United States Patent Application Publication US 2015/0141320 A1 - sequence listing, part 8

SEQ ID NO: 109210 - DNA, 15 bp, Homo sapiens
ccctcagtgagtgtc

SEQ ID NO: 109211 - DNA, 15 bp, Homo sapiens
accctcagtgagtgt

SEQ ID NO: 109212 - DNA, 15 bp, Homo sapiens
gaccctcagtgagtg

SEQ ID NO: 109213 - DNA, 15 bp, Homo sapiens
agaccctcagtgagt

SEQ ID NO: 109214 - DNA, 15 bp, Homo sapiens
tagaccctcagtgag

SEQ ID NO: 109215 - DNA, 15 bp, Homo sapiens
gtagaccctcagtga

SEQ ID NO: 109216 - DNA, 15 bp, Homo sapiens
ggtagaccctcagtg

SEQ ID NO: 109217 - DNA, 15 bp, Homo sapiens
gggtagaccctcagt

SEQ ID NO: 109218 - DNA, 15 bp, Homo sapiens
agggtagaccctcag

SEQ ID NO: 109219 - DNA, 15 bp, Homo sapiens
cagggtagaccctca

SEQ ID NO: 109220 - DNA, 15 bp, Homo sapiens
acagggtagaccctc

SEQ ID NO: 109221 - DNA, 15 bp, Homo sapiens
cacagggtagaccct

SEQ ID NO: 109222 - DNA, 15 bp, Homo sapiens
gcacagggtagaccc

SEQ ID NO: 109223 - DNA, 15 bp, Homo sapiens
tgcacagggtagacc

SEQ ID NO: 109224 - DNA, 15 bp, Homo sapiens
ctgcacagggtagac

SEQ ID NO: 109225 - DNA, 15 bp, Homo sapiens
tctgcacagggtaga

SEQ ID NO: 109226 - DNA, 15 bp, Homo sapiens
ctctgcacagggtag

SEQ ID NO: 109227 - DNA, 15 bp, Homo sapiens
tctctgcacagggta

SEQ ID NO: 109228 - DNA, 15 bp, Homo sapiens
ttctctgcacagggt

SEQ ID NO: 109229 - DNA, 15 bp, Homo sapiens
gttctctgcacaggg

SEQ ID NO: 109230 - DNA, 15 bp, Homo sapiens
ggttctctgcacagg

SEQ ID NO: 109231 - DNA, 15 bp, Homo sapiens
gggttctctgcacag

SEQ ID NO: 109232 - DNA, 15 bp, Homo sapiens
agggttctctgcaca

SEQ ID NO: 109233 - DNA, 15 bp, Homo sapiens
cagggttctctgcac

SEQ ID NO: 109234 - DNA, 15 bp, Homo sapiens
gcagggttctctgca

SEQ ID NO: 109235 - DNA, 15 bp, Homo sapiens
cgcagggttctctgc

SEQ ID NO: 109236 - DNA, 15 bp, Homo sapiens
tcgcagggttctctg

SEQ ID NO: 109237 - DNA, 15 bp, Homo sapiens
ctcgcagggttctct

SEQ ID NO: 109238 - DNA, 15 bp, Homo sapiens
tctcgcagggttctc

SEQ ID NO: 109239 - DNA, 15 bp, Homo sapiens
atctcgcagggttct

SEQ ID NO: 109240 - DNA, 15 bp, Homo sapiens
catctcgcagggttc

SEQ ID NO: 109241 - DNA, 15 bp, Homo sapiens
gcatctcgcagggtt

SEQ ID NO: 109242 - DNA, 15 bp, Homo sapiens
ggcatctcgcagggt

SEQ ID NO: 109243 - DNA, 15 bp, Homo sapiens
gggcatctcgcaggg

SEQ ID NO: 109244 - DNA, 15 bp, Homo sapiens
ggggcatctcgcagg

SEQ ID NO: 109245 - DNA, 15 bp, Homo sapiens
tggggcatctcgcag

SEQ ID NO: 109246 - DNA, 15 bp, Homo sapiens
atggggcatctcgca

SEQ ID NO: 109247 - DNA, 15 bp, Homo sapiens
gatggggcatctcgc

SEQ ID NO: 109248 - DNA, 15 bp, Homo sapiens
ggatggggcatctcg

SEQ ID NO: 109249 - DNA, 15 bp, Homo sapiens
cggatggggcatctc

SEQ ID NO: 109250 - DNA, 15 bp, Homo sapiens
tcggatggggcatct

SEQ ID NO: 109251 - DNA, 15 bp, Homo sapiens
ctcggatggggcatc

SEQ ID NO: 109252 - DNA, 15 bp, Homo sapiens
actcggatggggcat

SEQ ID NO: 109253 - DNA, 15 bp, Homo sapiens
aactcggatggggca

SEQ ID NO: 109254 - DNA, 15 bp, Homo sapiens
caactcggatggggc

SEQ ID NO: 109255 - DNA, 15 bp, Homo sapiens
acaactcggatgggg

SEQ ID NO: 109256 - DNA, 15 bp, Homo sapiens
gacaactcggatggg

SEQ ID NO: 109257 - DNA, 15 bp, Homo sapiens
tgacaactcggatgg

SEQ ID NO: 109258 - DNA, 15 bp, Homo sapiens
gtgacaactcggatg

SEQ ID NO: 109259 - DNA, 15 bp, Homo sapiens
cgtgacaactcggat

SEQ ID NO: 109260 - DNA, 15 bp, Homo sapiens
acgtgacaactcgga

SEQ ID NO: 109261 - DNA, 15 bp, Homo sapiens
gacgtgacaactcgg

SEQ ID NO: 109262 - DNA, 15 bp, Homo sapiens
cgacgtgacaactcg

SEQ ID NO: 109263 - DNA, 15 bp, Homo sapiens
acgacgtgacaactc

SEQ ID NO: 109264 - DNA, 15 bp, Homo sapiens
gacgacgtgacaact

SEQ ID NO: 109265 - DNA, 15 bp, Homo sapiens
ggacgacgtgacaac

SEQ ID NO: 109266 - DNA, 15 bp, Homo sapiens
aggacgacgtgacaa

SEQ ID NO: 109267 - DNA, 15 bp, Homo sapiens
gaggacgacgtgaca

SEQ ID NO: 109268 - DNA, 15 bp, Homo sapiens
tgaggacgacgtgac

SEQ ID NO: 109269 - DNA, 15 bp, Homo sapiens
gtgaggacgacgtga

SEQ ID NO: 109270 - DNA, 15 bp, Homo sapiens
cgtgaggacgacgtg

SEQ ID NO: 109271 - DNA, 15 bp, Homo sapiens
ccgtgaggacgacgt

SEQ ID NO: 109272 - DNA, 15 bp, Homo sapiens
accgtgaggacgacg

SEQ ID NO: 109273 - DNA, 15 bp, Homo sapiens
aaccgtgaggacgac

SEQ ID NO: 109274 - DNA, 15 bp, Homo sapiens
taaccgtgaggacga

SEQ ID NO: 109275 - DNA, 15 bp, Homo sapiens
gtaaccgtgaggacg

SEQ ID NO: 109276 - DNA, 15 bp, Homo sapiens
agtaaccgtgaggac

SEQ ID NO: 109277 - DNA, 15 bp, Homo sapiens
gagtaaccgtgagga

SEQ ID NO: 109278 - DNA, 15 bp, Homo sapiens
agagtaaccgtgagg

SEQ ID NO: 109279 - DNA, 15 bp, Homo sapiens
aagagtaaccgtgag

SEQ ID NO: 109280 - DNA, 15 bp, Homo sapiens
aaagagtaaccgtga

SEQ ID NO: 109281 - DNA, 15 bp, Homo sapiens
caaagagtaaccgtg

SEQ ID NO: 109282 - DNA, 15 bp, Homo sapiens
tcaaagagtaaccgt

SEQ ID NO: 109283 - DNA, 15 bp, Homo sapiens
ctcaaagagtaaccg

SEQ ID NO: 109284 - DNA, 15 bp, Homo sapiens
cctcaaagagtaacc

SEQ ID NO: 109285 - DNA, 15 bp, Homo sapiens
acctcaaagagtaac

SEQ ID NO: 109286 - DNA, 15 bp, Homo sapiens
cacctcaaagagtaa

SEQ ID NO: 109287 - DNA, 15 bp, Homo sapiens
ccacctcaaagagta

SEQ ID NO: 109288 - DNA, 15 bp, Homo sapiens
cccacctcaaagagt

SEQ ID NO: 109289 - DNA, 15 bp, Homo sapiens
tcccacctcaaagag

SEQ ID NO: 109290 - DNA, 15 bp, Homo sapiens
atcccacctcaaaga

SEQ ID NO: 109291 - DNA, 15 bp, Homo sapiens
gatcccacctcaaag

SEQ ID NO: 109292 - DNA, 15 bp, Homo sapiens
agatcccacctcaaa

SEQ ID NO: 109293 - DNA, 15 bp, Homo sapiens
aagatcccacctcaa

SEQ ID NO: 109294 - DNA, 15 bp, Homo sapiens
aaagatcccacctca

SEQ ID NO: 109295 - DNA, 15 bp, Homo sapiens
caaagatcccacctc

SEQ ID NO: 109296 - DNA, 15 bp, Homo sapiens
gcaaagatcccacct

SEQ ID NO: 109297 - DNA, 15 bp, Homo sapiens
ggcaaagatcccacc

SEQ ID NO: 109298 - DNA, 15 bp, Homo sapiens
aggcaaagatcccac

SEQ ID NO: 109299 - DNA, 15 bp, Homo sapiens
caggcaaagatccca

SEQ ID NO: 109300 - DNA, 15 bp, Homo sapiens
tcaggcaaagatccc

SEQ ID NO: 109301 - DNA, 15 bp, Homo sapiens
atcaggcaaagatcc

SEQ ID NO: 109302 - DNA, 15 bp, Homo sapiens
gatcaggcaaagatc

SEQ ID NO: 109303 - DNA, 15 bp, Homo sapiens
agatcaggcaaagat

SEQ ID NO: 109304 - DNA, 15 bp, Homo sapiens
aagatcaggcaaaga

SEQ ID NO: 109305 - DNA, 15 bp, Homo sapiens
aaagatcaggcaaag

SEQ ID NO: 109306 - DNA, 15 bp, Homo sapiens
caaagatcaggcaaa

SEQ ID NO: 109307 - DNA, 15 bp, Homo sapiens
gcaaagatcaggcaa

SEQ ID NO: 109308 - DNA, 15 bp, Homo sapiens
tgcaaagatcaggca

SEQ ID NO: 109309 - DNA, 15 bp, Homo sapiens
ttgcaaagatcaggc

SEQ ID NO: 109310 - DNA, 15 bp, Homo sapiens
tttgcaaagatcagg

SEQ ID NO: 109311 - DNA, 15 bp, Homo sapiens
ttttgcaaagatcag

SEQ ID NO: 109312 - DNA, 15 bp, Homo sapiens
attttgcaaagatca

SEQ ID NO: 109313 - DNA, 15 bp, Homo sapiens
gattttgcaaagatc

SEQ ID NO: 109314 - DNA, 15 bp, Homo sapiens
tgattttgcaaagat

SEQ ID NO: 109315 - DNA, 15 bp, Homo sapiens
ctgattttgcaaaga

SEQ ID NO: 109316 - DNA, 15 bp, Homo sapiens
cctgattttgcaaag

SEQ ID NO: 109317 - DNA, 15 bp, Homo sapiens
tcctgattttgcaaa

SEQ ID NO: 109318 - DNA, 15 bp, Homo sapiens
ctcctgattttgcaa

SEQ ID NO: 109319 - DNA, 15 bp, Homo sapiens
gctcctgattttgca

SEQ ID NO: 109320 - DNA, 15 bp, Homo sapiens
tgctcctgattttgc

SEQ ID NO: 109321 - DNA, 15 bp, Homo sapiens
atgctcctgattttg

SEQ ID NO: 109322 - DNA, 15 bp, Homo sapiens
aatgctcctgatttt

SEQ ID NO: 109323 - DNA, 15 bp, Homo sapiens
caatgctcctgattt

SEQ ID NO: 109324 - DNA, 15 bp, Homo sapiens
ccaatgctcctgatt

SEQ ID NO: 109325 - DNA, 15 bp, Homo sapiens
tccaatgctcctgat

SEQ ID NO: 109326 - DNA, 15 bp, Homo sapiens
atccaatgctcctga

SEQ ID NO: 109327 - DNA, 15 bp, Homo sapiens
gatccaatgctcctg

SEQ ID NO: 109328 - DNA, 15 bp, Homo sapiens
tgatccaatgctcct

SEQ ID NO: 109329 - DNA, 15 bp, Homo sapiens
ttgatccaatgctcc

SEQ ID NO: 109330 - DNA, 15 bp, Homo sapiens
tttgatccaatgctc

SEQ ID NO: 109331 - DNA, 15 bp, Homo sapiens
ctttgatccaatgct

SEQ ID NO: 109332 - DNA, 15 bp, Homo sapiens
gctttgatccaatgc

SEQ ID NO: 109333 - DNA, 15 bp, Homo sapiens
agctttgatccaatg

SEQ ID NO: 109334 - DNA, 15 bp, Homo sapiens
tagctttgatccaat

SEQ ID NO: 109335 - DNA, 15 bp, Homo sapiens
atagctttgatccaa

SEQ ID NO: 109336 - DNA, 15 bp, Homo sapiens
catagctttgatcca

SEQ ID NO: 109337 - DNA, 15 bp, Homo sapiens
acatagctttgatcc

SEQ ID NO: 109338 - DNA, 15 bp, Homo sapiens
cacatagctttgatc

SEQ ID NO: 109339 - DNA, 15 bp, Homo sapiens
tcacatagctttgat

SEQ ID NO: 109340 - DNA, 15 bp, Homo sapiens
ttcacatagctttga

SEQ ID NO: 109341 - DNA, 15 bp, Homo sapiens
cttcacatagctttg

SEQ ID NO: 109342 - DNA, 15 bp, Homo sapiens
tcttcacatagcttt

SEQ ID NO: 109343 - DNA, 15 bp, Homo sapiens
atcttcacatagctt

SEQ ID NO: 109344 - DNA, 15 bp, Homo sapiens
gatcttcacatagct

SEQ ID NO: 109345 - DNA, 15 bp, Homo sapiens
ggatcttcacatagc

SEQ ID NO: 109346 - DNA, 15 bp, Homo sapiens
aggatcttcacatag

SEQ ID NO: 109347 - DNA, 15 bp, Homo sapiens
caggatcttcacata

SEQ ID NO: 109348 - DNA, 15 bp, Homo sapiens
acaggatcttcacat

SEQ ID NO: 109349 - DNA, 15 bp, Homo sapiens
cacaggatcttcaca

SEQ ID NO: 109350 - DNA, 15 bp, Homo sapiens
tcacaggatcttcac

SEQ ID NO: 109351 - DNA, 15 bp, Homo sapiens
ctcacaggatcttca

SEQ ID NO: 109352 - DNA, 15 bp, Homo sapiens
cctcacaggatcttc

SEQ ID NO: 109353 - DNA, 15 bp, Homo sapiens
acctcacaggatctt

SEQ ID NO: 109354 - DNA, 15 bp, Homo sapiens
cacctcacaggatct

SEQ ID NO: 109355 - DNA, 15 bp, Homo sapiens
tcacctcacaggatc

SEQ ID NO: 109356 - DNA, 15 bp, Homo sapiens
ttcacctcacaggat

SEQ ID NO: 109357 - DNA, 15 bp, Homo sapiens
gttcacctcacagga

SEQ ID NO: 109358 - DNA, 15 bp, Homo sapiens
tgttcacctcacagg

SEQ ID NO: 109359 - DNA, 15 bp, Homo sapiens
ctgttcacctcacag

SEQ ID NO: 109360 - DNA, 15 bp, Homo sapiens
actgttcacctcaca

SEQ ID NO: 109361 - DNA, 15 bp, Homo sapiens
cactgttcacctcac

SEQ ID NO: 109362 - DNA, 15 bp, Homo sapiens
tcactgttcacctca

SEQ ID NO: 109363 - DNA, 15 bp, Homo sapiens
ttcactgttcacctc

SEQ ID NO: 109364 - DNA, 15 bp, Homo sapiens
tttcactgttcacct

SEQ ID NO: 109365 - DNA, 15 bp, Homo sapiens
atttcactgttcacc

SEQ ID NO: 109366 - DNA, 15 bp, Homo sapiens
gatttcactgttcac

SEQ ID NO: 109367 - DNA, 15 bp, Homo sapiens
agatttcactgttca

SEQ ID NO: 109368 - DNA, 15 bp, Homo sapiens
gagatttcactgttc

SEQ ID NO: 109369 - DNA, 15 bp, Homo sapiens
tgagatttcactgtt

SEQ ID NO: 109370 - DNA, 15 bp, Homo sapiens
gtgagatttcactgt

SEQ ID NO: 109371 - DNA, 15 bp, Homo sapiens
tgtgagatttcactg

SEQ ID NO: 109372 - DNA, 15 bp, Homo sapiens
ctgtgagatttcact

SEQ ID NO: 109373 - DNA, 15 bp, Homo sapiens
gctgtgagatttcac

SEQ ID NO: 109374 - DNA, 15 bp, Homo sapiens
cgctgtgagatttca

SEQ ID NO: 109375 - DNA, 15 bp, Homo sapiens
tcgctgtgagatttc

SEQ ID NO: 109376 - DNA, 15 bp, Homo sapiens
gtcgctgtgagattt

SEQ ID NO: 109377 - DNA, 15 bp, Homo sapiens
tgtcgctgtgagatt

SEQ ID NO: 109378 - DNA, 15 bp, Homo sapiens
atgtcgctgtgagat

SEQ ID NO: 109379 - DNA, 15 bp, Homo sapiens
aatgtcgctgtgaga

SEQ ID NO: 109380 - DNA, 15 bp, Homo sapiens
aaatgtcgctgtgag

SEQ ID NO: 109381 - DNA, 15 bp, Homo sapiens
caaatgtcgctgtga

SEQ ID NO: 109382 - DNA, 15 bp, Homo sapiens
acaaatgtcgctgtg

SEQ ID NO: 109383 - DNA, 15 bp, Homo sapiens
tacaaatgtcgctgt

SEQ ID NO: 109384 - DNA, 15 bp, Homo sapiens
atacaaatgtcgctg

SEQ ID NO: 109385 - DNA, 15 bp, Homo sapiens
aatacaaatgtcgct

SEQ ID NO: 109386 - DNA, 15 bp, Homo sapiens
gaatacaaatgtcgc

SEQ ID NO: 109387 - DNA, 15 bp, Homo sapiens
agaatacaaatgtcg

SEQ ID NO: 109388 - DNA, 15 bp, Homo sapiens
aagaatacaaatgtc

SEQ ID NO: 109389 - DNA, 15 bp, Homo sapiens
caagaatacaaatgt

SEQ ID NO: 109390 - DNA, 15 bp, Homo sapiens
ccaagaatacaaatg

SEQ ID NO: 109391 - DNA, 15 bp, Homo sapiens
cccaagaatacaaat

SEQ ID NO: 109392 - DNA, 15 bp, Homo sapiens
gcccaagaatacaaa

SEQ ID NO: 109393 - DNA, 15 bp, Homo sapiens
ggcccaagaatacaa

SEQ ID NO: 109394 - DNA, 15 bp, Homo sapiens
cggcccaagaataca

SEQ ID NO: 109395 - DNA, 15 bp, Homo sapiens
acggcccaagaatac

SEQ ID NO: 109396 - DNA, 15 bp, Homo sapiens
cacggcccaagaata

SEQ ID NO: 109397 - DNA, 15 bp, Homo sapiens
gcacggcccaagaat

SEQ ID NO: 109398 - DNA, 15 bp, Homo sapiens
ggcacggcccaagaa

SEQ ID NO: 109399 - DNA, 15 bp, Homo sapiens
gggcacggcccaaga

SEQ ID NO: 109400 - DNA, 15 bp, Homo sapiens
tgggcacggcccaag

SEQ ID NO: 109401 - DNA, 15 bp, Homo sapiens
ttgggcacggcccaa

SEQ ID NO: 109402 - DNA, 15 bp, Homo sapiens
cttgggcacggccca

SEQ ID NO: 109403 - DNA, 15 bp, Homo sapiens
tcttgggcacggccc

SEQ ID NO: 109404 - DNA, 15 bp, Homo sapiens
ctcttgggcacggcc

SEQ ID NO: 109405 - DNA, 15 bp, Homo sapiens
gctcttgggcacggc

SEQ ID NO: 109406 - DNA, 15 bp, Homo sapiens
tgctcttgggcacgg

SEQ ID NO: 109407 - DNA, 15 bp, Homo sapiens
gtgctcttgggcacg

SEQ ID NO: 109408 - DNA, 15 bp, Homo sapiens
cgtgctcttgggcac

SEQ ID NO: 109409 - DNA, 15 bp, Homo sapiens
acgtgctcttgggca

SEQ ID NO: 109410 - DNA, 15 bp, Homo sapiens
gacgtgctcttgggc

SEQ ID NO: 109411 - DNA, 15 bp, Homo sapiens
agacgtgctcttggg

SEQ ID NO: 109412 - DNA, 15 bp, Homo sapiens
gagacgtgctcttgg

SEQ ID NO: 109413 - DNA, 15 bp, Homo sapiens
cgagacgtgctcttg

SEQ ID NO: 109414 - DNA, 15 bp, Homo sapiens
ccgagacgtgctctt

SEQ ID NO: 109415 - DNA, 15 bp, Homo sapiens
gccgagacgtgctct

SEQ ID NO: 109416 - DNA, 15 bp, Homo sapiens
agccgagacgtgctc

SEQ ID NO: 109417 - DNA, 15 bp, Homo sapiens
tagccgagacgtgct

SEQ ID NO: 109418 - DNA, 15 bp, Homo sapiens
ctagccgagacgtgc

SEQ ID NO: 109419 - DNA, 15 bp, Homo sapiens
tctagccgagacgtg

SEQ ID NO: 109420 - DNA, 15 bp, Homo sapiens
ctctagccgagacgt

SEQ ID NO: 109421 - DNA, 15 bp, Homo sapiens
tctctagccgagacg

SEQ ID NO: 109422 - DNA, 15 bp, Homo sapiens
ctctctagccgagac

SEQ ID NO: 109423 - DNA, 15 bp, Homo sapiens
cctctctagccgaga

SEQ ID NO: 109424 - DNA, 15 bp, Homo sapiens
ccctctctagccgag

SEQ ID NO: 109425 - DNA, 15 bp, Homo sapiens
cccctctctagccga

SEQ ID NO: 109426 - DNA, 15 bp, Homo sapiens
gcccctctctagccg

SEQ ID NO: 109427 - DNA, 15 bp, Homo sapiens
tgcccctctctagcc

SEQ ID NO: 109428 - DNA, 15 bp, Homo sapiens
gtgcccctctctagc

SEQ ID NO: 109429 - DNA, 15 bp, Homo sapiens
tgtgcccctctctag

SEQ ID NO: 109430 - DNA, 15 bp, Homo sapiens
ctgtgcccctctcta

SEQ ID NO: 109431 - DNA, 15 bp, Homo sapiens
gctgtgcccctctct

SEQ ID NO: 109432 - DNA, 15 bp, Homo sapiens
ggctgtgcccctctc

SEQ ID NO: 109433 - DNA, 15 bp, Homo sapiens
aggctgtgcccctct

SEQ ID NO: 109434 - DNA, 15 bp, Homo sapiens
gaggctgtgcccctc

SEQ ID NO: 109435 - DNA, 15 bp, Homo sapiens
ggaggctgtgcccct

SEQ ID NO: 109436 - DNA, 15 bp, Homo sapiens
gggaggctgtgcccc

SEQ ID NO: 109437 - DNA, 15 bp, Homo sapiens
tgggaggctgtgccc

SEQ ID NO: 109438 - DNA, 15 bp, Homo sapiens
ctgggaggctgtgcc

SEQ ID NO: 109439 - DNA, 15 bp, Homo sapiens
tctgggaggctgtgc

SEQ ID NO: 109440 - DNA, 15 bp, Homo sapiens
ctctgggaggctgtg

SEQ ID NO: 109441 - DNA, 15 bp, Homo sapiens
gctctgggaggctgt

SEQ ID NO: 109442 - DNA, 15 bp, Homo sapiens
ggctctgggaggctg

SEQ ID NO: 109443 - DNA, 15 bp, Homo sapiens
tggctctgggaggct

SEQ ID NO: 109444 - DNA, 15 bp, Homo sapiens
ctggctctgggaggc

SEQ ID NO: 109445 - DNA, 15 bp, Homo sapiens
cctggctctgggagg

SEQ ID NO: 109446 - DNA, 15 bp, Homo sapiens
acctggctctgggag

SEQ ID NO: 109447 - DNA, 15 bp, Homo sapiens
gacctggctctggga

SEQ ID NO: 109448 - DNA, 15 bp, Homo sapiens
agacctggctctggg

SEQ ID NO: 109449 - DNA, 15 bp, Homo sapiens
cagacctggctctgg

SEQ ID NO: 109450 - DNA, 15 bp, Homo sapiens
tcagacctggctctg

SEQ ID NO: 109451 - DNA, 15 bp, Homo sapiens
ctcagacctggctct

SEQ ID NO: 109452 - DNA, 15 bp, Homo sapiens
gctcagacctggctc

SEQ ID NO: 109453 - DNA, 15 bp, Homo sapiens
tgctcagacctggct

SEQ ID NO: 109454 - DNA, 15 bp, Homo sapiens
ctgctcagacctggc

SEQ ID NO: 109455 - DNA, 15 bp, Homo sapiens
gctgctcagacctgg

SEQ ID NO: 109456 - DNA, 15 bp, Homo sapiens
agctgctcagacctg

SEQ ID NO: 109457 - DNA, 15 bp, Homo sapiens
aagctgctcagacct

SEQ ID NO: 109458 - DNA, 15 bp, Homo sapiens
aaagctgctcagacc

SEQ ID NO: 109459 - DNA, 15 bp, Homo sapiens
caaagctgctcagac

SEQ ID NO: 109460 - DNA, 15 bp, Homo sapiens
gcaaagctgctcaga

SEQ ID NO: 109461 - DNA, 15 bp, Homo sapiens
ggcaaagctgctcag

SEQ ID NO: 109462 - DNA, 15 bp, Homo sapiens
aggcaaagctgctca

SEQ ID NO: 109463 - DNA, 15 bp, Homo sapiens
caggcaaagctgctc

SEQ ID NO: 109464 - DNA, 15 bp, Homo sapiens
ccaggcaaagctgct

SEQ ID NO: 109465 - DNA, 15 bp, Homo sapiens
cccaggcaaagctgc

SEQ ID NO: 109466 - DNA, 15 bp, Homo sapiens
tcccaggcaaagctg

SEQ ID NO: 109467 - DNA, 15 bp, Homo sapiens
ctcccaggcaaagct

SEQ ID NO: 109468 - DNA, 15 bp, Homo sapiens
cctcccaggcaaagc

SEQ ID NO: 109469 - DNA, 15 bp, Homo sapiens
ccctcccaggcaaag

SEQ ID NO: 109470 - DNA, 15 bp, Homo sapiens
tccctcccaggcaaa

SEQ ID NO: 109471 - DNA, 15 bp, Homo sapiens
atccctcccaggcaa

SEQ ID NO: 109472 - DNA, 15 bp, Homo sapiens
gatccctcccaggca

SEQ ID NO: 109473 - DNA, 15 bp, Homo sapiens
agatccctcccaggc

SEQ ID NO: 109474 - DNA, 15 bp, Homo sapiens
cagatccctcccagg

SEQ ID NO: 109475 - DNA, 15 bp, Homo sapiens
gcagatccctcccag

SEQ ID NO: 109476 - DNA, 15 bp, Homo sapiens
tgcagatccctccca

SEQ ID NO: 109477 - DNA, 15 bp, Homo sapiens
ttgcagatccctccc

SEQ ID NO: 109478 - DNA, 15 bp, Homo sapiens
tttgcagatccctcc

SEQ ID NO: 109479 - DNA, 15 bp, Homo sapiens
ctttgcagatccctc

SEQ ID NO: 109480 - DNA, 15 bp, Homo sapiens
tctttgcagatccct

SEQ ID NO: 109481 - DNA, 15 bp, Homo sapiens
gtctttgcagatccc

SEQ ID NO: 109482 - DNA, 15 bp, Homo sapiens
ggtctttgcagatcc

SEQ ID NO: 109483 - DNA, 15 bp, Homo sapiens
gggtctttgcagatc

SEQ ID NO: 109484 - DNA, 15 bp, Homo sapiens
ggggtctttgcagat

SEQ ID NO: 109485 - DNA, 15 bp, Homo sapiens
tggggtctttgcaga

SEQ ID NO: 109486 - DNA, 15 bp, Homo sapiens
ctggggtctttgcag

SEQ ID NO: 109487 - DNA, 15 bp, Homo sapiens
cctggggtctttgca

SEQ ID NO: 109488 - DNA, 15 bp, Homo sapiens
tcctggggtctttgc

SEQ ID NO: 109489 - DNA, 15 bp, Homo sapiens
atcctggggtctttg

SEQ ID NO: 109490 - DNA, 15 bp, Homo sapiens
aatcctggggtcttt

SEQ ID NO: 109491 - DNA, 15 bp, Homo sapiens
aaatcctggggtctt

SEQ ID NO: 109492 - DNA, 15 bp, Homo sapiens
gaaatcctggggtct

SEQ ID NO: 109493 - DNA, 15 bp, Homo sapiens
tgaaatcctggggtc

SEQ ID NO: 109494 - DNA, 15 bp, Homo sapiens
ctgaaatcctggggt

SEQ ID NO: 109495 - DNA, 15 bp, Homo sapiens
tctgaaatcctgggg

SEQ ID NO: 109496 - DNA, 15 bp, Homo sapiens
ttctgaaatcctggg

SEQ ID NO: 109497 - DNA, 15 bp, Homo sapiens
tttctgaaatcctgg

SEQ ID NO: 109498 - DNA, 15 bp, Homo sapiens
ctttctgaaatcctg

SEQ ID NO: 109499 - DNA, 15 bp, Homo sapiens
tctttctgaaatcct

SEQ ID NO: 109500 - DNA, 15 bp, Homo sapiens
ttctttctgaaatcc

SEQ ID NO: 109501 - DNA, 15 bp, Homo sapiens
tttctttctgaaatc

SEQ ID NO: 109502 - DNA, 15 bp, Homo sapiens
atttctttctgaaat

SEQ ID NO: 109503 - DNA, 15 bp, Homo sapiens
aatttctttctgaaa

SEQ ID NO: 109504 - DNA, 15 bp, Homo sapiens
caatttctttctgaa

SEQ ID NO: 109505 - DNA, 15 bp, Homo sapiens
acaatttctttctga

SEQ ID NO: 109506 - DNA, 15 bp, Homo sapiens
cacaatttctttctg

SEQ ID NO: 109507 - DNA, 15 bp, Homo sapiens
gcacaatttctttct

SEQ ID NO: 109508 - DNA, 15 bp, Homo sapiens
tgcacaatttctttc

SEQ ID NO: 109509 - DNA, 15 bp, Homo sapiens
ttgcacaatttcttt

SEQ ID NO: 109510 - DNA, 15 bp, Homo sapiens
attgcacaatttctt

SEQ ID NO: 109511 - DNA, 15 bp, Homo sapiens
cattgcacaatttct

SEQ ID NO: 109512 - DNA, 15 bp, Homo sapiens
gcattgcacaatttc

SEQ ID NO: 109513 - DNA, 15 bp, Homo sapiens
ggcattgcacaattt

SEQ ID NO: 109514 - DNA, 15 bp, Homo sapiens
tggcattgcacaatt

SEQ ID NO: 109515 - DNA, 15 bp, Homo sapiens
ctggcattgcacaat

SEQ ID NO: 109516 - DNA, 15 bp, Homo sapiens
tctggcattgcacaa

SEQ ID NO: 109517 - DNA, 15 bp, Homo sapiens
ctctggcattgcaca

SEQ ID NO: 109518 - DNA, 15 bp, Homo sapiens
cctctggcattgcac

SEQ ID NO: 109519 - DNA, 15 bp, Homo sapiens
acctctggcattgca

SEQ ID NO: 109520 - DNA, 15 bp, Homo sapiens
aacctctggcattgc

SEQ ID NO: 109521 - DNA, 15 bp, Homo sapiens
gaacctctggcattg

SEQ ID NO: 109522 - DNA, 15 bp, Homo sapiens
ggaacctctggcatt

SEQ ID NO: 109523 - DNA, 15 bp, Homo sapiens
aggaacctctggcat

SEQ ID NO: 109524 - DNA, 15 bp, Homo sapiens
aaggaacctctggca

SEQ ID NO: 109525 - DNA, 15 bp, Homo sapiens
caaggaacctctggc

SEQ ID NO: 109526 - DNA, 15 bp, Homo sapiens
ccaaggaacctctgg

SEQ ID NO: 109527 - DNA, 15 bp, Homo sapiens
gccaaggaacctctg

SEQ ID NO: 109528 - DNA, 15 bp, Homo sapiens
tgccaaggaacctct

SEQ ID NO: 109529 - DNA, 15 bp, Homo sapiens
atgccaaggaacctc

SEQ ID NO: 109530 - DNA, 15 bp, Homo sapiens
catgccaaggaacct

SEQ ID NO: 109531 - DNA, 15 bp, Homo sapiens
gcatgccaaggaacc

SEQ ID NO: 109532 - DNA, 15 bp, Homo sapiens
ggcatgccaaggaac

SEQ ID NO: 109533 - DNA, 15 bp, Homo sapiens
gggcatgccaaggaa

SEQ ID NO: 109534 - DNA, 15 bp, Homo sapiens
cgggcatgccaagga

SEQ ID NO: 109535 - DNA, 15 bp, Homo sapiens
ccgggcatgccaagg

SEQ ID NO: 109536 - DNA, 15 bp, Homo sapiens
cccgggcatgccaag

SEQ ID NO: 109537 - DNA, 15 bp, Homo sapiens
tcccgggcatgccaa

SEQ ID NO: 109538 - DNA, 15 bp, Homo sapiens
ctcccgggcatgcca

SEQ ID NO: 109539 - DNA, 15 bp, Homo sapiens
cctcccgggcatgcc

SEQ ID NO: 109540 - DNA, 15 bp, Homo sapiens
ccctcccgggcatgc

SEQ ID NO: 109541 - DNA, 15 bp, Homo sapiens
gccctcccgggcatg

SEQ ID NO: 109542 - DNA, 15 bp, Homo sapiens
cgccctcccgggcat

SEQ ID NO: 109543 - DNA, 15 bp, Homo sapiens
tcgccctcccgggca

SEQ ID NO: 109544 - DNA, 15 bp, Homo sapiens
ctcgccctcccgggc

SEQ ID NO: 109545 - DNA, 15 bp, Homo sapiens
actcgccctcccggg

SEQ ID NO: 109546 - DNA, 15 bp, Homo sapiens
gactcgccctcccgg

SEQ ID NO: 109547 - DNA, 15 bp, Homo sapiens
tgactcgccctcccg

SEQ ID NO: 109548 - DNA, 15 bp, Homo sapiens
atgactcgccctccc

SEQ ID NO: 109549 - DNA, 15 bp, Homo sapiens
gatgactcgccctcc

SEQ ID NO: 109550 - DNA, 15 bp, Homo sapiens
tgatgactcgccctc

SEQ ID NO: 109551 - DNA, 15 bp, Homo sapiens
ctgatgactcgccct

SEQ ID NO: 109552 - DNA, 15 bp, Homo sapiens
tctgatgactcgccc

SEQ ID NO: 109553 - DNA, 15 bp, Homo sapiens
ctctgatgactcgcc

SEQ ID NO: 109554 - DNA, 15 bp, Homo sapiens
tctctgatgactcgc

SEQ ID NO: 109555 - DNA, 15 bp, Homo sapiens
ttctctgatgactcg

SEQ ID NO: 109556 - DNA, 15 bp, Homo sapiens
tttctctgatgactc

SEQ ID NO: 109557 - DNA, 15 bp, Homo sapiens
gtttctctgatgact

SEQ ID NO: 109558 - DNA, 15 bp, Homo sapiens
tgtttctctgatgac

SEQ ID NO: 109559 - DNA, 15 bp, Homo sapiens
ttgtttctctgatga

SEQ ID NO: 109560 - DNA, 15 bp, Homo sapiens
attgtttctctgatg

SEQ ID NO: 109561 - DNA, 15 bp, Homo sapiens
cattgtttctctgat

SEQ ID NO: 109562 - DNA, 15 bp, Homo sapiens
tcattgtttctctga

SEQ ID NO: 109563 - DNA, 15 bp, Homo sapiens
gtcattgtttctctg

SEQ ID NO: 109564 - DNA, 15 bp, Homo sapiens
tgtcattgtttctct

SEQ ID NO: 109565 - DNA, 15 bp, Homo sapiens
ctgtcattgtttctc

SEQ ID NO: 109566 - DNA, 15 bp, Homo sapiens
gctgtcattgtttct

SEQ ID NO: 109567 - DNA, 15 bp, Homo sapiens
tgctgtcattgtttc

SEQ ID NO: 109568 - DNA, 15 bp, Homo sapiens
ttgctgtcattgttt

SEQ ID NO: 109569 - DNA, 15 bp, Homo sapiens
attgctgtcattgtt

SEQ ID NO: 109570 - DNA, 15 bp, Homo sapiens
cattgctgtcattgt

SEQ ID NO: 109571 - DNA, 15 bp, Homo sapiens
acattgctgtcattg

SEQ ID NO: 109572 - DNA, 15 bp, Homo sapiens
cacattgctgtcatt

SEQ ID NO: 109573 - DNA, 15 bp, Homo sapiens
tcacattgctgtcat

SEQ ID NO: 109574 - DNA, 15 bp, Homo sapiens
gtcacattgctgtca

SEQ ID NO: 109575 - DNA, 15 bp, Homo sapiens
agtcacattgctgtc

SEQ ID NO: 109576 - DNA, 15 bp, Homo sapiens
aagtcacattgctgt

SEQ ID NO: 109577 - DNA, 15 bp, Homo sapiens
gaagtcacattgctg

SEQ ID NO: 109578 - DNA, 15 bp, Homo sapiens
ggaagtcacattgct

SEQ ID NO: 109579 - DNA, 15 bp, Homo sapiens
tggaagtcacattgc

SEQ ID NO: 109580 - DNA, 15 bp, Homo sapiens
gtggaagtcacattg

SEQ ID NO: 109581 - DNA, 15 bp, Homo sapiens
tgtggaagtcacatt

SEQ ID NO: 109582 - DNA, 15 bp, Homo sapiens
gtgtggaagtcacat

SEQ ID NO: 109583 - DNA, 15 bp, Homo sapiens
ggtgtggaagtcaca

SEQ ID NO: 109584 - DNA, 15 bp, Homo sapiens
aggtgtggaagtcac

SEQ ID NO: 109585 - DNA, 15 bp, Homo sapiens
gaggtgtggaagtca

SEQ ID NO: 109586 - DNA, 15 bp, Homo sapiens
ggaggtgtggaagtc

SEQ ID NO: 109587 - DNA, 15 bp, Homo sapiens
aggaggtgtggaagt

SEQ ID NO: 109588 - DNA, 15 bp, Homo sapiens
caggaggtgtggaag

SEQ ID NO: 109589 - DNA, 15 bp, Homo sapiens
acaggaggtgtggaa

SEQ ID NO: 109590 - DNA, 15 bp, Homo sapiens
gacaggaggtgtgga

SEQ ID NO: 109591 - DNA, 15 bp, Homo sapiens
ggacaggaggtgtgg

SEQ ID NO: 109592 - DNA, 15 bp, Homo sapiens
gggacaggaggtgtg

SEQ ID NO: 109593 - DNA, 15 bp, Homo sapiens
ggggacaggaggtgt

SEQ ID NO: 109594 - DNA, 15 bp, Homo sapiens
gggggacaggaggtg

SEQ ID NO: 109595 - DNA, 15 bp, Homo sapiens
ggggggacaggaggt

SEQ ID NO: 109596 - DNA, 15 bp, Homo sapiens
cggggggacaggagg

SEQ ID NO: 109597 - DNA, 15 bp, Homo sapiens
gcggggggacaggag

SEQ ID NO: 109598 - DNA, 15 bp, Homo sapiens
ggcggggggacagga

SEQ ID NO: 109599 - DNA, 15 bp, Homo sapiens
gggcggggggacagg

SEQ ID NO: 109600 - DNA, 15 bp, Homo sapiens
tgggcggggggacag

SEQ ID NO: 109601 - DNA, 15 bp, Homo sapiens
ctgggcggggggaca

SEQ ID NO: 109602 - DNA, 15 bp, Homo sapiens
cctgggcggggggac

SEQ ID NO: 109603 - DNA, 15 bp, Homo sapiens
acctgggcgggggga

SEQ ID NO: 109604 - DNA, 15 bp, Homo sapiens
gacctgggcgggggg

SEQ ID NO: 109605 - DNA, 15 bp, Homo sapiens
ggacctgggcggggg

SEQ ID NO: 109606 - DNA, 15 bp, Homo sapiens
aggacctgggcgggg

SEQ ID NO: 109607 - DNA, 15 bp, Homo sapiens
caggacctgggcggg

SEQ ID NO: 109608 - DNA, 15 bp, Homo sapiens
acaggacctgggcgg

SEQ ID NO: 109609 - DNA, 15 bp, Homo sapiens
aacaggacctgggcg

SEQ ID NO: 109610 - DNA, 15 bp, Homo sapiens
caacaggacctgggc

SEQ ID NO: 109611 - DNA, 15 bp, Homo sapiens
acaacaggacctggg

SEQ ID NO: 109612 - DNA, 15 bp, Homo sapiens
aacaacaggacctgg

SEQ ID NO: 109613 - DNA, 15 bp, Homo sapiens
caacaacaggacctg

SEQ ID NO: 109614 - DNA, 15 bp, Homo sapiens
ccaacaacaggacct

SEQ ID NO: 109615 - DNA, 15 bp, Homo sapiens
accaacaacaggacc

SEQ ID NO: 109616 - DNA, 15 bp, Homo sapiens
caccaacaacaggac

SEQ ID NO: 109617 - DNA, 15 bp, Homo sapiens
tcaccaacaacagga

SEQ ID NO: 109618 - DNA, 15 bp, Homo sapiens
ttcaccaacaacagg

SEQ ID NO: 109619 - DNA, 15 bp, Homo sapiens
attcaccaacaacag

SEQ ID NO: 109620 - DNA, 15 bp, Homo sapiens
cattcaccaacaaca

SEQ ID NO: 109621 - DNA, 15 bp, Homo sapiens
ccattcaccaacaac

SEQ ID NO: 109622 - DNA, 15 bp, Homo sapiens
tccattcaccaacaa

SEQ ID NO: 109623 - DNA, 15 bp, Homo sapiens
ctccattcaccaaca

SEQ ID NO: 109624 - DNA, 15 bp, Homo sapiens
gctccattcaccaac

SEQ ID NO: 109625 - DNA, 15 bp, Homo sapiens
agctccattcaccaa

SEQ ID NO: 109626 - DNA, 15 bp, Homo sapiens
gagctccattcacca

SEQ ID NO: 109627 - DNA, 15 bp, Homo sapiens
tgagctccattcacc

SEQ ID NO: 109628 - DNA, 15 bp, Homo sapiens
ctgagctccattcac

SEQ ID NO: 109629 - DNA, 15 bp, Homo sapiens
actgagctccattca

SEQ ID NO: 109630 - DNA, 15 bp, Homo sapiens
aactgagctccattc

SEQ ID NO: 109631 - DNA, 15 bp, Homo sapiens
caactgagctccatt

SEQ ID NO: 109632 - DNA, 15 bp, Homo sapiens
acaactgagctccat

SEQ ID NO: 109633 - DNA, 15 bp, Homo sapiens
cacaactgagctcca

SEQ ID NO: 109634 - DNA, 15 bp, Homo sapiens
acacaactgagctcc

SEQ ID NO: 109635 - DNA, 15 bp, Homo sapiens
cacacaactgagctc

SEQ ID NO: 109636 - DNA, 15 bp, Homo sapiens
ccacacaactgagct

SEQ ID NO: 109637 - DNA, 15 bp, Homo sapiens
cccacacaactgagc

SEQ ID NO: 109638 - DNA, 15 bp, Homo sapiens
ccccacacaactgag

SEQ ID NO: 109639 - DNA, 15 bp, Homo sapiens
cccccacacaactga

SEQ ID NO: 109640 - DNA, 15 bp, Homo sapiens
ccccccacacaactg

SEQ ID NO: 109641 - DNA, 15 bp, Homo sapiens
tccccccacacaact

SEQ ID NO: 109642 - DNA, 15 bp, Homo sapiens
gtccccccacacaac

SEQ ID NO: 109643 - DNA, 15 bp, Homo sapiens
ggtccccccacacaa

SEQ ID NO: 109644 - DNA, 15 bp, Homo sapiens
gggtccccccacaca

SEQ ID NO: 109645 - DNA, 15 bp, Homo sapiens
agggtccccccacac

SEQ ID NO: 109646 - DNA, 15 bp, Homo sapiens
cagggtccccccaca

SEQ ID NO: 109647 - DNA, 15 bp, Homo sapiens
tcagggtccccccac

SEQ ID NO: 109648 - DNA, 15 bp, Homo sapiens
atcagggtcccccca

SEQ ID NO: 109649 - DNA, 15 bp, Homo sapiens
gatcagggtcccccc

SEQ ID NO: 109650 - DNA, 15 bp, Homo sapiens
tgatcagggtccccc

SEQ ID NO: 109651 - DNA, 15 bp, Homo sapiens
ttgatcagggtcccc

SEQ ID NO: 109652 - DNA, 15 bp, Homo sapiens
gttgatcagggtccc

SEQ ID NO: 109653 - DNA, 15 bp, Homo sapiens
tgttgatcagggtcc

SEQ ID NO: 109654 - DNA, 15 bp, Homo sapiens
gtgttgatcagggtc

SEQ ID NO: 109655 - DNA, 15 bp, Homo sapiens
ggtgttgatcagggt

SEQ ID NO: 109656 - DNA, 15 bp, Homo sapiens
tggtgttgatcaggg

SEQ ID NO: 109657 - DNA, 15 bp, Homo sapiens
atggtgttgatcagg

SEQ ID NO: 109658 - DNA, 15 bp, Homo sapiens
gatggtgttgatcag

SEQ ID NO: 109659 - DNA, 15 bp, Homo sapiens
agatggtgttgatca

SEQ ID NO: 109660 - DNA, 15 bp, Homo sapiens
cagatggtgttgatc

SEQ ID NO: 109661 - DNA, 15 bp, Homo sapiens
ccagatggtgttgat

SEQ ID NO: 109662 - DNA, 15 bp, Homo sapiens
cccagatggtgttga

SEQ ID NO: 109663 - DNA, 15 bp, Homo sapiens
acccagatggtgttg

SEQ ID NO: 109664 - DNA, 15 bp, Homo sapiens
cacccagatggtgtt

SEQ ID NO: 109665 - DNA, 15 bp, Homo sapiens
ccacccagatggtgt

SEQ ID NO: 109666 - DNA, 15 bp, Homo sapiens
accacccagatggtg

SEQ ID NO: 109667 - DNA, 15 bp, Homo sapiens
gaccacccagatggt

SEQ ID NO: 109668 - DNA, 15 bp, Homo sapiens
agaccacccagatgg

SEQ ID NO: 109669 - DNA, 15 bp, Homo sapiens
gagaccacccagatg

SEQ ID NO: 109670 - DNA, 15 bp, Homo sapiens
ggagaccacccagat

SEQ ID NO: 109671 - DNA, 15 bp, Homo sapiens
cggagaccacccaga

SEQ ID NO: 109672 - DNA, 15 bp, Homo sapiens
gcggagaccacccag

SEQ ID NO: 109673 - DNA, 15 bp, Homo sapiens
cgcggagaccaccca

SEQ ID NO: 109674 - DNA, 15 bp, Homo sapiens
ccgcggagaccaccc

SEQ ID NO: 109675 - DNA, 15 bp, Homo sapiens
gccgcggagaccacc

SEQ ID NO: 109676 - DNA, 15 bp, Homo sapiens
ggccgcggagaccac

SEQ ID NO: 109677 - DNA, 15 bp, Homo sapiens
gggccgcggagacca

SEQ ID NO: 109678 - DNA, 15 bp, Homo sapiens
tgggccgcggagacc

SEQ ID NO: 109679 - DNA, 15 bp, Homo sapiens
gtgggccgcggagac

SEQ ID NO: 109680 - DNA, 15 bp, Homo sapiens
agtgggccgcggaga

SEQ ID NO: 109681 - DNA, 15 bp, Homo sapiens
cagtgggccgcggag

SEQ ID NO: 109682 - DNA, 15 bp, Homo sapiens
acagtgggccgcgga

SEQ ID NO: 109683 - DNA, 15 bp, Homo sapiens
aacagtgggccgcgg

SEQ ID NO: 109684 - DNA, 15 bp, Homo sapiens
aaacagtgggccgcg

SEQ ID NO: 109685 - DNA, 15 bp, Homo sapiens
gaaacagtgggccgc

SEQ ID NO: 109686 - DNA, 15 bp, Homo sapiens
cgaaacagtgggccg

SEQ ID NO: 109687 - DNA, 15 bp, Homo sapiens
tcgaaacagtgggcc

SEQ ID NO: 109688 - DNA, 15 bp, Homo sapiens
gtcgaaacagtgggc

SEQ ID NO: 109689 - DNA, 15 bp, Homo sapiens
tgtcgaaacagtggg

SEQ ID NO: 109690 - DNA, 15 bp, Homo sapiens
ttgtcgaaacagtgg

SEQ ID NO: 109691 - DNA, 15 bp, Homo sapiens
tttgtcgaaacagtg

SEQ ID NO: 109692 - DNA, 15 bp, Homo sapiens
ttttgtcgaaacagt

SEQ ID NO: 109693 - DNA, 15 bp, Homo sapiens
attttgtcgaaacag

SEQ ID NO: 109694 - DNA, 15 bp, Homo sapiens
gattttgtcgaaaca

SEQ ID NO: 109695 - DNA, 15 bp, Homo sapiens
tgattttgtcgaaac

SEQ ID NO: 109696 - DNA, 15 bp, Homo sapiens
ttgattttgtcgaaa

SEQ ID NO: 109697 - DNA, 15 bp, Homo sapiens
cttgattttgtcgaa

SEQ ID NO: 109698 - DNA, 15 bp, Homo sapiens
tcttgattttgtcga

SEQ ID NO: 109699 - DNA, 15 bp, Homo sapiens
ttcttgattttgtcg

SEQ ID NO: 109700 - DNA, 15 bp, Homo sapiens
gttcttgattttgtc

SEQ ID NO: 109701 - DNA, 15 bp, Homo sapiens
agttcttgattttgt

SEQ ID NO: 109702 - DNA, 15 bp, Homo sapiens
cagttcttgattttg

SEQ ID NO: 109703 - DNA, 15 bp, Homo sapiens
ccagttcttgatttt

SEQ ID NO: 109704 - DNA, 15 bp, Homo sapiens
tccagttcttgattt

SEQ ID NO: 109705 - DNA, 15 bp, Homo sapiens
ctccagttcttgatt

SEQ ID NO: 109706 - DNA, 15 bp, Homo sapiens
cctccagttcttgat

SEQ ID NO: 109707 - DNA, 15 bp, Homo sapiens
tcctccagttcttga

SEQ ID NO: 109708 - DNA, 15 bp, Homo sapiens
ttcctccagttcttg

SEQ ID NO: 109709 - DNA, 15 bp, Homo sapiens
gttcctccagttctt

SEQ ID NO: 109710 - DNA, 15 bp, Homo sapiens
ggttcctccagttct

SEQ ID NO: 109711 - DNA, 15 bp, Homo sapiens
aggttcctccagttc

SEQ ID NO: 109712 - DNA, 15 bp, Homo sapiens
caggttcctccagtt

SEQ ID NO: 109713 - DNA, 15 bp, Homo sapiens
tcaggttcctccagt

SEQ ID NO: 109714 - DNA, 15 bp, Homo sapiens
atcaggttcctccag

SEQ ID NO: 109715 - DNA, 15 bp, Homo sapiens
gatcaggttcctcca

SEQ ID NO: 109716 - DNA, 15 bp, Homo sapiens
cgatcaggttcctcc

SEQ ID NO: 109717 - DNA, 15 bp, Homo sapiens
gcgatcaggttcctc

SEQ ID NO: 109718 - DNA, 15 bp, Homo sapiens
cgcgatcaggttcct

SEQ ID NO: 109719 - DNA, 15 bp, Homo sapiens
ccgcgatcaggttcc

SEQ ID NO: 109720 - DNA, 15 bp, Homo sapiens
accgcgatcaggttc

SEQ ID NO: 109721 - DNA, 15 bp, Homo sapiens
caccgcgatcaggtt

SEQ ID NO: 109722 - DNA, 15 bp, Homo sapiens
gcaccgcgatcaggt

SEQ ID NO: 109723 - DNA, 15 bp, Homo sapiens
agcaccgcgatcagg

SEQ ID NO: 109724 - DNA, 15 bp, Homo sapiens
cagcaccgcgatcag

SEQ ID NO: 109725 - DNA, 15 bp, Homo sapiens
ccagcaccgcgatca

SEQ ID NO: 109726 - DNA, 15 bp, Homo sapiens
cccagcaccgcgatc

SEQ ID NO: 109727 - DNA, 15 bp, Homo sapiens
acccagcaccgcgat

SEQ ID NO: 109728 - DNA, 15 bp, Homo sapiens
cacccagcaccgcga

SEQ ID NO: 109729 - DNA, 15 bp, Homo sapiens
ccacccagcaccgcg

SEQ ID NO: 109730 - DNA, 15 bp, Homo sapiens
cccacccagcaccgc

SEQ ID NO: 109731 - DNA, 15 bp, Homo sapiens
acccacccagcaccg

SEQ ID NO: 109732 - DNA, 15 bp, Homo sapiens
tacccacccagcacc

SEQ ID NO: 109733 - DNA, 15 bp, Homo sapiens
gtacccacccagcac

SEQ ID NO: 109734 - DNA, 15 bp, Homo sapiens
ggtacccacccagca

SEQ ID NO: 109735 - DNA, 15 bp, Homo sapiens
tggtacccacccagc

SEQ ID NO: 109736 - DNA, 15 bp, Homo sapiens
gtggtacccacccag

SEQ ID NO: 109737 - DNA, 15 bp, Homo sapiens
agtggtacccaccca

SEQ ID NO: 109738 - DNA, 15 bp, Homo sapiens
gagtggtacccaccc

SEQ ID NO: 109739 - DNA, 15 bp, Homo sapiens
agagtggtacccacc

SEQ ID NO: 109740 - DNA, 15 bp, Homo sapiens
gagagtggtacccac

SEQ ID NO: 109741 - DNA, 15 bp, Homo sapiens
ggagagtggtaccca

SEQ ID NO: 109742 - DNA, 15 bp, Homo sapiens
gggagagtggtaccc

SEQ ID NO: 109743 - DNA, 15 bp, Homo sapiens
ggggagagtggtacc

SEQ ID NO: 109744 - DNA, 15 bp, Homo sapiens
aggggagagtggtac

SEQ ID NO: 109745 - DNA, 15 bp, Homo sapiens
caggggagagtggta

SEQ ID NO: 109746 - DNA, 15 bp, Homo sapiens
acaggggagagtggt

SEQ ID NO: 109747 - DNA, 15 bp, Homo sapiens
gacaggggagagtgg

SEQ ID NO: 109748 - DNA, 15 bp, Homo sapiens
ggacaggggagagtg

SEQ ID NO: 109749 - DNA, 15 bp, Homo sapiens
cggacaggggagagt

SEQ ID NO: 109750 - DNA, 15 bp, Homo sapiens
tcggacaggggagag

SEQ ID NO: 109751 - DNA, 15 bp, Homo sapiens
gtcggacaggggaga

SEQ ID NO: 109752 - DNA, 15 bp, Homo sapiens
ggtcggacaggggag

SEQ ID NO: 109753 - DNA, 15 bp, Homo sapiens
cggtcggacagggga

SEQ ID NO: 109754 - DNA, 15 bp, Homo sapiens
gcggtcggacagggg

SEQ ID NO: 109755 - DNA, 15 bp, Homo sapiens
cgcggtcggacaggg

SEQ ID NO: 109756 - DNA, 15 bp, Homo sapiens
ccgcggtcggacagg

SEQ ID NO: 109757 - DNA, 15 bp, Homo sapiens
accgcggtcggacag

SEQ ID NO: 109758 - DNA, 15 bp, Homo sapiens
caccgcggtcggaca

SEQ ID NO: 109759 - DNA, 15 bp, Homo sapiens
gcaccgcggtcggac

SEQ ID NO: 109760 - DNA, 15 bp, Homo sapiens
agcaccgcggtcgga

SEQ ID NO: 109761 - DNA, 15 bp, Homo sapiens
cagcaccgcggtcgg

SEQ ID NO: 109762 - DNA, 15 bp, Homo sapiens
ccagcaccgcggtcg

SEQ ID NO: 109763 - DNA, 15 bp, Homo sapiens
cccagcaccgcggtc

SEQ ID NO: 109764 - DNA, 15 bp, Homo sapiens
acccagcaccgcggt

SEQ ID NO: 109765 - DNA, 15 bp, Homo sapiens
cacccagcaccgcgg

SEQ ID NO: 109766 - DNA, 15 bp, Homo sapiens
cacccacccagcacc

SEQ ID NO: 109767 - DNA, 15 bp, Homo sapiens
gcacccacccagcac

SEQ ID NO: 109768 - DNA, 15 bp, Homo sapiens
ggcacccacccagca

SEQ ID NO: 109769 - DNA, 15 bp, Homo sapiens
tggcacccacccagc

SEQ ID NO: 109770 - DNA, 15 bp, Homo sapiens
gtggcacccacccag

SEQ ID NO: 109771 - DNA, 15 bp, Homo sapiens
agtggcacccaccca

SEQ ID NO: 109772 - DNA, 15 bp, Homo sapiens
gagtggcacccaccc

SEQ ID NO: 109773 - DNA, 15 bp, Homo sapiens
agagtggcacccacc

SEQ ID NO: 109774 - DNA, 15 bp, Homo sapiens
aagagtggcacccac

SEQ ID NO: 109775 - DNA, 15 bp, Homo sapiens
gaagagtggcaccca

SEQ ID NO: 109776 - DNA, 15 bp, Homo sapiens
ggaagagtggcaccc

SEQ ID NO: 109777 - DNA, 15 bp, Homo sapiens
gggaagagtggcacc

SEQ ID NO: 109778 - DNA, 15 bp, Homo sapiens
agggaagagtggcac

SEQ ID NO: 109779 - DNA, 15 bp, Homo sapiens
cagggaagagtggca

SEQ ID NO: 109780 - DNA, 15 bp, Homo sapiens
acagggaagagtggc

SEQ ID NO: 109781 - DNA, 15 bp, Homo sapiens
gacagggaagagtgg

SEQ ID NO: 109782 - DNA, 15 bp, Homo sapiens
ggacagggaagagtg

SEQ ID NO: 109783 - DNA, 15 bp, Homo sapiens
cggacagggaagagt

SEQ ID NO: 109784 - DNA, 15 bp, Homo sapiens
tcggacagggaagag

SEQ ID NO: 109785 - DNA, 15 bp, Homo sapiens
gtcggacagggaaga

SEQ ID NO: 109786 - DNA, 15 bp, Homo sapiens
ggtcggacagggaag

SEQ ID NO: 109787 - DNA, 15 bp, Homo sapiens
cggtcggacagggaa

SEQ ID NO: 109788 - DNA, 15 bp, Homo sapiens
gcggtcggacaggga

SEQ ID NO: 109789 - DNA, 15 bp, Homo sapiens
gagagtggcacccac

SEQ ID NO: 109790 - DNA, 15 bp, Homo sapiens
ggagagtggcaccca

SEQ ID NO: 109791 - DNA, 15 bp, Homo sapiens
gggagagtggcaccc

SEQ ID NO: 109792 - DNA, 15 bp, Homo sapiens
ggggagagtggcacc

SEQ ID NO: 109793 - DNA, 15 bp, Homo sapiens
aggggagagtggcac

SEQ ID NO: 109794 - DNA, 15 bp, Homo sapiens
caggggagagtggca

SEQ ID NO: 109795 - DNA, 15 bp, Homo sapiens
acaggggagagtggc

SEQ ID NO: 109796 - DNA, 15 bp, Homo sapiens
cggagagtggcaccc

SEQ ID NO: 109797 - DNA, 15 bp, Homo sapiens
gcggagagtggcacc

SEQ ID NO: 109798 - DNA, 15 bp, Homo sapiens
agcggagagtggcac

SEQ ID NO: 109799 - DNA, 15 bp, Homo sapiens
cagcggagagtggca

SEQ ID NO: 109800 - DNA, 15 bp, Homo sapiens
acagcggagagtggc

SEQ ID NO: 109801 - DNA, 15 bp, Homo sapiens
gacagcggagagtgg

SEQ ID NO: 109802 - DNA, 15 bp, Homo sapiens
ggacagcggagagtg

SEQ ID NO: 109803 - DNA, 15 bp, Homo sapiens
cggacagcggagagt

SEQ ID NO: 109804 - DNA, 15 bp, Homo sapiens
tcggacagcggagag

SEQ ID NO: 109805 - DNA, 15 bp, Homo sapiens
gtcggacagcggaga

SEQ ID NO: 109806 - DNA, 15 bp, Homo sapiens
ggtcggacagcggag

SEQ ID NO: 109807 - DNA, 15 bp, Homo sapiens
cggtcggacagcgga

SEQ ID NO: 109808 - DNA, 15 bp, Homo sapiens
gcggtcggacagcgg

SEQ ID NO: 109809 - DNA, 15 bp, Homo sapiens
cgcggtcggacagcg

SEQ ID NO: 109810 - DNA, 15 bp, Homo sapiens
ccgcggtcggacagc

SEQ ID NO: 109811 - DNA, 15 bp, Homo sapiens
agacaggggagagtg

SEQ ID NO: 109812 - DNA, 15 bp, Homo sapiens
cagacaggggagagt

SEQ ID NO: 109813 - DNA, 15 bp, Homo sapiens
tcagacaggggagag

SEQ ID NO: 109814 - DNA, 15 bp, Homo sapiens
gtcagacaggggaga

SEQ ID NO: 109815 - DNA, 15 bp, Homo sapiens
ggtcagacaggggag

SEQ ID NO: 109816 - DNA, 15 bp, Homo sapiens
cggtcagacagggga

SEQ ID NO: 109817 - DNA, 15 bp, Homo sapiens
gcggtcagacagggg

SEQ ID NO: 109818 - DNA, 15 bp, Homo sapiens
tgcggtcagacaggg

SEQ ID NO: 109819 - DNA, 15 bp, Homo sapiens
ctgcggtcagacagg

SEQ ID NO: 109820 - DNA, 15 bp, Homo sapiens
gctgcggtcagacag

SEQ ID NO: 109821 - DNA, 15 bp, Homo sapiens
agctgcggtcagaca

SEQ ID NO: 109822 - DNA, 15 bp, Homo sapiens
gagctgcggtcagac

SEQ ID NO: 109823 - DNA, 15 bp, Homo sapiens
agagctgcggtcaga

SEQ ID NO: 109824 - DNA, 15 bp, Homo sapiens
gagagctgcggtcag

SEQ ID NO: 109825 - DNA, 15 bp, Homo sapiens
tgagagctgcggtca

SEQ ID NO: 109826 - DNA, 15 bp, Homo sapiens
ttgagagctgcggtc

SEQ ID NO: 109827 - DNA, 15 bp, Homo sapiens
cttgagagctgcggt

SEQ ID NO: 109828 - DNA, 15 bp, Homo sapiens
acttgagagctgcgg

SEQ ID NO: 109829 - DNA, 15 bp, Homo sapiens
cacttgagagctgcg

SEQ ID NO: 109830 - DNA, 15 bp, Homo sapiens
acacttgagagctgc

SEQ ID NO: 109831 - DNA, 15 bp, Homo sapiens
gacacttgagagctg

SEQ ID NO: 109832 - DNA, 15 bp, Homo sapiens
agacacttgagagct

SEQ ID NO: 109833 - DNA, 15 bp, Homo sapiens
gagacacttgagagc

SEQ ID NO: 109834 - DNA, 15 bp, Homo sapiens
tgagacacttgagag

SEQ ID NO: 109835 - DNA, 15 bp, Homo sapiens
ctgagacacttgaga

SEQ ID NO: 109836 - DNA, 15 bp, Homo sapiens
cctgagacacttgag

SEQ ID NO: 109837 - DNA, 15 bp, Homo sapiens
ccctgagacacttga

SEQ ID NO: 109838 - DNA, 15 bp, Homo sapiens
cccctgagacacttg

SEQ ID NO: 109839 - DNA, 15 bp, Homo sapiens
gcccctgagacactt

SEQ ID NO: 109840 - DNA, 15 bp, Homo sapiens
agcccctgagacact

SEQ ID NO: 109841 - DNA, 15 bp, Homo sapiens
cagcccctgagacac

SEQ ID NO: 109842 - DNA, 15 bp, Homo sapiens
acagcccctgagaca

SEQ ID NO: 109843 - DNA, 15 bp, Homo sapiens
cacagcccctgagac

SEQ ID NO: 109844 - DNA, 15 bp, Homo sapiens
ccacagcccctgaga

SEQ ID NO: 109845 - DNA, 15 bp, Homo sapiens
gccacagcccctgag

SEQ ID NO: 109846 - DNA, 15 bp, Homo sapiens
agccacagcccctga

SEQ ID NO: 109847 - DNA, 15 bp, Homo sapiens
gagccacagcccctg

SEQ ID NO: 109848 - DNA, 15 bp, Homo sapiens
agagccacagcccct

SEQ ID NO: 109849 - DNA, 15 bp, Homo sapiens
cagagccacagcccc

SEQ ID NO: 109850 - DNA, 15 bp, Homo sapiens
ccagagccacagccc

SEQ ID NO: 109851 - DNA, 15 bp, Homo sapiens
cccagagccacagcc

SEQ ID NO: 109852 - DNA, 15 bp, Homo sapiens
gcccagagccacagc

SEQ ID NO: 109853 - DNA, 15 bp, Homo sapiens
agcccagagccacag

SEQ ID NO: 109854 - DNA, 15 bp, Homo sapiens
aagcccagagccaca

SEQ ID NO: 109855 - DNA, 15 bp, Homo sapiens
gaagcccagagccac

SEQ ID NO: 109856 - DNA, 15 bp, Homo sapiens
cgaagcccagagcca

SEQ ID NO: 109857 - DNA, 15 bp, Homo sapiens
acgaagcccagagcc

SEQ ID NO: 109858 - DNA, 15 bp, Homo sapiens
cacgaagcccagagc

SEQ ID NO: 109859 - DNA, 15 bp, Homo sapiens
gcacgaagcccagag

SEQ ID NO: 109860 - DNA, 15 bp, Homo sapiens
agcacgaagcccaga

SEQ ID NO: 109861 - DNA, 15 bp, Homo sapiens
cagcacgaagcccag

SEQ ID NO: 109862 - DNA, 15 bp, Homo sapiens
acagcacgaagccca

SEQ ID NO: 109863 - DNA, 15 bp, Homo sapiens
gacagcacgaagccc

SEQ ID NO: 109864 - DNA, 15 bp, Homo sapiens
tgacagcacgaagcc

SEQ ID NO: 109865 - DNA, 15 bp, Homo sapiens
gtgacagcacgaagc

SEQ ID NO: 109866 - DNA, 15 bp, Homo sapiens
agtgacagcacgaag

SEQ ID NO: 109867 - DNA, 15 bp, Homo sapiens
aagtgacagcacgaa

SEQ ID NO: 109868 - DNA, 15 bp, Homo sapiens
gaagtgacagcacga

SEQ ID NO: 109869 - DNA, 15 bp, Homo sapiens
ggaagtgacagcacg

SEQ ID NO: 109870 - DNA, 15 bp, Homo sapiens
tggaagtgacagcac

SEQ ID NO: 109871 - DNA, 15 bp, Homo sapiens
gtggaagtgacagca

SEQ ID NO: 109872 - DNA, 15 bp, Homo sapiens
tgtggaagtgacagc

SEQ ID NO: 109873 - DNA, 15 bp, Homo sapiens
ctgtggaagtgacag

SEQ ID NO: 109874 - DNA, 15 bp, Homo sapiens
tctgtggaagtgaca

SEQ ID NO: 109875 - DNA, 15 bp, Homo sapiens
gtctgtggaagtgac

SEQ ID NO: 109876 - DNA, 15 bp, Homo sapiens
tgtctgtggaagtga

SEQ ID NO: 109877 - DNA, 15 bp, Homo sapiens
ctgtctgtggaagtg

SEQ ID NO: 109878 - DNA, 15 bp, Homo sapiens
tctgtctgtggaagt

SEQ ID NO: 109879 - DNA, 15 bp, Homo sapiens
gtctgtctgtggaag

SEQ ID NO: 109880 - DNA, 15 bp, Homo sapiens
tgtctgtctgtggaa

SEQ ID NO: 109881 - DNA, 15 bp, Homo sapiens
ctgtctgtctgtgga

SEQ ID NO: 109882 - DNA, 15 bp, Homo sapiens
tctgtctgtctgtgg

SEQ ID NO: 109883 - DNA, 15 bp, Homo sapiens
gtctgtctgtctgtg

SEQ ID NO: 109884 - DNA, 15 bp, Homo sapiens
tgtctgtctgtctgt

SEQ ID NO: 109885 - DNA, 15 bp, Homo sapiens
atgtctgtctgtctg

SEQ ID NO: 109886 - DNA, 15 bp, Homo sapiens
gatgtctgtctgtct

SEQ ID NO: 109887 - DNA, 15 bp, Homo sapiens
ggatgtctgtctgtc

SEQ ID NO: 109888 - DNA, 15 bp, Homo sapiens
gggatgtctgtctgt

SEQ ID NO: 109889 - DNA, 15 bp, Homo sapiens
ggggatgtctgtctg

SEQ ID NO: 109890 - DNA, 15 bp, Homo sapiens
tggggatgtctgtct

SEQ ID NO: 109891 - DNA, 15 bp, Homo sapiens
ttggggatgtctgtc

SEQ ID NO: 109892 - DNA, 15 bp, Homo sapiens
tttggggatgtctgt

SEQ ID NO: 109893 - DNA, 15 bp, Homo sapiens
ttttggggatgtctg

SEQ ID NO: 109894 - DNA, 15 bp, Homo sapiens
cttttggggatgtct

SEQ ID NO: 109895 - DNA, 15 bp, Homo sapiens
ccttttggggatgtc

SEQ ID NO: 109896 - DNA, 15 bp, Homo sapiens
cccttttggggatgt

SEQ ID NO: 109897 - DNA, 15 bp, Homo sapiens
ccccttttggggatg

SEQ ID NO: 109898 - DNA, 15 bp, Homo sapiens
tccccttttggggat

SEQ ID NO: 109899 - DNA, 15 bp, Homo sapiens
ctccccttttgggga

SEQ ID NO: 109900 - DNA, 15 bp, Homo sapiens
gctccccttttgggg

SEQ ID NO: 109901 - DNA, 15 bp, Homo sapiens
tgctccccttttggg

SEQ ID NO: 109902 - DNA, 15 bp, Homo sapiens
ttgctccccttttgg

SEQ ID NO: 109903 - DNA, 15 bp, Homo sapiens
gttgctccccttttg

SEQ ID NO: 109904 - DNA, 15 bp, Homo sapiens
ggttgctcccctttt

SEQ ID NO: 109905 - DNA, 15 bp, Homo sapiens
tggttgctccccttt

SEQ ID NO: 109906 - DNA, 15 bp, Homo sapiens
atggttgctcccctt

SEQ ID NO: 109907 - DNA, 15 bp, Homo sapiens
catggttgctcccct

SEQ ID NO: 109908 - DNA, 15 bp, Homo sapiens
gcatggttgctcccc

SEQ ID NO: 109909 - DNA, 15 bp, Homo sapiens
agcatggttgctccc

SEQ ID NO: 109910 - DNA, 15 bp, Homo sapiens
cagcatggttgctcc

SEQ ID NO: 109911 - DNA, 15 bp, Homo sapiens
ccagcatggttgctc

SEQ ID NO: 109912 - DNA, 15 bp, Homo sapiens
cccagcatggttgct

SEQ ID NO: 109913 - DNA, 15 bp, Homo sapiens
gcccagcatggttgc

SEQ ID NO: 109914 - DNA, 15 bp, Homo sapiens
tgcccagcatggttg

SEQ ID NO: 109915 - DNA, 15 bp, Homo sapiens
gtgcccagcatggtt

SEQ ID NO: 109916 - DNA, 15 bp, Homo sapiens
cgtgcccagcatggt

SEQ ID NO: 109917 - DNA, 15 bp, Homo sapiens
tcgtgcccagcatgg

SEQ ID NO: 109918 - DNA, 15 bp, Homo sapiens
gtcgtgcccagcatg

SEQ ID NO: 109919 - DNA, 15 bp, Homo sapiens
agtcgtgcccagcat

SEQ ID NO: 109920 - DNA, 15 bp, Homo sapiens
cagtcgtgcccagca

SEQ ID NO: 109921 - DNA, 15 bp, Homo sapiens
gcagtcgtgcccagc

SEQ ID NO: 109922 - DNA, 15 bp, Homo sapiens
agcagtcgtgcccag

SEQ ID NO: 109923 - DNA, 15 bp, Homo sapiens
cagcagtcgtgccca

SEQ ID NO: 109924 - DNA, 15 bp, Homo sapiens
acagcagtcgtgccc

SEQ ID NO: 109925 - DNA, 15 bp, Homo sapiens
cacagcagtcgtgcc

SEQ ID NO: 109926 - DNA, 15 bp, Homo sapiens
ccacagcagtcgtgc

SEQ ID NO: 109927 - DNA, 15 bp, Homo sapiens
gccacagcagtcgtg

SEQ ID NO: 109928 - DNA, 15 bp, Homo sapiens
ggccacagcagtcgt

SEQ ID NO: 109929 - DNA, 15 bp, Homo sapiens
tggccacagcagtcg

SEQ ID NO: 109930 - DNA, 15 bp, Homo sapiens
gtggccacagcagtc

SEQ ID NO: 109931 - DNA, 15 bp, Homo sapiens
ggtggccacagcagt

SEQ ID NO: 109932 - DNA, 15 bp, Homo sapiens
cggtggccacagcag

SEQ ID NO: 109933 - DNA, 15 bp, Homo sapiens
acggtggccacagca

SEQ ID NO: 109934 - DNA, 15 bp, Homo sapiens
cacggtggccacagc

SEQ ID NO: 109935 - DNA, 15 bp, Homo sapiens
gcacggtggccacag

SEQ ID NO: 109936 - DNA, 15 bp, Homo sapiens
agcacggtggccaca

SEQ ID NO: 109937 - DNA, 15 bp, Homo sapiens
gagcacggtggccac

SEQ ID NO: 109938 - DNA, 15 bp, Homo sapiens
agagcacggtggcca

SEQ ID NO: 109939 - DNA, 15 bp, Homo sapiens
gagagcacggtggcc

SEQ ID NO: 109940 - DNA, 15 bp, Homo sapiens
tgagagcacggtggc

SEQ ID NO: 109941 - DNA, 15 bp, Homo sapiens
ctgagagcacggtgg

SEQ ID NO: 109942 - DNA, 15 bp, Homo sapiens
gctgagagcacggtg

SEQ ID NO: 109943 - DNA, 15 bp, Homo sapiens
ggctgagagcacggt

SEQ ID NO: 109944 - DNA, 15 bp, Homo sapiens
tggctgagagcacgg

SEQ ID NO: 109945 - DNA, 15 bp, Homo sapiens
gtggctgagagcacg

SEQ ID NO: 109946 - DNA, 15 bp, Homo sapiens
agtggctgagagcac

SEQ ID NO: 109947 - DNA, 15 bp, Homo sapiens
aagtggctgagagca

SEQ ID NO: 109948 - DNA, 15 bp, Homo sapiens
aaagtggctgagagc

SEQ ID NO: 109949 - DNA, 15 bp, Homo sapiens
gaaagtggctgagag

SEQ ID NO: 109950 - DNA, 15 bp, Homo sapiens
ggaaagtggctgaga

SEQ ID NO: 109951 - DNA, 15 bp, Homo sapiens
gggaaagtggctgag

SEQ ID NO: 109952 - DNA, 15 bp, Homo sapiens
tgggaaagtggctga

SEQ ID NO: 109953 - DNA, 15 bp, Homo sapiens
atgggaaagtggctg

SEQ ID NO: 109954 - DNA, 15 bp, Homo sapiens
catgggaaagtggct

SEQ ID NO: 109955 - DNA, 15 bp, Homo sapiens
gcatgggaaagtggc

SEQ ID NO: 109956 - DNA, 15 bp, Homo sapiens
ggcatgggaaagtgg

SEQ ID NO: 109957 - DNA, 15 bp, Homo sapiens
gggcatgggaaagtg

SEQ ID NO: 109958 - DNA, 15 bp, Homo sapiens
tgggcatgggaaagt

SEQ ID NO: 109959 - DNA, 15 bp, Homo sapiens
ttgggcatgggaaag

SEQ ID NO: 109960 - DNA, 15 bp, Homo sapiens
tttgggcatgggaaa

SEQ ID NO: 109961 - DNA, 15 bp, Homo sapiens
atttgggcatgggaa

SEQ ID NO: 109962 - DNA, 15 bp, Homo sapiens
tatttgggcatggga

SEQ ID NO: 109963 - DNA, 15 bp, Homo sapiens
ttatttgggcatggg

SEQ ID NO: 109964 - DNA, 15 bp, Homo sapiens
tttatttgggcatgg

SEQ ID NO: 109965 - DNA, 15 bp, Homo sapiens
ttttatttgggcatg

SEQ ID NO: 109966 - DNA, 15 bp, Homo sapiens
gttttatttgggcat

SEQ ID NO: 109967 - DNA, 15 bp, Homo sapiens
cgttttatttgggca

SEQ ID NO: 109968 - DNA, 15 bp, Homo sapiens
tcgttttatttgggc

SEQ ID NO: 109969 - DNA, 15 bp, Homo sapiens
atcgttttatttggg

SEQ ID NO: 109970 - DNA, 15 bp, Homo sapiens
tatcgttttatttgg

SEQ ID NO: 109971 - DNA, 15 bp, Homo sapiens
ttatcgttttatttg

SEQ ID NO: 109972 - DNA, 15 bp, Homo sapiens
tttatcgttttattt

SEQ ID NO: 109973 - DNA, 15 bp, Homo sapiens
ttttatcgttttatt

SEQ ID NO: 109974 - DNA, 15 bp, Homo sapiens
cttttatcgttttat

SEQ ID NO: 109975 - DNA, 15 bp, Homo sapiens
tcttttatcgtttta

SEQ ID NO: 109976 - DNA, 15 bp, Homo sapiens
gtcttttatcgtttt

SEQ ID NO: 109977 - DNA, 15 bp, Homo sapiens
agtcttttatcgttt

SEQ ID NO: 109978 - DNA, 15 bp, Homo sapiens
cagtcttttatcgtt

SEQ ID NO: 109979 - DNA, 15 bp, Homo sapiens
ccagtcttttatcgt

SEQ ID NO: 109980 - DNA, 15 bp, Homo sapiens
cccagtcttttatcg

SEQ ID NO: 109981 - DNA, 15 bp, Homo sapiens
ccccagtcttttatc

SEQ ID NO: 109982 - DNA, 15 bp, Homo sapiens
cccccagtcttttat

SEQ ID NO: 109983 - DNA, 15 bp, Homo sapiens
gcccccagtctttta

SEQ ID NO: 109984 - DNA, 15 bp, Homo sapiens
agcccccagtctttt

SEQ ID NO: 109985 - DNA, 15 bp, Homo sapiens
aagcccccagtcttt

SEQ ID NO: 109986 - DNA, 15 bp, Homo sapiens
gaagcccccagtctt

SEQ ID NO: 109987 - DNA, 15 bp, Homo sapiens
agaagcccccagtct

SEQ ID NO: 109988 - DNA, 15 bp, Homo sapiens
cagaagcccccagtc

SEQ ID NO: 109989 - DNA, 15 bp, Homo sapiens
gcagaagcccccagt

SEQ ID NO: 109990 - DNA, 15 bp, Homo sapiens
ggcagaagcccccag

SEQ ID NO: 109991 - DNA, 15 bp, Homo sapiens
gggcagaagccccca

SEQ ID NO: 109992 - DNA, 15 bp, Homo sapiens
tgggcagaagccccc

SEQ ID NO: 109993 - DNA, 15 bp, Homo sapiens
atgggcagaagcccc

SEQ ID NO: 109994 - DNA, 15 bp, Homo sapiens
gatgggcagaagccc

SEQ ID NO: 109995 - DNA, 15 bp, Homo sapiens
ggatgggcagaagcc

SEQ ID NO: 109996 - DNA, 15 bp, Homo sapiens
aggatgggcagaagc

SEQ ID NO: 109997 - DNA, 15 bp, Homo sapiens
caggatgggcagaag

SEQ ID NO: 109998 - DNA, 15 bp, Homo sapiens
gcaggatgggcagaa

SEQ ID NO: 109999 - DNA, 15 bp, Homo sapiens
ggcaggatgggcaga

SEQ ID NO: 110000 - DNA, 15 bp, Homo sapiens
aggcaggatgggcag

SEQ ID NO: 110001 - DNA, 15 bp, Homo sapiens
gaggcaggatgggca

SEQ ID NO: 110002 - DNA, 15 bp, Homo sapiens
tgaggcaggatgggc

SEQ ID NO: 110003 - DNA, 15 bp, Homo sapiens
gtgaggcaggatggg

SEQ ID NO: 110004 - DNA, 15 bp, Homo sapiens
agtgaggcaggatgg

SEQ ID NO: 110005 - DNA, 15 bp, Homo sapiens
aagtgaggcaggatg

SEQ ID NO: 110006 - DNA, 15 bp, Homo sapiens
caagtgaggcaggat

SEQ ID NO: 110007 - DNA, 15 bp, Homo sapiens
tcaagtgaggcagga

SEQ ID NO: 110008 - DNA, 15 bp, Homo sapiens
gtcaagtgaggcagg

SEQ ID NO: 110009 - DNA, 15 bp, Homo sapiens
ggtcaagtgaggcag

SEQ ID NO: 110010 - DNA, 15 bp, Homo sapiens
tggtcaagtgaggca

SEQ ID NO: 110011 - DNA, 15 bp, Homo sapiens
ttggtcaagtgaggc

SEQ ID NO: 110012 - DNA, 15 bp, Homo sapiens
cttggtcaagtgagg

SEQ ID NO: 110013 - DNA, 15 bp, Homo sapiens
tcttggtcaagtgag

SEQ ID NO: 110014 - DNA, 15 bp, Homo sapiens
ctcttggtcaagtga

SEQ ID NO: 110015 - DNA, 15 bp, Homo sapiens
gctcttggtcaagtg

SEQ ID NO: 110016 - DNA, 15 bp, Homo sapiens
ggctcttggtcaagt

SEQ ID NO: 110017 - DNA, 15 bp, Homo sapiens
gggctcttggtcaag

SEQ ID NO: 110018 - DNA, 15 bp, Homo sapiens
tgggctcttggtcaa

SEQ ID NO: 110019 - DNA, 15 bp, Homo sapiens
ctgggctcttggtca

SEQ ID NO: 110020 - DNA, 15 bp, Homo sapiens
tctgggctcttggtc

SEQ ID NO: 110021 - DNA, 15 bp, Homo sapiens
ttctgggctcttggt

SEQ ID NO: 110022 - DNA, 15 bp, Homo sapiens
cttctgggctcttgg

SEQ ID NO: 110023 - DNA, 15 bp, Homo sapiens
tcttctgggctcttg

SEQ ID NO: 110024 - DNA, 15 bp, Homo sapiens
ctcttctgggctctt

SEQ ID NO: 110025 - DNA, 15 bp, Homo sapiens
cctcttctgggctct

SEQ ID NO: 110026 - DNA, 15 bp, Homo sapiens
tcctcttctgggctc

SEQ ID NO: 110027 - DNA, 15 bp, Homo sapiens
atcctcttctgggct

SEQ ID NO: 110028 - DNA, 15 bp, Homo sapiens
catcctcttctgggc

SEQ ID NO: 110029 - DNA, 15 bp, Homo sapiens
gcatcctcttctggg

SEQ ID NO: 110030 - DNA, 15 bp, Homo sapiens
cgcatcctcttctgg

SEQ ID NO: 110031 - DNA, 15 bp, Homo sapiens
tcgcatcctcttctg

SEQ ID NO: 110032 - DNA, 15 bp, Homo sapiens
gtcgcatcctcttct

SEQ ID NO: 110033 - DNA, 15 bp, Homo sapiens
tgtcgcatcctcttc

SEQ ID NO: 110034 - DNA, 15 bp, Homo sapiens
gtgtcgcatcctctt

SEQ ID NO: 110035 - DNA, 15 bp, Homo sapiens
ggtgtcgcatcctct

SEQ ID NO: 110036 - DNA, 15 bp, Homo sapiens
gggtgtcgcatcctc

SEQ ID NO: 110037 - DNA, 15 bp, Homo sapiens
tgggtgtcgcatcct

SEQ ID NO: 110038 - DNA, 15 bp, Homo sapiens
ctgggtgtcgcatcc

SEQ ID NO: 110039 - DNA, 15 bp, Homo sapiens
cctgggtgtcgcatc

SEQ ID NO: 110040 - DNA, 15 bp, Homo sapiens
ccctgggtgtcgcat

SEQ ID NO: 110041 - DNA, 15 bp, Homo sapiens
gccctgggtgtcgca

SEQ ID NO: 110042 - DNA, 15 bp, Homo sapiens
ggccctgggtgtcgc

SEQ ID NO: 110043 - DNA, 15 bp, Homo sapiens
aggccctgggtgtcg

SEQ ID NO: 110044 - DNA, 15 bp, Homo sapiens
gaggccctgggtgtc

SEQ ID NO: 110045 - DNA, 15 bp, Homo sapiens
tgaggccctgggtgt

SEQ ID NO: 110046 - DNA, 15 bp, Homo sapiens
atgaggccctgggtg

SEQ ID NO: 110047 - DNA, 15 bp, Homo sapiens
catgaggccctgggt

SEQ ID NO: 110048 - DNA, 15 bp, Homo sapiens
ccatgaggccctggg

SEQ ID NO: 110049 - DNA, 15 bp, Homo sapiens
cccatgaggccctgg

SEQ ID NO: 110050 - DNA, 15 bp, Homo sapiens
tcccatgaggccctg

SEQ ID NO: 110051 - DNA, 15 bp, Homo sapiens
gtcccatgaggccct

SEQ ID NO: 110052 - DNA, 15 bp, Homo sapiens
ggtcccatgaggccc

SEQ ID NO: 110053 - DNA, 15 bp, Homo sapiens
tggtcccatgaggcc

SEQ ID NO: 110054 - DNA, 15 bp, Homo sapiens
gtggtcccatgaggc

SEQ ID NO: 110055 - DNA, 15 bp, Homo sapiens
ggtggtcccatgagg

SEQ ID NO: 110056 - DNA, 15 bp, Homo sapiens
cggtggtcccatgag

SEQ ID NO: 110057 - DNA, 15 bp, Homo sapiens
ccggtggtcccatga

SEQ ID NO: 110058 - DNA, 15 bp, Homo sapiens
gccggtggtcccatg

SEQ ID NO: 110059 - DNA, 15 bp, Homo sapiens
agccggtggtcccat

SEQ ID NO: 110060 - DNA, 15 bp, Homo sapiens
cagccggtggtccca

SEQ ID NO: 110061 - DNA, 15 bp, Homo sapiens
ccagccggtggtccc

SEQ ID NO: 110062 - DNA, 15 bp, Homo sapiens
gccagccggtggtcc

SEQ ID NO: 110063 - DNA, 15 bp, Homo sapiens
tgccagccggtggtc

SEQ ID NO: 110064 - DNA, 15 bp, Homo sapiens
ctgccagccggtggt

SEQ ID NO: 110065 - DNA, 15 bp, Homo sapiens
cctgccagccggtgg

SEQ ID NO: 110066 - DNA, 15 bp, Homo sapiens
ccctgccagccggtg

SEQ ID NO: 110067 - DNA, 15 bp, Homo sapiens
cccctgccagccggt

SEQ ID NO: 110068 - DNA, 15 bp, Homo sapiens
acccctgccagccgg

SEQ ID NO: 110069 - DNA, 15 bp, Homo sapiens
aacccctgccagccg

SEQ ID NO: 110070 - DNA, 15 bp, Homo sapiens
gaacccctgccagcc

SEQ ID NO: 110071 - DNA, 15 bp, Homo sapiens
agaacccctgccagc

SEQ ID NO: 110072 - DNA, 15 bp, Homo sapiens
cagaacccctgccag

SEQ ID NO: 110073 - DNA, 15 bp, Homo sapiens
gcagaacccctgcca

SEQ ID NO: 110074 - DNA, 15 bp, Homo sapiens
agcagaacccctgcc

SEQ ID NO: 110075 - DNA, 15 bp, Homo sapiens
gagcagaacccctgc

SEQ ID NO: 110076 - DNA, 15 bp, Homo sapiens
tgagcagaacccctg

SEQ ID NO: 110077 - DNA, 15 bp, Homo sapiens
gtgagcagaacccct

SEQ ID NO: 110078 - DNA, 15 bp, Homo sapiens
agtgagcagaacccc

SEQ ID NO: 110079 - DNA, 15 bp, Homo sapiens
cagtgagcagaaccc

SEQ ID NO: 110080 - DNA, 15 bp, Homo sapiens
ccagtgagcagaacc

SEQ ID NO: 110081 - DNA, 15 bp, Homo sapiens
cccagtgagcagaac

SEQ ID NO: 110082 - DNA, 15 bp, Homo sapiens
acccagtgagcagaa

SEQ ID NO: 110083 - DNA, 15 bp, Homo sapiens
aacccagtgagcaga

SEQ ID NO: 110084 - DNA, 15 bp, Homo sapiens
aaacccagtgagcag

SEQ ID NO: 110085 - DNA, 15 bp, Homo sapiens
taaacccagtgagca

SEQ ID NO: 110086 - DNA, 15 bp, Homo sapiens
ataaacccagtgagc

SEQ ID NO: 110087 - DNA, 15 bp, Homo sapiens
cataaacccagtgag

SEQ ID NO: 110088 - DNA, 15 bp, Homo sapiens
ccataaacccagtga

SEQ ID NO: 110089 - DNA, 15 bp, Homo sapiens
cccataaacccagtg

SEQ ID NO: 110090 - DNA, 15 bp, Homo sapiens
acccataaacccagt

SEQ ID NO: 110091 - DNA, 15 bp, Homo sapiens
cacccataaacccag

SEQ ID NO: 110092 - DNA, 15 bp, Homo sapiens
tcacccataaaccca

SEQ ID NO: 110093 - DNA, 15 bp, Homo sapiens
ctcacccataaaccc

SEQ ID NO: 110094 - DNA, 15 bp, Homo sapiens
tctcacccataaacc

SEQ ID NO: 110095 - DNA, 15 bp, Homo sapiens
gtctcacccataaac

SEQ ID NO: 110096 - DNA, 15 bp, Homo sapiens
cgtctcacccataaa

SEQ ID NO: 110097 - DNA, 15 bp, Homo sapiens
tcgtctcacccataa

SEQ ID NO: 110098 - DNA, 15 bp, Homo sapiens
ctcgtctcacccata

SEQ ID NO: 110099 - DNA, 15 bp, Homo sapiens
gctcgtctcacccat

SEQ ID NO: 110100 - DNA, 15 bp, Homo sapiens
tgctcgtctcaccca

SEQ ID NO: 110101 - DNA, 15 bp, Homo sapiens
gtgctcgtctcaccc

SEQ ID NO: 110102 - DNA, 15 bp, Homo sapiens
agtgctcgtctcacc

SEQ ID NO: 110103 - DNA, 15 bp, Homo sapiens
gagtgctcgtctcac

SEQ ID NO: 110104 - DNA, 15 bp, Homo sapiens
ggagtgctcgtctca

SEQ ID NO: 110105 - DNA, 15 bp, Homo sapiens
gggagtgctcgtctc

SEQ ID NO: 110106 - DNA, 15 bp, Homo sapiens
tgggagtgctcgtct

SEQ ID NO: 110107 - DNA, 15 bp, Homo sapiens
ctgggagtgctcgtc

SEQ ID NO: 110108 - DNA, 15 bp, Homo sapiens
cctgggagtgctcgt

SEQ ID NO: 110109 - DNA, 15 bp, Homo sapiens
tcctgggagtgctcg

SEQ ID NO: 110110 - DNA, 15 bp, Homo sapiens
ctcctgggagtgctc

SEQ ID NO: 110111 - DNA, 15 bp, Homo sapiens
cctcctgggagtgct

SEQ ID NO: 110112 - DNA, 15 bp, Homo sapiens
ccctcctgggagtgc

SEQ ID NO: 110113 - DNA, 15 bp, Homo sapiens
gccctcctgggagtg

SEQ ID NO: 110114 - DNA, 15 bp, Homo sapiens
ggccctcctgggagt

SEQ ID NO: 110115 - DNA, 15 bp, Homo sapiens
tggccctcctgggag

SEQ ID NO: 110116 - DNA, 15 bp, Homo sapiens
gtggccctcctggga

SEQ ID NO: 110117 - DNA, 15 bp, Homo sapiens
agtggccctcctggg

SEQ ID NO: 110118 - DNA, 15 bp, Homo sapiens
cagtggccctcctgg

SEQ ID NO: 110119 - DNA, 15 bp, Homo sapiens
ccagtggccctcctg

SEQ ID NO: 110120 - DNA, 15 bp, Homo sapiens
cccagtggccctcct

SEQ ID NO: 110121 - DNA, 15 bp, Homo sapiens
gcccagtggccctcc

SEQ ID NO: 110122 - DNA, 15 bp, Homo sapiens
ggcccagtggccctc

SEQ ID NO: 110123 - DNA, 15 bp, Homo sapiens
cggcccagtggccct

SEQ ID NO: 110124 - DNA, 15 bp, Homo sapiens
ccggcccagtggccc

SEQ ID NO: 110125 - DNA, 15 bp, Homo sapiens
cccggcccagtggcc

SEQ ID NO: 110126 - DNA, 15 bp, Homo sapiens
tcccggcccagtggc

SEQ ID NO: 110127 - DNA, 15 bp, Homo sapiens
ttcccggcccagtgg

SEQ ID NO: 110128 - DNA, 15 bp, Homo sapiens
cttcccggcccagtg

SEQ ID NO: 110129 - DNA, 15 bp, Homo sapiens
tcttcccggcccagt

SEQ ID NO: 110130 - DNA, 15 bp, Homo sapiens
ttcttcccggcccag

SEQ ID NO: 110131 - DNA, 15 bp, Homo sapiens
gttcttcccggccca

SEQ ID NO: 110132 - DNA, 15 bp, Homo sapiens
agttcttcccggccc

SEQ ID NO: 110133 - DNA, 15 bp, Homo sapiens
cagttcttcccggcc

SEQ ID NO: 110134 - DNA, 15 bp, Homo sapiens
acagttcttcccggc

SEQ ID NO: 110135 - DNA, 15 bp, Homo sapiens
cacagttcttcccgg

SEQ ID NO: 110136 - DNA, 15 bp, Homo sapiens
ccacagttcttcccg

SEQ ID NO: 110137 - DNA, 15 bp, Homo sapiens
tccacagttcttccc

SEQ ID NO: 110138 - DNA, 15 bp, Homo sapiens
ctccacagttcttcc

SEQ ID NO: 110139 - DNA, 15 bp, Homo sapiens
tctccacagttcttc

SEQ ID NO: 110140 - DNA, 15 bp, Homo sapiens
ttctccacagttctt

SEQ ID NO: 110141 - DNA, 15 bp, Homo sapiens
attctccacagttct

SEQ ID NO: 110142 - DNA, 15 bp, Homo sapiens
gattctccacagttc

SEQ ID NO: 110143 - DNA, 15 bp, Homo sapiens
cgattctccacagtt

SEQ ID NO: 110144 - DNA, 15 bp, Homo sapiens
ccgattctccacagt

SEQ ID NO: 110145 - DNA, 15 bp, Homo sapiens
cccgattctccacag

SEQ ID NO: 110146 - DNA, 15 bp, Homo sapiens
ccccgattctccaca

SEQ ID NO: 110147 - DNA, 15 bp, Homo sapiens
gccccgattctccac

SEQ ID NO: 110148 - DNA, 15 bp, Homo sapiens
tgccccgattctcca

SEQ ID NO: 110149 - DNA, 15 bp, Homo sapiens
gtgccccgattctcc

SEQ ID NO: 110150 - DNA, 15 bp, Homo sapiens
cgtgccccgattctc

SEQ ID NO: 110151 - DNA, 15 bp, Homo sapiens
gcgtgccccgattct

SEQ ID NO: 110152 - DNA, 15 bp, Homo sapiens
ggcgtgccccgattc

SEQ ID NO: 110153 - DNA, 15 bp, Homo sapiens
gggcgtgccccgatt

SEQ ID NO: 110154 - DNA, 15 bp, Homo sapiens
agggcgtgccccgat

SEQ ID NO: 110155 - DNA, 15 bp, Homo sapiens
cagggcgtgccccga

SEQ ID NO: 110156 - DNA, 15 bp, Homo sapiens
acagggcgtgccccg

SEQ ID NO: 110157 - DNA, 15 bp, Homo sapiens
gacagggcgtgcccc

SEQ ID NO: 110158 - DNA, 15 bp, Homo sapiens
ggacagggcgtgccc

SEQ ID NO: 110159 - DNA, 15 bp, Homo sapiens
aggacagggcgtgcc

SEQ ID NO: 110160 - DNA, 15 bp, Homo sapiens
gaggacagggcgtgc

SEQ ID NO: 110161 - DNA, 15 bp, Homo sapiens
ggaggacagggcgtg

SEQ ID NO: 110162 - DNA, 15 bp, Homo sapiens
gggaggacagggcgt

SEQ ID NO: 110163 - DNA, 15 bp, Homo sapiens
tgggaggacagggcg

SEQ ID NO: 110164 - DNA, 15 bp, Homo sapiens
ctgggaggacagggc

SEQ ID NO: 110165 - DNA, 15 bp, Homo sapiens
gctgggaggacaggg

SEQ ID NO: 110166 - DNA, 15 bp, Homo sapiens
agctgggaggacagg

SEQ ID NO: 110167 - DNA, 15 bp, Homo sapiens
cagctgggaggacag

SEQ ID NO: 110168 - DNA, 15 bp, Homo sapiens
gcagctgggaggaca

SEQ ID NO: 110169 - DNA, 15 bp, Homo sapiens
ggcagctgggaggac

SEQ ID NO: 110170 - DNA, 15 bp, Homo sapiens
tggcagctgggagga

SEQ ID NO: 110171 - DNA, 15 bp, Homo sapiens
ctggcagctgggagg

SEQ ID NO: 110172 - DNA, 15 bp, Homo sapiens
cctggcagctgggag

SEQ ID NO: 110173 - DNA, 15 bp, Homo sapiens
ccctggcagctggga

SEQ ID NO: 110174 - DNA, 15 bp, Homo sapiens
gccctggcagctggg

SEQ ID NO: 110175 - DNA, 15 bp, Homo sapiens
tgccctggcagctgg

SEQ ID NO: 110176 - DNA, 15 bp, Homo sapiens
gtgccctggcagctg

SEQ ID NO: 110177 - DNA, 15 bp, Homo sapiens
tgtgccctggcagct

SEQ ID NO: 110178 - DNA, 15 bp, Homo sapiens
ctgtgccctggcagc

SEQ ID NO: 110179 - DNA, 15 bp, Homo sapiens
gctgtgccctggcag

SEQ ID NO: 110180 - DNA, 15 bp, Homo sapiens
tgctgtgccctggca

SEQ ID NO: 110181 - DNA, 15 bp, Homo sapiens
atgctgtgccctggc

SEQ ID NO: 110182 - DNA, 15 bp, Homo sapiens
gatgctgtgccctgg

SEQ ID NO: 110183 - DNA, 15 bp, Homo sapiens
ggatgctgtgccctg

SEQ ID NO: 110184 - DNA, 15 bp, Homo sapiens
gggatgctgtgccct

SEQ ID NO: 110185 - DNA, 15 bp, Homo sapiens
agggatgctgtgccc

SEQ ID NO: 110186 - DNA, 15 bp, Homo sapiens
aagggatgctgtgcc

SEQ ID NO: 110187 - DNA, 15 bp, Homo sapiens
gaagggatgctgtgc

SEQ ID NO: 110188 - DNA, 15 bp, Homo sapiens
ggaagggatgctgtg

SEQ ID NO: 110189 - DNA, 15 bp, Homo sapiens
gggaagggatgctgt

SEQ ID NO: 110190 - DNA, 15 bp, Homo sapiens
ggggaagggatgctg

SEQ ID NO: 110191 - DNA, 15 bp, Homo sapiens
tggggaagggatgct

SEQ ID NO: 110192 - DNA, 15 bp, Homo sapiens
gtggggaagggatgc

SEQ ID NO: 110193 - DNA, 15 bp, Homo sapiens
ggtggggaagggatg

SEQ ID NO: 110194 - DNA, 15 bp, Homo sapiens
aggtggggaagggat

SEQ ID NO: 110195 - DNA, 15 bp, Homo sapiens
gaggtggggaaggga

SEQ ID NO: 110196 - DNA, 15 bp, Homo sapiens
tgaggtggggaaggg

SEQ ID NO: 110197 - DNA, 15 bp, Homo sapiens
ttgaggtggggaagg

SEQ ID NO: 110198 - DNA, 15 bp, Homo sapiens
gttgaggtggggaag

SEQ ID NO: 110199 - DNA, 15 bp, Homo sapiens
tgttgaggtggggaa

SEQ ID NO: 110200 - DNA, 15 bp, Homo sapiens
gtgttgaggtgggga

SEQ ID NO: 110201 - DNA, 15 bp, Homo sapiens
ggtgttgaggtgggg

SEQ ID NO: 110202 - DNA, 15 bp, Homo sapiens
gggtgttgaggtggg

SEQ ID NO: 110203 - DNA, 15 bp, Homo sapiens
tgggtgttgaggtgg

SEQ ID NO: 110204 - DNA, 15 bp, Homo sapiens
ctgggtgttgaggtg

SEQ ID NO: 110205 - DNA, 15 bp, Homo sapiens
tctgggtgttgaggt

SEQ ID NO: 110206 - DNA, 15 bp, Homo sapiens
gtctgggtgttgagg

SEQ ID NO: 110207 - DNA, 15 bp, Homo sapiens
ggtctgggtgttgag

SEQ ID NO: 110208 - DNA, 15 bp, Homo sapiens
gggtctgggtgttga

SEQ ID NO: 110209 - DNA, 15 bp, Homo sapiens
ggggtctgggtgttg

SEQ ID NO: 110210 - DNA, 15 bp, Homo sapiens
tggggtctgggtgtt

SEQ ID NO: 110211 - DNA, 15 bp, Homo sapiens
ctggggtctgggtgt

SEQ ID NO: 110212 - DNA, 15 bp, Homo sapiens
tctggggtctgggtg

SEQ ID NO: 110213 - DNA, 15 bp, Homo sapiens
atctggggtctgggt

SEQ ID NO: 110214 - DNA, 15 bp, Homo sapiens
aatctggggtctggg

SEQ ID NO: 110215 - DNA, 15 bp, Homo sapiens
gaatctggggtctgg

SEQ ID NO: 110216 - DNA, 15 bp, Homo sapiens
tgaatctggggtctg

SEQ ID NO: 110217 - DNA, 15 bp, Homo sapiens
gtgaatctggggtct

SEQ ID NO: 110218 - DNA, 15 bp, Homo sapiens
ggtgaatctggggtc

SEQ ID NO: 110219 - DNA, 15 bp, Homo sapiens
gggtgaatctggggt

SEQ ID NO: 110220 - DNA, 15 bp, Homo sapiens
ggggtgaatctgggg

SEQ ID NO: 110221 - DNA, 15 bp, Homo sapiens
tggggtgaatctggg

SEQ ID NO: 110222 - DNA, 15 bp, Homo sapiens
ctggggtgaatctgg

SEQ ID NO: 110223 - DNA, 15 bp, Homo sapiens
actggggtgaatctg

SEQ ID NO: 110224 - DNA, 15 bp, Homo sapiens
aactggggtgaatct

SEQ ID NO: 110225 - DNA, 15 bp, Homo sapiens
gaactggggtgaatc

SEQ ID NO: 110226 - DNA, 15 bp, Homo sapiens
tgaactggggtgaat

SEQ ID NO: 110227 - DNA, 15 bp, Homo sapiens
gtgaactggggtgaa

SEQ ID NO: 110228 - DNA, 15 bp, Homo sapiens
agtgaactggggtga

SEQ ID NO: 110229 - DNA, 15 bp, Homo sapiens
aagtgaactggggtg

SEQ ID NO: 110230 - DNA, 15 bp, Homo sapiens
caagtgaactggggt

SEQ ID NO: 110231 - DNA, 15 bp, Homo sapiens
acaagtgaactgggg

SEQ ID NO: 110232 - DNA, 15 bp, Homo sapiens
gacaagtgaactggg

SEQ ID NO: 110233 - DNA, 15 bp, Homo sapiens
ggacaagtgaactgg

SEQ ID NO: 110234 - DNA, 15 bp, Homo sapiens
gggacaagtgaactg

SEQ ID NO: 110235 - DNA, 15 bp, Homo sapiens
ggggacaagtgaact

SEQ ID NO: 110236 - DNA, 15 bp, Homo sapiens
tggggacaagtgaac

SEQ ID NO: 110237 - DNA, 15 bp, Homo sapiens
gtggggacaagtgaa

SEQ ID NO: 110238 - DNA, 15 bp, Homo sapiens
tgtggggacaagtga

SEQ ID NO: 110239 - DNA, 15 bp, Homo sapiens
gtgtggggacaagtg

SEQ ID NO: 110240 - DNA, 15 bp, Homo sapiens
cgtgtggggacaagt

SEQ ID NO: 110241 - DNA, 15 bp, Homo sapiens
tcgtgtggggacaag

SEQ ID NO: 110242 - DNA, 15 bp, Homo sapiens
ctcgtgtggggacaa

SEQ ID NO: 110243 - DNA, 15 bp, Homo sapiens
gctcgtgtggggaca

SEQ ID NO: 110244 - DNA, 15 bp, Homo sapiens
ggctcgtgtggggac

SEQ ID NO: 110245 - DNA, 15 bp, Homo sapiens
tggctcgtgtgggga

SEQ ID NO: 110246 - DNA, 15 bp, Homo sapiens
gtggctcgtgtgggg

SEQ ID NO: 110247 - DNA, 15 bp, Homo sapiens
tgtggctcgtgtggg

SEQ ID NO: 110248 - DNA, 15 bp, Homo sapiens
ctgtggctcgtgtgg

SEQ ID NO: 110249 - DNA, 15 bp, Homo sapiens
cctgtggctcgtgtg

SEQ ID NO: 110250 - DNA, 15 bp, Homo sapiens
gcctgtggctcgtgt

SEQ ID NO: 110251 - DNA, 15 bp, Homo sapiens
agcctgtggctcgtg

SEQ ID NO: 110252 - DNA, 15 bp, Homo sapiens
cagcctgtggctcgt

SEQ ID NO: 110253 - DNA, 15 bp, Homo sapiens
gcagcctgtggctcg

SEQ ID NO: 110254 - DNA, 15 bp, Homo sapiens
ggcagcctgtggctc

SEQ ID NO: 110255 - DNA, 15 bp, Homo sapiens
tggcagcctgtggct

SEQ ID NO: 110256 - DNA, 15 bp, Homo sapiens
gtggcagcctgtggc

SEQ ID NO: 110257 - DNA, 15 bp, Homo sapiens
ggtggcagcctgtgg

SEQ ID NO: 110258 - DNA, 15 bp, Homo sapiens
aggtggcagcctgtg

SEQ ID NO: 110259 - DNA, 15 bp, Homo sapiens
caggtggcagcctgt

SEQ ID NO: 110260 - DNA, 15 bp, Homo sapiens
ccaggtggcagcctg

SEQ ID NO: 110261 - DNA, 15 bp, Homo sapiens
cccaggtggcagcct

SEQ ID NO: 110262 - DNA, 15 bp, Homo sapiens
ccccaggtggcagcc

SEQ ID NO: 110263 - DNA, 15 bp, Homo sapiens
gccccaggtggcagc

SEQ ID NO: 110264 - DNA, 15 bp, Homo sapiens
tgccccaggtggcag

SEQ ID NO: 110265 - DNA, 15 bp, Homo sapiens
ctgccccaggtggca

SEQ ID NO: 110266 - DNA, 15 bp, Homo sapiens
cctgccccaggtggc

SEQ ID NO: 110267 - DNA, 15 bp, Homo sapiens
gcctgccccaggtgg

SEQ ID NO: 110268 - DNA, 15 bp, Homo sapiens
agcctgccccaggtg

SEQ ID NO: 110269 - DNA, 15 bp, Homo sapiens
cagcctgccccaggt

SEQ ID NO: 110270 - DNA, 15 bp, Homo sapiens
ccagcctgccccagg

SEQ ID NO: 110271 - DNA, 15 bp, Homo sapiens
gccagcctgccccag

SEQ ID NO: 110272 - DNA, 15 bp, Homo sapiens
ggccagcctgcccca

SEQ ID NO: 110273 - DNA, 15 bp, Homo sapiens
gggccagcctgcccc

SEQ ID NO: 110274 - DNA, 15 bp, Homo sapiens
ggggccagcctgccc

SEQ ID NO: 110275 - DNA, 15 bp, Homo sapiens
tggggccagcctgcc

SEQ ID NO: 110276 - DNA, 15 bp, Homo sapiens
gtggggccagcctgc

SEQ ID NO: 110277 - DNA, 15 bp, Homo sapiens
ggtggggccagcctg

SEQ ID NO: 110278 - DNA, 15 bp, Homo sapiens
aggtggggccagcct

SEQ ID NO: 110279 - DNA, 15 bp, Homo sapiens
aaggtggggccagcc

SEQ ID NO: 110280 - DNA, 15 bp, Homo sapiens
caaggtggggccagc

SEQ ID NO: 110281 - DNA, 15 bp, Homo sapiens
ccaaggtggggccag

SEQ ID NO: 110282 - DNA, 15 bp, Homo sapiens
cccaaggtggggcca

SEQ ID NO: 110283 - DNA, 15 bp, Homo sapiens
ccccaaggtggggcc

SEQ ID NO: 110284 - DNA, 15 bp, Homo sapiens
accccaaggtggggc

SEQ ID NO: 110285 - DNA, 15 bp, Homo sapiens
aaccccaaggtgggg

SEQ ID NO: 110286 - DNA, 15 bp, Homo sapiens
taaccccaaggtggg

SEQ ID NO: 110287 - DNA, 15 bp, Homo sapiens
ctaaccccaaggtgg

SEQ ID NO: 110288 - DNA, 15 bp, Homo sapiens
tctaaccccaaggtg

SEQ ID NO: 110289 - DNA, 15 bp, Homo sapiens
atctaaccccaaggt

SEQ ID NO: 110290 - DNA, 15 bp, Homo sapiens
catctaaccccaagg

SEQ ID NO: 110291 - DNA, 15 bp, Homo sapiens
gcatctaaccccaag

SEQ ID NO: 110292 - DNA, 15 bp, Homo sapiens
tgcatctaaccccaa

SEQ ID NO: 110293 - DNA, 15 bp, Homo sapiens
ctgcatctaacccca

SEQ ID NO: 110294 - DNA, 15 bp, Homo sapiens
cctgcatctaacccc

SEQ ID NO: 110295 - DNA, 15 bp, Homo sapiens
acctgcatctaaccc

SEQ ID NO: 110296 - DNA, 15 bp, Homo sapiens
gacctgcatctaacc

SEQ ID NO: 110297 - DNA, 15 bp, Homo sapiens
ggacctgcatctaac

SEQ ID NO: 110298 - DNA, 15 bp, Homo sapiens
gggacctgcatctaa

SEQ ID NO: 110299 - DNA, 15 bp, Homo sapiens
ggggacctgcatcta

SEQ ID NO: 110300 - DNA, 15 bp, Homo sapiens
aggggacctgcatct

SEQ ID NO: 110301 - DNA, 15 bp, Homo sapiens
aaggggacctgcatc

SEQ ID NO: 110302 - DNA, 15 bp, Homo sapiens
caaggggacctgcat

SEQ ID NO: 110303 - DNA, 15 bp, Homo sapiens
gcaaggggacctgca

SEQ ID NO: 110304 - DNA, 15 bp, Homo sapiens
ggcaaggggacctgc

SEQ ID NO: 110305 - DNA, 15 bp, Homo sapiens
gggcaaggggacctg

SEQ ID NO: 110306 - DNA, 15 bp, Homo sapiens
ggggcaaggggacct

SEQ ID NO: 110307 - DNA, 15 bp, Homo sapiens
tggggcaaggggacc

SEQ ID NO: 110308 - DNA, 15 bp, Homo sapiens
ctggggcaaggggac

SEQ ID NO: 110309 - DNA, 15 bp, Homo sapiens
tctggggcaagggga

SEQ ID NO: 110310 - DNA, 15 bp, Homo sapiens
ttctggggcaagggg

SEQ ID NO: 110311 - DNA, 15 bp, Homo sapiens
cttctggggcaaggg

SEQ ID NO: 110312 - DNA, 15 bp, Homo sapiens
ccttctggggcaagg

SEQ ID NO: 110313 - DNA, 15 bp, Homo sapiens
tccttctggggcaag

SEQ ID NO: 110314 - DNA, 15 bp, Homo sapiens
ctccttctggggcaa

SEQ ID NO: 110315 - DNA, 15 bp, Homo sapiens
tctccttctggggca

SEQ ID NO: 110316 - DNA, 15 bp, Homo sapiens
gtctccttctggggc

SEQ ID NO: 110317 - DNA, 15 bp, Homo sapiens
agtctccttctgggg

SEQ ID NO: 110318 - DNA, 15 bp, Homo sapiens
cagtctccttctggg

SEQ ID NO: 110319 - DNA, 15 bp, Homo sapiens
gcagtctccttctgg

SEQ ID NO: 110320 - DNA, 15 bp, Homo sapiens
tgcagtctccttctg

SEQ ID NO: 110321 - DNA, 15 bp, Homo sapiens
ctgcagtctccttct

SEQ ID NO: 110322 - DNA, 15 bp, Homo sapiens
gctgcagtctccttc

SEQ ID NO: 110323 - DNA, 15 bp, Homo sapiens
ggctgcagtctcctt

SEQ ID NO: 110324 - DNA, 15 bp, Homo sapiens
gggctgcagtctcct

SEQ ID NO: 110325 - DNA, 15 bp, Homo sapiens
ggggctgcagtctcc

SEQ ID NO: 110326 - DNA, 15 bp, Homo sapiens
aggggctgcagtctc

SEQ ID NO: 110327 - DNA, 15 bp, Homo sapiens
caggggctgcagtct

SEQ ID NO: 110328 - DNA, 15 bp, Homo sapiens
gcaggggctgcagtc

SEQ ID NO: 110329 - DNA, 15 bp, Homo sapiens
tgcaggggctgcagt

SEQ ID NO: 110330 - DNA, 15 bp, Homo sapiens
ctgcaggggctgcag

SEQ ID NO: 110331 - DNA, 15 bp, Homo sapiens
tctgcaggggctgca

SEQ ID NO: 110332 - DNA, 15 bp, Homo sapiens
gtctgcaggggctgc

SEQ ID NO: 110333 - DNA, 15 bp, Homo sapiens
ggtctgcaggggctg

SEQ ID NO: 110334 - DNA, 15 bp, Homo sapiens
aggtctgcaggggct

SEQ ID NO: 110335 - DNA, 15 bp, Homo sapiens
taggtctgcaggggc

SEQ ID NO: 110336 - DNA, 15 bp, Homo sapiens
ctaggtctgcagggg

SEQ ID NO: 110337 - DNA, 15 bp, Homo sapiens
tctaggtctgcaggg

SEQ ID NO: 110338 - DNA, 15 bp, Homo sapiens
ttctaggtctgcagg

SEQ ID NO: 110339 - DNA, 15 bp, Homo sapiens
tttctaggtctgcag

SEQ ID NO: 110340 - DNA, 15 bp, Homo sapiens
atttctaggtctgca

SEQ ID NO: 110341 - DNA, 15 bp, Homo sapiens
catttctaggtctgc

SEQ ID NO: 110342 - DNA, 15 bp, Homo sapiens
ccatttctaggtctg

SEQ ID NO: 110343 - DNA, 15 bp, Homo sapiens
gccatttctaggtct

SEQ ID NO: 110344 - DNA, 15 bp, Homo sapiens
ggccatttctaggtc

SEQ ID NO: 110345 - DNA, 15 bp, Homo sapiens
tggccatttctaggt

SEQ ID NO: 110346 - DNA, 15 bp, Homo sapiens
gtggccatttctagg

SEQ ID NO: 110347 - DNA, 15 bp, Homo sapiens
tgtggccatttctag

SEQ ID NO: 110348 - DNA, 15 bp, Homo sapiens
ctgtggccatttcta

SEQ ID NO: 110349 - DNA, 15 bp, Homo sapiens
gctgtggccatttct

SEQ ID NO: 110350 - DNA, 15 bp, Homo sapiens
ggctgtggccatttc

SEQ ID NO: 110351 - DNA, 15 bp, Homo sapiens
gggctgtggccattt

SEQ ID NO: 110352 - DNA, 15 bp, Homo sapiens
tgggctgtggccatt

SEQ ID NO: 110353 - DNA, 15 bp, Homo sapiens
atgggctgtggccat

SEQ ID NO: 110354 - DNA, 15 bp, Homo sapiens
gatgggctgtggcca

SEQ ID NO: 110355 - DNA, 15 bp, Homo sapiens
ggatgggctgtggcc

SEQ ID NO: 110356 - DNA, 15 bp, Homo sapiens
gggatgggctgtggc

SEQ ID NO: 110357 - DNA, 15 bp, Homo sapiens
ggggatgggctgtgg

SEQ ID NO: 110358 - DNA, 15 bp, Homo sapiens
tggggatgggctgtg

SEQ ID NO: 110359 - DNA, 15 bp, Homo sapiens
atggggatgggctgt

SEQ ID NO: 110360 - DNA, 15 bp, Homo sapiens
catggggatgggctg

SEQ ID NO: 110361 - DNA, 15 bp, Homo sapiens
gcatggggatgggct

SEQ ID NO: 110362 - DNA, 15 bp, Homo sapiens
tgcatggggatgggc

SEQ ID NO: 110363 - DNA, 15 bp, Homo sapiens
gtgcatggggatggg

SEQ ID NO: 110364 - DNA, 15 bp, Homo sapiens
ggtgcatggggatgg

SEQ ID NO: 110365 - DNA, 15 bp, Homo sapiens
tggtgcatggggatg

SEQ ID NO: 110366 - DNA, 15 bp, Homo sapiens
ctggtgcatggggat

SEQ ID NO: 110367 - DNA, 15 bp, Homo sapiens
cctggtgcatgggga

SEQ ID NO: 110368 - DNA, 15 bp, Homo sapiens
ccctggtgcatgggg

SEQ ID NO: 110369 - DNA, 15 bp, Homo sapiens
cccctggtgcatggg

SEQ ID NO: 110370 - DNA, 15 bp, Homo sapiens
ccccctggtgcatgg

SEQ ID NO: 110371 - DNA, 15 bp, Homo sapiens
accccctggtgcatg

SEQ ID NO: 110372 - DNA, 15 bp, Homo sapiens
caccccctggtgcat

SEQ ID NO: 110373 - DNA, 15 bp, Homo sapiens
tcaccccctggtgca

SEQ ID NO: 110374 - DNA, 15 bp, Homo sapiens
ctcaccccctggtgc

SEQ ID NO: 110375 - DNA, 15 bp, Homo sapiens
cctcaccccctggtg

SEQ ID NO: 110376 - DNA, 15 bp, Homo sapiens
acctcaccccctggt

SEQ ID NO: 110377 - DNA, 15 bp, Homo sapiens
cacctcaccccctgg

SEQ ID NO: 110378 - DNA, 15 bp, Homo sapiens
ccacctcaccccctg

SEQ ID NO: 110379 - DNA, 15 bp, Homo sapiens
gccacctcaccccct

SEQ ID NO: 110380 - DNA, 15 bp, Homo sapiens
tgccacctcaccccc

SEQ ID NO: 110381 - DNA, 15 bp, Homo sapiens
ctgccacctcacccc

SEQ ID NO: 110382 - DNA, 15 bp, Homo sapiens
cctgccacctcaccc

SEQ ID NO: 110383 - DNA, 15 bp, Homo sapiens
acctgccacctcacc

SEQ ID NO: 110384 - DNA, 15 bp, Homo sapiens
cacctgccacctcac

SEQ ID NO: 110385 - DNA, 15 bp, Homo sapiens
ccacctgccacctca

SEQ ID NO: 110386 - DNA, 15 bp, Homo sapiens
accacctgccacctc

SEQ ID NO: 110387 - DNA, 15 bp, Homo sapiens
caccacctgccacct

SEQ ID NO: 110388 - DNA, 15 bp, Homo sapiens
ccaccacctgccacc

SEQ ID NO: 110389 - DNA, 15 bp, Homo sapiens
tccaccacctgccac

SEQ ID NO: 110390 - DNA, 15 bp, Homo sapiens
ttccaccacctgcca

SEQ ID NO: 110391 - DNA, 15 bp, Homo sapiens
tttccaccacctgcc

SEQ ID NO: 110392 - DNA, 15 bp, Homo sapiens
ctttccaccacctgc

SEQ ID NO: 110393 - DNA, 15 bp, Homo sapiens
cctttccaccacctg

SEQ ID NO: 110394 - DNA, 15 bp, Homo sapiens
ccctttccaccacct

SEQ ID NO: 110395 - DNA, 15 bp, Homo sapiens
gccctttccaccacc

SEQ ID NO: 110396 - DNA, 15 bp, Homo sapiens
ggccctttccaccac

SEQ ID NO: 110397 - DNA, 15 bp, Homo sapiens
aggccctttccacca

SEQ ID NO: 110398 - DNA, 15 bp, Homo sapiens
caggccctttccacc

SEQ ID NO: 110399 - DNA, 15 bp, Homo sapiens
tcaggccctttccac

SEQ ID NO: 110400 - DNA, 15 bp, Homo sapiens
ctcaggccctttcca

SEQ ID NO: 110401 - DNA, 15 bp, Homo sapiens
cctcaggccctttcc

SEQ ID NO: 110402 - DNA, 15 bp, Homo sapiens
ccctcaggccctttc

SEQ ID NO: 110403 - DNA, 15 bp, Homo sapiens
cccctcaggcccttt

SEQ ID NO: 110404 - DNA, 15 bp, Homo sapiens
ccccctcaggccctt

SEQ ID NO: 110405 - DNA, 15 bp, Homo sapiens
cccccctcaggccct

SEQ ID NO: 110406 - DNA, 15 bp, Homo sapiens
gcccccctcaggccc

SEQ ID NO: 110407 - DNA, 15 bp, Homo sapiens
agcccccctcaggcc

SEQ ID NO: 110408 - DNA, 15 bp, Homo sapiens
aagcccccctcaggc

SEQ ID NO: 110409 - DNA, 15 bp, Homo sapiens
gaagcccccctcagg

SEQ ID NO: 110410 - DNA, 15 bp, Homo sapiens
agaagcccccctcag

SEQ ID NO: 110411 - DNA, 15 bp, Homo sapiens
aagaagcccccctca

SEQ ID NO: 110412 - DNA, 15 bp, Homo sapiens
gaagaagcccccctc

SEQ ID NO: 110413 - DNA, 15 bp, Homo sapiens
ggaagaagcccccct

SEQ ID NO: 110414 - DNA, 15 bp, Homo sapiens
aggaagaagcccccc

SEQ ID NO: 110415 - DNA, 15 bp, Homo sapiens
aaggaagaagccccc

SEQ ID NO: 110416 - DNA, 15 bp, Homo sapiens
gaaggaagaagcccc

SEQ ID NO: 110417 - DNA, 15 bp, Homo sapiens
ggaaggaagaagccc

SEQ ID NO: 110418 - DNA, 15 bp, Homo sapiens
tggaaggaagaagcc

SEQ ID NO: 110419 - DNA, 15 bp, Homo sapiens
ctggaaggaagaagc

SEQ ID NO: 110420 - DNA, 15 bp, Homo sapiens
cctggaaggaagaag

SEQ ID NO: 110421 - DNA, 15 bp, Homo sapiens
gcctggaaggaagaa

SEQ ID NO: 110422 - DNA, 15 bp, Homo sapiens
cgcctggaaggaaga

SEQ ID NO: 110423 - DNA, 15 bp, Homo sapiens
tcgcctggaaggaag

SEQ ID NO: 110424 - DNA, 15 bp, Homo sapiens
ctcgcctggaaggaa

SEQ ID NO: 110425 - DNA, 15 bp, Homo sapiens
gctcgcctggaagga

SEQ ID NO: 110426 - DNA, 15 bp, Homo sapiens
tgctcgcctggaagg

SEQ ID NO: 110427 - DNA, 15 bp, Homo sapiens
gtgctcgcctggaag

SEQ ID NO: 110428 - DNA, 15 bp, Homo sapiens
cgtgctcgcctggaa

SEQ ID NO: 110429 - DNA, 15 bp, Homo sapiens
tcgtgctcgcctgga

SEQ ID NO: 110430 - DNA, 15 bp, Homo sapiens
gtcgtgctcgcctgg

SEQ ID NO: 110431 - DNA, 15 bp, Homo sapiens
ggtcgtgctcgcctg

SEQ ID NO: 110432 - DNA, 15 bp, Homo sapiens
aggtcgtgctcgcct

SEQ ID NO: 110433 - DNA, 15 bp, Homo sapiens
gaggtcgtgctcgcc

SEQ ID NO: 110434 - DNA, 15 bp, Homo sapiens
tgaggtcgtgctcgc

SEQ ID NO: 110435 - DNA, 15 bp, Homo sapiens
ctgaggtcgtgctcg

SEQ ID NO: 110436 - DNA, 15 bp, Homo sapiens
gctgaggtcgtgctc

SEQ ID NO: 110437 - DNA, 15 bp, Homo sapiens
cgctgaggtcgtgct

SEQ ID NO: 110438 - DNA, 15 bp, Homo sapiens
tcgctgaggtcgtgc

SEQ ID NO: 110439 - DNA, 15 bp, Homo sapiens
ctcgctgaggtcgtg

SEQ ID NO: 110440 - DNA, 15 bp, Homo sapiens
gctcgctgaggtcgt

SEQ ID NO: 110441 - DNA, 15 bp, Homo sapiens
tgctcgctgaggtcg

SEQ ID NO: 110442 - DNA, 15 bp, Homo sapiens
gtgctcgctgaggtc

SEQ ID NO: 110443 - DNA, 15 bp, Homo sapiens
cgtgctcgctgaggt

SEQ ID NO: 110444 - DNA, 15 bp, Homo sapiens
tcgtgctcgctgagg

SEQ ID NO: 110445 - DNA, 15 bp, Homo sapiens
gtcgtgctcgctgag

SEQ ID NO: 110446 - DNA, 15 bp, Homo sapiens
cgtcgtgctcgctga

SEQ ID NO: 110447 - DNA, 15 bp, Homo sapiens
ccgtcgtgctcgctg

SEQ ID NO: 110448 - DNA, 15 bp, Homo sapiens
cccgtcgtgctcgct

SEQ ID NO: 110449 - DNA, 15 bp, Homo sapiens
ccccgtcgtgctcgc

SEQ ID NO: 110450 - DNA, 15 bp, Homo sapiens
tccccgtcgtgctcg

SEQ ID NO: 110451 - DNA, 15 bp, Homo sapiens
atccccgtcgtgctc

SEQ ID NO: 110452 - DNA, 15 bp, Homo sapiens
catccccgtcgtgct

SEQ ID NO: 110453 - DNA, 15 bp, Homo sapiens
tcatccccgtcgtgc

SEQ ID NO: 110454 - DNA, 15 bp, Homo sapiens
ctcatccccgtcgtg

SEQ ID NO: 110455 - DNA, 15 bp, Homo sapiens
gctcatccccgtcgt

SEQ ID NO: 110456 - DNA, 15 bp, Homo sapiens
tgctcatccccgtcg

SEQ ID NO: 110457 - DNA, 15 bp, Homo sapiens
ctgctcatccccgtc

SEQ ID NO: 110458 - DNA, 15 bp, Homo sapiens
tctgctcatccccgt

SEQ ID NO: 110459 - DNA, 15 bp, Homo sapiens
ctctgctcatccccg

SEQ ID NO: 110460 - DNA, 15 bp, Homo sapiens
gctctgctcatcccc

SEQ ID NO: 110461 - DNA, 15 bp, Homo sapiens
ggctctgctcatccc

SEQ ID NO: 110462 - DNA, 15 bp, Homo sapiens
cggctctgctcatcc

SEQ ID NO: 110463 - DNA, 15 bp, Homo sapiens
ccggctctgctcatc

SEQ ID NO: 110464 - DNA, 15 bp, Homo sapiens
gccggctctgctcat

SEQ ID NO: 110465 - DNA, 15 bp, Homo sapiens
cgccggctctgctca

SEQ ID NO: 110466 - DNA, 15 bp, Homo sapiens
ccgccggctctgctc

SEQ ID NO: 110467 - DNA, 15 bp, Homo sapiens
cccgccggctctgct

SEQ ID NO: 110468 - DNA, 15 bp, Homo sapiens
acccgccggctctgc

SEQ ID NO: 110469 - DNA, 15 bp, Homo sapiens
cacccgccggctctg

SEQ ID NO: 110470 - DNA, 15 bp, Homo sapiens
ccacccgccggctct

SEQ ID NO: 110471 - DNA, 15 bp, Homo sapiens
gccacccgccggctc

SEQ ID NO: 110472 - DNA, 15 bp, Homo sapiens
cgccacccgccggct

SEQ ID NO: 110473 - DNA, 15 bp, Homo sapiens
gcgccacccgccggc

SEQ ID NO: 110474 - DNA, 15 bp, Homo sapiens
tgcgccacccgccgg

SEQ ID NO: 110475 - DNA, 15 bp, Homo sapiens
ctgcgccacccgccg

SEQ ID NO: 110476 - DNA, 15 bp, Homo sapiens
cctgcgccacccgcc

SEQ ID NO: 110477 - DNA, 15 bp, Homo sapiens
acctgcgccacccgc

SEQ ID NO: 110478 - DNA, 15 bp, Homo sapiens
gacctgcgccacccg

SEQ ID NO: 110479 - DNA, 15 bp, Homo sapiens
tgacctgcgccaccc

SEQ ID NO: 110480 - DNA, 15 bp, Homo sapiens
atgacctgcgccacc

SEQ ID NO: 110481 - DNA, 15 bp, Homo sapiens
gatgacctgcgccac

SEQ ID NO: 110482 - DNA, 15 bp, Homo sapiens
tgatgacctgcgcca

SEQ ID NO: 110483 - DNA, 15 bp, Homo sapiens
atgatgacctgcgcc

SEQ ID NO: 110484 - DNA, 15 bp, Homo sapiens
gatgatgacctgcgc

SEQ ID NO: 110485 - DNA, 15 bp, Homo sapiens
ggatgatgacctgcg

SEQ ID NO: 110486 - DNA, 15 bp, Homo sapiens
gggatgatgacctgc

SEQ ID NO: 110487 - DNA, 15 bp, Homo sapiens
ggggatgatgacctg

SEQ ID NO: 110488 - DNA, 15 bp, Homo sapiens
tggggatgatgacct

SEQ ID NO: 110489 - DNA, 15 bp, Homo sapiens
ctggggatgatgacc

SEQ ID NO: 110490 - DNA, 15 bp, Homo sapiens
gctggggatgatgac

SEQ ID NO: 110491 - DNA, 15 bp, Homo sapiens
tgctggggatgatga

SEQ ID NO: 110492 - DNA, 15 bp, Homo sapiens
gtgctggggatgatg

SEQ ID NO: 110493 - DNA, 15 bp, Homo sapiens
cgtgctggggatgat

SEQ ID NO: 110494 - DNA, 15 bp, Homo sapiens
acgtgctggggatga

SEQ ID NO: 110495 - DNA, 15 bp, Homo sapiens
tacgtgctggggatg

SEQ ID NO: 110496 - DNA, 15 bp, Homo sapiens
gtacgtgctggggat

SEQ ID NO: 110497 - DNA, 15 bp, Homo sapiens
cgtacgtgctgggga

SEQ ID NO: 110498 - DNA, 15 bp, Homo sapiens
acgtacgtgctgggg

SEQ ID NO: 110499 - DNA, 15 bp, Homo sapiens
gacgtacgtgctggg

SEQ ID NO: 110500 - DNA, 15 bp, Homo sapiens
ggacgtacgtgctgg

SEQ ID NO: 110501 - DNA, 15 bp, Homo sapiens
gggacgtacgtgctg

SEQ ID NO: 110502 - DNA, 15 bp, Homo sapiens
cgggacgtacgtgct

SEQ ID NO: 110503 - DNA, 15 bp, Homo sapiens
ccgggacgtacgtgc

SEQ ID NO: 110504 - DNA, 15 bp, Homo sapiens
cccgggacgtacgtg

SEQ ID NO: 110505 - DNA, 15 bp, Homo sapiens
gcccgggacgtacgt

SEQ ID NO: 110506 - DNA, 15 bp, Homo sapiens
tgcccgggacgtacg

SEQ ID NO: 110507 - DNA, 15 bp, Homo sapiens
gtgcccgggacgtac

SEQ ID NO: 110508 - DNA, 15 bp, Homo sapiens
ggtgcccgggacgta

SEQ ID NO: 110509 - DNA, 15 bp, Homo sapiens
tggtgcccgggacgt

SEQ ID NO: 110510 - DNA, 15 bp, Homo sapiens
gtggtgcccgggacg

SEQ ID NO: 110511 - DNA, 15 bp, Homo sapiens
ggtggtgcccgggac

SEQ ID NO: 110512 - DNA, 15 bp, Homo sapiens
tggtggtgcccggga

SEQ ID NO: 110513 - DNA, 15 bp, Homo sapiens
ttggtggtgcccggg

SEQ ID NO: 110514 - DNA, 15 bp, Homo sapiens
gttggtggtgcccgg

SEQ ID NO: 110515 - DNA, 15 bp, Homo sapiens
ggttggtggtgcccg

SEQ ID NO: 110516 - DNA, 15 bp, Homo sapiens
tggttggtggtgccc

SEQ ID NO: 110517 - DNA, 15 bp, Homo sapiens
gtggttggtggtgcc

SEQ ID NO: 110518 - DNA, 15 bp, Homo sapiens
cgtggttggtggtgc

SEQ ID NO: 110519 - DNA, 15 bp, Homo sapiens
tcgtggttggtggtg

SEQ ID NO: 110520 - DNA, 15 bp, Homo sapiens
gtcgtggttggtggt

SEQ ID NO: 110521 - DNA, 15 bp, Homo sapiens
tgtcgtggttggtgg

SEQ ID NO: 110522 - DNA, 15 bp, Homo sapiens
atgtcgtggttggtg

SEQ ID NO: 110523 - DNA, 15 bp, Homo sapiens
gatgtcgtggttggt

SEQ ID NO: 110524 - DNA, 15 bp, Homo sapiens
cgatgtcgtggttgg

SEQ ID NO: 110525 - DNA, 15 bp, Homo sapiens
gcgatgtcgtggttg

SEQ ID NO: 110526 - DNA, 15 bp, Homo sapiens
cgcgatgtcgtggtt

SEQ ID NO: 110527 - DNA, 15 bp, Homo sapiens
gcgcgatgtcgtggt

SEQ ID NO: 110528 - DNA, 15 bp, Homo sapiens
agcgcgatgtcgtgg

SEQ ID NO: 110529 - DNA, 15 bp, Homo sapiens
cagcgcgatgtcgtg

SEQ ID NO: 110530 - DNA, 15 bp, Homo sapiens
gcagcgcgatgtcgt

SEQ ID NO: 110531 - DNA, 15 bp, Homo sapiens
agcagcgcgatgtcg

SEQ ID NO: 110532 - DNA, 15 bp, Homo sapiens
gagcagcgcgatgtc

SEQ ID NO: 110533 - DNA, 15 bp, Homo sapiens
ggagcagcgcgatgt

SEQ ID NO: 110534 - DNA, 15 bp, Homo sapiens
cggagcagcgcgatg

SEQ ID NO: 110535 - DNA, 15 bp, Homo sapiens
gcggagcagcgcgat

SEQ ID NO: 110536 - DNA, 15 bp, Homo sapiens
ggcggagcagcgcga

SEQ ID NO: 110537 - DNA, 15 bp, Homo sapiens
aggcggagcagcgcg

SEQ ID NO: 110538 - DNA, 15 bp, Homo sapiens
caggcggagcagcgc

SEQ ID NO: 110539 - DNA, 15 bp, Homo sapiens
gcaggcggagcagcg

SEQ ID NO: 110540 - DNA, 15 bp, Homo sapiens
tgcaggcggagcagc

SEQ ID NO: 110541 - DNA, 15 bp, Homo sapiens
gtgcaggcggagcag

SEQ ID NO: 110542 - DNA, 15 bp, Homo sapiens
ggtgcaggcggagca

SEQ ID NO: 110543 - DNA, 15 bp, Homo sapiens
tggtgcaggcggagc

SEQ ID NO: 110544 - DNA, 15 bp, Homo sapiens
ctggtgcaggcggag

SEQ ID NO: 110545 - DNA, 15 bp, Homo sapiens
gctggtgcaggcgga

SEQ ID NO: 110546 - DNA, 15 bp, Homo sapiens
ggctggtgcaggcgg

SEQ ID NO: 110547 - DNA, 15 bp, Homo sapiens
gggctggtgcaggcg

SEQ ID NO: 110548 - DNA, 15 bp, Homo sapiens
cgggctggtgcaggc

SEQ ID NO: 110549 - DNA, 15 bp, Homo sapiens
acgggctggtgcagg

SEQ ID NO: 110550 - DNA, 15 bp, Homo sapiens
cacgggctggtgcag

SEQ ID NO: 110551 - DNA, 15 bp, Homo sapiens
ccacgggctggtgca

SEQ ID NO: 110552 - DNA, 15 bp, Homo sapiens
accacgggctggtgc

SEQ ID NO: 110553 - DNA, 15 bp, Homo sapiens
gaccacgggctggtg

SEQ ID NO: 110554 - DNA, 15 bp, Homo sapiens
ggaccacgggctggt

SEQ ID NO: 110555 - DNA, 15 bp, Homo sapiens
aggaccacgggctgg

SEQ ID NO: 110556 - DNA, 15 bp, Homo sapiens
gaggaccacgggctg

SEQ ID NO: 110557 - DNA, 15 bp, Homo sapiens
tgaggaccacgggct

SEQ ID NO: 110558 - DNA, 15 bp, Homo sapiens
gtgaggaccacgggc

SEQ ID NO: 110559 - DNA, 15 bp, Homo sapiens
agtgaggaccacggg

SEQ ID NO: 110560 - DNA, 15 bp, Homo sapiens
cagtgaggaccacgg

SEQ ID NO: 110561 - DNA, 15 bp, Homo sapiens
tcagtgaggaccacg

SEQ ID NO: 110562 - DNA, 15 bp, Homo sapiens
gtcagtgaggaccac

SEQ ID NO: 110563 - DNA, 15 bp, Homo sapiens
ggtcagtgaggacca

SEQ ID NO: 110564 - DNA, 15 bp, Homo sapiens
tggtcagtgaggacc

SEQ ID NO: 110565 - DNA, 15 bp, Homo sapiens
atggtcagtgaggac

SEQ ID NO: 110566 - DNA, 15 bp, Homo sapiens
catggtcagtgagga

SEQ ID NO: 110567 - DNA, 15 bp, Homo sapiens
acatggtcagtgagg

SEQ ID NO: 110568 - DNA, 15 bp, Homo sapiens
cacatggtcagtgag

SEQ ID NO: 110569 - DNA, 15 bp, Homo sapiens
ccacatggtcagtga

SEQ ID NO: 110570 - DNA, 15 bp, Homo sapiens
accacatggtcagtg

SEQ ID NO: 110571 - DNA, 15 bp, Homo sapiens
caccacatggtcagt

SEQ ID NO: 110572 - DNA, 15 bp, Homo sapiens
gcaccacatggtcag

SEQ ID NO: 110573 - DNA, 15 bp, Homo sapiens
ggcaccacatggtca

SEQ ID NO: 110574 - DNA, 15 bp, Homo sapiens
gggcaccacatggtc

SEQ ID NO: 110575 - DNA, 15 bp, Homo sapiens
ggggcaccacatggt

SEQ ID NO: 110576 - DNA, 15 bp, Homo sapiens
aggggcaccacatgg

SEQ ID NO: 110577 - DNA, 15 bp, Homo sapiens
gaggggcaccacatg

SEQ ID NO: 110578 - DNA, 15 bp, Homo sapiens
agaggggcaccacat

SEQ ID NO: 110579 - DNA, 15 bp, Homo sapiens
cagaggggcaccaca

SEQ ID NO: 110580 - DNA, 15 bp, Homo sapiens
gcagaggggcaccac

SEQ ID NO: 110581 - DNA, 15 bp, Homo sapiens
ggcagaggggcacca

SEQ ID NO: 110582 - DNA, 15 bp, Homo sapiens
aggcagaggggcacc

SEQ ID NO: 110583 - DNA, 15 bp, Homo sapiens
caggcagaggggcac

SEQ ID NO: 110584 - DNA, 15 bp, Homo sapiens
gcaggcagaggggca

SEQ ID NO: 110585 - DNA, 15 bp, Homo sapiens
ggcaggcagaggggc

SEQ ID NO: 110586 - DNA, 15 bp, Homo sapiens
gggcaggcagagggg

SEQ ID NO: 110587 - DNA, 15 bp, Homo sapiens
cgggcaggcagaggg

SEQ ID NO: 110588 - DNA, 15 bp, Homo sapiens
tcgggcaggcagagg

SEQ ID NO: 110589 - DNA, 15 bp, Homo sapiens
ttcgggcaggcagag

SEQ ID NO: 110590 - DNA, 15 bp, Homo sapiens
gttcgggcaggcaga

SEQ ID NO: 110591 - DNA, 15 bp, Homo sapiens
cgttcgggcaggcag

SEQ ID NO: 110592 - DNA, 15 bp, Homo sapiens
ccgttcgggcaggca

SEQ ID NO: 110593 - DNA, 15 bp, Homo sapiens
tccgttcgggcaggc

SEQ ID NO: 110594 - DNA, 15 bp, Homo sapiens
gtccgttcgggcagg

SEQ ID NO: 110595 - DNA, 15 bp, Homo sapiens
cgtccgttcgggcag

SEQ ID NO: 110596 - DNA, 15 bp, Homo sapiens
acgtccgttcgggca

SEQ ID NO: 110597 - DNA, 15 bp, Homo sapiens
aacgtccgttcgggc

SEQ ID NO: 110598 - DNA, 15 bp, Homo sapiens
gaacgtccgttcggg

SEQ ID NO: 110599 - DNA, 15 bp, Homo sapiens
agaacgtccgttcgg

SEQ ID NO: 110600 - DNA, 15 bp, Homo sapiens
gagaacgtccgttcg

SEQ ID NO: 110601 - DNA, 15 bp, Homo sapiens
agagaacgtccgttc

SEQ ID NO: 110602 - DNA, 15 bp, Homo sapiens
cagagaacgtccgtt

SEQ ID NO: 110603 - DNA, 15 bp, Homo sapiens
tcagagaacgtccgt

SEQ ID NO: 110604 - DNA, 15 bp, Homo sapiens
ctcagagaacgtccg

SEQ ID NO: 110605 - DNA, 15 bp, Homo sapiens
tctcagagaacgtcc

SEQ ID NO: 110606 - DNA, 15 bp, Homo sapiens
ctctcagagaacgtc

SEQ ID NO: 110607 - DNA, 15 bp, Homo sapiens
cctctcagagaacgt

SEQ ID NO: 110608 - DNA, 15 bp, Homo sapiens
tcctctcagagaacg

SEQ ID NO: 110609 - DNA, 15 bp, Homo sapiens
gtcctctcagagaac

SEQ ID NO: 110610 - DNA, 15 bp, Homo sapiens
cgtcctctcagagaa

SEQ ID NO: 110611 - DNA, 15 bp, Homo sapiens
gcgtcctctcagaga

SEQ ID NO: 110612 - DNA, 15 bp, Homo sapiens
agcgtcctctcagag

SEQ ID NO: 110613 - DNA, 15 bp, Homo sapiens
cagcgtcctctcaga

SEQ ID NO: 110614 - DNA, 15 bp, Homo sapiens
ccagcgtcctctcag

SEQ ID NO: 110615 - DNA, 15 bp, Homo sapiens
gccagcgtcctctca

SEQ ID NO: 110616 - DNA, 15 bp, Homo sapiens
ggccagcgtcctctc

SEQ ID NO: 110617 - DNA, 15 bp, Homo sapiens
aggccagcgtcctct

SEQ ID NO: 110618 - DNA, 15 bp, Homo sapiens
aaggccagcgtcctc

SEQ ID NO: 110619 - DNA, 15 bp, Homo sapiens
gaaggccagcgtcct

SEQ ID NO: 110620 - DNA, 15 bp, Homo sapiens
cgaaggccagcgtcc

SEQ ID NO: 110621 - DNA, 15 bp, Homo sapiens
acgaaggccagcgtc

SEQ ID NO: 110622 - DNA, 15 bp, Homo sapiens
cacgaaggccagcgt

SEQ ID NO: 110623 - DNA, 15 bp, Homo sapiens
gcacgaaggccagcg

SEQ ID NO: 110624 - DNA, 15 bp, Homo sapiens
cgcacgaaggccagc

SEQ ID NO: 110625 - DNA, 15 bp, Homo sapiens
gcgcacgaaggccag

SEQ ID NO: 110626 - DNA, 15 bp, Homo sapiens
agcgcacgaaggcca

SEQ ID NO: 110627 - DNA, 15 bp, Homo sapiens
aagcgcacgaaggcc

SEQ ID NO: 110628 - DNA, 15 bp, Homo sapiens
gaagcgcacgaaggc

SEQ ID NO: 110629 - DNA, 15 bp, Homo sapiens
agaagcgcacgaagg

SEQ ID NO: 110630 - DNA, 15 bp, Homo sapiens
gagaagcgcacgaag

SEQ ID NO: 110631 - DNA, 15 bp, Homo sapiens
tgagaagcgcacgaa

SEQ ID NO: 110632 - DNA, 15 bp, Homo sapiens
atgagaagcgcacga

SEQ ID NO: 110633 - DNA, 15 bp, Homo sapiens
aatgagaagcgcacg

SEQ ID NO: 110634 - DNA, 15 bp, Homo sapiens
caatgagaagcgcac

SEQ ID NO: 110635 - DNA, 15 bp, Homo sapiens
ccaatgagaagcgca

SEQ ID NO: 110636 - DNA, 15 bp, Homo sapiens
accaatgagaagcgc

SEQ ID NO: 110637 - DNA, 15 bp, Homo sapiens
gaccaatgagaagcg

SEQ ID NO: 110638 - DNA, 15 bp, Homo sapiens
tgaccaatgagaagc

SEQ ID NO: 110639 - DNA, 15 bp, Homo sapiens
ctgaccaatgagaag

SEQ ID NO: 110640 - DNA, 15 bp, Homo sapiens
gctgaccaatgagaa

SEQ ID NO: 110641 - DNA, 15 bp, Homo sapiens
cgctgaccaatgaga

SEQ ID NO: 110642 - DNA, 15 bp, Homo sapiens
ccgctgaccaatgag

SEQ ID NO: 110643 - DNA, 15 bp, Homo sapiens
gccgctgaccaatga

SEQ ID NO: 110644 - DNA, 15 bp, Homo sapiens
agccgctgaccaatg

SEQ ID NO: 110645 - DNA, 15 bp, Homo sapiens
cagccgctgaccaat

SEQ ID NO: 110646 - DNA, 15 bp, Homo sapiens
ccagccgctgaccaa

SEQ ID NO: 110647 - DNA, 15 bp, Homo sapiens
cccagccgctgacca

SEQ ID NO: 110648 - DNA, 15 bp, Homo sapiens
ccccagccgctgacc

SEQ ID NO: 110649 - DNA, 15 bp, Homo sapiens
gccccagccgctgac

SEQ ID NO: 110650 - DNA, 15 bp, Homo sapiens
ggccccagccgctga

SEQ ID NO: 110651 - DNA, 15 bp, Homo sapiens
tggccccagccgctg

SEQ ID NO: 110652 - DNA, 15 bp, Homo sapiens
ctggccccagccgct

SEQ ID NO: 110653 - DNA, 15 bp, Homo sapiens
gctggccccagccgc

SEQ ID NO: 110654 - DNA, 15 bp, Homo sapiens
agctggccccagccg

SEQ ID NO: 110655 - DNA, 15 bp, Homo sapiens
cagctggccccagcc

SEQ ID NO: 110656 - DNA, 15 bp, Homo sapiens
gcagctggccccagc

SEQ ID NO: 110657 - DNA, 15 bp, Homo sapiens
agcagctggccccag

SEQ ID NO: 110658 - DNA, 15 bp, Homo sapiens
cagcagctggcccca

SEQ ID NO: 110659 - DNA, 15 bp, Homo sapiens
ccagcagctggcccc

SEQ ID NO: 110660 - DNA, 15 bp, Homo sapiens
tccagcagctggccc

SEQ ID NO: 110661 - DNA, 15 bp, Homo sapiens
gtccagcagctggcc

SEQ ID NO: 110662 - DNA, 15 bp, Homo sapiens
ggtccagcagctggc

SEQ ID NO: 110663 - DNA, 15 bp, Homo sapiens
cggtccagcagctgg

SEQ ID NO: 110664 - DNA, 15 bp, Homo sapiens
acggtccagcagctg

SEQ ID NO: 110665 - DNA, 15 bp, Homo sapiens
cacggtccagcagct

SEQ ID NO: 110666 - DNA, 15 bp, Homo sapiens
ccacggtccagcagc

SEQ ID NO: 110667 - DNA, 15 bp, Homo sapiens
gccacggtccagcag

SEQ ID NO: 110668 - DNA, 15 bp, Homo sapiens
cgccacggtccagca

SEQ ID NO: 110669 - DNA, 15 bp, Homo sapiens
gcgccacggtccagc

SEQ ID NO: 110670 - DNA, 15 bp, Homo sapiens
ggcgccacggtccag

SEQ ID NO: 110671 - DNA, 15 bp, Homo sapiens
tggcgccacggtcca

SEQ ID NO: 110672 - DNA, 15 bp, Homo sapiens
gtggcgccacggtcc

SEQ ID NO: 110673 - DNA, 15 bp, Homo sapiens
cgtggcgccacggtc

SEQ ID NO: 110674 - DNA, 15 bp, Homo sapiens
ccgtggcgccacggt

SEQ ID NO: 110675 - DNA, 15 bp, Homo sapiens
gccgtggcgccacgg

SEQ ID NO: 110676 - DNA, 15 bp, Homo sapiens
ggccgtggcgccacg

SEQ ID NO: 110677 - DNA, 15 bp, Homo sapiens
gggccgtggcgccac

SEQ ID NO: 110678 - DNA, 15 bp, Homo sapiens
agggccgtggcgcca

SEQ ID NO: 110679 - DNA, 15 bp, Homo sapiens
cagggccgtggcgcc

SEQ ID NO: 110680 - DNA, 15 bp, Homo sapiens
ccagggccgtggcgc

SEQ ID NO: 110681 - DNA, 15 bp, Homo sapiens
tccagggccgtggcg

SEQ ID NO: 110682 - DNA, 15 bp, Homo sapiens
ctccagggccgtggc

SEQ ID NO: 110683 - DNA, 15 bp, Homo sapiens
gctccagggccgtgg

SEQ ID NO: 110684 - DNA, 15 bp, Homo sapiens
agctccagggccgtg

SEQ ID NO: 110685 - DNA, 15 bp, Homo sapiens
gagctccagggccgt

SEQ ID NO: 110686 - DNA, 15 bp, Homo sapiens
tgagctccagggccg

SEQ ID NO: 110687 - DNA, 15 bp, Homo sapiens
atgagctccagggcc

SEQ ID NO: 110688 - DNA, 15 bp, Homo sapiens
catgagctccagggc

SEQ ID NO: 110689 - DNA, 15 bp, Homo sapiens
ccatgagctccaggg

SEQ ID NO: 110690 - DNA, 15 bp, Homo sapiens
accatgagctccagg

SEQ ID NO: 110691 - DNA, 15 bp, Homo sapiens
gaccatgagctccag

SEQ ID NO: 110692 - DNA, 15 bp, Homo sapiens
ggaccatgagctcca

SEQ ID NO: 110693 - DNA, 15 bp, Homo sapiens
aggaccatgagctcc

SEQ ID NO: 110694 - DNA, 15 bp, Homo sapiens
gaggaccatgagctc

SEQ ID NO: 110695 - DNA, 15 bp, Homo sapiens
tgaggaccatgagct

SEQ ID NO: 110696 - DNA, 15 bp, Homo sapiens
ttgaggaccatgagc

SEQ ID NO: 110697 - DNA, 15 bp, Homo sapiens
gttgaggaccatgag

SEQ ID NO: 110698 - DNA, 15 bp, Homo sapiens
cgttgaggaccatga

SEQ ID NO: 110699 - DNA, 15 bp, Homo sapiens
acgttgaggaccatg

SEQ ID NO: 110700 - DNA, 15 bp, Homo sapiens
cacgttgaggaccat

SEQ ID NO: 110701 - DNA, 15 bp, Homo sapiens
gcacgttgaggacca

SEQ ID NO: 110702 - DNA, 15 bp, Homo sapiens
ggcacgttgaggacc

SEQ ID NO: 110703 - DNA, 15 bp, Homo sapiens
gggcacgttgaggac

SEQ ID NO: 110704 - DNA, 15 bp, Homo sapiens
ggggcacgttgagga

SEQ ID NO: 110705 - DNA, 15 bp, Homo sapiens
cggggcacgttgagg

SEQ ID NO: 110706 - DNA, 15 bp, Homo sapiens
ccggggcacgttgag

SEQ ID NO: 110707 - DNA, 15 bp, Homo sapiens
gccggggcacgttga

SEQ ID NO: 110708 - DNA, 15 bp, Homo sapiens
agccggggcacgttg

SEQ ID NO: 110709 - DNA, 15 bp, Homo sapiens
cagccggggcacgtt

SEQ ID NO: 110710 - DNA, 15 bp, Homo sapiens
tcagccggggcacgt

SEQ ID NO: 110711 - DNA, 15 bp, Homo sapiens
atcagccggggcacg

SEQ ID NO: 110712 - DNA, 15 bp, Homo sapiens
catcagccggggcac

SEQ ID NO: 110713 - DNA, 15 bp, Homo sapiens
tcatcagccggggca

SEQ ID NO: 110714 - DNA, 15 bp, Homo sapiens
gtcatcagccggggc

SEQ ID NO: 110715 - DNA, 15 bp, Homo sapiens
ggtcatcagccgggg

SEQ ID NO: 110716 - DNA, 15 bp, Homo sapiens
gggtcatcagccggg

SEQ ID NO: 110717 - DNA, 15 bp, Homo sapiens
tgggtcatcagccgg

SEQ ID NO: 110718 - DNA, 15 bp, Homo sapiens
ctgggtcatcagccg

SEQ ID NO: 110719 - DNA, 15 bp, Homo sapiens
cctgggtcatcagcc

SEQ ID NO: 110720 - DNA, 15 bp, Homo sapiens
tcctgggtcatcagc

SEQ ID NO: 110721 - DNA, 15 bp, Homo sapiens
gtcctgggtcatcag

SEQ ID NO: 110722 - DNA, 15 bp, Homo sapiens
agtcctgggtcatca

SEQ ID NO: 110723 - DNA, 15 bp, Homo sapiens
cagtcctgggtcatc

SEQ ID NO: 110724 - DNA, 15 bp, Homo sapiens
gcagtcctgggtcat

SEQ ID NO: 110725 - DNA, 15 bp, Homo sapiens
ggcagtcctgggtca

SEQ ID NO: 110726 - DNA, 15 bp, Homo sapiens
aggcagtcctgggtc

SEQ ID NO: 110727 - DNA, 15 bp, Homo sapiens
caggcagtcctgggt

SEQ ID NO: 110728 - DNA, 15 bp, Homo sapiens
gcaggcagtcctggg

SEQ ID NO: 110729 - DNA, 15 bp, Homo sapiens
tgcaggcagtcctgg

SEQ ID NO: 110730 - DNA, 15 bp, Homo sapiens
ctgcaggcagtcctg

SEQ ID NO: 110731 - DNA, 15 bp, Homo sapiens
gctgcaggcagtcct

SEQ ID NO: 110732 - DNA, 15 bp, Homo sapiens
tgctgcaggcagtcc

SEQ ID NO: 110733 - DNA, 15 bp, Homo sapiens
ctgctgcaggcagtc

SEQ ID NO: 110734 - DNA, 15 bp, Homo sapiens
actgctgcaggcagt

SEQ ID NO: 110735 - DNA, 15 bp, Homo sapiens
gactgctgcaggcag

SEQ ID NO: 110736 - DNA, 15 bp, Homo sapiens
tgactgctgcaggca

SEQ ID NO: 110737 - DNA, 15 bp, Homo sapiens
gtgactgctgcaggc

SEQ ID NO: 110738 - DNA, 15 bp, Homo sapiens
cgtgactgctgcagg

SEQ ID NO: 110739 - DNA, 15 bp, Homo sapiens
ccgtgactgctgcag

SEQ ID NO: 110740 - DNA, 15 bp, Homo sapiens
tccgtgactgctgca

SEQ ID NO: 110741 - DNA, 15 bp, Homo sapiens
ttccgtgactgctgc

SEQ ID NO: 110742 - DNA, 15 bp, Homo sapiens
cttccgtgactgctg

SEQ ID NO: 110743 - DNA, 15 bp, Homo sapiens
ccttccgtgactgct

SEQ ID NO: 110744 - DNA, 15 bp, Homo sapiens
accttccgtgactgc

SEQ ID NO: 110745 - DNA, 15 bp, Homo sapiens
caccttccgtgactg

SEQ ID NO: 110746 - DNA, 15 bp, Homo sapiens
ccaccttccgtgact

SEQ ID NO: 110747 - DNA, 15 bp, Homo sapiens
cccaccttccgtgac

SEQ ID NO: 110748 - DNA, 15 bp, Homo sapiens
tcccaccttccgtga

SEQ ID NO: 110749 - DNA, 15 bp, Homo sapiens
ctcccaccttccgtg

SEQ ID NO: 110750 - DNA, 15 bp, Homo sapiens
tctcccaccttccgt

SEQ ID NO: 110751 - DNA, 15 bp, Homo sapiens
gtctcccaccttccg

SEQ ID NO: 110752 - DNA, 15 bp, Homo sapiens
agtctcccaccttcc

SEQ ID NO: 110753 - DNA, 15 bp, Homo sapiens
gagtctcccaccttc

SEQ ID NO: 110754 - DNA, 15 bp, Homo sapiens
ggagtctcccacctt

SEQ ID NO: 110755 - DNA, 15 bp, Homo sapiens
gggagtctcccacct

SEQ ID NO: 110756 - DNA, 15 bp, Homo sapiens
ggggagtctcccacc

SEQ ID NO: 110757 - DNA, 15 bp, Homo sapiens
tggggagtctcccac

SEQ ID NO: 110758 - DNA, 15 bp, Homo sapiens
ttggggagtctccca

SEQ ID NO: 110759 - DNA, 15 bp, Homo sapiens
tttggggagtctccc

SEQ ID NO: 110760 - DNA, 15 bp, Homo sapiens
atttggggagtctcc

SEQ ID NO: 110761 - DNA, 15 bp, Homo sapiens
tatttggggagtctc

SEQ ID NO: 110762 - DNA, 15 bp, Homo sapiens
atatttggggagtct

SEQ ID NO: 110763 - DNA, 15 bp, Homo sapiens
gatatttggggagtc

SEQ ID NO: 110764 - DNA, 15 bp, Homo sapiens
tgatatttggggagt

SEQ ID NO: 110765 - DNA, 15 bp, Homo sapiens
gtgatatttggggag

SEQ ID NO: 110766 - DNA, 15 bp, Homo sapiens
cgtgatatttgggga

SEQ ID NO: 110767 - DNA, 15 bp, Homo sapiens
ccgtgatatttgggg

SEQ ID NO: 110768 - DNA, 15 bp, Homo sapiens
tccgtgatatttggg

SEQ ID NO: 110769 - DNA, 15 bp, Homo sapiens
ctccgtgatatttgg

SEQ ID NO: 110770 - DNA, 15 bp, Homo sapiens
actccgtgatatttg

SEQ ID NO: 110771 - DNA, 15 bp, Homo sapiens
tactccgtgatattt

SEQ ID NO: 110772 - DNA, 15 bp, Homo sapiens
gtactccgtgatatt

SEQ ID NO: 110773 - DNA, 15 bp, Homo sapiens
tgtactccgtgatat

SEQ ID NO: 110774 - DNA, 15 bp, Homo sapiens
atgtactccgtgata

SEQ ID NO: 110775 - DNA, 15 bp, Homo sapiens
catgtactccgtgat

SEQ ID NO: 110776 - DNA, 15 bp, Homo sapiens
acatgtactccgtga

SEQ ID NO: 110777 - DNA, 15 bp, Homo sapiens
aacatgtactccgtg

SEQ ID NO: 110778 - DNA, 15 bp, Homo sapiens
gaacatgtactccgt

SEQ ID NO: 110779 - DNA, 15 bp, Homo sapiens
agaacatgtactccg

SEQ ID NO: 110780 - DNA, 15 bp, Homo sapiens
cagaacatgtactcc

SEQ ID NO: 110781 - DNA, 15 bp, Homo sapiens
acagaacatgtactc

SEQ ID NO: 110782 - DNA, 15 bp, Homo sapiens
cacagaacatgtact

SEQ ID NO: 110783 - DNA, 15 bp, Homo sapiens
gcacagaacatgtac

SEQ ID NO: 110784 - DNA, 15 bp, Homo sapiens
ggcacagaacatgta

SEQ ID NO: 110785 - DNA, 15 bp, Homo sapiens
cggcacagaacatgt

SEQ ID NO: 110786 - DNA, 15 bp, Homo sapiens
ccggcacagaacatg

SEQ ID NO: 110787 - DNA, 15 bp, Homo sapiens
gccggcacagaacat

SEQ ID NO: 110788 - DNA, 15 bp, Homo sapiens
agccggcacagaaca

SEQ ID NO: 110789 - DNA, 15 bp, Homo sapiens
tagccggcacagaac

SEQ ID NO: 110790 - DNA, 15 bp, Homo sapiens
gtagccggcacagaa

SEQ ID NO: 110791 - DNA, 15 bp, Homo sapiens
agtagccggcacaga

SEQ ID NO: 110792 - DNA, 15 bp, Homo sapiens
gagtagccggcacag

SEQ ID NO: 110793 - DNA, 15 bp, Homo sapiens
cgagtagccggcaca

SEQ ID NO: 110794 - DNA, 15 bp, Homo sapiens
ccgagtagccggcac

SEQ ID NO: 110795 - DNA, 15 bp, Homo sapiens
tccgagtagccggca

SEQ ID NO: 110796 - DNA, 15 bp, Homo sapiens
atccgagtagccggc

SEQ ID NO: 110797 - DNA, 15 bp, Homo sapiens
catccgagtagccgg

SEQ ID NO: 110798 - DNA, 15 bp, Homo sapiens
ccatccgagtagccg

SEQ ID NO: 110799 - DNA, 15 bp, Homo sapiens
gccatccgagtagcc

SEQ ID NO: 110800 - DNA, 15 bp, Homo sapiens
tgccatccgagtagc

SEQ ID NO: 110801 - DNA, 15 bp, Homo sapiens
ctgccatccgagtag

SEQ ID NO: 110802 - DNA, 15 bp, Homo sapiens
gctgccatccgagta

SEQ ID NO: 110803 - DNA, 15 bp, Homo sapiens
tgctgccatccgagt

SEQ ID NO: 110804 - DNA, 15 bp, Homo sapiens
ttgctgccatccgag

SEQ ID NO: 110805 - DNA, 15 bp, Homo sapiens
cttgctgccatccga

SEQ ID NO: 110806 - DNA, 15 bp, Homo sapiens
ccttgctgccatccg

SEQ ID NO: 110807 - DNA, 15 bp, Homo sapiens
tccttgctgccatcc

SEQ ID NO: 110808 - DNA, 15 bp, Homo sapiens
gtccttgctgccatc

SEQ ID NO: 110809 - DNA, 15 bp, Homo sapiens
agtccttgctgccat

SEQ ID NO: 110810 - DNA, 15 bp, Homo sapiens
gagtccttgctgcca

SEQ ID NO: 110811 - DNA, 15 bp, Homo sapiens
ggagtccttgctgcc

SEQ ID NO: 110812 - DNA, 15 bp, Homo sapiens
aggagtccttgctgc

SEQ ID NO: 110813 - DNA, 15 bp, Homo sapiens
caggagtccttgctg

SEQ ID NO: 110814 - DNA, 15 bp, Homo sapiens
gcaggagtccttgct

SEQ ID NO: 110815 - DNA, 15 bp, Homo sapiens
tgcaggagtccttgc

SEQ ID NO: 110816 - DNA, 15 bp, Homo sapiens
ttgcaggagtccttg

SEQ ID NO: 110817 - DNA, 15 bp, Homo sapiens
cttgcaggagtcctt

SEQ ID NO: 110818 - DNA, 15 bp, Homo sapiens
ccttgcaggagtcct

SEQ ID NO: 110819 - DNA, 15 bp, Homo sapiens
cccttgcaggagtcc

SEQ ID NO: 110820 - DNA, 15 bp, Homo sapiens
ccccttgcaggagtc

SEQ ID NO: 110821 - DNA, 15 bp, Homo sapiens
cccccttgcaggagt

SEQ ID NO: 110822 - DNA, 15 bp, Homo sapiens
tcccccttgcaggag

SEQ ID NO: 110823 - DNA, 15 bp, Homo sapiens
gtcccccttgcagga

SEQ ID NO: 110824 - DNA, 15 bp, Homo sapiens
tgtcccccttgcagg

SEQ ID NO: 110825 - DNA, 15 bp, Homo sapiens
ctgtcccccttgcag

SEQ ID NO: 110826 - DNA, 15 bp, Homo sapiens
actgtcccccttgca

SEQ ID NO: 110827 - DNA, 15 bp, Homo sapiens
cactgtcccccttgc

SEQ ID NO: 110828 - DNA, 15 bp, Homo sapiens
ccactgtcccccttg

SEQ ID NO: 110829 - DNA, 15 bp, Homo sapiens
tccactgtccccctt

SEQ ID NO: 110830 - DNA, 15 bp, Homo sapiens
ctccactgtccccct

SEQ ID NO: 110831 - DNA, 15 bp, Homo sapiens
cctccactgtccccc

SEQ ID NO: 110832 - DNA, 15 bp, Homo sapiens
gcctccactgtcccc

SEQ ID NO: 110833 - DNA, 15 bp, Homo sapiens
ggcctccactgtccc

SEQ ID NO: 110834 - DNA, 15 bp, Homo sapiens
gggcctccactgtcc

SEQ ID NO: 110835 - DNA, 15 bp, Homo sapiens
tgggcctccactgtc

SEQ ID NO: 110836 - DNA, 15 bp, Homo sapiens
gtgggcctccactgt

SEQ ID NO: 110837 - DNA, 15 bp, Homo sapiens
tgtgggcctccactg

SEQ ID NO: 110838 - DNA, 15 bp, Homo sapiens
atgtgggcctccact

SEQ ID NO: 110839 - DNA, 15 bp, Homo sapiens
catgtgggcctccac

SEQ ID NO: 110840 - DNA, 15 bp, Homo sapiens
gcatgtgggcctcca

SEQ ID NO: 110841 - DNA, 15 bp, Homo sapiens
ggcatgtgggcctcc

SEQ ID NO: 110842 - DNA, 15 bp, Homo sapiens
tggcatgtgggcctc

SEQ ID NO: 110843 - DNA, 15 bp, Homo sapiens
gtggcatgtgggcct

SEQ ID NO: 110844 - DNA, 15 bp, Homo sapiens
ggtggcatgtgggcc

SEQ ID NO: 110845 - DNA, 15 bp, Homo sapiens
gggtggcatgtgggc

SEQ ID NO: 110846 - DNA, 15 bp, Homo sapiens
tgggtggcatgtggg

SEQ ID NO: 110847 - DNA, 15 bp, Homo sapiens
gtgggtggcatgtgg

SEQ ID NO: 110848 - DNA, 15 bp, Homo sapiens
agtgggtggcatgtg

SEQ ID NO: 110849 - DNA, 15 bp, Homo sapiens
tagtgggtggcatgt

SEQ ID NO: 110850 - DNA, 15 bp, Homo sapiens
gtagtgggtggcatg

SEQ ID NO: 110851 - DNA, 15 bp, Homo sapiens
ggtagtgggtggcat

SEQ ID NO: 110852 - DNA, 15 bp, Homo sapiens
cggtagtgggtggca

SEQ ID NO: 110853 - DNA, 15 bp, Homo sapiens
ccggtagtgggtggc

SEQ ID NO: 110854 - DNA, 15 bp, Homo sapiens
cccggtagtgggtgg

SEQ ID NO: 110855 - DNA, 15 bp, Homo sapiens
ccccggtagtgggtg

SEQ ID NO: 110856 - DNA, 15 bp, Homo sapiens
gccccggtagtgggt

SEQ ID NO: 110857 - DNA, 15 bp, Homo sapiens
tgccccggtagtggg

SEQ ID NO: 110858 - DNA, 15 bp, Homo sapiens
gtgccccggtagtgg

SEQ ID NO: 110859 - DNA, 15 bp, Homo sapiens
cgtgccccggtagtg

SEQ ID NO: 110860 - DNA, 15 bp, Homo sapiens
acgtgccccggtagt

SEQ ID NO: 110861 - DNA, 15 bp, Homo sapiens
cacgtgccccggtag

SEQ ID NO: 110862 - DNA, 15 bp, Homo sapiens
ccacgtgccccggta

SEQ ID NO: 110863 - DNA, 15 bp, Homo sapiens
accacgtgccccggt

SEQ ID NO: 110864 - DNA, 15 bp, Homo sapiens
taccacgtgccccgg

SEQ ID NO: 110865 - DNA, 15 bp, Homo sapiens
gtaccacgtgccccg

SEQ ID NO: 110866 - DNA, 15 bp, Homo sapiens
ggtaccacgtgcccc

SEQ ID NO: 110867 - DNA, 15 bp, Homo sapiens
aggtaccacgtgccc

SEQ ID NO: 110868 - DNA, 15 bp, Homo sapiens
caggtaccacgtgcc

SEQ ID NO: 110869 - DNA, 15 bp, Homo sapiens
tcaggtaccacgtgc

SEQ ID NO: 110870 - DNA, 15 bp, Homo sapiens
gtcaggtaccacgtg

SEQ ID NO: 110871 - DNA, 15 bp, Homo sapiens
cgtcaggtaccacgt

SEQ ID NO: 110872 - DNA, 15 bp, Homo sapiens
ccgtcaggtaccacg

SEQ ID NO: 110873 - DNA, 15 bp, Homo sapiens
cccgtcaggtaccac

SEQ ID NO: 110874 - DNA, 15 bp, Homo sapiens
gcccgtcaggtacca

SEQ ID NO: 110875 - DNA, 15 bp, Homo sapiens
tgcccgtcaggtacc

SEQ ID NO: 110876 - DNA, 15 bp, Homo sapiens
atgcccgtcaggtac

SEQ ID NO: 110877 - DNA, 15 bp, Homo sapiens
gatgcccgtcaggta

SEQ ID NO: 110878 - DNA, 15 bp, Homo sapiens
cgatgcccgtcaggt

SEQ ID NO: 110879 - DNA, 15 bp, Homo sapiens
acgatgcccgtcagg

SEQ ID NO: 110880 - DNA, 15 bp, Homo sapiens
gacgatgcccgtcag

SEQ ID NO: 110881 - DNA, 15 bp, Homo sapiens
tgacgatgcccgtca

SEQ ID NO: 110882 - DNA, 15 bp, Homo sapiens
ctgacgatgcccgtc

SEQ ID NO: 110883 - DNA, 15 bp, Homo sapiens
gctgacgatgcccgt

SEQ ID NO: 110884 - DNA, 15 bp, Homo sapiens
agctgacgatgcccg

SEQ ID NO: 110885 - DNA, 15 bp, Homo sapiens
cagctgacgatgccc

SEQ ID NO: 110886 - DNA, 15 bp, Homo sapiens
ccagctgacgatgcc

SEQ ID NO: 110887 - DNA, 15 bp, Homo sapiens
cccagctgacgatgc

SEQ ID NO: 110888 - DNA, 15 bp, Homo sapiens
ccccagctgacgatg

SEQ ID NO: 110889 - DNA, 15 bp, Homo sapiens
gccccagctgacgat

SEQ ID NO: 110890 - DNA, 15 bp, Homo sapiens
ggccccagctgacga

SEQ ID NO: 110891 - DNA, 15 bp, Homo sapiens
tggccccagctgacg

SEQ ID NO: 110892 - DNA, 15 bp, Homo sapiens
ctggccccagctgac

SEQ ID NO: 110893 - DNA, 15 bp, Homo sapiens
cctggccccagctga

SEQ ID NO: 110894 - DNA, 15 bp, Homo sapiens
ccctggccccagctg

SEQ ID NO: 110895 - DNA, 15 bp, Homo sapiens
gccctggccccagct

SEQ ID NO: 110896 - DNA, 15 bp, Homo sapiens
agccctggccccagc

SEQ ID NO: 110897 - DNA, 15 bp, Homo sapiens
cagccctggccccag

SEQ ID NO: 110898 - DNA, 15 bp, Homo sapiens
gcagccctggcccca

SEQ ID NO: 110899 - DNA, 15 bp, Homo sapiens
cgcagccctggcccc

SEQ ID NO: 110900 - DNA, 15 bp, Homo sapiens
gcgcagccctggccc

SEQ ID NO: 110901 - DNA, 15 bp, Homo sapiens
tgcgcagccctggcc

SEQ ID NO: 110902 - DNA, 15 bp, Homo sapiens
ttgcgcagccctggc

SEQ ID NO: 110903 - DNA, 15 bp, Homo sapiens
gttgcgcagccctgg

SEQ ID NO: 110904 - DNA, 15 bp, Homo sapiens
ggttgcgcagccctg

SEQ ID NO: 110905 - DNA, 15 bp, Homo sapiens
cggttgcgcagccct

SEQ ID NO: 110906 - DNA, 15 bp, Homo sapiens
acggttgcgcagccc

SEQ ID NO: 110907 - DNA, 15 bp, Homo sapiens
cacggttgcgcagcc

SEQ ID NO: 110908 - DNA, 15 bp, Homo sapiens
ccacggttgcgcagc

SEQ ID NO: 110909 - DNA, 15 bp, Homo sapiens
cccacggttgcgcag

SEQ ID NO: 110910 - DNA, 15 bp, Homo sapiens
gcccacggttgcgca

SEQ ID NO: 110911 - DNA, 15 bp, Homo sapiens
ggcccacggttgcgc

SEQ ID NO: 110912 - DNA, 15 bp, Homo sapiens
tggcccacggttgcg

SEQ ID NO: 110913 - DNA, 15 bp, Homo sapiens
gtggcccacggttgc

SEQ ID NO: 110914 - DNA, 15 bp, Homo sapiens
agtggcccacggttg

SEQ ID NO: 110915 - DNA, 15 bp, Homo sapiens
aagtggcccacggtt

SEQ ID NO: 110916 - DNA, 15 bp, Homo sapiens
aaagtggcccacggt

SEQ ID NO: 110917 - DNA, 15 bp, Homo sapiens
caaagtggcccacgg

SEQ ID NO: 110918 - DNA, 15 bp, Homo sapiens
ccaaagtggcccacg

SEQ ID NO: 110919 - DNA, 15 bp, Homo sapiens
cccaaagtggcccac

SEQ ID NO: 110920 - DNA, 15 bp, Homo sapiens
ccccaaagtggccca

SEQ ID NO: 110921 - DNA, 15 bp, Homo sapiens
accccaaagtggccc

SEQ ID NO: 110922 - DNA, 15 bp, Homo sapiens
caccccaaagtggcc

SEQ ID NO: 110923 - DNA, 15 bp, Homo sapiens
acaccccaaagtggc

SEQ ID NO: 110924 - DNA, 15 bp, Homo sapiens
tacaccccaaagtgg

SEQ ID NO: 110925 - DNA, 15 bp, Homo sapiens
gtacaccccaaagtg

SEQ ID NO: 110926 - DNA, 15 bp, Homo sapiens
tgtacaccccaaagt

SEQ ID NO: 110927 - DNA, 15 bp, Homo sapiens
gtgtacaccccaaag

SEQ ID NO: 110928 - DNA, 15 bp, Homo sapiens
ggtgtacaccccaaa

SEQ ID NO: 110929 - DNA, 15 bp, Homo sapiens
tggtgtacaccccaa

SEQ ID NO: 110930 - DNA, 15 bp, Homo sapiens
ctggtgtacacccca

SEQ ID NO: 110931 - DNA, 15 bp, Homo sapiens
cctggtgtacacccc

SEQ ID NO: 110932 - DNA, 15 bp, Homo sapiens
ccctggtgtacaccc

SEQ ID NO: 110933 - DNA, 15 bp, Homo sapiens
accctggtgtacacc

SEQ ID NO: 110934 - DNA, 15 bp, Homo sapiens
gaccctggtgtacac

SEQ ID NO: 110935 - DNA, 15 bp, Homo sapiens
agaccctggtgtaca

SEQ ID NO: 110936 - DNA, 15 bp, Homo sapiens
gagaccctggtgtac

SEQ ID NO: 110937 - DNA, 15 bp, Homo sapiens
ggagaccctggtgta

SEQ ID NO: 110938 - DNA, 15 bp, Homo sapiens
gggagaccctggtgt

SEQ ID NO: 110939 - DNA, 15 bp, Homo sapiens
tgggagaccctggtg

SEQ ID NO: 110940 - DNA, 15 bp, Homo sapiens
ctgggagaccctggt

SEQ ID NO: 110941 - DNA, 15 bp, Homo sapiens
actgggagaccctgg

SEQ ID NO: 110942 - DNA, 15 bp, Homo sapiens
tactgggagaccctg

SEQ ID NO: 110943 - DNA, 15 bp, Homo sapiens
gtactgggagaccct

SEQ ID NO: 110944 - DNA, 15 bp, Homo sapiens
tgtactgggagaccc

SEQ ID NO: 110945 - DNA, 15 bp, Homo sapiens
atgtactgggagacc

SEQ ID NO: 110946 - DNA, 15 bp, Homo sapiens
gatgtactgggagac

SEQ ID NO: 110947 - DNA, 15 bp, Homo sapiens
cgatgtactgggaga

SEQ ID NO: 110948 - DNA, 15 bp, Homo sapiens
tcgatgtactgggag

SEQ ID NO: 110949 - DNA, 15 bp, Homo sapiens
ctcgatgtactggga

SEQ ID NO: 110950 - DNA, 15 bp, Homo sapiens
actcgatgtactggg

SEQ ID NO: 110951 - DNA, 15 bp, Homo sapiens
cactcgatgtactgg

SEQ ID NO: 110952 - DNA, 15 bp, Homo sapiens
ccactcgatgtactg

SEQ ID NO: 110953 - DNA, 15 bp, Homo sapiens
gccactcgatgtact

SEQ ID NO: 110954 - DNA, 15 bp, Homo sapiens
agccactcgatgtac

SEQ ID NO: 110955 - DNA, 15 bp, Homo sapiens
cagccactcgatgta

SEQ ID NO: 110956 - DNA, 15 bp, Homo sapiens
gcagccactcgatgt

SEQ ID NO: 110957 - DNA, 15 bp, Homo sapiens
tgcagccactcgatg

SEQ ID NO: 110958 - DNA, 15 bp, Homo sapiens
ttgcagccactcgat

SEQ ID NO: 110959 - DNA, 15 bp, Homo sapiens
tttgcagccactcga

SEQ ID NO: 110960 - DNA, 15 bp, Homo sapiens
ttttgcagccactcg

SEQ ID NO: 110961 - DNA, 15 bp, Homo sapiens
cttttgcagccactc

SEQ ID NO: 110962 - DNA, 15 bp, Homo sapiens
gcttttgcagccact

SEQ ID NO: 110963 - DNA, 15 bp, Homo sapiens
agcttttgcagccac

SEQ ID NO: 110964 - DNA, 15 bp, Homo sapiens
gagcttttgcagcca

SEQ ID NO: 110965 - DNA, 15 bp, Homo sapiens
tgagcttttgcagcc

SEQ ID NO: 110966 - DNA, 15 bp, Homo sapiens
atgagcttttgcagc

SEQ ID NO: 110967 - DNA, 15 bp, Homo sapiens
catgagcttttgcag

SEQ ID NO: 110968 - DNA, 15 bp, Homo sapiens
gcatgagcttttgca

SEQ ID NO: 110969 - DNA, 15 bp, Homo sapiens
cgcatgagcttttgc

SEQ ID NO: 110970 - DNA, 15 bp, Homo sapiens
gcgcatgagcttttg

SEQ ID NO: 110971 - DNA, 15 bp, Homo sapiens
agcgcatgagctttt

SEQ ID NO: 110972 - DNA, 15 bp, Homo sapiens
gagcgcatgagcttt

SEQ ID NO: 110973 - DNA, 15 bp, Homo sapiens
tgagcgcatgagctt

SEQ ID NO: 110974 - DNA, 15 bp, Homo sapiens
ctgagcgcatgagct

SEQ ID NO: 110975 - DNA, 15 bp, Homo sapiens
tctgagcgcatgagc

SEQ ID NO: 110976 - DNA, 15 bp, Homo sapiens
ctctgagcgcatgag

SEQ ID NO: 110977 - DNA, 15 bp, Homo sapiens
gctctgagcgcatga

SEQ ID NO: 110978 - DNA, 15 bp, Homo sapiens
ggctctgagcgcatg

SEQ ID NO: 110979 - DNA, 15 bp, Homo sapiens
tggctctgagcgcat

SEQ ID NO: 110980 - DNA, 15 bp, Homo sapiens
gtggctctgagcgca

SEQ ID NO: 110981 - DNA, 15 bp, Homo sapiens
cgtggctctgagcgc

SEQ ID NO: 110982 - DNA, 15 bp, Homo sapiens
gcgtggctctgagcg

SEQ ID NO: 110983 - DNA, 15 bp, Homo sapiens
ggcgtggctctgagc

SEQ ID NO: 110984 - DNA, 15 bp, Homo sapiens
gggcgtggctctgag

SEQ ID NO: 110985 - DNA, 15 bp, Homo sapiens
tgggcgtggctctga

SEQ ID NO: 110986 - DNA, 15 bp, Homo sapiens
ctgggcgtggctctg

SEQ ID NO: 110987 - DNA, 15 bp, Homo sapiens
cctgggcgtggctct

SEQ ID NO: 110988 - DNA, 15 bp, Homo sapiens
tcctgggcgtggctc

SEQ ID NO: 110989 - DNA, 15 bp, Homo sapiens
ctcctgggcgtggct

SEQ ID NO: 110990 - DNA, 15 bp, Homo sapiens
actcctgggcgtggc

SEQ ID NO: 110991 - DNA, 15 bp, Homo sapiens
gactcctgggcgtgg

SEQ ID NO: 110992 - DNA, 15 bp, Homo sapiens
ggactcctgggcgtg

SEQ ID NO: 110993 - DNA, 15 bp, Homo sapiens
aggactcctgggcgt

SEQ ID NO: 110994 - DNA, 15 bp, Homo sapiens
gaggactcctgggcg

SEQ ID NO: 110995 - DNA, 15 bp, Homo sapiens
ggaggactcctgggc

SEQ ID NO: 110996 - DNA, 15 bp, Homo sapiens
aggaggactcctggg

SEQ ID NO: 110997 - DNA, 15 bp, Homo sapiens
caggaggactcctgg

SEQ ID NO: 110998 - DNA, 15 bp, Homo sapiens
gcaggaggactcctg

SEQ ID NO: 110999 - DNA, 15 bp, Homo sapiens
cgcaggaggactcct

SEQ ID NO: 111000 - DNA, 15 bp, Homo sapiens
tcgcaggaggactcc

SEQ ID NO: 111001 - DNA, 15 bp, Homo sapiens
ctcgcaggaggactc

SEQ ID NO: 111002 - DNA, 15 bp, Homo sapiens
gctcgcaggaggact

SEQ ID NO: 111003 - DNA, 15 bp, Homo sapiens
ggctcgcaggaggac

SEQ ID NO: 111004 - DNA, 15 bp, Homo sapiens
gggctcgcaggagga

SEQ ID NO: 111005 - DNA, 15 bp, Homo sapiens
ggggctcgcaggagg

SEQ ID NO: 111006 - DNA, 15 bp, Homo sapiens
tggggctcgcaggag

SEQ ID NO: 111007 - DNA, 15 bp, Homo sapiens
atggggctcgcagga

SEQ ID NO: 111008 - DNA, 15 bp, Homo sapiens
aatggggctcgcagg

SEQ ID NO: 111009 - DNA, 15 bp, Homo sapiens
aaatggggctcgcag

SEQ ID NO: 111010 - DNA, 15 bp, Homo sapiens
gaaatggggctcgca

SEQ ID NO: 111011 - DNA, 15 bp, Homo sapiens
ggaaatggggctcgc

SEQ ID NO: 111012 - DNA, 15 bp, Homo sapiens
gggaaatggggctcg

SEQ ID NO: 111013 - DNA, 15 bp, Homo sapiens
agggaaatggggctc

SEQ ID NO: 111014 - DNA, 15 bp, Homo sapiens
tagggaaatggggct

SEQ ID NO: 111015 - DNA, 15 bp, Homo sapiens
ctagggaaatggggc

SEQ ID NO: 111016 - DNA, 15 bp, Homo sapiens
gctagggaaatgggg

SEQ ID NO: 111017 - DNA, 15 bp, Homo sapiens
ggctagggaaatggg

SEQ ID NO: 111018 - DNA, 15 bp, Homo sapiens
gggctagggaaatgg

SEQ ID NO: 111019 - DNA, 15 bp, Homo sapiens
tgggctagggaaatg

SEQ ID NO: 111020 - DNA, 15 bp, Homo sapiens
ctgggctagggaaat

SEQ ID NO: 111021 - DNA, 15 bp, Homo sapiens
gctgggctagggaaa

SEQ ID NO: 111022 - DNA, 15 bp, Homo sapiens
tgctgggctagggaa

SEQ ID NO: 111023 - DNA, 15 bp, Homo sapiens
ctgctgggctaggga

SEQ ID NO: 111024 - DNA, 15 bp, Homo sapiens
gctgctgggctaggg

SEQ ID NO: 111025 - DNA, 15 bp, Homo sapiens
ggctgctgggctagg

SEQ ID NO: 111026 - DNA, 15 bp, Homo sapiens
gggctgctgggctag

SEQ ID NO: 111027 - DNA, 15 bp, Homo sapiens
agggctgctgggcta

SEQ ID NO: 111028 - DNA, 15 bp, Homo sapiens
cagggctgctgggct

SEQ ID NO: 111029 - DNA, 15 bp, Homo sapiens
gccagggctgctggg

SEQ ID NO: 111030 - DNA, 15 bp, Homo sapiens
ggccagggctgctgg

SEQ ID NO: 111031 - DNA, 15 bp, Homo sapiens
aggccagggctgctg

SEQ ID NO: 111032 - DNA, 15 bp, Homo sapiens
caggccagggctgct

SEQ ID NO: 111033 - DNA, 15 bp, Homo sapiens
acaggccagggctgc

SEQ ID NO: 111034 - DNA, 15 bp, Homo sapiens
cacaggccagggctg

SEQ ID NO: 111035 - DNA, 15 bp, Homo sapiens
ccacaggccagggct

SEQ ID NO: 111036 - DNA, 15 bp, Homo sapiens
tccacaggccagggc

SEQ ID NO: 111037 - DNA, 15 bp, Homo sapiens
ctccacaggccaggg

SEQ ID NO: 111038 - DNA, 15 bp, Homo sapiens
tctccacaggccagg

SEQ ID NO: 111039 - DNA, 15 bp, Homo sapiens
ctctccacaggccag

SEQ ID NO: 111040 - DNA, 15 bp, Homo sapiens
tctctccacaggcca

SEQ ID NO: 111041 - DNA, 15 bp, Homo sapiens
ttctctccacaggcc

SEQ ID NO: 111042 - DNA, 15 bp, Homo sapiens
tttctctccacaggc

SEQ ID NO: 111043 - DNA, 15 bp, Homo sapiens
ctttctctccacagg

SEQ ID NO: 111044 - DNA, 15 bp, Homo sapiens
gctttctctccacag

SEQ ID NO: 111045 - DNA, 15 bp, Homo sapiens
ggctttctctccaca

SEQ ID NO: 111046 - DNA, 15 bp, Homo sapiens
tggctttctctccac

SEQ ID NO: 111047 - DNA, 15 bp, Homo sapiens
ttggctttctctcca

SEQ ID NO: 111048 - DNA, 15 bp, Homo sapiens
cttggctttctctcc

SEQ ID NO: 111049 - DNA, 15 bp, Homo sapiens
ccttggctttctctc

SEQ ID NO: 111050 - DNA, 15 bp, Homo sapiens
gccttggctttctct

SEQ ID NO: 111051 - DNA, 15 bp, Homo sapiens
agccttggctttctc

SEQ ID NO: 111052 - DNA, 15 bp, Homo sapiens
cagccttggctttct

SEQ ID NO: 111053 - DNA, 15 bp, Homo sapiens
gcagccttggctttc

SEQ ID NO: 111054 - DNA, 15 bp, Homo sapiens
cgcagccttggcttt

SEQ ID NO: 111055 - DNA, 15 bp, Homo sapiens
acgcagccttggctt

SEQ ID NO: 111056 - DNA, 15 bp, Homo sapiens
gacgcagccttggct

SEQ ID NO: 111057 - DNA, 15 bp, Homo sapiens
cgacgcagccttggc

SEQ ID NO: 111058 - DNA, 15 bp, Homo sapiens
tcgacgcagccttgg

SEQ ID NO: 111059 - DNA, 15 bp, Homo sapiens
ttcgacgcagccttg

SEQ ID NO: 111060 - DNA, 15 bp, Homo sapiens
gttcgacgcagcctt

SEQ ID NO: 111061 - DNA, 15 bp, Homo sapiens
agttcgacgcagcct

SEQ ID NO: 111062 - DNA, 15 bp, Homo sapiens
cagttcgacgcagcc

SEQ ID NO: 111063 - DNA, 15 bp, Homo sapiens
acagttcgacgcagc

SEQ ID NO: 111064 - DNA, 15 bp, Homo sapiens
gacagttcgacgcag

SEQ ID NO: 111065 - DNA, 15 bp, Homo sapiens
ggacagttcgacgca

SEQ ID NO: 111066 - DNA, 15 bp, Homo sapiens
aggacagttcgacgc

SEQ ID NO: 111067 - DNA, 15 bp, Homo sapiens
caggacagttcgacg

SEQ ID NO: 111068 - DNA, 15 bp, Homo sapiens
ccaggacagttcgac

SEQ ID NO: 111069 - DNA, 15 bp, Homo sapiens
gccaggacagttcga

SEQ ID NO: 111070 - DNA, 15 bp, Homo sapiens
tgccaggacagttcg

SEQ ID NO: 111071 - DNA, 15 bp, Homo sapiens
gtgccaggacagttc

SEQ ID NO: 111072 - DNA, 15 bp, Homo sapiens
ggtgccaggacagtt

SEQ ID NO: 111073 - DNA, 15 bp, Homo sapiens
tggtgccaggacagt

SEQ ID NO: 111074 - DNA, 15 bp, Homo sapiens
ttggtgccaggacag

SEQ ID NO: 111075 - DNA, 15 bp, Homo sapiens
tttggtgccaggaca

SEQ ID NO: 111076 - DNA, 15 bp, Homo sapiens
atttggtgccaggac

SEQ ID NO: 111077 - DNA, 15 bp, Homo sapiens
gatttggtgccagga

SEQ ID NO: 111078 - DNA, 15 bp, Homo sapiens
ggatttggtgccagg

SEQ ID NO: 111079 - DNA, 15 bp, Homo sapiens
gggatttggtgccag

SEQ ID NO: 111080 - DNA, 15 bp, Homo sapiens
tgggatttggtgcca

SEQ ID NO: 111081 - DNA, 15 bp, Homo sapiens
atgggatttggtgcc

SEQ ID NO: 111082 - DNA, 15 bp, Homo sapiens
tatgggatttggtgc

SEQ ID NO: 111083 - DNA, 15 bp, Homo sapiens
atatgggatttggtg

SEQ ID NO: 111084 - DNA, 15 bp, Homo sapiens
tatatgggatttggt

SEQ ID NO: 111085 - DNA, 15 bp, Homo sapiens
atatatgggatttgg

SEQ ID NO: 111086 - DNA, 15 bp, Homo sapiens
aatatatgggatttg

SEQ ID NO: 111087 - DNA, 15 bp, Homo sapiens
gaatatatgggattt

SEQ ID NO: 111088 - DNA, 15 bp, Homo sapiens
agaatatatgggatt

SEQ ID NO: 111089 - DNA, 15 bp, Homo sapiens
aagaatatatgggat

SEQ ID NO: 111090 - DNA, 15 bp, Homo sapiens
gaagaatatatggga

SEQ ID NO: 111091 - DNA, 15 bp, Homo sapiens
agaagaatatatggg

SEQ ID NO: 111092 - DNA, 15 bp, Homo sapiens
cagaagaatatatgg

SEQ ID NO: 111093 - DNA, 15 bp, Homo sapiens
gcagaagaatatatg

SEQ ID NO: 111094 - DNA, 15 bp, Homo sapiens
tgcagaagaatatat

SEQ ID NO: 111095 - DNA, 15 bp, Homo sapiens
ctgcagaagaatata

SEQ ID NO: 111096 - DNA, 15 bp, Homo sapiens
actgcagaagaatat

SEQ ID NO: 111097 - DNA, 15 bp, Homo sapiens
aactgcagaagaata

SEQ ID NO: 111098 - DNA, 15 bp, Homo sapiens
taactgcagaagaat

SEQ ID NO: 111099 - DNA, 15 bp, Homo sapiens
ttaactgcagaagaa

SEQ ID NO: 111100 - DNA, 15 bp, Homo sapiens
attaactgcagaaga

SEQ ID NO: 111101 - DNA, 15 bp, Homo sapiens
cattaactgcagaag

SEQ ID NO: 111102 - DNA, 15 bp, Homo sapiens
ccattaactgcagaa

SEQ ID NO: 111103 - DNA, 15 bp, Homo sapiens
cccattaactgcaga

SEQ ID NO: 111104 - DNA, 15 bp, Homo sapiens
ccccattaactgcag

SEQ ID NO: 111105 - DNA, 15 bp, Homo sapiens
accccattaactgca

SEQ ID NO: 111106 - DNA, 15 bp, Homo sapiens
taccccattaactgc

SEQ ID NO: 111107 - DNA, 15 bp, Homo sapiens
ctaccccattaactg

SEQ ID NO: 111108 - DNA, 15 bp, Homo sapiens
tctaccccattaact

SEQ ID NO: 111109 - DNA, 15 bp, Homo sapiens
ctctaccccattaac

SEQ ID NO: 111110 - DNA, 15 bp, Homo sapiens
cctctaccccattaa

SEQ ID NO: 111111 - DNA, 15 bp, Homo sapiens
tcctctaccccatta

SEQ ID NO: 111112 - DNA, 15 bp, Homo sapiens
ctcctctaccccatt

SEQ ID NO: 111113 - DNA, 15 bp, Homo sapiens
cctcctctaccccat

SEQ ID NO: 111114 - DNA, 15 bp, Homo sapiens
ccctcctctacccca

SEQ ID NO: 111115 - DNA, 15 bp, Homo sapiens
gccctcctctacccc

SEQ ID NO: 111116 - DNA, 15 bp, Homo sapiens
tgccctcctctaccc

SEQ ID NO: 111117 - DNA, 15 bp, Homo sapiens
atgccctcctctacc

SEQ ID NO: 111118 - DNA, 15 bp, Homo sapiens
catgccctcctctac

SEQ ID NO: 111119 - DNA, 15 bp, Homo sapiens
ccatgccctcctcta

SEQ ID NO: 111120 - DNA, 15 bp, Homo sapiens
cccatgccctcctct

SEQ ID NO: 111121 - DNA, 15 bp, Homo sapiens
tcccatgccctcctc

SEQ ID NO: 111122 - DNA, 15 bp, Homo sapiens
ctcccatgccctcct

SEQ ID NO: 111123 - DNA, 15 bp, Homo sapiens
cctcccatgccctcc

SEQ ID NO: 111124 - DNA, 15 bp, Homo sapiens
ccctcccatgccctc

SEQ ID NO: 111125 - DNA, 15 bp, Homo sapiens
tccctcccatgccct

SEQ ID NO: 111126 - DNA, 15 bp, Homo sapiens
ctccctcccatgccc

SEQ ID NO: 111127 - DNA, 15 bp, Homo sapiens
cctccctcccatgcc

SEQ ID NO: 111128 - DNA, 15 bp, Homo sapiens
ccctccctcccatgc

SEQ ID NO: 111129 - DNA, 15 bp, Homo sapiens
tccctccctcccatg

SEQ ID NO: 111130 - DNA, 15 bp, Homo sapiens
ctccctccctcccat

SEQ ID NO: 111131 - DNA, 15 bp, Homo sapiens
tctccctccctccca

SEQ ID NO: 111132 - DNA, 15 bp, Homo sapiens
ctctccctccctccc

SEQ ID NO: 111133 - DNA, 15 bp, Homo sapiens
cctctccctccctcc

SEQ ID NO: 111134 - DNA, 15 bp, Homo sapiens
acctctccctccctc

SEQ ID NO: 111135 - DNA, 15 bp, Homo sapiens
cacctctccctccct

SEQ ID NO: 111136 - DNA, 15 bp, Homo sapiens
ccacctctccctccc

SEQ ID NO: 111137 - DNA, 15 bp, Homo sapiens
cccacctctccctcc

SEQ ID NO: 111138 - DNA, 15 bp, Homo sapiens
ccccacctctccctc

SEQ ID NO: 111139 - DNA, 15 bp, Homo sapiens
tccccacctctccct

SEQ ID NO: 111140 - DNA, 15 bp, Homo sapiens
ctccccacctctccc

SEQ ID NO: 111141 - DNA, 15 bp, Homo sapiens
cctccccacctctcc

SEQ ID NO: 111142 - DNA, 15 bp, Homo sapiens
ccctccccacctctc

SEQ ID NO: 111143 - DNA, 15 bp, Homo sapiens
tccctccccacctct

SEQ ID NO: 111144 - DNA, 15 bp, Homo sapiens
ctccctccccacctc

SEQ ID NO: 111145 - DNA, 15 bp, Homo sapiens
tctccctccccacct

SEQ ID NO: 111146 - DNA, 15 bp, Homo sapiens
gtctccctccccacc

SEQ ID NO: 111147 - DNA, 15 bp, Homo sapiens
tgtctccctccccac

SEQ ID NO: 111148 - DNA, 15 bp, Homo sapiens
ctgtctccctcccca

SEQ ID NO: 111149 - DNA, 15 bp, Homo sapiens
tctgtctccctcccc

SEQ ID NO: 111150 - DNA, 15 bp, Homo sapiens
ctctgtctccctccc

SEQ ID NO: 111151 - DNA, 15 bp, Homo sapiens
tctctgtctccctcc

SEQ ID NO: 111152 - DNA, 15 bp, Homo sapiens
gtctctgtctccctc

SEQ ID NO: 111153 - DNA, 15 bp, Homo sapiens
tgtctctgtctccct

SEQ ID NO: 111154 - DNA, 15 bp, Homo sapiens
ctgtctctgtctccc

SEQ ID NO: 111155 - DNA, 15 bp, Homo sapiens
tctgtctctgtctcc

SEQ ID NO: 111156 - DNA, 15 bp, Homo sapiens
ttctgtctctgtctc

SEQ ID NO: 111157 - DNA, 15 bp, Homo sapiens
tttctgtctctgtct

SEQ ID NO: 111158 - DNA, 15 bp, Homo sapiens
gtttctgtctctgtc

SEQ ID NO: 111159 - DNA, 15 bp, Homo sapiens
tgtttctgtctctgt

SEQ ID NO: 111160 - DNA, 15 bp, Homo sapiens
ctgtttctgtctctg

SEQ ID NO: 111161 - DNA, 15 bp, Homo sapiens
tctgtttctgtctct

SEQ ID NO: 111162 - DNA, 15 bp, Homo sapiens
ctctgtttctgtctc

SEQ ID NO: 111163 - DNA, 15 bp, Homo sapiens
tctctgtttctgtct

SEQ ID NO: 111164 - DNA, 15 bp, Homo sapiens
ctctctgtttctgtc

SEQ ID NO: 111165 - DNA, 15 bp, Homo sapiens
tctctctgtttctgt

SEQ ID NO: 111166 - DNA, 15 bp, Homo sapiens
ctctctctgtttctg

SEQ ID NO: 111167 - DNA, 15 bp, Homo sapiens
tctctctctgtttct

SEQ ID NO: 111168 - DNA, 15 bp, Homo sapiens
gtctctctctgtttc

SEQ ID NO: 111169 - DNA, 15 bp, Homo sapiens
tgtctctctctgttt

SEQ ID NO: 111170 - DNA, 15 bp, Homo sapiens
ctgtctctctctgtt

SEQ ID NO: 111171 - DNA, 15 bp, Homo sapiens
tctgtctctctctgt

SEQ ID NO: 111172 - DNA, 15 bp, Homo sapiens
ctctgtctctctctg

SEQ ID NO: 111173 - DNA, 15 bp, Homo sapiens
tctctgtctctctct

SEQ ID NO: 111174 - DNA, 15 bp, Homo sapiens
gtctctgtctctctc

SEQ ID NO: 111175 - DNA, 15 bp, Homo sapiens
tgtctctgtctctct

SEQ ID NO: 111176 - DNA, 15 bp, Homo sapiens
ctgtctctgtctctc

SEQ ID NO: 111177 - DNA, 15 bp, Homo sapiens
tctgtctctgtctct

SEQ ID NO: 111178 - DNA, 15 bp, Homo sapiens
ctctgtctctgtctc

SEQ ID NO: 111179 - DNA, 15 bp, Homo sapiens
tctctgtctctgtct

SEQ ID NO: 111180 - DNA, 15 bp, Homo sapiens
ctctctgtctctgtc

SEQ ID NO: 111181 - DNA, 15 bp, Homo sapiens
tctctctgtctctgt

SEQ ID NO: 111182 - DNA, 15 bp, Homo sapiens
ctctctctgtctctg

SEQ ID NO: 111183 - DNA, 15 bp, Homo sapiens
tctctctctgtctct

SEQ ID NO: 111184 - DNA, 15 bp, Homo sapiens
gtctctctctgtctc

SEQ ID NO: 111185 - DNA, 15 bp, Homo sapiens
agtctctctctgtct

SEQ ID NO: 111186 - DNA, 15 bp, Homo sapiens
cagtctctctctgtc

SEQ ID NO: 111187 - DNA, 15 bp, Homo sapiens
tcagtctctctctgt

SEQ ID NO: 111188 - DNA, 15 bp, Homo sapiens
ctcagtctctctctg

SEQ ID NO: 111189 - DNA, 15 bp, Homo sapiens
cctcagtctctctct

SEQ ID NO: 111190 - DNA, 15 bp, Homo sapiens
ccctcagtctctctc

SEQ ID NO: 111191 - DNA, 15 bp, Homo sapiens
tccctcagtctctct

SEQ ID NO: 111192 - DNA, 15 bp, Homo sapiens
ctccctcagtctctc

SEQ ID NO: 111193 - DNA, 15 bp, Homo sapiens
tctccctcagtctct

SEQ ID NO: 111194 - DNA, 15 bp, Homo sapiens
ctctccctcagtctc

SEQ ID NO: 111195 - DNA, 15 bp, Homo sapiens
tctctccctcagtct

SEQ ID NO: 111196 - DNA, 15 bp, Homo sapiens
gtctctccctcagtc

SEQ ID NO: 111197 - DNA, 15 bp, Homo sapiens
agtctctccctcagt

SEQ ID NO: 111198 - DNA, 15 bp, Homo sapiens
gagtctctccctcag

SEQ ID NO: 111199 - DNA, 15 bp, Homo sapiens
agagtctctccctca

SEQ ID NO: 111200 - DNA, 15 bp, Homo sapiens
cagagtctctccctc

SEQ ID NO: 111201 - DNA, 15 bp, Homo sapiens
tcagagtctctccct

SEQ ID NO: 111202 - DNA, 15 bp, Homo sapiens
ctcagagtctctccc

SEQ ID NO: 111203 - DNA, 15 bp, Homo sapiens
cctcagagtctctcc

SEQ ID NO: 111204 - DNA, 15 bp, Homo sapiens
tcctcagagtctctc

SEQ ID NO: 111205 - DNA, 15 bp, Homo sapiens
gtcctcagagtctct

SEQ ID NO: 111206 - DNA, 15 bp, Homo sapiens
tgtcctcagagtctc

SEQ ID NO: 111207 - DNA, 15 bp, Homo sapiens
atgtcctcagagtct

SEQ ID NO: 111208 - DNA, 15 bp, Homo sapiens
catgtcctcagagtc

SEQ ID NO: 111209 - DNA, 15 bp, Homo sapiens
ccatgtcctcagagt

SEQ ID NO: 111210 - DNA, 15 bp, Homo sapiens
tccatgtcctcagag

SEQ ID NO: 111211 - DNA, 15 bp, Homo sapiens
ggaccccgcatgact

SEQ ID NO: 111212 - DNA, 15 bp, Homo sapiens
aggaccccgcatgac

SEQ ID NO: 111213 - DNA, 15 bp, Homo sapiens
caggaccccgcatga

SEQ ID NO: 111214 - DNA, 15 bp, Homo sapiens
ccaggaccccgcatg

SEQ ID NO: 111215 - DNA, 15 bp, Homo sapiens
accaggaccccgcat

SEQ ID NO: 111216 - DNA, 15 bp, Homo sapiens
caccaggaccccgca

SEQ ID NO: 111217 - DNA, 15 bp, Homo sapiens
ccaccaggaccccgc

SEQ ID NO: 111218 - DNA, 15 bp, Homo sapiens
tccaccaggaccccg

SEQ ID NO: 111219 - DNA, 15 bp, Homo sapiens
ctccaccaggacccc

SEQ ID NO: 111220 - DNA, 15 bp, Homo sapiens
gctccaccaggaccc

SEQ ID NO: 111221 - DNA, 15 bp, Homo sapiens
cgctccaccaggacc

SEQ ID NO: 111222 - DNA, 15 bp, Homo sapiens
gcgctccaccaggac

SEQ ID NO: 111223 - DNA, 15 bp, Homo sapiens
ggcgctccaccagga

SEQ ID NO: 111224 - DNA, 15 bp, Homo sapiens
tggcgctccaccagg

SEQ ID NO: 111225 - DNA, 15 bp, Homo sapiens
ctggcgctccaccag

SEQ ID NO: 111226 - DNA, 15 bp, Homo sapiens
gctggcgctccacca

SEQ ID NO: 111227 - DNA, 15 bp, Homo sapiens
ggctggcgctccacc

SEQ ID NO: 111228 - DNA, 15 bp, Homo sapiens
aggctggcgctccac

SEQ ID NO: 111229 - DNA, 15 bp, Homo sapiens
gaggctggcgctcca

SEQ ID NO: 111230 - DNA, 15 bp, Homo sapiens
ggaggctggcgctcc

SEQ ID NO: 111231 - DNA, 15 bp, Homo sapiens
gggaggctggcgctc

SEQ ID NO: 111232 - DNA, 15 bp, Homo sapiens
agggaggctggcgct

SEQ ID NO: 111233 - DNA, 15 bp, Homo sapiens
aagggaggctggcgc

SEQ ID NO: 111234 - DNA, 15 bp, Homo sapiens
gaagggaggctggcg

SEQ ID NO: 111235 - DNA, 15 bp, Homo sapiens
ggaagggaggctggc

SEQ ID NO: 111236 - DNA, 15 bp, Homo sapiens
aggaagggaggctgg

SEQ ID NO: 111237 - DNA, 15 bp, Homo sapiens
caggaagggaggctg

SEQ ID NO: 111238 - DNA, 15 bp, Homo sapiens
gcaggaagggaggct

SEQ ID NO: 111239 - DNA, 15 bp, Homo sapiens
ggcaggaagggaggc

SEQ ID NO: 111240 - DNA, 15 bp, Homo sapiens
tggcaggaagggagg

SEQ ID NO: 111241 - DNA, 15 bp, Homo sapiens
ttggcaggaagggag

SEQ ID NO: 111242 - DNA, 15 bp, Homo sapiens
attggcaggaaggga

SEQ ID NO: 111243 - DNA, 15 bp, Homo sapiens
cattggcaggaaggg

SEQ ID NO: 111244 - DNA, 15 bp, Homo sapiens
ccattggcaggaagg

SEQ ID NO: 111245 - DNA, 15 bp, Homo sapiens
cccattggcaggaag

SEQ ID NO: 111246 - DNA, 15 bp, Homo sapiens
tcccattggcaggaa

SEQ ID NO: 111247 - DNA, 15 bp, Homo sapiens
ttcccattggcagga

SEQ ID NO: 111248 - DNA, 15 bp, Homo sapiens
tttcccattggcagg

SEQ ID NO: 111249 - DNA, 15 bp, Homo sapiens
atttcccattggcag

SEQ ID NO: 111250 - DNA, 15 bp, Homo sapiens
catttcccattggca

SEQ ID NO: 111251 - DNA, 15 bp, Homo sapiens
gcatttcccattggc

SEQ ID NO: 111252 - DNA, 15 bp, Homo sapiens
tgcatttcccattgg

SEQ ID NO: 111253 - DNA, 15 bp, Homo sapiens
ctgcatttcccattg

SEQ ID NO: 111254 - DNA, 15 bp, Homo sapiens
cctgcatttcccatt

SEQ ID NO: 111255 - DNA, 15 bp, Homo sapiens
gcctgcatttcccat

SEQ ID NO: 111256 - DNA, 15 bp, Homo sapiens
cgcctgcatttccca

SEQ ID NO: 111257 - DNA, 15 bp, Homo sapiens
gcgcctgcatttccc

SEQ ID NO: 111258 - DNA, 15 bp, Homo sapiens
ggcgcctgcatttcc

SEQ ID NO: 111259 - DNA, 15 bp, Homo sapiens
gggcgcctgcatttc

SEQ ID NO: 111260 - DNA, 15 bp, Homo sapiens
tgggcgcctgcattt

SEQ ID NO: 111261 - DNA, 15 bp, Homo sapiens
gtgggcgcctgcatt

SEQ ID NO: 111262 - DNA, 15 bp, Homo sapiens
ggtgggcgcctgcat

SEQ ID NO: 111263 - DNA, 15 bp, Homo sapiens
aggtgggcgcctgca

SEQ ID NO: 111264 - DNA, 15 bp, Homo sapiens
gaggtgggcgcctgc

SEQ ID NO: 111265 - DNA, 15 bp, Homo sapiens
tgaggtgggcgcctg

SEQ ID NO: 111266 - DNA, 15 bp, Homo sapiens
atgaggtgggcgcct

SEQ ID NO: 111267 - DNA, 15 bp, Homo sapiens
catgaggtgggcgcc

SEQ ID NO: 111268 - DNA, 15 bp, Homo sapiens
ccatgaggtgggcgc

SEQ ID NO: 111269 - DNA, 15 bp, Homo sapiens
accatgaggtgggcg

SEQ ID NO: 111270 - DNA, 15 bp, Homo sapiens
caccatgaggtgggc

SEQ ID NO: 111271 - DNA, 15 bp, Homo sapiens
gcaccatgaggtggg

SEQ ID NO: 111272 - DNA, 15 bp, Homo sapiens
agcaccatgaggtgg

SEQ ID NO: 111273 - DNA, 15 bp, Homo sapiens
cagcaccatgaggtg

SEQ ID NO: 111274 - DNA, 15 bp, Homo sapiens
gcagcaccatgaggt

SEQ ID NO: 111275 - DNA, 15 bp, Homo sapiens
ggcagcaccatgagg

SEQ ID NO: 111276 - DNA, 15 bp, Homo sapiens
cggcagcaccatgag

SEQ ID NO: 111277 - DNA, 15 bp, Homo sapiens
ccggcagcaccatga

SEQ ID NO: 111278 - DNA, 15 bp, Homo sapiens
tccggcagcaccatg

SEQ ID NO: 111279 - DNA, 15 bp, Homo sapiens
ctccggcagcaccat

SEQ ID NO: 111280 - DNA, 15 bp, Homo sapiens
cctccggcagcacca

SEQ ID NO: 111281 - DNA, 15 bp, Homo sapiens
tcctccggcagcacc

SEQ ID NO: 111282 - DNA, 15 bp, Homo sapiens
ctcctccggcagcac

SEQ ID NO: 111283 - DNA, 15 bp, Homo sapiens
cctcctccggcagca

SEQ ID NO: 111284 - DNA, 15 bp, Homo sapiens
ccctcctccggcagc

SEQ ID NO: 111285 - DNA, 15 bp, Homo sapiens
cccctcctccggcag

SEQ ID NO: 111286 - DNA, 15 bp, Homo sapiens
ccccctcctccggca

SEQ ID NO: 111287 - DNA, 15 bp, Homo sapiens
gccccctcctccggc

SEQ ID NO: 111288 - DNA, 15 bp, Homo sapiens
ggccccctcctccgg

SEQ ID NO: 111289 - DNA, 15 bp, Homo sapiens
gggccccctcctccg

SEQ ID NO: 111290 - DNA, 15 bp, Homo sapiens
cgggccccctcctcc

SEQ ID NO: 111291 - DNA, 15 bp, Homo sapiens
ccgggccccctcctc

SEQ ID NO: 111292 - DNA, 15 bp, Homo sapiens
cccgggccccctcct

SEQ ID NO: 111293 - DNA, 15 bp, Homo sapiens
tcccgggccccctcc

SEQ ID NO: 111294 - DNA, 15 bp, Homo sapiens
gtcccgggccccctc

SEQ ID NO: 111295 - DNA, 15 bp, Homo sapiens
agtcccgggccccct

SEQ ID NO: 111296 - DNA, 15 bp, Homo sapiens
gagtcccgggccccc

SEQ ID NO: 111297 - DNA, 15 bp, Homo sapiens
ggagtcccgggcccc

SEQ ID NO: 111298 - DNA, 15 bp, Homo sapiens
gggagtcccgggccc

SEQ ID NO: 111299 - DNA, 15 bp, Homo sapiens
ggggagtcccgggcc

SEQ ID NO: 111300 - DNA, 15 bp, Homo sapiens
tggggagtcccgggc

SEQ ID NO: 111301 - DNA, 15 bp, Homo sapiens
ctggggagtcccggg

SEQ ID NO: 111302 - DNA, 15 bp, Homo sapiens
tctggggagtcccgg

SEQ ID NO: 111303 - DNA, 15 bp, Homo sapiens
ctctggggagtcccg

SEQ ID NO: 111304 - DNA, 15 bp, Homo sapiens
cctctggggagtccc

SEQ ID NO: 111305 - DNA, 15 bp, Homo sapiens
gcctctggggagtcc

SEQ ID NO: 111306 - DNA, 15 bp, Homo sapiens
agcctctggggagtc

SEQ ID NO: 111307 - DNA, 15 bp, Homo sapiens
aagcctctggggagt

SEQ ID NO: 111308 - DNA, 15 bp, Homo sapiens
gaagcctctggggag

SEQ ID NO: 111309 - DNA, 15 bp, Homo sapiens
cgaagcctctgggga

SEQ ID NO: 111310 - DNA, 15 bp, Homo sapiens
gcgaagcctctgggg

SEQ ID NO: 111311 - DNA, 15 bp, Homo sapiens
agcgaagcctctggg

SEQ ID NO: 111312 - DNA, 15 bp, Homo sapiens
cagcgaagcctctgg

SEQ ID NO: 111313 - DNA, 15 bp, Homo sapiens
tcagcgaagcctctg

SEQ ID NO: 111314 - DNA, 15 bp, Homo sapiens
ttcagcgaagcctct

SEQ ID NO: 111315 - DNA, 15 bp, Homo sapiens
cttcagcgaagcctc

SEQ ID NO: 111316 - DNA, 15 bp, Homo sapiens
ccttcagcgaagcct

SEQ ID NO: 111317 - DNA, 15 bp, Homo sapiens
cccttcagcgaagcc

SEQ ID NO: 111318 - DNA, 15 bp, Homo sapiens
gcccttcagcgaagc

SEQ ID NO: 111319 - DNA, 15 bp, Homo sapiens
ggcccttcagcgaag

SEQ ID NO: 111320 - DNA, 15 bp, Homo sapiens
aggcccttcagcgaa

SEQ ID NO: 111321 - DNA, 15 bp, Homo sapiens
caggcccttcagcga

SEQ ID NO: 111322 - DNA, 15 bp, Homo sapiens
ccaggcccttcagcg

SEQ ID NO: 111323 - DNA, 15 bp, Homo sapiens
cccaggcccttcagc

SEQ ID NO: 111324 - DNA, 15 bp, Homo sapiens
gcccaggcccttcag

SEQ ID NO: 111325 - DNA, 15 bp, Homo sapiens
cgcccaggcccttca

SEQ ID NO: 111326 - DNA, 15 bp, Homo sapiens
gcgcccaggcccttc

SEQ ID NO: 111327 - DNA, 15 bp, Homo sapiens
ggcgcccaggccctt

SEQ ID NO: 111328 - DNA, 15 bp, Homo sapiens
gggcgcccaggccct

SEQ ID NO: 111329 - DNA, 15 bp, Homo sapiens
ggggcgcccaggccc

SEQ ID NO: 111330 - DNA, 15 bp, Homo sapiens
gggggcgcccaggcc

SEQ ID NO: 111331 - DNA, 15 bp, Homo sapiens
tgggggcgcccaggc

SEQ ID NO: 111332 - DNA, 15 bp, Homo sapiens
ttgggggcgcccagg

SEQ ID NO: 111333 - DNA, 15 bp, Homo sapiens
tttgggggcgcccag

SEQ ID NO: 111334 - DNA, 15 bp, Homo sapiens
ctttgggggcgccca

SEQ ID NO: 111335 - DNA, 15 bp, Homo sapiens
cctttgggggcgccc

SEQ ID NO: 111336 - DNA, 15 bp, Homo sapiens
gcctttgggggcgcc

SEQ ID NO: 111337 - DNA, 15 bp, Homo sapiens
agcctttgggggcgc

SEQ ID NO: 111338 - DNA, 15 bp, Homo sapiens
tagcctttgggggcg

SEQ ID NO: 111339 - DNA, 15 bp, Homo sapiens
gtagcctttgggggc

SEQ ID NO: 111340 - DNA, 15 bp, Homo sapiens
tgtagcctttggggg

SEQ ID NO: 111341 - DNA, 15 bp, Homo sapiens
atgtagcctttgggg

SEQ ID NO: 111342 - DNA, 15 bp, Homo sapiens
catgtagcctttggg

SEQ ID NO: 111343 - DNA, 15 bp, Homo sapiens
acatgtagcctttgg

SEQ ID NO: 111344 - DNA, 15 bp, Homo sapiens
aacatgtagcctttg

SEQ ID NO: 111345 - DNA, 15 bp, Homo sapiens
aaacatgtagccttt

SEQ ID NO: 111346 - DNA, 15 bp, Homo sapiens
gaaacatgtagcctt

SEQ ID NO: 111347 - DNA, 15 bp, Homo sapiens
tgaaacatgtagcct

SEQ ID NO: 111348 - DNA, 15 bp, Homo sapiens
atgaaacatgtagcc

SEQ ID NO: 111349 - DNA, 15 bp, Homo sapiens
tatgaaacatgtagc

SEQ ID NO: 111350 - DNA, 15 bp, Homo sapiens
atatgaaacatgtag

SEQ ID NO: 111351 - DNA, 15 bp, Homo sapiens
catatgaaacatgta

SEQ ID NO: 111352 - DNA, 15 bp, Homo sapiens
ccatatgaaacatgt

SEQ ID NO: 111353 - DNA, 15 bp, Homo sapiens
cccatatgaaacatg

SEQ ID NO: 111354 - DNA, 15 bp, Homo sapiens
tcccatatgaaacat

SEQ ID NO: 111355 - DNA, 15 bp, Homo sapiens
gtcccatatgaaaca

SEQ ID NO: 111356 - DNA, 15 bp, Homo sapiens
cgtcccatatgaaac

SEQ ID NO: 111357 - DNA, 15 bp, Homo sapiens
acgtcccatatgaaa

SEQ ID NO: 111358 - DNA, 15 bp, Homo sapiens
cacgtcccatatgaa

SEQ ID NO: 111359 - DNA, 15 bp, Homo sapiens
gcacgtcccatatga

SEQ ID NO: 111360 - DNA, 15 bp, Homo sapiens
ggcacgtcccatatg

SEQ ID NO: 111361 - DNA, 15 bp, Homo sapiens
tggcacgtcccatat

SEQ ID NO: 111362 - DNA, 15 bp, Homo sapiens
gtggcacgtcccata

SEQ ID NO: 111363 - DNA, 15 bp, Homo sapiens
ggtggcacgtcccat

SEQ ID NO: 111364 - DNA, 15 bp, Homo sapiens
aggtggcacgtccca

SEQ ID NO: 111365 - DNA, 15 bp, Homo sapiens
caggtggcacgtccc

SEQ ID NO: 111366 - DNA, 15 bp, Homo sapiens
gcaggtggcacgtcc

SEQ ID NO: 111367 - DNA, 15 bp, Homo sapiens
ggcaggtggcacgtc

SEQ ID NO: 111368 - DNA, 15 bp, Homo sapiens
tggcaggtggcacgt

SEQ ID NO: 111369 - DNA, 15 bp, Homo sapiens
gtggcaggtggcacg

SEQ ID NO: 111370 - DNA, 15 bp, Homo sapiens
cgtggcaggtggcac

SEQ ID NO: 111371 - DNA, 15 bp, Homo sapiens
ccgtggcaggtggca

SEQ ID NO: 111372 - DNA, 15 bp, Homo sapiens
gccgtggcaggtggc

SEQ ID NO: 111373 - DNA, 15 bp, Homo sapiens
agccgtggcaggtgg

SEQ ID NO: 111374 - DNA, 15 bp, Homo sapiens
gagccgtggcaggtg

SEQ ID NO: 111375 - DNA, 15 bp, Homo sapiens
tgagccgtggcaggt

SEQ ID NO: 111376 - DNA, 15 bp, Homo sapiens
ctgagccgtggcagg

SEQ ID NO: 111377 - DNA, 15 bp, Homo sapiens
gctgagccgtggcag

SEQ ID NO: 111378 - DNA, 15 bp, Homo sapiens
agctgagccgtggca

SEQ ID NO: 111379 - DNA, 15 bp, Homo sapiens
gagctgagccgtggc

SEQ ID NO: 111380 - DNA, 15 bp, Homo sapiens
ggagctgagccgtgg

SEQ ID NO: 111381 - DNA, 15 bp, Homo sapiens
tggagctgagccgtg

SEQ ID NO: 111382 - DNA, 15 bp, Homo sapiens
ctggagctgagccgt

SEQ ID NO: 111383 - DNA, 15 bp, Homo sapiens
gctggagctgagccg

SEQ ID NO: 111384 - DNA, 15 bp, Homo sapiens
agctggagctgagcc

SEQ ID NO: 111385 - DNA, 15 bp, Homo sapiens
aagctggagctgagc

SEQ ID NO: 111386 - DNA, 15 bp, Homo sapiens
aaagctggagctgag

SEQ ID NO: 111387 - DNA, 15 bp, Homo sapiens
gaaagctggagctga

SEQ ID NO: 111388 - DNA, 15 bp, Homo sapiens
agaaagctggagctg

SEQ ID NO: 111389 - DNA, 15 bp, Homo sapiens
cagaaagctggagct

SEQ ID NO: 111390 - DNA, 15 bp, Homo sapiens
acagaaagctggagc

SEQ ID NO: 111391 - DNA, 15 bp, Homo sapiens
cacagaaagctggag

SEQ ID NO: 111392 - DNA, 15 bp, Homo sapiens
tcacagaaagctgga

SEQ ID NO: 111393 - DNA, 15 bp, Homo sapiens
ctcacagaaagctgg

SEQ ID NO: 111394 - DNA, 15 bp, Homo sapiens
actcacagaaagctg

SEQ ID NO: 111395 - DNA, 15 bp, Homo sapiens
cactcacagaaagct

SEQ ID NO: 111396 - DNA, 15 bp, Homo sapiens
ccactcacagaaagc

SEQ ID NO: 111397 - DNA, 15 bp, Homo sapiens
gccactcacagaaag

SEQ ID NO: 111398 - DNA, 15 bp, Homo sapiens
cgccactcacagaaa

SEQ ID NO: 111399 - DNA, 15 bp, Homo sapiens
tcgccactcacagaa

SEQ ID NO: 111400 - DNA, 15 bp, Homo sapiens
ctcgccactcacaga

SEQ ID NO: 111401 - DNA, 15 bp, Homo sapiens
tctcgccactcacag

SEQ ID NO: 111402 - DNA, 15 bp, Homo sapiens
atctcgccactcaca

SEQ ID NO: 111403 - DNA, 15 bp, Homo sapiens
tatctcgccactcac

SEQ ID NO: 111404 - DNA, 15 bp, Homo sapiens
ctatctcgccactca

SEQ ID NO: 111405 - DNA, 15 bp, Homo sapiens
tctatctcgccactc

SEQ ID NO: 111406 - DNA, 15 bp, Homo sapiens
ttctatctcgccact

SEQ ID NO: 111407 - DNA, 15 bp, Homo sapiens
attctatctcgccac

SEQ ID NO: 111408 - DNA, 15 bp, Homo sapiens
tattctatctcgcca

SEQ ID NO: 111409 - DNA, 15 bp, Homo sapiens
gtattctatctcgcc

SEQ ID NO: 111410 - DNA, 15 bp, Homo sapiens
cgtattctatctcgc

SEQ ID NO: 111411 - DNA, 15 bp, Homo sapiens
ccgtattctatctcg

SEQ ID NO: 111412 - DNA, 15 bp, Homo sapiens
cccgtattctatctc

SEQ ID NO: 111413 - DNA, 15 bp, Homo sapiens
ccccgtattctatct

SEQ ID NO: 111414 - DNA, 15 bp, Homo sapiens
tccccgtattctatc

SEQ ID NO: 111415 - DNA, 15 bp, Homo sapiens
ctccccgtattctat

SEQ ID NO: 111416 - DNA, 15 bp, Homo sapiens
cctccccgtattcta

SEQ ID NO: 111417 - DNA, 15 bp, Homo sapiens
gcctccccgtattct

SEQ ID NO: 111418 - DNA, 15 bp, Homo sapiens
ggcctccccgtattc

SEQ ID NO: 111419 - DNA, 15 bp, Homo sapiens
tggcctccccgtatt

SEQ ID NO: 111420 - DNA, 15 bp, Homo sapiens
gtggcctccccgtat

SEQ ID NO: 111421 - DNA, 15 bp, Homo sapiens
agtggcctccccgta

SEQ ID NO: 111422 - DNA, 15 bp, Homo sapiens
cagtggcctccccgt

SEQ ID NO: 111423 - DNA, 15 bp, Homo sapiens
ccagtggcctccccg

SEQ ID NO: 111424 - DNA, 15 bp, Homo sapiens
gccagtggcctcccc

SEQ ID NO: 111425 - DNA, 15 bp, Homo sapiens
ggccagtggcctccc

SEQ ID NO: 111426 - DNA, 15 bp, Homo sapiens
tggccagtggcctcc

SEQ ID NO: 111427 - DNA, 15 bp, Homo sapiens
atggccagtggcctc

SEQ ID NO: 111428 - DNA, 15 bp, Homo sapiens
catggccagtggcct

SEQ ID NO: 111429 - DNA, 15 bp, Homo sapiens
ccatggccagtggcc

SEQ ID NO: 111430 - DNA, 15 bp, Homo sapiens
cccatggccagtggc

SEQ ID NO: 111431 - DNA, 15 bp, Homo sapiens
gcccatggccagtgg

SEQ ID NO: 111432 - DNA, 15 bp, Homo sapiens
ggcccatggccagtg

SEQ ID NO: 111433 - DNA, 15 bp, Homo sapiens
aggcccatggccagt

SEQ ID NO: 111434 - DNA, 15 bp, Homo sapiens
caggcccatggccag

SEQ ID NO: 111435 - DNA, 15 bp, Homo sapiens
ccaggcccatggcca

SEQ ID NO: 111436 - DNA, 15 bp, Homo sapiens
cccaggcccatggcc

SEQ ID NO: 111437 - DNA, 15 bp, Homo sapiens
tcccaggcccatggc

SEQ ID NO: 111438 - DNA, 15 bp, Homo sapiens
gtcccaggcccatgg

SEQ ID NO: 111439 - DNA, 15 bp, Homo sapiens
tgtcccaggcccatg

SEQ ID NO: 111440 - DNA, 15 bp, Homo sapiens
ctgtcccaggcccat

SEQ ID NO: 111441 - DNA, 15 bp, Homo sapiens
cctgtcccaggccca

SEQ ID NO: 111442 - DNA, 15 bp, Homo sapiens
ccctgtcccaggccc

SEQ ID NO: 111443 - DNA, 15 bp, Homo sapiens
accctgtcccaggcc

SEQ ID NO: 111444 - DNA, 15 bp, Homo sapiens
caccctgtcccaggc

SEQ ID NO: 111445 - DNA, 15 bp, Homo sapiens
ccaccctgtcccagg

SEQ ID NO: 111446 - DNA, 15 bp, Homo sapiens
cccaccctgtcccag

SEQ ID NO: 111447 - DNA, 15 bp, Homo sapiens
tcccaccctgtccca

SEQ ID NO: 111448 - DNA, 15 bp, Homo sapiens
atcccaccctgtccc

SEQ ID NO: 111449 - DNA, 15 bp, Homo sapiens
catcccaccctgtcc

SEQ ID NO: 111450 - DNA, 15 bp, Homo sapiens
tcatcccaccctgtc

SEQ ID NO: 111451 - DNA, 15 bp, Homo sapiens
ctcatcccaccctgt

SEQ ID NO: 111452 - DNA, 15 bp, Homo sapiens
cctcatcccaccctg

SEQ ID NO: 111453 - DNA, 15 bp, Homo sapiens
gcctcatcccaccct

SEQ ID NO: 111454 - DNA, 15 bp, Homo sapiens
cgcctcatcccaccc

SEQ ID NO: 111455 - DNA, 15 bp, Homo sapiens
ccgcctcatcccacc

SEQ ID NO: 111456 - DNA, 15 bp, Homo sapiens
gccgcctcatcccac

SEQ ID NO: 111457 - DNA, 15 bp, Homo sapiens
tgccgcctcatccca

SEQ ID NO: 111458 - DNA, 15 bp, Homo sapiens
ctgccgcctcatccc

SEQ ID NO: 111459 - DNA, 15 bp, Homo sapiens
cctgccgcctcatcc

SEQ ID NO: 111460 - DNA, 15 bp, Homo sapiens
gcctgccgcctcatc

SEQ ID NO: 111461 - DNA, 15 bp, Homo sapiens
agcctgccgcctcat

SEQ ID NO: 111462 - DNA, 15 bp, Homo sapiens
aagcctgccgcctca

SEQ ID NO: 111463 - DNA, 15 bp, Homo sapiens
caagcctgccgcctc

SEQ ID NO: 111464 - DNA, 15 bp, Homo sapiens
ccaagcctgccgcct

SEQ ID NO: 111465 - DNA, 15 bp, Homo sapiens
cccaagcctgccgcc

SEQ ID NO: 111466 - DNA, 15 bp, Homo sapiens
gcccaagcctgccgc

SEQ ID NO: 111467 - DNA, 15 bp, Homo sapiens
ggcccaagcctgccg

SEQ ID NO: 111468 - DNA, 15 bp, Homo sapiens
tggcccaagcctgcc

SEQ ID NO: 111469 - DNA, 15 bp, Homo sapiens
gtggcccaagcctgc

SEQ ID NO: 111470 - DNA, 15 bp, Homo sapiens
ggtggcccaagcctg

SEQ ID NO: 111471 - DNA, 15 bp, Homo sapiens
tggtggcccaagcct

SEQ ID NO: 111472 - DNA, 15 bp, Homo sapiens
ttggtggcccaagcc

SEQ ID NO: 111473 - DNA, 15 bp, Homo sapiens
tttggtggcccaagc

SEQ ID NO: 111474 - DNA, 15 bp, Homo sapiens
ctttggtggcccaag

SEQ ID NO: 111475 - DNA, 15 bp, Homo sapiens
gctttggtggcccaa

SEQ ID NO: 111476 - DNA, 15 bp, Homo sapiens
ggctttggtggccca

SEQ ID NO: 111477 - DNA, 15 bp, Homo sapiens
tggctttggtggccc

SEQ ID NO: 111478 - DNA, 15 bp, Homo sapiens
ctggctttggtggcc

SEQ ID NO: 111479 - DNA, 15 bp, Homo sapiens
gctggctttggtggc

SEQ ID NO: 111480 - DNA, 15 bp, Homo sapiens
tgctggctttggtgg

SEQ ID NO: 111481 - DNA, 15 bp, Homo sapiens
atgctggctttggtg

SEQ ID NO: 111482 - DNA, 15 bp, Homo sapiens
gatgctggctttggt

SEQ ID NO: 111483 - DNA, 15 bp, Homo sapiens
cgatgctggctttgg

SEQ ID NO: 111484 - DNA, 15 bp, Homo sapiens
gcgatgctggctttg

SEQ ID NO: 111485 - DNA, 15 bp, Homo sapiens
ggcgatgctggcttt

SEQ ID NO: 111486 - DNA, 15 bp, Homo sapiens
tggcgatgctggctt

SEQ ID NO: 111487 - DNA, 15 bp, Homo sapiens
gtggcgatgctggct

SEQ ID NO: 111488 - DNA, 15 bp, Homo sapiens
ggtggcgatgctggc

SEQ ID NO: 111489 - DNA, 15 bp, Homo sapiens
gggtggcgatgctgg

SEQ ID NO: 111490 - DNA, 15 bp, Homo sapiens
tgggtggcgatgctg

SEQ ID NO: 111491 - DNA, 15 bp, Homo sapiens
ctgggtggcgatgct

SEQ ID NO: 111492 - DNA, 15 bp, Homo sapiens
gctgggtggcgatgc

SEQ ID NO: 111493 - DNA, 15 bp, Homo sapiens
tgctgggtggcgatg

SEQ ID NO: 111494 - DNA, 15 bp, Homo sapiens
atgctgggtggcgat

SEQ ID NO: 111495 - DNA, 15 bp, Homo sapiens
aatgctgggtggcga

SEQ ID NO: 111496 - DNA, 15 bp, Homo sapiens
caatgctgggtggcg

SEQ ID NO: 111497 - DNA, 15 bp, Homo sapiens
tcaatgctgggtggc

SEQ ID NO: 111498 - DNA, 15 bp, Homo sapiens
atcaatgctgggtgg

SEQ ID NO: 111499 - DNA, 15 bp, Homo sapiens
catcaatgctgggtg

SEQ ID NO: 111500 - DNA, 15 bp, Homo sapiens
tcatcaatgctgggt

SEQ ID NO: 111501 - DNA, 15 bp, Homo sapiens
gtcatcaatgctggg

SEQ ID NO: 111502 - DNA, 15 bp, Homo sapiens
tgtcatcaatgctgg

SEQ ID NO: 111503 - DNA, 15 bp, Homo sapiens
ttgtcatcaatgctg

SEQ ID NO: 111504 - DNA, 15 bp, Homo sapiens
tttgtcatcaatgct

SEQ ID NO: 111505 - DNA, 15 bp, Homo sapiens
ctttgtcatcaatgc

SEQ ID NO: 111506 - DNA, 15 bp, Homo sapiens
tctttgtcatcaatg

SEQ ID NO: 111507 - DNA, 15 bp, Homo sapiens
gtctttgtcatcaat

SEQ ID NO: 111508 - DNA, 15 bp, Homo sapiens
agtctttgtcatcaa

SEQ ID NO: 111509 - DNA, 15 bp, Homo sapiens
cagtctttgtcatca

SEQ ID NO: 111510 - DNA, 15 bp, Homo sapiens
gcagtctttgtcatc

SEQ ID NO: 111511 - DNA, 15 bp, Homo sapiens
cgcagtctttgtcat

SEQ ID NO: 111512 - DNA, 15 bp, Homo sapiens
acgcagtctttgtca

SEQ ID NO: 111513 - DNA, 15 bp, Homo sapiens
cacgcagtctttgtc

SEQ ID NO: 111514 - DNA, 15 bp, Homo sapiens
acacgcagtctttgt

SEQ ID NO: 111515 - DNA, 15 bp, Homo sapiens
gacacgcagtctttg

SEQ ID NO: 111516 - DNA, 15 bp, Homo sapiens
agacacgcagtcttt

SEQ ID NO: 111517 - DNA, 15 bp, Homo sapiens
cagacacgcagtctt

SEQ ID NO: 111518 - DNA, 15 bp, Homo sapiens
gcagacacgcagtct

SEQ ID NO: 111519 - DNA, 15 bp, Homo sapiens
ggcagacacgcagtc

SEQ ID NO: 111520 - DNA, 15 bp, Homo sapiens
tggcagacacgcagt

SEQ ID NO: 111521 - DNA, 15 bp, Homo sapiens
atggcagacacgcag

SEQ ID NO: 111522 - DNA, 15 bp, Homo sapiens
catggcagacacgca

SEQ ID NO: 111523 - DNA, 15 bp, Homo sapiens
tcatggcagacacgc

SEQ ID NO: 111524 - DNA, 15 bp, Homo sapiens
ctcatggcagacacg

SEQ ID NO: 111525 - DNA, 15 bp, Homo sapiens
gctcatggcagacac

SEQ ID NO: 111526 - DNA, 15 bp, Homo sapiens
tgctcatggcagaca

SEQ ID NO: 111527 - DNA, 15 bp, Homo sapiens
atgctcatggcagac

SEQ ID NO: 111528 - DNA, 15 bp, Homo sapiens
gatgctcatggcaga

SEQ ID NO: 111529 - DNA, 15 bp, Homo sapiens
ggatgctcatggcag

SEQ ID NO: 111530 - DNA, 15 bp, Homo sapiens
aggatgctcatggca

SEQ ID NO: 111531 - DNA, 15 bp, Homo sapiens
caggatgctcatggc

SEQ ID NO: 111532 - DNA, 15 bp, Homo sapiens
gcaggatgctcatgg

SEQ ID NO: 111533 - DNA, 15 bp, Homo sapiens
agcaggatgctcatg

SEQ ID NO: 111534 - DNA, 15 bp, Homo sapiens
cagcaggatgctcat

SEQ ID NO: 111535 - DNA, 15 bp, Homo sapiens
acagcaggatgctca

SEQ ID NO: 111536 - DNA, 15 bp, Homo sapiens
aacagcaggatgctc

SEQ ID NO: 111537 - DNA, 15 bp, Homo sapiens
caacagcaggatgct

SEQ ID NO: 111538 - DNA, 15 bp, Homo sapiens
ccaacagcaggatgc

SEQ ID NO: 111539 - DNA, 15 bp, Homo sapiens
accaacagcaggatg

SEQ ID NO: 111540 - DNA, 15 bp, Homo sapiens
caccaacagcaggat

SEQ ID NO: 111541 - DNA, 15 bp, Homo sapiens
gcaccaacagcagga

SEQ ID NO: 111542 - DNA, 15 bp, Homo sapiens
tgcaccaacagcagg

SEQ ID NO: 111543 - DNA, 15 bp, Homo sapiens
gtgcaccaacagcag

SEQ ID NO: 111544 - DNA, 15 bp, Homo sapiens
tgtgcaccaacagca

SEQ ID NO: 111545 - DNA, 15 bp, Homo sapiens
gtgtgcaccaacagc

SEQ ID NO: 111546 - DNA, 15 bp, Homo sapiens
tgtgtgcaccaacag

SEQ ID NO: 111547 - DNA, 15 bp, Homo sapiens
gtgtgtgcaccaaca

SEQ ID NO: 111548 - DNA, 15 bp, Homo sapiens
ggtgtgtgcaccaac

SEQ ID NO: 111549 - DNA, 15 bp, Homo sapiens
cggtgtgtgcaccaa

SEQ ID NO: 111550 - DNA, 15 bp, Homo sapiens
gcggtgtgtgcacca

SEQ ID NO: 111551 - DNA, 15 bp, Homo sapiens
tgcggtgtgtgcacc

SEQ ID NO: 111552 - DNA, 15 bp, Homo sapiens
atgcggtgtgtgcac

SEQ ID NO: 111553 - DNA, 15 bp, Homo sapiens
aatgcggtgtgtgca

SEQ ID NO: 111554 - DNA, 15 bp, Homo sapiens
caatgcggtgtgtgc

SEQ ID NO: 111555 - DNA, 15 bp, Homo sapiens
ccaatgcggtgtgtg

SEQ ID NO: 111556 - DNA, 15 bp, Homo sapiens
accaatgcggtgtgt

SEQ ID NO: 111557 - DNA, 15 bp, Homo sapiens
gaccaatgcggtgtg

SEQ ID NO: 111558 - DNA, 15 bp, Homo sapiens
agaccaatgcggtgt

SEQ ID NO: 111559 - DNA, 15 bp, Homo sapiens
gagaccaatgcggtg

SEQ ID NO: 111560 - DNA, 15 bp, Homo sapiens
agagaccaatgcggt

SEQ ID NO: 111561 - DNA, 15 bp, Homo sapiens
gagagaccaatgcgg

SEQ ID NO: 111562 - DNA, 15 bp, Homo sapiens
ggagagaccaatgcg

SEQ ID NO: 111563 - DNA, 15 bp, Homo sapiens
tggagagaccaatgc

SEQ ID NO: 111564 - DNA, 15 bp, Homo sapiens
atggagagaccaatg

SEQ ID NO: 111565 - DNA, 15 bp, Homo sapiens
tatggagagaccaat

SEQ ID NO: 111566 - DNA, 15 bp, Homo sapiens
gtatggagagaccaa

SEQ ID NO: 111567 - DNA, 15 bp, Homo sapiens
tgtatggagagacca

SEQ ID NO: 111568 - DNA, 15 bp, Homo sapiens
ttgtatggagagacc

SEQ ID NO: 111569 - DNA, 15 bp, Homo sapiens
tttgtatggagagac

SEQ ID NO: 111570 - DNA, 15 bp, Homo sapiens
gtttgtatggagaga

SEQ ID NO: 111571 - DNA, 15 bp, Homo sapiens
tgtttgtatggagag

SEQ ID NO: 111572 - DNA, 15 bp, Homo sapiens
atgtttgtatggaga

SEQ ID NO: 111573 - DNA, 15 bp, Homo sapiens
catgtttgtatggag

SEQ ID NO: 111574 - DNA, 15 bp, Homo sapiens
gcatgtttgtatgga

SEQ ID NO: 111575 - DNA, 15 bp, Homo sapiens
ggcatgtttgtatgg

SEQ ID NO: 111576 - DNA, 15 bp, Homo sapiens
aggcatgtttgtatg

SEQ ID NO: 111577 - DNA, 15 bp, Homo sapiens
taggcatgtttgtat

SEQ ID NO: 111578 - DNA, 15 bp, Homo sapiens
ctaggcatgtttgta

SEQ ID NO: 111579 - DNA, 15 bp, Homo sapiens
tctaggcatgtttgt

SEQ ID NO: 111580 - DNA, 15 bp, Homo sapiens
ctctaggcatgtttg

SEQ ID NO: 111581 - DNA, 15 bp, Homo sapiens
cctctaggcatgttt

SEQ ID NO: 111582 - DNA, 15 bp, Homo sapiens
gcctctaggcatgtt

SEQ ID NO: 111583 - DNA, 15 bp, Homo sapiens
cgcctctaggcatgt

SEQ ID NO: 111584 - DNA, 15 bp, Homo sapiens
tcgcctctaggcatg

SEQ ID NO: 111585 - DNA, 15 bp, Homo sapiens
atcgcctctaggcat

SEQ ID NO: 111586 - DNA, 15 bp, Homo sapiens
catcgcctctaggca

SEQ ID NO: 111587 - DNA, 15 bp, Homo sapiens
acatcgcctctaggc

SEQ ID NO: 111588 - DNA, 15 bp, Homo sapiens
gacatcgcctctagg

SEQ ID NO: 111589 - DNA, 15 bp, Homo sapiens
tgacatcgcctctag

SEQ ID NO: 111590 - DNA, 15 bp, Homo sapiens
ctgacatcgcctcta

SEQ ID NO: 111591 - DNA, 15 bp, Homo sapiens
tctgacatcgcctct

SEQ ID NO: 111592 - DNA, 15 bp, Homo sapiens
ctctgacatcgcctc

SEQ ID NO: 111593 - DNA, 15 bp, Homo sapiens
cctctgacatcgcct

SEQ ID NO: 111594 - DNA, 15 bp, Homo sapiens
ccctctgacatcgcc

SEQ ID NO: 111595 - DNA, 15 bp, Homo sapiens
accctctgacatcgc

SEQ ID NO: 111596 - DNA, 15 bp, Homo sapiens
caccctctgacatcg

SEQ ID NO: 111597 - DNA, 15 bp, Homo sapiens
ccaccctctgacatc

SEQ ID NO: 111598 - DNA, 15 bp, Homo sapiens
tccaccctctgacat

SEQ ID NO: 111599 - DNA, 15 bp, Homo sapiens
ctccaccctctgaca

SEQ ID NO: 111600 - DNA, 15 bp, Homo sapiens
tctccaccctctgac

SEQ ID NO: 111601 - DNA, 15 bp, Homo sapiens
gtctccaccctctga

SEQ ID NO: 111602 - DNA, 15 bp, Homo sapiens
ggtctccaccctctg

SEQ ID NO: 111603 - DNA, 15 bp, Homo sapiens
tggtctccaccctct

SEQ ID NO: 111604 - DNA, 15 bp, Homo sapiens
ctggtctccaccctc

SEQ ID NO: 111605 - DNA, 15 bp, Homo sapiens
cctggtctccaccct

SEQ ID NO: 111606 - DNA, 15 bp, Homo sapiens
tcctggtctccaccc

SEQ ID NO: 111607 - DNA, 15 bp, Homo sapiens
ctcctggtctccacc

SEQ ID NO: 111608 - DNA, 15 bp, Homo sapiens
tctcctggtctccac

SEQ ID NO: 111609 - DNA, 15 bp, Homo sapiens
ctctcctggtctcca

SEQ ID NO: 111610 - DNA, 15 bp, Homo sapiens
cctctcctggtctcc

SEQ ID NO: 111611 - DNA, 15 bp, Homo sapiens
gcctctcctggtctc

SEQ ID NO: 111612 - DNA, 15 bp, Homo sapiens
tgcctctcctggtct

SEQ ID NO: 111613 - DNA, 15 bp, Homo sapiens
ctgcctctcctggtc

SEQ ID NO: 111614 - DNA, 15 bp, Homo sapiens
cctgcctctcctggt

SEQ ID NO: 111615 - DNA, 15 bp, Homo sapiens
tcctgcctctcctgg

SEQ ID NO: 111616 - DNA, 15 bp, Homo sapiens
ctcctgcctctcctg

SEQ ID NO: 111617 - DNA, 15 bp, Homo sapiens
actcctgcctctcct

SEQ ID NO: 111618 - DNA, 15 bp, Homo sapiens
gactcctgcctctcc

SEQ ID NO: 111619 - DNA, 15 bp, Homo sapiens
tgactcctgcctctc

SEQ ID NO: 111620 - DNA, 15 bp, Homo sapiens
ctgactcctgcctct

SEQ ID NO: 111621 - DNA, 15 bp, Homo sapiens
tctgactcctgcctc

SEQ ID NO: 111622 - DNA, 15 bp, Homo sapiens
gtctgactcctgcct

SEQ ID NO: 111623 - DNA, 15 bp, Homo sapiens
tgtctgactcctgcc

SEQ ID NO: 111624 - DNA, 15 bp, Homo sapiens
atgtctgactcctgc

SEQ ID NO: 111625 - DNA, 15 bp, Homo sapiens
gatgtctgactcctg

SEQ ID NO: 111626 - DNA, 15 bp, Homo sapiens
agatgtctgactcct

SEQ ID NO: 111627 - DNA, 15 bp, Homo sapiens
cagatgtctgactcc

SEQ ID NO: 111628 - DNA, 15 bp, Homo sapiens
ccagatgtctgactc

SEQ ID NO: 111629 - DNA, 15 bp, Homo sapiens
accagatgtctgact

SEQ ID NO: 111630 - DNA, 15 bp, Homo sapiens
caccagatgtctgac

SEQ ID NO: 111631 - DNA, 15 bp, Homo sapiens
gcaccagatgtctga

SEQ ID NO: 111632 - DNA, 15 bp, Homo sapiens
ggcaccagatgtctg

SEQ ID NO: 111633 - DNA, 15 bp, Homo sapiens
tggcaccagatgtct

SEQ ID NO: 111634 - DNA, 15 bp, Homo sapiens
gtggcaccagatgtc

SEQ ID NO: 111635 - DNA, 15 bp, Homo sapiens
ggtggcaccagatgt

SEQ ID NO: 111636 - DNA, 15 bp, Homo sapiens
tggtggcaccagatg

SEQ ID NO: 111637 - DNA, 15 bp, Homo sapiens
ctggtggcaccagat

SEQ ID NO: 111638 - DNA, 15 bp, Homo sapiens
cctggtggcaccaga

SEQ ID NO: 111639 - DNA, 15 bp, Homo sapiens
tcctggtggcaccag

SEQ ID NO: 111640 - DNA, 15 bp, Homo sapiens
ttcctggtggcacca

SEQ ID NO: 111641 - DNA, 15 bp, Homo sapiens
cttcctggtggcacc

SEQ ID NO: 111642 - DNA, 15 bp, Homo sapiens
ccttcctggtggcac

SEQ ID NO: 111643 - DNA, 15 bp, Homo sapiens
gccttcctggtggca

SEQ ID NO: 111644 - DNA, 15 bp, Homo sapiens
ggccttcctggtggc

SEQ ID NO: 111645 - DNA, 15 bp, Homo sapiens
gggccttcctggtgg

SEQ ID NO: 111646 - DNA, 15 bp, Homo sapiens
agggccttcctggtg

SEQ ID NO: 111647 - DNA, 15 bp, Homo sapiens
aagggccttcctggt

SEQ ID NO: 111648 - DNA, 15 bp, Homo sapiens
gaagggccttcctgg

SEQ ID NO: 111649 - DNA, 15 bp, Homo sapiens
agaagggccttcctg

SEQ ID NO: 111650 - DNA, 15 bp, Homo sapiens
gagaagggccttcct

SEQ ID NO: 111651 - DNA, 15 bp, Homo sapiens
tgagaagggccttcc

SEQ ID NO: 111652 - DNA, 15 bp, Homo sapiens
ctgagaagggccttc

SEQ ID NO: 111653 - DNA, 15 bp, Homo sapiens
tctgagaagggcctt

SEQ ID NO: 111654 - DNA, 15 bp, Homo sapiens
ctctgagaagggcct

SEQ ID NO: 111655 - DNA, 15 bp, Homo sapiens
cctctgagaagggcc

SEQ ID NO: 111656 - DNA, 15 bp, Homo sapiens
tcctctgagaagggc

SEQ ID NO: 111657 - DNA, 15 bp, Homo sapiens
gtcctctgagaaggg

SEQ ID NO: 111658 - DNA, 15 bp, Homo sapiens
ggtcctctgagaagg

SEQ ID NO: 111659 - DNA, 15 bp, Homo sapiens
tggtcctctgagaag

SEQ ID NO: 111660 - DNA, 15 bp, Homo sapiens
ctggtcctctgagaa

SEQ ID NO: 111661 - DNA, 15 bp, Homo sapiens
cctggtcctctgaga

SEQ ID NO: 111662 - DNA, 15 bp, Homo sapiens
gcctggtcctctgag

SEQ ID NO: 111663 - DNA, 15 bp, Homo sapiens
agcctggtcctctga

SEQ ID NO: 111664 - DNA, 15 bp, Homo sapiens
cagcctggtcctctg

SEQ ID NO: 111665 - DNA, 15 bp, Homo sapiens
acagcctggtcctct

SEQ ID NO: 111666 - DNA, 15 bp, Homo sapiens
cacagcctggtcctc

SEQ ID NO: 111667 - DNA, 15 bp, Homo sapiens
gcacagcctggtcct

SEQ ID NO: 111668 - DNA, 15 bp, Homo sapiens
cgcacagcctggtcc

SEQ ID NO: 111669 - DNA, 15 bp, Homo sapiens
acgcacagcctggtc

SEQ ID NO: 111670 - DNA, 15 bp, Homo sapiens
cacgcacagcctggt

SEQ ID NO: 111671 - DNA, 15 bp, Homo sapiens
ccacgcacagcctgg

SEQ ID NO: 111672 - DNA, 15 bp, Homo sapiens
accacgcacagcctg

SEQ ID NO: 111673 - DNA, 15 bp, Homo sapiens
caccacgcacagcct

SEQ ID NO: 111674 - DNA, 15 bp, Homo sapiens
gcaccacgcacagcc

SEQ ID NO: 111675 - DNA, 15 bp, Homo sapiens
ggcaccacgcacagc

SEQ ID NO: 111676 - DNA, 15 bp, Homo sapiens
gggcaccacgcacag

SEQ ID NO: 111677 - DNA, 15 bp, Homo sapiens
cgggcaccacgcaca

SEQ ID NO: 111678 - DNA, 15 bp, Homo sapiens
gcgggcaccacgcac

SEQ ID NO: 111679 - DNA, 15 bp, Homo sapiens
ggcgggcaccacgca

SEQ ID NO: 111680 - DNA, 15 bp, Homo sapiens
cggcgggcaccacgc

SEQ ID NO: 111681 - DNA, 15 bp, Homo sapiens
acggcgggcaccacg

SEQ ID NO: 111682 - DNA, 15 bp, Homo sapiens
cacggcgggcaccac

SEQ ID NO: 111683 - DNA, 15 bp, Homo sapiens
ccacggcgggcacca

SEQ ID NO: 111684 - DNA, 15 bp, Homo sapiens
cccacggcgggcacc

SEQ ID NO: 111685 - DNA, 15 bp, Homo sapiens
tcccacggcgggcac

SEQ ID NO: 111686 - DNA, 15 bp, Homo sapiens
ctcccacggcgggca

SEQ ID NO: 111687 - DNA, 15 bp, Homo sapiens
cctcccacggcgggc

SEQ ID NO: 111688 - DNA, 15 bp, Homo sapiens
gcctcccacggcggg

SEQ ID NO: 111689 - DNA, 15 bp, Homo sapiens
ggcctcccacggcgg

SEQ ID NO: 111690 - DNA, 15 bp, Homo sapiens
tggcctcccacggcg

SEQ ID NO: 111691 - DNA, 15 bp, Homo sapiens
ctggcctcccacggc

SEQ ID NO: 111692 - DNA, 15 bp, Homo sapiens
gctggcctcccacgg

SEQ ID NO: 111693 - DNA, 15 bp, Homo sapiens
ggctggcctcccacg

SEQ ID NO: 111694 - DNA, 15 bp, Homo sapiens
aggctggcctcccac

SEQ ID NO: 111695 - DNA, 15 bp, Homo sapiens
caggctggcctccca

SEQ ID NO: 111696 - DNA, 15 bp, Homo sapiens
ccaggctggcctccc

SEQ ID NO: 111697 - DNA, 15 bp, Homo sapiens
gccaggctggcctcc

SEQ ID NO: 111698 - DNA, 15 bp, Homo sapiens
cgccaggctggcctc

SEQ ID NO: 111699 - DNA, 15 bp, Homo sapiens
acgccaggctggcct

SEQ ID NO: 111700 - DNA, 15 bp, Homo sapiens
aacgccaggctggcc

SEQ ID NO: 111701 - DNA, 15 bp, Homo sapiens
caacgccaggctggc

SEQ ID NO: 111702 - DNA, 15 bp, Homo sapiens
ccaacgccaggctgg

SEQ ID NO: 111703 - DNA, 15 bp, Homo sapiens
gccaacgccaggctg

SEQ ID NO: 111704 - DNA, 15 bp, Homo sapiens
tgccaacgccaggct

SEQ ID NO: 111705 - DNA, 15 bp, Homo sapiens
atgccaacgccaggc

SEQ ID NO: 111706 - DNA, 15 bp, Homo sapiens
gatgccaacgccagg

SEQ ID NO: 111707 - DNA, 15 bp, Homo sapiens
ggatgccaacgccag

SEQ ID NO: 111708 - DNA, 15 bp, Homo sapiens
tggatgccaacgcca

SEQ ID NO: 111709 - DNA, 15 bp, Homo sapiens
ctggatgccaacgcc

SEQ ID NO: 111710 - DNA, 15 bp, Homo sapiens
gctggatgccaacgc

SEQ ID NO: 111711 - DNA, 15 bp, Homo sapiens
tgctggatgccaacg

SEQ ID NO: 111712 - DNA, 15 bp, Homo sapiens
atgctggatgccaac

SEQ ID NO: 111713 - DNA, 15 bp, Homo sapiens
gatgctggatgccaa

SEQ ID NO: 111714 - DNA, 15 bp, Homo sapiens
tgatgctggatgcca

SEQ ID NO: 111715 - DNA, 15 bp, Homo sapiens
atgatgctggatgcc

SEQ ID NO: 111716 - DNA, 15 bp, Homo sapiens
gatgatgctggatgc

SEQ ID NO: 111717 - DNA, 15 bp, Homo sapiens
tgatgatgctggatg

SEQ ID NO: 111718 - DNA, 15 bp, Homo sapiens
ctgatgatgctggat

SEQ ID NO: 111719 - DNA, 15 bp, Homo sapiens
actgatgatgctgga

SEQ ID NO: 111720 - DNA, 15 bp, Homo sapiens
aactgatgatgctgg

SEQ ID NO: 111721 - DNA, 15 bp, Homo sapiens
aaactgatgatgctg

SEQ ID NO: 111722 - DNA, 15 bp, Homo sapiens
caaactgatgatgct

SEQ ID NO: 111723 - DNA, 15 bp, Homo sapiens
acaaactgatgatgc

SEQ ID NO: 111724 - DNA, 15 bp, Homo sapiens
cacaaactgatgatg

SEQ ID NO: 111725 - DNA, 15 bp, Homo sapiens
gcacaaactgatgat

SEQ ID NO: 111726 - DNA, 15 bp, Homo sapiens
tgcacaaactgatga

SEQ ID NO: 111727 - DNA, 15 bp, Homo sapiens
ctgcacaaactgatg

SEQ ID NO: 111728 - DNA, 15 bp, Homo sapiens
actgcacaaactgat

SEQ ID NO: 111729 - DNA, 15 bp, Homo sapiens
gactgcacaaactga

SEQ ID NO: 111730 - DNA, 15 bp, Homo sapiens
cgactgcacaaactg

SEQ ID NO: 111731 - DNA, 15 bp, Homo sapiens
ccgactgcacaaact

SEQ ID NO: 111732 - DNA, 15 bp, Homo sapiens
cccgactgcacaaac

SEQ ID NO: 111733 - DNA, 15 bp, Homo sapiens
acccgactgcacaaa

SEQ ID NO: 111734 - DNA, 15 bp, Homo sapiens
cacccgactgcacaa

SEQ ID NO: 111735 - DNA, 15 bp, Homo sapiens
ccacccgactgcaca

SEQ ID NO: 111736 - DNA, 15 bp, Homo sapiens
cccacccgactgcac

SEQ ID NO: 111737 - DNA, 15 bp, Homo sapiens
ccccacccgactgca

SEQ ID NO: 111738 - DNA, 15 bp, Homo sapiens
gccccacccgactgc

SEQ ID NO: 111739 - DNA, 15 bp, Homo sapiens
agccccacccgactg

SEQ ID NO: 111740 - DNA, 15 bp, Homo sapiens
gagccccacccgact

SEQ ID NO: 111741 - DNA, 15 bp, Homo sapiens
tgagccccacccgac

SEQ ID NO: 111742 - DNA, 15 bp, Homo sapiens
ctgagccccacccga

SEQ ID NO: 111743 - DNA, 15 bp, Homo sapiens
actgagccccacccg

SEQ ID NO: 111744 - DNA, 15 bp, Homo sapiens
cactgagccccaccc

SEQ ID NO: 111745 - DNA, 15 bp, Homo sapiens
tcactgagccccacc

SEQ ID NO: 111746 - DNA, 15 bp, Homo sapiens
ctcactgagccccac

SEQ ID NO: 111747 - DNA, 15 bp, Homo sapiens
actcactgagcccca

SEQ ID NO: 111748 - DNA, 15 bp, Homo sapiens
cactcactgagcccc

SEQ ID NO: 111749 - DNA, 15 bp, Homo sapiens
gcactcactgagccc

SEQ ID NO: 111750 - DNA, 15 bp, Homo sapiens
ggcactcactgagcc

SEQ ID NO: 111751 - DNA, 15 bp, Homo sapiens
aggcactcactgagc

SEQ ID NO: 111752 - DNA, 15 bp, Homo sapiens
gaggcactcactgag

SEQ ID NO: 111753 - DNA, 15 bp, Homo sapiens
ggaggcactcactga

SEQ ID NO: 111754 - DNA, 15 bp, Homo sapiens
aggaggcactcactg

SEQ ID NO: 111755 - DNA, 15 bp, Homo sapiens
caggaggcactcact

SEQ ID NO: 111756 - DNA, 15 bp, Homo sapiens
acaggaggcactcac

SEQ ID NO: 111757 - DNA, 15 bp, Homo sapiens
cacaggaggcactca

SEQ ID NO: 111758 - DNA, 15 bp, Homo sapiens
acacaggaggcactc

SEQ ID NO: 111759 - DNA, 15 bp, Homo sapiens
cacacaggaggcact

SEQ ID NO: 111760 - DNA, 15 bp, Homo sapiens
gcacacaggaggcac

SEQ ID NO: 111761 - DNA, 15 bp, Homo sapiens
ggcacacaggaggca

SEQ ID NO: 111762 - DNA, 15 bp, Homo sapiens
tggcacacaggaggc

SEQ ID NO: 111763 - DNA, 15 bp, Homo sapiens
ctggcacacaggagg

SEQ ID NO: 111764 - DNA, 15 bp, Homo sapiens
cctggcacacaggag

SEQ ID NO: 111765 - DNA, 15 bp, Homo sapiens
gcctggcacacagga

SEQ ID NO: 111766 - DNA, 15 bp, Homo sapiens
tgcctggcacacagg

SEQ ID NO: 111767 - DNA, 15 bp, Homo sapiens
ttgtgcctggcacac

SEQ ID NO: 111768 - DNA, 15 bp, Homo sapiens
attgtgcctggcaca

SEQ ID NO: 111769 - DNA, 15 bp, Homo sapiens
cattgtgcctggcac

SEQ ID NO: 111770 - DNA, 15 bp, Homo sapiens
tcattgtgcctggca

SEQ ID NO: 111771 - DNA, 15 bp, Homo sapiens
gtcattgtgcctggc

SEQ ID NO: 111772 - DNA, 15 bp, Homo sapiens
cgtcattgtgcctgg

SEQ ID NO: 111773 - DNA, 15 bp, Homo sapiens
gcgtcattgtgcctg

SEQ ID NO: 111774 - DNA, 15 bp, Homo sapiens
tgcgtcattgtgcct

SEQ ID NO: 111775 - DNA, 15 bp, Homo sapiens
gtgcgtcattgtgcc

SEQ ID NO: 111776 - DNA, 15 bp, Homo sapiens
tgtgcgtcattgtgc

SEQ ID NO: 111777 - DNA, 15 bp, Homo sapiens
ttgtgcgtcattgtg

SEQ ID NO: 111778 - DNA, 15 bp, Homo sapiens
attgtgcgtcattgt

SEQ ID NO: 111779 - DNA, 15 bp, Homo sapiens
cattgtgcgtcattg

SEQ ID NO: 111780 - DNA, 15 bp, Homo sapiens
acattgtgcgtcatt

SEQ ID NO: 111781 - DNA, 15 bp, Homo sapiens
cacattgtgcgtcat

SEQ ID NO: 111782 - DNA, 15 bp, Homo sapiens
acacattgtgcgtca

SEQ ID NO: 111783 - DNA, 15 bp, Homo sapiens
cacacattgtgcgtc

SEQ ID NO: 111784 - DNA, 15 bp, Homo sapiens
gcacacattgtgcgt

SEQ ID NO: 111785 - DNA, 15 bp, Homo sapiens
tgcacacattgtgcg

SEQ ID NO: 111786 - DNA, 15 bp, Homo sapiens
gtgcacacattgtgc

SEQ ID NO: 111787 - DNA, 15 bp, Homo sapiens
tgtgcacacattgtg

SEQ ID NO: 111788 - DNA, 15 bp, Homo sapiens
gtgtgcacacattgt

SEQ ID NO: 111789 - DNA, 15 bp, Homo sapiens
ggtgtgcacacattg

SEQ ID NO: 111790 - DNA, 15 bp, Homo sapiens
tggtgtgcacacatt

SEQ ID NO: 111791 - DNA, 15 bp, Homo sapiens
ctggtgtgcacacat

SEQ ID NO: 111792 - DNA, 15 bp, Homo sapiens
cctggtgtgcacaca

SEQ ID NO: 111793 - DNA, 15 bp, Homo sapiens
gcctggtgtgcacac

SEQ ID NO: 111794 - DNA, 15 bp, Homo sapiens
agcctggtgtgcaca

SEQ ID NO: 111795 - DNA, 15 bp, Homo sapiens
gagcctggtgtgcac

SEQ ID NO: 111796 - DNA, 15 bp, Homo sapiens
tgagcctggtgtgca

SEQ ID NO: 111797 - DNA, 15 bp, Homo sapiens
atgagcctggtgtgc

SEQ ID NO: 111798 - DNA, 15 bp, Homo sapiens
catgagcctggtgtg

SEQ ID NO: 111799 - DNA, 15 bp, Homo sapiens
acatgagcctggtgt

SEQ ID NO: 111800 - DNA, 15 bp, Homo sapiens
cacatgagcctggtg

SEQ ID NO: 111801 - DNA, 15 bp, Homo sapiens
gcacatgagcctggt

SEQ ID NO: 111802 - DNA, 15 bp, Homo sapiens
tgcacatgagcctgg

SEQ ID NO: 111803 - DNA, 15 bp, Homo sapiens
ctgcacatgagcctg

SEQ ID NO: 111804 - DNA, 15 bp, Homo sapiens
cctgcacatgagcct

SEQ ID NO: 111805 - DNA, 15 bp, Homo sapiens
acctgcacatgagcc

SEQ ID NO: 111806 - DNA, 15 bp, Homo sapiens
cacctgcacatgagc

SEQ ID NO: 111807 - DNA, 15 bp, Homo sapiens
ccacctgcacatgag

SEQ ID NO: 111808 - DNA, 15 bp, Homo sapiens
gccacctgcacatga

SEQ ID NO: 111809 - DNA, 15 bp, Homo sapiens
agccacctgcacatg

SEQ ID NO: 111810 - DNA, 15 bp, Homo sapiens
cagccacctgcacat

SEQ ID NO: 111811 - DNA, 15 bp, Homo sapiens
gcagccacctgcaca

SEQ ID NO: 111812 - DNA, 15 bp, Homo sapiens
cgcagccacctgcac

SEQ ID NO: 111813 - DNA, 15 bp, Homo sapiens
tcgcagccacctgca

SEQ ID NO: 111814 - DNA, 15 bp, Homo sapiens
ctcgcagccacctgc

SEQ ID NO: 111815 - DNA, 15 bp, Homo sapiens
tctcgcagccacctg

SEQ ID NO: 111816 - DNA, 15 bp, Homo sapiens
gtctcgcagccacct

SEQ ID NO: 111817 - DNA, 15 bp, Homo sapiens
tgtctcgcagccacc

SEQ ID NO: 111818 - DNA, 15 bp, Homo sapiens
ctgtctcgcagccac

SEQ ID NO: 111819 - DNA, 15 bp, Homo sapiens
cctgtctcgcagcca

SEQ ID NO: 111820 - DNA, 15 bp, Homo sapiens
ccctgtctcgcagcc

SEQ ID NO: 111821 - DNA, 15 bp, Homo sapiens
gccctgtctcgcagc

SEQ ID NO: 111822 - DNA, 15 bp, Homo sapiens
cgccctgtctcgcag

SEQ ID NO: 111823 - DNA, 15 bp, Homo sapiens
tcgccctgtctcgca

SEQ ID NO: 111824 - DNA, 15 bp, Homo sapiens
gtcgccctgtctcgc

SEQ ID NO: 111825 - DNA, 15 bp, Homo sapiens
ggtcgccctgtctcg

SEQ ID NO: 111826 - DNA, 15 bp, Homo sapiens
gggtcgccctgtctc

SEQ ID NO: 111827 - DNA, 15 bp, Homo sapiens
tgggtcgccctgtct

SEQ ID NO: 111828 - DNA, 15 bp, Homo sapiens
atgggtcgccctgtc

SEQ ID NO: 111829 - DNA, 15 bp, Homo sapiens
gatgggtcgccctgt

SEQ ID NO: 111830 - DNA, 15 bp, Homo sapiens
tgatgggtcgccctg

SEQ ID NO: 111831 - DNA, 15 bp, Homo sapiens
ttgatgggtcgccct

SEQ ID NO: 111832 - DNA, 15 bp, Homo sapiens
cttgatgggtcgccc

SEQ ID NO: 111833 - DNA, 15 bp, Homo sapiens
ccttgatgggtcgcc

SEQ ID NO: 111834 - DNA, 15 bp, Homo sapiens
gccttgatgggtcgc

SEQ ID NO: 111835 - DNA, 15 bp, Homo sapiens
tgccttgatgggtcg

SEQ ID NO: 111836 - DNA, 15 bp, Homo sapiens
ctgccttgatgggtc

SEQ ID NO: 111837 - DNA, 15 bp, Homo sapiens
tctgccttgatgggt

SEQ ID NO: 111838 - DNA, 15 bp, Homo sapiens
atctgccttgatggg

SEQ ID NO: 111839 - DNA, 15 bp, Homo sapiens
catctgccttgatgg

SEQ ID NO: 111840 - DNA, 15 bp, Homo sapiens
gcatctgccttgatg

SEQ ID NO: 111841 - DNA, 15 bp, Homo sapiens
tgcatctgccttgat

SEQ ID NO: 111842 - DNA, 15 bp, Homo sapiens
gtgcatctgccttga

SEQ ID NO: 111843 - DNA, 15 bp, Homo sapiens
ggtgcatctgccttg

SEQ ID NO: 111844 - DNA, 15 bp, Homo sapiens
tggtgcatctgcctt

SEQ ID NO: 111845 - DNA, 15 bp, Homo sapiens
atggtgcatctgcct

SEQ ID NO: 111846 - DNA, 15 bp, Homo sapiens
catggtgcatctgcc

SEQ ID NO: 111847 - DNA, 15 bp, Homo sapiens
tcatggtgcatctgc

SEQ ID NO: 111848 - DNA, 15 bp, Homo sapiens
ctcatggtgcatctg

SEQ ID NO: 111849 - DNA, 15 bp, Homo sapiens
cctcatggtgcatct

SEQ ID NO: 111850 - DNA, 15 bp, Homo sapiens
gcctcatggtgcatc

SEQ ID NO: 111851 - DNA, 15 bp, Homo sapiens
tgcctcatggtgcat

SEQ ID NO: 111852 - DNA, 15 bp, Homo sapiens
ctgcctcatggtgca

SEQ ID NO: 111853 - DNA, 15 bp, Homo sapiens
actgcctcatggtgc

SEQ ID NO: 111854 - DNA, 15 bp, Homo sapiens
cactgcctcatggtg

SEQ ID NO: 111855 - DNA, 15 bp, Homo sapiens
ccactgcctcatggt

SEQ ID NO: 111856 - DNA, 15 bp, Homo sapiens
gccactgcctcatgg

SEQ ID NO: 111857 - DNA, 15 bp, Homo sapiens
ggccactgcctcatg

SEQ ID NO: 111858 - DNA, 15 bp, Homo sapiens
tggccactgcctcat

SEQ ID NO: 111859 - DNA, 15 bp, Homo sapiens
ctggccactgcctca

SEQ ID NO: 111860 - DNA, 15 bp, Homo sapiens
actggccactgcctc

SEQ ID NO: 111861 - DNA, 15 bp, Homo sapiens
cactggccactgcct

SEQ ID NO: 111862 - DNA, 15 bp, Homo sapiens
gcactggccactgcc

SEQ ID NO: 111863 - DNA, 15 bp, Homo sapiens
agcactggccactgc

SEQ ID NO: 111864 - DNA, 15 bp, Homo sapiens
cagcactggccactg

SEQ ID NO: 111865 - DNA, 15 bp, Homo sapiens
acagcactggccact

SEQ ID NO: 111866 - DNA, 15 bp, Homo sapiens
cacagcactggccac

SEQ ID NO: 111867 - DNA, 15 bp, Homo sapiens
ccacagcactggcca

SEQ ID NO: 111868 - DNA, 15 bp, Homo sapiens
cccacagcactggcc

SEQ ID NO: 111869 - DNA, 15 bp, Homo sapiens
acccacagcactggc

SEQ ID NO: 111870 - DNA, 15 bp, Homo sapiens
cacccacagcactgg

SEQ ID NO: 111871 - DNA, 15 bp, Homo sapiens
acacccacagcactg

SEQ ID NO: 111872 - DNA, 15 bp, Homo sapiens
aacacccacagcact

SEQ ID NO: 111873 - DNA, 15 bp, Homo sapiens
taacacccacagcac

SEQ ID NO: 111874 - DNA, 15 bp, Homo sapiens
ctaacacccacagca

SEQ ID NO: 111875 - DNA, 15 bp, Homo sapiens
cctaacacccacagc

SEQ ID NO: 111876 - DNA, 15 bp, Homo sapiens
ccctaacacccacag

SEQ ID NO: 111877 - DNA, 15 bp, Homo sapiens
cccctaacacccaca

SEQ ID NO: 111878 - DNA, 15 bp, Homo sapiens
gcccctaacacccac

SEQ ID NO: 111879 - DNA, 15 bp, Homo sapiens
tgcccctaacaccca

SEQ ID NO: 111880 - DNA, 15 bp, Homo sapiens
atgcccctaacaccc

SEQ ID NO: 111881 - DNA, 15 bp, Homo sapiens
aatgcccctaacacc

SEQ ID NO: 111882 - DNA, 15 bp, Homo sapiens
caatgcccctaacac

SEQ ID NO: 111883 - DNA, 15 bp, Homo sapiens
gcaatgcccctaaca

SEQ ID NO: 111884 - DNA, 15 bp, Homo sapiens
agcaatgcccctaac

SEQ ID NO: 111885 - DNA, 15 bp, Homo sapiens
gagcaatgcccctaa

SEQ ID NO: 111886 - DNA, 15 bp, Homo sapiens
ggagcaatgccccta

SEQ ID NO: 111887 - DNA, 15 bp, Homo sapiens
gggagcaatgcccct

SEQ ID NO: 111888 - DNA, 15 bp, Homo sapiens
ggggagcaatgcccc

SEQ ID NO: 111889 - DNA, 15 bp, Homo sapiens
cggggagcaatgccc

SEQ ID NO: 111890 - DNA, 15 bp, Homo sapiens
ccggggagcaatgcc

SEQ ID NO: 111891 - DNA, 15 bp, Homo sapiens
gccggggagcaatgc

SEQ ID NO: 111892 - DNA, 15 bp, Homo sapiens
ggccggggagcaatg

SEQ ID NO: 111893 - DNA, 15 bp, Homo sapiens
tggccggggagcaat

SEQ ID NO: 111894 - DNA, 15 bp, Homo sapiens
gtggccggggagcaa

SEQ ID NO: 111895 - DNA, 15 bp, Homo sapiens
agtggccggggagca

SEQ ID NO: 111896 - DNA, 15 bp, Homo sapiens
tagtggccggggagc

SEQ ID NO: 111897 - DNA, 15 bp, Homo sapiens
gtagtggccggggag

SEQ ID NO: 111898 - DNA, 15 bp, Homo sapiens
cgtagtggccgggga

SEQ ID NO: 111899 - DNA, 15 bp, Homo sapiens
ccgtagtggccgggg

SEQ ID NO: 111900 - DNA, 15 bp, Homo sapiens
gccgtagtggccggg

SEQ ID NO: 111901 - DNA, 15 bp, Homo sapiens
tgccgtagtggccgg

SEQ ID NO: 111902 - DNA, 15 bp, Homo sapiens
atgccgtagtggccg

SEQ ID NO: 111903 - DNA, 15 bp, Homo sapiens
tatgccgtagtggcc

SEQ ID NO: 111904 - DNA, 15 bp, Homo sapiens
ctatgccgtagtggc

SEQ ID NO: 111905 - DNA, 15 bp, Homo sapiens
gctatgccgtagtgg

SEQ ID NO: 111906 - DNA, 15 bp, Homo sapiens
tgctatgccgtagtg

SEQ ID NO: 111907 - DNA, 15 bp, Homo sapiens
ctgctatgccgtagt

SEQ ID NO: 111908 - DNA, 15 bp, Homo sapiens
cctgctatgccgtag

SEQ ID NO: 111909 - DNA, 15 bp, Homo sapiens
gcctgctatgccgta

SEQ ID NO: 111910 - DNA, 15 bp, Homo sapiens
tgcctgctatgccgt

SEQ ID NO: 111911 - DNA, 15 bp, Homo sapiens
ctgcctgctatgccg

SEQ ID NO: 111912 - DNA, 15 bp, Homo sapiens
actgcctgctatgcc

SEQ ID NO: 111913 - DNA, 15 bp, Homo sapiens
cactgcctgctatgc

SEQ ID NO: 111914 - DNA, 15 bp, Homo sapiens
tcactgcctgctatg

SEQ ID NO: 111915 - DNA, 15 bp, Homo sapiens
atcactgcctgctat

SEQ ID NO: 111916 - DNA, 15 bp, Homo sapiens
gatcactgcctgcta

SEQ ID NO: 111917 - DNA, 15 bp, Homo sapiens
cgatcactgcctgct

SEQ ID NO: 111918 - DNA, 15 bp, Homo sapiens
gcgatcactgcctgc

SEQ ID NO: 111919 - DNA, 15 bp, Homo sapiens
ggcgatcactgcctg

SEQ ID NO: 111920 - DNA, 15 bp, Homo sapiens
tggcgatcactgcct

SEQ ID NO: 111921 - DNA, 15 bp, Homo sapiens
gtggcgatcactgcc

SEQ ID NO: 111922 - DNA, 15 bp, Homo sapiens
tgtggcgatcactgc

SEQ ID NO: 111923 - DNA, 15 bp, Homo sapiens
gtgtggcgatcactg

SEQ ID NO: 111924 - DNA, 15 bp, Homo sapiens
agtgtggcgatcact

SEQ ID NO: 111925 - DNA, 15 bp, Homo sapiens
cagtgtggcgatcac

SEQ ID NO: 111926 - DNA, 15 bp, Homo sapiens
ccagtgtggcgatca

SEQ ID NO: 111927 - DNA, 15 bp, Homo sapiens
gccagtgtggcgatc

SEQ ID NO: 111928 - DNA, 15 bp, Homo sapiens
ggccagtgtggcgat

SEQ ID NO: 111929 - DNA, 15 bp, Homo sapiens
tggccagtgtggcga

SEQ ID NO: 111930 - DNA, 15 bp, Homo sapiens
ttggccagtgtggcg

SEQ ID NO: 111931 - DNA, 15 bp, Homo sapiens
cttggccagtgtggc

SEQ ID NO: 111932 - DNA, 15 bp, Homo sapiens
gcttggccagtgtgg

SEQ ID NO: 111933 - DNA, 15 bp, Homo sapiens
agcttggccagtgtg

SEQ ID NO: 111934 - DNA, 15 bp, Homo sapiens
aagcttggccagtgt

SEQ ID NO: 111935 - DNA, 15 bp, Homo sapiens
aaagcttggccagtg

SEQ ID NO: 111936 - DNA, 15 bp, Homo sapiens
taaagcttggccagt

SEQ ID NO: 111937 - DNA, 15 bp, Homo sapiens
ctaaagcttggccag

SEQ ID NO: 111938 - DNA, 15 bp, Homo sapiens
tctaaagcttggcca

SEQ ID NO: 111939 - DNA, 15 bp, Homo sapiens
gtctaaagcttggcc

SEQ ID NO: 111940 - DNA, 15 bp, Homo sapiens
ggtctaaagcttggc

SEQ ID NO: 111941 - DNA, 15 bp, Homo sapiens
tggtctaaagcttgg

SEQ ID NO: 111942 - DNA, 15 bp, Homo sapiens
atggtctaaagcttg

SEQ ID NO: 111943 - DNA, 15 bp, Homo sapiens
aatggtctaaagctt

SEQ ID NO: 111944 - DNA, 15 bp, Homo sapiens
aaatggtctaaagct

SEQ ID NO: 111945 - DNA, 15 bp, Homo sapiens
taaatggtctaaagc

SEQ ID NO: 111946 - DNA, 15 bp, Homo sapiens
ataaatggtctaaag

SEQ ID NO: 111947 - DNA, 15 bp, Homo sapiens
aataaatggtctaaa

SEQ ID NO: 111948 - DNA, 15 bp, Homo sapiens
gaataaatggtctaa

SEQ ID NO: 111949 - DNA, 15 bp, Homo sapiens
ggaataaatggtcta

SEQ ID NO: 111950 - DNA, 15 bp, Homo sapiens
tggaataaatggtct

SEQ ID NO: 111951 - DNA, 15 bp, Homo sapiens
ctggaataaatggtc

SEQ ID NO: 111952 - DNA, 15 bp, Homo sapiens
tctggaataaatggt

SEQ ID NO: 111953 - DNA, 15 bp, Homo sapiens
ctctggaataaatgg

SEQ ID NO: 111954 - DNA, 15 bp, Homo sapiens
tctctggaataaatg

SEQ ID NO: 111955 - DNA, 15 bp, Homo sapiens
gtctctggaataaat

SEQ ID NO: 111956 - DNA, 15 bp, Homo sapiens
ggtctctggaataaa

SEQ ID NO: 111957 - DNA, 15 bp, Homo sapiens
gggtctctggaataa

SEQ ID NO: 111958 - DNA, 15 bp, Homo sapiens
ggggtctctggaata

SEQ ID NO: 111959 - DNA, 15 bp, Homo sapiens
tggggtctctggaat

SEQ ID NO: 111960 - DNA, 15 bp, Homo sapiens
ctggggtctctggaa

SEQ ID NO: 111961 - DNA, 15 bp, Homo sapiens
tctggggtctctgga

SEQ ID NO: 111962 - DNA, 15 bp, Homo sapiens
ctctggggtctctgg

SEQ ID NO: 111963 - DNA, 15 bp, Homo sapiens
cctctggggtctctg

SEQ ID NO: 111964 - DNA, 15 bp, Homo sapiens
gcctctggggtctct

SEQ ID NO: 111965 - DNA, 15 bp, Homo sapiens
tgcctctggggtctc

SEQ ID NO: 111966 - DNA, 15 bp, Homo sapiens
ttgcctctggggtct

SEQ ID NO: 111967 - DNA, 15 bp, Homo sapiens
tttgcctctggggtc

SEQ ID NO: 111968 - DNA, 15 bp, Homo sapiens
ttttgcctctggggt

SEQ ID NO: 111969 - DNA, 15 bp, Homo sapiens
tttttgcctctgggg

SEQ ID NO: 111970 - DNA, 15 bp, Homo sapiens
ctttttgcctctggg

SEQ ID NO: 111971 - DNA, 15 bp, Homo sapiens
gctttttgcctctgg

SEQ ID NO: 111972 - DNA, 15 bp, Homo sapiens
ggctttttgcctctg

SEQ ID NO: 111973 - DNA, 15 bp, Homo sapiens
gggctttttgcctct

SEQ ID NO: 111974 - DNA, 15 bp, Homo sapiens
cgggctttttgcctc

SEQ ID NO: 111975 - DNA, 15 bp, Homo sapiens
ccgggctttttgcct

SEQ ID NO: 111976 - DNA, 15 bp, Homo sapiens
gccgggctttttgcc

SEQ ID NO: 111977 - DNA, 15 bp, Homo sapiens
agccgggctttttgc

SEQ ID NO: 111978 - DNA, 15 bp, Homo sapiens
cagccgggctttttg

SEQ ID NO: 111979 - DNA, 15 bp, Homo sapiens
gcagccgggcttttt

SEQ ID NO: 111980 - DNA, 15 bp, Homo sapiens
tgcagccgggctttt

SEQ ID NO: 111981 - DNA, 15 bp, Homo sapiens
gtgcagccgggcttt

SEQ ID NO: 111982 - DNA, 15 bp, Homo sapiens
ggtgcagccgggctt

SEQ ID NO: 111983 - DNA, 15 bp, Homo sapiens
aggtgcagccgggct

SEQ ID NO: 111984 - DNA, 15 bp, Homo sapiens
gaggtgcagccgggc

SEQ ID NO: 111985 - DNA, 15 bp, Homo sapiens
ggaggtgcagccggg

SEQ ID NO: 111986 - DNA, 15 bp, Homo sapiens
gggaggtgcagccgg

SEQ ID NO: 111987 - DNA, 15 bp, Homo sapiens
tgggaggtgcagccg

SEQ ID NO: 111988 - DNA, 15 bp, Homo sapiens
ctgggaggtgcagcc

SEQ ID NO: 111989 - DNA, 15 bp, Homo sapiens
actgggaggtgcagc

SEQ ID NO: 111990 - DNA, 15 bp, Homo sapiens
cactgggaggtgcag

SEQ ID NO: 111991 - DNA, 15 bp, Homo sapiens
tcactgggaggtgca

SEQ ID NO: 111992 - DNA, 15 bp, Homo sapiens
gtcactgggaggtgc

SEQ ID NO: 111993 - DNA, 15 bp, Homo sapiens
agtcactgggaggtg

SEQ ID NO: 111994 - DNA, 15 bp, Homo sapiens
gagtcactgggaggt

SEQ ID NO: 111995 - DNA, 15 bp, Homo sapiens
ggagtcactgggagg

SEQ ID NO: 111996 - DNA, 15 bp, Homo sapiens
gggagtcactgggag

SEQ ID NO: 111997 - DNA, 15 bp, Homo sapiens
tgggagtcactggga

SEQ ID NO: 111998 - DNA, 15 bp, Homo sapiens
gtgggagtcactggg

SEQ ID NO: 111999 - DNA, 15 bp, Homo sapiens
tgtgggagtcactgg

SEQ ID NO: 112000 - DNA, 15 bp, Homo sapiens
ctgtgggagtcactg

SEQ ID NO: 112001 - DNA, 15 bp, Homo sapiens
gctgtgggagtcact

SEQ ID NO: 112002 - DNA, 15 bp, Homo sapiens
ggctgtgggagtcac

SEQ ID NO: 112003 - DNA, 15 bp, Homo sapiens
tggctgtgggagtca

SEQ ID NO: 112004 - DNA, 15 bp, Homo sapiens
atggctgtgggagtc

SEQ ID NO: 112005 - DNA, 15 bp, Homo sapiens
aatggctgtgggagt

SEQ ID NO: 112006 - DNA, 15 bp, Homo sapiens
caatggctgtgggag

SEQ ID NO: 112007 - DNA, 15 bp, Homo sapiens
tcaatggctgtggga

SEQ ID NO: 112008 - DNA, 15 bp, Homo sapiens
ctcaatggctgtggg

SEQ ID NO: 112009 - DNA, 15 bp, Homo sapiens
gctcaatggctgtgg

SEQ ID NO: 112010 - DNA, 15 bp, Homo sapiens
tgctcaatggctgtg

SEQ ID NO: 112011 - DNA, 15 bp, Homo sapiens
ctgctcaatggctgt

SEQ ID NO: 112012 - DNA, 15 bp, Homo sapiens
tctgctcaatggctg

SEQ ID NO: 112013 - DNA, 15 bp, Homo sapiens
ctctgctcaatggct

SEQ ID NO: 112014 - DNA, 15 bp, Homo sapiens
tctctgctcaatggc

SEQ ID NO: 112015 - DNA, 15 bp, Homo sapiens
gtctctgctcaatgg

SEQ ID NO: 112016 - DNA, 15 bp, Homo sapiens
tgtctctgctcaatg

SEQ ID NO: 112017 - DNA, 15 bp, Homo sapiens
gtgtctctgctcaat

SEQ ID NO: 112018 - DNA, 15 bp, Homo sapiens
agtgtctctgctcaa

SEQ ID NO: 112019 - DNA, 15 bp, Homo sapiens
gagtgtctctgctca

SEQ ID NO: 112020 - DNA, 15 bp, Homo sapiens
tgagtgtctctgctc

SEQ ID NO: 112021 - DNA, 15 bp, Homo sapiens
ctgagtgtctctgct

SEQ ID NO: 112022 - DNA, 15 bp, Homo sapiens
cctgagtgtctctgc

SEQ ID NO: 112023 - DNA, 15 bp, Homo sapiens
tcctgagtgtctctg

SEQ ID NO: 112024 - DNA, 15 bp, Homo sapiens
gtcctgagtgtctct

SEQ ID NO: 112025 - DNA, 15 bp, Homo sapiens
ggtcctgagtgtctc

SEQ ID NO: 112026 - DNA, 15 bp, Homo sapiens
aggtcctgagtgtct

SEQ ID NO: 112027 - DNA, 15 bp, Homo sapiens
aaggtcctgagtgtc

SEQ ID NO: 112028 - DNA, 15 bp, Homo sapiens
caaggtcctgagtgt

SEQ ID NO: 112029 - DNA, 15 bp, Homo sapiens
acaaggtcctgagtg

SEQ ID NO: 112030 - DNA, 15 bp, Homo sapiens
cacaaggtcctgagt

SEQ ID NO: 112031 - DNA, 15 bp, Homo sapiens
tcacaaggtcctgag

SEQ ID NO: 112032 - DNA, 15 bp, Homo sapiens
atcacaaggtcctga

SEQ ID NO: 112033 - DNA, 15 bp, Homo sapiens
catcacaaggtcctg

SEQ ID NO: 112034 - DNA, 15 bp, Homo sapiens
ccatcacaaggtcct

SEQ ID NO: 112035 - DNA, 15 bp, Homo sapiens
cccatcacaaggtcc

SEQ ID NO: 112036 - DNA, 15 bp, Homo sapiens
tcccatcacaaggtc

SEQ ID NO: 112037 - DNA, 15 bp, Homo sapiens
ctcccatcacaaggt

SEQ ID NO: 112038 - DNA, 15 bp, Homo sapiens
cctcccatcacaagg

SEQ ID NO: 112039 - DNA, 15 bp, Homo sapiens
acctcccatcacaag

SEQ ID NO: 112040 - DNA, 15 bp, Homo sapiens
aacctcccatcacaa

SEQ ID NO: 112041 - DNA, 15 bp, Homo sapiens
aaacctcccatcaca

SEQ ID NO: 112042 - DNA, 15 bp, Homo sapiens
gaaacctcccatcac

SEQ ID NO: 112043 - DNA, 15 bp, Homo sapiens
agaaacctcccatca

SEQ ID NO: 112044 - DNA, 15 bp, Homo sapiens
cagaaacctcccatc

SEQ ID NO: 112045 - DNA, 15 bp, Homo sapiens
gcagaaacctcccat

SEQ ID NO: 112046 - DNA, 15 bp, Homo sapiens
tgcagaaacctccca

SEQ ID NO: 112047 - DNA, 15 bp, Homo sapiens
gtgcagaaacctccc

SEQ ID NO: 112048 - DNA, 15 bp, Homo sapiens
agtgcagaaacctcc

SEQ ID NO: 112049 - DNA, 15 bp, Homo sapiens
cagtgcagaaacctc

SEQ ID NO: 112050 - DNA, 15 bp, Homo sapiens
ccagtgcagaaacct

SEQ ID NO: 112051 - DNA, 15 bp, Homo sapiens
tccagtgcagaaacc

SEQ ID NO: 112052 - DNA, 15 bp, Homo sapiens
ctccagtgcagaaac

SEQ ID NO: 112053 - DNA, 15 bp, Homo sapiens
tctccagtgcagaaa

SEQ ID NO: 112054 - DNA, 15 bp, Homo sapiens
ttctccagtgcagaa

SEQ ID NO: 112055 - DNA, 15 bp, Homo sapiens
gttctccagtgcaga

SEQ ID NO: 112056 - DNA, 15 bp, Homo sapiens
cgttctccagtgcag

SEQ ID NO: 112057 - DNA, 15 bp, Homo sapiens
tcgttctccagtgca

SEQ ID NO: 112058 - DNA, 15 bp, Homo sapiens
ctcgttctccagtgc

SEQ ID NO: 112059 - DNA, 15 bp, Homo sapiens
gctcgttctccagtg

SEQ ID NO: 112060 - DNA, 15 bp, Homo sapiens
ggctcgttctccagt

SEQ ID NO: 112061 - DNA, 15 bp, Homo sapiens
gggctcgttctccag

SEQ ID NO: 112062 - DNA, 15 bp, Homo sapiens
tgggctcgttctcca

SEQ ID NO: 112063 - DNA, 15 bp, Homo sapiens
ctgggctcgttctcc

SEQ ID NO: 112064 - DNA, 15 bp, Homo sapiens
tctgggctcgttctc

SEQ ID NO: 112065 - DNA, 15 bp, Homo sapiens
ttctgggctcgttct

SEQ ID NO: 112066 - DNA, 15 bp, Homo sapiens
cttctgggctcgttc

SEQ ID NO: 112067 - DNA, 15 bp, Homo sapiens
gcttctgggctcgtt

SEQ ID NO: 112068 - DNA, 15 bp, Homo sapiens
ggcttctgggctcgt

SEQ ID NO: 112069 - DNA, 15 bp, Homo sapiens
gggcttctgggctcg

SEQ ID NO: 112070 - DNA, 15 bp, Homo sapiens
agggcttctgggctc

SEQ ID NO: 112071 - DNA, 15 bp, Homo sapiens
gagggcttctgggct

SEQ ID NO: 112072 - DNA, 15 bp, Homo sapiens
agagggcttctgggc

SEQ ID NO: 112073 - DNA, 15 bp, Homo sapiens
gagagggcttctggg

SEQ ID NO: 112074 - DNA, 15 bp, Homo sapiens
tgagagggcttctgg

SEQ ID NO: 112075 - DNA, 15 bp, Homo sapiens
ctgagagggcttctg

SEQ ID NO: 112076 - DNA, 15 bp, Homo sapiens
gctgagagggcttct

SEQ ID NO: 112077 - DNA, 15 bp, Homo sapiens
ggctgagagggcttc

SEQ ID NO: 112078 - DNA, 15 bp, Homo sapiens
aggctgagagggctt

SEQ ID NO: 112079 - DNA, 15 bp, Homo sapiens
gaggctgagagggct

SEQ ID NO: 112080 - DNA, 15 bp, Homo sapiens
cgaggctgagagggc

SEQ ID NO: 112081 - DNA, 15 bp, Homo sapiens
ccgaggctgagaggg

SEQ ID NO: 112082 - DNA, 15 bp, Homo sapiens
tccgaggctgagagg

SEQ ID NO: 112083 - DNA, 15 bp, Homo sapiens
ttccgaggctgagag

SEQ ID NO: 112084 - DNA, 15 bp, Homo sapiens
gttccgaggctgaga

SEQ ID NO: 112085 - DNA, 15 bp, Homo sapiens
tgttccgaggctgag

SEQ ID NO: 112086 - DNA, 15 bp, Homo sapiens
ctgttccgaggctga

SEQ ID NO: 112087 - DNA, 15 bp, Homo sapiens
actgttccgaggctg

SEQ ID NO: 112088 - DNA, 15 bp, Homo sapiens
cactgttccgaggct

SEQ ID NO: 112089 - DNA, 15 bp, Homo sapiens
acactgttccgaggc

SEQ ID NO: 112090 - DNA, 15 bp, Homo sapiens
cacactgttccgagg

SEQ ID NO: 112091 - DNA, 15 bp, Homo sapiens
ccacactgttccgag

SEQ ID NO: 112092 - DNA, 15 bp, Homo sapiens
gccacactgttccga

SEQ ID NO: 112093 - DNA, 15 bp, Homo sapiens
ggccacactgttccg

SEQ ID NO: 112094 - DNA, 15 bp, Homo sapiens
tggccacactgttcc

SEQ ID NO: 112095 - DNA, 15 bp, Homo sapiens
ctggccacactgttc

SEQ ID NO: 112096 - DNA, 15 bp, Homo sapiens
actggccacactgtt

SEQ ID NO: 112097 - DNA, 15 bp, Homo sapiens
cactggccacactgt

SEQ ID NO: 112098 - DNA, 15 bp, Homo sapiens
ccactggccacactg

SEQ ID NO: 112099 - DNA, 15 bp, Homo sapiens
accactggccacact

SEQ ID NO: 112100 - DNA, 15 bp, Homo sapiens
caccactggccacac

SEQ ID NO: 112101 - DNA, 15 bp, Homo sapiens
ccaccactggccaca

SEQ ID NO: 112102 - DNA, 15 bp, Homo sapiens
cccaccactggccac

SEQ ID NO: 112103 - DNA, 15 bp, Homo sapiens
gcccaccactggcca

SEQ ID NO: 112104 - DNA, 15 bp, Homo sapiens
tgcccaccactggcc

SEQ ID NO: 112105 - DNA, 15 bp, Homo sapiens
ctgcccaccactggc

SEQ ID NO: 112106 - DNA, 15 bp, Homo sapiens
cctgcccaccactgg

SEQ ID NO: 112107 - DNA, 15 bp, Homo sapiens
acctgcccaccactg

SEQ ID NO: 112108 - DNA, 15 bp, Homo sapiens
gacctgcccaccact

SEQ ID NO: 112109 - DNA, 15 bp, Homo sapiens
tgacctgcccaccac

SEQ ID NO: 112110 - DNA, 15 bp, Homo sapiens
ctgacctgcccacca

SEQ ID NO: 112111 - DNA, 15 bp, Homo sapiens
cctgacctgcccacc

SEQ ID NO: 112112 - DNA, 15 bp, Homo sapiens
tcctgacctgcccac

SEQ ID NO: 112113 - DNA, 15 bp, Homo sapiens
ctcctgacctgccca

SEQ ID NO: 112114 - DNA, 15 bp, Homo sapiens
cctcctgacctgccc

SEQ ID NO: 112115 - DNA, 15 bp, Homo sapiens
ccctcctgacctgcc

SEQ ID NO: 112116 - DNA, 15 bp, Homo sapiens
cccctcctgacctgc

SEQ ID NO: 112117 - DNA, 15 bp, Homo sapiens
gcccctcctgacctg

SEQ ID NO: 112118 - DNA, 15 bp, Homo sapiens
agcccctcctgacct

SEQ ID NO: 112119 - DNA, 15 bp, Homo sapiens
aagcccctcctgacc

SEQ ID NO: 112120 - DNA, 15 bp, Homo sapiens
gaagcccctcctgac

SEQ ID NO: 112121 - DNA, 15 bp, Homo sapiens
tgaagcccctcctga

SEQ ID NO: 112122 - DNA, 15 bp, Homo sapiens
ctgaagcccctcctg

SEQ ID NO: 112123 - DNA, 15 bp, Homo sapiens
tctgaagcccctcct

SEQ ID NO: 112124 - DNA, 15 bp, Homo sapiens
gtctgaagcccctcc

SEQ ID NO: 112125 - DNA, 15 bp, Homo sapiens
tgtctgaagcccctc

SEQ ID NO: 112126 - DNA, 15 bp, Homo sapiens
gtgtctgaagcccct

SEQ ID NO: 112127 - DNA, 15 bp, Homo sapiens
tgtgtctgaagcccc

SEQ ID NO: 112128 - DNA, 15 bp, Homo sapiens
ctgtgtctgaagccc

SEQ ID NO: 112129 - DNA, 15 bp, Homo sapiens
gctgtgtctgaagcc

SEQ ID NO: 112130 - DNA, 15 bp, Homo sapiens
ggctgtgtctgaagc

SEQ ID NO: 112131 - DNA, 15 bp, Homo sapiens
aggctgtgtctgaag

SEQ ID NO: 112132 - DNA, 15 bp, Homo sapiens
caggctgtgtctgaa

SEQ ID NO: 112133 - DNA, 15 bp, Homo sapiens
acaggctgtgtctga

SEQ ID NO: 112134 - DNA, 15 bp, Homo sapiens
gacaggctgtgtctg

SEQ ID NO: 112135 - DNA, 15 bp, Homo sapiens
ggacaggctgtgtct

SEQ ID NO: 112136 - DNA, 15 bp, Homo sapiens
gggacaggctgtgtc

SEQ ID NO: 112137 - DNA, 15 bp, Homo sapiens
agggacaggctgtgt

SEQ ID NO: 112138 - DNA, 15 bp, Homo sapiens
gagggacaggctgtg

SEQ ID NO: 112139 - DNA, 15 bp, Homo sapiens
ggagggacaggctgt

SEQ ID NO: 112140 - DNA, 15 bp, Homo sapiens
tggagggacaggctg

SEQ ID NO: 112141 - DNA, 15 bp, Homo sapiens
ctggagggacaggct

SEQ ID NO: 112142 - DNA, 15 bp, Homo sapiens
tctggagggacaggc

SEQ ID NO: 112143 - DNA, 15 bp, Homo sapiens
atctggagggacagg

SEQ ID NO: 112144 - DNA, 15 bp, Homo sapiens
catctggagggacag

SEQ ID NO: 112145 - DNA, 15 bp, Homo sapiens
ccatctggagggaca

SEQ ID NO: 112146 - DNA, 15 bp, Homo sapiens
accatctggagggac

SEQ ID NO: 112147 - DNA, 15 bp, Homo sapiens
gaccatctggaggga

SEQ ID NO: 112148 - DNA, 15 bp, Homo sapiens
tgaccatctggaggg

SEQ ID NO: 112149 - DNA, 15 bp, Homo sapiens
gtgaccatctggagg

SEQ ID NO: 112150 - DNA, 15 bp, Homo sapiens
cgtgaccatctggag

SEQ ID NO: 112151 - DNA, 15 bp, Homo sapiens
ccgtgaccatctgga

SEQ ID NO: 112152 - DNA, 15 bp, Homo sapiens
cccgtgaccatctgg

SEQ ID NO: 112153 - DNA, 15 bp, Homo sapiens
tcccgtgaccatctg

SEQ ID NO: 112154 - DNA, 15 bp, Homo sapiens
ttcccgtgaccatct

SEQ ID NO: 112155 - DNA, 15 bp, Homo sapiens
cttcccgtgaccatc

SEQ ID NO: 112156 - DNA, 15 bp, Homo sapiens
ccttcccgtgaccat

SEQ ID NO: 112157 - DNA, 15 bp, Homo sapiens
accttcccgtgacca

SEQ ID NO: 112158 - DNA, 15 bp, Homo sapiens
gaccttcccgtgacc

SEQ ID NO: 112159 - DNA, 15 bp, Homo sapiens
tgaccttcccgtgac

SEQ ID NO: 112160 - DNA, 15 bp, Homo sapiens
gtgaccttcccgtga

SEQ ID NO: 112161 - DNA, 15 bp, Homo sapiens
agtgaccttcccgtg

SEQ ID NO: 112162 - DNA, 15 bp, Homo sapiens
gagtgaccttcccgt

SEQ ID NO: 112163 - DNA, 15 bp, Homo sapiens
ggagtgaccttcccg

SEQ ID NO: 112164 - DNA, 15 bp, Homo sapiens
gggagtgaccttccc

SEQ ID NO: 112165 - DNA, 15 bp, Homo sapiens
ggggagtgaccttcc

SEQ ID NO: 112166 - DNA, 15 bp, Homo sapiens
tggggagtgaccttc

SEQ ID NO: 112167 - DNA, 15 bp, Homo sapiens
gtggggagtgacctt

SEQ ID NO: 112168 - DNA, 15 bp, Homo sapiens
tgtggggagtgacct

SEQ ID NO: 112169 - DNA, 15 bp, Homo sapiens
ctgtggggagtgacc

SEQ ID NO: 112170 - DNA, 15 bp, Homo sapiens
tctgtggggagtgac

SEQ ID NO: 112171 - DNA, 15 bp, Homo sapiens
ttctgtggggagtga

SEQ ID NO: 112172 - DNA, 15 bp, Homo sapiens
cttctgtggggagtg

SEQ ID NO: 112173 - DNA, 15 bp, Homo sapiens
acttctgtggggagt

SEQ ID NO: 112174 - DNA, 15 bp, Homo sapiens
tacttctgtggggag

SEQ ID NO: 112175 - DNA, 15 bp, Homo sapiens
gtacttctgtgggga

SEQ ID NO: 112176 - DNA, 15 bp, Homo sapiens
cgtacttctgtgggg

SEQ ID NO: 112177 - DNA, 15 bp, Homo sapiens
acgtacttctgtggg

SEQ ID NO: 112178 - DNA, 15 bp, Homo sapiens
aacgtacttctgtgg

SEQ ID NO: 112179 - DNA, 15 bp, Homo sapiens
aaacgtacttctgtg

SEQ ID NO: 112180 - DNA, 15 bp, Homo sapiens
aaaacgtacttctgt

SEQ ID NO: 112181 - DNA, 15 bp, Homo sapiens
caaaacgtacttctg

SEQ ID NO: 112182 - DNA, 15 bp, Homo sapiens
ccaaaacgtacttct

SEQ ID NO: 112183 - DNA, 15 bp, Homo sapiens
cccaaaacgtacttc

SEQ ID NO: 112184 - DNA, 15 bp, Homo sapiens
ccccaaaacgtactt

SEQ ID NO: 112185 - DNA, 15 bp, Homo sapiens
gccccaaaacgtact

SEQ ID NO: 112186 - DNA, 15 bp, Homo sapiens
ggccccaaaacgtac

SEQ ID NO: 112187 - DNA, 15 bp, Homo sapiens
tggccccaaaacgta

SEQ ID NO: 112188 - DNA, 15 bp, Homo sapiens
atggccccaaaacgt

SEQ ID NO: 112189 - DNA, 15 bp, Homo sapiens
catggccccaaaacg

SEQ ID NO: 112190 - DNA, 15 bp, Homo sapiens
gcatggccccaaaac

SEQ ID NO: 112191 - DNA, 15 bp, Homo sapiens
cgcatggccccaaaa

SEQ ID NO: 112192 - DNA, 15 bp, Homo sapiens
ccgcatggccccaaa

SEQ ID NO: 112193 - DNA, 15 bp, Homo sapiens
cccgcatggccccaa

SEQ ID NO: 112194 - DNA, 15 bp, Homo sapiens
gcccgcatggcccca

SEQ ID NO: 112195 - DNA, 15 bp, Homo sapiens
tgcccgcatggcccc

SEQ ID NO: 112196 - DNA, 15 bp, Homo sapiens
gtgcccgcatggccc

SEQ ID NO: 112197 - DNA, 15 bp, Homo sapiens
tgtgcccgcatggcc

SEQ ID NO: 112198 - DNA, 15 bp, Homo sapiens
ctgtgcccgcatggc

SEQ ID NO: 112199 - DNA, 15 bp, Homo sapiens
tctgtgcccgcatgg

SEQ ID NO: 112200 - DNA, 15 bp, Homo sapiens
ttctgtgcccgcatg

SEQ ID NO: 112201 - DNA, 15 bp, Homo sapiens
cttctgtgcccgcat

SEQ ID NO: 112202 - DNA, 15 bp, Homo sapiens
ccttctgtgcccgca

SEQ ID NO: 112203 - DNA, 15 bp, Homo sapiens
accttctgtgcccgc

SEQ ID NO: 112204 - DNA, 15 bp, Homo sapiens
aaccttctgtgcccg

SEQ ID NO: 112205 - DNA, 15 bp, Homo sapiens
aaaccttctgtgccc

SEQ ID NO: 112206 - DNA, 15 bp, Homo sapiens
caaaccttctgtgcc

SEQ ID NO: 112207 - DNA, 15 bp, Homo sapiens
ccaaaccttctgtgc

SEQ ID NO: 112208 - DNA, 15 bp, Homo sapiens
cccaaaccttctgtg

SEQ ID NO: 112209 - DNA, 15 bp, Homo sapiens
ccccaaaccttctgt

SEQ ID NO: 112210 - DNA, 15 bp, Homo sapiens
cccccaaaccttctg

SEQ ID NO: 112211 - DNA, 15 bp, Homo sapiens
acccccaaaccttct

SEQ ID NO: 112212 - DNA, 15 bp, Homo sapiens
cacccccaaaccttc

SEQ ID NO: 112213 - DNA, 15 bp, Homo sapiens
ccacccccaaacctt

SEQ ID NO: 112214 - DNA, 15 bp, Homo sapiens
cccacccccaaacct

SEQ ID NO: 112215 - DNA, 15 bp, Homo sapiens
acccacccccaaacc

SEQ ID NO: 112216 - DNA, 15 bp, Homo sapiens
cacccacccccaaac

SEQ ID NO: 112217 - DNA, 15 bp, Homo sapiens
ccacccacccccaaa

SEQ ID NO: 112218 - DNA, 15 bp, Homo sapiens
cccacccacccccaa

SEQ ID NO: 112219 - DNA, 15 bp, Homo sapiens
ccccacccaccccca

SEQ ID NO: 112220 - DNA, 15 bp, Homo sapiens
gccccacccaccccc

SEQ ID NO: 112221 - DNA, 15 bp, Homo sapiens
tgccccacccacccc

SEQ ID NO: 112222 - DNA, 15 bp, Homo sapiens
ctgccccacccaccc

SEQ ID NO: 112223 - DNA, 15 bp, Homo sapiens
cctgccccacccacc

SEQ ID NO: 112224 - DNA, 15 bp, Homo sapiens
acctgccccacccac

SEQ ID NO: 112225 - DNA, 15 bp, Homo sapiens
cacctgccccaccca

SEQ ID NO: 112226 - DNA, 15 bp, Homo sapiens
gcacctgccccaccc

SEQ ID NO: 112227 - DNA, 15 bp, Homo sapiens
ggcacctgccccacc

SEQ ID NO: 112228 - DNA, 15 bp, Homo sapiens
tggcacctgccccac

SEQ ID NO: 112229 - DNA, 15 bp, Homo sapiens
ctggcacctgcccca

SEQ ID NO: 112230 - DNA, 15 bp, Homo sapiens
gctggcacctgcccc

SEQ ID NO: 112231 - DNA, 15 bp, Homo sapiens
ggctggcacctgccc

SEQ ID NO: 112232 - DNA, 15 bp, Homo sapiens
aggctggcacctgcc

SEQ ID NO: 112233 - DNA, 15 bp, Homo sapiens
caggctggcacctgc

SEQ ID NO: 112234 - DNA, 15 bp, Homo sapiens
ccaggctggcacctg

SEQ ID NO: 112235 - DNA, 15 bp, Homo sapiens
gccaggctggcacct

SEQ ID NO: 112236 - DNA, 15 bp, Homo sapiens
ggccaggctggcacc

SEQ ID NO: 112237 - DNA, 15 bp, Homo sapiens
aggccaggctggcac

SEQ ID NO: 112238 - DNA, 15 bp, Homo sapiens
caggccaggctggca

SEQ ID NO: 112239 - DNA, 15 bp, Homo sapiens
acaggccaggctggc

SEQ ID NO: 112240 - DNA, 15 bp, Homo sapiens
cacaggccaggctgg

SEQ ID NO: 112241 - DNA, 15 bp, Homo sapiens
ccacaggccaggctg

SEQ ID NO: 112242 - DNA, 15 bp, Homo sapiens
cccacaggccaggct

SEQ ID NO: 112243 - DNA, 15 bp, Homo sapiens
tcccacaggccaggc

SEQ ID NO: 112244 - DNA, 15 bp, Homo sapiens
ctcccacaggccagg

SEQ ID NO: 112245 - DNA, 15 bp, Homo sapiens
cctcccacaggccag

SEQ ID NO: 112246 - DNA, 15 bp, Homo sapiens
gcctcccacaggcca

SEQ ID NO: 112247 - DNA, 15 bp, Homo sapiens
ggcctcccacaggcc

SEQ ID NO: 112248 - DNA, 15 bp, Homo sapiens
tggcctcccacaggc

SEQ ID NO: 112249 - DNA, 15 bp, Homo sapiens
atggcctcccacagg

SEQ ID NO: 112250 - DNA, 15 bp, Homo sapiens
catggcctcccacag

SEQ ID NO: 112251 - DNA, 15 bp, Homo sapiens
ccatggcctcccaca

SEQ ID NO: 112252 - DNA, 15 bp, Homo sapiens
accatggcctcccac

SEQ ID NO: 112253 - DNA, 15 bp, Homo sapiens
caccatggcctccca

SEQ ID NO: 112254 - DNA, 15 bp, Homo sapiens
gcaccatggcctccc

SEQ ID NO: 112255 - DNA, 15 bp, Homo sapiens
tgcaccatggcctcc

SEQ ID NO: 112256 - DNA, 15 bp, Homo sapiens
ctgcaccatggcctc

SEQ ID NO: 112257 - DNA, 15 bp, Homo sapiens
tctgcaccatggcct

SEQ ID NO: 112258 - DNA, 15 bp, Homo sapiens
atctgcaccatggcc

SEQ ID NO: 112259 - DNA, 15 bp, Homo sapiens
catctgcaccatggc

SEQ ID NO: 112260 - DNA, 15 bp, Homo sapiens
gcatctgcaccatgg

SEQ ID NO: 112261 - DNA, 15 bp, Homo sapiens
ggcatctgcaccatg

SEQ ID NO: 112262 - DNA, 15 bp, Homo sapiens
tggcatctgcaccat

SEQ ID NO: 112263 - DNA, 15 bp, Homo sapiens
ttggcatctgcacca

SEQ ID NO: 112264 - DNA, 15 bp, Homo sapiens
cttggcatctgcacc

SEQ ID NO: 112265 - DNA, 15 bp, Homo sapiens
gcttggcatctgcac

SEQ ID NO: 112266 - DNA, 15 bp, Homo sapiens
ggcttggcatctgca

SEQ ID NO: 112267 - DNA, 15 bp, Homo sapiens
gggcttggcatctgc

SEQ ID NO: 112268 - DNA, 15 bp, Homo sapiens
ggggcttggcatctg

SEQ ID NO: 112269 - DNA, 15 bp, Homo sapiens
gggggcttggcatct

SEQ ID NO: 112270 - DNA, 15 bp, Homo sapiens
ggggggcttggcatc

SEQ ID NO: 112271 - DNA, 15 bp, Homo sapiens
gggggggcttggcat

SEQ ID NO: 112272 - DNA, 15 bp, Homo sapiens
ggggggggcttggca

SEQ ID NO: 112273 - DNA, 15 bp, Homo sapiens
cggggggggcttggc

SEQ ID NO: 112274 - DNA, 15 bp, Homo sapiens
acggggggggcttgg

SEQ ID NO: 112275 - DNA, 15 bp, Homo sapiens
cacggggggggcttg

SEQ ID NO: 112276 - DNA, 15 bp, Homo sapiens
tcacggggggggctt

SEQ ID NO: 112277 - DNA, 15 bp, Homo sapiens
gtcacggggggggct

SEQ ID NO: 112278 - DNA, 15 bp, Homo sapiens
tgtcacggggggggc

SEQ ID NO: 112279 - DNA, 15 bp, Homo sapiens
atgtcacgggggggg

SEQ ID NO: 112280 - DNA, 15 bp, Homo sapiens
catgtcacggggggg

SEQ ID NO: 112281 - DNA, 15 bp, Homo sapiens
tcatgtcacgggggg

SEQ ID NO: 112282 - DNA, 15 bp, Homo sapiens
ctcatgtcacggggg

SEQ ID NO: 112283 - DNA, 15 bp, Homo sapiens
tctcatgtcacgggg

SEQ ID NO: 112284 - DNA, 15 bp, Homo sapiens
gtctcatgtcacggg

SEQ ID NO: 112285 - DNA, 15 bp, Homo sapiens
ggtctcatgtcacgg

SEQ ID NO: 112286 - DNA, 15 bp, Homo sapiens
tggtctcatgtcacg

SEQ ID NO: 112287 - DNA, 15 bp, Homo sapiens
gtggtctcatgtcac

SEQ ID NO: 112288 - DNA, 15 bp, Homo sapiens
ggtggtctcatgtca

SEQ ID NO: 112289 - DNA, 15 bp, Homo sapiens
aggtggtctcatgtc

SEQ ID NO: 112290 - DNA, 15 bp, Homo sapiens
caggtggtctcatgt

SEQ ID NO: 112291 - DNA, 15 bp, Homo sapiens
tcaggtggtctcatg

SEQ ID NO: 112292 - DNA, 15 bp, Homo sapiens
atcaggtggtctcat

SEQ ID NO: 112293 - DNA, 15 bp, Homo sapiens
tatcaggtggtctca

SEQ ID NO: 112294 - DNA, 15 bp, Homo sapiens
gtatcaggtggtctc

SEQ ID NO: 112295 - DNA, 15 bp, Homo sapiens
ggtatcaggtggtct

SEQ ID NO: 112296 - DNA, 15 bp, Homo sapiens
tggtatcaggtggtc

SEQ ID NO: 112297 - DNA, 15 bp, Homo sapiens
gtggtatcaggtggt

SEQ ID NO: 112298 - DNA, 15 bp, Homo sapiens
ggtggtatcaggtgg

SEQ ID NO: 112299 - DNA, 15 bp, Homo sapiens
gggtggtatcaggtg

SEQ ID NO: 112300 - DNA, 15 bp, Homo sapiens
tgggtggtatcaggt

SEQ ID NO: 112301 - DNA, 15 bp, Homo sapiens
ctgggtggtatcagg

SEQ ID NO: 112302 - DNA, 15 bp, Homo sapiens
tctgggtggtatcag

SEQ ID NO: 112303 - DNA, 15 bp, Homo sapiens
ctctgggtggtatca

SEQ ID NO: 112304 - DNA, 15 bp, Homo sapiens
tctctgggtggtatc

SEQ ID NO: 112305 - DNA, 15 bp, Homo sapiens
ctctctgggtggtat

SEQ ID NO: 112306 - DNA, 15 bp, Homo sapiens
actctctgggtggta

SEQ ID NO: 112307 - DNA, 15 bp, Homo sapiens
cactctctgggtggt

SEQ ID NO: 112308 - DNA, 15 bp, Homo sapiens
ccactctctgggtgg

SEQ ID NO: 112309 - DNA, 15 bp, Homo sapiens
gccactctctgggtg

SEQ ID NO: 112310 - DNA, 15 bp, Homo sapiens
agccactctctgggt

SEQ ID NO: 112311 - DNA, 15 bp, Homo sapiens
cagccactctctggg

SEQ ID NO: 112312 - DNA, 15 bp, Homo sapiens
acagccactctctgg

SEQ ID NO: 112313 - DNA, 15 bp, Homo sapiens
cacagccactctctg

SEQ ID NO: 112314 - DNA, 15 bp, Homo sapiens
tcacagccactctct

SEQ ID NO: 112315 - DNA, 15 bp, Homo sapiens
ctcacagccactctc

SEQ ID NO: 112316 - DNA, 15 bp, Homo sapiens
gctcacagccactct

SEQ ID NO: 112317 - DNA, 15 bp, Homo sapiens
cgctcacagccactc

SEQ ID NO: 112318 - DNA, 15 bp, Homo sapiens
ccgctcacagccact

SEQ ID NO: 112319 - DNA, 15 bp, Homo sapiens
tccgctcacagccac

SEQ ID NO: 112320 - DNA, 15 bp, Homo sapiens
ttccgctcacagcca

SEQ ID NO: 112321 - DNA, 15 bp, Homo sapiens
cttccgctcacagcc

SEQ ID NO: 112322 - DNA, 15 bp, Homo sapiens
ccttccgctcacagc

SEQ ID NO: 112323 - DNA, 15 bp, Homo sapiens
cccttccgctcacag

SEQ ID NO: 112324 - DNA, 15 bp, Homo sapiens
gcccttccgctcaca

SEQ ID NO: 112325 - DNA, 15 bp, Homo sapiens
ggcccttccgctcac

SEQ ID NO: 112326 - DNA, 15 bp, Homo sapiens
gggcccttccgctca

SEQ ID NO: 112327 - DNA, 15 bp, Homo sapiens
cgggcccttccgctc

SEQ ID NO: 112328 - DNA, 15 bp, Homo sapiens
gcgggcccttccgct

SEQ ID NO: 112329 - DNA, 15 bp, Homo sapiens
ggcgggcccttccgc

SEQ ID NO: 112330 - DNA, 15 bp, Homo sapiens
gggcgggcccttccg

SEQ ID NO: 112331 - DNA, 15 bp, Homo sapiens
tgggcgggcccttcc

SEQ ID NO: 112332 - DNA, 15 bp, Homo sapiens
ctgggcgggcccttc

SEQ ID NO: 112333 - DNA, 15 bp, Homo sapiens
tctgggcgggccctt

SEQ ID NO: 112334 - DNA, 15 bp, Homo sapiens
ttctgggcgggccct

SEQ ID NO: 112335 - DNA, 15 bp, Homo sapiens
tttctgggcgggccc

SEQ ID NO: 112336 - DNA, 15 bp, Homo sapiens
gtttctgggcgggcc

SEQ ID NO: 112337 - DNA, 15 bp, Homo sapiens
tgtttctgggcgggc

SEQ ID NO: 112338 - DNA, 15 bp, Homo sapiens
ttgtttctgggcggg

SEQ ID NO: 112339 - DNA, 15 bp, Homo sapiens
cttgtttctgggcgg

SEQ ID NO: 112340 - DNA, 15 bp, Homo sapiens
gcttgtttctgggcg

SEQ ID NO: 112341 - DNA, 15 bp, Homo sapiens
tgcttgtttctgggc

SEQ ID NO: 112342 - DNA, 15 bp, Homo sapiens
ctgcttgtttctggg

SEQ ID NO: 112343 - DNA, 15 bp, Homo sapiens
cctgcttgtttctgg

SEQ ID NO: 112344 - DNA, 15 bp, Homo sapiens
ccctgcttgtttctg

SEQ ID NO: 112345 - DNA, 15 bp, Homo sapiens
gccctgcttgtttct

SEQ ID NO: 112346 - DNA, 15 bp, Homo sapiens
ggccctgcttgtttc

SEQ ID NO: 112347 - DNA, 15 bp, Homo sapiens
aggccctgcttgttt

SEQ ID NO: 112348 - DNA, 15 bp, Homo sapiens
aaggccctgcttgtt

SEQ ID NO: 112349 - DNA, 15 bp, Homo sapiens
caaggccctgcttgt

SEQ ID NO: 112350 - DNA, 15 bp, Homo sapiens
ccaaggccctgcttg

SEQ ID NO: 112351 - DNA, 15 bp, Homo sapiens
cccaaggccctgctt

SEQ ID NO: 112352 - DNA, 15 bp, Homo sapiens
ccccaaggccctgct

SEQ ID NO: 112353 - DNA, 15 bp, Homo sapiens
gccccaaggccctgc

SEQ ID NO: 112354 - DNA, 15 bp, Homo sapiens
tgccccaaggccctg

SEQ ID NO: 112355 - DNA, 15 bp, Homo sapiens
ctgccccaaggccct

SEQ ID NO: 112356 - DNA, 15 bp, Homo sapiens
tctgccccaaggccc

SEQ ID NO: 112357 - DNA, 15 bp, Homo sapiens
ttctgccccaaggcc

SEQ ID NO: 112358 - DNA, 15 bp, Homo sapiens
cttctgccccaaggc

SEQ ID NO: 112359 - DNA, 15 bp, Homo sapiens
acttctgccccaagg

SEQ ID NO: 112360 - DNA, 15 bp, Homo sapiens
gacttctgccccaag

SEQ ID NO: 112361 - DNA, 15 bp, Homo sapiens
ggacttctgccccaa

SEQ ID NO: 112362 - DNA, 15 bp, Homo sapiens
aggacttctgcccca

SEQ ID NO: 112363 - DNA, 15 bp, Homo sapiens
caggacttctgcccc

SEQ ID NO: 112364 - DNA, 15 bp, Homo sapiens
ccaggacttctgccc

SEQ ID NO: 112365 - DNA, 15 bp, Homo sapiens
cccaggacttctgcc

SEQ ID NO: 112366 - DNA, 15 bp, Homo sapiens
gcccaggacttctgc

SEQ ID NO: 112367 - DNA, 15 bp, Homo sapiens
agcccaggacttctg

SEQ ID NO: 112368 - DNA, 15 bp, Homo sapiens
gagcccaggacttct

SEQ ID NO: 112369 - DNA, 15 bp, Homo sapiens
tgagcccaggacttc

SEQ ID NO: 112370 - DNA, 15 bp, Homo sapiens
ctgagcccaggactt

SEQ ID NO: 112371 - DNA, 15 bp, Homo sapiens
tctgagcccaggact

SEQ ID NO: 112372 - DNA, 15 bp, Homo sapiens
atctgagcccaggac

SEQ ID NO: 112373 - DNA, 15 bp, Homo sapiens
gatctgagcccagga

SEQ ID NO: 112374 - DNA, 15 bp, Homo sapiens
ggatctgagcccagg

SEQ ID NO: 112375 - DNA, 15 bp, Homo sapiens
gggatctgagcccag

SEQ ID NO: 112376 - DNA, 15 bp, Homo sapiens
tgggatctgagccca

SEQ ID NO: 112377 - DNA, 15 bp, Homo sapiens
gtgggatctgagccc

SEQ ID NO: 112378 - DNA, 15 bp, Homo sapiens
cgtgggatctgagcc

SEQ ID NO: 112379 - DNA, 15 bp, Homo sapiens
gcgtgggatctgagc

SEQ ID NO: 112380 - DNA, 15 bp, Homo sapiens
agcgtgggatctgag

SEQ ID NO: 112381 - DNA, 15 bp, Homo sapiens
gagcgtgggatctga

SEQ ID NO: 112382 - DNA, 15 bp, Homo sapiens
tgagcgtgggatctg

SEQ ID NO: 112383 - DNA, 15 bp, Homo sapiens
gtgagcgtgggatct

SEQ ID NO: 112384 - DNA, 15 bp, Homo sapiens
agtgagcgtgggatc

SEQ ID NO: 112385 - DNA, 15 bp, Homo sapiens
cagtgagcgtgggat

SEQ ID NO: 112386 - DNA, 15 bp, Homo sapiens
gcagtgagcgtggga

SEQ ID NO: 112387 - DNA, 15 bp, Homo sapiens
ggcagtgagcgtggg

SEQ ID NO: 112388 - DNA, 15 bp, Homo sapiens
tggcagtgagcgtgg

SEQ ID NO: 112389 - DNA, 15 bp, Homo sapiens
ctggcagtgagcgtg

SEQ ID NO: 112390 - DNA, 15 bp, Homo sapiens
gctggcagtgagcgt

SEQ ID NO: 112391 - DNA, 15 bp, Homo sapiens
cgctggcagtgagcg

SEQ ID NO: 112392 - DNA, 15 bp, Homo sapiens
ccgctggcagtgagc

SEQ ID NO: 112393 - DNA, 15 bp, Homo sapiens
gccgctggcagtgag

SEQ ID NO: 112394 - DNA, 15 bp, Homo sapiens
ggccgctggcagtga

SEQ ID NO: 112395 - DNA, 15 bp, Homo sapiens
aggccgctggcagtg

SEQ ID NO: 112396 - DNA, 15 bp, Homo sapiens
gaggccgctggcagt

SEQ ID NO: 112397 - DNA, 15 bp, Homo sapiens
cgaggccgctggcag

SEQ ID NO: 112398 - DNA, 15 bp, Homo sapiens
ccgaggccgctggca

SEQ ID NO: 112399 - DNA, 15 bp, Homo sapiens
gccgaggccgctggc

SEQ ID NO: 112400 - DNA, 15 bp, Homo sapiens
agccgaggccgctgg

SEQ ID NO: 112401 - DNA, 15 bp, Homo sapiens
gagccgaggccgctg

SEQ ID NO: 112402 - DNA, 15 bp, Homo sapiens
tgagccgaggccgct

SEQ ID NO: 112403 - DNA, 15 bp, Homo sapiens
ctgagccgaggccgc

SEQ ID NO: 112404 - DNA, 15 bp, Homo sapiens
cctgagccgaggccg

SEQ ID NO: 112405 - DNA, 15 bp, Homo sapiens
gcctgagccgaggcc

SEQ ID NO: 112406 - DNA, 15 bp, Homo sapiens
agcctgagccgaggc

SEQ ID NO: 112407 - DNA, 15 bp, Homo sapiens
aagcctgagccgagg

SEQ ID NO: 112408 - DNA, 15 bp, Homo sapiens
gaagcctgagccgag

SEQ ID NO: 112409 - DNA, 15 bp, Homo sapiens
agaagcctgagccga

SEQ ID NO: 112410 - DNA, 15 bp, Homo sapiens
cagaagcctgagccg

SEQ ID NO: 112411 - DNA, 15 bp, Homo sapiens
gcagaagcctgagcc

SEQ ID NO: 112412 - DNA, 15 bp, Homo sapiens
cgcagaagcctgagc

SEQ ID NO: 112413 - DNA, 15 bp, Homo sapiens
gcgcagaagcctgag

SEQ ID NO: 112414 - DNA, 15 bp, Homo sapiens
agcgcagaagcctga

SEQ ID NO: 112415 - DNA, 15 bp, Homo sapiens
gagcgcagaagcctg

SEQ ID NO: 112416 - DNA, 15 bp, Homo sapiens
agagcgcagaagcct

SEQ ID NO: 112417 - DNA, 15 bp, Homo sapiens
gagagcgcagaagcc

SEQ ID NO: 112418 - DNA, 15 bp, Homo sapiens
agagagcgcagaagc

SEQ ID NO: 112419 - DNA, 15 bp, Homo sapiens
tagagagcgcagaag

SEQ ID NO: 112420 - DNA, 15 bp, Homo sapiens
ttagagagcgcagaa

SEQ ID NO: 112421 - DNA, 15 bp, Homo sapiens
tttagagagcgcaga

SEQ ID NO: 112422 - DNA, 15 bp, Homo sapiens
gtttagagagcgcag

SEQ ID NO: 112423 - DNA, 15 bp, Homo sapiens
agtttagagagcgca

SEQ ID NO: 112424 - DNA, 15 bp, Homo sapiens
aagtttagagagcgc

SEQ ID NO: 112425 - DNA, 15 bp, Homo sapiens
taagtttagagagcg

SEQ ID NO: 112426 - DNA, 15 bp, Homo sapiens
ctaagtttagagagc

SEQ ID NO: 112427 - DNA, 15 bp, Homo sapiens
actaagtttagagag

SEQ ID NO: 112428 - DNA, 15 bp, Homo sapiens
aactaagtttagaga

SEQ ID NO: 112429 - DNA, 15 bp, Homo sapiens
aaactaagtttagag

SEQ ID NO: 112430 - DNA, 15 bp, Homo sapiens
aaaactaagtttaga

SEQ ID NO: 112431 - DNA, 15 bp, Homo sapiens
gaaaactaagtttag

SEQ ID NO: 112432 - DNA, 15 bp, Homo sapiens
agaaaactaagttta

SEQ ID NO: 112433 - DNA, 15 bp, Homo sapiens
gagaaaactaagttt

SEQ ID NO: 112434 - DNA, 15 bp, Homo sapiens
agagaaaactaagtt

SEQ ID NO: 112435 - DNA, 15 bp, Homo sapiens
aagagaaaactaagt

SEQ ID NO: 112436 - DNA, 15 bp, Homo sapiens
gaagagaaaactaag

SEQ ID NO: 112437 - DNA, 15 bp, Homo sapiens
agaagagaaaactaa

SEQ ID NO: 112438 - DNA, 15 bp, Homo sapiens
cagaagagaaaacta

SEQ ID NO: 112439 - DNA, 15 bp, Homo sapiens
ccagaagagaaaact

SEQ ID NO: 112440 - DNA, 15 bp, Homo sapiens
tccagaagagaaaac

SEQ ID NO: 112441 - DNA, 15 bp, Homo sapiens
ttccagaagagaaaa

SEQ ID NO: 112442 - DNA, 15 bp, Homo sapiens
tttccagaagagaaa

SEQ ID NO: 112443 - DNA, 15 bp, Homo sapiens
ttttccagaagagaa

SEQ ID NO: 112444 - DNA, 15 bp, Homo sapiens
tttttccagaagaga

SEQ ID NO: 112445 - DNA, 15 bp, Homo sapiens
atttttccagaagag

SEQ ID NO: 112446 - DNA, 15 bp, Homo sapiens
catttttccagaaga

SEQ ID NO: 112447 - DNA, 15 bp, Homo sapiens
tcatttttccagaag

SEQ ID NO: 112448 - DNA, 15 bp, Homo sapiens
atcatttttccagaa

SEQ ID NO: 112449 - DNA, 15 bp, Homo sapiens
catcatttttccaga

SEQ ID NO: 112450 - DNA, 15 bp, Homo sapiens
ccatcatttttccag

SEQ ID NO: 112451 - DNA, 15 bp, Homo sapiens
cccatcatttttcca

SEQ ID NO: 112452 - DNA, 15 bp, Homo sapiens
ccccatcatttttcc

SEQ ID NO: 112453 - DNA, 15 bp, Homo sapiens
tccccatcatttttc

SEQ ID NO: 112454 - DNA, 15 bp, Homo sapiens
ttccccatcattttt

SEQ ID NO: 112455 - DNA, 15 bp, Homo sapiens
tttccccatcatttt

SEQ ID NO: 112456 - DNA, 15 bp, Homo sapiens
ttttccccatcattt

SEQ ID NO: 112457 - DNA, 15 bp, Homo sapiens
attttccccatcatt

SEQ ID NO: 112458 - DNA, 15 bp, Homo sapiens
cattttccccatcat

SEQ ID NO: 112459 - DNA, 15 bp, Homo sapiens
tcattttccccatca

SEQ ID NO: 112460 - DNA, 15 bp, Homo sapiens
atcattttccccatc

SEQ ID NO: 112461 - DNA, 15 bp, Homo sapiens
tatcattttccccat

SEQ ID NO: 112462 - DNA, 15 bp, Homo sapiens
atatcattttcccca

SEQ ID NO: 112463 - DNA, 15 bp, Homo sapiens
aatatcattttcccc

SEQ ID NO: 112464 - DNA, 15 bp, Homo sapiens
aaatatcattttccc

SEQ ID NO: 112465 - DNA, 15 bp, Homo sapiens
caaatatcattttcc

SEQ ID NO: 112466 - DNA, 15 bp, Homo sapiens
acaaatatcattttc

SEQ ID NO: 112467 - DNA, 15 bp, Homo sapiens
tacaaatatcatttt

SEQ ID NO: 112468 - DNA, 15 bp, Homo sapiens
atacaaatatcattt

SEQ ID NO: 112469 - DNA, 15 bp, Homo sapiens
catacaaatatcatt

SEQ ID NO: 112470 - DNA, 15 bp, Homo sapiens
acatacaaatatcat

SEQ ID NO: 112471 - DNA, 15 bp, Homo sapiens
cacatacaaatatca

SEQ ID NO: 112472 - DNA, 15 bp, Homo sapiens
tcacatacaaatatc

SEQ ID NO: 112473 - DNA, 15 bp, Homo sapiens
ctcacatacaaatat

SEQ ID NO: 112474 - DNA, 15 bp, Homo sapiens
cctcacatacaaata

SEQ ID NO: 112475 - DNA, 15 bp, Homo sapiens
tcctcacatacaaat

SEQ ID NO: 112476 - DNA, 15 bp, Homo sapiens
gtcctcacatacaaa

SEQ ID NO: 112477 - DNA, 15 bp, Homo sapiens
agtcctcacatacaa

SEQ ID NO: 112478 - DNA, 15 bp, Homo sapiens
cagtcctcacataca

SEQ ID NO: 112479 - DNA, 15 bp, Homo sapiens
tcagtcctcacatac

SEQ ID NO: 112480 - DNA, 15 bp, Homo sapiens
ctcagtcctcacata

SEQ ID NO: 112481 - DNA, 15 bp, Homo sapiens
tctcagtcctcacat

SEQ ID NO: 112482 - DNA, 15 bp, Homo sapiens
ctctcagtcctcaca

SEQ ID NO: 112483 - DNA, 15 bp, Homo sapiens
actctcagtcctcac

SEQ ID NO: 112484 - DNA, 15 bp, Homo sapiens
aactctcagtcctca

SEQ ID NO: 112485 - DNA, 15 bp, Homo sapiens
taactctcagtcctc

SEQ ID NO: 112486 - DNA, 15 bp, Homo sapiens
ttaactctcagtcct

SEQ ID NO: 112487 - DNA, 15 bp, Homo sapiens
tttaactctcagtcc

SEQ ID NO: 112488 - DNA, 15 bp, Homo sapiens
atttaactctcagtc

SEQ ID NO: 112489 - DNA, 15 bp, Homo sapiens
catttaactctcagt

SEQ ID NO: 112490 - DNA, 15 bp, Homo sapiens
acatttaactctcag

SEQ ID NO: 112491 - DNA, 15 bp, Homo sapiens
tacatttaactctca

SEQ ID NO: 112492 - DNA, 15 bp, Homo sapiens
ttacatttaactctc

SEQ ID NO: 112493 - DNA, 15 bp, Homo sapiens
tttacatttaactct

SEQ ID NO: 112494 - DNA, 15 bp, Homo sapiens
gtttacatttaactc

SEQ ID NO: 112495 - DNA, 15 bp, Homo sapiens
tgtttacatttaact

SEQ ID NO: 112496 - DNA, 15 bp, Homo sapiens
atgtttacatttaac

SEQ ID NO: 112497 - DNA, 15 bp, Homo sapiens
gatgtttacatttaa

SEQ ID NO: 112498 - DNA, 15 bp, Homo sapiens
agatgtttacattta

SEQ ID NO: 112499 - DNA, 15 bp, Homo sapiens
cagatgtttacattt

SEQ ID NO: 112500 - DNA, 15 bp, Homo sapiens
ccagatgtttacatt

SEQ ID NO: 112501 - DNA, 15 bp, Homo sapiens
tccagatgtttacat

SEQ ID NO: 112502 - DNA, 15 bp, Homo sapiens
ttccagatgtttaca

SEQ ID NO: 112503 - DNA, 15 bp, Homo sapiens
tttccagatgtttac

SEQ ID NO: 112504 - DNA, 15 bp, Homo sapiens
gtttccagatgttta

SEQ ID NO: 112505 - DNA, 15 bp, Homo sapiens
agtttccagatgttt

SEQ ID NO: 112506 - DNA, 15 bp, Homo sapiens
tagtttccagatgtt

SEQ ID NO: 112507 - DNA, 15 bp, Homo sapiens
gtagtttccagatgt

SEQ ID NO: 112508 - DNA, 15 bp, Homo sapiens
tgtagtttccagatg

SEQ ID NO: 112509 - DNA, 15 bp, Homo sapiens
ttgtagtttccagat

SEQ ID NO: 112510 - DNA, 15 bp, Homo sapiens
tttgtagtttccaga

SEQ ID NO: 112511 - DNA, 15 bp, Homo sapiens
ttttgtagtttccag

SEQ ID NO: 112512 - DNA, 15 bp, Homo sapiens
attttgtagtttcca

SEQ ID NO: 112513 - DNA, 15 bp, Homo sapiens
cattttgtagtttcc

SEQ ID NO: 112514 - DNA, 15 bp, Homo sapiens
tcattttgtagtttc

SEQ ID NO: 112515 - DNA, 15 bp, Homo sapiens
ctcattttgtagttt

SEQ ID NO: 112516 - DNA, 15 bp, Homo sapiens
gctcattttgtagtt

SEQ ID NO: 112517 - DNA, 15 bp, Homo sapiens
tgctcattttgtagt

SEQ ID NO: 112518 - DNA, 15 bp, Homo sapiens
gtgctcattttgtag

SEQ ID NO: 112519 - DNA, 15 bp, Homo sapiens
cgtgctcattttgta

SEQ ID NO: 112520 - DNA, 15 bp, Homo sapiens
tcgtgctcattttgt

SEQ ID NO: 112521 - DNA, 15 bp, Homo sapiens
ttcgtgctcattttg

SEQ ID NO: 112522 - DNA, 15 bp, Homo sapiens
tttcgtgctcatttt

SEQ ID NO: 112523 - DNA, 15 bp, Homo sapiens
atttcgtgctcattt

SEQ ID NO: 112524 - DNA, 15 bp, Homo sapiens
catttcgtgctcatt

SEQ ID NO: 112525 - DNA, 15 bp, Homo sapiens
tcatttcgtgctcat

SEQ ID NO: 112526 - DNA, 15 bp, Homo sapiens
atcatttcgtgctca

SEQ ID NO: 112527 - DNA, 15 bp, Homo sapiens
catcatttcgtgctc

SEQ ID NO: 112528 - DNA, 15 bp, Homo sapiens
acatcatttcgtgct

SEQ ID NO: 112529 - DNA, 15 bp, Homo sapiens
aacatcatttcgtgc

SEQ ID NO: 112530 - DNA, 15 bp, Homo sapiens
aaacatcatttcgtg

SEQ ID NO: 112531 - DNA, 15 bp, Homo sapiens
aaaacatcatttcgt

SEQ ID NO: 112532 - DNA, 15 bp, Homo sapiens
aaaaacatcatttcg

SEQ ID NO: 112533 - DNA, 15 bp, Homo sapiens
taaaaacatcatttc

SEQ ID NO: 112534 - DNA, 15 bp, Homo sapiens
ataaaaacatcattt

SEQ ID NO: 112535 - DNA, 15 bp, Homo sapiens
aataaaaacatcatt

SEQ ID NO: 112536 - DNA, 15 bp, Homo sapiens
gaataaaaacatcat

SEQ ID NO: 112537 - DNA, 15 bp, Homo sapiens
agaataaaaacatca

SEQ ID NO: 112538 - DNA, 15 bp, Homo sapiens
aagaataaaaacatc

SEQ ID NO: 112539 - DNA, 15 bp, Homo sapiens
taagaataaaaacat

SEQ ID NO: 112540 - DNA, 15 bp, Homo sapiens
ctaagaataaaaaca

SEQ ID NO: 112541 - DNA, 15 bp, Homo sapiens
tctaagaataaaaac

SEQ ID NO: 112542 - DNA, 15 bp, Homo sapiens
ttctaagaataaaaa

SEQ ID NO: 112543 - DNA, 15 bp, Homo sapiens
gttctaagaataaaa

SEQ ID NO: 112544 - DNA, 15 bp, Homo sapiens
tgttctaagaataaa

SEQ ID NO: 112545 - DNA, 15 bp, Homo sapiens
ctgttctaagaataa

SEQ ID NO: 112546 - DNA, 15 bp, Homo sapiens
tctgttctaagaata

SEQ ID NO: 112547 - DNA, 15 bp, Homo sapiens
ttctgttctaagaat

SEQ ID NO: 112548 - DNA, 15 bp, Homo sapiens
tttctgttctaagaa

SEQ ID NO: 112549 - DNA, 15 bp, Homo sapiens
ctttctgttctaaga

SEQ ID NO: 112550 - DNA, 15 bp, Homo sapiens
actttctgttctaag

SEQ ID NO: 112551 - DNA, 15 bp, Homo sapiens
gactttctgttctaa

SEQ ID NO: 112552 - DNA, 15 bp, Homo sapiens
ggactttctgttcta

SEQ ID NO: 112553 - DNA, 15 bp, Homo sapiens
gggactttctgttct

SEQ ID NO: 112554 - DNA, 15 bp, Homo sapiens
ggggactttctgttc

SEQ ID NO: 112555 - DNA, 15 bp, Homo sapiens
tggggactttctgtt

SEQ ID NO: 112556 - DNA, 15 bp, Homo sapiens
gtggggactttctgt

SEQ ID NO: 112557 - DNA, 15 bp, Homo sapiens
tgtggggactttctg

SEQ ID NO: 112558 - DNA, 15 bp, Homo sapiens
gtgtggggactttct

SEQ ID NO: 112559 - DNA, 15 bp, Homo sapiens
ggtgtggggactttc

SEQ ID NO: 112560 - DNA, 15 bp, Homo sapiens
gggtgtggggacttt

SEQ ID NO: 112561 - DNA, 15 bp, Homo sapiens
cgggtgtggggactt

SEQ ID NO: 112562 - DNA, 15 bp, Homo sapiens
gcgggtgtggggact

SEQ ID NO: 112563 - DNA, 15 bp, Homo sapiens
cgcgggtgtggggac

SEQ ID NO: 112564 - DNA, 15 bp, Homo sapiens
ccgcgggtgtgggga

SEQ ID NO: 112565 - DNA, 15 bp, Homo sapiens
gccgcgggtgtgggg

SEQ ID NO: 112566 - DNA, 15 bp, Homo sapiens
ggccgcgggtgtggg

SEQ ID NO: 112567 - DNA, 15 bp, Homo sapiens
gggccgcgggtgtgg

SEQ ID NO: 112568 - DNA, 15 bp, Homo sapiens
agggccgcgggtgtg

SEQ ID NO: 112569 - DNA, 15 bp, Homo sapiens
cagggccgcgggtgt

SEQ ID NO: 112570 - DNA, 15 bp, Homo sapiens
ccagggccgcgggtg

SEQ ID NO: 112571 - DNA, 15 bp, Homo sapiens
accagggccgcgggt

SEQ ID NO: 112572 - DNA, 15 bp, Homo sapiens
caccagggccgcggg

SEQ ID NO: 112573 - DNA, 15 bp, Homo sapiens
tcaccagggccgcgg

SEQ ID NO: 112574 - DNA, 15 bp, Homo sapiens
gtcaccagggccgcg

SEQ ID NO: 112575 - DNA, 15 bp, Homo sapiens
agtcaccagggccgc

SEQ ID NO: 112576 - DNA, 15 bp, Homo sapiens
cagtcaccagggccg

SEQ ID NO: 112577 - DNA, 15 bp, Homo sapiens
tcagtcaccagggcc

SEQ ID NO: 112578 - DNA, 15 bp, Homo sapiens
atcagtcaccagggc

SEQ ID NO: 112579 - DNA, 15 bp, Homo sapiens
catcagtcaccaggg

SEQ ID NO: 112580 - DNA, 15 bp, Homo sapiens
tcatcagtcaccagg

SEQ ID NO: 112581 - DNA, 15 bp, Homo sapiens
ctcatcagtcaccag

SEQ ID NO: 112582 - DNA, 15 bp, Homo sapiens
cctcatcagtcacca

SEQ ID NO: 112583 - DNA, 15 bp, Homo sapiens
tcctcatcagtcacc

SEQ ID NO: 112584 - DNA, 15 bp, Homo sapiens
atcctcatcagtcac

SEQ ID NO: 112585 - DNA, 15 bp, Homo sapiens
catcctcatcagtca

SEQ ID NO: 112586 - DNA, 15 bp, Homo sapiens
tcatcctcatcagtc

SEQ ID NO: 112587 - DNA, 15 bp, Homo sapiens
ctcatcctcatcagt

SEQ ID NO: 112588 - DNA, 15 bp, Homo sapiens
cctcatcctcatcag

SEQ ID NO: 112589 - DNA, 15 bp, Homo sapiens
acctcatcctcatca

SEQ ID NO: 112590 - DNA, 15 bp, Homo sapiens
aacctcatcctcatc

SEQ ID NO: 112591 - DNA, 15 bp, Homo sapiens
gaacctcatcctcat

SEQ ID NO: 112592 - DNA, 15 bp, Homo sapiens
agaacctcatcctca

SEQ ID NO: 112593 - DNA, 15 bp, Homo sapiens
cagaacctcatcctc

SEQ ID NO: 112594 - DNA, 15 bp, Homo sapiens
gcagaacctcatcct

SEQ ID NO: 112595 - DNA, 15 bp, Homo sapiens
cgcagaacctcatcc

SEQ ID NO: 112596 - DNA, 15 bp, Homo sapiens
ccgcagaacctcatc

SEQ ID NO: 112597 - DNA, 15 bp, Homo sapiens
cccgcagaacctcat

SEQ ID NO: 112598 - DNA, 15 bp, Homo sapiens
ccccgcagaacctca

SEQ ID NO: 112599 - DNA, 15 bp, Homo sapiens
gccccgcagaacctc

SEQ ID NO: 112600 - DNA, 15 bp, Homo sapiens
ggccccgcagaacct

SEQ ID NO: 112601 - DNA, 15 bp, Homo sapiens
aggccccgcagaacc

SEQ ID NO: 112602 - DNA, 15 bp, Homo sapiens
gaggccccgcagaac

SEQ ID NO: 112603 - DNA, 15 bp, Homo sapiens
agaggccccgcagaa

SEQ ID NO: 112604 - DNA, 15 bp, Homo sapiens
gagaggccccgcaga

SEQ ID NO: 112605 - DNA, 15 bp, Homo sapiens
agagaggccccgcag

SEQ ID NO: 112606 - DNA, 15 bp, Homo sapiens
cagagaggccccgca

SEQ ID NO: 112607 - DNA, 15 bp, Homo sapiens
ccagagaggccccgc

SEQ ID NO: 112608 - DNA, 15 bp, Homo sapiens
gccagagaggccccg

SEQ ID NO: 112609 - DNA, 15 bp, Homo sapiens
ggccagagaggcccc

SEQ ID NO: 112610 - DNA, 15 bp, Homo sapiens
cggccagagaggccc

SEQ ID NO: 112611 - DNA, 15 bp, Homo sapiens
gcggccagagaggcc

SEQ ID NO: 112612 - DNA, 15 bp, Homo sapiens
ggcggccagagaggc

SEQ ID NO: 112613 - DNA, 15 bp, Homo sapiens
gggcggccagagagg

SEQ ID NO: 112614 - DNA, 15 bp, Homo sapiens
tgggcggccagagag

SEQ ID NO: 112615 - DNA, 15 bp, Homo sapiens
ctgggcggccagaga

SEQ ID NO: 112616 - DNA, 15 bp, Homo sapiens
gctgggcggccagag

SEQ ID NO: 112617 - DNA, 15 bp, Homo sapiens
agctgggcggccaga

SEQ ID NO: 112618 - DNA, 15 bp, Homo sapiens
gagctgggcggccag

SEQ ID NO: 112619 - DNA, 15 bp, Homo sapiens
agagctgggcggcca

SEQ ID NO: 112620 - DNA, 15 bp, Homo sapiens
cagagctgggcggcc

SEQ ID NO: 112621 - DNA, 15 bp, Homo sapiens
gcagagctgggcggc

SEQ ID NO: 112622 - DNA, 15 bp, Homo sapiens
ggcagagctgggcgg

SEQ ID NO: 112623 - DNA, 15 bp, Homo sapiens
aggcagagctgggcg

SEQ ID NO: 112624 - DNA, 15 bp, Homo sapiens
caggcagagctgggc

SEQ ID NO: 112625 - DNA, 15 bp, Homo sapiens
ccaggcagagctggg

SEQ ID NO: 112626 - DNA, 15 bp, Homo sapiens
cccaggcagagctgg

SEQ ID NO: 112627 - DNA, 15 bp, Homo sapiens
ccccaggcagagctg

SEQ ID NO: 112628 - DNA, 15 bp, Homo sapiens
tccccaggcagagct

SEQ ID NO: 112629 - DNA, 15 bp, Homo sapiens
ttccccaggcagagc

SEQ ID NO: 112630 - DNA, 15 bp, Homo sapiens
cttccccaggcagag

SEQ ID NO: 112631 - DNA, 15 bp, Homo sapiens
ccttccccaggcaga

SEQ ID NO: 112632 - DNA, 15 bp, Homo sapiens
accttccccaggcag

SEQ ID NO: 112633 - DNA, 15 bp, Homo sapiens
caccttccccaggca

SEQ ID NO: 112634 - DNA, 15 bp, Homo sapiens
ccaccttccccaggc

SEQ ID NO: 112635 - DNA, 15 bp, Homo sapiens
cccaccttccccagg

SEQ ID NO: 112636 - DNA, 15 bp, Homo sapiens
ccccaccttccccag

SEQ ID NO: 112637 - DNA, 15 bp, Homo sapiens
gccccaccttcccca

SEQ ID NO: 112638 - DNA, 15 bp, Homo sapiens
ggccccaccttcccc

SEQ ID NO: 112639 - DNA, 15 bp, Homo sapiens
tggccccaccttccc

SEQ ID NO: 112640 - DNA, 15 bp, Homo sapiens
ctggccccaccttcc

SEQ ID NO: 112641 - DNA, 15 bp, Homo sapiens
tctggccccaccttc

SEQ ID NO: 112642 - DNA, 15 bp, Homo sapiens
ctctggccccacctt

SEQ ID NO: 112643 - DNA, 15 bp, Homo sapiens
actctggccccacct

SEQ ID NO: 112644 - DNA, 15 bp, Homo sapiens
cactctggccccacc

SEQ ID NO: 112645 - DNA, 15 bp, Homo sapiens
ccactctggccccac

SEQ ID NO: 112646 - DNA, 15 bp, Homo sapiens
tccactctggcccca

SEQ ID NO: 112647 - DNA, 15 bp, Homo sapiens
atccactctggcccc

SEQ ID NO: 112648 - DNA, 15 bp, Homo sapiens
catccactctggccc

SEQ ID NO: 112649 - DNA, 15 bp, Homo sapiens
acatccactctggcc

SEQ ID NO: 112650 - DNA, 15 bp, Homo sapiens
cacatccactctggc

SEQ ID NO: 112651 - DNA, 15 bp, Homo sapiens
acacatccactctgg

SEQ ID NO: 112652 - DNA, 15 bp, Homo sapiens
aacacatccactctg

SEQ ID NO: 112653 - DNA, 15 bp, Homo sapiens
gaacacatccactct

SEQ ID NO: 112654 - DNA, 15 bp, Homo sapiens
ggaacacatccactc

SEQ ID NO: 112655 - DNA, 15 bp, Homo sapiens
gggaacacatccact

SEQ ID NO: 112656 - DNA, 15 bp, Homo sapiens
tgggaacacatccac

SEQ ID NO: 112657 - DNA, 15 bp, Homo sapiens
ctgggaacacatcca

SEQ ID NO: 112658 - DNA, 15 bp, Homo sapiens
gctgggaacacatcc

SEQ ID NO: 112659 - DNA, 15 bp, Homo sapiens
cgctgggaacacatc

SEQ ID NO: 112660 - DNA, 15 bp, Homo sapiens
acgctgggaacacat

SEQ ID NO: 112661 - DNA, 15 bp, Homo sapiens
cacgctgggaacaca

SEQ ID NO: 112662 - DNA, 15 bp, Homo sapiens
ccacgctgggaacac

SEQ ID NO: 112663 - DNA, 15 bp, Homo sapiens
accacgctgggaaca

SEQ ID NO: 112664 - DNA, 15 bp, Homo sapiens
gaccacgctgggaac

SEQ ID NO: 112665 - DNA, 15 bp, Homo sapiens
tgaccacgctgggaa

SEQ ID NO: 112666 - DNA, 15 bp, Homo sapiens
gtgaccacgctggga

SEQ ID NO: 112667 - DNA, 15 bp, Homo sapiens
agtgaccacgctggg

SEQ ID NO: 112668 - DNA, 15 bp, Homo sapiens
gagtgaccacgctgg

SEQ ID NO: 112669 - DNA, 15 bp, Homo sapiens
ggagtgaccacgctg

SEQ ID NO: 112670 - DNA, 15 bp, Homo sapiens
gggagtgaccacgct

SEQ ID NO: 112671 - DNA, 15 bp, Homo sapiens
ggggagtgaccacgc

SEQ ID NO: 112672 - DNA, 15 bp, Homo sapiens
aggggagtgaccacg

SEQ ID NO: 112673 - DNA, 15 bp, Homo sapiens
caggggagtgaccac

SEQ ID NO: 112674 - DNA, 15 bp, Homo sapiens
gcaggggagtgacca

SEQ ID NO: 112675 - DNA, 15 bp, Homo sapiens
ggcaggggagtgacc

SEQ ID NO: 112676 - DNA, 15 bp, Homo sapiens
aggcaggggagtgac

SEQ ID NO: 112677 - DNA, 15 bp, Homo sapiens
gaggcaggggagtga

SEQ ID NO: 112678 - DNA, 15 bp, Homo sapiens
cgaggcaggggagtg

SEQ ID NO: 112679 - DNA, 15 bp, Homo sapiens
gcgaggcaggggagt

SEQ ID NO: 112680 - DNA, 15 bp, Homo sapiens
ggcgaggcaggggag

SEQ ID NO: 112681 - DNA, 15 bp, Homo sapiens
tggcgaggcagggga

SEQ ID NO: 112682 - DNA, 15 bp, Homo sapiens
ctggcgaggcagggg

SEQ ID NO: 112683 - DNA, 15 bp, Homo sapiens
gctggcgaggcaggg

SEQ ID NO: 112684 - DNA, 15 bp, Homo sapiens
tgctggcgaggcagg

SEQ ID NO: 112685 - DNA, 15 bp, Homo sapiens
ctgctggcgaggcag

SEQ ID NO: 112686 - DNA, 15 bp, Homo sapiens
cctgctggcgaggca

SEQ ID NO: 112687 - DNA, 15 bp, Homo sapiens
acctgctggcgaggc

SEQ ID NO: 112688 - DNA, 15 bp, Homo sapiens
gacctgctggcgagg

SEQ ID NO: 112689 - DNA, 15 bp, Homo sapiens
agacctgctggcgag

SEQ ID NO: 112690 - DNA, 15 bp, Homo sapiens
gagacctgctggcga

SEQ ID NO: 112691 - DNA, 15 bp, Homo sapiens
cgagacctgctggcg

SEQ ID NO: 112692 - DNA, 15 bp, Homo sapiens
ccgagacctgctggc

SEQ ID NO: 112693 - DNA, 15 bp, Homo sapiens
gccgagacctgctgg

SEQ ID NO: 112694 - DNA, 15 bp, Homo sapiens
agccgagacctgctg

SEQ ID NO: 112695 - DNA, 15 bp, Homo sapiens
gagccgagacctgct

SEQ ID NO: 112696 - DNA, 15 bp, Homo sapiens
ggagccgagacctgc

SEQ ID NO: 112697 - DNA, 15 bp, Homo sapiens
tggagccgagacctg

SEQ ID NO: 112698 - DNA, 15 bp, Homo sapiens
ttggagccgagacct

SEQ ID NO: 112699 - DNA, 15 bp, Homo sapiens
attggagccgagacc

SEQ ID NO: 112700 - DNA, 15 bp, Homo sapiens
gattggagccgagac

SEQ ID NO: 112701 - DNA, 15 bp, Homo sapiens
tgattggagccgaga

SEQ ID NO: 112702 - DNA, 15 bp, Homo sapiens
ctgattggagccgag

SEQ ID NO: 112703 - DNA, 15 bp, Homo sapiens
cctgattggagccga

SEQ ID NO: 112704 - DNA, 15 bp, Homo sapiens
tcctgattggagccg

SEQ ID NO: 112705 - DNA, 15 bp, Homo sapiens
ctcctgattggagcc

SEQ ID NO: 112706 - DNA, 15 bp, Homo sapiens
cctcctgattggagc

SEQ ID NO: 112707 - DNA, 15 bp, Homo sapiens
gcctcctgattggag

SEQ ID NO: 112708 - DNA, 15 bp, Homo sapiens
ggcctcctgattgga

SEQ ID NO: 112709 - DNA, 15 bp, Homo sapiens
aggcctcctgattgg

SEQ ID NO: 112710 - DNA, 15 bp, Homo sapiens
taggcctcctgattg

SEQ ID NO: 112711 - DNA, 15 bp, Homo sapiens
ttaggcctcctgatt

SEQ ID NO: 112712 - DNA, 15 bp, Homo sapiens
cttaggcctcctgat

SEQ ID NO: 112713 - DNA, 15 bp, Homo sapiens
gcttaggcctcctga

SEQ ID NO: 112714 - DNA, 15 bp, Homo sapiens
ggcttaggcctcctg

SEQ ID NO: 112715 - DNA, 15 bp, Homo sapiens
tggcttaggcctcct

SEQ ID NO: 112716 - DNA, 15 bp, Homo sapiens
ttggcttaggcctcc

SEQ ID NO: 112717 - DNA, 15 bp, Homo sapiens
cttggcttaggcctc

SEQ ID NO: 112718 - DNA, 15 bp, Homo sapiens
acttggcttaggcct

SEQ ID NO: 112719 - DNA, 15 bp, Homo sapiens
cacttggcttaggcc

SEQ ID NO: 112720 - DNA, 15 bp, Homo sapiens
tcacttggcttaggc

SEQ ID NO: 112721 - DNA, 15 bp, Homo sapiens
atcacttggcttagg

SEQ ID NO: 112722 - DNA, 15 bp, Homo sapiens
tatcacttggcttag

SEQ ID NO: 112723 - DNA, 15 bp, Homo sapiens
ttatcacttggctta

SEQ ID NO: 112724 - DNA, 15 bp, Homo sapiens
cttatcacttggctt

SEQ ID NO: 112725 - DNA, 15 bp, Homo sapiens
gcttatcacttggct

SEQ ID NO: 112726 - DNA, 15 bp, Homo sapiens
tgcttatcacttggc

SEQ ID NO: 112727 - DNA, 15 bp, Homo sapiens
ctgcttatcacttgg

SEQ ID NO: 112728 - DNA, 15 bp, Homo sapiens
gctgcttatcacttg

SEQ ID NO: 112729 - DNA, 15 bp, Homo sapiens
ggctgcttatcactt

SEQ ID NO: 112730 - DNA, 15 bp, Homo sapiens
tggctgcttatcact

SEQ ID NO: 112731 - DNA, 15 bp, Homo sapiens
ctggctgcttatcac

SEQ ID NO: 112732 - DNA, 15 bp, Homo sapiens
tctggctgcttatca

SEQ ID NO: 112733 - DNA, 15 bp, Homo sapiens
gtctggctgcttatc

SEQ ID NO: 112734 - DNA, 15 bp, Homo sapiens
tgtctggctgcttat

SEQ ID NO: 112735 - DNA, 15 bp, Homo sapiens
ttgtctggctgctta

SEQ ID NO: 112736 - DNA, 15 bp, Homo sapiens
gttgtctggctgctt

SEQ ID NO: 112737 - DNA, 15 bp, Homo sapiens
tgttgtctggctgct

SEQ ID NO: 112738 - DNA, 15 bp, Homo sapiens
ctgttgtctggctgc

SEQ ID NO: 112739 - DNA, 15 bp, Homo sapiens
gctgttgtctggctg

SEQ ID NO: 112740 - DNA, 15 bp, Homo sapiens
ggctgttgtctggct

SEQ ID NO: 112741 - DNA, 15 bp, Homo sapiens
tggctgttgtctggc

SEQ ID NO: 112742 - DNA, 15 bp, Homo sapiens
atggctgttgtctgg

SEQ ID NO: 112743 - DNA, 15 bp, Homo sapiens
gatggctgttgtctg

SEQ ID NO: 112744 - DNA, 15 bp, Homo sapiens
ggatggctgttgtct

SEQ ID NO: 112745 - DNA, 15 bp, Homo sapiens
gggatggctgttgtc

SEQ ID NO: 112746 - DNA, 15 bp, Homo sapiens
tgggatggctgttgt

SEQ ID NO: 112747 - DNA, 15 bp, Homo sapiens
ctgggatggctgttg

SEQ ID NO: 112748 - DNA, 15 bp, Homo sapiens
gctgggatggctgtt

SEQ ID NO: 112749 - DNA, 15 bp, Homo sapiens
agctgggatggctgt

SEQ ID NO: 112750 - DNA, 15 bp, Homo sapiens
cagctgggatggctg

SEQ ID NO: 112751 - DNA, 15 bp, Homo sapiens
ccagctgggatggct

SEQ ID NO: 112752 - DNA, 15 bp, Homo sapiens
cccagctgggatggc

SEQ ID NO: 112753 - DNA, 15 bp, Homo sapiens
ccccagctgggatgg

SEQ ID NO: 112754 - DNA, 15 bp, Homo sapiens
gccccagctgggatg

SEQ ID NO: 112755 - DNA, 15 bp, Homo sapiens
cgccccagctgggat

SEQ ID NO: 112756 - DNA, 15 bp, Homo sapiens
acgccccagctggga

SEQ ID NO: 112757 - DNA, 15 bp, Homo sapiens
cacgccccagctggg

SEQ ID NO: 112758 - DNA, 15 bp, Homo sapiens
ccacgccccagctgg

SEQ ID NO: 112759 - DNA, 15 bp, Homo sapiens
tccacgccccagctg

SEQ ID NO: 112760 - DNA, 15 bp, Homo sapiens
gtccacgccccagct

SEQ ID NO: 112761 - DNA, 15 bp, Homo sapiens
agtccacgccccagc

SEQ ID NO: 112762 - DNA, 15 bp, Homo sapiens
aagtccacgccccag

SEQ ID NO: 112763 - DNA, 15 bp, Homo sapiens
aaagtccacgcccca

SEQ ID NO: 112764 - DNA, 15 bp, Homo sapiens
caaagtccacgcccc

SEQ ID NO: 112765 - DNA, 15 bp, Homo sapiens
gcaaagtccacgccc

SEQ ID NO: 112766 - DNA, 15 bp, Homo sapiens
agcaaagtccacgcc

SEQ ID NO: 112767 - DNA, 15 bp, Homo sapiens
gagcaaagtccacgc

SEQ ID NO: 112768 - DNA, 15 bp, Homo sapiens
ggagcaaagtccacg

SEQ ID NO: 112769 - DNA, 15 bp, Homo sapiens
tggagcaaagtccac

SEQ ID NO: 112770 - DNA, 15 bp, Homo sapiens
ctggagcaaagtcca

SEQ ID NO: 112771 - DNA, 15 bp, Homo sapiens
gctggagcaaagtcc

SEQ ID NO: 112772 - DNA, 15 bp, Homo sapiens
tgctggagcaaagtc

SEQ ID NO: 112773 - DNA, 15 bp, Homo sapiens
ctgctggagcaaagt

SEQ ID NO: 112774 - DNA, 15 bp, Homo sapiens
gctgctggagcaaag

SEQ ID NO: 112775 - DNA, 15 bp, Homo sapiens
ggctgctggagcaaa

SEQ ID NO: 112776 - DNA, 15 bp, Homo sapiens
aggctgctggagcaa

SEQ ID NO: 112777 - DNA, 15 bp, Homo sapiens
caggctgctggagca

SEQ ID NO: 112778 - DNA, 15 bp, Homo sapiens
acaggctgctggagc

SEQ ID NO: 112779 - DNA, 15 bp, Homo sapiens
gacaggctgctggag

SEQ ID NO: 112780 - DNA, 15 bp, Homo sapiens
ggacaggctgctgga

SEQ ID NO: 112781 - DNA, 15 bp, Homo sapiens
gggacaggctgctgg

SEQ ID NO: 112782 - DNA, 15 bp, Homo sapiens
tgggacaggctgctg

SEQ ID NO: 112783 - DNA, 15 bp, Homo sapiens
ctgggacaggctgct

SEQ ID NO: 112784 - DNA, 15 bp, Homo sapiens
actgggacaggctgc

SEQ ID NO: 112785 - DNA, 15 bp, Homo sapiens
cactgggacaggctg

SEQ ID NO: 112786 - DNA, 15 bp, Homo sapiens
tcactgggacaggct

SEQ ID NO: 112787 - DNA, 15 bp, Homo sapiens
ctcactgggacaggc

SEQ ID NO: 112788 - DNA, 15 bp, Homo sapiens
cctcactgggacagg

SEQ ID NO: 112789 - DNA, 15 bp, Homo sapiens
tcctcactgggacag

SEQ ID NO: 112790 - DNA, 15 bp, Homo sapiens
gtcctcactgggaca

SEQ ID NO: 112791 - DNA, 15 bp, Homo sapiens
tgtcctcactgggac

SEQ ID NO: 112792 - DNA, 15 bp, Homo sapiens
ctgtcctcactggga

SEQ ID NO: 112793 - DNA, 15 bp, Homo sapiens
cctgtcctcactggg

SEQ ID NO: 112794 - DNA, 15 bp, Homo sapiens
ccctgtcctcactgg

SEQ ID NO: 112795 - DNA, 15 bp, Homo sapiens
tccctgtcctcactg

SEQ ID NO: 112796 - DNA, 15 bp, Homo sapiens
gtccctgtcctcact

SEQ ID NO: 112797 - DNA, 15 bp, Homo sapiens
tgtccctgtcctcac

SEQ ID NO: 112798 - DNA, 15 bp, Homo sapiens
gtgtccctgtcctca

SEQ ID NO: 112799 - DNA, 15 bp, Homo sapiens
tgtgtccctgtcctc

SEQ ID NO: 112800 - DNA, 15 bp, Homo sapiens
ctgtgtccctgtcct

SEQ ID NO: 112801 - DNA, 15 bp, Homo sapiens
actgtgtccctgtcc

SEQ ID NO: 112802 - DNA, 15 bp, Homo sapiens
tactgtgtccctgtc

SEQ ID NO: 112803 - DNA, 15 bp, Homo sapiens
gtactgtgtccctgt

SEQ ID NO: 112804 - DNA, 15 bp, Homo sapiens
agtactgtgtccctg

SEQ ID NO: 112805 - DNA, 15 bp, Homo sapiens
gagtactgtgtccct

SEQ ID NO: 112806 - DNA, 15 bp, Homo sapiens
cgagtactgtgtccc

SEQ ID NO: 112807 - DNA, 15 bp, Homo sapiens
ccgagtactgtgtcc

SEQ ID NO: 112808 - DNA, 15 bp, Homo sapiens
gccgagtactgtgtc

SEQ ID NO: 112809 - DNA, 15 bp, Homo sapiens
ggccgagtactgtgt

SEQ ID NO: 112810 - DNA, 15 bp, Homo sapiens
tggccgagtactgtg

SEQ ID NO: 112811 - DNA, 15 bp, Homo sapiens
gtggccgagtactgt

SEQ ID NO: 112812 - DNA, 15 bp, Homo sapiens
tgtggccgagtactg

SEQ ID NO: 112813 - DNA, 15 bp, Homo sapiens
gtgtggccgagtact

SEQ ID NO: 112814 - DNA, 15 bp, Homo sapiens
ggtgtggccgagtac

SEQ ID NO: 112815 - DNA, 15 bp, Homo sapiens
tggtgtggccgagta

SEQ ID NO: 112816 - DNA, 15 bp, Homo sapiens
atggtgtggccgagt

SEQ ID NO: 112817 - DNA, 15 bp, Homo sapiens
catggtgtggccgag

SEQ ID NO: 112818 - DNA, 15 bp, Homo sapiens
ccatggtgtggccga

SEQ ID NO: 112819 - DNA, 15 bp, Homo sapiens
cccatggtgtggccg

SEQ ID NO: 112820 - DNA, 15 bp, Homo sapiens
ccccatggtgtggcc

SEQ ID NO: 112821 - DNA, 15 bp, Homo sapiens
gccccatggtgtggc

SEQ ID NO: 112822 - DNA, 15 bp, Homo sapiens
cgccccatggtgtgg

SEQ ID NO: 112823 - DNA, 15 bp, Homo sapiens
gcgccccatggtgtg

SEQ ID NO: 112824 - DNA, 15 bp, Homo sapiens
ggcgccccatggtgt

SEQ ID NO: 112825 - DNA, 15 bp, Homo sapiens
gggcgccccatggtg

SEQ ID NO: 112826 - DNA, 15 bp, Homo sapiens
tgggcgccccatggt

SEQ ID NO: 112827 - DNA, 15 bp, Homo sapiens
gtgggcgccccatgg

SEQ ID NO: 112828 - DNA, 15 bp, Homo sapiens
agtgggcgccccatg

SEQ ID NO: 112829 - DNA, 15 bp, Homo sapiens
cagtgggcgccccat

SEQ ID NO: 112830 - DNA, 15 bp, Homo sapiens
gcagtgggcgcccca

SEQ ID NO: 112831 - DNA, 15 bp, Homo sapiens
tgcagtgggcgcccc

SEQ ID NO: 112832 - DNA, 15 bp, Homo sapiens
gtgcagtgggcgccc

SEQ ID NO: 112833 - DNA, 15 bp, Homo sapiens
ggtgcagtgggcgcc

SEQ ID NO: 112834 - DNA, 15 bp, Homo sapiens
aggtgcagtgggcgc

SEQ ID NO: 112835 - DNA, 15 bp, Homo sapiens
gaggtgcagtgggcg

SEQ ID NO: 112836 - DNA, 15 bp, Homo sapiens
cgaggtgcagtgggc

SEQ ID NO: 112837 - DNA, 15 bp, Homo sapiens
acgaggtgcagtggg

SEQ ID NO: 112838 - DNA, 15 bp, Homo sapiens
gacgaggtgcagtgg

SEQ ID NO: 112839 - DNA, 15 bp, Homo sapiens
ggacgaggtgcagtg

SEQ ID NO: 112840 - DNA, 15 bp, Homo sapiens
aggacgaggtgcagt

SEQ ID NO: 112841 - DNA, 15 bp, Homo sapiens
caggacgaggtgcag

SEQ ID NO: 112842 - DNA, 15 bp, Homo sapiens
gcaggacgaggtgca

SEQ ID NO: 112843 - DNA, 15 bp, Homo sapiens
agcaggacgaggtgc

SEQ ID NO: 112844 - DNA, 15 bp, Homo sapiens
gagcaggacgaggtg

SEQ ID NO: 112845 - DNA, 15 bp, Homo sapiens
tgagcaggacgaggt

SEQ ID NO: 112846 - DNA, 15 bp, Homo sapiens
ctgagcaggacgagg

SEQ ID NO: 112847 - DNA, 15 bp, Homo sapiens
actgagcaggacgag

SEQ ID NO: 112848 - DNA, 15 bp, Homo sapiens
cactgagcaggacga

SEQ ID NO: 112849 - DNA, 15 bp, Homo sapiens
gcactgagcaggacg

SEQ ID NO: 112850 - DNA, 15 bp, Homo sapiens
ggcactgagcaggac

SEQ ID NO: 112851 - DNA, 15 bp, Homo sapiens
aggcactgagcagga

SEQ ID NO: 112852 - DNA, 15 bp, Homo sapiens
gaggcactgagcagg

SEQ ID NO: 112853 - DNA, 15 bp, Homo sapiens
ggaggcactgagcag

SEQ ID NO: 112854 - DNA, 15 bp, Homo sapiens
gggaggcactgagca

SEQ ID NO: 112855 - DNA, 15 bp, Homo sapiens
agggaggcactgagc

SEQ ID NO: 112856 - DNA, 15 bp, Homo sapiens
cagggaggcactgag

SEQ ID NO: 112857 - DNA, 15 bp, Homo sapiens
ccagggaggcactga

SEQ ID NO: 112858 - DNA, 15 bp, Homo sapiens
gccagggaggcactg

SEQ ID NO: 112859 - DNA, 15 bp, Homo sapiens
agccagggaggcact

SEQ ID NO: 112860 - DNA, 15 bp, Homo sapiens
cagccagggaggcac

SEQ ID NO: 112861 - DNA, 15 bp, Homo sapiens
ccagccagggaggca

SEQ ID NO: 112862 - DNA, 15 bp, Homo sapiens
gccagccagggaggc

SEQ ID NO: 112863 - DNA, 15 bp, Homo sapiens
ggccagccagggagg

SEQ ID NO: 112864 - DNA, 15 bp, Homo sapiens
aggccagccagggag

SEQ ID NO: 112865 - DNA, 15 bp, Homo sapiens
gaggccagccaggga

SEQ ID NO: 112866 - DNA, 15 bp, Homo sapiens
ggaggccagccaggg

SEQ ID NO: 112867 - DNA, 15 bp, Homo sapiens
aggaggccagccagg

SEQ ID NO: 112868 - DNA, 15 bp, Homo sapiens
caggaggccagccag

SEQ ID NO: 112869 - DNA, 15 bp, Homo sapiens
gcaggaggccagcca

SEQ ID NO: 112870 - DNA, 15 bp, Homo sapiens
agcaggaggccagcc

SEQ ID NO: 112871 - DNA, 15 bp, Homo sapiens
cagcaggaggccagc

SEQ ID NO: 112872 - DNA, 15 bp, Homo sapiens
gcagcaggaggccag

SEQ ID NO: 112873 - DNA, 15 bp, Homo sapiens
agcagcaggaggcca

SEQ ID NO: 112874 - DNA, 15 bp, Homo sapiens
gagcagcaggaggcc

SEQ ID NO: 112875 - DNA, 15 bp, Homo sapiens
cgagcagcaggaggc

SEQ ID NO: 112876 - DNA, 15 bp, Homo sapiens
ccgagcagcaggagg

SEQ ID NO: 112877 - DNA, 15 bp, Homo sapiens
cccgagcagcaggag

SEQ ID NO: 112878 - DNA, 15 bp, Homo sapiens
ccccgagcagcagga

SEQ ID NO: 112879 - DNA, 15 bp, Homo sapiens
tccccgagcagcagg

SEQ ID NO: 112880 - DNA, 15 bp, Homo sapiens
ttccccgagcagcag

SEQ ID NO: 112881 - DNA, 15 bp, Homo sapiens
tttccccgagcagca

SEQ ID NO: 112882 - DNA, 15 bp, Homo sapiens
ctttccccgagcagc

SEQ ID NO: 112883 - DNA, 15 bp, Homo sapiens
actttccccgagcag

SEQ ID NO: 112884 - DNA, 15 bp, Homo sapiens
gactttccccgagca

SEQ ID NO: 112885 - DNA, 15 bp, Homo sapiens
cgactttccccgagc

SEQ ID NO: 112886 - DNA, 15 bp, Homo sapiens
acgactttccccgag

SEQ ID NO: 112887 - DNA, 15 bp, Homo sapiens
tacgactttccccga

SEQ ID NO: 112888 - DNA, 15 bp, Homo sapiens
ttacgactttccccg

SEQ ID NO: 112889 - DNA, 15 bp, Homo sapiens
cttacgactttcccc

SEQ ID NO: 112890 - DNA, 15 bp, Homo sapiens
acttacgactttccc

SEQ ID NO: 112891 - DNA, 15 bp, Homo sapiens
cacttacgactttcc

SEQ ID NO: 112892 - DNA, 15 bp, Homo sapiens
gcacttacgactttc

SEQ ID NO: 112893 - DNA, 15 bp, Homo sapiens
ggcacttacgacttt

SEQ ID NO: 112894 - DNA, 15 bp, Homo sapiens
gggcacttacgactt

SEQ ID NO: 112895 - DNA, 15 bp, Homo sapiens
ggggcacttacgact

SEQ ID NO: 112896 - DNA, 15 bp, Homo sapiens
aggggcacttacgac

SEQ ID NO: 112897 - DNA, 15 bp, Homo sapiens
gaggggcacttacga

SEQ ID NO: 112898 - DNA, 15 bp, Homo sapiens
cgaggggcacttacg

SEQ ID NO: 112899 - DNA, 15 bp, Homo sapiens
gcgaggggcacttac

SEQ ID NO: 112900 - DNA, 15 bp, Homo sapiens
ggcgaggggcactta

SEQ ID NO: 112901 - DNA, 15 bp, Homo sapiens
gggcgaggggcactt

SEQ ID NO: 112902 - DNA, 15 bp, Homo sapiens
agggcgaggggcact

SEQ ID NO: 112903 - DNA, 15 bp, Homo sapiens
aagggcgaggggcac

SEQ ID NO: 112904 - DNA, 15 bp, Homo sapiens
gaagggcgaggggca

SEQ ID NO: 112905 - DNA, 15 bp, Homo sapiens
tgaagggcgaggggc

SEQ ID NO: 112906 - DNA, 15 bp, Homo sapiens
ctgaagggcgagggg

SEQ ID NO: 112907 - DNA, 15 bp, Homo sapiens
tctgaagggcgaggg

SEQ ID NO: 112908 - DNA, 15 bp, Homo sapiens
gtctgaagggcgagg

SEQ ID NO: 112909 - DNA, 15 bp, Homo sapiens
ggtctgaagggcgag

SEQ ID NO: 112910 - DNA, 15 bp, Homo sapiens
gggtctgaagggcga

SEQ ID NO: 112911 - DNA, 15 bp, Homo sapiens
tgggtctgaagggcg

SEQ ID NO: 112912 - DNA, 15 bp, Homo sapiens
ttgggtctgaagggc

SEQ ID NO: 112913 - DNA, 15 bp, Homo sapiens
tttgggtctgaaggg

SEQ ID NO: 112914 - DNA, 15 bp, Homo sapiens
ttttgggtctgaagg

SEQ ID NO: 112915 - DNA, 15 bp, Homo sapiens
cttttgggtctgaag

SEQ ID NO: 112916 - DNA, 15 bp, Homo sapiens
gcttttgggtctgaa

SEQ ID NO: 112917 - DNA, 15 bp, Homo sapiens
tgcttttgggtctga

SEQ ID NO: 112918 - DNA, 15 bp, Homo sapiens
ctgcttttgggtctg

SEQ ID NO: 112919 - DNA, 15 bp, Homo sapiens
gctgcttttgggtct

SEQ ID NO: 112920 - DNA, 15 bp, Homo sapiens
cgctgcttttgggtc

SEQ ID NO: 112921 - DNA, 15 bp, Homo sapiens
gcgctgcttttgggt

SEQ ID NO: 112922 - DNA, 15 bp, Homo sapiens
ggcgctgcttttggg

SEQ ID NO: 112923 - DNA, 15 bp, Homo sapiens
tggcgctgcttttgg

SEQ ID NO: 112924 - DNA, 15 bp, Homo sapiens
ctggcgctgcttttg

SEQ ID NO: 112925 - DNA, 15 bp, Homo sapiens
cctggcgctgctttt

SEQ ID NO: 112926 - DNA, 15 bp, Homo sapiens
ccctggcgctgcttt

SEQ ID NO: 112927 - DNA, 15 bp, Homo sapiens
tccctggcgctgctt

SEQ ID NO: 112928 - DNA, 15 bp, Homo sapiens
ctccctggcgctgct

SEQ ID NO: 112929 - DNA, 15 bp, Homo sapiens
gctccctggcgctgc

SEQ ID NO: 112930 - DNA, 15 bp, Homo sapiens
tgctccctggcgctg

SEQ ID NO: 112931 - DNA, 15 bp, Homo sapiens
ctgctccctggcgct

SEQ ID NO: 112932 - DNA, 15 bp, Homo sapiens
cctgctccctggcgc

SEQ ID NO: 112933 - DNA, 15 bp, Homo sapiens
ccctgctccctggcg

SEQ ID NO: 112934 - DNA, 15 bp, Homo sapiens
tccctgctccctggc

SEQ ID NO: 112935 - DNA, 15 bp, Homo sapiens
ctccctgctccctgg

SEQ ID NO: 112936 - DNA, 15 bp, Homo sapiens
cctccctgctccctg

SEQ ID NO: 112937 - DNA, 15 bp, Homo sapiens
ccctccctgctccct

SEQ ID NO: 112938 - DNA, 15 bp, Homo sapiens
cccctccctgctccc

SEQ ID NO: 112939 - DNA, 15 bp, Homo sapiens
gcccctccctgctcc

SEQ ID NO: 112940 - DNA, 15 bp, Homo sapiens
cgcccctccctgctc

SEQ ID NO: 112941 - DNA, 15 bp, Homo sapiens
ccgcccctccctgct

SEQ ID NO: 112942 - DNA, 15 bp, Homo sapiens
gccgcccctccctgc

SEQ ID NO: 112943 - DNA, 15 bp, Homo sapiens
tgccgcccctccctg

SEQ ID NO: 112944 - DNA, 15 bp, Homo sapiens
ctgccgcccctccct

SEQ ID NO: 112945 - DNA, 15 bp, Homo sapiens
actgccgcccctccc

SEQ ID NO: 112946 - DNA, 15 bp, Homo sapiens
aactgccgcccctcc

SEQ ID NO: 112947 - DNA, 15 bp, Homo sapiens
caactgccgcccctc

SEQ ID NO: 112948 - DNA, 15 bp, Homo sapiens
ccaactgccgcccct

SEQ ID NO: 112949 - DNA, 15 bp, Homo sapiens
cccaactgccgcccc

SEQ ID NO: 112950 - DNA, 15 bp, Homo sapiens
ccccaactgccgccc

SEQ ID NO: 112951 - DNA, 15 bp, Homo sapiens
tccccaactgccgcc

SEQ ID NO: 112952 - DNA, 15 bp, Homo sapiens
ttccccaactgccgc

SEQ ID NO: 112953 - DNA, 15 bp, Homo sapiens
tttccccaactgccg

SEQ ID NO: 112954 - DNA, 15 bp, Homo sapiens
gtttccccaactgcc

SEQ ID NO: 112955 - DNA, 15 bp, Homo sapiens
ggtttccccaactgc

SEQ ID NO: 112956 - DNA, 15 bp, Homo sapiens
gggtttccccaactg

SEQ ID NO: 112957 - DNA, 15 bp, Homo sapiens
agggtttccccaact

SEQ ID NO: 112958 - DNA, 15 bp, Homo sapiens
gagggtttccccaac

SEQ ID NO: 112959 - DNA, 15 bp, Homo sapiens
agagggtttccccaa

SEQ ID NO: 112960 - DNA, 15 bp, Homo sapiens
gagagggtttcccca

SEQ ID NO: 112961 - DNA, 15 bp, Homo sapiens
tgagagggtttcccc

SEQ ID NO: 112962 - DNA, 15 bp, Homo sapiens
atgagagggtttccc

SEQ ID NO: 112963 - DNA, 15 bp, Homo sapiens
gatgagagggtttcc

SEQ ID NO: 112964 - DNA, 15 bp, Homo sapiens
agatgagagggtttc

SEQ ID NO: 112965 - DNA, 15 bp, Homo sapiens
gagatgagagggttt

SEQ ID NO: 112966 - DNA, 15 bp, Homo sapiens
agagatgagagggtt

SEQ ID NO: 112967 - DNA, 15 bp, Homo sapiens
cagagatgagagggt

SEQ ID NO: 112968 - DNA, 15 bp, Homo sapiens
gcagagatgagaggg

SEQ ID NO: 112969 - DNA, 15 bp, Homo sapiens
tgcagagatgagagg

SEQ ID NO: 112970 - DNA, 15 bp, Homo sapiens
ctgcagagatgagag

SEQ ID NO: 112971 - DNA, 15 bp, Homo sapiens
gctgcagagatgaga

SEQ ID NO: 112972 - DNA, 15 bp, Homo sapiens
ggctgcagagatgag

SEQ ID NO: 112973 - DNA, 15 bp, Homo sapiens
aggctgcagagatga

SEQ ID NO: 112974 - DNA, 15 bp, Homo sapiens
caggctgcagagatg

SEQ ID NO: 112975 - DNA, 15 bp, Homo sapiens
ccaggctgcagagat

SEQ ID NO: 112976 - DNA, 15 bp, Homo sapiens
tccaggctgcagaga

SEQ ID NO: 112977 - DNA, 15 bp, Homo sapiens
gtccaggctgcagag

SEQ ID NO: 112978 - DNA, 15 bp, Homo sapiens
cgtccaggctgcaga

SEQ ID NO: 112979 - DNA, 15 bp, Homo sapiens
ccgtccaggctgcag

SEQ ID NO: 112980 - DNA, 15 bp, Homo sapiens
accgtccaggctgca

SEQ ID NO: 112981 - DNA, 15 bp, Homo sapiens
caccgtccaggctgc

SEQ ID NO: 112982 - DNA, 15 bp, Homo sapiens
ccaccgtccaggctg

SEQ ID NO: 112983 - DNA, 15 bp, Homo sapiens
cccaccgtccaggct

SEQ ID NO: 112984 - DNA, 15 bp, Homo sapiens
acccaccgtccaggc

SEQ ID NO: 112985 - DNA, 15 bp, Homo sapiens
cacccaccgtccagg

SEQ ID NO: 112986 - DNA, 15 bp, Homo sapiens
gcacccaccgtccag

SEQ ID NO: 112987 - DNA, 15 bp, Homo sapiens
ggcacccaccgtcca

SEQ ID NO: 112988 - DNA, 15 bp, Homo sapiens
aggcacccaccgtcc

SEQ ID NO: 112989 - DNA, 15 bp, Homo sapiens
aaggcacccaccgtc

SEQ ID NO: 112990 - DNA, 15 bp, Homo sapiens
caaggcacccaccgt

SEQ ID NO: 112991 - DNA, 15 bp, Homo sapiens
tcaaggcacccaccg

SEQ ID NO: 112992 - DNA, 15 bp, Homo sapiens
ctcaaggcacccacc

SEQ ID NO: 112993 - DNA, 15 bp, Homo sapiens
actcaaggcacccac

SEQ ID NO: 112994 - DNA, 15 bp, Homo sapiens
cactcaaggcaccca

SEQ ID NO: 112995 - DNA, 15 bp, Homo sapiens
gcactcaaggcaccc

SEQ ID NO: 112996 - DNA, 15 bp, Homo sapiens
agcactcaaggcacc

SEQ ID NO: 112997 - DNA, 15 bp, Homo sapiens
cagcactcaaggcac

SEQ ID NO: 112998 - DNA, 15 bp, Homo sapiens
gcagcactcaaggca

SEQ ID NO: 112999 - DNA, 15 bp, Homo sapiens
ggcagcactcaaggc

SEQ ID NO: 113000 - DNA, 15 bp, Homo sapiens
tggcagcactcaagg

SEQ ID NO: 113001 - DNA, 15 bp, Homo sapiens
ctggcagcactcaag

SEQ ID NO: 113002 - DNA, 15 bp, Homo sapiens
tctggcagcactcaa

SEQ ID NO: 113003 - DNA, 15 bp, Homo sapiens
ctctggcagcactca

SEQ ID NO: 113004 - DNA, 15 bp, Homo sapiens
cctctggcagcactc

SEQ ID NO: 113005 - DNA, 15 bp, Homo sapiens
gcctctggcagcact

SEQ ID NO: 113006 - DNA, 15 bp, Homo sapiens
agcctctggcagcac

SEQ ID NO: 113007 - DNA, 15 bp, Homo sapiens
cagcctctggcagca

SEQ ID NO: 113008 - DNA, 15 bp, Homo sapiens
ccagcctctggcagc

SEQ ID NO: 113009 - DNA, 15 bp, Homo sapiens
cccagcctctggcag

SEQ ID NO: 113010 - DNA, 15 bp, Homo sapiens
gcccagcctctggca

SEQ ID NO: 113011 - DNA, 15 bp, Homo sapiens
agcccagcctctggc

SEQ ID NO: 113012 - DNA, 15 bp, Homo sapiens
gagcccagcctctgg

SEQ ID NO: 113013 - DNA, 15 bp, Homo sapiens
cgagcccagcctctg

SEQ ID NO: 113014 - DNA, 15 bp, Homo sapiens
ccgagcccagcctct

SEQ ID NO: 113015 - DNA, 15 bp, Homo sapiens
tccgagcccagcctc

SEQ ID NO: 113016 - DNA, 15 bp, Homo sapiens
atccgagcccagcct

SEQ ID NO: 113017 - DNA, 15 bp, Homo sapiens
catccgagcccagcc

SEQ ID NO: 113018 - DNA, 15 bp, Homo sapiens
ccatccgagcccagc

SEQ ID NO: 113019 - DNA, 15 bp, Homo sapiens
gccatccgagcccag

SEQ ID NO: 113020 - DNA, 15 bp, Homo sapiens
agccatccgagccca

SEQ ID NO: 113021 - DNA, 15 bp, Homo sapiens
cagccatccgagccc

SEQ ID NO: 113022 - DNA, 15 bp, Homo sapiens
ccagccatccgagcc

SEQ ID NO: 113023 - DNA, 15 bp, Homo sapiens
cccagccatccgagc

SEQ ID NO: 113024 - DNA, 15 bp, Homo sapiens
gcccagccatccgag

SEQ ID NO: 113025 - DNA, 15 bp, Homo sapiens
agcccagccatccga

SEQ ID NO: 113026 - DNA, 15 bp, Homo sapiens
aagcccagccatccg

SEQ ID NO: 113027 - DNA, 15 bp, Homo sapiens
caagcccagccatcc

SEQ ID NO: 113028 - DNA, 15 bp, Homo sapiens
ccaagcccagccatc

SEQ ID NO: 113029 - DNA, 15 bp, Homo sapiens
gccaagcccagccat

SEQ ID NO: 113030 - DNA, 15 bp, Homo sapiens
ggccaagcccagcca

SEQ ID NO: 113031 - DNA, 15 bp, Homo sapiens
aggccaagcccagcc

SEQ ID NO: 113032 - DNA, 15 bp, Homo sapiens
aaggccaagcccagc

SEQ ID NO: 113033 - DNA, 15 bp, Homo sapiens
aaaggccaagcccag

SEQ ID NO: 113034 - DNA, 15 bp, Homo sapiens
gaaaggccaagccca

SEQ ID NO: 113035 - DNA, 15 bp, Homo sapiens
ggaaaggccaagccc

SEQ ID NO: 113036 - DNA, 15 bp, Homo sapiens
tggaaaggccaagcc

SEQ ID NO: 113037 - DNA, 15 bp, Homo sapiens
ctggaaaggccaagc

SEQ ID NO: 113038 - DNA, 15 bp, Homo sapiens
gctggaaaggccaag

SEQ ID NO: 113039 - DNA, 15 bp, Homo sapiens
ggctggaaaggccaa

SEQ ID NO: 113040 - DNA, 15 bp, Homo sapiens
tggctggaaaggcca

SEQ ID NO: 113041 - DNA, 15 bp, Homo sapiens
ttggctggaaaggcc

SEQ ID NO: 113042 - DNA, 15 bp, Homo sapiens
gttggctggaaaggc

SEQ ID NO: 113043 - DNA, 15 bp, Homo sapiens
cgttggctggaaagg

SEQ ID NO: 113044 - DNA, 15 bp, Homo sapiens
ccgttggctggaaag

SEQ ID NO: 113045 - DNA, 15 bp, Homo sapiens
gccgttggctggaaa

SEQ ID NO: 113046 - DNA, 15 bp, Homo sapiens
tgccgttggctggaa

SEQ ID NO: 113047 - DNA, 15 bp, Homo sapiens
atgccgttggctgga

SEQ ID NO: 113048 - DNA, 15 bp, Homo sapiens
gatgccgttggctgg

SEQ ID NO: 113049 - DNA, 15 bp, Homo sapiens
ggatgccgttggctg

SEQ ID NO: 113050 - DNA, 15 bp, Homo sapiens
aggatgccgttggct

SEQ ID NO: 113051 - DNA, 15 bp, Homo sapiens
gaggatgccgttggc

SEQ ID NO: 113052 - DNA, 15 bp, Homo sapiens
tgaggatgccgttgg

SEQ ID NO: 113053 - DNA, 15 bp, Homo sapiens
ttgaggatgccgttg

SEQ ID NO: 113054 - DNA, 15 bp, Homo sapiens
cttgaggatgccgtt

SEQ ID NO: 113055 - DNA, 15 bp, Homo sapiens
ccttgaggatgccgt

SEQ ID NO: 113056 - DNA, 15 bp, Homo sapiens
gccttgaggatgccg

SEQ ID NO: 113057 - DNA, 15 bp, Homo sapiens
ggccttgaggatgcc

SEQ ID NO: 113058 - DNA, 15 bp, Homo sapiens
tggccttgaggatgc

SEQ ID NO: 113059 - DNA, 15 bp, Homo sapiens
ctggccttgaggatg

SEQ ID NO: 113060 - DNA, 15 bp, Homo sapiens
gctggccttgaggat

SEQ ID NO: 113061 - DNA, 15 bp, Homo sapiens
agctggccttgagga

SEQ ID NO: 113062 - DNA, 15 bp, Homo sapiens
cagctggccttgagg

SEQ ID NO: 113063 - DNA, 15 bp, Homo sapiens
acagctggccttgag

SEQ ID NO: 113064 - DNA, 15 bp, Homo sapiens
cacagctggccttga

SEQ ID NO: 113065 - DNA, 15 bp, Homo sapiens
ccacagctggccttg

SEQ ID NO: 113066 - DNA, 15 bp, Homo sapiens
gccacagctggcctt

SEQ ID NO: 113067 - DNA, 15 bp, Homo sapiens
agccacagctggcct

SEQ ID NO: 113068 - DNA, 15 bp, Homo sapiens
gagccacagctggcc

SEQ ID NO: 113069 - DNA, 15 bp, Homo sapiens
ggagccacagctggc

SEQ ID NO: 113070 - DNA, 15 bp, Homo sapiens
gggagccacagctgg

SEQ ID NO: 113071 - DNA, 15 bp, Homo sapiens
agggagccacagctg

SEQ ID NO: 113072 - DNA, 15 bp, Homo sapiens
cagggagccacagct

SEQ ID NO: 113073 - DNA, 15 bp, Homo sapiens
ccagggagccacagc

SEQ ID NO: 113074 - DNA, 15 bp, Homo sapiens
cccagggagccacag

SEQ ID NO: 113075 - DNA, 15 bp, Homo sapiens
ccccagggagccaca

SEQ ID NO: 113076 - DNA, 15 bp, Homo sapiens
gccccagggagccac

SEQ ID NO: 113077 - DNA, 15 bp, Homo sapiens
agccccagggagcca

SEQ ID NO: 113078 - DNA, 15 bp, Homo sapiens
cagccccagggagcc

SEQ ID NO: 113079 - DNA, 15 bp, Homo sapiens
tcagccccagggagc

SEQ ID NO: 113080 - DNA, 15 bp, Homo sapiens
ctcagccccagggag

SEQ ID NO: 113081 - DNA, 15 bp, Homo sapiens
tctcagccccaggga

SEQ ID NO: 113082 - DNA, 15 bp, Homo sapiens
ctctcagccccaggg

SEQ ID NO: 113083 - DNA, 15 bp, Homo sapiens
actctcagccccagg

SEQ ID NO: 113084 - DNA, 15 bp, Homo sapiens
gactctcagccccag

SEQ ID NO: 113085 - DNA, 15 bp, Homo sapiens
tgactctcagcccca

SEQ ID NO: 113086 - DNA, 15 bp, Homo sapiens
ctgactctcagcccc

SEQ ID NO: 113087 - DNA, 15 bp, Homo sapiens
tctgactctcagccc

SEQ ID NO: 113088 - DNA, 15 bp, Homo sapiens
gtctgactctcagcc

SEQ ID NO: 113089 - DNA, 15 bp, Homo sapiens
cgtctgactctcagc

SEQ ID NO: 113090 - DNA, 15 bp, Homo sapiens
ccgtctgactctcag

SEQ ID NO: 113091 - DNA, 15 bp, Homo sapiens
cccgtctgactctca

SEQ ID NO: 113092 - DNA, 15 bp, Homo sapiens
gcccgtctgactctc

SEQ ID NO: 113093 - DNA, 15 bp, Homo sapiens
cgcccgtctgactct

SEQ ID NO: 113094 - DNA, 15 bp, Homo sapiens
ccgcccgtctgactc

SEQ ID NO: 113095 - DNA, 15 bp, Homo sapiens
tccgcccgtctgact

SEQ ID NO: 113096 - DNA, 15 bp, Homo sapiens
atccgcccgtctgac

SEQ ID NO: 113097 - DNA, 15 bp, Homo sapiens
gatccgcccgtctga

SEQ ID NO: 113098 - DNA, 15 bp, Homo sapiens
tgatccgcccgtctg

SEQ ID NO: 113099 - DNA, 15 bp, Homo sapiens
ctgatccgcccgtct

SEQ ID NO: 113100 - DNA, 15 bp, Homo sapiens
tctgatccgcccgtc

SEQ ID NO: 113101 - DNA, 15 bp, Homo sapiens
ctctgatccgcccgt

SEQ ID NO: 113102 - DNA, 15 bp, Homo sapiens
cctctgatccgcccg

SEQ ID NO: 113103 - DNA, 15 bp, Homo sapiens
acctctgatccgccc

SEQ ID NO: 113104 - DNA, 15 bp, Homo sapiens
gacctctgatccgcc

SEQ ID NO: 113105 - DNA, 15 bp, Homo sapiens
tgacctctgatccgc

SEQ ID NO: 113106 - DNA, 15 bp, Homo sapiens
gtgacctctgatccg

SEQ ID NO: 113107 - DNA, 15 bp, Homo sapiens
tgtgacctctgatcc

SEQ ID NO: 113108 - DNA, 15 bp, Homo sapiens
ctgtgacctctgatc

SEQ ID NO: 113109 - DNA, 15 bp, Homo sapiens
tctgtgacctctgat

SEQ ID NO: 113110 - DNA, 15 bp, Homo sapiens
ctctgtgacctctga

SEQ ID NO: 113111 - DNA, 15 bp, Homo sapiens
tctctgtgacctctg

SEQ ID NO: 113112 - DNA, 15 bp, Homo sapiens
gtctctgtgacctct

SEQ ID NO: 113113 - DNA, 15 bp, Homo sapiens
tgtctctgtgacctc

SEQ ID NO: 113114 - DNA, 15 bp, Homo sapiens
ttgtctctgtgacct

SEQ ID NO: 113115 - DNA, 15 bp, Homo sapiens
tttgtctctgtgacc

SEQ ID NO: 113116 - DNA, 15 bp, Homo sapiens
ttttgtctctgtgac

SEQ ID NO: 113117 - DNA, 15 bp, Homo sapiens
tttttgtctctgtga

SEQ ID NO: 113118 - DNA, 15 bp, Homo sapiens
gtttttgtctctgtg

SEQ ID NO: 113119 - DNA, 15 bp, Homo sapiens
tgtttttgtctctgt

SEQ ID NO: 113120 - DNA, 15 bp, Homo sapiens
gtgtttttgtctctg

SEQ ID NO: 113121 - DNA, 15 bp, Homo sapiens
tgtgtttttgtctct

SEQ ID NO: 113122 - DNA, 15 bp, Homo sapiens
ttgtgtttttgtctc

SEQ ID NO: 113123 - DNA, 15 bp, Homo sapiens
cttgtgtttttgtct

SEQ ID NO: 113124 - DNA, 15 bp, Homo sapiens
ccttgtgtttttgtc

SEQ ID NO: 113125 - DNA, 15 bp, Homo sapiens
tccttgtgtttttgt

SEQ ID NO: 113126 - DNA, 15 bp, Homo sapiens
gtccttgtgtttttg

SEQ ID NO: 113127 - DNA, 15 bp, Homo sapiens
tgtccttgtgttttt

SEQ ID NO: 113128 - DNA, 15 bp, Homo sapiens
ctgtccttgtgtttt

SEQ ID NO: 113129 - DNA, 15 bp, Homo sapiens
tctgtccttgtgttt

SEQ ID NO: 113130 - DNA, 15 bp, Homo sapiens
ctctgtccttgtgtt

SEQ ID NO: 113131 - DNA, 15 bp, Homo sapiens
actctgtccttgtgt

SEQ ID NO: 113132 - DNA, 15 bp, Homo sapiens
gactctgtccttgtg

SEQ ID NO: 113133 - DNA, 15 bp, Homo sapiens
tgactctgtccttgt

SEQ ID NO: 113134 - DNA, 15 bp, Homo sapiens
ctgactctgtccttg

SEQ ID NO: 113135 - DNA, 15 bp, Homo sapiens
tctgactctgtcctt

SEQ ID NO: 113136 - DNA, 15 bp, Homo sapiens
ctctgactctgtcct

SEQ ID NO: 113137 - DNA, 15 bp, Homo sapiens
tctctgactctgtcc

SEQ ID NO: 113138 - DNA, 15 bp, Homo sapiens
ctctctgactctgtc

SEQ ID NO: 113139 - DNA, 15 bp, Homo sapiens
tctctctgactctgt

SEQ ID NO: 113140 - DNA, 15 bp, Homo sapiens
ctctctctgactctg

SEQ ID NO: 113141 - DNA, 15 bp, Homo sapiens
tctctctctgactct

SEQ ID NO: 113142 - DNA, 15 bp, Homo sapiens
ttctctctctgactc

SEQ ID NO: 113143 - DNA, 15 bp, Homo sapiens
tttctctctctgact

SEQ ID NO: 113144 - DNA, 15 bp, Homo sapiens
ctttctctctctgac

SEQ ID NO: 113145 - DNA, 15 bp, Homo sapiens
cctttctctctctga

SEQ ID NO: 113146 - DNA, 15 bp, Homo sapiens
ccctttctctctctg

SEQ ID NO: 113147 - DNA, 15 bp, Homo sapiens
tccctttctctctct

SEQ ID NO: 113148 - DNA, 15 bp, Homo sapiens
ctccctttctctctc

SEQ ID NO: 113149 - DNA, 15 bp, Homo sapiens
tctccctttctctct

SEQ ID NO: 113150 - DNA, 15 bp, Homo sapiens
ctctccctttctctc

SEQ ID NO: 113151 - DNA, 15 bp, Homo sapiens
cctctccctttctct

SEQ ID NO: 113152 - DNA, 15 bp, Homo sapiens
ccctctccctttctc

SEQ ID NO: 113153 - DNA, 15 bp, Homo sapiens
tccctctccctttct

SEQ ID NO: 113154 - DNA, 15 bp, Homo sapiens
ttccctctccctttc

SEQ ID NO: 113155 - DNA, 15 bp, Homo sapiens
cttccctctcccttt

SEQ ID NO: 113156 - DNA, 15 bp, Homo sapiens
ccttccctctccctt

SEQ ID NO: 113157 - DNA, 15 bp, Homo sapiens
tccttccctctccct

SEQ ID NO: 113158 - DNA, 15 bp, Homo sapiens
ctccttccctctccc

SEQ ID NO: 113159 - DNA, 15 bp, Homo sapiens
tctccttccctctcc

SEQ ID NO: 113160 - DNA, 15 bp, Homo sapiens
ttctccttccctctc

SEQ ID NO: 113161 - DNA, 15 bp, Homo sapiens
tttctccttccctct

SEQ ID NO: 113162 - DNA, 15 bp, Homo sapiens
gtttctccttccctc

SEQ ID NO: 113163 - DNA, 15 bp, Homo sapiens
cgtttctccttccct

SEQ ID NO: 113164 - DNA, 15 bp, Homo sapiens
ccgtttctccttccc

SEQ ID NO: 113165 - DNA, 15 bp, Homo sapiens
tccgtttctccttcc

SEQ ID NO: 113166 - DNA, 15 bp, Homo sapiens
ctccgtttctccttc

SEQ ID NO: 113167 - DNA, 15 bp, Homo sapiens
tctccgtttctcctt

SEQ ID NO: 113168 - DNA, 15 bp, Homo sapiens
gtctccgtttctcct

SEQ ID NO: 113169 - DNA, 15 bp, Homo sapiens
tgtctccgtttctcc

SEQ ID NO: 113170 - DNA, 15 bp, Homo sapiens
gtgtctccgtttctc

SEQ ID NO: 113171 - DNA, 15 bp, Homo sapiens
tgtgtctccgtttct

SEQ ID NO: 113172 - DNA, 15 bp, Homo sapiens
ctgtgtctccgtttc

SEQ ID NO: 113173 - DNA, 15 bp, Homo sapiens
actgtgtctccgttt

SEQ ID NO: 113174 - DNA, 15 bp, Homo sapiens
cactgtgtctccgtt

SEQ ID NO: 113175 - DNA, 15 bp, Homo sapiens
tcactgtgtctccgt

SEQ ID NO: 113176 - DNA, 15 bp, Homo sapiens
ctcactgtgtctccg

SEQ ID NO: 113177 - DNA, 15 bp, Homo sapiens
tctcactgtgtctcc

SEQ ID NO: 113178 - DNA, 15 bp, Homo sapiens
atctcactgtgtctc

SEQ ID NO: 113179 - DNA, 15 bp, Homo sapiens
catctcactgtgtct

SEQ ID NO: 113180 - DNA, 15 bp, Homo sapiens
ccatctcactgtgtc

SEQ ID NO: 113181 - DNA, 15 bp, Homo sapiens
cccatctcactgtgt

SEQ ID NO: 113182 - DNA, 15 bp, Homo sapiens
tcccatctcactgtg

SEQ ID NO: 113183 - DNA, 15 bp, Homo sapiens
ctcccatctcactgt

SEQ ID NO: 113184 - DNA, 15 bp, Homo sapiens
cctcccatctcactg

SEQ ID NO: 113185 - DNA, 15 bp, Homo sapiens
gcctcccatctcact

SEQ ID NO: 113186 - DNA, 15 bp, Homo sapiens
ggcctcccatctcac

SEQ ID NO: 113187 - DNA, 15 bp, Homo sapiens
tggcctcccatctca

SEQ ID NO: 113188 - DNA, 15 bp, Homo sapiens
ttggcctcccatctc

SEQ ID NO: 113189 - DNA, 15 bp, Homo sapiens
cttggcctcccatct

SEQ ID NO: 113190 - DNA, 15 bp, Homo sapiens
tcttggcctcccatc

SEQ ID NO: 113191 - DNA, 15 bp, Homo sapiens
ctcttggcctcccat

SEQ ID NO: 113192 - DNA, 15 bp, Homo sapiens
cctcttggcctccca

SEQ ID NO: 113193 - DNA, 15 bp, Homo sapiens
gcctcttggcctccc

SEQ ID NO: 113194 - DNA, 15 bp, Homo sapiens
tgcctcttggcctcc

SEQ ID NO: 113195 - DNA, 15 bp, Homo sapiens
ctgcctcttggcctc

SEQ ID NO: 113196 - DNA, 15 bp, Homo sapiens
tctgcctcttggcct

SEQ ID NO: 113197 - DNA, 15 bp, Homo sapiens
ctctgcctcttggcc

SEQ ID NO: 113198 - DNA, 15 bp, Homo sapiens
tctctgcctcttggc

SEQ ID NO: 113199 - DNA, 15 bp, Homo sapiens
gtctctgcctcttgg

SEQ ID NO: 113200 - DNA, 15 bp, Homo sapiens
tgtctctgcctcttg

SEQ ID NO: 113201 - DNA, 15 bp, Homo sapiens
ctgtctctgcctctt

SEQ ID NO: 113202 - DNA, 15 bp, Homo sapiens
tctgtctctgcctct

SEQ ID NO: 113203 - DNA, 15 bp, Homo sapiens
ctctgtctctgcctc

SEQ ID NO: 113204 - DNA, 15 bp, Homo sapiens
cctctgtctctgcct

SEQ ID NO: 113205 - DNA, 15 bp, Homo sapiens
acctctgtctctgcc

SEQ ID NO: 113206 - DNA, 15 bp, Homo sapiens
tacctctgtctctgc

SEQ ID NO: 113207 - DNA, 15 bp, Homo sapiens
ctacctctgtctctg

SEQ ID NO: 113208 - DNA, 15 bp, Homo sapiens
tctacctctgtctct

SEQ ID NO: 113209 - DNA, 15 bp, Homo sapiens
ttctacctctgtctc

SEQ ID NO: 113210 - DNA, 15 bp, Homo sapiens
tttctacctctgtct

SEQ ID NO: 113211 - DNA, 15 bp, Homo sapiens
ctttctacctctgtc

SEQ ID NO: 113212 - DNA, 15 bp, Homo sapiens
tctttctacctctgt

SEQ ID NO: 113213 - DNA, 15 bp, Homo sapiens
gtctttctacctctg

SEQ ID NO: 113214 - DNA, 15 bp, Homo sapiens
cgtctttctacctct

SEQ ID NO: 113215 - DNA, 15 bp, Homo sapiens
ccgtctttctacctc

SEQ ID NO: 113216 - DNA, 15 bp, Homo sapiens
tccgtctttctacct

SEQ ID NO: 113217 - DNA, 15 bp, Homo sapiens
ctccgtctttctacc

SEQ ID NO: 113218 - DNA, 15 bp, Homo sapiens
tctccgtctttctac

SEQ ID NO: 113219 - DNA, 15 bp, Homo sapiens
gtctccgtctttcta

SEQ ID NO: 113220 - DNA, 15 bp, Homo sapiens
tgtctccgtctttct

SEQ ID NO: 113221 - DNA, 15 bp, Homo sapiens
ctgtctccgtctttc

SEQ ID NO: 113222 - DNA, 15 bp, Homo sapiens
tctgtctccgtcttt

SEQ ID NO: 113223 - DNA, 15 bp, Homo sapiens
ctctgtctccgtctt

SEQ ID NO: 113224 - DNA, 15 bp, Homo sapiens
tctctgtctccgtct

SEQ ID NO: 113225 - DNA, 15 bp, Homo sapiens
ctctctgtctccgtc

SEQ ID NO: 113226 - DNA, 15 bp, Homo sapiens
tctctctgtctccgt

SEQ ID NO: 113227 - DNA, 15 bp, Homo sapiens
ctctctctgtctccg

SEQ ID NO: 113228 - DNA, 15 bp, Homo sapiens
tctctctctgtctcc

SEQ ID NO: 113229 - DNA, 15 bp, Homo sapiens
ctctctctctgtctc

SEQ ID NO: 113230 - DNA, 15 bp, Homo sapiens
cctctctctctgtct

SEQ ID NO: 113231 - DNA, 15 bp, Homo sapiens
ccctctctctctgtc

SEQ ID NO: 113232 - DNA, 15 bp, Homo sapiens
tccctctctctctgt

SEQ ID NO: 113233 - DNA, 15 bp, Homo sapiens
ctccctctctctctg

SEQ ID NO: 113234 - DNA, 15 bp, Homo sapiens
cctccctctctctct

SEQ ID NO: 113235 - DNA, 15 bp, Homo sapiens
ccctccctctctctc

SEQ ID NO: 113236 - DNA, 15 bp, Homo sapiens
cccctccctctctct

SEQ ID NO: 113237 - DNA, 15 bp, Homo sapiens
acccctccctctctc

SEQ ID NO: 113238 - DNA, 15 bp, Homo sapiens
aacccctccctctct

SEQ ID NO: 113239 - DNA, 15 bp, Homo sapiens
caacccctccctctc

SEQ ID NO: 113240 - DNA, 15 bp, Homo sapiens
ccaacccctccctct

SEQ ID NO: 113241 - DNA, 15 bp, Homo sapiens
cccaacccctccctc

SEQ ID NO: 113242 - DNA, 15 bp, Homo sapiens
ccccaacccctccct

SEQ ID NO: 113243 - DNA, 15 bp, Homo sapiens
gccccaacccctccc

SEQ ID NO: 113244 - DNA, 15 bp, Homo sapiens
tgccccaacccctcc

SEQ ID NO: 113245 - DNA, 15 bp, Homo sapiens
ctgccccaacccctc

SEQ ID NO: 113246 - DNA, 15 bp, Homo sapiens
cctgccccaacccct

SEQ ID NO: 113247 - DNA, 15 bp, Homo sapiens
gcctgccccaacccc

SEQ ID NO: 113248 - DNA, 15 bp, Homo sapiens
tgcctgccccaaccc

SEQ ID NO: 113249 - DNA, 15 bp, Homo sapiens
ctgcctgccccaacc

SEQ ID NO: 113250 - DNA, 15 bp, Homo sapiens
tctgcctgccccaac

SEQ ID NO: 113251 - DNA, 15 bp, Homo sapiens
ctctgcctgccccaa

SEQ ID NO: 113252 - DNA, 15 bp, Homo sapiens
tctctgcctgcccca

SEQ ID NO: 113253 - DNA, 15 bp, Homo sapiens
gtctctgcctgcccc

SEQ ID NO: 113254 - DNA, 15 bp, Homo sapiens
tgtctctgcctgccc

SEQ ID NO: 113255 - DNA, 15 bp, Homo sapiens
ctgtctctgcctgcc

SEQ ID NO: 113256 - DNA, 15 bp, Homo sapiens
cctgtctctgcctgc

SEQ ID NO: 113257 - DNA, 15 bp, Homo sapiens
tcctgtctctgcctg

SEQ ID NO: 113258 - DNA, 15 bp, Homo sapiens
gtcctgtctctgcct

SEQ ID NO: 113259 - DNA, 15 bp, Homo sapiens
tgtcctgtctctgcc

SEQ ID NO: 113260 - DNA, 15 bp, Homo sapiens
ctgtcctgtctctgc

SEQ ID NO: 113261 - DNA, 15 bp, Homo sapiens
actgtcctgtctctg

SEQ ID NO: 113262 - DNA, 15 bp, Homo sapiens
aactgtcctgtctct

SEQ ID NO: 113263 - DNA, 15 bp, Homo sapiens
taactgtcctgtctc

SEQ ID NO: 113264 - DNA, 15 bp, Homo sapiens
ctaactgtcctgtct

SEQ ID NO: 113265 - DNA, 15 bp, Homo sapiens
gctaactgtcctgtc

SEQ ID NO: 113266 - DNA, 15 bp, Homo sapiens
ggctaactgtcctgt

SEQ ID NO: 113267 - DNA, 15 bp, Homo sapiens
tggctaactgtcctg

SEQ ID NO: 113268 - DNA, 15 bp, Homo sapiens
atggctaactgtcct

SEQ ID NO: 113269 - DNA, 15 bp, Homo sapiens
gatggctaactgtcc

SEQ ID NO: 113270 - DNA, 15 bp, Homo sapiens
agatggctaactgtc

SEQ ID NO: 113271 - DNA, 15 bp, Homo sapiens
cagatggctaactgt

SEQ ID NO: 113272 - DNA, 15 bp, Homo sapiens
gcagatggctaactg

SEQ ID NO: 113273 - DNA, 15 bp, Homo sapiens
ggcagatggctaact

SEQ ID NO: 113274 - DNA, 15 bp, Homo sapiens
tggcagatggctaac

SEQ ID NO: 113275 - DNA, 15 bp, Homo sapiens
gtggcagatggctaa

SEQ ID NO: 113276 - DNA, 15 bp, Homo sapiens
ggtggcagatggcta

SEQ ID NO: 113277 - DNA, 15 bp, Homo sapiens
tggtggcagatggct

SEQ ID NO: 113278 - DNA, 15 bp, Homo sapiens
gtggtggcagatggc

SEQ ID NO: 113279 - DNA, 15 bp, Homo sapiens
tgtggtggcagatgg

SEQ ID NO: 113280 - DNA, 15 bp, Homo sapiens
ctgtggtggcagatg

SEQ ID NO: 113281 - DNA, 15 bp, Homo sapiens
cctgtggtggcagat

SEQ ID NO: 113282 - DNA, 15 bp, Homo sapiens
ccctgtggtggcaga

SEQ ID NO: 113283 - DNA, 15 bp, Homo sapiens
tccctgtggtggcag

SEQ ID NO: 113284 - DNA, 15 bp, Homo sapiens
ctccctgtggtggca

SEQ ID NO: 113285 - DNA, 15 bp, Homo sapiens
cctccctgtggtggc

SEQ ID NO: 113286 - DNA, 15 bp, Homo sapiens
gcctccctgtggtgg

SEQ ID NO: 113287 - DNA, 15 bp, Homo sapiens
tgcctccctgtggtg

SEQ ID NO: 113288 - DNA, 15 bp, Homo sapiens
gtgcctccctgtggt

SEQ ID NO: 113289 - DNA, 15 bp, Homo sapiens
tgtgcctccctgtgg

SEQ ID NO: 113290 - DNA, 15 bp, Homo sapiens
ctgtgcctccctgtg

SEQ ID NO: 113291 - DNA, 15 bp, Homo sapiens
cctgtgcctccctgt

SEQ ID NO: 113292 - DNA, 15 bp, Homo sapiens
tcctgtgcctccctg

SEQ ID NO: 113293 - DNA, 15 bp, Homo sapiens
gtcctgtgcctccct

SEQ ID NO: 113294 - DNA, 15 bp, Homo sapiens
cgtcctgtgcctccc

SEQ ID NO: 113295 - DNA, 15 bp, Homo sapiens
tcgtcctgtgcctcc

SEQ ID NO: 113296 - DNA, 15 bp, Homo sapiens
ctcgtcctgtgcctc

SEQ ID NO: 113297 - DNA, 15 bp, Homo sapiens
cctcgtcctgtgcct

SEQ ID NO: 113298 - DNA, 15 bp, Homo sapiens
ccctcgtcctgtgcc

SEQ ID NO: 113299 - DNA, 15 bp, Homo sapiens
cccctcgtcctgtgc

SEQ ID NO: 113300 - DNA, 15 bp, Homo sapiens
gcccctcgtcctgtg

SEQ ID NO: 113301 - DNA, 15 bp, Homo sapiens
tgcccctcgtcctgt

SEQ ID NO: 113302 - DNA, 15 bp, Homo sapiens
gtgcccctcgtcctg

SEQ ID NO: 113303 - DNA, 15 bp, Homo sapiens
tgtgcccctcgtcct

SEQ ID NO: 113304 - DNA, 15 bp, Homo sapiens
ctgtgcccctcgtcc

SEQ ID NO: 113305 - DNA, 15 bp, Homo sapiens
gctgtgcccctcgtc

SEQ ID NO: 113306 - DNA, 15 bp, Homo sapiens
tgctgtgcccctcgt

SEQ ID NO: 113307 - DNA, 15 bp, Homo sapiens
ctgctgtgcccctcg

SEQ ID NO: 113308 - DNA, 15 bp, Homo sapiens
tctgctgtgcccctc

SEQ ID NO: 113309 - DNA, 15 bp, Homo sapiens
ctctgctgtgcccct

SEQ ID NO: 113310 - DNA, 15 bp, Homo sapiens
cctctgctgtgcccc

SEQ ID NO: 113311 - DNA, 15 bp, Homo sapiens
tcctctgctgtgccc

SEQ ID NO: 113312 - DNA, 15 bp, Homo sapiens
ctcctctgctgtgcc

SEQ ID NO: 113313 - DNA, 15 bp, Homo sapiens
gctcctctgctgtgc

SEQ ID NO: 113314 - DNA, 15 bp, Homo sapiens
agctcctctgctgtg

SEQ ID NO: 113315 - DNA, 15 bp, Homo sapiens
gagctcctctgctgt

SEQ ID NO: 113316 - DNA, 15 bp, Homo sapiens
ggagctcctctgctg

SEQ ID NO: 113317 - DNA, 15 bp, Homo sapiens
gggagctcctctgct

SEQ ID NO: 113318 - DNA, 15 bp, Homo sapiens
tgggagctcctctgc

SEQ ID NO: 113319 - DNA, 15 bp, Homo sapiens
ctgggagctcctctg

SEQ ID NO: 113320 - DNA, 15 bp, Homo sapiens
cctgggagctcctct

SEQ ID NO: 113321 - DNA, 15 bp, Homo sapiens
ccctgggagctcctc

SEQ ID NO: 113322 - DNA, 15 bp, Homo sapiens
tccctgggagctcct

SEQ ID NO: 113323 - DNA, 15 bp, Homo sapiens
ctccctgggagctcc

SEQ ID NO: 113324 - DNA, 15 bp, Homo sapiens
cctccctgggagctc

SEQ ID NO: 113325 - DNA, 15 bp, Homo sapiens
tcctccctgggagct

SEQ ID NO: 113326 - DNA, 15 bp, Homo sapiens
ctcctccctgggagc

SEQ ID NO: 113327 - DNA, 15 bp, Homo sapiens
cctcctccctgggag

SEQ ID NO: 113328 - DNA, 15 bp, Homo sapiens
tcctcctccctggga

SEQ ID NO: 113329 - DNA, 15 bp, Homo sapiens
ctcctcctccctggg

SEQ ID NO: 113330 - DNA, 15 bp, Homo sapiens
cctcctcctccctgg

SEQ ID NO: 113331 - DNA, 15 bp, Homo sapiens
gcctcctcctccctg

SEQ ID NO: 113332 - DNA, 15 bp, Homo sapiens
agcctcctcctccct

SEQ ID NO: 113333 - DNA, 15 bp, Homo sapiens
cagcctcctcctccc

SEQ ID NO: 113334 - DNA, 15 bp, Homo sapiens
tcagcctcctcctcc

SEQ ID NO: 113335 - DNA, 15 bp, Homo sapiens
ctcagcctcctcctc

SEQ ID NO: 113336 - DNA, 15 bp, Homo sapiens
gctcagcctcctcct

SEQ ID NO: 113337 - DNA, 15 bp, Homo sapiens
ggctcagcctcctcc

SEQ ID NO: 113338 - DNA, 15 bp, Homo sapiens
cggctcagcctcctc

SEQ ID NO: 113339 - DNA, 15 bp, Homo sapiens
tcggctcagcctcct

SEQ ID NO: 113340 - DNA, 15 bp, Homo sapiens
ctcggctcagcctcc

SEQ ID NO: 113341 - DNA, 15 bp, Homo sapiens
gctcggctcagcctc

SEQ ID NO: 113342 - DNA, 15 bp, Homo sapiens
ggctcggctcagcct

SEQ ID NO: 113343 - DNA, 15 bp, Homo sapiens
tggctcggctcagcc

SEQ ID NO: 113344 - DNA, 15 bp, Homo sapiens
ctggctcggctcagc

SEQ ID NO: 113345 - DNA, 15 bp, Homo sapiens
actggctcggctcag

SEQ ID NO: 113346 - DNA, 15 bp, Homo sapiens
cactggctcggctca

SEQ ID NO: 113347 - DNA, 15 bp, Homo sapiens
gcactggctcggctc

SEQ ID NO: 113348 - DNA, 15 bp, Homo sapiens
ggcactggctcggct

SEQ ID NO: 113349 - DNA, 15 bp, Homo sapiens
tggcactggctcggc

SEQ ID NO: 113350 - DNA, 15 bp, Homo sapiens
gtggcactggctcgg

SEQ ID NO: 113351 - DNA, 15 bp, Homo sapiens
ggtggcactggctcg

SEQ ID NO: 113352 - DNA, 15 bp, Homo sapiens
tggtggcactggctc

SEQ ID NO: 113353 - DNA, 15 bp, Homo sapiens
gtggtggcactggct

SEQ ID NO: 113354 - DNA, 15 bp, Homo sapiens
agtggtggcactggc

SEQ ID NO: 113355 - DNA, 15 bp, Homo sapiens
gagtggtggcactgg

SEQ ID NO: 113356 - DNA, 15 bp, Homo sapiens
agagtggtggcactg

SEQ ID NO: 113357 - DNA, 15 bp, Homo sapiens
gagagtggtggcact

SEQ ID NO: 113358 - DNA, 15 bp, Homo sapiens
cgagagtggtggcac

SEQ ID NO: 113359 - DNA, 15 bp, Homo sapiens
ccgagagtggtggca

SEQ ID NO: 113360 - DNA, 15 bp, Homo sapiens
tccgagagtggtggc

SEQ ID NO: 113361 - DNA, 15 bp, Homo sapiens
gtccgagagtggtgg

SEQ ID NO: 113362 - DNA, 15 bp, Homo sapiens
agtccgagagtggtg

SEQ ID NO: 113363 - DNA, 15 bp, Homo sapiens
cagtccgagagtggt

SEQ ID NO: 113364 - DNA, 15 bp, Homo sapiens
ccagtccgagagtgg

SEQ ID NO: 113365 - DNA, 15 bp, Homo sapiens
gccagtccgagagtg

SEQ ID NO: 113366 - DNA, 15 bp, Homo sapiens
agccagtccgagagt

SEQ ID NO: 113367 - DNA, 15 bp, Homo sapiens
gagccagtccgagag

SEQ ID NO: 113368 - DNA, 15 bp, Homo sapiens
ggagccagtccgaga

SEQ ID NO: 113369 - DNA, 15 bp, Homo sapiens
cggagccagtccgag

SEQ ID NO: 113370 - DNA, 15 bp, Homo sapiens
acggagccagtccga

SEQ ID NO: 113371 - DNA, 15 bp, Homo sapiens
gacggagccagtccg

SEQ ID NO: 113372 - DNA, 15 bp, Homo sapiens
cgacggagccagtcc

SEQ ID NO: 113373 - DNA, 15 bp, Homo sapiens
ccgacggagccagtc

SEQ ID NO: 113374 - DNA, 15 bp, Homo sapiens
cccgacggagccagt

SEQ ID NO: 113375 - DNA, 15 bp, Homo sapiens
ccccgacggagccag

SEQ ID NO: 113376 - DNA, 15 bp, Homo sapiens
tccccgacggagcca

SEQ ID NO: 113377 - DNA, 15 bp, Homo sapiens
ttccccgacggagcc

SEQ ID NO: 113378 - DNA, 15 bp, Homo sapiens
cttccccgacggagc

SEQ ID NO: 113379 - DNA, 15 bp, Homo sapiens
ccttccccgacggag

SEQ ID NO: 113380 - DNA, 15 bp, Homo sapiens
tccttccccgacgga

SEQ ID NO: 113381 - DNA, 15 bp, Homo sapiens
ctccttccccgacgg

SEQ ID NO: 113382 - DNA, 15 bp, Homo sapiens
gctccttccccgacg

SEQ ID NO: 113383 - DNA, 15 bp, Homo sapiens
agctccttccccgac

SEQ ID NO: 113384 - DNA, 15 bp, Homo sapiens
cagctccttccccga

SEQ ID NO: 113385 - DNA, 15 bp, Homo sapiens
gcagctccttccccg

SEQ ID NO: 113386 - DNA, 15 bp, Homo sapiens
ggcagctccttcccc

SEQ ID NO: 113387 - DNA, 15 bp, Homo sapiens
aggcagctccttccc

SEQ ID NO: 113388 - DNA, 15 bp, Homo sapiens
taggcagctccttcc

SEQ ID NO: 113389 - DNA, 15 bp, Homo sapiens
ttaggcagctccttc

SEQ ID NO: 113390 - DNA, 15 bp, Homo sapiens
attaggcagctcctt

SEQ ID NO: 113391 - DNA, 15 bp, Homo sapiens
cattaggcagctcct

SEQ ID NO: 113392 - DNA, 15 bp, Homo sapiens
gcattaggcagctcc

SEQ ID NO: 113393 - DNA, 15 bp, Homo sapiens
tgcattaggcagctc

SEQ ID NO: 113394 - DNA, 15 bp, Homo sapiens
gtgcattaggcagct

SEQ ID NO: 113395 - DNA, 15 bp, Homo sapiens
tgtgcattaggcagc

SEQ ID NO: 113396 - DNA, 15 bp, Homo sapiens
ctgtgcattaggcag

SEQ ID NO: 113397 - DNA, 15 bp, Homo sapiens
gctgtgcattaggca

SEQ ID NO: 113398 - DNA, 15 bp, Homo sapiens
agctgtgcattaggc

SEQ ID NO: 113399 - DNA, 15 bp, Homo sapiens
cagctgtgcattagg

SEQ ID NO: 113400 - DNA, 15 bp, Homo sapiens
ccagctgtgcattag

SEQ ID NO: 113401 - DNA, 15 bp, Homo sapiens
tccagctgtgcatta

SEQ ID NO: 113402 - DNA, 15 bp, Homo sapiens
gtccagctgtgcatt

SEQ ID NO: 113403 - DNA, 15 bp, Homo sapiens
tgtccagctgtgcat

SEQ ID NO: 113404 - DNA, 15 bp, Homo sapiens
ctgtccagctgtgca

SEQ ID NO: 113405 - DNA, 15 bp, Homo sapiens
cctgtccagctgtgc

SEQ ID NO: 113406 - DNA, 15 bp, Homo sapiens
acctgtccagctgtg

SEQ ID NO: 113407 - DNA, 15 bp, Homo sapiens
cacctgtccagctgt

SEQ ID NO: 113408 - DNA, 15 bp, Homo sapiens
ccacctgtccagctg

SEQ ID NO: 113409 - DNA, 15 bp, Homo sapiens
cccacctgtccagct

SEQ ID NO: 113410 - DNA, 15 bp, Homo sapiens
ccccacctgtccagc

SEQ ID NO: 113411 - DNA, 15 bp, Homo sapiens
cccccacctgtccag

SEQ ID NO: 113412 - DNA, 15 bp, Homo sapiens
gcccccacctgtcca

SEQ ID NO: 113413 - DNA, 15 bp, Homo sapiens
tgcccccacctgtcc

SEQ ID NO: 113414 - DNA, 15 bp, Homo sapiens
ctgcccccacctgtc

SEQ ID NO: 113415 - DNA, 15 bp, Homo sapiens
gctgcccccacctgt

SEQ ID NO: 113416 - DNA, 15 bp, Homo sapiens
tgctgcccccacctg

SEQ ID NO: 113417 - DNA, 15 bp, Homo sapiens
ctgctgcccccacct

SEQ ID NO: 113418 - DNA, 15 bp, Homo sapiens
cctgctgcccccacc

SEQ ID NO: 113419 - DNA, 15 bp, Homo sapiens
ccctgctgcccccac

SEQ ID NO: 113420 - DNA, 15 bp, Homo sapiens
gccctgctgccccca

SEQ ID NO: 113421 - DNA, 15 bp, Homo sapiens
agccctgctgccccc

SEQ ID NO: 113422 - DNA, 15 bp, Homo sapiens
cagccctgctgcccc

SEQ ID NO: 113423 - DNA, 15 bp, Homo sapiens
acagccctgctgccc

SEQ ID NO: 113424 - DNA, 15 bp, Homo sapiens
gacagccctgctgcc

SEQ ID NO: 113425 - DNA, 15 bp, Homo sapiens
ggacagccctgctgc

SEQ ID NO: 113426 - DNA, 15 bp, Homo sapiens
tggacagccctgctg

SEQ ID NO: 113427 - DNA, 15 bp, Homo sapiens
ctggacagccctgct

SEQ ID NO: 113428 - DNA, 15 bp, Homo sapiens
cctggacagccctgc

SEQ ID NO: 113429 - DNA, 15 bp, Homo sapiens
tcctggacagccctg

SEQ ID NO: 113430 - DNA, 15 bp, Homo sapiens
gtcctggacagccct

SEQ ID NO: 113431 - DNA, 15 bp, Homo sapiens
ggtcctggacagccc

SEQ ID NO: 113432 - DNA, 15 bp, Homo sapiens
gggtcctggacagcc

SEQ ID NO: 113433 - DNA, 15 bp, Homo sapiens
ggggtcctggacagc

SEQ ID NO: 113434 - DNA, 15 bp, Homo sapiens
gggggtcctggacag

SEQ ID NO: 113435 - DNA, 15 bp, Homo sapiens
cgggggtcctggaca

SEQ ID NO: 113436 - DNA, 15 bp, Homo sapiens
ccgggggtcctggac

SEQ ID NO: 113437 - DNA, 15 bp, Homo sapiens
cccgggggtcctgga

SEQ ID NO: 113438 - DNA, 15 bp, Homo sapiens
acccgggggtcctgg

SEQ ID NO: 113439 - DNA, 15 bp, Homo sapiens
gacccgggggtcctg

SEQ ID NO: 113440 - DNA, 15 bp, Homo sapiens
agacccgggggtcct

SEQ ID NO: 113441 - DNA, 15 bp, Homo sapiens
cagacccgggggtcc

SEQ ID NO: 113442 - DNA, 15 bp, Homo sapiens
acagacccgggggtc

SEQ ID NO: 113443 - DNA, 15 bp, Homo sapiens
gacagacccgggggt

SEQ ID NO: 113444 - DNA, 15 bp, Homo sapiens
ggacagacccggggg

SEQ ID NO: 113445 - DNA, 15 bp, Homo sapiens
tggacagacccgggg

SEQ ID NO: 113446 - DNA, 15 bp, Homo sapiens
ttggacagacccggg

SEQ ID NO: 113447 - DNA, 15 bp, Homo sapiens
tttggacagacccgg

SEQ ID NO: 113448 - DNA, 15 bp, Homo sapiens
ttttggacagacccg

SEQ ID NO: 113449 - DNA, 15 bp, Homo sapiens
cttttggacagaccc

SEQ ID NO: 113450 - DNA, 15 bp, Homo sapiens
gcttttggacagacc

SEQ ID NO: 113451 - DNA, 15 bp, Homo sapiens
tgcttttggacagac

SEQ ID NO: 113452 - DNA, 15 bp, Homo sapiens
ctgcttttggacaga

SEQ ID NO: 113453 - DNA, 15 bp, Homo sapiens
tctgcttttggacag

SEQ ID NO: 113454 - DNA, 15 bp, Homo sapiens
ctctgcttttggaca

SEQ ID NO: 113455 - DNA, 15 bp, Homo sapiens
cctctgcttttggac

SEQ ID NO: 113456 - DNA, 15 bp, Homo sapiens
gcctctgcttttgga

SEQ ID NO: 113457 - DNA, 15 bp, Homo sapiens
ggcctctgcttttgg

SEQ ID NO: 113458 - DNA, 15 bp, Homo sapiens
gggcctctgcttttg

SEQ ID NO: 113459 - DNA, 15 bp, Homo sapiens
tgggcctctgctttt

SEQ ID NO: 113460 - DNA, 15 bp, Homo sapiens
ctgggcctctgcttt

SEQ ID NO: 113461 - DNA, 15 bp, Homo sapiens
tctgggcctctgctt

SEQ ID NO: 113462 - DNA, 15 bp, Homo sapiens
gtctgggcctctgct

SEQ ID NO: 113463 - DNA, 15 bp, Homo sapiens
tgtctgggcctctgc

SEQ ID NO: 113464 - DNA, 15 bp, Homo sapiens
ctgtctgggcctctg

SEQ ID NO: 113465 - DNA, 15 bp, Homo sapiens
cctgtctgggcctct

SEQ ID NO: 113466 - DNA, 15 bp, Homo sapiens
tcctgtctgggcctc

SEQ ID NO: 113467 - DNA, 15 bp, Homo sapiens
gtcctgtctgggcct

SEQ ID NO: 113468 - DNA, 15 bp, Homo sapiens
tgtcctgtctgggcc

SEQ ID NO: 113469 - DNA, 15 bp, Homo sapiens
ctgtcctgtctgggc

SEQ ID NO: 113470 - DNA, 15 bp, Homo sapiens
tctgtcctgtctggg

SEQ ID NO: 113471 - DNA, 15 bp, Homo sapiens
ttctgtcctgtctgg

SEQ ID NO: 113472 - DNA, 15 bp, Homo sapiens
cttctgtcctgtctg

SEQ ID NO: 113473 - DNA, 15 bp, Homo sapiens
gcttctgtcctgtct

SEQ ID NO: 113474 - DNA, 15 bp, Homo sapiens
ggcttctgtcctgtc

SEQ ID NO: 113475 - DNA, 15 bp, Homo sapiens
tggcttctgtcctgt

SEQ ID NO: 113476 - DNA, 15 bp, Homo sapiens
ctggcttctgtcctg

SEQ ID NO: 113477 - DNA, 15 bp, Homo sapiens
cctggcttctgtcct

SEQ ID NO: 113478 - DNA, 15 bp, Homo sapiens
gcctggcttctgtcc

SEQ ID NO: 113479 - DNA, 15 bp, Homo sapiens
tgcctggcttctgtc

SEQ ID NO: 113480 - DNA, 15 bp, Homo sapiens
ttgcctggcttctgt

SEQ ID NO: 113481 - DNA, 15 bp, Homo sapiens
cttgcctggcttctg

SEQ ID NO: 113482 - DNA, 15 bp, Homo sapiens
gcttgcctggcttct

SEQ ID NO: 113483 - DNA, 15 bp, Homo sapiens
ggcttgcctggcttc

SEQ ID NO: 113484 - DNA, 15 bp, Homo sapiens
aggcttgcctggctt

SEQ ID NO: 113485 - DNA, 15 bp, Homo sapiens
caggcttgcctggct

SEQ ID NO: 113486 - DNA, 15 bp, Homo sapiens
ccaggcttgcctggc

SEQ ID NO: 113487 - DNA, 15 bp, Homo sapiens
cccaggcttgcctgg

SEQ ID NO: 113488 - DNA, 15 bp, Homo sapiens
ccccaggcttgcctg

SEQ ID NO: 113489 - DNA, 15 bp, Homo sapiens
tccccaggcttgcct

SEQ ID NO: 113490 - DNA, 15 bp, Homo sapiens
gtccccaggcttgcc

SEQ ID NO: 113491 - DNA, 15 bp, Homo sapiens
tgtccccaggcttgc

SEQ ID NO: 113492 - DNA, 15 bp, Homo sapiens
ctgtccccaggcttg

SEQ ID NO: 113493 - DNA, 15 bp, Homo sapiens
gctgtccccaggctt

SEQ ID NO: 113494 - DNA, 15 bp, Homo sapiens
cgctgtccccaggct

SEQ ID NO: 113495 - DNA, 15 bp, Homo sapiens
ccgctgtccccaggc

SEQ ID NO: 113496 - DNA, 15 bp, Homo sapiens
tccgctgtccccagg

SEQ ID NO: 113497 - DNA, 15 bp, Homo sapiens
ctccgctgtccccag

SEQ ID NO: 113498 - DNA, 15 bp, Homo sapiens
cctccgctgtcccca

SEQ ID NO: 113499 - DNA, 15 bp, Homo sapiens
tcctccgctgtcccc

SEQ ID NO: 113500 - DNA, 15 bp, Homo sapiens
ttcctccgctgtccc

SEQ ID NO: 113501 - DNA, 15 bp, Homo sapiens
cttcctccgctgtcc

SEQ ID NO: 113502 - DNA, 15 bp, Homo sapiens
tcttcctccgctgtc

SEQ ID NO: 113503 - DNA, 15 bp, Homo sapiens
ctcttcctccgctgt

SEQ ID NO: 113504 - DNA, 15 bp, Homo sapiens
cctcttcctccgctg

SEQ ID NO: 113505 - DNA, 15 bp, Homo sapiens
tcctcttcctccgct

SEQ ID NO: 113506 - DNA, 15 bp, Homo sapiens
ctcctcttcctccgc

SEQ ID NO: 113507 - DNA, 15 bp, Homo sapiens
cctcctcttcctccg

SEQ ID NO: 113508 - DNA, 15 bp, Homo sapiens
gcctcctcttcctcc

SEQ ID NO: 113509 - DNA, 15 bp, Homo sapiens
ggcctcctcttcctc

SEQ ID NO: 113510 - DNA, 15 bp, Homo sapiens
gggcctcctcttcct

SEQ ID NO: 113511 - DNA, 15 bp, Homo sapiens
ggggcctcctcttcc

SEQ ID NO: 113512 - DNA, 15 bp, Homo sapiens
aggggcctcctcttc

SEQ ID NO: 113513 - DNA, 15 bp, Homo sapiens
gaggggcctcctctt

SEQ ID NO: 113514 - DNA, 15 bp, Homo sapiens
agaggggcctcctct

SEQ ID NO: 113515 - DNA, 15 bp, Homo sapiens
cagaggggcctcctc

SEQ ID NO: 113516 - DNA, 15 bp, Homo sapiens
ccagaggggcctcct

SEQ ID NO: 113517 - DNA, 15 bp, Homo sapiens
accagaggggcctcc

SEQ ID NO: 113518 - DNA, 15 bp, Homo sapiens
caccagaggggcctc

SEQ ID NO: 113519 - DNA, 15 bp, Homo sapiens
ccaccagaggggcct

SEQ ID NO: 113520 - DNA, 15 bp, Homo sapiens
cccaccagaggggcc

SEQ ID NO: 113521 - DNA, 15 bp, Homo sapiens
ccccaccagaggggc

SEQ ID NO: 113522 - DNA, 15 bp, Homo sapiens
tccccaccagagggg

SEQ ID NO: 113523 - DNA, 15 bp, Homo sapiens
gtccccaccagaggg

SEQ ID NO: 113524 - DNA, 15 bp, Homo sapiens
tgtccccaccagagg

SEQ ID NO: 113525 - DNA, 15 bp, Homo sapiens
gtgtccccaccagag

SEQ ID NO: 113526 - DNA, 15 bp, Homo sapiens
cgtgtccccaccaga

SEQ ID NO: 113527 - DNA, 15 bp, Homo sapiens
tcgtgtccccaccag

SEQ ID NO: 113528 - DNA, 15 bp, Homo sapiens
ctcgtgtccccacca

SEQ ID NO: 113529 - DNA, 15 bp, Homo sapiens
tctcgtgtccccacc

SEQ ID NO: 113530 - DNA, 15 bp, Homo sapiens
ctctcgtgtccccac

SEQ ID NO: 113531 - DNA, 15 bp, Homo sapiens
tctctcgtgtcccca

SEQ ID NO: 113532 - DNA, 15 bp, Homo sapiens
gtctctcgtgtcccc

SEQ ID NO: 113533 - DNA, 15 bp, Homo sapiens
tgtctctcgtgtccc

SEQ ID NO: 113534 - DNA, 15 bp, Homo sapiens
ctgtctctcgtgtcc

SEQ ID NO: 113535 - DNA, 15 bp, Homo sapiens
cctgtctctcgtgtc

SEQ ID NO: 113536 - DNA, 15 bp, Homo sapiens
ccctgtctctcgtgt

SEQ ID NO: 113537 - DNA, 15 bp, Homo sapiens
tccctgtctctcgtg

SEQ ID NO: 113538 - DNA, 15 bp, Homo sapiens
gtccctgtctctcgt

SEQ ID NO: 113539 - DNA, 15 bp, Homo sapiens
ggtccctgtctctcg

SEQ ID NO: 113540 - DNA, 15 bp, Homo sapiens
gggtccctgtctctc

SEQ ID NO: 113541 - DNA, 15 bp, Homo sapiens
agggtccctgtctct

SEQ ID NO: 113542 - DNA, 15 bp, Homo sapiens
tagggtccctgtctc

SEQ ID NO: 113543 - DNA, 15 bp, Homo sapiens
ctagggtccctgtct

SEQ ID NO: 113544 - DNA, 15 bp, Homo sapiens
tctagggtccctgtc

SEQ ID NO: 113545 - DNA, 15 bp, Homo sapiens
gtctagggtccctgt

SEQ ID NO: 113546 - DNA, 15 bp, Homo sapiens
agtctagggtccctg

SEQ ID NO: 113547 - DNA, 15 bp, Homo sapiens
aagtctagggtccct

SEQ ID NO: 113548 - DNA, 15 bp, Homo sapiens
caagtctagggtccc

SEQ ID NO: 113549 - DNA, 15 bp, Homo sapiens
acaagtctagggtcc

SEQ ID NO: 113550 - DNA, 15 bp, Homo sapiens
aacaagtctagggtc

SEQ ID NO: 113551 - DNA, 15 bp, Homo sapiens
aaacaagtctagggt

SEQ ID NO: 113552 - DNA, 15 bp, Homo sapiens
caaacaagtctaggg

SEQ ID NO: 113553 - DNA, 15 bp, Homo sapiens
gcaaacaagtctagg

SEQ ID NO: 113554 - DNA, 15 bp, Homo sapiens
tgcaaacaagtctag

SEQ ID NO: 113555 - DNA, 15 bp, Homo sapiens
atgcaaacaagtcta

SEQ ID NO: 113556 - DNA, 15 bp, Homo sapiens
gatgcaaacaagtct

SEQ ID NO: 113557 - DNA, 15 bp, Homo sapiens
ggatgcaaacaagtc

SEQ ID NO: 113558 - DNA, 15 bp, Homo sapiens
aggatgcaaacaagt

SEQ ID NO: 113559 - DNA, 15 bp, Homo sapiens
caggatgcaaacaag

SEQ ID NO: 113560 - DNA, 15 bp, Homo sapiens
ccaggatgcaaacaa

SEQ ID NO: 113561 - DNA, 15 bp, Homo sapiens
tccaggatgcaaaca

SEQ ID NO: 113562 - DNA, 15 bp, Homo sapiens
gtccaggatgcaaac

SEQ ID NO: 113563 - DNA, 15 bp, Homo sapiens
tgtccaggatgcaaa

SEQ ID NO: 113564 - DNA, 15 bp, Homo sapiens
ttgtccaggatgcaa

SEQ ID NO: 113565 - DNA, 15 bp, Homo sapiens
tttgtccaggatgca

SEQ ID NO: 113566 - DNA, 15 bp, Homo sapiens
ctttgtccaggatgc

SEQ ID NO: 113567 - DNA, 15 bp, Homo sapiens
actttgtccaggatg

SEQ ID NO: 113568 - DNA, 15 bp, Homo sapiens
cactttgtccaggat

SEQ ID NO: 113569 - DNA, 15 bp, Homo sapiens
ccactttgtccagga

SEQ ID NO: 113570 - DNA, 15 bp, Homo sapiens
tccactttgtccagg

SEQ ID NO: 113571 - DNA, 15 bp, Homo sapiens
gtccactttgtccag

SEQ ID NO: 113572 - DNA, 15 bp, Homo sapiens
tgtccactttgtcca

SEQ ID NO: 113573 - DNA, 15 bp, Homo sapiens
ctgtccactttgtcc

SEQ ID NO: 113574 - DNA, 15 bp, Homo sapiens
cctgtccactttgtc

SEQ ID NO: 113575 - DNA, 15 bp, Homo sapiens
gcctgtccactttgt

SEQ ID NO: 113576 - DNA, 15 bp, Homo sapiens
tgcctgtccactttg

SEQ ID NO: 113577 - DNA, 15 bp, Homo sapiens
ctgcctgtccacttt

SEQ ID NO: 113578 - DNA, 15 bp, Homo sapiens
cctgcctgtccactt

SEQ ID NO: 113579 - DNA, 15 bp, Homo sapiens
ccctgcctgtccact

SEQ ID NO: 113580 - DNA, 15 bp, Homo sapiens
cccctgcctgtccac

SEQ ID NO: 113581 - DNA, 15 bp, Homo sapiens
gcccctgcctgtcca

SEQ ID NO: 113582 - DNA, 15 bp, Homo sapiens
tgcccctgcctgtcc

SEQ ID NO: 113583 - DNA, 15 bp, Homo sapiens
gtgcccctgcctgtc

SEQ ID NO: 113584 - DNA, 15 bp, Homo sapiens
ggtgcccctgcctgt

SEQ ID NO: 113585 - DNA, 15 bp, Homo sapiens
tggtgcccctgcctg

SEQ ID NO: 113586 - DNA, 15 bp, Homo sapiens
ttggtgcccctgcct

SEQ ID NO: 113587 - DNA, 15 bp, Homo sapiens
cttggtgcccctgcc

SEQ ID NO: 113588 - DNA, 15 bp, Homo sapiens
ccttggtgcccctgc

SEQ ID NO: 113589 - DNA, 15 bp, Homo sapiens
cccttggtgcccctg

SEQ ID NO: 113590 - DNA, 15 bp, Homo sapiens
ccccttggtgcccct

SEQ ID NO: 113591 - DNA, 15 bp, Homo sapiens
tccccttggtgcccc

SEQ ID NO: 113592 - DNA, 15 bp, Homo sapiens
gtccccttggtgccc

SEQ ID NO: 113593 - DNA, 15 bp, Homo sapiens
ggtccccttggtgcc

SEQ ID NO: 113594 - DNA, 15 bp, Homo sapiens
gggtccccttggtgc

SEQ ID NO: 113595 - DNA, 15 bp, Homo sapiens
tgggtccccttggtg

SEQ ID NO: 113596 - DNA, 15 bp, Homo sapiens
ctgggtccccttggt

SEQ ID NO: 113597 - DNA, 15 bp, Homo sapiens
cctgggtccccttgg

SEQ ID NO: 113598 - DNA, 15 bp, Homo sapiens
gcctgggtccccttg

SEQ ID NO: 113599 - DNA, 15 bp, Homo sapiens
ggcctgggtcccctt

SEQ ID NO: 113600 - DNA, 15 bp, Homo sapiens
aggcctgggtcccct

SEQ ID NO: 113601 - DNA, 15 bp, Homo sapiens
caggcctgggtcccc

SEQ ID NO: 113602 - DNA, 15 bp, Homo sapiens
ccaggcctgggtccc

SEQ ID NO: 113603 - DNA, 15 bp, Homo sapiens
cccaggcctgggtcc

SEQ ID NO: 113604 - DNA, 15 bp, Homo sapiens
tcccaggcctgggtc

SEQ ID NO: 113605 - DNA, 15 bp, Homo sapiens
ttcccaggcctgggt

SEQ ID NO: 113606 - DNA, 15 bp, Homo sapiens
cttcccaggcctggg

SEQ ID NO: 113607 - DNA, 15 bp, Homo sapiens
ccttcccaggcctgg

SEQ ID NO: 113608 - DNA, 15 bp, Homo sapiens
cccttcccaggcctg

SEQ ID NO: 113609 - DNA, 15 bp, Homo sapiens
tcccttcccaggcct

SEQ ID NO: 113610 - DNA, 15 bp, Homo sapiens
ttcccttcccaggcc

SEQ ID NO: 113611 - DNA, 15 bp, Homo sapiens
attcccttcccaggc

SEQ ID NO: 113612 - DNA, 15 bp, Homo sapiens
cattcccttcccagg

SEQ ID NO: 113613 - DNA, 15 bp, Homo sapiens
acattcccttcccag

SEQ ID NO: 113614 - DNA, 15 bp, Homo sapiens
cacattcccttccca

SEQ ID NO: 113615 - DNA, 15 bp, Homo sapiens
acacattcccttccc

SEQ ID NO: 113616 - DNA, 15 bp, Homo sapiens
cacacattcccttcc

SEQ ID NO: 113617 - DNA, 15 bp, Homo sapiens
tcacacattcccttc

SEQ ID NO: 113618 - DNA, 15 bp, Homo sapiens
ctcacacattccctt

SEQ ID NO: 113619 - DNA, 15 bp, Homo sapiens
cctcacacattccct

SEQ ID NO: 113620 - DNA, 15 bp, Homo sapiens
ccctcacacattccc

SEQ ID NO: 113621 - DNA, 15 bp, Homo sapiens
tccctcacacattcc

SEQ ID NO: 113622 - DNA, 15 bp, Homo sapiens
ctccctcacacattc

SEQ ID NO: 113623 - DNA, 15 bp, Homo sapiens
tctccctcacacatt

SEQ ID NO: 113624 - DNA, 15 bp, Homo sapiens
ctctccctcacacat

SEQ ID NO: 113625 - DNA, 15 bp, Homo sapiens
tctctccctcacaca

SEQ ID NO: 113626 - DNA, 15 bp, Homo sapiens
gtctctccctcacac

SEQ ID NO: 113627 - DNA, 15 bp, Homo sapiens
cgtctctccctcaca

SEQ ID NO: 113628 - DNA, 15 bp, Homo sapiens
ccgtctctccctcac

SEQ ID NO: 113629 - DNA, 15 bp, Homo sapiens
tccgtctctccctca

SEQ ID NO: 113630 - DNA, 15 bp, Homo sapiens
ctccgtctctccctc

SEQ ID NO: 113631 - DNA, 15 bp, Homo sapiens
gctccgtctctccct

SEQ ID NO: 113632 - DNA, 15 bp, Homo sapiens
tgctccgtctctccc

SEQ ID NO: 113633 - DNA, 15 bp, Homo sapiens
ctgctccgtctctcc

SEQ ID NO: 113634 - DNA, 15 bp, Homo sapiens
cctgctccgtctctc

SEQ ID NO: 113635 - DNA, 15 bp, Homo sapiens
ccctgctccgtctct

SEQ ID NO: 113636 - DNA, 15 bp, Homo sapiens
cccctgctccgtctc

SEQ ID NO: 113637 - DNA, 15 bp, Homo sapiens
ccccctgctccgtct

SEQ ID NO: 113638 - DNA, 15 bp, Homo sapiens
tccccctgctccgtc

SEQ ID NO: 113639 - DNA, 15 bp, Homo sapiens
ctccccctgctccgt

SEQ ID NO: 113640 - DNA, 15 bp, Homo sapiens
tctccccctgctccg

SEQ ID NO: 113641 - DNA, 15 bp, Homo sapiens
gtctccccctgctcc

SEQ ID NO: 113642 - DNA, 15 bp, Homo sapiens
ggtctccccctgctc

SEQ ID NO: 113643 - DNA, 15 bp, Homo sapiens
gggtctccccctgct

SEQ ID NO: 113644 - DNA, 15 bp, Homo sapiens
agggtctccccctgc

SEQ ID NO: 113645 - DNA, 15 bp, Homo sapiens
gagggtctccccctg

SEQ ID NO: 113646 - DNA, 15 bp, Homo sapiens
cgagggtctccccct

SEQ ID NO: 113647 - DNA, 15 bp, Homo sapiens
acgagggtctccccc

SEQ ID NO: 113648 - DNA, 15 bp, Homo sapiens
cacgagggtctcccc

SEQ ID NO: 113649 - DNA, 15 bp, Homo sapiens
ccacgagggtctccc

SEQ ID NO: 113650 - DNA, 15 bp, Homo sapiens
cccacgagggtctcc

SEQ ID NO: 113651 - DNA, 15 bp, Homo sapiens
ccccacgagggtctc

SEQ ID NO: 113652 - DNA, 15 bp, Homo sapiens
accccacgagggtct

SEQ ID NO: 113653 - DNA, 15 bp, Homo sapiens
caccccacgagggtc

SEQ ID NO: 113654 - DNA, 15 bp, Homo sapiens
ccaccccacgagggt

SEQ ID NO: 113655 - DNA, 15 bp, Homo sapiens
tccaccccacgaggg

SEQ ID NO: 113656 - DNA, 15 bp, Homo sapiens
ttccaccccacgagg

SEQ ID NO: 113657 - DNA, 15 bp, Homo sapiens
tttccaccccacgag

SEQ ID NO: 113658 - DNA, 15 bp, Homo sapiens
ctttccaccccacga

SEQ ID NO: 113659 - DNA, 15 bp, Homo sapiens
cctttccaccccacg

SEQ ID NO: 113660 - DNA, 15 bp, Homo sapiens
ccctttccaccccac

SEQ ID NO: 113661 - DNA, 15 bp, Homo sapiens
cccctttccacccca

SEQ ID NO: 113662 - DNA, 15 bp, Homo sapiens
tcccctttccacccc

SEQ ID NO: 113663 - DNA, 15 bp, Homo sapiens
ctcccctttccaccc

SEQ ID NO: 113664 - DNA, 15 bp, Homo sapiens
tctcccctttccacc

SEQ ID NO: 113665 - DNA, 15 bp, Homo sapiens
gtctcccctttccac

SEQ ID NO: 113666 - DNA, 15 bp, Homo sapiens
ggtctcccctttcca

SEQ ID NO: 113667 - DNA, 15 bp, Homo sapiens
gggtctcccctttcc

SEQ ID NO: 113668 - DNA, 15 bp, Homo sapiens
ggggtctcccctttc

SEQ ID NO: 113669 - DNA, 15 bp, Homo sapiens
aggggtctccccttt

SEQ ID NO: 113670 - DNA, 15 bp, Homo sapiens
caggggtctcccctt

SEQ ID NO: 113671 - DNA, 15 bp, Homo sapiens
ccaggggtctcccct

SEQ ID NO: 113672 - DNA, 15 bp, Homo sapiens
cccaggggtctcccc

SEQ ID NO: 113673 - DNA, 15 bp, Homo sapiens
tcccaggggtctccc

SEQ ID NO: 113674 - DNA, 15 bp, Homo sapiens
ttcccaggggtctcc

SEQ ID NO: 113675 - DNA, 15 bp, Homo sapiens
cttcccaggggtctc

SEQ ID NO: 113676 - DNA, 15 bp, Homo sapiens
ccttcccaggggtct

SEQ ID NO: 113677 - DNA, 15 bp, Homo sapiens
gccttcccaggggtc

SEQ ID NO: 113678 - DNA, 15 bp, Homo sapiens
agccttcccaggggt

SEQ ID NO: 113679 - DNA, 15 bp, Homo sapiens
cagccttcccagggg

SEQ ID NO: 113680 - DNA, 15 bp, Homo sapiens
tcagccttcccaggg

SEQ ID NO: 113681 - DNA, 15 bp, Homo sapiens
ctcagccttcccagg

SEQ ID NO: 113682 - DNA, 15 bp, Homo sapiens
actcagccttcccag

SEQ ID NO: 113683 - DNA, 15 bp, Homo sapiens
cactcagccttccca

SEQ ID NO: 113684 - DNA, 15 bp, Homo sapiens
ccactcagccttccc

SEQ ID NO: 113685 - DNA, 15 bp, Homo sapiens
tccactcagccttcc

SEQ ID NO: 113686 - DNA, 15 bp, Homo sapiens
atccactcagccttc

SEQ ID NO: 113687 - DNA, 15 bp, Homo sapiens
gatccactcagcctt

SEQ ID NO: 113688 - DNA, 15 bp, Homo sapiens
ggatccactcagcct

SEQ ID NO: 113689 - DNA, 15 bp, Homo sapiens
aggatccactcagcc

SEQ ID NO: 113690 - DNA, 15 bp, Homo sapiens
gaggatccactcagc

SEQ ID NO: 113691 - DNA, 15 bp, Homo sapiens
tgaggatccactcag

SEQ ID NO: 113692 - DNA, 15 bp, Homo sapiens
ctgaggatccactca

SEQ ID NO: 113693 - DNA, 15 bp, Homo sapiens
actgaggatccactc

SEQ ID NO: 113694 - DNA, 15 bp, Homo sapiens
cactgaggatccact

SEQ ID NO: 113695 - DNA, 15 bp, Homo sapiens
gcactgaggatccac

SEQ ID NO: 113696 - DNA, 15 bp, Homo sapiens
tgcactgaggatcca

SEQ ID NO: 113697 - DNA, 15 bp, Homo sapiens
atgcactgaggatcc

SEQ ID NO: 113698 - DNA, 15 bp, Homo sapiens
gatgcactgaggatc

SEQ ID NO: 113699 - DNA, 15 bp, Homo sapiens
tgatgcactgaggat

SEQ ID NO: 113700 - DNA, 15 bp, Homo sapiens
gtgatgcactgagga

SEQ ID NO: 113701 - DNA, 15 bp, Homo sapiens
agtgatgcactgagg

SEQ ID NO: 113702 - DNA, 15 bp, Homo sapiens
cagtgatgcactgag

SEQ ID NO: 113703 - DNA, 15 bp, Homo sapiens
tcagtgatgcactga

SEQ ID NO: 113704 - DNA, 15 bp, Homo sapiens
gtcagtgatgcactg

SEQ ID NO: 113705 - DNA, 15 bp, Homo sapiens
ggtcagtgatgcact

SEQ ID NO: 113706 - DNA, 15 bp, Homo sapiens
aggtcagtgatgcac

SEQ ID NO: 113707 - DNA, 15 bp, Homo sapiens
taggtcagtgatgca

SEQ ID NO: 113708 - DNA, 15 bp, Homo sapiens
ttaggtcagtgatgc

SEQ ID NO: 113709 - DNA, 15 bp, Homo sapiens
tttaggtcagtgatg

SEQ ID NO: 113710 - DNA, 15 bp, Homo sapiens
gtttaggtcagtgat

SEQ ID NO: 113711 - DNA, 15 bp, Homo sapiens
cgtttaggtcagtga

SEQ ID NO: 113712 - DNA, 15 bp, Homo sapiens
ccgtttaggtcagtg

SEQ ID NO: 113713 - DNA, 15 bp, Homo sapiens
gccgtttaggtcagt

SEQ ID NO: 113714 - DNA, 15 bp, Homo sapiens
ggccgtttaggtcag

SEQ ID NO: 113715 - DNA, 15 bp, Homo sapiens
gggccgtttaggtca

SEQ ID NO: 113716 - DNA, 15 bp, Homo sapiens
ggggccgtttaggtc

SEQ ID NO: 113717 - DNA, 15 bp, Homo sapiens
aggggccgtttaggt

SEQ ID NO: 113718 - DNA, 15 bp, Homo sapiens
gaggggccgtttagg

SEQ ID NO: 113719 - DNA, 15 bp, Homo sapiens
ggaggggccgtttag

SEQ ID NO: 113720 - DNA, 15 bp, Homo sapiens
cggaggggccgttta

SEQ ID NO: 113721 - DNA, 15 bp, Homo sapiens
gcggaggggccgttt

SEQ ID NO: 113722 - DNA, 15 bp, Homo sapiens
ggcggaggggccgtt

SEQ ID NO: 113723 - DNA, 15 bp, Homo sapiens
aggcggaggggccgt

SEQ ID NO: 113724 - DNA, 15 bp, Homo sapiens
caggcggaggggccg

SEQ ID NO: 113725 - DNA, 15 bp, Homo sapiens
ccaggcggaggggcc

SEQ ID NO: 113726 - DNA, 15 bp, Homo sapiens
accaggcggaggggc

SEQ ID NO: 113727 - DNA, 15 bp, Homo sapiens
caccaggcggagggg

SEQ ID NO: 113728 - DNA, 15 bp, Homo sapiens
tcaccaggcggaggg

SEQ ID NO: 113729 - DNA, 15 bp, Homo sapiens
gtcaccaggcggagg

SEQ ID NO: 113730 - DNA, 15 bp, Homo sapiens
agtcaccaggcggag

SEQ ID NO: 113731 - DNA, 15 bp, Homo sapiens
aagtcaccaggcgga

SEQ ID NO: 113732 - DNA, 15 bp, Homo sapiens
caagtcaccaggcgg

SEQ ID NO: 113733 - DNA, 15 bp, Homo sapiens
ccaagtcaccaggcg

SEQ ID NO: 113734 - DNA, 15 bp, Homo sapiens
tccaagtcaccaggc

SEQ ID NO: 113735 - DNA, 15 bp, Homo sapiens
ctccaagtcaccagg

SEQ ID NO: 113736 - DNA, 15 bp, Homo sapiens
gctccaagtcaccag

SEQ ID NO: 113737 - DNA, 15 bp, Homo sapiens
agctccaagtcacca

SEQ ID NO: 113738 - DNA, 15 bp, Homo sapiens
gagctccaagtcacc

SEQ ID NO: 113739 - DNA, 15 bp, Homo sapiens
ggagctccaagtcac

SEQ ID NO: 113740 - DNA, 15 bp, Homo sapiens
tggagctccaagtca

SEQ ID NO: 113741 - DNA, 15 bp, Homo sapiens
ctggagctccaagtc

SEQ ID NO: 113742 - DNA, 15 bp, Homo sapiens
actggagctccaagt

SEQ ID NO: 113743 - DNA, 15 bp, Homo sapiens
gactggagctccaag

SEQ ID NO: 113744 - DNA, 15 bp, Homo sapiens
tgactggagctccaa

SEQ ID NO: 113745 - DNA, 15 bp, Homo sapiens
gtgactggagctcca

SEQ ID NO: 113746 - DNA, 15 bp, Homo sapiens
tgtgactggagctcc

SEQ ID NO: 113747 - DNA, 15 bp, Homo sapiens
atgtgactggagctc

SEQ ID NO: 113748 - DNA, 15 bp, Homo sapiens
gatgtgactggagct

SEQ ID NO: 113749 - DNA, 15 bp, Homo sapiens
tgatgtgactggagc

SEQ ID NO: 113750 - DNA, 15 bp, Homo sapiens
gtgatgtgactggag

SEQ ID NO: 113751 - DNA, 15 bp, Homo sapiens
tgtgatgtgactgga

SEQ ID NO: 113752 - DNA, 15 bp, Homo sapiens
gtgtgatgtgactgg

SEQ ID NO: 113753 - DNA, 15 bp, Homo sapiens
cgtgtgatgtgactg

SEQ ID NO: 113754 - DNA, 15 bp, Homo sapiens
ccgtgtgatgtgact

SEQ ID NO: 113755 - DNA, 15 bp, Homo sapiens
cccgtgtgatgtgac

SEQ ID NO: 113756 - DNA, 15 bp, Homo sapiens
ccccgtgtgatgtga

SEQ ID NO: 113757 - DNA, 15 bp, Homo sapiens
cccccgtgtgatgtg

SEQ ID NO: 113758 - DNA, 15 bp, Homo sapiens
acccccgtgtgatgt

SEQ ID NO: 113759 - DNA, 15 bp, Homo sapiens
gacccccgtgtgatg

SEQ ID NO: 113760 - DNA, 15 bp, Homo sapiens
agacccccgtgtgat

SEQ ID NO: 113761 - DNA, 15 bp, Homo sapiens
aagacccccgtgtga

SEQ ID NO: 113762 - DNA, 15 bp, Homo sapiens
gaagacccccgtgtg

SEQ ID NO: 113763 - DNA, 15 bp, Homo sapiens
agaagacccccgtgt

SEQ ID NO: 113764 - DNA, 15 bp, Homo sapiens
gagaagacccccgtg

SEQ ID NO: 113765 - DNA, 15 bp, Homo sapiens
ggagaagacccccgt

SEQ ID NO: 113766 - DNA, 15 bp, Homo sapiens
tggagaagacccccg

SEQ ID NO: 113767 - DNA, 15 bp, Homo sapiens
atggagaagaccccc

SEQ ID NO: 113768 - DNA, 15 bp, Homo sapiens
gatggagaagacccc

SEQ ID NO: 113769 - DNA, 15 bp, Homo sapiens
ggatggagaagaccc

SEQ ID NO: 113770 - DNA, 15 bp, Homo sapiens
gggatggagaagacc

SEQ ID NO: 113771 - DNA, 15 bp, Homo sapiens
tgggatggagaagac

SEQ ID NO: 113772 - DNA, 15 bp, Homo sapiens
gtgggatggagaaga

SEQ ID NO: 113773 - DNA, 15 bp, Homo sapiens
ggtgggatggagaag

SEQ ID NO: 113774 - DNA, 15 bp, Homo sapiens
gggtgggatggagaa

SEQ ID NO: 113775 - DNA, 15 bp, Homo sapiens
agggtgggatggaga

SEQ ID NO: 113776 - DNA, 15 bp, Homo sapiens
gagggtgggatggag

SEQ ID NO: 113777 - DNA, 15 bp, Homo sapiens
tgagggtgggatgga

SEQ ID NO: 113778 - DNA, 15 bp, Homo sapiens
ttgagggtgggatgg

SEQ ID NO: 113779 - DNA, 15 bp, Homo sapiens
gttgagggtgggatg

SEQ ID NO: 113780 - DNA, 15 bp, Homo sapiens
ggttgagggtgggat

SEQ ID NO: 113781 - DNA, 15 bp, Homo sapiens
gggttgagggtggga

SEQ ID NO: 113782 - DNA, 15 bp, Homo sapiens
ggggttgagggtggg

SEQ ID NO: 113783 - DNA, 15 bp, Homo sapiens
gggggttgagggtgg

SEQ ID NO: 113784 - DNA, 15 bp, Homo sapiens
agggggttgagggtg

SEQ ID NO: 113785 - DNA, 15 bp, Homo sapiens
cagggggttgagggt

SEQ ID NO: 113786 - DNA, 15 bp, Homo sapiens
gcagggggttgaggg

SEQ ID NO: 113787 - DNA, 15 bp, Homo sapiens
ggcagggggttgagg

SEQ ID NO: 113788 - DNA, 15 bp, Homo sapiens
gggcagggggttgag

SEQ ID NO: 113789 - DNA, 15 bp, Homo sapiens
agggcagggggttga

SEQ ID NO: 113790 - DNA, 15 bp, Homo sapiens
gagggcagggggttg

SEQ ID NO: 113791 - DNA, 15 bp, Homo sapiens
ggagggcagggggtt

SEQ ID NO: 113792 - DNA, 15 bp, Homo sapiens
gggagggcagggggt

SEQ ID NO: 113793 - DNA, 15 bp, Homo sapiens
ggggagggcaggggg

SEQ ID NO: 113794 - DNA, 15 bp, Homo sapiens
tggggagggcagggg

SEQ ID NO: 113795 - DNA, 15 bp, Homo sapiens
ctggggagggcaggg

SEQ ID NO: 113796 - DNA, 15 bp, Homo sapiens
gctggggagggcagg

SEQ ID NO: 113797 - DNA, 15 bp, Homo sapiens
ggctggggagggcag

SEQ ID NO: 113798 - DNA, 15 bp, Homo sapiens
aggctggggagggca

SEQ ID NO: 113799 - DNA, 15 bp, Homo sapiens
gaggctggggagggc

SEQ ID NO: 113800 - DNA, 15 bp, Homo sapiens
agaggctggggaggg

SEQ ID NO: 113801 - DNA, 15 bp, Homo sapiens
cagaggctggggagg

SEQ ID NO: 113802 - DNA, 15 bp, Homo sapiens
acagaggctggggag

SEQ ID NO: 113803 - DNA, 15 bp, Homo sapiens
gacagaggctgggga

SEQ ID NO: 113804 - DNA, 15 bp, Homo sapiens
ggacagaggctgggg

SEQ ID NO: 113805 - DNA, 15 bp, Homo sapiens
gggacagaggctggg

SEQ ID NO: 113806 - DNA, 15 bp, Homo sapiens
ggggacagaggctgg

SEQ ID NO: 113807 - DNA, 15 bp, Homo sapiens
aggggacagaggctg

SEQ ID NO: 113808 - DNA, 15 bp, Homo sapiens
caggggacagaggct

SEQ ID NO: 113809 - DNA, 15 bp, Homo sapiens
tcaggggacagaggc

SEQ ID NO: 113810 - DNA, 15 bp, Homo sapiens
ctcaggggacagagg

SEQ ID NO: 113811 - DNA, 15 bp, Homo sapiens
gctcaggggacagag

SEQ ID NO: 113812 - DNA, 15 bp, Homo sapiens
ggctcaggggacaga

SEQ ID NO: 113813 - DNA, 15 bp, Homo sapiens
tggctcaggggacag

SEQ ID NO: 113814 - DNA, 15 bp, Homo sapiens
gtggctcaggggaca

SEQ ID NO: 113815 - DNA, 15 bp, Homo sapiens
tgtggctcaggggac

SEQ ID NO: 113816 - DNA, 15 bp, Homo sapiens
atgtggctcagggga

SEQ ID NO: 113817 - DNA, 15 bp, Homo sapiens
gatgtggctcagggg

SEQ ID NO: 113818 - DNA, 15 bp, Homo sapiens
agatgtggctcaggg

SEQ ID NO: 113819 - DNA, 15 bp, Homo sapiens
aagatgtggctcagg

SEQ ID NO: 113820 - DNA, 15 bp, Homo sapiens
gaagatgtggctcag

SEQ ID NO: 113821 - DNA, 15 bp, Homo sapiens
ggaagatgtggctca

SEQ ID NO: 113822 - DNA, 15 bp, Homo sapiens
aggaagatgtggctc

SEQ ID NO: 113823 - DNA, 15 bp, Homo sapiens
caggaagatgtggct

SEQ ID NO: 113824 - DNA, 15 bp, Homo sapiens
acaggaagatgtggc

SEQ ID NO: 113825 - DNA, 15 bp, Homo sapiens
gacaggaagatgtgg

SEQ ID NO: 113826 - DNA, 15 bp, Homo sapiens
agacaggaagatgtg

SEQ ID NO: 113827 - DNA, 15 bp, Homo sapiens
gagacaggaagatgt

SEQ ID NO: 113828 - DNA, 15 bp, Homo sapiens
ggagacaggaagatg

SEQ ID NO: 113829 - DNA, 15 bp, Homo sapiens
gggagacaggaagat

SEQ ID NO: 113830 - DNA, 15 bp, Homo sapiens
tgggagacaggaaga

SEQ ID NO: 113831 - DNA, 15 bp, Homo sapiens
gtgggagacaggaag

SEQ ID NO: 113832 - DNA, 15 bp, Homo sapiens
cgtgggagacaggaa

SEQ ID NO: 113833 - DNA, 15 bp, Homo sapiens
gcgtgggagacagga

SEQ ID NO: 113834 - DNA, 15 bp, Homo sapiens
cgcgtgggagacagg

SEQ ID NO: 113835 - DNA, 15 bp, Homo sapiens
ccgcgtgggagacag

SEQ ID NO: 113836 - DNA, 15 bp, Homo sapiens
tccgcgtgggagaca

SEQ ID NO: 113837 - DNA, 15 bp, Homo sapiens
ttccgcgtgggagac

SEQ ID NO: 113838 - DNA, 15 bp, Homo sapiens
gttccgcgtgggaga

SEQ ID NO: 113839 - DNA, 15 bp, Homo sapiens
cgttccgcgtgggag

SEQ ID NO: 113840 - DNA, 15 bp, Homo sapiens
ccgttccgcgtggga

SEQ ID NO: 113841 - DNA, 15 bp, Homo sapiens
cccgttccgcgtggg

SEQ ID NO: 113842 - DNA, 15 bp, Homo sapiens
tcccgttccgcgtgg

SEQ ID NO: 113843 - DNA, 15 bp, Homo sapiens
gtcccgttccgcgtg

SEQ ID NO: 113844 - DNA, 15 bp, Homo sapiens
agtcccgttccgcgt

SEQ ID NO: 113845 - DNA, 15 bp, Homo sapiens
gagtcccgttccgcg

SEQ ID NO: 113846 - DNA, 15 bp, Homo sapiens
ggagtcccgttccgc

SEQ ID NO: 113847 - DNA, 15 bp, Homo sapiens
gggagtcccgttccg

SEQ ID NO: 113848 - DNA, 15 bp, Homo sapiens
cgggagtcccgttcc

SEQ ID NO: 113849 - DNA, 15 bp, Homo sapiens
acgggagtcccgttc

SEQ ID NO: 113850 - DNA, 15 bp, Homo sapiens
gacgggagtcccgtt

SEQ ID NO: 113851 - DNA, 15 bp, Homo sapiens
agacgggagtcccgt

SEQ ID NO: 113852 - DNA, 15 bp, Homo sapiens
aagacgggagtcccg

SEQ ID NO: 113853 - DNA, 15 bp, Homo sapiens
gaagacgggagtccc

SEQ ID NO: 113854 - DNA, 15 bp, Homo sapiens
tgaagacgggagtcc

SEQ ID NO: 113855 - DNA, 15 bp, Homo sapiens
atgaagacgggagtc

SEQ ID NO: 113856 - DNA, 15 bp, Homo sapiens
catgaagacgggagt

SEQ ID NO: 113857 - DNA, 15 bp, Homo sapiens
ccatgaagacgggag

SEQ ID NO: 113858 - DNA, 15 bp, Homo sapiens
cccatgaagacggga

SEQ ID NO: 113859 - DNA, 15 bp, Homo sapiens
ccccatgaagacggg

SEQ ID NO: 113860 - DNA, 15 bp, Homo sapiens
accccatgaagacgg

SEQ ID NO: 113861 - DNA, 15 bp, Homo sapiens
taccccatgaagacg

SEQ ID NO: 113862 - DNA, 15 bp, Homo sapiens
gtaccccatgaagac

SEQ ID NO: 113863 - DNA, 15 bp, Homo sapiens
agtaccccatgaaga

SEQ ID NO: 113864 - DNA, 15 bp, Homo sapiens
cagtaccccatgaag

SEQ ID NO: 113865 - DNA, 15 bp, Homo sapiens
acagtaccccatgaa

SEQ ID NO: 113866 - DNA, 15 bp, Homo sapiens
cacagtaccccatga

SEQ ID NO: 113867 - DNA, 15 bp, Homo sapiens
acacagtaccccatg

SEQ ID NO: 113868 - DNA, 15 bp, Homo sapiens
cacacagtaccccat

SEQ ID NO: 113869 - DNA, 15 bp, Homo sapiens
ccacacagtacccca

SEQ ID NO: 113870 - DNA, 15 bp, Homo sapiens
gccacacagtacccc

SEQ ID NO: 113871 - DNA, 15 bp, Homo sapiens
agccacacagtaccc

SEQ ID NO: 113872 - DNA, 15 bp, Homo sapiens
gagccacacagtacc

SEQ ID NO: 113873 - DNA, 15 bp, Homo sapiens
ggagccacacagtac

SEQ ID NO: 113874 - DNA, 15 bp, Homo sapiens
tggagccacacagta

SEQ ID NO: 113875 - DNA, 15 bp, Homo sapiens
ttggagccacacagt

SEQ ID NO: 113876 - DNA, 15 bp, Homo sapiens
gttggagccacacag

SEQ ID NO: 113877 - DNA, 15 bp, Homo sapiens
agttggagccacaca

SEQ ID NO: 113878 - DNA, 15 bp, Homo sapiens
gagttggagccacac

SEQ ID NO: 113879 - DNA, 15 bp, Homo sapiens
cgagttggagccaca

SEQ ID NO: 113880 - DNA, 15 bp, Homo sapiens
gcgagttggagccac

SEQ ID NO: 113881 - DNA, 15 bp, Homo sapiens
ggcgagttggagcca

SEQ ID NO: 113882 - DNA, 15 bp, Homo sapiens
gggcgagttggagcc

SEQ ID NO: 113883 - DNA, 15 bp, Homo sapiens
tgggcgagttggagc

SEQ ID NO: 113884 - DNA, 15 bp, Homo sapiens
ctgggcgagttggag

SEQ ID NO: 113885 - DNA, 15 bp, Homo sapiens
gctgggcgagttgga

SEQ ID NO: 113886 - DNA, 15 bp, Homo sapiens
ggctgggcgagttgg

SEQ ID NO: 113887 - DNA, 15 bp, Homo sapiens
aggctgggcgagttg

SEQ ID NO: 113888 - DNA, 15 bp, Homo sapiens
aaggctgggcgagtt

SEQ ID NO: 113889 - DNA, 15 bp, Homo sapiens
gaaggctgggcgagt

SEQ ID NO: 113890 - DNA, 15 bp, Homo sapiens
agaaggctgggcgag

SEQ ID NO: 113891 - DNA, 15 bp, Homo sapiens
aagaaggctgggcga

SEQ ID NO: 113892 - DNA, 15 bp, Homo sapiens
gaagaaggctgggcg

SEQ ID NO: 113893 - DNA, 15 bp, Homo sapiens
ggaagaaggctgggc

SEQ ID NO: 113894 - DNA, 15 bp, Homo sapiens
aggaagaaggctggg

SEQ ID NO: 113895 - DNA, 15 bp, Homo sapiens
gaggaagaaggctgg

SEQ ID NO: 113896 - DNA, 15 bp, Homo sapiens
ggaggaagaaggctg

SEQ ID NO: 113897 - DNA, 15 bp, Homo sapiens
gggaggaagaaggct

SEQ ID NO: 113898 - DNA, 15 bp, Homo sapiens
ggggaggaagaaggc

SEQ ID NO: 113899 - DNA, 15 bp, Homo sapiens
gggggaggaagaagg

SEQ ID NO: 113900 - DNA, 15 bp, Homo sapiens
agggggaggaagaag

SEQ ID NO: 113901 - DNA, 15 bp, Homo sapiens
gagggggaggaagaa

SEQ ID NO: 113902 - DNA, 15 bp, Homo sapiens
tgagggggaggaaga

SEQ ID NO: 113903 - DNA, 15 bp, Homo sapiens
ctgagggggaggaag

SEQ ID NO: 113904 - DNA, 15 bp, Homo sapiens
cctgagggggaggaa

SEQ ID NO: 113905 - DNA, 15 bp, Homo sapiens
gcctgagggggagga

SEQ ID NO: 113906 - DNA, 15 bp, Homo sapiens
ggcctgagggggagg

SEQ ID NO: 113907 - DNA, 15 bp, Homo sapiens
tggcctgagggggag

SEQ ID NO: 113908 - DNA, 15 bp, Homo sapiens
gtggcctgaggggga

SEQ ID NO: 113909 - DNA, 15 bp, Homo sapiens
tgtggcctgaggggg

SEQ ID NO: 113910 - DNA, 15 bp, Homo sapiens
gtgtggcctgagggg

SEQ ID NO: 113911 - DNA, 15 bp, Homo sapiens
agtgtggcctgaggg

SEQ ID NO: 113912 - DNA, 15 bp, Homo sapiens
cagtgtggcctgagg

SEQ ID NO: 113913 - DNA, 15 bp, Homo sapiens
gcagtgtggcctgag

SEQ ID NO: 113914 - DNA, 15 bp, Homo sapiens
ggcagtgtggcctga

SEQ ID NO: 113915 - DNA, 15 bp, Homo sapiens
gggcagtgtggcctg

SEQ ID NO: 113916 - DNA, 15 bp, Homo sapiens
ggggcagtgtggcct

SEQ ID NO: 113917 - DNA, 15 bp, Homo sapiens
gggggcagtgtggcc

SEQ ID NO: 113918 - DNA, 15 bp, Homo sapiens
agggggcagtgtggc

SEQ ID NO: 113919 - DNA, 15 bp, Homo sapiens
cagggggcagtgtgg

SEQ ID NO: 113920 - DNA, 15 bp, Homo sapiens
gcagggggcagtgtg

SEQ ID NO: 113921 - DNA, 15 bp, Homo sapiens
tgcagggggcagtgt

SEQ ID NO: 113922 - DNA, 15 bp, Homo sapiens
ctgcagggggcagtg

SEQ ID NO: 113923 - DNA, 15 bp, Homo sapiens
cctgcagggggcagt

SEQ ID NO: 113924 - DNA, 15 bp, Homo sapiens
tcctgcagggggcag

SEQ ID NO: 113925 - DNA, 15 bp, Homo sapiens
ctcctgcagggggca

SEQ ID NO: 113926 - DNA, 15 bp, Homo sapiens
gctcctgcagggggc

SEQ ID NO: 113927 - DNA, 15 bp, Homo sapiens
ggctcctgcaggggg

SEQ ID NO: 113928 - DNA, 15 bp, Homo sapiens
gggctcctgcagggg

SEQ ID NO: 113929 - DNA, 15 bp, Homo sapiens
tgggctcctgcaggg

SEQ ID NO: 113930 - DNA, 15 bp, Homo sapiens
gtgggctcctgcagg

SEQ ID NO: 113931 - DNA, 15 bp, Homo sapiens
agtgggctcctgcag

SEQ ID NO: 113932 - DNA, 15 bp, Homo sapiens
cagtgggctcctgca

SEQ ID NO: 113933 - DNA, 15 bp, Homo sapiens
acagtgggctcctgc

SEQ ID NO: 113934 - DNA, 15 bp, Homo sapiens
cacagtgggctcctg

SEQ ID NO: 113935 - DNA, 15 bp, Homo sapiens
tcacagtgggctcct

SEQ ID NO: 113936 - DNA, 15 bp, Homo sapiens
atcacagtgggctcc

SEQ ID NO: 113937 - DNA, 15 bp, Homo sapiens
catcacagtgggctc

SEQ ID NO: 113938 - DNA, 15 bp, Homo sapiens
gcatcacagtgggct

SEQ ID NO: 113939 - DNA, 15 bp, Homo sapiens
agcatcacagtgggc

SEQ ID NO: 113940 - DNA, 15 bp, Homo sapiens
aagcatcacagtggg

SEQ ID NO: 113941 - DNA, 15 bp, Homo sapiens
caagcatcacagtgg

SEQ ID NO: 113942 - DNA, 15 bp, Homo sapiens
acaagcatcacagtg

SEQ ID NO: 113943 - DNA, 15 bp, Homo sapiens
cacaagcatcacagt

SEQ ID NO: 113944 - DNA, 15 bp, Homo sapiens
ccacaagcatcacag

SEQ ID NO: 113945 - DNA, 15 bp, Homo sapiens
accacaagcatcaca

SEQ ID NO: 113946 - DNA, 15 bp, Homo sapiens
caccacaagcatcac

SEQ ID NO: 113947 - DNA, 15 bp, Homo sapiens
ccaccacaagcatca

SEQ ID NO: 113948 - DNA, 15 bp, Homo sapiens
cccaccacaagcatc

SEQ ID NO: 113949 - DNA, 15 bp, Homo sapiens
tcccaccacaagcat

SEQ ID NO: 113950 - DNA, 15 bp, Homo sapiens
atcccaccacaagca

SEQ ID NO: 113951 - DNA, 15 bp, Homo sapiens
catcccaccacaagc

SEQ ID NO: 113952 - DNA, 15 bp, Homo sapiens
tcatcccaccacaag

SEQ ID NO: 113953 - DNA, 15 bp, Homo sapiens
ctcatcccaccacaa

SEQ ID NO: 113954 - DNA, 15 bp, Homo sapiens
tctcatcccaccaca

SEQ ID NO: 113955 - DNA, 15 bp, Homo sapiens
atctcatcccaccac

SEQ ID NO: 113956 - DNA, 15 bp, Homo sapiens
cgctgatctcatccc

SEQ ID NO: 113957 - DNA, 15 bp, Homo sapiens
acgctgatctcatcc

SEQ ID NO: 113958 - DNA, 15 bp, Homo sapiens
cacgctgatctcatc

SEQ ID NO: 113959 - DNA, 15 bp, Homo sapiens
ccacgctgatctcat

SEQ ID NO: 113960 - DNA, 15 bp, Homo sapiens
cccacgctgatctca

SEQ ID NO: 113961 - DNA, 15 bp, Homo sapiens
acccacgctgatctc

SEQ ID NO: 113962 - DNA, 15 bp, Homo sapiens
cacccacgctgatct

SEQ ID NO: 113963 - DNA, 15 bp, Homo sapiens
ccacccacgctgatc

SEQ ID NO: 113964 - DNA, 15 bp, Homo sapiens
tccacccacgctgat

SEQ ID NO: 113965 - DNA, 15 bp, Homo sapiens
ttccacccacgctga

SEQ ID NO: 113966 - DNA, 15 bp, Homo sapiens
gttccacccacgctg

SEQ ID NO: 113967 - DNA, 15 bp, Homo sapiens
tgttccacccacgct

SEQ ID NO: 113968 - DNA, 15 bp, Homo sapiens
ttgttccacccacgc

SEQ ID NO: 113969 - DNA, 15 bp, Homo sapiens
cttgttccacccacg

SEQ ID NO: 113970 - DNA, 15 bp, Homo sapiens
ccttgttccacccac

SEQ ID NO: 113971 - DNA, 15 bp, Homo sapiens
gccttgttccaccca

SEQ ID NO: 113972 - DNA, 15 bp, Homo sapiens
ggccttgttccaccc

SEQ ID NO: 113973 - DNA, 15 bp, Homo sapiens
gggccttgttccacc

SEQ ID NO: 113974 - DNA, 15 bp, Homo sapiens
agggccttgttccac

SEQ ID NO: 113975 - DNA, 15 bp, Homo sapiens
tccttccagggcctt

SEQ ID NO: 113976 - DNA, 15 bp, Homo sapiens
gtccttccagggcct

SEQ ID NO: 113977 - DNA, 15 bp, Homo sapiens
ggtccttccagggcc

SEQ ID NO: 113978 - DNA, 15 bp, Homo sapiens
gggtccttccagggc

SEQ ID NO: 113979 - DNA, 15 bp, Homo sapiens
tgggtccttccaggg

SEQ ID NO: 113980 - DNA, 15 bp, Homo sapiens
atgggtccttccagg

SEQ ID NO: 113981 - DNA, 15 bp, Homo sapiens
catgggtccttccag

SEQ ID NO: 113982 - DNA, 15 bp, Homo sapiens
gcatgggtccttcca

SEQ ID NO: 113983 - DNA, 15 bp, Homo sapiens
ggcatgggtccttcc

SEQ ID NO: 113984 - DNA, 15 bp, Homo sapiens
tggcatgggtccttc

SEQ ID NO: 113985 - DNA, 15 bp, Homo sapiens
atggcatgggtcctt

SEQ ID NO: 113986 - DNA, 15 bp, Homo sapiens
gatggcatgggtcct

SEQ ID NO: 113987 - DNA, 15 bp, Homo sapiens
tgatggcatgggtcc

SEQ ID NO: 113988 - DNA, 15 bp, Homo sapiens
atgatggcatgggtc

SEQ ID NO: 113989 - DNA, 15 bp, Homo sapiens
gatgatggcatgggt

SEQ ID NO: 113990 - DNA, 15 bp, Homo sapiens
tgatgatggcatggg

SEQ ID NO: 113991 - DNA, 15 bp, Homo sapiens
atgatgatggcatgg

SEQ ID NO: 113992 - DNA, 15 bp, Homo sapiens
gatgatgatggcatg

SEQ ID NO: 113993 - DNA, 15 bp, Homo sapiens
cgatgatgatggcat

SEQ ID NO: 113994 - DNA, 15 bp, Homo sapiens
tcgatgatgatggca

SEQ ID NO: 113995 - DNA, 15 bp, Homo sapiens
gtcgatgatgatggc

SEQ ID NO: 113996 - DNA, 15 bp, Homo sapiens
tgtcgatgatgatgg

SEQ ID NO: 113997 - DNA, 15 bp, Homo sapiens
ctgtcgatgatgatg

SEQ ID NO: 113998 - DNA, 15 bp, Homo sapiens
gctgtcgatgatgat

SEQ ID NO: 113999 - DNA, 15 bp, Homo sapiens
tgctgtcgatgatga

SEQ ID NO: 114000 - DNA, 15 bp, Homo sapiens
ttgctgtcgatgatg

SEQ ID NO: 114001 - DNA, 15 bp, Homo sapiens
tttgctgtcgatgat

SEQ ID NO: 114002 - DNA, 15 bp, Homo sapiens
agctttgctgtcgat

SEQ ID NO: 114003 - DNA, 15 bp, Homo sapiens
tagctttgctgtcga

SEQ ID NO: 114004 - DNA, 15 bp, Homo sapiens
gtagctttgctgtcg

SEQ ID NO: 114005 - DNA, 15 bp, Homo sapiens
agtagctttgctgtc

SEQ ID NO: 114006 - DNA, 15 bp, Homo sapiens
gagtagctttgctgt

SEQ ID NO: 114007 - DNA, 15 bp, Homo sapiens
agagtagctttgctg

SEQ ID NO: 114008 - DNA, 15 bp, Homo sapiens
cagagtagctttgct

SEQ ID NO: 114009 - DNA, 15 bp, Homo sapiens
gcagagtagctttgc

SEQ ID NO: 114010 - DNA, 15 bp, Homo sapiens
tgcagagtagctttg

SEQ ID NO: 114011 - DNA, 15 bp, Homo sapiens
ttgcagagtagcttt

SEQ ID NO: 114012 - DNA, 15 bp, Homo sapiens
tttgcagagtagctt

SEQ ID NO: 114013 - DNA, 15 bp, Homo sapiens
gtttgcagagtagct

SEQ ID NO: 114014 - DNA, 15 bp, Homo sapiens
tgtttgcagagtagc

SEQ ID NO: 114015 - DNA, 15 bp, Homo sapiens
ctgtttgcagagtag

SEQ ID NO: 114016 - DNA, 15 bp, Homo sapiens
tctgtttgcagagta

SEQ ID NO: 114017 - DNA, 15 bp, Homo sapiens
gtctgtttgcagagt

SEQ ID NO: 114018 - DNA, 15 bp, Homo sapiens
tgtctgtttgcagag

SEQ ID NO: 114019 - DNA, 15 bp, Homo sapiens
ctgtctgtttgcaga

SEQ ID NO: 114020 - DNA, 15 bp, Homo sapiens
tctgtctgtttgcag

SEQ ID NO: 114021 - DNA, 15 bp, Homo sapiens
atctgtctgtttgca

SEQ ID NO: 114022 - DNA, 15 bp, Homo sapiens
catctgtctgtttgc

SEQ ID NO: 114023 - DNA, 15 bp, Homo sapiens
gcatctgtctgtttg

SEQ ID NO: 114024 - DNA, 15 bp, Homo sapiens
agcatctgtctgttt

SEQ ID NO: 114025 - DNA, 15 bp, Homo sapiens
aagcatctgtctgtt

SEQ ID NO: 114026 - DNA, 15 bp, Homo sapiens
gaagcatctgtctgt

SEQ ID NO: 114027 - DNA, 15 bp, Homo sapiens
ggaagcatctgtctg

SEQ ID NO: 114028 - DNA, 15 bp, Homo sapiens
cggaagcatctgtct

SEQ ID NO: 114029 - DNA, 15 bp, Homo sapiens
gcggaagcatctgtc

SEQ ID NO: 114030 - DNA, 15 bp, Homo sapiens
cgcggaagcatctgt

SEQ ID NO: 114031 - DNA, 15 bp, Homo sapiens
tcgcggaagcatctg

SEQ ID NO: 114032 - DNA, 15 bp, Homo sapiens
ttcgcggaagcatct

SEQ ID NO: 114033 - DNA, 15 bp, Homo sapiens
attcgcggaagcatc

SEQ ID NO: 114034 - DNA, 15 bp, Homo sapiens
aattcgcggaagcat

SEQ ID NO: 114035 - DNA, 15 bp, Homo sapiens
caattcgcggaagca

SEQ ID NO: 114036 - DNA, 15 bp, Homo sapiens
ccaattcgcggaagc

SEQ ID NO: 114037 - DNA, 15 bp, Homo sapiens
accaattcgcggaag

SEQ ID NO: 114038 - DNA, 15 bp, Homo sapiens
taccaattcgcggaa

SEQ ID NO: 114039 - DNA, 15 bp, Homo sapiens
ctaccaattcgcgga

SEQ ID NO: 114040 - DNA, 15 bp, Homo sapiens
tctaccaattcgcgg

SEQ ID NO: 114041 - DNA, 15 bp, Homo sapiens
ttctaccaattcgcg

SEQ ID NO: 114042 - DNA, 15 bp, Homo sapiens
tttctaccaattcgc

SEQ ID NO: 114043 - DNA, 15 bp, Homo sapiens
ttttctaccaattcg

SEQ ID NO: 114044 - DNA, 15 bp, Homo sapiens
ctgcagaattttcta

SEQ ID NO: 114045 - DNA, 15 bp, Homo sapiens
gctgcagaattttct

SEQ ID NO: 114046 - DNA, 15 bp, Homo sapiens
ggctgcagaattttc

SEQ ID NO: 114047 - DNA, 15 bp, Homo sapiens
cggctgcagaatttt

SEQ ID NO: 114048 - DNA, 15 bp, Homo sapiens
ccggctgcagaattt

SEQ ID NO: 114049 - DNA, 15 bp, Homo sapiens
tccggctgcagaatt

SEQ ID NO: 114050 - DNA, 15 bp, Homo sapiens
ttccggctgcagaat

SEQ ID NO: 114051 - DNA, 15 bp, Homo sapiens
attccggctgcagaa

SEQ ID NO: 114052 - DNA, 15 bp, Homo sapiens
cattccggctgcaga

SEQ ID NO: 114053 - DNA, 15 bp, Homo sapiens
gcattccggctgcag

SEQ ID NO: 114054 - DNA, 15 bp, Homo sapiens
agcattccggctgca

SEQ ID NO: 114055 - DNA, 15 bp, Homo sapiens
gagcattccggctgc

SEQ ID NO: 114056 - DNA, 15 bp, Homo sapiens
agagcattccggctg

SEQ ID NO: 114057 - DNA, 15 bp, Homo sapiens
tagagcattccggct

SEQ ID NO: 114058 - DNA, 15 bp, Homo sapiens
ctagagcattccggc

SEQ ID NO: 114059 - DNA, 15 bp, Homo sapiens
cctagagcattccgg

SEQ ID NO: 114060 - DNA, 15 bp, Homo sapiens
tcctagagcattccg

SEQ ID NO: 114061 - DNA, 15 bp, Homo sapiens
atcctagagcattcc

SEQ ID NO: 114062 - DNA, 15 bp, Homo sapiens
gatcctagagcattc

SEQ ID NO: 114063 - DNA, 15 bp, Homo sapiens
ggatcctagagcatt

SEQ ID NO: 114064 - DNA, 15 bp, Homo sapiens
aggatcctagagcat

SEQ ID NO: 114065 - DNA, 15 bp, Homo sapiens
caggatcctagagca

SEQ ID NO: 114066 - DNA, 15 bp, Homo sapiens
tcaggatcctagagc

SEQ ID NO: 114067 - DNA, 15 bp, Homo sapiens
ctcaggatcctagag

SEQ ID NO: 114068 - DNA, 15 bp, Homo sapiens
cctcaggatcctaga

SEQ ID NO: 114069 - DNA, 15 bp, Homo sapiens
gcctcaggatcctag

SEQ ID NO: 114070 - DNA, 15 bp, Homo sapiens
ggcctcaggatccta

SEQ ID NO: 114071 - DNA, 15 bp, Homo sapiens
gggcctcaggatcct

SEQ ID NO: 114072 - DNA, 15 bp, Homo sapiens
agggcctcaggatcc

SEQ ID NO: 114073 - DNA, 15 bp, Homo sapiens
tagggcctcaggatc

SEQ ID NO: 114074 - DNA, 15 bp, Homo sapiens
ttagggcctcaggat

SEQ ID NO: 114075 - DNA, 15 bp, Homo sapiens
cttagggcctcagga

SEQ ID NO: 114076 - DNA, 15 bp, Homo sapiens
gcttagggcctcagg

SEQ ID NO: 114077 - DNA, 15 bp, Homo sapiens
ggcttagggcctcag

SEQ ID NO: 114078 - DNA, 15 bp, Homo sapiens
gggcttagggcctca

SEQ ID NO: 114079 - DNA, 15 bp, Homo sapiens
cgggcttagggcctc

SEQ ID NO: 114080 - DNA, 15 bp, Homo sapiens
ccgggcttagggcct

SEQ ID NO: 114081 - DNA, 15 bp, Homo sapiens
gccgggcttagggcc

SEQ ID NO: 114082 - DNA, 15 bp, Homo sapiens
ggccgggcttagggc

SEQ ID NO: 114083 - DNA, 15 bp, Homo sapiens
gggccgggcttaggg

SEQ ID NO: 114084 - DNA, 15 bp, Homo sapiens
cgggccgggcttagg

SEQ ID NO: 114085 - DNA, 15 bp, Homo sapiens
ccgggccgggcttag

SEQ ID NO: 114086 - DNA, 15 bp, Homo sapiens
cccgggccgggctta

SEQ ID NO: 114087 - DNA, 15 bp, Homo sapiens
ccccgggccgggctt

SEQ ID NO: 114088 - DNA, 15 bp, Homo sapiens
gccccgggccgggct

SEQ ID NO: 114089 - DNA, 15 bp, Homo sapiens
agccccgggccgggc

SEQ ID NO: 114090 - DNA, 15 bp, Homo sapiens
gagccccgggccggg

SEQ ID NO: 114091 - DNA, 15 bp, Homo sapiens
ggagccccgggccgg

SEQ ID NO: 114092 - DNA, 15 bp, Homo sapiens
gggagccccgggccg

SEQ ID NO: 114093 - DNA, 15 bp, Homo sapiens
cgggagccccgggcc

SEQ ID NO: 114094 - DNA, 15 bp, Homo sapiens
tcgggagccccgggc

SEQ ID NO: 114095 - DNA, 15 bp, Homo sapiens
ctcgggagccccggg

SEQ ID NO: 114096 - DNA, 15 bp, Homo sapiens
cctcgggagccccgg

SEQ ID NO: 114097 - DNA, 15 bp, Homo sapiens
gcctcgggagccccg

SEQ ID NO: 114098 - DNA, 15 bp, Homo sapiens
ggcctcgggagcccc

SEQ ID NO: 114099 - DNA, 15 bp, Homo sapiens
gggcctcgggagccc

SEQ ID NO: 114100 - DNA, 15 bp, Homo sapiens
agggcctcgggagcc

SEQ ID NO: 114101 - DNA, 15 bp, Homo sapiens
tagggcctcgggagc

SEQ ID NO: 114102 - DNA, 15 bp, Homo sapiens
ttagggcctcgggag

SEQ ID NO: 114103 - DNA, 15 bp, Homo sapiens
cttagggcctcggga

SEQ ID NO: 114104 - DNA, 15 bp, Homo sapiens
gcttagggcctcggg

SEQ ID NO: 114105 - DNA, 15 bp, Homo sapiens
ggcttagggcctcgg

SEQ ID NO: 114106 - DNA, 15 bp, Homo sapiens
gggcttagggcctcg

SEQ ID NO: 114107 - DNA, 15 bp, Homo sapiens
tcccgggccgggctt

SEQ ID NO: 114108 - DNA, 15 bp, Homo sapiens
gtcccgggccgggct

SEQ ID NO: 114109 - DNA, 15 bp, Homo sapiens
agtcccgggccgggc

SEQ ID NO: 114110 - DNA, 15 bp, Homo sapiens
gagtcccgggccggg

SEQ ID NO: 114111 - DNA, 15 bp, Homo sapiens
agagtcccgggccgg

SEQ ID NO: 114112 - DNA, 15 bp, Homo sapiens
cagagtcccgggccg

SEQ ID NO: 114113 - DNA, 15 bp, Homo sapiens
ccagagtcccgggcc

SEQ ID NO: 114114 - DNA, 15 bp, Homo sapiens
tccagagtcccgggc

SEQ ID NO: 114115 - DNA, 15 bp, Homo sapiens
ttccagagtcccggg

SEQ ID NO: 114116 - DNA, 15 bp, Homo sapiens
cttccagagtcccgg

SEQ ID NO: 114117 - DNA, 15 bp, Homo sapiens
gcttccagagtcccg

SEQ ID NO: 114118 - DNA, 15 bp, Homo sapiens
agcttccagagtccc

SEQ ID NO: 114119 - DNA, 15 bp, Homo sapiens
cagcttccagagtcc

SEQ ID NO: 114120 - DNA, 15 bp, Homo sapiens
gcagcttccagagtc

SEQ ID NO: 114121 - DNA, 15 bp, Homo sapiens
agcagcttccagagt

SEQ ID NO: 114122 - DNA, 15 bp, Homo sapiens
gagcagcttccagag

SEQ ID NO: 114123 - DNA, 15 bp, Homo sapiens
agagcagcttccaga

SEQ ID NO: 114124 - DNA, 15 bp, Homo sapiens
cagagcagcttccag

SEQ ID NO: 114125 - DNA, 15 bp, Homo sapiens
ccagagcagcttcca

SEQ ID NO: 114126 - DNA, 15 bp, Homo sapiens
gccagagcagcttcc

SEQ ID NO: 114127 - DNA, 15 bp, Homo sapiens
agccagagcagcttc

SEQ ID NO: 114128 - DNA, 15 bp, Homo sapiens
aagccagagcagctt

SEQ ID NO: 114129 - DNA, 15 bp, Homo sapiens
taagccagagcagct

SEQ ID NO: 114130 - DNA, 15 bp, Homo sapiens
ataagccagagcagc

SEQ ID NO: 114131 - DNA, 15 bp, Homo sapiens
aataagccagagcag

SEQ ID NO: 114132 - DNA, 15 bp, Homo sapiens
caataagccagagca

SEQ ID NO: 114133 - DNA, 15 bp, Homo sapiens
ccaataagccagagc

SEQ ID NO: 114134 - DNA, 15 bp, Homo sapiens
cccaataagccagag

SEQ ID NO: 114135 - DNA, 15 bp, Homo sapiens
tcccaataagccaga

SEQ ID NO: 114136 - DNA, 15 bp, Homo sapiens
ttcccaataagccag

SEQ ID NO: 114137 - DNA, 15 bp, Homo sapiens
attcccaataagcca

SEQ ID NO: 114138 - DNA, 15 bp, Homo sapiens
cattcccaataagcc

SEQ ID NO: 114139 - DNA, 15 bp, Homo sapiens
ccattcccaataagc

SEQ ID NO: 114140 - DNA, 15 bp, Homo sapiens
tccattcccaataag

SEQ ID NO: 114141 - DNA, 15 bp, Homo sapiens
ttccattcccaataa

SEQ ID NO: 114142 - DNA, 15 bp, Homo sapiens
cttccattcccaata

SEQ ID NO: 114143 - DNA, 15 bp, Homo sapiens
acttccattcccaat

SEQ ID NO: 114144 - DNA, 15 bp, Homo sapiens
aacttccattcccaa

SEQ ID NO: 114145 - DNA, 15 bp, Homo sapiens
caacttccattccca

SEQ ID NO: 114146 - DNA, 15 bp, Homo sapiens
ccaacttccattccc

SEQ ID NO: 114147 - DNA, 15 bp, Homo sapiens
gccaacttccattcc

SEQ ID NO: 114148 - DNA, 15 bp, Homo sapiens
tgccaacttccattc

SEQ ID NO: 114149 - DNA, 15 bp, Homo sapiens
ctgccaacttccatt

SEQ ID NO: 114150 - DNA, 15 bp, Homo sapiens
cctgccaacttccat

SEQ ID NO: 114151 - DNA, 15 bp, Homo sapiens
ggagtcctgccaact

SEQ ID NO: 114152 - DNA, 15 bp, Homo sapiens
aggagtcctgccaac

SEQ ID NO: 114153 - DNA, 15 bp, Homo sapiens
gaggagtcctgccaa

SEQ ID NO: 114154 - DNA, 15 bp, Homo sapiens
agaggagtcctgcca

SEQ ID NO: 114155 - DNA, 15 bp, Homo sapiens
aagaggagtcctgcc

SEQ ID NO: 114156 - DNA, 15 bp, Homo sapiens
gaagaggagtcctgc

SEQ ID NO: 114157 - DNA, 15 bp, Homo sapiens
ggaagaggagtcctg

SEQ ID NO: 114158 - DNA, 15 bp, Homo sapiens
aggaagaggagtcct

SEQ ID NO: 114159 - DNA, 15 bp, Homo sapiens
caggaagaggagtcc

SEQ ID NO: 114160 - DNA, 15 bp, Homo sapiens
ccaggaagaggagtc

SEQ ID NO: 114161 - DNA, 15 bp, Homo sapiens
cccaggaagaggagt

SEQ ID NO: 114162 - DNA, 15 bp, Homo sapiens
tcccaggaagaggag

SEQ ID NO: 114163 - DNA, 15 bp, Homo sapiens
ttcccaggaagagga

SEQ ID NO: 114164 - DNA, 15 bp, Homo sapiens
cttcccaggaagagg

SEQ ID NO: 114165 - DNA, 15 bp, Homo sapiens
tgcttcttcccagga

SEQ ID NO: 114166 - DNA, 15 bp, Homo sapiens
ctgcttcttcccagg

SEQ ID NO: 114167 - DNA, 15 bp, Homo sapiens
tctgcttcttcccag

SEQ ID NO: 114168 - DNA, 15 bp, Homo sapiens
ctctgcttcttccca

SEQ ID NO: 114169 - DNA, 15 bp, Homo sapiens
cctctgcttcttccc

SEQ ID NO: 114170 - DNA, 15 bp, Homo sapiens
ccctctgcttcttcc

SEQ ID NO: 114171 - DNA, 15 bp, Homo sapiens
accctctgcttcttc

SEQ ID NO: 114172 - DNA, 15 bp, Homo sapiens
caccctctgcttctt

SEQ ID NO: 114173 - DNA, 15 bp, Homo sapiens
ccaccctctgcttct

SEQ ID NO: 114174 - DNA, 15 bp, Homo sapiens
cccaccctctgcttc

SEQ ID NO: 114175 - DNA, 15 bp, Homo sapiens
ccccaccctctgctt

SEQ ID NO: 114176 - DNA, 15 bp, Homo sapiens
tccccaccctctgct

SEQ ID NO: 114177 - DNA, 15 bp, Homo sapiens
atccccaccctctgc

SEQ ID NO: 114178 - DNA, 15 bp, Homo sapiens
catccccaccctctg

SEQ ID NO: 114179 - DNA, 15 bp, Homo sapiens
tcatccccaccctct

SEQ ID NO: 114180 - DNA, 15 bp, Homo sapiens
ttctcatccccaccc

SEQ ID NO: 114181 - DNA, 15 bp, Homo sapiens
cttctcatccccacc

SEQ ID NO: 114182 - DNA, 15 bp, Homo sapiens
tcttctcatccccac

SEQ ID NO: 114183 - DNA, 15 bp, Homo sapiens
gtcttctcatcccca

SEQ ID NO: 114184 - DNA, 15 bp, Homo sapiens
tgtcttctcatcccc

SEQ ID NO: 114185 - DNA, 15 bp, Homo sapiens
ctgtcttctcatccc

SEQ ID NO: 114186 - DNA, 15 bp, Homo sapiens
cctgtcttctcatcc

SEQ ID NO: 114187 - DNA, 15 bp, Homo sapiens
gcctgtcttctcatc

SEQ ID NO: 114188 - DNA, 15 bp, Homo sapiens
ggcctgtcttctcat

SEQ ID NO: 114189 - DNA, 15 bp, Homo sapiens
tggcctgtcttctca

SEQ ID NO: 114190 - DNA, 15 bp, Homo sapiens
ctggcctgtcttctc

SEQ ID NO: 114191 - DNA, 15 bp, Homo sapiens
cctggcctgtcttct

SEQ ID NO: 114192 - DNA, 15 bp, Homo sapiens
tcctggcctgtcttc

SEQ ID NO: 114193 - DNA, 15 bp, Homo sapiens
ctcctggcctgtctt

SEQ ID NO: 114194 - DNA, 15 bp, Homo sapiens
gctcctggcctgtct

SEQ ID NO: 114195 - DNA, 15 bp, Homo sapiens
ggctcctggcctgtc

SEQ ID NO: 114196 - DNA, 15 bp, Homo sapiens
gggctcctggcctgt

SEQ ID NO: 114197 - DNA, 15 bp, Homo sapiens
tgggctcctggcctg

SEQ ID NO: 114198 - DNA, 15 bp, Homo sapiens
gtgggctcctggcct

SEQ ID NO: 114199 - DNA, 15 bp, Homo sapiens
ggtgggctcctggcc

SEQ ID NO: 114200 - DNA, 15 bp, Homo sapiens
gggtgggctcctggc

SEQ ID NO: 114201 - DNA, 15 bp, Homo sapiens
tgggtgggctcctgg

SEQ ID NO: 114202 - DNA, 15 bp, Homo sapiens
aactcccctagtttc

SEQ ID NO: 114203 - DNA, 15 bp, Homo sapiens
taactcccctagttt

SEQ ID NO: 114204 - DNA, 15 bp, Homo sapiens
ataactcccctagtt

SEQ ID NO: 114205 - DNA, 15 bp, Homo sapiens
cataactcccctagt

SEQ ID NO: 114206 - DNA, 15 bp, Homo sapiens
gcataactcccctag

SEQ ID NO: 114207 - DNA, 15 bp, Homo sapiens
tgcataactccccta

SEQ ID NO: 114208 - DNA, 15 bp, Homo sapiens
ctgcataactcccct

SEQ ID NO: 114209 - DNA, 15 bp, Homo sapiens
tctgcataactcccc

SEQ ID NO: 114210 - DNA, 15 bp, Homo sapiens
ctctgcataactccc

SEQ ID NO: 114211 - DNA, 15 bp, Homo sapiens
actctgcataactcc

SEQ ID NO: 114212 - DNA, 15 bp, Homo sapiens
gactctgcataactc

SEQ ID NO: 114213 - DNA, 15 bp, Homo sapiens
ggactctgcataact

SEQ ID NO: 114214 - DNA, 15 bp, Homo sapiens
aggactctgcataac

SEQ ID NO: 114215 - DNA, 15 bp, Homo sapiens
caggactctgcataa

SEQ ID NO: 114216 - DNA, 15 bp, Homo sapiens
ccaggactctgcata

SEQ ID NO: 114217 - DNA, 15 bp, Homo sapiens
accaggactctgcat

SEQ ID NO: 114218 - DNA, 15 bp, Homo sapiens
caccaggactctgca

SEQ ID NO: 114219 - DNA, 15 bp, Homo sapiens
ccaccaggactctgc

SEQ ID NO: 114220 - DNA, 15 bp, Homo sapiens
tccaccaggactctg

SEQ ID NO: 114221 - DNA, 15 bp, Homo sapiens
ctccaccaggactct

SEQ ID NO: 114222 - DNA, 15 bp, Homo sapiens
gctccaccaggactc

SEQ ID NO: 114223 - DNA, 15 bp, Homo sapiens
cgctccaccaggact

SEQ ID NO: 114224 - DNA, 15 bp, Homo sapiens
agctggcgctccacc

SEQ ID NO: 114225 - DNA, 15 bp, Homo sapiens
aagctggcgctccac

SEQ ID NO: 114226 - DNA, 15 bp, Homo sapiens
gaagctggcgctcca

SEQ ID NO: 114227 - DNA, 15 bp, Homo sapiens
ggaagctggcgctcc

SEQ ID NO: 114228 - DNA, 15 bp, Homo sapiens
gggaagctggcgctc

SEQ ID NO: 114229 - DNA, 15 bp, Homo sapiens
agggaagctggcgct

SEQ ID NO: 114230 - DNA, 15 bp, Homo sapiens
aagggaagctggcgc

SEQ ID NO: 114231 - DNA, 15 bp, Homo sapiens
gaagggaagctggcg

SEQ ID NO: 114232 - DNA, 15 bp, Homo sapiens
ggaagggaagctggc

SEQ ID NO: 114233 - DNA, 15 bp, Homo sapiens
aggaagggaagctgg

SEQ ID NO: 114234 - DNA, 15 bp, Homo sapiens
caggaagggaagctg

SEQ ID NO: 114235 - DNA, 15 bp, Homo sapiens
gcaggaagggaagct

SEQ ID NO: 114236 - DNA, 15 bp, Homo sapiens
ggcaggaagggaagc

SEQ ID NO: 114237 - DNA, 15 bp, Homo sapiens
tggcaggaagggaag

SEQ ID NO: 114238 - DNA, 15 bp, Homo sapiens
ttggcaggaagggaa

SEQ ID NO: 114239 - DNA, 15 bp, Homo sapiens
cgaggtgggcgcctg

SEQ ID NO: 114240 - DNA, 15 bp, Homo sapiens
gcgaggtgggcgcct

SEQ ID NO: 114241 - DNA, 15 bp, Homo sapiens
cgcgaggtgggcgcc

SEQ ID NO: 114242 - DNA, 15 bp, Homo sapiens
ccgcgaggtgggcgc

SEQ ID NO: 114243 - DNA, 15 bp, Homo sapiens
tccgcgaggtgggcg

SEQ ID NO: 114244 - DNA, 15 bp, Homo sapiens
gtccgcgaggtgggc

SEQ ID NO: 114245 - DNA, 15 bp, Homo sapiens
ggtccgcgaggtggg

SEQ ID NO: 114246 - DNA, 15 bp, Homo sapiens
aggtccgcgaggtgg

SEQ ID NO: 114247 - DNA, 15 bp, Homo sapiens
gaggtccgcgaggtg

SEQ ID NO: 114248 - DNA, 15 bp, Homo sapiens
agaggtccgcgaggt

SEQ ID NO: 114249 - DNA, 15 bp, Homo sapiens
cagaggtccgcgagg

SEQ ID NO: 114250 - DNA, 15 bp, Homo sapiens
ccagaggtccgcgag

SEQ ID NO: 114251 - DNA, 15 bp, Homo sapiens
cccagaggtccgcga

SEQ ID NO: 114252 - DNA, 15 bp, Homo sapiens
acccagaggtccgcg

SEQ ID NO: 114253 - DNA, 15 bp, Homo sapiens
gacccagaggtccgc

SEQ ID NO: 114254 - DNA, 15 bp, Homo sapiens
ggacccagaggtccg

SEQ ID NO: 114255 - DNA, 15 bp, Homo sapiens
tggacccagaggtcc

SEQ ID NO: 114256 - DNA, 15 bp, Homo sapiens
gtggacccagaggtc

SEQ ID NO: 114257 - DNA, 15 bp, Homo sapiens
tgtggacccagaggt

SEQ ID NO: 114258 - DNA, 15 bp, Homo sapiens
ctgtggacccagagg

SEQ ID NO: 114259 - DNA, 15 bp, Homo sapiens
cctgtggacccagag

SEQ ID NO: 114260 - DNA, 15 bp, Homo sapiens
ccctgtggacccaga

SEQ ID NO: 114261 - DNA, 15 bp, Homo sapiens
accctgtggacccag

SEQ ID NO: 114262 - DNA, 15 bp, Homo sapiens
taccctgtggaccca

SEQ ID NO: 114263 - DNA, 15 bp, Homo sapiens
ataccctgtggaccc

SEQ ID NO: 114264 - DNA, 15 bp, Homo sapiens
aataccctgtggacc

SEQ ID NO: 114265 - DNA, 15 bp, Homo sapiens
caataccctgtggac

SEQ ID NO: 114266 - DNA, 15 bp, Homo sapiens
ccaataccctgtgga

SEQ ID NO: 114267 - DNA, 15 bp, Homo sapiens
gccaataccctgtgg

SEQ ID NO: 114268 - DNA, 15 bp, Homo sapiens
tgccaataccctgtg

SEQ ID NO: 114269 - DNA, 15 bp, Homo sapiens
gtgccaataccctgt

SEQ ID NO: 114270 - DNA, 15 bp, Homo sapiens
ggtgccaataccctg

SEQ ID NO: 114271 - DNA, 15 bp, Homo sapiens
gggtgccaataccct

SEQ ID NO: 114272 - DNA, 15 bp, Homo sapiens
agggtgccaataccc

SEQ ID NO: 114273 - DNA, 15 bp, Homo sapiens
aagggtgccaatacc

SEQ ID NO: 114274 - DNA, 15 bp, Homo sapiens
taagggtgccaatac

SEQ ID NO: 114275 - DNA, 15 bp, Homo sapiens
ctaagggtgccaata

SEQ ID NO: 114276 - DNA, 15 bp, Homo sapiens
gctaagggtgccaat

SEQ ID NO: 114277 - DNA, 15 bp, Homo sapiens
agctaagggtgccaa

SEQ ID NO: 114278 - DNA, 15 bp, Homo sapiens
cagctaagggtgcca

SEQ ID NO: 114279 - DNA, 15 bp, Homo sapiens
acagctaagggtgcc

SEQ ID NO: 114280 - DNA, 15 bp, Homo sapiens
cacagctaagggtgc

SEQ ID NO: 114281 - DNA, 15 bp, Homo sapiens
acacagctaagggtg

SEQ ID NO: 114282 - DNA, 15 bp, Homo sapiens
cacacagctaagggt

SEQ ID NO: 114283 - DNA, 15 bp, Homo sapiens
tcacacagctaaggg

SEQ ID NO: 114284 - DNA, 15 bp, Homo sapiens
atcacacagctaagg

SEQ ID NO: 114285 - DNA, 15 bp, Homo sapiens
catcacacagctaag

SEQ ID NO: 114286 - DNA, 15 bp, Homo sapiens
gcatcacacagctaa

SEQ ID NO: 114287 - DNA, 15 bp, Homo sapiens
cgcatcacacagcta

SEQ ID NO: 114288 - DNA, 15 bp, Homo sapiens
ccgcatcacacagct

SEQ ID NO: 114289 - DNA, 15 bp, Homo sapiens
cccgcatcacacagc

SEQ ID NO: 114290 - DNA, 15 bp, Homo sapiens
gcccgcatcacacag

SEQ ID NO: 114291 - DNA, 15 bp, Homo sapiens
ggcccgcatcacaca

SEQ ID NO: 114292 - DNA, 15 bp, Homo sapiens
aggcccgcatcacac

SEQ ID NO: 114293 - DNA, 15 bp, Homo sapiens
caggcccgcatcaca

SEQ ID NO: 114294 - DNA, 15 bp, Homo sapiens
ccaggcccgcatcac

SEQ ID NO: 114295 - DNA, 15 bp, Homo sapiens
gccaggcccgcatca

SEQ ID NO: 114296 - DNA, 15 bp, Homo sapiens
agccaggcccgcatc

SEQ ID NO: 114297 - DNA, 15 bp, Homo sapiens
gagccaggcccgcat

SEQ ID NO: 114298 - DNA, 15 bp, Homo sapiens
tgagccaggcccgca

SEQ ID NO: 114299 - DNA, 15 bp, Homo sapiens
atgagccaggcccgc

SEQ ID NO: 114300 - DNA, 15 bp, Homo sapiens
tatgagccaggcccg

SEQ ID NO: 114301 - DNA, 15 bp, Homo sapiens
ttatgagccaggccc

SEQ ID NO: 114302 - DNA, 15 bp, Homo sapiens
gttatgagccaggcc

SEQ ID NO: 114303 - DNA, 15 bp, Homo sapiens
ggttatgagccaggc

SEQ ID NO: 114304 - DNA, 15 bp, Homo sapiens
tggttatgagccagg

SEQ ID NO: 114305 - DNA, 15 bp, Homo sapiens
atggttatgagccag

SEQ ID NO: 114306 - DNA, 15 bp, Homo sapiens
catggttatgagcca

SEQ ID NO: 114307 - DNA, 15 bp, Homo sapiens
ccatggttatgagcc

SEQ ID NO: 114308 - DNA, 15 bp, Homo sapiens
gccatggttatgagc

SEQ ID NO: 114309 - DNA, 15 bp, Homo sapiens
ggccatggttatgag

SEQ ID NO: 114310 - DNA, 15 bp, Homo sapiens
aggccatggttatga

SEQ ID NO: 114311 - DNA, 15 bp, Homo sapiens
caggccatggttatg

SEQ ID NO: 114312 - DNA, 15 bp, Homo sapiens
acaggccatggttat

SEQ ID NO: 114313 - DNA, 15 bp, Homo sapiens
cacaggccatggtta

SEQ ID NO: 114314 - DNA, 15 bp, Homo sapiens
ccacaggccatggtt

SEQ ID NO: 114315 - DNA, 15 bp, Homo sapiens
accacaggccatggt

SEQ ID NO: 114316 - DNA, 15 bp, Homo sapiens
caccacaggccatgg

SEQ ID NO: 114317 - DNA, 15 bp, Homo sapiens
acaccacaggccatg

SEQ ID NO: 114318 - DNA, 15 bp, Homo sapiens
gacaccacaggccat

SEQ ID NO: 114319 - DNA, 15 bp, Homo sapiens
ggacaccacaggcca

SEQ ID NO: 114320 - DNA, 15 bp, Homo sapiens
gggacaccacaggcc

SEQ ID NO: 114321 - DNA, 15 bp, Homo sapiens
ggggacaccacaggc

SEQ ID NO: 114322 - DNA, 15 bp, Homo sapiens
cggggacaccacagg

SEQ ID NO: 114323 - DNA, 15 bp, Homo sapiens
ccggggacaccacag

SEQ ID NO: 114324 - DNA, 15 bp, Homo sapiens
cccggggacaccaca

SEQ ID NO: 114325 - DNA, 15 bp, Homo sapiens
ccccggggacaccac

SEQ ID NO: 114326 - DNA, 15 bp, Homo sapiens
cccccggggacacca

SEQ ID NO: 114327 - DNA, 15 bp, Homo sapiens
gcccccggggacacc

SEQ ID NO: 114328 - DNA, 15 bp, Homo sapiens
ggcccccggggacac

SEQ ID NO: 114329 - DNA, 15 bp, Homo sapiens
cggcccccggggaca

SEQ ID NO: 114330 - DNA, 15 bp, Homo sapiens
ccggcccccggggac

SEQ ID NO: 114331 - DNA, 15 bp, Homo sapiens
gccggcccccgggga

SEQ ID NO: 114332 - DNA, 15 bp, Homo sapiens
ggccggcccccgggg

SEQ ID NO: 114333 - DNA, 15 bp, Homo sapiens
aggccggcccccggg

SEQ ID NO: 114334 - DNA, 15 bp, Homo sapiens
caggccggcccccgg

SEQ ID NO: 114335 - DNA, 15 bp, Homo sapiens
ccaggccggcccccg

SEQ ID NO: 114336 - DNA, 15 bp, Homo sapiens
tccaggccggccccc

SEQ ID NO: 114337 - DNA, 15 bp, Homo sapiens
gtccaggccggcccc

SEQ ID NO: 114338 - DNA, 15 bp, Homo sapiens
ggtccaggccggccc

SEQ ID NO: 114339 - DNA, 15 bp, Homo sapiens
gggtccaggccggcc

SEQ ID NO: 114340 - DNA, 15 bp, Homo sapiens
agggtccaggccggc

SEQ ID NO: 114341 - DNA, 15 bp, Homo sapiens
cagggtccaggccgg

SEQ ID NO: 114342 - DNA, 15 bp, Homo sapiens
ccagggtccaggccg

SEQ ID NO: 114343 - DNA, 15 bp, Homo sapiens
cccagggtccaggcc

SEQ ID NO: 114344 - DNA, 15 bp, Homo sapiens
acccagggtccaggc

SEQ ID NO: 114345 - DNA, 15 bp, Homo sapiens
cacccagggtccagg

SEQ ID NO: 114346 - DNA, 15 bp, Homo sapiens
ccacccagggtccag

SEQ ID NO: 114347 - DNA, 15 bp, Homo sapiens
tccacccagggtcca

SEQ ID NO: 114348 - DNA, 15 bp, Homo sapiens
gtccacccagggtcc

SEQ ID NO: 114349 - DNA, 15 bp, Homo sapiens
tgtccacccagggtc

SEQ ID NO: 114350 - DNA, 15 bp, Homo sapiens
atgtccacccagggt

SEQ ID NO: 114351 - DNA, 15 bp, Homo sapiens
catgtccacccaggg

SEQ ID NO: 114352 - DNA, 15 bp, Homo sapiens
ccatgtccacccagg

SEQ ID NO: 114353 - DNA, 15 bp, Homo sapiens
gccatgtccacccag

SEQ ID NO: 114354 - DNA, 15 bp, Homo sapiens
ggccatgtccaccca

SEQ ID NO: 114355 - DNA, 15 bp, Homo sapiens
tggccatgtccaccc

SEQ ID NO: 114356 - DNA, 15 bp, Homo sapiens
ctggccatgtccacc

SEQ ID NO: 114357 - DNA, 15 bp, Homo sapiens
gctggccatgtccac

SEQ ID NO: 114358 - DNA, 15 bp, Homo sapiens
ggctggccatgtcca

SEQ ID NO: 114359 - DNA, 15 bp, Homo sapiens
gggctggccatgtcc

SEQ ID NO: 114360 - DNA, 15 bp, Homo sapiens
ggggctggccatgtc

SEQ ID NO: 114361 - DNA, 15 bp, Homo sapiens
cggggctggccatgt

SEQ ID NO: 114362 - DNA, 15 bp, Homo sapiens
ccggggctggccatg

SEQ ID NO: 114363 - DNA, 15 bp, Homo sapiens
tccggggctggccat

SEQ ID NO: 114364 - DNA, 15 bp, Homo sapiens
ctccggggctggcca

SEQ ID NO: 114365 - DNA, 15 bp, Homo sapiens
tctccggggctggcc

SEQ ID NO: 114366 - DNA, 15 bp, Homo sapiens
ctctccggggctggc

SEQ ID NO: 114367 - DNA, 15 bp, Homo sapiens
gctctccggggctgg

SEQ ID NO: 114368 - DNA, 15 bp, Homo sapiens
ggctctccggggctg

SEQ ID NO: 114369 - DNA, 15 bp, Homo sapiens
tggctctccggggct

SEQ ID NO: 114370 - DNA, 15 bp, Homo sapiens
ctggctctccggggc

SEQ ID NO: 114371 - DNA, 15 bp, Homo sapiens
cctggctctccgggg

SEQ ID NO: 114372 - DNA, 15 bp, Homo sapiens
ccctggctctccggg

SEQ ID NO: 114373 - DNA, 15 bp, Homo sapiens
gccctggctctccgg

SEQ ID NO: 114374 - DNA, 15 bp, Homo sapiens
ggccctggctctccg

SEQ ID NO: 114375 - DNA, 15 bp, Homo sapiens
tggccctggctctcc

SEQ ID NO: 114376 - DNA, 15 bp, Homo sapiens
ctggccctggctctc

SEQ ID NO: 114377 - DNA, 15 bp, Homo sapiens
cctggccctggctct

SEQ ID NO: 114378 - DNA, 15 bp, Homo sapiens
gcctggccctggctc

SEQ ID NO: 114379 - DNA, 15 bp, Homo sapiens
ggcctggccctggct

SEQ ID NO: 114380 - DNA, 15 bp, Homo sapiens
tggcctggccctggc

SEQ ID NO: 114381 - DNA, 15 bp, Homo sapiens
atggcctggccctgg

SEQ ID NO: 114382 - DNA, 15 bp, Homo sapiens
gatggcctggccctg

SEQ ID NO: 114383 - DNA, 15 bp, Homo sapiens
agatggcctggccct

SEQ ID NO: 114384 - DNA, 15 bp, Homo sapiens
gagatggcctggccc

SEQ ID NO: 114385 - DNA, 15 bp, Homo sapiens
agagatggcctggcc

SEQ ID NO: 114386 - DNA, 15 bp, Homo sapiens
gagagatggcctggc

SEQ ID NO: 114387 - DNA, 15 bp, Homo sapiens
agagagatggcctgg

SEQ ID NO: 114388 - DNA, 15 bp, Homo sapiens
gagagagatggcctg

SEQ ID NO: 114389 - DNA, 15 bp, Homo sapiens
ggagagagatggcct

SEQ ID NO: 114390 - DNA, 15 bp, Homo sapiens
gggagagagatggcc

SEQ ID NO: 114391 - DNA, 15 bp, Homo sapiens
ggggagagagatggc

SEQ ID NO: 114392 - DNA, 15 bp, Homo sapiens
aggggagagagatgg

SEQ ID NO: 114393 - DNA, 15 bp, Homo sapiens
taggggagagagatg

SEQ ID NO: 114394 - DNA, 15 bp, Homo sapiens
gtaggggagagagat

SEQ ID NO: 114395 - DNA, 15 bp, Homo sapiens
agtaggggagagaga

SEQ ID NO: 114396 - DNA, 15 bp, Homo sapiens
gagtaggggagagag

SEQ ID NO: 114397 - DNA, 15 bp, Homo sapiens
agagtaggggagaga

SEQ ID NO: 114398 - DNA, 15 bp, Homo sapiens
cagagtaggggagag

SEQ ID NO: 114399 - DNA, 15 bp, Homo sapiens
gcagagtaggggaga

SEQ ID NO: 114400 - DNA, 15 bp, Homo sapiens
ggcagagtaggggag

SEQ ID NO: 114401 - DNA, 15 bp, Homo sapiens
aggcagagtagggga

SEQ ID NO: 114402 - DNA, 15 bp, Homo sapiens
gaggcagagtagggg

SEQ ID NO: 114403 - DNA, 15 bp, Homo sapiens
tgaggcagagtaggg

SEQ ID NO: 114404 - DNA, 15 bp, Homo sapiens
ctgaggcagagtagg

SEQ ID NO: 114405 - DNA, 15 bp, Homo sapiens
tctgaggcagagtag

SEQ ID NO: 114406 - DNA, 15 bp, Homo sapiens
ctctgaggcagagta

SEQ ID NO: 114407 - DNA, 15 bp, Homo sapiens
cctctgaggcagagt

SEQ ID NO: 114408 - DNA, 15 bp, Homo sapiens
gcctctgaggcagag

SEQ ID NO: 114409 - DNA, 15 bp, Homo sapiens
ggcctctgaggcaga

SEQ ID NO: 114410 - DNA, 15 bp, Homo sapiens
aggcctctgaggcag

SEQ ID NO: 114411 - DNA, 15 bp, Homo sapiens
gaggcctctgaggca

SEQ ID NO: 114412 - DNA, 15 bp, Homo sapiens
cgaggcctctgaggc

SEQ ID NO: 114413 - DNA, 15 bp, Homo sapiens
ccgaggcctctgagg

SEQ ID NO: 114414 - DNA, 15 bp, Homo sapiens
gccgaggcctctgag

SEQ ID NO: 114415 - DNA, 15 bp, Homo sapiens
tgccgaggcctctga

SEQ ID NO: 114416 - DNA, 15 bp, Homo sapiens
ctgccgaggcctctg

SEQ ID NO: 114417 - DNA, 15 bp, Homo sapiens
gctgccgaggcctct

SEQ ID NO: 114418 - DNA, 15 bp, Homo sapiens
agctgccgaggcctc

SEQ ID NO: 114419 - DNA, 15 bp, Homo sapiens
cagctgccgaggcct

SEQ ID NO: 114420 - DNA, 15 bp, Homo sapiens
gcagctgccgaggcc

SEQ ID NO: 114421 - DNA, 15 bp, Homo sapiens
tgcagctgccgaggc

SEQ ID NO: 114422 - DNA, 15 bp, Homo sapiens
gtgcagctgccgagg

SEQ ID NO: 114423 - DNA, 15 bp, Homo sapiens
agtgcagctgccgag

SEQ ID NO: 114424 - DNA, 15 bp, Homo sapiens
cagtgcagctgccga

SEQ ID NO: 114425 - DNA, 15 bp, Homo sapiens
acagtgcagctgccg

SEQ ID NO: 114426 - DNA, 15 bp, Homo sapiens
cacagtgcagctgcc

SEQ ID NO: 114427 - DNA, 15 bp, Homo sapiens
ccacagtgcagctgc

SEQ ID NO: 114428 - DNA, 15 bp, Homo sapiens
cccacagtgcagctg

SEQ ID NO: 114429 - DNA, 15 bp, Homo sapiens
ccccacagtgcagct

SEQ ID NO: 114430 - DNA, 15 bp, Homo sapiens
accccacagtgcagc

SEQ ID NO: 114431 - DNA, 15 bp, Homo sapiens
caccccacagtgcag

SEQ ID NO: 114432 - DNA, 15 bp, Homo sapiens
ccaccccacagtgca

SEQ ID NO: 114433 - DNA, 15 bp, Homo sapiens
cccaccccacagtgc

SEQ ID NO: 114434 - DNA, 15 bp, Homo sapiens
acccaccccacagtg

SEQ ID NO: 114435 - DNA, 15 bp, Homo sapiens
cacccaccccacagt

SEQ ID NO: 114436 - DNA, 15 bp, Homo sapiens
ccacccaccccacag

SEQ ID NO: 114437 - DNA, 15 bp, Homo sapiens
cccacccaccccaca

SEQ ID NO: 114438 - DNA, 15 bp, Homo sapiens
ccccacccaccccac

SEQ ID NO: 114439 - DNA, 15 bp, Homo sapiens
gccccacccacccca

SEQ ID NO: 114440 - DNA, 15 bp, Homo sapiens
agccccacccacccc

SEQ ID NO: 114441 - DNA, 15 bp, Homo sapiens
cagccccacccaccc

SEQ ID NO: 114442 - DNA, 15 bp, Homo sapiens
tcagccccacccacc

SEQ ID NO: 114443 - DNA, 15 bp, Homo sapiens
ttcagccccacccac

SEQ ID NO: 114444 - DNA, 15 bp, Homo sapiens
gttcagccccaccca

SEQ ID NO: 114445 - DNA, 15 bp, Homo sapiens
tgttcagccccaccc

SEQ ID NO: 114446 - DNA, 15 bp, Homo sapiens
gtgttcagccccacc

SEQ ID NO: 114447 - DNA, 15 bp, Homo sapiens
tgtgttcagccccac

SEQ ID NO: 114448 - DNA, 15 bp, Homo sapiens
ctgtgttcagcccca

SEQ ID NO: 114449 - DNA, 15 bp, Homo sapiens
cctgtgttcagcccc

SEQ ID NO: 114450 - DNA, 15 bp, Homo sapiens
acctgtgttcagccc

SEQ ID NO: 114451 - DNA, 15 bp, Homo sapiens
gacctgtgttcagcc

SEQ ID NO: 114452 - DNA, 15 bp, Homo sapiens
ggacctgtgttcagc

SEQ ID NO: 114453 - DNA, 15 bp, Homo sapiens
gggacctgtgttcag

SEQ ID NO: 114454 - DNA, 15 bp, Homo sapiens
tgggacctgtgttca

SEQ ID NO: 114455 - DNA, 15 bp, Homo sapiens
ctgggacctgtgttc

SEQ ID NO: 114456 - DNA, 15 bp, Homo sapiens
tctgggacctgtgtt

SEQ ID NO: 114457 - DNA, 15 bp, Homo sapiens
ttctgggacctgtgt

SEQ ID NO: 114458 - DNA, 15 bp, Homo sapiens
cttctgggacctgtg

SEQ ID NO: 114459 - DNA, 15 bp, Homo sapiens
ccttctgggacctgt

SEQ ID NO: 114460 - DNA, 15 bp, Homo sapiens
accttctgggacctg

SEQ ID NO: 114461 - DNA, 15 bp, Homo sapiens
gaccttctgggacct

SEQ ID NO: 114462 - DNA, 15 bp, Homo sapiens
ggaccttctgggacc

SEQ ID NO: 114463 - DNA, 15 bp, Homo sapiens
gggaccttctgggac

SEQ ID NO: 114464 - DNA, 15 bp, Homo sapiens
tgggaccttctggga

SEQ ID NO: 114465 - DNA, 15 bp, Homo sapiens
gtgggaccttctggg

SEQ ID NO: 114466 - DNA, 15 bp, Homo sapiens
agtgggaccttctgg

SEQ ID NO: 114467 - DNA, 15 bp, Homo sapiens
gagtgggaccttctg

SEQ ID NO: 114468 - DNA, 15 bp, Homo sapiens
tgagtgggaccttct

SEQ ID NO: 114469 - DNA, 15 bp, Homo sapiens
ctgagtgggaccttc

SEQ ID NO: 114470 - DNA, 15 bp, Homo sapiens
cctgagtgggacctt

SEQ ID NO: 114471 - DNA, 15 bp, Homo sapiens
tcctgagtgggacct

SEQ ID NO: 114472 - DNA, 15 bp, Homo sapiens
gtcctgagtgggacc

SEQ ID NO: 114473 - DNA, 15 bp, Homo sapiens
ggtcctgagtgggac

SEQ ID NO: 114474 - DNA, 15 bp, Homo sapiens
gggtcctgagtggga

SEQ ID NO: 114475 - DNA, 15 bp, Homo sapiens
agggtcctgagtggg

SEQ ID NO: 114476 - DNA, 15 bp, Homo sapiens
cagggtcctgagtgg

SEQ ID NO: 114477 - DNA, 15 bp, Homo sapiens
gcagggtcctgagtg

SEQ ID NO: 114478 - DNA, 15 bp, Homo sapiens
agcagggtcctgagt

SEQ ID NO: 114479 - DNA, 15 bp, Homo sapiens
cagcagggtcctgag

SEQ ID NO: 114480 - DNA, 15 bp, Homo sapiens
acagcagggtcctga

SEQ ID NO: 114481 - DNA, 15 bp, Homo sapiens
cacagcagggtcctg

SEQ ID NO: 114482 - DNA, 15 bp, Homo sapiens
gcacagcagggtcct

SEQ ID NO: 114483 - DNA, 15 bp, Homo sapiens
tgcacagcagggtcc

SEQ ID NO: 114484 - DNA, 15 bp, Homo sapiens
gtgcacagcagggtc

SEQ ID NO: 114485 - DNA, 15 bp, Homo sapiens
tgtgcacagcagggt

SEQ ID NO: 114486 - DNA, 15 bp, Homo sapiens
gtgtgcacagcaggg

SEQ ID NO: 114487 - DNA, 15 bp, Homo sapiens
agtgtgcacagcagg

SEQ ID NO: 114488 - DNA, 15 bp, Homo sapiens
aagtgtgcacagcag

SEQ ID NO: 114489 - DNA, 15 bp, Homo sapiens
aaagtgtgcacagca

SEQ ID NO: 114490 - DNA, 15 bp, Homo sapiens
aaaagtgtgcacagc

SEQ ID NO: 114491 - DNA, 15 bp, Homo sapiens
caaaagtgtgcacag

SEQ ID NO: 114492 - DNA, 15 bp, Homo sapiens
tcaaaagtgtgcaca

SEQ ID NO: 114493 - DNA, 15 bp, Homo sapiens
atcaaaagtgtgcac

SEQ ID NO: 114494 - DNA, 15 bp, Homo sapiens
aatcaaaagtgtgca

SEQ ID NO: 114495 - DNA, 15 bp, Homo sapiens
aaatcaaaagtgtgc

SEQ ID NO: 114496 - DNA, 15 bp, Homo sapiens
aaaatcaaaagtgtg

SEQ ID NO: 114497 - DNA, 15 bp, Homo sapiens
taaaatcaaaagtgt

SEQ ID NO: 114498 - DNA, 15 bp, Homo sapiens
ttaaaatcaaaagtg

SEQ ID NO: 114499 - DNA, 15 bp, Homo sapiens
attaaaatcaaaagt

SEQ ID NO: 114500 - DNA, 15 bp, Homo sapiens
tattaaaatcaaaag

SEQ ID NO: 114501 - DNA, 15 bp, Homo sapiens
ttattaaaatcaaaa

SEQ ID NO: 114502 - DNA, 15 bp, Homo sapiens
tttattaaaatcaaa

SEQ ID NO: 114503 - DNA, 15 bp, Homo sapiens
ttttattaaaatcaa

SEQ ID NO: 114504 - DNA, 15 bp, Homo sapiens
attttattaaaatca

SEQ ID NO: 114505 - DNA, 15 bp, Homo sapiens
gattttattaaaatc

SEQ ID NO: 114506 - DNA, 15 bp, Homo sapiens
tgattttattaaaat

SEQ ID NO: 114507 - DNA, 15 bp, Homo sapiens
ctgattttattaaaa

SEQ ID NO: 114508 - DNA, 15 bp, Homo sapiens
tctgattttattaaa

SEQ ID NO: 114509 - DNA, 15 bp, Homo sapiens
ttctgattttattaa

SEQ ID NO: 114510 - DNA, 15 bp, Homo sapiens
attctgattttatta

SEQ ID NO: 114511 - DNA, 15 bp, Homo sapiens
cattctgattttatt

SEQ ID NO: 114512 - DNA, 15 bp, Homo sapiens
gcattctgattttat

SEQ ID NO: 114513 - DNA, 15 bp, Homo sapiens
cgcattctgatttta

SEQ ID NO: 114514 - DNA, 15 bp, Homo sapiens
gcgcattctgatttt

SEQ ID NO: 114515 - DNA, 15 bp, Homo sapiens
tgcgcattctgattt

SEQ ID NO: 114516 - DNA, 15 bp, Homo sapiens
gtgcgcattctgatt

SEQ ID NO: 114517 - DNA, 15 bp, Homo sapiens
tgtgcgcattctgat

SEQ ID NO: 114518 - DNA, 15 bp, Homo sapiens
ctgtgcgcattctga

SEQ ID NO: 114519 - DNA, 15 bp, Homo sapiens
gctgtgcgcattctg

SEQ ID NO: 114520 - DNA, 15 bp, Homo sapiens
tgctgtgcgcattct

SEQ ID NO: 114521 - DNA, 15 bp, Homo sapiens
atgctgtgcgcattc

SEQ ID NO: 114522 - DNA, 15 bp, Homo sapiens
gatgctgtgcgcatt

SEQ ID NO: 114523 - DNA, 15 bp, Homo sapiens
agatgctgtgcgcat

SEQ ID NO: 114524 - DNA, 15 bp, Homo sapiens
cagatgctgtgcgca

SEQ ID NO: 114525 - DNA, 15 bp, Homo sapiens
gcagatgctgtgcgc

SEQ ID NO: 114526 - DNA, 15 bp, Homo sapiens
tgcagatgctgtgcg

SEQ ID NO: 114527 - DNA, 15 bp, Homo sapiens
ctgcagatgctgtgc

SEQ ID NO: 114528 - DNA, 15 bp, Homo sapiens
actgcagatgctgtg

SEQ ID NO: 114529 - DNA, 15 bp, Homo sapiens
gactgcagatgctgt

SEQ ID NO: 114530 - DNA, 15 bp, Homo sapiens
agactgcagatgctg

SEQ ID NO: 114531 - DNA, 15 bp, Homo sapiens
tagactgcagatgct

SEQ ID NO: 114532 - DNA, 15 bp, Homo sapiens
ctagactgcagatgc

SEQ ID NO: 114533 - DNA, 15 bp, Homo sapiens
gctagactgcagatg

SEQ ID NO: 114534 - DNA, 15 bp, Homo sapiens
ggctagactgcagat

SEQ ID NO: 114535 - DNA, 15 bp, Homo sapiens
aggctagactgcaga

SEQ ID NO: 114536 - DNA, 15 bp, Homo sapiens
aaggctagactgcag

SEQ ID NO: 114537 - DNA, 15 bp, Homo sapiens
aaaggctagactgca

SEQ ID NO: 114538 - DNA, 15 bp, Homo sapiens
taaaggctagactgc

SEQ ID NO: 114539 - DNA, 15 bp, Homo sapiens
ttaaaggctagactg

SEQ ID NO: 114540 - DNA, 15 bp, Homo sapiens
tttaaaggctagact

SEQ ID NO: 114541 - DNA, 15 bp, Homo sapiens
gtttaaaggctagac

SEQ ID NO: 114542 - DNA, 15 bp, Homo sapiens
cgtttaaaggctaga

SEQ ID NO: 114543 - DNA, 15 bp, Homo sapiens
tcgtttaaaggctag

SEQ ID NO: 114544 - DNA, 15 bp, Homo sapiens
ctcgtttaaaggcta

SEQ ID NO: 114545 - DNA, 15 bp, Homo sapiens
gctcgtttaaaggct

SEQ ID NO: 114546 - DNA, 15 bp, Homo sapiens
tgctcgtttaaaggc

SEQ ID NO: 114547 - DNA, 15 bp, Homo sapiens
gtgctcgtttaaagg

SEQ ID NO: 114548 - DNA, 15 bp, Homo sapiens
tgtgctcgtttaaag

SEQ ID NO: 114549 - DNA, 15 bp, Homo sapiens
ctgtgctcgtttaaa

SEQ ID NO: 114550 - DNA, 15 bp, Homo sapiens
gctgtgctcgtttaa

SEQ ID NO: 114551 - DNA, 15 bp, Homo sapiens
agctgtgctcgttta

SEQ ID NO: 114552 - DNA, 15 bp, Homo sapiens
cagctgtgctcgttt

SEQ ID NO: 114553 - DNA, 15 bp, Homo sapiens
acagctgtgctcgtt

SEQ ID NO: 114554 - DNA, 15 bp, Homo sapiens
gacagctgtgctcgt

SEQ ID NO: 114555 - DNA, 15 bp, Homo sapiens
ggacagctgtgctcg

SEQ ID NO: 114556 - DNA, 15 bp, Homo sapiens
aggacagctgtgctc

SEQ ID NO: 114557 - DNA, 15 bp, Homo sapiens
caggacagctgtgct

SEQ ID NO: 114558 - DNA, 15 bp, Homo sapiens
ccaggacagctgtgc

SEQ ID NO: 114559 - DNA, 15 bp, Homo sapiens
gccaggacagctgtg

SEQ ID NO: 114560 - DNA, 15 bp, Homo sapiens
tgccaggacagctgt

SEQ ID NO: 114561 - DNA, 15 bp, Homo sapiens
ctgccaggacagctg

SEQ ID NO: 114562 - DNA, 15 bp, Homo sapiens
actgccaggacagct

SEQ ID NO: 114563 - DNA, 15 bp, Homo sapiens
gactgccaggacagc

SEQ ID NO: 114564 - DNA, 15 bp, Homo sapiens
tgactgccaggacag

SEQ ID NO: 114565 - DNA, 15 bp, Homo sapiens
gtgactgccaggaca

SEQ ID NO: 114566 - DNA, 15 bp, Homo sapiens
cgtgactgccaggac

SEQ ID NO: 114567 - DNA, 15 bp, Homo sapiens
ccgtgactgccagga

SEQ ID NO: 114568 - DNA, 15 bp, Homo sapiens
tccgtgactgccagg

SEQ ID NO: 114569 - DNA, 15 bp, Homo sapiens
ttccgtgactgccag

SEQ ID NO: 114570 - DNA, 15 bp, Homo sapiens
cttccgtgactgcca

SEQ ID NO: 114571 - DNA, 15 bp, Homo sapiens
acttccgtgactgcc

SEQ ID NO: 114572 - DNA, 15 bp, Homo sapiens
aacttccgtgactgc

SEQ ID NO: 114573 - DNA, 15 bp, Homo sapiens
gaacttccgtgactg

SEQ ID NO: 114574 - DNA, 15 bp, Homo sapiens
agaacttccgtgact

SEQ ID NO: 114575 - DNA, 15 bp, Homo sapiens
aagaacttccgtgac

SEQ ID NO: 114576 - DNA, 15 bp, Homo sapiens
gaagaacttccgtga

SEQ ID NO: 114577 - DNA, 15 bp, Homo sapiens
agaagaacttccgtg

SEQ ID NO: 114578 - DNA, 15 bp, Homo sapiens
cagaagaacttccgt

SEQ ID NO: 114579 - DNA, 15 bp, Homo sapiens
ccagaagaacttccg

SEQ ID NO: 114580 - DNA, 15 bp, Homo sapiens
cccagaagaacttcc

SEQ ID NO: 114581 - DNA, 15 bp, Homo sapiens
ccccagaagaacttc

SEQ ID NO: 114582 - DNA, 15 bp, Homo sapiens
gccccagaagaactt

SEQ ID NO: 114583 - DNA, 15 bp, Homo sapiens
cgccccagaagaact

SEQ ID NO: 114584 - DNA, 15 bp, Homo sapiens
ccgccccagaagaac

SEQ ID NO: 114585 - DNA, 15 bp, Homo sapiens
accgccccagaagaa

SEQ ID NO: 114586 - DNA, 15 bp, Homo sapiens
caccgccccagaaga

SEQ ID NO: 114587 - DNA, 15 bp, Homo sapiens
ccaccgccccagaag

SEQ ID NO: 114588 - DNA, 15 bp, Homo sapiens
cccaccgccccagaa

SEQ ID NO: 114589 - DNA, 15 bp, Homo sapiens
tcccaccgccccaga

SEQ ID NO: 114590 - DNA, 15 bp, Homo sapiens
gtcccaccgccccag

SEQ ID NO: 114591 - DNA, 15 bp, Homo sapiens
ggtcccaccgcccca

SEQ ID NO: 114592 - DNA, 15 bp, Homo sapiens
aggtcccaccgcccc

SEQ ID NO: 114593 - DNA, 15 bp, Homo sapiens
gaggtcccaccgccc

SEQ ID NO: 114594 - DNA, 15 bp, Homo sapiens
tgaggtcccaccgcc

SEQ ID NO: 114595 - DNA, 15 bp, Homo sapiens
ctgaggtcccaccgc

SEQ ID NO: 114596 - DNA, 15 bp, Homo sapiens
gctgaggtcccaccg

SEQ ID NO: 114597 - DNA, 15 bp, Homo sapiens
tgctgaggtcccacc

SEQ ID NO: 114598 - DNA, 15 bp, Homo sapiens
atgctgaggtcccac

SEQ ID NO: 114599 - DNA, 15 bp, Homo sapiens
aatgctgaggtccca

SEQ ID NO: 114600 - DNA, 15 bp, Homo sapiens
gaatgctgaggtccc

SEQ ID NO: 114601 - DNA, 15 bp, Homo sapiens
ggaatgctgaggtcc

SEQ ID NO: 114602 - DNA, 15 bp, Homo sapiens
aggaatgctgaggtc

SEQ ID NO: 114603 - DNA, 15 bp, Homo sapiens
aaggaatgctgaggt

SEQ ID NO: 114604 - DNA, 15 bp, Homo sapiens
aaaggaatgctgagg

SEQ ID NO: 114605 - DNA, 15 bp, Homo sapiens
caaaggaatgctgag

SEQ ID NO: 114606 - DNA, 15 bp, Homo sapiens
gcaaaggaatgctga

SEQ ID NO: 114607 - DNA, 15 bp, Homo sapiens
agcaaaggaatgctg

SEQ ID NO: 114608 - DNA, 15 bp, Homo sapiens
cagcaaaggaatgct

SEQ ID NO: 114609 - DNA, 15 bp, Homo sapiens
ccagcaaaggaatgc

SEQ ID NO: 114610 - DNA, 15 bp, Homo sapiens
accagcaaaggaatg

SEQ ID NO: 114611 - DNA, 15 bp, Homo sapiens
taccagcaaaggaat

SEQ ID NO: 114612 - DNA, 15 bp, Homo sapiens
gtaccagcaaaggaa

SEQ ID NO: 114613 - DNA, 15 bp, Homo sapiens
agtaccagcaaagga

SEQ ID NO: 114614 - DNA, 15 bp, Homo sapiens
cagtaccagcaaagg

SEQ ID NO: 114615 - DNA, 15 bp, Homo sapiens
gcagtaccagcaaag

SEQ ID NO: 114616 - DNA, 15 bp, Homo sapiens
agcagtaccagcaaa

SEQ ID NO: 114617 - DNA, 15 bp, Homo sapiens
tagcagtaccagcaa

SEQ ID NO: 114618 - DNA, 15 bp, Homo sapiens
gtagcagtaccagca

SEQ ID NO: 114619 - DNA, 15 bp, Homo sapiens
tgtagcagtaccagc

SEQ ID NO: 114620 - DNA, 15 bp, Homo sapiens
ttgtagcagtaccag

SEQ ID NO: 114621 - DNA, 15 bp, Homo sapiens
cttgtagcagtacca

SEQ ID NO: 114622 - DNA, 15 bp, Homo sapiens
tcttgtagcagtacc

SEQ ID NO: 114623 - DNA, 15 bp, Homo sapiens
ttcttgtagcagtac

SEQ ID NO: 114624 - DNA, 15 bp, Homo sapiens
tttcttgtagcagta

SEQ ID NO: 114625 - DNA, 15 bp, Homo sapiens
ctttcttgtagcagt

SEQ ID NO: 114626 - DNA, 15 bp, Homo sapiens
cctttcttgtagcag

SEQ ID NO: 114627 - DNA, 15 bp, Homo sapiens
tcctttcttgtagca

SEQ ID NO: 114628 - DNA, 15 bp, Homo sapiens
gtcctttcttgtagc

SEQ ID NO: 114629 - DNA, 15 bp, Homo sapiens
tgtcctttcttgtag

SEQ ID NO: 114630 - DNA, 15 bp, Homo sapiens
ttgtcctttcttgta

SEQ ID NO: 114631 - DNA, 15 bp, Homo sapiens
attgtcctttcttgt

SEQ ID NO: 114632 - DNA, 15 bp, Homo sapiens
cattgtcctttcttg

SEQ ID NO: 114633 - DNA, 15 bp, Homo sapiens
ccattgtcctttctt

SEQ ID NO: 114634 - DNA, 15 bp, Homo sapiens
tccattgtcctttct

SEQ ID NO: 114635 - DNA, 15 bp, Homo sapiens
gtccattgtcctttc

SEQ ID NO: 114636 - DNA, 15 bp, Homo sapiens
ggtccattgtccttt

SEQ ID NO: 114637 - DNA, 15 bp, Homo sapiens
tggtccattgtcctt

SEQ ID NO: 114638 - DNA, 15 bp, Homo sapiens
ttggtccattgtcct

SEQ ID NO: 114639 - DNA, 15 bp, Homo sapiens
cttggtccattgtcc

SEQ ID NO: 114640 - DNA, 15 bp, Homo sapiens
acttggtccattgtc

SEQ ID NO: 114641 - DNA, 15 bp, Homo sapiens
tacttggtccattgt

SEQ ID NO: 114642 - DNA, 15 bp, Homo sapiens
ctacttggtccattg

SEQ ID NO: 114643 - DNA, 15 bp, Homo sapiens
gctacttggtccatt

SEQ ID NO: 114644 - DNA, 15 bp, Homo sapiens
agctacttggtccat

SEQ ID NO: 114645 - DNA, 15 bp, Homo sapiens
aagctacttggtcca

SEQ ID NO: 114646 - DNA, 15 bp, Homo sapiens
taagctacttggtcc

SEQ ID NO: 114647 - DNA, 15 bp, Homo sapiens
ttaagctacttggtc

SEQ ID NO: 114648 - DNA, 15 bp, Homo sapiens
tttaagctacttggt

SEQ ID NO: 114649 - DNA, 15 bp, Homo sapiens
ctttaagctacttgg

SEQ ID NO: 114650 - DNA, 15 bp, Homo sapiens
gctttaagctacttg

SEQ ID NO: 114651 - DNA, 15 bp, Homo sapiens
tgctttaagctactt

SEQ ID NO: 114652 - DNA, 15 bp, Homo sapiens
ttgctttaagctact

SEQ ID NO: 114653 - DNA, 15 bp, Homo sapiens
gttgctttaagctac

SEQ ID NO: 114654 - DNA, 15 bp, Homo sapiens
tgttgctttaagcta

SEQ ID NO: 114655 - DNA, 15 bp, Homo sapiens
ctgttgctttaagct

SEQ ID NO: 114656 - DNA, 15 bp, Homo sapiens
tctgttgctttaagc

SEQ ID NO: 114657 - DNA, 15 bp, Homo sapiens
ttctgttgctttaag

SEQ ID NO: 114658 - DNA, 15 bp, Homo sapiens
tttctgttgctttaa

SEQ ID NO: 114659 - DNA, 15 bp, Homo sapiens
gtttctgttgcttta

SEQ ID NO: 114660 - DNA, 15 bp, Homo sapiens
tgtttctgttgcttt

SEQ ID NO: 114661 - DNA, 15 bp, Homo sapiens
atgtttctgttgctt

SEQ ID NO: 114662 - DNA, 15 bp, Homo sapiens
aatgtttctgttgct

SEQ ID NO: 114663 - DNA, 15 bp, Homo sapiens
aaatgtttctgttgc

SEQ ID NO: 114664 - DNA, 15 bp, Homo sapiens
gaaatgtttctgttg

SEQ ID NO: 114665 - DNA, 15 bp, Homo sapiens
agaaatgtttctgtt

SEQ ID NO: 114666 - DNA, 15 bp, Homo sapiens
gagaaatgtttctgt

SEQ ID NO: 114667 - DNA, 15 bp, Homo sapiens
ggagaaatgtttctg

SEQ ID NO: 114668 - DNA, 15 bp, Homo sapiens
gggagaaatgtttct

SEQ ID NO: 114669 - DNA, 15 bp, Homo sapiens
tgggagaaatgtttc

SEQ ID NO: 114670 - DNA, 15 bp, Homo sapiens
gtgggagaaatgttt

SEQ ID NO: 114671 - DNA, 15 bp, Homo sapiens
tgtgggagaaatgtt

SEQ ID NO: 114672 - DNA, 15 bp, Homo sapiens
ctgtgggagaaatgt

SEQ ID NO: 114673 - DNA, 15 bp, Homo sapiens
gctgtgggagaaatg

SEQ ID NO: 114674 - DNA, 15 bp, Homo sapiens
agctgtgggagaaat

SEQ ID NO: 114675 - DNA, 15 bp, Homo sapiens
gagctgtgggagaaa

SEQ ID NO: 114676 - DNA, 15 bp, Homo sapiens
agagctgtgggagaa

SEQ ID NO: 114677 - DNA, 15 bp, Homo sapiens
cagagctgtgggaga

SEQ ID NO: 114678 - DNA, 15 bp, Homo sapiens
ccagagctgtgggag

SEQ ID NO: 114679 - DNA, 15 bp, Homo sapiens
tccagagctgtggga

SEQ ID NO: 114680 - DNA, 15 bp, Homo sapiens
ctccagagctgtggg

SEQ ID NO: 114681 - DNA, 15 bp, Homo sapiens
cctccagagctgtgg

SEQ ID NO: 114682 - DNA, 15 bp, Homo sapiens
gcctccagagctgtg

SEQ ID NO: 114683 - DNA, 15 bp, Homo sapiens
agcctccagagctgt

SEQ ID NO: 114684 - DNA, 15 bp, Homo sapiens
cagcctccagagctg

SEQ ID NO: 114685 - DNA, 15 bp, Homo sapiens
ccagcctccagagct

SEQ ID NO: 114686 - DNA, 15 bp, Homo sapiens
tccagcctccagagc

SEQ ID NO: 114687 - DNA, 15 bp, Homo sapiens
ttccagcctccagag

SEQ ID NO: 114688 - DNA, 15 bp, Homo sapiens
cttccagcctccaga

SEQ ID NO: 114689 - DNA, 15 bp, Homo sapiens
acttccagcctccag

SEQ ID NO: 114690 - DNA, 15 bp, Homo sapiens
aacttccagcctcca

SEQ ID NO: 114691 - DNA, 15 bp, Homo sapiens
gaacttccagcctcc

SEQ ID NO: 114692 - DNA, 15 bp, Homo sapiens
tgaacttccagcctc

SEQ ID NO: 114693 - DNA, 15 bp, Homo sapiens
ttgaacttccagcct

SEQ ID NO: 114694 - DNA, 15 bp, Homo sapiens
tttgaacttccagcc

SEQ ID NO: 114695 - DNA, 15 bp, Homo sapiens
ttttgaacttccagc

SEQ ID NO: 114696 - DNA, 15 bp, Homo sapiens
attttgaacttccag

SEQ ID NO: 114697 - DNA, 15 bp, Homo sapiens
gattttgaacttcca

SEQ ID NO: 114698 - DNA, 15 bp, Homo sapiens
tgattttgaacttcc

SEQ ID NO: 114699 - DNA, 15 bp, Homo sapiens
ttgattttgaacttc

SEQ ID NO: 114700 - DNA, 15 bp, Homo sapiens
cttgattttgaactt

SEQ ID NO: 114701 - DNA, 15 bp, Homo sapiens
ccttgattttgaact

SEQ ID NO: 114702 - DNA, 15 bp, Homo sapiens
gccttgattttgaac

SEQ ID NO: 114703 - DNA, 15 bp, Homo sapiens
cgccttgattttgaa

SEQ ID NO: 114704 - DNA, 15 bp, Homo sapiens
acgccttgattttga

SEQ ID NO: 114705 - DNA, 15 bp, Homo sapiens
gacgccttgattttg

SEQ ID NO: 114706 - DNA, 15 bp, Homo sapiens
tgacgccttgatttt

SEQ ID NO: 114707 - DNA, 15 bp, Homo sapiens
ctgacgccttgattt

SEQ ID NO: 114708 - DNA, 15 bp, Homo sapiens
gctgacgccttgatt

SEQ ID NO: 114709 - DNA, 15 bp, Homo sapiens
cgctgacgccttgat

SEQ ID NO: 114710 - DNA, 15 bp, Homo sapiens
ccgctgacgccttga

SEQ ID NO: 114711 - DNA, 15 bp, Homo sapiens
cccgctgacgccttg

SEQ ID NO: 114712 - DNA, 15 bp, Homo sapiens
ccccgctgacgcctt

SEQ ID NO: 114713 - DNA, 15 bp, Homo sapiens
gccccgctgacgcct

SEQ ID NO: 114714 - DNA, 15 bp, Homo sapiens
agccccgctgacgcc

SEQ ID NO: 114715 - DNA, 15 bp, Homo sapiens
cagccccgctgacgc

SEQ ID NO: 114716 - DNA, 15 bp, Homo sapiens
ccagccccgctgacg

SEQ ID NO: 114717 - DNA, 15 bp, Homo sapiens
accagccccgctgac

SEQ ID NO: 114718 - DNA, 15 bp, Homo sapiens
aaccagccccgctga

SEQ ID NO: 114719 - DNA, 15 bp, Homo sapiens
gaaccagccccgctg

SEQ ID NO: 114720 - DNA, 15 bp, Homo sapiens
ggaaccagccccgct

SEQ ID NO: 114721 - DNA, 15 bp, Homo sapiens
aggaaccagccccgc

SEQ ID NO: 114722 - DNA, 15 bp, Homo sapiens
gaggaaccagccccg

SEQ ID NO: 114723 - DNA, 15 bp, Homo sapiens
ggaggaaccagcccc

SEQ ID NO: 114724 - DNA, 15 bp, Homo sapiens
tggaggaaccagccc

SEQ ID NO: 114725 - DNA, 15 bp, Homo sapiens
ctggaggaaccagcc

SEQ ID NO: 114726 - DNA, 15 bp, Homo sapiens
tctggaggaaccagc

SEQ ID NO: 114727 - DNA, 15 bp, Homo sapiens
ctctggaggaaccag

SEQ ID NO: 114728 - DNA, 15 bp, Homo sapiens
cctctggaggaacca

SEQ ID NO: 114729 - DNA, 15 bp, Homo sapiens
gcctctggaggaacc

SEQ ID NO: 114730 - DNA, 15 bp, Homo sapiens
agcctctggaggaac

SEQ ID NO: 114731 - DNA, 15 bp, Homo sapiens
cagcctctggaggaa

SEQ ID NO: 114732 - DNA, 15 bp, Homo sapiens
ccagcctctggagga

SEQ ID NO: 114733 - DNA, 15 bp, Homo sapiens
cccagcctctggagg

SEQ ID NO: 114734 - DNA, 15 bp, Homo sapiens
tcccagcctctggag

SEQ ID NO: 114735 - DNA, 15 bp, Homo sapiens
ctcccagcctctgga

SEQ ID NO: 114736 - DNA, 15 bp, Homo sapiens
tctcccagcctctgg

SEQ ID NO: 114737 - DNA, 15 bp, Homo sapiens
ctctcccagcctctg

SEQ ID NO: 114738 - DNA, 15 bp, Homo sapiens
tctctcccagcctct

SEQ ID NO: 114739 - DNA, 15 bp, Homo sapiens
ctctctcccagcctc

SEQ ID NO: 114740 - DNA, 15 bp, Homo sapiens
actctctcccagcct

SEQ ID NO: 114741 - DNA, 15 bp, Homo sapiens
gactctctcccagcc

SEQ ID NO: 114742 - DNA, 15 bp, Homo sapiens
agactctctcccagc

SEQ ID NO: 114743 - DNA, 15 bp, Homo sapiens
cagactctctcccag

SEQ ID NO: 114744 - DNA, 15 bp, Homo sapiens
gcagactctctccca

SEQ ID NO: 114745 - DNA, 15 bp, Homo sapiens
agcagactctctccc

SEQ ID NO: 114746 - DNA, 15 bp, Homo sapiens
gagcagactctctcc

SEQ ID NO: 114747 - DNA, 15 bp, Homo sapiens
agagcagactctctc

SEQ ID NO: 114748 - DNA, 15 bp, Homo sapiens
tagagcagactctct

SEQ ID NO: 114749 - DNA, 15 bp, Homo sapiens
ctagagcagactctc

SEQ ID NO: 114750 - DNA, 15 bp, Homo sapiens
cctagagcagactct

SEQ ID NO: 114751 - DNA, 15 bp, Homo sapiens
gcctagagcagactc

SEQ ID NO: 114752 - DNA, 15 bp, Homo sapiens
ggcctagagcagact

SEQ ID NO: 114753 - DNA, 15 bp, Homo sapiens
aggcctagagcagac

SEQ ID NO: 114754 - DNA, 15 bp, Homo sapiens
caggcctagagcaga

SEQ ID NO: 114755 - DNA, 15 bp, Homo sapiens
acaggcctagagcag

SEQ ID NO: 114756 - DNA, 15 bp, Homo sapiens
aacaggcctagagca

SEQ ID NO: 114757 - DNA, 15 bp, Homo sapiens
aaacaggcctagagc

SEQ ID NO: 114758 - DNA, 15 bp, Homo sapiens
gaaacaggcctagag

SEQ ID NO: 114759 - DNA, 15 bp, Homo sapiens
ggaaacaggcctaga

SEQ ID NO: 114760 - DNA, 15 bp, Homo sapiens
aggaaacaggcctag

SEQ ID NO: 114761 - DNA, 15 bp, Homo sapiens
caggaaacaggccta

SEQ ID NO: 114762 - DNA, 15 bp, Homo sapiens
ccaggaaacaggcct

SEQ ID NO: 114763 - DNA, 15 bp, Homo sapiens
gccaggaaacaggcc

SEQ ID NO: 114764 - DNA, 15 bp, Homo sapiens
ggccaggaaacaggc

SEQ ID NO: 114765 - DNA, 15 bp, Homo sapiens
aggccaggaaacagg

SEQ ID NO: 114766 - DNA, 15 bp, Homo sapiens
gaggccaggaaacag

SEQ ID NO: 114767 - DNA, 15 bp, Homo sapiens
cgaggccaggaaaca

SEQ ID NO: 114768 - DNA, 15 bp, Homo sapiens
ccgaggccaggaaac

SEQ ID NO: 114769 - DNA, 15 bp, Homo sapiens
cccgaggccaggaaa

SEQ ID NO: 114770 - DNA, 15 bp, Homo sapiens
ccccgaggccaggaa

SEQ ID NO: 114771 - DNA, 15 bp, Homo sapiens
accccgaggccagga

SEQ ID NO: 114772 - DNA, 15 bp, Homo sapiens
caccccgaggccagg

SEQ ID NO: 114773 - DNA, 15 bp, Homo sapiens
gcaccccgaggccag

SEQ ID NO: 114774 - DNA, 15 bp, Homo sapiens
ggcaccccgaggcca

SEQ ID NO: 114775 - DNA, 15 bp, Homo sapiens
tggcaccccgaggcc

SEQ ID NO: 114776 - DNA, 15 bp, Homo sapiens
ctggcaccccgaggc

SEQ ID NO: 114777 - DNA, 15 bp, Homo sapiens
gctggcaccccgagg

SEQ ID NO: 114778 - DNA, 15 bp, Homo sapiens
cgctggcaccccgag

SEQ ID NO: 114779 - DNA, 15 bp, Homo sapiens
ccgctggcaccccga

SEQ ID NO: 114780 - DNA, 15 bp, Homo sapiens
gccgctggcaccccg

SEQ ID NO: 114781 - DNA, 15 bp, Homo sapiens
ggccgctggcacccc

SEQ ID NO: 114782 - DNA, 15 bp, Homo sapiens
aggccgctggcaccc

SEQ ID NO: 114783 - DNA, 15 bp, Homo sapiens
gaggccgctggcacc

SEQ ID NO: 114784 - DNA, 15 bp, Homo sapiens
tgaggccgctggcac

SEQ ID NO: 114785 - DNA, 15 bp, Homo sapiens
gtgaggccgctggca

SEQ ID NO: 114786 - DNA, 15 bp, Homo sapiens
tgtgaggccgctggc

SEQ ID NO: 114787 - DNA, 15 bp, Homo sapiens
ctgtgaggccgctgg

SEQ ID NO: 114788 - DNA, 15 bp, Homo sapiens
gctgtgaggccgctg

SEQ ID NO: 114789 - DNA, 15 bp, Homo sapiens
ggctgtgaggccgct

SEQ ID NO: 114790 - DNA, 15 bp, Homo sapiens
gggctgtgaggccgc

SEQ ID NO: 114791 - DNA, 15 bp, Homo sapiens
tgggctgtgaggccg

SEQ ID NO: 114792 - DNA, 15 bp, Homo sapiens
atgggctgtgaggcc

SEQ ID NO: 114793 - DNA, 15 bp, Homo sapiens
catgggctgtgaggc

SEQ ID NO: 114794 - DNA, 15 bp, Homo sapiens
ccatgggctgtgagg

SEQ ID NO: 114795 - DNA, 15 bp, Homo sapiens
gccatgggctgtgag

SEQ ID NO: 114796 - DNA, 15 bp, Homo sapiens
agccatgggctgtga

SEQ ID NO: 114797 - DNA, 15 bp, Homo sapiens
aagccatgggctgtg

SEQ ID NO: 114798 - DNA, 15 bp, Homo sapiens
caagccatgggctgt

SEQ ID NO: 114799 - DNA, 15 bp, Homo sapiens
acaagccatgggctg

SEQ ID NO: 114800 - DNA, 15 bp, Homo sapiens
cacaagccatgggct

SEQ ID NO: 114801 - DNA, 15 bp, Homo sapiens
ccacaagccatgggc

SEQ ID NO: 114802 - DNA, 15 bp, Homo sapiens
cccacaagccatggg

SEQ ID NO: 114803 - DNA, 15 bp, Homo sapiens
tcccacaagccatgg

SEQ ID NO: 114804 - DNA, 15 bp, Homo sapiens
ctcccacaagccatg

SEQ ID NO: 114805 - DNA, 15 bp, Homo sapiens
gctcccacaagccat

SEQ ID NO: 114806 - DNA, 15 bp, Homo sapiens
tgctcccacaagcca

SEQ ID NO: 114807 - DNA, 15 bp, Homo sapiens
atgctcccacaagcc

SEQ ID NO: 114808 - DNA, 15 bp, Homo sapiens
aatgctcccacaagc

SEQ ID NO: 114809 - DNA, 15 bp, Homo sapiens
caatgctcccacaag

SEQ ID NO: 114810 - DNA, 15 bp, Homo sapiens
gcaatgctcccacaa

SEQ ID NO: 114811 - DNA, 15 bp, Homo sapiens
agcaatgctcccaca

SEQ ID NO: 114812 - DNA, 15 bp, Homo sapiens
gagcaatgctcccac

SEQ ID NO: 114813 - DNA, 15 bp, Homo sapiens
ggagcaatgctccca

SEQ ID NO: 114814 - DNA, 15 bp, Homo sapiens
gggagcaatgctccc

SEQ ID NO: 114815 - DNA, 15 bp, Homo sapiens
tgggagcaatgctcc

SEQ ID NO: 114816 - DNA, 15 bp, Homo sapiens
atgggagcaatgctc

SEQ ID NO: 114817 - DNA, 15 bp, Homo sapiens
gatgggagcaatgct

SEQ ID NO: 114818 - DNA, 15 bp, Homo sapiens
cgatgggagcaatgc

SEQ ID NO: 114819 - DNA, 15 bp, Homo sapiens
gcgatgggagcaatg

SEQ ID NO: 114820 - DNA, 15 bp, Homo sapiens
agcgatgggagcaat

SEQ ID NO: 114821 - DNA, 15 bp, Homo sapiens
cagcgatgggagcaa

SEQ ID NO: 114822 - DNA, 15 bp, Homo sapiens
gcagcgatgggagca

SEQ ID NO: 114823 - DNA, 15 bp, Homo sapiens
ggcagcgatgggagc

SEQ ID NO: 114824 - DNA, 15 bp, Homo sapiens
aggcagcgatgggag

SEQ ID NO: 114825 - DNA, 15 bp, Homo sapiens
gaggcagcgatggga

SEQ ID NO: 114826 - DNA, 15 bp, Homo sapiens
ggaggcagcgatggg

SEQ ID NO: 114827 - DNA, 15 bp, Homo sapiens
tggaggcagcgatgg

SEQ ID NO: 114828 - DNA, 15 bp, Homo sapiens
atggaggcagcgatg

SEQ ID NO: 114829 - DNA, 15 bp, Homo sapiens
gatggaggcagcgat

SEQ ID NO: 114830 - DNA, 15 bp, Homo sapiens
tgatggaggcagcga

SEQ ID NO: 114831 - DNA, 15 bp, Homo sapiens
atgatggaggcagcg

SEQ ID NO: 114832 - DNA, 15 bp, Homo sapiens
gatgatggaggcagc

SEQ ID NO: 114833 - DNA, 15 bp, Homo sapiens
cgatgatggaggcag

SEQ ID NO: 114834 - DNA, 15 bp, Homo sapiens
gcgatgatggaggca

SEQ ID NO: 114835 - DNA, 15 bp, Homo sapiens
tgcgatgatggaggc

SEQ ID NO: 114836 - DNA, 15 bp, Homo sapiens
atgcgatgatggagg

SEQ ID NO: 114837 - DNA, 15 bp, Homo sapiens
catgcgatgatggag

SEQ ID NO: 114838 - DNA, 15 bp, Homo sapiens
ccatgcgatgatgga

SEQ ID NO: 114839 - DNA, 15 bp, Homo sapiens
cccatgcgatgatgg

SEQ ID NO: 114840 - DNA, 15 bp, Homo sapiens
ccccatgcgatgatg

SEQ ID NO: 114841 - DNA, 15 bp, Homo sapiens
accccatgcgatgat

SEQ ID NO: 114842 - DNA, 15 bp, Homo sapiens
aaccccatgcgatga

SEQ ID NO: 114843 - DNA, 15 bp, Homo sapiens
gaaccccatgcgatg

SEQ ID NO: 114844 - DNA, 15 bp, Homo sapiens
agaaccccatgcgat

SEQ ID NO: 114845 - DNA, 15 bp, Homo sapiens
gagaaccccatgcga

SEQ ID NO: 114846 - DNA, 15 bp, Homo sapiens
tgagaaccccatgcg

SEQ ID NO: 114847 - DNA, 15 bp, Homo sapiens
gtgagaaccccatgc

SEQ ID NO: 114848 - DNA, 15 bp, Homo sapiens
ggtgagaaccccatg

SEQ ID NO: 114849 - DNA, 15 bp, Homo sapiens
tggtgagaaccccat

SEQ ID NO: 114850 - DNA, 15 bp, Homo sapiens
atggtgagaacccca

SEQ ID NO: 114851 - DNA, 15 bp, Homo sapiens
catggtgagaacccc

SEQ ID NO: 114852 - DNA, 15 bp, Homo sapiens
ccatggtgagaaccc

SEQ ID NO: 114853 - DNA, 15 bp, Homo sapiens
gccatggtgagaacc

SEQ ID NO: 114854 - DNA, 15 bp, Homo sapiens
agccatggtgagaac

SEQ ID NO: 114855 - DNA, 15 bp, Homo sapiens
cagccatggtgagaa

SEQ ID NO: 114856 - DNA, 15 bp, Homo sapiens
acagccatggtgaga

SEQ ID NO: 114857 - DNA, 15 bp, Homo sapiens
aacagccatggtgag

SEQ ID NO: 114858 - DNA, 15 bp, Homo sapiens
aaacagccatggtga

SEQ ID NO: 114859 - DNA, 15 bp, Homo sapiens
aaaacagccatggtg

SEQ ID NO: 114860 - DNA, 15 bp, Homo sapiens
aaaaacagccatggt

SEQ ID NO: 114861 - DNA, 15 bp, Homo sapiens
gaaaaacagccatgg

SEQ ID NO: 114862 - DNA, 15 bp, Homo sapiens
agaaaaacagccatg

SEQ ID NO: 114863 - DNA, 15 bp, Homo sapiens
cagaaaaacagccat

SEQ ID NO: 114864 - DNA, 15 bp, Homo sapiens
acagaaaaacagcca

SEQ ID NO: 114865 - DNA, 15 bp, Homo sapiens
gacagaaaaacagcc

SEQ ID NO: 114866 - DNA, 15 bp, Homo sapiens
agacagaaaaacagc

SEQ ID NO: 114867 - DNA, 15 bp, Homo sapiens
aagacagaaaaacag

SEQ ID NO: 114868 - DNA, 15 bp, Homo sapiens
gaagacagaaaaaca

SEQ ID NO: 114869 - DNA, 15 bp, Homo sapiens
agaagacagaaaaac

SEQ ID NO: 114870 - DNA, 15 bp, Homo sapiens
aagaagacagaaaaa

SEQ ID NO: 114871 - DNA, 15 bp, Homo sapiens
aaagaagacagaaaa

SEQ ID NO: 114872 - DNA, 15 bp, Homo sapiens
aaaagaagacagaaa

SEQ ID NO: 114873 - DNA, 15 bp, Homo sapiens
gaaaagaagacagaa

SEQ ID NO: 114874 - DNA, 15 bp, Homo sapiens
agaaaagaagacaga

SEQ ID NO: 114875 - DNA, 15 bp, Homo sapiens
gagaaaagaagacag

SEQ ID NO: 114876 - DNA, 15 bp, Homo sapiens
agagaaaagaagaca

SEQ ID NO: 114877 - DNA, 15 bp, Homo sapiens
gagagaaaagaagac

SEQ ID NO: 114878 - DNA, 15 bp, Homo sapiens
tgagagaaaagaaga

SEQ ID NO: 114879 - DNA, 15 bp, Homo sapiens
ctgagagaaaagaag

SEQ ID NO: 114880 - DNA, 15 bp, Homo sapiens
tctgagagaaaagaa

SEQ ID NO: 114881 - DNA, 15 bp, Homo sapiens
ttctgagagaaaaga

SEQ ID NO: 114882 - DNA, 15 bp, Homo sapiens
cttctgagagaaaag

SEQ ID NO: 114883 - DNA, 15 bp, Homo sapiens
ccttctgagagaaaa

SEQ ID NO: 114884 - DNA, 15 bp, Homo sapiens
tccttctgagagaaa

SEQ ID NO: 114885 - DNA, 15 bp, Homo sapiens
gtccttctgagagaa

SEQ ID NO: 114886 - DNA, 15 bp, Homo sapiens
tgtccttctgagaga

SEQ ID NO: 114887 - DNA, 15 bp, Homo sapiens
gtgtccttctgagag

SEQ ID NO: 114888 - DNA, 15 bp, Homo sapiens
ggtgtccttctgaga

SEQ ID NO: 114889 - DNA, 15 bp, Homo sapiens
tggtgtccttctgag

SEQ ID NO: 114890 - DNA, 15 bp, Homo sapiens
ctggtgtccttctga

SEQ ID NO: 114891 - DNA, 15 bp, Homo sapiens
actggtgtccttctg

SEQ ID NO: 114892 - DNA, 15 bp, Homo sapiens
gactggtgtccttct

SEQ ID NO: 114893 - DNA, 15 bp, Homo sapiens
tgactggtgtccttc

SEQ ID NO: 114894 - DNA, 15 bp, Homo sapiens
atgactggtgtcctt

SEQ ID NO: 114895 - DNA, 15 bp, Homo sapiens
aatgactggtgtcct

SEQ ID NO: 114896 - DNA, 15 bp, Homo sapiens
caatgactggtgtcc

SEQ ID NO: 114897 - DNA, 15 bp, Homo sapiens
ccaatgactggtgtc

SEQ ID NO: 114898 - DNA, 15 bp, Homo sapiens
tccaatgactggtgt

SEQ ID NO: 114899 - DNA, 15 bp, Homo sapiens
atccaatgactggtg

SEQ ID NO: 114900 - DNA, 15 bp, Homo sapiens
aatccaatgactggt

SEQ ID NO: 114901 - DNA, 15 bp, Homo sapiens
aaatccaatgactgg

SEQ ID NO: 114902 - DNA, 15 bp, Homo sapiens
taaatccaatgactg

SEQ ID NO: 114903 - DNA, 15 bp, Homo sapiens
ctaaatccaatgact

SEQ ID NO: 114904 - DNA, 15 bp, Homo sapiens
cctaaatccaatgac

SEQ ID NO: 114905 - DNA, 15 bp, Homo sapiens
ccctaaatccaatga

SEQ ID NO: 114906 - DNA, 15 bp, Homo sapiens
gccctaaatccaatg

SEQ ID NO: 114907 - DNA, 15 bp, Homo sapiens
agccctaaatccaat

SEQ ID NO: 114908 - DNA, 15 bp, Homo sapiens
gagccctaaatccaa

SEQ ID NO: 114909 - DNA, 15 bp, Homo sapiens
tgagccctaaatcca

SEQ ID NO: 114910 - DNA, 15 bp, Homo sapiens
gtgagccctaaatcc

SEQ ID NO: 114911 - DNA, 15 bp, Homo sapiens
agtgagccctaaatc

SEQ ID NO: 114912 - DNA, 15 bp, Homo sapiens
gagtgagccctaaat

SEQ ID NO: 114913 - DNA, 15 bp, Homo sapiens
agagtgagccctaaa

SEQ ID NO: 114914 - DNA, 15 bp, Homo sapiens
tagagtgagccctaa

SEQ ID NO: 114915 - DNA, 15 bp, Homo sapiens
gtagagtgagcccta

SEQ ID NO: 114916 - DNA, 15 bp, Homo sapiens
agtagagtgagccct

SEQ ID NO: 114917 - DNA, 15 bp, Homo sapiens
gagtagagtgagccc

SEQ ID NO: 114918 - DNA, 15 bp, Homo sapiens
ggagtagagtgagcc

SEQ ID NO: 114919 - DNA, 15 bp, Homo sapiens
gggagtagagtgagc

SEQ ID NO: 114920 - DNA, 15 bp, Homo sapiens
tgggagtagagtgag

SEQ ID NO: 114921 - DNA, 15 bp, Homo sapiens
atgggagtagagtga

SEQ ID NO: 114922 - DNA, 15 bp, Homo sapiens
tatgggagtagagtg

SEQ ID NO: 114923 - DNA, 15 bp, Homo sapiens
ttatgggagtagagt

SEQ ID NO: 114924 - DNA, 15 bp, Homo sapiens
tttatgggagtagag

SEQ ID NO: 114925 - DNA, 15 bp, Homo sapiens
ttttatgggagtaga

SEQ ID NO: 114926 - DNA, 15 bp, Homo sapiens
attttatgggagtag

SEQ ID NO: 114927 - DNA, 15 bp, Homo sapiens
cattttatgggagta

SEQ ID NO: 114928 - DNA, 15 bp, Homo sapiens
acattttatgggagt

SEQ ID NO: 114929 - DNA, 15 bp, Homo sapiens
gacattttatgggag

SEQ ID NO: 114930 - DNA, 15 bp, Homo sapiens
agacattttatggga

SEQ ID NO: 114931 - DNA, 15 bp, Homo sapiens
aagacattttatggg

SEQ ID NO: 114932 - DNA, 15 bp, Homo sapiens
gaagacattttatgg

SEQ ID NO: 114933 - DNA, 15 bp, Homo sapiens
ggaagacattttatg

SEQ ID NO: 114934 - DNA, 15 bp, Homo sapiens
aggaagacattttat

SEQ ID NO: 114935 - DNA, 15 bp, Homo sapiens
taggaagacatttta

SEQ ID NO: 114936 - DNA, 15 bp, Homo sapiens
ttaggaagacatttt

SEQ ID NO: 114937 - DNA, 15 bp, Homo sapiens
gttaggaagacattt

SEQ ID NO: 114938 - DNA, 15 bp, Homo sapiens
agttaggaagacatt

SEQ ID NO: 114939 - DNA, 15 bp, Homo sapiens
tagttaggaagacat

SEQ ID NO: 114940 - DNA, 15 bp, Homo sapiens
ttagttaggaagaca

SEQ ID NO: 114941 - DNA, 15 bp, Homo sapiens
tttagttaggaagac

SEQ ID NO: 114942 - DNA, 15 bp, Homo sapiens
atttagttaggaaga

SEQ ID NO: 114943 - DNA, 15 bp, Homo sapiens
tatttagttaggaag

SEQ ID NO: 114944 - DNA, 15 bp, Homo sapiens
gtatttagttaggaa

SEQ ID NO: 114945 - DNA, 15 bp, Homo sapiens
tgtatttagttagga

SEQ ID NO: 114946 - DNA, 15 bp, Homo sapiens
atgtatttagttagg

SEQ ID NO: 114947 - DNA, 15 bp, Homo sapiens
gatgtatttagttag

SEQ ID NO: 114948 - DNA, 15 bp, Homo sapiens
tgatgtatttagtta

SEQ ID NO: 114949 - DNA, 15 bp, Homo sapiens
gtgatgtatttagtt

SEQ ID NO: 114950 - DNA, 15 bp, Homo sapiens
tgtgatgtatttagt

SEQ ID NO: 114951 - DNA, 15 bp, Homo sapiens
ttgtgatgtatttag

SEQ ID NO: 114952 - DNA, 15 bp, Homo sapiens
tttgtgatgtattta

SEQ ID NO: 114953 - DNA, 15 bp, Homo sapiens
ttttgtgatgtattt

SEQ ID NO: 114954 - DNA, 15 bp, Homo sapiens
cttttgtgatgtatt

SEQ ID NO: 114955 - DNA, 15 bp, Homo sapiens
acttttgtgatgtat

SEQ ID NO: 114956 - DNA, 15 bp, Homo sapiens
aacttttgtgatgta

SEQ ID NO: 114957 - DNA, 15 bp, Homo sapiens
gaacttttgtgatgt

SEQ ID NO: 114958 - DNA, 15 bp, Homo sapiens
agaacttttgtgatg

SEQ ID NO: 114959 - DNA, 15 bp, Homo sapiens
tagaacttttgtgat

SEQ ID NO: 114960 - DNA, 15 bp, Homo sapiens
atagaacttttgtga

SEQ ID NO: 114961 - DNA, 15 bp, Homo sapiens
aatagaacttttgtg

SEQ ID NO: 114962 - DNA, 15 bp, Homo sapiens
aaatagaacttttgt

SEQ ID NO: 114963 - DNA, 15 bp, Homo sapiens
gaaatagaacttttg

SEQ ID NO: 114964 - DNA, 15 bp, Homo sapiens
ggaaatagaactttt

SEQ ID NO: 114965 - DNA, 15 bp, Homo sapiens
tggaaatagaacttt

SEQ ID NO: 114966 - DNA, 15 bp, Homo sapiens
ttggaaatagaactt

SEQ ID NO: 114967 - DNA, 15 bp, Homo sapiens
attggaaatagaact

SEQ ID NO: 114968 - DNA, 15 bp, Homo sapiens
aattggaaatagaac

SEQ ID NO: 114969 - DNA, 15 bp, Homo sapiens
taattggaaatagaa

SEQ ID NO: 114970 - DNA, 15 bp, Homo sapiens
ttaattggaaataga

SEQ ID NO: 114971 - DNA, 15 bp, Homo sapiens
cttaattggaaatag

SEQ ID NO: 114972 - DNA, 15 bp, Homo sapiens
ccttaattggaaata

SEQ ID NO: 114973 - DNA, 15 bp, Homo sapiens
accttaattggaaat

SEQ ID NO: 114974 - DNA, 15 bp, Homo sapiens
gaccttaattggaaa

SEQ ID NO: 114975 - DNA, 15 bp, Homo sapiens
tgaccttaattggaa

SEQ ID NO: 114976 - DNA, 15 bp, Homo sapiens
ctgaccttaattgga

SEQ ID NO: 114977 - DNA, 15 bp, Homo sapiens
cctgaccttaattgg

SEQ ID NO: 114978 - DNA, 15 bp, Homo sapiens
acctgaccttaattg

SEQ ID NO: 114979 - DNA, 15 bp, Homo sapiens
aacctgaccttaatt

SEQ ID NO: 114980 - DNA, 15 bp, Homo sapiens
gaacctgaccttaat

SEQ ID NO: 114981 - DNA, 15 bp, Homo sapiens
agaacctgaccttaa

SEQ ID NO: 114982 - DNA, 15 bp, Homo sapiens
cagaacctgacctta

SEQ ID NO: 114983 - DNA, 15 bp, Homo sapiens
tcagaacctgacctt

SEQ ID NO: 114984 - DNA, 15 bp, Homo sapiens
ctcagaacctgacct

SEQ ID NO: 114985 - DNA, 15 bp, Homo sapiens
cctcagaacctgacc

SEQ ID NO: 114986 - DNA, 15 bp, Homo sapiens
acctcagaacctgac

SEQ ID NO: 114987 - DNA, 15 bp, Homo sapiens
aacctcagaacctga

SEQ ID NO: 114988 - DNA, 15 bp, Homo sapiens
gaacctcagaacctg

SEQ ID NO: 114989 - DNA, 15 bp, Homo sapiens
agaacctcagaacct

SEQ ID NO: 114990 - DNA, 15 bp, Homo sapiens
cagaacctcagaacc

SEQ ID NO: 114991 - DNA, 15 bp, Homo sapiens
ccagaacctcagaac

SEQ ID NO: 114992 - DNA, 15 bp, Homo sapiens
cccagaacctcagaa

SEQ ID NO: 114993 - DNA, 15 bp, Homo sapiens
tcccagaacctcaga

SEQ ID NO: 114994 - DNA, 15 bp, Homo sapiens
ttcccagaacctcag

SEQ ID NO: 114995 - DNA, 15 bp, Homo sapiens
tttcccagaacctca

SEQ ID NO: 114996 - DNA, 15 bp, Homo sapiens
ctttcccagaacctc

SEQ ID NO: 114997 - DNA, 15 bp, Homo sapiens
tctttcccagaacct

SEQ ID NO: 114998 - DNA, 15 bp, Homo sapiens
gtctttcccagaacc

SEQ ID NO: 114999 - DNA, 15 bp, Homo sapiens
tgtctttcccagaac

SEQ ID NO: 115000 - DNA, 15 bp, Homo sapiens
atgtctttcccagaa

SEQ ID NO: 115001 - DNA, 15 bp, Homo sapiens
catgtctttcccaga

SEQ ID NO: 115002 - DNA, 15 bp, Homo sapiens
tcatgtctttcccag

SEQ ID NO: 115003 - DNA, 15 bp, Homo sapiens
ttcatgtctttccca

SEQ ID NO: 115004 - DNA, 15 bp, Homo sapiens
attcatgtctttccc

SEQ ID NO: 115005 - DNA, 15 bp, Homo sapiens
aattcatgtctttcc

SEQ ID NO: 115006 - DNA, 15 bp, Homo sapiens
aaattcatgtctttc

SEQ ID NO: 115007 - DNA, 15 bp, Homo sapiens
caaattcatgtcttt

SEQ ID NO: 115008 - DNA, 15 bp, Homo sapiens
ccaaattcatgtctt

SEQ ID NO: 115009 - DNA, 15 bp, Homo sapiens
tccaaattcatgtct

SEQ ID NO: 115010 - DNA, 15 bp, Homo sapiens
ctccaaattcatgtc

SEQ ID NO: 115011 - DNA, 15 bp, Homo sapiens
cctccaaattcatgt

SEQ ID NO: 115012 - DNA, 15 bp, Homo sapiens
ccctccaaattcatg

SEQ ID NO: 115013 - DNA, 15 bp, Homo sapiens
tccctccaaattcat

SEQ ID NO: 115014 - DNA, 15 bp, Homo sapiens
gtccctccaaattca

SEQ ID NO: 115015 - DNA, 15 bp, Homo sapiens
tgtccctccaaattc

SEQ ID NO: 115016 - DNA, 15 bp, Homo sapiens
atgtccctccaaatt

SEQ ID NO: 115017 - DNA, 15 bp, Homo sapiens
aatgtccctccaaat

SEQ ID NO: 115018 - DNA, 15 bp, Homo sapiens
taatgtccctccaaa

SEQ ID NO: 115019 - DNA, 15 bp, Homo sapiens
ataatgtccctccaa

SEQ ID NO: 115020 - DNA, 15 bp, Homo sapiens
aataatgtccctcca

SEQ ID NO: 115021 - DNA, 15 bp, Homo sapiens
gaataatgtccctcc

SEQ ID NO: 115022 - DNA, 15 bp, Homo sapiens
tgaataatgtccctc

SEQ ID NO: 115023 - DNA, 15 bp, Homo sapiens
ctgaataatgtccct

SEQ ID NO: 115024 - DNA, 15 bp, Homo sapiens
gctgaataatgtccc

SEQ ID NO: 115025 - DNA, 15 bp, Homo sapiens
ggctgaataatgtcc

SEQ ID NO: 115026 - DNA, 15 bp, Homo sapiens
gggctgaataatgtc

SEQ ID NO: 115027 - DNA, 15 bp, Homo sapiens
agggctgaataatgt

SEQ ID NO: 115028 - DNA, 15 bp, Homo sapiens
cagggctgaataatg

SEQ ID NO: 115029 - DNA, 15 bp, Homo sapiens
acagggctgaataat

SEQ ID NO: 115030 - DNA, 15 bp, Homo sapiens
gacagggctgaataa

SEQ ID NO: 115031 - DNA, 15 bp, Homo sapiens
ggacagggctgaata

SEQ ID NO: 115032 - DNA, 15 bp, Homo sapiens
aggacagggctgaat

SEQ ID NO: 115033 - DNA, 15 bp, Homo sapiens
caggacagggctgaa

SEQ ID NO: 115034 - DNA, 15 bp, Homo sapiens
gcaggacagggctga

SEQ ID NO: 115035 - DNA, 15 bp, Homo sapiens
ggcaggacagggctg

SEQ ID NO: 115036 - DNA, 15 bp, Homo sapiens
tggcaggacagggct

SEQ ID NO: 115037 - DNA, 15 bp, Homo sapiens
gtggcaggacagggc

SEQ ID NO: 115038 - DNA, 15 bp, Homo sapiens
ggtggcaggacaggg

SEQ ID NO: 115039 - DNA, 15 bp, Homo sapiens
aggtggcaggacagg

SEQ ID NO: 115040 - DNA, 15 bp, Homo sapiens
caggtggcaggacag

SEQ ID NO: 115041 - DNA, 15 bp, Homo sapiens
acaggtggcaggaca

SEQ ID NO: 115042 - DNA, 15 bp, Homo sapiens
cacaggtggcaggac

SEQ ID NO: 115043 - DNA, 15 bp, Homo sapiens
tcacaggtggcagga

SEQ ID NO: 115044 - DNA, 15 bp, Homo sapiens
ctcacaggtggcagg

SEQ ID NO: 115045 - DNA, 15 bp, Homo sapiens
actcacaggtggcag

SEQ ID NO: 115046 - DNA, 15 bp, Homo sapiens
cactcacaggtggca

SEQ ID NO: 115047 - DNA, 15 bp, Homo sapiens
acactcacaggtggc

SEQ ID NO: 115048 - DNA, 15 bp, Homo sapiens
aacactcacaggtgg

SEQ ID NO: 115049 - DNA, 15 bp, Homo sapiens
aaacactcacaggtg

SEQ ID NO: 115050 - DNA, 15 bp, Homo sapiens
aaaacactcacaggt

SEQ ID NO: 115051 - DNA, 15 bp, Homo sapiens
gaaaacactcacagg

SEQ ID NO: 115052 - DNA, 15 bp, Homo sapiens
agaaaacactcacag

SEQ ID NO: 115053 - DNA, 15 bp, Homo sapiens
cagaaaacactcaca

SEQ ID NO: 115054 - DNA, 15 bp, Homo sapiens
gcagaaaacactcac

SEQ ID NO: 115055 - DNA, 15 bp, Homo sapiens
tgcagaaaacactca

SEQ ID NO: 115056 - DNA, 15 bp, Homo sapiens
ttgcagaaaacactc

SEQ ID NO: 115057 - DNA, 15 bp, Homo sapiens
attgcagaaaacact

SEQ ID NO: 115058 - DNA, 15 bp, Homo sapiens
gattgcagaaaacac

SEQ ID NO: 115059 - DNA, 15 bp, Homo sapiens
ggattgcagaaaaca

SEQ ID NO: 115060 - DNA, 15 bp, Homo sapiens
tggattgcagaaaac

SEQ ID NO: 115061 - DNA, 15 bp, Homo sapiens
ttggattgcagaaaa

SEQ ID NO: 115062 - DNA, 15 bp, Homo sapiens
gttggattgcagaaa

SEQ ID NO: 115063 - DNA, 15 bp, Homo sapiens
agttggattgcagaa

SEQ ID NO: 115064 - DNA, 15 bp, Homo sapiens
aagttggattgcaga

SEQ ID NO: 115065 - DNA, 15 bp, Homo sapiens
aaagttggattgcag

SEQ ID NO: 115066 - DNA, 15 bp, Homo sapiens
aaaagttggattgca

SEQ ID NO: 115067 - DNA, 15 bp, Homo sapiens
aaaaagttggattgc

SEQ ID NO: 115068 - DNA, 15 bp, Homo sapiens
taaaaagttggattg

SEQ ID NO: 115069 - DNA, 15 bp, Homo sapiens
ataaaaagttggatt

SEQ ID NO: 115070 - DNA, 15 bp, Homo sapiens
aataaaaagttggat

SEQ ID NO: 115071 - DNA, 15 bp, Homo sapiens
aaataaaaagttgga

SEQ ID NO: 115072 - DNA, 15 bp, Homo sapiens
aaaataaaaagttgg

SEQ ID NO: 115073 - DNA, 15 bp, Homo sapiens
taaaataaaaagttg

SEQ ID NO: 115074 - DNA, 15 bp, Homo sapiens
ttaaaataaaaagtt

SEQ ID NO: 115075 - DNA, 15 bp, Homo sapiens
attaaaataaaaagt

SEQ ID NO: 115076 - DNA, 15 bp, Homo sapiens
tattaaaataaaaag

SEQ ID NO: 115077 - DNA, 15 bp, Homo sapiens
ttattaaaataaaaa

SEQ ID NO: 115078 - DNA, 15 bp, Homo sapiens
tttattaaaataaaa

SEQ ID NO: 115079 - DNA, 15 bp, Homo sapiens
ttttattaaaataaa

SEQ ID NO: 115080 - DNA, 15 bp, Homo sapiens
attttattaaaataa

SEQ ID NO: 115081 - DNA, 15 bp, Homo sapiens
gattttattaaaata

SEQ ID NO: 115082 - DNA, 15 bp, Homo sapiens
tattctgattttatt

SEQ ID NO: 115083 - DNA, 15 bp, Homo sapiens
gtattctgattttat

SEQ ID NO: 115084 - DNA, 15 bp, Homo sapiens
cgtattctgatttta

SEQ ID NO: 115085 - DNA, 15 bp, Homo sapiens
gcgtattctgatttt

SEQ ID NO: 115086 - DNA, 15 bp, Homo sapiens
tgcgtattctgattt

SEQ ID NO: 115087 - DNA, 15 bp, Homo sapiens
ctgcgtattctgatt

SEQ ID NO: 115088 - DNA, 15 bp, Homo sapiens
tctgcgtattctgat

SEQ ID NO: 115089 - DNA, 15 bp, Homo sapiens
ctctgcgtattctga

SEQ ID NO: 115090 - DNA, 15 bp, Homo sapiens
gctctgcgtattctg

SEQ ID NO: 115091 - DNA, 15 bp, Homo sapiens
tgctctgcgtattct

SEQ ID NO: 115092 - DNA, 15 bp, Homo sapiens
gtgctctgcgtattc

SEQ ID NO: 115093 - DNA, 15 bp, Homo sapiens
ggtgctctgcgtatt

SEQ ID NO: 115094 - DNA, 15 bp, Homo sapiens
aggtgctctgcgtat

SEQ ID NO: 115095 - DNA, 15 bp, Homo sapiens
caggtgctctgcgta

SEQ ID NO: 115096 - DNA, 15 bp, Homo sapiens
gcaggtgctctgcgt

SEQ ID NO: 115097 - DNA, 15 bp, Homo sapiens
tgcaggtgctctgcg

SEQ ID NO: 115098 - DNA, 15 bp, Homo sapiens
ctgcaggtgctctgc

SEQ ID NO: 115099 - DNA, 15 bp, Homo sapiens
actgcaggtgctctg

SEQ ID NO: 115100 - DNA, 15 bp, Homo sapiens
cactgcaggtgctct

SEQ ID NO: 115101 - DNA, 15 bp, Homo sapiens
gcactgcaggtgctc

SEQ ID NO: 115102 - DNA, 15 bp, Homo sapiens
ggcactgcaggtgct

SEQ ID NO: 115103 - DNA, 15 bp, Homo sapiens
tggcactgcaggtgc

SEQ ID NO: 115104 - DNA, 15 bp, Homo sapiens
ctggcactgcaggtg

SEQ ID NO: 115105 - DNA, 15 bp, Homo sapiens
gctggcactgcaggt

SEQ ID NO: 115106 - DNA, 15 bp, Homo sapiens
ggctggcactgcagg

SEQ ID NO: 115107 - DNA, 15 bp, Homo sapiens
aggctggcactgcag

SEQ ID NO: 115108 - DNA, 15 bp, Homo sapiens
aaggctggcactgca

SEQ ID NO: 115109 - DNA, 15 bp, Homo sapiens
aatgagagtcaggaa

SEQ ID NO: 115110 - DNA, 15 bp, Homo sapiens
taatgagagtcagga

SEQ ID NO: 115111 - DNA, 15 bp, Homo sapiens
ctaatgagagtcagg

SEQ ID NO: 115112 - DNA, 15 bp, Homo sapiens
cctaatgagagtcag

SEQ ID NO: 115113 - DNA, 15 bp, Homo sapiens
tcctaatgagagtca

SEQ ID NO: 115114 - DNA, 15 bp, Homo sapiens
ctcctaatgagagtc

SEQ ID NO: 115115 - DNA, 15 bp, Homo sapiens
gctcctaatgagagt

SEQ ID NO: 115116 - DNA, 15 bp, Homo sapiens
agctcctaatgagag

SEQ ID NO: 115117 - DNA, 15 bp, Homo sapiens
cagctcctaatgaga

SEQ ID NO: 115118 - DNA, 15 bp, Homo sapiens
tcagctcctaatgag

SEQ ID NO: 115119 - DNA, 15 bp, Homo sapiens
ctcagctcctaatga

SEQ ID NO: 115120 - DNA, 15 bp, Homo sapiens
gctcagctcctaatg

SEQ ID NO: 115121 - DNA, 15 bp, Homo sapiens
agctcagctcctaat

SEQ ID NO: 115122 - DNA, 15 bp, Homo sapiens
aagctcagctcctaa

SEQ ID NO: 115123 - DNA, 15 bp, Homo sapiens
gaagctcagctccta

SEQ ID NO: 115124 - DNA, 15 bp, Homo sapiens
tgaagctcagctcct

SEQ ID NO: 115125 - DNA, 15 bp, Homo sapiens
atgaagctcagctcc

SEQ ID NO: 115126 - DNA, 15 bp, Homo sapiens
aatgaagctcagctc

SEQ ID NO: 115127 - DNA, 15 bp, Homo sapiens
gaatgaagctcagct

SEQ ID NO: 115128 - DNA, 15 bp, Homo sapiens
tgaatgaagctcagc

SEQ ID NO: 115129 - DNA, 15 bp, Homo sapiens
ctgaatgaagctcag

SEQ ID NO: 115130 - DNA, 15 bp, Homo sapiens
actgaatgaagctca

SEQ ID NO: 115131 - DNA, 15 bp, Homo sapiens
cactgaatgaagctc

SEQ ID NO: 115132 - DNA, 15 bp, Homo sapiens
acactgaatgaagct

SEQ ID NO: 115133 - DNA, 15 bp, Homo sapiens
cacactgaatgaagc

SEQ ID NO: 115134 - DNA, 15 bp, Homo sapiens
acacactgaatgaag

SEQ ID NO: 115135 - DNA, 15 bp, Homo sapiens
cacacactgaatgaa

SEQ ID NO: 115136 - DNA, 15 bp, Homo sapiens
acacacactgaatga

SEQ ID NO: 115137 - DNA, 15 bp, Homo sapiens
cacacacactgaatg

SEQ ID NO: 115138 - DNA, 15 bp, Homo sapiens
gcacacacactgaat

SEQ ID NO: 115139 - DNA, 15 bp, Homo sapiens
cgcacacacactgaa

SEQ ID NO: 115140 - DNA, 15 bp, Homo sapiens
acgcacacacactga

SEQ ID NO: 115141 - DNA, 15 bp, Homo sapiens
aacgcacacacactg

SEQ ID NO: 115142 - DNA, 15 bp, Homo sapiens
caacgcacacacact

SEQ ID NO: 115143 - DNA, 15 bp, Homo sapiens
ccaacgcacacacac

SEQ ID NO: 115144 - DNA, 15 bp, Homo sapiens
accaacgcacacaca

SEQ ID NO: 115145 - DNA, 15 bp, Homo sapiens
aaccaacgcacacac

SEQ ID NO: 115146 - DNA, 15 bp, Homo sapiens
caaccaacgcacaca

SEQ ID NO: 115147 - DNA, 15 bp, Homo sapiens
gcaaccaacgcacac

SEQ ID NO: 115148 - DNA, 15 bp, Homo sapiens
ggcaaccaacgcaca

SEQ ID NO: 115149 - DNA, 15 bp, Homo sapiens
cggcaaccaacgcac

SEQ ID NO: 115150 - DNA, 15 bp, Homo sapiens
tcggcaaccaacgca

SEQ ID NO: 115151 - DNA, 15 bp, Homo sapiens
atcggcaaccaacgc

SEQ ID NO: 115152 - DNA, 15 bp, Homo sapiens
gatcggcaaccaacg

SEQ ID NO: 115153 - DNA, 15 bp, Homo sapiens
cgatcggcaaccaac

SEQ ID NO: 115154 - DNA, 15 bp, Homo sapiens
acgatcggcaaccaa

SEQ ID NO: 115155 - DNA, 15 bp, Homo sapiens
tacgatcggcaacca

SEQ ID NO: 115156 - DNA, 15 bp, Homo sapiens
gtacgatcggcaacc

SEQ ID NO: 115157 - DNA, 15 bp, Homo sapiens
agtacgatcggcaac

SEQ ID NO: 115158 - DNA, 15 bp, Homo sapiens
cagtacgatcggcaa

SEQ ID NO: 115159 - DNA, 15 bp, Homo sapiens
gcagtacgatcggca

SEQ ID NO: 115160 - DNA, 15 bp, Homo sapiens
ggcagtacgatcggc

SEQ ID NO: 115161 - DNA, 15 bp, Homo sapiens
tggcagtacgatcgg

SEQ ID NO: 115162 - DNA, 15 bp, Homo sapiens
ctggcagtacgatcg

SEQ ID NO: 115163 - DNA, 15 bp, Homo sapiens
actggcagtacgatc

SEQ ID NO: 115164 - DNA, 15 bp, Homo sapiens
tactggcagtacgat

SEQ ID NO: 115165 - DNA, 15 bp, Homo sapiens
ctactggcagtacga

SEQ ID NO: 115166 - DNA, 15 bp, Homo sapiens
gctactggcagtacg

SEQ ID NO: 115167 - DNA, 15 bp, Homo sapiens
tgctactggcagtac

SEQ ID NO: 115168 - DNA, 15 bp, Homo sapiens
atgctactggcagta

SEQ ID NO: 115169 - DNA, 15 bp, Homo sapiens
aatgctactggcagt

SEQ ID NO: 115170 - DNA, 15 bp, Homo sapiens
caatgctactggcag

SEQ ID NO: 115171 - DNA, 15 bp, Homo sapiens
acaatgctactggca

SEQ ID NO: 115172 - DNA, 15 bp, Homo sapiens
gacaatgctactggc

SEQ ID NO: 115173 - DNA, 15 bp, Homo sapiens
agacaatgctactgg

SEQ ID NO: 115174 - DNA, 15 bp, Homo sapiens
cagacaatgctactg

SEQ ID NO: 115175 - DNA, 15 bp, Homo sapiens
acagacaatgctact

SEQ ID NO: 115176 - DNA, 15 bp, Homo sapiens
gacagacaatgctac

SEQ ID NO: 115177 - DNA, 15 bp, Homo sapiens
agacagacaatgcta

SEQ ID NO: 115178 - DNA, 15 bp, Homo sapiens
cagacagacaatgct

SEQ ID NO: 115179 - DNA, 15 bp, Homo sapiens
acagacagacaatgc

SEQ ID NO: 115180 - DNA, 15 bp, Homo sapiens
gacagacagacaatg

SEQ ID NO: 115181 - DNA, 15 bp, Homo sapiens
ggacagacagacaat

SEQ ID NO: 115182 - DNA, 15 bp, Homo sapiens
cggacagacagacaa

SEQ ID NO: 115183 - DNA, 15 bp, Homo sapiens
ccggacagacagaca

SEQ ID NO: 115184 - DNA, 15 bp, Homo sapiens
accggacagacagac

SEQ ID NO: 115185 - DNA, 15 bp, Homo sapiens
gaccggacagacaga

SEQ ID NO: 115186 - DNA, 15 bp, Homo sapiens
agaccggacagacag

SEQ ID NO: 115187 - DNA, 15 bp, Homo sapiens
aagaccggacagaca

SEQ ID NO: 115188 - DNA, 15 bp, Homo sapiens
caagaccggacagac

SEQ ID NO: 115189 - DNA, 15 bp, Homo sapiens
acaagaccggacaga

SEQ ID NO: 115190 - DNA, 15 bp, Homo sapiens
aacaagaccggacag

SEQ ID NO: 115191 - DNA, 15 bp, Homo sapiens
aaacaagaccggaca

SEQ ID NO: 115192 - DNA, 15 bp, Homo sapiens
caaacaagaccggac

SEQ ID NO: 115193 - DNA, 15 bp, Homo sapiens
acaaacaagaccgga

SEQ ID NO: 115194 - DNA, 15 bp, Homo sapiens
tacaaacaagaccgg

SEQ ID NO: 115195 - DNA, 15 bp, Homo sapiens
gtacaaacaagaccg

SEQ ID NO: 115196 - DNA, 15 bp, Homo sapiens
tgtacaaacaagacc

SEQ ID NO: 115197 - DNA, 15 bp, Homo sapiens
atgtacaaacaagac

SEQ ID NO: 115198 - DNA, 15 bp, Homo sapiens
aatgtacaaacaaga

SEQ ID NO: 115199 - DNA, 15 bp, Homo sapiens
gaatgtacaaacaag

SEQ ID NO: 115200 - DNA, 15 bp, Homo sapiens
ggaatgtacaaacaa

SEQ ID NO: 115201 - DNA, 15 bp, Homo sapiens
tggaatgtacaaaca

SEQ ID NO: 115202 - DNA, 15 bp, Homo sapiens
atggaatgtacaaac

SEQ ID NO: 115203 - DNA, 15 bp, Homo sapiens
aatggaatgtacaaa

SEQ ID NO: 115204 - DNA, 15 bp, Homo sapiens
aaatggaatgtacaa

SEQ ID NO: 115205 - DNA, 15 bp, Homo sapiens
aaaatggaatgtaca

SEQ ID NO: 115206 - DNA, 15 bp, Homo sapiens
gaaaatggaatgtac

SEQ ID NO: 115207 - DNA, 15 bp, Homo sapiens
tgaaaatggaatgta

SEQ ID NO: 115208 - DNA, 15 bp, Homo sapiens
ttgaaaatggaatgt

SEQ ID NO: 115209 - DNA, 15 bp, Homo sapiens
attgaaaatggaatg

SEQ ID NO: 115210 - DNA, 15 bp, Homo sapiens
aattgaaaatggaat

SEQ ID NO: 115211 - DNA, 15 bp, Homo sapiens
caattgaaaatggaa

SEQ ID NO: 115212 - DNA, 15 bp, Homo sapiens
acaattgaaaatgga

SEQ ID NO: 115213 - DNA, 15 bp, Homo sapiens
aacaattgaaaatgg

SEQ ID NO: 115214 - DNA, 15 bp, Homo sapiens
taacaattgaaaatg

SEQ ID NO: 115215 - DNA, 15 bp, Homo sapiens
gtaacaattgaaaat

SEQ ID NO: 115216 - DNA, 15 bp, Homo sapiens
tgtaacaattgaaaa

SEQ ID NO: 115217 - DNA, 15 bp, Homo sapiens
ctgtaacaattgaaa

SEQ ID NO: 115218 - DNA, 15 bp, Homo sapiens
tctgtaacaattgaa

SEQ ID NO: 115219 - DNA, 15 bp, Homo sapiens
atctgtaacaattga

SEQ ID NO: 115220 - DNA, 15 bp, Homo sapiens
catctgtaacaattg

SEQ ID NO: 115221 - DNA, 15 bp, Homo sapiens
acatctgtaacaatt

SEQ ID NO: 115222 - DNA, 15 bp, Homo sapiens
cacatctgtaacaat

SEQ ID NO: 115223 - DNA, 15 bp, Homo sapiens
tcacatctgtaacaa

SEQ ID NO: 115224 - DNA, 15 bp, Homo sapiens
ttcacatctgtaaca

SEQ ID NO: 115225 - DNA, 15 bp, Homo sapiens
gttcacatctgtaac

SEQ ID NO: 115226 - DNA, 15 bp, Homo sapiens
agttcacatctgtaa

SEQ ID NO: 115227 - DNA, 15 bp, Homo sapiens
aagttcacatctgta

SEQ ID NO: 115228 - DNA, 15 bp, Homo sapiens
aaagttcacatctgt

SEQ ID NO: 115229 - DNA, 15 bp, Homo sapiens
taaagttcacatctg

SEQ ID NO: 115230 - DNA, 15 bp, Homo sapiens
ataaagttcacatct

SEQ ID NO: 115231 - DNA, 15 bp, Homo sapiens
aataaagttcacatc

SEQ ID NO: 115232 - DNA, 15 bp, Homo sapiens
gaataaagttcacat

SEQ ID NO: 115233 - DNA, 15 bp, Homo sapiens
ggaataaagttcaca

SEQ ID NO: 115234 - DNA, 15 bp, Homo sapiens
aggaataaagttcac

SEQ ID NO: 115235 - DNA, 15 bp, Homo sapiens
aaggaataaagttca

SEQ ID NO: 115236 - DNA, 15 bp, Homo sapiens
caaggaataaagttc

SEQ ID NO: 115237 - DNA, 15 bp, Homo sapiens
acaaggaataaagtt

SEQ ID NO: 115238 - DNA, 15 bp, Homo sapiens
gacaaggaataaagt

SEQ ID NO: 115239 - DNA, 15 bp, Homo sapiens
tgacaaggaataaag

SEQ ID NO: 115240 - DNA, 15 bp, Homo sapiens
gtgacaaggaataaa

SEQ ID NO: 115241 - DNA, 15 bp, Homo sapiens
agtgacaaggaataa

SEQ ID NO: 115242 - DNA, 15 bp, Homo sapiens
tagtgacaaggaata

SEQ ID NO: 115243 - DNA, 15 bp, Homo sapiens
ttagtgacaaggaat

SEQ ID NO: 115244 - DNA, 15 bp, Homo sapiens
attagtgacaaggaa

SEQ ID NO: 115245 - DNA, 15 bp, Homo sapiens
aattagtgacaagga

SEQ ID NO: 115246 - DNA, 15 bp, Homo sapiens
taattagtgacaagg

SEQ ID NO: 115247 - DNA, 15 bp, Homo sapiens
ataattagtgacaag

SEQ ID NO: 115248 - DNA, 15 bp, Homo sapiens
tataattagtgacaa

SEQ ID NO: 115249 - DNA, 15 bp, Homo sapiens
atataattagtgaca

SEQ ID NO: 115250 - DNA, 15 bp, Homo sapiens
aatataattagtgac

SEQ ID NO: 115251 - DNA, 15 bp, Homo sapiens
aaatataattagtga

SEQ ID NO: 115252 - DNA, 15 bp, Homo sapiens
taaatataattagtg

SEQ ID NO: 115253 - DNA, 15 bp, Homo sapiens
ttaaatataattagt

SEQ ID NO: 115254 - DNA, 15 bp, Homo sapiens
tttaaatataattag

SEQ ID NO: 115255 - DNA, 15 bp, Homo sapiens
taattttaaatataa

SEQ ID NO: 115256 - DNA, 15 bp, Homo sapiens
ataattttaaatata

SEQ ID NO: 115257 - DNA, 15 bp, Homo sapiens
aataattttaaatat

SEQ ID NO: 115258 - DNA, 15 bp, Homo sapiens
aaataattttaaata

SEQ ID NO: 115259 - DNA, 15 bp, Homo sapiens
gaaataattttaaat

SEQ ID NO: 115260 - DNA, 15 bp, Homo sapiens
agaaataattttaaa

SEQ ID NO: 115261 - DNA, 15 bp, Homo sapiens
tagaaataattttaa

SEQ ID NO: 115262 - DNA, 15 bp, Homo sapiens
ctagaaataatttta

SEQ ID NO: 115263 - DNA, 15 bp, Homo sapiens
cctagaaataatttt

SEQ ID NO: 115264 - DNA, 15 bp, Homo sapiens
tcctagaaataattt

SEQ ID NO: 115265 - DNA, 15 bp, Homo sapiens
ttcctagaaataatt

SEQ ID NO: 115266 - DNA, 15 bp, Homo sapiens
cttcctagaaataat

SEQ ID NO: 115267 - DNA, 15 bp, Homo sapiens
acttcctagaaataa

SEQ ID NO: 115268 - DNA, 15 bp, Homo sapiens
gacttcctagaaata

SEQ ID NO: 115269 - DNA, 15 bp, Homo sapiens
tgacttcctagaaat

SEQ ID NO: 115270 - DNA, 15 bp, Homo sapiens
ttgacttcctagaaa

SEQ ID NO: 115271 - DNA, 15 bp, Homo sapiens
tttgacttcctagaa

SEQ ID NO: 115272 - DNA, 15 bp, Homo sapiens
atttgacttcctaga

SEQ ID NO: 115273 - DNA, 15 bp, Homo sapiens
tatttgacttcctag

SEQ ID NO: 115274 - DNA, 15 bp, Homo sapiens
ttatttgacttccta

SEQ ID NO: 115275 - DNA, 15 bp, Homo sapiens
tttatttgacttcct

SEQ ID NO: 115276 - DNA, 15 bp, Homo sapiens
atttatttgacttcc

SEQ ID NO: 115277 - DNA, 15 bp, Homo sapiens
tatttatttgacttc

SEQ ID NO: 115278 - DNA, 15 bp, Homo sapiens
atatttatttgactt

SEQ ID NO: 115279 - DNA, 15 bp, Homo sapiens
tatatttatttgact

SEQ ID NO: 115280 - DNA, 15 bp, Homo sapiens
ttatatttatttgac

SEQ ID NO: 115281 - DNA, 15 bp, Homo sapiens
attatatttatttga

SEQ ID NO: 115282 - DNA, 15 bp, Homo sapiens
tattatatttatttg

SEQ ID NO: 115283 - DNA, 15 bp, Homo sapiens
ttattatatttattt

SEQ ID NO: 115284 - DNA, 15 bp, Homo sapiens
tttattatatttatt

SEQ ID NO: 115285 - DNA, 15 bp, Homo sapiens
ctttattatatttat

SEQ ID NO: 115286 - DNA, 15 bp, Homo sapiens
cctttattatattta

SEQ ID NO: 115287 - DNA, 15 bp, Homo sapiens
ccctttattatattt

SEQ ID NO: 115288 - DNA, 15 bp, Homo sapiens
accctttattatatt

SEQ ID NO: 115289 - DNA, 15 bp, Homo sapiens
aaccctttattatat

SEQ ID NO: 115290 - DNA, 15 bp, Homo sapiens
caaccctttattata

SEQ ID NO: 115291 - DNA, 15 bp, Homo sapiens
tcaaccctttattat

SEQ ID NO: 115292 - DNA, 15 bp, Homo sapiens
ctcaaccctttatta

SEQ ID NO: 115293 - DNA, 15 bp, Homo sapiens
gctcaaccctttatt

SEQ ID NO: 115294 - DNA, 15 bp, Homo sapiens
ggctcaaccctttat

SEQ ID NO: 115295 - DNA, 15 bp, Homo sapiens
gggctcaacccttta

SEQ ID NO: 115296 - DNA, 15 bp, Homo sapiens
agggctcaacccttt

SEQ ID NO: 115297 - DNA, 15 bp, Homo sapiens
gagggctcaaccctt

SEQ ID NO: 115298 - DNA, 15 bp, Homo sapiens
agagggctcaaccct

SEQ ID NO: 115299 - DNA, 15 bp, Homo sapiens
tagagggctcaaccc

SEQ ID NO: 115300 - DNA, 15 bp, Homo sapiens
gtagagggctcaacc

SEQ ID NO: 115301 - DNA, 15 bp, Homo sapiens
agtagagggctcaac

SEQ ID NO: 115302 - DNA, 15 bp, Homo sapiens
aagtagagggctcaa

SEQ ID NO: 115303 - DNA, 15 bp, Homo sapiens
aaagtagagggctca

SEQ ID NO: 115304 - DNA, 15 bp, Homo sapiens
gaaagtagagggctc

SEQ ID NO: 115305 - DNA, 15 bp, Homo sapiens
agaaagtagagggct

SEQ ID NO: 115306 - DNA, 15 bp, Homo sapiens
aagaaagtagagggc

SEQ ID NO: 115307 - DNA, 15 bp, Homo sapiens
gaagaaagtagaggg

SEQ ID NO: 115308 - DNA, 15 bp, Homo sapiens
agaagaaagtagagg

SEQ ID NO: 115309 - DNA, 15 bp, Homo sapiens
aagaagaaagtagag

SEQ ID NO: 115310 - DNA, 15 bp, Homo sapiens
caagaagaaagtaga

SEQ ID NO: 115311 - DNA, 15 bp, Homo sapiens
gcaagaagaaagtag

SEQ ID NO: 115312 - DNA, 15 bp, Homo sapiens
ggcaagaagaaagta

SEQ ID NO: 115313 - DNA, 15 bp, Homo sapiens
tggcaagaagaaagt

SEQ ID NO: 115314 - DNA, 15 bp, Homo sapiens
gtggcaagaagaaag

SEQ ID NO: 115315 - DNA, 15 bp, Homo sapiens
ggtggcaagaagaaa

SEQ ID NO: 115316 - DNA, 15 bp, Homo sapiens
aggtggcaagaagaa

SEQ ID NO: 115317 - DNA, 15 bp, Homo sapiens
aaggtggcaagaaga

SEQ ID NO: 115318 - DNA, 15 bp, Homo sapiens
aaaggtggcaagaag

SEQ ID NO: 115319 - DNA, 15 bp, Homo sapiens
aaaaggtggcaagaa

SEQ ID NO: 115320 - DNA, 15 bp, Homo sapiens
aaaaaggtggcaaga

SEQ ID NO: 115321 - DNA, 15 bp, Homo sapiens
caaaaaggtggcaag

SEQ ID NO: 115322 - DNA, 15 bp, Homo sapiens
acaaaaaggtggcaa

SEQ ID NO: 115323 - DNA, 15 bp, Homo sapiens
cacaaaaaggtggca

SEQ ID NO: 115324 - DNA, 15 bp, Homo sapiens
ccacaaaaaggtggc

SEQ ID NO: 115325 - DNA, 15 bp, Homo sapiens
gccacaaaaaggtgg

SEQ ID NO: 115326 - DNA, 15 bp, Homo sapiens
tgccacaaaaaggtg

SEQ ID NO: 115327 - DNA, 15 bp, Homo sapiens
ttgccacaaaaaggt

SEQ ID NO: 115328 - DNA, 15 bp, Homo sapiens
attgccacaaaaagg

SEQ ID NO: 115329 - DNA, 15 bp, Homo sapiens
tattgccacaaaaag

SEQ ID NO: 115330 - DNA, 15 bp, Homo sapiens
atattgccacaaaaa

SEQ ID NO: 115331 - DNA, 15 bp, Homo sapiens
aatattgccacaaaa

SEQ ID NO: 115332 - DNA, 15 bp, Homo sapiens
taatattgccacaaa

SEQ ID NO: 115333 - DNA, 15 bp, Homo sapiens
ttaatattgccacaa

SEQ ID NO: 115334 - DNA, 15 bp, Homo sapiens
tttaatattgccaca

SEQ ID NO: 115335 - DNA, 15 bp, Homo sapiens
ctttaatattgccac

SEQ ID NO: 115336 - DNA, 15 bp, Homo sapiens
actttaatattgcca

SEQ ID NO: 115337 - DNA, 15 bp, Homo sapiens
cactttaatattgcc

SEQ ID NO: 115338 - DNA, 15 bp, Homo sapiens
tcactttaatattgc

SEQ ID NO: 115339 - DNA, 15 bp, Homo sapiens
ttcactttaatattg

SEQ ID NO: 115340 - DNA, 15 bp, Homo sapiens
gttcactttaatatt

SEQ ID NO: 115341 - DNA, 15 bp, Homo sapiens
agttcactttaatat

SEQ ID NO: 115342 - DNA, 15 bp, Homo sapiens
cagttcactttaata

SEQ ID NO: 115343 - DNA, 15 bp, Homo sapiens
gcagttcactttaat

SEQ ID NO: 115344 - DNA, 15 bp, Homo sapiens
agcagttcactttaa

SEQ ID NO: 115345 - DNA, 15 bp, Homo sapiens
tagcagttcacttta

SEQ ID NO: 115346 - DNA, 15 bp, Homo sapiens
ttagcagttcacttt

SEQ ID NO: 115347 - DNA, 15 bp, Homo sapiens
attagcagttcactt

SEQ ID NO: 115348 - DNA, 15 bp, Homo sapiens
tattagcagttcact

SEQ ID NO: 115349 - DNA, 15 bp, Homo sapiens
ctattagcagttcac

SEQ ID NO: 115350 - DNA, 15 bp, Homo sapiens
actattagcagttca

SEQ ID NO: 115351 - DNA, 15 bp, Homo sapiens
cactattagcagttc

SEQ ID NO: 115352 - DNA, 15 bp, Homo sapiens
acactattagcagtt

SEQ ID NO: 115353 - DNA, 15 bp, Homo sapiens
tacactattagcagt

SEQ ID NO: 115354 - DNA, 15 bp, Homo sapiens
ttacactattagcag

SEQ ID NO: 115355 - DNA, 15 bp, Homo sapiens
cttacactattagca

SEQ ID NO: 115356 - DNA, 15 bp, Homo sapiens
acttacactattagc

SEQ ID NO: 115357 - DNA, 15 bp, Homo sapiens
tacttacactattag

SEQ ID NO: 115358 - DNA, 15 bp, Homo sapiens
gtacttacactatta

SEQ ID NO: 115359 - DNA, 15 bp, Homo sapiens
cgtacttacactatt

SEQ ID NO: 115360 - DNA, 15 bp, Homo sapiens
acgtacttacactat

SEQ ID NO: 115361 - DNA, 15 bp, Homo sapiens
cacgtacttacacta

SEQ ID NO: 115362 - DNA, 15 bp, Homo sapiens
gcacgtacttacact

SEQ ID NO: 115363 - DNA, 15 bp, Homo sapiens
tgcacgtacttacac

SEQ ID NO: 115364 - DNA, 15 bp, Homo sapiens
gtgcacgtacttaca

SEQ ID NO: 115365 - DNA, 15 bp, Homo sapiens
tgtgcacgtacttac

SEQ ID NO: 115366 - DNA, 15 bp, Homo sapiens
ttgtgcacgtactta

SEQ ID NO: 115367 - DNA, 15 bp, Homo sapiens
tttgtgcacgtactt

SEQ ID NO: 115368 - DNA, 15 bp, Homo sapiens
ttttgtgcacgtact

SEQ ID NO: 115369 - DNA, 15 bp, Homo sapiens
gttttgtgcacgtac

SEQ ID NO: 115370 - DNA, 15 bp, Homo sapiens
ggttttgtgcacgta

SEQ ID NO: 115371 - DNA, 15 bp, Homo sapiens
tggttttgtgcacgt

SEQ ID NO: 115372 - DNA, 15 bp, Homo sapiens
gtggttttgtgcacg

SEQ ID NO: 115373 - DNA, 15 bp, Homo sapiens
agtggttttgtgcac

SEQ ID NO: 115374 - DNA, 15 bp, Homo sapiens
cagtggttttgtgca

SEQ ID NO: 115375 - DNA, 15 bp, Homo sapiens
gcagtggttttgtgc

SEQ ID NO: 115376 - DNA, 15 bp, Homo sapiens
ggcagtggttttgtg

SEQ ID NO: 115377 - DNA, 15 bp, Homo sapiens
tggcagtggttttgt

SEQ ID NO: 115378 - DNA, 15 bp, Homo sapiens
ctggcagtggttttg

SEQ ID NO: 115379 - DNA, 15 bp, Homo sapiens
tctggcagtggtttt

SEQ ID NO: 115380 - DNA, 15 bp, Homo sapiens
atctggcagtggttt

SEQ ID NO: 115381 - DNA, 15 bp, Homo sapiens
tatctggcagtggtt

SEQ ID NO: 115382 - DNA, 15 bp, Homo sapiens
ttatctggcagtggt

SEQ ID NO: 115383 - DNA, 15 bp, Homo sapiens
gttatctggcagtgg

SEQ ID NO: 115384 - DNA, 15 bp, Homo sapiens
ggttatctggcagtg

SEQ ID NO: 115385 - DNA, 15 bp, Homo sapiens
tggttatctggcagt

SEQ ID NO: 115386 - DNA, 15 bp, Homo sapiens
ctggttatctggcag

SEQ ID NO: 115387 - DNA, 15 bp, Homo sapiens
tctggttatctggca

SEQ ID NO: 115388 - DNA, 15 bp, Homo sapiens
ctctggttatctggc

SEQ ID NO: 115389 - DNA, 15 bp, Homo sapiens
cctctggttatctgg

SEQ ID NO: 115390 - DNA, 15 bp, Homo sapiens
ccctctggttatctg

SEQ ID NO: 115391 - DNA, 15 bp, Homo sapiens
cccctctggttatct

SEQ ID NO: 115392 - DNA, 15 bp, Homo sapiens
gcccctctggttatc

SEQ ID NO: 115393 - DNA, 15 bp, Homo sapiens
ggcccctctggttat

SEQ ID NO: 115394 - DNA, 15 bp, Homo sapiens
aggcccctctggtta

SEQ ID NO: 115395 - DNA, 15 bp, Homo sapiens
caggcccctctggtt

SEQ ID NO: 115396 - DNA, 15 bp, Homo sapiens
ccaggcccctctggt

SEQ ID NO: 115397 - DNA, 15 bp, Homo sapiens
cccaggcccctctgg

SEQ ID NO: 115398 - DNA, 15 bp, Homo sapiens
tcccaggcccctctg

SEQ ID NO: 115399 - DNA, 15 bp, Homo sapiens
ttcccaggcccctct

SEQ ID NO: 115400 - DNA, 15 bp, Homo sapiens
cttcccaggcccctc

SEQ ID NO: 115401 - DNA, 15 bp, Homo sapiens
ccttcccaggcccct

SEQ ID NO: 115402 - DNA, 15 bp, Homo sapiens
cccttcccaggcccc

SEQ ID NO: 115403 - DNA, 15 bp, Homo sapiens
tcccttcccaggccc

SEQ ID NO: 115404 - DNA, 15 bp, Homo sapiens
ctcccttcccaggcc

SEQ ID NO: 115405 - DNA, 15 bp, Homo sapiens
tctcccttcccaggc

SEQ ID NO: 115406 - DNA, 15 bp, Homo sapiens
ttctcccttcccagg

SEQ ID NO: 115407 - DNA, 15 bp, Homo sapiens
cttctcccttcccag

SEQ ID NO: 115408 - DNA, 15 bp, Homo sapiens
tcttctcccttccca

SEQ ID NO: 115409 - DNA, 15 bp, Homo sapiens
ttcttctcccttccc

SEQ ID NO: 115410 - DNA, 15 bp, Homo sapiens
attcttctcccttcc

SEQ ID NO: 115411 - DNA, 15 bp, Homo sapiens
aattcttctcccttc

SEQ ID NO: 115412 - DNA, 15 bp, Homo sapiens
taattcttctccctt

SEQ ID NO: 115413 - DNA, 15 bp, Homo sapiens
ctaattcttctccct

SEQ ID NO: 115414 - DNA, 15 bp, Homo sapiens
actaattcttctccc

SEQ ID NO: 115415 - DNA, 15 bp, Homo sapiens
cactaattcttctcc

SEQ ID NO: 115416 - DNA, 15 bp, Homo sapiens
acactaattcttctc

SEQ ID NO: 115417 - DNA, 15 bp, Homo sapiens
tacactaattcttct

SEQ ID NO: 115418 - DNA, 15 bp, Homo sapiens
atacactaattcttc

SEQ ID NO: 115419 - DNA, 15 bp, Homo sapiens
aatacactaattctt

SEQ ID NO: 115420 - DNA, 15 bp, Homo sapiens
aaatacactaattct

SEQ ID NO: 115421 - DNA, 15 bp, Homo sapiens
aaaatacactaattc

SEQ ID NO: 115422 - DNA, 15 bp, Homo sapiens
aaaaatacactaatt

SEQ ID NO: 115423 - DNA, 15 bp, Homo sapiens
aaaaaatacactaat

SEQ ID NO: 115424 - DNA, 15 bp, Homo sapiens
aaaaaaatacactaa

SEQ ID NO: 115425 - DNA, 15 bp, Homo sapiens
gaaaaaaatacacta

SEQ ID NO: 115426 - DNA, 15 bp, Homo sapiens
tgaaaaaaatacact

SEQ ID NO: 115427 - DNA, 15 bp, Homo sapiens
ttgaaaaaaatacac

SEQ ID NO: 115428 - DNA, 15 bp, Homo sapiens
tttgaaaaaaataca

SEQ ID NO: 115429 - DNA, 15 bp, Homo sapiens
atttgaaaaaaatac

SEQ ID NO: 115430 - DNA, 15 bp, Homo sapiens
tatttgaaaaaaata

SEQ ID NO: 115431 - DNA, 15 bp, Homo sapiens
ctatttgaaaaaaat

SEQ ID NO: 115432 - DNA, 15 bp, Homo sapiens
actatttgaaaaaaa

SEQ ID NO: 115433 - DNA, 15 bp, Homo sapiens
tactatttgaaaaaa

SEQ ID NO: 115434 - DNA, 15 bp, Homo sapiens
gtactatttgaaaaa

SEQ ID NO: 115435 - DNA, 15 bp, Homo sapiens
tgtactatttgaaaa

SEQ ID NO: 115436 - DNA, 15 bp, Homo sapiens
ctgtactatttgaaa

SEQ ID NO: 115437 - DNA, 15 bp, Homo sapiens
actgtactatttgaa

SEQ ID NO: 115438 - DNA, 15 bp, Homo sapiens
tactgtactatttga

SEQ ID NO: 115439 - DNA, 15 bp, Homo sapiens
ttactgtactatttg

SEQ ID NO: 115440 - DNA, 15 bp, Homo sapiens
attactgtactattt

SEQ ID NO: 115441 - DNA, 15 bp, Homo sapiens
aattactgtactatt

SEQ ID NO: 115442 - DNA, 15 bp, Homo sapiens
aaattactgtactat

SEQ ID NO: 115443 - DNA, 15 bp, Homo sapiens
caaattactgtacta

SEQ ID NO: 115444 - DNA, 15 bp, Homo sapiens
gcaaattactgtact

SEQ ID NO: 115445 - DNA, 15 bp, Homo sapiens
ggcaaattactgtac

SEQ ID NO: 115446 - DNA, 15 bp, Homo sapiens
aggcaaattactgta

SEQ ID NO: 115447 - DNA, 15 bp, Homo sapiens
gaggcaaattactgt

SEQ ID NO: 115448 - DNA, 15 bp, Homo sapiens
tgaggcaaattactg

SEQ ID NO: 115449 - DNA, 15 bp, Homo sapiens
atgaggcaaattact

SEQ ID NO: 115450 - DNA, 15 bp, Homo sapiens
tatgaggcaaattac

SEQ ID NO: 115451 - DNA, 15 bp, Homo sapiens
ttatgaggcaaatta

SEQ ID NO: 115452 - DNA, 15 bp, Homo sapiens
cttatgaggcaaatt

SEQ ID NO: 115453 - DNA, 15 bp, Homo sapiens
gcttatgaggcaaat

SEQ ID NO: 115454 - DNA, 15 bp, Homo sapiens
tgcttatgaggcaaa

SEQ ID NO: 115455 - DNA, 15 bp, Homo sapiens
atgcttatgaggcaa

SEQ ID NO: 115456 - DNA, 15 bp, Homo sapiens
tatgcttatgaggca

SEQ ID NO: 115457 - DNA, 15 bp, Homo sapiens
ctatgcttatgaggc

SEQ ID NO: 115458 - DNA, 15 bp, Homo sapiens
cctatgcttatgagg

SEQ ID NO: 115459 - DNA, 15 bp, Homo sapiens
tcctatgcttatgag

SEQ ID NO: 115460 - DNA, 15 bp, Homo sapiens
ctcctatgcttatga

SEQ ID NO: 115461 - DNA, 15 bp, Homo sapiens
gctcctatgcttatg

SEQ ID NO: 115462 - DNA, 15 bp, Homo sapiens
tgctcctatgcttat

SEQ ID NO: 115463 - DNA, 15 bp, Homo sapiens
atgctcctatgctta

SEQ ID NO: 115464 - DNA, 15 bp, Homo sapiens
aatgctcctatgctt

SEQ ID NO: 115465 - DNA, 15 bp, Homo sapiens
caatgctcctatgct

SEQ ID NO: 115466 - DNA, 15 bp, Homo sapiens
ccaatgctcctatgc

SEQ ID NO: 115467 - DNA, 15 bp, Homo sapiens
cccaatgctcctatg

SEQ ID NO: 115468 - DNA, 15 bp, Homo sapiens
tcccaatgctcctat

SEQ ID NO: 115469 - DNA, 15 bp, Homo sapiens
ttcccaatgctccta

SEQ ID NO: 115470 - DNA, 15 bp, Homo sapiens
attcccaatgctcct

SEQ ID NO: 115471 - DNA, 15 bp, Homo sapiens
cattcccaatgctcc

SEQ ID NO: 115472 - DNA, 15 bp, Homo sapiens
tcattcccaatgctc

SEQ ID NO: 115473 - DNA, 15 bp, Homo sapiens
ctcattcccaatgct

SEQ ID NO: 115474 - DNA, 15 bp, Homo sapiens
tctcattcccaatgc

SEQ ID NO: 115475 - DNA, 15 bp, Homo sapiens
ctctcattcccaatg

SEQ ID NO: 115476 - DNA, 15 bp, Homo sapiens
cctctcattcccaat

SEQ ID NO: 115477 - DNA, 15 bp, Homo sapiens
ccctctcattcccaa

SEQ ID NO: 115478 - DNA, 15 bp, Homo sapiens
tccctctcattccca

SEQ ID NO: 115479 - DNA, 15 bp, Homo sapiens
ttccctctcattccc

SEQ ID NO: 115480 - DNA, 15 bp, Homo sapiens
gttccctctcattcc

SEQ ID NO: 115481 - DNA, 15 bp, Homo sapiens
agttccctctcattc

SEQ ID NO: 115482 - DNA, 15 bp, Homo sapiens
cagttccctctcatt

SEQ ID NO: 115483 - DNA, 15 bp, Homo sapiens
acagttccctctcat

SEQ ID NO: 115484 - DNA, 15 bp, Homo sapiens
cacagttccctctca

SEQ ID NO: 115485 - DNA, 15 bp, Homo sapiens
gcacagttccctctc

SEQ ID NO: 115486 - DNA, 15 bp, Homo sapiens
ggcacagttccctct

SEQ ID NO: 115487 - DNA, 15 bp, Homo sapiens
gggcacagttccctc

SEQ ID NO: 115488 - DNA, 15 bp, Homo sapiens
tgggcacagttccct

SEQ ID NO: 115489 - DNA, 15 bp, Homo sapiens
ctgggcacagttccc

SEQ ID NO: 115490 - DNA, 15 bp, Homo sapiens
actgggcacagttcc

SEQ ID NO: 115491 - DNA, 15 bp, Homo sapiens
tactgggcacagttc

SEQ ID NO: 115492 - DNA, 15 bp, Homo sapiens
atactgggcacagtt

SEQ ID NO: 115493 - DNA, 15 bp, Homo sapiens
tatactgggcacagt

SEQ ID NO: 115494 - DNA, 15 bp, Homo sapiens
gtatactgggcacag

SEQ ID NO: 115495 - DNA, 15 bp, Homo sapiens
agtatactgggcaca

SEQ ID NO: 115496 - DNA, 15 bp, Homo sapiens
cagtatactgggcac

SEQ ID NO: 115497 - DNA, 15 bp, Homo sapiens
acagtatactgggca

SEQ ID NO: 115498 - DNA, 15 bp, Homo sapiens
aacagtatactgggc

SEQ ID NO: 115499 - DNA, 15 bp, Homo sapiens
aaacagtatactggg

SEQ ID NO: 115500 - DNA, 15 bp, Homo sapiens
aaaacagtatactgg

SEQ ID NO: 115501 - DNA, 15 bp, Homo sapiens
aaaaacagtatactg

SEQ ID NO: 115502 - DNA, 15 bp, Homo sapiens
aaaaaacagtatact

SEQ ID NO: 115503 - DNA, 15 bp, Homo sapiens
aaaaaaacagtatac

SEQ ID NO: 115504 - DNA, 15 bp, Homo sapiens
aaaaaaaacagtata

SEQ ID NO: 115505 - DNA, 15 bp, Homo sapiens
gaaaaaaaacagtat

SEQ ID NO: 115506 - DNA, 15 bp, Homo sapiens
agaaaaaaaacagta

SEQ ID NO: 115507 - DNA, 15 bp, Homo sapiens
aagaaaaaaaacagt

SEQ ID NO: 115508 - DNA, 15 bp, Homo sapiens
gaagaaaaaaaacag

SEQ ID NO: 115509 - DNA, 15 bp, Homo sapiens
ggaagaaaaaaaaca

SEQ ID NO: 115510 - DNA, 15 bp, Homo sapiens
aggaagaaaaaaaac

SEQ ID NO: 115511 - DNA, 15 bp, Homo sapiens
gaggaagaaaaaaaa

SEQ ID NO: 115512 - DNA, 15 bp, Homo sapiens
ggaggaagaaaaaaa

SEQ ID NO: 115513 - DNA, 15 bp, Homo sapiens
tggaggaagaaaaaa

SEQ ID NO: 115514 - DNA, 15 bp, Homo sapiens
ttggaggaagaaaaa

SEQ ID NO: 115515 - DNA, 15 bp, Homo sapiens
attggaggaagaaaa

SEQ ID NO: 115516 - DNA, 15 bp, Homo sapiens
tattggaggaagaaa

SEQ ID NO: 115517 - DNA, 15 bp, Homo sapiens
ttattggaggaagaa

SEQ ID NO: 115518 - DNA, 15 bp, Homo sapiens
tttattggaggaaga

SEQ ID NO: 115519 - DNA, 15 bp, Homo sapiens
ttttattggaggaag

SEQ ID NO: 115520 - DNA, 15 bp, Homo sapiens
cttttattggaggaa

SEQ ID NO: 115521 - DNA, 15 bp, Homo sapiens
acttttattggagga

SEQ ID NO: 115522 - DNA, 15 bp, Homo sapiens
cacttttattggagg

SEQ ID NO: 115523 - DNA, 15 bp, Homo sapiens
ccacttttattggag

SEQ ID NO: 115524 - DNA, 15 bp, Homo sapiens
accacttttattgga

SEQ ID NO: 115525 - DNA, 15 bp, Homo sapiens
caccacttttattgg

SEQ ID NO: 115526 - DNA, 15 bp, Homo sapiens
acaccacttttattg

SEQ ID NO: 115527 - DNA, 15 bp, Homo sapiens
tacaccacttttatt

SEQ ID NO: 115528 - DNA, 15 bp, Homo sapiens
ctacaccacttttat

SEQ ID NO: 115529 - DNA, 15 bp, Homo sapiens
actacaccactttta

SEQ ID NO: 115530 - DNA, 15 bp, Homo sapiens
cactacaccactttt

SEQ ID NO: 115531 - DNA, 15 bp, Homo sapiens
gcactacaccacttt

SEQ ID NO: 115532 - DNA, 15 bp, Homo sapiens
ggcactacaccactt

SEQ ID NO: 115533 - DNA, 15 bp, Homo sapiens
cggcactacaccact

SEQ ID NO: 115534 - DNA, 15 bp, Homo sapiens
tcggcactacaccac

SEQ ID NO: 115535 - DNA, 15 bp, Homo sapiens
ttcggcactacacca

SEQ ID NO: 115536 - DNA, 15 bp, Homo sapiens
tttcggcactacacc

SEQ ID NO: 115537 - DNA, 15 bp, Homo sapiens
ctttcggcactacac

SEQ ID NO: 115538 - DNA, 15 bp, Homo sapiens
actttcggcactaca

SEQ ID NO: 115539 - DNA, 15 bp, Homo sapiens
cactttcggcactac

SEQ ID NO: 115540 - DNA, 15 bp, Homo sapiens
gcactttcggcacta

SEQ ID NO: 115541 - DNA, 15 bp, Homo sapiens
agcactttcggcact

SEQ ID NO: 115542 - DNA, 15 bp, Homo sapiens
tagcactttcggcac

SEQ ID NO: 115543 - DNA, 15 bp, Homo sapiens
ttagcactttcggca

SEQ ID NO: 115544 - DNA, 15 bp, Homo sapiens
tttagcactttcggc

SEQ ID NO: 115545 - DNA, 15 bp, Homo sapiens
ttttagcactttcgg

SEQ ID NO: 115546 - DNA, 15 bp, Homo sapiens
attttagcactttcg

SEQ ID NO: 115547 - DNA, 15 bp, Homo sapiens
tattttagcactttc

SEQ ID NO: 115548 - DNA, 15 bp, Homo sapiens
atattttagcacttt

SEQ ID NO: 115549 - DNA, 15 bp, Homo sapiens
aatattttagcactt

SEQ ID NO: 115550 - DNA, 15 bp, Homo sapiens
aaatattttagcact

SEQ ID NO: 115551 - DNA, 15 bp, Homo sapiens
taaatattttagcac

SEQ ID NO: 115552 - DNA, 15 bp, Homo sapiens
ctaaatattttagca

SEQ ID NO: 115553 - DNA, 15 bp, Homo sapiens
actaaatattttagc

SEQ ID NO: 115554 - DNA, 15 bp, Homo sapiens
cactaaatattttag

SEQ ID NO: 115555 - DNA, 15 bp, Homo sapiens
gcactaaatatttta

SEQ ID NO: 115556 - DNA, 15 bp, Homo sapiens
cgcactaaatatttt

SEQ ID NO: 115557 - DNA, 15 bp, Homo sapiens
ccgcactaaatattt

SEQ ID NO: 115558 - DNA, 15 bp, Homo sapiens
accgcactaaatatt

SEQ ID NO: 115559 - DNA, 15 bp, Homo sapiens
taccgcactaaatat

SEQ ID NO: 115560 - DNA, 15 bp, Homo sapiens
ataccgcactaaata

SEQ ID NO: 115561 - DNA, 15 bp, Homo sapiens
aataccgcactaaat

SEQ ID NO: 115562 - DNA, 15 bp, Homo sapiens
caataccgcactaaa

SEQ ID NO: 115563 - DNA, 15 bp, Homo sapiens
gcaataccgcactaa

SEQ ID NO: 115564 - DNA, 15 bp, Homo sapiens
agcaataccgcacta

SEQ ID NO: 115565 - DNA, 15 bp, Homo sapiens
gagcaataccgcact

SEQ ID NO: 115566 - DNA, 15 bp, Homo sapiens
agagcaataccgcac

SEQ ID NO: 115567 - DNA, 15 bp, Homo sapiens
cagagcaataccgca

SEQ ID NO: 115568 - DNA, 15 bp, Homo sapiens
acagagcaataccgc

SEQ ID NO: 115569 - DNA, 15 bp, Homo sapiens
cacagagcaataccg

SEQ ID NO: 115570 - DNA, 15 bp, Homo sapiens
tcacagagcaatacc

SEQ ID NO: 115571 - DNA, 15 bp, Homo sapiens
ttcacagagcaatac

SEQ ID NO: 115572 - DNA, 15 bp, Homo sapiens
attcacagagcaata

SEQ ID NO: 115573 - DNA, 15 bp, Homo sapiens
aattcacagagcaat

SEQ ID NO: 115574 - DNA, 15 bp, Homo sapiens
gaattcacagagcaa

SEQ ID NO: 115575 - DNA, 15 bp, Homo sapiens
tgaattcacagagca

SEQ ID NO: 115576 - DNA, 15 bp, Homo sapiens
ttgaattcacagagc

SEQ ID NO: 115577 - DNA, 15 bp, Homo sapiens
cttgaattcacagag

SEQ ID NO: 115578 - DNA, 15 bp, Homo sapiens
acttgaattcacaga

SEQ ID NO: 115579 - DNA, 15 bp, Homo sapiens
aacttgaattcacag

SEQ ID NO: 115580 - DNA, 15 bp, Homo sapiens
gaacttgaattcaca

SEQ ID NO: 115581 - DNA, 15 bp, Homo sapiens
tgaacttgaattcac

SEQ ID NO: 115582 - DNA, 15 bp, Homo sapiens
ttgaacttgaattca

SEQ ID NO: 115583 - DNA, 15 bp, Homo sapiens
gttgaacttgaattc

SEQ ID NO: 115584 - DNA, 15 bp, Homo sapiens
tgttgaacttgaatt

SEQ ID NO: 115585 - DNA, 15 bp, Homo sapiens
ctgttgaacttgaat

SEQ ID NO: 115586 - DNA, 15 bp, Homo sapiens
tctgttgaacttgaa

SEQ ID NO: 115587 - DNA, 15 bp, Homo sapiens
gtctgttgaacttga

SEQ ID NO: 115588 - DNA, 15 bp, Homo sapiens
agtctgttgaacttg

SEQ ID NO: 115589 - DNA, 15 bp, Homo sapiens
aagtctgttgaactt

SEQ ID NO: 115590 - DNA, 15 bp, Homo sapiens
gaagtctgttgaact

SEQ ID NO: 115591 - DNA, 15 bp, Homo sapiens
tgaagtctgttgaac

SEQ ID NO: 115592 - DNA, 15 bp, Homo sapiens
gtgaagtctgttgaa

SEQ ID NO: 115593 - DNA, 15 bp, Homo sapiens
agtgaagtctgttga

SEQ ID NO: 115594 - DNA, 15 bp, Homo sapiens
aagtgaagtctgttg

SEQ ID NO: 115595 - DNA, 15 bp, Homo sapiens
aaagtgaagtctgtt

SEQ ID NO: 115596 - DNA, 15 bp, Homo sapiens
caaagtgaagtctgt

SEQ ID NO: 115597 - DNA, 15 bp, Homo sapiens
ccaaagtgaagtctg

SEQ ID NO: 115598 - DNA, 15 bp, Homo sapiens
accaaagtgaagtct

SEQ ID NO: 115599 - DNA, 15 bp, Homo sapiens
gaccaaagtgaagtc

SEQ ID NO: 115600 - DNA, 15 bp, Homo sapiens
tgaccaaagtgaagt

SEQ ID NO: 115601 - DNA, 15 bp, Homo sapiens
atgaccaaagtgaag

SEQ ID NO: 115602 - DNA, 15 bp, Homo sapiens
catgaccaaagtgaa

SEQ ID NO: 115603 - DNA, 15 bp, Homo sapiens
acatgaccaaagtga

SEQ ID NO: 115604 - DNA, 15 bp, Homo sapiens
aacatgaccaaagtg

SEQ ID NO: 115605 - DNA, 15 bp, Homo sapiens
aaacatgaccaaagt

SEQ ID NO: 115606 - DNA, 15 bp, Homo sapiens
taaacatgaccaaag

SEQ ID NO: 115607 - DNA, 15 bp, Homo sapiens
ataaacatgaccaaa

SEQ ID NO: 115608 - DNA, 15 bp, Homo sapiens
aataaacatgaccaa

SEQ ID NO: 115609 - DNA, 15 bp, Homo sapiens
taataaacatgacca

SEQ ID NO: 115610 - DNA, 15 bp, Homo sapiens
ttaataaacatgacc

SEQ ID NO: 115611 - DNA, 15 bp, Homo sapiens
tttaataaacatgac

SEQ ID NO: 115612 - DNA, 15 bp, Homo sapiens
gtttaataaacatga

SEQ ID NO: 115613 - DNA, 15 bp, Homo sapiens
ggtttaataaacatg

SEQ ID NO: 115614 - DNA, 15 bp, Homo sapiens
tggtttaataaacat

SEQ ID NO: 115615 - DNA, 15 bp, Homo sapiens
gtggtttaataaaca

SEQ ID NO: 115616 - DNA, 15 bp, Homo sapiens
ggtggtttaataaac

SEQ ID NO: 115617 - DNA, 15 bp, Homo sapiens
tggtggtttaataaa

SEQ ID NO: 115618 - DNA, 15 bp, Homo sapiens
ctggtggtttaataa

SEQ ID NO: 115619 - DNA, 15 bp, Homo sapiens
actggtggtttaata

SEQ ID NO: 115620 - DNA, 15 bp, Homo sapiens
cactggtggtttaat

SEQ ID NO: 115621 - DNA, 15 bp, Homo sapiens
tcactggtggtttaa

SEQ ID NO: 115622 - DNA, 15 bp, Homo sapiens
gtcactggtggttta

SEQ ID NO: 115623 - DNA, 15 bp, Homo sapiens
tgtcactggtggttt

SEQ ID NO: 115624 - DNA, 15 bp, Homo sapiens
atgtcactggtggtt

SEQ ID NO: 115625 - DNA, 15 bp, Homo sapiens
aatgtcactggtggt

SEQ ID NO: 115626 - DNA, 15 bp, Homo sapiens
aaatgtcactggtgg

SEQ ID NO: 115627 - DNA, 15 bp, Homo sapiens
taaatgtcactggtg

SEQ ID NO: 115628 - DNA, 15 bp, Homo sapiens
ttaaatgtcactggt

SEQ ID NO: 115629 - DNA, 15 bp, Homo sapiens
tttaaatgtcactgg

SEQ ID NO: 115630 - DNA, 15 bp, Homo sapiens
ttttaaatgtcactg

SEQ ID NO: 115631 - DNA, 15 bp, Homo sapiens
tttttaaatgtcact

SEQ ID NO: 115632 - DNA, 15 bp, Homo sapiens
atttttaaatgtcac

SEQ ID NO: 115633 - DNA, 15 bp, Homo sapiens
tatttttaaatgtca

SEQ ID NO: 115634 - DNA, 15 bp, Homo sapiens
atatttttaaatgtc

SEQ ID NO: 115635 - DNA, 15 bp, Homo sapiens
tatatttttaaatgt

SEQ ID NO: 115636 - DNA, 15 bp, Homo sapiens
atatatttttaaatg

SEQ ID NO: 115637 - DNA, 15 bp, Homo sapiens
aatatatttttaaat

SEQ ID NO: 115638 - DNA, 15 bp, Homo sapiens
aaatatatttttaaa

SEQ ID NO: 115639 - DNA, 15 bp, Homo sapiens
aaaatatatttttaa

SEQ ID NO: 115640 - DNA, 15 bp, Homo sapiens
aaaaatatattttta

SEQ ID NO: 115641 - DNA, 15 bp, Homo sapiens
taaaaatatattttt

SEQ ID NO: 115642 - DNA, 15 bp, Homo sapiens
ctaaaaatatatttt

SEQ ID NO: 115643 - DNA, 15 bp, Homo sapiens
gctaaaaatatattt

SEQ ID NO: 115644 - DNA, 15 bp, Homo sapiens
tgctaaaaatatatt

SEQ ID NO: 115645 - DNA, 15 bp, Homo sapiens
ctgctaaaaatatat

SEQ ID NO: 115646 - DNA, 15 bp, Homo sapiens
actgctaaaaatata

SEQ ID NO: 115647 - DNA, 15 bp, Homo sapiens
gactgctaaaaatat

SEQ ID NO: 115648 - DNA, 15 bp, Homo sapiens
cgactgctaaaaata

SEQ ID NO: 115649 - DNA, 15 bp, Homo sapiens
acgactgctaaaaat

SEQ ID NO: 115650 - DNA, 15 bp, Homo sapiens
tacgactgctaaaaa

SEQ ID NO: 115651 - DNA, 15 bp, Homo sapiens
ttacgactgctaaaa

SEQ ID NO: 115652 - DNA, 15 bp, Homo sapiens
attacgactgctaaa

SEQ ID NO: 115653 - DNA, 15 bp, Homo sapiens
cattacgactgctaa

SEQ ID NO: 115654 - DNA, 15 bp, Homo sapiens
acattacgactgcta

SEQ ID NO: 115655 - DNA, 15 bp, Homo sapiens
aacattacgactgct

SEQ ID NO: 115656 - DNA, 15 bp, Homo sapiens
taacattacgactgc

SEQ ID NO: 115657 - DNA, 15 bp, Homo sapiens
ctaacattacgactg

SEQ ID NO: 115658 - DNA, 15 bp, Homo sapiens
actaacattacgact

SEQ ID NO: 115659 - DNA, 15 bp, Homo sapiens
gactaacattacgac

SEQ ID NO: 115660 - DNA, 15 bp, Homo sapiens
tgactaacattacga

SEQ ID NO: 115661 - DNA, 15 bp, Homo sapiens
gtgactaacattacg

SEQ ID NO: 115662 - DNA, 15 bp, Homo sapiens
ggtgactaacattac

SEQ ID NO: 115663 - DNA, 15 bp, Homo sapiens
tggtgactaacatta

SEQ ID NO: 115664 - DNA, 15 bp, Homo sapiens
ttggtgactaacatt

SEQ ID NO: 115665 - DNA, 15 bp, Homo sapiens
cttggtgactaacat

SEQ ID NO: 115666 - DNA, 15 bp, Homo sapiens
ccttggtgactaaca

SEQ ID NO: 115667 - DNA, 15 bp, Homo sapiens
cccttggtgactaac

SEQ ID NO: 115668 - DNA, 15 bp, Homo sapiens
tcccttggtgactaa

SEQ ID NO: 115669 - DNA, 15 bp, Homo sapiens
ttcccttggtgacta

SEQ ID NO: 115670 - DNA, 15 bp, Homo sapiens
cttcccttggtgact

SEQ ID NO: 115671 - DNA, 15 bp, Homo sapiens
ccttcccttggtgac

SEQ ID NO: 115672 - DNA, 15 bp, Homo sapiens
accttcccttggtga

SEQ ID NO: 115673 - DNA, 15 bp, Homo sapiens
caccttcccttggtg

SEQ ID NO: 115674 - DNA, 15 bp, Homo sapiens
ccaccttcccttggt

SEQ ID NO: 115675 - DNA, 15 bp, Homo sapiens
accaccttcccttgg

SEQ ID NO: 115676 - DNA, 15 bp, Homo sapiens
caccaccttcccttg

SEQ ID NO: 115677 - DNA, 15 bp, Homo sapiens
ccaccaccttccctt

SEQ ID NO: 115678 - DNA, 15 bp, Homo sapiens
tccaccaccttccct

SEQ ID NO: 115679 - DNA, 15 bp, Homo sapiens
ttccaccaccttccc

SEQ ID NO: 115680 - DNA, 15 bp, Homo sapiens
attccaccaccttcc

SEQ ID NO: 115681 - DNA, 15 bp, Homo sapiens
cattccaccaccttc

SEQ ID NO: 115682 - DNA, 15 bp, Homo sapiens
acattccaccacctt

SEQ ID NO: 115683 - DNA, 15 bp, Homo sapiens
gacattccaccacct

SEQ ID NO: 115684 - DNA, 15 bp, Homo sapiens
agacattccaccacc

SEQ ID NO: 115685 - DNA, 15 bp, Homo sapiens
tagacattccaccac

SEQ ID NO: 115686 - DNA, 15 bp, Homo sapiens
atagacattccacca

SEQ ID NO: 115687 - DNA, 15 bp, Homo sapiens
catagacattccacc

SEQ ID NO: 115688 - DNA, 15 bp, Homo sapiens
acatagacattccac

SEQ ID NO: 115689 - DNA, 15 bp, Homo sapiens
aacatagacattcca

SEQ ID NO: 115690 - DNA, 15 bp, Homo sapiens
aaacatagacattcc

SEQ ID NO: 115691 - DNA, 15 bp, Homo sapiens
aaaacatagacattc

SEQ ID NO: 115692 - DNA, 15 bp, Homo sapiens
aaaaacatagacatt

SEQ ID NO: 115693 - DNA, 15 bp, Homo sapiens
caaaaacatagacat

SEQ ID NO: 115694 - DNA, 15 bp, Homo sapiens
tcaaaaacatagaca

SEQ ID NO: 115695 - DNA, 15 bp, Homo sapiens
atcaaaaacatagac

SEQ ID NO: 115696 - DNA, 15 bp, Homo sapiens
aatcaaaaacataga

SEQ ID NO: 115697 - DNA, 15 bp, Homo sapiens
aaatcaaaaacatag

SEQ ID NO: 115698 - DNA, 15 bp, Homo sapiens
aaaatcaaaaacata

SEQ ID NO: 115699 - DNA, 15 bp, Homo sapiens
taaaatcaaaaacat

SEQ ID NO: 115700 - DNA, 15 bp, Homo sapiens
gtaaaatcaaaaaca

SEQ ID NO: 115701 - DNA, 15 bp, Homo sapiens
agtaaaatcaaaaac

SEQ ID NO: 115702 - DNA, 15 bp, Homo sapiens
cagtaaaatcaaaaa

SEQ ID NO: 115703 - DNA, 15 bp, Homo sapiens
acagtaaaatcaaaa

SEQ ID NO: 115704 - DNA, 15 bp, Homo sapiens
cacagtaaaatcaaa

SEQ ID NO: 115705 - DNA, 15 bp, Homo sapiens
tcacagtaaaatcaa

SEQ ID NO: 115706 - DNA, 15 bp, Homo sapiens
ctcacagtaaaatca

SEQ ID NO: 115707 - DNA, 15 bp, Homo sapiens
actcacagtaaaatc

SEQ ID NO: 115708 - DNA, 15 bp, Homo sapiens
aactcacagtaaaat

SEQ ID NO: 115709 - DNA, 15 bp, Homo sapiens
taactcacagtaaaa

SEQ ID NO: 115710 - DNA, 15 bp, Homo sapiens
ttaactcacagtaaa

SEQ ID NO: 115711 - DNA, 15 bp, Homo sapiens
tttaactcacagtaa

SEQ ID NO: 115712 - DNA, 15 bp, Homo sapiens
ttttaactcacagta

SEQ ID NO: 115713 - DNA, 15 bp, Homo sapiens
tttttaactcacagt

SEQ ID NO: 115714 - DNA, 15 bp, Homo sapiens
ctttttaactcacag

SEQ ID NO: 115715 - DNA, 15 bp, Homo sapiens
cctttttaactcaca

SEQ ID NO: 115716 - DNA, 15 bp, Homo sapiens
gcctttttaactcac

SEQ ID NO: 115717 - DNA, 15 bp, Homo sapiens
tgcctttttaactca

SEQ ID NO: 115718 - DNA, 15 bp, Homo sapiens
gtgcctttttaactc

SEQ ID NO: 115719 - DNA, 15 bp, Homo sapiens
tgtgcctttttaact

SEQ ID NO: 115720 - DNA, 15 bp, Homo sapiens
atgtgcctttttaac

SEQ ID NO: 115721 - DNA, 15 bp, Homo sapiens
aatgtgcctttttaa

SEQ ID NO: 115722 - DNA, 15 bp, Homo sapiens
aaatgtgccttttta

SEQ ID NO: 115723 - DNA, 15 bp, Homo sapiens
gaaatgtgccttttt

SEQ ID NO: 115724 - DNA, 15 bp, Homo sapiens
agaaatgtgcctttt

SEQ ID NO: 115725 - DNA, 15 bp, Homo sapiens
tagaaatgtgccttt

SEQ ID NO: 115726 - DNA, 15 bp, Homo sapiens
gtagaaatgtgcctt

SEQ ID NO: 115727 - DNA, 15 bp, Homo sapiens
ggtagaaatgtgcct

SEQ ID NO: 115728 - DNA, 15 bp, Homo sapiens
aggtagaaatgtgcc

SEQ ID NO: 115729 - DNA, 15 bp, Homo sapiens
aaggtagaaatgtgc

SEQ ID NO: 115730 - DNA, 15 bp, Homo sapiens
gaaggtagaaatgtg

SEQ ID NO: 115731 - DNA, 15 bp, Homo sapiens
agaaggtagaaatgt

SEQ ID NO: 115732 - DNA, 15 bp, Homo sapiens
tagaaggtagaaatg

SEQ ID NO: 115733 - DNA, 15 bp, Homo sapiens
atagaaggtagaaat

SEQ ID NO: 115734 - DNA, 15 bp, Homo sapiens
aatagaaggtagaaa

SEQ ID NO: 115735 - DNA, 15 bp, Homo sapiens
caatagaaggtagaa

SEQ ID NO: 115736 - DNA, 15 bp, Homo sapiens
acaatagaaggtaga

SEQ ID NO: 115737 - DNA, 15 bp, Homo sapiens
aacaatagaaggtag

SEQ ID NO: 115738 - DNA, 15 bp, Homo sapiens
aaacaatagaaggta

SEQ ID NO: 115739 - DNA, 15 bp, Homo sapiens
aaaacaatagaaggt

SEQ ID NO: 115740 - DNA, 15 bp, Homo sapiens
aaaaacaatagaagg

SEQ ID NO: 115741 - DNA, 15 bp, Homo sapiens
taaaaacaatagaag

SEQ ID NO: 115742 - DNA, 15 bp, Homo sapiens
ttaaaaacaatagaa

SEQ ID NO: 115743 - DNA, 15 bp, Homo sapiens
tttaaaaacaataga

SEQ ID NO: 115744 - DNA, 15 bp, Homo sapiens
atttaaaaacaatag

SEQ ID NO: 115745 - DNA, 15 bp, Homo sapiens
aatttaaaaacaata

SEQ ID NO: 115746 - DNA, 15 bp, Homo sapiens
gaatttaaaaacaat

SEQ ID NO: 115747 - DNA, 15 bp, Homo sapiens
tgaatttaaaaacaa

SEQ ID NO: 115748 - DNA, 15 bp, Homo sapiens
ttgaatttaaaaaca

SEQ ID NO: 115749 - DNA, 15 bp, Homo sapiens
cttgaatttaaaaac

SEQ ID NO: 115750 - DNA, 15 bp, Homo sapiens
tcttgaatttaaaaa

SEQ ID NO: 115751 - DNA, 15 bp, Homo sapiens
ttcttgaatttaaaa

SEQ ID NO: 115752 - DNA, 15 bp, Homo sapiens
attcttgaatttaaa

SEQ ID NO: 115753 - DNA, 15 bp, Homo sapiens
tattcttgaatttaa

SEQ ID NO: 115754 - DNA, 15 bp, Homo sapiens
ctattcttgaattta

SEQ ID NO: 115755 - DNA, 15 bp, Homo sapiens
cctattcttgaattt

SEQ ID NO: 115756 - DNA, 15 bp, Homo sapiens
ccctattcttgaatt

SEQ ID NO: 115757 - DNA, 15 bp, Homo sapiens
tccctattcttgaat

SEQ ID NO: 115758 - DNA, 15 bp, Homo sapiens
ttccctattcttgaa

SEQ ID NO: 115759 - DNA, 15 bp, Homo sapiens
attccctattcttga

SEQ ID NO: 115760 - DNA, 15 bp, Homo sapiens
aattccctattcttg

SEQ ID NO: 115761 - DNA, 15 bp, Homo sapiens
taattccctattctt

SEQ ID NO: 115762 - DNA, 15 bp, Homo sapiens
ctaattccctattct

SEQ ID NO: 115763 - DNA, 15 bp, Homo sapiens
actaattccctattc

SEQ ID NO: 115764 - DNA, 15 bp, Homo sapiens
aactaattccctatt

SEQ ID NO: 115765 - DNA, 15 bp, Homo sapiens
gaactaattccctat

SEQ ID NO: 115766 - DNA, 15 bp, Homo sapiens
ggaactaattcccta

SEQ ID NO: 115767 - DNA, 15 bp, Homo sapiens
aggaactaattccct

SEQ ID NO: 115768 - DNA, 15 bp, Homo sapiens
caggaactaattccc

SEQ ID NO: 115769 - DNA, 15 bp, Homo sapiens
ccaggaactaattcc

SEQ ID NO: 115770 - DNA, 15 bp, Homo sapiens
accaggaactaattc

SEQ ID NO: 115771 - DNA, 15 bp, Homo sapiens
caccaggaactaatt

SEQ ID NO: 115772 - DNA, 15 bp, Homo sapiens
acaccaggaactaat

SEQ ID NO: 115773 - DNA, 15 bp, Homo sapiens
aacaccaggaactaa

SEQ ID NO: 115774 - DNA, 15 bp, Homo sapiens
caacaccaggaacta

SEQ ID NO: 115775 - DNA, 15 bp, Homo sapiens
acaacaccaggaact

SEQ ID NO: 115776 - DNA, 15 bp, Homo sapiens
aacaacaccaggaac

SEQ ID NO: 115777 - DNA, 15 bp, Homo sapiens
aaacaacaccaggaa

SEQ ID NO: 115778 - DNA, 15 bp, Homo sapiens
taaacaacaccagga

SEQ ID NO: 115779 - DNA, 15 bp, Homo sapiens
gtaaacaacaccagg

SEQ ID NO: 115780 - DNA, 15 bp, Homo sapiens
cgtaaacaacaccag

SEQ ID NO: 115781 - DNA, 15 bp, Homo sapiens
tcgtaaacaacacca

SEQ ID NO: 115782 - DNA, 15 bp, Homo sapiens
ctcgtaaacaacacc

SEQ ID NO: 115783 - DNA, 15 bp, Homo sapiens
actcgtaaacaacac

SEQ ID NO: 115784 - DNA, 15 bp, Homo sapiens
cactcgtaaacaaca

SEQ ID NO: 115785 - DNA, 15 bp, Homo sapiens
acactcgtaaacaac

SEQ ID NO: 115786 - DNA, 15 bp, Homo sapiens
tacactcgtaaacaa

SEQ ID NO: 115787 - DNA, 15 bp, Homo sapiens
atacactcgtaaaca

SEQ ID NO: 115788 - DNA, 15 bp, Homo sapiens
aatacactcgtaaac

SEQ ID NO: 115789 - DNA, 15 bp, Homo sapiens
gaatacactcgtaaa

SEQ ID NO: 115790 - DNA, 15 bp, Homo sapiens
agaatacactcgtaa

SEQ ID NO: 115791 - DNA, 15 bp, Homo sapiens
gagaatacactcgta

SEQ ID NO: 115792 - DNA, 15 bp, Homo sapiens
cgagaatacactcgt

SEQ ID NO: 115793 - DNA, 15 bp, Homo sapiens
acgagaatacactcg

SEQ ID NO: 115794 - DNA, 15 bp, Homo sapiens
cacgagaatacactc

SEQ ID NO: 115795 - DNA, 15 bp, Homo sapiens
acacgagaatacact

SEQ ID NO: 115796 - DNA, 15 bp, Homo sapiens
gacacgagaatacac

SEQ ID NO: 115797 - DNA, 15 bp, Homo sapiens
tgacacgagaataca

SEQ ID NO: 115798 - DNA, 15 bp, Homo sapiens
ttgacacgagaatac

SEQ ID NO: 115799 - DNA, 15 bp, Homo sapiens
gttgacacgagaata

SEQ ID NO: 115800 - DNA, 15 bp, Homo sapiens
tgttgacacgagaat

SEQ ID NO: 115801 - DNA, 15 bp, Homo sapiens
atgttgacacgagaa

SEQ ID NO: 115802 - DNA, 15 bp, Homo sapiens
tatgttgacacgaga

SEQ ID NO: 115803 - DNA, 15 bp, Homo sapiens
gtatgttgacacgag

SEQ ID NO: 115804 - DNA, 15 bp, Homo sapiens
tgtatgttgacacga

SEQ ID NO: 115805 - DNA, 15 bp, Homo sapiens
ctgtatgttgacacg

SEQ ID NO: 115806 - DNA, 15 bp, Homo sapiens
cctgtatgttgacac

SEQ ID NO: 115807 - DNA, 15 bp, Homo sapiens
ccctgtatgttgaca

SEQ ID NO: 115808 - DNA, 15 bp, Homo sapiens
tccctgtatgttgac

SEQ ID NO: 115809 - DNA, 15 bp, Homo sapiens
atccctgtatgttga

SEQ ID NO: 115810 - DNA, 15 bp, Homo sapiens
aatccctgtatgttg

SEQ ID NO: 115811 - DNA, 15 bp, Homo sapiens
aaatccctgtatgtt

SEQ ID NO: 115812 - DNA, 15 bp, Homo sapiens
taaatccctgtatgt

SEQ ID NO: 115813 - DNA, 15 bp, Homo sapiens
ctaaatccctgtatg

SEQ ID NO: 115814 - DNA, 15 bp, Homo sapiens
tctaaatccctgtat

SEQ ID NO: 115815 - DNA, 15 bp, Homo sapiens
gtctaaatccctgta

SEQ ID NO: 115816 - DNA, 15 bp, Homo sapiens
tgtctaaatccctgt

SEQ ID NO: 115817 - DNA, 15 bp, Homo sapiens
atgtctaaatccctg

SEQ ID NO: 115818 - DNA, 15 bp, Homo sapiens
aatgtctaaatccct

SEQ ID NO: 115819 - DNA, 15 bp, Homo sapiens
aaatgtctaaatccc

SEQ ID NO: 115820 - DNA, 15 bp, Homo sapiens
taaatgtctaaatcc

SEQ ID NO: 115821 - DNA, 15 bp, Homo sapiens
ttaaatgtctaaatc

SEQ ID NO: 115822 - DNA, 15 bp, Homo sapiens
gttaaatgtctaaat

SEQ ID NO: 115823 - DNA, 15 bp, Homo sapiens
agttaaatgtctaaa

SEQ ID NO: 115824 - DNA, 15 bp, Homo sapiens
gagttaaatgtctaa

SEQ ID NO: 115825 - DNA, 15 bp, Homo sapiens
agagttaaatgtcta

SEQ ID NO: 115826 - DNA, 15 bp, Homo sapiens
gagagttaaatgtct

SEQ ID NO: 115827 - DNA, 15 bp, Homo sapiens
agagagttaaatgtc

SEQ ID NO: 115828 - DNA, 15 bp, Homo sapiens
cagagagttaaatgt

SEQ ID NO: 115829 - DNA, 15 bp, Homo sapiens
acagagagttaaatg

SEQ ID NO: 115830 - DNA, 15 bp, Homo sapiens
cacagagagttaaat

SEQ ID NO: 115831 - DNA, 15 bp, Homo sapiens
gcacagagagttaaa

SEQ ID NO: 115832 - DNA, 15 bp, Homo sapiens
ggcacagagagttaa

SEQ ID NO: 115833 - DNA, 15 bp, Homo sapiens
aggcacagagagtta

SEQ ID NO: 115834 - DNA, 15 bp, Homo sapiens
aaggcacagagagtt

SEQ ID NO: 115835 - DNA, 15 bp, Homo sapiens
caaggcacagagagt

SEQ ID NO: 115836 - DNA, 15 bp, Homo sapiens
tcaaggcacagagag

SEQ ID NO: 115837 - DNA, 15 bp, Homo sapiens
atcaaggcacagaga

SEQ ID NO: 115838 - DNA, 15 bp, Homo sapiens
tatcaaggcacagag

SEQ ID NO: 115839 - DNA, 15 bp, Homo sapiens
ttatcaaggcacaga

SEQ ID NO: 115840 - DNA, 15 bp, Homo sapiens
cttatcaaggcacag

SEQ ID NO: 115841 - DNA, 15 bp, Homo sapiens
tcttatcaaggcaca

SEQ ID NO: 115842 - DNA, 15 bp, Homo sapiens
ttcttatcaaggcac

SEQ ID NO: 115843 - DNA, 15 bp, Homo sapiens
attcttatcaaggca

SEQ ID NO: 115844 - DNA, 15 bp, Homo sapiens
tattcttatcaaggc

SEQ ID NO: 115845 - DNA, 15 bp, Homo sapiens
atattcttatcaagg

SEQ ID NO: 115846 - DNA, 15 bp, Homo sapiens
gatattcttatcaag

SEQ ID NO: 115847 - DNA, 15 bp, Homo sapiens
tgatattcttatcaa

SEQ ID NO: 115848 - DNA, 15 bp, Homo sapiens
atgatattcttatca

SEQ ID NO: 115849 - DNA, 15 bp, Homo sapiens
aatgatattcttatc

SEQ ID NO: 115850 - DNA, 15 bp, Homo sapiens
aaatgatattcttat

SEQ ID NO: 115851 - DNA, 15 bp, Homo sapiens
taaatgatattctta

SEQ ID NO: 115852 - DNA, 15 bp, Homo sapiens
ctaaatgatattctt

SEQ ID NO: 115853 - DNA, 15 bp, Homo sapiens
tctaaatgatattct

SEQ ID NO: 115854 - DNA, 15 bp, Homo sapiens
ctctaaatgatattc

SEQ ID NO: 115855 - DNA, 15 bp, Homo sapiens
actctaaatgatatt

SEQ ID NO: 115856 - DNA, 15 bp, Homo sapiens
cactctaaatgatat

SEQ ID NO: 115857 - DNA, 15 bp, Homo sapiens
acactctaaatgata

SEQ ID NO: 115858 - DNA, 15 bp, Homo sapiens
tacactctaaatgat

SEQ ID NO: 115859 - DNA, 15 bp, Homo sapiens
ctacactctaaatga

SEQ ID NO: 115860 - DNA, 15 bp, Homo sapiens
tctacactctaaatg

SEQ ID NO: 115861 - DNA, 15 bp, Homo sapiens
atctacactctaaat

SEQ ID NO: 115862 - DNA, 15 bp, Homo sapiens
tatctacactctaaa

SEQ ID NO: 115863 - DNA, 15 bp, Homo sapiens
gtatctacactctaa

SEQ ID NO: 115864 - DNA, 15 bp, Homo sapiens
agtatctacactcta

SEQ ID NO: 115865 - DNA, 15 bp, Homo sapiens
aagtatctacactct

SEQ ID NO: 115866 - DNA, 15 bp, Homo sapiens
aaagtatctacactc

SEQ ID NO: 115867 - DNA, 15 bp, Homo sapiens
aaaagtatctacact

SEQ ID NO: 115868 - DNA, 15 bp, Homo sapiens
caaaagtatctacac

SEQ ID NO: 115869 - DNA, 15 bp, Homo sapiens
gcaaaagtatctaca

SEQ ID NO: 115870 - DNA, 15 bp, Homo sapiens
ggcaaaagtatctac

SEQ ID NO: 115871 - DNA, 15 bp, Homo sapiens
aggcaaaagtatcta

SEQ ID NO: 115872 - DNA, 15 bp, Homo sapiens
aaggcaaaagtatct

SEQ ID NO: 115873 - DNA, 15 bp, Homo sapiens
aaaggcaaaagtatc

SEQ ID NO: 115874 - DNA, 15 bp, Homo sapiens
aaaaggcaaaagtat

SEQ ID NO: 115875 - DNA, 15 bp, Homo sapiens
aaaaaggcaaaagta

SEQ ID NO: 115876 - DNA, 15 bp, Homo sapiens
taaaaaggcaaaagt

SEQ ID NO: 115877 - DNA, 15 bp, Homo sapiens
ttaaaaaggcaaaag

SEQ ID NO: 115878 - DNA, 15 bp, Homo sapiens
tttaaaaaggcaaaa

SEQ ID NO: 115879 - DNA, 15 bp, Homo sapiens
ttttaaaaaggcaaa

SEQ ID NO: 115880 - DNA, 15 bp, Homo sapiens
tttttaaaaaggcaa

SEQ ID NO: 115881 - DNA, 15 bp, Homo sapiens
ttttttaaaaaggca

SEQ ID NO: 115882 - DNA, 15 bp, Homo sapiens
cttttttaaaaaggc

SEQ ID NO: 115883 - DNA, 15 bp, Homo sapiens
gcttttttaaaaagg

SEQ ID NO: 115884 - DNA, 15 bp, Homo sapiens
ggcttttttaaaaag

SEQ ID NO: 115885 - DNA, 15 bp, Homo sapiens
tggcttttttaaaaa

SEQ ID NO: 115886 - DNA, 15 bp, Homo sapiens
atggcttttttaaaa

SEQ ID NO: 115887 - DNA, 15 bp, Homo sapiens
aatggcttttttaaa

SEQ ID NO: 115888 - DNA, 15 bp, Homo sapiens
taatggcttttttaa

SEQ ID NO: 115889 - DNA, 15 bp, Homo sapiens
ataatggctttttta

SEQ ID NO: 115890 - DNA, 15 bp, Homo sapiens
aataatggctttttt

SEQ ID NO: 115891 - DNA, 15 bp, Homo sapiens
aaataatggcttttt

SEQ ID NO: 115892 - DNA, 15 bp, Homo sapiens
aaaataatggctttt

SEQ ID NO: 115893 - DNA, 15 bp, Homo sapiens
taaaataatggcttt

SEQ ID NO: 115894 - DNA, 15 bp, Homo sapiens
ataaaataatggctt

SEQ ID NO: 115895 - DNA, 15 bp, Homo sapiens
cataaaataatggct

SEQ ID NO: 115896 - DNA, 15 bp, Homo sapiens
tcataaaataatggc

SEQ ID NO: 115897 - DNA, 15 bp, Homo sapiens
ctcataaaataatgg

SEQ ID NO: 115898 - DNA, 15 bp, Homo sapiens
tctcataaaataatg

SEQ ID NO: 115899 - DNA, 15 bp, Homo sapiens
gtctcataaaataat

SEQ ID NO: 115900 - DNA, 15 bp, Homo sapiens
agtctcataaaataa

SEQ ID NO: 115901 - DNA, 15 bp, Homo sapiens
aagtctcataaaata

SEQ ID NO: 115902 - DNA, 15 bp, Homo sapiens
taagtctcataaaat

SEQ ID NO: 115903 - DNA, 15 bp, Homo sapiens
ctaagtctcataaaa

SEQ ID NO: 115904 - DNA, 15 bp, Homo sapiens
actaagtctcataaa

SEQ ID NO: 115905 - DNA, 15 bp, Homo sapiens
tactaagtctcataa

SEQ ID NO: 115906 - DNA, 15 bp, Homo sapiens
gtactaagtctcata

SEQ ID NO: 115907 - DNA, 15 bp, Homo sapiens
agtactaagtctcat

SEQ ID NO: 115908 - DNA, 15 bp, Homo sapiens
gagtactaagtctca

SEQ ID NO: 115909 - DNA, 15 bp, Homo sapiens
tgagtactaagtctc

SEQ ID NO: 115910 - DNA, 15 bp, Homo sapiens
gtgagtactaagtct

SEQ ID NO: 115911 - DNA, 15 bp, Homo sapiens
tgtgagtactaagtc

SEQ ID NO: 115912 - DNA, 15 bp, Homo sapiens
gtgtgagtactaagt

SEQ ID NO: 115913 - DNA, 15 bp, Homo sapiens
agtgtgagtactaag

SEQ ID NO: 115914 - DNA, 15 bp, Homo sapiens
cagtgtgagtactaa

SEQ ID NO: 115915 - DNA, 15 bp, Homo sapiens
gcagtgtgagtacta

SEQ ID NO: 115916 - DNA, 15 bp, Homo sapiens
tgcagtgtgagtact

SEQ ID NO: 115917 - DNA, 15 bp, Homo sapiens
ttgcagtgtgagtac

SEQ ID NO: 115918 - DNA, 15 bp, Homo sapiens
tttgcagtgtgagta

SEQ ID NO: 115919 - DNA, 15 bp, Homo sapiens
atttgcagtgtgagt

SEQ ID NO: 115920 - DNA, 15 bp, Homo sapiens
tatttgcagtgtgag

SEQ ID NO: 115921 - DNA, 15 bp, Homo sapiens
ttatttgcagtgtga

SEQ ID NO: 115922 - DNA, 15 bp, Homo sapiens
gttatttgcagtgtg

SEQ ID NO: 115923 - DNA, 15 bp, Homo sapiens
agttatttgcagtgt

SEQ ID NO: 115924 - DNA, 15 bp, Homo sapiens
tagttatttgcagtg

SEQ ID NO: 115925 - DNA, 15 bp, Homo sapiens
ctagttatttgcagt

SEQ ID NO: 115926 - DNA, 15 bp, Homo sapiens
actagttatttgcag

SEQ ID NO: 115927 - DNA, 15 bp, Homo sapiens
gactagttatttgca

SEQ ID NO: 115928 - DNA, 15 bp, Homo sapiens
tgactagttatttgc

SEQ ID NO: 115929 - DNA, 15 bp, Homo sapiens
ctgactagttatttg

SEQ ID NO: 115930 - DNA, 15 bp, Homo sapiens
gctgactagttattt

SEQ ID NO: 115931 - DNA, 15 bp, Homo sapiens
agctgactagttatt

SEQ ID NO: 115932 - DNA, 15 bp, Homo sapiens
gagctgactagttat

SEQ ID NO: 115933 - DNA, 15 bp, Homo sapiens
tgagctgactagtta

SEQ ID NO: 115934 - DNA, 15 bp, Homo sapiens
ctgagctgactagtt

SEQ ID NO: 115935 - DNA, 15 bp, Homo sapiens
actgagctgactagt

SEQ ID NO: 115936 - DNA, 15 bp, Homo sapiens
aactgagctgactag

SEQ ID NO: 115937 - DNA, 15 bp, Homo sapiens
aaactgagctgacta

SEQ ID NO: 115938 - DNA, 15 bp, Homo sapiens
aaaactgagctgact

SEQ ID NO: 115939 - DNA, 15 bp, Homo sapiens
taaaactgagctgac

SEQ ID NO: 115940 - DNA, 15 bp, Homo sapiens
ttaaaactgagctga

SEQ ID NO: 115941 - DNA, 15 bp, Homo sapiens
gttaaaactgagctg

SEQ ID NO: 115942 - DNA, 15 bp, Homo sapiens
agttaaaactgagct

SEQ ID NO: 115943 - DNA, 15 bp, Homo sapiens
aagttaaaactgagc

SEQ ID NO: 115944 - DNA, 15 bp, Homo sapiens
aaagttaaaactgag

SEQ ID NO: 115945 - DNA, 15 bp, Homo sapiens
taaagttaaaactga

SEQ ID NO: 115946 - DNA, 15 bp, Homo sapiens
ataaagttaaaactg

SEQ ID NO: 115947 - DNA, 15 bp, Homo sapiens
tataaagttaaaact

SEQ ID NO: 115948 - DNA, 15 bp, Homo sapiens
ctataaagttaaaac

SEQ ID NO: 115949 - DNA, 15 bp, Homo sapiens
cctataaagttaaaa

SEQ ID NO: 115950 - DNA, 15 bp, Homo sapiens
acctataaagttaaa

SEQ ID NO: 115951 - DNA, 15 bp, Homo sapiens
aacctataaagttaa

SEQ ID NO: 115952 - DNA, 15 bp, Homo sapiens
aaacctataaagtta

SEQ ID NO: 115953 - DNA, 15 bp, Homo sapiens
taaacctataaagtt

SEQ ID NO: 115954 - DNA, 15 bp, Homo sapiens
ataaacctataaagt

SEQ ID NO: 115955 - DNA, 15 bp, Homo sapiens
aataaacctataaag

SEQ ID NO: 115956 - DNA, 15 bp, Homo sapiens
caataaacctataaa

SEQ ID NO: 115957 - DNA, 15 bp, Homo sapiens
tcaataaacctataa

SEQ ID NO: 115958 - DNA, 15 bp, Homo sapiens
ctcaataaacctata

SEQ ID NO: 115959 - DNA, 15 bp, Homo sapiens
actcaataaacctat

SEQ ID NO: 115960 - DNA, 15 bp, Homo sapiens
aactcaataaaccta

SEQ ID NO: 115961 - DNA, 15 bp, Homo sapiens
aaactcaataaacct

SEQ ID NO: 115962 - DNA, 15 bp, Homo sapiens
gaaactcaataaacc

SEQ ID NO: 115963 - DNA, 15 bp, Homo sapiens
ggaaactcaataaac

SEQ ID NO: 115964 - DNA, 15 bp, Homo sapiens
aggaaactcaataaa

SEQ ID NO: 115965 - DNA, 15 bp, Homo sapiens
aaggaaactcaataa

SEQ ID NO: 115966 - DNA, 15 bp, Homo sapiens
aaaggaaactcaata

SEQ ID NO: 115967 - DNA, 15 bp, Homo sapiens
caaaggaaactcaat

SEQ ID NO: 115968 - DNA, 15 bp, Homo sapiens
acaaaggaaactcaa

SEQ ID NO: 115969 - DNA, 15 bp, Homo sapiens
cacaaaggaaactca

SEQ ID NO: 115970 - DNA, 15 bp, Homo sapiens
acacaaaggaaactc

SEQ ID NO: 115971 - DNA, 15 bp, Homo sapiens
cacacaaaggaaact

SEQ ID NO: 115972 - DNA, 15 bp, Homo sapiens
tcacacaaaggaaac

SEQ ID NO: 115973 - DNA, 15 bp, Homo sapiens
atcacacaaaggaaa

SEQ ID NO: 115974 - DNA, 15 bp, Homo sapiens
gatcacacaaaggaa

SEQ ID NO: 115975 - DNA, 15 bp, Homo sapiens
ggatcacacaaagga

SEQ ID NO: 115976 - DNA, 15 bp, Homo sapiens
tggatcacacaaagg

SEQ ID NO: 115977 - DNA, 15 bp, Homo sapiens
atggatcacacaaag

SEQ ID NO: 115978 - DNA, 15 bp, Homo sapiens
catggatcacacaaa

SEQ ID NO: 115979 - DNA, 15 bp, Homo sapiens
acatggatcacacaa

SEQ ID NO: 115980 - DNA, 15 bp, Homo sapiens
tacatggatcacaca

SEQ ID NO: 115981 - DNA, 15 bp, Homo sapiens
ctacatggatcacac

SEQ ID NO: 115982 - DNA, 15 bp, Homo sapiens
tctacatggatcaca

SEQ ID NO: 115983 - DNA, 15 bp, Homo sapiens
atctacatggatcac

SEQ ID NO: 115984 - DNA, 15 bp, Homo sapiens
catctacatggatca

SEQ ID NO: 115985 - DNA, 15 bp, Homo sapiens
gcatctacatggatc

SEQ ID NO: 115986 - DNA, 15 bp, Homo sapiens
ggcatctacatggat

SEQ ID NO: 115987 - DNA, 15 bp, Homo sapiens
aggcatctacatgga

SEQ ID NO: 115988 - DNA, 15 bp, Homo sapiens
gaggcatctacatgg

SEQ ID NO: 115989 - DNA, 15 bp, Homo sapiens
tgaggcatctacatg

SEQ ID NO: 115990 - DNA, 15 bp, Homo sapiens
ttgaggcatctacat

SEQ ID NO: 115991 - DNA, 15 bp, Homo sapiens
tttgaggcatctaca

SEQ ID NO: 115992 - DNA, 15 bp, Homo sapiens
ttttgaggcatctac

SEQ ID NO: 115993 - DNA, 15 bp, Homo sapiens
attttgaggcatcta

SEQ ID NO: 115994 - DNA, 15 bp, Homo sapiens
cattttgaggcatct

SEQ ID NO: 115995 - DNA, 15 bp, Homo sapiens
acattttgaggcatc

SEQ ID NO: 115996 - DNA, 15 bp, Homo sapiens
aacattttgaggcat

SEQ ID NO: 115997 - DNA, 15 bp, Homo sapiens
aaacattttgaggca

SEQ ID NO: 115998 - DNA, 15 bp, Homo sapiens
gaaacattttgaggc

SEQ ID NO: 115999 - DNA, 15 bp, Homo sapiens
agaaacattttgagg

SEQ ID NO: 116000 - DNA, 15 bp, Homo sapiens
aagaaacattttgag

SEQ ID NO: 116001 - DNA, 15 bp, Homo sapiens
gaagaaacattttga

SEQ ID NO: 116002 - DNA, 15 bp, Homo sapiens
agaagaaacattttg

SEQ ID NO: 116003 - DNA, 15 bp, Homo sapiens
aagaagaaacatttt

SEQ ID NO: 116004 - DNA, 15 bp, Homo sapiens
gaagaagaaacattt

SEQ ID NO: 116005 - DNA, 15 bp, Homo sapiens
agaagaagaaacatt

SEQ ID NO: 116006 - DNA, 15 bp, Homo sapiens
aagaagaagaaacat

SEQ ID NO: 116007 - DNA, 15 bp, Homo sapiens
gaagaagaagaaaca

SEQ ID NO: 116008 - DNA, 15 bp, Homo sapiens
agaagaagaagaaac

SEQ ID NO: 116009 - DNA, 15 bp, Homo sapiens
aagaagaagaagaaa

SEQ ID NO: 116010 - DNA, 15 bp, Homo sapiens
aaagaagaagaagaa

SEQ ID NO: 116011 - DNA, 15 bp, Homo sapiens
aaaagaagaagaaga

SEQ ID NO: 116012 - DNA, 15 bp, Homo sapiens
aaaaagaagaagaag

SEQ ID NO: 116013 - DNA, 15 bp, Homo sapiens
aaaaaagaagaagaa

SEQ ID NO: 116014 - DNA, 15 bp, Homo sapiens
aaaaaaagaagaaga

SEQ ID NO: 116015 - DNA, 15 bp, Homo sapiens
aaaaaaaagaagaag

SEQ ID NO: 116016 - DNA, 15 bp, Homo sapiens
taaaaaaaagaagaa

SEQ ID NO: 116017 - DNA, 15 bp, Homo sapiens
ttaaaaaaaagaaga

SEQ ID NO: 116018 - DNA, 15 bp, Homo sapiens
attaaaaaaaagaag

SEQ ID NO: 116019 - DNA, 15 bp, Homo sapiens
gattaaaaaaaagaa

SEQ ID NO: 116020 - DNA, 15 bp, Homo sapiens
agattaaaaaaaaga

SEQ ID NO: 116021 - DNA, 15 bp, Homo sapiens
aagattaaaaaaaag

SEQ ID NO: 116022 - DNA, 15 bp, Homo sapiens
taagattaaaaaaaa

SEQ ID NO: 116023 - DNA, 15 bp, Homo sapiens
ataagattaaaaaaa

SEQ ID NO: 116024 - DNA, 15 bp, Homo sapiens
tataagattaaaaaa

SEQ ID NO: 116025 - DNA, 15 bp, Homo sapiens
ttataagattaaaaa

SEQ ID NO: 116026 - DNA, 15 bp, Homo sapiens
cttataagattaaaa

SEQ ID NO: 116027 - DNA, 15 bp, Homo sapiens
tcttataagattaaa

SEQ ID NO: 116028 - DNA, 15 bp, Homo sapiens
atcttataagattaa

SEQ ID NO: 116029 - DNA, 15 bp, Homo sapiens
tatcttataagatta

SEQ ID NO: 116030 - DNA, 15 bp, Homo sapiens
atatcttataagatt

SEQ ID NO: 116031 - DNA, 15 bp, Homo sapiens
aatatcttataagat

SEQ ID NO: 116032 - DNA, 15 bp, Homo sapiens
aaatatcttataaga

SEQ ID NO: 116033 - DNA, 15 bp, Homo sapiens
aaaatatcttataag

SEQ ID NO: 116034 - DNA, 15 bp, Homo sapiens
aaaaatatcttataa

SEQ ID NO: 116035 - DNA, 15 bp, Homo sapiens
gaaaaatatcttata

SEQ ID NO: 116036 - DNA, 15 bp, Homo sapiens
agaaaaatatcttat

SEQ ID NO: 116037 - DNA, 15 bp, Homo sapiens
tagaaaaatatctta

SEQ ID NO: 116038 - DNA, 15 bp, Homo sapiens
ttagaaaaatatctt

SEQ ID NO: 116039 - DNA, 15 bp, Homo sapiens
cttagaaaaatatct

SEQ ID NO: 116040 - DNA, 15 bp, Homo sapiens
acttagaaaaatatc

SEQ ID NO: 116041 - DNA, 15 bp, Homo sapiens
tacttagaaaaatat

SEQ ID NO: 116042 - DNA, 15 bp, Homo sapiens
atacttagaaaaata

SEQ ID NO: 116043 - DNA, 15 bp, Homo sapiens
aatacttagaaaaat

SEQ ID NO: 116044 - DNA, 15 bp, Homo sapiens
aaatacttagaaaaa

SEQ ID NO: 116045 - DNA, 15 bp, Homo sapiens
gaaatacttagaaaa

SEQ ID NO: 116046 - DNA, 15 bp, Homo sapiens
ggaaatacttagaaa

SEQ ID NO: 116047 - DNA, 15 bp, Homo sapiens
tggaaatacttagaa

SEQ ID NO: 116048 - DNA, 15 bp, Homo sapiens
ctggaaatacttaga

SEQ ID NO: 116049 - DNA, 15 bp, Homo sapiens
tctggaaatacttag

SEQ ID NO: 116050 - DNA, 15 bp, Homo sapiens
ttctggaaatactta

SEQ ID NO: 116051 - DNA, 15 bp, Homo sapiens
tttctggaaatactt

SEQ ID NO: 116052 - DNA, 15 bp, Homo sapiens
gtttctggaaatact

SEQ ID NO: 116053 - DNA, 15 bp, Homo sapiens
tgtttctggaaatac

SEQ ID NO: 116054 - DNA, 15 bp, Homo sapiens
atgtttctggaaata

SEQ ID NO: 116055 - DNA, 15 bp, Homo sapiens
aatgtttctggaaat

SEQ ID NO: 116056 - DNA, 15 bp, Homo sapiens
aaatgtttctggaaa

SEQ ID NO: 116057 - DNA, 15 bp, Homo sapiens
caaatgtttctggaa

SEQ ID NO: 116058 - DNA, 15 bp, Homo sapiens
tcaaatgtttctgga

SEQ ID NO: 116059 - DNA, 15 bp, Homo sapiens
ctcaaatgtttctgg

SEQ ID NO: 116060 - DNA, 15 bp, Homo sapiens
tctcaaatgtttctg

SEQ ID NO: 116061 - DNA, 15 bp, Homo sapiens
ctctcaaatgtttct

SEQ ID NO: 116062 - DNA, 15 bp, Homo sapiens
actctcaaatgtttc

SEQ ID NO: 116063 - DNA, 15 bp, Homo sapiens
cactctcaaatgttt

SEQ ID NO: 116064 - DNA, 15 bp, Homo sapiens
gcactctcaaatgtt

SEQ ID NO: 116065 - DNA, 15 bp, Homo sapiens
ggcactctcaaatgt

SEQ ID NO: 116066 - DNA, 15 bp, Homo sapiens
gggcactctcaaatg

SEQ ID NO: 116067 - DNA, 15 bp, Homo sapiens
tgggcactctcaaat

SEQ ID NO: 116068 - DNA, 15 bp, Homo sapiens
atgggcactctcaaa

SEQ ID NO: 116069 - DNA, 15 bp, Homo sapiens
gatgggcactctcaa

SEQ ID NO: 116070 - DNA, 15 bp, Homo sapiens
tgatgggcactctca

SEQ ID NO: 116071 - DNA, 15 bp, Homo sapiens
atgatgggcactctc

SEQ ID NO: 116072 - DNA, 15 bp, Homo sapiens
aatgatgggcactct

SEQ ID NO: 116073 - DNA, 15 bp, Homo sapiens
aaatgatgggcactc

SEQ ID NO: 116074 - DNA, 15 bp, Homo sapiens
aaaatgatgggcact

SEQ ID NO: 116075 - DNA, 15 bp, Homo sapiens
gaaaatgatgggcac

SEQ ID NO: 116076 - DNA, 15 bp, Homo sapiens
tgaaaatgatgggca

SEQ ID NO: 116077 - DNA, 15 bp, Homo sapiens
ctgaaaatgatgggc

SEQ ID NO: 116078 - DNA, 15 bp, Homo sapiens
cctgaaaatgatggg

SEQ ID NO: 116079 - DNA, 15 bp, Homo sapiens
acctgaaaatgatgg

SEQ ID NO: 116080 - DNA, 15 bp, Homo sapiens
gacctgaaaatgatg

SEQ ID NO: 116081 - DNA, 15 bp, Homo sapiens
agacctgaaaatgat

SEQ ID NO: 116082 - DNA, 15 bp, Homo sapiens
cagacctgaaaatga

SEQ ID NO: 116083 - DNA, 15 bp, Homo sapiens
gcagacctgaaaatg

SEQ ID NO: 116084 - DNA, 15 bp, Homo sapiens
tgcagacctgaaaat

SEQ ID NO: 116085 - DNA, 15 bp, Homo sapiens
ctgcagacctgaaaa

SEQ ID NO: 116086 - DNA, 15 bp, Homo sapiens
tctgcagacctgaaa

SEQ ID NO: 116087 - DNA, 15 bp, Homo sapiens
ttctgcagacctgaa

SEQ ID NO: 116088 - DNA, 15 bp, Homo sapiens
gttctgcagacctga

SEQ ID NO: 116089 - DNA, 15 bp, Homo sapiens
ggttctgcagacctg

SEQ ID NO: 116090 - DNA, 15 bp, Homo sapiens
tggttctgcagacct

SEQ ID NO: 116091 - DNA, 15 bp, Homo sapiens
atggttctgcagacc

SEQ ID NO: 116092 - DNA, 15 bp, Homo sapiens
tatggttctgcagac

SEQ ID NO: 116093 - DNA, 15 bp, Homo sapiens
ctatggttctgcaga

SEQ ID NO: 116094 - DNA, 15 bp, Homo sapiens
gctatggttctgcag

SEQ ID NO: 116095 - DNA, 15 bp, Homo sapiens
agctatggttctgca

SEQ ID NO: 116096 - DNA, 15 bp, Homo sapiens
aagctatggttctgc

SEQ ID NO: 116097 - DNA, 15 bp, Homo sapiens
gaagctatggttctg

SEQ ID NO: 116098 - DNA, 15 bp, Homo sapiens
ggaagctatggttct

SEQ ID NO: 116099 - DNA, 15 bp, Homo sapiens
tggaagctatggttc

SEQ ID NO: 116100 - DNA, 15 bp, Homo sapiens
gtggaagctatggtt

SEQ ID NO: 116101 - DNA, 15 bp, Homo sapiens
cgtggaagctatggt

SEQ ID NO: 116102 - DNA, 15 bp, Homo sapiens
gcgtggaagctatgg

SEQ ID NO: 116103 - DNA, 15 bp, Homo sapiens
tgcgtggaagctatg

SEQ ID NO: 116104 - DNA, 15 bp, Homo sapiens
gtgcgtggaagctat

SEQ ID NO: 116105 - DNA, 15 bp, Homo sapiens
ggtgcgtggaagcta

SEQ ID NO: 116106 - DNA, 15 bp, Homo sapiens
aggtgcgtggaagct

SEQ ID NO: 116107 - DNA, 15 bp, Homo sapiens
caggtgcgtggaagc

SEQ ID NO: 116108 - DNA, 15 bp, Homo sapiens
tcaggtgcgtggaag

SEQ ID NO: 116109 - DNA, 15 bp, Homo sapiens
ttcaggtgcgtggaa

SEQ ID NO: 116110 - DNA, 15 bp, Homo sapiens
gttcaggtgcgtgga

SEQ ID NO: 116111 - DNA, 15 bp, Homo sapiens
cgttcaggtgcgtgg

SEQ ID NO: 116112 - DNA, 15 bp, Homo sapiens
tcgttcaggtgcgtg

SEQ ID NO: 116113 - DNA, 15 bp, Homo sapiens
ctcgttcaggtgcgt

SEQ ID NO: 116114 - DNA, 15 bp, Homo sapiens
gctcgttcaggtgcg

SEQ ID NO: 116115 - DNA, 15 bp, Homo sapiens
tgctcgttcaggtgc

SEQ ID NO: 116116 - DNA, 15 bp, Homo sapiens
gtgctcgttcaggtg

SEQ ID NO: 116117 - DNA, 15 bp, Homo sapiens
tgtgctcgttcaggt

SEQ ID NO: 116118 - DNA, 15 bp, Homo sapiens
ctgtgctcgttcagg

SEQ ID NO: 116119 - DNA, 15 bp, Homo sapiens
tctgtgctcgttcag

SEQ ID NO: 116120 - DNA, 15 bp, Homo sapiens
ttctgtgctcgttca

SEQ ID NO: 116121 - DNA, 15 bp, Homo sapiens
attctgtgctcgttc

SEQ ID NO: 116122 - DNA, 15 bp, Homo sapiens
cattctgtgctcgtt

SEQ ID NO: 116123 - DNA, 15 bp, Homo sapiens
tcattctgtgctcgt

SEQ ID NO: 116124 - DNA, 15 bp, Homo sapiens
ttcattctgtgctcg

SEQ ID NO: 116125 - DNA, 15 bp, Homo sapiens
gttcattctgtgctc

SEQ ID NO: 116126 - DNA, 15 bp, Homo sapiens
agttcattctgtgct

SEQ ID NO: 116127 - DNA, 15 bp, Homo sapiens
cagttcattctgtgc

SEQ ID NO: 116128 - DNA, 15 bp, Homo sapiens
tcagttcattctgtg

SEQ ID NO: 116129 - DNA, 15 bp, Homo sapiens
gtcagttcattctgt

SEQ ID NO: 116130 - DNA, 15 bp, Homo sapiens
cgtcagttcattctg

SEQ ID NO: 116131 - DNA, 15 bp, Homo sapiens
ccgtcagttcattct

SEQ ID NO: 116132 - DNA, 15 bp, Homo sapiens
accgtcagttcattc

SEQ ID NO: 116133 - DNA, 15 bp, Homo sapiens
caccgtcagttcatt

SEQ ID NO: 116134 - DNA, 15 bp, Homo sapiens
ccaccgtcagttcat

SEQ ID NO: 116135 - DNA, 15 bp, Homo sapiens
tccaccgtcagttca

SEQ ID NO: 116136 - DNA, 15 bp, Homo sapiens
ttccaccgtcagttc

SEQ ID NO: 116137 - DNA, 15 bp, Homo sapiens
cttccaccgtcagtt

SEQ ID NO: 116138 - DNA, 15 bp, Homo sapiens
tcttccaccgtcagt

SEQ ID NO: 116139 - DNA, 15 bp, Homo sapiens
gtcttccaccgtcag

SEQ ID NO: 116140 - DNA, 15 bp, Homo sapiens
tgtcttccaccgtca

SEQ ID NO: 116141 - DNA, 15 bp, Homo sapiens
atgtcttccaccgtc

SEQ ID NO: 116142 - DNA, 15 bp, Homo sapiens
aatgtcttccaccgt

SEQ ID NO: 116143 - DNA, 15 bp, Homo sapiens
taatgtcttccaccg

SEQ ID NO: 116144 - DNA, 15 bp, Homo sapiens
ataatgtcttccacc

SEQ ID NO: 116145 - DNA, 15 bp, Homo sapiens
cataatgtcttccac

SEQ ID NO: 116146 - DNA, 15 bp, Homo sapiens
tcataatgtcttcca

SEQ ID NO: 116147 - DNA, 15 bp, Homo sapiens
ctcataatgtcttcc

SEQ ID NO: 116148 - DNA, 15 bp, Homo sapiens
gctcataatgtcttc

SEQ ID NO: 116149 - DNA, 15 bp, Homo sapiens
agctcataatgtctt

SEQ ID NO: 116150 - DNA, 15 bp, Homo sapiens
cagctcataatgtct

SEQ ID NO: 116151 - DNA, 15 bp, Homo sapiens
acagctcataatgtc

SEQ ID NO: 116152 - DNA, 15 bp, Homo sapiens
cacagctcataatgt

SEQ ID NO: 116153 - DNA, 15 bp, Homo sapiens
acacagctcataatg

SEQ ID NO: 116154 - DNA, 15 bp, Homo sapiens
gacacagctcataat

SEQ ID NO: 116155 - DNA, 15 bp, Homo sapiens
ggacacagctcataa

SEQ ID NO: 116156 - DNA, 15 bp, Homo sapiens
tggacacagctcata

SEQ ID NO: 116157 - DNA, 15 bp, Homo sapiens
ttggacacagctcat

SEQ ID NO: 116158 - DNA, 15 bp, Homo sapiens
gttggacacagctca

SEQ ID NO: 116159 - DNA, 15 bp, Homo sapiens
cgttggacacagctc

SEQ ID NO: 116160 - DNA, 15 bp, Homo sapiens
acgttggacacagct

SEQ ID NO: 116161 - DNA, 15 bp, Homo sapiens
aacgttggacacagc

SEQ ID NO: 116162 - DNA, 15 bp, Homo sapiens
aaacgttggacacag

SEQ ID NO: 116163 - DNA, 15 bp, Homo sapiens
aaaacgttggacaca

SEQ ID NO: 116164 - DNA, 15 bp, Homo sapiens
taaaacgttggacac

SEQ ID NO: 116165 - DNA, 15 bp, Homo sapiens
ttaaaacgttggaca

SEQ ID NO: 116166 - DNA, 15 bp, Homo sapiens
gttaaaacgttggac

SEQ ID NO: 116167 - DNA, 15 bp, Homo sapiens
ggttaaaacgttgga

SEQ ID NO: 116168 - DNA, 15 bp, Homo sapiens
tggttaaaacgttgg

SEQ ID NO: 116169 - DNA, 15 bp, Homo sapiens
ttggttaaaacgttg

SEQ ID NO: 116170 - DNA, 15 bp, Homo sapiens
tttggttaaaacgtt

SEQ ID NO: 116171 - DNA, 15 bp, Homo sapiens
ctttggttaaaacgt

SEQ ID NO: 116172 - DNA, 15 bp, Homo sapiens
gctttggttaaaacg

SEQ ID NO: 116173 - DNA, 15 bp, Homo sapiens
cgctttggttaaaac

SEQ ID NO: 116174 - DNA, 15 bp, Homo sapiens
acgctttggttaaaa

SEQ ID NO: 116175 - DNA, 15 bp, Homo sapiens
tacgctttggttaaa

SEQ ID NO: 116176 - DNA, 15 bp, Homo sapiens
atacgctttggttaa

SEQ ID NO: 116177 - DNA, 15 bp, Homo sapiens
gatacgctttggtta

SEQ ID NO: 116178 - DNA, 15 bp, Homo sapiens
cgatacgctttggtt

SEQ ID NO: 116179 - DNA, 15 bp, Homo sapiens
acgatacgctttggt

SEQ ID NO: 116180 - DNA, 15 bp, Homo sapiens
tacgatacgctttgg

SEQ ID NO: 116181 - DNA, 15 bp, Homo sapiens
gtacgatacgctttg

SEQ ID NO: 116182 - DNA, 15 bp, Homo sapiens
ggtacgatacgcttt

SEQ ID NO: 116183 - DNA, 15 bp, Homo sapiens
tggtacgatacgctt

SEQ ID NO: 116184 - DNA, 15 bp, Homo sapiens
ttggtacgatacgct

SEQ ID NO: 116185 - DNA, 15 bp, Homo sapiens
gttggtacgatacgc

SEQ ID NO: 116186 - DNA, 15 bp, Homo sapiens
cgttggtacgatacg

SEQ ID NO: 116187 - DNA, 15 bp, Homo sapiens
tcgttggtacgatac

SEQ ID NO: 116188 - DNA, 15 bp, Homo sapiens
atcgttggtacgata

SEQ ID NO: 116189 - DNA, 15 bp, Homo sapiens
gatcgttggtacgat

SEQ ID NO: 116190 - DNA, 15 bp, Homo sapiens
agatcgttggtacga

SEQ ID NO: 116191 - DNA, 15 bp, Homo sapiens
cagatcgttggtacg

SEQ ID NO: 116192 - DNA, 15 bp, Homo sapiens
acagatcgttggtac

SEQ ID NO: 116193 - DNA, 15 bp, Homo sapiens
cacagatcgttggta

SEQ ID NO: 116194 - DNA, 15 bp, Homo sapiens
tcacagatcgttggt

SEQ ID NO: 116195 - DNA, 15 bp, Homo sapiens
ttcacagatcgttgg

SEQ ID NO: 116196 - DNA, 15 bp, Homo sapiens
tttcacagatcgttg

SEQ ID NO: 116197 - DNA, 15 bp, Homo sapiens
ttttcacagatcgtt

SEQ ID NO: 116198 - DNA, 15 bp, Homo sapiens
attttcacagatcgt

SEQ ID NO: 116199 - DNA, 15 bp, Homo sapiens
cattttcacagatcg

SEQ ID NO: 116200 - DNA, 15 bp, Homo sapiens
gcattttcacagatc

SEQ ID NO: 116201 - DNA, 15 bp, Homo sapiens
tgcattttcacagat

SEQ ID NO: 116202 - DNA, 15 bp, Homo sapiens
gtgcattttcacaga

SEQ ID NO: 116203 - DNA, 15 bp, Homo sapiens
agtgcattttcacag

SEQ ID NO: 116204 - DNA, 15 bp, Homo sapiens
cagtgcattttcaca

SEQ ID NO: 116205 - DNA, 15 bp, Homo sapiens
ccagtgcattttcac

SEQ ID NO: 116206 - DNA, 15 bp, Homo sapiens
tccagtgcattttca

SEQ ID NO: 116207 - DNA, 15 bp, Homo sapiens
ttccagtgcattttc

SEQ ID NO: 116208 - DNA, 15 bp, Homo sapiens
cttccagtgcatttt

SEQ ID NO: 116209 - DNA, 15 bp, Homo sapiens
gcttccagtgcattt

SEQ ID NO: 116210 - DNA, 15 bp, Homo sapiens
agcttccagtgcatt

SEQ ID NO: 116211 - DNA, 15 bp, Homo sapiens
aagcttccagtgcat

SEQ ID NO: 116212 - DNA, 15 bp, Homo sapiens
gaagcttccagtgca

SEQ ID NO: 116213 - DNA, 15 bp, Homo sapiens
agaagcttccagtgc

SEQ ID NO: 116214 - DNA, 15 bp, Homo sapiens
cagaagcttccagtg

SEQ ID NO: 116215 - DNA, 15 bp, Homo sapiens
ccagaagcttccagt

SEQ ID NO: 116216 - DNA, 15 bp, Homo sapiens
accagaagcttccag

SEQ ID NO: 116217 - DNA, 15 bp, Homo sapiens
gaccagaagcttcca

SEQ ID NO: 116218 - DNA, 15 bp, Homo sapiens
ggaccagaagcttcc

SEQ ID NO: 116219 - DNA, 15 bp, Homo sapiens
gggaccagaagcttc

SEQ ID NO: 116220 - DNA, 15 bp, Homo sapiens
cgggaccagaagctt

SEQ ID NO: 116221 - DNA, 15 bp, Homo sapiens
ccgggaccagaagct

SEQ ID NO: 116222 - DNA, 15 bp, Homo sapiens
accgggaccagaagc

SEQ ID NO: 116223 - DNA, 15 bp, Homo sapiens
aaccgggaccagaag

SEQ ID NO: 116224 - DNA, 15 bp, Homo sapiens
aaaccgggaccagaa

SEQ ID NO: 116225 - DNA, 15 bp, Homo sapiens
gaaaccgggaccaga

SEQ ID NO: 116226 - DNA, 15 bp, Homo sapiens
ggaaaccgggaccag

SEQ ID NO: 116227 - DNA, 15 bp, Homo sapiens
aggaaaccgggacca

SEQ ID NO: 116228 - DNA, 15 bp, Homo sapiens
aaggaaaccgggacc

SEQ ID NO: 116229 - DNA, 15 bp, Homo sapiens
aaaggaaaccgggac

SEQ ID NO: 116230 - DNA, 15 bp, Homo sapiens
caaaggaaaccggga

SEQ ID NO: 116231 - DNA, 15 bp, Homo sapiens
acaaaggaaaccggg

SEQ ID NO: 116232 - DNA, 15 bp, Homo sapiens
cacaaaggaaaccgg

SEQ ID NO: 116233 - DNA, 15 bp, Homo sapiens
ccacaaaggaaaccg

SEQ ID NO: 116234 - DNA, 15 bp, Homo sapiens
accacaaaggaaacc

SEQ ID NO: 116235 - DNA, 15 bp, Homo sapiens
gaccacaaaggaaac

SEQ ID NO: 116236 - DNA, 15 bp, Homo sapiens
agaccacaaaggaaa

SEQ ID NO: 116237 - DNA, 15 bp, Homo sapiens
tagaccacaaaggaa

SEQ ID NO: 116238 - DNA, 15 bp, Homo sapiens
atagaccacaaagga

SEQ ID NO: 116239 - DNA, 15 bp, Homo sapiens
catagaccacaaagg

SEQ ID NO: 116240 - DNA, 15 bp, Homo sapiens
acatagaccacaaag

SEQ ID NO: 116241 - DNA, 15 bp, Homo sapiens
cacatagaccacaaa

SEQ ID NO: 116242 - DNA, 15 bp, Homo sapiens
ccacatagaccacaa

SEQ ID NO: 116243 - DNA, 15 bp, Homo sapiens
cccacatagaccaca

SEQ ID NO: 116244 - DNA, 15 bp, Homo sapiens
acccacatagaccac

SEQ ID NO: 116245 - DNA, 15 bp, Homo sapiens
gacccacatagacca

SEQ ID NO: 116246 - DNA, 15 bp, Homo sapiens
agacccacatagacc

SEQ ID NO: 116247 - DNA, 15 bp, Homo sapiens
aagacccacatagac

SEQ ID NO: 116248 - DNA, 15 bp, Homo sapiens
caagacccacataga

SEQ ID NO: 116249 - DNA, 15 bp, Homo sapiens
acaagacccacatag

SEQ ID NO: 116250 - DNA, 15 bp, Homo sapiens
gacaagacccacata

SEQ ID NO: 116251 - DNA, 15 bp, Homo sapiens
ggacaagacccacat

SEQ ID NO: 116252 - DNA, 15 bp, Homo sapiens
aggacaagacccaca

SEQ ID NO: 116253 - DNA, 15 bp, Homo sapiens
gaggacaagacccac

SEQ ID NO: 116254 - DNA, 15 bp, Homo sapiens
tgaggacaagaccca

SEQ ID NO: 116255 - DNA, 15 bp, Homo sapiens
atgaggacaagaccc

SEQ ID NO: 116256 - DNA, 15 bp, Homo sapiens
aatgaggacaagacc

SEQ ID NO: 116257 - DNA, 15 bp, Homo sapiens
caatgaggacaagac

SEQ ID NO: 116258 - DNA, 15 bp, Homo sapiens
acaatgaggacaaga

SEQ ID NO: 116259 - DNA, 15 bp, Homo sapiens
tacaatgaggacaag

SEQ ID NO: 116260 - DNA, 15 bp, Homo sapiens
ttacaatgaggacaa

SEQ ID NO: 116261 - DNA, 15 bp, Homo sapiens
gttacaatgaggaca

SEQ ID NO: 116262 - DNA, 15 bp, Homo sapiens
agttacaatgaggac

SEQ ID NO: 116263 - DNA, 15 bp, Homo sapiens
gagttacaatgagga

SEQ ID NO: 116264 - DNA, 15 bp, Homo sapiens
ggagttacaatgagg

SEQ ID NO: 116265 - DNA, 15 bp, Homo sapiens
cggagttacaatgag

SEQ ID NO: 116266 - DNA, 15 bp, Homo sapiens
acggagttacaatga

SEQ ID NO: 116267 - DNA, 15 bp, Homo sapiens
tacggagttacaatg

SEQ ID NO: 116268 - DNA, 15 bp, Homo sapiens
atacggagttacaat

SEQ ID NO: 116269 - DNA, 15 bp, Homo sapiens
tatacggagttacaa

SEQ ID NO: 116270 - DNA, 15 bp, Homo sapiens
ctatacggagttaca

SEQ ID NO: 116271 - DNA, 15 bp, Homo sapiens
tctatacggagttac

SEQ ID NO: 116272 - DNA, 15 bp, Homo sapiens
atctatacggagtta

SEQ ID NO: 116273 - DNA, 15 bp, Homo sapiens
catctatacggagtt

SEQ ID NO: 116274 - DNA, 15 bp, Homo sapiens
ccatctatacggagt

SEQ ID NO: 116275 - DNA, 15 bp, Homo sapiens
accatctatacggag

SEQ ID NO: 116276 - DNA, 15 bp, Homo sapiens
taccatctatacgga

SEQ ID NO: 116277 - DNA, 15 bp, Homo sapiens
ataccatctatacgg

SEQ ID NO: 116278 - DNA, 15 bp, Homo sapiens
tataccatctatacg

SEQ ID NO: 116279 - DNA, 15 bp, Homo sapiens
ctataccatctatac

SEQ ID NO: 116280 - DNA, 15 bp, Homo sapiens
cctataccatctata

SEQ ID NO: 116281 - DNA, 15 bp, Homo sapiens
acctataccatctat

SEQ ID NO: 116282 - DNA, 15 bp, Homo sapiens
tacctataccatcta

SEQ ID NO: 116283 - DNA, 15 bp, Homo sapiens
atacctataccatct

SEQ ID NO: 116284 - DNA, 15 bp, Homo sapiens
aatacctataccatc

SEQ ID NO: 116285 - DNA, 15 bp, Homo sapiens
aaatacctataccat

SEQ ID NO: 116286 - DNA, 15 bp, Homo sapiens
aaaatacctatacca

SEQ ID NO: 116287 - DNA, 15 bp, Homo sapiens
taaaatacctatacc

SEQ ID NO: 116288 - DNA, 15 bp, Homo sapiens
ttaaaatacctatac

SEQ ID NO: 116289 - DNA, 15 bp, Homo sapiens
attaaaatacctata

SEQ ID NO: 116290 - DNA, 15 bp, Homo sapiens
gattaaaatacctat

SEQ ID NO: 116291 - DNA, 15 bp, Homo sapiens
ggattaaaataccta

SEQ ID NO: 116292 - DNA, 15 bp, Homo sapiens
aggattaaaatacct

SEQ ID NO: 116293 - DNA, 15 bp, Homo sapiens
caggattaaaatacc

SEQ ID NO: 116294 - DNA, 15 bp, Homo sapiens
ccaggattaaaatac

SEQ ID NO: 116295 - DNA, 15 bp, Homo sapiens
tccaggattaaaata

SEQ ID NO: 116296 - DNA, 15 bp, Homo sapiens
ttccaggattaaaat

SEQ ID NO: 116297 - DNA, 15 bp, Homo sapiens
cttccaggattaaaa

SEQ ID NO: 116298 - DNA, 15 bp, Homo sapiens
gcttccaggattaaa

SEQ ID NO: 116299 - DNA, 15 bp, Homo sapiens
agcttccaggattaa

SEQ ID NO: 116300 - DNA, 15 bp, Homo sapiens
cagcttccaggatta

SEQ ID NO: 116301 - DNA, 15 bp, Homo sapiens
acagcttccaggatt

SEQ ID NO: 116302 - DNA, 15 bp, Homo sapiens
aacagcttccaggat

SEQ ID NO: 116303 - DNA, 15 bp, Homo sapiens
caacagcttccagga

SEQ ID NO: 116304 - DNA, 15 bp, Homo sapiens
gcaacagcttccagg

SEQ ID NO: 116305 - DNA, 15 bp, Homo sapiens
ggcaacagcttccag

SEQ ID NO: 116306 - DNA, 15 bp, Homo sapiens
aggcaacagcttcca

SEQ ID NO: 116307 - DNA, 15 bp, Homo sapiens
aaggcaacagcttcc

SEQ ID NO: 116308 - DNA, 15 bp, Homo sapiens
taaggcaacagcttc

SEQ ID NO: 116309 - DNA, 15 bp, Homo sapiens
ataaggcaacagctt

SEQ ID NO: 116310 - DNA, 15 bp, Homo sapiens
aataaggcaacagct

SEQ ID NO: 116311 - DNA, 15 bp, Homo sapiens
taataaggcaacagc

SEQ ID NO: 116312 - DNA, 15 bp, Homo sapiens
ttaataaggcaacag

SEQ ID NO: 116313 - DNA, 15 bp, Homo sapiens
attaataaggcaaca

SEQ ID NO: 116314 - DNA, 15 bp, Homo sapiens
cattaataaggcaac

SEQ ID NO: 116315 - DNA, 15 bp, Homo sapiens
tcattaataaggcaa

SEQ ID NO: 116316 - DNA, 15 bp, Homo sapiens
atcattaataaggca

SEQ ID NO: 116317 - DNA, 15 bp, Homo sapiens
aatcattaataaggc

SEQ ID NO: 116318 - DNA, 15 bp, Homo sapiens
taatcattaataagg

SEQ ID NO: 116319 - DNA, 15 bp, Homo sapiens
ataatcattaataag

SEQ ID NO: 116320 - DNA, 15 bp, Homo sapiens
gataatcattaataa

SEQ ID NO: 116321 - DNA, 15 bp, Homo sapiens
agataatcattaata

SEQ ID NO: 116322 - DNA, 15 bp, Homo sapiens
aagataatcattaat

SEQ ID NO: 116323 - DNA, 15 bp, Homo sapiens
taagataatcattaa

SEQ ID NO: 116324 - DNA, 15 bp, Homo sapiens
ttaagataatcatta

SEQ ID NO: 116325 - DNA, 15 bp, Homo sapiens
tttaagataatcatt

SEQ ID NO: 116326 - DNA, 15 bp, Homo sapiens
ttttaagataatcat

SEQ ID NO: 116327 - DNA, 15 bp, Homo sapiens
attttaagataatca

SEQ ID NO: 116328 - DNA, 15 bp, Homo sapiens
aattttaagataatc

SEQ ID NO: 116329 - DNA, 15 bp, Homo sapiens
aaattttaagataat

SEQ ID NO: 116330 - DNA, 15 bp, Homo sapiens
gaaattttaagataa

SEQ ID NO: 116331 - DNA, 15 bp, Homo sapiens
ggaaattttaagata

SEQ ID NO: 116332 - DNA, 15 bp, Homo sapiens
aggaaattttaagat

SEQ ID NO: 116333 - DNA, 15 bp, Homo sapiens
gaggaaattttaaga

SEQ ID NO: 116334 - DNA, 15 bp, Homo sapiens
ggaggaaattttaag

SEQ ID NO: 116335 - DNA, 15 bp, Homo sapiens
tggaggaaattttaa

SEQ ID NO: 116336 - DNA, 15 bp, Homo sapiens
atggaggaaatttta

SEQ ID NO: 116337 - DNA, 15 bp, Homo sapiens
aatggaggaaatttt

SEQ ID NO: 116338 - DNA, 15 bp, Homo sapiens
caatggaggaaattt

SEQ ID NO: 116339 - DNA, 15 bp, Homo sapiens
ccaatggaggaaatt

SEQ ID NO: 116340 - DNA, 15 bp, Homo sapiens
cccaatggaggaaat

SEQ ID NO: 116341 - DNA, 15 bp, Homo sapiens
ccccaatggaggaaa

SEQ ID NO: 116342 - DNA, 15 bp, Homo sapiens
gccccaatggaggaa

SEQ ID NO: 116343 - DNA, 15 bp, Homo sapiens
tgccccaatggagga

SEQ ID NO: 116344 - DNA, 15 bp, Homo sapiens
ctgccccaatggagg

SEQ ID NO: 116345 - DNA, 15 bp, Homo sapiens
gctgccccaatggag

SEQ ID NO: 116346 - DNA, 15 bp, Homo sapiens
cgctgccccaatgga

SEQ ID NO: 116347 - DNA, 15 bp, Homo sapiens
acgctgccccaatgg

SEQ ID NO: 116348 - DNA, 15 bp, Homo sapiens
cacgctgccccaatg

SEQ ID NO: 116349 - DNA, 15 bp, Homo sapiens
ccacgctgccccaat

SEQ ID NO: 116350 - DNA, 15 bp, Homo sapiens
cccacgctgccccaa

SEQ ID NO: 116351 - DNA, 15 bp, Homo sapiens
gcccacgctgcccca

SEQ ID NO: 116352 - DNA, 15 bp, Homo sapiens
ggcccacgctgcccc

SEQ ID NO: 116353 - DNA, 15 bp, Homo sapiens
tggcccacgctgccc

SEQ ID NO: 116354 - DNA, 15 bp, Homo sapiens
ttggcccacgctgcc

SEQ ID NO: 116355 - DNA, 15 bp, Homo sapiens
tttggcccacgctgc

SEQ ID NO: 116356 - DNA, 15 bp, Homo sapiens
atttggcccacgctg

SEQ ID NO: 116357 - DNA, 15 bp, Homo sapiens
aatttggcccacgct

SEQ ID NO: 116358 - DNA, 15 bp, Homo sapiens
taatttggcccacgc

SEQ ID NO: 116359 - DNA, 15 bp, Homo sapiens
ttaatttggcccacg

SEQ ID NO: 116360 - DNA, 15 bp, Homo sapiens
tttaatttggcccac

SEQ ID NO: 116361 - DNA, 15 bp, Homo sapiens
ttttaatttggccca

SEQ ID NO: 116362 - DNA, 15 bp, Homo sapiens
gttttaatttggccc

SEQ ID NO: 116363 - DNA, 15 bp, Homo sapiens
tgttttaatttggcc

SEQ ID NO: 116364 - DNA, 15 bp, Homo sapiens
ttgttttaatttggc

SEQ ID NO: 116365 - DNA, 15 bp, Homo sapiens
tttgttttaatttgg

SEQ ID NO: 116366 - DNA, 15 bp, Homo sapiens
gtttgttttaatttg

SEQ ID NO: 116367 - DNA, 15 bp, Homo sapiens
tgtttgttttaattt

SEQ ID NO: 116368 - DNA, 15 bp, Homo sapiens
ttgtttgttttaatt

SEQ ID NO: 116369 - DNA, 15 bp, Homo sapiens
tttgtttgttttaat

SEQ ID NO: 116370 - DNA, 15 bp, Homo sapiens
ttttgtttgttttaa

SEQ ID NO: 116371 - DNA, 15 bp, Homo sapiens
gttttgtttgtttta

SEQ ID NO: 116372 - DNA, 15 bp, Homo sapiens
ggttttgtttgtttt

SEQ ID NO: 116373 - DNA, 15 bp, Homo sapiens
cggttttgtttgttt

SEQ ID NO: 116374 - DNA, 15 bp, Homo sapiens
gcggttttgtttgtt

SEQ ID NO: 116375 - DNA, 15 bp, Homo sapiens
tgcggttttgtttgt

SEQ ID NO: 116376 - DNA, 15 bp, Homo sapiens
ttgcggttttgtttg

SEQ ID NO: 116377 - DNA, 15 bp, Homo sapiens
gttgcggttttgttt

SEQ ID NO: 116378 - DNA, 15 bp, Homo sapiens
agttgcggttttgtt

SEQ ID NO: 116379 - DNA, 15 bp, Homo sapiens
gagttgcggttttgt

SEQ ID NO: 116380 - DNA, 15 bp, Homo sapiens
ggagttgcggttttg

SEQ ID NO: 116381 - DNA, 15 bp, Homo sapiens
aggagttgcggtttt

SEQ ID NO: 116382 - DNA, 15 bp, Homo sapiens
gaggagttgcggttt

SEQ ID NO: 116383 - DNA, 15 bp, Homo sapiens
ggaggagttgcggtt

SEQ ID NO: 116384 - DNA, 15 bp, Homo sapiens
tggaggagttgcggt

SEQ ID NO: 116385 - DNA, 15 bp, Homo sapiens
gtggaggagttgcgg

SEQ ID NO: 116386 - DNA, 15 bp, Homo sapiens
tgtggaggagttgcg

SEQ ID NO: 116387 - DNA, 15 bp, Homo sapiens
ctgtggaggagttgc

SEQ ID NO: 116388 - DNA, 15 bp, Homo sapiens
tctgtggaggagttg

SEQ ID NO: 116389 - DNA, 15 bp, Homo sapiens
ttctgtggaggagtt

SEQ ID NO: 116390 - DNA, 15 bp, Homo sapiens
tttctgtggaggagt

SEQ ID NO: 116391 - DNA, 15 bp, Homo sapiens
gtttctgtggaggag

SEQ ID NO: 116392 - DNA, 15 bp, Homo sapiens
tgtttctgtggagga

SEQ ID NO: 116393 - DNA, 15 bp, Homo sapiens
gtgtttctgtggagg

SEQ ID NO: 116394 - DNA, 15 bp, Homo sapiens
tgtgtttctgtggag

SEQ ID NO: 116395 - DNA, 15 bp, Homo sapiens
ttgtgtttctgtgga

SEQ ID NO: 116396 - DNA, 15 bp, Homo sapiens
tttgtgtttctgtgg

SEQ ID NO: 116397 - DNA, 15 bp, Homo sapiens
gtttgtgtttctgtg

SEQ ID NO: 116398 - DNA, 15 bp, Homo sapiens
tgtttgtgtttctgt

SEQ ID NO: 116399 - DNA, 15 bp, Homo sapiens
gtgtttgtgtttctg

SEQ ID NO: 116400 - DNA, 15 bp, Homo sapiens
tgtgtttgtgtttct

SEQ ID NO: 116401 - DNA, 15 bp, Homo sapiens
ctgtgtttgtgtttc

SEQ ID NO: 116402 - DNA, 15 bp, Homo sapiens
actgtgtttgtgttt

SEQ ID NO: 116403 - DNA, 15 bp, Homo sapiens
aactgtgtttgtgtt

SEQ ID NO: 116404 - DNA, 15 bp, Homo sapiens
taactgtgtttgtgt

SEQ ID NO: 116405 - DNA, 15 bp, Homo sapiens
ataactgtgtttgtg

SEQ ID NO: 116406 - DNA, 15 bp, Homo sapiens
aataactgtgtttgt

SEQ ID NO: 116407 - DNA, 15 bp, Homo sapiens
gaataactgtgtttg

SEQ ID NO: 116408 - DNA, 15 bp, Homo sapiens
ggaataactgtgttt

SEQ ID NO: 116409 - DNA, 15 bp, Homo sapiens
tggaataactgtgtt

SEQ ID NO: 116410 - DNA, 15 bp, Homo sapiens
atggaataactgtgt

SEQ ID NO: 116411 - DNA, 15 bp, Homo sapiens
catggaataactgtg

SEQ ID NO: 116412 - DNA, 15 bp, Homo sapiens
tcatggaataactgt

SEQ ID NO: 116413 - DNA, 15 bp, Homo sapiens
ttcatggaataactg

SEQ ID NO: 116414 - DNA, 15 bp, Homo sapiens
cttcatggaataact

SEQ ID NO: 116415 - DNA, 15 bp, Homo sapiens
acttcatggaataac

SEQ ID NO: 116416 - DNA, 15 bp, Homo sapiens
aacttcatggaataa

SEQ ID NO: 116417 - DNA, 15 bp, Homo sapiens
aaacttcatggaata

SEQ ID NO: 116418 - DNA, 15 bp, Homo sapiens
taaacttcatggaat

SEQ ID NO: 116419 - DNA, 15 bp, Homo sapiens
ctaaacttcatggaa

SEQ ID NO: 116420 - DNA, 15 bp, Homo sapiens
actaaacttcatgga

SEQ ID NO: 116421 - DNA, 15 bp, Homo sapiens
tactaaacttcatgg

SEQ ID NO: 116422 - DNA, 15 bp, Homo sapiens
atactaaacttcatg

SEQ ID NO: 116423 - DNA, 15 bp, Homo sapiens
aatactaaacttcat

SEQ ID NO: 116424 - DNA, 15 bp, Homo sapiens
aaatactaaacttca

SEQ ID NO: 116425 - DNA, 15 bp, Homo sapiens
caaatactaaacttc

SEQ ID NO: 116426 - DNA, 15 bp, Homo sapiens
ccaaatactaaactt

SEQ ID NO: 116427 - DNA, 15 bp, Homo sapiens
accaaatactaaact

SEQ ID NO: 116428 - DNA, 15 bp, Homo sapiens
aaccaaatactaaac

SEQ ID NO: 116429 - DNA, 15 bp, Homo sapiens
caaccaaatactaaa

SEQ ID NO: 116430 - DNA, 15 bp, Homo sapiens
tcaaccaaatactaa

SEQ ID NO: 116431 - DNA, 15 bp, Homo sapiens
gtcaaccaaatacta

SEQ ID NO: 116432 - DNA, 15 bp, Homo sapiens
tgtcaaccaaatact

SEQ ID NO: 116433 - DNA, 15 bp, Homo sapiens
atgtcaaccaaatac

SEQ ID NO: 116434 - DNA, 15 bp, Homo sapiens
tatgtcaaccaaata

SEQ ID NO: 116435 - DNA, 15 bp, Homo sapiens
ctatgtcaaccaaat

SEQ ID NO: 116436 - DNA, 15 bp, Homo sapiens
actatgtcaaccaaa

SEQ ID NO: 116437 - DNA, 15 bp, Homo sapiens
cactatgtcaaccaa

SEQ ID NO: 116438 - DNA, 15 bp, Homo sapiens
gcactatgtcaacca

SEQ ID NO: 116439 - DNA, 15 bp, Homo sapiens
agcactatgtcaacc

SEQ ID NO: 116440 - DNA, 15 bp, Homo sapiens
gagcactatgtcaac

SEQ ID NO: 116441 - DNA, 15 bp, Homo sapiens
agagcactatgtcaa

SEQ ID NO: 116442 - DNA, 15 bp, Homo sapiens
aagagcactatgtca

SEQ ID NO: 116443 - DNA, 15 bp, Homo sapiens
gaagagcactatgtc

SEQ ID NO: 116444 - DNA, 15 bp, Homo sapiens
tgaagagcactatgt

SEQ ID NO: 116445 - DNA, 15 bp, Homo sapiens
ttgaagagcactatg

SEQ ID NO: 116446 - DNA, 15 bp, Homo sapiens
tttgaagagcactat

SEQ ID NO: 116447 - DNA, 15 bp, Homo sapiens
atttgaagagcacta

SEQ ID NO: 116448 - DNA, 15 bp, Homo sapiens
aatttgaagagcact

SEQ ID NO: 116449 - DNA, 15 bp, Homo sapiens
gaatttgaagagcac

SEQ ID NO: 116450 - DNA, 15 bp, Homo sapiens
tgaatttgaagagca

SEQ ID NO: 116451 - DNA, 15 bp, Homo sapiens
atgaatttgaagagc

SEQ ID NO: 116452 - DNA, 15 bp, Homo sapiens
gatgaatttgaagag

SEQ ID NO: 116453 - DNA, 15 bp, Homo sapiens
ggatgaatttgaaga

SEQ ID NO: 116454 - DNA, 15 bp, Homo sapiens
gggatgaatttgaag

SEQ ID NO: 116455 - DNA, 15 bp, Homo sapiens
tgggatgaatttgaa

SEQ ID NO: 116456 - DNA, 15 bp, Homo sapiens
atgggatgaatttga

SEQ ID NO: 116457 - DNA, 15 bp, Homo sapiens
aatgggatgaatttg

SEQ ID NO: 116458 - DNA, 15 bp, Homo sapiens
taatgggatgaattt

SEQ ID NO: 116459 - DNA, 15 bp, Homo sapiens
gtaatgggatgaatt

SEQ ID NO: 116460 - DNA, 15 bp, Homo sapiens
ggtaatgggatgaat

SEQ ID NO: 116461 - DNA, 15 bp, Homo sapiens
gggtaatgggatgaa

SEQ ID NO: 116462 - DNA, 15 bp, Homo sapiens
agggtaatgggatga

SEQ ID NO: 116463 - DNA, 15 bp, Homo sapiens
tagggtaatgggatg

SEQ ID NO: 116464 - DNA, 15 bp, Homo sapiens
ttagggtaatgggat

SEQ ID NO: 116465 - DNA, 15 bp, Homo sapiens
tttagggtaatggga

SEQ ID NO: 116466 - DNA, 15 bp, Homo sapiens
ttttagggtaatggg

SEQ ID NO: 116467 - DNA, 15 bp, Homo sapiens
cttttagggtaatgg

SEQ ID NO: 116468 - DNA, 15 bp, Homo sapiens
acttttagggtaatg

SEQ ID NO: 116469 - DNA, 15 bp, Homo sapiens
tacttttagggtaat

SEQ ID NO: 116470 - DNA, 15 bp, Homo sapiens
ttacttttagggtaa

SEQ ID NO: 116471 - DNA, 15 bp, Homo sapiens
attacttttagggta

SEQ ID NO: 116472 - DNA, 15 bp, Homo sapiens
tattacttttagggt

SEQ ID NO: 116473 - DNA, 15 bp, Homo sapiens
ttattacttttaggg

SEQ ID NO: 116474 - DNA, 15 bp, Homo sapiens
gttattacttttagg

SEQ ID NO: 116475 - DNA, 15 bp, Homo sapiens
agttattacttttag

SEQ ID NO: 116476 - DNA, 15 bp, Homo sapiens
aagttattactttta

SEQ ID NO: 116477 - DNA, 15 bp, Homo sapiens
aaagttattactttt

SEQ ID NO: 116478 - DNA, 15 bp, Homo sapiens
caaagttattacttt

SEQ ID NO: 116479 - DNA, 15 bp, Homo sapiens
tcaaagttattactt

SEQ ID NO: 116480 - DNA, 15 bp, Homo sapiens
atcaaagttattact

SEQ ID NO: 116481 - DNA, 15 bp, Homo sapiens
catcaaagttattac

SEQ ID NO: 116482 - DNA, 15 bp, Homo sapiens
gcatcaaagttatta

SEQ ID NO: 116483 - DNA, 15 bp, Homo sapiens
agcatcaaagttatt

SEQ ID NO: 116484 - DNA, 15 bp, Homo sapiens
aagcatcaaagttat

SEQ ID NO: 116485 - DNA, 15 bp, Homo sapiens
caagcatcaaagtta

SEQ ID NO: 116486 - DNA, 15 bp, Homo sapiens
gcaagcatcaaagtt

SEQ ID NO: 116487 - DNA, 15 bp, Homo sapiens
agcaagcatcaaagt

SEQ ID NO: 116488 - DNA, 15 bp, Homo sapiens
aagcaagcatcaaag

SEQ ID NO: 116489 - DNA, 15 bp, Homo sapiens
aaagcaagcatcaaa

SEQ ID NO: 116490 - DNA, 15 bp, Homo sapiens
taaagcaagcatcaa

SEQ ID NO: 116491 - DNA, 15 bp, Homo sapiens
ttaaagcaagcatca

SEQ ID NO: 116492 - DNA, 15 bp, Homo sapiens
gttaaagcaagcatc

SEQ ID NO: 116493 - DNA, 15 bp, Homo sapiens
agttaaagcaagcat

SEQ ID NO: 116494 - DNA, 15 bp, Homo sapiens
aagttaaagcaagca

SEQ ID NO: 116495 - DNA, 15 bp, Homo sapiens
aaagttaaagcaagc

SEQ ID NO: 116496 - DNA, 15 bp, Homo sapiens
taaagttaaagcaag

SEQ ID NO: 116497 - DNA, 15 bp, Homo sapiens
ctaaagttaaagcaa

SEQ ID NO: 116498 - DNA, 15 bp, Homo sapiens
actaaagttaaagca

SEQ ID NO: 116499 - DNA, 15 bp, Homo sapiens
gactaaagttaaagc

SEQ ID NO: 116500 - DNA, 15 bp, Homo sapiens
ggactaaagttaaag

SEQ ID NO: 116501 - DNA, 15 bp, Homo sapiens
gggactaaagttaaa

SEQ ID NO: 116502 - DNA, 15 bp, Homo sapiens
tgggactaaagttaa

SEQ ID NO: 116503 - DNA, 15 bp, Homo sapiens
atgggactaaagtta

SEQ ID NO: 116504 - DNA, 15 bp, Homo sapiens
gatgggactaaagtt

SEQ ID NO: 116505 - DNA, 15 bp, Homo sapiens
agatgggactaaagt

SEQ ID NO: 116506 - DNA, 15 bp, Homo sapiens
gagatgggactaaag

SEQ ID NO: 116507 - DNA, 15 bp, Homo sapiens
agagatgggactaaa

SEQ ID NO: 116508 - DNA, 15 bp, Homo sapiens
cagagatgggactaa

SEQ ID NO: 116509 - DNA, 15 bp, Homo sapiens
gcagagatgggacta

SEQ ID NO: 116510 - DNA, 15 bp, Homo sapiens
ggcagagatgggact

SEQ ID NO: 116511 - DNA, 15 bp, Homo sapiens
tggcagagatgggac

SEQ ID NO: 116512 - DNA, 15 bp, Homo sapiens
gtggcagagatggga

SEQ ID NO: 116513 - DNA, 15 bp, Homo sapiens
agtggcagagatggg

SEQ ID NO: 116514 - DNA, 15 bp, Homo sapiens
aagtggcagagatgg

SEQ ID NO: 116515 - DNA, 15 bp, Homo sapiens
aaagtggcagagatg

SEQ ID NO: 116516 - DNA, 15 bp, Homo sapiens
caaagtggcagagat

SEQ ID NO: 116517 - DNA, 15 bp, Homo sapiens
tcaaagtggcagaga

SEQ ID NO: 116518 - DNA, 15 bp, Homo sapiens
atcaaagtggcagag

SEQ ID NO: 116519 - DNA, 15 bp, Homo sapiens
catcaaagtggcaga

SEQ ID NO: 116520 - DNA, 15 bp, Homo sapiens
gcatcaaagtggcag

SEQ ID NO: 116521 - DNA, 15 bp, Homo sapiens
agcatcaaagtggca

SEQ ID NO: 116522 - DNA, 15 bp, Homo sapiens
tagcatcaaagtggc

SEQ ID NO: 116523 - DNA, 15 bp, Homo sapiens
atagcatcaaagtgg

SEQ ID NO: 116524 - DNA, 15 bp, Homo sapiens
aatagcatcaaagtg

SEQ ID NO: 116525 - DNA, 15 bp, Homo sapiens
aaatagcatcaaagt

SEQ ID NO: 116526 - DNA, 15 bp, Homo sapiens
caaatagcatcaaag

SEQ ID NO: 116527 - DNA, 15 bp, Homo sapiens
ccaaatagcatcaaa

SEQ ID NO: 116528 - DNA, 15 bp, Homo sapiens
cccaaatagcatcaa

SEQ ID NO: 116529 - DNA, 15 bp, Homo sapiens
acccaaatagcatca

SEQ ID NO: 116530 - DNA, 15 bp, Homo sapiens
aacccaaatagcatc

SEQ ID NO: 116531 - DNA, 15 bp, Homo sapiens
taacccaaatagcat

SEQ ID NO: 116532 - DNA, 15 bp, Homo sapiens
ataacccaaatagca

SEQ ID NO: 116533 - DNA, 15 bp, Homo sapiens
cataacccaaatagc

SEQ ID NO: 116534 - DNA, 15 bp, Homo sapiens
tcataacccaaatag

SEQ ID NO: 116535 - DNA, 15 bp, Homo sapiens
atcataacccaaata

SEQ ID NO: 116536 - DNA, 15 bp, Homo sapiens
catcataacccaaat

SEQ ID NO: 116537 - DNA, 15 bp, Homo sapiens
ccatcataacccaaa

SEQ ID NO: 116538 - DNA, 15 bp, Homo sapiens
cccatcataacccaa

SEQ ID NO: 116539 - DNA, 15 bp, Homo sapiens
ccccatcataaccca

SEQ ID NO: 116540 - DNA, 15 bp, Homo sapiens
gccccatcataaccc

SEQ ID NO: 116541 - DNA, 15 bp, Homo sapiens
tgccccatcataacc

SEQ ID NO: 116542 - DNA, 15 bp, Homo sapiens
ttgccccatcataac

SEQ ID NO: 116543 - DNA, 15 bp, Homo sapiens
cttgccccatcataa

SEQ ID NO: 116544 - DNA, 15 bp, Homo sapiens
tcttgccccatcata

SEQ ID NO: 116545 - DNA, 15 bp, Homo sapiens
atcttgccccatcat

SEQ ID NO: 116546 - DNA, 15 bp, Homo sapiens
catcttgccccatca

SEQ ID NO: 116547 - DNA, 15 bp, Homo sapiens
ccatcttgccccatc

SEQ ID NO: 116548 - DNA, 15 bp, Homo sapiens
gccatcttgccccat

SEQ ID NO: 116549 - DNA, 15 bp, Homo sapiens
tgccatcttgcccca

SEQ ID NO: 116550 - DNA, 15 bp, Homo sapiens
ctgccatcttgcccc

SEQ ID NO: 116551 - DNA, 15 bp, Homo sapiens
tctgccatcttgccc

SEQ ID NO: 116552 - DNA, 15 bp, Homo sapiens
ctctgccatcttgcc

SEQ ID NO: 116553 - DNA, 15 bp, Homo sapiens
cctctgccatcttgc

SEQ ID NO: 116554 - DNA, 15 bp, Homo sapiens
acctctgccatcttg

SEQ ID NO: 116555 - DNA, 15 bp, Homo sapiens
tacctctgccatctt

SEQ ID NO: 116556 - DNA, 15 bp, Homo sapiens
atacctctgccatct

SEQ ID NO: 116557 - DNA, 15 bp, Homo sapiens
aatacctctgccatc

SEQ ID NO: 116558 - DNA, 15 bp, Homo sapiens
caatacctctgccat

SEQ ID NO: 116559 - DNA, 15 bp, Homo sapiens
ccaatacctctgcca

SEQ ID NO: 116560 - DNA, 15 bp, Homo sapiens
cccaatacctctgcc

SEQ ID NO: 116561 - DNA, 15 bp, Homo sapiens
acccaatacctctgc

SEQ ID NO: 116562 - DNA, 15 bp, Homo sapiens
aacccaatacctctg

SEQ ID NO: 116563 - DNA, 15 bp, Homo sapiens
aaacccaatacctct

SEQ ID NO: 116564 - DNA, 15 bp, Homo sapiens
aaaacccaatacctc

SEQ ID NO: 116565 - DNA, 15 bp, Homo sapiens
aaaaacccaatacct

SEQ ID NO: 116566 - DNA, 15 bp, Homo sapiens
aaaaaacccaatacc

SEQ ID NO: 116567 - DNA, 15 bp, Homo sapiens
aaaaaaacccaatac

SEQ ID NO: 116568 - DNA, 15 bp, Homo sapiens
caaaaaaacccaata

SEQ ID NO: 116569 - DNA, 15 bp, Homo sapiens
acaaaaaaacccaat

SEQ ID NO: 116570 - DNA, 15 bp, Homo sapiens
aacaaaaaaacccaa

SEQ ID NO: 116571 - DNA, 15 bp, Homo sapiens
aaacaaaaaaaccca

SEQ ID NO: 116572 - DNA, 15 bp, Homo sapiens
aaaacaaaaaaaccc

SEQ ID NO: 116573 - DNA, 15 bp, Homo sapiens
aaaaacaaaaaaacc

SEQ ID NO: 116574 - DNA, 15 bp, Homo sapiens
aaaaaacaaaaaaac

SEQ ID NO: 116575 - DNA, 15 bp, Homo sapiens
aaaaaaacaaaaaaa

SEQ ID NO: 116576 - DNA, 15 bp, Homo sapiens
gaaaaaaacaaaaaa

SEQ ID NO: 116577 - DNA, 15 bp, Homo sapiens
ggaaaaaaacaaaaa

SEQ ID NO: 116578 - DNA, 15 bp, Homo sapiens
tggaaaaaaacaaaa

SEQ ID NO: 116579 - DNA, 15 bp, Homo sapiens
atggaaaaaaacaaa

SEQ ID NO: 116580 - DNA, 15 bp, Homo sapiens
aatggaaaaaaacaa

SEQ ID NO: 116581 - DNA, 15 bp, Homo sapiens
gaatggaaaaaaaca

SEQ ID NO: 116582 - DNA, 15 bp, Homo sapiens
ggaatggaaaaaaac

SEQ ID NO: 116583 - DNA, 15 bp, Homo sapiens
aggaatggaaaaaaa

SEQ ID NO: 116584 - DNA, 15 bp, Homo sapiens
gaggaatggaaaaaa

SEQ ID NO: 116585 - DNA, 15 bp, Homo sapiens
agaggaatggaaaaa

SEQ ID NO: 116586 - DNA, 15 bp, Homo sapiens
gagaggaatggaaaa

SEQ ID NO: 116587 - DNA, 15 bp, Homo sapiens
agagaggaatggaaa

SEQ ID NO: 116588 - DNA, 15 bp, Homo sapiens
tagagaggaatggaa

SEQ ID NO: 116589 - DNA, 15 bp, Homo sapiens
gtagagaggaatgga

SEQ ID NO: 116590 - DNA, 15 bp, Homo sapiens
agtagagaggaatgg

SEQ ID NO: 116591 - DNA, 15 bp, Homo sapiens
aagtagagaggaatg

SEQ ID NO: 116592 - DNA, 15 bp, Homo sapiens
gaagtagagaggaat

SEQ ID NO: 116593 - DNA, 15 bp, Homo sapiens
agaagtagagaggaa

SEQ ID NO: 116594 - DNA, 15 bp, Homo sapiens
cagaagtagagagga

SEQ ID NO: 116595 - DNA, 15 bp, Homo sapiens
acagaagtagagagg

SEQ ID NO: 116596 - DNA, 15 bp, Homo sapiens
aacagaagtagagag

SEQ ID NO: 116597 - DNA, 15 bp, Homo sapiens
aaacagaagtagaga

SEQ ID NO: 116598 - DNA, 15 bp, Homo sapiens
gaaacagaagtagag

SEQ ID NO: 116599 - DNA, 15 bp, Homo sapiens
ggaaacagaagtaga

SEQ ID NO: 116600 - DNA, 15 bp, Homo sapiens
aggaaacagaagtag

SEQ ID NO: 116601 - DNA, 15 bp, Homo sapiens
taggaaacagaagta

SEQ ID NO: 116602 - DNA, 15 bp, Homo sapiens
ctaggaaacagaagt

SEQ ID NO: 116603 - DNA, 15 bp, Homo sapiens
gctaggaaacagaag

SEQ ID NO: 116604 - DNA, 15 bp, Homo sapiens
agctaggaaacagaa

SEQ ID NO: 116605 - DNA, 15 bp, Homo sapiens
aagctaggaaacaga

SEQ ID NO: 116606 - DNA, 15 bp, Homo sapiens
aaagctaggaaacag

SEQ ID NO: 116607 - DNA, 15 bp, Homo sapiens
aaaagctaggaaaca

SEQ ID NO: 116608 - DNA, 15 bp, Homo sapiens
aaaaagctaggaaac

SEQ ID NO: 116609 - DNA, 15 bp, Homo sapiens
gaaaaagctaggaaa

SEQ ID NO: 116610 - DNA, 15 bp, Homo sapiens
agaaaaagctaggaa

SEQ ID NO: 116611 - DNA, 15 bp, Homo sapiens
aagaaaaagctagga

SEQ ID NO: 116612 - DNA, 15 bp, Homo sapiens
aaagaaaaagctagg

SEQ ID NO: 116613 - DNA, 15 bp, Homo sapiens
gaaagaaaaagctag

SEQ ID NO: 116614 - DNA, 15 bp, Homo sapiens
agaaagaaaaagcta

SEQ ID NO: 116615 - DNA, 15 bp, Homo sapiens
cagaaagaaaaagct

SEQ ID NO: 116616 - DNA, 15 bp, Homo sapiens
ccagaaagaaaaagc

SEQ ID NO: 116617 - DNA, 15 bp, Homo sapiens
tccagaaagaaaaag

SEQ ID NO: 116618 - DNA, 15 bp, Homo sapiens
ctccagaaagaaaaa

SEQ ID NO: 116619 - DNA, 15 bp, Homo sapiens
actccagaaagaaaa

SEQ ID NO: 116620 - DNA, 15 bp, Homo sapiens
aactccagaaagaaa

SEQ ID NO: 116621 - DNA, 15 bp, Homo sapiens
aaactccagaaagaa

SEQ ID NO: 116622 - DNA, 15 bp, Homo sapiens
taaactccagaaaga

SEQ ID NO: 116623 - DNA, 15 bp, Homo sapiens
ttaaactccagaaag

SEQ ID NO: 116624 - DNA, 15 bp, Homo sapiens
cttaaactccagaaa

SEQ ID NO: 116625 - DNA, 15 bp, Homo sapiens
acttaaactccagaa

SEQ ID NO: 116626 - DNA, 15 bp, Homo sapiens
tacttaaactccaga

SEQ ID NO: 116627 - DNA, 15 bp, Homo sapiens
gtacttaaactccag

SEQ ID NO: 116628 - DNA, 15 bp, Homo sapiens
tgtacttaaactcca

SEQ ID NO: 116629 - DNA, 15 bp, Homo sapiens
ctgtacttaaactcc

SEQ ID NO: 116630 - DNA, 15 bp, Homo sapiens
actgtacttaaactc

SEQ ID NO: 116631 - DNA, 15 bp, Homo sapiens
cactgtacttaaact

SEQ ID NO: 116632 - DNA, 15 bp, Homo sapiens
tcactgtacttaaac

SEQ ID NO: 116633 - DNA, 15 bp, Homo sapiens
atcactgtacttaaa

SEQ ID NO: 116634 - DNA, 15 bp, Homo sapiens
catcactgtacttaa

SEQ ID NO: 116635 - DNA, 15 bp, Homo sapiens
ccatcactgtactta

SEQ ID NO: 116636 - DNA, 15 bp, Homo sapiens
accatcactgtactt

SEQ ID NO: 116637 - DNA, 15 bp, Homo sapiens
aaccatcactgtact

SEQ ID NO: 116638 - DNA, 15 bp, Homo sapiens
caaccatcactgtac

SEQ ID NO: 116639 - DNA, 15 bp, Homo sapiens
ccaaccatcactgta

SEQ ID NO: 116640 - DNA, 15 bp, Homo sapiens
gccaaccatcactgt

SEQ ID NO: 116641 - DNA, 15 bp, Homo sapiens
agccaaccatcactg

SEQ ID NO: 116642 - DNA, 15 bp, Homo sapiens
aagccaaccatcact

SEQ ID NO: 116643 - DNA, 15 bp, Homo sapiens
caagccaaccatcac

SEQ ID NO: 116644 - DNA, 15 bp, Homo sapiens
tcaagccaaccatca

SEQ ID NO: 116645 - DNA, 15 bp, Homo sapiens
ctcaagccaaccatc

SEQ ID NO: 116646 - DNA, 15 bp, Homo sapiens
actcaagccaaccat

SEQ ID NO: 116647 - DNA, 15 bp, Homo sapiens
tactcaagccaacca

SEQ ID NO: 116648 - DNA, 15 bp, Homo sapiens
gtactcaagccaacc

SEQ ID NO: 116649 - DNA, 15 bp, Homo sapiens
ggtactcaagccaac

SEQ ID NO: 116650 - DNA, 15 bp, Homo sapiens
aggtactcaagccaa

SEQ ID NO: 116651 - DNA, 15 bp, Homo sapiens
aaggtactcaagcca

SEQ ID NO: 116652 - DNA, 15 bp, Homo sapiens
aaaggtactcaagcc

SEQ ID NO: 116653 - DNA, 15 bp, Homo sapiens
aaaaggtactcaagc

SEQ ID NO: 116654 - DNA, 15 bp, Homo sapiens
aaaaaggtactcaag

SEQ ID NO: 116655 - DNA, 15 bp, Homo sapiens
taaaaaggtactcaa

SEQ ID NO: 116656 - DNA, 15 bp, Homo sapiens
ttaaaaaggtactca

SEQ ID NO: 116657 - DNA, 15 bp, Homo sapiens
tttaaaaaggtactc

SEQ ID NO: 116658 - DNA, 15 bp, Homo sapiens
atttaaaaaggtact

SEQ ID NO: 116659 - DNA, 15 bp, Homo sapiens
gatttaaaaaggtac

SEQ ID NO: 116660 - DNA, 15 bp, Homo sapiens
agatttaaaaaggta

SEQ ID NO: 116661 - DNA, 15 bp, Homo sapiens
tagatttaaaaaggt

SEQ ID NO: 116662 - DNA, 15 bp, Homo sapiens
ctagatttaaaaagg

SEQ ID NO: 116663 - DNA, 15 bp, Homo sapiens
gctagatttaaaaag

SEQ ID NO: 116664 - DNA, 15 bp, Homo sapiens
ggctagatttaaaaa

SEQ ID NO: 116665 - DNA, 15 bp, Homo sapiens
gggctagatttaaaa

SEQ ID NO: 116666 - DNA, 15 bp, Homo sapiens
tgggctagatttaaa

SEQ ID NO: 116667 - DNA, 15 bp, Homo sapiens
ctgggctagatttaa

SEQ ID NO: 116668 - DNA, 15 bp, Homo sapiens
actgggctagattta

SEQ ID NO: 116669 - DNA, 15 bp, Homo sapiens
tactgggctagattt

SEQ ID NO: 116670 - DNA, 15 bp, Homo sapiens
atactgggctagatt

SEQ ID NO: 116671 - DNA, 15 bp, Homo sapiens
tatactgggctagat

SEQ ID NO: 116672 - DNA, 15 bp, Homo sapiens
ttatactgggctaga

SEQ ID NO: 116673 - DNA, 15 bp, Homo sapiens
tttatactgggctag

SEQ ID NO: 116674 - DNA, 15 bp, Homo sapiens
gtttatactgggcta

SEQ ID NO: 116675 - DNA, 15 bp, Homo sapiens
tgtttatactgggct

SEQ ID NO: 116676 - DNA, 15 bp, Homo sapiens
atgtttatactgggc

SEQ ID NO: 116677 - DNA, 15 bp, Homo sapiens
aatgtttatactggg

SEQ ID NO: 116678 - DNA, 15 bp, Homo sapiens
taatgtttatactgg

SEQ ID NO: 116679 - DNA, 15 bp, Homo sapiens
ctaatgtttatactg

SEQ ID NO: 116680 - DNA, 15 bp, Homo sapiens
gctaatgtttatact

SEQ ID NO: 116681 - DNA, 15 bp, Homo sapiens
ggctaatgtttatac

SEQ ID NO: 116682 - DNA, 15 bp, Homo sapiens
aggctaatgtttata

SEQ ID NO: 116683 - DNA, 15 bp, Homo sapiens
caggctaatgtttat

SEQ ID NO: 116684 - DNA, 15 bp, Homo sapiens
gcaggctaatgttta

SEQ ID NO: 116685 - DNA, 15 bp, Homo sapiens
agcaggctaatgttt

SEQ ID NO: 116686 - DNA, 15 bp, Homo sapiens
aagcaggctaatgtt

SEQ ID NO: 116687 - DNA, 15 bp, Homo sapiens
taagcaggctaatgt

SEQ ID NO: 116688 - DNA, 15 bp, Homo sapiens
ttaagcaggctaatg

SEQ ID NO: 116689 - DNA, 15 bp, Homo sapiens
attaagcaggctaat

SEQ ID NO: 116690 - DNA, 15 bp, Homo sapiens
tattaagcaggctaa

SEQ ID NO: 116691 - DNA, 15 bp, Homo sapiens
atattaagcaggcta

SEQ ID NO: 116692 - DNA, 15 bp, Homo sapiens
aatattaagcaggct

SEQ ID NO: 116693 - DNA, 15 bp, Homo sapiens
aaatattaagcaggc

SEQ ID NO: 116694 - DNA, 15 bp, Homo sapiens
taaatattaagcagg

SEQ ID NO: 116695 - DNA, 15 bp, Homo sapiens
ctaaatattaagcag

SEQ ID NO: 116696 - DNA, 15 bp, Homo sapiens
tctaaatattaagca

SEQ ID NO: 116697 - DNA, 15 bp, Homo sapiens
gtctaaatattaagc

SEQ ID NO: 116698 - DNA, 15 bp, Homo sapiens
tgtctaaatattaag

SEQ ID NO: 116699 - DNA, 15 bp, Homo sapiens
atgtctaaatattaa

SEQ ID NO: 116700 - DNA, 15 bp, Homo sapiens
aatgtctaaatatta

SEQ ID NO: 116701 - DNA, 15 bp, Homo sapiens
aaatgtctaaatatt

SEQ ID NO: 116702 - DNA, 15 bp, Homo sapiens
taaatgtctaaatat

SEQ ID NO: 116703 - DNA, 15 bp, Homo sapiens
ataaatgtctaaata

SEQ ID NO: 116704 - DNA, 15 bp, Homo sapiens
tataaatgtctaaat

SEQ ID NO: 116705 - DNA, 15 bp, Homo sapiens
ctataaatgtctaaa

SEQ ID NO: 116706 - DNA, 15 bp, Homo sapiens
cctataaatgtctaa

SEQ ID NO: 116707 - DNA, 15 bp, Homo sapiens
acctataaatgtcta

SEQ ID NO: 116708 - DNA, 15 bp, Homo sapiens
tacctataaatgtct

SEQ ID NO: 116709 - DNA, 15 bp, Homo sapiens
ctacctataaatgtc

SEQ ID NO: 116710 - DNA, 15 bp, Homo sapiens
tctacctataaatgt

SEQ ID NO: 116711 - DNA, 15 bp, Homo sapiens
ttctacctataaatg

SEQ ID NO: 116712 - DNA, 15 bp, Homo sapiens
attctacctataaat

SEQ ID NO: 116713 - DNA, 15 bp, Homo sapiens
aattctacctataaa

SEQ ID NO: 116714 - DNA, 15 bp, Homo sapiens
gaattctacctataa

SEQ ID NO: 116715 - DNA, 15 bp, Homo sapiens
agaattctacctata

SEQ ID NO: 116716 - DNA, 15 bp, Homo sapiens
cagaattctacctat

SEQ ID NO: 116717 - DNA, 15 bp, Homo sapiens
tcagaattctaccta

SEQ ID NO: 116718 - DNA, 15 bp, Homo sapiens
ctcagaattctacct

SEQ ID NO: 116719 - DNA, 15 bp, Homo sapiens
gctcagaattctacc

SEQ ID NO: 116720 - DNA, 15 bp, Homo sapiens
tgctcagaattctac

SEQ ID NO: 116721 - DNA, 15 bp, Homo sapiens
gtgctcagaattcta

SEQ ID NO: 116722 - DNA, 15 bp, Homo sapiens
agtgctcagaattct

SEQ ID NO: 116723 - DNA, 15 bp, Homo sapiens
gagtgctcagaattc

SEQ ID NO: 116724 - DNA, 15 bp, Homo sapiens
tgagtgctcagaatt

SEQ ID NO: 116725 - DNA, 15 bp, Homo sapiens
ttgagtgctcagaat

SEQ ID NO: 116726 - DNA, 15 bp, Homo sapiens
gttgagtgctcagaa

SEQ ID NO: 116727 - DNA, 15 bp, Homo sapiens
agttgagtgctcaga

SEQ ID NO: 116728 - DNA, 15 bp, Homo sapiens
gagttgagtgctcag

SEQ ID NO: 116729 - DNA, 15 bp, Homo sapiens
tgagttgagtgctca

SEQ ID NO: 116730 - DNA, 15 bp, Homo sapiens
atgagttgagtgctc

SEQ ID NO: 116731 - DNA, 15 bp, Homo sapiens
catgagttgagtgct

SEQ ID NO: 116732 - DNA, 15 bp, Homo sapiens
acatgagttgagtgc

SEQ ID NO: 116733 - DNA, 15 bp, Homo sapiens
aacatgagttgagtg

SEQ ID NO: 116734 - DNA, 15 bp, Homo sapiens
aaacatgagttgagt

SEQ ID NO: 116735 - DNA, 15 bp, Homo sapiens
caaacatgagttgag

SEQ ID NO: 116736 - DNA, 15 bp, Homo sapiens
ccaaacatgagttga

SEQ ID NO: 116737 - DNA, 15 bp, Homo sapiens
gccaaacatgagttg

SEQ ID NO: 116738 - DNA, 15 bp, Homo sapiens
tgccaaacatgagtt

SEQ ID NO: 116739 - DNA, 15 bp, Homo sapiens
atgccaaacatgagt

SEQ ID NO: 116740 - DNA, 15 bp, Homo sapiens
aatgccaaacatgag

SEQ ID NO: 116741 - DNA, 15 bp, Homo sapiens
aaatgccaaacatga

SEQ ID NO: 116742 - DNA, 15 bp, Homo sapiens
aaaatgccaaacatg

SEQ ID NO: 116743 - DNA, 15 bp, Homo sapiens
taaaatgccaaacat

SEQ ID NO: 116744 - DNA, 15 bp, Homo sapiens
ttaaaatgccaaaca

SEQ ID NO: 116745 - DNA, 15 bp, Homo sapiens
tttaaaatgccaaac

SEQ ID NO: 116746 - DNA, 15 bp, Homo sapiens
ctttaaaatgccaaa

SEQ ID NO: 116747 - DNA, 15 bp, Homo sapiens
actttaaaatgccaa

SEQ ID NO: 116748 - DNA, 15 bp, Homo sapiens
tactttaaaatgcca

SEQ ID NO: 116749 - DNA, 15 bp, Homo sapiens
ttactttaaaatgcc

SEQ ID NO: 116750 - DNA, 15 bp, Homo sapiens
tttactttaaaatgc

SEQ ID NO: 116751 - DNA, 15 bp, Homo sapiens
ttttactttaaaatg

SEQ ID NO: 116752 - DNA, 15 bp, Homo sapiens
tttttactttaaaat

SEQ ID NO: 116753 - DNA, 15 bp, Homo sapiens
gtttttactttaaaa

SEQ ID NO: 116754 - DNA, 15 bp, Homo sapiens
tgtttttactttaaa

SEQ ID NO: 116755 - DNA, 15 bp, Homo sapiens
ttgtttttactttaa

SEQ ID NO: 116756 - DNA, 15 bp, Homo sapiens
cttgtttttacttta

SEQ ID NO: 116757 - DNA, 15 bp, Homo sapiens
acttgtttttacttt

SEQ ID NO: 116758 - DNA, 15 bp, Homo sapiens
cacttgtttttactt

SEQ ID NO: 116759 - DNA, 15 bp, Homo sapiens
acacttgtttttact

SEQ ID NO: 116760 - DNA, 15 bp, Homo sapiens
cacacttgtttttac

SEQ ID NO: 116761 - DNA, 15 bp, Homo sapiens
tcacacttgttttta

SEQ ID NO: 116762 - DNA, 15 bp, Homo sapiens
gtcacacttgttttt

SEQ ID NO: 116763 - DNA, 15 bp, Homo sapiens
agtcacacttgtttt

SEQ ID NO: 116764 - DNA, 15 bp, Homo sapiens
aagtcacacttgttt

SEQ ID NO: 116765 - DNA, 15 bp, Homo sapiens
gaagtcacacttgtt

SEQ ID NO: 116766 - DNA, 15 bp, Homo sapiens
cgaagtcacacttgt

SEQ ID NO: 116767 - DNA, 15 bp, Homo sapiens
tcgaagtcacacttg

SEQ ID NO: 116768 - DNA, 15 bp, Homo sapiens
ctcgaagtcacactt

SEQ ID NO: 116769 - DNA, 15 bp, Homo sapiens
cctcgaagtcacact

SEQ ID NO: 116770 - DNA, 15 bp, Homo sapiens
tcctcgaagtcacac

SEQ ID NO: 116771 - DNA, 15 bp, Homo sapiens
gtcctcgaagtcaca

SEQ ID NO: 116772 - DNA, 15 bp, Homo sapiens
ggtcctcgaagtcac

SEQ ID NO: 116773 - DNA, 15 bp, Homo sapiens
tggtcctcgaagtca

SEQ ID NO: 116774 - DNA, 15 bp, Homo sapiens
ttggtcctcgaagtc

SEQ ID NO: 116775 - DNA, 15 bp, Homo sapiens
tttggtcctcgaagt

SEQ ID NO: 116776 - DNA, 15 bp, Homo sapiens
ctttggtcctcgaag

SEQ ID NO: 116777 - DNA, 15 bp, Homo sapiens
tctttggtcctcgaa

SEQ ID NO: 116778 - DNA, 15 bp, Homo sapiens
ttctttggtcctcga

SEQ ID NO: 116779 - DNA, 15 bp, Homo sapiens
tttctttggtcctcg

SEQ ID NO: 116780 - DNA, 15 bp, Homo sapiens
atttctttggtcctc

SEQ ID NO: 116781 - DNA, 15 bp, Homo sapiens
aatttctttggtcct

SEQ ID NO: 116782 - DNA, 15 bp, Homo sapiens
caatttctttggtcc

SEQ ID NO: 116783 - DNA, 15 bp, Homo sapiens
acaatttctttggtc

SEQ ID NO: 116784 - DNA, 15 bp, Homo sapiens
gacaatttctttggt

SEQ ID NO: 116785 - DNA, 15 bp, Homo sapiens
tgacaatttctttgg

SEQ ID NO: 116786 - DNA, 15 bp, Homo sapiens
ctgacaatttctttg

SEQ ID NO: 116787 - DNA, 15 bp, Homo sapiens
gctgacaatttcttt

SEQ ID NO: 116788 - DNA, 15 bp, Homo sapiens
agctgacaatttctt

SEQ ID NO: 116789 - DNA, 15 bp, Homo sapiens
tagctgacaatttct

SEQ ID NO: 116790 - DNA, 15 bp, Homo sapiens
atagctgacaatttc

SEQ ID NO: 116791 - DNA, 15 bp, Homo sapiens
tatagctgacaattt

SEQ ID NO: 116792 - DNA, 15 bp, Homo sapiens
gtatagctgacaatt

SEQ ID NO: 116793 - DNA, 15 bp, Homo sapiens
tgtatagctgacaat

SEQ ID NO: 116794 - DNA, 15 bp, Homo sapiens
atgtatagctgacaa

SEQ ID NO: 116795 - DNA, 15 bp, Homo sapiens
aatgtatagctgaca

SEQ ID NO: 116796 - DNA, 15 bp, Homo sapiens
aaatgtatagctgac

SEQ ID NO: 116797 - DNA, 15 bp, Homo sapiens
taaatgtatagctga

SEQ ID NO: 116798 - DNA, 15 bp, Homo sapiens
ataaatgtatagctg

SEQ ID NO: 116799 - DNA, 15 bp, Homo sapiens
gataaatgtatagct

SEQ ID NO: 116800 - DNA, 15 bp, Homo sapiens
agataaatgtatagc

SEQ ID NO: 116801 - DNA, 15 bp, Homo sapiens
aagataaatgtatag

SEQ ID NO: 116802 - DNA, 15 bp, Homo sapiens
aaagataaatgtata

SEQ ID NO: 116803 - DNA, 15 bp, Homo sapiens
taaagataaatgtat

SEQ ID NO: 116804 - DNA, 15 bp, Homo sapiens
ataaagataaatgta

SEQ ID NO: 116805 - DNA, 15 bp, Homo sapiens
cataaagataaatgt

SEQ ID NO: 116806 - DNA, 15 bp, Homo sapiens
tcataaagataaatg

SEQ ID NO: 116807 - DNA, 15 bp, Homo sapiens
ttcataaagataaat

SEQ ID NO: 116808 - DNA, 15 bp, Homo sapiens
gttcataaagataaa

SEQ ID NO: 116809 - DNA, 15 bp, Homo sapiens
agttcataaagataa

SEQ ID NO: 116810 - DNA, 15 bp, Homo sapiens
gagttcataaagata

SEQ ID NO: 116811 - DNA, 15 bp, Homo sapiens
tgagttcataaagat

SEQ ID NO: 116812 - DNA, 15 bp, Homo sapiens
atgagttcataaaga

SEQ ID NO: 116813 - DNA, 15 bp, Homo sapiens
aatgagttcataaag

SEQ ID NO: 116814 - DNA, 15 bp, Homo sapiens
aaatgagttcataaa

SEQ ID NO: 116815 - DNA, 15 bp, Homo sapiens
taaatgagttcataa

SEQ ID NO: 116816 - DNA, 15 bp, Homo sapiens
ataaatgagttcata

SEQ ID NO: 116817 - DNA, 15 bp, Homo sapiens
tataaatgagttcat

SEQ ID NO: 116818 - DNA, 15 bp, Homo sapiens
atataaatgagttca

SEQ ID NO: 116819 - DNA, 15 bp, Homo sapiens
aatataaatgagttc

SEQ ID NO: 116820 - DNA, 15 bp, Homo sapiens
gaatataaatgagtt

SEQ ID NO: 116821 - DNA, 15 bp, Homo sapiens
ggaatataaatgagt

SEQ ID NO: 116822 - DNA, 15 bp, Homo sapiens
aggaatataaatgag

SEQ ID NO: 116823 - DNA, 15 bp, Homo sapiens
aaggaatataaatga

SEQ ID NO: 116824 - DNA, 15 bp, Homo sapiens
aaaggaatataaatg

SEQ ID NO: 116825 - DNA, 15 bp, Homo sapiens
aaaaggaatataaat

SEQ ID NO: 116826 - DNA, 15 bp, Homo sapiens
aaaaaggaatataaa

SEQ ID NO: 116827 - DNA, 15 bp, Homo sapiens
taaaaaggaatataa

SEQ ID NO: 116828 - DNA, 15 bp, Homo sapiens
ttaaaaaggaatata

SEQ ID NO: 116829 - DNA, 15 bp, Homo sapiens
attaaaaaggaatat

SEQ ID NO: 116830 - DNA, 15 bp, Homo sapiens
cattaaaaaggaata

SEQ ID NO: 116831 - DNA, 15 bp, Homo sapiens
tcattaaaaaggaat

SEQ ID NO: 116832 - DNA, 15 bp, Homo sapiens
gtcattaaaaaggaa

SEQ ID NO: 116833 - DNA, 15 bp, Homo sapiens
agtcattaaaaagga

SEQ ID NO: 116834 - DNA, 15 bp, Homo sapiens
gagtcattaaaaagg

SEQ ID NO: 116835 - DNA, 15 bp, Homo sapiens
cgagtcattaaaaag

SEQ ID NO: 116836 - DNA, 15 bp, Homo sapiens
acgagtcattaaaaa

SEQ ID NO: 116837 - DNA, 15 bp, Homo sapiens
aacgagtcattaaaa

SEQ ID NO: 116838 - DNA, 15 bp, Homo sapiens
caacgagtcattaaa

SEQ ID NO: 116839 - DNA, 15 bp, Homo sapiens
acaacgagtcattaa

SEQ ID NO: 116840 - DNA, 15 bp, Homo sapiens
aacaacgagtcatta

SEQ ID NO: 116841 - DNA, 15 bp, Homo sapiens
gaacaacgagtcatt

SEQ ID NO: 116842 - DNA, 15 bp, Homo sapiens
agaacaacgagtcat

SEQ ID NO: 116843 - DNA, 15 bp, Homo sapiens
tagaacaacgagtca

SEQ ID NO: 116844 - DNA, 15 bp, Homo sapiens
ttagaacaacgagtc

SEQ ID NO: 116845 - DNA, 15 bp, Homo sapiens
gttagaacaacgagt

SEQ ID NO: 116846 - DNA, 15 bp, Homo sapiens
tgttagaacaacgag

SEQ ID NO: 116847 - DNA, 15 bp, Homo sapiens
atgttagaacaacga

SEQ ID NO: 116848 - DNA, 15 bp, Homo sapiens
aatgttagaacaacg

SEQ ID NO: 116849 - DNA, 15 bp, Homo sapiens
aaatgttagaacaac

SEQ ID NO: 116850 - DNA, 15 bp, Homo sapiens
gaaatgttagaacaa

SEQ ID NO: 116851 - DNA, 15 bp, Homo sapiens
ggaaatgttagaaca

SEQ ID NO: 116852 - DNA, 15 bp, Homo sapiens
aggaaatgttagaac

SEQ ID NO: 116853 - DNA, 15 bp, Homo sapiens
taggaaatgttagaa

SEQ ID NO: 116854 - DNA, 15 bp, Homo sapiens
ctaggaaatgttaga

SEQ ID NO: 116855 - DNA, 15 bp, Homo sapiens
tctaggaaatgttag

SEQ ID NO: 116856 - DNA, 15 bp, Homo sapiens
ttctaggaaatgtta

SEQ ID NO: 116857 - DNA, 15 bp, Homo sapiens
cttctaggaaatgtt

SEQ ID NO: 116858 - DNA, 15 bp, Homo sapiens
acttctaggaaatgt

SEQ ID NO: 116859 - DNA, 15 bp, Homo sapiens
cacttctaggaaatg

SEQ ID NO: 116860 - DNA, 15 bp, Homo sapiens
acacttctaggaaat

SEQ ID NO: 116861 - DNA, 15 bp, Homo sapiens
aacacttctaggaaa

SEQ ID NO: 116862 - DNA, 15 bp, Homo sapiens
gaacacttctaggaa

SEQ ID NO: 116863 - DNA, 15 bp, Homo sapiens
agaacacttctagga

SEQ ID NO: 116864 - DNA, 15 bp, Homo sapiens
aagaacacttctagg

SEQ ID NO: 116865 - DNA, 15 bp, Homo sapiens
taagaacacttctag

SEQ ID NO: 116866 - DNA, 15 bp, Homo sapiens
ataagaacacttcta

SEQ ID NO: 116867 - DNA, 15 bp, Homo sapiens
tataagaacacttct

SEQ ID NO: 116868 - DNA, 15 bp, Homo sapiens
ttataagaacacttc

SEQ ID NO: 116869 - DNA, 15 bp, Homo sapiens
tttataagaacactt

SEQ ID NO: 116870 - DNA, 15 bp, Homo sapiens
ctttataagaacact

SEQ ID NO: 116871 - DNA, 15 bp, Homo sapiens
cctttataagaacac

SEQ ID NO: 116872 - DNA, 15 bp, Homo sapiens
acctttataagaaca

SEQ ID NO: 116873 - DNA, 15 bp, Homo sapiens
gacctttataagaac

SEQ ID NO: 116874 - DNA, 15 bp, Homo sapiens
agacctttataagaa

SEQ ID NO: 116875 - DNA, 15 bp, Homo sapiens
tagacctttataaga

SEQ ID NO: 116876 - DNA, 15 bp, Homo sapiens
ttagacctttataag

SEQ ID NO: 116877 - DNA, 15 bp, Homo sapiens
attagacctttataa

SEQ ID NO: 116878 - DNA, 15 bp, Homo sapiens
cattagacctttata

SEQ ID NO: 116879 - DNA, 15 bp, Homo sapiens
acattagacctttat

SEQ ID NO: 116880 - DNA, 15 bp, Homo sapiens
tacattagaccttta

SEQ ID NO: 116881 - DNA, 15 bp, Homo sapiens
atacattagaccttt

SEQ ID NO: 116882 - DNA, 15 bp, Homo sapiens
gatacattagacctt

SEQ ID NO: 116883 - DNA, 15 bp, Homo sapiens
ggatacattagacct

SEQ ID NO: 116884 - DNA, 15 bp, Homo sapiens
tggatacattagacc

SEQ ID NO: 116885 - DNA, 15 bp, Homo sapiens
gtggatacattagac

SEQ ID NO: 116886 - DNA, 15 bp, Homo sapiens
tgtggatacattaga

SEQ ID NO: 116887 - DNA, 15 bp, Homo sapiens
ctgtggatacattag

SEQ ID NO: 116888 - DNA, 15 bp, Homo sapiens
cctgtggatacatta

SEQ ID NO: 116889 - DNA, 15 bp, Homo sapiens
gcctgtggatacatt

SEQ ID NO: 116890 - DNA, 15 bp, Homo sapiens
agcctgtggatacat

SEQ ID NO: 116891 - DNA, 15 bp, Homo sapiens
cagcctgtggataca

SEQ ID NO: 116892 - DNA, 15 bp, Homo sapiens
acagcctgtggatac

SEQ ID NO: 116893 - DNA, 15 bp, Homo sapiens
aacagcctgtggata

SEQ ID NO: 116894 - DNA, 15 bp, Homo sapiens
caacagcctgtggat

SEQ ID NO: 116895 - DNA, 15 bp, Homo sapiens
acaacagcctgtgga

SEQ ID NO: 116896 - DNA, 15 bp, Homo sapiens
gacaacagcctgtgg

SEQ ID NO: 116897 - DNA, 15 bp, Homo sapiens
agacaacagcctgtg

SEQ ID NO: 116898 - DNA, 15 bp, Homo sapiens
aagacaacagcctgt

SEQ ID NO: 116899 - DNA, 15 bp, Homo sapiens
taagacaacagcctg

SEQ ID NO: 116900 - DNA, 15 bp, Homo sapiens
ataagacaacagcct

SEQ ID NO: 116901 - DNA, 15 bp, Homo sapiens
aataagacaacagcc

SEQ ID NO: 116902 - DNA, 15 bp, Homo sapiens
taataagacaacagc

SEQ ID NO: 116903 - DNA, 15 bp, Homo sapiens
ctaataagacaacag

SEQ ID NO: 116904 - DNA, 15 bp, Homo sapiens
actaataagacaaca

SEQ ID NO: 116905 - DNA, 15 bp, Homo sapiens
tactaataagacaac

SEQ ID NO: 116906 - DNA, 15 bp, Homo sapiens
ttactaataagacaa

SEQ ID NO: 116907 - DNA, 15 bp, Homo sapiens
tttactaataagaca

SEQ ID NO: 116908 - DNA, 15 bp, Homo sapiens
atttactaataagac

SEQ ID NO: 116909 - DNA, 15 bp, Homo sapiens
catttactaataaga

SEQ ID NO: 116910 - DNA, 15 bp, Homo sapiens
gcatttactaataag

SEQ ID NO: 116911 - DNA, 15 bp, Homo sapiens
tgcatttactaataa

SEQ ID NO: 116912 - DNA, 15 bp, Homo sapiens
ttgcatttactaata

SEQ ID NO: 116913 - DNA, 15 bp, Homo sapiens
tttgcatttactaat

SEQ ID NO: 116914 - DNA, 15 bp, Homo sapiens
ctttgcatttactaa

SEQ ID NO: 116915 - DNA, 15 bp, Homo sapiens
actttgcatttacta

SEQ ID NO: 116916 - DNA, 15 bp, Homo sapiens
tactttgcatttact

SEQ ID NO: 116917 - DNA, 15 bp, Homo sapiens
ttactttgcatttac

SEQ ID NO: 116918 - DNA, 15 bp, Homo sapiens
attactttgcattta

SEQ ID NO: 116919 - DNA, 15 bp, Homo sapiens
cattactttgcattt

SEQ ID NO: 116920 - DNA, 15 bp, Homo sapiens
tcattactttgcatt

SEQ ID NO: 116921 - DNA, 15 bp, Homo sapiens
gtcattactttgcat

SEQ ID NO: 116922 - DNA, 15 bp, Homo sapiens
agtcattactttgca

SEQ ID NO: 116923 - DNA, 15 bp, Homo sapiens
aagtcattactttgc

SEQ ID NO: 116924 - DNA, 15 bp, Homo sapiens
aaagtcattactttg

SEQ ID NO: 116925 - DNA, 15 bp, Homo sapiens
caaagtcattacttt

SEQ ID NO: 116926 - DNA, 15 bp, Homo sapiens
acaaagtcattactt

SEQ ID NO: 116927 - DNA, 15 bp, Homo sapiens
gacaaagtcattact

SEQ ID NO: 116928 - DNA, 15 bp, Homo sapiens
agacaaagtcattac

SEQ ID NO: 116929 - DNA, 15 bp, Homo sapiens
cagacaaagtcatta

SEQ ID NO: 116930 - DNA, 15 bp, Homo sapiens
acagacaaagtcatt

SEQ ID NO: 116931 - DNA, 15 bp, Homo sapiens
aacagacaaagtcat

SEQ ID NO: 116932 - DNA, 15 bp, Homo sapiens
aaacagacaaagtca

SEQ ID NO: 116933 - DNA, 15 bp, Homo sapiens
aaaacagacaaagtc

SEQ ID NO: 116934 - DNA, 15 bp, Homo sapiens
taaaacagacaaagt

SEQ ID NO: 116935 - DNA, 15 bp, Homo sapiens
gtaaaacagacaaag

SEQ ID NO: 116936 - DNA, 15 bp, Homo sapiens
agtaaaacagacaaa

SEQ ID NO: 116937 - DNA, 15 bp, Homo sapiens
gagtaaaacagacaa

SEQ ID NO: 116938 - DNA, 15 bp, Homo sapiens
agagtaaaacagaca

SEQ ID NO: 116939 - DNA, 15 bp, Homo sapiens
tagagtaaaacagac

SEQ ID NO: 116940 - DNA, 15 bp, Homo sapiens
ctagagtaaaacaga

SEQ ID NO: 116941 - DNA, 15 bp, Homo sapiens
actagagtaaaacag

SEQ ID NO: 116942 - DNA, 15 bp, Homo sapiens
gactagagtaaaaca

SEQ ID NO: 116943 - DNA, 15 bp, Homo sapiens
agactagagtaaaac

SEQ ID NO: 116944 - DNA, 15 bp, Homo sapiens
aagactagagtaaaa

SEQ ID NO: 116945 - DNA, 15 bp, Homo sapiens
aaagactagagtaaa

SEQ ID NO: 116946 - DNA, 15 bp, Homo sapiens
taaagactagagtaa

SEQ ID NO: 116947 - DNA, 15 bp, Homo sapiens
ctaaagactagagta

SEQ ID NO: 116948 - DNA, 15 bp, Homo sapiens
actaaagactagagt

SEQ ID NO: 116949 - DNA, 15 bp, Homo sapiens
tactaaagactagag

SEQ ID NO: 116950 - DNA, 15 bp, Homo sapiens
gtactaaagactaga

SEQ ID NO: 116951 - DNA, 15 bp, Homo sapiens
agtactaaagactag

SEQ ID NO: 116952 - DNA, 15 bp, Homo sapiens
aagtactaaagacta

SEQ ID NO: 116953 - DNA, 15 bp, Homo sapiens
gaagtactaaagact

SEQ ID NO: 116954 - DNA, 15 bp, Homo sapiens
tgaagtactaaagac

SEQ ID NO: 116955 - DNA, 15 bp, Homo sapiens
ttgaagtactaaaga

SEQ ID NO: 116956 - DNA, 15 bp, Homo sapiens
tttgaagtactaaag

SEQ ID NO: 116957 - DNA, 15 bp, Homo sapiens
ttttgaagtactaaa

SEQ ID NO: 116958 - DNA, 15 bp, Homo sapiens
attttgaagtactaa

SEQ ID NO: 116959 - DNA, 15 bp, Homo sapiens
aattttgaagtacta

SEQ ID NO: 116960 - DNA, 15 bp, Homo sapiens
taattttgaagtact

SEQ ID NO: 116961 - DNA, 15 bp, Homo sapiens
gtaattttgaagtac

SEQ ID NO: 116962 - DNA, 15 bp, Homo sapiens
ggtaattttgaagta

SEQ ID NO: 116963 - DNA, 15 bp, Homo sapiens
aggtaattttgaagt

SEQ ID NO: 116964 - DNA, 15 bp, Homo sapiens
aaggtaattttgaag

SEQ ID NO: 116965 - DNA, 15 bp, Homo sapiens
aaaggtaattttgaa

SEQ ID NO: 116966 - DNA, 15 bp, Homo sapiens
aaaaggtaattttga

SEQ ID NO: 116967 - DNA, 15 bp, Homo sapiens
gaaaaggtaattttg

SEQ ID NO: 116968 - DNA, 15 bp, Homo sapiens
tgaaaaggtaatttt

SEQ ID NO: 116969 - DNA, 15 bp, Homo sapiens
atgaaaaggtaattt

SEQ ID NO: 116970 - DNA, 15 bp, Homo sapiens
tatgaaaaggtaatt

SEQ ID NO: 116971 - DNA, 15 bp, Homo sapiens
atatgaaaaggtaat

SEQ ID NO: 116972 - DNA, 15 bp, Homo sapiens
gatatgaaaaggtaa

SEQ ID NO: 116973 - DNA, 15 bp, Homo sapiens
ggatatgaaaaggta

SEQ ID NO: 116974 - DNA, 15 bp, Homo sapiens
tggatatgaaaaggt

SEQ ID NO: 116975 - DNA, 15 bp, Homo sapiens
atggatatgaaaagg

SEQ ID NO: 116976 - DNA, 15 bp, Homo sapiens
catggatatgaaaag

SEQ ID NO: 116977 - DNA, 15 bp, Homo sapiens
tcatggatatgaaaa

SEQ ID NO: 116978 - DNA, 15 bp, Homo sapiens
atcatggatatgaaa

SEQ ID NO: 116979 - DNA, 15 bp, Homo sapiens
gatcatggatatgaa

SEQ ID NO: 116980 - DNA, 15 bp, Homo sapiens
agatcatggatatga

SEQ ID NO: 116981 - DNA, 15 bp, Homo sapiens
aagatcatggatatg

SEQ ID NO: 116982 - DNA, 15 bp, Homo sapiens
caagatcatggatat

SEQ ID NO: 116983 - DNA, 15 bp, Homo sapiens
tcaagatcatggata

SEQ ID NO: 116984 - DNA, 15 bp, Homo sapiens
ctcaagatcatggat

SEQ ID NO: 116985 - DNA, 15 bp, Homo sapiens
actcaagatcatgga

SEQ ID NO: 116986 - DNA, 15 bp, Homo sapiens
gactcaagatcatgg

SEQ ID NO: 116987 - DNA, 15 bp, Homo sapiens
ggactcaagatcatg

SEQ ID NO: 116988 - DNA, 15 bp, Homo sapiens
tggactcaagatcat

SEQ ID NO: 116989 - DNA, 15 bp, Homo sapiens
atggactcaagatca

SEQ ID NO: 116990 - DNA, 15 bp, Homo sapiens
aatggactcaagatc

SEQ ID NO: 116991 - DNA, 15 bp, Homo sapiens
aaatggactcaagat

SEQ ID NO: 116992 - DNA, 15 bp, Homo sapiens
caaatggactcaaga

SEQ ID NO: 116993 - DNA, 15 bp, Homo sapiens
ccaaatggactcaag

SEQ ID NO: 116994 - DNA, 15 bp, Homo sapiens
cccaaatggactcaa

SEQ ID NO: 116995 - DNA, 15 bp, Homo sapiens
ccccaaatggactca

SEQ ID NO: 116996 - DNA, 15 bp, Homo sapiens
cccccaaatggactc

SEQ ID NO: 116997 - DNA, 15 bp, Homo sapiens
tcccccaaatggact

SEQ ID NO: 116998 - DNA, 15 bp, Homo sapiens
atcccccaaatggac

SEQ ID NO: 116999 - DNA, 15 bp, Homo sapiens
aatcccccaaatgga

SEQ ID NO: 117000 - DNA, 15 bp, Homo sapiens
aaatcccccaaatgg

SEQ ID NO: 117001 - DNA, 15 bp, Homo sapiens
aaaatcccccaaatg

SEQ ID NO: 117002 - DNA, 15 bp, Homo sapiens
aaaaatcccccaaat

SEQ ID NO: 117003 - DNA, 15 bp, Homo sapiens
taaaaatcccccaaa

SEQ ID NO: 117004 - DNA, 15 bp, Homo sapiens
ttaaaaatcccccaa

SEQ ID NO: 117005 - DNA, 15 bp, Homo sapiens
cttaaaaatccccca

SEQ ID NO: 117006 - DNA, 15 bp, Homo sapiens
tcttaaaaatccccc

SEQ ID NO: 117007 - DNA, 15 bp, Homo sapiens
ttcttaaaaatcccc

SEQ ID NO: 117008 - DNA, 15 bp, Homo sapiens
attcttaaaaatccc

SEQ ID NO: 117009 - DNA, 15 bp, Homo sapiens
aattcttaaaaatcc

SEQ ID NO: 117010 - DNA, 15 bp, Homo sapiens
aaattcttaaaaatc

SEQ ID NO: 117011 - DNA, 15 bp, Homo sapiens
caaattcttaaaaat

SEQ ID NO: 117012 - DNA, 15 bp, Homo sapiens
tcaaattcttaaaaa

SEQ ID NO: 117013 - DNA, 15 bp, Homo sapiens
atcaaattcttaaaa

SEQ ID NO: 117014 - DNA, 15 bp, Homo sapiens
catcaaattcttaaa

SEQ ID NO: 117015 - DNA, 15 bp, Homo sapiens
acatcaaattcttaa

SEQ ID NO: 117016 - DNA, 15 bp, Homo sapiens
tacatcaaattctta

SEQ ID NO: 117017 - DNA, 15 bp, Homo sapiens
atacatcaaattctt

SEQ ID NO: 117018 - DNA, 15 bp, Homo sapiens
aatacatcaaattct

SEQ ID NO: 117019 - DNA, 15 bp, Homo sapiens
aaatacatcaaattc

SEQ ID NO: 117020 - DNA, 15 bp, Homo sapiens
gaaatacatcaaatt

SEQ ID NO: 117021 - DNA, 15 bp, Homo sapiens
tgaaatacatcaaat

SEQ ID NO: 117022 - DNA, 15 bp, Homo sapiens
ttgaaatacatcaaa

SEQ ID NO: 117023 - DNA, 15 bp, Homo sapiens
attgaaatacatcaa

SEQ ID NO: 117024 - DNA, 15 bp, Homo sapiens
tattgaaatacatca

SEQ ID NO: 117025 - DNA, 15 bp, Homo sapiens
gtattgaaatacatc

SEQ ID NO: 117026 - DNA, 15 bp, Homo sapiens
tgtattgaaatacat

SEQ ID NO: 117027 - DNA, 15 bp, Homo sapiens
gtgtattgaaataca

SEQ ID NO: 117028 - DNA, 15 bp, Homo sapiens
agtgtattgaaatac

SEQ ID NO: 117029 - DNA, 15 bp, Homo sapiens
cagtgtattgaaata

SEQ ID NO: 117030 - DNA, 15 bp, Homo sapiens
acagtgtattgaaat

SEQ ID NO: 117031 - DNA, 15 bp, Homo sapiens
aacagtgtattgaaa

SEQ ID NO: 117032 - DNA, 15 bp, Homo sapiens
gaacagtgtattgaa

SEQ ID NO: 117033 - DNA, 15 bp, Homo sapiens
tgaacagtgtattga

SEQ ID NO: 117034 - DNA, 15 bp, Homo sapiens
ttgaacagtgtattg

SEQ ID NO: 117035 - DNA, 15 bp, Homo sapiens
tttgaacagtgtatt

SEQ ID NO: 117036 - DNA, 15 bp, Homo sapiens
ttttgaacagtgtat

SEQ ID NO: 117037 - DNA, 15 bp, Homo sapiens
attttgaacagtgta

SEQ ID NO: 117038 - DNA, 15 bp, Homo sapiens
aattttgaacagtgt

SEQ ID NO: 117039 - DNA, 15 bp, Homo sapiens
taattttgaacagtg

SEQ ID NO: 117040 - DNA, 15 bp, Homo sapiens
ttaattttgaacagt

SEQ ID NO: 117041 - DNA, 15 bp, Homo sapiens
tttaattttgaacag

SEQ ID NO: 117042 - DNA, 15 bp, Homo sapiens
atttaattttgaaca

SEQ ID NO: 117043 - DNA, 15 bp, Homo sapiens
aatttaattttgaac

SEQ ID NO: 117044 - DNA, 15 bp, Homo sapiens
caatttaattttgaa

SEQ ID NO: 117045 - DNA, 15 bp, Homo sapiens
acaatttaattttga

SEQ ID NO: 117046 - DNA, 15 bp, Homo sapiens
aacaatttaattttg

SEQ ID NO: 117047 - DNA, 15 bp, Homo sapiens
aaacaatttaatttt

SEQ ID NO: 117048 - DNA, 15 bp, Homo sapiens
taaacaatttaattt

SEQ ID NO: 117049 - DNA, 15 bp, Homo sapiens
ttaaacaatttaatt

SEQ ID NO: 117050 - DNA, 15 bp, Homo sapiens
attaaacaatttaat

SEQ ID NO: 117051 - DNA, 15 bp, Homo sapiens
aattaaacaatttaa

SEQ ID NO: 117052 - DNA, 15 bp, Homo sapiens
aaattaaacaattta

SEQ ID NO: 117053 - DNA, 15 bp, Homo sapiens
aaaattaaacaattt

SEQ ID NO: 117054 - DNA, 15 bp, Homo sapiens
taaaattaaacaatt

SEQ ID NO: 117055 - DNA, 15 bp, Homo sapiens
ataaaattaaacaat

SEQ ID NO: 117056 - DNA, 15 bp, Homo sapiens
cataaaattaaacaa

SEQ ID NO: 117057 - DNA, 15 bp, Homo sapiens
acataaaattaaaca

SEQ ID NO: 117058 - DNA, 15 bp, Homo sapiens
tacataaaattaaac

SEQ ID NO: 117059 - DNA, 15 bp, Homo sapiens
atacataaaattaaa

SEQ ID NO: 117060 - DNA, 15 bp, Homo sapiens
catacataaaattaa

SEQ ID NO: 117061 - DNA, 15 bp, Homo sapiens
tcatacataaaatta

SEQ ID NO: 117062 - DNA, 15 bp, Homo sapiens
ctcatacataaaatt

SEQ ID NO: 117063 - DNA, 15 bp, Homo sapiens
actcatacataaaat

SEQ ID NO: 117064 - DNA, 15 bp, Homo sapiens
tactcatacataaaa

SEQ ID NO: 117065 - DNA, 15 bp, Homo sapiens
atactcatacataaa

SEQ ID NO: 117066 - DNA, 15 bp, Homo sapiens
catactcatacataa

SEQ ID NO: 117067 - DNA, 15 bp, Homo sapiens
acatactcatacata

SEQ ID NO: 117068 - DNA, 15 bp, Homo sapiens
tacatactcatacat

SEQ ID NO: 117069 - DNA, 15 bp, Homo sapiens
atacatactcataca

SEQ ID NO: 117070 - DNA, 15 bp, Homo sapiens
catacatactcatac

SEQ ID NO: 117071 - DNA, 15 bp, Homo sapiens
acatacatactcata

SEQ ID NO: 117072 - DNA, 15 bp, Homo sapiens
aacatacatactcat

SEQ ID NO: 117073 - DNA, 15 bp, Homo sapiens
gaacatacatactca

SEQ ID NO: 117074 - DNA, 15 bp, Homo sapiens
ggaacatacatactc

SEQ ID NO: 117075 - DNA, 15 bp, Homo sapiens
aggaacatacatact

SEQ ID NO: 117076 - DNA, 15 bp, Homo sapiens
caggaacatacatac

SEQ ID NO: 117077 - DNA, 15 bp, Homo sapiens
tcaggaacatacata

SEQ ID NO: 117078 - DNA, 15 bp, Homo sapiens
ttcaggaacatacat

SEQ ID NO: 117079 - DNA, 15 bp, Homo sapiens
cttcaggaacataca

SEQ ID NO: 117080 - DNA, 15 bp, Homo sapiens
ccttcaggaacatac

SEQ ID NO: 117081 - DNA, 15 bp, Homo sapiens
accttcaggaacata

SEQ ID NO: 117082 - DNA, 15 bp, Homo sapiens
caccttcaggaacat

SEQ ID NO: 117083 - DNA, 15 bp, Homo sapiens
ccaccttcaggaaca

SEQ ID NO: 117084 - DNA, 15 bp, Homo sapiens
accaccttcaggaac

SEQ ID NO: 117085 - DNA, 15 bp, Homo sapiens
gaccaccttcaggaa

SEQ ID NO: 117086 - DNA, 15 bp, Homo sapiens
ggaccaccttcagga

SEQ ID NO: 117087 - DNA, 15 bp, Homo sapiens
aggaccaccttcagg

SEQ ID NO: 117088 - DNA, 15 bp, Homo sapiens
taggaccaccttcag

SEQ ID NO: 117089 - DNA, 15 bp, Homo sapiens
ataggaccaccttca

SEQ ID NO: 117090 - DNA, 15 bp, Homo sapiens
aataggaccaccttc

SEQ ID NO: 117091 - DNA, 15 bp, Homo sapiens
aaataggaccacctt

SEQ ID NO: 117092 - DNA, 15 bp, Homo sapiens
taaataggaccacct

SEQ ID NO: 117093 - DNA, 15 bp, Homo sapiens
ttaaataggaccacc

SEQ ID NO: 117094 - DNA, 15 bp, Homo sapiens
tttaaataggaccac

SEQ ID NO: 117095 - DNA, 15 bp, Homo sapiens
atttaaataggacca

SEQ ID NO: 117096 - DNA, 15 bp, Homo sapiens
aatttaaataggacc

SEQ ID NO: 117097 - DNA, 15 bp, Homo sapiens
taatttaaataggac

SEQ ID NO: 117098 - DNA, 15 bp, Homo sapiens
ataatttaaatagga

SEQ ID NO: 117099 - DNA, 15 bp, Homo sapiens
aataatttaaatagg

SEQ ID NO: 117100 - DNA, 15 bp, Homo sapiens
taataatttaaatag

SEQ ID NO: 117101 - DNA, 15 bp, Homo sapiens
ttaataatttaaata

SEQ ID NO: 117102 - DNA, 15 bp, Homo sapiens
tttaataatttaaat

SEQ ID NO: 117103 - DNA, 15 bp, Homo sapiens
gtttaataatttaaa

SEQ ID NO: 117104 - DNA, 15 bp, Homo sapiens
agtttaataatttaa

SEQ ID NO: 117105 - DNA, 15 bp, Homo sapiens
tagtttaataattta

SEQ ID NO: 117106 - DNA, 15 bp, Homo sapiens
atagtttaataattt

SEQ ID NO: 117107 - DNA, 15 bp, Homo sapiens
aatagtttaataatt

SEQ ID NO: 117108 - DNA, 15 bp, Homo sapiens
caatagtttaataat

SEQ ID NO: 117109 - DNA, 15 bp, Homo sapiens
acaatagtttaataa

SEQ ID NO: 117110 - DNA, 15 bp, Homo sapiens
tacaatagtttaata

SEQ ID NO: 117111 - DNA, 15 bp, Homo sapiens
ttacaatagtttaat

SEQ ID NO: 117112 - DNA, 15 bp, Homo sapiens
gttacaatagtttaa

SEQ ID NO: 117113 - DNA, 15 bp, Homo sapiens
agttacaatagttta

SEQ ID NO: 117114 - DNA, 15 bp, Homo sapiens
aagttacaatagttt

SEQ ID NO: 117115 - DNA, 15 bp, Homo sapiens
aaagttacaatagtt

SEQ ID NO: 117116 - DNA, 15 bp, Homo sapiens
caaagttacaatagt

SEQ ID NO: 117117 - DNA, 15 bp, Homo sapiens
acaaagttacaatag

SEQ ID NO: 117118 - DNA, 15 bp, Homo sapiens
aacaaagttacaata

SEQ ID NO: 117119 - DNA, 15 bp, Homo sapiens
gaacaaagttacaat

SEQ ID NO: 117120 - DNA, 15 bp, Homo sapiens
agaacaaagttacaa

SEQ ID NO: 117121 - DNA, 15 bp, Homo sapiens
aagaacaaagttaca

SEQ ID NO: 117122 - DNA, 15 bp, Homo sapiens
caagaacaaagttac

SEQ ID NO: 117123 - DNA, 15 bp, Homo sapiens
acaagaacaaagtta

SEQ ID NO: 117124 - DNA, 15 bp, Homo sapiens
cacaagaacaaagtt

SEQ ID NO: 117125 - DNA, 15 bp, Homo sapiens
tcacaagaacaaagt

SEQ ID NO: 117126 - DNA, 15 bp, Homo sapiens
ttcacaagaacaaag

SEQ ID NO: 117127 - DNA, 15 bp, Homo sapiens
tttcacaagaacaaa

SEQ ID NO: 117128 - DNA, 15 bp, Homo sapiens
ctttcacaagaacaa

SEQ ID NO: 117129 - DNA, 15 bp, Homo sapiens
actttcacaagaaca

SEQ ID NO: 117130 - DNA, 15 bp, Homo sapiens
aactttcacaagaac

SEQ ID NO: 117131 - DNA, 15 bp, Homo sapiens
caactttcacaagaa

SEQ ID NO: 117132 - DNA, 15 bp, Homo sapiens
acaactttcacaaga

SEQ ID NO: 117133 - DNA, 15 bp, Homo sapiens
aacaactttcacaag

SEQ ID NO: 117134 - DNA, 15 bp, Homo sapiens
aaacaactttcacaa

SEQ ID NO: 117135 - DNA, 15 bp, Homo sapiens
gaaacaactttcaca

SEQ ID NO: 117136 - DNA, 15 bp, Homo sapiens
agaaacaactttcac

SEQ ID NO: 117137 - DNA, 15 bp, Homo sapiens
aagaaacaactttca

SEQ ID NO: 117138 - DNA, 15 bp, Homo sapiens
aaagaaacaactttc

SEQ ID NO: 117139 - DNA, 15 bp, Homo sapiens
aaaagaaacaacttt

SEQ ID NO: 117140 - DNA, 15 bp, Homo sapiens
aaaaagaaacaactt

SEQ ID NO: 117141 - DNA, 15 bp, Homo sapiens
gaaaaagaaacaact

SEQ ID NO: 117142 - DNA, 15 bp, Homo sapiens
tgaaaaagaaacaac

SEQ ID NO: 117143 - DNA, 15 bp, Homo sapiens
ttgaaaaagaaacaa

SEQ ID NO: 117144 - DNA, 15 bp, Homo sapiens
gttgaaaaagaaaca

SEQ ID NO: 117145 - DNA, 15 bp, Homo sapiens
ggttgaaaaagaaac

SEQ ID NO: 117146 - DNA, 15 bp, Homo sapiens
tggttgaaaaagaaa

SEQ ID NO: 117147 - DNA, 15 bp, Homo sapiens
gtggttgaaaaagaa

SEQ ID NO: 117148 - DNA, 15 bp, Homo sapiens
ggtggttgaaaaaga

SEQ ID NO: 117149 - DNA, 15 bp, Homo sapiens
tggtggttgaaaaag

SEQ ID NO: 117150 - DNA, 15 bp, Homo sapiens
gtggtggttgaaaaa

SEQ ID NO: 117151 - DNA, 15 bp, Homo sapiens
agtggtggttgaaaa

SEQ ID NO: 117152 - DNA, 15 bp, Homo sapiens
tagtggtggttgaaa

SEQ ID NO: 117153 - DNA, 15 bp, Homo sapiens
atagtggtggttgaa

SEQ ID NO: 117154 - DNA, 15 bp, Homo sapiens
tatagtggtggttga

SEQ ID NO: 117155 - DNA, 15 bp, Homo sapiens
ttatagtggtggttg

SEQ ID NO: 117156 - DNA, 15 bp, Homo sapiens
tttatagtggtggtt

SEQ ID NO: 117157 - DNA, 15 bp, Homo sapiens
atttatagtggtggt

SEQ ID NO: 117158 - DNA, 15 bp, Homo sapiens
tatttatagtggtgg

SEQ ID NO: 117159 - DNA, 15 bp, Homo sapiens
atatttatagtggtg

SEQ ID NO: 117160 - DNA, 15 bp, Homo sapiens
aatatttatagtggt

SEQ ID NO: 117161 - DNA, 15 bp, Homo sapiens
aaatatttatagtgg

SEQ ID NO: 117162 - DNA, 15 bp, Homo sapiens
taaatatttatagtg

SEQ ID NO: 117163 - DNA, 15 bp, Homo sapiens
ttaaatatttatagt

SEQ ID NO: 117164 - DNA, 15 bp, Homo sapiens
tttaaatatttatag

SEQ ID NO: 117165 - DNA, 15 bp, Homo sapiens
atttaaatatttata

SEQ ID NO: 117166 - DNA, 15 bp, Homo sapiens
tatttaaatatttat

SEQ ID NO: 117167 - DNA, 15 bp, Homo sapiens
ttatttaaatattta

SEQ ID NO: 117168 - DNA, 15 bp, Homo sapiens
gttatttaaatattt

SEQ ID NO: 117169 - DNA, 15 bp, Homo sapiens
agttatttaaatatt

SEQ ID NO: 117170 - DNA, 15 bp, Homo sapiens
aagttatttaaatat

SEQ ID NO: 117171 - DNA, 15 bp, Homo sapiens
caagttatttaaata

SEQ ID NO: 117172 - DNA, 15 bp, Homo sapiens
tcaagttatttaaat

SEQ ID NO: 117173 - DNA, 15 bp, Homo sapiens
atcaagttatttaaa

SEQ ID NO: 117174 - DNA, 15 bp, Homo sapiens
aatcaagttatttaa

SEQ ID NO: 117175 - DNA, 15 bp, Homo sapiens
taatcaagttattta

SEQ ID NO: 117176 - DNA, 15 bp, Homo sapiens
ataatcaagttattt

SEQ ID NO: 117177 - DNA, 15 bp, Homo sapiens
aataatcaagttatt

SEQ ID NO: 117178 - DNA, 15 bp, Homo sapiens
aaataatcaagttat

SEQ ID NO: 117179 - DNA, 15 bp, Homo sapiens
aaaataatcaagtta

SEQ ID NO: 117180 - DNA, 15 bp, Homo sapiens
caaaataatcaagtt

SEQ ID NO: 117181 - DNA, 15 bp, Homo sapiens
ccaaaataatcaagt

SEQ ID NO: 117182 - DNA, 15 bp, Homo sapiens
gccaaaataatcaag

SEQ ID NO: 117183 - DNA, 15 bp, Homo sapiens
agccaaaataatcaa

SEQ ID NO: 117184 - DNA, 15 bp, Homo sapiens
cagccaaaataatca

SEQ ID NO: 117185 - DNA, 15 bp, Homo sapiens
acagccaaaataatc

SEQ ID NO: 117186 - DNA, 15 bp, Homo sapiens
tacagccaaaataat

SEQ ID NO: 117187 - DNA, 15 bp, Homo sapiens
atacagccaaaataa

SEQ ID NO: 117188 - DNA, 15 bp, Homo sapiens
aatacagccaaaata

SEQ ID NO: 117189 - DNA, 15 bp, Homo sapiens
gaatacagccaaaat

SEQ ID NO: 117190 - DNA, 15 bp, Homo sapiens
agaatacagccaaaa

SEQ ID NO: 117191 - DNA, 15 bp, Homo sapiens
cagaatacagccaaa

SEQ ID NO: 117192 - DNA, 15 bp, Homo sapiens
acagaatacagccaa

SEQ ID NO: 117193 - DNA, 15 bp, Homo sapiens
aacagaatacagcca

SEQ ID NO: 117194 - DNA, 15 bp, Homo sapiens
aaacagaatacagcc

SEQ ID NO: 117195 - DNA, 15 bp, Homo sapiens
gaaacagaatacagc

SEQ ID NO: 117196 - DNA, 15 bp, Homo sapiens
tgaaacagaatacag

SEQ ID NO: 117197 - DNA, 15 bp, Homo sapiens
ctgaaacagaataca

SEQ ID NO: 117198 - DNA, 15 bp, Homo sapiens
gctgaaacagaatac

SEQ ID NO: 117199 - DNA, 15 bp, Homo sapiens
tgctgaaacagaata

SEQ ID NO: 117200 - DNA, 15 bp, Homo sapiens
ttgctgaaacagaat

SEQ ID NO: 117201 - DNA, 15 bp, Homo sapiens
tttgctgaaacagaa

SEQ ID NO: 117202 - DNA, 15 bp, Homo sapiens
ctttgctgaaacaga

SEQ ID NO: 117203 - DNA, 15 bp, Homo sapiens
tctttgctgaaacag

SEQ ID NO: 117204 - DNA, 15 bp, Homo sapiens
gtctttgctgaaaca

SEQ ID NO: 117205 - DNA, 15 bp, Homo sapiens
tgtctttgctgaaac

SEQ ID NO: 117206 - DNA, 15 bp, Homo sapiens
atgtctttgctgaaa

SEQ ID NO: 117207 - DNA, 15 bp, Homo sapiens
gatgtctttgctgaa

SEQ ID NO: 117208 - DNA, 15 bp, Homo sapiens
tgatgtctttgctga

SEQ ID NO: 117209 - DNA, 15 bp, Homo sapiens
atgatgtctttgctg

SEQ ID NO: 117210 - DNA, 15 bp, Homo sapiens
tatgatgtctttgct

SEQ ID NO: 117211 - DNA, 15 bp, Homo sapiens
ttatgatgtctttgc

SEQ ID NO: 117212 - DNA, 15 bp, Homo sapiens
cttatgatgtctttg

SEQ ID NO: 117213 - DNA, 15 bp, Homo sapiens
ccttatgatgtcttt

SEQ ID NO: 117214 - DNA, 15 bp, Homo sapiens
cccttatgatgtctt

SEQ ID NO: 117215 - DNA, 15 bp, Homo sapiens
gcccttatgatgtct

SEQ ID NO: 117216 - DNA, 15 bp, Homo sapiens
agcccttatgatgtc

SEQ ID NO: 117217 - DNA, 15 bp, Homo sapiens
aagcccttatgatgt

SEQ ID NO: 117218 - DNA, 15 bp, Homo sapiens
gaagcccttatgatg

SEQ ID NO: 117219 - DNA, 15 bp, Homo sapiens
agaagcccttatgat

SEQ ID NO: 117220 - DNA, 15 bp, Homo sapiens
gagaagcccttatga

SEQ ID NO: 117221 - DNA, 15 bp, Homo sapiens
ggagaagcccttatg

SEQ ID NO: 117222 - DNA, 15 bp, Homo sapiens
gggagaagcccttat

SEQ ID NO: 117223 - DNA, 15 bp, Homo sapiens
tgggagaagccctta

SEQ ID NO: 117224 - DNA, 15 bp, Homo sapiens
ctgggagaagccctt

SEQ ID NO: 117225 - DNA, 15 bp, Homo sapiens
gctgggagaagccct

SEQ ID NO: 117226 - DNA, 15 bp, Homo sapiens
ggctgggagaagccc

SEQ ID NO: 117227 - DNA, 15 bp, Homo sapiens
tggctgggagaagcc

SEQ ID NO: 117228 - DNA, 15 bp, Homo sapiens
atggctgggagaagc

SEQ ID NO: 117229 - DNA, 15 bp, Homo sapiens
gatggctgggagaag

SEQ ID NO: 117230 - DNA, 15 bp, Homo sapiens
tgatggctgggagaa

SEQ ID NO: 117231 - DNA, 15 bp, Homo sapiens
ttgatggctgggaga

SEQ ID NO: 117232 - DNA, 15 bp, Homo sapiens
tttgatggctgggag

SEQ ID NO: 117233 - DNA, 15 bp, Homo sapiens
ctttgatggctggga

SEQ ID NO: 117234 - DNA, 15 bp, Homo sapiens
gctttgatggctggg

SEQ ID NO: 117235 - DNA, 15 bp, Homo sapiens
agctttgatggctgg

SEQ ID NO: 117236 - DNA, 15 bp, Homo sapiens
tagctttgatggctg

SEQ ID NO: 117237 - DNA, 15 bp, Homo sapiens
atagctttgatggct

SEQ ID NO: 117238 - DNA, 15 bp, Homo sapiens
aatagctttgatggc

SEQ ID NO: 117239 - DNA, 15 bp, Homo sapiens
aaatagctttgatgg

SEQ ID NO: 117240 - DNA, 15 bp, Homo sapiens
caaatagctttgatg

SEQ ID NO: 117241 - DNA, 15 bp, Homo sapiens
tcaaatagctttgat

SEQ ID NO: 117242 - DNA, 15 bp, Homo sapiens
ttcaaatagctttga

SEQ ID NO: 117243 - DNA, 15 bp, Homo sapiens
attcaaatagctttg

SEQ ID NO: 117244 - DNA, 15 bp, Homo sapiens
tattcaaatagcttt

SEQ ID NO: 117245 - DNA, 15 bp, Homo sapiens
gtattcaaatagctt

SEQ ID NO: 117246 - DNA, 15 bp, Homo sapiens
agtattcaaatagct

SEQ ID NO: 117247 - DNA, 15 bp, Homo sapiens
tagtattcaaatagc

SEQ ID NO: 117248 - DNA, 15 bp, Homo sapiens
ttagtattcaaatag

SEQ ID NO: 117249 - DNA, 15 bp, Homo sapiens
attagtattcaaata

SEQ ID NO: 117250 - DNA, 15 bp, Homo sapiens
gattagtattcaaat

SEQ ID NO: 117251 - DNA, 15 bp, Homo sapiens
agattagtattcaaa

SEQ ID NO: 117252 - DNA, 15 bp, Homo sapiens
gagattagtattcaa

SEQ ID NO: 117253 - DNA, 15 bp, Homo sapiens
ggagattagtattca

SEQ ID NO: 117254 - DNA, 15 bp, Homo sapiens
tggagattagtattc

SEQ ID NO: 117255 - DNA, 15 bp, Homo sapiens
atggagattagtatt

SEQ ID NO: 117256 - DNA, 15 bp, Homo sapiens
aatggagattagtat

SEQ ID NO: 117257 - DNA, 15 bp, Homo sapiens
taatggagattagta

SEQ ID NO: 117258 - DNA, 15 bp, Homo sapiens
ataatggagattagt

SEQ ID NO: 117259 - DNA, 15 bp, Homo sapiens
tataatggagattag

SEQ ID NO: 117260 - DNA, 15 bp, Homo sapiens
ctataatggagatta

SEQ ID NO: 117261 - DNA, 15 bp, Homo sapiens
actataatggagatt

SEQ ID NO: 117262 - DNA, 15 bp, Homo sapiens
tactataatggagat

SEQ ID NO: 117263 - DNA, 15 bp, Homo sapiens
gtactataatggaga

SEQ ID NO: 117264 - DNA, 15 bp, Homo sapiens
cgtactataatggag

SEQ ID NO: 117265 - DNA, 15 bp, Homo sapiens
tcgtactataatgga

SEQ ID NO: 117266 - DNA, 15 bp, Homo sapiens
ttcgtactataatgg

SEQ ID NO: 117267 - DNA, 15 bp, Homo sapiens
cttcgtactataatg

SEQ ID NO: 117268 - DNA, 15 bp, Homo sapiens
acttcgtactataat

SEQ ID NO: 117269 - DNA, 15 bp, Homo sapiens
tacttcgtactataa

SEQ ID NO: 117270 - DNA, 15 bp, Homo sapiens
ttacttcgtactata

SEQ ID NO: 117271 - DNA, 15 bp, Homo sapiens
gttacttcgtactat

SEQ ID NO: 117272 - DNA, 15 bp, Homo sapiens
ggttacttcgtacta

SEQ ID NO: 117273 - DNA, 15 bp, Homo sapiens
gggttacttcgtact

SEQ ID NO: 117274 - DNA, 15 bp, Homo sapiens
ggggttacttcgtac

SEQ ID NO: 117275 - DNA, 15 bp, Homo sapiens
tggggttacttcgta

SEQ ID NO: 117276 - DNA, 15 bp, Homo sapiens
ctggggttacttcgt

SEQ ID NO: 117277 - DNA, 15 bp, Homo sapiens
cctggggttacttcg

SEQ ID NO: 117278 - DNA, 15 bp, Homo sapiens
acctggggttacttc

SEQ ID NO: 117279 - DNA, 15 bp, Homo sapiens
aacctggggttactt

SEQ ID NO: 117280 - DNA, 15 bp, Homo sapiens
gaacctggggttact

SEQ ID NO: 117281 - DNA, 15 bp, Homo sapiens
agaacctggggttac

SEQ ID NO: 117282 - DNA, 15 bp, Homo sapiens
cagaacctggggtta

SEQ ID NO: 117283 - DNA, 15 bp, Homo sapiens
tcagaacctggggtt

SEQ ID NO: 117284 - DNA, 15 bp, Homo sapiens
gtcagaacctggggt

SEQ ID NO: 117285 - DNA, 15 bp, Homo sapiens
tgtcagaacctgggg

SEQ ID NO: 117286 - DNA, 15 bp, Homo sapiens
ctgtcagaacctggg

SEQ ID NO: 117287 - DNA, 15 bp, Homo sapiens
actgtcagaacctgg

SEQ ID NO: 117288 - DNA, 15 bp, Homo sapiens
aactgtcagaacctg

SEQ ID NO: 117289 - DNA, 15 bp, Homo sapiens
aaactgtcagaacct

SEQ ID NO: 117290 - DNA, 15 bp, Homo sapiens
gaaactgtcagaacc

SEQ ID NO: 117291 - DNA, 15 bp, Homo sapiens
agaaactgtcagaac

SEQ ID NO: 117292 - DNA, 15 bp, Homo sapiens
gagaaactgtcagaa

SEQ ID NO: 117293 - DNA, 15 bp, Homo sapiens
ggagaaactgtcaga

SEQ ID NO: 117294 - DNA, 15 bp, Homo sapiens
aggagaaactgtcag

SEQ ID NO: 117295 - DNA, 15 bp, Homo sapiens
aaggagaaactgtca

SEQ ID NO: 117296 - DNA, 15 bp, Homo sapiens
caaggagaaactgtc

SEQ ID NO: 117297 - DNA, 15 bp, Homo sapiens
ccaaggagaaactgt

SEQ ID NO: 117298 - DNA, 15 bp, Homo sapiens
accaaggagaaactg

SEQ ID NO: 117299 - DNA, 15 bp, Homo sapiens
taccaaggagaaact

SEQ ID NO: 117300 - DNA, 15 bp, Homo sapiens
ataccaaggagaaac

SEQ ID NO: 117301 - DNA, 15 bp, Homo sapiens
aataccaaggagaaa

SEQ ID NO: 117302 - DNA, 15 bp, Homo sapiens
aaataccaaggagaa

SEQ ID NO: 117303 - DNA, 15 bp, Homo sapiens
caaataccaaggaga

SEQ ID NO: 117304 - DNA, 15 bp, Homo sapiens
ccaaataccaaggag

SEQ ID NO: 117305 - DNA, 15 bp, Homo sapiens
accaaataccaagga

SEQ ID NO: 117306 - DNA, 15 bp, Homo sapiens
aaccaaataccaagg

SEQ ID NO: 117307 - DNA, 15 bp, Homo sapiens
caaccaaataccaag

SEQ ID NO: 117308 - DNA, 15 bp, Homo sapiens
ccaaccaaataccaa

SEQ ID NO: 117309 - DNA, 15 bp, Homo sapiens
tccaaccaaatacca

SEQ ID NO: 117310 - DNA, 15 bp, Homo sapiens
ctccaaccaaatacc

SEQ ID NO: 117311 - DNA, 15 bp, Homo sapiens
actccaaccaaatac

SEQ ID NO: 117312 - DNA, 15 bp, Homo sapiens
gactccaaccaaata

SEQ ID NO: 117313 - DNA, 15 bp, Homo sapiens
agactccaaccaaat

SEQ ID NO: 117314 - DNA, 15 bp, Homo sapiens
aagactccaaccaaa

SEQ ID NO: 117315 - DNA, 15 bp, Homo sapiens
taagactccaaccaa

SEQ ID NO: 117316 - DNA, 15 bp, Homo sapiens
gtaagactccaacca

SEQ ID NO: 117317 - DNA, 15 bp, Homo sapiens
ggtaagactccaacc

SEQ ID NO: 117318 - DNA, 15 bp, Homo sapiens
cggtaagactccaac

SEQ ID NO: 117319 - DNA, 15 bp, Homo sapiens
acggtaagactccaa

SEQ ID NO: 117320 - DNA, 15 bp, Homo sapiens
gacggtaagactcca

SEQ ID NO: 117321 - DNA, 15 bp, Homo sapiens
ggacggtaagactcc

SEQ ID NO: 117322 - DNA, 15 bp, Homo sapiens
aggacggtaagactc

SEQ ID NO: 117323 - DNA, 15 bp, Homo sapiens
gaggacggtaagact

SEQ ID NO: 117324 - DNA, 15 bp, Homo sapiens
tgaggacggtaagac

SEQ ID NO: 117325 - DNA, 15 bp, Homo sapiens
gtgaggacggtaaga

SEQ ID NO: 117326 - DNA, 15 bp, Homo sapiens
agtgaggacggtaag

SEQ ID NO: 117327 - DNA, 15 bp, Homo sapiens
cagtgaggacggtaa

SEQ ID NO: 117328 - DNA, 15 bp, Homo sapiens
acagtgaggacggta

SEQ ID NO: 117329 - DNA, 15 bp, Homo sapiens
gacagtgaggacggt

SEQ ID NO: 117330 - DNA, 15 bp, Homo sapiens
agacagtgaggacgg

SEQ ID NO: 117331 - DNA, 15 bp, Homo sapiens
aagacagtgaggacg

SEQ ID NO: 117332 - DNA, 15 bp, Homo sapiens
caagacagtgaggac

SEQ ID NO: 117333 - DNA, 15 bp, Homo sapiens
tcaagacagtgagga

SEQ ID NO: 117334 - DNA, 15 bp, Homo sapiens
ctcaagacagtgagg

SEQ ID NO: 117335 - DNA, 15 bp, Homo sapiens
cctcaagacagtgag

SEQ ID NO: 117336 - DNA, 15 bp, Homo sapiens
acctcaagacagtga

SEQ ID NO: 117337 - DNA, 15 bp, Homo sapiens
tacctcaagacagtg

SEQ ID NO: 117338 - DNA, 15 bp, Homo sapiens
ttacctcaagacagt

SEQ ID NO: 117339 - DNA, 15 bp, Homo sapiens
attacctcaagacag

SEQ ID NO: 117340 - DNA, 15 bp, Homo sapiens
cattacctcaagaca

SEQ ID NO: 117341 - DNA, 15 bp, Homo sapiens
ccattacctcaagac

SEQ ID NO: 117342 - DNA, 15 bp, Homo sapiens
cccattacctcaaga

SEQ ID NO: 117343 - DNA, 15 bp, Homo sapiens
tcccattacctcaag

SEQ ID NO: 117344 - DNA, 15 bp, Homo sapiens
ctcccattacctcaa

SEQ ID NO: 117345 - DNA, 15 bp, Homo sapiens
cctcccattacctca

SEQ ID NO: 117346 - DNA, 15 bp, Homo sapiens
tcctcccattacctc

SEQ ID NO: 117347 - DNA, 15 bp, Homo sapiens
ctcctcccattacct

SEQ ID NO: 117348 - DNA, 15 bp, Homo sapiens
cctcctcccattacc

SEQ ID NO: 117349 - DNA, 15 bp, Homo sapiens
tcctcctcccattac

SEQ ID NO: 117350 - DNA, 15 bp, Homo sapiens
ctcctcctcccatta

SEQ ID NO: 117351 - DNA, 15 bp, Homo sapiens
cctcctcctcccatt

SEQ ID NO: 117352 - DNA, 15 bp, Homo sapiens
acctcctcctcccat

SEQ ID NO: 117353 - DNA, 15 bp, Homo sapiens
gacctcctcctccca

SEQ ID NO: 117354 - DNA, 15 bp, Homo sapiens
agacctcctcctccc

SEQ ID NO: 117355 - DNA, 15 bp, Homo sapiens
cagacctcctcctcc

SEQ ID NO: 117356 - DNA, 15 bp, Homo sapiens
ccagacctcctcctc

SEQ ID NO: 117357 - DNA, 15 bp, Homo sapiens
cccagacctcctcct

SEQ ID NO: 117358 - DNA, 15 bp, Homo sapiens
tcccagacctcctcc

SEQ ID NO: 117359 - DNA, 15 bp, Homo sapiens
atcccagacctcctc

SEQ ID NO: 117360 - DNA, 15 bp, Homo sapiens
tatcccagacctcct

SEQ ID NO: 117361 - DNA, 15 bp, Homo sapiens
ttatcccagacctcc

SEQ ID NO: 117362 - DNA, 15 bp, Homo sapiens
cttatcccagacctc

SEQ ID NO: 117363 - DNA, 15 bp, Homo sapiens
tcttatcccagacct

SEQ ID NO: 117364 - DNA, 15 bp, Homo sapiens
ctcttatcccagacc

SEQ ID NO: 117365 - DNA, 15 bp, Homo sapiens
actcttatcccagac

SEQ ID NO: 117366 - DNA, 15 bp, Homo sapiens
gactcttatcccaga

SEQ ID NO: 117367 - DNA, 15 bp, Homo sapiens
tgactcttatcccag

SEQ ID NO: 117368 - DNA, 15 bp, Homo sapiens
ctgactcttatccca

SEQ ID NO: 117369 - DNA, 15 bp, Homo sapiens
cctgactcttatccc

SEQ ID NO: 117370 - DNA, 15 bp, Homo sapiens
tcctgactcttatcc

SEQ ID NO: 117371 - DNA, 15 bp, Homo sapiens
ttcctgactcttatc

SEQ ID NO: 117372 - DNA, 15 bp, Homo sapiens
attcctgactcttat

SEQ ID NO: 117373 - DNA, 15 bp, Homo sapiens
gattcctgactctta

SEQ ID NO: 117374 - DNA, 15 bp, Homo sapiens
agattcctgactctt

SEQ ID NO: 117375 - DNA, 15 bp, Homo sapiens
cagattcctgactct

SEQ ID NO: 117376 - DNA, 15 bp, Homo sapiens
tcagattcctgactc

SEQ ID NO: 117377 - DNA, 15 bp, Homo sapiens
ctcagattcctgact

SEQ ID NO: 117378 - DNA, 15 bp, Homo sapiens
actcagattcctgac

SEQ ID NO: 117379 - DNA, 15 bp, Homo sapiens
cactcagattcctga

SEQ ID NO: 117380 - DNA, 15 bp, Homo sapiens
ccactcagattcctg

SEQ ID NO: 117381 - DNA, 15 bp, Homo sapiens
gccactcagattcct

SEQ ID NO: 117382 - DNA, 15 bp, Homo sapiens
ggccactcagattcc

SEQ ID NO: 117383 - DNA, 15 bp, Homo sapiens
gggccactcagattc

SEQ ID NO: 117384 - DNA, 15 bp, Homo sapiens
agggccactcagatt

SEQ ID NO: 117385 - DNA, 15 bp, Homo sapiens
gagggccactcagat

SEQ ID NO: 117386 - DNA, 15 bp, Homo sapiens
tgagggccactcaga

SEQ ID NO: 117387 - DNA, 15 bp, Homo sapiens
atgagggccactcag

SEQ ID NO: 117388 - DNA, 15 bp, Homo sapiens
catgagggccactca

SEQ ID NO: 117389 - DNA, 15 bp, Homo sapiens
acatgagggccactc

SEQ ID NO: 117390 - DNA, 15 bp, Homo sapiens
gacatgagggccact

SEQ ID NO: 117391 - DNA, 15 bp, Homo sapiens
ggacatgagggccac

SEQ ID NO: 117392 - DNA, 15 bp, Homo sapiens
gggacatgagggcca

SEQ ID NO: 117393 - DNA, 15 bp, Homo sapiens
agggacatgagggcc

SEQ ID NO: 117394 - DNA, 15 bp, Homo sapiens
cagggacatgagggc

SEQ ID NO: 117395 - DNA, 15 bp, Homo sapiens
acagggacatgaggg

SEQ ID NO: 117396 - DNA, 15 bp, Homo sapiens
aacagggacatgagg

SEQ ID NO: 117397 - DNA, 15 bp, Homo sapiens
caacagggacatgag

SEQ ID NO: 117398 - DNA, 15 bp, Homo sapiens
acaacagggacatga

SEQ ID NO: 117399 - DNA, 15 bp, Homo sapiens
gacaacagggacatg

SEQ ID NO: 117400 - DNA, 15 bp, Homo sapiens
agacaacagggacat

SEQ ID NO: 117401 - DNA, 15 bp, Homo sapiens
aagacaacagggaca

SEQ ID NO: 117402 - DNA, 15 bp, Homo sapiens
taagacaacagggac

SEQ ID NO: 117403 - DNA, 15 bp, Homo sapiens
ttaagacaacaggga

SEQ ID NO: 117404 - DNA, 15 bp, Homo sapiens
attaagacaacaggg

SEQ ID NO: 117405 - DNA, 15 bp, Homo sapiens
cattaagacaacagg

SEQ ID NO: 117406 - DNA, 15 bp, Homo sapiens
gcattaagacaacag

SEQ ID NO: 117407 - DNA, 15 bp, Homo sapiens
agcattaagacaaca

SEQ ID NO: 117408 - DNA, 15 bp, Homo sapiens
aagcattaagacaac

SEQ ID NO: 117409 - DNA, 15 bp, Homo sapiens
taagcattaagacaa

SEQ ID NO: 117410 - DNA, 15 bp, Homo sapiens
ctaagcattaagaca

SEQ ID NO: 117411 - DNA, 15 bp, Homo sapiens
actaagcattaagac

SEQ ID NO: 117412 - DNA, 15 bp, Homo sapiens
tactaagcattaaga

SEQ ID NO: 117413 - DNA, 15 bp, Homo sapiens
ctactaagcattaag

SEQ ID NO: 117414 - DNA, 15 bp, Homo sapiens
cctactaagcattaa

SEQ ID NO: 117415 - DNA, 15 bp, Homo sapiens
acctactaagcatta

SEQ ID NO: 117416 - DNA, 15 bp, Homo sapiens
tacctactaagcatt

SEQ ID NO: 117417 - DNA, 15 bp, Homo sapiens
ttacctactaagcat

SEQ ID NO: 117418 - DNA, 15 bp, Homo sapiens
gttacctactaagca

SEQ ID NO: 117419 - DNA, 15 bp, Homo sapiens
agttacctactaagc

SEQ ID NO: 117420 - DNA, 15 bp, Homo sapiens
aagttacctactaag

SEQ ID NO: 117421 - DNA, 15 bp, Homo sapiens
gaagttacctactaa

SEQ ID NO: 117422 - DNA, 15 bp, Homo sapiens
tgaagttacctacta

SEQ ID NO: 117423 - DNA, 15 bp, Homo sapiens
ctgaagttacctact

SEQ ID NO: 117424 - DNA, 15 bp, Homo sapiens
gctgaagttacctac

SEQ ID NO: 117425 - DNA, 15 bp, Homo sapiens
ggctgaagttaccta

SEQ ID NO: 117426 - DNA, 15 bp, Homo sapiens
gggctgaagttacct

SEQ ID NO: 117427 - DNA, 15 bp, Homo sapiens
ggggctgaagttacc

SEQ ID NO: 117428 - DNA, 15 bp, Homo sapiens
gggggctgaagttac

SEQ ID NO: 117429 - DNA, 15 bp, Homo sapiens
agggggctgaagtta

SEQ ID NO: 117430 - DNA, 15 bp, Homo sapiens
cagggggctgaagtt

SEQ ID NO: 117431 - DNA, 15 bp, Homo sapiens
ccagggggctgaagt

SEQ ID NO: 117432 - DNA, 15 bp, Homo sapiens
cccagggggctgaag

SEQ ID NO: 117433 - DNA, 15 bp, Homo sapiens
tcccagggggctgaa

SEQ ID NO: 117434 - DNA, 15 bp, Homo sapiens
ttcccagggggctga

SEQ ID NO: 117435 - DNA, 15 bp, Homo sapiens
gttcccagggggctg

SEQ ID NO: 117436 - DNA, 15 bp, Homo sapiens
agttcccagggggct

SEQ ID NO: 117437 - DNA, 15 bp, Homo sapiens
cagttcccagggggc

SEQ ID NO: 117438 - DNA, 15 bp, Homo sapiens
ccagttcccaggggg

SEQ ID NO: 117439 - DNA, 15 bp, Homo sapiens
gccagttcccagggg

SEQ ID NO: 117440 - DNA, 15 bp, Homo sapiens
tgccagttcccaggg

SEQ ID NO: 117441 - DNA, 15 bp, Homo sapiens
gtgccagttcccagg

SEQ ID NO: 117442 - DNA, 15 bp, Homo sapiens
agtgccagttcccag

SEQ ID NO: 117443 - DNA, 15 bp, Homo sapiens
cagtgccagttccca

SEQ ID NO: 117444 - DNA, 15 bp, Homo sapiens
acagtgccagttccc

SEQ ID NO: 117445 - DNA, 15 bp, Homo sapiens
aacagtgccagttcc

SEQ ID NO: 117446 - DNA, 15 bp, Homo sapiens
aaacagtgccagttc

SEQ ID NO: 117447 - DNA, 15 bp, Homo sapiens
gaaacagtgccagtt

SEQ ID NO: 117448 - DNA, 15 bp, Homo sapiens
ggaaacagtgccagt

SEQ ID NO: 117449 - DNA, 15 bp, Homo sapiens
aggaaacagtgccag

SEQ ID NO: 117450 - DNA, 15 bp, Homo sapiens
taggaaacagtgcca

SEQ ID NO: 117451 - DNA, 15 bp, Homo sapiens
gtaggaaacagtgcc

SEQ ID NO: 117452 - DNA, 15 bp, Homo sapiens
cgtaggaaacagtgc

SEQ ID NO: 117453 - DNA, 15 bp, Homo sapiens
acgtaggaaacagtg

SEQ ID NO: 117454 - DNA, 15 bp, Homo sapiens
cacgtaggaaacagt

SEQ ID NO: 117455 - DNA, 15 bp, Homo sapiens
ccacgtaggaaacag

SEQ ID NO: 117456 - DNA, 15 bp, Homo sapiens
cccacgtaggaaaca

SEQ ID NO: 117457 - DNA, 15 bp, Homo sapiens
tcccacgtaggaaac

SEQ ID NO: 117458 - DNA, 15 bp, Homo sapiens
ctcccacgtaggaaa

SEQ ID NO: 117459 - DNA, 15 bp, Homo sapiens
gctcccacgtaggaa

SEQ ID NO: 117460 - DNA, 15 bp, Homo sapiens
agctcccacgtagga

SEQ ID NO: 117461 - DNA, 15 bp, Homo sapiens
cagctcccacgtagg

SEQ ID NO: 117462 - DNA, 15 bp, Homo sapiens
acagctcccacgtag

SEQ ID NO: 117463 - DNA, 15 bp, Homo sapiens
aacagctcccacgta

SEQ ID NO: 117464 - DNA, 15 bp, Homo sapiens
caacagctcccacgt

SEQ ID NO: 117465 - DNA, 15 bp, Homo sapiens
ccaacagctcccacg

SEQ ID NO: 117466 - DNA, 15 bp, Homo sapiens
cccaacagctcccac

SEQ ID NO: 117467 - DNA, 15 bp, Homo sapiens
ccccaacagctccca

SEQ ID NO: 117468 - DNA, 15 bp, Homo sapiens
tccccaacagctccc

SEQ ID NO: 117469 - DNA, 15 bp, Homo sapiens
ttccccaacagctcc

SEQ ID NO: 117470 - DNA, 15 bp, Homo sapiens
cttccccaacagctc

SEQ ID NO: 117471 - DNA, 15 bp, Homo sapiens
ccttccccaacagct

SEQ ID NO: 117472 - DNA, 15 bp, Homo sapiens
tccttccccaacagc

SEQ ID NO: 117473 - DNA, 15 bp, Homo sapiens
ttccttccccaacag

SEQ ID NO: 117474 - DNA, 15 bp, Homo sapiens
cttccttccccaaca

SEQ ID NO: 117475 - DNA, 15 bp, Homo sapiens
tcttccttccccaac

SEQ ID NO: 117476 - DNA, 15 bp, Homo sapiens
ctcttccttccccaa

SEQ ID NO: 117477 - DNA, 15 bp, Homo sapiens
actcttccttcccca

SEQ ID NO: 117478 - DNA, 15 bp, Homo sapiens
tactcttccttcccc

SEQ ID NO: 117479 - DNA, 15 bp, Homo sapiens
ctactcttccttccc

SEQ ID NO: 117480 - DNA, 15 bp, Homo sapiens
cctactcttccttcc

SEQ ID NO: 117481 - DNA, 15 bp, Homo sapiens
gcctactcttccttc

SEQ ID NO: 117482 - DNA, 15 bp, Homo sapiens
agcctactcttcctt

SEQ ID NO: 117483 - DNA, 15 bp, Homo sapiens
cagcctactcttcct

SEQ ID NO: 117484 - DNA, 15 bp, Homo sapiens
ccagcctactcttcc

SEQ ID NO: 117485 - DNA, 15 bp, Homo sapiens
cccagcctactcttc

SEQ ID NO: 117486 - DNA, 15 bp, Homo sapiens
ccccagcctactctt

SEQ ID NO: 117487 - DNA, 15 bp, Homo sapiens
gccccagcctactct

SEQ ID NO: 117488 - DNA, 15 bp, Homo sapiens
tgccccagcctactc

SEQ ID NO: 117489 - DNA, 15 bp, Homo sapiens
ctgccccagcctact

SEQ ID NO: 117490 - DNA, 15 bp, Homo sapiens
cctgccccagcctac

SEQ ID NO: 117491 - DNA, 15 bp, Homo sapiens
ccctgccccagccta

SEQ ID NO: 117492 - DNA, 15 bp, Homo sapiens
tccctgccccagcct

SEQ ID NO: 117493 - DNA, 15 bp, Homo sapiens
ctccctgccccagcc

SEQ ID NO: 117494 - DNA, 15 bp, Homo sapiens
actccctgccccagc

SEQ ID NO: 117495 - DNA, 15 bp, Homo sapiens
cactccctgccccag

SEQ ID NO: 117496 - DNA, 15 bp, Homo sapiens
ccactccctgcccca

SEQ ID NO: 117497 - DNA, 15 bp, Homo sapiens
tccactccctgcccc

SEQ ID NO: 117498 - DNA, 15 bp, Homo sapiens
ttccactccctgccc

SEQ ID NO: 117499 - DNA, 15 bp, Homo sapiens
tttccactccctgcc

SEQ ID NO: 117500 - DNA, 15 bp, Homo sapiens
ttttccactccctgc

SEQ ID NO: 117501 - DNA, 15 bp, Homo sapiens
cttttccactccctg

SEQ ID NO: 117502 - DNA, 15 bp, Homo sapiens
ccttttccactccct

SEQ ID NO: 117503 - DNA, 15 bp, Homo sapiens
cccttttccactccc

SEQ ID NO: 117504 - DNA, 15 bp, Homo sapiens
acccttttccactcc

SEQ ID NO: 117505 - DNA, 15 bp, Homo sapiens
aacccttttccactc

SEQ ID NO: 117506 - DNA, 15 bp, Homo sapiens
aaacccttttccact

SEQ ID NO: 117507 - DNA, 15 bp, Homo sapiens
gaaacccttttccac

SEQ ID NO: 117508 - DNA, 15 bp, Homo sapiens
ggaaacccttttcca

SEQ ID NO: 117509 - DNA, 15 bp, Homo sapiens
aggaaacccttttcc

SEQ ID NO: 117510 - DNA, 15 bp, Homo sapiens
aaggaaacccttttc

SEQ ID NO: 117511 - DNA, 15 bp, Homo sapiens
gaaggaaaccctttt

SEQ ID NO: 117512 - DNA, 15 bp, Homo sapiens
ggaaggaaacccttt

SEQ ID NO: 117513 - DNA, 15 bp, Homo sapiens
gggaaggaaaccctt

SEQ ID NO: 117514 - DNA, 15 bp, Homo sapiens
agggaaggaaaccct

SEQ ID NO: 117515 - DNA, 15 bp, Homo sapiens
gagggaaggaaaccc

SEQ ID NO: 117516 - DNA, 15 bp, Homo sapiens
agagggaaggaaacc

SEQ ID NO: 117517 - DNA, 15 bp, Homo sapiens
aagagggaaggaaac

SEQ ID NO: 117518 - DNA, 15 bp, Homo sapiens
gaagagggaaggaaa

SEQ ID NO: 117519 - DNA, 15 bp, Homo sapiens
agaagagggaaggaa

SEQ ID NO: 117520 - DNA, 15 bp, Homo sapiens
tagaagagggaagga

SEQ ID NO: 117521 - DNA, 15 bp, Homo sapiens
ctagaagagggaagg

SEQ ID NO: 117522 - DNA, 15 bp, Homo sapiens
cctagaagagggaag

SEQ ID NO: 117523 - DNA, 15 bp, Homo sapiens
tcctagaagagggaa

SEQ ID NO: 117524 - DNA, 15 bp, Homo sapiens
ttcctagaagaggga

SEQ ID NO: 117525 - DNA, 15 bp, Homo sapiens
cttcctagaagaggg

SEQ ID NO: 117526 - DNA, 15 bp, Homo sapiens
tcttcctagaagagg

SEQ ID NO: 117527 - DNA, 15 bp, Homo sapiens
ctcttcctagaagag

SEQ ID NO: 117528 - DNA, 15 bp, Homo sapiens
gctcttcctagaaga

SEQ ID NO: 117529 - DNA, 15 bp, Homo sapiens
ggctcttcctagaag

SEQ ID NO: 117530 - DNA, 15 bp, Homo sapiens
aggctcttcctagaa

SEQ ID NO: 117531 - DNA, 15 bp, Homo sapiens
caggctcttcctaga

SEQ ID NO: 117532 - DNA, 15 bp, Homo sapiens
gcaggctcttcctag

SEQ ID NO: 117533 - DNA, 15 bp, Homo sapiens
ggcaggctcttccta

SEQ ID NO: 117534 - DNA, 15 bp, Homo sapiens
gggcaggctcttcct

SEQ ID NO: 117535 - DNA, 15 bp, Homo sapiens
tgggcaggctcttcc

SEQ ID NO: 117536 - DNA, 15 bp, Homo sapiens
ctgggcaggctcttc

SEQ ID NO: 117537 - DNA, 15 bp, Homo sapiens
cctgggcaggctctt

SEQ ID NO: 117538 - DNA, 15 bp, Homo sapiens
ccctgggcaggctct

SEQ ID NO: 117539 - DNA, 15 bp, Homo sapiens
gccctgggcaggctc

SEQ ID NO: 117540 - DNA, 15 bp, Homo sapiens
tgccctgggcaggct

SEQ ID NO: 117541 - DNA, 15 bp, Homo sapiens
ttgccctgggcaggc

SEQ ID NO: 117542 - DNA, 15 bp, Homo sapiens
tttgccctgggcagg

SEQ ID NO: 117543 - DNA, 15 bp, Homo sapiens
ttttgccctgggcag

SEQ ID NO: 117544 - DNA, 15 bp, Homo sapiens
gttttgccctgggca

SEQ ID NO: 117545 - DNA, 15 bp, Homo sapiens
agttttgccctgggc

SEQ ID NO: 117546 - DNA, 15 bp, Homo sapiens
aagttttgccctggg

SEQ ID NO: 117547 - DNA, 15 bp, Homo sapiens
gaagttttgccctgg

SEQ ID NO: 117548 - DNA, 15 bp, Homo sapiens
ggaagttttgccctg

SEQ ID NO: 117549 - DNA, 15 bp, Homo sapiens
tggaagttttgccct

SEQ ID NO: 117550 - DNA, 15 bp, Homo sapiens
ctggaagttttgccc

SEQ ID NO: 117551 - DNA, 15 bp, Homo sapiens
actggaagttttgcc

SEQ ID NO: 117552 - DNA, 15 bp, Homo sapiens
aactggaagttttgc

SEQ ID NO: 117553 - DNA, 15 bp, Homo sapiens
taactggaagttttg

SEQ ID NO: 117554 - DNA, 15 bp, Homo sapiens
ctaactggaagtttt

SEQ ID NO: 117555 - DNA, 15 bp, Homo sapiens
actaactggaagttt

SEQ ID NO: 117556 - DNA, 15 bp, Homo sapiens
cactaactggaagtt

SEQ ID NO: 117557 - DNA, 15 bp, Homo sapiens
gcactaactggaagt

SEQ ID NO: 117558 - DNA, 15 bp, Homo sapiens
tgcactaactggaag

SEQ ID NO: 117559 - DNA, 15 bp, Homo sapiens
ttgcactaactggaa

SEQ ID NO: 117560 - DNA, 15 bp, Homo sapiens
cttgcactaactgga

SEQ ID NO: 117561 - DNA, 15 bp, Homo sapiens
ccttgcactaactgg

SEQ ID NO: 117562 - DNA, 15 bp, Homo sapiens
cccttgcactaactg

SEQ ID NO: 117563 - DNA, 15 bp, Homo sapiens
ccccttgcactaact

SEQ ID NO: 117564 - DNA, 15 bp, Homo sapiens
accccttgcactaac

SEQ ID NO: 117565 - DNA, 15 bp, Homo sapiens
aaccccttgcactaa

SEQ ID NO: 117566 - DNA, 15 bp, Homo sapiens
aaaccccttgcacta

SEQ ID NO: 117567 - DNA, 15 bp, Homo sapiens
aaaaccccttgcact

SEQ ID NO: 117568 - DNA, 15 bp, Homo sapiens
caaaaccccttgcac

SEQ ID NO: 117569 - DNA, 15 bp, Homo sapiens
acaaaaccccttgca

SEQ ID NO: 117570 - DNA, 15 bp, Homo sapiens
cacaaaaccccttgc

SEQ ID NO: 117571 - DNA, 15 bp, Homo sapiens
gcacaaaaccccttg

SEQ ID NO: 117572 - DNA, 15 bp, Homo sapiens
agcacaaaacccctt

SEQ ID NO: 117573 - DNA, 15 bp, Homo sapiens
cagcacaaaacccct

SEQ ID NO: 117574 - DNA, 15 bp, Homo sapiens
gcagcacaaaacccc

SEQ ID NO: 117575 - DNA, 15 bp, Homo sapiens
agcagcacaaaaccc

SEQ ID NO: 117576 - DNA, 15 bp, Homo sapiens
gagcagcacaaaacc

SEQ ID NO: 117577 - DNA, 15 bp, Homo sapiens
agagcagcacaaaac

SEQ ID NO: 117578 - DNA, 15 bp, Homo sapiens
aagagcagcacaaaa

SEQ ID NO: 117579 - DNA, 15 bp, Homo sapiens
gaagagcagcacaaa

SEQ ID NO: 117580 - DNA, 15 bp, Homo sapiens
agaagagcagcacaa

SEQ ID NO: 117581 - DNA, 15 bp, Homo sapiens
cagaagagcagcaca

SEQ ID NO: 117582 - DNA, 15 bp, Homo sapiens
acagaagagcagcac

SEQ ID NO: 117583 - DNA, 15 bp, Homo sapiens
gacagaagagcagca

SEQ ID NO: 117584 - DNA, 15 bp, Homo sapiens
ggacagaagagcagc

SEQ ID NO: 117585 - DNA, 15 bp, Homo sapiens
gggacagaagagcag

SEQ ID NO: 117586 - DNA, 15 bp, Homo sapiens
tgggacagaagagca

SEQ ID NO: 117587 - DNA, 15 bp, Homo sapiens
atgggacagaagagc

SEQ ID NO: 117588 - DNA, 15 bp, Homo sapiens
catgggacagaagag

SEQ ID NO: 117589 - DNA, 15 bp, Homo sapiens
gcatgggacagaaga

SEQ ID NO: 117590 - DNA, 15 bp, Homo sapiens
ggcatgggacagaag

SEQ ID NO: 117591 - DNA, 15 bp, Homo sapiens
gggcatgggacagaa

SEQ ID NO: 117592 - DNA, 15 bp, Homo sapiens
tgggcatgggacaga

SEQ ID NO: 117593 - DNA, 15 bp, Homo sapiens
ttgggcatgggacag

SEQ ID NO: 117594 - DNA, 15 bp, Homo sapiens
gttgggcatgggaca

SEQ ID NO: 117595 - DNA, 15 bp, Homo sapiens
tgttgggcatgggac

SEQ ID NO: 117596 - DNA, 15 bp, Homo sapiens
ttgttgggcatggga

SEQ ID NO: 117597 - DNA, 15 bp, Homo sapiens
gttgttgggcatggg

SEQ ID NO: 117598 - DNA, 15 bp, Homo sapiens
ggttgttgggcatgg

SEQ ID NO: 117599 - DNA, 15 bp, Homo sapiens
aggttgttgggcatg

SEQ ID NO: 117600 - DNA, 15 bp, Homo sapiens
gaggttgttgggcat

SEQ ID NO: 117601 - DNA, 15 bp, Homo sapiens
ggaggttgttgggca

SEQ ID NO: 117602 - DNA, 15 bp, Homo sapiens
aggaggttgttgggc

SEQ ID NO: 117603 - DNA, 15 bp, Homo sapiens
aaggaggttgttggg

SEQ ID NO: 117604 - DNA, 15 bp, Homo sapiens
aaaggaggttgttgg

SEQ ID NO: 117605 - DNA, 15 bp, Homo sapiens
gaaaggaggttgttg

SEQ ID NO: 117606 - DNA, 15 bp, Homo sapiens
ggaaaggaggttgtt

SEQ ID NO: 117607 - DNA, 15 bp, Homo sapiens
gggaaaggaggttgt

SEQ ID NO: 117608 - DNA, 15 bp, Homo sapiens
agggaaaggaggttg

SEQ ID NO: 117609 - DNA, 15 bp, Homo sapiens
gagggaaaggaggtt

SEQ ID NO: 117610 - DNA, 15 bp, Homo sapiens
agagggaaaggaggt

SEQ ID NO: 117611 - DNA, 15 bp, Homo sapiens
aagagggaaaggagg

SEQ ID NO: 117612 - DNA, 15 bp, Homo sapiens
caagagggaaaggag

SEQ ID NO: 117613 - DNA, 15 bp, Homo sapiens
gcaagagggaaagga

SEQ ID NO: 117614 - DNA, 15 bp, Homo sapiens
agcaagagggaaagg

SEQ ID NO: 117615 - DNA, 15 bp, Homo sapiens
tagcaagagggaaag

SEQ ID NO: 117616 - DNA, 15 bp, Homo sapiens
ttagcaagagggaaa

SEQ ID NO: 117617 - DNA, 15 bp, Homo sapiens
attagcaagagggaa

SEQ ID NO: 117618 - DNA, 15 bp, Homo sapiens
cattagcaagaggga

SEQ ID NO: 117619 - DNA, 15 bp, Homo sapiens
ccattagcaagaggg

SEQ ID NO: 117620 - DNA, 15 bp, Homo sapiens
accattagcaagagg

SEQ ID NO: 117621 - DNA, 15 bp, Homo sapiens
gaccattagcaagag

SEQ ID NO: 117622 - DNA, 15 bp, Homo sapiens
agaccattagcaaga

SEQ ID NO: 117623 - DNA, 15 bp, Homo sapiens
gagaccattagcaag

SEQ ID NO: 117624 - DNA, 15 bp, Homo sapiens
ggagaccattagcaa

SEQ ID NO: 117625 - DNA, 15 bp, Homo sapiens
aggagaccattagca

SEQ ID NO: 117626 - DNA, 15 bp, Homo sapiens
gaggagaccattagc

SEQ ID NO: 117627 - DNA, 15 bp, Homo sapiens
ggaggagaccattag

SEQ ID NO: 117628 - DNA, 15 bp, Homo sapiens
gggaggagaccatta

SEQ ID NO: 117629 - DNA, 15 bp, Homo sapiens
ggggaggagaccatt

SEQ ID NO: 117630 - DNA, 15 bp, Homo sapiens
tggggaggagaccat

SEQ ID NO: 117631 - DNA, 15 bp, Homo sapiens
atggggaggagacca

SEQ ID NO: 117632 - DNA, 15 bp, Homo sapiens
aatggggaggagacc

SEQ ID NO: 117633 - DNA, 15 bp, Homo sapiens
gaatggggaggagac

SEQ ID NO: 117634 - DNA, 15 bp, Homo sapiens
ggaatggggaggaga

SEQ ID NO: 117635 - DNA, 15 bp, Homo sapiens
cggaatggggaggag

SEQ ID NO: 117636 - DNA, 15 bp, Homo sapiens
acggaatggggagga

SEQ ID NO: 117637 - DNA, 15 bp, Homo sapiens
cacggaatggggagg

SEQ ID NO: 117638 - DNA, 15 bp, Homo sapiens
gcacggaatggggag

SEQ ID NO: 117639 - DNA, 15 bp, Homo sapiens
agcacggaatgggga

SEQ ID NO: 117640 - DNA, 15 bp, Homo sapiens
cagcacggaatgggg

SEQ ID NO: 117641 - DNA, 15 bp, Homo sapiens
gcagcacggaatggg

SEQ ID NO: 117642 - DNA, 15 bp, Homo sapiens
ggcagcacggaatgg

SEQ ID NO: 117643 - DNA, 15 bp, Homo sapiens
gggcagcacggaatg

SEQ ID NO: 117644 - DNA, 15 bp, Homo sapiens
tgggcagcacggaat

SEQ ID NO: 117645 - DNA, 15 bp, Homo sapiens
gtgggcagcacggaa

SEQ ID NO: 117646 - DNA, 15 bp, Homo sapiens
tgtgggcagcacgga

SEQ ID NO: 117647 - DNA, 15 bp, Homo sapiens
ctgtgggcagcacgg

SEQ ID NO: 117648 - DNA, 15 bp, Homo sapiens
cctgtgggcagcacg

SEQ ID NO: 117649 - DNA, 15 bp, Homo sapiens
gcctgtgggcagcac

SEQ ID NO: 117650 - DNA, 15 bp, Homo sapiens
tgcctgtgggcagca

SEQ ID NO: 117651 - DNA, 15 bp, Homo sapiens
ctgcctgtgggcagc

SEQ ID NO: 117652 - DNA, 15 bp, Homo sapiens
tctgcctgtgggcag

SEQ ID NO: 117653 - DNA, 15 bp, Homo sapiens
ctctgcctgtgggca

SEQ ID NO: 117654 - DNA, 15 bp, Homo sapiens
cctctgcctgtgggc

SEQ ID NO: 117655 - DNA, 15 bp, Homo sapiens
gcctctgcctgtggg

SEQ ID NO: 117656 - DNA, 15 bp, Homo sapiens
ggcctctgcctgtgg

SEQ ID NO: 117657 - DNA, 15 bp, Homo sapiens
cggcctctgcctgtg

SEQ ID NO: 117658 - DNA, 15 bp, Homo sapiens
gcggcctctgcctgt

SEQ ID NO: 117659 - DNA, 15 bp, Homo sapiens
ggcggcctctgcctg

SEQ ID NO: 117660 - DNA, 15 bp, Homo sapiens
gggcggcctctgcct

SEQ ID NO: 117661 - DNA, 15 bp, Homo sapiens
ggggcggcctctgcc

SEQ ID NO: 117662 - DNA, 15 bp, Homo sapiens
aggggcggcctctgc

SEQ ID NO: 117663 - DNA, 15 bp, Homo sapiens
caggggcggcctctg

SEQ ID NO: 117664 - DNA, 15 bp, Homo sapiens
gcaggggcggcctct

SEQ ID NO: 117665 - DNA, 15 bp, Homo sapiens
ggcaggggcggcctc

SEQ ID NO: 117666 - DNA, 15 bp, Homo sapiens
gggcaggggcggcct

SEQ ID NO: 117667 - DNA, 15 bp, Homo sapiens
agggcaggggcggcc

SEQ ID NO: 117668 - DNA, 15 bp, Homo sapiens
gagggcaggggcggc

SEQ ID NO: 117669 - DNA, 15 bp, Homo sapiens
tgagggcaggggcgg

SEQ ID NO: 117670 - DNA, 15 bp, Homo sapiens
gtgagggcaggggcg

SEQ ID NO: 117671 - DNA, 15 bp, Homo sapiens
agtgagggcaggggc

SEQ ID NO: 117672 - DNA, 15 bp, Homo sapiens
cagtgagggcagggg

SEQ ID NO: 117673 - DNA, 15 bp, Homo sapiens
ccagtgagggcaggg

SEQ ID NO: 117674 - DNA, 15 bp, Homo sapiens
accagtgagggcagg

SEQ ID NO: 117675 - DNA, 15 bp, Homo sapiens
caccagtgagggcag

SEQ ID NO: 117676 - DNA, 15 bp, Homo sapiens
ccaccagtgagggca

SEQ ID NO: 117677 - DNA, 15 bp, Homo sapiens
gccaccagtgagggc

SEQ ID NO: 117678 - DNA, 15 bp, Homo sapiens
ggccaccagtgaggg

SEQ ID NO: 117679 - DNA, 15 bp, Homo sapiens
tggccaccagtgagg

SEQ ID NO: 117680 - DNA, 15 bp, Homo sapiens
ctggccaccagtgag

SEQ ID NO: 117681 - DNA, 15 bp, Homo sapiens
gctggccaccagtga

SEQ ID NO: 117682 - DNA, 15 bp, Homo sapiens
tgctggccaccagtg

SEQ ID NO: 117683 - DNA, 15 bp, Homo sapiens
atgctggccaccagt

SEQ ID NO: 117684 - DNA, 15 bp, Homo sapiens
catgctggccaccag

SEQ ID NO: 117685 - DNA, 15 bp, Homo sapiens
acatgctggccacca

SEQ ID NO: 117686 - DNA, 15 bp, Homo sapiens
gacatgctggccacc

SEQ ID NO: 117687 - DNA, 15 bp, Homo sapiens
ggacatgctggccac

SEQ ID NO: 117688 - DNA, 15 bp, Homo sapiens
tggacatgctggcca

SEQ ID NO: 117689 - DNA, 15 bp, Homo sapiens
ttggacatgctggcc

SEQ ID NO: 117690 - DNA, 15 bp, Homo sapiens
cttggacatgctggc

SEQ ID NO: 117691 - DNA, 15 bp, Homo sapiens
acttggacatgctgg

SEQ ID NO: 117692 - DNA, 15 bp, Homo sapiens
tacttggacatgctg

SEQ ID NO: 117693 - DNA, 15 bp, Homo sapiens
gtacttggacatgct

SEQ ID NO: 117694 - DNA, 15 bp, Homo sapiens
agtacttggacatgc

SEQ ID NO: 117695 - DNA, 15 bp, Homo sapiens
cagtacttggacatg

SEQ ID NO: 117696 - DNA, 15 bp, Homo sapiens
ccagtacttggacat

SEQ ID NO: 117697 - DNA, 15 bp, Homo sapiens
cccagtacttggaca

SEQ ID NO: 117698 - DNA, 15 bp, Homo sapiens
ccccagtacttggac

SEQ ID NO: 117699 - DNA, 15 bp, Homo sapiens
gccccagtacttgga

SEQ ID NO: 117700 - DNA, 15 bp, Homo sapiens
ggccccagtacttgg

SEQ ID NO: 117701 - DNA, 15 bp, Homo sapiens
aggccccagtacttg

SEQ ID NO: 117702 - DNA, 15 bp, Homo sapiens
caggccccagtactt

SEQ ID NO: 117703 - DNA, 15 bp, Homo sapiens
gcaggccccagtact

SEQ ID NO: 117704 - DNA, 15 bp, Homo sapiens
agcaggccccagtac

SEQ ID NO: 117705 - DNA, 15 bp, Homo sapiens
cagcaggccccagta

SEQ ID NO: 117706 - DNA, 15 bp, Homo sapiens
gcagcaggccccagt

SEQ ID NO: 117707 - DNA, 15 bp, Homo sapiens
agcagcaggccccag

SEQ ID NO: 117708 - DNA, 15 bp, Homo sapiens
gagcagcaggcccca

SEQ ID NO: 117709 - DNA, 15 bp, Homo sapiens
ggagcagcaggcccc

SEQ ID NO: 117710 - DNA, 15 bp, Homo sapiens
aggagcagcaggccc

SEQ ID NO: 117711 - DNA, 15 bp, Homo sapiens
aaggagcagcaggcc

SEQ ID NO: 117712 - DNA, 15 bp, Homo sapiens
caaggagcagcaggc

SEQ ID NO: 117713 - DNA, 15 bp, Homo sapiens
acaaggagcagcagg

SEQ ID NO: 117714 - DNA, 15 bp, Homo sapiens
cacaaggagcagcag

SEQ ID NO: 117715 - DNA, 15 bp, Homo sapiens
ccacaaggagcagca

SEQ ID NO: 117716 - DNA, 15 bp, Homo sapiens
cccacaaggagcagc

SEQ ID NO: 117717 - DNA, 15 bp, Homo sapiens
tcccacaaggagcag

SEQ ID NO: 117718 - DNA, 15 bp, Homo sapiens
gtcccacaaggagca

SEQ ID NO: 117719 - DNA, 15 bp, Homo sapiens
ggtcccacaaggagc

SEQ ID NO: 117720 - DNA, 15 bp, Homo sapiens
gggtcccacaaggag

SEQ ID NO: 117721 - DNA, 15 bp, Homo sapiens
agggtcccacaagga

SEQ ID NO: 117722 - DNA, 15 bp, Homo sapiens
cagggtcccacaagg

SEQ ID NO: 117723 - DNA, 15 bp, Homo sapiens
acagggtcccacaag

SEQ ID NO: 117724 - DNA, 15 bp, Homo sapiens
cacagggtcccacaa

SEQ ID NO: 117725 - DNA, 15 bp, Homo sapiens
ccacagggtcccaca

SEQ ID NO: 117726 - DNA, 15 bp, Homo sapiens
tccacagggtcccac

SEQ ID NO: 117727 - DNA, 15 bp, Homo sapiens
gtccacagggtccca

SEQ ID NO: 117728 - DNA, 15 bp, Homo sapiens
ggtccacagggtccc

SEQ ID NO: 117729 - DNA, 15 bp, Homo sapiens
cggtccacagggtcc

SEQ ID NO: 117730 - DNA, 15 bp, Homo sapiens
acggtccacagggtc

SEQ ID NO: 117731 - DNA, 15 bp, Homo sapiens
aacggtccacagggt

SEQ ID NO: 117732 - DNA, 15 bp, Homo sapiens
caacggtccacaggg

SEQ ID NO: 117733 - DNA, 15 bp, Homo sapiens
ccaacggtccacagg

SEQ ID NO: 117734 - DNA, 15 bp, Homo sapiens
cccaacggtccacag

SEQ ID NO: 117735 - DNA, 15 bp, Homo sapiens
acccaacggtccaca

SEQ ID NO: 117736 - DNA, 15 bp, Homo sapiens
tacccaacggtccac

SEQ ID NO: 117737 - DNA, 15 bp, Homo sapiens
ctacccaacggtcca

SEQ ID NO: 117738 - DNA, 15 bp, Homo sapiens
gctacccaacggtcc

SEQ ID NO: 117739 - DNA, 15 bp, Homo sapiens
tgctacccaacggtc

SEQ ID NO: 117740 - DNA, 15 bp, Homo sapiens
ttgctacccaacggt

SEQ ID NO: 117741 - DNA, 15 bp, Homo sapiens
tttgctacccaacgg

SEQ ID NO: 117742 - DNA, 15 bp, Homo sapiens
atttgctacccaacg

SEQ ID NO: 117743 - DNA, 15 bp, Homo sapiens
gatttgctacccaac

SEQ ID NO: 117744 - DNA, 15 bp, Homo sapiens
agatttgctacccaa

SEQ ID NO: 117745 - DNA, 15 bp, Homo sapiens
aagatttgctaccca

SEQ ID NO: 117746 - DNA, 15 bp, Homo sapiens
taagatttgctaccc

SEQ ID NO: 117747 - DNA, 15 bp, Homo sapiens
ataagatttgctacc

SEQ ID NO: 117748 - DNA, 15 bp, Homo sapiens
gataagatttgctac

SEQ ID NO: 117749 - DNA, 15 bp, Homo sapiens
tgataagatttgcta

SEQ ID NO: 117750 - DNA, 15 bp, Homo sapiens
ttgataagatttgct

SEQ ID NO: 117751 - DNA, 15 bp, Homo sapiens
tttgataagatttgc

SEQ ID NO: 117752 - DNA, 15 bp, Homo sapiens
ctttgataagatttg

SEQ ID NO: 117753 - DNA, 15 bp, Homo sapiens
actttgataagattt

SEQ ID NO: 117754 - DNA, 15 bp, Homo sapiens
tactttgataagatt

SEQ ID NO: 117755 - DNA, 15 bp, Homo sapiens
ctactttgataagat

SEQ ID NO: 117756 - DNA, 15 bp, Homo sapiens
cctactttgataaga

SEQ ID NO: 117757 - DNA, 15 bp, Homo sapiens
tcctactttgataag

SEQ ID NO: 117758 - DNA, 15 bp, Homo sapiens
ttcctactttgataa

SEQ ID NO: 117759 - DNA, 15 bp, Homo sapiens
attcctactttgata

SEQ ID NO: 117760 - DNA, 15 bp, Homo sapiens
cattcctactttgat

SEQ ID NO: 117761 - DNA, 15 bp, Homo sapiens
gcattcctactttga

SEQ ID NO: 117762 - DNA, 15 bp, Homo sapiens
agcattcctactttg

SEQ ID NO: 117763 - DNA, 15 bp, Homo sapiens
aagcattcctacttt

SEQ ID NO: 117764 - DNA, 15 bp, Homo sapiens
taagcattcctactt

SEQ ID NO: 117765 - DNA, 15 bp, Homo sapiens
gtaagcattcctact

SEQ ID NO: 117766 - DNA, 15 bp, Homo sapiens
agtaagcattcctac

SEQ ID NO: 117767 - DNA, 15 bp, Homo sapiens
cagtaagcattccta

SEQ ID NO: 117768 - DNA, 15 bp, Homo sapiens
ccagtaagcattcct

SEQ ID NO: 117769 - DNA, 15 bp, Homo sapiens
gccagtaagcattcc

SEQ ID NO: 117770 - DNA, 15 bp, Homo sapiens
tgccagtaagcattc

SEQ ID NO: 117771 - DNA, 15 bp, Homo sapiens
atgccagtaagcatt

SEQ ID NO: 117772 - DNA, 15 bp, Homo sapiens
tatgccagtaagcat

SEQ ID NO: 117773 - DNA, 15 bp, Homo sapiens
ttatgccagtaagca

SEQ ID NO: 117774 - DNA, 15 bp, Homo sapiens
tttatgccagtaagc

SEQ ID NO: 117775 - DNA, 15 bp, Homo sapiens
ttttatgccagtaag

SEQ ID NO: 117776 - DNA, 15 bp, Homo sapiens
gttttatgccagtaa

SEQ ID NO: 117777 - DNA, 15 bp, Homo sapiens
tgttttatgccagta

SEQ ID NO: 117778 - DNA, 15 bp, Homo sapiens
atgttttatgccagt

SEQ ID NO: 117779 - DNA, 15 bp, Homo sapiens
aatgttttatgccag

SEQ ID NO: 117780 - DNA, 15 bp, Homo sapiens
gaatgttttatgcca

SEQ ID NO: 117781 - DNA, 15 bp, Homo sapiens
ggaatgttttatgcc

SEQ ID NO: 117782 - DNA, 15 bp, Homo sapiens
aggaatgttttatgc

SEQ ID NO: 117783 - DNA, 15 bp, Homo sapiens
taggaatgttttatg

SEQ ID NO: 117784 - DNA, 15 bp, Homo sapiens
ctaggaatgttttat

SEQ ID NO: 117785 - DNA, 15 bp, Homo sapiens
tctaggaatgtttta

SEQ ID NO: 117786 - DNA, 15 bp, Homo sapiens
ttctaggaatgtttt

SEQ ID NO: 117787 - DNA, 15 bp, Homo sapiens
gttctaggaatgttt

SEQ ID NO: 117788 - DNA, 15 bp, Homo sapiens
ggttctaggaatgtt

SEQ ID NO: 117789 - DNA, 15 bp, Homo sapiens
tggttctaggaatgt

SEQ ID NO: 117790 - DNA, 15 bp, Homo sapiens
gtggttctaggaatg

SEQ ID NO: 117791 - DNA, 15 bp, Homo sapiens
ggtggttctaggaat

SEQ ID NO: 117792 - DNA, 15 bp, Homo sapiens
tggtggttctaggaa

SEQ ID NO: 117793 - DNA, 15 bp, Homo sapiens
gtggtggttctagga

SEQ ID NO: 117794 - DNA, 15 bp, Homo sapiens
agtggtggttctagg

SEQ ID NO: 117795 - DNA, 15 bp, Homo sapiens
gagtggtggttctag

SEQ ID NO: 117796 - DNA, 15 bp, Homo sapiens
tgagtggtggttcta

SEQ ID NO: 117797 - DNA, 15 bp, Homo sapiens
atgagtggtggttct

SEQ ID NO: 117798 - DNA, 15 bp, Homo sapiens
tatgagtggtggttc

SEQ ID NO: 117799 - DNA, 15 bp, Homo sapiens
ctatgagtggtggtt

SEQ ID NO: 117800 - DNA, 15 bp, Homo sapiens
cctatgagtggtggt

SEQ ID NO: 117801 - DNA, 15 bp, Homo sapiens
acctatgagtggtgg

SEQ ID NO: 117802 - DNA, 15 bp, Homo sapiens
cacctatgagtggtg

SEQ ID NO: 117803 - DNA, 15 bp, Homo sapiens
acacctatgagtggt

SEQ ID NO: 117804 - DNA, 15 bp, Homo sapiens
gacacctatgagtgg

SEQ ID NO: 117805 - DNA, 15 bp, Homo sapiens
tgacacctatgagtg

SEQ ID NO: 117806 - DNA, 15 bp, Homo sapiens
ttgacacctatgagt

SEQ ID NO: 117807 - DNA, 15 bp, Homo sapiens
attgacacctatgag

SEQ ID NO: 117808 - DNA, 15 bp, Homo sapiens
tattgacacctatga

SEQ ID NO: 117809 - DNA, 15 bp, Homo sapiens
ttattgacacctatg

SEQ ID NO: 117810 - DNA, 15 bp, Homo sapiens
tttattgacacctat

SEQ ID NO: 117811 - DNA, 15 bp, Homo sapiens
ttttattgacaccta

SEQ ID NO: 117812 - DNA, 15 bp, Homo sapiens
gttttattgacacct

SEQ ID NO: 117813 - DNA, 15 bp, Homo sapiens
cgttttattgacacc

SEQ ID NO: 117814 - DNA, 15 bp, Homo sapiens
tcgttttattgacac

SEQ ID NO: 117815 - DNA, 15 bp, Homo sapiens
atcgttttattgaca

SEQ ID NO: 117816 - DNA, 15 bp, Homo sapiens
catcgttttattgac

SEQ ID NO: 117817 - DNA, 15 bp, Homo sapiens
tcatcgttttattga

SEQ ID NO: 117818 - DNA, 15 bp, Homo sapiens
ctcatcgttttattg

SEQ ID NO: 117819 - DNA, 15 bp, Homo sapiens
gctcatcgttttatt

SEQ ID NO: 117820 - DNA, 15 bp, Homo sapiens
agctcatcgttttat

SEQ ID NO: 117821 - DNA, 15 bp, Homo sapiens
cagctcatcgtttta

SEQ ID NO: 117822 - DNA, 15 bp, Homo sapiens
gcagctcatcgtttt

SEQ ID NO: 117823 - DNA, 15 bp, Homo sapiens
agcagctcatcgttt

SEQ ID NO: 117824 - DNA, 15 bp, Homo sapiens
gagcagctcatcgtt

SEQ ID NO: 117825 - DNA, 15 bp, Homo sapiens
tgagcagctcatcgt

SEQ ID NO: 117826 - DNA, 15 bp, Homo sapiens
ctgagcagctcatcg

SEQ ID NO: 117827 - DNA, 15 bp, Homo sapiens
gctgagcagctcatc

SEQ ID NO: 117828 - DNA, 15 bp, Homo sapiens
agctgagcagctcat

SEQ ID NO: 117829 - DNA, 15 bp, Homo sapiens
tagctgagcagctca

SEQ ID NO: 117830 - DNA, 15 bp, Homo sapiens
ttagctgagcagctc

SEQ ID NO: 117831 - DNA, 15 bp, Homo sapiens
cttagctgagcagct

SEQ ID NO: 117832 - DNA, 15 bp, Homo sapiens
gcttagctgagcagc

SEQ ID NO: 117833 - DNA, 15 bp, Homo sapiens
ggcttagctgagcag

SEQ ID NO: 117834 - DNA, 15 bp, Homo sapiens
gggcttagctgagca

SEQ ID NO: 117835 - DNA, 15 bp, Homo sapiens
cgggcttagctgagc

SEQ ID NO: 117836 - DNA, 15 bp, Homo sapiens
tcgggcttagctgag

SEQ ID NO: 117837 - DNA, 15 bp, Homo sapiens
ctcgggcttagctga

SEQ ID NO: 117838 - DNA, 15 bp, Homo sapiens
actcgggcttagctg

SEQ ID NO: 117839 - DNA, 15 bp, Homo sapiens
aactcgggcttagct

SEQ ID NO: 117840 - DNA, 15 bp, Homo sapiens
caactcgggcttagc

SEQ ID NO: 117841 - DNA, 15 bp, Homo sapiens
gcaactcgggcttag

SEQ ID NO: 117842 - DNA, 15 bp, Homo sapiens
agcaactcgggctta

SEQ ID NO: 117843 - DNA, 15 bp, Homo sapiens
cagcaactcgggctt

SEQ ID NO: 117844 - DNA, 15 bp, Homo sapiens
gcagcaactcgggct

SEQ ID NO: 117845 - DNA, 15 bp, Homo sapiens
agcagcaactcgggc

SEQ ID NO: 117846 - DNA, 15 bp, Homo sapiens
aagcagcaactcggg

SEQ ID NO: 117847 - DNA, 15 bp, Homo sapiens
gaagcagcaactcgg

SEQ ID NO: 117848 - DNA, 15 bp, Homo sapiens
agaagcagcaactcg

SEQ ID NO: 117849 - DNA, 15 bp, Homo sapiens
cagaagcagcaactc

SEQ ID NO: 117850 - DNA, 15 bp, Homo sapiens
tcagaagcagcaact

SEQ ID NO: 117851 - DNA, 15 bp, Homo sapiens
ctcagaagcagcaac

SEQ ID NO: 117852 - DNA, 15 bp, Homo sapiens
actcagaagcagcaa

SEQ ID NO: 117853 - DNA, 15 bp, Homo sapiens
aactcagaagcagca

SEQ ID NO: 117854 - DNA, 15 bp, Homo sapiens
aaactcagaagcagc

SEQ ID NO: 117855 - DNA, 15 bp, Homo sapiens
aaaactcagaagcag

SEQ ID NO: 117856 - DNA, 15 bp, Homo sapiens
caaaactcagaagca

SEQ ID NO: 117857 - DNA, 15 bp, Homo sapiens
acaaaactcagaagc

SEQ ID NO: 117858 - DNA, 15 bp, Homo sapiens
gacaaaactcagaag

SEQ ID NO: 117859 - DNA, 15 bp, Homo sapiens
tgacaaaactcagaa

SEQ ID NO: 117860 - DNA, 15 bp, Homo sapiens
gtgacaaaactcaga

SEQ ID NO: 117861 - DNA, 15 bp, Homo sapiens
ggtgacaaaactcag

SEQ ID NO: 117862 - DNA, 15 bp, Homo sapiens
cggtgacaaaactca

SEQ ID NO: 117863 - DNA, 15 bp, Homo sapiens
tcggtgacaaaactc

SEQ ID NO: 117864 - DNA, 15 bp, Homo sapiens
ttcggtgacaaaact

SEQ ID NO: 117865 - DNA, 15 bp, Homo sapiens
cttcggtgacaaaac

SEQ ID NO: 117866 - DNA, 15 bp, Homo sapiens
tcttcggtgacaaaa

SEQ ID NO: 117867 - DNA, 15 bp, Homo sapiens
atcttcggtgacaaa

SEQ ID NO: 117868 - DNA, 15 bp, Homo sapiens
aatcttcggtgacaa

SEQ ID NO: 117869 - DNA, 15 bp, Homo sapiens
caatcttcggtgaca

SEQ ID NO: 117870 - DNA, 15 bp, Homo sapiens
tcaatcttcggtgac

SEQ ID NO: 117871 - DNA, 15 bp, Homo sapiens
atcaatcttcggtga

SEQ ID NO: 117872 - DNA, 15 bp, Homo sapiens
aatcaatcttcggtg

SEQ ID NO: 117873 - DNA, 15 bp, Homo sapiens
caatcaatcttcggt

SEQ ID NO: 117874 - DNA, 15 bp, Homo sapiens
ccaatcaatcttcgg

SEQ ID NO: 117875 - DNA, 15 bp, Homo sapiens
gccaatcaatcttcg

SEQ ID NO: 117876 - DNA, 15 bp, Homo sapiens
ggccaatcaatcttc

SEQ ID NO: 117877 - DNA, 15 bp, Homo sapiens
tggccaatcaatctt

SEQ ID NO: 117878 - DNA, 15 bp, Homo sapiens
ttggccaatcaatct

SEQ ID NO: 117879 - DNA, 15 bp, Homo sapiens
cttggccaatcaatc

SEQ ID NO: 117880 - DNA, 15 bp, Homo sapiens
acttggccaatcaat

SEQ ID NO: 117881 - DNA, 15 bp, Homo sapiens
aacttggccaatcaa

SEQ ID NO: 117882 - DNA, 15 bp, Homo sapiens
gaacttggccaatca

SEQ ID NO: 117883 - DNA, 15 bp, Homo sapiens
ggaacttggccaatc

SEQ ID NO: 117884 - DNA, 15 bp, Homo sapiens
aggaacttggccaat

SEQ ID NO: 117885 - DNA, 15 bp, Homo sapiens
aaggaacttggccaa

SEQ ID NO: 117886 - DNA, 15 bp, Homo sapiens
aaaggaacttggcca

SEQ ID NO: 117887 - DNA, 15 bp, Homo sapiens
aaaaggaacttggcc

SEQ ID NO: 117888 - DNA, 15 bp, Homo sapiens
gaaaaggaacttggc

SEQ ID NO: 117889 - DNA, 15 bp, Homo sapiens
tgaaaaggaacttgg

SEQ ID NO: 117890 - DNA, 15 bp, Homo sapiens
gtgaaaaggaacttg

SEQ ID NO: 117891 - DNA, 15 bp, Homo sapiens
agtgaaaaggaactt

SEQ ID NO: 117892 - DNA, 15 bp, Homo sapiens
aagtgaaaaggaact

SEQ ID NO: 117893 - DNA, 15 bp, Homo sapiens
taagtgaaaaggaac

SEQ ID NO: 117894 - DNA, 15 bp, Homo sapiens
ctaagtgaaaaggaa

SEQ ID NO: 117895 - DNA, 15 bp, Homo sapiens
actaagtgaaaagga

SEQ ID NO: 117896 - DNA, 15 bp, Homo sapiens
cactaagtgaaaagg

SEQ ID NO: 117897 - DNA, 15 bp, Homo sapiens
ccactaagtgaaaag

SEQ ID NO: 117898 - DNA, 15 bp, Homo sapiens
tccactaagtgaaaa

SEQ ID NO: 117899 - DNA, 15 bp, Homo sapiens
ttccactaagtgaaa

SEQ ID NO: 117900 - DNA, 15 bp, Homo sapiens
cttccactaagtgaa

SEQ ID NO: 117901 - DNA, 15 bp, Homo sapiens
tcttccactaagtga

SEQ ID NO: 117902 - DNA, 15 bp, Homo sapiens
ctcttccactaagtg

SEQ ID NO: 117903 - DNA, 15 bp, Homo sapiens
gctcttccactaagt

SEQ ID NO: 117904 - DNA, 15 bp, Homo sapiens
tgctcttccactaag

SEQ ID NO: 117905 - DNA, 15 bp, Homo sapiens
ctgctcttccactaa

SEQ ID NO: 117906 - DNA, 15 bp, Homo sapiens
actgctcttccacta

SEQ ID NO: 117907 - DNA, 15 bp, Homo sapiens
aactgctcttccact

SEQ ID NO: 117908 - DNA, 15 bp, Homo sapiens
caactgctcttccac

SEQ ID NO: 117909 - DNA, 15 bp, Homo sapiens
gcaactgctcttcca

SEQ ID NO: 117910 - DNA, 15 bp, Homo sapiens
tgcaactgctcttcc

SEQ ID NO: 117911 - DNA, 15 bp, Homo sapiens
ctgcaactgctcttc

SEQ ID NO: 117912 - DNA, 15 bp, Homo sapiens
tctgcaactgctctt

SEQ ID NO: 117913 - DNA, 15 bp, Homo sapiens
gtctgcaactgctct

SEQ ID NO: 117914 - DNA, 15 bp, Homo sapiens
tgtctgcaactgctc

SEQ ID NO: 117915 - DNA, 15 bp, Homo sapiens
atgtctgcaactgct

SEQ ID NO: 117916 - DNA, 15 bp, Homo sapiens
catgtctgcaactgc

SEQ ID NO: 117917 - DNA, 15 bp, Homo sapiens
tcatgtctgcaactg

SEQ ID NO: 117918 - DNA, 15 bp, Homo sapiens
ttcatgtctgcaact

SEQ ID NO: 117919 - DNA, 15 bp, Homo sapiens
tttcatgtctgcaac

SEQ ID NO: 117920 - DNA, 15 bp, Homo sapiens
ctttcatgtctgcaa

SEQ ID NO: 117921 - DNA, 15 bp, Homo sapiens
cctttcatgtctgca

SEQ ID NO: 117922 - DNA, 15 bp, Homo sapiens
acctttcatgtctgc

SEQ ID NO: 117923 - DNA, 15 bp, Homo sapiens
aacctttcatgtctg

SEQ ID NO: 117924 - DNA, 15 bp, Homo sapiens
aaacctttcatgtct

SEQ ID NO: 117925 - DNA, 15 bp, Homo sapiens
aaaacctttcatgtc

SEQ ID NO: 117926 - DNA, 15 bp, Homo sapiens
gaaaacctttcatgt

SEQ ID NO: 117927 - DNA, 15 bp, Homo sapiens
tgaaaacctttcatg

SEQ ID NO: 117928 - DNA, 15 bp, Homo sapiens
ttgaaaacctttcat

SEQ ID NO: 117929 - DNA, 15 bp, Homo sapiens
cttgaaaacctttca

SEQ ID NO: 117930 - DNA, 15 bp, Homo sapiens
tcttgaaaacctttc

SEQ ID NO: 117931 - DNA, 15 bp, Homo sapiens
ttcttgaaaaccttt

SEQ ID NO: 117932 - DNA, 15 bp, Homo sapiens
cttcttgaaaacctt

SEQ ID NO: 117933 - DNA, 15 bp, Homo sapiens
gcttcttgaaaacct

SEQ ID NO: 117934 - DNA, 15 bp, Homo sapiens
ggcttcttgaaaacc

SEQ ID NO: 117935 - DNA, 15 bp, Homo sapiens
aggcttcttgaaaac

SEQ ID NO: 117936 - DNA, 15 bp, Homo sapiens
aaggcttcttgaaaa

SEQ ID NO: 117937 - DNA, 15 bp, Homo sapiens
aaaggcttcttgaaa

SEQ ID NO: 117938 - DNA, 15 bp, Homo sapiens
gaaaggcttcttgaa

SEQ ID NO: 117939 - DNA, 15 bp, Homo sapiens
agaaaggcttcttga

SEQ ID NO: 117940 - DNA, 15 bp, Homo sapiens
cagaaaggcttcttg

SEQ ID NO: 117941 - DNA, 15 bp, Homo sapiens
acagaaaggcttctt

SEQ ID NO: 117942 - DNA, 15 bp, Homo sapiens
gacagaaaggcttct

SEQ ID NO: 117943 - DNA, 15 bp, Homo sapiens
tgacagaaaggcttc

SEQ ID NO: 117944 - DNA, 15 bp, Homo sapiens
ttgacagaaaggctt

SEQ ID NO: 117945 - DNA, 15 bp, Homo sapiens
tttgacagaaaggct

SEQ ID NO: 117946 - DNA, 15 bp, Homo sapiens
ttttgacagaaaggc

SEQ ID NO: 117947 - DNA, 15 bp, Homo sapiens
gttttgacagaaagg

SEQ ID NO: 117948 - DNA, 15 bp, Homo sapiens
tgttttgacagaaag

SEQ ID NO: 117949 - DNA, 15 bp, Homo sapiens
ctgttttgacagaaa

SEQ ID NO: 117950 - DNA, 15 bp, Homo sapiens
tctgttttgacagaa

SEQ ID NO: 117951 - DNA, 15 bp, Homo sapiens
ctctgttttgacaga

SEQ ID NO: 117952 - DNA, 15 bp, Homo sapiens
gctctgttttgacag

SEQ ID NO: 117953 - DNA, 15 bp, Homo sapiens
tgctctgttttgaca

SEQ ID NO: 117954 - DNA, 15 bp, Homo sapiens
gtgctctgttttgac

SEQ ID NO: 117955 - DNA, 15 bp, Homo sapiens
ggtgctctgttttga

SEQ ID NO: 117956 - DNA, 15 bp, Homo sapiens
aggtgctctgttttg

SEQ ID NO: 117957 - DNA, 15 bp, Homo sapiens
caggtgctctgtttt

SEQ ID NO: 117958 - DNA, 15 bp, Homo sapiens
ccaggtgctctgttt

SEQ ID NO: 117959 - DNA, 15 bp, Homo sapiens
tccaggtgctctgtt

SEQ ID NO: 117960 - DNA, 15 bp, Homo sapiens
atccaggtgctctgt

SEQ ID NO: 117961 - DNA, 15 bp, Homo sapiens
aatccaggtgctctg

SEQ ID NO: 117962 - DNA, 15 bp, Homo sapiens
gaatccaggtgctct

SEQ ID NO: 117963 - DNA, 15 bp, Homo sapiens
tgaatccaggtgctc

SEQ ID NO: 117964 - DNA, 15 bp, Homo sapiens
atgaatccaggtgct

SEQ ID NO: 117965 - DNA, 15 bp, Homo sapiens
gatgaatccaggtgc

SEQ ID NO: 117966 - DNA, 15 bp, Homo sapiens
tgatgaatccaggtg

SEQ ID NO: 117967 - DNA, 15 bp, Homo sapiens
atgatgaatccaggt

SEQ ID NO: 117968 - DNA, 15 bp, Homo sapiens
gatgatgaatccagg

SEQ ID NO: 117969 - DNA, 15 bp, Homo sapiens
tgatgatgaatccag

SEQ ID NO: 117970 - DNA, 15 bp, Homo sapiens
gtgatgatgaatcca

SEQ ID NO: 117971 - DNA, 15 bp, Homo sapiens
tgtgatgatgaatcc

SEQ ID NO: 117972 - DNA, 15 bp, Homo sapiens
ctgtgatgatgaatc

SEQ ID NO: 117973 - DNA, 15 bp, Homo sapiens
cctgtgatgatgaat

SEQ ID NO: 117974 - DNA, 15 bp, Homo sapiens
gcctgtgatgatgaa

SEQ ID NO: 117975 - DNA, 15 bp, Homo sapiens
tgcctgtgatgatga

SEQ ID NO: 117976 - DNA, 15 bp, Homo sapiens
atgcctgtgatgatg

SEQ ID NO: 117977 - DNA, 15 bp, Homo sapiens
catgcctgtgatgat

SEQ ID NO: 117978 - DNA, 15 bp, Homo sapiens
ccatgcctgtgatga

SEQ ID NO: 117979 - DNA, 15 bp, Homo sapiens
cccatgcctgtgatg

SEQ ID NO: 117980 - DNA, 15 bp, Homo sapiens
acccatgcctgtgat

SEQ ID NO: 117981 - DNA, 15 bp, Homo sapiens
gacccatgcctgtga

SEQ ID NO: 117982 - DNA, 15 bp, Homo sapiens
ggacccatgcctgtg

SEQ ID NO: 117983 - DNA, 15 bp, Homo sapiens
aggacccatgcctgt

SEQ ID NO: 117984 - DNA, 15 bp, Homo sapiens
gaggacccatgcctg

SEQ ID NO: 117985 - DNA, 15 bp, Homo sapiens
ggaggacccatgcct

SEQ ID NO: 117986 - DNA, 15 bp, Homo sapiens
aggaggacccatgcc

SEQ ID NO: 117987 - DNA, 15 bp, Homo sapiens
caggaggacccatgc

SEQ ID NO: 117988 - DNA, 15 bp, Homo sapiens
gcaggaggacccatg

SEQ ID NO: 117989 - DNA, 15 bp, Homo sapiens
agcaggaggacccat

SEQ ID NO: 117990 - DNA, 15 bp, Homo sapiens
cagcaggaggaccca

SEQ ID NO: 117991 - DNA, 15 bp, Homo sapiens
tcagcaggaggaccc

SEQ ID NO: 117992 - DNA, 15 bp, Homo sapiens
atcagcaggaggacc

SEQ ID NO: 117993 - DNA, 15 bp, Homo sapiens
catcagcaggaggac

SEQ ID NO: 117994 - DNA, 15 bp, Homo sapiens
ccatcagcaggagga

SEQ ID NO: 117995 - DNA, 15 bp, Homo sapiens
tccatcagcaggagg

SEQ ID NO: 117996 - DNA, 15 bp, Homo sapiens
ctccatcagcaggag

SEQ ID NO: 117997 - DNA, 15 bp, Homo sapiens
tctccatcagcagga

SEQ ID NO: 117998 - DNA, 15 bp, Homo sapiens
ctctccatcagcagg

SEQ ID NO: 117999 - DNA, 15 bp, Homo sapiens
tctctccatcagcag

SEQ ID NO: 118000 - DNA, 15 bp, Homo sapiens
ttctctccatcagca

SEQ ID NO: 118001 - DNA, 15 bp, Homo sapiens
cttctctccatcagc

SEQ ID NO: 118002 - DNA, 15 bp, Homo sapiens
tcttctctccatcag

SEQ ID NO: 118003 - DNA, 15 bp, Homo sapiens
ttcttctctccatca

SEQ ID NO: 118004 - DNA, 15 bp, Homo sapiens
cttcttctctccatc

SEQ ID NO: 118005 - DNA, 15 bp, Homo sapiens
tcttcttctctccat

SEQ ID NO: 118006 - DNA, 15 bp, Homo sapiens
ttcttcttctctcca

SEQ ID NO: 118007 - DNA, 15 bp, Homo sapiens
cttcttcttctctcc

SEQ ID NO: 118008 - DNA, 15 bp, Homo sapiens
acttcttcttctctc

SEQ ID NO: 118009 - DNA, 15 bp, Homo sapiens
gacttcttcttctct

SEQ ID NO: 118010 - DNA, 15 bp, Homo sapiens
agacttcttcttctc

SEQ ID NO: 118011 - DNA, 15 bp, Homo sapiens
gagacttcttcttct

SEQ ID NO: 118012 - DNA, 15 bp, Homo sapiens
tgagacttcttcttc

SEQ ID NO: 118013 - DNA, 15 bp, Homo sapiens
ttgagacttcttctt

SEQ ID NO: 118014 - DNA, 15 bp, Homo sapiens
cttgagacttcttct

SEQ ID NO: 118015 - DNA, 15 bp, Homo sapiens
tcttgagacttcttc

SEQ ID NO: 118016 - DNA, 15 bp, Homo sapiens
ctcttgagacttctt

SEQ ID NO: 118017 - DNA, 15 bp, Homo sapiens
tctcttgagacttct

SEQ ID NO: 118018 - DNA, 15 bp, Homo sapiens
atctcttgagacttc

SEQ ID NO: 118019 - DNA, 15 bp, Homo sapiens
gatctcttgagactt

SEQ ID NO: 118020 - DNA, 15 bp, Homo sapiens
tgatctcttgagact

SEQ ID NO: 118021 - DNA, 15 bp, Homo sapiens
ttgatctcttgagac

SEQ ID NO: 118022 - DNA, 15 bp, Homo sapiens
cttgatctcttgaga

SEQ ID NO: 118023 - DNA, 15 bp, Homo sapiens
ccttgatctcttgag

SEQ ID NO: 118024 - DNA, 15 bp, Homo sapiens
cccttgatctcttga

SEQ ID NO: 118025 - DNA, 15 bp, Homo sapiens
ccccttgatctcttg

SEQ ID NO: 118026 - DNA, 15 bp, Homo sapiens
tccccttgatctctt

SEQ ID NO: 118027 - DNA, 15 bp, Homo sapiens
ttccccttgatctct

SEQ ID NO: 118028 - DNA, 15 bp, Homo sapiens
cttccccttgatctc

SEQ ID NO: 118029 - DNA, 15 bp, Homo sapiens
acttccccttgatct

SEQ ID NO: 118030 - DNA, 15 bp, Homo sapiens
cacttccccttgatc

SEQ ID NO: 118031 - DNA, 15 bp, Homo sapiens
acacttccccttgat

SEQ ID NO: 118032 - DNA, 15 bp, Homo sapiens
cacacttccccttga

SEQ ID NO: 118033 - DNA, 15 bp, Homo sapiens
tcacacttccccttg

SEQ ID NO: 118034 - DNA, 15 bp, Homo sapiens
ctcacacttcccctt

SEQ ID NO: 118035 - DNA, 15 bp, Homo sapiens
actcacacttcccct

SEQ ID NO: 118036 - DNA, 15 bp, Homo sapiens
tactcacacttcccc

SEQ ID NO: 118037 - DNA, 15 bp, Homo sapiens
gtactcacacttccc

SEQ ID NO: 118038 - DNA, 15 bp, Homo sapiens
ggtactcacacttcc

SEQ ID NO: 118039 - DNA, 15 bp, Homo sapiens
aggtactcacacttc

SEQ ID NO: 118040 - DNA, 15 bp, Homo sapiens
caggtactcacactt

SEQ ID NO: 118041 - DNA, 15 bp, Homo sapiens
tcaggtactcacact

SEQ ID NO: 118042 - DNA, 15 bp, Homo sapiens
gtcaggtactcacac

SEQ ID NO: 118043 - DNA, 15 bp, Homo sapiens
agtcaggtactcaca

SEQ ID NO: 118044 - DNA, 15 bp, Homo sapiens
gagtcaggtactcac

SEQ ID NO: 118045 - DNA, 15 bp, Homo sapiens
ggagtcaggtactca

SEQ ID NO: 118046 - DNA, 15 bp, Homo sapiens
aggagtcaggtactc

SEQ ID NO: 118047 - DNA, 15 bp, Homo sapiens
gaggagtcaggtact

SEQ ID NO: 118048 - DNA, 15 bp, Homo sapiens
tgaggagtcaggtac

SEQ ID NO: 118049 - DNA, 15 bp, Homo sapiens
gtgaggagtcaggta

SEQ ID NO: 118050 - DNA, 15 bp, Homo sapiens
ggtgaggagtcaggt

SEQ ID NO: 118051 - DNA, 15 bp, Homo sapiens
gggtgaggagtcagg

SEQ ID NO: 118052 - DNA, 15 bp, Homo sapiens
agggtgaggagtcag

SEQ ID NO: 118053 - DNA, 15 bp, Homo sapiens
gagggtgaggagtca

SEQ ID NO: 118054 - DNA, 15 bp, Homo sapiens
ggagggtgaggagtc

SEQ ID NO: 118055 - DNA, 15 bp, Homo sapiens
gggagggtgaggagt

SEQ ID NO: 118056 - DNA, 15 bp, Homo sapiens
tgggagggtgaggag

SEQ ID NO: 118057 - DNA, 15 bp, Homo sapiens
ctgggagggtgagga

SEQ ID NO: 118058 - DNA, 15 bp, Homo sapiens
tctgggagggtgagg

SEQ ID NO: 118059 - DNA, 15 bp, Homo sapiens
ctctgggagggtgag

SEQ ID NO: 118060 - DNA, 15 bp, Homo sapiens
cctctgggagggtga

SEQ ID NO: 118061 - DNA, 15 bp, Homo sapiens
gcctctgggagggtg

SEQ ID NO: 118062 - DNA, 15 bp, Homo sapiens
ggcctctgggagggt

SEQ ID NO: 118063 - DNA, 15 bp, Homo sapiens
gggcctctgggaggg

SEQ ID NO: 118064 - DNA, 15 bp, Homo sapiens
agggcctctgggagg

SEQ ID NO: 118065 - DNA, 15 bp, Homo sapiens
aagggcctctgggag

SEQ ID NO: 118066 - DNA, 15 bp, Homo sapiens
caagggcctctggga

SEQ ID NO: 118067 - DNA, 15 bp, Homo sapiens
gcaagggcctctggg

SEQ ID NO: 118068 - DNA, 15 bp, Homo sapiens
ggcaagggcctctgg

SEQ ID NO: 118069 - DNA, 15 bp, Homo sapiens
aggcaagggcctctg

SEQ ID NO: 118070 - DNA, 15 bp, Homo sapiens
aaggcaagggcctct

SEQ ID NO: 118071 - DNA, 15 bp, Homo sapiens
gaaggcaagggcctc

SEQ ID NO: 118072 - DNA, 15 bp, Homo sapiens
agaaggcaagggcct

SEQ ID NO: 118073 - DNA, 15 bp, Homo sapiens
aagaaggcaagggcc

SEQ ID NO: 118074 - DNA, 15 bp, Homo sapiens
aaagaaggcaagggc

SEQ ID NO: 118075 - DNA, 15 bp, Homo sapiens
aaaagaaggcaaggg

SEQ ID NO: 118076 - DNA, 15 bp, Homo sapiens
taaaagaaggcaagg

SEQ ID NO: 118077 - DNA, 15 bp, Homo sapiens
ttaaaagaaggcaag

SEQ ID NO: 118078 - DNA, 15 bp, Homo sapiens
attaaaagaaggcaa

SEQ ID NO: 118079 - DNA, 15 bp, Homo sapiens
aattaaaagaaggca

SEQ ID NO: 118080 - DNA, 15 bp, Homo sapiens
aaattaaaagaaggc

SEQ ID NO: 118081 - DNA, 15 bp, Homo sapiens
aaaattaaaagaagg

SEQ ID NO: 118082 - DNA, 15 bp, Homo sapiens
aaaaattaaaagaag

SEQ ID NO: 118083 - DNA, 15 bp, Homo sapiens
caaaaattaaaagaa

SEQ ID NO: 118084 - DNA, 15 bp, Homo sapiens
acaaaaattaaaaga

SEQ ID NO: 118085 - DNA, 15 bp, Homo sapiens
aacaaaaattaaaag

SEQ ID NO: 118086 - DNA, 15 bp, Homo sapiens
taacaaaaattaaaa

SEQ ID NO: 118087 - DNA, 15 bp, Homo sapiens
gtaacaaaaattaaa

SEQ ID NO: 118088 - DNA, 15 bp, Homo sapiens
tgtaacaaaaattaa

SEQ ID NO: 118089 - DNA, 15 bp, Homo sapiens
ctgtaacaaaaatta

SEQ ID NO: 118090 - DNA, 15 bp, Homo sapiens
tctgtaacaaaaatt

SEQ ID NO: 118091 - DNA, 15 bp, Homo sapiens
ttctgtaacaaaaat

SEQ ID NO: 118092 - DNA, 15 bp, Homo sapiens
tttctgtaacaaaaa

SEQ ID NO: 118093 - DNA, 15 bp, Homo sapiens
ttttctgtaacaaaa

SEQ ID NO: 118094 - DNA, 15 bp, Homo sapiens
attttctgtaacaaa

SEQ ID NO: 118095 - DNA, 15 bp, Homo sapiens
cattttctgtaacaa

SEQ ID NO: 118096 - DNA, 15 bp, Homo sapiens
tcattttctgtaaca

SEQ ID NO: 118097 - DNA, 15 bp, Homo sapiens
ttcattttctgtaac

SEQ ID NO: 118098 - DNA, 15 bp, Homo sapiens
tttcattttctgtaa

SEQ ID NO: 118099 - DNA, 15 bp, Homo sapiens
gtttcattttctgta

SEQ ID NO: 118100 - DNA, 15 bp, Homo sapiens
tgtttcattttctgt

SEQ ID NO: 118101 - DNA, 15 bp, Homo sapiens
atgtttcattttctg

SEQ ID NO: 118102 - DNA, 15 bp, Homo sapiens
catgtttcattttct

SEQ ID NO: 118103 - DNA, 15 bp, Homo sapiens
gcatgtttcattttc

SEQ ID NO: 118104 - DNA, 15 bp, Homo sapiens
tgcatgtttcatttt

SEQ ID NO: 118105 - DNA, 15 bp, Homo sapiens
gtgcatgtttcattt

SEQ ID NO: 118106 - DNA, 15 bp, Homo sapiens
tgtgcatgtttcatt

SEQ ID NO: 118107 - DNA, 15 bp, Homo sapiens
atgtgcatgtttcat

SEQ ID NO: 118108 - DNA, 15 bp, Homo sapiens
gatgtgcatgtttca

SEQ ID NO: 118109 - DNA, 15 bp, Homo sapiens
tgatgtgcatgtttc

SEQ ID NO: 118110 - DNA, 15 bp, Homo sapiens
ctgatgtgcatgttt

SEQ ID NO: 118111 - DNA, 15 bp, Homo sapiens
actgatgtgcatgtt

SEQ ID NO: 118112 - DNA, 15 bp, Homo sapiens
tactgatgtgcatgt

SEQ ID NO: 118113 - DNA, 15 bp, Homo sapiens
ctactgatgtgcatg

SEQ ID NO: 118114 - DNA, 15 bp, Homo sapiens
tctactgatgtgcat

SEQ ID NO: 118115 - DNA, 15 bp, Homo sapiens
ctctactgatgtgca

SEQ ID NO: 118116 - DNA, 15 bp, Homo sapiens
tctctactgatgtgc

SEQ ID NO: 118117 - DNA, 15 bp, Homo sapiens
ctctctactgatgtg

SEQ ID NO: 118118 - DNA, 15 bp, Homo sapiens
tctctctactgatgt

SEQ ID NO: 118119 - DNA, 15 bp, Homo sapiens
atctctctactgatg

SEQ ID NO: 118120 - DNA, 15 bp, Homo sapiens
catctctctactgat

SEQ ID NO: 118121 - DNA, 15 bp, Homo sapiens
tcatctctctactga

SEQ ID NO: 118122 - DNA, 15 bp, Homo sapiens
ctcatctctctactg

SEQ ID NO: 118123 - DNA, 15 bp, Homo sapiens
gctcatctctctact

SEQ ID NO: 118124 - DNA, 15 bp, Homo sapiens
tgctcatctctctac

SEQ ID NO: 118125 - DNA, 15 bp, Homo sapiens
gtgctcatctctcta

SEQ ID NO: 118126 - DNA, 15 bp, Homo sapiens
tgtgctcatctctct

SEQ ID NO: 118127 - DNA, 15 bp, Homo sapiens
atgtgctcatctctc

SEQ ID NO: 118128 - DNA, 15 bp, Homo sapiens
catgtgctcatctct

SEQ ID NO: 118129 - DNA, 15 bp, Homo sapiens
tcatgtgctcatctc

SEQ ID NO: 118130 - DNA, 15 bp, Homo sapiens
ttcatgtgctcatct

SEQ ID NO: 118131 - DNA, 15 bp, Homo sapiens
gttcatgtgctcatc

SEQ ID NO: 118132 - DNA, 15 bp, Homo sapiens
ggttcatgtgctcat

SEQ ID NO: 118133 - DNA, 15 bp, Homo sapiens
gggttcatgtgctca

SEQ ID NO: 118134 - DNA, 15 bp, Homo sapiens
ggggttcatgtgctc

SEQ ID NO: 118135 - DNA, 15 bp, Homo sapiens
aggggttcatgtgct

SEQ ID NO: 118136 - DNA, 15 bp, Homo sapiens
caggggttcatgtgc

SEQ ID NO: 118137 - DNA, 15 bp, Homo sapiens
acaggggttcatgtg

SEQ ID NO: 118138 - DNA, 15 bp, Homo sapiens
cacaggggttcatgt

SEQ ID NO: 118139 - DNA, 15 bp, Homo sapiens
acacaggggttcatg

SEQ ID NO: 118140 - DNA, 15 bp, Homo sapiens
tacacaggggttcat

SEQ ID NO: 118141 - DNA, 15 bp, Homo sapiens
gtacacaggggttca

SEQ ID NO: 118142 - DNA, 15 bp, Homo sapiens
agtacacaggggttc

SEQ ID NO: 118143 - DNA, 15 bp, Homo sapiens
tagtacacaggggtt

SEQ ID NO: 118144 - DNA, 15 bp, Homo sapiens
ttagtacacaggggt

SEQ ID NO: 118145 - DNA, 15 bp, Homo sapiens
attagtacacagggg

SEQ ID NO: 118146 - DNA, 15 bp, Homo sapiens
gattagtacacaggg

SEQ ID NO: 118147 - DNA, 15 bp, Homo sapiens
tgattagtacacagg

SEQ ID NO: 118148 - DNA, 15 bp, Homo sapiens
gtgattagtacacag

SEQ ID NO: 118149 - DNA, 15 bp, Homo sapiens
ggtgattagtacaca

SEQ ID NO: 118150 - DNA, 15 bp, Homo sapiens
gggtgattagtacac

SEQ ID NO: 118151 - DNA, 15 bp, Homo sapiens
tgggtgattagtaca

SEQ ID NO: 118152 - DNA, 15 bp, Homo sapiens
ctgggtgattagtac

SEQ ID NO: 118153 - DNA, 15 bp, Homo sapiens
gctgggtgattagta

SEQ ID NO: 118154 - DNA, 15 bp, Homo sapiens
agctgggtgattagt

SEQ ID NO: 118155 - DNA, 15 bp, Homo sapiens
aagctgggtgattag

SEQ ID NO: 118156 - DNA, 15 bp, Homo sapiens
gaagctgggtgatta

SEQ ID NO: 118157 - DNA, 15 bp, Homo sapiens
tgaagctgggtgatt

SEQ ID NO: 118158 - DNA, 15 bp, Homo sapiens
ttgaagctgggtgat

SEQ ID NO: 118159 - DNA, 15 bp, Homo sapiens
cttgaagctgggtga

SEQ ID NO: 118160 - DNA, 15 bp, Homo sapiens
tcttgaagctgggtg

SEQ ID NO: 118161 - DNA, 15 bp, Homo sapiens
ttcttgaagctgggt

SEQ ID NO: 118162 - DNA, 15 bp, Homo sapiens
cttcttgaagctggg

SEQ ID NO: 118163 - DNA, 15 bp, Homo sapiens
acttcttgaagctgg

SEQ ID NO: 118164 - DNA, 15 bp, Homo sapiens
gacttcttgaagctg

SEQ ID NO: 118165 - DNA, 15 bp, Homo sapiens
agacttcttgaagct

SEQ ID NO: 118166 - DNA, 15 bp, Homo sapiens
gagacttcttgaagc

SEQ ID NO: 118167 - DNA, 15 bp, Homo sapiens
tgagacttcttgaag

SEQ ID NO: 118168 - DNA, 15 bp, Homo sapiens
ttgagacttcttgaa

SEQ ID NO: 118169 - DNA, 15 bp, Homo sapiens
gttgagacttcttga

SEQ ID NO: 118170 - DNA, 15 bp, Homo sapiens
agttgagacttcttg

SEQ ID NO: 118171 - DNA, 15 bp, Homo sapiens
gagttgagacttctt

SEQ ID NO: 118172 - DNA, 15 bp, Homo sapiens
tgagttgagacttct

SEQ ID NO: 118173 - DNA, 15 bp, Homo sapiens
ttgagttgagacttc

SEQ ID NO: 118174 - DNA, 15 bp, Homo sapiens
attgagttgagactt

SEQ ID NO: 118175 - DNA, 15 bp, Homo sapiens
cattgagttgagact

SEQ ID NO: 118176 - DNA, 15 bp, Homo sapiens
ccattgagttgagac

SEQ ID NO: 118177 - DNA, 15 bp, Homo sapiens
gccattgagttgaga

SEQ ID NO: 118178 - DNA, 15 bp, Homo sapiens
cgccattgagttgag

SEQ ID NO: 118179 - DNA, 15 bp, Homo sapiens
gcgccattgagttga

SEQ ID NO: 118180 - DNA, 15 bp, Homo sapiens
ggcgccattgagttg

SEQ ID NO: 118181 - DNA, 15 bp, Homo sapiens
tggcgccattgagtt

SEQ ID NO: 118182 - DNA, 15 bp, Homo sapiens
atggcgccattgagt

SEQ ID NO: 118183 - DNA, 15 bp, Homo sapiens
gatggcgccattgag

SEQ ID NO: 118184 - DNA, 15 bp, Homo sapiens
agatggcgccattga

SEQ ID NO: 118185 - DNA, 15 bp, Homo sapiens
aagatggcgccattg

SEQ ID NO: 118186 - DNA, 15 bp, Homo sapiens
caagatggcgccatt

SEQ ID NO: 118187 - DNA, 15 bp, Homo sapiens
acaagatggcgccat

SEQ ID NO: 118188 - DNA, 15 bp, Homo sapiens
aacaagatggcgcca

SEQ ID NO: 118189 - DNA, 15 bp, Homo sapiens
aaacaagatggcgcc

SEQ ID NO: 118190 - DNA, 15 bp, Homo sapiens
aaaacaagatggcgc

SEQ ID NO: 118191 - DNA, 15 bp, Homo sapiens
gaaaacaagatggcg

SEQ ID NO: 118192 - DNA, 15 bp, Homo sapiens
ggaaaacaagatggc

SEQ ID NO: 118193 - DNA, 15 bp, Homo sapiens
aggaaaacaagatgg

SEQ ID NO: 118194 - DNA, 15 bp, Homo sapiens
gaggaaaacaagatg

SEQ ID NO: 118195 - DNA, 15 bp, Homo sapiens
agaggaaaacaagat

SEQ ID NO: 118196 - DNA, 15 bp, Homo sapiens
tagaggaaaacaaga

SEQ ID NO: 118197 - DNA, 15 bp, Homo sapiens
atagaggaaaacaag

SEQ ID NO: 118198 - DNA, 15 bp, Homo sapiens
tatagaggaaaacaa

SEQ ID NO: 118199 - DNA, 15 bp, Homo sapiens
gtatagaggaaaaca

SEQ ID NO: 118200 - DNA, 15 bp, Homo sapiens
ggtatagaggaaaac

SEQ ID NO: 118201 - DNA, 15 bp, Homo sapiens
gggtatagaggaaaa

SEQ ID NO: 118202 - DNA, 15 bp, Homo sapiens
tgggtatagaggaaa

SEQ ID NO: 118203 - DNA, 15 bp, Homo sapiens
atgggtatagaggaa

SEQ ID NO: 118204 - DNA, 15 bp, Homo sapiens
gatgggtatagagga

SEQ ID NO: 118205 - DNA, 15 bp, Homo sapiens
agatgggtatagagg

SEQ ID NO: 118206 - DNA, 15 bp, Homo sapiens
cagatgggtatagag

SEQ ID NO: 118207 - DNA, 15 bp, Homo sapiens
tcagatgggtataga

SEQ ID NO: 118208 - DNA, 15 bp, Homo sapiens
gtcagatgggtatag

SEQ ID NO: 118209 - DNA, 15 bp, Homo sapiens
ggtcagatgggtata

SEQ ID NO: 118210 - DNA, 15 bp, Homo sapiens
tggtcagatgggtat

SEQ ID NO: 118211 - DNA, 15 bp, Homo sapiens
ctggtcagatgggta

SEQ ID NO: 118212 - DNA, 15 bp, Homo sapiens
tctggtcagatgggt

SEQ ID NO: 118213 - DNA, 15 bp, Homo sapiens
atctggtcagatggg

SEQ ID NO: 118214 - DNA, 15 bp, Homo sapiens
aatctggtcagatgg

SEQ ID NO: 118215 - DNA, 15 bp, Homo sapiens
taatctggtcagatg

SEQ ID NO: 118216 - DNA, 15 bp, Homo sapiens
ataatctggtcagat

SEQ ID NO: 118217 - DNA, 15 bp, Homo sapiens
aataatctggtcaga

SEQ ID NO: 118218 - DNA, 15 bp, Homo sapiens
caataatctggtcag

SEQ ID NO: 118219 - DNA, 15 bp, Homo sapiens
gcaataatctggtca

SEQ ID NO: 118220 - DNA, 15 bp, Homo sapiens
tgcaataatctggtc

SEQ ID NO: 118221 - DNA, 15 bp, Homo sapiens
ttgcaataatctggt

SEQ ID NO: 118222 - DNA, 15 bp, Homo sapiens
tttgcaataatctgg

SEQ ID NO: 118223 - DNA, 15 bp, Homo sapiens
ctttgcaataatctg

SEQ ID NO: 118224 - DNA, 15 bp, Homo sapiens
gctttgcaataatct

SEQ ID NO: 118225 - DNA, 15 bp, Homo sapiens
tgctttgcaataatc

SEQ ID NO: 118226 - DNA, 15 bp, Homo sapiens
ttgctttgcaataat

SEQ ID NO: 118227 - DNA, 15 bp, Homo sapiens
tttgctttgcaataa

SEQ ID NO: 118228 - DNA, 15 bp, Homo sapiens
atttgctttgcaata

SEQ ID NO: 118229 - DNA, 15 bp, Homo sapiens
gatttgctttgcaat

SEQ ID NO: 118230 - DNA, 15 bp, Homo sapiens
ggatttgctttgcaa

SEQ ID NO: 118231 - DNA, 15 bp, Homo sapiens
gggatttgctttgca

SEQ ID NO: 118232 - DNA, 15 bp, Homo sapiens
tgggatttgctttgc

SEQ ID NO: 118233 - DNA, 15 bp, Homo sapiens
ctgggatttgctttg

SEQ ID NO: 118234 - DNA, 15 bp, Homo sapiens
cctgggatttgcttt

SEQ ID NO: 118235 - DNA, 15 bp, Homo sapiens
gcctgggatttgctt

SEQ ID NO: 118236 - DNA, 15 bp, Homo sapiens
tgcctgggatttgct

SEQ ID NO: 118237 - DNA, 15 bp, Homo sapiens
atgcctgggatttgc

SEQ ID NO: 118238 - DNA, 15 bp, Homo sapiens
aatgcctgggatttg

SEQ ID NO: 118239 - DNA, 15 bp, Homo sapiens
taatgcctgggattt

SEQ ID NO: 118240 - DNA, 15 bp, Homo sapiens
ataatgcctgggatt

SEQ ID NO: 118241 - DNA, 15 bp, Homo sapiens
aataatgcctgggat

SEQ ID NO: 118242 - DNA, 15 bp, Homo sapiens
aaataatgcctggga

SEQ ID NO: 118243 - DNA, 15 bp, Homo sapiens
gaaataatgcctggg

SEQ ID NO: 118244 - DNA, 15 bp, Homo sapiens
tgaaataatgcctgg

SEQ ID NO: 118245 - DNA, 15 bp, Homo sapiens
atgaaataatgcctg

SEQ ID NO: 118246 - DNA, 15 bp, Homo sapiens
gatgaaataatgcct

SEQ ID NO: 118247 - DNA, 15 bp, Homo sapiens
ggatgaaataatgcc

SEQ ID NO: 118248 - DNA, 15 bp, Homo sapiens
tggatgaaataatgc

SEQ ID NO: 118249 - DNA, 15 bp, Homo sapiens
atggatgaaataatg

SEQ ID NO: 118250 - DNA, 15 bp, Homo sapiens
tatggatgaaataat

SEQ ID NO: 118251 - DNA, 15 bp, Homo sapiens
ttatggatgaaataa

SEQ ID NO: 118252 - DNA, 15 bp, Homo sapiens
tttatggatgaaata

SEQ ID NO: 118253 - DNA, 15 bp, Homo sapiens
atttatggatgaaat

SEQ ID NO: 118254 - DNA, 15 bp, Homo sapiens
tatttatggatgaaa

SEQ ID NO: 118255 - DNA, 15 bp, Homo sapiens
atatttatggatgaa

SEQ ID NO: 118256 - DNA, 15 bp, Homo sapiens
aatatttatggatga

SEQ ID NO: 118257 - DNA, 15 bp, Homo sapiens
aaatatttatggatg

SEQ ID NO: 118258 - DNA, 15 bp, Homo sapiens
gaaatatttatggat

SEQ ID NO: 118259 - DNA, 15 bp, Homo sapiens
tgaaatatttatgga

SEQ ID NO: 118260 - DNA, 15 bp, Homo sapiens
ctgaaatatttatgg

SEQ ID NO: 118261 - DNA, 15 bp, Homo sapiens
tctgaaatatttatg

SEQ ID NO: 118262 - DNA, 15 bp, Homo sapiens
atctgaaatatttat

SEQ ID NO: 118263 - DNA, 15 bp, Homo sapiens
aatctgaaatattta

SEQ ID NO: 118264 - DNA, 15 bp, Homo sapiens
taatctgaaatattt

SEQ ID NO: 118265 - DNA, 15 bp, Homo sapiens
ataatctgaaatatt

SEQ ID NO: 118266 - DNA, 15 bp, Homo sapiens
gataatctgaaatat

SEQ ID NO: 118267 - DNA, 15 bp, Homo sapiens
agataatctgaaata

SEQ ID NO: 118268 - DNA, 15 bp, Homo sapiens
tagataatctgaaat

SEQ ID NO: 118269 - DNA, 15 bp, Homo sapiens
ttagataatctgaaa

SEQ ID NO: 118270 - DNA, 15 bp, Homo sapiens
tttagataatctgaa

SEQ ID NO: 118271 - DNA, 15 bp, Homo sapiens
atttagataatctga

SEQ ID NO: 118272 - DNA, 15 bp, Homo sapiens
tatttagataatctg

SEQ ID NO: 118273 - DNA, 15 bp, Homo sapiens
ttatttagataatct

SEQ ID NO: 118274 - DNA, 15 bp, Homo sapiens
tttatttagataatc

SEQ ID NO: 118275 - DNA, 15 bp, Homo sapiens
ctttatttagataat

SEQ ID NO: 118276 - DNA, 15 bp, Homo sapiens
actttatttagataa

SEQ ID NO: 118277 - DNA, 15 bp, Homo sapiens
cactttatttagata

SEQ ID NO: 118278 - DNA, 15 bp, Homo sapiens
ccactttatttagat

SEQ ID NO: 118279 - DNA, 15 bp, Homo sapiens
tccactttatttaga

SEQ ID NO: 118280 - DNA, 15 bp, Homo sapiens
ttccactttatttag

SEQ ID NO: 118281 - DNA, 15 bp, Homo sapiens
attccactttattta

SEQ ID NO: 118282 - DNA, 15 bp, Homo sapiens
gattccactttattt

SEQ ID NO: 118283 - DNA, 15 bp, Homo sapiens
tgattccactttatt

SEQ ID NO: 118284 - DNA, 15 bp, Homo sapiens
ctgattccactttat

SEQ ID NO: 118285 - DNA, 15 bp, Homo sapiens
cctgattccacttta

SEQ ID NO: 118286 - DNA, 15 bp, Homo sapiens
acctgattccacttt

SEQ ID NO: 118287 - DNA, 15 bp, Homo sapiens
tacctgattccactt

SEQ ID NO: 118288 - DNA, 15 bp, Homo sapiens
ttacctgattccact

SEQ ID NO: 118289 - DNA, 15 bp, Homo sapiens
tttacctgattccac

SEQ ID NO: 118290 - DNA, 15 bp, Homo sapiens
ctttacctgattcca

SEQ ID NO: 118291 - DNA, 15 bp, Homo sapiens
tctttacctgattcc

SEQ ID NO: 118292 - DNA, 15 bp, Homo sapiens
ttctttacctgattc

SEQ ID NO: 118293 - DNA, 15 bp, Homo sapiens
tttctttacctgatt

SEQ ID NO: 118294 - DNA, 15 bp, Homo sapiens
atttctttacctgat

SEQ ID NO: 118295 - DNA, 15 bp, Homo sapiens
tatttctttacctga

SEQ ID NO: 118296 - DNA, 15 bp, Homo sapiens
atatttctttacctg

SEQ ID NO: 118297 - DNA, 15 bp, Homo sapiens
tatatttctttacct

SEQ ID NO: 118298 - DNA, 15 bp, Homo sapiens
atatatttctttacc

SEQ ID NO: 118299 - DNA, 15 bp, Homo sapiens
catatatttctttac

SEQ ID NO: 118300 - DNA, 15 bp, Homo sapiens
tcatatatttcttta

SEQ ID NO: 118301 - DNA, 15 bp, Homo sapiens
atcatatatttcttt

SEQ ID NO: 118302 - DNA, 15 bp, Homo sapiens
gatcatatatttctt

SEQ ID NO: 118303 - DNA, 15 bp, Homo sapiens
tgatcatatatttct

SEQ ID NO: 118304 - DNA, 15 bp, Homo sapiens
ttgatcatatatttc

SEQ ID NO: 118305 - DNA, 15 bp, Homo sapiens
tttgatcatatattt

SEQ ID NO: 118306 - DNA, 15 bp, Homo sapiens
atttgatcatatatt

SEQ ID NO: 118307 - DNA, 15 bp, Homo sapiens
tatttgatcatatat

SEQ ID NO: 118308 - DNA, 15 bp, Homo sapiens
gtatttgatcatata

SEQ ID NO: 118309 - DNA, 15 bp, Homo sapiens
tgtatttgatcatat

SEQ ID NO: 118310 - DNA, 15 bp, Homo sapiens
atgtatttgatcata

SEQ ID NO: 118311 - DNA, 15 bp, Homo sapiens
gatgtatttgatcat

SEQ ID NO: 118312 - DNA, 15 bp, Homo sapiens
ggatgtatttgatca

SEQ ID NO: 118313 - DNA, 15 bp, Homo sapiens
tggatgtatttgatc

SEQ ID NO: 118314 - DNA, 15 bp, Homo sapiens
atggatgtatttgat

SEQ ID NO: 118315 - DNA, 15 bp, Homo sapiens
aatggatgtatttga

SEQ ID NO: 118316 - DNA, 15 bp, Homo sapiens
taatggatgtatttg

SEQ ID NO: 118317 - DNA, 15 bp, Homo sapiens
ataatggatgtattt

SEQ ID NO: 118318 - DNA, 15 bp, Homo sapiens
gataatggatgtatt

SEQ ID NO: 118319 - DNA, 15 bp, Homo sapiens
tgataatggatgtat

SEQ ID NO: 118320 - DNA, 15 bp, Homo sapiens
gtgataatggatgta

SEQ ID NO: 118321 - DNA, 15 bp, Homo sapiens
tgtgataatggatgt

SEQ ID NO: 118322 - DNA, 15 bp, Homo sapiens
gtgtgataatggatg

SEQ ID NO: 118323 - DNA, 15 bp, Homo sapiens
agtgtgataatggat

SEQ ID NO: 118324 - DNA, 15 bp, Homo sapiens
tagtgtgataatgga

SEQ ID NO: 118325 - DNA, 15 bp, Homo sapiens
ttagtgtgataatgg

SEQ ID NO: 118326 - DNA, 15 bp, Homo sapiens
tttagtgtgataatg

SEQ ID NO: 118327 - DNA, 15 bp, Homo sapiens
ttttagtgtgataat

SEQ ID NO: 118328 - DNA, 15 bp, Homo sapiens
tttttagtgtgataa

SEQ ID NO: 118329 - DNA, 15 bp, Homo sapiens
atttttagtgtgata

SEQ ID NO: 118330 - DNA, 15 bp, Homo sapiens
aatttttagtgtgat

SEQ ID NO: 118331 - DNA, 15 bp, Homo sapiens
taatttttagtgtga

SEQ ID NO: 118332 - DNA, 15 bp, Homo sapiens
ctaatttttagtgtg

SEQ ID NO: 118333 - DNA, 15 bp, Homo sapiens
actaatttttagtgt

SEQ ID NO: 118334 - DNA, 15 bp, Homo sapiens
cactaatttttagtg

SEQ ID NO: 118335 - DNA, 15 bp, Homo sapiens
acactaatttttagt

SEQ ID NO: 118336 - DNA, 15 bp, Homo sapiens
gacactaatttttag

SEQ ID NO: 118337 - DNA, 15 bp, Homo sapiens
tgacactaattttta

SEQ ID NO: 118338 - DNA, 15 bp, Homo sapiens
ttgacactaattttt

SEQ ID NO: 118339 - DNA, 15 bp, Homo sapiens
attgacactaatttt

SEQ ID NO: 118340 - DNA, 15 bp, Homo sapiens
aattgacactaattt

SEQ ID NO: 118341 - DNA, 15 bp, Homo sapiens
gaattgacactaatt

SEQ ID NO: 118342 - DNA, 15 bp, Homo sapiens
tgaattgacactaat

SEQ ID NO: 118343 - DNA, 15 bp, Homo sapiens
ttgaattgacactaa

SEQ ID NO: 118344 - DNA, 15 bp, Homo sapiens
tttgaattgacacta

SEQ ID NO: 118345 - DNA, 15 bp, Homo sapiens
atttgaattgacact

SEQ ID NO: 118346 - DNA, 15 bp, Homo sapiens
tatttgaattgacac

SEQ ID NO: 118347 - DNA, 15 bp, Homo sapiens
atatttgaattgaca

SEQ ID NO: 118348 - DNA, 15 bp, Homo sapiens
gatatttgaattgac

SEQ ID NO: 118349 - DNA, 15 bp, Homo sapiens
agatatttgaattga

SEQ ID NO: 118350 - DNA, 15 bp, Homo sapiens
tagatatttgaattg

SEQ ID NO: 118351 - DNA, 15 bp, Homo sapiens
ctagatatttgaatt

SEQ ID NO: 118352 - DNA, 15 bp, Homo sapiens
tctagatatttgaat

SEQ ID NO: 118353 - DNA, 15 bp, Homo sapiens
atctagatatttgaa

SEQ ID NO: 118354 - DNA, 15 bp, Homo sapiens
aatctagatatttga

SEQ ID NO: 118355 - DNA, 15 bp, Homo sapiens
aaatctagatatttg

SEQ ID NO: 118356 - DNA, 15 bp, Homo sapiens
aaaatctagatattt

SEQ ID NO: 118357 - DNA, 15 bp, Homo sapiens
gaaaatctagatatt

SEQ ID NO: 118358 - DNA, 15 bp, Homo sapiens
ggaaaatctagatat

SEQ ID NO: 118359 - DNA, 15 bp, Homo sapiens
gggaaaatctagata

SEQ ID NO: 118360 - DNA, 15 bp, Homo sapiens
ggggaaaatctagat

SEQ ID NO: 118361 - DNA, 15 bp, Homo sapiens
aggggaaaatctaga

SEQ ID NO: 118362 - DNA, 15 bp, Homo sapiens
taggggaaaatctag

SEQ ID NO: 118363 - DNA, 15 bp, Homo sapiens
gtaggggaaaatcta

SEQ ID NO: 118364 - DNA, 15 bp, Homo sapiens
agtaggggaaaatct

SEQ ID NO: 118365 - DNA, 15 bp, Homo sapiens
cagtaggggaaaatc

SEQ ID NO: 118366 - DNA, 15 bp, Homo sapiens
acagtaggggaaaat

SEQ ID NO: 118367 - DNA, 15 bp, Homo sapiens
aacagtaggggaaaa

SEQ ID NO: 118368 - DNA, 15 bp, Homo sapiens
caacagtaggggaaa

SEQ ID NO: 118369 - DNA, 15 bp, Homo sapiens
acaacagtaggggaa

SEQ ID NO: 118370 - DNA, 15 bp, Homo sapiens
cacaacagtagggga

SEQ ID NO: 118371 - DNA, 15 bp, Homo sapiens
acacaacagtagggg

SEQ ID NO: 118372 - DNA, 15 bp, Homo sapiens
tacacaacagtaggg

SEQ ID NO: 118373 - DNA, 15 bp, Homo sapiens
ctacacaacagtagg

SEQ ID NO: 118374 - DNA, 15 bp, Homo sapiens
actacacaacagtag

SEQ ID NO: 118375 - DNA, 15 bp, Homo sapiens
aactacacaacagta

SEQ ID NO: 118376 - DNA, 15 bp, Homo sapiens
aaactacacaacagt

SEQ ID NO: 118377 - DNA, 15 bp, Homo sapiens
aaaactacacaacag

SEQ ID NO: 118378 - DNA, 15 bp, Homo sapiens
aaaaactacacaaca

SEQ ID NO: 118379 - DNA, 15 bp, Homo sapiens
taaaaactacacaac

SEQ ID NO: 118380 - DNA, 15 bp, Homo sapiens
ctaaaaactacacaa

SEQ ID NO: 118381 - DNA, 15 bp, Homo sapiens
actaaaaactacaca

SEQ ID NO: 118382 - DNA, 15 bp, Homo sapiens
tactaaaaactacac

SEQ ID NO: 118383 - DNA, 15 bp, Homo sapiens
ctactaaaaactaca

SEQ ID NO: 118384 - DNA, 15 bp, Homo sapiens
actactaaaaactac

SEQ ID NO: 118385 - DNA, 15 bp, Homo sapiens
aactactaaaaacta

SEQ ID NO: 118386 - DNA, 15 bp, Homo sapiens
aaactactaaaaact

SEQ ID NO: 118387 - DNA, 15 bp, Homo sapiens
taaactactaaaaac

SEQ ID NO: 118388 - DNA, 15 bp, Homo sapiens
ataaactactaaaaa

SEQ ID NO: 118389 - DNA, 15 bp, Homo sapiens
aataaactactaaaa

SEQ ID NO: 118390 - DNA, 15 bp, Homo sapiens
aaataaactactaaa

SEQ ID NO: 118391 - DNA, 15 bp, Homo sapiens
caaataaactactaa

SEQ ID NO: 118392 - DNA, 15 bp, Homo sapiens
tcaaataaactacta

SEQ ID NO: 118393 - DNA, 15 bp, Homo sapiens
ttcaaataaactact

SEQ ID NO: 118394 - DNA, 15 bp, Homo sapiens
attcaaataaactac

SEQ ID NO: 118395 - DNA, 15 bp, Homo sapiens
gattcaaataaacta

SEQ ID NO: 118396 - DNA, 15 bp, Homo sapiens
tgattcaaataaact

SEQ ID NO: 118397 - DNA, 15 bp, Homo sapiens
ttgattcaaataaac

SEQ ID NO: 118398 - DNA, 15 bp, Homo sapiens
cttgattcaaataaa

SEQ ID NO: 118399 - DNA, 15 bp, Homo sapiens
ccttgattcaaataa

SEQ ID NO: 118400 - DNA, 15 bp, Homo sapiens
accttgattcaaata

SEQ ID NO: 118401 - DNA, 15 bp, Homo sapiens
taccttgattcaaat

SEQ ID NO: 118402 - DNA, 15 bp, Homo sapiens
gtaccttgattcaaa

SEQ ID NO: 118403 - DNA, 15 bp, Homo sapiens
tgtaccttgattcaa

SEQ ID NO: 118404 - DNA, 15 bp, Homo sapiens
ttgtaccttgattca

SEQ ID NO: 118405 - DNA, 15 bp, Homo sapiens
tttgtaccttgattc

SEQ ID NO: 118406 - DNA, 15 bp, Homo sapiens
gtttgtaccttgatt

SEQ ID NO: 118407 - DNA, 15 bp, Homo sapiens
cgtttgtaccttgat

SEQ ID NO: 118408 - DNA, 15 bp, Homo sapiens
tcgtttgtaccttga

SEQ ID NO: 118409 - DNA, 15 bp, Homo sapiens
ctcgtttgtaccttg

SEQ ID NO: 118410 - DNA, 15 bp, Homo sapiens
tctcgtttgtacctt

SEQ ID NO: 118411 - DNA, 15 bp, Homo sapiens
atctcgtttgtacct

SEQ ID NO: 118412 - DNA, 15 bp, Homo sapiens
gatctcgtttgtacc

SEQ ID NO: 118413 - DNA, 15 bp, Homo sapiens
ggatctcgtttgtac

SEQ ID NO: 118414 - DNA, 15 bp, Homo sapiens
tggatctcgtttgta

SEQ ID NO: 118415 - DNA, 15 bp, Homo sapiens
gtggatctcgtttgt

SEQ ID NO: 118416 - DNA, 15 bp, Homo sapiens
tgtggatctcgtttg

SEQ ID NO: 118417 - DNA, 15 bp, Homo sapiens
gtgtggatctcgttt

SEQ ID NO: 118418 - DNA, 15 bp, Homo sapiens
tgtgtggatctcgtt

SEQ ID NO: 118419 - DNA, 15 bp, Homo sapiens
atgtgtggatctcgt

SEQ ID NO: 118420 - DNA, 15 bp, Homo sapiens
aatgtgtggatctcg

SEQ ID NO: 118421 - DNA, 15 bp, Homo sapiens
caatgtgtggatctc

SEQ ID NO: 118422 - DNA, 15 bp, Homo sapiens
gcaatgtgtggatct

SEQ ID NO: 118423 - DNA, 15 bp, Homo sapiens
tgcaatgtgtggatc

SEQ ID NO: 118424 - DNA, 15 bp, Homo sapiens
ttgcaatgtgtggat

SEQ ID NO: 118425 - DNA, 15 bp, Homo sapiens
gttgcaatgtgtgga

SEQ ID NO: 118426 - DNA, 15 bp, Homo sapiens
tgttgcaatgtgtgg

SEQ ID NO: 118427 - DNA, 15 bp, Homo sapiens
ctgttgcaatgtgtg

SEQ ID NO: 118428 - DNA, 15 bp, Homo sapiens
cctgttgcaatgtgt

SEQ ID NO: 118429 - DNA, 15 bp, Homo sapiens
acctgttgcaatgtg

SEQ ID NO: 118430 - DNA, 15 bp, Homo sapiens
aacctgttgcaatgt

SEQ ID NO: 118431 - DNA, 15 bp, Homo sapiens
caacctgttgcaatg

SEQ ID NO: 118432 - DNA, 15 bp, Homo sapiens
tcaacctgttgcaat

SEQ ID NO: 118433 - DNA, 15 bp, Homo sapiens
atcaacctgttgcaa

SEQ ID NO: 118434 - DNA, 15 bp, Homo sapiens
aatcaacctgttgca

SEQ ID NO: 118435 - DNA, 15 bp, Homo sapiens
aaatcaacctgttgc

SEQ ID NO: 118436 - DNA, 15 bp, Homo sapiens
taaatcaacctgttg

SEQ ID NO: 118437 - DNA, 15 bp, Homo sapiens
ttaaatcaacctgtt

SEQ ID NO: 118438 - DNA, 15 bp, Homo sapiens
cttaaatcaacctgt

SEQ ID NO: 118439 - DNA, 15 bp, Homo sapiens
acttaaatcaacctg

SEQ ID NO: 118440 - DNA, 15 bp, Homo sapiens
gacttaaatcaacct

SEQ ID NO: 118441 - DNA, 15 bp, Homo sapiens
agacttaaatcaacc

SEQ ID NO: 118442 - DNA, 15 bp, Homo sapiens
gagacttaaatcaac

SEQ ID NO: 118443 - DNA, 15 bp, Homo sapiens
agagacttaaatcaa

SEQ ID NO: 118444 - DNA, 15 bp, Homo sapiens
aagagacttaaatca

SEQ ID NO: 118445 - DNA, 15 bp, Homo sapiens
taagagacttaaatc

SEQ ID NO: 118446 - DNA, 15 bp, Homo sapiens
ttaagagacttaaat

SEQ ID NO: 118447 - DNA, 15 bp, Homo sapiens
cttaagagacttaaa

SEQ ID NO: 118448 - DNA, 15 bp, Homo sapiens
tcttaagagacttaa

SEQ ID NO: 118449 - DNA, 15 bp, Homo sapiens
ttcttaagagactta

SEQ ID NO: 118450 - DNA, 15 bp, Homo sapiens
attcttaagagactt

SEQ ID NO: 118451 - DNA, 15 bp, Homo sapiens
gattcttaagagact

SEQ ID NO: 118452 - DNA, 15 bp, Homo sapiens
agattcttaagagac

SEQ ID NO: 118453 - DNA, 15 bp, Homo sapiens
aagattcttaagaga

SEQ ID NO: 118454 - DNA, 15 bp, Homo sapiens
taagattcttaagag

SEQ ID NO: 118455 - DNA, 15 bp, Homo sapiens
ataagattcttaaga

SEQ ID NO: 118456 - DNA, 15 bp, Homo sapiens
tataagattcttaag

SEQ ID NO: 118457 - DNA, 15 bp, Homo sapiens
atataagattcttaa

SEQ ID NO: 118458 - DNA, 15 bp, Homo sapiens
catataagattctta

SEQ ID NO: 118459 - DNA, 15 bp, Homo sapiens
acatataagattctt

SEQ ID NO: 118460 - DNA, 15 bp, Homo sapiens
aacatataagattct

SEQ ID NO: 118461 - DNA, 15 bp, Homo sapiens
gaacatataagattc

SEQ ID NO: 118462 - DNA, 15 bp, Homo sapiens
agaacatataagatt

SEQ ID NO: 118463 - DNA, 15 bp, Homo sapiens
gagaacatataagat

SEQ ID NO: 118464 - DNA, 15 bp, Homo sapiens
agagaacatataaga

SEQ ID NO: 118465 - DNA, 15 bp, Homo sapiens
aagagaacatataag

SEQ ID NO: 118466 - DNA, 15 bp, Homo sapiens
aaagagaacatataa

SEQ ID NO: 118467 - DNA, 15 bp, Homo sapiens
gaaagagaacatata

SEQ ID NO: 118468 - DNA, 15 bp, Homo sapiens
ggaaagagaacatat

SEQ ID NO: 118469 - DNA, 15 bp, Homo sapiens
tggaaagagaacata

SEQ ID NO: 118470 - DNA, 15 bp, Homo sapiens
gtggaaagagaacat

SEQ ID NO: 118471 - DNA, 15 bp, Homo sapiens
agtggaaagagaaca

SEQ ID NO: 118472 - DNA, 15 bp, Homo sapiens
gagtggaaagagaac

SEQ ID NO: 118473 - DNA, 15 bp, Homo sapiens
ggagtggaaagagaa

SEQ ID NO: 118474 - DNA, 15 bp, Homo sapiens
gggagtggaaagaga

SEQ ID NO: 118475 - DNA, 15 bp, Homo sapiens
agggagtggaaagag

SEQ ID NO: 118476 - DNA, 15 bp, Homo sapiens
gagggagtggaaaga

SEQ ID NO: 118477 - DNA, 15 bp, Homo sapiens
ggagggagtggaaag

SEQ ID NO: 118478 - DNA, 15 bp, Homo sapiens
aggagggagtggaaa

SEQ ID NO: 118479 - DNA, 15 bp, Homo sapiens
gaggagggagtggaa

SEQ ID NO: 118480 - DNA, 15 bp, Homo sapiens
agaggagggagtgga

SEQ ID NO: 118481 - DNA, 15 bp, Homo sapiens
cagaggagggagtgg

SEQ ID NO: 118482 - DNA, 15 bp, Homo sapiens
acagaggagggagtg

SEQ ID NO: 118483 - DNA, 15 bp, Homo sapiens
aacagaggagggagt

SEQ ID NO: 118484 - DNA, 15 bp, Homo sapiens
aaacagaggagggag

SEQ ID NO: 118485 - DNA, 15 bp, Homo sapiens
aaaacagaggaggga

SEQ ID NO: 118486 - DNA, 15 bp, Homo sapiens
gaaaacagaggaggg

SEQ ID NO: 118487 - DNA, 15 bp, Homo sapiens
ggaaaacagaggagg

SEQ ID NO: 118488 - DNA, 15 bp, Homo sapiens
aggaaaacagaggag

SEQ ID NO: 118489 - DNA, 15 bp, Homo sapiens
aaggaaaacagagga

SEQ ID NO: 118490 - DNA, 15 bp, Homo sapiens
taaggaaaacagagg

SEQ ID NO: 118491 - DNA, 15 bp, Homo sapiens
ttaaggaaaacagag

SEQ ID NO: 118492 - DNA, 15 bp, Homo sapiens
tttaaggaaaacaga

SEQ ID NO: 118493 - DNA, 15 bp, Homo sapiens
ttttaaggaaaacag

SEQ ID NO: 118494 - DNA, 15 bp, Homo sapiens
attttaaggaaaaca

SEQ ID NO: 118495 - DNA, 15 bp, Homo sapiens
aattttaaggaaaac

SEQ ID NO: 118496 - DNA, 15 bp, Homo sapiens
aaattttaaggaaaa

SEQ ID NO: 118497 - DNA, 15 bp, Homo sapiens
taaattttaaggaaa

SEQ ID NO: 118498 - DNA, 15 bp, Homo sapiens
ataaattttaaggaa

SEQ ID NO: 118499 - DNA, 15 bp, Homo sapiens
gataaattttaagga

SEQ ID NO: 118500 - DNA, 15 bp, Homo sapiens
agataaattttaagg

SEQ ID NO: 118501 - DNA, 15 bp, Homo sapiens
cagataaattttaag

SEQ ID NO: 118502 - DNA, 15 bp, Homo sapiens
ccagataaattttaa

SEQ ID NO: 118503 - DNA, 15 bp, Homo sapiens
accagataaatttta

SEQ ID NO: 118504 - DNA, 15 bp, Homo sapiens
gaccagataaatttt

SEQ ID NO: 118505 - DNA, 15 bp, Homo sapiens
tgaccagataaattt

SEQ ID NO: 118506 - DNA, 15 bp, Homo sapiens
gtgaccagataaatt

SEQ ID NO: 118507 - DNA, 15 bp, Homo sapiens
agtgaccagataaat

SEQ ID NO: 118508 - DNA, 15 bp, Homo sapiens
aagtgaccagataaa

SEQ ID NO: 118509 - DNA, 15 bp, Homo sapiens
caagtgaccagataa

SEQ ID NO: 118510 - DNA, 15 bp, Homo sapiens
acaagtgaccagata

SEQ ID NO: 118511 - DNA, 15 bp, Homo sapiens
aacaagtgaccagat

SEQ ID NO: 118512 - DNA, 15 bp, Homo sapiens
aaacaagtgaccaga

SEQ ID NO: 118513 - DNA, 15 bp, Homo sapiens
aaaacaagtgaccag

SEQ ID NO: 118514 - DNA, 15 bp, Homo sapiens
caaaacaagtgacca

SEQ ID NO: 118515 - DNA, 15 bp, Homo sapiens
ccaaaacaagtgacc

SEQ ID NO: 118516 - DNA, 15 bp, Homo sapiens
tccaaaacaagtgac

SEQ ID NO: 118517 - DNA, 15 bp, Homo sapiens
ctccaaaacaagtga

SEQ ID NO: 118518 - DNA, 15 bp, Homo sapiens
tctccaaaacaagtg

SEQ ID NO: 118519 - DNA, 15 bp, Homo sapiens
ttctccaaaacaagt

SEQ ID NO: 118520 - DNA, 15 bp, Homo sapiens
cttctccaaaacaag

SEQ ID NO: 118521 - DNA, 15 bp, Homo sapiens
gcttctccaaaacaa

SEQ ID NO: 118522 - DNA, 15 bp, Homo sapiens
ggcttctccaaaaca

SEQ ID NO: 118523 - DNA, 15 bp, Homo sapiens
gggcttctccaaaac

SEQ ID NO: 118524 - DNA, 15 bp, Homo sapiens
ggggcttctccaaaa

SEQ ID NO: 118525 - DNA, 15 bp, Homo sapiens
cggggcttctccaaa

SEQ ID NO: 118526 - DNA, 15 bp, Homo sapiens
acggggcttctccaa

SEQ ID NO: 118527 - DNA, 15 bp, Homo sapiens
cacggggcttctcca

SEQ ID NO: 118528 - DNA, 15 bp, Homo sapiens
acacggggcttctcc

SEQ ID NO: 118529 - DNA, 15 bp, Homo sapiens
aacacggggcttctc

SEQ ID NO: 118530 - DNA, 15 bp, Homo sapiens
aaacacggggcttct

SEQ ID NO: 118531 - DNA, 15 bp, Homo sapiens
taaacacggggcttc

SEQ ID NO: 118532 - DNA, 15 bp, Homo sapiens
ataaacacggggctt

SEQ ID NO: 118533 - DNA, 15 bp, Homo sapiens
aataaacacggggct

SEQ ID NO: 118534 - DNA, 15 bp, Homo sapiens
gaataaacacggggc

SEQ ID NO: 118535 - DNA, 15 bp, Homo sapiens
ggaataaacacgggg

SEQ ID NO: 118536 - DNA, 15 bp, Homo sapiens
tggaataaacacggg

SEQ ID NO: 118537 - DNA, 15 bp, Homo sapiens
ctggaataaacacgg

SEQ ID NO: 118538 - DNA, 15 bp, Homo sapiens
cctggaataaacacg

SEQ ID NO: 118539 - DNA, 15 bp, Homo sapiens
tcctggaataaacac

SEQ ID NO: 118540 - DNA, 15 bp, Homo sapiens
ttcctggaataaaca

SEQ ID NO: 118541 - DNA, 15 bp, Homo sapiens
gttcctggaataaac

SEQ ID NO: 118542 - DNA, 15 bp, Homo sapiens
agttcctggaataaa

SEQ ID NO: 118543 - DNA, 15 bp, Homo sapiens
cagttcctggaataa

SEQ ID NO: 118544 - DNA, 15 bp, Homo sapiens
acagttcctggaata

SEQ ID NO: 118545 - DNA, 15 bp, Homo sapiens
gacagttcctggaat

SEQ ID NO: 118546 - DNA, 15 bp, Homo sapiens
agacagttcctggaa

SEQ ID NO: 118547 - DNA, 15 bp, Homo sapiens
cagacagttcctgga

SEQ ID NO: 118548 - DNA, 15 bp, Homo sapiens
ccagacagttcctgg

SEQ ID NO: 118549 - DNA, 15 bp, Homo sapiens
accagacagttcctg

SEQ ID NO: 118550 - DNA, 15 bp, Homo sapiens
aaccagacagttcct

SEQ ID NO: 118551 - DNA, 15 bp, Homo sapiens
caaccagacagttcc

SEQ ID NO: 118552 - DNA, 15 bp, Homo sapiens
gcaaccagacagttc

SEQ ID NO: 118553 - DNA, 15 bp, Homo sapiens
agcaaccagacagtt

SEQ ID NO: 118554 - DNA, 15 bp, Homo sapiens
cagcaaccagacagt

SEQ ID NO: 118555 - DNA, 15 bp, Homo sapiens
ccagcaaccagacag

SEQ ID NO: 118556 - DNA, 15 bp, Homo sapiens
tccagcaaccagaca

SEQ ID NO: 118557 - DNA, 15 bp, Homo sapiens
ttccagcaaccagac

SEQ ID NO: 118558 - DNA, 15 bp, Homo sapiens
attccagcaaccaga

SEQ ID NO: 118559 - DNA, 15 bp, Homo sapiens
cattccagcaaccag

SEQ ID NO: 118560 - DNA, 15 bp, Homo sapiens
acattccagcaacca

SEQ ID NO: 118561 - DNA, 15 bp, Homo sapiens
gacattccagcaacc

SEQ ID NO: 118562 - DNA, 15 bp, Homo sapiens
agacattccagcaac

SEQ ID NO: 118563 - DNA, 15 bp, Homo sapiens
cagacattccagcaa

SEQ ID NO: 118564 - DNA, 15 bp, Homo sapiens
acagacattccagca

SEQ ID NO: 118565 - DNA, 15 bp, Homo sapiens
cacagacattccagc

SEQ ID NO: 118566 - DNA, 15 bp, Homo sapiens
ccacagacattccag

SEQ ID NO: 118567 - DNA, 15 bp, Homo sapiens
gccacagacattcca

SEQ ID NO: 118568 - DNA, 15 bp, Homo sapiens
agccacagacattcc

SEQ ID NO: 118569 - DNA, 15 bp, Homo sapiens
cagccacagacattc

SEQ ID NO: 118570 - DNA, 15 bp, Homo sapiens
acagccacagacatt

SEQ ID NO: 118571 - DNA, 15 bp, Homo sapiens
gacagccacagacat

SEQ ID NO: 118572 - DNA, 15 bp, Homo sapiens
ggacagccacagaca

SEQ ID NO: 118573 - DNA, 15 bp, Homo sapiens
tggacagccacagac

SEQ ID NO: 118574 - DNA, 15 bp, Homo sapiens
ttggacagccacaga

SEQ ID NO: 118575 - DNA, 15 bp, Homo sapiens
tttggacagccacag

SEQ ID NO: 118576 - DNA, 15 bp, Homo sapiens
atttggacagccaca

SEQ ID NO: 118577 - DNA, 15 bp, Homo sapiens
catttggacagccac

SEQ ID NO: 118578 - DNA, 15 bp, Homo sapiens
tcatttggacagcca

SEQ ID NO: 118579 - DNA, 15 bp, Homo sapiens
ctcatttggacagcc

SEQ ID NO: 118580 - DNA, 15 bp, Homo sapiens
cctcatttggacagc

SEQ ID NO: 118581 - DNA, 15 bp, Homo sapiens
acctcatttggacag

SEQ ID NO: 118582 - DNA, 15 bp, Homo sapiens
gacctcatttggaca

SEQ ID NO: 118583 - DNA, 15 bp, Homo sapiens
tgacctcatttggac

SEQ ID NO: 118584 - DNA, 15 bp, Homo sapiens
ttgacctcatttgga

SEQ ID NO: 118585 - DNA, 15 bp, Homo sapiens
tttgacctcatttgg

SEQ ID NO: 118586 - DNA, 15 bp, Homo sapiens
gtttgacctcatttg

SEQ ID NO: 118587 - DNA, 15 bp, Homo sapiens
agtttgacctcattt

SEQ ID NO: 118588 - DNA, 15 bp, Homo sapiens
gagtttgacctcatt

SEQ ID NO: 118589 - DNA, 15 bp, Homo sapiens
ggagtttgacctcat

SEQ ID NO: 118590 - DNA, 15 bp, Homo sapiens
tggagtttgacctca

SEQ ID NO: 118591 - DNA, 15 bp, Homo sapiens
ctggagtttgacctc

SEQ ID NO: 118592 - DNA, 15 bp, Homo sapiens
gctggagtttgacct

SEQ ID NO: 118593 - DNA, 15 bp, Homo sapiens
agctggagtttgacc

SEQ ID NO: 118594 - DNA, 15 bp, Homo sapiens
tagctggagtttgac

SEQ ID NO: 118595 - DNA, 15 bp, Homo sapiens
ttagctggagtttga

SEQ ID NO: 118596 - DNA, 15 bp, Homo sapiens
tttagctggagtttg

SEQ ID NO: 118597 - DNA, 15 bp, Homo sapiens
gtttagctggagttt

SEQ ID NO: 118598 - DNA, 15 bp, Homo sapiens
tgtttagctggagtt

SEQ ID NO: 118599 - DNA, 15 bp, Homo sapiens
ctgtttagctggagt

SEQ ID NO: 118600 - DNA, 15 bp, Homo sapiens
cctgtttagctggag

SEQ ID NO: 118601 - DNA, 15 bp, Homo sapiens
ccctgtttagctgga

SEQ ID NO: 118602 - DNA, 15 bp, Homo sapiens
tccctgtttagctgg

SEQ ID NO: 118603 - DNA, 15 bp, Homo sapiens
ttccctgtttagctg

SEQ ID NO: 118604 - DNA, 15 bp, Homo sapiens
tttccctgtttagct

SEQ ID NO: 118605 - DNA, 15 bp, Homo sapiens
ttttccctgtttagc

SEQ ID NO: 118606 - DNA, 15 bp, Homo sapiens
cttttccctgtttag

SEQ ID NO: 118607 - DNA, 15 bp, Homo sapiens
tcttttccctgttta

SEQ ID NO: 118608 - DNA, 15 bp, Homo sapiens
ttcttttccctgttt

SEQ ID NO: 118609 - DNA, 15 bp, Homo sapiens
cttcttttccctgtt

SEQ ID NO: 118610 - DNA, 15 bp, Homo sapiens
ccttcttttccctgt

SEQ ID NO: 118611 - DNA, 15 bp, Homo sapiens
cccttcttttccctg

SEQ ID NO: 118612 - DNA, 15 bp, Homo sapiens
acccttcttttccct

SEQ ID NO: 118613 - DNA, 15 bp, Homo sapiens
aacccttcttttccc

SEQ ID NO: 118614 - DNA, 15 bp, Homo sapiens
gaacccttcttttcc

SEQ ID NO: 118615 - DNA, 15 bp, Homo sapiens
agaacccttcttttc

SEQ ID NO: 118616 - DNA, 15 bp, Homo sapiens
aagaacccttctttt

SEQ ID NO: 118617 - DNA, 15 bp, Homo sapiens
aaagaacccttcttt

SEQ ID NO: 118618 - DNA, 15 bp, Homo sapiens
caaagaacccttctt

SEQ ID NO: 118619 - DNA, 15 bp, Homo sapiens
gcaaagaacccttct

SEQ ID NO: 118620 - DNA, 15 bp, Homo sapiens
ggcaaagaacccttc

SEQ ID NO: 118621 - DNA, 15 bp, Homo sapiens
tggcaaagaaccctt

SEQ ID NO: 118622 - DNA, 15 bp, Homo sapiens
gtggcaaagaaccct

SEQ ID NO: 118623 - DNA, 15 bp, Homo sapiens
tgtggcaaagaaccc

SEQ ID NO: 118624 - DNA, 15 bp, Homo sapiens
ttgtggcaaagaacc

SEQ ID NO: 118625 - DNA, 15 bp, Homo sapiens
gttgtggcaaagaac

SEQ ID NO: 118626 - DNA, 15 bp, Homo sapiens
tgttgtggcaaagaa

SEQ ID NO: 118627 - DNA, 15 bp, Homo sapiens
gtgttgtggcaaaga

SEQ ID NO: 118628 - DNA, 15 bp, Homo sapiens
agtgttgtggcaaag

SEQ ID NO: 118629 - DNA, 15 bp, Homo sapiens
aagtgttgtggcaaa

SEQ ID NO: 118630 - DNA, 15 bp, Homo sapiens
gaagtgttgtggcaa

SEQ ID NO: 118631 - DNA, 15 bp, Homo sapiens
agaagtgttgtggca

SEQ ID NO: 118632 - DNA, 15 bp, Homo sapiens
gagaagtgttgtggc

SEQ ID NO: 118633 - DNA, 15 bp, Homo sapiens
ggagaagtgttgtgg

SEQ ID NO: 118634 - DNA, 15 bp, Homo sapiens
tggagaagtgttgtg

SEQ ID NO: 118635 - DNA, 15 bp, Homo sapiens
gtggagaagtgttgt

SEQ ID NO: 118636 - DNA, 15 bp, Homo sapiens
cgtggagaagtgttg

SEQ ID NO: 118637 - DNA, 15 bp, Homo sapiens
acgtggagaagtgtt

SEQ ID NO: 118638 - DNA, 15 bp, Homo sapiens
gacgtggagaagtgt

SEQ ID NO: 118639 - DNA, 15 bp, Homo sapiens
ggacgtggagaagtg

SEQ ID NO: 118640 - DNA, 15 bp, Homo sapiens
gggacgtggagaagt

SEQ ID NO: 118641 - DNA, 15 bp, Homo sapiens
agggacgtggagaag

SEQ ID NO: 118642 - DNA, 15 bp, Homo sapiens
tagggacgtggagaa

SEQ ID NO: 118643 - DNA, 15 bp, Homo sapiens
ttagggacgtggaga

SEQ ID NO: 118644 - DNA, 15 bp, Homo sapiens
tttagggacgtggag

SEQ ID NO: 118645 - DNA, 15 bp, Homo sapiens
gtttagggacgtgga

SEQ ID NO: 118646 - DNA, 15 bp, Homo sapiens
ggtttagggacgtgg

SEQ ID NO: 118647 - DNA, 15 bp, Homo sapiens
gggtttagggacgtg

SEQ ID NO: 118648 - DNA, 15 bp, Homo sapiens
ggggtttagggacgt

SEQ ID NO: 118649 - DNA, 15 bp, Homo sapiens
aggggtttagggacg

SEQ ID NO: 118650 - DNA, 15 bp, Homo sapiens
taggggtttagggac

SEQ ID NO: 118651 - DNA, 15 bp, Homo sapiens
gtaggggtttaggga

SEQ ID NO: 118652 - DNA, 15 bp, Homo sapiens
agtaggggtttaggg

SEQ ID NO: 118653 - DNA, 15 bp, Homo sapiens
gagtaggggtttagg

SEQ ID NO: 118654 - DNA, 15 bp, Homo sapiens
ggagtaggggtttag

SEQ ID NO: 118655 - DNA, 15 bp, Homo sapiens
aggagtaggggttta

SEQ ID NO: 118656 - DNA, 15 bp, Homo sapiens
caggagtaggggttt

SEQ ID NO: 118657 - DNA, 15 bp, Homo sapiens
ccaggagtaggggtt

SEQ ID NO: 118658 - DNA, 15 bp, Homo sapiens
cccaggagtaggggt

SEQ ID NO: 118659 - DNA, 15 bp, Homo sapiens
gcccaggagtagggg

SEQ ID NO: 118660 - DNA, 15 bp, Homo sapiens
tgcccaggagtaggg

SEQ ID NO: 118661 - DNA, 15 bp, Homo sapiens
ctgcccaggagtagg

SEQ ID NO: 118662 - DNA, 15 bp, Homo sapiens
gctgcccaggagtag

SEQ ID NO: 118663 - DNA, 15 bp, Homo sapiens
ggctgcccaggagta

SEQ ID NO: 118664 - DNA, 15 bp, Homo sapiens
aggctgcccaggagt

SEQ ID NO: 118665 - DNA, 15 bp, Homo sapiens
taggctgcccaggag

SEQ ID NO: 118666 - DNA, 15 bp, Homo sapiens
ctaggctgcccagga

SEQ ID NO: 118667 - DNA, 15 bp, Homo sapiens
gctaggctgcccagg

SEQ ID NO: 118668 - DNA, 15 bp, Homo sapiens
agctaggctgcccag

SEQ ID NO: 118669 - DNA, 15 bp, Homo sapiens
aagctaggctgccca

SEQ ID NO: 118670 - DNA, 15 bp, Homo sapiens
caagctaggctgccc

SEQ ID NO: 118671 - DNA, 15 bp, Homo sapiens
ccaagctaggctgcc

SEQ ID NO: 118672 - DNA, 15 bp, Homo sapiens
accaagctaggctgc

SEQ ID NO: 118673 - DNA, 15 bp, Homo sapiens
gaccaagctaggctg

SEQ ID NO: 118674 - DNA, 15 bp, Homo sapiens
agaccaagctaggct

SEQ ID NO: 118675 - DNA, 15 bp, Homo sapiens
cagaccaagctaggc

SEQ ID NO: 118676 - DNA, 15 bp, Homo sapiens
ccagaccaagctagg

SEQ ID NO: 118677 - DNA, 15 bp, Homo sapiens
accagaccaagctag

SEQ ID NO: 118678 - DNA, 15 bp, Homo sapiens
aaccagaccaagcta

SEQ ID NO: 118679 - DNA, 15 bp, Homo sapiens
gaaccagaccaagct

SEQ ID NO: 118680 - DNA, 15 bp, Homo sapiens
agaaccagaccaagc

SEQ ID NO: 118681 - DNA, 15 bp, Homo sapiens
cagaaccagaccaag

SEQ ID NO: 118682 - DNA, 15 bp, Homo sapiens
acagaaccagaccaa

SEQ ID NO: 118683 - DNA, 15 bp, Homo sapiens
gacagaaccagacca

SEQ ID NO: 118684 - DNA, 15 bp, Homo sapiens
agacagaaccagacc

SEQ ID NO: 118685 - DNA, 15 bp, Homo sapiens
cagacagaaccagac

SEQ ID NO: 118686 - DNA, 15 bp, Homo sapiens
ccagacagaaccaga

SEQ ID NO: 118687 - DNA, 15 bp, Homo sapiens
gccagacagaaccag

SEQ ID NO: 118688 - DNA, 15 bp, Homo sapiens
agccagacagaacca

SEQ ID NO: 118689 - DNA, 15 bp, Homo sapiens
aagccagacagaacc

SEQ ID NO: 118690 - DNA, 15 bp, Homo sapiens
aaagccagacagaac

SEQ ID NO: 118691 - DNA, 15 bp, Homo sapiens
aaaagccagacagaa

SEQ ID NO: 118692 - DNA, 15 bp, Homo sapiens
taaaagccagacaga

SEQ ID NO: 118693 - DNA, 15 bp, Homo sapiens
ttaaaagccagacag

SEQ ID NO: 118694 - DNA, 15 bp, Homo sapiens
gttaaaagccagaca

SEQ ID NO: 118695 - DNA, 15 bp, Homo sapiens
agttaaaagccagac

SEQ ID NO: 118696 - DNA, 15 bp, Homo sapiens
cagttaaaagccaga

SEQ ID NO: 118697 - DNA, 15 bp, Homo sapiens
ccagttaaaagccag

SEQ ID NO: 118698 - DNA, 15 bp, Homo sapiens
tccagttaaaagcca

SEQ ID NO: 118699 - DNA, 15 bp, Homo sapiens
ttccagttaaaagcc

SEQ ID NO: 118700 - DNA, 15 bp, Homo sapiens
gttccagttaaaagc

SEQ ID NO: 118701 - DNA, 15 bp, Homo sapiens
tgttccagttaaaag

SEQ ID NO: 118702 - DNA, 15 bp, Homo sapiens
atgttccagttaaaa

SEQ ID NO: 118703 - DNA, 15 bp, Homo sapiens
tatgttccagttaaa

SEQ ID NO: 118704 - DNA, 15 bp, Homo sapiens
ctatgttccagttaa

SEQ ID NO: 118705 - DNA, 15 bp, Homo sapiens
gctatgttccagtta

SEQ ID NO: 118706 - DNA, 15 bp, Homo sapiens
agctatgttccagtt

SEQ ID NO: 118707 - DNA, 15 bp, Homo sapiens
gagctatgttccagt

SEQ ID NO: 118708 - DNA, 15 bp, Homo sapiens
agagctatgttccag

SEQ ID NO: 118709 - DNA, 15 bp, Homo sapiens
gagagctatgttcca

SEQ ID NO: 118710 - DNA, 15 bp, Homo sapiens
ggagagctatgttcc

SEQ ID NO: 118711 - DNA, 15 bp, Homo sapiens
aggagagctatgttc

SEQ ID NO: 118712 - DNA, 15 bp, Homo sapiens
aaggagagctatgtt

SEQ ID NO: 118713 - DNA, 15 bp, Homo sapiens
caaggagagctatgt

SEQ ID NO: 118714 - DNA, 15 bp, Homo sapiens
ccaaggagagctatg

SEQ ID NO: 118715 - DNA, 15 bp, Homo sapiens
gccaaggagagctat

SEQ ID NO: 118716 - DNA, 15 bp, Homo sapiens
agccaaggagagcta

SEQ ID NO: 118717 - DNA, 15 bp, Homo sapiens
aagccaaggagagct

SEQ ID NO: 118718 - DNA, 15 bp, Homo sapiens
aaagccaaggagagc

SEQ ID NO: 118719 - DNA, 15 bp, Homo sapiens
caaagccaaggagag

SEQ ID NO: 118720 - DNA, 15 bp, Homo sapiens
acaaagccaaggaga

SEQ ID NO: 118721 - DNA, 15 bp, Homo sapiens
tacaaagccaaggag

SEQ ID NO: 118722 - DNA, 15 bp, Homo sapiens
ttacaaagccaagga

SEQ ID NO: 118723 - DNA, 15 bp, Homo sapiens
gttacaaagccaagg

SEQ ID NO: 118724 - DNA, 15 bp, Homo sapiens
agttacaaagccaag

SEQ ID NO: 118725 - DNA, 15 bp, Homo sapiens
aagttacaaagccaa

SEQ ID NO: 118726 - DNA, 15 bp, Homo sapiens
taagttacaaagcca

SEQ ID NO: 118727 - DNA, 15 bp, Homo sapiens
ctaagttacaaagcc

SEQ ID NO: 118728 - DNA, 15 bp, Homo sapiens
tctaagttacaaagc

SEQ ID NO: 118729 - DNA, 15 bp, Homo sapiens
ctctaagttacaaag

SEQ ID NO: 118730 - DNA, 15 bp, Homo sapiens
gctctaagttacaaa

SEQ ID NO: 118731 - DNA, 15 bp, Homo sapiens
ggctctaagttacaa

SEQ ID NO: 118732 - DNA, 15 bp, Homo sapiens
tggctctaagttaca

SEQ ID NO: 118733 - DNA, 15 bp, Homo sapiens
atggctctaagttac

SEQ ID NO: 118734 - DNA, 15 bp, Homo sapiens
aatggctctaagtta

SEQ ID NO: 118735 - DNA, 15 bp, Homo sapiens
gaatggctctaagtt

SEQ ID NO: 118736 - DNA, 15 bp, Homo sapiens
ggaatggctctaagt

SEQ ID NO: 118737 - DNA, 15 bp, Homo sapiens
gggaatggctctaag

SEQ ID NO: 118738 - DNA, 15 bp, Homo sapiens
ggggaatggctctaa

SEQ ID NO: 118739 - DNA, 15 bp, Homo sapiens
tggggaatggctcta

SEQ ID NO: 118740 - DNA, 15 bp, Homo sapiens
ctggggaatggctct

SEQ ID NO: 118741 - DNA, 15 bp, Homo sapiens
cctggggaatggctc

SEQ ID NO: 118742 - DNA, 15 bp, Homo sapiens
acctggggaatggct

SEQ ID NO: 118743 - DNA, 15 bp, Homo sapiens
tacctggggaatggc

SEQ ID NO: 118744 - DNA, 15 bp, Homo sapiens
gtacctggggaatgg

SEQ ID NO: 118745 - DNA, 15 bp, Homo sapiens
tgtacctggggaatg

SEQ ID NO: 118746 - DNA, 15 bp, Homo sapiens
ctgtacctggggaat

SEQ ID NO: 118747 - DNA, 15 bp, Homo sapiens
tctgtacctggggaa

SEQ ID NO: 118748 - DNA, 15 bp, Homo sapiens
ttctgtacctgggga

SEQ ID NO: 118749 - DNA, 15 bp, Homo sapiens
attctgtacctgggg

SEQ ID NO: 118750 - DNA, 15 bp, Homo sapiens
tattctgtacctggg

SEQ ID NO: 118751 - DNA, 15 bp, Homo sapiens
ctattctgtacctgg

SEQ ID NO: 118752 - DNA, 15 bp, Homo sapiens
tctattctgtacctg

SEQ ID NO: 118753 - DNA, 15 bp, Homo sapiens
ttctattctgtacct

SEQ ID NO: 118754 - DNA, 15 bp, Homo sapiens
attctattctgtacc

SEQ ID NO: 118755 - DNA, 15 bp, Homo sapiens
aattctattctgtac

SEQ ID NO: 118756 - DNA, 15 bp, Homo sapiens
gaattctattctgta

SEQ ID NO: 118757 - DNA, 15 bp, Homo sapiens
tgaattctattctgt

SEQ ID NO: 118758 - DNA, 15 bp, Homo sapiens
atgaattctattctg

SEQ ID NO: 118759 - DNA, 15 bp, Homo sapiens
aatgaattctattct

SEQ ID NO: 118760 - DNA, 15 bp, Homo sapiens
caatgaattctattc

SEQ ID NO: 118761 - DNA, 15 bp, Homo sapiens
gcaatgaattctatt

SEQ ID NO: 118762 - DNA, 15 bp, Homo sapiens
agcaatgaattctat

SEQ ID NO: 118763 - DNA, 15 bp, Homo sapiens
aagcaatgaattcta

SEQ ID NO: 118764 - DNA, 15 bp, Homo sapiens
aaagcaatgaattct

SEQ ID NO: 118765 - DNA, 15 bp, Homo sapiens
aaaagcaatgaattc

SEQ ID NO: 118766 - DNA, 15 bp, Homo sapiens
aaaaagcaatgaatt

SEQ ID NO: 118767 - DNA, 15 bp, Homo sapiens
aaaaaagcaatgaat

SEQ ID NO: 118768 - DNA, 15 bp, Homo sapiens
gaaaaaagcaatgaa

SEQ ID NO: 118769 - DNA, 15 bp, Homo sapiens
agaaaaaagcaatga

SEQ ID NO: 118770 - DNA, 15 bp, Homo sapiens
cagaaaaaagcaatg

SEQ ID NO: 118771 - DNA, 15 bp, Homo sapiens
tcagaaaaaagcaat

SEQ ID NO: 118772 - DNA, 15 bp, Homo sapiens
ctcagaaaaaagcaa

SEQ ID NO: 118773 - DNA, 15 bp, Homo sapiens
actcagaaaaaagca

SEQ ID NO: 118774 - DNA, 15 bp, Homo sapiens
cactcagaaaaaagc

SEQ ID NO: 118775 - DNA, 15 bp, Homo sapiens
acactcagaaaaaag

SEQ ID NO: 118776 - DNA, 15 bp, Homo sapiens
cacactcagaaaaaa

SEQ ID NO: 118777 - DNA, 15 bp, Homo sapiens
acacactcagaaaaa

SEQ ID NO: 118778 - DNA, 15 bp, Homo sapiens
gacacactcagaaaa

SEQ ID NO: 118779 - DNA, 15 bp, Homo sapiens
ggacacactcagaaa

SEQ ID NO: 118780 - DNA, 15 bp, Homo sapiens
aggacacactcagaa

SEQ ID NO: 118781 - DNA, 15 bp, Homo sapiens
aaggacacactcaga

SEQ ID NO: 118782 - DNA, 15 bp, Homo sapiens
aaaggacacactcag

SEQ ID NO: 118783 - DNA, 15 bp, Homo sapiens
aaaaggacacactca

SEQ ID NO: 118784 - DNA, 15 bp, Homo sapiens
aaaaaggacacactc

SEQ ID NO: 118785 - DNA, 15 bp, Homo sapiens
caaaaaggacacact

SEQ ID NO: 118786 - DNA, 15 bp, Homo sapiens
ccaaaaaggacacac

SEQ ID NO: 118787 - DNA, 15 bp, Homo sapiens
cccaaaaaggacaca

SEQ ID NO: 118788 - DNA, 15 bp, Homo sapiens
gcccaaaaaggacac

SEQ ID NO: 118789 - DNA, 15 bp, Homo sapiens
tgcccaaaaaggaca

SEQ ID NO: 118790 - DNA, 15 bp, Homo sapiens
ttgcccaaaaaggac

SEQ ID NO: 118791 - DNA, 15 bp, Homo sapiens
cttgcccaaaaagga

SEQ ID NO: 118792 - DNA, 15 bp, Homo sapiens
ccttgcccaaaaagg

SEQ ID NO: 118793 - DNA, 15 bp, Homo sapiens
gccttgcccaaaaag

SEQ ID NO: 118794 - DNA, 15 bp, Homo sapiens
agccttgcccaaaaa

SEQ ID NO: 118795 - DNA, 15 bp, Homo sapiens
aagccttgcccaaaa

SEQ ID NO: 118796 - DNA, 15 bp, Homo sapiens
gaagccttgcccaaa

SEQ ID NO: 118797 - DNA, 15 bp, Homo sapiens
ggaagccttgcccaa

SEQ ID NO: 118798 - DNA, 15 bp, Homo sapiens
tggaagccttgccca

SEQ ID NO: 118799 - DNA, 15 bp, Homo sapiens
atggaagccttgccc

SEQ ID NO: 118800 - DNA, 15 bp, Homo sapiens
aatggaagccttgcc

SEQ ID NO: 118801 - DNA, 15 bp, Homo sapiens
aaatggaagccttgc

SEQ ID NO: 118802 - DNA, 15 bp, Homo sapiens
aaaatggaagccttg

SEQ ID NO: 118803 - DNA, 15 bp, Homo sapiens
taaaatggaagcctt

SEQ ID NO: 118804 - DNA, 15 bp, Homo sapiens
ttaaaatggaagcct

SEQ ID NO: 118805 - DNA, 15 bp, Homo sapiens
tttaaaatggaagcc

SEQ ID NO: 118806 - DNA, 15 bp, Homo sapiens
ttttaaaatggaagc

SEQ ID NO: 118807 - DNA, 15 bp, Homo sapiens
gttttaaaatggaag

SEQ ID NO: 118808 - DNA, 15 bp, Homo sapiens
tgttttaaaatggaa

SEQ ID NO: 118809 - DNA, 15 bp, Homo sapiens
atgttttaaaatgga

SEQ ID NO: 118810 - DNA, 15 bp, Homo sapiens
catgttttaaaatgg

SEQ ID NO: 118811 - DNA, 15 bp, Homo sapiens
gcatgttttaaaatg

SEQ ID NO: 118812 - DNA, 15 bp, Homo sapiens
agcatgttttaaaat

SEQ ID NO: 118813 - DNA, 15 bp, Homo sapiens
cagcatgttttaaaa

SEQ ID NO: 118814 - DNA, 15 bp, Homo sapiens
gcagcatgttttaaa

SEQ ID NO: 118815 - DNA, 15 bp, Homo sapiens
ggcagcatgttttaa

SEQ ID NO: 118816 - DNA, 15 bp, Homo sapiens
aggcagcatgtttta

SEQ ID NO: 118817 - DNA, 15 bp, Homo sapiens
aaggcagcatgtttt

SEQ ID NO: 118818 - DNA, 15 bp, Homo sapiens
aaaggcagcatgttt

SEQ ID NO: 118819 - DNA, 15 bp, Homo sapiens
caaaggcagcatgtt

SEQ ID NO: 118820 - DNA, 15 bp, Homo sapiens
ccaaaggcagcatgt

SEQ ID NO: 118821 - DNA, 15 bp, Homo sapiens
gccaaaggcagcatg

SEQ ID NO: 118822 - DNA, 15 bp, Homo sapiens
agccaaaggcagcat

SEQ ID NO: 118823 - DNA, 15 bp, Homo sapiens
aagccaaaggcagca

SEQ ID NO: 118824 - DNA, 15 bp, Homo sapiens
gaagccaaaggcagc

SEQ ID NO: 118825 - DNA, 15 bp, Homo sapiens
tgaagccaaaggcag

SEQ ID NO: 118826 - DNA, 15 bp, Homo sapiens
ctgaagccaaaggca

SEQ ID NO: 118827 - DNA, 15 bp, Homo sapiens
gctgaagccaaaggc

SEQ ID NO: 118828 - DNA, 15 bp, Homo sapiens
agctgaagccaaagg

SEQ ID NO: 118829 - DNA, 15 bp, Homo sapiens
aagctgaagccaaag

SEQ ID NO: 118830 - DNA, 15 bp, Homo sapiens
caagctgaagccaaa

SEQ ID NO: 118831 - DNA, 15 bp, Homo sapiens
ccaagctgaagccaa

SEQ ID NO: 118832 - DNA, 15 bp, Homo sapiens
accaagctgaagcca

SEQ ID NO: 118833 - DNA, 15 bp, Homo sapiens
caccaagctgaagcc

SEQ ID NO: 118834 - DNA, 15 bp, Homo sapiens
ccaccaagctgaagc

SEQ ID NO: 118835 - DNA, 15 bp, Homo sapiens
tccaccaagctgaag

SEQ ID NO: 118836 - DNA, 15 bp, Homo sapiens
atccaccaagctgaa

SEQ ID NO: 118837 - DNA, 15 bp, Homo sapiens
aatccaccaagctga

SEQ ID NO: 118838 - DNA, 15 bp, Homo sapiens
gaatccaccaagctg

SEQ ID NO: 118839 - DNA, 15 bp, Homo sapiens
ggaatccaccaagct

SEQ ID NO: 118840 - DNA, 15 bp, Homo sapiens
aggaatccaccaagc

SEQ ID NO: 118841 - DNA, 15 bp, Homo sapiens
aaggaatccaccaag

SEQ ID NO: 118842 - DNA, 15 bp, Homo sapiens
caaggaatccaccaa

SEQ ID NO: 118843 - DNA, 15 bp, Homo sapiens
ccaaggaatccacca

SEQ ID NO: 118844 - DNA, 15 bp, Homo sapiens
gccaaggaatccacc

SEQ ID NO: 118845 - DNA, 15 bp, Homo sapiens
agccaaggaatccac

SEQ ID NO: 118846 - DNA, 15 bp, Homo sapiens
cagccaaggaatcca

SEQ ID NO: 118847 - DNA, 15 bp, Homo sapiens
gcagccaaggaatcc

SEQ ID NO: 118848 - DNA, 15 bp, Homo sapiens
ggcagccaaggaatc

SEQ ID NO: 118849 - DNA, 15 bp, Homo sapiens
tggcagccaaggaat

SEQ ID NO: 118850 - DNA, 15 bp, Homo sapiens
ttggcagccaaggaa

SEQ ID NO: 118851 - DNA, 15 bp, Homo sapiens
cttggcagccaagga

SEQ ID NO: 118852 - DNA, 15 bp, Homo sapiens
tcttggcagccaagg

SEQ ID NO: 118853 - DNA, 15 bp, Homo sapiens
atcttggcagccaag

SEQ ID NO: 118854 - DNA, 15 bp, Homo sapiens
aatcttggcagccaa

SEQ ID NO: 118855 - DNA, 15 bp, Homo sapiens
aaatcttggcagcca

SEQ ID NO: 118856 - DNA, 15 bp, Homo sapiens
aaaatcttggcagcc

SEQ ID NO: 118857 - DNA, 15 bp, Homo sapiens
caaaatcttggcagc

SEQ ID NO: 118858 - DNA, 15 bp, Homo sapiens
ccaaaatcttggcag

SEQ ID NO: 118859 - DNA, 15 bp, Homo sapiens
accaaaatcttggca

SEQ ID NO: 118860 - DNA, 15 bp, Homo sapiens
aaccaaaatcttggc

SEQ ID NO: 118861 - DNA, 15 bp, Homo sapiens
taaccaaaatcttgg

SEQ ID NO: 118862 - DNA, 15 bp, Homo sapiens
ttaaccaaaatcttg

SEQ ID NO: 118863 - DNA, 15 bp, Homo sapiens
cttaaccaaaatctt

SEQ ID NO: 118864 - DNA, 15 bp, Homo sapiens
ccttaaccaaaatct

SEQ ID NO: 118865 - DNA, 15 bp, Homo sapiens
accttaaccaaaatc

SEQ ID NO: 118866 - DNA, 15 bp, Homo sapiens
caccttaaccaaaat

SEQ ID NO: 118867 - DNA, 15 bp, Homo sapiens
ccaccttaaccaaaa

SEQ ID NO: 118868 - DNA, 15 bp, Homo sapiens
tccaccttaaccaaa

SEQ ID NO: 118869 - DNA, 15 bp, Homo sapiens
ttccaccttaaccaa

SEQ ID NO: 118870 - DNA, 15 bp, Homo sapiens
tttccaccttaacca

SEQ ID NO: 118871 - DNA, 15 bp, Homo sapiens
ctttccaccttaacc

SEQ ID NO: 118872 - DNA, 15 bp, Homo sapiens
cctttccaccttaac

SEQ ID NO: 118873 - DNA, 15 bp, Homo sapiens
acctttccaccttaa

SEQ ID NO: 118874 - DNA, 15 bp, Homo sapiens
aacctttccacctta

SEQ ID NO: 118875 - DNA, 15 bp, Homo sapiens
taacctttccacctt

SEQ ID NO: 118876 - DNA, 15 bp, Homo sapiens
ataacctttccacct

SEQ ID NO: 118877 - DNA, 15 bp, Homo sapiens
aataacctttccacc

SEQ ID NO: 118878 - DNA, 15 bp, Homo sapiens
taataacctttccac

SEQ ID NO: 118879 - DNA, 15 bp, Homo sapiens
gtaataacctttcca

SEQ ID NO: 118880 - DNA, 15 bp, Homo sapiens
tgtaataacctttcc

SEQ ID NO: 118881 - DNA, 15 bp, Homo sapiens
ctgtaataacctttc

SEQ ID NO: 118882 - DNA, 15 bp, Homo sapiens
tctgtaataaccttt

SEQ ID NO: 118883 - DNA, 15 bp, Homo sapiens
ttctgtaataacctt

SEQ ID NO: 118884 - DNA, 15 bp, Homo sapiens
cttctgtaataacct

SEQ ID NO: 118885 - DNA, 15 bp, Homo sapiens
acttctgtaataacc

SEQ ID NO: 118886 - DNA, 15 bp, Homo sapiens
cacttctgtaataac

SEQ ID NO: 118887 - DNA, 15 bp, Homo sapiens
tcacttctgtaataa

SEQ ID NO: 118888 - DNA, 15 bp, Homo sapiens
ttcacttctgtaata

SEQ ID NO: 118889 - DNA, 15 bp, Homo sapiens
tttcacttctgtaat

SEQ ID NO: 118890 - DNA, 15 bp, Homo sapiens
ttttcacttctgtaa

SEQ ID NO: 118891 - DNA, 15 bp, Homo sapiens
gttttcacttctgta

SEQ ID NO: 118892 - DNA, 15 bp, Homo sapiens
tgttttcacttctgt

SEQ ID NO: 118893 - DNA, 15 bp, Homo sapiens
ttgttttcacttctg

SEQ ID NO: 118894 - DNA, 15 bp, Homo sapiens
attgttttcacttct

SEQ ID NO: 118895 - DNA, 15 bp, Homo sapiens
cattgttttcacttc

SEQ ID NO: 118896 - DNA, 15 bp, Homo sapiens
tcattgttttcactt

SEQ ID NO: 118897 - DNA, 15 bp, Homo sapiens
ttcattgttttcact

SEQ ID NO: 118898 - DNA, 15 bp, Homo sapiens
attcattgttttcac

SEQ ID NO: 118899 - DNA, 15 bp, Homo sapiens
gattcattgttttca

SEQ ID NO: 118900 - DNA, 15 bp, Homo sapiens
agattcattgttttc

SEQ ID NO: 118901 - DNA, 15 bp, Homo sapiens
gagattcattgtttt

SEQ ID NO: 118902 - DNA, 15 bp, Homo sapiens
tgagattcattgttt

SEQ ID NO: 118903 - DNA, 15 bp, Homo sapiens
gtgagattcattgtt

SEQ ID NO: 118904 - DNA, 15 bp, Homo sapiens
tgtgagattcattgt

SEQ ID NO: 118905 - DNA, 15 bp, Homo sapiens
ctgtgagattcattg

SEQ ID NO: 118906 - DNA, 15 bp, Homo sapiens
actgtgagattcatt

SEQ ID NO: 118907 - DNA, 15 bp, Homo sapiens
tactgtgagattcat

SEQ ID NO: 118908 - DNA, 15 bp, Homo sapiens
ttactgtgagattca

SEQ ID NO: 118909 - DNA, 15 bp, Homo sapiens
attactgtgagattc

SEQ ID NO: 118910 - DNA, 15 bp, Homo sapiens
aattactgtgagatt

SEQ ID NO: 118911 - DNA, 15 bp, Homo sapiens
caattactgtgagat

SEQ ID NO: 118912 - DNA, 15 bp, Homo sapiens
ccaattactgtgaga

SEQ ID NO: 118913 - DNA, 15 bp, Homo sapiens
gccaattactgtgag

SEQ ID NO: 118914 - DNA, 15 bp, Homo sapiens
tgccaattactgtga

SEQ ID NO: 118915 - DNA, 15 bp, Homo sapiens
atgccaattactgtg

SEQ ID NO: 118916 - DNA, 15 bp, Homo sapiens
gatgccaattactgt

SEQ ID NO: 118917 - DNA, 15 bp, Homo sapiens
tgatgccaattactg

SEQ ID NO: 118918 - DNA, 15 bp, Homo sapiens
gtgatgccaattact

SEQ ID NO: 118919 - DNA, 15 bp, Homo sapiens
agtgatgccaattac

SEQ ID NO: 118920 - DNA, 15 bp, Homo sapiens
aagtgatgccaatta

SEQ ID NO: 118921 - DNA, 15 bp, Homo sapiens
aaagtgatgccaatt

SEQ ID NO: 118922 - DNA, 15 bp, Homo sapiens
caaagtgatgccaat

SEQ ID NO: 118923 - DNA, 15 bp, Homo sapiens
tcaaagtgatgccaa

SEQ ID NO: 118924 - DNA, 15 bp, Homo sapiens
ctcaaagtgatgcca

SEQ ID NO: 118925 - DNA, 15 bp, Homo sapiens
cctcaaagtgatgcc

SEQ ID NO: 118926 - DNA, 15 bp, Homo sapiens
ccctcaaagtgatgc

SEQ ID NO: 118927 - DNA, 15 bp, Homo sapiens
gccctcaaagtgatg

SEQ ID NO: 118928 - DNA, 15 bp, Homo sapiens
ggccctcaaagtgat

SEQ ID NO: 118929 - DNA, 15 bp, Homo sapiens
aggccctcaaagtga

SEQ ID NO: 118930 - DNA, 15 bp, Homo sapiens
taggccctcaaagtg

SEQ ID NO: 118931 - DNA, 15 bp, Homo sapiens
gtaggccctcaaagt

SEQ ID NO: 118932 - DNA, 15 bp, Homo sapiens
ggtaggccctcaaag

SEQ ID NO: 118933 - DNA, 15 bp, Homo sapiens
gggtaggccctcaaa

SEQ ID NO: 118934 - DNA, 15 bp, Homo sapiens
tgggtaggccctcaa

SEQ ID NO: 118935 - DNA, 15 bp, Homo sapiens
atgggtaggccctca

SEQ ID NO: 118936 - DNA, 15 bp, Homo sapiens
catgggtaggccctc

SEQ ID NO: 118937 - DNA, 15 bp, Homo sapiens
ccatgggtaggccct

SEQ ID NO: 118938 - DNA, 15 bp, Homo sapiens
cccatgggtaggccc

SEQ ID NO: 118939 - DNA, 15 bp, Homo sapiens
ccccatgggtaggcc

SEQ ID NO: 118940 - DNA, 15 bp, Homo sapiens
tccccatgggtaggc

SEQ ID NO: 118941 - DNA, 15 bp, Homo sapiens
ttccccatgggtagg

SEQ ID NO: 118942 - DNA, 15 bp, Homo sapiens
attccccatgggtag

SEQ ID NO: 118943 - DNA, 15 bp, Homo sapiens
aattccccatgggta

SEQ ID NO: 118944 - DNA, 15 bp, Homo sapiens
gaattccccatgggt

SEQ ID NO: 118945 - DNA, 15 bp, Homo sapiens
ggaattccccatggg

SEQ ID NO: 118946 - DNA, 15 bp, Homo sapiens
tggaattccccatgg

SEQ ID NO: 118947 - DNA, 15 bp, Homo sapiens
atggaattccccatg

SEQ ID NO: 118948 - DNA, 15 bp, Homo sapiens
aatggaattccccat

SEQ ID NO: 118949 - DNA, 15 bp, Homo sapiens
caatggaattcccca

SEQ ID NO: 118950 - DNA, 15 bp, Homo sapiens
ccaatggaattcccc

SEQ ID NO: 118951 - DNA, 15 bp, Homo sapiens
cccaatggaattccc

SEQ ID NO: 118952 - DNA, 15 bp, Homo sapiens
acccaatggaattcc

SEQ ID NO: 118953 - DNA, 15 bp, Homo sapiens
aacccaatggaattc

SEQ ID NO: 118954 - DNA, 15 bp, Homo sapiens
caacccaatggaatt

SEQ ID NO: 118955 - DNA, 15 bp, Homo sapiens
ccaacccaatggaat

SEQ ID NO: 118956 - DNA, 15 bp, Homo sapiens
tccaacccaatggaa

SEQ ID NO: 118957 - DNA, 15 bp, Homo sapiens
gtccaacccaatgga

SEQ ID NO: 118958 - DNA, 15 bp, Homo sapiens
tgtccaacccaatgg

SEQ ID NO: 118959 - DNA, 15 bp, Homo sapiens
ctgtccaacccaatg

SEQ ID NO: 118960 - DNA, 15 bp, Homo sapiens
actgtccaacccaat

SEQ ID NO: 118961 - DNA, 15 bp, Homo sapiens
tactgtccaacccaa

SEQ ID NO: 118962 - DNA, 15 bp, Homo sapiens
ctactgtccaaccca

SEQ ID NO: 118963 - DNA, 15 bp, Homo sapiens
cctactgtccaaccc

SEQ ID NO: 118964 - DNA, 15 bp, Homo sapiens
tcctactgtccaacc

SEQ ID NO: 118965 - DNA, 15 bp, Homo sapiens
ctcctactgtccaac

SEQ ID NO: 118966 - DNA, 15 bp, Homo sapiens
actcctactgtccaa

SEQ ID NO: 118967 - DNA, 15 bp, Homo sapiens
tactcctactgtcca

SEQ ID NO: 118968 - DNA, 15 bp, Homo sapiens
gtactcctactgtcc

SEQ ID NO: 118969 - DNA, 15 bp, Homo sapiens
agtactcctactgtc

SEQ ID NO: 118970 - DNA, 15 bp, Homo sapiens
aagtactcctactgt

SEQ ID NO: 118971 - DNA, 15 bp, Homo sapiens
caagtactcctactg

SEQ ID NO: 118972 - DNA, 15 bp, Homo sapiens
ccaagtactcctact

SEQ ID NO: 118973 - DNA, 15 bp, Homo sapiens
cccaagtactcctac

SEQ ID NO: 118974 - DNA, 15 bp, Homo sapiens
acccaagtactccta

SEQ ID NO: 118975 - DNA, 15 bp, Homo sapiens
aacccaagtactcct

SEQ ID NO: 118976 - DNA, 15 bp, Homo sapiens
aaacccaagtactcc

SEQ ID NO: 118977 - DNA, 15 bp, Homo sapiens
gaaacccaagtactc

SEQ ID NO: 118978 - DNA, 15 bp, Homo sapiens
agaaacccaagtact

SEQ ID NO: 118979 - DNA, 15 bp, Homo sapiens
aagaaacccaagtac

SEQ ID NO: 118980 - DNA, 15 bp, Homo sapiens
gaagaaacccaagta

SEQ ID NO: 118981 - DNA, 15 bp, Homo sapiens
ggaagaaacccaagt

SEQ ID NO: 118982 - DNA, 15 bp, Homo sapiens
gggaagaaacccaag

SEQ ID NO: 118983 - DNA, 15 bp, Homo sapiens
ggggaagaaacccaa

SEQ ID NO: 118984 - DNA, 15 bp, Homo sapiens
gggggaagaaaccca

SEQ ID NO: 118985 - DNA, 15 bp, Homo sapiens
ggggggaagaaaccc

SEQ ID NO: 118986 - DNA, 15 bp, Homo sapiens
cggggggaagaaacc

SEQ ID NO: 118987 - DNA, 15 bp, Homo sapiens
ccggggggaagaaac

SEQ ID NO: 118988 - DNA, 15 bp, Homo sapiens
gccggggggaagaaa

SEQ ID NO: 118989 - DNA, 15 bp, Homo sapiens
agccggggggaagaa

SEQ ID NO: 118990 - DNA, 15 bp, Homo sapiens
gagccggggggaaga

SEQ ID NO: 118991 - DNA, 15 bp, Homo sapiens
ggagccggggggaag

SEQ ID NO: 118992 - DNA, 15 bp, Homo sapiens
aggagccggggggaa

SEQ ID NO: 118993 - DNA, 15 bp, Homo sapiens
gaggagccgggggga

SEQ ID NO: 118994 - DNA, 15 bp, Homo sapiens
cgaggagccgggggg

SEQ ID NO: 118995 - DNA, 15 bp, Homo sapiens
tcgaggagccggggg

SEQ ID NO: 118996 - DNA, 15 bp, Homo sapiens
gtcgaggagccgggg

SEQ ID NO: 118997 - DNA, 15 bp, Homo sapiens
ggtcgaggagccggg

SEQ ID NO: 118998 - DNA, 15 bp, Homo sapiens
aggtcgaggagccgg

SEQ ID NO: 118999 - DNA, 15 bp, Homo sapiens
gaggtcgaggagccg

SEQ ID NO: 119000 - DNA, 15 bp, Homo sapiens
tgaggtcgaggagcc

SEQ ID NO: 119001 - DNA, 15 bp, Homo sapiens
atgaggtcgaggagc

SEQ ID NO: 119002 - DNA, 15 bp, Homo sapiens
gatgaggtcgaggag

SEQ ID NO: 119003 - DNA, 15 bp, Homo sapiens
tgatgaggtcgagga

SEQ ID NO: 119004 - DNA, 15 bp, Homo sapiens
ttgatgaggtcgagg

SEQ ID NO: 119005 - DNA, 15 bp, Homo sapiens
attgatgaggtcgag

SEQ ID NO: 119006 - DNA, 15 bp, Homo sapiens
aattgatgaggtcga

SEQ ID NO: 119007 - DNA, 15 bp, Homo sapiens
taattgatgaggtcg

SEQ ID NO: 119008 - DNA, 15 bp, Homo sapiens
gtaattgatgaggtc

SEQ ID NO: 119009 - DNA, 15 bp, Homo sapiens
tgtaattgatgaggt

SEQ ID NO: 119010 - DNA, 15 bp, Homo sapiens
atgtaattgatgagg

SEQ ID NO: 119011 - DNA, 15 bp, Homo sapiens
aatgtaattgatgag

SEQ ID NO: 119012 - DNA, 15 bp, Homo sapiens
aaatgtaattgatga

SEQ ID NO: 119013 - DNA, 15 bp, Homo sapiens
aaaatgtaattgatg

SEQ ID NO: 119014 - DNA, 15 bp, Homo sapiens
gaaaatgtaattgat

SEQ ID NO: 119015 - DNA, 15 bp, Homo sapiens
tgaaaatgtaattga

SEQ ID NO: 119016 - DNA, 15 bp, Homo sapiens
atgaaaatgtaattg

SEQ ID NO: 119017 - DNA, 15 bp, Homo sapiens
catgaaaatgtaatt

SEQ ID NO: 119018 - DNA, 15 bp, Homo sapiens
tcatgaaaatgtaat

SEQ ID NO: 119019 - DNA, 15 bp, Homo sapiens
gtcatgaaaatgtaa

SEQ ID NO: 119020 - DNA, 15 bp, Homo sapiens
tgtcatgaaaatgta

SEQ ID NO: 119021 - DNA, 15 bp, Homo sapiens
atgtcatgaaaatgt

SEQ ID NO: 119022 - DNA, 15 bp, Homo sapiens
gatgtcatgaaaatg

SEQ ID NO: 119023 - DNA, 15 bp, Homo sapiens
ggatgtcatgaaaat

SEQ ID NO: 119024 - DNA, 15 bp, Homo sapiens
aggatgtcatgaaaa

SEQ ID NO: 119025 - DNA, 15 bp, Homo sapiens
caggatgtcatgaaa

SEQ ID NO: 119026 - DNA, 15 bp, Homo sapiens
tcaggatgtcatgaa

SEQ ID NO: 119027 - DNA, 15 bp, Homo sapiens
ctcaggatgtcatga

SEQ ID NO: 119028 - DNA, 15 bp, Homo sapiens
actcaggatgtcatg

SEQ ID NO: 119029 - DNA, 15 bp, Homo sapiens
tactcaggatgtcat

SEQ ID NO: 119030 - DNA, 15 bp, Homo sapiens
atactcaggatgtca

SEQ ID NO: 119031 - DNA, 15 bp, Homo sapiens
catactcaggatgtc

SEQ ID NO: 119032 - DNA, 15 bp, Homo sapiens
tcatactcaggatgt

SEQ ID NO: 119033 - DNA, 15 bp, Homo sapiens
ttcatactcaggatg

SEQ ID NO: 119034 - DNA, 15 bp, Homo sapiens
attcatactcaggat

SEQ ID NO: 119035 - DNA, 15 bp, Homo sapiens
tattcatactcagga

SEQ ID NO: 119036 - DNA, 15 bp, Homo sapiens
atattcatactcagg

SEQ ID NO: 119037 - DNA, 15 bp, Homo sapiens
gatattcatactcag

SEQ ID NO: 119038 - DNA, 15 bp, Homo sapiens
tgatattcatactca

SEQ ID NO: 119039 - DNA, 15 bp, Homo sapiens
ctgatattcatactc

SEQ ID NO: 119040 - DNA, 15 bp, Homo sapiens
cctgatattcatact

SEQ ID NO: 119041 - DNA, 15 bp, Homo sapiens
gcctgatattcatac

SEQ ID NO: 119042 - DNA, 15 bp, Homo sapiens
agcctgatattcata

SEQ ID NO: 119043 - DNA, 15 bp, Homo sapiens
gagcctgatattcat

SEQ ID NO: 119044 - DNA, 15 bp, Homo sapiens
agagcctgatattca

SEQ ID NO: 119045 - DNA, 15 bp, Homo sapiens
cagagcctgatattc

SEQ ID NO: 119046 - DNA, 15 bp, Homo sapiens
ccagagcctgatatt

SEQ ID NO: 119047 - DNA, 15 bp, Homo sapiens
gccagagcctgatat

SEQ ID NO: 119048 - DNA, 15 bp, Homo sapiens
ggccagagcctgata

SEQ ID NO: 119049 - DNA, 15 bp, Homo sapiens
cggccagagcctgat

SEQ ID NO: 119050 - DNA, 15 bp, Homo sapiens
tcggccagagcctga

SEQ ID NO: 119051 - DNA, 15 bp, Homo sapiens
gtcggccagagcctg

SEQ ID NO: 119052 - DNA, 15 bp, Homo sapiens
tgtcggccagagcct

SEQ ID NO: 119053 - DNA, 15 bp, Homo sapiens
ttgtcggccagagcc

SEQ ID NO: 119054 - DNA, 15 bp, Homo sapiens
tttgtcggccagagc

SEQ ID NO: 119055 - DNA, 15 bp, Homo sapiens
ctttgtcggccagag

SEQ ID NO: 119056 - DNA, 15 bp, Homo sapiens
cctttgtcggccaga

SEQ ID NO: 119057 - DNA, 15 bp, Homo sapiens
ccctttgtcggccag

SEQ ID NO: 119058 - DNA, 15 bp, Homo sapiens
accctttgtcggcca

SEQ ID NO: 119059 - DNA, 15 bp, Homo sapiens
caccctttgtcggcc

SEQ ID NO: 119060 - DNA, 15 bp, Homo sapiens
ccaccctttgtcggc

SEQ ID NO: 119061 - DNA, 15 bp, Homo sapiens
accaccctttgtcgg

SEQ ID NO: 119062 - DNA, 15 bp, Homo sapiens
caccaccctttgtcg

SEQ ID NO: 119063 - DNA, 15 bp, Homo sapiens
tcaccaccctttgtc

SEQ ID NO: 119064 - DNA, 15 bp, Homo sapiens
ttcaccaccctttgt

SEQ ID NO: 119065 - DNA, 15 bp, Homo sapiens
cttcaccaccctttg

SEQ ID NO: 119066 - DNA, 15 bp, Homo sapiens
ccttcaccacccttt

SEQ ID NO: 119067 - DNA, 15 bp, Homo sapiens
tccttcaccaccctt

SEQ ID NO: 119068 - DNA, 15 bp, Homo sapiens
ttccttcaccaccct

SEQ ID NO: 119069 - DNA, 15 bp, Homo sapiens
cttccttcaccaccc

SEQ ID NO: 119070 - DNA, 15 bp, Homo sapiens
tcttccttcaccacc

SEQ ID NO: 119071 - DNA, 15 bp, Homo sapiens
gtcttccttcaccac

SEQ ID NO: 119072 - DNA, 15 bp, Homo sapiens
tgtcttccttcacca

SEQ ID NO: 119073 - DNA, 15 bp, Homo sapiens
gtgtcttccttcacc

SEQ ID NO: 119074 - DNA, 15 bp, Homo sapiens
tgtgtcttccttcac

SEQ ID NO: 119075 - DNA, 15 bp, Homo sapiens
gtgtgtcttccttca

SEQ ID NO: 119076 - DNA, 15 bp, Homo sapiens
agtgtgtcttccttc

SEQ ID NO: 119077 - DNA, 15 bp, Homo sapiens
cagtgtgtcttcctt

SEQ ID NO: 119078 - DNA, 15 bp, Homo sapiens
gcagtgtgtcttcct

SEQ ID NO: 119079 - DNA, 15 bp, Homo sapiens
cgcagtgtgtcttcc

SEQ ID NO: 119080 - DNA, 15 bp, Homo sapiens
acgcagtgtgtcttc

SEQ ID NO: 119081 - DNA, 15 bp, Homo sapiens
gacgcagtgtgtctt

SEQ ID NO: 119082 - DNA, 15 bp, Homo sapiens
agacgcagtgtgtct

SEQ ID NO: 119083 - DNA, 15 bp, Homo sapiens
aagacgcagtgtgtc

SEQ ID NO: 119084 - DNA, 15 bp, Homo sapiens
caagacgcagtgtgt

SEQ ID NO: 119085 - DNA, 15 bp, Homo sapiens
gcaagacgcagtgtg

SEQ ID NO: 119086 - DNA, 15 bp, Homo sapiens
tgcaagacgcagtgt

SEQ ID NO: 119087 - DNA, 15 bp, Homo sapiens
atgcaagacgcagtg

SEQ ID NO: 119088 - DNA, 15 bp, Homo sapiens
aatgcaagacgcagt

SEQ ID NO: 119089 - DNA, 15 bp, Homo sapiens
aaatgcaagacgcag

SEQ ID NO: 119090 - DNA, 15 bp, Homo sapiens
taaatgcaagacgca

SEQ ID NO: 119091 - DNA, 15 bp, Homo sapiens
ttaaatgcaagacgc

SEQ ID NO: 119092 - DNA, 15 bp, Homo sapiens
cttaaatgcaagacg

SEQ ID NO: 119093 - DNA, 15 bp, Homo sapiens
gcttaaatgcaagac

SEQ ID NO: 119094 - DNA, 15 bp, Homo sapiens
tgcttaaatgcaaga

SEQ ID NO: 119095 - DNA, 15 bp, Homo sapiens
ctgcttaaatgcaag

SEQ ID NO: 119096 - DNA, 15 bp, Homo sapiens
gctgcttaaatgcaa

SEQ ID NO: 119097 - DNA, 15 bp, Homo sapiens
agctgcttaaatgca

SEQ ID NO: 119098 - DNA, 15 bp, Homo sapiens
gagctgcttaaatgc

SEQ ID NO: 119099 - DNA, 15 bp, Homo sapiens
ggagctgcttaaatg

SEQ ID NO: 119100 - DNA, 15 bp, Homo sapiens
gggagctgcttaaat

SEQ ID NO: 119101 - DNA, 15 bp, Homo sapiens
agggagctgcttaaa

SEQ ID NO: 119102 - DNA, 15 bp, Homo sapiens
aagggagctgcttaa

SEQ ID NO: 119103 - DNA, 15 bp, Homo sapiens
aaagggagctgctta

SEQ ID NO: 119104 - DNA, 15 bp, Homo sapiens
taaagggagctgctt

SEQ ID NO: 119105 - DNA, 15 bp, Homo sapiens
ataaagggagctgct

SEQ ID NO: 119106 - DNA, 15 bp, Homo sapiens
aataaagggagctgc

SEQ ID NO: 119107 - DNA, 15 bp, Homo sapiens
gaataaagggagctg

SEQ ID NO: 119108 - DNA, 15 bp, Homo sapiens
ggaataaagggagct

SEQ ID NO: 119109 - DNA, 15 bp, Homo sapiens
gggaataaagggagc

SEQ ID NO: 119110 - DNA, 15 bp, Homo sapiens
agggaataaagggag

SEQ ID NO: 119111 - DNA, 15 bp, Homo sapiens
gagggaataaaggga

SEQ ID NO: 119112 - DNA, 15 bp, Homo sapiens
ggagggaataaaggg

SEQ ID NO: 119113 - DNA, 15 bp, Homo sapiens
gggagggaataaagg

SEQ ID NO: 119114 - DNA, 15 bp, Homo sapiens
agggagggaataaag

SEQ ID NO: 119115 - DNA, 15 bp, Homo sapiens
tagggagggaataaa

SEQ ID NO: 119116 - DNA, 15 bp, Homo sapiens
ctagggagggaataa

SEQ ID NO: 119117 - DNA, 15 bp, Homo sapiens
gctagggagggaata

SEQ ID NO: 119118 - DNA, 15 bp, Homo sapiens
tgctagggagggaat

SEQ ID NO: 119119 - DNA, 15 bp, Homo sapiens
ctgctagggagggaa

SEQ ID NO: 119120 - DNA, 15 bp, Homo sapiens
actgctagggaggga

SEQ ID NO: 119121 - DNA, 15 bp, Homo sapiens
cactgctagggaggg

SEQ ID NO: 119122 - DNA, 15 bp, Homo sapiens
gcactgctagggagg

SEQ ID NO: 119123 - DNA, 15 bp, Homo sapiens
tgcactgctagggag

SEQ ID NO: 119124 - DNA, 15 bp, Homo sapiens
ctgcactgctaggga

SEQ ID NO: 119125 - DNA, 15 bp, Homo sapiens
gctgcactgctaggg

SEQ ID NO: 119126 - DNA, 15 bp, Homo sapiens
agctgcactgctagg

SEQ ID NO: 119127 - DNA, 15 bp, Homo sapiens
tagctgcactgctag

SEQ ID NO: 119128 - DNA, 15 bp, Homo sapiens
atagctgcactgcta

SEQ ID NO: 119129 - DNA, 15 bp, Homo sapiens
catagctgcactgct

SEQ ID NO: 119130 - DNA, 15 bp, Homo sapiens
tcatagctgcactgc

SEQ ID NO: 119131 - DNA, 15 bp, Homo sapiens
gtcatagctgcactg

SEQ ID NO: 119132 - DNA, 15 bp, Homo sapiens
agtcatagctgcact

SEQ ID NO: 119133 - DNA, 15 bp, Homo sapiens
aagtcatagctgcac

SEQ ID NO: 119134 - DNA, 15 bp, Homo sapiens
caagtcatagctgca

SEQ ID NO: 119135 - DNA, 15 bp, Homo sapiens
gcaagtcatagctgc

SEQ ID NO: 119136 - DNA, 15 bp, Homo sapiens
agcaagtcatagctg

SEQ ID NO: 119137 - DNA, 15 bp, Homo sapiens
aagcaagtcatagct

SEQ ID NO: 119138 - DNA, 15 bp, Homo sapiens
caagcaagtcatagc

SEQ ID NO: 119139 - DNA, 15 bp, Homo sapiens
acaagcaagtcatag

SEQ ID NO: 119140 - DNA, 15 bp, Homo sapiens
cacaagcaagtcata

SEQ ID NO: 119141 - DNA, 15 bp, Homo sapiens
ccacaagcaagtcat

SEQ ID NO: 119142 - DNA, 15 bp, Homo sapiens
cccacaagcaagtca

SEQ ID NO: 119143 - DNA, 15 bp, Homo sapiens
acccacaagcaagtc

SEQ ID NO: 119144 - DNA, 15 bp, Homo sapiens
gacccacaagcaagt

SEQ ID NO: 119145 - DNA, 15 bp, Homo sapiens
ggacccacaagcaag

SEQ ID NO: 119146 - DNA, 15 bp, Homo sapiens
aggacccacaagcaa

SEQ ID NO: 119147 - DNA, 15 bp, Homo sapiens
caggacccacaagca

SEQ ID NO: 119148 - DNA, 15 bp, Homo sapiens
ccaggacccacaagc

SEQ ID NO: 119149 - DNA, 15 bp, Homo sapiens
accaggacccacaag

SEQ ID NO: 119150 - DNA, 15 bp, Homo sapiens
taccaggacccacaa

SEQ ID NO: 119151 - DNA, 15 bp, Homo sapiens
ctaccaggacccaca

SEQ ID NO: 119152 - DNA, 15 bp, Homo sapiens
cctaccaggacccac

SEQ ID NO: 119153 - DNA, 15 bp, Homo sapiens
tcctaccaggaccca

SEQ ID NO: 119154 - DNA, 15 bp, Homo sapiens
atcctaccaggaccc

SEQ ID NO: 119155 - DNA, 15 bp, Homo sapiens
tatcctaccaggacc

SEQ ID NO: 119156 - DNA, 15 bp, Homo sapiens
ttatcctaccaggac

SEQ ID NO: 119157 - DNA, 15 bp, Homo sapiens
gttatcctaccagga

SEQ ID NO: 119158 - DNA, 15 bp, Homo sapiens
agttatcctaccagg

SEQ ID NO: 119159 - DNA, 15 bp, Homo sapiens
gagttatcctaccag

SEQ ID NO: 119160 - DNA, 15 bp, Homo sapiens
ggagttatcctacca

SEQ ID NO: 119161 - DNA, 15 bp, Homo sapiens
aggagttatcctacc

SEQ ID NO: 119162 - DNA, 15 bp, Homo sapiens
caggagttatcctac

SEQ ID NO: 119163 - DNA, 15 bp, Homo sapiens
ccaggagttatccta

SEQ ID NO: 119164 - DNA, 15 bp, Homo sapiens
gccaggagttatcct

SEQ ID NO: 119165 - DNA, 15 bp, Homo sapiens
tgccaggagttatcc

SEQ ID NO: 119166 - DNA, 15 bp, Homo sapiens
gtgccaggagttatc

SEQ ID NO: 119167 - DNA, 15 bp, Homo sapiens
ggtgccaggagttat

SEQ ID NO: 119168 - DNA, 15 bp, Homo sapiens
cctggaagccatatt

SEQ ID NO: 119169 - DNA, 15 bp, Homo sapiens
ccctggaagccatat

SEQ ID NO: 119170 - DNA, 15 bp, Homo sapiens
accctggaagccata

SEQ ID NO: 119171 - DNA, 15 bp, Homo sapiens
caccctggaagccat

SEQ ID NO: 119172 - DNA, 15 bp, Homo sapiens
tcaccctggaagcca

SEQ ID NO: 119173 - DNA, 15 bp, Homo sapiens
ctcaccctggaagcc

SEQ ID NO: 119174 - DNA, 15 bp, Homo sapiens
tctcaccctggaagc

SEQ ID NO: 119175 - DNA, 15 bp, Homo sapiens
ctctcaccctggaag

SEQ ID NO: 119176 - DNA, 15 bp, Homo sapiens
tctctcaccctggaa

SEQ ID NO: 119177 - DNA, 15 bp, Homo sapiens
atctctcaccctgga

SEQ ID NO: 119178 - DNA, 15 bp, Homo sapiens
tatctctcaccctgg

SEQ ID NO: 119179 - DNA, 15 bp, Homo sapiens
atatctctcaccctg

SEQ ID NO: 119180 - DNA, 15 bp, Homo sapiens
tatatctctcaccct

SEQ ID NO: 119181 - DNA, 15 bp, Homo sapiens
ctatatctctcaccc

SEQ ID NO: 119182 - DNA, 15 bp, Homo sapiens
cctatatctctcacc

SEQ ID NO: 119183 - DNA, 15 bp, Homo sapiens
ccctatatctctcac

SEQ ID NO: 119184 - DNA, 15 bp, Homo sapiens
tccctatatctctca

SEQ ID NO: 119185 - DNA, 15 bp, Homo sapiens
ttccctatatctctc

SEQ ID NO: 119186 - DNA, 15 bp, Homo sapiens
attccctatatctct

SEQ ID NO: 119187 - DNA, 15 bp, Homo sapiens
gattccctatatctc

SEQ ID NO: 119188 - DNA, 15 bp, Homo sapiens
ggattccctatatct

SEQ ID NO: 119189 - DNA, 15 bp, Homo sapiens
gggattccctatatc

SEQ ID NO: 119190 - DNA, 15 bp, Homo sapiens
tgggattccctatat

SEQ ID NO: 119191 - DNA, 15 bp, Homo sapiens
gtgggattccctata

SEQ ID NO: 119192 - DNA, 15 bp, Homo sapiens
tgtgggattccctat

SEQ ID NO: 119193 - DNA, 15 bp, Homo sapiens
ctgtgggattcccta

SEQ ID NO: 119194 - DNA, 15 bp, Homo sapiens
actgtgggattccct

SEQ ID NO: 119195 - DNA, 15 bp, Homo sapiens
cactgtgggattccc

SEQ ID NO: 119196 - DNA, 15 bp, Homo sapiens
gcactgtgggattcc

SEQ ID NO: 119197 - DNA, 15 bp, Homo sapiens
ggcactgtgggattc

SEQ ID NO: 119198 - DNA, 15 bp, Homo sapiens
gggcactgtgggatt

SEQ ID NO: 119199 - DNA, 15 bp, Homo sapiens
agggcactgtgggat

SEQ ID NO: 119200 - DNA, 15 bp, Homo sapiens
aagggcactgtggga

SEQ ID NO: 119201 - DNA, 15 bp, Homo sapiens
caagggcactgtggg

SEQ ID NO: 119202 - DNA, 15 bp, Homo sapiens
ccaagggcactgtgg

SEQ ID NO: 119203 - DNA, 15 bp, Homo sapiens
cccaagggcactgtg

SEQ ID NO: 119204 - DNA, 15 bp, Homo sapiens
ccccaagggcactgt

SEQ ID NO: 119205 - DNA, 15 bp, Homo sapiens
cccccaagggcactg

SEQ ID NO: 119206 - DNA, 15 bp, Homo sapiens
tcccccaagggcact

SEQ ID NO: 119207 - DNA, 15 bp, Homo sapiens
gtcccccaagggcac

SEQ ID NO: 119208 - DNA, 15 bp, Homo sapiens
tgtcccccaagggca

SEQ ID NO: 119209 - DNA, 15 bp, Homo sapiens
gtgtcccccaagggc

SEQ ID NO: 119210 - DNA, 15 bp, Homo sapiens
tgtgtcccccaaggg

SEQ ID NO: 119211 - DNA, 15 bp, Homo sapiens
ctgtgtcccccaagg

SEQ ID NO: 119212 - DNA, 15 bp, Homo sapiens
actgtgtcccccaag

SEQ ID NO: 119213 - DNA, 15 bp, Homo sapiens
tactgtgtcccccaa

SEQ ID NO: 119214 - DNA, 15 bp, Homo sapiens
ttactgtgtccccca

SEQ ID NO: 119215 - DNA, 15 bp, Homo sapiens
attactgtgtccccc

SEQ ID NO: 119216 - DNA, 15 bp, Homo sapiens
cattactgtgtcccc

SEQ ID NO: 119217 - DNA, 15 bp, Homo sapiens
acattactgtgtccc

SEQ ID NO: 119218 - DNA, 15 bp, Homo sapiens
cacattactgtgtcc

SEQ ID NO: 119219 - DNA, 15 bp, Homo sapiens
ccacattactgtgtc

SEQ ID NO: 119220 - DNA, 15 bp, Homo sapiens
gccacattactgtgt

SEQ ID NO: 119221 - DNA, 15 bp, Homo sapiens
agccacattactgtg

SEQ ID NO: 119222 - DNA, 15 bp, Homo sapiens
gagccacattactgt

SEQ ID NO: 119223 - DNA, 15 bp, Homo sapiens
tgagccacattactg

SEQ ID NO: 119224 - DNA, 15 bp, Homo sapiens
ctgagccacattact

SEQ ID NO: 119225 - DNA, 15 bp, Homo sapiens
tctgagccacattac

SEQ ID NO: 119226 - DNA, 15 bp, Homo sapiens
gtctgagccacatta

SEQ ID NO: 119227 - DNA, 15 bp, Homo sapiens
tgtctgagccacatt

SEQ ID NO: 119228 - DNA, 15 bp, Homo sapiens
atgtctgagccacat

SEQ ID NO: 119229 - DNA, 15 bp, Homo sapiens
tatgtctgagccaca

SEQ ID NO: 119230 - DNA, 15 bp, Homo sapiens
ctatgtctgagccac

SEQ ID NO: 119231 - DNA, 15 bp, Homo sapiens
tctatgtctgagcca

SEQ ID NO: 119232 - DNA, 15 bp, Homo sapiens
gtctatgtctgagcc

SEQ ID NO: 119233 - DNA, 15 bp, Homo sapiens
ggtctatgtctgagc

SEQ ID NO: 119234 - DNA, 15 bp, Homo sapiens
tggtctatgtctgag

SEQ ID NO: 119235 - DNA, 15 bp, Homo sapiens
gtggtctatgtctga

SEQ ID NO: 119236 - DNA, 15 bp, Homo sapiens
agtggtctatgtctg

SEQ ID NO: 119237 - DNA, 15 bp, Homo sapiens
cagtggtctatgtct

SEQ ID NO: 119238 - DNA, 15 bp, Homo sapiens
acagtggtctatgtc

SEQ ID NO: 119239 - DNA, 15 bp, Homo sapiens
tacagtggtctatgt

SEQ ID NO: 119240 - DNA, 15 bp, Homo sapiens
gtacagtggtctatg

SEQ ID NO: 119241 - DNA, 15 bp, Homo sapiens
tgtacagtggtctat

SEQ ID NO: 119242 - DNA, 15 bp, Homo sapiens
ctgtacagtggtcta

SEQ ID NO: 119243 - DNA, 15 bp, Homo sapiens
tctgtacagtggtct

SEQ ID NO: 119244 - DNA, 15 bp, Homo sapiens
atctgtacagtggtc

SEQ ID NO: 119245 - DNA, 15 bp, Homo sapiens
gatctgtacagtggt

SEQ ID NO: 119246 - DNA, 15 bp, Homo sapiens
ggatctgtacagtgg

SEQ ID NO: 119247 - DNA, 15 bp, Homo sapiens
tggatctgtacagtg

SEQ ID NO: 119248 - DNA, 15 bp, Homo sapiens
ctggatctgtacagt

SEQ ID NO: 119249 - DNA, 15 bp, Homo sapiens
gctggatctgtacag

SEQ ID NO: 119250 - DNA, 15 bp, Homo sapiens
tgctggatctgtaca

SEQ ID NO: 119251 - DNA, 15 bp, Homo sapiens
ctgctggatctgtac

SEQ ID NO: 119252 - DNA, 15 bp, Homo sapiens
gctgctggatctgta

SEQ ID NO: 119253 - DNA, 15 bp, Homo sapiens
tgctgctggatctgt

SEQ ID NO: 119254 - DNA, 15 bp, Homo sapiens
gtgctgctggatctg

SEQ ID NO: 119255 - DNA, 15 bp, Homo sapiens
tgtgctgctggatct

SEQ ID NO: 119256 - DNA, 15 bp, Homo sapiens
ctgtgctgctggatc

SEQ ID NO: 119257 - DNA, 15 bp, Homo sapiens
cctgtgctgctggat

SEQ ID NO: 119258 - DNA, 15 bp, Homo sapiens
tcctgtgctgctgga

SEQ ID NO: 119259 - DNA, 15 bp, Homo sapiens
ttcctgtgctgctgg

SEQ ID NO: 119260 - DNA, 15 bp, Homo sapiens
cttcctgtgctgctg

SEQ ID NO: 119261 - DNA, 15 bp, Homo sapiens
ccttcctgtgctgct

SEQ ID NO: 119262 - DNA, 15 bp, Homo sapiens
cccttcctgtgctgc

SEQ ID NO: 119263 - DNA, 15 bp, Homo sapiens
gcccttcctgtgctg

SEQ ID NO: 119264 - DNA, 15 bp, Homo sapiens
agcccttcctgtgct

SEQ ID NO: 119265 - DNA, 15 bp, Homo sapiens
cagcccttcctgtgc

SEQ ID NO: 119266 - DNA, 15 bp, Homo sapiens
gcagcccttcctgtg

SEQ ID NO: 119267 - DNA, 15 bp, Homo sapiens
tgcagcccttcctgt

SEQ ID NO: 119268 - DNA, 15 bp, Homo sapiens
ctgcagcccttcctg

SEQ ID NO: 119269 - DNA, 15 bp, Homo sapiens
cctgcagcccttcct

SEQ ID NO: 119270 - DNA, 15 bp, Homo sapiens
gcctgcagcccttcc

SEQ ID NO: 119271 - DNA, 15 bp, Homo sapiens
ggcctgcagcccttc

SEQ ID NO: 119272 - DNA, 15 bp, Homo sapiens
aggcctgcagccctt

SEQ ID NO: 119273 - DNA, 15 bp, Homo sapiens
caggcctgcagccct

SEQ ID NO: 119274 - DNA, 15 bp, Homo sapiens
ccaggcctgcagccc

SEQ ID NO: 119275 - DNA, 15 bp, Homo sapiens
cccaggcctgcagcc

SEQ ID NO: 119276 - DNA, 15 bp, Homo sapiens
tcccaggcctgcagc

SEQ ID NO: 119277 - DNA, 15 bp, Homo sapiens
ctcccaggcctgcag

SEQ ID NO: 119278 - DNA, 15 bp, Homo sapiens
tctcccaggcctgca

SEQ ID NO: 119279 - DNA, 15 bp, Homo sapiens
ttctcccaggcctgc

SEQ ID NO: 119280 - DNA, 15 bp, Homo sapiens
tttctcccaggcctg

SEQ ID NO: 119281 - DNA, 15 bp, Homo sapiens
ttttctcccaggcct

SEQ ID NO: 119282 - DNA, 15 bp, Homo sapiens
cttttctcccaggcc

SEQ ID NO: 119283 - DNA, 15 bp, Homo sapiens
acttttctcccaggc

SEQ ID NO: 119284 - DNA, 15 bp, Homo sapiens
cacttttctcccagg

SEQ ID NO: 119285 - DNA, 15 bp, Homo sapiens
tcacttttctcccag

SEQ ID NO: 119286 - DNA, 15 bp, Homo sapiens
gtcacttttctccca

SEQ ID NO: 119287 - DNA, 15 bp, Homo sapiens
tgtcacttttctccc

SEQ ID NO: 119288 - DNA, 15 bp, Homo sapiens
ctgtcacttttctcc

SEQ ID NO: 119289 - DNA, 15 bp, Homo sapiens
gctgtcacttttctc

SEQ ID NO: 119290 - DNA, 15 bp, Homo sapiens
tgctgtcacttttct

SEQ ID NO: 119291 - DNA, 15 bp, Homo sapiens
ctgctgtcacttttc

SEQ ID NO: 119292 - DNA, 15 bp, Homo sapiens
tctgctgtcactttt

SEQ ID NO: 119293 - DNA, 15 bp, Homo sapiens
atctgctgtcacttt

SEQ ID NO: 119294 - DNA, 15 bp, Homo sapiens
catctgctgtcactt

SEQ ID NO: 119295 - DNA, 15 bp, Homo sapiens
ccatctgctgtcact

SEQ ID NO: 119296 - DNA, 15 bp, Homo sapiens
gccatctgctgtcac

SEQ ID NO: 119297 - DNA, 15 bp, Homo sapiens
ggccatctgctgtca

SEQ ID NO: 119298 - DNA, 15 bp, Homo sapiens
cggccatctgctgtc

SEQ ID NO: 119299 - DNA, 15 bp, Homo sapiens
ccggccatctgctgt

SEQ ID NO: 119300 - DNA, 15 bp, Homo sapiens
accggccatctgctg

SEQ ID NO: 119301 - DNA, 15 bp, Homo sapiens
gaccggccatctgct

SEQ ID NO: 119302 - DNA, 15 bp, Homo sapiens
ggaccggccatctgc

SEQ ID NO: 119303 - DNA, 15 bp, Homo sapiens
tggaccggccatctg

SEQ ID NO: 119304 - DNA, 15 bp, Homo sapiens
ctggaccggccatct

SEQ ID NO: 119305 - DNA, 15 bp, Homo sapiens
cctggaccggccatc

SEQ ID NO: 119306 - DNA, 15 bp, Homo sapiens
gcctggaccggccat

SEQ ID NO: 119307 - DNA, 15 bp, Homo sapiens
agcctggaccggcca

SEQ ID NO: 119308 - DNA, 15 bp, Homo sapiens
aagcctggaccggcc

SEQ ID NO: 119309 - DNA, 15 bp, Homo sapiens
aaagcctggaccggc

SEQ ID NO: 119310 - DNA, 15 bp, Homo sapiens
gaaagcctggaccgg

SEQ ID NO: 119311 - DNA, 15 bp, Homo sapiens
agaaagcctggaccg

SEQ ID NO: 119312 - DNA, 15 bp, Homo sapiens
cagaaagcctggacc

SEQ ID NO: 119313 - DNA, 15 bp, Homo sapiens
ccagaaagcctggac

SEQ ID NO: 119314 - DNA, 15 bp, Homo sapiens
cccagaaagcctgga

SEQ ID NO: 119315 - DNA, 15 bp, Homo sapiens
acccagaaagcctgg

SEQ ID NO: 119316 - DNA, 15 bp, Homo sapiens
tacccagaaagcctg

SEQ ID NO: 119317 - DNA, 15 bp, Homo sapiens
gtacccagaaagcct

SEQ ID NO: 119318 - DNA, 15 bp, Homo sapiens
ggtacccagaaagcc

SEQ ID NO: 119319 - DNA, 15 bp, Homo sapiens
gggtacccagaaagc

SEQ ID NO: 119320 - DNA, 15 bp, Homo sapiens
tgggtacccagaaag

SEQ ID NO: 119321 - DNA, 15 bp, Homo sapiens
ctgggtacccagaaa

SEQ ID NO: 119322 - DNA, 15 bp, Homo sapiens
cctgggtacccagaa

SEQ ID NO: 119323 - DNA, 15 bp, Homo sapiens
gcctgggtacccaga

SEQ ID NO: 119324 - DNA, 15 bp, Homo sapiens
ggcctgggtacccag

SEQ ID NO: 119325 - DNA, 15 bp, Homo sapiens
aggcctgggtaccca

SEQ ID NO: 119326 - DNA, 15 bp, Homo sapiens
caggcctgggtaccc

SEQ ID NO: 119327 - DNA, 15 bp, Homo sapiens
acaggcctgggtacc

SEQ ID NO: 119328 - DNA, 15 bp, Homo sapiens
tacaggcctgggtac

SEQ ID NO: 119329 - DNA, 15 bp, Homo sapiens
ttacaggcctgggta

SEQ ID NO: 119330 - DNA, 15 bp, Homo sapiens
cttacaggcctgggt

SEQ ID NO: 119331 - DNA, 15 bp, Homo sapiens
ccttacaggcctggg

SEQ ID NO: 119332 - DNA, 15 bp, Homo sapiens
gccttacaggcctgg

SEQ ID NO: 119333 - DNA, 15 bp, Homo sapiens
ggccttacaggcctg

SEQ ID NO: 119334 - DNA, 15 bp, Homo sapiens
tggccttacaggcct

SEQ ID NO: 119335 - DNA, 15 bp, Homo sapiens
gtggccttacaggcc

SEQ ID NO: 119336 - DNA, 15 bp, Homo sapiens
tgtggccttacaggc

SEQ ID NO: 119337 - DNA, 15 bp, Homo sapiens
gtgtggccttacagg

SEQ ID NO: 119338 - DNA, 15 bp, Homo sapiens
agtgtggccttacag

SEQ ID NO: 119339 - DNA, 15 bp, Homo sapiens
gagtgtggccttaca

SEQ ID NO: 119340 - DNA, 15 bp, Homo sapiens
tgagtgtggccttac

SEQ ID NO: 119341 - DNA, 15 bp, Homo sapiens
atgagtgtggcctta

SEQ ID NO: 119342 - DNA, 15 bp, Homo sapiens
tatgagtgtggcctt

SEQ ID NO: 119343 - DNA, 15 bp, Homo sapiens
atatgagtgtggcct

SEQ ID NO: 119344 - DNA, 15 bp, Homo sapiens
catatgagtgtggcc

SEQ ID NO: 119345 - DNA, 15 bp, Homo sapiens
tcatatgagtgtggc

SEQ ID NO: 119346 - DNA, 15 bp, Homo sapiens
ctcatatgagtgtgg

SEQ ID NO: 119347 - DNA, 15 bp, Homo sapiens
cctcatatgagtgtg

SEQ ID NO: 119348 - DNA, 15 bp, Homo sapiens
gcctcatatgagtgt

SEQ ID NO: 119349 - DNA, 15 bp, Homo sapiens
tgcctcatatgagtg

SEQ ID NO: 119350 - DNA, 15 bp, Homo sapiens
ctgcctcatatgagt

SEQ ID NO: 119351 - DNA, 15 bp, Homo sapiens
cctgcctcatatgag

SEQ ID NO: 119352 - DNA, 15 bp, Homo sapiens
gcctgcctcatatga

SEQ ID NO: 119353 - DNA, 15 bp, Homo sapiens
tgcctgcctcatatg

SEQ ID NO: 119354 - DNA, 15 bp, Homo sapiens
ctgcctgcctcatat

SEQ ID NO: 119355 - DNA, 15 bp, Homo sapiens
gctgcctgcctcata

SEQ ID NO: 119356 - DNA, 15 bp, Homo sapiens
tgctgcctgcctcat

SEQ ID NO: 119357 - DNA, 15 bp, Homo sapiens
gtgctgcctgcctca

SEQ ID NO: 119358 - DNA, 15 bp, Homo sapiens
ggtgctgcctgcctc

SEQ ID NO: 119359 - DNA, 15 bp, Homo sapiens
gggtgctgcctgcct

SEQ ID NO: 119360 - DNA, 15 bp, Homo sapiens
ggggtgctgcctgcc

SEQ ID NO: 119361 - DNA, 15 bp, Homo sapiens
aggggtgctgcctgc

SEQ ID NO: 119362 - DNA, 15 bp, Homo sapiens
aaggggtgctgcctg

SEQ ID NO: 119363 - DNA, 15 bp, Homo sapiens
caaggggtgctgcct

SEQ ID NO: 119364 - DNA, 15 bp, Homo sapiens
ccaaggggtgctgcc

SEQ ID NO: 119365 - DNA, 15 bp, Homo sapiens
tccaaggggtgctgc

SEQ ID NO: 119366 - DNA, 15 bp, Homo sapiens
ttccaaggggtgctg

SEQ ID NO: 119367 - DNA, 15 bp, Homo sapiens
gttccaaggggtgct

SEQ ID NO: 119368 - DNA, 15 bp, Homo sapiens
tgttccaaggggtgc

SEQ ID NO: 119369 - DNA, 15 bp, Homo sapiens
ttgttccaaggggtg

SEQ ID NO: 119370 - DNA, 15 bp, Homo sapiens
attgttccaaggggt

SEQ ID NO: 119371 - DNA, 15 bp, Homo sapiens
tattgttccaagggg

SEQ ID NO: 119372 - DNA, 15 bp, Homo sapiens
atattgttccaaggg

SEQ ID NO: 119373 - DNA, 15 bp, Homo sapiens
gatattgttccaagg

SEQ ID NO: 119374 - DNA, 15 bp, Homo sapiens
agatattgttccaag

SEQ ID NO: 119375 - DNA, 15 bp, Homo sapiens
tagatattgttccaa

SEQ ID NO: 119376 - DNA, 15 bp, Homo sapiens
atagatattgttcca

SEQ ID NO: 119377 - DNA, 15 bp, Homo sapiens
catagatattgttcc

SEQ ID NO: 119378 - DNA, 15 bp, Homo sapiens
ccatagatattgttc

SEQ ID NO: 119379 - DNA, 15 bp, Homo sapiens
accatagatattgtt

SEQ ID NO: 119380 - DNA, 15 bp, Homo sapiens
taccatagatattgt

SEQ ID NO: 119381 - DNA, 15 bp, Homo sapiens
ctaccatagatattg

SEQ ID NO: 119382 - DNA, 15 bp, Homo sapiens
cctaccatagatatt

SEQ ID NO: 119383 - DNA, 15 bp, Homo sapiens
acctaccatagatat

SEQ ID NO: 119384 - DNA, 15 bp, Homo sapiens
gacctaccatagata

SEQ ID NO: 119385 - DNA, 15 bp, Homo sapiens
agacctaccatagat

SEQ ID NO: 119386 - DNA, 15 bp, Homo sapiens
tagacctaccataga

SEQ ID NO: 119387 - DNA, 15 bp, Homo sapiens
atagacctaccatag

SEQ ID NO: 119388 - DNA, 15 bp, Homo sapiens
tatagacctaccata

SEQ ID NO: 119389 - DNA, 15 bp, Homo sapiens
ctatagacctaccat

SEQ ID NO: 119390 - DNA, 15 bp, Homo sapiens
tctatagacctacca

SEQ ID NO: 119391 - DNA, 15 bp, Homo sapiens
gtctatagacctacc

SEQ ID NO: 119392 - DNA, 15 bp, Homo sapiens
ggtctatagacctac

SEQ ID NO: 119393 - DNA, 15 bp, Homo sapiens
tggtctatagaccta

SEQ ID NO: 119394 - DNA, 15 bp, Homo sapiens
ttggtctatagacct

SEQ ID NO: 119395 - DNA, 15 bp, Homo sapiens
cttggtctatagacc

SEQ ID NO: 119396 - DNA, 15 bp, Homo sapiens
ccttggtctatagac

SEQ ID NO: 119397 - DNA, 15 bp, Homo sapiens
cccttggtctataga

SEQ ID NO: 119398 - DNA, 15 bp, Homo sapiens
gcccttggtctatag

SEQ ID NO: 119399 - DNA, 15 bp, Homo sapiens
agcccttggtctata

SEQ ID NO: 119400 - DNA, 15 bp, Homo sapiens
gagcccttggtctat

SEQ ID NO: 119401 - DNA, 15 bp, Homo sapiens
agagcccttggtcta

SEQ ID NO: 119402 - DNA, 15 bp, Homo sapiens
cagagcccttggtct

SEQ ID NO: 119403 - DNA, 15 bp, Homo sapiens
gcagagcccttggtc

SEQ ID NO: 119404 - DNA, 15 bp, Homo sapiens
agcagagcccttggt

SEQ ID NO: 119405 - DNA, 15 bp, Homo sapiens
gagcagagcccttgg

SEQ ID NO: 119406 - DNA, 15 bp, Homo sapiens
agagcagagcccttg

SEQ ID NO: 119407 - DNA, 15 bp, Homo sapiens
cagagcagagccctt

SEQ ID NO: 119408 - DNA, 15 bp, Homo sapiens
acagagcagagccct

SEQ ID NO: 119409 - DNA, 15 bp, Homo sapiens
cacagagcagagccc

SEQ ID NO: 119410 - DNA, 15 bp, Homo sapiens
gcacagagcagagcc

SEQ ID NO: 119411 - DNA, 15 bp, Homo sapiens
ggcacagagcagagc

SEQ ID NO: 119412 - DNA, 15 bp, Homo sapiens
cggcacagagcagag

SEQ ID NO: 119413 - DNA, 15 bp, Homo sapiens
gcggcacagagcaga

SEQ ID NO: 119414 - DNA, 15 bp, Homo sapiens
tgcggcacagagcag

SEQ ID NO: 119415 - DNA, 15 bp, Homo sapiens
ctgcggcacagagca

SEQ ID NO: 119416 - DNA, 15 bp, Homo sapiens
tctgcggcacagagc

SEQ ID NO: 119417 - DNA, 15 bp, Homo sapiens
gtctgcggcacagag

SEQ ID NO: 119418 - DNA, 15 bp, Homo sapiens
tgtctgcggcacaga

SEQ ID NO: 119419 - DNA, 15 bp, Homo sapiens
atgtctgcggcacag

SEQ ID NO: 119420 - DNA, 15 bp, Homo sapiens
gatgtctgcggcaca

SEQ ID NO: 119421 - DNA, 15 bp, Homo sapiens
ggatgtctgcggcac

SEQ ID NO: 119422 - DNA, 15 bp, Homo sapiens
tggatgtctgcggca

SEQ ID NO: 119423 - DNA, 15 bp, Homo sapiens
gtggatgtctgcggc

SEQ ID NO: 119424 - DNA, 15 bp, Homo sapiens
tgtggatgtctgcgg

SEQ ID NO: 119425 - DNA, 15 bp, Homo sapiens
gtgtggatgtctgcg

SEQ ID NO: 119426 - DNA, 15 bp, Homo sapiens
tgtgtggatgtctgc

SEQ ID NO: 119427 - DNA, 15 bp, Homo sapiens
gtgtgtggatgtctg

SEQ ID NO: 119428 - DNA, 15 bp, Homo sapiens
tgtgtgtggatgtct

SEQ ID NO: 119429 - DNA, 15 bp, Homo sapiens
atgtgtgtggatgtc

SEQ ID NO: 119430 - DNA, 15 bp, Homo sapiens
tatgtgtgtggatgt

SEQ ID NO: 119431 - DNA, 15 bp, Homo sapiens
gtatgtgtgtggatg

SEQ ID NO: 119432 - DNA, 15 bp, Homo sapiens
tgtatgtgtgtggat

SEQ ID NO: 119433 - DNA, 15 bp, Homo sapiens
atgtatgtgtgtgga

SEQ ID NO: 119434 - DNA, 15 bp, Homo sapiens
tatgtatgtgtgtgg

SEQ ID NO: 119435 - DNA, 15 bp, Homo sapiens
ctatgtatgtgtgtg

SEQ ID NO: 119436 - DNA, 15 bp, Homo sapiens
cctatgtatgtgtgt

SEQ ID NO: 119437 - DNA, 15 bp, Homo sapiens
acctatgtatgtgtg

SEQ ID NO: 119438 - DNA, 15 bp, Homo sapiens
tacctatgtatgtgt

SEQ ID NO: 119439 - DNA, 15 bp, Homo sapiens
gtacctatgtatgtg

SEQ ID NO: 119440 - DNA, 15 bp, Homo sapiens
tgtacctatgtatgt

SEQ ID NO: 119441 - DNA, 15 bp, Homo sapiens
gtgtacctatgtatg

SEQ ID NO: 119442 - DNA, 15 bp, Homo sapiens
tgtgtacctatgtat

SEQ ID NO: 119443 - DNA, 15 bp, Homo sapiens
atgtgtacctatgta

SEQ ID NO: 119444 - DNA, 15 bp, Homo sapiens
catgtgtacctatgt

SEQ ID NO: 119445 - DNA, 15 bp, Homo sapiens
tcatgtgtacctatg

SEQ ID NO: 119446 - DNA, 15 bp, Homo sapiens
gtcatgtgtacctat

SEQ ID NO: 119447 - DNA, 15 bp, Homo sapiens
tgtcatgtgtaccta

SEQ ID NO: 119448 - DNA, 15 bp, Homo sapiens
atgtcatgtgtacct

SEQ ID NO: 119449 - DNA, 15 bp, Homo sapiens
tatgtcatgtgtacc

SEQ ID NO: 119450 - DNA, 15 bp, Homo sapiens
ctatgtcatgtgtac

SEQ ID NO: 119451 - DNA, 15 bp, Homo sapiens
tctatgtcatgtgta

SEQ ID NO: 119452 - DNA, 15 bp, Homo sapiens
ttctatgtcatgtgt

SEQ ID NO: 119453 - DNA, 15 bp, Homo sapiens
attctatgtcatgtg

SEQ ID NO: 119454 - DNA, 15 bp, Homo sapiens
aattctatgtcatgt

SEQ ID NO: 119455 - DNA, 15 bp, Homo sapiens
gaattctatgtcatg

SEQ ID NO: 119456 - DNA, 15 bp, Homo sapiens
tgaattctatgtcat

SEQ ID NO: 119457 - DNA, 15 bp, Homo sapiens
ttgaattctatgtca

SEQ ID NO: 119458 - DNA, 15 bp, Homo sapiens
attgaattctatgtc

SEQ ID NO: 119459 - DNA, 15 bp, Homo sapiens
tattgaattctatgt

SEQ ID NO: 119460 - DNA, 15 bp, Homo sapiens
ctattgaattctatg

SEQ ID NO: 119461 - DNA, 15 bp, Homo sapiens
gctattgaattctat

SEQ ID NO: 119462 - DNA, 15 bp, Homo sapiens
agctattgaattcta

SEQ ID NO: 119463 - DNA, 15 bp, Homo sapiens
aagctattgaattct

SEQ ID NO: 119464 - DNA, 15 bp, Homo sapiens
caagctattgaattc

SEQ ID NO: 119465 - DNA, 15 bp, Homo sapiens
tcaagctattgaatt

SEQ ID NO: 119466 - DNA, 15 bp, Homo sapiens
ttcaagctattgaat

SEQ ID NO: 119467 - DNA, 15 bp, Homo sapiens
cttcaagctattgaa

SEQ ID NO: 119468 - DNA, 15 bp, Homo sapiens
tcttcaagctattga

SEQ ID NO: 119469 - DNA, 15 bp, Homo sapiens
ttcttcaagctattg

SEQ ID NO: 119470 - DNA, 15 bp, Homo sapiens
tttcttcaagctatt

SEQ ID NO: 119471 - DNA, 15 bp, Homo sapiens
atttcttcaagctat

SEQ ID NO: 119472 - DNA, 15 bp, Homo sapiens
aatttcttcaagcta

SEQ ID NO: 119473 - DNA, 15 bp, Homo sapiens
caatttcttcaagct

SEQ ID NO: 119474 - DNA, 15 bp, Homo sapiens
gcaatttcttcaagc

SEQ ID NO: 119475 - DNA, 15 bp, Homo sapiens
ggcaatttcttcaag

SEQ ID NO: 119476 - DNA, 15 bp, Homo sapiens
aggcaatttcttcaa

SEQ ID NO: 119477 - DNA, 15 bp, Homo sapiens
taggcaatttcttca

SEQ ID NO: 119478 - DNA, 15 bp, Homo sapiens
ataggcaatttcttc

SEQ ID NO: 119479 - DNA, 15 bp, Homo sapiens
cataggcaatttctt

SEQ ID NO: 119480 - DNA, 15 bp, Homo sapiens
tcataggcaatttct

SEQ ID NO: 119481 - DNA, 15 bp, Homo sapiens
atcataggcaatttc

SEQ ID NO: 119482 - DNA, 15 bp, Homo sapiens
aatcataggcaattt

SEQ ID NO: 119483 - DNA, 15 bp, Homo sapiens
gaatcataggcaatt

SEQ ID NO: 119484 - DNA, 15 bp, Homo sapiens
agaatcataggcaat

SEQ ID NO: 119485 - DNA, 15 bp, Homo sapiens
aagaatcataggcaa

SEQ ID NO: 119486 - DNA, 15 bp, Homo sapiens
gaagaatcataggca

SEQ ID NO: 119487 - DNA, 15 bp, Homo sapiens
tgaagaatcataggc

SEQ ID NO: 119488 - DNA, 15 bp, Homo sapiens
ttgaagaatcatagg

SEQ ID NO: 119489 - DNA, 15 bp, Homo sapiens
gttgaagaatcatag

SEQ ID NO: 119490 - DNA, 15 bp, Homo sapiens
agttgaagaatcata

SEQ ID NO: 119491 - DNA, 15 bp, Homo sapiens
aagttgaagaatcat

SEQ ID NO: 119492 - DNA, 15 bp, Homo sapiens
caagttgaagaatca

SEQ ID NO: 119493 - DNA, 15 bp, Homo sapiens
gcaagttgaagaatc

SEQ ID NO: 119494 - DNA, 15 bp, Homo sapiens
agcaagttgaagaat

SEQ ID NO: 119495 - DNA, 15 bp, Homo sapiens
aagcaagttgaagaa

SEQ ID NO: 119496 - DNA, 15 bp, Homo sapiens
taagcaagttgaaga

SEQ ID NO: 119497 - DNA, 15 bp, Homo sapiens
gtaagcaagttgaag

SEQ ID NO: 119498 - DNA, 15 bp, Homo sapiens
ggtaagcaagttgaa

SEQ ID NO: 119499 - DNA, 15 bp, Homo sapiens
aggtaagcaagttga

SEQ ID NO: 119500 - DNA, 15 bp, Homo sapiens
caggtaagcaagttg

SEQ ID NO: 119501 - DNA, 15 bp, Homo sapiens
ccaggtaagcaagtt

SEQ ID NO: 119502 - DNA, 15 bp, Homo sapiens
tccaggtaagcaagt

SEQ ID NO: 119503 - DNA, 15 bp, Homo sapiens
atccaggtaagcaag

SEQ ID NO: 119504 - DNA, 15 bp, Homo sapiens
gatccaggtaagcaa

SEQ ID NO: 119505 - DNA, 15 bp, Homo sapiens
agatccaggtaagca

SEQ ID NO: 119506 - DNA, 15 bp, Homo sapiens
cagatccaggtaagc

SEQ ID NO: 119507 - DNA, 15 bp, Homo sapiens
tcagatccaggtaag

SEQ ID NO: 119508 - DNA, 15 bp, Homo sapiens
ttcagatccaggtaa

SEQ ID NO: 119509 - DNA, 15 bp, Homo sapiens
attcagatccaggta

SEQ ID NO: 119510 - DNA, 15 bp, Homo sapiens
aattcagatccaggt

SEQ ID NO: 119511 - DNA, 15 bp, Homo sapiens
gaattcagatccagg

SEQ ID NO: 119512 - DNA, 15 bp, Homo sapiens
agaattcagatccag

SEQ ID NO: 119513 - DNA, 15 bp, Homo sapiens
aagaattcagatcca

SEQ ID NO: 119514 - DNA, 15 bp, Homo sapiens
gaagaattcagatcc

SEQ ID NO: 119515 - DNA, 15 bp, Homo sapiens
ggaagaattcagatc

SEQ ID NO: 119516 - DNA, 15 bp, Homo sapiens
tggaagaattcagat

SEQ ID NO: 119517 - DNA, 15 bp, Homo sapiens
atggaagaattcaga

SEQ ID NO: 119518 - DNA, 15 bp, Homo sapiens
tatggaagaattcag

SEQ ID NO: 119519 - DNA, 15 bp, Homo sapiens
ttatggaagaattca

SEQ ID NO: 119520 - DNA, 15 bp, Homo sapiens
gttatggaagaattc

SEQ ID NO: 119521 - DNA, 15 bp, Homo sapiens
tgttatggaagaatt

SEQ ID NO: 119522 - DNA, 15 bp, Homo sapiens
atgttatggaagaat

SEQ ID NO: 119523 - DNA, 15 bp, Homo sapiens
aatgttatggaagaa

SEQ ID NO: 119524 - DNA, 15 bp, Homo sapiens
aaatgttatggaaga

SEQ ID NO: 119525 - DNA, 15 bp, Homo sapiens
aaaatgttatggaag

SEQ ID NO: 119526 - DNA, 15 bp, Homo sapiens
taaaatgttatggaa

SEQ ID NO: 119527 - DNA, 15 bp, Homo sapiens
ttaaaatgttatgga

SEQ ID NO: 119528 - DNA, 15 bp, Homo sapiens
tttaaaatgttatgg

SEQ ID NO: 119529 - DNA, 15 bp, Homo sapiens
atttaaaatgttatg

SEQ ID NO: 119530 - DNA, 15 bp, Homo sapiens
gatttaaaatgttat

SEQ ID NO: 119531 - DNA, 15 bp, Homo sapiens
tgatttaaaatgtta

SEQ ID NO: 119532 - DNA, 15 bp, Homo sapiens
ttgatttaaaatgtt

SEQ ID NO: 119533 - DNA, 15 bp, Homo sapiens
attgatttaaaatgt

SEQ ID NO: 119534 - DNA, 15 bp, Homo sapiens
gattgatttaaaatg

SEQ ID NO: 119535 - DNA, 15 bp, Homo sapiens
ggattgatttaaaat

SEQ ID NO: 119536 - DNA, 15 bp, Homo sapiens
tggattgatttaaaa

SEQ ID NO: 119537 - DNA, 15 bp, Homo sapiens
ctggattgatttaaa

SEQ ID NO: 119538 - DNA, 15 bp, Homo sapiens
cctggattgatttaa

SEQ ID NO: 119539 - DNA, 15 bp, Homo sapiens
acctggattgattta

SEQ ID NO: 119540 - DNA, 15 bp, Homo sapiens
cacctggattgattt

SEQ ID NO: 119541 - DNA, 15 bp, Homo sapiens
acacctggattgatt

SEQ ID NO: 119542 - DNA, 15 bp, Homo sapiens
tacacctggattgat

SEQ ID NO: 119543 - DNA, 15 bp, Homo sapiens
gtacacctggattga

SEQ ID NO: 119544 - DNA, 15 bp, Homo sapiens
ggtacacctggattg

SEQ ID NO: 119545 - DNA, 15 bp, Homo sapiens
gggtacacctggatt

SEQ ID NO: 119546 - DNA, 15 bp, Homo sapiens
tgggtacacctggat

SEQ ID NO: 119547 - DNA, 15 bp, Homo sapiens
atgggtacacctgga

SEQ ID NO: 119548 - DNA, 15 bp, Homo sapiens
gatgggtacacctgg

SEQ ID NO: 119549 - DNA, 15 bp, Homo sapiens
agatgggtacacctg

SEQ ID NO: 119550 - DNA, 15 bp, Homo sapiens
aagatgggtacacct

SEQ ID NO: 119551 - DNA, 15 bp, Homo sapiens
gaagatgggtacacc

SEQ ID NO: 119552 - DNA, 15 bp, Homo sapiens
tgaagatgggtacac

SEQ ID NO: 119553 - DNA, 15 bp, Homo sapiens
ctgaagatgggtaca

SEQ ID NO: 119554 - DNA, 15 bp, Homo sapiens
tctgaagatgggtac

SEQ ID NO: 119555 - DNA, 15 bp, Homo sapiens
ttctgaagatgggta

SEQ ID NO: 119556 - DNA, 15 bp, Homo sapiens
tttctgaagatgggt

SEQ ID NO: 119557 - DNA, 15 bp, Homo sapiens
atttctgaagatggg

SEQ ID NO: 119558 - DNA, 15 bp, Homo sapiens
tatttctgaagatgg

SEQ ID NO: 119559 - DNA, 15 bp, Homo sapiens
ttatttctgaagatg

SEQ ID NO: 119560 - DNA, 15 bp, Homo sapiens
attatttctgaagat

SEQ ID NO: 119561 - DNA, 15 bp, Homo sapiens
cattatttctgaaga

SEQ ID NO: 119562 - DNA, 15 bp, Homo sapiens
ccattatttctgaag

SEQ ID NO: 119563 - DNA, 15 bp, Homo sapiens
tccattatttctgaa

SEQ ID NO: 119564 - DNA, 15 bp, Homo sapiens
gtccattatttctga

SEQ ID NO: 119565 - DNA, 15 bp, Homo sapiens
ggtccattatttctg

SEQ ID NO: 119566 - DNA, 15 bp, Homo sapiens
gggtccattatttct

SEQ ID NO: 119567 - DNA, 15 bp, Homo sapiens
ggggtccattatttc

SEQ ID NO: 119568 - DNA, 15 bp, Homo sapiens
tggggtccattattt

SEQ ID NO: 119569 - DNA, 15 bp, Homo sapiens
ttggggtccattatt

SEQ ID NO: 119570 - DNA, 15 bp, Homo sapiens
attggggtccattat

SEQ ID NO: 119571 - DNA, 15 bp, Homo sapiens
cattggggtccatta

SEQ ID NO: 119572 - DNA, 15 bp, Homo sapiens
acattggggtccatt

SEQ ID NO: 119573 - DNA, 15 bp, Homo sapiens
gacattggggtccat

SEQ ID NO: 119574 - DNA, 15 bp, Homo sapiens
agacattggggtcca

SEQ ID NO: 119575 - DNA, 15 bp, Homo sapiens
gagacattggggtcc

SEQ ID NO: 119576 - DNA, 15 bp, Homo sapiens
tgagacattggggtc

SEQ ID NO: 119577 - DNA, 15 bp, Homo sapiens
ctgagacattggggt

SEQ ID NO: 119578 - DNA, 15 bp, Homo sapiens
tctgagacattgggg

SEQ ID NO: 119579 - DNA, 15 bp, Homo sapiens
ttctgagacattggg

SEQ ID NO: 119580 - DNA, 15 bp, Homo sapiens
attctgagacattgg

SEQ ID NO: 119581 - DNA, 15 bp, Homo sapiens
aattctgagacattg

SEQ ID NO: 119582 - DNA, 15 bp, Homo sapiens
taattctgagacatt

SEQ ID NO: 119583 - DNA, 15 bp, Homo sapiens
gtaattctgagacat

SEQ ID NO: 119584 - DNA, 15 bp, Homo sapiens
tgtaattctgagaca

SEQ ID NO: 119585 - DNA, 15 bp, Homo sapiens
ctgtaattctgagac

SEQ ID NO: 119586 - DNA, 15 bp, Homo sapiens
tctgtaattctgaga

SEQ ID NO: 119587 - DNA, 15 bp, Homo sapiens
ctctgtaattctgag

SEQ ID NO: 119588 - DNA, 15 bp, Homo sapiens
actctgtaattctga

SEQ ID NO: 119589 - DNA, 15 bp, Homo sapiens
gactctgtaattctg

SEQ ID NO: 119590 - DNA, 15 bp, Homo sapiens
tgactctgtaattct

SEQ ID NO: 119591 - DNA, 15 bp, Homo sapiens
ctgactctgtaattc

SEQ ID NO: 119592 - DNA, 15 bp, Homo sapiens
tctgactctgtaatt

SEQ ID NO: 119593 - DNA, 15 bp, Homo sapiens
ctctgactctgtaat

SEQ ID NO: 119594 - DNA, 15 bp, Homo sapiens
actctgactctgtaa

SEQ ID NO: 119595 - DNA, 15 bp, Homo sapiens
gactctgactctgta

SEQ ID NO: 119596 - DNA, 15 bp, Homo sapiens
ggactctgactctgt

SEQ ID NO: 119597 - DNA, 15 bp, Homo sapiens
aggactctgactctg

SEQ ID NO: 119598 - DNA, 15 bp, Homo sapiens
gaggactctgactct

SEQ ID NO: 119599 - DNA, 15 bp, Homo sapiens
tgaggactctgactc

SEQ ID NO: 119600 - DNA, 15 bp, Homo sapiens
ttgaggactctgact

SEQ ID NO: 119601 - DNA, 15 bp, Homo sapiens
gttgaggactctgac

SEQ ID NO: 119602 - DNA, 15 bp, Homo sapiens
tgttgaggactctga

SEQ ID NO: 119603 - DNA, 15 bp, Homo sapiens
atgttgaggactctg

SEQ ID NO: 119604 - DNA, 15 bp, Homo sapiens
catgttgaggactct

SEQ ID NO: 119605 - DNA, 15 bp, Homo sapiens
acatgttgaggactc

SEQ ID NO: 119606 - DNA, 15 bp, Homo sapiens
gacatgttgaggact

SEQ ID NO: 119607 - DNA, 15 bp, Homo sapiens
ggacatgttgaggac

SEQ ID NO: 119608 - DNA, 15 bp, Homo sapiens
tggacatgttgagga

SEQ ID NO: 119609 - DNA, 15 bp, Homo sapiens
ttggacatgttgagg

SEQ ID NO: 119610 - DNA, 15 bp, Homo sapiens
tttggacatgttgag

SEQ ID NO: 119611 - DNA, 15 bp, Homo sapiens
ctttggacatgttga

SEQ ID NO: 119612 - DNA, 15 bp, Homo sapiens
gctttggacatgttg

SEQ ID NO: 119613 - DNA, 15 bp, Homo sapiens
tgctttggacatgtt

SEQ ID NO: 119614 - DNA, 15 bp, Homo sapiens
atgctttggacatgt

SEQ ID NO: 119615 - DNA, 15 bp, Homo sapiens
aatgctttggacatg

SEQ ID NO: 119616 - DNA, 15 bp, Homo sapiens
aaatgctttggacat

SEQ ID NO: 119617 - DNA, 15 bp, Homo sapiens
gaaatgctttggaca

SEQ ID NO: 119618 - DNA, 15 bp, Homo sapiens
cgaaatgctttggac

SEQ ID NO: 119619 - DNA, 15 bp, Homo sapiens
acgaaatgctttgga

SEQ ID NO: 119620 - DNA, 15 bp, Homo sapiens
cacgaaatgctttgg

SEQ ID NO: 119621 - DNA, 15 bp, Homo sapiens
ccacgaaatgctttg

SEQ ID NO: 119622 - DNA, 15 bp, Homo sapiens
tccacgaaatgcttt

SEQ ID NO: 119623 - DNA, 15 bp, Homo sapiens
ttccacgaaatgctt

SEQ ID NO: 119624 - DNA, 15 bp, Homo sapiens
tttccacgaaatgct

SEQ ID NO: 119625 - DNA, 15 bp, Homo sapiens
atttccacgaaatgc

SEQ ID NO: 119626 - DNA, 15 bp, Homo sapiens
aatttccacgaaatg

SEQ ID NO: 119627 - DNA, 15 bp, Homo sapiens
taatttccacgaaat

SEQ ID NO: 119628 - DNA, 15 bp, Homo sapiens
ataatttccacgaaa

SEQ ID NO: 119629 - DNA, 15 bp, Homo sapiens
aataatttccacgaa

SEQ ID NO: 119630 - DNA, 15 bp, Homo sapiens
gaataatttccacga

SEQ ID NO: 119631 - DNA, 15 bp, Homo sapiens
ggaataatttccacg

SEQ ID NO: 119632 - DNA, 15 bp, Homo sapiens
tggaataatttccac

SEQ ID NO: 119633 - DNA, 15 bp, Homo sapiens
gtggaataatttcca

SEQ ID NO: 119634 - DNA, 15 bp, Homo sapiens
ggtggaataatttcc

SEQ ID NO: 119635 - DNA, 15 bp, Homo sapiens
tggtggaataatttc

SEQ ID NO: 119636 - DNA, 15 bp, Homo sapiens
atggtggaataattt

SEQ ID NO: 119637 - DNA, 15 bp, Homo sapiens
catggtggaataatt

SEQ ID NO: 119638 - DNA, 15 bp, Homo sapiens
tcatggtggaataat

SEQ ID NO: 119639 - DNA, 15 bp, Homo sapiens
ttcatggtggaataa

SEQ ID NO: 119640 - DNA, 15 bp, Homo sapiens
cttcatggtggaata

SEQ ID NO: 119641 - DNA, 15 bp, Homo sapiens
tcttcatggtggaat

SEQ ID NO: 119642 - DNA, 15 bp, Homo sapiens
gtcttcatggtggaa

SEQ ID NO: 119643 - DNA, 15 bp, Homo sapiens
agtcttcatggtgga

SEQ ID NO: 119644 - DNA, 15 bp, Homo sapiens
tagtcttcatggtgg

SEQ ID NO: 119645 - DNA, 15 bp, Homo sapiens
ctagtcttcatggtg

SEQ ID NO: 119646 - DNA, 15 bp, Homo sapiens
tctagtcttcatggt

SEQ ID NO: 119647 - DNA, 15 bp, Homo sapiens
ttctagtcttcatgg

SEQ ID NO: 119648 - DNA, 15 bp, Homo sapiens
attctagtcttcatg

SEQ ID NO: 119649 - DNA, 15 bp, Homo sapiens
cattctagtcttcat

SEQ ID NO: 119650 - DNA, 15 bp, Homo sapiens
ccattctagtcttca

SEQ ID NO: 119651 - DNA, 15 bp, Homo sapiens
gccattctagtcttc

SEQ ID NO: 119652 - DNA, 15 bp, Homo sapiens
ggccattctagtctt

SEQ ID NO: 119653 - DNA, 15 bp, Homo sapiens
aggccattctagtct

SEQ ID NO: 119654 - DNA, 15 bp, Homo sapiens
gaggccattctagtc

SEQ ID NO: 119655 - DNA, 15 bp, Homo sapiens
agaggccattctagt

SEQ ID NO: 119656 - DNA, 15 bp, Homo sapiens
gagaggccattctag

SEQ ID NO: 119657 - DNA, 15 bp, Homo sapiens
agagaggccattcta

SEQ ID NO: 119658 - DNA, 15 bp, Homo sapiens
aagagaggccattct

SEQ ID NO: 119659 - DNA, 15 bp, Homo sapiens
gaagagaggccattc

SEQ ID NO: 119660 - DNA, 15 bp, Homo sapiens
tgaagagaggccatt

SEQ ID NO: 119661 - DNA, 15 bp, Homo sapiens
atgaagagaggccat

SEQ ID NO: 119662 - DNA, 15 bp, Homo sapiens
catgaagagaggcca

SEQ ID NO: 119663 - DNA, 15 bp, Homo sapiens
ccatgaagagaggcc

SEQ ID NO: 119664 - DNA, 15 bp, Homo sapiens
tccatgaagagaggc

SEQ ID NO: 119665 - DNA, 15 bp, Homo sapiens
atccatgaagagagg

SEQ ID NO: 119666 - DNA, 15 bp, Homo sapiens
aatccatgaagagag

SEQ ID NO: 119667 - DNA, 15 bp, Homo sapiens
gaatccatgaagaga

SEQ ID NO: 119668 - DNA, 15 bp, Homo sapiens
tgaatccatgaagag

SEQ ID NO: 119669 - DNA, 15 bp, Homo sapiens
ctgaatccatgaaga

SEQ ID NO: 119670 - DNA, 15 bp, Homo sapiens
gctgaatccatgaag

SEQ ID NO: 119671 - DNA, 15 bp, Homo sapiens
agctgaatccatgaa

SEQ ID NO: 119672 - DNA, 15 bp, Homo sapiens
aagctgaatccatga

SEQ ID NO: 119673 - DNA, 15 bp, Homo sapiens
caagctgaatccatg

SEQ ID NO: 119674 - DNA, 15 bp, Homo sapiens
gcaagctgaatccat

SEQ ID NO: 119675 - DNA, 15 bp, Homo sapiens
agcaagctgaatcca

SEQ ID NO: 119676 - DNA, 15 bp, Homo sapiens
tagcaagctgaatcc

SEQ ID NO: 119677 - DNA, 15 bp, Homo sapiens
ttagcaagctgaatc

SEQ ID NO: 119678 - DNA, 15 bp, Homo sapiens
cttagcaagctgaat

SEQ ID NO: 119679 - DNA, 15 bp, Homo sapiens
ccttagcaagctgaa

SEQ ID NO: 119680 - DNA, 15 bp, Homo sapiens
tccttagcaagctga

SEQ ID NO: 119681 - DNA, 15 bp, Homo sapiens
ctccttagcaagctg

SEQ ID NO: 119682 - DNA, 15 bp, Homo sapiens
cctccttagcaagct

SEQ ID NO: 119683 - DNA, 15 bp, Homo sapiens
gcctccttagcaagc

SEQ ID NO: 119684 - DNA, 15 bp, Homo sapiens
agcctccttagcaag

SEQ ID NO: 119685 - DNA, 15 bp, Homo sapiens
aagcctccttagcaa

SEQ ID NO: 119686 - DNA, 15 bp, Homo sapiens
taagcctccttagca

SEQ ID NO: 119687 - DNA, 15 bp, Homo sapiens
ctaagcctccttagc

SEQ ID NO: 119688 - DNA, 15 bp, Homo sapiens
actaagcctccttag

SEQ ID NO: 119689 - DNA, 15 bp, Homo sapiens
aactaagcctcctta

SEQ ID NO: 119690 - DNA, 15 bp, Homo sapiens
gaactaagcctcctt

SEQ ID NO: 119691 - DNA, 15 bp, Homo sapiens
tgaactaagcctcct

SEQ ID NO: 119692 - DNA, 15 bp, Homo sapiens
ctgaactaagcctcc

SEQ ID NO: 119693 - DNA, 15 bp, Homo sapiens
tctgaactaagcctc

SEQ ID NO: 119694 - DNA, 15 bp, Homo sapiens
ctctgaactaagcct

SEQ ID NO: 119695 - DNA, 15 bp, Homo sapiens
cctctgaactaagcc

SEQ ID NO: 119696 - DNA, 15 bp, Homo sapiens
ccctctgaactaagc

SEQ ID NO: 119697 - DNA, 15 bp, Homo sapiens
tccctctgaactaag

SEQ ID NO: 119698 - DNA, 15 bp, Homo sapiens
gtccctctgaactaa

SEQ ID NO: 119699 - DNA, 15 bp, Homo sapiens
agtccctctgaacta

SEQ ID NO: 119700 - DNA, 15 bp, Homo sapiens
tagtccctctgaact

SEQ ID NO: 119701 - DNA, 15 bp, Homo sapiens
ttagtccctctgaac

SEQ ID NO: 119702 - DNA, 15 bp, Homo sapiens
cttagtccctctgaa

SEQ ID NO: 119703 - DNA, 15 bp, Homo sapiens
tcttagtccctctga

SEQ ID NO: 119704 - DNA, 15 bp, Homo sapiens
gtcttagtccctctg

SEQ ID NO: 119705 - DNA, 15 bp, Homo sapiens
tgtcttagtccctct

SEQ ID NO: 119706 - DNA, 15 bp, Homo sapiens
gtgtcttagtccctc

SEQ ID NO: 119707 - DNA, 15 bp, Homo sapiens
agtgtcttagtccct

SEQ ID NO: 119708 - DNA, 15 bp, Homo sapiens
gagtgtcttagtccc

SEQ ID NO: 119709 - DNA, 15 bp, Homo sapiens
agagtgtcttagtcc

SEQ ID NO: 119710 - DNA, 15 bp, Homo sapiens
gagagtgtcttagtc

SEQ ID NO: 119711 - DNA, 15 bp, Homo sapiens
ggagagtgtcttagt

SEQ ID NO: 119712 - DNA, 15 bp, Homo sapiens
aggagagtgtcttag

SEQ ID NO: 119713 - DNA, 15 bp, Homo sapiens
aaggagagtgtctta

SEQ ID NO: 119714 - DNA, 15 bp, Homo sapiens
aaaggagagtgtctt

SEQ ID NO: 119715 - DNA, 15 bp, Homo sapiens
aaaaggagagtgtct

SEQ ID NO: 119716 - DNA, 15 bp, Homo sapiens
taaaaggagagtgtc

SEQ ID NO: 119717 - DNA, 15 bp, Homo sapiens
ctaaaaggagagtgt

SEQ ID NO: 119718 - DNA, 15 bp, Homo sapiens
gctaaaaggagagtg

SEQ ID NO: 119719 - DNA, 15 bp, Homo sapiens
tgctaaaaggagagt

SEQ ID NO: 119720 - DNA, 15 bp, Homo sapiens
ttgctaaaaggagag

SEQ ID NO: 119721 - DNA, 15 bp, Homo sapiens
tttgctaaaaggaga

SEQ ID NO: 119722 - DNA, 15 bp, Homo sapiens
atttgctaaaaggag

SEQ ID NO: 119723 - DNA, 15 bp, Homo sapiens
tatttgctaaaagga

SEQ ID NO: 119724 - DNA, 15 bp, Homo sapiens
ttatttgctaaaagg

SEQ ID NO: 119725 - DNA, 15 bp, Homo sapiens
gttatttgctaaaag

SEQ ID NO: 119726 - DNA, 15 bp, Homo sapiens
agttatttgctaaaa

SEQ ID NO: 119727 - DNA, 15 bp, Homo sapiens
tagttatttgctaaa

SEQ ID NO: 119728 - DNA, 15 bp, Homo sapiens
ttagttatttgctaa

SEQ ID NO: 119729 - DNA, 15 bp, Homo sapiens
gttagttatttgcta

SEQ ID NO: 119730 - DNA, 15 bp, Homo sapiens
ggttagttatttgct

SEQ ID NO: 119731 - DNA, 15 bp, Homo sapiens
tggttagttatttgc

SEQ ID NO: 119732 - DNA, 15 bp, Homo sapiens
ttggttagttatttg

SEQ ID NO: 119733 - DNA, 15 bp, Homo sapiens
tttggttagttattt

SEQ ID NO: 119734 - DNA, 15 bp, Homo sapiens
ttttggttagttatt

SEQ ID NO: 119735 - DNA, 15 bp, Homo sapiens
cttttggttagttat

SEQ ID NO: 119736 - DNA, 15 bp, Homo sapiens
ccttttggttagtta

SEQ ID NO: 119737 - DNA, 15 bp, Homo sapiens
cccttttggttagtt

SEQ ID NO: 119738 - DNA, 15 bp, Homo sapiens
gcccttttggttagt

SEQ ID NO: 119739 - DNA, 15 bp, Homo sapiens
tgcccttttggttag

SEQ ID NO: 119740 - DNA, 15 bp, Homo sapiens
ttgcccttttggtta

SEQ ID NO: 119741 - DNA, 15 bp, Homo sapiens
cttgcccttttggtt

SEQ ID NO: 119742 - DNA, 15 bp, Homo sapiens
ccttgcccttttggt

SEQ ID NO: 119743 - DNA, 15 bp, Homo sapiens
tccttgcccttttgg

SEQ ID NO: 119744 - DNA, 15 bp, Homo sapiens
ttccttgcccttttg

SEQ ID NO: 119745 - DNA, 15 bp, Homo sapiens
cttccttgccctttt

SEQ ID NO: 119746 - DNA, 15 bp, Homo sapiens
ccttccttgcccttt

SEQ ID NO: 119747 - DNA, 15 bp, Homo sapiens
cccttccttgccctt

SEQ ID NO: 119748 - DNA, 15 bp, Homo sapiens
tcccttccttgccct

SEQ ID NO: 119749 - DNA, 15 bp, Homo sapiens
ctcccttccttgccc

SEQ ID NO: 119750 - DNA, 15 bp, Homo sapiens
cctcccttccttgcc

SEQ ID NO: 119751 - DNA, 15 bp, Homo sapiens
acctcccttccttgc

SEQ ID NO: 119752 - DNA, 15 bp, Homo sapiens
tacctcccttccttg

SEQ ID NO: 119753 - DNA, 15 bp, Homo sapiens
ttacctcccttcctt

SEQ ID NO: 119754 - DNA, 15 bp, Homo sapiens
tttacctcccttcct

SEQ ID NO: 119755 - DNA, 15 bp, Homo sapiens
ttttacctcccttcc

SEQ ID NO: 119756 - DNA, 15 bp, Homo sapiens
cttttacctcccttc

SEQ ID NO: 119757 - DNA, 15 bp, Homo sapiens
tcttttacctccctt

SEQ ID NO: 119758 - DNA, 15 bp, Homo sapiens
gtcttttacctccct

SEQ ID NO: 119759 - DNA, 15 bp, Homo sapiens
cgtcttttacctccc

SEQ ID NO: 119760 - DNA, 15 bp, Homo sapiens
acgtcttttacctcc

SEQ ID NO: 119761 - DNA, 15 bp, Homo sapiens
gacgtcttttacctc

SEQ ID NO: 119762 - DNA, 15 bp, Homo sapiens
tgacgtcttttacct

SEQ ID NO: 119763 - DNA, 15 bp, Homo sapiens
atgacgtcttttacc

SEQ ID NO: 119764 - DNA, 15 bp, Homo sapiens
tatgacgtcttttac

SEQ ID NO: 119765 - DNA, 15 bp, Homo sapiens
ttatgacgtctttta

SEQ ID NO: 119766 - DNA, 15 bp, Homo sapiens
gttatgacgtctttt

SEQ ID NO: 119767 - DNA, 15 bp, Homo sapiens
ggttatgacgtcttt

SEQ ID NO: 119768 - DNA, 15 bp, Homo sapiens
tggttatgacgtctt

SEQ ID NO: 119769 - DNA, 15 bp, Homo sapiens
ctggttatgacgtct

SEQ ID NO: 119770 - DNA, 15 bp, Homo sapiens
cctggttatgacgtc

SEQ ID NO: 119771 - DNA, 15 bp, Homo sapiens
gcctggttatgacgt

SEQ ID NO: 119772 - DNA, 15 bp, Homo sapiens
ggcctggttatgacg

SEQ ID NO: 119773 - DNA, 15 bp, Homo sapiens
tggcctggttatgac

SEQ ID NO: 119774 - DNA, 15 bp, Homo sapiens
ctggcctggttatga

SEQ ID NO: 119775 - DNA, 15 bp, Homo sapiens
actggcctggttatg

SEQ ID NO: 119776 - DNA, 15 bp, Homo sapiens
tactggcctggttat

SEQ ID NO: 119777 - DNA, 15 bp, Homo sapiens
ctactggcctggtta

SEQ ID NO: 119778 - DNA, 15 bp, Homo sapiens
tctactggcctggtt

SEQ ID NO: 119779 - DNA, 15 bp, Homo sapiens
ttctactggcctggt

SEQ ID NO: 119780 - DNA, 15 bp, Homo sapiens
attctactggcctgg

SEQ ID NO: 119781 - DNA, 15 bp, Homo sapiens
gattctactggcctg

SEQ ID NO: 119782 - DNA, 15 bp, Homo sapiens
ggattctactggcct

SEQ ID NO: 119783 - DNA, 15 bp, Homo sapiens
gggattctactggcc

SEQ ID NO: 119784 - DNA, 15 bp, Homo sapiens
ggggattctactggc

SEQ ID NO: 119785 - DNA, 15 bp, Homo sapiens
aggggattctactgg

SEQ ID NO: 119786 - DNA, 15 bp, Homo sapiens
caggggattctactg

SEQ ID NO: 119787 - DNA, 15 bp, Homo sapiens
ccaggggattctact

SEQ ID NO: 119788 - DNA, 15 bp, Homo sapiens
accaggggattctac

SEQ ID NO: 119789 - DNA, 15 bp, Homo sapiens
gaccaggggattcta

SEQ ID NO: 119790 - DNA, 15 bp, Homo sapiens
agaccaggggattct

SEQ ID NO: 119791 - DNA, 15 bp, Homo sapiens
cagaccaggggattc

SEQ ID NO: 119792 - DNA, 15 bp, Homo sapiens
ccagaccaggggatt

SEQ ID NO: 119793 - DNA, 15 bp, Homo sapiens
gccagaccaggggat

SEQ ID NO: 119794 - DNA, 15 bp, Homo sapiens
ggccagaccagggga

SEQ ID NO: 119795 - DNA, 15 bp, Homo sapiens
tggccagaccagggg

SEQ ID NO: 119796 - DNA, 15 bp, Homo sapiens
atggccagaccaggg

SEQ ID NO: 119797 - DNA, 15 bp, Homo sapiens
aatggccagaccagg

SEQ ID NO: 119798 - DNA, 15 bp, Homo sapiens
taatggccagaccag

SEQ ID NO: 119799 - DNA, 15 bp, Homo sapiens
gtaatggccagacca

SEQ ID NO: 119800 - DNA, 15 bp, Homo sapiens
tgtaatggccagacc

SEQ ID NO: 119801 - DNA, 15 bp, Homo sapiens
atgtaatggccagac

SEQ ID NO: 119802 - DNA, 15 bp, Homo sapiens
catgtaatggccaga

SEQ ID NO: 119803 - DNA, 15 bp, Homo sapiens
acatgtaatggccag

SEQ ID NO: 119804 - DNA, 15 bp, Homo sapiens
cacatgtaatggcca

SEQ ID NO: 119805 - DNA, 15 bp, Homo sapiens
tcacatgtaatggcc

SEQ ID NO: 119806 - DNA, 15 bp, Homo sapiens
atcacatgtaatggc

SEQ ID NO: 119807 - DNA, 15 bp, Homo sapiens
catcacatgtaatgg

SEQ ID NO: 119808 - DNA, 15 bp, Homo sapiens
tcatcacatgtaatg

SEQ ID NO: 119809 - DNA, 15 bp, Homo sapiens
atcatcacatgtaat

SEQ ID NO: 119810 - DNA, 15 bp, Homo sapiens
aatcatcacatgtaa

SEQ ID NO: 119811 - DNA, 15 bp, Homo sapiens
aaatcatcacatgta

SEQ ID NO: 119812 - DNA, 15 bp, Homo sapiens
gaaatcatcacatgt

SEQ ID NO: 119813 - DNA, 15 bp, Homo sapiens
tgaaatcatcacatg

SEQ ID NO: 119814 - DNA, 15 bp, Homo sapiens
ttgaaatcatcacat

SEQ ID NO: 119815 - DNA, 15 bp, Homo sapiens
tttgaaatcatcaca

SEQ ID NO: 119816 - DNA, 15 bp, Homo sapiens
atttgaaatcatcac

SEQ ID NO: 119817 - DNA, 15 bp, Homo sapiens
catttgaaatcatca

SEQ ID NO: 119818 - DNA, 15 bp, Homo sapiens
ccatttgaaatcatc

SEQ ID NO: 119819 - DNA, 15 bp, Homo sapiens
cccatttgaaatcat

SEQ ID NO: 119820 - DNA, 15 bp, Homo sapiens
acccatttgaaatca

SEQ ID NO: 119821 - DNA, 15 bp, Homo sapiens
aacccatttgaaatc

SEQ ID NO: 119822 - DNA, 15 bp, Homo sapiens
gaacccatttgaaat

SEQ ID NO: 119823 - DNA, 15 bp, Homo sapiens
agaacccatttgaaa

SEQ ID NO: 119824 - DNA, 15 bp, Homo sapiens
aagaacccatttgaa

SEQ ID NO: 119825 - DNA, 15 bp, Homo sapiens
taagaacccatttga

SEQ ID NO: 119826 - DNA, 15 bp, Homo sapiens
ctaagaacccatttg

SEQ ID NO: 119827 - DNA, 15 bp, Homo sapiens
actaagaacccattt

SEQ ID NO: 119828 - DNA, 15 bp, Homo sapiens
tactaagaacccatt

SEQ ID NO: 119829 - DNA, 15 bp, Homo sapiens
gtactaagaacccat

SEQ ID NO: 119830 - DNA, 15 bp, Homo sapiens
ggtactaagaaccca

SEQ ID NO: 119831 - DNA, 15 bp, Homo sapiens
aggtactaagaaccc

SEQ ID NO: 119832 - DNA, 15 bp, Homo sapiens
aaggtactaagaacc

SEQ ID NO: 119833 - DNA, 15 bp, Homo sapiens
taaggtactaagaac

SEQ ID NO: 119834 - DNA, 15 bp, Homo sapiens
ttaaggtactaagaa

SEQ ID NO: 119835 - DNA, 15 bp, Homo sapiens
attaaggtactaaga

SEQ ID NO: 119836 - DNA, 15 bp, Homo sapiens
aattaaggtactaag

SEQ ID NO: 119837 - DNA, 15 bp, Homo sapiens
aaattaaggtactaa

SEQ ID NO: 119838 - DNA, 15 bp, Homo sapiens
aaaattaaggtacta

SEQ ID NO: 119839 - DNA, 15 bp, Homo sapiens
caaaattaaggtact

SEQ ID NO: 119840 - DNA, 15 bp, Homo sapiens
tcaaaattaaggtac

SEQ ID NO: 119841 - DNA, 15 bp, Homo sapiens
ctcaaaattaaggta

SEQ ID NO: 119842 - DNA, 15 bp, Homo sapiens
cctcaaaattaaggt

SEQ ID NO: 119843 - DNA, 15 bp, Homo sapiens
ccctcaaaattaagg

SEQ ID NO: 119844 - DNA, 15 bp, Homo sapiens
tccctcaaaattaag

SEQ ID NO: 119845 - DNA, 15 bp, Homo sapiens
ttccctcaaaattaa

SEQ ID NO: 119846 - DNA, 15 bp, Homo sapiens
tttccctcaaaatta

SEQ ID NO: 119847 - DNA, 15 bp, Homo sapiens
ttttccctcaaaatt

SEQ ID NO: 119848 - DNA, 15 bp, Homo sapiens
cttttccctcaaaat

SEQ ID NO: 119849 - DNA, 15 bp, Homo sapiens
tcttttccctcaaaa

SEQ ID NO: 119850 - DNA, 15 bp, Homo sapiens
ctcttttccctcaaa

SEQ ID NO: 119851 - DNA, 15 bp, Homo sapiens
actcttttccctcaa

SEQ ID NO: 119852 - DNA, 15 bp, Homo sapiens
tactcttttccctca

SEQ ID NO: 119853 - DNA, 15 bp, Homo sapiens
ctactcttttccctc

SEQ ID NO: 119854 - DNA, 15 bp, Homo sapiens
tctactcttttccct

SEQ ID NO: 119855 - DNA, 15 bp, Homo sapiens
ctctactcttttccc

SEQ ID NO: 119856 - DNA, 15 bp, Homo sapiens
cctctactcttttcc

SEQ ID NO: 119857 - DNA, 15 bp, Homo sapiens
tcctctactcttttc

SEQ ID NO: 119858 - DNA, 15 bp, Homo sapiens
ttcctctactctttt

SEQ ID NO: 119859 - DNA, 15 bp, Homo sapiens
tttcctctactcttt

SEQ ID NO: 119860 - DNA, 15 bp, Homo sapiens
gtttcctctactctt

SEQ ID NO: 119861 - DNA, 15 bp, Homo sapiens
ggtttcctctactct

SEQ ID NO: 119862 - DNA, 15 bp, Homo sapiens
tggtttcctctactc

SEQ ID NO: 119863 - DNA, 15 bp, Homo sapiens
ctggtttcctctact

SEQ ID NO: 119864 - DNA, 15 bp, Homo sapiens
gctggtttcctctac

SEQ ID NO: 119865 - DNA, 15 bp, Homo sapiens
ggctggtttcctcta

SEQ ID NO: 119866 - DNA, 15 bp, Homo sapiens
tggctggtttcctct

SEQ ID NO: 119867 - DNA, 15 bp, Homo sapiens
ttggctggtttcctc

SEQ ID NO: 119868 - DNA, 15 bp, Homo sapiens
attggctggtttcct

SEQ ID NO: 119869 - DNA, 15 bp, Homo sapiens
cattggctggtttcc

SEQ ID NO: 119870 - DNA, 15 bp, Homo sapiens
gcattggctggtttc

SEQ ID NO: 119871 - DNA, 15 bp, Homo sapiens
agcattggctggttt

SEQ ID NO: 119872 - DNA, 15 bp, Homo sapiens
aagcattggctggtt

SEQ ID NO: 119873 - DNA, 15 bp, Homo sapiens
aaagcattggctggt

SEQ ID NO: 119874 - DNA, 15 bp, Homo sapiens
caaagcattggctgg

SEQ ID NO: 119875 - DNA, 15 bp, Homo sapiens
gcaaagcattggctg

SEQ ID NO: 119876 - DNA, 15 bp, Homo sapiens
tgcaaagcattggct

SEQ ID NO: 119877 - DNA, 15 bp, Homo sapiens
atgcaaagcattggc

SEQ ID NO: 119878 - DNA, 15 bp, Homo sapiens
catgcaaagcattgg

SEQ ID NO: 119879 - DNA, 15 bp, Homo sapiens
gcatgcaaagcattg

SEQ ID NO: 119880 - DNA, 15 bp, Homo sapiens
agcatgcaaagcatt

SEQ ID NO: 119881 - DNA, 15 bp, Homo sapiens
aagcatgcaaagcat

SEQ ID NO: 119882 - DNA, 15 bp, Homo sapiens
taagcatgcaaagca

SEQ ID NO: 119883 - DNA, 15 bp, Homo sapiens
ctaagcatgcaaagc

SEQ ID NO: 119884 - DNA, 15 bp, Homo sapiens
actaagcatgcaaag

SEQ ID NO: 119885 - DNA, 15 bp, Homo sapiens
aactaagcatgcaaa

SEQ ID NO: 119886 - DNA, 15 bp, Homo sapiens
aaactaagcatgcaa

SEQ ID NO: 119887 - DNA, 15 bp, Homo sapiens
gaaactaagcatgca

SEQ ID NO: 119888 - DNA, 15 bp, Homo sapiens
agaaactaagcatgc

SEQ ID NO: 119889 - DNA, 15 bp, Homo sapiens
cagaaactaagcatg

SEQ ID NO: 119890 - DNA, 15 bp, Homo sapiens
gcagaaactaagcat

SEQ ID NO: 119891 - DNA, 15 bp, Homo sapiens
agcagaaactaagca

SEQ ID NO: 119892 - DNA, 15 bp, Homo sapiens
cagcagaaactaagc

SEQ ID NO: 119893 - DNA, 15 bp, Homo sapiens
tcagcagaaactaag

SEQ ID NO: 119894 - DNA, 15 bp, Homo sapiens
atcagcagaaactaa

SEQ ID NO: 119895 - DNA, 15 bp, Homo sapiens
catcagcagaaacta

SEQ ID NO: 119896 - DNA, 15 bp, Homo sapiens
tcatcagcagaaact

SEQ ID NO: 119897 - DNA, 15 bp, Homo sapiens
gtcatcagcagaaac

SEQ ID NO: 119898 - DNA, 15 bp, Homo sapiens
tgtcatcagcagaaa

SEQ ID NO: 119899 - DNA, 15 bp, Homo sapiens
gtgtcatcagcagaa

SEQ ID NO: 119900 - DNA, 15 bp, Homo sapiens
agtgtcatcagcaga

SEQ ID NO: 119901 - DNA, 15 bp, Homo sapiens
cagtgtcatcagcag

SEQ ID NO: 119902 - DNA, 15 bp, Homo sapiens
tcagtgtcatcagca

SEQ ID NO: 119903 - DNA, 15 bp, Homo sapiens
ttcagtgtcatcagc

SEQ ID NO: 119904 - DNA, 15 bp, Homo sapiens
gttcagtgtcatcag

SEQ ID NO: 119905 - DNA, 15 bp, Homo sapiens
agttcagtgtcatca

SEQ ID NO: 119906 - DNA, 15 bp, Homo sapiens
gagttcagtgtcatc

SEQ ID NO: 119907 - DNA, 15 bp, Homo sapiens
tgagttcagtgtcat

SEQ ID NO: 119908 - DNA, 15 bp, Homo sapiens
ctgagttcagtgtca

SEQ ID NO: 119909 - DNA, 15 bp, Homo sapiens
tctgagttcagtgtc

SEQ ID NO: 119910 - DNA, 15 bp, Homo sapiens
ctctgagttcagtgt

SEQ ID NO: 119911 - DNA, 15 bp, Homo sapiens
tctctgagttcagtg

SEQ ID NO: 119912 - DNA, 15 bp, Homo sapiens
ttctctgagttcagt

SEQ ID NO: 119913 - DNA, 15 bp, Homo sapiens
gttctctgagttcag

SEQ ID NO: 119914 - DNA, 15 bp, Homo sapiens
agttctctgagttca

SEQ ID NO: 119915 - DNA, 15 bp, Homo sapiens
cagttctctgagttc

SEQ ID NO: 119916 - DNA, 15 bp, Homo sapiens
tcagttctctgagtt

SEQ ID NO: 119917 - DNA, 15 bp, Homo sapiens
ctcagttctctgagt

SEQ ID NO: 119918 - DNA, 15 bp, Homo sapiens
tctcagttctctgag

SEQ ID NO: 119919 - DNA, 15 bp, Homo sapiens
atctcagttctctga

SEQ ID NO: 119920 - DNA, 15 bp, Homo sapiens
gatctcagttctctg

SEQ ID NO: 119921 - DNA, 15 bp, Homo sapiens
agatctcagttctct

SEQ ID NO: 119922 - DNA, 15 bp, Homo sapiens
aagatctcagttctc

SEQ ID NO: 119923 - DNA, 15 bp, Homo sapiens
aaagatctcagttct

SEQ ID NO: 119924 - DNA, 15 bp, Homo sapiens
caaagatctcagttc

SEQ ID NO: 119925 - DNA, 15 bp, Homo sapiens
ccaaagatctcagtt

SEQ ID NO: 119926 - DNA, 15 bp, Homo sapiens
tccaaagatctcagt

SEQ ID NO: 119927 - DNA, 15 bp, Homo sapiens
ctccaaagatctcag

SEQ ID NO: 119928 - DNA, 15 bp, Homo sapiens
tctccaaagatctca

SEQ ID NO: 119929 - DNA, 15 bp, Homo sapiens
ttctccaaagatctc

SEQ ID NO: 119930 - DNA, 15 bp, Homo sapiens
tttctccaaagatct

SEQ ID NO: 119931 - DNA, 15 bp, Homo sapiens
gtttctccaaagatc

SEQ ID NO: 119932 - DNA, 15 bp, Homo sapiens
ggtttctccaaagat

SEQ ID NO: 119933 - DNA, 15 bp, Homo sapiens
tggtttctccaaaga

SEQ ID NO: 119934 - DNA, 15 bp, Homo sapiens
ttggtttctccaaag

SEQ ID NO: 119935 - DNA, 15 bp, Homo sapiens
tttggtttctccaaa

SEQ ID NO: 119936 - DNA, 15 bp, Homo sapiens
ctttggtttctccaa

SEQ ID NO: 119937 - DNA, 15 bp, Homo sapiens
tctttggtttctcca

SEQ ID NO: 119938 - DNA, 15 bp, Homo sapiens
atctttggtttctcc

SEQ ID NO: 119939 - DNA, 15 bp, Homo sapiens
catctttggtttctc

SEQ ID NO: 119940 - DNA, 15 bp, Homo sapiens
ccatctttggtttct

SEQ ID NO: 119941 - DNA, 15 bp, Homo sapiens
gccatctttggtttc

SEQ ID NO: 119942 - DNA, 15 bp, Homo sapiens
agccatctttggttt

SEQ ID NO: 119943 - DNA, 15 bp, Homo sapiens
gagccatctttggtt

SEQ ID NO: 119944 - DNA, 15 bp, Homo sapiens
tgagccatctttggt

SEQ ID NO: 119945 - DNA, 15 bp, Homo sapiens
ttgagccatctttgg

SEQ ID NO: 119946 - DNA, 15 bp, Homo sapiens
tttgagccatctttg

SEQ ID NO: 119947 - DNA, 15 bp, Homo sapiens
atttgagccatcttt

SEQ ID NO: 119948 - DNA, 15 bp, Homo sapiens
catttgagccatctt

SEQ ID NO: 119949 - DNA, 15 bp, Homo sapiens
tcatttgagccatct

SEQ ID NO: 119950 - DNA, 15 bp, Homo sapiens
gtcatttgagccatc

SEQ ID NO: 119951 - DNA, 15 bp, Homo sapiens
agtcatttgagccat

SEQ ID NO: 119952 - DNA, 15 bp, Homo sapiens
gagtcatttgagcca

SEQ ID NO: 119953 - DNA, 15 bp, Homo sapiens
cgagtcatttgagcc

SEQ ID NO: 119954 - DNA, 15 bp, Homo sapiens
acgagtcatttgagc

SEQ ID NO: 119955 - DNA, 15 bp, Homo sapiens
cacgagtcatttgag

SEQ ID NO: 119956 - DNA, 15 bp, Homo sapiens
tcacgagtcatttga

SEQ ID NO: 119957 - DNA, 15 bp, Homo sapiens
atcacgagtcatttg

SEQ ID NO: 119958 - DNA, 15 bp, Homo sapiens
tatcacgagtcattt

SEQ ID NO: 119959 - DNA, 15 bp, Homo sapiens
ttatcacgagtcatt

SEQ ID NO: 119960 - DNA, 15 bp, Homo sapiens
attatcacgagtcat

SEQ ID NO: 119961 - DNA, 15 bp, Homo sapiens
tattatcacgagtca

SEQ ID NO: 119962 - DNA, 15 bp, Homo sapiens
ttattatcacgagtc

SEQ ID NO: 119963 - DNA, 15 bp, Homo sapiens
tttattatcacgagt

SEQ ID NO: 119964 - DNA, 15 bp, Homo sapiens
atttattatcacgag

SEQ ID NO: 119965 - DNA, 15 bp, Homo sapiens
catttattatcacga

SEQ ID NO: 119966 - DNA, 15 bp, Homo sapiens
tcatttattatcacg

SEQ ID NO: 119967 - DNA, 15 bp, Homo sapiens
ttcatttattatcac

SEQ ID NO: 119968 - DNA, 15 bp, Homo sapiens
gttcatttattatca

SEQ ID NO: 119969 - DNA, 15 bp, Homo sapiens
cgttcatttattatc

SEQ ID NO: 119970 - DNA, 15 bp, Homo sapiens
acgttcatttattat

SEQ ID NO: 119971 - DNA, 15 bp, Homo sapiens
tacgttcatttatta

SEQ ID NO: 119972 - DNA, 15 bp, Homo sapiens
atacgttcatttatt

SEQ ID NO: 119973 - DNA, 15 bp, Homo sapiens
aatacgttcatttat

SEQ ID NO: 119974 - DNA, 15 bp, Homo sapiens
taatacgttcattta

SEQ ID NO: 119975 - DNA, 15 bp, Homo sapiens
gtaatacgttcattt

SEQ ID NO: 119976 - DNA, 15 bp, Homo sapiens
agtaatacgttcatt

SEQ ID NO: 119977 - DNA, 15 bp, Homo sapiens
cagtaatacgttcat

SEQ ID NO: 119978 - DNA, 15 bp, Homo sapiens
gcagtaatacgttca

SEQ ID NO: 119979 - DNA, 15 bp, Homo sapiens
agcagtaatacgttc

SEQ ID NO: 119980 - DNA, 15 bp, Homo sapiens
gagcagtaatacgtt

SEQ ID NO: 119981 - DNA, 15 bp, Homo sapiens
cgagcagtaatacgt

SEQ ID NO: 119982 - DNA, 15 bp, Homo sapiens
gcgagcagtaatacg

SEQ ID NO: 119983 - DNA, 15 bp, Homo sapiens
agcgagcagtaatac

SEQ ID NO: 119984 - DNA, 15 bp, Homo sapiens
cagcgagcagtaata

SEQ ID NO: 119985 - DNA, 15 bp, Homo sapiens
tcagcgagcagtaat

SEQ ID NO: 119986 - DNA, 15 bp, Homo sapiens
gtcagcgagcagtaa

SEQ ID NO: 119987 - DNA, 15 bp, Homo sapiens
tgtcagcgagcagta

SEQ ID NO: 119988 - DNA, 15 bp, Homo sapiens
ttgtcagcgagcagt

SEQ ID NO: 119989 - DNA, 15 bp, Homo sapiens
tttgtcagcgagcag

SEQ ID NO: 119990 - DNA, 15 bp, Homo sapiens
atttgtcagcgagca

SEQ ID NO: 119991 - DNA, 15 bp, Homo sapiens
aatttgtcagcgagc

SEQ ID NO: 119992 - DNA, 15 bp, Homo sapiens
caatttgtcagcgag

SEQ ID NO: 119993 - DNA, 15 bp, Homo sapiens
tcaatttgtcagcga

SEQ ID NO: 119994 - DNA, 15 bp, Homo sapiens
ttcaatttgtcagcg

SEQ ID NO: 119995 - DNA, 15 bp, Homo sapiens
cttcaatttgtcagc

SEQ ID NO: 119996 - DNA, 15 bp, Homo sapiens
acttcaatttgtcag

SEQ ID NO: 119997 - DNA, 15 bp, Homo sapiens
aacttcaatttgtca

SEQ ID NO: 119998 - DNA, 15 bp, Homo sapiens
aaacttcaatttgtc

SEQ ID NO: 119999 - DNA, 15 bp, Homo sapiens
gaaacttcaatttgt

SEQ ID NO: 120000 - DNA, 15 bp, Homo sapiens
ggaaacttcaatttg

SEQ ID NO: 120001 - DNA, 15 bp, Homo sapiens
aggaaacttcaattt

SEQ ID NO: 120002 - DNA, 15 bp, Homo sapiens
taggaaacttcaatt

SEQ ID NO: 120003 - DNA, 15 bp, Homo sapiens
ttaggaaacttcaat

SEQ ID NO: 120004 - DNA, 15 bp, Homo sapiens
attaggaaacttcaa

SEQ ID NO: 120005 - DNA, 15 bp, Homo sapiens
aattaggaaacttca

SEQ ID NO: 120006 - DNA, 15 bp, Homo sapiens
taattaggaaacttc

SEQ ID NO: 120007 - DNA, 15 bp, Homo sapiens
ataattaggaaactt

SEQ ID NO: 120008 - DNA, 15 bp, Homo sapiens
tataattaggaaact

SEQ ID NO: 120009 - DNA, 15 bp, Homo sapiens
ttataattaggaaac

SEQ ID NO: 120010 - DNA, 15 bp, Homo sapiens
tttataattaggaaa

SEQ ID NO: 120011 - DNA, 15 bp, Homo sapiens
ctttataattaggaa

SEQ ID NO: 120012 - DNA, 15 bp, Homo sapiens
gctttataattagga

SEQ ID NO: 120013 - DNA, 15 bp, Homo sapiens
tgctttataattagg

SEQ ID NO: 120014 - DNA, 15 bp, Homo sapiens
ctgctttataattag

SEQ ID NO: 120015 - DNA, 15 bp, Homo sapiens
tctgctttataatta

SEQ ID NO: 120016 - DNA, 15 bp, Homo sapiens
ttctgctttataatt

SEQ ID NO: 120017 - DNA, 15 bp, Homo sapiens
gttctgctttataat

SEQ ID NO: 120018 - DNA, 15 bp, Homo sapiens
ggttctgctttataa

SEQ ID NO: 120019 - DNA, 15 bp, Homo sapiens
tggttctgctttata

SEQ ID NO: 120020 - DNA, 15 bp, Homo sapiens
ctggttctgctttat

SEQ ID NO: 120021 - DNA, 15 bp, Homo sapiens
actggttctgcttta

SEQ ID NO: 120022 - DNA, 15 bp, Homo sapiens
cactggttctgcttt

SEQ ID NO: 120023 - DNA, 15 bp, Homo sapiens
ccactggttctgctt

SEQ ID NO: 120024 - DNA, 15 bp, Homo sapiens
gccactggttctgct

SEQ ID NO: 120025 - DNA, 15 bp, Homo sapiens
ggccactggttctgc

SEQ ID NO: 120026 - DNA, 15 bp, Homo sapiens
tggccactggttctg

SEQ ID NO: 120027 - DNA, 15 bp, Homo sapiens
gtggccactggttct

SEQ ID NO: 120028 - DNA, 15 bp, Homo sapiens
ggtggccactggttc

SEQ ID NO: 120029 - DNA, 15 bp, Homo sapiens
tggtggccactggtt

SEQ ID NO: 120030 - DNA, 15 bp, Homo sapiens
gtggtggccactggt

SEQ ID NO: 120031 - DNA, 15 bp, Homo sapiens
ggtggtggccactgg

SEQ ID NO: 120032 - DNA, 15 bp, Homo sapiens
tggtggtggccactg

SEQ ID NO: 120033 - DNA, 15 bp, Homo sapiens
atggtggtggccact

SEQ ID NO: 120034 - DNA, 15 bp, Homo sapiens
tatggtggtggccac

SEQ ID NO: 120035 - DNA, 15 bp, Homo sapiens
ctatggtggtggcca

SEQ ID NO: 120036 - DNA, 15 bp, Homo sapiens
tctatggtggtggcc

SEQ ID NO: 120037 - DNA, 15 bp, Homo sapiens
ttctatggtggtggc

SEQ ID NO: 120038 - DNA, 15 bp, Homo sapiens
tttctatggtggtgg

SEQ ID NO: 120039 - DNA, 15 bp, Homo sapiens
ctttctatggtggtg

SEQ ID NO: 120040 - DNA, 15 bp, Homo sapiens
gctttctatggtggt

SEQ ID NO: 120041 - DNA, 15 bp, Homo sapiens
ggctttctatggtgg

SEQ ID NO: 120042 - DNA, 15 bp, Homo sapiens
aggctttctatggtg

SEQ ID NO: 120043 - DNA, 15 bp, Homo sapiens
taggctttctatggt

SEQ ID NO: 120044 - DNA, 15 bp, Homo sapiens
gtaggctttctatgg

SEQ ID NO: 120045 - DNA, 15 bp, Homo sapiens
ggtaggctttctatg

SEQ ID NO: 120046 - DNA, 15 bp, Homo sapiens
gggtaggctttctat

SEQ ID NO: 120047 - DNA, 15 bp, Homo sapiens
ggggtaggctttcta

SEQ ID NO: 120048 - DNA, 15 bp, Homo sapiens
tggggtaggctttct

SEQ ID NO: 120049 - DNA, 15 bp, Homo sapiens
gtggggtaggctttc

SEQ ID NO: 120050 - DNA, 15 bp, Homo sapiens
tgtggggtaggcttt

SEQ ID NO: 120051 - DNA, 15 bp, Homo sapiens
ctgtggggtaggctt

SEQ ID NO: 120052 - DNA, 15 bp, Homo sapiens
tctgtggggtaggct

SEQ ID NO: 120053 - DNA, 15 bp, Homo sapiens
atctgtggggtaggc

SEQ ID NO: 120054 - DNA, 15 bp, Homo sapiens
catctgtggggtagg

SEQ ID NO: 120055 - DNA, 15 bp, Homo sapiens
ccatctgtggggtag

SEQ ID NO: 120056 - DNA, 15 bp, Homo sapiens
tccatctgtggggta

SEQ ID NO: 120057 - DNA, 15 bp, Homo sapiens
ctccatctgtggggt

SEQ ID NO: 120058 - DNA, 15 bp, Homo sapiens
tctccatctgtgggg

SEQ ID NO: 120059 - DNA, 15 bp, Homo sapiens
ttctccatctgtggg

SEQ ID NO: 120060 - DNA, 15 bp, Homo sapiens
cttctccatctgtgg

SEQ ID NO: 120061 - DNA, 15 bp, Homo sapiens
tcttctccatctgtg

SEQ ID NO: 120062 - DNA, 15 bp, Homo sapiens
ctcttctccatctgt

SEQ ID NO: 120063 - DNA, 15 bp, Homo sapiens
cctcttctccatctg

SEQ ID NO: 120064 - DNA, 15 bp, Homo sapiens
gcctcttctccatct

SEQ ID NO: 120065 - DNA, 15 bp, Homo sapiens
tgcctcttctccatc

SEQ ID NO: 120066 - DNA, 15 bp, Homo sapiens
ttgcctcttctccat

SEQ ID NO: 120067 - DNA, 15 bp, Homo sapiens
tttgcctcttctcca

SEQ ID NO: 120068 - DNA, 15 bp, Homo sapiens
ctttgcctcttctcc

SEQ ID NO: 120069 - DNA, 15 bp, Homo sapiens
gctttgcctcttctc

SEQ ID NO: 120070 - DNA, 15 bp, Homo sapiens
tgctttgcctcttct

SEQ ID NO: 120071 - DNA, 15 bp, Homo sapiens
gtgctttgcctcttc

SEQ ID NO: 120072 - DNA, 15 bp, Homo sapiens
agtgctttgcctctt

SEQ ID NO: 120073 - DNA, 15 bp, Homo sapiens
cagtgctttgcctct

SEQ ID NO: 120074 - DNA, 15 bp, Homo sapiens
tcagtgctttgcctc

SEQ ID NO: 120075 - DNA, 15 bp, Homo sapiens
ttcagtgctttgcct

SEQ ID NO: 120076 - DNA, 15 bp, Homo sapiens
tttcagtgctttgcc

SEQ ID NO: 120077 - DNA, 15 bp, Homo sapiens
gtttcagtgctttgc

SEQ ID NO: 120078 - DNA, 15 bp, Homo sapiens
agtttcagtgctttg

SEQ ID NO: 120079 - DNA, 15 bp, Homo sapiens
gagtttcagtgcttt

SEQ ID NO: 120080 - DNA, 15 bp, Homo sapiens
tgagtttcagtgctt

SEQ ID NO: 120081 - DNA, 15 bp, Homo sapiens
ctgagtttcagtgct

SEQ ID NO: 120082 - DNA, 15 bp, Homo sapiens
actgagtttcagtgc

SEQ ID NO: 120083 - DNA, 15 bp, Homo sapiens
gactgagtttcagtg

SEQ ID NO: 120084 - DNA, 15 bp, Homo sapiens
ggactgagtttcagt

SEQ ID NO: 120085 - DNA, 15 bp, Homo sapiens
cggactgagtttcag

SEQ ID NO: 120086 - DNA, 15 bp, Homo sapiens
tcggactgagtttca

SEQ ID NO: 120087 - DNA, 15 bp, Homo sapiens
ctcggactgagtttc

SEQ ID NO: 120088 - DNA, 15 bp, Homo sapiens
cctcggactgagttt

SEQ ID NO: 120089 - DNA, 15 bp, Homo sapiens
ccctcggactgagtt

SEQ ID NO: 120090 - DNA, 15 bp, Homo sapiens
tccctcggactgagt

SEQ ID NO: 120091 - DNA, 15 bp, Homo sapiens
gtccctcggactgag

SEQ ID NO: 120092 - DNA, 15 bp, Homo sapiens
ggtccctcggactga

SEQ ID NO: 120093 - DNA, 15 bp, Homo sapiens
aggtccctcggactg

SEQ ID NO: 120094 - DNA, 15 bp, Homo sapiens
gaggtccctcggact

SEQ ID NO: 120095 - DNA, 15 bp, Homo sapiens
ggaggtccctcggac

SEQ ID NO: 120096 - DNA, 15 bp, Homo sapiens
gggaggtccctcgga

SEQ ID NO: 120097 - DNA, 15 bp, Homo sapiens
ggggaggtccctcgg

SEQ ID NO: 120098 - DNA, 15 bp, Homo sapiens
tggggaggtccctcg

SEQ ID NO: 120099 - DNA, 15 bp, Homo sapiens
ctggggaggtccctc

SEQ ID NO: 120100 - DNA, 15 bp, Homo sapiens
gctggggaggtccct

SEQ ID NO: 120101 - DNA, 15 bp, Homo sapiens
ggctggggaggtccc

SEQ ID NO: 120102 - DNA, 15 bp, Homo sapiens
tggctggggaggtcc

SEQ ID NO: 120103 - DNA, 15 bp, Homo sapiens
atggctggggaggtc

SEQ ID NO: 120104 - DNA, 15 bp, Homo sapiens
catggctggggaggt

SEQ ID NO: 120105 - DNA, 15 bp, Homo sapiens
ccatggctggggagg

SEQ ID NO: 120106 - DNA, 15 bp, Homo sapiens
cccatggctggggag

SEQ ID NO: 120107 - DNA, 15 bp, Homo sapiens
ccccatggctgggga

SEQ ID NO: 120108 - DNA, 15 bp, Homo sapiens
cccccatggctgggg

SEQ ID NO: 120109 - DNA, 15 bp, Homo sapiens
gcccccatggctggg

SEQ ID NO: 120110 - DNA, 15 bp, Homo sapiens
tgcccccatggctgg

SEQ ID NO: 120111 - DNA, 15 bp, Homo sapiens
ctgcccccatggctg

SEQ ID NO: 120112 - DNA, 15 bp, Homo sapiens
cctgcccccatggct

SEQ ID NO: 120113 - DNA, 15 bp, Homo sapiens
ccctgcccccatggc

SEQ ID NO: 120114 - DNA, 15 bp, Homo sapiens
gccctgcccccatgg

SEQ ID NO: 120115 - DNA, 15 bp, Homo sapiens
ggccctgcccccatg

SEQ ID NO: 120116 - DNA, 15 bp, Homo sapiens
tggccctgcccccat

SEQ ID NO: 120117 - DNA, 15 bp, Homo sapiens
ttggccctgccccca

SEQ ID NO: 120118 - DNA, 15 bp, Homo sapiens
tttggccctgccccc

SEQ ID NO: 120119 - DNA, 15 bp, Homo sapiens
atttggccctgcccc

SEQ ID NO: 120120 - DNA, 15 bp, Homo sapiens
catttggccctgccc

SEQ ID NO: 120121 - DNA, 15 bp, Homo sapiens
ccatttggccctgcc

SEQ ID NO: 120122 - DNA, 15 bp, Homo sapiens
cccatttggccctgc

SEQ ID NO: 120123 - DNA, 15 bp, Homo sapiens
ccccatttggccctg

SEQ ID NO: 120124 - DNA, 15 bp, Homo sapiens
gccccatttggccct

SEQ ID NO: 120125 - DNA, 15 bp, Homo sapiens
agccccatttggccc

SEQ ID NO: 120126 - DNA, 15 bp, Homo sapiens
aagccccatttggcc

SEQ ID NO: 120127 - DNA, 15 bp, Homo sapiens
gaagccccatttggc

SEQ ID NO: 120128 - DNA, 15 bp, Homo sapiens
agaagccccatttgg

SEQ ID NO: 120129 - DNA, 15 bp, Homo sapiens
aagaagccccatttg

SEQ ID NO: 120130 - DNA, 15 bp, Homo sapiens
gaagaagccccattt

SEQ ID NO: 120131 - DNA, 15 bp, Homo sapiens
tgaagaagccccatt

SEQ ID NO: 120132 - DNA, 15 bp, Homo sapiens
ctgaagaagccccat

SEQ ID NO: 120133 - DNA, 15 bp, Homo sapiens
cctgaagaagcccca

SEQ ID NO: 120134 - DNA, 15 bp, Homo sapiens
tcctgaagaagcccc

SEQ ID NO: 120135 - DNA, 15 bp, Homo sapiens
gtcctgaagaagccc

SEQ ID NO: 120136 - DNA, 15 bp, Homo sapiens
ggtcctgaagaagcc

SEQ ID NO: 120137 - DNA, 15 bp, Homo sapiens
tggtcctgaagaagc

SEQ ID NO: 120138 - DNA, 15 bp, Homo sapiens
ctggtcctgaagaag

SEQ ID NO: 120139 - DNA, 15 bp, Homo sapiens
gctggtcctgaagaa

SEQ ID NO: 120140 - DNA, 15 bp, Homo sapiens
tgctggtcctgaaga

SEQ ID NO: 120141 - DNA, 15 bp, Homo sapiens
ttgctggtcctgaag

SEQ ID NO: 120142 - DNA, 15 bp, Homo sapiens
tttgctggtcctgaa

SEQ ID NO: 120143 - DNA, 15 bp, Homo sapiens
ctttgctggtcctga

SEQ ID NO: 120144 - DNA, 15 bp, Homo sapiens
gctttgctggtcctg

SEQ ID NO: 120145 - DNA, 15 bp, Homo sapiens
ggctttgctggtcct

SEQ ID NO: 120146 - DNA, 15 bp, Homo sapiens
tggctttgctggtcc

SEQ ID NO: 120147 - DNA, 15 bp, Homo sapiens
atggctttgctggtc

SEQ ID NO: 120148 - DNA, 15 bp, Homo sapiens
aatggctttgctggt

SEQ ID NO: 120149 - DNA, 15 bp, Homo sapiens
aaatggctttgctgg

SEQ ID NO: 120150 - DNA, 15 bp, Homo sapiens
aaaatggctttgctg

SEQ ID NO: 120151 - DNA, 15 bp, Homo sapiens
aaaaatggctttgct

SEQ ID NO: 120152 - DNA, 15 bp, Homo sapiens
gaaaaatggctttgc

SEQ ID NO: 120153 - DNA, 15 bp, Homo sapiens
agaaaaatggctttg

SEQ ID NO: 120154 - DNA, 15 bp, Homo sapiens
gagaaaaatggcttt

SEQ ID NO: 120155 - DNA, 15 bp, Homo sapiens
tgagaaaaatggctt

SEQ ID NO: 120156 - DNA, 15 bp, Homo sapiens
atgagaaaaatggct

SEQ ID NO: 120157 - DNA, 15 bp, Homo sapiens
gatgagaaaaatggc

SEQ ID NO: 120158 - DNA, 15 bp, Homo sapiens
tgatgagaaaaatgg

SEQ ID NO: 120159 - DNA, 15 bp, Homo sapiens
ctgatgagaaaaatg

SEQ ID NO: 120160 - DNA, 15 bp, Homo sapiens
gctgatgagaaaaat

SEQ ID NO: 120161 - DNA, 15 bp, Homo sapiens
tgctgatgagaaaaa

SEQ ID NO: 120162 - DNA, 15 bp, Homo sapiens
ttgctgatgagaaaa

SEQ ID NO: 120163 - DNA, 15 bp, Homo sapiens
tttgctgatgagaaa

SEQ ID NO: 120164 - DNA, 15 bp, Homo sapiens
gtttgctgatgagaa

SEQ ID NO: 120165 - DNA, 15 bp, Homo sapiens
agtttgctgatgaga

SEQ ID NO: 120166 - DNA, 15 bp, Homo sapiens
tagtttgctgatgag

SEQ ID NO: 120167 - DNA, 15 bp, Homo sapiens
ctagtttgctgatga

SEQ ID NO: 120168 - DNA, 15 bp, Homo sapiens
gctagtttgctgatg

SEQ ID NO: 120169 - DNA, 15 bp, Homo sapiens
agctagtttgctgat

SEQ ID NO: 120170 - DNA, 15 bp, Homo sapiens
aagctagtttgctga

SEQ ID NO: 120171 - DNA, 15 bp, Homo sapiens
gaagctagtttgctg

SEQ ID NO: 120172 - DNA, 15 bp, Homo sapiens
tgaagctagtttgct

SEQ ID NO: 120173 - DNA, 15 bp, Homo sapiens
ctgaagctagtttgc

SEQ ID NO: 120174 - DNA, 15 bp, Homo sapiens
tctgaagctagtttg

SEQ ID NO: 120175 - DNA, 15 bp, Homo sapiens
ctctgaagctagttt

SEQ ID NO: 120176 - DNA, 15 bp, Homo sapiens
tctctgaagctagtt

SEQ ID NO: 120177 - DNA, 15 bp, Homo sapiens
ttctctgaagctagt

SEQ ID NO: 120178 - DNA, 15 bp, Homo sapiens
cttctctgaagctag

SEQ ID NO: 120179 - DNA, 15 bp, Homo sapiens
acttctctgaagcta

SEQ ID NO: 120180 - DNA, 15 bp, Homo sapiens
aacttctctgaagct

SEQ ID NO: 120181 - DNA, 15 bp, Homo sapiens
aaacttctctgaagc

SEQ ID NO: 120182 - DNA, 15 bp, Homo sapiens
caaacttctctgaag

SEQ ID NO: 120183 - DNA, 15 bp, Homo sapiens
gcaaacttctctgaa

SEQ ID NO: 120184 - DNA, 15 bp, Homo sapiens
tgcaaacttctctga

SEQ ID NO: 120185 - DNA, 15 bp, Homo sapiens
ttgcaaacttctctg

SEQ ID NO: 120186 - DNA, 15 bp, Homo sapiens
attgcaaacttctct

SEQ ID NO: 120187 - DNA, 15 bp, Homo sapiens
gattgcaaacttctc

SEQ ID NO: 120188 - DNA, 15 bp, Homo sapiens
tgattgcaaacttct

SEQ ID NO: 120189 - DNA, 15 bp, Homo sapiens
ctgattgcaaacttc

SEQ ID NO: 120190 - DNA, 15 bp, Homo sapiens
cctgattgcaaactt

SEQ ID NO: 120191 - DNA, 15 bp, Homo sapiens
ccctgattgcaaact

SEQ ID NO: 120192 - DNA, 15 bp, Homo sapiens
gccctgattgcaaac

SEQ ID NO: 120193 - DNA, 15 bp, Homo sapiens
tgccctgattgcaaa

SEQ ID NO: 120194 - DNA, 15 bp, Homo sapiens
gtgccctgattgcaa

SEQ ID NO: 120195 - DNA, 15 bp, Homo sapiens
agtgccctgattgca

SEQ ID NO: 120196 - DNA, 15 bp, Homo sapiens
gagtgccctgattgc

SEQ ID NO: 120197 - DNA, 15 bp, Homo sapiens
agagtgccctgattg

SEQ ID NO: 120198 - DNA, 15 bp, Homo sapiens
gagagtgccctgatt

SEQ ID NO: 120199 - DNA, 15 bp, Homo sapiens
agagagtgccctgat

SEQ ID NO: 120200 - DNA, 15 bp, Homo sapiens
aagagagtgccctga

SEQ ID NO: 120201 - DNA, 15 bp, Homo sapiens
gaagagagtgccctg

SEQ ID NO: 120202 - DNA, 15 bp, Homo sapiens
ggaagagagtgccct

SEQ ID NO: 120203 - DNA, 15 bp, Homo sapiens
tggaagagagtgccc

SEQ ID NO: 120204 - DNA, 15 bp, Homo sapiens
ttggaagagagtgcc

SEQ ID NO: 120205 - DNA, 15 bp, Homo sapiens
cttggaagagagtgc

SEQ ID NO: 120206 - DNA, 15 bp, Homo sapiens
gcttggaagagagtg

SEQ ID NO: 120207 - DNA, 15 bp, Homo sapiens
ggcttggaagagagt

SEQ ID NO: 120208 - DNA, 15 bp, Homo sapiens
aggcttggaagagag

SEQ ID NO: 120209 - DNA, 15 bp, Homo sapiens
taggcttggaagaga

SEQ ID NO: 120210 - DNA, 15 bp, Homo sapiens
ctaggcttggaagag

SEQ ID NO: 120211 - DNA, 15 bp, Homo sapiens
tctaggcttggaaga

SEQ ID NO: 120212 - DNA, 15 bp, Homo sapiens
ctctaggcttggaag

SEQ ID NO: 120213 - DNA, 15 bp, Homo sapiens
tctctaggcttggaa

SEQ ID NO: 120214 - DNA, 15 bp, Homo sapiens
gtctctaggcttgga

SEQ ID NO: 120215 - DNA, 15 bp, Homo sapiens
ggtctctaggcttgg

SEQ ID NO: 120216 - DNA, 15 bp, Homo sapiens
gggtctctaggcttg

SEQ ID NO: 120217 - DNA, 15 bp, Homo sapiens
tgggtctctaggctt

SEQ ID NO: 120218 - DNA, 15 bp, Homo sapiens
ctgggtctctaggct

SEQ ID NO: 120219 - DNA, 15 bp, Homo sapiens
cctgggtctctaggc

SEQ ID NO: 120220 - DNA, 15 bp, Homo sapiens
ccctgggtctctagg

SEQ ID NO: 120221 - DNA, 15 bp, Homo sapiens
tccctgggtctctag

SEQ ID NO: 120222 - DNA, 15 bp, Homo sapiens
ttccctgggtctcta

SEQ ID NO: 120223 - DNA, 15 bp, Homo sapiens
tttccctgggtctct

SEQ ID NO: 120224 - DNA, 15 bp, Homo sapiens
ctttccctgggtctc

SEQ ID NO: 120225 - DNA, 15 bp, Homo sapiens
cctttccctgggtct

SEQ ID NO: 120226 - DNA, 15 bp, Homo sapiens
ccctttccctgggtc

SEQ ID NO: 120227 - DNA, 15 bp, Homo sapiens
cccctttccctgggt

SEQ ID NO: 120228 - DNA, 15 bp, Homo sapiens
acccctttccctggg

SEQ ID NO: 120229 - DNA, 15 bp, Homo sapiens
tacccctttccctgg

SEQ ID NO: 120230 - DNA, 15 bp, Homo sapiens
gtacccctttccctg

SEQ ID NO: 120231 - DNA, 15 bp, Homo sapiens
cgtacccctttccct

SEQ ID NO: 120232 - DNA, 15 bp, Homo sapiens
ccgtacccctttccc

SEQ ID NO: 120233 - DNA, 15 bp, Homo sapiens
cccgtacccctttcc

SEQ ID NO: 120234 - DNA, 15 bp, Homo sapiens
ccccgtacccctttc

SEQ ID NO: 120235 - DNA, 15 bp, Homo sapiens
cccccgtaccccttt

SEQ ID NO: 120236 - DNA, 15 bp, Homo sapiens
acccccgtacccctt

SEQ ID NO: 120237 - DNA, 15 bp, Homo sapiens
cacccccgtacccct

SEQ ID NO: 120238 - DNA, 15 bp, Homo sapiens
acacccccgtacccc

SEQ ID NO: 120239 - DNA, 15 bp, Homo sapiens
gacacccccgtaccc

SEQ ID NO: 120240 - DNA, 15 bp, Homo sapiens
ggacacccccgtacc

SEQ ID NO: 120241 - DNA, 15 bp, Homo sapiens
gggacacccccgtac

SEQ ID NO: 120242 - DNA, 15 bp, Homo sapiens
tgggacacccccgta

SEQ ID NO: 120243 - DNA, 15 bp, Homo sapiens
ttgggacacccccgt

SEQ ID NO: 120244 - DNA, 15 bp, Homo sapiens
cttgggacacccccg

SEQ ID NO: 120245 - DNA, 15 bp, Homo sapiens
ccttgggacaccccc

SEQ ID NO: 120246 - DNA, 15 bp, Homo sapiens
gccttgggacacccc

SEQ ID NO: 120247 - DNA, 15 bp, Homo sapiens
tgccttgggacaccc

SEQ ID NO: 120248 - DNA, 15 bp, Homo sapiens
ttgccttgggacacc

SEQ ID NO: 120249 - DNA, 15 bp, Homo sapiens
tttgccttgggacac

SEQ ID NO: 120250 - DNA, 15 bp, Homo sapiens
ctttgccttgggaca

SEQ ID NO: 120251 - DNA, 15 bp, Homo sapiens
tctttgccttgggac

SEQ ID NO: 120252 - DNA, 15 bp, Homo sapiens
ctctttgccttggga

SEQ ID NO: 120253 - DNA, 15 bp, Homo sapiens
tctctttgccttggg

SEQ ID NO: 120254 - DNA, 15 bp, Homo sapiens
ttctctttgccttgg

SEQ ID NO: 120255 - DNA, 15 bp, Homo sapiens
attctctttgccttg

SEQ ID NO: 120256 - DNA, 15 bp, Homo sapiens
gattctctttgcctt

SEQ ID NO: 120257 - DNA, 15 bp, Homo sapiens
agattctctttgcct

SEQ ID NO: 120258 - DNA, 15 bp, Homo sapiens
tagattctctttgcc

SEQ ID NO: 120259 - DNA, 15 bp, Homo sapiens
gtagattctctttgc

SEQ ID NO: 120260 - DNA, 15 bp, Homo sapiens
tgtagattctctttg

SEQ ID NO: 120261 - DNA, 15 bp, Homo sapiens
gtgtagattctcttt

SEQ ID NO: 120262 - DNA, 15 bp, Homo sapiens
agtgtagattctctt

SEQ ID NO: 120263 - DNA, 15 bp, Homo sapiens
aagtgtagattctct

SEQ ID NO: 120264 - DNA, 15 bp, Homo sapiens
aaagtgtagattctc

SEQ ID NO: 120265 - DNA, 15 bp, Homo sapiens
aaaagtgtagattct

SEQ ID NO: 120266 - DNA, 15 bp, Homo sapiens
aaaaagtgtagattc

SEQ ID NO: 120267 - DNA, 15 bp, Homo sapiens
caaaaagtgtagatt

SEQ ID NO: 120268 - DNA, 15 bp, Homo sapiens
gcaaaaagtgtagat

SEQ ID NO: 120269 - DNA, 15 bp, Homo sapiens
ggcaaaaagtgtaga

SEQ ID NO: 120270 - DNA, 15 bp, Homo sapiens
gggcaaaaagtgtag

SEQ ID NO: 120271 - DNA, 15 bp, Homo sapiens
ggggcaaaaagtgta

SEQ ID NO: 120272 - DNA, 15 bp, Homo sapiens
gggggcaaaaagtgt

SEQ ID NO: 120273 - DNA, 15 bp, Homo sapiens
cgggggcaaaaagtg

SEQ ID NO: 120274 - DNA, 15 bp, Homo sapiens
ccgggggcaaaaagt

SEQ ID NO: 120275 - DNA, 15 bp, Homo sapiens
tccgggggcaaaaag

SEQ ID NO: 120276 - DNA, 15 bp, Homo sapiens
ctccgggggcaaaaa

SEQ ID NO: 120277 - DNA, 15 bp, Homo sapiens
tctccgggggcaaaa

SEQ ID NO: 120278 - DNA, 15 bp, Homo sapiens
ctctccgggggcaaa

SEQ ID NO: 120279 - DNA, 15 bp, Homo sapiens
cctctccgggggcaa

SEQ ID NO: 120280 - DNA, 15 bp, Homo sapiens
gcctctccgggggca

SEQ ID NO: 120281 - DNA, 15 bp, Homo sapiens
agcctctccgggggc

SEQ ID NO: 120282 - DNA, 15 bp, Homo sapiens
tagcctctccggggg

SEQ ID NO: 120283 - DNA, 15 bp, Homo sapiens
gtagcctctccgggg

SEQ ID NO: 120284 - DNA, 15 bp, Homo sapiens
agtagcctctccggg

SEQ ID NO: 120285 - DNA, 15 bp, Homo sapiens
aagtagcctctccgg

SEQ ID NO: 120286 - DNA, 15 bp, Homo sapiens
gaagtagcctctccg

SEQ ID NO: 120287 - DNA, 15 bp, Homo sapiens
ggaagtagcctctcc

SEQ ID NO: 120288 - DNA, 15 bp, Homo sapiens
gggaagtagcctctc

SEQ ID NO: 120289 - DNA, 15 bp, Homo sapiens
agggaagtagcctct

SEQ ID NO: 120290 - DNA, 15 bp, Homo sapiens
gagggaagtagcctc

SEQ ID NO: 120291 - DNA, 15 bp, Homo sapiens
ggagggaagtagcct

SEQ ID NO: 120292 - DNA, 15 bp, Homo sapiens
gggagggaagtagcc

SEQ ID NO: 120293 - DNA, 15 bp, Homo sapiens
tgggagggaagtagc

SEQ ID NO: 120294 - DNA, 15 bp, Homo sapiens
ttgggagggaagtag

SEQ ID NO: 120295 - DNA, 15 bp, Homo sapiens
cttgggagggaagta

SEQ ID NO: 120296 - DNA, 15 bp, Homo sapiens
tcttgggagggaagt

SEQ ID NO: 120297 - DNA, 15 bp, Homo sapiens
atcttgggagggaag

SEQ ID NO: 120298 - DNA, 15 bp, Homo sapiens
catcttgggagggaa

SEQ ID NO: 120299 - DNA, 15 bp, Homo sapiens
gcatcttgggaggga

SEQ ID NO: 120300 - DNA, 15 bp, Homo sapiens
ggcatcttgggaggg

SEQ ID NO: 120301 - DNA, 15 bp, Homo sapiens
aggcatcttgggagg

SEQ ID NO: 120302 - DNA, 15 bp, Homo sapiens
caggcatcttgggag

SEQ ID NO: 120303 - DNA, 15 bp, Homo sapiens
ccaggcatcttggga

SEQ ID NO: 120304 - DNA, 15 bp, Homo sapiens
cccaggcatcttggg

SEQ ID NO: 120305 - DNA, 15 bp, Homo sapiens
tcccaggcatcttgg

SEQ ID NO: 120306 - DNA, 15 bp, Homo sapiens
atcccaggcatcttg

SEQ ID NO: 120307 - DNA, 15 bp, Homo sapiens
aatcccaggcatctt

SEQ ID NO: 120308 - DNA, 15 bp, Homo sapiens
aaatcccaggcatct

SEQ ID NO: 120309 - DNA, 15 bp, Homo sapiens
aaaatcccaggcatc

SEQ ID NO: 120310 - DNA, 15 bp, Homo sapiens
gaaaatcccaggcat

SEQ ID NO: 120311 - DNA, 15 bp, Homo sapiens
ggaaaatcccaggca

SEQ ID NO: 120312 - DNA, 15 bp, Homo sapiens
tggaaaatcccaggc

SEQ ID NO: 120313 - DNA, 15 bp, Homo sapiens
gtggaaaatcccagg

SEQ ID NO: 120314 - DNA, 15 bp, Homo sapiens
agtggaaaatcccag

SEQ ID NO: 120315 - DNA, 15 bp, Homo sapiens
aagtggaaaatccca

SEQ ID NO: 120316 - DNA, 15 bp, Homo sapiens
gaagtggaaaatccc

SEQ ID NO: 120317 - DNA, 15 bp, Homo sapiens
tgaagtggaaaatcc

SEQ ID NO: 120318 - DNA, 15 bp, Homo sapiens
ctgaagtggaaaatc

SEQ ID NO: 120319 - DNA, 15 bp, Homo sapiens
gctgaagtggaaaat

SEQ ID NO: 120320 - DNA, 15 bp, Homo sapiens
tgctgaagtggaaaa

SEQ ID NO: 120321 - DNA, 15 bp, Homo sapiens
ctgctgaagtggaaa

SEQ ID NO: 120322 - DNA, 15 bp, Homo sapiens
cctgctgaagtggaa

SEQ ID NO: 120323 - DNA, 15 bp, Homo sapiens
ccctgctgaagtgga

SEQ ID NO: 120324 - DNA, 15 bp, Homo sapiens
cccctgctgaagtgg

SEQ ID NO: 120325 - DNA, 15 bp, Homo sapiens
ccccctgctgaagtg

SEQ ID NO: 120326 - DNA, 15 bp, Homo sapiens
tccccctgctgaagt

SEQ ID NO: 120327 - DNA, 15 bp, Homo sapiens
ttccccctgctgaag

SEQ ID NO: 120328 - DNA, 15 bp, Homo sapiens
cttccccctgctgaa

SEQ ID NO: 120329 - DNA, 15 bp, Homo sapiens
ccttccccctgctga

SEQ ID NO: 120330 - DNA, 15 bp, Homo sapiens
accttccccctgctg

SEQ ID NO: 120331 - DNA, 15 bp, Homo sapiens
taccttccccctgct

SEQ ID NO: 120332 - DNA, 15 bp, Homo sapiens
ttaccttccccctgc

SEQ ID NO: 120333 - DNA, 15 bp, Homo sapiens
cttaccttccccctg

SEQ ID NO: 120334 - DNA, 15 bp, Homo sapiens
acttaccttccccct

SEQ ID NO: 120335 - DNA, 15 bp, Homo sapiens
gacttaccttccccc

SEQ ID NO: 120336 - DNA, 15 bp, Homo sapiens
tgacttaccttcccc

SEQ ID NO: 120337 - DNA, 15 bp, Homo sapiens
gtgacttaccttccc

SEQ ID NO: 120338 - DNA, 15 bp, Homo sapiens
tgtgacttaccttcc

SEQ ID NO: 120339 - DNA, 15 bp, Homo sapiens
atgtgacttaccttc

SEQ ID NO: 120340 - DNA, 15 bp, Homo sapiens
tatgtgacttacctt

SEQ ID NO: 120341 - DNA, 15 bp, Homo sapiens
ctatgtgacttacct

SEQ ID NO: 120342 - DNA, 15 bp, Homo sapiens
gctatgtgacttacc

SEQ ID NO: 120343 - DNA, 15 bp, Homo sapiens
tgctatgtgacttac

SEQ ID NO: 120344 - DNA, 15 bp, Homo sapiens
ttgctatgtgactta

SEQ ID NO: 120345 - DNA, 15 bp, Homo sapiens
tttgctatgtgactt

SEQ ID NO: 120346 - DNA, 15 bp, Homo sapiens
ttttgctatgtgact

SEQ ID NO: 120347 - DNA, 15 bp, Homo sapiens
attttgctatgtgac

SEQ ID NO: 120348 - DNA, 15 bp, Homo sapiens
tattttgctatgtga

SEQ ID NO: 120349 - DNA, 15 bp, Homo sapiens
ttattttgctatgtg

SEQ ID NO: 120350 - DNA, 15 bp, Homo sapiens
attattttgctatgt

SEQ ID NO: 120351 - DNA, 15 bp, Homo sapiens
cattattttgctatg

SEQ ID NO: 120352 - DNA, 15 bp, Homo sapiens
tcattattttgctat

SEQ ID NO: 120353 - DNA, 15 bp, Homo sapiens
ctcattattttgcta

SEQ ID NO: 120354 - DNA, 15 bp, Homo sapiens
cctcattattttgct

SEQ ID NO: 120355 - DNA, 15 bp, Homo sapiens
ccctcattattttgc

SEQ ID NO: 120356 - DNA, 15 bp, Homo sapiens
gccctcattattttg

SEQ ID NO: 120357 - DNA, 15 bp, Homo sapiens
tgccctcattatttt

SEQ ID NO: 120358 - DNA, 15 bp, Homo sapiens
gtgccctcattattt

SEQ ID NO: 120359 - DNA, 15 bp, Homo sapiens
tgtgccctcattatt

SEQ ID NO: 120360 - DNA, 15 bp, Homo sapiens
ctgtgccctcattat

SEQ ID NO: 120361 - DNA, 15 bp, Homo sapiens
tctgtgccctcatta

SEQ ID NO: 120362 - DNA, 15 bp, Homo sapiens
ttctgtgccctcatt

SEQ ID NO: 120363 - DNA, 15 bp, Homo sapiens
gttctgtgccctcat

SEQ ID NO: 120364 - DNA, 15 bp, Homo sapiens
tgttctgtgccctca

SEQ ID NO: 120365 - DNA, 15 bp, Homo sapiens
ctgttctgtgccctc

SEQ ID NO: 120366 - DNA, 15 bp, Homo sapiens
tctgttctgtgccct

SEQ ID NO: 120367 - DNA, 15 bp, Homo sapiens
atctgttctgtgccc

SEQ ID NO: 120368 - DNA, 15 bp, Homo sapiens
catctgttctgtgcc

SEQ ID NO: 120369 - DNA, 15 bp, Homo sapiens
tcatctgttctgtgc

SEQ ID NO: 120370 - DNA, 15 bp, Homo sapiens
gtcatctgttctgtg

SEQ ID NO: 120371 - DNA, 15 bp, Homo sapiens
ggtcatctgttctgt

SEQ ID NO: 120372 - DNA, 15 bp, Homo sapiens
aggtcatctgttctg

SEQ ID NO: 120373 - DNA, 15 bp, Homo sapiens
gaggtcatctgttct

SEQ ID NO: 120374 - DNA, 15 bp, Homo sapiens
ggaggtcatctgttc

SEQ ID NO: 120375 - DNA, 15 bp, Homo sapiens
gggaggtcatctgtt

SEQ ID NO: 120376 - DNA, 15 bp, Homo sapiens
agggaggtcatctgt

SEQ ID NO: 120377 - DNA, 15 bp, Homo sapiens
tagggaggtcatctg

SEQ ID NO: 120378 - DNA, 15 bp, Homo sapiens
atagggaggtcatct

SEQ ID NO: 120379 - DNA, 15 bp, Homo sapiens
tatagggaggtcatc

SEQ ID NO: 120380 - DNA, 15 bp, Homo sapiens
ctatagggaggtcat

SEQ ID NO: 120381 - DNA, 15 bp, Homo sapiens
tctatagggaggtca

SEQ ID NO: 120382 - DNA, 15 bp, Homo sapiens
ctctatagggaggtc

SEQ ID NO: 120383 - DNA, 15 bp, Homo sapiens
actctatagggaggt

SEQ ID NO: 120384 - DNA, 15 bp, Homo sapiens
aactctatagggagg

SEQ ID NO: 120385 - DNA, 15 bp, Homo sapiens
aaactctatagggag

SEQ ID NO: 120386 - DNA, 15 bp, Homo sapiens
aaaactctataggga

SEQ ID NO: 120387 - DNA, 15 bp, Homo sapiens
caaaactctataggg

SEQ ID NO: 120388 - DNA, 15 bp, Homo sapiens
tcaaaactctatagg

SEQ ID NO: 120389 - DNA, 15 bp, Homo sapiens
ttcaaaactctatag

SEQ ID NO: 120390 - DNA, 15 bp, Homo sapiens
attcaaaactctata

SEQ ID NO: 120391 - DNA, 15 bp, Homo sapiens
cattcaaaactctat

SEQ ID NO: 120392 - DNA, 15 bp, Homo sapiens
tcattcaaaactcta

SEQ ID NO: 120393 - DNA, 15 bp, Homo sapiens
ctcattcaaaactct

SEQ ID NO: 120394 - DNA, 15 bp, Homo sapiens
tctcattcaaaactc

SEQ ID NO: 120395 - DNA, 15 bp, Homo sapiens
ttctcattcaaaact

SEQ ID NO: 120396 - DNA, 15 bp, Homo sapiens
tttctcattcaaaac

SEQ ID NO: 120397 - DNA, 15 bp, Homo sapiens
gtttctcattcaaaa

SEQ ID NO: 120398 - DNA, 15 bp, Homo sapiens
tgtttctcattcaaa

SEQ ID NO: 120399 - DNA, 15 bp, Homo sapiens
gtgtttctcattcaa

SEQ ID NO: 120400 - DNA, 15 bp, Homo sapiens
tgtgtttctcattca

SEQ ID NO: 120401 - DNA, 15 bp, Homo sapiens
ctgtgtttctcattc

SEQ ID NO: 120402 - DNA, 15 bp, Homo sapiens
gctgtgtttctcatt

SEQ ID NO: 120403 - DNA, 15 bp, Homo sapiens
tgctgtgtttctcat

SEQ ID NO: 120404 - DNA, 15 bp, Homo sapiens
ctgctgtgtttctca

SEQ ID NO: 120405 - DNA, 15 bp, Homo sapiens
cctgctgtgtttctc

SEQ ID NO: 120406 - DNA, 15 bp, Homo sapiens
ccctgctgtgtttct

SEQ ID NO: 120407 - DNA, 15 bp, Homo sapiens
gccctgctgtgtttc

SEQ ID NO: 120408 - DNA, 15 bp, Homo sapiens
tgccctgctgtgttt

SEQ ID NO: 120409 - DNA, 15 bp, Homo sapiens
ctgccctgctgtgtt

SEQ ID NO: 120410 - DNA, 15 bp, Homo sapiens
tctgccctgctgtgt

SEQ ID NO: 120411 - DNA, 15 bp, Homo sapiens
atctgccctgctgtg

SEQ ID NO: 120412 - DNA, 15 bp, Homo sapiens
catctgccctgctgt

SEQ ID NO: 120413 - DNA, 15 bp, Homo sapiens
acatctgccctgctg

SEQ ID NO: 120414 - DNA, 15 bp, Homo sapiens
cacatctgccctgct

SEQ ID NO: 120415 - DNA, 15 bp, Homo sapiens
gcacatctgccctgc

SEQ ID NO: 120416 - DNA, 15 bp, Homo sapiens
ggcacatctgccctg

SEQ ID NO: 120417 - DNA, 15 bp, Homo sapiens
gggcacatctgccct

SEQ ID NO: 120418 - DNA, 15 bp, Homo sapiens
ggggcacatctgccc

SEQ ID NO: 120419 - DNA, 15 bp, Homo sapiens
aggggcacatctgcc

SEQ ID NO: 120420 - DNA, 15 bp, Homo sapiens
aaggggcacatctgc

SEQ ID NO: 120421 - DNA, 15 bp, Homo sapiens
gaaggggcacatctg

SEQ ID NO: 120422 - DNA, 15 bp, Homo sapiens
agaaggggcacatct

SEQ ID NO: 120423 - DNA, 15 bp, Homo sapiens
gagaaggggcacatc

SEQ ID NO: 120424 - DNA, 15 bp, Homo sapiens
agagaaggggcacat

SEQ ID NO: 120425 - DNA, 15 bp, Homo sapiens
tagagaaggggcaca

SEQ ID NO: 120426 - DNA, 15 bp, Homo sapiens
ctagagaaggggcac

SEQ ID NO: 120427 - DNA, 15 bp, Homo sapiens
actagagaaggggca

SEQ ID NO: 120428 - DNA, 15 bp, Homo sapiens
gactagagaaggggc

SEQ ID NO: 120429 - DNA, 15 bp, Homo sapiens
agactagagaagggg

SEQ ID NO: 120430 - DNA, 15 bp, Homo sapiens
tagactagagaaggg

SEQ ID NO: 120431 - DNA, 15 bp, Homo sapiens
ctagactagagaagg

SEQ ID NO: 120432 - DNA, 15 bp, Homo sapiens
cctagactagagaag

SEQ ID NO: 120433 - DNA, 15 bp, Homo sapiens
tcctagactagagaa

SEQ ID NO: 120434 - DNA, 15 bp, Homo sapiens
ctcctagactagaga

SEQ ID NO: 120435 - DNA, 15 bp, Homo sapiens
cctcctagactagag

SEQ ID NO: 120436 - DNA, 15 bp, Homo sapiens
tcctcctagactaga

SEQ ID NO: 120437 - DNA, 15 bp, Homo sapiens
ctcctcctagactag

SEQ ID NO: 120438 - DNA, 15 bp, Homo sapiens
gctcctcctagacta

SEQ ID NO: 120439 - DNA, 15 bp, Homo sapiens
agctcctcctagact

SEQ ID NO: 120440 - DNA, 15 bp, Homo sapiens
tagctcctcctagac

SEQ ID NO: 120441 - DNA, 15 bp, Homo sapiens
ctagctcctcctaga

SEQ ID NO: 120442 - DNA, 15 bp, Homo sapiens
cctagctcctcctag

SEQ ID NO: 120443 - DNA, 15 bp, Homo sapiens
acctagctcctccta

SEQ ID NO: 120444 - DNA, 15 bp, Homo sapiens
gacctagctcctcct

SEQ ID NO: 120445 - DNA, 15 bp, Homo sapiens
ggacctagctcctcc

SEQ ID NO: 120446 - DNA, 15 bp, Homo sapiens
tggacctagctcctc

SEQ ID NO: 120447 - DNA, 15 bp, Homo sapiens
ctggacctagctcct

SEQ ID NO: 120448 - DNA, 15 bp, Homo sapiens
gctggacctagctcc

SEQ ID NO: 120449 - DNA, 15 bp, Homo sapiens
ggctggacctagctc

SEQ ID NO: 120450 - DNA, 15 bp, Homo sapiens
gggctggacctagct

SEQ ID NO: 120451 - DNA, 15 bp, Homo sapiens
ggggctggacctagc

SEQ ID NO: 120452 - DNA, 15 bp, Homo sapiens
aggggctggacctag

SEQ ID NO: 120453 - DNA, 15 bp, Homo sapiens
caggggctggaccta

SEQ ID NO: 120454 - DNA, 15 bp, Homo sapiens
tcaggggctggacct

SEQ ID NO: 120455 - DNA, 15 bp, Homo sapiens
ttcaggggctggacc

SEQ ID NO: 120456 - DNA, 15 bp, Homo sapiens
gttcaggggctggac

SEQ ID NO: 120457 - DNA, 15 bp, Homo sapiens
tgttcaggggctgga

SEQ ID NO: 120458 - DNA, 15 bp, Homo sapiens
atgttcaggggctgg

SEQ ID NO: 120459 - DNA, 15 bp, Homo sapiens
gatgttcaggggctg

SEQ ID NO: 120460 - DNA, 15 bp, Homo sapiens
ggatgttcaggggct

SEQ ID NO: 120461 - DNA, 15 bp, Homo sapiens
aggatgttcaggggc

SEQ ID NO: 120462 - DNA, 15 bp, Homo sapiens
gaggatgttcagggg

SEQ ID NO: 120463 - DNA, 15 bp, Homo sapiens
ggaggatgttcaggg

SEQ ID NO: 120464 - DNA, 15 bp, Homo sapiens
gggaggatgttcagg

SEQ ID NO: 120465 - DNA, 15 bp, Homo sapiens
ggggaggatgttcag

SEQ ID NO: 120466 - DNA, 15 bp, Homo sapiens
gggggaggatgttca

SEQ ID NO: 120467 - DNA, 15 bp, Homo sapiens
agggggaggatgttc

SEQ ID NO: 120468 - DNA, 15 bp, Homo sapiens
gagggggaggatgtt

SEQ ID NO: 120469 - DNA, 15 bp, Homo sapiens
tgagggggaggatgt

SEQ ID NO: 120470 - DNA, 15 bp, Homo sapiens
ctgagggggaggatg

SEQ ID NO: 120471 - DNA, 15 bp, Homo sapiens
tctgagggggaggat

SEQ ID NO: 120472 - DNA, 15 bp, Homo sapiens
ttctgagggggagga

SEQ ID NO: 120473 - DNA, 15 bp, Homo sapiens
tttctgagggggagg

SEQ ID NO: 120474 - DNA, 15 bp, Homo sapiens
ttttctgagggggag

SEQ ID NO: 120475 - DNA, 15 bp, Homo sapiens
cttttctgaggggga

SEQ ID NO: 120476 - DNA, 15 bp, Homo sapiens
gcttttctgaggggg

SEQ ID NO: 120477 - DNA, 15 bp, Homo sapiens
agcttttctgagggg

SEQ ID NO: 120478 - DNA, 15 bp, Homo sapiens
cagcttttctgaggg

SEQ ID NO: 120479 - DNA, 15 bp, Homo sapiens
tcagcttttctgagg

SEQ ID NO: 120480 - DNA, 15 bp, Homo sapiens
ctcagcttttctgag

SEQ ID NO: 120481 - DNA, 15 bp, Homo sapiens
cctcagcttttctga

SEQ ID NO: 120482 - DNA, 15 bp, Homo sapiens
gcctcagcttttctg

SEQ ID NO: 120483 - DNA, 15 bp, Homo sapiens
ggcctcagcttttct

SEQ ID NO: 120484 - DNA, 15 bp, Homo sapiens
tggcctcagcttttc

SEQ ID NO: 120485 - DNA, 15 bp, Homo sapiens
ctggcctcagctttt

SEQ ID NO: 120486 - DNA, 15 bp, Homo sapiens
tctggcctcagcttt

SEQ ID NO: 120487 - DNA, 15 bp, Homo sapiens
gtctggcctcagctt

SEQ ID NO: 120488 - DNA, 15 bp, Homo sapiens
agtctggcctcagct

SEQ ID NO: 120489 - DNA, 15 bp, Homo sapiens
tagtctggcctcagc

SEQ ID NO: 120490 - DNA, 15 bp, Homo sapiens
ttagtctggcctcag

SEQ ID NO: 120491 - DNA, 15 bp, Homo sapiens
cttagtctggcctca

SEQ ID NO: 120492 - DNA, 15 bp, Homo sapiens
tcttagtctggcctc

SEQ ID NO: 120493 - DNA, 15 bp, Homo sapiens
ttcttagtctggcct

SEQ ID NO: 120494 - DNA, 15 bp, Homo sapiens
attcttagtctggcc

SEQ ID NO: 120495 - DNA, 15 bp, Homo sapiens
aattcttagtctggc

SEQ ID NO: 120496 - DNA, 15 bp, Homo sapiens
gaattcttagtctgg

SEQ ID NO: 120497 - DNA, 15 bp, Homo sapiens
tgaattcttagtctg

SEQ ID NO: 120498 - DNA, 15 bp, Homo sapiens
gtgaattcttagtct

SEQ ID NO: 120499 - DNA, 15 bp, Homo sapiens
ggtgaattcttagtc

SEQ ID NO: 120500 - DNA, 15 bp, Homo sapiens
tggtgaattcttagt

SEQ ID NO: 120501 - DNA, 15 bp, Homo sapiens
ctggtgaattcttag

SEQ ID NO: 120502 - DNA, 15 bp, Homo sapiens
tctggtgaattctta

SEQ ID NO: 120503 - DNA, 15 bp, Homo sapiens
gtctggtgaattctt

SEQ ID NO: 120504 - DNA, 15 bp, Homo sapiens
ggtctggtgaattct

SEQ ID NO: 120505 - DNA, 15 bp, Homo sapiens
tggtctggtgaattc

SEQ ID NO: 120506 - DNA, 15 bp, Homo sapiens
ttggtctggtgaatt

SEQ ID NO: 120507 - DNA, 15 bp, Homo sapiens
cttggtctggtgaat

SEQ ID NO: 120508 - DNA, 15 bp, Homo sapiens
ccttggtctggtgaa

SEQ ID NO: 120509 - DNA, 15 bp, Homo sapiens
tccttggtctggtga

SEQ ID NO: 120510 - DNA, 15 bp, Homo sapiens
ctccttggtctggtg

SEQ ID NO: 120511 - DNA, 15 bp, Homo sapiens
gctccttggtctggt

SEQ ID NO: 120512 - DNA, 15 bp, Homo sapiens
agctccttggtctgg

SEQ ID NO: 120513 - DNA, 15 bp, Homo sapiens
tagctccttggtctg

SEQ ID NO: 120514 - DNA, 15 bp, Homo sapiens
gtagctccttggtct

SEQ ID NO: 120515 - DNA, 15 bp, Homo sapiens
tgtagctccttggtc

SEQ ID NO: 120516 - DNA, 15 bp, Homo sapiens
ttgtagctccttggt

SEQ ID NO: 120517 - DNA, 15 bp, Homo sapiens
gttgtagctccttgg

SEQ ID NO: 120518 - DNA, 15 bp, Homo sapiens
tgttgtagctccttg

SEQ ID NO: 120519 - DNA, 15 bp, Homo sapiens
ctgttgtagctcctt

SEQ ID NO: 120520 - DNA, 15 bp, Homo sapiens
cctgttgtagctcct

SEQ ID NO: 120521 - DNA, 15 bp, Homo sapiens
tcctgttgtagctcc

SEQ ID NO: 120522 - DNA, 15 bp, Homo sapiens
gtcctgttgtagctc

SEQ ID NO: 120523 - DNA, 15 bp, Homo sapiens
tgtcctgttgtagct

SEQ ID NO: 120524 - DNA, 15 bp, Homo sapiens
atgtcctgttgtagc

SEQ ID NO: 120525 - DNA, 15 bp, Homo sapiens
gatgtcctgttgtag

SEQ ID NO: 120526 - DNA, 15 bp, Homo sapiens
tgatgtcctgttgta

SEQ ID NO: 120527 - DNA, 15 bp, Homo sapiens
ctgatgtcctgttgt

SEQ ID NO: 120528 - DNA, 15 bp, Homo sapiens
tctgatgtcctgttg

SEQ ID NO: 120529 - DNA, 15 bp, Homo sapiens
ctctgatgtcctgtt

SEQ ID NO: 120530 - DNA, 15 bp, Homo sapiens
gctctgatgtcctgt

SEQ ID NO: 120531 - DNA, 15 bp, Homo sapiens
agctctgatgtcctg

SEQ ID NO: 120532 - DNA, 15 bp, Homo sapiens
cagctctgatgtcct

SEQ ID NO: 120533 - DNA, 15 bp, Homo sapiens
tcagctctgatgtcc

SEQ ID NO: 120534 - DNA, 15 bp, Homo sapiens
ctcagctctgatgtc

SEQ ID NO: 120535 - DNA, 15 bp, Homo sapiens
cctcagctctgatgt

SEQ ID NO: 120536 - DNA, 15 bp, Homo sapiens
gcctcagctctgatg

SEQ ID NO: 120537 - DNA, 15 bp, Homo sapiens
agcctcagctctgat

SEQ ID NO: 120538 - DNA, 15 bp, Homo sapiens
cagcctcagctctga

SEQ ID NO: 120539 - DNA, 15 bp, Homo sapiens
gcagcctcagctctg

SEQ ID NO: 120540 - DNA, 15 bp, Homo sapiens
tgcagcctcagctct

SEQ ID NO: 120541 - DNA, 15 bp, Homo sapiens
ttgcagcctcagctc

SEQ ID NO: 120542 - DNA, 15 bp, Homo sapiens
tttgcagcctcagct

SEQ ID NO: 120543 - DNA, 15 bp, Homo sapiens
ctttgcagcctcagc

SEQ ID NO: 120544 - DNA, 15 bp, Homo sapiens
gctttgcagcctcag

SEQ ID NO: 120545 - DNA, 15 bp, Homo sapiens
ggctttgcagcctca

SEQ ID NO: 120546 - DNA, 15 bp, Homo sapiens
tggctttgcagcctc

SEQ ID NO: 120547 - DNA, 15 bp, Homo sapiens
ctggctttgcagcct

SEQ ID NO: 120548 - DNA, 15 bp, Homo sapiens
cctggctttgcagcc

SEQ ID NO: 120549 - DNA, 15 bp, Homo sapiens
tcctggctttgcagc

SEQ ID NO: 120550 - DNA, 15 bp, Homo sapiens
gtcctggctttgcag

SEQ ID NO: 120551 - DNA, 15 bp, Homo sapiens
agtcctggctttgca

SEQ ID NO: 120552 - DNA, 15 bp, Homo sapiens
cagtcctggctttgc

SEQ ID NO: 120553 - DNA, 15 bp, Homo sapiens
tcagtcctggctttg

SEQ ID NO: 120554 - DNA, 15 bp, Homo sapiens
ctcagtcctggcttt

SEQ ID NO: 120555 - DNA, 15 bp, Homo sapiens
tctcagtcctggctt

SEQ ID NO: 120556 - DNA, 15 bp, Homo sapiens
gtctcagtcctggct

SEQ ID NO: 120557 - DNA, 15 bp, Homo sapiens
ggtctcagtcctggc

SEQ ID NO: 120558 - DNA, 15 bp, Homo sapiens
tggtctcagtcctgg

SEQ ID NO: 120559 - DNA, 15 bp, Homo sapiens
ctggtctcagtcctg

SEQ ID NO: 120560 - DNA, 15 bp, Homo sapiens
tctggtctcagtcct

SEQ ID NO: 120561 - DNA, 15 bp, Homo sapiens
gtctggtctcagtcc

SEQ ID NO: 120562 - DNA, 15 bp, Homo sapiens
ggtctggtctcagtc

SEQ ID NO: 120563 - DNA, 15 bp, Homo sapiens
tggtctggtctcagt

SEQ ID NO: 120564 - DNA, 15 bp, Homo sapiens
ctggtctggtctcag

SEQ ID NO: 120565 - DNA, 15 bp, Homo sapiens
cctggtctggtctca

SEQ ID NO: 120566 - DNA, 15 bp, Homo sapiens
gcctggtctggtctc

SEQ ID NO: 120567 - DNA, 15 bp, Homo sapiens
tgcctggtctggtct

SEQ ID NO: 120568 - DNA, 15 bp, Homo sapiens
ctgcctggtctggtc

SEQ ID NO: 120569 - DNA, 15 bp, Homo sapiens
cctgcctggtctggt

SEQ ID NO: 120570 - DNA, 15 bp, Homo sapiens
tcctgcctggtctgg

SEQ ID NO: 120571 - DNA, 15 bp, Homo sapiens
ttcctgcctggtctg

SEQ ID NO: 120572 - DNA, 15 bp, Homo sapiens
tttcctgcctggtct

SEQ ID NO: 120573 - DNA, 15 bp, Homo sapiens
gtttcctgcctggtc

SEQ ID NO: 120574 - DNA, 15 bp, Homo sapiens
agtttcctgcctggt

SEQ ID NO: 120575 - DNA, 15 bp, Homo sapiens
cagtttcctgcctgg

SEQ ID NO: 120576 - DNA, 15 bp, Homo sapiens
acagtttcctgcctg

SEQ ID NO: 120577 - DNA, 15 bp, Homo sapiens
gacagtttcctgcct

SEQ ID NO: 120578 - DNA, 15 bp, Homo sapiens
tgacagtttcctgcc

SEQ ID NO: 120579 - DNA, 15 bp, Homo sapiens
ttgacagtttcctgc

SEQ ID NO: 120580 - DNA, 15 bp, Homo sapiens
cttgacagtttcctg

SEQ ID NO: 120581 - DNA, 15 bp, Homo sapiens
tcttgacagtttcct

SEQ ID NO: 120582 - DNA, 15 bp, Homo sapiens
ctcttgacagtttcc

SEQ ID NO: 120583 - DNA, 15 bp, Homo sapiens
gctcttgacagtttc

SEQ ID NO: 120584 - DNA, 15 bp, Homo sapiens
agctcttgacagttt

SEQ ID NO: 120585 - DNA, 15 bp, Homo sapiens
aagctcttgacagtt

SEQ ID NO: 120586 - DNA, 15 bp, Homo sapiens
aaagctcttgacagt

SEQ ID NO: 120587 - DNA, 15 bp, Homo sapiens
caaagctcttgacag

SEQ ID NO: 120588 - DNA, 15 bp, Homo sapiens
ccaaagctcttgaca

SEQ ID NO: 120589 - DNA, 15 bp, Homo sapiens
accaaagctcttgac

SEQ ID NO: 120590 - DNA, 15 bp, Homo sapiens
gaccaaagctcttga

SEQ ID NO: 120591 - DNA, 15 bp, Homo sapiens
tgaccaaagctcttg

SEQ ID NO: 120592 - DNA, 15 bp, Homo sapiens
gtgaccaaagctctt

SEQ ID NO: 120593 - DNA, 15 bp, Homo sapiens
ggtgaccaaagctct

SEQ ID NO: 120594 - DNA, 15 bp, Homo sapiens
tggtgaccaaagctc

SEQ ID NO: 120595 - DNA, 15 bp, Homo sapiens
ctggtgaccaaagct

SEQ ID NO: 120596 - DNA, 15 bp, Homo sapiens
cctggtgaccaaagc

SEQ ID NO: 120597 - DNA, 15 bp, Homo sapiens
gcctggtgaccaaag

SEQ ID NO: 120598 - DNA, 15 bp, Homo sapiens
ggcctggtgaccaaa

SEQ ID NO: 120599 - DNA, 15 bp, Homo sapiens
aggcctggtgaccaa

SEQ ID NO: 120600 - DNA, 15 bp, Homo sapiens
caggcctggtgacca

SEQ ID NO: 120601 - DNA, 15 bp, Homo sapiens
ccaggcctggtgacc

SEQ ID NO: 120602 - DNA, 15 bp, Homo sapiens
gccaggcctggtgac

SEQ ID NO: 120603 - DNA, 15 bp, Homo sapiens
agccaggcctggtga

SEQ ID NO: 120604 - DNA, 15 bp, Homo sapiens
cagccaggcctggtg

SEQ ID NO: 120605 - DNA, 15 bp, Homo sapiens
gcagccaggcctggt

SEQ ID NO: 120606 - DNA, 15 bp, Homo sapiens
ggcagccaggcctgg

SEQ ID NO: 120607 - DNA, 15 bp, Homo sapiens
gggcagccaggcctg

SEQ ID NO: 120608 - DNA, 15 bp, Homo sapiens
agggcagccaggcct

SEQ ID NO: 120609 - DNA, 15 bp, Homo sapiens
gagggcagccaggcc

SEQ ID NO: 120610 - DNA, 15 bp, Homo sapiens
ggagggcagccaggc

SEQ ID NO: 120611 - DNA, 15 bp, Homo sapiens
tggagggcagccagg

SEQ ID NO: 120612 - DNA, 15 bp, Homo sapiens
ttggagggcagccag

SEQ ID NO: 120613 - DNA, 15 bp, Homo sapiens
gttggagggcagcca

SEQ ID NO: 120614 - DNA, 15 bp, Homo sapiens
tgttggagggcagcc

SEQ ID NO: 120615 - DNA, 15 bp, Homo sapiens
atgttggagggcagc

SEQ ID NO: 120616 - DNA, 15 bp, Homo sapiens
gatgttggagggcag

SEQ ID NO: 120617 - DNA, 15 bp, Homo sapiens
tgatgttggagggca

SEQ ID NO: 120618 - DNA, 15 bp, Homo sapiens
ctgatgttggagggc

SEQ ID NO: 120619 - DNA, 15 bp, Homo sapiens
gctgatgttggaggg

SEQ ID NO: 120620 - DNA, 15 bp, Homo sapiens
agctgatgttggagg

SEQ ID NO: 120621 - DNA, 15 bp, Homo sapiens
cagctgatgttggag

SEQ ID NO: 120622 - DNA, 15 bp, Homo sapiens
ccagctgatgttgga

SEQ ID NO: 120623 - DNA, 15 bp, Homo sapiens
gccagctgatgttgg

SEQ ID NO: 120624 - DNA, 15 bp, Homo sapiens
agccagctgatgttg

SEQ ID NO: 120625 - DNA, 15 bp, Homo sapiens
gagccagctgatgtt

SEQ ID NO: 120626 - DNA, 15 bp, Homo sapiens
agagccagctgatgt

SEQ ID NO: 120627 - DNA, 15 bp, Homo sapiens
aagagccagctgatg

SEQ ID NO: 120628 - DNA, 15 bp, Homo sapiens
aaagagccagctgat

SEQ ID NO: 120629 - DNA, 15 bp, Homo sapiens
gaaagagccagctga

SEQ ID NO: 120630 - DNA, 15 bp, Homo sapiens
agaaagagccagctg

SEQ ID NO: 120631 - DNA, 15 bp, Homo sapiens
tagaaagagccagct

SEQ ID NO: 120632 - DNA, 15 bp, Homo sapiens
ttagaaagagccagc

SEQ ID NO: 120633 - DNA, 15 bp, Homo sapiens
tttagaaagagccag

SEQ ID NO: 120634 - DNA, 15 bp, Homo sapiens
atttagaaagagcca

SEQ ID NO: 120635 - DNA, 15 bp, Homo sapiens
aatttagaaagagcc

SEQ ID NO: 120636 - DNA, 15 bp, Homo sapiens
caatttagaaagagc

SEQ ID NO: 120637 - DNA, 15 bp, Homo sapiens
tcaatttagaaagag

SEQ ID NO: 120638 - DNA, 15 bp, Homo sapiens
gtcaatttagaaaga

SEQ ID NO: 120639 - DNA, 15 bp, Homo sapiens
tgtcaatttagaaag

SEQ ID NO: 120640 - DNA, 15 bp, Homo sapiens
gtgtcaatttagaaa

SEQ ID NO: 120641 - DNA, 15 bp, Homo sapiens
tgtgtcaatttagaa

SEQ ID NO: 120642 - DNA, 15 bp, Homo sapiens
gtgtgtcaatttaga

SEQ ID NO: 120643 - DNA, 15 bp, Homo sapiens
ggtgtgtcaatttag

SEQ ID NO: 120644 - DNA, 15 bp, Homo sapiens
tggtgtgtcaattta

SEQ ID NO: 120645 - DNA, 15 bp, Homo sapiens
gtggtgtgtcaattt

SEQ ID NO: 120646 - DNA, 15 bp, Homo sapiens
tgtggtgtgtcaatt

SEQ ID NO: 120647 - DNA, 15 bp, Homo sapiens
atgtggtgtgtcaat

SEQ ID NO: 120648 - DNA, 15 bp, Homo sapiens
catgtggtgtgtcaa

SEQ ID NO: 120649 - DNA, 15 bp, Homo sapiens
acatgtggtgtgtca

SEQ ID NO: 120650 - DNA, 15 bp, Homo sapiens
gacatgtggtgtgtc

SEQ ID NO: 120651 - DNA, 15 bp, Homo sapiens
ggacatgtggtgtgt

SEQ ID NO: 120652 - DNA, 15 bp, Homo sapiens
gggacatgtggtgtg

SEQ ID NO: 120653 - DNA, 15 bp, Homo sapiens
agggacatgtggtgt

SEQ ID NO: 120654 - DNA, 15 bp, Homo sapiens
tagggacatgtggtg

SEQ ID NO: 120655 - DNA, 15 bp, Homo sapiens
ttagggacatgtggt

SEQ ID NO: 120656 - DNA, 15 bp, Homo sapiens
tttagggacatgtgg

SEQ ID NO: 120657 - DNA, 15 bp, Homo sapiens
ttttagggacatgtg

SEQ ID NO: 120658 - DNA, 15 bp, Homo sapiens
attttagggacatgt

SEQ ID NO: 120659 - DNA, 15 bp, Homo sapiens
aattttagggacatg

SEQ ID NO: 120660 - DNA, 15 bp, Homo sapiens
gaattttagggacat

SEQ ID NO: 120661 - DNA, 15 bp, Homo sapiens
agaattttagggaca

SEQ ID NO: 120662 - DNA, 15 bp, Homo sapiens
gagaattttagggac

SEQ ID NO: 120663 - DNA, 15 bp, Homo sapiens
agagaattttaggga

SEQ ID NO: 120664 - DNA, 15 bp, Homo sapiens
gagagaattttaggg

SEQ ID NO: 120665 - DNA, 15 bp, Homo sapiens
agagagaattttagg

SEQ ID NO: 120666 - DNA, 15 bp, Homo sapiens
aagagagaattttag

SEQ ID NO: 120667 - DNA, 15 bp, Homo sapiens
gaagagagaatttta

SEQ ID NO: 120668 - DNA, 15 bp, Homo sapiens
tgaagagagaatttt

SEQ ID NO: 120669 - DNA, 15 bp, Homo sapiens
ttgaagagagaattt

SEQ ID NO: 120670 - DNA, 15 bp, Homo sapiens
cttgaagagagaatt

SEQ ID NO: 120671 - DNA, 15 bp, Homo sapiens
acttgaagagagaat

SEQ ID NO: 120672 - DNA, 15 bp, Homo sapiens
tacttgaagagagaa

SEQ ID NO: 120673 - DNA, 15 bp, Homo sapiens
ttacttgaagagaga

SEQ ID NO: 120674 - DNA, 15 bp, Homo sapiens
attacttgaagagag

SEQ ID NO: 120675 - DNA, 15 bp, Homo sapiens
tattacttgaagaga

SEQ ID NO: 120676 - DNA, 15 bp, Homo sapiens
gtattacttgaagag

SEQ ID NO: 120677 - DNA, 15 bp, Homo sapiens
ggtattacttgaaga

SEQ ID NO: 120678 - DNA, 15 bp, Homo sapiens
tggtattacttgaag

SEQ ID NO: 120679 - DNA, 15 bp, Homo sapiens
gtggtattacttgaa

SEQ ID NO: 120680 - DNA, 15 bp, Homo sapiens
ggtggtattacttga

SEQ ID NO: 120681 - DNA, 15 bp, Homo sapiens
tggtggtattacttg

SEQ ID NO: 120682 - DNA, 15 bp, Homo sapiens
atggtggtattactt

SEQ ID NO: 120683 - DNA, 15 bp, Homo sapiens
gatggtggtattact

SEQ ID NO: 120684 - DNA, 15 bp, Homo sapiens
tgatggtggtattac

SEQ ID NO: 120685 - DNA, 15 bp, Homo sapiens
ttgatggtggtatta

SEQ ID NO: 120686 - DNA, 15 bp, Homo sapiens
tttgatggtggtatt

SEQ ID NO: 120687 - DNA, 15 bp, Homo sapiens
ctttgatggtggtat

SEQ ID NO: 120688 - DNA, 15 bp, Homo sapiens
gctttgatggtggta

SEQ ID NO: 120689 - DNA, 15 bp, Homo sapiens
tgctttgatggtggt

SEQ ID NO: 120690 - DNA, 15 bp, Homo sapiens
ctgctttgatggtgg

SEQ ID NO: 120691 - DNA, 15 bp, Homo sapiens
cctgctttgatggtg

SEQ ID NO: 120692 - DNA, 15 bp, Homo sapiens
tcctgctttgatggt

SEQ ID NO: 120693 - DNA, 15 bp, Homo sapiens
gtcctgctttgatgg

SEQ ID NO: 120694 - DNA, 15 bp, Homo sapiens
tgtcctgctttgatg

SEQ ID NO: 120695 - DNA, 15 bp, Homo sapiens
atgtcctgctttgat

SEQ ID NO: 120696 - DNA, 15 bp, Homo sapiens
aatgtcctgctttga

SEQ ID NO: 120697 - DNA, 15 bp, Homo sapiens
aaatgtcctgctttg

SEQ ID NO: 120698 - DNA, 15 bp, Homo sapiens
gaaatgtcctgcttt

SEQ ID NO: 120699 - DNA, 15 bp, Homo sapiens
ggaaatgtcctgctt

SEQ ID NO: 120700 - DNA, 15 bp, Homo sapiens
gggaaatgtcctgct

SEQ ID NO: 120701 - DNA, 15 bp, Homo sapiens
tgggaaatgtcctgc

SEQ ID NO: 120702 - DNA, 15 bp, Homo sapiens
ctgggaaatgtcctg

SEQ ID NO: 120703 - DNA, 15 bp, Homo sapiens
tctgggaaatgtcct

SEQ ID NO: 120704 - DNA, 15 bp, Homo sapiens
ctctgggaaatgtcc

SEQ ID NO: 120705 - DNA, 15 bp, Homo sapiens
gctctgggaaatgtc

SEQ ID NO: 120706 - DNA, 15 bp, Homo sapiens
ggctctgggaaatgt

SEQ ID NO: 120707 - DNA, 15 bp, Homo sapiens
aggctctgggaaatg

SEQ ID NO: 120708 - DNA, 15 bp, Homo sapiens
aaggctctgggaaat

SEQ ID NO: 120709 - DNA, 15 bp, Homo sapiens
taaggctctgggaaa

SEQ ID NO: 120710 - DNA, 15 bp, Homo sapiens
ctaaggctctgggaa

SEQ ID NO: 120711 - DNA, 15 bp, Homo sapiens
tctaaggctctggga

SEQ ID NO: 120712 - DNA, 15 bp, Homo sapiens
ctctaaggctctggg

SEQ ID NO: 120713 - DNA, 15 bp, Homo sapiens
gctctaaggctctgg

SEQ ID NO: 120714 - DNA, 15 bp, Homo sapiens
ggctctaaggctctg

SEQ ID NO: 120715 - DNA, 15 bp, Homo sapiens
aggctctaaggctct

SEQ ID NO: 120716 - DNA, 15 bp, Homo sapiens
caggctctaaggctc

SEQ ID NO: 120717 - DNA, 15 bp, Homo sapiens
ccaggctctaaggct

SEQ ID NO: 120718 - DNA, 15 bp, Homo sapiens
accaggctctaaggc

SEQ ID NO: 120719 - DNA, 15 bp, Homo sapiens
caccaggctctaagg

SEQ ID NO: 120720 - DNA, 15 bp, Homo sapiens
acaccaggctctaag

SEQ ID NO: 120721 - DNA, 15 bp, Homo sapiens
gacaccaggctctaa

SEQ ID NO: 120722 - DNA, 15 bp, Homo sapiens
agacaccaggctcta

SEQ ID NO: 120723 - DNA, 15 bp, Homo sapiens
cagacaccaggctct

SEQ ID NO: 120724 - DNA, 15 bp, Homo sapiens
gcagacaccaggctc

SEQ ID NO: 120725 - DNA, 15 bp, Homo sapiens
agcagacaccaggct

SEQ ID NO: 120726 - DNA, 15 bp, Homo sapiens
gagcagacaccaggc

SEQ ID NO: 120727 - DNA, 15 bp, Homo sapiens
tgagcagacaccagg

SEQ ID NO: 120728 - DNA, 15 bp, Homo sapiens
ctgagcagacaccag

SEQ ID NO: 120729 - DNA, 15 bp, Homo sapiens
actgagcagacacca

SEQ ID NO: 120730 - DNA, 15 bp, Homo sapiens
cactgagcagacacc

SEQ ID NO: 120731 - DNA, 15 bp, Homo sapiens
ccactgagcagacac

SEQ ID NO: 120732 - DNA, 15 bp, Homo sapiens
cccactgagcagaca

SEQ ID NO: 120733 - DNA, 15 bp, Homo sapiens
tcccactgagcagac

SEQ ID NO: 120734 - DNA, 15 bp, Homo sapiens
gtcccactgagcaga

SEQ ID NO: 120735 - DNA, 15 bp, Homo sapiens
agtcccactgagcag

SEQ ID NO: 120736 - DNA, 15 bp, Homo sapiens
gagtcccactgagca

SEQ ID NO: 120737 - DNA, 15 bp, Homo sapiens
tgagtcccactgagc

SEQ ID NO: 120738 - DNA, 15 bp, Homo sapiens
ttgagtcccactgag

SEQ ID NO: 120739 - DNA, 15 bp, Homo sapiens
gttgagtcccactga

SEQ ID NO: 120740 - DNA, 15 bp, Homo sapiens
ggttgagtcccactg

SEQ ID NO: 120741 - DNA, 15 bp, Homo sapiens
gggttgagtcccact

SEQ ID NO: 120742 - DNA, 15 bp, Homo sapiens
ggggttgagtcccac

SEQ ID NO: 120743 - DNA, 15 bp, Homo sapiens
tggggttgagtccca

SEQ ID NO: 120744 - DNA, 15 bp, Homo sapiens
ctggggttgagtccc

SEQ ID NO: 120745 - DNA, 15 bp, Homo sapiens
tctggggttgagtcc

SEQ ID NO: 120746 - DNA, 15 bp, Homo sapiens
ttctggggttgagtc

SEQ ID NO: 120747 - DNA, 15 bp, Homo sapiens
cttctggggttgagt

SEQ ID NO: 120748 - DNA, 15 bp, Homo sapiens
tcttctggggttgag

SEQ ID NO: 120749 - DNA, 15 bp, Homo sapiens
ttcttctggggttga

SEQ ID NO: 120750 - DNA, 15 bp, Homo sapiens
cttcttctggggttg

SEQ ID NO: 120751 - DNA, 15 bp, Homo sapiens
gcttcttctggggtt

SEQ ID NO: 120752 - DNA, 15 bp, Homo sapiens
agcttcttctggggt

SEQ ID NO: 120753 - DNA, 15 bp, Homo sapiens
cagcttcttctgggg

SEQ ID NO: 120754 - DNA, 15 bp, Homo sapiens
acagcttcttctggg

SEQ ID NO: 120755 - DNA, 15 bp, Homo sapiens
aacagcttcttctgg

SEQ ID NO: 120756 - DNA, 15 bp, Homo sapiens
taacagcttcttctg

SEQ ID NO: 120757 - DNA, 15 bp, Homo sapiens
ttaacagcttcttct

SEQ ID NO: 120758 - DNA, 15 bp, Homo sapiens
tttaacagcttcttc

SEQ ID NO: 120759 - DNA, 15 bp, Homo sapiens
atttaacagcttctt

SEQ ID NO: 120760 - DNA, 15 bp, Homo sapiens
gatttaacagcttct

SEQ ID NO: 120761 - DNA, 15 bp, Homo sapiens
tgatttaacagcttc

SEQ ID NO: 120762 - DNA, 15 bp, Homo sapiens
gtgatttaacagctt

SEQ ID NO: 120763 - DNA, 15 bp, Homo sapiens
ggtgatttaacagct

SEQ ID NO: 120764 - DNA, 15 bp, Homo sapiens
gggtgatttaacagc

SEQ ID NO: 120765 - DNA, 15 bp, Homo sapiens
tgggtgatttaacag

SEQ ID NO: 120766 - DNA, 15 bp, Homo sapiens
gtgggtgatttaaca

SEQ ID NO: 120767 - DNA, 15 bp, Homo sapiens
agtgggtgatttaac

SEQ ID NO: 120768 - DNA, 15 bp, Homo sapiens
cagtgggtgatttaa

SEQ ID NO: 120769 - DNA, 15 bp, Homo sapiens
acagtgggtgattta

SEQ ID NO: 120770 - DNA, 15 bp, Homo sapiens
aacagtgggtgattt

SEQ ID NO: 120771 - DNA, 15 bp, Homo sapiens
aaacagtgggtgatt

SEQ ID NO: 120772 - DNA, 15 bp, Homo sapiens
gaaacagtgggtgat

SEQ ID NO: 120773 - DNA, 15 bp, Homo sapiens
tgaaacagtgggtga

SEQ ID NO: 120774 - DNA, 15 bp, Homo sapiens
ctgaaacagtgggtg

SEQ ID NO: 120775 - DNA, 15 bp, Homo sapiens
actgaaacagtgggt

SEQ ID NO: 120776 - DNA, 15 bp, Homo sapiens
aactgaaacagtggg

SEQ ID NO: 120777 - DNA, 15 bp, Homo sapiens
aaactgaaacagtgg

SEQ ID NO: 120778 - DNA, 15 bp, Homo sapiens
taaactgaaacagtg

SEQ ID NO: 120779 - DNA, 15 bp, Homo sapiens
gtaaactgaaacagt

SEQ ID NO: 120780 - DNA, 15 bp, Homo sapiens
tgtaaactgaaacag

SEQ ID NO: 120781 - DNA, 15 bp, Homo sapiens
ttgtaaactgaaaca

SEQ ID NO: 120782 - DNA, 15 bp, Homo sapiens
tttgtaaactgaaac

SEQ ID NO: 120783 - DNA, 15 bp, Homo sapiens
gtttgtaaactgaaa

SEQ ID NO: 120784 - DNA, 15 bp, Homo sapiens
agtttgtaaactgaa

SEQ ID NO: 120785 - DNA, 15 bp, Homo sapiens
aagtttgtaaactga

SEQ ID NO: 120786 - DNA, 15 bp, Homo sapiens
gaagtttgtaaactg

SEQ ID NO: 120787 - DNA, 15 bp, Homo sapiens
agaagtttgtaaact

SEQ ID NO: 120788 - DNA, 15 bp, Homo sapiens
aagaagtttgtaaac

SEQ ID NO: 120789 - DNA, 15 bp, Homo sapiens
taagaagtttgtaaa

SEQ ID NO: 120790 - DNA, 15 bp, Homo sapiens
gtaagaagtttgtaa

SEQ ID NO: 120791 - DNA, 15 bp, Homo sapiens
cgtaagaagtttgta

SEQ ID NO: 120792 - DNA, 15 bp, Homo sapiens
tcgtaagaagtttgt

SEQ ID NO: 120793 - DNA, 15 bp, Homo sapiens
gtcgtaagaagtttg

SEQ ID NO: 120794 - DNA, 15 bp, Homo sapiens
agtcgtaagaagttt

SEQ ID NO: 120795 - DNA, 15 bp, Homo sapiens
aagtcgtaagaagtt

SEQ ID NO: 120796 - DNA, 15 bp, Homo sapiens
caagtcgtaagaagt

SEQ ID NO: 120797 - DNA, 15 bp, Homo sapiens
ccaagtcgtaagaag

SEQ ID NO: 120798 - DNA, 15 bp, Homo sapiens
gccaagtcgtaagaa

SEQ ID NO: 120799 - DNA, 15 bp, Homo sapiens
tgccaagtcgtaaga

SEQ ID NO: 120800 - DNA, 15 bp, Homo sapiens
ttgccaagtcgtaag

SEQ ID NO: 120801 - DNA, 15 bp, Homo sapiens
gttgccaagtcgtaa

SEQ ID NO: 120802 - DNA, 15 bp, Homo sapiens
tgttgccaagtcgta

SEQ ID NO: 120803 - DNA, 15 bp, Homo sapiens
ttgttgccaagtcgt

SEQ ID NO: 120804 - DNA, 15 bp, Homo sapiens
cttgttgccaagtcg

SEQ ID NO: 120805 - DNA, 15 bp, Homo sapiens
acttgttgccaagtc

SEQ ID NO: 120806 - DNA, 15 bp, Homo sapiens
cacttgttgccaagt

SEQ ID NO: 120807 - DNA, 15 bp, Homo sapiens
tcacttgttgccaag

SEQ ID NO: 120808 - DNA, 15 bp, Homo sapiens
ttcacttgttgccaa

SEQ ID NO: 120809 - DNA, 15 bp, Homo sapiens
tttcacttgttgcca

SEQ ID NO: 120810 - DNA, 15 bp, Homo sapiens
gtttcacttgttgcc

SEQ ID NO: 120811 - DNA, 15 bp, Homo sapiens
agtttcacttgttgc

SEQ ID NO: 120812 - DNA, 15 bp, Homo sapiens
tagtttcacttgttg

SEQ ID NO: 120813 - DNA, 15 bp, Homo sapiens
gtagtttcacttgtt

SEQ ID NO: 120814 - DNA, 15 bp, Homo sapiens
tgtagtttcacttgt

SEQ ID NO: 120815 - DNA, 15 bp, Homo sapiens
atgtagtttcacttg

SEQ ID NO: 120816 - DNA, 15 bp, Homo sapiens
aatgtagtttcactt

SEQ ID NO: 120817 - DNA, 15 bp, Homo sapiens
gaatgtagtttcact

SEQ ID NO: 120818 - DNA, 15 bp, Homo sapiens
agaatgtagtttcac

SEQ ID NO: 120819 - DNA, 15 bp, Homo sapiens
cagaatgtagtttca

SEQ ID NO: 120820 - DNA, 15 bp, Homo sapiens
ccagaatgtagtttc

SEQ ID NO: 120821 - DNA, 15 bp, Homo sapiens
gccagaatgtagttt

SEQ ID NO: 120822 - DNA, 15 bp, Homo sapiens
tgccagaatgtagtt

SEQ ID NO: 120823 - DNA, 15 bp, Homo sapiens
ctgccagaatgtagt

SEQ ID NO: 120824 - DNA, 15 bp, Homo sapiens
gctgccagaatgtag

SEQ ID NO: 120825 - DNA, 15 bp, Homo sapiens
tgctgccagaatgta

SEQ ID NO: 120826 - DNA, 15 bp, Homo sapiens
ttgctgccagaatgt

SEQ ID NO: 120827 - DNA, 15 bp, Homo sapiens
gttgctgccagaatg

SEQ ID NO: 120828 - DNA, 15 bp, Homo sapiens
agttgctgccagaat

SEQ ID NO: 120829 - DNA, 15 bp, Homo sapiens
cagttgctgccagaa

SEQ ID NO: 120830 - DNA, 15 bp, Homo sapiens
gcagttgctgccaga

SEQ ID NO: 120831 - DNA, 15 bp, Homo sapiens
tgcagttgctgccag

SEQ ID NO: 120832 - DNA, 15 bp, Homo sapiens
ttgcagttgctgcca

SEQ ID NO: 120833 - DNA, 15 bp, Homo sapiens
cttgcagttgctgcc

SEQ ID NO: 120834 - DNA, 15 bp, Homo sapiens
acttgcagttgctgc

SEQ ID NO: 120835 - DNA, 15 bp, Homo sapiens
aacttgcagttgctg

SEQ ID NO: 120836 - DNA, 15 bp, Homo sapiens
gaacttgcagttgct

SEQ ID NO: 120837 - DNA, 15 bp, Homo sapiens
ggaacttgcagttgc

SEQ ID NO: 120838 - DNA, 15 bp, Homo sapiens
gggaacttgcagttg

SEQ ID NO: 120839 - DNA, 15 bp, Homo sapiens
agggaacttgcagtt

SEQ ID NO: 120840 - DNA, 15 bp, Homo sapiens
tagggaacttgcagt

SEQ ID NO: 120841 - DNA, 15 bp, Homo sapiens
ctagggaacttgcag

SEQ ID NO: 120842 - DNA, 15 bp, Homo sapiens
actagggaacttgca

SEQ ID NO: 120843 - DNA, 15 bp, Homo sapiens
tactagggaacttgc

SEQ ID NO: 120844 - DNA, 15 bp, Homo sapiens
gtactagggaacttg

SEQ ID NO: 120845 - DNA, 15 bp, Homo sapiens
ggtactagggaactt

SEQ ID NO: 120846 - DNA, 15 bp, Homo sapiens
gggtactagggaact

SEQ ID NO: 120847 - DNA, 15 bp, Homo sapiens
tgggtactagggaac

SEQ ID NO: 120848 - DNA, 15 bp, Homo sapiens
ctgggtactagggaa

SEQ ID NO: 120849 - DNA, 15 bp, Homo sapiens
cctgggtactaggga

SEQ ID NO: 120850 - DNA, 15 bp, Homo sapiens
tcctgggtactaggg

SEQ ID NO: 120851 - DNA, 15 bp, Homo sapiens
gtcctgggtactagg

SEQ ID NO: 120852 - DNA, 15 bp, Homo sapiens
agtcctgggtactag

SEQ ID NO: 120853 - DNA, 15 bp, Homo sapiens
aagtcctgggtacta

SEQ ID NO: 120854 - DNA, 15 bp, Homo sapiens
gaagtcctgggtact

SEQ ID NO: 120855 - DNA, 15 bp, Homo sapiens
ggaagtcctgggtac

SEQ ID NO: 120856 - DNA, 15 bp, Homo sapiens
gggaagtcctgggta

SEQ ID NO: 120857 - DNA, 15 bp, Homo sapiens
cgggaagtcctgggt

SEQ ID NO: 120858 - DNA, 15 bp, Homo sapiens
acgggaagtcctggg

SEQ ID NO: 120859 - DNA, 15 bp, Homo sapiens
aacgggaagtcctgg

SEQ ID NO: 120860 - DNA, 15 bp, Homo sapiens
aaacgggaagtcctg

SEQ ID NO: 120861 - DNA, 15 bp, Homo sapiens
aaaacgggaagtcct

SEQ ID NO: 120862 - DNA, 15 bp, Homo sapiens
aaaaacgggaagtcc

SEQ ID NO: 120863 - DNA, 15 bp, Homo sapiens
aaaaaacgggaagtc

SEQ ID NO: 120864 - DNA, 15 bp, Homo sapiens
gaaaaaacgggaagt

SEQ ID NO: 120865 - DNA, 15 bp, Homo sapiens
agaaaaaacgggaag

SEQ ID NO: 120866 - DNA, 15 bp, Homo sapiens
aagaaaaaacgggaa

SEQ ID NO: 120867 - DNA, 15 bp, Homo sapiens
caagaaaaaacggga

SEQ ID NO: 120868 - DNA, 15 bp, Homo sapiens
gcaagaaaaaacggg

SEQ ID NO: 120869 - DNA, 15 bp, Homo sapiens
agcaagaaaaaacgg

SEQ ID NO: 120870 - DNA, 15 bp, Homo sapiens
cagcaagaaaaaacg

SEQ ID NO: 120871 - DNA, 15 bp, Homo sapiens
acagcaagaaaaaac

SEQ ID NO: 120872 - DNA, 15 bp, Homo sapiens
tacagcaagaaaaaa

SEQ ID NO: 120873 - DNA, 15 bp, Homo sapiens
gtacagcaagaaaaa

SEQ ID NO: 120874 - DNA, 15 bp, Homo sapiens
agtacagcaagaaaa

SEQ ID NO: 120875 - DNA, 15 bp, Homo sapiens
gagtacagcaagaaa

SEQ ID NO: 120876 - DNA, 15 bp, Homo sapiens
ggagtacagcaagaa

SEQ ID NO: 120877 - DNA, 15 bp, Homo sapiens
gggagtacagcaaga

SEQ ID NO: 120878 - DNA, 15 bp, Homo sapiens
agggagtacagcaag

SEQ ID NO: 120879 - DNA, 15 bp, Homo sapiens
gagggagtacagcaa

SEQ ID NO: 120880 - DNA, 15 bp, Homo sapiens
ggagggagtacagca

SEQ ID NO: 120881 - DNA, 15 bp, Homo sapiens
aggagggagtacagc

SEQ ID NO: 120882 - DNA, 15 bp, Homo sapiens
caggagggagtacag

SEQ ID NO: 120883 - DNA, 15 bp, Homo sapiens
acaggagggagtaca

SEQ ID NO: 120884 - DNA, 15 bp, Homo sapiens
aacaggagggagtac

SEQ ID NO: 120885 - DNA, 15 bp, Homo sapiens
taacaggagggagta

SEQ ID NO: 120886 - DNA, 15 bp, Homo sapiens
ttaacaggagggagt

SEQ ID NO: 120887 - DNA, 15 bp, Homo sapiens
tttaacaggagggag

SEQ ID NO: 120888 - DNA, 15 bp, Homo sapiens
atttaacaggaggga

SEQ ID NO: 120889 - DNA, 15 bp, Homo sapiens
gatttaacaggaggg

SEQ ID NO: 120890 - DNA, 15 bp, Homo sapiens
tgatttaacaggagg

SEQ ID NO: 120891 - DNA, 15 bp, Homo sapiens
gtgatttaacaggag

SEQ ID NO: 120892 - DNA, 15 bp, Homo sapiens
tgtgatttaacagga

SEQ ID NO: 120893 - DNA, 15 bp, Homo sapiens
ctgtgatttaacagg

SEQ ID NO: 120894 - DNA, 15 bp, Homo sapiens
tctgtgatttaacag

SEQ ID NO: 120895 - DNA, 15 bp, Homo sapiens
gtctgtgatttaaca

SEQ ID NO: 120896 - DNA, 15 bp, Homo sapiens
agtctgtgatttaac

SEQ ID NO: 120897 - DNA, 15 bp, Homo sapiens
gagtctgtgatttaa

SEQ ID NO: 120898 - DNA, 15 bp, Homo sapiens
tgagtctgtgattta

SEQ ID NO: 120899 - DNA, 15 bp, Homo sapiens
atgagtctgtgattt

SEQ ID NO: 120900 - DNA, 15 bp, Homo sapiens
gatgagtctgtgatt

SEQ ID NO: 120901 - DNA, 15 bp, Homo sapiens
ggatgagtctgtgat

SEQ ID NO: 120902 - DNA, 15 bp, Homo sapiens
tggatgagtctgtga

SEQ ID NO: 120903 - DNA, 15 bp, Homo sapiens
atggatgagtctgtg

SEQ ID NO: 120904 - DNA, 15 bp, Homo sapiens
gatggatgagtctgt

SEQ ID NO: 120905 - DNA, 15 bp, Homo sapiens
agatggatgagtctg

SEQ ID NO: 120906 - DNA, 15 bp, Homo sapiens
gagatggatgagtct

SEQ ID NO: 120907 - DNA, 15 bp, Homo sapiens
ggagatggatgagtc

SEQ ID NO: 120908 - DNA, 15 bp, Homo sapiens
tggagatggatgagt

SEQ ID NO: 120909 - DNA, 15 bp, Homo sapiens
ttggagatggatgag

SEQ ID NO: 120910 - DNA, 15 bp, Homo sapiens
gttggagatggatga

SEQ ID NO: 120911 - DNA, 15 bp, Homo sapiens
ggttggagatggatg

SEQ ID NO: 120912 - DNA, 15 bp, Homo sapiens
gggttggagatggat

SEQ ID NO: 120913 - DNA, 15 bp, Homo sapiens
ggggttggagatgga

SEQ ID NO: 120914 - DNA, 15 bp, Homo sapiens
gggggttggagatgg

SEQ ID NO: 120915 - DNA, 15 bp, Homo sapiens
tgggggttggagatg

SEQ ID NO: 120916 - DNA, 15 bp, Homo sapiens
ctgggggttggagat

SEQ ID NO: 120917 - DNA, 15 bp, Homo sapiens
tctgggggttggaga

SEQ ID NO: 120918 - DNA, 15 bp, Homo sapiens
ttctgggggttggag

SEQ ID NO: 120919 - DNA, 15 bp, Homo sapiens
attctgggggttgga

SEQ ID NO: 120920 - DNA, 15 bp, Homo sapiens
tattctgggggttgg

SEQ ID NO: 120921 - DNA, 15 bp, Homo sapiens
atattctgggggttg

SEQ ID NO: 120922 - DNA, 15 bp, Homo sapiens
tatattctgggggtt

SEQ ID NO: 120923 - DNA, 15 bp, Homo sapiens
ctatattctgggggt

SEQ ID NO: 120924 - DNA, 15 bp, Homo sapiens
tctatattctggggg

SEQ ID NO: 120925 - DNA, 15 bp, Homo sapiens
ctctatattctgggg

SEQ ID NO: 120926 - DNA, 15 bp, Homo sapiens
tctctatattctggg

SEQ ID NO: 120927 - DNA, 15 bp, Homo sapiens
ttctctatattctgg

SEQ ID NO: 120928 - DNA, 15 bp, Homo sapiens
tttctctatattctg

SEQ ID NO: 120929 - DNA, 15 bp, Homo sapiens
ctttctctatattct

SEQ ID NO: 120930 - DNA, 15 bp, Homo sapiens
tctttctctatattc

SEQ ID NO: 120931 - DNA, 15 bp, Homo sapiens
ctctttctctatatt

SEQ ID NO: 120932 - DNA, 15 bp, Homo sapiens
gctctttctctatat

SEQ ID NO: 120933 - DNA, 15 bp, Homo sapiens
tgctctttctctata

SEQ ID NO: 120934 - DNA, 15 bp, Homo sapiens
gtgctctttctctat

SEQ ID NO: 120935 - DNA, 15 bp, Homo sapiens
tgtgctctttctcta

SEQ ID NO: 120936 - DNA, 15 bp, Homo sapiens
ttgtgctctttctct

SEQ ID NO: 120937 - DNA, 15 bp, Homo sapiens
gttgtgctctttctc

SEQ ID NO: 120938 - DNA, 15 bp, Homo sapiens
tgttgtgctctttct

SEQ ID NO: 120939 - DNA, 15 bp, Homo sapiens
gtgttgtgctctttc

SEQ ID NO: 120940 - DNA, 15 bp, Homo sapiens
agtgttgtgctcttt

SEQ ID NO: 120941 - DNA, 15 bp, Homo sapiens
tagtgttgtgctctt

SEQ ID NO: 120942 - DNA, 15 bp, Homo sapiens
gtagtgttgtgctct

SEQ ID NO: 120943 - DNA, 15 bp, Homo sapiens
tgtagtgttgtgctc

SEQ ID NO: 120944 - DNA, 15 bp, Homo sapiens
atgtagtgttgtgct

SEQ ID NO: 120945 - DNA, 15 bp, Homo sapiens
gatgtagtgttgtgc

SEQ ID NO: 120946 - DNA, 15 bp, Homo sapiens
agatgtagtgttgtg

SEQ ID NO: 120947 - DNA, 15 bp, Homo sapiens
aagatgtagtgttgt

SEQ ID NO: 120948 - DNA, 15 bp, Homo sapiens
taagatgtagtgttg

SEQ ID NO: 120949 - DNA, 15 bp, Homo sapiens
ttaagatgtagtgtt

SEQ ID NO: 120950 - DNA, 15 bp, Homo sapiens
gttaagatgtagtgt

SEQ ID NO: 120951 - DNA, 15 bp, Homo sapiens
agttaagatgtagtg

SEQ ID NO: 120952 - DNA, 15 bp, Homo sapiens
gagttaagatgtagt

SEQ ID NO: 120953 - DNA, 15 bp, Homo sapiens
ggagttaagatgtag

SEQ ID NO: 120954 - DNA, 15 bp, Homo sapiens
aggagttaagatgta

SEQ ID NO: 120955 - DNA, 15 bp, Homo sapiens
caggagttaagatgt

SEQ ID NO: 120956 - DNA, 15 bp, Homo sapiens
tcaggagttaagatg

SEQ ID NO: 120957 - DNA, 15 bp, Homo sapiens
ctcaggagttaagat

SEQ ID NO: 120958 - DNA, 15 bp, Homo sapiens
tctcaggagttaaga

SEQ ID NO: 120959 - DNA, 15 bp, Homo sapiens
gtctcaggagttaag

SEQ ID NO: 120960 - DNA, 15 bp, Homo sapiens
cgtctcaggagttaa

SEQ ID NO: 120961 - DNA, 15 bp, Homo sapiens
acgtctcaggagtta

SEQ ID NO: 120962 - DNA, 15 bp, Homo sapiens
cacgtctcaggagtt

SEQ ID NO: 120963 - DNA, 15 bp, Homo sapiens
ccacgtctcaggagt

SEQ ID NO: 120964 - DNA, 15 bp, Homo sapiens
tccacgtctcaggag

SEQ ID NO: 120965 - DNA, 15 bp, Homo sapiens
ctccacgtctcagga

SEQ ID NO: 120966 - DNA, 15 bp, Homo sapiens
tctccacgtctcagg

SEQ ID NO: 120967 - DNA, 15 bp, Homo sapiens
ttctccacgtctcag

SEQ ID NO: 120968 - DNA, 15 bp, Homo sapiens
gttctccacgtctca

SEQ ID NO: 120969 - DNA, 15 bp, Homo sapiens
tgttctccacgtctc

SEQ ID NO: 120970 - DNA, 15 bp, Homo sapiens
gtgttctccacgtct

SEQ ID NO: 120971 - DNA, 15 bp, Homo sapiens
agtgttctccacgtc

SEQ ID NO: 120972 - DNA, 15 bp, Homo sapiens
aagtgttctccacgt

SEQ ID NO: 120973 - DNA, 15 bp, Homo sapiens
gaagtgttctccacg

SEQ ID NO: 120974 - DNA, 15 bp, Homo sapiens
agaagtgttctccac

SEQ ID NO: 120975 - DNA, 15 bp, Homo sapiens
gagaagtgttctcca

SEQ ID NO: 120976 - DNA, 15 bp, Homo sapiens
ggagaagtgttctcc

SEQ ID NO: 120977 - DNA, 15 bp, Homo sapiens
aggagaagtgttctc

SEQ ID NO: 120978 - DNA, 15 bp, Homo sapiens
gaggagaagtgttct

SEQ ID NO: 120979 - DNA, 15 bp, Homo sapiens
ggaggagaagtgttc

SEQ ID NO: 120980 - DNA, 15 bp, Homo sapiens
aggaggagaagtgtt

SEQ ID NO: 120981 - DNA, 15 bp, Homo sapiens
caggaggagaagtgt

SEQ ID NO: 120982 - DNA, 15 bp, Homo sapiens
tcaggaggagaagtg

SEQ ID NO: 120983 - DNA, 15 bp, Homo sapiens
ctcaggaggagaagt

SEQ ID NO: 120984 - DNA, 15 bp, Homo sapiens
tctcaggaggagaag

SEQ ID NO: 120985 - DNA, 15 bp, Homo sapiens
ctctcaggaggagaa

SEQ ID NO: 120986 - DNA, 15 bp, Homo sapiens
gctctcaggaggaga

SEQ ID NO: 120987 - DNA, 15 bp, Homo sapiens
agctctcaggaggag

SEQ ID NO: 120988 - DNA, 15 bp, Homo sapiens
aagctctcaggagga

SEQ ID NO: 120989 - DNA, 15 bp, Homo sapiens
taagctctcaggagg

SEQ ID NO: 120990 - DNA, 15 bp, Homo sapiens
ttaagctctcaggag

SEQ ID NO: 120991 - DNA, 15 bp, Homo sapiens
cttaagctctcagga

SEQ ID NO: 120992 - DNA, 15 bp, Homo sapiens
acttaagctctcagg

SEQ ID NO: 120993 - DNA, 15 bp, Homo sapiens
tacttaagctctcag

SEQ ID NO: 120994 - DNA, 15 bp, Homo sapiens
gtacttaagctctca

SEQ ID NO: 120995 - DNA, 15 bp, Homo sapiens
ggtacttaagctctc

SEQ ID NO: 120996 - DNA, 15 bp, Homo sapiens
tggtacttaagctct

SEQ ID NO: 120997 - DNA, 15 bp, Homo sapiens
ttggtacttaagctc

SEQ ID NO: 120998 - DNA, 15 bp, Homo sapiens
tttggtacttaagct

SEQ ID NO: 120999 - DNA, 15 bp, Homo sapiens
atttggtacttaagc

SEQ ID NO: 121000 - DNA, 15 bp, Homo sapiens
catttggtacttaag

SEQ ID NO: 121001 - DNA, 15 bp, Homo sapiens
ccatttggtacttaa

SEQ ID NO: 121002 - DNA, 15 bp, Homo sapiens
tccatttggtactta

SEQ ID NO: 121003 - DNA, 15 bp, Homo sapiens
ttccatttggtactt

SEQ ID NO: 121004 - DNA, 15 bp, Homo sapiens
cttccatttggtact

SEQ ID NO: 121005 - DNA, 15 bp, Homo sapiens
gcttccatttggtac

SEQ ID NO: 121006 - DNA, 15 bp, Homo sapiens
agcttccatttggta

SEQ ID NO: 121007 - DNA, 15 bp, Homo sapiens
tagcttccatttggt

SEQ ID NO: 121008 - DNA, 15 bp, Homo sapiens
gtagcttccatttgg

SEQ ID NO: 121009 - DNA, 15 bp, Homo sapiens
agtagcttccatttg

SEQ ID NO: 121010 - DNA, 15 bp, Homo sapiens
aagtagcttccattt

SEQ ID NO: 121011 - DNA, 15 bp, Homo sapiens
aaagtagcttccatt

SEQ ID NO: 121012 - DNA, 15 bp, Homo sapiens
aaaagtagcttccat

SEQ ID NO: 121013 - DNA, 15 bp, Homo sapiens
gaaaagtagcttcca

SEQ ID NO: 121014 - DNA, 15 bp, Homo sapiens
ggaaaagtagcttcc

SEQ ID NO: 121015 - DNA, 15 bp, Homo sapiens
gggaaaagtagcttc

SEQ ID NO: 121016 - DNA, 15 bp, Homo sapiens
ggggaaaagtagctt

SEQ ID NO: 121017 - DNA, 15 bp, Homo sapiens
gggggaaaagtagct

SEQ ID NO: 121018 - DNA, 15 bp, Homo sapiens
agggggaaaagtagc

SEQ ID NO: 121019 - DNA, 15 bp, Homo sapiens
aagggggaaaagtag

SEQ ID NO: 121020 - DNA, 15 bp, Homo sapiens
caagggggaaaagta

SEQ ID NO: 121021 - DNA, 15 bp, Homo sapiens
ccaagggggaaaagt

SEQ ID NO: 121022 - DNA, 15 bp, Homo sapiens
accaagggggaaaag

SEQ ID NO: 121023 - DNA, 15 bp, Homo sapiens
gaccaagggggaaaa

SEQ ID NO: 121024 - DNA, 15 bp, Homo sapiens
agaccaagggggaaa

SEQ ID NO: 121025 - DNA, 15 bp, Homo sapiens
gagaccaagggggaa

SEQ ID NO: 121026 - DNA, 15 bp, Homo sapiens
tgagaccaaggggga

SEQ ID NO: 121027 - DNA, 15 bp, Homo sapiens
ttgagaccaaggggg

SEQ ID NO: 121028 - DNA, 15 bp, Homo sapiens
tttgagaccaagggg

SEQ ID NO: 121029 - DNA, 15 bp, Homo sapiens
atttgagaccaaggg

SEQ ID NO: 121030 - DNA, 15 bp, Homo sapiens
catttgagaccaagg

SEQ ID NO: 121031 - DNA, 15 bp, Homo sapiens
acatttgagaccaag

SEQ ID NO: 121032 - DNA, 15 bp, Homo sapiens
tacatttgagaccaa

SEQ ID NO: 121033 - DNA, 15 bp, Homo sapiens
atacatttgagacca

SEQ ID NO: 121034 - DNA, 15 bp, Homo sapiens
aatacatttgagacc

SEQ ID NO: 121035 - DNA, 15 bp, Homo sapiens
taatacatttgagac

SEQ ID NO: 121036 - DNA, 15 bp, Homo sapiens
gtaatacatttgaga

SEQ ID NO: 121037 - DNA, 15 bp, Homo sapiens
agtaatacatttgag

SEQ ID NO: 121038 - DNA, 15 bp, Homo sapiens
tagtaatacatttga

SEQ ID NO: 121039 - DNA, 15 bp, Homo sapiens
ctagtaatacatttg

SEQ ID NO: 121040 - DNA, 15 bp, Homo sapiens
tctagtaatacattt

SEQ ID NO: 121041 - DNA, 15 bp, Homo sapiens
atctagtaatacatt

SEQ ID NO: 121042 - DNA, 15 bp, Homo sapiens
aatctagtaatacat

SEQ ID NO: 121043 - DNA, 15 bp, Homo sapiens
gaatctagtaataca

SEQ ID NO: 121044 - DNA, 15 bp, Homo sapiens
agaatctagtaatac

SEQ ID NO: 121045 - DNA, 15 bp, Homo sapiens
cagaatctagtaata

SEQ ID NO: 121046 - DNA, 15 bp, Homo sapiens
tcagaatctagtaat

SEQ ID NO: 121047 - DNA, 15 bp, Homo sapiens
ttcagaatctagtaa

SEQ ID NO: 121048 - DNA, 15 bp, Homo sapiens
gttcagaatctagta

SEQ ID NO: 121049 - DNA, 15 bp, Homo sapiens
agttcagaatctagt

SEQ ID NO: 121050 - DNA, 15 bp, Homo sapiens
cagttcagaatctag

SEQ ID NO: 121051 - DNA, 15 bp, Homo sapiens
ccagttcagaatcta

SEQ ID NO: 121052 - DNA, 15 bp, Homo sapiens
tccagttcagaatct

SEQ ID NO: 121053 - DNA, 15 bp, Homo sapiens
gtccagttcagaatc

SEQ ID NO: 121054 - DNA, 15 bp, Homo sapiens
agtccagttcagaat

SEQ ID NO: 121055 - DNA, 15 bp, Homo sapiens
gagtccagttcagaa

SEQ ID NO: 121056 - DNA, 15 bp, Homo sapiens
ggagtccagttcaga

SEQ ID NO: 121057 - DNA, 15 bp, Homo sapiens
tggagtccagttcag

SEQ ID NO: 121058 - DNA, 15 bp, Homo sapiens
gtggagtccagttca

SEQ ID NO: 121059 - DNA, 15 bp, Homo sapiens
ggtggagtccagttc

SEQ ID NO: 121060 - DNA, 15 bp, Homo sapiens
tggtggagtccagtt

SEQ ID NO: 121061 - DNA, 15 bp, Homo sapiens
atggtggagtccagt

SEQ ID NO: 121062 - DNA, 15 bp, Homo sapiens
gatggtggagtccag

SEQ ID NO: 121063 - DNA, 15 bp, Homo sapiens
tgatggtggagtcca

SEQ ID NO: 121064 - DNA, 15 bp, Homo sapiens
gtgatggtggagtcc

SEQ ID NO: 121065 - DNA, 15 bp, Homo sapiens
cgtgatggtggagtc

SEQ ID NO: 121066 - DNA, 15 bp, Homo sapiens
acgtgatggtggagt

SEQ ID NO: 121067 - DNA, 15 bp, Homo sapiens
tacgtgatggtggag

SEQ ID NO: 121068 - DNA, 15 bp, Homo sapiens
ttacgtgatggtgga

SEQ ID NO: 121069 - DNA, 15 bp, Homo sapiens
cttacgtgatggtgg

SEQ ID NO: 121070 - DNA, 15 bp, Homo sapiens
tcttacgtgatggtg

SEQ ID NO: 121071 - DNA, 15 bp, Homo sapiens
ttcttacgtgatggt

SEQ ID NO: 121072 - DNA, 15 bp, Homo sapiens
tttcttacgtgatgg

SEQ ID NO: 121073 - DNA, 15 bp, Homo sapiens
ctttcttacgtgatg

SEQ ID NO: 121074 - DNA, 15 bp, Homo sapiens
gctttcttacgtgat

SEQ ID NO: 121075 - DNA, 15 bp, Homo sapiens
tgctttcttacgtga

SEQ ID NO: 121076 - DNA, 15 bp, Homo sapiens
ctgctttcttacgtg

SEQ ID NO: 121077 - DNA, 15 bp, Homo sapiens
actgctttcttacgt

SEQ ID NO: 121078 - DNA, 15 bp, Homo sapiens
gactgctttcttacg

SEQ ID NO: 121079 - DNA, 15 bp, Homo sapiens
tgactgctttcttac

SEQ ID NO: 121080 - DNA, 15 bp, Homo sapiens
atgactgctttctta

SEQ ID NO: 121081 - DNA, 15 bp, Homo sapiens
catgactgctttctt

SEQ ID NO: 121082 - DNA, 15 bp, Homo sapiens
ccatgactgctttct

SEQ ID NO: 121083 - DNA, 15 bp, Homo sapiens
cccatgactgctttc

SEQ ID NO: 121084 - DNA, 15 bp, Homo sapiens
gcccatgactgcttt

SEQ ID NO: 121085 - DNA, 15 bp, Homo sapiens
tgcccatgactgctt

SEQ ID NO: 121086 - DNA, 15 bp, Homo sapiens
ctgcccatgactgct

SEQ ID NO: 121087 - DNA, 15 bp, Homo sapiens
actgcccatgactgc

SEQ ID NO: 121088 - DNA, 15 bp, Homo sapiens
tactgcccatgactg

SEQ ID NO: 121089 - DNA, 15 bp, Homo sapiens
ttactgcccatgact

SEQ ID NO: 121090 - DNA, 15 bp, Homo sapiens
attactgcccatgac

SEQ ID NO: 121091 - DNA, 15 bp, Homo sapiens
aattactgcccatga

SEQ ID NO: 121092 - DNA, 15 bp, Homo sapiens
gaattactgcccatg

SEQ ID NO: 121093 - DNA, 15 bp, Homo sapiens
agaattactgcccat

SEQ ID NO: 121094 - DNA, 15 bp, Homo sapiens
cagaattactgccca

SEQ ID NO: 121095 - DNA, 15 bp, Homo sapiens
ccagaattactgccc

SEQ ID NO: 121096 - DNA, 15 bp, Homo sapiens
cccagaattactgcc

SEQ ID NO: 121097 - DNA, 15 bp, Homo sapiens
tcccagaattactgc

SEQ ID NO: 121098 - DNA, 15 bp, Homo sapiens
ctcccagaattactg

SEQ ID NO: 121099 - DNA, 15 bp, Homo sapiens
tctcccagaattact

SEQ ID NO: 121100 - DNA, 15 bp, Homo sapiens
atctcccagaattac

SEQ ID NO: 121101 - DNA, 15 bp, Homo sapiens
gatctcccagaatta

SEQ ID NO: 121102 - DNA, 15 bp, Homo sapiens
ggatctcccagaatt

SEQ ID NO: 121103 - DNA, 15 bp, Homo sapiens
tggatctcccagaat

SEQ ID NO: 121104 - DNA, 15 bp, Homo sapiens
ctggatctcccagaa

SEQ ID NO: 121105 - DNA, 15 bp, Homo sapiens
tctggatctcccaga

SEQ ID NO: 121106 - DNA, 15 bp, Homo sapiens
atctggatctcccag

SEQ ID NO: 121107 - DNA, 15 bp, Homo sapiens
tatctggatctccca

SEQ ID NO: 121108 - DNA, 15 bp, Homo sapiens
ctatctggatctccc

SEQ ID NO: 121109 - DNA, 15 bp, Homo sapiens
cctatctggatctcc

SEQ ID NO: 121110 - DNA, 15 bp, Homo sapiens
tcctatctggatctc

SEQ ID NO: 121111 - DNA, 15 bp, Homo sapiens
gtcctatctggatct

SEQ ID NO: 121112 - DNA, 15 bp, Homo sapiens
tgtcctatctggatc

SEQ ID NO: 121113 - DNA, 15 bp, Homo sapiens
atgtcctatctggat

SEQ ID NO: 121114 - DNA, 15 bp, Homo sapiens
catgtcctatctgga

SEQ ID NO: 121115 - DNA, 15 bp, Homo sapiens
gcatgtcctatctgg

SEQ ID NO: 121116 - DNA, 15 bp, Homo sapiens
ggcatgtcctatctg

SEQ ID NO: 121117 - DNA, 15 bp, Homo sapiens
tggcatgtcctatct

SEQ ID NO: 121118 - DNA, 15 bp, Homo sapiens
ctggcatgtcctatc

SEQ ID NO: 121119 - DNA, 15 bp, Homo sapiens
gctggcatgtcctat

SEQ ID NO: 121120 - DNA, 15 bp, Homo sapiens
ggctggcatgtccta

SEQ ID NO: 121121 - DNA, 15 bp, Homo sapiens
gggctggcatgtcct

SEQ ID NO: 121122 - DNA, 15 bp, Homo sapiens
ggggctggcatgtcc

SEQ ID NO: 121123 - DNA, 15 bp, Homo sapiens
tggggctggcatgtc

SEQ ID NO: 121124 - DNA, 15 bp, Homo sapiens
gtggggctggcatgt

SEQ ID NO: 121125 - DNA, 15 bp, Homo sapiens
tgtggggctggcatg

SEQ ID NO: 121126 - DNA, 15 bp, Homo sapiens
gtgtggggctggcat

SEQ ID NO: 121127 - DNA, 15 bp, Homo sapiens
agtgtggggctggca

SEQ ID NO: 121128 - DNA, 15 bp, Homo sapiens
cagtgtggggctggc

SEQ ID NO: 121129 - DNA, 15 bp, Homo sapiens
ccagtgtggggctgg

SEQ ID NO: 121130 - DNA, 15 bp, Homo sapiens
accagtgtggggctg

SEQ ID NO: 121131 - DNA, 15 bp, Homo sapiens
caccagtgtggggct

SEQ ID NO: 121132 - DNA, 15 bp, Homo sapiens
ccaccagtgtggggc

SEQ ID NO: 121133 - DNA, 15 bp, Homo sapiens
gccaccagtgtgggg

SEQ ID NO: 121134 - DNA, 15 bp, Homo sapiens
tgccaccagtgtggg

SEQ ID NO: 121135 - DNA, 15 bp, Homo sapiens
atgccaccagtgtgg

SEQ ID NO: 121136 - DNA, 15 bp, Homo sapiens
tatgccaccagtgtg

SEQ ID NO: 121137 - DNA, 15 bp, Homo sapiens
ctatgccaccagtgt

SEQ ID NO: 121138 - DNA, 15 bp, Homo sapiens
cctatgccaccagtg

SEQ ID NO: 121139 - DNA, 15 bp, Homo sapiens
tcctatgccaccagt

SEQ ID NO: 121140 - DNA, 15 bp, Homo sapiens
ttcctatgccaccag

SEQ ID NO: 121141 - DNA, 15 bp, Homo sapiens
cttcctatgccacca

SEQ ID NO: 121142 - DNA, 15 bp, Homo sapiens
gcttcctatgccacc

SEQ ID NO: 121143 - DNA, 15 bp, Homo sapiens
ggcttcctatgccac

SEQ ID NO: 121144 - DNA, 15 bp, Homo sapiens
tggcttcctatgcca

SEQ ID NO: 121145 - DNA, 15 bp, Homo sapiens
ttggcttcctatgcc

SEQ ID NO: 121146 - DNA, 15 bp, Homo sapiens
cttggcttcctatgc

SEQ ID NO: 121147 - DNA, 15 bp, Homo sapiens
acttggcttcctatg

SEQ ID NO: 121148 - DNA, 15 bp, Homo sapiens
aacttggcttcctat

SEQ ID NO: 121149 - DNA, 15 bp, Homo sapiens
caacttggcttccta

SEQ ID NO: 121150 - DNA, 15 bp, Homo sapiens
gcaacttggcttcct

SEQ ID NO: 121151 - DNA, 15 bp, Homo sapiens
agcaacttggcttcc

SEQ ID NO: 121152 - DNA, 15 bp, Homo sapiens
cagcaacttggcttc

SEQ ID NO: 121153 - DNA, 15 bp, Homo sapiens
gcagcaacttggctt

SEQ ID NO: 121154 - DNA, 15 bp, Homo sapiens
agcagcaacttggct

SEQ ID NO: 121155 - DNA, 15 bp, Homo sapiens
aagcagcaacttggc

SEQ ID NO: 121156 - DNA, 15 bp, Homo sapiens
gaagcagcaacttgg

SEQ ID NO: 121157 - DNA, 15 bp, Homo sapiens
ggaagcagcaacttg

SEQ ID NO: 121158 - DNA, 15 bp, Homo sapiens
aggaagcagcaactt

SEQ ID NO: 121159 - DNA, 15 bp, Homo sapiens
gaggaagcagcaact

SEQ ID NO: 121160 - DNA, 15 bp, Homo sapiens
ggaggaagcagcaac

SEQ ID NO: 121161 - DNA, 15 bp, Homo sapiens
gggaggaagcagcaa

SEQ ID NO: 121162 - DNA, 15 bp, Homo sapiens
agggaggaagcagca

SEQ ID NO: 121163 - DNA, 15 bp, Homo sapiens
cagggaggaagcagc

SEQ ID NO: 121164 - DNA, 15 bp, Homo sapiens
acagggaggaagcag

SEQ ID NO: 121165 - DNA, 15 bp, Homo sapiens
cacagggaggaagca

SEQ ID NO: 121166 - DNA, 15 bp, Homo sapiens
gcacagggaggaagc

SEQ ID NO: 121167 - DNA, 15 bp, Homo sapiens
tgcacagggaggaag

SEQ ID NO: 121168 - DNA, 15 bp, Homo sapiens
gtgcacagggaggaa

SEQ ID NO: 121169 - DNA, 15 bp, Homo sapiens
agtgcacagggagga

SEQ ID NO: 121170 - DNA, 15 bp, Homo sapiens
gagtgcacagggagg

SEQ ID NO: 121171 - DNA, 15 bp, Homo sapiens
ggagtgcacagggag

SEQ ID NO: 121172 - DNA, 15 bp, Homo sapiens
gggagtgcacaggga

SEQ ID NO: 121173 - DNA, 15 bp, Homo sapiens
tgggagtgcacaggg

SEQ ID NO: 121174 - DNA, 15 bp, Homo sapiens
atgggagtgcacagg

SEQ ID NO: 121175 - DNA, 15 bp, Homo sapiens
aatgggagtgcacag

SEQ ID NO: 121176 - DNA, 15 bp, Homo sapiens
aaatgggagtgcaca

SEQ ID NO: 121177 - DNA, 15 bp, Homo sapiens
caaatgggagtgcac

SEQ ID NO: 121178 - DNA, 15 bp, Homo sapiens
acaaatgggagtgca

SEQ ID NO: 121179 - DNA, 15 bp, Homo sapiens
gacaaatgggagtgc

SEQ ID NO: 121180 - DNA, 15 bp, Homo sapiens
agacaaatgggagtg

SEQ ID NO: 121181 - DNA, 15 bp, Homo sapiens
cagacaaatgggagt

SEQ ID NO: 121182 - DNA, 15 bp, Homo sapiens
ccagacaaatgggag

SEQ ID NO: 121183 - DNA, 15 bp, Homo sapiens
gccagacaaatggga

SEQ ID NO: 121184 - DNA, 15 bp, Homo sapiens
ggccagacaaatggg

SEQ ID NO: 121185 - DNA, 15 bp, Homo sapiens
aggccagacaaatgg

SEQ ID NO: 121186 - DNA, 15 bp, Homo sapiens
gaggccagacaaatg

SEQ ID NO: 121187 - DNA, 15 bp, Homo sapiens
agaggccagacaaat

SEQ ID NO: 121188 - DNA, 15 bp, Homo sapiens
gagaggccagacaaa

SEQ ID NO: 121189 - DNA, 15 bp, Homo sapiens
agagaggccagacaa

SEQ ID NO: 121190 - DNA, 15 bp, Homo sapiens
aagagaggccagaca

SEQ ID NO: 121191 - DNA, 15 bp, Homo sapiens
caagagaggccagac

SEQ ID NO: 121192 - DNA, 15 bp, Homo sapiens
tcaagagaggccaga

SEQ ID NO: 121193 - DNA, 15 bp, Homo sapiens
atcaagagaggccag

SEQ ID NO: 121194 - DNA, 15 bp, Homo sapiens
gatcaagagaggcca

SEQ ID NO: 121195 - DNA, 15 bp, Homo sapiens
agatcaagagaggcc

SEQ ID NO: 121196 - DNA, 15 bp, Homo sapiens
gagatcaagagaggc

SEQ ID NO: 121197 - DNA, 15 bp, Homo sapiens
tgagatcaagagagg

SEQ ID NO: 121198 - DNA, 15 bp, Homo sapiens
ctgagatcaagagag

SEQ ID NO: 121199 - DNA, 15 bp, Homo sapiens
gctgagatcaagaga

SEQ ID NO: 121200 - DNA, 15 bp, Homo sapiens
agctgagatcaagag

SEQ ID NO: 121201 - DNA, 15 bp, Homo sapiens
cagctgagatcaaga

SEQ ID NO: 121202 - DNA, 15 bp, Homo sapiens
ccagctgagatcaag

SEQ ID NO: 121203 - DNA, 15 bp, Homo sapiens
gccagctgagatcaa

SEQ ID NO: 121204 - DNA, 15 bp, Homo sapiens
cgccagctgagatca

SEQ ID NO: 121205 - DNA, 15 bp, Homo sapiens
gcgccagctgagatc

SEQ ID NO: 121206 - DNA, 15 bp, Homo sapiens
agcgccagctgagat

SEQ ID NO: 121207 - DNA, 15 bp, Homo sapiens
gagcgccagctgaga

SEQ ID NO: 121208 - DNA, 15 bp, Homo sapiens
tgagcgccagctgag

SEQ ID NO: 121209 - DNA, 15 bp, Homo sapiens
gtgagcgccagctga

SEQ ID NO: 121210 - DNA, 15 bp, Homo sapiens
agtgagcgccagctg

SEQ ID NO: 121211 - DNA, 15 bp, Homo sapiens
aagtgagcgccagct

SEQ ID NO: 121212 - DNA, 15 bp, Homo sapiens
gaagtgagcgccagc

SEQ ID NO: 121213 - DNA, 15 bp, Homo sapiens
tgaagtgagcgccag

SEQ ID NO: 121214 - DNA, 15 bp, Homo sapiens
gtgaagtgagcgcca

SEQ ID NO: 121215 - DNA, 15 bp, Homo sapiens
tgtgaagtgagcgcc

SEQ ID NO: 121216 - DNA, 15 bp, Homo sapiens
atgtgaagtgagcgc

SEQ ID NO: 121217 - DNA, 15 bp, Homo sapiens
gatgtgaagtgagcg

SEQ ID NO: 121218 - DNA, 15 bp, Homo sapiens
tgatgtgaagtgagc

SEQ ID NO: 121219 - DNA, 15 bp, Homo sapiens
ctgatgtgaagtgag

SEQ ID NO: 121220 - DNA, 15 bp, Homo sapiens
gctgatgtgaagtga

SEQ ID NO: 121221 - DNA, 15 bp, Homo sapiens
agctgatgtgaagtg

SEQ ID NO: 121222 - DNA, 15 bp, Homo sapiens
tagctgatgtgaagt

SEQ ID NO: 121223 - DNA, 15 bp, Homo sapiens
atagctgatgtgaag

SEQ ID NO: 121224 - DNA, 15 bp, Homo sapiens
catagctgatgtgaa

SEQ ID NO: 121225 - DNA, 15 bp, Homo sapiens
tcatagctgatgtga

SEQ ID NO: 121226 - DNA, 15 bp, Homo sapiens
atcatagctgatgtg

SEQ ID NO: 121227 - DNA, 15 bp, Homo sapiens
catcatagctgatgt

SEQ ID NO: 121228 - DNA, 15 bp, Homo sapiens
gcatcatagctgatg

SEQ ID NO: 121229 - DNA, 15 bp, Homo sapiens
tgcatcatagctgat

SEQ ID NO: 121230 - DNA, 15 bp, Homo sapiens
ttgcatcatagctga

SEQ ID NO: 121231 - DNA, 15 bp, Homo sapiens
attgcatcatagctg

SEQ ID NO: 121232 - DNA, 15 bp, Homo sapiens
gattgcatcatagct

SEQ ID NO: 121233 - DNA, 15 bp, Homo sapiens
ggattgcatcatagc

SEQ ID NO: 121234 - DNA, 15 bp, Homo sapiens
tggattgcatcatag

SEQ ID NO: 121235 - DNA, 15 bp, Homo sapiens
ctggattgcatcata

SEQ ID NO: 121236 - DNA, 15 bp, Homo sapiens
gctggattgcatcat

SEQ ID NO: 121237 - DNA, 15 bp, Homo sapiens
tgctggattgcatca

SEQ ID NO: 121238 - DNA, 15 bp, Homo sapiens
ttgctggattgcatc

SEQ ID NO: 121239 - DNA, 15 bp, Homo sapiens
gttgctggattgcat

SEQ ID NO: 121240 - DNA, 15 bp, Homo sapiens
agttgctggattgca

SEQ ID NO: 121241 - DNA, 15 bp, Homo sapiens
tagttgctggattgc

SEQ ID NO: 121242 - DNA, 15 bp, Homo sapiens
ttagttgctggattg

SEQ ID NO: 121243 - DNA, 15 bp, Homo sapiens
tttagttgctggatt

SEQ ID NO: 121244 - DNA, 15 bp, Homo sapiens
ctttagttgctggat

SEQ ID NO: 121245 - DNA, 15 bp, Homo sapiens
actttagttgctgga

SEQ ID NO: 121246 - DNA, 15 bp, Homo sapiens
tactttagttgctgg

SEQ ID NO: 121247 - DNA, 15 bp, Homo sapiens
atactttagttgctg

SEQ ID NO: 121248 - DNA, 15 bp, Homo sapiens
aatactttagttgct

SEQ ID NO: 121249 - DNA, 15 bp, Homo sapiens
taatactttagttgc

SEQ ID NO: 121250 - DNA, 15 bp, Homo sapiens
ctaatactttagttg

SEQ ID NO: 121251 - DNA, 15 bp, Homo sapiens
actaatactttagtt

SEQ ID NO: 121252 - DNA, 15 bp, Homo sapiens
aactaatactttagt

SEQ ID NO: 121253 - DNA, 15 bp, Homo sapiens
taactaatactttag

SEQ ID NO: 121254 - DNA, 15 bp, Homo sapiens
ttaactaatacttta

SEQ ID NO: 121255 - DNA, 15 bp, Homo sapiens
attaactaatacttt

SEQ ID NO: 121256 - DNA, 15 bp, Homo sapiens
tattaactaatactt

SEQ ID NO: 121257 - DNA, 15 bp, Homo sapiens
ttattaactaatact

SEQ ID NO: 121258 - DNA, 15 bp, Homo sapiens
tttattaactaatac

SEQ ID NO: 121259 - DNA, 15 bp, Homo sapiens
atttattaactaata

SEQ ID NO: 121260 - DNA, 15 bp, Homo sapiens
catttattaactaat

SEQ ID NO: 121261 - DNA, 15 bp, Homo sapiens
gcatttattaactaa

SEQ ID NO: 121262 - DNA, 15 bp, Homo sapiens
agcatttattaacta

SEQ ID NO: 121263 - DNA, 15 bp, Homo sapiens
cagcatttattaact

SEQ ID NO: 121264 - DNA, 15 bp, Homo sapiens
tcagcatttattaac

SEQ ID NO: 121265 - DNA, 15 bp, Homo sapiens
gtcagcatttattaa

SEQ ID NO: 121266 - DNA, 15 bp, Homo sapiens
tgtcagcatttatta

SEQ ID NO: 121267 - DNA, 15 bp, Homo sapiens
ctgtcagcatttatt

SEQ ID NO: 121268 - DNA, 15 bp, Homo sapiens
gctgtcagcatttat

SEQ ID NO: 121269 - DNA, 15 bp, Homo sapiens
tgctgtcagcattta

SEQ ID NO: 121270 - DNA, 15 bp, Homo sapiens
gtgctgtcagcattt

SEQ ID NO: 121271 - DNA, 15 bp, Homo sapiens
tgtgctgtcagcatt

SEQ ID NO: 121272 - DNA, 15 bp, Homo sapiens
ctgtgctgtcagcat

SEQ ID NO: 121273 - DNA, 15 bp, Homo sapiens
gctgtgctgtcagca

SEQ ID NO: 121274 - DNA, 15 bp, Homo sapiens
ggctgtgctgtcagc

SEQ ID NO: 121275 - DNA, 15 bp, Homo sapiens
aggctgtgctgtcag

SEQ ID NO: 121276 - DNA, 15 bp, Homo sapiens
aaggctgtgctgtca

SEQ ID NO: 121277 - DNA, 15 bp, Homo sapiens
aaaggctgtgctgtc

SEQ ID NO: 121278 - DNA, 15 bp, Homo sapiens
aaaaggctgtgctgt

SEQ ID NO: 121279 - DNA, 15 bp, Homo sapiens
gaaaaggctgtgctg

SEQ ID NO: 121280 - DNA, 15 bp, Homo sapiens
agaaaaggctgtgct

SEQ ID NO: 121281 - DNA, 15 bp, Homo sapiens
cagaaaaggctgtgc

SEQ ID NO: 121282 - DNA, 15 bp, Homo sapiens
ccagaaaaggctgtg

SEQ ID NO: 121283 - DNA, 15 bp, Homo sapiens
accagaaaaggctgt

SEQ ID NO: 121284 - DNA, 15 bp, Homo sapiens
gaccagaaaaggctg

SEQ ID NO: 121285 - DNA, 15 bp, Homo sapiens
tgaccagaaaaggct

SEQ ID NO: 121286 - DNA, 15 bp, Homo sapiens
gtgaccagaaaaggc

SEQ ID NO: 121287 - DNA, 15 bp, Homo sapiens
cgtgaccagaaaagg

SEQ ID NO: 121288 - DNA, 15 bp, Homo sapiens
acgtgaccagaaaag

SEQ ID NO: 121289 - DNA, 15 bp, Homo sapiens
tacgtgaccagaaaa

SEQ ID NO: 121290 - DNA, 15 bp, Homo sapiens
atacgtgaccagaaa

SEQ ID NO: 121291 - DNA, 15 bp, Homo sapiens
aatacgtgaccagaa

SEQ ID NO: 121292 - DNA, 15 bp, Homo sapiens
gaatacgtgaccaga

SEQ ID NO: 121293 - DNA, 15 bp, Homo sapiens
tgaatacgtgaccag

SEQ ID NO: 121294 - DNA, 15 bp, Homo sapiens
atgaatacgtgacca

SEQ ID NO: 121295 - DNA, 15 bp, Homo sapiens
tatgaatacgtgacc

SEQ ID NO: 121296 - DNA, 15 bp, Homo sapiens
gtatgaatacgtgac

SEQ ID NO: 121297 - DNA, 15 bp, Homo sapiens
agtatgaatacgtga

SEQ ID NO: 121298 - DNA, 15 bp, Homo sapiens
tagtatgaatacgtg

SEQ ID NO: 121299 - DNA, 15 bp, Homo sapiens
ttagtatgaatacgt

SEQ ID NO: 121300 - DNA, 15 bp, Homo sapiens
tttagtatgaatacg

SEQ ID NO: 121301 - DNA, 15 bp, Homo sapiens
ttttagtatgaatac

SEQ ID NO: 121302 - DNA, 15 bp, Homo sapiens
attttagtatgaata

SEQ ID NO: 121303 - DNA, 15 bp, Homo sapiens
tattttagtatgaat

SEQ ID NO: 121304 - DNA, 15 bp, Homo sapiens
gtattttagtatgaa

SEQ ID NO: 121305 - DNA, 15 bp, Homo sapiens
cgtattttagtatga

SEQ ID NO: 121306 - DNA, 15 bp, Homo sapiens
ccgtattttagtatg

SEQ ID NO: 121307 - DNA, 15 bp, Homo sapiens
cccgtattttagtat

SEQ ID NO: 121308 - DNA, 15 bp, Homo sapiens
ccccgtattttagta

SEQ ID NO: 121309 - DNA, 15 bp, Homo sapiens
cccccgtattttagt

SEQ ID NO: 121310 - DNA, 15 bp, Homo sapiens
tcccccgtattttag

SEQ ID NO: 121311 - DNA, 15 bp, Homo sapiens
ctcccccgtatttta

SEQ ID NO: 121312 - DNA, 15 bp, Homo sapiens
tctcccccgtatttt

SEQ ID NO: 121313 - DNA, 15 bp, Homo sapiens
ctctcccccgtattt

SEQ ID NO: 121314 - DNA, 15 bp, Homo sapiens
actctcccccgtatt

SEQ ID NO: 121315 - DNA, 15 bp, Homo sapiens
aactctcccccgtat

SEQ ID NO: 121316 - DNA, 15 bp, Homo sapiens
caactctcccccgta

SEQ ID NO: 121317 - DNA, 15 bp, Homo sapiens
ccaactctcccccgt

SEQ ID NO: 121318 - DNA, 15 bp, Homo sapiens
cccaactctcccccg

SEQ ID NO: 121319 - DNA, 15 bp, Homo sapiens
ccccaactctccccc

SEQ ID NO: 121320 - DNA, 15 bp, Homo sapiens
cccccaactctcccc

SEQ ID NO: 121321 - DNA, 15 bp, Homo sapiens
ccccccaactctccc

SEQ ID NO: 121322 - DNA, 15 bp, Homo sapiens
tccccccaactctcc

SEQ ID NO: 121323 - DNA, 15 bp, Homo sapiens
ctccccccaactctc

SEQ ID NO: 121324 - DNA, 15 bp, Homo sapiens
tctccccccaactct

SEQ ID NO: 121325 - DNA, 15 bp, Homo sapiens
ctctccccccaactc

SEQ ID NO: 121326 - DNA, 15 bp, Homo sapiens
cctctccccccaact

SEQ ID NO: 121327 - DNA, 15 bp, Homo sapiens
ccctctccccccaac

SEQ ID NO: 121328 - DNA, 15 bp, Homo sapiens
cccctctccccccaa

SEQ ID NO: 121329 - DNA, 15 bp, Homo sapiens
ccccctctcccccca

SEQ ID NO: 121330 - DNA, 15 bp, Homo sapiens
tccccctctcccccc

SEQ ID NO: 121331 - DNA, 15 bp, Homo sapiens
atccccctctccccc

SEQ ID NO: 121332 - DNA, 15 bp, Homo sapiens
tatccccctctcccc

SEQ ID NO: 121333 - DNA, 15 bp, Homo sapiens
atatccccctctccc

SEQ ID NO: 121334 - DNA, 15 bp, Homo sapiens
tatatccccctctcc

SEQ ID NO: 121335 - DNA, 15 bp, Homo sapiens
atatatccccctctc

SEQ ID NO: 121336 - DNA, 15 bp, Homo sapiens
catatatccccctct

SEQ ID NO: 121337 - DNA, 15 bp, Homo sapiens
ccatatatccccctc

SEQ ID NO: 121338 - DNA, 15 bp, Homo sapiens
cccatatatccccct

SEQ ID NO: 121339 - DNA, 15 bp, Homo sapiens
tcccatatatccccc

SEQ ID NO: 121340 - DNA, 15 bp, Homo sapiens
ttcccatatatcccc

SEQ ID NO: 121341 - DNA, 15 bp, Homo sapiens
tttcccatatatccc

SEQ ID NO: 121342 - DNA, 15 bp, Homo sapiens
atttcccatatatcc

SEQ ID NO: 121343 - DNA, 15 bp, Homo sapiens
gatttcccatatatc

SEQ ID NO: 121344 - DNA, 15 bp, Homo sapiens
agatttcccatatat

SEQ ID NO: 121345 - DNA, 15 bp, Homo sapiens
gagatttcccatata

SEQ ID NO: 121346 - DNA, 15 bp, Homo sapiens
agagatttcccatat

SEQ ID NO: 121347 - DNA, 15 bp, Homo sapiens
cagagatttcccata

SEQ ID NO: 121348 - DNA, 15 bp, Homo sapiens
acagagatttcccat

SEQ ID NO: 121349 - DNA, 15 bp, Homo sapiens
tacagagatttccca

SEQ ID NO: 121350 - DNA, 15 bp, Homo sapiens
gtacagagatttccc

SEQ ID NO: 121351 - DNA, 15 bp, Homo sapiens
ggtacagagatttcc

SEQ ID NO: 121352 - DNA, 15 bp, Homo sapiens
aggtacagagatttc

SEQ ID NO: 121353 - DNA, 15 bp, Homo sapiens
aaggtacagagattt

SEQ ID NO: 121354 - DNA, 15 bp, Homo sapiens
gaaggtacagagatt

SEQ ID NO: 121355 - DNA, 15 bp, Homo sapiens
ggaaggtacagagat

SEQ ID NO: 121356 - DNA, 15 bp, Homo sapiens
aggaaggtacagaga

SEQ ID NO: 121357 - DNA, 15 bp, Homo sapiens
gaggaaggtacagag

SEQ ID NO: 121358 - DNA, 15 bp, Homo sapiens
agaggaaggtacaga

SEQ ID NO: 121359 - DNA, 15 bp, Homo sapiens
gagaggaaggtacag

SEQ ID NO: 121360 - DNA, 15 bp, Homo sapiens
ggagaggaaggtaca

SEQ ID NO: 121361 - DNA, 15 bp, Homo sapiens
tggagaggaaggtac

SEQ ID NO: 121362 - DNA, 15 bp, Homo sapiens
atggagaggaaggta

SEQ ID NO: 121363 - DNA, 15 bp, Homo sapiens
aatggagaggaaggt

SEQ ID NO: 121364 - DNA, 15 bp, Homo sapiens
aaatggagaggaagg

SEQ ID NO: 121365 - DNA, 15 bp, Homo sapiens
aaaatggagaggaag

SEQ ID NO: 121366 - DNA, 15 bp, Homo sapiens
caaaatggagaggaa

SEQ ID NO: 121367 - DNA, 15 bp, Homo sapiens
gcaaaatggagagga

SEQ ID NO: 121368 - DNA, 15 bp, Homo sapiens
agcaaaatggagagg

SEQ ID NO: 121369 - DNA, 15 bp, Homo sapiens
tagcaaaatggagag

SEQ ID NO: 121370 - DNA, 15 bp, Homo sapiens
atagcaaaatggaga

SEQ ID NO: 121371 - DNA, 15 bp, Homo sapiens
catagcaaaatggag

SEQ ID NO: 121372 - DNA, 15 bp, Homo sapiens
tcatagcaaaatgga

SEQ ID NO: 121373 - DNA, 15 bp, Homo sapiens
gtcatagcaaaatgg

SEQ ID NO: 121374 - DNA, 15 bp, Homo sapiens
ggtcatagcaaaatg

SEQ ID NO: 121375 - DNA, 15 bp, Homo sapiens
aggtcatagcaaaat

SEQ ID NO: 121376 - DNA, 15 bp, Homo sapiens
taggtcatagcaaaa

SEQ ID NO: 121377 - DNA, 15 bp, Homo sapiens
ttaggtcatagcaaa

SEQ ID NO: 121378 - DNA, 15 bp, Homo sapiens
tttaggtcatagcaa

SEQ ID NO: 121379 - DNA, 15 bp, Homo sapiens
ctttaggtcatagca

SEQ ID NO: 121380 - DNA, 15 bp, Homo sapiens
gctttaggtcatagc

SEQ ID NO: 121381 - DNA, 15 bp, Homo sapiens
agctttaggtcatag

SEQ ID NO: 121382 - DNA, 15 bp, Homo sapiens
cagctttaggtcata

SEQ ID NO: 121383 - DNA, 15 bp, Homo sapiens
gcagctttaggtcat

SEQ ID NO: 121384 - DNA, 15 bp, Homo sapiens
ggcagctttaggtca

SEQ ID NO: 121385 - DNA, 15 bp, Homo sapiens
gggcagctttaggtc

SEQ ID NO: 121386 - DNA, 15 bp, Homo sapiens
agggcagctttaggt

SEQ ID NO: 121387 - DNA, 15 bp, Homo sapiens
aagggcagctttagg

SEQ ID NO: 121388 - DNA, 15 bp, Homo sapiens
aaagggcagctttag

SEQ ID NO: 121389 - DNA, 15 bp, Homo sapiens
taaagggcagcttta

SEQ ID NO: 121390 - DNA, 15 bp, Homo sapiens
ttaaagggcagcttt

SEQ ID NO: 121391 - DNA, 15 bp, Homo sapiens
tttaaagggcagctt

SEQ ID NO: 121392 - DNA, 15 bp, Homo sapiens
ttttaaagggcagct

SEQ ID NO: 121393 - DNA, 15 bp, Homo sapiens
tttttaaagggcagc

SEQ ID NO: 121394 - DNA, 15 bp, Homo sapiens
ttttttaaagggcag

SEQ ID NO: 121395 - DNA, 15 bp, Homo sapiens
attttttaaagggca

SEQ ID NO: 121396 - DNA, 15 bp, Homo sapiens
tattttttaaagggc

SEQ ID NO: 121397 - DNA, 15 bp, Homo sapiens
gtattttttaaaggg

SEQ ID NO: 121398 - DNA, 15 bp, Homo sapiens
tgtattttttaaagg

SEQ ID NO: 121399 - DNA, 15 bp, Homo sapiens
ttgtattttttaaag

SEQ ID NO: 121400 - DNA, 15 bp, Homo sapiens
cttgtattttttaaa

SEQ ID NO: 121401 - DNA, 15 bp, Homo sapiens
ccttgtattttttaa

SEQ ID NO: 121402 - DNA, 15 bp, Homo sapiens
cccttgtatttttta

SEQ ID NO: 121403 - DNA, 15 bp, Homo sapiens
ccccttgtatttttt

SEQ ID NO: 121404 - DNA, 15 bp, Homo sapiens
gccccttgtattttt

SEQ ID NO: 121405 - DNA, 15 bp, Homo sapiens
agccccttgtatttt

SEQ ID NO: 121406 - DNA, 15 bp, Homo sapiens
cagccccttgtattt

SEQ ID NO: 121407 - DNA, 15 bp, Homo sapiens
ccagccccttgtatt

SEQ ID NO: 121408 - DNA, 15 bp, Homo sapiens
cccagccccttgtat

SEQ ID NO: 121409 - DNA, 15 bp, Homo sapiens
gcccagccccttgta

SEQ ID NO: 121410 - DNA, 15 bp, Homo sapiens
tgcccagccccttgt

SEQ ID NO: 121411 - DNA, 15 bp, Homo sapiens
gtgcccagccccttg

SEQ ID NO: 121412 - DNA, 15 bp, Homo sapiens
tgtgcccagcccctt

SEQ ID NO: 121413 - DNA, 15 bp, Homo sapiens
ctgtgcccagcccct

SEQ ID NO: 121414 - DNA, 15 bp, Homo sapiens
actgtgcccagcccc

SEQ ID NO: 121415 - DNA, 15 bp, Homo sapiens
cactgtgcccagccc

SEQ ID NO: 121416 - DNA, 15 bp, Homo sapiens
ccactgtgcccagcc

SEQ ID NO: 121417 - DNA, 15 bp, Homo sapiens
accactgtgcccagc

SEQ ID NO: 121418 - DNA, 15 bp, Homo sapiens
aaccactgtgcccag

SEQ ID NO: 121419 - DNA, 15 bp, Homo sapiens
gaaccactgtgccca

SEQ ID NO: 121420 - DNA, 15 bp, Homo sapiens
tgaaccactgtgccc

SEQ ID NO: 121421 - DNA, 15 bp, Homo sapiens
gtgaaccactgtgcc

SEQ ID NO: 121422 - DNA, 15 bp, Homo sapiens
cgtgaaccactgtgc

SEQ ID NO: 121423 - DNA, 15 bp, Homo sapiens
gcgtgaaccactgtg

SEQ ID NO: 121424 - DNA, 15 bp, Homo sapiens
ggcgtgaaccactgt

SEQ ID NO: 121425 - DNA, 15 bp, Homo sapiens
aggcgtgaaccactg

SEQ ID NO: 121426 - DNA, 15 bp, Homo sapiens
caggcgtgaaccact

SEQ ID NO: 121427 - DNA, 15 bp, Homo sapiens
acaggcgtgaaccac

SEQ ID NO: 121428 - DNA, 15 bp, Homo sapiens
tacaggcgtgaacca

SEQ ID NO: 121429 - DNA, 15 bp, Homo sapiens
ttacaggcgtgaacc

SEQ ID NO: 121430 - DNA, 15 bp, Homo sapiens
tttacaggcgtgaac

SEQ ID NO: 121431 - DNA, 15 bp, Homo sapiens
gtttacaggcgtgaa

SEQ ID NO: 121432 - DNA, 15 bp, Homo sapiens
ggtttacaggcgtga

SEQ ID NO: 121433 - DNA, 15 bp, Homo sapiens
gggtttacaggcgtg

SEQ ID NO: 121434 - DNA, 15 bp, Homo sapiens
tgggtttacaggcgt

SEQ ID NO: 121435 - DNA, 15 bp, Homo sapiens
ctgggtttacaggcg

SEQ ID NO: 121436 - DNA, 15 bp, Homo sapiens
gctgggtttacaggc

SEQ ID NO: 121437 - DNA, 15 bp, Homo sapiens
tgctgggtttacagg

SEQ ID NO: 121438 - DNA, 15 bp, Homo sapiens
gtgctgggtttacag

SEQ ID NO: 121439 - DNA, 15 bp, Homo sapiens
agtgctgggtttaca

SEQ ID NO: 121440 - DNA, 15 bp, Homo sapiens
aagtgctgggtttac

SEQ ID NO: 121441 - DNA, 15 bp, Homo sapiens
aaagtgctgggttta

SEQ ID NO: 121442 - DNA, 15 bp, Homo sapiens
caaagtgctgggttt

SEQ ID NO: 121443 - DNA, 15 bp, Homo sapiens
ccaaagtgctgggtt

SEQ ID NO: 121444 - DNA, 15 bp, Homo sapiens
cccaaagtgctgggt

SEQ ID NO: 121445 - DNA, 15 bp, Homo sapiens
tcccaaagtgctggg

SEQ ID NO: 121446 - DNA, 15 bp, Homo sapiens
ctcccaaagtgctgg

SEQ ID NO: 121447 - DNA, 15 bp, Homo sapiens
cctcccaaagtgctg

SEQ ID NO: 121448 - DNA, 15 bp, Homo sapiens
gcctcccaaagtgct

SEQ ID NO: 121449 - DNA, 15 bp, Homo sapiens
ggcctcccaaagtgc

SEQ ID NO: 121450 - DNA, 15 bp, Homo sapiens
cggcctcccaaagtg

SEQ ID NO: 121451 - DNA, 15 bp, Homo sapiens
tcggcctcccaaagt

SEQ ID NO: 121452 - DNA, 15 bp, Homo sapiens
ctcggcctcccaaag

SEQ ID NO: 121453 - DNA, 15 bp, Homo sapiens
cctcggcctcccaaa

SEQ ID NO: 121454 - DNA, 15 bp, Homo sapiens
gcctcggcctcccaa

SEQ ID NO: 121455 - DNA, 15 bp, Homo sapiens
cgcctcggcctccca

SEQ ID NO: 121456 - DNA, 15 bp, Homo sapiens
gcgcctcggcctccc

SEQ ID NO: 121457 - DNA, 15 bp, Homo sapiens
cgcgcctcggcctcc

SEQ ID NO: 121458 - DNA, 15 bp, Homo sapiens
acgcgcctcggcctc

SEQ ID NO: 121459 - DNA, 15 bp, Homo sapiens
cacgcgcctcggcct

SEQ ID NO: 121460 - DNA, 15 bp, Homo sapiens
ccacgcgcctcggcc

SEQ ID NO: 121461 - DNA, 15 bp, Homo sapiens
tccacgcgcctcggc

SEQ ID NO: 121462 - DNA, 15 bp, Homo sapiens
atccacgcgcctcgg

SEQ ID NO: 121463 - DNA, 15 bp, Homo sapiens
gatccacgcgcctcg

SEQ ID NO: 121464 - DNA, 15 bp, Homo sapiens
tgatccacgcgcctc

SEQ ID NO: 121465 - DNA, 15 bp, Homo sapiens
gtgatccacgcgcct

SEQ ID NO: 121466 - DNA, 15 bp, Homo sapiens
ggtgatccacgcgcc

SEQ ID NO: 121467 - DNA, 15 bp, Homo sapiens
aggtgatccacgcgc

SEQ ID NO: 121468 - DNA, 15 bp, Homo sapiens
caggtgatccacgcg

SEQ ID NO: 121469 - DNA, 15 bp, Homo sapiens
tcaggtgatccacgc

SEQ ID NO: 121470 - DNA, 15 bp, Homo sapiens
ctcaggtgatccacg

SEQ ID NO: 121471 - DNA, 15 bp, Homo sapiens
cctcaggtgatccac

SEQ ID NO: 121472 - DNA, 15 bp, Homo sapiens
acctcaggtgatcca

SEQ ID NO: 121473 - DNA, 15 bp, Homo sapiens
gacctcaggtgatcc

SEQ ID NO: 121474 - DNA, 15 bp, Homo sapiens
tgacctcaggtgatc

SEQ ID NO: 121475 - DNA, 15 bp, Homo sapiens
ctgacctcaggtgat

SEQ ID NO: 121476 - DNA, 15 bp, Homo sapiens
cctgacctcaggtga

SEQ ID NO: 121477 - DNA, 15 bp, Homo sapiens
tcctgacctcaggtg

SEQ ID NO: 121478 - DNA, 15 bp, Homo sapiens
ctcctgacctcaggt

SEQ ID NO: 121479 - DNA, 15 bp, Homo sapiens
actcctgacctcagg

SEQ ID NO: 121480 - DNA, 15 bp, Homo sapiens
aactcctgacctcag

SEQ ID NO: 121481 - DNA, 15 bp, Homo sapiens
gaactcctgacctca

SEQ ID NO: 121482 - DNA, 15 bp, Homo sapiens
tgaactcctgacctc

SEQ ID NO: 121483 - DNA, 15 bp, Homo sapiens
ttgaactcctgacct

SEQ ID NO: 121484 - DNA, 15 bp, Homo sapiens
cttgaactcctgacc

SEQ ID NO: 121485 - DNA, 15 bp, Homo sapiens
tcttgaactcctgac

SEQ ID NO: 121486 - DNA, 15 bp, Homo sapiens
gtcttgaactcctga

SEQ ID NO: 121487 - DNA, 15 bp, Homo sapiens
ggtcttgaactcctg

SEQ ID NO: 121488 - DNA, 15 bp, Homo sapiens
gggtcttgaactcct

SEQ ID NO: 121489 - DNA, 15 bp, Homo sapiens
cgggtcttgaactcc

SEQ ID NO: 121490 - DNA, 15 bp, Homo sapiens
gcgggtcttgaactc

SEQ ID NO: 121491 - DNA, 15 bp, Homo sapiens
ggcgggtcttgaact

SEQ ID NO: 121492 - DNA, 15 bp, Homo sapiens
aggcgggtcttgaac

SEQ ID NO: 121493 - DNA, 15 bp, Homo sapiens
caggcgggtcttgaa

SEQ ID NO: 121494 - DNA, 15 bp, Homo sapiens
ccaggcgggtcttga

SEQ ID NO: 121495 - DNA, 15 bp, Homo sapiens
gccaggcgggtcttg

SEQ ID NO: 121496 - DNA, 15 bp, Homo sapiens
ggccaggcgggtctt

SEQ ID NO: 121497 - DNA, 15 bp, Homo sapiens
tggccaggcgggtct

SEQ ID NO: 121498 - DNA, 15 bp, Homo sapiens
ttggccaggcgggtc

SEQ ID NO: 121499 - DNA, 15 bp, Homo sapiens
gttggccaggcgggt

SEQ ID NO: 121500 - DNA, 15 bp, Homo sapiens
tgttggccaggcggg

SEQ ID NO: 121501 - DNA, 15 bp, Homo sapiens
atgttggccaggcgg

SEQ ID NO: 121502 - DNA, 15 bp, Homo sapiens
catgttggccaggcg

SEQ ID NO: 121503 - DNA, 15 bp, Homo sapiens
ccatgttggccaggc

SEQ ID NO: 121504 - DNA, 15 bp, Homo sapiens
gccatgttggccagg

SEQ ID NO: 121505 - DNA, 15 bp, Homo sapiens
tgccatgttggccag

SEQ ID NO: 121506 - DNA, 15 bp, Homo sapiens
ttgccatgttggcca

SEQ ID NO: 121507 - DNA, 15 bp, Homo sapiens
tttgccatgttggcc

SEQ ID NO: 121508 - DNA, 15 bp, Homo sapiens
ttttgccatgttggc

SEQ ID NO: 121509 - DNA, 15 bp, Homo sapiens
gttttgccatgttgg

SEQ ID NO: 121510 - DNA, 15 bp, Homo sapiens
ggttttgccatgttg

SEQ ID NO: 121511 - DNA, 15 bp, Homo sapiens
gggttttgccatgtt

SEQ ID NO: 121512 - DNA, 15 bp, Homo sapiens
ggggttttgccatgt

SEQ ID NO: 121513 - DNA, 15 bp, Homo sapiens
cggggttttgccatg

SEQ ID NO: 121514 - DNA, 15 bp, Homo sapiens
acggggttttgccat

SEQ ID NO: 121515 - DNA, 15 bp, Homo sapiens
aacggggttttgcca

SEQ ID NO: 121516 - DNA, 15 bp, Homo sapiens
aaacggggttttgcc

SEQ ID NO: 121517 - DNA, 15 bp, Homo sapiens
gaaacggggttttgc

SEQ ID NO: 121518 - DNA, 15 bp, Homo sapiens
agaaacggggttttg

SEQ ID NO: 121519 - DNA, 15 bp, Homo sapiens
tagaaacggggtttt

SEQ ID NO: 121520 - DNA, 15 bp, Homo sapiens
gtagaaacggggttt

SEQ ID NO: 121521 - DNA, 15 bp, Homo sapiens
agtagaaacggggtt

SEQ ID NO: 121522 - DNA, 15 bp, Homo sapiens
tagtagaaacggggt

SEQ ID NO: 121523 - DNA, 15 bp, Homo sapiens
ttagtagaaacgggg

SEQ ID NO: 121524 - DNA, 15 bp, Homo sapiens
tttagtagaaacggg

SEQ ID NO: 121525 - DNA, 15 bp, Homo sapiens
ttttagtagaaacgg

SEQ ID NO: 121526 - DNA, 15 bp, Homo sapiens
tttttagtagaaacg

SEQ ID NO: 121527 - DNA, 15 bp, Homo sapiens
atttttagtagaaac

SEQ ID NO: 121528 - DNA, 15 bp, Homo sapiens
tatttttagtagaaa

SEQ ID NO: 121529 - DNA, 15 bp, Homo sapiens
gtatttttagtagaa

SEQ ID NO: 121530 - DNA, 15 bp, Homo sapiens
tgtatttttagtaga

SEQ ID NO: 121531 - DNA, 15 bp, Homo sapiens
ttgtatttttagtag

SEQ ID NO: 121532 - DNA, 15 bp, Homo sapiens
tttgtatttttagta

SEQ ID NO: 121533 - DNA, 15 bp, Homo sapiens
ttttgtatttttagt

SEQ ID NO: 121534 - DNA, 15 bp, Homo sapiens
tttttgtatttttag

SEQ ID NO: 121535 - DNA, 15 bp, Homo sapiens
ctttttgtattttta

SEQ ID NO: 121536 - DNA, 15 bp, Homo sapiens
actttttgtattttt

SEQ ID NO: 121537 - DNA, 15 bp, Homo sapiens
tactttttgtatttt

SEQ ID NO: 121538 - DNA, 15 bp, Homo sapiens
ctactttttgtattt

SEQ ID NO: 121539 - DNA, 15 bp, Homo sapiens
gctactttttgtatt

SEQ ID NO: 121540 - DNA, 15 bp, Homo sapiens
agctactttttgtat

SEQ ID NO: 121541 - DNA, 15 bp, Homo sapiens
cagctactttttgta

SEQ ID NO: 121542 - DNA, 15 bp, Homo sapiens
ccagctactttttgt

SEQ ID NO: 121543 - DNA, 15 bp, Homo sapiens
cccagctactttttg

SEQ ID NO: 121544 - DNA, 15 bp, Homo sapiens
gcccagctacttttt

SEQ ID NO: 121545 - DNA, 15 bp, Homo sapiens
cgcccagctactttt

SEQ ID NO: 121546 - DNA, 15 bp, Homo sapiens
acgcccagctacttt

SEQ ID NO: 121547 - DNA, 15 bp, Homo sapiens
cacgcccagctactt

SEQ ID NO: 121548 - DNA, 15 bp, Homo sapiens
ccacgcccagctact

SEQ ID NO: 121549 - DNA, 15 bp, Homo sapiens
accacgcccagctac

SEQ ID NO: 121550 - DNA, 15 bp, Homo sapiens
gaccacgcccagcta

SEQ ID NO: 121551 - DNA, 15 bp, Homo sapiens
cgaccacgcccagct

SEQ ID NO: 121552 - DNA, 15 bp, Homo sapiens
gcgaccacgcccagc

SEQ ID NO: 121553 - DNA, 15 bp, Homo sapiens
tgcgaccacgcccag

SEQ ID NO: 121554 - DNA, 15 bp, Homo sapiens
atgcgaccacgccca

SEQ ID NO: 121555 - DNA, 15 bp, Homo sapiens
catgcgaccacgccc

SEQ ID NO: 121556 - DNA, 15 bp, Homo sapiens
gcatgcgaccacgcc

SEQ ID NO: 121557 - DNA, 15 bp, Homo sapiens
tgcatgcgaccacgc

SEQ ID NO: 121558 - DNA, 15 bp, Homo sapiens
atgcatgcgaccacg

SEQ ID NO: 121559 - DNA, 15 bp, Homo sapiens
gatgcatgcgaccac

SEQ ID NO: 121560 - DNA, 15 bp, Homo sapiens
agatgcatgcgacca

SEQ ID NO: 121561 - DNA, 15 bp, Homo sapiens
cagatgcatgcgacc

SEQ ID NO: 121562 - DNA, 15 bp, Homo sapiens
acagatgcatgcgac

SEQ ID NO: 121563 - DNA, 15 bp, Homo sapiens
tacagatgcatgcga

SEQ ID NO: 121564 - DNA, 15 bp, Homo sapiens
ctacagatgcatgcg

SEQ ID NO: 121565 - DNA, 15 bp, Homo sapiens
actacagatgcatgc

SEQ ID NO: 121566 - DNA, 15 bp, Homo sapiens
gactacagatgcatg

SEQ ID NO: 121567 - DNA, 15 bp, Homo sapiens
ggactacagatgcat

SEQ ID NO: 121568 - DNA, 15 bp, Homo sapiens
gggactacagatgca

SEQ ID NO: 121569 - DNA, 15 bp, Homo sapiens
tgggactacagatgc

SEQ ID NO: 121570 - DNA, 15 bp, Homo sapiens
ctgggactacagatg

SEQ ID NO: 121571 - DNA, 15 bp, Homo sapiens
gctgggactacagat

SEQ ID NO: 121572 - DNA, 15 bp, Homo sapiens
agctgggactacaga

SEQ ID NO: 121573 - DNA, 15 bp, Homo sapiens
tagctgggactacag

SEQ ID NO: 121574 - DNA, 15 bp, Homo sapiens
gtagctgggactaca

SEQ ID NO: 121575 - DNA, 15 bp, Homo sapiens
agtagctgggactac

SEQ ID NO: 121576 - DNA, 15 bp, Homo sapiens
gagtagctgggacta

SEQ ID NO: 121577 - DNA, 15 bp, Homo sapiens
tgagtagctgggact

SEQ ID NO: 121578 - DNA, 15 bp, Homo sapiens
ctgagtagctgggac

SEQ ID NO: 121579 - DNA, 15 bp, Homo sapiens
cctgagtagctggga

SEQ ID NO: 121580 - DNA, 15 bp, Homo sapiens
tcctgagtagctggg

SEQ ID NO: 121581 - DNA, 15 bp, Homo sapiens
ctcctgagtagctgg

SEQ ID NO: 121582 - DNA, 15 bp, Homo sapiens
cctcctgagtagctg

SEQ ID NO: 121583 - DNA, 15 bp, Homo sapiens
gcctcctgagtagct

SEQ ID NO: 121584 - DNA, 15 bp, Homo sapiens
agcctcctgagtagc

SEQ ID NO: 121585 - DNA, 15 bp, Homo sapiens
cagcctcctgagtag

SEQ ID NO: 121586 - DNA, 15 bp, Homo sapiens
tcagcctcctgagta

SEQ ID NO: 121587 - DNA, 15 bp, Homo sapiens
ctcagcctcctgagt

SEQ ID NO: 121588 - DNA, 15 bp, Homo sapiens
cctcagcctcctgag

SEQ ID NO: 121589 - DNA, 15 bp, Homo sapiens
gcctcagcctcctga

SEQ ID NO: 121590 - DNA, 15 bp, Homo sapiens
tgcctcagcctcctg

SEQ ID NO: 121591 - DNA, 15 bp, Homo sapiens
cggctacatctttgg

SEQ ID NO: 121592 - DNA, 15 bp, Homo sapiens
gcggctacatctttg

SEQ ID NO: 121593 - DNA, 15 bp, Homo sapiens
ggcggctacatcttt

SEQ ID NO: 121594 - DNA, 15 bp, Homo sapiens
gggcggctacatctt

SEQ ID NO: 121595 - DNA, 15 bp, Homo sapiens
ggggcggctacatct

SEQ ID NO: 121596 - DNA, 15 bp, Homo sapiens
tggggcggctacatc

SEQ ID NO: 121597 - DNA, 15 bp, Homo sapiens
gtggggcggctacat

SEQ ID NO: 121598 - DNA, 15 bp, Homo sapiens
tgtggggcggctaca

SEQ ID NO: 121599 - DNA, 15 bp, Homo sapiens
gtgtggggcggctac

SEQ ID NO: 121600 - DNA, 15 bp, Homo sapiens
tgtgtggggcggcta

SEQ ID NO: 121601 - DNA, 15 bp, Homo sapiens
ctgtgtggggcggct

SEQ ID NO: 121602 - DNA, 15 bp, Homo sapiens
tctgtgtggggcggc

SEQ ID NO: 121603 - DNA, 15 bp, Homo sapiens
gtctgtgtggggcgg

SEQ ID NO: 121604 - DNA, 15 bp, Homo sapiens
tgtctgtgtggggcg

SEQ ID NO: 121605 - DNA, 15 bp, Homo sapiens
ctgtctgtgtggggc

SEQ ID NO: 121606 - DNA, 15 bp, Homo sapiens
gctgtctgtgtgggg

SEQ ID NO: 121607 - DNA, 15 bp, Homo sapiens
ggctgtctgtgtggg

SEQ ID NO: 121608 - DNA, 15 bp, Homo sapiens
tggctgtctgtgtgg

SEQ ID NO: 121609 - DNA, 15 bp, Homo sapiens
gtggctgtctgtgtg

SEQ ID NO: 121610 - DNA, 15 bp, Homo sapiens
agtggctgtctgtgt

SEQ ID NO: 121611 - DNA, 15 bp, Homo sapiens
gagtggctgtctgtg

SEQ ID NO: 121612 - DNA, 15 bp, Homo sapiens
tgagtggctgtctgt

SEQ ID NO: 121613 - DNA, 15 bp, Homo sapiens
gtgagtggctgtctg

SEQ ID NO: 121614 - DNA, 15 bp, Homo sapiens
ggtgagtggctgtct

SEQ ID NO: 121615 - DNA, 15 bp, Homo sapiens
aggtgagtggctgtc

SEQ ID NO: 121616 - DNA, 15 bp, Homo sapiens
gaggtgagtggctgt

SEQ ID NO: 121617 - DNA, 15 bp, Homo sapiens
agaggtgagtggctg

SEQ ID NO: 121618 - DNA, 15 bp, Homo sapiens
aagaggtgagtggct

SEQ ID NO: 121619 - DNA, 15 bp, Homo sapiens
gaagaggtgagtggc

SEQ ID NO: 121620 - DNA, 15 bp, Homo sapiens
tgaagaggtgagtgg

SEQ ID NO: 121621 - DNA, 15 bp, Homo sapiens
ctgaagaggtgagtg

SEQ ID NO: 121622 - DNA, 15 bp, Homo sapiens
tctgaagaggtgagt

SEQ ID NO: 121623 - DNA, 15 bp, Homo sapiens
ttctgaagaggtgag

SEQ ID NO: 121624 - DNA, 15 bp, Homo sapiens
gttctgaagaggtga

SEQ ID NO: 121625 - DNA, 15 bp, Homo sapiens
cgttctgaagaggtg

SEQ ID NO: 121626 - DNA, 15 bp, Homo sapiens
tcgttctgaagaggt

SEQ ID NO: 121627 - DNA, 15 bp, Homo sapiens
ttcgttctgaagagg

SEQ ID NO: 121628 - DNA, 15 bp, Homo sapiens
attcgttctgaagag

SEQ ID NO: 121629 - DNA, 15 bp, Homo sapiens
aattcgttctgaaga

SEQ ID NO: 121630 - DNA, 15 bp, Homo sapiens
caattcgttctgaag

SEQ ID NO: 121631 - DNA, 15 bp, Homo sapiens
tcaattcgttctgaa

SEQ ID NO: 121632 - DNA, 15 bp, Homo sapiens
gtcaattcgttctga

SEQ ID NO: 121633 - DNA, 15 bp, Homo sapiens
tgtcaattcgttctg

SEQ ID NO: 121634 - DNA, 15 bp, Homo sapiens
ttgtcaattcgttct

SEQ ID NO: 121635 - DNA, 15 bp, Homo sapiens
tttgtcaattcgttc

SEQ ID NO: 121636 - DNA, 15 bp, Homo sapiens
gtttgtcaattcgtt

SEQ ID NO: 121637 - DNA, 15 bp, Homo sapiens
tgtttgtcaattcgt

SEQ ID NO: 121638 - DNA, 15 bp, Homo sapiens
ttgtttgtcaattcg

SEQ ID NO: 121639 - DNA, 15 bp, Homo sapiens
tttgtttgtcaattc

SEQ ID NO: 121640 - DNA, 15 bp, Homo sapiens
atttgtttgtcaatt

SEQ ID NO: 121641 - DNA, 15 bp, Homo sapiens
aatttgtttgtcaat

SEQ ID NO: 121642 - DNA, 15 bp, Homo sapiens
gaatttgtttgtcaa

SEQ ID NO: 121643 - DNA, 15 bp, Homo sapiens
cgaatttgtttgtca

SEQ ID NO: 121644 - DNA, 15 bp, Homo sapiens
ccgaatttgtttgtc

SEQ ID NO: 121645 - DNA, 15 bp, Homo sapiens
accgaatttgtttgt

SEQ ID NO: 121646 - DNA, 15 bp, Homo sapiens
taccgaatttgtttg

SEQ ID NO: 121647 - DNA, 15 bp, Homo sapiens
gtaccgaatttgttt

SEQ ID NO: 121648 - DNA, 15 bp, Homo sapiens
tgtaccgaatttgtt

SEQ ID NO: 121649 - DNA, 15 bp, Homo sapiens
atgtaccgaatttgt

SEQ ID NO: 121650 - DNA, 15 bp, Homo sapiens
gatgtaccgaatttg

SEQ ID NO: 121651 - DNA, 15 bp, Homo sapiens
ggatgtaccgaattt

SEQ ID NO: 121652 - DNA, 15 bp, Homo sapiens
aggatgtaccgaatt

SEQ ID NO: 121653 - DNA, 15 bp, Homo sapiens
gaggatgtaccgaat

SEQ ID NO: 121654 - DNA, 15 bp, Homo sapiens
cgaggatgtaccgaa

SEQ ID NO: 121655 - DNA, 15 bp, Homo sapiens
tcgaggatgtaccga

SEQ ID NO: 121656 - DNA, 15 bp, Homo sapiens
gtcgaggatgtaccg

SEQ ID NO: 121657 - DNA, 15 bp, Homo sapiens
cgtcgaggatgtacc

SEQ ID NO: 121658 - DNA, 15 bp, Homo sapiens
ccgtcgaggatgtac

SEQ ID NO: 121659 - DNA, 15 bp, Homo sapiens
gccgtcgaggatgta

SEQ ID NO: 121660 - DNA, 15 bp, Homo sapiens
tgccgtcgaggatgt

SEQ ID NO: 121661 - DNA, 15 bp, Homo sapiens
atgccgtcgaggatg

SEQ ID NO: 121662 - DNA, 15 bp, Homo sapiens
gatgccgtcgaggat

SEQ ID NO: 121663 - DNA, 15 bp, Homo sapiens
agatgccgtcgagga

SEQ ID NO: 121664 - DNA, 15 bp, Homo sapiens
gagatgccgtcgagg

SEQ ID NO: 121665 - DNA, 15 bp, Homo sapiens
tgagatgccgtcgag

SEQ ID NO: 121666 - DNA, 15 bp, Homo sapiens
ctgagatgccgtcga

SEQ ID NO: 121667 - DNA, 15 bp, Homo sapiens
gctgagatgccgtcg

SEQ ID NO: 121668 - DNA, 15 bp, Homo sapiens
ggctgagatgccgtc

SEQ ID NO: 121669 - DNA, 15 bp, Homo sapiens
gggctgagatgccgt

SEQ ID NO: 121670 - DNA, 15 bp, Homo sapiens
agggctgagatgccg

SEQ ID NO: 121671 - DNA, 15 bp, Homo sapiens
cagggctgagatgcc

SEQ ID NO: 121672 - DNA, 15 bp, Homo sapiens
tcagggctgagatgc

SEQ ID NO: 121673 - DNA, 15 bp, Homo sapiens
ctcagggctgagatg

SEQ ID NO: 121674 - DNA, 15 bp, Homo sapiens
tctcagggctgagat

SEQ ID NO: 121675 - DNA, 15 bp, Homo sapiens
ttctcagggctgaga

SEQ ID NO: 121676 - DNA, 15 bp, Homo sapiens
tttctcagggctgag

SEQ ID NO: 121677 - DNA, 15 bp, Homo sapiens
ctttctcagggctga

SEQ ID NO: 121678 - DNA, 15 bp, Homo sapiens
cctttctcagggctg

SEQ ID NO: 121679 - DNA, 15 bp, Homo sapiens
tcctttctcagggct

SEQ ID NO: 121680 - DNA, 15 bp, Homo sapiens
ctcctttctcagggc

SEQ ID NO: 121681 - DNA, 15 bp, Homo sapiens
cctcctttctcaggg

SEQ ID NO: 121682 - DNA, 15 bp, Homo sapiens
acctcctttctcagg

SEQ ID NO: 121683 - DNA, 15 bp, Homo sapiens
cacctcctttctcag

SEQ ID NO: 121684 - DNA, 15 bp, Homo sapiens
ccacctcctttctca

SEQ ID NO: 121685 - DNA, 15 bp, Homo sapiens
cccacctcctttctc

SEQ ID NO: 121686 - DNA, 15 bp, Homo sapiens
acccacctcctttct

SEQ ID NO: 121687 - DNA, 15 bp, Homo sapiens
tacccacctcctttc

SEQ ID NO: 121688 - DNA, 15 bp, Homo sapiens
ctacccacctccttt

SEQ ID NO: 121689 - DNA, 15 bp, Homo sapiens
cctacccacctcctt

SEQ ID NO: 121690 - DNA, 15 bp, Homo sapiens
gcctacccacctcct

SEQ ID NO: 121691 - DNA, 15 bp, Homo sapiens
agcctacccacctcc

SEQ ID NO: 121692 - DNA, 15 bp, Homo sapiens
aagcctacccacctc

SEQ ID NO: 121693 - DNA, 15 bp, Homo sapiens
caagcctacccacct

SEQ ID NO: 121694 - DNA, 15 bp, Homo sapiens
ccaagcctacccacc

SEQ ID NO: 121695 - DNA, 15 bp, Homo sapiens
gccaagcctacccac

SEQ ID NO: 121696 - DNA, 15 bp, Homo sapiens
cgccaagcctaccca

SEQ ID NO: 121697 - DNA, 15 bp, Homo sapiens
tcgccaagcctaccc

SEQ ID NO: 121698 - DNA, 15 bp, Homo sapiens
atcgccaagcctacc

SEQ ID NO: 121699 - DNA, 15 bp, Homo sapiens
catcgccaagcctac

SEQ ID NO: 121700 - DNA, 15 bp, Homo sapiens
ccatcgccaagccta

SEQ ID NO: 121701 - DNA, 15 bp, Homo sapiens
cccatcgccaagcct

SEQ ID NO: 121702 - DNA, 15 bp, Homo sapiens
ccccatcgccaagcc

SEQ ID NO: 121703 - DNA, 15 bp, Homo sapiens
accccatcgccaagc

SEQ ID NO: 121704 - DNA, 15 bp, Homo sapiens
aaccccatcgccaag

SEQ ID NO: 121705 - DNA, 15 bp, Homo sapiens
caaccccatcgccaa

SEQ ID NO: 121706 - DNA, 15 bp, Homo sapiens
tcaaccccatcgcca

SEQ ID NO: 121707 - DNA, 15 bp, Homo sapiens
ttcaaccccatcgcc

SEQ ID NO: 121708 - DNA, 15 bp, Homo sapiens
cttcaaccccatcgc

SEQ ID NO: 121709 - DNA, 15 bp, Homo sapiens
ccttcaaccccatcg

SEQ ID NO: 121710 - DNA, 15 bp, Homo sapiens
cccttcaaccccatc

SEQ ID NO: 121711 - DNA, 15 bp, Homo sapiens
gcccttcaaccccat

SEQ ID NO: 121712 - DNA, 15 bp, Homo sapiens
ggcccttcaacccca

SEQ ID NO: 121713 - DNA, 15 bp, Homo sapiens
gggcccttcaacccc

SEQ ID NO: 121714 - DNA, 15 bp, Homo sapiens
cgggcccttcaaccc

SEQ ID NO: 121715 - DNA, 15 bp, Homo sapiens
ccgggcccttcaacc

SEQ ID NO: 121716 - DNA, 15 bp, Homo sapiens
accgggcccttcaac

SEQ ID NO: 121717 - DNA, 15 bp, Homo sapiens
caccgggcccttcaa

SEQ ID NO: 121718 - DNA, 15 bp, Homo sapiens
gcaccgggcccttca

SEQ ID NO: 121719 - DNA, 15 bp, Homo sapiens
cgcaccgggcccttc

SEQ ID NO: 121720 - DNA, 15 bp, Homo sapiens
gcgcaccgggccctt

SEQ ID NO: 121721 - DNA, 15 bp, Homo sapiens
tgcgcaccgggccct

SEQ ID NO: 121722 - DNA, 15 bp, Homo sapiens
atgcgcaccgggccc

SEQ ID NO: 121723 - DNA, 15 bp, Homo sapiens
catgcgcaccgggcc

SEQ ID NO: 121724 - DNA, 15 bp, Homo sapiens
gcatgcgcaccgggc

SEQ ID NO: 121725 - DNA, 15 bp, Homo sapiens
cgcatgcgcaccggg

SEQ ID NO: 121726 - DNA, 15 bp, Homo sapiens
acgcatgcgcaccgg

SEQ ID NO: 121727 - DNA, 15 bp, Homo sapiens
aacgcatgcgcaccg

SEQ ID NO: 121728 - DNA, 15 bp, Homo sapiens
gaacgcatgcgcacc

SEQ ID NO: 121729 - DNA, 15 bp, Homo sapiens
ggaacgcatgcgcac

SEQ ID NO: 121730 - DNA, 15 bp, Homo sapiens
gggaacgcatgcgca

SEQ ID NO: 121731 - DNA, 15 bp, Homo sapiens
ggggaacgcatgcgc

SEQ ID NO: 121732 - DNA, 15 bp, Homo sapiens
aggggaacgcatgcg

SEQ ID NO: 121733 - DNA, 15 bp, Homo sapiens
aaggggaacgcatgc

SEQ ID NO: 121734 - DNA, 15 bp, Homo sapiens
caaggggaacgcatg

SEQ ID NO: 121735 - DNA, 15 bp, Homo sapiens
gcaaggggaacgcat

SEQ ID NO: 121736 - DNA, 15 bp, Homo sapiens
ggcaaggggaacgca

SEQ ID NO: 121737 - DNA, 15 bp, Homo sapiens
gggcaaggggaacgc

SEQ ID NO: 121738 - DNA, 15 bp, Homo sapiens
ggggcaaggggaacg

SEQ ID NO: 121739 - DNA, 15 bp, Homo sapiens
aggggcaaggggaac

SEQ ID NO: 121740 - DNA, 15 bp, Homo sapiens
caggggcaaggggaa

SEQ ID NO: 121741 - DNA, 15 bp, Homo sapiens
gcaggggcaagggga

SEQ ID NO: 121742 - DNA, 15 bp, Homo sapiens
cgcaggggcaagggg

SEQ ID NO: 121743 - DNA, 15 bp, Homo sapiens
acgcaggggcaaggg

SEQ ID NO: 121744 - DNA, 15 bp, Homo sapiens
cacgcaggggcaagg

SEQ ID NO: 121745 - DNA, 15 bp, Homo sapiens
acacgcaggggcaag

SEQ ID NO: 121746 - DNA, 15 bp, Homo sapiens
cacacgcaggggcaa

SEQ ID NO: 121747 - DNA, 15 bp, Homo sapiens
ccacacgcaggggca

SEQ ID NO: 121748 - DNA, 15 bp, Homo sapiens
gccacacgcaggggc

SEQ ID NO: 121749 - DNA, 15 bp, Homo sapiens
ggccacacgcagggg

SEQ ID NO: 121750 - DNA, 15 bp, Homo sapiens
cggccacacgcaggg

SEQ ID NO: 121751 - DNA, 15 bp, Homo sapiens
ccggccacacgcagg

SEQ ID NO: 121752 - DNA, 15 bp, Homo sapiens
cccggccacacgcag

SEQ ID NO: 121753 - DNA, 15 bp, Homo sapiens
ccccggccacacgca

SEQ ID NO: 121754 - DNA, 15 bp, Homo sapiens
cccccggccacacgc

SEQ ID NO: 121755 - DNA, 15 bp, Homo sapiens
gcccccggccacacg

SEQ ID NO: 121756 - DNA, 15 bp, Homo sapiens
agcccccggccacac

SEQ ID NO: 121757 - DNA, 15 bp, Homo sapiens
cagcccccggccaca

SEQ ID NO: 121758 - DNA, 15 bp, Homo sapiens
gcagcccccggccac

SEQ ID NO: 121759 - DNA, 15 bp, Homo sapiens
ggcagcccccggcca

SEQ ID NO: 121760 - DNA, 15 bp, Homo sapiens
aggcagcccccggcc

SEQ ID NO: 121761 - DNA, 15 bp, Homo sapiens
caggcagcccccggc

SEQ ID NO: 121762 - DNA, 15 bp, Homo sapiens
gcaggcagcccccgg

SEQ ID NO: 121763 - DNA, 15 bp, Homo sapiens
tgcaggcagcccccg

SEQ ID NO: 121764 - DNA, 15 bp, Homo sapiens
atgcaggcagccccc

SEQ ID NO: 121765 - DNA, 15 bp, Homo sapiens
aatgcaggcagcccc

SEQ ID NO: 121766 - DNA, 15 bp, Homo sapiens
taatgcaggcagccc

SEQ ID NO: 121767 - DNA, 15 bp, Homo sapiens
ctaatgcaggcagcc

SEQ ID NO: 121768 - DNA, 15 bp, Homo sapiens
cctaatgcaggcagc

SEQ ID NO: 121769 - DNA, 15 bp, Homo sapiens
tcctaatgcaggcag

SEQ ID NO: 121770 - DNA, 15 bp, Homo sapiens
ctcctaatgcaggca

SEQ ID NO: 121771 - DNA, 15 bp, Homo sapiens
cctcctaatgcaggc

SEQ ID NO: 121772 - DNA, 15 bp, Homo sapiens
acctcctaatgcagg

SEQ ID NO: 121773 - DNA, 15 bp, Homo sapiens
gacctcctaatgcag

SEQ ID NO: 121774 - DNA, 15 bp, Homo sapiens
agacctcctaatgca

SEQ ID NO: 121775 - DNA, 15 bp, Homo sapiens
aagacctcctaatgc

SEQ ID NO: 121776 - DNA, 15 bp, Homo sapiens
aaagacctcctaatg

SEQ ID NO: 121777 - DNA, 15 bp, Homo sapiens
caaagacctcctaat

SEQ ID NO: 121778 - DNA, 15 bp, Homo sapiens
gcaaagacctcctaa

SEQ ID NO: 121779 - DNA, 15 bp, Homo sapiens
agcaaagacctccta

SEQ ID NO: 121780 - DNA, 15 bp, Homo sapiens
cagcaaagacctcct

SEQ ID NO: 121781 - DNA, 15 bp, Homo sapiens
ccagcaaagacctcc

SEQ ID NO: 121782 - DNA, 15 bp, Homo sapiens
cccagcaaagacctc

SEQ ID NO: 121783 - DNA, 15 bp, Homo sapiens
acccagcaaagacct

SEQ ID NO: 121784 - DNA, 15 bp, Homo sapiens
aacccagcaaagacc

SEQ ID NO: 121785 - DNA, 15 bp, Homo sapiens
gaacccagcaaagac

SEQ ID NO: 121786 - DNA, 15 bp, Homo sapiens
agaacccagcaaaga

SEQ ID NO: 121787 - DNA, 15 bp, Homo sapiens
tagaacccagcaaag

SEQ ID NO: 121788 - DNA, 15 bp, Homo sapiens
ctagaacccagcaaa

SEQ ID NO: 121789 - DNA, 15 bp, Homo sapiens
tctagaacccagcaa

SEQ ID NO: 121790 - DNA, 15 bp, Homo sapiens
ctctagaacccagca

SEQ ID NO: 121791 - DNA, 15 bp, Homo sapiens
gctctagaacccagc

SEQ ID NO: 121792 - DNA, 15 bp, Homo sapiens
tgctctagaacccag

SEQ ID NO: 121793 - DNA, 15 bp, Homo sapiens
gtgctctagaaccca

SEQ ID NO: 121794 - DNA, 15 bp, Homo sapiens
agtgctctagaaccc

SEQ ID NO: 121795 - DNA, 15 bp, Homo sapiens
cagtgctctagaacc

SEQ ID NO: 121796 - DNA, 15 bp, Homo sapiens
acagtgctctagaac

SEQ ID NO: 121797 - DNA, 15 bp, Homo sapiens
tacagtgctctagaa

SEQ ID NO: 121798 - DNA, 15 bp, Homo sapiens
ctacagtgctctaga

SEQ ID NO: 121799 - DNA, 15 bp, Homo sapiens
tctacagtgctctag

SEQ ID NO: 121800 - DNA, 15 bp, Homo sapiens
atctacagtgctcta

SEQ ID NO: 121801 - DNA, 15 bp, Homo sapiens
aatctacagtgctct

SEQ ID NO: 121802 - DNA, 15 bp, Homo sapiens
aaatctacagtgctc

SEQ ID NO: 121803 - DNA, 15 bp, Homo sapiens
caaatctacagtgct

SEQ ID NO: 121804 - DNA, 15 bp, Homo sapiens
tcaaatctacagtgc

SEQ ID NO: 121805 - DNA, 15 bp, Homo sapiens
ctcaaatctacagtg

SEQ ID NO: 121806 - DNA, 15 bp, Homo sapiens
cctcaaatctacagt

SEQ ID NO: 121807 - DNA, 15 bp, Homo sapiens
gcctcaaatctacag

SEQ ID NO: 121808 - DNA, 15 bp, Homo sapiens
ggcctcaaatctaca

SEQ ID NO: 121809 - DNA, 15 bp, Homo sapiens
tggcctcaaatctac

SEQ ID NO: 121810 - DNA, 15 bp, Homo sapiens
ttggcctcaaatcta

SEQ ID NO: 121811 - DNA, 15 bp, Homo sapiens
gttggcctcaaatct

SEQ ID NO: 121812 - DNA, 15 bp, Homo sapiens
cgttggcctcaaatc

SEQ ID NO: 121813 - DNA, 15 bp, Homo sapiens
ccgttggcctcaaat

SEQ ID NO: 121814 - DNA, 15 bp, Homo sapiens
cccgttggcctcaaa

SEQ ID NO: 121815 - DNA, 15 bp, Homo sapiens
ccccgttggcctcaa

SEQ ID NO: 121816 - DNA, 15 bp, Homo sapiens
gccccgttggcctca

SEQ ID NO: 121817 - DNA, 15 bp, Homo sapiens
ggccccgttggcctc

SEQ ID NO: 121818 - DNA, 15 bp, Homo sapiens
cggccccgttggcct

SEQ ID NO: 121819 - DNA, 15 bp, Homo sapiens
tcggccccgttggcc

SEQ ID NO: 121820 - DNA, 15 bp, Homo sapiens
gtcggccccgttggc

SEQ ID NO: 121821 - DNA, 15 bp, Homo sapiens
agtcggccccgttgg

SEQ ID NO: 121822 - DNA, 15 bp, Homo sapiens
tagtcggccccgttg

SEQ ID NO: 121823 - DNA, 15 bp, Homo sapiens
ctagtcggccccgtt

SEQ ID NO: 121824 - DNA, 15 bp, Homo sapiens
tctagtcggccccgt

SEQ ID NO: 121825 - DNA, 15 bp, Homo sapiens
gtctagtcggccccg

SEQ ID NO: 121826 - DNA, 15 bp, Homo sapiens
agtctagtcggcccc

SEQ ID NO: 121827 - DNA, 15 bp, Homo sapiens
cagtctagtcggccc

SEQ ID NO: 121828 - DNA, 15 bp, Homo sapiens
tcagtctagtcggcc

SEQ ID NO: 121829 - DNA, 15 bp, Homo sapiens
gtcagtctagtcggc

SEQ ID NO: 121830 - DNA, 15 bp, Homo sapiens
agtcagtctagtcgg

SEQ ID NO: 121831 - DNA, 15 bp, Homo sapiens
aagtcagtctagtcg

SEQ ID NO: 121832 - DNA, 15 bp, Homo sapiens
gaagtcagtctagtc

SEQ ID NO: 121833 - DNA, 15 bp, Homo sapiens
agaagtcagtctagt

SEQ ID NO: 121834 - DNA, 15 bp, Homo sapiens
cagaagtcagtctag

SEQ ID NO: 121835 - DNA, 15 bp, Homo sapiens
acagaagtcagtcta

SEQ ID NO: 121836 - DNA, 15 bp, Homo sapiens
tacagaagtcagtct

SEQ ID NO: 121837 - DNA, 15 bp, Homo sapiens
atacagaagtcagtc

SEQ ID NO: 121838 - DNA, 15 bp, Homo sapiens
aatacagaagtcagt

SEQ ID NO: 121839 - DNA, 15 bp, Homo sapiens
aaatacagaagtcag

SEQ ID NO: 121840 - DNA, 15 bp, Homo sapiens
taaatacagaagtca

SEQ ID NO: 121841 - DNA, 15 bp, Homo sapiens
ataaatacagaagtc

SEQ ID NO: 121842 - DNA, 15 bp, Homo sapiens
gataaatacagaagt

SEQ ID NO: 121843 - DNA, 15 bp, Homo sapiens
ggataaatacagaag

SEQ ID NO: 121844 - DNA, 15 bp, Homo sapiens
aggataaatacagaa

SEQ ID NO: 121845 - DNA, 15 bp, Homo sapiens
aaggataaatacaga

SEQ ID NO: 121846 - DNA, 15 bp, Homo sapiens
aaaggataaatacag

SEQ ID NO: 121847 - DNA, 15 bp, Homo sapiens
caaaggataaataca

SEQ ID NO: 121848 - DNA, 15 bp, Homo sapiens
gcaaaggataaatac

SEQ ID NO: 121849 - DNA, 15 bp, Homo sapiens
agcaaaggataaata

SEQ ID NO: 121850 - DNA, 15 bp, Homo sapiens
cagcaaaggataaat

SEQ ID NO: 121851 - DNA, 15 bp, Homo sapiens
ccagcaaaggataaa

SEQ ID NO: 121852 - DNA, 15 bp, Homo sapiens
accagcaaaggataa

SEQ ID NO: 121853 - DNA, 15 bp, Homo sapiens
caccagcaaaggata

SEQ ID NO: 121854 - DNA, 15 bp, Homo sapiens
acaccagcaaaggat

SEQ ID NO: 121855 - DNA, 15 bp, Homo sapiens
gacaccagcaaagga

SEQ ID NO: 121856 - DNA, 15 bp, Homo sapiens
tgacaccagcaaagg

SEQ ID NO: 121857 - DNA, 15 bp, Homo sapiens
ctgacaccagcaaag

SEQ ID NO: 121858 - DNA, 15 bp, Homo sapiens
cctgacaccagcaaa

SEQ ID NO: 121859 - DNA, 15 bp, Homo sapiens
tcctgacaccagcaa

SEQ ID NO: 121860 - DNA, 15 bp, Homo sapiens
ttcctgacaccagca

SEQ ID NO: 121861 - DNA, 15 bp, Homo sapiens
cttcctgacaccagc

SEQ ID NO: 121862 - DNA, 15 bp, Homo sapiens
acttcctgacaccag

SEQ ID NO: 121863 - DNA, 15 bp, Homo sapiens
aacttcctgacacca

SEQ ID NO: 121864 - DNA, 15 bp, Homo sapiens
gaacttcctgacacc

SEQ ID NO: 121865 - DNA, 15 bp, Homo sapiens
ggaacttcctgacac

SEQ ID NO: 121866 - DNA, 15 bp, Homo sapiens
aggaacttcctgaca

SEQ ID NO: 121867 - DNA, 15 bp, Homo sapiens
aaggaacttcctgac

SEQ ID NO: 121868 - DNA, 15 bp, Homo sapiens
aaaggaacttcctga

SEQ ID NO: 121869 - DNA, 15 bp, Homo sapiens
gaaaggaacttcctg

SEQ ID NO: 121870 - DNA, 15 bp, Homo sapiens
ggaaaggaacttcct

SEQ ID NO: 121871 - DNA, 15 bp, Homo sapiens
aggaaaggaacttcc

SEQ ID NO: 121872 - DNA, 15 bp, Homo sapiens
aaggaaaggaacttc

SEQ ID NO: 121873 - DNA, 15 bp, Homo sapiens
aaaggaaaggaactt

SEQ ID NO: 121874 - DNA, 15 bp, Homo sapiens
gaaaggaaaggaact

SEQ ID NO: 121875 - DNA, 15 bp, Homo sapiens
agaaaggaaaggaac

SEQ ID NO: 121876 - DNA, 15 bp, Homo sapiens
cagaaaggaaaggaa

SEQ ID NO: 121877 - DNA, 15 bp, Homo sapiens
ccagaaaggaaagga

SEQ ID NO: 121878 - DNA, 15 bp, Homo sapiens
tccagaaaggaaagg

SEQ ID NO: 121879 - DNA, 15 bp, Homo sapiens
ttccagaaaggaaag

SEQ ID NO: 121880 - DNA, 15 bp, Homo sapiens
tttccagaaaggaaa

SEQ ID NO: 121881 - DNA, 15 bp, Homo sapiens
ttttccagaaaggaa

SEQ ID NO: 121882 - DNA, 15 bp, Homo sapiens
attttccagaaagga

SEQ ID NO: 121883 - DNA, 15 bp, Homo sapiens
cattttccagaaagg

SEQ ID NO: 121884 - DNA, 15 bp, Homo sapiens
gcattttccagaaag

SEQ ID NO: 121885 - DNA, 15 bp, Homo sapiens
tgcattttccagaaa

SEQ ID NO: 121886 - DNA, 15 bp, Homo sapiens
ctgcattttccagaa

SEQ ID NO: 121887 - DNA, 15 bp, Homo sapiens
tctgcattttccaga

SEQ ID NO: 121888 - DNA, 15 bp, Homo sapiens
ttctgcattttccag

SEQ ID NO: 121889 - DNA, 15 bp, Homo sapiens
attctgcattttcca

SEQ ID NO: 121890 - DNA, 15 bp, Homo sapiens
cattctgcattttcc

SEQ ID NO: 121891 - DNA, 15 bp, Homo sapiens
ccattctgcattttc

SEQ ID NO: 121892 - DNA, 15 bp, Homo sapiens
cccattctgcatttt

SEQ ID NO: 121893 - DNA, 15 bp, Homo sapiens
acccattctgcattt

SEQ ID NO: 121894 - DNA, 15 bp, Homo sapiens
gacccattctgcatt

SEQ ID NO: 121895 - DNA, 15 bp, Homo sapiens
agacccattctgcat

SEQ ID NO: 121896 - DNA, 15 bp, Homo sapiens
cagacccattctgca

SEQ ID NO: 121897 - DNA, 15 bp, Homo sapiens
tcagacccattctgc

SEQ ID NO: 121898 - DNA, 15 bp, Homo sapiens
ttcagacccattctg

SEQ ID NO: 121899 - DNA, 15 bp, Homo sapiens
tttcagacccattct

SEQ ID NO: 121900 - DNA, 15 bp, Homo sapiens
atttcagacccattc

SEQ ID NO: 121901 - DNA, 15 bp, Homo sapiens
gatttcagacccatt

SEQ ID NO: 121902 - DNA, 15 bp, Homo sapiens
ggatttcagacccat

SEQ ID NO: 121903 - DNA, 15 bp, Homo sapiens
tggatttcagaccca

SEQ ID NO: 121904 - DNA, 15 bp, Homo sapiens
atggatttcagaccc

SEQ ID NO: 121905 - DNA, 15 bp, Homo sapiens
catggatttcagacc

SEQ ID NO: 121906 - DNA, 15 bp, Homo sapiens
gcatggatttcagac

SEQ ID NO: 121907 - DNA, 15 bp, Homo sapiens
ggcatggatttcaga

SEQ ID NO: 121908 - DNA, 15 bp, Homo sapiens
gggcatggatttcag

SEQ ID NO: 121909 - DNA, 15 bp, Homo sapiens
tgggcatggatttca

SEQ ID NO: 121910 - DNA, 15 bp, Homo sapiens
gtgggcatggatttc

SEQ ID NO: 121911 - DNA, 15 bp, Homo sapiens
ggtgggcatggattt

SEQ ID NO: 121912 - DNA, 15 bp, Homo sapiens
aggtgggcatggatt

SEQ ID NO: 121913 - DNA, 15 bp, Homo sapiens
aaggtgggcatggat

SEQ ID NO: 121914 - DNA, 15 bp, Homo sapiens
aaaggtgggcatgga

SEQ ID NO: 121915 - DNA, 15 bp, Homo sapiens
caaaggtgggcatgg

SEQ ID NO: 121916 - DNA, 15 bp, Homo sapiens
ccaaaggtgggcatg

SEQ ID NO: 121917 - DNA, 15 bp, Homo sapiens
gccaaaggtgggcat

SEQ ID NO: 121918 - DNA, 15 bp, Homo sapiens
tgccaaaggtgggca

SEQ ID NO: 121919 - DNA, 15 bp, Homo sapiens
atgccaaaggtgggc

SEQ ID NO: 121920 - DNA, 15 bp, Homo sapiens
catgccaaaggtggg

SEQ ID NO: 121921 - DNA, 15 bp, Homo sapiens
tcatgccaaaggtgg

SEQ ID NO: 121922 - DNA, 15 bp, Homo sapiens
ctcatgccaaaggtg

SEQ ID NO: 121923 - DNA, 15 bp, Homo sapiens
gctcatgccaaaggt

SEQ ID NO: 121924 - DNA, 15 bp, Homo sapiens
agctcatgccaaagg

SEQ ID NO: 121925 - DNA, 15 bp, Homo sapiens
cagctcatgccaaag

SEQ ID NO: 121926 - DNA, 15 bp, Homo sapiens
tcagctcatgccaaa

SEQ ID NO: 121927 - DNA, 15 bp, Homo sapiens
ctcagctcatgccaa

SEQ ID NO: 121928 - DNA, 15 bp, Homo sapiens
cctcagctcatgcca

SEQ ID NO: 121929 - DNA, 15 bp, Homo sapiens
ccctcagctcatgcc

SEQ ID NO: 121930 - DNA, 15 bp, Homo sapiens
accctcagctcatgc

SEQ ID NO: 121931 - DNA, 15 bp, Homo sapiens
aaccctcagctcatg

SEQ ID NO: 121932 - DNA, 15 bp, Homo sapiens
taaccctcagctcat

SEQ ID NO: 121933 - DNA, 15 bp, Homo sapiens
ataaccctcagctca

SEQ ID NO: 121934 - DNA, 15 bp, Homo sapiens
aataaccctcagctc

SEQ ID NO: 121935 - DNA, 15 bp, Homo sapiens
caataaccctcagct

SEQ ID NO: 121936 - DNA, 15 bp, Homo sapiens
gcaataaccctcagc

SEQ ID NO: 121937 - DNA, 15 bp, Homo sapiens
agcaataaccctcag

SEQ ID NO: 121938 - DNA, 15 bp, Homo sapiens
aagcaataaccctca

SEQ ID NO: 121939 - DNA, 15 bp, Homo sapiens
gaagcaataaccctc

SEQ ID NO: 121940 - DNA, 15 bp, Homo sapiens
agaagcaataaccct

SEQ ID NO: 121941 - DNA, 15 bp, Homo sapiens
gagaagcaataaccc

SEQ ID NO: 121942 - DNA, 15 bp, Homo sapiens
tgagaagcaataacc

SEQ ID NO: 121943 - DNA, 15 bp, Homo sapiens
ctgagaagcaataac

SEQ ID NO: 121944 - DNA, 15 bp, Homo sapiens
cctgagaagcaataa

SEQ ID NO: 121945 - DNA, 15 bp, Homo sapiens
ccctgagaagcaata

SEQ ID NO: 121946 - DNA, 15 bp, Homo sapiens
gccctgagaagcaat

SEQ ID NO: 121947 - DNA, 15 bp, Homo sapiens
agccctgagaagcaa

SEQ ID NO: 121948 - DNA, 15 bp, Homo sapiens
aagccctgagaagca

SEQ ID NO: 121949 - DNA, 15 bp, Homo sapiens
gaagccctgagaagc

SEQ ID NO: 121950 - DNA, 15 bp, Homo sapiens
ggaagccctgagaag

SEQ ID NO: 121951 - DNA, 15 bp, Homo sapiens
aggaagccctgagaa

SEQ ID NO: 121952 - DNA, 15 bp, Homo sapiens
aaggaagccctgaga

SEQ ID NO: 121953 - DNA, 15 bp, Homo sapiens
aaaggaagccctgag

SEQ ID NO: 121954 - DNA, 15 bp, Homo sapiens
aaaaggaagccctga

SEQ ID NO: 121955 - DNA, 15 bp, Homo sapiens
gaaaaggaagccctg

SEQ ID NO: 121956 - DNA, 15 bp, Homo sapiens
ggaaaaggaagccct

SEQ ID NO: 121957 - DNA, 15 bp, Homo sapiens
gggaaaaggaagccc

SEQ ID NO: 121958 - DNA, 15 bp, Homo sapiens
agggaaaaggaagcc

SEQ ID NO: 121959 - DNA, 15 bp, Homo sapiens
aagggaaaaggaagc

SEQ ID NO: 121960 - DNA, 15 bp, Homo sapiens
aaagggaaaaggaag

SEQ ID NO: 121961 - DNA, 15 bp, Homo sapiens
gaaagggaaaaggaa

SEQ ID NO: 121962 - DNA, 15 bp, Homo sapiens
ggaaagggaaaagga

SEQ ID NO: 121963 - DNA, 15 bp, Homo sapiens
tggaaagggaaaagg

SEQ ID NO: 121964 - DNA, 15 bp, Homo sapiens
ttggaaagggaaaag

SEQ ID NO: 121965 - DNA, 15 bp, Homo sapiens
tttggaaagggaaaa

SEQ ID NO: 121966 - DNA, 15 bp, Homo sapiens
ttttggaaagggaaa

SEQ ID NO: 121967 - DNA, 15 bp, Homo sapiens
tttttggaaagggaa

SEQ ID NO: 121968 - DNA, 15 bp, Homo sapiens
ttttttggaaaggga

SEQ ID NO: 121969 - DNA, 15 bp, Homo sapiens
attttttggaaaggg

SEQ ID NO: 121970 - DNA, 15 bp, Homo sapiens
aattttttggaaagg

SEQ ID NO: 121971 - DNA, 15 bp, Homo sapiens
taattttttggaaag

SEQ ID NO: 121972 - DNA, 15 bp, Homo sapiens
ctaattttttggaaa

SEQ ID NO: 121973 - DNA, 15 bp, Homo sapiens
cctaattttttggaa

SEQ ID NO: 121974 - DNA, 15 bp, Homo sapiens
acctaattttttgga

SEQ ID NO: 121975 - DNA, 15 bp, Homo sapiens
gacctaattttttgg

SEQ ID NO: 121976 - DNA, 15 bp, Homo sapiens
agacctaattttttg

SEQ ID NO: 121977 - DNA, 15 bp, Homo sapiens
cagacctaatttttt

SEQ ID NO: 121978 - DNA, 15 bp, Homo sapiens
acagacctaattttt

SEQ ID NO: 121979 - DNA, 15 bp, Homo sapiens
cacagacctaatttt

SEQ ID NO: 121980 - DNA, 15 bp, Homo sapiens
tcacagacctaattt

SEQ ID NO: 121981 - DNA, 15 bp, Homo sapiens
ttcacagacctaatt

SEQ ID NO: 121982 - DNA, 15 bp, Homo sapiens
cttcacagacctaat

SEQ ID NO: 121983 - DNA, 15 bp, Homo sapiens
gcttcacagacctaa

SEQ ID NO: 121984 - DNA, 15 bp, Homo sapiens
agcttcacagaccta

SEQ ID NO: 121985 - DNA, 15 bp, Homo sapiens
gagcttcacagacct

SEQ ID NO: 121986 - DNA, 15 bp, Homo sapiens
ggagcttcacagacc

SEQ ID NO: 121987 - DNA, 15 bp, Homo sapiens
aggagcttcacagac

SEQ ID NO: 121988 - DNA, 15 bp, Homo sapiens
aaggagcttcacaga

SEQ ID NO: 121989 - DNA, 15 bp, Homo sapiens
aaaggagcttcacag

SEQ ID NO: 121990 - DNA, 15 bp, Homo sapiens
aaaaggagcttcaca

SEQ ID NO: 121991 - DNA, 15 bp, Homo sapiens
aaaaaggagcttcac

SEQ ID NO: 121992 - DNA, 15 bp, Homo sapiens
caaaaaggagcttca

SEQ ID NO: 121993 - DNA, 15 bp, Homo sapiens
acaaaaaggagcttc

SEQ ID NO: 121994 - DNA, 15 bp, Homo sapiens
gacaaaaaggagctt

SEQ ID NO: 121995 - DNA, 15 bp, Homo sapiens
ggacaaaaaggagct

SEQ ID NO: 121996 - DNA, 15 bp, Homo sapiens
gggacaaaaaggagc

SEQ ID NO: 121997 - DNA, 15 bp, Homo sapiens
ggggacaaaaaggag

SEQ ID NO: 121998 - DNA, 15 bp, Homo sapiens
gggggacaaaaagga

SEQ ID NO: 121999 - DNA, 15 bp, Homo sapiens
cgggggacaaaaagg

SEQ ID NO: 122000 - DNA, 15 bp, Homo sapiens
ccgggggacaaaaag

SEQ ID NO: 122001 - DNA, 15 bp, Homo sapiens
cccgggggacaaaaa

SEQ ID NO: 122002 - DNA, 15 bp, Homo sapiens
gcccgggggacaaaa

SEQ ID NO: 122003 - DNA, 15 bp, Homo sapiens
agcccgggggacaaa

SEQ ID NO: 122004 - DNA, 15 bp, Homo sapiens
aagcccgggggacaa

SEQ ID NO: 122005 - DNA, 15 bp, Homo sapiens
aaagcccgggggaca

SEQ ID NO: 122006 - DNA, 15 bp, Homo sapiens
caaagcccgggggac

SEQ ID NO: 122007 - DNA, 15 bp, Homo sapiens
ccaaagcccggggga

SEQ ID NO: 122008 - DNA, 15 bp, Homo sapiens
tccaaagcccggggg

SEQ ID NO: 122009 - DNA, 15 bp, Homo sapiens
ttccaaagcccgggg

SEQ ID NO: 122010 - DNA, 15 bp, Homo sapiens
cttccaaagcccggg

SEQ ID NO: 122011 - DNA, 15 bp, Homo sapiens
ccttccaaagcccgg

SEQ ID NO: 122012 - DNA, 15 bp, Homo sapiens
tccttccaaagcccg

SEQ ID NO: 122013 - DNA, 15 bp, Homo sapiens
gtccttccaaagccc

SEQ ID NO: 122014 - DNA, 15 bp, Homo sapiens
agtccttccaaagcc

SEQ ID NO: 122015 - DNA, 15 bp, Homo sapiens
tagtccttccaaagc

SEQ ID NO: 122016 - DNA, 15 bp, Homo sapiens
ctagtccttccaaag

SEQ ID NO: 122017 - DNA, 15 bp, Homo sapiens
tctagtccttccaaa

SEQ ID NO: 122018 - DNA, 15 bp, Homo sapiens
ttctagtccttccaa

SEQ ID NO: 122019 - DNA, 15 bp, Homo sapiens
tttctagtccttcca

SEQ ID NO: 122020 - DNA, 15 bp, Homo sapiens
ttttctagtccttcc

SEQ ID NO: 122021 - DNA, 15 bp, Homo sapiens
cttttctagtccttc

SEQ ID NO: 122022 - DNA, 15 bp, Homo sapiens
acttttctagtcctt

SEQ ID NO: 122023 - DNA, 15 bp, Homo sapiens
cacttttctagtcct

SEQ ID NO: 122024 - DNA, 15 bp, Homo sapiens
gcacttttctagtcc

SEQ ID NO: 122025 - DNA, 15 bp, Homo sapiens
ggcacttttctagtc

SEQ ID NO: 122026 - DNA, 15 bp, Homo sapiens
tggcacttttctagt

SEQ ID NO: 122027 - DNA, 15 bp, Homo sapiens
gtggcacttttctag

SEQ ID NO: 122028 - DNA, 15 bp, Homo sapiens
ggtggcacttttcta

SEQ ID NO: 122029 - DNA, 15 bp, Homo sapiens
aggtggcacttttct

SEQ ID NO: 122030 - DNA, 15 bp, Homo sapiens
caggtggcacttttc

SEQ ID NO: 122031 - DNA, 15 bp, Homo sapiens
tcaggtggcactttt

SEQ ID NO: 122032 - DNA, 15 bp, Homo sapiens
ttcaggtggcacttt

SEQ ID NO: 122033 - DNA, 15 bp, Homo sapiens
tttcaggtggcactt

SEQ ID NO: 122034 - DNA, 15 bp, Homo sapiens
ctttcaggtggcact

SEQ ID NO: 122035 - DNA, 15 bp, Homo sapiens
cctttcaggtggcac

SEQ ID NO: 122036 - DNA, 15 bp, Homo sapiens
gcctttcaggtggca

SEQ ID NO: 122037 - DNA, 15 bp, Homo sapiens
tgcctttcaggtggc

SEQ ID NO: 122038 - DNA, 15 bp, Homo sapiens
atgcctttcaggtgg

SEQ ID NO: 122039 - DNA, 15 bp, Homo sapiens
catgcctttcaggtg

SEQ ID NO: 122040 - DNA, 15 bp, Homo sapiens
acatgcctttcaggt

SEQ ID NO: 122041 - DNA, 15 bp, Homo sapiens
aacatgcctttcagg

SEQ ID NO: 122042 - DNA, 15 bp, Homo sapiens
gaacatgcctttcag

SEQ ID NO: 122043 - DNA, 15 bp, Homo sapiens
tgaacatgcctttca

SEQ ID NO: 122044 - DNA, 15 bp, Homo sapiens
ctgaacatgcctttc

SEQ ID NO: 122045 - DNA, 15 bp, Homo sapiens
gctgaacatgccttt

SEQ ID NO: 122046 - DNA, 15 bp, Homo sapiens
agctgaacatgcctt

SEQ ID NO: 122047 - DNA, 15 bp, Homo sapiens
aagctgaacatgcct

SEQ ID NO: 122048 - DNA, 15 bp, Homo sapiens
gaagctgaacatgcc

SEQ ID NO: 122049 - DNA, 15 bp, Homo sapiens
agaagctgaacatgc

SEQ ID NO: 122050 - DNA, 15 bp, Homo sapiens
gagaagctgaacatg

SEQ ID NO: 122051 - DNA, 15 bp, Homo sapiens
tgagaagctgaacat

SEQ ID NO: 122052 - DNA, 15 bp, Homo sapiens
ctgagaagctgaaca

SEQ ID NO: 122053 - DNA, 15 bp, Homo sapiens
tctgagaagctgaac

SEQ ID NO: 122054 - DNA, 15 bp, Homo sapiens
ctctgagaagctgaa

SEQ ID NO: 122055 - DNA, 15 bp, Homo sapiens
gctctgagaagctga

SEQ ID NO: 122056 - DNA, 15 bp, Homo sapiens
tgctctgagaagctg

SEQ ID NO: 122057 - DNA, 15 bp, Homo sapiens
ctgctctgagaagct

SEQ ID NO: 122058 - DNA, 15 bp, Homo sapiens
actgctctgagaagc

SEQ ID NO: 122059 - DNA, 15 bp, Homo sapiens
aactgctctgagaag

SEQ ID NO: 122060 - DNA, 15 bp, Homo sapiens
caactgctctgagaa

SEQ ID NO: 122061 - DNA, 15 bp, Homo sapiens
gcaactgctctgaga

SEQ ID NO: 122062 - DNA, 15 bp, Homo sapiens
tgcaactgctctgag

SEQ ID NO: 122063 - DNA, 15 bp, Homo sapiens
ctgcaactgctctga

SEQ ID NO: 122064 - DNA, 15 bp, Homo sapiens
actgcaactgctctg

SEQ ID NO: 122065 - DNA, 15 bp, Homo sapiens
tactgcaactgctct

SEQ ID NO: 122066 - DNA, 15 bp, Homo sapiens
gtactgcaactgctc

SEQ ID NO: 122067 - DNA, 15 bp, Homo sapiens
agtactgcaactgct

SEQ ID NO: 122068 - DNA, 15 bp, Homo sapiens
aagtactgcaactgc

SEQ ID NO: 122069 - DNA, 15 bp, Homo sapiens
aaagtactgcaactg

SEQ ID NO: 122070 - DNA, 15 bp, Homo sapiens
aaaagtactgcaact

SEQ ID NO: 122071 - DNA, 15 bp, Homo sapiens
aaaaagtactgcaac

SEQ ID NO: 122072 - DNA, 15 bp, Homo sapiens
caaaaagtactgcaa

SEQ ID NO: 122073 - DNA, 15 bp, Homo sapiens
ccaaaaagtactgca

SEQ ID NO: 122074 - DNA, 15 bp, Homo sapiens
accaaaaagtactgc

SEQ ID NO: 122075 - DNA, 15 bp, Homo sapiens
aaccaaaaagtactg

SEQ ID NO: 122076 - DNA, 15 bp, Homo sapiens
taaccaaaaagtact

SEQ ID NO: 122077 - DNA, 15 bp, Homo sapiens
ataaccaaaaagtac

SEQ ID NO: 122078 - DNA, 15 bp, Homo sapiens
cataaccaaaaagta

SEQ ID NO: 122079 - DNA, 15 bp, Homo sapiens
acataaccaaaaagt

SEQ ID NO: 122080 - DNA, 15 bp, Homo sapiens
tacataaccaaaaag

SEQ ID NO: 122081 - DNA, 15 bp, Homo sapiens
ttacataaccaaaaa

SEQ ID NO: 122082 - DNA, 15 bp, Homo sapiens
tttacataaccaaaa

SEQ ID NO: 122083 - DNA, 15 bp, Homo sapiens
gtttacataaccaaa

SEQ ID NO: 122084 - DNA, 15 bp, Homo sapiens
agtttacataaccaa

SEQ ID NO: 122085 - DNA, 15 bp, Homo sapiens
gagtttacataacca

SEQ ID NO: 122086 - DNA, 15 bp, Homo sapiens
tgagtttacataacc

SEQ ID NO: 122087 - DNA, 15 bp, Homo sapiens
ttgagtttacataac

SEQ ID NO: 122088 - DNA, 15 bp, Homo sapiens
attgagtttacataa

SEQ ID NO: 122089 - DNA, 15 bp, Homo sapiens
cattgagtttacata

SEQ ID NO: 122090 - DNA, 15 bp, Homo sapiens
ccattgagtttacat

SEQ ID NO: 122091 - DNA, 15 bp, Homo sapiens
gccattgagtttaca

SEQ ID NO: 122092 - DNA, 15 bp, Homo sapiens
agccattgagtttac

SEQ ID NO: 122093 - DNA, 15 bp, Homo sapiens
tagccattgagttta

SEQ ID NO: 122094 - DNA, 15 bp, Homo sapiens
ctagccattgagttt

SEQ ID NO: 122095 - DNA, 15 bp, Homo sapiens
cctagccattgagtt

SEQ ID NO: 122096 - DNA, 15 bp, Homo sapiens
tcctagccattgagt

SEQ ID NO: 122097 - DNA, 15 bp, Homo sapiens
atcctagccattgag

SEQ ID NO: 122098 - DNA, 15 bp, Homo sapiens
aatcctagccattga

SEQ ID NO: 122099 - DNA, 15 bp, Homo sapiens
gaatcctagccattg

SEQ ID NO: 122100 - DNA, 15 bp, Homo sapiens
ggaatcctagccatt

SEQ ID NO: 122101 - DNA, 15 bp, Homo sapiens
aggaatcctagccat

SEQ ID NO: 122102 - DNA, 15 bp, Homo sapiens
gaggaatcctagcca

SEQ ID NO: 122103 - DNA, 15 bp, Homo sapiens
tgaggaatcctagcc

SEQ ID NO: 122104 - DNA, 15 bp, Homo sapiens
ttgaggaatcctagc

SEQ ID NO: 122105 - DNA, 15 bp, Homo sapiens
tttgaggaatcctag

SEQ ID NO: 122106 - DNA, 15 bp, Homo sapiens
ctttgaggaatccta

SEQ ID NO: 122107 - DNA, 15 bp, Homo sapiens
gctttgaggaatcct

SEQ ID NO: 122108 - DNA, 15 bp, Homo sapiens
ggctttgaggaatcc

SEQ ID NO: 122109 - DNA, 15 bp, Homo sapiens
tggctttgaggaatc

SEQ ID NO: 122110 - DNA, 15 bp, Homo sapiens
atggctttgaggaat

SEQ ID NO: 122111 - DNA, 15 bp, Homo sapiens
aatggctttgaggaa

SEQ ID NO: 122112 - DNA, 15 bp, Homo sapiens
gaatggctttgagga

SEQ ID NO: 122113 - DNA, 15 bp, Homo sapiens
ggaatggctttgagg

SEQ ID NO: 122114 - DNA, 15 bp, Homo sapiens
tggaatggctttgag

SEQ ID NO: 122115 - DNA, 15 bp, Homo sapiens
ctggaatggctttga

SEQ ID NO: 122116 - DNA, 15 bp, Homo sapiens
gctggaatggctttg

SEQ ID NO: 122117 - DNA, 15 bp, Homo sapiens
agctggaatggcttt

SEQ ID NO: 122118 - DNA, 15 bp, Homo sapiens
tagctggaatggctt

SEQ ID NO: 122119 - DNA, 15 bp, Homo sapiens
ttagctggaatggct

SEQ ID NO: 122120 - DNA, 15 bp, Homo sapiens
cttagctggaatggc

SEQ ID NO: 122121 - DNA, 15 bp, Homo sapiens
tcttagctggaatgg

SEQ ID NO: 122122 - DNA, 15 bp, Homo sapiens
atcttagctggaatg

SEQ ID NO: 122123 - DNA, 15 bp, Homo sapiens
aatcttagctggaat

SEQ ID NO: 122124 - DNA, 15 bp, Homo sapiens
gaatcttagctggaa

SEQ ID NO: 122125 - DNA, 15 bp, Homo sapiens
tgaatcttagctgga

SEQ ID NO: 122126 - DNA, 15 bp, Homo sapiens
atgaatcttagctgg

SEQ ID NO: 122127 - DNA, 15 bp, Homo sapiens
tatgaatcttagctg

SEQ ID NO: 122128 - DNA, 15 bp, Homo sapiens
gtatgaatcttagct

SEQ ID NO: 122129 - DNA, 15 bp, Homo sapiens
ggtatgaatcttagc

SEQ ID NO: 122130 - DNA, 15 bp, Homo sapiens
aggtatgaatcttag

SEQ ID NO: 122131 - DNA, 15 bp, Homo sapiens
gaggtatgaatctta

SEQ ID NO: 122132 - DNA, 15 bp, Homo sapiens
tgaggtatgaatctt

SEQ ID NO: 122133 - DNA, 15 bp, Homo sapiens
ctgaggtatgaatct

SEQ ID NO: 122134 - DNA, 15 bp, Homo sapiens
tctgaggtatgaatc

SEQ ID NO: 122135 - DNA, 15 bp, Homo sapiens
ctctgaggtatgaat

SEQ ID NO: 122136 - DNA, 15 bp, Homo sapiens
gctctgaggtatgaa

SEQ ID NO: 122137 - DNA, 15 bp, Homo sapiens
ggctctgaggtatga

SEQ ID NO: 122138 - DNA, 15 bp, Homo sapiens
gggctctgaggtatg

SEQ ID NO: 122139 - DNA, 15 bp, Homo sapiens
tgggctctgaggtat

SEQ ID NO: 122140 - DNA, 15 bp, Homo sapiens
gtgggctctgaggta

SEQ ID NO: 122141 - DNA, 15 bp, Homo sapiens
ggtgggctctgaggt

SEQ ID NO: 122142 - DNA, 15 bp, Homo sapiens
tggtgggctctgagg

SEQ ID NO: 122143 - DNA, 15 bp, Homo sapiens
ttggtgggctctgag

SEQ ID NO: 122144 - DNA, 15 bp, Homo sapiens
tttggtgggctctga

SEQ ID NO: 122145 - DNA, 15 bp, Homo sapiens
ctttggtgggctctg

SEQ ID NO: 122146 - DNA, 15 bp, Homo sapiens
actttggtgggctct

SEQ ID NO: 122147 - DNA, 15 bp, Homo sapiens
cactttggtgggctc

SEQ ID NO: 122148 - DNA, 15 bp, Homo sapiens
ccactttggtgggct

SEQ ID NO: 122149 - DNA, 15 bp, Homo sapiens
gccactttggtgggc

SEQ ID NO: 122150 - DNA, 15 bp, Homo sapiens
tgccactttggtggg

SEQ ID NO: 122151 - DNA, 15 bp, Homo sapiens
ttgccactttggtgg

SEQ ID NO: 122152 - DNA, 15 bp, Homo sapiens
tttgccactttggtg

SEQ ID NO: 122153 - DNA, 15 bp, Homo sapiens
atttgccactttggt

SEQ ID NO: 122154 - DNA, 15 bp, Homo sapiens
gatttgccactttgg

SEQ ID NO: 122155 - DNA, 15 bp, Homo sapiens
tgatttgccactttg

SEQ ID NO: 122156 - DNA, 15 bp, Homo sapiens
atgatttgccacttt

SEQ ID NO: 122157 - DNA, 15 bp, Homo sapiens
tatgatttgccactt

SEQ ID NO: 122158 - DNA, 15 bp, Homo sapiens
ttatgatttgccact

SEQ ID NO: 122159 - DNA, 15 bp, Homo sapiens
tttatgatttgccac

SEQ ID NO: 122160 - DNA, 15 bp, Homo sapiens
atttatgatttgcca

SEQ ID NO: 122161 - DNA, 15 bp, Homo sapiens
tatttatgatttgcc

SEQ ID NO: 122162 - DNA, 15 bp, Homo sapiens
ctatttatgatttgc

SEQ ID NO: 122163 - DNA, 15 bp, Homo sapiens
cctatttatgatttg

SEQ ID NO: 122164 - DNA, 15 bp, Homo sapiens
acctatttatgattt

SEQ ID NO: 122165 - DNA, 15 bp, Homo sapiens
aacctatttatgatt

SEQ ID NO: 122166 - DNA, 15 bp, Homo sapiens
taacctatttatgat

SEQ ID NO: 122167 - DNA, 15 bp, Homo sapiens
ttaacctatttatga

SEQ ID NO: 122168 - DNA, 15 bp, Homo sapiens
tttaacctatttatg

SEQ ID NO: 122169 - DNA, 15 bp, Homo sapiens
ctttaacctatttat

SEQ ID NO: 122170 - DNA, 15 bp, Homo sapiens
gctttaacctattta

SEQ ID NO: 122171 - DNA, 15 bp, Homo sapiens
tgctttaacctattt

SEQ ID NO: 122172 - DNA, 15 bp, Homo sapiens
atgctttaacctatt

SEQ ID NO: 122173 - DNA, 15 bp, Homo sapiens
gatgctttaacctat

SEQ ID NO: 122174 - DNA, 15 bp, Homo sapiens
agatgctttaaccta

SEQ ID NO: 122175 - DNA, 15 bp, Homo sapiens
gagatgctttaacct

SEQ ID NO: 122176 - DNA, 15 bp, Homo sapiens
ggagatgctttaacc

SEQ ID NO: 122177 - DNA, 15 bp, Homo sapiens
gggagatgctttaac

SEQ ID NO: 122178 - DNA, 15 bp, Homo sapiens
ggggagatgctttaa

SEQ ID NO: 122179 - DNA, 15 bp, Homo sapiens
tggggagatgcttta

SEQ ID NO: 122180 - DNA, 15 bp, Homo sapiens
gtggggagatgcttt

SEQ ID NO: 122181 - DNA, 15 bp, Homo sapiens
agtggggagatgctt

SEQ ID NO: 122182 - DNA, 15 bp, Homo sapiens
aagtggggagatgct

SEQ ID NO: 122183 - DNA, 15 bp, Homo sapiens
aaagtggggagatgc

SEQ ID NO: 122184 - DNA, 15 bp, Homo sapiens
gaaagtggggagatg

SEQ ID NO: 122185 - DNA, 15 bp, Homo sapiens
tgaaagtggggagat

SEQ ID NO: 122186 - DNA, 15 bp, Homo sapiens
ttgaaagtggggaga

SEQ ID NO: 122187 - DNA, 15 bp, Homo sapiens
attgaaagtggggag

SEQ ID NO: 122188 - DNA, 15 bp, Homo sapiens
cattgaaagtgggga

SEQ ID NO: 122189 - DNA, 15 bp, Homo sapiens
gcattgaaagtgggg

SEQ ID NO: 122190 - DNA, 15 bp, Homo sapiens
tgcattgaaagtggg

SEQ ID NO: 122191 - DNA, 15 bp, Homo sapiens
ttgcattgaaagtgg

SEQ ID NO: 122192 - DNA, 15 bp, Homo sapiens
cttgcattgaaagtg

SEQ ID NO: 122193 - DNA, 15 bp, Homo sapiens
ccttgcattgaaagt

SEQ ID NO: 122194 - DNA, 15 bp, Homo sapiens
accttgcattgaaag

SEQ ID NO: 122195 - DNA, 15 bp, Homo sapiens
taccttgcattgaaa

SEQ ID NO: 122196 - DNA, 15 bp, Homo sapiens
ataccttgcattgaa

SEQ ID NO: 122197 - DNA, 15 bp, Homo sapiens
aataccttgcattga

SEQ ID NO: 122198 - DNA, 15 bp, Homo sapiens
aaataccttgcattg

SEQ ID NO: 122199 - DNA, 15 bp, Homo sapiens
aaaataccttgcatt

SEQ ID NO: 122200 - DNA, 15 bp, Homo sapiens
caaaataccttgcat

SEQ ID NO: 122201 - DNA, 15 bp, Homo sapiens
ccaaaataccttgca

SEQ ID NO: 122202 - DNA, 15 bp, Homo sapiens
accaaaataccttgc

SEQ ID NO: 122203 - DNA, 15 bp, Homo sapiens
gaccaaaataccttg

SEQ ID NO: 122204 - DNA, 15 bp, Homo sapiens
ggaccaaaatacctt

SEQ ID NO: 122205 - DNA, 15 bp, Homo sapiens
aggaccaaaatacct

SEQ ID NO: 122206 - DNA, 15 bp, Homo sapiens
caggaccaaaatacc

SEQ ID NO: 122207 - DNA, 15 bp, Homo sapiens
acaggaccaaaatac

SEQ ID NO: 122208 - DNA, 15 bp, Homo sapiens
aacaggaccaaaata

SEQ ID NO: 122209 - DNA, 15 bp, Homo sapiens
aaacaggaccaaaat

SEQ ID NO: 122210 - DNA, 15 bp, Homo sapiens
caaacaggaccaaaa

SEQ ID NO: 122211 - DNA, 15 bp, Homo sapiens
ccaaacaggaccaaa

SEQ ID NO: 122212 - DNA, 15 bp, Homo sapiens
accaaacaggaccaa

SEQ ID NO: 122213 - DNA, 15 bp, Homo sapiens
taccaaacaggacca

SEQ ID NO: 122214 - DNA, 15 bp, Homo sapiens
ctaccaaacaggacc

SEQ ID NO: 122215 - DNA, 15 bp, Homo sapiens
tctaccaaacaggac

SEQ ID NO: 122216 - DNA, 15 bp, Homo sapiens
ttctaccaaacagga

SEQ ID NO: 122217 - DNA, 15 bp, Homo sapiens
tttctaccaaacagg

SEQ ID NO: 122218 - DNA, 15 bp, Homo sapiens
ctttctaccaaacag

SEQ ID NO: 122219 - DNA, 15 bp, Homo sapiens
tctttctaccaaaca

SEQ ID NO: 122220 - DNA, 15 bp, Homo sapiens
ttctttctaccaaac

SEQ ID NO: 122221 - DNA, 15 bp, Homo sapiens
tttctttctaccaaa

SEQ ID NO: 122222 - DNA, 15 bp, Homo sapiens
ttttctttctaccaa

SEQ ID NO: 122223 - DNA, 15 bp, Homo sapiens
cttttctttctacca

SEQ ID NO: 122224 - DNA, 15 bp, Homo sapiens
tcttttctttctacc

SEQ ID NO: 122225 - DNA, 15 bp, Homo sapiens
ttcttttctttctac

SEQ ID NO: 122226 - DNA, 15 bp, Homo sapiens
gttcttttctttcta

SEQ ID NO: 122227 - DNA, 15 bp, Homo sapiens
tgttcttttctttct

SEQ ID NO: 122228 - DNA, 15 bp, Homo sapiens
gtgttcttttctttc

SEQ ID NO: 122229 - DNA, 15 bp, Homo sapiens
tgtgttcttttcttt

SEQ ID NO: 122230 - DNA, 15 bp, Homo sapiens
ctgtgttcttttctt

SEQ ID NO: 122231 - DNA, 15 bp, Homo sapiens
cctgtgttcttttct

SEQ ID NO: 122232 - DNA, 15 bp, Homo sapiens
tcctgtgttcttttc

SEQ ID NO: 122233 - DNA, 15 bp, Homo sapiens
ctcctgtgttctttt

SEQ ID NO: 122234 - DNA, 15 bp, Homo sapiens
cctcctgtgttcttt

SEQ ID NO: 122235 - DNA, 15 bp, Homo sapiens
ccctcctgtgttctt

SEQ ID NO: 122236 - DNA, 15 bp, Homo sapiens
cccctcctgtgttct

SEQ ID NO: 122237 - DNA, 15 bp, Homo sapiens
tcccctcctgtgttc

SEQ ID NO: 122238 - DNA, 15 bp, Homo sapiens
ctcccctcctgtgtt

SEQ ID NO: 122239 - DNA, 15 bp, Homo sapiens
tctcccctcctgtgt

SEQ ID NO: 122240 - DNA, 15 bp, Homo sapiens
atctcccctcctgtg

SEQ ID NO: 122241 - DNA, 15 bp, Homo sapiens
aatctcccctcctgt

SEQ ID NO: 122242 - DNA, 15 bp, Homo sapiens
caatctcccctcctg

SEQ ID NO: 122243 - DNA, 15 bp, Homo sapiens
ccaatctcccctcct

SEQ ID NO: 122244 - DNA, 15 bp, Homo sapiens
cccaatctcccctcc

SEQ ID NO: 122245 - DNA, 15 bp, Homo sapiens
tcccaatctcccctc

SEQ ID NO: 122246 - DNA, 15 bp, Homo sapiens
ctcccaatctcccct

SEQ ID NO: 122247 - DNA, 15 bp, Homo sapiens
gctcccaatctcccc

SEQ ID NO: 122248 - DNA, 15 bp, Homo sapiens
ggctcccaatctccc

SEQ ID NO: 122249 - DNA, 15 bp, Homo sapiens
gggctcccaatctcc

SEQ ID NO: 122250 - DNA, 15 bp, Homo sapiens
tgggctcccaatctc

SEQ ID NO: 122251 - DNA, 15 bp, Homo sapiens
gtgggctcccaatct

SEQ ID NO: 122252 - DNA, 15 bp, Homo sapiens
tgtgggctcccaatc

SEQ ID NO: 122253 - DNA, 15 bp, Homo sapiens
gtgtgggctcccaat

SEQ ID NO: 122254 - DNA, 15 bp, Homo sapiens
agtgtgggctcccaa

SEQ ID NO: 122255 - DNA, 15 bp, Homo sapiens
gagtgtgggctccca

SEQ ID NO: 122256 - DNA, 15 bp, Homo sapiens
cgagtgtgggctccc

SEQ ID NO: 122257 - DNA, 15 bp, Homo sapiens
tcgagtgtgggctcc

SEQ ID NO: 122258 - DNA, 15 bp, Homo sapiens
ttcgagtgtgggctc

SEQ ID NO: 122259 - DNA, 15 bp, Homo sapiens
attcgagtgtgggct

SEQ ID NO: 122260 - DNA, 15 bp, Homo sapiens
aattcgagtgtgggc

SEQ ID NO: 122261 - DNA, 15 bp, Homo sapiens
gaattcgagtgtggg

SEQ ID NO: 122262 - DNA, 15 bp, Homo sapiens
agaattcgagtgtgg

SEQ ID NO: 122263 - DNA, 15 bp, Homo sapiens
cagaattcgagtgtg

SEQ ID NO: 122264 - DNA, 15 bp, Homo sapiens
ccagaattcgagtgt

SEQ ID NO: 122265 - DNA, 15 bp, Homo sapiens
accagaattcgagtg

SEQ ID NO: 122266 - DNA, 15 bp, Homo sapiens
aaccagaattcgagt

SEQ ID NO: 122267 - DNA, 15 bp, Homo sapiens
gaaccagaattcgag

SEQ ID NO: 122268 - DNA, 15 bp, Homo sapiens
agaaccagaattcga

SEQ ID NO: 122269 - DNA, 15 bp, Homo sapiens
cagaaccagaattcg

SEQ ID NO: 122270 - DNA, 15 bp, Homo sapiens
gcagaaccagaattc

SEQ ID NO: 122271 - DNA, 15 bp, Homo sapiens
ggcagaaccagaatt

SEQ ID NO: 122272 - DNA, 15 bp, Homo sapiens
tggcagaaccagaat

SEQ ID NO: 122273 - DNA, 15 bp, Homo sapiens
ttggcagaaccagaa

SEQ ID NO: 122274 - DNA, 15 bp, Homo sapiens
tttggcagaaccaga

SEQ ID NO: 122275 - DNA, 15 bp, Homo sapiens
gtttggcagaaccag

SEQ ID NO: 122276 - DNA, 15 bp, Homo sapiens
ggtttggcagaacca

SEQ ID NO: 122277 - DNA, 15 bp, Homo sapiens
tggtttggcagaacc

SEQ ID NO: 122278 - DNA, 15 bp, Homo sapiens
ctggtttggcagaac

SEQ ID NO: 122279 - DNA, 15 bp, Homo sapiens
gctggtttggcagaa

SEQ ID NO: 122280 - DNA, 15 bp, Homo sapiens
ggctggtttggcaga

SEQ ID NO: 122281 - DNA, 15 bp, Homo sapiens
aggctggtttggcag

SEQ ID NO: 122282 - DNA, 15 bp, Homo sapiens
aaggctggtttggca

SEQ ID NO: 122283 - DNA, 15 bp, Homo sapiens
caaggctggtttggc

SEQ ID NO: 122284 - DNA, 15 bp, Homo sapiens
acaaggctggtttgg

SEQ ID NO: 122285 - DNA, 15 bp, Homo sapiens
cacaaggctggtttg

SEQ ID NO: 122286 - DNA, 15 bp, Homo sapiens
tcacaaggctggttt

SEQ ID NO: 122287 - DNA, 15 bp, Homo sapiens
atcacaaggctggtt

SEQ ID NO: 122288 - DNA, 15 bp, Homo sapiens
gatcacaaggctggt

SEQ ID NO: 122289 - DNA, 15 bp, Homo sapiens
agatcacaaggctgg

SEQ ID NO: 122290 - DNA, 15 bp, Homo sapiens
aagatcacaaggctg

SEQ ID NO: 122291 - DNA, 15 bp, Homo sapiens
caagatcacaaggct

SEQ ID NO: 122292 - DNA, 15 bp, Homo sapiens
ccaagatcacaaggc

SEQ ID NO: 122293 - DNA, 15 bp, Homo sapiens
cccaagatcacaagg

SEQ ID NO: 122294 - DNA, 15 bp, Homo sapiens
acccaagatcacaag

SEQ ID NO: 122295 - DNA, 15 bp, Homo sapiens
tacccaagatcacaa

SEQ ID NO: 122296 - DNA, 15 bp, Homo sapiens
ttacccaagatcaca

SEQ ID NO: 122297 - DNA, 15 bp, Homo sapiens
tttacccaagatcac

SEQ ID NO: 122298 - DNA, 15 bp, Homo sapiens
atttacccaagatca

SEQ ID NO: 122299 - DNA, 15 bp, Homo sapiens
aatttacccaagatc

SEQ ID NO: 122300 - DNA, 15 bp, Homo sapiens
gaatttacccaagat

SEQ ID NO: 122301 - DNA, 15 bp, Homo sapiens
ggaatttacccaaga

SEQ ID NO: 122302 - DNA, 15 bp, Homo sapiens
gggaatttacccaag

SEQ ID NO: 122303 - DNA, 15 bp, Homo sapiens
agggaatttacccaa

SEQ ID NO: 122304 - DNA, 15 bp, Homo sapiens
tagggaatttaccca

SEQ ID NO: 122305 - DNA, 15 bp, Homo sapiens
gtagggaatttaccc

SEQ ID NO: 122306 - DNA, 15 bp, Homo sapiens
ggtagggaatttacc

SEQ ID NO: 122307 - DNA, 15 bp, Homo sapiens
tggtagggaatttac

SEQ ID NO: 122308 - DNA, 15 bp, Homo sapiens
gtggtagggaattta

SEQ ID NO: 122309 - DNA, 15 bp, Homo sapiens
ggtggtagggaattt

SEQ ID NO: 122310 - DNA, 15 bp, Homo sapiens
aggtggtagggaatt

SEQ ID NO: 122311 - DNA, 15 bp, Homo sapiens
gaggtggtagggaat

SEQ ID NO: 122312 - DNA, 15 bp, Homo sapiens
agaggtggtagggaa

SEQ ID NO: 122313 - DNA, 15 bp, Homo sapiens
cagaggtggtaggga

SEQ ID NO: 122314 - DNA, 15 bp, Homo sapiens
ccagaggtggtaggg

SEQ ID NO: 122315 - DNA, 15 bp, Homo sapiens
tccagaggtggtagg

SEQ ID NO: 122316 - DNA, 15 bp, Homo sapiens
gtccagaggtggtag

SEQ ID NO: 122317 - DNA, 15 bp, Homo sapiens
agtccagaggtggta

SEQ ID NO: 122318 - DNA, 15 bp, Homo sapiens
gagtccagaggtggt

SEQ ID NO: 122319 - DNA, 15 bp, Homo sapiens
ggagtccagaggtgg

SEQ ID NO: 122320 - DNA, 15 bp, Homo sapiens
tggagtccagaggtg

SEQ ID NO: 122321 - DNA, 15 bp, Homo sapiens
atggagtccagaggt

SEQ ID NO: 122322 - DNA, 15 bp, Homo sapiens
gatggagtccagagg

SEQ ID NO: 122323 - DNA, 15 bp, Homo sapiens
tgatggagtccagag

SEQ ID NO: 122324 - DNA, 15 bp, Homo sapiens
ctgatggagtccaga

SEQ ID NO: 122325 - DNA, 15 bp, Homo sapiens
actgatggagtccag

SEQ ID NO: 122326 - DNA, 15 bp, Homo sapiens
tactgatggagtcca

SEQ ID NO: 122327 - DNA, 15 bp, Homo sapiens
ttactgatggagtcc

SEQ ID NO: 122328 - DNA, 15 bp, Homo sapiens
tttactgatggagtc

SEQ ID NO: 122329 - DNA, 15 bp, Homo sapiens
ttttactgatggagt

SEQ ID NO: 122330 - DNA, 15 bp, Homo sapiens
attttactgatggag

SEQ ID NO: 122331 - DNA, 15 bp, Homo sapiens
aattttactgatgga

SEQ ID NO: 122332 - DNA, 15 bp, Homo sapiens
caattttactgatgg

SEQ ID NO: 122333 - DNA, 15 bp, Homo sapiens
ccaattttactgatg

SEQ ID NO: 122334 - DNA, 15 bp, Homo sapiens
cccaattttactgat

SEQ ID NO: 122335 - DNA, 15 bp, Homo sapiens
gcccaattttactga

SEQ ID NO: 122336 - DNA, 15 bp, Homo sapiens
cgcccaattttactg

SEQ ID NO: 122337 - DNA, 15 bp, Homo sapiens
acgcccaattttact

SEQ ID NO: 122338 - DNA, 15 bp, Homo sapiens
cacgcccaattttac

SEQ ID NO: 122339 - DNA, 15 bp, Homo sapiens
ccacgcccaatttta

SEQ ID NO: 122340 - DNA, 15 bp, Homo sapiens
tccacgcccaatttt

SEQ ID NO: 122341 - DNA, 15 bp, Homo sapiens
gtccacgcccaattt

SEQ ID NO: 122342 - DNA, 15 bp, Homo sapiens
agtccacgcccaatt

SEQ ID NO: 122343 - DNA, 15 bp, Homo sapiens
tagtccacgcccaat

SEQ ID NO: 122344 - DNA, 15 bp, Homo sapiens
ctagtccacgcccaa

SEQ ID NO: 122345 - DNA, 15 bp, Homo sapiens
cctagtccacgccca

SEQ ID NO: 122346 - DNA, 15 bp, Homo sapiens
acctagtccacgccc

SEQ ID NO: 122347 - DNA, 15 bp, Homo sapiens
cacctagtccacgcc

SEQ ID NO: 122348 - DNA, 15 bp, Homo sapiens
tcacctagtccacgc

SEQ ID NO: 122349 - DNA, 15 bp, Homo sapiens
atcacctagtccacg

SEQ ID NO: 122350 - DNA, 15 bp, Homo sapiens
gatcacctagtccac

SEQ ID NO: 122351 - DNA, 15 bp, Homo sapiens
agatcacctagtcca

SEQ ID NO: 122352 - DNA, 15 bp, Homo sapiens
gagatcacctagtcc

SEQ ID NO: 122353 - DNA, 15 bp, Homo sapiens
tgagatcacctagtc

SEQ ID NO: 122354 - DNA, 15 bp, Homo sapiens
atgagatcacctagt

SEQ ID NO: 122355 - DNA, 15 bp, Homo sapiens
tatgagatcacctag

SEQ ID NO: 122356 - DNA, 15 bp, Homo sapiens
ctatgagatcaccta

SEQ ID NO: 122357 - DNA, 15 bp, Homo sapiens
tctatgagatcacct

SEQ ID NO: 122358 - DNA, 15 bp, Homo sapiens
atctatgagatcacc

SEQ ID NO: 122359 - DNA, 15 bp, Homo sapiens
gatctatgagatcac

SEQ ID NO: 122360 - DNA, 15 bp, Homo sapiens
ggatctatgagatca

SEQ ID NO: 122361 - DNA, 15 bp, Homo sapiens
aggatctatgagatc

SEQ ID NO: 122362 - DNA, 15 bp, Homo sapiens
aaggatctatgagat

SEQ ID NO: 122363 - DNA, 15 bp, Homo sapiens
gaaggatctatgaga

SEQ ID NO: 122364 - DNA, 15 bp, Homo sapiens
ggaaggatctatgag

SEQ ID NO: 122365 - DNA, 15 bp, Homo sapiens
aggaaggatctatga

SEQ ID NO: 122366 - DNA, 15 bp, Homo sapiens
caggaaggatctatg

SEQ ID NO: 122367 - DNA, 15 bp, Homo sapiens
gcaggaaggatctat

SEQ ID NO: 122368 - DNA, 15 bp, Homo sapiens
agcaggaaggatcta

SEQ ID NO: 122369 - DNA, 15 bp, Homo sapiens
cagcaggaaggatct

SEQ ID NO: 122370 - DNA, 15 bp, Homo sapiens
ccagcaggaaggatc

SEQ ID NO: 122371 - DNA, 15 bp, Homo sapiens
tccagcaggaaggat

SEQ ID NO: 122372 - DNA, 15 bp, Homo sapiens
ttccagcaggaagga

SEQ ID NO: 122373 - DNA, 15 bp, Homo sapiens
gttccagcaggaagg

SEQ ID NO: 122374 - DNA, 15 bp, Homo sapiens
tgttccagcaggaag

SEQ ID NO: 122375 - DNA, 15 bp, Homo sapiens
atgttccagcaggaa

SEQ ID NO: 122376 - DNA, 15 bp, Homo sapiens
aatgttccagcagga

SEQ ID NO: 122377 - DNA, 15 bp, Homo sapiens
gaatgttccagcagg

SEQ ID NO: 122378 - DNA, 15 bp, Homo sapiens
agaatgttccagcag

SEQ ID NO: 122379 - DNA, 15 bp, Homo sapiens
tagaatgttccagca

SEQ ID NO: 122380 - DNA, 15 bp, Homo sapiens
atagaatgttccagc

SEQ ID NO: 122381 - DNA, 15 bp, Homo sapiens
catagaatgttccag

SEQ ID NO: 122382 - DNA, 15 bp, Homo sapiens
ccatagaatgttcca

SEQ ID NO: 122383 - DNA, 15 bp, Homo sapiens
gccatagaatgttcc

SEQ ID NO: 122384 - DNA, 15 bp, Homo sapiens
agccatagaatgttc

SEQ ID NO: 122385 - DNA, 15 bp, Homo sapiens
aagccatagaatgtt

SEQ ID NO: 122386 - DNA, 15 bp, Homo sapiens
caagccatagaatgt

SEQ ID NO: 122387 - DNA, 15 bp, Homo sapiens
tcaagccatagaatg

SEQ ID NO: 122388 - DNA, 15 bp, Homo sapiens
ttcaagccatagaat

SEQ ID NO: 122389 - DNA, 15 bp, Homo sapiens
attcaagccatagaa

SEQ ID NO: 122390 - DNA, 15 bp, Homo sapiens
aattcaagccataga

SEQ ID NO: 122391 - DNA, 15 bp, Homo sapiens
taattcaagccatag

SEQ ID NO: 122392 - DNA, 15 bp, Homo sapiens
ataattcaagccata

SEQ ID NO: 122393 - DNA, 15 bp, Homo sapiens
tataattcaagccat

SEQ ID NO: 122394 - DNA, 15 bp, Homo sapiens
atataattcaagcca

SEQ ID NO: 122395 - DNA, 15 bp, Homo sapiens
aatataattcaagcc

SEQ ID NO: 122396 - DNA, 15 bp, Homo sapiens
gaatataattcaagc

SEQ ID NO: 122397 - DNA, 15 bp, Homo sapiens
agaatataattcaag

SEQ ID NO: 122398 - DNA, 15 bp, Homo sapiens
gagaatataattcaa

SEQ ID NO: 122399 - DNA, 15 bp, Homo sapiens
ggagaatataattca

SEQ ID NO: 122400 - DNA, 15 bp, Homo sapiens
aggagaatataattc

SEQ ID NO: 122401 - DNA, 15 bp, Homo sapiens
taggagaatataatt

SEQ ID NO: 122402 - DNA, 15 bp, Homo sapiens
ttaggagaatataat

SEQ ID NO: 122403 - DNA, 15 bp, Homo sapiens
attaggagaatataa

SEQ ID NO: 122404 - DNA, 15 bp, Homo sapiens
aattaggagaatata

SEQ ID NO: 122405 - DNA, 15 bp, Homo sapiens
taattaggagaatat

SEQ ID NO: 122406 - DNA, 15 bp, Homo sapiens
ataattaggagaata

SEQ ID NO: 122407 - DNA, 15 bp, Homo sapiens
aataattaggagaat

SEQ ID NO: 122408 - DNA, 15 bp, Homo sapiens
caataattaggagaa

SEQ ID NO: 122409 - DNA, 15 bp, Homo sapiens
acaataattaggaga

SEQ ID NO: 122410 - DNA, 15 bp, Homo sapiens
gacaataattaggag

SEQ ID NO: 122411 - DNA, 15 bp, Homo sapiens
tgacaataattagga

SEQ ID NO: 122412 - DNA, 15 bp, Homo sapiens
ttgacaataattagg

SEQ ID NO: 122413 - DNA, 15 bp, Homo sapiens
tttgacaataattag

SEQ ID NO: 122414 - DNA, 15 bp, Homo sapiens
ttttgacaataatta

SEQ ID NO: 122415 - DNA, 15 bp, Homo sapiens
attttgacaataatt

SEQ ID NO: 122416 - DNA, 15 bp, Homo sapiens
aattttgacaataat

SEQ ID NO: 122417 - DNA, 15 bp, Homo sapiens
caattttgacaataa

SEQ ID NO: 122418 - DNA, 15 bp, Homo sapiens
gcaattttgacaata

SEQ ID NO: 122419 - DNA, 15 bp, Homo sapiens
agcaattttgacaat

SEQ ID NO: 122420 - DNA, 15 bp, Homo sapiens
cagcaattttgacaa

SEQ ID NO: 122421 - DNA, 15 bp, Homo sapiens
acagcaattttgaca

SEQ ID NO: 122422 - DNA, 15 bp, Homo sapiens
aacagcaattttgac

SEQ ID NO: 122423 - DNA, 15 bp, Homo sapiens
taacagcaattttga

SEQ ID NO: 122424 - DNA, 15 bp, Homo sapiens
ataacagcaattttg

SEQ ID NO: 122425 - DNA, 15 bp, Homo sapiens
aataacagcaatttt

SEQ ID NO: 122426 - DNA, 15 bp, Homo sapiens
taataacagcaattt

SEQ ID NO: 122427 - DNA, 15 bp, Homo sapiens
ttaataacagcaatt

SEQ ID NO: 122428 - DNA, 15 bp, Homo sapiens
cttaataacagcaat

SEQ ID NO: 122429 - DNA, 15 bp, Homo sapiens
acttaataacagcaa

SEQ ID NO: 122430 - DNA, 15 bp, Homo sapiens
tacttaataacagca

SEQ ID NO: 122431 - DNA, 15 bp, Homo sapiens
atacttaataacagc

SEQ ID NO: 122432 - DNA, 15 bp, Homo sapiens
gatacttaataacag

SEQ ID NO: 122433 - DNA, 15 bp, Homo sapiens
agatacttaataaca

SEQ ID NO: 122434 - DNA, 15 bp, Homo sapiens
tagatacttaataac

SEQ ID NO: 122435 - DNA, 15 bp, Homo sapiens
gtagatacttaataa

SEQ ID NO: 122436 - DNA, 15 bp, Homo sapiens
agtagatacttaata

SEQ ID NO: 122437 - DNA, 15 bp, Homo sapiens
cagtagatacttaat

SEQ ID NO: 122438 - DNA, 15 bp, Homo sapiens
acagtagatacttaa

SEQ ID NO: 122439 - DNA, 15 bp, Homo sapiens
cacagtagatactta

SEQ ID NO: 122440 - DNA, 15 bp, Homo sapiens
acacagtagatactt

SEQ ID NO: 122441 - DNA, 15 bp, Homo sapiens
cacacagtagatact

SEQ ID NO: 122442 - DNA, 15 bp, Homo sapiens
gcacacagtagatac

SEQ ID NO: 122443 - DNA, 15 bp, Homo sapiens
ggcacacagtagata

SEQ ID NO: 122444 - DNA, 15 bp, Homo sapiens
tggcacacagtagat

SEQ ID NO: 122445 - DNA, 15 bp, Homo sapiens
ctggcacacagtaga

SEQ ID NO: 122446 - DNA, 15 bp, Homo sapiens
cctggcacacagtag

SEQ ID NO: 122447 - DNA, 15 bp, Homo sapiens
gcctggcacacagta

SEQ ID NO: 122448 - DNA, 15 bp, Homo sapiens
tgcctggcacacagt

SEQ ID NO: 122449 - DNA, 15 bp, Homo sapiens
gtgcctggcacacag

SEQ ID NO: 122450 - DNA, 15 bp, Homo sapiens
agtgcctggcacaca

SEQ ID NO: 122451 - DNA, 15 bp, Homo sapiens
aagtgcctggcacac

SEQ ID NO: 122452 - DNA, 15 bp, Homo sapiens
aaagtgcctggcaca

SEQ ID NO: 122453 - DNA, 15 bp, Homo sapiens
taaagtgcctggcac

SEQ ID NO: 122454 - DNA, 15 bp, Homo sapiens
ttaaagtgcctggca

SEQ ID NO: 122455 - DNA, 15 bp, Homo sapiens
tttaaagtgcctggc

SEQ ID NO: 122456 - DNA, 15 bp, Homo sapiens
atttaaagtgcctgg

SEQ ID NO: 122457 - DNA, 15 bp, Homo sapiens
tatttaaagtgcctg

SEQ ID NO: 122458 - DNA, 15 bp, Homo sapiens
ttatttaaagtgcct

SEQ ID NO: 122459 - DNA, 15 bp, Homo sapiens
tttatttaaagtgcc

SEQ ID NO: 122460 - DNA, 15 bp, Homo sapiens
atttatttaaagtgc

SEQ ID NO: 122461 - DNA, 15 bp, Homo sapiens
tatttatttaaagtg

SEQ ID NO: 122462 - DNA, 15 bp, Homo sapiens
atatttatttaaagt

SEQ ID NO: 122463 - DNA, 15 bp, Homo sapiens
aatatttatttaaag

SEQ ID NO: 122464 - DNA, 15 bp, Homo sapiens
caatatttatttaaa

SEQ ID NO: 122465 - DNA, 15 bp, Homo sapiens
acaatatttatttaa

SEQ ID NO: 122466 - DNA, 15 bp, Homo sapiens
cacaatatttattta

SEQ ID NO: 122467 - DNA, 15 bp, Homo sapiens
acacaatatttattt

SEQ ID NO: 122468 - DNA, 15 bp, Homo sapiens
gacacaatatttatt

SEQ ID NO: 122469 - DNA, 15 bp, Homo sapiens
agacacaatatttat

SEQ ID NO: 122470 - DNA, 15 bp, Homo sapiens
tagacacaatattta

SEQ ID NO: 122471 - DNA, 15 bp, Homo sapiens
ttagacacaatattt

SEQ ID NO: 122472 - DNA, 15 bp, Homo sapiens
attagacacaatatt

SEQ ID NO: 122473 - DNA, 15 bp, Homo sapiens
gattagacacaatat

SEQ ID NO: 122474 - DNA, 15 bp, Homo sapiens
agattagacacaata

SEQ ID NO: 122475 - DNA, 15 bp, Homo sapiens
aagattagacacaat

SEQ ID NO: 122476 - DNA, 15 bp, Homo sapiens
gaagattagacacaa

SEQ ID NO: 122477 - DNA, 15 bp, Homo sapiens
tgaagattagacaca

SEQ ID NO: 122478 - DNA, 15 bp, Homo sapiens
ttgaagattagacac

SEQ ID NO: 122479 - DNA, 15 bp, Homo sapiens
tttgaagattagaca

SEQ ID NO: 122480 - DNA, 15 bp, Homo sapiens
ttttgaagattagac

SEQ ID NO: 122481 - DNA, 15 bp, Homo sapiens
gttttgaagattaga

SEQ ID NO: 122482 - DNA, 15 bp, Homo sapiens
tgttttgaagattag

SEQ ID NO: 122483 - DNA, 15 bp, Homo sapiens
ttgttttgaagatta

SEQ ID NO: 122484 - DNA, 15 bp, Homo sapiens
tttgttttgaagatt

SEQ ID NO: 122485 - DNA, 15 bp, Homo sapiens
atttgttttgaagat

SEQ ID NO: 122486 - DNA, 15 bp, Homo sapiens
aatttgttttgaaga

SEQ ID NO: 122487 - DNA, 15 bp, Homo sapiens
aaatttgttttgaag

SEQ ID NO: 122488 - DNA, 15 bp, Homo sapiens
caaatttgttttgaa

SEQ ID NO: 122489 - DNA, 15 bp, Homo sapiens
gcaaatttgttttga

SEQ ID NO: 122490 - DNA, 15 bp, Homo sapiens
tgcaaatttgttttg

SEQ ID NO: 122491 - DNA, 15 bp, Homo sapiens
ttgcaaatttgtttt

SEQ ID NO: 122492 - DNA, 15 bp, Homo sapiens
cttgcaaatttgttt

SEQ ID NO: 122493 - DNA, 15 bp, Homo sapiens
ccttgcaaatttgtt

SEQ ID NO: 122494 - DNA, 15 bp, Homo sapiens
tccttgcaaatttgt

SEQ ID NO: 122495 - DNA, 15 bp, Homo sapiens
ttccttgcaaatttg

SEQ ID NO: 122496 - DNA, 15 bp, Homo sapiens
cttccttgcaaattt

SEQ ID NO: 122497 - DNA, 15 bp, Homo sapiens
ccttccttgcaaatt

SEQ ID NO: 122498 - DNA, 15 bp, Homo sapiens
accttccttgcaaat

SEQ ID NO: 122499 - DNA, 15 bp, Homo sapiens
aaccttccttgcaaa

SEQ ID NO: 122500 - DNA, 15 bp, Homo sapiens
aaaccttccttgcaa

SEQ ID NO: 122501 - DNA, 15 bp, Homo sapiens
aaaaccttccttgca

SEQ ID NO: 122502 - DNA, 15 bp, Homo sapiens
aaaaaccttccttgc

SEQ ID NO: 122503 - DNA, 15 bp, Homo sapiens
caaaaaccttccttg

SEQ ID NO: 122504 - DNA, 15 bp, Homo sapiens
ccaaaaaccttcctt

SEQ ID NO: 122505 - DNA, 15 bp, Homo sapiens
tccaaaaaccttcct

SEQ ID NO: 122506 - DNA, 15 bp, Homo sapiens
ctccaaaaaccttcc

SEQ ID NO: 122507 - DNA, 15 bp, Homo sapiens
tctccaaaaaccttc

SEQ ID NO: 122508 - DNA, 15 bp, Homo sapiens
atctccaaaaacctt

SEQ ID NO: 122509 - DNA, 15 bp, Homo sapiens
tatctccaaaaacct

SEQ ID NO: 122510 - DNA, 15 bp, Homo sapiens
ttatctccaaaaacc

SEQ ID NO: 122511 - DNA, 15 bp, Homo sapiens
cttatctccaaaaac

SEQ ID NO: 122512 - DNA, 15 bp, Homo sapiens
ccttatctccaaaaa

SEQ ID NO: 122513 - DNA, 15 bp, Homo sapiens
tccttatctccaaaa

SEQ ID NO: 122514 - DNA, 15 bp, Homo sapiens
ttccttatctccaaa

SEQ ID NO: 122515 - DNA, 15 bp, Homo sapiens
tttccttatctccaa

SEQ ID NO: 122516 - DNA, 15 bp, Homo sapiens
gtttccttatctcca

SEQ ID NO: 122517 - DNA, 15 bp, Homo sapiens
agtttccttatctcc

SEQ ID NO: 122518 - DNA, 15 bp, Homo sapiens
cagtttccttatctc

SEQ ID NO: 122519 - DNA, 15 bp, Homo sapiens
tcagtttccttatct

SEQ ID NO: 122520 - DNA, 15 bp, Homo sapiens
ctcagtttccttatc

SEQ ID NO: 122521 - DNA, 15 bp, Homo sapiens
tctcagtttccttat

SEQ ID NO: 122522 - DNA, 15 bp, Homo sapiens
gtctcagtttcctta

SEQ ID NO: 122523 - DNA, 15 bp, Homo sapiens
agtctcagtttcctt

SEQ ID NO: 122524 - DNA, 15 bp, Homo sapiens
gagtctcagtttcct

SEQ ID NO: 122525 - DNA, 15 bp, Homo sapiens
tgagtctcagtttcc

SEQ ID NO: 122526 - DNA, 15 bp, Homo sapiens
ctgagtctcagtttc

SEQ ID NO: 122527 - DNA, 15 bp, Homo sapiens
cctgagtctcagttt

SEQ ID NO: 122528 - DNA, 15 bp, Homo sapiens
tcctgagtctcagtt

SEQ ID NO: 122529 - DNA, 15 bp, Homo sapiens
atcctgagtctcagt

SEQ ID NO: 122530 - DNA, 15 bp, Homo sapiens
aatcctgagtctcag

SEQ ID NO: 122531 - DNA, 15 bp, Homo sapiens
taatcctgagtctca

SEQ ID NO: 122532 - DNA, 15 bp, Homo sapiens
ttaatcctgagtctc

SEQ ID NO: 122533 - DNA, 15 bp, Homo sapiens
cttaatcctgagtct

SEQ ID NO: 122534 - DNA, 15 bp, Homo sapiens
acttaatcctgagtc

SEQ ID NO: 122535 - DNA, 15 bp, Homo sapiens
tacttaatcctgagt

SEQ ID NO: 122536 - DNA, 15 bp, Homo sapiens
ttacttaatcctgag

SEQ ID NO: 122537 - DNA, 15 bp, Homo sapiens
gttacttaatcctga

SEQ ID NO: 122538 - DNA, 15 bp, Homo sapiens
tgttacttaatcctg

SEQ ID NO: 122539 - DNA, 15 bp, Homo sapiens
gtgttacttaatcct

SEQ ID NO: 122540 - DNA, 15 bp, Homo sapiens
tgtgttacttaatcc

SEQ ID NO: 122541 - DNA, 15 bp, Homo sapiens
gtgtgttacttaatc

SEQ ID NO: 122542 - DNA, 15 bp, Homo sapiens
ggtgtgttacttaat

SEQ ID NO: 122543 - DNA, 15 bp, Homo sapiens
aggtgtgttacttaa

SEQ ID NO: 122544 - DNA, 15 bp, Homo sapiens
taggtgtgttactta

SEQ ID NO: 122545 - DNA, 15 bp, Homo sapiens
ttaggtgtgttactt

SEQ ID NO: 122546 - DNA, 15 bp, Homo sapiens
tttaggtgtgttact

SEQ ID NO: 122547 - DNA, 15 bp, Homo sapiens
ctttaggtgtgttac

SEQ ID NO: 122548 - DNA, 15 bp, Homo sapiens
actttaggtgtgtta

SEQ ID NO: 122549 - DNA, 15 bp, Homo sapiens
gactttaggtgtgtt

SEQ ID NO: 122550 - DNA, 15 bp, Homo sapiens
tgactttaggtgtgt

SEQ ID NO: 122551 - DNA, 15 bp, Homo sapiens
gtgactttaggtgtg

SEQ ID NO: 122552 - DNA, 15 bp, Homo sapiens
tgtgactttaggtgt

SEQ ID NO: 122553 - DNA, 15 bp, Homo sapiens
ctgtgactttaggtg

SEQ ID NO: 122554 - DNA, 15 bp, Homo sapiens
cctgtgactttaggt

SEQ ID NO: 122555 - DNA, 15 bp, Homo sapiens
acctgtgactttagg

SEQ ID NO: 122556 - DNA, 15 bp, Homo sapiens
cacctgtgactttag

SEQ ID NO: 122557 - DNA, 15 bp, Homo sapiens
tcacctgtgacttta

SEQ ID NO: 122558 - DNA, 15 bp, Homo sapiens
ctcacctgtgacttt

SEQ ID NO: 122559 - DNA, 15 bp, Homo sapiens
gctcacctgtgactt

SEQ ID NO: 122560 - DNA, 15 bp, Homo sapiens
agctcacctgtgact

SEQ ID NO: 122561 - DNA, 15 bp, Homo sapiens
aagctcacctgtgac

SEQ ID NO: 122562 - DNA, 15 bp, Homo sapiens
caagctcacctgtga

SEQ ID NO: 122563 - DNA, 15 bp, Homo sapiens
ccaagctcacctgtg

SEQ ID NO: 122564 - DNA, 15 bp, Homo sapiens
tccaagctcacctgt

SEQ ID NO: 122565 - DNA, 15 bp, Homo sapiens
ttccaagctcacctg

SEQ ID NO: 122566 - DNA, 15 bp, Homo sapiens
gttccaagctcacct

SEQ ID NO: 122567 - DNA, 15 bp, Homo sapiens
agttccaagctcacc

SEQ ID NO: 122568 - DNA, 15 bp, Homo sapiens
cagttccaagctcac

SEQ ID NO: 122569 - DNA, 15 bp, Homo sapiens
tcagttccaagctca

SEQ ID NO: 122570 - DNA, 15 bp, Homo sapiens
ttcagttccaagctc

SEQ ID NO: 122571 - DNA, 15 bp, Homo sapiens
gttcagttccaagct

SEQ ID NO: 122572 - DNA, 15 bp, Homo sapiens
ggttcagttccaagc

SEQ ID NO: 122573 - DNA, 15 bp, Homo sapiens
gggttcagttccaag

SEQ ID NO: 122574 - DNA, 15 bp, Homo sapiens
tgggttcagttccaa

SEQ ID NO: 122575 - DNA, 15 bp, Homo sapiens
ttgggttcagttcca

SEQ ID NO: 122576 - DNA, 15 bp, Homo sapiens
cttgggttcagttcc

SEQ ID NO: 122577 - DNA, 15 bp, Homo sapiens
acttgggttcagttc

SEQ ID NO: 122578 - DNA, 15 bp, Homo sapiens
cacttgggttcagtt

SEQ ID NO: 122579 - DNA, 15 bp, Homo sapiens
acacttgggttcagt

SEQ ID NO: 122580 - DNA, 15 bp, Homo sapiens
cacacttgggttcag

SEQ ID NO: 122581 - DNA, 15 bp, Homo sapiens
gcacacttgggttca

SEQ ID NO: 122582 - DNA, 15 bp, Homo sapiens
ggcacacttgggttc

SEQ ID NO: 122583 - DNA, 15 bp, Homo sapiens
gggcacacttgggtt

SEQ ID NO: 122584 - DNA, 15 bp, Homo sapiens
ggggcacacttgggt

SEQ ID NO: 122585 - DNA, 15 bp, Homo sapiens
gggggcacacttggg

SEQ ID NO: 122586 - DNA, 15 bp, Homo sapiens
tgggggcacacttgg

SEQ ID NO: 122587 - DNA, 15 bp, Homo sapiens
gtgggggcacacttg

SEQ ID NO: 122588 - DNA, 15 bp, Homo sapiens
agtgggggcacactt

SEQ ID NO: 122589 - DNA, 15 bp, Homo sapiens
gagtgggggcacact

SEQ ID NO: 122590 - DNA, 15 bp, Homo sapiens
ggagtgggggcacac

SEQ ID NO: 122591 - DNA, 15 bp, Homo sapiens
tggagtgggggcaca

SEQ ID NO: 122592 - DNA, 15 bp, Homo sapiens
gtggagtgggggcac

SEQ ID NO: 122593 - DNA, 15 bp, Homo sapiens
agtggagtgggggca

SEQ ID NO: 122594 - DNA, 15 bp, Homo sapiens
cagtggagtgggggc

SEQ ID NO: 122595 - DNA, 15 bp, Homo sapiens
ccagtggagtggggg

SEQ ID NO: 122596 - DNA, 15 bp, Homo sapiens
tccagtggagtgggg

SEQ ID NO: 122597 - DNA, 15 bp, Homo sapiens
ttccagtggagtggg

SEQ ID NO: 122598 - DNA, 15 bp, Homo sapiens
attccagtggagtgg

SEQ ID NO: 122599 - DNA, 15 bp, Homo sapiens
aattccagtggagtg

SEQ ID NO: 122600 - DNA, 15 bp, Homo sapiens
aaattccagtggagt

SEQ ID NO: 122601 - DNA, 15 bp, Homo sapiens
caaattccagtggag

SEQ ID NO: 122602 - DNA, 15 bp, Homo sapiens
gcaaattccagtgga

SEQ ID NO: 122603 - DNA, 15 bp, Homo sapiens
agcaaattccagtgg

SEQ ID NO: 122604 - DNA, 15 bp, Homo sapiens
aagcaaattccagtg

SEQ ID NO: 122605 - DNA, 15 bp, Homo sapiens
caagcaaattccagt

SEQ ID NO: 122606 - DNA, 15 bp, Homo sapiens
gcaagcaaattccag

SEQ ID NO: 122607 - DNA, 15 bp, Homo sapiens
ggcaagcaaattcca

SEQ ID NO: 122608 - DNA, 15 bp, Homo sapiens
tggcaagcaaattcc

SEQ ID NO: 122609 - DNA, 15 bp, Homo sapiens
ctggcaagcaaattc

SEQ ID NO: 122610 - DNA, 15 bp, Homo sapiens
cctggcaagcaaatt

SEQ ID NO: 122611 - DNA, 15 bp, Homo sapiens
tcctggcaagcaaat

SEQ ID NO: 122612 - DNA, 15 bp, Homo sapiens
atcctggcaagcaaa

SEQ ID NO: 122613 - DNA, 15 bp, Homo sapiens
catcctggcaagcaa

SEQ ID NO: 122614 - DNA, 15 bp, Homo sapiens
gcatcctggcaagca

SEQ ID NO: 122615 - DNA, 15 bp, Homo sapiens
ggcatcctggcaagc

SEQ ID NO: 122616 - DNA, 15 bp, Homo sapiens
tggcatcctggcaag

SEQ ID NO: 122617 - DNA, 15 bp, Homo sapiens
ttggcatcctggcaa

SEQ ID NO: 122618 - DNA, 15 bp, Homo sapiens
attggcatcctggca

SEQ ID NO: 122619 - DNA, 15 bp, Homo sapiens
cattggcatcctggc

SEQ ID NO: 122620 - DNA, 15 bp, Homo sapiens
tcattggcatcctgg

SEQ ID NO: 122621 - DNA, 15 bp, Homo sapiens
ctcattggcatcctg

SEQ ID NO: 122622 - DNA, 15 bp, Homo sapiens
actcattggcatcct

SEQ ID NO: 122623 - DNA, 15 bp, Homo sapiens
aactcattggcatcc

SEQ ID NO: 122624 - DNA, 15 bp, Homo sapiens
caactcattggcatc

SEQ ID NO: 122625 - DNA, 15 bp, Homo sapiens
acaactcattggcat

SEQ ID NO: 122626 - DNA, 15 bp, Homo sapiens
tacaactcattggca

SEQ ID NO: 122627 - DNA, 15 bp, Homo sapiens
ctacaactcattggc

SEQ ID NO: 122628 - DNA, 15 bp, Homo sapiens
gctacaactcattgg

SEQ ID NO: 122629 - DNA, 15 bp, Homo sapiens
agctacaactcattg

SEQ ID NO: 122630 - DNA, 15 bp, Homo sapiens
aagctacaactcatt

SEQ ID NO: 122631 - DNA, 15 bp, Homo sapiens
gaagctacaactcat

SEQ ID NO: 122632 - DNA, 15 bp, Homo sapiens
tgaagctacaactca

SEQ ID NO: 122633 - DNA, 15 bp, Homo sapiens
atgaagctacaactc

SEQ ID NO: 122634 - DNA, 15 bp, Homo sapiens
aatgaagctacaact

SEQ ID NO: 122635 - DNA, 15 bp, Homo sapiens
aaatgaagctacaac

SEQ ID NO: 122636 - DNA, 15 bp, Homo sapiens
aaaatgaagctacaa

SEQ ID NO: 122637 - DNA, 15 bp, Homo sapiens
aaaaatgaagctaca

SEQ ID NO: 122638 - DNA, 15 bp, Homo sapiens
gaaaaatgaagctac

SEQ ID NO: 122639 - DNA, 15 bp, Homo sapiens
agaaaaatgaagcta

SEQ ID NO: 122640 - DNA, 15 bp, Homo sapiens
aagaaaaatgaagct

SEQ ID NO: 122641 - DNA, 15 bp, Homo sapiens
taagaaaaatgaagc

SEQ ID NO: 122642 - DNA, 15 bp, Homo sapiens
ctaagaaaaatgaag

SEQ ID NO: 122643 - DNA, 15 bp, Homo sapiens
tctaagaaaaatgaa

SEQ ID NO: 122644 - DNA, 15 bp, Homo sapiens
ctctaagaaaaatga

SEQ ID NO: 122645 - DNA, 15 bp, Homo sapiens
tctctaagaaaaatg

SEQ ID NO: 122646 - DNA, 15 bp, Homo sapiens
gtctctaagaaaaat

SEQ ID NO: 122647 - DNA, 15 bp, Homo sapiens
agtctctaagaaaaa

SEQ ID NO: 122648 - DNA, 15 bp, Homo sapiens
aagtctctaagaaaa

SEQ ID NO: 122649 - DNA, 15 bp, Homo sapiens
aaagtctctaagaaa

SEQ ID NO: 122650 - DNA, 15 bp, Homo sapiens
gaaagtctctaagaa

SEQ ID NO: 122651 - DNA, 15 bp, Homo sapiens
ggaaagtctctaaga

SEQ ID NO: 122652 - DNA, 15 bp, Homo sapiens
aggaaagtctctaag

SEQ ID NO: 122653 - DNA, 15 bp, Homo sapiens
caggaaagtctctaa

SEQ ID NO: 122654 - DNA, 15 bp, Homo sapiens
ccaggaaagtctcta

SEQ ID NO: 122655 - DNA, 15 bp, Homo sapiens
gccaggaaagtctct

SEQ ID NO: 122656 - DNA, 15 bp, Homo sapiens
agccaggaaagtctc

SEQ ID NO: 122657 - DNA, 15 bp, Homo sapiens
cagccaggaaagtct

SEQ ID NO: 122658 - DNA, 15 bp, Homo sapiens
acagccaggaaagtc

SEQ ID NO: 122659 - DNA, 15 bp, Homo sapiens
cacagccaggaaagt

SEQ ID NO: 122660 - DNA, 15 bp, Homo sapiens
ccacagccaggaaag

SEQ ID NO: 122661 - DNA, 15 bp, Homo sapiens
accacagccaggaaa

SEQ ID NO: 122662 - DNA, 15 bp, Homo sapiens
aaccacagccaggaa

SEQ ID NO: 122663 - DNA, 15 bp, Homo sapiens
caaccacagccagga

SEQ ID NO: 122664 - DNA, 15 bp, Homo sapiens
tcaaccacagccagg

SEQ ID NO: 122665 - DNA, 15 bp, Homo sapiens
ttcaaccacagccag

SEQ ID NO: 122666 - DNA, 15 bp, Homo sapiens
gttcaaccacagcca

SEQ ID NO: 122667 - DNA, 15 bp, Homo sapiens
tgttcaaccacagcc

SEQ ID NO: 122668 - DNA, 15 bp, Homo sapiens
ttgttcaaccacagc

SEQ ID NO: 122669 - DNA, 15 bp, Homo sapiens
attgttcaaccacag

SEQ ID NO: 122670 - DNA, 15 bp, Homo sapiens
cattgttcaaccaca

SEQ ID NO: 122671 - DNA, 15 bp, Homo sapiens
tcattgttcaaccac

SEQ ID NO: 122672 - DNA, 15 bp, Homo sapiens
ttcattgttcaacca

SEQ ID NO: 122673 - DNA, 15 bp, Homo sapiens
tttcattgttcaacc

SEQ ID NO: 122674 - DNA, 15 bp, Homo sapiens
ttttcattgttcaac

SEQ ID NO: 122675 - DNA, 15 bp, Homo sapiens
cttttcattgttcaa

SEQ ID NO: 122676 - DNA, 15 bp, Homo sapiens
ccttttcattgttca

SEQ ID NO: 122677 - DNA, 15 bp, Homo sapiens
gccttttcattgttc

SEQ ID NO: 122678 - DNA, 15 bp, Homo sapiens
ggccttttcattgtt

SEQ ID NO: 122679 - DNA, 15 bp, Homo sapiens
gggccttttcattgt

SEQ ID NO: 122680 - DNA, 15 bp, Homo sapiens
agggccttttcattg

SEQ ID NO: 122681 - DNA, 15 bp, Homo sapiens
gagggccttttcatt

SEQ ID NO: 122682 - DNA, 15 bp, Homo sapiens
agagggccttttcat

SEQ ID NO: 122683 - DNA, 15 bp, Homo sapiens
tagagggccttttca

SEQ ID NO: 122684 - DNA, 15 bp, Homo sapiens
ctagagggccttttc

SEQ ID NO: 122685 - DNA, 15 bp, Homo sapiens
actagagggcctttt

SEQ ID NO: 122686 - DNA, 15 bp, Homo sapiens
cactagagggccttt

SEQ ID NO: 122687 - DNA, 15 bp, Homo sapiens
ccactagagggcctt

SEQ ID NO: 122688 - DNA, 15 bp, Homo sapiens
accactagagggcct

SEQ ID NO: 122689 - DNA, 15 bp, Homo sapiens
caccactagagggcc

SEQ ID NO: 122690 - DNA, 15 bp, Homo sapiens
acaccactagagggc

SEQ ID NO: 122691 - DNA, 15 bp, Homo sapiens
aacaccactagaggg

SEQ ID NO: 122692 - DNA, 15 bp, Homo sapiens
aaacaccactagagg

SEQ ID NO: 122693 - DNA, 15 bp, Homo sapiens
caaacaccactagag

SEQ ID NO: 122694 - DNA, 15 bp, Homo sapiens
acaaacaccactaga

SEQ ID NO: 122695 - DNA, 15 bp, Homo sapiens
aacaaacaccactag

SEQ ID NO: 122696 - DNA, 15 bp, Homo sapiens
aaacaaacaccacta

SEQ ID NO: 122697 - DNA, 15 bp, Homo sapiens
aaaacaaacaccact

SEQ ID NO: 122698 - DNA, 15 bp, Homo sapiens
taaaacaaacaccac

SEQ ID NO: 122699 - DNA, 15 bp, Homo sapiens
ctaaaacaaacacca

SEQ ID NO: 122700 - DNA, 15 bp, Homo sapiens
cctaaaacaaacacc

SEQ ID NO: 122701 - DNA, 15 bp, Homo sapiens
ccctaaaacaaacac

SEQ ID NO: 122702 - DNA, 15 bp, Homo sapiens
tccctaaaacaaaca

SEQ ID NO: 122703 - DNA, 15 bp, Homo sapiens
gtccctaaaacaaac

SEQ ID NO: 122704 - DNA, 15 bp, Homo sapiens
tgtccctaaaacaaa

SEQ ID NO: 122705 - DNA, 15 bp, Homo sapiens
gtgtccctaaaacaa

SEQ ID NO: 122706 - DNA, 15 bp, Homo sapiens
agtgtccctaaaaca

SEQ ID NO: 122707 - DNA, 15 bp, Homo sapiens
aagtgtccctaaaac

SEQ ID NO: 122708 - DNA, 15 bp, Homo sapiens
taagtgtccctaaaa

SEQ ID NO: 122709 - DNA, 15 bp, Homo sapiens
ctaagtgtccctaaa

SEQ ID NO: 122710 - DNA, 15 bp, Homo sapiens
cctaagtgtccctaa

SEQ ID NO: 122711 - DNA, 15 bp, Homo sapiens
acctaagtgtcccta

SEQ ID NO: 122712 - DNA, 15 bp, Homo sapiens
cacctaagtgtccct

SEQ ID NO: 122713 - DNA, 15 bp, Homo sapiens
tcacctaagtgtccc

SEQ ID NO: 122714 - DNA, 15 bp, Homo sapiens
atcacctaagtgtcc

SEQ ID NO: 122715 - DNA, 15 bp, Homo sapiens
tatcacctaagtgtc

SEQ ID NO: 122716 - DNA, 15 bp, Homo sapiens
ttatcacctaagtgt

SEQ ID NO: 122717 - DNA, 15 bp, Homo sapiens
gttatcacctaagtg

SEQ ID NO: 122718 - DNA, 15 bp, Homo sapiens
tgttatcacctaagt

SEQ ID NO: 122719 - DNA, 15 bp, Homo sapiens
ttgttatcacctaag

SEQ ID NO: 122720 - DNA, 15 bp, Homo sapiens
attgttatcacctaa

SEQ ID NO: 122721 - DNA, 15 bp, Homo sapiens
aattgttatcaccta

SEQ ID NO: 122722 - DNA, 15 bp, Homo sapiens
gaattgttatcacct

SEQ ID NO: 122723 - DNA, 15 bp, Homo sapiens
agaattgttatcacc

SEQ ID NO: 122724 - DNA, 15 bp, Homo sapiens
cagaattgttatcac

SEQ ID NO: 122725 - DNA, 15 bp, Homo sapiens
ccagaattgttatca

SEQ ID NO: 122726 - DNA, 15 bp, Homo sapiens
accagaattgttatc

SEQ ID NO: 122727 - DNA, 15 bp, Homo sapiens
taccagaattgttat

SEQ ID NO: 122728 - DNA, 15 bp, Homo sapiens
ataccagaattgtta

SEQ ID NO: 122729 - DNA, 15 bp, Homo sapiens
aataccagaattgtt

SEQ ID NO: 122730 - DNA, 15 bp, Homo sapiens
gaataccagaattgt

SEQ ID NO: 122731 - DNA, 15 bp, Homo sapiens
agaataccagaattg

SEQ ID NO: 122732 - DNA, 15 bp, Homo sapiens
aagaataccagaatt

SEQ ID NO: 122733 - DNA, 15 bp, Homo sapiens
aaagaataccagaat

SEQ ID NO: 122734 - DNA, 15 bp, Homo sapiens
gaaagaataccagaa

SEQ ID NO: 122735 - DNA, 15 bp, Homo sapiens
ggaaagaataccaga

SEQ ID NO: 122736 - DNA, 15 bp, Homo sapiens
gggaaagaataccag

SEQ ID NO: 122737 - DNA, 15 bp, Homo sapiens
tgggaaagaatacca

SEQ ID NO: 122738 - DNA, 15 bp, Homo sapiens
ctgggaaagaatacc

SEQ ID NO: 122739 - DNA, 15 bp, Homo sapiens
tctgggaaagaatac

SEQ ID NO: 122740 - DNA, 15 bp, Homo sapiens
gtctgggaaagaata

SEQ ID NO: 122741 - DNA, 15 bp, Homo sapiens
tgtctgggaaagaat

SEQ ID NO: 122742 - DNA, 15 bp, Homo sapiens
atgtctgggaaagaa

SEQ ID NO: 122743 - DNA, 15 bp, Homo sapiens
catgtctgggaaaga

SEQ ID NO: 122744 - DNA, 15 bp, Homo sapiens
acatgtctgggaaag

SEQ ID NO: 122745 - DNA, 15 bp, Homo sapiens
tacatgtctgggaaa

SEQ ID NO: 122746 - DNA, 15 bp, Homo sapiens
ttacatgtctgggaa

SEQ ID NO: 122747 - DNA, 15 bp, Homo sapiens
gttacatgtctggga

SEQ ID NO: 122748 - DNA, 15 bp, Homo sapiens
tgttacatgtctggg

SEQ ID NO: 122749 - DNA, 15 bp, Homo sapiens
ttgttacatgtctgg

SEQ ID NO: 122750 - DNA, 15 bp, Homo sapiens
cttgttacatgtctg

SEQ ID NO: 122751 - DNA, 15 bp, Homo sapiens
tcttgttacatgtct

SEQ ID NO: 122752 - DNA, 15 bp, Homo sapiens
ctcttgttacatgtc

SEQ ID NO: 122753 - DNA, 15 bp, Homo sapiens
actcttgttacatgt

SEQ ID NO: 122754 - DNA, 15 bp, Homo sapiens
tactcttgttacatg

SEQ ID NO: 122755 - DNA, 15 bp, Homo sapiens
ttactcttgttacat

SEQ ID NO: 122756 - DNA, 15 bp, Homo sapiens
gttactcttgttaca

SEQ ID NO: 122757 - DNA, 15 bp, Homo sapiens
tgttactcttgttac

SEQ ID NO: 122758 - DNA, 15 bp, Homo sapiens
atgttactcttgtta

SEQ ID NO: 122759 - DNA, 15 bp, Homo sapiens
catgttactcttgtt

SEQ ID NO: 122760 - DNA, 15 bp, Homo sapiens
acatgttactcttgt

SEQ ID NO: 122761 - DNA, 15 bp, Homo sapiens
cacatgttactcttg

SEQ ID NO: 122762 - DNA, 15 bp, Homo sapiens
acacatgttactctt

SEQ ID NO: 122763 - DNA, 15 bp, Homo sapiens
cacacatgttactct

SEQ ID NO: 122764 - DNA, 15 bp, Homo sapiens
tcacacatgttactc

SEQ ID NO: 122765 - DNA, 15 bp, Homo sapiens
ttcacacatgttact

SEQ ID NO: 122766 - DNA, 15 bp, Homo sapiens
tttcacacatgttac

SEQ ID NO: 122767 - DNA, 15 bp, Homo sapiens
ctttcacacatgtta

SEQ ID NO: 122768 - DNA, 15 bp, Homo sapiens
gctttcacacatgtt

SEQ ID NO: 122769 - DNA, 15 bp, Homo sapiens
tgctttcacacatgt

SEQ ID NO: 122770 - DNA, 15 bp, Homo sapiens
ctgctttcacacatg

SEQ ID NO: 122771 - DNA, 15 bp, Homo sapiens
gctgctttcacacat

SEQ ID NO: 122772 - DNA, 15 bp, Homo sapiens
tgctgctttcacaca

SEQ ID NO: 122773 - DNA, 15 bp, Homo sapiens
ttgctgctttcacac

SEQ ID NO: 122774 - DNA, 15 bp, Homo sapiens
tttgctgctttcaca

SEQ ID NO: 122775 - DNA, 15 bp, Homo sapiens
ctttgctgctttcac

SEQ ID NO: 122776 - DNA, 15 bp, Homo sapiens
tctttgctgctttca

SEQ ID NO: 122777 - DNA, 15 bp, Homo sapiens
ctctttgctgctttc

SEQ ID NO: 122778 - DNA, 15 bp, Homo sapiens
cctctttgctgcttt

SEQ ID NO: 122779 - DNA, 15 bp, Homo sapiens
gcctctttgctgctt

SEQ ID NO: 122780 - DNA, 15 bp, Homo sapiens
tgcctctttgctgct

SEQ ID NO: 122781 - DNA, 15 bp, Homo sapiens
gtgcctctttgctgc

SEQ ID NO: 122782 - DNA, 15 bp, Homo sapiens
agtgcctctttgctg

SEQ ID NO: 122783 - DNA, 15 bp, Homo sapiens
cagtgcctctttgct

SEQ ID NO: 122784 - DNA, 15 bp, Homo sapiens
ccagtgcctctttgc

SEQ ID NO: 122785 - DNA, 15 bp, Homo sapiens
gccagtgcctctttg

SEQ ID NO: 122786 - DNA, 15 bp, Homo sapiens
tgccagtgcctcttt

SEQ ID NO: 122787 - DNA, 15 bp, Homo sapiens
ctgccagtgcctctt

SEQ ID NO: 122788 - DNA, 15 bp, Homo sapiens
tctgccagtgcctct

SEQ ID NO: 122789 - DNA, 15 bp, Homo sapiens
ttctgccagtgcctc

SEQ ID NO: 122790 - DNA, 15 bp, Homo sapiens
tttctgccagtgcct

SEQ ID NO: 122791 - DNA, 15 bp, Homo sapiens
ttttctgccagtgcc

SEQ ID NO: 122792 - DNA, 15 bp, Homo sapiens
gttttctgccagtgc

SEQ ID NO: 122793 - DNA, 15 bp, Homo sapiens
tgttttctgccagtg

SEQ ID NO: 122794 - DNA, 15 bp, Homo sapiens
ttgttttctgccagt

SEQ ID NO: 122795 - DNA, 15 bp, Homo sapiens
gttgttttctgccag

SEQ ID NO: 122796 - DNA, 15 bp, Homo sapiens
ggttgttttctgcca

SEQ ID NO: 122797 - DNA, 15 bp, Homo sapiens
aggttgttttctgcc

SEQ ID NO: 122798 - DNA, 15 bp, Homo sapiens
caggttgttttctgc

SEQ ID NO: 122799 - DNA, 15 bp, Homo sapiens
tcaggttgttttctg

SEQ ID NO: 122800 - DNA, 15 bp, Homo sapiens
ttcaggttgttttct

SEQ ID NO: 122801 - DNA, 15 bp, Homo sapiens
gttcaggttgttttc

SEQ ID NO: 122802 - DNA, 15 bp, Homo sapiens
ggttcaggttgtttt

SEQ ID NO: 122803 - DNA, 15 bp, Homo sapiens
aggttcaggttgttt

SEQ ID NO: 122804 - DNA, 15 bp, Homo sapiens
aaggttcaggttgtt

SEQ ID NO: 122805 - DNA, 15 bp, Homo sapiens
gaaggttcaggttgt

SEQ ID NO: 122806 - DNA, 15 bp, Homo sapiens
ggaaggttcaggttg

SEQ ID NO: 122807 - DNA, 15 bp, Homo sapiens
tggaaggttcaggtt

SEQ ID NO: 122808 - DNA, 15 bp, Homo sapiens
ttggaaggttcaggt

SEQ ID NO: 122809 - DNA, 15 bp, Homo sapiens
tttggaaggttcagg

SEQ ID NO: 122810 - DNA, 15 bp, Homo sapiens
ctttggaaggttcag

SEQ ID NO: 122811 - DNA, 15 bp, Homo sapiens
tctttggaaggttca

SEQ ID NO: 122812 - DNA, 15 bp, Homo sapiens
atctttggaaggttc

SEQ ID NO: 122813 - DNA, 15 bp, Homo sapiens
catctttggaaggtt

SEQ ID NO: 122814 - DNA, 15 bp, Homo sapiens
ccatctttggaaggt

SEQ ID NO: 122815 - DNA, 15 bp, Homo sapiens
gccatctttggaagg

SEQ ID NO: 122816 - DNA, 15 bp, Homo sapiens
agccatctttggaag

SEQ ID NO: 122817 - DNA, 15 bp, Homo sapiens
cagccatctttggaa

SEQ ID NO: 122818 - DNA, 15 bp, Homo sapiens
tcagccatctttgga

SEQ ID NO: 122819 - DNA, 15 bp, Homo sapiens
ttcagccatctttgg

SEQ ID NO: 122820 - DNA, 15 bp, Homo sapiens
tttcagccatctttg

SEQ ID NO: 122821 - DNA, 15 bp, Homo sapiens
ttttcagccatcttt

SEQ ID NO: 122822 - DNA, 15 bp, Homo sapiens
tttttcagccatctt

SEQ ID NO: 122823 - DNA, 15 bp, Homo sapiens
ctttttcagccatct

SEQ ID NO: 122824 - DNA, 15 bp, Homo sapiens
tctttttcagccatc

SEQ ID NO: 122825 - DNA, 15 bp, Homo sapiens
atctttttcagccat

SEQ ID NO: 122826 - DNA, 15 bp, Homo sapiens
catctttttcagcca

SEQ ID NO: 122827 - DNA, 15 bp, Homo sapiens
ccatctttttcagcc

SEQ ID NO: 122828 - DNA, 15 bp, Homo sapiens
tccatctttttcagc

SEQ ID NO: 122829 - DNA, 15 bp, Homo sapiens
atccatctttttcag

SEQ ID NO: 122830 - DNA, 15 bp, Homo sapiens
catccatctttttca

SEQ ID NO: 122831 - DNA, 15 bp, Homo sapiens
gcatccatctttttc

SEQ ID NO: 122832 - DNA, 15 bp, Homo sapiens
agcatccatcttttt

SEQ ID NO: 122833 - DNA, 15 bp, Homo sapiens
aagcatccatctttt

SEQ ID NO: 122834 - DNA, 15 bp, Homo sapiens
gaagcatccatcttt

SEQ ID NO: 122835 - DNA, 15 bp, Homo sapiens
ggaagcatccatctt

SEQ ID NO: 122836 - DNA, 15 bp, Homo sapiens
tggaagcatccatct

SEQ ID NO: 122837 - DNA, 15 bp, Homo sapiens
ttggaagcatccatc

SEQ ID NO: 122838 - DNA, 15 bp, Homo sapiens
attggaagcatccat

SEQ ID NO: 122839 - DNA, 15 bp, Homo sapiens
gattggaagcatcca

SEQ ID NO: 122840 - DNA, 15 bp, Homo sapiens
agattggaagcatcc

SEQ ID NO: 122841 - DNA, 15 bp, Homo sapiens
cagattggaagcatc

SEQ ID NO: 122842 - DNA, 15 bp, Homo sapiens
ccagattggaagcat

SEQ ID NO: 122843 - DNA, 15 bp, Homo sapiens
tccagattggaagca

SEQ ID NO: 122844 - DNA, 15 bp, Homo sapiens
atccagattggaagc

SEQ ID NO: 122845 - DNA, 15 bp, Homo sapiens
aatccagattggaag

SEQ ID NO: 122846 - DNA, 15 bp, Homo sapiens
gaatccagattggaa

SEQ ID NO: 122847 - DNA, 15 bp, Homo sapiens
tgaatccagattgga

SEQ ID NO: 122848 - DNA, 15 bp, Homo sapiens
ttgaatccagattgg

SEQ ID NO: 122849 - DNA, 15 bp, Homo sapiens
attgaatccagattg

SEQ ID NO: 122850 - DNA, 15 bp, Homo sapiens
cattgaatccagatt

SEQ ID NO: 122851 - DNA, 15 bp, Homo sapiens
tcattgaatccagat

SEQ ID NO: 122852 - DNA, 15 bp, Homo sapiens
ctcattgaatccaga

SEQ ID NO: 122853 - DNA, 15 bp, Homo sapiens
cctcattgaatccag

SEQ ID NO: 122854 - DNA, 15 bp, Homo sapiens
acctcattgaatcca

SEQ ID NO: 122855 - DNA, 15 bp, Homo sapiens
tacctcattgaatcc

SEQ ID NO: 122856 - DNA, 15 bp, Homo sapiens
gtacctcattgaatc

SEQ ID NO: 122857 - DNA, 15 bp, Homo sapiens
ggtacctcattgaat

SEQ ID NO: 122858 - DNA, 15 bp, Homo sapiens
tggtacctcattgaa

SEQ ID NO: 122859 - DNA, 15 bp, Homo sapiens
ttggtacctcattga

SEQ ID NO: 122860 - DNA, 15 bp, Homo sapiens
gttggtacctcattg

SEQ ID NO: 122861 - DNA, 15 bp, Homo sapiens
agttggtacctcatt

SEQ ID NO: 122862 - DNA, 15 bp, Homo sapiens
aagttggtacctcat

SEQ ID NO: 122863 - DNA, 15 bp, Homo sapiens
caagttggtacctca

SEQ ID NO: 122864 - DNA, 15 bp, Homo sapiens
acaagttggtacctc

SEQ ID NO: 122865 - DNA, 15 bp, Homo sapiens
gacaagttggtacct

SEQ ID NO: 122866 - DNA, 15 bp, Homo sapiens
cgacaagttggtacc

SEQ ID NO: 122867 - DNA, 15 bp, Homo sapiens
gcgacaagttggtac

SEQ ID NO: 122868 - DNA, 15 bp, Homo sapiens
tgcgacaagttggta

SEQ ID NO: 122869 - DNA, 15 bp, Homo sapiens
gtgcgacaagttggt

SEQ ID NO: 122870 - DNA, 15 bp, Homo sapiens
agtgcgacaagttgg

SEQ ID NO: 122871 - DNA, 15 bp, Homo sapiens
gagtgcgacaagttg

SEQ ID NO: 122872 - DNA, 15 bp, Homo sapiens
tgagtgcgacaagtt

SEQ ID NO: 122873 - DNA, 15 bp, Homo sapiens
gtgagtgcgacaagt

SEQ ID NO: 122874 - DNA, 15 bp, Homo sapiens
agtgagtgcgacaag

SEQ ID NO: 122875 - DNA, 15 bp, Homo sapiens
aagtgagtgcgacaa

SEQ ID NO: 122876 - DNA, 15 bp, Homo sapiens
aaagtgagtgcgaca

SEQ ID NO: 122877 - DNA, 15 bp, Homo sapiens
aaaagtgagtgcgac

SEQ ID NO: 122878 - DNA, 15 bp, Homo sapiens
gaaaagtgagtgcga

SEQ ID NO: 122879 - DNA, 15 bp, Homo sapiens
tgaaaagtgagtgcg

SEQ ID NO: 122880 - DNA, 15 bp, Homo sapiens
gtgaaaagtgagtgc

SEQ ID NO: 122881 - DNA, 15 bp, Homo sapiens
agtgaaaagtgagtg

SEQ ID NO: 122882 - DNA, 15 bp, Homo sapiens
tagtgaaaagtgagt

SEQ ID NO: 122883 - DNA, 15 bp, Homo sapiens
atagtgaaaagtgag

SEQ ID NO: 122884 - DNA, 15 bp, Homo sapiens
aatagtgaaaagtga

SEQ ID NO: 122885 - DNA, 15 bp, Homo sapiens
gaatagtgaaaagtg

SEQ ID NO: 122886 - DNA, 15 bp, Homo sapiens
ggaatagtgaaaagt

SEQ ID NO: 122887 - DNA, 15 bp, Homo sapiens
aggaatagtgaaaag

SEQ ID NO: 122888 - DNA, 15 bp, Homo sapiens
aaggaatagtgaaaa

SEQ ID NO: 122889 - DNA, 15 bp, Homo sapiens
taaggaatagtgaaa

SEQ ID NO: 122890 - DNA, 15 bp, Homo sapiens
ctaaggaatagtgaa

SEQ ID NO: 122891 - DNA, 15 bp, Homo sapiens
cctaaggaatagtga

SEQ ID NO: 122892 - DNA, 15 bp, Homo sapiens
gcctaaggaatagtg

SEQ ID NO: 122893 - DNA, 15 bp, Homo sapiens
tgcctaaggaatagt

SEQ ID NO: 122894 - DNA, 15 bp, Homo sapiens
ttgcctaaggaatag

SEQ ID NO: 122895 - DNA, 15 bp, Homo sapiens
tttgcctaaggaata

SEQ ID NO: 122896 - DNA, 15 bp, Homo sapiens
ttttgcctaaggaat

SEQ ID NO: 122897 - DNA, 15 bp, Homo sapiens
gttttgcctaaggaa

SEQ ID NO: 122898 - DNA, 15 bp, Homo sapiens
agttttgcctaagga

SEQ ID NO: 122899 - DNA, 15 bp, Homo sapiens
aagttttgcctaagg

SEQ ID NO: 122900 - DNA, 15 bp, Homo sapiens
gaagttttgcctaag

SEQ ID NO: 122901 - DNA, 15 bp, Homo sapiens
agaagttttgcctaa

SEQ ID NO: 122902 - DNA, 15 bp, Homo sapiens
gagaagttttgccta

SEQ ID NO: 122903 - DNA, 15 bp, Homo sapiens
ggagaagttttgcct

SEQ ID NO: 122904 - DNA, 15 bp, Homo sapiens
gggagaagttttgcc

SEQ ID NO: 122905 - DNA, 15 bp, Homo sapiens
agggagaagttttgc

SEQ ID NO: 122906 - DNA, 15 bp, Homo sapiens
gagggagaagttttg

SEQ ID NO: 122907 - DNA, 15 bp, Homo sapiens
agagggagaagtttt

SEQ ID NO: 122908 - DNA, 15 bp, Homo sapiens
aagagggagaagttt

SEQ ID NO: 122909 - DNA, 15 bp, Homo sapiens
caagagggagaagtt

SEQ ID NO: 122910 - DNA, 15 bp, Homo sapiens
gcaagagggagaagt

SEQ ID NO: 122911 - DNA, 15 bp, Homo sapiens
tgcaagagggagaag

SEQ ID NO: 122912 - DNA, 15 bp, Homo sapiens
atgcaagagggagaa

SEQ ID NO: 122913 - DNA, 15 bp, Homo sapiens
catgcaagagggaga

SEQ ID NO: 122914 - DNA, 15 bp, Homo sapiens
gcatgcaagagggag

SEQ ID NO: 122915 - DNA, 15 bp, Homo sapiens
tgcatgcaagaggga

SEQ ID NO: 122916 - DNA, 15 bp, Homo sapiens
ctgcatgcaagaggg

SEQ ID NO: 122917 - DNA, 15 bp, Homo sapiens
actgcatgcaagagg

SEQ ID NO: 122918 - DNA, 15 bp, Homo sapiens
cactgcatgcaagag

SEQ ID NO: 122919 - DNA, 15 bp, Homo sapiens
gcactgcatgcaaga

SEQ ID NO: 122920 - DNA, 15 bp, Homo sapiens
ggcactgcatgcaag

SEQ ID NO: 122921 - DNA, 15 bp, Homo sapiens
aggcactgcatgcaa

SEQ ID NO: 122922 - DNA, 15 bp, Homo sapiens
caggcactgcatgca

SEQ ID NO: 122923 - DNA, 15 bp, Homo sapiens
acaggcactgcatgc

SEQ ID NO: 122924 - DNA, 15 bp, Homo sapiens
tacaggcactgcatg

SEQ ID NO: 122925 - DNA, 15 bp, Homo sapiens
atacaggcactgcat

SEQ ID NO: 122926 - DNA, 15 bp, Homo sapiens
tatacaggcactgca

SEQ ID NO: 122927 - DNA, 15 bp, Homo sapiens
gtatacaggcactgc

SEQ ID NO: 122928 - DNA, 15 bp, Homo sapiens
tgtatacaggcactg

SEQ ID NO: 122929 - DNA, 15 bp, Homo sapiens
atgtatacaggcact

SEQ ID NO: 122930 - DNA, 15 bp, Homo sapiens
tatgtatacaggcac

SEQ ID NO: 122931 - DNA, 15 bp, Homo sapiens
atatgtatacaggca

SEQ ID NO: 122932 - DNA, 15 bp, Homo sapiens
tatatgtatacaggc

SEQ ID NO: 122933 - DNA, 15 bp, Homo sapiens
ctatatgtatacagg

SEQ ID NO: 122934 - DNA, 15 bp, Homo sapiens
tctatatgtatacag

SEQ ID NO: 122935 - DNA, 15 bp, Homo sapiens
atctatatgtataca

SEQ ID NO: 122936 - DNA, 15 bp, Homo sapiens
gatctatatgtatac

SEQ ID NO: 122937 - DNA, 15 bp, Homo sapiens
ggatctatatgtata

SEQ ID NO: 122938 - DNA, 15 bp, Homo sapiens
tggatctatatgtat

SEQ ID NO: 122939 - DNA, 15 bp, Homo sapiens
ctggatctatatgta

SEQ ID NO: 122940 - DNA, 15 bp, Homo sapiens
cctggatctatatgt

SEQ ID NO: 122941 - DNA, 15 bp, Homo sapiens
gcctggatctatatg

SEQ ID NO: 122942 - DNA, 15 bp, Homo sapiens
tgcctggatctatat

SEQ ID NO: 122943 - DNA, 15 bp, Homo sapiens
ctgcctggatctata

SEQ ID NO: 122944 - DNA, 15 bp, Homo sapiens
gctgcctggatctat

SEQ ID NO: 122945 - DNA, 15 bp, Homo sapiens
tgctgcctggatcta

SEQ ID NO: 122946 - DNA, 15 bp, Homo sapiens
ttgctgcctggatct

SEQ ID NO: 122947 - DNA, 15 bp, Homo sapiens
gttgctgcctggatc

SEQ ID NO: 122948 - DNA, 15 bp, Homo sapiens
tgttgctgcctggat

SEQ ID NO: 122949 - DNA, 15 bp, Homo sapiens
ttgttgctgcctgga

SEQ ID NO: 122950 - DNA, 15 bp, Homo sapiens
tttgttgctgcctgg

SEQ ID NO: 122951 - DNA, 15 bp, Homo sapiens
ttttgttgctgcctg

SEQ ID NO: 122952 - DNA, 15 bp, Homo sapiens
tttttgttgctgcct

SEQ ID NO: 122953 - DNA, 15 bp, Homo sapiens
ctttttgttgctgcc

SEQ ID NO: 122954 - DNA, 15 bp, Homo sapiens
actttttgttgctgc

SEQ ID NO: 122955 - DNA, 15 bp, Homo sapiens
cactttttgttgctg

SEQ ID NO: 122956 - DNA, 15 bp, Homo sapiens
ccactttttgttgct

SEQ ID NO: 122957 - DNA, 15 bp, Homo sapiens
cccactttttgttgc

SEQ ID NO: 122958 - DNA, 15 bp, Homo sapiens
acccactttttgttg

SEQ ID NO: 122959 - DNA, 15 bp, Homo sapiens
tacccactttttgtt

SEQ ID NO: 122960 - DNA, 15 bp, Homo sapiens
ttacccactttttgt

SEQ ID NO: 122961 - DNA, 15 bp, Homo sapiens
tttacccactttttg

SEQ ID NO: 122962 - DNA, 15 bp, Homo sapiens
atttacccacttttt

SEQ ID NO: 122963 - DNA, 15 bp, Homo sapiens
catttacccactttt

SEQ ID NO: 122964 - DNA, 15 bp, Homo sapiens
acatttacccacttt

SEQ ID NO: 122965 - DNA, 15 bp, Homo sapiens
tacatttacccactt

SEQ ID NO: 122966 - DNA, 15 bp, Homo sapiens
ttacatttacccact

SEQ ID NO: 122967 - DNA, 15 bp, Homo sapiens
tttacatttacccac

SEQ ID NO: 122968 - DNA, 15 bp, Homo sapiens
ctttacatttaccca

SEQ ID NO: 122969 - DNA, 15 bp, Homo sapiens
tctttacatttaccc

SEQ ID NO: 122970 - DNA, 15 bp, Homo sapiens
ttctttacatttacc

SEQ ID NO: 122971 - DNA, 15 bp, Homo sapiens
attctttacatttac

SEQ ID NO: 122972 - DNA, 15 bp, Homo sapiens
cattctttacattta

SEQ ID NO: 122973 - DNA, 15 bp, Homo sapiens
acattctttacattt

SEQ ID NO: 122974 - DNA, 15 bp, Homo sapiens
aacattctttacatt

SEQ ID NO: 122975 - DNA, 15 bp, Homo sapiens
taacattctttacat

SEQ ID NO: 122976 - DNA, 15 bp, Homo sapiens
ataacattctttaca

SEQ ID NO: 122977 - DNA, 15 bp, Homo sapiens
cataacattctttac

SEQ ID NO: 122978 - DNA, 15 bp, Homo sapiens
acataacattcttta

SEQ ID NO: 122979 - DNA, 15 bp, Homo sapiens
tacataacattcttt

SEQ ID NO: 122980 - DNA, 15 bp, Homo sapiens
ttacataacattctt

SEQ ID NO: 122981 - DNA, 15 bp, Homo sapiens
tttacataacattct

SEQ ID NO: 122982 - DNA, 15 bp, Homo sapiens
atttacataacattc

SEQ ID NO: 122983 - DNA, 15 bp, Homo sapiens
aatttacataacatt

SEQ ID NO: 122984 - DNA, 15 bp, Homo sapiens
aaatttacataacat

SEQ ID NO: 122985 - DNA, 15 bp, Homo sapiens
gaaatttacataaca

SEQ ID NO: 122986 - DNA, 15 bp, Homo sapiens
tgaaatttacataac

SEQ ID NO: 122987 - DNA, 15 bp, Homo sapiens
atgaaatttacataa

SEQ ID NO: 122988 - DNA, 15 bp, Homo sapiens
catgaaatttacata

SEQ ID NO: 122989 - DNA, 15 bp, Homo sapiens
tcatgaaatttacat

SEQ ID NO: 122990 - DNA, 15 bp, Homo sapiens
ctcatgaaatttaca

SEQ ID NO: 122991 - DNA, 15 bp, Homo sapiens
cctcatgaaatttac

SEQ ID NO: 122992 - DNA, 15 bp, Homo sapiens
tcctcatgaaattta

SEQ ID NO: 122993 - DNA, 15 bp, Homo sapiens
ctcctcatgaaattt

SEQ ID NO: 122994 - DNA, 15 bp, Homo sapiens
cctcctcatgaaatt

SEQ ID NO: 122995 - DNA, 15 bp, Homo sapiens
gcctcctcatgaaat

SEQ ID NO: 122996 - DNA, 15 bp, Homo sapiens
ggcctcctcatgaaa

SEQ ID NO: 122997 - DNA, 15 bp, Homo sapiens
tggcctcctcatgaa

SEQ ID NO: 122998 - DNA, 15 bp, Homo sapiens
ttggcctcctcatga

SEQ ID NO: 122999 - DNA, 15 bp, Homo sapiens
gttggcctcctcatg

SEQ ID NO: 123000 - DNA, 15 bp, Homo sapiens
agttggcctcctcat

SEQ ID NO: 123001 - DNA, 15 bp, Homo sapiens
aagttggcctcctca

SEQ ID NO: 123002 - DNA, 15 bp, Homo sapiens
gaagttggcctcctc

SEQ ID NO: 123003 - DNA, 15 bp, Homo sapiens
tgaagttggcctcct

SEQ ID NO: 123004 - DNA, 15 bp, Homo sapiens
ttgaagttggcctcc

SEQ ID NO: 123005 - DNA, 15 bp, Homo sapiens
cttgaagttggcctc

SEQ ID NO: 123006 - DNA, 15 bp, Homo sapiens
gcttgaagttggcct

SEQ ID NO: 123007 - DNA, 15 bp, Homo sapiens
agcttgaagttggcc

SEQ ID NO: 123008 - DNA, 15 bp, Homo sapiens
aagcttgaagttggc

SEQ ID NO: 123009 - DNA, 15 bp, Homo sapiens
aaagcttgaagttgg

SEQ ID NO: 123010 - DNA, 15 bp, Homo sapiens
aaaagcttgaagttg

SEQ ID NO: 123011 - DNA, 15 bp, Homo sapiens
aaaaagcttgaagtt

SEQ ID NO: 123012 - DNA, 15 bp, Homo sapiens
aaaaaagcttgaagt

SEQ ID NO: 123013 - DNA, 15 bp, Homo sapiens
taaaaaagcttgaag

SEQ ID NO: 123014 - DNA, 15 bp, Homo sapiens
ttaaaaaagcttgaa

SEQ ID NO: 123015 - DNA, 15 bp, Homo sapiens
tttaaaaaagcttga

SEQ ID NO: 123016 - DNA, 15 bp, Homo sapiens
ctttaaaaaagcttg

SEQ ID NO: 123017 - DNA, 15 bp, Homo sapiens
cctttaaaaaagctt

SEQ ID NO: 123018 - DNA, 15 bp, Homo sapiens
gcctttaaaaaagct

SEQ ID NO: 123019 - DNA, 15 bp, Homo sapiens
tgcctttaaaaaagc

SEQ ID NO: 123020 - DNA, 15 bp, Homo sapiens
ctgcctttaaaaaag

SEQ ID NO: 123021 - DNA, 15 bp, Homo sapiens
actgcctttaaaaaa

SEQ ID NO: 123022 - DNA, 15 bp, Homo sapiens
aactgcctttaaaaa

SEQ ID NO: 123023 - DNA, 15 bp, Homo sapiens
aaactgcctttaaaa

SEQ ID NO: 123024 - DNA, 15 bp, Homo sapiens
taaactgcctttaaa

SEQ ID NO: 123025 - DNA, 15 bp, Homo sapiens
ataaactgcctttaa

SEQ ID NO: 123026 - DNA, 15 bp, Homo sapiens
aataaactgccttta

SEQ ID NO: 123027 - DNA, 15 bp, Homo sapiens
gaataaactgccttt

SEQ ID NO: 123028 - DNA, 15 bp, Homo sapiens
agaataaactgcctt

SEQ ID NO: 123029 - DNA, 15 bp, Homo sapiens
aagaataaactgcct

SEQ ID NO: 123030 - DNA, 15 bp, Homo sapiens
caagaataaactgcc

SEQ ID NO: 123031 - DNA, 15 bp, Homo sapiens
ccaagaataaactgc

SEQ ID NO: 123032 - DNA, 15 bp, Homo sapiens
tccaagaataaactg

SEQ ID NO: 123033 - DNA, 15 bp, Homo sapiens
gtccaagaataaact

SEQ ID NO: 123034 - DNA, 15 bp, Homo sapiens
tgtccaagaataaac

SEQ ID NO: 123035 - DNA, 15 bp, Homo sapiens
ctgtccaagaataaa

SEQ ID NO: 123036 - DNA, 15 bp, Homo sapiens
cctgtccaagaataa

SEQ ID NO: 123037 - DNA, 15 bp, Homo sapiens
acctgtccaagaata

SEQ ID NO: 123038 - DNA, 15 bp, Homo sapiens
tacctgtccaagaat

SEQ ID NO: 123039 - DNA, 15 bp, Homo sapiens
atacctgtccaagaa

SEQ ID NO: 123040 - DNA, 15 bp, Homo sapiens
catacctgtccaaga

SEQ ID NO: 123041 - DNA, 15 bp, Homo sapiens
ccatacctgtccaag

SEQ ID NO: 123042 - DNA, 15 bp, Homo sapiens
gccatacctgtccaa

SEQ ID NO: 123043 - DNA, 15 bp, Homo sapiens
ggccatacctgtcca

SEQ ID NO: 123044 - DNA, 15 bp, Homo sapiens
tggccatacctgtcc

SEQ ID NO: 123045 - DNA, 15 bp, Homo sapiens
ctggccatacctgtc

SEQ ID NO: 123046 - DNA, 15 bp, Homo sapiens
tctggccatacctgt

SEQ ID NO: 123047 - DNA, 15 bp, Homo sapiens
ctctggccatacctg

SEQ ID NO: 123048 - DNA, 15 bp, Homo sapiens
tctctggccatacct

SEQ ID NO: 123049 - DNA, 15 bp, Homo sapiens
atctctggccatacc

SEQ ID NO: 123050 - DNA, 15 bp, Homo sapiens
catctctggccatac

SEQ ID NO: 123051 - DNA, 15 bp, Homo sapiens
ccatctctggccata

SEQ ID NO: 123052 - DNA, 15 bp, Homo sapiens
accatctctggccat

SEQ ID NO: 123053 - DNA, 15 bp, Homo sapiens
caccatctctggcca

SEQ ID NO: 123054 - DNA, 15 bp, Homo sapiens
gcaccatctctggcc

SEQ ID NO: 123055 - DNA, 15 bp, Homo sapiens
ggcaccatctctggc

SEQ ID NO: 123056 - DNA, 15 bp, Homo sapiens
tggcaccatctctgg

SEQ ID NO: 123057 - DNA, 15 bp, Homo sapiens
gtggcaccatctctg

SEQ ID NO: 123058 - DNA, 15 bp, Homo sapiens
agtggcaccatctct

SEQ ID NO: 123059 - DNA, 15 bp, Homo sapiens
cagtggcaccatctc

SEQ ID NO: 123060 - DNA, 15 bp, Homo sapiens
acagtggcaccatct

SEQ ID NO: 123061 - DNA, 15 bp, Homo sapiens
cacagtggcaccatc

SEQ ID NO: 123062 - DNA, 15 bp, Homo sapiens
ccacagtggcaccat

SEQ ID NO: 123063 - DNA, 15 bp, Homo sapiens
accacagtggcacca

SEQ ID NO: 123064 - DNA, 15 bp, Homo sapiens
caccacagtggcacc

SEQ ID NO: 123065 - DNA, 15 bp, Homo sapiens
tcaccacagtggcac

SEQ ID NO: 123066 - DNA, 15 bp, Homo sapiens
ctcaccacagtggca

SEQ ID NO: 123067 - DNA, 15 bp, Homo sapiens
tctcaccacagtggc

SEQ ID NO: 123068 - DNA, 15 bp, Homo sapiens
atctcaccacagtgg

SEQ ID NO: 123069 - DNA, 15 bp, Homo sapiens
aatctcaccacagtg

SEQ ID NO: 123070 - DNA, 15 bp, Homo sapiens
aaatctcaccacagt

SEQ ID NO: 123071 - DNA, 15 bp, Homo sapiens
aaaatctcaccacag

SEQ ID NO: 123072 - DNA, 15 bp, Homo sapiens
taaaatctcaccaca

SEQ ID NO: 123073 - DNA, 15 bp, Homo sapiens
ttaaaatctcaccac

SEQ ID NO: 123074 - DNA, 15 bp, Homo sapiens
gttaaaatctcacca

SEQ ID NO: 123075 - DNA, 15 bp, Homo sapiens
tgttaaaatctcacc

SEQ ID NO: 123076 - DNA, 15 bp, Homo sapiens
ttgttaaaatctcac

SEQ ID NO: 123077 - DNA, 15 bp, Homo sapiens
gttgttaaaatctca

SEQ ID NO: 123078 - DNA, 15 bp, Homo sapiens
agttgttaaaatctc

SEQ ID NO: 123079 - DNA, 15 bp, Homo sapiens
cagttgttaaaatct

SEQ ID NO: 123080 - DNA, 15 bp, Homo sapiens
acagttgttaaaatc

SEQ ID NO: 123081 - DNA, 15 bp, Homo sapiens
gacagttgttaaaat

SEQ ID NO: 123082 - DNA, 15 bp, Homo sapiens
tgacagttgttaaaa

SEQ ID NO: 123083 - DNA, 15 bp, Homo sapiens
ttgacagttgttaaa

SEQ ID NO: 123084 - DNA, 15 bp, Homo sapiens
tttgacagttgttaa

SEQ ID NO: 123085 - DNA, 15 bp, Homo sapiens
atttgacagttgtta

SEQ ID NO: 123086 - DNA, 15 bp, Homo sapiens
catttgacagttgtt

SEQ ID NO: 123087 - DNA, 15 bp, Homo sapiens
acatttgacagttgt

SEQ ID NO: 123088 - DNA, 15 bp, Homo sapiens
aacatttgacagttg

SEQ ID NO: 123089 - DNA, 15 bp, Homo sapiens
aaacatttgacagtt

SEQ ID NO: 123090 - DNA, 15 bp, Homo sapiens
taaacatttgacagt

SEQ ID NO: 123091 - DNA, 15 bp, Homo sapiens
ttaaacatttgacag

SEQ ID NO: 123092 - DNA, 15 bp, Homo sapiens
tttaaacatttgaca

SEQ ID NO: 123093 - DNA, 15 bp, Homo sapiens
ttttaaacatttgac

SEQ ID NO: 123094 - DNA, 15 bp, Homo sapiens
gttttaaacatttga

SEQ ID NO: 123095 - DNA, 15 bp, Homo sapiens
agttttaaacatttg

SEQ ID NO: 123096 - DNA, 15 bp, Homo sapiens
gagttttaaacattt

SEQ ID NO: 123097 - DNA, 15 bp, Homo sapiens
ggagttttaaacatt

SEQ ID NO: 123098 - DNA, 15 bp, Homo sapiens
gggagttttaaacat

SEQ ID NO: 123099 - DNA, 15 bp, Homo sapiens
tgggagttttaaaca

SEQ ID NO: 123100 - DNA, 15 bp, Homo sapiens
gtgggagttttaaac

SEQ ID NO: 123101 - DNA, 15 bp, Homo sapiens
tgtgggagttttaaa

SEQ ID NO: 123102 - DNA, 15 bp, Homo sapiens
ctgtgggagttttaa

SEQ ID NO: 123103 - DNA, 15 bp, Homo sapiens
cctgtgggagtttta

SEQ ID NO: 123104 - DNA, 15 bp, Homo sapiens
acctgtgggagtttt

SEQ ID NO: 123105 - DNA, 15 bp, Homo sapiens
aacctgtgggagttt

SEQ ID NO: 123106 - DNA, 15 bp, Homo sapiens
aaacctgtgggagtt

SEQ ID NO: 123107 - DNA, 15 bp, Homo sapiens
taaacctgtgggagt

SEQ ID NO: 123108 - DNA, 15 bp, Homo sapiens
ttaaacctgtgggag

SEQ ID NO: 123109 - DNA, 15 bp, Homo sapiens
attaaacctgtggga

SEQ ID NO: 123110 - DNA, 15 bp, Homo sapiens
aattaaacctgtggg

SEQ ID NO: 123111 - DNA, 15 bp, Homo sapiens
taattaaacctgtgg

SEQ ID NO: 123112 - DNA, 15 bp, Homo sapiens
ctaattaaacctgtg

SEQ ID NO: 123113 - DNA, 15 bp, Homo sapiens
actaattaaacctgt

SEQ ID NO: 123114 - DNA, 15 bp, Homo sapiens
aactaattaaacctg

SEQ ID NO: 123115 - DNA, 15 bp, Homo sapiens
gaactaattaaacct

SEQ ID NO: 123116 - DNA, 15 bp, Homo sapiens
tgaactaattaaacc

SEQ ID NO: 123117 - DNA, 15 bp, Homo sapiens
atgaactaattaaac

SEQ ID NO: 123118 - DNA, 15 bp, Homo sapiens
gatgaactaattaaa

SEQ ID NO: 123119 - DNA, 15 bp, Homo sapiens
ggatgaactaattaa

SEQ ID NO: 123120 - DNA, 15 bp, Homo sapiens
aggatgaactaatta

SEQ ID NO: 123121 - DNA, 15 bp, Homo sapiens
caggatgaactaatt

SEQ ID NO: 123122 - DNA, 15 bp, Homo sapiens
ccaggatgaactaat

SEQ ID NO: 123123 - DNA, 15 bp, Homo sapiens
cccaggatgaactaa

SEQ ID NO: 123124 - DNA, 15 bp, Homo sapiens
tcccaggatgaacta

SEQ ID NO: 123125 - DNA, 15 bp, Homo sapiens
ttcccaggatgaact

SEQ ID NO: 123126 - DNA, 15 bp, Homo sapiens
tttcccaggatgaac

SEQ ID NO: 123127 - DNA, 15 bp, Homo sapiens
ctttcccaggatgaa

SEQ ID NO: 123128 - DNA, 15 bp, Homo sapiens
cctttcccaggatga

SEQ ID NO: 123129 - DNA, 15 bp, Homo sapiens
acctttcccaggatg

SEQ ID NO: 123130 - DNA, 15 bp, Homo sapiens
tacctttcccaggat

SEQ ID NO: 123131 - DNA, 15 bp, Homo sapiens
gtacctttcccagga

SEQ ID NO: 123132 - DNA, 15 bp, Homo sapiens
agtacctttcccagg

SEQ ID NO: 123133 - DNA, 15 bp, Homo sapiens
gagtacctttcccag

SEQ ID NO: 123134 - DNA, 15 bp, Homo sapiens
agagtacctttccca

SEQ ID NO: 123135 - DNA, 15 bp, Homo sapiens
gagagtacctttccc

SEQ ID NO: 123136 - DNA, 15 bp, Homo sapiens
tgagagtacctttcc

SEQ ID NO: 123137 - DNA, 15 bp, Homo sapiens
ctgagagtacctttc

SEQ ID NO: 123138 - DNA, 15 bp, Homo sapiens
cctgagagtaccttt

SEQ ID NO: 123139 - DNA, 15 bp, Homo sapiens
ccctgagagtacctt

SEQ ID NO: 123140 - DNA, 15 bp, Homo sapiens
gccctgagagtacct

SEQ ID NO: 123141 - DNA, 15 bp, Homo sapiens
ggccctgagagtacc

SEQ ID NO: 123142 - DNA, 15 bp, Homo sapiens
aggccctgagagtac

SEQ ID NO: 123143 - DNA, 15 bp, Homo sapiens
aaggccctgagagta

SEQ ID NO: 123144 - DNA, 15 bp, Homo sapiens
aaaggccctgagagt

SEQ ID NO: 123145 - DNA, 15 bp, Homo sapiens
aaaaggccctgagag

SEQ ID NO: 123146 - DNA, 15 bp, Homo sapiens
gaaaaggccctgaga

SEQ ID NO: 123147 - DNA, 15 bp, Homo sapiens
ggaaaaggccctgag

SEQ ID NO: 123148 - DNA, 15 bp, Homo sapiens
gggaaaaggccctga

SEQ ID NO: 123149 - DNA, 15 bp, Homo sapiens
agggaaaaggccctg

SEQ ID NO: 123150 - DNA, 15 bp, Homo sapiens
gagggaaaaggccct

SEQ ID NO: 123151 - DNA, 15 bp, Homo sapiens
agagggaaaaggccc

SEQ ID NO: 123152 - DNA, 15 bp, Homo sapiens
gagagggaaaaggcc

SEQ ID NO: 123153 - DNA, 15 bp, Homo sapiens
agagagggaaaaggc

SEQ ID NO: 123154 - DNA, 15 bp, Homo sapiens
cagagagggaaaagg

SEQ ID NO: 123155 - DNA, 15 bp, Homo sapiens
ccagagagggaaaag

SEQ ID NO: 123156 - DNA, 15 bp, Homo sapiens
gccagagagggaaaa

SEQ ID NO: 123157 - DNA, 15 bp, Homo sapiens
agccagagagggaaa

SEQ ID NO: 123158 - DNA, 15 bp, Homo sapiens
cagccagagagggaa

SEQ ID NO: 123159 - DNA, 15 bp, Homo sapiens
gcagccagagaggga

SEQ ID NO: 123160 - DNA, 15 bp, Homo sapiens
ggcagccagagaggg

SEQ ID NO: 123161 - DNA, 15 bp, Homo sapiens
gggcagccagagagg

SEQ ID NO: 123162 - DNA, 15 bp, Homo sapiens
ggggcagccagagag

SEQ ID NO: 123163 - DNA, 15 bp, Homo sapiens
aggggcagccagaga

SEQ ID NO: 123164 - DNA, 15 bp, Homo sapiens
caggggcagccagag

SEQ ID NO: 123165 - DNA, 15 bp, Homo sapiens
ccaggggcagccaga

SEQ ID NO: 123166 - DNA, 15 bp, Homo sapiens
gccaggggcagccag

SEQ ID NO: 123167 - DNA, 15 bp, Homo sapiens
tgccaggggcagcca

SEQ ID NO: 123168 - DNA, 15 bp, Homo sapiens
ctgccaggggcagcc

SEQ ID NO: 123169 - DNA, 15 bp, Homo sapiens
cctgccaggggcagc

SEQ ID NO: 123170 - DNA, 15 bp, Homo sapiens
ccctgccaggggcag

SEQ ID NO: 123171 - DNA, 15 bp, Homo sapiens
accctgccaggggca

SEQ ID NO: 123172 - DNA, 15 bp, Homo sapiens
gaccctgccaggggc

SEQ ID NO: 123173 - DNA, 15 bp, Homo sapiens
ggaccctgccagggg

SEQ ID NO: 123174 - DNA, 15 bp, Homo sapiens
tggaccctgccaggg

SEQ ID NO: 123175 - DNA, 15 bp, Homo sapiens
ctggaccctgccagg

SEQ ID NO: 123176 - DNA, 15 bp, Homo sapiens
cctggaccctgccag

SEQ ID NO: 123177 - DNA, 15 bp, Homo sapiens
acctggaccctgcca

SEQ ID NO: 123178 - DNA, 15 bp, Homo sapiens
gacctggaccctgcc

SEQ ID NO: 123179 - DNA, 15 bp, Homo sapiens
agacctggaccctgc

SEQ ID NO: 123180 - DNA, 15 bp, Homo sapiens
cagacctggaccctg

SEQ ID NO: 123181 - DNA, 15 bp, Homo sapiens
gcagacctggaccct

SEQ ID NO: 123182 - DNA, 15 bp, Homo sapiens
ggcagacctggaccc

SEQ ID NO: 123183 - DNA, 15 bp, Homo sapiens
gggcagacctggacc

SEQ ID NO: 123184 - DNA, 15 bp, Homo sapiens
agggcagacctggac

SEQ ID NO: 123185 - DNA, 15 bp, Homo sapiens
gagggcagacctgga

SEQ ID NO: 123186 - DNA, 15 bp, Homo sapiens
ggagggcagacctgg

SEQ ID NO: 123187 - DNA, 15 bp, Homo sapiens
gggagggcagacctg

SEQ ID NO: 123188 - DNA, 15 bp, Homo sapiens
agggagggcagacct

SEQ ID NO: 123189 - DNA, 15 bp, Homo sapiens
gagggagggcagacc

SEQ ID NO: 123190 - DNA, 15 bp, Homo sapiens
ggagggagggcagac

SEQ ID NO: 123191 - DNA, 15 bp, Homo sapiens
gggagggagggcaga

SEQ ID NO: 123192 - DNA, 15 bp, Homo sapiens
agggagggagggcag

SEQ ID NO: 123193 - DNA, 15 bp, Homo sapiens
cagggagggagggca

SEQ ID NO: 123194 - DNA, 15 bp, Homo sapiens
gcagggagggagggc

SEQ ID NO: 123195 - DNA, 15 bp, Homo sapiens
ggcagggagggaggg

SEQ ID NO: 123196 - DNA, 15 bp, Homo sapiens
gggcagggagggagg

SEQ ID NO: 123197 - DNA, 15 bp, Homo sapiens
tgggcagggagggag

SEQ ID NO: 123198 - DNA, 15 bp, Homo sapiens
ctgggcagggaggga

SEQ ID NO: 123199 - DNA, 15 bp, Homo sapiens
gctgggcagggaggg

SEQ ID NO: 123200 - DNA, 15 bp, Homo sapiens
agctgggcagggagg

SEQ ID NO: 123201 - DNA, 15 bp, Homo sapiens
gagctgggcagggag

SEQ ID NO: 123202 - DNA, 15 bp, Homo sapiens
tgagctgggcaggga

SEQ ID NO: 123203 - DNA, 15 bp, Homo sapiens
atgagctgggcaggg

SEQ ID NO: 123204 - DNA, 15 bp, Homo sapiens
aatgagctgggcagg

SEQ ID NO: 123205 - DNA, 15 bp, Homo sapiens
gaatgagctgggcag

SEQ ID NO: 123206 - DNA, 15 bp, Homo sapiens
agaatgagctgggca

SEQ ID NO: 123207 - DNA, 15 bp, Homo sapiens
gagaatgagctgggc

SEQ ID NO: 123208 - DNA, 15 bp, Homo sapiens
ggagaatgagctggg

SEQ ID NO: 123209 - DNA, 15 bp, Homo sapiens
tggagaatgagctgg

SEQ ID NO: 123210 - DNA, 15 bp, Homo sapiens
gtggagaatgagctg

SEQ ID NO: 123211 - DNA, 15 bp, Homo sapiens
tgtggagaatgagct

SEQ ID NO: 123212 - DNA, 15 bp, Homo sapiens
ctgtggagaatgagc

SEQ ID NO: 123213 - DNA, 15 bp, Homo sapiens
actgtggagaatgag

SEQ ID NO: 123214 - DNA, 15 bp, Homo sapiens
cactgtggagaatga

SEQ ID NO: 123215 - DNA, 15 bp, Homo sapiens
tcactgtggagaatg

SEQ ID NO: 123216 - DNA, 15 bp, Homo sapiens
ctcactgtggagaat

SEQ ID NO: 123217 - DNA, 15 bp, Homo sapiens
tctcactgtggagaa

SEQ ID NO: 123218 - DNA, 15 bp, Homo sapiens
atctcactgtggaga

SEQ ID NO: 123219 - DNA, 15 bp, Homo sapiens
tatctcactgtggag

SEQ ID NO: 123220 - DNA, 15 bp, Homo sapiens
ttatctcactgtgga

SEQ ID NO: 123221 - DNA, 15 bp, Homo sapiens
gttatctcactgtgg

SEQ ID NO: 123222 - DNA, 15 bp, Homo sapiens
ggttatctcactgtg

SEQ ID NO: 123223 - DNA, 15 bp, Homo sapiens
aggttatctcactgt

SEQ ID NO: 123224 - DNA, 15 bp, Homo sapiens
caggttatctcactg

SEQ ID NO: 123225 - DNA, 15 bp, Homo sapiens
gcaggttatctcact

SEQ ID NO: 123226 - DNA, 15 bp, Homo sapiens
tgcaggttatctcac

SEQ ID NO: 123227 - DNA, 15 bp, Homo sapiens
gtgcaggttatctca

SEQ ID NO: 123228 - DNA, 15 bp, Homo sapiens
agtgcaggttatctc

SEQ ID NO: 123229 - DNA, 15 bp, Homo sapiens
cagtgcaggttatct

SEQ ID NO: 123230 - DNA, 15 bp, Homo sapiens
acagtgcaggttatc

SEQ ID NO: 123231 - DNA, 15 bp, Homo sapiens
gacagtgcaggttat

SEQ ID NO: 123232 - DNA, 15 bp, Homo sapiens
agacagtgcaggtta

SEQ ID NO: 123233 - DNA, 15 bp, Homo sapiens
aagacagtgcaggtt

SEQ ID NO: 123234 - DNA, 15 bp, Homo sapiens
gaagacagtgcaggt

SEQ ID NO: 123235 - DNA, 15 bp, Homo sapiens
agaagacagtgcagg

SEQ ID NO: 123236 - DNA, 15 bp, Homo sapiens
cagaagacagtgcag

SEQ ID NO: 123237 - DNA, 15 bp, Homo sapiens
tcagaagacagtgca

SEQ ID NO: 123238 - DNA, 15 bp, Homo sapiens
atcagaagacagtgc

SEQ ID NO: 123239 - DNA, 15 bp, Homo sapiens
aatcagaagacagtg

SEQ ID NO: 123240 - DNA, 15 bp, Homo sapiens
taatcagaagacagt

SEQ ID NO: 123241 - DNA, 15 bp, Homo sapiens
ataatcagaagacag

SEQ ID NO: 123242 - DNA, 15 bp, Homo sapiens
aataatcagaagaca

SEQ ID NO: 123243 - DNA, 15 bp, Homo sapiens
aaataatcagaagac

SEQ ID NO: 123244 - DNA, 15 bp, Homo sapiens
aaaataatcagaaga

SEQ ID NO: 123245 - DNA, 15 bp, Homo sapiens
taaaataatcagaag

SEQ ID NO: 123246 - DNA, 15 bp, Homo sapiens
ataaaataatcagaa

SEQ ID NO: 123247 - DNA, 15 bp, Homo sapiens
tataaaataatcaga

SEQ ID NO: 123248 - DNA, 15 bp, Homo sapiens
ttataaaataatcag

SEQ ID NO: 123249 - DNA, 15 bp, Homo sapiens
tttataaaataatca

SEQ ID NO: 123250 - DNA, 15 bp, Homo sapiens
ttttataaaataatc

SEQ ID NO: 123251 - DNA, 15 bp, Homo sapiens
cttttataaaataat

SEQ ID NO: 123252 - DNA, 15 bp, Homo sapiens
ccttttataaaataa

SEQ ID NO: 123253 - DNA, 15 bp, Homo sapiens
tccttttataaaata

SEQ ID NO: 123254 - DNA, 15 bp, Homo sapiens
ctccttttataaaat

SEQ ID NO: 123255 - DNA, 15 bp, Homo sapiens
cctccttttataaaa

SEQ ID NO: 123256 - DNA, 15 bp, Homo sapiens
acctccttttataaa

SEQ ID NO: 123257 - DNA, 15 bp, Homo sapiens
aacctccttttataa

SEQ ID NO: 123258 - DNA, 15 bp, Homo sapiens
gaacctccttttata

SEQ ID NO: 123259 - DNA, 15 bp, Homo sapiens
ggaacctccttttat

SEQ ID NO: 123260 - DNA, 15 bp, Homo sapiens
tggaacctcctttta

SEQ ID NO: 123261 - DNA, 15 bp, Homo sapiens
ctggaacctcctttt

SEQ ID NO: 123262 - DNA, 15 bp, Homo sapiens
gctggaacctccttt

SEQ ID NO: 123263 - DNA, 15 bp, Homo sapiens
ggctggaacctcctt

SEQ ID NO: 123264 - DNA, 15 bp, Homo sapiens
gggctggaacctcct

SEQ ID NO: 123265 - DNA, 15 bp, Homo sapiens
tgggctggaacctcc

SEQ ID NO: 123266 - DNA, 15 bp, Homo sapiens
ctgggctggaacctc

SEQ ID NO: 123267 - DNA, 15 bp, Homo sapiens
gctgggctggaacct

SEQ ID NO: 123268 - DNA, 15 bp, Homo sapiens
tgctgggctggaacc

SEQ ID NO: 123269 - DNA, 15 bp, Homo sapiens
atgctgggctggaac

SEQ ID NO: 123270 - DNA, 15 bp, Homo sapiens
aatgctgggctggaa

SEQ ID NO: 123271 - DNA, 15 bp, Homo sapiens
taatgctgggctgga

SEQ ID NO: 123272 - DNA, 15 bp, Homo sapiens
ttaatgctgggctgg

SEQ ID NO: 123273 - DNA, 15 bp, Homo sapiens
gttaatgctgggctg

SEQ ID NO: 123274 - DNA, 15 bp, Homo sapiens
tgttaatgctgggct

SEQ ID NO: 123275 - DNA, 15 bp, Homo sapiens
ttgttaatgctgggc

SEQ ID NO: 123276 - DNA, 15 bp, Homo sapiens
cttgttaatgctggg

SEQ ID NO: 123277 - DNA, 15 bp, Homo sapiens
ccttgttaatgctgg

SEQ ID NO: 123278 - DNA, 15 bp, Homo sapiens
cccttgttaatgctg

SEQ ID NO: 123279 - DNA, 15 bp, Homo sapiens
gcccttgttaatgct

SEQ ID NO: 123280 - DNA, 15 bp, Homo sapiens
tgcccttgttaatgc

SEQ ID NO: 123281 - DNA, 15 bp, Homo sapiens
ttgcccttgttaatg

SEQ ID NO: 123282 - DNA, 15 bp, Homo sapiens
cttgcccttgttaat

SEQ ID NO: 123283 - DNA, 15 bp, Homo sapiens
tcttgcccttgttaa

SEQ ID NO: 123284 - DNA, 15 bp, Homo sapiens
ctcttgcccttgtta

SEQ ID NO: 123285 - DNA, 15 bp, Homo sapiens
actcttgcccttgtt

SEQ ID NO: 123286 - DNA, 15 bp, Homo sapiens
cactcttgcccttgt

SEQ ID NO: 123287 - DNA, 15 bp, Homo sapiens
gcactcttgcccttg

SEQ ID NO: 123288 - DNA, 15 bp, Homo sapiens
tgcactcttgccctt

SEQ ID NO: 123289 - DNA, 15 bp, Homo sapiens
ctgcactcttgccct

SEQ ID NO: 123290 - DNA, 15 bp, Homo sapiens
cctgcactcttgccc

SEQ ID NO: 123291 - DNA, 15 bp, Homo sapiens
tcctgcactcttgcc

SEQ ID NO: 123292 - DNA, 15 bp, Homo sapiens
ttcctgcactcttgc

SEQ ID NO: 123293 - DNA, 15 bp, Homo sapiens
cttcctgcactcttg

SEQ ID NO: 123294 - DNA, 15 bp, Homo sapiens
tcttcctgcactctt

SEQ ID NO: 123295 - DNA, 15 bp, Homo sapiens
ttcttcctgcactct

SEQ ID NO: 123296 - DNA, 15 bp, Homo sapiens
gttcttcctgcactc

SEQ ID NO: 123297 - DNA, 15 bp, Homo sapiens
tgttcttcctgcact

SEQ ID NO: 123298 - DNA, 15 bp, Homo sapiens
atgttcttcctgcac

SEQ ID NO: 123299 - DNA, 15 bp, Homo sapiens
gatgttcttcctgca

SEQ ID NO: 123300 - DNA, 15 bp, Homo sapiens
tgatgttcttcctgc

SEQ ID NO: 123301 - DNA, 15 bp, Homo sapiens
ttgatgttcttcctg

SEQ ID NO: 123302 - DNA, 15 bp, Homo sapiens
cttgatgttcttcct

SEQ ID NO: 123303 - DNA, 15 bp, Homo sapiens
ccttgatgttcttcc

SEQ ID NO: 123304 - DNA, 15 bp, Homo sapiens
cccttgatgttcttc

SEQ ID NO: 123305 - DNA, 15 bp, Homo sapiens
ccccttgatgttctt

SEQ ID NO: 123306 - DNA, 15 bp, Homo sapiens
cccccttgatgttct

SEQ ID NO: 123307 - DNA, 15 bp, Homo sapiens
tcccccttgatgttc

SEQ ID NO: 123308 - DNA, 15 bp, Homo sapiens
gtcccccttgatgtt

SEQ ID NO: 123309 - DNA, 15 bp, Homo sapiens
tgtcccccttgatgt

SEQ ID NO: 123310 - DNA, 15 bp, Homo sapiens
ttgtcccccttgatg

SEQ ID NO: 123311 - DNA, 15 bp, Homo sapiens
attgtcccccttgat

SEQ ID NO: 123312 - DNA, 15 bp, Homo sapiens
gattgtcccccttga

SEQ ID NO: 123313 - DNA, 15 bp, Homo sapiens
tgattgtcccccttg

SEQ ID NO: 123314 - DNA, 15 bp, Homo sapiens
ctgattgtccccctt

SEQ ID NO: 123315 - DNA, 15 bp, Homo sapiens
tctgattgtccccct

SEQ ID NO: 123316 - DNA, 15 bp, Homo sapiens
ctctgattgtccccc

SEQ ID NO: 123317 - DNA, 15 bp, Homo sapiens
tctctgattgtcccc

SEQ ID NO: 123318 - DNA, 15 bp, Homo sapiens
ttctctgattgtccc

SEQ ID NO: 123319 - DNA, 15 bp, Homo sapiens
cttctctgattgtcc

SEQ ID NO: 123320 - DNA, 15 bp, Homo sapiens
ccttctctgattgtc

SEQ ID NO: 123321 - DNA, 15 bp, Homo sapiens
tccttctctgattgt

SEQ ID NO: 123322 - DNA, 15 bp, Homo sapiens
atccttctctgattg

SEQ ID NO: 123323 - DNA, 15 bp, Homo sapiens
gatccttctctgatt

SEQ ID NO: 123324 - DNA, 15 bp, Homo sapiens
ggatccttctctgat

SEQ ID NO: 123325 - DNA, 15 bp, Homo sapiens
gggatccttctctga

SEQ ID NO: 123326 - DNA, 15 bp, Homo sapiens
ggggatccttctctg

SEQ ID NO: 123327 - DNA, 15 bp, Homo sapiens
tggggatccttctct

SEQ ID NO: 123328 - DNA, 15 bp, Homo sapiens
atggggatccttctc

SEQ ID NO: 123329 - DNA, 15 bp, Homo sapiens
aatggggatccttct

SEQ ID NO: 123330 - DNA, 15 bp, Homo sapiens
caatggggatccttc

SEQ ID NO: 123331 - DNA, 15 bp, Homo sapiens
gcaatggggatcctt

SEQ ID NO: 123332 - DNA, 15 bp, Homo sapiens
ggcaatggggatcct

SEQ ID NO: 123333 - DNA, 15 bp, Homo sapiens
tggcaatggggatcc

SEQ ID NO: 123334 - DNA, 15 bp, Homo sapiens
gtggcaatggggatc

SEQ ID NO: 123335 - DNA, 15 bp, Homo sapiens
tgtggcaatggggat

SEQ ID NO: 123336 - DNA, 15 bp, Homo sapiens
atgtggcaatgggga

SEQ ID NO: 123337 - DNA, 15 bp, Homo sapiens
aatgtggcaatgggg

SEQ ID NO: 123338 - DNA, 15 bp, Homo sapiens
gaatgtggcaatggg

SEQ ID NO: 123339 - DNA, 15 bp, Homo sapiens
agaatgtggcaatgg

SEQ ID NO: 123340 - DNA, 15 bp, Homo sapiens
tagaatgtggcaatg

SEQ ID NO: 123341 - DNA, 15 bp, Homo sapiens
ctagaatgtggcaat

SEQ ID NO: 123342 - DNA, 15 bp, Homo sapiens
gctagaatgtggcaa

SEQ ID NO: 123343 - DNA, 15 bp, Homo sapiens
tgctagaatgtggca

SEQ ID NO: 123344 - DNA, 15 bp, Homo sapiens
atgctagaatgtggc

SEQ ID NO: 123345 - DNA, 15 bp, Homo sapiens
gatgctagaatgtgg

SEQ ID NO: 123346 - DNA, 15 bp, Homo sapiens
agatgctagaatgtg

SEQ ID NO: 123347 - DNA, 15 bp, Homo sapiens
cagatgctagaatgt

SEQ ID NO: 123348 - DNA, 15 bp, Homo sapiens
acagatgctagaatg

SEQ ID NO: 123349 - DNA, 15 bp, Homo sapiens
aacagatgctagaat

SEQ ID NO: 123350 - DNA, 15 bp, Homo sapiens
caacagatgctagaa

SEQ ID NO: 123351 - DNA, 15 bp, Homo sapiens
ccaacagatgctaga

SEQ ID NO: 123352 - DNA, 15 bp, Homo sapiens
cccaacagatgctag

SEQ ID NO: 123353 - DNA, 15 bp, Homo sapiens
gcccaacagatgcta

SEQ ID NO: 123354 - DNA, 15 bp, Homo sapiens
agcccaacagatgct

SEQ ID NO: 123355 - DNA, 15 bp, Homo sapiens
aagcccaacagatgc

SEQ ID NO: 123356 - DNA, 15 bp, Homo sapiens
aaagcccaacagatg

SEQ ID NO: 123357 - DNA, 15 bp, Homo sapiens
caaagcccaacagat

SEQ ID NO: 123358 - DNA, 15 bp, Homo sapiens
ccaaagcccaacaga

SEQ ID NO: 123359 - DNA, 15 bp, Homo sapiens
tccaaagcccaacag

SEQ ID NO: 123360 - DNA, 15 bp, Homo sapiens
atccaaagcccaaca

SEQ ID NO: 123361 - DNA, 15 bp, Homo sapiens
tatccaaagcccaac

SEQ ID NO: 123362 - DNA, 15 bp, Homo sapiens
ttatccaaagcccaa

SEQ ID NO: 123363 - DNA, 15 bp, Homo sapiens
tttatccaaagccca

SEQ ID NO: 123364 - DNA, 15 bp, Homo sapiens
ttttatccaaagccc

SEQ ID NO: 123365 - DNA, 15 bp, Homo sapiens
gttttatccaaagcc

SEQ ID NO: 123366 - DNA, 15 bp, Homo sapiens
agttttatccaaagc

SEQ ID NO: 123367 - DNA, 15 bp, Homo sapiens
tagttttatccaaag

SEQ ID NO: 123368 - DNA, 15 bp, Homo sapiens
ttagttttatccaaa

SEQ ID NO: 123369 - DNA, 15 bp, Homo sapiens
attagttttatccaa

SEQ ID NO: 123370 - DNA, 15 bp, Homo sapiens
aattagttttatcca

SEQ ID NO: 123371 - DNA, 15 bp, Homo sapiens
taattagttttatcc

SEQ ID NO: 123372 - DNA, 15 bp, Homo sapiens
gtaattagttttatc

SEQ ID NO: 123373 - DNA, 15 bp, Homo sapiens
tgtaattagttttat

SEQ ID NO: 123374 - DNA, 15 bp, Homo sapiens
atgtaattagtttta

SEQ ID NO: 123375 - DNA, 15 bp, Homo sapiens
catgtaattagtttt

SEQ ID NO: 123376 - DNA, 15 bp, Homo sapiens
ccatgtaattagttt

SEQ ID NO: 123377 - DNA, 15 bp, Homo sapiens
cccatgtaattagtt

SEQ ID NO: 123378 - DNA, 15 bp, Homo sapiens
ccccatgtaattagt

SEQ ID NO: 123379 - DNA, 15 bp, Homo sapiens
gccccatgtaattag

SEQ ID NO: 123380 - DNA, 15 bp, Homo sapiens
ggccccatgtaatta

SEQ ID NO: 123381 - DNA, 15 bp, Homo sapiens
aggccccatgtaatt

SEQ ID NO: 123382 - DNA, 15 bp, Homo sapiens
gaggccccatgtaat

SEQ ID NO: 123383 - DNA, 15 bp, Homo sapiens
agaggccccatgtaa

SEQ ID NO: 123384 - DNA, 15 bp, Homo sapiens
cagaggccccatgta

SEQ ID NO: 123385 - DNA, 15 bp, Homo sapiens
tcagaggccccatgt

SEQ ID NO: 123386 - DNA, 15 bp, Homo sapiens
atcagaggccccatg

SEQ ID NO: 123387 - DNA, 15 bp, Homo sapiens
aatcagaggccccat

SEQ ID NO: 123388 - DNA, 15 bp, Homo sapiens
caatcagaggcccca

SEQ ID NO: 123389 - DNA, 15 bp, Homo sapiens
acaatcagaggcccc

SEQ ID NO: 123390 - DNA, 15 bp, Homo sapiens
gacaatcagaggccc

SEQ ID NO: 123391 - DNA, 15 bp, Homo sapiens
ggacaatcagaggcc

SEQ ID NO: 123392 - DNA, 15 bp, Homo sapiens
tggacaatcagaggc

SEQ ID NO: 123393 - DNA, 15 bp, Homo sapiens
ctggacaatcagagg

SEQ ID NO: 123394 - DNA, 15 bp, Homo sapiens
actggacaatcagag

SEQ ID NO: 123395 - DNA, 15 bp, Homo sapiens
aactggacaatcaga

SEQ ID NO: 123396 - DNA, 15 bp, Homo sapiens
taactggacaatcag

SEQ ID NO: 123397 - DNA, 15 bp, Homo sapiens
ataactggacaatca

SEQ ID NO: 123398 - DNA, 15 bp, Homo sapiens
aataactggacaatc

SEQ ID NO: 123399 - DNA, 15 bp, Homo sapiens
aaataactggacaat

SEQ ID NO: 123400 - DNA, 15 bp, Homo sapiens
taaataactggacaa

SEQ ID NO: 123401 - DNA, 15 bp, Homo sapiens
ttaaataactggaca

SEQ ID NO: 123402 - DNA, 15 bp, Homo sapiens
tttaaataactggac

SEQ ID NO: 123403 - DNA, 15 bp, Homo sapiens
ttttaaataactgga

SEQ ID NO: 123404 - DNA, 15 bp, Homo sapiens
attttaaataactgg

SEQ ID NO: 123405 - DNA, 15 bp, Homo sapiens
cattttaaataactg

SEQ ID NO: 123406 - DNA, 15 bp, Homo sapiens
ccattttaaataact

SEQ ID NO: 123407 - DNA, 15 bp, Homo sapiens
accattttaaataac

SEQ ID NO: 123408 - DNA, 15 bp, Homo sapiens
caccattttaaataa

SEQ ID NO: 123409 - DNA, 15 bp, Homo sapiens
gcaccattttaaata

SEQ ID NO: 123410 - DNA, 15 bp, Homo sapiens
agcaccattttaaat

SEQ ID NO: 123411 - DNA, 15 bp, Homo sapiens
cagcaccattttaaa

SEQ ID NO: 123412 - DNA, 15 bp, Homo sapiens
acagcaccattttaa

SEQ ID NO: 123413 - DNA, 15 bp, Homo sapiens
gacagcaccatttta

SEQ ID NO: 123414 - DNA, 15 bp, Homo sapiens
ggacagcaccatttt

SEQ ID NO: 123415 - DNA, 15 bp, Homo sapiens
tggacagcaccattt

SEQ ID NO: 123416 - DNA, 15 bp, Homo sapiens
ttggacagcaccatt

SEQ ID NO: 123417 - DNA, 15 bp, Homo sapiens
attggacagcaccat

SEQ ID NO: 123418 - DNA, 15 bp, Homo sapiens
cattggacagcacca

SEQ ID NO: 123419 - DNA, 15 bp, Homo sapiens
acattggacagcacc

SEQ ID NO: 123420 - DNA, 15 bp, Homo sapiens
gacattggacagcac

SEQ ID NO: 123421 - DNA, 15 bp, Homo sapiens
ggacattggacagca

SEQ ID NO: 123422 - DNA, 15 bp, Homo sapiens
gggacattggacagc

SEQ ID NO: 123423 - DNA, 15 bp, Homo sapiens
tgggacattggacag

SEQ ID NO: 123424 - DNA, 15 bp, Homo sapiens
ttgggacattggaca

SEQ ID NO: 123425 - DNA, 15 bp, Homo sapiens
tttgggacattggac

SEQ ID NO: 123426 - DNA, 15 bp, Homo sapiens
ttttgggacattgga

SEQ ID NO: 123427 - DNA, 15 bp, Homo sapiens
gttttgggacattgg

SEQ ID NO: 123428 - DNA, 15 bp, Homo sapiens
tgttttgggacattg

SEQ ID NO: 123429 - DNA, 15 bp, Homo sapiens
atgttttgggacatt

SEQ ID NO: 123430 - DNA, 15 bp, Homo sapiens
catgttttgggacat

SEQ ID NO: 123431 - DNA, 15 bp, Homo sapiens
gcatgttttgggaca

SEQ ID NO: 123432 - DNA, 15 bp, Homo sapiens
agcatgttttgggac

SEQ ID NO: 123433 - DNA, 15 bp, Homo sapiens
cagcatgttttggga

SEQ ID NO: 123434 - DNA, 15 bp, Homo sapiens
gcagcatgttttggg

SEQ ID NO: 123435 - DNA, 15 bp, Homo sapiens
ggcagcatgttttgg

SEQ ID NO: 123436 - DNA, 15 bp, Homo sapiens
aggcagcatgttttg

SEQ ID NO: 123437 - DNA, 15 bp, Homo sapiens
taggcagcatgtttt

SEQ ID NO: 123438 - DNA, 15 bp, Homo sapiens
ttaggcagcatgttt

SEQ ID NO: 123439 - DNA, 15 bp, Homo sapiens
cttaggcagcatgtt

SEQ ID NO: 123440 - DNA, 15 bp, Homo sapiens
tcttaggcagcatgt

SEQ ID NO: 123441 - DNA, 15 bp, Homo sapiens
ctcttaggcagcatg

SEQ ID NO: 123442 - DNA, 15 bp, Homo sapiens
cctcttaggcagcat

SEQ ID NO: 123443 - DNA, 15 bp, Homo sapiens
acctcttaggcagca

SEQ ID NO: 123444 - DNA, 15 bp, Homo sapiens
tacctcttaggcagc

SEQ ID NO: 123445 - DNA, 15 bp, Homo sapiens
gtacctcttaggcag

SEQ ID NO: 123446 - DNA, 15 bp, Homo sapiens
agtacctcttaggca

SEQ ID NO: 123447 - DNA, 15 bp, Homo sapiens
aagtacctcttaggc

SEQ ID NO: 123448 - DNA, 15 bp, Homo sapiens
caagtacctcttagg

SEQ ID NO: 123449 - DNA, 15 bp, Homo sapiens
tcaagtacctcttag

SEQ ID NO: 123450 - DNA, 15 bp, Homo sapiens
ttcaagtacctctta

SEQ ID NO: 123451 - DNA, 15 bp, Homo sapiens
cttcaagtacctctt

SEQ ID NO: 123452 - DNA, 15 bp, Homo sapiens
acttcaagtacctct

SEQ ID NO: 123453 - DNA, 15 bp, Homo sapiens
aacttcaagtacctc

SEQ ID NO: 123454 - DNA, 15 bp, Homo sapiens
gaacttcaagtacct

SEQ ID NO: 123455 - DNA, 15 bp, Homo sapiens
agaacttcaagtacc

SEQ ID NO: 123456 - DNA, 15 bp, Homo sapiens
gagaacttcaagtac

SEQ ID NO: 123457 - DNA, 15 bp, Homo sapiens
agagaacttcaagta

SEQ ID NO: 123458 - DNA, 15 bp, Homo sapiens
tagagaacttcaagt

SEQ ID NO: 123459 - DNA, 15 bp, Homo sapiens
ctagagaacttcaag

SEQ ID NO: 123460 - DNA, 15 bp, Homo sapiens
tctagagaacttcaa

SEQ ID NO: 123461 - DNA, 15 bp, Homo sapiens
ctctagagaacttca

SEQ ID NO: 123462 - DNA, 15 bp, Homo sapiens
cctctagagaacttc

SEQ ID NO: 123463 - DNA, 15 bp, Homo sapiens
tcctctagagaactt

SEQ ID NO: 123464 - DNA, 15 bp, Homo sapiens
ctcctctagagaact

SEQ ID NO: 123465 - DNA, 15 bp, Homo sapiens
gctcctctagagaac

SEQ ID NO: 123466 - DNA, 15 bp, Homo sapiens
tgctcctctagagaa

SEQ ID NO: 123467 - DNA, 15 bp, Homo sapiens
ctgctcctctagaga

SEQ ID NO: 123468 - DNA, 15 bp, Homo sapiens
tctgctcctctagag

SEQ ID NO: 123469 - DNA, 15 bp, Homo sapiens
ctctgctcctctaga

SEQ ID NO: 123470 - DNA, 15 bp, Homo sapiens
cctctgctcctctag

SEQ ID NO: 123471 - DNA, 15 bp, Homo sapiens
ccctctgctcctcta

SEQ ID NO: 123472 - DNA, 15 bp, Homo sapiens
tccctctgctcctct

SEQ ID NO: 123473 - DNA, 15 bp, Homo sapiens
ttccctctgctcctc

SEQ ID NO: 123474 - DNA, 15 bp, Homo sapiens
tttccctctgctcct

SEQ ID NO: 123475 - DNA, 15 bp, Homo sapiens
ttttccctctgctcc

SEQ ID NO: 123476 - DNA, 15 bp, Homo sapiens
cttttccctctgctc

SEQ ID NO: 123477 - DNA, 15 bp, Homo sapiens
tcttttccctctgct

SEQ ID NO: 123478 - DNA, 15 bp, Homo sapiens
atcttttccctctgc

SEQ ID NO: 123479 - DNA, 15 bp, Homo sapiens
catcttttccctctg

SEQ ID NO: 123480 - DNA, 15 bp, Homo sapiens
acatcttttccctct

SEQ ID NO: 123481 - DNA, 15 bp, Homo sapiens
gacatcttttccctc

SEQ ID NO: 123482 - DNA, 15 bp, Homo sapiens
cgacatcttttccct

SEQ ID NO: 123483 - DNA, 15 bp, Homo sapiens
tcgacatcttttccc

SEQ ID NO: 123484 - DNA, 15 bp, Homo sapiens
ttcgacatcttttcc

SEQ ID NO: 123485 - DNA, 15 bp, Homo sapiens
gttcgacatcttttc

SEQ ID NO: 123486 - DNA, 15 bp, Homo sapiens
agttcgacatctttt

SEQ ID NO: 123487 - DNA, 15 bp, Homo sapiens
cagttcgacatcttt

SEQ ID NO: 123488 - DNA, 15 bp, Homo sapiens
acagttcgacatctt

SEQ ID NO: 123489 - DNA, 15 bp, Homo sapiens
cacagttcgacatct

SEQ ID NO: 123490 - DNA, 15 bp, Homo sapiens
ccacagttcgacatc

SEQ ID NO: 123491 - DNA, 15 bp, Homo sapiens
gccacagttcgacat

SEQ ID NO: 123492 - DNA, 15 bp, Homo sapiens
tgccacagttcgaca

SEQ ID NO: 123493 - DNA, 15 bp, Homo sapiens
ttgccacagttcgac

SEQ ID NO: 123494 - DNA, 15 bp, Homo sapiens
attgccacagttcga

SEQ ID NO: 123495 - DNA, 15 bp, Homo sapiens
aattgccacagttcg

SEQ ID NO: 123496 - DNA, 15 bp, Homo sapiens
aaattgccacagttc

SEQ ID NO: 123497 - DNA, 15 bp, Homo sapiens
aaaattgccacagtt

SEQ ID NO: 123498 - DNA, 15 bp, Homo sapiens
taaaattgccacagt

SEQ ID NO: 123499 - DNA, 15 bp, Homo sapiens
ttaaaattgccacag

SEQ ID NO: 123500 - DNA, 15 bp, Homo sapiens
gttaaaattgccaca

SEQ ID NO: 123501 - DNA, 15 bp, Homo sapiens
agttaaaattgccac

SEQ ID NO: 123502 - DNA, 15 bp, Homo sapiens
aagttaaaattgcca

SEQ ID NO: 123503 - DNA, 15 bp, Homo sapiens
aaagttaaaattgcc

SEQ ID NO: 123504 - DNA, 15 bp, Homo sapiens
aaaagttaaaattgc

SEQ ID NO: 123505 - DNA, 15 bp, Homo sapiens
gaaaagttaaaattg

SEQ ID NO: 123506 - DNA, 15 bp, Homo sapiens
tgaaaagttaaaatt

SEQ ID NO: 123507 - DNA, 15 bp, Homo sapiens
ttgaaaagttaaaat

SEQ ID NO: 123508 - DNA, 15 bp, Homo sapiens
tttgaaaagttaaaa

SEQ ID NO: 123509 - DNA, 15 bp, Homo sapiens
atttgaaaagttaaa

SEQ ID NO: 123510 - DNA, 15 bp, Homo sapiens
aatttgaaaagttaa

SEQ ID NO: 123511 - DNA, 15 bp, Homo sapiens
caatttgaaaagtta

SEQ ID NO: 123512 - DNA, 15 bp, Homo sapiens
tcaatttgaaaagtt

SEQ ID NO: 123513 - DNA, 15 bp, Homo sapiens
atcaatttgaaaagt

SEQ ID NO: 123514 - DNA, 15 bp, Homo sapiens
aatcaatttgaaaag

SEQ ID NO: 123515 - DNA, 15 bp, Homo sapiens
gaatcaatttgaaaa

SEQ ID NO: 123516 - DNA, 15 bp, Homo sapiens
agaatcaatttgaaa

SEQ ID NO: 123517 - DNA, 15 bp, Homo sapiens
tagaatcaatttgaa

SEQ ID NO: 123518 - DNA, 15 bp, Homo sapiens
atagaatcaatttga

SEQ ID NO: 123519 - DNA, 15 bp, Homo sapiens
gatagaatcaatttg

SEQ ID NO: 123520 - DNA, 15 bp, Homo sapiens
agatagaatcaattt

SEQ ID NO: 123521 - DNA, 15 bp, Homo sapiens
gagatagaatcaatt

SEQ ID NO: 123522 - DNA, 15 bp, Homo sapiens
ggagatagaatcaat

SEQ ID NO: 123523 - DNA, 15 bp, Homo sapiens
aggagatagaatcaa

SEQ ID NO: 123524 - DNA, 15 bp, Homo sapiens
caggagatagaatca

SEQ ID NO: 123525 - DNA, 15 bp, Homo sapiens
ccaggagatagaatc

SEQ ID NO: 123526 - DNA, 15 bp, Homo sapiens
gccaggagatagaat

SEQ ID NO: 123527 - DNA, 15 bp, Homo sapiens
cgccaggagatagaa

SEQ ID NO: 123528 - DNA, 15 bp, Homo sapiens
tcgccaggagataga

SEQ ID NO: 123529 - DNA, 15 bp, Homo sapiens
atcgccaggagatag

SEQ ID NO: 123530 - DNA, 15 bp, Homo sapiens
tatcgccaggagata

SEQ ID NO: 123531 - DNA, 15 bp, Homo sapiens
ttatcgccaggagat

SEQ ID NO: 123532 - DNA, 15 bp, Homo sapiens
gttatcgccaggaga

SEQ ID NO: 123533 - DNA, 15 bp, Homo sapiens
ggttatcgccaggag

SEQ ID NO: 123534 - DNA, 15 bp, Homo sapiens
tggttatcgccagga

SEQ ID NO: 123535 - DNA, 15 bp, Homo sapiens
ttggttatcgccagg

SEQ ID NO: 123536 - DNA, 15 bp, Homo sapiens
attggttatcgccag

SEQ ID NO: 123537 - DNA, 15 bp, Homo sapiens
aattggttatcgcca

SEQ ID NO: 123538 - DNA, 15 bp, Homo sapiens
aaattggttatcgcc

SEQ ID NO: 123539 - DNA, 15 bp, Homo sapiens
aaaattggttatcgc

SEQ ID NO: 123540 - DNA, 15 bp, Homo sapiens
gaaaattggttatcg

SEQ ID NO: 123541 - DNA, 15 bp, Homo sapiens
ggaaaattggttatc

SEQ ID NO: 123542 - DNA, 15 bp, Homo sapiens
gggaaaattggttat

SEQ ID NO: 123543 - DNA, 15 bp, Homo sapiens
tgggaaaattggtta

SEQ ID NO: 123544 - DNA, 15 bp, Homo sapiens
gtgggaaaattggtt

SEQ ID NO: 123545 - DNA, 15 bp, Homo sapiens
ggtgggaaaattggt

SEQ ID NO: 123546 - DNA, 15 bp, Homo sapiens
tggtgggaaaattgg

SEQ ID NO: 123547 - DNA, 15 bp, Homo sapiens
atggtgggaaaattg

SEQ ID NO: 123548 - DNA, 15 bp, Homo sapiens
gatggtgggaaaatt

SEQ ID NO: 123549 - DNA, 15 bp, Homo sapiens
agatggtgggaaaat

SEQ ID NO: 123550 - DNA, 15 bp, Homo sapiens
aagatggtgggaaaa

SEQ ID NO: 123551 - DNA, 15 bp, Homo sapiens
aaagatggtgggaaa

SEQ ID NO: 123552 - DNA, 15 bp, Homo sapiens
gaaagatggtgggaa

SEQ ID NO: 123553 - DNA, 15 bp, Homo sapiens
ggaaagatggtggga

SEQ ID NO: 123554 - DNA, 15 bp, Homo sapiens
aggaaagatggtggg

SEQ ID NO: 123555 - DNA, 15 bp, Homo sapiens
gaggaaagatggtgg

SEQ ID NO: 123556 - DNA, 15 bp, Homo sapiens
agaggaaagatggtg

SEQ ID NO: 123557 - DNA, 15 bp, Homo sapiens
aagaggaaagatggt

SEQ ID NO: 123558 - DNA, 15 bp, Homo sapiens
taagaggaaagatgg

SEQ ID NO: 123559 - DNA, 15 bp, Homo sapiens
ctaagaggaaagatg

SEQ ID NO: 123560 - DNA, 15 bp, Homo sapiens
cctaagaggaaagat

SEQ ID NO: 123561 - DNA, 15 bp, Homo sapiens
tcctaagaggaaaga

SEQ ID NO: 123562 - DNA, 15 bp, Homo sapiens
ctcctaagaggaaag

SEQ ID NO: 123563 - DNA, 15 bp, Homo sapiens
tctcctaagaggaaa

SEQ ID NO: 123564 - DNA, 15 bp, Homo sapiens
gtctcctaagaggaa

SEQ ID NO: 123565 - DNA, 15 bp, Homo sapiens
agtctcctaagagga

SEQ ID NO: 123566 - DNA, 15 bp, Homo sapiens
aagtctcctaagagg

SEQ ID NO: 123567 - DNA, 15 bp, Homo sapiens
caagtctcctaagag

SEQ ID NO: 123568 - DNA, 15 bp, Homo sapiens
gcaagtctcctaaga

SEQ ID NO: 123569 - DNA, 15 bp, Homo sapiens
ggcaagtctcctaag

SEQ ID NO: 123570 - DNA, 15 bp, Homo sapiens
aggcaagtctcctaa

SEQ ID NO: 123571 - DNA, 15 bp, Homo sapiens
caggcaagtctccta

SEQ ID NO: 123572 - DNA, 15 bp, Homo sapiens
ccaggcaagtctcct

SEQ ID NO: 123573 - DNA, 15 bp, Homo sapiens
accaggcaagtctcc

SEQ ID NO: 123574 - DNA, 15 bp, Homo sapiens
caccaggcaagtctc

SEQ ID NO: 123575 - DNA, 15 bp, Homo sapiens
tcaccaggcaagtct

SEQ ID NO: 123576 - DNA, 15 bp, Homo sapiens
ttcaccaggcaagtc

SEQ ID NO: 123577 - DNA, 15 bp, Homo sapiens
tttcaccaggcaagt

SEQ ID NO: 123578 - DNA, 15 bp, Homo sapiens
ttttcaccaggcaag

SEQ ID NO: 123579 - DNA, 15 bp, Homo sapiens
attttcaccaggcaa

SEQ ID NO: 123580 - DNA, 15 bp, Homo sapiens
gattttcaccaggca

SEQ ID NO: 123581 - DNA, 15 bp, Homo sapiens
tgattttcaccaggc

SEQ ID NO: 123582 - DNA, 15 bp, Homo sapiens
atgattttcaccagg

SEQ ID NO: 123583 - DNA, 15 bp, Homo sapiens
gatgattttcaccag

SEQ ID NO: 123584 - DNA, 15 bp, Homo sapiens
tgatgattttcacca

SEQ ID NO: 123585 - DNA, 15 bp, Homo sapiens
gtgatgattttcacc

SEQ ID NO: 123586 - DNA, 15 bp, Homo sapiens
agtgatgattttcac

SEQ ID NO: 123587 - DNA, 15 bp, Homo sapiens
cagtgatgattttca

SEQ ID NO: 123588 - DNA, 15 bp, Homo sapiens
ccagtgatgattttc

SEQ ID NO: 123589 - DNA, 15 bp, Homo sapiens
accagtgatgatttt

SEQ ID NO: 123590 - DNA, 15 bp, Homo sapiens
gaccagtgatgattt

SEQ ID NO: 123591 - DNA, 15 bp, Homo sapiens
agaccagtgatgatt

SEQ ID NO: 123592 - DNA, 15 bp, Homo sapiens
aagaccagtgatgat

SEQ ID NO: 123593 - DNA, 15 bp, Homo sapiens
aaagaccagtgatga

SEQ ID NO: 123594 - DNA, 15 bp, Homo sapiens
aaaagaccagtgatg

SEQ ID NO: 123595 - DNA, 15 bp, Homo sapiens
caaaagaccagtgat

SEQ ID NO: 123596 - DNA, 15 bp, Homo sapiens
ccaaaagaccagtga

SEQ ID NO: 123597 - DNA, 15 bp, Homo sapiens
tccaaaagaccagtg

SEQ ID NO: 123598 - DNA, 15 bp, Homo sapiens
ctccaaaagaccagt

SEQ ID NO: 123599 - DNA, 15 bp, Homo sapiens
actccaaaagaccag

SEQ ID NO: 123600 - DNA, 15 bp, Homo sapiens
aactccaaaagacca

SEQ ID NO: 123601 - DNA, 15 bp, Homo sapiens
aaactccaaaagacc

SEQ ID NO: 123602 - DNA, 15 bp, Homo sapiens
caaactccaaaagac

SEQ ID NO: 123603 - DNA, 15 bp, Homo sapiens
tcaaactccaaaaga

SEQ ID NO: 123604 - DNA, 15 bp, Homo sapiens
ctcaaactccaaaag

SEQ ID NO: 123605 - DNA, 15 bp, Homo sapiens
cctcaaactccaaaa

SEQ ID NO: 123606 - DNA, 15 bp, Homo sapiens
acctcaaactccaaa

SEQ ID NO: 123607 - DNA, 15 bp, Homo sapiens
tacctcaaactccaa

SEQ ID NO: 123608 - DNA, 15 bp, Homo sapiens
atacctcaaactcca

SEQ ID NO: 123609 - DNA, 15 bp, Homo sapiens
tatacctcaaactcc

SEQ ID NO: 123610 - DNA, 15 bp, Homo sapiens
gtatacctcaaactc

SEQ ID NO: 123611 - DNA, 15 bp, Homo sapiens
ggtatacctcaaact

SEQ ID NO: 123612 - DNA, 15 bp, Homo sapiens
aggtatacctcaaac

SEQ ID NO: 123613 - DNA, 15 bp, Homo sapiens
taggtatacctcaaa

SEQ ID NO: 123614 - DNA, 15 bp, Homo sapiens
ctaggtatacctcaa

SEQ ID NO: 123615 - DNA, 15 bp, Homo sapiens
tctaggtatacctca

SEQ ID NO: 123616 - DNA, 15 bp, Homo sapiens
ctctaggtatacctc

SEQ ID NO: 123617 - DNA, 15 bp, Homo sapiens
actctaggtatacct

SEQ ID NO: 123618 - DNA, 15 bp, Homo sapiens
tactctaggtatacc

SEQ ID NO: 123619 - DNA, 15 bp, Homo sapiens
gtactctaggtatac

SEQ ID NO: 123620 - DNA, 15 bp, Homo sapiens
ggtactctaggtata

SEQ ID NO: 123621 - DNA, 15 bp, Homo sapiens
aggtactctaggtat

SEQ ID NO: 123622 - DNA, 15 bp, Homo sapiens
gaggtactctaggta

SEQ ID NO: 123623 - DNA, 15 bp, Homo sapiens
ggaggtactctaggt

SEQ ID NO: 123624 - DNA, 15 bp, Homo sapiens
tggaggtactctagg

SEQ ID NO: 123625 - DNA, 15 bp, Homo sapiens
ctggaggtactctag

SEQ ID NO: 123626 - DNA, 15 bp, Homo sapiens
tctggaggtactcta

SEQ ID NO: 123627 - DNA, 15 bp, Homo sapiens
ttctggaggtactct

SEQ ID NO: 123628 - DNA, 15 bp, Homo sapiens
gttctggaggtactc

SEQ ID NO: 123629 - DNA, 15 bp, Homo sapiens
tgttctggaggtact

SEQ ID NO: 123630 - DNA, 15 bp, Homo sapiens
ctgttctggaggtac

SEQ ID NO: 123631 - DNA, 15 bp, Homo sapiens
tctgttctggaggta

SEQ ID NO: 123632 - DNA, 15 bp, Homo sapiens
atctgttctggaggt

SEQ ID NO: 123633 - DNA, 15 bp, Homo sapiens
aatctgttctggagg

SEQ ID NO: 123634 - DNA, 15 bp, Homo sapiens
aaatctgttctggag

SEQ ID NO: 123635 - DNA, 15 bp, Homo sapiens
caaatctgttctgga

SEQ ID NO: 123636 - DNA, 15 bp, Homo sapiens
tcaaatctgttctgg

SEQ ID NO: 123637 - DNA, 15 bp, Homo sapiens
ctcaaatctgttctg

SEQ ID NO: 123638 - DNA, 15 bp, Homo sapiens
tctcaaatctgttct

SEQ ID NO: 123639 - DNA, 15 bp, Homo sapiens
ctctcaaatctgttc

SEQ ID NO: 123640 - DNA, 15 bp, Homo sapiens
actctcaaatctgtt

SEQ ID NO: 123641 - DNA, 15 bp, Homo sapiens
tactctcaaatctgt

SEQ ID NO: 123642 - DNA, 15 bp, Homo sapiens
ctactctcaaatctg

SEQ ID NO: 123643 - DNA, 15 bp, Homo sapiens
actactctcaaatct

SEQ ID NO: 123644 - DNA, 15 bp, Homo sapiens
cactactctcaaatc

SEQ ID NO: 123645 - DNA, 15 bp, Homo sapiens
tcactactctcaaat

SEQ ID NO: 123646 - DNA, 15 bp, Homo sapiens
ctcactactctcaaa

SEQ ID NO: 123647 - DNA, 15 bp, Homo sapiens
cctcactactctcaa

SEQ ID NO: 123648 - DNA, 15 bp, Homo sapiens
tcctcactactctca

SEQ ID NO: 123649 - DNA, 15 bp, Homo sapiens
ttcctcactactctc

SEQ ID NO: 123650 - DNA, 15 bp, Homo sapiens
gttcctcactactct

SEQ ID NO: 123651 - DNA, 15 bp, Homo sapiens
tgttcctcactactc

SEQ ID NO: 123652 - DNA, 15 bp, Homo sapiens
ttgttcctcactact

SEQ ID NO: 123653 - DNA, 15 bp, Homo sapiens
cttgttcctcactac

SEQ ID NO: 123654 - DNA, 15 bp, Homo sapiens
gcttgttcctcacta

SEQ ID NO: 123655 - DNA, 15 bp, Homo sapiens
ggcttgttcctcact

SEQ ID NO: 123656 - DNA, 15 bp, Homo sapiens
tggcttgttcctcac

SEQ ID NO: 123657 - DNA, 15 bp, Homo sapiens
ctggcttgttcctca

SEQ ID NO: 123658 - DNA, 15 bp, Homo sapiens
tctggcttgttcctc

SEQ ID NO: 123659 - DNA, 15 bp, Homo sapiens
ctctggcttgttcct

SEQ ID NO: 123660 - DNA, 15 bp, Homo sapiens
gctctggcttgttcc

SEQ ID NO: 123661 - DNA, 15 bp, Homo sapiens
agctctggcttgttc

SEQ ID NO: 123662 - DNA, 15 bp, Homo sapiens
cagctctggcttgtt

SEQ ID NO: 123663 - DNA, 15 bp, Homo sapiens
acagctctggcttgt

SEQ ID NO: 123664 - DNA, 15 bp, Homo sapiens
cacagctctggcttg

SEQ ID NO: 123665 - DNA, 15 bp, Homo sapiens
gcacagctctggctt

SEQ ID NO: 123666 - DNA, 15 bp, Homo sapiens
tgcacagctctggct

SEQ ID NO: 123667 - DNA, 15 bp, Homo sapiens
ctgcacagctctggc

SEQ ID NO: 123668 - DNA, 15 bp, Homo sapiens
tctgcacagctctgg

SEQ ID NO: 123669 - DNA, 15 bp, Homo sapiens
atctgcacagctctg

SEQ ID NO: 123670 - DNA, 15 bp, Homo sapiens
catctgcacagctct

SEQ ID NO: 123671 - DNA, 15 bp, Homo sapiens
tcatctgcacagctc

SEQ ID NO: 123672 - DNA, 15 bp, Homo sapiens
ctcatctgcacagct

SEQ ID NO: 123673 - DNA, 15 bp, Homo sapiens
actcatctgcacagc

SEQ ID NO: 123674 - DNA, 15 bp, Homo sapiens
tactcatctgcacag

SEQ ID NO: 123675 - DNA, 15 bp, Homo sapiens
gtactcatctgcaca

SEQ ID NO: 123676 - DNA, 15 bp, Homo sapiens
tgtactcatctgcac

SEQ ID NO: 123677 - DNA, 15 bp, Homo sapiens
ttgtactcatctgca

SEQ ID NO: 123678 - DNA, 15 bp, Homo sapiens
tttgtactcatctgc

SEQ ID NO: 123679 - DNA, 15 bp, Homo sapiens
ttttgtactcatctg

SEQ ID NO: 123680 - DNA, 15 bp, Homo sapiens
cttttgtactcatct

SEQ ID NO: 123681 - DNA, 15 bp, Homo sapiens
acttttgtactcatc

SEQ ID NO: 123682 - DNA, 15 bp, Homo sapiens
gacttttgtactcat

SEQ ID NO: 123683 - DNA, 15 bp, Homo sapiens
ggacttttgtactca

SEQ ID NO: 123684 - DNA, 15 bp, Homo sapiens
aggacttttgtactc

SEQ ID NO: 123685 - DNA, 15 bp, Homo sapiens
caggacttttgtact

SEQ ID NO: 123686 - DNA, 15 bp, Homo sapiens
tcaggacttttgtac

SEQ ID NO: 123687 - DNA, 15 bp, Homo sapiens
atcaggacttttgta

SEQ ID NO: 123688 - DNA, 15 bp, Homo sapiens
gatcaggacttttgt

SEQ ID NO: 123689 - DNA, 15 bp, Homo sapiens
ggatcaggacttttg

SEQ ID NO: 123690 - DNA, 15 bp, Homo sapiens
tggatcaggactttt

SEQ ID NO: 123691 - DNA, 15 bp, Homo sapiens
ctggatcaggacttt

SEQ ID NO: 123692 - DNA, 15 bp, Homo sapiens
actggatcaggactt

SEQ ID NO: 123693 - DNA, 15 bp, Homo sapiens
aactggatcaggact

SEQ ID NO: 123694 - DNA, 15 bp, Homo sapiens
gaactggatcaggac

SEQ ID NO: 123695 - DNA, 15 bp, Homo sapiens
ggaactggatcagga

SEQ ID NO: 123696 - DNA, 15 bp, Homo sapiens
aggaactggatcagg

SEQ ID NO: 123697 - DNA, 15 bp, Homo sapiens
caggaactggatcag

SEQ ID NO: 123698 - DNA, 15 bp, Homo sapiens
gcaggaactggatca

SEQ ID NO: 123699 - DNA, 15 bp, Homo sapiens
tgcaggaactggatc

SEQ ID NO: 123700 - DNA, 15 bp, Homo sapiens
ctgcaggaactggat

SEQ ID NO: 123701 - DNA, 15 bp, Homo sapiens
tctgcaggaactgga

SEQ ID NO: 123702 - DNA, 15 bp, Homo sapiens
ttctgcaggaactgg

SEQ ID NO: 123703 - DNA, 15 bp, Homo sapiens
tttctgcaggaactg

SEQ ID NO: 123704 - DNA, 15 bp, Homo sapiens
ttttctgcaggaact

SEQ ID NO: 123705 - DNA, 15 bp, Homo sapiens
tttttctgcaggaac

SEQ ID NO: 123706 - DNA, 15 bp, Homo sapiens
ctttttctgcaggaa

SEQ ID NO: 123707 - DNA, 15 bp, Homo sapiens
cctttttctgcagga

SEQ ID NO: 123708 - DNA, 15 bp, Homo sapiens
acctttttctgcagg

SEQ ID NO: 123709 - DNA, 15 bp, Homo sapiens
cacctttttctgcag

SEQ ID NO: 123710 - DNA, 15 bp, Homo sapiens
ccacctttttctgca

SEQ ID NO: 123711 - DNA, 15 bp, Homo sapiens
cccacctttttctgc

SEQ ID NO: 123712 - DNA, 15 bp, Homo sapiens
acccacctttttctg

SEQ ID NO: 123713 - DNA, 15 bp, Homo sapiens
cacccacctttttct

SEQ ID NO: 123714 - DNA, 15 bp, Homo sapiens
acacccacctttttc

SEQ ID NO: 123715 - DNA, 15 bp, Homo sapiens
cacacccaccttttt

SEQ ID NO: 123716 - DNA, 15 bp, Homo sapiens
acacacccacctttt

SEQ ID NO: 123717 - DNA, 15 bp, Homo sapiens
gacacacccaccttt

SEQ ID NO: 123718 - DNA, 15 bp, Homo sapiens
ggacacacccacctt

SEQ ID NO: 123719 - DNA, 15 bp, Homo sapiens
aggacacacccacct

SEQ ID NO: 123720 - DNA, 15 bp, Homo sapiens
gaggacacacccacc

SEQ ID NO: 123721 - DNA, 15 bp, Homo sapiens
tgaggacacacccac

SEQ ID NO: 123722 - DNA, 15 bp, Homo sapiens
atgaggacacaccca

SEQ ID NO: 123723 - DNA, 15 bp, Homo sapiens
aatgaggacacaccc

SEQ ID NO: 123724 - DNA, 15 bp, Homo sapiens
gaatgaggacacacc

SEQ ID NO: 123725 - DNA, 15 bp, Homo sapiens
ggaatgaggacacac

SEQ ID NO: 123726 - DNA, 15 bp, Homo sapiens
gggaatgaggacaca

SEQ ID NO: 123727 - DNA, 15 bp, Homo sapiens
agggaatgaggacac

SEQ ID NO: 123728 - DNA, 15 bp, Homo sapiens
gagggaatgaggaca

SEQ ID NO: 123729 - DNA, 15 bp, Homo sapiens
tgagggaatgaggac

SEQ ID NO: 123730 - DNA, 15 bp, Homo sapiens
ttgagggaatgagga

SEQ ID NO: 123731 - DNA, 15 bp, Homo sapiens
gttgagggaatgagg

SEQ ID NO: 123732 - DNA, 15 bp, Homo sapiens
agttgagggaatgag

SEQ ID NO: 123733 - DNA, 15 bp, Homo sapiens
aagttgagggaatga

SEQ ID NO: 123734 - DNA, 15 bp, Homo sapiens
caagttgagggaatg

SEQ ID NO: 123735 - DNA, 15 bp, Homo sapiens
ccaagttgagggaat

SEQ ID NO: 123736 - DNA, 15 bp, Homo sapiens
accaagttgagggaa

SEQ ID NO: 123737 - DNA, 15 bp, Homo sapiens
caccaagttgaggga

SEQ ID NO: 123738 - DNA, 15 bp, Homo sapiens
acaccaagttgaggg

SEQ ID NO: 123739 - DNA, 15 bp, Homo sapiens
cacaccaagttgagg

SEQ ID NO: 123740 - DNA, 15 bp, Homo sapiens
ccacaccaagttgag

SEQ ID NO: 123741 - DNA, 15 bp, Homo sapiens
cccacaccaagttga

SEQ ID NO: 123742 - DNA, 15 bp, Homo sapiens
ccccacaccaagttg

SEQ ID NO: 123743 - DNA, 15 bp, Homo sapiens
cccccacaccaagtt

SEQ ID NO: 123744 - DNA, 15 bp, Homo sapiens
tcccccacaccaagt

SEQ ID NO: 123745 - DNA, 15 bp, Homo sapiens
ttcccccacaccaag

SEQ ID NO: 123746 - DNA, 15 bp, Homo sapiens
cttcccccacaccaa

SEQ ID NO: 123747 - DNA, 15 bp, Homo sapiens
tcttcccccacacca

SEQ ID NO: 123748 - DNA, 15 bp, Homo sapiens
gtcttcccccacacc

SEQ ID NO: 123749 - DNA, 15 bp, Homo sapiens
tgtcttcccccacac

SEQ ID NO: 123750 - DNA, 15 bp, Homo sapiens
ctgtcttcccccaca

SEQ ID NO: 123751 - DNA, 15 bp, Homo sapiens
cctgtcttcccccac

SEQ ID NO: 123752 - DNA, 15 bp, Homo sapiens
gcctgtcttccccca

SEQ ID NO: 123753 - DNA, 15 bp, Homo sapiens
agcctgtcttccccc

SEQ ID NO: 123754 - DNA, 15 bp, Homo sapiens
gagcctgtcttcccc

SEQ ID NO: 123755 - DNA, 15 bp, Homo sapiens
tgagcctgtcttccc

SEQ ID NO: 123756 - DNA, 15 bp, Homo sapiens
ttgagcctgtcttcc

SEQ ID NO: 123757 - DNA, 15 bp, Homo sapiens
tttgagcctgtcttc

SEQ ID NO: 123758 - DNA, 15 bp, Homo sapiens
ctttgagcctgtctt

SEQ ID NO: 123759 - DNA, 15 bp, Homo sapiens
tctttgagcctgtct

SEQ ID NO: 123760 - DNA, 15 bp, Homo sapiens
gtctttgagcctgtc

SEQ ID NO: 123761 - DNA, 15 bp, Homo sapiens
tgtctttgagcctgt

SEQ ID NO: 123762 - DNA, 15 bp, Homo sapiens
ctgtctttgagcctg

SEQ ID NO: 123763 - DNA, 15 bp, Homo sapiens
actgtctttgagcct

SEQ ID NO: 123764 - DNA, 15 bp, Homo sapiens
cactgtctttgagcc

SEQ ID NO: 123765 - DNA, 15 bp, Homo sapiens
acactgtctttgagc

SEQ ID NO: 123766 - DNA, 15 bp, Homo sapiens
gacactgtctttgag

SEQ ID NO: 123767 - DNA, 15 bp, Homo sapiens
ggacactgtctttga

SEQ ID NO: 123768 - DNA, 15 bp, Homo sapiens
aggacactgtctttg

SEQ ID NO: 123769 - DNA, 15 bp, Homo sapiens
caggacactgtcttt

SEQ ID NO: 123770 - DNA, 15 bp, Homo sapiens
ccaggacactgtctt

SEQ ID NO: 123771 - DNA, 15 bp, Homo sapiens
tccaggacactgtct

SEQ ID NO: 123772 - DNA, 15 bp, Homo sapiens
gtccaggacactgtc

SEQ ID NO: 123773 - DNA, 15 bp, Homo sapiens
tgtccaggacactgt

SEQ ID NO: 123774 - DNA, 15 bp, Homo sapiens
ttgtccaggacactg

SEQ ID NO: 123775 - DNA, 15 bp, Homo sapiens
gttgtccaggacact

SEQ ID NO: 123776 - DNA, 15 bp, Homo sapiens
agttgtccaggacac

SEQ ID NO: 123777 - DNA, 15 bp, Homo sapiens
gagttgtccaggaca

SEQ ID NO: 123778 - DNA, 15 bp, Homo sapiens
tgagttgtccaggac

SEQ ID NO: 123779 - DNA, 15 bp, Homo sapiens
ctgagttgtccagga

SEQ ID NO: 123780 - DNA, 15 bp, Homo sapiens
cctgagttgtccagg

SEQ ID NO: 123781 - DNA, 15 bp, Homo sapiens
ccctgagttgtccag

SEQ ID NO: 123782 - DNA, 15 bp, Homo sapiens
tccctgagttgtcca

SEQ ID NO: 123783 - DNA, 15 bp, Homo sapiens
atccctgagttgtcc

SEQ ID NO: 123784 - DNA, 15 bp, Homo sapiens
catccctgagttgtc

SEQ ID NO: 123785 - DNA, 15 bp, Homo sapiens
gcatccctgagttgt

SEQ ID NO: 123786 - DNA, 15 bp, Homo sapiens
tgcatccctgagttg

SEQ ID NO: 123787 - DNA, 15 bp, Homo sapiens
ttgcatccctgagtt

SEQ ID NO: 123788 - DNA, 15 bp, Homo sapiens
attgcatccctgagt

SEQ ID NO: 123789 - DNA, 15 bp, Homo sapiens
cattgcatccctgag

SEQ ID NO: 123790 - DNA, 15 bp, Homo sapiens
gcattgcatccctga

SEQ ID NO: 123791 - DNA, 15 bp, Homo sapiens
ggcattgcatccctg

SEQ ID NO: 123792 - DNA, 15 bp, Homo sapiens
tggcattgcatccct

SEQ ID NO: 123793 - DNA, 15 bp, Homo sapiens
gtggcattgcatccc

SEQ ID NO: 123794 - DNA, 15 bp, Homo sapiens
agtggcattgcatcc

SEQ ID NO: 123795 - DNA, 15 bp, Homo sapiens
aagtggcattgcatc

SEQ ID NO: 123796 - DNA, 15 bp, Homo sapiens
gaagtggcattgcat

SEQ ID NO: 123797 - DNA, 15 bp, Homo sapiens
ggaagtggcattgca

SEQ ID NO: 123798 - DNA, 15 bp, Homo sapiens
tggaagtggcattgc

SEQ ID NO: 123799 - DNA, 15 bp, Homo sapiens
ttggaagtggcattg

SEQ ID NO: 123800 - DNA, 15 bp, Homo sapiens
tttggaagtggcatt

SEQ ID NO: 123801 - DNA, 15 bp, Homo sapiens
ttttggaagtggcat

SEQ ID NO: 123802 - DNA, 15 bp, Homo sapiens
cttttggaagtggca

SEQ ID NO: 123803 - DNA, 15 bp, Homo sapiens
tcttttggaagtggc

SEQ ID NO: 123804 - DNA, 15 bp, Homo sapiens
ctcttttggaagtgg

SEQ ID NO: 123805 - DNA, 15 bp, Homo sapiens
tctcttttggaagtg

SEQ ID NO: 123806 - DNA, 15 bp, Homo sapiens
ttctcttttggaagt

SEQ ID NO: 123807 - DNA, 15 bp, Homo sapiens
cttctcttttggaag

SEQ ID NO: 123808 - DNA, 15 bp, Homo sapiens
ccttctcttttggaa

SEQ ID NO: 123809 - DNA, 15 bp, Homo sapiens
gccttctcttttgga

SEQ ID NO: 123810 - DNA, 15 bp, Homo sapiens
agccttctcttttgg

SEQ ID NO: 123811 - DNA, 15 bp, Homo sapiens
tagccttctcttttg

SEQ ID NO: 123812 - DNA, 15 bp, Homo sapiens
gtagccttctctttt

SEQ ID NO: 123813 - DNA, 15 bp, Homo sapiens
tgtagccttctcttt

SEQ ID NO: 123814 - DNA, 15 bp, Homo sapiens
gtgtagccttctctt

SEQ ID NO: 123815 - DNA, 15 bp, Homo sapiens
cgtgtagccttctct

SEQ ID NO: 123816 - DNA, 15 bp, Homo sapiens
acgtgtagccttctc

SEQ ID NO: 123817 - DNA, 15 bp, Homo sapiens
tacgtgtagccttct

SEQ ID NO: 123818 - DNA, 15 bp, Homo sapiens
ttacgtgtagccttc

SEQ ID NO: 123819 - DNA, 15 bp, Homo sapiens
tttacgtgtagcctt

SEQ ID NO: 123820 - DNA, 15 bp, Homo sapiens
gtttacgtgtagcct

SEQ ID NO: 123821 - DNA, 15 bp, Homo sapiens
tgtttacgtgtagcc

SEQ ID NO: 123822 - DNA, 15 bp, Homo sapiens
ttgtttacgtgtagc

SEQ ID NO: 123823 - DNA, 15 bp, Homo sapiens
tttgtttacgtgtag

SEQ ID NO: 123824 - DNA, 15 bp, Homo sapiens
ttttgtttacgtgta

SEQ ID NO: 123825 - DNA, 15 bp, Homo sapiens
cttttgtttacgtgt

SEQ ID NO: 123826 - DNA, 15 bp, Homo sapiens
tcttttgtttacgtg

SEQ ID NO: 123827 - DNA, 15 bp, Homo sapiens
ctcttttgtttacgt

SEQ ID NO: 123828 - DNA, 15 bp, Homo sapiens
actcttttgtttacg

SEQ ID NO: 123829 - DNA, 15 bp, Homo sapiens
gactcttttgtttac

SEQ ID NO: 123830 - DNA, 15 bp, Homo sapiens
agactcttttgttta

SEQ ID NO: 123831 - DNA, 15 bp, Homo sapiens
cagactcttttgttt

SEQ ID NO: 123832 - DNA, 15 bp, Homo sapiens
tcagactcttttgtt

SEQ ID NO: 123833 - DNA, 15 bp, Homo sapiens
ctcagactcttttgt

SEQ ID NO: 123834 - DNA, 15 bp, Homo sapiens
tctcagactcttttg

SEQ ID NO: 123835 - DNA, 15 bp, Homo sapiens
ttctcagactctttt

SEQ ID NO: 123836 - DNA, 15 bp, Homo sapiens
tttctcagactcttt

SEQ ID NO: 123837 - DNA, 15 bp, Homo sapiens
atttctcagactctt

SEQ ID NO: 123838 - DNA, 15 bp, Homo sapiens
tatttctcagactct

SEQ ID NO: 123839 - DNA, 15 bp, Homo sapiens
ctatttctcagactc

SEQ ID NO: 123840 - DNA, 15 bp, Homo sapiens
actatttctcagact

SEQ ID NO: 123841 - DNA, 15 bp, Homo sapiens
aactatttctcagac

SEQ ID NO: 123842 - DNA, 15 bp, Homo sapiens
aaactatttctcaga

SEQ ID NO: 123843 - DNA, 15 bp, Homo sapiens
gaaactatttctcag

SEQ ID NO: 123844 - DNA, 15 bp, Homo sapiens
agaaactatttctca

SEQ ID NO: 123845 - DNA, 15 bp, Homo sapiens
cagaaactatttctc

SEQ ID NO: 123846 - DNA, 15 bp, Homo sapiens
tcagaaactatttct

SEQ ID NO: 123847 - DNA, 15 bp, Homo sapiens
atcagaaactatttc

SEQ ID NO: 123848 - DNA, 15 bp, Homo sapiens
aatcagaaactattt

SEQ ID NO: 123849 - DNA, 15 bp, Homo sapiens
caatcagaaactatt

SEQ ID NO: 123850 - DNA, 15 bp, Homo sapiens
acaatcagaaactat

SEQ ID NO: 123851 - DNA, 15 bp, Homo sapiens
aacaatcagaaacta

SEQ ID NO: 123852 - DNA, 15 bp, Homo sapiens
taacaatcagaaact

SEQ ID NO: 123853 - DNA, 15 bp, Homo sapiens
ataacaatcagaaac

SEQ ID NO: 123854 - DNA, 15 bp, Homo sapiens
aataacaatcagaaa

SEQ ID NO: 123855 - DNA, 15 bp, Homo sapiens
caataacaatcagaa

SEQ ID NO: 123856 - DNA, 15 bp, Homo sapiens
acaataacaatcaga

SEQ ID NO: 123857 - DNA, 15 bp, Homo sapiens
aacaataacaatcag

SEQ ID NO: 123858 - DNA, 15 bp, Homo sapiens
taacaataacaatca

SEQ ID NO: 123859 - DNA, 15 bp, Homo sapiens
ttaacaataacaatc

SEQ ID NO: 123860 - DNA, 15 bp, Homo sapiens
tttaacaataacaat

SEQ ID NO: 123861 - DNA, 15 bp, Homo sapiens
atttaacaataacaa

SEQ ID NO: 123862 - DNA, 15 bp, Homo sapiens
gatttaacaataaca

SEQ ID NO: 123863 - DNA, 15 bp, Homo sapiens
agatttaacaataac

SEQ ID NO: 123864 - DNA, 15 bp, Homo sapiens
aagatttaacaataa

SEQ ID NO: 123865 - DNA, 15 bp, Homo sapiens
aaagatttaacaata

SEQ ID NO: 123866 - DNA, 15 bp, Homo sapiens
aaaagatttaacaat

SEQ ID NO: 123867 - DNA, 15 bp, Homo sapiens
aaaaagatttaacaa

SEQ ID NO: 123868 - DNA, 15 bp, Homo sapiens
aaaaaagatttaaca

SEQ ID NO: 123869 - DNA, 15 bp, Homo sapiens
aaaaaaagatttaac

SEQ ID NO: 123870 - DNA, 15 bp, Homo sapiens
caaaaaaagatttaa

SEQ ID NO: 123871 - DNA, 15 bp, Homo sapiens
acaaaaaaagattta

SEQ ID NO: 123872 - DNA, 15 bp, Homo sapiens
aacaaaaaaagattt

SEQ ID NO: 123873 - DNA, 15 bp, Homo sapiens
aaacaaaaaaagatt

SEQ ID NO: 123874 - DNA, 15 bp, Homo sapiens
caaacaaaaaaagat

SEQ ID NO: 123875 - DNA, 15 bp, Homo sapiens
acaaacaaaaaaaga

SEQ ID NO: 123876 - DNA, 15 bp, Homo sapiens
aacaaacaaaaaaag

SEQ ID NO: 123877 - DNA, 15 bp, Homo sapiens
aaacaaacaaaaaaa

SEQ ID NO: 123878 - DNA, 15 bp, Homo sapiens
caaacaaacaaaaaa

SEQ ID NO: 123879 - DNA, 15 bp, Homo sapiens
ccaaacaaacaaaaa

SEQ ID NO: 123880 - DNA, 15 bp, Homo sapiens
accaaacaaacaaaa

SEQ ID NO: 123881 - DNA, 15 bp, Homo sapiens
aaccaaacaaacaaa

SEQ ID NO: 123882 - DNA, 15 bp, Homo sapiens
caaccaaacaaacaa

SEQ ID NO: 123883 - DNA, 15 bp, Homo sapiens
ccaaccaaacaaaca

SEQ ID NO: 123884 - DNA, 15 bp, Homo sapiens
accaaccaaacaaac

SEQ ID NO: 123885 - DNA, 15 bp, Homo sapiens
aaccaaccaaacaaa

SEQ ID NO: 123886 - DNA, 15 bp, Homo sapiens
caaccaaccaaacaa

SEQ ID NO: 123887 - DNA, 15 bp, Homo sapiens
ccaaccaaccaaaca

SEQ ID NO: 123888 - DNA, 15 bp, Homo sapiens
gccaaccaaccaaac

SEQ ID NO: 123889 - DNA, 15 bp, Homo sapiens
agccaaccaaccaaa

SEQ ID NO: 123890 - DNA, 15 bp, Homo sapiens
gagccaaccaaccaa

SEQ ID NO: 123891 - DNA, 15 bp, Homo sapiens
agagccaaccaacca

SEQ ID NO: 123892 - DNA, 15 bp, Homo sapiens
gagagccaaccaacc

SEQ ID NO: 123893 - DNA, 15 bp, Homo sapiens
agagagccaaccaac

SEQ ID NO: 123894 - DNA, 15 bp, Homo sapiens
aagagagccaaccaa

SEQ ID NO: 123895 - DNA, 15 bp, Homo sapiens
gaagagagccaacca

SEQ ID NO: 123896 - DNA, 15 bp, Homo sapiens
agaagagagccaacc

SEQ ID NO: 123897 - DNA, 15 bp, Homo sapiens
cagaagagagccaac

SEQ ID NO: 123898 - DNA, 15 bp, Homo sapiens
gcagaagagagccaa

SEQ ID NO: 123899 - DNA, 15 bp, Homo sapiens
tgcagaagagagcca

SEQ ID NO: 123900 - DNA, 15 bp, Homo sapiens
ttgcagaagagagcc

SEQ ID NO: 123901 - DNA, 15 bp, Homo sapiens
tttgcagaagagagc

SEQ ID NO: 123902 - DNA, 15 bp, Homo sapiens
ctttgcagaagagag

SEQ ID NO: 123903 - DNA, 15 bp, Homo sapiens
cctttgcagaagaga

SEQ ID NO: 123904 - DNA, 15 bp, Homo sapiens
tcctttgcagaagag

SEQ ID NO: 123905 - DNA, 15 bp, Homo sapiens
gtcctttgcagaaga

SEQ ID NO: 123906 - DNA, 15 bp, Homo sapiens
tgtcctttgcagaag

SEQ ID NO: 123907 - DNA, 15 bp, Homo sapiens
atgtcctttgcagaa

SEQ ID NO: 123908 - DNA, 15 bp, Homo sapiens
gatgtcctttgcaga

SEQ ID NO: 123909 - DNA, 15 bp, Homo sapiens
tgatgtcctttgcag

SEQ ID NO: 123910 - DNA, 15 bp, Homo sapiens
ttgatgtcctttgca

SEQ ID NO: 123911 - DNA, 15 bp, Homo sapiens
attgatgtcctttgc

SEQ ID NO: 123912 - DNA, 15 bp, Homo sapiens
tattgatgtcctttg

SEQ ID NO: 123913 - DNA, 15 bp, Homo sapiens
ttattgatgtccttt

SEQ ID NO: 123914 - DNA, 15 bp, Homo sapiens
gttattgatgtcctt

SEQ ID NO: 123915 - DNA, 15 bp, Homo sapiens
agttattgatgtcct

SEQ ID NO: 123916 - DNA, 15 bp, Homo sapiens
cagttattgatgtcc

SEQ ID NO: 123917 - DNA, 15 bp, Homo sapiens
acagttattgatgtc

SEQ ID NO: 123918 - DNA, 15 bp, Homo sapiens
tacagttattgatgt

SEQ ID NO: 123919 - DNA, 15 bp, Homo sapiens
atacagttattgatg

SEQ ID NO: 123920 - DNA, 15 bp, Homo sapiens
aatacagttattgat

SEQ ID NO: 123921 - DNA, 15 bp, Homo sapiens
aaatacagttattga

SEQ ID NO: 123922 - DNA, 15 bp, Homo sapiens
aaaatacagttattg

SEQ ID NO: 123923 - DNA, 15 bp, Homo sapiens
taaaatacagttatt

SEQ ID NO: 123924 - DNA, 15 bp, Homo sapiens
ttaaaatacagttat

SEQ ID NO: 123925 - DNA, 15 bp, Homo sapiens
tttaaaatacagtta

SEQ ID NO: 123926 - DNA, 15 bp, Homo sapiens
gtttaaaatacagtt

SEQ ID NO: 123927 - DNA, 15 bp, Homo sapiens
agtttaaaatacagt

SEQ ID NO: 123928 - DNA, 15 bp, Homo sapiens
tagtttaaaatacag

SEQ ID NO: 123929 - DNA, 15 bp, Homo sapiens
atagtttaaaataca

SEQ ID NO: 123930 - DNA, 15 bp, Homo sapiens
tatagtttaaaatac

SEQ ID NO: 123931 - DNA, 15 bp, Homo sapiens
atatagtttaaaata

SEQ ID NO: 123932 - DNA, 15 bp, Homo sapiens
tatatagtttaaaat

SEQ ID NO: 123933 - DNA, 15 bp, Homo sapiens
atatatagtttaaaa

SEQ ID NO: 123934 - DNA, 15 bp, Homo sapiens
aatatatagtttaaa

SEQ ID NO: 123935 - DNA, 15 bp, Homo sapiens
taatatatagtttaa

SEQ ID NO: 123936 - DNA, 15 bp, Homo sapiens
ttaatatatagttta

SEQ ID NO: 123937 - DNA, 15 bp, Homo sapiens
gttaatatatagttt

SEQ ID NO: 123938 - DNA, 15 bp, Homo sapiens
agttaatatatagtt

SEQ ID NO: 123939 - DNA, 15 bp, Homo sapiens
cagttaatatatagt

SEQ ID NO: 123940 - DNA, 15 bp, Homo sapiens
tcagttaatatatag

SEQ ID NO: 123941 - DNA, 15 bp, Homo sapiens
ctcagttaatatata

SEQ ID NO: 123942 - DNA, 15 bp, Homo sapiens
cctcagttaatatat

SEQ ID NO: 123943 - DNA, 15 bp, Homo sapiens
acctcagttaatata

SEQ ID NO: 123944 - DNA, 15 bp, Homo sapiens
cacctcagttaatat

SEQ ID NO: 123945 - DNA, 15 bp, Homo sapiens
ccacctcagttaata

SEQ ID NO: 123946 - DNA, 15 bp, Homo sapiens
tccacctcagttaat

SEQ ID NO: 123947 - DNA, 15 bp, Homo sapiens
atccacctcagttaa

SEQ ID NO: 123948 - DNA, 15 bp, Homo sapiens
aatccacctcagtta

SEQ ID NO: 123949 - DNA, 15 bp, Homo sapiens
aaatccacctcagtt

SEQ ID NO: 123950 - DNA, 15 bp, Homo sapiens
aaaatccacctcagt

SEQ ID NO: 123951 - DNA, 15 bp, Homo sapiens
taaaatccacctcag

SEQ ID NO: 123952 - DNA, 15 bp, Homo sapiens
ttaaaatccacctca

SEQ ID NO: 123953 - DNA, 15 bp, Homo sapiens
gttaaaatccacctc

SEQ ID NO: 123954 - DNA, 15 bp, Homo sapiens
tgttaaaatccacct

SEQ ID NO: 123955 - DNA, 15 bp, Homo sapiens
atgttaaaatccacc

SEQ ID NO: 123956 - DNA, 15 bp, Homo sapiens
gatgttaaaatccac

SEQ ID NO: 123957 - DNA, 15 bp, Homo sapiens
tgatgttaaaatcca

SEQ ID NO: 123958 - DNA, 15 bp, Homo sapiens
ttgatgttaaaatcc

SEQ ID NO: 123959 - DNA, 15 bp, Homo sapiens
attgatgttaaaatc

SEQ ID NO: 123960 - DNA, 15 bp, Homo sapiens
aattgatgttaaaat

SEQ ID NO: 123961 - DNA, 15 bp, Homo sapiens
aaattgatgttaaaa

SEQ ID NO: 123962 - DNA, 15 bp, Homo sapiens
aaaattgatgttaaa

SEQ ID NO: 123963 - DNA, 15 bp, Homo sapiens
aaaaattgatgttaa

SEQ ID NO: 123964 - DNA, 15 bp, Homo sapiens
taaaaattgatgtta

SEQ ID NO: 123965 - DNA, 15 bp, Homo sapiens
ttaaaaattgatgtt

SEQ ID NO: 123966 - DNA, 15 bp, Homo sapiens
attaaaaattgatgt

SEQ ID NO: 123967 - DNA, 15 bp, Homo sapiens
tattaaaaattgatg

SEQ ID NO: 123968 - DNA, 15 bp, Homo sapiens
ctattaaaaattgat

SEQ ID NO: 123969 - DNA, 15 bp, Homo sapiens
actattaaaaattga

SEQ ID NO: 123970 - DNA, 15 bp, Homo sapiens
cactattaaaaattg

SEQ ID NO: 123971 - DNA, 15 bp, Homo sapiens
gcactattaaaaatt

SEQ ID NO: 123972 - DNA, 15 bp, Homo sapiens
tgcactattaaaaat

SEQ ID NO: 123973 - DNA, 15 bp, Homo sapiens
ttgcactattaaaaa

SEQ ID NO: 123974 - DNA, 15 bp, Homo sapiens
cttgcactattaaaa

SEQ ID NO: 123975 - DNA, 15 bp, Homo sapiens
tcttgcactattaaa

SEQ ID NO: 123976 - DNA, 15 bp, Homo sapiens
ctcttgcactattaa

SEQ ID NO: 123977 - DNA, 15 bp, Homo sapiens
tctcttgcactatta

SEQ ID NO: 123978 - DNA, 15 bp, Homo sapiens
atctcttgcactatt

SEQ ID NO: 123979 - DNA, 15 bp, Homo sapiens
aatctcttgcactat

SEQ ID NO: 123980 - DNA, 15 bp, Homo sapiens
aaatctcttgcacta

SEQ ID NO: 123981 - DNA, 15 bp, Homo sapiens
taaatctcttgcact

SEQ ID NO: 123982 - DNA, 15 bp, Homo sapiens
ttaaatctcttgcac

SEQ ID NO: 123983 - DNA, 15 bp, Homo sapiens
tttaaatctcttgca

SEQ ID NO: 123984 - DNA, 15 bp, Homo sapiens
ttttaaatctcttgc

SEQ ID NO: 123985 - DNA, 15 bp, Homo sapiens
gttttaaatctcttg

SEQ ID NO: 123986 - DNA, 15 bp, Homo sapiens
ggttttaaatctctt

SEQ ID NO: 123987 - DNA, 15 bp, Homo sapiens
tggttttaaatctct

SEQ ID NO: 123988 - DNA, 15 bp, Homo sapiens
ttggttttaaatctc

SEQ ID NO: 123989 - DNA, 15 bp, Homo sapiens
tttggttttaaatct

SEQ ID NO: 123990 - DNA, 15 bp, Homo sapiens
ctttggttttaaatc

SEQ ID NO: 123991 - DNA, 15 bp, Homo sapiens
cctttggttttaaat

SEQ ID NO: 123992 - DNA, 15 bp, Homo sapiens
gcctttggttttaaa

SEQ ID NO: 123993 - DNA, 15 bp, Homo sapiens
cgcctttggttttaa

SEQ ID NO: 123994 - DNA, 15 bp, Homo sapiens
ccgcctttggtttta

SEQ ID NO: 123995 - DNA, 15 bp, Homo sapiens
cccgcctttggtttt

SEQ ID NO: 123996 - DNA, 15 bp, Homo sapiens
ccccgcctttggttt

SEQ ID NO: 123997 - DNA, 15 bp, Homo sapiens
cccccgcctttggtt

SEQ ID NO: 123998 - DNA, 15 bp, Homo sapiens
ccccccgcctttggt

SEQ ID NO: 123999 - DNA, 15 bp, Homo sapiens
cccccccgcctttgg

SEQ ID NO: 124000 - DNA, 15 bp, Homo sapiens
gcccccccgcctttg

SEQ ID NO: 124001 - DNA, 15 bp, Homo sapiens
cgcccccccgccttt

SEQ ID NO: 124002 - DNA, 15 bp, Homo sapiens
ccgcccccccgcctt

SEQ ID NO: 124003 - DNA, 15 bp, Homo sapiens
cccgcccccccgcct

SEQ ID NO: 124004 - DNA, 15 bp, Homo sapiens
gcccgcccccccgcc

SEQ ID NO: 124005 - DNA, 15 bp, Homo sapiens
tgcccgcccccccgc

SEQ ID NO: 124006 - DNA, 15 bp, Homo sapiens
ctgcccgcccccccg

SEQ ID NO: 124007 - DNA, 15 bp, Homo sapiens
tctgcccgccccccc

SEQ ID NO: 124008 - DNA, 15 bp, Homo sapiens
ttctgcccgcccccc

SEQ ID NO: 124009 - DNA, 15 bp, Homo sapiens
tttctgcccgccccc

SEQ ID NO: 124010 - DNA, 15 bp, Homo sapiens
ttttctgcccgcccc

SEQ ID NO: 124011 - DNA, 15 bp, Homo sapiens
tttttctgcccgccc

SEQ ID NO: 124012 - DNA, 15 bp, Homo sapiens
ttttttctgcccgcc

SEQ ID NO: 124013 - DNA, 15 bp, Homo sapiens
cttttttctgcccgc

SEQ ID NO: 124014 - DNA, 15 bp, Homo sapiens
acttttttctgcccg

SEQ ID NO: 124015 - DNA, 15 bp, Homo sapiens
cacttttttctgccc

SEQ ID NO: 124016 - DNA, 15 bp, Homo sapiens
gcacttttttctgcc

SEQ ID NO: 124017 - DNA, 15 bp, Homo sapiens
tgcacttttttctgc

SEQ ID NO: 124018 - DNA, 15 bp, Homo sapiens
atgcacttttttctg

SEQ ID NO: 124019 - DNA, 15 bp, Homo sapiens
gatgcacttttttct

SEQ ID NO: 124020 - DNA, 15 bp, Homo sapiens
ggatgcacttttttc

SEQ ID NO: 124021 - DNA, 15 bp, Homo sapiens
tggatgcactttttt

SEQ ID NO: 124022 - DNA, 15 bp, Homo sapiens
ttggatgcacttttt

SEQ ID NO: 124023 - DNA, 15 bp, Homo sapiens
gttggatgcactttt

SEQ ID NO: 124024 - DNA, 15 bp, Homo sapiens
agttggatgcacttt

SEQ ID NO: 124025 - DNA, 15 bp, Homo sapiens
gagttggatgcactt

SEQ ID NO: 124026 - DNA, 15 bp, Homo sapiens
ggagttggatgcact

SEQ ID NO: 124027 - DNA, 15 bp, Homo sapiens
tggagttggatgcac

SEQ ID NO: 124028 - DNA, 15 bp, Homo sapiens
ctggagttggatgca

SEQ ID NO: 124029 - DNA, 15 bp, Homo sapiens
gctggagttggatgc

SEQ ID NO: 124030 - DNA, 15 bp, Homo sapiens
ggctggagttggatg

SEQ ID NO: 124031 - DNA, 15 bp, Homo sapiens
tggctggagttggat

SEQ ID NO: 124032 - DNA, 15 bp, Homo sapiens
ctggctggagttgga

SEQ ID NO: 124033 - DNA, 15 bp, Homo sapiens
actggctggagttgg

SEQ ID NO: 124034 - DNA, 15 bp, Homo sapiens
cactggctggagttg

SEQ ID NO: 124035 - DNA, 15 bp, Homo sapiens
tcactggctggagtt

SEQ ID NO: 124036 - DNA, 15 bp, Homo sapiens
atcactggctggagt

SEQ ID NO: 124037 - DNA, 15 bp, Homo sapiens
gatcactggctggag

SEQ ID NO: 124038 - DNA, 15 bp, Homo sapiens
ggatcactggctgga

SEQ ID NO: 124039 - DNA, 15 bp, Homo sapiens
tggatcactggctgg

SEQ ID NO: 124040 - DNA, 15 bp, Homo sapiens
gtggatcactggctg

SEQ ID NO: 124041 - DNA, 15 bp, Homo sapiens
tgtggatcactggct

SEQ ID NO: 124042 - DNA, 15 bp, Homo sapiens
ctgtggatcactggc

SEQ ID NO: 124043 - DNA, 15 bp, Homo sapiens
tctgtggatcactgg

SEQ ID NO: 124044 - DNA, 15 bp, Homo sapiens
ttctgtggatcactg

SEQ ID NO: 124045 - DNA, 15 bp, Homo sapiens
tttctgtggatcact

SEQ ID NO: 124046 - DNA, 15 bp, Homo sapiens
gtttctgtggatcac

SEQ ID NO: 124047 - DNA, 15 bp, Homo sapiens
tgtttctgtggatca

SEQ ID NO: 124048 - DNA, 15 bp, Homo sapiens
ttgtttctgtggatc

SEQ ID NO: 124049 - DNA, 15 bp, Homo sapiens
tttgtttctgtggat

SEQ ID NO: 124050 - DNA, 15 bp, Homo sapiens
ctttgtttctgtgga

SEQ ID NO: 124051 - DNA, 15 bp, Homo sapiens
tctttgtttctgtgg

SEQ ID NO: 124052 - DNA, 15 bp, Homo sapiens
gtctttgtttctgtg

SEQ ID NO: 124053 - DNA, 15 bp, Homo sapiens
ggtctttgtttctgt

SEQ ID NO: 124054 - DNA, 15 bp, Homo sapiens
tggtctttgtttctg

SEQ ID NO: 124055 - DNA, 15 bp, Homo sapiens
ttggtctttgtttct

SEQ ID NO: 124056 - DNA, 15 bp, Homo sapiens
cttggtctttgtttc

SEQ ID NO: 124057 - DNA, 15 bp, Homo sapiens
ccttggtctttgttt

SEQ ID NO: 124058 - DNA, 15 bp, Homo sapiens
tccttggtctttgtt

SEQ ID NO: 124059 - DNA, 15 bp, Homo sapiens
ctccttggtctttgt

SEQ ID NO: 124060 - DNA, 15 bp, Homo sapiens
gctccttggtctttg

SEQ ID NO: 124061 - DNA, 15 bp, Homo sapiens
tgctccttggtcttt

SEQ ID NO: 124062 - DNA, 15 bp, Homo sapiens
gtgctccttggtctt

SEQ ID NO: 124063 - DNA, 15 bp, Homo sapiens
tgtgctccttggtct

SEQ ID NO: 124064 - DNA, 15 bp, Homo sapiens
ttgtgctccttggtc

SEQ ID NO: 124065 - DNA, 15 bp, Homo sapiens
tttgtgctccttggt

SEQ ID NO: 124066 - DNA, 15 bp, Homo sapiens
ttttgtgctccttgg

SEQ ID NO: 124067 - DNA, 15 bp, Homo sapiens
attttgtgctccttg

SEQ ID NO: 124068 - DNA, 15 bp, Homo sapiens
cattttgtgctcctt

SEQ ID NO: 124069 - DNA, 15 bp, Homo sapiens
tcattttgtgctcct

SEQ ID NO: 124070 - DNA, 15 bp, Homo sapiens
atcattttgtgctcc

SEQ ID NO: 124071 - DNA, 15 bp, Homo sapiens
aatcattttgtgctc

SEQ ID NO: 124072 - DNA, 15 bp, Homo sapiens
aaatcattttgtgct

SEQ ID NO: 124073 - DNA, 15 bp, Homo sapiens
aaaatcattttgtgc

SEQ ID NO: 124074 - DNA, 15 bp, Homo sapiens
taaaatcattttgtg

SEQ ID NO: 124075 - DNA, 15 bp, Homo sapiens
ttaaaatcattttgt

SEQ ID NO: 124076 - DNA, 15 bp, Homo sapiens
cttaaaatcattttg

SEQ ID NO: 124077 - DNA, 15 bp, Homo sapiens
tcttaaaatcatttt

SEQ ID NO: 124078 - DNA, 15 bp, Homo sapiens
atcttaaaatcattt

SEQ ID NO: 124079 - DNA, 15 bp, Homo sapiens
aatcttaaaatcatt

SEQ ID NO: 124080 - DNA, 15 bp, Homo sapiens
aaatcttaaaatcat

SEQ ID NO: 124081 - DNA, 15 bp, Homo sapiens
aaaatcttaaaatca

SEQ ID NO: 124082 - DNA, 15 bp, Homo sapiens
taaaatcttaaaatc

SEQ ID NO: 124083 - DNA, 15 bp, Homo sapiens
ctaaaatcttaaaat

SEQ ID NO: 124084 - DNA, 15 bp, Homo sapiens
actaaaatcttaaaa

SEQ ID NO: 124085 - DNA, 15 bp, Homo sapiens
gactaaaatcttaaa

SEQ ID NO: 124086 - DNA, 15 bp, Homo sapiens
tgactaaaatcttaa

SEQ ID NO: 124087 - DNA, 15 bp, Homo sapiens
atgactaaaatctta

SEQ ID NO: 124088 - DNA, 15 bp, Homo sapiens
aatgactaaaatctt

SEQ ID NO: 124089 - DNA, 15 bp, Homo sapiens
caatgactaaaatct

SEQ ID NO: 124090 - DNA, 15 bp, Homo sapiens
gcaatgactaaaatc

SEQ ID NO: 124091 - DNA, 15 bp, Homo sapiens
ggcaatgactaaaat

SEQ ID NO: 124092 - DNA, 15 bp, Homo sapiens
tggcaatgactaaaa

SEQ ID NO: 124093 - DNA, 15 bp, Homo sapiens
ttggcaatgactaaa

SEQ ID NO: 124094 - DNA, 15 bp, Homo sapiens
cttggcaatgactaa

SEQ ID NO: 124095 - DNA, 15 bp, Homo sapiens
acttggcaatgacta

SEQ ID NO: 124096 - DNA, 15 bp, Homo sapiens
cacttggcaatgact

SEQ ID NO: 124097 - DNA, 15 bp, Homo sapiens
tcacttggcaatgac

SEQ ID NO: 124098 - DNA, 15 bp, Homo sapiens
gtcacttggcaatga

SEQ ID NO: 124099 - DNA, 15 bp, Homo sapiens
tgtcacttggcaatg

SEQ ID NO: 124100 - DNA, 15 bp, Homo sapiens
atgtcacttggcaat

SEQ ID NO: 124101 - DNA, 15 bp, Homo sapiens
aatgtcacttggcaa

SEQ ID NO: 124102 - DNA, 15 bp, Homo sapiens
gaatgtcacttggca

SEQ ID NO: 124103 - DNA, 15 bp, Homo sapiens
agaatgtcacttggc

SEQ ID NO: 124104 - DNA, 15 bp, Homo sapiens
aagaatgtcacttgg

SEQ ID NO: 124105 - DNA, 15 bp, Homo sapiens
gaagaatgtcacttg

SEQ ID NO: 124106 - DNA, 15 bp, Homo sapiens
agaagaatgtcactt

SEQ ID NO: 124107 - DNA, 15 bp, Homo sapiens
gagaagaatgtcact

SEQ ID NO: 124108 - DNA, 15 bp, Homo sapiens
tgagaagaatgtcac

SEQ ID NO: 124109 - DNA, 15 bp, Homo sapiens
gtgagaagaatgtca

SEQ ID NO: 124110 - DNA, 15 bp, Homo sapiens
agtgagaagaatgtc

SEQ ID NO: 124111 - DNA, 15 bp, Homo sapiens
cagtgagaagaatgt

SEQ ID NO: 124112 - DNA, 15 bp, Homo sapiens
acagtgagaagaatg

SEQ ID NO: 124113 - DNA, 15 bp, Homo sapiens
cacagtgagaagaat

SEQ ID NO: 124114 - DNA, 15 bp, Homo sapiens
ccacagtgagaagaa

SEQ ID NO: 124115 - DNA, 15 bp, Homo sapiens
accacagtgagaaga

SEQ ID NO: 124116 - DNA, 15 bp, Homo sapiens
aaccacagtgagaag

SEQ ID NO: 124117 - DNA, 15 bp, Homo sapiens
caaccacagtgagaa

SEQ ID NO: 124118 - DNA, 15 bp, Homo sapiens
acaaccacagtgaga

SEQ ID NO: 124119 - DNA, 15 bp, Homo sapiens
aacaaccacagtgag

SEQ ID NO: 124120 - DNA, 15 bp, Homo sapiens
aaacaaccacagtga

SEQ ID NO: 124121 - DNA, 15 bp, Homo sapiens
gaaacaaccacagtg

SEQ ID NO: 124122 - DNA, 15 bp, Homo sapiens
tgaaacaaccacagt

SEQ ID NO: 124123 - DNA, 15 bp, Homo sapiens
ttgaaacaaccacag

SEQ ID NO: 124124 - DNA, 15 bp, Homo sapiens
attgaaacaaccaca

SEQ ID NO: 124125 - DNA, 15 bp, Homo sapiens
aattgaaacaaccac

SEQ ID NO: 124126 - DNA, 15 bp, Homo sapiens
gaattgaaacaacca

SEQ ID NO: 124127 - DNA, 15 bp, Homo sapiens
agaattgaaacaacc

SEQ ID NO: 124128 - DNA, 15 bp, Homo sapiens
aagaattgaaacaac

SEQ ID NO: 124129 - DNA, 15 bp, Homo sapiens
aaagaattgaaacaa

SEQ ID NO: 124130 - DNA, 15 bp, Homo sapiens
aaaagaattgaaaca

SEQ ID NO: 124131 - DNA, 15 bp, Homo sapiens
aaaaagaattgaaac

SEQ ID NO: 124132 - DNA, 15 bp, Homo sapiens
gaaaaagaattgaaa

SEQ ID NO: 124133 - DNA, 15 bp, Homo sapiens
ggaaaaagaattgaa

SEQ ID NO: 124134 - DNA, 15 bp, Homo sapiens
aggaaaaagaattga

SEQ ID NO: 124135 - DNA, 15 bp, Homo sapiens
taggaaaaagaattg

SEQ ID NO: 124136 - DNA, 15 bp, Homo sapiens
gtaggaaaaagaatt

SEQ ID NO: 124137 - DNA, 15 bp, Homo sapiens
ggtaggaaaaagaat

SEQ ID NO: 124138 - DNA, 15 bp, Homo sapiens
aggtaggaaaaagaa

SEQ ID NO: 124139 - DNA, 15 bp, Homo sapiens
aaggtaggaaaaaga

SEQ ID NO: 124140 - DNA, 15 bp, Homo sapiens
aaaggtaggaaaaag

SEQ ID NO: 124141 - DNA, 15 bp, Homo sapiens
aaaaggtaggaaaaa

SEQ ID NO: 124142 - DNA, 15 bp, Homo sapiens
taaaaggtaggaaaa

SEQ ID NO: 124143 - DNA, 15 bp, Homo sapiens
gtaaaaggtaggaaa

SEQ ID NO: 124144 - DNA, 15 bp, Homo sapiens
ggtaaaaggtaggaa

SEQ ID NO: 124145 - DNA, 15 bp, Homo sapiens
tggtaaaaggtagga

SEQ ID NO: 124146 - DNA, 15 bp, Homo sapiens
ctggtaaaaggtagg

SEQ ID NO: 124147 - DNA, 15 bp, Homo sapiens
tctggtaaaaggtag

SEQ ID NO: 124148 - DNA, 15 bp, Homo sapiens
ctctggtaaaaggta

SEQ ID NO: 124149 - DNA, 15 bp, Homo sapiens
tctctggtaaaaggt

SEQ ID NO: 124150 - DNA, 15 bp, Homo sapiens
ctctctggtaaaagg

SEQ ID NO: 124151 - DNA, 15 bp, Homo sapiens
actctctggtaaaag

SEQ ID NO: 124152 - DNA, 15 bp, Homo sapiens
aactctctggtaaaa

SEQ ID NO: 124153 - DNA, 15 bp, Homo sapiens
taactctctggtaaa

SEQ ID NO: 124154 - DNA, 15 bp, Homo sapiens
ctaactctctggtaa

SEQ ID NO: 124155 - DNA, 15 bp, Homo sapiens
actaactctctggta

SEQ ID NO: 124156 - DNA, 15 bp, Homo sapiens
aactaactctctggt

SEQ ID NO: 124157 - DNA, 15 bp, Homo sapiens
gaactaactctctgg

SEQ ID NO: 124158 - DNA, 15 bp, Homo sapiens
tgaactaactctctg

SEQ ID NO: 124159 - DNA, 15 bp, Homo sapiens
ctgaactaactctct

SEQ ID NO: 124160 - DNA, 15 bp, Homo sapiens
tctgaactaactctc

SEQ ID NO: 124161 - DNA, 15 bp, Homo sapiens
ctctgaactaactct

SEQ ID NO: 124162 - DNA, 15 bp, Homo sapiens
tctctgaactaactc

SEQ ID NO: 124163 - DNA, 15 bp, Homo sapiens
ttctctgaactaact

SEQ ID NO: 124164 - DNA, 15 bp, Homo sapiens
tttctctgaactaac

SEQ ID NO: 124165 - DNA, 15 bp, Homo sapiens
atttctctgaactaa

SEQ ID NO: 124166 - DNA, 15 bp, Homo sapiens
catttctctgaacta

SEQ ID NO: 124167 - DNA, 15 bp, Homo sapiens
ccatttctctgaact

SEQ ID NO: 124168 - DNA, 15 bp, Homo sapiens
accatttctctgaac

SEQ ID NO: 124169 - DNA, 15 bp, Homo sapiens
gaccatttctctgaa

SEQ ID NO: 124170 - DNA, 15 bp, Homo sapiens
tgaccatttctctga

SEQ ID NO: 124171 - DNA, 15 bp, Homo sapiens
ctgaccatttctctg

SEQ ID NO: 124172 - DNA, 15 bp, Homo sapiens
tctgaccatttctct

SEQ ID NO: 124173 - DNA, 15 bp, Homo sapiens
ctctgaccatttctc

SEQ ID NO: 124174 - DNA, 15 bp, Homo sapiens
tctctgaccatttct

SEQ ID NO: 124175 - DNA, 15 bp, Homo sapiens
gtctctgaccatttc

SEQ ID NO: 124176 - DNA, 15 bp, Homo sapiens
agtctctgaccattt

SEQ ID NO: 124177 - DNA, 15 bp, Homo sapiens
gagtctctgaccatt

SEQ ID NO: 124178 - DNA, 15 bp, Homo sapiens
tgagtctctgaccat

SEQ ID NO: 124179 - DNA, 15 bp, Homo sapiens
ttgagtctctgacca

SEQ ID NO: 124180 - DNA, 15 bp, Homo sapiens
cttgagtctctgacc

SEQ ID NO: 124181 - DNA, 15 bp, Homo sapiens
ccttgagtctctgac

SEQ ID NO: 124182 - DNA, 15 bp, Homo sapiens
cccttgagtctctga

SEQ ID NO: 124183 - DNA, 15 bp, Homo sapiens
acccttgagtctctg

SEQ ID NO: 124184 - DNA, 15 bp, Homo sapiens
cacccttgagtctct

SEQ ID NO: 124185 - DNA, 15 bp, Homo sapiens
ccacccttgagtctc

SEQ ID NO: 124186 - DNA, 15 bp, Homo sapiens
tccacccttgagtct

SEQ ID NO: 124187 - DNA, 15 bp, Homo sapiens
ttccacccttgagtc

SEQ ID NO: 124188 - DNA, 15 bp, Homo sapiens
tttccacccttgagt

SEQ ID NO: 124189 - DNA, 15 bp, Homo sapiens
ctttccacccttgag

SEQ ID NO: 124190 - DNA, 15 bp, Homo sapiens
tctttccacccttga

SEQ ID NO: 124191 - DNA, 15 bp, Homo sapiens
ctctttccacccttg

SEQ ID NO: 124192 - DNA, 15 bp, Homo sapiens
cctctttccaccctt

SEQ ID NO: 124193 - DNA, 15 bp, Homo sapiens
acctctttccaccct

SEQ ID NO: 124194 - DNA, 15 bp, Homo sapiens
tacctctttccaccc

SEQ ID NO: 124195 - DNA, 15 bp, Homo sapiens
gtacctctttccacc

SEQ ID NO: 124196 - DNA, 15 bp, Homo sapiens
ggtacctctttccac

SEQ ID NO: 124197 - DNA, 15 bp, Homo sapiens
tggtacctctttcca

SEQ ID NO: 124198 - DNA, 15 bp, Homo sapiens
ttggtacctctttcc

SEQ ID NO: 124199 - DNA, 15 bp, Homo sapiens
tttggtacctctttc

SEQ ID NO: 124200 - DNA, 15 bp, Homo sapiens
ctttggtacctcttt

SEQ ID NO: 124201 - DNA, 15 bp, Homo sapiens
cctttggtacctctt

SEQ ID NO: 124202 - DNA, 15 bp, Homo sapiens
gcctttggtacctct

SEQ ID NO: 124203 - DNA, 15 bp, Homo sapiens
agcctttggtacctc

SEQ ID NO: 124204 - DNA, 15 bp, Homo sapiens
aagcctttggtacct

SEQ ID NO: 124205 - DNA, 15 bp, Homo sapiens
aaagcctttggtacc

SEQ ID NO: 124206 - DNA, 15 bp, Homo sapiens
caaagcctttggtac

SEQ ID NO: 124207 - DNA, 15 bp, Homo sapiens
ccaaagcctttggta

SEQ ID NO: 124208 - DNA, 15 bp, Homo sapiens
gccaaagcctttggt

SEQ ID NO: 124209 - DNA, 15 bp, Homo sapiens
ggccaaagcctttgg

SEQ ID NO: 124210 - DNA, 15 bp, Homo sapiens
tggccaaagcctttg

SEQ ID NO: 124211 - DNA, 15 bp, Homo sapiens
gtggccaaagccttt

SEQ ID NO: 124212 - DNA, 15 bp, Homo sapiens
ggtggccaaagcctt

SEQ ID NO: 124213 - DNA, 15 bp, Homo sapiens
tggtggccaaagcct

SEQ ID NO: 124214 - DNA, 15 bp, Homo sapiens
ctggtggccaaagcc

SEQ ID NO: 124215 - DNA, 15 bp, Homo sapiens
actggtggccaaagc

SEQ ID NO: 124216 - DNA, 15 bp, Homo sapiens
tactggtggccaaag

SEQ ID NO: 124217 - DNA, 15 bp, Homo sapiens
ctactggtggccaaa

SEQ ID NO: 124218 - DNA, 15 bp, Homo sapiens
gctactggtggccaa

SEQ ID NO: 124219 - DNA, 15 bp, Homo sapiens
agctactggtggcca

SEQ ID NO: 124220 - DNA, 15 bp, Homo sapiens
cagctactggtggcc

SEQ ID NO: 124221 - DNA, 15 bp, Homo sapiens
ccagctactggtggc

SEQ ID NO: 124222 - DNA, 15 bp, Homo sapiens
gccagctactggtgg

SEQ ID NO: 124223 - DNA, 15 bp, Homo sapiens
agccagctactggtg

SEQ ID NO: 124224 - DNA, 15 bp, Homo sapiens
tagccagctactggt

SEQ ID NO: 124225 - DNA, 15 bp, Homo sapiens
atagccagctactgg

SEQ ID NO: 124226 - DNA, 15 bp, Homo sapiens
aatagccagctactg

SEQ ID NO: 124227 - DNA, 15 bp, Homo sapiens
gaatagccagctact

SEQ ID NO: 124228 - DNA, 15 bp, Homo sapiens
tgaatagccagctac

SEQ ID NO: 124229 - DNA, 15 bp, Homo sapiens
ctgaatagccagcta

SEQ ID NO: 124230 - DNA, 15 bp, Homo sapiens
tctgaatagccagct

SEQ ID NO: 124231 - DNA, 15 bp, Homo sapiens
gtctgaatagccagc

SEQ ID NO: 124232 - DNA, 15 bp, Homo sapiens
tgtctgaatagccag

SEQ ID NO: 124233 - DNA, 15 bp, Homo sapiens
ctgtctgaatagcca

SEQ ID NO: 124234 - DNA, 15 bp, Homo sapiens
gctgtctgaatagcc

SEQ ID NO: 124235 - DNA, 15 bp, Homo sapiens
tgctgtctgaatagc

SEQ ID NO: 124236 - DNA, 15 bp, Homo sapiens
ctgctgtctgaatag

SEQ ID NO: 124237 - DNA, 15 bp, Homo sapiens
cctgctgtctgaata

SEQ ID NO: 124238 - DNA, 15 bp, Homo sapiens
ccctgctgtctgaat

SEQ ID NO: 124239 - DNA, 15 bp, Homo sapiens
tccctgctgtctgaa

SEQ ID NO: 124240 - DNA, 15 bp, Homo sapiens
ctccctgctgtctga

SEQ ID NO: 124241 - DNA, 15 bp, Homo sapiens
actccctgctgtctg

SEQ ID NO: 124242 - DNA, 15 bp, Homo sapiens
tactccctgctgtct

SEQ ID NO: 124243 - DNA, 15 bp, Homo sapiens
ctactccctgctgtc

SEQ ID NO: 124244 - DNA, 15 bp, Homo sapiens
tctactccctgctgt

SEQ ID NO: 124245 - DNA, 15 bp, Homo sapiens
gtctactccctgctg

SEQ ID NO: 124246 - DNA, 15 bp, Homo sapiens
agtctactccctgct

SEQ ID NO: 124247 - DNA, 15 bp, Homo sapiens
aagtctactccctgc

SEQ ID NO: 124248 - DNA, 15 bp, Homo sapiens
caagtctactccctg

SEQ ID NO: 124249 - DNA, 15 bp, Homo sapiens
gcaagtctactccct

SEQ ID NO: 124250 - DNA, 15 bp, Homo sapiens
agcaagtctactccc

SEQ ID NO: 124251 - DNA, 15 bp, Homo sapiens
cagcaagtctactcc

SEQ ID NO: 124252 - DNA, 15 bp, Homo sapiens
ccagcaagtctactc

SEQ ID NO: 124253 - DNA, 15 bp, Homo sapiens
gccagcaagtctact

SEQ ID NO: 124254 - DNA, 15 bp, Homo sapiens
agccagcaagtctac

SEQ ID NO: 124255 - DNA, 15 bp, Homo sapiens
tagccagcaagtcta

SEQ ID NO: 124256 - DNA, 15 bp, Homo sapiens
ctagccagcaagtct

SEQ ID NO: 124257 - DNA, 15 bp, Homo sapiens
gctagccagcaagtc

SEQ ID NO: 124258 - DNA, 15 bp, Homo sapiens
tgctagccagcaagt

SEQ ID NO: 124259 - DNA, 15 bp, Homo sapiens
atgctagccagcaag

SEQ ID NO: 124260 - DNA, 15 bp, Homo sapiens
catgctagccagcaa

SEQ ID NO: 124261 - DNA, 15 bp, Homo sapiens
acatgctagccagca

SEQ ID NO: 124262 - DNA, 15 bp, Homo sapiens
cacatgctagccagc

SEQ ID NO: 124263 - DNA, 15 bp, Homo sapiens
ccacatgctagccag

SEQ ID NO: 124264 - DNA, 15 bp, Homo sapiens
tccacatgctagcca

SEQ ID NO: 124265 - DNA, 15 bp, Homo sapiens
ctccacatgctagcc

SEQ ID NO: 124266 - DNA, 15 bp, Homo sapiens
cctccacatgctagc

SEQ ID NO: 124267 - DNA, 15 bp, Homo sapiens
tcctccacatgctag

SEQ ID NO: 124268 - DNA, 15 bp, Homo sapiens
ctcctccacatgcta

SEQ ID NO: 124269 - DNA, 15 bp, Homo sapiens
gctcctccacatgct

SEQ ID NO: 124270 - DNA, 15 bp, Homo sapiens
ggctcctccacatgc

SEQ ID NO: 124271 - DNA, 15 bp, Homo sapiens
tggctcctccacatg

SEQ ID NO: 124272 - DNA, 15 bp, Homo sapiens
ttggctcctccacat

SEQ ID NO: 124273 - DNA, 15 bp, Homo sapiens
tttggctcctccaca

SEQ ID NO: 124274 - DNA, 15 bp, Homo sapiens
ctttggctcctccac

SEQ ID NO: 124275 - DNA, 15 bp, Homo sapiens
gctttggctcctcca

SEQ ID NO: 124276 - DNA, 15 bp, Homo sapiens
agctttggctcctcc

SEQ ID NO: 124277 - DNA, 15 bp, Homo sapiens
gagctttggctcctc

SEQ ID NO: 124278 - DNA, 15 bp, Homo sapiens
tgagctttggctcct

SEQ ID NO: 124279 - DNA, 15 bp, Homo sapiens
ttgagctttggctcc

SEQ ID NO: 124280 - DNA, 15 bp, Homo sapiens
attgagctttggctc

SEQ ID NO: 124281 - DNA, 15 bp, Homo sapiens
tattgagctttggct

SEQ ID NO: 124282 - DNA, 15 bp, Homo sapiens
ttattgagctttggc

SEQ ID NO: 124283 - DNA, 15 bp, Homo sapiens
cttattgagctttgg

SEQ ID NO: 124284 - DNA, 15 bp, Homo sapiens
tcttattgagctttg

SEQ ID NO: 124285 - DNA, 15 bp, Homo sapiens
ttcttattgagcttt

SEQ ID NO: 124286 - DNA, 15 bp, Homo sapiens
cttcttattgagctt

SEQ ID NO: 124287 - DNA, 15 bp, Homo sapiens
ccttcttattgagct

SEQ ID NO: 124288 - DNA, 15 bp, Homo sapiens
cccttcttattgagc

SEQ ID NO: 124289 - DNA, 15 bp, Homo sapiens
ccccttcttattgag

SEQ ID NO: 124290 - DNA, 15 bp, Homo sapiens
gccccttcttattga

SEQ ID NO: 124291 - DNA, 15 bp, Homo sapiens
ggccccttcttattg

SEQ ID NO: 124292 - DNA, 15 bp, Homo sapiens
aggccccttcttatt

SEQ ID NO: 124293 - DNA, 15 bp, Homo sapiens
taggccccttcttat

SEQ ID NO: 124294 - DNA, 15 bp, Homo sapiens
ctaggccccttctta

SEQ ID NO: 124295 - DNA, 15 bp, Homo sapiens
tctaggccccttctt

SEQ ID NO: 124296 - DNA, 15 bp, Homo sapiens
ttctaggccccttct

SEQ ID NO: 124297 - DNA, 15 bp, Homo sapiens
attctaggccccttc

SEQ ID NO: 124298 - DNA, 15 bp, Homo sapiens
cattctaggcccctt

SEQ ID NO: 124299 - DNA, 15 bp, Homo sapiens
tcattctaggcccct

SEQ ID NO: 124300 - DNA, 15 bp, Homo sapiens
ttcattctaggcccc

SEQ ID NO: 124301 - DNA, 15 bp, Homo sapiens
tttcattctaggccc

SEQ ID NO: 124302 - DNA, 15 bp, Homo sapiens
gtttcattctaggcc

SEQ ID NO: 124303 - DNA, 15 bp, Homo sapiens
ggtttcattctaggc

SEQ ID NO: 124304 - DNA, 15 bp, Homo sapiens
gggtttcattctagg

SEQ ID NO: 124305 - DNA, 15 bp, Homo sapiens
agggtttcattctag

SEQ ID NO: 124306 - DNA, 15 bp, Homo sapiens
aagggtttcattcta

SEQ ID NO: 124307 - DNA, 15 bp, Homo sapiens
caagggtttcattct

SEQ ID NO: 124308 - DNA, 15 bp, Homo sapiens
ccaagggtttcattc

SEQ ID NO: 124309 - DNA, 15 bp, Homo sapiens
accaagggtttcatt

SEQ ID NO: 124310 - DNA, 15 bp, Homo sapiens
caccaagggtttcat

SEQ ID NO: 124311 - DNA, 15 bp, Homo sapiens
gcaccaagggtttca

SEQ ID NO: 124312 - DNA, 15 bp, Homo sapiens
agcaccaagggtttc

SEQ ID NO: 124313 - DNA, 15 bp, Homo sapiens
cagcaccaagggttt

SEQ ID NO: 124314 - DNA, 15 bp, Homo sapiens
tcagcaccaagggtt

SEQ ID NO: 124315 - DNA, 15 bp, Homo sapiens
atcagcaccaagggt

SEQ ID NO: 124316 - DNA, 15 bp, Homo sapiens
gatcagcaccaaggg

SEQ ID NO: 124317 - DNA, 15 bp, Homo sapiens
ggatcagcaccaagg

SEQ ID NO: 124318 - DNA, 15 bp, Homo sapiens
aggatcagcaccaag

SEQ ID NO: 124319 - DNA, 15 bp, Homo sapiens
caggatcagcaccaa

SEQ ID NO: 124320 - DNA, 15 bp, Homo sapiens
gcaggatcagcacca

SEQ ID NO: 124321 - DNA, 15 bp, Homo sapiens
ggcaggatcagcacc

SEQ ID NO: 124322 - DNA, 15 bp, Homo sapiens
aggcaggatcagcac

SEQ ID NO: 124323 - DNA, 15 bp, Homo sapiens
gaggcaggatcagca

SEQ ID NO: 124324 - DNA, 15 bp, Homo sapiens
agaggcaggatcagc

SEQ ID NO: 124325 - DNA, 15 bp, Homo sapiens
cagaggcaggatcag

SEQ ID NO: 124326 - DNA, 15 bp, Homo sapiens
gcagaggcaggatca

SEQ ID NO: 124327 - DNA, 15 bp, Homo sapiens
ggcagaggcaggatc

SEQ ID NO: 124328 - DNA, 15 bp, Homo sapiens
tggcagaggcaggat

SEQ ID NO: 124329 - DNA, 15 bp, Homo sapiens
atggcagaggcagga

SEQ ID NO: 124330 - DNA, 15 bp, Homo sapiens
aatggcagaggcagg

SEQ ID NO: 124331 - DNA, 15 bp, Homo sapiens
aaatggcagaggcag

SEQ ID NO: 124332 - DNA, 15 bp, Homo sapiens
gaaatggcagaggca

SEQ ID NO: 124333 - DNA, 15 bp, Homo sapiens
agaaatggcagaggc

SEQ ID NO: 124334 - DNA, 15 bp, Homo sapiens
tagaaatggcagagg

SEQ ID NO: 124335 - DNA, 15 bp, Homo sapiens
gtagaaatggcagag

SEQ ID NO: 124336 - DNA, 15 bp, Homo sapiens
agtagaaatggcaga

SEQ ID NO: 124337 - DNA, 15 bp, Homo sapiens
aagtagaaatggcag

SEQ ID NO: 124338 - DNA, 15 bp, Homo sapiens
taagtagaaatggca

SEQ ID NO: 124339 - DNA, 15 bp, Homo sapiens
ttaagtagaaatggc

SEQ ID NO: 124340 - DNA, 15 bp, Homo sapiens
cttaagtagaaatgg

SEQ ID NO: 124341 - DNA, 15 bp, Homo sapiens
gcttaagtagaaatg

SEQ ID NO: 124342 - DNA, 15 bp, Homo sapiens
ggcttaagtagaaat

SEQ ID NO: 124343 - DNA, 15 bp, Homo sapiens
tggcttaagtagaaa

SEQ ID NO: 124344 - DNA, 15 bp, Homo sapiens
ctggcttaagtagaa

SEQ ID NO: 124345 - DNA, 15 bp, Homo sapiens
cctggcttaagtaga

SEQ ID NO: 124346 - DNA, 15 bp, Homo sapiens
ccctggcttaagtag

SEQ ID NO: 124347 - DNA, 15 bp, Homo sapiens
accctggcttaagta

SEQ ID NO: 124348 - DNA, 15 bp, Homo sapiens
aaccctggcttaagt

SEQ ID NO: 124349 - DNA, 15 bp, Homo sapiens
aaaccctggcttaag

SEQ ID NO: 124350 - DNA, 15 bp, Homo sapiens
gaaaccctggcttaa

SEQ ID NO: 124351 - DNA, 15 bp, Homo sapiens
agaaaccctggctta

SEQ ID NO: 124352 - DNA, 15 bp, Homo sapiens
gagaaaccctggctt

SEQ ID NO: 124353 - DNA, 15 bp, Homo sapiens
tgagaaaccctggct

SEQ ID NO: 124354 - DNA, 15 bp, Homo sapiens
atgagaaaccctggc

SEQ ID NO: 124355 - DNA, 15 bp, Homo sapiens
tatgagaaaccctgg

SEQ ID NO: 124356 - DNA, 15 bp, Homo sapiens
atatgagaaaccctg

SEQ ID NO: 124357 - DNA, 15 bp, Homo sapiens
catatgagaaaccct

SEQ ID NO: 124358 - DNA, 15 bp, Homo sapiens
acatatgagaaaccc

SEQ ID NO: 124359 - DNA, 15 bp, Homo sapiens
aacatatgagaaacc

SEQ ID NO: 124360 - DNA, 15 bp, Homo sapiens
taacatatgagaaac

SEQ ID NO: 124361 - DNA, 15 bp, Homo sapiens
ttaacatatgagaaa

SEQ ID NO: 124362 - DNA, 15 bp, Homo sapiens
gttaacatatgagaa

SEQ ID NO: 124363 - DNA, 15 bp, Homo sapiens
tgttaacatatgaga

SEQ ID NO: 124364 - DNA, 15 bp, Homo sapiens
atgttaacatatgag

SEQ ID NO: 124365 - DNA, 15 bp, Homo sapiens
catgttaacatatga

SEQ ID NO: 124366 - DNA, 15 bp, Homo sapiens
gcatgttaacatatg

SEQ ID NO: 124367 - DNA, 15 bp, Homo sapiens
tgcatgttaacatat

SEQ ID NO: 124368 - DNA, 15 bp, Homo sapiens
atgcatgttaacata

SEQ ID NO: 124369 - DNA, 15 bp, Homo sapiens
catgcatgttaacat

SEQ ID NO: 124370 - DNA, 15 bp, Homo sapiens
ccatgcatgttaaca

SEQ ID NO: 124371 - DNA, 15 bp, Homo sapiens
cccatgcatgttaac

SEQ ID NO: 124372 - DNA, 15 bp, Homo sapiens
tcccatgcatgttaa

SEQ ID NO: 124373 - DNA, 15 bp, Homo sapiens
ttcccatgcatgtta

SEQ ID NO: 124374 - DNA, 15 bp, Homo sapiens
attcccatgcatgtt

SEQ ID NO: 124375 - DNA, 15 bp, Homo sapiens
aattcccatgcatgt

SEQ ID NO: 124376 - DNA, 15 bp, Homo sapiens
gaattcccatgcatg

SEQ ID NO: 124377 - DNA, 15 bp, Homo sapiens
ggaattcccatgcat

SEQ ID NO: 124378 - DNA, 15 bp, Homo sapiens
gggaattcccatgca

SEQ ID NO: 124379 - DNA, 15 bp, Homo sapiens
agggaattcccatgc

SEQ ID NO: 124380 - DNA, 15 bp, Homo sapiens
cagggaattcccatg

SEQ ID NO: 124381 - DNA, 15 bp, Homo sapiens
ccagggaattcccat

SEQ ID NO: 124382 - DNA, 15 bp, Homo sapiens
cccagggaattccca

SEQ ID NO: 124383 - DNA, 15 bp, Homo sapiens
gcccagggaattccc

SEQ ID NO: 124384 - DNA, 15 bp, Homo sapiens
tgcccagggaattcc

SEQ ID NO: 124385 - DNA, 15 bp, Homo sapiens
atgcccagggaattc

SEQ ID NO: 124386 - DNA, 15 bp, Homo sapiens
gatgcccagggaatt

SEQ ID NO: 124387 - DNA, 15 bp, Homo sapiens
agatgcccagggaat

SEQ ID NO: 124388 - DNA, 15 bp, Homo sapiens
aagatgcccagggaa

SEQ ID NO: 124389 - DNA, 15 bp, Homo sapiens
gaagatgcccaggga

SEQ ID NO: 124390 - DNA, 15 bp, Homo sapiens
agaagatgcccaggg

SEQ ID NO: 124391 - DNA, 15 bp, Homo sapiens
aagaagatgcccagg

SEQ ID NO: 124392 - DNA, 15 bp, Homo sapiens
caagaagatgcccag

SEQ ID NO: 124393 - DNA, 15 bp, Homo sapiens
acaagaagatgccca

SEQ ID NO: 124394 - DNA, 15 bp, Homo sapiens
cacaagaagatgccc

SEQ ID NO: 124395 - DNA, 15 bp, Homo sapiens
ccacaagaagatgcc

SEQ ID NO: 124396 - DNA, 15 bp, Homo sapiens
accacaagaagatgc

SEQ ID NO: 124397 - DNA, 15 bp, Homo sapiens
caccacaagaagatg

SEQ ID NO: 124398 - DNA, 15 bp, Homo sapiens
acaccacaagaagat

SEQ ID NO: 124399 - DNA, 15 bp, Homo sapiens
cacaccacaagaaga

SEQ ID NO: 124400 - DNA, 15 bp, Homo sapiens
ccacaccacaagaag

SEQ ID NO: 124401 - DNA, 15 bp, Homo sapiens
tccacaccacaagaa

SEQ ID NO: 124402 - DNA, 15 bp, Homo sapiens
ctccacaccacaaga

SEQ ID NO: 124403 - DNA, 15 bp, Homo sapiens
actccacaccacaag

SEQ ID NO: 124404 - DNA, 15 bp, Homo sapiens
gactccacaccacaa

SEQ ID NO: 124405 - DNA, 15 bp, Homo sapiens
agactccacaccaca

SEQ ID NO: 124406 - DNA, 15 bp, Homo sapiens
cagactccacaccac

SEQ ID NO: 124407 - DNA, 15 bp, Homo sapiens
tcagactccacacca

SEQ ID NO: 124408 - DNA, 15 bp, Homo sapiens
gtcagactccacacc

SEQ ID NO: 124409 - DNA, 15 bp, Homo sapiens
agtcagactccacac

SEQ ID NO: 124410 - DNA, 15 bp, Homo sapiens
aagtcagactccaca

SEQ ID NO: 124411 - DNA, 15 bp, Homo sapiens
taagtcagactccac

SEQ ID NO: 124412 - DNA, 15 bp, Homo sapiens
ctaagtcagactcca

SEQ ID NO: 124413 - DNA, 15 bp, Homo sapiens
gctaagtcagactcc

SEQ ID NO: 124414 - DNA, 15 bp, Homo sapiens
tgctaagtcagactc

SEQ ID NO: 124415 - DNA, 15 bp, Homo sapiens
ttgctaagtcagact

SEQ ID NO: 124416 - DNA, 15 bp, Homo sapiens
cttgctaagtcagac

SEQ ID NO: 124417 - DNA, 15 bp, Homo sapiens
gcttgctaagtcaga

SEQ ID NO: 124418 - DNA, 15 bp, Homo sapiens
ggcttgctaagtcag

SEQ ID NO: 124419 - DNA, 15 bp, Homo sapiens
aggcttgctaagtca

SEQ ID NO: 124420 - DNA, 15 bp, Homo sapiens
gaggcttgctaagtc

SEQ ID NO: 124421 - DNA, 15 bp, Homo sapiens
cgaggcttgctaagt

SEQ ID NO: 124422 - DNA, 15 bp, Homo sapiens
ccgaggcttgctaag

SEQ ID NO: 124423 - DNA, 15 bp, Homo sapiens
cccgaggcttgctaa

SEQ ID NO: 124424 - DNA, 15 bp, Homo sapiens
acccgaggcttgcta

SEQ ID NO: 124425 - DNA, 15 bp, Homo sapiens
cacccgaggcttgct

SEQ ID NO: 124426 - DNA, 15 bp, Homo sapiens
ccacccgaggcttgc

SEQ ID NO: 124427 - DNA, 15 bp, Homo sapiens
cccacccgaggcttg

SEQ ID NO: 124428 - DNA, 15 bp, Homo sapiens
acccacccgaggctt

SEQ ID NO: 124429 - DNA, 15 bp, Homo sapiens
aacccacccgaggct

SEQ ID NO: 124430 - DNA, 15 bp, Homo sapiens
aaacccacccgaggc

SEQ ID NO: 124431 - DNA, 15 bp, Homo sapiens
caaacccacccgagg

SEQ ID NO: 124432 - DNA, 15 bp, Homo sapiens
tcaaacccacccgag

SEQ ID NO: 124433 - DNA, 15 bp, Homo sapiens
ctcaaacccacccga

SEQ ID NO: 124434 - DNA, 15 bp, Homo sapiens
cctcaaacccacccg

SEQ ID NO: 124435 - DNA, 15 bp, Homo sapiens
ccctcaaacccaccc

SEQ ID NO: 124436 - DNA, 15 bp, Homo sapiens
accctcaaacccacc

SEQ ID NO: 124437 - DNA, 15 bp, Homo sapiens
gaccctcaaacccac

SEQ ID NO: 124438 - DNA, 15 bp, Homo sapiens
tgaccctcaaaccca

SEQ ID NO: 124439 - DNA, 15 bp, Homo sapiens
ttgaccctcaaaccc

SEQ ID NO: 124440 - DNA, 15 bp, Homo sapiens
tttgaccctcaaacc

SEQ ID NO: 124441 - DNA, 15 bp, Homo sapiens
atttgaccctcaaac

SEQ ID NO: 124442 - DNA, 15 bp, Homo sapiens
aatttgaccctcaaa

SEQ ID NO: 124443 - DNA, 15 bp, Homo sapiens
aaatttgaccctcaa

SEQ ID NO: 124444 - DNA, 15 bp, Homo sapiens
gaaatttgaccctca

SEQ ID NO: 124445 - DNA, 15 bp, Homo sapiens
agaaatttgaccctc

SEQ ID NO: 124446 - DNA, 15 bp, Homo sapiens
tagaaatttgaccct

SEQ ID NO: 124447 - DNA, 15 bp, Homo sapiens
gtagaaatttgaccc

SEQ ID NO: 124448 - DNA, 15 bp, Homo sapiens
ggtagaaatttgacc

SEQ ID NO: 124449 - DNA, 15 bp, Homo sapiens
tggtagaaatttgac

SEQ ID NO: 124450 - DNA, 15 bp, Homo sapiens
ctggtagaaatttga

SEQ ID NO: 124451 - DNA, 15 bp, Homo sapiens
cctggtagaaatttg

SEQ ID NO: 124452 - DNA, 15 bp, Homo sapiens
gcctggtagaaattt

SEQ ID NO: 124453 - DNA, 15 bp, Homo sapiens
agcctggtagaaatt

SEQ ID NO: 124454 - DNA, 15 bp, Homo sapiens
aagcctggtagaaat

SEQ ID NO: 124455 - DNA, 15 bp, Homo sapiens
taagcctggtagaaa

SEQ ID NO: 124456 - DNA, 15 bp, Homo sapiens
ataagcctggtagaa

SEQ ID NO: 124457 - DNA, 15 bp, Homo sapiens
tataagcctggtaga

SEQ ID NO: 124458 - DNA, 15 bp, Homo sapiens
atataagcctggtag

SEQ ID NO: 124459 - DNA, 15 bp, Homo sapiens
gatataagcctggta

SEQ ID NO: 124460 - DNA, 15 bp, Homo sapiens
ggatataagcctggt

SEQ ID NO: 124461 - DNA, 15 bp, Homo sapiens
gggatataagcctgg

SEQ ID NO: 124462 - DNA, 15 bp, Homo sapiens
agggatataagcctg

SEQ ID NO: 124463 - DNA, 15 bp, Homo sapiens
cagggatataagcct

SEQ ID NO: 124464 - DNA, 15 bp, Homo sapiens
ccagggatataagcc

SEQ ID NO: 124465 - DNA, 15 bp, Homo sapiens
accagggatataagc

SEQ ID NO: 124466 - DNA, 15 bp, Homo sapiens
caccagggatataag

SEQ ID NO: 124467 - DNA, 15 bp, Homo sapiens
tcaccagggatataa

SEQ ID NO: 124468 - DNA, 15 bp, Homo sapiens
atcaccagggatata

SEQ ID NO: 124469 - DNA, 15 bp, Homo sapiens
catcaccagggatat

SEQ ID NO: 124470 - DNA, 15 bp, Homo sapiens
gcatcaccagggata

SEQ ID NO: 124471 - DNA, 15 bp, Homo sapiens
agcatcaccagggat

SEQ ID NO: 124472 - DNA, 15 bp, Homo sapiens
cagcatcaccaggga

SEQ ID NO: 124473 - DNA, 15 bp, Homo sapiens
gcagcatcaccaggg

SEQ ID NO: 124474 - DNA, 15 bp, Homo sapiens
tgcagcatcaccagg

SEQ ID NO: 124475 - DNA, 15 bp, Homo sapiens
ctgcagcatcaccag

SEQ ID NO: 124476 - DNA, 15 bp, Homo sapiens
tctgcagcatcacca

SEQ ID NO: 124477 - DNA, 15 bp, Homo sapiens
ttctgcagcatcacc

SEQ ID NO: 124478 - DNA, 15 bp, Homo sapiens
attctgcagcatcac

SEQ ID NO: 124479 - DNA, 15 bp, Homo sapiens
aattctgcagcatca

SEQ ID NO: 124480 - DNA, 15 bp, Homo sapiens
gaattctgcagcatc

SEQ ID NO: 124481 - DNA, 15 bp, Homo sapiens
ggaattctgcagcat

SEQ ID NO: 124482 - DNA, 15 bp, Homo sapiens
tggaattctgcagca

SEQ ID NO: 124483 - DNA, 15 bp, Homo sapiens
ctggaattctgcagc

SEQ ID NO: 124484 - DNA, 15 bp, Homo sapiens
cctggaattctgcag

SEQ ID NO: 124485 - DNA, 15 bp, Homo sapiens
tcctggaattctgca

SEQ ID NO: 124486 - DNA, 15 bp, Homo sapiens
gtcctggaattctgc

SEQ ID NO: 124487 - DNA, 15 bp, Homo sapiens
ggtcctggaattctg

SEQ ID NO: 124488 - DNA, 15 bp, Homo sapiens
tggtcctggaattct

SEQ ID NO: 124489 - DNA, 15 bp, Homo sapiens
gtggtcctggaattc

SEQ ID NO: 124490 - DNA, 15 bp, Homo sapiens
tgtggtcctggaatt

SEQ ID NO: 124491 - DNA, 15 bp, Homo sapiens
gtgtggtcctggaat

SEQ ID NO: 124492 - DNA, 15 bp, Homo sapiens
agtgtggtcctggaa

SEQ ID NO: 124493 - DNA, 15 bp, Homo sapiens
aagtgtggtcctgga

SEQ ID NO: 124494 - DNA, 15 bp, Homo sapiens
caagtgtggtcctgg

SEQ ID NO: 124495 - DNA, 15 bp, Homo sapiens
ccaagtgtggtcctg

SEQ ID NO: 124496 - DNA, 15 bp, Homo sapiens
tccaagtgtggtcct

SEQ ID NO: 124497 - DNA, 15 bp, Homo sapiens
ctccaagtgtggtcc

SEQ ID NO: 124498 - DNA, 15 bp, Homo sapiens
cctccaagtgtggtc

SEQ ID NO: 124499 - DNA, 15 bp, Homo sapiens
acctccaagtgtggt

SEQ ID NO: 124500 - DNA, 15 bp, Homo sapiens
aacctccaagtgtgg

SEQ ID NO: 124501 - DNA, 15 bp, Homo sapiens
aaacctccaagtgtg

SEQ ID NO: 124502 - DNA, 15 bp, Homo sapiens
taaacctccaagtgt

SEQ ID NO: 124503 - DNA, 15 bp, Homo sapiens
ttaaacctccaagtg

SEQ ID NO: 124504 - DNA, 15 bp, Homo sapiens
cttaaacctccaagt

SEQ ID NO: 124505 - DNA, 15 bp, Homo sapiens
ccttaaacctccaag

SEQ ID NO: 124506 - DNA, 15 bp, Homo sapiens
gccttaaacctccaa

SEQ ID NO: 124507 - DNA, 15 bp, Homo sapiens
ggccttaaacctcca

SEQ ID NO: 124508 - DNA, 15 bp, Homo sapiens
aggccttaaacctcc

SEQ ID NO: 124509 - DNA, 15 bp, Homo sapiens
aaggccttaaacctc

SEQ ID NO: 124510 - DNA, 15 bp, Homo sapiens
gaaggccttaaacct

SEQ ID NO: 124511 - DNA, 15 bp, Homo sapiens
ggaaggccttaaacc

SEQ ID NO: 124512 - DNA, 15 bp, Homo sapiens
tggaaggccttaaac

SEQ ID NO: 124513 - DNA, 15 bp, Homo sapiens
gtggaaggccttaaa

SEQ ID NO: 124514 - DNA, 15 bp, Homo sapiens
tgtggaaggccttaa

SEQ ID NO: 124515 - DNA, 15 bp, Homo sapiens
ttgtggaaggcctta

SEQ ID NO: 124516 - DNA, 15 bp, Homo sapiens
cttgtggaaggcctt

SEQ ID NO: 124517 - DNA, 15 bp, Homo sapiens
acttgtggaaggcct

SEQ ID NO: 124518 - DNA, 15 bp, Homo sapiens
aacttgtggaaggcc

SEQ ID NO: 124519 - DNA, 15 bp, Homo sapiens
taacttgtggaaggc

SEQ ID NO: 124520 - DNA, 15 bp, Homo sapiens
gtaacttgtggaagg

SEQ ID NO: 124521 - DNA, 15 bp, Homo sapiens
agtaacttgtggaag

SEQ ID NO: 124522 - DNA, 15 bp, Homo sapiens
aagtaacttgtggaa

SEQ ID NO: 124523 - DNA, 15 bp, Homo sapiens
taagtaacttgtgga

SEQ ID NO: 124524 - DNA, 15 bp, Homo sapiens
ataagtaacttgtgg

SEQ ID NO: 124525 - DNA, 15 bp, Homo sapiens
gataagtaacttgtg

SEQ ID NO: 124526 - DNA, 15 bp, Homo sapiens
ggataagtaacttgt

SEQ ID NO: 124527 - DNA, 15 bp, Homo sapiens
gggataagtaacttg

SEQ ID NO: 124528 - DNA, 15 bp, Homo sapiens
tgggataagtaactt

SEQ ID NO: 124529 - DNA, 15 bp, Homo sapiens
atgggataagtaact

SEQ ID NO: 124530 - DNA, 15 bp, Homo sapiens
tatgggataagtaac

SEQ ID NO: 124531 - DNA, 15 bp, Homo sapiens
atatgggataagtaa

SEQ ID NO: 124532 - DNA, 15 bp, Homo sapiens
catatgggataagta

SEQ ID NO: 124533 - DNA, 15 bp, Homo sapiens
ccatatgggataagt

SEQ ID NO: 124534 - DNA, 15 bp, Homo sapiens
accatatgggataag

SEQ ID NO: 124535 - DNA, 15 bp, Homo sapiens
caccatatgggataa

SEQ ID NO: 124536 - DNA, 15 bp, Homo sapiens
ccaccatatgggata

SEQ ID NO: 124537 - DNA, 15 bp, Homo sapiens
cccaccatatgggat

SEQ ID NO: 124538 - DNA, 15 bp, Homo sapiens
acccaccatatggga

SEQ ID NO: 124539 - DNA, 15 bp, Homo sapiens
gacccaccatatggg

SEQ ID NO: 124540 - DNA, 15 bp, Homo sapiens
agacccaccatatgg

SEQ ID NO: 124541 - DNA, 15 bp, Homo sapiens
tagacccaccatatg

SEQ ID NO: 124542 - DNA, 15 bp, Homo sapiens
atagacccaccatat

SEQ ID NO: 124543 - DNA, 15 bp, Homo sapiens
catagacccaccata

SEQ ID NO: 124544 - DNA, 15 bp, Homo sapiens
ccatagacccaccat

SEQ ID NO: 124545 - DNA, 15 bp, Homo sapiens
tccatagacccacca

SEQ ID NO: 124546 - DNA, 15 bp, Homo sapiens
ttccatagacccacc

SEQ ID NO: 124547 - DNA, 15 bp, Homo sapiens
tttccatagacccac

SEQ ID NO: 124548 - DNA, 15 bp, Homo sapiens
ctttccatagaccca

SEQ ID NO: 124549 - DNA, 15 bp, Homo sapiens
cctttccatagaccc

SEQ ID NO: 124550 - DNA, 15 bp, Homo sapiens
acctttccatagacc

SEQ ID NO: 124551 - DNA, 15 bp, Homo sapiens
cacctttccatagac

SEQ ID NO: 124552 - DNA, 15 bp, Homo sapiens
acacctttccataga

SEQ ID NO: 124553 - DNA, 15 bp, Homo sapiens
aacacctttccatag

SEQ ID NO: 124554 - DNA, 15 bp, Homo sapiens
aaacacctttccata

SEQ ID NO: 124555 - DNA, 15 bp, Homo sapiens
gaaacacctttccat

SEQ ID NO: 124556 - DNA, 15 bp, Homo sapiens
ggaaacacctttcca

SEQ ID NO: 124557 - DNA, 15 bp, Homo sapiens
gggaaacacctttcc

SEQ ID NO: 124558 - DNA, 15 bp, Homo sapiens
tgggaaacacctttc

SEQ ID NO: 124559 - DNA, 15 bp, Homo sapiens
ctgggaaacaccttt

SEQ ID NO: 124560 - DNA, 15 bp, Homo sapiens
actgggaaacacctt

SEQ ID NO: 124561 - DNA, 15 bp, Homo sapiens
gactgggaaacacct

SEQ ID NO: 124562 - DNA, 15 bp, Homo sapiens
ggactgggaaacacc

SEQ ID NO: 124563 - DNA, 15 bp, Homo sapiens
aggactgggaaacac

SEQ ID NO: 124564 - DNA, 15 bp, Homo sapiens
gaggactgggaaaca

SEQ ID NO: 124565 - DNA, 15 bp, Homo sapiens
agaggactgggaaac

SEQ ID NO: 124566 - DNA, 15 bp, Homo sapiens
aagaggactgggaaa

SEQ ID NO: 124567 - DNA, 15 bp, Homo sapiens
aaagaggactgggaa

SEQ ID NO: 124568 - DNA, 15 bp, Homo sapiens
taaagaggactggga

SEQ ID NO: 124569 - DNA, 15 bp, Homo sapiens
gtaaagaggactggg

SEQ ID NO: 124570 - DNA, 15 bp, Homo sapiens
tgtaaagaggactgg

SEQ ID NO: 124571 - DNA, 15 bp, Homo sapiens
gtgtaaagaggactg

SEQ ID NO: 124572 - DNA, 15 bp, Homo sapiens
ggtgtaaagaggact

SEQ ID NO: 124573 - DNA, 15 bp, Homo sapiens
tggtgtaaagaggac

SEQ ID NO: 124574 - DNA, 15 bp, Homo sapiens
gtggtgtaaagagga

SEQ ID NO: 124575 - DNA, 15 bp, Homo sapiens
ggtggtgtaaagagg

SEQ ID NO: 124576 - DNA, 15 bp, Homo sapiens
cggtggtgtaaagag

SEQ ID NO: 124577 - DNA, 15 bp, Homo sapiens
ccggtggtgtaaaga

SEQ ID NO: 124578 - DNA, 15 bp, Homo sapiens
tccggtggtgtaaag

SEQ ID NO: 124579 - DNA, 15 bp, Homo sapiens
atccggtggtgtaaa

SEQ ID NO: 124580 - DNA, 15 bp, Homo sapiens
gatccggtggtgtaa

SEQ ID NO: 124581 - DNA, 15 bp, Homo sapiens
tgatccggtggtgta

SEQ ID NO: 124582 - DNA, 15 bp, Homo sapiens
ctgatccggtggtgt

SEQ ID NO: 124583 - DNA, 15 bp, Homo sapiens
actgatccggtggtg

SEQ ID NO: 124584 - DNA, 15 bp, Homo sapiens
cactgatccggtggt

SEQ ID NO: 124585 - DNA, 15 bp, Homo sapiens
ccactgatccggtgg

SEQ ID NO: 124586 - DNA, 15 bp, Homo sapiens
accactgatccggtg

SEQ ID NO: 124587 - DNA, 15 bp, Homo sapiens
gaccactgatccggt

SEQ ID NO: 124588 - DNA, 15 bp, Homo sapiens
agaccactgatccgg

SEQ ID NO: 124589 - DNA, 15 bp, Homo sapiens
aagaccactgatccg

SEQ ID NO: 124590 - DNA, 15 bp, Homo sapiens
aaagaccactgatcc

SEQ ID NO: 124591 - DNA, 15 bp, Homo sapiens
gaaagaccactgatc

SEQ ID NO: 124592 - DNA, 15 bp, Homo sapiens
tgaaagaccactgat

SEQ ID NO: 124593 - DNA, 15 bp, Homo sapiens
ttgaaagaccactga

SEQ ID NO: 124594 - DNA, 15 bp, Homo sapiens
gttgaaagaccactg

SEQ ID NO: 124595 - DNA, 15 bp, Homo sapiens
tgttgaaagaccact

SEQ ID NO: 124596 - DNA, 15 bp, Homo sapiens
ctgttgaaagaccac

SEQ ID NO: 124597 - DNA, 15 bp, Homo sapiens
tctgttgaaagacca

SEQ ID NO: 124598 - DNA, 15 bp, Homo sapiens
atctgttgaaagacc

SEQ ID NO: 124599 - DNA, 15 bp, Homo sapiens
gatctgttgaaagac

SEQ ID NO: 124600 - DNA, 15 bp, Homo sapiens
ggatctgttgaaaga

SEQ ID NO: 124601 - DNA, 15 bp, Homo sapiens
aggatctgttgaaag

SEQ ID NO: 124602 - DNA, 15 bp, Homo sapiens
taggatctgttgaaa

SEQ ID NO: 124603 - DNA, 15 bp, Homo sapiens
ttaggatctgttgaa

SEQ ID NO: 124604 - DNA, 15 bp, Homo sapiens
tttaggatctgttga

SEQ ID NO: 124605 - DNA, 15 bp, Homo sapiens
ctttaggatctgttg

SEQ ID NO: 124606 - DNA, 15 bp, Homo sapiens
cctttaggatctgtt

SEQ ID NO: 124607 - DNA, 15 bp, Homo sapiens
ccctttaggatctgt

SEQ ID NO: 124608 - DNA, 15 bp, Homo sapiens
tccctttaggatctg

SEQ ID NO: 124609 - DNA, 15 bp, Homo sapiens
atccctttaggatct

SEQ ID NO: 124610 - DNA, 15 bp, Homo sapiens
catccctttaggatc

SEQ ID NO: 124611 - DNA, 15 bp, Homo sapiens
ccatccctttaggat

SEQ ID NO: 124612 - DNA, 15 bp, Homo sapiens
accatccctttagga

SEQ ID NO: 124613 - DNA, 15 bp, Homo sapiens
caccatccctttagg

SEQ ID NO: 124614 - DNA, 15 bp, Homo sapiens
tcaccatccctttag

SEQ ID NO: 124615 - DNA, 15 bp, Homo sapiens
ctcaccatcccttta

SEQ ID NO: 124616 - DNA, 15 bp, Homo sapiens
tctcaccatcccttt

SEQ ID NO: 124617 - DNA, 15 bp, Homo sapiens
ctctcaccatccctt

SEQ ID NO: 124618 - DNA, 15 bp, Homo sapiens
cctctcaccatccct

SEQ ID NO: 124619 - DNA, 15 bp, Homo sapiens
ccctctcaccatccc

SEQ ID NO: 124620 - DNA, 15 bp, Homo sapiens
tccctctcaccatcc

SEQ ID NO: 124621 - DNA, 15 bp, Homo sapiens
ttccctctcaccatc

SEQ ID NO: 124622 - DNA, 15 bp, Homo sapiens
tttccctctcaccat

SEQ ID NO: 124623 - DNA, 15 bp, Homo sapiens
gtttccctctcacca

SEQ ID NO: 124624 - DNA, 15 bp, Homo sapiens
agtttccctctcacc

SEQ ID NO: 124625 - DNA, 15 bp, Homo sapiens
cagtttccctctcac

SEQ ID NO: 124626 - DNA, 15 bp, Homo sapiens
ccagtttccctctca

SEQ ID NO: 124627 - DNA, 15 bp, Homo sapiens
tccagtttccctctc

SEQ ID NO: 124628 - DNA, 15 bp, Homo sapiens
ctccagtttccctct

SEQ ID NO: 124629 - DNA, 15 bp, Homo sapiens
tctccagtttccctc

SEQ ID NO: 124630 - DNA, 15 bp, Homo sapiens
ttctccagtttccct

SEQ ID NO: 124631 - DNA, 15 bp, Homo sapiens
tttctccagtttccc

SEQ ID NO: 124632 - DNA, 15 bp, Homo sapiens
ttttctccagtttcc

SEQ ID NO: 124633 - DNA, 15 bp, Homo sapiens
cttttctccagtttc

SEQ ID NO: 124634 - DNA, 15 bp, Homo sapiens
acttttctccagttt

SEQ ID NO: 124635 - DNA, 15 bp, Homo sapiens
tacttttctccagtt

SEQ ID NO: 124636 - DNA, 15 bp, Homo sapiens
atacttttctccagt

SEQ ID NO: 124637 - DNA, 15 bp, Homo sapiens
gatacttttctccag

SEQ ID NO: 124638 - DNA, 15 bp, Homo sapiens
tgatacttttctcca

SEQ ID NO: 124639 - DNA, 15 bp, Homo sapiens
ctgatacttttctcc

SEQ ID NO: 124640 - DNA, 15 bp, Homo sapiens
tctgatacttttctc

SEQ ID NO: 124641 - DNA, 15 bp, Homo sapiens
atctgatacttttct

SEQ ID NO: 124642 - DNA, 15 bp, Homo sapiens
aatctgatacttttc

SEQ ID NO: 124643 - DNA, 15 bp, Homo sapiens
aaatctgatactttt

SEQ ID NO: 124644 - DNA, 15 bp, Homo sapiens
taaatctgatacttt

SEQ ID NO: 124645 - DNA, 15 bp, Homo sapiens
ctaaatctgatactt

SEQ ID NO: 124646 - DNA, 15 bp, Homo sapiens
tctaaatctgatact

SEQ ID NO: 124647 - DNA, 15 bp, Homo sapiens
ctctaaatctgatac

SEQ ID NO: 124648 - DNA, 15 bp, Homo sapiens
cctctaaatctgata

SEQ ID NO: 124649 - DNA, 15 bp, Homo sapiens
gcctctaaatctgat

SEQ ID NO: 124650 - DNA, 15 bp, Homo sapiens
ggcctctaaatctga

SEQ ID NO: 124651 - DNA, 15 bp, Homo sapiens
tggcctctaaatctg

SEQ ID NO: 124652 - DNA, 15 bp, Homo sapiens
gtggcctctaaatct

SEQ ID NO: 124653 - DNA, 15 bp, Homo sapiens
agtggcctctaaatc

SEQ ID NO: 124654 - DNA, 15 bp, Homo sapiens
cagtggcctctaaat

SEQ ID NO: 124655 - DNA, 15 bp, Homo sapiens
tcagtggcctctaaa

SEQ ID NO: 124656 - DNA, 15 bp, Homo sapiens
ttcagtggcctctaa

SEQ ID NO: 124657 - DNA, 15 bp, Homo sapiens
cttcagtggcctcta

SEQ ID NO: 124658 - DNA, 15 bp, Homo sapiens
tcttcagtggcctct

SEQ ID NO: 124659 - DNA, 15 bp, Homo sapiens
ttcttcagtggcctc

SEQ ID NO: 124660 - DNA, 15 bp, Homo sapiens
gttcttcagtggcct

SEQ ID NO: 124661 - DNA, 15 bp, Homo sapiens
ggttcttcagtggcc

SEQ ID NO: 124662 - DNA, 15 bp, Homo sapiens
gggttcttcagtggc

SEQ ID NO: 124663 - DNA, 15 bp, Homo sapiens
tgggttcttcagtgg

SEQ ID NO: 124664 - DNA, 15 bp, Homo sapiens
atgggttcttcagtg

SEQ ID NO: 124665 - DNA, 15 bp, Homo sapiens
tatgggttcttcagt

SEQ ID NO: 124666 - DNA, 15 bp, Homo sapiens
atatgggttcttcag

SEQ ID NO: 124667 - DNA, 15 bp, Homo sapiens
aatatgggttcttca

SEQ ID NO: 124668 - DNA, 15 bp, Homo sapiens
taatatgggttcttc

SEQ ID NO: 124669 - DNA, 15 bp, Homo sapiens
ttaatatgggttctt

SEQ ID NO: 124670 - DNA, 15 bp, Homo sapiens
tttaatatgggttct

SEQ ID NO: 124671 - DNA, 15 bp, Homo sapiens
ttttaatatgggttc

SEQ ID NO: 124672 - DNA, 15 bp, Homo sapiens
attttaatatgggtt

SEQ ID NO: 124673 - DNA, 15 bp, Homo sapiens
cattttaatatgggt

SEQ ID NO: 124674 - DNA, 15 bp, Homo sapiens
gcattttaatatggg

SEQ ID NO: 124675 - DNA, 15 bp, Homo sapiens
ggcattttaatatgg

SEQ ID NO: 124676 - DNA, 15 bp, Homo sapiens
aggcattttaatatg

SEQ ID NO: 124677 - DNA, 15 bp, Homo sapiens
aaggcattttaatat

SEQ ID NO: 124678 - DNA, 15 bp, Homo sapiens
aaaggcattttaata

SEQ ID NO: 124679 - DNA, 15 bp, Homo sapiens
taaaggcattttaat

SEQ ID NO: 124680 - DNA, 15 bp, Homo sapiens
ttaaaggcattttaa

SEQ ID NO: 124681 - DNA, 15 bp, Homo sapiens
cttaaaggcatttta

SEQ ID NO: 124682 - DNA, 15 bp, Homo sapiens
acttaaaggcatttt

SEQ ID NO: 124683 - DNA, 15 bp, Homo sapiens
tacttaaaggcattt

SEQ ID NO: 124684 - DNA, 15 bp, Homo sapiens
atacttaaaggcatt

SEQ ID NO: 124685 - DNA, 15 bp, Homo sapiens
catacttaaaggcat

SEQ ID NO: 124686 - DNA, 15 bp, Homo sapiens
ccatacttaaaggca

SEQ ID NO: 124687 - DNA, 15 bp, Homo sapiens
cccatacttaaaggc

SEQ ID NO: 124688 - DNA, 15 bp, Homo sapiens
gcccatacttaaagg

SEQ ID NO: 124689 - DNA, 15 bp, Homo sapiens
agcccatacttaaag

SEQ ID NO: 124690 - DNA, 15 bp, Homo sapiens
gagcccatacttaaa

SEQ ID NO: 124691 - DNA, 15 bp, Homo sapiens
agagcccatacttaa

SEQ ID NO: 124692 - DNA, 15 bp, Homo sapiens
aagagcccatactta

SEQ ID NO: 124693 - DNA, 15 bp, Homo sapiens
gaagagcccatactt

SEQ ID NO: 124694 - DNA, 15 bp, Homo sapiens
tgaagagcccatact

SEQ ID NO: 124695 - DNA, 15 bp, Homo sapiens
atgaagagcccatac

SEQ ID NO: 124696 - DNA, 15 bp, Homo sapiens
aatgaagagcccata

SEQ ID NO: 124697 - DNA, 15 bp, Homo sapiens
gaatgaagagcccat

SEQ ID NO: 124698 - DNA, 15 bp, Homo sapiens
tgaatgaagagccca

SEQ ID NO: 124699 - DNA, 15 bp, Homo sapiens
atgaatgaagagccc

SEQ ID NO: 124700 - DNA, 15 bp, Homo sapiens
tatgaatgaagagcc

SEQ ID NO: 124701 - DNA, 15 bp, Homo sapiens
atatgaatgaagagc

SEQ ID NO: 124702 - DNA, 15 bp, Homo sapiens
tatatgaatgaagag

SEQ ID NO: 124703 - DNA, 15 bp, Homo sapiens
gtatatgaatgaaga

SEQ ID NO: 124704 - DNA, 15 bp, Homo sapiens
agtatatgaatgaag

SEQ ID NO: 124705 - DNA, 15 bp, Homo sapiens
tagtatatgaatgaa

SEQ ID NO: 124706 - DNA, 15 bp, Homo sapiens
ttagtatatgaatga

SEQ ID NO: 124707 - DNA, 15 bp, Homo sapiens
tttagtatatgaatg

SEQ ID NO: 124708 - DNA, 15 bp, Homo sapiens
atttagtatatgaat

SEQ ID NO: 124709 - DNA, 15 bp, Homo sapiens
tatttagtatatgaa

SEQ ID NO: 124710 - DNA, 15 bp, Homo sapiens
atatttagtatatga

SEQ ID NO: 124711 - DNA, 15 bp, Homo sapiens
catatttagtatatg

SEQ ID NO: 124712 - DNA, 15 bp, Homo sapiens
tcatatttagtatat

SEQ ID NO: 124713 - DNA, 15 bp, Homo sapiens
ttcatatttagtata

SEQ ID NO: 124714 - DNA, 15 bp, Homo sapiens
gttcatatttagtat

SEQ ID NO: 124715 - DNA, 15 bp, Homo sapiens
agttcatatttagta

SEQ ID NO: 124716 - DNA, 15 bp, Homo sapiens
tagttcatatttagt

SEQ ID NO: 124717 - DNA, 15 bp, Homo sapiens
atagttcatatttag

SEQ ID NO: 124718 - DNA, 15 bp, Homo sapiens
catagttcatattta

SEQ ID NO: 124719 - DNA, 15 bp, Homo sapiens
acatagttcatattt

SEQ ID NO: 124720 - DNA, 15 bp, Homo sapiens
cacatagttcatatt

SEQ ID NO: 124721 - DNA, 15 bp, Homo sapiens
gcacatagttcatat

SEQ ID NO: 124722 - DNA, 15 bp, Homo sapiens
ggcacatagttcata

SEQ ID NO: 124723 - DNA, 15 bp, Homo sapiens
tggcacatagttcat

SEQ ID NO: 124724 - DNA, 15 bp, Homo sapiens
ctggcacatagttca

SEQ ID NO: 124725 - DNA, 15 bp, Homo sapiens
cctggcacatagttc

SEQ ID NO: 124726 - DNA, 15 bp, Homo sapiens
gcctggcacatagtt

SEQ ID NO: 124727 - DNA, 15 bp, Homo sapiens
tgcctggcacatagt

SEQ ID NO: 124728 - DNA, 15 bp, Homo sapiens
atgcctggcacatag

SEQ ID NO: 124729 - DNA, 15 bp, Homo sapiens
aatgcctggcacata

SEQ ID NO: 124730 - DNA, 15 bp, Homo sapiens
taatgcctggcacat

SEQ ID NO: 124731 - DNA, 15 bp, Homo sapiens
ataatgcctggcaca

SEQ ID NO: 124732 - DNA, 15 bp, Homo sapiens
aataatgcctggcac

SEQ ID NO: 124733 - DNA, 15 bp, Homo sapiens
aaataatgcctggca

SEQ ID NO: 124734 - DNA, 15 bp, Homo sapiens
gaaataatgcctggc

SEQ ID NO: 124735 - DNA, 15 bp, Homo sapiens
tgaaataatgcctgg

SEQ ID NO: 124736 - DNA, 15 bp, Homo sapiens
atgaaataatgcctg

SEQ ID NO: 124737 - DNA, 15 bp, Homo sapiens
tatgaaataatgcct

SEQ ID NO: 124738 - DNA, 15 bp, Homo sapiens
atatgaaataatgcc

SEQ ID NO: 124739 - DNA, 15 bp, Homo sapiens
catatgaaataatgc

SEQ ID NO: 124740 - DNA, 15 bp, Homo sapiens
tcatatgaaataatg

SEQ ID NO: 124741 - DNA, 15 bp, Homo sapiens
gtcatatgaaataat

SEQ ID NO: 124742 - DNA, 15 bp, Homo sapiens
tgtcatatgaaataa

SEQ ID NO: 124743 - DNA, 15 bp, Homo sapiens
ctgtcatatgaaata

SEQ ID NO: 124744 - DNA, 15 bp, Homo sapiens
tctgtcatatgaaat

SEQ ID NO: 124745 - DNA, 15 bp, Homo sapiens
ttctgtcatatgaaa

SEQ ID NO: 124746 - DNA, 15 bp, Homo sapiens
attctgtcatatgaa

SEQ ID NO: 124747 - DNA, 15 bp, Homo sapiens
tattctgtcatatga

SEQ ID NO: 124748 - DNA, 15 bp, Homo sapiens
gtattctgtcatatg

SEQ ID NO: 124749 - DNA, 15 bp, Homo sapiens
tgtattctgtcatat

SEQ ID NO: 124750 - DNA, 15 bp, Homo sapiens
ttgtattctgtcata

SEQ ID NO: 124751 - DNA, 15 bp, Homo sapiens
tttgtattctgtcat

SEQ ID NO: 124752 - DNA, 15 bp, Homo sapiens
gtttgtattctgtca

SEQ ID NO: 124753 - DNA, 15 bp, Homo sapiens
tgtttgtattctgtc

SEQ ID NO: 124754 - DNA, 15 bp, Homo sapiens
ttgtttgtattctgt

SEQ ID NO: 124755 - DNA, 15 bp, Homo sapiens
tttgtttgtattctg

SEQ ID NO: 124756 - DNA, 15 bp, Homo sapiens
atttgtttgtattct

SEQ ID NO: 124757 - DNA, 15 bp, Homo sapiens
tatttgtttgtattc

SEQ ID NO: 124758 - DNA, 15 bp, Homo sapiens
ttatttgtttgtatt

SEQ ID NO: 124759 - DNA, 15 bp, Homo sapiens
cttatttgtttgtat

SEQ ID NO: 124760 - DNA, 15 bp, Homo sapiens
tcttatttgtttgta

SEQ ID NO: 124761 - DNA, 15 bp, Homo sapiens
atcttatttgtttgt

SEQ ID NO: 124762 - DNA, 15 bp, Homo sapiens
tatcttatttgtttg

SEQ ID NO: 124763 - DNA, 15 bp, Homo sapiens
ctatcttatttgttt

SEQ ID NO: 124764 - DNA, 15 bp, Homo sapiens
actatcttatttgtt

SEQ ID NO: 124765 - DNA, 15 bp, Homo sapiens
cactatcttatttgt

SEQ ID NO: 124766 - DNA, 15 bp, Homo sapiens
tcactatcttatttg

SEQ ID NO: 124767 - DNA, 15 bp, Homo sapiens
atcactatcttattt

SEQ ID NO: 124768 - DNA, 15 bp, Homo sapiens
catcactatcttatt

SEQ ID NO: 124769 - DNA, 15 bp, Homo sapiens
gcatcactatcttat

SEQ ID NO: 124770 - DNA, 15 bp, Homo sapiens
agcatcactatctta

SEQ ID NO: 124771 - DNA, 15 bp, Homo sapiens
cagcatcactatctt

SEQ ID NO: 124772 - DNA, 15 bp, Homo sapiens
ccagcatcactatct

SEQ ID NO: 124773 - DNA, 15 bp, Homo sapiens
accagcatcactatc

SEQ ID NO: 124774 - DNA, 15 bp, Homo sapiens
gaccagcatcactat

SEQ ID NO: 124775 - DNA, 15 bp, Homo sapiens
tgaccagcatcacta

SEQ ID NO: 124776 - DNA, 15 bp, Homo sapiens
ctgaccagcatcact

SEQ ID NO: 124777 - DNA, 15 bp, Homo sapiens
cctgaccagcatcac

SEQ ID NO: 124778 - DNA, 15 bp, Homo sapiens
gcctgaccagcatca

SEQ ID NO: 124779 - DNA, 15 bp, Homo sapiens
agcctgaccagcatc

SEQ ID NO: 124780 - DNA, 15 bp, Homo sapiens
aagcctgaccagcat

SEQ ID NO: 124781 - DNA, 15 bp, Homo sapiens
caagcctgaccagca

SEQ ID NO: 124782 - DNA, 15 bp, Homo sapiens
ccaagcctgaccagc

SEQ ID NO: 124783 - DNA, 15 bp, Homo sapiens
accaagcctgaccag

SEQ ID NO: 124784 - DNA, 15 bp, Homo sapiens
caccaagcctgacca

SEQ ID NO: 124785 - DNA, 15 bp, Homo sapiens
ccaccaagcctgacc

SEQ ID NO: 124786 - DNA, 15 bp, Homo sapiens
gccaccaagcctgac

SEQ ID NO: 124787 - DNA, 15 bp, Homo sapiens
agccaccaagcctga

SEQ ID NO: 124788 - DNA, 15 bp, Homo sapiens
gagccaccaagcctg

SEQ ID NO: 124789 - DNA, 15 bp, Homo sapiens
tgagccaccaagcct

SEQ ID NO: 124790 - DNA, 15 bp, Homo sapiens
atgagccaccaagcc

SEQ ID NO: 124791 - DNA, 15 bp, Homo sapiens
catgagccaccaagc

SEQ ID NO: 124792 - DNA, 15 bp, Homo sapiens
gcatgagccaccaag

SEQ ID NO: 124793 - DNA, 15 bp, Homo sapiens
ggcatgagccaccaa

SEQ ID NO: 124794 - DNA, 15 bp, Homo sapiens
atacaggcatgagcc

SEQ ID NO: 124795 - DNA, 15 bp, Homo sapiens
aatacaggcatgagc

SEQ ID NO: 124796 - DNA, 15 bp, Homo sapiens
gaatacaggcatgag

SEQ ID NO: 124797 - DNA, 15 bp, Homo sapiens
ggaatacaggcatga

SEQ ID NO: 124798 - DNA, 15 bp, Homo sapiens
gggaatacaggcatg

SEQ ID NO: 124799 - DNA, 15 bp, Homo sapiens
agggaatacaggcat

SEQ ID NO: 124800 - DNA, 15 bp, Homo sapiens
tagggaatacaggca

SEQ ID NO: 124801 - DNA, 15 bp, Homo sapiens
ttagggaatacaggc

SEQ ID NO: 124802 - DNA, 15 bp, Homo sapiens
tttagggaatacagg

SEQ ID NO: 124803 - DNA, 15 bp, Homo sapiens
gtttagggaatacag

SEQ ID NO: 124804 - DNA, 15 bp, Homo sapiens
agtttagggaataca

SEQ ID NO: 124805 - DNA, 15 bp, Homo sapiens
aagtttagggaatac

SEQ ID NO: 124806 - DNA, 15 bp, Homo sapiens
aaagtttagggaata

SEQ ID NO: 124807 - DNA, 15 bp, Homo sapiens
caaagtttagggaat

SEQ ID NO: 124808 - DNA, 15 bp, Homo sapiens
ccaaagtttagggaa

SEQ ID NO: 124809 - DNA, 15 bp, Homo sapiens
cccaaagtttaggga

SEQ ID NO: 124810 - DNA, 15 bp, Homo sapiens
tcccaaagtttaggg

SEQ ID NO: 124811 - DNA, 15 bp, Homo sapiens
ctcccaaagtttagg

SEQ ID NO: 124812 - DNA, 15 bp, Homo sapiens
gctcccaaagtttag

SEQ ID NO: 124813 - DNA, 15 bp, Homo sapiens
ggctcccaaagttta

SEQ ID NO: 124814 - DNA, 15 bp, Homo sapiens
aggctcccaaagttt

SEQ ID NO: 124815 - DNA, 15 bp, Homo sapiens
taggctcccaaagtt

SEQ ID NO: 124816 - DNA, 15 bp, Homo sapiens
ttaggctcccaaagt

SEQ ID NO: 124817 - DNA, 15 bp, Homo sapiens
cttaggctcccaaag

SEQ ID NO: 124818 - DNA, 15 bp, Homo sapiens
ccttaggctcccaaa

SEQ ID NO: 124819 - DNA, 15 bp, Homo sapiens
accttaggctcccaa

SEQ ID NO: 124820 - DNA, 15 bp, Homo sapiens
caccttaggctccca

SEQ ID NO: 124821 - DNA, 15 bp, Homo sapiens
tcaccttaggctccc

SEQ ID NO: 124822 - DNA, 15 bp, Homo sapiens
ctcaccttaggctcc

SEQ ID NO: 124823 - DNA, 15 bp, Homo sapiens
tctcaccttaggctc

SEQ ID NO: 124824 - DNA, 15 bp, Homo sapiens
ttctcaccttaggct

SEQ ID NO: 124825 - DNA, 15 bp, Homo sapiens
gttctcaccttaggc

SEQ ID NO: 124826 - DNA, 15 bp, Homo sapiens
agttctcaccttagg

SEQ ID NO: 124827 - DNA, 15 bp, Homo sapiens
gagttctcaccttag

SEQ ID NO: 124828 - DNA, 15 bp, Homo sapiens
ggagttctcacctta

SEQ ID NO: 124829 - DNA, 15 bp, Homo sapiens
aggagttctcacctt

SEQ ID NO: 124830 - DNA, 15 bp, Homo sapiens
aaggagttctcacct

SEQ ID NO: 124831 - DNA, 15 bp, Homo sapiens
caaggagttctcacc

SEQ ID NO: 124832 - DNA, 15 bp, Homo sapiens
tcaaggagttctcac

SEQ ID NO: 124833 - DNA, 15 bp, Homo sapiens
ttcaaggagttctca

SEQ ID NO: 124834 - DNA, 15 bp, Homo sapiens
gttcaaggagttctc

SEQ ID NO: 124835 - DNA, 15 bp, Homo sapiens
agttcaaggagttct

SEQ ID NO: 124836 - DNA, 15 bp, Homo sapiens
gagttcaaggagttc

SEQ ID NO: 124837 - DNA, 15 bp, Homo sapiens
ggagttcaaggagtt

SEQ ID NO: 124838 - DNA, 15 bp, Homo sapiens
aggagttcaaggagt

SEQ ID NO: 124839 - DNA, 15 bp, Homo sapiens
taggagttcaaggag

SEQ ID NO: 124840 - DNA, 15 bp, Homo sapiens
ttaggagttcaagga

SEQ ID NO: 124841 - DNA, 15 bp, Homo sapiens
cttaggagttcaagg

SEQ ID NO: 124842 - DNA, 15 bp, Homo sapiens
ccttaggagttcaag

SEQ ID NO: 124843 - DNA, 15 bp, Homo sapiens
gccttaggagttcaa

SEQ ID NO: 124844 - DNA, 15 bp, Homo sapiens
ggccttaggagttca

SEQ ID NO: 124845 - DNA, 15 bp, Homo sapiens
tggccttaggagttc

SEQ ID NO: 124846 - DNA, 15 bp, Homo sapiens
ctggccttaggagtt

SEQ ID NO: 124847 - DNA, 15 bp, Homo sapiens
cctggccttaggagt

SEQ ID NO: 124848 - DNA, 15 bp, Homo sapiens
tcctggccttaggag

SEQ ID NO: 124849 - DNA, 15 bp, Homo sapiens
ctcctggccttagga

SEQ ID NO: 124850 - DNA, 15 bp, Homo sapiens
actcctggccttagg

SEQ ID NO: 124851 - DNA, 15 bp, Homo sapiens
aactcctggccttag

SEQ ID NO: 124852 - DNA, 15 bp, Homo sapiens
gaactcctggcctta

SEQ ID NO: 124853 - DNA, 15 bp, Homo sapiens
tgaactcctggcctt

SEQ ID NO: 124854 - DNA, 15 bp, Homo sapiens
ttgaactcctggcct

SEQ ID NO: 124855 - DNA, 15 bp, Homo sapiens
cttgaactcctggcc

SEQ ID NO: 124856 - DNA, 15 bp, Homo sapiens
tcttgaactcctggc

SEQ ID NO: 124857 - DNA, 15 bp, Homo sapiens
gtcttgaactcctgg

SEQ ID NO: 124858 - DNA, 15 bp, Homo sapiens
tggtcttgaactcct

SEQ ID NO: 124859 - DNA, 15 bp, Homo sapiens
ctggtcttgaactcc

SEQ ID NO: 124860 - DNA, 15 bp, Homo sapiens
gctggtcttgaactc

SEQ ID NO: 124861 - DNA, 15 bp, Homo sapiens
ggctggtcttgaact

SEQ ID NO: 124862 - DNA, 15 bp, Homo sapiens
aggctggtcttgaac

SEQ ID NO: 124863 - DNA, 15 bp, Homo sapiens
caggctggtcttgaa

SEQ ID NO: 124864 - DNA, 15 bp, Homo sapiens
ccaggctggtcttga

SEQ ID NO: 124865 - DNA, 15 bp, Homo sapiens
tccaggctggtcttg

SEQ ID NO: 124866 - DNA, 15 bp, Homo sapiens
atccaggctggtctt

SEQ ID NO: 124867 - DNA, 15 bp, Homo sapiens
tatccaggctggtct

SEQ ID NO: 124868 - DNA, 15 bp, Homo sapiens
ttatccaggctggtc

SEQ ID NO: 124869 - DNA, 15 bp, Homo sapiens
gttatccaggctggt

SEQ ID NO: 124870 - DNA, 15 bp, Homo sapiens
tgttatccaggctgg

SEQ ID NO: 124871 - DNA, 15 bp, Homo sapiens
atgttatccaggctg

SEQ ID NO: 124872 - DNA, 15 bp, Homo sapiens
tatgttatccaggct

SEQ ID NO: 124873 - DNA, 15 bp, Homo sapiens
ctatgttatccaggc

SEQ ID NO: 124874 - DNA, 15 bp, Homo sapiens
gctatgttatccagg

SEQ ID NO: 124875 - DNA, 15 bp, Homo sapiens
tgctatgttatccag

SEQ ID NO: 124876 - DNA, 15 bp, Homo sapiens
ttgctatgttatcca

SEQ ID NO: 124877 - DNA, 15 bp, Homo sapiens
cttgctatgttatcc

SEQ ID NO: 124878 - DNA, 15 bp, Homo sapiens
tcttgctatgttatc

SEQ ID NO: 124879 - DNA, 15 bp, Homo sapiens
gtcttgctatgttat

SEQ ID NO: 124880 - DNA, 15 bp, Homo sapiens
ggtcttgctatgtta

SEQ ID NO: 124881 - DNA, 15 bp, Homo sapiens
gggtcttgctatgtt

SEQ ID NO: 124882 - DNA, 15 bp, Homo sapiens
ggggtcttgctatgt

SEQ ID NO: 124883 - DNA, 15 bp, Homo sapiens
tggggtcttgctatg

SEQ ID NO: 124884 - DNA, 15 bp, Homo sapiens
atggggtcttgctat

SEQ ID NO: 124885 - DNA, 15 bp, Homo sapiens
gatggggtcttgcta

SEQ ID NO: 124886 - DNA, 15 bp, Homo sapiens
agatggggtcttgct

SEQ ID NO: 124887 - DNA, 15 bp, Homo sapiens
gagatggggtcttgc

SEQ ID NO: 124888 - DNA, 15 bp, Homo sapiens
agagatggggtcttg

SEQ ID NO: 124889 - DNA, 15 bp, Homo sapiens
tagagatggggtctt

SEQ ID NO: 124890 - DNA, 15 bp, Homo sapiens
gtagagatggggtct

SEQ ID NO: 124891 - DNA, 15 bp, Homo sapiens
tgtagagatggggtc

SEQ ID NO: 124892 - DNA, 15 bp, Homo sapiens
ttgtagagatggggt

SEQ ID NO: 124893 - DNA, 15 bp, Homo sapiens
tttgtagagatgggg

SEQ ID NO: 124894 - DNA, 15 bp, Homo sapiens
ttttgtagagatggg

SEQ ID NO: 124895 - DNA, 15 bp, Homo sapiens
tttttgtagagatgg

SEQ ID NO: 124896 - DNA, 15 bp, Homo sapiens
ttttttgtagagatg

SEQ ID NO: 124897 - DNA, 15 bp, Homo sapiens
gttttttgtagagat

SEQ ID NO: 124898 - DNA, 15 bp, Homo sapiens
ggttttttgtagaga

SEQ ID NO: 124899 - DNA, 15 bp, Homo sapiens
tggttttttgtagag

SEQ ID NO: 124900 - DNA, 15 bp, Homo sapiens
ttggttttttgtaga

SEQ ID NO: 124901 - DNA, 15 bp, Homo sapiens
tttggttttttgtag

SEQ ID NO: 124902 - DNA, 15 bp, Homo sapiens
ttttggttttttgta

SEQ ID NO: 124903 - DNA, 15 bp, Homo sapiens
gttttggttttttgt

SEQ ID NO: 124904 - DNA, 15 bp, Homo sapiens
ggttttggttttttg

SEQ ID NO: 124905 - DNA, 15 bp, Homo sapiens
tggttttggtttttt

SEQ ID NO: 124906 - DNA, 15 bp, Homo sapiens
ttggttttggttttt

SEQ ID NO: 124907 - DNA, 15 bp, Homo sapiens
tttggttttggtttt

SEQ ID NO: 124908 - DNA, 15 bp, Homo sapiens
gtttggttttggttt

SEQ ID NO: 124909 - DNA, 15 bp, Homo sapiens
tgtttggttttggtt

SEQ ID NO: 124910 - DNA, 15 bp, Homo sapiens
ttgtttggttttggt

SEQ ID NO: 124911 - DNA, 15 bp, Homo sapiens
tttgtttggttttgg

SEQ ID NO: 124912 - DNA, 15 bp, Homo sapiens
gtttgtttggttttg

SEQ ID NO: 124913 - DNA, 15 bp, Homo sapiens
tgtttgtttggtttt

SEQ ID NO: 124914 - DNA, 15 bp, Homo sapiens
ttgtttgtttggttt

SEQ ID NO: 124915 - DNA, 15 bp, Homo sapiens
tttgtttgtttggtt

SEQ ID NO: 124916 - DNA, 15 bp, Homo sapiens
ttttgtttgtttggt

SEQ ID NO: 124917 - DNA, 15 bp, Homo sapiens
tttttgtttgtttgg

SEQ ID NO: 124918 - DNA, 15 bp, Homo sapiens
atttttgtttgtttg

SEQ ID NO: 124919 - DNA, 15 bp, Homo sapiens
catttttgtttgttt

SEQ ID NO: 124920 - DNA, 15 bp, Homo sapiens
tcatttttgtttgtt

SEQ ID NO: 124921 - DNA, 15 bp, Homo sapiens
atcatttttgtttgt

SEQ ID NO: 124922 - DNA, 15 bp, Homo sapiens
tatcatttttgtttg

SEQ ID NO: 124923 - DNA, 15 bp, Homo sapiens
ctatcatttttgttt

SEQ ID NO: 124924 - DNA, 15 bp, Homo sapiens
actatcatttttgtt

SEQ ID NO: 124925 - DNA, 15 bp, Homo sapiens
cactatcatttttgt

SEQ ID NO: 124926 - DNA, 15 bp, Homo sapiens
ccactatcatttttg

SEQ ID NO: 124927 - DNA, 15 bp, Homo sapiens
accactatcattttt

SEQ ID NO: 124928 - DNA, 15 bp, Homo sapiens
caccactatcatttt

SEQ ID NO: 124929 - DNA, 15 bp, Homo sapiens
gcaccactatcattt

SEQ ID NO: 124930 - DNA, 15 bp, Homo sapiens
agcaccactatcatt

SEQ ID NO: 124931 - DNA, 15 bp, Homo sapiens
aagcaccactatcat

SEQ ID NO: 124932 - DNA, 15 bp, Homo sapiens
gaagcaccactatca

SEQ ID NO: 124933 - DNA, 15 bp, Homo sapiens
ggaagcaccactatc

SEQ ID NO: 124934 - DNA, 15 bp, Homo sapiens
gggaagcaccactat

SEQ ID NO: 124935 - DNA, 15 bp, Homo sapiens
agggaagcaccacta

SEQ ID NO: 124936 - DNA, 15 bp, Homo sapiens
gagggaagcaccact

SEQ ID NO: 124937 - DNA, 15 bp, Homo sapiens
tgagggaagcaccac

SEQ ID NO: 124938 - DNA, 15 bp, Homo sapiens
ctgagggaagcacca

SEQ ID NO: 124939 - DNA, 15 bp, Homo sapiens
cctgagggaagcacc

SEQ ID NO: 124940 - DNA, 15 bp, Homo sapiens
tcctgagggaagcac

SEQ ID NO: 124941 - DNA, 15 bp, Homo sapiens
atcctgagggaagca

SEQ ID NO: 124942 - DNA, 15 bp, Homo sapiens
catcctgagggaagc

SEQ ID NO: 124943 - DNA, 15 bp, Homo sapiens
gcatcctgagggaag

SEQ ID NO: 124944 - DNA, 15 bp, Homo sapiens
agcatcctgagggaa

SEQ ID NO: 124945 - DNA, 15 bp, Homo sapiens
aagcatcctgaggga

SEQ ID NO: 124946 - DNA, 15 bp, Homo sapiens
caagcatcctgaggg

SEQ ID NO: 124947 - DNA, 15 bp, Homo sapiens
acaagcatcctgagg

SEQ ID NO: 124948 - DNA, 15 bp, Homo sapiens
cacaagcatcctgag

SEQ ID NO: 124949 - DNA, 15 bp, Homo sapiens
ccacaagcatcctga

SEQ ID NO: 124950 - DNA, 15 bp, Homo sapiens
accacaagcatcctg

SEQ ID NO: 124951 - DNA, 15 bp, Homo sapiens
gaccacaagcatcct

SEQ ID NO: 124952 - DNA, 15 bp, Homo sapiens
agaccacaagcatcc

SEQ ID NO: 124953 - DNA, 15 bp, Homo sapiens
tagaccacaagcatc

SEQ ID NO: 124954 - DNA, 15 bp, Homo sapiens
ttagaccacaagcat

SEQ ID NO: 124955 - DNA, 15 bp, Homo sapiens
attagaccacaagca

SEQ ID NO: 124956 - DNA, 15 bp, Homo sapiens
cattagaccacaagc

SEQ ID NO: 124957 - DNA, 15 bp, Homo sapiens
ccattagaccacaag

SEQ ID NO: 124958 - DNA, 15 bp, Homo sapiens
cccattagaccacaa

SEQ ID NO: 124959 - DNA, 15 bp, Homo sapiens
tcccattagaccaca

SEQ ID NO: 124960 - DNA, 15 bp, Homo sapiens
ctcccattagaccac

SEQ ID NO: 124961 - DNA, 15 bp, Homo sapiens
tctcccattagacca

SEQ ID NO: 124962 - DNA, 15 bp, Homo sapiens
gtctcccattagacc

SEQ ID NO: 124963 - DNA, 15 bp, Homo sapiens
tgtctcccattagac

SEQ ID NO: 124964 - DNA, 15 bp, Homo sapiens
ctgtctcccattaga

SEQ ID NO: 124965 - DNA, 15 bp, Homo sapiens
tctgtctcccattag

SEQ ID NO: 124966 - DNA, 15 bp, Homo sapiens
ttctgtctcccatta

SEQ ID NO: 124967 - DNA, 15 bp, Homo sapiens
gttctgtctcccatt

SEQ ID NO: 124968 - DNA, 15 bp, Homo sapiens
tgttctgtctcccat

SEQ ID NO: 124969 - DNA, 15 bp, Homo sapiens
ctgttctgtctccca

SEQ ID NO: 124970 - DNA, 15 bp, Homo sapiens
gctgttctgtctccc

SEQ ID NO: 124971 - DNA, 15 bp, Homo sapiens
tgctgttctgtctcc

SEQ ID NO: 124972 - DNA, 15 bp, Homo sapiens
ttgctgttctgtctc

SEQ ID NO: 124973 - DNA, 15 bp, Homo sapiens
tttgctgttctgtct

SEQ ID NO: 124974 - DNA, 15 bp, Homo sapiens
ctttgctgttctgtc

SEQ ID NO: 124975 - DNA, 15 bp, Homo sapiens
cctttgctgttctgt

SEQ ID NO: 124976 - DNA, 15 bp, Homo sapiens
ccctttgctgttctg

SEQ ID NO: 124977 - DNA, 15 bp, Homo sapiens
tccctttgctgttct

SEQ ID NO: 124978 - DNA, 15 bp, Homo sapiens
atccctttgctgttc

SEQ ID NO: 124979 - DNA, 15 bp, Homo sapiens
catccctttgctgtt

SEQ ID NO: 124980 - DNA, 15 bp, Homo sapiens
tcatccctttgctgt

SEQ ID NO: 124981 - DNA, 15 bp, Homo sapiens
atcatccctttgctg

SEQ ID NO: 124982 - DNA, 15 bp, Homo sapiens
aatcatccctttgct

SEQ ID NO: 124983 - DNA, 15 bp, Homo sapiens
taatcatccctttgc

SEQ ID NO: 124984 - DNA, 15 bp, Homo sapiens
ctaatcatccctttg

SEQ ID NO: 124985 - DNA, 15 bp, Homo sapiens
tctaatcatcccttt

SEQ ID NO: 124986 - DNA, 15 bp, Homo sapiens
ttctaatcatccctt

SEQ ID NO: 124987 - DNA, 15 bp, Homo sapiens
cttctaatcatccct

SEQ ID NO: 124988 - DNA, 15 bp, Homo sapiens
acttctaatcatccc

SEQ ID NO: 124989 - DNA, 15 bp, Homo sapiens
aacttctaatcatcc

SEQ ID NO: 124990 - DNA, 15 bp, Homo sapiens
caacttctaatcatc

SEQ ID NO: 124991 - DNA, 15 bp, Homo sapiens
ccaacttctaatcat

SEQ ID NO: 124992 - DNA, 15 bp, Homo sapiens
accaacttctaatca

SEQ ID NO: 124993 - DNA, 15 bp, Homo sapiens
aaccaacttctaatc

SEQ ID NO: 124994 - DNA, 15 bp, Homo sapiens
caaccaacttctaat

SEQ ID NO: 124995 - DNA, 15 bp, Homo sapiens
gcaaccaacttctaa

SEQ ID NO: 124996 - DNA, 15 bp, Homo sapiens
agcaaccaacttcta

SEQ ID NO: 124997 - DNA, 15 bp, Homo sapiens
cagcaaccaacttct

SEQ ID NO: 124998 - DNA, 15 bp, Homo sapiens
acagcaaccaacttc

SEQ ID NO: 124999 - DNA, 15 bp, Homo sapiens
cacagcaaccaactt

SEQ ID NO: 125000 - DNA, 15 bp, Homo sapiens
tcacagcaaccaact

SEQ ID NO: 125001 - DNA, 15 bp, Homo sapiens
ctcacagcaaccaac

SEQ ID NO: 125002 - DNA, 15 bp, Homo sapiens
gctcacagcaaccaa

SEQ ID NO: 125003 - DNA, 15 bp, Homo sapiens
ggctcacagcaacca

SEQ ID NO: 125004 - DNA, 15 bp, Homo sapiens
tggctcacagcaacc

SEQ ID NO: 125005 - DNA, 15 bp, Homo sapiens
ctggctcacagcaac

SEQ ID NO: 125006 - DNA, 15 bp, Homo sapiens
cctggctcacagcaa

SEQ ID NO: 125007 - DNA, 15 bp, Homo sapiens
gcctggctcacagca

SEQ ID NO: 125008 - DNA, 15 bp, Homo sapiens
tgcctggctcacagc

SEQ ID NO: 125009 - DNA, 15 bp, Homo sapiens
gtgcctggctcacag

SEQ ID NO: 125010 - DNA, 15 bp, Homo sapiens
tgtgcctggctcaca

SEQ ID NO: 125011 - DNA, 15 bp, Homo sapiens
ctgtgcctggctcac

SEQ ID NO: 125012 - DNA, 15 bp, Homo sapiens
actgtgcctggctca

SEQ ID NO: 125013 - DNA, 15 bp, Homo sapiens
cactgtgcctggctc

SEQ ID NO: 125014 - DNA, 15 bp, Homo sapiens
gcactgtgcctggct

SEQ ID NO: 125015 - DNA, 15 bp, Homo sapiens
agcactgtgcctggc

SEQ ID NO: 125016 - DNA, 15 bp, Homo sapiens
cagcactgtgcctgg

SEQ ID NO: 125017 - DNA, 15 bp, Homo sapiens
tcagcactgtgcctg

SEQ ID NO: 125018 - DNA, 15 bp, Homo sapiens
atcagcactgtgcct

SEQ ID NO: 125019 - DNA, 15 bp, Homo sapiens
tatcagcactgtgcc

SEQ ID NO: 125020 - DNA, 15 bp, Homo sapiens
atatcagcactgtgc

SEQ ID NO: 125021 - DNA, 15 bp, Homo sapiens
tatatcagcactgtg

SEQ ID NO: 125022 - DNA, 15 bp, Homo sapiens
ttatatcagcactgt

SEQ ID NO: 125023 - DNA, 15 bp, Homo sapiens
attatatcagcactg

SEQ ID NO: 125024 - DNA, 15 bp, Homo sapiens
gattatatcagcact

SEQ ID NO: 125025 - DNA, 15 bp, Homo sapiens
ggattatatcagcac

SEQ ID NO: 125026 - DNA, 15 bp, Homo sapiens
gggattatatcagca

SEQ ID NO: 125027 - DNA, 15 bp, Homo sapiens
tgggattatatcagc

SEQ ID NO: 125028 - DNA, 15 bp, Homo sapiens
ctgggattatatcag

SEQ ID NO: 125029 - DNA, 15 bp, Homo sapiens
gctgggattatatca

SEQ ID NO: 125030 - DNA, 15 bp, Homo sapiens
cgctgggattatatc

SEQ ID NO: 125031 - DNA, 15 bp, Homo sapiens
gcgctgggattatat

SEQ ID NO: 125032 - DNA, 15 bp, Homo sapiens
agcgctgggattata

SEQ ID NO: 125033 - DNA, 15 bp, Homo sapiens
tagcgctgggattat

SEQ ID NO: 125034 - DNA, 15 bp, Homo sapiens
atagcgctgggatta

SEQ ID NO: 125035 - DNA, 15 bp, Homo sapiens
catagcgctgggatt

SEQ ID NO: 125036 - DNA, 15 bp, Homo sapiens
ccatagcgctgggat

SEQ ID NO: 125037 - DNA, 15 bp, Homo sapiens
cccatagcgctggga

SEQ ID NO: 125038 - DNA, 15 bp, Homo sapiens
tcccatagcgctggg

SEQ ID NO: 125039 - DNA, 15 bp, Homo sapiens
ctcccatagcgctgg

SEQ ID NO: 125040 - DNA, 15 bp, Homo sapiens
cctcccatagcgctg

SEQ ID NO: 125041 - DNA, 15 bp, Homo sapiens
gcctcccatagcgct

SEQ ID NO: 125042 - DNA, 15 bp, Homo sapiens
agcctcccatagcgc

SEQ ID NO: 125043 - DNA, 15 bp, Homo sapiens
cagcctcccatagcg

SEQ ID NO: 125044 - DNA, 15 bp, Homo sapiens
tcagcctcccatagc

SEQ ID NO: 125045 - DNA, 15 bp, Homo sapiens
ctcagcctcccatag

SEQ ID NO: 125046 - DNA, 15 bp, Homo sapiens
cctcagcctcccata

SEQ ID NO: 125047 - DNA, 15 bp, Homo sapiens
acctcagcctcccat

SEQ ID NO: 125048 - DNA, 15 bp, Homo sapiens
cacctcagcctccca

SEQ ID NO: 125049 - DNA, 15 bp, Homo sapiens
ccacctcagcctccc

SEQ ID NO: 125050 - DNA, 15 bp, Homo sapiens
cccacctcagcctcc

SEQ ID NO: 125051 - DNA, 15 bp, Homo sapiens
acccacctcagcctc

SEQ ID NO: 125052 - DNA, 15 bp, Homo sapiens
cacccacctcagcct

SEQ ID NO: 125053 - DNA, 15 bp, Homo sapiens
ccacccacctcagcc

SEQ ID NO: 125054 - DNA, 15 bp, Homo sapiens
tccacccacctcagc

SEQ ID NO: 125055 - DNA, 15 bp, Homo sapiens
atccacccacctcag

SEQ ID NO: 125056 - DNA, 15 bp, Homo sapiens
gatccacccacctca

SEQ ID NO: 125057 - DNA, 15 bp, Homo sapiens
tgatccacccacctc

SEQ ID NO: 125058 - DNA, 15 bp, Homo sapiens
atgatccacccacct

SEQ ID NO: 125059 - DNA, 15 bp, Homo sapiens
aatgatccacccacc

SEQ ID NO: 125060 - DNA, 15 bp, Homo sapiens
aaatgatccacccac

SEQ ID NO: 125061 - DNA, 15 bp, Homo sapiens
caaatgatccaccca

SEQ ID NO: 125062 - DNA, 15 bp, Homo sapiens
tcaaatgatccaccc

SEQ ID NO: 125063 - DNA, 15 bp, Homo sapiens
ctcaaatgatccacc

SEQ ID NO: 125064 - DNA, 15 bp, Homo sapiens
cctcaaatgatccac

SEQ ID NO: 125065 - DNA, 15 bp, Homo sapiens
gcctcaaatgatcca

SEQ ID NO: 125066 - DNA, 15 bp, Homo sapiens
ggcctcaaatgatcc

SEQ ID NO: 125067 - DNA, 15 bp, Homo sapiens
tggcctcaaatgatc

SEQ ID NO: 125068 - DNA, 15 bp, Homo sapiens
ctggcctcaaatgat

SEQ ID NO: 125069 - DNA, 15 bp, Homo sapiens
cctggcctcaaatga

SEQ ID NO: 125070 - DNA, 15 bp, Homo sapiens
tcctggcctcaaatg

SEQ ID NO: 125071 - DNA, 15 bp, Homo sapiens
ctcctggcctcaaat

SEQ ID NO: 125072 - DNA, 15 bp, Homo sapiens
actcctggcctcaaa

SEQ ID NO: 125073 - DNA, 15 bp, Homo sapiens
aactcctggcctcaa

SEQ ID NO: 125074 - DNA, 15 bp, Homo sapiens
aaactcctggcctca

SEQ ID NO: 125075 - DNA, 15 bp, Homo sapiens
taaactcctggcctc

SEQ ID NO: 125076 - DNA, 15 bp, Homo sapiens
ttaaactcctggcct

SEQ ID NO: 125077 - DNA, 15 bp, Homo sapiens
cttaaactcctggcc

SEQ ID NO: 125078 - DNA, 15 bp, Homo sapiens
tcttaaactcctggc

SEQ ID NO: 125079 - DNA, 15 bp, Homo sapiens
gtcttaaactcctgg

SEQ ID NO: 125080 - DNA, 15 bp, Homo sapiens
ggtcttaaactcctg

SEQ ID NO: 125081 - DNA, 15 bp, Homo sapiens
tggtcttaaactcct

SEQ ID NO: 125082 - DNA, 15 bp, Homo sapiens
ctggtcttaaactcc

SEQ ID NO: 125083 - DNA, 15 bp, Homo sapiens
gctggtcttaaactc

SEQ ID NO: 125084 - DNA, 15 bp, Homo sapiens
ggctggtcttaaact

SEQ ID NO: 125085 - DNA, 15 bp, Homo sapiens
aggctggtcttaaac

SEQ ID NO: 125086 - DNA, 15 bp, Homo sapiens
caggctggtcttaaa

SEQ ID NO: 125087 - DNA, 15 bp, Homo sapiens
ccaggctggtcttaa

SEQ ID NO: 125088 - DNA, 15 bp, Homo sapiens
accaggctggtctta

SEQ ID NO: 125089 - DNA, 15 bp, Homo sapiens
gaccaggctggtctt

SEQ ID NO: 125090 - DNA, 15 bp, Homo sapiens
tgaccaggctggtct

SEQ ID NO: 125091 - DNA, 15 bp, Homo sapiens
ttgaccaggctggtc

SEQ ID NO: 125092 - DNA, 15 bp, Homo sapiens
gttgaccaggctggt

SEQ ID NO: 125093 - DNA, 15 bp, Homo sapiens
tgttgaccaggctgg

SEQ ID NO: 125094 - DNA, 15 bp, Homo sapiens
atgttgaccaggctg

SEQ ID NO: 125095 - DNA, 15 bp, Homo sapiens
catgttgaccaggct

SEQ ID NO: 125096 - DNA, 15 bp, Homo sapiens
ccatgttgaccaggc

SEQ ID NO: 125097 - DNA, 15 bp, Homo sapiens
accatgttgaccagg

SEQ ID NO: 125098 - DNA, 15 bp, Homo sapiens
taccatgttgaccag

SEQ ID NO: 125099 - DNA, 15 bp, Homo sapiens
ttaccatgttgacca

SEQ ID NO: 125100 - DNA, 15 bp, Homo sapiens
tttaccatgttgacc

SEQ ID NO: 125101 - DNA, 15 bp, Homo sapiens
ttttaccatgttgac

SEQ ID NO: 125102 - DNA, 15 bp, Homo sapiens
gttttaccatgttga

SEQ ID NO: 125103 - DNA, 15 bp, Homo sapiens
ggttttaccatgttg

SEQ ID NO: 125104 - DNA, 15 bp, Homo sapiens
gggttttaccatgtt

SEQ ID NO: 125105 - DNA, 15 bp, Homo sapiens
ggggttttaccatgt

SEQ ID NO: 125106 - DNA, 15 bp, Homo sapiens
tggggttttaccatg

SEQ ID NO: 125107 - DNA, 15 bp, Homo sapiens
atggggttttaccat

SEQ ID NO: 125108 - DNA, 15 bp, Homo sapiens
gatggggttttacca

SEQ ID NO: 125109 - DNA, 15 bp, Homo sapiens
agatggggttttacc

SEQ ID NO: 125110 - DNA, 15 bp, Homo sapiens
gagatggggttttac

SEQ ID NO: 125111 - DNA, 15 bp, Homo sapiens
agagatggggtttta

SEQ ID NO: 125112 - DNA, 15 bp, Homo sapiens
tagagatggggtttt

SEQ ID NO: 125113 - DNA, 15 bp, Homo sapiens
gtagagatggggttt

SEQ ID NO: 125114 - DNA, 15 bp, Homo sapiens
agtagagatggggtt

SEQ ID NO: 125115 - DNA, 15 bp, Homo sapiens
aagtagagatggggt

SEQ ID NO: 125116 - DNA, 15 bp, Homo sapiens
taagtagagatgggg

SEQ ID NO: 125117 - DNA, 15 bp, Homo sapiens
ttaagtagagatggg

SEQ ID NO: 125118 - DNA, 15 bp, Homo sapiens
tttaagtagagatgg

SEQ ID NO: 125119 - DNA, 15 bp, Homo sapiens
ttttaagtagagatg

SEQ ID NO: 125120 - DNA, 15 bp, Homo sapiens
tttttaagtagagat

SEQ ID NO: 125121 - DNA, 15 bp, Homo sapiens
atttttaagtagaga

SEQ ID NO: 125122 - DNA, 15 bp, Homo sapiens
tatttttaagtagag

SEQ ID NO: 125123 - DNA, 15 bp, Homo sapiens
gtatttttaagtaga

SEQ ID NO: 125124 - DNA, 15 bp, Homo sapiens
tgtatttttaagtag

SEQ ID NO: 125125 - DNA, 15 bp, Homo sapiens
ttgtatttttaagta

SEQ ID NO: 125126 - DNA, 15 bp, Homo sapiens
tttgtatttttaagt

SEQ ID NO: 125127 - DNA, 15 bp, Homo sapiens
ttttgtatttttaag

SEQ ID NO: 125128 - DNA, 15 bp, Homo sapiens
tttttgtatttttaa

SEQ ID NO: 125129 - DNA, 15 bp, Homo sapiens
ttttttgtattttta

SEQ ID NO: 125130 - DNA, 15 bp, Homo sapiens
cttttttgtattttt

SEQ ID NO: 125131 - DNA, 15 bp, Homo sapiens
acttttttgtatttt

SEQ ID NO: 125132 - DNA, 15 bp, Homo sapiens
aacttttttgtattt

SEQ ID NO: 125133 - DNA, 15 bp, Homo sapiens
taacttttttgtatt

SEQ ID NO: 125134 - DNA, 15 bp, Homo sapiens
ctaacttttttgtat

SEQ ID NO: 125135 - DNA, 15 bp, Homo sapiens
gctaacttttttgta

SEQ ID NO: 125136 - DNA, 15 bp, Homo sapiens
ggctaacttttttgt

SEQ ID NO: 125137 - DNA, 15 bp, Homo sapiens
tggctaacttttttg

SEQ ID NO: 125138 - DNA, 15 bp, Homo sapiens
ctggctaactttttt

SEQ ID NO: 125139 - DNA, 15 bp, Homo sapiens
cctggctaacttttt

SEQ ID NO: 125140 - DNA, 15 bp, Homo sapiens
gcctggctaactttt

SEQ ID NO: 125141 - DNA, 15 bp, Homo sapiens
tgcctggctaacttt

SEQ ID NO: 125142 - DNA, 15 bp, Homo sapiens
atgcctggctaactt

SEQ ID NO: 125143 - DNA, 15 bp, Homo sapiens
catgcctggctaact

SEQ ID NO: 125144 - DNA, 15 bp, Homo sapiens
ccatgcctggctaac

SEQ ID NO: 125145 - DNA, 15 bp, Homo sapiens
accatgcctggctaa

SEQ ID NO: 125146 - DNA, 15 bp, Homo sapiens
caccatgcctggcta

SEQ ID NO: 125147 - DNA, 15 bp, Homo sapiens
ccaccatgcctggct

SEQ ID NO: 125148 - DNA, 15 bp, Homo sapiens
gccaccatgcctggc

SEQ ID NO: 125149 - DNA, 15 bp, Homo sapiens
tgccaccatgcctgg

SEQ ID NO: 125150 - DNA, 15 bp, Homo sapiens
atgccaccatgcctg

SEQ ID NO: 125151 - DNA, 15 bp, Homo sapiens
tatgccaccatgcct

SEQ ID NO: 125152 - DNA, 15 bp, Homo sapiens
gtatgccaccatgcc

SEQ ID NO: 125153 - DNA, 15 bp, Homo sapiens
tgtatgccaccatgc

SEQ ID NO: 125154 - DNA, 15 bp, Homo sapiens
gtgtatgccaccatg

SEQ ID NO: 125155 - DNA, 15 bp, Homo sapiens
ggtgtatgccaccat

SEQ ID NO: 125156 - DNA, 15 bp, Homo sapiens
aggtgtatgccacca

SEQ ID NO: 125157 - DNA, 15 bp, Homo sapiens
caggtgtatgccacc

SEQ ID NO: 125158 - DNA, 15 bp, Homo sapiens
acaggtgtatgccac

SEQ ID NO: 125159 - DNA, 15 bp, Homo sapiens
tacaggtgtatgcca

SEQ ID NO: 125160 - DNA, 15 bp, Homo sapiens
ttacaggtgtatgcc

SEQ ID NO: 125161 - DNA, 15 bp, Homo sapiens
gttacaggtgtatgc

SEQ ID NO: 125162 - DNA, 15 bp, Homo sapiens
ggttacaggtgtatg

SEQ ID NO: 125163 - DNA, 15 bp, Homo sapiens
gggttacaggtgtat

SEQ ID NO: 125164 - DNA, 15 bp, Homo sapiens
tgggttacaggtgta

SEQ ID NO: 125165 - DNA, 15 bp, Homo sapiens
ctgggttacaggtgt

SEQ ID NO: 125166 - DNA, 15 bp, Homo sapiens
gctgggttacaggtg

SEQ ID NO: 125167 - DNA, 15 bp, Homo sapiens
agctgggttacaggt

SEQ ID NO: 125168 - DNA, 15 bp, Homo sapiens
tagctgggttacagg

SEQ ID NO: 125169 - DNA, 15 bp, Homo sapiens
gtagctgggttacag

SEQ ID NO: 125170 - DNA, 15 bp, Homo sapiens
agtagctgggttaca

SEQ ID NO: 125171 - DNA, 15 bp, Homo sapiens
gagtagctgggttac

SEQ ID NO: 125172 - DNA, 15 bp, Homo sapiens
tgagtagctgggtta

SEQ ID NO: 125173 - DNA, 15 bp, Homo sapiens
ctgagtagctgggtt

SEQ ID NO: 125174 - DNA, 15 bp, Homo sapiens
cctgagtagctgggt

SEQ ID NO: 125175 - DNA, 15 bp, Homo sapiens
gtgcctcagcctcct

SEQ ID NO: 125176 - DNA, 15 bp, Homo sapiens
tgtgcctcagcctcc

SEQ ID NO: 125177 - DNA, 15 bp, Homo sapiens
atgtgcctcagcctc

SEQ ID NO: 125178 - DNA, 15 bp, Homo sapiens
catgtgcctcagcct

SEQ ID NO: 125179 - DNA, 15 bp, Homo sapiens
tcatgtgcctcagcc

SEQ ID NO: 125180 - DNA, 15 bp, Homo sapiens
ttcatgtgcctcagc

SEQ ID NO: 125181 - DNA, 15 bp, Homo sapiens
attcatgtgcctcag

SEQ ID NO: 125182 - DNA, 15 bp, Homo sapiens
gattcatgtgcctca

SEQ ID NO: 125183 - DNA, 15 bp, Homo sapiens
tgattcatgtgcctc

SEQ ID NO: 125184 - DNA, 15 bp, Homo sapiens
gtgattcatgtgcct

SEQ ID NO: 125185 - DNA, 15 bp, Homo sapiens
agtgattcatgtgcc

SEQ ID NO: 125186 - DNA, 15 bp, Homo sapiens
aagtgattcatgtgc

SEQ ID NO: 125187 - DNA, 15 bp, Homo sapiens
caagtgattcatgtg

SEQ ID NO: 125188 - DNA, 15 bp, Homo sapiens
tcaagtgattcatgt

SEQ ID NO: 125189 - DNA, 15 bp, Homo sapiens
ttcaagtgattcatg

SEQ ID NO: 125190 - DNA, 15 bp, Homo sapiens
gttcaagtgattcat

SEQ ID NO: 125191 - DNA, 15 bp, Homo sapiens
ggttcaagtgattca

SEQ ID NO: 125192 - DNA, 15 bp, Homo sapiens
gggttcaagtgattc

SEQ ID NO: 125193 - DNA, 15 bp, Homo sapiens
tgggttcaagtgatt

SEQ ID NO: 125194 - DNA, 15 bp, Homo sapiens
ctgggttcaagtgat

SEQ ID NO: 125195 - DNA, 15 bp, Homo sapiens
cctgggttcaagtga

SEQ ID NO: 125196 - DNA, 15 bp, Homo sapiens
tcctgggttcaagtg

SEQ ID NO: 125197 - DNA, 15 bp, Homo sapiens
ctcctgggttcaagt

SEQ ID NO: 125198 - DNA, 15 bp, Homo sapiens
cctcctgggttcaag

SEQ ID NO: 125199 - DNA, 15 bp, Homo sapiens
gcctcctgggttcaa

SEQ ID NO: 125200 - DNA, 15 bp, Homo sapiens
tgcctcctgggttca

SEQ ID NO: 125201 - DNA, 15 bp, Homo sapiens
ctgcctcctgggttc

SEQ ID NO: 125202 - DNA, 15 bp, Homo sapiens
tctgcctcctgggtt

SEQ ID NO: 125203 - DNA, 15 bp, Homo sapiens
ctctgcctcctgggt

SEQ ID NO: 125204 - DNA, 15 bp, Homo sapiens
cctctgcctcctggg

SEQ ID NO: 125205 - DNA, 15 bp, Homo sapiens
acctctgcctcctgg

SEQ ID NO: 125206 - DNA, 15 bp, Homo sapiens
aacctctgcctcctg

SEQ ID NO: 125207 - DNA, 15 bp, Homo sapiens
caacctctgcctcct

SEQ ID NO: 125208 - DNA, 15 bp, Homo sapiens
gcaacctctgcctcc

SEQ ID NO: 125209 - DNA, 15 bp, Homo sapiens
agcaacctctgcctc

SEQ ID NO: 125210 - DNA, 15 bp, Homo sapiens
cagcaacctctgcct

SEQ ID NO: 125211 - DNA, 15 bp, Homo sapiens
acagcaacctctgcc

SEQ ID NO: 125212 - DNA, 15 bp, Homo sapiens
cacagcaacctctgc

SEQ ID NO: 125213 - DNA, 15 bp, Homo sapiens
gcacagcaacctctg

SEQ ID NO: 125214 - DNA, 15 bp, Homo sapiens
tgcacagcaacctct

SEQ ID NO: 125215 - DNA, 15 bp, Homo sapiens
gtgcacagcaacctc

SEQ ID NO: 125216 - DNA, 15 bp, Homo sapiens
ggtgcacagcaacct

SEQ ID NO: 125217 - DNA, 15 bp, Homo sapiens
tggtgcacagcaacc

SEQ ID NO: 125218 - DNA, 15 bp, Homo sapiens
gtggtgcacagcaac

SEQ ID NO: 125219 - DNA, 15 bp, Homo sapiens
agtggtgcacagcaa

SEQ ID NO: 125220 - DNA, 15 bp, Homo sapiens
cagtggtgcacagca

SEQ ID NO: 125221 - DNA, 15 bp, Homo sapiens
gcagtggtgcacagc

SEQ ID NO: 125222 - DNA, 15 bp, Homo sapiens
tgcagtggtgcacag

SEQ ID NO: 125223 - DNA, 15 bp, Homo sapiens
gtgcagtggtgcaca

SEQ ID NO: 125224 - DNA, 15 bp, Homo sapiens
agtgcagtggtgcac

SEQ ID NO: 125225 - DNA, 15 bp, Homo sapiens
gagtgcagtggtgca

SEQ ID NO: 125226 - DNA, 15 bp, Homo sapiens
ggagtgcagtggtgc

SEQ ID NO: 125227 - DNA, 15 bp, Homo sapiens
tggagtgcagtggtg

SEQ ID NO: 125228 - DNA, 15 bp, Homo sapiens
ctggagtgcagtggt

SEQ ID NO: 125229 - DNA, 15 bp, Homo sapiens
gctggagtgcagtgg

SEQ ID NO: 125230 - DNA, 15 bp, Homo sapiens
ggctggagtgcagtg

SEQ ID NO: 125231 - DNA, 15 bp, Homo sapiens
aggctggagtgcagt

SEQ ID NO: 125232 - DNA, 15 bp, Homo sapiens
caggctggagtgcag

SEQ ID NO: 125233 - DNA, 15 bp, Homo sapiens
ccaggctggagtgca

SEQ ID NO: 125234 - DNA, 15 bp, Homo sapiens
cccaggctggagtgc

SEQ ID NO: 125235 - DNA, 15 bp, Homo sapiens
acccaggctggagtg

SEQ ID NO: 125236 - DNA, 15 bp, Homo sapiens
cacccaggctggagt

SEQ ID NO: 125237 - DNA, 15 bp, Homo sapiens
tcacccaggctggag

SEQ ID NO: 125238 - DNA, 15 bp, Homo sapiens
gtcacccaggctgga

SEQ ID NO: 125239 - DNA, 15 bp, Homo sapiens
tgtcacccaggctgg

SEQ ID NO: 125240 - DNA, 15 bp, Homo sapiens
ctgtcacccaggctg

SEQ ID NO: 125241 - DNA, 15 bp, Homo sapiens
tctgtcacccaggct

SEQ ID NO: 125242 - DNA, 15 bp, Homo sapiens
ttctgtcacccaggc

SEQ ID NO: 125243 - DNA, 15 bp, Homo sapiens
gttctgtcacccagg

SEQ ID NO: 125244 - DNA, 15 bp, Homo sapiens
cgttctgtcacccag

SEQ ID NO: 125245 - DNA, 15 bp, Homo sapiens
tcgttctgtcaccca

SEQ ID NO: 125246 - DNA, 15 bp, Homo sapiens
ctcgttctgtcaccc

SEQ ID NO: 125247 - DNA, 15 bp, Homo sapiens
tctcgttctgtcacc

SEQ ID NO: 125248 - DNA, 15 bp, Homo sapiens
gtctcgttctgtcac

SEQ ID NO: 125249 - DNA, 15 bp, Homo sapiens
ggtctcgttctgtca

SEQ ID NO: 125250 - DNA, 15 bp, Homo sapiens
aggtctcgttctgtc

SEQ ID NO: 125251 - DNA, 15 bp, Homo sapiens
aaggtctcgttctgt

SEQ ID NO: 125252 - DNA, 15 bp, Homo sapiens
caaggtctcgttctg

SEQ ID NO: 125253 - DNA, 15 bp, Homo sapiens
tcaaggtctcgttct

SEQ ID NO: 125254 - DNA, 15 bp, Homo sapiens
gtcaaggtctcgttc

SEQ ID NO: 125255 - DNA, 15 bp, Homo sapiens
agtcaaggtctcgtt

SEQ ID NO: 125256 - DNA, 15 bp, Homo sapiens
gagtcaaggtctcgt

SEQ ID NO: 125257 - DNA, 15 bp, Homo sapiens
tgagtcaaggtctcg

SEQ ID NO: 125258 - DNA, 15 bp, Homo sapiens
ttgagtcaaggtctc

SEQ ID NO: 125259 - DNA, 15 bp, Homo sapiens
tttgagtcaaggtct

SEQ ID NO: 125260 - DNA, 15 bp, Homo sapiens
ttttgagtcaaggtc

SEQ ID NO: 125261 - DNA, 15 bp, Homo sapiens
tttttgagtcaaggt

SEQ ID NO: 125262 - DNA, 15 bp, Homo sapiens
ttttttgagtcaagg

SEQ ID NO: 125263 - DNA, 15 bp, Homo sapiens
tttttttgagtcaag

SEQ ID NO: 125264 - DNA, 15 bp, Homo sapiens
ttttttttgagtcaa

SEQ ID NO: 125265 - DNA, 15 bp, Homo sapiens
tttttttttgagtca

SEQ ID NO: 125266 - DNA, 15 bp, Homo sapiens
ttttttttttgagtc

SEQ ID NO: 125267 - DNA, 15 bp, Homo sapiens
tttttttttttgagt

SEQ ID NO: 125268 - DNA, 15 bp, Homo sapiens
ttttttttttttgag

SEQ ID NO: 125269 - DNA, 15 bp, Homo sapiens
tttttttttttttga

SEQ ID NO: 125270 - DNA, 15 bp, Homo sapiens
ttttttttttttttg

SEQ ID NO: 125271 - DNA, 15 bp, Homo sapiens
ctttttttttttttt

SEQ ID NO: 125272 - DNA, 15 bp, Homo sapiens
tcttttttttttttt

SEQ ID NO: 125273 - DNA, 15 bp, Homo sapiens
ttctttttttttttt

SEQ ID NO: 125274 - DNA, 15 bp, Homo sapiens
cttcttttttttttt

SEQ ID NO: 125275 - DNA, 15 bp, Homo sapiens
acttctttttttttt

SEQ ID NO: 125276 - DNA, 15 bp, Homo sapiens
aacttcttttttttt

SEQ ID NO: 125277 - DNA, 15 bp, Homo sapiens
aaacttctttttttt

SEQ ID NO: 125278 - DNA, 15 bp, Homo sapiens
caaacttcttttttt

SEQ ID NO: 125279 - DNA, 15 bp, Homo sapiens
acaaacttctttttt

SEQ ID NO: 125280 - DNA, 15 bp, Homo sapiens
aacaaacttcttttt

SEQ ID NO: 125281 - DNA, 15 bp, Homo sapiens
caacaaacttctttt

SEQ ID NO: 125282 - DNA, 15 bp, Homo sapiens
gcaacaaacttcttt

SEQ ID NO: 125283 - DNA, 15 bp, Homo sapiens
agcaacaaacttctt

SEQ ID NO: 125284 - DNA, 15 bp, Homo sapiens
tagcaacaaacttct

SEQ ID NO: 125285 - DNA, 15 bp, Homo sapiens
atagcaacaaacttc

SEQ ID NO: 125286 - DNA, 15 bp, Homo sapiens
catagcaacaaactt

SEQ ID NO: 125287 - DNA, 15 bp, Homo sapiens
ccatagcaacaaact

SEQ ID NO: 125288 - DNA, 15 bp, Homo sapiens
tccatagcaacaaac

SEQ ID NO: 125289 - DNA, 15 bp, Homo sapiens
ttccatagcaacaaa

SEQ ID NO: 125290 - DNA, 15 bp, Homo sapiens
cttccatagcaacaa

SEQ ID NO: 125291 - DNA, 15 bp, Homo sapiens
ccttccatagcaaca

SEQ ID NO: 125292 - DNA, 15 bp, Homo sapiens
cccttccatagcaac

SEQ ID NO: 125293 - DNA, 15 bp, Homo sapiens
acccttccatagcaa

SEQ ID NO: 125294 - DNA, 15 bp, Homo sapiens
gacccttccatagca

SEQ ID NO: 125295 - DNA, 15 bp, Homo sapiens
ggacccttccatagc

SEQ ID NO: 125296 - DNA, 15 bp, Homo sapiens
aggacccttccatag

SEQ ID NO: 125297 - DNA, 15 bp, Homo sapiens
taggacccttccata

SEQ ID NO: 125298 - DNA, 15 bp, Homo sapiens
gtaggacccttccat

SEQ ID NO: 125299 - DNA, 15 bp, Homo sapiens
agtaggacccttcca

SEQ ID NO: 125300 - DNA, 15 bp, Homo sapiens
gagtaggacccttcc

SEQ ID NO: 125301 - DNA, 15 bp, Homo sapiens
tgagtaggacccttc

SEQ ID NO: 125302 - DNA, 15 bp, Homo sapiens
ctgagtaggaccctt

SEQ ID NO: 125303 - DNA, 15 bp, Homo sapiens
tctgagtaggaccct

SEQ ID NO: 125304 - DNA, 15 bp, Homo sapiens
ctctgagtaggaccc

SEQ ID NO: 125305 - DNA, 15 bp, Homo sapiens
gctctgagtaggacc

SEQ ID NO: 125306 - DNA, 15 bp, Homo sapiens
tgctctgagtaggac

SEQ ID NO: 125307 - DNA, 15 bp, Homo sapiens
ctgctctgagtagga

SEQ ID NO: 125308 - DNA, 15 bp, Homo sapiens
cctgctctgagtagg

SEQ ID NO: 125309 - DNA, 15 bp, Homo sapiens
gcctgctctgagtag

SEQ ID NO: 125310 - DNA, 15 bp, Homo sapiens
tgcctgctctgagta

SEQ ID NO: 125311 - DNA, 15 bp, Homo sapiens
gtgcctgctctgagt

SEQ ID NO: 125312 - DNA, 15 bp, Homo sapiens
ggtgcctgctctgag

SEQ ID NO: 125313 - DNA, 15 bp, Homo sapiens
gggtgcctgctctga

SEQ ID NO: 125314 - DNA, 15 bp, Homo sapiens
ggggtgcctgctctg

SEQ ID NO: 125315 - DNA, 15 bp, Homo sapiens
tggggtgcctgctct

SEQ ID NO: 125316 - DNA, 15 bp, Homo sapiens
ctggggtgcctgctc

SEQ ID NO: 125317 - DNA, 15 bp, Homo sapiens
actggggtgcctgct

SEQ ID NO: 125318 - DNA, 15 bp, Homo sapiens
aactggggtgcctgc

SEQ ID NO: 125319 - DNA, 15 bp, Homo sapiens
taactggggtgcctg

SEQ ID NO: 125320 - DNA, 15 bp, Homo sapiens
ttaactggggtgcct

SEQ ID NO: 125321 - DNA, 15 bp, Homo sapiens
attaactggggtgcc

SEQ ID NO: 125322 - DNA, 15 bp, Homo sapiens
gattaactggggtgc

SEQ ID NO: 125323 - DNA, 15 bp, Homo sapiens
agattaactggggtg

SEQ ID NO: 125324 - DNA, 15 bp, Homo sapiens
gagattaactggggt

SEQ ID NO: 125325 - DNA, 15 bp, Homo sapiens
tgagattaactgggg

SEQ ID NO: 125326 - DNA, 15 bp, Homo sapiens
atgagattaactggg

SEQ ID NO: 125327 - DNA, 15 bp, Homo sapiens
aatgagattaactgg

SEQ ID NO: 125328 - DNA, 15 bp, Homo sapiens
gaatgagattaactg

SEQ ID NO: 125329 - DNA, 15 bp, Homo sapiens
tgaatgagattaact

SEQ ID NO: 125330 - DNA, 15 bp, Homo sapiens
gtgaatgagattaac

SEQ ID NO: 125331 - DNA, 15 bp, Homo sapiens
ggtgaatgagattaa

SEQ ID NO: 125332 - DNA, 15 bp, Homo sapiens
gggtgaatgagatta

SEQ ID NO: 125333 - DNA, 15 bp, Homo sapiens
ggggtgaatgagatt

SEQ ID NO: 125334 - DNA, 15 bp, Homo sapiens
tggggtgaatgagat

SEQ ID NO: 125335 - DNA, 15 bp, Homo sapiens
gtggggtgaatgaga

SEQ ID NO: 125336 - DNA, 15 bp, Homo sapiens
tgtggggtgaatgag

SEQ ID NO: 125337 - DNA, 15 bp, Homo sapiens
atgtggggtgaatga

SEQ ID NO: 125338 - DNA, 15 bp, Homo sapiens
aatgtggggtgaatg

SEQ ID NO: 125339 - DNA, 15 bp, Homo sapiens
aaatgtggggtgaat

SEQ ID NO: 125340 - DNA, 15 bp, Homo sapiens
gaaatgtggggtgaa

SEQ ID NO: 125341 - DNA, 15 bp, Homo sapiens
tgaaatgtggggtga

SEQ ID NO: 125342 - DNA, 15 bp, Homo sapiens
gtgaaatgtggggtg

SEQ ID NO: 125343 - DNA, 15 bp, Homo sapiens
tgtgaaatgtggggt

SEQ ID NO: 125344 - DNA, 15 bp, Homo sapiens
atgtgaaatgtgggg

SEQ ID NO: 125345 - DNA, 15 bp, Homo sapiens
aatgtgaaatgtggg

SEQ ID NO: 125346 - DNA, 15 bp, Homo sapiens
aaatgtgaaatgtgg

SEQ ID NO: 125347 - DNA, 15 bp, Homo sapiens
caaatgtgaaatgtg

SEQ ID NO: 125348 - DNA, 15 bp, Homo sapiens
tcaaatgtgaaatgt

SEQ ID NO: 125349 - DNA, 15 bp, Homo sapiens
ttcaaatgtgaaatg

SEQ ID NO: 125350 - DNA, 15 bp, Homo sapiens
gttcaaatgtgaaat

SEQ ID NO: 125351 - DNA, 15 bp, Homo sapiens
tgttcaaatgtgaaa

SEQ ID NO: 125352 - DNA, 15 bp, Homo sapiens
atgttcaaatgtgaa

SEQ ID NO: 125353 - DNA, 15 bp, Homo sapiens
gatgttcaaatgtga

SEQ ID NO: 125354 - DNA, 15 bp, Homo sapiens
tgatgttcaaatgtg

SEQ ID NO: 125355 - DNA, 15 bp, Homo sapiens
atgatgttcaaatgt

SEQ ID NO: 125356 - DNA, 15 bp, Homo sapiens
gatgatgttcaaatg

SEQ ID NO: 125357 - DNA, 15 bp, Homo sapiens
ggatgatgttcaaat

SEQ ID NO: 125358 - DNA, 15 bp, Homo sapiens
gggatgatgttcaaa

SEQ ID NO: 125359 - DNA, 15 bp, Homo sapiens
tgggatgatgttcaa

SEQ ID NO: 125360 - DNA, 15 bp, Homo sapiens
atgggatgatgttca

SEQ ID NO: 125361 - DNA, 15 bp, Homo sapiens
tatgggatgatgttc

SEQ ID NO: 125362 - DNA, 15 bp, Homo sapiens
ctatgggatgatgtt

SEQ ID NO: 125363 - DNA, 15 bp, Homo sapiens
gctatgggatgatgt

SEQ ID NO: 125364 - DNA, 15 bp, Homo sapiens
ggctatgggatgatg

SEQ ID NO: 125365 - DNA, 15 bp, Homo sapiens
gggctatgggatgat

SEQ ID NO: 125366 - DNA, 15 bp, Homo sapiens
tgggctatgggatga

SEQ ID NO: 125367 - DNA, 15 bp, Homo sapiens
ctgggctatgggatg

SEQ ID NO: 125368 - DNA, 15 bp, Homo sapiens
tctgggctatgggat

SEQ ID NO: 125369 - DNA, 15 bp, Homo sapiens
ctctgggctatggga

SEQ ID NO: 125370 - DNA, 15 bp, Homo sapiens
gctctgggctatggg

SEQ ID NO: 125371 - DNA, 15 bp, Homo sapiens
tgctctgggctatgg

SEQ ID NO: 125372 - DNA, 15 bp, Homo sapiens
atgctctgggctatg

SEQ ID NO: 125373 - DNA, 15 bp, Homo sapiens
gatgctctgggctat

SEQ ID NO: 125374 - DNA, 15 bp, Homo sapiens
ggatgctctgggcta

SEQ ID NO: 125375 - DNA, 15 bp, Homo sapiens
gggatgctctgggct

SEQ ID NO: 125376 - DNA, 15 bp, Homo sapiens
agggatgctctgggc

SEQ ID NO: 125377 - DNA, 15 bp, Homo sapiens
gagggatgctctggg

SEQ ID NO: 125378 - DNA, 15 bp, Homo sapiens
ggagggatgctctgg

SEQ ID NO: 125379 - DNA, 15 bp, Homo sapiens
tggagggatgctctg

SEQ ID NO: 125380 - DNA, 15 bp, Homo sapiens
gtggagggatgctct

SEQ ID NO: 125381 - DNA, 15 bp, Homo sapiens
agtggagggatgctc

SEQ ID NO: 125382 - DNA, 15 bp, Homo sapiens
cagtggagggatgct

SEQ ID NO: 125383 - DNA, 15 bp, Homo sapiens
gcagtggagggatgc

SEQ ID NO: 125384 - DNA, 15 bp, Homo sapiens
tgcagtggagggatg

SEQ ID NO: 125385 - DNA, 15 bp, Homo sapiens
ttgcagtggagggat

SEQ ID NO: 125386 - DNA, 15 bp, Homo sapiens
tttgcagtggaggga

SEQ ID NO: 125387 - DNA, 15 bp, Homo sapiens
ctttgcagtggaggg

SEQ ID NO: 125388 - DNA, 15 bp, Homo sapiens
cctttgcagtggagg

SEQ ID NO: 125389 - DNA, 15 bp, Homo sapiens
tcctttgcagtggag

SEQ ID NO: 125390 - DNA, 15 bp, Homo sapiens
atcctttgcagtgga

SEQ ID NO: 125391 - DNA, 15 bp, Homo sapiens
aatcctttgcagtgg

SEQ ID NO: 125392 - DNA, 15 bp, Homo sapiens
aaatcctttgcagtg

SEQ ID NO: 125393 - DNA, 15 bp, Homo sapiens
taaatcctttgcagt

SEQ ID NO: 125394 - DNA, 15 bp, Homo sapiens
ataaatcctttgcag

SEQ ID NO: 125395 - DNA, 15 bp, Homo sapiens
aataaatcctttgca

SEQ ID NO: 125396 - DNA, 15 bp, Homo sapiens
gaataaatcctttgc

SEQ ID NO: 125397 - DNA, 15 bp, Homo sapiens
tgaataaatcctttg

SEQ ID NO: 125398 - DNA, 15 bp, Homo sapiens
ttgaataaatccttt

SEQ ID NO: 125399 - DNA, 15 bp, Homo sapiens
gttgaataaatcctt

SEQ ID NO: 125400 - DNA, 15 bp, Homo sapiens
tgttgaataaatcct

SEQ ID NO: 125401 - DNA, 15 bp, Homo sapiens
atgttgaataaatcc

SEQ ID NO: 125402 - DNA, 15 bp, Homo sapiens
aatgttgaataaatc

SEQ ID NO: 125403 - DNA, 15 bp, Homo sapiens
aaatgttgaataaat

SEQ ID NO: 125404 - DNA, 15 bp, Homo sapiens
taaatgttgaataaa

SEQ ID NO: 125405 - DNA, 15 bp, Homo sapiens
ttaaatgttgaataa

SEQ ID NO: 125406 - DNA, 15 bp, Homo sapiens
tttaaatgttgaata

SEQ ID NO: 125407 - DNA, 15 bp, Homo sapiens
gtttaaatgttgaat

SEQ ID NO: 125408 - DNA, 15 bp, Homo sapiens
tgtttaaatgttgaa

SEQ ID NO: 125409 - DNA, 15 bp, Homo sapiens
ttgtttaaatgttga

SEQ ID NO: 125410 - DNA, 15 bp, Homo sapiens
attgtttaaatgttg

SEQ ID NO: 125411 - DNA, 15 bp, Homo sapiens
gattgtttaaatgtt

SEQ ID NO: 125412 - DNA, 15 bp, Homo sapiens
ggattgtttaaatgt

SEQ ID NO: 125413 - DNA, 15 bp, Homo sapiens
aggattgtttaaatg

SEQ ID NO: 125414 - DNA, 15 bp, Homo sapiens
aaggattgtttaaat

SEQ ID NO: 125415 - DNA, 15 bp, Homo sapiens
aaaggattgtttaaa

SEQ ID NO: 125416 - DNA, 15 bp, Homo sapiens
aaaaggattgtttaa

SEQ ID NO: 125417 - DNA, 15 bp, Homo sapiens
aaaaaggattgttta

SEQ ID NO: 125418 - DNA, 15 bp, Homo sapiens
taaaaaggattgttt

SEQ ID NO: 125419 - DNA, 15 bp, Homo sapiens
gtaaaaaggattgtt

SEQ ID NO: 125420 - DNA, 15 bp, Homo sapiens
agtaaaaaggattgt

SEQ ID NO: 125421 - DNA, 15 bp, Homo sapiens
aagtaaaaaggattg

SEQ ID NO: 125422 - DNA, 15 bp, Homo sapiens
aaagtaaaaaggatt

SEQ ID NO: 125423 - DNA, 15 bp, Homo sapiens
gaaagtaaaaaggat

SEQ ID NO: 125424 - DNA, 15 bp, Homo sapiens
tgaaagtaaaaagga

SEQ ID NO: 125425 - DNA, 15 bp, Homo sapiens
atgaaagtaaaaagg

SEQ ID NO: 125426 - DNA, 15 bp, Homo sapiens
aatgaaagtaaaaag

SEQ ID NO: 125427 - DNA, 15 bp, Homo sapiens
aaatgaaagtaaaaa

SEQ ID NO: 125428 - DNA, 15 bp, Homo sapiens
aaaatgaaagtaaaa

SEQ ID NO: 125429 - DNA, 15 bp, Homo sapiens
gaaaatgaaagtaaa

SEQ ID NO: 125430 - DNA, 15 bp, Homo sapiens
ggaaaatgaaagtaa

SEQ ID NO: 125431 - DNA, 15 bp, Homo sapiens
aggaaaatgaaagta

SEQ ID NO: 125432 - DNA, 15 bp, Homo sapiens
aaggaaaatgaaagt

SEQ ID NO: 125433 - DNA, 15 bp, Homo sapiens
gaaggaaaatgaaag

SEQ ID NO: 125434 - DNA, 15 bp, Homo sapiens
tgaaggaaaatgaaa

SEQ ID NO: 125435 - DNA, 15 bp, Homo sapiens
ctgaaggaaaatgaa

SEQ ID NO: 125436 - DNA, 15 bp, Homo sapiens
cctgaaggaaaatga

SEQ ID NO: 125437 - DNA, 15 bp, Homo sapiens
gcctgaaggaaaatg

SEQ ID NO: 125438 - DNA, 15 bp, Homo sapiens
tgcctgaaggaaaat

SEQ ID NO: 125439 - DNA, 15 bp, Homo sapiens
ttgcctgaaggaaaa

SEQ ID NO: 125440 - DNA, 15 bp, Homo sapiens
tttgcctgaaggaaa

SEQ ID NO: 125441 - DNA, 15 bp, Homo sapiens
ctttgcctgaaggaa

SEQ ID NO: 125442 - DNA, 15 bp, Homo sapiens
tctttgcctgaagga

SEQ ID NO: 125443 - DNA, 15 bp, Homo sapiens
ttctttgcctgaagg

SEQ ID NO: 125444 - DNA, 15 bp, Homo sapiens
attctttgcctgaag

SEQ ID NO: 125445 - DNA, 15 bp, Homo sapiens
gattctttgcctgaa

SEQ ID NO: 125446 - DNA, 15 bp, Homo sapiens
agattctttgcctga

SEQ ID NO: 125447 - DNA, 15 bp, Homo sapiens
tagattctttgcctg

SEQ ID NO: 125448 - DNA, 15 bp, Homo sapiens
ctagattctttgcct

SEQ ID NO: 125449 - DNA, 15 bp, Homo sapiens
tctagattctttgcc

SEQ ID NO: 125450 - DNA, 15 bp, Homo sapiens
atctagattctttgc

SEQ ID NO: 125451 - DNA, 15 bp, Homo sapiens
catctagattctttg

SEQ ID NO: 125452 - DNA, 15 bp, Homo sapiens
gcatctagattcttt

SEQ ID NO: 125453 - DNA, 15 bp, Homo sapiens
tgcatctagattctt

SEQ ID NO: 125454 - DNA, 15 bp, Homo sapiens
ttgcatctagattct

SEQ ID NO: 125455 - DNA, 15 bp, Homo sapiens
attgcatctagattc

SEQ ID NO: 125456 - DNA, 15 bp, Homo sapiens
tattgcatctagatt

SEQ ID NO: 125457 - DNA, 15 bp, Homo sapiens
ttattgcatctagat

SEQ ID NO: 125458 - DNA, 15 bp, Homo sapiens
gttattgcatctaga

SEQ ID NO: 125459 - DNA, 15 bp, Homo sapiens
ggttattgcatctag

SEQ ID NO: 125460 - DNA, 15 bp, Homo sapiens
tggttattgcatcta

SEQ ID NO: 125461 - DNA, 15 bp, Homo sapiens
gtggttattgcatct

SEQ ID NO: 125462 - DNA, 15 bp, Homo sapiens
ggtggttattgcatc

SEQ ID NO: 125463 - DNA, 15 bp, Homo sapiens
gggtggttattgcat

SEQ ID NO: 125464 - DNA, 15 bp, Homo sapiens
ggggtggttattgca

SEQ ID NO: 125465 - DNA, 15 bp, Homo sapiens
aggggtggttattgc

SEQ ID NO: 125466 - DNA, 15 bp, Homo sapiens
caggggtggttattg

SEQ ID NO: 125467 - DNA, 15 bp, Homo sapiens
tcaggggtggttatt

SEQ ID NO: 125468 - DNA, 15 bp, Homo sapiens
gtcaggggtggttat

SEQ ID NO: 125469 - DNA, 15 bp, Homo sapiens
ggtcaggggtggtta

SEQ ID NO: 125470 - DNA, 15 bp, Homo sapiens
gggtcaggggtggtt

SEQ ID NO: 125471 - DNA, 15 bp, Homo sapiens
tgggtcaggggtggt

SEQ ID NO: 125472 - DNA, 15 bp, Homo sapiens
ttgggtcaggggtgg

SEQ ID NO: 125473 - DNA, 15 bp, Homo sapiens
gttgggtcaggggtg

SEQ ID NO: 125474 - DNA, 15 bp, Homo sapiens
ggttgggtcaggggt

SEQ ID NO: 125475 - DNA, 15 bp, Homo sapiens
tggttgggtcagggg

SEQ ID NO: 125476 - DNA, 15 bp, Homo sapiens
gtggttgggtcaggg

SEQ ID NO: 125477 - DNA, 15 bp, Homo sapiens
tgtggttgggtcagg

SEQ ID NO: 125478 - DNA, 15 bp, Homo sapiens
ttgtggttgggtcag

SEQ ID NO: 125479 - DNA, 15 bp, Homo sapiens
tttgtggttgggtca

SEQ ID NO: 125480 - DNA, 15 bp, Homo sapiens
atttgtggttgggtc

SEQ ID NO: 125481 - DNA, 15 bp, Homo sapiens
catttgtggttgggt

SEQ ID NO: 125482 - DNA, 15 bp, Homo sapiens
gcatttgtggttggg

SEQ ID NO: 125483 - DNA, 15 bp, Homo sapiens
ggcatttgtggttgg

SEQ ID NO: 125484 - DNA, 15 bp, Homo sapiens
tggcatttgtggttg

SEQ ID NO: 125485 - DNA, 15 bp, Homo sapiens
ctggcatttgtggtt

SEQ ID NO: 125486 - DNA, 15 bp, Homo sapiens
gctggcatttgtggt

SEQ ID NO: 125487 - DNA, 15 bp, Homo sapiens
ggctggcatttgtgg

SEQ ID NO: 125488 - DNA, 15 bp, Homo sapiens
aggctggcatttgtg

SEQ ID NO: 125489 - DNA, 15 bp, Homo sapiens
caggctggcatttgt

SEQ ID NO: 125490 - DNA, 15 bp, Homo sapiens
gcaggctggcatttg

SEQ ID NO: 125491 - DNA, 15 bp, Homo sapiens
agcaggctggcattt

SEQ ID NO: 125492 - DNA, 15 bp, Homo sapiens
cagcaggctggcatt

SEQ ID NO: 125493 - DNA, 15 bp, Homo sapiens
tcagcaggctggcat

SEQ ID NO: 125494 - DNA, 15 bp, Homo sapiens
gtcagcaggctggca

SEQ ID NO: 125495 - DNA, 15 bp, Homo sapiens
cgtcagcaggctggc

SEQ ID NO: 125496 - DNA, 15 bp, Homo sapiens
tcgtcagcaggctgg

SEQ ID NO: 125497 - DNA, 15 bp, Homo sapiens
ttcgtcagcaggctg

SEQ ID NO: 125498 - DNA, 15 bp, Homo sapiens
cttcgtcagcaggct

SEQ ID NO: 125499 - DNA, 15 bp, Homo sapiens
gcttcgtcagcaggc

SEQ ID NO: 125500 - DNA, 15 bp, Homo sapiens
agcttcgtcagcagg

SEQ ID NO: 125501 - DNA, 15 bp, Homo sapiens
cagcttcgtcagcag

SEQ ID NO: 125502 - DNA, 15 bp, Homo sapiens
gcagcttcgtcagca

SEQ ID NO: 125503 - DNA, 15 bp, Homo sapiens
tgcagcttcgtcagc

SEQ ID NO: 125504 - DNA, 15 bp, Homo sapiens
ctgcagcttcgtcag

SEQ ID NO: 125505 - DNA, 15 bp, Homo sapiens
cctgcagcttcgtca

SEQ ID NO: 125506 - DNA, 15 bp, Homo sapiens
gcctgcagcttcgtc

SEQ ID NO: 125507 - DNA, 15 bp, Homo sapiens
tgcctgcagcttcgt

SEQ ID NO: 125508 - DNA, 15 bp, Homo sapiens
gtgcctgcagcttcg

SEQ ID NO: 125509 - DNA, 15 bp, Homo sapiens
tgtgcctgcagcttc

SEQ ID NO: 125510 - DNA, 15 bp, Homo sapiens
ctgtgcctgcagctt

SEQ ID NO: 125511 - DNA, 15 bp, Homo sapiens
tctgtgcctgcagct

SEQ ID NO: 125512 - DNA, 15 bp, Homo sapiens
ttctgtgcctgcagc

SEQ ID NO: 125513 - DNA, 15 bp, Homo sapiens
gttctgtgcctgcag

SEQ ID NO: 125514 - DNA, 15 bp, Homo sapiens
ggttctgtgcctgca

SEQ ID NO: 125515 - DNA, 15 bp, Homo sapiens
tggttctgtgcctgc

SEQ ID NO: 125516 - DNA, 15 bp, Homo sapiens
ctggttctgtgcctg

SEQ ID NO: 125517 - DNA, 15 bp, Homo sapiens
actggttctgtgcct

SEQ ID NO: 125518 - DNA, 15 bp, Homo sapiens
cactggttctgtgcc

SEQ ID NO: 125519 - DNA, 15 bp, Homo sapiens
ccactggttctgtgc

SEQ ID NO: 125520 - DNA, 15 bp, Homo sapiens
gccactggttctgtg

SEQ ID NO: 125521 - DNA, 15 bp, Homo sapiens
agccactggttctgt

SEQ ID NO: 125522 - DNA, 15 bp, Homo sapiens
cagccactggttctg

SEQ ID NO: 125523 - DNA, 15 bp, Homo sapiens
gcagccactggttct

SEQ ID NO: 125524 - DNA, 15 bp, Homo sapiens
tgcagccactggttc

SEQ ID NO: 125525 - DNA, 15 bp, Homo sapiens
ctgcagccactggtt

SEQ ID NO: 125526 - DNA, 15 bp, Homo sapiens
cctgcagccactggt

SEQ ID NO: 125527 - DNA, 15 bp, Homo sapiens
tcctgcagccactgg

SEQ ID NO: 125528 - DNA, 15 bp, Homo sapiens
gtcctgcagccactg

SEQ ID NO: 125529 - DNA, 15 bp, Homo sapiens
tgtcctgcagccact

SEQ ID NO: 125530 - DNA, 15 bp, Homo sapiens
atgtcctgcagccac

SEQ ID NO: 125531 - DNA, 15 bp, Homo sapiens
catgtcctgcagcca

SEQ ID NO: 125532 - DNA, 15 bp, Homo sapiens
tcatgtcctgcagcc

SEQ ID NO: 125533 - DNA, 15 bp, Homo sapiens
gtcatgtcctgcagc

SEQ ID NO: 125534 - DNA, 15 bp, Homo sapiens
tgtcatgtcctgcag

SEQ ID NO: 125535 - DNA, 15 bp, Homo sapiens
ttgtcatgtcctgca

SEQ ID NO: 125536 - DNA, 15 bp, Homo sapiens
gttgtcatgtcctgc

SEQ ID NO: 125537 - DNA, 15 bp, Homo sapiens
agttgtcatgtcctg

SEQ ID NO: 125538 - DNA, 15 bp, Homo sapiens
gagttgtcatgtcct

SEQ ID NO: 125539 - DNA, 15 bp, Homo sapiens
tgagttgtcatgtcc

SEQ ID NO: 125540 - DNA, 15 bp, Homo sapiens
atgagttgtcatgtc

SEQ ID NO: 125541 - DNA, 15 bp, Homo sapiens
gatgagttgtcatgt

SEQ ID NO: 125542 - DNA, 15 bp, Homo sapiens
agatgagttgtcatg

SEQ ID NO: 125543 - DNA, 15 bp, Homo sapiens
gagatgagttgtcat

SEQ ID NO: 125544 - DNA, 15 bp, Homo sapiens
tgagatgagttgtca

SEQ ID NO: 125545 - DNA, 15 bp, Homo sapiens
atgagatgagttgtc

SEQ ID NO: 125546 - DNA, 15 bp, Homo sapiens
aatgagatgagttgt

SEQ ID NO: 125547 - DNA, 15 bp, Homo sapiens
gaatgagatgagttg

SEQ ID NO: 125548 - DNA, 15 bp, Homo sapiens
agaatgagatgagtt

SEQ ID NO: 125549 - DNA, 15 bp, Homo sapiens
cagaatgagatgagt

SEQ ID NO: 125550 - DNA, 15 bp, Homo sapiens
gcagaatgagatgag

SEQ ID NO: 125551 - DNA, 15 bp, Homo sapiens
cgcagaatgagatga

SEQ ID NO: 125552 - DNA, 15 bp, Homo sapiens
gcgcagaatgagatg

SEQ ID NO: 125553 - DNA, 15 bp, Homo sapiens
tgcgcagaatgagat

SEQ ID NO: 125554 - DNA, 15 bp, Homo sapiens
ctgcgcagaatgaga

SEQ ID NO: 125555 - DNA, 15 bp, Homo sapiens
gctgcgcagaatgag

SEQ ID NO: 125556 - DNA, 15 bp, Homo sapiens
agctgcgcagaatga

SEQ ID NO: 125557 - DNA, 15 bp, Homo sapiens
aagctgcgcagaatg

SEQ ID NO: 125558 - DNA, 15 bp, Homo sapiens
aaagctgcgcagaat

SEQ ID NO: 125559 - DNA, 15 bp, Homo sapiens
taaagctgcgcagaa

SEQ ID NO: 125560 - DNA, 15 bp, Homo sapiens
ttaaagctgcgcaga

SEQ ID NO: 125561 - DNA, 15 bp, Homo sapiens
cttaaagctgcgcag

SEQ ID NO: 125562 - DNA, 15 bp, Homo sapiens
ccttaaagctgcgca

SEQ ID NO: 125563 - DNA, 15 bp, Homo sapiens
tccttaaagctgcgc

SEQ ID NO: 125564 - DNA, 15 bp, Homo sapiens
ctccttaaagctgcg

SEQ ID NO: 125565 - DNA, 15 bp, Homo sapiens
actccttaaagctgc

SEQ ID NO: 125566 - DNA, 15 bp, Homo sapiens
aactccttaaagctg

SEQ ID NO: 125567 - DNA, 15 bp, Homo sapiens
gaactccttaaagct

SEQ ID NO: 125568 - DNA, 15 bp, Homo sapiens
ggaactccttaaagc

SEQ ID NO: 125569 - DNA, 15 bp, Homo sapiens
aggaactccttaaag

SEQ ID NO: 125570 - DNA, 15 bp, Homo sapiens
caggaactccttaaa

SEQ ID NO: 125571 - DNA, 15 bp, Homo sapiens
gcaggaactccttaa

SEQ ID NO: 125572 - DNA, 15 bp, Homo sapiens
tgcaggaactcctta

SEQ ID NO: 125573 - DNA, 15 bp, Homo sapiens
ctgcaggaactcctt

SEQ ID NO: 125574 - DNA, 15 bp, Homo sapiens
actgcaggaactcct

SEQ ID NO: 125575 - DNA, 15 bp, Homo sapiens
gactgcaggaactcc

SEQ ID NO: 125576 - DNA, 15 bp, Homo sapiens
ggactgcaggaactc

SEQ ID NO: 125577 - DNA, 15 bp, Homo sapiens
tggactgcaggaact

SEQ ID NO: 125578 - DNA, 15 bp, Homo sapiens
ctggactgcaggaac

SEQ ID NO: 125579 - DNA, 15 bp, Homo sapiens
gctggactgcaggaa

SEQ ID NO: 125580 - DNA, 15 bp, Homo sapiens
ggctggactgcagga

SEQ ID NO: 125581 - DNA, 15 bp, Homo sapiens
aggctggactgcagg

SEQ ID NO: 125582 - DNA, 15 bp, Homo sapiens
caggctggactgcag

SEQ ID NO: 125583 - DNA, 15 bp, Homo sapiens
tcaggctggactgca

SEQ ID NO: 125584 - DNA, 15 bp, Homo sapiens
ctcaggctggactgc

SEQ ID NO: 125585 - DNA, 15 bp, Homo sapiens
cctcaggctggactg

SEQ ID NO: 125586 - DNA, 15 bp, Homo sapiens
ccctcaggctggact

SEQ ID NO: 125587 - DNA, 15 bp, Homo sapiens
gccctcaggctggac

SEQ ID NO: 125588 - DNA, 15 bp, Homo sapiens
agccctcaggctgga

SEQ ID NO: 125589 - DNA, 15 bp, Homo sapiens
gagccctcaggctgg

SEQ ID NO: 125590 - DNA, 15 bp, Homo sapiens
agagccctcaggctg

SEQ ID NO: 125591 - DNA, 15 bp, Homo sapiens
aagagccctcaggct

SEQ ID NO: 125592 - DNA, 15 bp, Homo sapiens
gaagagccctcaggc

SEQ ID NO: 125593 - DNA, 15 bp, Homo sapiens
cgaagagccctcagg

SEQ ID NO: 125594 - DNA, 15 bp, Homo sapiens
ccgaagagccctcag

SEQ ID NO: 125595 - DNA, 15 bp, Homo sapiens
gccgaagagccctca

SEQ ID NO: 125596 - DNA, 15 bp, Homo sapiens
tgccgaagagccctc

SEQ ID NO: 125597 - DNA, 15 bp, Homo sapiens
ttgccgaagagccct

SEQ ID NO: 125598 - DNA, 15 bp, Homo sapiens
tttgccgaagagccc

SEQ ID NO: 125599 - DNA, 15 bp, Homo sapiens
atttgccgaagagcc

SEQ ID NO: 125600 - DNA, 15 bp, Homo sapiens
catttgccgaagagc

SEQ ID NO: 125601 - DNA, 15 bp, Homo sapiens
acatttgccgaagag

SEQ ID NO: 125602 - DNA, 15 bp, Homo sapiens
tacatttgccgaaga

SEQ ID NO: 125603 - DNA, 15 bp, Homo sapiens
ctacatttgccgaag

SEQ ID NO: 125604 - DNA, 15 bp, Homo sapiens
gctacatttgccgaa

SEQ ID NO: 125605 - DNA, 15 bp, Homo sapiens
tgctacatttgccga

SEQ ID NO: 125606 - DNA, 15 bp, Homo sapiens
atgctacatttgccg

SEQ ID NO: 125607 - DNA, 15 bp, Homo sapiens
catgctacatttgcc

SEQ ID NO: 125608 - DNA, 15 bp, Homo sapiens
ccatgctacatttgc

SEQ ID NO: 125609 - DNA, 15 bp, Homo sapiens
cccatgctacatttg

SEQ ID NO: 125610 - DNA, 15 bp, Homo sapiens
gcccatgctacattt

SEQ ID NO: 125611 - DNA, 15 bp, Homo sapiens
tgcccatgctacatt

SEQ ID NO: 125612 - DNA, 15 bp, Homo sapiens
gtgcccatgctacat

SEQ ID NO: 125613 - DNA, 15 bp, Homo sapiens
ggtgcccatgctaca

SEQ ID NO: 125614 - DNA, 15 bp, Homo sapiens
aggtgcccatgctac

SEQ ID NO: 125615 - DNA, 15 bp, Homo sapiens
gaggtgcccatgcta

SEQ ID NO: 125616 - DNA, 15 bp, Homo sapiens
tgaggtgcccatgct

SEQ ID NO: 125617 - DNA, 15 bp, Homo sapiens
ctgaggtgcccatgc

SEQ ID NO: 125618 - DNA, 15 bp, Homo sapiens
tctgaggtgcccatg

SEQ ID NO: 125619 - DNA, 15 bp, Homo sapiens
atctgaggtgcccat

SEQ ID NO: 125620 - DNA, 15 bp, Homo sapiens
aatctgaggtgccca

SEQ ID NO: 125621 - DNA, 15 bp, Homo sapiens
caatctgaggtgccc

SEQ ID NO: 125622 - DNA, 15 bp, Homo sapiens
acaatctgaggtgcc

SEQ ID NO: 125623 - DNA, 15 bp, Homo sapiens
aacaatctgaggtgc

SEQ ID NO: 125624 - DNA, 15 bp, Homo sapiens
caacaatctgaggtg

SEQ ID NO: 125625 - DNA, 15 bp, Homo sapiens
acaacaatctgaggt

SEQ ID NO: 125626 - DNA, 15 bp, Homo sapiens
aacaacaatctgagg

SEQ ID NO: 125627 - DNA, 15 bp, Homo sapiens
caacaacaatctgag

SEQ ID NO: 125628 - DNA, 15 bp, Homo sapiens
acaacaacaatctga

SEQ ID NO: 125629 - DNA, 15 bp, Homo sapiens
aacaacaacaatctg

SEQ ID NO: 125630 - DNA, 15 bp, Homo sapiens
taacaacaacaatct

SEQ ID NO: 125631 - DNA, 15 bp, Homo sapiens
ttaacaacaacaatc

SEQ ID NO: 125632 - DNA, 15 bp, Homo sapiens
attaacaacaacaat

SEQ ID NO: 125633 - DNA, 15 bp, Homo sapiens
cattaacaacaacaa

SEQ ID NO: 125634 - DNA, 15 bp, Homo sapiens
ccattaacaacaaca

SEQ ID NO: 125635 - DNA, 15 bp, Homo sapiens
cccattaacaacaac

SEQ ID NO: 125636 - DNA, 15 bp, Homo sapiens
gcccattaacaacaa

SEQ ID NO: 125637 - DNA, 15 bp, Homo sapiens
tgcccattaacaaca

SEQ ID NO: 125638 - DNA, 15 bp, Homo sapiens
atgcccattaacaac

SEQ ID NO: 125639 - DNA, 15 bp, Homo sapiens
aatgcccattaacaa

SEQ ID NO: 125640 - DNA, 15 bp, Homo sapiens
gaatgcccattaaca

SEQ ID NO: 125641 - DNA, 15 bp, Homo sapiens
ggaatgcccattaac

SEQ ID NO: 125642 - DNA, 15 bp, Homo sapiens
aggaatgcccattaa

SEQ ID NO: 125643 - DNA, 15 bp, Homo sapiens
aaggaatgcccatta

SEQ ID NO: 125644 - DNA, 15 bp, Homo sapiens
gaaggaatgcccatt

SEQ ID NO: 125645 - DNA, 15 bp, Homo sapiens
agaaggaatgcccat

SEQ ID NO: 125646 - DNA, 15 bp, Homo sapiens
aagaaggaatgccca

SEQ ID NO: 125647 - DNA, 15 bp, Homo sapiens
gaagaaggaatgccc

SEQ ID NO: 125648 - DNA, 15 bp, Homo sapiens
agaagaaggaatgcc

SEQ ID NO: 125649 - DNA, 15 bp, Homo sapiens
cagaagaaggaatgc

SEQ ID NO: 125650 - DNA, 15 bp, Homo sapiens
ccagaagaaggaatg

SEQ ID NO: 125651 - DNA, 15 bp, Homo sapiens
accagaagaaggaat

SEQ ID NO: 125652 - DNA, 15 bp, Homo sapiens
gaccagaagaaggaa

SEQ ID NO: 125653 - DNA, 15 bp, Homo sapiens
tgaccagaagaagga

SEQ ID NO: 125654 - DNA, 15 bp, Homo sapiens
ctgaccagaagaagg

SEQ ID NO: 125655 - DNA, 15 bp, Homo sapiens
tctgaccagaagaag

SEQ ID NO: 125656 - DNA, 15 bp, Homo sapiens
ttctgaccagaagaa

SEQ ID NO: 125657 - DNA, 15 bp, Homo sapiens
tttctgaccagaaga

SEQ ID NO: 125658 - DNA, 15 bp, Homo sapiens
gtttctgaccagaag

SEQ ID NO: 125659 - DNA, 15 bp, Homo sapiens
agcaaagatcatgcc

SEQ ID NO: 125660 - DNA, 15 bp, Homo sapiens
gagcaaagatcatgc

SEQ ID NO: 125661 - DNA, 15 bp, Homo sapiens
tgagcaaagatcatg

SEQ ID NO: 125662 - DNA, 15 bp, Homo sapiens
gtgagcaaagatcat

SEQ ID NO: 125663 - DNA, 15 bp, Homo sapiens
agtgagcaaagatca

SEQ ID NO: 125664 - DNA, 15 bp, Homo sapiens
cagtgagcaaagatc

SEQ ID NO: 125665 - DNA, 15 bp, Homo sapiens
acagtgagcaaagat

SEQ ID NO: 125666 - DNA, 15 bp, Homo sapiens
tacagtgagcaaaga

SEQ ID NO: 125667 - DNA, 15 bp, Homo sapiens
ttacagtgagcaaag

SEQ ID NO: 125668 - DNA, 15 bp, Homo sapiens
gttacagtgagcaaa

SEQ ID NO: 125669 - DNA, 15 bp, Homo sapiens
ggttacagtgagcaa

SEQ ID NO: 125670 - DNA, 15 bp, Homo sapiens
aggttacagtgagca

SEQ ID NO: 125671 - DNA, 15 bp, Homo sapiens
aaggttacagtgagc

SEQ ID NO: 125672 - DNA, 15 bp, Homo sapiens
gaaggttacagtgag

SEQ ID NO: 125673 - DNA, 15 bp, Homo sapiens
tgaaggttacagtga

SEQ ID NO: 125674 - DNA, 15 bp, Homo sapiens
atgaaggttacagtg

SEQ ID NO: 125675 - DNA, 15 bp, Homo sapiens
gatgaaggttacagt

SEQ ID NO: 125676 - DNA, 15 bp, Homo sapiens
agatgaaggttacag

SEQ ID NO: 125677 - DNA, 15 bp, Homo sapiens
gagatgaaggttaca

SEQ ID NO: 125678 - DNA, 15 bp, Homo sapiens
ggagatgaaggttac

SEQ ID NO: 125679 - DNA, 15 bp, Homo sapiens
gggagatgaaggtta

SEQ ID NO: 125680 - DNA, 15 bp, Homo sapiens
cgggagatgaaggtt

SEQ ID NO: 125681 - DNA, 15 bp, Homo sapiens
ccgggagatgaaggt

SEQ ID NO: 125682 - DNA, 15 bp, Homo sapiens
cccgggagatgaagg

SEQ ID NO: 125683 - DNA, 15 bp, Homo sapiens
acccgggagatgaag

SEQ ID NO: 125684 - DNA, 15 bp, Homo sapiens
aacccgggagatgaa

SEQ ID NO: 125685 - DNA, 15 bp, Homo sapiens
gaacccgggagatga

SEQ ID NO: 125686 - DNA, 15 bp, Homo sapiens
tgaacccgggagatg

SEQ ID NO: 125687 - DNA, 15 bp, Homo sapiens
ttgaacccgggagat

SEQ ID NO: 125688 - DNA, 15 bp, Homo sapiens
tttgaacccgggaga

SEQ ID NO: 125689 - DNA, 15 bp, Homo sapiens
gtttgaacccgggag

SEQ ID NO: 125690 - DNA, 15 bp, Homo sapiens
tgtttgaacccggga

SEQ ID NO: 125691 - DNA, 15 bp, Homo sapiens
ttgtttgaacccggg

SEQ ID NO: 125692 - DNA, 15 bp, Homo sapiens
attgtttgaacccgg

SEQ ID NO: 125693 - DNA, 15 bp, Homo sapiens
aattgtttgaacccg

SEQ ID NO: 125694 - DNA, 15 bp, Homo sapiens
gaattgtttgaaccc

SEQ ID NO: 125695 - DNA, 15 bp, Homo sapiens
agaattgtttgaacc

SEQ ID NO: 125696 - DNA, 15 bp, Homo sapiens
gagaattgtttgaac

SEQ ID NO: 125697 - DNA, 15 bp, Homo sapiens
ggagaattgtttgaa

SEQ ID NO: 125698 - DNA, 15 bp, Homo sapiens
aggagaattgtttga

SEQ ID NO: 125699 - DNA, 15 bp, Homo sapiens
caggagaattgtttg

SEQ ID NO: 125700 - DNA, 15 bp, Homo sapiens
gcaggagaattgttt

SEQ ID NO: 125701 - DNA, 15 bp, Homo sapiens
agcaggagaattgtt

SEQ ID NO: 125702 - DNA, 15 bp, Homo sapiens
aagcaggagaattgt

SEQ ID NO: 125703 - DNA, 15 bp, Homo sapiens
gaagcaggagaattg

SEQ ID NO: 125704 - DNA, 15 bp, Homo sapiens
tgaagcaggagaatt

SEQ ID NO: 125705 - DNA, 15 bp, Homo sapiens
ttgaagcaggagaat

SEQ ID NO: 125706 - DNA, 15 bp, Homo sapiens
gttgaagcaggagaa

SEQ ID NO: 125707 - DNA, 15 bp, Homo sapiens
ggttgaagcaggaga

SEQ ID NO: 125708 - DNA, 15 bp, Homo sapiens
aggttgaagcaggag

SEQ ID NO: 125709 - DNA, 15 bp, Homo sapiens
gaggttgaagcagga

SEQ ID NO: 125710 - DNA, 15 bp, Homo sapiens
ggaggttgaagcagg

SEQ ID NO: 125711 - DNA, 15 bp, Homo sapiens
aggaggttgaagcag

SEQ ID NO: 125712 - DNA, 15 bp, Homo sapiens
caggaggttgaagca

SEQ ID NO: 125713 - DNA, 15 bp, Homo sapiens
tcaggaggttgaagc

SEQ ID NO: 125714 - DNA, 15 bp, Homo sapiens
ctcaggaggttgaag

SEQ ID NO: 125715 - DNA, 15 bp, Homo sapiens
actcaggaggttgaa

SEQ ID NO: 125716 - DNA, 15 bp, Homo sapiens
tactcaggaggttga

SEQ ID NO: 125717 - DNA, 15 bp, Homo sapiens
ctactcaggaggttg

SEQ ID NO: 125718 - DNA, 15 bp, Homo sapiens
gctactcaggaggtt

SEQ ID NO: 125719 - DNA, 15 bp, Homo sapiens
agctactcaggaggt

SEQ ID NO: 125720 - DNA, 15 bp, Homo sapiens
cagctactcaggagg

SEQ ID NO: 125721 - DNA, 15 bp, Homo sapiens
ccagctactcaggag

SEQ ID NO: 125722 - DNA, 15 bp, Homo sapiens
cccagctactcagga

SEQ ID NO: 125723 - DNA, 15 bp, Homo sapiens
tcccagctactcagg

SEQ ID NO: 125724 - DNA, 15 bp, Homo sapiens
atcccagctactcag

SEQ ID NO: 125725 - DNA, 15 bp, Homo sapiens
aatcccagctactca

SEQ ID NO: 125726 - DNA, 15 bp, Homo sapiens
taatcccagctactc

SEQ ID NO: 125727 - DNA, 15 bp, Homo sapiens
gtaatcccagctact

SEQ ID NO: 125728 - DNA, 15 bp, Homo sapiens
tgtaatcccagctac

SEQ ID NO: 125729 - DNA, 15 bp, Homo sapiens
ctgtaatcccagcta

SEQ ID NO: 125730 - DNA, 15 bp, Homo sapiens
cctgtaatcccagct

SEQ ID NO: 125731 - DNA, 15 bp, Homo sapiens
acctgtaatcccagc

SEQ ID NO: 125732 - DNA, 15 bp, Homo sapiens
cacctgtaatcccag

SEQ ID NO: 125733 - DNA, 15 bp, Homo sapiens
gcacctgtaatccca

SEQ ID NO: 125734 - DNA, 15 bp, Homo sapiens
ggcacctgtaatccc

SEQ ID NO: 125735 - DNA, 15 bp, Homo sapiens
aggcacctgtaatcc

SEQ ID NO: 125736 - DNA, 15 bp, Homo sapiens
taggcacctgtaatc

SEQ ID NO: 125737 - DNA, 15 bp, Homo sapiens
gtaggcacctgtaat

SEQ ID NO: 125738 - DNA, 15 bp, Homo sapiens
ggtaggcacctgtaa

SEQ ID NO: 125739 - DNA, 15 bp, Homo sapiens
tggtaggcacctgta

SEQ ID NO: 125740 - DNA, 15 bp, Homo sapiens
gtggtaggcacctgt

SEQ ID NO: 125741 - DNA, 15 bp, Homo sapiens
ggtggtaggcacctg

SEQ ID NO: 125742 - DNA, 15 bp, Homo sapiens
tggtggtaggcacct

SEQ ID NO: 125743 - DNA, 15 bp, Homo sapiens
gtggtggtaggcacc

SEQ ID NO: 125744 - DNA, 15 bp, Homo sapiens
tgtggtggtaggcac

SEQ ID NO: 125745 - DNA, 15 bp, Homo sapiens
gtgtggtggtaggca

SEQ ID NO: 125746 - DNA, 15 bp, Homo sapiens
ggtgtggtggtaggc

SEQ ID NO: 125747 - DNA, 15 bp, Homo sapiens
aggtgtggtggtagg

SEQ ID NO: 125748 - DNA, 15 bp, Homo sapiens
caggtgtggtggtag

SEQ ID NO: 125749 - DNA, 15 bp, Homo sapiens
ccaggtgtggtggta

SEQ ID NO: 125750 - DNA, 15 bp, Homo sapiens
gccaggtgtggtggt

SEQ ID NO: 125751 - DNA, 15 bp, Homo sapiens
agccaggtgtggtgg

SEQ ID NO: 125752 - DNA, 15 bp, Homo sapiens
tagccaggtgtggtg

SEQ ID NO: 125753 - DNA, 15 bp, Homo sapiens
ttagccaggtgtggt

SEQ ID NO: 125754 - DNA, 15 bp, Homo sapiens
attagccaggtgtgg

SEQ ID NO: 125755 - DNA, 15 bp, Homo sapiens
aattagccaggtgtg

SEQ ID NO: 125756 - DNA, 15 bp, Homo sapiens
aaattagccaggtgt

SEQ ID NO: 125757 - DNA, 15 bp, Homo sapiens
aaaattagccaggtg

SEQ ID NO: 125758 - DNA, 15 bp, Homo sapiens
aaaaattagccaggt

SEQ ID NO: 125759 - DNA, 15 bp, Homo sapiens
caaaaattagccagg

SEQ ID NO: 125760 - DNA, 15 bp, Homo sapiens
acaaaaattagccag

SEQ ID NO: 125761 - DNA, 15 bp, Homo sapiens
tacaaaaattagcca

SEQ ID NO: 125762 - DNA, 15 bp, Homo sapiens
ctacaaaaattagcc

SEQ ID NO: 125763 - DNA, 15 bp, Homo sapiens
actacaaaaattagc

SEQ ID NO: 125764 - DNA, 15 bp, Homo sapiens
aactacaaaaattag

SEQ ID NO: 125765 - DNA, 15 bp, Homo sapiens
aaactacaaaaatta

SEQ ID NO: 125766 - DNA, 15 bp, Homo sapiens
aaaactacaaaaatt

SEQ ID NO: 125767 - DNA, 15 bp, Homo sapiens
aaaaactacaaaaat

SEQ ID NO: 125768 - DNA, 15 bp, Homo sapiens
aaaaaactacaaaaa

SEQ ID NO: 125769 - DNA, 15 bp, Homo sapiens
taaaaaactacaaaa

SEQ ID NO: 125770 - DNA, 15 bp, Homo sapiens
ctaaaaaactacaaa

SEQ ID NO: 125771 - DNA, 15 bp, Homo sapiens
actaaaaaactacaa

SEQ ID NO: 125772 - DNA, 15 bp, Homo sapiens
tactaaaaaactaca

SEQ ID NO: 125773 - DNA, 15 bp, Homo sapiens
ctactaaaaaactac

SEQ ID NO: 125774 - DNA, 15 bp, Homo sapiens
tctactaaaaaacta

SEQ ID NO: 125775 - DNA, 15 bp, Homo sapiens
ctctactaaaaaact

SEQ ID NO: 125776 - DNA, 15 bp, Homo sapiens
tctctactaaaaaac

SEQ ID NO: 125777 - DNA, 15 bp, Homo sapiens
atctctactaaaaaa

SEQ ID NO: 125778 - DNA, 15 bp, Homo sapiens
catctctactaaaaa

SEQ ID NO: 125779 - DNA, 15 bp, Homo sapiens
ccatctctactaaaa

SEQ ID NO: 125780 - DNA, 15 bp, Homo sapiens
cccatctctactaaa

SEQ ID NO: 125781 - DNA, 15 bp, Homo sapiens
ccccatctctactaa

SEQ ID NO: 125782 - DNA, 15 bp, Homo sapiens
accccatctctacta

SEQ ID NO: 125783 - DNA, 15 bp, Homo sapiens
aaccccatctctact

SEQ ID NO: 125784 - DNA, 15 bp, Homo sapiens
aaaccccatctctac

SEQ ID NO: 125785 - DNA, 15 bp, Homo sapiens
gaaaccccatctcta

SEQ ID NO: 125786 - DNA, 15 bp, Homo sapiens
tgaaaccccatctct

SEQ ID NO: 125787 - DNA, 15 bp, Homo sapiens
gtgaaaccccatctc

SEQ ID NO: 125788 - DNA, 15 bp, Homo sapiens
ggtgaaaccccatct

SEQ ID NO: 125789 - DNA, 15 bp, Homo sapiens
tggtgaaaccccatc

SEQ ID NO: 125790 - DNA, 15 bp, Homo sapiens
atggtgaaaccccat

SEQ ID NO: 125791 - DNA, 15 bp, Homo sapiens
catggtgaaacccca

SEQ ID NO: 125792 - DNA, 15 bp, Homo sapiens
acatggtgaaacccc

SEQ ID NO: 125793 - DNA, 15 bp, Homo sapiens
aacatggtgaaaccc

SEQ ID NO: 125794 - DNA, 15 bp, Homo sapiens
caacatggtgaaacc

SEQ ID NO: 125795 - DNA, 15 bp, Homo sapiens
ccaacatggtgaaac

SEQ ID NO: 125796 - DNA, 15 bp, Homo sapiens
gccaacatggtgaaa

SEQ ID NO: 125797 - DNA, 15 bp, Homo sapiens
ggccaacatggtgaa

SEQ ID NO: 125798 - DNA, 15 bp, Homo sapiens
tggccaacatggtga

SEQ ID NO: 125799 - DNA, 15 bp, Homo sapiens
ctggccaacatggtg

SEQ ID NO: 125800 - DNA, 15 bp, Homo sapiens
cctggccaacatggt

SEQ ID NO: 125801 - DNA, 15 bp, Homo sapiens
gcctggccaacatgg

SEQ ID NO: 125802 - DNA, 15 bp, Homo sapiens
agcctggccaacatg

SEQ ID NO: 125803 - DNA, 15 bp, Homo sapiens
cagcctggccaacat

SEQ ID NO: 125804 - DNA, 15 bp, Homo sapiens
ccagcctggccaaca

SEQ ID NO: 125805 - DNA, 15 bp, Homo sapiens
accagcctggccaac

SEQ ID NO: 125806 - DNA, 15 bp, Homo sapiens
gaccagcctggccaa

SEQ ID NO: 125807 - DNA, 15 bp, Homo sapiens
tgaccagcctggcca

SEQ ID NO: 125808 - DNA, 15 bp, Homo sapiens
gtgaccagcctggcc

SEQ ID NO: 125809 - DNA, 15 bp, Homo sapiens
cgtgaccagcctggc

SEQ ID NO: 125810 - DNA, 15 bp, Homo sapiens
tcgtgaccagcctgg

SEQ ID NO: 125811 - DNA, 15 bp, Homo sapiens
ttcgtgaccagcctg

SEQ ID NO: 125812 - DNA, 15 bp, Homo sapiens
gttcgtgaccagcct

SEQ ID NO: 125813 - DNA, 15 bp, Homo sapiens
agttcgtgaccagcc

SEQ ID NO: 125814 - DNA, 15 bp, Homo sapiens
gagttcgtgaccagc

SEQ ID NO: 125815 - DNA, 15 bp, Homo sapiens
ggagttcgtgaccag

SEQ ID NO: 125816 - DNA, 15 bp, Homo sapiens
aggagttcgtgacca

SEQ ID NO: 125817 - DNA, 15 bp, Homo sapiens
caggagttcgtgacc

SEQ ID NO: 125818 - DNA, 15 bp, Homo sapiens
tcaggagttcgtgac

SEQ ID NO: 125819 - DNA, 15 bp, Homo sapiens
gtcaggagttcgtga

SEQ ID NO: 125820 - DNA, 15 bp, Homo sapiens
ggtcaggagttcgtg

SEQ ID NO: 125821 - DNA, 15 bp, Homo sapiens
aggtcaggagttcgt

SEQ ID NO: 125822 - DNA, 15 bp, Homo sapiens
gaggtcaggagttcg

SEQ ID NO: 125823 - DNA, 15 bp, Homo sapiens
tgaggtcaggagttc

SEQ ID NO: 125824 - DNA, 15 bp, Homo sapiens
ctgaggtcaggagtt

SEQ ID NO: 125825 - DNA, 15 bp, Homo sapiens
cctgaggtcaggagt

SEQ ID NO: 125826 - DNA, 15 bp, Homo sapiens
acctgaggtcaggag

SEQ ID NO: 125827 - DNA, 15 bp, Homo sapiens
cacctgaggtcagga

SEQ ID NO: 125828 - DNA, 15 bp, Homo sapiens
tcacctgaggtcagg

SEQ ID NO: 125829 - DNA, 15 bp, Homo sapiens
atcacctgaggtcag

SEQ ID NO: 125830 - DNA, 15 bp, Homo sapiens
gatcacctgaggtca

SEQ ID NO: 125831 - DNA, 15 bp, Homo sapiens
ggatcacctgaggtc

SEQ ID NO: 125832 - DNA, 15 bp, Homo sapiens
tggatcacctgaggt

SEQ ID NO: 125833 - DNA, 15 bp, Homo sapiens
gtggatcacctgagg

SEQ ID NO: 125834 - DNA, 15 bp, Homo sapiens
ggtggatcacctgag

SEQ ID NO: 125835 - DNA, 15 bp, Homo sapiens
aggtggatcacctga

SEQ ID NO: 125836 - DNA, 15 bp, Homo sapiens
caggtggatcacctg

SEQ ID NO: 125837 - DNA, 15 bp, Homo sapiens
gcaggtggatcacct

SEQ ID NO: 125838 - DNA, 15 bp, Homo sapiens
ggcaggtggatcacc

SEQ ID NO: 125839 - DNA, 15 bp, Homo sapiens
aggcaggtggatcac

SEQ ID NO: 125840 - DNA, 15 bp, Homo sapiens
caggcaggtggatca

SEQ ID NO: 125841 - DNA, 15 bp, Homo sapiens
ccaggcaggtggatc

SEQ ID NO: 125842 - DNA, 15 bp, Homo sapiens
cccaggcaggtggat

SEQ ID NO: 125843 - DNA, 15 bp, Homo sapiens
gcccaggcaggtgga

SEQ ID NO: 125844 - DNA, 15 bp, Homo sapiens
ggcccaggcaggtgg

SEQ ID NO: 125845 - DNA, 15 bp, Homo sapiens
aggcccaggcaggtg

SEQ ID NO: 125846 - DNA, 15 bp, Homo sapiens
gaggcccaggcaggt

SEQ ID NO: 125847 - DNA, 15 bp, Homo sapiens
ggaggcccaggcagg

SEQ ID NO: 125848 - DNA, 15 bp, Homo sapiens
gggaggcccaggcag

SEQ ID NO: 125849 - DNA, 15 bp, Homo sapiens
tgggaggcccaggca

SEQ ID NO: 125850 - DNA, 15 bp, Homo sapiens
ttgggaggcccaggc

SEQ ID NO: 125851 - DNA, 15 bp, Homo sapiens
tttgggaggcccagg

SEQ ID NO: 125852 - DNA, 15 bp, Homo sapiens
ctttgggaggcccag

SEQ ID NO: 125853 - DNA, 15 bp, Homo sapiens
actttgggaggccca

SEQ ID NO: 125854 - DNA, 15 bp, Homo sapiens
cactttgggaggccc

SEQ ID NO: 125855 - DNA, 15 bp, Homo sapiens
gcactttgggaggcc

SEQ ID NO: 125856 - DNA, 15 bp, Homo sapiens
agcactttgggaggc

SEQ ID NO: 125857 - DNA, 15 bp, Homo sapiens
cagcactttgggagg

SEQ ID NO: 125858 - DNA, 15 bp, Homo sapiens
ccagcactttgggag

SEQ ID NO: 125859 - DNA, 15 bp, Homo sapiens
cccagcactttggga

SEQ ID NO: 125860 - DNA, 15 bp, Homo sapiens
tcccagcactttggg

SEQ ID NO: 125861 - DNA, 15 bp, Homo sapiens
atcccagcactttgg

SEQ ID NO: 125862 - DNA, 15 bp, Homo sapiens
aatcccagcactttg

SEQ ID NO: 125863 - DNA, 15 bp, Homo sapiens
taatcccagcacttt

SEQ ID NO: 125864 - DNA, 15 bp, Homo sapiens
gtaatcccagcactt

SEQ ID NO: 125865 - DNA, 15 bp, Homo sapiens
tgtaatcccagcact

SEQ ID NO: 125866 - DNA, 15 bp, Homo sapiens
ctgtaatcccagcac

SEQ ID NO: 125867 - DNA, 15 bp, Homo sapiens
cctgtaatcccagca

SEQ ID NO: 125868 - DNA, 15 bp, Homo sapiens
gcctgtaatcccagc

SEQ ID NO: 125869 - DNA, 15 bp, Homo sapiens
cgcctgtaatcccag

SEQ ID NO: 125870 - DNA, 15 bp, Homo sapiens
acgcctgtaatccca

SEQ ID NO: 125871 - DNA, 15 bp, Homo sapiens
cacgcctgtaatccc

SEQ ID NO: 125872 - DNA, 15 bp, Homo sapiens
tcacgcctgtaatcc

SEQ ID NO: 125873 - DNA, 15 bp, Homo sapiens
ctcacgcctgtaatc

SEQ ID NO: 125874 - DNA, 15 bp, Homo sapiens
gctcacgcctgtaat

SEQ ID NO: 125875 - DNA, 15 bp, Homo sapiens
ggctcacgcctgtaa

SEQ ID NO: 125876 - DNA, 15 bp, Homo sapiens
tggctcacgcctgta

SEQ ID NO: 125877 - DNA, 15 bp, Homo sapiens
gtggctcacgcctgt

SEQ ID NO: 125878 - DNA, 15 bp, Homo sapiens
agtggctcacgcctg

SEQ ID NO: 125879 - DNA, 15 bp, Homo sapiens
cagtggctcacgcct

SEQ ID NO: 125880 - DNA, 15 bp, Homo sapiens
acagtggctcacgcc

SEQ ID NO: 125881 - DNA, 15 bp, Homo sapiens
cacagtggctcacgc

SEQ ID NO: 125882 - DNA, 15 bp, Homo sapiens
gcacagtggctcacg

SEQ ID NO: 125883 - DNA, 15 bp, Homo sapiens
ggcacagtggctcac

SEQ ID NO: 125884 - DNA, 15 bp, Homo sapiens
gggcacagtggctca

SEQ ID NO: 125885 - DNA, 15 bp, Homo sapiens
tgggcacagtggctc

SEQ ID NO: 125886 - DNA, 15 bp, Homo sapiens
ctgggcacagtggct

SEQ ID NO: 125887 - DNA, 15 bp, Homo sapiens
gctgggcacagtggc

SEQ ID NO: 125888 - DNA, 15 bp, Homo sapiens
ggctgggcacagtgg

SEQ ID NO: 125889 - DNA, 15 bp, Homo sapiens
aggctgggcacagtg

SEQ ID NO: 125890 - DNA, 15 bp, Homo sapiens
gaggctgggcacagt

SEQ ID NO: 125891 - DNA, 15 bp, Homo sapiens
cgaggctgggcacag

SEQ ID NO: 125892 - DNA, 15 bp, Homo sapiens
acgaggctgggcaca

SEQ ID NO: 125893 - DNA, 15 bp, Homo sapiens
cacgaggctgggcac

SEQ ID NO: 125894 - DNA, 15 bp, Homo sapiens
acacgaggctgggca

SEQ ID NO: 125895 - DNA, 15 bp, Homo sapiens
tacacgaggctgggc

SEQ ID NO: 125896 - DNA, 15 bp, Homo sapiens
ttacacgaggctggg

SEQ ID NO: 125897 - DNA, 15 bp, Homo sapiens
cttacacgaggctgg

SEQ ID NO: 125898 - DNA, 15 bp, Homo sapiens
tcttacacgaggctg

SEQ ID NO: 125899 - DNA, 15 bp, Homo sapiens
ttcttacacgaggct

SEQ ID NO: 125900 - DNA, 15 bp, Homo sapiens
attcttacacgaggc

SEQ ID NO: 125901 - DNA, 15 bp, Homo sapiens
aattcttacacgagg

SEQ ID NO: 125902 - DNA, 15 bp, Homo sapiens
taattcttacacgag

SEQ ID NO: 125903 - DNA, 15 bp, Homo sapiens
ttaattcttacacga

SEQ ID NO: 125904 - DNA, 15 bp, Homo sapiens
tttaattcttacacg

SEQ ID NO: 125905 - DNA, 15 bp, Homo sapiens
ttttaattcttacac

SEQ ID NO: 125906 - DNA, 15 bp, Homo sapiens
gttttaattcttaca

SEQ ID NO: 125907 - DNA, 15 bp, Homo sapiens
cgttttaattcttac

SEQ ID NO: 125908 - DNA, 15 bp, Homo sapiens
tcgttttaattctta

SEQ ID NO: 125909 - DNA, 15 bp, Homo sapiens
ctcgttttaattctt

SEQ ID NO: 125910 - DNA, 15 bp, Homo sapiens
actcgttttaattct

SEQ ID NO: 125911 - DNA, 15 bp, Homo sapiens
tactcgttttaattc

SEQ ID NO: 125912 - DNA, 15 bp, Homo sapiens
ctactcgttttaatt

SEQ ID NO: 125913 - DNA, 15 bp, Homo sapiens
cctactcgttttaat

SEQ ID NO: 125914 - DNA, 15 bp, Homo sapiens
tcctactcgttttaa

SEQ ID NO: 125915 - DNA, 15 bp, Homo sapiens
ttcctactcgtttta

SEQ ID NO: 125916 - DNA, 15 bp, Homo sapiens
tttcctactcgtttt

SEQ ID NO: 125917 - DNA, 15 bp, Homo sapiens
ctttcctactcgttt

SEQ ID NO: 125918 - DNA, 15 bp, Homo sapiens
gctttcctactcgtt

SEQ ID NO: 125919 - DNA, 15 bp, Homo sapiens
tgctttcctactcgt

SEQ ID NO: 125920 - DNA, 15 bp, Homo sapiens
ctgctttcctactcg

SEQ ID NO: 125921 - DNA, 15 bp, Homo sapiens
actgctttcctactc

SEQ ID NO: 125922 - DNA, 15 bp, Homo sapiens
cactgctttcctact

SEQ ID NO: 125923 - DNA, 15 bp, Homo sapiens
gcactgctttcctac

SEQ ID NO: 125924 - DNA, 15 bp, Homo sapiens
agcactgctttccta

SEQ ID NO: 125925 - DNA, 15 bp, Homo sapiens
aagcactgctttcct

SEQ ID NO: 125926 - DNA, 15 bp, Homo sapiens
gaagcactgctttcc

SEQ ID NO: 125927 - DNA, 15 bp, Homo sapiens
ggaagcactgctttc

SEQ ID NO: 125928 - DNA, 15 bp, Homo sapiens
tggaagcactgcttt

SEQ ID NO: 125929 - DNA, 15 bp, Homo sapiens
ttggaagcactgctt

SEQ ID NO: 125930 - DNA, 15 bp, Homo sapiens
tttggaagcactgct

SEQ ID NO: 125931 - DNA, 15 bp, Homo sapiens
ttttggaagcactgc

SEQ ID NO: 125932 - DNA, 15 bp, Homo sapiens
tttttggaagcactg

SEQ ID NO: 125933 - DNA, 15 bp, Homo sapiens
ctttttggaagcact

SEQ ID NO: 125934 - DNA, 15 bp, Homo sapiens
cctttttggaagcac

SEQ ID NO: 125935 - DNA, 15 bp, Homo sapiens
gcctttttggaagca

SEQ ID NO: 125936 - DNA, 15 bp, Homo sapiens
tgcctttttggaagc

SEQ ID NO: 125937 - DNA, 15 bp, Homo sapiens
ctgcctttttggaag

SEQ ID NO: 125938 - DNA, 15 bp, Homo sapiens
cctgcctttttggaa

SEQ ID NO: 125939 - DNA, 15 bp, Homo sapiens
gcctgcctttttgga

SEQ ID NO: 125940 - DNA, 15 bp, Homo sapiens
agcctgcctttttgg

SEQ ID NO: 125941 - DNA, 15 bp, Homo sapiens
cagcctgcctttttg

SEQ ID NO: 125942 - DNA, 15 bp, Homo sapiens
gcagcctgccttttt

SEQ ID NO: 125943 - DNA, 15 bp, Homo sapiens
agcagcctgcctttt

SEQ ID NO: 125944 - DNA, 15 bp, Homo sapiens
aagcagcctgccttt

SEQ ID NO: 125945 - DNA, 15 bp, Homo sapiens
caagcagcctgcctt

SEQ ID NO: 125946 - DNA, 15 bp, Homo sapiens
tcaagcagcctgcct

SEQ ID NO: 125947 - DNA, 15 bp, Homo sapiens
gtcaagcagcctgcc

SEQ ID NO: 125948 - DNA, 15 bp, Homo sapiens
ggtcaagcagcctgc

SEQ ID NO: 125949 - DNA, 15 bp, Homo sapiens
gggtcaagcagcctg

SEQ ID NO: 125950 - DNA, 15 bp, Homo sapiens
ggggtcaagcagcct

SEQ ID NO: 125951 - DNA, 15 bp, Homo sapiens
tggggtcaagcagcc

SEQ ID NO: 125952 - DNA, 15 bp, Homo sapiens
gtggggtcaagcagc

SEQ ID NO: 125953 - DNA, 15 bp, Homo sapiens
cgtggggtcaagcag

SEQ ID NO: 125954 - DNA, 15 bp, Homo sapiens
gcgtggggtcaagca

SEQ ID NO: 125955 - DNA, 15 bp, Homo sapiens
cgcgtggggtcaagc

SEQ ID NO: 125956 - DNA, 15 bp, Homo sapiens
ccgcgtggggtcaag

SEQ ID NO: 125957 - DNA, 15 bp, Homo sapiens
accgcgtggggtcaa

SEQ ID NO: 125958 - DNA, 15 bp, Homo sapiens
taccgcgtggggtca

SEQ ID NO: 125959 - DNA, 15 bp, Homo sapiens
gtaccgcgtggggtc

SEQ ID NO: 125960 - DNA, 15 bp, Homo sapiens
tgtaccgcgtggggt

SEQ ID NO: 125961 - DNA, 15 bp, Homo sapiens
ttgtaccgcgtgggg

SEQ ID NO: 125962 - DNA, 15 bp, Homo sapiens
tttgtaccgcgtggg

SEQ ID NO: 125963 - DNA, 15 bp, Homo sapiens
ctttgtaccgcgtgg

SEQ ID NO: 125964 - DNA, 15 bp, Homo sapiens
cctttgtaccgcgtg

SEQ ID NO: 125965 - DNA, 15 bp, Homo sapiens
tcctttgtaccgcgt

SEQ ID NO: 125966 - DNA, 15 bp, Homo sapiens
atcctttgtaccgcg

SEQ ID NO: 125967 - DNA, 15 bp, Homo sapiens
catcctttgtaccgc

SEQ ID NO: 125968 - DNA, 15 bp, Homo sapiens
tcatcctttgtaccg

SEQ ID NO: 125969 - DNA, 15 bp, Homo sapiens
atcatcctttgtacc

SEQ ID NO: 125970 - DNA, 15 bp, Homo sapiens
aatcatcctttgtac

SEQ ID NO: 125971 - DNA, 15 bp, Homo sapiens
aaatcatcctttgta

SEQ ID NO: 125972 - DNA, 15 bp, Homo sapiens
caaatcatcctttgt

SEQ ID NO: 125973 - DNA, 15 bp, Homo sapiens
tcaaatcatcctttg

SEQ ID NO: 125974 - DNA, 15 bp, Homo sapiens
ctcaaatcatccttt

SEQ ID NO: 125975 - DNA, 15 bp, Homo sapiens
gctcaaatcatcctt

SEQ ID NO: 125976 - DNA, 15 bp, Homo sapiens
agctcaaatcatcct

SEQ ID NO: 125977 - DNA, 15 bp, Homo sapiens
aagctcaaatcatcc

SEQ ID NO: 125978 - DNA, 15 bp, Homo sapiens
taagctcaaatcatc

SEQ ID NO: 125979 - DNA, 15 bp, Homo sapiens
ataagctcaaatcat

SEQ ID NO: 125980 - DNA, 15 bp, Homo sapiens
tataagctcaaatca

SEQ ID NO: 125981 - DNA, 15 bp, Homo sapiens
gtataagctcaaatc

SEQ ID NO: 125982 - DNA, 15 bp, Homo sapiens
agtataagctcaaat

SEQ ID NO: 125983 - DNA, 15 bp, Homo sapiens
gagtataagctcaaa

SEQ ID NO: 125984 - DNA, 15 bp, Homo sapiens
ggagtataagctcaa

SEQ ID NO: 125985 - DNA, 15 bp, Homo sapiens
cggagtataagctca

SEQ ID NO: 125986 - DNA, 15 bp, Homo sapiens
ccggagtataagctc

SEQ ID NO: 125987 - DNA, 15 bp, Homo sapiens
accggagtataagct

SEQ ID NO: 125988 - DNA, 15 bp, Homo sapiens
gaccggagtataagc

SEQ ID NO: 125989 - DNA, 15 bp, Homo sapiens
agaccggagtataag

SEQ ID NO: 125990 - DNA, 15 bp, Homo sapiens
aagaccggagtataa

SEQ ID NO: 125991 - DNA, 15 bp, Homo sapiens
caagaccggagtata

SEQ ID NO: 125992 - DNA, 15 bp, Homo sapiens
ccaagaccggagtat

SEQ ID NO: 125993 - DNA, 15 bp, Homo sapiens
gccaagaccggagta

SEQ ID NO: 125994 - DNA, 15 bp, Homo sapiens
tgccaagaccggagt

SEQ ID NO: 125995 - DNA, 15 bp, Homo sapiens
gtgccaagaccggag

SEQ ID NO: 125996 - DNA, 15 bp, Homo sapiens
agtgccaagaccgga

SEQ ID NO: 125997 - DNA, 15 bp, Homo sapiens
gagtgccaagaccgg

SEQ ID NO: 125998 - DNA, 15 bp, Homo sapiens
tgagtgccaagaccg

SEQ ID NO: 125999 - DNA, 15 bp, Homo sapiens
ctgagtgccaagacc

SEQ ID NO: 126000 - DNA, 15 bp, Homo sapiens
actgagtgccaagac

SEQ ID NO: 126001 - DNA, 15 bp, Homo sapiens
cactgagtgccaaga

SEQ ID NO: 126002 - DNA, 15 bp, Homo sapiens
ccactgagtgccaag

SEQ ID NO: 126003 - DNA, 15 bp, Homo sapiens
cccactgagtgccaa

SEQ ID NO: 126004 - DNA, 15 bp, Homo sapiens
tcccactgagtgcca

SEQ ID NO: 126005 - DNA, 15 bp, Homo sapiens
ttcccactgagtgcc

SEQ ID NO: 126006 - DNA, 15 bp, Homo sapiens
tttcccactgagtgc

SEQ ID NO: 126007 - DNA, 15 bp, Homo sapiens
ctttcccactgagtg

SEQ ID NO: 126008 - DNA, 15 bp, Homo sapiens
actttcccactgagt

SEQ ID NO: 126009 - DNA, 15 bp, Homo sapiens
gactttcccactgag

SEQ ID NO: 126010 - DNA, 15 bp, Homo sapiens
tgactttcccactga

SEQ ID NO: 126011 - DNA, 15 bp, Homo sapiens
atgactttcccactg

SEQ ID NO: 126012 - DNA, 15 bp, Homo sapiens
catgactttcccact

SEQ ID NO: 126013 - DNA, 15 bp, Homo sapiens
gcatgactttcccac

SEQ ID NO: 126014 - DNA, 15 bp, Homo sapiens
ggcatgactttccca

SEQ ID NO: 126015 - DNA, 15 bp, Homo sapiens
gggcatgactttccc

SEQ ID NO: 126016 - DNA, 15 bp, Homo sapiens
agggcatgactttcc

SEQ ID NO: 126017 - DNA, 15 bp, Homo sapiens
cagggcatgactttc

SEQ ID NO: 126018 - DNA, 15 bp, Homo sapiens
gcagggcatgacttt

SEQ ID NO: 126019 - DNA, 15 bp, Homo sapiens
ggcagggcatgactt

SEQ ID NO: 126020 - DNA, 15 bp, Homo sapiens
gggcagggcatgact

SEQ ID NO: 126021 - DNA, 15 bp, Homo sapiens
tgggcagggcatgac

SEQ ID NO: 126022 - DNA, 15 bp, Homo sapiens
ttgggcagggcatga

SEQ ID NO: 126023 - DNA, 15 bp, Homo sapiens
attgggcagggcatg

SEQ ID NO: 126024 - DNA, 15 bp, Homo sapiens
aattgggcagggcat

SEQ ID NO: 126025 - DNA, 15 bp, Homo sapiens
gaattgggcagggca

SEQ ID NO: 126026 - DNA, 15 bp, Homo sapiens
ggaattgggcagggc

SEQ ID NO: 126027 - DNA, 15 bp, Homo sapiens
gggaattgggcaggg

SEQ ID NO: 126028 - DNA, 15 bp, Homo sapiens
agggaattgggcagg

SEQ ID NO: 126029 - DNA, 15 bp, Homo sapiens
gagggaattgggcag

SEQ ID NO: 126030 - DNA, 15 bp, Homo sapiens
agagggaattgggca

SEQ ID NO: 126031 - DNA, 15 bp, Homo sapiens
gagagggaattgggc

SEQ ID NO: 126032 - DNA, 15 bp, Homo sapiens
agagagggaattggg

SEQ ID NO: 126033 - DNA, 15 bp, Homo sapiens
tagagagggaattgg

SEQ ID NO: 126034 - DNA, 15 bp, Homo sapiens
ttagagagggaattg

SEQ ID NO: 126035 - DNA, 15 bp, Homo sapiens
gttagagagggaatt

SEQ ID NO: 126036 - DNA, 15 bp, Homo sapiens
ggttagagagggaat

SEQ ID NO: 126037 - DNA, 15 bp, Homo sapiens
aggttagagagggaa

SEQ ID NO: 126038 - DNA, 15 bp, Homo sapiens
caggttagagaggga

SEQ ID NO: 126039 - DNA, 15 bp, Homo sapiens
tcaggttagagaggg

SEQ ID NO: 126040 - DNA, 15 bp, Homo sapiens
atcaggttagagagg

SEQ ID NO: 126041 - DNA, 15 bp, Homo sapiens
aatcaggttagagag

SEQ ID NO: 126042 - DNA, 15 bp, Homo sapiens
caatcaggttagaga

SEQ ID NO: 126043 - DNA, 15 bp, Homo sapiens
gcaatcaggttagag

SEQ ID NO: 126044 - DNA, 15 bp, Homo sapiens
ggcaatcaggttaga

SEQ ID NO: 126045 - DNA, 15 bp, Homo sapiens
tggcaatcaggttag

SEQ ID NO: 126046 - DNA, 15 bp, Homo sapiens
gtggcaatcaggtta

SEQ ID NO: 126047 - DNA, 15 bp, Homo sapiens
tgtggcaatcaggtt

SEQ ID NO: 126048 - DNA, 15 bp, Homo sapiens
ctgtggcaatcaggt

SEQ ID NO: 126049 - DNA, 15 bp, Homo sapiens
tctgtggcaatcagg

SEQ ID NO: 126050 - DNA, 15 bp, Homo sapiens
ctctgtggcaatcag

SEQ ID NO: 126051 - DNA, 15 bp, Homo sapiens
tctctgtggcaatca

SEQ ID NO: 126052 - DNA, 15 bp, Homo sapiens
atctctgtggcaatc

SEQ ID NO: 126053 - DNA, 15 bp, Homo sapiens
catctctgtggcaat

SEQ ID NO: 126054 - DNA, 15 bp, Homo sapiens
ccatctctgtggcaa

SEQ ID NO: 126055 - DNA, 15 bp, Homo sapiens
accatctctgtggca

SEQ ID NO: 126056 - DNA, 15 bp, Homo sapiens
gaccatctctgtggc

SEQ ID NO: 126057 - DNA, 15 bp, Homo sapiens
tgaccatctctgtgg

SEQ ID NO: 126058 - DNA, 15 bp, Homo sapiens
atgaccatctctgtg

SEQ ID NO: 126059 - DNA, 15 bp, Homo sapiens
aatgaccatctctgt

SEQ ID NO: 126060 - DNA, 15 bp, Homo sapiens
caatgaccatctctg

SEQ ID NO: 126061 - DNA, 15 bp, Homo sapiens
acaatgaccatctct

SEQ ID NO: 126062 - DNA, 15 bp, Homo sapiens
cacaatgaccatctc

SEQ ID NO: 126063 - DNA, 15 bp, Homo sapiens
gcacaatgaccatct

SEQ ID NO: 126064 - DNA, 15 bp, Homo sapiens
ggcacaatgaccatc

SEQ ID NO: 126065 - DNA, 15 bp, Homo sapiens
aggcacaatgaccat

SEQ ID NO: 126066 - DNA, 15 bp, Homo sapiens
caggcacaatgacca

SEQ ID NO: 126067 - DNA, 15 bp, Homo sapiens
ccaggcacaatgacc

SEQ ID NO: 126068 - DNA, 15 bp, Homo sapiens
tccaggcacaatgac

SEQ ID NO: 126069 - DNA, 15 bp, Homo sapiens
ttccaggcacaatga

SEQ ID NO: 126070 - DNA, 15 bp, Homo sapiens
gttccaggcacaatg

SEQ ID NO: 126071 - DNA, 15 bp, Homo sapiens
tgttccaggcacaat

SEQ ID NO: 126072 - DNA, 15 bp, Homo sapiens
atgttccaggcacaa

SEQ ID NO: 126073 - DNA, 15 bp, Homo sapiens
gatgttccaggcaca

SEQ ID NO: 126074 - DNA, 15 bp, Homo sapiens
agatgttccaggcac

SEQ ID NO: 126075 - DNA, 15 bp, Homo sapiens
gagatgttccaggca

SEQ ID NO: 126076 - DNA, 15 bp, Homo sapiens
agagatgttccaggc

SEQ ID NO: 126077 - DNA, 15 bp, Homo sapiens
tagagatgttccagg

SEQ ID NO: 126078 - DNA, 15 bp, Homo sapiens
gtagagatgttccag

SEQ ID NO: 126079 - DNA, 15 bp, Homo sapiens
tgtagagatgttcca

SEQ ID NO: 126080 - DNA, 15 bp, Homo sapiens
ttgtagagatgttcc

SEQ ID NO: 126081 - DNA, 15 bp, Homo sapiens
gttgtagagatgttc

SEQ ID NO: 126082 - DNA, 15 bp, Homo sapiens
tgttgtagagatgtt

SEQ ID NO: 126083 - DNA, 15 bp, Homo sapiens
gtgttgtagagatgt

SEQ ID NO: 126084 - DNA, 15 bp, Homo sapiens
agtgttgtagagatg

SEQ ID NO: 126085 - DNA, 15 bp, Homo sapiens
aagtgttgtagagat

SEQ ID NO: 126086 - DNA, 15 bp, Homo sapiens
taagtgttgtagaga

SEQ ID NO: 126087 - DNA, 15 bp, Homo sapiens
gtaagtgttgtagag

SEQ ID NO: 126088 - DNA, 15 bp, Homo sapiens
ggtaagtgttgtaga

SEQ ID NO: 126089 - DNA, 15 bp, Homo sapiens
tggtaagtgttgtag

SEQ ID NO: 126090 - DNA, 15 bp, Homo sapiens
ttggtaagtgttgta

SEQ ID NO: 126091 - DNA, 15 bp, Homo sapiens
attggtaagtgttgt

SEQ ID NO: 126092 - DNA, 15 bp, Homo sapiens
aattggtaagtgttg

SEQ ID NO: 126093 - DNA, 15 bp, Homo sapiens
aaattggtaagtgtt

SEQ ID NO: 126094 - DNA, 15 bp, Homo sapiens
gaaattggtaagtgt

SEQ ID NO: 126095 - DNA, 15 bp, Homo sapiens
agaaattggtaagtg

SEQ ID NO: 126096 - DNA, 15 bp, Homo sapiens
gagaaattggtaagt

SEQ ID NO: 126097 - DNA, 15 bp, Homo sapiens
ggagaaattggtaag

SEQ ID NO: 126098 - DNA, 15 bp, Homo sapiens
aggagaaattggtaa

SEQ ID NO: 126099 - DNA, 15 bp, Homo sapiens
aaggagaaattggta

SEQ ID NO: 126100 - DNA, 15 bp, Homo sapiens
aaaggagaaattggt

SEQ ID NO: 126101 - DNA, 15 bp, Homo sapiens
aaaaggagaaattgg

SEQ ID NO: 126102 - DNA, 15 bp, Homo sapiens
taaaaggagaaattg

SEQ ID NO: 126103 - DNA, 15 bp, Homo sapiens
ctaaaaggagaaatt

SEQ ID NO: 126104 - DNA, 15 bp, Homo sapiens
gctaaaaggagaaat

SEQ ID NO: 126105 - DNA, 15 bp, Homo sapiens
tgctaaaaggagaaa

SEQ ID NO: 126106 - DNA, 15 bp, Homo sapiens
ttgctaaaaggagaa

SEQ ID NO: 126107 - DNA, 15 bp, Homo sapiens
tttgctaaaaggaga

SEQ ID NO: 126108 - DNA, 15 bp, Homo sapiens
ctttgctaaaaggag

SEQ ID NO: 126109 - DNA, 15 bp, Homo sapiens
cctttgctaaaagga

SEQ ID NO: 126110 - DNA, 15 bp, Homo sapiens
gcctttgctaaaagg

SEQ ID NO: 126111 - DNA, 15 bp, Homo sapiens
tgcctttgctaaaag

SEQ ID NO: 126112 - DNA, 15 bp, Homo sapiens
ctgcctttgctaaaa

SEQ ID NO: 126113 - DNA, 15 bp, Homo sapiens
actgcctttgctaaa

SEQ ID NO: 126114 - DNA, 15 bp, Homo sapiens
gactgcctttgctaa

SEQ ID NO: 126115 - DNA, 15 bp, Homo sapiens
agactgcctttgcta

SEQ ID NO: 126116 - DNA, 15 bp, Homo sapiens
tagactgcctttgct

SEQ ID NO: 126117 - DNA, 15 bp, Homo sapiens
ctagactgcctttgc

SEQ ID NO: 126118 - DNA, 15 bp, Homo sapiens
cctagactgcctttg

SEQ ID NO: 126119 - DNA, 15 bp, Homo sapiens
gcctagactgccttt

SEQ ID NO: 126120 - DNA, 15 bp, Homo sapiens
agcctagactgcctt

SEQ ID NO: 126121 - DNA, 15 bp, Homo sapiens
aagcctagactgcct

SEQ ID NO: 126122 - DNA, 15 bp, Homo sapiens
gaagcctagactgcc

SEQ ID NO: 126123 - DNA, 15 bp, Homo sapiens
tgaagcctagactgc

SEQ ID NO: 126124 - DNA, 15 bp, Homo sapiens
ctgaagcctagactg

SEQ ID NO: 126125 - DNA, 15 bp, Homo sapiens
tctgaagcctagact

SEQ ID NO: 126126 - DNA, 15 bp, Homo sapiens
atctgaagcctagac

SEQ ID NO: 126127 - DNA, 15 bp, Homo sapiens
catctgaagcctaga

SEQ ID NO: 126128 - DNA, 15 bp, Homo sapiens
ccatctgaagcctag

SEQ ID NO: 126129 - DNA, 15 bp, Homo sapiens
tccatctgaagccta

SEQ ID NO: 126130 - DNA, 15 bp, Homo sapiens
ctccatctgaagcct

SEQ ID NO: 126131 - DNA, 15 bp, Homo sapiens
cctccatctgaagcc

SEQ ID NO: 126132 - DNA, 15 bp, Homo sapiens
ccctccatctgaagc

SEQ ID NO: 126133 - DNA, 15 bp, Homo sapiens
gccctccatctgaag

SEQ ID NO: 126134 - DNA, 15 bp, Homo sapiens
agccctccatctgaa

SEQ ID NO: 126135 - DNA, 15 bp, Homo sapiens
aagccctccatctga

SEQ ID NO: 126136 - DNA, 15 bp, Homo sapiens
aaagccctccatctg

SEQ ID NO: 126137 - DNA, 15 bp, Homo sapiens
gaaagccctccatct

SEQ ID NO: 126138 - DNA, 15 bp, Homo sapiens
tgaaagccctccatc

SEQ ID NO: 126139 - DNA, 15 bp, Homo sapiens
gtgaaagccctccat

SEQ ID NO: 126140 - DNA, 15 bp, Homo sapiens
ggtgaaagccctcca

SEQ ID NO: 126141 - DNA, 15 bp, Homo sapiens
aggtgaaagccctcc

SEQ ID NO: 126142 - DNA, 15 bp, Homo sapiens
caggtgaaagccctc

SEQ ID NO: 126143 - DNA, 15 bp, Homo sapiens
tcaggtgaaagccct

SEQ ID NO: 126144 - DNA, 15 bp, Homo sapiens
ttcaggtgaaagccc

SEQ ID NO: 126145 - DNA, 15 bp, Homo sapiens
tttcaggtgaaagcc

SEQ ID NO: 126146 - DNA, 15 bp, Homo sapiens
ttttcaggtgaaagc

SEQ ID NO: 126147 - DNA, 15 bp, Homo sapiens
gttttcaggtgaaag

SEQ ID NO: 126148 - DNA, 15 bp, Homo sapiens
tgttttcaggtgaaa

SEQ ID NO: 126149 - DNA, 15 bp, Homo sapiens
ctgttttcaggtgaa

SEQ ID NO: 126150 - DNA, 15 bp, Homo sapiens
gctgttttcaggtga

SEQ ID NO: 126151 - DNA, 15 bp, Homo sapiens
tgctgttttcaggtg

SEQ ID NO: 126152 - DNA, 15 bp, Homo sapiens
ttgctgttttcaggt

SEQ ID NO: 126153 - DNA, 15 bp, Homo sapiens
cttgctgttttcagg

SEQ ID NO: 126154 - DNA, 15 bp, Homo sapiens
gcttgctgttttcag

SEQ ID NO: 126155 - DNA, 15 bp, Homo sapiens
agcttgctgttttca

SEQ ID NO: 126156 - DNA, 15 bp, Homo sapiens
gagcttgctgttttc

SEQ ID NO: 126157 - DNA, 15 bp, Homo sapiens
agagcttgctgtttt

SEQ ID NO: 126158 - DNA, 15 bp, Homo sapiens
cagagcttgctgttt

SEQ ID NO: 126159 - DNA, 15 bp, Homo sapiens
tcagagcttgctgtt

SEQ ID NO: 126160 - DNA, 15 bp, Homo sapiens
atcagagcttgctgt

SEQ ID NO: 126161 - DNA, 15 bp, Homo sapiens
aatcagagcttgctg

SEQ ID NO: 126162 - DNA, 15 bp, Homo sapiens
aaatcagagcttgct

SEQ ID NO: 126163 - DNA, 15 bp, Homo sapiens
aaaatcagagcttgc

SEQ ID NO: 126164 - DNA, 15 bp, Homo sapiens
taaaatcagagcttg

SEQ ID NO: 126165 - DNA, 15 bp, Homo sapiens
gtaaaatcagagctt

SEQ ID NO: 126166 - DNA, 15 bp, Homo sapiens
tgtaaaatcagagct

SEQ ID NO: 126167 - DNA, 15 bp, Homo sapiens
ctgtaaaatcagagc

SEQ ID NO: 126168 - DNA, 15 bp, Homo sapiens
gctgtaaaatcagag

SEQ ID NO: 126169 - DNA, 15 bp, Homo sapiens
tgctgtaaaatcaga

SEQ ID NO: 126170 - DNA, 15 bp, Homo sapiens
atgctgtaaaatcag

SEQ ID NO: 126171 - DNA, 15 bp, Homo sapiens
aatgctgtaaaatca

SEQ ID NO: 126172 - DNA, 15 bp, Homo sapiens
caatgctgtaaaatc

SEQ ID NO: 126173 - DNA, 15 bp, Homo sapiens
acaatgctgtaaaat

SEQ ID NO: 126174 - DNA, 15 bp, Homo sapiens
aacaatgctgtaaaa

SEQ ID NO: 126175 - DNA, 15 bp, Homo sapiens
aaacaatgctgtaaa

SEQ ID NO: 126176 - DNA, 15 bp, Homo sapiens
caaacaatgctgtaa

SEQ ID NO: 126177 - DNA, 15 bp, Homo sapiens
gcaaacaatgctgta

SEQ ID NO: 126178 - DNA, 15 bp, Homo sapiens
tgcaaacaatgctgt

SEQ ID NO: 126179 - DNA, 15 bp, Homo sapiens
atgcaaacaatgctg

SEQ ID NO: 126180 - DNA, 15 bp, Homo sapiens
aatgcaaacaatgct

SEQ ID NO: 126181 - DNA, 15 bp, Homo sapiens
aaatgcaaacaatgc

SEQ ID NO: 126182 - DNA, 15 bp, Homo sapiens
taaatgcaaacaatg

SEQ ID NO: 126183 - DNA, 15 bp, Homo sapiens
ataaatgcaaacaat

SEQ ID NO: 126184 - DNA, 15 bp, Homo sapiens
aataaatgcaaacaa

SEQ ID NO: 126185 - DNA, 15 bp, Homo sapiens
taataaatgcaaaca

SEQ ID NO: 126186 - DNA, 15 bp, Homo sapiens
ataataaatgcaaac

SEQ ID NO: 126187 - DNA, 15 bp, Homo sapiens
tataataaatgcaaa

SEQ ID NO: 126188 - DNA, 15 bp, Homo sapiens
atataataaatgcaa

SEQ ID NO: 126189 - DNA, 15 bp, Homo sapiens
aatataataaatgca

SEQ ID NO: 126190 - DNA, 15 bp, Homo sapiens
aaatataataaatgc

SEQ ID NO: 126191 - DNA, 15 bp, Homo sapiens
taaatataataaatg

SEQ ID NO: 126192 - DNA, 15 bp, Homo sapiens
gtaaatataataaat

SEQ ID NO: 126193 - DNA, 15 bp, Homo sapiens
agtaaatataataaa

SEQ ID NO: 126194 - DNA, 15 bp, Homo sapiens
aagtaaatataataa

SEQ ID NO: 126195 - DNA, 15 bp, Homo sapiens
aaagtaaatataata

SEQ ID NO: 126196 - DNA, 15 bp, Homo sapiens
aaaagtaaatataat

SEQ ID NO: 126197 - DNA, 15 bp, Homo sapiens
taaaagtaaatataa

SEQ ID NO: 126198 - DNA, 15 bp, Homo sapiens
gtaaaagtaaatata

SEQ ID NO: 126199 - DNA, 15 bp, Homo sapiens
tgtaaaagtaaatat

SEQ ID NO: 126200 - DNA, 15 bp, Homo sapiens
gtgtaaaagtaaata

SEQ ID NO: 126201 - DNA, 15 bp, Homo sapiens
agtgtaaaagtaaat

SEQ ID NO: 126202 - DNA, 15 bp, Homo sapiens
aagtgtaaaagtaaa

SEQ ID NO: 126203 - DNA, 15 bp, Homo sapiens
caagtgtaaaagtaa

SEQ ID NO: 126204 - DNA, 15 bp, Homo sapiens
gcaagtgtaaaagta

SEQ ID NO: 126205 - DNA, 15 bp, Homo sapiens
ggcaagtgtaaaagt

SEQ ID NO: 126206 - DNA, 15 bp, Homo sapiens
aggcaagtgtaaaag

SEQ ID NO: 126207 - DNA, 15 bp, Homo sapiens
aaggcaagtgtaaaa

SEQ ID NO: 126208 - DNA, 15 bp, Homo sapiens
gaaggcaagtgtaaa

SEQ ID NO: 126209 - DNA, 15 bp, Homo sapiens
agaaggcaagtgtaa

SEQ ID NO: 126210 - DNA, 15 bp, Homo sapiens
tagaaggcaagtgta

SEQ ID NO: 126211 - DNA, 15 bp, Homo sapiens
atagaaggcaagtgt

SEQ ID NO: 126212 - DNA, 15 bp, Homo sapiens
aatagaaggcaagtg

SEQ ID NO: 126213 - DNA, 15 bp, Homo sapiens
aaatagaaggcaagt

SEQ ID NO: 126214 - DNA, 15 bp, Homo sapiens
taaatagaaggcaag

SEQ ID NO: 126215 - DNA, 15 bp, Homo sapiens
ataaatagaaggcaa

SEQ ID NO: 126216 - DNA, 15 bp, Homo sapiens
aataaatagaaggca

SEQ ID NO: 126217 - DNA, 15 bp, Homo sapiens
aaataaatagaaggc

SEQ ID NO: 126218 - DNA, 15 bp, Homo sapiens
gaaataaatagaagg

SEQ ID NO: 126219 - DNA, 15 bp, Homo sapiens
agaaataaatagaag

SEQ ID NO: 126220 - DNA, 15 bp, Homo sapiens
tagaaataaatagaa

SEQ ID NO: 126221 - DNA, 15 bp, Homo sapiens
ttagaaataaataga

SEQ ID NO: 126222 - DNA, 15 bp, Homo sapiens
attagaaataaatag

SEQ ID NO: 126223 - DNA, 15 bp, Homo sapiens
cattagaaataaata

SEQ ID NO: 126224 - DNA, 15 bp, Homo sapiens
acattagaaataaat

SEQ ID NO: 126225 - DNA, 15 bp, Homo sapiens
tacattagaaataaa

SEQ ID NO: 126226 - DNA, 15 bp, Homo sapiens
atacattagaaataa

SEQ ID NO: 126227 - DNA, 15 bp, Homo sapiens
aatacattagaaata

SEQ ID NO: 126228 - DNA, 15 bp, Homo sapiens
aaatacattagaaat

SEQ ID NO: 126229 - DNA, 15 bp, Homo sapiens
taaatacattagaaa

SEQ ID NO: 126230 - DNA, 15 bp, Homo sapiens
ataaatacattagaa

SEQ ID NO: 126231 - DNA, 15 bp, Homo sapiens
tataaatacattaga

SEQ ID NO: 126232 - DNA, 15 bp, Homo sapiens
atataaatacattag

SEQ ID NO: 126233 - DNA, 15 bp, Homo sapiens
aatataaatacatta

SEQ ID NO: 126234 - DNA, 15 bp, Homo sapiens
aaatataaatacatt

SEQ ID NO: 126235 - DNA, 15 bp, Homo sapiens
aaaatataaatacat

SEQ ID NO: 126236 - DNA, 15 bp, Homo sapiens
caaaatataaataca

SEQ ID NO: 126237 - DNA, 15 bp, Homo sapiens
tcaaaatataaatac

SEQ ID NO: 126238 - DNA, 15 bp, Homo sapiens
atcaaaatataaata

SEQ ID NO: 126239 - DNA, 15 bp, Homo sapiens
aatcaaaatataaat

SEQ ID NO: 126240 - DNA, 15 bp, Homo sapiens
aaatcaaaatataaa

SEQ ID NO: 126241 - DNA, 15 bp, Homo sapiens
caaatcaaaatataa

SEQ ID NO: 126242 - DNA, 15 bp, Homo sapiens
acaaatcaaaatata

SEQ ID NO: 126243 - DNA, 15 bp, Homo sapiens
aacaaatcaaaatat

SEQ ID NO: 126244 - DNA, 15 bp, Homo sapiens
taacaaatcaaaata

SEQ ID NO: 126245 - DNA, 15 bp, Homo sapiens
ataacaaatcaaaat

SEQ ID NO: 126246 - DNA, 15 bp, Homo sapiens
aataacaaatcaaaa

SEQ ID NO: 126247 - DNA, 15 bp, Homo sapiens
aaataacaaatcaaa

SEQ ID NO: 126248 - DNA, 15 bp, Homo sapiens
taaataacaaatcaa

SEQ ID NO: 126249 - DNA, 15 bp, Homo sapiens
ataaataacaaatca

SEQ ID NO: 126250 - DNA, 15 bp, Homo sapiens
aataaataacaaatc

SEQ ID NO: 126251 - DNA, 15 bp, Homo sapiens
aaataaataacaaat

SEQ ID NO: 126252 - DNA, 15 bp, Homo sapiens
aaaataaataacaaa

SEQ ID NO: 126253 - DNA, 15 bp, Homo sapiens
aaaaataaataacaa

SEQ ID NO: 126254 - DNA, 15 bp, Homo sapiens
taaaaataaataaca

SEQ ID NO: 126255 - DNA, 15 bp, Homo sapiens
ataaaaataaataac

SEQ ID NO: 126256 - DNA, 15 bp, Homo sapiens
aataaaaataaataa

SEQ ID NO: 126257 - DNA, 15 bp, Homo sapiens
aaataaaaataaata

SEQ ID NO: 126258 - DNA, 15 bp, Homo sapiens
aaaataaaaataaat

SEQ ID NO: 126259 - DNA, 15 bp, Homo sapiens
taaaataaaaataaa

SEQ ID NO: 126260 - DNA, 15 bp, Homo sapiens
ataaaataaaaataa

SEQ ID NO: 126261 - DNA, 15 bp, Homo sapiens
aataaaataaaaata

SEQ ID NO: 126262 - DNA, 15 bp, Homo sapiens
taataaaataaaaat

SEQ ID NO: 126263 - DNA, 15 bp, Homo sapiens
ataataaaataaaaa

SEQ ID NO: 126264 - DNA, 15 bp, Homo sapiens
aataataaaataaaa

SEQ ID NO: 126265 - DNA, 15 bp, Homo sapiens
taataataaaataaa

SEQ ID NO: 126266 - DNA, 15 bp, Homo sapiens
gtaataataaaataa

SEQ ID NO: 126267 - DNA, 15 bp, Homo sapiens
tgtaataataaaata

SEQ ID NO: 126268 - DNA, 15 bp, Homo sapiens
ctgtaataataaaat

SEQ ID NO: 126269 - DNA, 15 bp, Homo sapiens
actgtaataataaaa

SEQ ID NO: 126270 - DNA, 15 bp, Homo sapiens
tactgtaataataaa

SEQ ID NO: 126271 - DNA, 15 bp, Homo sapiens
ctactgtaataataa

SEQ ID NO: 126272 - DNA, 15 bp, Homo sapiens
actactgtaataata

SEQ ID NO: 126273 - DNA, 15 bp, Homo sapiens
gactactgtaataat

SEQ ID NO: 126274 - DNA, 15 bp, Homo sapiens
ggactactgtaataa

SEQ ID NO: 126275 - DNA, 15 bp, Homo sapiens
gggactactgtaata

SEQ ID NO: 126276 - DNA, 15 bp, Homo sapiens
ggggactactgtaat

SEQ ID NO: 126277 - DNA, 15 bp, Homo sapiens
gggggactactgtaa

SEQ ID NO: 126278 - DNA, 15 bp, Homo sapiens
agggggactactgta

SEQ ID NO: 126279 - DNA, 15 bp, Homo sapiens
gagggggactactgt

SEQ ID NO: 126280 - DNA, 15 bp, Homo sapiens
agagggggactactg

SEQ ID NO: 126281 - DNA, 15 bp, Homo sapiens
aagagggggactact

SEQ ID NO: 126282 - DNA, 15 bp, Homo sapiens
taagagggggactac

SEQ ID NO: 126283 - DNA, 15 bp, Homo sapiens
ataagagggggacta

SEQ ID NO: 126284 - DNA, 15 bp, Homo sapiens
gataagagggggact

SEQ ID NO: 126285 - DNA, 15 bp, Homo sapiens
agataagagggggac

SEQ ID NO: 126286 - DNA, 15 bp, Homo sapiens
cagataagaggggga

SEQ ID NO: 126287 - DNA, 15 bp, Homo sapiens
tcagataagaggggg

SEQ ID NO: 126288 - DNA, 15 bp, Homo sapiens
ctcagataagagggg

SEQ ID NO: 126289 - DNA, 15 bp, Homo sapiens
cctcagataagaggg

SEQ ID NO: 126290 - DNA, 15 bp, Homo sapiens
acctcagataagagg

SEQ ID NO: 126291 - DNA, 15 bp, Homo sapiens
aacctcagataagag

SEQ ID NO: 126292 - DNA, 15 bp, Homo sapiens
aaacctcagataaga

SEQ ID NO: 126293 - DNA, 15 bp, Homo sapiens
aaaacctcagataag

SEQ ID NO: 126294 - DNA, 15 bp, Homo sapiens
caaaacctcagataa

SEQ ID NO: 126295 - DNA, 15 bp, Homo sapiens
gcaaaacctcagata

SEQ ID NO: 126296 - DNA, 15 bp, Homo sapiens
agcaaaacctcagat

SEQ ID NO: 126297 - DNA, 15 bp, Homo sapiens
aagcaaaacctcaga

SEQ ID NO: 126298 - DNA, 15 bp, Homo sapiens
aaagcaaaacctcag

SEQ ID NO: 126299 - DNA, 15 bp, Homo sapiens
gaaagcaaaacctca

SEQ ID NO: 126300 - DNA, 15 bp, Homo sapiens
agaaagcaaaacctc

SEQ ID NO: 126301 - DNA, 15 bp, Homo sapiens
cagaaagcaaaacct

SEQ ID NO: 126302 - DNA, 15 bp, Homo sapiens
gcagaaagcaaaacc

SEQ ID NO: 126303 - DNA, 15 bp, Homo sapiens
tgcagaaagcaaaac

SEQ ID NO: 126304 - DNA, 15 bp, Homo sapiens
ttgcagaaagcaaaa

SEQ ID NO: 126305 - DNA, 15 bp, Homo sapiens
attgcagaaagcaaa

SEQ ID NO: 126306 - DNA, 15 bp, Homo sapiens
aattgcagaaagcaa

SEQ ID NO: 126307 - DNA, 15 bp, Homo sapiens
aaattgcagaaagca

SEQ ID NO: 126308 - DNA, 15 bp, Homo sapiens
gaaattgcagaaagc

SEQ ID NO: 126309 - DNA, 15 bp, Homo sapiens
tgaaattgcagaaag

SEQ ID NO: 126310 - DNA, 15 bp, Homo sapiens
ctgaaattgcagaaa

SEQ ID NO: 126311 - DNA, 15 bp, Homo sapiens
actgaaattgcagaa

SEQ ID NO: 126312 - DNA, 15 bp, Homo sapiens
aactgaaattgcaga

SEQ ID NO: 126313 - DNA, 15 bp, Homo sapiens
taactgaaattgcag

SEQ ID NO: 126314 - DNA, 15 bp, Homo sapiens
gtaactgaaattgca

SEQ ID NO: 126315 - DNA, 15 bp, Homo sapiens
ggtaactgaaattgc

SEQ ID NO: 126316 - DNA, 15 bp, Homo sapiens
aggtaactgaaattg

SEQ ID NO: 126317 - DNA, 15 bp, Homo sapiens
caggtaactgaaatt

SEQ ID NO: 126318 - DNA, 15 bp, Homo sapiens
acaggtaactgaaat

SEQ ID NO: 126319 - DNA, 15 bp, Homo sapiens
cacaggtaactgaaa

SEQ ID NO: 126320 - DNA, 15 bp, Homo sapiens
ccacaggtaactgaa

SEQ ID NO: 126321 - DNA, 15 bp, Homo sapiens
accacaggtaactga

SEQ ID NO: 126322 - DNA, 15 bp, Homo sapiens
gaccacaggtaactg

SEQ ID NO: 126323 - DNA, 15 bp, Homo sapiens
tgaccacaggtaact

SEQ ID NO: 126324 - DNA, 15 bp, Homo sapiens
ttgaccacaggtaac

SEQ ID NO: 126325 - DNA, 15 bp, Homo sapiens
gttgaccacaggtaa

SEQ ID NO: 126326 - DNA, 15 bp, Homo sapiens
ggttgaccacaggta

SEQ ID NO: 126327 - DNA, 15 bp, Homo sapiens
tggttgaccacaggt

SEQ ID NO: 126328 - DNA, 15 bp, Homo sapiens
gtggttgaccacagg

SEQ ID NO: 126329 - DNA, 15 bp, Homo sapiens
tgtggttgaccacag

SEQ ID NO: 126330 - DNA, 15 bp, Homo sapiens
ctgtggttgaccaca

SEQ ID NO: 126331 - DNA, 15 bp, Homo sapiens
actgtggttgaccac

SEQ ID NO: 126332 - DNA, 15 bp, Homo sapiens
gactgtggttgacca

SEQ ID NO: 126333 - DNA, 15 bp, Homo sapiens
ggactgtggttgacc

SEQ ID NO: 126334 - DNA, 15 bp, Homo sapiens
tggactgtggttgac

SEQ ID NO: 126335 - DNA, 15 bp, Homo sapiens
ttggactgtggttga

SEQ ID NO: 126336 - DNA, 15 bp, Homo sapiens
tttggactgtggttg

SEQ ID NO: 126337 - DNA, 15 bp, Homo sapiens
ttttggactgtggtt

SEQ ID NO: 126338 - DNA, 15 bp, Homo sapiens
tttttggactgtggt

SEQ ID NO: 126339 - DNA, 15 bp, Homo sapiens
atttttggactgtgg

SEQ ID NO: 126340 - DNA, 15 bp, Homo sapiens
tatttttggactgtg

SEQ ID NO: 126341 - DNA, 15 bp, Homo sapiens
atatttttggactgt

SEQ ID NO: 126342 - DNA, 15 bp, Homo sapiens
aatatttttggactg

SEQ ID NO: 126343 - DNA, 15 bp, Homo sapiens
gaatatttttggact

SEQ ID NO: 126344 - DNA, 15 bp, Homo sapiens
tgaatatttttggac

SEQ ID NO: 126345 - DNA, 15 bp, Homo sapiens
ttgaatatttttgga

SEQ ID NO: 126346 - DNA, 15 bp, Homo sapiens
attgaatatttttgg

SEQ ID NO: 126347 - DNA, 15 bp, Homo sapiens
cattgaatatttttg

SEQ ID NO: 126348 - DNA, 15 bp, Homo sapiens
ccattgaatattttt

SEQ ID NO: 126349 - DNA, 15 bp, Homo sapiens
tccattgaatatttt

SEQ ID NO: 126350 - DNA, 15 bp, Homo sapiens
ttccattgaatattt

SEQ ID NO: 126351 - DNA, 15 bp, Homo sapiens
tttccattgaatatt

SEQ ID NO: 126352 - DNA, 15 bp, Homo sapiens
ctttccattgaatat

SEQ ID NO: 126353 - DNA, 15 bp, Homo sapiens
actttccattgaata

SEQ ID NO: 126354 - DNA, 15 bp, Homo sapiens
aactttccattgaat

SEQ ID NO: 126355 - DNA, 15 bp, Homo sapiens
gaactttccattgaa

SEQ ID NO: 126356 - DNA, 15 bp, Homo sapiens
ggaactttccattga

SEQ ID NO: 126357 - DNA, 15 bp, Homo sapiens
tggaactttccattg

SEQ ID NO: 126358 - DNA, 15 bp, Homo sapiens
ctggaactttccatt

SEQ ID NO: 126359 - DNA, 15 bp, Homo sapiens
tctggaactttccat

SEQ ID NO: 126360 - DNA, 15 bp, Homo sapiens
ttctggaactttcca

SEQ ID NO: 126361 - DNA, 15 bp, Homo sapiens
tttctggaactttcc

SEQ ID NO: 126362 - DNA, 15 bp, Homo sapiens
atttctggaactttc

SEQ ID NO: 126363 - DNA, 15 bp, Homo sapiens
tatttctggaacttt

SEQ ID NO: 126364 - DNA, 15 bp, Homo sapiens
ttatttctggaactt

SEQ ID NO: 126365 - DNA, 15 bp, Homo sapiens
tttatttctggaact

SEQ ID NO: 126366 - DNA, 15 bp, Homo sapiens
gtttatttctggaac

SEQ ID NO: 126367 - DNA, 15 bp, Homo sapiens
tgtttatttctggaa

SEQ ID NO: 126368 - DNA, 15 bp, Homo sapiens
ttgtttatttctgga

SEQ ID NO: 126369 - DNA, 15 bp, Homo sapiens
attgtttatttctgg

SEQ ID NO: 126370 - DNA, 15 bp, Homo sapiens
aattgtttatttctg

SEQ ID NO: 126371 - DNA, 15 bp, Homo sapiens
gaattgtttatttct

SEQ ID NO: 126372 - DNA, 15 bp, Homo sapiens
tgaattgtttatttc

SEQ ID NO: 126373 - DNA, 15 bp, Homo sapiens
atgaattgtttattt

SEQ ID NO: 126374 - DNA, 15 bp, Homo sapiens
tatgaattgtttatt

SEQ ID NO: 126375 - DNA, 15 bp, Homo sapiens
ttatgaattgtttat

SEQ ID NO: 126376 - DNA, 15 bp, Homo sapiens
cttatgaattgttta

SEQ ID NO: 126377 - DNA, 15 bp, Homo sapiens
acttatgaattgttt

SEQ ID NO: 126378 - DNA, 15 bp, Homo sapiens
aacttatgaattgtt

SEQ ID NO: 126379 - DNA, 15 bp, Homo sapiens
aaacttatgaattgt

SEQ ID NO: 126380 - DNA, 15 bp, Homo sapiens
aaaacttatgaattg

SEQ ID NO: 126381 - DNA, 15 bp, Homo sapiens
taaaacttatgaatt

SEQ ID NO: 126382 - DNA, 15 bp, Homo sapiens
ttaaaacttatgaat

SEQ ID NO: 126383 - DNA, 15 bp, Homo sapiens
tttaaaacttatgaa

SEQ ID NO: 126384 - DNA, 15 bp, Homo sapiens
gtttaaaacttatga

SEQ ID NO: 126385 - DNA, 15 bp, Homo sapiens
agtttaaaacttatg

SEQ ID NO: 126386 - DNA, 15 bp, Homo sapiens
cagtttaaaacttat

SEQ ID NO: 126387 - DNA, 15 bp, Homo sapiens
gcagtttaaaactta

SEQ ID NO: 126388 - DNA, 15 bp, Homo sapiens
agcagtttaaaactt

SEQ ID NO: 126389 - DNA, 15 bp, Homo sapiens
cagcagtttaaaact

SEQ ID NO: 126390 - DNA, 15 bp, Homo sapiens
gcagcagtttaaaac

SEQ ID NO: 126391 - DNA, 15 bp, Homo sapiens
ggcagcagtttaaaa

SEQ ID NO: 126392 - DNA, 15 bp, Homo sapiens
tggcagcagtttaaa

SEQ ID NO: 126393 - DNA, 15 bp, Homo sapiens
atggcagcagtttaa

SEQ ID NO: 126394 - DNA, 15 bp, Homo sapiens
aatggcagcagttta

SEQ ID NO: 126395 - DNA, 15 bp, Homo sapiens
gaatggcagcagttt

SEQ ID NO: 126396 - DNA, 15 bp, Homo sapiens
agaatggcagcagtt

SEQ ID NO: 126397 - DNA, 15 bp, Homo sapiens
cagaatggcagcagt

SEQ ID NO: 126398 - DNA, 15 bp, Homo sapiens
tcagaatggcagcag

SEQ ID NO: 126399 - DNA, 15 bp, Homo sapiens
ctcagaatggcagca

SEQ ID NO: 126400 - DNA, 15 bp, Homo sapiens
actcagaatggcagc

SEQ ID NO: 126401 - DNA, 15 bp, Homo sapiens
tactcagaatggcag

SEQ ID NO: 126402 - DNA, 15 bp, Homo sapiens
ctactcagaatggca

SEQ ID NO: 126403 - DNA, 15 bp, Homo sapiens
actactcagaatggc

SEQ ID NO: 126404 - DNA, 15 bp, Homo sapiens
tactactcagaatgg

SEQ ID NO: 126405 - DNA, 15 bp, Homo sapiens
atactactcagaatg

SEQ ID NO: 126406 - DNA, 15 bp, Homo sapiens
catactactcagaat

SEQ ID NO: 126407 - DNA, 15 bp, Homo sapiens
tcatactactcagaa

SEQ ID NO: 126408 - DNA, 15 bp, Homo sapiens
atcatactactcaga

SEQ ID NO: 126409 - DNA, 15 bp, Homo sapiens
catcatactactcag

SEQ ID NO: 126410 - DNA, 15 bp, Homo sapiens
tcatcatactactca

SEQ ID NO: 126411 - DNA, 15 bp, Homo sapiens
ttcatcatactactc

SEQ ID NO: 126412 - DNA, 15 bp, Homo sapiens
tttcatcatactact

SEQ ID NO: 126413 - DNA, 15 bp, Homo sapiens
atttcatcatactac

SEQ ID NO: 126414 - DNA, 15 bp, Homo sapiens
gatttcatcatacta

SEQ ID NO: 126415 - DNA, 15 bp, Homo sapiens
agatttcatcatact

SEQ ID NO: 126416 - DNA, 15 bp, Homo sapiens
gagatttcatcatac

SEQ ID NO: 126417 - DNA, 15 bp, Homo sapiens
agagatttcatcata

SEQ ID NO: 126418 - DNA, 15 bp, Homo sapiens
aagagatttcatcat

SEQ ID NO: 126419 - DNA, 15 bp, Homo sapiens
caagagatttcatca

SEQ ID NO: 126420 - DNA, 15 bp, Homo sapiens
gcaagagatttcatc

SEQ ID NO: 126421 - DNA, 15 bp, Homo sapiens
ggcaagagatttcat

SEQ ID NO: 126422 - DNA, 15 bp, Homo sapiens
tggcaagagatttca

SEQ ID NO: 126423 - DNA, 15 bp, Homo sapiens
ttggcaagagatttc

SEQ ID NO: 126424 - DNA, 15 bp, Homo sapiens
tttggcaagagattt

SEQ ID NO: 126425 - DNA, 15 bp, Homo sapiens
atttggcaagagatt

SEQ ID NO: 126426 - DNA, 15 bp, Homo sapiens
catttggcaagagat

SEQ ID NO: 126427 - DNA, 15 bp, Homo sapiens
gcatttggcaagaga

SEQ ID NO: 126428 - DNA, 15 bp, Homo sapiens
agcatttggcaagag

SEQ ID NO: 126429 - DNA, 15 bp, Homo sapiens
gagcatttggcaaga

SEQ ID NO: 126430 - DNA, 15 bp, Homo sapiens
ggagcatttggcaag

SEQ ID NO: 126431 - DNA, 15 bp, Homo sapiens
tggagcatttggcaa

SEQ ID NO: 126432 - DNA, 15 bp, Homo sapiens
atggagcatttggca

SEQ ID NO: 126433 - DNA, 15 bp, Homo sapiens
gatggagcatttggc

SEQ ID NO: 126434 - DNA, 15 bp, Homo sapiens
ggatggagcatttgg

SEQ ID NO: 126435 - DNA, 15 bp, Homo sapiens
aggatggagcatttg

SEQ ID NO: 126436 - DNA, 15 bp, Homo sapiens
caggatggagcattt

SEQ ID NO: 126437 - DNA, 15 bp, Homo sapiens
gcaggatggagcatt

SEQ ID NO: 126438 - DNA, 15 bp, Homo sapiens
ggcaggatggagcat

SEQ ID NO: 126439 - DNA, 15 bp, Homo sapiens
aggcaggatggagca

SEQ ID NO: 126440 - DNA, 15 bp, Homo sapiens
caggcaggatggagc

SEQ ID NO: 126441 - DNA, 15 bp, Homo sapiens
ccaggcaggatggag

SEQ ID NO: 126442 - DNA, 15 bp, Homo sapiens
cccaggcaggatgga

SEQ ID NO: 126443 - DNA, 15 bp, Homo sapiens
tcccaggcaggatgg

SEQ ID NO: 126444 - DNA, 15 bp, Homo sapiens
atcccaggcaggatg

SEQ ID NO: 126445 - DNA, 15 bp, Homo sapiens
tatcccaggcaggat

SEQ ID NO: 126446 - DNA, 15 bp, Homo sapiens
atatcccaggcagga

SEQ ID NO: 126447 - DNA, 15 bp, Homo sapiens
tatatcccaggcagg

SEQ ID NO: 126448 - DNA, 15 bp, Homo sapiens
ttatatcccaggcag

SEQ ID NO: 126449 - DNA, 15 bp, Homo sapiens
tttatatcccaggca

SEQ ID NO: 126450 - DNA, 15 bp, Homo sapiens
atttatatcccaggc

SEQ ID NO: 126451 - DNA, 15 bp, Homo sapiens
gatttatatcccagg

SEQ ID NO: 126452 - DNA, 15 bp, Homo sapiens
tgatttatatcccag

SEQ ID NO: 126453 - DNA, 15 bp, Homo sapiens
atgatttatatccca

SEQ ID NO: 126454 - DNA, 15 bp, Homo sapiens
aatgatttatatccc

SEQ ID NO: 126455 - DNA, 15 bp, Homo sapiens
gaatgatttatatcc

SEQ ID NO: 126456 - DNA, 15 bp, Homo sapiens
ggaatgatttatatc

SEQ ID NO: 126457 - DNA, 15 bp, Homo sapiens
aggaatgatttatat

SEQ ID NO: 126458 - DNA, 15 bp, Homo sapiens
aaggaatgatttata

SEQ ID NO: 126459 - DNA, 15 bp, Homo sapiens
aaaggaatgatttat

SEQ ID NO: 126460 - DNA, 15 bp, Homo sapiens
caaaggaatgattta

SEQ ID NO: 126461 - DNA, 15 bp, Homo sapiens
acaaaggaatgattt

SEQ ID NO: 126462 - DNA, 15 bp, Homo sapiens
gacaaaggaatgatt

SEQ ID NO: 126463 - DNA, 15 bp, Homo sapiens
ggacaaaggaatgat

SEQ ID NO: 126464 - DNA, 15 bp, Homo sapiens
tggacaaaggaatga

SEQ ID NO: 126465 - DNA, 15 bp, Homo sapiens
ctggacaaaggaatg

SEQ ID NO: 126466 - DNA, 15 bp, Homo sapiens
actggacaaaggaat

SEQ ID NO: 126467 - DNA, 15 bp, Homo sapiens
cactggacaaaggaa

SEQ ID NO: 126468 - DNA, 15 bp, Homo sapiens
acactggacaaagga

SEQ ID NO: 126469 - DNA, 15 bp, Homo sapiens
tacactggacaaagg

SEQ ID NO: 126470 - DNA, 15 bp, Homo sapiens
atacactggacaaag

SEQ ID NO: 126471 - DNA, 15 bp, Homo sapiens
catacactggacaaa

SEQ ID NO: 126472 - DNA, 15 bp, Homo sapiens
gcatacactggacaa

SEQ ID NO: 126473 - DNA, 15 bp, Homo sapiens
tgcatacactggaca

SEQ ID NO: 126474 - DNA, 15 bp, Homo sapiens
gtgcatacactggac

SEQ ID NO: 126475 - DNA, 15 bp, Homo sapiens
ggtgcatacactgga

SEQ ID NO: 126476 - DNA, 15 bp, Homo sapiens
tggtgcatacactgg

SEQ ID NO: 126477 - DNA, 15 bp, Homo sapiens
gtggtgcatacactg

SEQ ID NO: 126478 - DNA, 15 bp, Homo sapiens
ggtggtgcatacact

SEQ ID NO: 126479 - DNA, 15 bp, Homo sapiens
gggtggtgcatacac

SEQ ID NO: 126480 - DNA, 15 bp, Homo sapiens
tgggtggtgcataca

SEQ ID NO: 126481 - DNA, 15 bp, Homo sapiens
gtgggtggtgcatac

SEQ ID NO: 126482 - DNA, 15 bp, Homo sapiens
ggtgggtggtgcata

SEQ ID NO: 126483 - DNA, 15 bp, Homo sapiens
tggtgggtggtgcat

SEQ ID NO: 126484 - DNA, 15 bp, Homo sapiens
gtggtgggtggtgca

SEQ ID NO: 126485 - DNA, 15 bp, Homo sapiens
ggtggtgggtggtgc

SEQ ID NO: 126486 - DNA, 15 bp, Homo sapiens
aggtggtgggtggtg

SEQ ID NO: 126487 - DNA, 15 bp, Homo sapiens
caggtggtgggtggt

SEQ ID NO: 126488 - DNA, 15 bp, Homo sapiens
gcaggtggtgggtgg

SEQ ID NO: 126489 - DNA, 15 bp, Homo sapiens
ggcaggtggtgggtg

SEQ ID NO: 126490 - DNA, 15 bp, Homo sapiens
aggcaggtggtgggt

SEQ ID NO: 126491 - DNA, 15 bp, Homo sapiens
caggcaggtggtggg

SEQ ID NO: 126492 - DNA, 15 bp, Homo sapiens
acaggcaggtggtgg

SEQ ID NO: 126493 - DNA, 15 bp, Homo sapiens
aacaggcaggtggtg

SEQ ID NO: 126494 - DNA, 15 bp, Homo sapiens
taacaggcaggtggt

SEQ ID NO: 126495 - DNA, 15 bp, Homo sapiens
ctaacaggcaggtgg

SEQ ID NO: 126496 - DNA, 15 bp, Homo sapiens
actaacaggcaggtg

SEQ ID NO: 126497 - DNA, 15 bp, Homo sapiens
tactaacaggcaggt

SEQ ID NO: 126498 - DNA, 15 bp, Homo sapiens
gtactaacaggcagg

SEQ ID NO: 126499 - DNA, 15 bp, Homo sapiens
ggtactaacaggcag

SEQ ID NO: 126500 - DNA, 15 bp, Homo sapiens
aggtactaacaggca

SEQ ID NO: 126501 - DNA, 15 bp, Homo sapiens
caggtactaacaggc

SEQ ID NO: 126502 - DNA, 15 bp, Homo sapiens
tcaggtactaacagg

SEQ ID NO: 126503 - DNA, 15 bp, Homo sapiens
ctcaggtactaacag

SEQ ID NO: 126504 - DNA, 15 bp, Homo sapiens
gctcaggtactaaca

SEQ ID NO: 126505 - DNA, 15 bp, Homo sapiens
tgctcaggtactaac

SEQ ID NO: 126506 - DNA, 15 bp, Homo sapiens
ctgctcaggtactaa

SEQ ID NO: 126507 - DNA, 15 bp, Homo sapiens
actgctcaggtacta

SEQ ID NO: 126508 - DNA, 15 bp, Homo sapiens
cactgctcaggtact

SEQ ID NO: 126509 - DNA, 15 bp, Homo sapiens
acactgctcaggtac

SEQ ID NO: 126510 - DNA, 15 bp, Homo sapiens
aacactgctcaggta

SEQ ID NO: 126511 - DNA, 15 bp, Homo sapiens
gaacactgctcaggt

SEQ ID NO: 126512 - DNA, 15 bp, Homo sapiens
agaacactgctcagg

SEQ ID NO: 126513 - DNA, 15 bp, Homo sapiens
gagaacactgctcag

SEQ ID NO: 126514 - DNA, 15 bp, Homo sapiens
cgagaacactgctca

SEQ ID NO: 126515 - DNA, 15 bp, Homo sapiens
ccgagaacactgctc

SEQ ID NO: 126516 - DNA, 15 bp, Homo sapiens
accgagaacactgct

SEQ ID NO: 126517 - DNA, 15 bp, Homo sapiens
aaccgagaacactgc

SEQ ID NO: 126518 - DNA, 15 bp, Homo sapiens
taaccgagaacactg

SEQ ID NO: 126519 - DNA, 15 bp, Homo sapiens
ataaccgagaacact

SEQ ID NO: 126520 - DNA, 15 bp, Homo sapiens
gataaccgagaacac

SEQ ID NO: 126521 - DNA, 15 bp, Homo sapiens
tgataaccgagaaca

SEQ ID NO: 126522 - DNA, 15 bp, Homo sapiens
ctgataaccgagaac

SEQ ID NO: 126523 - DNA, 15 bp, Homo sapiens
tctgataaccgagaa

SEQ ID NO: 126524 - DNA, 15 bp, Homo sapiens
atctgataaccgaga

SEQ ID NO: 126525 - DNA, 15 bp, Homo sapiens
catctgataaccgag

SEQ ID NO: 126526 - DNA, 15 bp, Homo sapiens
ccatctgataaccga

SEQ ID NO: 126527 - DNA, 15 bp, Homo sapiens
tccatctgataaccg

SEQ ID NO: 126528 - DNA, 15 bp, Homo sapiens
ttccatctgataacc

SEQ ID NO: 126529 - DNA, 15 bp, Homo sapiens
tttccatctgataac

SEQ ID NO: 126530 - DNA, 15 bp, Homo sapiens
ttttccatctgataa

SEQ ID NO: 126531 - DNA, 15 bp, Homo sapiens
tttttccatctgata

SEQ ID NO: 126532 - DNA, 15 bp, Homo sapiens
gtttttccatctgat

SEQ ID NO: 126533 - DNA, 15 bp, Homo sapiens
agtttttccatctga

SEQ ID NO: 126534 - DNA, 15 bp, Homo sapiens
aagtttttccatctg

SEQ ID NO: 126535 - DNA, 15 bp, Homo sapiens
caagtttttccatct

SEQ ID NO: 126536 - DNA, 15 bp, Homo sapiens
acaagtttttccatc

SEQ ID NO: 126537 - DNA, 15 bp, Homo sapiens
tacaagtttttccat

SEQ ID NO: 126538 - DNA, 15 bp, Homo sapiens
atacaagtttttcca

SEQ ID NO: 126539 - DNA, 15 bp, Homo sapiens
tatacaagtttttcc

SEQ ID NO: 126540 - DNA, 15 bp, Homo sapiens
atatacaagtttttc

SEQ ID NO: 126541 - DNA, 15 bp, Homo sapiens
tatatacaagttttt

SEQ ID NO: 126542 - DNA, 15 bp, Homo sapiens
gtatatacaagtttt

SEQ ID NO: 126543 - DNA, 15 bp, Homo sapiens
agtatatacaagttt

SEQ ID NO: 126544 - DNA, 15 bp, Homo sapiens
cagtatatacaagtt

SEQ ID NO: 126545 - DNA, 15 bp, Homo sapiens
acagtatatacaagt

SEQ ID NO: 126546 - DNA, 15 bp, Homo sapiens
cacagtatatacaag

SEQ ID NO: 126547 - DNA, 15 bp, Homo sapiens
acacagtatatacaa

SEQ ID NO: 126548 - DNA, 15 bp, Homo sapiens
cacacagtatataca

SEQ ID NO: 126549 - DNA, 15 bp, Homo sapiens
acacacagtatatac

SEQ ID NO: 126550 - DNA, 15 bp, Homo sapiens
tacacacagtatata

SEQ ID NO: 126551 - DNA, 15 bp, Homo sapiens
ctacacacagtatat

SEQ ID NO: 126552 - DNA, 15 bp, Homo sapiens
tctacacacagtata

SEQ ID NO: 126553 - DNA, 15 bp, Homo sapiens
ctctacacacagtat

SEQ ID NO: 126554 - DNA, 15 bp, Homo sapiens
actctacacacagta

SEQ ID NO: 126555 - DNA, 15 bp, Homo sapiens
aactctacacacagt

SEQ ID NO: 126556 - DNA, 15 bp, Homo sapiens
gaactctacacacag

SEQ ID NO: 126557 - DNA, 15 bp, Homo sapiens
tgaactctacacaca

SEQ ID NO: 126558 - DNA, 15 bp, Homo sapiens
ctgaactctacacac

SEQ ID NO: 126559 - DNA, 15 bp, Homo sapiens
actgaactctacaca

SEQ ID NO: 126560 - DNA, 15 bp, Homo sapiens
cactgaactctacac

SEQ ID NO: 126561 - DNA, 15 bp, Homo sapiens
gcactgaactctaca

SEQ ID NO: 126562 - DNA, 15 bp, Homo sapiens
agcactgaactctac

SEQ ID NO: 126563 - DNA, 15 bp, Homo sapiens
tagcactgaactcta

SEQ ID NO: 126564 - DNA, 15 bp, Homo sapiens
atagcactgaactct

SEQ ID NO: 126565 - DNA, 15 bp, Homo sapiens
gatagcactgaactc

SEQ ID NO: 126566 - DNA, 15 bp, Homo sapiens
agatagcactgaact

SEQ ID NO: 126567 - DNA, 15 bp, Homo sapiens
cagatagcactgaac

SEQ ID NO: 126568 - DNA, 15 bp, Homo sapiens
acagatagcactgaa

SEQ ID NO: 126569 - DNA, 15 bp, Homo sapiens
cacagatagcactga

SEQ ID NO: 126570 - DNA, 15 bp, Homo sapiens
ccacagatagcactg

SEQ ID NO: 126571 - DNA, 15 bp, Homo sapiens
gccacagatagcact

SEQ ID NO: 126572 - DNA, 15 bp, Homo sapiens
agccacagatagcac

SEQ ID NO: 126573 - DNA, 15 bp, Homo sapiens
aagccacagatagca

SEQ ID NO: 126574 - DNA, 15 bp, Homo sapiens
gaagccacagatagc

SEQ ID NO: 126575 - DNA, 15 bp, Homo sapiens
tgaagccacagatag

SEQ ID NO: 126576 - DNA, 15 bp, Homo sapiens
ctgaagccacagata

SEQ ID NO: 126577 - DNA, 15 bp, Homo sapiens
cctgaagccacagat

SEQ ID NO: 126578 - DNA, 15 bp, Homo sapiens
gcctgaagccacaga

SEQ ID NO: 126579 - DNA, 15 bp, Homo sapiens
tgcctgaagccacag

SEQ ID NO: 126580 - DNA, 15 bp, Homo sapiens
atgcctgaagccaca

SEQ ID NO: 126581 - DNA, 15 bp, Homo sapiens
gatgcctgaagccac

SEQ ID NO: 126582 - DNA, 15 bp, Homo sapiens
ggatgcctgaagcca

SEQ ID NO: 126583 - DNA, 15 bp, Homo sapiens
tggatgcctgaagcc

SEQ ID NO: 126584 - DNA, 15 bp, Homo sapiens
gtggatgcctgaagc

SEQ ID NO: 126585 - DNA, 15 bp, Homo sapiens
tgtggatgcctgaag

SEQ ID NO: 126586 - DNA, 15 bp, Homo sapiens
ctgtggatgcctgaa

SEQ ID NO: 126587 - DNA, 15 bp, Homo sapiens
cctgtggatgcctga

SEQ ID NO: 126588 - DNA, 15 bp, Homo sapiens
ccctgtggatgcctg

SEQ ID NO: 126589 - DNA, 15 bp, Homo sapiens
cccctgtggatgcct

SEQ ID NO: 126590 - DNA, 15 bp, Homo sapiens
acccctgtggatgcc

SEQ ID NO: 126591 - DNA, 15 bp, Homo sapiens
aacccctgtggatgc

SEQ ID NO: 126592 - DNA, 15 bp, Homo sapiens
gaacccctgtggatg

SEQ ID NO: 126593 - DNA, 15 bp, Homo sapiens
agaacccctgtggat

SEQ ID NO: 126594 - DNA, 15 bp, Homo sapiens
cagaacccctgtgga

SEQ ID NO: 126595 - DNA, 15 bp, Homo sapiens
ccagaacccctgtgg

SEQ ID NO: 126596 - DNA, 15 bp, Homo sapiens
cccagaacccctgtg

SEQ ID NO: 126597 - DNA, 15 bp, Homo sapiens
tcccagaacccctgt

SEQ ID NO: 126598 - DNA, 15 bp, Homo sapiens
ttcccagaacccctg

SEQ ID NO: 126599 - DNA, 15 bp, Homo sapiens
cttcccagaacccct

SEQ ID NO: 126600 - DNA, 15 bp, Homo sapiens
ccttcccagaacccc

SEQ ID NO: 126601 - DNA, 15 bp, Homo sapiens
accttcccagaaccc

SEQ ID NO: 126602 - DNA, 15 bp, Homo sapiens
taccttcccagaacc

SEQ ID NO: 126603 - DNA, 15 bp, Homo sapiens
ataccttcccagaac

SEQ ID NO: 126604 - DNA, 15 bp, Homo sapiens
cataccttcccagaa

SEQ ID NO: 126605 - DNA, 15 bp, Homo sapiens
gcataccttcccaga

SEQ ID NO: 126606 - DNA, 15 bp, Homo sapiens
ggcataccttcccag

SEQ ID NO: 126607 - DNA, 15 bp, Homo sapiens
gggcataccttccca

SEQ ID NO: 126608 - DNA, 15 bp, Homo sapiens
agggcataccttccc

SEQ ID NO: 126609 - DNA, 15 bp, Homo sapiens
cagggcataccttcc

SEQ ID NO: 126610 - DNA, 15 bp, Homo sapiens
gcagggcataccttc

SEQ ID NO: 126611 - DNA, 15 bp, Homo sapiens
tgcagggcatacctt

SEQ ID NO: 126612 - DNA, 15 bp, Homo sapiens
ctgcagggcatacct

SEQ ID NO: 126613 - DNA, 15 bp, Homo sapiens
tctgcagggcatacc

SEQ ID NO: 126614 - DNA, 15 bp, Homo sapiens
ttctgcagggcatac

SEQ ID NO: 126615 - DNA, 15 bp, Homo sapiens
tttctgcagggcata

SEQ ID NO: 126616 - DNA, 15 bp, Homo sapiens
ttttctgcagggcat

SEQ ID NO: 126617 - DNA, 15 bp, Homo sapiens
cttttctgcagggca

SEQ ID NO: 126618 - DNA, 15 bp, Homo sapiens
acttttctgcagggc

SEQ ID NO: 126619 - DNA, 15 bp, Homo sapiens
cacttttctgcaggg

SEQ ID NO: 126620 - DNA, 15 bp, Homo sapiens
tcacttttctgcagg

SEQ ID NO: 126621 - DNA, 15 bp, Homo sapiens
ctcacttttctgcag

SEQ ID NO: 126622 - DNA, 15 bp, Homo sapiens
tctcacttttctgca

SEQ ID NO: 126623 - DNA, 15 bp, Homo sapiens
ctctcacttttctgc

SEQ ID NO: 126624 - DNA, 15 bp, Homo sapiens
tctctcacttttctg

SEQ ID NO: 126625 - DNA, 15 bp, Homo sapiens
gtctctcacttttct

SEQ ID NO: 126626 - DNA, 15 bp, Homo sapiens
agtctctcacttttc

SEQ ID NO: 126627 - DNA, 15 bp, Homo sapiens
tagtctctcactttt

SEQ ID NO: 126628 - DNA, 15 bp, Homo sapiens
gtagtctctcacttt

SEQ ID NO: 126629 - DNA, 15 bp, Homo sapiens
agtagtctctcactt

SEQ ID NO: 126630 - DNA, 15 bp, Homo sapiens
cagtagtctctcact

SEQ ID NO: 126631 - DNA, 15 bp, Homo sapiens
acagtagtctctcac

SEQ ID NO: 126632 - DNA, 15 bp, Homo sapiens
tacagtagtctctca

SEQ ID NO: 126633 - DNA, 15 bp, Homo sapiens
atacagtagtctctc

SEQ ID NO: 126634 - DNA, 15 bp, Homo sapiens
aatacagtagtctct

SEQ ID NO: 126635 - DNA, 15 bp, Homo sapiens
aaatacagtagtctc

SEQ ID NO: 126636 - DNA, 15 bp, Homo sapiens
taaatacagtagtct

SEQ ID NO: 126637 - DNA, 15 bp, Homo sapiens
ataaatacagtagtc

SEQ ID NO: 126638 - DNA, 15 bp, Homo sapiens
aataaatacagtagt

SEQ ID NO: 126639 - DNA, 15 bp, Homo sapiens
aaataaatacagtag

SEQ ID NO: 126640 - DNA, 15 bp, Homo sapiens
taaataaatacagta

SEQ ID NO: 126641 - DNA, 15 bp, Homo sapiens
gtaaataaatacagt

SEQ ID NO: 126642 - DNA, 15 bp, Homo sapiens
ggtaaataaatacag

SEQ ID NO: 126643 - DNA, 15 bp, Homo sapiens
aggtaaataaataca

SEQ ID NO: 126644 - DNA, 15 bp, Homo sapiens
caggtaaataaatac

SEQ ID NO: 126645 - DNA, 15 bp, Homo sapiens
gcaggtaaataaata

SEQ ID NO: 126646 - DNA, 15 bp, Homo sapiens
agcaggtaaataaat

SEQ ID NO: 126647 - DNA, 15 bp, Homo sapiens
tagcaggtaaataaa

SEQ ID NO: 126648 - DNA, 15 bp, Homo sapiens
gtagcaggtaaataa

SEQ ID NO: 126649 - DNA, 15 bp, Homo sapiens
agtagcaggtaaata

SEQ ID NO: 126650 - DNA, 15 bp, Homo sapiens
aagtagcaggtaaat

SEQ ID NO: 126651 - DNA, 15 bp, Homo sapiens
taagtagcaggtaaa

SEQ ID NO: 126652 - DNA, 15 bp, Homo sapiens
gtaagtagcaggtaa

SEQ ID NO: 126653 - DNA, 15 bp, Homo sapiens
tgtaagtagcaggta

SEQ ID NO: 126654 - DNA, 15 bp, Homo sapiens
ctgtaagtagcaggt

SEQ ID NO: 126655 - DNA, 15 bp, Homo sapiens
actgtaagtagcagg

SEQ ID NO: 126656 - DNA, 15 bp, Homo sapiens
cactgtaagtagcag

SEQ ID NO: 126657 - DNA, 15 bp, Homo sapiens
tcactgtaagtagca

SEQ ID NO: 126658 - DNA, 15 bp, Homo sapiens
atcactgtaagtagc

SEQ ID NO: 126659 - DNA, 15 bp, Homo sapiens
catcactgtaagtag

SEQ ID NO: 126660 - DNA, 15 bp, Homo sapiens
acatcactgtaagta

SEQ ID NO: 126661 - DNA, 15 bp, Homo sapiens
aacatcactgtaagt

SEQ ID NO: 126662 - DNA, 15 bp, Homo sapiens
caacatcactgtaag

SEQ ID NO: 126663 - DNA, 15 bp, Homo sapiens
ccaacatcactgtaa

SEQ ID NO: 126664 - DNA, 15 bp, Homo sapiens
accaacatcactgta

SEQ ID NO: 126665 - DNA, 15 bp, Homo sapiens
aaccaacatcactgt

SEQ ID NO: 126666 - DNA, 15 bp, Homo sapiens
aaaccaacatcactg

SEQ ID NO: 126667 - DNA, 15 bp, Homo sapiens
aaaaccaacatcact

SEQ ID NO: 126668 - DNA, 15 bp, Homo sapiens
gaaaaccaacatcac

SEQ ID NO: 126669 - DNA, 15 bp, Homo sapiens
ggaaaaccaacatca

SEQ ID NO: 126670 - DNA, 15 bp, Homo sapiens
tggaaaaccaacatc

SEQ ID NO: 126671 - DNA, 15 bp, Homo sapiens
ctggaaaaccaacat

SEQ ID NO: 126672 - DNA, 15 bp, Homo sapiens
cctggaaaaccaaca

SEQ ID NO: 126673 - DNA, 15 bp, Homo sapiens
tcctggaaaaccaac

SEQ ID NO: 126674 - DNA, 15 bp, Homo sapiens
ttcctggaaaaccaa

SEQ ID NO: 126675 - DNA, 15 bp, Homo sapiens
cttcctggaaaacca

SEQ ID NO: 126676 - DNA, 15 bp, Homo sapiens
tcttcctggaaaacc

SEQ ID NO: 126677 - DNA, 15 bp, Homo sapiens
atcttcctggaaaac

SEQ ID NO: 126678 - DNA, 15 bp, Homo sapiens
tatcttcctggaaaa

SEQ ID NO: 126679 - DNA, 15 bp, Homo sapiens
ctatcttcctggaaa

SEQ ID NO: 126680 - DNA, 15 bp, Homo sapiens
actatcttcctggaa

SEQ ID NO: 126681 - DNA, 15 bp, Homo sapiens
cactatcttcctgga

SEQ ID NO: 126682 - DNA, 15 bp, Homo sapiens
ccactatcttcctgg

SEQ ID NO: 126683 - DNA, 15 bp, Homo sapiens
accactatcttcctg

SEQ ID NO: 126684 - DNA, 15 bp, Homo sapiens
taccactatcttcct

SEQ ID NO: 126685 - DNA, 15 bp, Homo sapiens
ataccactatcttcc

SEQ ID NO: 126686 - DNA, 15 bp, Homo sapiens
tataccactatcttc

SEQ ID NO: 126687 - DNA, 15 bp, Homo sapiens
ctataccactatctt

SEQ ID NO: 126688 - DNA, 15 bp, Homo sapiens
tctataccactatct

SEQ ID NO: 126689 - DNA, 15 bp, Homo sapiens
ttctataccactatc

SEQ ID NO: 126690 - DNA, 15 bp, Homo sapiens
attctataccactat

SEQ ID NO: 126691 - DNA, 15 bp, Homo sapiens
aattctataccacta

SEQ ID NO: 126692 - DNA, 15 bp, Homo sapiens
aaattctataccact

SEQ ID NO: 126693 - DNA, 15 bp, Homo sapiens
gaaattctataccac

SEQ ID NO: 126694 - DNA, 15 bp, Homo sapiens
ggaaattctatacca

SEQ ID NO: 126695 - DNA, 15 bp, Homo sapiens
aggaaattctatacc

SEQ ID NO: 126696 - DNA, 15 bp, Homo sapiens
aaggaaattctatac

SEQ ID NO: 126697 - DNA, 15 bp, Homo sapiens
aaaggaaattctata

SEQ ID NO: 126698 - DNA, 15 bp, Homo sapiens
aaaaggaaattctat

SEQ ID NO: 126699 - DNA, 15 bp, Homo sapiens
caaaaggaaattcta

SEQ ID NO: 126700 - DNA, 15 bp, Homo sapiens
tcaaaaggaaattct

SEQ ID NO: 126701 - DNA, 15 bp, Homo sapiens
ttcaaaaggaaattc

SEQ ID NO: 126702 - DNA, 15 bp, Homo sapiens
tttcaaaaggaaatt

SEQ ID NO: 126703 - DNA, 15 bp, Homo sapiens
atttcaaaaggaaat

SEQ ID NO: 126704 - DNA, 15 bp, Homo sapiens
tatttcaaaaggaaa

SEQ ID NO: 126705 - DNA, 15 bp, Homo sapiens
ttatttcaaaaggaa

SEQ ID NO: 126706 - DNA, 15 bp, Homo sapiens
tttatttcaaaagga

SEQ ID NO: 126707 - DNA, 15 bp, Homo sapiens
atttatttcaaaagg

SEQ ID NO: 126708 - DNA, 15 bp, Homo sapiens
aatttatttcaaaag

SEQ ID NO: 126709 - DNA, 15 bp, Homo sapiens
aaatttatttcaaaa

SEQ ID NO: 126710 - DNA, 15 bp, Homo sapiens
taaatttatttcaaa

SEQ ID NO: 126711 - DNA, 15 bp, Homo sapiens
ctaaatttatttcaa

SEQ ID NO: 126712 - DNA, 15 bp, Homo sapiens
cctaaatttatttca

SEQ ID NO: 126713 - DNA, 15 bp, Homo sapiens
acctaaatttatttc

SEQ ID NO: 126714 - DNA, 15 bp, Homo sapiens
tacctaaatttattt

SEQ ID NO: 126715 - DNA, 15 bp, Homo sapiens
ttacctaaatttatt

SEQ ID NO: 126716 - DNA, 15 bp, Homo sapiens
tttacctaaatttat

SEQ ID NO: 126717 - DNA, 15 bp, Homo sapiens
atttacctaaattta

SEQ ID NO: 126718 - DNA, 15 bp, Homo sapiens
tatttacctaaattt

SEQ ID NO: 126719 - DNA, 15 bp, Homo sapiens
ttatttacctaaatt

SEQ ID NO: 126720 - DNA, 15 bp, Homo sapiens
tttatttacctaaat

SEQ ID NO: 126721 - DNA, 15 bp, Homo sapiens
ttttatttacctaaa

SEQ ID NO: 126722 - DNA, 15 bp, Homo sapiens
cttttatttacctaa

SEQ ID NO: 126723 - DNA, 15 bp, Homo sapiens
acttttatttaccta

SEQ ID NO: 126724 - DNA, 15 bp, Homo sapiens
tacttttatttacct

SEQ ID NO: 126725 - DNA, 15 bp, Homo sapiens
ctacttttatttacc

SEQ ID NO: 126726 - DNA, 15 bp, Homo sapiens
actacttttatttac

SEQ ID NO: 126727 - DNA, 15 bp, Homo sapiens
gactacttttattta

SEQ ID NO: 126728 - DNA, 15 bp, Homo sapiens
agactacttttattt

SEQ ID NO: 126729 - DNA, 15 bp, Homo sapiens
tagactacttttatt

SEQ ID NO: 126730 - DNA, 15 bp, Homo sapiens
atagactacttttat

SEQ ID NO: 126731 - DNA, 15 bp, Homo sapiens
aatagactactttta

SEQ ID NO: 126732 - DNA, 15 bp, Homo sapiens
caatagactactttt

SEQ ID NO: 126733 - DNA, 15 bp, Homo sapiens
tcaatagactacttt

SEQ ID NO: 126734 - DNA, 15 bp, Homo sapiens
ttcaatagactactt

SEQ ID NO: 126735 - DNA, 15 bp, Homo sapiens
cttcaatagactact

SEQ ID NO: 126736 - DNA, 15 bp, Homo sapiens
tcttcaatagactac

SEQ ID NO: 126737 - DNA, 15 bp, Homo sapiens
gtcttcaatagacta

SEQ ID NO: 126738 - DNA, 15 bp, Homo sapiens
tgtcttcaatagact

SEQ ID NO: 126739 - DNA, 15 bp, Homo sapiens
ttgtcttcaatagac

SEQ ID NO: 126740 - DNA, 15 bp, Homo sapiens
tttgtcttcaataga

SEQ ID NO: 126741 - DNA, 15 bp, Homo sapiens
atttgtcttcaatag

SEQ ID NO: 126742 - DNA, 15 bp, Homo sapiens
tatttgtcttcaata

SEQ ID NO: 126743 - DNA, 15 bp, Homo sapiens
atatttgtcttcaat

SEQ ID NO: 126744 - DNA, 15 bp, Homo sapiens
aatatttgtcttcaa

SEQ ID NO: 126745 - DNA, 15 bp, Homo sapiens
taatatttgtcttca

SEQ ID NO: 126746 - DNA, 15 bp, Homo sapiens
ctaatatttgtcttc

SEQ ID NO: 126747 - DNA, 15 bp, Homo sapiens
actaatatttgtctt

SEQ ID NO: 126748 - DNA, 15 bp, Homo sapiens
tactaatatttgtct

SEQ ID NO: 126749 - DNA, 15 bp, Homo sapiens
ttactaatatttgtc

SEQ ID NO: 126750 - DNA, 15 bp, Homo sapiens
cttactaatatttgt

SEQ ID NO: 126751 - DNA, 15 bp, Homo sapiens
acttactaatatttg

SEQ ID NO: 126752 - DNA, 15 bp, Homo sapiens
tacttactaatattt

SEQ ID NO: 126753 - DNA, 15 bp, Homo sapiens
ttacttactaatatt

SEQ ID NO: 126754 - DNA, 15 bp, Homo sapiens
attacttactaatat

SEQ ID NO: 126755 - DNA, 15 bp, Homo sapiens
aattacttactaata

SEQ ID NO: 126756 - DNA, 15 bp, Homo sapiens
caattacttactaat

SEQ ID NO: 126757 - DNA, 15 bp, Homo sapiens
tcaattacttactaa

SEQ ID NO: 126758 - DNA, 15 bp, Homo sapiens
ttcaattacttacta

SEQ ID NO: 126759 - DNA, 15 bp, Homo sapiens
tttcaattacttact

SEQ ID NO: 126760 - DNA, 15 bp, Homo sapiens
ttttcaattacttac

SEQ ID NO: 126761 - DNA, 15 bp, Homo sapiens
cttttcaattactta

SEQ ID NO: 126762 - DNA, 15 bp, Homo sapiens
ccttttcaattactt

SEQ ID NO: 126763 - DNA, 15 bp, Homo sapiens
gccttttcaattact

SEQ ID NO: 126764 - DNA, 15 bp, Homo sapiens
tgccttttcaattac

SEQ ID NO: 126765 - DNA, 15 bp, Homo sapiens
ctgccttttcaatta

SEQ ID NO: 126766 - DNA, 15 bp, Homo sapiens
actgccttttcaatt

SEQ ID NO: 126767 - DNA, 15 bp, Homo sapiens
tactgccttttcaat

SEQ ID NO: 126768 - DNA, 15 bp, Homo sapiens
atactgccttttcaa

SEQ ID NO: 126769 - DNA, 15 bp, Homo sapiens
catactgccttttca

SEQ ID NO: 126770 - DNA, 15 bp, Homo sapiens
tcatactgccttttc

SEQ ID NO: 126771 - DNA, 15 bp, Homo sapiens
gtcatactgcctttt

SEQ ID NO: 126772 - DNA, 15 bp, Homo sapiens
cgtcatactgccttt

SEQ ID NO: 126773 - DNA, 15 bp, Homo sapiens
tcgtcatactgcctt

SEQ ID NO: 126774 - DNA, 15 bp, Homo sapiens
atcgtcatactgcct

SEQ ID NO: 126775 - DNA, 15 bp, Homo sapiens
tatcgtcatactgcc

SEQ ID NO: 126776 - DNA, 15 bp, Homo sapiens
atatcgtcatactgc

SEQ ID NO: 126777 - DNA, 15 bp, Homo sapiens
catatcgtcatactg

SEQ ID NO: 126778 - DNA, 15 bp, Homo sapiens
ccatatcgtcatact

SEQ ID NO: 126779 - DNA, 15 bp, Homo sapiens
accatatcgtcatac

SEQ ID NO: 126780 - DNA, 15 bp, Homo sapiens
gaccatatcgtcata

SEQ ID NO: 126781 - DNA, 15 bp, Homo sapiens
tgaccatatcgtcat

SEQ ID NO: 126782 - DNA, 15 bp, Homo sapiens
ttgaccatatcgtca

SEQ ID NO: 126783 - DNA, 15 bp, Homo sapiens
tttgaccatatcgtc

SEQ ID NO: 126784 - DNA, 15 bp, Homo sapiens
ttttgaccatatcgt

SEQ ID NO: 126785 - DNA, 15 bp, Homo sapiens
attttgaccatatcg

SEQ ID NO: 126786 - DNA, 15 bp, Homo sapiens
aattttgaccatatc

SEQ ID NO: 126787 - DNA, 15 bp, Homo sapiens
caattttgaccatat

SEQ ID NO: 126788 - DNA, 15 bp, Homo sapiens
acaattttgaccata

SEQ ID NO: 126789 - DNA, 15 bp, Homo sapiens
cacaattttgaccat

SEQ ID NO: 126790 - DNA, 15 bp, Homo sapiens
tcacaattttgacca

SEQ ID NO: 126791 - DNA, 15 bp, Homo sapiens
ttcacaattttgacc

SEQ ID NO: 126792 - DNA, 15 bp, Homo sapiens
cttcacaattttgac

SEQ ID NO: 126793 - DNA, 15 bp, Homo sapiens
ccttcacaattttga

SEQ ID NO: 126794 - DNA, 15 bp, Homo sapiens
accttcacaattttg

SEQ ID NO: 126795 - DNA, 15 bp, Homo sapiens
caccttcacaatttt

SEQ ID NO: 126796 - DNA, 15 bp, Homo sapiens
ccaccttcacaattt

SEQ ID NO: 126797 - DNA, 15 bp, Homo sapiens
accaccttcacaatt

SEQ ID NO: 126798 - DNA, 15 bp, Homo sapiens
gaccaccttcacaat

SEQ ID NO: 126799 - DNA, 15 bp, Homo sapiens
agaccaccttcacaa

SEQ ID NO: 126800 - DNA, 15 bp, Homo sapiens
tagaccaccttcaca

SEQ ID NO: 126801 - DNA, 15 bp, Homo sapiens
ttagaccaccttcac

SEQ ID NO: 126802 - DNA, 15 bp, Homo sapiens
cttagaccaccttca

SEQ ID NO: 126803 - DNA, 15 bp, Homo sapiens
gcttagaccaccttc

SEQ ID NO: 126804 - DNA, 15 bp, Homo sapiens
tgcttagaccacctt

SEQ ID NO: 126805 - DNA, 15 bp, Homo sapiens
atgcttagaccacct

SEQ ID NO: 126806 - DNA, 15 bp, Homo sapiens
aatgcttagaccacc

SEQ ID NO: 126807 - DNA, 15 bp, Homo sapiens
taatgcttagaccac

SEQ ID NO: 126808 - DNA, 15 bp, Homo sapiens
ctaatgcttagacca

SEQ ID NO: 126809 - DNA, 15 bp, Homo sapiens
cctaatgcttagacc

SEQ ID NO: 126810 - DNA, 15 bp, Homo sapiens
ccctaatgcttagac

SEQ ID NO: 126811 - DNA, 15 bp, Homo sapiens
tccctaatgcttaga

SEQ ID NO: 126812 - DNA, 15 bp, Homo sapiens
ttccctaatgcttag

SEQ ID NO: 126813 - DNA, 15 bp, Homo sapiens
tttccctaatgctta

SEQ ID NO: 126814 - DNA, 15 bp, Homo sapiens
atttccctaatgctt

SEQ ID NO: 126815 - DNA, 15 bp, Homo sapiens
tatttccctaatgct

SEQ ID NO: 126816 - DNA, 15 bp, Homo sapiens
atatttccctaatgc

SEQ ID NO: 126817 - DNA, 15 bp, Homo sapiens
catatttccctaatg

SEQ ID NO: 126818 - DNA, 15 bp, Homo sapiens
acatatttccctaat

SEQ ID NO: 126819 - DNA, 15 bp, Homo sapiens
cacatatttccctaa

SEQ ID NO: 126820 - DNA, 15 bp, Homo sapiens
gcacatatttcccta

SEQ ID NO: 126821 - DNA, 15 bp, Homo sapiens
tgcacatatttccct

SEQ ID NO: 126822 - DNA, 15 bp, Homo sapiens
atgcacatatttccc

SEQ ID NO: 126823 - DNA, 15 bp, Homo sapiens
aatgcacatatttcc

SEQ ID NO: 126824 - DNA, 15 bp, Homo sapiens
caatgcacatatttc

SEQ ID NO: 126825 - DNA, 15 bp, Homo sapiens
tcaatgcacatattt

SEQ ID NO: 126826 - DNA, 15 bp, Homo sapiens
ttcaatgcacatatt

SEQ ID NO: 126827 - DNA, 15 bp, Homo sapiens
attcaatgcacatat

SEQ ID NO: 126828 - DNA, 15 bp, Homo sapiens
aattcaatgcacata

SEQ ID NO: 126829 - DNA, 15 bp, Homo sapiens
aaattcaatgcacat

SEQ ID NO: 126830 - DNA, 15 bp, Homo sapiens
aaaattcaatgcaca

SEQ ID NO: 126831 - DNA, 15 bp, Homo sapiens
caaaattcaatgcac

SEQ ID NO: 126832 - DNA, 15 bp, Homo sapiens
ccaaaattcaatgca

SEQ ID NO: 126833 - DNA, 15 bp, Homo sapiens
cccaaaattcaatgc

SEQ ID NO: 126834 - DNA, 15 bp, Homo sapiens
tcccaaaattcaatg

SEQ ID NO: 126835 - DNA, 15 bp, Homo sapiens
gtcccaaaattcaat

SEQ ID NO: 126836 - DNA, 15 bp, Homo sapiens
tgtcccaaaattcaa

SEQ ID NO: 126837 - DNA, 15 bp, Homo sapiens
atgtcccaaaattca

SEQ ID NO: 126838 - DNA, 15 bp, Homo sapiens
catgtcccaaaattc

SEQ ID NO: 126839 - DNA, 15 bp, Homo sapiens
acatgtcccaaaatt

SEQ ID NO: 126840 - DNA, 15 bp, Homo sapiens
tacatgtcccaaaat

SEQ ID NO: 126841 - DNA, 15 bp, Homo sapiens
ttacatgtcccaaaa

SEQ ID NO: 126842 - DNA, 15 bp, Homo sapiens
tttacatgtcccaaa

SEQ ID NO: 126843 - DNA, 15 bp, Homo sapiens
atttacatgtcccaa

SEQ ID NO: 126844 - DNA, 15 bp, Homo sapiens
aatttacatgtccca

SEQ ID NO: 126845 - DNA, 15 bp, Homo sapiens
caatttacatgtccc

SEQ ID NO: 126846 - DNA, 15 bp, Homo sapiens
gcaatttacatgtcc

SEQ ID NO: 126847 - DNA, 15 bp, Homo sapiens
ggcaatttacatgtc

SEQ ID NO: 126848 - DNA, 15 bp, Homo sapiens
gggcaatttacatgt

SEQ ID NO: 126849 - DNA, 15 bp, Homo sapiens
tgggcaatttacatg

SEQ ID NO: 126850 - DNA, 15 bp, Homo sapiens
atgggcaatttacat

SEQ ID NO: 126851 - DNA, 15 bp, Homo sapiens
aatgggcaatttaca

SEQ ID NO: 126852 - DNA, 15 bp, Homo sapiens
taatgggcaatttac

SEQ ID NO: 126853 - DNA, 15 bp, Homo sapiens
ataatgggcaattta

SEQ ID NO: 126854 - DNA, 15 bp, Homo sapiens
cataatgggcaattt

SEQ ID NO: 126855 - DNA, 15 bp, Homo sapiens
ccataatgggcaatt

SEQ ID NO: 126856 - DNA, 15 bp, Homo sapiens
accataatgggcaat

SEQ ID NO: 126857 - DNA, 15 bp, Homo sapiens
gaccataatgggcaa

SEQ ID NO: 126858 - DNA, 15 bp, Homo sapiens
agaccataatgggca

SEQ ID NO: 126859 - DNA, 15 bp, Homo sapiens
gagaccataatgggc

SEQ ID NO: 126860 - DNA, 15 bp, Homo sapiens
agagaccataatggg

SEQ ID NO: 126861 - DNA, 15 bp, Homo sapiens
cagagaccataatgg

SEQ ID NO: 126862 - DNA, 15 bp, Homo sapiens
ccagagaccataatg

SEQ ID NO: 126863 - DNA, 15 bp, Homo sapiens
gccagagaccataat

SEQ ID NO: 126864 - DNA, 15 bp, Homo sapiens
ggccagagaccataa

SEQ ID NO: 126865 - DNA, 15 bp, Homo sapiens
aggccagagaccata

SEQ ID NO: 126866 - DNA, 15 bp, Homo sapiens
gaggccagagaccat

SEQ ID NO: 126867 - DNA, 15 bp, Homo sapiens
tgaggccagagacca

SEQ ID NO: 126868 - DNA, 15 bp, Homo sapiens
ttgaggccagagacc

SEQ ID NO: 126869 - DNA, 15 bp, Homo sapiens
gttgaggccagagac

SEQ ID NO: 126870 - DNA, 15 bp, Homo sapiens
agttgaggccagaga

SEQ ID NO: 126871 - DNA, 15 bp, Homo sapiens
tagttgaggccagag

SEQ ID NO: 126872 - DNA, 15 bp, Homo sapiens
atagttgaggccaga

SEQ ID NO: 126873 - DNA, 15 bp, Homo sapiens
aatagttgaggccag

SEQ ID NO: 126874 - DNA, 15 bp, Homo sapiens
taatagttgaggcca

SEQ ID NO: 126875 - DNA, 15 bp, Homo sapiens
ataatagttgaggcc

SEQ ID NO: 126876 - DNA, 15 bp, Homo sapiens
aataatagttgaggc

SEQ ID NO: 126877 - DNA, 15 bp, Homo sapiens
gaataatagttgagg

SEQ ID NO: 126878 - DNA, 15 bp, Homo sapiens
ggaataatagttgag

SEQ ID NO: 126879 - DNA, 15 bp, Homo sapiens
gggaataatagttga

SEQ ID NO: 126880 - DNA, 15 bp, Homo sapiens
ggggaataatagttg

SEQ ID NO: 126881 - DNA, 15 bp, Homo sapiens
aggggaataatagtt

SEQ ID NO: 126882 - DNA, 15 bp, Homo sapiens
taggggaataatagt

SEQ ID NO: 126883 - DNA, 15 bp, Homo sapiens
ctaggggaataatag

SEQ ID NO: 126884 - DNA, 15 bp, Homo sapiens
tctaggggaataata

SEQ ID NO: 126885 - DNA, 15 bp, Homo sapiens
ttctaggggaataat

SEQ ID NO: 126886 - DNA, 15 bp, Homo sapiens
cttctaggggaataa

SEQ ID NO: 126887 - DNA, 15 bp, Homo sapiens
ccttctaggggaata

SEQ ID NO: 126888 - DNA, 15 bp, Homo sapiens
tccttctaggggaat

SEQ ID NO: 126889 - DNA, 15 bp, Homo sapiens
ttccttctaggggaa

SEQ ID NO: 126890 - DNA, 15 bp, Homo sapiens
cttccttctagggga

SEQ ID NO: 126891 - DNA, 15 bp, Homo sapiens
ccttccttctagggg

SEQ ID NO: 126892 - DNA, 15 bp, Homo sapiens
cccttccttctaggg

SEQ ID NO: 126893 - DNA, 15 bp, Homo sapiens
gcccttccttctagg

SEQ ID NO: 126894 - DNA, 15 bp, Homo sapiens
tgcccttccttctag

SEQ ID NO: 126895 - DNA, 15 bp, Homo sapiens
atgcccttccttcta

SEQ ID NO: 126896 - DNA, 15 bp, Homo sapiens
catgcccttccttct

SEQ ID NO: 126897 - DNA, 15 bp, Homo sapiens
gcatgcccttccttc

SEQ ID NO: 126898 - DNA, 15 bp, Homo sapiens
ggcatgcccttcctt

SEQ ID NO: 126899 - DNA, 15 bp, Homo sapiens
gggcatgcccttcct

SEQ ID NO: 126900 - DNA, 15 bp, Homo sapiens
agggcatgcccttcc

SEQ ID NO: 126901 - DNA, 15 bp, Homo sapiens
cagggcatgcccttc

SEQ ID NO: 126902 - DNA, 15 bp, Homo sapiens
gcagggcatgccctt

SEQ ID NO: 126903 - DNA, 15 bp, Homo sapiens
ggcagggcatgccct

SEQ ID NO: 126904 - DNA, 15 bp, Homo sapiens
aggcagggcatgccc

SEQ ID NO: 126905 - DNA, 15 bp, Homo sapiens
taggcagggcatgcc

SEQ ID NO: 126906 - DNA, 15 bp, Homo sapiens
gtaggcagggcatgc

SEQ ID NO: 126907 - DNA, 15 bp, Homo sapiens
tgtaggcagggcatg

SEQ ID NO: 126908 - DNA, 15 bp, Homo sapiens
atgtaggcagggcat

SEQ ID NO: 126909 - DNA, 15 bp, Homo sapiens
catgtaggcagggca

SEQ ID NO: 126910 - DNA, 15 bp, Homo sapiens
gcatgtaggcagggc

SEQ ID NO: 126911 - DNA, 15 bp, Homo sapiens
agcatgtaggcaggg

SEQ ID NO: 126912 - DNA, 15 bp, Homo sapiens
aagcatgtaggcagg

SEQ ID NO: 126913 - DNA, 15 bp, Homo sapiens
aaagcatgtaggcag

SEQ ID NO: 126914 - DNA, 15 bp, Homo sapiens
aaaagcatgtaggca

SEQ ID NO: 126915 - DNA, 15 bp, Homo sapiens
aaaaagcatgtaggc

SEQ ID NO: 126916 - DNA, 15 bp, Homo sapiens
gaaaaagcatgtagg

SEQ ID NO: 126917 - DNA, 15 bp, Homo sapiens
agaaaaagcatgtag

SEQ ID NO: 126918 - DNA, 15 bp, Homo sapiens
gagaaaaagcatgta

SEQ ID NO: 126919 - DNA, 15 bp, Homo sapiens
agagaaaaagcatgt

SEQ ID NO: 126920 - DNA, 15 bp, Homo sapiens
cagagaaaaagcatg

SEQ ID NO: 126921 - DNA, 15 bp, Homo sapiens
gcagagaaaaagcat

SEQ ID NO: 126922 - DNA, 15 bp, Homo sapiens
ggcagagaaaaagca

SEQ ID NO: 126923 - DNA, 15 bp, Homo sapiens
aggcagagaaaaagc

SEQ ID NO: 126924 - DNA, 15 bp, Homo sapiens
taggcagagaaaaag

SEQ ID NO: 126925 - DNA, 15 bp, Homo sapiens
gtaggcagagaaaaa

SEQ ID NO: 126926 - DNA, 15 bp, Homo sapiens
ggtaggcagagaaaa

SEQ ID NO: 126927 - DNA, 15 bp, Homo sapiens
tggtaggcagagaaa

SEQ ID NO: 126928 - DNA, 15 bp, Homo sapiens
gtggtaggcagagaa

SEQ ID NO: 126929 - DNA, 15 bp, Homo sapiens
ggtggtaggcagaga

SEQ ID NO: 126930 - DNA, 15 bp, Homo sapiens
aggtggtaggcagag

SEQ ID NO: 126931 - DNA, 15 bp, Homo sapiens
gaggtggtaggcaga

SEQ ID NO: 126932 - DNA, 15 bp, Homo sapiens
tgaggtggtaggcag

SEQ ID NO: 126933 - DNA, 15 bp, Homo sapiens
ctgaggtggtaggca

SEQ ID NO: 126934 - DNA, 15 bp, Homo sapiens
gctgaggtggtaggc

SEQ ID NO: 126935 - DNA, 15 bp, Homo sapiens
agctgaggtggtagg

SEQ ID NO: 126936 - DNA, 15 bp, Homo sapiens
gagctgaggtggtag

SEQ ID NO: 126937 - DNA, 15 bp, Homo sapiens
ggagctgaggtggta

SEQ ID NO: 126938 - DNA, 15 bp, Homo sapiens
gggagctgaggtggt

SEQ ID NO: 126939 - DNA, 15 bp, Homo sapiens
tgggagctgaggtgg

SEQ ID NO: 126940 - DNA, 15 bp, Homo sapiens
ctgggagctgaggtg

SEQ ID NO: 126941 - DNA, 15 bp, Homo sapiens
cctgggagctgaggt

SEQ ID NO: 126942 - DNA, 15 bp, Homo sapiens
gcctgggagctgagg

SEQ ID NO: 126943 - DNA, 15 bp, Homo sapiens
tgcctgggagctgag

SEQ ID NO: 126944 - DNA, 15 bp, Homo sapiens
ctgcctgggagctga

SEQ ID NO: 126945 - DNA, 15 bp, Homo sapiens
actgcctgggagctg

SEQ ID NO: 126946 - DNA, 15 bp, Homo sapiens
cactgcctgggagct

SEQ ID NO: 126947 - DNA, 15 bp, Homo sapiens
gcactgcctgggagc

SEQ ID NO: 126948 - DNA, 15 bp, Homo sapiens
agcactgcctgggag

SEQ ID NO: 126949 - DNA, 15 bp, Homo sapiens
cagcactgcctggga

SEQ ID NO: 126950 - DNA, 15 bp, Homo sapiens
tcagcactgcctggg

SEQ ID NO: 126951 - DNA, 15 bp, Homo sapiens
atcagcactgcctgg

SEQ ID NO: 126952 - DNA, 15 bp, Homo sapiens
gatcagcactgcctg

SEQ ID NO: 126953 - DNA, 15 bp, Homo sapiens
agatcagcactgcct

SEQ ID NO: 126954 - DNA, 15 bp, Homo sapiens
gagatcagcactgcc

SEQ ID NO: 126955 - DNA, 15 bp, Homo sapiens
tgagatcagcactgc

SEQ ID NO: 126956 - DNA, 15 bp, Homo sapiens
gtgagatcagcactg

SEQ ID NO: 126957 - DNA, 15 bp, Homo sapiens
ggtgagatcagcact

SEQ ID NO: 126958 - DNA, 15 bp, Homo sapiens
tggtgagatcagcac

SEQ ID NO: 126959 - DNA, 15 bp, Homo sapiens
ctggtgagatcagca

SEQ ID NO: 126960 - DNA, 15 bp, Homo sapiens
actggtgagatcagc

SEQ ID NO: 126961 - DNA, 15 bp, Homo sapiens
gactggtgagatcag

SEQ ID NO: 126962 - DNA, 15 bp, Homo sapiens
agactggtgagatca

SEQ ID NO: 126963 - DNA, 15 bp, Homo sapiens
aagactggtgagatc

SEQ ID NO: 126964 - DNA, 15 bp, Homo sapiens
gaagactggtgagat

SEQ ID NO: 126965 - DNA, 15 bp, Homo sapiens
tgaagactggtgaga

SEQ ID NO: 126966 - DNA, 15 bp, Homo sapiens
atgaagactggtgag

SEQ ID NO: 126967 - DNA, 15 bp, Homo sapiens
catgaagactggtga

SEQ ID NO: 126968 - DNA, 15 bp, Homo sapiens
ccatgaagactggtg

SEQ ID NO: 126969 - DNA, 15 bp, Homo sapiens
tccatgaagactggt

SEQ ID NO: 126970 - DNA, 15 bp, Homo sapiens
ttccatgaagactgg

SEQ ID NO: 126971 - DNA, 15 bp, Homo sapiens
cttccatgaagactg

SEQ ID NO: 126972 - DNA, 15 bp, Homo sapiens
tcttccatgaagact

SEQ ID NO: 126973 - DNA, 15 bp, Homo sapiens
gtcttccatgaagac

SEQ ID NO: 126974 - DNA, 15 bp, Homo sapiens
ggtcttccatgaaga

SEQ ID NO: 126975 - DNA, 15 bp, Homo sapiens
gggtcttccatgaag

SEQ ID NO: 126976 - DNA, 15 bp, Homo sapiens
tgggtcttccatgaa

SEQ ID NO: 126977 - DNA, 15 bp, Homo sapiens
ctgggtcttccatga

SEQ ID NO: 126978 - DNA, 15 bp, Homo sapiens
cctgggtcttccatg

SEQ ID NO: 126979 - DNA, 15 bp, Homo sapiens
ccctgggtcttccat

SEQ ID NO: 126980 - DNA, 15 bp, Homo sapiens
tccctgggtcttcca

SEQ ID NO: 126981 - DNA, 15 bp, Homo sapiens
ttccctgggtcttcc

SEQ ID NO: 126982 - DNA, 15 bp, Homo sapiens
cttccctgggtcttc

SEQ ID NO: 126983 - DNA, 15 bp, Homo sapiens
tcttccctgggtctt

SEQ ID NO: 126984 - DNA, 15 bp, Homo sapiens
ctcttccctgggtct

SEQ ID NO: 126985 - DNA, 15 bp, Homo sapiens
tctcttccctgggtc

SEQ ID NO: 126986 - DNA, 15 bp, Homo sapiens
ctctcttccctgggt

SEQ ID NO: 126987 - DNA, 15 bp, Homo sapiens
tctctcttccctggg

SEQ ID NO: 126988 - DNA, 15 bp, Homo sapiens
ctctctcttccctgg

SEQ ID NO: 126989 - DNA, 15 bp, Homo sapiens
gctctctcttccctg

SEQ ID NO: 126990 - DNA, 15 bp, Homo sapiens
ggctctctcttccct

SEQ ID NO: 126991 - DNA, 15 bp, Homo sapiens
cggctctctcttccc

SEQ ID NO: 126992 - DNA, 15 bp, Homo sapiens
tcggctctctcttcc

SEQ ID NO: 126993 - DNA, 15 bp, Homo sapiens
ctcggctctctcttc

SEQ ID NO: 126994 - DNA, 15 bp, Homo sapiens
gctcggctctctctt

SEQ ID NO: 126995 - DNA, 15 bp, Homo sapiens
cgctcggctctctct

SEQ ID NO: 126996 - DNA, 15 bp, Homo sapiens
tcgctcggctctctc

SEQ ID NO: 126997 - DNA, 15 bp, Homo sapiens
ctcgctcggctctct

SEQ ID NO: 126998 - DNA, 15 bp, Homo sapiens
gctcgctcggctctc

SEQ ID NO: 126999 - DNA, 15 bp, Homo sapiens
ggctcgctcggctct

SEQ ID NO: 127000 - DNA, 15 bp, Homo sapiens
gggctcgctcggctc

SEQ ID NO: 127001 - DNA, 15 bp, Homo sapiens
agggctcgctcggct

SEQ ID NO: 127002 - DNA, 15 bp, Homo sapiens
gagggctcgctcggc

SEQ ID NO: 127003 - DNA, 15 bp, Homo sapiens
agagggctcgctcgg

SEQ ID NO: 127004 - DNA, 15 bp, Homo sapiens
cagagggctcgctcg

SEQ ID NO: 127005 - DNA, 15 bp, Homo sapiens
ccagagggctcgctc

SEQ ID NO: 127006 - DNA, 15 bp, Homo sapiens
cccagagggctcgct

SEQ ID NO: 127007 - DNA, 15 bp, Homo sapiens
gcccagagggctcgc

SEQ ID NO: 127008 - DNA, 15 bp, Homo sapiens
tgcccagagggctcg

SEQ ID NO: 127009 - DNA, 15 bp, Homo sapiens
ctgcccagagggctc

SEQ ID NO: 127010 - DNA, 15 bp, Homo sapiens
actgcccagagggct

SEQ ID NO: 127011 - DNA, 15 bp, Homo sapiens
cactgcccagagggc

SEQ ID NO: 127012 - DNA, 15 bp, Homo sapiens
gcactgcccagaggg

SEQ ID NO: 127013 - DNA, 15 bp, Homo sapiens
cgcactgcccagagg

SEQ ID NO: 127014 - DNA, 15 bp, Homo sapiens
tcgcactgcccagag

SEQ ID NO: 127015 - DNA, 15 bp, Homo sapiens
atcgcactgcccaga

SEQ ID NO: 127016 - DNA, 15 bp, Homo sapiens
catcgcactgcccag

SEQ ID NO: 127017 - DNA, 15 bp, Homo sapiens
acatcgcactgccca

SEQ ID NO: 127018 - DNA, 15 bp, Homo sapiens
cacatcgcactgccc

SEQ ID NO: 127019 - DNA, 15 bp, Homo sapiens
acacatcgcactgcc

SEQ ID NO: 127020 - DNA, 15 bp, Homo sapiens
cacacatcgcactgc

SEQ ID NO: 127021 - DNA, 15 bp, Homo sapiens
gcacacatcgcactg

SEQ ID NO: 127022 - DNA, 15 bp, Homo sapiens
ggcacacatcgcact

SEQ ID NO: 127023 - DNA, 15 bp, Homo sapiens
aggcacacatcgcac

SEQ ID NO: 127024 - DNA, 15 bp, Homo sapiens
caggcacacatcgca

SEQ ID NO: 127025 - DNA, 15 bp, Homo sapiens
gcaggcacacatcgc

SEQ ID NO: 127026 - DNA, 15 bp, Homo sapiens
tgcaggcacacatcg

SEQ ID NO: 127027 - DNA, 15 bp, Homo sapiens
atgcaggcacacatc

SEQ ID NO: 127028 - DNA, 15 bp, Homo sapiens
aatgcaggcacacat

SEQ ID NO: 127029 - DNA, 15 bp, Homo sapiens
gaatgcaggcacaca

SEQ ID NO: 127030 - DNA, 15 bp, Homo sapiens
agaatgcaggcacac

SEQ ID NO: 127031 - DNA, 15 bp, Homo sapiens
cagaatgcaggcaca

SEQ ID NO: 127032 - DNA, 15 bp, Homo sapiens
acagaatgcaggcac

SEQ ID NO: 127033 - DNA, 15 bp, Homo sapiens
aacagaatgcaggca

SEQ ID NO: 127034 - DNA, 15 bp, Homo sapiens
aaacagaatgcaggc

SEQ ID NO: 127035 - DNA, 15 bp, Homo sapiens
taaacagaatgcagg

SEQ ID NO: 127036 - DNA, 15 bp, Homo sapiens
ctaaacagaatgcag

SEQ ID NO: 127037 - DNA, 15 bp, Homo sapiens
actaaacagaatgca

SEQ ID NO: 127038 - DNA, 15 bp, Homo sapiens
aactaaacagaatgc

SEQ ID NO: 127039 - DNA, 15 bp, Homo sapiens
aaactaaacagaatg

SEQ ID NO: 127040 - DNA, 15 bp, Homo sapiens
caaactaaacagaat

SEQ ID NO: 127041 - DNA, 15 bp, Homo sapiens
acaaactaaacagaa

SEQ ID NO: 127042 - DNA, 15 bp, Homo sapiens
tacaaactaaacaga

SEQ ID NO: 127043 - DNA, 15 bp, Homo sapiens
ttacaaactaaacag

SEQ ID NO: 127044 - DNA, 15 bp, Homo sapiens
tttacaaactaaaca

SEQ ID NO: 127045 - DNA, 15 bp, Homo sapiens
atttacaaactaaac

SEQ ID NO: 127046 - DNA, 15 bp, Homo sapiens
aatttacaaactaaa

SEQ ID NO: 127047 - DNA, 15 bp, Homo sapiens
caatttacaaactaa

SEQ ID NO: 127048 - DNA, 15 bp, Homo sapiens
ccaatttacaaacta

SEQ ID NO: 127049 - DNA, 15 bp, Homo sapiens
accaatttacaaact

SEQ ID NO: 127050 - DNA, 15 bp, Homo sapiens
aaccaatttacaaac

SEQ ID NO: 127051 - DNA, 15 bp, Homo sapiens
gaaccaatttacaaa

SEQ ID NO: 127052 - DNA, 15 bp, Homo sapiens
agaaccaatttacaa

SEQ ID NO: 127053 - DNA, 15 bp, Homo sapiens
cagaaccaatttaca

SEQ ID NO: 127054 - DNA, 15 bp, Homo sapiens
tcagaaccaatttac

SEQ ID NO: 127055 - DNA, 15 bp, Homo sapiens
gtcagaaccaattta

SEQ ID NO: 127056 - DNA, 15 bp, Homo sapiens
agtcagaaccaattt

SEQ ID NO: 127057 - DNA, 15 bp, Homo sapiens
gagtcagaaccaatt

SEQ ID NO: 127058 - DNA, 15 bp, Homo sapiens
tgagtcagaaccaat

SEQ ID NO: 127059 - DNA, 15 bp, Homo sapiens
ttgagtcagaaccaa

SEQ ID NO: 127060 - DNA, 15 bp, Homo sapiens
tttgagtcagaacca

SEQ ID NO: 127061 - DNA, 15 bp, Homo sapiens
atttgagtcagaacc

SEQ ID NO: 127062 - DNA, 15 bp, Homo sapiens
tatttgagtcagaac

SEQ ID NO: 127063 - DNA, 15 bp, Homo sapiens
ttatttgagtcagaa

SEQ ID NO: 127064 - DNA, 15 bp, Homo sapiens
attatttgagtcaga

SEQ ID NO: 127065 - DNA, 15 bp, Homo sapiens
tattatttgagtcag

SEQ ID NO: 127066 - DNA, 15 bp, Homo sapiens
atattatttgagtca

SEQ ID NO: 127067 - DNA, 15 bp, Homo sapiens
gatattatttgagtc

SEQ ID NO: 127068 - DNA, 15 bp, Homo sapiens
ggatattatttgagt

SEQ ID NO: 127069 - DNA, 15 bp, Homo sapiens
gggatattatttgag

SEQ ID NO: 127070 - DNA, 15 bp, Homo sapiens
ggggatattatttga

SEQ ID NO: 127071 - DNA, 15 bp, Homo sapiens
gggggatattatttg

SEQ ID NO: 127072 - DNA, 15 bp, Homo sapiens
tgggggatattattt

SEQ ID NO: 127073 - DNA, 15 bp, Homo sapiens
atgggggatattatt

SEQ ID NO: 127074 - DNA, 15 bp, Homo sapiens
aatgggggatattat

SEQ ID NO: 127075 - DNA, 15 bp, Homo sapiens
caatgggggatatta

SEQ ID NO: 127076 - DNA, 15 bp, Homo sapiens
tcaatgggggatatt

SEQ ID NO: 127077 - DNA, 15 bp, Homo sapiens
ttcaatgggggatat

SEQ ID NO: 127078 - DNA, 15 bp, Homo sapiens
attcaatgggggata

SEQ ID NO: 127079 - DNA, 15 bp, Homo sapiens
aattcaatgggggat

SEQ ID NO: 127080 - DNA, 15 bp, Homo sapiens
aaattcaatggggga

SEQ ID NO: 127081 - DNA, 15 bp, Homo sapiens
taaattcaatggggg

SEQ ID NO: 127082 - DNA, 15 bp, Homo sapiens
ttaaattcaatgggg

SEQ ID NO: 127083 - DNA, 15 bp, Homo sapiens
attaaattcaatggg

SEQ ID NO: 127084 - DNA, 15 bp, Homo sapiens
cattaaattcaatgg

SEQ ID NO: 127085 - DNA, 15 bp, Homo sapiens
ccattaaattcaatg

SEQ ID NO: 127086 - DNA, 15 bp, Homo sapiens
tccattaaattcaat

SEQ ID NO: 127087 - DNA, 15 bp, Homo sapiens
ttccattaaattcaa

SEQ ID NO: 127088 - DNA, 15 bp, Homo sapiens
gttccattaaattca

SEQ ID NO: 127089 - DNA, 15 bp, Homo sapiens
tgttccattaaattc

SEQ ID NO: 127090 - DNA, 15 bp, Homo sapiens
atgttccattaaatt

SEQ ID NO: 127091 - DNA, 15 bp, Homo sapiens
gatgttccattaaat

SEQ ID NO: 127092 - DNA, 15 bp, Homo sapiens
tgatgttccattaaa

SEQ ID NO: 127093 - DNA, 15 bp, Homo sapiens
atgatgttccattaa

SEQ ID NO: 127094 - DNA, 15 bp, Homo sapiens
aatgatgttccatta

SEQ ID NO: 127095 - DNA, 15 bp, Homo sapiens
aaatgatgttccatt

SEQ ID NO: 127096 - DNA, 15 bp, Homo sapiens
gaaatgatgttccat

SEQ ID NO: 127097 - DNA, 15 bp, Homo sapiens
tgaaatgatgttcca

SEQ ID NO: 127098 - DNA, 15 bp, Homo sapiens
ttgaaatgatgttcc

SEQ ID NO: 127099 - DNA, 15 bp, Homo sapiens
attgaaatgatgttc

SEQ ID NO: 127100 - DNA, 15 bp, Homo sapiens
cattgaaatgatgtt

SEQ ID NO: 127101 - DNA, 15 bp, Homo sapiens
ccattgaaatgatgt

SEQ ID NO: 127102 - DNA, 15 bp, Homo sapiens
cccattgaaatgatg

SEQ ID NO: 127103 - DNA, 15 bp, Homo sapiens
gcccattgaaatgat

SEQ ID NO: 127104 - DNA, 15 bp, Homo sapiens
ggcccattgaaatga

SEQ ID NO: 127105 - DNA, 15 bp, Homo sapiens
tggcccattgaaatg

SEQ ID NO: 127106 - DNA, 15 bp, Homo sapiens
gtggcccattgaaat

SEQ ID NO: 127107 - DNA, 15 bp, Homo sapiens
ggtggcccattgaaa

SEQ ID NO: 127108 - DNA, 15 bp, Homo sapiens
tggtggcccattgaa

SEQ ID NO: 127109 - DNA, 15 bp, Homo sapiens
gtggtggcccattga

SEQ ID NO: 127110 - DNA, 15 bp, Homo sapiens
tgtggtggcccattg

SEQ ID NO: 127111 - DNA, 15 bp, Homo sapiens
atgtggtggcccatt

SEQ ID NO: 127112 - DNA, 15 bp, Homo sapiens
aatgtggtggcccat

SEQ ID NO: 127113 - DNA, 15 bp, Homo sapiens
taatgtggtggccca

SEQ ID NO: 127114 - DNA, 15 bp, Homo sapiens
ataatgtggtggccc

SEQ ID NO: 127115 - DNA, 15 bp, Homo sapiens
cataatgtggtggcc

SEQ ID NO: 127116 - DNA, 15 bp, Homo sapiens
tcataatgtggtggc

SEQ ID NO: 127117 - DNA, 15 bp, Homo sapiens
ttcataatgtggtgg

SEQ ID NO: 127118 - DNA, 15 bp, Homo sapiens
gttcataatgtggtg

SEQ ID NO: 127119 - DNA, 15 bp, Homo sapiens
ggttcataatgtggt

SEQ ID NO: 127120 - DNA, 15 bp, Homo sapiens
tggttcataatgtgg

SEQ ID NO: 127121 - DNA, 15 bp, Homo sapiens
atggttcataatgtg

SEQ ID NO: 127122 - DNA, 15 bp, Homo sapiens
aatggttcataatgt

SEQ ID NO: 127123 - DNA, 15 bp, Homo sapiens
caatggttcataatg

SEQ ID NO: 127124 - DNA, 15 bp, Homo sapiens
tcaatggttcataat

SEQ ID NO: 127125 - DNA, 15 bp, Homo sapiens
ttcaatggttcataa

SEQ ID NO: 127126 - DNA, 15 bp, Homo sapiens
cttcaatggttcata

SEQ ID NO: 127127 - DNA, 15 bp, Homo sapiens
acttcaatggttcat

SEQ ID NO: 127128 - DNA, 15 bp, Homo sapiens
aacttcaatggttca

SEQ ID NO: 127129 - DNA, 15 bp, Homo sapiens
taacttcaatggttc

SEQ ID NO: 127130 - DNA, 15 bp, Homo sapiens
ttaacttcaatggtt

SEQ ID NO: 127131 - DNA, 15 bp, Homo sapiens
attaacttcaatggt

SEQ ID NO: 127132 - DNA, 15 bp, Homo sapiens
cattaacttcaatgg

SEQ ID NO: 127133 - DNA, 15 bp, Homo sapiens
tcattaacttcaatg

SEQ ID NO: 127134 - DNA, 15 bp, Homo sapiens
ttcattaacttcaat

SEQ ID NO: 127135 - DNA, 15 bp, Homo sapiens
tttcattaacttcaa

SEQ ID NO: 127136 - DNA, 15 bp, Homo sapiens
ttttcattaacttca

SEQ ID NO: 127137 - DNA, 15 bp, Homo sapiens
cttttcattaacttc

SEQ ID NO: 127138 - DNA, 15 bp, Homo sapiens
acttttcattaactt

SEQ ID NO: 127139 - DNA, 15 bp, Homo sapiens
gacttttcattaact

SEQ ID NO: 127140 - DNA, 15 bp, Homo sapiens
tgacttttcattaac

SEQ ID NO: 127141 - DNA, 15 bp, Homo sapiens
atgacttttcattaa

SEQ ID NO: 127142 - DNA, 15 bp, Homo sapiens
aatgacttttcatta

SEQ ID NO: 127143 - DNA, 15 bp, Homo sapiens
aaatgacttttcatt

SEQ ID NO: 127144 - DNA, 15 bp, Homo sapiens
gaaatgacttttcat

SEQ ID NO: 127145 - DNA, 15 bp, Homo sapiens
tgaaatgacttttca

SEQ ID NO: 127146 - DNA, 15 bp, Homo sapiens
ttgaaatgacttttc

SEQ ID NO: 127147 - DNA, 15 bp, Homo sapiens
attgaaatgactttt

SEQ ID NO: 127148 - DNA, 15 bp, Homo sapiens
cattgaaatgacttt

SEQ ID NO: 127149 - DNA, 15 bp, Homo sapiens
tcattgaaatgactt

SEQ ID NO: 127150 - DNA, 15 bp, Homo sapiens
ctcattgaaatgact

SEQ ID NO: 127151 - DNA, 15 bp, Homo sapiens
gctcattgaaatgac

SEQ ID NO: 127152 - DNA, 15 bp, Homo sapiens
agctcattgaaatga

SEQ ID NO: 127153 - DNA, 15 bp, Homo sapiens
tagctcattgaaatg

SEQ ID NO: 127154 - DNA, 15 bp, Homo sapiens
gtagctcattgaaat

SEQ ID NO: 127155 - DNA, 15 bp, Homo sapiens
ggtagctcattgaaa

SEQ ID NO: 127156 - DNA, 15 bp, Homo sapiens
tggtagctcattgaa

SEQ ID NO: 127157 - DNA, 15 bp, Homo sapiens
ctggtagctcattga

SEQ ID NO: 127158 - DNA, 15 bp, Homo sapiens
tctggtagctcattg

SEQ ID NO: 127159 - DNA, 15 bp, Homo sapiens
atctggtagctcatt

SEQ ID NO: 127160 - DNA, 15 bp, Homo sapiens
aatctggtagctcat

SEQ ID NO: 127161 - DNA, 15 bp, Homo sapiens
taatctggtagctca

SEQ ID NO: 127162 - DNA, 15 bp, Homo sapiens
ataatctggtagctc

SEQ ID NO: 127163 - DNA, 15 bp, Homo sapiens
cataatctggtagct

SEQ ID NO: 127164 - DNA, 15 bp, Homo sapiens
tcataatctggtagc

SEQ ID NO: 127165 - DNA, 15 bp, Homo sapiens
ttcataatctggtag

SEQ ID NO: 127166 - DNA, 15 bp, Homo sapiens
gttcataatctggta

SEQ ID NO: 127167 - DNA, 15 bp, Homo sapiens
ggttcataatctggt

SEQ ID NO: 127168 - DNA, 15 bp, Homo sapiens
tggttcataatctgg

SEQ ID NO: 127169 - DNA, 15 bp, Homo sapiens
atggttcataatctg

SEQ ID NO: 127170 - DNA, 15 bp, Homo sapiens
aatggttcataatct

SEQ ID NO: 127171 - DNA, 15 bp, Homo sapiens
caatggttcataatc

SEQ ID NO: 127172 - DNA, 15 bp, Homo sapiens
attcaatggttcata

SEQ ID NO: 127173 - DNA, 15 bp, Homo sapiens
aattcaatggttcat

SEQ ID NO: 127174 - DNA, 15 bp, Homo sapiens
aaattcaatggttca

SEQ ID NO: 127175 - DNA, 15 bp, Homo sapiens
gaaattcaatggttc

SEQ ID NO: 127176 - DNA, 15 bp, Homo sapiens
agaaattcaatggtt

SEQ ID NO: 127177 - DNA, 15 bp, Homo sapiens
tagaaattcaatggt

SEQ ID NO: 127178 - DNA, 15 bp, Homo sapiens
atagaaattcaatgg

SEQ ID NO: 127179 - DNA, 15 bp, Homo sapiens
tatagaaattcaatg

SEQ ID NO: 127180 - DNA, 15 bp, Homo sapiens
gtatagaaattcaat

SEQ ID NO: 127181 - DNA, 15 bp, Homo sapiens
agtatagaaattcaa

SEQ ID NO: 127182 - DNA, 15 bp, Homo sapiens
tagtatagaaattca

SEQ ID NO: 127183 - DNA, 15 bp, Homo sapiens
ttagtatagaaattc

SEQ ID NO: 127184 - DNA, 15 bp, Homo sapiens
attagtatagaaatt

SEQ ID NO: 127185 - DNA, 15 bp, Homo sapiens
cattagtatagaaat

SEQ ID NO: 127186 - DNA, 15 bp, Homo sapiens
tcattagtatagaaa

SEQ ID NO: 127187 - DNA, 15 bp, Homo sapiens
atcattagtatagaa

SEQ ID NO: 127188 - DNA, 15 bp, Homo sapiens
tatcattagtataga

SEQ ID NO: 127189 - DNA, 15 bp, Homo sapiens
ttatcattagtatag

SEQ ID NO: 127190 - DNA, 15 bp, Homo sapiens
tttatcattagtata

SEQ ID NO: 127191 - DNA, 15 bp, Homo sapiens
ctttatcattagtat

SEQ ID NO: 127192 - DNA, 15 bp, Homo sapiens
cctttatcattagta

SEQ ID NO: 127193 - DNA, 15 bp, Homo sapiens
ccctttatcattagt

SEQ ID NO: 127194 - DNA, 15 bp, Homo sapiens
cccctttatcattag

SEQ ID NO: 127195 - DNA, 15 bp, Homo sapiens
gcccctttatcatta

SEQ ID NO: 127196 - DNA, 15 bp, Homo sapiens
agcccctttatcatt

SEQ ID NO: 127197 - DNA, 15 bp, Homo sapiens
cagcccctttatcat

SEQ ID NO: 127198 - DNA, 15 bp, Homo sapiens
ccagcccctttatca

SEQ ID NO: 127199 - DNA, 15 bp, Homo sapiens
tccagcccctttatc

SEQ ID NO: 127200 - DNA, 15 bp, Homo sapiens
ttccagcccctttat

SEQ ID NO: 127201 - DNA, 15 bp, Homo sapiens
attccagccccttta

SEQ ID NO: 127202 - DNA, 15 bp, Homo sapiens
aattccagccccttt

SEQ ID NO: 127203 - DNA, 15 bp, Homo sapiens
gaattccagcccctt

SEQ ID NO: 127204 - DNA, 15 bp, Homo sapiens
ggaattccagcccct

SEQ ID NO: 127205 - DNA, 15 bp, Homo sapiens
gggaattccagcccc

SEQ ID NO: 127206 - DNA, 15 bp, Homo sapiens
agggaattccagccc

SEQ ID NO: 127207 - DNA, 15 bp, Homo sapiens
aagggaattccagcc

SEQ ID NO: 127208 - DNA, 15 bp, Homo sapiens
gaagggaattccagc

SEQ ID NO: 127209 - DNA, 15 bp, Homo sapiens
agaagggaattccag

SEQ ID NO: 127210 - DNA, 15 bp, Homo sapiens
cagaagggaattcca

SEQ ID NO: 127211 - DNA, 15 bp, Homo sapiens
ccagaagggaattcc

SEQ ID NO: 127212 - DNA, 15 bp, Homo sapiens
cccagaagggaattc

SEQ ID NO: 127213 - DNA, 15 bp, Homo sapiens
acccagaagggaatt

SEQ ID NO: 127214 - DNA, 15 bp, Homo sapiens
gacccagaagggaat

SEQ ID NO: 127215 - DNA, 15 bp, Homo sapiens
tgacccagaagggaa

SEQ ID NO: 127216 - DNA, 15 bp, Homo sapiens
atgacccagaaggga

SEQ ID NO: 127217 - DNA, 15 bp, Homo sapiens
aatgacccagaaggg

SEQ ID NO: 127218 - DNA, 15 bp, Homo sapiens
caatgacccagaagg

SEQ ID NO: 127219 - DNA, 15 bp, Homo sapiens
acaatgacccagaag

SEQ ID NO: 127220 - DNA, 15 bp, Homo sapiens
tacaatgacccagaa

SEQ ID NO: 127221 - DNA, 15 bp, Homo sapiens
gtacaatgacccaga

SEQ ID NO: 127222 - DNA, 15 bp, Homo sapiens
agtacaatgacccag

SEQ ID NO: 127223 - DNA, 15 bp, Homo sapiens
aagtacaatgaccca

SEQ ID NO: 127224 - DNA, 15 bp, Homo sapiens
aaagtacaatgaccc

SEQ ID NO: 127225 - DNA, 15 bp, Homo sapiens
taaagtacaatgacc

SEQ ID NO: 127226 - DNA, 15 bp, Homo sapiens
ttaaagtacaatgac

SEQ ID NO: 127227 - DNA, 15 bp, Homo sapiens
tttaaagtacaatga

SEQ ID NO: 127228 - DNA, 15 bp, Homo sapiens
atttaaagtacaatg

SEQ ID NO: 127229 - DNA, 15 bp, Homo sapiens
tatttaaagtacaat

SEQ ID NO: 127230 - DNA, 15 bp, Homo sapiens
ctatttaaagtacaa

SEQ ID NO: 127231 - DNA, 15 bp, Homo sapiens
tctatttaaagtaca

SEQ ID NO: 127232 - DNA, 15 bp, Homo sapiens
ttctatttaaagtac

SEQ ID NO: 127233 - DNA, 15 bp, Homo sapiens
attctatttaaagta

SEQ ID NO: 127234 - DNA, 15 bp, Homo sapiens
tattctatttaaagt

SEQ ID NO: 127235 - DNA, 15 bp, Homo sapiens
atattctatttaaag

SEQ ID NO: 127236 - DNA, 15 bp, Homo sapiens
catattctatttaaa

SEQ ID NO: 127237 - DNA, 15 bp, Homo sapiens
acatattctatttaa

SEQ ID NO: 127238 - DNA, 15 bp, Homo sapiens
tacatattctattta

SEQ ID NO: 127239 - DNA, 15 bp, Homo sapiens
atacatattctattt

SEQ ID NO: 127240 - DNA, 15 bp, Homo sapiens
aatacatattctatt

SEQ ID NO: 127241 - DNA, 15 bp, Homo sapiens
taatacatattctat

SEQ ID NO: 127242 - DNA, 15 bp, Homo sapiens
gtaatacatattcta

SEQ ID NO: 127243 - DNA, 15 bp, Homo sapiens
ggtaatacatattct

SEQ ID NO: 127244 - DNA, 15 bp, Homo sapiens
aggtaatacatattc

SEQ ID NO: 127245 - DNA, 15 bp, Homo sapiens
aaggtaatacatatt

SEQ ID NO: 127246 - DNA, 15 bp, Homo sapiens
gaaggtaatacatat

SEQ ID NO: 127247 - DNA, 15 bp, Homo sapiens
agaaggtaatacata

SEQ ID NO: 127248 - DNA, 15 bp, Homo sapiens
cagaaggtaatacat

SEQ ID NO: 127249 - DNA, 15 bp, Homo sapiens
tcagaaggtaataca

SEQ ID NO: 127250 - DNA, 15 bp, Homo sapiens
ttcagaaggtaatac

SEQ ID NO: 127251 - DNA, 15 bp, Homo sapiens
tttcagaaggtaata

SEQ ID NO: 127252 - DNA, 15 bp, Homo sapiens
atttcagaaggtaat

SEQ ID NO: 127253 - DNA, 15 bp, Homo sapiens
tatttcagaaggtaa

SEQ ID NO: 127254 - DNA, 15 bp, Homo sapiens
ttatttcagaaggta

SEQ ID NO: 127255 - DNA, 15 bp, Homo sapiens
tttatttcagaaggt

SEQ ID NO: 127256 - DNA, 15 bp, Homo sapiens
ttttatttcagaagg

SEQ ID NO: 127257 - DNA, 15 bp, Homo sapiens
cttttatttcagaag

SEQ ID NO: 127258 - DNA, 15 bp, Homo sapiens
gcttttatttcagaa

SEQ ID NO: 127259 - DNA, 15 bp, Homo sapiens
ggcttttatttcaga

SEQ ID NO: 127260 - DNA, 15 bp, Homo sapiens
tggcttttatttcag

SEQ ID NO: 127261 - DNA, 15 bp, Homo sapiens
gtggcttttatttca

SEQ ID NO: 127262 - DNA, 15 bp, Homo sapiens
agtggcttttatttc

SEQ ID NO: 127263 - DNA, 15 bp, Homo sapiens
aagtggcttttattt

SEQ ID NO: 127264 - DNA, 15 bp, Homo sapiens
taagtggcttttatt

SEQ ID NO: 127265 - DNA, 15 bp, Homo sapiens
ataagtggcttttat

SEQ ID NO: 127266 - DNA, 15 bp, Homo sapiens
cataagtggctttta

SEQ ID NO: 127267 - DNA, 15 bp, Homo sapiens
gcataagtggctttt

SEQ ID NO: 127268 - DNA, 15 bp, Homo sapiens
tgcataagtggcttt

SEQ ID NO: 127269 - DNA, 15 bp, Homo sapiens
atgcataagtggctt

SEQ ID NO: 127270 - DNA, 15 bp, Homo sapiens
tatgcataagtggct

SEQ ID NO: 127271 - DNA, 15 bp, Homo sapiens
gtatgcataagtggc

SEQ ID NO: 127272 - DNA, 15 bp, Homo sapiens
ggtatgcataagtgg

SEQ ID NO: 127273 - DNA, 15 bp, Homo sapiens
tggtatgcataagtg

SEQ ID NO: 127274 - DNA, 15 bp, Homo sapiens
ttggtatgcataagt

SEQ ID NO: 127275 - DNA, 15 bp, Homo sapiens
gttggtatgcataag

SEQ ID NO: 127276 - DNA, 15 bp, Homo sapiens
agttggtatgcataa

SEQ ID NO: 127277 - DNA, 15 bp, Homo sapiens
gagttggtatgcata

SEQ ID NO: 127278 - DNA, 15 bp, Homo sapiens
tgagttggtatgcat

SEQ ID NO: 127279 - DNA, 15 bp, Homo sapiens
atgagttggtatgca

SEQ ID NO: 127280 - DNA, 15 bp, Homo sapiens
gatgagttggtatgc

SEQ ID NO: 127281 - DNA, 15 bp, Homo sapiens
agatgagttggtatg

SEQ ID NO: 127282 - DNA, 15 bp, Homo sapiens
tagatgagttggtat

SEQ ID NO: 127283 - DNA, 15 bp, Homo sapiens
atagatgagttggta

SEQ ID NO: 127284 - DNA, 15 bp, Homo sapiens
gatagatgagttggt

SEQ ID NO: 127285 - DNA, 15 bp, Homo sapiens
agatagatgagttgg

SEQ ID NO: 127286 - DNA, 15 bp, Homo sapiens
gagatagatgagttg

SEQ ID NO: 127287 - DNA, 15 bp, Homo sapiens
tgagatagatgagtt

SEQ ID NO: 127288 - DNA, 15 bp, Homo sapiens
ctgagatagatgagt

SEQ ID NO: 127289 - DNA, 15 bp, Homo sapiens
actgagatagatgag

SEQ ID NO: 127290 - DNA, 15 bp, Homo sapiens
tactgagatagatga

SEQ ID NO: 127291 - DNA, 15 bp, Homo sapiens
ctactgagatagatg

SEQ ID NO: 127292 - DNA, 15 bp, Homo sapiens
tctactgagatagat

SEQ ID NO: 127293 - DNA, 15 bp, Homo sapiens
ctctactgagataga

SEQ ID NO: 127294 - DNA, 15 bp, Homo sapiens
actctactgagatag

SEQ ID NO: 127295 - DNA, 15 bp, Homo sapiens
cactctactgagata

SEQ ID NO: 127296 - DNA, 15 bp, Homo sapiens
acactctactgagat

SEQ ID NO: 127297 - DNA, 15 bp, Homo sapiens
gacactctactgaga

SEQ ID NO: 127298 - DNA, 15 bp, Homo sapiens
tgacactctactgag

SEQ ID NO: 127299 - DNA, 15 bp, Homo sapiens
gtgacactctactga

SEQ ID NO: 127300 - DNA, 15 bp, Homo sapiens
ggtgacactctactg

SEQ ID NO: 127301 - DNA, 15 bp, Homo sapiens
tggtgacactctact

SEQ ID NO: 127302 - DNA, 15 bp, Homo sapiens
ttggtgacactctac

SEQ ID NO: 127303 - DNA, 15 bp, Homo sapiens
cttggtgacactcta

SEQ ID NO: 127304 - DNA, 15 bp, Homo sapiens
tcttggtgacactct

SEQ ID NO: 127305 - DNA, 15 bp, Homo sapiens
gtcttggtgacactc

SEQ ID NO: 127306 - DNA, 15 bp, Homo sapiens
tgtcttggtgacact

SEQ ID NO: 127307 - DNA, 15 bp, Homo sapiens
ctgtcttggtgacac

SEQ ID NO: 127308 - DNA, 15 bp, Homo sapiens
tctgtcttggtgaca

SEQ ID NO: 127309 - DNA, 15 bp, Homo sapiens
atctgtcttggtgac

SEQ ID NO: 127310 - DNA, 15 bp, Homo sapiens
gatctgtcttggtga

SEQ ID NO: 127311 - DNA, 15 bp, Homo sapiens
agatctgtcttggtg

SEQ ID NO: 127312 - DNA, 15 bp, Homo sapiens
aagatctgtcttggt

SEQ ID NO: 127313 - DNA, 15 bp, Homo sapiens
caagatctgtcttgg

SEQ ID NO: 127314 - DNA, 15 bp, Homo sapiens
tcaagatctgtcttg

SEQ ID NO: 127315 - DNA, 15 bp, Homo sapiens
atcaagatctgtctt

SEQ ID NO: 127316 - DNA, 15 bp, Homo sapiens
tatcaagatctgtct

SEQ ID NO: 127317 - DNA, 15 bp, Homo sapiens
ctatcaagatctgtc

SEQ ID NO: 127318 - DNA, 15 bp, Homo sapiens
tctatcaagatctgt

SEQ ID NO: 127319 - DNA, 15 bp, Homo sapiens
ttctatcaagatctg

SEQ ID NO: 127320 - DNA, 15 bp, Homo sapiens
tttctatcaagatct

SEQ ID NO: 127321 - DNA, 15 bp, Homo sapiens
ttttctatcaagatc

SEQ ID NO: 127322 - DNA, 15 bp, Homo sapiens
cttttctatcaagat

SEQ ID NO: 127323 - DNA, 15 bp, Homo sapiens
gcttttctatcaaga

SEQ ID NO: 127324 - DNA, 15 bp, Homo sapiens
ggcttttctatcaag

SEQ ID NO: 127325 - DNA, 15 bp, Homo sapiens
tggcttttctatcaa

SEQ ID NO: 127326 - DNA, 15 bp, Homo sapiens
ttggcttttctatca

SEQ ID NO: 127327 - DNA, 15 bp, Homo sapiens
cttggcttttctatc

SEQ ID NO: 127328 - DNA, 15 bp, Homo sapiens
tcttggcttttctat

SEQ ID NO: 127329 - DNA, 15 bp, Homo sapiens
ctcttggcttttcta

SEQ ID NO: 127330 - DNA, 15 bp, Homo sapiens
gctcttggcttttct

SEQ ID NO: 127331 - DNA, 15 bp, Homo sapiens
tgctcttggcttttc

SEQ ID NO: 127332 - DNA, 15 bp, Homo sapiens
ttgctcttggctttt

SEQ ID NO: 127333 - DNA, 15 bp, Homo sapiens
cttgctcttggcttt

SEQ ID NO: 127334 - DNA, 15 bp, Homo sapiens
acttgctcttggctt

SEQ ID NO: 127335 - DNA, 15 bp, Homo sapiens
gacttgctcttggct

SEQ ID NO: 127336 - DNA, 15 bp, Homo sapiens
tgacttgctcttggc

SEQ ID NO: 127337 - DNA, 15 bp, Homo sapiens
ttgacttgctcttgg

SEQ ID NO: 127338 - DNA, 15 bp, Homo sapiens
tttgacttgctcttg

SEQ ID NO: 127339 - DNA, 15 bp, Homo sapiens
atttgacttgctctt

SEQ ID NO: 127340 - DNA, 15 bp, Homo sapiens
catttgacttgctct

SEQ ID NO: 127341 - DNA, 15 bp, Homo sapiens
tcatttgacttgctc

SEQ ID NO: 127342 - DNA, 15 bp, Homo sapiens
ttcatttgacttgct

SEQ ID NO: 127343 - DNA, 15 bp, Homo sapiens
tttcatttgacttgc

SEQ ID NO: 127344 - DNA, 15 bp, Homo sapiens
ttttcatttgacttg

SEQ ID NO: 127345 - DNA, 15 bp, Homo sapiens
cttttcatttgactt

SEQ ID NO: 127346 - DNA, 15 bp, Homo sapiens
gcttttcatttgact

SEQ ID NO: 127347 - DNA, 15 bp, Homo sapiens
agcttttcatttgac

SEQ ID NO: 127348 - DNA, 15 bp, Homo sapiens
gagcttttcatttga

SEQ ID NO: 127349 - DNA, 15 bp, Homo sapiens
agagcttttcatttg

SEQ ID NO: 127350 - DNA, 15 bp, Homo sapiens
tagagcttttcattt

SEQ ID NO: 127351 - DNA, 15 bp, Homo sapiens
ttagagcttttcatt

SEQ ID NO: 127352 - DNA, 15 bp, Homo sapiens
cttagagcttttcat

SEQ ID NO: 127353 - DNA, 15 bp, Homo sapiens
gcttagagcttttca

SEQ ID NO: 127354 - DNA, 15 bp, Homo sapiens
ggcttagagcttttc

SEQ ID NO: 127355 - DNA, 15 bp, Homo sapiens
gggcttagagctttt

SEQ ID NO: 127356 - DNA, 15 bp, Homo sapiens
tgggcttagagcttt

SEQ ID NO: 127357 - DNA, 15 bp, Homo sapiens
atgggcttagagctt

SEQ ID NO: 127358 - DNA, 15 bp, Homo sapiens
catgggcttagagct

SEQ ID NO: 127359 - DNA, 15 bp, Homo sapiens
tcatgggcttagagc

SEQ ID NO: 127360 - DNA, 15 bp, Homo sapiens
gtcatgggcttagag

SEQ ID NO: 127361 - DNA, 15 bp, Homo sapiens
ggtcatgggcttaga

SEQ ID NO: 127362 - DNA, 15 bp, Homo sapiens
tggtcatgggcttag

SEQ ID NO: 127363 - DNA, 15 bp, Homo sapiens
atggtcatgggctta

SEQ ID NO: 127364 - DNA, 15 bp, Homo sapiens
tatggtcatgggctt

SEQ ID NO: 127365 - DNA, 15 bp, Homo sapiens
atatggtcatgggct

SEQ ID NO: 127366 - DNA, 15 bp, Homo sapiens
tatatggtcatgggc

SEQ ID NO: 127367 - DNA, 15 bp, Homo sapiens
atatatggtcatggg

SEQ ID NO: 127368 - DNA, 15 bp, Homo sapiens
gatatatggtcatgg

SEQ ID NO: 127369 - DNA, 15 bp, Homo sapiens
tgatatatggtcatg

SEQ ID NO: 127370 - DNA, 15 bp, Homo sapiens
gtgatatatggtcat

SEQ ID NO: 127371 - DNA, 15 bp, Homo sapiens
ggtgatatatggtca

SEQ ID NO: 127372 - DNA, 15 bp, Homo sapiens
gggtgatatatggtc

SEQ ID NO: 127373 - DNA, 15 bp, Homo sapiens
tgggtgatatatggt

SEQ ID NO: 127374 - DNA, 15 bp, Homo sapiens
ctgggtgatatatgg

SEQ ID NO: 127375 - DNA, 15 bp, Homo sapiens
cctgggtgatatatg

SEQ ID NO: 127376 - DNA, 15 bp, Homo sapiens
ccctgggtgatatat

SEQ ID NO: 127377 - DNA, 15 bp, Homo sapiens
tccctgggtgatata

SEQ ID NO: 127378 - DNA, 15 bp, Homo sapiens
ctccctgggtgatat

SEQ ID NO: 127379 - DNA, 15 bp, Homo sapiens
actccctgggtgata

SEQ ID NO: 127380 - DNA, 15 bp, Homo sapiens
aactccctgggtgat

SEQ ID NO: 127381 - DNA, 15 bp, Homo sapiens
gaactccctgggtga

SEQ ID NO: 127382 - DNA, 15 bp, Homo sapiens
ggaactccctgggtg

SEQ ID NO: 127383 - DNA, 15 bp, Homo sapiens
gggaactccctgggt

SEQ ID NO: 127384 - DNA, 15 bp, Homo sapiens
tgggaactccctggg

SEQ ID NO: 127385 - DNA, 15 bp, Homo sapiens
ctgggaactccctgg

SEQ ID NO: 127386 - DNA, 15 bp, Homo sapiens
cctgggaactccctg

SEQ ID NO: 127387 - DNA, 15 bp, Homo sapiens
ccctgggaactccct

SEQ ID NO: 127388 - DNA, 15 bp, Homo sapiens
gccctgggaactccc

SEQ ID NO: 127389 - DNA, 15 bp, Homo sapiens
agccctgggaactcc

SEQ ID NO: 127390 - DNA, 15 bp, Homo sapiens
cagccctgggaactc

SEQ ID NO: 127391 - DNA, 15 bp, Homo sapiens
gcagccctgggaact

SEQ ID NO: 127392 - DNA, 15 bp, Homo sapiens
agcagccctgggaac

SEQ ID NO: 127393 - DNA, 15 bp, Homo sapiens
tagcagccctgggaa

SEQ ID NO: 127394 - DNA, 15 bp, Homo sapiens
ctagcagccctggga

SEQ ID NO: 127395 - DNA, 15 bp, Homo sapiens
tctagcagccctggg

SEQ ID NO: 127396 - DNA, 15 bp, Homo sapiens
ctctagcagccctgg

SEQ ID NO: 127397 - DNA, 15 bp, Homo sapiens
gctctagcagccctg

SEQ ID NO: 127398 - DNA, 15 bp, Homo sapiens
tgctctagcagccct

SEQ ID NO: 127399 - DNA, 15 bp, Homo sapiens
ctgctctagcagccc

SEQ ID NO: 127400 - DNA, 15 bp, Homo sapiens
actgctctagcagcc

SEQ ID NO: 127401 - DNA, 15 bp, Homo sapiens
aactgctctagcagc

SEQ ID NO: 127402 - DNA, 15 bp, Homo sapiens
aaactgctctagcag

SEQ ID NO: 127403 - DNA, 15 bp, Homo sapiens
caaactgctctagca

SEQ ID NO: 127404 - DNA, 15 bp, Homo sapiens
gcaaactgctctagc

SEQ ID NO: 127405 - DNA, 15 bp, Homo sapiens
tgcaaactgctctag

SEQ ID NO: 127406 - DNA, 15 bp, Homo sapiens
ctgcaaactgctcta

SEQ ID NO: 127407 - DNA, 15 bp, Homo sapiens
cctgcaaactgctct

SEQ ID NO: 127408 - DNA, 15 bp, Homo sapiens
acctgcaaactgctc

SEQ ID NO: 127409 - DNA, 15 bp, Homo sapiens
aacctgcaaactgct

SEQ ID NO: 127410 - DNA, 15 bp, Homo sapiens
caacctgcaaactgc

SEQ ID NO: 127411 - DNA, 15 bp, Homo sapiens
gcaacctgcaaactg

SEQ ID NO: 127412 - DNA, 15 bp, Homo sapiens
agcaacctgcaaact

SEQ ID NO: 127413 - DNA, 15 bp, Homo sapiens
aagcaacctgcaaac

SEQ ID NO: 127414 - DNA, 15 bp, Homo sapiens
aaagcaacctgcaaa

SEQ ID NO: 127415 - DNA, 15 bp, Homo sapiens
caaagcaacctgcaa

SEQ ID NO: 127416 - DNA, 15 bp, Homo sapiens
acaaagcaacctgca

SEQ ID NO: 127417 - DNA, 15 bp, Homo sapiens
aacaaagcaacctgc

SEQ ID NO: 127418 - DNA, 15 bp, Homo sapiens
gaacaaagcaacctg

SEQ ID NO: 127419 - DNA, 15 bp, Homo sapiens
tgaacaaagcaacct

SEQ ID NO: 127420 - DNA, 15 bp, Homo sapiens
ttgaacaaagcaacc

SEQ ID NO: 127421 - DNA, 15 bp, Homo sapiens
gttgaacaaagcaac

SEQ ID NO: 127422 - DNA, 15 bp, Homo sapiens
agttgaacaaagcaa

SEQ ID NO: 127423 - DNA, 15 bp, Homo sapiens
aagttgaacaaagca

SEQ ID NO: 127424 - DNA, 15 bp, Homo sapiens
taagttgaacaaagc

SEQ ID NO: 127425 - DNA, 15 bp, Homo sapiens
gtaagttgaacaaag

SEQ ID NO: 127426 - DNA, 15 bp, Homo sapiens
tgtaagttgaacaaa

SEQ ID NO: 127427 - DNA, 15 bp, Homo sapiens
ctgtaagttgaacaa

SEQ ID NO: 127428 - DNA, 15 bp, Homo sapiens
gctgtaagttgaaca

SEQ ID NO: 127429 - DNA, 15 bp, Homo sapiens
agctgtaagttgaac

SEQ ID NO: 127430 - DNA, 15 bp, Homo sapiens
aagctgtaagttgaa

SEQ ID NO: 127431 - DNA, 15 bp, Homo sapiens
aaagctgtaagttga

SEQ ID NO: 127432 - DNA, 15 bp, Homo sapiens
gaaagctgtaagttg

SEQ ID NO: 127433 - DNA, 15 bp, Homo sapiens
tgaaagctgtaagtt

SEQ ID NO: 127434 - DNA, 15 bp, Homo sapiens
ttgaaagctgtaagt

SEQ ID NO: 127435 - DNA, 15 bp, Homo sapiens
attgaaagctgtaag

SEQ ID NO: 127436 - DNA, 15 bp, Homo sapiens
aattgaaagctgtaa

SEQ ID NO: 127437 - DNA, 15 bp, Homo sapiens
aaattgaaagctgta

SEQ ID NO: 127438 - DNA, 15 bp, Homo sapiens
aaaattgaaagctgt

SEQ ID NO: 127439 - DNA, 15 bp, Homo sapiens
caaaattgaaagctg

SEQ ID NO: 127440 - DNA, 15 bp, Homo sapiens
acaaaattgaaagct

SEQ ID NO: 127441 - DNA, 15 bp, Homo sapiens
aacaaaattgaaagc

SEQ ID NO: 127442 - DNA, 15 bp, Homo sapiens
taacaaaattgaaag

SEQ ID NO: 127443 - DNA, 15 bp, Homo sapiens
ataacaaaattgaaa

SEQ ID NO: 127444 - DNA, 15 bp, Homo sapiens
aataacaaaattgaa

SEQ ID NO: 127445 - DNA, 15 bp, Homo sapiens
taataacaaaattga

SEQ ID NO: 127446 - DNA, 15 bp, Homo sapiens
ctaataacaaaattg

SEQ ID NO: 127447 - DNA, 15 bp, Homo sapiens
cctaataacaaaatt

SEQ ID NO: 127448 - DNA, 15 bp, Homo sapiens
tcctaataacaaaat

SEQ ID NO: 127449 - DNA, 15 bp, Homo sapiens
ctcctaataacaaaa

SEQ ID NO: 127450 - DNA, 15 bp, Homo sapiens
tctcctaataacaaa

SEQ ID NO: 127451 - DNA, 15 bp, Homo sapiens
ctctcctaataacaa

SEQ ID NO: 127452 - DNA, 15 bp, Homo sapiens
tctctcctaataaca

SEQ ID NO: 127453 - DNA, 15 bp, Homo sapiens
ttctctcctaataac

SEQ ID NO: 127454 - DNA, 15 bp, Homo sapiens
cttctctcctaataa

SEQ ID NO: 127455 - DNA, 15 bp, Homo sapiens
tcttctctcctaata

SEQ ID NO: 127456 - DNA, 15 bp, Homo sapiens
ttcttctctcctaat

SEQ ID NO: 127457 - DNA, 15 bp, Homo sapiens
gttcttctctcctaa

SEQ ID NO: 127458 - DNA, 15 bp, Homo sapiens
tgttcttctctccta

SEQ ID NO: 127459 - DNA, 15 bp, Homo sapiens
ttgttcttctctcct

SEQ ID NO: 127460 - DNA, 15 bp, Homo sapiens
tttgttcttctctcc

SEQ ID NO: 127461 - DNA, 15 bp, Homo sapiens
ttttgttcttctctc

SEQ ID NO: 127462 - DNA, 15 bp, Homo sapiens
attttgttcttctct

SEQ ID NO: 127463 - DNA, 15 bp, Homo sapiens
cattttgttcttctc

SEQ ID NO: 127464 - DNA, 15 bp, Homo sapiens
tcattttgttcttct

SEQ ID NO: 127465 - DNA, 15 bp, Homo sapiens
ttcattttgttcttc

SEQ ID NO: 127466 - DNA, 15 bp, Homo sapiens
tttcattttgttctt

SEQ ID NO: 127467 - DNA, 15 bp, Homo sapiens
atttcattttgttct

SEQ ID NO: 127468 - DNA, 15 bp, Homo sapiens
aatttcattttgttc

SEQ ID NO: 127469 - DNA, 15 bp, Homo sapiens
aaatttcattttgtt

SEQ ID NO: 127470 - DNA, 15 bp, Homo sapiens
taaatttcattttgt

SEQ ID NO: 127471 - DNA, 15 bp, Homo sapiens
ataaatttcattttg

SEQ ID NO: 127472 - DNA, 15 bp, Homo sapiens
tataaatttcatttt

SEQ ID NO: 127473 - DNA, 15 bp, Homo sapiens
ctataaatttcattt

SEQ ID NO: 127474 - DNA, 15 bp, Homo sapiens
tctataaatttcatt

SEQ ID NO: 127475 - DNA, 15 bp, Homo sapiens
atctataaatttcat

SEQ ID NO: 127476 - DNA, 15 bp, Homo sapiens
tatctataaatttca

SEQ ID NO: 127477 - DNA, 15 bp, Homo sapiens
ttatctataaatttc

SEQ ID NO: 127478 - DNA, 15 bp, Homo sapiens
gttatctataaattt

SEQ ID NO: 127479 - DNA, 15 bp, Homo sapiens
ggttatctataaatt

SEQ ID NO: 127480 - DNA, 15 bp, Homo sapiens
tggttatctataaat

SEQ ID NO: 127481 - DNA, 15 bp, Homo sapiens
ttggttatctataaa

SEQ ID NO: 127482 - DNA, 15 bp, Homo sapiens
tttggttatctataa

SEQ ID NO: 127483 - DNA, 15 bp, Homo sapiens
ttttggttatctata

SEQ ID NO: 127484 - DNA, 15 bp, Homo sapiens
cttttggttatctat

SEQ ID NO: 127485 - DNA, 15 bp, Homo sapiens
ccttttggttatcta

SEQ ID NO: 127486 - DNA, 15 bp, Homo sapiens
tccttttggttatct

SEQ ID NO: 127487 - DNA, 15 bp, Homo sapiens
atccttttggttatc

SEQ ID NO: 127488 - DNA, 15 bp, Homo sapiens
catccttttggttat

SEQ ID NO: 127489 - DNA, 15 bp, Homo sapiens
acatccttttggtta

SEQ ID NO: 127490 - DNA, 15 bp, Homo sapiens
aacatccttttggtt

SEQ ID NO: 127491 - DNA, 15 bp, Homo sapiens
aaacatccttttggt

SEQ ID NO: 127492 - DNA, 15 bp, Homo sapiens
aaaacatccttttgg

SEQ ID NO: 127493 - DNA, 15 bp, Homo sapiens
aaaaacatccttttg

SEQ ID NO: 127494 - DNA, 15 bp, Homo sapiens
caaaaacatcctttt

SEQ ID NO: 127495 - DNA, 15 bp, Homo sapiens
gcaaaaacatccttt

SEQ ID NO: 127496 - DNA, 15 bp, Homo sapiens
tgcaaaaacatcctt

SEQ ID NO: 127497 - DNA, 15 bp, Homo sapiens
gtgcaaaaacatcct

SEQ ID NO: 127498 - DNA, 15 bp, Homo sapiens
cgtgcaaaaacatcc

SEQ ID NO: 127499 - DNA, 15 bp, Homo sapiens
gcgtgcaaaaacatc

SEQ ID NO: 127500 - DNA, 15 bp, Homo sapiens
agcgtgcaaaaacat

SEQ ID NO: 127501 - DNA, 15 bp, Homo sapiens
aagcgtgcaaaaaca

SEQ ID NO: 127502 - DNA, 15 bp, Homo sapiens
aaagcgtgcaaaaac

SEQ ID NO: 127503 - DNA, 15 bp, Homo sapiens
gaaagcgtgcaaaaa

SEQ ID NO: 127504 - DNA, 15 bp, Homo sapiens
tgaaagcgtgcaaaa

SEQ ID NO: 127505 - DNA, 15 bp, Homo sapiens
ttgaaagcgtgcaaa

SEQ ID NO: 127506 - DNA, 15 bp, Homo sapiens
attgaaagcgtgcaa

SEQ ID NO: 127507 - DNA, 15 bp, Homo sapiens
aattgaaagcgtgca

SEQ ID NO: 127508 - DNA, 15 bp, Homo sapiens
gaattgaaagcgtgc

SEQ ID NO: 127509 - DNA, 15 bp, Homo sapiens
tgaattgaaagcgtg

SEQ ID NO: 127510 - DNA, 15 bp, Homo sapiens
ctgaattgaaagcgt

SEQ ID NO: 127511 - DNA, 15 bp, Homo sapiens
actgaattgaaagcg

SEQ ID NO: 127512 - DNA, 15 bp, Homo sapiens
cactgaattgaaagc

SEQ ID NO: 127513 - DNA, 15 bp, Homo sapiens
acactgaattgaaag

SEQ ID NO: 127514 - DNA, 15 bp, Homo sapiens
tacactgaattgaaa

SEQ ID NO: 127515 - DNA, 15 bp, Homo sapiens
ctacactgaattgaa

SEQ ID NO: 127516 - DNA, 15 bp, Homo sapiens
gctacactgaattga

SEQ ID NO: 127517 - DNA, 15 bp, Homo sapiens
tgctacactgaattg

SEQ ID NO: 127518 - DNA, 15 bp, Homo sapiens
atgctacactgaatt

SEQ ID NO: 127519 - DNA, 15 bp, Homo sapiens
gatgctacactgaat

SEQ ID NO: 127520 - DNA, 15 bp, Homo sapiens
agatgctacactgaa

SEQ ID NO: 127521 - DNA, 15 bp, Homo sapiens
aagatgctacactga

SEQ ID NO: 127522 - DNA, 15 bp, Homo sapiens
caagatgctacactg

SEQ ID NO: 127523 - DNA, 15 bp, Homo sapiens
gcaagatgctacact

SEQ ID NO: 127524 - DNA, 15 bp, Homo sapiens
tgcaagatgctacac

SEQ ID NO: 127525 - DNA, 15 bp, Homo sapiens
ctgcaagatgctaca

SEQ ID NO: 127526 - DNA, 15 bp, Homo sapiens
tctgcaagatgctac

SEQ ID NO: 127527 - DNA, 15 bp, Homo sapiens
ttctgcaagatgcta

SEQ ID NO: 127528 - DNA, 15 bp, Homo sapiens
tttctgcaagatgct

SEQ ID NO: 127529 - DNA, 15 bp, Homo sapiens
ttttctgcaagatgc

SEQ ID NO: 127530 - DNA, 15 bp, Homo sapiens
attttctgcaagatg

SEQ ID NO: 127531 - DNA, 15 bp, Homo sapiens
cattttctgcaagat

SEQ ID NO: 127532 - DNA, 15 bp, Homo sapiens
gcattttctgcaaga

SEQ ID NO: 127533 - DNA, 15 bp, Homo sapiens
tgcattttctgcaag

SEQ ID NO: 127534 - DNA, 15 bp, Homo sapiens
atgcattttctgcaa

SEQ ID NO: 127535 - DNA, 15 bp, Homo sapiens
aatgcattttctgca

SEQ ID NO: 127536 - DNA, 15 bp, Homo sapiens
aaatgcattttctgc

SEQ ID NO: 127537 - DNA, 15 bp, Homo sapiens
taaatgcattttctg

SEQ ID NO: 127538 - DNA, 15 bp, Homo sapiens
ctaaatgcattttct

SEQ ID NO: 127539 - DNA, 15 bp, Homo sapiens
gctaaatgcattttc

SEQ ID NO: 127540 - DNA, 15 bp, Homo sapiens
tgctaaatgcatttt

SEQ ID NO: 127541 - DNA, 15 bp, Homo sapiens
gtgctaaatgcattt

SEQ ID NO: 127542 - DNA, 15 bp, Homo sapiens
tgtgctaaatgcatt

SEQ ID NO: 127543 - DNA, 15 bp, Homo sapiens
ctgtgctaaatgcat

SEQ ID NO: 127544 - DNA, 15 bp, Homo sapiens
actgtgctaaatgca

SEQ ID NO: 127545 - DNA, 15 bp, Homo sapiens
cactgtgctaaatgc

SEQ ID NO: 127546 - DNA, 15 bp, Homo sapiens
acactgtgctaaatg

SEQ ID NO: 127547 - DNA, 15 bp, Homo sapiens
gacactgtgctaaat

SEQ ID NO: 127548 - DNA, 15 bp, Homo sapiens
ggacactgtgctaaa

SEQ ID NO: 127549 - DNA, 15 bp, Homo sapiens
aggacactgtgctaa

SEQ ID NO: 127550 - DNA, 15 bp, Homo sapiens
caggacactgtgcta

SEQ ID NO: 127551 - DNA, 15 bp, Homo sapiens
ccaggacactgtgct

SEQ ID NO: 127552 - DNA, 15 bp, Homo sapiens
tccaggacactgtgc

SEQ ID NO: 127553 - DNA, 15 bp, Homo sapiens
ctccaggacactgtg

SEQ ID NO: 127554 - DNA, 15 bp, Homo sapiens
gctccaggacactgt

SEQ ID NO: 127555 - DNA, 15 bp, Homo sapiens
agctccaggacactg

SEQ ID NO: 127556 - DNA, 15 bp, Homo sapiens
gagctccaggacact

SEQ ID NO: 127557 - DNA, 15 bp, Homo sapiens
tgagctccaggacac

SEQ ID NO: 127558 - DNA, 15 bp, Homo sapiens
gtgagctccaggaca

SEQ ID NO: 127559 - DNA, 15 bp, Homo sapiens
tgtgagctccaggac

SEQ ID NO: 127560 - DNA, 15 bp, Homo sapiens
ctgtgagctccagga

SEQ ID NO: 127561 - DNA, 15 bp, Homo sapiens
tctgtgagctccagg

SEQ ID NO: 127562 - DNA, 15 bp, Homo sapiens
ctctgtgagctccag

SEQ ID NO: 127563 - DNA, 15 bp, Homo sapiens
cctctgtgagctcca

SEQ ID NO: 127564 - DNA, 15 bp, Homo sapiens
gcctctgtgagctcc

SEQ ID NO: 127565 - DNA, 15 bp, Homo sapiens
agcctctgtgagctc

SEQ ID NO: 127566 - DNA, 15 bp, Homo sapiens
aagcctctgtgagct

SEQ ID NO: 127567 - DNA, 15 bp, Homo sapiens
aaagcctctgtgagc

SEQ ID NO: 127568 - DNA, 15 bp, Homo sapiens
aaaagcctctgtgag

SEQ ID NO: 127569 - DNA, 15 bp, Homo sapiens
aaaaagcctctgtga

SEQ ID NO: 127570 - DNA, 15 bp, Homo sapiens
gaaaaagcctctgtg

SEQ ID NO: 127571 - DNA, 15 bp, Homo sapiens
agaaaaagcctctgt

SEQ ID NO: 127572 - DNA, 15 bp, Homo sapiens
cagaaaaagcctctg

SEQ ID NO: 127573 - DNA, 15 bp, Homo sapiens
tcagaaaaagcctct

SEQ ID NO: 127574 - DNA, 15 bp, Homo sapiens
ttcagaaaaagcctc

SEQ ID NO: 127575 - DNA, 15 bp, Homo sapiens
cttcagaaaaagcct

SEQ ID NO: 127576 - DNA, 15 bp, Homo sapiens
ccttcagaaaaagcc

SEQ ID NO: 127577 - DNA, 15 bp, Homo sapiens
cccttcagaaaaagc

SEQ ID NO: 127578 - DNA, 15 bp, Homo sapiens
tcccttcagaaaaag

SEQ ID NO: 127579 - DNA, 15 bp, Homo sapiens
ctcccttcagaaaaa

SEQ ID NO: 127580 - DNA, 15 bp, Homo sapiens
cctcccttcagaaaa

SEQ ID NO: 127581 - DNA, 15 bp, Homo sapiens
acctcccttcagaaa

SEQ ID NO: 127582 - DNA, 15 bp, Homo sapiens
gacctcccttcagaa

SEQ ID NO: 127583 - DNA, 15 bp, Homo sapiens
agacctcccttcaga

SEQ ID NO: 127584 - DNA, 15 bp, Homo sapiens
cagacctcccttcag

SEQ ID NO: 127585 - DNA, 15 bp, Homo sapiens
tcagacctcccttca

SEQ ID NO: 127586 - DNA, 15 bp, Homo sapiens
ctcagacctcccttc

SEQ ID NO: 127587 - DNA, 15 bp, Homo sapiens
tctcagacctccctt

SEQ ID NO: 127588 - DNA, 15 bp, Homo sapiens
gtctcagacctccct

SEQ ID NO: 127589 - DNA, 15 bp, Homo sapiens
tgtctcagacctccc

SEQ ID NO: 127590 - DNA, 15 bp, Homo sapiens
gtgtctcagacctcc

SEQ ID NO: 127591 - DNA, 15 bp, Homo sapiens
tgtgtctcagacctc

SEQ ID NO: 127592 - DNA, 15 bp, Homo sapiens
gtgtgtctcagacct

SEQ ID NO: 127593 - DNA, 15 bp, Homo sapiens
cgtgtgtctcagacc

SEQ ID NO: 127594 - DNA, 15 bp, Homo sapiens
gcgtgtgtctcagac

SEQ ID NO: 127595 - DNA, 15 bp, Homo sapiens
agcgtgtgtctcaga

SEQ ID NO: 127596 - DNA, 15 bp, Homo sapiens
cagcgtgtgtctcag

SEQ ID NO: 127597 - DNA, 15 bp, Homo sapiens
ccagcgtgtgtctca

SEQ ID NO: 127598 - DNA, 15 bp, Homo sapiens
cccagcgtgtgtctc

SEQ ID NO: 127599 - DNA, 15 bp, Homo sapiens
gcccagcgtgtgtct

SEQ ID NO: 127600 - DNA, 15 bp, Homo sapiens
tgcccagcgtgtgtc

SEQ ID NO: 127601 - DNA, 15 bp, Homo sapiens
ctgcccagcgtgtgt

SEQ ID NO: 127602 - DNA, 15 bp, Homo sapiens
actgcccagcgtgtg

SEQ ID NO: 127603 - DNA, 15 bp, Homo sapiens
cactgcccagcgtgt

SEQ ID NO: 127604 - DNA, 15 bp, Homo sapiens
acactgcccagcgtg

SEQ ID NO: 127605 - DNA, 15 bp, Homo sapiens
gacactgcccagcgt

SEQ ID NO: 127606 - DNA, 15 bp, Homo sapiens
agacactgcccagcg

SEQ ID NO: 127607 - DNA, 15 bp, Homo sapiens
cagacactgcccagc

SEQ ID NO: 127608 - DNA, 15 bp, Homo sapiens
gcagacactgcccag

SEQ ID NO: 127609 - DNA, 15 bp, Homo sapiens
ggcagacactgccca

SEQ ID NO: 127610 - DNA, 15 bp, Homo sapiens
aggcagacactgccc

SEQ ID NO: 127611 - DNA, 15 bp, Homo sapiens
gaggcagacactgcc

SEQ ID NO: 127612 - DNA, 15 bp, Homo sapiens
agaggcagacactgc

SEQ ID NO: 127613 - DNA, 15 bp, Homo sapiens
tagaggcagacactg

SEQ ID NO: 127614 - DNA, 15 bp, Homo sapiens
ttagaggcagacact

SEQ ID NO: 127615 - DNA, 15 bp, Homo sapiens
gttagaggcagacac

SEQ ID NO: 127616 - DNA, 15 bp, Homo sapiens
tgttagaggcagaca

SEQ ID NO: 127617 - DNA, 15 bp, Homo sapiens
ctgttagaggcagac

SEQ ID NO: 127618 - DNA, 15 bp, Homo sapiens
actgttagaggcaga

SEQ ID NO: 127619 - DNA, 15 bp, Homo sapiens
gactgttagaggcag

SEQ ID NO: 127620 - DNA, 15 bp, Homo sapiens
agactgttagaggca

SEQ ID NO: 127621 - DNA, 15 bp, Homo sapiens
gagactgttagaggc

SEQ ID NO: 127622 - DNA, 15 bp, Homo sapiens
ggagactgttagagg

SEQ ID NO: 127623 - DNA, 15 bp, Homo sapiens
gggagactgttagag

SEQ ID NO: 127624 - DNA, 15 bp, Homo sapiens
agggagactgttaga

SEQ ID NO: 127625 - DNA, 15 bp, Homo sapiens
cagggagactgttag

SEQ ID NO: 127626 - DNA, 15 bp, Homo sapiens
acagggagactgtta

SEQ ID NO: 127627 - DNA, 15 bp, Homo sapiens
aacagggagactgtt

SEQ ID NO: 127628 - DNA, 15 bp, Homo sapiens
gaacagggagactgt

SEQ ID NO: 127629 - DNA, 15 bp, Homo sapiens
ggaacagggagactg

SEQ ID NO: 127630 - DNA, 15 bp, Homo sapiens
tggaacagggagact

SEQ ID NO: 127631 - DNA, 15 bp, Homo sapiens
ctggaacagggagac

SEQ ID NO: 127632 - DNA, 15 bp, Homo sapiens
gctggaacagggaga

SEQ ID NO: 127633 - DNA, 15 bp, Homo sapiens
agctggaacagggag

SEQ ID NO: 127634 - DNA, 15 bp, Homo sapiens
cagctggaacaggga

SEQ ID NO: 127635 - DNA, 15 bp, Homo sapiens
gcagctggaacaggg

SEQ ID NO: 127636 - DNA, 15 bp, Homo sapiens
tgcagctggaacagg

SEQ ID NO: 127637 - DNA, 15 bp, Homo sapiens
atgcagctggaacag

SEQ ID NO: 127638 - DNA, 15 bp, Homo sapiens
tatgcagctggaaca

SEQ ID NO: 127639 - DNA, 15 bp, Homo sapiens
ctatgcagctggaac

SEQ ID NO: 127640 - DNA, 15 bp, Homo sapiens
actatgcagctggaa

SEQ ID NO: 127641 - DNA, 15 bp, Homo sapiens
cactatgcagctgga

SEQ ID NO: 127642 - DNA, 15 bp, Homo sapiens
gcactatgcagctgg

SEQ ID NO: 127643 - DNA, 15 bp, Homo sapiens
agcactatgcagctg

SEQ ID NO: 127644 - DNA, 15 bp, Homo sapiens
cagcactatgcagct

SEQ ID NO: 127645 - DNA, 15 bp, Homo sapiens
acagcactatgcagc

SEQ ID NO: 127646 - DNA, 15 bp, Homo sapiens
tacagcactatgcag

SEQ ID NO: 127647 - DNA, 15 bp, Homo sapiens
ctacagcactatgca

SEQ ID NO: 127648 - DNA, 15 bp, Homo sapiens
cctacagcactatgc

SEQ ID NO: 127649 - DNA, 15 bp, Homo sapiens
gcctacagcactatg

SEQ ID NO: 127650 - DNA, 15 bp, Homo sapiens
tgcctacagcactat

SEQ ID NO: 127651 - DNA, 15 bp, Homo sapiens
ttgcctacagcacta

SEQ ID NO: 127652 - DNA, 15 bp, Homo sapiens
cttgcctacagcact

SEQ ID NO: 127653 - DNA, 15 bp, Homo sapiens
gcttgcctacagcac

SEQ ID NO: 127654 - DNA, 15 bp, Homo sapiens
ggcttgcctacagca

SEQ ID NO: 127655 - DNA, 15 bp, Homo sapiens
tggcttgcctacagc

SEQ ID NO: 127656 - DNA, 15 bp, Homo sapiens
atggcttgcctacag

SEQ ID NO: 127657 - DNA, 15 bp, Homo sapiens
gatggcttgcctaca

SEQ ID NO: 127658 - DNA, 15 bp, Homo sapiens
agatggcttgcctac

SEQ ID NO: 127659 - DNA, 15 bp, Homo sapiens
aagatggcttgccta

SEQ ID NO: 127660 - DNA, 15 bp, Homo sapiens
aaagatggcttgcct

SEQ ID NO: 127661 - DNA, 15 bp, Homo sapiens
gaaagatggcttgcc

SEQ ID NO: 127662 - DNA, 15 bp, Homo sapiens
agaaagatggcttgc

SEQ ID NO: 127663 - DNA, 15 bp, Homo sapiens
cagaaagatggcttg

SEQ ID NO: 127664 - DNA, 15 bp, Homo sapiens
ccagaaagatggctt

SEQ ID NO: 127665 - DNA, 15 bp, Homo sapiens
tccagaaagatggct

SEQ ID NO: 127666 - DNA, 15 bp, Homo sapiens
ttccagaaagatggc

SEQ ID NO: 127667 - DNA, 15 bp, Homo sapiens
cttccagaaagatgg

SEQ ID NO: 127668 - DNA, 15 bp, Homo sapiens
gcttccagaaagatg

SEQ ID NO: 127669 - DNA, 15 bp, Homo sapiens
tgcttccagaaagat

SEQ ID NO: 127670 - DNA, 15 bp, Homo sapiens
atgcttccagaaaga

SEQ ID NO: 127671 - DNA, 15 bp, Homo sapiens
gatgcttccagaaag

SEQ ID NO: 127672 - DNA, 15 bp, Homo sapiens
agatgcttccagaaa

SEQ ID NO: 127673 - DNA, 15 bp, Homo sapiens
tagatgcttccagaa

SEQ ID NO: 127674 - DNA, 15 bp, Homo sapiens
ttagatgcttccaga

SEQ ID NO: 127675 - DNA, 15 bp, Homo sapiens
tttagatgcttccag

SEQ ID NO: 127676 - DNA, 15 bp, Homo sapiens
ctttagatgcttcca

SEQ ID NO: 127677 - DNA, 15 bp, Homo sapiens
actttagatgcttcc

SEQ ID NO: 127678 - DNA, 15 bp, Homo sapiens
aactttagatgcttc

SEQ ID NO: 127679 - DNA, 15 bp, Homo sapiens
aaactttagatgctt

SEQ ID NO: 127680 - DNA, 15 bp, Homo sapiens
caaactttagatgct

SEQ ID NO: 127681 - DNA, 15 bp, Homo sapiens
gcaaactttagatgc

SEQ ID NO: 127682 - DNA, 15 bp, Homo sapiens
cgcaaactttagatg

SEQ ID NO: 127683 - DNA, 15 bp, Homo sapiens
gcgcaaactttagat

SEQ ID NO: 127684 - DNA, 15 bp, Homo sapiens
agcgcaaactttaga

SEQ ID NO: 127685 - DNA, 15 bp, Homo sapiens
aagcgcaaactttag

SEQ ID NO: 127686 - DNA, 15 bp, Homo sapiens
taagcgcaaacttta

SEQ ID NO: 127687 - DNA, 15 bp, Homo sapiens
ttaagcgcaaacttt

SEQ ID NO: 127688 - DNA, 15 bp, Homo sapiens
tttaagcgcaaactt

SEQ ID NO: 127689 - DNA, 15 bp, Homo sapiens
atttaagcgcaaact

SEQ ID NO: 127690 - DNA, 15 bp, Homo sapiens
tatttaagcgcaaac

SEQ ID NO: 127691 - DNA, 15 bp, Homo sapiens
ttatttaagcgcaaa

SEQ ID NO: 127692 - DNA, 15 bp, Homo sapiens
cttatttaagcgcaa

SEQ ID NO: 127693 - DNA, 15 bp, Homo sapiens
gcttatttaagcgca

SEQ ID NO: 127694 - DNA, 15 bp, Homo sapiens
ggcttatttaagcgc

SEQ ID NO: 127695 - DNA, 15 bp, Homo sapiens
gggcttatttaagcg

SEQ ID NO: 127696 - DNA, 15 bp, Homo sapiens
tgggcttatttaagc

SEQ ID NO: 127697 - DNA, 15 bp, Homo sapiens
atgggcttatttaag

SEQ ID NO: 127698 - DNA, 15 bp, Homo sapiens
catgggcttatttaa

SEQ ID NO: 127699 - DNA, 15 bp, Homo sapiens
acatgggcttattta

SEQ ID NO: 127700 - DNA, 15 bp, Homo sapiens
gacatgggcttattt

SEQ ID NO: 127701 - DNA, 15 bp, Homo sapiens
tgacatgggcttatt

SEQ ID NO: 127702 - DNA, 15 bp, Homo sapiens
ctgacatgggcttat

SEQ ID NO: 127703 - DNA, 15 bp, Homo sapiens
tctgacatgggctta

SEQ ID NO: 127704 - DNA, 15 bp, Homo sapiens
ctctgacatgggctt

SEQ ID NO: 127705 - DNA, 15 bp, Homo sapiens
cctctgacatgggct

SEQ ID NO: 127706 - DNA, 15 bp, Homo sapiens
acctctgacatgggc

SEQ ID NO: 127707 - DNA, 15 bp, Homo sapiens
gacctctgacatggg

SEQ ID NO: 127708 - DNA, 15 bp, Homo sapiens
ggacctctgacatgg

SEQ ID NO: 127709 - DNA, 15 bp, Homo sapiens
aggacctctgacatg

SEQ ID NO: 127710 - DNA, 15 bp, Homo sapiens
gaggacctctgacat

SEQ ID NO: 127711 - DNA, 15 bp, Homo sapiens
tgaggacctctgaca

SEQ ID NO: 127712 - DNA, 15 bp, Homo sapiens
ctgaggacctctgac

SEQ ID NO: 127713 - DNA, 15 bp, Homo sapiens
tctgaggacctctga

SEQ ID NO: 127714 - DNA, 15 bp, Homo sapiens
ctctgaggacctctg

SEQ ID NO: 127715 - DNA, 15 bp, Homo sapiens
tctctgaggacctct

SEQ ID NO: 127716 - DNA, 15 bp, Homo sapiens
ctctctgaggacctc

SEQ ID NO: 127717 - DNA, 15 bp, Homo sapiens
tctctctgaggacct

SEQ ID NO: 127718 - DNA, 15 bp, Homo sapiens
ttctctctgaggacc

SEQ ID NO: 127719 - DNA, 15 bp, Homo sapiens
tttctctctgaggac

SEQ ID NO: 127720 - DNA, 15 bp, Homo sapiens
ctttctctctgagga

SEQ ID NO: 127721 - DNA, 15 bp, Homo sapiens
tctttctctctgagg

SEQ ID NO: 127722 - DNA, 15 bp, Homo sapiens
ctctttctctctgag

SEQ ID NO: 127723 - DNA, 15 bp, Homo sapiens
gctctttctctctga

SEQ ID NO: 127724 - DNA, 15 bp, Homo sapiens
agctctttctctctg

SEQ ID NO: 127725 - DNA, 15 bp, Homo sapiens
cagctctttctctct

SEQ ID NO: 127726 - DNA, 15 bp, Homo sapiens
ccagctctttctctc

SEQ ID NO: 127727 - DNA, 15 bp, Homo sapiens
gccagctctttctct

SEQ ID NO: 127728 - DNA, 15 bp, Homo sapiens
cgccagctctttctc

SEQ ID NO: 127729 - DNA, 15 bp, Homo sapiens
tcgccagctctttct

SEQ ID NO: 127730 - DNA, 15 bp, Homo sapiens
ctcgccagctctttc

SEQ ID NO: 127731 - DNA, 15 bp, Homo sapiens
cctcgccagctcttt

SEQ ID NO: 127732 - DNA, 15 bp, Homo sapiens
gcctcgccagctctt

SEQ ID NO: 127733 - DNA, 15 bp, Homo sapiens
tgcctcgccagctct

SEQ ID NO: 127734 - DNA, 15 bp, Homo sapiens
gtgcctcgccagctc

SEQ ID NO: 127735 - DNA, 15 bp, Homo sapiens
agtgcctcgccagct

SEQ ID NO: 127736 - DNA, 15 bp, Homo sapiens
gagtgcctcgccagc

SEQ ID NO: 127737 - DNA, 15 bp, Homo sapiens
agagtgcctcgccag

SEQ ID NO: 127738 - DNA, 15 bp, Homo sapiens
cagagtgcctcgcca

SEQ ID NO: 127739 - DNA, 15 bp, Homo sapiens
acagagtgcctcgcc

SEQ ID NO: 127740 - DNA, 15 bp, Homo sapiens
cacagagtgcctcgc

SEQ ID NO: 127741 - DNA, 15 bp, Homo sapiens
ccacagagtgcctcg

SEQ ID NO: 127742 - DNA, 15 bp, Homo sapiens
tccacagagtgcctc

SEQ ID NO: 127743 - DNA, 15 bp, Homo sapiens
atccacagagtgcct

SEQ ID NO: 127744 - DNA, 15 bp, Homo sapiens
catccacagagtgcc

SEQ ID NO: 127745 - DNA, 15 bp, Homo sapiens
gcatccacagagtgc

SEQ ID NO: 127746 - DNA, 15 bp, Homo sapiens
agcatccacagagtg

SEQ ID NO: 127747 - DNA, 15 bp, Homo sapiens
tagcatccacagagt

SEQ ID NO: 127748 - DNA, 15 bp, Homo sapiens
gtagcatccacagag

SEQ ID NO: 127749 - DNA, 15 bp, Homo sapiens
cgtagcatccacaga

SEQ ID NO: 127750 - DNA, 15 bp, Homo sapiens
tcgtagcatccacag

SEQ ID NO: 127751 - DNA, 15 bp, Homo sapiens
ttcgtagcatccaca

SEQ ID NO: 127752 - DNA, 15 bp, Homo sapiens
tttcgtagcatccac

SEQ ID NO: 127753 - DNA, 15 bp, Homo sapiens
atttcgtagcatcca

SEQ ID NO: 127754 - DNA, 15 bp, Homo sapiens
aatttcgtagcatcc

SEQ ID NO: 127755 - DNA, 15 bp, Homo sapiens
caatttcgtagcatc

SEQ ID NO: 127756 - DNA, 15 bp, Homo sapiens
acaatttcgtagcat

SEQ ID NO: 127757 - DNA, 15 bp, Homo sapiens
tacaatttcgtagca

SEQ ID NO: 127758 - DNA, 15 bp, Homo sapiens
ctacaatttcgtagc

SEQ ID NO: 127759 - DNA, 15 bp, Homo sapiens
actacaatttcgtag

SEQ ID NO: 127760 - DNA, 15 bp, Homo sapiens
cactacaatttcgta

SEQ ID NO: 127761 - DNA, 15 bp, Homo sapiens
ccactacaatttcgt

SEQ ID NO: 127762 - DNA, 15 bp, Homo sapiens
gccactacaatttcg

SEQ ID NO: 127763 - DNA, 15 bp, Homo sapiens
agccactacaatttc

SEQ ID NO: 127764 - DNA, 15 bp, Homo sapiens
cagccactacaattt

SEQ ID NO: 127765 - DNA, 15 bp, Homo sapiens
gcagccactacaatt

SEQ ID NO: 127766 - DNA, 15 bp, Homo sapiens
tgcagccactacaat

SEQ ID NO: 127767 - DNA, 15 bp, Homo sapiens
ctgcagccactacaa

SEQ ID NO: 127768 - DNA, 15 bp, Homo sapiens
actgcagccactaca

SEQ ID NO: 127769 - DNA, 15 bp, Homo sapiens
cactgcagccactac

SEQ ID NO: 127770 - DNA, 15 bp, Homo sapiens
gcactgcagccacta

SEQ ID NO: 127771 - DNA, 15 bp, Homo sapiens
agcactgcagccact

SEQ ID NO: 127772 - DNA, 15 bp, Homo sapiens
gagcactgcagccac

SEQ ID NO: 127773 - DNA, 15 bp, Homo sapiens
tgagcactgcagcca

SEQ ID NO: 127774 - DNA, 15 bp, Homo sapiens
ctgagcactgcagcc

SEQ ID NO: 127775 - DNA, 15 bp, Homo sapiens
tctgagcactgcagc

SEQ ID NO: 127776 - DNA, 15 bp, Homo sapiens
ctctgagcactgcag

SEQ ID NO: 127777 - DNA, 15 bp, Homo sapiens
tctctgagcactgca

SEQ ID NO: 127778 - DNA, 15 bp, Homo sapiens
ttctctgagcactgc

SEQ ID NO: 127779 - DNA, 15 bp, Homo sapiens
tttctctgagcactg

SEQ ID NO: 127780 - DNA, 15 bp, Homo sapiens
gtttctctgagcact

SEQ ID NO: 127781 - DNA, 15 bp, Homo sapiens
cgtttctctgagcac

SEQ ID NO: 127782 - DNA, 15 bp, Homo sapiens
ccgtttctctgagca

SEQ ID NO: 127783 - DNA, 15 bp, Homo sapiens
cccgtttctctgagc

SEQ ID NO: 127784 - DNA, 15 bp, Homo sapiens
tcccgtttctctgag

SEQ ID NO: 127785 - DNA, 15 bp, Homo sapiens
ctcccgtttctctga

SEQ ID NO: 127786 - DNA, 15 bp, Homo sapiens
cctcccgtttctctg

SEQ ID NO: 127787 - DNA, 15 bp, Homo sapiens
acctcccgtttctct

SEQ ID NO: 127788 - DNA, 15 bp, Homo sapiens
gacctcccgtttctc

SEQ ID NO: 127789 - DNA, 15 bp, Homo sapiens
tgacctcccgtttct

SEQ ID NO: 127790 - DNA, 15 bp, Homo sapiens
atgacctcccgtttc

SEQ ID NO: 127791 - DNA, 15 bp, Homo sapiens
aatgacctcccgttt

SEQ ID NO: 127792 - DNA, 15 bp, Homo sapiens
aaatgacctcccgtt

SEQ ID NO: 127793 - DNA, 15 bp, Homo sapiens
gaaatgacctcccgt

SEQ ID NO: 127794 - DNA, 15 bp, Homo sapiens
agaaatgacctcccg

SEQ ID NO: 127795 - DNA, 15 bp, Homo sapiens
gagaaatgacctccc

SEQ ID NO: 127796 - DNA, 15 bp, Homo sapiens
agagaaatgacctcc

SEQ ID NO: 127797 - DNA, 15 bp, Homo sapiens
aagagaaatgacctc

SEQ ID NO: 127798 - DNA, 15 bp, Homo sapiens
aaagagaaatgacct

SEQ ID NO: 127799 - DNA, 15 bp, Homo sapiens
caaagagaaatgacc

SEQ ID NO: 127800 - DNA, 15 bp, Homo sapiens
acaaagagaaatgac

SEQ ID NO: 127801 - DNA, 15 bp, Homo sapiens
cacaaagagaaatga

SEQ ID NO: 127802 - DNA, 15 bp, Homo sapiens
acacaaagagaaatg

SEQ ID NO: 127803 - DNA, 15 bp, Homo sapiens
aacacaaagagaaat

SEQ ID NO: 127804 - DNA, 15 bp, Homo sapiens
aaacacaaagagaaa

SEQ ID NO: 127805 - DNA, 15 bp, Homo sapiens
caaacacaaagagaa

SEQ ID NO: 127806 - DNA, 15 bp, Homo sapiens
ccaaacacaaagaga

SEQ ID NO: 127807 - DNA, 15 bp, Homo sapiens
tccaaacacaaagag

SEQ ID NO: 127808 - DNA, 15 bp, Homo sapiens
gtccaaacacaaaga

SEQ ID NO: 127809 - DNA, 15 bp, Homo sapiens
agtccaaacacaaag

SEQ ID NO: 127810 - DNA, 15 bp, Homo sapiens
aagtccaaacacaaa

SEQ ID NO: 127811 - DNA, 15 bp, Homo sapiens
aaagtccaaacacaa

SEQ ID NO: 127812 - DNA, 15 bp, Homo sapiens
gaaagtccaaacaca

SEQ ID NO: 127813 - DNA, 15 bp, Homo sapiens
agaaagtccaaacac

SEQ ID NO: 127814 - DNA, 15 bp, Homo sapiens
tagaaagtccaaaca

SEQ ID NO: 127815 - DNA, 15 bp, Homo sapiens
ctagaaagtccaaac

SEQ ID NO: 127816 - DNA, 15 bp, Homo sapiens
tctagaaagtccaaa

SEQ ID NO: 127817 - DNA, 15 bp, Homo sapiens
ttctagaaagtccaa

SEQ ID NO: 127818 - DNA, 15 bp, Homo sapiens
attctagaaagtcca

SEQ ID NO: 127819 - DNA, 15 bp, Homo sapiens
cattctagaaagtcc

SEQ ID NO: 127820 - DNA, 15 bp, Homo sapiens
ccattctagaaagtc

SEQ ID NO: 127821 - DNA, 15 bp, Homo sapiens
gccattctagaaagt

SEQ ID NO: 127822 - DNA, 15 bp, Homo sapiens
ggccattctagaaag

SEQ ID NO: 127823 - DNA, 15 bp, Homo sapiens
tggccattctagaaa

SEQ ID NO: 127824 - DNA, 15 bp, Homo sapiens
ctggccattctagaa

SEQ ID NO: 127825 - DNA, 15 bp, Homo sapiens
cctggccattctaga

SEQ ID NO: 127826 - DNA, 15 bp, Homo sapiens
tcctggccattctag

SEQ ID NO: 127827 - DNA, 15 bp, Homo sapiens
ttcctggccattcta

SEQ ID NO: 127828 - DNA, 15 bp, Homo sapiens
cttcctggccattct

SEQ ID NO: 127829 - DNA, 15 bp, Homo sapiens
tcttcctggccattc

SEQ ID NO: 127830 - DNA, 15 bp, Homo sapiens
atcttcctggccatt

SEQ ID NO: 127831 - DNA, 15 bp, Homo sapiens
catcttcctggccat

SEQ ID NO: 127832 - DNA, 15 bp, Homo sapiens
ccatcttcctggcca

SEQ ID NO: 127833 - DNA, 15 bp, Homo sapiens
gccatcttcctggcc

SEQ ID NO: 127834 - DNA, 15 bp, Homo sapiens
tgccatcttcctggc

SEQ ID NO: 127835 - DNA, 15 bp, Homo sapiens
ctgccatcttcctgg

SEQ ID NO: 127836 - DNA, 15 bp, Homo sapiens
cctgccatcttcctg

SEQ ID NO: 127837 - DNA, 15 bp, Homo sapiens
ccctgccatcttcct

SEQ ID NO: 127838 - DNA, 15 bp, Homo sapiens
accctgccatcttcc

SEQ ID NO: 127839 - DNA, 15 bp, Homo sapiens
gaccctgccatcttc

SEQ ID NO: 127840 - DNA, 15 bp, Homo sapiens
agaccctgccatctt

SEQ ID NO: 127841 - DNA, 15 bp, Homo sapiens
gagaccctgccatct

SEQ ID NO: 127842 - DNA, 15 bp, Homo sapiens
agagaccctgccatc

SEQ ID NO: 127843 - DNA, 15 bp, Homo sapiens
gagagaccctgccat

SEQ ID NO: 127844 - DNA, 15 bp, Homo sapiens
ggagagaccctgcca

SEQ ID NO: 127845 - DNA, 15 bp, Homo sapiens
gggagagaccctgcc

SEQ ID NO: 127846 - DNA, 15 bp, Homo sapiens
tgggagagaccctgc

SEQ ID NO: 127847 - DNA, 15 bp, Homo sapiens
gtgggagagaccctg

SEQ ID NO: 127848 - DNA, 15 bp, Homo sapiens
ggtgggagagaccct

SEQ ID NO: 127849 - DNA, 15 bp, Homo sapiens
aggtgggagagaccc

SEQ ID NO: 127850 - DNA, 15 bp, Homo sapiens
aaggtgggagagacc

SEQ ID NO: 127851 - DNA, 15 bp, Homo sapiens
gaaggtgggagagac

SEQ ID NO: 127852 - DNA, 15 bp, Homo sapiens
tgaaggtgggagaga

SEQ ID NO: 127853 - DNA, 15 bp, Homo sapiens
ctgaaggtgggagag

SEQ ID NO: 127854 - DNA, 15 bp, Homo sapiens
cctgaaggtgggaga

SEQ ID NO: 127855 - DNA, 15 bp, Homo sapiens
acctgaaggtgggag

SEQ ID NO: 127856 - DNA, 15 bp, Homo sapiens
gacctgaaggtggga

SEQ ID NO: 127857 - DNA, 15 bp, Homo sapiens
agacctgaaggtggg

SEQ ID NO: 127858 - DNA, 15 bp, Homo sapiens
gagacctgaaggtgg

SEQ ID NO: 127859 - DNA, 15 bp, Homo sapiens
agagacctgaaggtg

SEQ ID NO: 127860 - DNA, 15 bp, Homo sapiens
aagagacctgaaggt

SEQ ID NO: 127861 - DNA, 15 bp, Homo sapiens
aaagagacctgaagg

SEQ ID NO: 127862 - DNA, 15 bp, Homo sapiens
gaaagagacctgaag

SEQ ID NO: 127863 - DNA, 15 bp, Homo sapiens
agaaagagacctgaa

SEQ ID NO: 127864 - DNA, 15 bp, Homo sapiens
cagaaagagacctga

SEQ ID NO: 127865 - DNA, 15 bp, Homo sapiens
ccagaaagagacctg

SEQ ID NO: 127866 - DNA, 15 bp, Homo sapiens
tccagaaagagacct

SEQ ID NO: 127867 - DNA, 15 bp, Homo sapiens
atccagaaagagacc

SEQ ID NO: 127868 - DNA, 15 bp, Homo sapiens
aatccagaaagagac

SEQ ID NO: 127869 - DNA, 15 bp, Homo sapiens
taatccagaaagaga

SEQ ID NO: 127870 - DNA, 15 bp, Homo sapiens
ctaatccagaaagag

SEQ ID NO: 127871 - DNA, 15 bp, Homo sapiens
actaatccagaaaga

SEQ ID NO: 127872 - DNA, 15 bp, Homo sapiens
gactaatccagaaag

SEQ ID NO: 127873 - DNA, 15 bp, Homo sapiens
tgactaatccagaaa

SEQ ID NO: 127874 - DNA, 15 bp, Homo sapiens
ctgactaatccagaa

SEQ ID NO: 127875 - DNA, 15 bp, Homo sapiens
tctgactaatccaga

SEQ ID NO: 127876 - DNA, 15 bp, Homo sapiens
atctgactaatccag

SEQ ID NO: 127877 - DNA, 15 bp, Homo sapiens
catctgactaatcca

SEQ ID NO: 127878 - DNA, 15 bp, Homo sapiens
acatctgactaatcc

SEQ ID NO: 127879 - DNA, 15 bp, Homo sapiens
gacatctgactaatc

SEQ ID NO: 127880 - DNA, 15 bp, Homo sapiens
ggacatctgactaat

SEQ ID NO: 127881 - DNA, 15 bp, Homo sapiens
tggacatctgactaa

SEQ ID NO: 127882 - DNA, 15 bp, Homo sapiens
gtggacatctgacta

SEQ ID NO: 127883 - DNA, 15 bp, Homo sapiens
cgtggacatctgact

SEQ ID NO: 127884 - DNA, 15 bp, Homo sapiens
gcgtggacatctgac

SEQ ID NO: 127885 - DNA, 15 bp, Homo sapiens
tgcgtggacatctga

SEQ ID NO: 127886 - DNA, 15 bp, Homo sapiens
ttgcgtggacatctg

SEQ ID NO: 127887 - DNA, 15 bp, Homo sapiens
tttgcgtggacatct

SEQ ID NO: 127888 - DNA, 15 bp, Homo sapiens
ttttgcgtggacatc

SEQ ID NO: 127889 - DNA, 15 bp, Homo sapiens
attttgcgtggacat

SEQ ID NO: 127890 - DNA, 15 bp, Homo sapiens
gattttgcgtggaca

SEQ ID NO: 127891 - DNA, 15 bp, Homo sapiens
ggattttgcgtggac

SEQ ID NO: 127892 - DNA, 15 bp, Homo sapiens
tggattttgcgtgga

SEQ ID NO: 127893 - DNA, 15 bp, Homo sapiens
gtggattttgcgtgg

SEQ ID NO: 127894 - DNA, 15 bp, Homo sapiens
agtggattttgcgtg

SEQ ID NO: 127895 - DNA, 15 bp, Homo sapiens
cagtggattttgcgt

SEQ ID NO: 127896 - DNA, 15 bp, Homo sapiens
ccagtggattttgcg

SEQ ID NO: 127897 - DNA, 15 bp, Homo sapiens
cccagtggattttgc

SEQ ID NO: 127898 - DNA, 15 bp, Homo sapiens
ccccagtggattttg

SEQ ID NO: 127899 - DNA, 15 bp, Homo sapiens
tccccagtggatttt

SEQ ID NO: 127900 - DNA, 15 bp, Homo sapiens
ttccccagtggattt

SEQ ID NO: 127901 - DNA, 15 bp, Homo sapiens
tttccccagtggatt

SEQ ID NO: 127902 - DNA, 15 bp, Homo sapiens
atttccccagtggat

SEQ ID NO: 127903 - DNA, 15 bp, Homo sapiens
aatttccccagtgga

SEQ ID NO: 127904 - DNA, 15 bp, Homo sapiens
aaatttccccagtgg

SEQ ID NO: 127905 - DNA, 15 bp, Homo sapiens
gaaatttccccagtg

SEQ ID NO: 127906 - DNA, 15 bp, Homo sapiens
ggaaatttccccagt

SEQ ID NO: 127907 - DNA, 15 bp, Homo sapiens
gggaaatttccccag

SEQ ID NO: 127908 - DNA, 15 bp, Homo sapiens
agggaaatttcccca

SEQ ID NO: 127909 - DNA, 15 bp, Homo sapiens
cagggaaatttcccc

SEQ ID NO: 127910 - DNA, 15 bp, Homo sapiens
ccagggaaatttccc

SEQ ID NO: 127911 - DNA, 15 bp, Homo sapiens
accagggaaatttcc

SEQ ID NO: 127912 - DNA, 15 bp, Homo sapiens
caccagggaaatttc

SEQ ID NO: 127913 - DNA, 15 bp, Homo sapiens
ccaccagggaaattt

SEQ ID NO: 127914 - DNA, 15 bp, Homo sapiens
cccaccagggaaatt

SEQ ID NO: 127915 - DNA, 15 bp, Homo sapiens
tcccaccagggaaat

SEQ ID NO: 127916 - DNA, 15 bp, Homo sapiens
ctcccaccagggaaa

SEQ ID NO: 127917 - DNA, 15 bp, Homo sapiens
tctcccaccagggaa

SEQ ID NO: 127918 - DNA, 15 bp, Homo sapiens
gtctcccaccaggga

SEQ ID NO: 127919 - DNA, 15 bp, Homo sapiens
agtctcccaccaggg

SEQ ID NO: 127920 - DNA, 15 bp, Homo sapiens
gagtctcccaccagg

SEQ ID NO: 127921 - DNA, 15 bp, Homo sapiens
tgagtctcccaccag

SEQ ID NO: 127922 - DNA, 15 bp, Homo sapiens
ttgagtctcccacca

SEQ ID NO: 127923 - DNA, 15 bp, Homo sapiens
tttgagtctcccacc

SEQ ID NO: 127924 - DNA, 15 bp, Homo sapiens
ctttgagtctcccac

SEQ ID NO: 127925 - DNA, 15 bp, Homo sapiens
tctttgagtctccca

SEQ ID NO: 127926 - DNA, 15 bp, Homo sapiens
gtctttgagtctccc

SEQ ID NO: 127927 - DNA, 15 bp, Homo sapiens
agtctttgagtctcc

SEQ ID NO: 127928 - DNA, 15 bp, Homo sapiens
gagtctttgagtctc

SEQ ID NO: 127929 - DNA, 15 bp, Homo sapiens
tgagtctttgagtct

SEQ ID NO: 127930 - DNA, 15 bp, Homo sapiens
ctgagtctttgagtc

SEQ ID NO: 127931 - DNA, 15 bp, Homo sapiens
actgagtctttgagt

SEQ ID NO: 127932 - DNA, 15 bp, Homo sapiens
aactgagtctttgag

SEQ ID NO: 127933 - DNA, 15 bp, Homo sapiens
aaactgagtctttga

SEQ ID NO: 127934 - DNA, 15 bp, Homo sapiens
gaaactgagtctttg

SEQ ID NO: 127935 - DNA, 15 bp, Homo sapiens
agaaactgagtcttt

SEQ ID NO: 127936 - DNA, 15 bp, Homo sapiens
tagaaactgagtctt

SEQ ID NO: 127937 - DNA, 15 bp, Homo sapiens
ctagaaactgagtct

SEQ ID NO: 127938 - DNA, 15 bp, Homo sapiens
gctagaaactgagtc

SEQ ID NO: 127939 - DNA, 15 bp, Homo sapiens
ggctagaaactgagt

SEQ ID NO: 127940 - DNA, 15 bp, Homo sapiens
tggctagaaactgag

SEQ ID NO: 127941 - DNA, 15 bp, Homo sapiens
ttggctagaaactga

SEQ ID NO: 127942 - DNA, 15 bp, Homo sapiens
tttggctagaaactg

SEQ ID NO: 127943 - DNA, 15 bp, Homo sapiens
ctttggctagaaact

SEQ ID NO: 127944 - DNA, 15 bp, Homo sapiens
cctttggctagaaac

SEQ ID NO: 127945 - DNA, 15 bp, Homo sapiens
acctttggctagaaa

SEQ ID NO: 127946 - DNA, 15 bp, Homo sapiens
cacctttggctagaa

SEQ ID NO: 127947 - DNA, 15 bp, Homo sapiens
tcacctttggctaga

SEQ ID NO: 127948 - DNA, 15 bp, Homo sapiens
ctcacctttggctag

SEQ ID NO: 127949 - DNA, 15 bp, Homo sapiens
cctcacctttggcta

SEQ ID NO: 127950 - DNA, 15 bp, Homo sapiens
tcctcacctttggct

SEQ ID NO: 127951 - DNA, 15 bp, Homo sapiens
atcctcacctttggc

SEQ ID NO: 127952 - DNA, 15 bp, Homo sapiens
gatcctcacctttgg

SEQ ID NO: 127953 - DNA, 15 bp, Homo sapiens
agatcctcacctttg

SEQ ID NO: 127954 - DNA, 15 bp, Homo sapiens
tagatcctcaccttt

SEQ ID NO: 127955 - DNA, 15 bp, Homo sapiens
gtagatcctcacctt

SEQ ID NO: 127956 - DNA, 15 bp, Homo sapiens
ggtagatcctcacct

SEQ ID NO: 127957 - DNA, 15 bp, Homo sapiens
aggtagatcctcacc

SEQ ID NO: 127958 - DNA, 15 bp, Homo sapiens
gaggtagatcctcac

SEQ ID NO: 127959 - DNA, 15 bp, Homo sapiens
agaggtagatcctca

SEQ ID NO: 127960 - DNA, 15 bp, Homo sapiens
gagaggtagatcctc

SEQ ID NO: 127961 - DNA, 15 bp, Homo sapiens
ggagaggtagatcct

SEQ ID NO: 127962 - DNA, 15 bp, Homo sapiens
aggagaggtagatcc

SEQ ID NO: 127963 - DNA, 15 bp, Homo sapiens
aaggagaggtagatc

SEQ ID NO: 127964 - DNA, 15 bp, Homo sapiens
gaaggagaggtagat

SEQ ID NO: 127965 - DNA, 15 bp, Homo sapiens
ggaaggagaggtaga

SEQ ID NO: 127966 - DNA, 15 bp, Homo sapiens
aggaaggagaggtag

SEQ ID NO: 127967 - DNA, 15 bp, Homo sapiens
caggaaggagaggta

SEQ ID NO: 127968 - DNA, 15 bp, Homo sapiens
ccaggaaggagaggt

SEQ ID NO: 127969 - DNA, 15 bp, Homo sapiens
gccaggaaggagagg

SEQ ID NO: 127970 - DNA, 15 bp, Homo sapiens
agccaggaaggagag

SEQ ID NO: 127971 - DNA, 15 bp, Homo sapiens
gagccaggaaggaga

SEQ ID NO: 127972 - DNA, 15 bp, Homo sapiens
ggagccaggaaggag

SEQ ID NO: 127973 - DNA, 15 bp, Homo sapiens
tggagccaggaagga

SEQ ID NO: 127974 - DNA, 15 bp, Homo sapiens
ctggagccaggaagg

SEQ ID NO: 127975 - DNA, 15 bp, Homo sapiens
cctggagccaggaag

SEQ ID NO: 127976 - DNA, 15 bp, Homo sapiens
gcctggagccaggaa

SEQ ID NO: 127977 - DNA, 15 bp, Homo sapiens
tgcctggagccagga

SEQ ID NO: 127978 - DNA, 15 bp, Homo sapiens
ctgcctggagccagg

SEQ ID NO: 127979 - DNA, 15 bp, Homo sapiens
gctgcctggagccag

SEQ ID NO: 127980 - DNA, 15 bp, Homo sapiens
tgctgcctggagcca

SEQ ID NO: 127981 - DNA, 15 bp, Homo sapiens
atgctgcctggagcc

SEQ ID NO: 127982 - DNA, 15 bp, Homo sapiens
aatgctgcctggagc

SEQ ID NO: 127983 - DNA, 15 bp, Homo sapiens
gaatgctgcctggag

SEQ ID NO: 127984 - DNA, 15 bp, Homo sapiens
ggaatgctgcctgga

SEQ ID NO: 127985 - DNA, 15 bp, Homo sapiens
aggaatgctgcctgg

SEQ ID NO: 127986 - DNA, 15 bp, Homo sapiens
taggaatgctgcctg

SEQ ID NO: 127987 - DNA, 15 bp, Homo sapiens
ctaggaatgctgcct

SEQ ID NO: 127988 - DNA, 15 bp, Homo sapiens
tctaggaatgctgcc

SEQ ID NO: 127989 - DNA, 15 bp, Homo sapiens
ttctaggaatgctgc

SEQ ID NO: 127990 - DNA, 15 bp, Homo sapiens
attctaggaatgctg

SEQ ID NO: 127991 - DNA, 15 bp, Homo sapiens
cattctaggaatgct

SEQ ID NO: 127992 - DNA, 15 bp, Homo sapiens
ccattctaggaatgc

SEQ ID NO: 127993 - DNA, 15 bp, Homo sapiens
accattctaggaatg

SEQ ID NO: 127994 - DNA, 15 bp, Homo sapiens
caccattctaggaat

SEQ ID NO: 127995 - DNA, 15 bp, Homo sapiens
tcaccattctaggaa

SEQ ID NO: 127996 - DNA, 15 bp, Homo sapiens
atcaccattctagga

SEQ ID NO: 127997 - DNA, 15 bp, Homo sapiens
aatcaccattctagg

SEQ ID NO: 127998 - DNA, 15 bp, Homo sapiens
gaatcaccattctag

SEQ ID NO: 127999 - DNA, 15 bp, Homo sapiens
agaatcaccattcta

SEQ ID NO: 128000 - DNA, 15 bp, Homo sapiens
aagaatcaccattct

SEQ ID NO: 128001 - DNA, 15 bp, Homo sapiens
taagaatcaccattc

SEQ ID NO: 128002 - DNA, 15 bp, Homo sapiens
gtaagaatcaccatt

SEQ ID NO: 128003 - DNA, 15 bp, Homo sapiens
tgtaagaatcaccat

SEQ ID NO: 128004 - DNA, 15 bp, Homo sapiens
atgtaagaatcacca

SEQ ID NO: 128005 - DNA, 15 bp, Homo sapiens
aatgtaagaatcacc

SEQ ID NO: 128006 - DNA, 15 bp, Homo sapiens
gaatgtaagaatcac

SEQ ID NO: 128007 - DNA, 15 bp, Homo sapiens
agaatgtaagaatca

SEQ ID NO: 128008 - DNA, 15 bp, Homo sapiens
cagaatgtaagaatc

SEQ ID NO: 128009 - DNA, 15 bp, Homo sapiens
ccagaatgtaagaat

SEQ ID NO: 128010 - DNA, 15 bp, Homo sapiens
cccagaatgtaagaa

SEQ ID NO: 128011 - DNA, 15 bp, Homo sapiens
tcccagaatgtaaga

SEQ ID NO: 128012 - DNA, 15 bp, Homo sapiens
gtcccagaatgtaag

SEQ ID NO: 128013 - DNA, 15 bp, Homo sapiens
agtcccagaatgtaa

SEQ ID NO: 128014 - DNA, 15 bp, Homo sapiens
gagtcccagaatgta

SEQ ID NO: 128015 - DNA, 15 bp, Homo sapiens
agagtcccagaatgt

SEQ ID NO: 128016 - DNA, 15 bp, Homo sapiens
tagagtcccagaatg

SEQ ID NO: 128017 - DNA, 15 bp, Homo sapiens
ttagagtcccagaat

SEQ ID NO: 128018 - DNA, 15 bp, Homo sapiens
gttagagtcccagaa

SEQ ID NO: 128019 - DNA, 15 bp, Homo sapiens
tgttagagtcccaga

SEQ ID NO: 128020 - DNA, 15 bp, Homo sapiens
ctgttagagtcccag

SEQ ID NO: 128021 - DNA, 15 bp, Homo sapiens
gctgttagagtccca

SEQ ID NO: 128022 - DNA, 15 bp, Homo sapiens
tgctgttagagtccc

SEQ ID NO: 128023 - DNA, 15 bp, Homo sapiens
atgctgttagagtcc

SEQ ID NO: 128024 - DNA, 15 bp, Homo sapiens
aatgctgttagagtc

SEQ ID NO: 128025 - DNA, 15 bp, Homo sapiens
gaatgctgttagagt

SEQ ID NO: 128026 - DNA, 15 bp, Homo sapiens
agaatgctgttagag

SEQ ID NO: 128027 - DNA, 15 bp, Homo sapiens
cagaatgctgttaga

SEQ ID NO: 128028 - DNA, 15 bp, Homo sapiens
gcagaatgctgttag

SEQ ID NO: 128029 - DNA, 15 bp, Homo sapiens
agcagaatgctgtta

SEQ ID NO: 128030 - DNA, 15 bp, Homo sapiens
cagcagaatgctgtt

SEQ ID NO: 128031 - DNA, 15 bp, Homo sapiens
tcagcagaatgctgt

SEQ ID NO: 128032 - DNA, 15 bp, Homo sapiens
ttcagcagaatgctg

SEQ ID NO: 128033 - DNA, 15 bp, Homo sapiens
tttcagcagaatgct

SEQ ID NO: 128034 - DNA, 15 bp, Homo sapiens
atttcagcagaatgc

SEQ ID NO: 128035 - DNA, 15 bp, Homo sapiens
tatttcagcagaatg

SEQ ID NO: 128036 - DNA, 15 bp, Homo sapiens
atatttcagcagaat

SEQ ID NO: 128037 - DNA, 15 bp, Homo sapiens
catatttcagcagaa

SEQ ID NO: 128038 - DNA, 15 bp, Homo sapiens
ccatatttcagcaga

SEQ ID NO: 128039 - DNA, 15 bp, Homo sapiens
accatatttcagcag

SEQ ID NO: 128040 - DNA, 15 bp, Homo sapiens
taccatatttcagca

SEQ ID NO: 128041 - DNA, 15 bp, Homo sapiens
ttaccatatttcagc

SEQ ID NO: 128042 - DNA, 15 bp, Homo sapiens
cttaccatatttcag

SEQ ID NO: 128043 - DNA, 15 bp, Homo sapiens
gcttaccatatttca

SEQ ID NO: 128044 - DNA, 15 bp, Homo sapiens
tgcttaccatatttc

SEQ ID NO: 128045 - DNA, 15 bp, Homo sapiens
gtgcttaccatattt

SEQ ID NO: 128046 - DNA, 15 bp, Homo sapiens
ggtgcttaccatatt

SEQ ID NO: 128047 - DNA, 15 bp, Homo sapiens
aggtgcttaccatat

SEQ ID NO: 128048 - DNA, 15 bp, Homo sapiens
aaggtgcttaccata

SEQ ID NO: 128049 - DNA, 15 bp, Homo sapiens
gaaggtgcttaccat

SEQ ID NO: 128050 - DNA, 15 bp, Homo sapiens
agaaggtgcttacca

SEQ ID NO: 128051 - DNA, 15 bp, Homo sapiens
tagaaggtgcttacc

SEQ ID NO: 128052 - DNA, 15 bp, Homo sapiens
gtagaaggtgcttac

SEQ ID NO: 128053 - DNA, 15 bp, Homo sapiens
agtagaaggtgctta

SEQ ID NO: 128054 - DNA, 15 bp, Homo sapiens
tagtagaaggtgctt

SEQ ID NO: 128055 - DNA, 15 bp, Homo sapiens
ctagtagaaggtgct

SEQ ID NO: 128056 - DNA, 15 bp, Homo sapiens
cctagtagaaggtgc

SEQ ID NO: 128057 - DNA, 15 bp, Homo sapiens
tcctagtagaaggtg

SEQ ID NO: 128058 - DNA, 15 bp, Homo sapiens
gtcctagtagaaggt

SEQ ID NO: 128059 - DNA, 15 bp, Homo sapiens
ggtcctagtagaagg

SEQ ID NO: 128060 - DNA, 15 bp, Homo sapiens
aggtcctagtagaag

SEQ ID NO: 128061 - DNA, 15 bp, Homo sapiens
aaggtcctagtagaa

SEQ ID NO: 128062 - DNA, 15 bp, Homo sapiens
aaaggtcctagtaga

SEQ ID NO: 128063 - DNA, 15 bp, Homo sapiens
taaaggtcctagtag

SEQ ID NO: 128064 - DNA, 15 bp, Homo sapiens
gtaaaggtcctagta

SEQ ID NO: 128065 - DNA, 15 bp, Homo sapiens
agtaaaggtcctagt

SEQ ID NO: 128066 - DNA, 15 bp, Homo sapiens
cagtaaaggtcctag

SEQ ID NO: 128067 - DNA, 15 bp, Homo sapiens
tcagtaaaggtccta

SEQ ID NO: 128068 - DNA, 15 bp, Homo sapiens
ttcagtaaaggtcct

SEQ ID NO: 128069 - DNA, 15 bp, Homo sapiens
gttcagtaaaggtcc

SEQ ID NO: 128070 - DNA, 15 bp, Homo sapiens
agttcagtaaaggtc

SEQ ID NO: 128071 - DNA, 15 bp, Homo sapiens
aagttcagtaaaggt

SEQ ID NO: 128072 - DNA, 15 bp, Homo sapiens
gaagttcagtaaagg

SEQ ID NO: 128073 - DNA, 15 bp, Homo sapiens
ggaagttcagtaaag

SEQ ID NO: 128074 - DNA, 15 bp, Homo sapiens
gggaagttcagtaaa

SEQ ID NO: 128075 - DNA, 15 bp, Homo sapiens
agggaagttcagtaa

SEQ ID NO: 128076 - DNA, 15 bp, Homo sapiens
gagggaagttcagta

SEQ ID NO: 128077 - DNA, 15 bp, Homo sapiens
agagggaagttcagt

SEQ ID NO: 128078 - DNA, 15 bp, Homo sapiens
aagagggaagttcag

SEQ ID NO: 128079 - DNA, 15 bp, Homo sapiens
caagagggaagttca

SEQ ID NO: 128080 - DNA, 15 bp, Homo sapiens
tcaagagggaagttc

SEQ ID NO: 128081 - DNA, 15 bp, Homo sapiens
ttcaagagggaagtt

SEQ ID NO: 128082 - DNA, 15 bp, Homo sapiens
gttcaagagggaagt

SEQ ID NO: 128083 - DNA, 15 bp, Homo sapiens
ggttcaagagggaag

SEQ ID NO: 128084 - DNA, 15 bp, Homo sapiens
gggttcaagagggaa

SEQ ID NO: 128085 - DNA, 15 bp, Homo sapiens
tgggttcaagaggga

SEQ ID NO: 128086 - DNA, 15 bp, Homo sapiens
ctgggttcaagaggg

SEQ ID NO: 128087 - DNA, 15 bp, Homo sapiens
tctgggttcaagagg

SEQ ID NO: 128088 - DNA, 15 bp, Homo sapiens
ttctgggttcaagag

SEQ ID NO: 128089 - DNA, 15 bp, Homo sapiens
tttctgggttcaaga

SEQ ID NO: 128090 - DNA, 15 bp, Homo sapiens
gtttctgggttcaag

SEQ ID NO: 128091 - DNA, 15 bp, Homo sapiens
ggtttctgggttcaa

SEQ ID NO: 128092 - DNA, 15 bp, Homo sapiens
tggtttctgggttca

SEQ ID NO: 128093 - DNA, 15 bp, Homo sapiens
ctggtttctgggttc

SEQ ID NO: 128094 - DNA, 15 bp, Homo sapiens
actggtttctgggtt

SEQ ID NO: 128095 - DNA, 15 bp, Homo sapiens
aactggtttctgggt

SEQ ID NO: 128096 - DNA, 15 bp, Homo sapiens
aaactggtttctggg

SEQ ID NO: 128097 - DNA, 15 bp, Homo sapiens
taaactggtttctgg

SEQ ID NO: 128098 - DNA, 15 bp, Homo sapiens
ataaactggtttctg

SEQ ID NO: 128099 - DNA, 15 bp, Homo sapiens
aataaactggtttct

SEQ ID NO: 128100 - DNA, 15 bp, Homo sapiens
caataaactggtttc

SEQ ID NO: 128101 - DNA, 15 bp, Homo sapiens
ccaataaactggttt

SEQ ID NO: 128102 - DNA, 15 bp, Homo sapiens
accaataaactggtt

SEQ ID NO: 128103 - DNA, 15 bp, Homo sapiens
gaccaataaactggt

SEQ ID NO: 128104 - DNA, 15 bp, Homo sapiens
agaccaataaactgg

SEQ ID NO: 128105 - DNA, 15 bp, Homo sapiens
cagaccaataaactg

SEQ ID NO: 128106 - DNA, 15 bp, Homo sapiens
acagaccaataaact

SEQ ID NO: 128107 - DNA, 15 bp, Homo sapiens
tacagaccaataaac

SEQ ID NO: 128108 - DNA, 15 bp, Homo sapiens
atacagaccaataaa

SEQ ID NO: 128109 - DNA, 15 bp, Homo sapiens
aatacagaccaataa

SEQ ID NO: 128110 - DNA, 15 bp, Homo sapiens
aaatacagaccaata

SEQ ID NO: 128111 - DNA, 15 bp, Homo sapiens
taaatacagaccaat

SEQ ID NO: 128112 - DNA, 15 bp, Homo sapiens
ataaatacagaccaa

SEQ ID NO: 128113 - DNA, 15 bp, Homo sapiens
cataaatacagacca

SEQ ID NO: 128114 - DNA, 15 bp, Homo sapiens
ccataaatacagacc

SEQ ID NO: 128115 - DNA, 15 bp, Homo sapiens
gccataaatacagac

SEQ ID NO: 128116 - DNA, 15 bp, Homo sapiens
agccataaatacaga

SEQ ID NO: 128117 - DNA, 15 bp, Homo sapiens
aagccataaatacag

SEQ ID NO: 128118 - DNA, 15 bp, Homo sapiens
aaagccataaataca

SEQ ID NO: 128119 - DNA, 15 bp, Homo sapiens
aaaagccataaatac

SEQ ID NO: 128120 - DNA, 15 bp, Homo sapiens
aaaaagccataaata

SEQ ID NO: 128121 - DNA, 15 bp, Homo sapiens
aaaaaagccataaat

SEQ ID NO: 128122 - DNA, 15 bp, Homo sapiens
caaaaaagccataaa

SEQ ID NO: 128123 - DNA, 15 bp, Homo sapiens
gcaaaaaagccataa

SEQ ID NO: 128124 - DNA, 15 bp, Homo sapiens
tgcaaaaaagccata

SEQ ID NO: 128125 - DNA, 15 bp, Homo sapiens
ctgcaaaaaagccat

SEQ ID NO: 128126 - DNA, 15 bp, Homo sapiens
cctgcaaaaaagcca

SEQ ID NO: 128127 - DNA, 15 bp, Homo sapiens
tcctgcaaaaaagcc

SEQ ID NO: 128128 - DNA, 15 bp, Homo sapiens
gtcctgcaaaaaagc

SEQ ID NO: 128129 - DNA, 15 bp, Homo sapiens
tgtcctgcaaaaaag

SEQ ID NO: 128130 - DNA, 15 bp, Homo sapiens
gtgtcctgcaaaaaa

SEQ ID NO: 128131 - DNA, 15 bp, Homo sapiens
agtgtcctgcaaaaa

SEQ ID NO: 128132 - DNA, 15 bp, Homo sapiens
cagtgtcctgcaaaa

SEQ ID NO: 128133 - DNA, 15 bp, Homo sapiens
gcagtgtcctgcaaa

SEQ ID NO: 128134 - DNA, 15 bp, Homo sapiens
agcagtgtcctgcaa

SEQ ID NO: 128135 - DNA, 15 bp, Homo sapiens
tagcagtgtcctgca

SEQ ID NO: 128136 - DNA, 15 bp, Homo sapiens
ctagcagtgtcctgc

SEQ ID NO: 128137 - DNA, 15 bp, Homo sapiens
tctagcagtgtcctg

SEQ ID NO: 128138 - DNA, 15 bp, Homo sapiens
atctagcagtgtcct

SEQ ID NO: 128139 - DNA, 15 bp, Homo sapiens
aatctagcagtgtcc

SEQ ID NO: 128140 - DNA, 15 bp, Homo sapiens
caatctagcagtgtc

SEQ ID NO: 128141 - DNA, 15 bp, Homo sapiens
ccaatctagcagtgt

SEQ ID NO: 128142 - DNA, 15 bp, Homo sapiens
cccaatctagcagtg

SEQ ID NO: 128143 - DNA, 15 bp, Homo sapiens
acccaatctagcagt

SEQ ID NO: 128144 - DNA, 15 bp, Homo sapiens
aacccaatctagcag

SEQ ID NO: 128145 - DNA, 15 bp, Homo sapiens
aaacccaatctagca

SEQ ID NO: 128146 - DNA, 15 bp, Homo sapiens
aaaacccaatctagc

SEQ ID NO: 128147 - DNA, 15 bp, Homo sapiens
aaaaacccaatctag

SEQ ID NO: 128148 - DNA, 15 bp, Homo sapiens
caaaaacccaatcta

SEQ ID NO: 128149 - DNA, 15 bp, Homo sapiens
acaaaaacccaatct

SEQ ID NO: 128150 - DNA, 15 bp, Homo sapiens
aacaaaaacccaatc

SEQ ID NO: 128151 - DNA, 15 bp, Homo sapiens
gaacaaaaacccaat

SEQ ID NO: 128152 - DNA, 15 bp, Homo sapiens
agaacaaaaacccaa

SEQ ID NO: 128153 - DNA, 15 bp, Homo sapiens
cagaacaaaaaccca

SEQ ID NO: 128154 - DNA, 15 bp, Homo sapiens
ccagaacaaaaaccc

SEQ ID NO: 128155 - DNA, 15 bp, Homo sapiens
tccagaacaaaaacc

SEQ ID NO: 128156 - DNA, 15 bp, Homo sapiens
ttccagaacaaaaac

SEQ ID NO: 128157 - DNA, 15 bp, Homo sapiens
cttccagaacaaaaa

SEQ ID NO: 128158 - DNA, 15 bp, Homo sapiens
ccttccagaacaaaa

SEQ ID NO: 128159 - DNA, 15 bp, Homo sapiens
tccttccagaacaaa

SEQ ID NO: 128160 - DNA, 15 bp, Homo sapiens
gtccttccagaacaa

SEQ ID NO: 128161 - DNA, 15 bp, Homo sapiens
ggtccttccagaaca

SEQ ID NO: 128162 - DNA, 15 bp, Homo sapiens
gggtccttccagaac

SEQ ID NO: 128163 - DNA, 15 bp, Homo sapiens
ggggtccttccagaa

SEQ ID NO: 128164 - DNA, 15 bp, Homo sapiens
aggggtccttccaga

SEQ ID NO: 128165 - DNA, 15 bp, Homo sapiens
aaggggtccttccag

SEQ ID NO: 128166 - DNA, 15 bp, Homo sapiens
gaaggggtccttcca

SEQ ID NO: 128167 - DNA, 15 bp, Homo sapiens
tgaaggggtccttcc

SEQ ID NO: 128168 - DNA, 15 bp, Homo sapiens
gtgaaggggtccttc

SEQ ID NO: 128169 - DNA, 15 bp, Homo sapiens
agtgaaggggtcctt

SEQ ID NO: 128170 - DNA, 15 bp, Homo sapiens
cagtgaaggggtcct

SEQ ID NO: 128171 - DNA, 15 bp, Homo sapiens
acagtgaaggggtcc

SEQ ID NO: 128172 - DNA, 15 bp, Homo sapiens
aacagtgaaggggtc

SEQ ID NO: 128173 - DNA, 15 bp, Homo sapiens
aaacagtgaaggggt

SEQ ID NO: 128174 - DNA, 15 bp, Homo sapiens
aaaacagtgaagggg

SEQ ID NO: 128175 - DNA, 15 bp, Homo sapiens
taaaacagtgaaggg

SEQ ID NO: 128176 - DNA, 15 bp, Homo sapiens
ataaaacagtgaagg

SEQ ID NO: 128177 - DNA, 15 bp, Homo sapiens
aataaaacagtgaag

SEQ ID NO: 128178 - DNA, 15 bp, Homo sapiens
taataaaacagtgaa

SEQ ID NO: 128179 - DNA, 15 bp, Homo sapiens
ataataaaacagtga

SEQ ID NO: 128180 - DNA, 15 bp, Homo sapiens
aataataaaacagtg

SEQ ID NO: 128181 - DNA, 15 bp, Homo sapiens
aaataataaaacagt

SEQ ID NO: 128182 - DNA, 15 bp, Homo sapiens
taaataataaaacag

SEQ ID NO: 128183 - DNA, 15 bp, Homo sapiens
gtaaataataaaaca

SEQ ID NO: 128184 - DNA, 15 bp, Homo sapiens
ggtaaataataaaac

SEQ ID NO: 128185 - DNA, 15 bp, Homo sapiens
gggtaaataataaaa

SEQ ID NO: 128186 - DNA, 15 bp, Homo sapiens
ggggtaaataataaa

SEQ ID NO: 128187 - DNA, 15 bp, Homo sapiens
gggggtaaataataa

SEQ ID NO: 128188 - DNA, 15 bp, Homo sapiens
tgggggtaaataata

SEQ ID NO: 128189 - DNA, 15 bp, Homo sapiens
ctgggggtaaataat

SEQ ID NO: 128190 - DNA, 15 bp, Homo sapiens
cctgggggtaaataa

SEQ ID NO: 128191 - DNA, 15 bp, Homo sapiens
ccctgggggtaaata

SEQ ID NO: 128192 - DNA, 15 bp, Homo sapiens
gccctgggggtaaat

SEQ ID NO: 128193 - DNA, 15 bp, Homo sapiens
ggccctgggggtaaa

SEQ ID NO: 128194 - DNA, 15 bp, Homo sapiens
tggccctgggggtaa

SEQ ID NO: 128195 - DNA, 15 bp, Homo sapiens
atggccctgggggta

SEQ ID NO: 128196 - DNA, 15 bp, Homo sapiens
aatggccctgggggt

SEQ ID NO: 128197 - DNA, 15 bp, Homo sapiens
taatggccctggggg

SEQ ID NO: 128198 - DNA, 15 bp, Homo sapiens
ttaatggccctgggg

SEQ ID NO: 128199 - DNA, 15 bp, Homo sapiens
tttaatggccctggg

SEQ ID NO: 128200 - DNA, 15 bp, Homo sapiens
ctttaatggccctgg

SEQ ID NO: 128201 - DNA, 15 bp, Homo sapiens
actttaatggccctg

SEQ ID NO: 128202 - DNA, 15 bp, Homo sapiens
tactttaatggccct

SEQ ID NO: 128203 - DNA, 15 bp, Homo sapiens
gtactttaatggccc

SEQ ID NO: 128204 - DNA, 15 bp, Homo sapiens
agtactttaatggcc

SEQ ID NO: 128205 - DNA, 15 bp, Homo sapiens
tagtactttaatggc

SEQ ID NO: 128206 - DNA, 15 bp, Homo sapiens
ctagtactttaatgg

SEQ ID NO: 128207 - DNA, 15 bp, Homo sapiens
tctagtactttaatg

SEQ ID NO: 128208 - DNA, 15 bp, Homo sapiens
ctctagtactttaat

SEQ ID NO: 128209 - DNA, 15 bp, Homo sapiens
tctctagtactttaa

SEQ ID NO: 128210 - DNA, 15 bp, Homo sapiens
atctctagtacttta

SEQ ID NO: 128211 - DNA, 15 bp, Homo sapiens
aatctctagtacttt

SEQ ID NO: 128212 - DNA, 15 bp, Homo sapiens
caatctctagtactt

SEQ ID NO: 128213 - DNA, 15 bp, Homo sapiens
gcaatctctagtact

SEQ ID NO: 128214 - DNA, 15 bp, Homo sapiens
ggcaatctctagtac

SEQ ID NO: 128215 - DNA, 15 bp, Homo sapiens
tggcaatctctagta

SEQ ID NO: 128216 - DNA, 15 bp, Homo sapiens
ctggcaatctctagt

SEQ ID NO: 128217 - DNA, 15 bp, Homo sapiens
gctggcaatctctag

SEQ ID NO: 128218 - DNA, 15 bp, Homo sapiens
agctggcaatctcta

SEQ ID NO: 128219 - DNA, 15 bp, Homo sapiens
cagctggcaatctct

SEQ ID NO: 128220 - DNA, 15 bp, Homo sapiens
ccagctggcaatctc

SEQ ID NO: 128221 - DNA, 15 bp, Homo sapiens
tccagctggcaatct

SEQ ID NO: 128222 - DNA, 15 bp, Homo sapiens
atccagctggcaatc

SEQ ID NO: 128223 - DNA, 15 bp, Homo sapiens
tatccagctggcaat

SEQ ID NO: 128224 - DNA, 15 bp, Homo sapiens
gtatccagctggcaa

SEQ ID NO: 128225 - DNA, 15 bp, Homo sapiens
tgtatccagctggca

SEQ ID NO: 128226 - DNA, 15 bp, Homo sapiens
ttgtatccagctggc

SEQ ID NO: 128227 - DNA, 15 bp, Homo sapiens
gttgtatccagctgg

SEQ ID NO: 128228 - DNA, 15 bp, Homo sapiens
tgttgtatccagctg

SEQ ID NO: 128229 - DNA, 15 bp, Homo sapiens
atgttgtatccagct

SEQ ID NO: 128230 - DNA, 15 bp, Homo sapiens
tatgttgtatccagc

SEQ ID NO: 128231 - DNA, 15 bp, Homo sapiens
gtatgttgtatccag

SEQ ID NO: 128232 - DNA, 15 bp, Homo sapiens
ggtatgttgtatcca

SEQ ID NO: 128233 - DNA, 15 bp, Homo sapiens
gggtatgttgtatcc

SEQ ID NO: 128234 - DNA, 15 bp, Homo sapiens
cgggtatgttgtatc

SEQ ID NO: 128235 - DNA, 15 bp, Homo sapiens
tcgggtatgttgtat

SEQ ID NO: 128236 - DNA, 15 bp, Homo sapiens
ctcgggtatgttgta

SEQ ID NO: 128237 - DNA, 15 bp, Homo sapiens
actcgggtatgttgt

SEQ ID NO: 128238 - DNA, 15 bp, Homo sapiens
cactcgggtatgttg

SEQ ID NO: 128239 - DNA, 15 bp, Homo sapiens
tcactcgggtatgtt

SEQ ID NO: 128240 - DNA, 15 bp, Homo sapiens
ttcactcgggtatgt

SEQ ID NO: 128241 - DNA, 15 bp, Homo sapiens
cttcactcgggtatg

SEQ ID NO: 128242 - DNA, 15 bp, Homo sapiens
gcttcactcgggtat

SEQ ID NO: 128243 - DNA, 15 bp, Homo sapiens
ggcttcactcgggta

SEQ ID NO: 128244 - DNA, 15 bp, Homo sapiens
cggcttcactcgggt

SEQ ID NO: 128245 - DNA, 15 bp, Homo sapiens
acggcttcactcggg

SEQ ID NO: 128246 - DNA, 15 bp, Homo sapiens
cacggcttcactcgg

SEQ ID NO: 128247 - DNA, 15 bp, Homo sapiens
tcacggcttcactcg

SEQ ID NO: 128248 - DNA, 15 bp, Homo sapiens
ttcacggcttcactc

SEQ ID NO: 128249 - DNA, 15 bp, Homo sapiens
tttcacggcttcact

SEQ ID NO: 128250 - DNA, 15 bp, Homo sapiens
ttttcacggcttcac

SEQ ID NO: 128251 - DNA, 15 bp, Homo sapiens
cttttcacggcttca

SEQ ID NO: 128252 - DNA, 15 bp, Homo sapiens
ccttttcacggcttc

SEQ ID NO: 128253 - DNA, 15 bp, Homo sapiens
gccttttcacggctt

SEQ ID NO: 128254 - DNA, 15 bp, Homo sapiens
agccttttcacggct

SEQ ID NO: 128255 - DNA, 15 bp, Homo sapiens
aagccttttcacggc

SEQ ID NO: 128256 - DNA, 15 bp, Homo sapiens
gaagccttttcacgg

SEQ ID NO: 128257 - DNA, 15 bp, Homo sapiens
tgaagccttttcacg

SEQ ID NO: 128258 - DNA, 15 bp, Homo sapiens
ctgaagccttttcac

SEQ ID NO: 128259 - DNA, 15 bp, Homo sapiens
cctgaagccttttca

SEQ ID NO: 128260 - DNA, 15 bp, Homo sapiens
tcctgaagccttttc

SEQ ID NO: 128261 - DNA, 15 bp, Homo sapiens
gtcctgaagcctttt

SEQ ID NO: 128262 - DNA, 15 bp, Homo sapiens
tgtcctgaagccttt

SEQ ID NO: 128263 - DNA, 15 bp, Homo sapiens
gtgtcctgaagcctt

SEQ ID NO: 128264 - DNA, 15 bp, Homo sapiens
ggtgtcctgaagcct

SEQ ID NO: 128265 - DNA, 15 bp, Homo sapiens
tggtgtcctgaagcc

SEQ ID NO: 128266 - DNA, 15 bp, Homo sapiens
ctggtgtcctgaagc

SEQ ID NO: 128267 - DNA, 15 bp, Homo sapiens
tctggtgtcctgaag

SEQ ID NO: 128268 - DNA, 15 bp, Homo sapiens
ctctggtgtcctgaa

SEQ ID NO: 128269 - DNA, 15 bp, Homo sapiens
actctggtgtcctga

SEQ ID NO: 128270 - DNA, 15 bp, Homo sapiens
aactctggtgtcctg

SEQ ID NO: 128271 - DNA, 15 bp, Homo sapiens
caactctggtgtcct

SEQ ID NO: 128272 - DNA, 15 bp, Homo sapiens
ccaactctggtgtcc

SEQ ID NO: 128273 - DNA, 15 bp, Homo sapiens
tccaactctggtgtc

SEQ ID NO: 128274 - DNA, 15 bp, Homo sapiens
ttccaactctggtgt

SEQ ID NO: 128275 - DNA, 15 bp, Homo sapiens
cttccaactctggtg

SEQ ID NO: 128276 - DNA, 15 bp, Homo sapiens
gcttccaactctggt

SEQ ID NO: 128277 - DNA, 15 bp, Homo sapiens
tgcttccaactctgg

SEQ ID NO: 128278 - DNA, 15 bp, Homo sapiens
ttgcttccaactctg

SEQ ID NO: 128279 - DNA, 15 bp, Homo sapiens
attgcttccaactct

SEQ ID NO: 128280 - DNA, 15 bp, Homo sapiens
cattgcttccaactc

SEQ ID NO: 128281 - DNA, 15 bp, Homo sapiens
gcattgcttccaact

SEQ ID NO: 128282 - DNA, 15 bp, Homo sapiens
ggcattgcttccaac

SEQ ID NO: 128283 - DNA, 15 bp, Homo sapiens
gggcattgcttccaa

SEQ ID NO: 128284 - DNA, 15 bp, Homo sapiens
agggcattgcttcca

SEQ ID NO: 128285 - DNA, 15 bp, Homo sapiens
gagggcattgcttcc

SEQ ID NO: 128286 - DNA, 15 bp, Homo sapiens
tgagggcattgcttc

SEQ ID NO: 128287 - DNA, 15 bp, Homo sapiens
ctgagggcattgctt

SEQ ID NO: 128288 - DNA, 15 bp, Homo sapiens
gctgagggcattgct

SEQ ID NO: 128289 - DNA, 15 bp, Homo sapiens
agctgagggcattgc

SEQ ID NO: 128290 - DNA, 15 bp, Homo sapiens
gagctgagggcattg

SEQ ID NO: 128291 - DNA, 15 bp, Homo sapiens
ggagctgagggcatt

SEQ ID NO: 128292 - DNA, 15 bp, Homo sapiens
aggagctgagggcat

SEQ ID NO: 128293 - DNA, 15 bp, Homo sapiens
gaggagctgagggca

SEQ ID NO: 128294 - DNA, 15 bp, Homo sapiens
tgaggagctgagggc

SEQ ID NO: 128295 - DNA, 15 bp, Homo sapiens
ttgaggagctgaggg

SEQ ID NO: 128296 - DNA, 15 bp, Homo sapiens
attgaggagctgagg

SEQ ID NO: 128297 - DNA, 15 bp, Homo sapiens
tattgaggagctgag

SEQ ID NO: 128298 - DNA, 15 bp, Homo sapiens
gtattgaggagctga

SEQ ID NO: 128299 - DNA, 15 bp, Homo sapiens
tgtattgaggagctg

SEQ ID NO: 128300 - DNA, 15 bp, Homo sapiens
gtgtattgaggagct

SEQ ID NO: 128301 - DNA, 15 bp, Homo sapiens
agtgtattgaggagc

SEQ ID NO: 128302 - DNA, 15 bp, Homo sapiens
aagtgtattgaggag

SEQ ID NO: 128303 - DNA, 15 bp, Homo sapiens
caagtgtattgagga

SEQ ID NO: 128304 - DNA, 15 bp, Homo sapiens
gcaagtgtattgagg

SEQ ID NO: 128305 - DNA, 15 bp, Homo sapiens
tgcaagtgtattgag

SEQ ID NO: 128306 - DNA, 15 bp, Homo sapiens
ttgcaagtgtattga

SEQ ID NO: 128307 - DNA, 15 bp, Homo sapiens
cttgcaagtgtattg

SEQ ID NO: 128308 - DNA, 15 bp, Homo sapiens
ccttgcaagtgtatt

SEQ ID NO: 128309 - DNA, 15 bp, Homo sapiens
gccttgcaagtgtat

SEQ ID NO: 128310 - DNA, 15 bp, Homo sapiens
ggccttgcaagtgta

SEQ ID NO: 128311 - DNA, 15 bp, Homo sapiens
gggccttgcaagtgt

SEQ ID NO: 128312 - DNA, 15 bp, Homo sapiens
agggccttgcaagtg

SEQ ID NO: 128313 - DNA, 15 bp, Homo sapiens
cagggccttgcaagt

SEQ ID NO: 128314 - DNA, 15 bp, Homo sapiens
tcagggccttgcaag

SEQ ID NO: 128315 - DNA, 15 bp, Homo sapiens
ttcagggccttgcaa

SEQ ID NO: 128316 - DNA, 15 bp, Homo sapiens
tttcagggccttgca

SEQ ID NO: 128317 - DNA, 15 bp, Homo sapiens
ctttcagggccttgc

SEQ ID NO: 128318 - DNA, 15 bp, Homo sapiens
tctttcagggccttg

SEQ ID NO: 128319 - DNA, 15 bp, Homo sapiens
atctttcagggcctt

SEQ ID NO: 128320 - DNA, 15 bp, Homo sapiens
gatctttcagggcct

SEQ ID NO: 128321 - DNA, 15 bp, Homo sapiens
agatctttcagggcc

SEQ ID NO: 128322 - DNA, 15 bp, Homo sapiens
cagatctttcagggc

SEQ ID NO: 128323 - DNA, 15 bp, Homo sapiens
tcagatctttcaggg

SEQ ID NO: 128324 - DNA, 15 bp, Homo sapiens
ctcagatctttcagg

SEQ ID NO: 128325 - DNA, 15 bp, Homo sapiens
cctcagatctttcag

SEQ ID NO: 128326 - DNA, 15 bp, Homo sapiens
acctcagatctttca

SEQ ID NO: 128327 - DNA, 15 bp, Homo sapiens
aacctcagatctttc

SEQ ID NO: 128328 - DNA, 15 bp, Homo sapiens
gaacctcagatcttt

SEQ ID NO: 128329 - DNA, 15 bp, Homo sapiens
ggaacctcagatctt

SEQ ID NO: 128330 - DNA, 15 bp, Homo sapiens
aggaacctcagatct

SEQ ID NO: 128331 - DNA, 15 bp, Homo sapiens
gaggaacctcagatc

SEQ ID NO: 128332 - DNA, 15 bp, Homo sapiens
agaggaacctcagat

SEQ ID NO: 128333 - DNA, 15 bp, Homo sapiens
aagaggaacctcaga

SEQ ID NO: 128334 - DNA, 15 bp, Homo sapiens
aaagaggaacctcag

SEQ ID NO: 128335 - DNA, 15 bp, Homo sapiens
taaagaggaacctca

SEQ ID NO: 128336 - DNA, 15 bp, Homo sapiens
ttaaagaggaacctc

SEQ ID NO: 128337 - DNA, 15 bp, Homo sapiens
cttaaagaggaacct

SEQ ID NO: 128338 - DNA, 15 bp, Homo sapiens
ccttaaagaggaacc

SEQ ID NO: 128339 - DNA, 15 bp, Homo sapiens
cccttaaagaggaac

SEQ ID NO: 128340 - DNA, 15 bp, Homo sapiens
ccccttaaagaggaa

SEQ ID NO: 128341 - DNA, 15 bp, Homo sapiens
tccccttaaagagga

SEQ ID NO: 128342 - DNA, 15 bp, Homo sapiens
ttccccttaaagagg

SEQ ID NO: 128343 - DNA, 15 bp, Homo sapiens
tttccccttaaagag

SEQ ID NO: 128344 - DNA, 15 bp, Homo sapiens
ctttccccttaaaga

SEQ ID NO: 128345 - DNA, 15 bp, Homo sapiens
cctttccccttaaag

SEQ ID NO: 128346 - DNA, 15 bp, Homo sapiens
tcctttccccttaaa

SEQ ID NO: 128347 - DNA, 15 bp, Homo sapiens
gtcctttccccttaa

SEQ ID NO: 128348 - DNA, 15 bp, Homo sapiens
tgtcctttcccctta

SEQ ID NO: 128349 - DNA, 15 bp, Homo sapiens
atgtcctttcccctt

SEQ ID NO: 128350 - DNA, 15 bp, Homo sapiens
gatgtcctttcccct

SEQ ID NO: 128351 - DNA, 15 bp, Homo sapiens
tgatgtcctttcccc

SEQ ID NO: 128352 - DNA, 15 bp, Homo sapiens
ttgatgtcctttccc

SEQ ID NO: 128353 - DNA, 15 bp, Homo sapiens
cttgatgtcctttcc

SEQ ID NO: 128354 - DNA, 15 bp, Homo sapiens
gcttgatgtcctttc

SEQ ID NO: 128355 - DNA, 15 bp, Homo sapiens
agcttgatgtccttt

SEQ ID NO: 128356 - DNA, 15 bp, Homo sapiens
gagcttgatgtcctt

SEQ ID NO: 128357 - DNA, 15 bp, Homo sapiens
ggagcttgatgtcct

SEQ ID NO: 128358 - DNA, 15 bp, Homo sapiens
tggagcttgatgtcc

SEQ ID NO: 128359 - DNA, 15 bp, Homo sapiens
ctggagcttgatgtc

SEQ ID NO: 128360 - DNA, 15 bp, Homo sapiens
tctggagcttgatgt

SEQ ID NO: 128361 - DNA, 15 bp, Homo sapiens
atctggagcttgatg

SEQ ID NO: 128362 - DNA, 15 bp, Homo sapiens
catctggagcttgat

SEQ ID NO: 128363 - DNA, 15 bp, Homo sapiens
tcatctggagcttga

SEQ ID NO: 128364 - DNA, 15 bp, Homo sapiens
atcatctggagcttg

SEQ ID NO: 128365 - DNA, 15 bp, Homo sapiens
gatcatctggagctt

SEQ ID NO: 128366 - DNA, 15 bp, Homo sapiens
ggatcatctggagct

SEQ ID NO: 128367 - DNA, 15 bp, Homo sapiens
aggatcatctggagc

SEQ ID NO: 128368 - DNA, 15 bp, Homo sapiens
gaggatcatctggag

SEQ ID NO: 128369 - DNA, 15 bp, Homo sapiens
tgaggatcatctgga

SEQ ID NO: 128370 - DNA, 15 bp, Homo sapiens
ctgaggatcatctgg

SEQ ID NO: 128371 - DNA, 15 bp, Homo sapiens
actgaggatcatctg

SEQ ID NO: 128372 - DNA, 15 bp, Homo sapiens
cactgaggatcatct

SEQ ID NO: 128373 - DNA, 15 bp, Homo sapiens
tcactgaggatcatc

SEQ ID NO: 128374 - DNA, 15 bp, Homo sapiens
ctcactgaggatcat

SEQ ID NO: 128375 - DNA, 15 bp, Homo sapiens
tctcactgaggatca

SEQ ID NO: 128376 - DNA, 15 bp, Homo sapiens
ctctcactgaggatc

SEQ ID NO: 128377 - DNA, 15 bp, Homo sapiens
tctctcactgaggat

SEQ ID NO: 128378 - DNA, 15 bp, Homo sapiens
atctctcactgagga

SEQ ID NO: 128379 - DNA, 15 bp, Homo sapiens
tatctctcactgagg

SEQ ID NO: 128380 - DNA, 15 bp, Homo sapiens
atatctctcactgag

SEQ ID NO: 128381 - DNA, 15 bp, Homo sapiens
aatatctctcactga

SEQ ID NO: 128382 - DNA, 15 bp, Homo sapiens
caatatctctcactg

SEQ ID NO: 128383 - DNA, 15 bp, Homo sapiens
acaatatctctcact

SEQ ID NO: 128384 - DNA, 15 bp, Homo sapiens
gacaatatctctcac

SEQ ID NO: 128385 - DNA, 15 bp, Homo sapiens
ggacaatatctctca

SEQ ID NO: 128386 - DNA, 15 bp, Homo sapiens
aggacaatatctctc

SEQ ID NO: 128387 - DNA, 15 bp, Homo sapiens
gaggacaatatctct

SEQ ID NO: 128388 - DNA, 15 bp, Homo sapiens
agaggacaatatctc

SEQ ID NO: 128389 - DNA, 15 bp, Homo sapiens
gagaggacaatatct

SEQ ID NO: 128390 - DNA, 15 bp, Homo sapiens
tgagaggacaatatc

SEQ ID NO: 128391 - DNA, 15 bp, Homo sapiens
ttgagaggacaatat

SEQ ID NO: 128392 - DNA, 15 bp, Homo sapiens
attgagaggacaata

SEQ ID NO: 128393 - DNA, 15 bp, Homo sapiens
tattgagaggacaat

SEQ ID NO: 128394 - DNA, 15 bp, Homo sapiens
atattgagaggacaa

SEQ ID NO: 128395 - DNA, 15 bp, Homo sapiens
aatattgagaggaca

SEQ ID NO: 128396 - DNA, 15 bp, Homo sapiens
gaatattgagaggac

SEQ ID NO: 128397 - DNA, 15 bp, Homo sapiens
tgaatattgagagga

SEQ ID NO: 128398 - DNA, 15 bp, Homo sapiens
ttgaatattgagagg

SEQ ID NO: 128399 - DNA, 15 bp, Homo sapiens
cttgaatattgagag

SEQ ID NO: 128400 - DNA, 15 bp, Homo sapiens
tcttgaatattgaga

SEQ ID NO: 128401 - DNA, 15 bp, Homo sapiens
ctcttgaatattgag

SEQ ID NO: 128402 - DNA, 15 bp, Homo sapiens
actcttgaatattga

SEQ ID NO: 128403 - DNA, 15 bp, Homo sapiens
gactcttgaatattg

SEQ ID NO: 128404 - DNA, 15 bp, Homo sapiens
tgactcttgaatatt

SEQ ID NO: 128405 - DNA, 15 bp, Homo sapiens
gtgactcttgaatat

SEQ ID NO: 128406 - DNA, 15 bp, Homo sapiens
ggtgactcttgaata

SEQ ID NO: 128407 - DNA, 15 bp, Homo sapiens
aggtgactcttgaat

SEQ ID NO: 128408 - DNA, 15 bp, Homo sapiens
aaggtgactcttgaa

SEQ ID NO: 128409 - DNA, 15 bp, Homo sapiens
aaaggtgactcttga

SEQ ID NO: 128410 - DNA, 15 bp, Homo sapiens
gaaaggtgactcttg

SEQ ID NO: 128411 - DNA, 15 bp, Homo sapiens
agaaaggtgactctt

SEQ ID NO: 128412 - DNA, 15 bp, Homo sapiens
tagaaaggtgactct

SEQ ID NO: 128413 - DNA, 15 bp, Homo sapiens
ttagaaaggtgactc

SEQ ID NO: 128414 - DNA, 15 bp, Homo sapiens
tttagaaaggtgact

SEQ ID NO: 128415 - DNA, 15 bp, Homo sapiens
ctttagaaaggtgac

SEQ ID NO: 128416 - DNA, 15 bp, Homo sapiens
cctttagaaaggtga

SEQ ID NO: 128417 - DNA, 15 bp, Homo sapiens
ccctttagaaaggtg

SEQ ID NO: 128418 - DNA, 15 bp, Homo sapiens
tccctttagaaaggt

SEQ ID NO: 128419 - DNA, 15 bp, Homo sapiens
ttccctttagaaagg

SEQ ID NO: 128420 - DNA, 15 bp, Homo sapiens
gttccctttagaaag

SEQ ID NO: 128421 - DNA, 15 bp, Homo sapiens
ggttccctttagaaa

SEQ ID NO: 128422 - DNA, 15 bp, Homo sapiens
aggttccctttagaa

SEQ ID NO: 128423 - DNA, 15 bp, Homo sapiens
gaggttccctttaga

SEQ ID NO: 128424 - DNA, 15 bp, Homo sapiens
agaggttccctttag

SEQ ID NO: 128425 - DNA, 15 bp, Homo sapiens
tagaggttcccttta

SEQ ID NO: 128426 - DNA, 15 bp, Homo sapiens
ctagaggttcccttt

SEQ ID NO: 128427 - DNA, 15 bp, Homo sapiens
tctagaggttccctt

SEQ ID NO: 128428 - DNA, 15 bp, Homo sapiens
atctagaggttccct

SEQ ID NO: 128429 - DNA, 15 bp, Homo sapiens
aatctagaggttccc

SEQ ID NO: 128430 - DNA, 15 bp, Homo sapiens
caatctagaggttcc

SEQ ID NO: 128431 - DNA, 15 bp, Homo sapiens
acaatctagaggttc

SEQ ID NO: 128432 - DNA, 15 bp, Homo sapiens
aacaatctagaggtt

SEQ ID NO: 128433 - DNA, 15 bp, Homo sapiens
gaacaatctagaggt

SEQ ID NO: 128434 - DNA, 15 bp, Homo sapiens
tgaacaatctagagg

SEQ ID NO: 128435 - DNA, 15 bp, Homo sapiens
atgaacaatctagag

SEQ ID NO: 128436 - DNA, 15 bp, Homo sapiens
gatgaacaatctaga

SEQ ID NO: 128437 - DNA, 15 bp, Homo sapiens
tgatgaacaatctag

SEQ ID NO: 128438 - DNA, 15 bp, Homo sapiens
ctgatgaacaatcta

SEQ ID NO: 128439 - DNA, 15 bp, Homo sapiens
actgatgaacaatct

SEQ ID NO: 128440 - DNA, 15 bp, Homo sapiens
cactgatgaacaatc

SEQ ID NO: 128441 - DNA, 15 bp, Homo sapiens
ccactgatgaacaat

SEQ ID NO: 128442 - DNA, 15 bp, Homo sapiens
cccactgatgaacaa

SEQ ID NO: 128443 - DNA, 15 bp, Homo sapiens
tcccactgatgaaca

SEQ ID NO: 128444 - DNA, 15 bp, Homo sapiens
gtcccactgatgaac

SEQ ID NO: 128445 - DNA, 15 bp, Homo sapiens
tgtcccactgatgaa

SEQ ID NO: 128446 - DNA, 15 bp, Homo sapiens
gtgtcccactgatga

SEQ ID NO: 128447 - DNA, 15 bp, Homo sapiens
cgtgtcccactgatg

SEQ ID NO: 128448 - DNA, 15 bp, Homo sapiens
tcgtgtcccactgat

SEQ ID NO: 128449 - DNA, 15 bp, Homo sapiens
gtcgtgtcccactga

SEQ ID NO: 128450 - DNA, 15 bp, Homo sapiens
tgtcgtgtcccactg

SEQ ID NO: 128451 - DNA, 15 bp, Homo sapiens
ctgtcgtgtcccact

SEQ ID NO: 128452 - DNA, 15 bp, Homo sapiens
tctgtcgtgtcccac

SEQ ID NO: 128453 - DNA, 15 bp, Homo sapiens
ctctgtcgtgtccca

SEQ ID NO: 128454 - DNA, 15 bp, Homo sapiens
cctctgtcgtgtccc

SEQ ID NO: 128455 - DNA, 15 bp, Homo sapiens
gcctctgtcgtgtcc

SEQ ID NO: 128456 - DNA, 15 bp, Homo sapiens
tgcctctgtcgtgtc

SEQ ID NO: 128457 - DNA, 15 bp, Homo sapiens
ttgcctctgtcgtgt

SEQ ID NO: 128458 - DNA, 15 bp, Homo sapiens
tttgcctctgtcgtg

SEQ ID NO: 128459 - DNA, 15 bp, Homo sapiens
ttttgcctctgtcgt

SEQ ID NO: 128460 - DNA, 15 bp, Homo sapiens
attttgcctctgtcg

SEQ ID NO: 128461 - DNA, 15 bp, Homo sapiens
gattttgcctctgtc

SEQ ID NO: 128462 - DNA, 15 bp, Homo sapiens
ggattttgcctctgt

SEQ ID NO: 128463 - DNA, 15 bp, Homo sapiens
aggattttgcctctg

SEQ ID NO: 128464 - DNA, 15 bp, Homo sapiens
caggattttgcctct

SEQ ID NO: 128465 - DNA, 15 bp, Homo sapiens
gcaggattttgcctc

SEQ ID NO: 128466 - DNA, 15 bp, Homo sapiens
ggcaggattttgcct

SEQ ID NO: 128467 - DNA, 15 bp, Homo sapiens
gggcaggattttgcc

SEQ ID NO: 128468 - DNA, 15 bp, Homo sapiens
ggggcaggattttgc

SEQ ID NO: 128469 - DNA, 15 bp, Homo sapiens
aggggcaggattttg

SEQ ID NO: 128470 - DNA, 15 bp, Homo sapiens
caggggcaggatttt

SEQ ID NO: 128471 - DNA, 15 bp, Homo sapiens
acaggggcaggattt

SEQ ID NO: 128472 - DNA, 15 bp, Homo sapiens
gacaggggcaggatt

SEQ ID NO: 128473 - DNA, 15 bp, Homo sapiens
agacaggggcaggat

SEQ ID NO: 128474 - DNA, 15 bp, Homo sapiens
gagacaggggcagga

SEQ ID NO: 128475 - DNA, 15 bp, Homo sapiens
ggagacaggggcagg

SEQ ID NO: 128476 - DNA, 15 bp, Homo sapiens
gggagacaggggcag

SEQ ID NO: 128477 - DNA, 15 bp, Homo sapiens
agggagacaggggca

SEQ ID NO: 128478 - DNA, 15 bp, Homo sapiens
aagggagacaggggc

SEQ ID NO: 128479 - DNA, 15 bp, Homo sapiens
taagggagacagggg

SEQ ID NO: 128480 - DNA, 15 bp, Homo sapiens
ctaagggagacaggg

SEQ ID NO: 128481 - DNA, 15 bp, Homo sapiens
tctaagggagacagg

SEQ ID NO: 128482 - DNA, 15 bp, Homo sapiens
gtctaagggagacag

SEQ ID NO: 128483 - DNA, 15 bp, Homo sapiens
ggtctaagggagaca

SEQ ID NO: 128484 - DNA, 15 bp, Homo sapiens
aggtctaagggagac

SEQ ID NO: 128485 - DNA, 15 bp, Homo sapiens
caggtctaagggaga

SEQ ID NO: 128486 - DNA, 15 bp, Homo sapiens
ccaggtctaagggag

SEQ ID NO: 128487 - DNA, 15 bp, Homo sapiens
gccaggtctaaggga

SEQ ID NO: 128488 - DNA, 15 bp, Homo sapiens
agccaggtctaaggg

SEQ ID NO: 128489 - DNA, 15 bp, Homo sapiens
cagccaggtctaagg

SEQ ID NO: 128490 - DNA, 15 bp, Homo sapiens
ccagccaggtctaag

SEQ ID NO: 128491 - DNA, 15 bp, Homo sapiens
tccagccaggtctaa

SEQ ID NO: 128492 - DNA, 15 bp, Homo sapiens
atccagccaggtcta

SEQ ID NO: 128493 - DNA, 15 bp, Homo sapiens
tatccagccaggtct

SEQ ID NO: 128494 - DNA, 15 bp, Homo sapiens
gtatccagccaggtc

SEQ ID NO: 128495 - DNA, 15 bp, Homo sapiens
ggtatccagccaggt

SEQ ID NO: 128496 - DNA, 15 bp, Homo sapiens
cggtatccagccagg

SEQ ID NO: 128497 - DNA, 15 bp, Homo sapiens
gcggtatccagccag

SEQ ID NO: 128498 - DNA, 15 bp, Homo sapiens
agcggtatccagcca

SEQ ID NO: 128499 - DNA, 15 bp, Homo sapiens
aagcggtatccagcc

SEQ ID NO: 128500 - DNA, 15 bp, Homo sapiens
aaagcggtatccagc

SEQ ID NO: 128501 - DNA, 15 bp, Homo sapiens
gaaagcggtatccag

SEQ ID NO: 128502 - DNA, 15 bp, Homo sapiens
tgaaagcggtatcca

SEQ ID NO: 128503 - DNA, 15 bp, Homo sapiens
gtgaaagcggtatcc

SEQ ID NO: 128504 - DNA, 15 bp, Homo sapiens
ggtgaaagcggtatc

SEQ ID NO: 128505 - DNA, 15 bp, Homo sapiens
tggtgaaagcggtat

SEQ ID NO: 128506 - DNA, 15 bp, Homo sapiens
ttggtgaaagcggta

SEQ ID NO: 128507 - DNA, 15 bp, Homo sapiens
attggtgaaagcggt

SEQ ID NO: 128508 - DNA, 15 bp, Homo sapiens
aattggtgaaagcgg

SEQ ID NO: 128509 - DNA, 15 bp, Homo sapiens
gaattggtgaaagcg

SEQ ID NO: 128510 - DNA, 15 bp, Homo sapiens
tgaattggtgaaagc

SEQ ID NO: 128511 - DNA, 15 bp, Homo sapiens
atgaattggtgaaag

SEQ ID NO: 128512 - DNA, 15 bp, Homo sapiens
catgaattggtgaaa

SEQ ID NO: 128513 - DNA, 15 bp, Homo sapiens
ccatgaattggtgaa

SEQ ID NO: 128514 - DNA, 15 bp, Homo sapiens
tccatgaattggtga

SEQ ID NO: 128515 - DNA, 15 bp, Homo sapiens
gtccatgaattggtg

SEQ ID NO: 128516 - DNA, 15 bp, Homo sapiens
ggtccatgaattggt

SEQ ID NO: 128517 - DNA, 15 bp, Homo sapiens
gggtccatgaattgg

SEQ ID NO: 128518 - DNA, 15 bp, Homo sapiens
tgggtccatgaattg

SEQ ID NO: 128519 - DNA, 15 bp, Homo sapiens
ttgggtccatgaatt

SEQ ID NO: 128520 - DNA, 15 bp, Homo sapiens
cttgggtccatgaat

SEQ ID NO: 128521 - DNA, 15 bp, Homo sapiens
acttgggtccatgaa

SEQ ID NO: 128522 - DNA, 15 bp, Homo sapiens
gacttgggtccatga

SEQ ID NO: 128523 - DNA, 15 bp, Homo sapiens
cgacttgggtccatg

SEQ ID NO: 128524 - DNA, 15 bp, Homo sapiens
ccgacttgggtccat

SEQ ID NO: 128525 - DNA, 15 bp, Homo sapiens
gccgacttgggtcca

SEQ ID NO: 128526 - DNA, 15 bp, Homo sapiens
ggccgacttgggtcc

SEQ ID NO: 128527 - DNA, 15 bp, Homo sapiens
gggccgacttgggtc

SEQ ID NO: 128528 - DNA, 15 bp, Homo sapiens
agggccgacttgggt

SEQ ID NO: 128529 - DNA, 15 bp, Homo sapiens
cagggccgacttggg

SEQ ID NO: 128530 - DNA, 15 bp, Homo sapiens
tcagggccgacttgg

SEQ ID NO: 128531 - DNA, 15 bp, Homo sapiens
gtcagggccgacttg

SEQ ID NO: 128532 - DNA, 15 bp, Homo sapiens
tgtcagggccgactt

SEQ ID NO: 128533 - DNA, 15 bp, Homo sapiens
ctgtcagggccgact

SEQ ID NO: 128534 - DNA, 15 bp, Homo sapiens
gctgtcagggccgac

SEQ ID NO: 128535 - DNA, 15 bp, Homo sapiens
agctgtcagggccga

SEQ ID NO: 128536 - DNA, 15 bp, Homo sapiens
tagctgtcagggccg

SEQ ID NO: 128537 - DNA, 15 bp, Homo sapiens
ctagctgtcagggcc

SEQ ID NO: 128538 - DNA, 15 bp, Homo sapiens
gctagctgtcagggc

SEQ ID NO: 128539 - DNA, 15 bp, Homo sapiens
tgctagctgtcaggg

SEQ ID NO: 128540 - DNA, 15 bp, Homo sapiens
ttgctagctgtcagg

SEQ ID NO: 128541 - DNA, 15 bp, Homo sapiens
cttgctagctgtcag

SEQ ID NO: 128542 - DNA, 15 bp, Homo sapiens
tcttgctagctgtca

SEQ ID NO: 128543 - DNA, 15 bp, Homo sapiens
ctcttgctagctgtc

SEQ ID NO: 128544 - DNA, 15 bp, Homo sapiens
cctcttgctagctgt

SEQ ID NO: 128545 - DNA, 15 bp, Homo sapiens
gcctcttgctagctg

SEQ ID NO: 128546 - DNA, 15 bp, Homo sapiens
ggcctcttgctagct

SEQ ID NO: 128547 - DNA, 15 bp, Homo sapiens
tggcctcttgctagc

SEQ ID NO: 128548 - DNA, 15 bp, Homo sapiens
ttggcctcttgctag

SEQ ID NO: 128549 - DNA, 15 bp, Homo sapiens
cttggcctcttgcta

SEQ ID NO: 128550 - DNA, 15 bp, Homo sapiens
tcttggcctcttgct

SEQ ID NO: 128551 - DNA, 15 bp, Homo sapiens
gtcttggcctcttgc

SEQ ID NO: 128552 - DNA, 15 bp, Homo sapiens
ggtcttggcctcttg

SEQ ID NO: 128553 - DNA, 15 bp, Homo sapiens
gggtcttggcctctt

SEQ ID NO: 128554 - DNA, 15 bp, Homo sapiens
tgggtcttggcctct

SEQ ID NO: 128555 - DNA, 15 bp, Homo sapiens
gtgggtcttggcctc

SEQ ID NO: 128556 - DNA, 15 bp, Homo sapiens
tgtgggtcttggcct

SEQ ID NO: 128557 - DNA, 15 bp, Homo sapiens
ctgtgggtcttggcc

SEQ ID NO: 128558 - DNA, 15 bp, Homo sapiens
tctgtgggtcttggc

SEQ ID NO: 128559 - DNA, 15 bp, Homo sapiens
ttctgtgggtcttgg

SEQ ID NO: 128560 - DNA, 15 bp, Homo sapiens
gttctgtgggtcttg

SEQ ID NO: 128561 - DNA, 15 bp, Homo sapiens
ggttctgtgggtctt

SEQ ID NO: 128562 - DNA, 15 bp, Homo sapiens
tggttctgtgggtct

SEQ ID NO: 128563 - DNA, 15 bp, Homo sapiens
gtggttctgtgggtc

SEQ ID NO: 128564 - DNA, 15 bp, Homo sapiens
ggtggttctgtgggt

SEQ ID NO: 128565 - DNA, 15 bp, Homo sapiens
tggtggttctgtggg

SEQ ID NO: 128566 - DNA, 15 bp, Homo sapiens
gtggtggttctgtgg

SEQ ID NO: 128567 - DNA, 15 bp, Homo sapiens
ggtggtggttctgtg

SEQ ID NO: 128568 - DNA, 15 bp, Homo sapiens
cggtggtggttctgt

SEQ ID NO: 128569 - DNA, 15 bp, Homo sapiens
gcggtggtggttctg

SEQ ID NO: 128570 - DNA, 15 bp, Homo sapiens
ggcggtggtggttct

SEQ ID NO: 128571 - DNA, 15 bp, Homo sapiens
gggcggtggtggttc

SEQ ID NO: 128572 - DNA, 15 bp, Homo sapiens
ggggcggtggtggtt

SEQ ID NO: 128573 - DNA, 15 bp, Homo sapiens
aggggcggtggtggt

SEQ ID NO: 128574 - DNA, 15 bp, Homo sapiens
gaggggcggtggtgg

SEQ ID NO: 128575 - DNA, 15 bp, Homo sapiens
agaggggcggtggtg

SEQ ID NO: 128576 - DNA, 15 bp, Homo sapiens
cagaggggcggtggt

SEQ ID NO: 128577 - DNA, 15 bp, Homo sapiens
acagaggggcggtgg

SEQ ID NO: 128578 - DNA, 15 bp, Homo sapiens
gacagaggggcggtg

SEQ ID NO: 128579 - DNA, 15 bp, Homo sapiens
tgacagaggggcggt

SEQ ID NO: 128580 - DNA, 15 bp, Homo sapiens
ctgacagaggggcgg

SEQ ID NO: 128581 - DNA, 15 bp, Homo sapiens
gctgacagaggggcg

SEQ ID NO: 128582 - DNA, 15 bp, Homo sapiens
tgctgacagaggggc

SEQ ID NO: 128583 - DNA, 15 bp, Homo sapiens
ctgctgacagagggg

SEQ ID NO: 128584 - DNA, 15 bp, Homo sapiens
cctgctgacagaggg

SEQ ID NO: 128585 - DNA, 15 bp, Homo sapiens
tcctgctgacagagg

SEQ ID NO: 128586 - DNA, 15 bp, Homo sapiens
ttcctgctgacagag

SEQ ID NO: 128587 - DNA, 15 bp, Homo sapiens
cttcctgctgacaga

SEQ ID NO: 128588 - DNA, 15 bp, Homo sapiens
tcttcctgctgacag

SEQ ID NO: 128589 - DNA, 15 bp, Homo sapiens
ttcttcctgctgaca

SEQ ID NO: 128590 - DNA, 15 bp, Homo sapiens
cttcttcctgctgac

SEQ ID NO: 128591 - DNA, 15 bp, Homo sapiens
acttcttcctgctga

SEQ ID NO: 128592 - DNA, 15 bp, Homo sapiens
aacttcttcctgctg

SEQ ID NO: 128593 - DNA, 15 bp, Homo sapiens
caacttcttcctgct

SEQ ID NO: 128594 - DNA, 15 bp, Homo sapiens
gcaacttcttcctgc

SEQ ID NO: 128595 - DNA, 15 bp, Homo sapiens
tgcaacttcttcctg

SEQ ID NO: 128596 - DNA, 15 bp, Homo sapiens
ctgcaacttcttcct

SEQ ID NO: 128597 - DNA, 15 bp, Homo sapiens
tctgcaacttcttcc

SEQ ID NO: 128598 - DNA, 15 bp, Homo sapiens
ttctgcaacttcttc

SEQ ID NO: 128599 - DNA, 15 bp, Homo sapiens
cttctgcaacttctt

SEQ ID NO: 128600 - DNA, 15 bp, Homo sapiens
tcttctgcaacttct

SEQ ID NO: 128601 - DNA, 15 bp, Homo sapiens
gtcttctgcaacttc

SEQ ID NO: 128602 - DNA, 15 bp, Homo sapiens
agtcttctgcaactt

SEQ ID NO: 128603 - DNA, 15 bp, Homo sapiens
cagtcttctgcaact

SEQ ID NO: 128604 - DNA, 15 bp, Homo sapiens
tcagtcttctgcaac

SEQ ID NO: 128605 - DNA, 15 bp, Homo sapiens
gtcagtcttctgcaa

SEQ ID NO: 128606 - DNA, 15 bp, Homo sapiens
ggtcagtcttctgca

SEQ ID NO: 128607 - DNA, 15 bp, Homo sapiens
aggtcagtcttctgc

SEQ ID NO: 128608 - DNA, 15 bp, Homo sapiens
aaggtcagtcttctg

SEQ ID NO: 128609 - DNA, 15 bp, Homo sapiens
gaaggtcagtcttct

SEQ ID NO: 128610 - DNA, 15 bp, Homo sapiens
tgaaggtcagtcttc

SEQ ID NO: 128611 - DNA, 15 bp, Homo sapiens
atgaaggtcagtctt

SEQ ID NO: 128612 - DNA, 15 bp, Homo sapiens
gatgaaggtcagtct

SEQ ID NO: 128613 - DNA, 15 bp, Homo sapiens
ggatgaaggtcagtc

SEQ ID NO: 128614 - DNA, 15 bp, Homo sapiens
tggatgaaggtcagt

SEQ ID NO: 128615 - DNA, 15 bp, Homo sapiens
atggatgaaggtcag

SEQ ID NO: 128616 - DNA, 15 bp, Homo sapiens
aatggatgaaggtca

SEQ ID NO: 128617 - DNA, 15 bp, Homo sapiens
aaatggatgaaggtc

SEQ ID NO: 128618 - DNA, 15 bp, Homo sapiens
aaaatggatgaaggt

SEQ ID NO: 128619 - DNA, 15 bp, Homo sapiens
gaaaatggatgaagg

SEQ ID NO: 128620 - DNA, 15 bp, Homo sapiens
ggaaaatggatgaag

SEQ ID NO: 128621 - DNA, 15 bp, Homo sapiens
gggaaaatggatgaa

SEQ ID NO: 128622 - DNA, 15 bp, Homo sapiens
ggggaaaatggatga

SEQ ID NO: 128623 - DNA, 15 bp, Homo sapiens
gggggaaaatggatg

SEQ ID NO: 128624 - DNA, 15 bp, Homo sapiens
tgggggaaaatggat

SEQ ID NO: 128625 - DNA, 15 bp, Homo sapiens
ttgggggaaaatgga

SEQ ID NO: 128626 - DNA, 15 bp, Homo sapiens
tttgggggaaaatgg

SEQ ID NO: 128627 - DNA, 15 bp, Homo sapiens
ctttgggggaaaatg

SEQ ID NO: 128628 - DNA, 15 bp, Homo sapiens
cctttgggggaaaat

SEQ ID NO: 128629 - DNA, 15 bp, Homo sapiens
acctttgggggaaaa

SEQ ID NO: 128630 - DNA, 15 bp, Homo sapiens
aacctttgggggaaa

SEQ ID NO: 128631 - DNA, 15 bp, Homo sapiens
aaacctttgggggaa

SEQ ID NO: 128632 - DNA, 15 bp, Homo sapiens
taaacctttggggga

SEQ ID NO: 128633 - DNA, 15 bp, Homo sapiens
ctaaacctttggggg

SEQ ID NO: 128634 - DNA, 15 bp, Homo sapiens
cctaaacctttgggg

SEQ ID NO: 128635 - DNA, 15 bp, Homo sapiens
tcctaaacctttggg

SEQ ID NO: 128636 - DNA, 15 bp, Homo sapiens
atcctaaacctttgg

SEQ ID NO: 128637 - DNA, 15 bp, Homo sapiens
gatcctaaacctttg

SEQ ID NO: 128638 - DNA, 15 bp, Homo sapiens
agatcctaaaccttt

SEQ ID NO: 128639 - DNA, 15 bp, Homo sapiens
aagatcctaaacctt

SEQ ID NO: 128640 - DNA, 15 bp, Homo sapiens
caagatcctaaacct

SEQ ID NO: 128641 - DNA, 15 bp, Homo sapiens
ccaagatcctaaacc

SEQ ID NO: 128642 - DNA, 15 bp, Homo sapiens
tccaagatcctaaac

SEQ ID NO: 128643 - DNA, 15 bp, Homo sapiens
gtccaagatcctaaa

SEQ ID NO: 128644 - DNA, 15 bp, Homo sapiens
agtccaagatcctaa

SEQ ID NO: 128645 - DNA, 15 bp, Homo sapiens
gagtccaagatccta

SEQ ID NO: 128646 - DNA, 15 bp, Homo sapiens
agagtccaagatcct

SEQ ID NO: 128647 - DNA, 15 bp, Homo sapiens
aagagtccaagatcc

SEQ ID NO: 128648 - DNA, 15 bp, Homo sapiens
caagagtccaagatc

SEQ ID NO: 128649 - DNA, 15 bp, Homo sapiens
tcaagagtccaagat

SEQ ID NO: 128650 - DNA, 15 bp, Homo sapiens
ctcaagagtccaaga

SEQ ID NO: 128651 - DNA, 15 bp, Homo sapiens
cctcaagagtccaag

SEQ ID NO: 128652 - DNA, 15 bp, Homo sapiens
ccctcaagagtccaa

SEQ ID NO: 128653 - DNA, 15 bp, Homo sapiens
cccctcaagagtcca

SEQ ID NO: 128654 - DNA, 15 bp, Homo sapiens
ccccctcaagagtcc

SEQ ID NO: 128655 - DNA, 15 bp, Homo sapiens
cccccctcaagagtc

SEQ ID NO: 128656 - DNA, 15 bp, Homo sapiens
tcccccctcaagagt

SEQ ID NO: 128657 - DNA, 15 bp, Homo sapiens
gtcccccctcaagag

SEQ ID NO: 128658 - DNA, 15 bp, Homo sapiens
cgtcccccctcaaga

SEQ ID NO: 128659 - DNA, 15 bp, Homo sapiens
acgtcccccctcaag

SEQ ID NO: 128660 - DNA, 15 bp, Homo sapiens
cacgtcccccctcaa

SEQ ID NO: 128661 - DNA, 15 bp, Homo sapiens
acacgtcccccctca

SEQ ID NO: 128662 - DNA, 15 bp, Homo sapiens
aacacgtcccccctc

SEQ ID NO: 128663 - DNA, 15 bp, Homo sapiens
taacacgtcccccct

SEQ ID NO: 128664 - DNA, 15 bp, Homo sapiens
ataacacgtcccccc

SEQ ID NO: 128665 - DNA, 15 bp, Homo sapiens
tataacacgtccccc

SEQ ID NO: 128666 - DNA, 15 bp, Homo sapiens
ctataacacgtcccc

SEQ ID NO: 128667 - DNA, 15 bp, Homo sapiens
actataacacgtccc

SEQ ID NO: 128668 - DNA, 15 bp, Homo sapiens
tactataacacgtcc

SEQ ID NO: 128669 - DNA, 15 bp, Homo sapiens
ctactataacacgtc

SEQ ID NO: 128670 - DNA, 15 bp, Homo sapiens
cctactataacacgt

SEQ ID NO: 128671 - DNA, 15 bp, Homo sapiens
acctactataacacg

SEQ ID NO: 128672 - DNA, 15 bp, Homo sapiens
tacctactataacac

SEQ ID NO: 128673 - DNA, 15 bp, Homo sapiens
ctacctactataaca

SEQ ID NO: 128674 - DNA, 15 bp, Homo sapiens
gctacctactataac

SEQ ID NO: 128675 - DNA, 15 bp, Homo sapiens
ggctacctactataa

SEQ ID NO: 128676 - DNA, 15 bp, Homo sapiens
tggctacctactata

SEQ ID NO: 128677 - DNA, 15 bp, Homo sapiens
ctggctacctactat

SEQ ID NO: 128678 - DNA, 15 bp, Homo sapiens
actggctacctacta

SEQ ID NO: 128679 - DNA, 15 bp, Homo sapiens
gactggctacctact

SEQ ID NO: 128680 - DNA, 15 bp, Homo sapiens
tgactggctacctac

SEQ ID NO: 128681 - DNA, 15 bp, Homo sapiens
ctgactggctaccta

SEQ ID NO: 128682 - DNA, 15 bp, Homo sapiens
cctgactggctacct

SEQ ID NO: 128683 - DNA, 15 bp, Homo sapiens
acctgactggctacc

SEQ ID NO: 128684 - DNA, 15 bp, Homo sapiens
tacctgactggctac

SEQ ID NO: 128685 - DNA, 15 bp, Homo sapiens
atacctgactggcta

SEQ ID NO: 128686 - DNA, 15 bp, Homo sapiens
catacctgactggct

SEQ ID NO: 128687 - DNA, 15 bp, Homo sapiens
tcatacctgactggc

SEQ ID NO: 128688 - DNA, 15 bp, Homo sapiens
ctcatacctgactgg

SEQ ID NO: 128689 - DNA, 15 bp, Homo sapiens
gctcatacctgactg

SEQ ID NO: 128690 - DNA, 15 bp, Homo sapiens
tgctcatacctgact

SEQ ID NO: 128691 - DNA, 15 bp, Homo sapiens
ttgctcatacctgac

SEQ ID NO: 128692 - DNA, 15 bp, Homo sapiens
cttgctcatacctga

SEQ ID NO: 128693 - DNA, 15 bp, Homo sapiens
ccttgctcatacctg

SEQ ID NO: 128694 - DNA, 15 bp, Homo sapiens
gccttgctcatacct

SEQ ID NO: 128695 - DNA, 15 bp, Homo sapiens
tgccttgctcatacc

SEQ ID NO: 128696 - DNA, 15 bp, Homo sapiens
ctgccttgctcatac

SEQ ID NO: 128697 - DNA, 15 bp, Homo sapiens
cctgccttgctcata

SEQ ID NO: 128698 - DNA, 15 bp, Homo sapiens
tcctgccttgctcat

SEQ ID NO: 128699 - DNA, 15 bp, Homo sapiens
ctcctgccttgctca

SEQ ID NO: 128700 - DNA, 15 bp, Homo sapiens
tctcctgccttgctc

SEQ ID NO: 128701 - DNA, 15 bp, Homo sapiens
ctctcctgccttgct

SEQ ID NO: 128702 - DNA, 15 bp, Homo sapiens
cctctcctgccttgc

SEQ ID NO: 128703 - DNA, 15 bp, Homo sapiens
ccctctcctgccttg

SEQ ID NO: 128704 - DNA, 15 bp, Homo sapiens
gccctctcctgcctt

SEQ ID NO: 128705 - DNA, 15 bp, Homo sapiens
agccctctcctgcct

SEQ ID NO: 128706 - DNA, 15 bp, Homo sapiens
gagccctctcctgcc

SEQ ID NO: 128707 - DNA, 15 bp, Homo sapiens
ggagccctctcctgc

SEQ ID NO: 128708 - DNA, 15 bp, Homo sapiens
gggagccctctcctg

SEQ ID NO: 128709 - DNA, 15 bp, Homo sapiens
ggggagccctctcct

SEQ ID NO: 128710 - DNA, 15 bp, Homo sapiens
tggggagccctctcc

SEQ ID NO: 128711 - DNA, 15 bp, Homo sapiens
gtggggagccctctc

SEQ ID NO: 128712 - DNA, 15 bp, Homo sapiens
tgtggggagccctct

SEQ ID NO: 128713 - DNA, 15 bp, Homo sapiens
ttgtggggagccctc

SEQ ID NO: 128714 - DNA, 15 bp, Homo sapiens
gttgtggggagccct

SEQ ID NO: 128715 - DNA, 15 bp, Homo sapiens
tgttgtggggagccc

SEQ ID NO: 128716 - DNA, 15 bp, Homo sapiens
gtgttgtggggagcc

SEQ ID NO: 128717 - DNA, 15 bp, Homo sapiens
tgtgttgtggggagc

SEQ ID NO: 128718 - DNA, 15 bp, Homo sapiens
gtgtgttgtggggag

SEQ ID NO: 128719 - DNA, 15 bp, Homo sapiens
agtgtgttgtgggga

SEQ ID NO: 128720 - DNA, 15 bp, Homo sapiens
aagtgtgttgtgggg

SEQ ID NO: 128721 - DNA, 15 bp, Homo sapiens
taagtgtgttgtggg

SEQ ID NO: 128722 - DNA, 15 bp, Homo sapiens
ctaagtgtgttgtgg

SEQ ID NO: 128723 - DNA, 15 bp, Homo sapiens
cctaagtgtgttgtg

SEQ ID NO: 128724 - DNA, 15 bp, Homo sapiens
tcctaagtgtgttgt

SEQ ID NO: 128725 - DNA, 15 bp, Homo sapiens
ctcctaagtgtgttg

SEQ ID NO: 128726 - DNA, 15 bp, Homo sapiens
actcctaagtgtgtt

SEQ ID NO: 128727 - DNA, 15 bp, Homo sapiens
cactcctaagtgtgt

SEQ ID NO: 128728 - DNA, 15 bp, Homo sapiens
ccactcctaagtgtg

SEQ ID NO: 128729 - DNA, 15 bp, Homo sapiens
accactcctaagtgt

SEQ ID NO: 128730 - DNA, 15 bp, Homo sapiens
caccactcctaagtg

SEQ ID NO: 128731 - DNA, 15 bp, Homo sapiens
ccaccactcctaagt

SEQ ID NO: 128732 - DNA, 15 bp, Homo sapiens
cccaccactcctaag

SEQ ID NO: 128733 - DNA, 15 bp, Homo sapiens
gcccaccactcctaa

SEQ ID NO: 128734 - DNA, 15 bp, Homo sapiens
tgcccaccactccta

SEQ ID NO: 128735 - DNA, 15 bp, Homo sapiens
ttgcccaccactcct

SEQ ID NO: 128736 - DNA, 15 bp, Homo sapiens
gttgcccaccactcc

SEQ ID NO: 128737 - DNA, 15 bp, Homo sapiens
ggttgcccaccactc

SEQ ID NO: 128738 - DNA, 15 bp, Homo sapiens
tggttgcccaccact

SEQ ID NO: 128739 - DNA, 15 bp, Homo sapiens
atggttgcccaccac

SEQ ID NO: 128740 - DNA, 15 bp, Homo sapiens
gatggttgcccacca

SEQ ID NO: 128741 - DNA, 15 bp, Homo sapiens
tgatggttgcccacc

SEQ ID NO: 128742 - DNA, 15 bp, Homo sapiens
ctgatggttgcccac

SEQ ID NO: 128743 - DNA, 15 bp, Homo sapiens
cctgatggttgccca

SEQ ID NO: 128744 - DNA, 15 bp, Homo sapiens
acctgatggttgccc

SEQ ID NO: 128745 - DNA, 15 bp, Homo sapiens
cacctgatggttgcc

SEQ ID NO: 128746 - DNA, 15 bp, Homo sapiens
tcacctgatggttgc

SEQ ID NO: 128747 - DNA, 15 bp, Homo sapiens
atcacctgatggttg

SEQ ID NO: 128748 - DNA, 15 bp, Homo sapiens
catcacctgatggtt

SEQ ID NO: 128749 - DNA, 15 bp, Homo sapiens
ccatcacctgatggt

SEQ ID NO: 128750 - DNA, 15 bp, Homo sapiens
accatcacctgatgg

SEQ ID NO: 128751 - DNA, 15 bp, Homo sapiens
gaccatcacctgatg

SEQ ID NO: 128752 - DNA, 15 bp, Homo sapiens
tgaccatcacctgat

SEQ ID NO: 128753 - DNA, 15 bp, Homo sapiens
ctgaccatcacctga

SEQ ID NO: 128754 - DNA, 15 bp, Homo sapiens
cctgaccatcacctg

SEQ ID NO: 128755 - DNA, 15 bp, Homo sapiens
ccctgaccatcacct

SEQ ID NO: 128756 - DNA, 15 bp, Homo sapiens
cccctgaccatcacc

SEQ ID NO: 128757 - DNA, 15 bp, Homo sapiens
ccccctgaccatcac

SEQ ID NO: 128758 - DNA, 15 bp, Homo sapiens
accccctgaccatca

SEQ ID NO: 128759 - DNA, 15 bp, Homo sapiens
aaccccctgaccatc

SEQ ID NO: 128760 - DNA, 15 bp, Homo sapiens
taaccccctgaccat

SEQ ID NO: 128761 - DNA, 15 bp, Homo sapiens
ttaaccccctgacca

SEQ ID NO: 128762 - DNA, 15 bp, Homo sapiens
gttaaccccctgacc

SEQ ID NO: 128763 - DNA, 15 bp, Homo sapiens
agttaaccccctgac

SEQ ID NO: 128764 - DNA, 15 bp, Homo sapiens
cagttaaccccctga

SEQ ID NO: 128765 - DNA, 15 bp, Homo sapiens
acagttaaccccctg

SEQ ID NO: 128766 - DNA, 15 bp, Homo sapiens
aacagttaaccccct

SEQ ID NO: 128767 - DNA, 15 bp, Homo sapiens
aaacagttaaccccc

SEQ ID NO: 128768 - DNA, 15 bp, Homo sapiens
gaaacagttaacccc

SEQ ID NO: 128769 - DNA, 15 bp, Homo sapiens
agaaacagttaaccc

SEQ ID NO: 128770 - DNA, 15 bp, Homo sapiens
gagaaacagttaacc

SEQ ID NO: 128771 - DNA, 15 bp, Homo sapiens
agagaaacagttaac

SEQ ID NO: 128772 - DNA, 15 bp, Homo sapiens
tagagaaacagttaa

SEQ ID NO: 128773 - DNA, 15 bp, Homo sapiens
ttagagaaacagtta

SEQ ID NO: 128774 - DNA, 15 bp, Homo sapiens
tttagagaaacagtt

SEQ ID NO: 128775 - DNA, 15 bp, Homo sapiens
ctttagagaaacagt

SEQ ID NO: 128776 - DNA, 15 bp, Homo sapiens
actttagagaaacag

SEQ ID NO: 128777 - DNA, 15 bp, Homo sapiens
tactttagagaaaca

SEQ ID NO: 128778 - DNA, 15 bp, Homo sapiens
ttactttagagaaac

SEQ ID NO: 128779 - DNA, 15 bp, Homo sapiens
attactttagagaaa

SEQ ID NO: 128780 - DNA, 15 bp, Homo sapiens
tattactttagagaa

SEQ ID NO: 128781 - DNA, 15 bp, Homo sapiens
ttattactttagaga

SEQ ID NO: 128782 - DNA, 15 bp, Homo sapiens
attattactttagag

SEQ ID NO: 128783 - DNA, 15 bp, Homo sapiens
aattattactttaga

SEQ ID NO: 128784 - DNA, 15 bp, Homo sapiens
caattattactttag

SEQ ID NO: 128785 - DNA, 15 bp, Homo sapiens
ccaattattacttta

SEQ ID NO: 128786 - DNA, 15 bp, Homo sapiens
accaattattacttt

SEQ ID NO: 128787 - DNA, 15 bp, Homo sapiens
gaccaattattactt

SEQ ID NO: 128788 - DNA, 15 bp, Homo sapiens
tgaccaattattact

SEQ ID NO: 128789 - DNA, 15 bp, Homo sapiens
gtgaccaattattac

SEQ ID NO: 128790 - DNA, 15 bp, Homo sapiens
tgtgaccaattatta

SEQ ID NO: 128791 - DNA, 15 bp, Homo sapiens
ctgtgaccaattatt

SEQ ID NO: 128792 - DNA, 15 bp, Homo sapiens
gctgtgaccaattat

SEQ ID NO: 128793 - DNA, 15 bp, Homo sapiens
ggctgtgaccaatta

SEQ ID NO: 128794 - DNA, 15 bp, Homo sapiens
tggctgtgaccaatt

SEQ ID NO: 128795 - DNA, 15 bp, Homo sapiens
ctggctgtgaccaat

SEQ ID NO: 128796 - DNA, 15 bp, Homo sapiens
tctggctgtgaccaa

SEQ ID NO: 128797 - DNA, 15 bp, Homo sapiens
ctctggctgtgacca

SEQ ID NO: 128798 - DNA, 15 bp, Homo sapiens
gctctggctgtgacc

SEQ ID NO: 128799 - DNA, 15 bp, Homo sapiens
ggctctggctgtgac

SEQ ID NO: 128800 - DNA, 15 bp, Homo sapiens
tggctctggctgtga

SEQ ID NO: 128801 - DNA, 15 bp, Homo sapiens
ctggctctggctgtg

SEQ ID NO: 128802 - DNA, 15 bp, Homo sapiens
cctggctctggctgt

SEQ ID NO: 128803 - DNA, 15 bp, Homo sapiens
ccctggctctggctg

SEQ ID NO: 128804 - DNA, 15 bp, Homo sapiens
tccctggctctggct

SEQ ID NO: 128805 - DNA, 15 bp, Homo sapiens
ttccctggctctggc

SEQ ID NO: 128806 - DNA, 15 bp, Homo sapiens
gttccctggctctgg

SEQ ID NO: 128807 - DNA, 15 bp, Homo sapiens
tgttccctggctctg

SEQ ID NO: 128808 - DNA, 15 bp, Homo sapiens
ctgttccctggctct

SEQ ID NO: 128809 - DNA, 15 bp, Homo sapiens
gctgttccctggctc

SEQ ID NO: 128810 - DNA, 15 bp, Homo sapiens
tgctgttccctggct

SEQ ID NO: 128811 - DNA, 15 bp, Homo sapiens
ctgctgttccctggc

SEQ ID NO: 128812 - DNA, 15 bp, Homo sapiens
actgctgttccctgg

SEQ ID NO: 128813 - DNA, 15 bp, Homo sapiens
gactgctgttccctg

SEQ ID NO: 128814 - DNA, 15 bp, Homo sapiens
agactgctgttccct

SEQ ID NO: 128815 - DNA, 15 bp, Homo sapiens
gagactgctgttccc

SEQ ID NO: 128816 - DNA, 15 bp, Homo sapiens
ggagactgctgttcc

SEQ ID NO: 128817 - DNA, 15 bp, Homo sapiens
aggagactgctgttc

SEQ ID NO: 128818 - DNA, 15 bp, Homo sapiens
caggagactgctgtt

SEQ ID NO: 128819 - DNA, 15 bp, Homo sapiens
tcaggagactgctgt

SEQ ID NO: 128820 - DNA, 15 bp, Homo sapiens
gtcaggagactgctg

SEQ ID NO: 128821 - DNA, 15 bp, Homo sapiens
tgtcaggagactgct

SEQ ID NO: 128822 - DNA, 15 bp, Homo sapiens
ctgtcaggagactgc

SEQ ID NO: 128823 - DNA, 15 bp, Homo sapiens
tctgtcaggagactg

SEQ ID NO: 128824 - DNA, 15 bp, Homo sapiens
atctgtcaggagact

SEQ ID NO: 128825 - DNA, 15 bp, Homo sapiens
tatctgtcaggagac

SEQ ID NO: 128826 - DNA, 15 bp, Homo sapiens
ctatctgtcaggaga

SEQ ID NO: 128827 - DNA, 15 bp, Homo sapiens
tctatctgtcaggag

SEQ ID NO: 128828 - DNA, 15 bp, Homo sapiens
ttctatctgtcagga

SEQ ID NO: 128829 - DNA, 15 bp, Homo sapiens
tttctatctgtcagg

SEQ ID NO: 128830 - DNA, 15 bp, Homo sapiens
ttttctatctgtcag

SEQ ID NO: 128831 - DNA, 15 bp, Homo sapiens
gttttctatctgtca

SEQ ID NO: 128832 - DNA, 15 bp, Homo sapiens
tgttttctatctgtc

SEQ ID NO: 128833 - DNA, 15 bp, Homo sapiens
ctgttttctatctgt

SEQ ID NO: 128834 - DNA, 15 bp, Homo sapiens
gctgttttctatctg

SEQ ID NO: 128835 - DNA, 15 bp, Homo sapiens
agctgttttctatct

SEQ ID NO: 128836 - DNA, 15 bp, Homo sapiens
cagctgttttctatc

SEQ ID NO: 128837 - DNA, 15 bp, Homo sapiens
tcagctgttttctat

SEQ ID NO: 128838 - DNA, 15 bp, Homo sapiens
ttcagctgttttcta

SEQ ID NO: 128839 - DNA, 15 bp, Homo sapiens
tttcagctgttttct

SEQ ID NO: 128840 - DNA, 15 bp, Homo sapiens
gtttcagctgttttc

SEQ ID NO: 128841 - DNA, 15 bp, Homo sapiens
agtttcagctgtttt

SEQ ID NO: 128842 - DNA, 15 bp, Homo sapiens
cagtttcagctgttt

SEQ ID NO: 128843 - DNA, 15 bp, Homo sapiens
tcagtttcagctgtt

SEQ ID NO: 128844 - DNA, 15 bp, Homo sapiens
atcagtttcagctgt

SEQ ID NO: 128845 - DNA, 15 bp, Homo sapiens
gatcagtttcagctg

SEQ ID NO: 128846 - DNA, 15 bp, Homo sapiens
tgatcagtttcagct

SEQ ID NO: 128847 - DNA, 15 bp, Homo sapiens
ctgatcagtttcagc

SEQ ID NO: 128848 - DNA, 15 bp, Homo sapiens
gctgatcagtttcag

SEQ ID NO: 128849 - DNA, 15 bp, Homo sapiens
tgctgatcagtttca

SEQ ID NO: 128850 - DNA, 15 bp, Homo sapiens
ctgctgatcagtttc

SEQ ID NO: 128851 - DNA, 15 bp, Homo sapiens
gctgctgatcagttt

SEQ ID NO: 128852 - DNA, 15 bp, Homo sapiens
agctgctgatcagtt

SEQ ID NO: 128853 - DNA, 15 bp, Homo sapiens
aagctgctgatcagt

SEQ ID NO: 128854 - DNA, 15 bp, Homo sapiens
gaagctgctgatcag

SEQ ID NO: 128855 - DNA, 15 bp, Homo sapiens
ggaagctgctgatca

SEQ ID NO: 128856 - DNA, 15 bp, Homo sapiens
gggaagctgctgatc

SEQ ID NO: 128857 - DNA, 15 bp, Homo sapiens
tgggaagctgctgat

SEQ ID NO: 128858 - DNA, 15 bp, Homo sapiens
ttgggaagctgctga

SEQ ID NO: 128859 - DNA, 15 bp, Homo sapiens
attgggaagctgctg

SEQ ID NO: 128860 - DNA, 15 bp, Homo sapiens
tattgggaagctgct

SEQ ID NO: 128861 - DNA, 15 bp, Homo sapiens
ttattgggaagctgc

SEQ ID NO: 128862 - DNA, 15 bp, Homo sapiens
cttattgggaagctg

SEQ ID NO: 128863 - DNA, 15 bp, Homo sapiens
tcttattgggaagct

SEQ ID NO: 128864 - DNA, 15 bp, Homo sapiens
atcttattgggaagc

SEQ ID NO: 128865 - DNA, 15 bp, Homo sapiens
gatcttattgggaag

SEQ ID NO: 128866 - DNA, 15 bp, Homo sapiens
agatcttattgggaa

SEQ ID NO: 128867 - DNA, 15 bp, Homo sapiens
gagatcttattggga

SEQ ID NO: 128868 - DNA, 15 bp, Homo sapiens
tgagatcttattggg

SEQ ID NO: 128869 - DNA, 15 bp, Homo sapiens
ctgagatcttattgg

SEQ ID NO: 128870 - DNA, 15 bp, Homo sapiens
cctgagatcttattg

SEQ ID NO: 128871 - DNA, 15 bp, Homo sapiens
tcctgagatcttatt

SEQ ID NO: 128872 - DNA, 15 bp, Homo sapiens
ctcctgagatcttat

SEQ ID NO: 128873 - DNA, 15 bp, Homo sapiens
actcctgagatctta

SEQ ID NO: 128874 - DNA, 15 bp, Homo sapiens
cactcctgagatctt

SEQ ID NO: 128875 - DNA, 15 bp, Homo sapiens
ccactcctgagatct

SEQ ID NO: 128876 - DNA, 15 bp, Homo sapiens
cccactcctgagatc

SEQ ID NO: 128877 - DNA, 15 bp, Homo sapiens
ccccactcctgagat

SEQ ID NO: 128878 - DNA, 15 bp, Homo sapiens
tccccactcctgaga

SEQ ID NO: 128879 - DNA, 15 bp, Homo sapiens
ctccccactcctgag

SEQ ID NO: 128880 - DNA, 15 bp, Homo sapiens
cctccccactcctga

SEQ ID NO: 128881 - DNA, 15 bp, Homo sapiens
ccctccccactcctg

SEQ ID NO: 128882 - DNA, 15 bp, Homo sapiens
accctccccactcct

SEQ ID NO: 128883 - DNA, 15 bp, Homo sapiens
aaccctccccactcc

SEQ ID NO: 128884 - DNA, 15 bp, Homo sapiens
taaccctccccactc

SEQ ID NO: 128885 - DNA, 15 bp, Homo sapiens
ttaaccctccccact

SEQ ID NO: 128886 - DNA, 15 bp, Homo sapiens
cttaaccctccccac

SEQ ID NO: 128887 - DNA, 15 bp, Homo sapiens
ccttaaccctcccca

SEQ ID NO: 128888 - DNA, 15 bp, Homo sapiens
gccttaaccctcccc

SEQ ID NO: 128889 - DNA, 15 bp, Homo sapiens
tgccttaaccctccc

SEQ ID NO: 128890 - DNA, 15 bp, Homo sapiens
ttgccttaaccctcc

SEQ ID NO: 128891 - DNA, 15 bp, Homo sapiens
cttgccttaaccctc

SEQ ID NO: 128892 - DNA, 15 bp, Homo sapiens
tcttgccttaaccct

SEQ ID NO: 128893 - DNA, 15 bp, Homo sapiens
atcttgccttaaccc

SEQ ID NO: 128894 - DNA, 15 bp, Homo sapiens
gatcttgccttaacc

SEQ ID NO: 128895 - DNA, 15 bp, Homo sapiens
agatcttgccttaac

SEQ ID NO: 128896 - DNA, 15 bp, Homo sapiens
aagatcttgccttaa

SEQ ID NO: 128897 - DNA, 15 bp, Homo sapiens
caagatcttgcctta

SEQ ID NO: 128898 - DNA, 15 bp, Homo sapiens
ccaagatcttgcctt

SEQ ID NO: 128899 - DNA, 15 bp, Homo sapiens
tccaagatcttgcct

SEQ ID NO: 128900 - DNA, 15 bp, Homo sapiens
ttccaagatcttgcc

SEQ ID NO: 128901 - DNA, 15 bp, Homo sapiens
cttccaagatcttgc

SEQ ID NO: 128902 - DNA, 15 bp, Homo sapiens
acttccaagatcttg

SEQ ID NO: 128903 - DNA, 15 bp, Homo sapiens
tacttccaagatctt

SEQ ID NO: 128904 - DNA, 15 bp, Homo sapiens
ctacttccaagatct

SEQ ID NO: 128905 - DNA, 15 bp, Homo sapiens
cctacttccaagatc

SEQ ID NO: 128906 - DNA, 15 bp, Homo sapiens
gcctacttccaagat

SEQ ID NO: 128907 - DNA, 15 bp, Homo sapiens
ggcctacttccaaga

SEQ ID NO: 128908 - DNA, 15 bp, Homo sapiens
tggcctacttccaag

SEQ ID NO: 128909 - DNA, 15 bp, Homo sapiens
ttggcctacttccaa

SEQ ID NO: 128910 - DNA, 15 bp, Homo sapiens
tttggcctacttcca

SEQ ID NO: 128911 - DNA, 15 bp, Homo sapiens
ctttggcctacttcc

SEQ ID NO: 128912 - DNA, 15 bp, Homo sapiens
actttggcctacttc

SEQ ID NO: 128913 - DNA, 15 bp, Homo sapiens
tactttggcctactt

SEQ ID NO: 128914 - DNA, 15 bp, Homo sapiens
atactttggcctact

SEQ ID NO: 128915 - DNA, 15 bp, Homo sapiens
tatactttggcctac

SEQ ID NO: 128916 - DNA, 15 bp, Homo sapiens
ttatactttggccta

SEQ ID NO: 128917 - DNA, 15 bp, Homo sapiens
tttatactttggcct

SEQ ID NO: 128918 - DNA, 15 bp, Homo sapiens
ttttatactttggcc

SEQ ID NO: 128919 - DNA, 15 bp, Homo sapiens
gttttatactttggc

SEQ ID NO: 128920 - DNA, 15 bp, Homo sapiens
ggttttatactttgg

SEQ ID NO: 128921 - DNA, 15 bp, Homo sapiens
gggttttatactttg

SEQ ID NO: 128922 - DNA, 15 bp, Homo sapiens
agggttttatacttt

SEQ ID NO: 128923 - DNA, 15 bp, Homo sapiens
cagggttttatactt

SEQ ID NO: 128924 - DNA, 15 bp, Homo sapiens
acagggttttatact

SEQ ID NO: 128925 - DNA, 15 bp, Homo sapiens
cacagggttttatac

SEQ ID NO: 128926 - DNA, 15 bp, Homo sapiens
acacagggttttata

SEQ ID NO: 128927 - DNA, 15 bp, Homo sapiens
aacacagggttttat

SEQ ID NO: 128928 - DNA, 15 bp, Homo sapiens
taacacagggtttta

SEQ ID NO: 128929 - DNA, 15 bp, Homo sapiens
ctaacacagggtttt

SEQ ID NO: 128930 - DNA, 15 bp, Homo sapiens
actaacacagggttt

SEQ ID NO: 128931 - DNA, 15 bp, Homo sapiens
aactaacacagggtt

SEQ ID NO: 128932 - DNA, 15 bp, Homo sapiens
aaactaacacagggt

SEQ ID NO: 128933 - DNA, 15 bp, Homo sapiens
caaactaacacaggg

SEQ ID NO: 128934 - DNA, 15 bp, Homo sapiens
acaaactaacacagg

SEQ ID NO: 128935 - DNA, 15 bp, Homo sapiens
aacaaactaacacag

SEQ ID NO: 128936 - DNA, 15 bp, Homo sapiens
gaacaaactaacaca

SEQ ID NO: 128937 - DNA, 15 bp, Homo sapiens
agaacaaactaacac

SEQ ID NO: 128938 - DNA, 15 bp, Homo sapiens
gagaacaaactaaca

SEQ ID NO: 128939 - DNA, 15 bp, Homo sapiens
tgagaacaaactaac

SEQ ID NO: 128940 - DNA, 15 bp, Homo sapiens
gtgagaacaaactaa

SEQ ID NO: 128941 - DNA, 15 bp, Homo sapiens
cgtgagaacaaacta

SEQ ID NO: 128942 - DNA, 15 bp, Homo sapiens
gcgtgagaacaaact

SEQ ID NO: 128943 - DNA, 15 bp, Homo sapiens
agcgtgagaacaaac

SEQ ID NO: 128944 - DNA, 15 bp, Homo sapiens
cagcgtgagaacaaa

SEQ ID NO: 128945 - DNA, 15 bp, Homo sapiens
gcagcgtgagaacaa

SEQ ID NO: 128946 - DNA, 15 bp, Homo sapiens
agcagcgtgagaaca

SEQ ID NO: 128947 - DNA, 15 bp, Homo sapiens
tagcagcgtgagaac

SEQ ID NO: 128948 - DNA, 15 bp, Homo sapiens
ttagcagcgtgagaa

SEQ ID NO: 128949 - DNA, 15 bp, Homo sapiens
attagcagcgtgaga

SEQ ID NO: 128950 - DNA, 15 bp, Homo sapiens
tattagcagcgtgag

SEQ ID NO: 128951 - DNA, 15 bp, Homo sapiens
ttattagcagcgtga

SEQ ID NO: 128952 - DNA, 15 bp, Homo sapiens
tttattagcagcgtg

SEQ ID NO: 128953 - DNA, 15 bp, Homo sapiens
ctttattagcagcgt

SEQ ID NO: 128954 - DNA, 15 bp, Homo sapiens
tctttattagcagcg

SEQ ID NO: 128955 - DNA, 15 bp, Homo sapiens
gtctttattagcagc

SEQ ID NO: 128956 - DNA, 15 bp, Homo sapiens
tgtctttattagcag

SEQ ID NO: 128957 - DNA, 15 bp, Homo sapiens
atgtctttattagca

SEQ ID NO: 128958 - DNA, 15 bp, Homo sapiens
tatgtctttattagc

SEQ ID NO: 128959 - DNA, 15 bp, Homo sapiens
gtatgtctttattag

SEQ ID NO: 128960 - DNA, 15 bp, Homo sapiens
ggtatgtctttatta

SEQ ID NO: 128961 - DNA, 15 bp, Homo sapiens
aggtatgtctttatt

SEQ ID NO: 128962 - DNA, 15 bp, Homo sapiens
caggtatgtctttat

SEQ ID NO: 128963 - DNA, 15 bp, Homo sapiens
tcaggtatgtcttta

SEQ ID NO: 128964 - DNA, 15 bp, Homo sapiens
ctcaggtatgtcttt

SEQ ID NO: 128965 - DNA, 15 bp, Homo sapiens
tctcaggtatgtctt

SEQ ID NO: 128966 - DNA, 15 bp, Homo sapiens
gtctcaggtatgtct

SEQ ID NO: 128967 - DNA, 15 bp, Homo sapiens
agtctcaggtatgtc

SEQ ID NO: 128968 - DNA, 15 bp, Homo sapiens
cagtctcaggtatgt

SEQ ID NO: 128969 - DNA, 15 bp, Homo sapiens
ccagtctcaggtatg

SEQ ID NO: 128970 - DNA, 15 bp, Homo sapiens
cccagtctcaggtat

SEQ ID NO: 128971 - DNA, 15 bp, Homo sapiens
acccagtctcaggta

SEQ ID NO: 128972 - DNA, 15 bp, Homo sapiens
tacccagtctcaggt

SEQ ID NO: 128973 - DNA, 15 bp, Homo sapiens
ttacccagtctcagg

SEQ ID NO: 128974 - DNA, 15 bp, Homo sapiens
attacccagtctcag

SEQ ID NO: 128975 - DNA, 15 bp, Homo sapiens
aattacccagtctca

SEQ ID NO: 128976 - DNA, 15 bp, Homo sapiens
aaattacccagtctc

SEQ ID NO: 128977 - DNA, 15 bp, Homo sapiens
taaattacccagtct

SEQ ID NO: 128978 - DNA, 15 bp, Homo sapiens
ataaattacccagtc

SEQ ID NO: 128979 - DNA, 15 bp, Homo sapiens
tataaattacccagt

SEQ ID NO: 128980 - DNA, 15 bp, Homo sapiens
ttataaattacccag

SEQ ID NO: 128981 - DNA, 15 bp, Homo sapiens
tttataaattaccca

SEQ ID NO: 128982 - DNA, 15 bp, Homo sapiens
ctttataaattaccc

SEQ ID NO: 128983 - DNA, 15 bp, Homo sapiens
cctttataaattacc

SEQ ID NO: 128984 - DNA, 15 bp, Homo sapiens
tcctttataaattac

SEQ ID NO: 128985 - DNA, 15 bp, Homo sapiens
ttcctttataaatta

SEQ ID NO: 128986 - DNA, 15 bp, Homo sapiens
tttcctttataaatt

SEQ ID NO: 128987 - DNA, 15 bp, Homo sapiens
ctttcctttataaat

SEQ ID NO: 128988 - DNA, 15 bp, Homo sapiens
tctttcctttataaa

SEQ ID NO: 128989 - DNA, 15 bp, Homo sapiens
ctctttcctttataa

SEQ ID NO: 128990 - DNA, 15 bp, Homo sapiens
cctctttcctttata

SEQ ID NO: 128991 - DNA, 15 bp, Homo sapiens
acctctttcctttat

SEQ ID NO: 128992 - DNA, 15 bp, Homo sapiens
aacctctttccttta

SEQ ID NO: 128993 - DNA, 15 bp, Homo sapiens
aaacctctttccttt

SEQ ID NO: 128994 - DNA, 15 bp, Homo sapiens
taaacctctttcctt

SEQ ID NO: 128995 - DNA, 15 bp, Homo sapiens
ttaaacctctttcct

SEQ ID NO: 128996 - DNA, 15 bp, Homo sapiens
attaaacctctttcc

SEQ ID NO: 128997 - DNA, 15 bp, Homo sapiens
cattaaacctctttc

SEQ ID NO: 128998 - DNA, 15 bp, Homo sapiens
tcattaaacctcttt

SEQ ID NO: 128999 - DNA, 15 bp, Homo sapiens
ttcattaaacctctt

SEQ ID NO: 129000 - DNA, 15 bp, Homo sapiens
gttcattaaacctct

SEQ ID NO: 129001 - DNA, 15 bp, Homo sapiens
agttcattaaacctc

SEQ ID NO: 129002 - DNA, 15 bp, Homo sapiens
gagttcattaaacct

SEQ ID NO: 129003 - DNA, 15 bp, Homo sapiens
tgagttcattaaacc

SEQ ID NO: 129004 - DNA, 15 bp, Homo sapiens
gtgagttcattaaac

SEQ ID NO: 129005 - DNA, 15 bp, Homo sapiens
tgtgagttcattaaa

SEQ ID NO: 129006 - DNA, 15 bp, Homo sapiens
ctgtgagttcattaa

SEQ ID NO: 129007 - DNA, 15 bp, Homo sapiens
actgtgagttcatta

SEQ ID NO: 129008 - DNA, 15 bp, Homo sapiens
aactgtgagttcatt

SEQ ID NO: 129009 - DNA, 15 bp, Homo sapiens
gaactgtgagttcat

SEQ ID NO: 129010 - DNA, 15 bp, Homo sapiens
tgaactgtgagttca

SEQ ID NO: 129011 - DNA, 15 bp, Homo sapiens
gtgaactgtgagttc

SEQ ID NO: 129012 - DNA, 15 bp, Homo sapiens
tgtgaactgtgagtt

SEQ ID NO: 129013 - DNA, 15 bp, Homo sapiens
atgtgaactgtgagt

SEQ ID NO: 129014 - DNA, 15 bp, Homo sapiens
catgtgaactgtgag

SEQ ID NO: 129015 - DNA, 15 bp, Homo sapiens
ccatgtgaactgtga

SEQ ID NO: 129016 - DNA, 15 bp, Homo sapiens
gccatgtgaactgtg

SEQ ID NO: 129017 - DNA, 15 bp, Homo sapiens
agccatgtgaactgt

SEQ ID NO: 129018 - DNA, 15 bp, Homo sapiens
cagccatgtgaactg

SEQ ID NO: 129019 - DNA, 15 bp, Homo sapiens
ccagccatgtgaact

SEQ ID NO: 129020 - DNA, 15 bp, Homo sapiens
cccagccatgtgaac

SEQ ID NO: 129021 - DNA, 15 bp, Homo sapiens
ccccagccatgtgaa

SEQ ID NO: 129022 - DNA, 15 bp, Homo sapiens
tccccagccatgtga

SEQ ID NO: 129023 - DNA, 15 bp, Homo sapiens
ctccccagccatgtg

SEQ ID NO: 129024 - DNA, 15 bp, Homo sapiens
cctccccagccatgt

SEQ ID NO: 129025 - DNA, 15 bp, Homo sapiens
gcctccccagccatg

SEQ ID NO: 129026 - DNA, 15 bp, Homo sapiens
ggcctccccagccat

SEQ ID NO: 129027 - DNA, 15 bp, Homo sapiens
aggcctccccagcca

SEQ ID NO: 129028 - DNA, 15 bp, Homo sapiens
gaggcctccccagcc

SEQ ID NO: 129029 - DNA, 15 bp, Homo sapiens
tgaggcctccccagc

SEQ ID NO: 129030 - DNA, 15 bp, Homo sapiens
gtgaggcctccccag

SEQ ID NO: 129031 - DNA, 15 bp, Homo sapiens
tgtgaggcctcccca

SEQ ID NO: 129032 - DNA, 15 bp, Homo sapiens
ttgtgaggcctcccc

SEQ ID NO: 129033 - DNA, 15 bp, Homo sapiens
attgtgaggcctccc

SEQ ID NO: 129034 - DNA, 15 bp, Homo sapiens
gattgtgaggcctcc

SEQ ID NO: 129035 - DNA, 15 bp, Homo sapiens
tgattgtgaggcctc

SEQ ID NO: 129036 - DNA, 15 bp, Homo sapiens
atgattgtgaggcct

SEQ ID NO: 129037 - DNA, 15 bp, Homo sapiens
catgattgtgaggcc

SEQ ID NO: 129038 - DNA, 15 bp, Homo sapiens
ccatgattgtgaggc

SEQ ID NO: 129039 - DNA, 15 bp, Homo sapiens
gccatgattgtgagg

SEQ ID NO: 129040 - DNA, 15 bp, Homo sapiens
cgccatgattgtgag

SEQ ID NO: 129041 - DNA, 15 bp, Homo sapiens
ccgccatgattgtga

SEQ ID NO: 129042 - DNA, 15 bp, Homo sapiens
tccgccatgattgtg

SEQ ID NO: 129043 - DNA, 15 bp, Homo sapiens
ttccgccatgattgt

SEQ ID NO: 129044 - DNA, 15 bp, Homo sapiens
attccgccatgattg

SEQ ID NO: 129045 - DNA, 15 bp, Homo sapiens
cattccgccatgatt

SEQ ID NO: 129046 - DNA, 15 bp, Homo sapiens
gcattccgccatgat

SEQ ID NO: 129047 - DNA, 15 bp, Homo sapiens
cgcattccgccatga

SEQ ID NO: 129048 - DNA, 15 bp, Homo sapiens
tcgcattccgccatg

SEQ ID NO: 129049 - DNA, 15 bp, Homo sapiens
ttcgcattccgccat

SEQ ID NO: 129050 - DNA, 15 bp, Homo sapiens
attcgcattccgcca

SEQ ID NO: 129051 - DNA, 15 bp, Homo sapiens
cattcgcattccgcc

SEQ ID NO: 129052 - DNA, 15 bp, Homo sapiens
tcattcgcattccgc

SEQ ID NO: 129053 - DNA, 15 bp, Homo sapiens
ctcattcgcattccg

SEQ ID NO: 129054 - DNA, 15 bp, Homo sapiens
cctcattcgcattcc

SEQ ID NO: 129055 - DNA, 15 bp, Homo sapiens
tcctcattcgcattc

SEQ ID NO: 129056 - DNA, 15 bp, Homo sapiens
ctcctcattcgcatt

SEQ ID NO: 129057 - DNA, 15 bp, Homo sapiens
gctcctcattcgcat

SEQ ID NO: 129058 - DNA, 15 bp, Homo sapiens
tgctcctcattcgca

SEQ ID NO: 129059 - DNA, 15 bp, Homo sapiens
ctgctcctcattcgc

SEQ ID NO: 129060 - DNA, 15 bp, Homo sapiens
cctgctcctcattcg

SEQ ID NO: 129061 - DNA, 15 bp, Homo sapiens
ccctgctcctcattc

SEQ ID NO: 129062 - DNA, 15 bp, Homo sapiens
accctgctcctcatt

SEQ ID NO: 129063 - DNA, 15 bp, Homo sapiens
gaccctgctcctcat

SEQ ID NO: 129064 - DNA, 15 bp, Homo sapiens
tgaccctgctcctca

SEQ ID NO: 129065 - DNA, 15 bp, Homo sapiens
atgaccctgctcctc

SEQ ID NO: 129066 - DNA, 15 bp, Homo sapiens
catgaccctgctcct

SEQ ID NO: 129067 - DNA, 15 bp, Homo sapiens
acatgaccctgctcc

SEQ ID NO: 129068 - DNA, 15 bp, Homo sapiens
gacatgaccctgctc

SEQ ID NO: 129069 - DNA, 15 bp, Homo sapiens
agacatgaccctgct

SEQ ID NO: 129070 - DNA, 15 bp, Homo sapiens
aagacatgaccctgc

SEQ ID NO: 129071 - DNA, 15 bp, Homo sapiens
taagacatgaccctg

SEQ ID NO: 129072 - DNA, 15 bp, Homo sapiens
gtaagacatgaccct

SEQ ID NO: 129073 - DNA, 15 bp, Homo sapiens
tgtaagacatgaccc

SEQ ID NO: 129074 - DNA, 15 bp, Homo sapiens
atgtaagacatgacc

SEQ ID NO: 129075 - DNA, 15 bp, Homo sapiens
catgtaagacatgac

SEQ ID NO: 129076 - DNA, 15 bp, Homo sapiens
ccatgtaagacatga

SEQ ID NO: 129077 - DNA, 15 bp, Homo sapiens
gccatgtaagacatg

SEQ ID NO: 129078 - DNA, 15 bp, Homo sapiens
tgccatgtaagacat

SEQ ID NO: 129079 - DNA, 15 bp, Homo sapiens
ctgccatgtaagaca

SEQ ID NO: 129080 - DNA, 15 bp, Homo sapiens
actgccatgtaagac

SEQ ID NO: 129081 - DNA, 15 bp, Homo sapiens
tactgccatgtaaga

SEQ ID NO: 129082 - DNA, 15 bp, Homo sapiens
ctactgccatgtaag

SEQ ID NO: 129083 - DNA, 15 bp, Homo sapiens
cctactgccatgtaa

SEQ ID NO: 129084 - DNA, 15 bp, Homo sapiens
gcctactgccatgta

SEQ ID NO: 129085 - DNA, 15 bp, Homo sapiens
tgcctactgccatgt

SEQ ID NO: 129086 - DNA, 15 bp, Homo sapiens
ttgcctactgccatg

SEQ ID NO: 129087 - DNA, 15 bp, Homo sapiens
cttgcctactgccat

SEQ ID NO: 129088 - DNA, 15 bp, Homo sapiens
tcttgcctactgcca

SEQ ID NO: 129089 - DNA, 15 bp, Homo sapiens
ctcttgcctactgcc

SEQ ID NO: 129090 - DNA, 15 bp, Homo sapiens
cctcttgcctactgc

SEQ ID NO: 129091 - DNA, 15 bp, Homo sapiens
ccctcttgcctactg

SEQ ID NO: 129092 - DNA, 15 bp, Homo sapiens
gccctcttgcctact

SEQ ID NO: 129093 - DNA, 15 bp, Homo sapiens
agccctcttgcctac

SEQ ID NO: 129094 - DNA, 15 bp, Homo sapiens
aagccctcttgccta

SEQ ID NO: 129095 - DNA, 15 bp, Homo sapiens
caagccctcttgcct

SEQ ID NO: 129096 - DNA, 15 bp, Homo sapiens
acaagccctcttgcc

SEQ ID NO: 129097 - DNA, 15 bp, Homo sapiens
cacaagccctcttgc

SEQ ID NO: 129098 - DNA, 15 bp, Homo sapiens
acacaagccctcttg

SEQ ID NO: 129099 - DNA, 15 bp, Homo sapiens
cacacaagccctctt

SEQ ID NO: 129100 - DNA, 15 bp, Homo sapiens
ccacacaagccctct

SEQ ID NO: 129101 - DNA, 15 bp, Homo sapiens
gccacacaagccctc

SEQ ID NO: 129102 - DNA, 15 bp, Homo sapiens
cgccacacaagccct

SEQ ID NO: 129103 - DNA, 15 bp, Homo sapiens
ccgccacacaagccc

SEQ ID NO: 129104 - DNA, 15 bp, Homo sapiens
tccgccacacaagcc

SEQ ID NO: 129105 - DNA, 15 bp, Homo sapiens
ttccgccacacaagc

SEQ ID NO: 129106 - DNA, 15 bp, Homo sapiens
gttccgccacacaag

SEQ ID NO: 129107 - DNA, 15 bp, Homo sapiens
agttccgccacacaa

SEQ ID NO: 129108 - DNA, 15 bp, Homo sapiens
gagttccgccacaca

SEQ ID NO: 129109 - DNA, 15 bp, Homo sapiens
ggagttccgccacac

SEQ ID NO: 129110 - DNA, 15 bp, Homo sapiens
gggagttccgccaca

SEQ ID NO: 129111 - DNA, 15 bp, Homo sapiens
ggggagttccgccac

SEQ ID NO: 129112 - DNA, 15 bp, Homo sapiens
aggggagttccgcca

SEQ ID NO: 129113 - DNA, 15 bp, Homo sapiens
aaggggagttccgcc

SEQ ID NO: 129114 - DNA, 15 bp, Homo sapiens
aaaggggagttccgc

SEQ ID NO: 129115 - DNA, 15 bp, Homo sapiens
taaaggggagttccg

SEQ ID NO: 129116 - DNA, 15 bp, Homo sapiens
ataaaggggagttcc

SEQ ID NO: 129117 - DNA, 15 bp, Homo sapiens
tataaaggggagttc

SEQ ID NO: 129118 - DNA, 15 bp, Homo sapiens
ttataaaggggagtt

SEQ ID NO: 129119 - DNA, 15 bp, Homo sapiens
tttataaaggggagt

SEQ ID NO: 129120 - DNA, 15 bp, Homo sapiens
ttttataaaggggag

SEQ ID NO: 129121 - DNA, 15 bp, Homo sapiens
gttttataaagggga

SEQ ID NO: 129122 - DNA, 15 bp, Homo sapiens
ggttttataaagggg

SEQ ID NO: 129123 - DNA, 15 bp, Homo sapiens
tggttttataaaggg

SEQ ID NO: 129124 - DNA, 15 bp, Homo sapiens
atggttttataaagg

SEQ ID NO: 129125 - DNA, 15 bp, Homo sapiens
gatggttttataaag

SEQ ID NO: 129126 - DNA, 15 bp, Homo sapiens
tgatggttttataaa

SEQ ID NO: 129127 - DNA, 15 bp, Homo sapiens
ctgatggttttataa

SEQ ID NO: 129128 - DNA, 15 bp, Homo sapiens
tctgatggttttata

SEQ ID NO: 129129 - DNA, 15 bp, Homo sapiens
atctgatggttttat

SEQ ID NO: 129130 - DNA, 15 bp, Homo sapiens
gatctgatggtttta

SEQ ID NO: 129131 - DNA, 15 bp, Homo sapiens
agatctgatggtttt

SEQ ID NO: 129132 - DNA, 15 bp, Homo sapiens
gagatctgatggttt

SEQ ID NO: 129133 - DNA, 15 bp, Homo sapiens
tgagatctgatggtt

SEQ ID NO: 129134 - DNA, 15 bp, Homo sapiens
atgagatctgatggt

SEQ ID NO: 129135 - DNA, 15 bp, Homo sapiens
tatgagatctgatgg

SEQ ID NO: 129136 - DNA, 15 bp, Homo sapiens
ttatgagatctgatg

SEQ ID NO: 129137 - DNA, 15 bp, Homo sapiens
cttatgagatctgat

SEQ ID NO: 129138 - DNA, 15 bp, Homo sapiens
tcttatgagatctga

SEQ ID NO: 129139 - DNA, 15 bp, Homo sapiens
gtcttatgagatctg

SEQ ID NO: 129140 - DNA, 15 bp, Homo sapiens
agtcttatgagatct

SEQ ID NO: 129141 - DNA, 15 bp, Homo sapiens
aagtcttatgagatc

SEQ ID NO: 129142 - DNA, 15 bp, Homo sapiens
taagtcttatgagat

SEQ ID NO: 129143 - DNA, 15 bp, Homo sapiens
ataagtcttatgaga

SEQ ID NO: 129144 - DNA, 15 bp, Homo sapiens
aataagtcttatgag

SEQ ID NO: 129145 - DNA, 15 bp, Homo sapiens
gaataagtcttatga

SEQ ID NO: 129146 - DNA, 15 bp, Homo sapiens
tgaataagtcttatg

SEQ ID NO: 129147 - DNA, 15 bp, Homo sapiens
gtgaataagtcttat

SEQ ID NO: 129148 - DNA, 15 bp, Homo sapiens
agtgaataagtctta

SEQ ID NO: 129149 - DNA, 15 bp, Homo sapiens
cagtgaataagtctt

SEQ ID NO: 129150 - DNA, 15 bp, Homo sapiens
acagtgaataagtct

SEQ ID NO: 129151 - DNA, 15 bp, Homo sapiens
gacagtgaataagtc

SEQ ID NO: 129152 - DNA, 15 bp, Homo sapiens
tgacagtgaataagt

SEQ ID NO: 129153 - DNA, 15 bp, Homo sapiens
atgacagtgaataag

SEQ ID NO: 129154 - DNA, 15 bp, Homo sapiens
catgacagtgaataa

SEQ ID NO: 129155 - DNA, 15 bp, Homo sapiens
tcatgacagtgaata

SEQ ID NO: 129156 - DNA, 15 bp, Homo sapiens
ctcatgacagtgaat

SEQ ID NO: 129157 - DNA, 15 bp, Homo sapiens
tctcatgacagtgaa

SEQ ID NO: 129158 - DNA, 15 bp, Homo sapiens
ttctcatgacagtga

SEQ ID NO: 129159 - DNA, 15 bp, Homo sapiens
gttctcatgacagtg

SEQ ID NO: 129160 - DNA, 15 bp, Homo sapiens
tgttctcatgacagt

SEQ ID NO: 129161 - DNA, 15 bp, Homo sapiens
ctgttctcatgacag

SEQ ID NO: 129162 - DNA, 15 bp, Homo sapiens
gctgttctcatgaca

SEQ ID NO: 129163 - DNA, 15 bp, Homo sapiens
tgctgttctcatgac

SEQ ID NO: 129164 - DNA, 15 bp, Homo sapiens
atgctgttctcatga

SEQ ID NO: 129165 - DNA, 15 bp, Homo sapiens
catgctgttctcatg

SEQ ID NO: 129166 - DNA, 15 bp, Homo sapiens
ccatgctgttctcat

SEQ ID NO: 129167 - DNA, 15 bp, Homo sapiens
cccatgctgttctca

SEQ ID NO: 129168 - DNA, 15 bp, Homo sapiens
tcccatgctgttctc

SEQ ID NO: 129169 - DNA, 15 bp, Homo sapiens
ttcccatgctgttct

SEQ ID NO: 129170 - DNA, 15 bp, Homo sapiens
tttcccatgctgttc

SEQ ID NO: 129171 - DNA, 15 bp, Homo sapiens
ctttcccatgctgtt

SEQ ID NO: 129172 - DNA, 15 bp, Homo sapiens
tctttcccatgctgt

SEQ ID NO: 129173 - DNA, 15 bp, Homo sapiens
gtctttcccatgctg

SEQ ID NO: 129174 - DNA, 15 bp, Homo sapiens
tgtctttcccatgct

SEQ ID NO: 129175 - DNA, 15 bp, Homo sapiens
gtgtctttcccatgc

SEQ ID NO: 129176 - DNA, 15 bp, Homo sapiens
tgtgtctttcccatg

SEQ ID NO: 129177 - DNA, 15 bp, Homo sapiens
gtgtgtctttcccat

SEQ ID NO: 129178 - DNA, 15 bp, Homo sapiens
ggtgtgtctttccca

SEQ ID NO: 129179 - DNA, 15 bp, Homo sapiens
gggtgtgtctttccc

SEQ ID NO: 129180 - DNA, 15 bp, Homo sapiens
agggtgtgtctttcc

SEQ ID NO: 129181 - DNA, 15 bp, Homo sapiens
gagggtgtgtctttc

SEQ ID NO: 129182 - DNA, 15 bp, Homo sapiens
tgagggtgtgtcttt

SEQ ID NO: 129183 - DNA, 15 bp, Homo sapiens
atgagggtgtgtctt

SEQ ID NO: 129184 - DNA, 15 bp, Homo sapiens
catgagggtgtgtct

SEQ ID NO: 129185 - DNA, 15 bp, Homo sapiens
tcatgagggtgtgtc

SEQ ID NO: 129186 - DNA, 15 bp, Homo sapiens
atcatgagggtgtgt

SEQ ID NO: 129187 - DNA, 15 bp, Homo sapiens
aatcatgagggtgtg

SEQ ID NO: 129188 - DNA, 15 bp, Homo sapiens
gaatcatgagggtgt

SEQ ID NO: 129189 - DNA, 15 bp, Homo sapiens
tgaatcatgagggtg

SEQ ID NO: 129190 - DNA, 15 bp, Homo sapiens
ttgaatcatgagggt

SEQ ID NO: 129191 - DNA, 15 bp, Homo sapiens
attgaatcatgaggg

SEQ ID NO: 129192 - DNA, 15 bp, Homo sapiens
aattgaatcatgagg

SEQ ID NO: 129193 - DNA, 15 bp, Homo sapiens
taattgaatcatgag

SEQ ID NO: 129194 - DNA, 15 bp, Homo sapiens
gtaattgaatcatga

SEQ ID NO: 129195 - DNA, 15 bp, Homo sapiens
ggtaattgaatcatg

SEQ ID NO: 129196 - DNA, 15 bp, Homo sapiens
aggtaattgaatcat

SEQ ID NO: 129197 - DNA, 15 bp, Homo sapiens
gaggtaattgaatca

SEQ ID NO: 129198 - DNA, 15 bp, Homo sapiens
ggaggtaattgaatc

SEQ ID NO: 129199 - DNA, 15 bp, Homo sapiens
gggaggtaattgaat

SEQ ID NO: 129200 - DNA, 15 bp, Homo sapiens
tgggaggtaattgaa

SEQ ID NO: 129201 - DNA, 15 bp, Homo sapiens
gtgggaggtaattga

SEQ ID NO: 129202 - DNA, 15 bp, Homo sapiens
ggtgggaggtaattg

SEQ ID NO: 129203 - DNA, 15 bp, Homo sapiens
cggtgggaggtaatt

SEQ ID NO: 129204 - DNA, 15 bp, Homo sapiens
ccggtgggaggtaat

SEQ ID NO: 129205 - DNA, 15 bp, Homo sapiens
cccggtgggaggtaa

SEQ ID NO: 129206 - DNA, 15 bp, Homo sapiens
acccggtgggaggta

SEQ ID NO: 129207 - DNA, 15 bp, Homo sapiens
gacccggtgggaggt

SEQ ID NO: 129208 - DNA, 15 bp, Homo sapiens
ggacccggtgggagg

SEQ ID NO: 129209 - DNA, 15 bp, Homo sapiens
aggacccggtgggag

SEQ ID NO: 129210 - DNA, 15 bp, Homo sapiens
aaggacccggtggga

SEQ ID NO: 129211 - DNA, 15 bp, Homo sapiens
gaaggacccggtggg

SEQ ID NO: 129212 - DNA, 15 bp, Homo sapiens
ggaaggacccggtgg

SEQ ID NO: 129213 - DNA, 15 bp, Homo sapiens
gggaaggacccggtg

SEQ ID NO: 129214 - DNA, 15 bp, Homo sapiens
tgggaaggacccggt

SEQ ID NO: 129215 - DNA, 15 bp, Homo sapiens
gtgggaaggacccgg

SEQ ID NO: 129216 - DNA, 15 bp, Homo sapiens
tgtgggaaggacccg

SEQ ID NO: 129217 - DNA, 15 bp, Homo sapiens
ttgtgggaaggaccc

SEQ ID NO: 129218 - DNA, 15 bp, Homo sapiens
attgtgggaaggacc

SEQ ID NO: 129219 - DNA, 15 bp, Homo sapiens
tattgtgggaaggac

SEQ ID NO: 129220 - DNA, 15 bp, Homo sapiens
gtattgtgggaagga

SEQ ID NO: 129221 - DNA, 15 bp, Homo sapiens
cgtattgtgggaagg

SEQ ID NO: 129222 - DNA, 15 bp, Homo sapiens
acgtattgtgggaag

SEQ ID NO: 129223 - DNA, 15 bp, Homo sapiens
cacgtattgtgggaa

SEQ ID NO: 129224 - DNA, 15 bp, Homo sapiens
ccacgtattgtggga

SEQ ID NO: 129225 - DNA, 15 bp, Homo sapiens
cccacgtattgtggg

SEQ ID NO: 129226 - DNA, 15 bp, Homo sapiens
tcccacgtattgtgg

SEQ ID NO: 129227 - DNA, 15 bp, Homo sapiens
ttcccacgtattgtg

SEQ ID NO: 129228 - DNA, 15 bp, Homo sapiens
attcccacgtattgt

SEQ ID NO: 129229 - DNA, 15 bp, Homo sapiens
aattcccacgtattg

SEQ ID NO: 129230 - DNA, 15 bp, Homo sapiens
taattcccacgtatt

SEQ ID NO: 129231 - DNA, 15 bp, Homo sapiens
gtaattcccacgtat

SEQ ID NO: 129232 - DNA, 15 bp, Homo sapiens
cgtaattcccacgta

SEQ ID NO: 129233 - DNA, 15 bp, Homo sapiens
ccgtaattcccacgt

SEQ ID NO: 129234 - DNA, 15 bp, Homo sapiens
cccgtaattcccacg

SEQ ID NO: 129235 - DNA, 15 bp, Homo sapiens
tcccgtaattcccac

SEQ ID NO: 129236 - DNA, 15 bp, Homo sapiens
ctcccgtaattccca

SEQ ID NO: 129237 - DNA, 15 bp, Homo sapiens
cctcccgtaattccc

SEQ ID NO: 129238 - DNA, 15 bp, Homo sapiens
ccctcccgtaattcc

SEQ ID NO: 129239 - DNA, 15 bp, Homo sapiens
tccctcccgtaattc

SEQ ID NO: 129240 - DNA, 15 bp, Homo sapiens
ctccctcccgtaatt

SEQ ID NO: 129241 - DNA, 15 bp, Homo sapiens
gctccctcccgtaat

SEQ ID NO: 129242 - DNA, 15 bp, Homo sapiens
agctccctcccgtaa

SEQ ID NO: 129243 - DNA, 15 bp, Homo sapiens
tagctccctcccgta

SEQ ID NO: 129244 - DNA, 15 bp, Homo sapiens
gtagctccctcccgt

SEQ ID NO: 129245 - DNA, 15 bp, Homo sapiens
tgtagctccctcccg

SEQ ID NO: 129246 - DNA, 15 bp, Homo sapiens
ttgtagctccctccc

SEQ ID NO: 129247 - DNA, 15 bp, Homo sapiens
attgtagctccctcc

SEQ ID NO: 129248 - DNA, 15 bp, Homo sapiens
aattgtagctccctc

SEQ ID NO: 129249 - DNA, 15 bp, Homo sapiens
gaattgtagctccct

SEQ ID NO: 129250 - DNA, 15 bp, Homo sapiens
tgaattgtagctccc

SEQ ID NO: 129251 - DNA, 15 bp, Homo sapiens
ttgaattgtagctcc

SEQ ID NO: 129252 - DNA, 15 bp, Homo sapiens
cttgaattgtagctc

SEQ ID NO: 129253 - DNA, 15 bp, Homo sapiens
tcttgaattgtagct

SEQ ID NO: 129254 - DNA, 15 bp, Homo sapiens
ctcttgaattgtagc

SEQ ID NO: 129255 - DNA, 15 bp, Homo sapiens
cctcttgaattgtag

SEQ ID NO: 129256 - DNA, 15 bp, Homo sapiens
tcctcttgaattgta

SEQ ID NO: 129257 - DNA, 15 bp, Homo sapiens
ctcctcttgaattgt

SEQ ID NO: 129258 - DNA, 15 bp, Homo sapiens
tctcctcttgaattg

SEQ ID NO: 129259 - DNA, 15 bp, Homo sapiens
atctcctcttgaatt

SEQ ID NO: 129260 - DNA, 15 bp, Homo sapiens
aatctcctcttgaat

SEQ ID NO: 129261 - DNA, 15 bp, Homo sapiens
aaatctcctcttgaa

SEQ ID NO: 129262 - DNA, 15 bp, Homo sapiens
caaatctcctcttga

SEQ ID NO: 129263 - DNA, 15 bp, Homo sapiens
ccaaatctcctcttg

SEQ ID NO: 129264 - DNA, 15 bp, Homo sapiens
cccaaatctcctctt

SEQ ID NO: 129265 - DNA, 15 bp, Homo sapiens
acccaaatctcctct

SEQ ID NO: 129266 - DNA, 15 bp, Homo sapiens
cacccaaatctcctc

SEQ ID NO: 129267 - DNA, 15 bp, Homo sapiens
ccacccaaatctcct

SEQ ID NO: 129268 - DNA, 15 bp, Homo sapiens
cccacccaaatctcc

SEQ ID NO: 129269 - DNA, 15 bp, Homo sapiens
ccccacccaaatctc

SEQ ID NO: 129270 - DNA, 15 bp, Homo sapiens
tccccacccaaatct

SEQ ID NO: 129271 - DNA, 15 bp, Homo sapiens
gtccccacccaaatc

SEQ ID NO: 129272 - DNA, 15 bp, Homo sapiens
tgtccccacccaaat

SEQ ID NO: 129273 - DNA, 15 bp, Homo sapiens
gtgtccccacccaaa

SEQ ID NO: 129274 - DNA, 15 bp, Homo sapiens
tgtgtccccacccaa

SEQ ID NO: 129275 - DNA, 15 bp, Homo sapiens
ctgtgtccccaccca

SEQ ID NO: 129276 - DNA, 15 bp, Homo sapiens
gctgtgtccccaccc

SEQ ID NO: 129277 - DNA, 15 bp, Homo sapiens
ggctgtgtccccacc

SEQ ID NO: 129278 - DNA, 15 bp, Homo sapiens
tggctgtgtccccac

SEQ ID NO: 129279 - DNA, 15 bp, Homo sapiens
ttggctgtgtcccca

SEQ ID NO: 129280 - DNA, 15 bp, Homo sapiens
tttggctgtgtcccc

SEQ ID NO: 129281 - DNA, 15 bp, Homo sapiens
gtttggctgtgtccc

SEQ ID NO: 129282 - DNA, 15 bp, Homo sapiens
ggtttggctgtgtcc

SEQ ID NO: 129283 - DNA, 15 bp, Homo sapiens
tggtttggctgtgtc

SEQ ID NO: 129284 - DNA, 15 bp, Homo sapiens
atggtttggctgtgt

SEQ ID NO: 129285 - DNA, 15 bp, Homo sapiens
tatggtttggctgtg

SEQ ID NO: 129286 - DNA, 15 bp, Homo sapiens
atatggtttggctgt

SEQ ID NO: 129287 - DNA, 15 bp, Homo sapiens
catatggtttggctg

SEQ ID NO: 129288 - DNA, 15 bp, Homo sapiens
tcatatggtttggct

SEQ ID NO: 129289 - DNA, 15 bp, Homo sapiens
ttcatatggtttggc

SEQ ID NO: 129290 - DNA, 15 bp, Homo sapiens
tttcatatggtttgg

SEQ ID NO: 129291 - DNA, 15 bp, Homo sapiens
gtttcatatggtttg

SEQ ID NO: 129292 - DNA, 15 bp, Homo sapiens
ggtttcatatggttt

SEQ ID NO: 129293 - DNA, 15 bp, Homo sapiens
gggtttcatatggtt

SEQ ID NO: 129294 - DNA, 15 bp, Homo sapiens
ggggtttcatatggt

SEQ ID NO: 129295 - DNA, 15 bp, Homo sapiens
tggggtttcatatgg

SEQ ID NO: 129296 - DNA, 15 bp, Homo sapiens
ttggggtttcatatg

SEQ ID NO: 129297 - DNA, 15 bp, Homo sapiens
cttggggtttcatat

SEQ ID NO: 129298 - DNA, 15 bp, Homo sapiens
acttggggtttcata

SEQ ID NO: 129299 - DNA, 15 bp, Homo sapiens
gacttggggtttcat

SEQ ID NO: 129300 - DNA, 15 bp, Homo sapiens
tgacttggggtttca

SEQ ID NO: 129301 - DNA, 15 bp, Homo sapiens
ttgacttggggtttc

SEQ ID NO: 129302 - DNA, 15 bp, Homo sapiens
cttgacttggggttt

SEQ ID NO: 129303 - DNA, 15 bp, Homo sapiens
tcttgacttggggtt

SEQ ID NO: 129304 - DNA, 15 bp, Homo sapiens
ctcttgacttggggt

SEQ ID NO: 129305 - DNA, 15 bp, Homo sapiens
cctcttgacttgggg

SEQ ID NO: 129306 - DNA, 15 bp, Homo sapiens
acctcttgacttggg

SEQ ID NO: 129307 - DNA, 15 bp, Homo sapiens
gacctcttgacttgg

SEQ ID NO: 129308 - DNA, 15 bp, Homo sapiens
tgacctcttgacttg

SEQ ID NO: 129309 - DNA, 15 bp, Homo sapiens
ttgacctcttgactt

SEQ ID NO: 129310 - DNA, 15 bp, Homo sapiens
cttgacctcttgact

SEQ ID NO: 129311 - DNA, 15 bp, Homo sapiens
gcttgacctcttgac

SEQ ID NO: 129312 - DNA, 15 bp, Homo sapiens
agcttgacctcttga

SEQ ID NO: 129313 - DNA, 15 bp, Homo sapiens
tagcttgacctcttg

SEQ ID NO: 129314 - DNA, 15 bp, Homo sapiens
atagcttgacctctt

SEQ ID NO: 129315 - DNA, 15 bp, Homo sapiens
catagcttgacctct

SEQ ID NO: 129316 - DNA, 15 bp, Homo sapiens
gcatagcttgacctc

SEQ ID NO: 129317 - DNA, 15 bp, Homo sapiens
tgcatagcttgacct

SEQ ID NO: 129318 - DNA, 15 bp, Homo sapiens
gtgcatagcttgacc

SEQ ID NO: 129319 - DNA, 15 bp, Homo sapiens
agtgcatagcttgac

SEQ ID NO: 129320 - DNA, 15 bp, Homo sapiens
aagtgcatagcttga

SEQ ID NO: 129321 - DNA, 15 bp, Homo sapiens
caagtgcatagcttg

SEQ ID NO: 129322 - DNA, 15 bp, Homo sapiens
ccaagtgcatagctt

SEQ ID NO: 129323 - DNA, 15 bp, Homo sapiens
accaagtgcatagct

SEQ ID NO: 129324 - DNA, 15 bp, Homo sapiens
aaccaagtgcatagc

SEQ ID NO: 129325 - DNA, 15 bp, Homo sapiens
aaaccaagtgcatag

SEQ ID NO: 129326 - DNA, 15 bp, Homo sapiens
gaaaccaagtgcata

SEQ ID NO: 129327 - DNA, 15 bp, Homo sapiens
agaaaccaagtgcat

SEQ ID NO: 129328 - DNA, 15 bp, Homo sapiens
gagaaaccaagtgca

SEQ ID NO: 129329 - DNA, 15 bp, Homo sapiens
tgagaaaccaagtgc

SEQ ID NO: 129330 - DNA, 15 bp, Homo sapiens
ttgagaaaccaagtg

SEQ ID NO: 129331 - DNA, 15 bp, Homo sapiens
cttgagaaaccaagt

SEQ ID NO: 129332 - DNA, 15 bp, Homo sapiens
gcttgagaaaccaag

SEQ ID NO: 129333 - DNA, 15 bp, Homo sapiens
agcttgagaaaccaa

SEQ ID NO: 129334 - DNA, 15 bp, Homo sapiens
cagcttgagaaacca

SEQ ID NO: 129335 - DNA, 15 bp, Homo sapiens
gcagcttgagaaacc

SEQ ID NO: 129336 - DNA, 15 bp, Homo sapiens
ggcagcttgagaaac

SEQ ID NO: 129337 - DNA, 15 bp, Homo sapiens
gggcagcttgagaaa

SEQ ID NO: 129338 - DNA, 15 bp, Homo sapiens
tgggcagcttgagaa

SEQ ID NO: 129339 - DNA, 15 bp, Homo sapiens
gtgggcagcttgaga

SEQ ID NO: 129340 - DNA, 15 bp, Homo sapiens
agtgggcagcttgag

SEQ ID NO: 129341 - DNA, 15 bp, Homo sapiens
aagtgggcagcttga

SEQ ID NO: 129342 - DNA, 15 bp, Homo sapiens
caagtgggcagcttg

SEQ ID NO: 129343 - DNA, 15 bp, Homo sapiens
tcaagtgggcagctt

SEQ ID NO: 129344 - DNA, 15 bp, Homo sapiens
gtcaagtgggcagct

SEQ ID NO: 129345 - DNA, 15 bp, Homo sapiens
ggtcaagtgggcagc

SEQ ID NO: 129346 - DNA, 15 bp, Homo sapiens
tggtcaagtgggcag

SEQ ID NO: 129347 - DNA, 15 bp, Homo sapiens
atggtcaagtgggca

SEQ ID NO: 129348 - DNA, 15 bp, Homo sapiens
gatggtcaagtgggc

SEQ ID NO: 129349 - DNA, 15 bp, Homo sapiens
agatggtcaagtggg

SEQ ID NO: 129350 - DNA, 15 bp, Homo sapiens
aagatggtcaagtgg

SEQ ID NO: 129351 - DNA, 15 bp, Homo sapiens
gaagatggtcaagtg

SEQ ID NO: 129352 - DNA, 15 bp, Homo sapiens
ggaagatggtcaagt

SEQ ID NO: 129353 - DNA, 15 bp, Homo sapiens
tggaagatggtcaag

SEQ ID NO: 129354 - DNA, 15 bp, Homo sapiens
ttggaagatggtcaa

SEQ ID NO: 129355 - DNA, 15 bp, Homo sapiens
cttggaagatggtca

SEQ ID NO: 129356 - DNA, 15 bp, Homo sapiens
acttggaagatggtc

SEQ ID NO: 129357 - DNA, 15 bp, Homo sapiens
aacttggaagatggt

SEQ ID NO: 129358 - DNA, 15 bp, Homo sapiens
caacttggaagatgg

SEQ ID NO: 129359 - DNA, 15 bp, Homo sapiens
acaacttggaagatg

SEQ ID NO: 129360 - DNA, 15 bp, Homo sapiens
tacaacttggaagat

SEQ ID NO: 129361 - DNA, 15 bp, Homo sapiens
gtacaacttggaaga

SEQ ID NO: 129362 - DNA, 15 bp, Homo sapiens
agtacaacttggaag

SEQ ID NO: 129363 - DNA, 15 bp, Homo sapiens
gagtacaacttggaa

SEQ ID NO: 129364 - DNA, 15 bp, Homo sapiens
agagtacaacttgga

SEQ ID NO: 129365 - DNA, 15 bp, Homo sapiens
gagagtacaacttgg

SEQ ID NO: 129366 - DNA, 15 bp, Homo sapiens
ggagagtacaacttg

SEQ ID NO: 129367 - DNA, 15 bp, Homo sapiens
aggagagtacaactt

SEQ ID NO: 129368 - DNA, 15 bp, Homo sapiens
aaggagagtacaact

SEQ ID NO: 129369 - DNA, 15 bp, Homo sapiens
gaaggagagtacaac

SEQ ID NO: 129370 - DNA, 15 bp, Homo sapiens
agaaggagagtacaa

SEQ ID NO: 129371 - DNA, 15 bp, Homo sapiens
aagaaggagagtaca

SEQ ID NO: 129372 - DNA, 15 bp, Homo sapiens
gaagaaggagagtac

SEQ ID NO: 129373 - DNA, 15 bp, Homo sapiens
agaagaaggagagta

SEQ ID NO: 129374 - DNA, 15 bp, Homo sapiens
gagaagaaggagagt

SEQ ID NO: 129375 - DNA, 15 bp, Homo sapiens
agagaagaaggagag

SEQ ID NO: 129376 - DNA, 15 bp, Homo sapiens
aagagaagaaggaga

SEQ ID NO: 129377 - DNA, 15 bp, Homo sapiens
aaagagaagaaggag

SEQ ID NO: 129378 - DNA, 15 bp, Homo sapiens
gaaagagaagaagga

SEQ ID NO: 129379 - DNA, 15 bp, Homo sapiens
ggaaagagaagaagg

SEQ ID NO: 129380 - DNA, 15 bp, Homo sapiens
aggaaagagaagaag

SEQ ID NO: 129381 - DNA, 15 bp, Homo sapiens
aaggaaagagaagaa

SEQ ID NO: 129382 - DNA, 15 bp, Homo sapiens
aaaggaaagagaaga

SEQ ID NO: 129383 - DNA, 15 bp, Homo sapiens
gaaaggaaagagaag

SEQ ID NO: 129384 - DNA, 15 bp, Homo sapiens
ggaaaggaaagagaa

SEQ ID NO: 129385 - DNA, 15 bp, Homo sapiens
aggaaaggaaagaga

SEQ ID NO: 129386 - DNA, 15 bp, Homo sapiens
aaggaaaggaaagag

SEQ ID NO: 129387 - DNA, 15 bp, Homo sapiens
gaaggaaaggaaaga

SEQ ID NO: 129388 - DNA, 15 bp, Homo sapiens
ggaaggaaaggaaag

SEQ ID NO: 129389 - DNA, 15 bp, Homo sapiens
aggaaggaaaggaaa

SEQ ID NO: 129390 - DNA, 15 bp, Homo sapiens
aaggaaggaaaggaa

SEQ ID NO: 129391 - DNA, 15 bp, Homo sapiens
aaaggaaggaaagga

SEQ ID NO: 129392 - DNA, 15 bp, Homo sapiens
gaaaggaaggaaagg

SEQ ID NO: 129393 - DNA, 15 bp, Homo sapiens
ggaaaggaaggaaag

SEQ ID NO: 129394 - DNA, 15 bp, Homo sapiens
aggaaaggaaggaaa

SEQ ID NO: 129395 - DNA, 15 bp, Homo sapiens
aaggaaaggaaggaa

SEQ ID NO: 129396 - DNA, 15 bp, Homo sapiens
taaggaaaggaagga

SEQ ID NO: 129397 - DNA, 15 bp, Homo sapiens
gtaaggaaaggaagg

SEQ ID NO: 129398 - DNA, 15 bp, Homo sapiens
agtaaggaaaggaag

SEQ ID NO: 129399 - DNA, 15 bp, Homo sapiens
cagtaaggaaaggaa

SEQ ID NO: 129400 - DNA, 15 bp, Homo sapiens
acagtaaggaaagga

SEQ ID NO: 129401 - DNA, 15 bp, Homo sapiens
aacagtaaggaaagg

SEQ ID NO: 129402 - DNA, 15 bp, Homo sapiens
gaacagtaaggaaag

SEQ ID NO: 129403 - DNA, 15 bp, Homo sapiens
agaacagtaaggaaa

SEQ ID NO: 129404 - DNA, 15 bp, Homo sapiens
tagaacagtaaggaa

SEQ ID NO: 129405 - DNA, 15 bp, Homo sapiens
ttagaacagtaagga

SEQ ID NO: 129406 - DNA, 15 bp, Homo sapiens
tttagaacagtaagg

SEQ ID NO: 129407 - DNA, 15 bp, Homo sapiens
ctttagaacagtaag

SEQ ID NO: 129408 - DNA, 15 bp, Homo sapiens
gctttagaacagtaa

SEQ ID NO: 129409 - DNA, 15 bp, Homo sapiens
agctttagaacagta

SEQ ID NO: 129410 - DNA, 15 bp, Homo sapiens
aagctttagaacagt

SEQ ID NO: 129411 - DNA, 15 bp, Homo sapiens
aaagctttagaacag

SEQ ID NO: 129412 - DNA, 15 bp, Homo sapiens
aaaagctttagaaca

SEQ ID NO: 129413 - DNA, 15 bp, Homo sapiens
taaaagctttagaac

SEQ ID NO: 129414 - DNA, 15 bp, Homo sapiens
ttaaaagctttagaa

SEQ ID NO: 129415 - DNA, 15 bp, Homo sapiens
tttaaaagctttaga

SEQ ID NO: 129416 - DNA, 15 bp, Homo sapiens
atttaaaagctttag

SEQ ID NO: 129417 - DNA, 15 bp, Homo sapiens
tatttaaaagcttta

SEQ ID NO: 129418 - DNA, 15 bp, Homo sapiens
ttatttaaaagcttt

SEQ ID NO: 129419 - DNA, 15 bp, Homo sapiens
tttatttaaaagctt

SEQ ID NO: 129420 - DNA, 15 bp, Homo sapiens
gtttatttaaaagct

SEQ ID NO: 129421 - DNA, 15 bp, Homo sapiens
agtttatttaaaagc

SEQ ID NO: 129422 - DNA, 15 bp, Homo sapiens
aagtttatttaaaag

SEQ ID NO: 129423 - DNA, 15 bp, Homo sapiens
aaagtttatttaaaa

SEQ ID NO: 129424 - DNA, 15 bp, Homo sapiens
gaaagtttatttaaa

SEQ ID NO: 129425 - DNA, 15 bp, Homo sapiens
tgaaagtttatttaa

SEQ ID NO: 129426 - DNA, 15 bp, Homo sapiens
gtgaaagtttattta

SEQ ID NO: 129427 - DNA, 15 bp, Homo sapiens
agtgaaagtttattt

SEQ ID NO: 129428 - DNA, 15 bp, Homo sapiens
gagtgaaagtttatt

SEQ ID NO: 129429 - DNA, 15 bp, Homo sapiens
ggagtgaaagtttat

SEQ ID NO: 129430 - DNA, 15 bp, Homo sapiens
aggagtgaaagttta

SEQ ID NO: 129431 - DNA, 15 bp, Homo sapiens
caggagtgaaagttt

SEQ ID NO: 129432 - DNA, 15 bp, Homo sapiens
gcaggagtgaaagtt

SEQ ID NO: 129433 - DNA, 15 bp, Homo sapiens
agcaggagtgaaagt

SEQ ID NO: 129434 - DNA, 15 bp, Homo sapiens
gagcaggagtgaaag

SEQ ID NO: 129435 - DNA, 15 bp, Homo sapiens
agagcaggagtgaaa

SEQ ID NO: 129436 - DNA, 15 bp, Homo sapiens
cagagcaggagtgaa

SEQ ID NO: 129437 - DNA, 15 bp, Homo sapiens
tcagagcaggagtga

SEQ ID NO: 129438 - DNA, 15 bp, Homo sapiens
ttcagagcaggagtg

SEQ ID NO: 129439 - DNA, 15 bp, Homo sapiens
tttcagagcaggagt

SEQ ID NO: 129440 - DNA, 15 bp, Homo sapiens
ttttcagagcaggag

SEQ ID NO: 129441 - DNA, 15 bp, Homo sapiens
tttttcagagcagga

SEQ ID NO: 129442 - DNA, 15 bp, Homo sapiens
ttttttcagagcagg

SEQ ID NO: 129443 - DNA, 15 bp, Homo sapiens
tttttttcagagcag

SEQ ID NO: 129444 - DNA, 15 bp, Homo sapiens
ttttttttcagagca

SEQ ID NO: 129445 - DNA, 15 bp, Homo sapiens
tttttttttcagagc

SEQ ID NO: 129446 - DNA, 15 bp, Homo sapiens
ttttttttttcagag

SEQ ID NO: 129447 - DNA, 15 bp, Homo sapiens
tttttttttttcaga

SEQ ID NO: 129448 - DNA, 15 bp, Homo sapiens
atttttttttttcag

SEQ ID NO: 129449 - DNA, 15 bp, Homo sapiens
catttttttttttca

SEQ ID NO: 129450 - DNA, 15 bp, Homo sapiens
acatttttttttttc

SEQ ID NO: 129451 - DNA, 15 bp, Homo sapiens
aacattttttttttt

SEQ ID NO: 129452 - DNA, 15 bp, Homo sapiens
aaacatttttttttt

SEQ ID NO: 129453 - DNA, 15 bp, Homo sapiens
taaacattttttttt

SEQ ID NO: 129454 - DNA, 15 bp, Homo sapiens
ataaacatttttttt

SEQ ID NO: 129455 - DNA, 15 bp, Homo sapiens
gataaacattttttt

SEQ ID NO: 129456 - DNA, 15 bp, Homo sapiens
agataaacatttttt

SEQ ID NO: 129457 - DNA, 15 bp, Homo sapiens
aagataaacattttt

SEQ ID NO: 129458 - DNA, 15 bp, Homo sapiens
aaagataaacatttt

SEQ ID NO: 129459 - DNA, 15 bp, Homo sapiens
caaagataaacattt

SEQ ID NO: 129460 - DNA, 15 bp, Homo sapiens
gcaaagataaacatt

SEQ ID NO: 129461 - DNA, 15 bp, Homo sapiens
tgcaaagataaacat

SEQ ID NO: 129462 - DNA, 15 bp, Homo sapiens
ttgcaaagataaaca

SEQ ID NO: 129463 - DNA, 15 bp, Homo sapiens
tttgcaaagataaac

SEQ ID NO: 129464 - DNA, 15 bp, Homo sapiens
ttttgcaaagataaa

SEQ ID NO: 129465 - DNA, 15 bp, Homo sapiens
tttttgcaaagataa

SEQ ID NO: 129466 - DNA, 15 bp, Homo sapiens
atttttgcaaagata

SEQ ID NO: 129467 - DNA, 15 bp, Homo sapiens
tatttttgcaaagat

SEQ ID NO: 129468 - DNA, 15 bp, Homo sapiens
atatttttgcaaaga

SEQ ID NO: 129469 - DNA, 15 bp, Homo sapiens
tatatttttgcaaag

SEQ ID NO: 129470 - DNA, 15 bp, Homo sapiens
ctatatttttgcaaa

SEQ ID NO: 129471 - DNA, 15 bp, Homo sapiens
gctatatttttgcaa

SEQ ID NO: 129472 - DNA, 15 bp, Homo sapiens
tgctatatttttgca

SEQ ID NO: 129473 - DNA, 15 bp, Homo sapiens
ttgctatatttttgc

SEQ ID NO: 129474 - DNA, 15 bp, Homo sapiens
tttgctatatttttg

SEQ ID NO: 129475 - DNA, 15 bp, Homo sapiens
ttttgctatattttt

SEQ ID NO: 129476 - DNA, 15 bp, Homo sapiens
cttttgctatatttt

SEQ ID NO: 129477 - DNA, 15 bp, Homo sapiens
gcttttgctatattt

SEQ ID NO: 129478 - DNA, 15 bp, Homo sapiens
tgcttttgctatatt

SEQ ID NO: 129479 - DNA, 15 bp, Homo sapiens
ctgcttttgctatat

SEQ ID NO: 129480 - DNA, 15 bp, Homo sapiens
tctgcttttgctata

SEQ ID NO: 129481 - DNA, 15 bp, Homo sapiens
ttctgcttttgctat

SEQ ID NO: 129482 - DNA, 15 bp, Homo sapiens
attctgcttttgcta

SEQ ID NO: 129483 - DNA, 15 bp, Homo sapiens
aattctgcttttgct

SEQ ID NO: 129484 - DNA, 15 bp, Homo sapiens
aaattctgcttttgc

SEQ ID NO: 129485 - DNA, 15 bp, Homo sapiens
gaaattctgcttttg

SEQ ID NO: 129486 - DNA, 15 bp, Homo sapiens
ggaaattctgctttt

SEQ ID NO: 129487 - DNA, 15 bp, Homo sapiens
aggaaattctgcttt

SEQ ID NO: 129488 - DNA, 15 bp, Homo sapiens
caggaaattctgctt

SEQ ID NO: 129489 - DNA, 15 bp, Homo sapiens
ccaggaaattctgct

SEQ ID NO: 129490 - DNA, 15 bp, Homo sapiens
accaggaaattctgc

SEQ ID NO: 129491 - DNA, 15 bp, Homo sapiens
aaccaggaaattctg

SEQ ID NO: 129492 - DNA, 15 bp, Homo sapiens
aaaccaggaaattct

SEQ ID NO: 129493 - DNA, 15 bp, Homo sapiens
gaaaccaggaaattc

SEQ ID NO: 129494 - DNA, 15 bp, Homo sapiens
tgaaaccaggaaatt

SEQ ID NO: 129495 - DNA, 15 bp, Homo sapiens
gtgaaaccaggaaat

SEQ ID NO: 129496 - DNA, 15 bp, Homo sapiens
tgtgaaaccaggaaa

SEQ ID NO: 129497 - DNA, 15 bp, Homo sapiens
ctgtgaaaccaggaa

SEQ ID NO: 129498 - DNA, 15 bp, Homo sapiens
tctgtgaaaccagga

SEQ ID NO: 129499 - DNA, 15 bp, Homo sapiens
ttctgtgaaaccagg

SEQ ID NO: 129500 - DNA, 15 bp, Homo sapiens
tttctgtgaaaccag

SEQ ID NO: 129501 - DNA, 15 bp, Homo sapiens
ctttctgtgaaacca

SEQ ID NO: 129502 - DNA, 15 bp, Homo sapiens
tctttctgtgaaacc

SEQ ID NO: 129503 - DNA, 15 bp, Homo sapiens
ctctttctgtgaaac

SEQ ID NO: 129504 - DNA, 15 bp, Homo sapiens
gctctttctgtgaaa

SEQ ID NO: 129505 - DNA, 15 bp, Homo sapiens
ggctctttctgtgaa

SEQ ID NO: 129506 - DNA, 15 bp, Homo sapiens
aggctctttctgtga

SEQ ID NO: 129507 - DNA, 15 bp, Homo sapiens
aaggctctttctgtg

SEQ ID NO: 129508 - DNA, 15 bp, Homo sapiens
taaggctctttctgt

SEQ ID NO: 129509 - DNA, 15 bp, Homo sapiens
gtaaggctctttctg

SEQ ID NO: 129510 - DNA, 15 bp, Homo sapiens
ggtaaggctctttct

SEQ ID NO: 129511 - DNA, 15 bp, Homo sapiens
aggtaaggctctttc

SEQ ID NO: 129512 - DNA, 15 bp, Homo sapiens
aaggtaaggctcttt

SEQ ID NO: 129513 - DNA, 15 bp, Homo sapiens
aaaggtaaggctctt

SEQ ID NO: 129514 - DNA, 15 bp, Homo sapiens
gaaaggtaaggctct

SEQ ID NO: 129515 - DNA, 15 bp, Homo sapiens
tgaaaggtaaggctc

SEQ ID NO: 129516 - DNA, 15 bp, Homo sapiens
atgaaaggtaaggct

SEQ ID NO: 129517 - DNA, 15 bp, Homo sapiens
tatgaaaggtaaggc

SEQ ID NO: 129518 - DNA, 15 bp, Homo sapiens
ttatgaaaggtaagg

SEQ ID NO: 129519 - DNA, 15 bp, Homo sapiens
tttatgaaaggtaag

SEQ ID NO: 129520 - DNA, 15 bp, Homo sapiens
ttttatgaaaggtaa

SEQ ID NO: 129521 - DNA, 15 bp, Homo sapiens
cttttatgaaaggta

SEQ ID NO: 129522 - DNA, 15 bp, Homo sapiens
gcttttatgaaaggt

SEQ ID NO: 129523 - DNA, 15 bp, Homo sapiens
tgcttttatgaaagg

SEQ ID NO: 129524 - DNA, 15 bp, Homo sapiens
atgcttttatgaaag

SEQ ID NO: 129525 - DNA, 15 bp, Homo sapiens
gatgcttttatgaaa

SEQ ID NO: 129526 - DNA, 15 bp, Homo sapiens
tgatgcttttatgaa

SEQ ID NO: 129527 - DNA, 15 bp, Homo sapiens
atgatgcttttatga

SEQ ID NO: 129528 - DNA, 15 bp, Homo sapiens
catgatgcttttatg

SEQ ID NO: 129529 - DNA, 15 bp, Homo sapiens
ccatgatgcttttat

SEQ ID NO: 129530 - DNA, 15 bp, Homo sapiens
accatgatgctttta

SEQ ID NO: 129531 - DNA, 15 bp, Homo sapiens
aaccatgatgctttt

SEQ ID NO: 129532 - DNA, 15 bp, Homo sapiens
aaaccatgatgcttt

SEQ ID NO: 129533 - DNA, 15 bp, Homo sapiens
taaaccatgatgctt

SEQ ID NO: 129534 - DNA, 15 bp, Homo sapiens
ataaaccatgatgct

SEQ ID NO: 129535 - DNA, 15 bp, Homo sapiens
tataaaccatgatgc

SEQ ID NO: 129536 - DNA, 15 bp, Homo sapiens
ttataaaccatgatg

SEQ ID NO: 129537 - DNA, 15 bp, Homo sapiens
attataaaccatgat

SEQ ID NO: 129538 - DNA, 15 bp, Homo sapiens
aattataaaccatga

SEQ ID NO: 129539 - DNA, 15 bp, Homo sapiens
aaattataaaccatg

SEQ ID NO: 129540 - DNA, 15 bp, Homo sapiens
aaaattataaaccat

SEQ ID NO: 129541 - DNA, 15 bp, Homo sapiens
aaaaattataaacca

SEQ ID NO: 129542 - DNA, 15 bp, Homo sapiens
aaaaaattataaacc

SEQ ID NO: 129543 - DNA, 15 bp, Homo sapiens
taaaaaattataaac

SEQ ID NO: 129544 - DNA, 15 bp, Homo sapiens
ttaaaaaattataaa

SEQ ID NO: 129545 - DNA, 15 bp, Homo sapiens
tttaaaaaattataa

SEQ ID NO: 129546 - DNA, 15 bp, Homo sapiens
gtttaaaaaattata

SEQ ID NO: 129547 - DNA, 15 bp, Homo sapiens
ggtttaaaaaattat

SEQ ID NO: 129548 - DNA, 15 bp, Homo sapiens
tggtttaaaaaatta

SEQ ID NO: 129549 - DNA, 15 bp, Homo sapiens
atggtttaaaaaatt

SEQ ID NO: 129550 - DNA, 15 bp, Homo sapiens
gatggtttaaaaaat

SEQ ID NO: 129551 - DNA, 15 bp, Homo sapiens
tgatggtttaaaaaa

SEQ ID NO: 129552 - DNA, 15 bp, Homo sapiens
ttgatggtttaaaaa

SEQ ID NO: 129553 - DNA, 15 bp, Homo sapiens
tttgatggtttaaaa

SEQ ID NO: 129554 - DNA, 15 bp, Homo sapiens
atttgatggtttaaa

SEQ ID NO: 129555 - DNA, 15 bp, Homo sapiens
catttgatggtttaa

SEQ ID NO: 129556 - DNA, 15 bp, Homo sapiens
tcatttgatggttta

SEQ ID NO: 129557 - DNA, 15 bp, Homo sapiens
atcatttgatggttt

SEQ ID NO: 129558 - DNA, 15 bp, Homo sapiens
gatcatttgatggtt

SEQ ID NO: 129559 - DNA, 15 bp, Homo sapiens
tgatcatttgatggt

SEQ ID NO: 129560 - DNA, 15 bp, Homo sapiens
atgatcatttgatgg

SEQ ID NO: 129561 - DNA, 15 bp, Homo sapiens
gatgatcatttgatg

SEQ ID NO: 129562 - DNA, 15 bp, Homo sapiens
agatgatcatttgat

SEQ ID NO: 129563 - DNA, 15 bp, Homo sapiens
aagatgatcatttga

SEQ ID NO: 129564 - DNA, 15 bp, Homo sapiens
aaagatgatcatttg

SEQ ID NO: 129565 - DNA, 15 bp, Homo sapiens
caaagatgatcattt

SEQ ID NO: 129566 - DNA, 15 bp, Homo sapiens
ccaaagatgatcatt

SEQ ID NO: 129567 - DNA, 15 bp, Homo sapiens
cccaaagatgatcat

SEQ ID NO: 129568 - DNA, 15 bp, Homo sapiens
tcccaaagatgatca

SEQ ID NO: 129569 - DNA, 15 bp, Homo sapiens
ttcccaaagatgatc

SEQ ID NO: 129570 - DNA, 15 bp, Homo sapiens
cttcccaaagatgat

SEQ ID NO: 129571 - DNA, 15 bp, Homo sapiens
gcttcccaaagatga

SEQ ID NO: 129572 - DNA, 15 bp, Homo sapiens
tgcttcccaaagatg

SEQ ID NO: 129573 - DNA, 15 bp, Homo sapiens
ctgcttcccaaagat

SEQ ID NO: 129574 - DNA, 15 bp, Homo sapiens
cctgcttcccaaaga

SEQ ID NO: 129575 - DNA, 15 bp, Homo sapiens
ccctgcttcccaaag

SEQ ID NO: 129576 - DNA, 15 bp, Homo sapiens
accctgcttcccaaa

SEQ ID NO: 129577 - DNA, 15 bp, Homo sapiens
caccctgcttcccaa

SEQ ID NO: 129578 - DNA, 15 bp, Homo sapiens
gcaccctgcttccca

SEQ ID NO: 129579 - DNA, 15 bp, Homo sapiens
agcaccctgcttccc

SEQ ID NO: 129580 - DNA, 15 bp, Homo sapiens
aagcaccctgcttcc

SEQ ID NO: 129581 - DNA, 15 bp, Homo sapiens
caagcaccctgcttc

SEQ ID NO: 129582 - DNA, 15 bp, Homo sapiens
ccaagcaccctgctt

SEQ ID NO: 129583 - DNA, 15 bp, Homo sapiens
gccaagcaccctgct

SEQ ID NO: 129584 - DNA, 15 bp, Homo sapiens
tgccaagcaccctgc

SEQ ID NO: 129585 - DNA, 15 bp, Homo sapiens
ttgccaagcaccctg

SEQ ID NO: 129586 - DNA, 15 bp, Homo sapiens
gttgccaagcaccct

SEQ ID NO: 129587 - DNA, 15 bp, Homo sapiens
agttgccaagcaccc

SEQ ID NO: 129588 - DNA, 15 bp, Homo sapiens
cagttgccaagcacc

SEQ ID NO: 129589 - DNA, 15 bp, Homo sapiens
acagttgccaagcac

SEQ ID NO: 129590 - DNA, 15 bp, Homo sapiens
cacagttgccaagca

SEQ ID NO: 129591 - DNA, 15 bp, Homo sapiens
ccacagttgccaagc

SEQ ID NO: 129592 - DNA, 15 bp, Homo sapiens
cccacagttgccaag

SEQ ID NO: 129593 - DNA, 15 bp, Homo sapiens
tcccacagttgccaa

SEQ ID NO: 129594 - DNA, 15 bp, Homo sapiens
atcccacagttgcca

SEQ ID NO: 129595 - DNA, 15 bp, Homo sapiens
tatcccacagttgcc

SEQ ID NO: 129596 - DNA, 15 bp, Homo sapiens
ttatcccacagttgc

SEQ ID NO: 129597 - DNA, 15 bp, Homo sapiens
gttatcccacagttg

SEQ ID NO: 129598 - DNA, 15 bp, Homo sapiens
tgttatcccacagtt

SEQ ID NO: 129599 - DNA, 15 bp, Homo sapiens
ttgttatcccacagt

SEQ ID NO: 129600 - DNA, 15 bp, Homo sapiens
cttgttatcccacag

SEQ ID NO: 129601 - DNA, 15 bp, Homo sapiens
ccttgttatcccaca

SEQ ID NO: 129602 - DNA, 15 bp, Homo sapiens
gccttgttatcccac

SEQ ID NO: 129603 - DNA, 15 bp, Homo sapiens
agccttgttatccca

SEQ ID NO: 129604 - DNA, 15 bp, Homo sapiens
cagccttgttatccc

SEQ ID NO: 129605 - DNA, 15 bp, Homo sapiens
tcagccttgttatcc

SEQ ID NO: 129606 - DNA, 15 bp, Homo sapiens
ttcagccttgttatc

SEQ ID NO: 129607 - DNA, 15 bp, Homo sapiens
cttcagccttgttat

SEQ ID NO: 129608 - DNA, 15 bp, Homo sapiens
tcttcagccttgtta

SEQ ID NO: 129609 - DNA, 15 bp, Homo sapiens
ttcttcagccttgtt

SEQ ID NO: 129610 - DNA, 15 bp, Homo sapiens
cttcttcagccttgt

SEQ ID NO: 129611 - DNA, 15 bp, Homo sapiens
ccttcttcagccttg

SEQ ID NO: 129612 - DNA, 15 bp, Homo sapiens
cccttcttcagcctt

SEQ ID NO: 129613 - DNA, 15 bp, Homo sapiens
tcccttcttcagcct

SEQ ID NO: 129614 - DNA, 15 bp, Homo sapiens
atcccttcttcagcc

SEQ ID NO: 129615 - DNA, 15 bp, Homo sapiens
catcccttcttcagc

SEQ ID NO: 129616 - DNA, 15 bp, Homo sapiens
gcatcccttcttcag

SEQ ID NO: 129617 - DNA, 15 bp, Homo sapiens
tgcatcccttcttca

SEQ ID NO: 129618 - DNA, 15 bp, Homo sapiens
gtgcatcccttcttc

SEQ ID NO: 129619 - DNA, 15 bp, Homo sapiens
ggtgcatcccttctt

SEQ ID NO: 129620 - DNA, 15 bp, Homo sapiens
aggtgcatcccttct

SEQ ID NO: 129621 - DNA, 15 bp, Homo sapiens
aaggtgcatcccttc

SEQ ID NO: 129622 - DNA, 15 bp, Homo sapiens
gaaggtgcatccctt

SEQ ID NO: 129623 - DNA, 15 bp, Homo sapiens
ggaaggtgcatccct

SEQ ID NO: 129624 - DNA, 15 bp, Homo sapiens
tggaaggtgcatccc

SEQ ID NO: 129625 - DNA, 15 bp, Homo sapiens
ctggaaggtgcatcc

SEQ ID NO: 129626 - DNA, 15 bp, Homo sapiens
cctggaaggtgcatc

SEQ ID NO: 129627 - DNA, 15 bp, Homo sapiens
ccctggaaggtgcat

SEQ ID NO: 129628 - DNA, 15 bp, Homo sapiens
tccctggaaggtgca

SEQ ID NO: 129629 - DNA, 15 bp, Homo sapiens
ctccctggaaggtgc

SEQ ID NO: 129630 - DNA, 15 bp, Homo sapiens
cctccctggaaggtg

SEQ ID NO: 129631 - DNA, 15 bp, Homo sapiens
gcctccctggaaggt

SEQ ID NO: 129632 - DNA, 15 bp, Homo sapiens
ggcctccctggaagg

SEQ ID NO: 129633 - DNA, 15 bp, Homo sapiens
tggcctccctggaag

SEQ ID NO: 129634 - DNA, 15 bp, Homo sapiens
gtggcctccctggaa

SEQ ID NO: 129635 - DNA, 15 bp, Homo sapiens
agtggcctccctgga

SEQ ID NO: 129636 - DNA, 15 bp, Homo sapiens
cagtggcctccctgg

SEQ ID NO: 129637 - DNA, 15 bp, Homo sapiens
acagtggcctccctg

SEQ ID NO: 129638 - DNA, 15 bp, Homo sapiens
cacagtggcctccct

SEQ ID NO: 129639 - DNA, 15 bp, Homo sapiens
tcacagtggcctccc

SEQ ID NO: 129640 - DNA, 15 bp, Homo sapiens
ttcacagtggcctcc

SEQ ID NO: 129641 - DNA, 15 bp, Homo sapiens
tttcacagtggcctc

SEQ ID NO: 129642 - DNA, 15 bp, Homo sapiens
gtttcacagtggcct

SEQ ID NO: 129643 - DNA, 15 bp, Homo sapiens
tgtttcacagtggcc

SEQ ID NO: 129644 - DNA, 15 bp, Homo sapiens
ttgtttcacagtggc

SEQ ID NO: 129645 - DNA, 15 bp, Homo sapiens
tttgtttcacagtgg

SEQ ID NO: 129646 - DNA, 15 bp, Homo sapiens
ctttgtttcacagtg

SEQ ID NO: 129647 - DNA, 15 bp, Homo sapiens
cctttgtttcacagt

SEQ ID NO: 129648 - DNA, 15 bp, Homo sapiens
ccctttgtttcacag

SEQ ID NO: 129649 - DNA, 15 bp, Homo sapiens
gccctttgtttcaca

SEQ ID NO: 129650 - DNA, 15 bp, Homo sapiens
agccctttgtttcac

SEQ ID NO: 129651 - DNA, 15 bp, Homo sapiens
aagccctttgtttca

SEQ ID NO: 129652 - DNA, 15 bp, Homo sapiens
aaagccctttgtttc

SEQ ID NO: 129653 - DNA, 15 bp, Homo sapiens
taaagccctttgttt

SEQ ID NO: 129654 - DNA, 15 bp, Homo sapiens
ttaaagccctttgtt

SEQ ID NO: 129655 - DNA, 15 bp, Homo sapiens
tttaaagccctttgt

SEQ ID NO: 129656 - DNA, 15 bp, Homo sapiens
ttttaaagccctttg

SEQ ID NO: 129657 - DNA, 15 bp, Homo sapiens
tttttaaagcccttt

SEQ ID NO: 129658 - DNA, 15 bp, Homo sapiens
ttttttaaagccctt

SEQ ID NO: 129659 - DNA, 15 bp, Homo sapiens
tttttttaaagccct

SEQ ID NO: 129660 - DNA, 15 bp, Homo sapiens
ttttttttaaagccc

SEQ ID NO: 129661 - DNA, 15 bp, Homo sapiens
attttttttaaagcc

SEQ ID NO: 129662 - DNA, 15 bp, Homo sapiens
aattttttttaaagc

SEQ ID NO: 129663 - DNA, 15 bp, Homo sapiens
gaattttttttaaag

SEQ ID NO: 129664 - DNA, 15 bp, Homo sapiens
ggaattttttttaaa

SEQ ID NO: 129665 - DNA, 15 bp, Homo sapiens
tggaattttttttaa

SEQ ID NO: 129666 - DNA, 15 bp, Homo sapiens
atggaatttttttta

SEQ ID NO: 129667 - DNA, 15 bp, Homo sapiens
aatggaatttttttt

SEQ ID NO: 129668 - DNA, 15 bp, Homo sapiens
aaatggaattttttt

SEQ ID NO: 129669 - DNA, 15 bp, Homo sapiens
aaaatggaatttttt

SEQ ID NO: 129670 - DNA, 15 bp, Homo sapiens
aaaaatggaattttt

SEQ ID NO: 129671 - DNA, 15 bp, Homo sapiens
taaaaatggaatttt

SEQ ID NO: 129672 - DNA, 15 bp, Homo sapiens
ataaaaatggaattt

SEQ ID NO: 129673 - DNA, 15 bp, Homo sapiens
aataaaaatggaatt

SEQ ID NO: 129674 - DNA, 15 bp, Homo sapiens
aaataaaaatggaat

SEQ ID NO: 129675 - DNA, 15 bp, Homo sapiens
aaaataaaaatggaa

SEQ ID NO: 129676 - DNA, 15 bp, Homo sapiens
aaaaataaaaatgga

SEQ ID NO: 129677 - DNA, 15 bp, Homo sapiens
caaaaataaaaatgg

SEQ ID NO: 129678 - DNA, 15 bp, Homo sapiens
tcaaaaataaaaatg

SEQ ID NO: 129679 - DNA, 15 bp, Homo sapiens
atcaaaaataaaaat

SEQ ID NO: 129680 - DNA, 15 bp, Homo sapiens
aatcaaaaataaaaa

SEQ ID NO: 129681 - DNA, 15 bp, Homo sapiens
aaatcaaaaataaaa

SEQ ID NO: 129682 - DNA, 15 bp, Homo sapiens
caaatcaaaaataaa

SEQ ID NO: 129683 - DNA, 15 bp, Homo sapiens
tcaaatcaaaaataa

SEQ ID NO: 129684 - DNA, 15 bp, Homo sapiens
ctcaaatcaaaaata

SEQ ID NO: 129685 - DNA, 15 bp, Homo sapiens
cctcaaatcaaaaat

SEQ ID NO: 129686 - DNA, 15 bp, Homo sapiens
ccctcaaatcaaaaa

SEQ ID NO: 129687 - DNA, 15 bp, Homo sapiens
accctcaaatcaaaa

SEQ ID NO: 129688 - DNA, 15 bp, Homo sapiens
taccctcaaatcaaa

SEQ ID NO: 129689 - DNA, 15 bp, Homo sapiens
gtaccctcaaatcaa

SEQ ID NO: 129690 - DNA, 15 bp, Homo sapiens
tgtaccctcaaatca

SEQ ID NO: 129691 - DNA, 15 bp, Homo sapiens
gtgtaccctcaaatc

SEQ ID NO: 129692 - DNA, 15 bp, Homo sapiens
cgtgtaccctcaaat

SEQ ID NO: 129693 - DNA, 15 bp, Homo sapiens
acgtgtaccctcaaa

SEQ ID NO: 129694 - DNA, 15 bp, Homo sapiens
tacgtgtaccctcaa

SEQ ID NO: 129695 - DNA, 15 bp, Homo sapiens
gtacgtgtaccctca

SEQ ID NO: 129696 - DNA, 15 bp, Homo sapiens
tgtacgtgtaccctc

SEQ ID NO: 129697 - DNA, 15 bp, Homo sapiens
ctgtacgtgtaccct

SEQ ID NO: 129698 - DNA, 15 bp, Homo sapiens
cctgtacgtgtaccc

SEQ ID NO: 129699 - DNA, 15 bp, Homo sapiens
acctgtacgtgtacc

SEQ ID NO: 129700 - DNA, 15 bp, Homo sapiens
aacctgtacgtgtac

SEQ ID NO: 129701 - DNA, 15 bp, Homo sapiens
aaacctgtacgtgta

SEQ ID NO: 129702 - DNA, 15 bp, Homo sapiens
caaacctgtacgtgt

SEQ ID NO: 129703 - DNA, 15 bp, Homo sapiens
acaaacctgtacgtg

SEQ ID NO: 129704 - DNA, 15 bp, Homo sapiens
aacaaacctgtacgt

SEQ ID NO: 129705 - DNA, 15 bp, Homo sapiens
taacaaacctgtacg

SEQ ID NO: 129706 - DNA, 15 bp, Homo sapiens
gtaacaaacctgtac

SEQ ID NO: 129707 - DNA, 15 bp, Homo sapiens
tgtaacaaacctgta

SEQ ID NO: 129708 - DNA, 15 bp, Homo sapiens
ttgtaacaaacctgt

SEQ ID NO: 129709 - DNA, 15 bp, Homo sapiens
cttgtaacaaacctg

SEQ ID NO: 129710 - DNA, 15 bp, Homo sapiens
ccttgtaacaaacct

SEQ ID NO: 129711 - DNA, 15 bp, Homo sapiens
cccttgtaacaaacc

SEQ ID NO: 129712 - DNA, 15 bp, Homo sapiens
acccttgtaacaaac

SEQ ID NO: 129713 - DNA, 15 bp, Homo sapiens
tacccttgtaacaaa

SEQ ID NO: 129714 - DNA, 15 bp, Homo sapiens
atacccttgtaacaa

SEQ ID NO: 129715 - DNA, 15 bp, Homo sapiens
tatacccttgtaaca

SEQ ID NO: 129716 - DNA, 15 bp, Homo sapiens
atatacccttgtaac

SEQ ID NO: 129717 - DNA, 15 bp, Homo sapiens
aatatacccttgtaa

SEQ ID NO: 129718 - DNA, 15 bp, Homo sapiens
caatatacccttgta

SEQ ID NO: 129719 - DNA, 15 bp, Homo sapiens
acaatatacccttgt

SEQ ID NO: 129720 - DNA, 15 bp, Homo sapiens
cacaatatacccttg

SEQ ID NO: 129721 - DNA, 15 bp, Homo sapiens
acacaatataccctt

SEQ ID NO: 129722 - DNA, 15 bp, Homo sapiens
cacacaatataccct

SEQ ID NO: 129723 - DNA, 15 bp, Homo sapiens
tcacacaatataccc

SEQ ID NO: 129724 - DNA, 15 bp, Homo sapiens
atcacacaatatacc

SEQ ID NO: 129725 - DNA, 15 bp, Homo sapiens
catcacacaatatac

SEQ ID NO: 129726 - DNA, 15 bp, Homo sapiens
gcatcacacaatata

SEQ ID NO: 129727 - DNA, 15 bp, Homo sapiens
agcatcacacaatat

SEQ ID NO: 129728 - DNA, 15 bp, Homo sapiens
cagcatcacacaata

SEQ ID NO: 129729 - DNA, 15 bp, Homo sapiens
tcagcatcacacaat

SEQ ID NO: 129730 - DNA, 15 bp, Homo sapiens
ctcagcatcacacaa

SEQ ID NO: 129731 - DNA, 15 bp, Homo sapiens
cctcagcatcacaca

SEQ ID NO: 129732 - DNA, 15 bp, Homo sapiens
acctcagcatcacac

SEQ ID NO: 129733 - DNA, 15 bp, Homo sapiens
aacctcagcatcaca

SEQ ID NO: 129734 - DNA, 15 bp, Homo sapiens
taacctcagcatcac

SEQ ID NO: 129735 - DNA, 15 bp, Homo sapiens
ctaacctcagcatca

SEQ ID NO: 129736 - DNA, 15 bp, Homo sapiens
actaacctcagcatc

SEQ ID NO: 129737 - DNA, 15 bp, Homo sapiens
cactaacctcagcat

SEQ ID NO: 129738 - DNA, 15 bp, Homo sapiens
gcactaacctcagca

SEQ ID NO: 129739 - DNA, 15 bp, Homo sapiens
agcactaacctcagc

SEQ ID NO: 129740 - DNA, 15 bp, Homo sapiens
aagcactaacctcag

SEQ ID NO: 129741 - DNA, 15 bp, Homo sapiens
gaagcactaacctca

SEQ ID NO: 129742 - DNA, 15 bp, Homo sapiens
agaagcactaacctc

SEQ ID NO: 129743 - DNA, 15 bp, Homo sapiens
tagaagcactaacct

SEQ ID NO: 129744 - DNA, 15 bp, Homo sapiens
atagaagcactaacc

SEQ ID NO: 129745 - DNA, 15 bp, Homo sapiens
aatagaagcactaac

SEQ ID NO: 129746 - DNA, 15 bp, Homo sapiens
gaatagaagcactaa

SEQ ID NO: 129747 - DNA, 15 bp, Homo sapiens
tgaatagaagcacta

SEQ ID NO: 129748 - DNA, 15 bp, Homo sapiens
atgaatagaagcact

SEQ ID NO: 129749 - DNA, 15 bp, Homo sapiens
gatgaatagaagcac

SEQ ID NO: 129750 - DNA, 15 bp, Homo sapiens
ggatgaatagaagca

SEQ ID NO: 129751 - DNA, 15 bp, Homo sapiens
gggatgaatagaagc

SEQ ID NO: 129752 - DNA, 15 bp, Homo sapiens
tgggatgaatagaag

SEQ ID NO: 129753 - DNA, 15 bp, Homo sapiens
gtgggatgaatagaa

SEQ ID NO: 129754 - DNA, 15 bp, Homo sapiens
ggtgggatgaataga

SEQ ID NO: 129755 - DNA, 15 bp, Homo sapiens
tggtgggatgaatag

SEQ ID NO: 129756 - DNA, 15 bp, Homo sapiens
atggtgggatgaata

SEQ ID NO: 129757 - DNA, 15 bp, Homo sapiens
gatggtgggatgaat

SEQ ID NO: 129758 - DNA, 15 bp, Homo sapiens
ggatggtgggatgaa

SEQ ID NO: 129759 - DNA, 15 bp, Homo sapiens
tggatggtgggatga

SEQ ID NO: 129760 - DNA, 15 bp, Homo sapiens
ctggatggtgggatg

SEQ ID NO: 129761 - DNA, 15 bp, Homo sapiens
tctggatggtgggat

SEQ ID NO: 129762 - DNA, 15 bp, Homo sapiens
gtctggatggtggga

SEQ ID NO: 129763 - DNA, 15 bp, Homo sapiens
tgtctggatggtggg

SEQ ID NO: 129764 - DNA, 15 bp, Homo sapiens
ctgtctggatggtgg

SEQ ID NO: 129765 - DNA, 15 bp, Homo sapiens
actgtctggatggtg

SEQ ID NO: 129766 - DNA, 15 bp, Homo sapiens
cactgtctggatggt

SEQ ID NO: 129767 - DNA, 15 bp, Homo sapiens
tcactgtctggatgg

SEQ ID NO: 129768 - DNA, 15 bp, Homo sapiens
ttcactgtctggatg

SEQ ID NO: 129769 - DNA, 15 bp, Homo sapiens
gttcactgtctggat

SEQ ID NO: 129770 - DNA, 15 bp, Homo sapiens
tgttcactgtctgga

SEQ ID NO: 129771 - DNA, 15 bp, Homo sapiens
gtgttcactgtctgg

SEQ ID NO: 129772 - DNA, 15 bp, Homo sapiens
tgtgttcactgtctg

SEQ ID NO: 129773 - DNA, 15 bp, Homo sapiens
ctgtgttcactgtct

SEQ ID NO: 129774 - DNA, 15 bp, Homo sapiens
actgtgttcactgtc

SEQ ID NO: 129775 - DNA, 15 bp, Homo sapiens
cactgtgttcactgt

SEQ ID NO: 129776 - DNA, 15 bp, Homo sapiens
gcactgtgttcactg

SEQ ID NO: 129777 - DNA, 15 bp, Homo sapiens
ggcactgtgttcact

SEQ ID NO: 129778 - DNA, 15 bp, Homo sapiens
gggcactgtgttcac

SEQ ID NO: 129779 - DNA, 15 bp, Homo sapiens
tgggcactgtgttca

SEQ ID NO: 129780 - DNA, 15 bp, Homo sapiens
ttgggcactgtgttc

SEQ ID NO: 129781 - DNA, 15 bp, Homo sapiens
attgggcactgtgtt

SEQ ID NO: 129782 - DNA, 15 bp, Homo sapiens
tattgggcactgtgt

SEQ ID NO: 129783 - DNA, 15 bp, Homo sapiens
ctattgggcactgtg

SEQ ID NO: 129784 - DNA, 15 bp, Homo sapiens
cctattgggcactgt

SEQ ID NO: 129785 - DNA, 15 bp, Homo sapiens
gcctattgggcactg

SEQ ID NO: 129786 - DNA, 15 bp, Homo sapiens
tgcctattgggcact

SEQ ID NO: 129787 - DNA, 15 bp, Homo sapiens
ctgcctattgggcac

SEQ ID NO: 129788 - DNA, 15 bp, Homo sapiens
gctgcctattgggca

SEQ ID NO: 129789 - DNA, 15 bp, Homo sapiens
agctgcctattgggc

SEQ ID NO: 129790 - DNA, 15 bp, Homo sapiens
aagctgcctattggg

SEQ ID NO: 129791 - DNA, 15 bp, Homo sapiens
aaagctgcctattgg

SEQ ID NO: 129792 - DNA, 15 bp, Homo sapiens
aaaagctgcctattg

SEQ ID NO: 129793 - DNA, 15 bp, Homo sapiens
gaaaagctgcctatt

SEQ ID NO: 129794 - DNA, 15 bp, Homo sapiens
tgaaaagctgcctat

SEQ ID NO: 129795 - DNA, 15 bp, Homo sapiens
ctgaaaagctgccta

SEQ ID NO: 129796 - DNA, 15 bp, Homo sapiens
actgaaaagctgcct

SEQ ID NO: 129797 - DNA, 15 bp, Homo sapiens
gactgaaaagctgcc

SEQ ID NO: 129798 - DNA, 15 bp, Homo sapiens
ggactgaaaagctgc

SEQ ID NO: 129799 - DNA, 15 bp, Homo sapiens
aggactgaaaagctg

SEQ ID NO: 129800 - DNA, 15 bp, Homo sapiens
aaggactgaaaagct

SEQ ID NO: 129801 - DNA, 15 bp, Homo sapiens
caaggactgaaaagc

SEQ ID NO: 129802 - DNA, 15 bp, Homo sapiens
gcaaggactgaaaag

SEQ ID NO: 129803 - DNA, 15 bp, Homo sapiens
agcaaggactgaaaa

SEQ ID NO: 129804 - DNA, 15 bp, Homo sapiens
gagcaaggactgaaa

SEQ ID NO: 129805 - DNA, 15 bp, Homo sapiens
ggagcaaggactgaa

SEQ ID NO: 129806 - DNA, 15 bp, Homo sapiens
gggagcaaggactga

SEQ ID NO: 129807 - DNA, 15 bp, Homo sapiens
ggggagcaaggactg

SEQ ID NO: 129808 - DNA, 15 bp, Homo sapiens
aggggagcaaggact

SEQ ID NO: 129809 - DNA, 15 bp, Homo sapiens
aaggggagcaaggac

SEQ ID NO: 129810 - DNA, 15 bp, Homo sapiens
gaaggggagcaagga

SEQ ID NO: 129811 - DNA, 15 bp, Homo sapiens
ggaaggggagcaagg

SEQ ID NO: 129812 - DNA, 15 bp, Homo sapiens
aggaaggggagcaag

SEQ ID NO: 129813 - DNA, 15 bp, Homo sapiens
gaggaaggggagcaa

SEQ ID NO: 129814 - DNA, 15 bp, Homo sapiens
tgaggaaggggagca

SEQ ID NO: 129815 - DNA, 15 bp, Homo sapiens
gtgaggaaggggagc

SEQ ID NO: 129816 - DNA, 15 bp, Homo sapiens
agtgaggaaggggag

SEQ ID NO: 129817 - DNA, 15 bp, Homo sapiens
gagtgaggaagggga

SEQ ID NO: 129818 - DNA, 15 bp, Homo sapiens
ggagtgaggaagggg

SEQ ID NO: 129819 - DNA, 15 bp, Homo sapiens
aggagtgaggaaggg

SEQ ID NO: 129820 - DNA, 15 bp, Homo sapiens
gaggagtgaggaagg

SEQ ID NO: 129821 - DNA, 15 bp, Homo sapiens
ggaggagtgaggaag

SEQ ID NO: 129822 - DNA, 15 bp, Homo sapiens
aggaggagtgaggaa

SEQ ID NO: 129823 - DNA, 15 bp, Homo sapiens
aaggaggagtgagga

SEQ ID NO: 129824 - DNA, 15 bp, Homo sapiens
caaggaggagtgagg

SEQ ID NO: 129825 - DNA, 15 bp, Homo sapiens
acaaggaggagtgag

SEQ ID NO: 129826 - DNA, 15 bp, Homo sapiens
cacaaggaggagtga

SEQ ID NO: 129827 - DNA, 15 bp, Homo sapiens
ccacaaggaggagtg

SEQ ID NO: 129828 - DNA, 15 bp, Homo sapiens
tccacaaggaggagt

SEQ ID NO: 129829 - DNA, 15 bp, Homo sapiens
ctccacaaggaggag

SEQ ID NO: 129830 - DNA, 15 bp, Homo sapiens
actccacaaggagga

SEQ ID NO: 129831 - DNA, 15 bp, Homo sapiens
gactccacaaggagg

SEQ ID NO: 129832 - DNA, 15 bp, Homo sapiens
ggactccacaaggag

SEQ ID NO: 129833 - DNA, 15 bp, Homo sapiens
gggactccacaagga

SEQ ID NO: 129834 - DNA, 15 bp, Homo sapiens
ggggactccacaagg

SEQ ID NO: 129835 - DNA, 15 bp, Homo sapiens
tggggactccacaag

SEQ ID NO: 129836 - DNA, 15 bp, Homo sapiens
ctggggactccacaa

SEQ ID NO: 129837 - DNA, 15 bp, Homo sapiens
actggggactccaca

SEQ ID NO: 129838 - DNA, 15 bp, Homo sapiens
cactggggactccac

SEQ ID NO: 129839 - DNA, 15 bp, Homo sapiens
acactggggactcca

SEQ ID NO: 129840 - DNA, 15 bp, Homo sapiens
cacactggggactcc

SEQ ID NO: 129841 - DNA, 15 bp, Homo sapiens
tcacactggggactc

SEQ ID NO: 129842 - DNA, 15 bp, Homo sapiens
ctcacactggggact

SEQ ID NO: 129843 - DNA, 15 bp, Homo sapiens
actcacactggggac

SEQ ID NO: 129844 - DNA, 15 bp, Homo sapiens
gactcacactgggga

SEQ ID NO: 129845 - DNA, 15 bp, Homo sapiens
agactcacactgggg

SEQ ID NO: 129846 - DNA, 15 bp, Homo sapiens
tagactcacactggg

SEQ ID NO: 129847 - DNA, 15 bp, Homo sapiens
atagactcacactgg

SEQ ID NO: 129848 - DNA, 15 bp, Homo sapiens
aatagactcacactg

SEQ ID NO: 129849 - DNA, 15 bp, Homo sapiens
caatagactcacact

SEQ ID NO: 129850 - DNA, 15 bp, Homo sapiens
acaatagactcacac

SEQ ID NO: 129851 - DNA, 15 bp, Homo sapiens
aacaatagactcaca

SEQ ID NO: 129852 - DNA, 15 bp, Homo sapiens
gaacaatagactcac

SEQ ID NO: 129853 - DNA, 15 bp, Homo sapiens
agaacaatagactca

SEQ ID NO: 129854 - DNA, 15 bp, Homo sapiens
gagaacaatagactc

SEQ ID NO: 129855 - DNA, 15 bp, Homo sapiens
tgagaacaatagact

SEQ ID NO: 129856 - DNA, 15 bp, Homo sapiens
atgagaacaatagac

SEQ ID NO: 129857 - DNA, 15 bp, Homo sapiens
gatgagaacaataga

SEQ ID NO: 129858 - DNA, 15 bp, Homo sapiens
agatgagaacaatag

SEQ ID NO: 129859 - DNA, 15 bp, Homo sapiens
aagatgagaacaata

SEQ ID NO: 129860 - DNA, 15 bp, Homo sapiens
aaagatgagaacaat

SEQ ID NO: 129861 - DNA, 15 bp, Homo sapiens
taaagatgagaacaa

SEQ ID NO: 129862 - DNA, 15 bp, Homo sapiens
gtaaagatgagaaca

SEQ ID NO: 129863 - DNA, 15 bp, Homo sapiens
cgtaaagatgagaac

SEQ ID NO: 129864 - DNA, 15 bp, Homo sapiens
acgtaaagatgagaa

SEQ ID NO: 129865 - DNA, 15 bp, Homo sapiens
gacgtaaagatgaga

SEQ ID NO: 129866 - DNA, 15 bp, Homo sapiens
agacgtaaagatgag

SEQ ID NO: 129867 - DNA, 15 bp, Homo sapiens
cagacgtaaagatga

SEQ ID NO: 129868 - DNA, 15 bp, Homo sapiens
acagacgtaaagatg

SEQ ID NO: 129869 - DNA, 15 bp, Homo sapiens
cacagacgtaaagat

SEQ ID NO: 129870 - DNA, 15 bp, Homo sapiens
acacagacgtaaaga

SEQ ID NO: 129871 - DNA, 15 bp, Homo sapiens
cacacagacgtaaag

SEQ ID NO: 129872 - DNA, 15 bp, Homo sapiens
tcacacagacgtaaa

SEQ ID NO: 129873 - DNA, 15 bp, Homo sapiens
ttcacacagacgtaa

SEQ ID NO: 129874 - DNA, 15 bp, Homo sapiens
gttcacacagacgta

SEQ ID NO: 129875 - DNA, 15 bp, Homo sapiens
ggttcacacagacgt

SEQ ID NO: 129876 - DNA, 15 bp, Homo sapiens
gggttcacacagacg

SEQ ID NO: 129877 - DNA, 15 bp, Homo sapiens
cgggttcacacagac

SEQ ID NO: 129878 - DNA, 15 bp, Homo sapiens
tcgggttcacacaga

SEQ ID NO: 129879 - DNA, 15 bp, Homo sapiens
ctcgggttcacacag

SEQ ID NO: 129880 - DNA, 15 bp, Homo sapiens
tctcgggttcacaca

SEQ ID NO: 129881 - DNA, 15 bp, Homo sapiens
ctctcgggttcacac

SEQ ID NO: 129882 - DNA, 15 bp, Homo sapiens
actctcgggttcaca

SEQ ID NO: 129883 - DNA, 15 bp, Homo sapiens
aactctcgggttcac

SEQ ID NO: 129884 - DNA, 15 bp, Homo sapiens
caactctcgggttca

SEQ ID NO: 129885 - DNA, 15 bp, Homo sapiens
tcaactctcgggttc

SEQ ID NO: 129886 - DNA, 15 bp, Homo sapiens
atcaactctcgggtt

SEQ ID NO: 129887 - DNA, 15 bp, Homo sapiens
aatcaactctcgggt

SEQ ID NO: 129888 - DNA, 15 bp, Homo sapiens
gaatcaactctcggg

SEQ ID NO: 129889 - DNA, 15 bp, Homo sapiens
ggaatcaactctcgg

SEQ ID NO: 129890 - DNA, 15 bp, Homo sapiens
gggaatcaactctcg

SEQ ID NO: 129891 - DNA, 15 bp, Homo sapiens
tgggaatcaactctc

SEQ ID NO: 129892 - DNA, 15 bp, Homo sapiens
gtgggaatcaactct

SEQ ID NO: 129893 - DNA, 15 bp, Homo sapiens
agtgggaatcaactc

SEQ ID NO: 129894 - DNA, 15 bp, Homo sapiens
aagtgggaatcaact

SEQ ID NO: 129895 - DNA, 15 bp, Homo sapiens
taagtgggaatcaac

SEQ ID NO: 129896 - DNA, 15 bp, Homo sapiens
gtaagtgggaatcaa

SEQ ID NO: 129897 - DNA, 15 bp, Homo sapiens
tgtaagtgggaatca

SEQ ID NO: 129898 - DNA, 15 bp, Homo sapiens
ttgtaagtgggaatc

SEQ ID NO: 129899 - DNA, 15 bp, Homo sapiens
cttgtaagtgggaat

SEQ ID NO: 129900 - DNA, 15 bp, Homo sapiens
acttgtaagtgggaa

SEQ ID NO: 129901 - DNA, 15 bp, Homo sapiens
cacttgtaagtggga

SEQ ID NO: 129902 - DNA, 15 bp, Homo sapiens
tcacttgtaagtggg

SEQ ID NO: 129903 - DNA, 15 bp, Homo sapiens
ctcacttgtaagtgg

SEQ ID NO: 129904 - DNA, 15 bp, Homo sapiens
tctcacttgtaagtg

SEQ ID NO: 129905 - DNA, 15 bp, Homo sapiens
ttctcacttgtaagt

SEQ ID NO: 129906 - DNA, 15 bp, Homo sapiens
gttctcacttgtaag

SEQ ID NO: 129907 - DNA, 15 bp, Homo sapiens
tgttctcacttgtaa

SEQ ID NO: 129908 - DNA, 15 bp, Homo sapiens
atgttctcacttgta

SEQ ID NO: 129909 - DNA, 15 bp, Homo sapiens
catgttctcacttgt

SEQ ID NO: 129910 - DNA, 15 bp, Homo sapiens
ccatgttctcacttg

SEQ ID NO: 129911 - DNA, 15 bp, Homo sapiens
cccatgttctcactt

SEQ ID NO: 129912 - DNA, 15 bp, Homo sapiens
tcccatgttctcact

SEQ ID NO: 129913 - DNA, 15 bp, Homo sapiens
atcccatgttctcac

SEQ ID NO: 129914 - DNA, 15 bp, Homo sapiens
tatcccatgttctca

SEQ ID NO: 129915 - DNA, 15 bp, Homo sapiens
atatcccatgttctc

SEQ ID NO: 129916 - DNA, 15 bp, Homo sapiens
aatatcccatgttct

SEQ ID NO: 129917 - DNA, 15 bp, Homo sapiens
aaatatcccatgttc

SEQ ID NO: 129918 - DNA, 15 bp, Homo sapiens
caaatatcccatgtt

SEQ ID NO: 129919 - DNA, 15 bp, Homo sapiens
ccaaatatcccatgt

SEQ ID NO: 129920 - DNA, 15 bp, Homo sapiens
accaaatatcccatg

SEQ ID NO: 129921 - DNA, 15 bp, Homo sapiens
aaccaaatatcccat

SEQ ID NO: 129922 - DNA, 15 bp, Homo sapiens
aaaccaaatatccca

SEQ ID NO: 129923 - DNA, 15 bp, Homo sapiens
aaaaccaaatatccc

SEQ ID NO: 129924 - DNA, 15 bp, Homo sapiens
gaaaaccaaatatcc

SEQ ID NO: 129925 - DNA, 15 bp, Homo sapiens
agaaaaccaaatatc

SEQ ID NO: 129926 - DNA, 15 bp, Homo sapiens
tagaaaaccaaatat

SEQ ID NO: 129927 - DNA, 15 bp, Homo sapiens
atagaaaaccaaata

SEQ ID NO: 129928 - DNA, 15 bp, Homo sapiens
aatagaaaaccaaat

SEQ ID NO: 129929 - DNA, 15 bp, Homo sapiens
aaatagaaaaccaaa

SEQ ID NO: 129930 - DNA, 15 bp, Homo sapiens
gaaatagaaaaccaa

SEQ ID NO: 129931 - DNA, 15 bp, Homo sapiens
agaaatagaaaacca

SEQ ID NO: 129932 - DNA, 15 bp, Homo sapiens
cagaaatagaaaacc

SEQ ID NO: 129933 - DNA, 15 bp, Homo sapiens
acagaaatagaaaac

SEQ ID NO: 129934 - DNA, 15 bp, Homo sapiens
cacagaaatagaaaa

SEQ ID NO: 129935 - DNA, 15 bp, Homo sapiens
acacagaaatagaaa

SEQ ID NO: 129936 - DNA, 15 bp, Homo sapiens
aacacagaaatagaa

SEQ ID NO: 129937 - DNA, 15 bp, Homo sapiens
taacacagaaataga

SEQ ID NO: 129938 - DNA, 15 bp, Homo sapiens
ttaacacagaaatag

SEQ ID NO: 129939 - DNA, 15 bp, Homo sapiens
attaacacagaaata

SEQ ID NO: 129940 - DNA, 15 bp, Homo sapiens
aattaacacagaaat

SEQ ID NO: 129941 - DNA, 15 bp, Homo sapiens
gaattaacacagaaa

SEQ ID NO: 129942 - DNA, 15 bp, Homo sapiens
tgaattaacacagaa

SEQ ID NO: 129943 - DNA, 15 bp, Homo sapiens
gtgaattaacacaga

SEQ ID NO: 129944 - DNA, 15 bp, Homo sapiens
agtgaattaacacag

SEQ ID NO: 129945 - DNA, 15 bp, Homo sapiens
aagtgaattaacaca

SEQ ID NO: 129946 - DNA, 15 bp, Homo sapiens
taagtgaattaacac

SEQ ID NO: 129947 - DNA, 15 bp, Homo sapiens
ctaagtgaattaaca

SEQ ID NO: 129948 - DNA, 15 bp, Homo sapiens
cctaagtgaattaac

SEQ ID NO: 129949 - DNA, 15 bp, Homo sapiens
tcctaagtgaattaa

SEQ ID NO: 129950 - DNA, 15 bp, Homo sapiens
atcctaagtgaatta

SEQ ID NO: 129951 - DNA, 15 bp, Homo sapiens
tatcctaagtgaatt

SEQ ID NO: 129952 - DNA, 15 bp, Homo sapiens
ttatcctaagtgaat

SEQ ID NO: 129953 - DNA, 15 bp, Homo sapiens
gttatcctaagtgaa

SEQ ID NO: 129954 - DNA, 15 bp, Homo sapiens
tgttatcctaagtga

SEQ ID NO: 129955 - DNA, 15 bp, Homo sapiens
ctgttatcctaagtg

SEQ ID NO: 129956 - DNA, 15 bp, Homo sapiens
gctgttatcctaagt

SEQ ID NO: 129957 - DNA, 15 bp, Homo sapiens
ggctgttatcctaag

SEQ ID NO: 129958 - DNA, 15 bp, Homo sapiens
aggctgttatcctaa

SEQ ID NO: 129959 - DNA, 15 bp, Homo sapiens
gaggctgttatccta

SEQ ID NO: 129960 - DNA, 15 bp, Homo sapiens
ggaggctgttatcct

SEQ ID NO: 129961 - DNA, 15 bp, Homo sapiens
tggaggctgttatcc

SEQ ID NO: 129962 - DNA, 15 bp, Homo sapiens
ctggaggctgttatc

SEQ ID NO: 129963 - DNA, 15 bp, Homo sapiens
gctggaggctgttat

SEQ ID NO: 129964 - DNA, 15 bp, Homo sapiens
agctggaggctgtta

SEQ ID NO: 129965 - DNA, 15 bp, Homo sapiens
cagctggaggctgtt

SEQ ID NO: 129966 - DNA, 15 bp, Homo sapiens
gcagctggaggctgt

SEQ ID NO: 129967 - DNA, 15 bp, Homo sapiens
tgcagctggaggctg

SEQ ID NO: 129968 - DNA, 15 bp, Homo sapiens
ttgcagctggaggct

SEQ ID NO: 129969 - DNA, 15 bp, Homo sapiens
gttgcagctggaggc

SEQ ID NO: 129970 - DNA, 15 bp, Homo sapiens
ggttgcagctggagg

SEQ ID NO: 129971 - DNA, 15 bp, Homo sapiens
tggttgcagctggag

SEQ ID NO: 129972 - DNA, 15 bp, Homo sapiens
atggttgcagctgga

SEQ ID NO: 129973 - DNA, 15 bp, Homo sapiens
catggttgcagctgg

SEQ ID NO: 129974 - DNA, 15 bp, Homo sapiens
acatggttgcagctg

SEQ ID NO: 129975 - DNA, 15 bp, Homo sapiens
aacatggttgcagct

SEQ ID NO: 129976 - DNA, 15 bp, Homo sapiens
caacatggttgcagc

SEQ ID NO: 129977 - DNA, 15 bp, Homo sapiens
gcaacatggttgcag

SEQ ID NO: 129978 - DNA, 15 bp, Homo sapiens
agcaacatggttgca

SEQ ID NO: 129979 - DNA, 15 bp, Homo sapiens
cagcaacatggttgc

SEQ ID NO: 129980 - DNA, 15 bp, Homo sapiens
gcagcaacatggttg

SEQ ID NO: 129981 - DNA, 15 bp, Homo sapiens
tgcagcaacatggtt

SEQ ID NO: 129982 - DNA, 15 bp, Homo sapiens
ttgcagcaacatggt

SEQ ID NO: 129983 - DNA, 15 bp, Homo sapiens
tttgcagcaacatgg

SEQ ID NO: 129984 - DNA, 15 bp, Homo sapiens
ctttgcagcaacatg

SEQ ID NO: 129985 - DNA, 15 bp, Homo sapiens
tctttgcagcaacat

SEQ ID NO: 129986 - DNA, 15 bp, Homo sapiens
ttctttgcagcaaca

SEQ ID NO: 129987 - DNA, 15 bp, Homo sapiens
attctttgcagcaac

SEQ ID NO: 129988 - DNA, 15 bp, Homo sapiens
cattctttgcagcaa

SEQ ID NO: 129989 - DNA, 15 bp, Homo sapiens
acattctttgcagca

SEQ ID NO: 129990 - DNA, 15 bp, Homo sapiens
cacattctttgcagc

SEQ ID NO: 129991 - DNA, 15 bp, Homo sapiens
tcacattctttgcag

SEQ ID NO: 129992 - DNA, 15 bp, Homo sapiens
atcacattctttgca

SEQ ID NO: 129993 - DNA, 15 bp, Homo sapiens
aatcacattctttgc

SEQ ID NO: 129994 - DNA, 15 bp, Homo sapiens
aaatcacattctttg

SEQ ID NO: 129995 - DNA, 15 bp, Homo sapiens
aaaatcacattcttt

SEQ ID NO: 129996 - DNA, 15 bp, Homo sapiens
aaaaatcacattctt

SEQ ID NO: 129997 - DNA, 15 bp, Homo sapiens
aaaaaatcacattct

SEQ ID NO: 129998 - DNA, 15 bp, Homo sapiens
aaaaaaatcacattc

SEQ ID NO: 129999 - DNA, 15 bp, Homo sapiens
aaaaaaaatcacatt

SEQ ID NO: 130000 - DNA, 15 bp, Homo sapiens
gaaaaaaaatcacat

SEQ ID NO: 130001 - DNA, 15 bp, Homo sapiens
ggaaaaaaaatcaca

SEQ ID NO: 130002 - DNA, 15 bp, Homo sapiens
aggaaaaaaaatcac

SEQ ID NO: 130003 - DNA, 15 bp, Homo sapiens
caggaaaaaaaatca

SEQ ID NO: 130004 - DNA, 15 bp, Homo sapiens
ccaggaaaaaaaatc

SEQ ID NO: 130005 - DNA, 15 bp, Homo sapiens
accaggaaaaaaaat

SEQ ID NO: 130006 - DNA, 15 bp, Homo sapiens
aaccaggaaaaaaaa

SEQ ID NO: 130007 - DNA, 15 bp, Homo sapiens
caaccaggaaaaaaa

SEQ ID NO: 130008 - DNA, 15 bp, Homo sapiens
gcaaccaggaaaaaa

SEQ ID NO: 130009 - DNA, 15 bp, Homo sapiens
tgcaaccaggaaaaa

SEQ ID NO: 130010 - DNA, 15 bp, Homo sapiens
atgcaaccaggaaaa

SEQ ID NO: 130011 - DNA, 15 bp, Homo sapiens
tatgcaaccaggaaa

SEQ ID NO: 130012 - DNA, 15 bp, Homo sapiens
ctatgcaaccaggaa

SEQ ID NO: 130013 - DNA, 15 bp, Homo sapiens
actatgcaaccagga

SEQ ID NO: 130014 - DNA, 15 bp, Homo sapiens
tactatgcaaccagg

SEQ ID NO: 130015 - DNA, 15 bp, Homo sapiens
atactatgcaaccag

SEQ ID NO: 130016 - DNA, 15 bp, Homo sapiens
aatactatgcaacca

SEQ ID NO: 130017 - DNA, 15 bp, Homo sapiens
gaatactatgcaacc

SEQ ID NO: 130018 - DNA, 15 bp, Homo sapiens
ggaatactatgcaac

SEQ ID NO: 130019 - DNA, 15 bp, Homo sapiens
tggaatactatgcaa

SEQ ID NO: 130020 - DNA, 15 bp, Homo sapiens
gtggaatactatgca

SEQ ID NO: 130021 - DNA, 15 bp, Homo sapiens
agtggaatactatgc

SEQ ID NO: 130022 - DNA, 15 bp, Homo sapiens
cagtggaatactatg

SEQ ID NO: 130023 - DNA, 15 bp, Homo sapiens
acagtggaatactat

SEQ ID NO: 130024 - DNA, 15 bp, Homo sapiens
cacagtggaatacta

SEQ ID NO: 130025 - DNA, 15 bp, Homo sapiens
acacagtggaatact

SEQ ID NO: 130026 - DNA, 15 bp, Homo sapiens
tacacagtggaatac

SEQ ID NO: 130027 - DNA, 15 bp, Homo sapiens
gtacacagtggaata

SEQ ID NO: 130028 - DNA, 15 bp, Homo sapiens
tgtacacagtggaat

SEQ ID NO: 130029 - DNA, 15 bp, Homo sapiens
gtgtacacagtggaa

SEQ ID NO: 130030 - DNA, 15 bp, Homo sapiens
tgtgtacacagtgga

SEQ ID NO: 130031 - DNA, 15 bp, Homo sapiens
atgtgtacacagtgg

SEQ ID NO: 130032 - DNA, 15 bp, Homo sapiens
tatgtgtacacagtg

SEQ ID NO: 130033 - DNA, 15 bp, Homo sapiens
gtatgtgtacacagt

SEQ ID NO: 130034 - DNA, 15 bp, Homo sapiens
agtatgtgtacacag

SEQ ID NO: 130035 - DNA, 15 bp, Homo sapiens
tagtatgtgtacaca

SEQ ID NO: 130036 - DNA, 15 bp, Homo sapiens
gtagtatgtgtacac

SEQ ID NO: 130037 - DNA, 15 bp, Homo sapiens
tgtagtatgtgtaca

SEQ ID NO: 130038 - DNA, 15 bp, Homo sapiens
atgtagtatgtgtac

SEQ ID NO: 130039 - DNA, 15 bp, Homo sapiens
aatgtagtatgtgta

SEQ ID NO: 130040 - DNA, 15 bp, Homo sapiens
aaatgtagtatgtgt

SEQ ID NO: 130041 - DNA, 15 bp, Homo sapiens
aaaatgtagtatgtg

SEQ ID NO: 130042 - DNA, 15 bp, Homo sapiens
gaaaatgtagtatgt

SEQ ID NO: 130043 - DNA, 15 bp, Homo sapiens
agaaaatgtagtatg

SEQ ID NO: 130044 - DNA, 15 bp, Homo sapiens
aagaaaatgtagtat

SEQ ID NO: 130045 - DNA, 15 bp, Homo sapiens
aaagaaaatgtagta

SEQ ID NO: 130046 - DNA, 15 bp, Homo sapiens
taaagaaaatgtagt

SEQ ID NO: 130047 - DNA, 15 bp, Homo sapiens
ataaagaaaatgtag

SEQ ID NO: 130048 - DNA, 15 bp, Homo sapiens
gataaagaaaatgta

SEQ ID NO: 130049 - DNA, 15 bp, Homo sapiens
ggataaagaaaatgt

SEQ ID NO: 130050 - DNA, 15 bp, Homo sapiens
tggataaagaaaatg

SEQ ID NO: 130051 - DNA, 15 bp, Homo sapiens
ctggataaagaaaat

SEQ ID NO: 130052 - DNA, 15 bp, Homo sapiens
actggataaagaaaa

SEQ ID NO: 130053 - DNA, 15 bp, Homo sapiens
cactggataaagaaa

SEQ ID NO: 130054 - DNA, 15 bp, Homo sapiens
gcactggataaagaa

SEQ ID NO: 130055 - DNA, 15 bp, Homo sapiens
tgcactggataaaga

SEQ ID NO: 130056 - DNA, 15 bp, Homo sapiens
gtgcactggataaag

SEQ ID NO: 130057 - DNA, 15 bp, Homo sapiens
ggtgcactggataaa

SEQ ID NO: 130058 - DNA, 15 bp, Homo sapiens
tggtgcactggataa

SEQ ID NO: 130059 - DNA, 15 bp, Homo sapiens
atggtgcactggata

SEQ ID NO: 130060 - DNA, 15 bp, Homo sapiens
gatggtgcactggat

SEQ ID NO: 130061 - DNA, 15 bp, Homo sapiens
cgatggtgcactgga

SEQ ID NO: 130062 - DNA, 15 bp, Homo sapiens
tcgatggtgcactgg

SEQ ID NO: 130063 - DNA, 15 bp, Homo sapiens
gtcgatggtgcactg

SEQ ID NO: 130064 - DNA, 15 bp, Homo sapiens
tgtcgatggtgcact

SEQ ID NO: 130065 - DNA, 15 bp, Homo sapiens
ctgtcgatggtgcac

SEQ ID NO: 130066 - DNA, 15 bp, Homo sapiens
tctgtcgatggtgca

SEQ ID NO: 130067 - DNA, 15 bp, Homo sapiens
gtctgtcgatggtgc

SEQ ID NO: 130068 - DNA, 15 bp, Homo sapiens
tgtctgtcgatggtg

SEQ ID NO: 130069 - DNA, 15 bp, Homo sapiens
atgtctgtcgatggt

SEQ ID NO: 130070 - DNA, 15 bp, Homo sapiens
aatgtctgtcgatgg

SEQ ID NO: 130071 - DNA, 15 bp, Homo sapiens
gaatgtctgtcgatg

SEQ ID NO: 130072 - DNA, 15 bp, Homo sapiens
tgaatgtctgtcgat

SEQ ID NO: 130073 - DNA, 15 bp, Homo sapiens
ctgaatgtctgtcga

SEQ ID NO: 130074 - DNA, 15 bp, Homo sapiens
cctgaatgtctgtcg

SEQ ID NO: 130075 - DNA, 15 bp, Homo sapiens
acctgaatgtctgtc

SEQ ID NO: 130076 - DNA, 15 bp, Homo sapiens
aacctgaatgtctgt

SEQ ID NO: 130077 - DNA, 15 bp, Homo sapiens
caacctgaatgtctg

SEQ ID NO: 130078 - DNA, 15 bp, Homo sapiens
tcaacctgaatgtct

SEQ ID NO: 130079 - DNA, 15 bp, Homo sapiens
atcaacctgaatgtc

SEQ ID NO: 130080 - DNA, 15 bp, Homo sapiens
aatcaacctgaatgt

SEQ ID NO: 130081 - DNA, 15 bp, Homo sapiens
gaatcaacctgaatg

SEQ ID NO: 130082 - DNA, 15 bp, Homo sapiens
ggaatcaacctgaat

SEQ ID NO: 130083 - DNA, 15 bp, Homo sapiens
tggaatcaacctgaa

SEQ ID NO: 130084 - DNA, 15 bp, Homo sapiens
atggaatcaacctga

SEQ ID NO: 130085 - DNA, 15 bp, Homo sapiens
catggaatcaacctg

SEQ ID NO: 130086 - DNA, 15 bp, Homo sapiens
gcatggaatcaacct

SEQ ID NO: 130087 - DNA, 15 bp, Homo sapiens
ggcatggaatcaacc

SEQ ID NO: 130088 - DNA, 15 bp, Homo sapiens
aggcatggaatcaac

SEQ ID NO: 130089 - DNA, 15 bp, Homo sapiens
aaggcatggaatcaa

SEQ ID NO: 130090 - DNA, 15 bp, Homo sapiens
aaaggcatggaatca

SEQ ID NO: 130091 - DNA, 15 bp, Homo sapiens
caaaggcatggaatc

SEQ ID NO: 130092 - DNA, 15 bp, Homo sapiens
gcaaaggcatggaat

SEQ ID NO: 130093 - DNA, 15 bp, Homo sapiens
ggcaaaggcatggaa

SEQ ID NO: 130094 - DNA, 15 bp, Homo sapiens
tggcaaaggcatgga

SEQ ID NO: 130095 - DNA, 15 bp, Homo sapiens
atggcaaaggcatgg

SEQ ID NO: 130096 - DNA, 15 bp, Homo sapiens
aatggcaaaggcatg

SEQ ID NO: 130097 - DNA, 15 bp, Homo sapiens
caatggcaaaggcat

SEQ ID NO: 130098 - DNA, 15 bp, Homo sapiens
acaatggcaaaggca

SEQ ID NO: 130099 - DNA, 15 bp, Homo sapiens
cacaatggcaaaggc

SEQ ID NO: 130100 - DNA, 15 bp, Homo sapiens
tcacaatggcaaagg

SEQ ID NO: 130101 - DNA, 15 bp, Homo sapiens
ttcacaatggcaaag

SEQ ID NO: 130102 - DNA, 15 bp, Homo sapiens
attcacaatggcaaa

SEQ ID NO: 130103 - DNA, 15 bp, Homo sapiens
tattcacaatggcaa

SEQ ID NO: 130104 - DNA, 15 bp, Homo sapiens
ctattcacaatggca

SEQ ID NO: 130105 - DNA, 15 bp, Homo sapiens
actattcacaatggc

SEQ ID NO: 130106 - DNA, 15 bp, Homo sapiens
cactattcacaatgg

SEQ ID NO: 130107 - DNA, 15 bp, Homo sapiens
gcactattcacaatg

SEQ ID NO: 130108 - DNA, 15 bp, Homo sapiens
agcactattcacaat

SEQ ID NO: 130109 - DNA, 15 bp, Homo sapiens
cagcactattcacaa

SEQ ID NO: 130110 - DNA, 15 bp, Homo sapiens
acagcactattcaca

SEQ ID NO: 130111 - DNA, 15 bp, Homo sapiens
cacagcactattcac

SEQ ID NO: 130112 - DNA, 15 bp, Homo sapiens
tcacagcactattca

SEQ ID NO: 130113 - DNA, 15 bp, Homo sapiens
atcacagcactattc

SEQ ID NO: 130114 - DNA, 15 bp, Homo sapiens
catcacagcactatt

SEQ ID NO: 130115 - DNA, 15 bp, Homo sapiens
tcatcacagcactat

SEQ ID NO: 130116 - DNA, 15 bp, Homo sapiens
ttcatcacagcacta

SEQ ID NO: 130117 - DNA, 15 bp, Homo sapiens
gttcatcacagcact

SEQ ID NO: 130118 - DNA, 15 bp, Homo sapiens
tgttcatcacagcac

SEQ ID NO: 130119 - DNA, 15 bp, Homo sapiens
atgttcatcacagca

SEQ ID NO: 130120 - DNA, 15 bp, Homo sapiens
tatgttcatcacagc

SEQ ID NO: 130121 - DNA, 15 bp, Homo sapiens
ttatgttcatcacag

SEQ ID NO: 130122 - DNA, 15 bp, Homo sapiens
tttatgttcatcaca

SEQ ID NO: 130123 - DNA, 15 bp, Homo sapiens
ttttatgttcatcac

SEQ ID NO: 130124 - DNA, 15 bp, Homo sapiens
cttttatgttcatca

SEQ ID NO: 130125 - DNA, 15 bp, Homo sapiens
acttttatgttcatc

SEQ ID NO: 130126 - DNA, 15 bp, Homo sapiens
cacttttatgttcat

SEQ ID NO: 130127 - DNA, 15 bp, Homo sapiens
gcacttttatgttca

SEQ ID NO: 130128 - DNA, 15 bp, Homo sapiens
tgcacttttatgttc

SEQ ID NO: 130129 - DNA, 15 bp, Homo sapiens
atgcacttttatgtt

SEQ ID NO: 130130 - DNA, 15 bp, Homo sapiens
catgcacttttatgt

SEQ ID NO: 130131 - DNA, 15 bp, Homo sapiens
gcatgcacttttatg

SEQ ID NO: 130132 - DNA, 15 bp, Homo sapiens
tgcatgcacttttat

SEQ ID NO: 130133 - DNA, 15 bp, Homo sapiens
atgcatgcactttta

SEQ ID NO: 130134 - DNA, 15 bp, Homo sapiens
aatgcatgcactttt

SEQ ID NO: 130135 - DNA, 15 bp, Homo sapiens
aaatgcatgcacttt

SEQ ID NO: 130136 - DNA, 15 bp, Homo sapiens
aaaatgcatgcactt

SEQ ID NO: 130137 - DNA, 15 bp, Homo sapiens
aaaaatgcatgcact

SEQ ID NO: 130138 - DNA, 15 bp, Homo sapiens
aaaaaatgcatgcac

SEQ ID NO: 130139 - DNA, 15 bp, Homo sapiens
aaaaaaatgcatgca

SEQ ID NO: 130140 - DNA, 15 bp, Homo sapiens
caaaaaaatgcatgc

SEQ ID NO: 130141 - DNA, 15 bp, Homo sapiens
ccaaaaaaatgcatg

SEQ ID NO: 130142 - DNA, 15 bp, Homo sapiens
accaaaaaaatgcat

SEQ ID NO: 130143 - DNA, 15 bp, Homo sapiens
taccaaaaaaatgca

SEQ ID NO: 130144 - DNA, 15 bp, Homo sapiens
gtaccaaaaaaatgc

SEQ ID NO: 130145 - DNA, 15 bp, Homo sapiens
tgtaccaaaaaaatg

SEQ ID NO: 130146 - DNA, 15 bp, Homo sapiens
ttgtaccaaaaaaat

SEQ ID NO: 130147 - DNA, 15 bp, Homo sapiens
attgtaccaaaaaaa

SEQ ID NO: 130148 - DNA, 15 bp, Homo sapiens
cattgtaccaaaaaa

SEQ ID NO: 130149 - DNA, 15 bp, Homo sapiens
tcattgtaccaaaaa

SEQ ID NO: 130150 - DNA, 15 bp, Homo sapiens
gtcattgtaccaaaa

SEQ ID NO: 130151 - DNA, 15 bp, Homo sapiens
agtcattgtaccaaa

SEQ ID NO: 130152 - DNA, 15 bp, Homo sapiens
aagtcattgtaccaa

SEQ ID NO: 130153 - DNA, 15 bp, Homo sapiens
taagtcattgtacca

SEQ ID NO: 130154 - DNA, 15 bp, Homo sapiens
ataagtcattgtacc

SEQ ID NO: 130155 - DNA, 15 bp, Homo sapiens
aataagtcattgtac

SEQ ID NO: 130156 - DNA, 15 bp, Homo sapiens
aaataagtcattgta

SEQ ID NO: 130157 - DNA, 15 bp, Homo sapiens
aaaataagtcattgt

SEQ ID NO: 130158 - DNA, 15 bp, Homo sapiens
gaaaataagtcattg

SEQ ID NO: 130159 - DNA, 15 bp, Homo sapiens
ggaaaataagtcatt

SEQ ID NO: 130160 - DNA, 15 bp, Homo sapiens
aggaaaataagtcat

SEQ ID NO: 130161 - DNA, 15 bp, Homo sapiens
caggaaaataagtca

SEQ ID NO: 130162 - DNA, 15 bp, Homo sapiens
tcaggaaaataagtc

SEQ ID NO: 130163 - DNA, 15 bp, Homo sapiens
ttcaggaaaataagt

SEQ ID NO: 130164 - DNA, 15 bp, Homo sapiens
tttcaggaaaataag

SEQ ID NO: 130165 - DNA, 15 bp, Homo sapiens
gtttcaggaaaataa

SEQ ID NO: 130166 - DNA, 15 bp, Homo sapiens
tgtttcaggaaaata

SEQ ID NO: 130167 - DNA, 15 bp, Homo sapiens
ttgtttcaggaaaat

SEQ ID NO: 130168 - DNA, 15 bp, Homo sapiens
tttgtttcaggaaaa

SEQ ID NO: 130169 - DNA, 15 bp, Homo sapiens
ctttgtttcaggaaa

SEQ ID NO: 130170 - DNA, 15 bp, Homo sapiens
cctttgtttcaggaa

SEQ ID NO: 130171 - DNA, 15 bp, Homo sapiens
ccctttgtttcagga

SEQ ID NO: 130172 - DNA, 15 bp, Homo sapiens
tccctttgtttcagg

SEQ ID NO: 130173 - DNA, 15 bp, Homo sapiens
gtccctttgtttcag

SEQ ID NO: 130174 - DNA, 15 bp, Homo sapiens
ggtccctttgtttca

SEQ ID NO: 130175 - DNA, 15 bp, Homo sapiens
aggtccctttgtttc

SEQ ID NO: 130176 - DNA, 15 bp, Homo sapiens
aaggtccctttgttt

SEQ ID NO: 130177 - DNA, 15 bp, Homo sapiens
caaggtccctttgtt

SEQ ID NO: 130178 - DNA, 15 bp, Homo sapiens
acaaggtccctttgt

SEQ ID NO: 130179 - DNA, 15 bp, Homo sapiens
aacaaggtccctttg

SEQ ID NO: 130180 - DNA, 15 bp, Homo sapiens
aaacaaggtcccttt

SEQ ID NO: 130181 - DNA, 15 bp, Homo sapiens
aaaacaaggtccctt

SEQ ID NO: 130182 - DNA, 15 bp, Homo sapiens
caaaacaaggtccct

SEQ ID NO: 130183 - DNA, 15 bp, Homo sapiens
ccaaaacaaggtccc

SEQ ID NO: 130184 - DNA, 15 bp, Homo sapiens
tccaaaacaaggtcc

SEQ ID NO: 130185 - DNA, 15 bp, Homo sapiens
ctccaaaacaaggtc

SEQ ID NO: 130186 - DNA, 15 bp, Homo sapiens
tctccaaaacaaggt

SEQ ID NO: 130187 - DNA, 15 bp, Homo sapiens
ttctccaaaacaagg

SEQ ID NO: 130188 - DNA, 15 bp, Homo sapiens
gttctccaaaacaag

SEQ ID NO: 130189 - DNA, 15 bp, Homo sapiens
tgttctccaaaacaa

SEQ ID NO: 130190 - DNA, 15 bp, Homo sapiens
atgttctccaaaaca

SEQ ID NO: 130191 - DNA, 15 bp, Homo sapiens
aatgttctccaaaac

SEQ ID NO: 130192 - DNA, 15 bp, Homo sapiens
taatgttctccaaaa

SEQ ID NO: 130193 - DNA, 15 bp, Homo sapiens
ataatgttctccaaa

SEQ ID NO: 130194 - DNA, 15 bp, Homo sapiens
cataatgttctccaa

SEQ ID NO: 130195 - DNA, 15 bp, Homo sapiens
tcataatgttctcca

SEQ ID NO: 130196 - DNA, 15 bp, Homo sapiens
gtcataatgttctcc

SEQ ID NO: 130197 - DNA, 15 bp, Homo sapiens
tgtcataatgttctc

SEQ ID NO: 130198 - DNA, 15 bp, Homo sapiens
ttgtcataatgttct

SEQ ID NO: 130199 - DNA, 15 bp, Homo sapiens
tttgtcataatgttc

SEQ ID NO: 130200 - DNA, 15 bp, Homo sapiens
ttttgtcataatgtt

SEQ ID NO: 130201 - DNA, 15 bp, Homo sapiens
cttttgtcataatgt

SEQ ID NO: 130202 - DNA, 15 bp, Homo sapiens
gcttttgtcataatg

SEQ ID NO: 130203 - DNA, 15 bp, Homo sapiens
tgcttttgtcataat

SEQ ID NO: 130204 - DNA, 15 bp, Homo sapiens
ctgcttttgtcataa

SEQ ID NO: 130205 - DNA, 15 bp, Homo sapiens
tctgcttttgtcata

SEQ ID NO: 130206 - DNA, 15 bp, Homo sapiens
gtctgcttttgtcat

SEQ ID NO: 130207 - DNA, 15 bp, Homo sapiens
tgtctgcttttgtca

SEQ ID NO: 130208 - DNA, 15 bp, Homo sapiens
gtgtctgcttttgtc

SEQ ID NO: 130209 - DNA, 15 bp, Homo sapiens
ggtgtctgcttttgt

SEQ ID NO: 130210 - DNA, 15 bp, Homo sapiens
tggtgtctgcttttg

SEQ ID NO: 130211 - DNA, 15 bp, Homo sapiens
ctggtgtctgctttt

SEQ ID NO: 130212 - DNA, 15 bp, Homo sapiens
cctggtgtctgcttt

SEQ ID NO: 130213 - DNA, 15 bp, Homo sapiens
tcctggtgtctgctt

SEQ ID NO: 130214 - DNA, 15 bp, Homo sapiens
ttcctggtgtctgct

SEQ ID NO: 130215 - DNA, 15 bp, Homo sapiens
tttcctggtgtctgc

SEQ ID NO: 130216 - DNA, 15 bp, Homo sapiens
ctttcctggtgtctg

SEQ ID NO: 130217 - DNA, 15 bp, Homo sapiens
gctttcctggtgtct

SEQ ID NO: 130218 - DNA, 15 bp, Homo sapiens
tgctttcctggtgtc

SEQ ID NO: 130219 - DNA, 15 bp, Homo sapiens
ttgctttcctggtgt

SEQ ID NO: 130220 - DNA, 15 bp, Homo sapiens
cttgctttcctggtg

SEQ ID NO: 130221 - DNA, 15 bp, Homo sapiens
acttgctttcctggt

SEQ ID NO: 130222 - DNA, 15 bp, Homo sapiens
gacttgctttcctgg

SEQ ID NO: 130223 - DNA, 15 bp, Homo sapiens
tgacttgctttcctg

SEQ ID NO: 130224 - DNA, 15 bp, Homo sapiens
ctgacttgctttcct

SEQ ID NO: 130225 - DNA, 15 bp, Homo sapiens
tctgacttgctttcc

SEQ ID NO: 130226 - DNA, 15 bp, Homo sapiens
ttctgacttgctttc

SEQ ID NO: 130227 - DNA, 15 bp, Homo sapiens
attctgacttgcttt

SEQ ID NO: 130228 - DNA, 15 bp, Homo sapiens
aattctgacttgctt

SEQ ID NO: 130229 - DNA, 15 bp, Homo sapiens
caattctgacttgct

SEQ ID NO: 130230 - DNA, 15 bp, Homo sapiens
ccaattctgacttgc

SEQ ID NO: 130231 - DNA, 15 bp, Homo sapiens
tccaattctgacttg

SEQ ID NO: 130232 - DNA, 15 bp, Homo sapiens
ttccaattctgactt

SEQ ID NO: 130233 - DNA, 15 bp, Homo sapiens
cttccaattctgact

SEQ ID NO: 130234 - DNA, 15 bp, Homo sapiens
acttccaattctgac

SEQ ID NO: 130235 - DNA, 15 bp, Homo sapiens
tacttccaattctga

SEQ ID NO: 130236 - DNA, 15 bp, Homo sapiens
ttacttccaattctg

SEQ ID NO: 130237 - DNA, 15 bp, Homo sapiens
tttacttccaattct

SEQ ID NO: 130238 - DNA, 15 bp, Homo sapiens
atttacttccaattc

SEQ ID NO: 130239 - DNA, 15 bp, Homo sapiens
catttacttccaatt

SEQ ID NO: 130240 - DNA, 15 bp, Homo sapiens
tcatttacttccaat

SEQ ID NO: 130241 - DNA, 15 bp, Homo sapiens
ttcatttacttccaa

SEQ ID NO: 130242 - DNA, 15 bp, Homo sapiens
tttcatttacttcca

SEQ ID NO: 130243 - DNA, 15 bp, Homo sapiens
gtttcatttacttcc

SEQ ID NO: 130244 - DNA, 15 bp, Homo sapiens
agtttcatttacttc

SEQ ID NO: 130245 - DNA, 15 bp, Homo sapiens
gagtttcatttactt

SEQ ID NO: 130246 - DNA, 15 bp, Homo sapiens
agagtttcatttact

SEQ ID NO: 130247 - DNA, 15 bp, Homo sapiens
aagagtttcatttac

SEQ ID NO: 130248 - DNA, 15 bp, Homo sapiens
taagagtttcattta

SEQ ID NO: 130249 - DNA, 15 bp, Homo sapiens
ctaagagtttcattt

SEQ ID NO: 130250 - DNA, 15 bp, Homo sapiens
tctaagagtttcatt

SEQ ID NO: 130251 - DNA, 15 bp, Homo sapiens
ctctaagagtttcat

SEQ ID NO: 130252 - DNA, 15 bp, Homo sapiens
tctctaagagtttca

SEQ ID NO: 130253 - DNA, 15 bp, Homo sapiens
atctctaagagtttc

SEQ ID NO: 130254 - DNA, 15 bp, Homo sapiens
catctctaagagttt

SEQ ID NO: 130255 - DNA, 15 bp, Homo sapiens
acatctctaagagtt

SEQ ID NO: 130256 - DNA, 15 bp, Homo sapiens
aacatctctaagagt

SEQ ID NO: 130257 - DNA, 15 bp, Homo sapiens
caacatctctaagag

SEQ ID NO: 130258 - DNA, 15 bp, Homo sapiens
acaacatctctaaga

SEQ ID NO: 130259 - DNA, 15 bp, Homo sapiens
tacaacatctctaag

SEQ ID NO: 130260 - DNA, 15 bp, Homo sapiens
gtacaacatctctaa

SEQ ID NO: 130261 - DNA, 15 bp, Homo sapiens
agtacaacatctcta

SEQ ID NO: 130262 - DNA, 15 bp, Homo sapiens
aagtacaacatctct

SEQ ID NO: 130263 - DNA, 15 bp, Homo sapiens
gaagtacaacatctc

SEQ ID NO: 130264 - DNA, 15 bp, Homo sapiens
ggaagtacaacatct

SEQ ID NO: 130265 - DNA, 15 bp, Homo sapiens
aggaagtacaacatc

SEQ ID NO: 130266 - DNA, 15 bp, Homo sapiens
caggaagtacaacat

SEQ ID NO: 130267 - DNA, 15 bp, Homo sapiens
tcaggaagtacaaca

SEQ ID NO: 130268 - DNA, 15 bp, Homo sapiens
gtcaggaagtacaac

SEQ ID NO: 130269 - DNA, 15 bp, Homo sapiens
agtcaggaagtacaa

SEQ ID NO: 130270 - DNA, 15 bp, Homo sapiens
aagtcaggaagtaca

SEQ ID NO: 130271 - DNA, 15 bp, Homo sapiens
gaagtcaggaagtac

SEQ ID NO: 130272 - DNA, 15 bp, Homo sapiens
agaagtcaggaagta

SEQ ID NO: 130273 - DNA, 15 bp, Homo sapiens
gagaagtcaggaagt

SEQ ID NO: 130274 - DNA, 15 bp, Homo sapiens
agagaagtcaggaag

SEQ ID NO: 130275 - DNA, 15 bp, Homo sapiens
gagagaagtcaggaa

SEQ ID NO: 130276 - DNA, 15 bp, Homo sapiens
ggagagaagtcagga

SEQ ID NO: 130277 - DNA, 15 bp, Homo sapiens
aggagagaagtcagg

SEQ ID NO: 130278 - DNA, 15 bp, Homo sapiens
aaggagagaagtcag

SEQ ID NO: 130279 - DNA, 15 bp, Homo sapiens
taaggagagaagtca

SEQ ID NO: 130280 - DNA, 15 bp, Homo sapiens
ataaggagagaagtc

SEQ ID NO: 130281 - DNA, 15 bp, Homo sapiens
aataaggagagaagt

SEQ ID NO: 130282 - DNA, 15 bp, Homo sapiens
gaataaggagagaag

SEQ ID NO: 130283 - DNA, 15 bp, Homo sapiens
ggaataaggagagaa

SEQ ID NO: 130284 - DNA, 15 bp, Homo sapiens
gggaataaggagaga

SEQ ID NO: 130285 - DNA, 15 bp, Homo sapiens
tgggaataaggagag

SEQ ID NO: 130286 - DNA, 15 bp, Homo sapiens
ttgggaataaggaga

SEQ ID NO: 130287 - DNA, 15 bp, Homo sapiens
cttgggaataaggag

SEQ ID NO: 130288 - DNA, 15 bp, Homo sapiens
tcttgggaataagga

SEQ ID NO: 130289 - DNA, 15 bp, Homo sapiens
ctcttgggaataagg

SEQ ID NO: 130290 - DNA, 15 bp, Homo sapiens
cctcttgggaataag

SEQ ID NO: 130291 - DNA, 15 bp, Homo sapiens
ccctcttgggaataa

SEQ ID NO: 130292 - DNA, 15 bp, Homo sapiens
accctcttgggaata

SEQ ID NO: 130293 - DNA, 15 bp, Homo sapiens
aaccctcttgggaat

SEQ ID NO: 130294 - DNA, 15 bp, Homo sapiens
aaaccctcttgggaa

SEQ ID NO: 130295 - DNA, 15 bp, Homo sapiens
caaaccctcttggga

SEQ ID NO: 130296 - DNA, 15 bp, Homo sapiens
acaaaccctcttggg

SEQ ID NO: 130297 - DNA, 15 bp, Homo sapiens
tacaaaccctcttgg

SEQ ID NO: 130298 - DNA, 15 bp, Homo sapiens
ttacaaaccctcttg

SEQ ID NO: 130299 - DNA, 15 bp, Homo sapiens
cttacaaaccctctt

SEQ ID NO: 130300 - DNA, 15 bp, Homo sapiens
acttacaaaccctct

SEQ ID NO: 130301 - DNA, 15 bp, Homo sapiens
cacttacaaaccctc

SEQ ID NO: 130302 - DNA, 15 bp, Homo sapiens
ccacttacaaaccct

SEQ ID NO: 130303 - DNA, 15 bp, Homo sapiens
cccacttacaaaccc

SEQ ID NO: 130304 - DNA, 15 bp, Homo sapiens
tcccacttacaaacc

SEQ ID NO: 130305 - DNA, 15 bp, Homo sapiens
ttcccacttacaaac

SEQ ID NO: 130306 - DNA, 15 bp, Homo sapiens
cttcccacttacaaa

SEQ ID NO: 130307 - DNA, 15 bp, Homo sapiens
ccttcccacttacaa

SEQ ID NO: 130308 - DNA, 15 bp, Homo sapiens
tccttcccacttaca

SEQ ID NO: 130309 - DNA, 15 bp, Homo sapiens
atccttcccacttac

SEQ ID NO: 130310 - DNA, 15 bp, Homo sapiens
catccttcccactta

SEQ ID NO: 130311 - DNA, 15 bp, Homo sapiens
tcatccttcccactt

SEQ ID NO: 130312 - DNA, 15 bp, Homo sapiens
atcatccttcccact

SEQ ID NO: 130313 - DNA, 15 bp, Homo sapiens
gatcatccttcccac

SEQ ID NO: 130314 - DNA, 15 bp, Homo sapiens
agatcatccttccca

SEQ ID NO: 130315 - DNA, 15 bp, Homo sapiens
gagatcatccttccc

SEQ ID NO: 130316 - DNA, 15 bp, Homo sapiens
tgagatcatccttcc

SEQ ID NO: 130317 - DNA, 15 bp, Homo sapiens
ctgagatcatccttc

SEQ ID NO: 130318 - DNA, 15 bp, Homo sapiens
gctgagatcatcctt

SEQ ID NO: 130319 - DNA, 15 bp, Homo sapiens
tgctgagatcatcct

SEQ ID NO: 130320 - DNA, 15 bp, Homo sapiens
atgctgagatcatcc

SEQ ID NO: 130321 - DNA, 15 bp, Homo sapiens
aatgctgagatcatc

SEQ ID NO: 130322 - DNA, 15 bp, Homo sapiens
caatgctgagatcat

SEQ ID NO: 130323 - DNA, 15 bp, Homo sapiens
acaatgctgagatca

SEQ ID NO: 130324 - DNA, 15 bp, Homo sapiens
aacaatgctgagatc

SEQ ID NO: 130325 - DNA, 15 bp, Homo sapiens
gaacaatgctgagat

SEQ ID NO: 130326 - DNA, 15 bp, Homo sapiens
agaacaatgctgaga

SEQ ID NO: 130327 - DNA, 15 bp, Homo sapiens
aagaacaatgctgag

SEQ ID NO: 130328 - DNA, 15 bp, Homo sapiens
taagaacaatgctga

SEQ ID NO: 130329 - DNA, 15 bp, Homo sapiens
gtaagaacaatgctg

SEQ ID NO: 130330 - DNA, 15 bp, Homo sapiens
agtaagaacaatgct

SEQ ID NO: 130331 - DNA, 15 bp, Homo sapiens
aagtaagaacaatgc

SEQ ID NO: 130332 - DNA, 15 bp, Homo sapiens
caagtaagaacaatg

SEQ ID NO: 130333 - DNA, 15 bp, Homo sapiens
gcaagtaagaacaat

SEQ ID NO: 130334 - DNA, 15 bp, Homo sapiens
tgcaagtaagaacaa

SEQ ID NO: 130335 - DNA, 15 bp, Homo sapiens
ttgcaagtaagaaca

SEQ ID NO: 130336 - DNA, 15 bp, Homo sapiens
tttgcaagtaagaac

SEQ ID NO: 130337 - DNA, 15 bp, Homo sapiens
atttgcaagtaagaa

SEQ ID NO: 130338 - DNA, 15 bp, Homo sapiens
tatttgcaagtaaga

SEQ ID NO: 130339 - DNA, 15 bp, Homo sapiens
atatttgcaagtaag

SEQ ID NO: 130340 - DNA, 15 bp, Homo sapiens
aatatttgcaagtaa

SEQ ID NO: 130341 - DNA, 15 bp, Homo sapiens
caatatttgcaagta

SEQ ID NO: 130342 - DNA, 15 bp, Homo sapiens
gcaatatttgcaagt

SEQ ID NO: 130343 - DNA, 15 bp, Homo sapiens
tgcaatatttgcaag

SEQ ID NO: 130344 - DNA, 15 bp, Homo sapiens
ttgcaatatttgcaa

SEQ ID NO: 130345 - DNA, 15 bp, Homo sapiens
tttgcaatatttgca

SEQ ID NO: 130346 - DNA, 15 bp, Homo sapiens
ttttgcaatatttgc

SEQ ID NO: 130347 - DNA, 15 bp, Homo sapiens
cttttgcaatatttg

SEQ ID NO: 130348 - DNA, 15 bp, Homo sapiens
gcttttgcaatattt

SEQ ID NO: 130349 - DNA, 15 bp, Homo sapiens
agcttttgcaatatt

SEQ ID NO: 130350 - DNA, 15 bp, Homo sapiens
tagcttttgcaatat

SEQ ID NO: 130351 - DNA, 15 bp, Homo sapiens
gtagcttttgcaata

SEQ ID NO: 130352 - DNA, 15 bp, Homo sapiens
ggtagcttttgcaat

SEQ ID NO: 130353 - DNA, 15 bp, Homo sapiens
tggtagcttttgcaa

SEQ ID NO: 130354 - DNA, 15 bp, Homo sapiens
ctggtagcttttgca

SEQ ID NO: 130355 - DNA, 15 bp, Homo sapiens
cctggtagcttttgc

SEQ ID NO: 130356 - DNA, 15 bp, Homo sapiens
tcctggtagcttttg

SEQ ID NO: 130357 - DNA, 15 bp, Homo sapiens
ttcctggtagctttt

SEQ ID NO: 130358 - DNA, 15 bp, Homo sapiens
cttcctggtagcttt

SEQ ID NO: 130359 - DNA, 15 bp, Homo sapiens
tcttcctggtagctt

SEQ ID NO: 130360 - DNA, 15 bp, Homo sapiens
ctcttcctggtagct

SEQ ID NO: 130361 - DNA, 15 bp, Homo sapiens
cctcttcctggtagc

SEQ ID NO: 130362 - DNA, 15 bp, Homo sapiens
gcctcttcctggtag

SEQ ID NO: 130363 - DNA, 15 bp, Homo sapiens
tgcctcttcctggta

SEQ ID NO: 130364 - DNA, 15 bp, Homo sapiens
ctgcctcttcctggt

SEQ ID NO: 130365 - DNA, 15 bp, Homo sapiens
cctgcctcttcctgg

SEQ ID NO: 130366 - DNA, 15 bp, Homo sapiens
tcctgcctcttcctg

SEQ ID NO: 130367 - DNA, 15 bp, Homo sapiens
ctcctgcctcttcct

SEQ ID NO: 130368 - DNA, 15 bp, Homo sapiens
actcctgcctcttcc

SEQ ID NO: 130369 - DNA, 15 bp, Homo sapiens
tactcctgcctcttc

SEQ ID NO: 130370 - DNA, 15 bp, Homo sapiens
ttactcctgcctctt

SEQ ID NO: 130371 - DNA, 15 bp, Homo sapiens
cttactcctgcctct

SEQ ID NO: 130372 - DNA, 15 bp, Homo sapiens
acttactcctgcctc

SEQ ID NO: 130373 - DNA, 15 bp, Homo sapiens
gacttactcctgcct

SEQ ID NO: 130374 - DNA, 15 bp, Homo sapiens
ggacttactcctgcc

SEQ ID NO: 130375 - DNA, 15 bp, Homo sapiens
gggacttactcctgc

SEQ ID NO: 130376 - DNA, 15 bp, Homo sapiens
agggacttactcctg

SEQ ID NO: 130377 - DNA, 15 bp, Homo sapiens
cagggacttactcct

SEQ ID NO: 130378 - DNA, 15 bp, Homo sapiens
gcagggacttactcc

SEQ ID NO: 130379 - DNA, 15 bp, Homo sapiens
agcagggacttactc

SEQ ID NO: 130380 - DNA, 15 bp, Homo sapiens
aagcagggacttact

SEQ ID NO: 130381 - DNA, 15 bp, Homo sapiens
gaagcagggacttac

SEQ ID NO: 130382 - DNA, 15 bp, Homo sapiens
tgaagcagggactta

SEQ ID NO: 130383 - DNA, 15 bp, Homo sapiens
atgaagcagggactt

SEQ ID NO: 130384 - DNA, 15 bp, Homo sapiens
gatgaagcagggact

SEQ ID NO: 130385 - DNA, 15 bp, Homo sapiens
agatgaagcagggac

SEQ ID NO: 130386 - DNA, 15 bp, Homo sapiens
cagatgaagcaggga

SEQ ID NO: 130387 - DNA, 15 bp, Homo sapiens
gcagatgaagcaggg

SEQ ID NO: 130388 - DNA, 15 bp, Homo sapiens
tgcagatgaagcagg

SEQ ID NO: 130389 - DNA, 15 bp, Homo sapiens
gtgcagatgaagcag

SEQ ID NO: 130390 - DNA, 15 bp, Homo sapiens
tgtgcagatgaagca

SEQ ID NO: 130391 - DNA, 15 bp, Homo sapiens
ctgtgcagatgaagc

SEQ ID NO: 130392 - DNA, 15 bp, Homo sapiens
actgtgcagatgaag

SEQ ID NO: 130393 - DNA, 15 bp, Homo sapiens
gactgtgcagatgaa

SEQ ID NO: 130394 - DNA, 15 bp, Homo sapiens
ggactgtgcagatga

SEQ ID NO: 130395 - DNA, 15 bp, Homo sapiens
gggactgtgcagatg

SEQ ID NO: 130396 - DNA, 15 bp, Homo sapiens
agggactgtgcagat

SEQ ID NO: 130397 - DNA, 15 bp, Homo sapiens
aagggactgtgcaga

SEQ ID NO: 130398 - DNA, 15 bp, Homo sapiens
taagggactgtgcag

SEQ ID NO: 130399 - DNA, 15 bp, Homo sapiens
ctaagggactgtgca

SEQ ID NO: 130400 - DNA, 15 bp, Homo sapiens
tctaagggactgtgc

SEQ ID NO: 130401 - DNA, 15 bp, Homo sapiens
atctaagggactgtg

SEQ ID NO: 130402 - DNA, 15 bp, Homo sapiens
aatctaagggactgt

SEQ ID NO: 130403 - DNA, 15 bp, Homo sapiens
caatctaagggactg

SEQ ID NO: 130404 - DNA, 15 bp, Homo sapiens
gcaatctaagggact

SEQ ID NO: 130405 - DNA, 15 bp, Homo sapiens
cgcaatctaagggac

SEQ ID NO: 130406 - DNA, 15 bp, Homo sapiens
ccgcaatctaaggga

SEQ ID NO: 130407 - DNA, 15 bp, Homo sapiens
accgcaatctaaggg

SEQ ID NO: 130408 - DNA, 15 bp, Homo sapiens
gaccgcaatctaagg

SEQ ID NO: 130409 - DNA, 15 bp, Homo sapiens
tgaccgcaatctaag

SEQ ID NO: 130410 - DNA, 15 bp, Homo sapiens
atgaccgcaatctaa

SEQ ID NO: 130411 - DNA, 15 bp, Homo sapiens
aatgaccgcaatcta

SEQ ID NO: 130412 - DNA, 15 bp, Homo sapiens
caatgaccgcaatct

SEQ ID NO: 130413 - DNA, 15 bp, Homo sapiens
ccaatgaccgcaatc

SEQ ID NO: 130414 - DNA, 15 bp, Homo sapiens
tccaatgaccgcaat

SEQ ID NO: 130415 - DNA, 15 bp, Homo sapiens
atccaatgaccgcaa

SEQ ID NO: 130416 - DNA, 15 bp, Homo sapiens
aatccaatgaccgca

SEQ ID NO: 130417 - DNA, 15 bp, Homo sapiens
taatccaatgaccgc

SEQ ID NO: 130418 - DNA, 15 bp, Homo sapiens
ataatccaatgaccg

SEQ ID NO: 130419 - DNA, 15 bp, Homo sapiens
aataatccaatgacc

SEQ ID NO: 130420 - DNA, 15 bp, Homo sapiens
aaataatccaatgac

SEQ ID NO: 130421 - DNA, 15 bp, Homo sapiens
aaaataatccaatga

SEQ ID NO: 130422 - DNA, 15 bp, Homo sapiens
caaaataatccaatg

SEQ ID NO: 130423 - DNA, 15 bp, Homo sapiens
ccaaaataatccaat

SEQ ID NO: 130424 - DNA, 15 bp, Homo sapiens
tccaaaataatccaa

SEQ ID NO: 130425 - DNA, 15 bp, Homo sapiens
ctccaaaataatcca

SEQ ID NO: 130426 - DNA, 15 bp, Homo sapiens
gctccaaaataatcc

SEQ ID NO: 130427 - DNA, 15 bp, Homo sapiens
tgctccaaaataatc

SEQ ID NO: 130428 - DNA, 15 bp, Homo sapiens
gtgctccaaaataat

SEQ ID NO: 130429 - DNA, 15 bp, Homo sapiens
agtgctccaaaataa

SEQ ID NO: 130430 - DNA, 15 bp, Homo sapiens
tagtgctccaaaata

SEQ ID NO: 130431 - DNA, 15 bp, Homo sapiens
ctagtgctccaaaat

SEQ ID NO: 130432 - DNA, 15 bp, Homo sapiens
cctagtgctccaaaa

SEQ ID NO: 130433 - DNA, 15 bp, Homo sapiens
tcctagtgctccaaa

SEQ ID NO: 130434 - DNA, 15 bp, Homo sapiens
ctcctagtgctccaa

SEQ ID NO: 130435 - DNA, 15 bp, Homo sapiens
actcctagtgctcca

SEQ ID NO: 130436 - DNA, 15 bp, Homo sapiens
tactcctagtgctcc

SEQ ID NO: 130437 - DNA, 15 bp, Homo sapiens
ttactcctagtgctc

SEQ ID NO: 130438 - DNA, 15 bp, Homo sapiens
cttactcctagtgct

SEQ ID NO: 130439 - DNA, 15 bp, Homo sapiens
tcttactcctagtgc

SEQ ID NO: 130440 - DNA, 15 bp, Homo sapiens
ttcttactcctagtg

SEQ ID NO: 130441 - DNA, 15 bp, Homo sapiens
cttcttactcctagt

SEQ ID NO: 130442 - DNA, 15 bp, Homo sapiens
acttcttactcctag

SEQ ID NO: 130443 - DNA, 15 bp, Homo sapiens
gacttcttactccta

SEQ ID NO: 130444 - DNA, 15 bp, Homo sapiens
tgacttcttactcct

SEQ ID NO: 130445 - DNA, 15 bp, Homo sapiens
ttgacttcttactcc

SEQ ID NO: 130446 - DNA, 15 bp, Homo sapiens
cttgacttcttactc

SEQ ID NO: 130447 - DNA, 15 bp, Homo sapiens
acttgacttcttact

SEQ ID NO: 130448 - DNA, 15 bp, Homo sapiens
gacttgacttcttac

SEQ ID NO: 130449 - DNA, 15 bp, Homo sapiens
ggacttgacttctta

SEQ ID NO: 130450 - DNA, 15 bp, Homo sapiens
aggacttgacttctt

SEQ ID NO: 130451 - DNA, 15 bp, Homo sapiens
caggacttgacttct

SEQ ID NO: 130452 - DNA, 15 bp, Homo sapiens
ccaggacttgacttc

SEQ ID NO: 130453 - DNA, 15 bp, Homo sapiens
tccaggacttgactt

SEQ ID NO: 130454 - DNA, 15 bp, Homo sapiens
gtccaggacttgact

SEQ ID NO: 130455 - DNA, 15 bp, Homo sapiens
agtccaggacttgac

SEQ ID NO: 130456 - DNA, 15 bp, Homo sapiens
cagtccaggacttga

SEQ ID NO: 130457 - DNA, 15 bp, Homo sapiens
gcagtccaggacttg

SEQ ID NO: 130458 - DNA, 15 bp, Homo sapiens
ggcagtccaggactt

SEQ ID NO: 130459 - DNA, 15 bp, Homo sapiens
gggcagtccaggact

SEQ ID NO: 130460 - DNA, 15 bp, Homo sapiens
tgggcagtccaggac

SEQ ID NO: 130461 - DNA, 15 bp, Homo sapiens
ctgggcagtccagga

SEQ ID NO: 130462 - DNA, 15 bp, Homo sapiens
cctgggcagtccagg

SEQ ID NO: 130463 - DNA, 15 bp, Homo sapiens
gcctgggcagtccag

SEQ ID NO: 130464 - DNA, 15 bp, Homo sapiens
tgcctgggcagtcca

SEQ ID NO: 130465 - DNA, 15 bp, Homo sapiens
atgcctgggcagtcc

SEQ ID NO: 130466 - DNA, 15 bp, Homo sapiens
aatgcctgggcagtc

SEQ ID NO: 130467 - DNA, 15 bp, Homo sapiens
caatgcctgggcagt

SEQ ID NO: 130468 - DNA, 15 bp, Homo sapiens
tcaatgcctgggcag

SEQ ID NO: 130469 - DNA, 15 bp, Homo sapiens
ttcaatgcctgggca

SEQ ID NO: 130470 - DNA, 15 bp, Homo sapiens
gttcaatgcctgggc

SEQ ID NO: 130471 - DNA, 15 bp, Homo sapiens
agttcaatgcctggg

SEQ ID NO: 130472 - DNA, 15 bp, Homo sapiens
tagttcaatgcctgg

SEQ ID NO: 130473 - DNA, 15 bp, Homo sapiens
ctagttcaatgcctg

SEQ ID NO: 130474 - DNA, 15 bp, Homo sapiens
tctagttcaatgcct

SEQ ID NO: 130475 - DNA, 15 bp, Homo sapiens
ctctagttcaatgcc

SEQ ID NO: 130476 - DNA, 15 bp, Homo sapiens
gctctagttcaatgc

SEQ ID NO: 130477 - DNA, 15 bp, Homo sapiens
agctctagttcaatg

SEQ ID NO: 130478 - DNA, 15 bp, Homo sapiens
aagctctagttcaat

SEQ ID NO: 130479 - DNA, 15 bp, Homo sapiens
aaagctctagttcaa

SEQ ID NO: 130480 - DNA, 15 bp, Homo sapiens
aaaagctctagttca

SEQ ID NO: 130481 - DNA, 15 bp, Homo sapiens
caaaagctctagttc

SEQ ID NO: 130482 - DNA, 15 bp, Homo sapiens
gcaaaagctctagtt

SEQ ID NO: 130483 - DNA, 15 bp, Homo sapiens
tgcaaaagctctagt

SEQ ID NO: 130484 - DNA, 15 bp, Homo sapiens
ttgcaaaagctctag

SEQ ID NO: 130485 - DNA, 15 bp, Homo sapiens
tttgcaaaagctcta

SEQ ID NO: 130486 - DNA, 15 bp, Homo sapiens
ctttgcaaaagctct

SEQ ID NO: 130487 - DNA, 15 bp, Homo sapiens
tctttgcaaaagctc

SEQ ID NO: 130488 - DNA, 15 bp, Homo sapiens
atctttgcaaaagct

SEQ ID NO: 130489 - DNA, 15 bp, Homo sapiens
aatctttgcaaaagc

SEQ ID NO: 130490 - DNA, 15 bp, Homo sapiens
taatctttgcaaaag

SEQ ID NO: 130491 - DNA, 15 bp, Homo sapiens
ttaatctttgcaaaa

SEQ ID NO: 130492 - DNA, 15 bp, Homo sapiens
tttaatctttgcaaa

SEQ ID NO: 130493 - DNA, 15 bp, Homo sapiens
atttaatctttgcaa

SEQ ID NO: 130494 - DNA, 15 bp, Homo sapiens
gatttaatctttgca

SEQ ID NO: 130495 - DNA, 15 bp, Homo sapiens
tgatttaatctttgc

SEQ ID NO: 130496 - DNA, 15 bp, Homo sapiens
ctgatttaatctttg

SEQ ID NO: 130497 - DNA, 15 bp, Homo sapiens
cctgatttaatcttt

SEQ ID NO: 130498 - DNA, 15 bp, Homo sapiens
tcctgatttaatctt

SEQ ID NO: 130499 - DNA, 15 bp, Homo sapiens
ttcctgatttaatct

SEQ ID NO: 130500 - DNA, 15 bp, Homo sapiens
attcctgatttaatc

SEQ ID NO: 130501 - DNA, 15 bp, Homo sapiens
tattcctgatttaat

SEQ ID NO: 130502 - DNA, 15 bp, Homo sapiens
gtattcctgatttaa

SEQ ID NO: 130503 - DNA, 15 bp, Homo sapiens
agtattcctgattta

SEQ ID NO: 130504 - DNA, 15 bp, Homo sapiens
gagtattcctgattt

SEQ ID NO: 130505 - DNA, 15 bp, Homo sapiens
agagtattcctgatt

SEQ ID NO: 130506 - DNA, 15 bp, Homo sapiens
tagagtattcctgat

SEQ ID NO: 130507 - DNA, 15 bp, Homo sapiens
ttagagtattcctga

SEQ ID NO: 130508 - DNA, 15 bp, Homo sapiens
cttagagtattcctg

SEQ ID NO: 130509 - DNA, 15 bp, Homo sapiens
tcttagagtattcct

SEQ ID NO: 130510 - DNA, 15 bp, Homo sapiens
ttcttagagtattcc

SEQ ID NO: 130511 - DNA, 15 bp, Homo sapiens
tttcttagagtattc

SEQ ID NO: 130512 - DNA, 15 bp, Homo sapiens
ttttcttagagtatt

SEQ ID NO: 130513 - DNA, 15 bp, Homo sapiens
cttttcttagagtat

SEQ ID NO: 130514 - DNA, 15 bp, Homo sapiens
ccttttcttagagta

SEQ ID NO: 130515 - DNA, 15 bp, Homo sapiens
tccttttcttagagt

SEQ ID NO: 130516 - DNA, 15 bp, Homo sapiens
atccttttcttagag

SEQ ID NO: 130517 - DNA, 15 bp, Homo sapiens
aatccttttcttaga

SEQ ID NO: 130518 - DNA, 15 bp, Homo sapiens
taatccttttcttag

SEQ ID NO: 130519 - DNA, 15 bp, Homo sapiens
ctaatccttttctta

SEQ ID NO: 130520 - DNA, 15 bp, Homo sapiens
tctaatccttttctt

SEQ ID NO: 130521 - DNA, 15 bp, Homo sapiens
ttctaatccttttct

SEQ ID NO: 130522 - DNA, 15 bp, Homo sapiens
tttctaatccttttc

SEQ ID NO: 130523 - DNA, 15 bp, Homo sapiens
ctttctaatcctttt

SEQ ID NO: 130524 - DNA, 15 bp, Homo sapiens
gctttctaatccttt

SEQ ID NO: 130525 - DNA, 15 bp, Homo sapiens
agctttctaatcctt

SEQ ID NO: 130526 - DNA, 15 bp, Homo sapiens
aagctttctaatcct

SEQ ID NO: 130527 - DNA, 15 bp, Homo sapiens
aaagctttctaatcc

SEQ ID NO: 130528 - DNA, 15 bp, Homo sapiens
aaaagctttctaatc

SEQ ID NO: 130529 - DNA, 15 bp, Homo sapiens
aaaaagctttctaat

SEQ ID NO: 130530 - DNA, 15 bp, Homo sapiens
caaaaagctttctaa

SEQ ID NO: 130531 - DNA, 15 bp, Homo sapiens
ccaaaaagctttcta

SEQ ID NO: 130532 - DNA, 15 bp, Homo sapiens
accaaaaagctttct

SEQ ID NO: 130533 - DNA, 15 bp, Homo sapiens
gaccaaaaagctttc

SEQ ID NO: 130534 - DNA, 15 bp, Homo sapiens
agaccaaaaagcttt

SEQ ID NO: 130535 - DNA, 15 bp, Homo sapiens
cagaccaaaaagctt

SEQ ID NO: 130536 - DNA, 15 bp, Homo sapiens
acagaccaaaaagct

SEQ ID NO: 130537 - DNA, 15 bp, Homo sapiens
gacagaccaaaaagc

SEQ ID NO: 130538 - DNA, 15 bp, Homo sapiens
tgacagaccaaaaag

SEQ ID NO: 130539 - DNA, 15 bp, Homo sapiens
ctgacagaccaaaaa

SEQ ID NO: 130540 - DNA, 15 bp, Homo sapiens
actgacagaccaaaa

SEQ ID NO: 130541 - DNA, 15 bp, Homo sapiens
gactgacagaccaaa

SEQ ID NO: 130542 - DNA, 15 bp, Homo sapiens
tgactgacagaccaa

SEQ ID NO: 130543 - DNA, 15 bp, Homo sapiens
ctgactgacagacca

SEQ ID NO: 130544 - DNA, 15 bp, Homo sapiens
cctgactgacagacc

SEQ ID NO: 130545 - DNA, 15 bp, Homo sapiens
tcctgactgacagac

SEQ ID NO: 130546 - DNA, 15 bp, Homo sapiens
ttcctgactgacaga

SEQ ID NO: 130547 - DNA, 15 bp, Homo sapiens
cttcctgactgacag

SEQ ID NO: 130548 - DNA, 15 bp, Homo sapiens
tcttcctgactgaca

SEQ ID NO: 130549 - DNA, 15 bp, Homo sapiens
gtcttcctgactgac

SEQ ID NO: 130550 - DNA, 15 bp, Homo sapiens
tgtcttcctgactga

SEQ ID NO: 130551 - DNA, 15 bp, Homo sapiens
ttgtcttcctgactg

SEQ ID NO: 130552 - DNA, 15 bp, Homo sapiens
cttgtcttcctgact

SEQ ID NO: 130553 - DNA, 15 bp, Homo sapiens
acttgtcttcctgac

SEQ ID NO: 130554 - DNA, 15 bp, Homo sapiens
aacttgtcttcctga

SEQ ID NO: 130555 - DNA, 15 bp, Homo sapiens
gaacttgtcttcctg

SEQ ID NO: 130556 - DNA, 15 bp, Homo sapiens
agaacttgtcttcct

SEQ ID NO: 130557 - DNA, 15 bp, Homo sapiens
cagaacttgtcttcc

SEQ ID NO: 130558 - DNA, 15 bp, Homo sapiens
acagaacttgtcttc

SEQ ID NO: 130559 - DNA, 15 bp, Homo sapiens
tacagaacttgtctt

SEQ ID NO: 130560 - DNA, 15 bp, Homo sapiens
ctacagaacttgtct

SEQ ID NO: 130561 - DNA, 15 bp, Homo sapiens
gctacagaacttgtc

SEQ ID NO: 130562 - DNA, 15 bp, Homo sapiens
tgctacagaacttgt

SEQ ID NO: 130563 - DNA, 15 bp, Homo sapiens
gtgctacagaacttg

SEQ ID NO: 130564 - DNA, 15 bp, Homo sapiens
agtgctacagaactt

SEQ ID NO: 130565 - DNA, 15 bp, Homo sapiens
cagtgctacagaact

SEQ ID NO: 130566 - DNA, 15 bp, Homo sapiens
tcagtgctacagaac

SEQ ID NO: 130567 - DNA, 15 bp, Homo sapiens
ctcagtgctacagaa

SEQ ID NO: 130568 - DNA, 15 bp, Homo sapiens
cctcagtgctacaga

SEQ ID NO: 130569 - DNA, 15 bp, Homo sapiens
tcctcagtgctacag

SEQ ID NO: 130570 - DNA, 15 bp, Homo sapiens
ttcctcagtgctaca

SEQ ID NO: 130571 - DNA, 15 bp, Homo sapiens
tttcctcagtgctac

SEQ ID NO: 130572 - DNA, 15 bp, Homo sapiens
ttttcctcagtgcta

SEQ ID NO: 130573 - DNA, 15 bp, Homo sapiens
attttcctcagtgct

SEQ ID NO: 130574 - DNA, 15 bp, Homo sapiens
gattttcctcagtgc

SEQ ID NO: 130575 - DNA, 15 bp, Homo sapiens
agattttcctcagtg

SEQ ID NO: 130576 - DNA, 15 bp, Homo sapiens
aagattttcctcagt

SEQ ID NO: 130577 - DNA, 15 bp, Homo sapiens
aaagattttcctcag

SEQ ID NO: 130578 - DNA, 15 bp, Homo sapiens
aaaagattttcctca

SEQ ID NO: 130579 - DNA, 15 bp, Homo sapiens
aaaaagattttcctc

SEQ ID NO: 130580 - DNA, 15 bp, Homo sapiens
gaaaaagattttcct

SEQ ID NO: 130581 - DNA, 15 bp, Homo sapiens
ggaaaaagattttcc

SEQ ID NO: 130582 - DNA, 15 bp, Homo sapiens
aggaaaaagattttc

SEQ ID NO: 130583 - DNA, 15 bp, Homo sapiens
aaggaaaaagatttt

SEQ ID NO: 130584 - DNA, 15 bp, Homo sapiens
aaaggaaaaagattt

SEQ ID NO: 130585 - DNA, 15 bp, Homo sapiens
aaaaggaaaaagatt

SEQ ID NO: 130586 - DNA, 15 bp, Homo sapiens
caaaaggaaaaagat

SEQ ID NO: 130587 - DNA, 15 bp, Homo sapiens
ccaaaaggaaaaaga

SEQ ID NO: 130588 - DNA, 15 bp, Homo sapiens
accaaaaggaaaaag

SEQ ID NO: 130589 - DNA, 15 bp, Homo sapiens
caccaaaaggaaaaa

SEQ ID NO: 130590 - DNA, 15 bp, Homo sapiens
gcaccaaaaggaaaa

SEQ ID NO: 130591 - DNA, 15 bp, Homo sapiens
ggcaccaaaaggaaa

SEQ ID NO: 130592 - DNA, 15 bp, Homo sapiens
aggcaccaaaaggaa

SEQ ID NO: 130593 - DNA, 15 bp, Homo sapiens
aaggcaccaaaagga

SEQ ID NO: 130594 - DNA, 15 bp, Homo sapiens
gaaggcaccaaaagg

SEQ ID NO: 130595 - DNA, 15 bp, Homo sapiens
agaaggcaccaaaag

SEQ ID NO: 130596 - DNA, 15 bp, Homo sapiens
aagaaggcaccaaaa

SEQ ID NO: 130597 - DNA, 15 bp, Homo sapiens
gaagaaggcaccaaa

SEQ ID NO: 130598 - DNA, 15 bp, Homo sapiens
agaagaaggcaccaa

SEQ ID NO: 130599 - DNA, 15 bp, Homo sapiens
gagaagaaggcacca

SEQ ID NO: 130600 - DNA, 15 bp, Homo sapiens
ggagaagaaggcacc

SEQ ID NO: 130601 - DNA, 15 bp, Homo sapiens
gggagaagaaggcac

SEQ ID NO: 130602 - DNA, 15 bp, Homo sapiens
tgggagaagaaggca

SEQ ID NO: 130603 - DNA, 15 bp, Homo sapiens
gtgggagaagaaggc

SEQ ID NO: 130604 - DNA, 15 bp, Homo sapiens
agtgggagaagaagg

SEQ ID NO: 130605 - DNA, 15 bp, Homo sapiens
tagtgggagaagaag

SEQ ID NO: 130606 - DNA, 15 bp, Homo sapiens
ctagtgggagaagaa

SEQ ID NO: 130607 - DNA, 15 bp, Homo sapiens
gctagtgggagaaga

SEQ ID NO: 130608 - DNA, 15 bp, Homo sapiens
tgctagtgggagaag

SEQ ID NO: 130609 - DNA, 15 bp, Homo sapiens
ttgctagtgggagaa

SEQ ID NO: 130610 - DNA, 15 bp, Homo sapiens
tttgctagtgggaga

SEQ ID NO: 130611 - DNA, 15 bp, Homo sapiens
ttttgctagtgggag

SEQ ID NO: 130612 - DNA, 15 bp, Homo sapiens
tttttgctagtggga

SEQ ID NO: 130613 - DNA, 15 bp, Homo sapiens
atttttgctagtggg

SEQ ID NO: 130614 - DNA, 15 bp, Homo sapiens
catttttgctagtgg

SEQ ID NO: 130615 - DNA, 15 bp, Homo sapiens
ccatttttgctagtg

SEQ ID NO: 130616 - DNA, 15 bp, Homo sapiens
cccatttttgctagt

SEQ ID NO: 130617 - DNA, 15 bp, Homo sapiens
acccatttttgctag

SEQ ID NO: 130618 - DNA, 15 bp, Homo sapiens
cacccatttttgcta

SEQ ID NO: 130619 - DNA, 15 bp, Homo sapiens
ccacccatttttgct

SEQ ID NO: 130620 - DNA, 15 bp, Homo sapiens
tccacccatttttgc

SEQ ID NO: 130621 - DNA, 15 bp, Homo sapiens
gtccacccatttttg

SEQ ID NO: 130622 - DNA, 15 bp, Homo sapiens
agtccacccattttt

SEQ ID NO: 130623 - DNA, 15 bp, Homo sapiens
cagtccacccatttt

SEQ ID NO: 130624 - DNA, 15 bp, Homo sapiens
tcagtccacccattt

SEQ ID NO: 130625 - DNA, 15 bp, Homo sapiens
atcagtccacccatt

SEQ ID NO: 130626 - DNA, 15 bp, Homo sapiens
aatcagtccacccat

SEQ ID NO: 130627 - DNA, 15 bp, Homo sapiens
aaatcagtccaccca

SEQ ID NO: 130628 - DNA, 15 bp, Homo sapiens
aaaatcagtccaccc

SEQ ID NO: 130629 - DNA, 15 bp, Homo sapiens
aaaaatcagtccacc

SEQ ID NO: 130630 - DNA, 15 bp, Homo sapiens
caaaaatcagtccac

SEQ ID NO: 130631 - DNA, 15 bp, Homo sapiens
gcaaaaatcagtcca

SEQ ID NO: 130632 - DNA, 15 bp, Homo sapiens
ggcaaaaatcagtcc

SEQ ID NO: 130633 - DNA, 15 bp, Homo sapiens
gggcaaaaatcagtc

SEQ ID NO: 130634 - DNA, 15 bp, Homo sapiens
agggcaaaaatcagt

SEQ ID NO: 130635 - DNA, 15 bp, Homo sapiens
cagggcaaaaatcag

SEQ ID NO: 130636 - DNA, 15 bp, Homo sapiens
gcagggcaaaaatca

SEQ ID NO: 130637 - DNA, 15 bp, Homo sapiens
ggcagggcaaaaatc

SEQ ID NO: 130638 - DNA, 15 bp, Homo sapiens
aggcagggcaaaaat

SEQ ID NO: 130639 - DNA, 15 bp, Homo sapiens
taggcagggcaaaaa

SEQ ID NO: 130640 - DNA, 15 bp, Homo sapiens
gtaggcagggcaaaa

SEQ ID NO: 130641 - DNA, 15 bp, Homo sapiens
ggtaggcagggcaaa

SEQ ID NO: 130642 - DNA, 15 bp, Homo sapiens
aggtaggcagggcaa

SEQ ID NO: 130643 - DNA, 15 bp, Homo sapiens
gaggtaggcagggca

SEQ ID NO: 130644 - DNA, 15 bp, Homo sapiens
ggaggtaggcagggc

SEQ ID NO: 130645 - DNA, 15 bp, Homo sapiens
gggaggtaggcaggg

SEQ ID NO: 130646 - DNA, 15 bp, Homo sapiens
tgggaggtaggcagg

SEQ ID NO: 130647 - DNA, 15 bp, Homo sapiens
ctgggaggtaggcag

SEQ ID NO: 130648 - DNA, 15 bp, Homo sapiens
tctgggaggtaggca

SEQ ID NO: 130649 - DNA, 15 bp, Homo sapiens
ctctgggaggtaggc

SEQ ID NO: 130650 - DNA, 15 bp, Homo sapiens
cctctgggaggtagg

SEQ ID NO: 130651 - DNA, 15 bp, Homo sapiens
gcctctgggaggtag

SEQ ID NO: 130652 - DNA, 15 bp, Homo sapiens
tgcctctgggaggta

SEQ ID NO: 130653 - DNA, 15 bp, Homo sapiens
ttgcctctgggaggt

SEQ ID NO: 130654 - DNA, 15 bp, Homo sapiens
cttgcctctgggagg

SEQ ID NO: 130655 - DNA, 15 bp, Homo sapiens
ccttgcctctgggag

SEQ ID NO: 130656 - DNA, 15 bp, Homo sapiens
gccttgcctctggga

SEQ ID NO: 130657 - DNA, 15 bp, Homo sapiens
ggccttgcctctggg

SEQ ID NO: 130658 - DNA, 15 bp, Homo sapiens
gggccttgcctctgg

SEQ ID NO: 130659 - DNA, 15 bp, Homo sapiens
tgggccttgcctctg

SEQ ID NO: 130660 - DNA, 15 bp, Homo sapiens
gtgggccttgcctct

SEQ ID NO: 130661 - DNA, 15 bp, Homo sapiens
tgtgggccttgcctc

SEQ ID NO: 130662 - DNA, 15 bp, Homo sapiens
ctgtgggccttgcct

SEQ ID NO: 130663 - DNA, 15 bp, Homo sapiens
actgtgggccttgcc

SEQ ID NO: 130664 - DNA, 15 bp, Homo sapiens
tactgtgggccttgc

SEQ ID NO: 130665 - DNA, 15 bp, Homo sapiens
ctactgtgggccttg

SEQ ID NO: 130666 - DNA, 15 bp, Homo sapiens
actactgtgggcctt

SEQ ID NO: 130667 - DNA, 15 bp, Homo sapiens
cactactgtgggcct

SEQ ID NO: 130668 - DNA, 15 bp, Homo sapiens
ccactactgtgggcc

SEQ ID NO: 130669 - DNA, 15 bp, Homo sapiens
accactactgtgggc

SEQ ID NO: 130670 - DNA, 15 bp, Homo sapiens
caccactactgtggg

SEQ ID NO: 130671 - DNA, 15 bp, Homo sapiens
acaccactactgtgg

SEQ ID NO: 130672 - DNA, 15 bp, Homo sapiens
aacaccactactgtg

SEQ ID NO: 130673 - DNA, 15 bp, Homo sapiens
gaacaccactactgt

SEQ ID NO: 130674 - DNA, 15 bp, Homo sapiens
agaacaccactactg

SEQ ID NO: 130675 - DNA, 15 bp, Homo sapiens
cagaacaccactact

SEQ ID NO: 130676 - DNA, 15 bp, Homo sapiens
gcagaacaccactac

SEQ ID NO: 130677 - DNA, 15 bp, Homo sapiens
agcagaacaccacta

SEQ ID NO: 130678 - DNA, 15 bp, Homo sapiens
cagcagaacaccact

SEQ ID NO: 130679 - DNA, 15 bp, Homo sapiens
ccagcagaacaccac

SEQ ID NO: 130680 - DNA, 15 bp, Homo sapiens
cccagcagaacacca

SEQ ID NO: 130681 - DNA, 15 bp, Homo sapiens
ccccagcagaacacc

SEQ ID NO: 130682 - DNA, 15 bp, Homo sapiens
cccccagcagaacac

SEQ ID NO: 130683 - DNA, 15 bp, Homo sapiens
ccccccagcagaaca

SEQ ID NO: 130684 - DNA, 15 bp, Homo sapiens
accccccagcagaac

SEQ ID NO: 130685 - DNA, 15 bp, Homo sapiens
caccccccagcagaa

SEQ ID NO: 130686 - DNA, 15 bp, Homo sapiens
tcaccccccagcaga

SEQ ID NO: 130687 - DNA, 15 bp, Homo sapiens
gtcaccccccagcag

SEQ ID NO: 130688 - DNA, 15 bp, Homo sapiens
tgtcaccccccagca

SEQ ID NO: 130689 - DNA, 15 bp, Homo sapiens
gtgtcaccccccagc

SEQ ID NO: 130690 - DNA, 15 bp, Homo sapiens
agtgtcaccccccag

SEQ ID NO: 130691 - DNA, 15 bp, Homo sapiens
cagtgtcacccccca

SEQ ID NO: 130692 - DNA, 15 bp, Homo sapiens
tcagtgtcacccccc

SEQ ID NO: 130693 - DNA, 15 bp, Homo sapiens
atcagtgtcaccccc

SEQ ID NO: 130694 - DNA, 15 bp, Homo sapiens
gatcagtgtcacccc

SEQ ID NO: 130695 - DNA, 15 bp, Homo sapiens
tgatcagtgtcaccc

SEQ ID NO: 130696 - DNA, 15 bp, Homo sapiens
gtgatcagtgtcacc

SEQ ID NO: 130697 - DNA, 15 bp, Homo sapiens
tgtgatcagtgtcac

SEQ ID NO: 130698 - DNA, 15 bp, Homo sapiens
ctgtgatcagtgtca

SEQ ID NO: 130699 - DNA, 15 bp, Homo sapiens
tctgtgatcagtgtc

SEQ ID NO: 130700 - DNA, 15 bp, Homo sapiens
ctctgtgatcagtgt

SEQ ID NO: 130701 - DNA, 15 bp, Homo sapiens
tctctgtgatcagtg

SEQ ID NO: 130702 - DNA, 15 bp, Homo sapiens
ctctctgtgatcagt

SEQ ID NO: 130703 - DNA, 15 bp, Homo sapiens
cctctctgtgatcag

SEQ ID NO: 130704 - DNA, 15 bp, Homo sapiens
tcctctctgtgatca

SEQ ID NO: 130705 - DNA, 15 bp, Homo sapiens
ttcctctctgtgatc

SEQ ID NO: 130706 - DNA, 15 bp, Homo sapiens
tttcctctctgtgat

SEQ ID NO: 130707 - DNA, 15 bp, Homo sapiens
ctttcctctctgtga

SEQ ID NO: 130708 - DNA, 15 bp, Homo sapiens
cctttcctctctgtg

SEQ ID NO: 130709 - DNA, 15 bp, Homo sapiens
ccctttcctctctgt

SEQ ID NO: 130710 - DNA, 15 bp, Homo sapiens
tccctttcctctctg

SEQ ID NO: 130711 - DNA, 15 bp, Homo sapiens
gtccctttcctctct

SEQ ID NO: 130712 - DNA, 15 bp, Homo sapiens
tgtccctttcctctc

SEQ ID NO: 130713 - DNA, 15 bp, Homo sapiens
gtgtccctttcctct

SEQ ID NO: 130714 - DNA, 15 bp, Homo sapiens
tgtgtccctttcctc

SEQ ID NO: 130715 - DNA, 15 bp, Homo sapiens
ctgtgtccctttcct

SEQ ID NO: 130716 - DNA, 15 bp, Homo sapiens
cctgtgtccctttcc

SEQ ID NO: 130717 - DNA, 15 bp, Homo sapiens
tcctgtgtccctttc

SEQ ID NO: 130718 - DNA, 15 bp, Homo sapiens
ttcctgtgtcccttt

SEQ ID NO: 130719 - DNA, 15 bp, Homo sapiens
attcctgtgtccctt

SEQ ID NO: 130720 - DNA, 15 bp, Homo sapiens
gattcctgtgtccct

SEQ ID NO: 130721 - DNA, 15 bp, Homo sapiens
agattcctgtgtccc

SEQ ID NO: 130722 - DNA, 15 bp, Homo sapiens
cagattcctgtgtcc

SEQ ID NO: 130723 - DNA, 15 bp, Homo sapiens
gcagattcctgtgtc

SEQ ID NO: 130724 - DNA, 15 bp, Homo sapiens
tgcagattcctgtgt

SEQ ID NO: 130725 - DNA, 15 bp, Homo sapiens
ctgcagattcctgtg

SEQ ID NO: 130726 - DNA, 15 bp, Homo sapiens
tctgcagattcctgt

SEQ ID NO: 130727 - DNA, 15 bp, Homo sapiens
ttctgcagattcctg

SEQ ID NO: 130728 - DNA, 15 bp, Homo sapiens
attctgcagattcct

SEQ ID NO: 130729 - DNA, 15 bp, Homo sapiens
gattctgcagattcc

SEQ ID NO: 130730 - DNA, 15 bp, Homo sapiens
cgattctgcagattc

SEQ ID NO: 130731 - DNA, 15 bp, Homo sapiens
acgattctgcagatt

SEQ ID NO: 130732 - DNA, 15 bp, Homo sapiens
aacgattctgcagat

SEQ ID NO: 130733 - DNA, 15 bp, Homo sapiens
taacgattctgcaga

SEQ ID NO: 130734 - DNA, 15 bp, Homo sapiens
ataacgattctgcag

SEQ ID NO: 130735 - DNA, 15 bp, Homo sapiens
aataacgattctgca

SEQ ID NO: 130736 - DNA, 15 bp, Homo sapiens
gaataacgattctgc

SEQ ID NO: 130737 - DNA, 15 bp, Homo sapiens
agaataacgattctg

SEQ ID NO: 130738 - DNA, 15 bp, Homo sapiens
cagaataacgattct

SEQ ID NO: 130739 - DNA, 15 bp, Homo sapiens
ccagaataacgattc

SEQ ID NO: 130740 - DNA, 15 bp, Homo sapiens
tccagaataacgatt

SEQ ID NO: 130741 - DNA, 15 bp, Homo sapiens
ttccagaataacgat

SEQ ID NO: 130742 - DNA, 15 bp, Homo sapiens
tttccagaataacga

SEQ ID NO: 130743 - DNA, 15 bp, Homo sapiens
atttccagaataacg

SEQ ID NO: 130744 - DNA, 15 bp, Homo sapiens
gatttccagaataac

SEQ ID NO: 130745 - DNA, 15 bp, Homo sapiens
ggatttccagaataa

SEQ ID NO: 130746 - DNA, 15 bp, Homo sapiens
aggatttccagaata

SEQ ID NO: 130747 - DNA, 15 bp, Homo sapiens
caggatttccagaat

SEQ ID NO: 130748 - DNA, 15 bp, Homo sapiens
gcaggatttccagaa

SEQ ID NO: 130749 - DNA, 15 bp, Homo sapiens
tgcaggatttccaga

SEQ ID NO: 130750 - DNA, 15 bp, Homo sapiens
ctgcaggatttccag

SEQ ID NO: 130751 - DNA, 15 bp, Homo sapiens
tctgcaggatttcca

SEQ ID NO: 130752 - DNA, 15 bp, Homo sapiens
ttctgcaggatttcc

SEQ ID NO: 130753 - DNA, 15 bp, Homo sapiens
attctgcaggatttc

SEQ ID NO: 130754 - DNA, 15 bp, Homo sapiens
cattctgcaggattt

SEQ ID NO: 130755 - DNA, 15 bp, Homo sapiens
ccattctgcaggatt

SEQ ID NO: 130756 - DNA, 15 bp, Homo sapiens
accattctgcaggat

SEQ ID NO: 130757 - DNA, 15 bp, Homo sapiens
caccattctgcagga

SEQ ID NO: 130758 - DNA, 15 bp, Homo sapiens
ccaccattctgcagg

SEQ ID NO: 130759 - DNA, 15 bp, Homo sapiens
accaccattctgcag

SEQ ID NO: 130760 - DNA, 15 bp, Homo sapiens
caccaccattctgca

SEQ ID NO: 130761 - DNA, 15 bp, Homo sapiens
tcaccaccattctgc

SEQ ID NO: 130762 - DNA, 15 bp, Homo sapiens
ttcaccaccattctg

SEQ ID NO: 130763 - DNA, 15 bp, Homo sapiens
tttcaccaccattct

SEQ ID NO: 130764 - DNA, 15 bp, Homo sapiens
ctttcaccaccattc

SEQ ID NO: 130765 - DNA, 15 bp, Homo sapiens
cctttcaccaccatt

SEQ ID NO: 130766 - DNA, 15 bp, Homo sapiens
acctttcaccaccat

SEQ ID NO: 130767 - DNA, 15 bp, Homo sapiens
cacctttcaccacca

SEQ ID NO: 130768 - DNA, 15 bp, Homo sapiens
tcacctttcaccacc

SEQ ID NO: 130769 - DNA, 15 bp, Homo sapiens
ttcacctttcaccac

SEQ ID NO: 130770 - DNA, 15 bp, Homo sapiens
attcacctttcacca

SEQ ID NO: 130771 - DNA, 15 bp, Homo sapiens
aattcacctttcacc

SEQ ID NO: 130772 - DNA, 15 bp, Homo sapiens
gaattcacctttcac

SEQ ID NO: 130773 - DNA, 15 bp, Homo sapiens
agaattcacctttca

SEQ ID NO: 130774 - DNA, 15 bp, Homo sapiens
tagaattcacctttc

SEQ ID NO: 130775 - DNA, 15 bp, Homo sapiens
ctagaattcaccttt

SEQ ID NO: 130776 - DNA, 15 bp, Homo sapiens
cctagaattcacctt

SEQ ID NO: 130777 - DNA, 15 bp, Homo sapiens
gcctagaattcacct

SEQ ID NO: 130778 - DNA, 15 bp, Homo sapiens
tgcctagaattcacc

SEQ ID NO: 130779 - DNA, 15 bp, Homo sapiens
ctgcctagaattcac

SEQ ID NO: 130780 - DNA, 15 bp, Homo sapiens
cctgcctagaattca

SEQ ID NO: 130781 - DNA, 15 bp, Homo sapiens
ccctgcctagaattc

SEQ ID NO: 130782 - DNA, 15 bp, Homo sapiens
gccctgcctagaatt

SEQ ID NO: 130783 - DNA, 15 bp, Homo sapiens
tgccctgcctagaat

SEQ ID NO: 130784 - DNA, 15 bp, Homo sapiens
atgccctgcctagaa

SEQ ID NO: 130785 - DNA, 15 bp, Homo sapiens
aatgccctgcctaga

SEQ ID NO: 130786 - DNA, 15 bp, Homo sapiens
caatgccctgcctag

SEQ ID NO: 130787 - DNA, 15 bp, Homo sapiens
acaatgccctgccta

SEQ ID NO: 130788 - DNA, 15 bp, Homo sapiens
cacaatgccctgcct

SEQ ID NO: 130789 - DNA, 15 bp, Homo sapiens
gcacaatgccctgcc

SEQ ID NO: 130790 - DNA, 15 bp, Homo sapiens
ggcacaatgccctgc

SEQ ID NO: 130791 - DNA, 15 bp, Homo sapiens
aggcacaatgccctg

SEQ ID NO: 130792 - DNA, 15 bp, Homo sapiens
caggcacaatgccct

SEQ ID NO: 130793 - DNA, 15 bp, Homo sapiens
tcaggcacaatgccc

SEQ ID NO: 130794 - DNA, 15 bp, Homo sapiens
ctcaggcacaatgcc

SEQ ID NO: 130795 - DNA, 15 bp, Homo sapiens
gctcaggcacaatgc

SEQ ID NO: 130796 - DNA, 15 bp, Homo sapiens
agctcaggcacaatg

SEQ ID NO: 130797 - DNA, 15 bp, Homo sapiens
cagctcaggcacaat

SEQ ID NO: 130798 - DNA, 15 bp, Homo sapiens
acagctcaggcacaa

SEQ ID NO: 130799 - DNA, 15 bp, Homo sapiens
cacagctcaggcaca

SEQ ID NO: 130800 - DNA, 15 bp, Homo sapiens
gcacagctcaggcac

SEQ ID NO: 130801 - DNA, 15 bp, Homo sapiens
ggcacagctcaggca

SEQ ID NO: 130802 - DNA, 15 bp, Homo sapiens
aggcacagctcaggc

SEQ ID NO: 130803 - DNA, 15 bp, Homo sapiens
aaggcacagctcagg

SEQ ID NO: 130804 - DNA, 15 bp, Homo sapiens
gaaggcacagctcag

SEQ ID NO: 130805 - DNA, 15 bp, Homo sapiens
agaaggcacagctca

SEQ ID NO: 130806 - DNA, 15 bp, Homo sapiens
aagaaggcacagctc

SEQ ID NO: 130807 - DNA, 15 bp, Homo sapiens
aaagaaggcacagct

SEQ ID NO: 130808 - DNA, 15 bp, Homo sapiens
caaagaaggcacagc

SEQ ID NO: 130809 - DNA, 15 bp, Homo sapiens
tcaaagaaggcacag

SEQ ID NO: 130810 - DNA, 15 bp, Homo sapiens
gtcaaagaaggcaca

SEQ ID NO: 130811 - DNA, 15 bp, Homo sapiens
ggtcaaagaaggcac

SEQ ID NO: 130812 - DNA, 15 bp, Homo sapiens
aggtcaaagaaggca

SEQ ID NO: 130813 - DNA, 15 bp, Homo sapiens
taggtcaaagaaggc

SEQ ID NO: 130814 - DNA, 15 bp, Homo sapiens
ctaggtcaaagaagg

SEQ ID NO: 130815 - DNA, 15 bp, Homo sapiens
gctaggtcaaagaag

SEQ ID NO: 130816 - DNA, 15 bp, Homo sapiens
ggctaggtcaaagaa

SEQ ID NO: 130817 - DNA, 15 bp, Homo sapiens
tggctaggtcaaaga

SEQ ID NO: 130818 - DNA, 15 bp, Homo sapiens
atggctaggtcaaag

SEQ ID NO: 130819 - DNA, 15 bp, Homo sapiens
catggctaggtcaaa

SEQ ID NO: 130820 - DNA, 15 bp, Homo sapiens
ccatggctaggtcaa

SEQ ID NO: 130821 - DNA, 15 bp, Homo sapiens
tccatggctaggtca

SEQ ID NO: 130822 - DNA, 15 bp, Homo sapiens
atccatggctaggtc

SEQ ID NO: 130823 - DNA, 15 bp, Homo sapiens
catccatggctaggt

SEQ ID NO: 130824 - DNA, 15 bp, Homo sapiens
acatccatggctagg

SEQ ID NO: 130825 - DNA, 15 bp, Homo sapiens
gacatccatggctag

SEQ ID NO: 130826 - DNA, 15 bp, Homo sapiens
ggacatccatggcta

SEQ ID NO: 130827 - DNA, 15 bp, Homo sapiens
aggacatccatggct

SEQ ID NO: 130828 - DNA, 15 bp, Homo sapiens
aaggacatccatggc

SEQ ID NO: 130829 - DNA, 15 bp, Homo sapiens
aaaggacatccatgg

SEQ ID NO: 130830 - DNA, 15 bp, Homo sapiens
caaaggacatccatg

SEQ ID NO: 130831 - DNA, 15 bp, Homo sapiens
ccaaaggacatccat

SEQ ID NO: 130832 - DNA, 15 bp, Homo sapiens
cccaaaggacatcca

SEQ ID NO: 130833 - DNA, 15 bp, Homo sapiens
ccccaaaggacatcc

SEQ ID NO: 130834 - DNA, 15 bp, Homo sapiens
tccccaaaggacatc

SEQ ID NO: 130835 - DNA, 15 bp, Homo sapiens
ttccccaaaggacat

SEQ ID NO: 130836 - DNA, 15 bp, Homo sapiens
attccccaaaggaca

SEQ ID NO: 130837 - DNA, 15 bp, Homo sapiens
cattccccaaaggac

SEQ ID NO: 130838 - DNA, 15 bp, Homo sapiens
tcattccccaaagga

SEQ ID NO: 130839 - DNA, 15 bp, Homo sapiens
ttcattccccaaagg

SEQ ID NO: 130840 - DNA, 15 bp, Homo sapiens
cttcattccccaaag

SEQ ID NO: 130841 - DNA, 15 bp, Homo sapiens
tcttcattccccaaa

SEQ ID NO: 130842 - DNA, 15 bp, Homo sapiens
atcttcattccccaa

SEQ ID NO: 130843 - DNA, 15 bp, Homo sapiens
catcttcattcccca

SEQ ID NO: 130844 - DNA, 15 bp, Homo sapiens
tcatcttcattcccc

SEQ ID NO: 130845 - DNA, 15 bp, Homo sapiens
atcatcttcattccc

SEQ ID NO: 130846 - DNA, 15 bp, Homo sapiens
catcatcttcattcc

SEQ ID NO: 130847 - DNA, 15 bp, Homo sapiens
acatcatcttcattc

SEQ ID NO: 130848 - DNA, 15 bp, Homo sapiens
aacatcatcttcatt

SEQ ID NO: 130849 - DNA, 15 bp, Homo sapiens
gaacatcatcttcat

SEQ ID NO: 130850 - DNA, 15 bp, Homo sapiens
agaacatcatcttca

SEQ ID NO: 130851 - DNA, 15 bp, Homo sapiens
aagaacatcatcttc

SEQ ID NO: 130852 - DNA, 15 bp, Homo sapiens
caagaacatcatctt

SEQ ID NO: 130853 - DNA, 15 bp, Homo sapiens
gcaagaacatcatct

SEQ ID NO: 130854 - DNA, 15 bp, Homo sapiens
tgcaagaacatcatc

SEQ ID NO: 130855 - DNA, 15 bp, Homo sapiens
ttgcaagaacatcat

SEQ ID NO: 130856 - DNA, 15 bp, Homo sapiens
cttgcaagaacatca

SEQ ID NO: 130857 - DNA, 15 bp, Homo sapiens
acttgcaagaacatc

SEQ ID NO: 130858 - DNA, 15 bp, Homo sapiens
aacttgcaagaacat

SEQ ID NO: 130859 - DNA, 15 bp, Homo sapiens
aaacttgcaagaaca

SEQ ID NO: 130860 - DNA, 15 bp, Homo sapiens
caaacttgcaagaac

SEQ ID NO: 130861 - DNA, 15 bp, Homo sapiens
acaaacttgcaagaa

SEQ ID NO: 130862 - DNA, 15 bp, Homo sapiens
tacaaacttgcaaga

SEQ ID NO: 130863 - DNA, 15 bp, Homo sapiens
atacaaacttgcaag

SEQ ID NO: 130864 - DNA, 15 bp, Homo sapiens
gatacaaacttgcaa

SEQ ID NO: 130865 - DNA, 15 bp, Homo sapiens
agatacaaacttgca

SEQ ID NO: 130866 - DNA, 15 bp, Homo sapiens
aagatacaaacttgc

SEQ ID NO: 130867 - DNA, 15 bp, Homo sapiens
caagatacaaacttg

SEQ ID NO: 130868 - DNA, 15 bp, Homo sapiens
ccaagatacaaactt

SEQ ID NO: 130869 - DNA, 15 bp, Homo sapiens
gccaagatacaaact

SEQ ID NO: 130870 - DNA, 15 bp, Homo sapiens
tgccaagatacaaac

SEQ ID NO: 130871 - DNA, 15 bp, Homo sapiens
ctgccaagatacaaa

SEQ ID NO: 130872 - DNA, 15 bp, Homo sapiens
cctgccaagatacaa

SEQ ID NO: 130873 - DNA, 15 bp, Homo sapiens
gcctgccaagataca

SEQ ID NO: 130874 - DNA, 15 bp, Homo sapiens
tgcctgccaagatac

SEQ ID NO: 130875 - DNA, 15 bp, Homo sapiens
ctgcctgccaagata

SEQ ID NO: 130876 - DNA, 15 bp, Homo sapiens
cctgcctgccaagat

SEQ ID NO: 130877 - DNA, 15 bp, Homo sapiens
acctgcctgccaaga

SEQ ID NO: 130878 - DNA, 15 bp, Homo sapiens
cacctgcctgccaag

SEQ ID NO: 130879 - DNA, 15 bp, Homo sapiens
ccacctgcctgccaa

SEQ ID NO: 130880 - DNA, 15 bp, Homo sapiens
gccacctgcctgcca

SEQ ID NO: 130881 - DNA, 15 bp, Homo sapiens
cgccacctgcctgcc

SEQ ID NO: 130882 - DNA, 15 bp, Homo sapiens
gcgccacctgcctgc

SEQ ID NO: 130883 - DNA, 15 bp, Homo sapiens
tgcgccacctgcctg

SEQ ID NO: 130884 - DNA, 15 bp, Homo sapiens
ttgcgccacctgcct

SEQ ID NO: 130885 - DNA, 15 bp, Homo sapiens
attgcgccacctgcc

SEQ ID NO: 130886 - DNA, 15 bp, Homo sapiens
cattgcgccacctgc

SEQ ID NO: 130887 - DNA, 15 bp, Homo sapiens
tcattgcgccacctg

SEQ ID NO: 130888 - DNA, 15 bp, Homo sapiens
atcattgcgccacct

SEQ ID NO: 130889 - DNA, 15 bp, Homo sapiens
aatcattgcgccacc

SEQ ID NO: 130890 - DNA, 15 bp, Homo sapiens
caatcattgcgccac

SEQ ID NO: 130891 - DNA, 15 bp, Homo sapiens
tcaatcattgcgcca

SEQ ID NO: 130892 - DNA, 15 bp, Homo sapiens
ctcaatcattgcgcc

SEQ ID NO: 130893 - DNA, 15 bp, Homo sapiens
cctcaatcattgcgc

SEQ ID NO: 130894 - DNA, 15 bp, Homo sapiens
tcctcaatcattgcg

SEQ ID NO: 130895 - DNA, 15 bp, Homo sapiens
ctcctcaatcattgc

SEQ ID NO: 130896 - DNA, 15 bp, Homo sapiens
cctcctcaatcattg

SEQ ID NO: 130897 - DNA, 15 bp, Homo sapiens
tcctcctcaatcatt

SEQ ID NO: 130898 - DNA, 15 bp, Homo sapiens
atcctcctcaatcat

SEQ ID NO: 130899 - DNA, 15 bp, Homo sapiens
tatcctcctcaatca

SEQ ID NO: 130900 - DNA, 15 bp, Homo sapiens
gtatcctcctcaatc

SEQ ID NO: 130901 - DNA, 15 bp, Homo sapiens
cgtatcctcctcaat

SEQ ID NO: 130902 - DNA, 15 bp, Homo sapiens
tcgtatcctcctcaa

SEQ ID NO: 130903 - DNA, 15 bp, Homo sapiens
atcgtatcctcctca

SEQ ID NO: 130904 - DNA, 15 bp, Homo sapiens
catcgtatcctcctc

SEQ ID NO: 130905 - DNA, 15 bp, Homo sapiens
tcatcgtatcctcct

SEQ ID NO: 130906 - DNA, 15 bp, Homo sapiens
ctcatcgtatcctcc

SEQ ID NO: 130907 - DNA, 15 bp, Homo sapiens
tctcatcgtatcctc

SEQ ID NO: 130908 - DNA, 15 bp, Homo sapiens
gtctcatcgtatcct

SEQ ID NO: 130909 - DNA, 15 bp, Homo sapiens
ggtctcatcgtatcc

SEQ ID NO: 130910 - DNA, 15 bp, Homo sapiens
tggtctcatcgtatc

SEQ ID NO: 130911 - DNA, 15 bp, Homo sapiens
gtggtctcatcgtat

SEQ ID NO: 130912 - DNA, 15 bp, Homo sapiens
tgtggtctcatcgta

SEQ ID NO: 130913 - DNA, 15 bp, Homo sapiens
ctgtggtctcatcgt

SEQ ID NO: 130914 - DNA, 15 bp, Homo sapiens
gctgtggtctcatcg

SEQ ID NO: 130915 - DNA, 15 bp, Homo sapiens
tgctgtggtctcatc

SEQ ID NO: 130916 - DNA, 15 bp, Homo sapiens
atgctgtggtctcat

SEQ ID NO: 130917 - DNA, 15 bp, Homo sapiens
aatgctgtggtctca

SEQ ID NO: 130918 - DNA, 15 bp, Homo sapiens
taatgctgtggtctc

SEQ ID NO: 130919 - DNA, 15 bp, Homo sapiens
ataatgctgtggtct

SEQ ID NO: 130920 - DNA, 15 bp, Homo sapiens
aataatgctgtggtc

SEQ ID NO: 130921 - DNA, 15 bp, Homo sapiens
aaataatgctgtggt

SEQ ID NO: 130922 - DNA, 15 bp, Homo sapiens
aaaataatgctgtgg

SEQ ID NO: 130923 - DNA, 15 bp, Homo sapiens
gaaaataatgctgtg

SEQ ID NO: 130924 - DNA, 15 bp, Homo sapiens
agaaaataatgctgt

SEQ ID NO: 130925 - DNA, 15 bp, Homo sapiens
aagaaaataatgctg

SEQ ID NO: 130926 - DNA, 15 bp, Homo sapiens
gaagaaaataatgct

SEQ ID NO: 130927 - DNA, 15 bp, Homo sapiens
ggaagaaaataatgc

SEQ ID NO: 130928 - DNA, 15 bp, Homo sapiens
tggaagaaaataatg

SEQ ID NO: 130929 - DNA, 15 bp, Homo sapiens
ttggaagaaaataat

SEQ ID NO: 130930 - DNA, 15 bp, Homo sapiens
attggaagaaaataa

SEQ ID NO: 130931 - DNA, 15 bp, Homo sapiens
cattggaagaaaata

SEQ ID NO: 130932 - DNA, 15 bp, Homo sapiens
gcattggaagaaaat

SEQ ID NO: 130933 - DNA, 15 bp, Homo sapiens
tgcattggaagaaaa

SEQ ID NO: 130934 - DNA, 15 bp, Homo sapiens
gtgcattggaagaaa

SEQ ID NO: 130935 - DNA, 15 bp, Homo sapiens
agtgcattggaagaa

SEQ ID NO: 130936 - DNA, 15 bp, Homo sapiens
cagtgcattggaaga

SEQ ID NO: 130937 - DNA, 15 bp, Homo sapiens
ccagtgcattggaag

SEQ ID NO: 130938 - DNA, 15 bp, Homo sapiens
gccagtgcattggaa

SEQ ID NO: 130939 - DNA, 15 bp, Homo sapiens
agccagtgcattgga

SEQ ID NO: 130940 - DNA, 15 bp, Homo sapiens
aagccagtgcattgg

SEQ ID NO: 130941 - DNA, 15 bp, Homo sapiens
aaagccagtgcattg

SEQ ID NO: 130942 - DNA, 15 bp, Homo sapiens
caaagccagtgcatt

SEQ ID NO: 130943 - DNA, 15 bp, Homo sapiens
tcaaagccagtgcat

SEQ ID NO: 130944 - DNA, 15 bp, Homo sapiens
atcaaagccagtgca

SEQ ID NO: 130945 - DNA, 15 bp, Homo sapiens
catcaaagccagtgc

SEQ ID NO: 130946 - DNA, 15 bp, Homo sapiens
acatcaaagccagtg

SEQ ID NO: 130947 - DNA, 15 bp, Homo sapiens
cacatcaaagccagt

SEQ ID NO: 130948 - DNA, 15 bp, Homo sapiens
acacatcaaagccag

SEQ ID NO: 130949 - DNA, 15 bp, Homo sapiens
aacacatcaaagcca

SEQ ID NO: 130950 - DNA, 15 bp, Homo sapiens
taacacatcaaagcc

SEQ ID NO: 130951 - DNA, 15 bp, Homo sapiens
ctaacacatcaaagc

SEQ ID NO: 130952 - DNA, 15 bp, Homo sapiens
tctaacacatcaaag

SEQ ID NO: 130953 - DNA, 15 bp, Homo sapiens
ttctaacacatcaaa

SEQ ID NO: 130954 - DNA, 15 bp, Homo sapiens
tttctaacacatcaa

SEQ ID NO: 130955 - DNA, 15 bp, Homo sapiens
ttttctaacacatca

SEQ ID NO: 130956 - DNA, 15 bp, Homo sapiens
cttttctaacacatc

SEQ ID NO: 130957 - DNA, 15 bp, Homo sapiens
tcttttctaacacat

SEQ ID NO: 130958 - DNA, 15 bp, Homo sapiens
ttcttttctaacaca

SEQ ID NO: 130959 - DNA, 15 bp, Homo sapiens
cttcttttctaacac

SEQ ID NO: 130960 - DNA, 15 bp, Homo sapiens
tcttcttttctaaca

SEQ ID NO: 130961 - DNA, 15 bp, Homo sapiens
ctcttcttttctaac

SEQ ID NO: 130962 - DNA, 15 bp, Homo sapiens
tctcttcttttctaa

SEQ ID NO: 130963 - DNA, 15 bp, Homo sapiens
ttctcttcttttcta

SEQ ID NO: 130964 - DNA, 15 bp, Homo sapiens
attctcttcttttct

SEQ ID NO: 130965 - DNA, 15 bp, Homo sapiens
aattctcttcttttc

SEQ ID NO: 130966 - DNA, 15 bp, Homo sapiens
taattctcttctttt

SEQ ID NO: 130967 - DNA, 15 bp, Homo sapiens
gtaattctcttcttt

SEQ ID NO: 130968 - DNA, 15 bp, Homo sapiens
agtaattctcttctt

SEQ ID NO: 130969 - DNA, 15 bp, Homo sapiens
aagtaattctcttct

SEQ ID NO: 130970 - DNA, 15 bp, Homo sapiens
aaagtaattctcttc

SEQ ID NO: 130971 - DNA, 15 bp, Homo sapiens
caaagtaattctctt

SEQ ID NO: 130972 - DNA, 15 bp, Homo sapiens
gcaaagtaattctct

SEQ ID NO: 130973 - DNA, 15 bp, Homo sapiens
cgcaaagtaattctc

SEQ ID NO: 130974 - DNA, 15 bp, Homo sapiens
ccgcaaagtaattct

SEQ ID NO: 130975 - DNA, 15 bp, Homo sapiens
cccgcaaagtaattc

SEQ ID NO: 130976 - DNA, 15 bp, Homo sapiens
acccgcaaagtaatt

SEQ ID NO: 130977 - DNA, 15 bp, Homo sapiens
tacccgcaaagtaat

SEQ ID NO: 130978 - DNA, 15 bp, Homo sapiens
ttacccgcaaagtaa

SEQ ID NO: 130979 - DNA, 15 bp, Homo sapiens
gttacccgcaaagta

SEQ ID NO: 130980 - DNA, 15 bp, Homo sapiens
tgttacccgcaaagt

SEQ ID NO: 130981 - DNA, 15 bp, Homo sapiens
atgttacccgcaaag

SEQ ID NO: 130982 - DNA, 15 bp, Homo sapiens
catgttacccgcaaa

SEQ ID NO: 130983 - DNA, 15 bp, Homo sapiens
gcatgttacccgcaa

SEQ ID NO: 130984 - DNA, 15 bp, Homo sapiens
ggcatgttacccgca

SEQ ID NO: 130985 - DNA, 15 bp, Homo sapiens
gggcatgttacccgc

SEQ ID NO: 130986 - DNA, 15 bp, Homo sapiens
agggcatgttacccg

SEQ ID NO: 130987 - DNA, 15 bp, Homo sapiens
cagggcatgttaccc

SEQ ID NO: 130988 - DNA, 15 bp, Homo sapiens
ccagggcatgttacc

SEQ ID NO: 130989 - DNA, 15 bp, Homo sapiens
gccagggcatgttac

SEQ ID NO: 130990 - DNA, 15 bp, Homo sapiens
agccagggcatgtta

SEQ ID NO: 130991 - DNA, 15 bp, Homo sapiens
gagccagggcatgtt

SEQ ID NO: 130992 - DNA, 15 bp, Homo sapiens
tgagccagggcatgt

SEQ ID NO: 130993 - DNA, 15 bp, Homo sapiens
ttgagccagggcatg

SEQ ID NO: 130994 - DNA, 15 bp, Homo sapiens
tttgagccagggcat

SEQ ID NO: 130995 - DNA, 15 bp, Homo sapiens
ctttgagccagggca

SEQ ID NO: 130996 - DNA, 15 bp, Homo sapiens
gctttgagccagggc

SEQ ID NO: 130997 - DNA, 15 bp, Homo sapiens
agctttgagccaggg

SEQ ID NO: 130998 - DNA, 15 bp, Homo sapiens
aagctttgagccagg

SEQ ID NO: 130999 - DNA, 15 bp, Homo sapiens
gaagctttgagccag

SEQ ID NO: 131000 - DNA, 15 bp, Homo sapiens
agaagctttgagcca

SEQ ID NO: 131001 - DNA, 15 bp, Homo sapiens
aagaagctttgagcc

SEQ ID NO: 131002 - DNA, 15 bp, Homo sapiens
gaagaagctttgagc

SEQ ID NO: 131003 - DNA, 15 bp, Homo sapiens
tgaagaagctttgag

SEQ ID NO: 131004 - DNA, 15 bp, Homo sapiens
atgaagaagctttga

SEQ ID NO: 131005 - DNA, 15 bp, Homo sapiens
gatgaagaagctttg

SEQ ID NO: 131006 - DNA, 15 bp, Homo sapiens
tgatgaagaagcttt

SEQ ID NO: 131007 - DNA, 15 bp, Homo sapiens
gtgatgaagaagctt

SEQ ID NO: 131008 - DNA, 15 bp, Homo sapiens
tgtgatgaagaagct

SEQ ID NO: 131009 - DNA, 15 bp, Homo sapiens
ttgtgatgaagaagc

SEQ ID NO: 131010 - DNA, 15 bp, Homo sapiens
attgtgatgaagaag

SEQ ID NO: 131011 - DNA, 15 bp, Homo sapiens
aattgtgatgaagaa

SEQ ID NO: 131012 - DNA, 15 bp, Homo sapiens
caattgtgatgaaga

SEQ ID NO: 131013 - DNA, 15 bp, Homo sapiens
ccaattgtgatgaag

SEQ ID NO: 131014 - DNA, 15 bp, Homo sapiens
gccaattgtgatgaa

SEQ ID NO: 131015 - DNA, 15 bp, Homo sapiens
agccaattgtgatga

SEQ ID NO: 131016 - DNA, 15 bp, Homo sapiens
cagccaattgtgatg

SEQ ID NO: 131017 - DNA, 15 bp, Homo sapiens
tcagccaattgtgat

SEQ ID NO: 131018 - DNA, 15 bp, Homo sapiens
atcagccaattgtga

SEQ ID NO: 131019 - DNA, 15 bp, Homo sapiens
gatcagccaattgtg

SEQ ID NO: 131020 - DNA, 15 bp, Homo sapiens
agatcagccaattgt

SEQ ID NO: 131021 - DNA, 15 bp, Homo sapiens
cagatcagccaattg

SEQ ID NO: 131022 - DNA, 15 bp, Homo sapiens
tcagatcagccaatt

SEQ ID NO: 131023 - DNA, 15 bp, Homo sapiens
ctcagatcagccaat

SEQ ID NO: 131024 - DNA, 15 bp, Homo sapiens
cctcagatcagccaa

SEQ ID NO: 131025 - DNA, 15 bp, Homo sapiens
gcctcagatcagcca

SEQ ID NO: 131026 - DNA, 15 bp, Homo sapiens
ggcctcagatcagcc

SEQ ID NO: 131027 - DNA, 15 bp, Homo sapiens
tggcctcagatcagc

SEQ ID NO: 131028 - DNA, 15 bp, Homo sapiens
ctggcctcagatcag

SEQ ID NO: 131029 - DNA, 15 bp, Homo sapiens
actggcctcagatca

SEQ ID NO: 131030 - DNA, 15 bp, Homo sapiens
cactggcctcagatc

SEQ ID NO: 131031 - DNA, 15 bp, Homo sapiens
tcactggcctcagat

SEQ ID NO: 131032 - DNA, 15 bp, Homo sapiens
gtcactggcctcaga

SEQ ID NO: 131033 - DNA, 15 bp, Homo sapiens
ggtcactggcctcag

SEQ ID NO: 131034 - DNA, 15 bp, Homo sapiens
aggtcactggcctca

SEQ ID NO: 131035 - DNA, 15 bp, Homo sapiens
caggtcactggcctc

SEQ ID NO: 131036 - DNA, 15 bp, Homo sapiens
ccaggtcactggcct

SEQ ID NO: 131037 - DNA, 15 bp, Homo sapiens
cccaggtcactggcc

SEQ ID NO: 131038 - DNA, 15 bp, Homo sapiens
ccccaggtcactggc

SEQ ID NO: 131039 - DNA, 15 bp, Homo sapiens
gccccaggtcactgg

SEQ ID NO: 131040 - DNA, 15 bp, Homo sapiens
tgccccaggtcactg

SEQ ID NO: 131041 - DNA, 15 bp, Homo sapiens
ctgccccaggtcact

SEQ ID NO: 131042 - DNA, 15 bp, Homo sapiens
cctgccccaggtcac

SEQ ID NO: 131043 - DNA, 15 bp, Homo sapiens
ccctgccccaggtca

SEQ ID NO: 131044 - DNA, 15 bp, Homo sapiens
gccctgccccaggtc

SEQ ID NO: 131045 - DNA, 15 bp, Homo sapiens
agccctgccccaggt

SEQ ID NO: 131046 - DNA, 15 bp, Homo sapiens
cagccctgccccagg

SEQ ID NO: 131047 - DNA, 15 bp, Homo sapiens
ccagccctgccccag

SEQ ID NO: 131048 - DNA, 15 bp, Homo sapiens
cccagccctgcccca

SEQ ID NO: 131049 - DNA, 15 bp, Homo sapiens
tcccagccctgcccc

SEQ ID NO: 131050 - DNA, 15 bp, Homo sapiens
ttcccagccctgccc

SEQ ID NO: 131051 - DNA, 15 bp, Homo sapiens
cttcccagccctgcc

SEQ ID NO: 131052 - DNA, 15 bp, Homo sapiens
acttcccagccctgc

SEQ ID NO: 131053 - DNA, 15 bp, Homo sapiens
tacttcccagccctg

SEQ ID NO: 131054 - DNA, 15 bp, Homo sapiens
atacttcccagccct

SEQ ID NO: 131055 - DNA, 15 bp, Homo sapiens
gatacttcccagccc

SEQ ID NO: 131056 - DNA, 15 bp, Homo sapiens
ggatacttcccagcc

SEQ ID NO: 131057 - DNA, 15 bp, Homo sapiens
gggatacttcccagc

SEQ ID NO: 131058 - DNA, 15 bp, Homo sapiens
tgggatacttcccag

SEQ ID NO: 131059 - DNA, 15 bp, Homo sapiens
gtgggatacttccca

SEQ ID NO: 131060 - DNA, 15 bp, Homo sapiens
cgtgggatacttccc

SEQ ID NO: 131061 - DNA, 15 bp, Homo sapiens
ccgtgggatacttcc

SEQ ID NO: 131062 - DNA, 15 bp, Homo sapiens
gccgtgggatacttc

SEQ ID NO: 131063 - DNA, 15 bp, Homo sapiens
ggccgtgggatactt

SEQ ID NO: 131064 - DNA, 15 bp, Homo sapiens
tggccgtgggatact

SEQ ID NO: 131065 - DNA, 15 bp, Homo sapiens
ctggccgtgggatac

SEQ ID NO: 131066 - DNA, 15 bp, Homo sapiens
tctggccgtgggata

SEQ ID NO: 131067 - DNA, 15 bp, Homo sapiens
gtctggccgtgggat

SEQ ID NO: 131068 - DNA, 15 bp, Homo sapiens
agtctggccgtggga

SEQ ID NO: 131069 - DNA, 15 bp, Homo sapiens
cagtctggccgtggg

SEQ ID NO: 131070 - DNA, 15 bp, Homo sapiens
tcagtctggccgtgg

SEQ ID NO: 131071 - DNA, 15 bp, Homo sapiens
gtcagtctggccgtg

SEQ ID NO: 131072 - DNA, 15 bp, Homo sapiens
agtcagtctggccgt

SEQ ID NO: 131073 - DNA, 15 bp, Homo sapiens
cagtcagtctggccg

SEQ ID NO: 131074 - DNA, 15 bp, Homo sapiens
gcagtcagtctggcc

SEQ ID NO: 131075 - DNA, 15 bp, Homo sapiens
ggcagtcagtctggc

SEQ ID NO: 131076 - DNA, 15 bp, Homo sapiens
tggcagtcagtctgg

SEQ ID NO: 131077 - DNA, 15 bp, Homo sapiens
gtggcagtcagtctg

SEQ ID NO: 131078 - DNA, 15 bp, Homo sapiens
tgtggcagtcagtct

SEQ ID NO: 131079 - DNA, 15 bp, Homo sapiens
ctgtggcagtcagtc

SEQ ID NO: 131080 - DNA, 15 bp, Homo sapiens
cctgtggcagtcagt

SEQ ID NO: 131081 - DNA, 15 bp, Homo sapiens
gcctgtggcagtcag

SEQ ID NO: 131082 - DNA, 15 bp, Homo sapiens
tgcctgtggcagtca

SEQ ID NO: 131083 - DNA, 15 bp, Homo sapiens
gtgcctgtggcagtc

SEQ ID NO: 131084 - DNA, 15 bp, Homo sapiens
ggtgcctgtggcagt

SEQ ID NO: 131085 - DNA, 15 bp, Homo sapiens
aggtgcctgtggcag

SEQ ID NO: 131086 - DNA, 15 bp, Homo sapiens
gaggtgcctgtggca

SEQ ID NO: 131087 - DNA, 15 bp, Homo sapiens
agaggtgcctgtggc

SEQ ID NO: 131088 - DNA, 15 bp, Homo sapiens
aagaggtgcctgtgg

SEQ ID NO: 131089 - DNA, 15 bp, Homo sapiens
aaagaggtgcctgtg

SEQ ID NO: 131090 - DNA, 15 bp, Homo sapiens
gaaagaggtgcctgt

SEQ ID NO: 131091 - DNA, 15 bp, Homo sapiens
ggaaagaggtgcctg

SEQ ID NO: 131092 - DNA, 15 bp, Homo sapiens
aggaaagaggtgcct

SEQ ID NO: 131093 - DNA, 15 bp, Homo sapiens
taggaaagaggtgcc

SEQ ID NO: 131094 - DNA, 15 bp, Homo sapiens
gtaggaaagaggtgc

SEQ ID NO: 131095 - DNA, 15 bp, Homo sapiens
tgtaggaaagaggtg

SEQ ID NO: 131096 - DNA, 15 bp, Homo sapiens
gtgtaggaaagaggt

SEQ ID NO: 131097 - DNA, 15 bp, Homo sapiens
tgtgtaggaaagagg

SEQ ID NO: 131098 - DNA, 15 bp, Homo sapiens
gtgtgtaggaaagag

SEQ ID NO: 131099 - DNA, 15 bp, Homo sapiens
tgtgtgtaggaaaga

SEQ ID NO: 131100 - DNA, 15 bp, Homo sapiens
gtgtgtgtaggaaag

SEQ ID NO: 131101 - DNA, 15 bp, Homo sapiens
ggtgtgtgtaggaaa

SEQ ID NO: 131102 - DNA, 15 bp, Homo sapiens
aggtgtgtgtaggaa

SEQ ID NO: 131103 - DNA, 15 bp, Homo sapiens
caggtgtgtgtagga

SEQ ID NO: 131104 - DNA, 15 bp, Homo sapiens
gcaggtgtgtgtagg

SEQ ID NO: 131105 - DNA, 15 bp, Homo sapiens
agcaggtgtgtgtag

SEQ ID NO: 131106 - DNA, 15 bp, Homo sapiens
gagcaggtgtgtgta

SEQ ID NO: 131107 - DNA, 15 bp, Homo sapiens
agagcaggtgtgtgt

SEQ ID NO: 131108 - DNA, 15 bp, Homo sapiens
gagagcaggtgtgtg

SEQ ID NO: 131109 - DNA, 15 bp, Homo sapiens
ggagagcaggtgtgt

SEQ ID NO: 131110 - DNA, 15 bp, Homo sapiens
gggagagcaggtgtg

SEQ ID NO: 131111 - DNA, 15 bp, Homo sapiens
cgggagagcaggtgt

SEQ ID NO: 131112 - DNA, 15 bp, Homo sapiens
tcgggagagcaggtg

SEQ ID NO: 131113 - DNA, 15 bp, Homo sapiens
ctcgggagagcaggt

SEQ ID NO: 131114 - DNA, 15 bp, Homo sapiens
cctcgggagagcagg

SEQ ID NO: 131115 - DNA, 15 bp, Homo sapiens
gcctcgggagagcag

SEQ ID NO: 131116 - DNA, 15 bp, Homo sapiens
tgcctcgggagagca

SEQ ID NO: 131117 - DNA, 15 bp, Homo sapiens
gtgcctcgggagagc

SEQ ID NO: 131118 - DNA, 15 bp, Homo sapiens
agtgcctcgggagag

SEQ ID NO: 131119 - DNA, 15 bp, Homo sapiens
cagtgcctcgggaga

SEQ ID NO: 131120 - DNA, 15 bp, Homo sapiens
ccagtgcctcgggag

SEQ ID NO: 131121 - DNA, 15 bp, Homo sapiens
tccagtgcctcggga

SEQ ID NO: 131122 - DNA, 15 bp, Homo sapiens
ctccagtgcctcggg

SEQ ID NO: 131123 - DNA, 15 bp, Homo sapiens
tctccagtgcctcgg

SEQ ID NO: 131124 - DNA, 15 bp, Homo sapiens
gtctccagtgcctcg

SEQ ID NO: 131125 - DNA, 15 bp, Homo sapiens
tgtctccagtgcctc

SEQ ID NO: 131126 - DNA, 15 bp, Homo sapiens
ctgtctccagtgcct

SEQ ID NO: 131127 - DNA, 15 bp, Homo sapiens
cctgtctccagtgcc

SEQ ID NO: 131128 - DNA, 15 bp, Homo sapiens
tcctgtctccagtgc

SEQ ID NO: 131129 - DNA, 15 bp, Homo sapiens
atcctgtctccagtg

SEQ ID NO: 131130 - DNA, 15 bp, Homo sapiens
catcctgtctccagt

SEQ ID NO: 131131 - DNA, 15 bp, Homo sapiens
ccatcctgtctccag

SEQ ID NO: 131132 - DNA, 15 bp, Homo sapiens
tccatcctgtctcca

SEQ ID NO: 131133 - DNA, 15 bp, Homo sapiens
ttccatcctgtctcc

SEQ ID NO: 131134 - DNA, 15 bp, Homo sapiens
cttccatcctgtctc

SEQ ID NO: 131135 - DNA, 15 bp, Homo sapiens
gcttccatcctgtct

SEQ ID NO: 131136 - DNA, 15 bp, Homo sapiens
tgcttccatcctgtc

SEQ ID NO: 131137 - DNA, 15 bp, Homo sapiens
atgcttccatcctgt

SEQ ID NO: 131138 - DNA, 15 bp, Homo sapiens
catgcttccatcctg

SEQ ID NO: 131139 - DNA, 15 bp, Homo sapiens
acatgcttccatcct

SEQ ID NO: 131140 - DNA, 15 bp, Homo sapiens
gacatgcttccatcc

SEQ ID NO: 131141 - DNA, 15 bp, Homo sapiens
tgacatgcttccatc

SEQ ID NO: 131142 - DNA, 15 bp, Homo sapiens
ctgacatgcttccat

SEQ ID NO: 131143 - DNA, 15 bp, Homo sapiens
actgacatgcttcca

SEQ ID NO: 131144 - DNA, 15 bp, Homo sapiens
cactgacatgcttcc

SEQ ID NO: 131145 - DNA, 15 bp, Homo sapiens
ccactgacatgcttc

SEQ ID NO: 131146 - DNA, 15 bp, Homo sapiens
tccactgacatgctt

SEQ ID NO: 131147 - DNA, 15 bp, Homo sapiens
ttccactgacatgct

SEQ ID NO: 131148 - DNA, 15 bp, Homo sapiens
tttccactgacatgc

SEQ ID NO: 131149 - DNA, 15 bp, Homo sapiens
atttccactgacatg

SEQ ID NO: 131150 - DNA, 15 bp, Homo sapiens
gatttccactgacat

SEQ ID NO: 131151 - DNA, 15 bp, Homo sapiens
agatttccactgaca

SEQ ID NO: 131152 - DNA, 15 bp, Homo sapiens
aagatttccactgac

SEQ ID NO: 131153 - DNA, 15 bp, Homo sapiens
gaagatttccactga

SEQ ID NO: 131154 - DNA, 15 bp, Homo sapiens
agaagatttccactg

SEQ ID NO: 131155 - DNA, 15 bp, Homo sapiens
cagaagatttccact

SEQ ID NO: 131156 - DNA, 15 bp, Homo sapiens
ccagaagatttccac

SEQ ID NO: 131157 - DNA, 15 bp, Homo sapiens
tccagaagatttcca

SEQ ID NO: 131158 - DNA, 15 bp, Homo sapiens
gtccagaagatttcc

SEQ ID NO: 131159 - DNA, 15 bp, Homo sapiens
tgtccagaagatttc

SEQ ID NO: 131160 - DNA, 15 bp, Homo sapiens
atgtccagaagattt

SEQ ID NO: 131161 - DNA, 15 bp, Homo sapiens
gatgtccagaagatt

SEQ ID NO: 131162 - DNA, 15 bp, Homo sapiens
agatgtccagaagat

SEQ ID NO: 131163 - DNA, 15 bp, Homo sapiens
aagatgtccagaaga

SEQ ID NO: 131164 - DNA, 15 bp, Homo sapiens
aaagatgtccagaag

SEQ ID NO: 131165 - DNA, 15 bp, Homo sapiens
aaaagatgtccagaa

SEQ ID NO: 131166 - DNA, 15 bp, Homo sapiens
aaaaagatgtccaga

SEQ ID NO: 131167 - DNA, 15 bp, Homo sapiens
aaaaaagatgtccag

SEQ ID NO: 131168 - DNA, 15 bp, Homo sapiens
caaaaaagatgtcca

SEQ ID NO: 131169 - DNA, 15 bp, Homo sapiens
tcaaaaaagatgtcc

SEQ ID NO: 131170 - DNA, 15 bp, Homo sapiens
gtcaaaaaagatgtc

SEQ ID NO: 131171 - DNA, 15 bp, Homo sapiens
tgtcaaaaaagatgt

SEQ ID NO: 131172 - DNA, 15 bp, Homo sapiens
ttgtcaaaaaagatg

SEQ ID NO: 131173 - DNA, 15 bp, Homo sapiens
gttgtcaaaaaagat

SEQ ID NO: 131174 - DNA, 15 bp, Homo sapiens
agttgtcaaaaaaga

SEQ ID NO: 131175 - DNA, 15 bp, Homo sapiens
tagttgtcaaaaaag

SEQ ID NO: 131176 - DNA, 15 bp, Homo sapiens
ctagttgtcaaaaaa

SEQ ID NO: 131177 - DNA, 15 bp, Homo sapiens
tctagttgtcaaaaa

SEQ ID NO: 131178 - DNA, 15 bp, Homo sapiens
ttctagttgtcaaaa

SEQ ID NO: 131179 - DNA, 15 bp, Homo sapiens
cttctagttgtcaaa

SEQ ID NO: 131180 - DNA, 15 bp, Homo sapiens
acttctagttgtcaa

SEQ ID NO: 131181 - DNA, 15 bp, Homo sapiens
gacttctagttgtca

SEQ ID NO: 131182 - DNA, 15 bp, Homo sapiens
tgacttctagttgtc

SEQ ID NO: 131183 - DNA, 15 bp, Homo sapiens
atgacttctagttgt

SEQ ID NO: 131184 - DNA, 15 bp, Homo sapiens
aatgacttctagttg

SEQ ID NO: 131185 - DNA, 15 bp, Homo sapiens
aaatgacttctagtt

SEQ ID NO: 131186 - DNA, 15 bp, Homo sapiens
caaatgacttctagt

SEQ ID NO: 131187 - DNA, 15 bp, Homo sapiens
gcaaatgacttctag

SEQ ID NO: 131188 - DNA, 15 bp, Homo sapiens
tgcaaatgacttcta

SEQ ID NO: 131189 - DNA, 15 bp, Homo sapiens
gtgcaaatgacttct

SEQ ID NO: 131190 - DNA, 15 bp, Homo sapiens
tgtgcaaatgacttc

SEQ ID NO: 131191 - DNA, 15 bp, Homo sapiens
gtgtgcaaatgactt

SEQ ID NO: 131192 - DNA, 15 bp, Homo sapiens
tgtgtgcaaatgact

SEQ ID NO: 131193 - DNA, 15 bp, Homo sapiens
ctgtgtgcaaatgac

SEQ ID NO: 131194 - DNA, 15 bp, Homo sapiens
actgtgtgcaaatga

SEQ ID NO: 131195 - DNA, 15 bp, Homo sapiens
aactgtgtgcaaatg

SEQ ID NO: 131196 - DNA, 15 bp, Homo sapiens
aaactgtgtgcaaat

SEQ ID NO: 131197 - DNA, 15 bp, Homo sapiens
aaaactgtgtgcaaa

SEQ ID NO: 131198 - DNA, 15 bp, Homo sapiens
taaaactgtgtgcaa

SEQ ID NO: 131199 - DNA, 15 bp, Homo sapiens
ataaaactgtgtgca

SEQ ID NO: 131200 - DNA, 15 bp, Homo sapiens
tataaaactgtgtgc

SEQ ID NO: 131201 - DNA, 15 bp, Homo sapiens
ttataaaactgtgtg

SEQ ID NO: 131202 - DNA, 15 bp, Homo sapiens
attataaaactgtgt

SEQ ID NO: 131203 - DNA, 15 bp, Homo sapiens
aattataaaactgtg

SEQ ID NO: 131204 - DNA, 15 bp, Homo sapiens
aaattataaaactgt

SEQ ID NO: 131205 - DNA, 15 bp, Homo sapiens
taaattataaaactg

SEQ ID NO: 131206 - DNA, 15 bp, Homo sapiens
ataaattataaaact

SEQ ID NO: 131207 - DNA, 15 bp, Homo sapiens
aataaattataaaac

SEQ ID NO: 131208 - DNA, 15 bp, Homo sapiens
aaataaattataaaa

SEQ ID NO: 131209 - DNA, 15 bp, Homo sapiens
aaaataaattataaa

SEQ ID NO: 131210 - DNA, 15 bp, Homo sapiens
taaaataaattataa

SEQ ID NO: 131211 - DNA, 15 bp, Homo sapiens
ttaaaataaattata

SEQ ID NO: 131212 - DNA, 15 bp, Homo sapiens
tttaaaataaattat

SEQ ID NO: 131213 - DNA, 15 bp, Homo sapiens
ttttaaaataaatta

SEQ ID NO: 131214 - DNA, 15 bp, Homo sapiens
gttttaaaataaatt

SEQ ID NO: 131215 - DNA, 15 bp, Homo sapiens
tgttttaaaataaat

SEQ ID NO: 131216 - DNA, 15 bp, Homo sapiens
atgttttaaaataaa

SEQ ID NO: 131217 - DNA, 15 bp, Homo sapiens
tatgttttaaaataa

SEQ ID NO: 131218 - DNA, 15 bp, Homo sapiens
atatgttttaaaata

SEQ ID NO: 131219 - DNA, 15 bp, Homo sapiens
aatatgttttaaaat

SEQ ID NO: 131220 - DNA, 15 bp, Homo sapiens
taatatgttttaaaa

SEQ ID NO: 131221 - DNA, 15 bp, Homo sapiens
ttaatatgttttaaa

SEQ ID NO: 131222 - DNA, 15 bp, Homo sapiens
tttaatatgttttaa

SEQ ID NO: 131223 - DNA, 15 bp, Homo sapiens
gtttaatatgtttta

SEQ ID NO: 131224 - DNA, 15 bp, Homo sapiens
agtttaatatgtttt

SEQ ID NO: 131225 - DNA, 15 bp, Homo sapiens
aagtttaatatgttt

SEQ ID NO: 131226 - DNA, 15 bp, Homo sapiens
aaagtttaatatgtt

SEQ ID NO: 131227 - DNA, 15 bp, Homo sapiens
caaagtttaatatgt

SEQ ID NO: 131228 - DNA, 15 bp, Homo sapiens
ccaaagtttaatatg

SEQ ID NO: 131229 - DNA, 15 bp, Homo sapiens
tccaaagtttaatat

SEQ ID NO: 131230 - DNA, 15 bp, Homo sapiens
ttccaaagtttaata

SEQ ID NO: 131231 - DNA, 15 bp, Homo sapiens
attccaaagtttaat

SEQ ID NO: 131232 - DNA, 15 bp, Homo sapiens
gattccaaagtttaa

SEQ ID NO: 131233 - DNA, 15 bp, Homo sapiens
tgattccaaagttta

SEQ ID NO: 131234 - DNA, 15 bp, Homo sapiens
atgattccaaagttt

SEQ ID NO: 131235 - DNA, 15 bp, Homo sapiens
gatgattccaaagtt

SEQ ID NO: 131236 - DNA, 15 bp, Homo sapiens
agatgattccaaagt

SEQ ID NO: 131237 - DNA, 15 bp, Homo sapiens
tagatgattccaaag

SEQ ID NO: 131238 - DNA, 15 bp, Homo sapiens
ttagatgattccaaa

SEQ ID NO: 131239 - DNA, 15 bp, Homo sapiens
tttagatgattccaa

SEQ ID NO: 131240 - DNA, 15 bp, Homo sapiens
atttagatgattcca

SEQ ID NO: 131241 - DNA, 15 bp, Homo sapiens
catttagatgattcc

SEQ ID NO: 131242 - DNA, 15 bp, Homo sapiens
gcatttagatgattc

SEQ ID NO: 131243 - DNA, 15 bp, Homo sapiens
ggcatttagatgatt

SEQ ID NO: 131244 - DNA, 15 bp, Homo sapiens
tggcatttagatgat

SEQ ID NO: 131245 - DNA, 15 bp, Homo sapiens
ctggcatttagatga

SEQ ID NO: 131246 - DNA, 15 bp, Homo sapiens
cctggcatttagatg

SEQ ID NO: 131247 - DNA, 15 bp, Homo sapiens
tcctggcatttagat

SEQ ID NO: 131248 - DNA, 15 bp, Homo sapiens
ctcctggcatttaga

SEQ ID NO: 131249 - DNA, 15 bp, Homo sapiens
actcctggcatttag

SEQ ID NO: 131250 - DNA, 15 bp, Homo sapiens
tactcctggcattta

SEQ ID NO: 131251 - DNA, 15 bp, Homo sapiens
atactcctggcattt

SEQ ID NO: 131252 - DNA, 15 bp, Homo sapiens
catactcctggcatt

SEQ ID NO: 131253 - DNA, 15 bp, Homo sapiens
gcatactcctggcat

SEQ ID NO: 131254 - DNA, 15 bp, Homo sapiens
ggcatactcctggca

SEQ ID NO: 131255 - DNA, 15 bp, Homo sapiens
tggcatactcctggc

SEQ ID NO: 131256 - DNA, 15 bp, Homo sapiens
atggcatactcctgg

SEQ ID NO: 131257 - DNA, 15 bp, Homo sapiens
gatggcatactcctg

SEQ ID NO: 131258 - DNA, 15 bp, Homo sapiens
agatggcatactcct

SEQ ID NO: 131259 - DNA, 15 bp, Homo sapiens
tagatggcatactcc

SEQ ID NO: 131260 - DNA, 15 bp, Homo sapiens
gtagatggcatactc

SEQ ID NO: 131261 - DNA, 15 bp, Homo sapiens
agtagatggcatact

SEQ ID NO: 131262 - DNA, 15 bp, Homo sapiens
cagtagatggcatac

SEQ ID NO: 131263 - DNA, 15 bp, Homo sapiens
tcagtagatggcata

SEQ ID NO: 131264 - DNA, 15 bp, Homo sapiens
ttcagtagatggcat

SEQ ID NO: 131265 - DNA, 15 bp, Homo sapiens
tttcagtagatggca

SEQ ID NO: 131266 - DNA, 15 bp, Homo sapiens
atttcagtagatggc

SEQ ID NO: 131267 - DNA, 15 bp, Homo sapiens
catttcagtagatgg

SEQ ID NO: 131268 - DNA, 15 bp, Homo sapiens
acatttcagtagatg

SEQ ID NO: 131269 - DNA, 15 bp, Homo sapiens
aacatttcagtagat

SEQ ID NO: 131270 - DNA, 15 bp, Homo sapiens
taacatttcagtaga

SEQ ID NO: 131271 - DNA, 15 bp, Homo sapiens
ataacatttcagtag

SEQ ID NO: 131272 - DNA, 15 bp, Homo sapiens
gataacatttcagta

SEQ ID NO: 131273 - DNA, 15 bp, Homo sapiens
ggataacatttcagt

SEQ ID NO: 131274 - DNA, 15 bp, Homo sapiens
tggataacatttcag

SEQ ID NO: 131275 - DNA, 15 bp, Homo sapiens
ttggataacatttca

SEQ ID NO: 131276 - DNA, 15 bp, Homo sapiens
attggataacatttc

SEQ ID NO: 131277 - DNA, 15 bp, Homo sapiens
aattggataacattt

SEQ ID NO: 131278 - DNA, 15 bp, Homo sapiens
taattggataacatt

SEQ ID NO: 131279 - DNA, 15 bp, Homo sapiens
ataattggataacat

SEQ ID NO: 131280 - DNA, 15 bp, Homo sapiens
gataattggataaca

SEQ ID NO: 131281 - DNA, 15 bp, Homo sapiens
tgataattggataac

SEQ ID NO: 131282 - DNA, 15 bp, Homo sapiens
atgataattggataa

SEQ ID NO: 131283 - DNA, 15 bp, Homo sapiens
aatgataattggata

SEQ ID NO: 131284 - DNA, 15 bp, Homo sapiens
aaatgataattggat

SEQ ID NO: 131285 - DNA, 15 bp, Homo sapiens
aaaatgataattgga

SEQ ID NO: 131286 - DNA, 15 bp, Homo sapiens
aaaaatgataattgg

SEQ ID NO: 131287 - DNA, 15 bp, Homo sapiens
aaaaaatgataattg

SEQ ID NO: 131288 - DNA, 15 bp, Homo sapiens
taaaaaatgataatt

SEQ ID NO: 131289 - DNA, 15 bp, Homo sapiens
ttaaaaaatgataat

SEQ ID NO: 131290 - DNA, 15 bp, Homo sapiens
tttaaaaaatgataa

SEQ ID NO: 131291 - DNA, 15 bp, Homo sapiens
ttttaaaaaatgata

SEQ ID NO: 131292 - DNA, 15 bp, Homo sapiens
attttaaaaaatgat

SEQ ID NO: 131293 - DNA, 15 bp, Homo sapiens
tattttaaaaaatga

SEQ ID NO: 131294 - DNA, 15 bp, Homo sapiens
ctattttaaaaaatg

SEQ ID NO: 131295 - DNA, 15 bp, Homo sapiens
actattttaaaaaat

SEQ ID NO: 131296 - DNA, 15 bp, Homo sapiens
cactattttaaaaaa

SEQ ID NO: 131297 - DNA, 15 bp, Homo sapiens
acactattttaaaaa

SEQ ID NO: 131298 - DNA, 15 bp, Homo sapiens
aacactattttaaaa

SEQ ID NO: 131299 - DNA, 15 bp, Homo sapiens
aaacactattttaaa

SEQ ID NO: 131300 - DNA, 15 bp, Homo sapiens
aaaacactattttaa

SEQ ID NO: 131301 - DNA, 15 bp, Homo sapiens
gaaaacactatttta

SEQ ID NO: 131302 - DNA, 15 bp, Homo sapiens
ggaaaacactatttt

SEQ ID NO: 131303 - DNA, 15 bp, Homo sapiens
tggaaaacactattt

SEQ ID NO: 131304 - DNA, 15 bp, Homo sapiens
atggaaaacactatt

SEQ ID NO: 131305 - DNA, 15 bp, Homo sapiens
catggaaaacactat

SEQ ID NO: 131306 - DNA, 15 bp, Homo sapiens
tcatggaaaacacta

SEQ ID NO: 131307 - DNA, 15 bp, Homo sapiens
atcatggaaaacact

SEQ ID NO: 131308 - DNA, 15 bp, Homo sapiens
tatcatggaaaacac

SEQ ID NO: 131309 - DNA, 15 bp, Homo sapiens
atatcatggaaaaca

SEQ ID NO: 131310 - DNA, 15 bp, Homo sapiens
aatatcatggaaaac

SEQ ID NO: 131311 - DNA, 15 bp, Homo sapiens
aaatatcatggaaaa

SEQ ID NO: 131312 - DNA, 15 bp, Homo sapiens
taaatatcatggaaa

SEQ ID NO: 131313 - DNA, 15 bp, Homo sapiens
ttaaatatcatggaa

SEQ ID NO: 131314 - DNA, 15 bp, Homo sapiens
attaaatatcatgga

SEQ ID NO: 131315 - DNA, 15 bp, Homo sapiens
cattaaatatcatgg

SEQ ID NO: 131316 - DNA, 15 bp, Homo sapiens
tcattaaatatcatg

SEQ ID NO: 131317 - DNA, 15 bp, Homo sapiens
gtcattaaatatcat

SEQ ID NO: 131318 - DNA, 15 bp, Homo sapiens
agtcattaaatatca

SEQ ID NO: 131319 - DNA, 15 bp, Homo sapiens
aagtcattaaatatc

SEQ ID NO: 131320 - DNA, 15 bp, Homo sapiens
taagtcattaaatat

SEQ ID NO: 131321 - DNA, 15 bp, Homo sapiens
ctaagtcattaaata

SEQ ID NO: 131322 - DNA, 15 bp, Homo sapiens
tctaagtcattaaat

SEQ ID NO: 131323 - DNA, 15 bp, Homo sapiens
ctctaagtcattaaa

SEQ ID NO: 131324 - DNA, 15 bp, Homo sapiens
tctctaagtcattaa

SEQ ID NO: 131325 - DNA, 15 bp, Homo sapiens
ttctctaagtcatta

SEQ ID NO: 131326 - DNA, 15 bp, Homo sapiens
tttctctaagtcatt

SEQ ID NO: 131327 - DNA, 15 bp, Homo sapiens
ttttctctaagtcat

SEQ ID NO: 131328 - DNA, 15 bp, Homo sapiens
attttctctaagtca

SEQ ID NO: 131329 - DNA, 15 bp, Homo sapiens
cattttctctaagtc

SEQ ID NO: 131330 - DNA, 15 bp, Homo sapiens
gcattttctctaagt

SEQ ID NO: 131331 - DNA, 15 bp, Homo sapiens
agcattttctctaag

SEQ ID NO: 131332 - DNA, 15 bp, Homo sapiens
tagcattttctctaa

SEQ ID NO: 131333 - DNA, 15 bp, Homo sapiens
ttagcattttctcta

SEQ ID NO: 131334 - DNA, 15 bp, Homo sapiens
gttagcattttctct

SEQ ID NO: 131335 - DNA, 15 bp, Homo sapiens
tgttagcattttctc

SEQ ID NO: 131336 - DNA, 15 bp, Homo sapiens
ctgttagcattttct

SEQ ID NO: 131337 - DNA, 15 bp, Homo sapiens
actgttagcattttc

SEQ ID NO: 131338 - DNA, 15 bp, Homo sapiens
aactgttagcatttt

SEQ ID NO: 131339 - DNA, 15 bp, Homo sapiens
aaactgttagcattt

SEQ ID NO: 131340 - DNA, 15 bp, Homo sapiens
gaaactgttagcatt

SEQ ID NO: 131341 - DNA, 15 bp, Homo sapiens
tgaaactgttagcat

SEQ ID NO: 131342 - DNA, 15 bp, Homo sapiens
atgaaactgttagca

SEQ ID NO: 131343 - DNA, 15 bp, Homo sapiens
catgaaactgttagc

SEQ ID NO: 131344 - DNA, 15 bp, Homo sapiens
acatgaaactgttag

SEQ ID NO: 131345 - DNA, 15 bp, Homo sapiens
aacatgaaactgtta

SEQ ID NO: 131346 - DNA, 15 bp, Homo sapiens
taacatgaaactgtt

SEQ ID NO: 131347 - DNA, 15 bp, Homo sapiens
ttaacatgaaactgt

SEQ ID NO: 131348 - DNA, 15 bp, Homo sapiens
cttaacatgaaactg

SEQ ID NO: 131349 - DNA, 15 bp, Homo sapiens
ccttaacatgaaact

SEQ ID NO: 131350 - DNA, 15 bp, Homo sapiens
cccttaacatgaaac

SEQ ID NO: 131351 - DNA, 15 bp, Homo sapiens
tcccttaacatgaaa

SEQ ID NO: 131352 - DNA, 15 bp, Homo sapiens
ttcccttaacatgaa

SEQ ID NO: 131353 - DNA, 15 bp, Homo sapiens
tttcccttaacatga

SEQ ID NO: 131354 - DNA, 15 bp, Homo sapiens
ttttcccttaacatg

SEQ ID NO: 131355 - DNA, 15 bp, Homo sapiens
attttcccttaacat

SEQ ID NO: 131356 - DNA, 15 bp, Homo sapiens
tattttcccttaaca

SEQ ID NO: 131357 - DNA, 15 bp, Homo sapiens
ctattttcccttaac

SEQ ID NO: 131358 - DNA, 15 bp, Homo sapiens
cctattttcccttaa

SEQ ID NO: 131359 - DNA, 15 bp, Homo sapiens
tcctattttccctta

SEQ ID NO: 131360 - DNA, 15 bp, Homo sapiens
atcctattttccctt

SEQ ID NO: 131361 - DNA, 15 bp, Homo sapiens
tatcctattttccct

SEQ ID NO: 131362 - DNA, 15 bp, Homo sapiens
ttatcctattttccc

SEQ ID NO: 131363 - DNA, 15 bp, Homo sapiens
tttatcctattttcc

SEQ ID NO: 131364 - DNA, 15 bp, Homo sapiens
ttttatcctattttc

SEQ ID NO: 131365 - DNA, 15 bp, Homo sapiens
cttttatcctatttt

SEQ ID NO: 131366 - DNA, 15 bp, Homo sapiens
acttttatcctattt

SEQ ID NO: 131367 - DNA, 15 bp, Homo sapiens
aacttttatcctatt

SEQ ID NO: 131368 - DNA, 15 bp, Homo sapiens
taacttttatcctat

SEQ ID NO: 131369 - DNA, 15 bp, Homo sapiens
ctaacttttatccta

SEQ ID NO: 131370 - DNA, 15 bp, Homo sapiens
tctaacttttatcct

SEQ ID NO: 131371 - DNA, 15 bp, Homo sapiens
atctaacttttatcc

SEQ ID NO: 131372 - DNA, 15 bp, Homo sapiens
catctaacttttatc

SEQ ID NO: 131373 - DNA, 15 bp, Homo sapiens
acatctaacttttat

SEQ ID NO: 131374 - DNA, 15 bp, Homo sapiens
aacatctaactttta

SEQ ID NO: 131375 - DNA, 15 bp, Homo sapiens
aaacatctaactttt

SEQ ID NO: 131376 - DNA, 15 bp, Homo sapiens
taaacatctaacttt

SEQ ID NO: 131377 - DNA, 15 bp, Homo sapiens
ttaaacatctaactt

SEQ ID NO: 131378 - DNA, 15 bp, Homo sapiens
attaaacatctaact

SEQ ID NO: 131379 - DNA, 15 bp, Homo sapiens
gattaaacatctaac

SEQ ID NO: 131380 - DNA, 15 bp, Homo sapiens
agattaaacatctaa

SEQ ID NO: 131381 - DNA, 15 bp, Homo sapiens
tagattaaacatcta

SEQ ID NO: 131382 - DNA, 15 bp, Homo sapiens
ttagattaaacatct

SEQ ID NO: 131383 - DNA, 15 bp, Homo sapiens
gttagattaaacatc

SEQ ID NO: 131384 - DNA, 15 bp, Homo sapiens
ggttagattaaacat

SEQ ID NO: 131385 - DNA, 15 bp, Homo sapiens
gggttagattaaaca

SEQ ID NO: 131386 - DNA, 15 bp, Homo sapiens
agggttagattaaac

SEQ ID NO: 131387 - DNA, 15 bp, Homo sapiens
tagggttagattaaa

SEQ ID NO: 131388 - DNA, 15 bp, Homo sapiens
ttagggttagattaa

SEQ ID NO: 131389 - DNA, 15 bp, Homo sapiens
attagggttagatta

SEQ ID NO: 131390 - DNA, 15 bp, Homo sapiens
aattagggttagatt

SEQ ID NO: 131391 - DNA, 15 bp, Homo sapiens
aaattagggttagat

SEQ ID NO: 131392 - DNA, 15 bp, Homo sapiens
aaaattagggttaga

SEQ ID NO: 131393 - DNA, 15 bp, Homo sapiens
caaaattagggttag

SEQ ID NO: 131394 - DNA, 15 bp, Homo sapiens
gcaaaattagggtta

SEQ ID NO: 131395 - DNA, 15 bp, Homo sapiens
tgcaaaattagggtt

SEQ ID NO: 131396 - DNA, 15 bp, Homo sapiens
ctgcaaaattagggt

SEQ ID NO: 131397 - DNA, 15 bp, Homo sapiens
tctgcaaaattaggg

SEQ ID NO: 131398 - DNA, 15 bp, Homo sapiens
ttctgcaaaattagg

SEQ ID NO: 131399 - DNA, 15 bp, Homo sapiens
tttctgcaaaattag

SEQ ID NO: 131400 - DNA, 15 bp, Homo sapiens
atttctgcaaaatta

SEQ ID NO: 131401 - DNA, 15 bp, Homo sapiens
tatttctgcaaaatt

SEQ ID NO: 131402 - DNA, 15 bp, Homo sapiens
gtatttctgcaaaat

SEQ ID NO: 131403 - DNA, 15 bp, Homo sapiens
tgtatttctgcaaaa

SEQ ID NO: 131404 - DNA, 15 bp, Homo sapiens
gtgtatttctgcaaa

SEQ ID NO: 131405 - DNA, 15 bp, Homo sapiens
tgtgtatttctgcaa

SEQ ID NO: 131406 - DNA, 15 bp, Homo sapiens
gtgtgtatttctgca

SEQ ID NO: 131407 - DNA, 15 bp, Homo sapiens
ggtgtgtatttctgc

SEQ ID NO: 131408 - DNA, 15 bp, Homo sapiens
gggtgtgtatttctg

SEQ ID NO: 131409 - DNA, 15 bp, Homo sapiens
tgggtgtgtatttct

SEQ ID NO: 131410 - DNA, 15 bp, Homo sapiens
ttgggtgtgtatttc

SEQ ID NO: 131411 - DNA, 15 bp, Homo sapiens
cttgggtgtgtattt

SEQ ID NO: 131412 - DNA, 15 bp, Homo sapiens
ccttgggtgtgtatt

SEQ ID NO: 131413 - DNA, 15 bp, Homo sapiens
tccttgggtgtgtat

SEQ ID NO: 131414 - DNA, 15 bp, Homo sapiens
ttccttgggtgtgta

SEQ ID NO: 131415 - DNA, 15 bp, Homo sapiens
tttccttgggtgtgt

SEQ ID NO: 131416 - DNA, 15 bp, Homo sapiens
ttttccttgggtgtg

SEQ ID NO: 131417 - DNA, 15 bp, Homo sapiens
cttttccttgggtgt

SEQ ID NO: 131418 - DNA, 15 bp, Homo sapiens
ccttttccttgggtg

SEQ ID NO: 131419 - DNA, 15 bp, Homo sapiens
accttttccttgggt

SEQ ID NO: 131420 - DNA, 15 bp, Homo sapiens
taccttttccttggg

SEQ ID NO: 131421 - DNA, 15 bp, Homo sapiens
ataccttttccttgg

SEQ ID NO: 131422 - DNA, 15 bp, Homo sapiens
cataccttttccttg

SEQ ID NO: 131423 - DNA, 15 bp, Homo sapiens
tcataccttttcctt

SEQ ID NO: 131424 - DNA, 15 bp, Homo sapiens
ctcataccttttcct

SEQ ID NO: 131425 - DNA, 15 bp, Homo sapiens
tctcataccttttcc

SEQ ID NO: 131426 - DNA, 15 bp, Homo sapiens
atctcataccttttc

SEQ ID NO: 131427 - DNA, 15 bp, Homo sapiens
tatctcatacctttt

SEQ ID NO: 131428 - DNA, 15 bp, Homo sapiens
ttatctcataccttt

SEQ ID NO: 131429 - DNA, 15 bp, Homo sapiens
tttatctcatacctt

SEQ ID NO: 131430 - DNA, 15 bp, Homo sapiens
atttatctcatacct

SEQ ID NO: 131431 - DNA, 15 bp, Homo sapiens
tatttatctcatacc

SEQ ID NO: 131432 - DNA, 15 bp, Homo sapiens
atatttatctcatac

SEQ ID NO: 131433 - DNA, 15 bp, Homo sapiens
tatatttatctcata

SEQ ID NO: 131434 - DNA, 15 bp, Homo sapiens
atatatttatctcat

SEQ ID NO: 131435 - DNA, 15 bp, Homo sapiens
tatatatttatctca

SEQ ID NO: 131436 - DNA, 15 bp, Homo sapiens
ttatatatttatctc

SEQ ID NO: 131437 - DNA, 15 bp, Homo sapiens
tttatatatttatct

SEQ ID NO: 131438 - DNA, 15 bp, Homo sapiens
ttttatatatttatc

SEQ ID NO: 131439 - DNA, 15 bp, Homo sapiens
tttttatatatttat

SEQ ID NO: 131440 - DNA, 15 bp, Homo sapiens
atttttatatattta

SEQ ID NO: 131441 - DNA, 15 bp, Homo sapiens
tatttttatatattt

SEQ ID NO: 131442 - DNA, 15 bp, Homo sapiens
atatttttatatatt

SEQ ID NO: 131443 - DNA, 15 bp, Homo sapiens
aatatttttatatat

SEQ ID NO: 131444 - DNA, 15 bp, Homo sapiens
taatatttttatata

SEQ ID NO: 131445 - DNA, 15 bp, Homo sapiens
ttaatatttttatat

SEQ ID NO: 131446 - DNA, 15 bp, Homo sapiens
attaatatttttata

SEQ ID NO: 131447 - DNA, 15 bp, Homo sapiens
tattaatatttttat

SEQ ID NO: 131448 - DNA, 15 bp, Homo sapiens
ctattaatattttta

SEQ ID NO: 131449 - DNA, 15 bp, Homo sapiens
actattaatattttt

SEQ ID NO: 131450 - DNA, 15 bp, Homo sapiens
cactattaatatttt

SEQ ID NO: 131451 - DNA, 15 bp, Homo sapiens
ccactattaatattt

SEQ ID NO: 131452 - DNA, 15 bp, Homo sapiens
accactattaatatt

SEQ ID NO: 131453 - DNA, 15 bp, Homo sapiens
aaccactattaatat

SEQ ID NO: 131454 - DNA, 15 bp, Homo sapiens
taaccactattaata

SEQ ID NO: 131455 - DNA, 15 bp, Homo sapiens
ataaccactattaat

SEQ ID NO: 131456 - DNA, 15 bp, Homo sapiens
aataaccactattaa

SEQ ID NO: 131457 - DNA, 15 bp, Homo sapiens
aaataaccactatta

SEQ ID NO: 131458 - DNA, 15 bp, Homo sapiens
aaaataaccactatt

SEQ ID NO: 131459 - DNA, 15 bp, Homo sapiens
caaaataaccactat

SEQ ID NO: 131460 - DNA, 15 bp, Homo sapiens
ccaaaataaccacta

SEQ ID NO: 131461 - DNA, 15 bp, Homo sapiens
cccaaaataaccact

SEQ ID NO: 131462 - DNA, 15 bp, Homo sapiens
ccccaaaataaccac

SEQ ID NO: 131463 - DNA, 15 bp, Homo sapiens
accccaaaataacca

SEQ ID NO: 131464 - DNA, 15 bp, Homo sapiens
caccccaaaataacc

SEQ ID NO: 131465 - DNA, 15 bp, Homo sapiens
ccaccccaaaataac

SEQ ID NO: 131466 - DNA, 15 bp, Homo sapiens
accaccccaaaataa

SEQ ID NO: 131467 - DNA, 15 bp, Homo sapiens
taccaccccaaaata

SEQ ID NO: 131468 - DNA, 15 bp, Homo sapiens
ttaccaccccaaaat

SEQ ID NO: 131469 - DNA, 15 bp, Homo sapiens
cttaccaccccaaaa

SEQ ID NO: 131470 - DNA, 15 bp, Homo sapiens
tcttaccaccccaaa

SEQ ID NO: 131471 - DNA, 15 bp, Homo sapiens
atcttaccaccccaa

SEQ ID NO: 131472 - DNA, 15 bp, Homo sapiens
aatcttaccacccca

SEQ ID NO: 131473 - DNA, 15 bp, Homo sapiens
gaatcttaccacccc

SEQ ID NO: 131474 - DNA, 15 bp, Homo sapiens
agaatcttaccaccc

SEQ ID NO: 131475 - DNA, 15 bp, Homo sapiens
tagaatcttaccacc

SEQ ID NO: 131476 - DNA, 15 bp, Homo sapiens
atagaatcttaccac

SEQ ID NO: 131477 - DNA, 15 bp, Homo sapiens
catagaatcttacca

SEQ ID NO: 131478 - DNA, 15 bp, Homo sapiens
acatagaatcttacc

SEQ ID NO: 131479 - DNA, 15 bp, Homo sapiens
cacatagaatcttac

SEQ ID NO: 131480 - DNA, 15 bp, Homo sapiens
tcacatagaatctta

SEQ ID NO: 131481 - DNA, 15 bp, Homo sapiens
gtcacatagaatctt

SEQ ID NO: 131482 - DNA, 15 bp, Homo sapiens
tgtcacatagaatct

SEQ ID NO: 131483 - DNA, 15 bp, Homo sapiens
atgtcacatagaatc

SEQ ID NO: 131484 - DNA, 15 bp, Homo sapiens
tatgtcacatagaat

SEQ ID NO: 131485 - DNA, 15 bp, Homo sapiens
atatgtcacatagaa

SEQ ID NO: 131486 - DNA, 15 bp, Homo sapiens
aatatgtcacataga

SEQ ID NO: 131487 - DNA, 15 bp, Homo sapiens
gaatatgtcacatag

SEQ ID NO: 131488 - DNA, 15 bp, Homo sapiens
agaatatgtcacata

SEQ ID NO: 131489 - DNA, 15 bp, Homo sapiens
aagaatatgtcacat

SEQ ID NO: 131490 - DNA, 15 bp, Homo sapiens
aaagaatatgtcaca

SEQ ID NO: 131491 - DNA, 15 bp, Homo sapiens
aaaagaatatgtcac

SEQ ID NO: 131492 - DNA, 15 bp, Homo sapiens
aaaaagaatatgtca

SEQ ID NO: 131493 - DNA, 15 bp, Homo sapiens
aaaaaagaatatgtc

SEQ ID NO: 131494 - DNA, 15 bp, Homo sapiens
gaaaaaagaatatgt

SEQ ID NO: 131495 - DNA, 15 bp, Homo sapiens
agaaaaaagaatatg

SEQ ID NO: 131496 - DNA, 15 bp, Homo sapiens
aagaaaaaagaatat

SEQ ID NO: 131497 - DNA, 15 bp, Homo sapiens
caagaaaaaagaata

SEQ ID NO: 131498 - DNA, 15 bp, Homo sapiens
acaagaaaaaagaat

SEQ ID NO: 131499 - DNA, 15 bp, Homo sapiens
gacaagaaaaaagaa

SEQ ID NO: 131500 - DNA, 15 bp, Homo sapiens
tgacaagaaaaaaga

SEQ ID NO: 131501 - DNA, 15 bp, Homo sapiens
gtgacaagaaaaaag

SEQ ID NO: 131502 - DNA, 15 bp, Homo sapiens
agtgacaagaaaaaa

SEQ ID NO: 131503 - DNA, 15 bp, Homo sapiens
cagtgacaagaaaaa

SEQ ID NO: 131504 - DNA, 15 bp, Homo sapiens
tcagtgacaagaaaa

SEQ ID NO: 131505 - DNA, 15 bp, Homo sapiens
gtcagtgacaagaaa

SEQ ID NO: 131506 - DNA, 15 bp, Homo sapiens
agtcagtgacaagaa

SEQ ID NO: 131507 - DNA, 15 bp, Homo sapiens
aagtcagtgacaaga

SEQ ID NO: 131508 - DNA, 15 bp, Homo sapiens
caagtcagtgacaag

SEQ ID NO: 131509 - DNA, 15 bp, Homo sapiens
tcaagtcagtgacaa

SEQ ID NO: 131510 - DNA, 15 bp, Homo sapiens
ttcaagtcagtgaca

SEQ ID NO: 131511 - DNA, 15 bp, Homo sapiens
cttcaagtcagtgac

SEQ ID NO: 131512 - DNA, 15 bp, Homo sapiens
gcttcaagtcagtga

SEQ ID NO: 131513 - DNA, 15 bp, Homo sapiens
agcttcaagtcagtg

SEQ ID NO: 131514 - DNA, 15 bp, Homo sapiens
aagcttcaagtcagt

SEQ ID NO: 131515 - DNA, 15 bp, Homo sapiens
taagcttcaagtcag

SEQ ID NO: 131516 - DNA, 15 bp, Homo sapiens
ataagcttcaagtca

SEQ ID NO: 131517 - DNA, 15 bp, Homo sapiens
tataagcttcaagtc

SEQ ID NO: 131518 - DNA, 15 bp, Homo sapiens
atataagcttcaagt

SEQ ID NO: 131519 - DNA, 15 bp, Homo sapiens
catataagcttcaag

SEQ ID NO: 131520 - DNA, 15 bp, Homo sapiens
tcatataagcttcaa

SEQ ID NO: 131521 - DNA, 15 bp, Homo sapiens
ttcatataagcttca

SEQ ID NO: 131522 - DNA, 15 bp, Homo sapiens
tttcatataagcttc

SEQ ID NO: 131523 - DNA, 15 bp, Homo sapiens
gtttcatataagctt

SEQ ID NO: 131524 - DNA, 15 bp, Homo sapiens
agtttcatataagct

SEQ ID NO: 131525 - DNA, 15 bp, Homo sapiens
aagtttcatataagc

SEQ ID NO: 131526 - DNA, 15 bp, Homo sapiens
aaagtttcatataag

SEQ ID NO: 131527 - DNA, 15 bp, Homo sapiens
aaaagtttcatataa

SEQ ID NO: 131528 - DNA, 15 bp, Homo sapiens
taaaagtttcatata

SEQ ID NO: 131529 - DNA, 15 bp, Homo sapiens
ataaaagtttcatat

SEQ ID NO: 131530 - DNA, 15 bp, Homo sapiens
tataaaagtttcata

SEQ ID NO: 131531 - DNA, 15 bp, Homo sapiens
atataaaagtttcat

SEQ ID NO: 131532 - DNA, 15 bp, Homo sapiens
aatataaaagtttca

SEQ ID NO: 131533 - DNA, 15 bp, Homo sapiens
gaatataaaagtttc

SEQ ID NO: 131534 - DNA, 15 bp, Homo sapiens
ggaatataaaagttt

SEQ ID NO: 131535 - DNA, 15 bp, Homo sapiens
tggaatataaaagtt

SEQ ID NO: 131536 - DNA, 15 bp, Homo sapiens
ttggaatataaaagt

SEQ ID NO: 131537 - DNA, 15 bp, Homo sapiens
tttggaatataaaag

SEQ ID NO: 131538 - DNA, 15 bp, Homo sapiens
ctttggaatataaaa

SEQ ID NO: 131539 - DNA, 15 bp, Homo sapiens
actttggaatataaa

SEQ ID NO: 131540 - DNA, 15 bp, Homo sapiens
aactttggaatataa

SEQ ID NO: 131541 - DNA, 15 bp, Homo sapiens
aaactttggaatata

SEQ ID NO: 131542 - DNA, 15 bp, Homo sapiens
taaactttggaatat

SEQ ID NO: 131543 - DNA, 15 bp, Homo sapiens
ataaactttggaata

SEQ ID NO: 131544 - DNA, 15 bp, Homo sapiens
tataaactttggaat

SEQ ID NO: 131545 - DNA, 15 bp, Homo sapiens
ttataaactttggaa

SEQ ID NO: 131546 - DNA, 15 bp, Homo sapiens
attataaactttgga

SEQ ID NO: 131547 - DNA, 15 bp, Homo sapiens
tattataaactttgg

SEQ ID NO: 131548 - DNA, 15 bp, Homo sapiens
gtattataaactttg

SEQ ID NO: 131549 - DNA, 15 bp, Homo sapiens
tgtattataaacttt

SEQ ID NO: 131550 - DNA, 15 bp, Homo sapiens
atgtattataaactt

SEQ ID NO: 131551 - DNA, 15 bp, Homo sapiens
tatgtattataaact

SEQ ID NO: 131552 - DNA, 15 bp, Homo sapiens
atatgtattataaac

SEQ ID NO: 131553 - DNA, 15 bp, Homo sapiens
catatgtattataaa

SEQ ID NO: 131554 - DNA, 15 bp, Homo sapiens
tcatatgtattataa

SEQ ID NO: 131555 - DNA, 15 bp, Homo sapiens
ttcatatgtattata

SEQ ID NO: 131556 - DNA, 15 bp, Homo sapiens
attcatatgtattat

SEQ ID NO: 131557 - DNA, 15 bp, Homo sapiens
aattcatatgtatta

SEQ ID NO: 131558 - DNA, 15 bp, Homo sapiens
taattcatatgtatt

SEQ ID NO: 131559 - DNA, 15 bp, Homo sapiens
ataattcatatgtat

SEQ ID NO: 131560 - DNA, 15 bp, Homo sapiens
aataattcatatgta

SEQ ID NO: 131561 - DNA, 15 bp, Homo sapiens
gaataattcatatgt

SEQ ID NO: 131562 - DNA, 15 bp, Homo sapiens
agaataattcatatg

SEQ ID NO: 131563 - DNA, 15 bp, Homo sapiens
aagaataattcatat

SEQ ID NO: 131564 - DNA, 15 bp, Homo sapiens
taagaataattcata

SEQ ID NO: 131565 - DNA, 15 bp, Homo sapiens
gtaagaataattcat

SEQ ID NO: 131566 - DNA, 15 bp, Homo sapiens
tgtaagaataattca

SEQ ID NO: 131567 - DNA, 15 bp, Homo sapiens
ttgtaagaataattc

SEQ ID NO: 131568 - DNA, 15 bp, Homo sapiens
cttgtaagaataatt

SEQ ID NO: 131569 - DNA, 15 bp, Homo sapiens
gcttgtaagaataat

SEQ ID NO: 131570 - DNA, 15 bp, Homo sapiens
tgcttgtaagaataa

SEQ ID NO: 131571 - DNA, 15 bp, Homo sapiens
ctgcttgtaagaata

SEQ ID NO: 131572 - DNA, 15 bp, Homo sapiens
tctgcttgtaagaat

SEQ ID NO: 131573 - DNA, 15 bp, Homo sapiens
ttctgcttgtaagaa

SEQ ID NO: 131574 - DNA, 15 bp, Homo sapiens
cttctgcttgtaaga

SEQ ID NO: 131575 - DNA, 15 bp, Homo sapiens
acttctgcttgtaag

SEQ ID NO: 131576 - DNA, 15 bp, Homo sapiens
tacttctgcttgtaa

SEQ ID NO: 131577 - DNA, 15 bp, Homo sapiens
ttacttctgcttgta

SEQ ID NO: 131578 - DNA, 15 bp, Homo sapiens
tttacttctgcttgt

SEQ ID NO: 131579 - DNA, 15 bp, Homo sapiens
atttacttctgcttg

SEQ ID NO: 131580 - DNA, 15 bp, Homo sapiens
tatttacttctgctt

SEQ ID NO: 131581 - DNA, 15 bp, Homo sapiens
atatttacttctgct

SEQ ID NO: 131582 - DNA, 15 bp, Homo sapiens
tatatttacttctgc

SEQ ID NO: 131583 - DNA, 15 bp, Homo sapiens
ttatatttacttctg

SEQ ID NO: 131584 - DNA, 15 bp, Homo sapiens
tttatatttacttct

SEQ ID NO: 131585 - DNA, 15 bp, Homo sapiens
ttttatatttacttc

SEQ ID NO: 131586 - DNA, 15 bp, Homo sapiens
attttatatttactt

SEQ ID NO: 131587 - DNA, 15 bp, Homo sapiens
tattttatatttact

SEQ ID NO: 131588 - DNA, 15 bp, Homo sapiens
ttattttatatttac

SEQ ID NO: 131589 - DNA, 15 bp, Homo sapiens
tttattttatattta

SEQ ID NO: 131590 - DNA, 15 bp, Homo sapiens
atttattttatattt

SEQ ID NO: 131591 - DNA, 15 bp, Homo sapiens
tatttattttatatt

SEQ ID NO: 131592 - DNA, 15 bp, Homo sapiens
atatttattttatat

SEQ ID NO: 131593 - DNA, 15 bp, Homo sapiens
gatatttattttata

SEQ ID NO: 131594 - DNA, 15 bp, Homo sapiens
agatatttattttat

SEQ ID NO: 131595 - DNA, 15 bp, Homo sapiens
tagatatttatttta

SEQ ID NO: 131596 - DNA, 15 bp, Homo sapiens
atagatatttatttt

SEQ ID NO: 131597 - DNA, 15 bp, Homo sapiens
tatagatatttattt

SEQ ID NO: 131598 - DNA, 15 bp, Homo sapiens
ttatagatatttatt

SEQ ID NO: 131599 - DNA, 15 bp, Homo sapiens
tttatagatatttat

SEQ ID NO: 131600 - DNA, 15 bp, Homo sapiens
ttttatagatattta

SEQ ID NO: 131601 - DNA, 15 bp, Homo sapiens
tttttatagatattt

SEQ ID NO: 131602 - DNA, 15 bp, Homo sapiens
atttttatagatatt

SEQ ID NO: 131603 - DNA, 15 bp, Homo sapiens
catttttatagatat

SEQ ID NO: 131604 - DNA, 15 bp, Homo sapiens
acatttttatagata

SEQ ID NO: 131605 - DNA, 15 bp, Homo sapiens
tacatttttatagat

SEQ ID NO: 131606 - DNA, 15 bp, Homo sapiens
ttacatttttataga

SEQ ID NO: 131607 - DNA, 15 bp, Homo sapiens
cttacatttttatag

SEQ ID NO: 131608 - DNA, 15 bp, Homo sapiens
gcttacatttttata

SEQ ID NO: 131609 - DNA, 15 bp, Homo sapiens
tgcttacatttttat

SEQ ID NO: 131610 - DNA, 15 bp, Homo sapiens
atgcttacattttta

SEQ ID NO: 131611 - DNA, 15 bp, Homo sapiens
catgcttacattttt

SEQ ID NO: 131612 - DNA, 15 bp, Homo sapiens
acatgcttacatttt

SEQ ID NO: 131613 - DNA, 15 bp, Homo sapiens
cacatgcttacattt

SEQ ID NO: 131614 - DNA, 15 bp, Homo sapiens
tcacatgcttacatt

SEQ ID NO: 131615 - DNA, 15 bp, Homo sapiens
ttcacatgcttacat

SEQ ID NO: 131616 - DNA, 15 bp, Homo sapiens
tttcacatgcttaca

SEQ ID NO: 131617 - DNA, 15 bp, Homo sapiens
ctttcacatgcttac

SEQ ID NO: 131618 - DNA, 15 bp, Homo sapiens
gctttcacatgctta

SEQ ID NO: 131619 - DNA, 15 bp, Homo sapiens
agctttcacatgctt

SEQ ID NO: 131620 - DNA, 15 bp, Homo sapiens
aagctttcacatgct

SEQ ID NO: 131621 - DNA, 15 bp, Homo sapiens
caagctttcacatgc

SEQ ID NO: 131622 - DNA, 15 bp, Homo sapiens
acaagctttcacatg

SEQ ID NO: 131623 - DNA, 15 bp, Homo sapiens
aacaagctttcacat

SEQ ID NO: 131624 - DNA, 15 bp, Homo sapiens
gaacaagctttcaca

SEQ ID NO: 131625 - DNA, 15 bp, Homo sapiens
agaacaagctttcac

SEQ ID NO: 131626 - DNA, 15 bp, Homo sapiens
cagaacaagctttca

SEQ ID NO: 131627 - DNA, 15 bp, Homo sapiens
acagaacaagctttc

SEQ ID NO: 131628 - DNA, 15 bp, Homo sapiens
tacagaacaagcttt

SEQ ID NO: 131629 - DNA, 15 bp, Homo sapiens
ttacagaacaagctt

SEQ ID NO: 131630 - DNA, 15 bp, Homo sapiens
cttacagaacaagct

SEQ ID NO: 131631 - DNA, 15 bp, Homo sapiens
acttacagaacaagc

SEQ ID NO: 131632 - DNA, 15 bp, Homo sapiens
gacttacagaacaag

SEQ ID NO: 131633 - DNA, 15 bp, Homo sapiens
ggacttacagaacaa

SEQ ID NO: 131634 - DNA, 15 bp, Homo sapiens
gggacttacagaaca

SEQ ID NO: 131635 - DNA, 15 bp, Homo sapiens
tgggacttacagaac

SEQ ID NO: 131636 - DNA, 15 bp, Homo sapiens
gtgggacttacagaa

SEQ ID NO: 131637 - DNA, 15 bp, Homo sapiens
agtgggacttacaga

SEQ ID NO: 131638 - DNA, 15 bp, Homo sapiens
gagtgggacttacag

SEQ ID NO: 131639 - DNA, 15 bp, Homo sapiens
agagtgggacttaca

SEQ ID NO: 131640 - DNA, 15 bp, Homo sapiens
gagagtgggacttac

SEQ ID NO: 131641 - DNA, 15 bp, Homo sapiens
ggagagtgggactta

SEQ ID NO: 131642 - DNA, 15 bp, Homo sapiens
tggagagtgggactt

SEQ ID NO: 131643 - DNA, 15 bp, Homo sapiens
ctggagagtgggact

SEQ ID NO: 131644 - DNA, 15 bp, Homo sapiens
gctggagagtgggac

SEQ ID NO: 131645 - DNA, 15 bp, Homo sapiens
tgctggagagtggga

SEQ ID NO: 131646 - DNA, 15 bp, Homo sapiens
atgctggagagtggg

SEQ ID NO: 131647 - DNA, 15 bp, Homo sapiens
aatgctggagagtgg

SEQ ID NO: 131648 - DNA, 15 bp, Homo sapiens
taatgctggagagtg

SEQ ID NO: 131649 - DNA, 15 bp, Homo sapiens
ataatgctggagagt

SEQ ID NO: 131650 - DNA, 15 bp, Homo sapiens
tataatgctggagag

SEQ ID NO: 131651 - DNA, 15 bp, Homo sapiens
ttataatgctggaga

SEQ ID NO: 131652 - DNA, 15 bp, Homo sapiens
tttataatgctggag

SEQ ID NO: 131653 - DNA, 15 bp, Homo sapiens
atttataatgctgga

SEQ ID NO: 131654 - DNA, 15 bp, Homo sapiens
aatttataatgctgg

SEQ ID NO: 131655 - DNA, 15 bp, Homo sapiens
taatttataatgctg

SEQ ID NO: 131656 - DNA, 15 bp, Homo sapiens
gtaatttataatgct

SEQ ID NO: 131657 - DNA, 15 bp, Homo sapiens
tgtaatttataatgc

SEQ ID NO: 131658 - DNA, 15 bp, Homo sapiens
ttgtaatttataatg

SEQ ID NO: 131659 - DNA, 15 bp, Homo sapiens
tttgtaatttataat

SEQ ID NO: 131660 - DNA, 15 bp, Homo sapiens
gtttgtaatttataa

SEQ ID NO: 131661 - DNA, 15 bp, Homo sapiens
tgtttgtaatttata

SEQ ID NO: 131662 - DNA, 15 bp, Homo sapiens
ctgtttgtaatttat

SEQ ID NO: 131663 - DNA, 15 bp, Homo sapiens
tctgtttgtaattta

SEQ ID NO: 131664 - DNA, 15 bp, Homo sapiens
atctgtttgtaattt

SEQ ID NO: 131665 - DNA, 15 bp, Homo sapiens
tatctgtttgtaatt

SEQ ID NO: 131666 - DNA, 15 bp, Homo sapiens
ttatctgtttgtaat

SEQ ID NO: 131667 - DNA, 15 bp, Homo sapiens
tttatctgtttgtaa

SEQ ID NO: 131668 - DNA, 15 bp, Homo sapiens
atttatctgtttgta

SEQ ID NO: 131669 - DNA, 15 bp, Homo sapiens
gatttatctgtttgt

SEQ ID NO: 131670 - DNA, 15 bp, Homo sapiens
tgatttatctgtttg

SEQ ID NO: 131671 - DNA, 15 bp, Homo sapiens
gtgatttatctgttt

SEQ ID NO: 131672 - DNA, 15 bp, Homo sapiens
agtgatttatctgtt

SEQ ID NO: 131673 - DNA, 15 bp, Homo sapiens
aagtgatttatctgt

SEQ ID NO: 131674 - DNA, 15 bp, Homo sapiens
gaagtgatttatctg

SEQ ID NO: 131675 - DNA, 15 bp, Homo sapiens
tgaagtgatttatct

SEQ ID NO: 131676 - DNA, 15 bp, Homo sapiens
ctgaagtgatttatc

SEQ ID NO: 131677 - DNA, 15 bp, Homo sapiens
tctgaagtgatttat

SEQ ID NO: 131678 - DNA, 15 bp, Homo sapiens
ctctgaagtgattta

SEQ ID NO: 131679 - DNA, 15 bp, Homo sapiens
cctctgaagtgattt

SEQ ID NO: 131680 - DNA, 15 bp, Homo sapiens
acctctgaagtgatt

SEQ ID NO: 131681 - DNA, 15 bp, Homo sapiens
tacctctgaagtgat

SEQ ID NO: 131682 - DNA, 15 bp, Homo sapiens
ttacctctgaagtga

SEQ ID NO: 131683 - DNA, 15 bp, Homo sapiens
gttacctctgaagtg

SEQ ID NO: 131684 - DNA, 15 bp, Homo sapiens
tgttacctctgaagt

SEQ ID NO: 131685 - DNA, 15 bp, Homo sapiens
ctgttacctctgaag

SEQ ID NO: 131686 - DNA, 15 bp, Homo sapiens
tctgttacctctgaa

SEQ ID NO: 131687 - DNA, 15 bp, Homo sapiens
gtctgttacctctga

SEQ ID NO: 131688 - DNA, 15 bp, Homo sapiens
agtctgttacctctg

SEQ ID NO: 131689 - DNA, 15 bp, Homo sapiens
aagtctgttacctct

SEQ ID NO: 131690 - DNA, 15 bp, Homo sapiens
aaagtctgttacctc

SEQ ID NO: 131691 - DNA, 15 bp, Homo sapiens
gaaagtctgttacct

SEQ ID NO: 131692 - DNA, 15 bp, Homo sapiens
ggaaagtctgttacc

SEQ ID NO: 131693 - DNA, 15 bp, Homo sapiens
aggaaagtctgttac

SEQ ID NO: 131694 - DNA, 15 bp, Homo sapiens
aaggaaagtctgtta

SEQ ID NO: 131695 - DNA, 15 bp, Homo sapiens
caaggaaagtctgtt

SEQ ID NO: 131696 - DNA, 15 bp, Homo sapiens
acaaggaaagtctgt

SEQ ID NO: 131697 - DNA, 15 bp, Homo sapiens
gacaaggaaagtctg

SEQ ID NO: 131698 - DNA, 15 bp, Homo sapiens
cgacaaggaaagtct

SEQ ID NO: 131699 - DNA, 15 bp, Homo sapiens
acgacaaggaaagtc

SEQ ID NO: 131700 - DNA, 15 bp, Homo sapiens
cacgacaaggaaagt

SEQ ID NO: 131701 - DNA, 15 bp, Homo sapiens
gcacgacaaggaaag

SEQ ID NO: 131702 - DNA, 15 bp, Homo sapiens
ggcacgacaaggaaa

SEQ ID NO: 131703 - DNA, 15 bp, Homo sapiens
tggcacgacaaggaa

SEQ ID NO: 131704 - DNA, 15 bp, Homo sapiens
ttggcacgacaagga

SEQ ID NO: 131705 - DNA, 15 bp, Homo sapiens
cttggcacgacaagg

SEQ ID NO: 131706 - DNA, 15 bp, Homo sapiens
acttggcacgacaag

SEQ ID NO: 131707 - DNA, 15 bp, Homo sapiens
tacttggcacgacaa

SEQ ID NO: 131708 - DNA, 15 bp, Homo sapiens
ttacttggcacgaca

SEQ ID NO: 131709 - DNA, 15 bp, Homo sapiens
gttacttggcacgac

SEQ ID NO: 131710 - DNA, 15 bp, Homo sapiens
ggttacttggcacga

SEQ ID NO: 131711 - DNA, 15 bp, Homo sapiens
aggttacttggcacg

SEQ ID NO: 131712 - DNA, 15 bp, Homo sapiens
caggttacttggcac

SEQ ID NO: 131713 - DNA, 15 bp, Homo sapiens
ccaggttacttggca

SEQ ID NO: 131714 - DNA, 15 bp, Homo sapiens
gccaggttacttggc

SEQ ID NO: 131715 - DNA, 15 bp, Homo sapiens
tgccaggttacttgg

SEQ ID NO: 131716 - DNA, 15 bp, Homo sapiens
ctgccaggttacttg

SEQ ID NO: 131717 - DNA, 15 bp, Homo sapiens
tctgccaggttactt

SEQ ID NO: 131718 - DNA, 15 bp, Homo sapiens
ctctgccaggttact

SEQ ID NO: 131719 - DNA, 15 bp, Homo sapiens
gctctgccaggttac

SEQ ID NO: 131720 - DNA, 15 bp, Homo sapiens
agctctgccaggtta

SEQ ID NO: 131721 - DNA, 15 bp, Homo sapiens
tagctctgccaggtt

SEQ ID NO: 131722 - DNA, 15 bp, Homo sapiens
ttagctctgccaggt

SEQ ID NO: 131723 - DNA, 15 bp, Homo sapiens
cttagctctgccagg

SEQ ID NO: 131724 - DNA, 15 bp, Homo sapiens
gcttagctctgccag

SEQ ID NO: 131725 - DNA, 15 bp, Homo sapiens
ggcttagctctgcca

SEQ ID NO: 131726 - DNA, 15 bp, Homo sapiens
aggcttagctctgcc

SEQ ID NO: 131727 - DNA, 15 bp, Homo sapiens
gaggcttagctctgc

SEQ ID NO: 131728 - DNA, 15 bp, Homo sapiens
tgaggcttagctctg

SEQ ID NO: 131729 - DNA, 15 bp, Homo sapiens
ctgaggcttagctct

SEQ ID NO: 131730 - DNA, 15 bp, Homo sapiens
actgaggcttagctc

SEQ ID NO: 131731 - DNA, 15 bp, Homo sapiens
aactgaggcttagct

SEQ ID NO: 131732 - DNA, 15 bp, Homo sapiens
aaactgaggcttagc

SEQ ID NO: 131733 - DNA, 15 bp, Homo sapiens
aaaactgaggcttag

SEQ ID NO: 131734 - DNA, 15 bp, Homo sapiens
gaaaactgaggctta

SEQ ID NO: 131735 - DNA, 15 bp, Homo sapiens
agaaaactgaggctt

SEQ ID NO: 131736 - DNA, 15 bp, Homo sapiens
gagaaaactgaggct

SEQ ID NO: 131737 - DNA, 15 bp, Homo sapiens
tgagaaaactgaggc

SEQ ID NO: 131738 - DNA, 15 bp, Homo sapiens
gtgagaaaactgagg

SEQ ID NO: 131739 - DNA, 15 bp, Homo sapiens
ggtgagaaaactgag

SEQ ID NO: 131740 - DNA, 15 bp, Homo sapiens
aggtgagaaaactga

SEQ ID NO: 131741 - DNA, 15 bp, Homo sapiens
caggtgagaaaactg

SEQ ID NO: 131742 - DNA, 15 bp, Homo sapiens
acaggtgagaaaact

SEQ ID NO: 131743 - DNA, 15 bp, Homo sapiens
tacaggtgagaaaac

SEQ ID NO: 131744 - DNA, 15 bp, Homo sapiens
ttacaggtgagaaaa

SEQ ID NO: 131745 - DNA, 15 bp, Homo sapiens
tttacaggtgagaaa

SEQ ID NO: 131746 - DNA, 15 bp, Homo sapiens
ctttacaggtgagaa

SEQ ID NO: 131747 - DNA, 15 bp, Homo sapiens
actttacaggtgaga

SEQ ID NO: 131748 - DNA, 15 bp, Homo sapiens
cactttacaggtgag

SEQ ID NO: 131749 - DNA, 15 bp, Homo sapiens
ccactttacaggtga

SEQ ID NO: 131750 - DNA, 15 bp, Homo sapiens
cccactttacaggtg

SEQ ID NO: 131751 - DNA, 15 bp, Homo sapiens
tcccactttacaggt

SEQ ID NO: 131752 - DNA, 15 bp, Homo sapiens
ttcccactttacagg

SEQ ID NO: 131753 - DNA, 15 bp, Homo sapiens
tttcccactttacag

SEQ ID NO: 131754 - DNA, 15 bp, Homo sapiens
ttttcccactttaca

SEQ ID NO: 131755 - DNA, 15 bp, Homo sapiens
attttcccactttac

SEQ ID NO: 131756 - DNA, 15 bp, Homo sapiens
tattttcccacttta

SEQ ID NO: 131757 - DNA, 15 bp, Homo sapiens
ctattttcccacttt

SEQ ID NO: 131758 - DNA, 15 bp, Homo sapiens
gctattttcccactt

SEQ ID NO: 131759 - DNA, 15 bp, Homo sapiens
agctattttcccact

SEQ ID NO: 131760 - DNA, 15 bp, Homo sapiens
tagctattttcccac

SEQ ID NO: 131761 - DNA, 15 bp, Homo sapiens
gtagctattttccca

SEQ ID NO: 131762 - DNA, 15 bp, Homo sapiens
tgtagctattttccc

SEQ ID NO: 131763 - DNA, 15 bp, Homo sapiens
ctgtagctattttcc

SEQ ID NO: 131764 - DNA, 15 bp, Homo sapiens
gctgtagctattttc

SEQ ID NO: 131765 - DNA, 15 bp, Homo sapiens
ggctgtagctatttt

SEQ ID NO: 131766 - DNA, 15 bp, Homo sapiens
aggctgtagctattt

SEQ ID NO: 131767 - DNA, 15 bp, Homo sapiens
aaggctgtagctatt

SEQ ID NO: 131768 - DNA, 15 bp, Homo sapiens
aaaggctgtagctat

SEQ ID NO: 131769 - DNA, 15 bp, Homo sapiens
aaaaggctgtagcta

SEQ ID NO: 131770 - DNA, 15 bp, Homo sapiens
aaaaaggctgtagct

SEQ ID NO: 131771 - DNA, 15 bp, Homo sapiens
aaaaaaggctgtagc

SEQ ID NO: 131772 - DNA, 15 bp, Homo sapiens
aaaaaaaggctgtag

SEQ ID NO: 131773 - DNA, 15 bp, Homo sapiens
aaaaaaaaggctgta

SEQ ID NO: 131774 - DNA, 15 bp, Homo sapiens
aaaaaaaaaggctgt

SEQ ID NO: 131775 - DNA, 15 bp, Homo sapiens
aaaaaaaaaaggctg

SEQ ID NO: 131776 - DNA, 15 bp, Homo sapiens
aaaaaaaaaaaggct

SEQ ID NO: 131777 - DNA, 15 bp, Homo sapiens
aaaaaaaaaaaaggc

SEQ ID NO: 131778 - DNA, 15 bp, Homo sapiens
aaaaaaaaaaaaagg

SEQ ID NO: 131779 - DNA, 15 bp, Homo sapiens
aaaaaaaaaaaaaag

SEQ ID NO: 131780 - DNA, 15 bp, Homo sapiens
aaaaaaaaaaaaaaa

SEQ ID NO: 131781 - DNA, 15 bp, Homo sapiens
caaaaaaaaaaaaaa

SEQ ID NO: 131782 - DNA, 15 bp, Homo sapiens
tcaaaaaaaaaaaaa

SEQ ID NO: 131783 - DNA, 15 bp, Homo sapiens
actctgtctcaaaaa

SEQ ID NO: 131784 - DNA, 15 bp, Homo sapiens
gactctgtctcaaaa

SEQ ID NO: 131785 - DNA, 15 bp, Homo sapiens
agactctgtctcaaa

SEQ ID NO: 131786 - DNA, 15 bp, Homo sapiens
gagactctgtctcaa

SEQ ID NO: 131787 - DNA, 15 bp, Homo sapiens
cgagactctgtctca

SEQ ID NO: 131788 - DNA, 15 bp, Homo sapiens
gcgagactctgtctc

SEQ ID NO: 131789 - DNA, 15 bp, Homo sapiens
agcgagactctgtct

SEQ ID NO: 131790 - DNA, 15 bp, Homo sapiens
gagcgagactctgtc

SEQ ID NO: 131791 - DNA, 15 bp, Homo sapiens
agagcgagactctgt

SEQ ID NO: 131792 - DNA, 15 bp, Homo sapiens
cagagcgagactctg

SEQ ID NO: 131793 - DNA, 15 bp, Homo sapiens
acagagcgagactct

SEQ ID NO: 131794 - DNA, 15 bp, Homo sapiens
aacagagcgagactc

SEQ ID NO: 131795 - DNA, 15 bp, Homo sapiens
caacagagcgagact

SEQ ID NO: 131796 - DNA, 15 bp, Homo sapiens
gcaacagagcgagac

SEQ ID NO: 131797 - DNA, 15 bp, Homo sapiens
ggcaacagagcgaga

SEQ ID NO: 131798 - DNA, 15 bp, Homo sapiens
tggcaacagagcgag

SEQ ID NO: 131799 - DNA, 15 bp, Homo sapiens
ctggcaacagagcga

SEQ ID NO: 131800 - DNA, 15 bp, Homo sapiens
actggcaacagagcg

SEQ ID NO: 131801 - DNA, 15 bp, Homo sapiens
aactggcaacagagc

SEQ ID NO: 131802 - DNA, 15 bp, Homo sapiens
caactggcaacagag

SEQ ID NO: 131803 - DNA, 15 bp, Homo sapiens
ccaactggcaacaga

SEQ ID NO: 131804 - DNA, 15 bp, Homo sapiens
tccaactggcaacag

SEQ ID NO: 131805 - DNA, 15 bp, Homo sapiens
ctccaactggcaaca

SEQ ID NO: 131806 - DNA, 15 bp, Homo sapiens
actccaactggcaac

SEQ ID NO: 131807 - DNA, 15 bp, Homo sapiens
tactccaactggcaa

SEQ ID NO: 131808 - DNA, 15 bp, Homo sapiens
gtactccaactggca

SEQ ID NO: 131809 - DNA, 15 bp, Homo sapiens
tgtactccaactggc

SEQ ID NO: 131810 - DNA, 15 bp, Homo sapiens
ctgtactccaactgg

SEQ ID NO: 131811 - DNA, 15 bp, Homo sapiens
actgtactccaactg

SEQ ID NO: 131812 - DNA, 15 bp, Homo sapiens
cactgtactccaact

SEQ ID NO: 131813 - DNA, 15 bp, Homo sapiens
ccactgtactccaac

SEQ ID NO: 131814 - DNA, 15 bp, Homo sapiens
accactgtactccaa

SEQ ID NO: 131815 - DNA, 15 bp, Homo sapiens
caccactgtactcca

SEQ ID NO: 131816 - DNA, 15 bp, Homo sapiens
gcaccactgtactcc

SEQ ID NO: 131817 - DNA, 15 bp, Homo sapiens
cgcaccactgtactc

SEQ ID NO: 131818 - DNA, 15 bp, Homo sapiens
tcgcaccactgtact

SEQ ID NO: 131819 - DNA, 15 bp, Homo sapiens
atcgcaccactgtac

SEQ ID NO: 131820 - DNA, 15 bp, Homo sapiens
gatcgcaccactgta

SEQ ID NO: 131821 - DNA, 15 bp, Homo sapiens
agatcgcaccactgt

SEQ ID NO: 131822 - DNA, 15 bp, Homo sapiens
aagatcgcaccactg

SEQ ID NO: 131823 - DNA, 15 bp, Homo sapiens
caagatcgcaccact

SEQ ID NO: 131824 - DNA, 15 bp, Homo sapiens
tcaagatcgcaccac

SEQ ID NO: 131825 - DNA, 15 bp, Homo sapiens
gtcaagatcgcacca

SEQ ID NO: 131826 - DNA, 15 bp, Homo sapiens
agtcaagatcgcacc

SEQ ID NO: 131827 - DNA, 15 bp, Homo sapiens
gagtcaagatcgcac

SEQ ID NO: 131828 - DNA, 15 bp, Homo sapiens
tgagtcaagatcgca

SEQ ID NO: 131829 - DNA, 15 bp, Homo sapiens
gtgagtcaagatcgc

SEQ ID NO: 131830 - DNA, 15 bp, Homo sapiens
agtgagtcaagatcg

SEQ ID NO: 131831 - DNA, 15 bp, Homo sapiens
cagtgagtcaagatc

SEQ ID NO: 131832 - DNA, 15 bp, Homo sapiens
gcagtgagtcaagat

SEQ ID NO: 131833 - DNA, 15 bp, Homo sapiens
tgcagtgagtcaaga

SEQ ID NO: 131834 - DNA, 15 bp, Homo sapiens
ttgcagtgagtcaag

SEQ ID NO: 131835 - DNA, 15 bp, Homo sapiens
gttgcagtgagtcaa

SEQ ID NO: 131836 - DNA, 15 bp, Homo sapiens
ggttgcagtgagtca

SEQ ID NO: 131837 - DNA, 15 bp, Homo sapiens
aggttgcagtgagtc

SEQ ID NO: 131838 - DNA, 15 bp, Homo sapiens
gaggttgcagtgagt

SEQ ID NO: 131839 - DNA, 15 bp, Homo sapiens
ggaggttgcagtgag

SEQ ID NO: 131840 - DNA, 15 bp, Homo sapiens
tggaggttgcagtga

SEQ ID NO: 131841 - DNA, 15 bp, Homo sapiens
atggaggttgcagtg

SEQ ID NO: 131842 - DNA, 15 bp, Homo sapiens
gatggaggttgcagt

SEQ ID NO: 131843 - DNA, 15 bp, Homo sapiens
agatggaggttgcag

SEQ ID NO: 131844 - DNA, 15 bp, Homo sapiens
gagatggaggttgca

SEQ ID NO: 131845 - DNA, 15 bp, Homo sapiens
ggagatggaggttgc

SEQ ID NO: 131846 - DNA, 15 bp, Homo sapiens
gggagatggaggttg

SEQ ID NO: 131847 - DNA, 15 bp, Homo sapiens
ggggagatggaggtt

SEQ ID NO: 131848 - DNA, 15 bp, Homo sapiens
tggggagatggaggt

SEQ ID NO: 131849 - DNA, 15 bp, Homo sapiens
ctggggagatggagg

SEQ ID NO: 131850 - DNA, 15 bp, Homo sapiens
actggggagatggag

SEQ ID NO: 131851 - DNA, 15 bp, Homo sapiens
aactggggagatgga

SEQ ID NO: 131852 - DNA, 15 bp, Homo sapiens
gaactggggagatgg

SEQ ID NO: 131853 - DNA, 15 bp, Homo sapiens
tgaactggggagatg

SEQ ID NO: 131854 - DNA, 15 bp, Homo sapiens
ttgaactggggagat

SEQ ID NO: 131855 - DNA, 15 bp, Homo sapiens
cttgaactggggaga

SEQ ID NO: 131856 - DNA, 15 bp, Homo sapiens
gcttgaactggggag

SEQ ID NO: 131857 - DNA, 15 bp, Homo sapiens
tgcttgaactgggga

SEQ ID NO: 131858 - DNA, 15 bp, Homo sapiens
ttgcttgaactgggg

SEQ ID NO: 131859 - DNA, 15 bp, Homo sapiens
attgcttgaactggg

SEQ ID NO: 131860 - DNA, 15 bp, Homo sapiens
aattgcttgaactgg

SEQ ID NO: 131861 - DNA, 15 bp, Homo sapiens
gaattgcttgaactg

SEQ ID NO: 131862 - DNA, 15 bp, Homo sapiens
agaattgcttgaact

SEQ ID NO: 131863 - DNA, 15 bp, Homo sapiens
gagaattgcttgaac

SEQ ID NO: 131864 - DNA, 15 bp, Homo sapiens
ggagaattgcttgaa

SEQ ID NO: 131865 - DNA, 15 bp, Homo sapiens
aggagaattgcttga

SEQ ID NO: 131866 - DNA, 15 bp, Homo sapiens
caggagaattgcttg

SEQ ID NO: 131867 - DNA, 15 bp, Homo sapiens
gcaggagaattgctt

SEQ ID NO: 131868 - DNA, 15 bp, Homo sapiens
ggcaggagaattgct

SEQ ID NO: 131869 - DNA, 15 bp, Homo sapiens
aggcaggagaattgc

SEQ ID NO: 131870 - DNA, 15 bp, Homo sapiens
gaggcaggagaattg

SEQ ID NO: 131871 - DNA, 15 bp, Homo sapiens
tgaggcaggagaatt

SEQ ID NO: 131872 - DNA, 15 bp, Homo sapiens
ctgaggcaggagaat

SEQ ID NO: 131873 - DNA, 15 bp, Homo sapiens
gctgaggcaggagaa

SEQ ID NO: 131874 - DNA, 15 bp, Homo sapiens
ggctgaggcaggaga

SEQ ID NO: 131875 - DNA, 15 bp, Homo sapiens
aggctgaggcaggag

SEQ ID NO: 131876 - DNA, 15 bp, Homo sapiens
gaggctgaggcagga

SEQ ID NO: 131877 - DNA, 15 bp, Homo sapiens
ggaggctgaggcagg

SEQ ID NO: 131878 - DNA, 15 bp, Homo sapiens
aggaggctgaggcag

SEQ ID NO: 131879 - DNA, 15 bp, Homo sapiens
caggaggctgaggca

SEQ ID NO: 131880 - DNA, 15 bp, Homo sapiens
tcaggaggctgaggc

SEQ ID NO: 131881 - DNA, 15 bp, Homo sapiens
ctcaggaggctgagg

SEQ ID NO: 131882 - DNA, 15 bp, Homo sapiens
actcaggaggctgag

SEQ ID NO: 131883 - DNA, 15 bp, Homo sapiens
tactcaggaggctga

SEQ ID NO: 131884 - DNA, 15 bp, Homo sapiens
ctactcaggaggctg

SEQ ID NO: 131885 - DNA, 15 bp, Homo sapiens
gctactcaggaggct

SEQ ID NO: 131886 - DNA, 15 bp, Homo sapiens
agctactcaggaggc

SEQ ID NO: 131887 - DNA, 15 bp, Homo sapiens
gcccagctactcagg

SEQ ID NO: 131888 - DNA, 15 bp, Homo sapiens
agcccagctactcag

SEQ ID NO: 131889 - DNA, 15 bp, Homo sapiens
aagcccagctactca

SEQ ID NO: 131890 - DNA, 15 bp, Homo sapiens
taagcccagctactc

SEQ ID NO: 131891 - DNA, 15 bp, Homo sapiens
gtaagcccagctact

SEQ ID NO: 131892 - DNA, 15 bp, Homo sapiens
tgtaagcccagctac

SEQ ID NO: 131893 - DNA, 15 bp, Homo sapiens
ctgtaagcccagcta

SEQ ID NO: 131894 - DNA, 15 bp, Homo sapiens
cctgtaagcccagct

SEQ ID NO: 131895 - DNA, 15 bp, Homo sapiens
gcctgtaagcccagc

SEQ ID NO: 131896 - DNA, 15 bp, Homo sapiens
tgcctgtaagcccag

SEQ ID NO: 131897 - DNA, 15 bp, Homo sapiens
atgcctgtaagccca

SEQ ID NO: 131898 - DNA, 15 bp, Homo sapiens
catgcctgtaagccc

SEQ ID NO: 131899 - DNA, 15 bp, Homo sapiens
gcatgcctgtaagcc

SEQ ID NO: 131900 - DNA, 15 bp, Homo sapiens
cgcatgcctgtaagc

SEQ ID NO: 131901 - DNA, 15 bp, Homo sapiens
gcgcatgcctgtaag

SEQ ID NO: 131902 - DNA, 15 bp, Homo sapiens
ggcgcatgcctgtaa

SEQ ID NO: 131903 - DNA, 15 bp, Homo sapiens
tggcgcatgcctgta

SEQ ID NO: 131904 - DNA, 15 bp, Homo sapiens
gtggcgcatgcctgt

SEQ ID NO: 131905 - DNA, 15 bp, Homo sapiens
ggtggcgcatgcctg

SEQ ID NO: 131906 - DNA, 15 bp, Homo sapiens
tggtggcgcatgcct

SEQ ID NO: 131907 - DNA, 15 bp, Homo sapiens
gtggtggcgcatgcc

SEQ ID NO: 131908 - DNA, 15 bp, Homo sapiens
tgtggtggcgcatgc

SEQ ID NO: 131909 - DNA, 15 bp, Homo sapiens
atgtggtggcgcatg

SEQ ID NO: 131910 - DNA, 15 bp, Homo sapiens
gatgtggtggcgcat

SEQ ID NO: 131911 - DNA, 15 bp, Homo sapiens
ggatgtggtggcgca

SEQ ID NO: 131912 - DNA, 15 bp, Homo sapiens
tggatgtggtggcgc

SEQ ID NO: 131913 - DNA, 15 bp, Homo sapiens
ctggatgtggtggcg

SEQ ID NO: 131914 - DNA, 15 bp, Homo sapiens
gctggatgtggtggc

SEQ ID NO: 131915 - DNA, 15 bp, Homo sapiens
agctggatgtggtgg

SEQ ID NO: 131916 - DNA, 15 bp, Homo sapiens
tagctggatgtggtg

SEQ ID NO: 131917 - DNA, 15 bp, Homo sapiens
atagctggatgtggt

SEQ ID NO: 131918 - DNA, 15 bp, Homo sapiens
aatagctggatgtgg

SEQ ID NO: 131919 - DNA, 15 bp, Homo sapiens
aaatagctggatgtg

SEQ ID NO: 131920 - DNA, 15 bp, Homo sapiens
aaaatagctggatgt

SEQ ID NO: 131921 - DNA, 15 bp, Homo sapiens
aaaaatagctggatg

SEQ ID NO: 131922 - DNA, 15 bp, Homo sapiens
aaaaaatagctggat

SEQ ID NO: 131923 - DNA, 15 bp, Homo sapiens
aaaaaaatagctgga

SEQ ID NO: 131924 - DNA, 15 bp, Homo sapiens
aaaaaaaatagctgg

SEQ ID NO: 131925 - DNA, 15 bp, Homo sapiens
aaaaaaaaatagctg

SEQ ID NO: 131926 - DNA, 15 bp, Homo sapiens
aaaaaaaaaatagct

SEQ ID NO: 131927 - DNA, 15 bp, Homo sapiens
aaaaaaaaaaatagc

SEQ ID NO: 131928 - DNA, 15 bp, Homo sapiens
aaaaaaaaaaaatag

SEQ ID NO: 131929 - DNA, 15 bp, Homo sapiens
aaaaaaaaaaaaata

SEQ ID NO: 131930 - DNA, 15 bp, Homo sapiens
aaaaaaaaaaaaaat

SEQ ID NO: 131931 - DNA, 15 bp, Homo sapiens
atctcaaaaaaaaaa

SEQ ID NO: 131932 - DNA, 15 bp, Homo sapiens
catctcaaaaaaaaa

SEQ ID NO: 131933 - DNA, 15 bp, Homo sapiens
ccatctcaaaaaaaa

SEQ ID NO: 131934 - DNA, 15 bp, Homo sapiens
tccatctcaaaaaaa

SEQ ID NO: 131935 - DNA, 15 bp, Homo sapiens
ctccatctcaaaaaa

SEQ ID NO: 131936 - DNA, 15 bp, Homo sapiens
actccatctcaaaaa

SEQ ID NO: 131937 - DNA, 15 bp, Homo sapiens
gactccatctcaaaa

SEQ ID NO: 131938 - DNA, 15 bp, Homo sapiens
agactccatctcaaa

SEQ ID NO: 131939 - DNA, 15 bp, Homo sapiens
gagactccatctcaa

SEQ ID NO: 131940 - DNA, 15 bp, Homo sapiens
cgagactccatctca

SEQ ID NO: 131941 - DNA, 15 bp, Homo sapiens
gcgagactccatctc

SEQ ID NO: 131942 - DNA, 15 bp, Homo sapiens
agcgagactccatct

SEQ ID NO: 131943 - DNA, 15 bp, Homo sapiens
gagcgagactccatc

SEQ ID NO: 131944 - DNA, 15 bp, Homo sapiens
agagcgagactccat

SEQ ID NO: 131945 - DNA, 15 bp, Homo sapiens
cagagcgagactcca

SEQ ID NO: 131946 - DNA, 15 bp, Homo sapiens
acagagcgagactcc

SEQ ID NO: 131947 - DNA, 15 bp, Homo sapiens
gacagagcgagactc

SEQ ID NO: 131948 - DNA, 15 bp, Homo sapiens
cgacagagcgagact

SEQ ID NO: 131949 - DNA, 15 bp, Homo sapiens
gcgacagagcgagac

SEQ ID NO: 131950 - DNA, 15 bp, Homo sapiens
ggcgacagagcgaga

SEQ ID NO: 131951 - DNA, 15 bp, Homo sapiens
gggcgacagagcgag

SEQ ID NO: 131952 - DNA, 15 bp, Homo sapiens
tgggcgacagagcga

SEQ ID NO: 131953 - DNA, 15 bp, Homo sapiens
ctgggcgacagagcg

SEQ ID NO: 131954 - DNA, 15 bp, Homo sapiens
actccagcctgggcg

SEQ ID NO: 131955 - DNA, 15 bp, Homo sapiens
cactccagcctgggc

SEQ ID NO: 131956 - DNA, 15 bp, Homo sapiens
gcactccagcctggg

SEQ ID NO: 131957 - DNA, 15 bp, Homo sapiens
tgcactccagcctgg

SEQ ID NO: 131958 - DNA, 15 bp, Homo sapiens
ctgcactccagcctg

SEQ ID NO: 131959 - DNA, 15 bp, Homo sapiens
actgcactccagcct

SEQ ID NO: 131960 - DNA, 15 bp, Homo sapiens
cactgcactccagcc

SEQ ID NO: 131961 - DNA, 15 bp, Homo sapiens
ccactgcactccagc

SEQ ID NO: 131962 - DNA, 15 bp, Homo sapiens
gccactgcactccag

SEQ ID NO: 131963 - DNA, 15 bp, Homo sapiens
cgccactgcactcca

SEQ ID NO: 131964 - DNA, 15 bp, Homo sapiens
gcgccactgcactcc

SEQ ID NO: 131965 - DNA, 15 bp, Homo sapiens
tgcgccactgcactc

SEQ ID NO: 131966 - DNA, 15 bp, Homo sapiens
ttgcgccactgcact

SEQ ID NO: 131967 - DNA, 15 bp, Homo sapiens
attgcgccactgcac

SEQ ID NO: 131968 - DNA, 15 bp, Homo sapiens
gattgcgccactgca

SEQ ID NO: 131969 - DNA, 15 bp, Homo sapiens
agattgcgccactgc

SEQ ID NO: 131970 - DNA, 15 bp, Homo sapiens
gagattgcgccactg

SEQ ID NO: 131971 - DNA, 15 bp, Homo sapiens
cgagattgcgccact

SEQ ID NO: 131972 - DNA, 15 bp, Homo sapiens
ccgagattgcgccac

SEQ ID NO: 131973 - DNA, 15 bp, Homo sapiens
gccgagattgcgcca

SEQ ID NO: 131974 - DNA, 15 bp, Homo sapiens
agccgagattgcgcc

SEQ ID NO: 131975 - DNA, 15 bp, Homo sapiens
gagccgagattgcgc

SEQ ID NO: 131976 - DNA, 15 bp, Homo sapiens
tgagccgagattgcg

SEQ ID NO: 131977 - DNA, 15 bp, Homo sapiens
gtgagccgagattgc

SEQ ID NO: 131978 - DNA, 15 bp, Homo sapiens
agtgagccgagattg

SEQ ID NO: 131979 - DNA, 15 bp, Homo sapiens
cagtgagccgagatt

SEQ ID NO: 131980 - DNA, 15 bp, Homo sapiens
gcagtgagccgagat

SEQ ID NO: 131981 - DNA, 15 bp, Homo sapiens
tgcagtgagccgaga

SEQ ID NO: 131982 - DNA, 15 bp, Homo sapiens
ttgcagtgagccgag

SEQ ID NO: 131983 - DNA, 15 bp, Homo sapiens
cttgcagtgagccga

SEQ ID NO: 131984 - DNA, 15 bp, Homo sapiens
gcttgcagtgagccg

SEQ ID NO: 131985 - DNA, 15 bp, Homo sapiens
agcttgcagtgagcc

SEQ ID NO: 131986 - DNA, 15 bp, Homo sapiens
gagcttgcagtgagc

SEQ ID NO: 131987 - DNA, 15 bp, Homo sapiens
agagcttgcagtgag

SEQ ID NO: 131988 - DNA, 15 bp, Homo sapiens
cagagcttgcagtga

SEQ ID NO: 131989 - DNA, 15 bp, Homo sapiens
gcagagcttgcagtg

SEQ ID NO: 131990 - DNA, 15 bp, Homo sapiens
ggcagagcttgcagt

SEQ ID NO: 131991 - DNA, 15 bp, Homo sapiens
aggcagagcttgcag

SEQ ID NO: 131992 - DNA, 15 bp, Homo sapiens
gaggcagagcttgca

SEQ ID NO: 131993 - DNA, 15 bp, Homo sapiens
ggaggcagagcttgc

SEQ ID NO: 131994 - DNA, 15 bp, Homo sapiens
gggaggcagagcttg

SEQ ID NO: 131995 - DNA, 15 bp, Homo sapiens
cgggaggcagagctt

SEQ ID NO: 131996 - DNA, 15 bp, Homo sapiens
ccgggaggcagagct

SEQ ID NO: 131997 - DNA, 15 bp, Homo sapiens
cccgggaggcagagc

SEQ ID NO: 131998 - DNA, 15 bp, Homo sapiens
acccgggaggcagag

SEQ ID NO: 131999 - DNA, 15 bp, Homo sapiens
aacccgggaggcaga

SEQ ID NO: 132000 - DNA, 15 bp, Homo sapiens
gaacccgggaggcag

SEQ ID NO: 132001 - DNA, 15 bp, Homo sapiens
tgaacccgggaggca

SEQ ID NO: 132002 - DNA, 15 bp, Homo sapiens
gtgaacccgggaggc

SEQ ID NO: 132003 - DNA, 15 bp, Homo sapiens
tgtgaacccgggagg

SEQ ID NO: 132004 - DNA, 15 bp, Homo sapiens
gtgtgaacccgggag

SEQ ID NO: 132005 - DNA, 15 bp, Homo sapiens
ggtgtgaacccggga

SEQ ID NO: 132006 - DNA, 15 bp, Homo sapiens
tggtgtgaacccggg

SEQ ID NO: 132007 - DNA, 15 bp, Homo sapiens
atggtgtgaacccgg

SEQ ID NO: 132008 - DNA, 15 bp, Homo sapiens
aatggtgtgaacccg

SEQ ID NO: 132009 - DNA, 15 bp, Homo sapiens
gaatggtgtgaaccc

SEQ ID NO: 132010 - DNA, 15 bp, Homo sapiens
agaatggtgtgaacc

SEQ ID NO: 132011 - DNA, 15 bp, Homo sapiens
gagaatggtgtgaac

SEQ ID NO: 132012 - DNA, 15 bp, Homo sapiens
ggagaatggtgtgaa

SEQ ID NO: 132013 - DNA, 15 bp, Homo sapiens
aggagaatggtgtga

SEQ ID NO: 132014 - DNA, 15 bp, Homo sapiens
caggagaatggtgtg

SEQ ID NO: 132015 - DNA, 15 bp, Homo sapiens
gcaggagaatggtgt

SEQ ID NO: 132016 - DNA, 15 bp, Homo sapiens
ggcaggagaatggtg

SEQ ID NO: 132017 - DNA, 15 bp, Homo sapiens
aggcaggagaatggt

SEQ ID NO: 132018 - DNA, 15 bp, Homo sapiens
gaggcaggagaatgg

SEQ ID NO: 132019 - DNA, 15 bp, Homo sapiens
tgaggcaggagaatg

SEQ ID NO: 132020 - DNA, 15 bp, Homo sapiens
gggaggctgaggcag

SEQ ID NO: 132021 - DNA, 15 bp, Homo sapiens
tgggaggctgaggca

SEQ ID NO: 132022 - DNA, 15 bp, Homo sapiens
ttgggaggctgaggc

SEQ ID NO: 132023 - DNA, 15 bp, Homo sapiens
cttgggaggctgagg

SEQ ID NO: 132024 - DNA, 15 bp, Homo sapiens
acttgggaggctgag

SEQ ID NO: 132025 - DNA, 15 bp, Homo sapiens
tacttgggaggctga

SEQ ID NO: 132026 - DNA, 15 bp, Homo sapiens
ctacttgggaggctg

SEQ ID NO: 132027 - DNA, 15 bp, Homo sapiens
gctacttgggaggct

SEQ ID NO: 132028 - DNA, 15 bp, Homo sapiens
agctacttgggaggc

SEQ ID NO: 132029 - DNA, 15 bp, Homo sapiens
cagctacttgggagg

SEQ ID NO: 132030 - DNA, 15 bp, Homo sapiens
ccagctacttgggag

SEQ ID NO: 132031 - DNA, 15 bp, Homo sapiens
cccagctacttggga

SEQ ID NO: 132032 - DNA, 15 bp, Homo sapiens
tcccagctacttggg

SEQ ID NO: 132033 - DNA, 15 bp, Homo sapiens
gtcccagctacttgg

SEQ ID NO: 132034 - DNA, 15 bp, Homo sapiens
agtcccagctacttg

SEQ ID NO: 132035 - DNA, 15 bp, Homo sapiens
tagtcccagctactt

SEQ ID NO: 132036 - DNA, 15 bp, Homo sapiens
gtagtcccagctact

SEQ ID NO: 132037 - DNA, 15 bp, Homo sapiens
tgtagtcccagctac

SEQ ID NO: 132038 - DNA, 15 bp, Homo sapiens
ctgtagtcccagcta

SEQ ID NO: 132039 - DNA, 15 bp, Homo sapiens
cctgtagtcccagct

SEQ ID NO: 132040 - DNA, 15 bp, Homo sapiens
gcctgtagtcccagc

SEQ ID NO: 132041 - DNA, 15 bp, Homo sapiens
tgcctgtagtcccag

SEQ ID NO: 132042 - DNA, 15 bp, Homo sapiens
atgcctgtagtccca

SEQ ID NO: 132043 - DNA, 15 bp, Homo sapiens
gatgcctgtagtccc

SEQ ID NO: 132044 - DNA, 15 bp, Homo sapiens
ggatgcctgtagtcc

SEQ ID NO: 132045 - DNA, 15 bp, Homo sapiens
tggatgcctgtagtc

SEQ ID NO: 132046 - DNA, 15 bp, Homo sapiens
gtggatgcctgtagt

SEQ ID NO: 132047 - DNA, 15 bp, Homo sapiens
ggtggatgcctgtag

SEQ ID NO: 132048 - DNA, 15 bp, Homo sapiens
tggtggatgcctgta

SEQ ID NO: 132049 - DNA, 15 bp, Homo sapiens
gtggtggatgcctgt

SEQ ID NO: 132050 - DNA, 15 bp, Homo sapiens
ggtggtggatgcctg

SEQ ID NO: 132051 - DNA, 15 bp, Homo sapiens
tggtggtggatgcct

SEQ ID NO: 132052 - DNA, 15 bp, Homo sapiens
gtggtggtggatgcc

SEQ ID NO: 132053 - DNA, 15 bp, Homo sapiens
cgtggtggtggatgc

SEQ ID NO: 132054 - DNA, 15 bp, Homo sapiens
gcgtggtggtggatg

SEQ ID NO: 132055 - DNA, 15 bp, Homo sapiens
ggcgtggtggtggat

SEQ ID NO: 132056 - DNA, 15 bp, Homo sapiens
gggcgtggtggtgga

SEQ ID NO: 132057 - DNA, 15 bp, Homo sapiens
cgggcgtggtggtgg

SEQ ID NO: 132058 - DNA, 15 bp, Homo sapiens
ccgggcgtggtggtg

SEQ ID NO: 132059 - DNA, 15 bp, Homo sapiens
gccgggcgtggtggt

SEQ ID NO: 132060 - DNA, 15 bp, Homo sapiens
agccgggcgtggtgg

SEQ ID NO: 132061 - DNA, 15 bp, Homo sapiens
tagccgggcgtggtg

SEQ ID NO: 132062 - DNA, 15 bp, Homo sapiens
ttagccgggcgtggt

SEQ ID NO: 132063 - DNA, 15 bp, Homo sapiens
attagccgggcgtgg

SEQ ID NO: 132064 - DNA, 15 bp, Homo sapiens
aattagccgggcgtg

SEQ ID NO: 132065 - DNA, 15 bp, Homo sapiens
aaattagccgggcgt

SEQ ID NO: 132066 - DNA, 15 bp, Homo sapiens
aaaattagccgggcg

SEQ ID NO: 132067 - DNA, 15 bp, Homo sapiens
aaaaattagccgggc

SEQ ID NO: 132068 - DNA, 15 bp, Homo sapiens
aaaaaattagccggg

SEQ ID NO: 132069 - DNA, 15 bp, Homo sapiens
caaaaaattagccgg

SEQ ID NO: 132070 - DNA, 15 bp, Homo sapiens
acaaaaaattagccg

SEQ ID NO: 132071 - DNA, 15 bp, Homo sapiens
tacaaaaaattagcc

SEQ ID NO: 132072 - DNA, 15 bp, Homo sapiens
atacaaaaaattagc

SEQ ID NO: 132073 - DNA, 15 bp, Homo sapiens
aatacaaaaaattag

SEQ ID NO: 132074 - DNA, 15 bp, Homo sapiens
aaatacaaaaaatta

SEQ ID NO: 132075 - DNA, 15 bp, Homo sapiens
aaaatacaaaaaatt

SEQ ID NO: 132076 - DNA, 15 bp, Homo sapiens
aaaaatacaaaaaat

SEQ ID NO: 132077 - DNA, 15 bp, Homo sapiens
taaaaatacaaaaaa

SEQ ID NO: 132078 - DNA, 15 bp, Homo sapiens
ctaaaaatacaaaaa

SEQ ID NO: 132079 - DNA, 15 bp, Homo sapiens
actaaaaatacaaaa

SEQ ID NO: 132080 - DNA, 15 bp, Homo sapiens
tactaaaaatacaaa

SEQ ID NO: 132081 - DNA, 15 bp, Homo sapiens
ctactaaaaatacaa

SEQ ID NO: 132082 - DNA, 15 bp, Homo sapiens
tctactaaaaataca

SEQ ID NO: 132083 - DNA, 15 bp, Homo sapiens
ctctactaaaaatac

SEQ ID NO: 132084 - DNA, 15 bp, Homo sapiens
tctctactaaaaata

SEQ ID NO: 132085 - DNA, 15 bp, Homo sapiens
gtctctactaaaaat

SEQ ID NO: 132086 - DNA, 15 bp, Homo sapiens
tgtctctactaaaaa

SEQ ID NO: 132087 - DNA, 15 bp, Homo sapiens
ctgtctctactaaaa

SEQ ID NO: 132088 - DNA, 15 bp, Homo sapiens
cctgtctctactaaa

SEQ ID NO: 132089 - DNA, 15 bp, Homo sapiens
ccctgtctctactaa

SEQ ID NO: 132090 - DNA, 15 bp, Homo sapiens
accctgtctctacta

SEQ ID NO: 132091 - DNA, 15 bp, Homo sapiens
aaccctgtctctact

SEQ ID NO: 132092 - DNA, 15 bp, Homo sapiens
aaaccctgtctctac

SEQ ID NO: 132093 - DNA, 15 bp, Homo sapiens
gaaaccctgtctcta

SEQ ID NO: 132094 - DNA, 15 bp, Homo sapiens
tgaaaccctgtctct

SEQ ID NO: 132095 - DNA, 15 bp, Homo sapiens
gtgaaaccctgtctc

SEQ ID NO: 132096 - DNA, 15 bp, Homo sapiens
agtgaaaccctgtct

SEQ ID NO: 132097 - DNA, 15 bp, Homo sapiens
cagtgaaaccctgtc

SEQ ID NO: 132098 - DNA, 15 bp, Homo sapiens
acagtgaaaccctgt

SEQ ID NO: 132099 - DNA, 15 bp, Homo sapiens
cacagtgaaaccctg

SEQ ID NO: 132100 - DNA, 15 bp, Homo sapiens
acacagtgaaaccct

SEQ ID NO: 132101 - DNA, 15 bp, Homo sapiens
aacacagtgaaaccc

SEQ ID NO: 132102 - DNA, 15 bp, Homo sapiens
taacacagtgaaacc

SEQ ID NO: 132103 - DNA, 15 bp, Homo sapiens
ctaacacagtgaaac

SEQ ID NO: 132104 - DNA, 15 bp, Homo sapiens
gctaacacagtgaaa

SEQ ID NO: 132105 - DNA, 15 bp, Homo sapiens
ggctaacacagtgaa

SEQ ID NO: 132106 - DNA, 15 bp, Homo sapiens
tggctaacacagtga

SEQ ID NO: 132107 - DNA, 15 bp, Homo sapiens
ctggctaacacagtg

SEQ ID NO: 132108 - DNA, 15 bp, Homo sapiens
cctggctaacacagt

SEQ ID NO: 132109 - DNA, 15 bp, Homo sapiens
tcctggctaacacag

SEQ ID NO: 132110 - DNA, 15 bp, Homo sapiens
atcctggctaacaca

SEQ ID NO: 132111 - DNA, 15 bp, Homo sapiens
catcctggctaacac

SEQ ID NO: 132112 - DNA, 15 bp, Homo sapiens
ccatcctggctaaca

SEQ ID NO: 132113 - DNA, 15 bp, Homo sapiens
accatcctggctaac

SEQ ID NO: 132114 - DNA, 15 bp, Homo sapiens
gaccatcctggctaa

SEQ ID NO: 132115 - DNA, 15 bp, Homo sapiens
agaccatcctggcta

SEQ ID NO: 132116 - DNA, 15 bp, Homo sapiens
aagaccatcctggct

SEQ ID NO: 132117 - DNA, 15 bp, Homo sapiens
caagaccatcctggc

SEQ ID NO: 132118 - DNA, 15 bp, Homo sapiens
tcaagaccatcctgg

SEQ ID NO: 132119 - DNA, 15 bp, Homo sapiens
atcaagaccatcctg

SEQ ID NO: 132120 - DNA, 15 bp, Homo sapiens
gatcaagaccatcct

SEQ ID NO: 132121 - DNA, 15 bp, Homo sapiens
agatcaagaccatcc

SEQ ID NO: 132122 - DNA, 15 bp, Homo sapiens
gagatcaagaccatc

SEQ ID NO: 132123 - DNA, 15 bp, Homo sapiens
ggagatcaagaccat

SEQ ID NO: 132124 - DNA, 15 bp, Homo sapiens
aggagatcaagacca

SEQ ID NO: 132125 - DNA, 15 bp, Homo sapiens
caggagatcaagacc

SEQ ID NO: 132126 - DNA, 15 bp, Homo sapiens
tcaggagatcaagac

SEQ ID NO: 132127 - DNA, 15 bp, Homo sapiens
gtcaggagatcaaga

SEQ ID NO: 132128 - DNA, 15 bp, Homo sapiens
ggtcaggagatcaag

SEQ ID NO: 132129 - DNA, 15 bp, Homo sapiens
aggtcaggagatcaa

SEQ ID NO: 132130 - DNA, 15 bp, Homo sapiens
gaggtcaggagatca

SEQ ID NO: 132131 - DNA, 15 bp, Homo sapiens
cgaggtcaggagatc

SEQ ID NO: 132132 - DNA, 15 bp, Homo sapiens
acgaggtcaggagat

SEQ ID NO: 132133 - DNA, 15 bp, Homo sapiens
cacgaggtcaggaga

SEQ ID NO: 132134 - DNA, 15 bp, Homo sapiens
tcacgaggtcaggag

SEQ ID NO: 132135 - DNA, 15 bp, Homo sapiens
atcacgaggtcagga

SEQ ID NO: 132136 - DNA, 15 bp, Homo sapiens
gatcacgaggtcagg

SEQ ID NO: 132137 - DNA, 15 bp, Homo sapiens
ggatcacgaggtcag

SEQ ID NO: 132138 - DNA, 15 bp, Homo sapiens
tggatcacgaggtca

SEQ ID NO: 132139 - DNA, 15 bp, Homo sapiens
gtggatcacgaggtc

SEQ ID NO: 132140 - DNA, 15 bp, Homo sapiens
ggtggatcacgaggt

SEQ ID NO: 132141 - DNA, 15 bp, Homo sapiens
aggtggatcacgagg

SEQ ID NO: 132142 - DNA, 15 bp, Homo sapiens
caggtggatcacgag

SEQ ID NO: 132143 - DNA, 15 bp, Homo sapiens
gcaggtggatcacga

SEQ ID NO: 132144 - DNA, 15 bp, Homo sapiens
ggcaggtggatcacg

SEQ ID NO: 132145 - DNA, 15 bp, Homo sapiens
aaggcaggtggatca

SEQ ID NO: 132146 - DNA, 15 bp, Homo sapiens
caaggcaggtggatc

SEQ ID NO: 132147 - DNA, 15 bp, Homo sapiens
ccaaggcaggtggat

SEQ ID NO: 132148 - DNA, 15 bp, Homo sapiens
gccaaggcaggtgga

SEQ ID NO: 132149 - DNA, 15 bp, Homo sapiens
ggccaaggcaggtgg

SEQ ID NO: 132150 - DNA, 15 bp, Homo sapiens
aggccaaggcaggtg

SEQ ID NO: 132151 - DNA, 15 bp, Homo sapiens
gaggccaaggcaggt

SEQ ID NO: 132152 - DNA, 15 bp, Homo sapiens
ggaggccaaggcagg

SEQ ID NO: 132153 - DNA, 15 bp, Homo sapiens
gggaggccaaggcag

SEQ ID NO: 132154 - DNA, 15 bp, Homo sapiens
tgggaggccaaggca

SEQ ID NO: 132155 - DNA, 15 bp, Homo sapiens
ttgggaggccaaggc

SEQ ID NO: 132156 - DNA, 15 bp, Homo sapiens
tttgggaggccaagg

SEQ ID NO: 132157 - DNA, 15 bp, Homo sapiens
ctttgggaggccaag

SEQ ID NO: 132158 - DNA, 15 bp, Homo sapiens
actttgggaggccaa

SEQ ID NO: 132159 - DNA, 15 bp, Homo sapiens
cactttgggaggcca

SEQ ID NO: 132160 - DNA, 15 bp, Homo sapiens
gacgcctgtaatccc

SEQ ID NO: 132161 - DNA, 15 bp, Homo sapiens
tgacgcctgtaatcc

SEQ ID NO: 132162 - DNA, 15 bp, Homo sapiens
ctgacgcctgtaatc

SEQ ID NO: 132163 - DNA, 15 bp, Homo sapiens
gctgacgcctgtaat

SEQ ID NO: 132164 - DNA, 15 bp, Homo sapiens
ggctgacgcctgtaa

SEQ ID NO: 132165 - DNA, 15 bp, Homo sapiens
tggctgacgcctgta

SEQ ID NO: 132166 - DNA, 15 bp, Homo sapiens
gtggctgacgcctgt

SEQ ID NO: 132167 - DNA, 15 bp, Homo sapiens
ggtggctgacgcctg

SEQ ID NO: 132168 - DNA, 15 bp, Homo sapiens
cggtggctgacgcct

SEQ ID NO: 132169 - DNA, 15 bp, Homo sapiens
gcggtggctgacgcc

SEQ ID NO: 132170 - DNA, 15 bp, Homo sapiens
cgcggtggctgacgc

SEQ ID NO: 132171 - DNA, 15 bp, Homo sapiens
gcgcggtggctgacg

SEQ ID NO: 132172 - DNA, 15 bp, Homo sapiens
ggcgcggtggctgac

SEQ ID NO: 132173 - DNA, 15 bp, Homo sapiens
gggcgcggtggctga

SEQ ID NO: 132174 - DNA, 15 bp, Homo sapiens
tgggcgcggtggctg

SEQ ID NO: 132175 - DNA, 15 bp, Homo sapiens
ctgggcgcggtggct

SEQ ID NO: 132176 - DNA, 15 bp, Homo sapiens
gctgggcgcggtggc

SEQ ID NO: 132177 - DNA, 15 bp, Homo sapiens
ggctgggcgcggtgg

SEQ ID NO: 132178 - DNA, 15 bp, Homo sapiens
tggctgggcgcggtg

SEQ ID NO: 132179 - DNA, 15 bp, Homo sapiens
ttggctgggcgcggt

SEQ ID NO: 132180 - DNA, 15 bp, Homo sapiens
attggctgggcgcgg

SEQ ID NO: 132181 - DNA, 15 bp, Homo sapiens
aattggctgggcgcg

SEQ ID NO: 132182 - DNA, 15 bp, Homo sapiens
aaattggctgggcgc

SEQ ID NO: 132183 - DNA, 15 bp, Homo sapiens
aaaattggctgggcg

SEQ ID NO: 132184 - DNA, 15 bp, Homo sapiens
aaaaattggctgggc

SEQ ID NO: 132185 - DNA, 15 bp, Homo sapiens
taaaaattggctggg

SEQ ID NO: 132186 - DNA, 15 bp, Homo sapiens
ataaaaattggctgg

SEQ ID NO: 132187 - DNA, 15 bp, Homo sapiens
tataaaaattggctg

SEQ ID NO: 132188 - DNA, 15 bp, Homo sapiens
atataaaaattggct

SEQ ID NO: 132189 - DNA, 15 bp, Homo sapiens
aatataaaaattggc

SEQ ID NO: 132190 - DNA, 15 bp, Homo sapiens
aaatataaaaattgg

SEQ ID NO: 132191 - DNA, 15 bp, Homo sapiens
aaaatataaaaattg

SEQ ID NO: 132192 - DNA, 15 bp, Homo sapiens
aaaaatataaaaatt

SEQ ID NO: 132193 - DNA, 15 bp, Homo sapiens
taaaaatataaaaat

SEQ ID NO: 132194 - DNA, 15 bp, Homo sapiens
ctaaaaatataaaaa

SEQ ID NO: 132195 - DNA, 15 bp, Homo sapiens
actaaaaatataaaa

SEQ ID NO: 132196 - DNA, 15 bp, Homo sapiens
cactaaaaatataaa

SEQ ID NO: 132197 - DNA, 15 bp, Homo sapiens
ccactaaaaatataa

SEQ ID NO: 132198 - DNA, 15 bp, Homo sapiens
tccactaaaaatata

SEQ ID NO: 132199 - DNA, 15 bp, Homo sapiens
ctccactaaaaatat

SEQ ID NO: 132200 - DNA, 15 bp, Homo sapiens
tctccactaaaaata

SEQ ID NO: 132201 - DNA, 15 bp, Homo sapiens
atctccactaaaaat

SEQ ID NO: 132202 - DNA, 15 bp, Homo sapiens
catctccactaaaaa

SEQ ID NO: 132203 - DNA, 15 bp, Homo sapiens
ccatctccactaaaa

SEQ ID NO: 132204 - DNA, 15 bp, Homo sapiens
cccatctccactaaa

SEQ ID NO: 132205 - DNA, 15 bp, Homo sapiens
ccccatctccactaa

SEQ ID NO: 132206 - DNA, 15 bp, Homo sapiens
accccatctccacta

SEQ ID NO: 132207 - DNA, 15 bp, Homo sapiens
aaccccatctccact

SEQ ID NO: 132208 - DNA, 15 bp, Homo sapiens
aaaccccatctccac

SEQ ID NO: 132209 - DNA, 15 bp, Homo sapiens
aaaaccccatctcca

SEQ ID NO: 132210 - DNA, 15 bp, Homo sapiens
caaaaccccatctcc

SEQ ID NO: 132211 - DNA, 15 bp, Homo sapiens
gcaaaaccccatctc

SEQ ID NO: 132212 - DNA, 15 bp, Homo sapiens
ggcaaaaccccatct

SEQ ID NO: 132213 - DNA, 15 bp, Homo sapiens
tggcaaaaccccatc

SEQ ID NO: 132214 - DNA, 15 bp, Homo sapiens
atggcaaaaccccat

SEQ ID NO: 132215 - DNA, 15 bp, Homo sapiens
catggcaaaacccca

SEQ ID NO: 132216 - DNA, 15 bp, Homo sapiens
acatggcaaaacccc

SEQ ID NO: 132217 - DNA, 15 bp, Homo sapiens
aacatggcaaaaccc

SEQ ID NO: 132218 - DNA, 15 bp, Homo sapiens
caacatggcaaaacc

SEQ ID NO: 132219 - DNA, 15 bp, Homo sapiens
ccaacatggcaaaac

SEQ ID NO: 132220 - DNA, 15 bp, Homo sapiens
gccaacatggcaaaa

SEQ ID NO: 132221 - DNA, 15 bp, Homo sapiens
ggccaacatggcaaa

SEQ ID NO: 132222 - DNA, 15 bp, Homo sapiens
tggccaacatggcaa

SEQ ID NO: 132223 - DNA, 15 bp, Homo sapiens
ctggccaacatggca

SEQ ID NO: 132224 - DNA, 15 bp, Homo sapiens
cctggccaacatggc

SEQ ID NO: 132225 - DNA, 15 bp, Homo sapiens
agaccagcctggcca

SEQ ID NO: 132226 - DNA, 15 bp, Homo sapiens
gagaccagcctggcc

SEQ ID NO: 132227 - DNA, 15 bp, Homo sapiens
cgagaccagcctggc

SEQ ID NO: 132228 - DNA, 15 bp, Homo sapiens
tcgagaccagcctgg

SEQ ID NO: 132229 - DNA, 15 bp, Homo sapiens
ttcgagaccagcctg

SEQ ID NO: 132230 - DNA, 15 bp, Homo sapiens
gttcgagaccagcct

SEQ ID NO: 132231 - DNA, 15 bp, Homo sapiens
agttcgagaccagcc

SEQ ID NO: 132232 - DNA, 15 bp, Homo sapiens
gagttcgagaccagc

SEQ ID NO: 132233 - DNA, 15 bp, Homo sapiens
ggagttcgagaccag

SEQ ID NO: 132234 - DNA, 15 bp, Homo sapiens
aggagttcgagacca

SEQ ID NO: 132235 - DNA, 15 bp, Homo sapiens
caggagttcgagacc

SEQ ID NO: 132236 - DNA, 15 bp, Homo sapiens
tcaggagttcgagac

SEQ ID NO: 132237 - DNA, 15 bp, Homo sapiens
gtcaggagttcgaga

SEQ ID NO: 132238 - DNA, 15 bp, Homo sapiens
tgtcaggagttcgag

SEQ ID NO: 132239 - DNA, 15 bp, Homo sapiens
atgtcaggagttcga

SEQ ID NO: 132240 - DNA, 15 bp, Homo sapiens
gatgtcaggagttcg

SEQ ID NO: 132241 - DNA, 15 bp, Homo sapiens
tgatgtcaggagttc

SEQ ID NO: 132242 - DNA, 15 bp, Homo sapiens
ctgatgtcaggagtt

SEQ ID NO: 132243 - DNA, 15 bp, Homo sapiens
cctgatgtcaggagt

SEQ ID NO: 132244 - DNA, 15 bp, Homo sapiens
acctgatgtcaggag

SEQ ID NO: 132245 - DNA, 15 bp, Homo sapiens
cacctgatgtcagga

SEQ ID NO: 132246 - DNA, 15 bp, Homo sapiens
tcacctgatgtcagg

SEQ ID NO: 132247 - DNA, 15 bp, Homo sapiens
atcacctgatgtcag

SEQ ID NO: 132248 - DNA, 15 bp, Homo sapiens
gatcacctgatgtca

SEQ ID NO: 132249 - DNA, 15 bp, Homo sapiens
agatcacctgatgtc

SEQ ID NO: 132250 - DNA, 15 bp, Homo sapiens
cagatcacctgatgt

SEQ ID NO: 132251 - DNA, 15 bp, Homo sapiens
gcagatcacctgatg

SEQ ID NO: 132252 - DNA, 15 bp, Homo sapiens
ggcagatcacctgat

SEQ ID NO: 132253 - DNA, 15 bp, Homo sapiens
gggcagatcacctga

SEQ ID NO: 132254 - DNA, 15 bp, Homo sapiens
cgggcagatcacctg

SEQ ID NO: 132255 - DNA, 15 bp, Homo sapiens
gcgggcagatcacct

SEQ ID NO: 132256 - DNA, 15 bp, Homo sapiens
ggcgggcagatcacc

SEQ ID NO: 132257 - DNA, 15 bp, Homo sapiens
aggcgggcagatcac

SEQ ID NO: 132258 - DNA, 15 bp, Homo sapiens
gaggcgggcagatca

SEQ ID NO: 132259 - DNA, 15 bp, Homo sapiens
tgaggcgggcagatc

SEQ ID NO: 132260 - DNA, 15 bp, Homo sapiens
ctgaggcgggcagat

SEQ ID NO: 132261 - DNA, 15 bp, Homo sapiens
gctgaggcgggcaga

SEQ ID NO: 132262 - DNA, 15 bp, Homo sapiens
ggctgaggcgggcag

SEQ ID NO: 132263 - DNA, 15 bp, Homo sapiens
aggctgaggcgggca

SEQ ID NO: 132264 - DNA, 15 bp, Homo sapiens
gaggctgaggcgggc

SEQ ID NO: 132265 - DNA, 15 bp, Homo sapiens
ggaggctgaggcggg

SEQ ID NO: 132266 - DNA, 15 bp, Homo sapiens
gggaggctgaggcgg

SEQ ID NO: 132267 - DNA, 15 bp, Homo sapiens
tgggaggctgaggcg

SEQ ID NO: 132268 - DNA, 15 bp, Homo sapiens
tttgggaggctgagg

SEQ ID NO: 132269 - DNA, 15 bp, Homo sapiens
ctttgggaggctgag

SEQ ID NO: 132270 - DNA, 15 bp, Homo sapiens
actttgggaggctga

SEQ ID NO: 132271 - DNA, 15 bp, Homo sapiens
cactttgggaggctg

SEQ ID NO: 132272 - DNA, 15 bp, Homo sapiens
acactttgggaggct

SEQ ID NO: 132273 - DNA, 15 bp, Homo sapiens
aacactttgggaggc

SEQ ID NO: 132274 - DNA, 15 bp, Homo sapiens
caacactttgggagg

SEQ ID NO: 132275 - DNA, 15 bp, Homo sapiens
ccaacactttgggag

SEQ ID NO: 132276 - DNA, 15 bp, Homo sapiens
cccaacactttggga

SEQ ID NO: 132277 - DNA, 15 bp, Homo sapiens
tcccaacactttggg

SEQ ID NO: 132278 - DNA, 15 bp, Homo sapiens
atcccaacactttgg

SEQ ID NO: 132279 - DNA, 15 bp, Homo sapiens
aatcccaacactttg

SEQ ID NO: 132280 - DNA, 15 bp, Homo sapiens
taatcccaacacttt

SEQ ID NO: 132281 - DNA, 15 bp, Homo sapiens
gtaatcccaacactt

SEQ ID NO: 132282 - DNA, 15 bp, Homo sapiens
tgtaatcccaacact

SEQ ID NO: 132283 - DNA, 15 bp, Homo sapiens
ctgtaatcccaacac

SEQ ID NO: 132284 - DNA, 15 bp, Homo sapiens
cctgtaatcccaaca

SEQ ID NO: 132285 - DNA, 15 bp, Homo sapiens
gcctgtaatcccaac

SEQ ID NO: 132286 - DNA, 15 bp, Homo sapiens
cgcctgtaatcccaa

SEQ ID NO: 132287 - DNA, 15 bp, Homo sapiens
ggtggctcacgcctg

SEQ ID NO: 132288 - DNA, 15 bp, Homo sapiens
cggtggctcacgcct

SEQ ID NO: 132289 - DNA, 15 bp, Homo sapiens
gcggtggctcacgcc

SEQ ID NO: 132290 - DNA, 15 bp, Homo sapiens
cgcggtggctcacgc

SEQ ID NO: 132291 - DNA, 15 bp, Homo sapiens
gcgcggtggctcacg

SEQ ID NO: 132292 - DNA, 15 bp, Homo sapiens
ggcgcggtggctcac

SEQ ID NO: 132293 - DNA, 15 bp, Homo sapiens
aggcgcggtggctca

SEQ ID NO: 132294 - DNA, 15 bp, Homo sapiens
caggcgcggtggctc

SEQ ID NO: 132295 - DNA, 15 bp, Homo sapiens
ccaggcgcggtggct

SEQ ID NO: 132296 - DNA, 15 bp, Homo sapiens
gccaggcgcggtggc

SEQ ID NO: 132297 - DNA, 15 bp, Homo sapiens
ggccaggcgcggtgg

SEQ ID NO: 132298 - DNA, 15 bp, Homo sapiens
tggccaggcgcggtg

SEQ ID NO: 132299 - DNA, 15 bp, Homo sapiens
gtggccaggcgcggt

SEQ ID NO: 132300 - DNA, 15 bp, Homo sapiens
agtggccaggcgcgg

SEQ ID NO: 132301 - DNA, 15 bp, Homo sapiens
tagtggccaggcgcg

SEQ ID NO: 132302 - DNA, 15 bp, Homo sapiens
gtagtggccaggcgc

SEQ ID NO: 132303 - DNA, 15 bp, Homo sapiens
agtagtggccaggcg

SEQ ID NO: 132304 - DNA, 15 bp, Homo sapiens
cagtagtggccaggc

SEQ ID NO: 132305 - DNA, 15 bp, Homo sapiens
gcagtagtggccagg

SEQ ID NO: 132306 - DNA, 15 bp, Homo sapiens
tgcagtagtggccag

SEQ ID NO: 132307 - DNA, 15 bp, Homo sapiens
gtgcagtagtggcca

SEQ ID NO: 132308 - DNA, 15 bp, Homo sapiens
agtgcagtagtggcc

SEQ ID NO: 132309 - DNA, 15 bp, Homo sapiens
aagtgcagtagtggc

SEQ ID NO: 132310 - DNA, 15 bp, Homo sapiens
aaagtgcagtagtgg

SEQ ID NO: 132311 - DNA, 15 bp, Homo sapiens
aaaagtgcagtagtg

SEQ ID NO: 132312 - DNA, 15 bp, Homo sapiens
aaaaagtgcagtagt

SEQ ID NO: 132313 - DNA, 15 bp, Homo sapiens
aaaaaagtgcagtag

SEQ ID NO: 132314 - DNA, 15 bp, Homo sapiens
taaaaaagtgcagta

SEQ ID NO: 132315 - DNA, 15 bp, Homo sapiens
gtaaaaaagtgcagt

SEQ ID NO: 132316 - DNA, 15 bp, Homo sapiens
agtaaaaaagtgcag

SEQ ID NO: 132317 - DNA, 15 bp, Homo sapiens
aagtaaaaaagtgca

SEQ ID NO: 132318 - DNA, 15 bp, Homo sapiens
gaagtaaaaaagtgc

SEQ ID NO: 132319 - DNA, 15 bp, Homo sapiens
tgaagtaaaaaagtg

SEQ ID NO: 132320 - DNA, 15 bp, Homo sapiens
gtgaagtaaaaaagt

SEQ ID NO: 132321 - DNA, 15 bp, Homo sapiens
tgtgaagtaaaaaag

SEQ ID NO: 132322 - DNA, 15 bp, Homo sapiens
ttgtgaagtaaaaaa

SEQ ID NO: 132323 - DNA, 15 bp, Homo sapiens
tttgtgaagtaaaaa

SEQ ID NO: 132324 - DNA, 15 bp, Homo sapiens
ctttgtgaagtaaaa

SEQ ID NO: 132325 - DNA, 15 bp, Homo sapiens
tctttgtgaagtaaa

SEQ ID NO: 132326 - DNA, 15 bp, Homo sapiens
ctctttgtgaagtaa

SEQ ID NO: 132327 - DNA, 15 bp, Homo sapiens
tctctttgtgaagta

SEQ ID NO: 132328 - DNA, 15 bp, Homo sapiens
gtctctttgtgaagt

SEQ ID NO: 132329 - DNA, 15 bp, Homo sapiens
agtctctttgtgaag

SEQ ID NO: 132330 - DNA, 15 bp, Homo sapiens
cagtctctttgtgaa

SEQ ID NO: 132331 - DNA, 15 bp, Homo sapiens
acagtctctttgtga

SEQ ID NO: 132332 - DNA, 15 bp, Homo sapiens
cacagtctctttgtg

SEQ ID NO: 132333 - DNA, 15 bp, Homo sapiens
tcacagtctctttgt

SEQ ID NO: 132334 - DNA, 15 bp, Homo sapiens
ttcacagtctctttg

SEQ ID NO: 132335 - DNA, 15 bp, Homo sapiens
cttcacagtctcttt

SEQ ID NO: 132336 - DNA, 15 bp, Homo sapiens
tcttcacagtctctt

SEQ ID NO: 132337 - DNA, 15 bp, Homo sapiens
gtcttcacagtctct

SEQ ID NO: 132338 - DNA, 15 bp, Homo sapiens
ggtcttcacagtctc

SEQ ID NO: 132339 - DNA, 15 bp, Homo sapiens
tggtcttcacagtct

SEQ ID NO: 132340 - DNA, 15 bp, Homo sapiens
ttggtcttcacagtc

SEQ ID NO: 132341 - DNA, 15 bp, Homo sapiens
cttggtcttcacagt

SEQ ID NO: 132342 - DNA, 15 bp, Homo sapiens
ccttggtcttcacag

SEQ ID NO: 132343 - DNA, 15 bp, Homo sapiens
cccttggtcttcaca

SEQ ID NO: 132344 - DNA, 15 bp, Homo sapiens
acccttggtcttcac

SEQ ID NO: 132345 - DNA, 15 bp, Homo sapiens
cacccttggtcttca

SEQ ID NO: 132346 - DNA, 15 bp, Homo sapiens
ccacccttggtcttc

SEQ ID NO: 132347 - DNA, 15 bp, Homo sapiens
accacccttggtctt

SEQ ID NO: 132348 - DNA, 15 bp, Homo sapiens
aaccacccttggtct

SEQ ID NO: 132349 - DNA, 15 bp, Homo sapiens
taaccacccttggtc

SEQ ID NO: 132350 - DNA, 15 bp, Homo sapiens
ctaaccacccttggt

SEQ ID NO: 132351 - DNA, 15 bp, Homo sapiens
tctaaccacccttgg

SEQ ID NO: 132352 - DNA, 15 bp, Homo sapiens
ttctaaccacccttg

SEQ ID NO: 132353 - DNA, 15 bp, Homo sapiens
tttctaaccaccctt

SEQ ID NO: 132354 - DNA, 15 bp, Homo sapiens
ctttctaaccaccct

SEQ ID NO: 132355 - DNA, 15 bp, Homo sapiens
tctttctaaccaccc

SEQ ID NO: 132356 - DNA, 15 bp, Homo sapiens
ctctttctaaccacc

SEQ ID NO: 132357 - DNA, 15 bp, Homo sapiens
cctctttctaaccac

SEQ ID NO: 132358 - DNA, 15 bp, Homo sapiens
ccctctttctaacca

SEQ ID NO: 132359 - DNA, 15 bp, Homo sapiens
tccctctttctaacc

SEQ ID NO: 132360 - DNA, 15 bp, Homo sapiens
atccctctttctaac

SEQ ID NO: 132361 - DNA, 15 bp, Homo sapiens
tatccctctttctaa

SEQ ID NO: 132362 - DNA, 15 bp, Homo sapiens
gtatccctctttcta

SEQ ID NO: 132363 - DNA, 15 bp, Homo sapiens
agtatccctctttct

SEQ ID NO: 132364 - DNA, 15 bp, Homo sapiens
cagtatccctctttc

SEQ ID NO: 132365 - DNA, 15 bp, Homo sapiens
gcagtatccctcttt

SEQ ID NO: 132366 - DNA, 15 bp, Homo sapiens
agcagtatccctctt

SEQ ID NO: 132367 - DNA, 15 bp, Homo sapiens
cagcagtatccctct

SEQ ID NO: 132368 - DNA, 15 bp, Homo sapiens
tcagcagtatccctc

SEQ ID NO: 132369 - DNA, 15 bp, Homo sapiens
gtcagcagtatccct

SEQ ID NO: 132370 - DNA, 15 bp, Homo sapiens
agtcagcagtatccc

SEQ ID NO: 132371 - DNA, 15 bp, Homo sapiens
aagtcagcagtatcc

SEQ ID NO: 132372 - DNA, 15 bp, Homo sapiens
aaagtcagcagtatc

SEQ ID NO: 132373 - DNA, 15 bp, Homo sapiens
taaagtcagcagtat

SEQ ID NO: 132374 - DNA, 15 bp, Homo sapiens
ttaaagtcagcagta

SEQ ID NO: 132375 - DNA, 15 bp, Homo sapiens
tttaaagtcagcagt

SEQ ID NO: 132376 - DNA, 15 bp, Homo sapiens
ttttaaagtcagcag

SEQ ID NO: 132377 - DNA, 15 bp, Homo sapiens
cttttaaagtcagca

SEQ ID NO: 132378 - DNA, 15 bp, Homo sapiens
tcttttaaagtcagc

SEQ ID NO: 132379 - DNA, 15 bp, Homo sapiens
ttcttttaaagtcag

SEQ ID NO: 132380 - DNA, 15 bp, Homo sapiens
tttcttttaaagtca

SEQ ID NO: 132381 - DNA, 15 bp, Homo sapiens
ttttcttttaaagtc

SEQ ID NO: 132382 - DNA, 15 bp, Homo sapiens
gttttcttttaaagt

SEQ ID NO: 132383 - DNA, 15 bp, Homo sapiens
tgttttcttttaaag

SEQ ID NO: 132384 - DNA, 15 bp, Homo sapiens
gtgttttcttttaaa

SEQ ID NO: 132385 - DNA, 15 bp, Homo sapiens
tgtgttttcttttaa

SEQ ID NO: 132386 - DNA, 15 bp, Homo sapiens
ctgtgttttctttta

SEQ ID NO: 132387 - DNA, 15 bp, Homo sapiens
actgtgttttctttt

SEQ ID NO: 132388 - DNA, 15 bp, Homo sapiens
cactgtgttttcttt

SEQ ID NO: 132389 - DNA, 15 bp, Homo sapiens
ccactgtgttttctt

SEQ ID NO: 132390 - DNA, 15 bp, Homo sapiens
accactgtgttttct

SEQ ID NO: 132391 - DNA, 15 bp, Homo sapiens
caccactgtgttttc

SEQ ID NO: 132392 - DNA, 15 bp, Homo sapiens
tcaccactgtgtttt

SEQ ID NO: 132393 - DNA, 15 bp, Homo sapiens
atcaccactgtgttt

SEQ ID NO: 132394 - DNA, 15 bp, Homo sapiens
aatcaccactgtgtt

SEQ ID NO: 132395 - DNA, 15 bp, Homo sapiens
gaatcaccactgtgt

SEQ ID NO: 132396 - DNA, 15 bp, Homo sapiens
tgaatcaccactgtg

SEQ ID NO: 132397 - DNA, 15 bp, Homo sapiens
ttgaatcaccactgt

SEQ ID NO: 132398 - DNA, 15 bp, Homo sapiens
cttgaatcaccactg

SEQ ID NO: 132399 - DNA, 15 bp, Homo sapiens
ccttgaatcaccact

SEQ ID NO: 132400 - DNA, 15 bp, Homo sapiens
tccttgaatcaccac

SEQ ID NO: 132401 - DNA, 15 bp, Homo sapiens
ttccttgaatcacca

SEQ ID NO: 132402 - DNA, 15 bp, Homo sapiens
cttccttgaatcacc

SEQ ID NO: 132403 - DNA, 15 bp, Homo sapiens
ccttccttgaatcac

SEQ ID NO: 132404 - DNA, 15 bp, Homo sapiens
cccttccttgaatca

SEQ ID NO: 132405 - DNA, 15 bp, Homo sapiens
gcccttccttgaatc

SEQ ID NO: 132406 - DNA, 15 bp, Homo sapiens
tgcccttccttgaat

SEQ ID NO: 132407 - DNA, 15 bp, Homo sapiens
ctgcccttccttgaa

SEQ ID NO: 132408 - DNA, 15 bp, Homo sapiens
cctgcccttccttga

SEQ ID NO: 132409 - DNA, 15 bp, Homo sapiens
ccctgcccttccttg

SEQ ID NO: 132410 - DNA, 15 bp, Homo sapiens
accctgcccttcctt

SEQ ID NO: 132411 - DNA, 15 bp, Homo sapiens
aaccctgcccttcct

SEQ ID NO: 132412 - DNA, 15 bp, Homo sapiens
taaccctgcccttcc

SEQ ID NO: 132413 - DNA, 15 bp, Homo sapiens
gtaaccctgcccttc

SEQ ID NO: 132414 - DNA, 15 bp, Homo sapiens
agtaaccctgccctt

SEQ ID NO: 132415 - DNA, 15 bp, Homo sapiens
cagtaaccctgccct

SEQ ID NO: 132416 - DNA, 15 bp, Homo sapiens
ccagtaaccctgccc

SEQ ID NO: 132417 - DNA, 15 bp, Homo sapiens
accagtaaccctgcc

SEQ ID NO: 132418 - DNA, 15 bp, Homo sapiens
caccagtaaccctgc

SEQ ID NO: 132419 - DNA, 15 bp, Homo sapiens
ccaccagtaaccctg

SEQ ID NO: 132420 - DNA, 15 bp, Homo sapiens
gccaccagtaaccct

SEQ ID NO: 132421 - DNA, 15 bp, Homo sapiens
tgccaccagtaaccc

SEQ ID NO: 132422 - DNA, 15 bp, Homo sapiens
ctgccaccagtaacc

SEQ ID NO: 132423 - DNA, 15 bp, Homo sapiens
actgccaccagtaac

SEQ ID NO: 132424 - DNA, 15 bp, Homo sapiens
tactgccaccagtaa

SEQ ID NO: 132425 - DNA, 15 bp, Homo sapiens
ttactgccaccagta

SEQ ID NO: 132426 - DNA, 15 bp, Homo sapiens
gttactgccaccagt

SEQ ID NO: 132427 - DNA, 15 bp, Homo sapiens
tgttactgccaccag

SEQ ID NO: 132428 - DNA, 15 bp, Homo sapiens
ctgttactgccacca

SEQ ID NO: 132429 - DNA, 15 bp, Homo sapiens
actgttactgccacc

SEQ ID NO: 132430 - DNA, 15 bp, Homo sapiens
aactgttactgccac

SEQ ID NO: 132431 - DNA, 15 bp, Homo sapiens
caactgttactgcca

SEQ ID NO: 132432 - DNA, 15 bp, Homo sapiens
tcaactgttactgcc

SEQ ID NO: 132433 - DNA, 15 bp, Homo sapiens
ctcaactgttactgc

SEQ ID NO: 132434 - DNA, 15 bp, Homo sapiens
tctcaactgttactg

SEQ ID NO: 132435 - DNA, 15 bp, Homo sapiens
atctcaactgttact

SEQ ID NO: 132436 - DNA, 15 bp, Homo sapiens
gatctcaactgttac

SEQ ID NO: 132437 - DNA, 15 bp, Homo sapiens
agatctcaactgtta

SEQ ID NO: 132438 - DNA, 15 bp, Homo sapiens
cagatctcaactgtt

SEQ ID NO: 132439 - DNA, 15 bp, Homo sapiens
tcagatctcaactgt

SEQ ID NO: 132440 - DNA, 15 bp, Homo sapiens
gtcagatctcaactg

SEQ ID NO: 132441 - DNA, 15 bp, Homo sapiens
tgtcagatctcaact

SEQ ID NO: 132442 - DNA, 15 bp, Homo sapiens
atgtcagatctcaac

SEQ ID NO: 132443 - DNA, 15 bp, Homo sapiens
gatgtcagatctcaa

SEQ ID NO: 132444 - DNA, 15 bp, Homo sapiens
tgatgtcagatctca

SEQ ID NO: 132445 - DNA, 15 bp, Homo sapiens
ttgatgtcagatctc

SEQ ID NO: 132446 - DNA, 15 bp, Homo sapiens
cttgatgtcagatct

SEQ ID NO: 132447 - DNA, 15 bp, Homo sapiens
acttgatgtcagatc

SEQ ID NO: 132448 - DNA, 15 bp, Homo sapiens
gacttgatgtcagat

SEQ ID NO: 132449 - DNA, 15 bp, Homo sapiens
tgacttgatgtcaga

SEQ ID NO: 132450 - DNA, 15 bp, Homo sapiens
atgacttgatgtcag

SEQ ID NO: 132451 - DNA, 15 bp, Homo sapiens
tatgacttgatgtca

SEQ ID NO: 132452 - DNA, 15 bp, Homo sapiens
ctatgacttgatgtc

SEQ ID NO: 132453 - DNA, 15 bp, Homo sapiens
actatgacttgatgt

SEQ ID NO: 132454 - DNA, 15 bp, Homo sapiens
tactatgacttgatg

SEQ ID NO: 132455 - DNA, 15 bp, Homo sapiens
ttactatgacttgat

SEQ ID NO: 132456 - DNA, 15 bp, Homo sapiens
attactatgacttga

SEQ ID NO: 132457 - DNA, 15 bp, Homo sapiens
tattactatgacttg

SEQ ID NO: 132458 - DNA, 15 bp, Homo sapiens
ttattactatgactt

SEQ ID NO: 132459 - DNA, 15 bp, Homo sapiens
gttattactatgact

SEQ ID NO: 132460 - DNA, 15 bp, Homo sapiens
tgttattactatgac

SEQ ID NO: 132461 - DNA, 15 bp, Homo sapiens
atgttattactatga

SEQ ID NO: 132462 - DNA, 15 bp, Homo sapiens
catgttattactatg

SEQ ID NO: 132463 - DNA, 15 bp, Homo sapiens
tcatgttattactat

SEQ ID NO: 132464 - DNA, 15 bp, Homo sapiens
ttcatgttattacta

SEQ ID NO: 132465 - DNA, 15 bp, Homo sapiens
gttcatgttattact

SEQ ID NO: 132466 - DNA, 15 bp, Homo sapiens
agttcatgttattac

SEQ ID NO: 132467 - DNA, 15 bp, Homo sapiens
aagttcatgttatta

SEQ ID NO: 132468 - DNA, 15 bp, Homo sapiens
aaagttcatgttatt

SEQ ID NO: 132469 - DNA, 15 bp, Homo sapiens
caaagttcatgttat

SEQ ID NO: 132470 - DNA, 15 bp, Homo sapiens
acaaagttcatgtta

SEQ ID NO: 132471 - DNA, 15 bp, Homo sapiens
aacaaagttcatgtt

SEQ ID NO: 132472 - DNA, 15 bp, Homo sapiens
taacaaagttcatgt

SEQ ID NO: 132473 - DNA, 15 bp, Homo sapiens
ctaacaaagttcatg

SEQ ID NO: 132474 - DNA, 15 bp, Homo sapiens
gctaacaaagttcat

SEQ ID NO: 132475 - DNA, 15 bp, Homo sapiens
agctaacaaagttca

SEQ ID NO: 132476 - DNA, 15 bp, Homo sapiens
cagctaacaaagttc

SEQ ID NO: 132477 - DNA, 15 bp, Homo sapiens
gcagctaacaaagtt

SEQ ID NO: 132478 - DNA, 15 bp, Homo sapiens
ggcagctaacaaagt

SEQ ID NO: 132479 - DNA, 15 bp, Homo sapiens
aggcagctaacaaag

SEQ ID NO: 132480 - DNA, 15 bp, Homo sapiens
aaggcagctaacaaa

SEQ ID NO: 132481 - DNA, 15 bp, Homo sapiens
aaaggcagctaacaa

SEQ ID NO: 132482 - DNA, 15 bp, Homo sapiens
taaaggcagctaaca

SEQ ID NO: 132483 - DNA, 15 bp, Homo sapiens
ataaaggcagctaac

SEQ ID NO: 132484 - DNA, 15 bp, Homo sapiens
gataaaggcagctaa

SEQ ID NO: 132485 - DNA, 15 bp, Homo sapiens
ggataaaggcagcta

SEQ ID NO: 132486 - DNA, 15 bp, Homo sapiens
tggataaaggcagct

SEQ ID NO: 132487 - DNA, 15 bp, Homo sapiens
gtggataaaggcagc

SEQ ID NO: 132488 - DNA, 15 bp, Homo sapiens
tgtggataaaggcag

SEQ ID NO: 132489 - DNA, 15 bp, Homo sapiens
ttgtggataaaggca

SEQ ID NO: 132490 - DNA, 15 bp, Homo sapiens
gttgtggataaaggc

SEQ ID NO: 132491 - DNA, 15 bp, Homo sapiens
tgttgtggataaagg

SEQ ID NO: 132492 - DNA, 15 bp, Homo sapiens
ctgttgtggataaag

SEQ ID NO: 132493 - DNA, 15 bp, Homo sapiens
gctgttgtggataaa

SEQ ID NO: 132494 - DNA, 15 bp, Homo sapiens
agctgttgtggataa

SEQ ID NO: 132495 - DNA, 15 bp, Homo sapiens
aagctgttgtggata

SEQ ID NO: 132496 - DNA, 15 bp, Homo sapiens
taagctgttgtggat

SEQ ID NO: 132497 - DNA, 15 bp, Homo sapiens
ataagctgttgtgga

SEQ ID NO: 132498 - DNA, 15 bp, Homo sapiens
tataagctgttgtgg

SEQ ID NO: 132499 - DNA, 15 bp, Homo sapiens
atataagctgttgtg

SEQ ID NO: 132500 - DNA, 15 bp, Homo sapiens
catataagctgttgt

SEQ ID NO: 132501 - DNA, 15 bp, Homo sapiens
gcatataagctgttg

SEQ ID NO: 132502 - DNA, 15 bp, Homo sapiens
agcatataagctgtt

SEQ ID NO: 132503 - DNA, 15 bp, Homo sapiens
cagcatataagctgt

SEQ ID NO: 132504 - DNA, 15 bp, Homo sapiens
ccagcatataagctg

SEQ ID NO: 132505 - DNA, 15 bp, Homo sapiens
accagcatataagct

SEQ ID NO: 132506 - DNA, 15 bp, Homo sapiens
taccagcatataagc

SEQ ID NO: 132507 - DNA, 15 bp, Homo sapiens
ctaccagcatataag

SEQ ID NO: 132508 - DNA, 15 bp, Homo sapiens
cctaccagcatataa

SEQ ID NO: 132509 - DNA, 15 bp, Homo sapiens
tcctaccagcatata

SEQ ID NO: 132510 - DNA, 15 bp, Homo sapiens
gtcctaccagcatat

SEQ ID NO: 132511 - DNA, 15 bp, Homo sapiens
agtcctaccagcata

SEQ ID NO: 132512 - DNA, 15 bp, Homo sapiens
cagtcctaccagcat

SEQ ID NO: 132513 - DNA, 15 bp, Homo sapiens
ccagtcctaccagca

SEQ ID NO: 132514 - DNA, 15 bp, Homo sapiens
accagtcctaccagc

SEQ ID NO: 132515 - DNA, 15 bp, Homo sapiens
taccagtcctaccag

SEQ ID NO: 132516 - DNA, 15 bp, Homo sapiens
ttaccagtcctacca

SEQ ID NO: 132517 - DNA, 15 bp, Homo sapiens
gttaccagtcctacc

SEQ ID NO: 132518 - DNA, 15 bp, Homo sapiens
agttaccagtcctac

SEQ ID NO: 132519 - DNA, 15 bp, Homo sapiens
tagttaccagtccta

SEQ ID NO: 132520 - DNA, 15 bp, Homo sapiens
ctagttaccagtcct

SEQ ID NO: 132521 - DNA, 15 bp, Homo sapiens
tctagttaccagtcc

SEQ ID NO: 132522 - DNA, 15 bp, Homo sapiens
atctagttaccagtc

SEQ ID NO: 132523 - DNA, 15 bp, Homo sapiens
tatctagttaccagt

SEQ ID NO: 132524 - DNA, 15 bp, Homo sapiens
ttatctagttaccag

SEQ ID NO: 132525 - DNA, 15 bp, Homo sapiens
attatctagttacca

SEQ ID NO: 132526 - DNA, 15 bp, Homo sapiens
aattatctagttacc

SEQ ID NO: 132527 - DNA, 15 bp, Homo sapiens
gaattatctagttac

SEQ ID NO: 132528 - DNA, 15 bp, Homo sapiens
tgaattatctagtta

SEQ ID NO: 132529 - DNA, 15 bp, Homo sapiens
atgaattatctagtt

SEQ ID NO: 132530 - DNA, 15 bp, Homo sapiens
tatgaattatctagt

SEQ ID NO: 132531 - DNA, 15 bp, Homo sapiens
gtatgaattatctag

SEQ ID NO: 132532 - DNA, 15 bp, Homo sapiens
agtatgaattatcta

SEQ ID NO: 132533 - DNA, 15 bp, Homo sapiens
cagtatgaattatct

SEQ ID NO: 132534 - DNA, 15 bp, Homo sapiens
acagtatgaattatc

SEQ ID NO: 132535 - DNA, 15 bp, Homo sapiens
aacagtatgaattat

SEQ ID NO: 132536 - DNA, 15 bp, Homo sapiens
caacagtatgaatta

SEQ ID NO: 132537 - DNA, 15 bp, Homo sapiens
tcaacagtatgaatt

SEQ ID NO: 132538 - DNA, 15 bp, Homo sapiens
ttcaacagtatgaat

SEQ ID NO: 132539 - DNA, 15 bp, Homo sapiens
cttcaacagtatgaa

SEQ ID NO: 132540 - DNA, 15 bp, Homo sapiens
gcttcaacagtatga

SEQ ID NO: 132541 - DNA, 15 bp, Homo sapiens
agcttcaacagtatg

SEQ ID NO: 132542 - DNA, 15 bp, Homo sapiens
cagcttcaacagtat

SEQ ID NO: 132543 - DNA, 15 bp, Homo sapiens
acagcttcaacagta

SEQ ID NO: 132544 - DNA, 15 bp, Homo sapiens
tacagcttcaacagt

SEQ ID NO: 132545 - DNA, 15 bp, Homo sapiens
ctacagcttcaacag

SEQ ID NO: 132546 - DNA, 15 bp, Homo sapiens
cctacagcttcaaca

SEQ ID NO: 132547 - DNA, 15 bp, Homo sapiens
ccctacagcttcaac

SEQ ID NO: 132548 - DNA, 15 bp, Homo sapiens
accctacagcttcaa

SEQ ID NO: 132549 - DNA, 15 bp, Homo sapiens
aaccctacagcttca

SEQ ID NO: 132550 - DNA, 15 bp, Homo sapiens
aaaccctacagcttc

SEQ ID NO: 132551 - DNA, 15 bp, Homo sapiens
aaaaccctacagctt

SEQ ID NO: 132552 - DNA, 15 bp, Homo sapiens
caaaaccctacagct

SEQ ID NO: 132553 - DNA, 15 bp, Homo sapiens
acaaaaccctacagc

SEQ ID NO: 132554 - DNA, 15 bp, Homo sapiens
aacaaaaccctacag

SEQ ID NO: 132555 - DNA, 15 bp, Homo sapiens
caacaaaaccctaca

SEQ ID NO: 132556 - DNA, 15 bp, Homo sapiens
acaacaaaaccctac

SEQ ID NO: 132557 - DNA, 15 bp, Homo sapiens
aacaacaaaacccta

SEQ ID NO: 132558 - DNA, 15 bp, Homo sapiens
aaacaacaaaaccct

SEQ ID NO: 132559 - DNA, 15 bp, Homo sapiens
aaaacaacaaaaccc

SEQ ID NO: 132560 - DNA, 15 bp, Homo sapiens
aaaaacaacaaaacc

SEQ ID NO: 132561 - DNA, 15 bp, Homo sapiens
aaaaaacaacaaaac

SEQ ID NO: 132562 - DNA, 15 bp, Homo sapiens
aaaaaaacaacaaaa

SEQ ID NO: 132563 - DNA, 15 bp, Homo sapiens
taaaaaaacaacaaa

SEQ ID NO: 132564 - DNA, 15 bp, Homo sapiens
ataaaaaaacaacaa

SEQ ID NO: 132565 - DNA, 15 bp, Homo sapiens
gataaaaaaacaaca

SEQ ID NO: 132566 - DNA, 15 bp, Homo sapiens
tgataaaaaaacaac

SEQ ID NO: 132567 - DNA, 15 bp, Homo sapiens
ttgataaaaaaacaa

SEQ ID NO: 132568 - DNA, 15 bp, Homo sapiens
attgataaaaaaaca

SEQ ID NO: 132569 - DNA, 15 bp, Homo sapiens
aattgataaaaaaac

SEQ ID NO: 132570 - DNA, 15 bp, Homo sapiens
aaattgataaaaaaa

SEQ ID NO: 132571 - DNA, 15 bp, Homo sapiens
aaaattgataaaaaa

SEQ ID NO: 132572 - DNA, 15 bp, Homo sapiens
aaaaattgataaaaa

SEQ ID NO: 132573 - DNA, 15 bp, Homo sapiens
gaaaaattgataaaa

SEQ ID NO: 132574 - DNA, 15 bp, Homo sapiens
agaaaaattgataaa

SEQ ID NO: 132575 - DNA, 15 bp, Homo sapiens
aagaaaaattgataa

SEQ ID NO: 132576 - DNA, 15 bp, Homo sapiens
taagaaaaattgata

SEQ ID NO: 132577 - DNA, 15 bp, Homo sapiens
ataagaaaaattgat

SEQ ID NO: 132578 - DNA, 15 bp, Homo sapiens
aataagaaaaattga

SEQ ID NO: 132579 - DNA, 15 bp, Homo sapiens
aaataagaaaaattg

SEQ ID NO: 132580 - DNA, 15 bp, Homo sapiens
aaaataagaaaaatt

SEQ ID NO: 132581 - DNA, 15 bp, Homo sapiens
aaaaataagaaaaat

SEQ ID NO: 132582 - DNA, 15 bp, Homo sapiens
aaaaaataagaaaaa

SEQ ID NO: 132583 - DNA, 15 bp, Homo sapiens
aaaaaaataagaaaa

SEQ ID NO: 132584 - DNA, 15 bp, Homo sapiens
taaaaaaataagaaa

SEQ ID NO: 132585 - DNA, 15 bp, Homo sapiens
ttaaaaaaataagaa

SEQ ID NO: 132586 - DNA, 15 bp, Homo sapiens
cttaaaaaaataaga

SEQ ID NO: 132587 - DNA, 15 bp, Homo sapiens
acttaaaaaaataag

SEQ ID NO: 132588 - DNA, 15 bp, Homo sapiens
cacttaaaaaaataa

SEQ ID NO: 132589 - DNA, 15 bp, Homo sapiens
tcacttaaaaaaata

SEQ ID NO: 132590 - DNA, 15 bp, Homo sapiens
gtcacttaaaaaaat

SEQ ID NO: 132591 - DNA, 15 bp, Homo sapiens
tgtcacttaaaaaaa

SEQ ID NO: 132592 - DNA, 15 bp, Homo sapiens
ttgtcacttaaaaaa

SEQ ID NO: 132593 - DNA, 15 bp, Homo sapiens
tttgtcacttaaaaa

SEQ ID NO: 132594 - DNA, 15 bp, Homo sapiens
ttttgtcacttaaaa

SEQ ID NO: 132595 - DNA, 15 bp, Homo sapiens
tttttgtcacttaaa

SEQ ID NO: 132596 - DNA, 15 bp, Homo sapiens
ctttttgtcacttaa

SEQ ID NO: 132597 - DNA, 15 bp, Homo sapiens
actttttgtcactta

SEQ ID NO: 132598 - DNA, 15 bp, Homo sapiens
cactttttgtcactt

SEQ ID NO: 132599 - DNA, 15 bp, Homo sapiens
acactttttgtcact

SEQ ID NO: 132600 - DNA, 15 bp, Homo sapiens
cacactttttgtcac

SEQ ID NO: 132601 - DNA, 15 bp, Homo sapiens
acacactttttgtca

SEQ ID NO: 132602 - DNA, 15 bp, Homo sapiens
aacacactttttgtc

SEQ ID NO: 132603 - DNA, 15 bp, Homo sapiens
aaacacactttttgt

SEQ ID NO: 132604 - DNA, 15 bp, Homo sapiens
taaacacactttttg

SEQ ID NO: 132605 - DNA, 15 bp, Homo sapiens
ataaacacacttttt

SEQ ID NO: 132606 - DNA, 15 bp, Homo sapiens
cataaacacactttt

SEQ ID NO: 132607 - DNA, 15 bp, Homo sapiens
ccataaacacacttt

SEQ ID NO: 132608 - DNA, 15 bp, Homo sapiens
accataaacacactt

SEQ ID NO: 132609 - DNA, 15 bp, Homo sapiens
caccataaacacact

SEQ ID NO: 132610 - DNA, 15 bp, Homo sapiens
acaccataaacacac

SEQ ID NO: 132611 - DNA, 15 bp, Homo sapiens
tacaccataaacaca

SEQ ID NO: 132612 - DNA, 15 bp, Homo sapiens
gtacaccataaacac

SEQ ID NO: 132613 - DNA, 15 bp, Homo sapiens
tgtacaccataaaca

SEQ ID NO: 132614 - DNA, 15 bp, Homo sapiens
atgtacaccataaac

SEQ ID NO: 132615 - DNA, 15 bp, Homo sapiens
catgtacaccataaa

SEQ ID NO: 132616 - DNA, 15 bp, Homo sapiens
tcatgtacaccataa

SEQ ID NO: 132617 - DNA, 15 bp, Homo sapiens
atcatgtacaccata

SEQ ID NO: 132618 - DNA, 15 bp, Homo sapiens
catcatgtacaccat

SEQ ID NO: 132619 - DNA, 15 bp, Homo sapiens
acatcatgtacacca

SEQ ID NO: 132620 - DNA, 15 bp, Homo sapiens
aacatcatgtacacc

SEQ ID NO: 132621 - DNA, 15 bp, Homo sapiens
aaacatcatgtacac

SEQ ID NO: 132622 - DNA, 15 bp, Homo sapiens
gaaacatcatgtaca

SEQ ID NO: 132623 - DNA, 15 bp, Homo sapiens
tgaaacatcatgtac

SEQ ID NO: 132624 - DNA, 15 bp, Homo sapiens
ttgaaacatcatgta

SEQ ID NO: 132625 - DNA, 15 bp, Homo sapiens
tttgaaacatcatgt

SEQ ID NO: 132626 - DNA, 15 bp, Homo sapiens
ttttgaaacatcatg

SEQ ID NO: 132627 - DNA, 15 bp, Homo sapiens
attttgaaacatcat

SEQ ID NO: 132628 - DNA, 15 bp, Homo sapiens
tattttgaaacatca

SEQ ID NO: 132629 - DNA, 15 bp, Homo sapiens
gtattttgaaacatc

SEQ ID NO: 132630 - DNA, 15 bp, Homo sapiens
tgtattttgaaacat

SEQ ID NO: 132631 - DNA, 15 bp, Homo sapiens
gtgtattttgaaaca

SEQ ID NO: 132632 - DNA, 15 bp, Homo sapiens
tgtgtattttgaaac

SEQ ID NO: 132633 - DNA, 15 bp, Homo sapiens
atgtgtattttgaaa

SEQ ID NO: 132634 - DNA, 15 bp, Homo sapiens
tatgtgtattttgaa

SEQ ID NO: 132635 - DNA, 15 bp, Homo sapiens
gtatgtgtattttga

SEQ ID NO: 132636 - DNA, 15 bp, Homo sapiens
tgtatgtgtattttg

SEQ ID NO: 132637 - DNA, 15 bp, Homo sapiens
atgtatgtgtatttt

SEQ ID NO: 132638 - DNA, 15 bp, Homo sapiens
aatgtatgtgtattt

SEQ ID NO: 132639 - DNA, 15 bp, Homo sapiens
caatgtatgtgtatt

SEQ ID NO: 132640 - DNA, 15 bp, Homo sapiens
acaatgtatgtgtat

SEQ ID NO: 132641 - DNA, 15 bp, Homo sapiens
cacaatgtatgtgta

SEQ ID NO: 132642 - DNA, 15 bp, Homo sapiens
ccacaatgtatgtgt

SEQ ID NO: 132643 - DNA, 15 bp, Homo sapiens
tccacaatgtatgtg

SEQ ID NO: 132644 - DNA, 15 bp, Homo sapiens
ttccacaatgtatgt

SEQ ID NO: 132645 - DNA, 15 bp, Homo sapiens
attccacaatgtatg

SEQ ID NO: 132646 - DNA, 15 bp, Homo sapiens
cattccacaatgtat

SEQ ID NO: 132647 - DNA, 15 bp, Homo sapiens
ccattccacaatgta

SEQ ID NO: 132648 - DNA, 15 bp, Homo sapiens
gccattccacaatgt

SEQ ID NO: 132649 - DNA, 15 bp, Homo sapiens
agccattccacaatg

SEQ ID NO: 132650 - DNA, 15 bp, Homo sapiens
tagccattccacaat

SEQ ID NO: 132651 - DNA, 15 bp, Homo sapiens
ttagccattccacaa

SEQ ID NO: 132652 - DNA, 15 bp, Homo sapiens
gttagccattccaca

SEQ ID NO: 132653 - DNA, 15 bp, Homo sapiens
agttagccattccac

SEQ ID NO: 132654 - DNA, 15 bp, Homo sapiens
aagttagccattcca

SEQ ID NO: 132655 - DNA, 15 bp, Homo sapiens
taagttagccattcc

SEQ ID NO: 132656 - DNA, 15 bp, Homo sapiens
ttaagttagccattc

SEQ ID NO: 132657 - DNA, 15 bp, Homo sapiens
cttaagttagccatt

SEQ ID NO: 132658 - DNA, 15 bp, Homo sapiens
acttaagttagccat

SEQ ID NO: 132659 - DNA, 15 bp, Homo sapiens
tacttaagttagcca

SEQ ID NO: 132660 - DNA, 15 bp, Homo sapiens
ttacttaagttagcc

SEQ ID NO: 132661 - DNA, 15 bp, Homo sapiens
tttacttaagttagc

SEQ ID NO: 132662 - DNA, 15 bp, Homo sapiens
atttacttaagttag

SEQ ID NO: 132663 - DNA, 15 bp, Homo sapiens
aatttacttaagtta

SEQ ID NO: 132664 - DNA, 15 bp, Homo sapiens
taatttacttaagtt

SEQ ID NO: 132665 - DNA, 15 bp, Homo sapiens
ttaatttacttaagt

SEQ ID NO: 132666 - DNA, 15 bp, Homo sapiens
gttaatttacttaag

SEQ ID NO: 132667 - DNA, 15 bp, Homo sapiens
tgttaatttacttaa

SEQ ID NO: 132668 - DNA, 15 bp, Homo sapiens
gtgttaatttactta

SEQ ID NO: 132669 - DNA, 15 bp, Homo sapiens
tgtgttaatttactt

SEQ ID NO: 132670 - DNA, 15 bp, Homo sapiens
atgtgttaatttact

SEQ ID NO: 132671 - DNA, 15 bp, Homo sapiens
catgtgttaatttac

SEQ ID NO: 132672 - DNA, 15 bp, Homo sapiens
acatgtgttaattta

SEQ ID NO: 132673 - DNA, 15 bp, Homo sapiens
tacatgtgttaattt

SEQ ID NO: 132674 - DNA, 15 bp, Homo sapiens
atacatgtgttaatt

SEQ ID NO: 132675 - DNA, 15 bp, Homo sapiens
aatacatgtgttaat

SEQ ID NO: 132676 - DNA, 15 bp, Homo sapiens
taatacatgtgttaa

SEQ ID NO: 132677 - DNA, 15 bp, Homo sapiens
gtaatacatgtgtta

SEQ ID NO: 132678 - DNA, 15 bp, Homo sapiens
ggtaatacatgtgtt

SEQ ID NO: 132679 - DNA, 15 bp, Homo sapiens
aggtaatacatgtgt

SEQ ID NO: 132680 - DNA, 15 bp, Homo sapiens
gaggtaatacatgtg

SEQ ID NO: 132681 - DNA, 15 bp, Homo sapiens
tgaggtaatacatgt

SEQ ID NO: 132682 - DNA, 15 bp, Homo sapiens
gtgaggtaatacatg

SEQ ID NO: 132683 - DNA, 15 bp, Homo sapiens
tgtgaggtaatacat

SEQ ID NO: 132684 - DNA, 15 bp, Homo sapiens
atgtgaggtaataca

SEQ ID NO: 132685 - DNA, 15 bp, Homo sapiens
tatgtgaggtaatac

SEQ ID NO: 132686 - DNA, 15 bp, Homo sapiens
gtatgtgaggtaata

SEQ ID NO: 132687 - DNA, 15 bp, Homo sapiens
agtatgtgaggtaat

SEQ ID NO: 132688 - DNA, 15 bp, Homo sapiens
aagtatgtgaggtaa

SEQ ID NO: 132689 - DNA, 15 bp, Homo sapiens
taagtatgtgaggta

SEQ ID NO: 132690 - DNA, 15 bp, Homo sapiens
ataagtatgtgaggt

SEQ ID NO: 132691 - DNA, 15 bp, Homo sapiens
gataagtatgtgagg

SEQ ID NO: 132692 - DNA, 15 bp, Homo sapiens
tgataagtatgtgag

SEQ ID NO: 132693 - DNA, 15 bp, Homo sapiens
atgataagtatgtga

SEQ ID NO: 132694 - DNA, 15 bp, Homo sapiens
aatgataagtatgtg

SEQ ID NO: 132695 - DNA, 15 bp, Homo sapiens
aaatgataagtatgt

SEQ ID NO: 132696 - DNA, 15 bp, Homo sapiens
taaatgataagtatg

SEQ ID NO: 132697 - DNA, 15 bp, Homo sapiens
gtaaatgataagtat

SEQ ID NO: 132698 - DNA, 15 bp, Homo sapiens
ggtaaatgataagta

SEQ ID NO: 132699 - DNA, 15 bp, Homo sapiens
aggtaaatgataagt

SEQ ID NO: 132700 - DNA, 15 bp, Homo sapiens
caggtaaatgataag

SEQ ID NO: 132701 - DNA, 15 bp, Homo sapiens
acaggtaaatgataa

SEQ ID NO: 132702 - DNA, 15 bp, Homo sapiens
cacaggtaaatgata

SEQ ID NO: 132703 - DNA, 15 bp, Homo sapiens
tcacaggtaaatgat

SEQ ID NO: 132704 - DNA, 15 bp, Homo sapiens
atcacaggtaaatga

SEQ ID NO: 132705 - DNA, 15 bp, Homo sapiens
catcacaggtaaatg

SEQ ID NO: 132706 - DNA, 15 bp, Homo sapiens
tcatcacaggtaaat

SEQ ID NO: 132707 - DNA, 15 bp, Homo sapiens
ctcatcacaggtaaa

SEQ ID NO: 132708 - DNA, 15 bp, Homo sapiens
tctcatcacaggtaa

SEQ ID NO: 132709 - DNA, 15 bp, Homo sapiens
ttctcatcacaggta

SEQ ID NO: 132710 - DNA, 15 bp, Homo sapiens
cttctcatcacaggt

SEQ ID NO: 132711 - DNA, 15 bp, Homo sapiens
tcttctcatcacagg

SEQ ID NO: 132712 - DNA, 15 bp, Homo sapiens
gtcttctcatcacag

SEQ ID NO: 132713 - DNA, 15 bp, Homo sapiens
agtcttctcatcaca

SEQ ID NO: 132714 - DNA, 15 bp, Homo sapiens
aagtcttctcatcac

SEQ ID NO: 132715 - DNA, 15 bp, Homo sapiens
taagtcttctcatca

SEQ ID NO: 132716 - DNA, 15 bp, Homo sapiens
ttaagtcttctcatc

SEQ ID NO: 132717 - DNA, 15 bp, Homo sapiens
tttaagtcttctcat

SEQ ID NO: 132718 - DNA, 15 bp, Homo sapiens
ttttaagtcttctca

SEQ ID NO: 132719 - DNA, 15 bp, Homo sapiens
attttaagtcttctc

SEQ ID NO: 132720 - DNA, 15 bp, Homo sapiens
gattttaagtcttct

SEQ ID NO: 132721 - DNA, 15 bp, Homo sapiens
agattttaagtcttc

SEQ ID NO: 132722 - DNA, 15 bp, Homo sapiens
gagattttaagtctt

SEQ ID NO: 132723 - DNA, 15 bp, Homo sapiens
agagattttaagtct

SEQ ID NO: 132724 - DNA, 15 bp, Homo sapiens
gagagattttaagtc

SEQ ID NO: 132725 - DNA, 15 bp, Homo sapiens
tgagagattttaagt

SEQ ID NO: 132726 - DNA, 15 bp, Homo sapiens
ctgagagattttaag

SEQ ID NO: 132727 - DNA, 15 bp, Homo sapiens
actgagagattttaa

SEQ ID NO: 132728 - DNA, 15 bp, Homo sapiens
cactgagagatttta

SEQ ID NO: 132729 - DNA, 15 bp, Homo sapiens
ccactgagagatttt

SEQ ID NO: 132730 - DNA, 15 bp, Homo sapiens
accactgagagattt

SEQ ID NO: 132731 - DNA, 15 bp, Homo sapiens
aaccactgagagatt

SEQ ID NO: 132732 - DNA, 15 bp, Homo sapiens
aaaccactgagagat

SEQ ID NO: 132733 - DNA, 15 bp, Homo sapiens
aaaaccactgagaga

SEQ ID NO: 132734 - DNA, 15 bp, Homo sapiens
gaaaaccactgagag

SEQ ID NO: 132735 - DNA, 15 bp, Homo sapiens
tgaaaaccactgaga

SEQ ID NO: 132736 - DNA, 15 bp, Homo sapiens
ttgaaaaccactgag

SEQ ID NO: 132737 - DNA, 15 bp, Homo sapiens
cttgaaaaccactga

SEQ ID NO: 132738 - DNA, 15 bp, Homo sapiens
acttgaaaaccactg

SEQ ID NO: 132739 - DNA, 15 bp, Homo sapiens
tacttgaaaaccact

SEQ ID NO: 132740 - DNA, 15 bp, Homo sapiens
atacttgaaaaccac

SEQ ID NO: 132741 - DNA, 15 bp, Homo sapiens
tatacttgaaaacca

SEQ ID NO: 132742 - DNA, 15 bp, Homo sapiens
gtatacttgaaaacc

SEQ ID NO: 132743 - DNA, 15 bp, Homo sapiens
tgtatacttgaaaac

SEQ ID NO: 132744 - DNA, 15 bp, Homo sapiens
ttgtatacttgaaaa

SEQ ID NO: 132745 - DNA, 15 bp, Homo sapiens
tttgtatacttgaaa

SEQ ID NO: 132746 - DNA, 15 bp, Homo sapiens
ttttgtatacttgaa

SEQ ID NO: 132747 - DNA, 15 bp, Homo sapiens
tttttgtatacttga

SEQ ID NO: 132748 - DNA, 15 bp, Homo sapiens
ttttttgtatacttg

SEQ ID NO: 132749 - DNA, 15 bp, Homo sapiens
tttttttgtatactt

SEQ ID NO: 132750 - DNA, 15 bp, Homo sapiens
gtttttttgtatact

SEQ ID NO: 132751 - DNA, 15 bp, Homo sapiens
tgtttttttgtatac

SEQ ID NO: 132752 - DNA, 15 bp, Homo sapiens
atgtttttttgtata

SEQ ID NO: 132753 - DNA, 15 bp, Homo sapiens
aatgtttttttgtat

SEQ ID NO: 132754 - DNA, 15 bp, Homo sapiens
caatgtttttttgta

SEQ ID NO: 132755 - DNA, 15 bp, Homo sapiens
acaatgtttttttgt

SEQ ID NO: 132756 - DNA, 15 bp, Homo sapiens
aacaatgtttttttg

SEQ ID NO: 132757 - DNA, 15 bp, Homo sapiens
aaacaatgttttttt

SEQ ID NO: 132758 - DNA, 15 bp, Homo sapiens
taaacaatgtttttt

SEQ ID NO: 132759 - DNA, 15 bp, Homo sapiens
ataaacaatgttttt

SEQ ID NO: 132760 - DNA, 15 bp, Homo sapiens
gataaacaatgtttt

SEQ ID NO: 132761 - DNA, 15 bp, Homo sapiens
ggataaacaatgttt

SEQ ID NO: 132762 - DNA, 15 bp, Homo sapiens
tggataaacaatgtt

SEQ ID NO: 132763 - DNA, 15 bp, Homo sapiens
gtggataaacaatgt

SEQ ID NO: 132764 - DNA, 15 bp, Homo sapiens
tgtggataaacaatg

SEQ ID NO: 132765 - DNA, 15 bp, Homo sapiens
ctgtggataaacaat

SEQ ID NO: 132766 - DNA, 15 bp, Homo sapiens
actgtggataaacaa

SEQ ID NO: 132767 - DNA, 15 bp, Homo sapiens
tactgtggataaaca

SEQ ID NO: 132768 - DNA, 15 bp, Homo sapiens
ctactgtggataaac

SEQ ID NO: 132769 - DNA, 15 bp, Homo sapiens
actactgtggataaa

SEQ ID NO: 132770 - DNA, 15 bp, Homo sapiens
gactactgtggataa

SEQ ID NO: 132771 - DNA, 15 bp, Homo sapiens
tgactactgtggata

SEQ ID NO: 132772 - DNA, 15 bp, Homo sapiens
gtgactactgtggat

SEQ ID NO: 132773 - DNA, 15 bp, Homo sapiens
ggtgactactgtgga

SEQ ID NO: 132774 - DNA, 15 bp, Homo sapiens
tggtgactactgtgg

SEQ ID NO: 132775 - DNA, 15 bp, Homo sapiens
atggtgactactgtg

SEQ ID NO: 132776 - DNA, 15 bp, Homo sapiens
catggtgactactgt

SEQ ID NO: 132777 - DNA, 15 bp, Homo sapiens
acatggtgactactg

SEQ ID NO: 132778 - DNA, 15 bp, Homo sapiens
aacatggtgactact

SEQ ID NO: 132779 - DNA, 15 bp, Homo sapiens
tctctttcaccagga

SEQ ID NO: 132780 - DNA, 15 bp, Homo sapiens
atctctttcaccagg

SEQ ID NO: 132781 - DNA, 15 bp, Homo sapiens
catctctttcaccag

SEQ ID NO: 132782 - DNA, 15 bp, Homo sapiens
ccatctctttcacca

SEQ ID NO: 132783 - DNA, 15 bp, Homo sapiens
cccatctctttcacc

SEQ ID NO: 132784 - DNA, 15 bp, Homo sapiens
gcccatctctttcac

SEQ ID NO: 132785 - DNA, 15 bp, Homo sapiens
agcccatctctttca

SEQ ID NO: 132786 - DNA, 15 bp, Homo sapiens
aagcccatctctttc

SEQ ID NO: 132787 - DNA, 15 bp, Homo sapiens
caagcccatctcttt

SEQ ID NO: 132788 - DNA, 15 bp, Homo sapiens
ccaagcccatctctt

SEQ ID NO: 132789 - DNA, 15 bp, Homo sapiens
accaagcccatctct

SEQ ID NO: 132790 - DNA, 15 bp, Homo sapiens
aaccaagcccatctc

SEQ ID NO: 132791 - DNA, 15 bp, Homo sapiens
aaaccaagcccatct

SEQ ID NO: 132792 - DNA, 15 bp, Homo sapiens
caaaccaagcccatc

SEQ ID NO: 132793 - DNA, 15 bp, Homo sapiens
acaaaccaagcccat

SEQ ID NO: 132794 - DNA, 15 bp, Homo sapiens
aacaaaccaagccca

SEQ ID NO: 132795 - DNA, 15 bp, Homo sapiens
caacaaaccaagccc

SEQ ID NO: 132796 - DNA, 15 bp, Homo sapiens
tcaacaaaccaagcc

SEQ ID NO: 132797 - DNA, 15 bp, Homo sapiens
gtcaacaaaccaagc

SEQ ID NO: 132798 - DNA, 15 bp, Homo sapiens
tgtcaacaaaccaag

SEQ ID NO: 132799 - DNA, 15 bp, Homo sapiens
ttgtcaacaaaccaa

SEQ ID NO: 132800 - DNA, 15 bp, Homo sapiens
gttgtcaacaaacca

SEQ ID NO: 132801 - DNA, 15 bp, Homo sapiens
tgttgtcaacaaacc

SEQ ID NO: 132802 - DNA, 15 bp, Homo sapiens
atgttgtcaacaaac

SEQ ID NO: 132803 - DNA, 15 bp, Homo sapiens
catgttgtcaacaaa

SEQ ID NO: 132804 - DNA, 15 bp, Homo sapiens
ccatgttgtcaacaa

SEQ ID NO: 132805 - DNA, 15 bp, Homo sapiens
accatgttgtcaaca

SEQ ID NO: 132806 - DNA, 15 bp, Homo sapiens
caccatgttgtcaac

SEQ ID NO: 132807 - DNA, 15 bp, Homo sapiens
gcaccatgttgtcaa

SEQ ID NO: 132808 - DNA, 15 bp, Homo sapiens
agcaccatgttgtca

SEQ ID NO: 132809 - DNA, 15 bp, Homo sapiens
aagcaccatgttgtc

SEQ ID NO: 132810 - DNA, 15 bp, Homo sapiens
caagcaccatgttgt

SEQ ID NO: 132811 - DNA, 15 bp, Homo sapiens
tcaagcaccatgttg

SEQ ID NO: 132812 - DNA, 15 bp, Homo sapiens
ttcaagcaccatgtt

SEQ ID NO: 132813 - DNA, 15 bp, Homo sapiens
attcaagcaccatgt

SEQ ID NO: 132814 - DNA, 15 bp, Homo sapiens
gattcaagcaccatg

SEQ ID NO: 132815 - DNA, 15 bp, Homo sapiens
tgattcaagcaccat

SEQ ID NO: 132816 - DNA, 15 bp, Homo sapiens
atgattcaagcacca

SEQ ID NO: 132817 - DNA, 15 bp, Homo sapiens
aatgattcaagcacc

SEQ ID NO: 132818 - DNA, 15 bp, Homo sapiens
gaatgattcaagcac

SEQ ID NO: 132819 - DNA, 15 bp, Homo sapiens
cgaatgattcaagca

SEQ ID NO: 132820 - DNA, 15 bp, Homo sapiens
acgaatgattcaagc

SEQ ID NO: 132821 - DNA, 15 bp, Homo sapiens
cacgaatgattcaag

SEQ ID NO: 132822 - DNA, 15 bp, Homo sapiens
ccacgaatgattcaa

SEQ ID NO: 132823 - DNA, 15 bp, Homo sapiens
tccacgaatgattca

SEQ ID NO: 132824 - DNA, 15 bp, Homo sapiens
atccacgaatgattc

SEQ ID NO: 132825 - DNA, 15 bp, Homo sapiens
aatccacgaatgatt

SEQ ID NO: 132826 - DNA, 15 bp, Homo sapiens
aaatccacgaatgat

SEQ ID NO: 132827 - DNA, 15 bp, Homo sapiens
aaaatccacgaatga

SEQ ID NO: 132828 - DNA, 15 bp, Homo sapiens
taaaatccacgaatg

SEQ ID NO: 132829 - DNA, 15 bp, Homo sapiens
ttaaaatccacgaat

SEQ ID NO: 132830 - DNA, 15 bp, Homo sapiens
attaaaatccacgaa

SEQ ID NO: 132831 - DNA, 15 bp, Homo sapiens
aattaaaatccacga

SEQ ID NO: 132832 - DNA, 15 bp, Homo sapiens
taattaaaatccacg

SEQ ID NO: 132833 - DNA, 15 bp, Homo sapiens
ataattaaaatccac

SEQ ID NO: 132834 - DNA, 15 bp, Homo sapiens
aataattaaaatcca

SEQ ID NO: 132835 - DNA, 15 bp, Homo sapiens
gaataattaaaatcc

SEQ ID NO: 132836 - DNA, 15 bp, Homo sapiens
tgaataattaaaatc

SEQ ID NO: 132837 - DNA, 15 bp, Homo sapiens
atgaataattaaaat

SEQ ID NO: 132838 - DNA, 15 bp, Homo sapiens
catgaataattaaaa

SEQ ID NO: 132839 - DNA, 15 bp, Homo sapiens
gcatgaataattaaa

SEQ ID NO: 132840 - DNA, 15 bp, Homo sapiens
ggcatgaataattaa

SEQ ID NO: 132841 - DNA, 15 bp, Homo sapiens
tggcatgaataatta

SEQ ID NO: 132842 - DNA, 15 bp, Homo sapiens
gtggcatgaataatt

SEQ ID NO: 132843 - DNA, 15 bp, Homo sapiens
ggtggcatgaataat

SEQ ID NO: 132844 - DNA, 15 bp, Homo sapiens
aggtggcatgaataa

SEQ ID NO: 132845 - DNA, 15 bp, Homo sapiens
caggtggcatgaata

SEQ ID NO: 132846 - DNA, 15 bp, Homo sapiens
ccaggtggcatgaat

SEQ ID NO: 132847 - DNA, 15 bp, Homo sapiens
accaggtggcatgaa

SEQ ID NO: 132848 - DNA, 15 bp, Homo sapiens
aaccaggtggcatga

SEQ ID NO: 132849 - DNA, 15 bp, Homo sapiens
aaaccaggtggcatg

SEQ ID NO: 132850 - DNA, 15 bp, Homo sapiens
gaaaccaggtggcat

SEQ ID NO: 132851 - DNA, 15 bp, Homo sapiens
agaaaccaggtggca

SEQ ID NO: 132852 - DNA, 15 bp, Homo sapiens
gagaaaccaggtggc

SEQ ID NO: 132853 - DNA, 15 bp, Homo sapiens
agagaaaccaggtgg

SEQ ID NO: 132854 - DNA, 15 bp, Homo sapiens
aagagaaaccaggtg

SEQ ID NO: 132855 - DNA, 15 bp, Homo sapiens
caagagaaaccaggt

SEQ ID NO: 132856 - DNA, 15 bp, Homo sapiens
tcaagagaaaccagg

SEQ ID NO: 132857 - DNA, 15 bp, Homo sapiens
atcaagagaaaccag

SEQ ID NO: 132858 - DNA, 15 bp, Homo sapiens
gatcaagagaaacca

SEQ ID NO: 132859 - DNA, 15 bp, Homo sapiens
tgatcaagagaaacc

SEQ ID NO: 132860 - DNA, 15 bp, Homo sapiens
ctgatcaagagaaac

SEQ ID NO: 132861 - DNA, 15 bp, Homo sapiens
actgatcaagagaaa

SEQ ID NO: 132862 - DNA, 15 bp, Homo sapiens
tactgatcaagagaa

SEQ ID NO: 132863 - DNA, 15 bp, Homo sapiens
ctactgatcaagaga

SEQ ID NO: 132864 - DNA, 15 bp, Homo sapiens
gctactgatcaagag

SEQ ID NO: 132865 - DNA, 15 bp, Homo sapiens
agctactgatcaaga

SEQ ID NO: 132866 - DNA, 15 bp, Homo sapiens
tagctactgatcaag

SEQ ID NO: 132867 - DNA, 15 bp, Homo sapiens
ttagctactgatcaa

SEQ ID NO: 132868 - DNA, 15 bp, Homo sapiens
gttagctactgatca

SEQ ID NO: 132869 - DNA, 15 bp, Homo sapiens
tgttagctactgatc

SEQ ID NO: 132870 - DNA, 15 bp, Homo sapiens
ttgttagctactgat

SEQ ID NO: 132871 - DNA, 15 bp, Homo sapiens
cttgttagctactga

SEQ ID NO: 132872 - DNA, 15 bp, Homo sapiens
ccttgttagctactg

SEQ ID NO: 132873 - DNA, 15 bp, Homo sapiens
tccttgttagctact

SEQ ID NO: 132874 - DNA, 15 bp, Homo sapiens
atccttgttagctac

SEQ ID NO: 132875 - DNA, 15 bp, Homo sapiens
aatccttgttagcta

SEQ ID NO: 132876 - DNA, 15 bp, Homo sapiens
aaatccttgttagct

SEQ ID NO: 132877 - DNA, 15 bp, Homo sapiens
taaatccttgttagc

SEQ ID NO: 132878 - DNA, 15 bp, Homo sapiens
ctaaatccttgttag

SEQ ID NO: 132879 - DNA, 15 bp, Homo sapiens
actaaatccttgtta

SEQ ID NO: 132880 - DNA, 15 bp, Homo sapiens
aactaaatccttgtt

SEQ ID NO: 132881 - DNA, 15 bp, Homo sapiens
gaactaaatccttgt

SEQ ID NO: 132882 - DNA, 15 bp, Homo sapiens
tgaactaaatccttg

SEQ ID NO: 132883 - DNA, 15 bp, Homo sapiens
atgaactaaatcctt

SEQ ID NO: 132884 - DNA, 15 bp, Homo sapiens
tatgaactaaatcct

SEQ ID NO: 132885 - DNA, 15 bp, Homo sapiens
ttatgaactaaatcc

SEQ ID NO: 132886 - DNA, 15 bp, Homo sapiens
attatgaactaaatc

SEQ ID NO: 132887 - DNA, 15 bp, Homo sapiens
cattatgaactaaat

SEQ ID NO: 132888 - DNA, 15 bp, Homo sapiens
ccattatgaactaaa

SEQ ID NO: 132889 - DNA, 15 bp, Homo sapiens
cccattatgaactaa

SEQ ID NO: 132890 - DNA, 15 bp, Homo sapiens
gcccattatgaacta

SEQ ID NO: 132891 - DNA, 15 bp, Homo sapiens
tgcccattatgaact

SEQ ID NO: 132892 - DNA, 15 bp, Homo sapiens
ctgcccattatgaac

SEQ ID NO: 132893 - DNA, 15 bp, Homo sapiens
actgcccattatgaa

SEQ ID NO: 132894 - DNA, 15 bp, Homo sapiens
aactgcccattatga

SEQ ID NO: 132895 - DNA, 15 bp, Homo sapiens
caactgcccattatg

SEQ ID NO: 132896 - DNA, 15 bp, Homo sapiens
acaactgcccattat

SEQ ID NO: 132897 - DNA, 15 bp, Homo sapiens
aacaactgcccatta

SEQ ID NO: 132898 - DNA, 15 bp, Homo sapiens
aaacaactgcccatt

SEQ ID NO: 132899 - DNA, 15 bp, Homo sapiens
caaacaactgcccat

SEQ ID NO: 132900 - DNA, 15 bp, Homo sapiens
acaaacaactgccca

SEQ ID NO: 132901 - DNA, 15 bp, Homo sapiens
cacaaacaactgccc

SEQ ID NO: 132902 - DNA, 15 bp, Homo sapiens
tcacaaacaactgcc

SEQ ID NO: 132903 - DNA, 15 bp, Homo sapiens
ctcacaaacaactgc

SEQ ID NO: 132904 - DNA, 15 bp, Homo sapiens
cctcacaaacaactg

SEQ ID NO: 132905 - DNA, 15 bp, Homo sapiens
acctcacaaacaact

SEQ ID NO: 132906 - DNA, 15 bp, Homo sapiens
cacctcacaaacaac

SEQ ID NO: 132907 - DNA, 15 bp, Homo sapiens
ccacctcacaaacaa

SEQ ID NO: 132908 - DNA, 15 bp, Homo sapiens
tccacctcacaaaca

SEQ ID NO: 132909 - DNA, 15 bp, Homo sapiens
atccacctcacaaac

SEQ ID NO: 132910 - DNA, 15 bp, Homo sapiens
catccacctcacaaa

SEQ ID NO: 132911 - DNA, 15 bp, Homo sapiens
tcatccacctcacaa

SEQ ID NO: 132912 - DNA, 15 bp, Homo sapiens
ctcatccacctcaca

SEQ ID NO: 132913 - DNA, 15 bp, Homo sapiens
actcatccacctcac

SEQ ID NO: 132914 - DNA, 15 bp, Homo sapiens
gactcatccacctca

SEQ ID NO: 132915 - DNA, 15 bp, Homo sapiens
tgactcatccacctc

SEQ ID NO: 132916 - DNA, 15 bp, Homo sapiens
ctgactcatccacct

SEQ ID NO: 132917 - DNA, 15 bp, Homo sapiens
cctgactcatccacc

SEQ ID NO: 132918 - DNA, 15 bp, Homo sapiens
gcctgactcatccac

SEQ ID NO: 132919 - DNA, 15 bp, Homo sapiens
tgcctgactcatcca

SEQ ID NO: 132920 - DNA, 15 bp, Homo sapiens
gtgcctgactcatcc

SEQ ID NO: 132921 - DNA, 15 bp, Homo sapiens
cgtgcctgactcatc

SEQ ID NO: 132922 - DNA, 15 bp, Homo sapiens
ccgtgcctgactcat

SEQ ID NO: 132923 - DNA, 15 bp, Homo sapiens
cccgtgcctgactca

SEQ ID NO: 132924 - DNA, 15 bp, Homo sapiens
tcccgtgcctgactc

SEQ ID NO: 132925 - DNA, 15 bp, Homo sapiens
ctcccgtgcctgact

SEQ ID NO: 132926 - DNA, 15 bp, Homo sapiens
cctcccgtgcctgac

SEQ ID NO: 132927 - DNA, 15 bp, Homo sapiens
ccctcccgtgcctga

SEQ ID NO: 132928 - DNA, 15 bp, Homo sapiens
tccctcccgtgcctg

SEQ ID NO: 132929 - DNA, 15 bp, Homo sapiens
ttccctcccgtgcct

SEQ ID NO: 132930 - DNA, 15 bp, Homo sapiens
cttccctcccgtgcc

SEQ ID NO: 132931 - DNA, 15 bp, Homo sapiens
ccttccctcccgtgc

SEQ ID NO: 132932 - DNA, 15 bp, Homo sapiens
cccttccctcccgtg

SEQ ID NO: 132933 - DNA, 15 bp, Homo sapiens
gcccttccctcccgt

SEQ ID NO: 132934 - DNA, 15 bp, Homo sapiens
tgcccttccctcccg

SEQ ID NO: 132935 - DNA, 15 bp, Homo sapiens
ctgcccttccctccc

SEQ ID NO: 132936 - DNA, 15 bp, Homo sapiens
actgcccttccctcc

SEQ ID NO: 132937 - DNA, 15 bp, Homo sapiens
aactgcccttccctc

SEQ ID NO: 132938 - DNA, 15 bp, Homo sapiens
aaactgcccttccct

SEQ ID NO: 132939 - DNA, 15 bp, Homo sapiens
gaaactgcccttccc

SEQ ID NO: 132940 - DNA, 15 bp, Homo sapiens
tgaaactgcccttcc

SEQ ID NO: 132941 - DNA, 15 bp, Homo sapiens
ttgaaactgcccttc

SEQ ID NO: 132942 - DNA, 15 bp, Homo sapiens
tttgaaactgccctt

SEQ ID NO: 132943 - DNA, 15 bp, Homo sapiens
ttttgaaactgccct

SEQ ID NO: 132944 - DNA, 15 bp, Homo sapiens
cttttgaaactgccc

SEQ ID NO: 132945 - DNA, 15 bp, Homo sapiens
tcttttgaaactgcc

SEQ ID NO: 132946 - DNA, 15 bp, Homo sapiens
ttcttttgaaactgc

SEQ ID NO: 132947 - DNA, 15 bp, Homo sapiens
attcttttgaaactg

SEQ ID NO: 132948 - DNA, 15 bp, Homo sapiens
cattcttttgaaact

SEQ ID NO: 132949 - DNA, 15 bp, Homo sapiens
ccattcttttgaaac

SEQ ID NO: 132950 - DNA, 15 bp, Homo sapiens
gccattcttttgaaa

SEQ ID NO: 132951 - DNA, 15 bp, Homo sapiens
agccattcttttgaa

SEQ ID NO: 132952 - DNA, 15 bp, Homo sapiens
cagccattcttttga

SEQ ID NO: 132953 - DNA, 15 bp, Homo sapiens
gcagccattcttttg

SEQ ID NO: 132954 - DNA, 15 bp, Homo sapiens
agcagccattctttt

SEQ ID NO: 132955 - DNA, 15 bp, Homo sapiens
aagcagccattcttt

SEQ ID NO: 132956 - DNA, 15 bp, Homo sapiens
aaagcagccattctt

SEQ ID NO: 132957 - DNA, 15 bp, Homo sapiens
taaagcagccattct

SEQ ID NO: 132958 - DNA, 15 bp, Homo sapiens
ttaaagcagccattc

SEQ ID NO: 132959 - DNA, 15 bp, Homo sapiens
cttaaagcagccatt

SEQ ID NO: 132960 - DNA, 15 bp, Homo sapiens
tcttaaagcagccat

SEQ ID NO: 132961 - DNA, 15 bp, Homo sapiens
atcttaaagcagcca

SEQ ID NO: 132962 - DNA, 15 bp, Homo sapiens
catcttaaagcagcc

SEQ ID NO: 132963 - DNA, 15 bp, Homo sapiens
ccatcttaaagcagc

SEQ ID NO: 132964 - DNA, 15 bp, Homo sapiens
tccatcttaaagcag

SEQ ID NO: 132965 - DNA, 15 bp, Homo sapiens
ttccatcttaaagca

SEQ ID NO: 132966 - DNA, 15 bp, Homo sapiens
gttccatcttaaagc

SEQ ID NO: 132967 - DNA, 15 bp, Homo sapiens
agttccatcttaaag

SEQ ID NO: 132968 - DNA, 15 bp, Homo sapiens
aagttccatcttaaa

SEQ ID NO: 132969 - DNA, 15 bp, Homo sapiens
caagttccatcttaa

SEQ ID NO: 132970 - DNA, 15 bp, Homo sapiens
gcaagttccatctta

SEQ ID NO: 132971 - DNA, 15 bp, Homo sapiens
agcaagttccatctt

SEQ ID NO: 132972 - DNA, 15 bp, Homo sapiens
aagcaagttccatct

SEQ ID NO: 132973 - DNA, 15 bp, Homo sapiens
aaagcaagttccatc

SEQ ID NO: 132974 - DNA, 15 bp, Homo sapiens
caaagcaagttccat

SEQ ID NO: 132975 - DNA, 15 bp, Homo sapiens
acaaagcaagttcca

SEQ ID NO: 132976 - DNA, 15 bp, Homo sapiens
aacaaagcaagttcc

SEQ ID NO: 132977 - DNA, 15 bp, Homo sapiens
aaacaaagcaagttc

SEQ ID NO: 132978 - DNA, 15 bp, Homo sapiens
aaaacaaagcaagtt

SEQ ID NO: 132979 - DNA, 15 bp, Homo sapiens
aaaaacaaagcaagt

SEQ ID NO: 132980 - DNA, 15 bp, Homo sapiens
caaaaacaaagcaag

SEQ ID NO: 132981 - DNA, 15 bp, Homo sapiens
ccaaaaacaaagcaa

SEQ ID NO: 132982 - DNA, 15 bp, Homo sapiens
gccaaaaacaaagca

SEQ ID NO: 132983 - DNA, 15 bp, Homo sapiens
tgccaaaaacaaagc

SEQ ID NO: 132984 - DNA, 15 bp, Homo sapiens
atgccaaaaacaaag

SEQ ID NO: 132985 - DNA, 15 bp, Homo sapiens
aatgccaaaaacaaa

SEQ ID NO: 132986 - DNA, 15 bp, Homo sapiens
taatgccaaaaacaa

SEQ ID NO: 132987 - DNA, 15 bp, Homo sapiens
ataatgccaaaaaca

SEQ ID NO: 132988 - DNA, 15 bp, Homo sapiens
aataatgccaaaaac

SEQ ID NO: 132989 - DNA, 15 bp, Homo sapiens
aaataatgccaaaaa

SEQ ID NO: 132990 - DNA, 15 bp, Homo sapiens
caaataatgccaaaa

SEQ ID NO: 132991 - DNA, 15 bp, Homo sapiens
ccaaataatgccaaa

SEQ ID NO: 132992 - DNA, 15 bp, Homo sapiens
accaaataatgccaa

SEQ ID NO: 132993 - DNA, 15 bp, Homo sapiens
caccaaataatgcca

SEQ ID NO: 132994 - DNA, 15 bp, Homo sapiens
tcaccaaataatgcc

SEQ ID NO: 132995 - DNA, 15 bp, Homo sapiens
atcaccaaataatgc

SEQ ID NO: 132996 - DNA, 15 bp, Homo sapiens
aatcaccaaataatg

SEQ ID NO: 132997 - DNA, 15 bp, Homo sapiens
caatcaccaaataat

SEQ ID NO: 132998 - DNA, 15 bp, Homo sapiens
acaatcaccaaataa

SEQ ID NO: 132999 - DNA, 15 bp, Homo sapiens
gacaatcaccaaata

SEQ ID NO: 133000 - DNA, 15 bp, Homo sapiens
agacaatcaccaaat

SEQ ID NO: 133001 - DNA, 15 bp, Homo sapiens
aagacaatcaccaaa

SEQ ID NO: 133002 - DNA, 15 bp, Homo sapiens
caagacaatcaccaa

SEQ ID NO: 133003 - DNA, 15 bp, Homo sapiens
ccaagacaatcacca

SEQ ID NO: 133004 - DNA, 15 bp, Homo sapiens
cccaagacaatcacc

SEQ ID NO: 133005 - DNA, 15 bp, Homo sapiens
tcccaagacaatcac

SEQ ID NO: 133006 - DNA, 15 bp, Homo sapiens
gtcccaagacaatca

SEQ ID NO: 133007 - DNA, 15 bp, Homo sapiens
tgtcccaagacaatc

SEQ ID NO: 133008 - DNA, 15 bp, Homo sapiens
atgtcccaagacaat

SEQ ID NO: 133009 - DNA, 15 bp, Homo sapiens
aatgtcccaagacaa

SEQ ID NO: 133010 - DNA, 15 bp, Homo sapiens
caatgtcccaagaca

SEQ ID NO: 133011 - DNA, 15 bp, Homo sapiens
acaatgtcccaagac

SEQ ID NO: 133012 - DNA, 15 bp, Homo sapiens
cacaatgtcccaaga

SEQ ID NO: 133013 - DNA, 15 bp, Homo sapiens
acacaatgtcccaag

SEQ ID NO: 133014 - DNA, 15 bp, Homo sapiens
gacacaatgtcccaa

SEQ ID NO: 133015 - DNA, 15 bp, Homo sapiens
agacacaatgtccca

SEQ ID NO: 133016 - DNA, 15 bp, Homo sapiens
tagacacaatgtccc

SEQ ID NO: 133017 - DNA, 15 bp, Homo sapiens
ttagacacaatgtcc

SEQ ID NO: 133018 - DNA, 15 bp, Homo sapiens
attagacacaatgtc

SEQ ID NO: 133019 - DNA, 15 bp, Homo sapiens
aattagacacaatgt

SEQ ID NO: 133020 - DNA, 15 bp, Homo sapiens
caattagacacaatg

SEQ ID NO: 133021 - DNA, 15 bp, Homo sapiens
gcaattagacacaat

SEQ ID NO: 133022 - DNA, 15 bp, Homo sapiens
ggcaattagacacaa

SEQ ID NO: 133023 - DNA, 15 bp, Homo sapiens
tggcaattagacaca

SEQ ID NO: 133024 - DNA, 15 bp, Homo sapiens
ttggcaattagacac

SEQ ID NO: 133025 - DNA, 15 bp, Homo sapiens
attggcaattagaca

SEQ ID NO: 133026 - DNA, 15 bp, Homo sapiens
aattggcaattagac

SEQ ID NO: 133027 - DNA, 15 bp, Homo sapiens
aaattggcaattaga

SEQ ID NO: 133028 - DNA, 15 bp, Homo sapiens
caaattggcaattag

SEQ ID NO: 133029 - DNA, 15 bp, Homo sapiens
ccaaattggcaatta

SEQ ID NO: 133030 - DNA, 15 bp, Homo sapiens
tccaaattggcaatt

SEQ ID NO: 133031 - DNA, 15 bp, Homo sapiens
ttccaaattggcaat

SEQ ID NO: 133032 - DNA, 15 bp, Homo sapiens
tttccaaattggcaa

SEQ ID NO: 133033 - DNA, 15 bp, Homo sapiens
atttccaaattggca

SEQ ID NO: 133034 - DNA, 15 bp, Homo sapiens
catttccaaattggc

SEQ ID NO: 133035 - DNA, 15 bp, Homo sapiens
acatttccaaattgg

SEQ ID NO: 133036 - DNA, 15 bp, Homo sapiens
tacatttccaaattg

SEQ ID NO: 133037 - DNA, 15 bp, Homo sapiens
ttacatttccaaatt

SEQ ID NO: 133038 - DNA, 15 bp, Homo sapiens
attacatttccaaat

SEQ ID NO: 133039 - DNA, 15 bp, Homo sapiens
aattacatttccaaa

SEQ ID NO: 133040 - DNA, 15 bp, Homo sapiens
caattacatttccaa

SEQ ID NO: 133041 - DNA, 15 bp, Homo sapiens
ccaattacatttcca

SEQ ID NO: 133042 - DNA, 15 bp, Homo sapiens
gccaattacatttcc

SEQ ID NO: 133043 - DNA, 15 bp, Homo sapiens
tgccaattacatttc

SEQ ID NO: 133044 - DNA, 15 bp, Homo sapiens
gtgccaattacattt

SEQ ID NO: 133045 - DNA, 15 bp, Homo sapiens
agtgccaattacatt

SEQ ID NO: 133046 - DNA, 15 bp, Homo sapiens
gagtgccaattacat

SEQ ID NO: 133047 - DNA, 15 bp, Homo sapiens
ggagtgccaattaca

SEQ ID NO: 133048 - DNA, 15 bp, Homo sapiens
tggagtgccaattac

SEQ ID NO: 133049 - DNA, 15 bp, Homo sapiens
ctggagtgccaatta

SEQ ID NO: 133050 - DNA, 15 bp, Homo sapiens
cctggagtgccaatt

SEQ ID NO: 133051 - DNA, 15 bp, Homo sapiens
gcctggagtgccaat

SEQ ID NO: 133052 - DNA, 15 bp, Homo sapiens
ggcctggagtgccaa

SEQ ID NO: 133053 - DNA, 15 bp, Homo sapiens
gggcctggagtgcca

SEQ ID NO: 133054 - DNA, 15 bp, Homo sapiens
tgggcctggagtgcc

SEQ ID NO: 133055 - DNA, 15 bp, Homo sapiens
ctgggcctggagtgc

SEQ ID NO: 133056 - DNA, 15 bp, Homo sapiens
tctgggcctggagtg

SEQ ID NO: 133057 - DNA, 15 bp, Homo sapiens
ttctgggcctggagt

SEQ ID NO: 133058 - DNA, 15 bp, Homo sapiens
attctgggcctggag

SEQ ID NO: 133059 - DNA, 15 bp, Homo sapiens
cattctgggcctgga

SEQ ID NO: 133060 - DNA, 15 bp, Homo sapiens
ccattctgggcctgg

SEQ ID NO: 133061 - DNA, 15 bp, Homo sapiens
tccattctgggcctg

SEQ ID NO: 133062 - DNA, 15 bp, Homo sapiens
atccattctgggcct

SEQ ID NO: 133063 - DNA, 15 bp, Homo sapiens
tatccattctgggcc

SEQ ID NO: 133064 - DNA, 15 bp, Homo sapiens
atatccattctgggc

SEQ ID NO: 133065 - DNA, 15 bp, Homo sapiens
tatatccattctggg

SEQ ID NO: 133066 - DNA, 15 bp, Homo sapiens
gtatatccattctgg

SEQ ID NO: 133067 - DNA, 15 bp, Homo sapiens
tgtatatccattctg

SEQ ID NO: 133068 - DNA, 15 bp, Homo sapiens
gtgtatatccattct

SEQ ID NO: 133069 - DNA, 15 bp, Homo sapiens
agtgtatatccattc

SEQ ID NO: 133070 - DNA, 15 bp, Homo sapiens
aagtgtatatccatt

SEQ ID NO: 133071 - DNA, 15 bp, Homo sapiens
taagtgtatatccat

SEQ ID NO: 133072 - DNA, 15 bp, Homo sapiens
ttaagtgtatatcca

SEQ ID NO: 133073 - DNA, 15 bp, Homo sapiens
gttaagtgtatatcc

SEQ ID NO: 133074 - DNA, 15 bp, Homo sapiens
cgttaagtgtatatc

SEQ ID NO: 133075 - DNA, 15 bp, Homo sapiens
acgttaagtgtatat

SEQ ID NO: 133076 - DNA, 15 bp, Homo sapiens
aacgttaagtgtata

SEQ ID NO: 133077 - DNA, 15 bp, Homo sapiens
caacgttaagtgtat

SEQ ID NO: 133078 - DNA, 15 bp, Homo sapiens
acaacgttaagtgta

SEQ ID NO: 133079 - DNA, 15 bp, Homo sapiens
gacaacgttaagtgt

SEQ ID NO: 133080 - DNA, 15 bp, Homo sapiens
tgacaacgttaagtg

SEQ ID NO: 133081 - DNA, 15 bp, Homo sapiens
ttgacaacgttaagt

SEQ ID NO: 133082 - DNA, 15 bp, Homo sapiens
cttgacaacgttaag

SEQ ID NO: 133083 - DNA, 15 bp, Homo sapiens
gcttgacaacgttaa

SEQ ID NO: 133084 - DNA, 15 bp, Homo sapiens
ggcttgacaacgtta

SEQ ID NO: 133085 - DNA, 15 bp, Homo sapiens
cggcttgacaacgtt

SEQ ID NO: 133086 - DNA, 15 bp, Homo sapiens
tcggcttgacaacgt

SEQ ID NO: 133087 - DNA, 15 bp, Homo sapiens
ctcggcttgacaacg

SEQ ID NO: 133088 - DNA, 15 bp, Homo sapiens
gctcggcttgacaac

SEQ ID NO: 133089 - DNA, 15 bp, Homo sapiens
ggctcggcttgacaa

SEQ ID NO: 133090 - DNA, 15 bp, Homo sapiens
aggctcggcttgaca

SEQ ID NO: 133091 - DNA, 15 bp, Homo sapiens
aaggctcggcttgac

SEQ ID NO: 133092 - DNA, 15 bp, Homo sapiens
caaggctcggcttga

SEQ ID NO: 133093 - DNA, 15 bp, Homo sapiens
ccaaggctcggcttg

SEQ ID NO: 133094 - DNA, 15 bp, Homo sapiens
tccaaggctcggctt

SEQ ID NO: 133095 - DNA, 15 bp, Homo sapiens
ttccaaggctcggct

SEQ ID NO: 133096 - DNA, 15 bp, Homo sapiens
attccaaggctcggc

SEQ ID NO: 133097 - DNA, 15 bp, Homo sapiens
gattccaaggctcgg

SEQ ID NO: 133098 - DNA, 15 bp, Homo sapiens
tgattccaaggctcg

SEQ ID NO: 133099 - DNA, 15 bp, Homo sapiens
atgattccaaggctc

SEQ ID NO: 133100 - DNA, 15 bp, Homo sapiens
gatgattccaaggct

SEQ ID NO: 133101 - DNA, 15 bp, Homo sapiens
agatgattccaaggc

SEQ ID NO: 133102 - DNA, 15 bp, Homo sapiens
gagatgattccaagg

SEQ ID NO: 133103 - DNA, 15 bp, Homo sapiens
ggagatgattccaag

SEQ ID NO: 133104 - DNA, 15 bp, Homo sapiens
gggagatgattccaa

SEQ ID NO: 133105 - DNA, 15 bp, Homo sapiens
agggagatgattcca

SEQ ID NO: 133106 - DNA, 15 bp, Homo sapiens
cagggagatgattcc

SEQ ID NO: 133107 - DNA, 15 bp, Homo sapiens
acagggagatgattc

SEQ ID NO: 133108 - DNA, 15 bp, Homo sapiens
tacagggagatgatt

SEQ ID NO: 133109 - DNA, 15 bp, Homo sapiens
ttacagggagatgat

SEQ ID NO: 133110 - DNA, 15 bp, Homo sapiens
cttacagggagatga

SEQ ID NO: 133111 - DNA, 15 bp, Homo sapiens
tcttacagggagatg

SEQ ID NO: 133112 - DNA, 15 bp, Homo sapiens
atcttacagggagat

SEQ ID NO: 133113 - DNA, 15 bp, Homo sapiens
gatcttacagggaga

SEQ ID NO: 133114 - DNA, 15 bp, Homo sapiens
agatcttacagggag

SEQ ID NO: 133115 - DNA, 15 bp, Homo sapiens
aagatcttacaggga

SEQ ID NO: 133116 - DNA, 15 bp, Homo sapiens
caagatcttacaggg

SEQ ID NO: 133117 - DNA, 15 bp, Homo sapiens
acaagatcttacagg

SEQ ID NO: 133118 - DNA, 15 bp, Homo sapiens
aacaagatcttacag

SEQ ID NO: 133119 - DNA, 15 bp, Homo sapiens
taacaagatcttaca

SEQ ID NO: 133120 - DNA, 15 bp, Homo sapiens
gtaacaagatcttac

SEQ ID NO: 133121 - DNA, 15 bp, Homo sapiens
ggtaacaagatctta

SEQ ID NO: 133122 - DNA, 15 bp, Homo sapiens
aggtaacaagatctt

SEQ ID NO: 133123 - DNA, 15 bp, Homo sapiens
caggtaacaagatct

SEQ ID NO: 133124 - DNA, 15 bp, Homo sapiens
acaggtaacaagatc

SEQ ID NO: 133125 - DNA, 15 bp, Homo sapiens
tacaggtaacaagat

SEQ ID NO: 133126 - DNA, 15 bp, Homo sapiens
atacaggtaacaaga

SEQ ID NO: 133127 - DNA, 15 bp, Homo sapiens
catacaggtaacaag

SEQ ID NO: 133128 - DNA, 15 bp, Homo sapiens
tcatacaggtaacaa

SEQ ID NO: 133129 - DNA, 15 bp, Homo sapiens
gtcatacaggtaaca

SEQ ID NO: 133130 - DNA, 15 bp, Homo sapiens
agtcatacaggtaac

SEQ ID NO: 133131 - DNA, 15 bp, Homo sapiens
tagtcatacaggtaa

SEQ ID NO: 133132 - DNA, 15 bp, Homo sapiens
ttagtcatacaggta

SEQ ID NO: 133133 - DNA, 15 bp, Homo sapiens
attagtcatacaggt

SEQ ID NO: 133134 - DNA, 15 bp, Homo sapiens
tattagtcatacagg

SEQ ID NO: 133135 - DNA, 15 bp, Homo sapiens
gtattagtcatacag

SEQ ID NO: 133136 - DNA, 15 bp, Homo sapiens
agtattagtcataca

SEQ ID NO: 133137 - DNA, 15 bp, Homo sapiens
aagtattagtcatac

SEQ ID NO: 133138 - DNA, 15 bp, Homo sapiens
gaagtattagtcata

SEQ ID NO: 133139 - DNA, 15 bp, Homo sapiens
agaagtattagtcat

SEQ ID NO: 133140 - DNA, 15 bp, Homo sapiens
aagaagtattagtca

SEQ ID NO: 133141 - DNA, 15 bp, Homo sapiens
gaagaagtattagtc

SEQ ID NO: 133142 - DNA, 15 bp, Homo sapiens
tgaagaagtattagt

SEQ ID NO: 133143 - DNA, 15 bp, Homo sapiens
gtgaagaagtattag

SEQ ID NO: 133144 - DNA, 15 bp, Homo sapiens
cgtgaagaagtatta

SEQ ID NO: 133145 - DNA, 15 bp, Homo sapiens
acgtgaagaagtatt

SEQ ID NO: 133146 - DNA, 15 bp, Homo sapiens
cacgtgaagaagtat

SEQ ID NO: 133147 - DNA, 15 bp, Homo sapiens
ccacgtgaagaagta

SEQ ID NO: 133148 - DNA, 15 bp, Homo sapiens
gccacgtgaagaagt

SEQ ID NO: 133149 - DNA, 15 bp, Homo sapiens
ggccacgtgaagaag

SEQ ID NO: 133150 - DNA, 15 bp, Homo sapiens
tggccacgtgaagaa

SEQ ID NO: 133151 - DNA, 15 bp, Homo sapiens
ttggccacgtgaaga

SEQ ID NO: 133152 - DNA, 15 bp, Homo sapiens
tttggccacgtgaag

SEQ ID NO: 133153 - DNA, 15 bp, Homo sapiens
ttttggccacgtgaa

SEQ ID NO: 133154 - DNA, 15 bp, Homo sapiens
attttggccacgtga

SEQ ID NO: 133155 - DNA, 15 bp, Homo sapiens
gattttggccacgtg

SEQ ID NO: 133156 - DNA, 15 bp, Homo sapiens
tgattttggccacgt

SEQ ID NO: 133157 - DNA, 15 bp, Homo sapiens
ttgattttggccacg

SEQ ID NO: 133158 - DNA, 15 bp, Homo sapiens
tttgattttggccac

SEQ ID NO: 133159 - DNA, 15 bp, Homo sapiens
ttttgattttggcca

SEQ ID NO: 133160 - DNA, 15 bp, Homo sapiens
attttgattttggcc

SEQ ID NO: 133161 - DNA, 15 bp, Homo sapiens
aattttgattttggc

SEQ ID NO: 133162 - DNA, 15 bp, Homo sapiens
taattttgattttgg

SEQ ID NO: 133163 - DNA, 15 bp, Homo sapiens
ataattttgattttg

SEQ ID NO: 133164 - DNA, 15 bp, Homo sapiens
aataattttgatttt

SEQ ID NO: 133165 - DNA, 15 bp, Homo sapiens
aaataattttgattt

SEQ ID NO: 133166 - DNA, 15 bp, Homo sapiens
taaataattttgatt

SEQ ID NO: 133167 - DNA, 15 bp, Homo sapiens
ttaaataattttgat

SEQ ID NO: 133168 - DNA, 15 bp, Homo sapiens
gttaaataattttga

SEQ ID NO: 133169 - DNA, 15 bp, Homo sapiens
tgttaaataattttg

SEQ ID NO: 133170 - DNA, 15 bp, Homo sapiens
gtgttaaataatttt

SEQ ID NO: 133171 - DNA, 15 bp, Homo sapiens
tgtgttaaataattt

SEQ ID NO: 133172 - DNA, 15 bp, Homo sapiens
atgtgttaaataatt

SEQ ID NO: 133173 - DNA, 15 bp, Homo sapiens
gatgtgttaaataat

SEQ ID NO: 133174 - DNA, 15 bp, Homo sapiens
agatgtgttaaataa

SEQ ID NO: 133175 - DNA, 15 bp, Homo sapiens
gagatgtgttaaata

SEQ ID NO: 133176 - DNA, 15 bp, Homo sapiens
ggagatgtgttaaat

SEQ ID NO: 133177 - DNA, 15 bp, Homo sapiens
aggagatgtgttaaa

SEQ ID NO: 133178 - DNA, 15 bp, Homo sapiens
aaggagatgtgttaa

SEQ ID NO: 133179 - DNA, 15 bp, Homo sapiens
aaaggagatgtgtta

SEQ ID NO: 133180 - DNA, 15 bp, Homo sapiens
taaaggagatgtgtt

SEQ ID NO: 133181 - DNA, 15 bp, Homo sapiens
ataaaggagatgtgt

SEQ ID NO: 133182 - DNA, 15 bp, Homo sapiens
aataaaggagatgtg

SEQ ID NO: 133183 - DNA, 15 bp, Homo sapiens
aaataaaggagatgt

SEQ ID NO: 133184 - DNA, 15 bp, Homo sapiens
aaaataaaggagatg

SEQ ID NO: 133185 - DNA, 15 bp, Homo sapiens
gaaaataaaggagat

SEQ ID NO: 133186 - DNA, 15 bp, Homo sapiens
agaaaataaaggaga

SEQ ID NO: 133187 - DNA, 15 bp, Homo sapiens
tagaaaataaaggag

SEQ ID NO: 133188 - DNA, 15 bp, Homo sapiens
atagaaaataaagga

SEQ ID NO: 133189 - DNA, 15 bp, Homo sapiens
aatagaaaataaagg

SEQ ID NO: 133190 - DNA, 15 bp, Homo sapiens
gaatagaaaataaag

SEQ ID NO: 133191 - DNA, 15 bp, Homo sapiens
agaatagaaaataaa

SEQ ID NO: 133192 - DNA, 15 bp, Homo sapiens
aagaatagaaaataa

SEQ ID NO: 133193 - DNA, 15 bp, Homo sapiens
aaagaatagaaaata

SEQ ID NO: 133194 - DNA, 15 bp, Homo sapiens
taaagaatagaaaat

SEQ ID NO: 133195 - DNA, 15 bp, Homo sapiens
ataaagaatagaaaa

SEQ ID NO: 133196 - DNA, 15 bp, Homo sapiens
cataaagaatagaaa

SEQ ID NO: 133197 - DNA, 15 bp, Homo sapiens
gcataaagaatagaa

SEQ ID NO: 133198 - DNA, 15 bp, Homo sapiens
agcataaagaataga

SEQ ID NO: 133199 - DNA, 15 bp, Homo sapiens
cagcataaagaatag

SEQ ID NO: 133200 - DNA, 15 bp, Homo sapiens
ccagcataaagaata

SEQ ID NO: 133201 - DNA, 15 bp, Homo sapiens
accagcataaagaat

SEQ ID NO: 133202 - DNA, 15 bp, Homo sapiens
aaccagcataaagaa

SEQ ID NO: 133203 - DNA, 15 bp, Homo sapiens
gaaccagcataaaga

SEQ ID NO: 133204 - DNA, 15 bp, Homo sapiens
tgaaccagcataaag

SEQ ID NO: 133205 - DNA, 15 bp, Homo sapiens
gtgaaccagcataaa

SEQ ID NO: 133206 - DNA, 15 bp, Homo sapiens
agtgaaccagcataa

SEQ ID NO: 133207 - DNA, 15 bp, Homo sapiens
cagtgaaccagcata

SEQ ID NO: 133208 - DNA, 15 bp, Homo sapiens
ccagtgaaccagcat

SEQ ID NO: 133209 - DNA, 15 bp, Homo sapiens
gccagtgaaccagca

SEQ ID NO: 133210 - DNA, 15 bp, Homo sapiens
ggccagtgaaccagc

SEQ ID NO: 133211 - DNA, 15 bp, Homo sapiens
aggccagtgaaccag

SEQ ID NO: 133212 - DNA, 15 bp, Homo sapiens
gaggccagtgaacca

SEQ ID NO: 133213 - DNA, 15 bp, Homo sapiens
agaggccagtgaacc

SEQ ID NO: 133214 - DNA, 15 bp, Homo sapiens
gagaggccagtgaac

SEQ ID NO: 133215 - DNA, 15 bp, Homo sapiens
agagaggccagtgaa

SEQ ID NO: 133216 - DNA, 15 bp, Homo sapiens
tagagaggccagtga

SEQ ID NO: 133217 - DNA, 15 bp, Homo sapiens
gtagagaggccagtg

SEQ ID NO: 133218 - DNA, 15 bp, Homo sapiens
ggtagagaggccagt

SEQ ID NO: 133219 - DNA, 15 bp, Homo sapiens
tggtagagaggccag

SEQ ID NO: 133220 - DNA, 15 bp, Homo sapiens
ctggtagagaggcca

SEQ ID NO: 133221 - DNA, 15 bp, Homo sapiens
tctggtagagaggcc

SEQ ID NO: 133222 - DNA, 15 bp, Homo sapiens
atctggtagagaggc

SEQ ID NO: 133223 - DNA, 15 bp, Homo sapiens
aatctggtagagagg

SEQ ID NO: 133224 - DNA, 15 bp, Homo sapiens
aaatctggtagagag

SEQ ID NO: 133225 - DNA, 15 bp, Homo sapiens
aaaatctggtagaga

SEQ ID NO: 133226 - DNA, 15 bp, Homo sapiens
gaaaatctggtagag

SEQ ID NO: 133227 - DNA, 15 bp, Homo sapiens
agaaaatctggtaga

SEQ ID NO: 133228 - DNA, 15 bp, Homo sapiens
aagaaaatctggtag

SEQ ID NO: 133229 - DNA, 15 bp, Homo sapiens
caagaaaatctggta

SEQ ID NO: 133230 - DNA, 15 bp, Homo sapiens
ccaagaaaatctggt

SEQ ID NO: 133231 - DNA, 15 bp, Homo sapiens
cccaagaaaatctgg

SEQ ID NO: 133232 - DNA, 15 bp, Homo sapiens
ccccaagaaaatctg

SEQ ID NO: 133233 - DNA, 15 bp, Homo sapiens
tccccaagaaaatct

SEQ ID NO: 133234 - DNA, 15 bp, Homo sapiens
gtccccaagaaaatc

SEQ ID NO: 133235 - DNA, 15 bp, Homo sapiens
agtccccaagaaaat

SEQ ID NO: 133236 - DNA, 15 bp, Homo sapiens
gagtccccaagaaaa

SEQ ID NO: 133237 - DNA, 15 bp, Homo sapiens
tgagtccccaagaaa

SEQ ID NO: 133238 - DNA, 15 bp, Homo sapiens
ctgagtccccaagaa

SEQ ID NO: 133239 - DNA, 15 bp, Homo sapiens
tctgagtccccaaga

SEQ ID NO: 133240 - DNA, 15 bp, Homo sapiens
atctgagtccccaag

SEQ ID NO: 133241 - DNA, 15 bp, Homo sapiens
gatctgagtccccaa

SEQ ID NO: 133242 - DNA, 15 bp, Homo sapiens
ggatctgagtcccca

SEQ ID NO: 133243 - DNA, 15 bp, Homo sapiens
tggatctgagtcccc

SEQ ID NO: 133244 - DNA, 15 bp, Homo sapiens
ctggatctgagtccc

SEQ ID NO: 133245 - DNA, 15 bp, Homo sapiens
actggatctgagtcc

SEQ ID NO: 133246 - DNA, 15 bp, Homo sapiens
cactggatctgagtc

SEQ ID NO: 133247 - DNA, 15 bp, Homo sapiens
ccactggatctgagt

SEQ ID NO: 133248 - DNA, 15 bp, Homo sapiens
gccactggatctgag

SEQ ID NO: 133249 - DNA, 15 bp, Homo sapiens
ggccactggatctga

SEQ ID NO: 133250 - DNA, 15 bp, Homo sapiens
aggccactggatctg

SEQ ID NO: 133251 - DNA, 15 bp, Homo sapiens
gaggccactggatct

SEQ ID NO: 133252 - DNA, 15 bp, Homo sapiens
agaggccactggatc

SEQ ID NO: 133253 - DNA, 15 bp, Homo sapiens
tagaggccactggat

SEQ ID NO: 133254 - DNA, 15 bp, Homo sapiens
ctagaggccactgga

SEQ ID NO: 133255 - DNA, 15 bp, Homo sapiens
cctagaggccactgg

SEQ ID NO: 133256 - DNA, 15 bp, Homo sapiens
gcctagaggccactg

SEQ ID NO: 133257 - DNA, 15 bp, Homo sapiens
tgcctagaggccact

SEQ ID NO: 133258 - DNA, 15 bp, Homo sapiens
atgcctagaggccac

SEQ ID NO: 133259 - DNA, 15 bp, Homo sapiens
aatgcctagaggcca

SEQ ID NO: 133260 - DNA, 15 bp, Homo sapiens
aaatgcctagaggcc

SEQ ID NO: 133261 - DNA, 15 bp, Homo sapiens
gaaatgcctagaggc

SEQ ID NO: 133262 - DNA, 15 bp, Homo sapiens
tgaaatgcctagagg

SEQ ID NO: 133263 - DNA, 15 bp, Homo sapiens
ttgaaatgcctagag

SEQ ID NO: 133264 - DNA, 15 bp, Homo sapiens
tttgaaatgcctaga

SEQ ID NO: 133265 - DNA, 15 bp, Homo sapiens
ctttgaaatgcctag

SEQ ID NO: 133266 - DNA, 15 bp, Homo sapiens
gctttgaaatgccta

SEQ ID NO: 133267 - DNA, 15 bp, Homo sapiens
cgctttgaaatgcct

SEQ ID NO: 133268 - DNA, 15 bp, Homo sapiens
tcgctttgaaatgcc

SEQ ID NO: 133269 - DNA, 15 bp, Homo sapiens
ttcgctttgaaatgc

SEQ ID NO: 133270 - DNA, 15 bp, Homo sapiens
attcgctttgaaatg

SEQ ID NO: 133271 - DNA, 15 bp, Homo sapiens
aattcgctttgaaat

SEQ ID NO: 133272 - DNA, 15 bp, Homo sapiens
gaattcgctttgaaa

SEQ ID NO: 133273 - DNA, 15 bp, Homo sapiens
tgaattcgctttgaa

SEQ ID NO: 133274 - DNA, 15 bp, Homo sapiens
gtgaattcgctttga

SEQ ID NO: 133275 - DNA, 15 bp, Homo sapiens
tgtgaattcgctttg

SEQ ID NO: 133276 - DNA, 15 bp, Homo sapiens
ctgtgaattcgcttt

SEQ ID NO: 133277 - DNA, 15 bp, Homo sapiens
cctgtgaattcgctt

SEQ ID NO: 133278 - DNA, 15 bp, Homo sapiens
tcctgtgaattcgct

SEQ ID NO: 133279 - DNA, 15 bp, Homo sapiens
ttcctgtgaattcgc

SEQ ID NO: 133280 - DNA, 15 bp, Homo sapiens
tttcctgtgaattcg

SEQ ID NO: 133281 - DNA, 15 bp, Homo sapiens
ctttcctgtgaattc

SEQ ID NO: 133282 - DNA, 15 bp, Homo sapiens
gctttcctgtgaatt

SEQ ID NO: 133283 - DNA, 15 bp, Homo sapiens
ggctttcctgtgaat

SEQ ID NO: 133284 - DNA, 15 bp, Homo sapiens
aggctttcctgtgaa

SEQ ID NO: 133285 - DNA, 15 bp, Homo sapiens
caggctttcctgtga

SEQ ID NO: 133286 - DNA, 15 bp, Homo sapiens
tcaggctttcctgtg

SEQ ID NO: 133287 - DNA, 15 bp, Homo sapiens
ttcaggctttcctgt

SEQ ID NO: 133288 - DNA, 15 bp, Homo sapiens
attcaggctttcctg

SEQ ID NO: 133289 - DNA, 15 bp, Homo sapiens
aattcaggctttcct

SEQ ID NO: 133290 - DNA, 15 bp, Homo sapiens
gaattcaggctttcc

SEQ ID NO: 133291 - DNA, 15 bp, Homo sapiens
ggaattcaggctttc

SEQ ID NO: 133292 - DNA, 15 bp, Homo sapiens
tggaattcaggcttt

SEQ ID NO: 133293 - DNA, 15 bp, Homo sapiens
ctggaattcaggctt

SEQ ID NO: 133294 - DNA, 15 bp, Homo sapiens
gctggaattcaggct

SEQ ID NO: 133295 - DNA, 15 bp, Homo sapiens
ggctggaattcaggc

SEQ ID NO: 133296 - DNA, 15 bp, Homo sapiens
aggctggaattcagg

SEQ ID NO: 133297 - DNA, 15 bp, Homo sapiens
aaggctggaattcag

SEQ ID NO: 133298 - DNA, 15 bp, Homo sapiens
gaaggctggaattca

SEQ ID NO: 133299 - DNA, 15 bp, Homo sapiens
agaaggctggaattc

SEQ ID NO: 133300 - DNA, 15 bp, Homo sapiens
gagaaggctggaatt

SEQ ID NO: 133301 - DNA, 15 bp, Homo sapiens
ggagaaggctggaat

SEQ ID NO: 133302 - DNA, 15 bp, Homo sapiens
gggagaaggctggaa

SEQ ID NO: 133303 - DNA, 15 bp, Homo sapiens
ggggagaaggctgga

SEQ ID NO: 133304 - DNA, 15 bp, Homo sapiens
gggggagaaggctgg

SEQ ID NO: 133305 - DNA, 15 bp, Homo sapiens
agggggagaaggctg

SEQ ID NO: 133306 - DNA, 15 bp, Homo sapiens
gagggggagaaggct

SEQ ID NO: 133307 - DNA, 15 bp, Homo sapiens
ggagggggagaaggc

SEQ ID NO: 133308 - DNA, 15 bp, Homo sapiens
aggagggggagaagg

SEQ ID NO: 133309 - DNA, 15 bp, Homo sapiens
gaggagggggagaag

SEQ ID NO: 133310 - DNA, 15 bp, Homo sapiens
ggaggagggggagaa

SEQ ID NO: 133311 - DNA, 15 bp, Homo sapiens
aggaggagggggaga

SEQ ID NO: 133312 - DNA, 15 bp, Homo sapiens
gaggaggagggggag

SEQ ID NO: 133313 - DNA, 15 bp, Homo sapiens
agaggaggaggggga

SEQ ID NO: 133314 - DNA, 15 bp, Homo sapiens
aagaggaggaggggg

SEQ ID NO: 133315 - DNA, 15 bp, Homo sapiens
caagaggaggagggg

SEQ ID NO: 133316 - DNA, 15 bp, Homo sapiens
gcaagaggaggaggg

SEQ ID NO: 133317 - DNA, 15 bp, Homo sapiens
agcaagaggaggagg

SEQ ID NO: 133318 - DNA, 15 bp, Homo sapiens
gagcaagaggaggag

SEQ ID NO: 133319 - DNA, 15 bp, Homo sapiens
ggagcaagaggagga

SEQ ID NO: 133320 - DNA, 15 bp, Homo sapiens
tggagcaagaggagg

SEQ ID NO: 133321 - DNA, 15 bp, Homo sapiens
atggagcaagaggag

SEQ ID NO: 133322 - DNA, 15 bp, Homo sapiens
gatggagcaagagga

SEQ ID NO: 133323 - DNA, 15 bp, Homo sapiens
ggatggagcaagagg

SEQ ID NO: 133324 - DNA, 15 bp, Homo sapiens
aggatggagcaagag

SEQ ID NO: 133325 - DNA, 15 bp, Homo sapiens
aaggatggagcaaga

SEQ ID NO: 133326 - DNA, 15 bp, Homo sapiens
aaaggatggagcaag

SEQ ID NO: 133327 - DNA, 15 bp, Homo sapiens
gaaaggatggagcaa

SEQ ID NO: 133328 - DNA, 15 bp, Homo sapiens
agaaaggatggagca

SEQ ID NO: 133329 - DNA, 15 bp, Homo sapiens
aagaaaggatggagc

SEQ ID NO: 133330 - DNA, 15 bp, Homo sapiens
aaagaaaggatggag

SEQ ID NO: 133331 - DNA, 15 bp, Homo sapiens
aaaagaaaggatgga

SEQ ID NO: 133332 - DNA, 15 bp, Homo sapiens
taaaagaaaggatgg

SEQ ID NO: 133333 - DNA, 15 bp, Homo sapiens
gtaaaagaaaggatg

SEQ ID NO: 133334 - DNA, 15 bp, Homo sapiens
tgtaaaagaaaggat

SEQ ID NO: 133335 - DNA, 15 bp, Homo sapiens
atgtaaaagaaagga

SEQ ID NO: 133336 - DNA, 15 bp, Homo sapiens
gatgtaaaagaaagg

SEQ ID NO: 133337 - DNA, 15 bp, Homo sapiens
ggatgtaaaagaaag

SEQ ID NO: 133338 - DNA, 15 bp, Homo sapiens
aggatgtaaaagaaa

SEQ ID NO: 133339 - DNA, 15 bp, Homo sapiens
aaggatgtaaaagaa

SEQ ID NO: 133340 - DNA, 15 bp, Homo sapiens
aaaggatgtaaaaga

SEQ ID NO: 133341 - DNA, 15 bp, Homo sapiens
aaaaggatgtaaaag

SEQ ID NO: 133342 - DNA, 15 bp, Homo sapiens
aaaaaggatgtaaaa

SEQ ID NO: 133343 - DNA, 15 bp, Homo sapiens
aaaaaaggatgtaaa

SEQ ID NO: 133344 - DNA, 15 bp, Homo sapiens
gaaaaaaggatgtaa

SEQ ID NO: 133345 - DNA, 15 bp, Homo sapiens
ggaaaaaaggatgta

SEQ ID NO: 133346 - DNA, 15 bp, Homo sapiens
aggaaaaaaggatgt

SEQ ID NO: 133347 - DNA, 15 bp, Homo sapiens
aaggaaaaaaggatg

SEQ ID NO: 133348 - DNA, 15 bp, Homo sapiens
taaggaaaaaaggat

SEQ ID NO: 133349 - DNA, 15 bp, Homo sapiens
ctaaggaaaaaagga

SEQ ID NO: 133350 - DNA, 15 bp, Homo sapiens
actaaggaaaaaagg

SEQ ID NO: 133351 - DNA, 15 bp, Homo sapiens
cactaaggaaaaaag

SEQ ID NO: 133352 - DNA, 15 bp, Homo sapiens
ccactaaggaaaaaa

SEQ ID NO: 133353 - DNA, 15 bp, Homo sapiens
gccactaaggaaaaa

SEQ ID NO: 133354 - DNA, 15 bp, Homo sapiens
agccactaaggaaaa

SEQ ID NO: 133355 - DNA, 15 bp, Homo sapiens
cagccactaaggaaa

SEQ ID NO: 133356 - DNA, 15 bp, Homo sapiens
acagccactaaggaa

SEQ ID NO: 133357 - DNA, 15 bp, Homo sapiens
gacagccactaagga

SEQ ID NO: 133358 - DNA, 15 bp, Homo sapiens
tgacagccactaagg

SEQ ID NO: 133359 - DNA, 15 bp, Homo sapiens
atgacagccactaag

SEQ ID NO: 133360 - DNA, 15 bp, Homo sapiens
aatgacagccactaa

SEQ ID NO: 133361 - DNA, 15 bp, Homo sapiens
gaatgacagccacta

SEQ ID NO: 133362 - DNA, 15 bp, Homo sapiens
ggaatgacagccact

SEQ ID NO: 133363 - DNA, 15 bp, Homo sapiens
aggaatgacagccac

SEQ ID NO: 133364 - DNA, 15 bp, Homo sapiens
caggaatgacagcca

SEQ ID NO: 133365 - DNA, 15 bp, Homo sapiens
tcaggaatgacagcc

SEQ ID NO: 133366 - DNA, 15 bp, Homo sapiens
ctcaggaatgacagc

SEQ ID NO: 133367 - DNA, 15 bp, Homo sapiens
cctcaggaatgacag

SEQ ID NO: 133368 - DNA, 15 bp, Homo sapiens
ccctcaggaatgaca

SEQ ID NO: 133369 - DNA, 15 bp, Homo sapiens
accctcaggaatgac

SEQ ID NO: 133370 - DNA, 15 bp, Homo sapiens
aaccctcaggaatga

SEQ ID NO: 133371 - DNA, 15 bp, Homo sapiens
aaaccctcaggaatg

SEQ ID NO: 133372 - DNA, 15 bp, Homo sapiens
gaaaccctcaggaat

SEQ ID NO: 133373 - DNA, 15 bp, Homo sapiens
agaaaccctcaggaa

SEQ ID NO: 133374 - DNA, 15 bp, Homo sapiens
cagaaaccctcagga

SEQ ID NO: 133375 - DNA, 15 bp, Homo sapiens
acagaaaccctcagg

SEQ ID NO: 133376 - DNA, 15 bp, Homo sapiens
cacagaaaccctcag

SEQ ID NO: 133377 - DNA, 15 bp, Homo sapiens
ccacagaaaccctca

SEQ ID NO: 133378 - DNA, 15 bp, Homo sapiens
tccacagaaaccctc

SEQ ID NO: 133379 - DNA, 15 bp, Homo sapiens
ttccacagaaaccct

SEQ ID NO: 133380 - DNA, 15 bp, Homo sapiens
tttccacagaaaccc

SEQ ID NO: 133381 - DNA, 15 bp, Homo sapiens
ctttccacagaaacc

SEQ ID NO: 133382 - DNA, 15 bp, Homo sapiens
actttccacagaaac

SEQ ID NO: 133383 - DNA, 15 bp, Homo sapiens
aactttccacagaaa

SEQ ID NO: 133384 - DNA, 15 bp, Homo sapiens
caactttccacagaa

SEQ ID NO: 133385 - DNA, 15 bp, Homo sapiens
ccaactttccacaga

SEQ ID NO: 133386 - DNA, 15 bp, Homo sapiens
accaactttccacag

SEQ ID NO: 133387 - DNA, 15 bp, Homo sapiens
caccaactttccaca

SEQ ID NO: 133388 - DNA, 15 bp, Homo sapiens
gcaccaactttccac

SEQ ID NO: 133389 - DNA, 15 bp, Homo sapiens
agcaccaactttcca

SEQ ID NO: 133390 - DNA, 15 bp, Homo sapiens
cagcaccaactttcc

SEQ ID NO: 133391 - DNA, 15 bp, Homo sapiens
acagcaccaactttc

SEQ ID NO: 133392 - DNA, 15 bp, Homo sapiens
aacagcaccaacttt

SEQ ID NO: 133393 - DNA, 15 bp, Homo sapiens
aaacagcaccaactt

SEQ ID NO: 133394 - DNA, 15 bp, Homo sapiens
taaacagcaccaact

SEQ ID NO: 133395 - DNA, 15 bp, Homo sapiens
ttaaacagcaccaac

SEQ ID NO: 133396 - DNA, 15 bp, Homo sapiens
attaaacagcaccaa

SEQ ID NO: 133397 - DNA, 15 bp, Homo sapiens
aattaaacagcacca

SEQ ID NO: 133398 - DNA, 15 bp, Homo sapiens
aaattaaacagcacc

SEQ ID NO: 133399 - DNA, 15 bp, Homo sapiens
aaaattaaacagcac

SEQ ID NO: 133400 - DNA, 15 bp, Homo sapiens
caaaattaaacagca

SEQ ID NO: 133401 - DNA, 15 bp, Homo sapiens
ccaaaattaaacagc

SEQ ID NO: 133402 - DNA, 15 bp, Homo sapiens
accaaaattaaacag

SEQ ID NO: 133403 - DNA, 15 bp, Homo sapiens
aaccaaaattaaaca

SEQ ID NO: 133404 - DNA, 15 bp, Homo sapiens
aaaccaaaattaaac

SEQ ID NO: 133405 - DNA, 15 bp, Homo sapiens
gaaaccaaaattaaa

SEQ ID NO: 133406 - DNA, 15 bp, Homo sapiens
agaaaccaaaattaa

SEQ ID NO: 133407 - DNA, 15 bp, Homo sapiens
tagaaaccaaaatta

SEQ ID NO: 133408 - DNA, 15 bp, Homo sapiens
ctagaaaccaaaatt

SEQ ID NO: 133409 - DNA, 15 bp, Homo sapiens
gctagaaaccaaaat

SEQ ID NO: 133410 - DNA, 15 bp, Homo sapiens
tgctagaaaccaaaa

SEQ ID NO: 133411 - DNA, 15 bp, Homo sapiens
gtgctagaaaccaaa

SEQ ID NO: 133412 - DNA, 15 bp, Homo sapiens
tgtgctagaaaccaa

SEQ ID NO: 133413 - DNA, 15 bp, Homo sapiens
ttgtgctagaaacca

SEQ ID NO: 133414 - DNA, 15 bp, Homo sapiens
attgtgctagaaacc

SEQ ID NO: 133415 - DNA, 15 bp, Homo sapiens
tattgtgctagaaac

SEQ ID NO: 133416 - DNA, 15 bp, Homo sapiens
ctattgtgctagaaa

SEQ ID NO: 133417 - DNA, 15 bp, Homo sapiens
cctattgtgctagaa

SEQ ID NO: 133418 - DNA, 15 bp, Homo sapiens
ccctattgtgctaga

SEQ ID NO: 133419 - DNA, 15 bp, Homo sapiens
tccctattgtgctag

SEQ ID NO: 133420 - DNA, 15 bp, Homo sapiens
ctccctattgtgcta

SEQ ID NO: 133421 - DNA, 15 bp, Homo sapiens
cctccctattgtgct

SEQ ID NO: 133422 - DNA, 15 bp, Homo sapiens
tcctccctattgtgc

SEQ ID NO: 133423 - DNA, 15 bp, Homo sapiens
ttcctccctattgtg

SEQ ID NO: 133424 - DNA, 15 bp, Homo sapiens
attcctccctattgt

SEQ ID NO: 133425 - DNA, 15 bp, Homo sapiens
tattcctccctattg

SEQ ID NO: 133426 - DNA, 15 bp, Homo sapiens
gtattcctccctatt

SEQ ID NO: 133427 - DNA, 15 bp, Homo sapiens
agtattcctccctat

SEQ ID NO: 133428 - DNA, 15 bp, Homo sapiens
aagtattcctcccta

SEQ ID NO: 133429 - DNA, 15 bp, Homo sapiens
gaagtattcctccct

SEQ ID NO: 133430 - DNA, 15 bp, Homo sapiens
tgaagtattcctccc

SEQ ID NO: 133431 - DNA, 15 bp, Homo sapiens
ttgaagtattcctcc

SEQ ID NO: 133432 - DNA, 15 bp, Homo sapiens
attgaagtattcctc

SEQ ID NO: 133433 - DNA, 15 bp, Homo sapiens
aattgaagtattcct

SEQ ID NO: 133434 - DNA, 15 bp, Homo sapiens
aaattgaagtattcc

SEQ ID NO: 133435 - DNA, 15 bp, Homo sapiens
caaattgaagtattc

SEQ ID NO: 133436 - DNA, 15 bp, Homo sapiens
ccaaattgaagtatt

SEQ ID NO: 133437 - DNA, 15 bp, Homo sapiens
cccaaattgaagtat

SEQ ID NO: 133438 - DNA, 15 bp, Homo sapiens
ccccaaattgaagta

SEQ ID NO: 133439 - DNA, 15 bp, Homo sapiens
tccccaaattgaagt

SEQ ID NO: 133440 - DNA, 15 bp, Homo sapiens
ttccccaaattgaag

SEQ ID NO: 133441 - DNA, 15 bp, Homo sapiens
cttccccaaattgaa

SEQ ID NO: 133442 - DNA, 15 bp, Homo sapiens
tcttccccaaattga

SEQ ID NO: 133443 - DNA, 15 bp, Homo sapiens
ttcttccccaaattg

SEQ ID NO: 133444 - DNA, 15 bp, Homo sapiens
cttcttccccaaatt

SEQ ID NO: 133445 - DNA, 15 bp, Homo sapiens
acttcttccccaaat

SEQ ID NO: 133446 - DNA, 15 bp, Homo sapiens
tacttcttccccaaa

SEQ ID NO: 133447 - DNA, 15 bp, Homo sapiens
ttacttcttccccaa

SEQ ID NO: 133448 - DNA, 15 bp, Homo sapiens
attacttcttcccca

SEQ ID NO: 133449 - DNA, 15 bp, Homo sapiens
aattacttcttcccc

SEQ ID NO: 133450 - DNA, 15 bp, Homo sapiens
taattacttcttccc

SEQ ID NO: 133451 - DNA, 15 bp, Homo sapiens
ttaattacttcttcc

SEQ ID NO: 133452 - DNA, 15 bp, Homo sapiens
cttaattacttcttc

SEQ ID NO: 133453 - DNA, 15 bp, Homo sapiens
ccttaattacttctt

SEQ ID NO: 133454 - DNA, 15 bp, Homo sapiens
accttaattacttct

SEQ ID NO: 133455 - DNA, 15 bp, Homo sapiens
taccttaattacttc

SEQ ID NO: 133456 - DNA, 15 bp, Homo sapiens
ttaccttaattactt

SEQ ID NO: 133457 - DNA, 15 bp, Homo sapiens
tttaccttaattact

SEQ ID NO: 133458 - DNA, 15 bp, Homo sapiens
gtttaccttaattac

SEQ ID NO: 133459 - DNA, 15 bp, Homo sapiens
tgtttaccttaatta

SEQ ID NO: 133460 - DNA, 15 bp, Homo sapiens
atgtttaccttaatt

SEQ ID NO: 133461 - DNA, 15 bp, Homo sapiens
aatgtttaccttaat

SEQ ID NO: 133462 - DNA, 15 bp, Homo sapiens
taatgtttaccttaa

SEQ ID NO: 133463 - DNA, 15 bp, Homo sapiens
ataatgtttacctta

SEQ ID NO: 133464 - DNA, 15 bp, Homo sapiens
cataatgtttacctt

SEQ ID NO: 133465 - DNA, 15 bp, Homo sapiens
acataatgtttacct

SEQ ID NO: 133466 - DNA, 15 bp, Homo sapiens
tacataatgtttacc

SEQ ID NO: 133467 - DNA, 15 bp, Homo sapiens
ctacataatgtttac

SEQ ID NO: 133468 - DNA, 15 bp, Homo sapiens
tctacataatgttta

SEQ ID NO: 133469 - DNA, 15 bp, Homo sapiens
atctacataatgttt

SEQ ID NO: 133470 - DNA, 15 bp, Homo sapiens
gatctacataatgtt

SEQ ID NO: 133471 - DNA, 15 bp, Homo sapiens
agatctacataatgt

SEQ ID NO: 133472 - DNA, 15 bp, Homo sapiens
gagatctacataatg

SEQ ID NO: 133473 - DNA, 15 bp, Homo sapiens
ggagatctacataat

SEQ ID NO: 133474 - DNA, 15 bp, Homo sapiens
gggagatctacataa

SEQ ID NO: 133475 - DNA, 15 bp, Homo sapiens
ggggagatctacata

SEQ ID NO: 133476 - DNA, 15 bp, Homo sapiens
tggggagatctacat

SEQ ID NO: 133477 - DNA, 15 bp, Homo sapiens
atggggagatctaca

SEQ ID NO: 133478 - DNA, 15 bp, Homo sapiens
aatggggagatctac

SEQ ID NO: 133479 - DNA, 15 bp, Homo sapiens
taatggggagatcta

SEQ ID NO: 133480 - DNA, 15 bp, Homo sapiens
ataatggggagatct

SEQ ID NO: 133481 - DNA, 15 bp, Homo sapiens
gataatggggagatc

SEQ ID NO: 133482 - DNA, 15 bp, Homo sapiens
tgataatggggagat

SEQ ID NO: 133483 - DNA, 15 bp, Homo sapiens
ctgataatggggaga

SEQ ID NO: 133484 - DNA, 15 bp, Homo sapiens
tctgataatggggag

SEQ ID NO: 133485 - DNA, 15 bp, Homo sapiens
ctctgataatgggga

SEQ ID NO: 133486 - DNA, 15 bp, Homo sapiens
actctgataatgggg

SEQ ID NO: 133487 - DNA, 15 bp, Homo sapiens
aactctgataatggg

SEQ ID NO: 133488 - DNA, 15 bp, Homo sapiens
caactctgataatgg

SEQ ID NO: 133489 - DNA, 15 bp, Homo sapiens
tcaactctgataatg

SEQ ID NO: 133490 - DNA, 15 bp, Homo sapiens
gtcaactctgataat

SEQ ID NO: 133491 - DNA, 15 bp, Homo sapiens
agtcaactctgataa

SEQ ID NO: 133492 - DNA, 15 bp, Homo sapiens
aagtcaactctgata

SEQ ID NO: 133493 - DNA, 15 bp, Homo sapiens
aaagtcaactctgat

SEQ ID NO: 133494 - DNA, 15 bp, Homo sapiens
aaaagtcaactctga

SEQ ID NO: 133495 - DNA, 15 bp, Homo sapiens
taaaagtcaactctg

SEQ ID NO: 133496 - DNA, 15 bp, Homo sapiens
gtaaaagtcaactct

SEQ ID NO: 133497 - DNA, 15 bp, Homo sapiens
agtaaaagtcaactc

SEQ ID NO: 133498 - DNA, 15 bp, Homo sapiens
aagtaaaagtcaact

SEQ ID NO: 133499 - DNA, 15 bp, Homo sapiens
caagtaaaagtcaac

SEQ ID NO: 133500 - DNA, 15 bp, Homo sapiens
ccaagtaaaagtcaa

SEQ ID NO: 133501 - DNA, 15 bp, Homo sapiens
cccaagtaaaagtca

SEQ ID NO: 133502 - DNA, 15 bp, Homo sapiens
ccccaagtaaaagtc

SEQ ID NO: 133503 - DNA, 15 bp, Homo sapiens
tccccaagtaaaagt

SEQ ID NO: 133504 - DNA, 15 bp, Homo sapiens
ttccccaagtaaaag

SEQ ID NO: 133505 - DNA, 15 bp, Homo sapiens
cttccccaagtaaaa

SEQ ID NO: 133506 - DNA, 15 bp, Homo sapiens
ccttccccaagtaaa

SEQ ID NO: 133507 - DNA, 15 bp, Homo sapiens
cccttccccaagtaa

SEQ ID NO: 133508 - DNA, 15 bp, Homo sapiens
ccccttccccaagta

SEQ ID NO: 133509 - DNA, 15 bp, Homo sapiens
accccttccccaagt

SEQ ID NO: 133510 - DNA, 15 bp, Homo sapiens
caccccttccccaag

SEQ ID NO: 133511 - DNA, 15 bp, Homo sapiens
acaccccttccccaa

SEQ ID NO: 133512 - DNA, 15 bp, Homo sapiens
aacaccccttcccca

SEQ ID NO: 133513 - DNA, 15 bp, Homo sapiens
aaacaccccttcccc

SEQ ID NO: 133514 - DNA, 15 bp, Homo sapiens
aaaacaccccttccc

SEQ ID NO: 133515 - DNA, 15 bp, Homo sapiens
aaaaacaccccttcc

SEQ ID NO: 133516 - DNA, 15 bp, Homo sapiens
aaaaaacaccccttc

SEQ ID NO: 133517 - DNA, 15 bp, Homo sapiens
aaaaaaacacccctt

SEQ ID NO: 133518 - DNA, 15 bp, Homo sapiens
taaaaaaacacccct

SEQ ID NO: 133519 - DNA, 15 bp, Homo sapiens
ttaaaaaaacacccc

SEQ ID NO: 133520 - DNA, 15 bp, Homo sapiens
tttaaaaaaacaccc

SEQ ID NO: 133521 - DNA, 15 bp, Homo sapiens
ttttaaaaaaacacc

SEQ ID NO: 133522 - DNA, 15 bp, Homo sapiens
tttttaaaaaaacac

SEQ ID NO: 133523 - DNA, 15 bp, Homo sapiens
ctttttaaaaaaaca

SEQ ID NO: 133524 - DNA, 15 bp, Homo sapiens
cctttttaaaaaaac

SEQ ID NO: 133525 - DNA, 15 bp, Homo sapiens
tcctttttaaaaaaa

SEQ ID NO: 133526 - DNA, 15 bp, Homo sapiens
ttcctttttaaaaaa

SEQ ID NO: 133527 - DNA, 15 bp, Homo sapiens
tttcctttttaaaaa

SEQ ID NO: 133528 - DNA, 15 bp, Homo sapiens
ttttcctttttaaaa

SEQ ID NO: 133529 - DNA, 15 bp, Homo sapiens
tttttcctttttaaa

SEQ ID NO: 133530 - DNA, 15 bp, Homo sapiens
atttttcctttttaa

SEQ ID NO: 133531 - DNA, 15 bp, Homo sapiens
tatttttccttttta

SEQ ID NO: 133532 - DNA, 15 bp, Homo sapiens
ctatttttccttttt

SEQ ID NO: 133533 - DNA, 15 bp, Homo sapiens
cctatttttcctttt

SEQ ID NO: 133534 - DNA, 15 bp, Homo sapiens
tcctatttttccttt

SEQ ID NO: 133535 - DNA, 15 bp, Homo sapiens
atcctatttttcctt

SEQ ID NO: 133536 - DNA, 15 bp, Homo sapiens
aatcctatttttcct

SEQ ID NO: 133537 - DNA, 15 bp, Homo sapiens
aaatcctatttttcc

SEQ ID NO: 133538 - DNA, 15 bp, Homo sapiens
aaaatcctatttttc

SEQ ID NO: 133539 - DNA, 15 bp, Homo sapiens
taaaatcctattttt

SEQ ID NO: 133540 - DNA, 15 bp, Homo sapiens
ctaaaatcctatttt

SEQ ID NO: 133541 - DNA, 15 bp, Homo sapiens
tctaaaatcctattt

SEQ ID NO: 133542 - DNA, 15 bp, Homo sapiens
atctaaaatcctatt

SEQ ID NO: 133543 - DNA, 15 bp, Homo sapiens
aatctaaaatcctat

SEQ ID NO: 133544 - DNA, 15 bp, Homo sapiens
aaatctaaaatccta

SEQ ID NO: 133545 - DNA, 15 bp, Homo sapiens
aaaatctaaaatcct

SEQ ID NO: 133546 - DNA, 15 bp, Homo sapiens
aaaaatctaaaatcc

SEQ ID NO: 133547 - DNA, 15 bp, Homo sapiens
aaaaaatctaaaatc

SEQ ID NO: 133548 - DNA, 15 bp, Homo sapiens
aaaaaaatctaaaat

SEQ ID NO: 133549 - DNA, 15 bp, Homo sapiens
aaaaaaaatctaaaa

SEQ ID NO: 133550 - DNA, 15 bp, Homo sapiens
aaaaaaaaatctaaa

SEQ ID NO: 133551 - DNA, 15 bp, Homo sapiens
aaaaaaaaaatctaa

SEQ ID NO: 133552 - DNA, 15 bp, Homo sapiens
aaaaaaaaaaatcta

SEQ ID NO: 133553 - DNA, 15 bp, Homo sapiens
aaaaaaaaaaaatct

SEQ ID NO: 133554 - DNA, 15 bp, Homo sapiens
aaaaaaaaaaaaatc

SEQ ID NO: 133555 - DNA, 15 bp, Homo sapiens
tatctcaaaaaaaaa

SEQ ID NO: 133556 - DNA, 15 bp, Homo sapiens
gtatctcaaaaaaaa

SEQ ID NO: 133557 - DNA, 15 bp, Homo sapiens
ggtatctcaaaaaaa

SEQ ID NO: 133558 - DNA, 15 bp, Homo sapiens
cggtatctcaaaaaa

SEQ ID NO: 133559 - DNA, 15 bp, Homo sapiens
acggtatctcaaaaa

SEQ ID NO: 133560 - DNA, 15 bp, Homo sapiens
gacggtatctcaaaa

SEQ ID NO: 133561 - DNA, 15 bp, Homo sapiens
agacggtatctcaaa

SEQ ID NO: 133562 - DNA, 15 bp, Homo sapiens
aagacggtatctcaa

SEQ ID NO: 133563 - DNA, 15 bp, Homo sapiens
caagacggtatctca

SEQ ID NO: 133564 - DNA, 15 bp, Homo sapiens
gcaagacggtatctc

SEQ ID NO: 133565 - DNA, 15 bp, Homo sapiens
agcaagacggtatct

SEQ ID NO: 133566 - DNA, 15 bp, Homo sapiens
cagcaagacggtatc

SEQ ID NO: 133567 - DNA, 15 bp, Homo sapiens
acagcaagacggtat

SEQ ID NO: 133568 - DNA, 15 bp, Homo sapiens
cacagcaagacggta

SEQ ID NO: 133569 - DNA, 15 bp, Homo sapiens
acacagcaagacggt

SEQ ID NO: 133570 - DNA, 15 bp, Homo sapiens
aacacagcaagacgg

SEQ ID NO: 133571 - DNA, 15 bp, Homo sapiens
caacacagcaagacg

SEQ ID NO: 133572 - DNA, 15 bp, Homo sapiens
gcaacacagcaagac

SEQ ID NO: 133573 - DNA, 15 bp, Homo sapiens
ggcaacacagcaaga

SEQ ID NO: 133574 - DNA, 15 bp, Homo sapiens
gggcaacacagcaag

SEQ ID NO: 133575 - DNA, 15 bp, Homo sapiens
tgggcaacacagcaa

SEQ ID NO: 133576 - DNA, 15 bp, Homo sapiens
ctgggcaacacagca

SEQ ID NO: 133577 - DNA, 15 bp, Homo sapiens
cctgggcaacacagc

SEQ ID NO: 133578 - DNA, 15 bp, Homo sapiens
gcctgggcaacacag

SEQ ID NO: 133579 - DNA, 15 bp, Homo sapiens
agcctgggcaacaca

SEQ ID NO: 133580 - DNA, 15 bp, Homo sapiens
cagcctgggcaacac

SEQ ID NO: 133581 - DNA, 15 bp, Homo sapiens
gccagcctgggcaac

SEQ ID NO: 133582 - DNA, 15 bp, Homo sapiens
tgccagcctgggcaa

SEQ ID NO: 133583 - DNA, 15 bp, Homo sapiens
ctgccagcctgggca

SEQ ID NO: 133584 - DNA, 15 bp, Homo sapiens
cctgccagcctgggc

SEQ ID NO: 133585 - DNA, 15 bp, Homo sapiens
gcctgccagcctggg

SEQ ID NO: 133586 - DNA, 15 bp, Homo sapiens
agcctgccagcctgg

SEQ ID NO: 133587 - DNA, 15 bp, Homo sapiens
cagcctgccagcctg

SEQ ID NO: 133588 - DNA, 15 bp, Homo sapiens
ccagcctgccagcct

SEQ ID NO: 133589 - DNA, 15 bp, Homo sapiens
tccagcctgccagcc

SEQ ID NO: 133590 - DNA, 15 bp, Homo sapiens
ctccagcctgccagc

SEQ ID NO: 133591 - DNA, 15 bp, Homo sapiens
actccagcctgccag

SEQ ID NO: 133592 - DNA, 15 bp, Homo sapiens
cactccagcctgcca

SEQ ID NO: 133593 - DNA, 15 bp, Homo sapiens
gcactccagcctgcc

SEQ ID NO: 133594 - DNA, 15 bp, Homo sapiens
tgcactccagcctgc

SEQ ID NO: 133595 - DNA, 15 bp, Homo sapiens
tgccactgcactcca

SEQ ID NO: 133596 - DNA, 15 bp, Homo sapiens
atgccactgcactcc

SEQ ID NO: 133597 - DNA, 15 bp, Homo sapiens
catgccactgcactc

SEQ ID NO: 133598 - DNA, 15 bp, Homo sapiens
tcatgccactgcact

SEQ ID NO: 133599 - DNA, 15 bp, Homo sapiens
atcatgccactgcac

SEQ ID NO: 133600 - DNA, 15 bp, Homo sapiens
gatcatgccactgca

SEQ ID NO: 133601 - DNA, 15 bp, Homo sapiens
gagatcatgccactg

SEQ ID NO: 133602 - DNA, 15 bp, Homo sapiens
cgagatcatgccact

SEQ ID NO: 133603 - DNA, 15 bp, Homo sapiens
ccgagatcatgccac

SEQ ID NO: 133604 - DNA, 15 bp, Homo sapiens
gccgagatcatgcca

SEQ ID NO: 133605 - DNA, 15 bp, Homo sapiens
agccgagatcatgcc

SEQ ID NO: 133606 - DNA, 15 bp, Homo sapiens
gagccgagatcatgc

SEQ ID NO: 133607 - DNA, 15 bp, Homo sapiens
tgagccgagatcatg

SEQ ID NO: 133608 - DNA, 15 bp, Homo sapiens
gtgagccgagatcat

SEQ ID NO: 133609 - DNA, 15 bp, Homo sapiens
agtgagccgagatca

SEQ ID NO: 133610 - DNA, 15 bp, Homo sapiens
cagtgagccgagatc

SEQ ID NO: 133611 - DNA, 15 bp, Homo sapiens
acagtgagccgagat

SEQ ID NO: 133612 - DNA, 15 bp, Homo sapiens
tacagtgagccgaga

SEQ ID NO: 133613 - DNA, 15 bp, Homo sapiens
ttacagtgagccgag

SEQ ID NO: 133614 - DNA, 15 bp, Homo sapiens
gttacagtgagccga

SEQ ID NO: 133615 - DNA, 15 bp, Homo sapiens
ggttacagtgagccg

SEQ ID NO: 133616 - DNA, 15 bp, Homo sapiens
aggttacagtgagcc

SEQ ID NO: 133617 - DNA, 15 bp, Homo sapiens
gaggttacagtgagc

SEQ ID NO: 133618 - DNA, 15 bp, Homo sapiens
agaggttacagtgag

SEQ ID NO: 133619 - DNA, 15 bp, Homo sapiens
gagaggttacagtga

SEQ ID NO: 133620 - DNA, 15 bp, Homo sapiens
ggagaggttacagtg

SEQ ID NO: 133621 - DNA, 15 bp, Homo sapiens
gggagaggttacagt

SEQ ID NO: 133622 - DNA, 15 bp, Homo sapiens
agggagaggttacag

SEQ ID NO: 133623 - DNA, 15 bp, Homo sapiens
gagggagaggttaca

SEQ ID NO: 133624 - DNA, 15 bp, Homo sapiens
ggagggagaggttac

SEQ ID NO: 133625 - DNA, 15 bp, Homo sapiens
tggagggagaggtta

SEQ ID NO: 133626 - DNA, 15 bp, Homo sapiens
ctggagggagaggtt

SEQ ID NO: 133627 - DNA, 15 bp, Homo sapiens
cctggagggagaggt

SEQ ID NO: 133628 - DNA, 15 bp, Homo sapiens
ccctggagggagagg

SEQ ID NO: 133629 - DNA, 15 bp, Homo sapiens
accctggagggagag

SEQ ID NO: 133630 - DNA, 15 bp, Homo sapiens
aaccctggagggaga

SEQ ID NO: 133631 - DNA, 15 bp, Homo sapiens
gaaccctggagggag

SEQ ID NO: 133632 - DNA, 15 bp, Homo sapiens
agaaccctggaggga

SEQ ID NO: 133633 - DNA, 15 bp, Homo sapiens
tagaaccctggaggg

SEQ ID NO: 133634 - DNA, 15 bp, Homo sapiens
ctagaaccctggagg

SEQ ID NO: 133635 - DNA, 15 bp, Homo sapiens
actagaaccctggag

SEQ ID NO: 133636 - DNA, 15 bp, Homo sapiens
cactagaaccctgga

SEQ ID NO: 133637 - DNA, 15 bp, Homo sapiens
gcactagaaccctgg

SEQ ID NO: 133638 - DNA, 15 bp, Homo sapiens
ggcactagaaccctg

SEQ ID NO: 133639 - DNA, 15 bp, Homo sapiens
aggcactagaaccct

SEQ ID NO: 133640 - DNA, 15 bp, Homo sapiens
gaggcactagaaccc

SEQ ID NO: 133641 - DNA, 15 bp, Homo sapiens
ggaggcactagaacc

SEQ ID NO: 133642 - DNA, 15 bp, Homo sapiens
aggaggcactagaac

SEQ ID NO: 133643 - DNA, 15 bp, Homo sapiens
caggaggcactagaa

SEQ ID NO: 133644 - DNA, 15 bp, Homo sapiens
tcaggaggcactaga

SEQ ID NO: 133645 - DNA, 15 bp, Homo sapiens
ctcaggaggcactag

SEQ ID NO: 133646 - DNA, 15 bp, Homo sapiens
actcaggaggcacta

SEQ ID NO: 133647 - DNA, 15 bp, Homo sapiens
tactcaggaggcact

SEQ ID NO: 133648 - DNA, 15 bp, Homo sapiens
gtactcaggaggcac

SEQ ID NO: 133649 - DNA, 15 bp, Homo sapiens
ggtactcaggaggca

SEQ ID NO: 133650 - DNA, 15 bp, Homo sapiens
aggtactcaggaggc

SEQ ID NO: 133651 - DNA, 15 bp, Homo sapiens
caggtactcaggagg

SEQ ID NO: 133652 - DNA, 15 bp, Homo sapiens
ccaggtactcaggag

SEQ ID NO: 133653 - DNA, 15 bp, Homo sapiens
gccaggtactcagga

SEQ ID NO: 133654 - DNA, 15 bp, Homo sapiens
tgccaggtactcagg

SEQ ID NO: 133655 - DNA, 15 bp, Homo sapiens
atgccaggtactcag

SEQ ID NO: 133656 - DNA, 15 bp, Homo sapiens
aatgccaggtactca

SEQ ID NO: 133657 - DNA, 15 bp, Homo sapiens
gaatgccaggtactc

SEQ ID NO: 133658 - DNA, 15 bp, Homo sapiens
ggaatgccaggtact

SEQ ID NO: 133659 - DNA, 15 bp, Homo sapiens
tggaatgccaggtac

SEQ ID NO: 133660 - DNA, 15 bp, Homo sapiens
ctggaatgccaggta

SEQ ID NO: 133661 - DNA, 15 bp, Homo sapiens
cctggaatgccaggt

SEQ ID NO: 133662 - DNA, 15 bp, Homo sapiens
acctggaatgccagg

SEQ ID NO: 133663 - DNA, 15 bp, Homo sapiens
aacctggaatgccag

SEQ ID NO: 133664 - DNA, 15 bp, Homo sapiens
gaacctggaatgcca

SEQ ID NO: 133665 - DNA, 15 bp, Homo sapiens
agaacctggaatgcc

SEQ ID NO: 133666 - DNA, 15 bp, Homo sapiens
gagaacctggaatgc

SEQ ID NO: 133667 - DNA, 15 bp, Homo sapiens
tgagaacctggaatg

SEQ ID NO: 133668 - DNA, 15 bp, Homo sapiens
atgagaacctggaat

SEQ ID NO: 133669 - DNA, 15 bp, Homo sapiens
catgagaacctggaa

SEQ ID NO: 133670 - DNA, 15 bp, Homo sapiens
gcatgagaacctgga

SEQ ID NO: 133671 - DNA, 15 bp, Homo sapiens
ggcatgagaacctgg

SEQ ID NO: 133672 - DNA, 15 bp, Homo sapiens
gggcatgagaacctg

SEQ ID NO: 133673 - DNA, 15 bp, Homo sapiens
ggggcatgagaacct

SEQ ID NO: 133674 - DNA, 15 bp, Homo sapiens
tggggcatgagaacc

SEQ ID NO: 133675 - DNA, 15 bp, Homo sapiens
atggggcatgagaac

SEQ ID NO: 133676 - DNA, 15 bp, Homo sapiens
catggggcatgagaa

SEQ ID NO: 133677 - DNA, 15 bp, Homo sapiens
gcatggggcatgaga

SEQ ID NO: 133678 - DNA, 15 bp, Homo sapiens
ggcatggggcatgag

SEQ ID NO: 133679 - DNA, 15 bp, Homo sapiens
aggcatggggcatga

SEQ ID NO: 133680 - DNA, 15 bp, Homo sapiens
caggcatggggcatg

SEQ ID NO: 133681 - DNA, 15 bp, Homo sapiens
ccaggcatggggcat

SEQ ID NO: 133682 - DNA, 15 bp, Homo sapiens
gccaggcatggggca

SEQ ID NO: 133683 - DNA, 15 bp, Homo sapiens
agccaggcatggggc

SEQ ID NO: 133684 - DNA, 15 bp, Homo sapiens
tagccaggcatgggg

SEQ ID NO: 133685 - DNA, 15 bp, Homo sapiens
ttagccaggcatggg

SEQ ID NO: 133686 - DNA, 15 bp, Homo sapiens
attagccaggcatgg

SEQ ID NO: 133687 - DNA, 15 bp, Homo sapiens
aattagccaggcatg

SEQ ID NO: 133688 - DNA, 15 bp, Homo sapiens
aaattagccaggcat

SEQ ID NO: 133689 - DNA, 15 bp, Homo sapiens
aaaattagccaggca

SEQ ID NO: 133690 - DNA, 15 bp, Homo sapiens
aaaaattagccaggc

SEQ ID NO: 133691 - DNA, 15 bp, Homo sapiens
aaaaatacaaaaatt

SEQ ID NO: 133692 - DNA, 15 bp, Homo sapiens
taaaaatacaaaaat

SEQ ID NO: 133693 - DNA, 15 bp, Homo sapiens
ttaaaaatacaaaaa

SEQ ID NO: 133694 - DNA, 15 bp, Homo sapiens
attaaaaatacaaaa

SEQ ID NO: 133695 - DNA, 15 bp, Homo sapiens
cattaaaaatacaaa

SEQ ID NO: 133696 - DNA, 15 bp, Homo sapiens
ccattaaaaatacaa

SEQ ID NO: 133697 - DNA, 15 bp, Homo sapiens
tccattaaaaataca

SEQ ID NO: 133698 - DNA, 15 bp, Homo sapiens
ctccattaaaaatac

SEQ ID NO: 133699 - DNA, 15 bp, Homo sapiens
tctccattaaaaata

SEQ ID NO: 133700 - DNA, 15 bp, Homo sapiens
gtctccattaaaaat

SEQ ID NO: 133701 - DNA, 15 bp, Homo sapiens
cgtctccattaaaaa

SEQ ID NO: 133702 - DNA, 15 bp, Homo sapiens
ccgtctccattaaaa

SEQ ID NO: 133703 - DNA, 15 bp, Homo sapiens
cccgtctccattaaa

SEQ ID NO: 133704 - DNA, 15 bp, Homo sapiens
tcccgtctccattaa

SEQ ID NO: 133705 - DNA, 15 bp, Homo sapiens
atcccgtctccatta

SEQ ID NO: 133706 - DNA, 15 bp, Homo sapiens
aatcccgtctccatt

SEQ ID NO: 133707 - DNA, 15 bp, Homo sapiens
aaatcccgtctccat

SEQ ID NO: 133708 - DNA, 15 bp, Homo sapiens
gaaatcccgtctcca

SEQ ID NO: 133709 - DNA, 15 bp, Homo sapiens
tgaaatcccgtctcc

SEQ ID NO: 133710 - DNA, 15 bp, Homo sapiens
gtgaaatcccgtctc

SEQ ID NO: 133711 - DNA, 15 bp, Homo sapiens
ggtgaaatcccgtct

SEQ ID NO: 133712 - DNA, 15 bp, Homo sapiens
tggtgaaatcccgtc

SEQ ID NO: 133713 - DNA, 15 bp, Homo sapiens
atggtgaaatcccgt

SEQ ID NO: 133714 - DNA, 15 bp, Homo sapiens
catggtgaaatcccg

SEQ ID NO: 133715 - DNA, 15 bp, Homo sapiens
acatggtgaaatccc

SEQ ID NO: 133716 - DNA, 15 bp, Homo sapiens
gacatggtgaaatcc

SEQ ID NO: 133717 - DNA, 15 bp, Homo sapiens
tgacatggtgaaatc

SEQ ID NO: 133718 - DNA, 15 bp, Homo sapiens
ctgacatggtgaaat

SEQ ID NO: 133719 - DNA, 15 bp, Homo sapiens
actgacatggtgaaa

SEQ ID NO: 133720 - DNA, 15 bp, Homo sapiens
gactgacatggtgaa

SEQ ID NO: 133721 - DNA, 15 bp, Homo sapiens
tgactgacatggtga

SEQ ID NO: 133722 - DNA, 15 bp, Homo sapiens
ctgactgacatggtg

SEQ ID NO: 133723 - DNA, 15 bp, Homo sapiens
cctgactgacatggt

SEQ ID NO: 133724 - DNA, 15 bp, Homo sapiens
gcctgactgacatgg

SEQ ID NO: 133725 - DNA, 15 bp, Homo sapiens
agcctgactgacatg

SEQ ID NO: 133726 - DNA, 15 bp, Homo sapiens
cagcctgactgacat

SEQ ID NO: 133727 - DNA, 15 bp, Homo sapiens
ccagcctgactgaca

SEQ ID NO: 133728 - DNA, 15 bp, Homo sapiens
accagcctgactgac

SEQ ID NO: 133729 - DNA, 15 bp, Homo sapiens
gaccagcctgactga

SEQ ID NO: 133730 - DNA, 15 bp, Homo sapiens
agaccagcctgactg

SEQ ID NO: 133731 - DNA, 15 bp, Homo sapiens
aagaccagcctgact

SEQ ID NO: 133732 - DNA, 15 bp, Homo sapiens
caagaccagcctgac

SEQ ID NO: 133733 - DNA, 15 bp, Homo sapiens
tcaagaccagcctga

SEQ ID NO: 133734 - DNA, 15 bp, Homo sapiens
ttgaggtcaggagtt

SEQ ID NO: 133735 - DNA, 15 bp, Homo sapiens
tttgaggtcaggagt

SEQ ID NO: 133736 - DNA, 15 bp, Homo sapiens
atttgaggtcaggag

SEQ ID NO: 133737 - DNA, 15 bp, Homo sapiens
catttgaggtcagga

SEQ ID NO: 133738 - DNA, 15 bp, Homo sapiens
tcatttgaggtcagg

SEQ ID NO: 133739 - DNA, 15 bp, Homo sapiens
atcatttgaggtcag

SEQ ID NO: 133740 - DNA, 15 bp, Homo sapiens
gatcatttgaggtca

SEQ ID NO: 133741 - DNA, 15 bp, Homo sapiens
ggatcatttgaggtc

SEQ ID NO: 133742 - DNA, 15 bp, Homo sapiens
tggatcatttgaggt

SEQ ID NO: 133743 - DNA, 15 bp, Homo sapiens
gtggatcatttgagg

SEQ ID NO: 133744 - DNA, 15 bp, Homo sapiens
ggtggatcatttgag

SEQ ID NO: 133745 - DNA, 15 bp, Homo sapiens
gggtggatcatttga

SEQ ID NO: 133746 - DNA, 15 bp, Homo sapiens
cgggtggatcatttg

SEQ ID NO: 133747 - DNA, 15 bp, Homo sapiens
gcgggtggatcattt

SEQ ID NO: 133748 - DNA, 15 bp, Homo sapiens
ggcgggtggatcatt

SEQ ID NO: 133749 - DNA, 15 bp, Homo sapiens
aggcgggtggatcat

SEQ ID NO: 133750 - DNA, 15 bp, Homo sapiens
aaggcgggtggatca

SEQ ID NO: 133751 - DNA, 15 bp, Homo sapiens
caaggcgggtggatc

SEQ ID NO: 133752 - DNA, 15 bp, Homo sapiens
ccaaggcgggtggat

SEQ ID NO: 133753 - DNA, 15 bp, Homo sapiens
gccaaggcgggtgga

SEQ ID NO: 133754 - DNA, 15 bp, Homo sapiens
ggccaaggcgggtgg

SEQ ID NO: 133755 - DNA, 15 bp, Homo sapiens
aggccaaggcgggtg

SEQ ID NO: 133756 - DNA, 15 bp, Homo sapiens
gaggccaaggcgggt

SEQ ID NO: 133757 - DNA, 15 bp, Homo sapiens
ggaggccaaggcggg

SEQ ID NO: 133758 - DNA, 15 bp, Homo sapiens
gggaggccaaggcgg

SEQ ID NO: 133759 - DNA, 15 bp, Homo sapiens
tgggaggccaaggcg

SEQ ID NO: 133760 - DNA, 15 bp, Homo sapiens
tgcctgtaatcccag

SEQ ID NO: 133761 - DNA, 15 bp, Homo sapiens
atgcctgtaatccca

SEQ ID NO: 133762 - DNA, 15 bp, Homo sapiens
catgcctgtaatccc

SEQ ID NO: 133763 - DNA, 15 bp, Homo sapiens
tcatgcctgtaatcc

SEQ ID NO: 133764 - DNA, 15 bp, Homo sapiens
ctcatgcctgtaatc

SEQ ID NO: 133765 - DNA, 15 bp, Homo sapiens
gctcatgcctgtaat

SEQ ID NO: 133766 - DNA, 15 bp, Homo sapiens
ggctcatgcctgtaa

SEQ ID NO: 133767 - DNA, 15 bp, Homo sapiens
tggctcatgcctgta

SEQ ID NO: 133768 - DNA, 15 bp, Homo sapiens
gtggctcatgcctgt

SEQ ID NO: 133769 - DNA, 15 bp, Homo sapiens
ggtggctcatgcctg

SEQ ID NO: 133770 - DNA, 15 bp, Homo sapiens
cggtggctcatgcct

SEQ ID NO: 133771 - DNA, 15 bp, Homo sapiens
gcggtggctcatgcc

SEQ ID NO: 133772 - DNA, 15 bp, Homo sapiens
cgcggtggctcatgc

SEQ ID NO: 133773 - DNA, 15 bp, Homo sapiens
gcgcggtggctcatg

SEQ ID NO: 133774 - DNA, 15 bp, Homo sapiens
ggcgcggtggctcat

SEQ ID NO: 133775 - DNA, 15 bp, Homo sapiens
gggcgcggtggctca

SEQ ID NO: 133776 - DNA, 15 bp, Homo sapiens
cgggcgcggtggctc

SEQ ID NO: 133777 - DNA, 15 bp, Homo sapiens
ccgggcgcggtggct

SEQ ID NO: 133778 - DNA, 15 bp, Homo sapiens
gccgggcgcggtggc

SEQ ID NO: 133779 - DNA, 15 bp, Homo sapiens
cgccgggcgcggtgg

SEQ ID NO: 133780 - DNA, 15 bp, Homo sapiens
tcgccgggcgcggtg

SEQ ID NO: 133781 - DNA, 15 bp, Homo sapiens
ctcgccgggcgcggt

SEQ ID NO: 133782 - DNA, 15 bp, Homo sapiens
tctcgccgggcgcgg

SEQ ID NO: 133783 - DNA, 15 bp, Homo sapiens
atctcgccgggcgcg

SEQ ID NO: 133784 - DNA, 15 bp, Homo sapiens
aatctcgccgggcgc

SEQ ID NO: 133785 - DNA, 15 bp, Homo sapiens
aaatctcgccgggcg

SEQ ID NO: 133786 - DNA, 15 bp, Homo sapiens
aaaatctcgccgggc

SEQ ID NO: 133787 - DNA, 15 bp, Homo sapiens
taaaatctcgccggg

SEQ ID NO: 133788 - DNA, 15 bp, Homo sapiens
ctaaaatctcgccgg

SEQ ID NO: 133789 - DNA, 15 bp, Homo sapiens
cctaaaatctcgccg

SEQ ID NO: 133790 - DNA, 15 bp, Homo sapiens
acctaaaatctcgcc

SEQ ID NO: 133791 - DNA, 15 bp, Homo sapiens
aacctaaaatctcgc

SEQ ID NO: 133792 - DNA, 15 bp, Homo sapiens
aaacctaaaatctcg

SEQ ID NO: 133793 - DNA, 15 bp, Homo sapiens
aaaacctaaaatctc

SEQ ID NO: 133794 - DNA, 15 bp, Homo sapiens
aaaaacctaaaatct

SEQ ID NO: 133795 - DNA, 15 bp, Homo sapiens
caaaaacctaaaatc

SEQ ID NO: 133796 - DNA, 15 bp, Homo sapiens
tcaaaaacctaaaat

SEQ ID NO: 133797 - DNA, 15 bp, Homo sapiens
gtcaaaaacctaaaa

SEQ ID NO: 133798 - DNA, 15 bp, Homo sapiens
agtcaaaaacctaaa

SEQ ID NO: 133799 - DNA, 15 bp, Homo sapiens
aagtcaaaaacctaa

SEQ ID NO: 133800 - DNA, 15 bp, Homo sapiens
caagtcaaaaaccta

SEQ ID NO: 133801 - DNA, 15 bp, Homo sapiens
tcaagtcaaaaacct

SEQ ID NO: 133802 - DNA, 15 bp, Homo sapiens
ttcaagtcaaaaacc

SEQ ID NO: 133803 - DNA, 15 bp, Homo sapiens
cttcaagtcaaaaac

SEQ ID NO: 133804 - DNA, 15 bp, Homo sapiens
acttcaagtcaaaaa

SEQ ID NO: 133805 - DNA, 15 bp, Homo sapiens
cacttcaagtcaaaa

SEQ ID NO: 133806 - DNA, 15 bp, Homo sapiens
tcacttcaagtcaaa

SEQ ID NO: 133807 - DNA, 15 bp, Homo sapiens
ttcacttcaagtcaa

SEQ ID NO: 133808 - DNA, 15 bp, Homo sapiens
cttcacttcaagtca

SEQ ID NO: 133809 - DNA, 15 bp, Homo sapiens
acttcacttcaagtc

SEQ ID NO: 133810 - DNA, 15 bp, Homo sapiens
aacttcacttcaagt

SEQ ID NO: 133811 - DNA, 15 bp, Homo sapiens
taacttcacttcaag

SEQ ID NO: 133812 - DNA, 15 bp, Homo sapiens
ttaacttcacttcaa

SEQ ID NO: 133813 - DNA, 15 bp, Homo sapiens
attaacttcacttca

SEQ ID NO: 133814 - DNA, 15 bp, Homo sapiens
aattaacttcacttc

SEQ ID NO: 133815 - DNA, 15 bp, Homo sapiens
aaattaacttcactt

SEQ ID NO: 133816 - DNA, 15 bp, Homo sapiens
gaaattaacttcact

SEQ ID NO: 133817 - DNA, 15 bp, Homo sapiens
ggaaattaacttcac

SEQ ID NO: 133818 - DNA, 15 bp, Homo sapiens
tggaaattaacttca

SEQ ID NO: 133819 - DNA, 15 bp, Homo sapiens
atggaaattaacttc

SEQ ID NO: 133820 - DNA, 15 bp, Homo sapiens
gatggaaattaactt

SEQ ID NO: 133821 - DNA, 15 bp, Homo sapiens
agatggaaattaact

SEQ ID NO: 133822 - DNA, 15 bp, Homo sapiens
cagatggaaattaac

SEQ ID NO: 133823 - DNA, 15 bp, Homo sapiens
acagatggaaattaa

SEQ ID NO: 133824 - DNA, 15 bp, Homo sapiens
aacagatggaaatta

SEQ ID NO: 133825 - DNA, 15 bp, Homo sapiens
taacagatggaaatt

SEQ ID NO: 133826 - DNA, 15 bp, Homo sapiens
ttaacagatggaaat

SEQ ID NO: 133827 - DNA, 15 bp, Homo sapiens
gttaacagatggaaa

SEQ ID NO: 133828 - DNA, 15 bp, Homo sapiens
agttaacagatggaa

SEQ ID NO: 133829 - DNA, 15 bp, Homo sapiens
cagttaacagatgga

SEQ ID NO: 133830 - DNA, 15 bp, Homo sapiens
gcagttaacagatgg

SEQ ID NO: 133831 - DNA, 15 bp, Homo sapiens
agcagttaacagatg

SEQ ID NO: 133832 - DNA, 15 bp, Homo sapiens
cagcagttaacagat

SEQ ID NO: 133833 - DNA, 15 bp, Homo sapiens
tcagcagttaacaga

SEQ ID NO: 133834 - DNA, 15 bp, Homo sapiens
ttcagcagttaacag

SEQ ID NO: 133835 - DNA, 15 bp, Homo sapiens
cttcagcagttaaca

SEQ ID NO: 133836 - DNA, 15 bp, Homo sapiens
acttcagcagttaac

SEQ ID NO: 133837 - DNA, 15 bp, Homo sapiens
gacttcagcagttaa

SEQ ID NO: 133838 - DNA, 15 bp, Homo sapiens
agacttcagcagtta

SEQ ID NO: 133839 - DNA, 15 bp, Homo sapiens
cagacttcagcagtt

SEQ ID NO: 133840 - DNA, 15 bp, Homo sapiens
ccagacttcagcagt

SEQ ID NO: 133841 - DNA, 15 bp, Homo sapiens
cccagacttcagcag

SEQ ID NO: 133842 - DNA, 15 bp, Homo sapiens
tcccagacttcagca

SEQ ID NO: 133843 - DNA, 15 bp, Homo sapiens
gtcccagacttcagc

SEQ ID NO: 133844 - DNA, 15 bp, Homo sapiens
ggtcccagacttcag

SEQ ID NO: 133845 - DNA, 15 bp, Homo sapiens
tggtcccagacttca

SEQ ID NO: 133846 - DNA, 15 bp, Homo sapiens
atggtcccagacttc

SEQ ID NO: 133847 - DNA, 15 bp, Homo sapiens
catggtcccagactt

SEQ ID NO: 133848 - DNA, 15 bp, Homo sapiens
tcatggtcccagact

SEQ ID NO: 133849 - DNA, 15 bp, Homo sapiens
atcatggtcccagac

SEQ ID NO: 133850 - DNA, 15 bp, Homo sapiens
catcatggtcccaga

SEQ ID NO: 133851 - DNA, 15 bp, Homo sapiens
acatcatggtcccag

SEQ ID NO: 133852 - DNA, 15 bp, Homo sapiens
gacatcatggtccca

SEQ ID NO: 133853 - DNA, 15 bp, Homo sapiens
agacatcatggtccc

SEQ ID NO: 133854 - DNA, 15 bp, Homo sapiens
aagacatcatggtcc

SEQ ID NO: 133855 - DNA, 15 bp, Homo sapiens
aaagacatcatggtc

SEQ ID NO: 133856 - DNA, 15 bp, Homo sapiens
aaaagacatcatggt

SEQ ID NO: 133857 - DNA, 15 bp, Homo sapiens
caaaagacatcatgg

SEQ ID NO: 133858 - DNA, 15 bp, Homo sapiens
gcaaaagacatcatg

SEQ ID NO: 133859 - DNA, 15 bp, Homo sapiens
tgcaaaagacatcat

SEQ ID NO: 133860 - DNA, 15 bp, Homo sapiens
ttgcaaaagacatca

SEQ ID NO: 133861 - DNA, 15 bp, Homo sapiens
tttgcaaaagacatc

SEQ ID NO: 133862 - DNA, 15 bp, Homo sapiens
ttttgcaaaagacat

SEQ ID NO: 133863 - DNA, 15 bp, Homo sapiens
cttttgcaaaagaca

SEQ ID NO: 133864 - DNA, 15 bp, Homo sapiens
tcttttgcaaaagac

SEQ ID NO: 133865 - DNA, 15 bp, Homo sapiens
ctcttttgcaaaaga

SEQ ID NO: 133866 - DNA, 15 bp, Homo sapiens
actcttttgcaaaag

SEQ ID NO: 133867 - DNA, 15 bp, Homo sapiens
aactcttttgcaaaa

SEQ ID NO: 133868 - DNA, 15 bp, Homo sapiens
aaactcttttgcaaa

SEQ ID NO: 133869 - DNA, 15 bp, Homo sapiens
aaaactcttttgcaa

SEQ ID NO: 133870 - DNA, 15 bp, Homo sapiens
aaaaactcttttgca

SEQ ID NO: 133871 - DNA, 15 bp, Homo sapiens
taaaaactcttttgc

SEQ ID NO: 133872 - DNA, 15 bp, Homo sapiens
ttaaaaactcttttg

SEQ ID NO: 133873 - DNA, 15 bp, Homo sapiens
cttaaaaactctttt

SEQ ID NO: 133874 - DNA, 15 bp, Homo sapiens
ccttaaaaactcttt

SEQ ID NO: 133875 - DNA, 15 bp, Homo sapiens
gccttaaaaactctt

SEQ ID NO: 133876 - DNA, 15 bp, Homo sapiens
tgccttaaaaactct

SEQ ID NO: 133877 - DNA, 15 bp, Homo sapiens
ttgccttaaaaactc

SEQ ID NO: 133878 - DNA, 15 bp, Homo sapiens
cttgccttaaaaact

SEQ ID NO: 133879 - DNA, 15 bp, Homo sapiens
tcttgccttaaaaac

SEQ ID NO: 133880 - DNA, 15 bp, Homo sapiens
gtcttgccttaaaaa

SEQ ID NO: 133881 - DNA, 15 bp, Homo sapiens
agtcttgccttaaaa

SEQ ID NO: 133882 - DNA, 15 bp, Homo sapiens
cagtcttgccttaaa

SEQ ID NO: 133883 - DNA, 15 bp, Homo sapiens
acagtcttgccttaa

SEQ ID NO: 133884 - DNA, 15 bp, Homo sapiens
gacagtcttgcctta

SEQ ID NO: 133885 - DNA, 15 bp, Homo sapiens
tgacagtcttgcctt

SEQ ID NO: 133886 - DNA, 15 bp, Homo sapiens
ctgacagtcttgcct

SEQ ID NO: 133887 - DNA, 15 bp, Homo sapiens
actgacagtcttgcc

SEQ ID NO: 133888 - DNA, 15 bp, Homo sapiens
tactgacagtcttgc

SEQ ID NO: 133889 - DNA, 15 bp, Homo sapiens
ttactgacagtcttg

SEQ ID NO: 133890 - DNA, 15 bp, Homo sapiens
attactgacagtctt

SEQ ID NO: 133891 - DNA, 15 bp, Homo sapiens
tattactgacagtct

SEQ ID NO: 133892 - DNA, 15 bp, Homo sapiens
atattactgacagtc

SEQ ID NO: 133893 - DNA, 15 bp, Homo sapiens
aatattactgacagt

SEQ ID NO: 133894 - DNA, 15 bp, Homo sapiens
gaatattactgacag

SEQ ID NO: 133895 - DNA, 15 bp, Homo sapiens
agaatattactgaca

SEQ ID NO: 133896 - DNA, 15 bp, Homo sapiens
aagaatattactgac

SEQ ID NO: 133897 - DNA, 15 bp, Homo sapiens
aaagaatattactga

SEQ ID NO: 133898 - DNA, 15 bp, Homo sapiens
gaaagaatattactg

SEQ ID NO: 133899 - DNA, 15 bp, Homo sapiens
ggaaagaatattact

SEQ ID NO: 133900 - DNA, 15 bp, Homo sapiens
tggaaagaatattac

SEQ ID NO: 133901 - DNA, 15 bp, Homo sapiens
ctggaaagaatatta

SEQ ID NO: 133902 - DNA, 15 bp, Homo sapiens
cctggaaagaatatt

SEQ ID NO: 133903 - DNA, 15 bp, Homo sapiens
ccctggaaagaatat

SEQ ID NO: 133904 - DNA, 15 bp, Homo sapiens
accctggaaagaata

SEQ ID NO: 133905 - DNA, 15 bp, Homo sapiens
gaccctggaaagaat

SEQ ID NO: 133906 - DNA, 15 bp, Homo sapiens
tgaccctggaaagaa

SEQ ID NO: 133907 - DNA, 15 bp, Homo sapiens
gtgaccctggaaaga

SEQ ID NO: 133908 - DNA, 15 bp, Homo sapiens
agtgaccctggaaag

SEQ ID NO: 133909 - DNA, 15 bp, Homo sapiens
aagtgaccctggaaa

SEQ ID NO: 133910 - DNA, 15 bp, Homo sapiens
gaagtgaccctggaa

SEQ ID NO: 133911 - DNA, 15 bp, Homo sapiens
agaagtgaccctgga

SEQ ID NO: 133912 - DNA, 15 bp, Homo sapiens
tagaagtgaccctgg

SEQ ID NO: 133913 - DNA, 15 bp, Homo sapiens
ttagaagtgaccctg

SEQ ID NO: 133914 - DNA, 15 bp, Homo sapiens
gttagaagtgaccct

SEQ ID NO: 133915 - DNA, 15 bp, Homo sapiens
agttagaagtgaccc

SEQ ID NO: 133916 - DNA, 15 bp, Homo sapiens
cagttagaagtgacc

SEQ ID NO: 133917 - DNA, 15 bp, Homo sapiens
acagttagaagtgac

SEQ ID NO: 133918 - DNA, 15 bp, Homo sapiens
tacagttagaagtga

SEQ ID NO: 133919 - DNA, 15 bp, Homo sapiens
gtacagttagaagtg

SEQ ID NO: 133920 - DNA, 15 bp, Homo sapiens
cgtacagttagaagt

SEQ ID NO: 133921 - DNA, 15 bp, Homo sapiens
tcgtacagttagaag

SEQ ID NO: 133922 - DNA, 15 bp, Homo sapiens
ttcgtacagttagaa

SEQ ID NO: 133923 - DNA, 15 bp, Homo sapiens
tttcgtacagttaga

SEQ ID NO: 133924 - DNA, 15 bp, Homo sapiens
gtttcgtacagttag

SEQ ID NO: 133925 - DNA, 15 bp, Homo sapiens
agtttcgtacagtta

SEQ ID NO: 133926 - DNA, 15 bp, Homo sapiens
tagtttcgtacagtt

SEQ ID NO: 133927 - DNA, 15 bp, Homo sapiens
atagtttcgtacagt

SEQ ID NO: 133928 - DNA, 15 bp, Homo sapiens
aatagtttcgtacag

SEQ ID NO: 133929 - DNA, 15 bp, Homo sapiens
gaatagtttcgtaca

SEQ ID NO: 133930 - DNA, 15 bp, Homo sapiens
tgaatagtttcgtac

SEQ ID NO: 133931 - DNA, 15 bp, Homo sapiens
ctgaatagtttcgta

SEQ ID NO: 133932 - DNA, 15 bp, Homo sapiens
gctgaatagtttcgt

SEQ ID NO: 133933 - DNA, 15 bp, Homo sapiens
ggctgaatagtttcg

SEQ ID NO: 133934 - DNA, 15 bp, Homo sapiens
tggctgaatagtttc

SEQ ID NO: 133935 - DNA, 15 bp, Homo sapiens
gtggctgaatagttt

SEQ ID NO: 133936 - DNA, 15 bp, Homo sapiens
cgtggctgaatagtt

SEQ ID NO: 133937 - DNA, 15 bp, Homo sapiens
tcgtggctgaatagt

SEQ ID NO: 133938 - DNA, 15 bp, Homo sapiens
atcgtggctgaatag

SEQ ID NO: 133939 - DNA, 15 bp, Homo sapiens
catcgtggctgaata

SEQ ID NO: 133940 - DNA, 15 bp, Homo sapiens
ccatcgtggctgaat

SEQ ID NO: 133941 - DNA, 15 bp, Homo sapiens
cccatcgtggctgaa

SEQ ID NO: 133942 - DNA, 15 bp, Homo sapiens
acccatcgtggctga

SEQ ID NO: 133943 - DNA, 15 bp, Homo sapiens
gacccatcgtggctg

SEQ ID NO: 133944 - DNA, 15 bp, Homo sapiens
agacccatcgtggct

SEQ ID NO: 133945 - DNA, 15 bp, Homo sapiens
cagacccatcgtggc

SEQ ID NO: 133946 - DNA, 15 bp, Homo sapiens
gcagacccatcgtgg

SEQ ID NO: 133947 - DNA, 15 bp, Homo sapiens
tgcagacccatcgtg

SEQ ID NO: 133948 - DNA, 15 bp, Homo sapiens
atgcagacccatcgt

SEQ ID NO: 133949 - DNA, 15 bp, Homo sapiens
gatgcagacccatcg

SEQ ID NO: 133950 - DNA, 15 bp, Homo sapiens
agatgcagacccatc

SEQ ID NO: 133951 - DNA, 15 bp, Homo sapiens
aagatgcagacccat

SEQ ID NO: 133952 - DNA, 15 bp, Homo sapiens
aaagatgcagaccca

SEQ ID NO: 133953 - DNA, 15 bp, Homo sapiens
caaagatgcagaccc

SEQ ID NO: 133954 - DNA, 15 bp, Homo sapiens
gcaaagatgcagacc

SEQ ID NO: 133955 - DNA, 15 bp, Homo sapiens
tgcaaagatgcagac

SEQ ID NO: 133956 - DNA, 15 bp, Homo sapiens
atgcaaagatgcaga

SEQ ID NO: 133957 - DNA, 15 bp, Homo sapiens
tatgcaaagatgcag

SEQ ID NO: 133958 - DNA, 15 bp, Homo sapiens
atatgcaaagatgca

SEQ ID NO: 133959 - DNA, 15 bp, Homo sapiens
gatatgcaaagatgc

SEQ ID NO: 133960 - DNA, 15 bp, Homo sapiens
tgatatgcaaagatg

SEQ ID NO: 133961 - DNA, 15 bp, Homo sapiens
atgatatgcaaagat

SEQ ID NO: 133962 - DNA, 15 bp, Homo sapiens
aatgatatgcaaaga

SEQ ID NO: 133963 - DNA, 15 bp, Homo sapiens
caatgatatgcaaag

SEQ ID NO: 133964 - DNA, 15 bp, Homo sapiens
acaatgatatgcaaa

SEQ ID NO: 133965 - DNA, 15 bp, Homo sapiens
tacaatgatatgcaa

SEQ ID NO: 133966 - DNA, 15 bp, Homo sapiens
ttacaatgatatgca

SEQ ID NO: 133967 - DNA, 15 bp, Homo sapiens
tttacaatgatatgc

SEQ ID NO: 133968 - DNA, 15 bp, Homo sapiens
gtttacaatgatatg

SEQ ID NO: 133969 - DNA, 15 bp, Homo sapiens
ggtttacaatgatat

SEQ ID NO: 133970 - DNA, 15 bp, Homo sapiens
tggtttacaatgata

SEQ ID NO: 133971 - DNA, 15 bp, Homo sapiens
ttggtttacaatgat

SEQ ID NO: 133972 - DNA, 15 bp, Homo sapiens
tttggtttacaatga

SEQ ID NO: 133973 - DNA, 15 bp, Homo sapiens
atttggtttacaatg

SEQ ID NO: 133974 - DNA, 15 bp, Homo sapiens
aatttggtttacaat

SEQ ID NO: 133975 - DNA, 15 bp, Homo sapiens
taatttggtttacaa

SEQ ID NO: 133976 - DNA, 15 bp, Homo sapiens
ataatttggtttaca

SEQ ID NO: 133977 - DNA, 15 bp, Homo sapiens
gataatttggtttac

SEQ ID NO: 133978 - DNA, 15 bp, Homo sapiens
agataatttggttta

SEQ ID NO: 133979 - DNA, 15 bp, Homo sapiens
tagataatttggttt

SEQ ID NO: 133980 - DNA, 15 bp, Homo sapiens
gtagataatttggtt

SEQ ID NO: 133981 - DNA, 15 bp, Homo sapiens
tgtagataatttggt

SEQ ID NO: 133982 - DNA, 15 bp, Homo sapiens
ctgtagataatttgg

SEQ ID NO: 133983 - DNA, 15 bp, Homo sapiens
cctgtagataatttg

SEQ ID NO: 133984 - DNA, 15 bp, Homo sapiens
gcctgtagataattt

SEQ ID NO: 133985 - DNA, 15 bp, Homo sapiens
agcctgtagataatt

SEQ ID NO: 133986 - DNA, 15 bp, Homo sapiens
cagcctgtagataat

SEQ ID NO: 133987 - DNA, 15 bp, Homo sapiens
acagcctgtagataa

SEQ ID NO: 133988 - DNA, 15 bp, Homo sapiens
aacagcctgtagata

SEQ ID NO: 133989 - DNA, 15 bp, Homo sapiens
caacagcctgtagat

SEQ ID NO: 133990 - DNA, 15 bp, Homo sapiens
ccaacagcctgtaga

SEQ ID NO: 133991 - DNA, 15 bp, Homo sapiens
cccaacagcctgtag

SEQ ID NO: 133992 - DNA, 15 bp, Homo sapiens
gcccaacagcctgta

SEQ ID NO: 133993 - DNA, 15 bp, Homo sapiens
agcccaacagcctgt

SEQ ID NO: 133994 - DNA, 15 bp, Homo sapiens
cagcccaacagcctg

SEQ ID NO: 133995 - DNA, 15 bp, Homo sapiens
gcagcccaacagcct

SEQ ID NO: 133996 - DNA, 15 bp, Homo sapiens
ggcagcccaacagcc

SEQ ID NO: 133997 - DNA, 15 bp, Homo sapiens
aggcagcccaacagc

SEQ ID NO: 133998 - DNA, 15 bp, Homo sapiens
caggcagcccaacag

SEQ ID NO: 133999 - DNA, 15 bp, Homo sapiens
acaggcagcccaaca

SEQ ID NO: 134000 - DNA, 15 bp, Homo sapiens
tacaggcagcccaac

SEQ ID NO: 134001 - DNA, 15 bp, Homo sapiens
atacaggcagcccaa

SEQ ID NO: 134002 - DNA, 15 bp, Homo sapiens
catacaggcagccca

SEQ ID NO: 134003 - DNA, 15 bp, Homo sapiens
acatacaggcagccc

SEQ ID NO: 134004 - DNA, 15 bp, Homo sapiens
cacatacaggcagcc

SEQ ID NO: 134005 - DNA, 15 bp, Homo sapiens
gcacatacaggcagc

SEQ ID NO: 134006 - DNA, 15 bp, Homo sapiens
tgcacatacaggcag

SEQ ID NO: 134007 - DNA, 15 bp, Homo sapiens
atgcacatacaggca

SEQ ID NO: 134008 - DNA, 15 bp, Homo sapiens
aatgcacatacaggc

SEQ ID NO: 134009 - DNA, 15 bp, Homo sapiens
aaatgcacatacagg

SEQ ID NO: 134010 - DNA, 15 bp, Homo sapiens
gaaatgcacatacag

SEQ ID NO: 134011 - DNA, 15 bp, Homo sapiens
tgaaatgcacataca

SEQ ID NO: 134012 - DNA, 15 bp, Homo sapiens
ttgaaatgcacatac

SEQ ID NO: 134013 - DNA, 15 bp, Homo sapiens
cttgaaatgcacata

SEQ ID NO: 134014 - DNA, 15 bp, Homo sapiens
acttgaaatgcacat

SEQ ID NO: 134015 - DNA, 15 bp, Homo sapiens
aacttgaaatgcaca

SEQ ID NO: 134016 - DNA, 15 bp, Homo sapiens
caacttgaaatgcac

SEQ ID NO: 134017 - DNA, 15 bp, Homo sapiens
ccaacttgaaatgca

SEQ ID NO: 134018 - DNA, 15 bp, Homo sapiens
cccaacttgaaatgc

SEQ ID NO: 134019 - DNA, 15 bp, Homo sapiens
tcccaacttgaaatg

SEQ ID NO: 134020 - DNA, 15 bp, Homo sapiens
ctcccaacttgaaat

SEQ ID NO: 134021 - DNA, 15 bp, Homo sapiens
actcccaacttgaaa

SEQ ID NO: 134022 - DNA, 15 bp, Homo sapiens
tactcccaacttgaa

SEQ ID NO: 134023 - DNA, 15 bp, Homo sapiens
atactcccaacttga

SEQ ID NO: 134024 - DNA, 15 bp, Homo sapiens
tatactcccaacttg

SEQ ID NO: 134025 - DNA, 15 bp, Homo sapiens
ttatactcccaactt

SEQ ID NO: 134026 - DNA, 15 bp, Homo sapiens
cttatactcccaact

SEQ ID NO: 134027 - DNA, 15 bp, Homo sapiens
tcttatactcccaac

SEQ ID NO: 134028 - DNA, 15 bp, Homo sapiens
atcttatactcccaa

SEQ ID NO: 134029 - DNA, 15 bp, Homo sapiens
catcttatactccca

SEQ ID NO: 134030 - DNA, 15 bp, Homo sapiens
tcatcttatactccc

SEQ ID NO: 134031 - DNA, 15 bp, Homo sapiens
ctcatcttatactcc

SEQ ID NO: 134032 - DNA, 15 bp, Homo sapiens
actcatcttatactc

SEQ ID NO: 134033 - DNA, 15 bp, Homo sapiens
tactcatcttatact

SEQ ID NO: 134034 - DNA, 15 bp, Homo sapiens
atactcatcttatac

SEQ ID NO: 134035 - DNA, 15 bp, Homo sapiens
aatactcatcttata

SEQ ID NO: 134036 - DNA, 15 bp, Homo sapiens
aaatactcatcttat

SEQ ID NO: 134037 - DNA, 15 bp, Homo sapiens
taaatactcatctta

SEQ ID NO: 134038 - DNA, 15 bp, Homo sapiens
ataaatactcatctt

SEQ ID NO: 134039 - DNA, 15 bp, Homo sapiens
aataaatactcatct

SEQ ID NO: 134040 - DNA, 15 bp, Homo sapiens
aaataaatactcatc

SEQ ID NO: 134041 - DNA, 15 bp, Homo sapiens
aaaataaatactcat

SEQ ID NO: 134042 - DNA, 15 bp, Homo sapiens
taaaataaatactca

SEQ ID NO: 134043 - DNA, 15 bp, Homo sapiens
ataaaataaatactc

SEQ ID NO: 134044 - DNA, 15 bp, Homo sapiens
aataaaataaatact

SEQ ID NO: 134045 - DNA, 15 bp, Homo sapiens
aaataaaataaatac

SEQ ID NO: 134046 - DNA, 15 bp, Homo sapiens
aaaataaaataaata

SEQ ID NO: 134047 - DNA, 15 bp, Homo sapiens
gaaaataaaataaat

SEQ ID NO: 134048 - DNA, 15 bp, Homo sapiens
agaaaataaaataaa

SEQ ID NO: 134049 - DNA, 15 bp, Homo sapiens
cagaaaataaaataa

SEQ ID NO: 134050 - DNA, 15 bp, Homo sapiens
ccagaaaataaaata

SEQ ID NO: 134051 - DNA, 15 bp, Homo sapiens
accagaaaataaaat

SEQ ID NO: 134052 - DNA, 15 bp, Homo sapiens
aaccagaaaataaaa

SEQ ID NO: 134053 - DNA, 15 bp, Homo sapiens
gaaccagaaaataaa

SEQ ID NO: 134054 - DNA, 15 bp, Homo sapiens
ggaaccagaaaataa

SEQ ID NO: 134055 - DNA, 15 bp, Homo sapiens
tggaaccagaaaata

SEQ ID NO: 134056 - DNA, 15 bp, Homo sapiens
atggaaccagaaaat

SEQ ID NO: 134057 - DNA, 15 bp, Homo sapiens
catggaaccagaaaa

SEQ ID NO: 134058 - DNA, 15 bp, Homo sapiens
acatggaaccagaaa

SEQ ID NO: 134059 - DNA, 15 bp, Homo sapiens
gacatggaaccagaa

SEQ ID NO: 134060 - DNA, 15 bp, Homo sapiens
agacatggaaccaga

SEQ ID NO: 134061 - DNA, 15 bp, Homo sapiens
aagacatggaaccag

SEQ ID NO: 134062 - DNA, 15 bp, Homo sapiens
caagacatggaacca

SEQ ID NO: 134063 - DNA, 15 bp, Homo sapiens
acaagacatggaacc

SEQ ID NO: 134064 - DNA, 15 bp, Homo sapiens
aacaagacatggaac

SEQ ID NO: 134065 - DNA, 15 bp, Homo sapiens
gaacaagacatggaa

SEQ ID NO: 134066 - DNA, 15 bp, Homo sapiens
agaacaagacatgga

SEQ ID NO: 134067 - DNA, 15 bp, Homo sapiens
aagaacaagacatgg

SEQ ID NO: 134068 - DNA, 15 bp, Homo sapiens
caagaacaagacatg

SEQ ID NO: 134069 - DNA, 15 bp, Homo sapiens
gcaagaacaagacat

SEQ ID NO: 134070 - DNA, 15 bp, Homo sapiens
agcaagaacaagaca

SEQ ID NO: 134071 - DNA, 15 bp, Homo sapiens
gagcaagaacaagac

SEQ ID NO: 134072 - DNA, 15 bp, Homo sapiens
ggagcaagaacaaga

SEQ ID NO: 134073 - DNA, 15 bp, Homo sapiens
aggagcaagaacaag

SEQ ID NO: 134074 - DNA, 15 bp, Homo sapiens
aaggagcaagaacaa

SEQ ID NO: 134075 - DNA, 15 bp, Homo sapiens
gaaggagcaagaaca

SEQ ID NO: 134076 - DNA, 15 bp, Homo sapiens
agaaggagcaagaac

SEQ ID NO: 134077 - DNA, 15 bp, Homo sapiens
aagaaggagcaagaa

SEQ ID NO: 134078 - DNA, 15 bp, Homo sapiens
gaagaaggagcaaga

SEQ ID NO: 134079 - DNA, 15 bp, Homo sapiens
ggaagaaggagcaag

SEQ ID NO: 134080 - DNA, 15 bp, Homo sapiens
gggaagaaggagcaa

SEQ ID NO: 134081 - DNA, 15 bp, Homo sapiens
agggaagaaggagca

SEQ ID NO: 134082 - DNA, 15 bp, Homo sapiens
aagggaagaaggagc

SEQ ID NO: 134083 - DNA, 15 bp, Homo sapiens
aaagggaagaaggag

SEQ ID NO: 134084 - DNA, 15 bp, Homo sapiens
aaaagggaagaagga

SEQ ID NO: 134085 - DNA, 15 bp, Homo sapiens
taaaagggaagaagg

SEQ ID NO: 134086 - DNA, 15 bp, Homo sapiens
ctaaaagggaagaag

SEQ ID NO: 134087 - DNA, 15 bp, Homo sapiens
tctaaaagggaagaa

SEQ ID NO: 134088 - DNA, 15 bp, Homo sapiens
ctctaaaagggaaga

SEQ ID NO: 134089 - DNA, 15 bp, Homo sapiens
tctctaaaagggaag

SEQ ID NO: 134090 - DNA, 15 bp, Homo sapiens
gtctctaaaagggaa

SEQ ID NO: 134091 - DNA, 15 bp, Homo sapiens
agtctctaaaaggga

SEQ ID NO: 134092 - DNA, 15 bp, Homo sapiens
cagtctctaaaaggg

SEQ ID NO: 134093 - DNA, 15 bp, Homo sapiens
ccagtctctaaaagg

SEQ ID NO: 134094 - DNA, 15 bp, Homo sapiens
tccagtctctaaaag

SEQ ID NO: 134095 - DNA, 15 bp, Homo sapiens
gtccagtctctaaaa

SEQ ID NO: 134096 - DNA, 15 bp, Homo sapiens
tgtccagtctctaaa

SEQ ID NO: 134097 - DNA, 15 bp, Homo sapiens
ctgtccagtctctaa

SEQ ID NO: 134098 - DNA, 15 bp, Homo sapiens
actgtccagtctcta

SEQ ID NO: 134099 - DNA, 15 bp, Homo sapiens
gactgtccagtctct

SEQ ID NO: 134100 - DNA, 15 bp, Homo sapiens
ggactgtccagtctc

SEQ ID NO: 134101 - DNA, 15 bp, Homo sapiens
aggactgtccagtct

SEQ ID NO: 134102 - DNA, 15 bp, Homo sapiens
gaggactgtccagtc

SEQ ID NO: 134103 - DNA, 15 bp, Homo sapiens
agaggactgtccagt

SEQ ID NO: 134104 - DNA, 15 bp, Homo sapiens
gagaggactgtccag

SEQ ID NO: 134105 - DNA, 15 bp, Homo sapiens
agagaggactgtcca

SEQ ID NO: 134106 - DNA, 15 bp, Homo sapiens
cagagaggactgtcc

SEQ ID NO: 134107 - DNA, 15 bp, Homo sapiens
acagagaggactgtc

SEQ ID NO: 134108 - DNA, 15 bp, Homo sapiens
gacagagaggactgt

SEQ ID NO: 134109 - DNA, 15 bp, Homo sapiens
agacagagaggactg

SEQ ID NO: 134110 - DNA, 15 bp, Homo sapiens
aagacagagaggact

SEQ ID NO: 134111 - DNA, 15 bp, Homo sapiens
gaagacagagaggac

SEQ ID NO: 134112 - DNA, 15 bp, Homo sapiens
tgaagacagagagga

SEQ ID NO: 134113 - DNA, 15 bp, Homo sapiens
atgaagacagagagg

SEQ ID NO: 134114 - DNA, 15 bp, Homo sapiens
gatgaagacagagag

SEQ ID NO: 134115 - DNA, 15 bp, Homo sapiens
agatgaagacagaga

SEQ ID NO: 134116 - DNA, 15 bp, Homo sapiens
aagatgaagacagag

SEQ ID NO: 134117 - DNA, 15 bp, Homo sapiens
aaagatgaagacaga

SEQ ID NO: 134118 - DNA, 15 bp, Homo sapiens
caaagatgaagacag

SEQ ID NO: 134119 - DNA, 15 bp, Homo sapiens
ccaaagatgaagaca

SEQ ID NO: 134120 - DNA, 15 bp, Homo sapiens
cccaaagatgaagac

SEQ ID NO: 134121 - DNA, 15 bp, Homo sapiens
tcccaaagatgaaga

SEQ ID NO: 134122 - DNA, 15 bp, Homo sapiens
ctcccaaagatgaag

SEQ ID NO: 134123 - DNA, 15 bp, Homo sapiens
actcccaaagatgaa

SEQ ID NO: 134124 - DNA, 15 bp, Homo sapiens
cactcccaaagatga

SEQ ID NO: 134125 - DNA, 15 bp, Homo sapiens
tcactcccaaagatg

SEQ ID NO: 134126 - DNA, 15 bp, Homo sapiens
ttcactcccaaagat

SEQ ID NO: 134127 - DNA, 15 bp, Homo sapiens
gttcactcccaaaga

SEQ ID NO: 134128 - DNA, 15 bp, Homo sapiens
agttcactcccaaag

SEQ ID NO: 134129 - DNA, 15 bp, Homo sapiens
cagttcactcccaaa

SEQ ID NO: 134130 - DNA, 15 bp, Homo sapiens
ccagttcactcccaa

SEQ ID NO: 134131 - DNA, 15 bp, Homo sapiens
cccagttcactccca

SEQ ID NO: 134132 - DNA, 15 bp, Homo sapiens
ccccagttcactccc

SEQ ID NO: 134133 - DNA, 15 bp, Homo sapiens
gccccagttcactcc

SEQ ID NO: 134134 - DNA, 15 bp, Homo sapiens
agccccagttcactc

SEQ ID NO: 134135 - DNA, 15 bp, Homo sapiens
cagccccagttcact

SEQ ID NO: 134136 - DNA, 15 bp, Homo sapiens
ccagccccagttcac

SEQ ID NO: 134137 - DNA, 15 bp, Homo sapiens
cccagccccagttca

SEQ ID NO: 134138 - DNA, 15 bp, Homo sapiens
ccccagccccagttc

SEQ ID NO: 134139 - DNA, 15 bp, Homo sapiens
cccccagccccagtt

SEQ ID NO: 134140 - DNA, 15 bp, Homo sapiens
ccccccagccccagt

SEQ ID NO: 134141 - DNA, 15 bp, Homo sapiens
accccccagccccag

SEQ ID NO: 134142 - DNA, 15 bp, Homo sapiens
caccccccagcccca

SEQ ID NO: 134143 - DNA, 15 bp, Homo sapiens
ccaccccccagcccc

SEQ ID NO: 134144 - DNA, 15 bp, Homo sapiens
cccaccccccagccc

SEQ ID NO: 134145 - DNA, 15 bp, Homo sapiens
tcccaccccccagcc

SEQ ID NO: 134146 - DNA, 15 bp, Homo sapiens
atcccaccccccagc

SEQ ID NO: 134147 - DNA, 15 bp, Homo sapiens
gatcccaccccccag

SEQ ID NO: 134148 - DNA, 15 bp, Homo sapiens
cgatcccacccccca

SEQ ID NO: 134149 - DNA, 15 bp, Homo sapiens
tcgatcccacccccc

SEQ ID NO: 134150 - DNA, 15 bp, Homo sapiens
ctcgatcccaccccc

SEQ ID NO: 134151 - DNA, 15 bp, Homo sapiens
tctcgatcccacccc

SEQ ID NO: 134152 - DNA, 15 bp, Homo sapiens
ctctcgatcccaccc

SEQ ID NO: 134153 - DNA, 15 bp, Homo sapiens
actctcgatcccacc

SEQ ID NO: 134154 - DNA, 15 bp, Homo sapiens
cactctcgatcccac

SEQ ID NO: 134155 - DNA, 15 bp, Homo sapiens
ccactctcgatccca

SEQ ID NO: 134156 - DNA, 15 bp, Homo sapiens
gccactctcgatccc

SEQ ID NO: 134157 - DNA, 15 bp, Homo sapiens
ggccactctcgatcc

SEQ ID NO: 134158 - DNA, 15 bp, Homo sapiens
aggccactctcgatc

SEQ ID NO: 134159 - DNA, 15 bp, Homo sapiens
gaggccactctcgat

SEQ ID NO: 134160 - DNA, 15 bp, Homo sapiens
agaggccactctcga

SEQ ID NO: 134161 - DNA, 15 bp, Homo sapiens
cagaggccactctcg

SEQ ID NO: 134162 - DNA, 15 bp, Homo sapiens
gcagaggccactctc

SEQ ID NO: 134163 - DNA, 15 bp, Homo sapiens
agcagaggccactct

SEQ ID NO: 134164 - DNA, 15 bp, Homo sapiens
cagcagaggccactc

SEQ ID NO: 134165 - DNA, 15 bp, Homo sapiens
ccagcagaggccact

SEQ ID NO: 134166 - DNA, 15 bp, Homo sapiens
gccagcagaggccac

SEQ ID NO: 134167 - DNA, 15 bp, Homo sapiens
agccagcagaggcca

SEQ ID NO: 134168 - DNA, 15 bp, Homo sapiens
cagccagcagaggcc

SEQ ID NO: 134169 - DNA, 15 bp, Homo sapiens
ccagccagcagaggc

SEQ ID NO: 134170 - DNA, 15 bp, Homo sapiens
cccagccagcagagg

SEQ ID NO: 134171 - DNA, 15 bp, Homo sapiens
ccccagccagcagag

SEQ ID NO: 134172 - DNA, 15 bp, Homo sapiens
cccccagccagcaga

SEQ ID NO: 134173 - DNA, 15 bp, Homo sapiens
gcccccagccagcag

SEQ ID NO: 134174 - DNA, 15 bp, Homo sapiens
agcccccagccagca

SEQ ID NO: 134175 - DNA, 15 bp, Homo sapiens
aagcccccagccagc

SEQ ID NO: 134176 - DNA, 15 bp, Homo sapiens
gaagcccccagccag

SEQ ID NO: 134177 - DNA, 15 bp, Homo sapiens
tgaagcccccagcca

SEQ ID NO: 134178 - DNA, 15 bp, Homo sapiens
ctgaagcccccagcc

SEQ ID NO: 134179 - DNA, 15 bp, Homo sapiens
cctgaagcccccagc

SEQ ID NO: 134180 - DNA, 15 bp, Homo sapiens
acctgaagcccccag

SEQ ID NO: 134181 - DNA, 15 bp, Homo sapiens
aacctgaagccccca

SEQ ID NO: 134182 - DNA, 15 bp, Homo sapiens
aaacctgaagccccc

SEQ ID NO: 134183 - DNA, 15 bp, Homo sapiens
caaacctgaagcccc

SEQ ID NO: 134184 - DNA, 15 bp, Homo sapiens
acaaacctgaagccc

SEQ ID NO: 134185 - DNA, 15 bp, Homo sapiens
tacaaacctgaagcc

SEQ ID NO: 134186 - DNA, 15 bp, Homo sapiens
ctacaaacctgaagc

SEQ ID NO: 134187 - DNA, 15 bp, Homo sapiens
tctacaaacctgaag

SEQ ID NO: 134188 - DNA, 15 bp, Homo sapiens
atctacaaacctgaa

SEQ ID NO: 134189 - DNA, 15 bp, Homo sapiens
aatctacaaacctga

SEQ ID NO: 134190 - DNA, 15 bp, Homo sapiens
taatctacaaacctg

SEQ ID NO: 134191 - DNA, 15 bp, Homo sapiens
ctaatctacaaacct

SEQ ID NO: 134192 - DNA, 15 bp, Homo sapiens
actaatctacaaacc

SEQ ID NO: 134193 - DNA, 15 bp, Homo sapiens
tactaatctacaaac

SEQ ID NO: 134194 - DNA, 15 bp, Homo sapiens
ctactaatctacaaa

SEQ ID NO: 134195 - DNA, 15 bp, Homo sapiens
tctactaatctacaa

SEQ ID NO: 134196 - DNA, 15 bp, Homo sapiens
gtctactaatctaca

SEQ ID NO: 134197 - DNA, 15 bp, Homo sapiens
tgtctactaatctac

SEQ ID NO: 134198 - DNA, 15 bp, Homo sapiens
ttgtctactaatcta

SEQ ID NO: 134199 - DNA, 15 bp, Homo sapiens
gttgtctactaatct

SEQ ID NO: 134200 - DNA, 15 bp, Homo sapiens
tgttgtctactaatc

SEQ ID NO: 134201 - DNA, 15 bp, Homo sapiens
ttgttgtctactaat

SEQ ID NO: 134202 - DNA, 15 bp, Homo sapiens
tttgttgtctactaa

SEQ ID NO: 134203 - DNA, 15 bp, Homo sapiens
atttgttgtctacta

SEQ ID NO: 134204 - DNA, 15 bp, Homo sapiens
tatttgttgtctact

SEQ ID NO: 134205 - DNA, 15 bp, Homo sapiens
ctatttgttgtctac

SEQ ID NO: 134206 - DNA, 15 bp, Homo sapiens
gctatttgttgtcta

SEQ ID NO: 134207 - DNA, 15 bp, Homo sapiens
cgctatttgttgtct

SEQ ID NO: 134208 - DNA, 15 bp, Homo sapiens
tcgctatttgttgtc

SEQ ID NO: 134209 - DNA, 15 bp, Homo sapiens
gtcgctatttgttgt

SEQ ID NO: 134210 - DNA, 15 bp, Homo sapiens
ggtcgctatttgttg

SEQ ID NO: 134211 - DNA, 15 bp, Homo sapiens
aggtcgctatttgtt

SEQ ID NO: 134212 - DNA, 15 bp, Homo sapiens
caggtcgctatttgt

SEQ ID NO: 134213 - DNA, 15 bp, Homo sapiens
tcaggtcgctatttg

SEQ ID NO: 134214 - DNA, 15 bp, Homo sapiens
atcaggtcgctattt

SEQ ID NO: 134215 - DNA, 15 bp, Homo sapiens
aatcaggtcgctatt

SEQ ID NO: 134216 - DNA, 15 bp, Homo sapiens
aaatcaggtcgctat

SEQ ID NO: 134217 - DNA, 15 bp, Homo sapiens
taaatcaggtcgcta

SEQ ID NO: 134218 - DNA, 15 bp, Homo sapiens
ttaaatcaggtcgct

SEQ ID NO: 134219 - DNA, 15 bp, Homo sapiens
gttaaatcaggtcgc

SEQ ID NO: 134220 - DNA, 15 bp, Homo sapiens
tgttaaatcaggtcg

SEQ ID NO: 134221 - DNA, 15 bp, Homo sapiens
ttgttaaatcaggtc

SEQ ID NO: 134222 - DNA, 15 bp, Homo sapiens
cttgttaaatcaggt

SEQ ID NO: 134223 - DNA, 15 bp, Homo sapiens
acttgttaaatcagg

SEQ ID NO: 134224 - DNA, 15 bp, Homo sapiens
cacttgttaaatcag

SEQ ID NO: 134225 - DNA, 15 bp, Homo sapiens
gcacttgttaaatca

SEQ ID NO: 134226 - DNA, 15 bp, Homo sapiens
tgcacttgttaaatc

SEQ ID NO: 134227 - DNA, 15 bp, Homo sapiens
ctgcacttgttaaat

SEQ ID NO: 134228 - DNA, 15 bp, Homo sapiens
tctgcacttgttaaa

SEQ ID NO: 134229 - DNA, 15 bp, Homo sapiens
ttctgcacttgttaa

SEQ ID NO: 134230 - DNA, 15 bp, Homo sapiens
cttctgcacttgtta

SEQ ID NO: 134231 - DNA, 15 bp, Homo sapiens
gcttctgcacttgtt

SEQ ID NO: 134232 - DNA, 15 bp, Homo sapiens
cgcttctgcacttgt

SEQ ID NO: 134233 - DNA, 15 bp, Homo sapiens
gcgcttctgcacttg

SEQ ID NO: 134234 - DNA, 15 bp, Homo sapiens
tgcgcttctgcactt

SEQ ID NO: 134235 - DNA, 15 bp, Homo sapiens
atgcgcttctgcact

SEQ ID NO: 134236 - DNA, 15 bp, Homo sapiens
catgcgcttctgcac

SEQ ID NO: 134237 - DNA, 15 bp, Homo sapiens
ccatgcgcttctgca

SEQ ID NO: 134238 - DNA, 15 bp, Homo sapiens
tccatgcgcttctgc

SEQ ID NO: 134239 - DNA, 15 bp, Homo sapiens
ttccatgcgcttctg

SEQ ID NO: 134240 - DNA, 15 bp, Homo sapiens
gttccatgcgcttct

SEQ ID NO: 134241 - DNA, 15 bp, Homo sapiens
agttccatgcgcttc

SEQ ID NO: 134242 - DNA, 15 bp, Homo sapiens
tagttccatgcgctt

SEQ ID NO: 134243 - DNA, 15 bp, Homo sapiens
atagttccatgcgct

SEQ ID NO: 134244 - DNA, 15 bp, Homo sapiens
tatagttccatgcgc

SEQ ID NO: 134245 - DNA, 15 bp, Homo sapiens
ttatagttccatgcg

SEQ ID NO: 134246 - DNA, 15 bp, Homo sapiens
tttatagttccatgc

SEQ ID NO: 134247 - DNA, 15 bp, Homo sapiens
atttatagttccatg

SEQ ID NO: 134248 - DNA, 15 bp, Homo sapiens
aatttatagttccat

SEQ ID NO: 134249 - DNA, 15 bp, Homo sapiens
gaatttatagttcca

SEQ ID NO: 134250 - DNA, 15 bp, Homo sapiens
tgaatttatagttcc

SEQ ID NO: 134251 - DNA, 15 bp, Homo sapiens
gtgaatttatagttc

SEQ ID NO: 134252 - DNA, 15 bp, Homo sapiens
tgtgaatttatagtt

SEQ ID NO: 134253 - DNA, 15 bp, Homo sapiens
ctgtgaatttatagt

SEQ ID NO: 134254 - DNA, 15 bp, Homo sapiens
actgtgaatttatag

SEQ ID NO: 134255 - DNA, 15 bp, Homo sapiens
cactgtgaatttata

SEQ ID NO: 134256 - DNA, 15 bp, Homo sapiens
ccactgtgaatttat

SEQ ID NO: 134257 - DNA, 15 bp, Homo sapiens
accactgtgaattta

SEQ ID NO: 134258 - DNA, 15 bp, Homo sapiens
caccactgtgaattt

SEQ ID NO: 134259 - DNA, 15 bp, Homo sapiens
ccaccactgtgaatt

SEQ ID NO: 134260 - DNA, 15 bp, Homo sapiens
tccaccactgtgaat

SEQ ID NO: 134261 - DNA, 15 bp, Homo sapiens
ttccaccactgtgaa

SEQ ID NO: 134262 - DNA, 15 bp, Homo sapiens
cttccaccactgtga

SEQ ID NO: 134263 - DNA, 15 bp, Homo sapiens
ccttccaccactgtg

SEQ ID NO: 134264 - DNA, 15 bp, Homo sapiens
tccttccaccactgt

SEQ ID NO: 134265 - DNA, 15 bp, Homo sapiens
ttccttccaccactg

SEQ ID NO: 134266 - DNA, 15 bp, Homo sapiens
cttccttccaccact

SEQ ID NO: 134267 - DNA, 15 bp, Homo sapiens
gcttccttccaccac

SEQ ID NO: 134268 - DNA, 15 bp, Homo sapiens
agcttccttccacca

SEQ ID NO: 134269 - DNA, 15 bp, Homo sapiens
aagcttccttccacc

SEQ ID NO: 134270 - DNA, 15 bp, Homo sapiens
aaagcttccttccac

SEQ ID NO: 134271 - DNA, 15 bp, Homo sapiens
caaagcttccttcca

SEQ ID NO: 134272 - DNA, 15 bp, Homo sapiens
ccaaagcttccttcc

SEQ ID NO: 134273 - DNA, 15 bp, Homo sapiens
cccaaagcttccttc

SEQ ID NO: 134274 - DNA, 15 bp, Homo sapiens
ccccaaagcttcctt

SEQ ID NO: 134275 - DNA, 15 bp, Homo sapiens
gccccaaagcttcct

SEQ ID NO: 134276 - DNA, 15 bp, Homo sapiens
ggccccaaagcttcc

SEQ ID NO: 134277 - DNA, 15 bp, Homo sapiens
aggccccaaagcttc

SEQ ID NO: 134278 - DNA, 15 bp, Homo sapiens
gaggccccaaagctt

SEQ ID NO: 134279 - DNA, 15 bp, Homo sapiens
tgaggccccaaagct

SEQ ID NO: 134280 - DNA, 15 bp, Homo sapiens
ctgaggccccaaagc

SEQ ID NO: 134281 - DNA, 15 bp, Homo sapiens
cctgaggccccaaag

SEQ ID NO: 134282 - DNA, 15 bp, Homo sapiens
gcctgaggccccaaa

SEQ ID NO: 134283 - DNA, 15 bp, Homo sapiens
ggcctgaggccccaa

SEQ ID NO: 134284 - DNA, 15 bp, Homo sapiens
gggcctgaggcccca

SEQ ID NO: 134285 - DNA, 15 bp, Homo sapiens
agggcctgaggcccc

SEQ ID NO: 134286 - DNA, 15 bp, Homo sapiens
cagggcctgaggccc

SEQ ID NO: 134287 - DNA, 15 bp, Homo sapiens
acagggcctgaggcc

SEQ ID NO: 134288 - DNA, 15 bp, Homo sapiens
cacagggcctgaggc

SEQ ID NO: 134289 - DNA, 15 bp, Homo sapiens
gcacagggcctgagg

SEQ ID NO: 134290 - DNA, 15 bp, Homo sapiens
cgcacagggcctgag

SEQ ID NO: 134291 - DNA, 15 bp, Homo sapiens
tcgcacagggcctga

SEQ ID NO: 134292 - DNA, 15 bp, Homo sapiens
atcgcacagggcctg

SEQ ID NO: 134293 - DNA, 15 bp, Homo sapiens
aatcgcacagggcct

SEQ ID NO: 134294 - DNA, 15 bp, Homo sapiens
gaatcgcacagggcc

SEQ ID NO: 134295 - DNA, 15 bp, Homo sapiens
ggaatcgcacagggc

SEQ ID NO: 134296 - DNA, 15 bp, Homo sapiens
aggaatcgcacaggg

SEQ ID NO: 134297 - DNA, 15 bp, Homo sapiens
gaggaatcgcacagg

SEQ ID NO: 134298 - DNA, 15 bp, Homo sapiens
ggaggaatcgcacag

SEQ ID NO: 134299 - DNA, 15 bp, Homo sapiens
gggaggaatcgcaca

SEQ ID NO: 134300 - DNA, 15 bp, Homo sapiens
ggggaggaatcgcac

SEQ ID NO: 134301 - DNA, 15 bp, Homo sapiens
tggggaggaatcgca

SEQ ID NO: 134302 - DNA, 15 bp, Homo sapiens
ctggggaggaatcgc

SEQ ID NO: 134303 - DNA, 15 bp, Homo sapiens
actggggaggaatcg

SEQ ID NO: 134304 - DNA, 15 bp, Homo sapiens
cactggggaggaatc

SEQ ID NO: 134305 - DNA, 15 bp, Homo sapiens
gcactggggaggaat

SEQ ID NO: 134306 - DNA, 15 bp, Homo sapiens
agcactggggaggaa

SEQ ID NO: 134307 - DNA, 15 bp, Homo sapiens
cagcactggggagga

SEQ ID NO: 134308 - DNA, 15 bp, Homo sapiens
ccagcactggggagg

SEQ ID NO: 134309 - DNA, 15 bp, Homo sapiens
tccagcactggggag

SEQ ID NO: 134310 - DNA, 15 bp, Homo sapiens
ttccagcactgggga

SEQ ID NO: 134311 - DNA, 15 bp, Homo sapiens
cttccagcactgggg

SEQ ID NO: 134312 - DNA, 15 bp, Homo sapiens
gcttccagcactggg

SEQ ID NO: 134313 - DNA, 15 bp, Homo sapiens
ggcttccagcactgg

SEQ ID NO: 134314 - DNA, 15 bp, Homo sapiens
gggcttccagcactg

SEQ ID NO: 134315 - DNA, 15 bp, Homo sapiens
tgggcttccagcact

SEQ ID NO: 134316 - DNA, 15 bp, Homo sapiens
gtgggcttccagcac

SEQ ID NO: 134317 - DNA, 15 bp, Homo sapiens
ggtgggcttccagca

SEQ ID NO: 134318 - DNA, 15 bp, Homo sapiens
gggtgggcttccagc

SEQ ID NO: 134319 - DNA, 15 bp, Homo sapiens
agggtgggcttccag

SEQ ID NO: 134320 - DNA, 15 bp, Homo sapiens
tagggtgggcttcca

SEQ ID NO: 134321 - DNA, 15 bp, Homo sapiens
gtagggtgggcttcc

SEQ ID NO: 134322 - DNA, 15 bp, Homo sapiens
ggtagggtgggcttc

SEQ ID NO: 134323 - DNA, 15 bp, Homo sapiens
tggtagggtgggctt

SEQ ID NO: 134324 - DNA, 15 bp, Homo sapiens
ctggtagggtgggct

SEQ ID NO: 134325 - DNA, 15 bp, Homo sapiens
actggtagggtgggc

SEQ ID NO: 134326 - DNA, 15 bp, Homo sapiens
cactggtagggtggg

SEQ ID NO: 134327 - DNA, 15 bp, Homo sapiens
acactggtagggtgg

SEQ ID NO: 134328 - DNA, 15 bp, Homo sapiens
cacactggtagggtg

SEQ ID NO: 134329 - DNA, 15 bp, Homo sapiens
acacactggtagggt

SEQ ID NO: 134330 - DNA, 15 bp, Homo sapiens
aacacactggtaggg

SEQ ID NO: 134331 - DNA, 15 bp, Homo sapiens
aaacacactggtagg

SEQ ID NO: 134332 - DNA, 15 bp, Homo sapiens
taaacacactggtag

SEQ ID NO: 134333 - DNA, 15 bp, Homo sapiens
ataaacacactggta

SEQ ID NO: 134334 - DNA, 15 bp, Homo sapiens
cataaacacactggt

SEQ ID NO: 134335 - DNA, 15 bp, Homo sapiens
tcataaacacactgg

SEQ ID NO: 134336 - DNA, 15 bp, Homo sapiens
atcataaacacactg

SEQ ID NO: 134337 - DNA, 15 bp, Homo sapiens
gatcataaacacact

SEQ ID NO: 134338 - DNA, 15 bp, Homo sapiens
agatcataaacacac

SEQ ID NO: 134339 - DNA, 15 bp, Homo sapiens
gagatcataaacaca

SEQ ID NO: 134340 - DNA, 15 bp, Homo sapiens
ggagatcataaacac

SEQ ID NO: 134341 - DNA, 15 bp, Homo sapiens
aggagatcataaaca

SEQ ID NO: 134342 - DNA, 15 bp, Homo sapiens
caggagatcataaac

SEQ ID NO: 134343 - DNA, 15 bp, Homo sapiens
tcaggagatcataaa

SEQ ID NO: 134344 - DNA, 15 bp, Homo sapiens
ctcaggagatcataa

SEQ ID NO: 134345 - DNA, 15 bp, Homo sapiens
cctcaggagatcata

SEQ ID NO: 134346 - DNA, 15 bp, Homo sapiens
gcctcaggagatcat

SEQ ID NO: 134347 - DNA, 15 bp, Homo sapiens
ggcctcaggagatca

SEQ ID NO: 134348 - DNA, 15 bp, Homo sapiens
tggcctcaggagatc

SEQ ID NO: 134349 - DNA, 15 bp, Homo sapiens
gtggcctcaggagat

SEQ ID NO: 134350 - DNA, 15 bp, Homo sapiens
agtggcctcaggaga

SEQ ID NO: 134351 - DNA, 15 bp, Homo sapiens
tagtggcctcaggag

SEQ ID NO: 134352 - DNA, 15 bp, Homo sapiens
atagtggcctcagga

SEQ ID NO: 134353 - DNA, 15 bp, Homo sapiens
aatagtggcctcagg

SEQ ID NO: 134354 - DNA, 15 bp, Homo sapiens
gaatagtggcctcag

SEQ ID NO: 134355 - DNA, 15 bp, Homo sapiens
ggaatagtggcctca

SEQ ID NO: 134356 - DNA, 15 bp, Homo sapiens
tggaatagtggcctc

SEQ ID NO: 134357 - DNA, 15 bp, Homo sapiens
gtggaatagtggcct

SEQ ID NO: 134358 - DNA, 15 bp, Homo sapiens
agtggaatagtggcc

SEQ ID NO: 134359 - DNA, 15 bp, Homo sapiens
cagtggaatagtggc

SEQ ID NO: 134360 - DNA, 15 bp, Homo sapiens
ccagtggaatagtgg

SEQ ID NO: 134361 - DNA, 15 bp, Homo sapiens
cccagtggaatagtg

SEQ ID NO: 134362 - DNA, 15 bp, Homo sapiens
ccccagtggaatagt

SEQ ID NO: 134363 - DNA, 15 bp, Homo sapiens
tccccagtggaatag

SEQ ID NO: 134364 - DNA, 15 bp, Homo sapiens
gtccccagtggaata

SEQ ID NO: 134365 - DNA, 15 bp, Homo sapiens
tgtccccagtggaat

SEQ ID NO: 134366 - DNA, 15 bp, Homo sapiens
ttgtccccagtggaa

SEQ ID NO: 134367 - DNA, 15 bp, Homo sapiens
tttgtccccagtgga

SEQ ID NO: 134368 - DNA, 15 bp, Homo sapiens
gtttgtccccagtgg

SEQ ID NO: 134369 - DNA, 15 bp, Homo sapiens
ggtttgtccccagtg

SEQ ID NO: 134370 - DNA, 15 bp, Homo sapiens
gggtttgtccccagt

SEQ ID NO: 134371 - DNA, 15 bp, Homo sapiens
tgggtttgtccccag

SEQ ID NO: 134372 - DNA, 15 bp, Homo sapiens
gtgggtttgtcccca

SEQ ID NO: 134373 - DNA, 15 bp, Homo sapiens
ggtgggtttgtcccc

SEQ ID NO: 134374 - DNA, 15 bp, Homo sapiens
aggtgggtttgtccc

SEQ ID NO: 134375 - DNA, 15 bp, Homo sapiens
aaggtgggtttgtcc

SEQ ID NO: 134376 - DNA, 15 bp, Homo sapiens
taaggtgggtttgtc

SEQ ID NO: 134377 - DNA, 15 bp, Homo sapiens
gtaaggtgggtttgt

SEQ ID NO: 134378 - DNA, 15 bp, Homo sapiens
cgtaaggtgggtttg

SEQ ID NO: 134379 - DNA, 15 bp, Homo sapiens
tcgtaaggtgggttt

SEQ ID NO: 134380 - DNA, 15 bp, Homo sapiens
atcgtaaggtgggtt

SEQ ID NO: 134381 - DNA, 15 bp, Homo sapiens
catcgtaaggtgggt

SEQ ID NO: 134382 - DNA, 15 bp, Homo sapiens
tcatcgtaaggtggg

SEQ ID NO: 134383 - DNA, 15 bp, Homo sapiens
ttcatcgtaaggtgg

SEQ ID NO: 134384 - DNA, 15 bp, Homo sapiens
gttcatcgtaaggtg

SEQ ID NO: 134385 - DNA, 15 bp, Homo sapiens
agttcatcgtaaggt

SEQ ID NO: 134386 - DNA, 15 bp, Homo sapiens
aagttcatcgtaagg

SEQ ID NO: 134387 - DNA, 15 bp, Homo sapiens
caagttcatcgtaag

SEQ ID NO: 134388 - DNA, 15 bp, Homo sapiens
ccaagttcatcgtaa

SEQ ID NO: 134389 - DNA, 15 bp, Homo sapiens
tccaagttcatcgta

SEQ ID NO: 134390 - DNA, 15 bp, Homo sapiens
ttccaagttcatcgt

SEQ ID NO: 134391 - DNA, 15 bp, Homo sapiens
tttccaagttcatcg

SEQ ID NO: 134392 - DNA, 15 bp, Homo sapiens
ctttccaagttcatc

SEQ ID NO: 134393 - DNA, 15 bp, Homo sapiens
tctttccaagttcat

SEQ ID NO: 134394 - DNA, 15 bp, Homo sapiens
atctttccaagttca

SEQ ID NO: 134395 - DNA, 15 bp, Homo sapiens
gatctttccaagttc

SEQ ID NO: 134396 - DNA, 15 bp, Homo sapiens
agatctttccaagtt

SEQ ID NO: 134397 - DNA, 15 bp, Homo sapiens
aagatctttccaagt

SEQ ID NO: 134398 - DNA, 15 bp, Homo sapiens
aaagatctttccaag

SEQ ID NO: 134399 - DNA, 15 bp, Homo sapiens
gaaagatctttccaa

SEQ ID NO: 134400 - DNA, 15 bp, Homo sapiens
agaaagatctttcca

SEQ ID NO: 134401 - DNA, 15 bp, Homo sapiens
cagaaagatctttcc

SEQ ID NO: 134402 - DNA, 15 bp, Homo sapiens
acagaaagatctttc

SEQ ID NO: 134403 - DNA, 15 bp, Homo sapiens
aacagaaagatcttt

SEQ ID NO: 134404 - DNA, 15 bp, Homo sapiens
aaacagaaagatctt

SEQ ID NO: 134405 - DNA, 15 bp, Homo sapiens
caaacagaaagatct

SEQ ID NO: 134406 - DNA, 15 bp, Homo sapiens
gcaaacagaaagatc

SEQ ID NO: 134407 - DNA, 15 bp, Homo sapiens
tgcaaacagaaagat

SEQ ID NO: 134408 - DNA, 15 bp, Homo sapiens
gtgcaaacagaaaga

SEQ ID NO: 134409 - DNA, 15 bp, Homo sapiens
agtgcaaacagaaag

SEQ ID NO: 134410 - DNA, 15 bp, Homo sapiens
tagtgcaaacagaaa

SEQ ID NO: 134411 - DNA, 15 bp, Homo sapiens
ctagtgcaaacagaa

SEQ ID NO: 134412 - DNA, 15 bp, Homo sapiens
actagtgcaaacaga

SEQ ID NO: 134413 - DNA, 15 bp, Homo sapiens
gactagtgcaaacag

SEQ ID NO: 134414 - DNA, 15 bp, Homo sapiens
ggactagtgcaaaca

SEQ ID NO: 134415 - DNA, 15 bp, Homo sapiens
aggactagtgcaaac

SEQ ID NO: 134416 - DNA, 15 bp, Homo sapiens
aaggactagtgcaaa

SEQ ID NO: 134417 - DNA, 15 bp, Homo sapiens
caaggactagtgcaa

SEQ ID NO: 134418 - DNA, 15 bp, Homo sapiens
acaaggactagtgca

SEQ ID NO: 134419 - DNA, 15 bp, Homo sapiens
aacaaggactagtgc

SEQ ID NO: 134420 - DNA, 15 bp, Homo sapiens
aaacaaggactagtg

SEQ ID NO: 134421 - DNA, 15 bp, Homo sapiens
caaacaaggactagt

SEQ ID NO: 134422 - DNA, 15 bp, Homo sapiens
gcaaacaaggactag

SEQ ID NO: 134423 - DNA, 15 bp, Homo sapiens
agcaaacaaggacta

SEQ ID NO: 134424 - DNA, 15 bp, Homo sapiens
aagcaaacaaggact

SEQ ID NO: 134425 - DNA, 15 bp, Homo sapiens
gaagcaaacaaggac

SEQ ID NO: 134426 - DNA, 15 bp, Homo sapiens
agaagcaaacaagga

SEQ ID NO: 134427 - DNA, 15 bp, Homo sapiens
tagaagcaaacaagg

SEQ ID NO: 134428 - DNA, 15 bp, Homo sapiens
ctagaagcaaacaag

SEQ ID NO: 134429 - DNA, 15 bp, Homo sapiens
actagaagcaaacaa

SEQ ID NO: 134430 - DNA, 15 bp, Homo sapiens
gactagaagcaaaca

SEQ ID NO: 134431 - DNA, 15 bp, Homo sapiens
agactagaagcaaac

SEQ ID NO: 134432 - DNA, 15 bp, Homo sapiens
cagactagaagcaaa

SEQ ID NO: 134433 - DNA, 15 bp, Homo sapiens
acagactagaagcaa

SEQ ID NO: 134434 - DNA, 15 bp, Homo sapiens
cacagactagaagca

SEQ ID NO: 134435 - DNA, 15 bp, Homo sapiens
acacagactagaagc

SEQ ID NO: 134436 - DNA, 15 bp, Homo sapiens
gacacagactagaag

SEQ ID NO: 134437 - DNA, 15 bp, Homo sapiens
agacacagactagaa

SEQ ID NO: 134438 - DNA, 15 bp, Homo sapiens
cagacacagactaga

SEQ ID NO: 134439 - DNA, 15 bp, Homo sapiens
ccagacacagactag

SEQ ID NO: 134440 - DNA, 15 bp, Homo sapiens
cccagacacagacta

SEQ ID NO: 134441 - DNA, 15 bp, Homo sapiens
tcccagacacagact

SEQ ID NO: 134442 - DNA, 15 bp, Homo sapiens
gtcccagacacagac

SEQ ID NO: 134443 - DNA, 15 bp, Homo sapiens
tgtcccagacacaga

SEQ ID NO: 134444 - DNA, 15 bp, Homo sapiens
atgtcccagacacag

SEQ ID NO: 134445 - DNA, 15 bp, Homo sapiens
catgtcccagacaca

SEQ ID NO: 134446 - DNA, 15 bp, Homo sapiens
gcatgtcccagacac

SEQ ID NO: 134447 - DNA, 15 bp, Homo sapiens
tgcatgtcccagaca

SEQ ID NO: 134448 - DNA, 15 bp, Homo sapiens
ctgcatgtcccagac

SEQ ID NO: 134449 - DNA, 15 bp, Homo sapiens
tctgcatgtcccaga

SEQ ID NO: 134450 - DNA, 15 bp, Homo sapiens
ttctgcatgtcccag

SEQ ID NO: 134451 - DNA, 15 bp, Homo sapiens
gttctgcatgtccca

SEQ ID NO: 134452 - DNA, 15 bp, Homo sapiens
tgttctgcatgtccc

SEQ ID NO: 134453 - DNA, 15 bp, Homo sapiens
ttgttctgcatgtcc

SEQ ID NO: 134454 - DNA, 15 bp, Homo sapiens
cttgttctgcatgtc

SEQ ID NO: 134455 - DNA, 15 bp, Homo sapiens
gcttgttctgcatgt

SEQ ID NO: 134456 - DNA, 15 bp, Homo sapiens
ggcttgttctgcatg

SEQ ID NO: 134457 - DNA, 15 bp, Homo sapiens
aggcttgttctgcat

SEQ ID NO: 134458 - DNA, 15 bp, Homo sapiens
aaggcttgttctgca

SEQ ID NO: 134459 - DNA, 15 bp, Homo sapiens
caaggcttgttctgc

SEQ ID NO: 134460 - DNA, 15 bp, Homo sapiens
ccaaggcttgttctg

SEQ ID NO: 134461 - DNA, 15 bp, Homo sapiens
accaaggcttgttct

SEQ ID NO: 134462 - DNA, 15 bp, Homo sapiens
caccaaggcttgttc

SEQ ID NO: 134463 - DNA, 15 bp, Homo sapiens
ccaccaaggcttgtt

SEQ ID NO: 134464 - DNA, 15 bp, Homo sapiens
tccaccaaggcttgt

SEQ ID NO: 134465 - DNA, 15 bp, Homo sapiens
atccaccaaggcttg

SEQ ID NO: 134466 - DNA, 15 bp, Homo sapiens
catccaccaaggctt

SEQ ID NO: 134467 - DNA, 15 bp, Homo sapiens
ccatccaccaaggct

SEQ ID NO: 134468 - DNA, 15 bp, Homo sapiens
accatccaccaaggc

SEQ ID NO: 134469 - DNA, 15 bp, Homo sapiens
taccatccaccaagg

SEQ ID NO: 134470 - DNA, 15 bp, Homo sapiens
ctaccatccaccaag

SEQ ID NO: 134471 - DNA, 15 bp, Homo sapiens
tctaccatccaccaa

SEQ ID NO: 134472 - DNA, 15 bp, Homo sapiens
atctaccatccacca

SEQ ID NO: 134473 - DNA, 15 bp, Homo sapiens
aatctaccatccacc

SEQ ID NO: 134474 - DNA, 15 bp, Homo sapiens
aaatctaccatccac

SEQ ID NO: 134475 - DNA, 15 bp, Homo sapiens
gaaatctaccatcca

SEQ ID NO: 134476 - DNA, 15 bp, Homo sapiens
tgaaatctaccatcc

SEQ ID NO: 134477 - DNA, 15 bp, Homo sapiens
ttgaaatctaccatc

SEQ ID NO: 134478 - DNA, 15 bp, Homo sapiens
tttgaaatctaccat

SEQ ID NO: 134479 - DNA, 15 bp, Homo sapiens
atttgaaatctacca

SEQ ID NO: 134480 - DNA, 15 bp, Homo sapiens
aatttgaaatctacc

SEQ ID NO: 134481 - DNA, 15 bp, Homo sapiens
gaatttgaaatctac

SEQ ID NO: 134482 - DNA, 15 bp, Homo sapiens
agaatttgaaatcta

SEQ ID NO: 134483 - DNA, 15 bp, Homo sapiens
tagaatttgaaatct

SEQ ID NO: 134484 - DNA, 15 bp, Homo sapiens
ttagaatttgaaatc

SEQ ID NO: 134485 - DNA, 15 bp, Homo sapiens
tttagaatttgaaat

SEQ ID NO: 134486 - DNA, 15 bp, Homo sapiens
atttagaatttgaaa

SEQ ID NO: 134487 - DNA, 15 bp, Homo sapiens
gatttagaatttgaa

SEQ ID NO: 134488 - DNA, 15 bp, Homo sapiens
ggatttagaatttga

SEQ ID NO: 134489 - DNA, 15 bp, Homo sapiens
tggatttagaatttg

SEQ ID NO: 134490 - DNA, 15 bp, Homo sapiens
ctggatttagaattt

SEQ ID NO: 134491 - DNA, 15 bp, Homo sapiens
actggatttagaatt

SEQ ID NO: 134492 - DNA, 15 bp, Homo sapiens
aactggatttagaat

SEQ ID NO: 134493 - DNA, 15 bp, Homo sapiens
gaactggatttagaa

SEQ ID NO: 134494 - DNA, 15 bp, Homo sapiens
tgaactggatttaga

SEQ ID NO: 134495 - DNA, 15 bp, Homo sapiens
ctgaactggatttag

SEQ ID NO: 134496 - DNA, 15 bp, Homo sapiens
cctgaactggattta

SEQ ID NO: 134497 - DNA, 15 bp, Homo sapiens
tcctgaactggattt

SEQ ID NO: 134498 - DNA, 15 bp, Homo sapiens
ttcctgaactggatt

SEQ ID NO: 134499 - DNA, 15 bp, Homo sapiens
cttcctgaactggat

SEQ ID NO: 134500 - DNA, 15 bp, Homo sapiens
ccttcctgaactgga

SEQ ID NO: 134501 - DNA, 15 bp, Homo sapiens
cccttcctgaactgg

SEQ ID NO: 134502 - DNA, 15 bp, Homo sapiens
tcccttcctgaactg

SEQ ID NO: 134503 - DNA, 15 bp, Homo sapiens
gtcccttcctgaact

SEQ ID NO: 134504 - DNA, 15 bp, Homo sapiens
tgtcccttcctgaac

SEQ ID NO: 134505 - DNA, 15 bp, Homo sapiens
ctgtcccttcctgaa

SEQ ID NO: 134506 - DNA, 15 bp, Homo sapiens
tctgtcccttcctga

SEQ ID NO: 134507 - DNA, 15 bp, Homo sapiens
ctctgtcccttcctg

SEQ ID NO: 134508 - DNA, 15 bp, Homo sapiens
gctctgtcccttcct

SEQ ID NO: 134509 - DNA, 15 bp, Homo sapiens
agctctgtcccttcc

SEQ ID NO: 134510 - DNA, 15 bp, Homo sapiens
cagctctgtcccttc

SEQ ID NO: 134511 - DNA, 15 bp, Homo sapiens
ccagctctgtccctt

SEQ ID NO: 134512 - DNA, 15 bp, Homo sapiens
cccagctctgtccct

SEQ ID NO: 134513 - DNA, 15 bp, Homo sapiens
acccagctctgtccc

SEQ ID NO: 134514 - DNA, 15 bp, Homo sapiens
cacccagctctgtcc

SEQ ID NO: 134515 - DNA, 15 bp, Homo sapiens
ccacccagctctgtc

SEQ ID NO: 134516 - DNA, 15 bp, Homo sapiens
accacccagctctgt

SEQ ID NO: 134517 - DNA, 15 bp, Homo sapiens
caccacccagctctg

SEQ ID NO: 134518 - DNA, 15 bp, Homo sapiens
acaccacccagctct

SEQ ID NO: 134519 - DNA, 15 bp, Homo sapiens
aacaccacccagctc

SEQ ID NO: 134520 - DNA, 15 bp, Homo sapiens
aaacaccacccagct

SEQ ID NO: 134521 - DNA, 15 bp, Homo sapiens
gaaacaccacccagc

SEQ ID NO: 134522 - DNA, 15 bp, Homo sapiens
ggaaacaccacccag

SEQ ID NO: 134523 - DNA, 15 bp, Homo sapiens
tggaaacaccaccca

SEQ ID NO: 134524 - DNA, 15 bp, Homo sapiens
atggaaacaccaccc

SEQ ID NO: 134525 - DNA, 15 bp, Homo sapiens
catggaaacaccacc

SEQ ID NO: 134526 - DNA, 15 bp, Homo sapiens
acatggaaacaccac

SEQ ID NO: 134527 - DNA, 15 bp, Homo sapiens
gacatggaaacacca

SEQ ID NO: 134528 - DNA, 15 bp, Homo sapiens
ggacatggaaacacc

SEQ ID NO: 134529 - DNA, 15 bp, Homo sapiens
cggacatggaaacac

SEQ ID NO: 134530 - DNA, 15 bp, Homo sapiens
gcggacatggaaaca

SEQ ID NO: 134531 - DNA, 15 bp, Homo sapiens
tgcggacatggaaac

SEQ ID NO: 134532 - DNA, 15 bp, Homo sapiens
ctgcggacatggaaa

SEQ ID NO: 134533 - DNA, 15 bp, Homo sapiens
actgcggacatggaa

SEQ ID NO: 134534 - DNA, 15 bp, Homo sapiens
cactgcggacatgga

SEQ ID NO: 134535 - DNA, 15 bp, Homo sapiens
acactgcggacatgg

SEQ ID NO: 134536 - DNA, 15 bp, Homo sapiens
aacactgcggacatg

SEQ ID NO: 134537 - DNA, 15 bp, Homo sapiens
caacactgcggacat

SEQ ID NO: 134538 - DNA, 15 bp, Homo sapiens
tcaacactgcggaca

SEQ ID NO: 134539 - DNA, 15 bp, Homo sapiens
ctcaacactgcggac

SEQ ID NO: 134540 - DNA, 15 bp, Homo sapiens
tctcaacactgcgga

SEQ ID NO: 134541 - DNA, 15 bp, Homo sapiens
gtctcaacactgcgg

SEQ ID NO: 134542 - DNA, 15 bp, Homo sapiens
cgtctcaacactgcg

SEQ ID NO: 134543 - DNA, 15 bp, Homo sapiens
acgtctcaacactgc

SEQ ID NO: 134544 - DNA, 15 bp, Homo sapiens
tacgtctcaacactg

SEQ ID NO: 134545 - DNA, 15 bp, Homo sapiens
ctacgtctcaacact

SEQ ID NO: 134546 - DNA, 15 bp, Homo sapiens
tctacgtctcaacac

SEQ ID NO: 134547 - DNA, 15 bp, Homo sapiens
ttctacgtctcaaca

SEQ ID NO: 134548 - DNA, 15 bp, Homo sapiens
attctacgtctcaac

SEQ ID NO: 134549 - DNA, 15 bp, Homo sapiens
cattctacgtctcaa

SEQ ID NO: 134550 - DNA, 15 bp, Homo sapiens
tcattctacgtctca

SEQ ID NO: 134551 - DNA, 15 bp, Homo sapiens
gtcattctacgtctc

SEQ ID NO: 134552 - DNA, 15 bp, Homo sapiens
ggtcattctacgtct

SEQ ID NO: 134553 - DNA, 15 bp, Homo sapiens
aggtcattctacgtc

SEQ ID NO: 134554 - DNA, 15 bp, Homo sapiens
aaggtcattctacgt

SEQ ID NO: 134555 - DNA, 15 bp, Homo sapiens
taaggtcattctacg

SEQ ID NO: 134556 - DNA, 15 bp, Homo sapiens
ttaaggtcattctac

SEQ ID NO: 134557 - DNA, 15 bp, Homo sapiens
gttaaggtcattcta

SEQ ID NO: 134558 - DNA, 15 bp, Homo sapiens
ggttaaggtcattct

SEQ ID NO: 134559 - DNA, 15 bp, Homo sapiens
aggttaaggtcattc

SEQ ID NO: 134560 - DNA, 15 bp, Homo sapiens
aaggttaaggtcatt

SEQ ID NO: 134561 - DNA, 15 bp, Homo sapiens
taaggttaaggtcat

SEQ ID NO: 134562 - DNA, 15 bp, Homo sapiens
ttaaggttaaggtca

SEQ ID NO: 134563 - DNA, 15 bp, Homo sapiens
gttaaggttaaggtc

SEQ ID NO: 134564 - DNA, 15 bp, Homo sapiens
agttaaggttaaggt

SEQ ID NO: 134565 - DNA, 15 bp, Homo sapiens
aagttaaggttaagg

SEQ ID NO: 134566 - DNA, 15 bp, Homo sapiens
caagttaaggttaag

SEQ ID NO: 134567 - DNA, 15 bp, Homo sapiens
acaagttaaggttaa

SEQ ID NO: 134568 - DNA, 15 bp, Homo sapiens
cacaagttaaggtta

SEQ ID NO: 134569 - DNA, 15 bp, Homo sapiens
acacaagttaaggtt

SEQ ID NO: 134570 - DNA, 15 bp, Homo sapiens
aacacaagttaaggt

SEQ ID NO: 134571 - DNA, 15 bp, Homo sapiens
aaacacaagttaagg

SEQ ID NO: 134572 - DNA, 15 bp, Homo sapiens
gaaacacaagttaag

SEQ ID NO: 134573 - DNA, 15 bp, Homo sapiens
ggaaacacaagttaa

SEQ ID NO: 134574 - DNA, 15 bp, Homo sapiens
aggaaacacaagtta

SEQ ID NO: 134575 - DNA, 15 bp, Homo sapiens
gaggaaacacaagtt

SEQ ID NO: 134576 - DNA, 15 bp, Homo sapiens
ggaggaaacacaagt

SEQ ID NO: 134577 - DNA, 15 bp, Homo sapiens
tggaggaaacacaag

SEQ ID NO: 134578 - DNA, 15 bp, Homo sapiens
atggaggaaacacaa

SEQ ID NO: 134579 - DNA, 15 bp, Homo sapiens
catggaggaaacaca

SEQ ID NO: 134580 - DNA, 15 bp, Homo sapiens
tcatggaggaaacac

SEQ ID NO: 134581 - DNA, 15 bp, Homo sapiens
ttcatggaggaaaca

SEQ ID NO: 134582 - DNA, 15 bp, Homo sapiens
cttcatggaggaaac

SEQ ID NO: 134583 - DNA, 15 bp, Homo sapiens
ccttcatggaggaaa

SEQ ID NO: 134584 - DNA, 15 bp, Homo sapiens
gccttcatggaggaa

SEQ ID NO: 134585 - DNA, 15 bp, Homo sapiens
ggccttcatggagga

SEQ ID NO: 134586 - DNA, 15 bp, Homo sapiens
tggccttcatggagg

SEQ ID NO: 134587 - DNA, 15 bp, Homo sapiens
gtggccttcatggag

SEQ ID NO: 134588 - DNA, 15 bp, Homo sapiens
agtggccttcatgga

SEQ ID NO: 134589 - DNA, 15 bp, Homo sapiens
aagtggccttcatgg

SEQ ID NO: 134590 - DNA, 15 bp, Homo sapiens
aaagtggccttcatg

SEQ ID NO: 134591 - DNA, 15 bp, Homo sapiens
taaagtggccttcat

SEQ ID NO: 134592 - DNA, 15 bp, Homo sapiens
ataaagtggccttca

SEQ ID NO: 134593 - DNA, 15 bp, Homo sapiens
aataaagtggccttc

SEQ ID NO: 134594 - DNA, 15 bp, Homo sapiens
aaataaagtggcctt

SEQ ID NO: 134595 - DNA, 15 bp, Homo sapiens
aaaataaagtggcct

SEQ ID NO: 134596 - DNA, 15 bp, Homo sapiens
aaaaataaagtggcc

SEQ ID NO: 134597 - DNA, 15 bp, Homo sapiens
gaaaaataaagtggc

SEQ ID NO: 134598 - DNA, 15 bp, Homo sapiens
agaaaaataaagtgg

SEQ ID NO: 134599 - DNA, 15 bp, Homo sapiens
gagaaaaataaagtg

SEQ ID NO: 134600 - DNA, 15 bp, Homo sapiens
ggagaaaaataaagt

SEQ ID NO: 134601 - DNA, 15 bp, Homo sapiens
gggagaaaaataaag

SEQ ID NO: 134602 - DNA, 15 bp, Homo sapiens
agggagaaaaataaa

SEQ ID NO: 134603 - DNA, 15 bp, Homo sapiens
cagggagaaaaataa

SEQ ID NO: 134604 - DNA, 15 bp, Homo sapiens
tcagggagaaaaata

SEQ ID NO: 134605 - DNA, 15 bp, Homo sapiens
atcagggagaaaaat

SEQ ID NO: 134606 - DNA, 15 bp, Homo sapiens
catcagggagaaaaa

SEQ ID NO: 134607 - DNA, 15 bp, Homo sapiens
ccatcagggagaaaa

SEQ ID NO: 134608 - DNA, 15 bp, Homo sapiens
gccatcagggagaaa

SEQ ID NO: 134609 - DNA, 15 bp, Homo sapiens
agccatcagggagaa

SEQ ID NO: 134610 - DNA, 15 bp, Homo sapiens
aagccatcagggaga

SEQ ID NO: 134611 - DNA, 15 bp, Homo sapiens
gaagccatcagggag

SEQ ID NO: 134612 - DNA, 15 bp, Homo sapiens
ggaagccatcaggga

SEQ ID NO: 134613 - DNA, 15 bp, Homo sapiens
gggaagccatcaggg

SEQ ID NO: 134614 - DNA, 15 bp, Homo sapiens
agggaagccatcagg

SEQ ID NO: 134615 - DNA, 15 bp, Homo sapiens
cagggaagccatcag

SEQ ID NO: 134616 - DNA, 15 bp, Homo sapiens
ccagggaagccatca

SEQ ID NO: 134617 - DNA, 15 bp, Homo sapiens
cccagggaagccatc

SEQ ID NO: 134618 - DNA, 15 bp, Homo sapiens
acccagggaagccat

SEQ ID NO: 134619 - DNA, 15 bp, Homo sapiens
aacccagggaagcca

SEQ ID NO: 134620 - DNA, 15 bp, Homo sapiens
gaacccagggaagcc

SEQ ID NO: 134621 - DNA, 15 bp, Homo sapiens
agaacccagggaagc

SEQ ID NO: 134622 - DNA, 15 bp, Homo sapiens
aagaacccagggaag

SEQ ID NO: 134623 - DNA, 15 bp, Homo sapiens
gaagaacccagggaa

SEQ ID NO: 134624 - DNA, 15 bp, Homo sapiens
cgaagaacccaggga

SEQ ID NO: 134625 - DNA, 15 bp, Homo sapiens
acgaagaacccaggg

SEQ ID NO: 134626 - DNA, 15 bp, Homo sapiens
gacgaagaacccagg

SEQ ID NO: 134627 - DNA, 15 bp, Homo sapiens
ggacgaagaacccag

SEQ ID NO: 134628 - DNA, 15 bp, Homo sapiens
aggacgaagaaccca

SEQ ID NO: 134629 - DNA, 15 bp, Homo sapiens
gaggacgaagaaccc

SEQ ID NO: 134630 - DNA, 15 bp, Homo sapiens
ggaggacgaagaacc

SEQ ID NO: 134631 - DNA, 15 bp, Homo sapiens
aggaggacgaagaac

SEQ ID NO: 134632 - DNA, 15 bp, Homo sapiens
caggaggacgaagaa

SEQ ID NO: 134633 - DNA, 15 bp, Homo sapiens
tcaggaggacgaaga

SEQ ID NO: 134634 - DNA, 15 bp, Homo sapiens
ctcaggaggacgaag

SEQ ID NO: 134635 - DNA, 15 bp, Homo sapiens
tctcaggaggacgaa

SEQ ID NO: 134636 - DNA, 15 bp, Homo sapiens
gtctcaggaggacga

SEQ ID NO: 134637 - DNA, 15 bp, Homo sapiens
tgtctcaggaggacg

SEQ ID NO: 134638 - DNA, 15 bp, Homo sapiens
ctgtctcaggaggac

SEQ ID NO: 134639 - DNA, 15 bp, Homo sapiens
actgtctcaggagga

SEQ ID NO: 134640 - DNA, 15 bp, Homo sapiens
cactgtctcaggagg

SEQ ID NO: 134641 - DNA, 15 bp, Homo sapiens
acactgtctcaggag

SEQ ID NO: 134642 - DNA, 15 bp, Homo sapiens
cacactgtctcagga

SEQ ID NO: 134643 - DNA, 15 bp, Homo sapiens
ccacactgtctcagg

SEQ ID NO: 134644 - DNA, 15 bp, Homo sapiens
accacactgtctcag

SEQ ID NO: 134645 - DNA, 15 bp, Homo sapiens
aaccacactgtctca

SEQ ID NO: 134646 - DNA, 15 bp, Homo sapiens
aaaccacactgtctc

SEQ ID NO: 134647 - DNA, 15 bp, Homo sapiens
gaaaccacactgtct

SEQ ID NO: 134648 - DNA, 15 bp, Homo sapiens
ggaaaccacactgtc

SEQ ID NO: 134649 - DNA, 15 bp, Homo sapiens
gggaaaccacactgt

SEQ ID NO: 134650 - DNA, 15 bp, Homo sapiens
agggaaaccacactg

SEQ ID NO: 134651 - DNA, 15 bp, Homo sapiens
aagggaaaccacact

SEQ ID NO: 134652 - DNA, 15 bp, Homo sapiens
aaagggaaaccacac

SEQ ID NO: 134653 - DNA, 15 bp, Homo sapiens
caaagggaaaccaca

SEQ ID NO: 134654 - DNA, 15 bp, Homo sapiens
gcaaagggaaaccac

SEQ ID NO: 134655 - DNA, 15 bp, Homo sapiens
ggcaaagggaaacca

SEQ ID NO: 134656 - DNA, 15 bp, Homo sapiens
gggcaaagggaaacc

SEQ ID NO: 134657 - DNA, 15 bp, Homo sapiens
ggggcaaagggaaac

SEQ ID NO: 134658 - DNA, 15 bp, Homo sapiens
aggggcaaagggaaa

SEQ ID NO: 134659 - DNA, 15 bp, Homo sapiens
aaggggcaaagggaa

SEQ ID NO: 134660 - DNA, 15 bp, Homo sapiens
aaaggggcaaaggga

SEQ ID NO: 134661 - DNA, 15 bp, Homo sapiens
caaaggggcaaaggg

SEQ ID NO: 134662 - DNA, 15 bp, Homo sapiens
gcaaaggggcaaagg

SEQ ID NO: 134663 - DNA, 15 bp, Homo sapiens
ggcaaaggggcaaag

SEQ ID NO: 134664 - DNA, 15 bp, Homo sapiens
gggcaaaggggcaaa

SEQ ID NO: 134665 - DNA, 15 bp, Homo sapiens
tgggcaaaggggcaa

SEQ ID NO: 134666 - DNA, 15 bp, Homo sapiens
ctgggcaaaggggca

SEQ ID NO: 134667 - DNA, 15 bp, Homo sapiens
tctgggcaaaggggc

SEQ ID NO: 134668 - DNA, 15 bp, Homo sapiens
ctctgggcaaagggg

SEQ ID NO: 134669 - DNA, 15 bp, Homo sapiens
actctgggcaaaggg

SEQ ID NO: 134670 - DNA, 15 bp, Homo sapiens
aactctgggcaaagg

SEQ ID NO: 134671 - DNA, 15 bp, Homo sapiens
gaactctgggcaaag

SEQ ID NO: 134672 - DNA, 15 bp, Homo sapiens
tgaactctgggcaaa

SEQ ID NO: 134673 - DNA, 15 bp, Homo sapiens
ctgaactctgggcaa

SEQ ID NO: 134674 - DNA, 15 bp, Homo sapiens
tctgaactctgggca

SEQ ID NO: 134675 - DNA, 15 bp, Homo sapiens
ttctgaactctgggc

SEQ ID NO: 134676 - DNA, 15 bp, Homo sapiens
tttctgaactctggg

SEQ ID NO: 134677 - DNA, 15 bp, Homo sapiens
ttttctgaactctgg

SEQ ID NO: 134678 - DNA, 15 bp, Homo sapiens
gttttctgaactctg

SEQ ID NO: 134679 - DNA, 15 bp, Homo sapiens
cgttttctgaactct

SEQ ID NO: 134680 - DNA, 15 bp, Homo sapiens
tcgttttctgaactc

SEQ ID NO: 134681 - DNA, 15 bp, Homo sapiens
gtcgttttctgaact

SEQ ID NO: 134682 - DNA, 15 bp, Homo sapiens
ggtcgttttctgaac

SEQ ID NO: 134683 - DNA, 15 bp, Homo sapiens
gggtcgttttctgaa

SEQ ID NO: 134684 - DNA, 15 bp, Homo sapiens
tgggtcgttttctga

SEQ ID NO: 134685 - DNA, 15 bp, Homo sapiens
atgggtcgttttctg

SEQ ID NO: 134686 - DNA, 15 bp, Homo sapiens
aatgggtcgttttct

SEQ ID NO: 134687 - DNA, 15 bp, Homo sapiens
gaatgggtcgttttc

SEQ ID NO: 134688 - DNA, 15 bp, Homo sapiens
agaatgggtcgtttt

SEQ ID NO: 134689 - DNA, 15 bp, Homo sapiens
cagaatgggtcgttt

SEQ ID NO: 134690 - DNA, 15 bp, Homo sapiens
ccagaatgggtcgtt

SEQ ID NO: 134691 - DNA, 15 bp, Homo sapiens
accagaatgggtcgt

SEQ ID NO: 134692 - DNA, 15 bp, Homo sapiens
aaccagaatgggtcg

SEQ ID NO: 134693 - DNA, 15 bp, Homo sapiens
caaccagaatgggtc

SEQ ID NO: 134694 - DNA, 15 bp, Homo sapiens
acaaccagaatgggt

SEQ ID NO: 134695 - DNA, 15 bp, Homo sapiens
aacaaccagaatggg

SEQ ID NO: 134696 - DNA, 15 bp, Homo sapiens
aaacaaccagaatgg

SEQ ID NO: 134697 - DNA, 15 bp, Homo sapiens
gaaacaaccagaatg

SEQ ID NO: 134698 - DNA, 15 bp, Homo sapiens
agaaacaaccagaat

SEQ ID NO: 134699 - DNA, 15 bp, Homo sapiens
aagaaacaaccagaa

SEQ ID NO: 134700 - DNA, 15 bp, Homo sapiens
caagaaacaaccaga

SEQ ID NO: 134701 - DNA, 15 bp, Homo sapiens
tcaagaaacaaccag

SEQ ID NO: 134702 - DNA, 15 bp, Homo sapiens
ttcaagaaacaacca

SEQ ID NO: 134703 - DNA, 15 bp, Homo sapiens
cttcaagaaacaacc

SEQ ID NO: 134704 - DNA, 15 bp, Homo sapiens
acttcaagaaacaac

SEQ ID NO: 134705 - DNA, 15 bp, Homo sapiens
aacttcaagaaacaa

SEQ ID NO: 134706 - DNA, 15 bp, Homo sapiens
aaacttcaagaaaca

SEQ ID NO: 134707 - DNA, 15 bp, Homo sapiens
caaacttcaagaaac

SEQ ID NO: 134708 - DNA, 15 bp, Homo sapiens
gcaaacttcaagaaa

SEQ ID NO: 134709 - DNA, 15 bp, Homo sapiens
ggcaaacttcaagaa

SEQ ID NO: 134710 - DNA, 15 bp, Homo sapiens
aggcaaacttcaaga

SEQ ID NO: 134711 - DNA, 15 bp, Homo sapiens
aaggcaaacttcaag

SEQ ID NO: 134712 - DNA, 15 bp, Homo sapiens
gaaggcaaacttcaa

SEQ ID NO: 134713 - DNA, 15 bp, Homo sapiens
agaaggcaaacttca

SEQ ID NO: 134714 - DNA, 15 bp, Homo sapiens
cagaaggcaaacttc

SEQ ID NO: 134715 - DNA, 15 bp, Homo sapiens
tcagaaggcaaactt

SEQ ID NO: 134716 - DNA, 15 bp, Homo sapiens
ctcagaaggcaaact

SEQ ID NO: 134717 - DNA, 15 bp, Homo sapiens
cctcagaaggcaaac

SEQ ID NO: 134718 - DNA, 15 bp, Homo sapiens
acctcagaaggcaaa

SEQ ID NO: 134719 - DNA, 15 bp, Homo sapiens
gacctcagaaggcaa

SEQ ID NO: 134720 - DNA, 15 bp, Homo sapiens
agacctcagaaggca

SEQ ID NO: 134721 - DNA, 15 bp, Homo sapiens
gagacctcagaaggc

SEQ ID NO: 134722 - DNA, 15 bp, Homo sapiens
agagacctcagaagg

SEQ ID NO: 134723 - DNA, 15 bp, Homo sapiens
aagagacctcagaag

SEQ ID NO: 134724 - DNA, 15 bp, Homo sapiens
gaagagacctcagaa

SEQ ID NO: 134725 - DNA, 15 bp, Homo sapiens
cgaagagacctcaga

SEQ ID NO: 134726 - DNA, 15 bp, Homo sapiens
ccgaagagacctcag

SEQ ID NO: 134727 - DNA, 15 bp, Homo sapiens
accgaagagacctca

SEQ ID NO: 134728 - DNA, 15 bp, Homo sapiens
gaccgaagagacctc

SEQ ID NO: 134729 - DNA, 15 bp, Homo sapiens
agaccgaagagacct

SEQ ID NO: 134730 - DNA, 15 bp, Homo sapiens
aagaccgaagagacc

SEQ ID NO: 134731 - DNA, 15 bp, Homo sapiens
caagaccgaagagac

SEQ ID NO: 134732 - DNA, 15 bp, Homo sapiens
acaagaccgaagaga

SEQ ID NO: 134733 - DNA, 15 bp, Homo sapiens
gacaagaccgaagag

SEQ ID NO: 134734 - DNA, 15 bp, Homo sapiens
tgacaagaccgaaga

SEQ ID NO: 134735 - DNA, 15 bp, Homo sapiens
ctgacaagaccgaag

SEQ ID NO: 134736 - DNA, 15 bp, Homo sapiens
gctgacaagaccgaa

SEQ ID NO: 134737 - DNA, 15 bp, Homo sapiens
tgctgacaagaccga

SEQ ID NO: 134738 - DNA, 15 bp, Homo sapiens
ctgctgacaagaccg

SEQ ID NO: 134739 - DNA, 15 bp, Homo sapiens
gctgctgacaagacc

SEQ ID NO: 134740 - DNA, 15 bp, Homo sapiens
agctgctgacaagac

SEQ ID NO: 134741 - DNA, 15 bp, Homo sapiens
cagctgctgacaaga

SEQ ID NO: 134742 - DNA, 15 bp, Homo sapiens
acagctgctgacaag

SEQ ID NO: 134743 - DNA, 15 bp, Homo sapiens
cacagctgctgacaa

SEQ ID NO: 134744 - DNA, 15 bp, Homo sapiens
tcacagctgctgaca

SEQ ID NO: 134745 - DNA, 15 bp, Homo sapiens
gtcacagctgctgac

SEQ ID NO: 134746 - DNA, 15 bp, Homo sapiens
agtcacagctgctga

SEQ ID NO: 134747 - DNA, 15 bp, Homo sapiens
cagtcacagctgctg

SEQ ID NO: 134748 - DNA, 15 bp, Homo sapiens
ccagtcacagctgct

SEQ ID NO: 134749 - DNA, 15 bp, Homo sapiens
tccagtcacagctgc

SEQ ID NO: 134750 - DNA, 15 bp, Homo sapiens
ctccagtcacagctg

SEQ ID NO: 134751 - DNA, 15 bp, Homo sapiens
cctccagtcacagct

SEQ ID NO: 134752 - DNA, 15 bp, Homo sapiens
gcctccagtcacagc

SEQ ID NO: 134753 - DNA, 15 bp, Homo sapiens
agcctccagtcacag

SEQ ID NO: 134754 - DNA, 15 bp, Homo sapiens
aagcctccagtcaca

SEQ ID NO: 134755 - DNA, 15 bp, Homo sapiens
aaagcctccagtcac

SEQ ID NO: 134756 - DNA, 15 bp, Homo sapiens
aaaagcctccagtca

SEQ ID NO: 134757 - DNA, 15 bp, Homo sapiens
caaaagcctccagtc

SEQ ID NO: 134758 - DNA, 15 bp, Homo sapiens
tcaaaagcctccagt

SEQ ID NO: 134759 - DNA, 15 bp, Homo sapiens
gtcaaaagcctccag

SEQ ID NO: 134760 - DNA, 15 bp, Homo sapiens
agtcaaaagcctcca

SEQ ID NO: 134761 - DNA, 15 bp, Homo sapiens
cagtcaaaagcctcc

SEQ ID NO: 134762 - DNA, 15 bp, Homo sapiens
acagtcaaaagcctc

SEQ ID NO: 134763 - DNA, 15 bp, Homo sapiens
aacagtcaaaagcct

SEQ ID NO: 134764 - DNA, 15 bp, Homo sapiens
caacagtcaaaagcc

SEQ ID NO: 134765 - DNA, 15 bp, Homo sapiens
gcaacagtcaaaagc

SEQ ID NO: 134766 - DNA, 15 bp, Homo sapiens
agcaacagtcaaaag

SEQ ID NO: 134767 - DNA, 15 bp, Homo sapiens
cagcaacagtcaaaa

SEQ ID NO: 134768 - DNA, 15 bp, Homo sapiens
ccagcaacagtcaaa

SEQ ID NO: 134769 - DNA, 15 bp, Homo sapiens
cccagcaacagtcaa

SEQ ID NO: 134770 - DNA, 15 bp, Homo sapiens
gcccagcaacagtca

SEQ ID NO: 134771 - DNA, 15 bp, Homo sapiens
ggcccagcaacagtc

SEQ ID NO: 134772 - DNA, 15 bp, Homo sapiens
tggcccagcaacagt

SEQ ID NO: 134773 - DNA, 15 bp, Homo sapiens
atggcccagcaacag

SEQ ID NO: 134774 - DNA, 15 bp, Homo sapiens
tatggcccagcaaca

SEQ ID NO: 134775 - DNA, 15 bp, Homo sapiens
ttatggcccagcaac

SEQ ID NO: 134776 - DNA, 15 bp, Homo sapiens
tttatggcccagcaa

SEQ ID NO: 134777 - DNA, 15 bp, Homo sapiens
atttatggcccagca

SEQ ID NO: 134778 - DNA, 15 bp, Homo sapiens
aatttatggcccagc

SEQ ID NO: 134779 - DNA, 15 bp, Homo sapiens
gaatttatggcccag

SEQ ID NO: 134780 - DNA, 15 bp, Homo sapiens
tgaatttatggccca

SEQ ID NO: 134781 - DNA, 15 bp, Homo sapiens
gtgaatttatggccc

SEQ ID NO: 134782 - DNA, 15 bp, Homo sapiens
ggtgaatttatggcc

SEQ ID NO: 134783 - DNA, 15 bp, Homo sapiens
aggtgaatttatggc

SEQ ID NO: 134784 - DNA, 15 bp, Homo sapiens
gaggtgaatttatgg

SEQ ID NO: 134785 - DNA, 15 bp, Homo sapiens
ggaggtgaatttatg

SEQ ID NO: 134786 - DNA, 15 bp, Homo sapiens
aggaggtgaatttat

SEQ ID NO: 134787 - DNA, 15 bp, Homo sapiens
aaggaggtgaattta

SEQ ID NO: 134788 - DNA, 15 bp, Homo sapiens
taaggaggtgaattt

SEQ ID NO: 134789 - DNA, 15 bp, Homo sapiens
ataaggaggtgaatt

SEQ ID NO: 134790 - DNA, 15 bp, Homo sapiens
gataaggaggtgaat

SEQ ID NO: 134791 - DNA, 15 bp, Homo sapiens
tgataaggaggtgaa

SEQ ID NO: 134792 - DNA, 15 bp, Homo sapiens
ttgataaggaggtga

SEQ ID NO: 134793 - DNA, 15 bp, Homo sapiens
attgataaggaggtg

SEQ ID NO: 134794 - DNA, 15 bp, Homo sapiens
cattgataaggaggt

SEQ ID NO: 134795 - DNA, 15 bp, Homo sapiens
acattgataaggagg

SEQ ID NO: 134796 - DNA, 15 bp, Homo sapiens
gacattgataaggag

SEQ ID NO: 134797 - DNA, 15 bp, Homo sapiens
tgacattgataagga

SEQ ID NO: 134798 - DNA, 15 bp, Homo sapiens
gtgacattgataagg

SEQ ID NO: 134799 - DNA, 15 bp, Homo sapiens
cgtgacattgataag

SEQ ID NO: 134800 - DNA, 15 bp, Homo sapiens
acgtgacattgataa

SEQ ID NO: 134801 - DNA, 15 bp, Homo sapiens
cacgtgacattgata

SEQ ID NO: 134802 - DNA, 15 bp, Homo sapiens
gcacgtgacattgat

SEQ ID NO: 134803 - DNA, 15 bp, Homo sapiens
ggcacgtgacattga

SEQ ID NO: 134804 - DNA, 15 bp, Homo sapiens
aggcacgtgacattg

SEQ ID NO: 134805 - DNA, 15 bp, Homo sapiens
aaggcacgtgacatt

SEQ ID NO: 134806 - DNA, 15 bp, Homo sapiens
caaggcacgtgacat

SEQ ID NO: 134807 - DNA, 15 bp, Homo sapiens
acaaggcacgtgaca

SEQ ID NO: 134808 - DNA, 15 bp, Homo sapiens
tacaaggcacgtgac

SEQ ID NO: 134809 - DNA, 15 bp, Homo sapiens
atacaaggcacgtga

SEQ ID NO: 134810 - DNA, 15 bp, Homo sapiens
gatacaaggcacgtg

SEQ ID NO: 134811 - DNA, 15 bp, Homo sapiens
agatacaaggcacgt

SEQ ID NO: 134812 - DNA, 15 bp, Homo sapiens
gagatacaaggcacg

SEQ ID NO: 134813 - DNA, 15 bp, Homo sapiens
ggagatacaaggcac

SEQ ID NO: 134814 - DNA, 15 bp, Homo sapiens
tggagatacaaggca

SEQ ID NO: 134815 - DNA, 15 bp, Homo sapiens
ttggagatacaaggc

SEQ ID NO: 134816 - DNA, 15 bp, Homo sapiens
cttggagatacaagg

SEQ ID NO: 134817 - DNA, 15 bp, Homo sapiens
ccttggagatacaag

SEQ ID NO: 134818 - DNA, 15 bp, Homo sapiens
accttggagatacaa

SEQ ID NO: 134819 - DNA, 15 bp, Homo sapiens
aaccttggagataca

SEQ ID NO: 134820 - DNA, 15 bp, Homo sapiens
aaaccttggagatac

SEQ ID NO: 134821 - DNA, 15 bp, Homo sapiens
taaaccttggagata

SEQ ID NO: 134822 - DNA, 15 bp, Homo sapiens
ctaaaccttggagat

SEQ ID NO: 134823 - DNA, 15 bp, Homo sapiens
gctaaaccttggaga

SEQ ID NO: 134824 - DNA, 15 bp, Homo sapiens
ggctaaaccttggag

SEQ ID NO: 134825 - DNA, 15 bp, Homo sapiens
gggctaaaccttgga

SEQ ID NO: 134826 - DNA, 15 bp, Homo sapiens
ggggctaaaccttgg

SEQ ID NO: 134827 - DNA, 15 bp, Homo sapiens
gggggctaaaccttg

SEQ ID NO: 134828 - DNA, 15 bp, Homo sapiens
agggggctaaacctt

SEQ ID NO: 134829 - DNA, 15 bp, Homo sapiens
aagggggctaaacct

SEQ ID NO: 134830 - DNA, 15 bp, Homo sapiens
gaagggggctaaacc

SEQ ID NO: 134831 - DNA, 15 bp, Homo sapiens
agaagggggctaaac

SEQ ID NO: 134832 - DNA, 15 bp, Homo sapiens
gagaagggggctaaa

SEQ ID NO: 134833 - DNA, 15 bp, Homo sapiens
tgagaagggggctaa

SEQ ID NO: 134834 - DNA, 15 bp, Homo sapiens
ctgagaagggggcta

SEQ ID NO: 134835 - DNA, 15 bp, Homo sapiens
actgagaagggggct

SEQ ID NO: 134836 - DNA, 15 bp, Homo sapiens
aactgagaagggggc

SEQ ID NO: 134837 - DNA, 15 bp, Homo sapiens
aaactgagaaggggg

SEQ ID NO: 134838 - DNA, 15 bp, Homo sapiens
gaaactgagaagggg

SEQ ID NO: 134839 - DNA, 15 bp, Homo sapiens
tgaaactgagaaggg

SEQ ID NO: 134840 - DNA, 15 bp, Homo sapiens
gtgaaactgagaagg

SEQ ID NO: 134841 - DNA, 15 bp, Homo sapiens
cgtgaaactgagaag

SEQ ID NO: 134842 - DNA, 15 bp, Homo sapiens
acgtgaaactgagaa

SEQ ID NO: 134843 - DNA, 15 bp, Homo sapiens
cacgtgaaactgaga

SEQ ID NO: 134844 - DNA, 15 bp, Homo sapiens
ccacgtgaaactgag

SEQ ID NO: 134845 - DNA, 15 bp, Homo sapiens
cccacgtgaaactga

SEQ ID NO: 134846 - DNA, 15 bp, Homo sapiens
ccccacgtgaaactg

SEQ ID NO: 134847 - DNA, 15 bp, Homo sapiens
cccccacgtgaaact

SEQ ID NO: 134848 - DNA, 15 bp, Homo sapiens
acccccacgtgaaac

SEQ ID NO: 134849 - DNA, 15 bp, Homo sapiens
aacccccacgtgaaa

SEQ ID NO: 134850 - DNA, 15 bp, Homo sapiens
caacccccacgtgaa

SEQ ID NO: 134851 - DNA, 15 bp, Homo sapiens
acaacccccacgtga

SEQ ID NO: 134852 - DNA, 15 bp, Homo sapiens
tacaacccccacgtg

SEQ ID NO: 134853 - DNA, 15 bp, Homo sapiens
ttacaacccccacgt

SEQ ID NO: 134854 - DNA, 15 bp, Homo sapiens
attacaacccccacg

SEQ ID NO: 134855 - DNA, 15 bp, Homo sapiens
aattacaacccccac

SEQ ID NO: 134856 - DNA, 15 bp, Homo sapiens
aaattacaaccccca

SEQ ID NO: 134857 - DNA, 15 bp, Homo sapiens
caaattacaaccccc

SEQ ID NO: 134858 - DNA, 15 bp, Homo sapiens
ccaaattacaacccc

SEQ ID NO: 134859 - DNA, 15 bp, Homo sapiens
cccaaattacaaccc

SEQ ID NO: 134860 - DNA, 15 bp, Homo sapiens
ccccaaattacaacc

SEQ ID NO: 134861 - DNA, 15 bp, Homo sapiens
cccccaaattacaac

SEQ ID NO: 134862 - DNA, 15 bp, Homo sapiens
gcccccaaattacaa

SEQ ID NO: 134863 - DNA, 15 bp, Homo sapiens
ggcccccaaattaca

SEQ ID NO: 134864 - DNA, 15 bp, Homo sapiens
gggcccccaaattac

SEQ ID NO: 134865 - DNA, 15 bp, Homo sapiens
agggcccccaaatta

SEQ ID NO: 134866 - DNA, 15 bp, Homo sapiens
cagggcccccaaatt

SEQ ID NO: 134867 - DNA, 15 bp, Homo sapiens
gcagggcccccaaat

SEQ ID NO: 134868 - DNA, 15 bp, Homo sapiens
ggcagggcccccaaa

SEQ ID NO: 134869 - DNA, 15 bp, Homo sapiens
tggcagggcccccaa

SEQ ID NO: 134870 - DNA, 15 bp, Homo sapiens
ttggcagggccccca

SEQ ID NO: 134871 - DNA, 15 bp, Homo sapiens
cttggcagggccccc

SEQ ID NO: 134872 - DNA, 15 bp, Homo sapiens
tcttggcagggcccc

SEQ ID NO: 134873 - DNA, 15 bp, Homo sapiens
ttcttggcagggccc

SEQ ID NO: 134874 - DNA, 15 bp, Homo sapiens
attcttggcagggcc

SEQ ID NO: 134875 - DNA, 15 bp, Homo sapiens
aattcttggcagggc

SEQ ID NO: 134876 - DNA, 15 bp, Homo sapiens
aaattcttggcaggg

SEQ ID NO: 134877 - DNA, 15 bp, Homo sapiens
caaattcttggcagg

SEQ ID NO: 134878 - DNA, 15 bp, Homo sapiens
ccaaattcttggcag

SEQ ID NO: 134879 - DNA, 15 bp, Homo sapiens
tccaaattcttggca

SEQ ID NO: 134880 - DNA, 15 bp, Homo sapiens
atccaaattcttggc

SEQ ID NO: 134881 - DNA, 15 bp, Homo sapiens
catccaaattcttgg

SEQ ID NO: 134882 - DNA, 15 bp, Homo sapiens
acatccaaattcttg

SEQ ID NO: 134883 - DNA, 15 bp, Homo sapiens
tacatccaaattctt

SEQ ID NO: 134884 - DNA, 15 bp, Homo sapiens
ctacatccaaattct

SEQ ID NO: 134885 - DNA, 15 bp, Homo sapiens
cctacatccaaattc

SEQ ID NO: 134886 - DNA, 15 bp, Homo sapiens
ccctacatccaaatt

SEQ ID NO: 134887 - DNA, 15 bp, Homo sapiens
accctacatccaaat

SEQ ID NO: 134888 - DNA, 15 bp, Homo sapiens
taccctacatccaaa

SEQ ID NO: 134889 - DNA, 15 bp, Homo sapiens
gtaccctacatccaa

SEQ ID NO: 134890 - DNA, 15 bp, Homo sapiens
tgtaccctacatcca

SEQ ID NO: 134891 - DNA, 15 bp, Homo sapiens
ctgtaccctacatcc

SEQ ID NO: 134892 - DNA, 15 bp, Homo sapiens
tctgtaccctacatc

SEQ ID NO: 134893 - DNA, 15 bp, Homo sapiens
ctctgtaccctacat

SEQ ID NO: 134894 - DNA, 15 bp, Homo sapiens
gctctgtaccctaca

SEQ ID NO: 134895 - DNA, 15 bp, Homo sapiens
ggctctgtaccctac

SEQ ID NO: 134896 - DNA, 15 bp, Homo sapiens
aggctctgtacccta

SEQ ID NO: 134897 - DNA, 15 bp, Homo sapiens
aaggctctgtaccct

SEQ ID NO: 134898 - DNA, 15 bp, Homo sapiens
aaaggctctgtaccc

SEQ ID NO: 134899 - DNA, 15 bp, Homo sapiens
caaaggctctgtacc

SEQ ID NO: 134900 - DNA, 15 bp, Homo sapiens
acaaaggctctgtac

SEQ ID NO: 134901 - DNA, 15 bp, Homo sapiens
aacaaaggctctgta

SEQ ID NO: 134902 - DNA, 15 bp, Homo sapiens
taacaaaggctctgt

SEQ ID NO: 134903 - DNA, 15 bp, Homo sapiens
ctaacaaaggctctg

SEQ ID NO: 134904 - DNA, 15 bp, Homo sapiens
cctaacaaaggctct

SEQ ID NO: 134905 - DNA, 15 bp, Homo sapiens
tcctaacaaaggctc

SEQ ID NO: 134906 - DNA, 15 bp, Homo sapiens
ttcctaacaaaggct

SEQ ID NO: 134907 - DNA, 15 bp, Homo sapiens
tttcctaacaaaggc

SEQ ID NO: 134908 - DNA, 15 bp, Homo sapiens
gtttcctaacaaagg

SEQ ID NO: 134909 - DNA, 15 bp, Homo sapiens
agtttcctaacaaag

SEQ ID NO: 134910 - DNA, 15 bp, Homo sapiens
gagtttcctaacaaa

SEQ ID NO: 134911 - DNA, 15 bp, Homo sapiens
cgagtttcctaacaa

SEQ ID NO: 134912 - DNA, 15 bp, Homo sapiens
tcgagtttcctaaca

SEQ ID NO: 134913 - DNA, 15 bp, Homo sapiens
ctcgagtttcctaac

SEQ ID NO: 134914 - DNA, 15 bp, Homo sapiens
actcgagtttcctaa

SEQ ID NO: 134915 - DNA, 15 bp, Homo sapiens
aactcgagtttccta

SEQ ID NO: 134916 - DNA, 15 bp, Homo sapiens
caactcgagtttcct

SEQ ID NO: 134917 - DNA, 15 bp, Homo sapiens
ccaactcgagtttcc

SEQ ID NO: 134918 - DNA, 15 bp, Homo sapiens
tccaactcgagtttc

SEQ ID NO: 134919 - DNA, 15 bp, Homo sapiens
atccaactcgagttt

SEQ ID NO: 134920 - DNA, 15 bp, Homo sapiens
aatccaactcgagtt

SEQ ID NO: 134921 - DNA, 15 bp, Homo sapiens
gaatccaactcgagt

SEQ ID NO: 134922 - DNA, 15 bp, Homo sapiens
ggaatccaactcgag

SEQ ID NO: 134923 - DNA, 15 bp, Homo sapiens
tggaatccaactcga

SEQ ID NO: 134924 - DNA, 15 bp, Homo sapiens
atggaatccaactcg

SEQ ID NO: 134925 - DNA, 15 bp, Homo sapiens
aatggaatccaactc

SEQ ID NO: 134926 - DNA, 15 bp, Homo sapiens
aaatggaatccaact

SEQ ID NO: 134927 - DNA, 15 bp, Homo sapiens
aaaatggaatccaac

SEQ ID NO: 134928 - DNA, 15 bp, Homo sapiens
gaaaatggaatccaa

SEQ ID NO: 134929 - DNA, 15 bp, Homo sapiens
agaaaatggaatcca

SEQ ID NO: 134930 - DNA, 15 bp, Homo sapiens
tagaaaatggaatcc

SEQ ID NO: 134931 - DNA, 15 bp, Homo sapiens
ctagaaaatggaatc

SEQ ID NO: 134932 - DNA, 15 bp, Homo sapiens
cctagaaaatggaat

SEQ ID NO: 134933 - DNA, 15 bp, Homo sapiens
acctagaaaatggaa

SEQ ID NO: 134934 - DNA, 15 bp, Homo sapiens
cacctagaaaatgga

SEQ ID NO: 134935 - DNA, 15 bp, Homo sapiens
acacctagaaaatgg

SEQ ID NO: 134936 - DNA, 15 bp, Homo sapiens
aacacctagaaaatg

SEQ ID NO: 134937 - DNA, 15 bp, Homo sapiens
caacacctagaaaat

SEQ ID NO: 134938 - DNA, 15 bp, Homo sapiens
tcaacacctagaaaa

SEQ ID NO: 134939 - DNA, 15 bp, Homo sapiens
gtcaacacctagaaa

SEQ ID NO: 134940 - DNA, 15 bp, Homo sapiens
agtcaacacctagaa

SEQ ID NO: 134941 - DNA, 15 bp, Homo sapiens
gagtcaacacctaga

SEQ ID NO: 134942 - DNA, 15 bp, Homo sapiens
agagtcaacacctag

SEQ ID NO: 134943 - DNA, 15 bp, Homo sapiens
aagagtcaacaccta

SEQ ID NO: 134944 - DNA, 15 bp, Homo sapiens
aaagagtcaacacct

SEQ ID NO: 134945 - DNA, 15 bp, Homo sapiens
aaaagagtcaacacc

SEQ ID NO: 134946 - DNA, 15 bp, Homo sapiens
aaaaagagtcaacac

SEQ ID NO: 134947 - DNA, 15 bp, Homo sapiens
gaaaaagagtcaaca

SEQ ID NO: 134948 - DNA, 15 bp, Homo sapiens
tgaaaaagagtcaac

SEQ ID NO: 134949 - DNA, 15 bp, Homo sapiens
gtgaaaaagagtcaa

SEQ ID NO: 134950 - DNA, 15 bp, Homo sapiens
ggtgaaaaagagtca

SEQ ID NO: 134951 - DNA, 15 bp, Homo sapiens
aggtgaaaaagagtc

SEQ ID NO: 134952 - DNA, 15 bp, Homo sapiens
taggtgaaaaagagt

SEQ ID NO: 134953 - DNA, 15 bp, Homo sapiens
ctaggtgaaaaagag

SEQ ID NO: 134954 - DNA, 15 bp, Homo sapiens
cctaggtgaaaaaga

SEQ ID NO: 134955 - DNA, 15 bp, Homo sapiens
ccctaggtgaaaaag

SEQ ID NO: 134956 - DNA, 15 bp, Homo sapiens
tccctaggtgaaaaa

SEQ ID NO: 134957 - DNA, 15 bp, Homo sapiens
ctccctaggtgaaaa

SEQ ID NO: 134958 - DNA, 15 bp, Homo sapiens
tctccctaggtgaaa

SEQ ID NO: 134959 - DNA, 15 bp, Homo sapiens
gtctccctaggtgaa

SEQ ID NO: 134960 - DNA, 15 bp, Homo sapiens
tgtctccctaggtga

SEQ ID NO: 134961 - DNA, 15 bp, Homo sapiens
ctgtctccctaggtg

SEQ ID NO: 134962 - DNA, 15 bp, Homo sapiens
tctgtctccctaggt

SEQ ID NO: 134963 - DNA, 15 bp, Homo sapiens
gtctgtctccctagg

SEQ ID NO: 134964 - DNA, 15 bp, Homo sapiens
tgtctgtctccctag

SEQ ID NO: 134965 - DNA, 15 bp, Homo sapiens
ctgtctgtctcccta

SEQ ID NO: 134966 - DNA, 15 bp, Homo sapiens
actgtctgtctccct

SEQ ID NO: 134967 - DNA, 15 bp, Homo sapiens
cactgtctgtctccc

SEQ ID NO: 134968 - DNA, 15 bp, Homo sapiens
gcactgtctgtctcc

SEQ ID NO: 134969 - DNA, 15 bp, Homo sapiens
agcactgtctgtctc

SEQ ID NO: 134970 - DNA, 15 bp, Homo sapiens
gagcactgtctgtct

SEQ ID NO: 134971 - DNA, 15 bp, Homo sapiens
agagcactgtctgtc

SEQ ID NO: 134972 - DNA, 15 bp, Homo sapiens
aagagcactgtctgt

SEQ ID NO: 134973 - DNA, 15 bp, Homo sapiens
caagagcactgtctg

SEQ ID NO: 134974 - DNA, 15 bp, Homo sapiens
tcaagagcactgtct

SEQ ID NO: 134975 - DNA, 15 bp, Homo sapiens
ttcaagagcactgtc

SEQ ID NO: 134976 - DNA, 15 bp, Homo sapiens
gttcaagagcactgt

SEQ ID NO: 134977 - DNA, 15 bp, Homo sapiens
ggttcaagagcactg

SEQ ID NO: 134978 - DNA, 15 bp, Homo sapiens
aggttcaagagcact

SEQ ID NO: 134979 - DNA, 15 bp, Homo sapiens
gaggttcaagagcac

SEQ ID NO: 134980 - DNA, 15 bp, Homo sapiens
agaggttcaagagca

SEQ ID NO: 134981 - DNA, 15 bp, Homo sapiens
aagaggttcaagagc

SEQ ID NO: 134982 - DNA, 15 bp, Homo sapiens
aaagaggttcaagag

SEQ ID NO: 134983 - DNA, 15 bp, Homo sapiens
aaaagaggttcaaga

SEQ ID NO: 134984 - DNA, 15 bp, Homo sapiens
aaaaagaggttcaag

SEQ ID NO: 134985 - DNA, 15 bp, Homo sapiens
caaaaagaggttcaa

SEQ ID NO: 134986 - DNA, 15 bp, Homo sapiens
gcaaaaagaggttca

SEQ ID NO: 134987 - DNA, 15 bp, Homo sapiens
tgcaaaaagaggttc

SEQ ID NO: 134988 - DNA, 15 bp, Homo sapiens
atgcaaaaagaggtt

SEQ ID NO: 134989 - DNA, 15 bp, Homo sapiens
gatgcaaaaagaggt

SEQ ID NO: 134990 - DNA, 15 bp, Homo sapiens
tgatgcaaaaagagg

SEQ ID NO: 134991 - DNA, 15 bp, Homo sapiens
gtgatgcaaaaagag

SEQ ID NO: 134992 - DNA, 15 bp, Homo sapiens
agtgatgcaaaaaga

SEQ ID NO: 134993 - DNA, 15 bp, Homo sapiens
aagtgatgcaaaaag

SEQ ID NO: 134994 - DNA, 15 bp, Homo sapiens
caagtgatgcaaaaa

SEQ ID NO: 134995 - DNA, 15 bp, Homo sapiens
tcaagtgatgcaaaa

SEQ ID NO: 134996 - DNA, 15 bp, Homo sapiens
ttcaagtgatgcaaa

SEQ ID NO: 134997 - DNA, 15 bp, Homo sapiens
attcaagtgatgcaa

SEQ ID NO: 134998 - DNA, 15 bp, Homo sapiens
tattcaagtgatgca

SEQ ID NO: 134999 - DNA, 15 bp, Homo sapiens
gtattcaagtgatgc

SEQ ID NO: 135000 - DNA, 15 bp, Homo sapiens
tgtattcaagtgatg

SEQ ID NO: 135001 - DNA, 15 bp, Homo sapiens
ctgtattcaagtgat

SEQ ID NO: 135002 - DNA, 15 bp, Homo sapiens
gctgtattcaagtga

SEQ ID NO: 135003 - DNA, 15 bp, Homo sapiens
ggctgtattcaagtg

SEQ ID NO: 135004 - DNA, 15 bp, Homo sapiens
cggctgtattcaagt

SEQ ID NO: 135005 - DNA, 15 bp, Homo sapiens
gcggctgtattcaag

SEQ ID NO: 135006 - DNA, 15 bp, Homo sapiens
agcggctgtattcaa

SEQ ID NO: 135007 - DNA, 15 bp, Homo sapiens
aagcggctgtattca

SEQ ID NO: 135008 - DNA, 15 bp, Homo sapiens
gaagcggctgtattc

SEQ ID NO: 135009 - DNA, 15 bp, Homo sapiens
agaagcggctgtatt

SEQ ID NO: 135010 - DNA, 15 bp, Homo sapiens
aagaagcggctgtat

SEQ ID NO: 135011 - DNA, 15 bp, Homo sapiens
taagaagcggctgta

SEQ ID NO: 135012 - DNA, 15 bp, Homo sapiens
ctaagaagcggctgt

SEQ ID NO: 135013 - DNA, 15 bp, Homo sapiens
tctaagaagcggctg

SEQ ID NO: 135014 - DNA, 15 bp, Homo sapiens
ttctaagaagcggct

SEQ ID NO: 135015 - DNA, 15 bp, Homo sapiens
attctaagaagcggc

SEQ ID NO: 135016 - DNA, 15 bp, Homo sapiens
tattctaagaagcgg

SEQ ID NO: 135017 - DNA, 15 bp, Homo sapiens
ctattctaagaagcg

SEQ ID NO: 135018 - DNA, 15 bp, Homo sapiens
cctattctaagaagc

SEQ ID NO: 135019 - DNA, 15 bp, Homo sapiens
tcctattctaagaag

SEQ ID NO: 135020 - DNA, 15 bp, Homo sapiens
ctcctattctaagaa

SEQ ID NO: 135021 - DNA, 15 bp, Homo sapiens
cctcctattctaaga

SEQ ID NO: 135022 - DNA, 15 bp, Homo sapiens
gcctcctattctaag

SEQ ID NO: 135023 - DNA, 15 bp, Homo sapiens
agcctcctattctaa

SEQ ID NO: 135024 - DNA, 15 bp, Homo sapiens
cagcctcctattcta

SEQ ID NO: 135025 - DNA, 15 bp, Homo sapiens
acagcctcctattct

SEQ ID NO: 135026 - DNA, 15 bp, Homo sapiens
aacagcctcctattc

SEQ ID NO: 135027 - DNA, 15 bp, Homo sapiens
aaacagcctcctatt

SEQ ID NO: 135028 - DNA, 15 bp, Homo sapiens
gaaacagcctcctat

SEQ ID NO: 135029 - DNA, 15 bp, Homo sapiens
agaaacagcctccta

SEQ ID NO: 135030 - DNA, 15 bp, Homo sapiens
aagaaacagcctcct

SEQ ID NO: 135031 - DNA, 15 bp, Homo sapiens
aaagaaacagcctcc

SEQ ID NO: 135032 - DNA, 15 bp, Homo sapiens
gaaagaaacagcctc

SEQ ID NO: 135033 - DNA, 15 bp, Homo sapiens
ggaaagaaacagcct

SEQ ID NO: 135034 - DNA, 15 bp, Homo sapiens
gggaaagaaacagcc

SEQ ID NO: 135035 - DNA, 15 bp, Homo sapiens
tgggaaagaaacagc

SEQ ID NO: 135036 - DNA, 15 bp, Homo sapiens
gtgggaaagaaacag

SEQ ID NO: 135037 - DNA, 15 bp, Homo sapiens
ggtgggaaagaaaca

SEQ ID NO: 135038 - DNA, 15 bp, Homo sapiens
aggtgggaaagaaac

SEQ ID NO: 135039 - DNA, 15 bp, Homo sapiens
caggtgggaaagaaa

SEQ ID NO: 135040 - DNA, 15 bp, Homo sapiens
gcaggtgggaaagaa

SEQ ID NO: 135041 - DNA, 15 bp, Homo sapiens
agcaggtgggaaaga

SEQ ID NO: 135042 - DNA, 15 bp, Homo sapiens
gagcaggtgggaaag

SEQ ID NO: 135043 - DNA, 15 bp, Homo sapiens
tgagcaggtgggaaa

SEQ ID NO: 135044 - DNA, 15 bp, Homo sapiens
atgagcaggtgggaa

SEQ ID NO: 135045 - DNA, 15 bp, Homo sapiens
aatgagcaggtggga

SEQ ID NO: 135046 - DNA, 15 bp, Homo sapiens
caatgagcaggtggg

SEQ ID NO: 135047 - DNA, 15 bp, Homo sapiens
ccaatgagcaggtgg

SEQ ID NO: 135048 - DNA, 15 bp, Homo sapiens
cccaatgagcaggtg

SEQ ID NO: 135049 - DNA, 15 bp, Homo sapiens
acccaatgagcaggt

SEQ ID NO: 135050 - DNA, 15 bp, Homo sapiens
gacccaatgagcagg

SEQ ID NO: 135051 - DNA, 15 bp, Homo sapiens
agacccaatgagcag

SEQ ID NO: 135052 - DNA, 15 bp, Homo sapiens
gagacccaatgagca

SEQ ID NO: 135053 - DNA, 15 bp, Homo sapiens
ggagacccaatgagc

SEQ ID NO: 135054 - DNA, 15 bp, Homo sapiens
aggagacccaatgag

SEQ ID NO: 135055 - DNA, 15 bp, Homo sapiens
aaggagacccaatga

SEQ ID NO: 135056 - DNA, 15 bp, Homo sapiens
aaaggagacccaatg

SEQ ID NO: 135057 - DNA, 15 bp, Homo sapiens
gaaaggagacccaat

SEQ ID NO: 135058 - DNA, 15 bp, Homo sapiens
ggaaaggagacccaa

SEQ ID NO: 135059 - DNA, 15 bp, Homo sapiens
aggaaaggagaccca

SEQ ID NO: 135060 - DNA, 15 bp, Homo sapiens
gaggaaaggagaccc

SEQ ID NO: 135061 - DNA, 15 bp, Homo sapiens
agaggaaaggagacc

SEQ ID NO: 135062 - DNA, 15 bp, Homo sapiens
cagaggaaaggagac

SEQ ID NO: 135063 - DNA, 15 bp, Homo sapiens
ccagaggaaaggaga

SEQ ID NO: 135064 - DNA, 15 bp, Homo sapiens
cccagaggaaaggag

SEQ ID NO: 135065 - DNA, 15 bp, Homo sapiens
ccccagaggaaagga

SEQ ID NO: 135066 - DNA, 15 bp, Homo sapiens
gccccagaggaaagg

SEQ ID NO: 135067 - DNA, 15 bp, Homo sapiens
agccccagaggaaag

SEQ ID NO: 135068 - DNA, 15 bp, Homo sapiens
gagccccagaggaaa

SEQ ID NO: 135069 - DNA, 15 bp, Homo sapiens
ggagccccagaggaa

SEQ ID NO: 135070 - DNA, 15 bp, Homo sapiens
aggagccccagagga

SEQ ID NO: 135071 - DNA, 15 bp, Homo sapiens
caggagccccagagg

SEQ ID NO: 135072 - DNA, 15 bp, Homo sapiens
acaggagccccagag

SEQ ID NO: 135073 - DNA, 15 bp, Homo sapiens
tacaggagccccaga

SEQ ID NO: 135074 - DNA, 15 bp, Homo sapiens
atacaggagccccag

SEQ ID NO: 135075 - DNA, 15 bp, Homo sapiens
catacaggagcccca

SEQ ID NO: 135076 - DNA, 15 bp, Homo sapiens
gcatacaggagcccc

SEQ ID NO: 135077 - DNA, 15 bp, Homo sapiens
ggcatacaggagccc

SEQ ID NO: 135078 - DNA, 15 bp, Homo sapiens
aggcatacaggagcc

SEQ ID NO: 135079 - DNA, 15 bp, Homo sapiens
gaggcatacaggagc

SEQ ID NO: 135080 - DNA, 15 bp, Homo sapiens
agaggcatacaggag

SEQ ID NO: 135081 - DNA, 15 bp, Homo sapiens
cagaggcatacagga

SEQ ID NO: 135082 - DNA, 15 bp, Homo sapiens
gcagaggcatacagg

SEQ ID NO: 135083 - DNA, 15 bp, Homo sapiens
agcagaggcatacag

SEQ ID NO: 135084 - DNA, 15 bp, Homo sapiens
cagcagaggcataca

SEQ ID NO: 135085 - DNA, 15 bp, Homo sapiens
acagcagaggcatac

SEQ ID NO: 135086 - DNA, 15 bp, Homo sapiens
gacagcagaggcata

SEQ ID NO: 135087 - DNA, 15 bp, Homo sapiens
tgacagcagaggcat

SEQ ID NO: 135088 - DNA, 15 bp, Homo sapiens
atgacagcagaggca

SEQ ID NO: 135089 - DNA, 15 bp, Homo sapiens
gatgacagcagaggc

SEQ ID NO: 135090 - DNA, 15 bp, Homo sapiens
agatgacagcagagg

SEQ ID NO: 135091 - DNA, 15 bp, Homo sapiens
gagatgacagcagag

SEQ ID NO: 135092 - DNA, 15 bp, Homo sapiens
ggagatgacagcaga

SEQ ID NO: 135093 - DNA, 15 bp, Homo sapiens
gggagatgacagcag

SEQ ID NO: 135094 - DNA, 15 bp, Homo sapiens
ggggagatgacagca

SEQ ID NO: 135095 - DNA, 15 bp, Homo sapiens
aggggagatgacagc

SEQ ID NO: 135096 - DNA, 15 bp, Homo sapiens
taggggagatgacag

SEQ ID NO: 135097 - DNA, 15 bp, Homo sapiens
ataggggagatgaca

SEQ ID NO: 135098 - DNA, 15 bp, Homo sapiens
aataggggagatgac

SEQ ID NO: 135099 - DNA, 15 bp, Homo sapiens
aaataggggagatga

SEQ ID NO: 135100 - DNA, 15 bp, Homo sapiens
aaaataggggagatg

SEQ ID NO: 135101 - DNA, 15 bp, Homo sapiens
caaaataggggagat

SEQ ID NO: 135102 - DNA, 15 bp, Homo sapiens
gcaaaataggggaga

SEQ ID NO: 135103 - DNA, 15 bp, Homo sapiens
agcaaaataggggag

SEQ ID NO: 135104 - DNA, 15 bp, Homo sapiens
cagcaaaatagggga

SEQ ID NO: 135105 - DNA, 15 bp, Homo sapiens
tcagcaaaatagggg

SEQ ID NO: 135106 - DNA, 15 bp, Homo sapiens
ttcagcaaaataggg

SEQ ID NO: 135107 - DNA, 15 bp, Homo sapiens
gttcagcaaaatagg

SEQ ID NO: 135108 - DNA, 15 bp, Homo sapiens
tgttcagcaaaatag

SEQ ID NO: 135109 - DNA, 15 bp, Homo sapiens
ctgttcagcaaaata

SEQ ID NO: 135110 - DNA, 15 bp, Homo sapiens
tctgttcagcaaaat

SEQ ID NO: 135111 - DNA, 15 bp, Homo sapiens
ttctgttcagcaaaa

SEQ ID NO: 135112 - DNA, 15 bp, Homo sapiens
tttctgttcagcaaa

SEQ ID NO: 135113 - DNA, 15 bp, Homo sapiens
ctttctgttcagcaa

SEQ ID NO: 135114 - DNA, 15 bp, Homo sapiens
tctttctgttcagca

SEQ ID NO: 135115 - DNA, 15 bp, Homo sapiens
ttctttctgttcagc

SEQ ID NO: 135116 - DNA, 15 bp, Homo sapiens
tttctttctgttcag

SEQ ID NO: 135117 - DNA, 15 bp, Homo sapiens
gtttctttctgttca

SEQ ID NO: 135118 - DNA, 15 bp, Homo sapiens
ggtttctttctgttc

SEQ ID NO: 135119 - DNA, 15 bp, Homo sapiens
tggtttctttctgtt

SEQ ID NO: 135120 - DNA, 15 bp, Homo sapiens
ctggtttctttctgt

SEQ ID NO: 135121 - DNA, 15 bp, Homo sapiens
tctggtttctttctg

SEQ ID NO: 135122 - DNA, 15 bp, Homo sapiens
ttctggtttctttct

SEQ ID NO: 135123 - DNA, 15 bp, Homo sapiens
tttctggtttctttc

SEQ ID NO: 135124 - DNA, 15 bp, Homo sapiens
ttttctggtttcttt

SEQ ID NO: 135125 - DNA, 15 bp, Homo sapiens
cttttctggtttctt

SEQ ID NO: 135126 - DNA, 15 bp, Homo sapiens
tcttttctggtttct

SEQ ID NO: 135127 - DNA, 15 bp, Homo sapiens
ttcttttctggtttc

SEQ ID NO: 135128 - DNA, 15 bp, Homo sapiens
tttcttttctggttt

SEQ ID NO: 135129 - DNA, 15 bp, Homo sapiens
ttttcttttctggtt

SEQ ID NO: 135130 - DNA, 15 bp, Homo sapiens
cttttcttttctggt

SEQ ID NO: 135131 - DNA, 15 bp, Homo sapiens
tcttttcttttctgg

SEQ ID NO: 135132 - DNA, 15 bp, Homo sapiens
ctcttttcttttctg

SEQ ID NO: 135133 - DNA, 15 bp, Homo sapiens
tctcttttcttttct

SEQ ID NO: 135134 - DNA, 15 bp, Homo sapiens
ctctcttttcttttc

SEQ ID NO: 135135 - DNA, 15 bp, Homo sapiens
gctctcttttctttt

SEQ ID NO: 135136 - DNA, 15 bp, Homo sapiens
tgctctcttttcttt

SEQ ID NO: 135137 - DNA, 15 bp, Homo sapiens
ttgctctcttttctt

SEQ ID NO: 135138 - DNA, 15 bp, Homo sapiens
tttgctctcttttct

SEQ ID NO: 135139 - DNA, 15 bp, Homo sapiens
ttttgctctcttttc

SEQ ID NO: 135140 - DNA, 15 bp, Homo sapiens
gttttgctctctttt

SEQ ID NO: 135141 - DNA, 15 bp, Homo sapiens
tgttttgctctcttt

SEQ ID NO: 135142 - DNA, 15 bp, Homo sapiens
gtgttttgctctctt

SEQ ID NO: 135143 - DNA, 15 bp, Homo sapiens
tgtgttttgctctct

SEQ ID NO: 135144 - DNA, 15 bp, Homo sapiens
gtgtgttttgctctc

SEQ ID NO: 135145 - DNA, 15 bp, Homo sapiens
tgtgtgttttgctct

SEQ ID NO: 135146 - DNA, 15 bp, Homo sapiens
ttgtgtgttttgctc

SEQ ID NO: 135147 - DNA, 15 bp, Homo sapiens
tttgtgtgttttgct

SEQ ID NO: 135148 - DNA, 15 bp, Homo sapiens
ctttgtgtgttttgc

SEQ ID NO: 135149 - DNA, 15 bp, Homo sapiens
cctttgtgtgttttg

SEQ ID NO: 135150 - DNA, 15 bp, Homo sapiens
tcctttgtgtgtttt

SEQ ID NO: 135151 - DNA, 15 bp, Homo sapiens
ttcctttgtgtgttt

SEQ ID NO: 135152 - DNA, 15 bp, Homo sapiens
cttcctttgtgtgtt

SEQ ID NO: 135153 - DNA, 15 bp, Homo sapiens
tcttcctttgtgtgt

SEQ ID NO: 135154 - DNA, 15 bp, Homo sapiens
ttcttcctttgtgtg

SEQ ID NO: 135155 - DNA, 15 bp, Homo sapiens
cttcttcctttgtgt

SEQ ID NO: 135156 - DNA, 15 bp, Homo sapiens
ccttcttcctttgtg

SEQ ID NO: 135157 - DNA, 15 bp, Homo sapiens
accttcttcctttgt

SEQ ID NO: 135158 - DNA, 15 bp, Homo sapiens
caccttcttcctttg

SEQ ID NO: 135159 - DNA, 15 bp, Homo sapiens
tcaccttcttccttt

SEQ ID NO: 135160 - DNA, 15 bp, Homo sapiens
ctcaccttcttcctt

SEQ ID NO: 135161 - DNA, 15 bp, Homo sapiens
cctcaccttcttcct

SEQ ID NO: 135162 - DNA, 15 bp, Homo sapiens
ccctcaccttcttcc

SEQ ID NO: 135163 - DNA, 15 bp, Homo sapiens
tccctcaccttcttc

SEQ ID NO: 135164 - DNA, 15 bp, Homo sapiens
ctccctcaccttctt

SEQ ID NO: 135165 - DNA, 15 bp, Homo sapiens
cctccctcaccttct

SEQ ID NO: 135166 - DNA, 15 bp, Homo sapiens
ccctccctcaccttc

SEQ ID NO: 135167 - DNA, 15 bp, Homo sapiens
gccctccctcacctt

SEQ ID NO: 135168 - DNA, 15 bp, Homo sapiens
tgccctccctcacct

SEQ ID NO: 135169 - DNA, 15 bp, Homo sapiens
ctgccctccctcacc

SEQ ID NO: 135170 - DNA, 15 bp, Homo sapiens
cctgccctccctcac

SEQ ID NO: 135171 - DNA, 15 bp, Homo sapiens
tcctgccctccctca

SEQ ID NO: 135172 - DNA, 15 bp, Homo sapiens
ctcctgccctccctc

SEQ ID NO: 135173 - DNA, 15 bp, Homo sapiens
cctcctgccctccct

SEQ ID NO: 135174 - DNA, 15 bp, Homo sapiens
acctcctgccctccc

SEQ ID NO: 135175 - DNA, 15 bp, Homo sapiens
tacctcctgccctcc

SEQ ID NO: 135176 - DNA, 15 bp, Homo sapiens
ctacctcctgccctc

SEQ ID NO: 135177 - DNA, 15 bp, Homo sapiens
tctacctcctgccct

SEQ ID NO: 135178 - DNA, 15 bp, Homo sapiens
ctctacctcctgccc

SEQ ID NO: 135179 - DNA, 15 bp, Homo sapiens
cctctacctcctgcc

SEQ ID NO: 135180 - DNA, 15 bp, Homo sapiens
ccctctacctcctgc

SEQ ID NO: 135181 - DNA, 15 bp, Homo sapiens
tccctctacctcctg

SEQ ID NO: 135182 - DNA, 15 bp, Homo sapiens
ctccctctacctcct

SEQ ID NO: 135183 - DNA, 15 bp, Homo sapiens
tctccctctacctcc

SEQ ID NO: 135184 - DNA, 15 bp, Homo sapiens
ctctccctctacctc

SEQ ID NO: 135185 - DNA, 15 bp, Homo sapiens
cctctccctctacct

SEQ ID NO: 135186 - DNA, 15 bp, Homo sapiens
acctctccctctacc

SEQ ID NO: 135187 - DNA, 15 bp, Homo sapiens
aacctctccctctac

SEQ ID NO: 135188 - DNA, 15 bp, Homo sapiens
caacctctccctcta

SEQ ID NO: 135189 - DNA, 15 bp, Homo sapiens
tcaacctctccctct

SEQ ID NO: 135190 - DNA, 15 bp, Homo sapiens
gtcaacctctccctc

SEQ ID NO: 135191 - DNA, 15 bp, Homo sapiens
tgtcaacctctccct

SEQ ID NO: 135192 - DNA, 15 bp, Homo sapiens
gtgtcaacctctccc

SEQ ID NO: 135193 - DNA, 15 bp, Homo sapiens
ggtgtcaacctctcc

SEQ ID NO: 135194 - DNA, 15 bp, Homo sapiens
tggtgtcaacctctc

SEQ ID NO: 135195 - DNA, 15 bp, Homo sapiens
ttggtgtcaacctct

SEQ ID NO: 135196 - DNA, 15 bp, Homo sapiens
cttggtgtcaacctc

SEQ ID NO: 135197 - DNA, 15 bp, Homo sapiens
ccttggtgtcaacct

SEQ ID NO: 135198 - DNA, 15 bp, Homo sapiens
tccttggtgtcaacc

SEQ ID NO: 135199 - DNA, 15 bp, Homo sapiens
ttccttggtgtcaac

SEQ ID NO: 135200 - DNA, 15 bp, Homo sapiens
tttccttggtgtcaa

SEQ ID NO: 135201 - DNA, 15 bp, Homo sapiens
ttttccttggtgtca

SEQ ID NO: 135202 - DNA, 15 bp, Homo sapiens
tttttccttggtgtc

SEQ ID NO: 135203 - DNA, 15 bp, Homo sapiens
ttttttccttggtgt

SEQ ID NO: 135204 - DNA, 15 bp, Homo sapiens
cttttttccttggtg

SEQ ID NO: 135205 - DNA, 15 bp, Homo sapiens
tcttttttccttggt

SEQ ID NO: 135206 - DNA, 15 bp, Homo sapiens
ttcttttttccttgg

SEQ ID NO: 135207 - DNA, 15 bp, Homo sapiens
attcttttttccttg

SEQ ID NO: 135208 - DNA, 15 bp, Homo sapiens
aattcttttttcctt

SEQ ID NO: 135209 - DNA, 15 bp, Homo sapiens
aaattcttttttcct

SEQ ID NO: 135210 - DNA, 15 bp, Homo sapiens
gaaattcttttttcc

SEQ ID NO: 135211 - DNA, 15 bp, Homo sapiens
agaaattcttttttc

SEQ ID NO: 135212 - DNA, 15 bp, Homo sapiens
gagaaattctttttt

SEQ ID NO: 135213 - DNA, 15 bp, Homo sapiens
ggagaaattcttttt

SEQ ID NO: 135214 - DNA, 15 bp, Homo sapiens
aggagaaattctttt

SEQ ID NO: 135215 - DNA, 15 bp, Homo sapiens
gaggagaaattcttt

SEQ ID NO: 135216 - DNA, 15 bp, Homo sapiens
agaggagaaattctt

SEQ ID NO: 135217 - DNA, 15 bp, Homo sapiens
cagaggagaaattct

SEQ ID NO: 135218 - DNA, 15 bp, Homo sapiens
tcagaggagaaattc

SEQ ID NO: 135219 - DNA, 15 bp, Homo sapiens
ctcagaggagaaatt

SEQ ID NO: 135220 - DNA, 15 bp, Homo sapiens
tctcagaggagaaat

SEQ ID NO: 135221 - DNA, 15 bp, Homo sapiens
ctctcagaggagaaa

SEQ ID NO: 135222 - DNA, 15 bp, Homo sapiens
actctcagaggagaa

SEQ ID NO: 135223 - DNA, 15 bp, Homo sapiens
aactctcagaggaga

SEQ ID NO: 135224 - DNA, 15 bp, Homo sapiens
taactctcagaggag

SEQ ID NO: 135225 - DNA, 15 bp, Homo sapiens
ctaactctcagagga

SEQ ID NO: 135226 - DNA, 15 bp, Homo sapiens
tctaactctcagagg

SEQ ID NO: 135227 - DNA, 15 bp, Homo sapiens
ctctaactctcagag

SEQ ID NO: 135228 - DNA, 15 bp, Homo sapiens
cctctaactctcaga

SEQ ID NO: 135229 - DNA, 15 bp, Homo sapiens
acctctaactctcag

SEQ ID NO: 135230 - DNA, 15 bp, Homo sapiens
aacctctaactctca

SEQ ID NO: 135231 - DNA, 15 bp, Homo sapiens
caacctctaactctc

SEQ ID NO: 135232 - DNA, 15 bp, Homo sapiens
ccaacctctaactct

SEQ ID NO: 135233 - DNA, 15 bp, Homo sapiens
tccaacctctaactc

SEQ ID NO: 135234 - DNA, 15 bp, Homo sapiens
atccaacctctaact

SEQ ID NO: 135235 - DNA, 15 bp, Homo sapiens
tatccaacctctaac

SEQ ID NO: 135236 - DNA, 15 bp, Homo sapiens
ttatccaacctctaa

SEQ ID NO: 135237 - DNA, 15 bp, Homo sapiens
tttatccaacctcta

SEQ ID NO: 135238 - DNA, 15 bp, Homo sapiens
atttatccaacctct

SEQ ID NO: 135239 - DNA, 15 bp, Homo sapiens
tatttatccaacctc

SEQ ID NO: 135240 - DNA, 15 bp, Homo sapiens
ctatttatccaacct

SEQ ID NO: 135241 - DNA, 15 bp, Homo sapiens
gctatttatccaacc

SEQ ID NO: 135242 - DNA, 15 bp, Homo sapiens
agctatttatccaac

SEQ ID NO: 135243 - DNA, 15 bp, Homo sapiens
tagctatttatccaa

SEQ ID NO: 135244 - DNA, 15 bp, Homo sapiens
ttagctatttatcca

SEQ ID NO: 135245 - DNA, 15 bp, Homo sapiens
attagctatttatcc

SEQ ID NO: 135246 - DNA, 15 bp, Homo sapiens
aattagctatttatc

SEQ ID NO: 135247 - DNA, 15 bp, Homo sapiens
caattagctatttat

SEQ ID NO: 135248 - DNA, 15 bp, Homo sapiens
ccaattagctattta

SEQ ID NO: 135249 - DNA, 15 bp, Homo sapiens
tccaattagctattt

SEQ ID NO: 135250 - DNA, 15 bp, Homo sapiens
atccaattagctatt

SEQ ID NO: 135251 - DNA, 15 bp, Homo sapiens
catccaattagctat

SEQ ID NO: 135252 - DNA, 15 bp, Homo sapiens
ccatccaattagcta

SEQ ID NO: 135253 - DNA, 15 bp, Homo sapiens
tccatccaattagct

SEQ ID NO: 135254 - DNA, 15 bp, Homo sapiens
atccatccaattagc

SEQ ID NO: 135255 - DNA, 15 bp, Homo sapiens
aatccatccaattag

SEQ ID NO: 135256 - DNA, 15 bp, Homo sapiens
aaatccatccaatta

SEQ ID NO: 135257 - DNA, 15 bp, Homo sapiens
aaaatccatccaatt

SEQ ID NO: 135258 - DNA, 15 bp, Homo sapiens
caaaatccatccaat

SEQ ID NO: 135259 - DNA, 15 bp, Homo sapiens
ccaaaatccatccaa

SEQ ID NO: 135260 - DNA, 15 bp, Homo sapiens
accaaaatccatcca

SEQ ID NO: 135261 - DNA, 15 bp, Homo sapiens
aaccaaaatccatcc

SEQ ID NO: 135262 - DNA, 15 bp, Homo sapiens
aaaccaaaatccatc

SEQ ID NO: 135263 - DNA, 15 bp, Homo sapiens
aaaaccaaaatccat

SEQ ID NO: 135264 - DNA, 15 bp, Homo sapiens
taaaaccaaaatcca

SEQ ID NO: 135265 - DNA, 15 bp, Homo sapiens
ctaaaaccaaaatcc

SEQ ID NO: 135266 - DNA, 15 bp, Homo sapiens
actaaaaccaaaatc

SEQ ID NO: 135267 - DNA, 15 bp, Homo sapiens
aactaaaaccaaaat

SEQ ID NO: 135268 - DNA, 15 bp, Homo sapiens
taactaaaaccaaaa

SEQ ID NO: 135269 - DNA, 15 bp, Homo sapiens
gtaactaaaaccaaa

SEQ ID NO: 135270 - DNA, 15 bp, Homo sapiens
ggtaactaaaaccaa

SEQ ID NO: 135271 - DNA, 15 bp, Homo sapiens
aggtaactaaaacca

SEQ ID NO: 135272 - DNA, 15 bp, Homo sapiens
gaggtaactaaaacc

SEQ ID NO: 135273 - DNA, 15 bp, Homo sapiens
tgaggtaactaaaac

SEQ ID NO: 135274 - DNA, 15 bp, Homo sapiens
gtgaggtaactaaaa

SEQ ID NO: 135275 - DNA, 15 bp, Homo sapiens
ggtgaggtaactaaa

SEQ ID NO: 135276 - DNA, 15 bp, Homo sapiens
aggtgaggtaactaa

SEQ ID NO: 135277 - DNA, 15 bp, Homo sapiens
aaggtgaggtaacta

SEQ ID NO: 135278 - DNA, 15 bp, Homo sapiens
aaaggtgaggtaact

SEQ ID NO: 135279 - DNA, 15 bp, Homo sapiens
caaaggtgaggtaac

SEQ ID NO: 135280 - DNA, 15 bp, Homo sapiens
acaaaggtgaggtaa

SEQ ID NO: 135281 - DNA, 15 bp, Homo sapiens
gacaaaggtgaggta

SEQ ID NO: 135282 - DNA, 15 bp, Homo sapiens
agacaaaggtgaggt

SEQ ID NO: 135283 - DNA, 15 bp, Homo sapiens
aagacaaaggtgagg

SEQ ID NO: 135284 - DNA, 15 bp, Homo sapiens
taagacaaaggtgag

SEQ ID NO: 135285 - DNA, 15 bp, Homo sapiens
ttaagacaaaggtga

SEQ ID NO: 135286 - DNA, 15 bp, Homo sapiens
attaagacaaaggtg

SEQ ID NO: 135287 - DNA, 15 bp, Homo sapiens
cattaagacaaaggt

SEQ ID NO: 135288 - DNA, 15 bp, Homo sapiens
tcattaagacaaagg

SEQ ID NO: 135289 - DNA, 15 bp, Homo sapiens
ttcattaagacaaag

SEQ ID NO: 135290 - DNA, 15 bp, Homo sapiens
attcattaagacaaa

SEQ ID NO: 135291 - DNA, 15 bp, Homo sapiens
tattcattaagacaa

SEQ ID NO: 135292 - DNA, 15 bp, Homo sapiens
ttattcattaagaca

SEQ ID NO: 135293 - DNA, 15 bp, Homo sapiens
tttattcattaagac

SEQ ID NO: 135294 - DNA, 15 bp, Homo sapiens
atttattcattaaga

SEQ ID NO: 135295 - DNA, 15 bp, Homo sapiens
gatttattcattaag

SEQ ID NO: 135296 - DNA, 15 bp, Homo sapiens
tgatttattcattaa

SEQ ID NO: 135297 - DNA, 15 bp, Homo sapiens
atgatttattcatta

SEQ ID NO: 135298 - DNA, 15 bp, Homo sapiens
catgatttattcatt

SEQ ID NO: 135299 - DNA, 15 bp, Homo sapiens
acatgatttattcat

SEQ ID NO: 135300 - DNA, 15 bp, Homo sapiens
gacatgatttattca

SEQ ID NO: 135301 - DNA, 15 bp, Homo sapiens
tgacatgatttattc

SEQ ID NO: 135302 - DNA, 15 bp, Homo sapiens
ttgacatgatttatt

SEQ ID NO: 135303 - DNA, 15 bp, Homo sapiens
tttgacatgatttat

SEQ ID NO: 135304 - DNA, 15 bp, Homo sapiens
atttgacatgattta

SEQ ID NO: 135305 - DNA, 15 bp, Homo sapiens
catttgacatgattt

SEQ ID NO: 135306 - DNA, 15 bp, Homo sapiens
tcatttgacatgatt

SEQ ID NO: 135307 - DNA, 15 bp, Homo sapiens
gtcatttgacatgat

SEQ ID NO: 135308 - DNA, 15 bp, Homo sapiens
agtcatttgacatga

SEQ ID NO: 135309 - DNA, 15 bp, Homo sapiens
aagtcatttgacatg

SEQ ID NO: 135310 - DNA, 15 bp, Homo sapiens
gaagtcatttgacat

SEQ ID NO: 135311 - DNA, 15 bp, Homo sapiens
tgaagtcatttgaca

SEQ ID NO: 135312 - DNA, 15 bp, Homo sapiens
gtgaagtcatttgac

SEQ ID NO: 135313 - DNA, 15 bp, Homo sapiens
ggtgaagtcatttga

SEQ ID NO: 135314 - DNA, 15 bp, Homo sapiens
aggtgaagtcatttg

SEQ ID NO: 135315 - DNA, 15 bp, Homo sapiens
gaggtgaagtcattt

SEQ ID NO: 135316 - DNA, 15 bp, Homo sapiens
ggaggtgaagtcatt

SEQ ID NO: 135317 - DNA, 15 bp, Homo sapiens
tggaggtgaagtcat

SEQ ID NO: 135318 - DNA, 15 bp, Homo sapiens
ttggaggtgaagtca

SEQ ID NO: 135319 - DNA, 15 bp, Homo sapiens
cttggaggtgaagtc

SEQ ID NO: 135320 - DNA, 15 bp, Homo sapiens
ccttggaggtgaagt

SEQ ID NO: 135321 - DNA, 15 bp, Homo sapiens
tccttggaggtgaag

SEQ ID NO: 135322 - DNA, 15 bp, Homo sapiens
ctccttggaggtgaa

SEQ ID NO: 135323 - DNA, 15 bp, Homo sapiens
actccttggaggtga

SEQ ID NO: 135324 - DNA, 15 bp, Homo sapiens
tactccttggaggtg

SEQ ID NO: 135325 - DNA, 15 bp, Homo sapiens
ttactccttggaggt

SEQ ID NO: 135326 - DNA, 15 bp, Homo sapiens
tttactccttggagg

SEQ ID NO: 135327 - DNA, 15 bp, Homo sapiens
ctttactccttggag

SEQ ID NO: 135328 - DNA, 15 bp, Homo sapiens
gctttactccttgga

SEQ ID NO: 135329 - DNA, 15 bp, Homo sapiens
tgctttactccttgg

SEQ ID NO: 135330 - DNA, 15 bp, Homo sapiens
atgctttactccttg

SEQ ID NO: 135331 - DNA, 15 bp, Homo sapiens
aatgctttactcctt

SEQ ID NO: 135332 - DNA, 15 bp, Homo sapiens
gaatgctttactcct

SEQ ID NO: 135333 - DNA, 15 bp, Homo sapiens
agaatgctttactcc

SEQ ID NO: 135334 - DNA, 15 bp, Homo sapiens
tagaatgctttactc

SEQ ID NO: 135335 - DNA, 15 bp, Homo sapiens
gtagaatgctttact

SEQ ID NO: 135336 - DNA, 15 bp, Homo sapiens
ggtagaatgctttac

SEQ ID NO: 135337 - DNA, 15 bp, Homo sapiens
tggtagaatgcttta

SEQ ID NO: 135338 - DNA, 15 bp, Homo sapiens
ctggtagaatgcttt

SEQ ID NO: 135339 - DNA, 15 bp, Homo sapiens
actggtagaatgctt

SEQ ID NO: 135340 - DNA, 15 bp, Homo sapiens
cactggtagaatgct

SEQ ID NO: 135341 - DNA, 15 bp, Homo sapiens
ccactggtagaatgc

SEQ ID NO: 135342 - DNA, 15 bp, Homo sapiens
cccactggtagaatg

SEQ ID NO: 135343 - DNA, 15 bp, Homo sapiens
acccactggtagaat

SEQ ID NO: 135344 - DNA, 15 bp, Homo sapiens
tacccactggtagaa

SEQ ID NO: 135345 - DNA, 15 bp, Homo sapiens
ctacccactggtaga

SEQ ID NO: 135346 - DNA, 15 bp, Homo sapiens
tctacccactggtag

SEQ ID NO: 135347 - DNA, 15 bp, Homo sapiens
ttctacccactggta

SEQ ID NO: 135348 - DNA, 15 bp, Homo sapiens
attctacccactggt

SEQ ID NO: 135349 - DNA, 15 bp, Homo sapiens
cattctacccactgg

SEQ ID NO: 135350 - DNA, 15 bp, Homo sapiens
tcattctacccactg

SEQ ID NO: 135351 - DNA, 15 bp, Homo sapiens
ctcattctacccact

SEQ ID NO: 135352 - DNA, 15 bp, Homo sapiens
actcattctacccac

SEQ ID NO: 135353 - DNA, 15 bp, Homo sapiens
aactcattctaccca

SEQ ID NO: 135354 - DNA, 15 bp, Homo sapiens
gaactcattctaccc

SEQ ID NO: 135355 - DNA, 15 bp, Homo sapiens
tgaactcattctacc

SEQ ID NO: 135356 - DNA, 15 bp, Homo sapiens
gtgaactcattctac

SEQ ID NO: 135357 - DNA, 15 bp, Homo sapiens
cgtgaactcattcta

SEQ ID NO: 135358 - DNA, 15 bp, Homo sapiens
acgtgaactcattct

SEQ ID NO: 135359 - DNA, 15 bp, Homo sapiens
aacgtgaactcattc

SEQ ID NO: 135360 - DNA, 15 bp, Homo sapiens
aaacgtgaactcatt

SEQ ID NO: 135361 - DNA, 15 bp, Homo sapiens
caaacgtgaactcat

SEQ ID NO: 135362 - DNA, 15 bp, Homo sapiens
ccaaacgtgaactca

SEQ ID NO: 135363 - DNA, 15 bp, Homo sapiens
tccaaacgtgaactc

SEQ ID NO: 135364 - DNA, 15 bp, Homo sapiens
ttccaaacgtgaact

SEQ ID NO: 135365 - DNA, 15 bp, Homo sapiens
tttccaaacgtgaac

SEQ ID NO: 135366 - DNA, 15 bp, Homo sapiens
ttttccaaacgtgaa

SEQ ID NO: 135367 - DNA, 15 bp, Homo sapiens
attttccaaacgtga

SEQ ID NO: 135368 - DNA, 15 bp, Homo sapiens
aattttccaaacgtg

SEQ ID NO: 135369 - DNA, 15 bp, Homo sapiens
aaattttccaaacgt

SEQ ID NO: 135370 - DNA, 15 bp, Homo sapiens
aaaattttccaaacg

SEQ ID NO: 135371 - DNA, 15 bp, Homo sapiens
taaaattttccaaac

SEQ ID NO: 135372 - DNA, 15 bp, Homo sapiens
ctaaaattttccaaa

SEQ ID NO: 135373 - DNA, 15 bp, Homo sapiens
gctaaaattttccaa

SEQ ID NO: 135374 - DNA, 15 bp, Homo sapiens
agctaaaattttcca

SEQ ID NO: 135375 - DNA, 15 bp, Homo sapiens
gagctaaaattttcc

SEQ ID NO: 135376 - DNA, 15 bp, Homo sapiens
agagctaaaattttc

SEQ ID NO: 135377 - DNA, 15 bp, Homo sapiens
aagagctaaaatttt

SEQ ID NO: 135378 - DNA, 15 bp, Homo sapiens
gaagagctaaaattt

SEQ ID NO: 135379 - DNA, 15 bp, Homo sapiens
tgaagagctaaaatt

SEQ ID NO: 135380 - DNA, 15 bp, Homo sapiens
ttgaagagctaaaat

SEQ ID NO: 135381 - DNA, 15 bp, Homo sapiens
tttgaagagctaaaa

SEQ ID NO: 135382 - DNA, 15 bp, Homo sapiens
gtttgaagagctaaa

SEQ ID NO: 135383 - DNA, 15 bp, Homo sapiens
cgtttgaagagctaa

SEQ ID NO: 135384 - DNA, 15 bp, Homo sapiens
tcgtttgaagagcta

SEQ ID NO: 135385 - DNA, 15 bp, Homo sapiens
ctcgtttgaagagct

SEQ ID NO: 135386 - DNA, 15 bp, Homo sapiens
tctcgtttgaagagc

SEQ ID NO: 135387 - DNA, 15 bp, Homo sapiens
gtctcgtttgaagag

SEQ ID NO: 135388 - DNA, 15 bp, Homo sapiens
tgtctcgtttgaaga

SEQ ID NO: 135389 - DNA, 15 bp, Homo sapiens
atgtctcgtttgaag

SEQ ID NO: 135390 - DNA, 15 bp, Homo sapiens
aatgtctcgtttgaa

SEQ ID NO: 135391 - DNA, 15 bp, Homo sapiens
gaatgtctcgtttga

SEQ ID NO: 135392 - DNA, 15 bp, Homo sapiens
agaatgtctcgtttg

SEQ ID NO: 135393 - DNA, 15 bp, Homo sapiens
cagaatgtctcgttt

SEQ ID NO: 135394 - DNA, 15 bp, Homo sapiens
acagaatgtctcgtt

SEQ ID NO: 135395 - DNA, 15 bp, Homo sapiens
cacagaatgtctcgt

SEQ ID NO: 135396 - DNA, 15 bp, Homo sapiens
ccacagaatgtctcg

SEQ ID NO: 135397 - DNA, 15 bp, Homo sapiens
tccacagaatgtctc

SEQ ID NO: 135398 - DNA, 15 bp, Homo sapiens
ttccacagaatgtct

SEQ ID NO: 135399 - DNA, 15 bp, Homo sapiens
attccacagaatgtc

SEQ ID NO: 135400 - DNA, 15 bp, Homo sapiens
cattccacagaatgt

SEQ ID NO: 135401 - DNA, 15 bp, Homo sapiens
tcattccacagaatg

SEQ ID NO: 135402 - DNA, 15 bp, Homo sapiens
ttcattccacagaat

SEQ ID NO: 135403 - DNA, 15 bp, Homo sapiens
gttcattccacagaa

SEQ ID NO: 135404 - DNA, 15 bp, Homo sapiens
agttcattccacaga

SEQ ID NO: 135405 - DNA, 15 bp, Homo sapiens
cagttcattccacag

SEQ ID NO: 135406 - DNA, 15 bp, Homo sapiens
tcagttcattccaca

SEQ ID NO: 135407 - DNA, 15 bp, Homo sapiens
atcagttcattccac

SEQ ID NO: 135408 - DNA, 15 bp, Homo sapiens
tatcagttcattcca

SEQ ID NO: 135409 - DNA, 15 bp, Homo sapiens
ctatcagttcattcc

SEQ ID NO: 135410 - DNA, 15 bp, Homo sapiens
gctatcagttcattc

SEQ ID NO: 135411 - DNA, 15 bp, Homo sapiens
tgctatcagttcatt

SEQ ID NO: 135412 - DNA, 15 bp, Homo sapiens
gtgctatcagttcat

SEQ ID NO: 135413 - DNA, 15 bp, Homo sapiens
cgtgctatcagttca

SEQ ID NO: 135414 - DNA, 15 bp, Homo sapiens
gcgtgctatcagttc

SEQ ID NO: 135415 - DNA, 15 bp, Homo sapiens
cgcgtgctatcagtt

SEQ ID NO: 135416 - DNA, 15 bp, Homo sapiens
ccgcgtgctatcagt

SEQ ID NO: 135417 - DNA, 15 bp, Homo sapiens
gccgcgtgctatcag

SEQ ID NO: 135418 - DNA, 15 bp, Homo sapiens
ggccgcgtgctatca

SEQ ID NO: 135419 - DNA, 15 bp, Homo sapiens
aggccgcgtgctatc

SEQ ID NO: 135420 - DNA, 15 bp, Homo sapiens
caggccgcgtgctat

SEQ ID NO: 135421 - DNA, 15 bp, Homo sapiens
acaggccgcgtgcta

SEQ ID NO: 135422 - DNA, 15 bp, Homo sapiens
cacaggccgcgtgct

SEQ ID NO: 135423 - DNA, 15 bp, Homo sapiens
acacaggccgcgtgc

SEQ ID NO: 135424 - DNA, 15 bp, Homo sapiens
cacacaggccgcgtg

SEQ ID NO: 135425 - DNA, 15 bp, Homo sapiens
ccacacaggccgcgt

SEQ ID NO: 135426 - DNA, 15 bp, Homo sapiens
gccacacaggccgcg

SEQ ID NO: 135427 - DNA, 15 bp, Homo sapiens
agccacacaggccgc

SEQ ID NO: 135428 - DNA, 15 bp, Homo sapiens
gagccacacaggccg

SEQ ID NO: 135429 - DNA, 15 bp, Homo sapiens
tgagccacacaggcc

SEQ ID NO: 135430 - DNA, 15 bp, Homo sapiens
ctgagccacacaggc

SEQ ID NO: 135431 - DNA, 15 bp, Homo sapiens
tctgagccacacagg

SEQ ID NO: 135432 - DNA, 15 bp, Homo sapiens
ctctgagccacacag

SEQ ID NO: 135433 - DNA, 15 bp, Homo sapiens
cctctgagccacaca

SEQ ID NO: 135434 - DNA, 15 bp, Homo sapiens
acctctgagccacac

SEQ ID NO: 135435 - DNA, 15 bp, Homo sapiens
cacctctgagccaca

SEQ ID NO: 135436 - DNA, 15 bp, Homo sapiens
tcacctctgagccac

SEQ ID NO: 135437 - DNA, 15 bp, Homo sapiens
ttcacctctgagcca

SEQ ID NO: 135438 - DNA, 15 bp, Homo sapiens
cttcacctctgagcc

SEQ ID NO: 135439 - DNA, 15 bp, Homo sapiens
gcttcacctctgagc

SEQ ID NO: 135440 - DNA, 15 bp, Homo sapiens
cgcttcacctctgag

SEQ ID NO: 135441 - DNA, 15 bp, Homo sapiens
acgcttcacctctga

SEQ ID NO: 135442 - DNA, 15 bp, Homo sapiens
aacgcttcacctctg

SEQ ID NO: 135443 - DNA, 15 bp, Homo sapiens
caacgcttcacctct

SEQ ID NO: 135444 - DNA, 15 bp, Homo sapiens
ccaacgcttcacctc

SEQ ID NO: 135445 - DNA, 15 bp, Homo sapiens
tccaacgcttcacct

SEQ ID NO: 135446 - DNA, 15 bp, Homo sapiens
ttccaacgcttcacc

SEQ ID NO: 135447 - DNA, 15 bp, Homo sapiens
cttccaacgcttcac

SEQ ID NO: 135448 - DNA, 15 bp, Homo sapiens
ccttccaacgcttca

SEQ ID NO: 135449 - DNA, 15 bp, Homo sapiens
cccttccaacgcttc

SEQ ID NO: 135450 - DNA, 15 bp, Homo sapiens
acccttccaacgctt

SEQ ID NO: 135451 - DNA, 15 bp, Homo sapiens
aacccttccaacgct

SEQ ID NO: 135452 - DNA, 15 bp, Homo sapiens
aaacccttccaacgc

SEQ ID NO: 135453 - DNA, 15 bp, Homo sapiens
caaacccttccaacg

SEQ ID NO: 135454 - DNA, 15 bp, Homo sapiens
acaaacccttccaac

SEQ ID NO: 135455 - DNA, 15 bp, Homo sapiens
cacaaacccttccaa

SEQ ID NO: 135456 - DNA, 15 bp, Homo sapiens
ccacaaacccttcca

SEQ ID NO: 135457 - DNA, 15 bp, Homo sapiens
cccacaaacccttcc

SEQ ID NO: 135458 - DNA, 15 bp, Homo sapiens
tcccacaaacccttc

SEQ ID NO: 135459 - DNA, 15 bp, Homo sapiens
ctcccacaaaccctt

SEQ ID NO: 135460 - DNA, 15 bp, Homo sapiens
tctcccacaaaccct

SEQ ID NO: 135461 - DNA, 15 bp, Homo sapiens
atctcccacaaaccc

SEQ ID NO: 135462 - DNA, 15 bp, Homo sapiens
catctcccacaaacc

SEQ ID NO: 135463 - DNA, 15 bp, Homo sapiens
acatctcccacaaac

SEQ ID NO: 135464 - DNA, 15 bp, Homo sapiens
aacatctcccacaaa

SEQ ID NO: 135465 - DNA, 15 bp, Homo sapiens
gaacatctcccacaa

SEQ ID NO: 135466 - DNA, 15 bp, Homo sapiens
agaacatctcccaca

SEQ ID NO: 135467 - DNA, 15 bp, Homo sapiens
aagaacatctcccac

SEQ ID NO: 135468 - DNA, 15 bp, Homo sapiens
aaagaacatctccca

SEQ ID NO: 135469 - DNA, 15 bp, Homo sapiens
caaagaacatctccc

SEQ ID NO: 135470 - DNA, 15 bp, Homo sapiens
acaaagaacatctcc

SEQ ID NO: 135471 - DNA, 15 bp, Homo sapiens
cacaaagaacatctc

SEQ ID NO: 135472 - DNA, 15 bp, Homo sapiens
acacaaagaacatct

SEQ ID NO: 135473 - DNA, 15 bp, Homo sapiens
cacacaaagaacatc

SEQ ID NO: 135474 - DNA, 15 bp, Homo sapiens
gcacacaaagaacat

SEQ ID NO: 135475 - DNA, 15 bp, Homo sapiens
agcacacaaagaaca

SEQ ID NO: 135476 - DNA, 15 bp, Homo sapiens
aagcacacaaagaac

SEQ ID NO: 135477 - DNA, 15 bp, Homo sapiens
caagcacacaaagaa

SEQ ID NO: 135478 - DNA, 15 bp, Homo sapiens
acaagcacacaaaga

SEQ ID NO: 135479 - DNA, 15 bp, Homo sapiens
aacaagcacacaaag

SEQ ID NO: 135480 - DNA, 15 bp, Homo sapiens
taacaagcacacaaa

SEQ ID NO: 135481 - DNA, 15 bp, Homo sapiens
ttaacaagcacacaa

SEQ ID NO: 135482 - DNA, 15 bp, Homo sapiens
gttaacaagcacaca

SEQ ID NO: 135483 - DNA, 15 bp, Homo sapiens
ggttaacaagcacac

SEQ ID NO: 135484 - DNA, 15 bp, Homo sapiens
tggttaacaagcaca

SEQ ID NO: 135485 - DNA, 15 bp, Homo sapiens
ttggttaacaagcac

SEQ ID NO: 135486 - DNA, 15 bp, Homo sapiens
cttggttaacaagca

SEQ ID NO: 135487 - DNA, 15 bp, Homo sapiens
tcttggttaacaagc

SEQ ID NO: 135488 - DNA, 15 bp, Homo sapiens
ctcttggttaacaag

SEQ ID NO: 135489 - DNA, 15 bp, Homo sapiens
gctcttggttaacaa

SEQ ID NO: 135490 - DNA, 15 bp, Homo sapiens
tgctcttggttaaca

SEQ ID NO: 135491 - DNA, 15 bp, Homo sapiens
ctgctcttggttaac

SEQ ID NO: 135492 - DNA, 15 bp, Homo sapiens
tctgctcttggttaa

SEQ ID NO: 135493 - DNA, 15 bp, Homo sapiens
ttctgctcttggtta

SEQ ID NO: 135494 - DNA, 15 bp, Homo sapiens
attctgctcttggtt

SEQ ID NO: 135495 - DNA, 15 bp, Homo sapiens
aattctgctcttggt

SEQ ID NO: 135496 - DNA, 15 bp, Homo sapiens
gaattctgctcttgg

SEQ ID NO: 135497 - DNA, 15 bp, Homo sapiens
agaattctgctcttg

SEQ ID NO: 135498 - DNA, 15 bp, Homo sapiens
cagaattctgctctt

SEQ ID NO: 135499 - DNA, 15 bp, Homo sapiens
gcagaattctgctct

SEQ ID NO: 135500 - DNA, 15 bp, Homo sapiens
agcagaattctgctc

SEQ ID NO: 135501 - DNA, 15 bp, Homo sapiens
gagcagaattctgct

SEQ ID NO: 135502 - DNA, 15 bp, Homo sapiens
ggagcagaattctgc

SEQ ID NO: 135503 - DNA, 15 bp, Homo sapiens
aggagcagaattctg

SEQ ID NO: 135504 - DNA, 15 bp, Homo sapiens
gaggagcagaattct

SEQ ID NO: 135505 - DNA, 15 bp, Homo sapiens
agaggagcagaattc

SEQ ID NO: 135506 - DNA, 15 bp, Homo sapiens
aagaggagcagaatt

SEQ ID NO: 135507 - DNA, 15 bp, Homo sapiens
aaagaggagcagaat

SEQ ID NO: 135508 - DNA, 15 bp, Homo sapiens
caaagaggagcagaa

SEQ ID NO: 135509 - DNA, 15 bp, Homo sapiens
ccaaagaggagcaga

SEQ ID NO: 135510 - DNA, 15 bp, Homo sapiens
cccaaagaggagcag

SEQ ID NO: 135511 - DNA, 15 bp, Homo sapiens
tcccaaagaggagca

SEQ ID NO: 135512 - DNA, 15 bp, Homo sapiens
ctcccaaagaggagc

SEQ ID NO: 135513 - DNA, 15 bp, Homo sapiens
tctcccaaagaggag

SEQ ID NO: 135514 - DNA, 15 bp, Homo sapiens
ttctcccaaagagga

SEQ ID NO: 135515 - DNA, 15 bp, Homo sapiens
cttctcccaaagagg

SEQ ID NO: 135516 - DNA, 15 bp, Homo sapiens
acttctcccaaagag

SEQ ID NO: 135517 - DNA, 15 bp, Homo sapiens
aacttctcccaaaga

SEQ ID NO: 135518 - DNA, 15 bp, Homo sapiens
caacttctcccaaag

SEQ ID NO: 135519 - DNA, 15 bp, Homo sapiens
gcaacttctcccaaa

SEQ ID NO: 135520 - DNA, 15 bp, Homo sapiens
ggcaacttctcccaa

SEQ ID NO: 135521 - DNA, 15 bp, Homo sapiens
tggcaacttctccca

SEQ ID NO: 135522 - DNA, 15 bp, Homo sapiens
gtggcaacttctccc

SEQ ID NO: 135523 - DNA, 15 bp, Homo sapiens
tgtggcaacttctcc

SEQ ID NO: 135524 - DNA, 15 bp, Homo sapiens
atgtggcaacttctc

SEQ ID NO: 135525 - DNA, 15 bp, Homo sapiens
aatgtggcaacttct

SEQ ID NO: 135526 - DNA, 15 bp, Homo sapiens
caatgtggcaacttc

SEQ ID NO: 135527 - DNA, 15 bp, Homo sapiens
tcaatgtggcaactt

SEQ ID NO: 135528 - DNA, 15 bp, Homo sapiens
gtcaatgtggcaact

SEQ ID NO: 135529 - DNA, 15 bp, Homo sapiens
cgtcaatgtggcaac

SEQ ID NO: 135530 - DNA, 15 bp, Homo sapiens
acgtcaatgtggcaa

SEQ ID NO: 135531 - DNA, 15 bp, Homo sapiens
aacgtcaatgtggca

SEQ ID NO: 135532 - DNA, 15 bp, Homo sapiens
caacgtcaatgtggc

SEQ ID NO: 135533 - DNA, 15 bp, Homo sapiens
acaacgtcaatgtgg

SEQ ID NO: 135534 - DNA, 15 bp, Homo sapiens
aacaacgtcaatgtg

SEQ ID NO: 135535 - DNA, 15 bp, Homo sapiens
aaacaacgtcaatgt

SEQ ID NO: 135536 - DNA, 15 bp, Homo sapiens
aaaacaacgtcaatg

SEQ ID NO: 135537 - DNA, 15 bp, Homo sapiens
gaaaacaacgtcaat

SEQ ID NO: 135538 - DNA, 15 bp, Homo sapiens
agaaaacaacgtcaa

SEQ ID NO: 135539 - DNA, 15 bp, Homo sapiens
gagaaaacaacgtca

SEQ ID NO: 135540 - DNA, 15 bp, Homo sapiens
agagaaaacaacgtc

SEQ ID NO: 135541 - DNA, 15 bp, Homo sapiens
aagagaaaacaacgt

SEQ ID NO: 135542 - DNA, 15 bp, Homo sapiens
aaagagaaaacaacg

SEQ ID NO: 135543 - DNA, 15 bp, Homo sapiens
taaagagaaaacaac

SEQ ID NO: 135544 - DNA, 15 bp, Homo sapiens
ataaagagaaaacaa

SEQ ID NO: 135545 - DNA, 15 bp, Homo sapiens
cataaagagaaaaca

SEQ ID NO: 135546 - DNA, 15 bp, Homo sapiens
acataaagagaaaac

SEQ ID NO: 135547 - DNA, 15 bp, Homo sapiens
cacataaagagaaaa

SEQ ID NO: 135548 - DNA, 15 bp, Homo sapiens
ccacataaagagaaa

SEQ ID NO: 135549 - DNA, 15 bp, Homo sapiens
accacataaagagaa

SEQ ID NO: 135550 - DNA, 15 bp, Homo sapiens
aaccacataaagaga

SEQ ID NO: 135551 - DNA, 15 bp, Homo sapiens
aaaccacataaagag

SEQ ID NO: 135552 - DNA, 15 bp, Homo sapiens
aaaaccacataaaga

SEQ ID NO: 135553 - DNA, 15 bp, Homo sapiens
caaaaccacataaag

SEQ ID NO: 135554 - DNA, 15 bp, Homo sapiens
ccaaaaccacataaa

SEQ ID NO: 135555 - DNA, 15 bp, Homo sapiens
tccaaaaccacataa

SEQ ID NO: 135556 - DNA, 15 bp, Homo sapiens
ttccaaaaccacata

SEQ ID NO: 135557 - DNA, 15 bp, Homo sapiens
tttccaaaaccacat

SEQ ID NO: 135558 - DNA, 15 bp, Homo sapiens
ctttccaaaaccaca

SEQ ID NO: 135559 - DNA, 15 bp, Homo sapiens
actttccaaaaccac

SEQ ID NO: 135560 - DNA, 15 bp, Homo sapiens
cactttccaaaacca

SEQ ID NO: 135561 - DNA, 15 bp, Homo sapiens
ccactttccaaaacc

SEQ ID NO: 135562 - DNA, 15 bp, Homo sapiens
tccactttccaaaac

SEQ ID NO: 135563 - DNA, 15 bp, Homo sapiens
gtccactttccaaaa

SEQ ID NO: 135564 - DNA, 15 bp, Homo sapiens
ggtccactttccaaa

SEQ ID NO: 135565 - DNA, 15 bp, Homo sapiens
gggtccactttccaa

SEQ ID NO: 135566 - DNA, 15 bp, Homo sapiens
agggtccactttcca

SEQ ID NO: 135567 - DNA, 15 bp, Homo sapiens
aagggtccactttcc

SEQ ID NO: 135568 - DNA, 15 bp, Homo sapiens
aaagggtccactttc

SEQ ID NO: 135569 - DNA, 15 bp, Homo sapiens
caaagggtccacttt

SEQ ID NO: 135570 - DNA, 15 bp, Homo sapiens
acaaagggtccactt

SEQ ID NO: 135571 - DNA, 15 bp, Homo sapiens
cacaaagggtccact

SEQ ID NO: 135572 - DNA, 15 bp, Homo sapiens
ccacaaagggtccac

SEQ ID NO: 135573 - DNA, 15 bp, Homo sapiens
gccacaaagggtcca

SEQ ID NO: 135574 - DNA, 15 bp, Homo sapiens
agccacaaagggtcc

SEQ ID NO: 135575 - DNA, 15 bp, Homo sapiens
gagccacaaagggtc

SEQ ID NO: 135576 - DNA, 15 bp, Homo sapiens
agagccacaaagggt

SEQ ID NO: 135577 - DNA, 15 bp, Homo sapiens
cagagccacaaaggg

SEQ ID NO: 135578 - DNA, 15 bp, Homo sapiens
ccagagccacaaagg

SEQ ID NO: 135579 - DNA, 15 bp, Homo sapiens
tccagagccacaaag

SEQ ID NO: 135580 - DNA, 15 bp, Homo sapiens
ttccagagccacaaa

SEQ ID NO: 135581 - DNA, 15 bp, Homo sapiens
cttccagagccacaa

SEQ ID NO: 135582 - DNA, 15 bp, Homo sapiens
ccttccagagccaca

SEQ ID NO: 135583 - DNA, 15 bp, Homo sapiens
cccttccagagccac

SEQ ID NO: 135584 - DNA, 15 bp, Homo sapiens
ccccttccagagcca

SEQ ID NO: 135585 - DNA, 15 bp, Homo sapiens
tccccttccagagcc

SEQ ID NO: 135586 - DNA, 15 bp, Homo sapiens
ttccccttccagagc

SEQ ID NO: 135587 - DNA, 15 bp, Homo sapiens
tttccccttccagag

SEQ ID NO: 135588 - DNA, 15 bp, Homo sapiens
ttttccccttccaga

SEQ ID NO: 135589 - DNA, 15 bp, Homo sapiens
tttttccccttccag

SEQ ID NO: 135590 - DNA, 15 bp, Homo sapiens
atttttccccttcca

SEQ ID NO: 135591 - DNA, 15 bp, Homo sapiens
catttttccccttcc

SEQ ID NO: 135592 - DNA, 15 bp, Homo sapiens
ccatttttccccttc

SEQ ID NO: 135593 - DNA, 15 bp, Homo sapiens
cccatttttcccctt

SEQ ID NO: 135594 - DNA, 15 bp, Homo sapiens
gcccatttttcccct

SEQ ID NO: 135595 - DNA, 15 bp, Homo sapiens
ggcccatttttcccc

SEQ ID NO: 135596 - DNA, 15 bp, Homo sapiens
aggcccatttttccc

SEQ ID NO: 135597 - DNA, 15 bp, Homo sapiens
gaggcccatttttcc

SEQ ID NO: 135598 - DNA, 15 bp, Homo sapiens
ggaggcccatttttc

SEQ ID NO: 135599 - DNA, 15 bp, Homo sapiens
tggaggcccattttt

SEQ ID NO: 135600 - DNA, 15 bp, Homo sapiens
ctggaggcccatttt

SEQ ID NO: 135601 - DNA, 15 bp, Homo sapiens
actggaggcccattt

SEQ ID NO: 135602 - DNA, 15 bp, Homo sapiens
aactggaggcccatt

SEQ ID NO: 135603 - DNA, 15 bp, Homo sapiens
taactggaggcccat

SEQ ID NO: 135604 - DNA, 15 bp, Homo sapiens
ataactggaggccca

SEQ ID NO: 135605 - DNA, 15 bp, Homo sapiens
aataactggaggccc

SEQ ID NO: 135606 - DNA, 15 bp, Homo sapiens
gaataactggaggcc

SEQ ID NO: 135607 - DNA, 15 bp, Homo sapiens
tgaataactggaggc

SEQ ID NO: 135608 - DNA, 15 bp, Homo sapiens
ttgaataactggagg

SEQ ID NO: 135609 - DNA, 15 bp, Homo sapiens
tttgaataactggag

SEQ ID NO: 135610 - DNA, 15 bp, Homo sapiens
atttgaataactgga

SEQ ID NO: 135611 - DNA, 15 bp, Homo sapiens
catttgaataactgg

SEQ ID NO: 135612 - DNA, 15 bp, Homo sapiens
ccatttgaataactg

SEQ ID NO: 135613 - DNA, 15 bp, Homo sapiens
tccatttgaataact

SEQ ID NO: 135614 - DNA, 15 bp, Homo sapiens
ctccatttgaataac

SEQ ID NO: 135615 - DNA, 15 bp, Homo sapiens
tctccatttgaataa

SEQ ID NO: 135616 - DNA, 15 bp, Homo sapiens
ttctccatttgaata

SEQ ID NO: 135617 - DNA, 15 bp, Homo sapiens
gttctccatttgaat

SEQ ID NO: 135618 - DNA, 15 bp, Homo sapiens
agttctccatttgaa

SEQ ID NO: 135619 - DNA, 15 bp, Homo sapiens
gagttctccatttga

SEQ ID NO: 135620 - DNA, 15 bp, Homo sapiens
tgagttctccatttg

SEQ ID NO: 135621 - DNA, 15 bp, Homo sapiens
ctgagttctccattt

SEQ ID NO: 135622 - DNA, 15 bp, Homo sapiens
tctgagttctccatt

SEQ ID NO: 135623 - DNA, 15 bp, Homo sapiens
ctctgagttctccat

SEQ ID NO: 135624 - DNA, 15 bp, Homo sapiens
tctctgagttctcca

SEQ ID NO: 135625 - DNA, 15 bp, Homo sapiens
atctctgagttctcc

SEQ ID NO: 135626 - DNA, 15 bp, Homo sapiens
tatctctgagttctc

SEQ ID NO: 135627 - DNA, 15 bp, Homo sapiens
ttatctctgagttct

SEQ ID NO: 135628 - DNA, 15 bp, Homo sapiens
cttatctctgagttc

SEQ ID NO: 135629 - DNA, 15 bp, Homo sapiens
acttatctctgagtt

SEQ ID NO: 135630 - DNA, 15 bp, Homo sapiens
cacttatctctgagt

SEQ ID NO: 135631 - DNA, 15 bp, Homo sapiens
acacttatctctgag

SEQ ID NO: 135632 - DNA, 15 bp, Homo sapiens
aacacttatctctga

SEQ ID NO: 135633 - DNA, 15 bp, Homo sapiens
gaacacttatctctg

SEQ ID NO: 135634 - DNA, 15 bp, Homo sapiens
agaacacttatctct

SEQ ID NO: 135635 - DNA, 15 bp, Homo sapiens
tagaacacttatctc

SEQ ID NO: 135636 - DNA, 15 bp, Homo sapiens
ttagaacacttatct

SEQ ID NO: 135637 - DNA, 15 bp, Homo sapiens
cttagaacacttatc

SEQ ID NO: 135638 - DNA, 15 bp, Homo sapiens
ccttagaacacttat

SEQ ID NO: 135639 - DNA, 15 bp, Homo sapiens
gccttagaacactta

SEQ ID NO: 135640 - DNA, 15 bp, Homo sapiens
agccttagaacactt

SEQ ID NO: 135641 - DNA, 15 bp, Homo sapiens
aagccttagaacact

SEQ ID NO: 135642 - DNA, 15 bp, Homo sapiens
caagccttagaacac

SEQ ID NO: 135643 - DNA, 15 bp, Homo sapiens
ccaagccttagaaca

SEQ ID NO: 135644 - DNA, 15 bp, Homo sapiens
tccaagccttagaac

SEQ ID NO: 135645 - DNA, 15 bp, Homo sapiens
ctccaagccttagaa

SEQ ID NO: 135646 - DNA, 15 bp, Homo sapiens
cctccaagccttaga

SEQ ID NO: 135647 - DNA, 15 bp, Homo sapiens
tcctccaagccttag

SEQ ID NO: 135648 - DNA, 15 bp, Homo sapiens
ttcctccaagcctta

SEQ ID NO: 135649 - DNA, 15 bp, Homo sapiens
tttcctccaagcctt

SEQ ID NO: 135650 - DNA, 15 bp, Homo sapiens
ctttcctccaagcct

SEQ ID NO: 135651 - DNA, 15 bp, Homo sapiens
tctttcctccaagcc

SEQ ID NO: 135652 - DNA, 15 bp, Homo sapiens
atctttcctccaagc

SEQ ID NO: 135653 - DNA, 15 bp, Homo sapiens
aatctttcctccaag

SEQ ID NO: 135654 - DNA, 15 bp, Homo sapiens
aaatctttcctccaa

SEQ ID NO: 135655 - DNA, 15 bp, Homo sapiens
caaatctttcctcca

SEQ ID NO: 135656 - DNA, 15 bp, Homo sapiens
ccaaatctttcctcc

SEQ ID NO: 135657 - DNA, 15 bp, Homo sapiens
tccaaatctttcctc

SEQ ID NO: 135658 - DNA, 15 bp, Homo sapiens
ttccaaatctttcct

SEQ ID NO: 135659 - DNA, 15 bp, Homo sapiens
cttccaaatctttcc

SEQ ID NO: 135660 - DNA, 15 bp, Homo sapiens
tcttccaaatctttc

SEQ ID NO: 135661 - DNA, 15 bp, Homo sapiens
atcttccaaatcttt

SEQ ID NO: 135662 - DNA, 15 bp, Homo sapiens
catcttccaaatctt

SEQ ID NO: 135663 - DNA, 15 bp, Homo sapiens
tcatcttccaaatct

SEQ ID NO: 135664 - DNA, 15 bp, Homo sapiens
ttcatcttccaaatc

SEQ ID NO: 135665 - DNA, 15 bp, Homo sapiens
tttcatcttccaaat

SEQ ID NO: 135666 - DNA, 15 bp, Homo sapiens
ctttcatcttccaaa

SEQ ID NO: 135667 - DNA, 15 bp, Homo sapiens
cctttcatcttccaa

SEQ ID NO: 135668 - DNA, 15 bp, Homo sapiens
gcctttcatcttcca

SEQ ID NO: 135669 - DNA, 15 bp, Homo sapiens
ggcctttcatcttcc

SEQ ID NO: 135670 - DNA, 15 bp, Homo sapiens
aggcctttcatcttc

SEQ ID NO: 135671 - DNA, 15 bp, Homo sapiens
aaggcctttcatctt

SEQ ID NO: 135672 - DNA, 15 bp, Homo sapiens
taaggcctttcatct

SEQ ID NO: 135673 - DNA, 15 bp, Homo sapiens
gtaaggcctttcatc

SEQ ID NO: 135674 - DNA, 15 bp, Homo sapiens
ggtaaggcctttcat

SEQ ID NO: 135675 - DNA, 15 bp, Homo sapiens
gggtaaggcctttca

SEQ ID NO: 135676 - DNA, 15 bp, Homo sapiens
tgggtaaggcctttc

SEQ ID NO: 135677 - DNA, 15 bp, Homo sapiens
ttgggtaaggccttt

SEQ ID NO: 135678 - DNA, 15 bp, Homo sapiens
cttgggtaaggcctt

SEQ ID NO: 135679 - DNA, 15 bp, Homo sapiens
acttgggtaaggcct

SEQ ID NO: 135680 - DNA, 15 bp, Homo sapiens
cacttgggtaaggcc

SEQ ID NO: 135681 - DNA, 15 bp, Homo sapiens
gcacttgggtaaggc

SEQ ID NO: 135682 - DNA, 15 bp, Homo sapiens
agcacttgggtaagg

SEQ ID NO: 135683 - DNA, 15 bp, Homo sapiens
tagcacttgggtaag

SEQ ID NO: 135684 - DNA, 15 bp, Homo sapiens
ctagcacttgggtaa

SEQ ID NO: 135685 - DNA, 15 bp, Homo sapiens
cctagcacttgggta

SEQ ID NO: 135686 - DNA, 15 bp, Homo sapiens
ccctagcacttgggt

SEQ ID NO: 135687 - DNA, 15 bp, Homo sapiens
tccctagcacttggg

SEQ ID NO: 135688 - DNA, 15 bp, Homo sapiens
atccctagcacttgg

SEQ ID NO: 135689 - DNA, 15 bp, Homo sapiens
aatccctagcacttg

SEQ ID NO: 135690 - DNA, 15 bp, Homo sapiens
aaatccctagcactt

SEQ ID NO: 135691 - DNA, 15 bp, Homo sapiens
aaaatccctagcact

SEQ ID NO: 135692 - DNA, 15 bp, Homo sapiens
aaaaatccctagcac

SEQ ID NO: 135693 - DNA, 15 bp, Homo sapiens
taaaaatccctagca

SEQ ID NO: 135694 - DNA, 15 bp, Homo sapiens
ataaaaatccctagc

SEQ ID NO: 135695 - DNA, 15 bp, Homo sapiens
cataaaaatccctag

SEQ ID NO: 135696 - DNA, 15 bp, Homo sapiens
tcataaaaatcccta

SEQ ID NO: 135697 - DNA, 15 bp, Homo sapiens
gtcataaaaatccct

SEQ ID NO: 135698 - DNA, 15 bp, Homo sapiens
ggtcataaaaatccc

SEQ ID NO: 135699 - DNA, 15 bp, Homo sapiens
tggtcataaaaatcc

SEQ ID NO: 135700 - DNA, 15 bp, Homo sapiens
ttggtcataaaaatc

SEQ ID NO: 135701 - DNA, 15 bp, Homo sapiens
gttggtcataaaaat

SEQ ID NO: 135702 - DNA, 15 bp, Homo sapiens
tgttggtcataaaaa

SEQ ID NO: 135703 - DNA, 15 bp, Homo sapiens
atgttggtcataaaa

SEQ ID NO: 135704 - DNA, 15 bp, Homo sapiens
aatgttggtcataaa

SEQ ID NO: 135705 - DNA, 15 bp, Homo sapiens
taatgttggtcataa

SEQ ID NO: 135706 - DNA, 15 bp, Homo sapiens
ctaatgttggtcata

SEQ ID NO: 135707 - DNA, 15 bp, Homo sapiens
gctaatgttggtcat

SEQ ID NO: 135708 - DNA, 15 bp, Homo sapiens
agctaatgttggtca

SEQ ID NO: 135709 - DNA, 15 bp, Homo sapiens
cagctaatgttggtc

SEQ ID NO: 135710 - DNA, 15 bp, Homo sapiens
ccagctaatgttggt

SEQ ID NO: 135711 - DNA, 15 bp, Homo sapiens
gccagctaatgttgg

SEQ ID NO: 135712 - DNA, 15 bp, Homo sapiens
tgccagctaatgttg

SEQ ID NO: 135713 - DNA, 15 bp, Homo sapiens
ttgccagctaatgtt

SEQ ID NO: 135714 - DNA, 15 bp, Homo sapiens
gttgccagctaatgt

SEQ ID NO: 135715 - DNA, 15 bp, Homo sapiens
tgttgccagctaatg

SEQ ID NO: 135716 - DNA, 15 bp, Homo sapiens
ctgttgccagctaat

SEQ ID NO: 135717 - DNA, 15 bp, Homo sapiens
gctgttgccagctaa

SEQ ID NO: 135718 - DNA, 15 bp, Homo sapiens
agctgttgccagcta

SEQ ID NO: 135719 - DNA, 15 bp, Homo sapiens
aagctgttgccagct

SEQ ID NO: 135720 - DNA, 15 bp, Homo sapiens
taagctgttgccagc

SEQ ID NO: 135721 - DNA, 15 bp, Homo sapiens
ttaagctgttgccag

SEQ ID NO: 135722 - DNA, 15 bp, Homo sapiens
attaagctgttgcca

SEQ ID NO: 135723 - DNA, 15 bp, Homo sapiens
tattaagctgttgcc

SEQ ID NO: 135724 - DNA, 15 bp, Homo sapiens
atattaagctgttgc

SEQ ID NO: 135725 - DNA, 15 bp, Homo sapiens
tatattaagctgttg

SEQ ID NO: 135726 - DNA, 15 bp, Homo sapiens
gtatattaagctgtt

SEQ ID NO: 135727 - DNA, 15 bp, Homo sapiens
tgtatattaagctgt

SEQ ID NO: 135728 - DNA, 15 bp, Homo sapiens
atgtatattaagctg

SEQ ID NO: 135729 - DNA, 15 bp, Homo sapiens
aatgtatattaagct

SEQ ID NO: 135730 - DNA, 15 bp, Homo sapiens
caatgtatattaagc

SEQ ID NO: 135731 - DNA, 15 bp, Homo sapiens
acaatgtatattaag

SEQ ID NO: 135732 - DNA, 15 bp, Homo sapiens
aacaatgtatattaa

SEQ ID NO: 135733 - DNA, 15 bp, Homo sapiens
caacaatgtatatta

SEQ ID NO: 135734 - DNA, 15 bp, Homo sapiens
acaacaatgtatatt

SEQ ID NO: 135735 - DNA, 15 bp, Homo sapiens
aacaacaatgtatat

SEQ ID NO: 135736 - DNA, 15 bp, Homo sapiens
gaacaacaatgtata

SEQ ID NO: 135737 - DNA, 15 bp, Homo sapiens
agaacaacaatgtat

SEQ ID NO: 135738 - DNA, 15 bp, Homo sapiens
gagaacaacaatgta

SEQ ID NO: 135739 - DNA, 15 bp, Homo sapiens
ggagaacaacaatgt

SEQ ID NO: 135740 - DNA, 15 bp, Homo sapiens
aggagaacaacaatg

SEQ ID NO: 135741 - DNA, 15 bp, Homo sapiens
aaggagaacaacaat

SEQ ID NO: 135742 - DNA, 15 bp, Homo sapiens
gaaggagaacaacaa

SEQ ID NO: 135743 - DNA, 15 bp, Homo sapiens
ggaaggagaacaaca

SEQ ID NO: 135744 - DNA, 15 bp, Homo sapiens
aggaaggagaacaac

SEQ ID NO: 135745 - DNA, 15 bp, Homo sapiens
caggaaggagaacaa

SEQ ID NO: 135746 - DNA, 15 bp, Homo sapiens
gcaggaaggagaaca

SEQ ID NO: 135747 - DNA, 15 bp, Homo sapiens
tgcaggaaggagaac

SEQ ID NO: 135748 - DNA, 15 bp, Homo sapiens
atgcaggaaggagaa

SEQ ID NO: 135749 - DNA, 15 bp, Homo sapiens
gatgcaggaaggaga

SEQ ID NO: 135750 - DNA, 15 bp, Homo sapiens
agatgcaggaaggag

SEQ ID NO: 135751 - DNA, 15 bp, Homo sapiens
cagatgcaggaagga

SEQ ID NO: 135752 - DNA, 15 bp, Homo sapiens
ccagatgcaggaagg

SEQ ID NO: 135753 - DNA, 15 bp, Homo sapiens
cccagatgcaggaag

SEQ ID NO: 135754 - DNA, 15 bp, Homo sapiens
tcccagatgcaggaa

SEQ ID NO: 135755 - DNA, 15 bp, Homo sapiens
ttcccagatgcagga

SEQ ID NO: 135756 - DNA, 15 bp, Homo sapiens
gttcccagatgcagg

SEQ ID NO: 135757 - DNA, 15 bp, Homo sapiens
tgttcccagatgcag

SEQ ID NO: 135758 - DNA, 15 bp, Homo sapiens
gtgttcccagatgca

SEQ ID NO: 135759 - DNA, 15 bp, Homo sapiens
agtgttcccagatgc

SEQ ID NO: 135760 - DNA, 15 bp, Homo sapiens
aagtgttcccagatg

SEQ ID NO: 135761 - DNA, 15 bp, Homo sapiens
aaagtgttcccagat

SEQ ID NO: 135762 - DNA, 15 bp, Homo sapiens
gaaagtgttcccaga

SEQ ID NO: 135763 - DNA, 15 bp, Homo sapiens
ggaaagtgttcccag

SEQ ID NO: 135764 - DNA, 15 bp, Homo sapiens
aggaaagtgttccca

SEQ ID NO: 135765 - DNA, 15 bp, Homo sapiens
gaggaaagtgttccc

SEQ ID NO: 135766 - DNA, 15 bp, Homo sapiens
ggaggaaagtgttcc

SEQ ID NO: 135767 - DNA, 15 bp, Homo sapiens
gggaggaaagtgttc

SEQ ID NO: 135768 - DNA, 15 bp, Homo sapiens
tgggaggaaagtgtt

SEQ ID NO: 135769 - DNA, 15 bp, Homo sapiens
ctgggaggaaagtgt

SEQ ID NO: 135770 - DNA, 15 bp, Homo sapiens
tctgggaggaaagtg

SEQ ID NO: 135771 - DNA, 15 bp, Homo sapiens
ctctgggaggaaagt

SEQ ID NO: 135772 - DNA, 15 bp, Homo sapiens
gctctgggaggaaag

SEQ ID NO: 135773 - DNA, 15 bp, Homo sapiens
agctctgggaggaaa

SEQ ID NO: 135774 - DNA, 15 bp, Homo sapiens
aagctctgggaggaa

SEQ ID NO: 135775 - DNA, 15 bp, Homo sapiens
taagctctgggagga

SEQ ID NO: 135776 - DNA, 15 bp, Homo sapiens
ctaagctctgggagg

SEQ ID NO: 135777 - DNA, 15 bp, Homo sapiens
tctaagctctgggag

SEQ ID NO: 135778 - DNA, 15 bp, Homo sapiens
ctctaagctctggga

SEQ ID NO: 135779 - DNA, 15 bp, Homo sapiens
cctctaagctctggg

SEQ ID NO: 135780 - DNA, 15 bp, Homo sapiens
tcctctaagctctgg

SEQ ID NO: 135781 - DNA, 15 bp, Homo sapiens
ttcctctaagctctg

SEQ ID NO: 135782 - DNA, 15 bp, Homo sapiens
attcctctaagctct

SEQ ID NO: 135783 - DNA, 15 bp, Homo sapiens
aattcctctaagctc

SEQ ID NO: 135784 - DNA, 15 bp, Homo sapiens
taattcctctaagct

SEQ ID NO: 135785 - DNA, 15 bp, Homo sapiens
ataattcctctaagc

SEQ ID NO: 135786 - DNA, 15 bp, Homo sapiens
aataattcctctaag

SEQ ID NO: 135787 - DNA, 15 bp, Homo sapiens
aaataattcctctaa

SEQ ID NO: 135788 - DNA, 15 bp, Homo sapiens
gaaataattcctcta

SEQ ID NO: 135789 - DNA, 15 bp, Homo sapiens
tgaaataattcctct

SEQ ID NO: 135790 - DNA, 15 bp, Homo sapiens
ctgaaataattcctc

SEQ ID NO: 135791 - DNA, 15 bp, Homo sapiens
gctgaaataattcct

SEQ ID NO: 135792 - DNA, 15 bp, Homo sapiens
agctgaaataattcc

SEQ ID NO: 135793 - DNA, 15 bp, Homo sapiens
cagctgaaataattc

SEQ ID NO: 135794 - DNA, 15 bp, Homo sapiens
gcagctgaaataatt

SEQ ID NO: 135795 - DNA, 15 bp, Homo sapiens
ggcagctgaaataat

SEQ ID NO: 135796 - DNA, 15 bp, Homo sapiens
gggcagctgaaataa

SEQ ID NO: 135797 - DNA, 15 bp, Homo sapiens
tgggcagctgaaata

SEQ ID NO: 135798 - DNA, 15 bp, Homo sapiens
atgggcagctgaaat

SEQ ID NO: 135799 - DNA, 15 bp, Homo sapiens
catgggcagctgaaa

SEQ ID NO: 135800 - DNA, 15 bp, Homo sapiens
tcatgggcagctgaa

SEQ ID NO: 135801 - DNA, 15 bp, Homo sapiens
ttcatgggcagctga

SEQ ID NO: 135802 - DNA, 15 bp, Homo sapiens
attcatgggcagctg

SEQ ID NO: 135803 - DNA, 15 bp, Homo sapiens
aattcatgggcagct

SEQ ID NO: 135804 - DNA, 15 bp, Homo sapiens
taattcatgggcagc

SEQ ID NO: 135805 - DNA, 15 bp, Homo sapiens
ataattcatgggcag

SEQ ID NO: 135806 - DNA, 15 bp, Homo sapiens
cataattcatgggca

SEQ ID NO: 135807 - DNA, 15 bp, Homo sapiens
ccataattcatgggc

SEQ ID NO: 135808 - DNA, 15 bp, Homo sapiens
gccataattcatggg

SEQ ID NO: 135809 - DNA, 15 bp, Homo sapiens
ggccataattcatgg

SEQ ID NO: 135810 - DNA, 15 bp, Homo sapiens
cggccataattcatg

SEQ ID NO: 135811 - DNA, 15 bp, Homo sapiens
acggccataattcat

SEQ ID NO: 135812 - DNA, 15 bp, Homo sapiens
aacggccataattca

SEQ ID NO: 135813 - DNA, 15 bp, Homo sapiens
aaacggccataattc

SEQ ID NO: 135814 - DNA, 15 bp, Homo sapiens
gaaacggccataatt

SEQ ID NO: 135815 - DNA, 15 bp, Homo sapiens
agaaacggccataat

SEQ ID NO: 135816 - DNA, 15 bp, Homo sapiens
gagaaacggccataa

SEQ ID NO: 135817 - DNA, 15 bp, Homo sapiens
ggagaaacggccata

SEQ ID NO: 135818 - DNA, 15 bp, Homo sapiens
aggagaaacggccat

SEQ ID NO: 135819 - DNA, 15 bp, Homo sapiens
caggagaaacggcca

SEQ ID NO: 135820 - DNA, 15 bp, Homo sapiens
acaggagaaacggcc

SEQ ID NO: 135821 - DNA, 15 bp, Homo sapiens
cacaggagaaacggc

SEQ ID NO: 135822 - DNA, 15 bp, Homo sapiens
ccacaggagaaacgg

SEQ ID NO: 135823 - DNA, 15 bp, Homo sapiens
gccacaggagaaacg

SEQ ID NO: 135824 - DNA, 15 bp, Homo sapiens
agccacaggagaaac

SEQ ID NO: 135825 - DNA, 15 bp, Homo sapiens
aagccacaggagaaa

SEQ ID NO: 135826 - DNA, 15 bp, Homo sapiens
caagccacaggagaa

SEQ ID NO: 135827 - DNA, 15 bp, Homo sapiens
acaagccacaggaga

SEQ ID NO: 135828 - DNA, 15 bp, Homo sapiens
cacaagccacaggag

SEQ ID NO: 135829 - DNA, 15 bp, Homo sapiens
ccacaagccacagga

SEQ ID NO: 135830 - DNA, 15 bp, Homo sapiens
gccacaagccacagg

SEQ ID NO: 135831 - DNA, 15 bp, Homo sapiens
tgccacaagccacag

SEQ ID NO: 135832 - DNA, 15 bp, Homo sapiens
ctgccacaagccaca

SEQ ID NO: 135833 - DNA, 15 bp, Homo sapiens
gctgccacaagccac

SEQ ID NO: 135834 - DNA, 15 bp, Homo sapiens
ggctgccacaagcca

SEQ ID NO: 135835 - DNA, 15 bp, Homo sapiens
tggctgccacaagcc

SEQ ID NO: 135836 - DNA, 15 bp, Homo sapiens
gtggctgccacaagc

SEQ ID NO: 135837 - DNA, 15 bp, Homo sapiens
tgtggctgccacaag

SEQ ID NO: 135838 - DNA, 15 bp, Homo sapiens
ctgtggctgccacaa

SEQ ID NO: 135839 - DNA, 15 bp, Homo sapiens
gctgtggctgccaca

SEQ ID NO: 135840 - DNA, 15 bp, Homo sapiens
ggctgtggctgccac

SEQ ID NO: 135841 - DNA, 15 bp, Homo sapiens
cggctgtggctgcca

SEQ ID NO: 135842 - DNA, 15 bp, Homo sapiens
tcggctgtggctgcc

SEQ ID NO: 135843 - DNA, 15 bp, Homo sapiens
atcggctgtggctgc

SEQ ID NO: 135844 - DNA, 15 bp, Homo sapiens
gatcggctgtggctg

SEQ ID NO: 135845 - DNA, 15 bp, Homo sapiens
tgatcggctgtggct

SEQ ID NO: 135846 - DNA, 15 bp, Homo sapiens
ctgatcggctgtggc

SEQ ID NO: 135847 - DNA, 15 bp, Homo sapiens
cctgatcggctgtgg

SEQ ID NO: 135848 - DNA, 15 bp, Homo sapiens
acctgatcggctgtg

SEQ ID NO: 135849 - DNA, 15 bp, Homo sapiens
cacctgatcggctgt

SEQ ID NO: 135850 - DNA, 15 bp, Homo sapiens
ccacctgatcggctg

SEQ ID NO: 135851 - DNA, 15 bp, Homo sapiens
accacctgatcggct

SEQ ID NO: 135852 - DNA, 15 bp, Homo sapiens
taccacctgatcggc

SEQ ID NO: 135853 - DNA, 15 bp, Homo sapiens
ctaccacctgatcgg

SEQ ID NO: 135854 - DNA, 15 bp, Homo sapiens
tctaccacctgatcg

SEQ ID NO: 135855 - DNA, 15 bp, Homo sapiens
atctaccacctgatc

SEQ ID NO: 135856 - DNA, 15 bp, Homo sapiens
aatctaccacctgat

SEQ ID NO: 135857 - DNA, 15 bp, Homo sapiens
gaatctaccacctga

SEQ ID NO: 135858 - DNA, 15 bp, Homo sapiens
agaatctaccacctg

SEQ ID NO: 135859 - DNA, 15 bp, Homo sapiens
aagaatctaccacct

SEQ ID NO: 135860 - DNA, 15 bp, Homo sapiens
caagaatctaccacc

SEQ ID NO: 135861 - DNA, 15 bp, Homo sapiens
tcaagaatctaccac

SEQ ID NO: 135862 - DNA, 15 bp, Homo sapiens
ttcaagaatctacca

SEQ ID NO: 135863 - DNA, 15 bp, Homo sapiens
cttcaagaatctacc

SEQ ID NO: 135864 - DNA, 15 bp, Homo sapiens
tcttcaagaatctac

SEQ ID NO: 135865 - DNA, 15 bp, Homo sapiens
ctcttcaagaatcta

SEQ ID NO: 135866 - DNA, 15 bp, Homo sapiens
actcttcaagaatct

SEQ ID NO: 135867 - DNA, 15 bp, Homo sapiens
tactcttcaagaatc

SEQ ID NO: 135868 - DNA, 15 bp, Homo sapiens
atactcttcaagaat

SEQ ID NO: 135869 - DNA, 15 bp, Homo sapiens
tatactcttcaagaa

SEQ ID NO: 135870 - DNA, 15 bp, Homo sapiens
ctatactcttcaaga

SEQ ID NO: 135871 - DNA, 15 bp, Homo sapiens
cctatactcttcaag

SEQ ID NO: 135872 - DNA, 15 bp, Homo sapiens
tcctatactcttcaa

SEQ ID NO: 135873 - DNA, 15 bp, Homo sapiens
ttcctatactcttca

SEQ ID NO: 135874 - DNA, 15 bp, Homo sapiens
attcctatactcttc

SEQ ID NO: 135875 - DNA, 15 bp, Homo sapiens
cattcctatactctt

SEQ ID NO: 135876 - DNA, 15 bp, Homo sapiens
tcattcctatactct

SEQ ID NO: 135877 - DNA, 15 bp, Homo sapiens
atcattcctatactc

SEQ ID NO: 135878 - DNA, 15 bp, Homo sapiens
catcattcctatact

SEQ ID NO: 135879 - DNA, 15 bp, Homo sapiens
acatcattcctatac

SEQ ID NO: 135880 - DNA, 15 bp, Homo sapiens
gacatcattcctata

SEQ ID NO: 135881 - DNA, 15 bp, Homo sapiens
agacatcattcctat

SEQ ID NO: 135882 - DNA, 15 bp, Homo sapiens
gagacatcattccta

SEQ ID NO: 135883 - DNA, 15 bp, Homo sapiens
agagacatcattcct

SEQ ID NO: 135884 - DNA, 15 bp, Homo sapiens
tagagacatcattcc

SEQ ID NO: 135885 - DNA, 15 bp, Homo sapiens
ctagagacatcattc

SEQ ID NO: 135886 - DNA, 15 bp, Homo sapiens
gctagagacatcatt

SEQ ID NO: 135887 - DNA, 15 bp, Homo sapiens
agctagagacatcat

SEQ ID NO: 135888 - DNA, 15 bp, Homo sapiens
cagctagagacatca

SEQ ID NO: 135889 - DNA, 15 bp, Homo sapiens
tcagctagagacatc

SEQ ID NO: 135890 - DNA, 15 bp, Homo sapiens
ctcagctagagacat

SEQ ID NO: 135891 - DNA, 15 bp, Homo sapiens
gctcagctagagaca

SEQ ID NO: 135892 - DNA, 15 bp, Homo sapiens
ggctcagctagagac

SEQ ID NO: 135893 - DNA, 15 bp, Homo sapiens
gggctcagctagaga

SEQ ID NO: 135894 - DNA, 15 bp, Homo sapiens
tgggctcagctagag

SEQ ID NO: 135895 - DNA, 15 bp, Homo sapiens
gtgggctcagctaga

SEQ ID NO: 135896 - DNA, 15 bp, Homo sapiens
tgtgggctcagctag

SEQ ID NO: 135897 - DNA, 15 bp, Homo sapiens
ttgtgggctcagcta

SEQ ID NO: 135898 - DNA, 15 bp, Homo sapiens
cttgtgggctcagct

SEQ ID NO: 135899 - DNA, 15 bp, Homo sapiens
tcttgtgggctcagc

SEQ ID NO: 135900 - DNA, 15 bp, Homo sapiens
ctcttgtgggctcag

SEQ ID NO: 135901 - DNA, 15 bp, Homo sapiens
cctcttgtgggctca

SEQ ID NO: 135902 - DNA, 15 bp, Homo sapiens
ccctcttgtgggctc

SEQ ID NO: 135903 - DNA, 15 bp, Homo sapiens
gccctcttgtgggct

SEQ ID NO: 135904 - DNA, 15 bp, Homo sapiens
agccctcttgtgggc

SEQ ID NO: 135905 - DNA, 15 bp, Homo sapiens
gagccctcttgtggg

SEQ ID NO: 135906 - DNA, 15 bp, Homo sapiens
tgagccctcttgtgg

SEQ ID NO: 135907 - DNA, 15 bp, Homo sapiens
ttgagccctcttgtg

SEQ ID NO: 135908 - DNA, 15 bp, Homo sapiens
gttgagccctcttgt

SEQ ID NO: 135909 - DNA, 15 bp, Homo sapiens
tgttgagccctcttg

SEQ ID NO: 135910 - DNA, 15 bp, Homo sapiens
ctgttgagccctctt

SEQ ID NO: 135911 - DNA, 15 bp, Homo sapiens
actgttgagccctct

SEQ ID NO: 135912 - DNA, 15 bp, Homo sapiens
aactgttgagccctc

SEQ ID NO: 135913 - DNA, 15 bp, Homo sapiens
aaactgttgagccct

SEQ ID NO: 135914 - DNA, 15 bp, Homo sapiens
caaactgttgagccc

SEQ ID NO: 135915 - DNA, 15 bp, Homo sapiens
gcaaactgttgagcc

SEQ ID NO: 135916 - DNA, 15 bp, Homo sapiens
ggcaaactgttgagc

SEQ ID NO: 135917 - DNA, 15 bp, Homo sapiens
aggcaaactgttgag

SEQ ID NO: 135918 - DNA, 15 bp, Homo sapiens
gaggcaaactgttga

SEQ ID NO: 135919 - DNA, 15 bp, Homo sapiens
tgaggcaaactgttg

SEQ ID NO: 135920 - DNA, 15 bp, Homo sapiens
ctgaggcaaactgtt

SEQ ID NO: 135921 - DNA, 15 bp, Homo sapiens
actgaggcaaactgt

SEQ ID NO: 135922 - DNA, 15 bp, Homo sapiens
gactgaggcaaactg

SEQ ID NO: 135923 - DNA, 15 bp, Homo sapiens
agactgaggcaaact

SEQ ID NO: 135924 - DNA, 15 bp, Homo sapiens
tagactgaggcaaac

SEQ ID NO: 135925 - DNA, 15 bp, Homo sapiens
ttagactgaggcaaa

SEQ ID NO: 135926 - DNA, 15 bp, Homo sapiens
tttagactgaggcaa

SEQ ID NO: 135927 - DNA, 15 bp, Homo sapiens
ttttagactgaggca

SEQ ID NO: 135928 - DNA, 15 bp, Homo sapiens
tttttagactgaggc

SEQ ID NO: 135929 - DNA, 15 bp, Homo sapiens
ttttttagactgagg

SEQ ID NO: 135930 - DNA, 15 bp, Homo sapiens
tttttttagactgag

SEQ ID NO: 135931 - DNA, 15 bp, Homo sapiens
ttttttttagactga

SEQ ID NO: 135932 - DNA, 15 bp, Homo sapiens
tttttttttagactg

SEQ ID NO: 135933 - DNA, 15 bp, Homo sapiens
ttttttttttagact

SEQ ID NO: 135934 - DNA, 15 bp, Homo sapiens
tttttttttttagac

SEQ ID NO: 135935 - DNA, 15 bp, Homo sapiens
ttttttttttttaga

SEQ ID NO: 135936 - DNA, 15 bp, Homo sapiens
gttttttttttttag

SEQ ID NO: 135937 - DNA, 15 bp, Homo sapiens
ggtttttttttttta

SEQ ID NO: 135938 - DNA, 15 bp, Homo sapiens
gggtttttttttttt

SEQ ID NO: 135939 - DNA, 15 bp, Homo sapiens
tgggttttttttttt

SEQ ID NO: 135940 - DNA, 15 bp, Homo sapiens
ttgggtttttttttt

SEQ ID NO: 135941 - DNA, 15 bp, Homo sapiens
attgggttttttttt

SEQ ID NO: 135942 - DNA, 15 bp, Homo sapiens
gattgggtttttttt

SEQ ID NO: 135943 - DNA, 15 bp, Homo sapiens
tgattgggttttttt

SEQ ID NO: 135944 - DNA, 15 bp, Homo sapiens
atgattgggtttttt

SEQ ID NO: 135945 - DNA, 15 bp, Homo sapiens
aatgattgggttttt

SEQ ID NO: 135946 - DNA, 15 bp, Homo sapiens
aaatgattgggtttt

SEQ ID NO: 135947 - DNA, 15 bp, Homo sapiens
gaaatgattgggttt

SEQ ID NO: 135948 - DNA, 15 bp, Homo sapiens
agaaatgattgggtt

SEQ ID NO: 135949 - DNA, 15 bp, Homo sapiens
aagaaatgattgggt

SEQ ID NO: 135950 - DNA, 15 bp, Homo sapiens
taagaaatgattggg

SEQ ID NO: 135951 - DNA, 15 bp, Homo sapiens
ttaagaaatgattgg

SEQ ID NO: 135952 - DNA, 15 bp, Homo sapiens
cttaagaaatgattg

SEQ ID NO: 135953 - DNA, 15 bp, Homo sapiens
acttaagaaatgatt

SEQ ID NO: 135954 - DNA, 15 bp, Homo sapiens
aacttaagaaatgat

SEQ ID NO: 135955 - DNA, 15 bp, Homo sapiens
gaacttaagaaatga

SEQ ID NO: 135956 - DNA, 15 bp, Homo sapiens
agaacttaagaaatg

SEQ ID NO: 135957 - DNA, 15 bp, Homo sapiens
aagaacttaagaaat

SEQ ID NO: 135958 - DNA, 15 bp, Homo sapiens
aaagaacttaagaaa

SEQ ID NO: 135959 - DNA, 15 bp, Homo sapiens
gaaagaacttaagaa

SEQ ID NO: 135960 - DNA, 15 bp, Homo sapiens
tgaaagaacttaaga

SEQ ID NO: 135961 - DNA, 15 bp, Homo sapiens
gtgaaagaacttaag

SEQ ID NO: 135962 - DNA, 15 bp, Homo sapiens
tgtgaaagaacttaa

SEQ ID NO: 135963 - DNA, 15 bp, Homo sapiens
ttgtgaaagaactta

SEQ ID NO: 135964 - DNA, 15 bp, Homo sapiens
gttgtgaaagaactt

SEQ ID NO: 135965 - DNA, 15 bp, Homo sapiens
ggttgtgaaagaact

SEQ ID NO: 135966 - DNA, 15 bp, Homo sapiens
gggttgtgaaagaac

SEQ ID NO: 135967 - DNA, 15 bp, Homo sapiens
agggttgtgaaagaa

SEQ ID NO: 135968 - DNA, 15 bp, Homo sapiens
cagggttgtgaaaga

SEQ ID NO: 135969 - DNA, 15 bp, Homo sapiens
acagggttgtgaaag

SEQ ID NO: 135970 - DNA, 15 bp, Homo sapiens
aacagggttgtgaaa

SEQ ID NO: 135971 - DNA, 15 bp, Homo sapiens
aaacagggttgtgaa

SEQ ID NO: 135972 - DNA, 15 bp, Homo sapiens
aaaacagggttgtga

SEQ ID NO: 135973 - DNA, 15 bp, Homo sapiens
gaaaacagggttgtg

SEQ ID NO: 135974 - DNA, 15 bp, Homo sapiens
agaaaacagggttgt

SEQ ID NO: 135975 - DNA, 15 bp, Homo sapiens
gagaaaacagggttg

SEQ ID NO: 135976 - DNA, 15 bp, Homo sapiens
ggagaaaacagggtt

SEQ ID NO: 135977 - DNA, 15 bp, Homo sapiens
tggagaaaacagggt

SEQ ID NO: 135978 - DNA, 15 bp, Homo sapiens
atggagaaaacaggg

SEQ ID NO: 135979 - DNA, 15 bp, Homo sapiens
tatggagaaaacagg

SEQ ID NO: 135980 - DNA, 15 bp, Homo sapiens
ctatggagaaaacag

SEQ ID NO: 135981 - DNA, 15 bp, Homo sapiens
cctatggagaaaaca

SEQ ID NO: 135982 - DNA, 15 bp, Homo sapiens
tcctatggagaaaac

SEQ ID NO: 135983 - DNA, 15 bp, Homo sapiens
atcctatggagaaaa

SEQ ID NO: 135984 - DNA, 15 bp, Homo sapiens
aatcctatggagaaa

SEQ ID NO: 135985 - DNA, 15 bp, Homo sapiens
aaatcctatggagaa

SEQ ID NO: 135986 - DNA, 15 bp, Homo sapiens
taaatcctatggaga

SEQ ID NO: 135987 - DNA, 15 bp, Homo sapiens
gtaaatcctatggag

SEQ ID NO: 135988 - DNA, 15 bp, Homo sapiens
agtaaatcctatgga

SEQ ID NO: 135989 - DNA, 15 bp, Homo sapiens
aagtaaatcctatgg

SEQ ID NO: 135990 - DNA, 15 bp, Homo sapiens
aaagtaaatcctatg

SEQ ID NO: 135991 - DNA, 15 bp, Homo sapiens
aaaagtaaatcctat

SEQ ID NO: 135992 - DNA, 15 bp, Homo sapiens
aaaaagtaaatccta

SEQ ID NO: 135993 - DNA, 15 bp, Homo sapiens
taaaaagtaaatcct

SEQ ID NO: 135994 - DNA, 15 bp, Homo sapiens
ttaaaaagtaaatcc

SEQ ID NO: 135995 - DNA, 15 bp, Homo sapiens
gttaaaaagtaaatc

SEQ ID NO: 135996 - DNA, 15 bp, Homo sapiens
agttaaaaagtaaat

SEQ ID NO: 135997 - DNA, 15 bp, Homo sapiens
aagttaaaaagtaaa

SEQ ID NO: 135998 - DNA, 15 bp, Homo sapiens
gaagttaaaaagtaa

SEQ ID NO: 135999 - DNA, 15 bp, Homo sapiens
tgaagttaaaaagta

SEQ ID NO: 136000 - DNA, 15 bp, Homo sapiens
ctgaagttaaaaagt

SEQ ID NO: 136001 - DNA, 15 bp, Homo sapiens
actgaagttaaaaag

SEQ ID NO: 136002 - DNA, 15 bp, Homo sapiens
tactgaagttaaaaa

SEQ ID NO: 136003 - DNA, 15 bp, Homo sapiens
atactgaagttaaaa

SEQ ID NO: 136004 - DNA, 15 bp, Homo sapiens
aatactgaagttaaa

SEQ ID NO: 136005 - DNA, 15 bp, Homo sapiens
aaatactgaagttaa

SEQ ID NO: 136006 - DNA, 15 bp, Homo sapiens
aaaatactgaagtta

SEQ ID NO: 136007 - DNA, 15 bp, Homo sapiens
taaaatactgaagtt

SEQ ID NO: 136008 - DNA, 15 bp, Homo sapiens
ataaaatactgaagt

SEQ ID NO: 136009 - DNA, 15 bp, Homo sapiens
tataaaatactgaag

SEQ ID NO: 136010 - DNA, 15 bp, Homo sapiens
atataaaatactgaa

SEQ ID NO: 136011 - DNA, 15 bp, Homo sapiens
aatataaaatactga

SEQ ID NO: 136012 - DNA, 15 bp, Homo sapiens
aaatataaaatactg

SEQ ID NO: 136013 - DNA, 15 bp, Homo sapiens
aaaatataaaatact

SEQ ID NO: 136014 - DNA, 15 bp, Homo sapiens
caaaatataaaatac

SEQ ID NO: 136015 - DNA, 15 bp, Homo sapiens
acaaaatataaaata

SEQ ID NO: 136016 - DNA, 15 bp, Homo sapiens
gacaaaatataaaat

SEQ ID NO: 136017 - DNA, 15 bp, Homo sapiens
ggacaaaatataaaa

SEQ ID NO: 136018 - DNA, 15 bp, Homo sapiens
aggacaaaatataaa

SEQ ID NO: 136019 - DNA, 15 bp, Homo sapiens
aaggacaaaatataa

SEQ ID NO: 136020 - DNA, 15 bp, Homo sapiens
taaggacaaaatata

SEQ ID NO: 136021 - DNA, 15 bp, Homo sapiens
ttaaggacaaaatat

SEQ ID NO: 136022 - DNA, 15 bp, Homo sapiens
attaaggacaaaata

SEQ ID NO: 136023 - DNA, 15 bp, Homo sapiens
gattaaggacaaaat

SEQ ID NO: 136024 - DNA, 15 bp, Homo sapiens
ggattaaggacaaaa

SEQ ID NO: 136025 - DNA, 15 bp, Homo sapiens
gggattaaggacaaa

SEQ ID NO: 136026 - DNA, 15 bp, Homo sapiens
tgggattaaggacaa

SEQ ID NO: 136027 - DNA, 15 bp, Homo sapiens
ttgggattaaggaca

SEQ ID NO: 136028 - DNA, 15 bp, Homo sapiens
tttgggattaaggac

SEQ ID NO: 136029 - DNA, 15 bp, Homo sapiens
atttgggattaagga

SEQ ID NO: 136030 - DNA, 15 bp, Homo sapiens
tatttgggattaagg

SEQ ID NO: 136031 - DNA, 15 bp, Homo sapiens
atatttgggattaag

SEQ ID NO: 136032 - DNA, 15 bp, Homo sapiens
tatatttgggattaa

SEQ ID NO: 136033 - DNA, 15 bp, Homo sapiens
gtatatttgggatta

SEQ ID NO: 136034 - DNA, 15 bp, Homo sapiens
agtatatttgggatt

SEQ ID NO: 136035 - DNA, 15 bp, Homo sapiens
tagtatatttgggat

SEQ ID NO: 136036 - DNA, 15 bp, Homo sapiens
gtagtatatttggga

SEQ ID NO: 136037 - DNA, 15 bp, Homo sapiens
tgtagtatatttggg

SEQ ID NO: 136038 - DNA, 15 bp, Homo sapiens
atgtagtatatttgg

SEQ ID NO: 136039 - DNA, 15 bp, Homo sapiens
catgtagtatatttg

SEQ ID NO: 136040 - DNA, 15 bp, Homo sapiens
acatgtagtatattt

SEQ ID NO: 136041 - DNA, 15 bp, Homo sapiens
aacatgtagtatatt

SEQ ID NO: 136042 - DNA, 15 bp, Homo sapiens
gaacatgtagtatat

SEQ ID NO: 136043 - DNA, 15 bp, Homo sapiens
tgaacatgtagtata

SEQ ID NO: 136044 - DNA, 15 bp, Homo sapiens
atgaacatgtagtat

SEQ ID NO: 136045 - DNA, 15 bp, Homo sapiens
aatgaacatgtagta

SEQ ID NO: 136046 - DNA, 15 bp, Homo sapiens
caatgaacatgtagt

SEQ ID NO: 136047 - DNA, 15 bp, Homo sapiens
acaatgaacatgtag

SEQ ID NO: 136048 - DNA, 15 bp, Homo sapiens
tacaatgaacatgta

SEQ ID NO: 136049 - DNA, 15 bp, Homo sapiens
ctacaatgaacatgt

SEQ ID NO: 136050 - DNA, 15 bp, Homo sapiens
tctacaatgaacatg

SEQ ID NO: 136051 - DNA, 15 bp, Homo sapiens
ttctacaatgaacat

SEQ ID NO: 136052 - DNA, 15 bp, Homo sapiens
tttctacaatgaaca

SEQ ID NO: 136053 - DNA, 15 bp, Homo sapiens
ttttctacaatgaac

SEQ ID NO: 136054 - DNA, 15 bp, Homo sapiens
gttttctacaatgaa

SEQ ID NO: 136055 - DNA, 15 bp, Homo sapiens
cgttttctacaatga

SEQ ID NO: 136056 - DNA, 15 bp, Homo sapiens
acgttttctacaatg

SEQ ID NO: 136057 - DNA, 15 bp, Homo sapiens
tacgttttctacaat

SEQ ID NO: 136058 - DNA, 15 bp, Homo sapiens
ctacgttttctacaa

SEQ ID NO: 136059 - DNA, 15 bp, Homo sapiens
cctacgttttctaca

SEQ ID NO: 136060 - DNA, 15 bp, Homo sapiens
gcctacgttttctac

SEQ ID NO: 136061 - DNA, 15 bp, Homo sapiens
ggcctacgttttcta

SEQ ID NO: 136062 - DNA, 15 bp, Homo sapiens
cggcctacgttttct

SEQ ID NO: 136063 - DNA, 15 bp, Homo sapiens
acggcctacgttttc

SEQ ID NO: 136064 - DNA, 15 bp, Homo sapiens
cacggcctacgtttt

SEQ ID NO: 136065 - DNA, 15 bp, Homo sapiens
gcacggcctacgttt

SEQ ID NO: 136066 - DNA, 15 bp, Homo sapiens
tgcacggcctacgtt

SEQ ID NO: 136067 - DNA, 15 bp, Homo sapiens
ctgcacggcctacgt

SEQ ID NO: 136068 - DNA, 15 bp, Homo sapiens
cctgcacggcctacg

SEQ ID NO: 136069 - DNA, 15 bp, Homo sapiens
ccctgcacggcctac

SEQ ID NO: 136070 - DNA, 15 bp, Homo sapiens
cccctgcacggccta

SEQ ID NO: 136071 - DNA, 15 bp, Homo sapiens
gcccctgcacggcct

SEQ ID NO: 136072 - DNA, 15 bp, Homo sapiens
tgcccctgcacggcc

SEQ ID NO: 136073 - DNA, 15 bp, Homo sapiens
atgcccctgcacggc

SEQ ID NO: 136074 - DNA, 15 bp, Homo sapiens
aatgcccctgcacgg

SEQ ID NO: 136075 - DNA, 15 bp, Homo sapiens
taatgcccctgcacg

SEQ ID NO: 136076 - DNA, 15 bp, Homo sapiens
ttaatgcccctgcac

SEQ ID NO: 136077 - DNA, 15 bp, Homo sapiens
tttaatgcccctgca

SEQ ID NO: 136078 - DNA, 15 bp, Homo sapiens
gtttaatgcccctgc

SEQ ID NO: 136079 - DNA, 15 bp, Homo sapiens
tgtttaatgcccctg

SEQ ID NO: 136080 - DNA, 15 bp, Homo sapiens
ttgtttaatgcccct

SEQ ID NO: 136081 - DNA, 15 bp, Homo sapiens
tttgtttaatgcccc

SEQ ID NO: 136082 - DNA, 15 bp, Homo sapiens
ttttgtttaatgccc

SEQ ID NO: 136083 - DNA, 15 bp, Homo sapiens
tttttgtttaatgcc

SEQ ID NO: 136084 - DNA, 15 bp, Homo sapiens
ctttttgtttaatgc

SEQ ID NO: 136085 - DNA, 15 bp, Homo sapiens
cctttttgtttaatg

SEQ ID NO: 136086 - DNA, 15 bp, Homo sapiens
tcctttttgtttaat

SEQ ID NO: 136087 - DNA, 15 bp, Homo sapiens
gtcctttttgtttaa

SEQ ID NO: 136088 - DNA, 15 bp, Homo sapiens
tgtcctttttgttta

SEQ ID NO: 136089 - DNA, 15 bp, Homo sapiens
gtgtcctttttgttt

SEQ ID NO: 136090 - DNA, 15 bp, Homo sapiens
tgtgtcctttttgtt

SEQ ID NO: 136091 - DNA, 15 bp, Homo sapiens
ctgtgtcctttttgt

SEQ ID NO: 136092 - DNA, 15 bp, Homo sapiens
actgtgtcctttttg

SEQ ID NO: 136093 - DNA, 15 bp, Homo sapiens
gactgtgtccttttt

SEQ ID NO: 136094 - DNA, 15 bp, Homo sapiens
tgactgtgtcctttt

SEQ ID NO: 136095 - DNA, 15 bp, Homo sapiens
gtgactgtgtccttt

SEQ ID NO: 136096 - DNA, 15 bp, Homo sapiens
tgtgactgtgtcctt

SEQ ID NO: 136097 - DNA, 15 bp, Homo sapiens
atgtgactgtgtcct

SEQ ID NO: 136098 - DNA, 15 bp, Homo sapiens
gatgtgactgtgtcc

SEQ ID NO: 136099 - DNA, 15 bp, Homo sapiens
agatgtgactgtgtc

SEQ ID NO: 136100 - DNA, 15 bp, Homo sapiens
cagatgtgactgtgt

SEQ ID NO: 136101 - DNA, 15 bp, Homo sapiens
acagatgtgactgtg

SEQ ID NO: 136102 - DNA, 15 bp, Homo sapiens
aacagatgtgactgt

SEQ ID NO: 136103 - DNA, 15 bp, Homo sapiens
taacagatgtgactg

SEQ ID NO: 136104 - DNA, 15 bp, Homo sapiens
ctaacagatgtgact

SEQ ID NO: 136105 - DNA, 15 bp, Homo sapiens
cctaacagatgtgac

SEQ ID NO: 136106 - DNA, 15 bp, Homo sapiens
tcctaacagatgtga

SEQ ID NO: 136107 - DNA, 15 bp, Homo sapiens
atcctaacagatgtg

SEQ ID NO: 136108 - DNA, 15 bp, Homo sapiens
catcctaacagatgt

SEQ ID NO: 136109 - DNA, 15 bp, Homo sapiens
ccatcctaacagatg

SEQ ID NO: 136110 - DNA, 15 bp, Homo sapiens
gccatcctaacagat

SEQ ID NO: 136111 - DNA, 15 bp, Homo sapiens
agccatcctaacaga

SEQ ID NO: 136112 - DNA, 15 bp, Homo sapiens
tagccatcctaacag

SEQ ID NO: 136113 - DNA, 15 bp, Homo sapiens
gtagccatcctaaca

SEQ ID NO: 136114 - DNA, 15 bp, Homo sapiens
agtagccatcctaac

SEQ ID NO: 136115 - DNA, 15 bp, Homo sapiens
cagtagccatcctaa

SEQ ID NO: 136116 - DNA, 15 bp, Homo sapiens
acagtagccatccta

SEQ ID NO: 136117 - DNA, 15 bp, Homo sapiens
tacagtagccatcct

SEQ ID NO: 136118 - DNA, 15 bp, Homo sapiens
ttacagtagccatcc

SEQ ID NO: 136119 - DNA, 15 bp, Homo sapiens
tttacagtagccatc

SEQ ID NO: 136120 - DNA, 15 bp, Homo sapiens
ttttacagtagccat

SEQ ID NO: 136121 - DNA, 15 bp, Homo sapiens
tttttacagtagcca

SEQ ID NO: 136122 - DNA, 15 bp, Homo sapiens
ttttttacagtagcc

SEQ ID NO: 136123 - DNA, 15 bp, Homo sapiens
tttttttacagtagc

SEQ ID NO: 136124 - DNA, 15 bp, Homo sapiens
ttttttttacagtag

SEQ ID NO: 136125 - DNA, 15 bp, Homo sapiens
tttttttttacagta

SEQ ID NO: 136126 - DNA, 15 bp, Homo sapiens
ttttttttttacagt

SEQ ID NO: 136127 - DNA, 15 bp, Homo sapiens
tttttttttttacag

SEQ ID NO: 136128 - DNA, 15 bp, Homo sapiens
ttttttttttttaca

SEQ ID NO: 136129 - DNA, 15 bp, Homo sapiens
tttttttttttttac

SEQ ID NO: 136130 - DNA, 15 bp, Homo sapiens
attttttttttttta

SEQ ID NO: 136131 - DNA, 15 bp, Homo sapiens
tattttttttttttt

SEQ ID NO: 136132 - DNA, 15 bp, Homo sapiens
ctatttttttttttt

SEQ ID NO: 136133 - DNA, 15 bp, Homo sapiens
tctattttttttttt

SEQ ID NO: 136134 - DNA, 15 bp, Homo sapiens
ttctatttttttttt

SEQ ID NO: 136135 - DNA, 15 bp, Homo sapiens
tttctattttttttt

SEQ ID NO: 136136 - DNA, 15 bp, Homo sapiens
ttttctatttttttt

SEQ ID NO: 136137 - DNA, 15 bp, Homo sapiens
attttctattttttt

SEQ ID NO: 136138 - DNA, 15 bp, Homo sapiens
gattttctatttttt

SEQ ID NO: 136139 - DNA, 15 bp, Homo sapiens
tgattttctattttt

SEQ ID NO: 136140 - DNA, 15 bp, Homo sapiens
gtgattttctatttt

SEQ ID NO: 136141 - DNA, 15 bp, Homo sapiens
ggtgattttctattt

SEQ ID NO: 136142 - DNA, 15 bp, Homo sapiens
tggtgattttctatt

SEQ ID NO: 136143 - DNA, 15 bp, Homo sapiens
ctggtgattttctat

SEQ ID NO: 136144 - DNA, 15 bp, Homo sapiens
actggtgattttcta

SEQ ID NO: 136145 - DNA, 15 bp, Homo sapiens
cactggtgattttct

SEQ ID NO: 136146 - DNA, 15 bp, Homo sapiens
acactggtgattttc

SEQ ID NO: 136147 - DNA, 15 bp, Homo sapiens
aacactggtgatttt

SEQ ID NO: 136148 - DNA, 15 bp, Homo sapiens
caacactggtgattt

SEQ ID NO: 136149 - DNA, 15 bp, Homo sapiens
ccaacactggtgatt

SEQ ID NO: 136150 - DNA, 15 bp, Homo sapiens
accaacactggtgat

SEQ ID NO: 136151 - DNA, 15 bp, Homo sapiens
caccaacactggtga

SEQ ID NO: 136152 - DNA, 15 bp, Homo sapiens
tcaccaacactggtg

SEQ ID NO: 136153 - DNA, 15 bp, Homo sapiens
ctcaccaacactggt

SEQ ID NO: 136154 - DNA, 15 bp, Homo sapiens
cctcaccaacactgg

SEQ ID NO: 136155 - DNA, 15 bp, Homo sapiens
tcctcaccaacactg

SEQ ID NO: 136156 - DNA, 15 bp, Homo sapiens
atcctcaccaacact

SEQ ID NO: 136157 - DNA, 15 bp, Homo sapiens
catcctcaccaacac

SEQ ID NO: 136158 - DNA, 15 bp, Homo sapiens
acatcctcaccaaca

SEQ ID NO: 136159 - DNA, 15 bp, Homo sapiens
cacatcctcaccaac

SEQ ID NO: 136160 - DNA, 15 bp, Homo sapiens
ccacatcctcaccaa

SEQ ID NO: 136161 - DNA, 15 bp, Homo sapiens
tccacatcctcacca

SEQ ID NO: 136162 - DNA, 15 bp, Homo sapiens
ctccacatcctcacc

SEQ ID NO: 136163 - DNA, 15 bp, Homo sapiens
tctccacatcctcac

SEQ ID NO: 136164 - DNA, 15 bp, Homo sapiens
ttctccacatcctca

SEQ ID NO: 136165 - DNA, 15 bp, Homo sapiens
tttctccacatcctc

SEQ ID NO: 136166 - DNA, 15 bp, Homo sapiens
atttctccacatcct

SEQ ID NO: 136167 - DNA, 15 bp, Homo sapiens
aatttctccacatcc

SEQ ID NO: 136168 - DNA, 15 bp, Homo sapiens
caatttctccacatc

SEQ ID NO: 136169 - DNA, 15 bp, Homo sapiens
ccaatttctccacat

SEQ ID NO: 136170 - DNA, 15 bp, Homo sapiens
tccaatttctccaca

SEQ ID NO: 136171 - DNA, 15 bp, Homo sapiens
ttccaatttctccac

SEQ ID NO: 136172 - DNA, 15 bp, Homo sapiens
gttccaatttctcca

SEQ ID NO: 136173 - DNA, 15 bp, Homo sapiens
ggttccaatttctcc

SEQ ID NO: 136174 - DNA, 15 bp, Homo sapiens
gggttccaatttctc

SEQ ID NO: 136175 - DNA, 15 bp, Homo sapiens
agggttccaatttct

SEQ ID NO: 136176 - DNA, 15 bp, Homo sapiens
aagggttccaatttc

SEQ ID NO: 136177 - DNA, 15 bp, Homo sapiens
caagggttccaattt

SEQ ID NO: 136178 - DNA, 15 bp, Homo sapiens
acaagggttccaatt

SEQ ID NO: 136179 - DNA, 15 bp, Homo sapiens
cacaagggttccaat

SEQ ID NO: 136180 - DNA, 15 bp, Homo sapiens
gcacaagggttccaa

SEQ ID NO: 136181 - DNA, 15 bp, Homo sapiens
tgcacaagggttcca

SEQ ID NO: 136182 - DNA, 15 bp, Homo sapiens
ctgcacaagggttcc

SEQ ID NO: 136183 - DNA, 15 bp, Homo sapiens
actgcacaagggttc

SEQ ID NO: 136184 - DNA, 15 bp, Homo sapiens
cactgcacaagggtt

SEQ ID NO: 136185 - DNA, 15 bp, Homo sapiens
acactgcacaagggt

SEQ ID NO: 136186 - DNA, 15 bp, Homo sapiens
aacactgcacaaggg

SEQ ID NO: 136187 - DNA, 15 bp, Homo sapiens
aaacactgcacaagg

SEQ ID NO: 136188 - DNA, 15 bp, Homo sapiens
caaacactgcacaag

SEQ ID NO: 136189 - DNA, 15 bp, Homo sapiens
acaaacactgcacaa

SEQ ID NO: 136190 - DNA, 15 bp, Homo sapiens
cacaaacactgcaca

SEQ ID NO: 136191 - DNA, 15 bp, Homo sapiens
ccacaaacactgcac

SEQ ID NO: 136192 - DNA, 15 bp, Homo sapiens
cccacaaacactgca

SEQ ID NO: 136193 - DNA, 15 bp, Homo sapiens
tcccacaaacactgc

SEQ ID NO: 136194 - DNA, 15 bp, Homo sapiens
ttcccacaaacactg

SEQ ID NO: 136195 - DNA, 15 bp, Homo sapiens
attcccacaaacact

SEQ ID NO: 136196 - DNA, 15 bp, Homo sapiens
cattcccacaaacac

SEQ ID NO: 136197 - DNA, 15 bp, Homo sapiens
gcattcccacaaaca

SEQ ID NO: 136198 - DNA, 15 bp, Homo sapiens
tgcattcccacaaac

SEQ ID NO: 136199 - DNA, 15 bp, Homo sapiens
ttgcattcccacaaa

SEQ ID NO: 136200 - DNA, 15 bp, Homo sapiens
tttgcattcccacaa

SEQ ID NO: 136201 - DNA, 15 bp, Homo sapiens
ctttgcattcccaca

SEQ ID NO: 136202 - DNA, 15 bp, Homo sapiens
actttgcattcccac

SEQ ID NO: 136203 - DNA, 15 bp, Homo sapiens
cactttgcattccca

SEQ ID NO: 136204 - DNA, 15 bp, Homo sapiens
ccactttgcattccc

SEQ ID NO: 136205 - DNA, 15 bp, Homo sapiens
accactttgcattcc

SEQ ID NO: 136206 - DNA, 15 bp, Homo sapiens
taccactttgcattc

SEQ ID NO: 136207 - DNA, 15 bp, Homo sapiens
gtaccactttgcatt

SEQ ID NO: 136208 - DNA, 15 bp, Homo sapiens
tgtaccactttgcat

SEQ ID NO: 136209 - DNA, 15 bp, Homo sapiens
ctgtaccactttgca

SEQ ID NO: 136210 - DNA, 15 bp, Homo sapiens
tctgtaccactttgc

SEQ ID NO: 136211 - DNA, 15 bp, Homo sapiens
atctgtaccactttg

SEQ ID NO: 136212 - DNA, 15 bp, Homo sapiens
catctgtaccacttt

SEQ ID NO: 136213 - DNA, 15 bp, Homo sapiens
gcatctgtaccactt

SEQ ID NO: 136214 - DNA, 15 bp, Homo sapiens
cgcatctgtaccact

SEQ ID NO: 136215 - DNA, 15 bp, Homo sapiens
ccgcatctgtaccac

SEQ ID NO: 136216 - DNA, 15 bp, Homo sapiens
accgcatctgtacca

SEQ ID NO: 136217 - DNA, 15 bp, Homo sapiens
caccgcatctgtacc

SEQ ID NO: 136218 - DNA, 15 bp, Homo sapiens
ccaccgcatctgtac

SEQ ID NO: 136219 - DNA, 15 bp, Homo sapiens
tccaccgcatctgta

SEQ ID NO: 136220 - DNA, 15 bp, Homo sapiens
ttccaccgcatctgt

SEQ ID NO: 136221 - DNA, 15 bp, Homo sapiens
tttccaccgcatctg

SEQ ID NO: 136222 - DNA, 15 bp, Homo sapiens
ctttccaccgcatct

SEQ ID NO: 136223 - DNA, 15 bp, Homo sapiens
gctttccaccgcatc

SEQ ID NO: 136224 - DNA, 15 bp, Homo sapiens
tgctttccaccgcat

SEQ ID NO: 136225 - DNA, 15 bp, Homo sapiens
ctgctttccaccgca

SEQ ID NO: 136226 - DNA, 15 bp, Homo sapiens
actgctttccaccgc

SEQ ID NO: 136227 - DNA, 15 bp, Homo sapiens
tactgctttccaccg

SEQ ID NO: 136228 - DNA, 15 bp, Homo sapiens
atactgctttccacc

SEQ ID NO: 136229 - DNA, 15 bp, Homo sapiens
catactgctttccac

SEQ ID NO: 136230 - DNA, 15 bp, Homo sapiens
ccatactgctttcca

SEQ ID NO: 136231 - DNA, 15 bp, Homo sapiens
gccatactgctttcc

SEQ ID NO: 136232 - DNA, 15 bp, Homo sapiens
tgccatactgctttc

SEQ ID NO: 136233 - DNA, 15 bp, Homo sapiens
ctgccatactgcttt

SEQ ID NO: 136234 - DNA, 15 bp, Homo sapiens
actgccatactgctt

SEQ ID NO: 136235 - DNA, 15 bp, Homo sapiens
aactgccatactgct

SEQ ID NO: 136236 - DNA, 15 bp, Homo sapiens
aaactgccatactgc

SEQ ID NO: 136237 - DNA, 15 bp, Homo sapiens
gaaactgccatactg

SEQ ID NO: 136238 - DNA, 15 bp, Homo sapiens
agaaactgccatact

SEQ ID NO: 136239 - DNA, 15 bp, Homo sapiens
gagaaactgccatac

SEQ ID NO: 136240 - DNA, 15 bp, Homo sapiens
tgagaaactgccata

SEQ ID NO: 136241 - DNA, 15 bp, Homo sapiens
ttgagaaactgccat

SEQ ID NO: 136242 - DNA, 15 bp, Homo sapiens
tttgagaaactgcca

SEQ ID NO: 136243 - DNA, 15 bp, Homo sapiens
ttttgagaaactgcc

SEQ ID NO: 136244 - DNA, 15 bp, Homo sapiens
gttttgagaaactgc

SEQ ID NO: 136245 - DNA, 15 bp, Homo sapiens
tgttttgagaaactg

SEQ ID NO: 136246 - DNA, 15 bp, Homo sapiens
ttgttttgagaaact

SEQ ID NO: 136247 - DNA, 15 bp, Homo sapiens
tttgttttgagaaac

SEQ ID NO: 136248 - DNA, 15 bp, Homo sapiens
atttgttttgagaaa

SEQ ID NO: 136249 - DNA, 15 bp, Homo sapiens
aatttgttttgagaa

SEQ ID NO: 136250 - DNA, 15 bp, Homo sapiens
taatttgttttgaga

SEQ ID NO: 136251 - DNA, 15 bp, Homo sapiens
ttaatttgttttgag

SEQ ID NO: 136252 - DNA, 15 bp, Homo sapiens
attaatttgttttga

SEQ ID NO: 136253 - DNA, 15 bp, Homo sapiens
gattaatttgttttg

SEQ ID NO: 136254 - DNA, 15 bp, Homo sapiens
tgattaatttgtttt

SEQ ID NO: 136255 - DNA, 15 bp, Homo sapiens
atgattaatttgttt

SEQ ID NO: 136256 - DNA, 15 bp, Homo sapiens
aatgattaatttgtt

SEQ ID NO: 136257 - DNA, 15 bp, Homo sapiens
gaatgattaatttgt

SEQ ID NO: 136258 - DNA, 15 bp, Homo sapiens
tgaatgattaatttg

SEQ ID NO: 136259 - DNA, 15 bp, Homo sapiens
ttgaatgattaattt

SEQ ID NO: 136260 - DNA, 15 bp, Homo sapiens
attgaatgattaatt

SEQ ID NO: 136261 - DNA, 15 bp, Homo sapiens
aattgaatgattaat

SEQ ID NO: 136262 - DNA, 15 bp, Homo sapiens
taattgaatgattaa

SEQ ID NO: 136263 - DNA, 15 bp, Homo sapiens
ataattgaatgatta

SEQ ID NO: 136264 - DNA, 15 bp, Homo sapiens
gataattgaatgatt

SEQ ID NO: 136265 - DNA, 15 bp, Homo sapiens
tgataattgaatgat

SEQ ID NO: 136266 - DNA, 15 bp, Homo sapiens
atgataattgaatga

SEQ ID NO: 136267 - DNA, 15 bp, Homo sapiens
tatgataattgaatg

SEQ ID NO: 136268 - DNA, 15 bp, Homo sapiens
atatgataattgaat

SEQ ID NO: 136269 - DNA, 15 bp, Homo sapiens
tatatgataattgaa

SEQ ID NO: 136270 - DNA, 15 bp, Homo sapiens
ttatatgataattga

SEQ ID NO: 136271 - DNA, 15 bp, Homo sapiens
attatatgataattg

SEQ ID NO: 136272 - DNA, 15 bp, Homo sapiens
gattatatgataatt

SEQ ID NO: 136273 - DNA, 15 bp, Homo sapiens
ggattatatgataat

SEQ ID NO: 136274 - DNA, 15 bp, Homo sapiens
tggattatatgataa

SEQ ID NO: 136275 - DNA, 15 bp, Homo sapiens
ctggattatatgata

SEQ ID NO: 136276 - DNA, 15 bp, Homo sapiens
gctggattatatgat

SEQ ID NO: 136277 - DNA, 15 bp, Homo sapiens
tgctggattatatga

SEQ ID NO: 136278 - DNA, 15 bp, Homo sapiens
ttgctggattatatg

SEQ ID NO: 136279 - DNA, 15 bp, Homo sapiens
attgctggattatat

SEQ ID NO: 136280 - DNA, 15 bp, Homo sapiens
aattgctggattata

SEQ ID NO: 136281 - DNA, 15 bp, Homo sapiens
gaattgctggattat

SEQ ID NO: 136282 - DNA, 15 bp, Homo sapiens
ggaattgctggatta

SEQ ID NO: 136283 - DNA, 15 bp, Homo sapiens
tggaattgctggatt

SEQ ID NO: 136284 - DNA, 15 bp, Homo sapiens
gtggaattgctggat

SEQ ID NO: 136285 - DNA, 15 bp, Homo sapiens
agtggaattgctgga

SEQ ID NO: 136286 - DNA, 15 bp, Homo sapiens
aagtggaattgctgg

SEQ ID NO: 136287 - DNA, 15 bp, Homo sapiens
gaagtggaattgctg

SEQ ID NO: 136288 - DNA, 15 bp, Homo sapiens
agaagtggaattgct

SEQ ID NO: 136289 - DNA, 15 bp, Homo sapiens
cagaagtggaattgc

SEQ ID NO: 136290 - DNA, 15 bp, Homo sapiens
ccagaagtggaattg

SEQ ID NO: 136291 - DNA, 15 bp, Homo sapiens
accagaagtggaatt

SEQ ID NO: 136292 - DNA, 15 bp, Homo sapiens
aaccagaagtggaat

SEQ ID NO: 136293 - DNA, 15 bp, Homo sapiens
taaccagaagtggaa

SEQ ID NO: 136294 - DNA, 15 bp, Homo sapiens
ctaaccagaagtgga

SEQ ID NO: 136295 - DNA, 15 bp, Homo sapiens
tctaaccagaagtgg

SEQ ID NO: 136296 - DNA, 15 bp, Homo sapiens
atctaaccagaagtg

SEQ ID NO: 136297 - DNA, 15 bp, Homo sapiens
tatctaaccagaagt

SEQ ID NO: 136298 - DNA, 15 bp, Homo sapiens
atatctaaccagaag

SEQ ID NO: 136299 - DNA, 15 bp, Homo sapiens
gatatctaaccagaa

SEQ ID NO: 136300 - DNA, 15 bp, Homo sapiens
ggatatctaaccaga

SEQ ID NO: 136301 - DNA, 15 bp, Homo sapiens
tggatatctaaccag

SEQ ID NO: 136302 - DNA, 15 bp, Homo sapiens
ttggatatctaacca

SEQ ID NO: 136303 - DNA, 15 bp, Homo sapiens
tttggatatctaacc

SEQ ID NO: 136304 - DNA, 15 bp, Homo sapiens
ttttggatatctaac

SEQ ID NO: 136305 - DNA, 15 bp, Homo sapiens
tttttggatatctaa

SEQ ID NO: 136306 - DNA, 15 bp, Homo sapiens
ttttttggatatcta

SEQ ID NO: 136307 - DNA, 15 bp, Homo sapiens
gttttttggatatct

SEQ ID NO: 136308 - DNA, 15 bp, Homo sapiens
agttttttggatatc

SEQ ID NO: 136309 - DNA, 15 bp, Homo sapiens
aagttttttggatat

SEQ ID NO: 136310 - DNA, 15 bp, Homo sapiens
taagttttttggata

SEQ ID NO: 136311 - DNA, 15 bp, Homo sapiens
ttaagttttttggat

SEQ ID NO: 136312 - DNA, 15 bp, Homo sapiens
tttaagttttttgga

SEQ ID NO: 136313 - DNA, 15 bp, Homo sapiens
ttttaagttttttgg

SEQ ID NO: 136314 - DNA, 15 bp, Homo sapiens
cttttaagttttttg

SEQ ID NO: 136315 - DNA, 15 bp, Homo sapiens
gcttttaagtttttt

SEQ ID NO: 136316 - DNA, 15 bp, Homo sapiens
tgcttttaagttttt

SEQ ID NO: 136317 - DNA, 15 bp, Homo sapiens
ctgcttttaagtttt

SEQ ID NO: 136318 - DNA, 15 bp, Homo sapiens
cctgcttttaagttt

SEQ ID NO: 136319 - DNA, 15 bp, Homo sapiens
ccctgcttttaagtt

SEQ ID NO: 136320 - DNA, 15 bp, Homo sapiens
accctgcttttaagt

SEQ ID NO: 136321 - DNA, 15 bp, Homo sapiens
gaccctgcttttaag

SEQ ID NO: 136322 - DNA, 15 bp, Homo sapiens
agaccctgcttttaa

SEQ ID NO: 136323 - DNA, 15 bp, Homo sapiens
aagaccctgctttta

SEQ ID NO: 136324 - DNA, 15 bp, Homo sapiens
taagaccctgctttt

SEQ ID NO: 136325 - DNA, 15 bp, Homo sapiens
ttaagaccctgcttt

SEQ ID NO: 136326 - DNA, 15 bp, Homo sapiens
cttaagaccctgctt

SEQ ID NO: 136327 - DNA, 15 bp, Homo sapiens
ccttaagaccctgct

SEQ ID NO: 136328 - DNA, 15 bp, Homo sapiens
tccttaagaccctgc

SEQ ID NO: 136329 - DNA, 15 bp, Homo sapiens
ctccttaagaccctg

SEQ ID NO: 136330 - DNA, 15 bp, Homo sapiens
tctccttaagaccct

SEQ ID NO: 136331 - DNA, 15 bp, Homo sapiens
atctccttaagaccc

SEQ ID NO: 136332 - DNA, 15 bp, Homo sapiens
tatctccttaagacc

SEQ ID NO: 136333 - DNA, 15 bp, Homo sapiens
atatctccttaagac

SEQ ID NO: 136334 - DNA, 15 bp, Homo sapiens
aatatctccttaaga

SEQ ID NO: 136335 - DNA, 15 bp, Homo sapiens
aaatatctccttaag

SEQ ID NO: 136336 - DNA, 15 bp, Homo sapiens
caaatatctccttaa

SEQ ID NO: 136337 - DNA, 15 bp, Homo sapiens
acaaatatctcctta

SEQ ID NO: 136338 - DNA, 15 bp, Homo sapiens
tacaaatatctcctt

SEQ ID NO: 136339 - DNA, 15 bp, Homo sapiens
gtacaaatatctcct

SEQ ID NO: 136340 - DNA, 15 bp, Homo sapiens
tgtacaaatatctcc

SEQ ID NO: 136341 - DNA, 15 bp, Homo sapiens
gtgtacaaatatctc

SEQ ID NO: 136342 - DNA, 15 bp, Homo sapiens
ggtgtacaaatatct

SEQ ID NO: 136343 - DNA, 15 bp, Homo sapiens
gggtgtacaaatatc

SEQ ID NO: 136344 - DNA, 15 bp, Homo sapiens
tgggtgtacaaatat

SEQ ID NO: 136345 - DNA, 15 bp, Homo sapiens
atgggtgtacaaata

SEQ ID NO: 136346 - DNA, 15 bp, Homo sapiens
catgggtgtacaaat

SEQ ID NO: 136347 - DNA, 15 bp, Homo sapiens
acatgggtgtacaaa

SEQ ID NO: 136348 - DNA, 15 bp, Homo sapiens
aacatgggtgtacaa

SEQ ID NO: 136349 - DNA, 15 bp, Homo sapiens
gaacatgggtgtaca

SEQ ID NO: 136350 - DNA, 15 bp, Homo sapiens
tgaacatgggtgtac

SEQ ID NO: 136351 - DNA, 15 bp, Homo sapiens
gtgaacatgggtgta

SEQ ID NO: 136352 - DNA, 15 bp, Homo sapiens
tgtgaacatgggtgt

SEQ ID NO: 136353 - DNA, 15 bp, Homo sapiens
ctgtgaacatgggtg

SEQ ID NO: 136354 - DNA, 15 bp, Homo sapiens
gctgtgaacatgggt

SEQ ID NO: 136355 - DNA, 15 bp, Homo sapiens
tgctgtgaacatggg

SEQ ID NO: 136356 - DNA, 15 bp, Homo sapiens
ctgctgtgaacatgg

SEQ ID NO: 136357 - DNA, 15 bp, Homo sapiens
gctgctgtgaacatg

SEQ ID NO: 136358 - DNA, 15 bp, Homo sapiens
tgctgctgtgaacat

SEQ ID NO: 136359 - DNA, 15 bp, Homo sapiens
atgctgctgtgaaca

SEQ ID NO: 136360 - DNA, 15 bp, Homo sapiens
aatgctgctgtgaac

SEQ ID NO: 136361 - DNA, 15 bp, Homo sapiens
taatgctgctgtgaa

SEQ ID NO: 136362 - DNA, 15 bp, Homo sapiens
ataatgctgctgtga

SEQ ID NO: 136363 - DNA, 15 bp, Homo sapiens
aataatgctgctgtg

SEQ ID NO: 136364 - DNA, 15 bp, Homo sapiens
aaataatgctgctgt

SEQ ID NO: 136365 - DNA, 15 bp, Homo sapiens
taaataatgctgctg

SEQ ID NO: 136366 - DNA, 15 bp, Homo sapiens
gtaaataatgctgct

SEQ ID NO: 136367 - DNA, 15 bp, Homo sapiens
tgtaaataatgctgc

SEQ ID NO: 136368 - DNA, 15 bp, Homo sapiens
ttgtaaataatgctg

SEQ ID NO: 136369 - DNA, 15 bp, Homo sapiens
attgtaaataatgct

SEQ ID NO: 136370 - DNA, 15 bp, Homo sapiens
cattgtaaataatgc

SEQ ID NO: 136371 - DNA, 15 bp, Homo sapiens
ccattgtaaataatg

SEQ ID NO: 136372 - DNA, 15 bp, Homo sapiens
gccattgtaaataat

SEQ ID NO: 136373 - DNA, 15 bp, Homo sapiens
ggccattgtaaataa

SEQ ID NO: 136374 - DNA, 15 bp, Homo sapiens
tggccattgtaaata

SEQ ID NO: 136375 - DNA, 15 bp, Homo sapiens
ttggccattgtaaat

SEQ ID NO: 136376 - DNA, 15 bp, Homo sapiens
tttggccattgtaaa

SEQ ID NO: 136377 - DNA, 15 bp, Homo sapiens
ctttggccattgtaa

SEQ ID NO: 136378 - DNA, 15 bp, Homo sapiens
cctttggccattgta

SEQ ID NO: 136379 - DNA, 15 bp, Homo sapiens
acctttggccattgt

SEQ ID NO: 136380 - DNA, 15 bp, Homo sapiens
cacctttggccattg

SEQ ID NO: 136381 - DNA, 15 bp, Homo sapiens
ccacctttggccatt

SEQ ID NO: 136382 - DNA, 15 bp, Homo sapiens
tccacctttggccat

SEQ ID NO: 136383 - DNA, 15 bp, Homo sapiens
ttccacctttggcca

SEQ ID NO: 136384 - DNA, 15 bp, Homo sapiens
cttccacctttggcc

SEQ ID NO: 136385 - DNA, 15 bp, Homo sapiens
gcttccacctttggc

SEQ ID NO: 136386 - DNA, 15 bp, Homo sapiens
tgcttccacctttgg

SEQ ID NO: 136387 - DNA, 15 bp, Homo sapiens
ttgcttccacctttg

SEQ ID NO: 136388 - DNA, 15 bp, Homo sapiens
attgcttccaccttt

SEQ ID NO: 136389 - DNA, 15 bp, Homo sapiens
aattgcttccacctt

SEQ ID NO: 136390 - DNA, 15 bp, Homo sapiens
gaattgcttccacct

SEQ ID NO: 136391 - DNA, 15 bp, Homo sapiens
tgaattgcttccacc

SEQ ID NO: 136392 - DNA, 15 bp, Homo sapiens
ttgaattgcttccac

SEQ ID NO: 136393 - DNA, 15 bp, Homo sapiens
cttgaattgcttcca

SEQ ID NO: 136394 - DNA, 15 bp, Homo sapiens
ccttgaattgcttcc

SEQ ID NO: 136395 - DNA, 15 bp, Homo sapiens
cccttgaattgcttc

SEQ ID NO: 136396 - DNA, 15 bp, Homo sapiens
acccttgaattgctt

SEQ ID NO: 136397 - DNA, 15 bp, Homo sapiens
aacccttgaattgct

SEQ ID NO: 136398 - DNA, 15 bp, Homo sapiens
gaacccttgaattgc

SEQ ID NO: 136399 - DNA, 15 bp, Homo sapiens
tgaacccttgaattg

SEQ ID NO: 136400 - DNA, 15 bp, Homo sapiens
atgaacccttgaatt

SEQ ID NO: 136401 - DNA, 15 bp, Homo sapiens
aatgaacccttgaat

SEQ ID NO: 136402 - DNA, 15 bp, Homo sapiens
gaatgaacccttgaa

SEQ ID NO: 136403 - DNA, 15 bp, Homo sapiens
tgaatgaacccttga

SEQ ID NO: 136404 - DNA, 15 bp, Homo sapiens
gtgaatgaacccttg

SEQ ID NO: 136405 - DNA, 15 bp, Homo sapiens
tgtgaatgaaccctt

SEQ ID NO: 136406 - DNA, 15 bp, Homo sapiens
ctgtgaatgaaccct

SEQ ID NO: 136407 - DNA, 15 bp, Homo sapiens
tctgtgaatgaaccc

SEQ ID NO: 136408 - DNA, 15 bp, Homo sapiens
atctgtgaatgaacc

SEQ ID NO: 136409 - DNA, 15 bp, Homo sapiens
catctgtgaatgaac

SEQ ID NO: 136410 - DNA, 15 bp, Homo sapiens
tcatctgtgaatgaa

SEQ ID NO: 136411 - DNA, 15 bp, Homo sapiens
ttcatctgtgaatga

SEQ ID NO: 136412 - DNA, 15 bp, Homo sapiens
attcatctgtgaatg

SEQ ID NO: 136413 - DNA, 15 bp, Homo sapiens
tattcatctgtgaat

SEQ ID NO: 136414 - DNA, 15 bp, Homo sapiens
ctattcatctgtgaa

SEQ ID NO: 136415 - DNA, 15 bp, Homo sapiens
tctattcatctgtga

SEQ ID NO: 136416 - DNA, 15 bp, Homo sapiens
atctattcatctgtg

SEQ ID NO: 136417 - DNA, 15 bp, Homo sapiens
aatctattcatctgt

SEQ ID NO: 136418 - DNA, 15 bp, Homo sapiens
taatctattcatctg

SEQ ID NO: 136419 - DNA, 15 bp, Homo sapiens
ctaatctattcatct

SEQ ID NO: 136420 - DNA, 15 bp, Homo sapiens
gctaatctattcatc

SEQ ID NO: 136421 - DNA, 15 bp, Homo sapiens
cgctaatctattcat

SEQ ID NO: 136422 - DNA, 15 bp, Homo sapiens
tcgctaatctattca

SEQ ID NO: 136423 - DNA, 15 bp, Homo sapiens
ttcgctaatctattc

SEQ ID NO: 136424 - DNA, 15 bp, Homo sapiens
attcgctaatctatt

SEQ ID NO: 136425 - DNA, 15 bp, Homo sapiens
aattcgctaatctat

SEQ ID NO: 136426 - DNA, 15 bp, Homo sapiens
caattcgctaatcta

SEQ ID NO: 136427 - DNA, 15 bp, Homo sapiens
acaattcgctaatct

SEQ ID NO: 136428 - DNA, 15 bp, Homo sapiens
cacaattcgctaatc

SEQ ID NO: 136429 - DNA, 15 bp, Homo sapiens
ccacaattcgctaat

SEQ ID NO: 136430 - DNA, 15 bp, Homo sapiens
accacaattcgctaa

SEQ ID NO: 136431 - DNA, 15 bp, Homo sapiens
taccacaattcgcta

SEQ ID NO: 136432 - DNA, 15 bp, Homo sapiens
ctaccacaattcgct

SEQ ID NO: 136433 - DNA, 15 bp, Homo sapiens
cctaccacaattcgc

SEQ ID NO: 136434 - DNA, 15 bp, Homo sapiens
acctaccacaattcg

SEQ ID NO: 136435 - DNA, 15 bp, Homo sapiens
tacctaccacaattc

SEQ ID NO: 136436 - DNA, 15 bp, Homo sapiens
gtacctaccacaatt

SEQ ID NO: 136437 - DNA, 15 bp, Homo sapiens
tgtacctaccacaat

SEQ ID NO: 136438 - DNA, 15 bp, Homo sapiens
atgtacctaccacaa

SEQ ID NO: 136439 - DNA, 15 bp, Homo sapiens
tatgtacctaccaca

SEQ ID NO: 136440 - DNA, 15 bp, Homo sapiens
gtatgtacctaccac

SEQ ID NO: 136441 - DNA, 15 bp, Homo sapiens
tgtatgtacctacca

SEQ ID NO: 136442 - DNA, 15 bp, Homo sapiens
ttgtatgtacctacc

SEQ ID NO: 136443 - DNA, 15 bp, Homo sapiens
gttgtatgtacctac

SEQ ID NO: 136444 - DNA, 15 bp, Homo sapiens
tgttgtatgtaccta

SEQ ID NO: 136445 - DNA, 15 bp, Homo sapiens
ctgttgtatgtacct

SEQ ID NO: 136446 - DNA, 15 bp, Homo sapiens
tctgttgtatgtacc

SEQ ID NO: 136447 - DNA, 15 bp, Homo sapiens
ctctgttgtatgtac

SEQ ID NO: 136448 - DNA, 15 bp, Homo sapiens
actctgttgtatgta

SEQ ID NO: 136449 - DNA, 15 bp, Homo sapiens
tactctgttgtatgt

SEQ ID NO: 136450 - DNA, 15 bp, Homo sapiens
atactctgttgtatg

SEQ ID NO: 136451 - DNA, 15 bp, Homo sapiens
aatactctgttgtat

SEQ ID NO: 136452 - DNA, 15 bp, Homo sapiens
taatactctgttgta

SEQ ID NO: 136453 - DNA, 15 bp, Homo sapiens
ataatactctgttgt

SEQ ID NO: 136454 - DNA, 15 bp, Homo sapiens
aataatactctgttg

SEQ ID NO: 136455 - DNA, 15 bp, Homo sapiens
gaataatactctgtt

SEQ ID NO: 136456 - DNA, 15 bp, Homo sapiens
tgaataatactctgt

SEQ ID NO: 136457 - DNA, 15 bp, Homo sapiens
ttgaataatactctg

SEQ ID NO: 136458 - DNA, 15 bp, Homo sapiens
gttgaataatactct

SEQ ID NO: 136459 - DNA, 15 bp, Homo sapiens
agttgaataatactc

SEQ ID NO: 136460 - DNA, 15 bp, Homo sapiens
aagttgaataatact

SEQ ID NO: 136461 - DNA, 15 bp, Homo sapiens
aaagttgaataatac

SEQ ID NO: 136462 - DNA, 15 bp, Homo sapiens
taaagttgaataata

SEQ ID NO: 136463 - DNA, 15 bp, Homo sapiens
ttaaagttgaataat

SEQ ID NO: 136464 - DNA, 15 bp, Homo sapiens
tttaaagttgaataa

SEQ ID NO: 136465 - DNA, 15 bp, Homo sapiens
ttttaaagttgaata

SEQ ID NO: 136466 - DNA, 15 bp, Homo sapiens
tttttaaagttgaat

SEQ ID NO: 136467 - DNA, 15 bp, Homo sapiens
ctttttaaagttgaa

SEQ ID NO: 136468 - DNA, 15 bp, Homo sapiens
cctttttaaagttga

SEQ ID NO: 136469 - DNA, 15 bp, Homo sapiens
tcctttttaaagttg

SEQ ID NO: 136470 - DNA, 15 bp, Homo sapiens
ttcctttttaaagtt

SEQ ID NO: 136471 - DNA, 15 bp, Homo sapiens
cttcctttttaaagt

SEQ ID NO: 136472 - DNA, 15 bp, Homo sapiens
ccttcctttttaaag

SEQ ID NO: 136473 - DNA, 15 bp, Homo sapiens
gccttcctttttaaa

SEQ ID NO: 136474 - DNA, 15 bp, Homo sapiens
tgccttcctttttaa

SEQ ID NO: 136475 - DNA, 15 bp, Homo sapiens
ttgccttccttttta

SEQ ID NO: 136476 - DNA, 15 bp, Homo sapiens
cttgccttccttttt

SEQ ID NO: 136477 - DNA, 15 bp, Homo sapiens
acttgccttcctttt

SEQ ID NO: 136478 - DNA, 15 bp, Homo sapiens
gacttgccttccttt

SEQ ID NO: 136479 - DNA, 15 bp, Homo sapiens
agacttgccttcctt

SEQ ID NO: 136480 - DNA, 15 bp, Homo sapiens
cagacttgccttcct

SEQ ID NO: 136481 - DNA, 15 bp, Homo sapiens
tcagacttgccttcc

SEQ ID NO: 136482 - DNA, 15 bp, Homo sapiens
gtcagacttgccttc

SEQ ID NO: 136483 - DNA, 15 bp, Homo sapiens
tgtcagacttgcctt

SEQ ID NO: 136484 - DNA, 15 bp, Homo sapiens
gtgtcagacttgcct

SEQ ID NO: 136485 - DNA, 15 bp, Homo sapiens
cgtgtcagacttgcc

SEQ ID NO: 136486 - DNA, 15 bp, Homo sapiens
acgtgtcagacttgc

SEQ ID NO: 136487 - DNA, 15 bp, Homo sapiens
cacgtgtcagacttg

SEQ ID NO: 136488 - DNA, 15 bp, Homo sapiens
gcacgtgtcagactt

SEQ ID NO: 136489 - DNA, 15 bp, Homo sapiens
agcacgtgtcagact

SEQ ID NO: 136490 - DNA, 15 bp, Homo sapiens
tagcacgtgtcagac

SEQ ID NO: 136491 - DNA, 15 bp, Homo sapiens
gtagcacgtgtcaga

SEQ ID NO: 136492 - DNA, 15 bp, Homo sapiens
ggtagcacgtgtcag

SEQ ID NO: 136493 - DNA, 15 bp, Homo sapiens
tggtagcacgtgtca

SEQ ID NO: 136494 - DNA, 15 bp, Homo sapiens
gtggtagcacgtgtc

SEQ ID NO: 136495 - DNA, 15 bp, Homo sapiens
tgtggtagcacgtgt

SEQ ID NO: 136496 - DNA, 15 bp, Homo sapiens
atgtggtagcacgtg

SEQ ID NO: 136497 - DNA, 15 bp, Homo sapiens
tatgtggtagcacgt

SEQ ID NO: 136498 - DNA, 15 bp, Homo sapiens
ctatgtggtagcacg

SEQ ID NO: 136499 - DNA, 15 bp, Homo sapiens
tctatgtggtagcac

SEQ ID NO: 136500 - DNA, 15 bp, Homo sapiens
atctatgtggtagca

SEQ ID NO: 136501 - DNA, 15 bp, Homo sapiens
catctatgtggtagc

SEQ ID NO: 136502 - DNA, 15 bp, Homo sapiens
tcatctatgtggtag

SEQ ID NO: 136503 - DNA, 15 bp, Homo sapiens
ttcatctatgtggta

SEQ ID NO: 136504 - DNA, 15 bp, Homo sapiens
gttcatctatgtggt

SEQ ID NO: 136505 - DNA, 15 bp, Homo sapiens
tgttcatctatgtgg

SEQ ID NO: 136506 - DNA, 15 bp, Homo sapiens
atgttcatctatgtg

SEQ ID NO: 136507 - DNA, 15 bp, Homo sapiens
gatgttcatctatgt

SEQ ID NO: 136508 - DNA, 15 bp, Homo sapiens
cgatgttcatctatg

SEQ ID NO: 136509 - DNA, 15 bp, Homo sapiens
tcgatgttcatctat

SEQ ID NO: 136510 - DNA, 15 bp, Homo sapiens
ctcgatgttcatcta

SEQ ID NO: 136511 - DNA, 15 bp, Homo sapiens
cctcgatgttcatct

SEQ ID NO: 136512 - DNA, 15 bp, Homo sapiens
tcctcgatgttcatc

SEQ ID NO: 136513 - DNA, 15 bp, Homo sapiens
gtcctcgatgttcat

SEQ ID NO: 136514 - DNA, 15 bp, Homo sapiens
tgtcctcgatgttca

SEQ ID NO: 136515 - DNA, 15 bp, Homo sapiens
atgtcctcgatgttc

SEQ ID NO: 136516 - DNA, 15 bp, Homo sapiens
gatgtcctcgatgtt

SEQ ID NO: 136517 - DNA, 15 bp, Homo sapiens
tgatgtcctcgatgt

SEQ ID NO: 136518 - DNA, 15 bp, Homo sapiens
ctgatgtcctcgatg

SEQ ID NO: 136519 - DNA, 15 bp, Homo sapiens
gctgatgtcctcgat

SEQ ID NO: 136520 - DNA, 15 bp, Homo sapiens
ggctgatgtcctcga

SEQ ID NO: 136521 - DNA, 15 bp, Homo sapiens
tggctgatgtcctcg

SEQ ID NO: 136522 - DNA, 15 bp, Homo sapiens
ttggctgatgtcctc

SEQ ID NO: 136523 - DNA, 15 bp, Homo sapiens
tttggctgatgtcct

SEQ ID NO: 136524 - DNA, 15 bp, Homo sapiens
atttggctgatgtcc

SEQ ID NO: 136525 - DNA, 15 bp, Homo sapiens
catttggctgatgtc

SEQ ID NO: 136526 - DNA, 15 bp, Homo sapiens
tcatttggctgatgt

SEQ ID NO: 136527 - DNA, 15 bp, Homo sapiens
ttcatttggctgatg

SEQ ID NO: 136528 - DNA, 15 bp, Homo sapiens
tttcatttggctgat

SEQ ID NO: 136529 - DNA, 15 bp, Homo sapiens
atttcatttggctga

SEQ ID NO: 136530 - DNA, 15 bp, Homo sapiens
tatttcatttggctg

SEQ ID NO: 136531 - DNA, 15 bp, Homo sapiens
ttatttcatttggct

SEQ ID NO: 136532 - DNA, 15 bp, Homo sapiens
cttatttcatttggc

SEQ ID NO: 136533 - DNA, 15 bp, Homo sapiens
gcttatttcatttgg

SEQ ID NO: 136534 - DNA, 15 bp, Homo sapiens
ggcttatttcatttg

SEQ ID NO: 136535 - DNA, 15 bp, Homo sapiens
tggcttatttcattt

SEQ ID NO: 136536 - DNA, 15 bp, Homo sapiens
ctggcttatttcatt

SEQ ID NO: 136537 - DNA, 15 bp, Homo sapiens
actggcttatttcat

SEQ ID NO: 136538 - DNA, 15 bp, Homo sapiens
gactggcttatttca

SEQ ID NO: 136539 - DNA, 15 bp, Homo sapiens
tgactggcttatttc

SEQ ID NO: 136540 - DNA, 15 bp, Homo sapiens
gtgactggcttattt

SEQ ID NO: 136541 - DNA, 15 bp, Homo sapiens
tgtgactggcttatt

SEQ ID NO: 136542 - DNA, 15 bp, Homo sapiens
ttgtgactggcttat

SEQ ID NO: 136543 - DNA, 15 bp, Homo sapiens
tttgtgactggctta

SEQ ID NO: 136544 - DNA, 15 bp, Homo sapiens
ttttgtgactggctt

SEQ ID NO: 136545 - DNA, 15 bp, Homo sapiens
cttttgtgactggct

SEQ ID NO: 136546 - DNA, 15 bp, Homo sapiens
ccttttgtgactggc

SEQ ID NO: 136547 - DNA, 15 bp, Homo sapiens
tccttttgtgactgg

SEQ ID NO: 136548 - DNA, 15 bp, Homo sapiens
atccttttgtgactg

SEQ ID NO: 136549 - DNA, 15 bp, Homo sapiens
tatccttttgtgact

SEQ ID NO: 136550 - DNA, 15 bp, Homo sapiens
ttatccttttgtgac

SEQ ID NO: 136551 - DNA, 15 bp, Homo sapiens
gttatccttttgtga

SEQ ID NO: 136552 - DNA, 15 bp, Homo sapiens
agttatccttttgtg

SEQ ID NO: 136553 - DNA, 15 bp, Homo sapiens
aagttatccttttgt

SEQ ID NO: 136554 - DNA, 15 bp, Homo sapiens
gaagttatccttttg

SEQ ID NO: 136555 - DNA, 15 bp, Homo sapiens
ggaagttatcctttt

SEQ ID NO: 136556 - DNA, 15 bp, Homo sapiens
tggaagttatccttt

SEQ ID NO: 136557 - DNA, 15 bp, Homo sapiens
gtggaagttatcctt

SEQ ID NO: 136558 - DNA, 15 bp, Homo sapiens
agtggaagttatcct

SEQ ID NO: 136559 - DNA, 15 bp, Homo sapiens
aagtggaagttatcc

SEQ ID NO: 136560 - DNA, 15 bp, Homo sapiens
taagtggaagttatc

SEQ ID NO: 136561 - DNA, 15 bp, Homo sapiens
gtaagtggaagttat

SEQ ID NO: 136562 - DNA, 15 bp, Homo sapiens
tgtaagtggaagtta

SEQ ID NO: 136563 - DNA, 15 bp, Homo sapiens
atgtaagtggaagtt

SEQ ID NO: 136564 - DNA, 15 bp, Homo sapiens
catgtaagtggaagt

SEQ ID NO: 136565 - DNA, 15 bp, Homo sapiens
tcatgtaagtggaag

SEQ ID NO: 136566 - DNA, 15 bp, Homo sapiens
ctcatgtaagtggaa

SEQ ID NO: 136567 - DNA, 15 bp, Homo sapiens
cctcatgtaagtgga

SEQ ID NO: 136568 - DNA, 15 bp, Homo sapiens
acctcatgtaagtgg

SEQ ID NO: 136569 - DNA, 15 bp, Homo sapiens
tacctcatgtaagtg

SEQ ID NO: 136570 - DNA, 15 bp, Homo sapiens
gtacctcatgtaagt

SEQ ID NO: 136571 - DNA, 15 bp, Homo sapiens
tgtacctcatgtaag

SEQ ID NO: 136572 - DNA, 15 bp, Homo sapiens
atgtacctcatgtaa

SEQ ID NO: 136573 - DNA, 15 bp, Homo sapiens
tatgtacctcatgta

SEQ ID NO: 136574 - DNA, 15 bp, Homo sapiens
ctatgtacctcatgt

SEQ ID NO: 136575 - DNA, 15 bp, Homo sapiens
tctatgtacctcatg

SEQ ID NO: 136576 - DNA, 15 bp, Homo sapiens
ctctatgtacctcat

SEQ ID NO: 136577 - DNA, 15 bp, Homo sapiens
actctatgtacctca

SEQ ID NO: 136578 - DNA, 15 bp, Homo sapiens
aactctatgtacctc

SEQ ID NO: 136579 - DNA, 15 bp, Homo sapiens
caactctatgtacct

SEQ ID NO: 136580 - DNA, 15 bp, Homo sapiens
gcaactctatgtacc

SEQ ID NO: 136581 - DNA, 15 bp, Homo sapiens
ggcaactctatgtac

SEQ ID NO: 136582 - DNA, 15 bp, Homo sapiens
tggcaactctatgta

SEQ ID NO: 136583 - DNA, 15 bp, Homo sapiens
ttggcaactctatgt

SEQ ID NO: 136584 - DNA, 15 bp, Homo sapiens
tttggcaactctatg

SEQ ID NO: 136585 - DNA, 15 bp, Homo sapiens
gtttggcaactctat

SEQ ID NO: 136586 - DNA, 15 bp, Homo sapiens
agtttggcaactcta

SEQ ID NO: 136587 - DNA, 15 bp, Homo sapiens
gagtttggcaactct

SEQ ID NO: 136588 - DNA, 15 bp, Homo sapiens
tgagtttggcaactc

SEQ ID NO: 136589 - DNA, 15 bp, Homo sapiens
atgagtttggcaact

SEQ ID NO: 136590 - DNA, 15 bp, Homo sapiens
tatgagtttggcaac

SEQ ID NO: 136591 - DNA, 15 bp, Homo sapiens
ctatgagtttggcaa

SEQ ID NO: 136592 - DNA, 15 bp, Homo sapiens
tctatgagtttggca

SEQ ID NO: 136593 - DNA, 15 bp, Homo sapiens
ttctatgagtttggc

SEQ ID NO: 136594 - DNA, 15 bp, Homo sapiens
tttctatgagtttgg

SEQ ID NO: 136595 - DNA, 15 bp, Homo sapiens
gtttctatgagtttg

SEQ ID NO: 136596 - DNA, 15 bp, Homo sapiens
tgtttctatgagttt

SEQ ID NO: 136597 - DNA, 15 bp, Homo sapiens
ctgtttctatgagtt

SEQ ID NO: 136598 - DNA, 15 bp, Homo sapiens
tctgtttctatgagt

SEQ ID NO: 136599 - DNA, 15 bp, Homo sapiens
ttctgtttctatgag

SEQ ID NO: 136600 - DNA, 15 bp, Homo sapiens
tttctgtttctatga

SEQ ID NO: 136601 - DNA, 15 bp, Homo sapiens
ctttctgtttctatg

SEQ ID NO: 136602 - DNA, 15 bp, Homo sapiens
actttctgtttctat

SEQ ID NO: 136603 - DNA, 15 bp, Homo sapiens
tactttctgtttcta

SEQ ID NO: 136604 - DNA, 15 bp, Homo sapiens
ctactttctgtttct

SEQ ID NO: 136605 - DNA, 15 bp, Homo sapiens
tctactttctgtttc

SEQ ID NO: 136606 - DNA, 15 bp, Homo sapiens
ttctactttctgttt

SEQ ID NO: 136607 - DNA, 15 bp, Homo sapiens
cttctactttctgtt

SEQ ID NO: 136608 - DNA, 15 bp, Homo sapiens
ccttctactttctgt

SEQ ID NO: 136609 - DNA, 15 bp, Homo sapiens
cccttctactttctg

SEQ ID NO: 136610 - DNA, 15 bp, Homo sapiens
acccttctactttct

SEQ ID NO: 136611 - DNA, 15 bp, Homo sapiens
tacccttctactttc

SEQ ID NO: 136612 - DNA, 15 bp, Homo sapiens
ctacccttctacttt

SEQ ID NO: 136613 - DNA, 15 bp, Homo sapiens
actacccttctactt

SEQ ID NO: 136614 - DNA, 15 bp, Homo sapiens
aactacccttctact

SEQ ID NO: 136615 - DNA, 15 bp, Homo sapiens
aaactacccttctac

SEQ ID NO: 136616 - DNA, 15 bp, Homo sapiens
gaaactacccttcta

SEQ ID NO: 136617 - DNA, 15 bp, Homo sapiens
ggaaactacccttct

SEQ ID NO: 136618 - DNA, 15 bp, Homo sapiens
tggaaactacccttc

SEQ ID NO: 136619 - DNA, 15 bp, Homo sapiens
ctggaaactaccctt

SEQ ID NO: 136620 - DNA, 15 bp, Homo sapiens
cctggaaactaccct

SEQ ID NO: 136621 - DNA, 15 bp, Homo sapiens
ccctggaaactaccc

SEQ ID NO: 136622 - DNA, 15 bp, Homo sapiens
gccctggaaactacc

SEQ ID NO: 136623 - DNA, 15 bp, Homo sapiens
ggccctggaaactac

SEQ ID NO: 136624 - DNA, 15 bp, Homo sapiens
tggccctggaaacta

SEQ ID NO: 136625 - DNA, 15 bp, Homo sapiens
ctggccctggaaact

SEQ ID NO: 136626 - DNA, 15 bp, Homo sapiens
tctggccctggaaac

SEQ ID NO: 136627 - DNA, 15 bp, Homo sapiens
ctctggccctggaaa

SEQ ID NO: 136628 - DNA, 15 bp, Homo sapiens
cctctggccctggaa

SEQ ID NO: 136629 - DNA, 15 bp, Homo sapiens
ccctctggccctgga

SEQ ID NO: 136630 - DNA, 15 bp, Homo sapiens
tccctctggccctgg

SEQ ID NO: 136631 - DNA, 15 bp, Homo sapiens
ctccctctggccctg

SEQ ID NO: 136632 - DNA, 15 bp, Homo sapiens
cctccctctggccct

SEQ ID NO: 136633 - DNA, 15 bp, Homo sapiens
ccctccctctggccc

SEQ ID NO: 136634 - DNA, 15 bp, Homo sapiens
tccctccctctggcc

SEQ ID NO: 136635 - DNA, 15 bp, Homo sapiens
ttccctccctctggc

SEQ ID NO: 136636 - DNA, 15 bp, Homo sapiens
cttccctccctctgg

SEQ ID NO: 136637 - DNA, 15 bp, Homo sapiens
acttccctccctctg

SEQ ID NO: 136638 - DNA, 15 bp, Homo sapiens
cacttccctccctct

SEQ ID NO: 136639 - DNA, 15 bp, Homo sapiens
acacttccctccctc

SEQ ID NO: 136640 - DNA, 15 bp, Homo sapiens
aacacttccctccct

SEQ ID NO: 136641 - DNA, 15 bp, Homo sapiens
aaacacttccctccc

SEQ ID NO: 136642 - DNA, 15 bp, Homo sapiens
taaacacttccctcc

SEQ ID NO: 136643 - DNA, 15 bp, Homo sapiens
ttaaacacttccctc

SEQ ID NO: 136644 - DNA, 15 bp, Homo sapiens
attaaacacttccct

SEQ ID NO: 136645 - DNA, 15 bp, Homo sapiens
cattaaacacttccc

SEQ ID NO: 136646 - DNA, 15 bp, Homo sapiens
ccattaaacacttcc

SEQ ID NO: 136647 - DNA, 15 bp, Homo sapiens
cccattaaacacttc

SEQ ID NO: 136648 - DNA, 15 bp, Homo sapiens
acccattaaacactt

SEQ ID NO: 136649 - DNA, 15 bp, Homo sapiens
tacccattaaacact

SEQ ID NO: 136650 - DNA, 15 bp, Homo sapiens
atacccattaaacac

SEQ ID NO: 136651 - DNA, 15 bp, Homo sapiens
tatacccattaaaca

SEQ ID NO: 136652 - DNA, 15 bp, Homo sapiens
ctatacccattaaac

SEQ ID NO: 136653 - DNA, 15 bp, Homo sapiens
cctatacccattaaa

SEQ ID NO: 136654 - DNA, 15 bp, Homo sapiens
ccctatacccattaa

SEQ ID NO: 136655 - DNA, 15 bp, Homo sapiens
accctatacccatta

SEQ ID NO: 136656 - DNA, 15 bp, Homo sapiens
aaccctatacccatt

SEQ ID NO: 136657 - DNA, 15 bp, Homo sapiens
aaaccctatacccat

SEQ ID NO: 136658 - DNA, 15 bp, Homo sapiens
gaaaccctataccca

SEQ ID NO: 136659 - DNA, 15 bp, Homo sapiens
tgaaaccctataccc

SEQ ID NO: 136660 - DNA, 15 bp, Homo sapiens
ctgaaaccctatacc

SEQ ID NO: 136661 - DNA, 15 bp, Homo sapiens
actgaaaccctatac

SEQ ID NO: 136662 - DNA, 15 bp, Homo sapiens
aactgaaaccctata

SEQ ID NO: 136663 - DNA, 15 bp, Homo sapiens
aaactgaaaccctat

SEQ ID NO: 136664 - DNA, 15 bp, Homo sapiens
aaaactgaaacccta

SEQ ID NO: 136665 - DNA, 15 bp, Homo sapiens
caaaactgaaaccct

SEQ ID NO: 136666 - DNA, 15 bp, Homo sapiens
acaaaactgaaaccc

SEQ ID NO: 136667 - DNA, 15 bp, Homo sapiens
tacaaaactgaaacc

SEQ ID NO: 136668 - DNA, 15 bp, Homo sapiens
ttacaaaactgaaac

SEQ ID NO: 136669 - DNA, 15 bp, Homo sapiens
cttacaaaactgaaa

SEQ ID NO: 136670 - DNA, 15 bp, Homo sapiens
tcttacaaaactgaa

SEQ ID NO: 136671 - DNA, 15 bp, Homo sapiens
atcttacaaaactga

SEQ ID NO: 136672 - DNA, 15 bp, Homo sapiens
catcttacaaaactg

SEQ ID NO: 136673 - DNA, 15 bp, Homo sapiens
tcatcttacaaaact

SEQ ID NO: 136674 - DNA, 15 bp, Homo sapiens
ttcatcttacaaaac

SEQ ID NO: 136675 - DNA, 15 bp, Homo sapiens
tttcatcttacaaaa

SEQ ID NO: 136676 - DNA, 15 bp, Homo sapiens
ttttcatcttacaaa

SEQ ID NO: 136677 - DNA, 15 bp, Homo sapiens
tttttcatcttacaa

SEQ ID NO: 136678 - DNA, 15 bp, Homo sapiens
ctttttcatcttaca

SEQ ID NO: 136679 - DNA, 15 bp, Homo sapiens
actttttcatcttac

SEQ ID NO: 136680 - DNA, 15 bp, Homo sapiens
aactttttcatctta

SEQ ID NO: 136681 - DNA, 15 bp, Homo sapiens
gaactttttcatctt

SEQ ID NO: 136682 - DNA, 15 bp, Homo sapiens
agaactttttcatct

SEQ ID NO: 136683 - DNA, 15 bp, Homo sapiens
cagaactttttcatc

SEQ ID NO: 136684 - DNA, 15 bp, Homo sapiens
ccagaactttttcat

SEQ ID NO: 136685 - DNA, 15 bp, Homo sapiens
tccagaactttttca

SEQ ID NO: 136686 - DNA, 15 bp, Homo sapiens
ctccagaactttttc

SEQ ID NO: 136687 - DNA, 15 bp, Homo sapiens
tctccagaacttttt

SEQ ID NO: 136688 - DNA, 15 bp, Homo sapiens
atctccagaactttt

SEQ ID NO: 136689 - DNA, 15 bp, Homo sapiens
catctccagaacttt

SEQ ID NO: 136690 - DNA, 15 bp, Homo sapiens
ccatctccagaactt

SEQ ID NO: 136691 - DNA, 15 bp, Homo sapiens
cccatctccagaact

SEQ ID NO: 136692 - DNA, 15 bp, Homo sapiens
tcccatctccagaac

SEQ ID NO: 136693 - DNA, 15 bp, Homo sapiens
atcccatctccagaa

SEQ ID NO: 136694 - DNA, 15 bp, Homo sapiens
catcccatctccaga

SEQ ID NO: 136695 - DNA, 15 bp, Homo sapiens
gcatcccatctccag

SEQ ID NO: 136696 - DNA, 15 bp, Homo sapiens
tgcatcccatctcca

SEQ ID NO: 136697 - DNA, 15 bp, Homo sapiens
gtgcatcccatctcc

SEQ ID NO: 136698 - DNA, 15 bp, Homo sapiens
tgtgcatcccatctc

SEQ ID NO: 136699 - DNA, 15 bp, Homo sapiens
ttgtgcatcccatct

SEQ ID NO: 136700 - DNA, 15 bp, Homo sapiens
gttgtgcatcccatc

SEQ ID NO: 136701 - DNA, 15 bp, Homo sapiens
tgttgtgcatcccat

SEQ ID NO: 136702 - DNA, 15 bp, Homo sapiens
ttgttgtgcatccca

SEQ ID NO: 136703 - DNA, 15 bp, Homo sapiens
attgttgtgcatccc

SEQ ID NO: 136704 - DNA, 15 bp, Homo sapiens
cattgttgtgcatcc

SEQ ID NO: 136705 - DNA, 15 bp, Homo sapiens
acattgttgtgcatc

SEQ ID NO: 136706 - DNA, 15 bp, Homo sapiens
cacattgttgtgcat

SEQ ID NO: 136707 - DNA, 15 bp, Homo sapiens
tcacattgttgtgca

SEQ ID NO: 136708 - DNA, 15 bp, Homo sapiens
ttcacattgttgtgc

SEQ ID NO: 136709 - DNA, 15 bp, Homo sapiens
tttcacattgttgtg

SEQ ID NO: 136710 - DNA, 15 bp, Homo sapiens
gtttcacattgttgt

SEQ ID NO: 136711 - DNA, 15 bp, Homo sapiens
tgtttcacattgttg

SEQ ID NO: 136712 - DNA, 15 bp, Homo sapiens
atgtttcacattgtt

SEQ ID NO: 136713 - DNA, 15 bp, Homo sapiens
catgtttcacattgt

SEQ ID NO: 136714 - DNA, 15 bp, Homo sapiens
gcatgtttcacattg

SEQ ID NO: 136715 - DNA, 15 bp, Homo sapiens
tgcatgtttcacatt

SEQ ID NO: 136716 - DNA, 15 bp, Homo sapiens
gtgcatgtttcacat

SEQ ID NO: 136717 - DNA, 15 bp, Homo sapiens
tgtgcatgtttcaca

SEQ ID NO: 136718 - DNA, 15 bp, Homo sapiens
atgtgcatgtttcac

SEQ ID NO: 136719 - DNA, 15 bp, Homo sapiens
aatgtgcatgtttca

SEQ ID NO: 136720 - DNA, 15 bp, Homo sapiens
aaatgtgcatgtttc

SEQ ID NO: 136721 - DNA, 15 bp, Homo sapiens
aaaatgtgcatgttt

SEQ ID NO: 136722 - DNA, 15 bp, Homo sapiens
aaaaatgtgcatgtt

SEQ ID NO: 136723 - DNA, 15 bp, Homo sapiens
taaaaatgtgcatgt

SEQ ID NO: 136724 - DNA, 15 bp, Homo sapiens
ttaaaaatgtgcatg

SEQ ID NO: 136725 - DNA, 15 bp, Homo sapiens
cttaaaaatgtgcat

SEQ ID NO: 136726 - DNA, 15 bp, Homo sapiens
acttaaaaatgtgca

SEQ ID NO: 136727 - DNA, 15 bp, Homo sapiens
cacttaaaaatgtgc

SEQ ID NO: 136728 - DNA, 15 bp, Homo sapiens
acacttaaaaatgtg

SEQ ID NO: 136729 - DNA, 15 bp, Homo sapiens
cacacttaaaaatgt

SEQ ID NO: 136730 - DNA, 15 bp, Homo sapiens
tcacacttaaaaatg

SEQ ID NO: 136731 - DNA, 15 bp, Homo sapiens
ttcacacttaaaaat

SEQ ID NO: 136732 - DNA, 15 bp, Homo sapiens
cttcacacttaaaaa

SEQ ID NO: 136733 - DNA, 15 bp, Homo sapiens
acttcacacttaaaa

SEQ ID NO: 136734 - DNA, 15 bp, Homo sapiens
tacttcacacttaaa

SEQ ID NO: 136735 - DNA, 15 bp, Homo sapiens
gtacttcacacttaa

SEQ ID NO: 136736 - DNA, 15 bp, Homo sapiens
agtacttcacactta

SEQ ID NO: 136737 - DNA, 15 bp, Homo sapiens
tagtacttcacactt

SEQ ID NO: 136738 - DNA, 15 bp, Homo sapiens
gtagtacttcacact

SEQ ID NO: 136739 - DNA, 15 bp, Homo sapiens
tgtagtacttcacac

SEQ ID NO: 136740 - DNA, 15 bp, Homo sapiens
gtgtagtacttcaca

SEQ ID NO: 136741 - DNA, 15 bp, Homo sapiens
tgtgtagtacttcac

SEQ ID NO: 136742 - DNA, 15 bp, Homo sapiens
gtgtgtagtacttca

SEQ ID NO: 136743 - DNA, 15 bp, Homo sapiens
agtgtgtagtacttc

SEQ ID NO: 136744 - DNA, 15 bp, Homo sapiens
aagtgtgtagtactt

SEQ ID NO: 136745 - DNA, 15 bp, Homo sapiens
taagtgtgtagtact

SEQ ID NO: 136746 - DNA, 15 bp, Homo sapiens
ttaagtgtgtagtac

SEQ ID NO: 136747 - DNA, 15 bp, Homo sapiens
tttaagtgtgtagta

SEQ ID NO: 136748 - DNA, 15 bp, Homo sapiens
ttttaagtgtgtagt

SEQ ID NO: 136749 - DNA, 15 bp, Homo sapiens
tttttaagtgtgtag

SEQ ID NO: 136750 - DNA, 15 bp, Homo sapiens
atttttaagtgtgta

SEQ ID NO: 136751 - DNA, 15 bp, Homo sapiens
catttttaagtgtgt

SEQ ID NO: 136752 - DNA, 15 bp, Homo sapiens
ccatttttaagtgtg

SEQ ID NO: 136753 - DNA, 15 bp, Homo sapiens
accatttttaagtgt

SEQ ID NO: 136754 - DNA, 15 bp, Homo sapiens
aaccatttttaagtg

SEQ ID NO: 136755 - DNA, 15 bp, Homo sapiens
caaccatttttaagt

SEQ ID NO: 136756 - DNA, 15 bp, Homo sapiens
tcaaccatttttaag

SEQ ID NO: 136757 - DNA, 15 bp, Homo sapiens
ctcaaccatttttaa

SEQ ID NO: 136758 - DNA, 15 bp, Homo sapiens
tctcaaccattttta

SEQ ID NO: 136759 - DNA, 15 bp, Homo sapiens
atctcaaccattttt

SEQ ID NO: 136760 - DNA, 15 bp, Homo sapiens
catctcaaccatttt

SEQ ID NO: 136761 - DNA, 15 bp, Homo sapiens
ccatctcaaccattt

SEQ ID NO: 136762 - DNA, 15 bp, Homo sapiens
accatctcaaccatt

SEQ ID NO: 136763 - DNA, 15 bp, Homo sapiens
taccatctcaaccat

SEQ ID NO: 136764 - DNA, 15 bp, Homo sapiens
tgatgaccagccacc

SEQ ID NO: 136765 - DNA, 15 bp, Homo sapiens
ttgatgaccagccac

SEQ ID NO: 136766 - DNA, 15 bp, Homo sapiens
tttgatgaccagcca

SEQ ID NO: 136767 - DNA, 15 bp, Homo sapiens
ctttgatgaccagcc

SEQ ID NO: 136768 - DNA, 15 bp, Homo sapiens
gctttgatgaccagc

SEQ ID NO: 136769 - DNA, 15 bp, Homo sapiens
tgctttgatgaccag

SEQ ID NO: 136770 - DNA, 15 bp, Homo sapiens
ctgctttgatgacca

SEQ ID NO: 136771 - DNA, 15 bp, Homo sapiens
cctgctttgatgacc

SEQ ID NO: 136772 - DNA, 15 bp, Homo sapiens
gcctgctttgatgac

SEQ ID NO: 136773 - DNA, 15 bp, Homo sapiens
ggcctgctttgatga

SEQ ID NO: 136774 - DNA, 15 bp, Homo sapiens
gggcctgctttgatg

SEQ ID NO: 136775 - DNA, 15 bp, Homo sapiens
agggcctgctttgat

SEQ ID NO: 136776 - DNA, 15 bp, Homo sapiens
gagggcctgctttga

SEQ ID NO: 136777 - DNA, 15 bp, Homo sapiens
tgagggcctgctttg

SEQ ID NO: 136778 - DNA, 15 bp, Homo sapiens
ctgagggcctgcttt

SEQ ID NO: 136779 - DNA, 15 bp, Homo sapiens
actgagggcctgctt

SEQ ID NO: 136780 - DNA, 15 bp, Homo sapiens
cactgagggcctgct

SEQ ID NO: 136781 - DNA, 15 bp, Homo sapiens
tcactgagggcctgc

SEQ ID NO: 136782 - DNA, 15 bp, Homo sapiens
ttcactgagggcctg

SEQ ID NO: 136783 - DNA, 15 bp, Homo sapiens
gttcactgagggcct

SEQ ID NO: 136784 - DNA, 15 bp, Homo sapiens
ggttcactgagggcc

SEQ ID NO: 136785 - DNA, 15 bp, Homo sapiens
tggttcactgagggc

SEQ ID NO: 136786 - DNA, 15 bp, Homo sapiens
gtggttcactgaggg

SEQ ID NO: 136787 - DNA, 15 bp, Homo sapiens
cgtggttcactgagg

SEQ ID NO: 136788 - DNA, 15 bp, Homo sapiens
tcgtggttcactgag

SEQ ID NO: 136789 - DNA, 15 bp, Homo sapiens
gtcgtggttcactga

SEQ ID NO: 136790 - DNA, 15 bp, Homo sapiens
agtcgtggttcactg

SEQ ID NO: 136791 - DNA, 15 bp, Homo sapiens
gagtcgtggttcact

SEQ ID NO: 136792 - DNA, 15 bp, Homo sapiens
ggagtcgtggttcac

SEQ ID NO: 136793 - DNA, 15 bp, Homo sapiens
aggagtcgtggttca

SEQ ID NO: 136794 - DNA, 15 bp, Homo sapiens
gaggagtcgtggttc

SEQ ID NO: 136795 - DNA, 15 bp, Homo sapiens
tgaggagtcgtggtt

SEQ ID NO: 136796 - DNA, 15 bp, Homo sapiens
gtgaggagtcgtggt

SEQ ID NO: 136797 - DNA, 15 bp, Homo sapiens
cgtgaggagtcgtgg

SEQ ID NO: 136798 - DNA, 15 bp, Homo sapiens
acgtgaggagtcgtg

SEQ ID NO: 136799 - DNA, 15 bp, Homo sapiens
aacgtgaggagtcgt

SEQ ID NO: 136800 - DNA, 15 bp, Homo sapiens
gaacgtgaggagtcg

SEQ ID NO: 136801 - DNA, 15 bp, Homo sapiens
tgaacgtgaggagtc

SEQ ID NO: 136802 - DNA, 15 bp, Homo sapiens
atgaacgtgaggagt

SEQ ID NO: 136803 - DNA, 15 bp, Homo sapiens
gatgaacgtgaggag

SEQ ID NO: 136804 - DNA, 15 bp, Homo sapiens
ggatgaacgtgagga

SEQ ID NO: 136805 - DNA, 15 bp, Homo sapiens
aggatgaacgtgagg

SEQ ID NO: 136806 - DNA, 15 bp, Homo sapiens
gaggatgaacgtgag

SEQ ID NO: 136807 - DNA, 15 bp, Homo sapiens
agaggatgaacgtga

SEQ ID NO: 136808 - DNA, 15 bp, Homo sapiens
aagaggatgaacgtg

SEQ ID NO: 136809 - DNA, 15 bp, Homo sapiens
caagaggatgaacgt

SEQ ID NO: 136810 - DNA, 15 bp, Homo sapiens
ccaagaggatgaacg

SEQ ID NO: 136811 - DNA, 15 bp, Homo sapiens
cccaagaggatgaac

SEQ ID NO: 136812 - DNA, 15 bp, Homo sapiens
acccaagaggatgaa

SEQ ID NO: 136813 - DNA, 15 bp, Homo sapiens
aacccaagaggatga

SEQ ID NO: 136814 - DNA, 15 bp, Homo sapiens
caacccaagaggatg

SEQ ID NO: 136815 - DNA, 15 bp, Homo sapiens
acaacccaagaggat

SEQ ID NO: 136816 - DNA, 15 bp, Homo sapiens
tacaacccaagagga

SEQ ID NO: 136817 - DNA, 15 bp, Homo sapiens
gtacaacccaagagg

SEQ ID NO: 136818 - DNA, 15 bp, Homo sapiens
ggtacaacccaagag

SEQ ID NO: 136819 - DNA, 15 bp, Homo sapiens
gggtacaacccaaga

SEQ ID NO: 136820 - DNA, 15 bp, Homo sapiens
agggtacaacccaag

SEQ ID NO: 136821 - DNA, 15 bp, Homo sapiens
aagggtacaacccaa

SEQ ID NO: 136822 - DNA, 15 bp, Homo sapiens
aaagggtacaaccca

SEQ ID NO: 136823 - DNA, 15 bp, Homo sapiens
caaagggtacaaccc

SEQ ID NO: 136824 - DNA, 15 bp, Homo sapiens
ccaaagggtacaacc

SEQ ID NO: 136825 - DNA, 15 bp, Homo sapiens
cccaaagggtacaac

SEQ ID NO: 136826 - DNA, 15 bp, Homo sapiens
ccccaaagggtacaa

SEQ ID NO: 136827 - DNA, 15 bp, Homo sapiens
gccccaaagggtaca

SEQ ID NO: 136828 - DNA, 15 bp, Homo sapiens
tgccccaaagggtac

SEQ ID NO: 136829 - DNA, 15 bp, Homo sapiens
ctgccccaaagggta

SEQ ID NO: 136830 - DNA, 15 bp, Homo sapiens
tctgccccaaagggt

SEQ ID NO: 136831 - DNA, 15 bp, Homo sapiens
ctctgccccaaaggg

SEQ ID NO: 136832 - DNA, 15 bp, Homo sapiens
gctctgccccaaagg

SEQ ID NO: 136833 - DNA, 15 bp, Homo sapiens
agctctgccccaaag

SEQ ID NO: 136834 - DNA, 15 bp, Homo sapiens
tagctctgccccaaa

SEQ ID NO: 136835 - DNA, 15 bp, Homo sapiens
ctagctctgccccaa

SEQ ID NO: 136836 - DNA, 15 bp, Homo sapiens
gctagctctgcccca

SEQ ID NO: 136837 - DNA, 15 bp, Homo sapiens
ggctagctctgcccc

SEQ ID NO: 136838 - DNA, 15 bp, Homo sapiens
gggctagctctgccc

SEQ ID NO: 136839 - DNA, 15 bp, Homo sapiens
ggggctagctctgcc

SEQ ID NO: 136840 - DNA, 15 bp, Homo sapiens
aggggctagctctgc

SEQ ID NO: 136841 - DNA, 15 bp, Homo sapiens
caggggctagctctg

SEQ ID NO: 136842 - DNA, 15 bp, Homo sapiens
acaggggctagctct

SEQ ID NO: 136843 - DNA, 15 bp, Homo sapiens
tacaggggctagctc

SEQ ID NO: 136844 - DNA, 15 bp, Homo sapiens
ttacaggggctagct

SEQ ID NO: 136845 - DNA, 15 bp, Homo sapiens
attacaggggctagc

SEQ ID NO: 136846 - DNA, 15 bp, Homo sapiens
gattacaggggctag

SEQ ID NO: 136847 - DNA, 15 bp, Homo sapiens
ggattacaggggcta

SEQ ID NO: 136848 - DNA, 15 bp, Homo sapiens
tggattacaggggct

SEQ ID NO: 136849 - DNA, 15 bp, Homo sapiens
atggattacaggggc

SEQ ID NO: 136850 - DNA, 15 bp, Homo sapiens
catggattacagggg

SEQ ID NO: 136851 - DNA, 15 bp, Homo sapiens
ccatggattacaggg

SEQ ID NO: 136852 - DNA, 15 bp, Homo sapiens
cccatggattacagg

SEQ ID NO: 136853 - DNA, 15 bp, Homo sapiens
acccatggattacag

SEQ ID NO: 136854 - DNA, 15 bp, Homo sapiens
aacccatggattaca

SEQ ID NO: 136855 - DNA, 15 bp, Homo sapiens
caacccatggattac

SEQ ID NO: 136856 - DNA, 15 bp, Homo sapiens
gcaacccatggatta

SEQ ID NO: 136857 - DNA, 15 bp, Homo sapiens
agcaacccatggatt

SEQ ID NO: 136858 - DNA, 15 bp, Homo sapiens
aagcaacccatggat

SEQ ID NO: 136859 - DNA, 15 bp, Homo sapiens
caagcaacccatgga

SEQ ID NO: 136860 - DNA, 15 bp, Homo sapiens
acaagcaacccatgg

SEQ ID NO: 136861 - DNA, 15 bp, Homo sapiens
tacaagcaacccatg

SEQ ID NO: 136862 - DNA, 15 bp, Homo sapiens
ttacaagcaacccat

SEQ ID NO: 136863 - DNA, 15 bp, Homo sapiens
gttacaagcaaccca

SEQ ID NO: 136864 - DNA, 15 bp, Homo sapiens
ggttacaagcaaccc

SEQ ID NO: 136865 - DNA, 15 bp, Homo sapiens
gggttacaagcaacc

SEQ ID NO: 136866 - DNA, 15 bp, Homo sapiens
tgggttacaagcaac

SEQ ID NO: 136867 - DNA, 15 bp, Homo sapiens
atgggttacaagcaa

SEQ ID NO: 136868 - DNA, 15 bp, Homo sapiens
catgggttacaagca

SEQ ID NO: 136869 - DNA, 15 bp, Homo sapiens
ccatgggttacaagc

SEQ ID NO: 136870 - DNA, 15 bp, Homo sapiens
tccatgggttacaag

SEQ ID NO: 136871 - DNA, 15 bp, Homo sapiens
atccatgggttacaa

SEQ ID NO: 136872 - DNA, 15 bp, Homo sapiens
aatccatgggttaca

SEQ ID NO: 136873 - DNA, 15 bp, Homo sapiens
caatccatgggttac

SEQ ID NO: 136874 - DNA, 15 bp, Homo sapiens
acaatccatgggtta

SEQ ID NO: 136875 - DNA, 15 bp, Homo sapiens
cacaatccatgggtt

SEQ ID NO: 136876 - DNA, 15 bp, Homo sapiens
ccacaatccatgggt

SEQ ID NO: 136877 - DNA, 15 bp, Homo sapiens
accacaatccatggg

SEQ ID NO: 136878 - DNA, 15 bp, Homo sapiens
caccacaatccatgg

SEQ ID NO: 136879 - DNA, 15 bp, Homo sapiens
ccaccacaatccatg

SEQ ID NO: 136880 - DNA, 15 bp, Homo sapiens
tccaccacaatccat

SEQ ID NO: 136881 - DNA, 15 bp, Homo sapiens
ttccaccacaatcca

SEQ ID NO: 136882 - DNA, 15 bp, Homo sapiens
tttccaccacaatcc

SEQ ID NO: 136883 - DNA, 15 bp, Homo sapiens
atttccaccacaatc

SEQ ID NO: 136884 - DNA, 15 bp, Homo sapiens
catttccaccacaat

SEQ ID NO: 136885 - DNA, 15 bp, Homo sapiens
tcatttccaccacaa

SEQ ID NO: 136886 - DNA, 15 bp, Homo sapiens
atcatttccaccaca

SEQ ID NO: 136887 - DNA, 15 bp, Homo sapiens
catcatttccaccac

SEQ ID NO: 136888 - DNA, 15 bp, Homo sapiens
gcatcatttccacca

SEQ ID NO: 136889 - DNA, 15 bp, Homo sapiens
agcatcatttccacc

SEQ ID NO: 136890 - DNA, 15 bp, Homo sapiens
tagcatcatttccac

SEQ ID NO: 136891 - DNA, 15 bp, Homo sapiens
atagcatcatttcca

SEQ ID NO: 136892 - DNA, 15 bp, Homo sapiens
catagcatcatttcc

SEQ ID NO: 136893 - DNA, 15 bp, Homo sapiens
acatagcatcatttc

SEQ ID NO: 136894 - DNA, 15 bp, Homo sapiens
cacatagcatcattt

SEQ ID NO: 136895 - DNA, 15 bp, Homo sapiens
tcacatagcatcatt

SEQ ID NO: 136896 - DNA, 15 bp, Homo sapiens
gtcacatagcatcat

SEQ ID NO: 136897 - DNA, 15 bp, Homo sapiens
agtcacatagcatca

SEQ ID NO: 136898 - DNA, 15 bp, Homo sapiens
aagtcacatagcatc

SEQ ID NO: 136899 - DNA, 15 bp, Homo sapiens
gaagtcacatagcat

SEQ ID NO: 136900 - DNA, 15 bp, Homo sapiens
agaagtcacatagca

SEQ ID NO: 136901 - DNA, 15 bp, Homo sapiens
cagaagtcacatagc

SEQ ID NO: 136902 - DNA, 15 bp, Homo sapiens
tcagaagtcacatag

SEQ ID NO: 136903 - DNA, 15 bp, Homo sapiens
ctcagaagtcacata

SEQ ID NO: 136904 - DNA, 15 bp, Homo sapiens
cctcagaagtcacat

SEQ ID NO: 136905 - DNA, 15 bp, Homo sapiens
gcctcagaagtcaca

SEQ ID NO: 136906 - DNA, 15 bp, Homo sapiens
agcctcagaagtcac

SEQ ID NO: 136907 - DNA, 15 bp, Homo sapiens
tagcctcagaagtca

SEQ ID NO: 136908 - DNA, 15 bp, Homo sapiens
atagcctcagaagtc

SEQ ID NO: 136909 - DNA, 15 bp, Homo sapiens
catagcctcagaagt

SEQ ID NO: 136910 - DNA, 15 bp, Homo sapiens
acatagcctcagaag

SEQ ID NO: 136911 - DNA, 15 bp, Homo sapiens
aacatagcctcagaa

SEQ ID NO: 136912 - DNA, 15 bp, Homo sapiens
caacatagcctcaga

SEQ ID NO: 136913 - DNA, 15 bp, Homo sapiens
ccaacatagcctcag

SEQ ID NO: 136914 - DNA, 15 bp, Homo sapiens
tccaacatagcctca

SEQ ID NO: 136915 - DNA, 15 bp, Homo sapiens
ttccaacatagcctc

SEQ ID NO: 136916 - DNA, 15 bp, Homo sapiens
cttccaacatagcct

SEQ ID NO: 136917 - DNA, 15 bp, Homo sapiens
tcttccaacatagcc

SEQ ID NO: 136918 - DNA, 15 bp, Homo sapiens
ttcttccaacatagc

SEQ ID NO: 136919 - DNA, 15 bp, Homo sapiens
gttcttccaacatag

SEQ ID NO: 136920 - DNA, 15 bp, Homo sapiens
ggttcttccaacata

SEQ ID NO: 136921 - DNA, 15 bp, Homo sapiens
gggttcttccaacat

SEQ ID NO: 136922 - DNA, 15 bp, Homo sapiens
agggttcttccaaca

SEQ ID NO: 136923 - DNA, 15 bp, Homo sapiens
cagggttcttccaac

SEQ ID NO: 136924 - DNA, 15 bp, Homo sapiens
ccagggttcttccaa

SEQ ID NO: 136925 - DNA, 15 bp, Homo sapiens
gccagggttcttcca

SEQ ID NO: 136926 - DNA, 15 bp, Homo sapiens
tgccagggttcttcc

SEQ ID NO: 136927 - DNA, 15 bp, Homo sapiens
ctgccagggttcttc

SEQ ID NO: 136928 - DNA, 15 bp, Homo sapiens
actgccagggttctt

SEQ ID NO: 136929 - DNA, 15 bp, Homo sapiens
aactgccagggttct

SEQ ID NO: 136930 - DNA, 15 bp, Homo sapiens
gaactgccagggttc

SEQ ID NO: 136931 - DNA, 15 bp, Homo sapiens
tgaactgccagggtt

SEQ ID NO: 136932 - DNA, 15 bp, Homo sapiens
atgaactgccagggt

SEQ ID NO: 136933 - DNA, 15 bp, Homo sapiens
aatgaactgccaggg

SEQ ID NO: 136934 - DNA, 15 bp, Homo sapiens
aaatgaactgccagg

SEQ ID NO: 136935 - DNA, 15 bp, Homo sapiens
caaatgaactgccag

SEQ ID NO: 136936 - DNA, 15 bp, Homo sapiens
acaaatgaactgcca

SEQ ID NO: 136937 - DNA, 15 bp, Homo sapiens
aacaaatgaactgcc

SEQ ID NO: 136938 - DNA, 15 bp, Homo sapiens
taacaaatgaactgc

SEQ ID NO: 136939 - DNA, 15 bp, Homo sapiens
ataacaaatgaactg

SEQ ID NO: 136940 - DNA, 15 bp, Homo sapiens
gataacaaatgaact

SEQ ID NO: 136941 - DNA, 15 bp, Homo sapiens
agataacaaatgaac

SEQ ID NO: 136942 - DNA, 15 bp, Homo sapiens
cagataacaaatgaa

SEQ ID NO: 136943 - DNA, 15 bp, Homo sapiens
ccagataacaaatga

SEQ ID NO: 136944 - DNA, 15 bp, Homo sapiens
cccagataacaaatg

SEQ ID NO: 136945 - DNA, 15 bp, Homo sapiens
tcccagataacaaat

SEQ ID NO: 136946 - DNA, 15 bp, Homo sapiens
ttcccagataacaaa

SEQ ID NO: 136947 - DNA, 15 bp, Homo sapiens
attcccagataacaa

SEQ ID NO: 136948 - DNA, 15 bp, Homo sapiens
cattcccagataaca

SEQ ID NO: 136949 - DNA, 15 bp, Homo sapiens
gcattcccagataac

SEQ ID NO: 136950 - DNA, 15 bp, Homo sapiens
agcattcccagataa

SEQ ID NO: 136951 - DNA, 15 bp, Homo sapiens
tagcattcccagata

SEQ ID NO: 136952 - DNA, 15 bp, Homo sapiens
gtagcattcccagat

SEQ ID NO: 136953 - DNA, 15 bp, Homo sapiens
agtagcattcccaga

SEQ ID NO: 136954 - DNA, 15 bp, Homo sapiens
aagtagcattcccag

SEQ ID NO: 136955 - DNA, 15 bp, Homo sapiens
gaagtagcattccca

SEQ ID NO: 136956 - DNA, 15 bp, Homo sapiens
agaagtagcattccc

SEQ ID NO: 136957 - DNA, 15 bp, Homo sapiens
aagaagtagcattcc

SEQ ID NO: 136958 - DNA, 15 bp, Homo sapiens
taagaagtagcattc

SEQ ID NO: 136959 - DNA, 15 bp, Homo sapiens
ctaagaagtagcatt

SEQ ID NO: 136960 - DNA, 15 bp, Homo sapiens
cctaagaagtagcat

SEQ ID NO: 136961 - DNA, 15 bp, Homo sapiens
ccctaagaagtagca

SEQ ID NO: 136962 - DNA, 15 bp, Homo sapiens
tccctaagaagtagc

SEQ ID NO: 136963 - DNA, 15 bp, Homo sapiens
ttccctaagaagtag

SEQ ID NO: 136964 - DNA, 15 bp, Homo sapiens
cttccctaagaagta

SEQ ID NO: 136965 - DNA, 15 bp, Homo sapiens
acttccctaagaagt

SEQ ID NO: 136966 - DNA, 15 bp, Homo sapiens
aacttccctaagaag

SEQ ID NO: 136967 - DNA, 15 bp, Homo sapiens
caacttccctaagaa

SEQ ID NO: 136968 - DNA, 15 bp, Homo sapiens
ccaacttccctaaga

SEQ ID NO: 136969 - DNA, 15 bp, Homo sapiens
gccaacttccctaag

SEQ ID NO: 136970 - DNA, 15 bp, Homo sapiens
ggccaacttccctaa

SEQ ID NO: 136971 - DNA, 15 bp, Homo sapiens
tggccaacttcccta

SEQ ID NO: 136972 - DNA, 15 bp, Homo sapiens
gtggccaacttccct

SEQ ID NO: 136973 - DNA, 15 bp, Homo sapiens
agtggccaacttccc

SEQ ID NO: 136974 - DNA, 15 bp, Homo sapiens
tagtggccaacttcc

SEQ ID NO: 136975 - DNA, 15 bp, Homo sapiens
gtagtggccaacttc

SEQ ID NO: 136976 - DNA, 15 bp, Homo sapiens
tgtagtggccaactt

SEQ ID NO: 136977 - DNA, 15 bp, Homo sapiens
ctgtagtggccaact

SEQ ID NO: 136978 - DNA, 15 bp, Homo sapiens
cctgtagtggccaac

SEQ ID NO: 136979 - DNA, 15 bp, Homo sapiens
ccctgtagtggccaa

SEQ ID NO: 136980 - DNA, 15 bp, Homo sapiens
cccctgtagtggcca

SEQ ID NO: 136981 - DNA, 15 bp, Homo sapiens
ccccctgtagtggcc

SEQ ID NO: 136982 - DNA, 15 bp, Homo sapiens
tccccctgtagtggc

SEQ ID NO: 136983 - DNA, 15 bp, Homo sapiens
ttccccctgtagtgg

SEQ ID NO: 136984 - DNA, 15 bp, Homo sapiens
cttccccctgtagtg

SEQ ID NO: 136985 - DNA, 15 bp, Homo sapiens
tcttccccctgtagt

SEQ ID NO: 136986 - DNA, 15 bp, Homo sapiens
ctcttccccctgtag

SEQ ID NO: 136987 - DNA, 15 bp, Homo sapiens
gctcttccccctgta

SEQ ID NO: 136988 - DNA, 15 bp, Homo sapiens
cgctcttccccctgt

SEQ ID NO: 136989 - DNA, 15 bp, Homo sapiens
tcgctcttccccctg

SEQ ID NO: 136990 - DNA, 15 bp, Homo sapiens
ctcgctcttccccct

SEQ ID NO: 136991 - DNA, 15 bp, Homo sapiens
tctcgctcttccccc

SEQ ID NO: 136992 - DNA, 15 bp, Homo sapiens
ctctcgctcttcccc

SEQ ID NO: 136993 - DNA, 15 bp, Homo sapiens
actctcgctcttccc

SEQ ID NO: 136994 - DNA, 15 bp, Homo sapiens
cactctcgctcttcc

SEQ ID NO: 136995 - DNA, 15 bp, Homo sapiens
tcactctcgctcttc

SEQ ID NO: 136996 - DNA, 15 bp, Homo sapiens
ctcactctcgctctt

SEQ ID NO: 136997 - DNA, 15 bp, Homo sapiens
tctcactctcgctct

SEQ ID NO: 136998 - DNA, 15 bp, Homo sapiens
ctctcactctcgctc

SEQ ID NO: 136999 - DNA, 15 bp, Homo sapiens
cctctcactctcgct

SEQ ID NO: 137000 - DNA, 15 bp, Homo sapiens
tcctctcactctcgc

SEQ ID NO: 137001 - DNA, 15 bp, Homo sapiens
ttcctctcactctcg

SEQ ID NO: 137002 - DNA, 15 bp, Homo sapiens
cttcctctcactctc

SEQ ID NO: 137003 - DNA, 15 bp, Homo sapiens
gcttcctctcactct

SEQ ID NO: 137004 - DNA, 15 bp, Homo sapiens
tgcttcctctcactc

SEQ ID NO: 137005 - DNA, 15 bp, Homo sapiens
atgcttcctctcact

SEQ ID NO: 137006 - DNA, 15 bp, Homo sapiens
catgcttcctctcac

SEQ ID NO: 137007 - DNA, 15 bp, Homo sapiens
acatgcttcctctca

SEQ ID NO: 137008 - DNA, 15 bp, Homo sapiens
cacatgcttcctctc

SEQ ID NO: 137009 - DNA, 15 bp, Homo sapiens
gcacatgcttcctct

SEQ ID NO: 137010 - DNA, 15 bp, Homo sapiens
cgcacatgcttcctc

SEQ ID NO: 137011 - DNA, 15 bp, Homo sapiens
acgcacatgcttcct

SEQ ID NO: 137012 - DNA, 15 bp, Homo sapiens
cacgcacatgcttcc

SEQ ID NO: 137013 - DNA, 15 bp, Homo sapiens
ccacgcacatgcttc

SEQ ID NO: 137014 - DNA, 15 bp, Homo sapiens
cccacgcacatgctt

SEQ ID NO: 137015 - DNA, 15 bp, Homo sapiens
gcccacgcacatgct

SEQ ID NO: 137016 - DNA, 15 bp, Homo sapiens
tgcccacgcacatgc

SEQ ID NO: 137017 - DNA, 15 bp, Homo sapiens
atgcccacgcacatg

SEQ ID NO: 137018 - DNA, 15 bp, Homo sapiens
tatgcccacgcacat

SEQ ID NO: 137019 - DNA, 15 bp, Homo sapiens
gtatgcccacgcaca

SEQ ID NO: 137020 - DNA, 15 bp, Homo sapiens
cgtatgcccacgcac

SEQ ID NO: 137021 - DNA, 15 bp, Homo sapiens
tcgtatgcccacgca

SEQ ID NO: 137022 - DNA, 15 bp, Homo sapiens
ctcgtatgcccacgc

SEQ ID NO: 137023 - DNA, 15 bp, Homo sapiens
tctcgtatgcccacg

SEQ ID NO: 137024 - DNA, 15 bp, Homo sapiens
ctctcgtatgcccac

SEQ ID NO: 137025 - DNA, 15 bp, Homo sapiens
tctctcgtatgccca

SEQ ID NO: 137026 - DNA, 15 bp, Homo sapiens
ctctctcgtatgccc

SEQ ID NO: 137027 - DNA, 15 bp, Homo sapiens
tctctctcgtatgcc

SEQ ID NO: 137028 - DNA, 15 bp, Homo sapiens
ctctctctcgtatgc

SEQ ID NO: 137029 - DNA, 15 bp, Homo sapiens
tctctctctcgtatg

SEQ ID NO: 137030 - DNA, 15 bp, Homo sapiens
ctctctctctcgtat

SEQ ID NO: 137031 - DNA, 15 bp, Homo sapiens
tctctctctctcgta

SEQ ID NO: 137032 - DNA, 15 bp, Homo sapiens
ctctctctctctcgt

SEQ ID NO: 137033 - DNA, 15 bp, Homo sapiens
tctctctctctctcg

SEQ ID NO: 137034 - DNA, 15 bp, Homo sapiens
ctctctctctctctc

SEQ ID NO: 137035 - DNA, 15 bp, Homo sapiens
tctctctctctctct

SEQ ID NO: 137036 - DNA, 15 bp, Homo sapiens
gtctctctctctctc

SEQ ID NO: 137037 - DNA, 15 bp, Homo sapiens
tgtctctctctctct

SEQ ID NO: 137038 - DNA, 15 bp, Homo sapiens
ctgtctctctctctc

SEQ ID NO: 137039 - DNA, 15 bp, Homo sapiens
tctgtctctctctct

SEQ ID NO: 137040 - DNA, 15 bp, Homo sapiens
gtctgtctctctctc

SEQ ID NO: 137041 - DNA, 15 bp, Homo sapiens
tgtctgtctctctct

SEQ ID NO: 137042 - DNA, 15 bp, Homo sapiens
ctgtctgtctctctc

SEQ ID NO: 137043 - DNA, 15 bp, Homo sapiens
tctgtctgtctctct

SEQ ID NO: 137044 - DNA, 15 bp, Homo sapiens
gtctgtctgtctctc

SEQ ID NO: 137045 - DNA, 15 bp, Homo sapiens
tgtctgtctgtctct

SEQ ID NO: 137046 - DNA, 15 bp, Homo sapiens
ctgtctgtctgtctc

SEQ ID NO: 137047 - DNA, 15 bp, Homo sapiens
tctgtctgtctgtct

SEQ ID NO: 137048 - DNA, 15 bp, Homo sapiens
ctctgtctgtctgtc

SEQ ID NO: 137049 - DNA, 15 bp, Homo sapiens
tctctgtctgtctgt

SEQ ID NO: 137050 - DNA, 15 bp, Homo sapiens
ctctctgtctgtctg

SEQ ID NO: 137051 - DNA, 15 bp, Homo sapiens
tctctctgtctgtct

SEQ ID NO: 137052 - DNA, 15 bp, Homo sapiens
gtctctctgtctgtc

SEQ ID NO: 137053 - DNA, 15 bp, Homo sapiens
tgtctctctgtctgt

SEQ ID NO: 137054 - DNA, 15 bp, Homo sapiens
gtgtctctctgtctg

SEQ ID NO: 137055 - DNA, 15 bp, Homo sapiens
agtgtctctctgtct

SEQ ID NO: 137056 - DNA, 15 bp, Homo sapiens
tagtgtctctctgtc

SEQ ID NO: 137057 - DNA, 15 bp, Homo sapiens
gtagtgtctctctgt

SEQ ID NO: 137058 - DNA, 15 bp, Homo sapiens
agtagtgtctctctg

SEQ ID NO: 137059 - DNA, 15 bp, Homo sapiens
cagtagtgtctctct

SEQ ID NO: 137060 - DNA, 15 bp, Homo sapiens
ccagtagtgtctctc

SEQ ID NO: 137061 - DNA, 15 bp, Homo sapiens
cccagtagtgtctct

SEQ ID NO: 137062 - DNA, 15 bp, Homo sapiens
ccccagtagtgtctc

SEQ ID NO: 137063 - DNA, 15 bp, Homo sapiens
gccccagtagtgtct

SEQ ID NO: 137064 - DNA, 15 bp, Homo sapiens
tgccccagtagtgtc

SEQ ID NO: 137065 - DNA, 15 bp, Homo sapiens
gtgccccagtagtgt

SEQ ID NO: 137066 - DNA, 15 bp, Homo sapiens
ggtgccccagtagtg

SEQ ID NO: 137067 - DNA, 15 bp, Homo sapiens
tggtgccccagtagt

SEQ ID NO: 137068 - DNA, 15 bp, Homo sapiens
gtggtgccccagtag

SEQ ID NO: 137069 - DNA, 15 bp, Homo sapiens
cgtggtgccccagta

SEQ ID NO: 137070 - DNA, 15 bp, Homo sapiens
gcgtggtgccccagt

SEQ ID NO: 137071 - DNA, 15 bp, Homo sapiens
tgcgtggtgccccag

SEQ ID NO: 137072 - DNA, 15 bp, Homo sapiens
atgcgtggtgcccca

SEQ ID NO: 137073 - DNA, 15 bp, Homo sapiens
tatgcgtggtgcccc

SEQ ID NO: 137074 - DNA, 15 bp, Homo sapiens
atatgcgtggtgccc

SEQ ID NO: 137075 - DNA, 15 bp, Homo sapiens
catatgcgtggtgcc

SEQ ID NO: 137076 - DNA, 15 bp, Homo sapiens
acatatgcgtggtgc

SEQ ID NO: 137077 - DNA, 15 bp, Homo sapiens
cacatatgcgtggtg

SEQ ID NO: 137078 - DNA, 15 bp, Homo sapiens
acacatatgcgtggt

SEQ ID NO: 137079 - DNA, 15 bp, Homo sapiens
cacacatatgcgtgg

SEQ ID NO: 137080 - DNA, 15 bp, Homo sapiens
tcacacatatgcgtg

SEQ ID NO: 137081 - DNA, 15 bp, Homo sapiens
ttcacacatatgcgt

SEQ ID NO: 137082 - DNA, 15 bp, Homo sapiens
cttcacacatatgcg

SEQ ID NO: 137083 - DNA, 15 bp, Homo sapiens
tcttcacacatatgc

SEQ ID NO: 137084 - DNA, 15 bp, Homo sapiens
atcttcacacatatg

SEQ ID NO: 137085 - DNA, 15 bp, Homo sapiens
catcttcacacatat

SEQ ID NO: 137086 - DNA, 15 bp, Homo sapiens
gcatcttcacacata

SEQ ID NO: 137087 - DNA, 15 bp, Homo sapiens
ggcatcttcacacat

SEQ ID NO: 137088 - DNA, 15 bp, Homo sapiens
tggcatcttcacaca

SEQ ID NO: 137089 - DNA, 15 bp, Homo sapiens
atggcatcttcacac

SEQ ID NO: 137090 - DNA, 15 bp, Homo sapiens
gatggcatcttcaca

SEQ ID NO: 137091 - DNA, 15 bp, Homo sapiens
tgatggcatcttcac

SEQ ID NO: 137092 - DNA, 15 bp, Homo sapiens
atgatggcatcttca

SEQ ID NO: 137093 - DNA, 15 bp, Homo sapiens
catgatggcatcttc

SEQ ID NO: 137094 - DNA, 15 bp, Homo sapiens
ccatgatggcatctt

SEQ ID NO: 137095 - DNA, 15 bp, Homo sapiens
tccatgatggcatct

SEQ ID NO: 137096 - DNA, 15 bp, Homo sapiens
ttccatgatggcatc

SEQ ID NO: 137097 - DNA, 15 bp, Homo sapiens
cttccatgatggcat

SEQ ID NO: 137098 - DNA, 15 bp, Homo sapiens
acttccatgatggca

SEQ ID NO: 137099 - DNA, 15 bp, Homo sapiens
cacttccatgatggc

SEQ ID NO: 137100 - DNA, 15 bp, Homo sapiens
ccacttccatgatgg

SEQ ID NO: 137101 - DNA, 15 bp, Homo sapiens
tccacttccatgatg

SEQ ID NO: 137102 - DNA, 15 bp, Homo sapiens
atccacttccatgat

SEQ ID NO: 137103 - DNA, 15 bp, Homo sapiens
gatccacttccatga

SEQ ID NO: 137104 - DNA, 15 bp, Homo sapiens
ggatccacttccatg

SEQ ID NO: 137105 - DNA, 15 bp, Homo sapiens
aggatccacttccat

SEQ ID NO: 137106 - DNA, 15 bp, Homo sapiens
gaggatccacttcca

SEQ ID NO: 137107 - DNA, 15 bp, Homo sapiens
ggaggatccacttcc

SEQ ID NO: 137108 - DNA, 15 bp, Homo sapiens
tggaggatccacttc

SEQ ID NO: 137109 - DNA, 15 bp, Homo sapiens
ttggaggatccactt

SEQ ID NO: 137110 - DNA, 15 bp, Homo sapiens
gttggaggatccact

SEQ ID NO: 137111 - DNA, 15 bp, Homo sapiens
ggttggaggatccac

SEQ ID NO: 137112 - DNA, 15 bp, Homo sapiens
gggttggaggatcca

SEQ ID NO: 137113 - DNA, 15 bp, Homo sapiens
ggggttggaggatcc

SEQ ID NO: 137114 - DNA, 15 bp, Homo sapiens
tggggttggaggatc

SEQ ID NO: 137115 - DNA, 15 bp, Homo sapiens
ctggggttggaggat

SEQ ID NO: 137116 - DNA, 15 bp, Homo sapiens
actggggttggagga

SEQ ID NO: 137117 - DNA, 15 bp, Homo sapiens
aactggggttggagg

SEQ ID NO: 137118 - DNA, 15 bp, Homo sapiens
caactggggttggag

SEQ ID NO: 137119 - DNA, 15 bp, Homo sapiens
tcaactggggttgga

SEQ ID NO: 137120 - DNA, 15 bp, Homo sapiens
gtcaactggggttgg

SEQ ID NO: 137121 - DNA, 15 bp, Homo sapiens
tgtcaactggggttg

SEQ ID NO: 137122 - DNA, 15 bp, Homo sapiens
atgtcaactggggtt

SEQ ID NO: 137123 - DNA, 15 bp, Homo sapiens
tatgtcaactggggt

SEQ ID NO: 137124 - DNA, 15 bp, Homo sapiens
ctatgtcaactgggg

SEQ ID NO: 137125 - DNA, 15 bp, Homo sapiens
tctatgtcaactggg

SEQ ID NO: 137126 - DNA, 15 bp, Homo sapiens
atctatgtcaactgg

SEQ ID NO: 137127 - DNA, 15 bp, Homo sapiens
aatctatgtcaactg

SEQ ID NO: 137128 - DNA, 15 bp, Homo sapiens
caatctatgtcaact

SEQ ID NO: 137129 - DNA, 15 bp, Homo sapiens
ccaatctatgtcaac

SEQ ID NO: 137130 - DNA, 15 bp, Homo sapiens
tccaatctatgtcaa

SEQ ID NO: 137131 - DNA, 15 bp, Homo sapiens
ctccaatctatgtca

SEQ ID NO: 137132 - DNA, 15 bp, Homo sapiens
tctccaatctatgtc

SEQ ID NO: 137133 - DNA, 15 bp, Homo sapiens
atctccaatctatgt

SEQ ID NO: 137134 - DNA, 15 bp, Homo sapiens
catctccaatctatg

SEQ ID NO: 137135 - DNA, 15 bp, Homo sapiens
tcatctccaatctat

SEQ ID NO: 137136 - DNA, 15 bp, Homo sapiens
ttcatctccaatcta

SEQ ID NO: 137137 - DNA, 15 bp, Homo sapiens
gttcatctccaatct

SEQ ID NO: 137138 - DNA, 15 bp, Homo sapiens
ggttcatctccaatc

SEQ ID NO: 137139 - DNA, 15 bp, Homo sapiens
gggttcatctccaat

SEQ ID NO: 137140 - DNA, 15 bp, Homo sapiens
tgggttcatctccaa

SEQ ID NO: 137141 - DNA, 15 bp, Homo sapiens
gtgggttcatctcca

SEQ ID NO: 137142 - DNA, 15 bp, Homo sapiens
ggtgggttcatctcc

SEQ ID NO: 137143 - DNA, 15 bp, Homo sapiens
tggtgggttcatctc

SEQ ID NO: 137144 - DNA, 15 bp, Homo sapiens
ctggtgggttcatct

SEQ ID NO: 137145 - DNA, 15 bp, Homo sapiens
gctggtgggttcatc

SEQ ID NO: 137146 - DNA, 15 bp, Homo sapiens
agctggtgggttcat

SEQ ID NO: 137147 - DNA, 15 bp, Homo sapiens
cagctggtgggttca

SEQ ID NO: 137148 - DNA, 15 bp, Homo sapiens
tcagctggtgggttc

SEQ ID NO: 137149 - DNA, 15 bp, Homo sapiens
atcagctggtgggtt

SEQ ID NO: 137150 - DNA, 15 bp, Homo sapiens
gatcagctggtgggt

SEQ ID NO: 137151 - DNA, 15 bp, Homo sapiens
ggatcagctggtggg

SEQ ID NO: 137152 - DNA, 15 bp, Homo sapiens
gggatcagctggtgg

SEQ ID NO: 137153 - DNA, 15 bp, Homo sapiens
agggatcagctggtg

SEQ ID NO: 137154 - DNA, 15 bp, Homo sapiens
gagggatcagctggt

SEQ ID NO: 137155 - DNA, 15 bp, Homo sapiens
agagggatcagctgg

SEQ ID NO: 137156 - DNA, 15 bp, Homo sapiens
tagagggatcagctg

SEQ ID NO: 137157 - DNA, 15 bp, Homo sapiens
atagagggatcagct

SEQ ID NO: 137158 - DNA, 15 bp, Homo sapiens
catagagggatcagc

SEQ ID NO: 137159 - DNA, 15 bp, Homo sapiens
tcatagagggatcag

SEQ ID NO: 137160 - DNA, 15 bp, Homo sapiens
ttcatagagggatca

SEQ ID NO: 137161 - DNA, 15 bp, Homo sapiens
attcatagagggatc

SEQ ID NO: 137162 - DNA, 15 bp, Homo sapiens
aattcatagagggat

SEQ ID NO: 137163 - DNA, 15 bp, Homo sapiens
gaattcatagaggga

SEQ ID NO: 137164 - DNA, 15 bp, Homo sapiens
ggaattcatagaggg

SEQ ID NO: 137165 - DNA, 15 bp, Homo sapiens
aggaattcatagagg

SEQ ID NO: 137166 - DNA, 15 bp, Homo sapiens
aaggaattcatagag

SEQ ID NO: 137167 - DNA, 15 bp, Homo sapiens
taaggaattcataga

SEQ ID NO: 137168 - DNA, 15 bp, Homo sapiens
gtaaggaattcatag

SEQ ID NO: 137169 - DNA, 15 bp, Homo sapiens
agtaaggaattcata

SEQ ID NO: 137170 - DNA, 15 bp, Homo sapiens
aagtaaggaattcat

SEQ ID NO: 137171 - DNA, 15 bp, Homo sapiens
taagtaaggaattca

SEQ ID NO: 137172 - DNA, 15 bp, Homo sapiens
ttaagtaaggaattc

SEQ ID NO: 137173 - DNA, 15 bp, Homo sapiens
tttaagtaaggaatt

SEQ ID NO: 137174 - DNA, 15 bp, Homo sapiens
ttttaagtaaggaat

SEQ ID NO: 137175 - DNA, 15 bp, Homo sapiens
cttttaagtaaggaa

SEQ ID NO: 137176 - DNA, 15 bp, Homo sapiens
acttttaagtaagga

SEQ ID NO: 137177 - DNA, 15 bp, Homo sapiens
gacttttaagtaagg

SEQ ID NO: 137178 - DNA, 15 bp, Homo sapiens
tgacttttaagtaag

SEQ ID NO: 137179 - DNA, 15 bp, Homo sapiens
atgacttttaagtaa

SEQ ID NO: 137180 - DNA, 15 bp, Homo sapiens
tatgacttttaagta

SEQ ID NO: 137181 - DNA, 15 bp, Homo sapiens
ttatgacttttaagt

SEQ ID NO: 137182 - DNA, 15 bp, Homo sapiens
tttatgacttttaag

SEQ ID NO: 137183 - DNA, 15 bp, Homo sapiens
gtttatgacttttaa

SEQ ID NO: 137184 - DNA, 15 bp, Homo sapiens
tgtttatgactttta

SEQ ID NO: 137185 - DNA, 15 bp, Homo sapiens
ttgtttatgactttt

SEQ ID NO: 137186 - DNA, 15 bp, Homo sapiens
tttgtttatgacttt

SEQ ID NO: 137187 - DNA, 15 bp, Homo sapiens
ttttgtttatgactt

SEQ ID NO: 137188 - DNA, 15 bp, Homo sapiens
attttgtttatgact

SEQ ID NO: 137189 - DNA, 15 bp, Homo sapiens
cattttgtttatgac

SEQ ID NO: 137190 - DNA, 15 bp, Homo sapiens
tcattttgtttatga

SEQ ID NO: 137191 - DNA, 15 bp, Homo sapiens
ttcattttgtttatg

SEQ ID NO: 137192 - DNA, 15 bp, Homo sapiens
tttcattttgtttat

SEQ ID NO: 137193 - DNA, 15 bp, Homo sapiens
atttcattttgttta

SEQ ID NO: 137194 - DNA, 15 bp, Homo sapiens
catttcattttgttt

SEQ ID NO: 137195 - DNA, 15 bp, Homo sapiens
tcatttcattttgtt

SEQ ID NO: 137196 - DNA, 15 bp, Homo sapiens
atcatttcattttgt

SEQ ID NO: 137197 - DNA, 15 bp, Homo sapiens
aatcatttcattttg

SEQ ID NO: 137198 - DNA, 15 bp, Homo sapiens
caatcatttcatttt

SEQ ID NO: 137199 - DNA, 15 bp, Homo sapiens
acaatcatttcattt

SEQ ID NO: 137200 - DNA, 15 bp, Homo sapiens
aacaatcatttcatt

SEQ ID NO: 137201 - DNA, 15 bp, Homo sapiens
aaacaatcatttcat

SEQ ID NO: 137202 - DNA, 15 bp, Homo sapiens
aaaacaatcatttca

SEQ ID NO: 137203 - DNA, 15 bp, Homo sapiens
taaaacaatcatttc

SEQ ID NO: 137204 - DNA, 15 bp, Homo sapiens
ttaaaacaatcattt

SEQ ID NO: 137205 - DNA, 15 bp, Homo sapiens
cttaaaacaatcatt

SEQ ID NO: 137206 - DNA, 15 bp, Homo sapiens
gcttaaaacaatcat

SEQ ID NO: 137207 - DNA, 15 bp, Homo sapiens
ggcttaaaacaatca

SEQ ID NO: 137208 - DNA, 15 bp, Homo sapiens
tggcttaaaacaatc

SEQ ID NO: 137209 - DNA, 15 bp, Homo sapiens
gtggcttaaaacaat

SEQ ID NO: 137210 - DNA, 15 bp, Homo sapiens
agtggcttaaaacaa

SEQ ID NO: 137211 - DNA, 15 bp, Homo sapiens
tagtggcttaaaaca

SEQ ID NO: 137212 - DNA, 15 bp, Homo sapiens
gtagtggcttaaaac

SEQ ID NO: 137213 - DNA, 15 bp, Homo sapiens
tgtagtggcttaaaa

SEQ ID NO: 137214 - DNA, 15 bp, Homo sapiens
atgtagtggcttaaa

SEQ ID NO: 137215 - DNA, 15 bp, Homo sapiens
aatgtagtggcttaa

SEQ ID NO: 137216 - DNA, 15 bp, Homo sapiens
aaatgtagtggctta

SEQ ID NO: 137217 - DNA, 15 bp, Homo sapiens
aaaatgtagtggctt

SEQ ID NO: 137218 - DNA, 15 bp, Homo sapiens
caaaatgtagtggct

SEQ ID NO: 137219 - DNA, 15 bp, Homo sapiens
ccaaaatgtagtggc

SEQ ID NO: 137220 - DNA, 15 bp, Homo sapiens
cccaaaatgtagtgg

SEQ ID NO: 137221 - DNA, 15 bp, Homo sapiens
ccccaaaatgtagtg

SEQ ID NO: 137222 - DNA, 15 bp, Homo sapiens
accccaaaatgtagt

SEQ ID NO: 137223 - DNA, 15 bp, Homo sapiens
taccccaaaatgtag

SEQ ID NO: 137224 - DNA, 15 bp, Homo sapiens
ttaccccaaaatgta

SEQ ID NO: 137225 - DNA, 15 bp, Homo sapiens
attaccccaaaatgt

SEQ ID NO: 137226 - DNA, 15 bp, Homo sapiens
aattaccccaaaatg

SEQ ID NO: 137227 - DNA, 15 bp, Homo sapiens
aaattaccccaaaat

SEQ ID NO: 137228 - DNA, 15 bp, Homo sapiens
caaattaccccaaaa

SEQ ID NO: 137229 - DNA, 15 bp, Homo sapiens
acaaattaccccaaa

SEQ ID NO: 137230 - DNA, 15 bp, Homo sapiens
aacaaattaccccaa

SEQ ID NO: 137231 - DNA, 15 bp, Homo sapiens
taacaaattacccca

SEQ ID NO: 137232 - DNA, 15 bp, Homo sapiens
gtaacaaattacccc

SEQ ID NO: 137233 - DNA, 15 bp, Homo sapiens
tgtaacaaattaccc

SEQ ID NO: 137234 - DNA, 15 bp, Homo sapiens
atgtaacaaattacc

SEQ ID NO: 137235 - DNA, 15 bp, Homo sapiens
tatgtaacaaattac

SEQ ID NO: 137236 - DNA, 15 bp, Homo sapiens
ctatgtaacaaatta

SEQ ID NO: 137237 - DNA, 15 bp, Homo sapiens
gctatgtaacaaatt

SEQ ID NO: 137238 - DNA, 15 bp, Homo sapiens
ggctatgtaacaaat

SEQ ID NO: 137239 - DNA, 15 bp, Homo sapiens
tggctatgtaacaaa

SEQ ID NO: 137240 - DNA, 15 bp, Homo sapiens
atggctatgtaacaa

SEQ ID NO: 137241 - DNA, 15 bp, Homo sapiens
catggctatgtaaca

SEQ ID NO: 137242 - DNA, 15 bp, Homo sapiens
ccatggctatgtaac

SEQ ID NO: 137243 - DNA, 15 bp, Homo sapiens
tccatggctatgtaa

SEQ ID NO: 137244 - DNA, 15 bp, Homo sapiens
atccatggctatgta

SEQ ID NO: 137245 - DNA, 15 bp, Homo sapiens
catccatggctatgt

SEQ ID NO: 137246 - DNA, 15 bp, Homo sapiens
tcatccatggctatg

SEQ ID NO: 137247 - DNA, 15 bp, Homo sapiens
gtcatccatggctat

SEQ ID NO: 137248 - DNA, 15 bp, Homo sapiens
agtcatccatggcta

SEQ ID NO: 137249 - DNA, 15 bp, Homo sapiens
cagtcatccatggct

SEQ ID NO: 137250 - DNA, 15 bp, Homo sapiens
ccagtcatccatggc

SEQ ID NO: 137251 - DNA, 15 bp, Homo sapiens
tccagtcatccatgg

SEQ ID NO: 137252 - DNA, 15 bp, Homo sapiens
ttccagtcatccatg

SEQ ID NO: 137253 - DNA, 15 bp, Homo sapiens
gttccagtcatccat

SEQ ID NO: 137254 - DNA, 15 bp, Homo sapiens
tgttccagtcatcca

SEQ ID NO: 137255 - DNA, 15 bp, Homo sapiens
ttgttccagtcatcc

SEQ ID NO: 137256 - DNA, 15 bp, Homo sapiens
tttgttccagtcatc

SEQ ID NO: 137257 - DNA, 15 bp, Homo sapiens
atttgttccagtcat

SEQ ID NO: 137258 - DNA, 15 bp, Homo sapiens
tatttgttccagtca

SEQ ID NO: 137259 - DNA, 15 bp, Homo sapiens
ttatttgttccagtc

SEQ ID NO: 137260 - DNA, 15 bp, Homo sapiens
attatttgttccagt

SEQ ID NO: 137261 - DNA, 15 bp, Homo sapiens
aattatttgttccag

SEQ ID NO: 137262 - DNA, 15 bp, Homo sapiens
taattatttgttcca

SEQ ID NO: 137263 - DNA, 15 bp, Homo sapiens
gtaattatttgttcc

SEQ ID NO: 137264 - DNA, 15 bp, Homo sapiens
agtaattatttgttc

SEQ ID NO: 137265 - DNA, 15 bp, Homo sapiens
tagtaattatttgtt

SEQ ID NO: 137266 - DNA, 15 bp, Homo sapiens
atagtaattatttgt

SEQ ID NO: 137267 - DNA, 15 bp, Homo sapiens
aatagtaattatttg

SEQ ID NO: 137268 - DNA, 15 bp, Homo sapiens
aaatagtaattattt

SEQ ID NO: 137269 - DNA, 15 bp, Homo sapiens
taaatagtaattatt

SEQ ID NO: 137270 - DNA, 15 bp, Homo sapiens
ctaaatagtaattat

SEQ ID NO: 137271 - DNA, 15 bp, Homo sapiens
actaaatagtaatta

SEQ ID NO: 137272 - DNA, 15 bp, Homo sapiens
cactaaatagtaatt

SEQ ID NO: 137273 - DNA, 15 bp, Homo sapiens
tcactaaatagtaat

SEQ ID NO: 137274 - DNA, 15 bp, Homo sapiens
ttcactaaatagtaa

SEQ ID NO: 137275 - DNA, 15 bp, Homo sapiens
cttcactaaatagta

SEQ ID NO: 137276 - DNA, 15 bp, Homo sapiens
acttcactaaatagt

SEQ ID NO: 137277 - DNA, 15 bp, Homo sapiens
gacttcactaaatag

SEQ ID NO: 137278 - DNA, 15 bp, Homo sapiens
ggacttcactaaata

SEQ ID NO: 137279 - DNA, 15 bp, Homo sapiens
aggacttcactaaat

SEQ ID NO: 137280 - DNA, 15 bp, Homo sapiens
aaggacttcactaaa

SEQ ID NO: 137281 - DNA, 15 bp, Homo sapiens
aaaggacttcactaa

SEQ ID NO: 137282 - DNA, 15 bp, Homo sapiens
gaaaggacttcacta

SEQ ID NO: 137283 - DNA, 15 bp, Homo sapiens
tgaaaggacttcact

SEQ ID NO: 137284 - DNA, 15 bp, Homo sapiens
gtgaaaggacttcac

SEQ ID NO: 137285 - DNA, 15 bp, Homo sapiens
tgtgaaaggacttca

SEQ ID NO: 137286 - DNA, 15 bp, Homo sapiens
ttgtgaaaggacttc

SEQ ID NO: 137287 - DNA, 15 bp, Homo sapiens
cttgtgaaaggactt

SEQ ID NO: 137288 - DNA, 15 bp, Homo sapiens
ccttgtgaaaggact

SEQ ID NO: 137289 - DNA, 15 bp, Homo sapiens
accttgtgaaaggac

SEQ ID NO: 137290 - DNA, 15 bp, Homo sapiens
gaccttgtgaaagga

SEQ ID NO: 137291 - DNA, 15 bp, Homo sapiens
ggaccttgtgaaagg

SEQ ID NO: 137292 - DNA, 15 bp, Homo sapiens
tggaccttgtgaaag

SEQ ID NO: 137293 - DNA, 15 bp, Homo sapiens
ctggaccttgtgaaa

SEQ ID NO: 137294 - DNA, 15 bp, Homo sapiens
gctggaccttgtgaa

SEQ ID NO: 137295 - DNA, 15 bp, Homo sapiens
agctggaccttgtga

SEQ ID NO: 137296 - DNA, 15 bp, Homo sapiens
gagctggaccttgtg

SEQ ID NO: 137297 - DNA, 15 bp, Homo sapiens
ggagctggaccttgt

SEQ ID NO: 137298 - DNA, 15 bp, Homo sapiens
aggagctggaccttg

SEQ ID NO: 137299 - DNA, 15 bp, Homo sapiens
caggagctggacctt

SEQ ID NO: 137300 - DNA, 15 bp, Homo sapiens
gcaggagctggacct

SEQ ID NO: 137301 - DNA, 15 bp, Homo sapiens
ggcaggagctggacc

SEQ ID NO: 137302 - DNA, 15 bp, Homo sapiens
gggcaggagctggac

SEQ ID NO: 137303 - DNA, 15 bp, Homo sapiens
agggcaggagctgga

SEQ ID NO: 137304 - DNA, 15 bp, Homo sapiens
gagggcaggagctgg

SEQ ID NO: 137305 - DNA, 15 bp, Homo sapiens
agagggcaggagctg

SEQ ID NO: 137306 - DNA, 15 bp, Homo sapiens
aagagggcaggagct

SEQ ID NO: 137307 - DNA, 15 bp, Homo sapiens
aaagagggcaggagc

SEQ ID NO: 137308 - DNA, 15 bp, Homo sapiens
gaaagagggcaggag

SEQ ID NO: 137309 - DNA, 15 bp, Homo sapiens
agaaagagggcagga

SEQ ID NO: 137310 - DNA, 15 bp, Homo sapiens
tagaaagagggcagg

SEQ ID NO: 137311 - DNA, 15 bp, Homo sapiens
ctagaaagagggcag

SEQ ID NO: 137312 - DNA, 15 bp, Homo sapiens
cctagaaagagggca

SEQ ID NO: 137313 - DNA, 15 bp, Homo sapiens
acctagaaagagggc

SEQ ID NO: 137314 - DNA, 15 bp, Homo sapiens
aacctagaaagaggg

SEQ ID NO: 137315 - DNA, 15 bp, Homo sapiens
gaacctagaaagagg

SEQ ID NO: 137316 - DNA, 15 bp, Homo sapiens
ggaacctagaaagag

SEQ ID NO: 137317 - DNA, 15 bp, Homo sapiens
aggaacctagaaaga

SEQ ID NO: 137318 - DNA, 15 bp, Homo sapiens
gaggaacctagaaag

SEQ ID NO: 137319 - DNA, 15 bp, Homo sapiens
agaggaacctagaaa

SEQ ID NO: 137320 - DNA, 15 bp, Homo sapiens
aagaggaacctagaa

SEQ ID NO: 137321 - DNA, 15 bp, Homo sapiens
taagaggaacctaga

SEQ ID NO: 137322 - DNA, 15 bp, Homo sapiens
ttaagaggaacctag

SEQ ID NO: 137323 - DNA, 15 bp, Homo sapiens
gttaagaggaaccta

SEQ ID NO: 137324 - DNA, 15 bp, Homo sapiens
tgttaagaggaacct

SEQ ID NO: 137325 - DNA, 15 bp, Homo sapiens
atgttaagaggaacc

SEQ ID NO: 137326 - DNA, 15 bp, Homo sapiens
gatgttaagaggaac

SEQ ID NO: 137327 - DNA, 15 bp, Homo sapiens
agatgttaagaggaa

SEQ ID NO: 137328 - DNA, 15 bp, Homo sapiens
aagatgttaagagga

SEQ ID NO: 137329 - DNA, 15 bp, Homo sapiens
gaagatgttaagagg

SEQ ID NO: 137330 - DNA, 15 bp, Homo sapiens
ggaagatgttaagag

SEQ ID NO: 137331 - DNA, 15 bp, Homo sapiens
gggaagatgttaaga

SEQ ID NO: 137332 - DNA, 15 bp, Homo sapiens
tgggaagatgttaag

SEQ ID NO: 137333 - DNA, 15 bp, Homo sapiens
ttgggaagatgttaa

SEQ ID NO: 137334 - DNA, 15 bp, Homo sapiens
cttgggaagatgtta

SEQ ID NO: 137335 - DNA, 15 bp, Homo sapiens
gcttgggaagatgtt

SEQ ID NO: 137336 - DNA, 15 bp, Homo sapiens
agcttgggaagatgt

SEQ ID NO: 137337 - DNA, 15 bp, Homo sapiens
gagcttgggaagatg

SEQ ID NO: 137338 - DNA, 15 bp, Homo sapiens
agagcttgggaagat

SEQ ID NO: 137339 - DNA, 15 bp, Homo sapiens
gagagcttgggaaga

SEQ ID NO: 137340 - DNA, 15 bp, Homo sapiens
ggagagcttgggaag

SEQ ID NO: 137341 - DNA, 15 bp, Homo sapiens
tggagagcttgggaa

SEQ ID NO: 137342 - DNA, 15 bp, Homo sapiens
gtggagagcttggga

SEQ ID NO: 137343 - DNA, 15 bp, Homo sapiens
tgtggagagcttggg

SEQ ID NO: 137344 - DNA, 15 bp, Homo sapiens
gtgtggagagcttgg

SEQ ID NO: 137345 - DNA, 15 bp, Homo sapiens
ggtgtggagagcttg

SEQ ID NO: 137346 - DNA, 15 bp, Homo sapiens
gggtgtggagagctt

SEQ ID NO: 137347 - DNA, 15 bp, Homo sapiens
tgggtgtggagagct

SEQ ID NO: 137348 - DNA, 15 bp, Homo sapiens
ctgggtgtggagagc

SEQ ID NO: 137349 - DNA, 15 bp, Homo sapiens
gctgggtgtggagag

SEQ ID NO: 137350 - DNA, 15 bp, Homo sapiens
ggctgggtgtggaga

SEQ ID NO: 137351 - DNA, 15 bp, Homo sapiens
tggctgggtgtggag

SEQ ID NO: 137352 - DNA, 15 bp, Homo sapiens
gtggctgggtgtgga

SEQ ID NO: 137353 - DNA, 15 bp, Homo sapiens
agtggctgggtgtgg

SEQ ID NO: 137354 - DNA, 15 bp, Homo sapiens
aagtggctgggtgtg

SEQ ID NO: 137355 - DNA, 15 bp, Homo sapiens
taagtggctgggtgt

SEQ ID NO: 137356 - DNA, 15 bp, Homo sapiens
ctaagtggctgggtg

SEQ ID NO: 137357 - DNA, 15 bp, Homo sapiens
cctaagtggctgggt

SEQ ID NO: 137358 - DNA, 15 bp, Homo sapiens
tcctaagtggctggg

SEQ ID NO: 137359 - DNA, 15 bp, Homo sapiens
gtcctaagtggctgg

SEQ ID NO: 137360 - DNA, 15 bp, Homo sapiens
agtcctaagtggctg

SEQ ID NO: 137361 - DNA, 15 bp, Homo sapiens
aagtcctaagtggct

SEQ ID NO: 137362 - DNA, 15 bp, Homo sapiens
gaagtcctaagtggc

SEQ ID NO: 137363 - DNA, 15 bp, Homo sapiens
ggaagtcctaagtgg

SEQ ID NO: 137364 - DNA, 15 bp, Homo sapiens
aggaagtcctaagtg

SEQ ID NO: 137365 - DNA, 15 bp, Homo sapiens
aaggaagtcctaagt

SEQ ID NO: 137366 - DNA, 15 bp, Homo sapiens
gaaggaagtcctaag

SEQ ID NO: 137367 - DNA, 15 bp, Homo sapiens
tgaaggaagtcctaa

SEQ ID NO: 137368 - DNA, 15 bp, Homo sapiens
atgaaggaagtccta

SEQ ID NO: 137369 - DNA, 15 bp, Homo sapiens
aatgaaggaagtcct

SEQ ID NO: 137370 - DNA, 15 bp, Homo sapiens
aaatgaaggaagtcc

SEQ ID NO: 137371 - DNA, 15 bp, Homo sapiens
gaaatgaaggaagtc

SEQ ID NO: 137372 - DNA, 15 bp, Homo sapiens
cgaaatgaaggaagt

SEQ ID NO: 137373 - DNA, 15 bp, Homo sapiens
acgaaatgaaggaag

SEQ ID NO: 137374 - DNA, 15 bp, Homo sapiens
aacgaaatgaaggaa

SEQ ID NO: 137375 - DNA, 15 bp, Homo sapiens
taacgaaatgaagga

SEQ ID NO: 137376 - DNA, 15 bp, Homo sapiens
ttaacgaaatgaagg

SEQ ID NO: 137377 - DNA, 15 bp, Homo sapiens
tttaacgaaatgaag

SEQ ID NO: 137378 - DNA, 15 bp, Homo sapiens
gtttaacgaaatgaa

SEQ ID NO: 137379 - DNA, 15 bp, Homo sapiens
ggtttaacgaaatga

SEQ ID NO: 137380 - DNA, 15 bp, Homo sapiens
aggtttaacgaaatg

SEQ ID NO: 137381 - DNA, 15 bp, Homo sapiens
aaggtttaacgaaat

SEQ ID NO: 137382 - DNA, 15 bp, Homo sapiens
aaaggtttaacgaaa

SEQ ID NO: 137383 - DNA, 15 bp, Homo sapiens
aaaaggtttaacgaa

SEQ ID NO: 137384 - DNA, 15 bp, Homo sapiens
caaaaggtttaacga

SEQ ID NO: 137385 - DNA, 15 bp, Homo sapiens
tcaaaaggtttaacg

SEQ ID NO: 137386 - DNA, 15 bp, Homo sapiens
atcaaaaggtttaac

SEQ ID NO: 137387 - DNA, 15 bp, Homo sapiens
aatcaaaaggtttaa

SEQ ID NO: 137388 - DNA, 15 bp, Homo sapiens
aaatcaaaaggttta

SEQ ID NO: 137389 - DNA, 15 bp, Homo sapiens
aaaatcaaaaggttt

SEQ ID NO: 137390 - DNA, 15 bp, Homo sapiens
aaaaatcaaaaggtt

SEQ ID NO: 137391 - DNA, 15 bp, Homo sapiens
taaaaatcaaaaggt

SEQ ID NO: 137392 - DNA, 15 bp, Homo sapiens
gtaaaaatcaaaagg

SEQ ID NO: 137393 - DNA, 15 bp, Homo sapiens
ggtaaaaatcaaaag

SEQ ID NO: 137394 - DNA, 15 bp, Homo sapiens
aggtaaaaatcaaaa

SEQ ID NO: 137395 - DNA, 15 bp, Homo sapiens
gaggtaaaaatcaaa

SEQ ID NO: 137396 - DNA, 15 bp, Homo sapiens
agaggtaaaaatcaa

SEQ ID NO: 137397 - DNA, 15 bp, Homo sapiens
cagaggtaaaaatca

SEQ ID NO: 137398 - DNA, 15 bp, Homo sapiens
ccagaggtaaaaatc

SEQ ID NO: 137399 - DNA, 15 bp, Homo sapiens
cccagaggtaaaaat

SEQ ID NO: 137400 - DNA, 15 bp, Homo sapiens
gcccagaggtaaaaa

SEQ ID NO: 137401 - DNA, 15 bp, Homo sapiens
ggcccagaggtaaaa

SEQ ID NO: 137402 - DNA, 15 bp, Homo sapiens
aggcccagaggtaaa

SEQ ID NO: 137403 - DNA, 15 bp, Homo sapiens
aaggcccagaggtaa

SEQ ID NO: 137404 - DNA, 15 bp, Homo sapiens
gaaggcccagaggta

SEQ ID NO: 137405 - DNA, 15 bp, Homo sapiens
tgaaggcccagaggt

SEQ ID NO: 137406 - DNA, 15 bp, Homo sapiens
gtgaaggcccagagg

SEQ ID NO: 137407 - DNA, 15 bp, Homo sapiens
tgtgaaggcccagag

SEQ ID NO: 137408 - DNA, 15 bp, Homo sapiens
gtgtgaaggcccaga

SEQ ID NO: 137409 - DNA, 15 bp, Homo sapiens
tgtgtgaaggcccag

SEQ ID NO: 137410 - DNA, 15 bp, Homo sapiens
atgtgtgaaggccca

SEQ ID NO: 137411 - DNA, 15 bp, Homo sapiens
catgtgtgaaggccc

SEQ ID NO: 137412 - DNA, 15 bp, Homo sapiens
gcatgtgtgaaggcc

SEQ ID NO: 137413 - DNA, 15 bp, Homo sapiens
agcatgtgtgaaggc

SEQ ID NO: 137414 - DNA, 15 bp, Homo sapiens
cagcatgtgtgaagg

SEQ ID NO: 137415 - DNA, 15 bp, Homo sapiens
acagcatgtgtgaag

SEQ ID NO: 137416 - DNA, 15 bp, Homo sapiens
aacagcatgtgtgaa

SEQ ID NO: 137417 - DNA, 15 bp, Homo sapiens
gaacagcatgtgtga

SEQ ID NO: 137418 - DNA, 15 bp, Homo sapiens
tgaacagcatgtgtg

SEQ ID NO: 137419 - DNA, 15 bp, Homo sapiens
gtgaacagcatgtgt

SEQ ID NO: 137420 - DNA, 15 bp, Homo sapiens
tgtgaacagcatgtg

SEQ ID NO: 137421 - DNA, 15 bp, Homo sapiens
gtgtgaacagcatgt

SEQ ID NO: 137422 - DNA, 15 bp, Homo sapiens
agtgtgaacagcatg

SEQ ID NO: 137423 - DNA, 15 bp, Homo sapiens
cagtgtgaacagcat

SEQ ID NO: 137424 - DNA, 15 bp, Homo sapiens
gcagtgtgaacagca

SEQ ID NO: 137425 - DNA, 15 bp, Homo sapiens
ggcagtgtgaacagc

SEQ ID NO: 137426 - DNA, 15 bp, Homo sapiens
cggcagtgtgaacag

SEQ ID NO: 137427 - DNA, 15 bp, Homo sapiens
ccggcagtgtgaaca

SEQ ID NO: 137428 - DNA, 15 bp, Homo sapiens
tccggcagtgtgaac

SEQ ID NO: 137429 - DNA, 15 bp, Homo sapiens
gtccggcagtgtgaa

SEQ ID NO: 137430 - DNA, 15 bp, Homo sapiens
agtccggcagtgtga

SEQ ID NO: 137431 - DNA, 15 bp, Homo sapiens
aagtccggcagtgtg

SEQ ID NO: 137432 - DNA, 15 bp, Homo sapiens
gaagtccggcagtgt

SEQ ID NO: 137433 - DNA, 15 bp, Homo sapiens
agaagtccggcagtg

SEQ ID NO: 137434 - DNA, 15 bp, Homo sapiens
gagaagtccggcagt

SEQ ID NO: 137435 - DNA, 15 bp, Homo sapiens
agagaagtccggcag

SEQ ID NO: 137436 - DNA, 15 bp, Homo sapiens
aagagaagtccggca

SEQ ID NO: 137437 - DNA, 15 bp, Homo sapiens
aaagagaagtccggc

SEQ ID NO: 137438 - DNA, 15 bp, Homo sapiens
aaaagagaagtccgg

SEQ ID NO: 137439 - DNA, 15 bp, Homo sapiens
gaaaagagaagtccg

SEQ ID NO: 137440 - DNA, 15 bp, Homo sapiens
agaaaagagaagtcc

SEQ ID NO: 137441 - DNA, 15 bp, Homo sapiens
aagaaaagagaagtc

SEQ ID NO: 137442 - DNA, 15 bp, Homo sapiens
caagaaaagagaagt

SEQ ID NO: 137443 - DNA, 15 bp, Homo sapiens
acaagaaaagagaag

SEQ ID NO: 137444 - DNA, 15 bp, Homo sapiens
gacaagaaaagagaa

SEQ ID NO: 137445 - DNA, 15 bp, Homo sapiens
ggacaagaaaagaga

SEQ ID NO: 137446 - DNA, 15 bp, Homo sapiens
aggacaagaaaagag

SEQ ID NO: 137447 - DNA, 15 bp, Homo sapiens
gaggacaagaaaaga

SEQ ID NO: 137448 - DNA, 15 bp, Homo sapiens
ggaggacaagaaaag

SEQ ID NO: 137449 - DNA, 15 bp, Homo sapiens
aggaggacaagaaaa

SEQ ID NO: 137450 - DNA, 15 bp, Homo sapiens
aaggaggacaagaaa

SEQ ID NO: 137451 - DNA, 15 bp, Homo sapiens
gaaggaggacaagaa

SEQ ID NO: 137452 - DNA, 15 bp, Homo sapiens
agaaggaggacaaga

SEQ ID NO: 137453 - DNA, 15 bp, Homo sapiens
gagaaggaggacaag

SEQ ID NO: 137454 - DNA, 15 bp, Homo sapiens
ggagaaggaggacaa

SEQ ID NO: 137455 - DNA, 15 bp, Homo sapiens
gggagaaggaggaca

SEQ ID NO: 137456 - DNA, 15 bp, Homo sapiens
ggggagaaggaggac

SEQ ID NO: 137457 - DNA, 15 bp, Homo sapiens
aggggagaaggagga

SEQ ID NO: 137458 - DNA, 15 bp, Homo sapiens
aaggggagaaggagg

SEQ ID NO: 137459 - DNA, 15 bp, Homo sapiens
gaaggggagaaggag

SEQ ID NO: 137460 - DNA, 15 bp, Homo sapiens
ggaaggggagaagga

SEQ ID NO: 137461 - DNA, 15 bp, Homo sapiens
tggaaggggagaagg

SEQ ID NO: 137462 - DNA, 15 bp, Homo sapiens
gtggaaggggagaag

SEQ ID NO: 137463 - DNA, 15 bp, Homo sapiens
agtggaaggggagaa

SEQ ID NO: 137464 - DNA, 15 bp, Homo sapiens
aagtggaaggggaga

SEQ ID NO: 137465 - DNA, 15 bp, Homo sapiens
taagtggaaggggag

SEQ ID NO: 137466 - DNA, 15 bp, Homo sapiens
ctaagtggaagggga

SEQ ID NO: 137467 - DNA, 15 bp, Homo sapiens
gctaagtggaagggg

SEQ ID NO: 137468 - DNA, 15 bp, Homo sapiens
agctaagtggaaggg

SEQ ID NO: 137469 - DNA, 15 bp, Homo sapiens
cagctaagtggaagg

SEQ ID NO: 137470 - DNA, 15 bp, Homo sapiens
tcagctaagtggaag

SEQ ID NO: 137471 - DNA, 15 bp, Homo sapiens
gtcagctaagtggaa

SEQ ID NO: 137472 - DNA, 15 bp, Homo sapiens
agtcagctaagtgga

SEQ ID NO: 137473 - DNA, 15 bp, Homo sapiens
gagtcagctaagtgg

SEQ ID NO: 137474 - DNA, 15 bp, Homo sapiens
ggagtcagctaagtg

SEQ ID NO: 137475 - DNA, 15 bp, Homo sapiens
aggagtcagctaagt

SEQ ID NO: 137476 - DNA, 15 bp, Homo sapiens
caggagtcagctaag

SEQ ID NO: 137477 - DNA, 15 bp, Homo sapiens
acaggagtcagctaa

SEQ ID NO: 137478 - DNA, 15 bp, Homo sapiens
aacaggagtcagcta

SEQ ID NO: 137479 - DNA, 15 bp, Homo sapiens
aaacaggagtcagct

SEQ ID NO: 137480 - DNA, 15 bp, Homo sapiens
taaacaggagtcagc

SEQ ID NO: 137481 - DNA, 15 bp, Homo sapiens
ataaacaggagtcag

SEQ ID NO: 137482 - DNA, 15 bp, Homo sapiens
gataaacaggagtca

SEQ ID NO: 137483 - DNA, 15 bp, Homo sapiens
ggataaacaggagtc

SEQ ID NO: 137484 - DNA, 15 bp, Homo sapiens
tggataaacaggagt

SEQ ID NO: 137485 - DNA, 15 bp, Homo sapiens
ctggataaacaggag

SEQ ID NO: 137486 - DNA, 15 bp, Homo sapiens
cctggataaacagga

SEQ ID NO: 137487 - DNA, 15 bp, Homo sapiens
ccctggataaacagg

SEQ ID NO: 137488 - DNA, 15 bp, Homo sapiens
tccctggataaacag

SEQ ID NO: 137489 - DNA, 15 bp, Homo sapiens
atccctggataaaca

SEQ ID NO: 137490 - DNA, 15 bp, Homo sapiens
catccctggataaac

SEQ ID NO: 137491 - DNA, 15 bp, Homo sapiens
acatccctggataaa

SEQ ID NO: 137492 - DNA, 15 bp, Homo sapiens
cacatccctggataa

SEQ ID NO: 137493 - DNA, 15 bp, Homo sapiens
gcacatccctggata

SEQ ID NO: 137494 - DNA, 15 bp, Homo sapiens
agcacatccctggat

SEQ ID NO: 137495 - DNA, 15 bp, Homo sapiens
cagcacatccctgga

SEQ ID NO: 137496 - DNA, 15 bp, Homo sapiens
ccagcacatccctgg

SEQ ID NO: 137497 - DNA, 15 bp, Homo sapiens
accagcacatccctg

SEQ ID NO: 137498 - DNA, 15 bp, Homo sapiens
taccagcacatccct

SEQ ID NO: 137499 - DNA, 15 bp, Homo sapiens
ttaccagcacatccc

SEQ ID NO: 137500 - DNA, 15 bp, Homo sapiens
cttaccagcacatcc

SEQ ID NO: 137501 - DNA, 15 bp, Homo sapiens
acttaccagcacatc

SEQ ID NO: 137502 - DNA, 15 bp, Homo sapiens
cacttaccagcacat

SEQ ID NO: 137503 - DNA, 15 bp, Homo sapiens
tcacttaccagcaca

SEQ ID NO: 137504 - DNA, 15 bp, Homo sapiens
atcacttaccagcac

SEQ ID NO: 137505 - DNA, 15 bp, Homo sapiens
aatcacttaccagca

SEQ ID NO: 137506 - DNA, 15 bp, Homo sapiens
taatcacttaccagc

SEQ ID NO: 137507 - DNA, 15 bp, Homo sapiens
ttaatcacttaccag

SEQ ID NO: 137508 - DNA, 15 bp, Homo sapiens
gttaatcacttacca

SEQ ID NO: 137509 - DNA, 15 bp, Homo sapiens
tgttaatcacttacc

SEQ ID NO: 137510 - DNA, 15 bp, Homo sapiens
ttgttaatcacttac

SEQ ID NO: 137511 - DNA, 15 bp, Homo sapiens
gttgttaatcactta

SEQ ID NO: 137512 - DNA, 15 bp, Homo sapiens
cgttgttaatcactt

SEQ ID NO: 137513 - DNA, 15 bp, Homo sapiens
ccgttgttaatcact

SEQ ID NO: 137514 - DNA, 15 bp, Homo sapiens
cccgttgttaatcac

SEQ ID NO: 137515 - DNA, 15 bp, Homo sapiens
tcccgttgttaatca

SEQ ID NO: 137516 - DNA, 15 bp, Homo sapiens
atcccgttgttaatc

SEQ ID NO: 137517 - DNA, 15 bp, Homo sapiens
aatcccgttgttaat

SEQ ID NO: 137518 - DNA, 15 bp, Homo sapiens
aaatcccgttgttaa

SEQ ID NO: 137519 - DNA, 15 bp, Homo sapiens
gaaatcccgttgtta

SEQ ID NO: 137520 - DNA, 15 bp, Homo sapiens
agaaatcccgttgtt

SEQ ID NO: 137521 - DNA, 15 bp, Homo sapiens
tagaaatcccgttgt

SEQ ID NO: 137522 - DNA, 15 bp, Homo sapiens
ctagaaatcccgttg

SEQ ID NO: 137523 - DNA, 15 bp, Homo sapiens
tctagaaatcccgtt

SEQ ID NO: 137524 - DNA, 15 bp, Homo sapiens
ctctagaaatcccgt

SEQ ID NO: 137525 - DNA, 15 bp, Homo sapiens
tctctagaaatcccg

SEQ ID NO: 137526 - DNA, 15 bp, Homo sapiens
ttctctagaaatccc

SEQ ID NO: 137527 - DNA, 15 bp, Homo sapiens
cttctctagaaatcc

SEQ ID NO: 137528 - DNA, 15 bp, Homo sapiens
tcttctctagaaatc

SEQ ID NO: 137529 - DNA, 15 bp, Homo sapiens
ttcttctctagaaat

SEQ ID NO: 137530 - DNA, 15 bp, Homo sapiens
tttcttctctagaaa

SEQ ID NO: 137531 - DNA, 15 bp, Homo sapiens
ctttcttctctagaa

SEQ ID NO: 137532 - DNA, 15 bp, Homo sapiens
actttcttctctaga

SEQ ID NO: 137533 - DNA, 15 bp, Homo sapiens
gactttcttctctag

SEQ ID NO: 137534 - DNA, 15 bp, Homo sapiens
ggactttcttctcta

SEQ ID NO: 137535 - DNA, 15 bp, Homo sapiens
gggactttcttctct

SEQ ID NO: 137536 - DNA, 15 bp, Homo sapiens
agggactttcttctc

SEQ ID NO: 137537 - DNA, 15 bp, Homo sapiens
tagggactttcttct

SEQ ID NO: 137538 - DNA, 15 bp, Homo sapiens
atagggactttcttc

SEQ ID NO: 137539 - DNA, 15 bp, Homo sapiens
catagggactttctt

SEQ ID NO: 137540 - DNA, 15 bp, Homo sapiens
acatagggactttct

SEQ ID NO: 137541 - DNA, 15 bp, Homo sapiens
tacatagggactttc

SEQ ID NO: 137542 - DNA, 15 bp, Homo sapiens
gtacatagggacttt

SEQ ID NO: 137543 - DNA, 15 bp, Homo sapiens
cgtacatagggactt

SEQ ID NO: 137544 - DNA, 15 bp, Homo sapiens
ccgtacatagggact

SEQ ID NO: 137545 - DNA, 15 bp, Homo sapiens
accgtacatagggac

SEQ ID NO: 137546 - DNA, 15 bp, Homo sapiens
caccgtacataggga

SEQ ID NO: 137547 - DNA, 15 bp, Homo sapiens
acaccgtacataggg

SEQ ID NO: 137548 - DNA, 15 bp, Homo sapiens
aacaccgtacatagg

SEQ ID NO: 137549 - DNA, 15 bp, Homo sapiens
gaacaccgtacatag

SEQ ID NO: 137550 - DNA, 15 bp, Homo sapiens
cgaacaccgtacata

SEQ ID NO: 137551 - DNA, 15 bp, Homo sapiens
acgaacaccgtacat

SEQ ID NO: 137552 - DNA, 15 bp, Homo sapiens
gacgaacaccgtaca

SEQ ID NO: 137553 - DNA, 15 bp, Homo sapiens
tgacgaacaccgtac

SEQ ID NO: 137554 - DNA, 15 bp, Homo sapiens
ttgacgaacaccgta

SEQ ID NO: 137555 - DNA, 15 bp, Homo sapiens
attgacgaacaccgt

SEQ ID NO: 137556 - DNA, 15 bp, Homo sapiens
aattgacgaacaccg

SEQ ID NO: 137557 - DNA, 15 bp, Homo sapiens
gaattgacgaacacc

SEQ ID NO: 137558 - DNA, 15 bp, Homo sapiens
ggaattgacgaacac

SEQ ID NO: 137559 - DNA, 15 bp, Homo sapiens
aggaattgacgaaca

SEQ ID NO: 137560 - DNA, 15 bp, Homo sapiens
taggaattgacgaac

SEQ ID NO: 137561 - DNA, 15 bp, Homo sapiens
ataggaattgacgaa

SEQ ID NO: 137562 - DNA, 15 bp, Homo sapiens
cataggaattgacga

SEQ ID NO: 137563 - DNA, 15 bp, Homo sapiens
ccataggaattgacg

SEQ ID NO: 137564 - DNA, 15 bp, Homo sapiens
accataggaattgac

SEQ ID NO: 137565 - DNA, 15 bp, Homo sapiens
taccataggaattga

SEQ ID NO: 137566 - DNA, 15 bp, Homo sapiens
ataccataggaattg

SEQ ID NO: 137567 - DNA, 15 bp, Homo sapiens
tataccataggaatt

SEQ ID NO: 137568 - DNA, 15 bp, Homo sapiens
ttataccataggaat

SEQ ID NO: 137569 - DNA, 15 bp, Homo sapiens
tttataccataggaa

SEQ ID NO: 137570 - DNA, 15 bp, Homo sapiens
atttataccatagga

SEQ ID NO: 137571 - DNA, 15 bp, Homo sapiens
tatttataccatagg

SEQ ID NO: 137572 - DNA, 15 bp, Homo sapiens
atatttataccatag

SEQ ID NO: 137573 - DNA, 15 bp, Homo sapiens
aatatttataccata

SEQ ID NO: 137574 - DNA, 15 bp, Homo sapiens
gaatatttataccat

SEQ ID NO: 137575 - DNA, 15 bp, Homo sapiens
ggaatatttatacca

SEQ ID NO: 137576 - DNA, 15 bp, Homo sapiens
aggaatatttatacc

SEQ ID NO: 137577 - DNA, 15 bp, Homo sapiens
caggaatatttatac

SEQ ID NO: 137578 - DNA, 15 bp, Homo sapiens
gcaggaatatttata

SEQ ID NO: 137579 - DNA, 15 bp, Homo sapiens
ggcaggaatatttat

SEQ ID NO: 137580 - DNA, 15 bp, Homo sapiens
gggcaggaatattta

SEQ ID NO: 137581 - DNA, 15 bp, Homo sapiens
agggcaggaatattt

SEQ ID NO: 137582 - DNA, 15 bp, Homo sapiens
cagggcaggaatatt

SEQ ID NO: 137583 - DNA, 15 bp, Homo sapiens
ccagggcaggaatat

SEQ ID NO: 137584 - DNA, 15 bp, Homo sapiens
gccagggcaggaata

SEQ ID NO: 137585 - DNA, 15 bp, Homo sapiens
agccagggcaggaat

SEQ ID NO: 137586 - DNA, 15 bp, Homo sapiens
cagccagggcaggaa

SEQ ID NO: 137587 - DNA, 15 bp, Homo sapiens
ccagccagggcagga

SEQ ID NO: 137588 - DNA, 15 bp, Homo sapiens
accagccagggcagg

SEQ ID NO: 137589 - DNA, 15 bp, Homo sapiens
aaccagccagggcag

SEQ ID NO: 137590 - DNA, 15 bp, Homo sapiens
aaaccagccagggca

SEQ ID NO: 137591 - DNA, 15 bp, Homo sapiens
caaaccagccagggc

SEQ ID NO: 137592 - DNA, 15 bp, Homo sapiens
tcaaaccagccaggg

SEQ ID NO: 137593 - DNA, 15 bp, Homo sapiens
ttcaaaccagccagg

SEQ ID NO: 137594 - DNA, 15 bp, Homo sapiens
cttcaaaccagccag

SEQ ID NO: 137595 - DNA, 15 bp, Homo sapiens
tcttcaaaccagcca

SEQ ID NO: 137596 - DNA, 15 bp, Homo sapiens
atcttcaaaccagcc

SEQ ID NO: 137597 - DNA, 15 bp, Homo sapiens
tatcttcaaaccagc

SEQ ID NO: 137598 - DNA, 15 bp, Homo sapiens
gtatcttcaaaccag

SEQ ID NO: 137599 - DNA, 15 bp, Homo sapiens
ggtatcttcaaacca

SEQ ID NO: 137600 - DNA, 15 bp, Homo sapiens
tggtatcttcaaacc

SEQ ID NO: 137601 - DNA, 15 bp, Homo sapiens
ctggtatcttcaaac

SEQ ID NO: 137602 - DNA, 15 bp, Homo sapiens
actggtatcttcaaa

SEQ ID NO: 137603 - DNA, 15 bp, Homo sapiens
cactggtatcttcaa

SEQ ID NO: 137604 - DNA, 15 bp, Homo sapiens
acactggtatcttca

SEQ ID NO: 137605 - DNA, 15 bp, Homo sapiens
cacactggtatcttc

SEQ ID NO: 137606 - DNA, 15 bp, Homo sapiens
tcacactggtatctt

SEQ ID NO: 137607 - DNA, 15 bp, Homo sapiens
atcacactggtatct

SEQ ID NO: 137608 - DNA, 15 bp, Homo sapiens
catcacactggtatc

SEQ ID NO: 137609 - DNA, 15 bp, Homo sapiens
acatcacactggtat

SEQ ID NO: 137610 - DNA, 15 bp, Homo sapiens
gacatcacactggta

SEQ ID NO: 137611 - DNA, 15 bp, Homo sapiens
tgacatcacactggt

SEQ ID NO: 137612 - DNA, 15 bp, Homo sapiens
gtgacatcacactgg

SEQ ID NO: 137613 - DNA, 15 bp, Homo sapiens
tgtgacatcacactg

SEQ ID NO: 137614 - DNA, 15 bp, Homo sapiens
ctgtgacatcacact

SEQ ID NO: 137615 - DNA, 15 bp, Homo sapiens
tctgtgacatcacac

SEQ ID NO: 137616 - DNA, 15 bp, Homo sapiens
ttctgtgacatcaca

SEQ ID NO: 137617 - DNA, 15 bp, Homo sapiens
gttctgtgacatcac

SEQ ID NO: 137618 - DNA, 15 bp, Homo sapiens
tgttctgtgacatca

SEQ ID NO: 137619 - DNA, 15 bp, Homo sapiens
atgttctgtgacatc

SEQ ID NO: 137620 - DNA, 15 bp, Homo sapiens
tatgttctgtgacat

SEQ ID NO: 137621 - DNA, 15 bp, Homo sapiens
ctatgttctgtgaca

SEQ ID NO: 137622 - DNA, 15 bp, Homo sapiens
cctatgttctgtgac

SEQ ID NO: 137623 - DNA, 15 bp, Homo sapiens
ccctatgttctgtga

SEQ ID NO: 137624 - DNA, 15 bp, Homo sapiens
accctatgttctgtg

SEQ ID NO: 137625 - DNA, 15 bp, Homo sapiens
taccctatgttctgt

SEQ ID NO: 137626 - DNA, 15 bp, Homo sapiens
ataccctatgttctg

SEQ ID NO: 137627 - DNA, 15 bp, Homo sapiens
aataccctatgttct

SEQ ID NO: 137628 - DNA, 15 bp, Homo sapiens
caataccctatgttc

SEQ ID NO: 137629 - DNA, 15 bp, Homo sapiens
acaataccctatgtt

SEQ ID NO: 137630 - DNA, 15 bp, Homo sapiens
aacaataccctatgt

SEQ ID NO: 137631 - DNA, 15 bp, Homo sapiens
taacaataccctatg

SEQ ID NO: 137632 - DNA, 15 bp, Homo sapiens
ataacaataccctat

SEQ ID NO: 137633 - DNA, 15 bp, Homo sapiens
gataacaatacccta

SEQ ID NO: 137634 - DNA, 15 bp, Homo sapiens
ggataacaataccct

SEQ ID NO: 137635 - DNA, 15 bp, Homo sapiens
tggataacaataccc

SEQ ID NO: 137636 - DNA, 15 bp, Homo sapiens
atggataacaatacc

SEQ ID NO: 137637 - DNA, 15 bp, Homo sapiens
catggataacaatac

SEQ ID NO: 137638 - DNA, 15 bp, Homo sapiens
tcatggataacaata

SEQ ID NO: 137639 - DNA, 15 bp, Homo sapiens
atcatggataacaat

SEQ ID NO: 137640 - DNA, 15 bp, Homo sapiens
aatcatggataacaa

SEQ ID NO: 137641 - DNA, 15 bp, Homo sapiens
caatcatggataaca

SEQ ID NO: 137642 - DNA, 15 bp, Homo sapiens
ccaatcatggataac

SEQ ID NO: 137643 - DNA, 15 bp, Homo sapiens
gccaatcatggataa

SEQ ID NO: 137644 - DNA, 15 bp, Homo sapiens
tgccaatcatggata

SEQ ID NO: 137645 - DNA, 15 bp, Homo sapiens
ctgccaatcatggat

SEQ ID NO: 137646 - DNA, 15 bp, Homo sapiens
actgccaatcatgga

SEQ ID NO: 137647 - DNA, 15 bp, Homo sapiens
aactgccaatcatgg

SEQ ID NO: 137648 - DNA, 15 bp, Homo sapiens
caactgccaatcatg

SEQ ID NO: 137649 - DNA, 15 bp, Homo sapiens
acaactgccaatcat

SEQ ID NO: 137650 - DNA, 15 bp, Homo sapiens
cacaactgccaatca

SEQ ID NO: 137651 - DNA, 15 bp, Homo sapiens
ccacaactgccaatc

SEQ ID NO: 137652 - DNA, 15 bp, Homo sapiens
tccacaactgccaat

SEQ ID NO: 137653 - DNA, 15 bp, Homo sapiens
ttccacaactgccaa

SEQ ID NO: 137654 - DNA, 15 bp, Homo sapiens
tttccacaactgcca

SEQ ID NO: 137655 - DNA, 15 bp, Homo sapiens
gtttccacaactgcc

SEQ ID NO: 137656 - DNA, 15 bp, Homo sapiens
agtttccacaactgc

SEQ ID NO: 137657 - DNA, 15 bp, Homo sapiens
cagtttccacaactg

SEQ ID NO: 137658 - DNA, 15 bp, Homo sapiens
tcagtttccacaact

SEQ ID NO: 137659 - DNA, 15 bp, Homo sapiens
ttcagtttccacaac

SEQ ID NO: 137660 - DNA, 15 bp, Homo sapiens
cttcagtttccacaa

SEQ ID NO: 137661 - DNA, 15 bp, Homo sapiens
gcttcagtttccaca

SEQ ID NO: 137662 - DNA, 15 bp, Homo sapiens
ggcttcagtttccac

SEQ ID NO: 137663 - DNA, 15 bp, Homo sapiens
gggcttcagtttcca

SEQ ID NO: 137664 - DNA, 15 bp, Homo sapiens
tgggcttcagtttcc

SEQ ID NO: 137665 - DNA, 15 bp, Homo sapiens
ctgggcttcagtttc

SEQ ID NO: 137666 - DNA, 15 bp, Homo sapiens
tctgggcttcagttt

SEQ ID NO: 137667 - DNA, 15 bp, Homo sapiens
ctctgggcttcagtt

SEQ ID NO: 137668 - DNA, 15 bp, Homo sapiens
gctctgggcttcagt

SEQ ID NO: 137669 - DNA, 15 bp, Homo sapiens
tgctctgggcttcag

SEQ ID NO: 137670 - DNA, 15 bp, Homo sapiens
ctgctctgggcttca

SEQ ID NO: 137671 - DNA, 15 bp, Homo sapiens
actgctctgggcttc

SEQ ID NO: 137672 - DNA, 15 bp, Homo sapiens
aactgctctgggctt

SEQ ID NO: 137673 - DNA, 15 bp, Homo sapiens
gaactgctctgggct

SEQ ID NO: 137674 - DNA, 15 bp, Homo sapiens
tgaactgctctgggc

SEQ ID NO: 137675 - DNA, 15 bp, Homo sapiens
ctgaactgctctggg

SEQ ID NO: 137676 - DNA, 15 bp, Homo sapiens
actgaactgctctgg

SEQ ID NO: 137677 - DNA, 15 bp, Homo sapiens
gactgaactgctctg

SEQ ID NO: 137678 - DNA, 15 bp, Homo sapiens
tgactgaactgctct

SEQ ID NO: 137679 - DNA, 15 bp, Homo sapiens
gtgactgaactgctc

SEQ ID NO: 137680 - DNA, 15 bp, Homo sapiens
agtgactgaactgct

SEQ ID NO: 137681 - DNA, 15 bp, Homo sapiens
aagtgactgaactgc

SEQ ID NO: 137682 - DNA, 15 bp, Homo sapiens
aaagtgactgaactg

SEQ ID NO: 137683 - DNA, 15 bp, Homo sapiens
aaaagtgactgaact

SEQ ID NO: 137684 - DNA, 15 bp, Homo sapiens
gaaaagtgactgaac

SEQ ID NO: 137685 - DNA, 15 bp, Homo sapiens
agaaaagtgactgaa

SEQ ID NO: 137686 - DNA, 15 bp, Homo sapiens
cagaaaagtgactga

SEQ ID NO: 137687 - DNA, 15 bp, Homo sapiens
ccagaaaagtgactg

SEQ ID NO: 137688 - DNA, 15 bp, Homo sapiens
cccagaaaagtgact

SEQ ID NO: 137689 - DNA, 15 bp, Homo sapiens
acccagaaaagtgac

SEQ ID NO: 137690 - DNA, 15 bp, Homo sapiens
tacccagaaaagtga

SEQ ID NO: 137691 - DNA, 15 bp, Homo sapiens
ctacccagaaaagtg

SEQ ID NO: 137692 - DNA, 15 bp, Homo sapiens
tctacccagaaaagt

SEQ ID NO: 137693 - DNA, 15 bp, Homo sapiens
atctacccagaaaag

SEQ ID NO: 137694 - DNA, 15 bp, Homo sapiens
gatctacccagaaaa

SEQ ID NO: 137695 - DNA, 15 bp, Homo sapiens
ggatctacccagaaa

SEQ ID NO: 137696 - DNA, 15 bp, Homo sapiens
gggatctacccagaa

SEQ ID NO: 137697 - DNA, 15 bp, Homo sapiens
tgggatctacccaga

SEQ ID NO: 137698 - DNA, 15 bp, Homo sapiens
ctgggatctacccag

SEQ ID NO: 137699 - DNA, 15 bp, Homo sapiens
cctgggatctaccca

SEQ ID NO: 137700 - DNA, 15 bp, Homo sapiens
gcctgggatctaccc

SEQ ID NO: 137701 - DNA, 15 bp, Homo sapiens
tgcctgggatctacc

SEQ ID NO: 137702 - DNA, 15 bp, Homo sapiens
ctgcctgggatctac

SEQ ID NO: 137703 - DNA, 15 bp, Homo sapiens
tctgcctgggatcta

SEQ ID NO: 137704 - DNA, 15 bp, Homo sapiens
atctgcctgggatct

SEQ ID NO: 137705 - DNA, 15 bp, Homo sapiens
tatctgcctgggatc

SEQ ID NO: 137706 - DNA, 15 bp, Homo sapiens
atatctgcctgggat

SEQ ID NO: 137707 - DNA, 15 bp, Homo sapiens
catatctgcctggga

SEQ ID NO: 137708 - DNA, 15 bp, Homo sapiens
ccatatctgcctggg

SEQ ID NO: 137709 - DNA, 15 bp, Homo sapiens
gccatatctgcctgg

SEQ ID NO: 137710 - DNA, 15 bp, Homo sapiens
ggccatatctgcctg

SEQ ID NO: 137711 - DNA, 15 bp, Homo sapiens
aggccatatctgcct

SEQ ID NO: 137712 - DNA, 15 bp, Homo sapiens
gaggccatatctgcc

SEQ ID NO: 137713 - DNA, 15 bp, Homo sapiens
agaggccatatctgc

SEQ ID NO: 137714 - DNA, 15 bp, Homo sapiens
cagaggccatatctg

SEQ ID NO: 137715 - DNA, 15 bp, Homo sapiens
tcagaggccatatct

SEQ ID NO: 137716 - DNA, 15 bp, Homo sapiens
atcagaggccatatc

SEQ ID NO: 137717 - DNA, 15 bp, Homo sapiens
tatcagaggccatat

SEQ ID NO: 137718 - DNA, 15 bp, Homo sapiens
atatcagaggccata

SEQ ID NO: 137719 - DNA, 15 bp, Homo sapiens
catatcagaggccat

SEQ ID NO: 137720 - DNA, 15 bp, Homo sapiens
gcatatcagaggcca

SEQ ID NO: 137721 - DNA, 15 bp, Homo sapiens
agcatatcagaggcc

SEQ ID NO: 137722 - DNA, 15 bp, Homo sapiens
aagcatatcagaggc

SEQ ID NO: 137723 - DNA, 15 bp, Homo sapiens
caagcatatcagagg

SEQ ID NO: 137724 - DNA, 15 bp, Homo sapiens
ccaagcatatcagag

SEQ ID NO: 137725 - DNA, 15 bp, Homo sapiens
gccaagcatatcaga

SEQ ID NO: 137726 - DNA, 15 bp, Homo sapiens
ggccaagcatatcag

SEQ ID NO: 137727 - DNA, 15 bp, Homo sapiens
aggccaagcatatca

SEQ ID NO: 137728 - DNA, 15 bp, Homo sapiens
aaggccaagcatatc

SEQ ID NO: 137729 - DNA, 15 bp, Homo sapiens
aaaggccaagcatat

SEQ ID NO: 137730 - DNA, 15 bp, Homo sapiens
caaaggccaagcata

SEQ ID NO: 137731 - DNA, 15 bp, Homo sapiens
tcaaaggccaagcat

SEQ ID NO: 137732 - DNA, 15 bp, Homo sapiens
ctcaaaggccaagca

SEQ ID NO: 137733 - DNA, 15 bp, Homo sapiens
tctcaaaggccaagc

SEQ ID NO: 137734 - DNA, 15 bp, Homo sapiens
gtctcaaaggccaag

SEQ ID NO: 137735 - DNA, 15 bp, Homo sapiens
ggtctcaaaggccaa

SEQ ID NO: 137736 - DNA, 15 bp, Homo sapiens
tggtctcaaaggcca

SEQ ID NO: 137737 - DNA, 15 bp, Homo sapiens
atggtctcaaaggcc

SEQ ID NO: 137738 - DNA, 15 bp, Homo sapiens
catggtctcaaaggc

SEQ ID NO: 137739 - DNA, 15 bp, Homo sapiens
gcatggtctcaaagg

SEQ ID NO: 137740 - DNA, 15 bp, Homo sapiens
agcatggtctcaaag

SEQ ID NO: 137741 - DNA, 15 bp, Homo sapiens
gagcatggtctcaaa

SEQ ID NO: 137742 - DNA, 15 bp, Homo sapiens
agagcatggtctcaa

SEQ ID NO: 137743 - DNA, 15 bp, Homo sapiens
aagagcatggtctca

SEQ ID NO: 137744 - DNA, 15 bp, Homo sapiens
aaagagcatggtctc

SEQ ID NO: 137745 - DNA, 15 bp, Homo sapiens
gaaagagcatggtct

SEQ ID NO: 137746 - DNA, 15 bp, Homo sapiens
ggaaagagcatggtc

SEQ ID NO: 137747 - DNA, 15 bp, Homo sapiens
aggaaagagcatggt

SEQ ID NO: 137748 - DNA, 15 bp, Homo sapiens
caggaaagagcatgg

SEQ ID NO: 137749 - DNA, 15 bp, Homo sapiens
acaggaaagagcatg

SEQ ID NO: 137750 - DNA, 15 bp, Homo sapiens
aacaggaaagagcat

SEQ ID NO: 137751 - DNA, 15 bp, Homo sapiens
gaacaggaaagagca

SEQ ID NO: 137752 - DNA, 15 bp, Homo sapiens
agaacaggaaagagc

SEQ ID NO: 137753 - DNA, 15 bp, Homo sapiens
gagaacaggaaagag

SEQ ID NO: 137754 - DNA, 15 bp, Homo sapiens
ggagaacaggaaaga

SEQ ID NO: 137755 - DNA, 15 bp, Homo sapiens
aggagaacaggaaag

SEQ ID NO: 137756 - DNA, 15 bp, Homo sapiens
caggagaacaggaaa

SEQ ID NO: 137757 - DNA, 15 bp, Homo sapiens
tcaggagaacaggaa

SEQ ID NO: 137758 - DNA, 15 bp, Homo sapiens
ttcaggagaacagga

SEQ ID NO: 137759 - DNA, 15 bp, Homo sapiens
cttcaggagaacagg

SEQ ID NO: 137760 - DNA, 15 bp, Homo sapiens
tcttcaggagaacag

SEQ ID NO: 137761 - DNA, 15 bp, Homo sapiens
ttcttcaggagaaca

SEQ ID NO: 137762 - DNA, 15 bp, Homo sapiens
gttcttcaggagaac

SEQ ID NO: 137763 - DNA, 15 bp, Homo sapiens
ggttcttcaggagaa

SEQ ID NO: 137764 - DNA, 15 bp, Homo sapiens
tggttcttcaggaga

SEQ ID NO: 137765 - DNA, 15 bp, Homo sapiens
ctggttcttcaggag

SEQ ID NO: 137766 - DNA, 15 bp, Homo sapiens
actggttcttcagga

SEQ ID NO: 137767 - DNA, 15 bp, Homo sapiens
tactggttcttcagg

SEQ ID NO: 137768 - DNA, 15 bp, Homo sapiens
ctactggttcttcag

SEQ ID NO: 137769 - DNA, 15 bp, Homo sapiens
gctactggttcttca

SEQ ID NO: 137770 - DNA, 15 bp, Homo sapiens
agctactggttcttc

SEQ ID NO: 137771 - DNA, 15 bp, Homo sapiens
tagctactggttctt

SEQ ID NO: 137772 - DNA, 15 bp, Homo sapiens
atagctactggttct

SEQ ID NO: 137773 - DNA, 15 bp, Homo sapiens
catagctactggttc

SEQ ID NO: 137774 - DNA, 15 bp, Homo sapiens
tcatagctactggtt

SEQ ID NO: 137775 - DNA, 15 bp, Homo sapiens
ctcatagctactggt

SEQ ID NO: 137776 - DNA, 15 bp, Homo sapiens
gctcatagctactgg

SEQ ID NO: 137777 - DNA, 15 bp, Homo sapiens
tgctcatagctactg

SEQ ID NO: 137778 - DNA, 15 bp, Homo sapiens
gtgctcatagctact

SEQ ID NO: 137779 - DNA, 15 bp, Homo sapiens
tgtgctcatagctac

SEQ ID NO: 137780 - DNA, 15 bp, Homo sapiens
ctgtgctcatagcta

SEQ ID NO: 137781 - DNA, 15 bp, Homo sapiens
cctgtgctcatagct

SEQ ID NO: 137782 - DNA, 15 bp, Homo sapiens
acctgtgctcatagc

SEQ ID NO: 137783 - DNA, 15 bp, Homo sapiens
tacctgtgctcatag

SEQ ID NO: 137784 - DNA, 15 bp, Homo sapiens
ttacctgtgctcata

SEQ ID NO: 137785 - DNA, 15 bp, Homo sapiens
attacctgtgctcat

SEQ ID NO: 137786 - DNA, 15 bp, Homo sapiens
tattacctgtgctca

SEQ ID NO: 137787 - DNA, 15 bp, Homo sapiens
atattacctgtgctc

SEQ ID NO: 137788 - DNA, 15 bp, Homo sapiens
aatattacctgtgct

SEQ ID NO: 137789 - DNA, 15 bp, Homo sapiens
caatattacctgtgc

SEQ ID NO: 137790 - DNA, 15 bp, Homo sapiens
gcaatattacctgtg

SEQ ID NO: 137791 - DNA, 15 bp, Homo sapiens
agcaatattacctgt

SEQ ID NO: 137792 - DNA, 15 bp, Homo sapiens
cagcaatattacctg

SEQ ID NO: 137793 - DNA, 15 bp, Homo sapiens
gcagcaatattacct

SEQ ID NO: 137794 - DNA, 15 bp, Homo sapiens
agcagcaatattacc

SEQ ID NO: 137795 - DNA, 15 bp, Homo sapiens
cagcagcaatattac

SEQ ID NO: 137796 - DNA, 15 bp, Homo sapiens
ccagcagcaatatta

SEQ ID NO: 137797 - DNA, 15 bp, Homo sapiens
cccagcagcaatatt

SEQ ID NO: 137798 - DNA, 15 bp, Homo sapiens
gcccagcagcaatat

SEQ ID NO: 137799 - DNA, 15 bp, Homo sapiens
ggcccagcagcaata

SEQ ID NO: 137800 - DNA, 15 bp, Homo sapiens
tggcccagcagcaat

SEQ ID NO: 137801 - DNA, 15 bp, Homo sapiens
atggcccagcagcaa

SEQ ID NO: 137802 - DNA, 15 bp, Homo sapiens
gatggcccagcagca

SEQ ID NO: 137803 - DNA, 15 bp, Homo sapiens
ggatggcccagcagc

SEQ ID NO: 137804 - DNA, 15 bp, Homo sapiens
aggatggcccagcag

SEQ ID NO: 137805 - DNA, 15 bp, Homo sapiens
caggatggcccagca

SEQ ID NO: 137806 - DNA, 15 bp, Homo sapiens
acaggatggcccagc

SEQ ID NO: 137807 - DNA, 15 bp, Homo sapiens
aacaggatggcccag

SEQ ID NO: 137808 - DNA, 15 bp, Homo sapiens
aaacaggatggccca

SEQ ID NO: 137809 - DNA, 15 bp, Homo sapiens
gaaacaggatggccc

SEQ ID NO: 137810 - DNA, 15 bp, Homo sapiens
agaaacaggatggcc

SEQ ID NO: 137811 - DNA, 15 bp, Homo sapiens
aagaaacaggatggc

SEQ ID NO: 137812 - DNA, 15 bp, Homo sapiens
gaagaaacaggatgg

SEQ ID NO: 137813 - DNA, 15 bp, Homo sapiens
agaagaaacaggatg

SEQ ID NO: 137814 - DNA, 15 bp, Homo sapiens
tagaagaaacaggat

SEQ ID NO: 137815 - DNA, 15 bp, Homo sapiens
ctagaagaaacagga

SEQ ID NO: 137816 - DNA, 15 bp, Homo sapiens
tctagaagaaacagg

SEQ ID NO: 137817 - DNA, 15 bp, Homo sapiens
gtctagaagaaacag

SEQ ID NO: 137818 - DNA, 15 bp, Homo sapiens
cgtctagaagaaaca

SEQ ID NO: 137819 - DNA, 15 bp, Homo sapiens
tcgtctagaagaaac

SEQ ID NO: 137820 - DNA, 15 bp, Homo sapiens
ctcgtctagaagaaa

SEQ ID NO: 137821 - DNA, 15 bp, Homo sapiens
actcgtctagaagaa

SEQ ID NO: 137822 - DNA, 15 bp, Homo sapiens
tactcgtctagaaga

SEQ ID NO: 137823 - DNA, 15 bp, Homo sapiens
ctactcgtctagaag

SEQ ID NO: 137824 - DNA, 15 bp, Homo sapiens
actactcgtctagaa

SEQ ID NO: 137825 - DNA, 15 bp, Homo sapiens
gactactcgtctaga

SEQ ID NO: 137826 - DNA, 15 bp, Homo sapiens
agactactcgtctag

SEQ ID NO: 137827 - DNA, 15 bp, Homo sapiens
aagactactcgtcta

SEQ ID NO: 137828 - DNA, 15 bp, Homo sapiens
gaagactactcgtct

SEQ ID NO: 137829 - DNA, 15 bp, Homo sapiens
ggaagactactcgtc

SEQ ID NO: 137830 - DNA, 15 bp, Homo sapiens
gggaagactactcgt

SEQ ID NO: 137831 - DNA, 15 bp, Homo sapiens
agggaagactactcg

SEQ ID NO: 137832 - DNA, 15 bp, Homo sapiens
gagggaagactactc

SEQ ID NO: 137833 - DNA, 15 bp, Homo sapiens
agagggaagactact

SEQ ID NO: 137834 - DNA, 15 bp, Homo sapiens
cagagggaagactac

SEQ ID NO: 137835 - DNA, 15 bp, Homo sapiens
gcagagggaagacta

SEQ ID NO: 137836 - DNA, 15 bp, Homo sapiens
tgcagagggaagact

SEQ ID NO: 137837 - DNA, 15 bp, Homo sapiens
atgcagagggaagac

SEQ ID NO: 137838 - DNA, 15 bp, Homo sapiens
aatgcagagggaaga

SEQ ID NO: 137839 - DNA, 15 bp, Homo sapiens
aaatgcagagggaag

SEQ ID NO: 137840 - DNA, 15 bp, Homo sapiens
gaaatgcagagggaa

SEQ ID NO: 137841 - DNA, 15 bp, Homo sapiens
agaaatgcagaggga

SEQ ID NO: 137842 - DNA, 15 bp, Homo sapiens
aagaaatgcagaggg

SEQ ID NO: 137843 - DNA, 15 bp, Homo sapiens
caagaaatgcagagg

SEQ ID NO: 137844 - DNA, 15 bp, Homo sapiens
tcaagaaatgcagag

SEQ ID NO: 137845 - DNA, 15 bp, Homo sapiens
ctcaagaaatgcaga

SEQ ID NO: 137846 - DNA, 15 bp, Homo sapiens
actcaagaaatgcag

SEQ ID NO: 137847 - DNA, 15 bp, Homo sapiens
aactcaagaaatgca

SEQ ID NO: 137848 - DNA, 15 bp, Homo sapiens
caactcaagaaatgc

SEQ ID NO: 137849 - DNA, 15 bp, Homo sapiens
gcaactcaagaaatg

SEQ ID NO: 137850 - DNA, 15 bp, Homo sapiens
agcaactcaagaaat

SEQ ID NO: 137851 - DNA, 15 bp, Homo sapiens
cagcaactcaagaaa

SEQ ID NO: 137852 - DNA, 15 bp, Homo sapiens
gcagcaactcaagaa

SEQ ID NO: 137853 - DNA, 15 bp, Homo sapiens
tgcagcaactcaaga

SEQ ID NO: 137854 - DNA, 15 bp, Homo sapiens
ctgcagcaactcaag

SEQ ID NO: 137855 - DNA, 15 bp, Homo sapiens
cctgcagcaactcaa

SEQ ID NO: 137856 - DNA, 15 bp, Homo sapiens
gcctgcagcaactca

SEQ ID NO: 137857 - DNA, 15 bp, Homo sapiens
agcctgcagcaactc

SEQ ID NO: 137858 - DNA, 15 bp, Homo sapiens
aagcctgcagcaact

SEQ ID NO: 137859 - DNA, 15 bp, Homo sapiens
aaagcctgcagcaac

SEQ ID NO: 137860 - DNA, 15 bp, Homo sapiens
taaagcctgcagcaa

SEQ ID NO: 137861 - DNA, 15 bp, Homo sapiens
gtaaagcctgcagca

SEQ ID NO: 137862 - DNA, 15 bp, Homo sapiens
ggtaaagcctgcagc

SEQ ID NO: 137863 - DNA, 15 bp, Homo sapiens
aggtaaagcctgcag

SEQ ID NO: 137864 - DNA, 15 bp, Homo sapiens
aaggtaaagcctgca

SEQ ID NO: 137865 - DNA, 15 bp, Homo sapiens
taaggtaaagcctgc

SEQ ID NO: 137866 - DNA, 15 bp, Homo sapiens
ataaggtaaagcctg

SEQ ID NO: 137867 - DNA, 15 bp, Homo sapiens
cataaggtaaagcct

SEQ ID NO: 137868 - DNA, 15 bp, Homo sapiens
gcataaggtaaagcc

SEQ ID NO: 137869 - DNA, 15 bp, Homo sapiens
agcataaggtaaagc

SEQ ID NO: 137870 - DNA, 15 bp, Homo sapiens
aagcataaggtaaag

SEQ ID NO: 137871 - DNA, 15 bp, Homo sapiens
taagcataaggtaaa

SEQ ID NO: 137872 - DNA, 15 bp, Homo sapiens
gtaagcataaggtaa

SEQ ID NO: 137873 - DNA, 15 bp, Homo sapiens
ggtaagcataaggta

SEQ ID NO: 137874 - DNA, 15 bp, Homo sapiens
tggtaagcataaggt

SEQ ID NO: 137875 - DNA, 15 bp, Homo sapiens
atggtaagcataagg

SEQ ID NO: 137876 - DNA, 15 bp, Homo sapiens
tatggtaagcataag

SEQ ID NO: 137877 - DNA, 15 bp, Homo sapiens
gtatggtaagcataa

SEQ ID NO: 137878 - DNA, 15 bp, Homo sapiens
ggtatggtaagcata

SEQ ID NO: 137879 - DNA, 15 bp, Homo sapiens
aggtatggtaagcat

SEQ ID NO: 137880 - DNA, 15 bp, Homo sapiens
caggtatggtaagca

SEQ ID NO: 137881 - DNA, 15 bp, Homo sapiens
ccaggtatggtaagc

SEQ ID NO: 137882 - DNA, 15 bp, Homo sapiens
gccaggtatggtaag

SEQ ID NO: 137883 - DNA, 15 bp, Homo sapiens
ggccaggtatggtaa

SEQ ID NO: 137884 - DNA, 15 bp, Homo sapiens
tggccaggtatggta

SEQ ID NO: 137885 - DNA, 15 bp, Homo sapiens
ctggccaggtatggt

SEQ ID NO: 137886 - DNA, 15 bp, Homo sapiens
actggccaggtatgg

SEQ ID NO: 137887 - DNA, 15 bp, Homo sapiens
aactggccaggtatg

SEQ ID NO: 137888 - DNA, 15 bp, Homo sapiens
caactggccaggtat

SEQ ID NO: 137889 - DNA, 15 bp, Homo sapiens
gcaactggccaggta

SEQ ID NO: 137890 - DNA, 15 bp, Homo sapiens
ggcaactggccaggt

SEQ ID NO: 137891 - DNA, 15 bp, Homo sapiens
tggcaactggccagg

SEQ ID NO: 137892 - DNA, 15 bp, Homo sapiens
ctggcaactggccag

SEQ ID NO: 137893 - DNA, 15 bp, Homo sapiens
actggcaactggcca

SEQ ID NO: 137894 - DNA, 15 bp, Homo sapiens
aactggcaactggcc

SEQ ID NO: 137895 - DNA, 15 bp, Homo sapiens
taactggcaactggc

SEQ ID NO: 137896 - DNA, 15 bp, Homo sapiens
gtaactggcaactgg

SEQ ID NO: 137897 - DNA, 15 bp, Homo sapiens
ggtaactggcaactg

SEQ ID NO: 137898 - DNA, 15 bp, Homo sapiens
tggtaactggcaact

SEQ ID NO: 137899 - DNA, 15 bp, Homo sapiens
gtggtaactggcaac

SEQ ID NO: 137900 - DNA, 15 bp, Homo sapiens
tgtggtaactggcaa

SEQ ID NO: 137901 - DNA, 15 bp, Homo sapiens
gtgtggtaactggca

SEQ ID NO: 137902 - DNA, 15 bp, Homo sapiens
ggtgtggtaactggc

SEQ ID NO: 137903 - DNA, 15 bp, Homo sapiens
tggtgtggtaactgg

SEQ ID NO: 137904 - DNA, 15 bp, Homo sapiens
gtggtgtggtaactg

SEQ ID NO: 137905 - DNA, 15 bp, Homo sapiens
cgtggtgtggtaact

SEQ ID NO: 137906 - DNA, 15 bp, Homo sapiens
gcgtggtgtggtaac

SEQ ID NO: 137907 - DNA, 15 bp, Homo sapiens
agcgtggtgtggtaa

SEQ ID NO: 137908 - DNA, 15 bp, Homo sapiens
cagcgtggtgtggta

SEQ ID NO: 137909 - DNA, 15 bp, Homo sapiens
gcagcgtggtgtggt

SEQ ID NO: 137910 - DNA, 15 bp, Homo sapiens
agcagcgtggtgtgg

SEQ ID NO: 137911 - DNA, 15 bp, Homo sapiens
cagcagcgtggtgtg

SEQ ID NO: 137912 - DNA, 15 bp, Homo sapiens
ccagcagcgtggtgt

SEQ ID NO: 137913 - DNA, 15 bp, Homo sapiens
accagcagcgtggtg

SEQ ID NO: 137914 - DNA, 15 bp, Homo sapiens
aaccagcagcgtggt

SEQ ID NO: 137915 - DNA, 15 bp, Homo sapiens
aaaccagcagcgtgg

SEQ ID NO: 137916 - DNA, 15 bp, Homo sapiens
gaaaccagcagcgtg

SEQ ID NO: 137917 - DNA, 15 bp, Homo sapiens
agaaaccagcagcgt

SEQ ID NO: 137918 - DNA, 15 bp, Homo sapiens
gagaaaccagcagcg

SEQ ID NO: 137919 - DNA, 15 bp, Homo sapiens
agagaaaccagcagc

SEQ ID NO: 137920 - DNA, 15 bp, Homo sapiens
gagagaaaccagcag

SEQ ID NO: 137921 - DNA, 15 bp, Homo sapiens
ggagagaaaccagca

SEQ ID NO: 137922 - DNA, 15 bp, Homo sapiens
aggagagaaaccagc

SEQ ID NO: 137923 - DNA, 15 bp, Homo sapiens
caggagagaaaccag

SEQ ID NO: 137924 - DNA, 15 bp, Homo sapiens
ccaggagagaaacca

SEQ ID NO: 137925 - DNA, 15 bp, Homo sapiens
tccaggagagaaacc

SEQ ID NO: 137926 - DNA, 15 bp, Homo sapiens
gtccaggagagaaac

SEQ ID NO: 137927 - DNA, 15 bp, Homo sapiens
ggtccaggagagaaa

SEQ ID NO: 137928 - DNA, 15 bp, Homo sapiens
tggtccaggagagaa

SEQ ID NO: 137929 - DNA, 15 bp, Homo sapiens
atggtccaggagaga

SEQ ID NO: 137930 - DNA, 15 bp, Homo sapiens
tatggtccaggagag

SEQ ID NO: 137931 - DNA, 15 bp, Homo sapiens
atatggtccaggaga

SEQ ID NO: 137932 - DNA, 15 bp, Homo sapiens
aatatggtccaggag

SEQ ID NO: 137933 - DNA, 15 bp, Homo sapiens
aaatatggtccagga

SEQ ID NO: 137934 - DNA, 15 bp, Homo sapiens
taaatatggtccagg

SEQ ID NO: 137935 - DNA, 15 bp, Homo sapiens
ataaatatggtccag

SEQ ID NO: 137936 - DNA, 15 bp, Homo sapiens
cataaatatggtcca

SEQ ID NO: 137937 - DNA, 15 bp, Homo sapiens
ccataaatatggtcc

SEQ ID NO: 137938 - DNA, 15 bp, Homo sapiens
accataaatatggtc

SEQ ID NO: 137939 - DNA, 15 bp, Homo sapiens
taccataaatatggt

SEQ ID NO: 137940 - DNA, 15 bp, Homo sapiens
ataccataaatatgg

SEQ ID NO: 137941 - DNA, 15 bp, Homo sapiens
gataccataaatatg

SEQ ID NO: 137942 - DNA, 15 bp, Homo sapiens
agataccataaatat

SEQ ID NO: 137943 - DNA, 15 bp, Homo sapiens
tagataccataaata

SEQ ID NO: 137944 - DNA, 15 bp, Homo sapiens
ctagataccataaat

SEQ ID NO: 137945 - DNA, 15 bp, Homo sapiens
tctagataccataaa

SEQ ID NO: 137946 - DNA, 15 bp, Homo sapiens
gtctagataccataa

SEQ ID NO: 137947 - DNA, 15 bp, Homo sapiens
agtctagataccata

SEQ ID NO: 137948 - DNA, 15 bp, Homo sapiens
gagtctagataccat

SEQ ID NO: 137949 - DNA, 15 bp, Homo sapiens
agagtctagatacca

SEQ ID NO: 137950 - DNA, 15 bp, Homo sapiens
cagagtctagatacc

SEQ ID NO: 137951 - DNA, 15 bp, Homo sapiens
ccagagtctagatac

SEQ ID NO: 137952 - DNA, 15 bp, Homo sapiens
accagagtctagata

SEQ ID NO: 137953 - DNA, 15 bp, Homo sapiens
caccagagtctagat

SEQ ID NO: 137954 - DNA, 15 bp, Homo sapiens
acaccagagtctaga

SEQ ID NO: 137955 - DNA, 15 bp, Homo sapiens
cacaccagagtctag

SEQ ID NO: 137956 - DNA, 15 bp, Homo sapiens
acacaccagagtcta

SEQ ID NO: 137957 - DNA, 15 bp, Homo sapiens
cacacaccagagtct

SEQ ID NO: 137958 - DNA, 15 bp, Homo sapiens
gcacacaccagagtc

SEQ ID NO: 137959 - DNA, 15 bp, Homo sapiens
tgcacacaccagagt

SEQ ID NO: 137960 - DNA, 15 bp, Homo sapiens
ctgcacacaccagag

SEQ ID NO: 137961 - DNA, 15 bp, Homo sapiens
actgcacacaccaga

SEQ ID NO: 137962 - DNA, 15 bp, Homo sapiens
cactgcacacaccag

SEQ ID NO: 137963 - DNA, 15 bp, Homo sapiens
ccactgcacacacca

SEQ ID NO: 137964 - DNA, 15 bp, Homo sapiens
gccactgcacacacc

SEQ ID NO: 137965 - DNA, 15 bp, Homo sapiens
cgccactgcacacac

SEQ ID NO: 137966 - DNA, 15 bp, Homo sapiens
tcgccactgcacaca

SEQ ID NO: 137967 - DNA, 15 bp, Homo sapiens
atcgccactgcacac

SEQ ID NO: 137968 - DNA, 15 bp, Homo sapiens
catcgccactgcaca

SEQ ID NO: 137969 - DNA, 15 bp, Homo sapiens
ccatcgccactgcac

SEQ ID NO: 137970 - DNA, 15 bp, Homo sapiens
tccatcgccactgca

SEQ ID NO: 137971 - DNA, 15 bp, Homo sapiens
ttccatcgccactgc

SEQ ID NO: 137972 - DNA, 15 bp, Homo sapiens
attccatcgccactg

SEQ ID NO: 137973 - DNA, 15 bp, Homo sapiens
gattccatcgccact

SEQ ID NO: 137974 - DNA, 15 bp, Homo sapiens
tgattccatcgccac

SEQ ID NO: 137975 - DNA, 15 bp, Homo sapiens
atgattccatcgcca

SEQ ID NO: 137976 - DNA, 15 bp, Homo sapiens
aatgattccatcgcc

SEQ ID NO: 137977 - DNA, 15 bp, Homo sapiens
caatgattccatcgc

SEQ ID NO: 137978 - DNA, 15 bp, Homo sapiens
tcaatgattccatcg

SEQ ID NO: 137979 - DNA, 15 bp, Homo sapiens
ctcaatgattccatc

SEQ ID NO: 137980 - DNA, 15 bp, Homo sapiens
cctcaatgattccat

SEQ ID NO: 137981 - DNA, 15 bp, Homo sapiens
gcctcaatgattcca

SEQ ID NO: 137982 - DNA, 15 bp, Homo sapiens
tgcctcaatgattcc

SEQ ID NO: 137983 - DNA, 15 bp, Homo sapiens
ttgcctcaatgattc

SEQ ID NO: 137984 - DNA, 15 bp, Homo sapiens
gttgcctcaatgatt

SEQ ID NO: 137985 - DNA, 15 bp, Homo sapiens
tgttgcctcaatgat

SEQ ID NO: 137986 - DNA, 15 bp, Homo sapiens
ctgttgcctcaatga

SEQ ID NO: 137987 - DNA, 15 bp, Homo sapiens
cctgttgcctcaatg

SEQ ID NO: 137988 - DNA, 15 bp, Homo sapiens
ccctgttgcctcaat

SEQ ID NO: 137989 - DNA, 15 bp, Homo sapiens
tccctgttgcctcaa

SEQ ID NO: 137990 - DNA, 15 bp, Homo sapiens
gtccctgttgcctca

SEQ ID NO: 137991 - DNA, 15 bp, Homo sapiens
ggtccctgttgcctc

SEQ ID NO: 137992 - DNA, 15 bp, Homo sapiens
aggtccctgttgcct

SEQ ID NO: 137993 - DNA, 15 bp, Homo sapiens
caggtccctgttgcc

SEQ ID NO: 137994 - DNA, 15 bp, Homo sapiens
acaggtccctgttgc

SEQ ID NO: 137995 - DNA, 15 bp, Homo sapiens
cacaggtccctgttg

SEQ ID NO: 137996 - DNA, 15 bp, Homo sapiens
tcacaggtccctgtt

SEQ ID NO: 137997 - DNA, 15 bp, Homo sapiens
ctcacaggtccctgt

SEQ ID NO: 137998 - DNA, 15 bp, Homo sapiens
actcacaggtccctg

SEQ ID NO: 137999 - DNA, 15 bp, Homo sapiens
gactcacaggtccct

SEQ ID NO: 138000 - DNA, 15 bp, Homo sapiens
ggactcacaggtccc

SEQ ID NO: 138001 - DNA, 15 bp, Homo sapiens
tggactcacaggtcc

SEQ ID NO: 138002 - DNA, 15 bp, Homo sapiens
atggactcacaggtc

SEQ ID NO: 138003 - DNA, 15 bp, Homo sapiens
gatggactcacaggt

SEQ ID NO: 138004 - DNA, 15 bp, Homo sapiens
agatggactcacagg

SEQ ID NO: 138005 - DNA, 15 bp, Homo sapiens
aagatggactcacag

SEQ ID NO: 138006 - DNA, 15 bp, Homo sapiens
caagatggactcaca

SEQ ID NO: 138007 - DNA, 15 bp, Homo sapiens
tcaagatggactcac

SEQ ID NO: 138008 - DNA, 15 bp, Homo sapiens
ctcaagatggactca

SEQ ID NO: 138009 - DNA, 15 bp, Homo sapiens
cctcaagatggactc

SEQ ID NO: 138010 - DNA, 15 bp, Homo sapiens
acctcaagatggact

SEQ ID NO: 138011 - DNA, 15 bp, Homo sapiens
aacctcaagatggac

SEQ ID NO: 138012 - DNA, 15 bp, Homo sapiens
aaacctcaagatgga

SEQ ID NO: 138013 - DNA, 15 bp, Homo sapiens
caaacctcaagatgg

SEQ ID NO: 138014 - DNA, 15 bp, Homo sapiens
tcaaacctcaagatg

SEQ ID NO: 138015 - DNA, 15 bp, Homo sapiens
atcaaacctcaagat

SEQ ID NO: 138016 - DNA, 15 bp, Homo sapiens
tatcaaacctcaaga

SEQ ID NO: 138017 - DNA, 15 bp, Homo sapiens
ttatcaaacctcaag

SEQ ID NO: 138018 - DNA, 15 bp, Homo sapiens
tttatcaaacctcaa

SEQ ID NO: 138019 - DNA, 15 bp, Homo sapiens
gtttatcaaacctca

SEQ ID NO: 138020 - DNA, 15 bp, Homo sapiens
agtttatcaaacctc

SEQ ID NO: 138021 - DNA, 15 bp, Homo sapiens
cagtttatcaaacct

SEQ ID NO: 138022 - DNA, 15 bp, Homo sapiens
acagtttatcaaacc

SEQ ID NO: 138023 - DNA, 15 bp, Homo sapiens
cacagtttatcaaac

SEQ ID NO: 138024 - DNA, 15 bp, Homo sapiens
acacagtttatcaaa

SEQ ID NO: 138025 - DNA, 15 bp, Homo sapiens
tacacagtttatcaa

SEQ ID NO: 138026 - DNA, 15 bp, Homo sapiens
atacacagtttatca

SEQ ID NO: 138027 - DNA, 15 bp, Homo sapiens
aatacacagtttatc

SEQ ID NO: 138028 - DNA, 15 bp, Homo sapiens
taatacacagtttat

SEQ ID NO: 138029 - DNA, 15 bp, Homo sapiens
ctaatacacagttta

SEQ ID NO: 138030 - DNA, 15 bp, Homo sapiens
actaatacacagttt

SEQ ID NO: 138031 - DNA, 15 bp, Homo sapiens
gactaatacacagtt

SEQ ID NO: 138032 - DNA, 15 bp, Homo sapiens
tgactaatacacagt

SEQ ID NO: 138033 - DNA, 15 bp, Homo sapiens
ctgactaatacacag

SEQ ID NO: 138034 - DNA, 15 bp, Homo sapiens
gctgactaatacaca

SEQ ID NO: 138035 - DNA, 15 bp, Homo sapiens
agctgactaatacac

SEQ ID NO: 138036 - DNA, 15 bp, Homo sapiens
tagctgactaataca

SEQ ID NO: 138037 - DNA, 15 bp, Homo sapiens
ctagctgactaatac

SEQ ID NO: 138038 - DNA, 15 bp, Homo sapiens
cctagctgactaata

SEQ ID NO: 138039 - DNA, 15 bp, Homo sapiens
gcctagctgactaat

SEQ ID NO: 138040 - DNA, 15 bp, Homo sapiens
ggcctagctgactaa

SEQ ID NO: 138041 - DNA, 15 bp, Homo sapiens
tggcctagctgacta

SEQ ID NO: 138042 - DNA, 15 bp, Homo sapiens
gtggcctagctgact

SEQ ID NO: 138043 - DNA, 15 bp, Homo sapiens
ggtggcctagctgac

SEQ ID NO: 138044 - DNA, 15 bp, Homo sapiens
aggtggcctagctga

SEQ ID NO: 138045 - DNA, 15 bp, Homo sapiens
gaggtggcctagctg

SEQ ID NO: 138046 - DNA, 15 bp, Homo sapiens
agaggtggcctagct

SEQ ID NO: 138047 - DNA, 15 bp, Homo sapiens
cagaggtggcctagc

SEQ ID NO: 138048 - DNA, 15 bp, Homo sapiens
acagaggtggcctag

SEQ ID NO: 138049 - DNA, 15 bp, Homo sapiens
tacagaggtggccta

SEQ ID NO: 138050 - DNA, 15 bp, Homo sapiens
ttacagaggtggcct

SEQ ID NO: 138051 - DNA, 15 bp, Homo sapiens
gttacagaggtggcc

SEQ ID NO: 138052 - DNA, 15 bp, Homo sapiens
tgttacagaggtggc

SEQ ID NO: 138053 - DNA, 15 bp, Homo sapiens
ttgttacagaggtgg

SEQ ID NO: 138054 - DNA, 15 bp, Homo sapiens
cttgttacagaggtg

SEQ ID NO: 138055 - DNA, 15 bp, Homo sapiens
tcttgttacagaggt

SEQ ID NO: 138056 - DNA, 15 bp, Homo sapiens
ctcttgttacagagg

SEQ ID NO: 138057 - DNA, 15 bp, Homo sapiens
cctcttgttacagag

SEQ ID NO: 138058 - DNA, 15 bp, Homo sapiens
acctcttgttacaga

SEQ ID NO: 138059 - DNA, 15 bp, Homo sapiens
gacctcttgttacag

SEQ ID NO: 138060 - DNA, 15 bp, Homo sapiens
tgacctcttgttaca

SEQ ID NO: 138061 - DNA, 15 bp, Homo sapiens
ttgacctcttgttac

SEQ ID NO: 138062 - DNA, 15 bp, Homo sapiens
gttgacctcttgtta

SEQ ID NO: 138063 - DNA, 15 bp, Homo sapiens
tgttgacctcttgtt

SEQ ID NO: 138064 - DNA, 15 bp, Homo sapiens
atgttgacctcttgt

SEQ ID NO: 138065 - DNA, 15 bp, Homo sapiens
catgttgacctcttg

SEQ ID NO: 138066 - DNA, 15 bp, Homo sapiens
acatgttgacctctt

SEQ ID NO: 138067 - DNA, 15 bp, Homo sapiens
gacatgttgacctct

SEQ ID NO: 138068 - DNA, 15 bp, Homo sapiens
tgacatgttgacctc

SEQ ID NO: 138069 - DNA, 15 bp, Homo sapiens
ttgacatgttgacct

SEQ ID NO: 138070 - DNA, 15 bp, Homo sapiens
attgacatgttgacc

SEQ ID NO: 138071 - DNA, 15 bp, Homo sapiens
cattgacatgttgac

SEQ ID NO: 138072 - DNA, 15 bp, Homo sapiens
tcattgacatgttga

SEQ ID NO: 138073 - DNA, 15 bp, Homo sapiens
gtcattgacatgttg

SEQ ID NO: 138074 - DNA, 15 bp, Homo sapiens
agtcattgacatgtt

SEQ ID NO: 138075 - DNA, 15 bp, Homo sapiens
aagtcattgacatgt

SEQ ID NO: 138076 - DNA, 15 bp, Homo sapiens
taagtcattgacatg

SEQ ID NO: 138077 - DNA, 15 bp, Homo sapiens
ttaagtcattgacat

SEQ ID NO: 138078 - DNA, 15 bp, Homo sapiens
attaagtcattgaca

SEQ ID NO: 138079 - DNA, 15 bp, Homo sapiens
tattaagtcattgac

SEQ ID NO: 138080 - DNA, 15 bp, Homo sapiens
gtattaagtcattga

SEQ ID NO: 138081 - DNA, 15 bp, Homo sapiens
tgtattaagtcattg

SEQ ID NO: 138082 - DNA, 15 bp, Homo sapiens
ctgtattaagtcatt

SEQ ID NO: 138083 - DNA, 15 bp, Homo sapiens
gctgtattaagtcat

SEQ ID NO: 138084 - DNA, 15 bp, Homo sapiens
tgctgtattaagtca

SEQ ID NO: 138085 - DNA, 15 bp, Homo sapiens
ctgctgtattaagtc

SEQ ID NO: 138086 - DNA, 15 bp, Homo sapiens
tctgctgtattaagt

SEQ ID NO: 138087 - DNA, 15 bp, Homo sapiens
ttctgctgtattaag

SEQ ID NO: 138088 - DNA, 15 bp, Homo sapiens
cttctgctgtattaa

SEQ ID NO: 138089 - DNA, 15 bp, Homo sapiens
acttctgctgtatta

SEQ ID NO: 138090 - DNA, 15 bp, Homo sapiens
aacttctgctgtatt

SEQ ID NO: 138091 - DNA, 15 bp, Homo sapiens
aaacttctgctgtat

SEQ ID NO: 138092 - DNA, 15 bp, Homo sapiens
taaacttctgctgta

SEQ ID NO: 138093 - DNA, 15 bp, Homo sapiens
gtaaacttctgctgt

SEQ ID NO: 138094 - DNA, 15 bp, Homo sapiens
cgtaaacttctgctg

SEQ ID NO: 138095 - DNA, 15 bp, Homo sapiens
acgtaaacttctgct

SEQ ID NO: 138096 - DNA, 15 bp, Homo sapiens
tacgtaaacttctgc

SEQ ID NO: 138097 - DNA, 15 bp, Homo sapiens
atacgtaaacttctg

SEQ ID NO: 138098 - DNA, 15 bp, Homo sapiens
aatacgtaaacttct

SEQ ID NO: 138099 - DNA, 15 bp, Homo sapiens
caatacgtaaacttc

SEQ ID NO: 138100 - DNA, 15 bp, Homo sapiens
gcaatacgtaaactt

SEQ ID NO: 138101 - DNA, 15 bp, Homo sapiens
agcaatacgtaaact

SEQ ID NO: 138102 - DNA, 15 bp, Homo sapiens
gagcaatacgtaaac

SEQ ID NO: 138103 - DNA, 15 bp, Homo sapiens
tgagcaatacgtaaa

SEQ ID NO: 138104 - DNA, 15 bp, Homo sapiens
atgagcaatacgtaa

SEQ ID NO: 138105 - DNA, 15 bp, Homo sapiens
tatgagcaatacgta

SEQ ID NO: 138106 - DNA, 15 bp, Homo sapiens
gtatgagcaatacgt

SEQ ID NO: 138107 - DNA, 15 bp, Homo sapiens
tgtatgagcaatacg

SEQ ID NO: 138108 - DNA, 15 bp, Homo sapiens
ttgtatgagcaatac

SEQ ID NO: 138109 - DNA, 15 bp, Homo sapiens
tttgtatgagcaata

SEQ ID NO: 138110 - DNA, 15 bp, Homo sapiens
ctttgtatgagcaat

SEQ ID NO: 138111 - DNA, 15 bp, Homo sapiens
actttgtatgagcaa

SEQ ID NO: 138112 - DNA, 15 bp, Homo sapiens
tactttgtatgagca

SEQ ID NO: 138113 - DNA, 15 bp, Homo sapiens
gtactttgtatgagc

SEQ ID NO: 138114 - DNA, 15 bp, Homo sapiens
ggtactttgtatgag

SEQ ID NO: 138115 - DNA, 15 bp, Homo sapiens
tggtactttgtatga

SEQ ID NO: 138116 - DNA, 15 bp, Homo sapiens
atggtactttgtatg

SEQ ID NO: 138117 - DNA, 15 bp, Homo sapiens
aatggtactttgtat

SEQ ID NO: 138118 - DNA, 15 bp, Homo sapiens
caatggtactttgta

SEQ ID NO: 138119 - DNA, 15 bp, Homo sapiens
tcaatggtactttgt

SEQ ID NO: 138120 - DNA, 15 bp, Homo sapiens
atcaatggtactttg

SEQ ID NO: 138121 - DNA, 15 bp, Homo sapiens
catcaatggtacttt

SEQ ID NO: 138122 - DNA, 15 bp, Homo sapiens
ccatcaatggtactt

SEQ ID NO: 138123 - DNA, 15 bp, Homo sapiens
accatcaatggtact

SEQ ID NO: 138124 - DNA, 15 bp, Homo sapiens
caccatcaatggtac

SEQ ID NO: 138125 - DNA, 15 bp, Homo sapiens
acaccatcaatggta

SEQ ID NO: 138126 - DNA, 15 bp, Homo sapiens
cacaccatcaatggt

SEQ ID NO: 138127 - DNA, 15 bp, Homo sapiens
acacaccatcaatgg

SEQ ID NO: 138128 - DNA, 15 bp, Homo sapiens
cacacaccatcaatg

SEQ ID NO: 138129 - DNA, 15 bp, Homo sapiens
acacacaccatcaat

SEQ ID NO: 138130 - DNA, 15 bp, Homo sapiens
cacacacaccatcaa

SEQ ID NO: 138131 - DNA, 15 bp, Homo sapiens
ccacacacaccatca

SEQ ID NO: 138132 - DNA, 15 bp, Homo sapiens
tccacacacaccatc

SEQ ID NO: 138133 - DNA, 15 bp, Homo sapiens
ctccacacacaccat

SEQ ID NO: 138134 - DNA, 15 bp, Homo sapiens
cctccacacacacca

SEQ ID NO: 138135 - DNA, 15 bp, Homo sapiens
ccctccacacacacc

SEQ ID NO: 138136 - DNA, 15 bp, Homo sapiens
accctccacacacac

SEQ ID NO: 138137 - DNA, 15 bp, Homo sapiens
caccctccacacaca

SEQ ID NO: 138138 - DNA, 15 bp, Homo sapiens
gcaccctccacacac

SEQ ID NO: 138139 - DNA, 15 bp, Homo sapiens
tgcaccctccacaca

SEQ ID NO: 138140 - DNA, 15 bp, Homo sapiens
ctgcaccctccacac

SEQ ID NO: 138141 - DNA, 15 bp, Homo sapiens
actgcaccctccaca

SEQ ID NO: 138142 - DNA, 15 bp, Homo sapiens
cactgcaccctccac

SEQ ID NO: 138143 - DNA, 15 bp, Homo sapiens
tcactgcaccctcca

SEQ ID NO: 138144 - DNA, 15 bp, Homo sapiens
ttcactgcaccctcc

SEQ ID NO: 138145 - DNA, 15 bp, Homo sapiens
cttcactgcaccctc

SEQ ID NO: 138146 - DNA, 15 bp, Homo sapiens
tcttcactgcaccct

SEQ ID NO: 138147 - DNA, 15 bp, Homo sapiens
gtcttcactgcaccc

SEQ ID NO: 138148 - DNA, 15 bp, Homo sapiens
tgtcttcactgcacc

SEQ ID NO: 138149 - DNA, 15 bp, Homo sapiens
gtgtcttcactgcac

SEQ ID NO: 138150 - DNA, 15 bp, Homo sapiens
tgtgtcttcactgca

SEQ ID NO: 138151 - DNA, 15 bp, Homo sapiens
gtgtgtcttcactgc

SEQ ID NO: 138152 - DNA, 15 bp, Homo sapiens
agtgtgtcttcactg

SEQ ID NO: 138153 - DNA, 15 bp, Homo sapiens
aagtgtgtcttcact

SEQ ID NO: 138154 - DNA, 15 bp, Homo sapiens
gaagtgtgtcttcac

SEQ ID NO: 138155 - DNA, 15 bp, Homo sapiens
tgaagtgtgtcttca

SEQ ID NO: 138156 - DNA, 15 bp, Homo sapiens
ctgaagtgtgtcttc

SEQ ID NO: 138157 - DNA, 15 bp, Homo sapiens
tctgaagtgtgtctt

SEQ ID NO: 138158 - DNA, 15 bp, Homo sapiens
gtctgaagtgtgtct

SEQ ID NO: 138159 - DNA, 15 bp, Homo sapiens
tgtctgaagtgtgtc

SEQ ID NO: 138160 - DNA, 15 bp, Homo sapiens
ctgtctgaagtgtgt

SEQ ID NO: 138161 - DNA, 15 bp, Homo sapiens
actgtctgaagtgtg

SEQ ID NO: 138162 - DNA, 15 bp, Homo sapiens
gactgtctgaagtgt

SEQ ID NO: 138163 - DNA, 15 bp, Homo sapiens
tgactgtctgaagtg

SEQ ID NO: 138164 - DNA, 15 bp, Homo sapiens
atgactgtctgaagt

SEQ ID NO: 138165 - DNA, 15 bp, Homo sapiens
aatgactgtctgaag

SEQ ID NO: 138166 - DNA, 15 bp, Homo sapiens
taatgactgtctgaa

SEQ ID NO: 138167 - DNA, 15 bp, Homo sapiens
ttaatgactgtctga

SEQ ID NO: 138168 - DNA, 15 bp, Homo sapiens
tttaatgactgtctg

SEQ ID NO: 138169 - DNA, 15 bp, Homo sapiens
ctttaatgactgtct

SEQ ID NO: 138170 - DNA, 15 bp, Homo sapiens
tctttaatgactgtc

SEQ ID NO: 138171 - DNA, 15 bp, Homo sapiens
gtctttaatgactgt

SEQ ID NO: 138172 - DNA, 15 bp, Homo sapiens
ggtctttaatgactg

SEQ ID NO: 138173 - DNA, 15 bp, Homo sapiens
gggtctttaatgact

SEQ ID NO: 138174 - DNA, 15 bp, Homo sapiens
ggggtctttaatgac

SEQ ID NO: 138175 - DNA, 15 bp, Homo sapiens
cggggtctttaatga

SEQ ID NO: 138176 - DNA, 15 bp, Homo sapiens
ccggggtctttaatg

SEQ ID NO: 138177 - DNA, 15 bp, Homo sapiens
gccggggtctttaat

SEQ ID NO: 138178 - DNA, 15 bp, Homo sapiens
agccggggtctttaa

SEQ ID NO: 138179 - DNA, 15 bp, Homo sapiens
gagccggggtcttta

SEQ ID NO: 138180 - DNA, 15 bp, Homo sapiens
ggagccggggtcttt

SEQ ID NO: 138181 - DNA, 15 bp, Homo sapiens
aggagccggggtctt

SEQ ID NO: 138182 - DNA, 15 bp, Homo sapiens
aaggagccggggtct

SEQ ID NO: 138183 - DNA, 15 bp, Homo sapiens
aaaggagccggggtc

SEQ ID NO: 138184 - DNA, 15 bp, Homo sapiens
gaaaggagccggggt

SEQ ID NO: 138185 - DNA, 15 bp, Homo sapiens
tgaaaggagccgggg

SEQ ID NO: 138186 - DNA, 15 bp, Homo sapiens
gtgaaaggagccggg

SEQ ID NO: 138187 - DNA, 15 bp, Homo sapiens
agtgaaaggagccgg

SEQ ID NO: 138188 - DNA, 15 bp, Homo sapiens
aagtgaaaggagccg

SEQ ID NO: 138189 - DNA, 15 bp, Homo sapiens
caagtgaaaggagcc

SEQ ID NO: 138190 - DNA, 15 bp, Homo sapiens
acaagtgaaaggagc

SEQ ID NO: 138191 - DNA, 15 bp, Homo sapiens
cacaagtgaaaggag

SEQ ID NO: 138192 - DNA, 15 bp, Homo sapiens
ccacaagtgaaagga

SEQ ID NO: 138193 - DNA, 15 bp, Homo sapiens
tccacaagtgaaagg

SEQ ID NO: 138194 - DNA, 15 bp, Homo sapiens
gtccacaagtgaaag

SEQ ID NO: 138195 - DNA, 15 bp, Homo sapiens
ggtccacaagtgaaa

SEQ ID NO: 138196 - DNA, 15 bp, Homo sapiens
aggtccacaagtgaa

SEQ ID NO: 138197 - DNA, 15 bp, Homo sapiens
caggtccacaagtga

SEQ ID NO: 138198 - DNA, 15 bp, Homo sapiens
tcaggtccacaagtg

SEQ ID NO: 138199 - DNA, 15 bp, Homo sapiens
ttcaggtccacaagt

SEQ ID NO: 138200 - DNA, 15 bp, Homo sapiens
tttcaggtccacaag

SEQ ID NO: 138201 - DNA, 15 bp, Homo sapiens
atttcaggtccacaa

SEQ ID NO: 138202 - DNA, 15 bp, Homo sapiens
gatttcaggtccaca

SEQ ID NO: 138203 - DNA, 15 bp, Homo sapiens
agatttcaggtccac

SEQ ID NO: 138204 - DNA, 15 bp, Homo sapiens
aagatttcaggtcca

SEQ ID NO: 138205 - DNA, 15 bp, Homo sapiens
gaagatttcaggtcc

SEQ ID NO: 138206 - DNA, 15 bp, Homo sapiens
agaagatttcaggtc

SEQ ID NO: 138207 - DNA, 15 bp, Homo sapiens
tagaagatttcaggt

SEQ ID NO: 138208 - DNA, 15 bp, Homo sapiens
ctagaagatttcagg

SEQ ID NO: 138209 - DNA, 15 bp, Homo sapiens
cctagaagatttcag

SEQ ID NO: 138210 - DNA, 15 bp, Homo sapiens
ccctagaagatttca

SEQ ID NO: 138211 - DNA, 15 bp, Homo sapiens
cccctagaagatttc

SEQ ID NO: 138212 - DNA, 15 bp, Homo sapiens
gcccctagaagattt

SEQ ID NO: 138213 - DNA, 15 bp, Homo sapiens
ggcccctagaagatt

SEQ ID NO: 138214 - DNA, 15 bp, Homo sapiens
gggcccctagaagat

SEQ ID NO: 138215 - DNA, 15 bp, Homo sapiens
ggggcccctagaaga

SEQ ID NO: 138216 - DNA, 15 bp, Homo sapiens
aggggcccctagaag

SEQ ID NO: 138217 - DNA, 15 bp, Homo sapiens
caggggcccctagaa

SEQ ID NO: 138218 - DNA, 15 bp, Homo sapiens
tcaggggcccctaga

SEQ ID NO: 138219 - DNA, 15 bp, Homo sapiens
ttcaggggcccctag

SEQ ID NO: 138220 - DNA, 15 bp, Homo sapiens
cttcaggggccccta

SEQ ID NO: 138221 - DNA, 15 bp, Homo sapiens
ccttcaggggcccct

SEQ ID NO: 138222 - DNA, 15 bp, Homo sapiens
accttcaggggcccc

SEQ ID NO: 138223 - DNA, 15 bp, Homo sapiens
gaccttcaggggccc

SEQ ID NO: 138224 - DNA, 15 bp, Homo sapiens
agaccttcaggggcc

SEQ ID NO: 138225 - DNA, 15 bp, Homo sapiens
gagaccttcaggggc

SEQ ID NO: 138226 - DNA, 15 bp, Homo sapiens
agagaccttcagggg

SEQ ID NO: 138227 - DNA, 15 bp, Homo sapiens
cagagaccttcaggg

SEQ ID NO: 138228 - DNA, 15 bp, Homo sapiens
gcagagaccttcagg

SEQ ID NO: 138229 - DNA, 15 bp, Homo sapiens
agcagagaccttcag

SEQ ID NO: 138230 - DNA, 15 bp, Homo sapiens
cagcagagaccttca

SEQ ID NO: 138231 - DNA, 15 bp, Homo sapiens
ccagcagagaccttc

SEQ ID NO: 138232 - DNA, 15 bp, Homo sapiens
tccagcagagacctt

SEQ ID NO: 138233 - DNA, 15 bp, Homo sapiens
gtccagcagagacct

SEQ ID NO: 138234 - DNA, 15 bp, Homo sapiens
ggtccagcagagacc

SEQ ID NO: 138235 - DNA, 15 bp, Homo sapiens
gggtccagcagagac

SEQ ID NO: 138236 - DNA, 15 bp, Homo sapiens
agggtccagcagaga

SEQ ID NO: 138237 - DNA, 15 bp, Homo sapiens
gagggtccagcagag

SEQ ID NO: 138238 - DNA, 15 bp, Homo sapiens
agagggtccagcaga

SEQ ID NO: 138239 - DNA, 15 bp, Homo sapiens
cagagggtccagcag

SEQ ID NO: 138240 - DNA, 15 bp, Homo sapiens
gcagagggtccagca

SEQ ID NO: 138241 - DNA, 15 bp, Homo sapiens
tgcagagggtccagc

SEQ ID NO: 138242 - DNA, 15 bp, Homo sapiens
atgcagagggtccag

SEQ ID NO: 138243 - DNA, 15 bp, Homo sapiens
gatgcagagggtcca

SEQ ID NO: 138244 - DNA, 15 bp, Homo sapiens
agatgcagagggtcc

SEQ ID NO: 138245 - DNA, 15 bp, Homo sapiens
cagatgcagagggtc

SEQ ID NO: 138246 - DNA, 15 bp, Homo sapiens
acagatgcagagggt

SEQ ID NO: 138247 - DNA, 15 bp, Homo sapiens
gacagatgcagaggg

SEQ ID NO: 138248 - DNA, 15 bp, Homo sapiens
ggacagatgcagagg

SEQ ID NO: 138249 - DNA, 15 bp, Homo sapiens
cggacagatgcagag

SEQ ID NO: 138250 - DNA, 15 bp, Homo sapiens
ccggacagatgcaga

SEQ ID NO: 138251 - DNA, 15 bp, Homo sapiens
tccggacagatgcag

SEQ ID NO: 138252 - DNA, 15 bp, Homo sapiens
atccggacagatgca

SEQ ID NO: 138253 - DNA, 15 bp, Homo sapiens
catccggacagatgc

SEQ ID NO: 138254 - DNA, 15 bp, Homo sapiens
tcatccggacagatg

SEQ ID NO: 138255 - DNA, 15 bp, Homo sapiens
atcatccggacagat

SEQ ID NO: 138256 - DNA, 15 bp, Homo sapiens
tatcatccggacaga

SEQ ID NO: 138257 - DNA, 15 bp, Homo sapiens
ctatcatccggacag

SEQ ID NO: 138258 - DNA, 15 bp, Homo sapiens
cctatcatccggaca

SEQ ID NO: 138259 - DNA, 15 bp, Homo sapiens
ccctatcatccggac

SEQ ID NO: 138260 - DNA, 15 bp, Homo sapiens
cccctatcatccgga

SEQ ID NO: 138261 - DNA, 15 bp, Homo sapiens
tcccctatcatccgg

SEQ ID NO: 138262 - DNA, 15 bp, Homo sapiens
atcccctatcatccg

SEQ ID NO: 138263 - DNA, 15 bp, Homo sapiens
catcccctatcatcc

SEQ ID NO: 138264 - DNA, 15 bp, Homo sapiens
tcatcccctatcatc

SEQ ID NO: 138265 - DNA, 15 bp, Homo sapiens
ctcatcccctatcat

SEQ ID NO: 138266 - DNA, 15 bp, Homo sapiens
tctcatcccctatca

SEQ ID NO: 138267 - DNA, 15 bp, Homo sapiens
ttctcatcccctatc

SEQ ID NO: 138268 - DNA, 15 bp, Homo sapiens
cttctcatcccctat

SEQ ID NO: 138269 - DNA, 15 bp, Homo sapiens
acttctcatccccta

SEQ ID NO: 138270 - DNA, 15 bp, Homo sapiens
tacttctcatcccct

SEQ ID NO: 138271 - DNA, 15 bp, Homo sapiens
ttacttctcatcccc

SEQ ID NO: 138272 - DNA, 15 bp, Homo sapiens
cttacttctcatccc

SEQ ID NO: 138273 - DNA, 15 bp, Homo sapiens
ccttacttctcatcc

SEQ ID NO: 138274 - DNA, 15 bp, Homo sapiens
tccttacttctcatc

SEQ ID NO: 138275 - DNA, 15 bp, Homo sapiens
atccttacttctcat

SEQ ID NO: 138276 - DNA, 15 bp, Homo sapiens
gatccttacttctca

SEQ ID NO: 138277 - DNA, 15 bp, Homo sapiens
tgatccttacttctc

SEQ ID NO: 138278 - DNA, 15 bp, Homo sapiens
atgatccttacttct

SEQ ID NO: 138279 - DNA, 15 bp, Homo sapiens
catgatccttacttc

SEQ ID NO: 138280 - DNA, 15 bp, Homo sapiens
tcatgatccttactt

SEQ ID NO: 138281 - DNA, 15 bp, Homo sapiens
ctcatgatccttact

SEQ ID NO: 138282 - DNA, 15 bp, Homo sapiens
cctcatgatccttac

SEQ ID NO: 138283 - DNA, 15 bp, Homo sapiens
ccctcatgatcctta

SEQ ID NO: 138284 - DNA, 15 bp, Homo sapiens
cccctcatgatcctt

SEQ ID NO: 138285 - DNA, 15 bp, Homo sapiens
acccctcatgatcct

SEQ ID NO: 138286 - DNA, 15 bp, Homo sapiens
tacccctcatgatcc

SEQ ID NO: 138287 - DNA, 15 bp, Homo sapiens
ctacccctcatgatc

SEQ ID NO: 138288 - DNA, 15 bp, Homo sapiens
actacccctcatgat

SEQ ID NO: 138289 - DNA, 15 bp, Homo sapiens
aactacccctcatga

SEQ ID NO: 138290 - DNA, 15 bp, Homo sapiens
aaactacccctcatg

SEQ ID NO: 138291 - DNA, 15 bp, Homo sapiens
aaaactacccctcat

SEQ ID NO: 138292 - DNA, 15 bp, Homo sapiens
caaaactacccctca

SEQ ID NO: 138293 - DNA, 15 bp, Homo sapiens
acaaaactacccctc

SEQ ID NO: 138294 - DNA, 15 bp, Homo sapiens
tacaaaactacccct

SEQ ID NO: 138295 - DNA, 15 bp, Homo sapiens
ctacaaaactacccc

SEQ ID NO: 138296 - DNA, 15 bp, Homo sapiens
cctacaaaactaccc

SEQ ID NO: 138297 - DNA, 15 bp, Homo sapiens
ccctacaaaactacc

SEQ ID NO: 138298 - DNA, 15 bp, Homo sapiens
cccctacaaaactac

SEQ ID NO: 138299 - DNA, 15 bp, Homo sapiens
acccctacaaaacta

SEQ ID NO: 138300 - DNA, 15 bp, Homo sapiens
tacccctacaaaact

SEQ ID NO: 138301 - DNA, 15 bp, Homo sapiens
ctacccctacaaaac

SEQ ID NO: 138302 - DNA, 15 bp, Homo sapiens
actacccctacaaaa

SEQ ID NO: 138303 - DNA, 15 bp, Homo sapiens
aactacccctacaaa

SEQ ID NO: 138304 - DNA, 15 bp, Homo sapiens
taactacccctacaa

SEQ ID NO: 138305 - DNA, 15 bp, Homo sapiens
ataactacccctaca

SEQ ID NO: 138306 - DNA, 15 bp, Homo sapiens
cataactacccctac

SEQ ID NO: 138307 - DNA, 15 bp, Homo sapiens
ccataactaccccta

SEQ ID NO: 138308 - DNA, 15 bp, Homo sapiens
tccataactacccct

SEQ ID NO: 138309 - DNA, 15 bp, Homo sapiens
ttccataactacccc

SEQ ID NO: 138310 - DNA, 15 bp, Homo sapiens
cttccataactaccc

SEQ ID NO: 138311 - DNA, 15 bp, Homo sapiens
acttccataactacc

SEQ ID NO: 138312 - DNA, 15 bp, Homo sapiens
gacttccataactac

SEQ ID NO: 138313 - DNA, 15 bp, Homo sapiens
tgacttccataacta

SEQ ID NO: 138314 - DNA, 15 bp, Homo sapiens
atgacttccataact

SEQ ID NO: 138315 - DNA, 15 bp, Homo sapiens
aatgacttccataac

SEQ ID NO: 138316 - DNA, 15 bp, Homo sapiens
gaatgacttccataa

SEQ ID NO: 138317 - DNA, 15 bp, Homo sapiens
tgaatgacttccata

SEQ ID NO: 138318 - DNA, 15 bp, Homo sapiens
gtgaatgacttccat

SEQ ID NO: 138319 - DNA, 15 bp, Homo sapiens
tgtgaatgacttcca

SEQ ID NO: 138320 - DNA, 15 bp, Homo sapiens
atgtgaatgacttcc

SEQ ID NO: 138321 - DNA, 15 bp, Homo sapiens
gatgtgaatgacttc

SEQ ID NO: 138322 - DNA, 15 bp, Homo sapiens
tgatgtgaatgactt

SEQ ID NO: 138323 - DNA, 15 bp, Homo sapiens
gtgatgtgaatgact

SEQ ID NO: 138324 - DNA, 15 bp, Homo sapiens
cgtgatgtgaatgac

SEQ ID NO: 138325 - DNA, 15 bp, Homo sapiens
acgtgatgtgaatga

SEQ ID NO: 138326 - DNA, 15 bp, Homo sapiens
gacgtgatgtgaatg

SEQ ID NO: 138327 - DNA, 15 bp, Homo sapiens
agacgtgatgtgaat

SEQ ID NO: 138328 - DNA, 15 bp, Homo sapiens
tagacgtgatgtgaa

SEQ ID NO: 138329 - DNA, 15 bp, Homo sapiens
gtagacgtgatgtga

SEQ ID NO: 138330 - DNA, 15 bp, Homo sapiens
ggtagacgtgatgtg

SEQ ID NO: 138331 - DNA, 15 bp, Homo sapiens
gggtagacgtgatgt

SEQ ID NO: 138332 - DNA, 15 bp, Homo sapiens
tgggtagacgtgatg

SEQ ID NO: 138333 - DNA, 15 bp, Homo sapiens
gtgggtagacgtgat

SEQ ID NO: 138334 - DNA, 15 bp, Homo sapiens
tgtgggtagacgtga

SEQ ID NO: 138335 - DNA, 15 bp, Homo sapiens
gtgtgggtagacgtg

SEQ ID NO: 138336 - DNA, 15 bp, Homo sapiens
tgtgtgggtagacgt

SEQ ID NO: 138337 - DNA, 15 bp, Homo sapiens
ctgtgtgggtagacg

SEQ ID NO: 138338 - DNA, 15 bp, Homo sapiens
actgtgtgggtagac

SEQ ID NO: 138339 - DNA, 15 bp, Homo sapiens
aactgtgtgggtaga

SEQ ID NO: 138340 - DNA, 15 bp, Homo sapiens
gaactgtgtgggtag

SEQ ID NO: 138341 - DNA, 15 bp, Homo sapiens
tgaactgtgtgggta

SEQ ID NO: 138342 - DNA, 15 bp, Homo sapiens
atgaactgtgtgggt

SEQ ID NO: 138343 - DNA, 15 bp, Homo sapiens
aatgaactgtgtggg

SEQ ID NO: 138344 - DNA, 15 bp, Homo sapiens
caatgaactgtgtgg

SEQ ID NO: 138345 - DNA, 15 bp, Homo sapiens
ccaatgaactgtgtg

SEQ ID NO: 138346 - DNA, 15 bp, Homo sapiens
gccaatgaactgtgt

SEQ ID NO: 138347 - DNA, 15 bp, Homo sapiens
ggccaatgaactgtg

SEQ ID NO: 138348 - DNA, 15 bp, Homo sapiens
tggccaatgaactgt

SEQ ID NO: 138349 - DNA, 15 bp, Homo sapiens
ctggccaatgaactg

SEQ ID NO: 138350 - DNA, 15 bp, Homo sapiens
tctggccaatgaact

SEQ ID NO: 138351 - DNA, 15 bp, Homo sapiens
ttctggccaatgaac

SEQ ID NO: 138352 - DNA, 15 bp, Homo sapiens
gttctggccaatgaa

SEQ ID NO: 138353 - DNA, 15 bp, Homo sapiens
agttctggccaatga

SEQ ID NO: 138354 - DNA, 15 bp, Homo sapiens
aagttctggccaatg

SEQ ID NO: 138355 - DNA, 15 bp, Homo sapiens
caagttctggccaat

SEQ ID NO: 138356 - DNA, 15 bp, Homo sapiens
tcaagttctggccaa

SEQ ID NO: 138357 - DNA, 15 bp, Homo sapiens
atcaagttctggcca

SEQ ID NO: 138358 - DNA, 15 bp, Homo sapiens
gatcaagttctggcc

SEQ ID NO: 138359 - DNA, 15 bp, Homo sapiens
tgatcaagttctggc

SEQ ID NO: 138360 - DNA, 15 bp, Homo sapiens
gtgatcaagttctgg

SEQ ID NO: 138361 - DNA, 15 bp, Homo sapiens
tgtgatcaagttctg

SEQ ID NO: 138362 - DNA, 15 bp, Homo sapiens
atgtgatcaagttct

SEQ ID NO: 138363 - DNA, 15 bp, Homo sapiens
catgtgatcaagttc

SEQ ID NO: 138364 - DNA, 15 bp, Homo sapiens
ccatgtgatcaagtt

SEQ ID NO: 138365 - DNA, 15 bp, Homo sapiens
accatgtgatcaagt

SEQ ID NO: 138366 - DNA, 15 bp, Homo sapiens
taccatgtgatcaag

SEQ ID NO: 138367 - DNA, 15 bp, Homo sapiens
ataccatgtgatcaa

SEQ ID NO: 138368 - DNA, 15 bp, Homo sapiens
aataccatgtgatca

SEQ ID NO: 138369 - DNA, 15 bp, Homo sapiens
aaataccatgtgatc

SEQ ID NO: 138370 - DNA, 15 bp, Homo sapiens
aaaataccatgtgat

SEQ ID NO: 138371 - DNA, 15 bp, Homo sapiens
taaaataccatgtga

SEQ ID NO: 138372 - DNA, 15 bp, Homo sapiens
ttaaaataccatgtg

SEQ ID NO: 138373 - DNA, 15 bp, Homo sapiens
gttaaaataccatgt

SEQ ID NO: 138374 - DNA, 15 bp, Homo sapiens
agttaaaataccatg

SEQ ID NO: 138375 - DNA, 15 bp, Homo sapiens
cagttaaaataccat

SEQ ID NO: 138376 - DNA, 15 bp, Homo sapiens
gcagttaaaatacca

SEQ ID NO: 138377 - DNA, 15 bp, Homo sapiens
tgcagttaaaatacc

SEQ ID NO: 138378 - DNA, 15 bp, Homo sapiens
ttgcagttaaaatac

SEQ ID NO: 138379 - DNA, 15 bp, Homo sapiens
cttgcagttaaaata

SEQ ID NO: 138380 - DNA, 15 bp, Homo sapiens
ccttgcagttaaaat

SEQ ID NO: 138381 - DNA, 15 bp, Homo sapiens
cccttgcagttaaaa

SEQ ID NO: 138382 - DNA, 15 bp, Homo sapiens
tcccttgcagttaaa

SEQ ID NO: 138383 - DNA, 15 bp, Homo sapiens
atcccttgcagttaa

SEQ ID NO: 138384 - DNA, 15 bp, Homo sapiens
gatcccttgcagtta

SEQ ID NO: 138385 - DNA, 15 bp, Homo sapiens
ggatcccttgcagtt

SEQ ID NO: 138386 - DNA, 15 bp, Homo sapiens
aggatcccttgcagt

SEQ ID NO: 138387 - DNA, 15 bp, Homo sapiens
caggatcccttgcag

SEQ ID NO: 138388 - DNA, 15 bp, Homo sapiens
ccaggatcccttgca

SEQ ID NO: 138389 - DNA, 15 bp, Homo sapiens
cccaggatcccttgc

SEQ ID NO: 138390 - DNA, 15 bp, Homo sapiens
tcccaggatcccttg

SEQ ID NO: 138391 - DNA, 15 bp, Homo sapiens
ttcccaggatccctt

SEQ ID NO: 138392 - DNA, 15 bp, Homo sapiens
tttcccaggatccct

SEQ ID NO: 138393 - DNA, 15 bp, Homo sapiens
atttcccaggatccc

SEQ ID NO: 138394 - DNA, 15 bp, Homo sapiens
catttcccaggatcc

SEQ ID NO: 138395 - DNA, 15 bp, Homo sapiens
acatttcccaggatc

SEQ ID NO: 138396 - DNA, 15 bp, Homo sapiens
tacatttcccaggat

SEQ ID NO: 138397 - DNA, 15 bp, Homo sapiens
ctacatttcccagga

SEQ ID NO: 138398 - DNA, 15 bp, Homo sapiens
gctacatttcccagg

SEQ ID NO: 138399 - DNA, 15 bp, Homo sapiens
tgctacatttcccag

SEQ ID NO: 138400 - DNA, 15 bp, Homo sapiens
gtgctacatttccca

SEQ ID NO: 138401 - DNA, 15 bp, Homo sapiens
agtgctacatttccc

SEQ ID NO: 138402 - DNA, 15 bp, Homo sapiens
cagtgctacatttcc

SEQ ID NO: 138403 - DNA, 15 bp, Homo sapiens
gcagtgctacatttc

SEQ ID NO: 138404 - DNA, 15 bp, Homo sapiens
tgcagtgctacattt

SEQ ID NO: 138405 - DNA, 15 bp, Homo sapiens
gtgcagtgctacatt

SEQ ID NO: 138406 - DNA, 15 bp, Homo sapiens
ggtgcagtgctacat

SEQ ID NO: 138407 - DNA, 15 bp, Homo sapiens
gggtgcagtgctaca

SEQ ID NO: 138408 - DNA, 15 bp, Homo sapiens
tgggtgcagtgctac

SEQ ID NO: 138409 - DNA, 15 bp, Homo sapiens
ctgggtgcagtgcta

SEQ ID NO: 138410 - DNA, 15 bp, Homo sapiens
cctgggtgcagtgct

SEQ ID NO: 138411 - DNA, 15 bp, Homo sapiens
tcctgggtgcagtgc

SEQ ID NO: 138412 - DNA, 15 bp, Homo sapiens
ctcctgggtgcagtg

SEQ ID NO: 138413 - DNA, 15 bp, Homo sapiens
tctcctgggtgcagt

SEQ ID NO: 138414 - DNA, 15 bp, Homo sapiens
atctcctgggtgcag

SEQ ID NO: 138415 - DNA, 15 bp, Homo sapiens
aatctcctgggtgca

SEQ ID NO: 138416 - DNA, 15 bp, Homo sapiens
caatctcctgggtgc

SEQ ID NO: 138417 - DNA, 15 bp, Homo sapiens
tcaatctcctgggtg

SEQ ID NO: 138418 - DNA, 15 bp, Homo sapiens
ttcaatctcctgggt

SEQ ID NO: 138419 - DNA, 15 bp, Homo sapiens
tttcaatctcctggg

SEQ ID NO: 138420 - DNA, 15 bp, Homo sapiens
atttcaatctcctgg

SEQ ID NO: 138421 - DNA, 15 bp, Homo sapiens
tatttcaatctcctg

SEQ ID NO: 138422 - DNA, 15 bp, Homo sapiens
ctatttcaatctcct

SEQ ID NO: 138423 - DNA, 15 bp, Homo sapiens
tctatttcaatctcc

SEQ ID NO: 138424 - DNA, 15 bp, Homo sapiens
atctatttcaatctc

SEQ ID NO: 138425 - DNA, 15 bp, Homo sapiens
aatctatttcaatct

SEQ ID NO: 138426 - DNA, 15 bp, Homo sapiens
aaatctatttcaatc

SEQ ID NO: 138427 - DNA, 15 bp, Homo sapiens
caaatctatttcaat

SEQ ID NO: 138428 - DNA, 15 bp, Homo sapiens
ccaaatctatttcaa

SEQ ID NO: 138429 - DNA, 15 bp, Homo sapiens
tccaaatctatttca

SEQ ID NO: 138430 - DNA, 15 bp, Homo sapiens
ctccaaatctatttc

SEQ ID NO: 138431 - DNA, 15 bp, Homo sapiens
tctccaaatctattt

SEQ ID NO: 138432 - DNA, 15 bp, Homo sapiens
ttctccaaatctatt

SEQ ID NO: 138433 - DNA, 15 bp, Homo sapiens
gttctccaaatctat

SEQ ID NO: 138434 - DNA, 15 bp, Homo sapiens
tgttctccaaatcta

SEQ ID NO: 138435 - DNA, 15 bp, Homo sapiens
gtgttctccaaatct

SEQ ID NO: 138436 - DNA, 15 bp, Homo sapiens
ggtgttctccaaatc

SEQ ID NO: 138437 - DNA, 15 bp, Homo sapiens
aggtgttctccaaat

SEQ ID NO: 138438 - DNA, 15 bp, Homo sapiens
caggtgttctccaaa

SEQ ID NO: 138439 - DNA, 15 bp, Homo sapiens
ccaggtgttctccaa

SEQ ID NO: 138440 - DNA, 15 bp, Homo sapiens
tccaggtgttctcca

SEQ ID NO: 138441 - DNA, 15 bp, Homo sapiens
gtccaggtgttctcc

SEQ ID NO: 138442 - DNA, 15 bp, Homo sapiens
agtccaggtgttctc

SEQ ID NO: 138443 - DNA, 15 bp, Homo sapiens
cagtccaggtgttct

SEQ ID NO: 138444 - DNA, 15 bp, Homo sapiens
gcagtccaggtgttc

SEQ ID NO: 138445 - DNA, 15 bp, Homo sapiens
agcagtccaggtgtt

SEQ ID NO: 138446 - DNA, 15 bp, Homo sapiens
cagcagtccaggtgt

SEQ ID NO: 138447 - DNA, 15 bp, Homo sapiens
tcagcagtccaggtg

SEQ ID NO: 138448 - DNA, 15 bp, Homo sapiens
ttcagcagtccaggt

SEQ ID NO: 138449 - DNA, 15 bp, Homo sapiens
cttcagcagtccagg

SEQ ID NO: 138450 - DNA, 15 bp, Homo sapiens
ccttcagcagtccag

SEQ ID NO: 138451 - DNA, 15 bp, Homo sapiens
cccttcagcagtcca

SEQ ID NO: 138452 - DNA, 15 bp, Homo sapiens
ccccttcagcagtcc

SEQ ID NO: 138453 - DNA, 15 bp, Homo sapiens
gccccttcagcagtc

SEQ ID NO: 138454 - DNA, 15 bp, Homo sapiens
agccccttcagcagt

SEQ ID NO: 138455 - DNA, 15 bp, Homo sapiens
gagccccttcagcag

SEQ ID NO: 138456 - DNA, 15 bp, Homo sapiens
ggagccccttcagca

SEQ ID NO: 138457 - DNA, 15 bp, Homo sapiens
gggagccccttcagc

SEQ ID NO: 138458 - DNA, 15 bp, Homo sapiens
cgggagccccttcag

SEQ ID NO: 138459 - DNA, 15 bp, Homo sapiens
tcgggagccccttca

SEQ ID NO: 138460 - DNA, 15 bp, Homo sapiens
ctcgggagccccttc

SEQ ID NO: 138461 - DNA, 15 bp, Homo sapiens
actcgggagcccctt

SEQ ID NO: 138462 - DNA, 15 bp, Homo sapiens
gactcgggagcccct

SEQ ID NO: 138463 - DNA, 15 bp, Homo sapiens
ggactcgggagcccc

SEQ ID NO: 138464 - DNA, 15 bp, Homo sapiens
gggactcgggagccc

SEQ ID NO: 138465 - DNA, 15 bp, Homo sapiens
tgggactcgggagcc

SEQ ID NO: 138466 - DNA, 15 bp, Homo sapiens
gtgggactcgggagc

SEQ ID NO: 138467 - DNA, 15 bp, Homo sapiens
tgtgggactcgggag

SEQ ID NO: 138468 - DNA, 15 bp, Homo sapiens
gtgtgggactcggga

SEQ ID NO: 138469 - DNA, 15 bp, Homo sapiens
agtgtgggactcggg

SEQ ID NO: 138470 - DNA, 15 bp, Homo sapiens
cagtgtgggactcgg

SEQ ID NO: 138471 - DNA, 15 bp, Homo sapiens
tcagtgtgggactcg

SEQ ID NO: 138472 - DNA, 15 bp, Homo sapiens
ctcagtgtgggactc

SEQ ID NO: 138473 - DNA, 15 bp, Homo sapiens
cctcagtgtgggact

SEQ ID NO: 138474 - DNA, 15 bp, Homo sapiens
ccctcagtgtgggac

SEQ ID NO: 138475 - DNA, 15 bp, Homo sapiens
gccctcagtgtggga

SEQ ID NO: 138476 - DNA, 15 bp, Homo sapiens
agccctcagtgtggg

SEQ ID NO: 138477 - DNA, 15 bp, Homo sapiens
aagccctcagtgtgg

SEQ ID NO: 138478 - DNA, 15 bp, Homo sapiens
gaagccctcagtgtg

SEQ ID NO: 138479 - DNA, 15 bp, Homo sapiens
agaagccctcagtgt

SEQ ID NO: 138480 - DNA, 15 bp, Homo sapiens
cagaagccctcagtg

SEQ ID NO: 138481 - DNA, 15 bp, Homo sapiens
gcagaagccctcagt

SEQ ID NO: 138482 - DNA, 15 bp, Homo sapiens
agcagaagccctcag

SEQ ID NO: 138483 - DNA, 15 bp, Homo sapiens
cagcagaagccctca

SEQ ID NO: 138484 - DNA, 15 bp, Homo sapiens
acagcagaagccctc

SEQ ID NO: 138485 - DNA, 15 bp, Homo sapiens
gacagcagaagccct

SEQ ID NO: 138486 - DNA, 15 bp, Homo sapiens
ggacagcagaagccc

SEQ ID NO: 138487 - DNA, 15 bp, Homo sapiens
tggacagcagaagcc

SEQ ID NO: 138488 - DNA, 15 bp, Homo sapiens
atggacagcagaagc

SEQ ID NO: 138489 - DNA, 15 bp, Homo sapiens
tatggacagcagaag

SEQ ID NO: 138490 - DNA, 15 bp, Homo sapiens
ctatggacagcagaa

SEQ ID NO: 138491 - DNA, 15 bp, Homo sapiens
gctatggacagcaga

SEQ ID NO: 138492 - DNA, 15 bp, Homo sapiens
agctatggacagcag

SEQ ID NO: 138493 - DNA, 15 bp, Homo sapiens
cagctatggacagca

SEQ ID NO: 138494 - DNA, 15 bp, Homo sapiens
ccagctatggacagc

SEQ ID NO: 138495 - DNA, 15 bp, Homo sapiens
gccagctatggacag

SEQ ID NO: 138496 - DNA, 15 bp, Homo sapiens
agccagctatggaca

SEQ ID NO: 138497 - DNA, 15 bp, Homo sapiens
gagccagctatggac

SEQ ID NO: 138498 - DNA, 15 bp, Homo sapiens
agagccagctatgga

SEQ ID NO: 138499 - DNA, 15 bp, Homo sapiens
cagagccagctatgg

SEQ ID NO: 138500 - DNA, 15 bp, Homo sapiens
gcagagccagctatg

SEQ ID NO: 138501 - DNA, 15 bp, Homo sapiens
ggcagagccagctat

SEQ ID NO: 138502 - DNA, 15 bp, Homo sapiens
tggcagagccagcta

SEQ ID NO: 138503 - DNA, 15 bp, Homo sapiens
ctggcagagccagct

SEQ ID NO: 138504 - DNA, 15 bp, Homo sapiens
tctggcagagccagc

SEQ ID NO: 138505 - DNA, 15 bp, Homo sapiens
ttctggcagagccag

SEQ ID NO: 138506 - DNA, 15 bp, Homo sapiens
gttctggcagagcca

SEQ ID NO: 138507 - DNA, 15 bp, Homo sapiens
ggttctggcagagcc

SEQ ID NO: 138508 - DNA, 15 bp, Homo sapiens
tggttctggcagagc

SEQ ID NO: 138509 - DNA, 15 bp, Homo sapiens
atggttctggcagag

SEQ ID NO: 138510 - DNA, 15 bp, Homo sapiens
aatggttctggcaga

SEQ ID NO: 138511 - DNA, 15 bp, Homo sapiens
taatggttctggcag

SEQ ID NO: 138512 - DNA, 15 bp, Homo sapiens
ataatggttctggca

SEQ ID NO: 138513 - DNA, 15 bp, Homo sapiens
gataatggttctggc

SEQ ID NO: 138514 - DNA, 15 bp, Homo sapiens
tgataatggttctgg

SEQ ID NO: 138515 - DNA, 15 bp, Homo sapiens
atgataatggttctg

SEQ ID NO: 138516 - DNA, 15 bp, Homo sapiens
catgataatggttct

SEQ ID NO: 138517 - DNA, 15 bp, Homo sapiens
tcatgataatggttc

SEQ ID NO: 138518 - DNA, 15 bp, Homo sapiens
gtcatgataatggtt

SEQ ID NO: 138519 - DNA, 15 bp, Homo sapiens
ggtcatgataatggt

SEQ ID NO: 138520 - DNA, 15 bp, Homo sapiens
gggtcatgataatgg

SEQ ID NO: 138521 - DNA, 15 bp, Homo sapiens
tgggtcatgataatg

SEQ ID NO: 138522 - DNA, 15 bp, Homo sapiens
ttgggtcatgataat

SEQ ID NO: 138523 - DNA, 15 bp, Homo sapiens
attgggtcatgataa

SEQ ID NO: 138524 - DNA, 15 bp, Homo sapiens
cattgggtcatgata

SEQ ID NO: 138525 - DNA, 15 bp, Homo sapiens
tcattgggtcatgat

SEQ ID NO: 138526 - DNA, 15 bp, Homo sapiens
ctcattgggtcatga

SEQ ID NO: 138527 - DNA, 15 bp, Homo sapiens
tctcattgggtcatg

SEQ ID NO: 138528 - DNA, 15 bp, Homo sapiens
ttctcattgggtcat

SEQ ID NO: 138529 - DNA, 15 bp, Homo sapiens
tttctcattgggtca

SEQ ID NO: 138530 - DNA, 15 bp, Homo sapiens
ttttctcattgggtc

SEQ ID NO: 138531 - DNA, 15 bp, Homo sapiens
gttttctcattgggt

SEQ ID NO: 138532 - DNA, 15 bp, Homo sapiens
agttttctcattggg

SEQ ID NO: 138533 - DNA, 15 bp, Homo sapiens
cagttttctcattgg

SEQ ID NO: 138534 - DNA, 15 bp, Homo sapiens
tcagttttctcattg

SEQ ID NO: 138535 - DNA, 15 bp, Homo sapiens
ttcagttttctcatt

SEQ ID NO: 138536 - DNA, 15 bp, Homo sapiens
attcagttttctcat

SEQ ID NO: 138537 - DNA, 15 bp, Homo sapiens
cattcagttttctca

SEQ ID NO: 138538 - DNA, 15 bp, Homo sapiens
acattcagttttctc

SEQ ID NO: 138539 - DNA, 15 bp, Homo sapiens
aacattcagttttct

SEQ ID NO: 138540 - DNA, 15 bp, Homo sapiens
aaacattcagttttc

SEQ ID NO: 138541 - DNA, 15 bp, Homo sapiens
taaacattcagtttt

SEQ ID NO: 138542 - DNA, 15 bp, Homo sapiens
gtaaacattcagttt

SEQ ID NO: 138543 - DNA, 15 bp, Homo sapiens
agtaaacattcagtt

SEQ ID NO: 138544 - DNA, 15 bp, Homo sapiens
cagtaaacattcagt

SEQ ID NO: 138545 - DNA, 15 bp, Homo sapiens
ccagtaaacattcag

SEQ ID NO: 138546 - DNA, 15 bp, Homo sapiens
cccagtaaacattca

SEQ ID NO: 138547 - DNA, 15 bp, Homo sapiens
acccagtaaacattc

SEQ ID NO: 138548 - DNA, 15 bp, Homo sapiens
tacccagtaaacatt

SEQ ID NO: 138549 - DNA, 15 bp, Homo sapiens
atacccagtaaacat

SEQ ID NO: 138550 - DNA, 15 bp, Homo sapiens
aatacccagtaaaca

SEQ ID NO: 138551 - DNA, 15 bp, Homo sapiens
aaatacccagtaaac

SEQ ID NO: 138552 - DNA, 15 bp, Homo sapiens
caaatacccagtaaa

SEQ ID NO: 138553 - DNA, 15 bp, Homo sapiens
gcaaatacccagtaa

SEQ ID NO: 138554 - DNA, 15 bp, Homo sapiens
agcaaatacccagta

SEQ ID NO: 138555 - DNA, 15 bp, Homo sapiens
tagcaaatacccagt

SEQ ID NO: 138556 - DNA, 15 bp, Homo sapiens
ctagcaaatacccag

SEQ ID NO: 138557 - DNA, 15 bp, Homo sapiens
cctagcaaataccca

SEQ ID NO: 138558 - DNA, 15 bp, Homo sapiens
acctagcaaataccc

SEQ ID NO: 138559 - DNA, 15 bp, Homo sapiens
cacctagcaaatacc

SEQ ID NO: 138560 - DNA, 15 bp, Homo sapiens
acacctagcaaatac

SEQ ID NO: 138561 - DNA, 15 bp, Homo sapiens
gacacctagcaaata

SEQ ID NO: 138562 - DNA, 15 bp, Homo sapiens
tgacacctagcaaat

SEQ ID NO: 138563 - DNA, 15 bp, Homo sapiens
ctgacacctagcaaa

SEQ ID NO: 138564 - DNA, 15 bp, Homo sapiens
tctgacacctagcaa

SEQ ID NO: 138565 - DNA, 15 bp, Homo sapiens
gtctgacacctagca

SEQ ID NO: 138566 - DNA, 15 bp, Homo sapiens
tgtctgacacctagc

SEQ ID NO: 138567 - DNA, 15 bp, Homo sapiens
atgtctgacacctag

SEQ ID NO: 138568 - DNA, 15 bp, Homo sapiens
catgtctgacaccta

SEQ ID NO: 138569 - DNA, 15 bp, Homo sapiens
ccatgtctgacacct

SEQ ID NO: 138570 - DNA, 15 bp, Homo sapiens
accatgtctgacacc

SEQ ID NO: 138571 - DNA, 15 bp, Homo sapiens
caccatgtctgacac

SEQ ID NO: 138572 - DNA, 15 bp, Homo sapiens
acaccatgtctgaca

SEQ ID NO: 138573 - DNA, 15 bp, Homo sapiens
gacaccatgtctgac

SEQ ID NO: 138574 - DNA, 15 bp, Homo sapiens
tgacaccatgtctga

SEQ ID NO: 138575 - DNA, 15 bp, Homo sapiens
ttgacaccatgtctg

SEQ ID NO: 138576 - DNA, 15 bp, Homo sapiens
cttgacaccatgtct

SEQ ID NO: 138577 - DNA, 15 bp, Homo sapiens
gcttgacaccatgtc

SEQ ID NO: 138578 - DNA, 15 bp, Homo sapiens
tgcttgacaccatgt

SEQ ID NO: 138579 - DNA, 15 bp, Homo sapiens
gtgcttgacaccatg

SEQ ID NO: 138580 - DNA, 15 bp, Homo sapiens
agtgcttgacaccat

SEQ ID NO: 138581 - DNA, 15 bp, Homo sapiens
aagtgcttgacacca

SEQ ID NO: 138582 - DNA, 15 bp, Homo sapiens
aaagtgcttgacacc

SEQ ID NO: 138583 - DNA, 15 bp, Homo sapiens
taaagtgcttgacac

SEQ ID NO: 138584 - DNA, 15 bp, Homo sapiens
ataaagtgcttgaca

SEQ ID NO: 138585 - DNA, 15 bp, Homo sapiens
tataaagtgcttgac

SEQ ID NO: 138586 - DNA, 15 bp, Homo sapiens
atataaagtgcttga

SEQ ID NO: 138587 - DNA, 15 bp, Homo sapiens
catataaagtgcttg

SEQ ID NO: 138588 - DNA, 15 bp, Homo sapiens
gcatataaagtgctt

SEQ ID NO: 138589 - DNA, 15 bp, Homo sapiens
tgcatataaagtgct

SEQ ID NO: 138590 - DNA, 15 bp, Homo sapiens
atgcatataaagtgc

SEQ ID NO: 138591 - DNA, 15 bp, Homo sapiens
aatgcatataaagtg

SEQ ID NO: 138592 - DNA, 15 bp, Homo sapiens
taatgcatataaagt

SEQ ID NO: 138593 - DNA, 15 bp, Homo sapiens
ataatgcatataaag

SEQ ID NO: 138594 - DNA, 15 bp, Homo sapiens
gataatgcatataaa

SEQ ID NO: 138595 - DNA, 15 bp, Homo sapiens
agataatgcatataa

SEQ ID NO: 138596 - DNA, 15 bp, Homo sapiens
gagataatgcatata

SEQ ID NO: 138597 - DNA, 15 bp, Homo sapiens
tgagataatgcatat

SEQ ID NO: 138598 - DNA, 15 bp, Homo sapiens
ttgagataatgcata

SEQ ID NO: 138599 - DNA, 15 bp, Homo sapiens
attgagataatgcat

SEQ ID NO: 138600 - DNA, 15 bp, Homo sapiens
gattgagataatgca

SEQ ID NO: 138601 - DNA, 15 bp, Homo sapiens
ggattgagataatgc

SEQ ID NO: 138602 - DNA, 15 bp, Homo sapiens
aggattgagataatg

SEQ ID NO: 138603 - DNA, 15 bp, Homo sapiens
gaggattgagataat

SEQ ID NO: 138604 - DNA, 15 bp, Homo sapiens
agaggattgagataa

SEQ ID NO: 138605 - DNA, 15 bp, Homo sapiens
tagaggattgagata

SEQ ID NO: 138606 - DNA, 15 bp, Homo sapiens
ttagaggattgagat

SEQ ID NO: 138607 - DNA, 15 bp, Homo sapiens
tttagaggattgaga

SEQ ID NO: 138608 - DNA, 15 bp, Homo sapiens
atttagaggattgag

SEQ ID NO: 138609 - DNA, 15 bp, Homo sapiens
gatttagaggattga

SEQ ID NO: 138610 - DNA, 15 bp, Homo sapiens
tgatttagaggattg

SEQ ID NO: 138611 - DNA, 15 bp, Homo sapiens
ctgatttagaggatt

SEQ ID NO: 138612 - DNA, 15 bp, Homo sapiens
gctgatttagaggat

SEQ ID NO: 138613 - DNA, 15 bp, Homo sapiens
ggctgatttagagga

SEQ ID NO: 138614 - DNA, 15 bp, Homo sapiens
aggctgatttagagg

SEQ ID NO: 138615 - DNA, 15 bp, Homo sapiens
taggctgatttagag

SEQ ID NO: 138616 - DNA, 15 bp, Homo sapiens
ataggctgatttaga

SEQ ID NO: 138617 - DNA, 15 bp, Homo sapiens
cataggctgatttag

SEQ ID NO: 138618 - DNA, 15 bp, Homo sapiens
tcataggctgattta

SEQ ID NO: 138619 - DNA, 15 bp, Homo sapiens
atcataggctgattt

SEQ ID NO: 138620 - DNA, 15 bp, Homo sapiens
catcataggctgatt

SEQ ID NO: 138621 - DNA, 15 bp, Homo sapiens
acatcataggctgat

SEQ ID NO: 138622 - DNA, 15 bp, Homo sapiens
tacatcataggctga

SEQ ID NO: 138623 - DNA, 15 bp, Homo sapiens
ctacatcataggctg

SEQ ID NO: 138624 - DNA, 15 bp, Homo sapiens
tctacatcataggct

SEQ ID NO: 138625 - DNA, 15 bp, Homo sapiens
atctacatcataggc

SEQ ID NO: 138626 - DNA, 15 bp, Homo sapiens
tatctacatcatagg

SEQ ID NO: 138627 - DNA, 15 bp, Homo sapiens
gtatctacatcatag

SEQ ID NO: 138628 - DNA, 15 bp, Homo sapiens
agtatctacatcata

SEQ ID NO: 138629 - DNA, 15 bp, Homo sapiens
tagtatctacatcat

SEQ ID NO: 138630 - DNA, 15 bp, Homo sapiens
atagtatctacatca

SEQ ID NO: 138631 - DNA, 15 bp, Homo sapiens
gatagtatctacatc

SEQ ID NO: 138632 - DNA, 15 bp, Homo sapiens
agatagtatctacat

SEQ ID NO: 138633 - DNA, 15 bp, Homo sapiens
cagatagtatctaca

SEQ ID NO: 138634 - DNA, 15 bp, Homo sapiens
acagatagtatctac

SEQ ID NO: 138635 - DNA, 15 bp, Homo sapiens
tacagatagtatcta

SEQ ID NO: 138636 - DNA, 15 bp, Homo sapiens
atacagatagtatct

SEQ ID NO: 138637 - DNA, 15 bp, Homo sapiens
aatacagatagtatc

SEQ ID NO: 138638 - DNA, 15 bp, Homo sapiens
aaatacagatagtat

SEQ ID NO: 138639 - DNA, 15 bp, Homo sapiens
aaaatacagatagta

SEQ ID NO: 138640 - DNA, 15 bp, Homo sapiens
aaaaatacagatagt

SEQ ID NO: 138641 - DNA, 15 bp, Homo sapiens
gaaaaatacagatag

SEQ ID NO: 138642 - DNA, 15 bp, Homo sapiens
ggaaaaatacagata

SEQ ID NO: 138643 - DNA, 15 bp, Homo sapiens
gggaaaaatacagat

SEQ ID NO: 138644 - DNA, 15 bp, Homo sapiens
tgggaaaaatacaga

SEQ ID NO: 138645 - DNA, 15 bp, Homo sapiens
atgggaaaaatacag

SEQ ID NO: 138646 - DNA, 15 bp, Homo sapiens
aatgggaaaaataca

SEQ ID NO: 138647 - DNA, 15 bp, Homo sapiens
aaatgggaaaaatac

SEQ ID NO: 138648 - DNA, 15 bp, Homo sapiens
aaaatgggaaaaata

SEQ ID NO: 138649 - DNA, 15 bp, Homo sapiens
taaaatgggaaaaat

SEQ ID NO: 138650 - DNA, 15 bp, Homo sapiens
gtaaaatgggaaaaa

SEQ ID NO: 138651 - DNA, 15 bp, Homo sapiens
tgtaaaatgggaaaa

SEQ ID NO: 138652 - DNA, 15 bp, Homo sapiens
ctgtaaaatgggaaa

SEQ ID NO: 138653 - DNA, 15 bp, Homo sapiens
tctgtaaaatgggaa

SEQ ID NO: 138654 - DNA, 15 bp, Homo sapiens
atctgtaaaatggga

SEQ ID NO: 138655 - DNA, 15 bp, Homo sapiens
catctgtaaaatggg

SEQ ID NO: 138656 - DNA, 15 bp, Homo sapiens
acatctgtaaaatgg

SEQ ID NO: 138657 - DNA, 15 bp, Homo sapiens
tacatctgtaaaatg

SEQ ID NO: 138658 - DNA, 15 bp, Homo sapiens
gtacatctgtaaaat

SEQ ID NO: 138659 - DNA, 15 bp, Homo sapiens
tgtacatctgtaaaa

SEQ ID NO: 138660 - DNA, 15 bp, Homo sapiens
ttgtacatctgtaaa

SEQ ID NO: 138661 - DNA, 15 bp, Homo sapiens
tttgtacatctgtaa

SEQ ID NO: 138662 - DNA, 15 bp, Homo sapiens
ttttgtacatctgta

SEQ ID NO: 138663 - DNA, 15 bp, Homo sapiens
tttttgtacatctgt

SEQ ID NO: 138664 - DNA, 15 bp, Homo sapiens
gtttttgtacatctg

SEQ ID NO: 138665 - DNA, 15 bp, Homo sapiens
agtttttgtacatct

SEQ ID NO: 138666 - DNA, 15 bp, Homo sapiens
cagtttttgtacatc

SEQ ID NO: 138667 - DNA, 15 bp, Homo sapiens
ccagtttttgtacat

SEQ ID NO: 138668 - DNA, 15 bp, Homo sapiens
cccagtttttgtaca

SEQ ID NO: 138669 - DNA, 15 bp, Homo sapiens
ccccagtttttgtac

SEQ ID NO: 138670 - DNA, 15 bp, Homo sapiens
gccccagtttttgta

SEQ ID NO: 138671 - DNA, 15 bp, Homo sapiens
agccccagtttttgt

SEQ ID NO: 138672 - DNA, 15 bp, Homo sapiens
aagccccagtttttg

SEQ ID NO: 138673 - DNA, 15 bp, Homo sapiens
caagccccagttttt

SEQ ID NO: 138674 - DNA, 15 bp, Homo sapiens
gcaagccccagtttt

SEQ ID NO: 138675 - DNA, 15 bp, Homo sapiens
tgcaagccccagttt

SEQ ID NO: 138676 - DNA, 15 bp, Homo sapiens
ttgcaagccccagtt

SEQ ID NO: 138677 - DNA, 15 bp, Homo sapiens
attgcaagccccagt

SEQ ID NO: 138678 - DNA, 15 bp, Homo sapiens
cattgcaagccccag

SEQ ID NO: 138679 - DNA, 15 bp, Homo sapiens
ccattgcaagcccca

SEQ ID NO: 138680 - DNA, 15 bp, Homo sapiens
gccattgcaagcccc

SEQ ID NO: 138681 - DNA, 15 bp, Homo sapiens
agccattgcaagccc

SEQ ID NO: 138682 - DNA, 15 bp, Homo sapiens
tagccattgcaagcc

SEQ ID NO: 138683 - DNA, 15 bp, Homo sapiens
atagccattgcaagc

SEQ ID NO: 138684 - DNA, 15 bp, Homo sapiens
catagccattgcaag

SEQ ID NO: 138685 - DNA, 15 bp, Homo sapiens
acatagccattgcaa

SEQ ID NO: 138686 - DNA, 15 bp, Homo sapiens
cacatagccattgca

SEQ ID NO: 138687 - DNA, 15 bp, Homo sapiens
tcacatagccattgc

SEQ ID NO: 138688 - DNA, 15 bp, Homo sapiens
atcacatagccattg

SEQ ID NO: 138689 - DNA, 15 bp, Homo sapiens
catcacatagccatt

SEQ ID NO: 138690 - DNA, 15 bp, Homo sapiens
acatcacatagccat

SEQ ID NO: 138691 - DNA, 15 bp, Homo sapiens
gacatcacatagcca

SEQ ID NO: 138692 - DNA, 15 bp, Homo sapiens
tgacatcacatagcc

SEQ ID NO: 138693 - DNA, 15 bp, Homo sapiens
gtgacatcacatagc

SEQ ID NO: 138694 - DNA, 15 bp, Homo sapiens
agtgacatcacatag

SEQ ID NO: 138695 - DNA, 15 bp, Homo sapiens
aagtgacatcacata

SEQ ID NO: 138696 - DNA, 15 bp, Homo sapiens
caagtgacatcacat

SEQ ID NO: 138697 - DNA, 15 bp, Homo sapiens
gcaagtgacatcaca

SEQ ID NO: 138698 - DNA, 15 bp, Homo sapiens
ggcaagtgacatcac

SEQ ID NO: 138699 - DNA, 15 bp, Homo sapiens
gggcaagtgacatca

SEQ ID NO: 138700 - DNA, 15 bp, Homo sapiens
tgggcaagtgacatc

SEQ ID NO: 138701 - DNA, 15 bp, Homo sapiens
ttgggcaagtgacat

SEQ ID NO: 138702 - DNA, 15 bp, Homo sapiens
cttgggcaagtgaca

SEQ ID NO: 138703 - DNA, 15 bp, Homo sapiens
tcttgggcaagtgac

SEQ ID NO: 138704 - DNA, 15 bp, Homo sapiens
ctcttgggcaagtga

SEQ ID NO: 138705 - DNA, 15 bp, Homo sapiens
cctcttgggcaagtg

SEQ ID NO: 138706 - DNA, 15 bp, Homo sapiens
gcctcttgggcaagt

SEQ ID NO: 138707 - DNA, 15 bp, Homo sapiens
tgcctcttgggcaag

SEQ ID NO: 138708 - DNA, 15 bp, Homo sapiens
atgcctcttgggcaa

SEQ ID NO: 138709 - DNA, 15 bp, Homo sapiens
gatgcctcttgggca

SEQ ID NO: 138710 - DNA, 15 bp, Homo sapiens
ggatgcctcttgggc

SEQ ID NO: 138711 - DNA, 15 bp, Homo sapiens
aggatgcctcttggg

SEQ ID NO: 138712 - DNA, 15 bp, Homo sapiens
aaggatgcctcttgg

SEQ ID NO: 138713 - DNA, 15 bp, Homo sapiens
taaggatgcctcttg

SEQ ID NO: 138714 - DNA, 15 bp, Homo sapiens
ttaaggatgcctctt

SEQ ID NO: 138715 - DNA, 15 bp, Homo sapiens
attaaggatgcctct

SEQ ID NO: 138716 - DNA, 15 bp, Homo sapiens
tattaaggatgcctc

SEQ ID NO: 138717 - DNA, 15 bp, Homo sapiens
ttattaaggatgcct

SEQ ID NO: 138718 - DNA, 15 bp, Homo sapiens
cttattaaggatgcc

SEQ ID NO: 138719 - DNA, 15 bp, Homo sapiens
acttattaaggatgc

SEQ ID NO: 138720 - DNA, 15 bp, Homo sapiens
cacttattaaggatg

SEQ ID NO: 138721 - DNA, 15 bp, Homo sapiens
ccacttattaaggat

SEQ ID NO: 138722 - DNA, 15 bp, Homo sapiens
gccacttattaagga

SEQ ID NO: 138723 - DNA, 15 bp, Homo sapiens
tgccacttattaagg

SEQ ID NO: 138724 - DNA, 15 bp, Homo sapiens
ctgccacttattaag

SEQ ID NO: 138725 - DNA, 15 bp, Homo sapiens
actgccacttattaa

SEQ ID NO: 138726 - DNA, 15 bp, Homo sapiens
tactgccacttatta

SEQ ID NO: 138727 - DNA, 15 bp, Homo sapiens
gtactgccacttatt

SEQ ID NO: 138728 - DNA, 15 bp, Homo sapiens
ggtactgccacttat

SEQ ID NO: 138729 - DNA, 15 bp, Homo sapiens
tggtactgccactta

SEQ ID NO: 138730 - DNA, 15 bp, Homo sapiens
ctggtactgccactt

SEQ ID NO: 138731 - DNA, 15 bp, Homo sapiens
gctggtactgccact

SEQ ID NO: 138732 - DNA, 15 bp, Homo sapiens
tgctggtactgccac

SEQ ID NO: 138733 - DNA, 15 bp, Homo sapiens
atgctggtactgcca

SEQ ID NO: 138734 - DNA, 15 bp, Homo sapiens
aatgctggtactgcc

SEQ ID NO: 138735 - DNA, 15 bp, Homo sapiens
taatgctggtactgc

SEQ ID NO: 138736 - DNA, 15 bp, Homo sapiens
ctaatgctggtactg

SEQ ID NO: 138737 - DNA, 15 bp, Homo sapiens
tctaatgctggtact

SEQ ID NO: 138738 - DNA, 15 bp, Homo sapiens
ttctaatgctggtac

SEQ ID NO: 138739 - DNA, 15 bp, Homo sapiens
gttctaatgctggta

SEQ ID NO: 138740 - DNA, 15 bp, Homo sapiens
ggttctaatgctggt

SEQ ID NO: 138741 - DNA, 15 bp, Homo sapiens
gggttctaatgctgg

SEQ ID NO: 138742 - DNA, 15 bp, Homo sapiens
tgggttctaatgctg

SEQ ID NO: 138743 - DNA, 15 bp, Homo sapiens
ctgggttctaatgct

SEQ ID NO: 138744 - DNA, 15 bp, Homo sapiens
cctgggttctaatgc

SEQ ID NO: 138745 - DNA, 15 bp, Homo sapiens
ccctgggttctaatg

SEQ ID NO: 138746 - DNA, 15 bp, Homo sapiens
accctgggttctaat

SEQ ID NO: 138747 - DNA, 15 bp, Homo sapiens
aaccctgggttctaa

SEQ ID NO: 138748 - DNA, 15 bp, Homo sapiens
aaaccctgggttcta

SEQ ID NO: 138749 - DNA, 15 bp, Homo sapiens
aaaaccctgggttct

SEQ ID NO: 138750 - DNA, 15 bp, Homo sapiens
gaaaaccctgggttc

SEQ ID NO: 138751 - DNA, 15 bp, Homo sapiens
agaaaaccctgggtt

SEQ ID NO: 138752 - DNA, 15 bp, Homo sapiens
cagaaaaccctgggt

SEQ ID NO: 138753 - DNA, 15 bp, Homo sapiens
acagaaaaccctggg

SEQ ID NO: 138754 - DNA, 15 bp, Homo sapiens
gacagaaaaccctgg

SEQ ID NO: 138755 - DNA, 15 bp, Homo sapiens
agacagaaaaccctg

SEQ ID NO: 138756 - DNA, 15 bp, Homo sapiens
aagacagaaaaccct

SEQ ID NO: 138757 - DNA, 15 bp, Homo sapiens
gaagacagaaaaccc

SEQ ID NO: 138758 - DNA, 15 bp, Homo sapiens
tgaagacagaaaacc

SEQ ID NO: 138759 - DNA, 15 bp, Homo sapiens
ctgaagacagaaaac

SEQ ID NO: 138760 - DNA, 15 bp, Homo sapiens
tctgaagacagaaaa

SEQ ID NO: 138761 - DNA, 15 bp, Homo sapiens
atctgaagacagaaa

SEQ ID NO: 138762 - DNA, 15 bp, Homo sapiens
aatctgaagacagaa

SEQ ID NO: 138763 - DNA, 15 bp, Homo sapiens
caatctgaagacaga

SEQ ID NO: 138764 - DNA, 15 bp, Homo sapiens
acaatctgaagacag

SEQ ID NO: 138765 - DNA, 15 bp, Homo sapiens
aacaatctgaagaca

SEQ ID NO: 138766 - DNA, 15 bp, Homo sapiens
taacaatctgaagac

SEQ ID NO: 138767 - DNA, 15 bp, Homo sapiens
ttaacaatctgaaga

SEQ ID NO: 138768 - DNA, 15 bp, Homo sapiens
gttaacaatctgaag

SEQ ID NO: 138769 - DNA, 15 bp, Homo sapiens
agttaacaatctgaa

SEQ ID NO: 138770 - DNA, 15 bp, Homo sapiens
gagttaacaatctga

SEQ ID NO: 138771 - DNA, 15 bp, Homo sapiens
agagttaacaatctg

SEQ ID NO: 138772 - DNA, 15 bp, Homo sapiens
aagagttaacaatct

SEQ ID NO: 138773 - DNA, 15 bp, Homo sapiens
taagagttaacaatc

SEQ ID NO: 138774 - DNA, 15 bp, Homo sapiens
gtaagagttaacaat

SEQ ID NO: 138775 - DNA, 15 bp, Homo sapiens
ggtaagagttaacaa

SEQ ID NO: 138776 - DNA, 15 bp, Homo sapiens
gggtaagagttaaca

SEQ ID NO: 138777 - DNA, 15 bp, Homo sapiens
agggtaagagttaac

SEQ ID NO: 138778 - DNA, 15 bp, Homo sapiens
gagggtaagagttaa

SEQ ID NO: 138779 - DNA, 15 bp, Homo sapiens
agagggtaagagtta

SEQ ID NO: 138780 - DNA, 15 bp, Homo sapiens
aagagggtaagagtt

SEQ ID NO: 138781 - DNA, 15 bp, Homo sapiens
gaagagggtaagagt

SEQ ID NO: 138782 - DNA, 15 bp, Homo sapiens
ggaagagggtaagag

SEQ ID NO: 138783 - DNA, 15 bp, Homo sapiens
aggaagagggtaaga

SEQ ID NO: 138784 - DNA, 15 bp, Homo sapiens
taggaagagggtaag

SEQ ID NO: 138785 - DNA, 15 bp, Homo sapiens
ataggaagagggtaa

SEQ ID NO: 138786 - DNA, 15 bp, Homo sapiens
cataggaagagggta

SEQ ID NO: 138787 - DNA, 15 bp, Homo sapiens
gcataggaagagggt

SEQ ID NO: 138788 - DNA, 15 bp, Homo sapiens
agcataggaagaggg

SEQ ID NO: 138789 - DNA, 15 bp, Homo sapiens
cagcataggaagagg

SEQ ID NO: 138790 - DNA, 15 bp, Homo sapiens
gcagcataggaagag

SEQ ID NO: 138791 - DNA, 15 bp, Homo sapiens
agcagcataggaaga

SEQ ID NO: 138792 - DNA, 15 bp, Homo sapiens
gagcagcataggaag

SEQ ID NO: 138793 - DNA, 15 bp, Homo sapiens
agagcagcataggaa

SEQ ID NO: 138794 - DNA, 15 bp, Homo sapiens
cagagcagcatagga

SEQ ID NO: 138795 - DNA, 15 bp, Homo sapiens
ccagagcagcatagg

SEQ ID NO: 138796 - DNA, 15 bp, Homo sapiens
tccagagcagcatag

SEQ ID NO: 138797 - DNA, 15 bp, Homo sapiens
ctccagagcagcata

SEQ ID NO: 138798 - DNA, 15 bp, Homo sapiens
actccagagcagcat

SEQ ID NO: 138799 - DNA, 15 bp, Homo sapiens
cactccagagcagca

SEQ ID NO: 138800 - DNA, 15 bp, Homo sapiens
gcactccagagcagc

SEQ ID NO: 138801 - DNA, 15 bp, Homo sapiens
ggcactccagagcag

SEQ ID NO: 138802 - DNA, 15 bp, Homo sapiens
aggcactccagagca

SEQ ID NO: 138803 - DNA, 15 bp, Homo sapiens
aaggcactccagagc

SEQ ID NO: 138804 - DNA, 15 bp, Homo sapiens
gaaggcactccagag

SEQ ID NO: 138805 - DNA, 15 bp, Homo sapiens
tgaaggcactccaga

SEQ ID NO: 138806 - DNA, 15 bp, Homo sapiens
ctgaaggcactccag

SEQ ID NO: 138807 - DNA, 15 bp, Homo sapiens
gctgaaggcactcca

SEQ ID NO: 138808 - DNA, 15 bp, Homo sapiens
agctgaaggcactcc

SEQ ID NO: 138809 - DNA, 15 bp, Homo sapiens
gagctgaaggcactc

SEQ ID NO: 138810 - DNA, 15 bp, Homo sapiens
agagctgaaggcact

SEQ ID NO: 138811 - DNA, 15 bp, Homo sapiens
cagagctgaaggcac

SEQ ID NO: 138812 - DNA, 15 bp, Homo sapiens
gcagagctgaaggca

SEQ ID NO: 138813 - DNA, 15 bp, Homo sapiens
ggcagagctgaaggc

SEQ ID NO: 138814 - DNA, 15 bp, Homo sapiens
aggcagagctgaagg

SEQ ID NO: 138815 - DNA, 15 bp, Homo sapiens
gaggcagagctgaag

SEQ ID NO: 138816 - DNA, 15 bp, Homo sapiens
agaggcagagctgaa

SEQ ID NO: 138817 - DNA, 15 bp, Homo sapiens
aagaggcagagctga

SEQ ID NO: 138818 - DNA, 15 bp, Homo sapiens
gaagaggcagagctg

SEQ ID NO: 138819 - DNA, 15 bp, Homo sapiens
agaagaggcagagct

SEQ ID NO: 138820 - DNA, 15 bp, Homo sapiens
aagaagaggcagagc

SEQ ID NO: 138821 - DNA, 15 bp, Homo sapiens
taagaagaggcagag

SEQ ID NO: 138822 - DNA, 15 bp, Homo sapiens
ataagaagaggcaga

SEQ ID NO: 138823 - DNA, 15 bp, Homo sapiens
gataagaagaggcag

SEQ ID NO: 138824 - DNA, 15 bp, Homo sapiens
ggataagaagaggca

SEQ ID NO: 138825 - DNA, 15 bp, Homo sapiens
gggataagaagaggc

SEQ ID NO: 138826 - DNA, 15 bp, Homo sapiens
agggataagaagagg

SEQ ID NO: 138827 - DNA, 15 bp, Homo sapiens
cagggataagaagag

SEQ ID NO: 138828 - DNA, 15 bp, Homo sapiens
acagggataagaaga

SEQ ID NO: 138829 - DNA, 15 bp, Homo sapiens
gacagggataagaag

SEQ ID NO: 138830 - DNA, 15 bp, Homo sapiens
agacagggataagaa

SEQ ID NO: 138831 - DNA, 15 bp, Homo sapiens
cagacagggataaga

SEQ ID NO: 138832 - DNA, 15 bp, Homo sapiens
gcagacagggataag

SEQ ID NO: 138833 - DNA, 15 bp, Homo sapiens
tgcagacagggataa

SEQ ID NO: 138834 - DNA, 15 bp, Homo sapiens
ctgcagacagggata

SEQ ID NO: 138835 - DNA, 15 bp, Homo sapiens
gctgcagacagggat

SEQ ID NO: 138836 - DNA, 15 bp, Homo sapiens
agctgcagacaggga

SEQ ID NO: 138837 - DNA, 15 bp, Homo sapiens
aagctgcagacaggg

SEQ ID NO: 138838 - DNA, 15 bp, Homo sapiens
caagctgcagacagg

SEQ ID NO: 138839 - DNA, 15 bp, Homo sapiens
tcaagctgcagacag

SEQ ID NO: 138840 - DNA, 15 bp, Homo sapiens
ttcaagctgcagaca

SEQ ID NO: 138841 - DNA, 15 bp, Homo sapiens
tttcaagctgcagac

SEQ ID NO: 138842 - DNA, 15 bp, Homo sapiens
ctttcaagctgcaga

SEQ ID NO: 138843 - DNA, 15 bp, Homo sapiens
gctttcaagctgcag

SEQ ID NO: 138844 - DNA, 15 bp, Homo sapiens
agctttcaagctgca

SEQ ID NO: 138845 - DNA, 15 bp, Homo sapiens
tagctttcaagctgc

SEQ ID NO: 138846 - DNA, 15 bp, Homo sapiens
gtagctttcaagctg

SEQ ID NO: 138847 - DNA, 15 bp, Homo sapiens
agtagctttcaagct

SEQ ID NO: 138848 - DNA, 15 bp, Homo sapiens
gagtagctttcaagc

SEQ ID NO: 138849 - DNA, 15 bp, Homo sapiens
tgagtagctttcaag

SEQ ID NO: 138850 - DNA, 15 bp, Homo sapiens
ctgagtagctttcaa

SEQ ID NO: 138851 - DNA, 15 bp, Homo sapiens
gctgagtagctttca

SEQ ID NO: 138852 - DNA, 15 bp, Homo sapiens
agctgagtagctttc

SEQ ID NO: 138853 - DNA, 15 bp, Homo sapiens
aagctgagtagcttt

SEQ ID NO: 138854 - DNA, 15 bp, Homo sapiens
gaagctgagtagctt

SEQ ID NO: 138855 - DNA, 15 bp, Homo sapiens
agaagctgagtagct

SEQ ID NO: 138856 - DNA, 15 bp, Homo sapiens
aagaagctgagtagc

SEQ ID NO: 138857 - DNA, 15 bp, Homo sapiens
taagaagctgagtag

SEQ ID NO: 138858 - DNA, 15 bp, Homo sapiens
ttaagaagctgagta

SEQ ID NO: 138859 - DNA, 15 bp, Homo sapiens
tttaagaagctgagt

SEQ ID NO: 138860 - DNA, 15 bp, Homo sapiens
gtttaagaagctgag

SEQ ID NO: 138861 - DNA, 15 bp, Homo sapiens
tgtttaagaagctga

SEQ ID NO: 138862 - DNA, 15 bp, Homo sapiens
gtgtttaagaagctg

SEQ ID NO: 138863 - DNA, 15 bp, Homo sapiens
ggtgtttaagaagct

SEQ ID NO: 138864 - DNA, 15 bp, Homo sapiens
aggtgtttaagaagc

SEQ ID NO: 138865 - DNA, 15 bp, Homo sapiens
aaggtgtttaagaag

SEQ ID NO: 138866 - DNA, 15 bp, Homo sapiens
gaaggtgtttaagaa

SEQ ID NO: 138867 - DNA, 15 bp, Homo sapiens
tgaaggtgtttaaga

SEQ ID NO: 138868 - DNA, 15 bp, Homo sapiens
ctgaaggtgtttaag

SEQ ID NO: 138869 - DNA, 15 bp, Homo sapiens
cctgaaggtgtttaa

SEQ ID NO: 138870 - DNA, 15 bp, Homo sapiens
tcctgaaggtgttta

SEQ ID NO: 138871 - DNA, 15 bp, Homo sapiens
atcctgaaggtgttt

SEQ ID NO: 138872 - DNA, 15 bp, Homo sapiens
tatcctgaaggtgtt

SEQ ID NO: 138873 - DNA, 15 bp, Homo sapiens
ttatcctgaaggtgt

SEQ ID NO: 138874 - DNA, 15 bp, Homo sapiens
tttatcctgaaggtg

SEQ ID NO: 138875 - DNA, 15 bp, Homo sapiens
ctttatcctgaaggt

SEQ ID NO: 138876 - DNA, 15 bp, Homo sapiens
cctttatcctgaagg

SEQ ID NO: 138877 - DNA, 15 bp, Homo sapiens
ccctttatcctgaag

SEQ ID NO: 138878 - DNA, 15 bp, Homo sapiens
tccctttatcctgaa

SEQ ID NO: 138879 - DNA, 15 bp, Homo sapiens
gtccctttatcctga

SEQ ID NO: 138880 - DNA, 15 bp, Homo sapiens
agtccctttatcctg

SEQ ID NO: 138881 - DNA, 15 bp, Homo sapiens
tagtccctttatcct

SEQ ID NO: 138882 - DNA, 15 bp, Homo sapiens
ttagtccctttatcc

SEQ ID NO: 138883 - DNA, 15 bp, Homo sapiens
cttagtccctttatc

SEQ ID NO: 138884 - DNA, 15 bp, Homo sapiens
ccttagtccctttat

SEQ ID NO: 138885 - DNA, 15 bp, Homo sapiens
cccttagtcccttta

SEQ ID NO: 138886 - DNA, 15 bp, Homo sapiens
ccccttagtcccttt

SEQ ID NO: 138887 - DNA, 15 bp, Homo sapiens
gccccttagtccctt

SEQ ID NO: 138888 - DNA, 15 bp, Homo sapiens
tgccccttagtccct

SEQ ID NO: 138889 - DNA, 15 bp, Homo sapiens
atgccccttagtccc

SEQ ID NO: 138890 - DNA, 15 bp, Homo sapiens
tatgccccttagtcc

SEQ ID NO: 138891 - DNA, 15 bp, Homo sapiens
ttatgccccttagtc

SEQ ID NO: 138892 - DNA, 15 bp, Homo sapiens
gttatgccccttagt

SEQ ID NO: 138893 - DNA, 15 bp, Homo sapiens
agttatgccccttag

SEQ ID NO: 138894 - DNA, 15 bp, Homo sapiens
cagttatgcccctta

SEQ ID NO: 138895 - DNA, 15 bp, Homo sapiens
gcagttatgcccctt

SEQ ID NO: 138896 - DNA, 15 bp, Homo sapiens
ggcagttatgcccct

SEQ ID NO: 138897 - DNA, 15 bp, Homo sapiens
aggcagttatgcccc

SEQ ID NO: 138898 - DNA, 15 bp, Homo sapiens
gaggcagttatgccc

SEQ ID NO: 138899 - DNA, 15 bp, Homo sapiens
ggaggcagttatgcc

SEQ ID NO: 138900 - DNA, 15 bp, Homo sapiens
gggaggcagttatgc

SEQ ID NO: 138901 - DNA, 15 bp, Homo sapiens
agggaggcagttatg

SEQ ID NO: 138902 - DNA, 15 bp, Homo sapiens
cagggaggcagttat

SEQ ID NO: 138903 - DNA, 15 bp, Homo sapiens
gcagggaggcagtta

SEQ ID NO: 138904 - DNA, 15 bp, Homo sapiens
agcagggaggcagtt

SEQ ID NO: 138905 - DNA, 15 bp, Homo sapiens
aagcagggaggcagt

SEQ ID NO: 138906 - DNA, 15 bp, Homo sapiens
gaagcagggaggcag

SEQ ID NO: 138907 - DNA, 15 bp, Homo sapiens
tgaagcagggaggca

SEQ ID NO: 138908 - DNA, 15 bp, Homo sapiens
atgaagcagggaggc

SEQ ID NO: 138909 - DNA, 15 bp, Homo sapiens
catgaagcagggagg

SEQ ID NO: 138910 - DNA, 15 bp, Homo sapiens
acatgaagcagggag

SEQ ID NO: 138911 - DNA, 15 bp, Homo sapiens
aacatgaagcaggga

SEQ ID NO: 138912 - DNA, 15 bp, Homo sapiens
aaacatgaagcaggg

SEQ ID NO: 138913 - DNA, 15 bp, Homo sapiens
gaaacatgaagcagg

SEQ ID NO: 138914 - DNA, 15 bp, Homo sapiens
tgaaacatgaagcag

SEQ ID NO: 138915 - DNA, 15 bp, Homo sapiens
ttgaaacatgaagca

SEQ ID NO: 138916 - DNA, 15 bp, Homo sapiens
tttgaaacatgaagc

SEQ ID NO: 138917 - DNA, 15 bp, Homo sapiens
ctttgaaacatgaag

SEQ ID NO: 138918 - DNA, 15 bp, Homo sapiens
tctttgaaacatgaa

SEQ ID NO: 138919 - DNA, 15 bp, Homo sapiens
ctctttgaaacatga

SEQ ID NO: 138920 - DNA, 15 bp, Homo sapiens
tctctttgaaacatg

SEQ ID NO: 138921 - DNA, 15 bp, Homo sapiens
atctctttgaaacat

SEQ ID NO: 138922 - DNA, 15 bp, Homo sapiens
aatctctttgaaaca

SEQ ID NO: 138923 - DNA, 15 bp, Homo sapiens
caatctctttgaaac

SEQ ID NO: 138924 - DNA, 15 bp, Homo sapiens
acaatctctttgaaa

SEQ ID NO: 138925 - DNA, 15 bp, Homo sapiens
gacaatctctttgaa

SEQ ID NO: 138926 - DNA, 15 bp, Homo sapiens
tgacaatctctttga

SEQ ID NO: 138927 - DNA, 15 bp, Homo sapiens
gtgacaatctctttg

SEQ ID NO: 138928 - DNA, 15 bp, Homo sapiens
agtgacaatctcttt

SEQ ID NO: 138929 - DNA, 15 bp, Homo sapiens
cagtgacaatctctt

SEQ ID NO: 138930 - DNA, 15 bp, Homo sapiens
ccagtgacaatctct

SEQ ID NO: 138931 - DNA, 15 bp, Homo sapiens
accagtgacaatctc

SEQ ID NO: 138932 - DNA, 15 bp, Homo sapiens
aaccagtgacaatct

SEQ ID NO: 138933 - DNA, 15 bp, Homo sapiens
aaaccagtgacaatc

SEQ ID NO: 138934 - DNA, 15 bp, Homo sapiens
taaaccagtgacaat

SEQ ID NO: 138935 - DNA, 15 bp, Homo sapiens
gtaaaccagtgacaa

SEQ ID NO: 138936 - DNA, 15 bp, Homo sapiens
cgtaaaccagtgaca

SEQ ID NO: 138937 - DNA, 15 bp, Homo sapiens
acgtaaaccagtgac

SEQ ID NO: 138938 - DNA, 15 bp, Homo sapiens
aacgtaaaccagtga

SEQ ID NO: 138939 - DNA, 15 bp, Homo sapiens
caacgtaaaccagtg

SEQ ID NO: 138940 - DNA, 15 bp, Homo sapiens
ccaacgtaaaccagt

SEQ ID NO: 138941 - DNA, 15 bp, Homo sapiens
gccaacgtaaaccag

SEQ ID NO: 138942 - DNA, 15 bp, Homo sapiens
ggccaacgtaaacca

SEQ ID NO: 138943 - DNA, 15 bp, Homo sapiens
gggccaacgtaaacc

SEQ ID NO: 138944 - DNA, 15 bp, Homo sapiens
agggccaacgtaaac

SEQ ID NO: 138945 - DNA, 15 bp, Homo sapiens
tagggccaacgtaaa

SEQ ID NO: 138946 - DNA, 15 bp, Homo sapiens
ttagggccaacgtaa

SEQ ID NO: 138947 - DNA, 15 bp, Homo sapiens
attagggccaacgta

SEQ ID NO: 138948 - DNA, 15 bp, Homo sapiens
aattagggccaacgt

SEQ ID NO: 138949 - DNA, 15 bp, Homo sapiens
gaattagggccaacg

SEQ ID NO: 138950 - DNA, 15 bp, Homo sapiens
tgaattagggccaac

SEQ ID NO: 138951 - DNA, 15 bp, Homo sapiens
ctgaattagggccaa

SEQ ID NO: 138952 - DNA, 15 bp, Homo sapiens
cctgaattagggcca

SEQ ID NO: 138953 - DNA, 15 bp, Homo sapiens
ccctgaattagggcc

SEQ ID NO: 138954 - DNA, 15 bp, Homo sapiens
cccctgaattagggc

SEQ ID NO: 138955 - DNA, 15 bp, Homo sapiens
acccctgaattaggg

SEQ ID NO: 138956 - DNA, 15 bp, Homo sapiens
cacccctgaattagg

SEQ ID NO: 138957 - DNA, 15 bp, Homo sapiens
ccacccctgaattag

SEQ ID NO: 138958 - DNA, 15 bp, Homo sapiens
accacccctgaatta

SEQ ID NO: 138959 - DNA, 15 bp, Homo sapiens
caccacccctgaatt

SEQ ID NO: 138960 - DNA, 15 bp, Homo sapiens
tcaccacccctgaat

SEQ ID NO: 138961 - DNA, 15 bp, Homo sapiens
ttcaccacccctgaa

SEQ ID NO: 138962 - DNA, 15 bp, Homo sapiens
attcaccacccctga

SEQ ID NO: 138963 - DNA, 15 bp, Homo sapiens
aattcaccacccctg

SEQ ID NO: 138964 - DNA, 15 bp, Homo sapiens
caattcaccacccct

SEQ ID NO: 138965 - DNA, 15 bp, Homo sapiens
tcaattcaccacccc

SEQ ID NO: 138966 - DNA, 15 bp, Homo sapiens
gtcaattcaccaccc

SEQ ID NO: 138967 - DNA, 15 bp, Homo sapiens
tgtcaattcaccacc

SEQ ID NO: 138968 - DNA, 15 bp, Homo sapiens
ctgtcaattcaccac

SEQ ID NO: 138969 - DNA, 15 bp, Homo sapiens
actgtcaattcacca

SEQ ID NO: 138970 - DNA, 15 bp, Homo sapiens
tactgtcaattcacc

SEQ ID NO: 138971 - DNA, 15 bp, Homo sapiens
ctactgtcaattcac

SEQ ID NO: 138972 - DNA, 15 bp, Homo sapiens
actactgtcaattca

SEQ ID NO: 138973 - DNA, 15 bp, Homo sapiens
aactactgtcaattc

SEQ ID NO: 138974 - DNA, 15 bp, Homo sapiens
taactactgtcaatt

SEQ ID NO: 138975 - DNA, 15 bp, Homo sapiens
gtaactactgtcaat

SEQ ID NO: 138976 - DNA, 15 bp, Homo sapiens
ggtaactactgtcaa

SEQ ID NO: 138977 - DNA, 15 bp, Homo sapiens
aggtaactactgtca

SEQ ID NO: 138978 - DNA, 15 bp, Homo sapiens
caggtaactactgtc

SEQ ID NO: 138979 - DNA, 15 bp, Homo sapiens
tcaggtaactactgt

SEQ ID NO: 138980 - DNA, 15 bp, Homo sapiens
ctcaggtaactactg

SEQ ID NO: 138981 - DNA, 15 bp, Homo sapiens
gctcaggtaactact

SEQ ID NO: 138982 - DNA, 15 bp, Homo sapiens
ggctcaggtaactac

SEQ ID NO: 138983 - DNA, 15 bp, Homo sapiens
aggctcaggtaacta

SEQ ID NO: 138984 - DNA, 15 bp, Homo sapiens
caggctcaggtaact

SEQ ID NO: 138985 - DNA, 15 bp, Homo sapiens
gcaggctcaggtaac

SEQ ID NO: 138986 - DNA, 15 bp, Homo sapiens
ggcaggctcaggtaa

SEQ ID NO: 138987 - DNA, 15 bp, Homo sapiens
gggcaggctcaggta

SEQ ID NO: 138988 - DNA, 15 bp, Homo sapiens
agggcaggctcaggt

SEQ ID NO: 138989 - DNA, 15 bp, Homo sapiens
gagggcaggctcagg

SEQ ID NO: 138990 - DNA, 15 bp, Homo sapiens
tgagggcaggctcag

SEQ ID NO: 138991 - DNA, 15 bp, Homo sapiens
atgagggcaggctca

SEQ ID NO: 138992 - DNA, 15 bp, Homo sapiens
catgagggcaggctc

SEQ ID NO: 138993 - DNA, 15 bp, Homo sapiens
tcatgagggcaggct

SEQ ID NO: 138994 - DNA, 15 bp, Homo sapiens
atcatgagggcaggc

SEQ ID NO: 138995 - DNA, 15 bp, Homo sapiens
aatcatgagggcagg

SEQ ID NO: 138996 - DNA, 15 bp, Homo sapiens
aaatcatgagggcag

SEQ ID NO: 138997 - DNA, 15 bp, Homo sapiens
caaatcatgagggca

SEQ ID NO: 138998 - DNA, 15 bp, Homo sapiens
tcaaatcatgagggc

SEQ ID NO: 138999 - DNA, 15 bp, Homo sapiens
ttcaaatcatgaggg

SEQ ID NO: 139000 - DNA, 15 bp, Homo sapiens
attcaaatcatgagg

SEQ ID NO: 139001 - DNA, 15 bp, Homo sapiens
cattcaaatcatgag

SEQ ID NO: 139002 - DNA, 15 bp, Homo sapiens
gcattcaaatcatga

SEQ ID NO: 139003 - DNA, 15 bp, Homo sapiens
tgcattcaaatcatg

SEQ ID NO: 139004 - DNA, 15 bp, Homo sapiens
atgcattcaaatcat

SEQ ID NO: 139005 - DNA, 15 bp, Homo sapiens
gatgcattcaaatca

SEQ ID NO: 139006 - DNA, 15 bp, Homo sapiens
tgatgcattcaaatc

SEQ ID NO: 139007 - DNA, 15 bp, Homo sapiens
atgatgcattcaaat

SEQ ID NO: 139008 - DNA, 15 bp, Homo sapiens
gatgatgcattcaaa

SEQ ID NO: 139009 - DNA, 15 bp, Homo sapiens
agatgatgcattcaa

SEQ ID NO: 139010 - DNA, 15 bp, Homo sapiens
gagatgatgcattca

SEQ ID NO: 139011 - DNA, 15 bp, Homo sapiens
ggagatgatgcattc

SEQ ID NO: 139012 - DNA, 15 bp, Homo sapiens
gggagatgatgcatt

SEQ ID NO: 139013 - DNA, 15 bp, Homo sapiens
tgggagatgatgcat

SEQ ID NO: 139014 - DNA, 15 bp, Homo sapiens
ctgggagatgatgca

SEQ ID NO: 139015 - DNA, 15 bp, Homo sapiens
actgggagatgatgc

SEQ ID NO: 139016 - DNA, 15 bp, Homo sapiens
gactgggagatgatg

SEQ ID NO: 139017 - DNA, 15 bp, Homo sapiens
agactgggagatgat

SEQ ID NO: 139018 - DNA, 15 bp, Homo sapiens
cagactgggagatga

SEQ ID NO: 139019 - DNA, 15 bp, Homo sapiens
gcagactgggagatg

SEQ ID NO: 139020 - DNA, 15 bp, Homo sapiens
ggcagactgggagat

SEQ ID NO: 139021 - DNA, 15 bp, Homo sapiens
gggcagactgggaga

SEQ ID NO: 139022 - DNA, 15 bp, Homo sapiens
agggcagactgggag

SEQ ID NO: 139023 - DNA, 15 bp, Homo sapiens
gagggcagactggga

SEQ ID NO: 139024 - DNA, 15 bp, Homo sapiens
agagggcagactggg

SEQ ID NO: 139025 - DNA, 15 bp, Homo sapiens
gagagggcagactgg

SEQ ID NO: 139026 - DNA, 15 bp, Homo sapiens
ggagagggcagactg

SEQ ID NO: 139027 - DNA, 15 bp, Homo sapiens
gggagagggcagact

SEQ ID NO: 139028 - DNA, 15 bp, Homo sapiens
tgggagagggcagac

SEQ ID NO: 139029 - DNA, 15 bp, Homo sapiens
gtgggagagggcaga

SEQ ID NO: 139030 - DNA, 15 bp, Homo sapiens
agtgggagagggcag

SEQ ID NO: 139031 - DNA, 15 bp, Homo sapiens
aagtgggagagggca

SEQ ID NO: 139032 - DNA, 15 bp, Homo sapiens
aaagtgggagagggc

SEQ ID NO: 139033 - DNA, 15 bp, Homo sapiens
caaagtgggagaggg

SEQ ID NO: 139034 - DNA, 15 bp, Homo sapiens
tcaaagtgggagagg

SEQ ID NO: 139035 - DNA, 15 bp, Homo sapiens
ttcaaagtgggagag

SEQ ID NO: 139036 - DNA, 15 bp, Homo sapiens
attcaaagtgggaga

SEQ ID NO: 139037 - DNA, 15 bp, Homo sapiens
gattcaaagtgggag

SEQ ID NO: 139038 - DNA, 15 bp, Homo sapiens
agattcaaagtggga

SEQ ID NO: 139039 - DNA, 15 bp, Homo sapiens
aagattcaaagtggg

SEQ ID NO: 139040 - DNA, 15 bp, Homo sapiens
taagattcaaagtgg

SEQ ID NO: 139041 - DNA, 15 bp, Homo sapiens
gtaagattcaaagtg

SEQ ID NO: 139042 - DNA, 15 bp, Homo sapiens
ggtaagattcaaagt

SEQ ID NO: 139043 - DNA, 15 bp, Homo sapiens
aggtaagattcaaag

SEQ ID NO: 139044 - DNA, 15 bp, Homo sapiens
tggatggactagagt

SEQ ID NO: 139045 - DNA, 15 bp, Homo sapiens
ctggatggactagag

SEQ ID NO: 139046 - DNA, 15 bp, Homo sapiens
cctggatggactaga

SEQ ID NO: 139047 - DNA, 15 bp, Homo sapiens
acctggatggactag

SEQ ID NO: 139048 - DNA, 15 bp, Homo sapiens
aacctggatggacta

SEQ ID NO: 139049 - DNA, 15 bp, Homo sapiens
caacctggatggact

SEQ ID NO: 139050 - DNA, 15 bp, Homo sapiens
ccaacctggatggac

SEQ ID NO: 139051 - DNA, 15 bp, Homo sapiens
tccaacctggatgga

SEQ ID NO: 139052 - DNA, 15 bp, Homo sapiens
atccaacctggatgg

SEQ ID NO: 139053 - DNA, 15 bp, Homo sapiens
aatccaacctggatg

SEQ ID NO: 139054 - DNA, 15 bp, Homo sapiens
caatccaacctggat

SEQ ID NO: 139055 - DNA, 15 bp, Homo sapiens
gcaatccaacctgga

SEQ ID NO: 139056 - DNA, 15 bp, Homo sapiens
tgcaatccaacctgg

SEQ ID NO: 139057 - DNA, 15 bp, Homo sapiens
gtgcaatccaacctg

SEQ ID NO: 139058 - DNA, 15 bp, Homo sapiens
cgtgcaatccaacct

SEQ ID NO: 139059 - DNA, 15 bp, Homo sapiens
acgtgcaatccaacc

SEQ ID NO: 139060 - DNA, 15 bp, Homo sapiens
gacgtgcaatccaac

SEQ ID NO: 139061 - DNA, 15 bp, Homo sapiens
agacgtgcaatccaa

SEQ ID NO: 139062 - DNA, 15 bp, Homo sapiens
cagacgtgcaatcca

SEQ ID NO: 139063 - DNA, 15 bp, Homo sapiens
acagacgtgcaatcc

SEQ ID NO: 139064 - DNA, 15 bp, Homo sapiens
cacagacgtgcaatc

SEQ ID NO: 139065 - DNA, 15 bp, Homo sapiens
ccacagacgtgcaat

SEQ ID NO: 139066 - DNA, 15 bp, Homo sapiens
tccacagacgtgcaa

SEQ ID NO: 139067 - DNA, 15 bp, Homo sapiens
ttccacagacgtgca

SEQ ID NO: 139068 - DNA, 15 bp, Homo sapiens
attccacagacgtgc

SEQ ID NO: 139069 - DNA, 15 bp, Homo sapiens
cattccacagacgtg

SEQ ID NO: 139070 - DNA, 15 bp, Homo sapiens
acattccacagacgt

SEQ ID NO: 139071 - DNA, 15 bp, Homo sapiens
gacattccacagacg

SEQ ID NO: 139072 - DNA, 15 bp, Homo sapiens
ggacattccacagac

SEQ ID NO: 139073 - DNA, 15 bp, Homo sapiens
tggacattccacaga

SEQ ID NO: 139074 - DNA, 15 bp, Homo sapiens
gtggacattccacag

SEQ ID NO: 139075 - DNA, 15 bp, Homo sapiens
ggtggacattccaca

SEQ ID NO: 139076 - DNA, 15 bp, Homo sapiens
gggtggacattccac

SEQ ID NO: 139077 - DNA, 15 bp, Homo sapiens
ggggtggacattcca

SEQ ID NO: 139078 - DNA, 15 bp, Homo sapiens
gggggtggacattcc

SEQ ID NO: 139079 - DNA, 15 bp, Homo sapiens
agggggtggacattc

SEQ ID NO: 139080 - DNA, 15 bp, Homo sapiens
cagggggtggacatt

SEQ ID NO: 139081 - DNA, 15 bp, Homo sapiens
gcagggggtggacat

SEQ ID NO: 139082 - DNA, 15 bp, Homo sapiens
agcagggggtggaca

SEQ ID NO: 139083 - DNA, 15 bp, Homo sapiens
cagcagggggtggac

SEQ ID NO: 139084 - DNA, 15 bp, Homo sapiens
ccagcagggggtgga

SEQ ID NO: 139085 - DNA, 15 bp, Homo sapiens
tccagcagggggtgg

SEQ ID NO: 139086 - DNA, 15 bp, Homo sapiens
ttccagcagggggtg

SEQ ID NO: 139087 - DNA, 15 bp, Homo sapiens
attccagcagggggt

SEQ ID NO: 139088 - DNA, 15 bp, Homo sapiens
cattccagcaggggg

SEQ ID NO: 139089 - DNA, 15 bp, Homo sapiens
acattccagcagggg

SEQ ID NO: 139090 - DNA, 15 bp, Homo sapiens
tacattccagcaggg

SEQ ID NO: 139091 - DNA, 15 bp, Homo sapiens
ctacattccagcagg

SEQ ID NO: 139092 - DNA, 15 bp, Homo sapiens
gctacattccagcag

SEQ ID NO: 139093 - DNA, 15 bp, Homo sapiens
tgctacattccagca

SEQ ID NO: 139094 - DNA, 15 bp, Homo sapiens
atgctacattccagc

SEQ ID NO: 139095 - DNA, 15 bp, Homo sapiens
gatgctacattccag

SEQ ID NO: 139096 - DNA, 15 bp, Homo sapiens
agatgctacattcca

SEQ ID NO: 139097 - DNA, 15 bp, Homo sapiens
gagatgctacattcc

SEQ ID NO: 139098 - DNA, 15 bp, Homo sapiens
agagatgctacattc

SEQ ID NO: 139099 - DNA, 15 bp, Homo sapiens
cagagatgctacatt

SEQ ID NO: 139100 - DNA, 15 bp, Homo sapiens
tcagagatgctacat

SEQ ID NO: 139101 - DNA, 15 bp, Homo sapiens
ttcagagatgctaca

SEQ ID NO: 139102 - DNA, 15 bp, Homo sapiens
cttcagagatgctac

SEQ ID NO: 139103 - DNA, 15 bp, Homo sapiens
gcttcagagatgcta

SEQ ID NO: 139104 - DNA, 15 bp, Homo sapiens
ggcttcagagatgct

SEQ ID NO: 139105 - DNA, 15 bp, Homo sapiens
aggcttcagagatgc

SEQ ID NO: 139106 - DNA, 15 bp, Homo sapiens
taggcttcagagatg

SEQ ID NO: 139107 - DNA, 15 bp, Homo sapiens
ctaggcttcagagat

SEQ ID NO: 139108 - DNA, 15 bp, Homo sapiens
cctaggcttcagaga

SEQ ID NO: 139109 - DNA, 15 bp, Homo sapiens
tcctaggcttcagag

SEQ ID NO: 139110 - DNA, 15 bp, Homo sapiens
gtcctaggcttcaga

SEQ ID NO: 139111 - DNA, 15 bp, Homo sapiens
agtcctaggcttcag

SEQ ID NO: 139112 - DNA, 15 bp, Homo sapiens
gagtcctaggcttca

SEQ ID NO: 139113 - DNA, 15 bp, Homo sapiens
agagtcctaggcttc

SEQ ID NO: 139114 - DNA, 15 bp, Homo sapiens
cagagtcctaggctt

SEQ ID NO: 139115 - DNA, 15 bp, Homo sapiens
acagagtcctaggct

SEQ ID NO: 139116 - DNA, 15 bp, Homo sapiens
cacagagtcctaggc

SEQ ID NO: 139117 - DNA, 15 bp, Homo sapiens
gcacagagtcctagg

SEQ ID NO: 139118 - DNA, 15 bp, Homo sapiens
ggcacagagtcctag

SEQ ID NO: 139119 - DNA, 15 bp, Homo sapiens
aggcacagagtccta

SEQ ID NO: 139120 - DNA, 15 bp, Homo sapiens
aaggcacagagtcct

SEQ ID NO: 139121 - DNA, 15 bp, Homo sapiens
gaaggcacagagtcc

SEQ ID NO: 139122 - DNA, 15 bp, Homo sapiens
ggaaggcacagagtc

SEQ ID NO: 139123 - DNA, 15 bp, Homo sapiens
tggaaggcacagagt

SEQ ID NO: 139124 - DNA, 15 bp, Homo sapiens
atggaaggcacagag

SEQ ID NO: 139125 - DNA, 15 bp, Homo sapiens
gatggaaggcacaga

SEQ ID NO: 139126 - DNA, 15 bp, Homo sapiens
agatggaaggcacag

SEQ ID NO: 139127 - DNA, 15 bp, Homo sapiens
aagatggaaggcaca

SEQ ID NO: 139128 - DNA, 15 bp, Homo sapiens
aaagatggaaggcac

SEQ ID NO: 139129 - DNA, 15 bp, Homo sapiens
caaagatggaaggca

SEQ ID NO: 139130 - DNA, 15 bp, Homo sapiens
gcaaagatggaaggc

SEQ ID NO: 139131 - DNA, 15 bp, Homo sapiens
tgcaaagatggaagg

SEQ ID NO: 139132 - DNA, 15 bp, Homo sapiens
atgcaaagatggaag

SEQ ID NO: 139133 - DNA, 15 bp, Homo sapiens
gatgcaaagatggaa

SEQ ID NO: 139134 - DNA, 15 bp, Homo sapiens
ggatgcaaagatgga

SEQ ID NO: 139135 - DNA, 15 bp, Homo sapiens
tggatgcaaagatgg

SEQ ID NO: 139136 - DNA, 15 bp, Homo sapiens
gtggatgcaaagatg

SEQ ID NO: 139137 - DNA, 15 bp, Homo sapiens
tgtggatgcaaagat

SEQ ID NO: 139138 - DNA, 15 bp, Homo sapiens
ctgtggatgcaaaga

SEQ ID NO: 139139 - DNA, 15 bp, Homo sapiens
actgtggatgcaaag

SEQ ID NO: 139140 - DNA, 15 bp, Homo sapiens
cactgtggatgcaaa

SEQ ID NO: 139141 - DNA, 15 bp, Homo sapiens
gcactgtggatgcaa

SEQ ID NO: 139142 - DNA, 15 bp, Homo sapiens
tgcactgtggatgca

SEQ ID NO: 139143 - DNA, 15 bp, Homo sapiens
ttgcactgtggatgc

SEQ ID NO: 139144 - DNA, 15 bp, Homo sapiens
gttgcactgtggatg

SEQ ID NO: 139145 - DNA, 15 bp, Homo sapiens
tgttgcactgtggat

SEQ ID NO: 139146 - DNA, 15 bp, Homo sapiens
atgttgcactgtgga

SEQ ID NO: 139147 - DNA, 15 bp, Homo sapiens
aatgttgcactgtgg

SEQ ID NO: 139148 - DNA, 15 bp, Homo sapiens
aaatgttgcactgtg

SEQ ID NO: 139149 - DNA, 15 bp, Homo sapiens
aaaatgttgcactgt

SEQ ID NO: 139150 - DNA, 15 bp, Homo sapiens
caaaatgttgcactg

SEQ ID NO: 139151 - DNA, 15 bp, Homo sapiens
tcaaaatgttgcact

SEQ ID NO: 139152 - DNA, 15 bp, Homo sapiens
ttcaaaatgttgcac

SEQ ID NO: 139153 - DNA, 15 bp, Homo sapiens
attcaaaatgttgca

SEQ ID NO: 139154 - DNA, 15 bp, Homo sapiens
cattcaaaatgttgc

SEQ ID NO: 139155 - DNA, 15 bp, Homo sapiens
acattcaaaatgttg

SEQ ID NO: 139156 - DNA, 15 bp, Homo sapiens
aacattcaaaatgtt

SEQ ID NO: 139157 - DNA, 15 bp, Homo sapiens
gaacattcaaaatgt

SEQ ID NO: 139158 - DNA, 15 bp, Homo sapiens
tgaacattcaaaatg

SEQ ID NO: 139159 - DNA, 15 bp, Homo sapiens
atgaacattcaaaat

SEQ ID NO: 139160 - DNA, 15 bp, Homo sapiens
aatgaacattcaaaa

SEQ ID NO: 139161 - DNA, 15 bp, Homo sapiens
aaatgaacattcaaa

SEQ ID NO: 139162 - DNA, 15 bp, Homo sapiens
aaaatgaacattcaa

SEQ ID NO: 139163 - DNA, 15 bp, Homo sapiens
caaaatgaacattca

SEQ ID NO: 139164 - DNA, 15 bp, Homo sapiens
ccaaaatgaacattc

SEQ ID NO: 139165 - DNA, 15 bp, Homo sapiens
accaaaatgaacatt

SEQ ID NO: 139166 - DNA, 15 bp, Homo sapiens
gaccaaaatgaacat

SEQ ID NO: 139167 - DNA, 15 bp, Homo sapiens
agaccaaaatgaaca

SEQ ID NO: 139168 - DNA, 15 bp, Homo sapiens
gagaccaaaatgaac

SEQ ID NO: 139169 - DNA, 15 bp, Homo sapiens
agagaccaaaatgaa

SEQ ID NO: 139170 - DNA, 15 bp, Homo sapiens
aagagaccaaaatga

SEQ ID NO: 139171 - DNA, 15 bp, Homo sapiens
taagagaccaaaatg

SEQ ID NO: 139172 - DNA, 15 bp, Homo sapiens
ttaagagaccaaaat

SEQ ID NO: 139173 - DNA, 15 bp, Homo sapiens
tttaagagaccaaaa

SEQ ID NO: 139174 - DNA, 15 bp, Homo sapiens
atttaagagaccaaa

SEQ ID NO: 139175 - DNA, 15 bp, Homo sapiens
aatttaagagaccaa

SEQ ID NO: 139176 - DNA, 15 bp, Homo sapiens
gaatttaagagacca

SEQ ID NO: 139177 - DNA, 15 bp, Homo sapiens
tgaatttaagagacc

SEQ ID NO: 139178 - DNA, 15 bp, Homo sapiens
ctgaatttaagagac

SEQ ID NO: 139179 - DNA, 15 bp, Homo sapiens
actgaatttaagaga

SEQ ID NO: 139180 - DNA, 15 bp, Homo sapiens
gactgaatttaagag

SEQ ID NO: 139181 - DNA, 15 bp, Homo sapiens
agactgaatttaaga

SEQ ID NO: 139182 - DNA, 15 bp, Homo sapiens
aagactgaatttaag

SEQ ID NO: 139183 - DNA, 15 bp, Homo sapiens
caagactgaatttaa

SEQ ID NO: 139184 - DNA, 15 bp, Homo sapiens
acaagactgaattta

SEQ ID NO: 139185 - DNA, 15 bp, Homo sapiens
cacaagactgaattt

SEQ ID NO: 139186 - DNA, 15 bp, Homo sapiens
tcacaagactgaatt

SEQ ID NO: 139187 - DNA, 15 bp, Homo sapiens
ctcacaagactgaat

SEQ ID NO: 139188 - DNA, 15 bp, Homo sapiens
cctcacaagactgaa

SEQ ID NO: 139189 - DNA, 15 bp, Homo sapiens
gcctcacaagactga

SEQ ID NO: 139190 - DNA, 15 bp, Homo sapiens
agcctcacaagactg

SEQ ID NO: 139191 - DNA, 15 bp, Homo sapiens
gagcctcacaagact

SEQ ID NO: 139192 - DNA, 15 bp, Homo sapiens
agagcctcacaagac

SEQ ID NO: 139193 - DNA, 15 bp, Homo sapiens
aagagcctcacaaga

SEQ ID NO: 139194 - DNA, 15 bp, Homo sapiens
taagagcctcacaag

SEQ ID NO: 139195 - DNA, 15 bp, Homo sapiens
ctaagagcctcacaa

SEQ ID NO: 139196 - DNA, 15 bp, Homo sapiens
gctaagagcctcaca

SEQ ID NO: 139197 - DNA, 15 bp, Homo sapiens
ggctaagagcctcac

SEQ ID NO: 139198 - DNA, 15 bp, Homo sapiens
aggctaagagcctca

SEQ ID NO: 139199 - DNA, 15 bp, Homo sapiens
taggctaagagcctc

SEQ ID NO: 139200 - DNA, 15 bp, Homo sapiens
ctaggctaagagcct

SEQ ID NO: 139201 - DNA, 15 bp, Homo sapiens
actaggctaagagcc

SEQ ID NO: 139202 - DNA, 15 bp, Homo sapiens
aactaggctaagagc

SEQ ID NO: 139203 - DNA, 15 bp, Homo sapiens
aaactaggctaagag

SEQ ID NO: 139204 - DNA, 15 bp, Homo sapiens
caaactaggctaaga

SEQ ID NO: 139205 - DNA, 15 bp, Homo sapiens
ccaaactaggctaag

SEQ ID NO: 139206 - DNA, 15 bp, Homo sapiens
tccaaactaggctaa

SEQ ID NO: 139207 - DNA, 15 bp, Homo sapiens
ttccaaactaggcta

SEQ ID NO: 139208 - DNA, 15 bp, Homo sapiens
attccaaactaggct

SEQ ID NO: 139209 - DNA, 15 bp, Homo sapiens
aattccaaactaggc

SEQ ID NO: 139210 - DNA, 15 bp, Homo sapiens
caattccaaactagg

SEQ ID NO: 139211 - DNA, 15 bp, Homo sapiens
ccaattccaaactag

SEQ ID NO: 139212 - DNA, 15 bp, Homo sapiens
accaattccaaacta

SEQ ID NO: 139213 - DNA, 15 bp, Homo sapiens
gaccaattccaaact

SEQ ID NO: 139214 - DNA, 15 bp, Homo sapiens
tgaccaattccaaac

SEQ ID NO: 139215 - DNA, 15 bp, Homo sapiens
ttgaccaattccaaa

SEQ ID NO: 139216 - DNA, 15 bp, Homo sapiens
tttgaccaattccaa

SEQ ID NO: 139217 - DNA, 15 bp, Homo sapiens
ctttgaccaattcca

SEQ ID NO: 139218 - DNA, 15 bp, Homo sapiens
cctttgaccaattcc

SEQ ID NO: 139219 - DNA, 15 bp, Homo sapiens
gcctttgaccaattc

SEQ ID NO: 139220 - DNA, 15 bp, Homo sapiens
cgcctttgaccaatt

SEQ ID NO: 139221 - DNA, 15 bp, Homo sapiens
ccgcctttgaccaat

SEQ ID NO: 139222 - DNA, 15 bp, Homo sapiens
cccgcctttgaccaa

SEQ ID NO: 139223 - DNA, 15 bp, Homo sapiens
acccgcctttgacca

SEQ ID NO: 139224 - DNA, 15 bp, Homo sapiens
aacccgcctttgacc

SEQ ID NO: 139225 - DNA, 15 bp, Homo sapiens
aaacccgcctttgac

SEQ ID NO: 139226 - DNA, 15 bp, Homo sapiens
caaacccgcctttga

SEQ ID NO: 139227 - DNA, 15 bp, Homo sapiens
tcaaacccgcctttg

SEQ ID NO: 139228 - DNA, 15 bp, Homo sapiens
ctcaaacccgccttt

SEQ ID NO: 139229 - DNA, 15 bp, Homo sapiens
actcaaacccgcctt

SEQ ID NO: 139230 - DNA, 15 bp, Homo sapiens
gactcaaacccgcct

SEQ ID NO: 139231 - DNA, 15 bp, Homo sapiens
ggactcaaacccgcc

SEQ ID NO: 139232 - DNA, 15 bp, Homo sapiens
aggactcaaacccgc

SEQ ID NO: 139233 - DNA, 15 bp, Homo sapiens
caggactcaaacccg

SEQ ID NO: 139234 - DNA, 15 bp, Homo sapiens
ccaggactcaaaccc

SEQ ID NO: 139235 - DNA, 15 bp, Homo sapiens
gccaggactcaaacc

SEQ ID NO: 139236 - DNA, 15 bp, Homo sapiens
agccaggactcaaac

SEQ ID NO: 139237 - DNA, 15 bp, Homo sapiens
gagccaggactcaaa

SEQ ID NO: 139238 - DNA, 15 bp, Homo sapiens
agagccaggactcaa

SEQ ID NO: 139239 - DNA, 15 bp, Homo sapiens
tagagccaggactca

SEQ ID NO: 139240 - DNA, 15 bp, Homo sapiens
gtagagccaggactc

SEQ ID NO: 139241 - DNA, 15 bp, Homo sapiens
ggtagagccaggact

SEQ ID NO: 139242 - DNA, 15 bp, Homo sapiens
aggtagagccaggac

SEQ ID NO: 139243 - DNA, 15 bp, Homo sapiens
aaggtagagccagga

SEQ ID NO: 139244 - DNA, 15 bp, Homo sapiens
caaggtagagccagg

SEQ ID NO: 139245 - DNA, 15 bp, Homo sapiens
gcaaggtagagccag

SEQ ID NO: 139246 - DNA, 15 bp, Homo sapiens
tgcaaggtagagcca

SEQ ID NO: 139247 - DNA, 15 bp, Homo sapiens
atgcaaggtagagcc

SEQ ID NO: 139248 - DNA, 15 bp, Homo sapiens
aatgcaaggtagagc

SEQ ID NO: 139249 - DNA, 15 bp, Homo sapiens
taatgcaaggtagag

SEQ ID NO: 139250 - DNA, 15 bp, Homo sapiens
ctaatgcaaggtaga

SEQ ID NO: 139251 - DNA, 15 bp, Homo sapiens
gctaatgcaaggtag

SEQ ID NO: 139252 - DNA, 15 bp, Homo sapiens
agctaatgcaaggta

SEQ ID NO: 139253 - DNA, 15 bp, Homo sapiens
aagctaatgcaaggt

SEQ ID NO: 139254 - DNA, 15 bp, Homo sapiens
caagctaatgcaagg

SEQ ID NO: 139255 - DNA, 15 bp, Homo sapiens
ccaagctaatgcaag

SEQ ID NO: 139256 - DNA, 15 bp, Homo sapiens
accaagctaatgcaa

SEQ ID NO: 139257 - DNA, 15 bp, Homo sapiens
caccaagctaatgca

SEQ ID NO: 139258 - DNA, 15 bp, Homo sapiens
ccaccaagctaatgc

SEQ ID NO: 139259 - DNA, 15 bp, Homo sapiens
accaccaagctaatg

SEQ ID NO: 139260 - DNA, 15 bp, Homo sapiens
aaccaccaagctaat

SEQ ID NO: 139261 - DNA, 15 bp, Homo sapiens
caaccaccaagctaa

SEQ ID NO: 139262 - DNA, 15 bp, Homo sapiens
acaaccaccaagcta

SEQ ID NO: 139263 - DNA, 15 bp, Homo sapiens
cacaaccaccaagct

SEQ ID NO: 139264 - DNA, 15 bp, Homo sapiens
ccacaaccaccaagc

SEQ ID NO: 139265 - DNA, 15 bp, Homo sapiens
gccacaaccaccaag

SEQ ID NO: 139266 - DNA, 15 bp, Homo sapiens
ggccacaaccaccaa

SEQ ID NO: 139267 - DNA, 15 bp, Homo sapiens
tggccacaaccacca

SEQ ID NO: 139268 - DNA, 15 bp, Homo sapiens
ttggccacaaccacc

SEQ ID NO: 139269 - DNA, 15 bp, Homo sapiens
attggccacaaccac

SEQ ID NO: 139270 - DNA, 15 bp, Homo sapiens
aattggccacaacca

SEQ ID NO: 139271 - DNA, 15 bp, Homo sapiens
aaattggccacaacc

SEQ ID NO: 139272 - DNA, 15 bp, Homo sapiens
taaattggccacaac

SEQ ID NO: 139273 - DNA, 15 bp, Homo sapiens
gtaaattggccacaa

SEQ ID NO: 139274 - DNA, 15 bp, Homo sapiens
agtaaattggccaca

SEQ ID NO: 139275 - DNA, 15 bp, Homo sapiens
aagtaaattggccac

SEQ ID NO: 139276 - DNA, 15 bp, Homo sapiens
taagtaaattggcca

SEQ ID NO: 139277 - DNA, 15 bp, Homo sapiens
ttaagtaaattggcc

SEQ ID NO: 139278 - DNA, 15 bp, Homo sapiens
gttaagtaaattggc

SEQ ID NO: 139279 - DNA, 15 bp, Homo sapiens
ggttaagtaaattgg

SEQ ID NO: 139280 - DNA, 15 bp, Homo sapiens
aggttaagtaaattg

SEQ ID NO: 139281 - DNA, 15 bp, Homo sapiens
aaggttaagtaaatt

SEQ ID NO: 139282 - DNA, 15 bp, Homo sapiens
caaggttaagtaaat

SEQ ID NO: 139283 - DNA, 15 bp, Homo sapiens
gcaaggttaagtaaa

SEQ ID NO: 139284 - DNA, 15 bp, Homo sapiens
tgcaaggttaagtaa

SEQ ID NO: 139285 - DNA, 15 bp, Homo sapiens
ttgcaaggttaagta

SEQ ID NO: 139286 - DNA, 15 bp, Homo sapiens
tttgcaaggttaagt

SEQ ID NO: 139287 - DNA, 15 bp, Homo sapiens
ctttgcaaggttaag

SEQ ID NO: 139288 - DNA, 15 bp, Homo sapiens
gctttgcaaggttaa

SEQ ID NO: 139289 - DNA, 15 bp, Homo sapiens
agctttgcaaggtta

SEQ ID NO: 139290 - DNA, 15 bp, Homo sapiens
gagctttgcaaggtt

SEQ ID NO: 139291 - DNA, 15 bp, Homo sapiens
tgagctttgcaaggt

SEQ ID NO: 139292 - DNA, 15 bp, Homo sapiens
gtgagctttgcaagg

SEQ ID NO: 139293 - DNA, 15 bp, Homo sapiens
agtgagctttgcaag

SEQ ID NO: 139294 - DNA, 15 bp, Homo sapiens
aagtgagctttgcaa

SEQ ID NO: 139295 - DNA, 15 bp, Homo sapiens
aaagtgagctttgca

SEQ ID NO: 139296 - DNA, 15 bp, Homo sapiens
gaaagtgagctttgc

SEQ ID NO: 139297 - DNA, 15 bp, Homo sapiens
agaaagtgagctttg

SEQ ID NO: 139298 - DNA, 15 bp, Homo sapiens
aagaaagtgagcttt

SEQ ID NO: 139299 - DNA, 15 bp, Homo sapiens
gaagaaagtgagctt

SEQ ID NO: 139300 - DNA, 15 bp, Homo sapiens
tgaagaaagtgagct

SEQ ID NO: 139301 - DNA, 15 bp, Homo sapiens
atgaagaaagtgagc

SEQ ID NO: 139302 - DNA, 15 bp, Homo sapiens
aatgaagaaagtgag

SEQ ID NO: 139303 - DNA, 15 bp, Homo sapiens
caatgaagaaagtga

SEQ ID NO: 139304 - DNA, 15 bp, Homo sapiens
ccaatgaagaaagtg

SEQ ID NO: 139305 - DNA, 15 bp, Homo sapiens
accaatgaagaaagt

SEQ ID NO: 139306 - DNA, 15 bp, Homo sapiens
taccaatgaagaaag

SEQ ID NO: 139307 - DNA, 15 bp, Homo sapiens
ttaccaatgaagaaa

SEQ ID NO: 139308 - DNA, 15 bp, Homo sapiens
tttaccaatgaagaa

SEQ ID NO: 139309 - DNA, 15 bp, Homo sapiens
gtttaccaatgaaga

SEQ ID NO: 139310 - DNA, 15 bp, Homo sapiens
agtttaccaatgaag

SEQ ID NO: 139311 - DNA, 15 bp, Homo sapiens
cagtttaccaatgaa

SEQ ID NO: 139312 - DNA, 15 bp, Homo sapiens
acagtttaccaatga

SEQ ID NO: 139313 - DNA, 15 bp, Homo sapiens
cacagtttaccaatg

SEQ ID NO: 139314 - DNA, 15 bp, Homo sapiens
tcacagtttaccaat

SEQ ID NO: 139315 - DNA, 15 bp, Homo sapiens
ttcacagtttaccaa

SEQ ID NO: 139316 - DNA, 15 bp, Homo sapiens
attcacagtttacca

SEQ ID NO: 139317 - DNA, 15 bp, Homo sapiens
tattcacagtttacc

SEQ ID NO: 139318 - DNA, 15 bp, Homo sapiens
gtattcacagtttac

SEQ ID NO: 139319 - DNA, 15 bp, Homo sapiens
agtattcacagttta

SEQ ID NO: 139320 - DNA, 15 bp, Homo sapiens
tagtattcacagttt

SEQ ID NO: 139321 - DNA, 15 bp, Homo sapiens
ttagtattcacagtt

SEQ ID NO: 139322 - DNA, 15 bp, Homo sapiens
tttagtattcacagt

SEQ ID NO: 139323 - DNA, 15 bp, Homo sapiens
ttttagtattcacag

SEQ ID NO: 139324 - DNA, 15 bp, Homo sapiens
tttttagtattcaca

SEQ ID NO: 139325 - DNA, 15 bp, Homo sapiens
atttttagtattcac

SEQ ID NO: 139326 - DNA, 15 bp, Homo sapiens
tatttttagtattca

SEQ ID NO: 139327 - DNA, 15 bp, Homo sapiens
gtatttttagtattc

SEQ ID NO: 139328 - DNA, 15 bp, Homo sapiens
ggtatttttagtatt

SEQ ID NO: 139329 - DNA, 15 bp, Homo sapiens
tggtatttttagtat

SEQ ID NO: 139330 - DNA, 15 bp, Homo sapiens
ctggtatttttagta

SEQ ID NO: 139331 - DNA, 15 bp, Homo sapiens
gctggtatttttagt

SEQ ID NO: 139332 - DNA, 15 bp, Homo sapiens
ggctggtatttttag

SEQ ID NO: 139333 - DNA, 15 bp, Homo sapiens
tggctggtattttta

SEQ ID NO: 139334 - DNA, 15 bp, Homo sapiens
gtggctggtattttt

SEQ ID NO: 139335 - DNA, 15 bp, Homo sapiens
cgtggctggtatttt

SEQ ID NO: 139336 - DNA, 15 bp, Homo sapiens
acgtggctggtattt

SEQ ID NO: 139337 - DNA, 15 bp, Homo sapiens
tacgtggctggtatt

SEQ ID NO: 139338 - DNA, 15 bp, Homo sapiens
ttacgtggctggtat

SEQ ID NO: 139339 - DNA, 15 bp, Homo sapiens
tttacgtggctggta

SEQ ID NO: 139340 - DNA, 15 bp, Homo sapiens
ctttacgtggctggt

SEQ ID NO: 139341 - DNA, 15 bp, Homo sapiens
cctttacgtggctgg

SEQ ID NO: 139342 - DNA, 15 bp, Homo sapiens
acctttacgtggctg

SEQ ID NO: 139343 - DNA, 15 bp, Homo sapiens
aacctttacgtggct

SEQ ID NO: 139344 - DNA, 15 bp, Homo sapiens
aaacctttacgtggc

SEQ ID NO: 139345 - DNA, 15 bp, Homo sapiens
aaaacctttacgtgg

SEQ ID NO: 139346 - DNA, 15 bp, Homo sapiens
caaaacctttacgtg

SEQ ID NO: 139347 - DNA, 15 bp, Homo sapiens
acaaaacctttacgt

SEQ ID NO: 139348 - DNA, 15 bp, Homo sapiens
cacaaaacctttacg

SEQ ID NO: 139349 - DNA, 15 bp, Homo sapiens
tcacaaaacctttac

SEQ ID NO: 139350 - DNA, 15 bp, Homo sapiens
ctcacaaaaccttta

SEQ ID NO: 139351 - DNA, 15 bp, Homo sapiens
actcacaaaaccttt

SEQ ID NO: 139352 - DNA, 15 bp, Homo sapiens
tactcacaaaacctt

SEQ ID NO: 139353 - DNA, 15 bp, Homo sapiens
atactcacaaaacct

SEQ ID NO: 139354 - DNA, 15 bp, Homo sapiens
tatactcacaaaacc

SEQ ID NO: 139355 - DNA, 15 bp, Homo sapiens
ttatactcacaaaac

SEQ ID NO: 139356 - DNA, 15 bp, Homo sapiens
attatactcacaaaa

SEQ ID NO: 139357 - DNA, 15 bp, Homo sapiens
tattatactcacaaa

SEQ ID NO: 139358 - DNA, 15 bp, Homo sapiens
ctattatactcacaa

SEQ ID NO: 139359 - DNA, 15 bp, Homo sapiens
gctattatactcaca

SEQ ID NO: 139360 - DNA, 15 bp, Homo sapiens
tgctattatactcac

SEQ ID NO: 139361 - DNA, 15 bp, Homo sapiens
atgctattatactca

SEQ ID NO: 139362 - DNA, 15 bp, Homo sapiens
aatgctattatactc

SEQ ID NO: 139363 - DNA, 15 bp, Homo sapiens
aaatgctattatact

SEQ ID NO: 139364 - DNA, 15 bp, Homo sapiens
taaatgctattatac

SEQ ID NO: 139365 - DNA, 15 bp, Homo sapiens
ctaaatgctattata

SEQ ID NO: 139366 - DNA, 15 bp, Homo sapiens
gctaaatgctattat

SEQ ID NO: 139367 - DNA, 15 bp, Homo sapiens
tgctaaatgctatta

SEQ ID NO: 139368 - DNA, 15 bp, Homo sapiens
atgctaaatgctatt

SEQ ID NO: 139369 - DNA, 15 bp, Homo sapiens
gatgctaaatgctat

SEQ ID NO: 139370 - DNA, 15 bp, Homo sapiens
agatgctaaatgcta

SEQ ID NO: 139371 - DNA, 15 bp, Homo sapiens
aagatgctaaatgct

SEQ ID NO: 139372 - DNA, 15 bp, Homo sapiens
caagatgctaaatgc

SEQ ID NO: 139373 - DNA, 15 bp, Homo sapiens
acaagatgctaaatg

SEQ ID NO: 139374 - DNA, 15 bp, Homo sapiens
tacaagatgctaaat

SEQ ID NO: 139375 - DNA, 15 bp, Homo sapiens
ttacaagatgctaaa

SEQ ID NO: 139376 - DNA, 15 bp, Homo sapiens
cttacaagatgctaa

SEQ ID NO: 139377 - DNA, 15 bp, Homo sapiens
acttacaagatgcta

SEQ ID NO: 139378 - DNA, 15 bp, Homo sapiens
gacttacaagatgct

SEQ ID NO: 139379 - DNA, 15 bp, Homo sapiens
ggacttacaagatgc

SEQ ID NO: 139380 - DNA, 15 bp, Homo sapiens
aggacttacaagatg

SEQ ID NO: 139381 - DNA, 15 bp, Homo sapiens
gaggacttacaagat

SEQ ID NO: 139382 - DNA, 15 bp, Homo sapiens
tgaggacttacaaga

SEQ ID NO: 139383 - DNA, 15 bp, Homo sapiens
ttgaggacttacaag

SEQ ID NO: 139384 - DNA, 15 bp, Homo sapiens
attgaggacttacaa

SEQ ID NO: 139385 - DNA, 15 bp, Homo sapiens
tattgaggacttaca

SEQ ID NO: 139386 - DNA, 15 bp, Homo sapiens
ttattgaggacttac

SEQ ID NO: 139387 - DNA, 15 bp, Homo sapiens
tttattgaggactta

SEQ ID NO: 139388 - DNA, 15 bp, Homo sapiens
atttattgaggactt

SEQ ID NO: 139389 - DNA, 15 bp, Homo sapiens
catttattgaggact

SEQ ID NO: 139390 - DNA, 15 bp, Homo sapiens
ccatttattgaggac

SEQ ID NO: 139391 - DNA, 15 bp, Homo sapiens
gccatttattgagga

SEQ ID NO: 139392 - DNA, 15 bp, Homo sapiens
ggccatttattgagg

SEQ ID NO: 139393 - DNA, 15 bp, Homo sapiens
gggccatttattgag

SEQ ID NO: 139394 - DNA, 15 bp, Homo sapiens
agggccatttattga

SEQ ID NO: 139395 - DNA, 15 bp, Homo sapiens
cagggccatttattg

SEQ ID NO: 139396 - DNA, 15 bp, Homo sapiens
acagggccatttatt

SEQ ID NO: 139397 - DNA, 15 bp, Homo sapiens
aacagggccatttat

SEQ ID NO: 139398 - DNA, 15 bp, Homo sapiens
taacagggccattta

SEQ ID NO: 139399 - DNA, 15 bp, Homo sapiens
ataacagggccattt

SEQ ID NO: 139400 - DNA, 15 bp, Homo sapiens
cataacagggccatt

SEQ ID NO: 139401 - DNA, 15 bp, Homo sapiens
tcataacagggccat

SEQ ID NO: 139402 - DNA, 15 bp, Homo sapiens
atcataacagggcca

SEQ ID NO: 139403 - DNA, 15 bp, Homo sapiens
catcataacagggcc

SEQ ID NO: 139404 - DNA, 15 bp, Homo sapiens
tcatcataacagggc

SEQ ID NO: 139405 - DNA, 15 bp, Homo sapiens
ttcatcataacaggg

SEQ ID NO: 139406 - DNA, 15 bp, Homo sapiens
cttcatcataacagg

SEQ ID NO: 139407 - DNA, 15 bp, Homo sapiens
acttcatcataacag

SEQ ID NO: 139408 - DNA, 15 bp, Homo sapiens
aacttcatcataaca

SEQ ID NO: 139409 - DNA, 15 bp, Homo sapiens
caacttcatcataac

SEQ ID NO: 139410 - DNA, 15 bp, Homo sapiens
ccaacttcatcataa

SEQ ID NO: 139411 - DNA, 15 bp, Homo sapiens
gccaacttcatcata

SEQ ID NO: 139412 - DNA, 15 bp, Homo sapiens
ggccaacttcatcat

SEQ ID NO: 139413 - DNA, 15 bp, Homo sapiens
aggccaacttcatca

SEQ ID NO: 139414 - DNA, 15 bp, Homo sapiens
aaggccaacttcatc

SEQ ID NO: 139415 - DNA, 15 bp, Homo sapiens
aaaggccaacttcat

SEQ ID NO: 139416 - DNA, 15 bp, Homo sapiens
taaaggccaacttca

SEQ ID NO: 139417 - DNA, 15 bp, Homo sapiens
ataaaggccaacttc

SEQ ID NO: 139418 - DNA, 15 bp, Homo sapiens
aataaaggccaactt

SEQ ID NO: 139419 - DNA, 15 bp, Homo sapiens
aaataaaggccaact

SEQ ID NO: 139420 - DNA, 15 bp, Homo sapiens
aaaataaaggccaac

SEQ ID NO: 139421 - DNA, 15 bp, Homo sapiens
taaaataaaggccaa

SEQ ID NO: 139422 - DNA, 15 bp, Homo sapiens
ctaaaataaaggcca

SEQ ID NO: 139423 - DNA, 15 bp, Homo sapiens
tctaaaataaaggcc

SEQ ID NO: 139424 - DNA, 15 bp, Homo sapiens
atctaaaataaaggc

SEQ ID NO: 139425 - DNA, 15 bp, Homo sapiens
gatctaaaataaagg

SEQ ID NO: 139426 - DNA, 15 bp, Homo sapiens
ggatctaaaataaag

SEQ ID NO: 139427 - DNA, 15 bp, Homo sapiens
gggatctaaaataaa

SEQ ID NO: 139428 - DNA, 15 bp, Homo sapiens
agggatctaaaataa

SEQ ID NO: 139429 - DNA, 15 bp, Homo sapiens
gagggatctaaaata

SEQ ID NO: 139430 - DNA, 15 bp, Homo sapiens
agagggatctaaaat

SEQ ID NO: 139431 - DNA, 15 bp, Homo sapiens
gagagggatctaaaa

SEQ ID NO: 139432 - DNA, 15 bp, Homo sapiens
ggagagggatctaaa

SEQ ID NO: 139433 - DNA, 15 bp, Homo sapiens
aggagagggatctaa

SEQ ID NO: 139434 - DNA, 15 bp, Homo sapiens
aaggagagggatcta

SEQ ID NO: 139435 - DNA, 15 bp, Homo sapiens
aaaggagagggatct

SEQ ID NO: 139436 - DNA, 15 bp, Homo sapiens
caaaggagagggatc

SEQ ID NO: 139437 - DNA, 15 bp, Homo sapiens
acaaaggagagggat

SEQ ID NO: 139438 - DNA, 15 bp, Homo sapiens
gacaaaggagaggga

SEQ ID NO: 139439 - DNA, 15 bp, Homo sapiens
tgacaaaggagaggg

SEQ ID NO: 139440 - DNA, 15 bp, Homo sapiens
ttgacaaaggagagg

SEQ ID NO: 139441 - DNA, 15 bp, Homo sapiens
attgacaaaggagag

SEQ ID NO: 139442 - DNA, 15 bp, Homo sapiens
tattgacaaaggaga

SEQ ID NO: 139443 - DNA, 15 bp, Homo sapiens
atattgacaaaggag

SEQ ID NO: 139444 - DNA, 15 bp, Homo sapiens
tatattgacaaagga

SEQ ID NO: 139445 - DNA, 15 bp, Homo sapiens
ttatattgacaaagg

SEQ ID NO: 139446 - DNA, 15 bp, Homo sapiens
gttatattgacaaag

SEQ ID NO: 139447 - DNA, 15 bp, Homo sapiens
ggttatattgacaaa

SEQ ID NO: 139448 - DNA, 15 bp, Homo sapiens
tggttatattgacaa

SEQ ID NO: 139449 - DNA, 15 bp, Homo sapiens
ctggttatattgaca

SEQ ID NO: 139450 - DNA, 15 bp, Homo sapiens
cctggttatattgac

SEQ ID NO: 139451 - DNA, 15 bp, Homo sapiens
tcctggttatattga

SEQ ID NO: 139452 - DNA, 15 bp, Homo sapiens
atcctggttatattg

SEQ ID NO: 139453 - DNA, 15 bp, Homo sapiens
aatcctggttatatt

SEQ ID NO: 139454 - DNA, 15 bp, Homo sapiens
caatcctggttatat

SEQ ID NO: 139455 - DNA, 15 bp, Homo sapiens
acaatcctggttata

SEQ ID NO: 139456 - DNA, 15 bp, Homo sapiens
cacaatcctggttat

SEQ ID NO: 139457 - DNA, 15 bp, Homo sapiens
gcacaatcctggtta

SEQ ID NO: 139458 - DNA, 15 bp, Homo sapiens
agcacaatcctggtt

SEQ ID NO: 139459 - DNA, 15 bp, Homo sapiens
cagcacaatcctggt

SEQ ID NO: 139460 - DNA, 15 bp, Homo sapiens
tcagcacaatcctgg

SEQ ID NO: 139461 - DNA, 15 bp, Homo sapiens
ttcagcacaatcctg

SEQ ID NO: 139462 - DNA, 15 bp, Homo sapiens
gttcagcacaatcct

SEQ ID NO: 139463 - DNA, 15 bp, Homo sapiens
agttcagcacaatcc

SEQ ID NO: 139464 - DNA, 15 bp, Homo sapiens
cagttcagcacaatc

SEQ ID NO: 139465 - DNA, 15 bp, Homo sapiens
tcagttcagcacaat

SEQ ID NO: 139466 - DNA, 15 bp, Homo sapiens
ctcagttcagcacaa

SEQ ID NO: 139467 - DNA, 15 bp, Homo sapiens
cctcagttcagcaca

SEQ ID NO: 139468 - DNA, 15 bp, Homo sapiens
ccctcagttcagcac

SEQ ID NO: 139469 - DNA, 15 bp, Homo sapiens
tccctcagttcagca

SEQ ID NO: 139470 - DNA, 15 bp, Homo sapiens
gtccctcagttcagc

SEQ ID NO: 139471 - DNA, 15 bp, Homo sapiens
tgtccctcagttcag

SEQ ID NO: 139472 - DNA, 15 bp, Homo sapiens
ctgtccctcagttca

SEQ ID NO: 139473 - DNA, 15 bp, Homo sapiens
cctgtccctcagttc

SEQ ID NO: 139474 - DNA, 15 bp, Homo sapiens
tcctgtccctcagtt

SEQ ID NO: 139475 - DNA, 15 bp, Homo sapiens
ctcctgtccctcagt

SEQ ID NO: 139476 - DNA, 15 bp, Homo sapiens
tctcctgtccctcag

SEQ ID NO: 139477 - DNA, 15 bp, Homo sapiens
gtctcctgtccctca

SEQ ID NO: 139478 - DNA, 15 bp, Homo sapiens
ggtctcctgtccctc

SEQ ID NO: 139479 - DNA, 15 bp, Homo sapiens
tggtctcctgtccct

SEQ ID NO: 139480 - DNA, 15 bp, Homo sapiens
gtggtctcctgtccc

SEQ ID NO: 139481 - DNA, 15 bp, Homo sapiens
agtggtctcctgtcc

SEQ ID NO: 139482 - DNA, 15 bp, Homo sapiens
cagtggtctcctgtc

SEQ ID NO: 139483 - DNA, 15 bp, Homo sapiens
ccagtggtctcctgt

SEQ ID NO: 139484 - DNA, 15 bp, Homo sapiens
tccagtggtctcctg

SEQ ID NO: 139485 - DNA, 15 bp, Homo sapiens
ttccagtggtctcct

SEQ ID NO: 139486 - DNA, 15 bp, Homo sapiens
cttccagtggtctcc

SEQ ID NO: 139487 - DNA, 15 bp, Homo sapiens
ccttccagtggtctc

SEQ ID NO: 139488 - DNA, 15 bp, Homo sapiens
cccttccagtggtct

SEQ ID NO: 139489 - DNA, 15 bp, Homo sapiens
ccccttccagtggtc

SEQ ID NO: 139490 - DNA, 15 bp, Homo sapiens
gccccttccagtggt

SEQ ID NO: 139491 - DNA, 15 bp, Homo sapiens
tgccccttccagtgg

SEQ ID NO: 139492 - DNA, 15 bp, Homo sapiens
ctgccccttccagtg

SEQ ID NO: 139493 - DNA, 15 bp, Homo sapiens
cctgccccttccagt

SEQ ID NO: 139494 - DNA, 15 bp, Homo sapiens
ccctgccccttccag

SEQ ID NO: 139495 - DNA, 15 bp, Homo sapiens
accctgccccttcca

SEQ ID NO: 139496 - DNA, 15 bp, Homo sapiens
taccctgccccttcc

SEQ ID NO: 139497 - DNA, 15 bp, Homo sapiens
ctaccctgccccttc

SEQ ID NO: 139498 - DNA, 15 bp, Homo sapiens
gctaccctgcccctt

SEQ ID NO: 139499 - DNA, 15 bp, Homo sapiens
ggctaccctgcccct

SEQ ID NO: 139500 - DNA, 15 bp, Homo sapiens
tggctaccctgcccc

SEQ ID NO: 139501 - DNA, 15 bp, Homo sapiens
ctggctaccctgccc

SEQ ID NO: 139502 - DNA, 15 bp, Homo sapiens
cctggctaccctgcc

SEQ ID NO: 139503 - DNA, 15 bp, Homo sapiens
ccctggctaccctgc

SEQ ID NO: 139504 - DNA, 15 bp, Homo sapiens
cccctggctaccctg

SEQ ID NO: 139505 - DNA, 15 bp, Homo sapiens
gcccctggctaccct

SEQ ID NO: 139506 - DNA, 15 bp, Homo sapiens
ggcccctggctaccc

SEQ ID NO: 139507 - DNA, 15 bp, Homo sapiens
tggcccctggctacc

SEQ ID NO: 139508 - DNA, 15 bp, Homo sapiens
ttggcccctggctac

SEQ ID NO: 139509 - DNA, 15 bp, Homo sapiens
gttggcccctggcta

SEQ ID NO: 139510 - DNA, 15 bp, Homo sapiens
tgttggcccctggct

SEQ ID NO: 139511 - DNA, 15 bp, Homo sapiens
ctgttggcccctggc

SEQ ID NO: 139512 - DNA, 15 bp, Homo sapiens
actgttggcccctgg

SEQ ID NO: 139513 - DNA, 15 bp, Homo sapiens
cactgttggcccctg

SEQ ID NO: 139514 - DNA, 15 bp, Homo sapiens
tcactgttggcccct

SEQ ID NO: 139515 - DNA, 15 bp, Homo sapiens
ctcactgttggcccc

SEQ ID NO: 139516 - DNA, 15 bp, Homo sapiens
gctcactgttggccc

SEQ ID NO: 139517 - DNA, 15 bp, Homo sapiens
tgctcactgttggcc

SEQ ID NO: 139518 - DNA, 15 bp, Homo sapiens
gtgctcactgttggc

SEQ ID NO: 139519 - DNA, 15 bp, Homo sapiens
ggtgctcactgttgg

SEQ ID NO: 139520 - DNA, 15 bp, Homo sapiens
tggtgctcactgttg

SEQ ID NO: 139521 - DNA, 15 bp, Homo sapiens
ttggtgctcactgtt

SEQ ID NO: 139522 - DNA, 15 bp, Homo sapiens
cttggtgctcactgt

SEQ ID NO: 139523 - DNA, 15 bp, Homo sapiens
tcttggtgctcactg

SEQ ID NO: 139524 - DNA, 15 bp, Homo sapiens
gtcttggtgctcact

SEQ ID NO: 139525 - DNA, 15 bp, Homo sapiens
cgtcttggtgctcac

SEQ ID NO: 139526 - DNA, 15 bp, Homo sapiens
ccgtcttggtgctca

SEQ ID NO: 139527 - DNA, 15 bp, Homo sapiens
tccgtcttggtgctc

SEQ ID NO: 139528 - DNA, 15 bp, Homo sapiens
gtccgtcttggtgct

SEQ ID NO: 139529 - DNA, 15 bp, Homo sapiens
tgtccgtcttggtgc

SEQ ID NO: 139530 - DNA, 15 bp, Homo sapiens
ctgtccgtcttggtg

SEQ ID NO: 139531 - DNA, 15 bp, Homo sapiens
actgtccgtcttggt

SEQ ID NO: 139532 - DNA, 15 bp, Homo sapiens
cactgtccgtcttgg

SEQ ID NO: 139533 - DNA, 15 bp, Homo sapiens
tcactgtccgtcttg

SEQ ID NO: 139534 - DNA, 15 bp, Homo sapiens
ctcactgtccgtctt

SEQ ID NO: 139535 - DNA, 15 bp, Homo sapiens
cctcactgtccgtct

SEQ ID NO: 139536 - DNA, 15 bp, Homo sapiens
acctcactgtccgtc

SEQ ID NO: 139537 - DNA, 15 bp, Homo sapiens
tacctcactgtccgt

SEQ ID NO: 139538 - DNA, 15 bp, Homo sapiens
ctacctcactgtccg

SEQ ID NO: 139539 - DNA, 15 bp, Homo sapiens
actacctcactgtcc

SEQ ID NO: 139540 - DNA, 15 bp, Homo sapiens
cactacctcactgtc

SEQ ID NO: 139541 - DNA, 15 bp, Homo sapiens
gcactacctcactgt

SEQ ID NO: 139542 - DNA, 15 bp, Homo sapiens
agcactacctcactg

SEQ ID NO: 139543 - DNA, 15 bp, Homo sapiens
tagcactacctcact

SEQ ID NO: 139544 - DNA, 15 bp, Homo sapiens
ttagcactacctcac

SEQ ID NO: 139545 - DNA, 15 bp, Homo sapiens
tttagcactacctca

SEQ ID NO: 139546 - DNA, 15 bp, Homo sapiens
ctttagcactacctc

SEQ ID NO: 139547 - DNA, 15 bp, Homo sapiens
tctttagcactacct

SEQ ID NO: 139548 - DNA, 15 bp, Homo sapiens
atctttagcactacc

SEQ ID NO: 139549 - DNA, 15 bp, Homo sapiens
catctttagcactac

SEQ ID NO: 139550 - DNA, 15 bp, Homo sapiens
ccatctttagcacta

SEQ ID NO: 139551 - DNA, 15 bp, Homo sapiens
tccatctttagcact

SEQ ID NO: 139552 - DNA, 15 bp, Homo sapiens
ctccatctttagcac

SEQ ID NO: 139553 - DNA, 15 bp, Homo sapiens
cctccatctttagca

SEQ ID NO: 139554 - DNA, 15 bp, Homo sapiens
gcctccatctttagc

SEQ ID NO: 139555 - DNA, 15 bp, Homo sapiens
tgcctccatctttag

SEQ ID NO: 139556 - DNA, 15 bp, Homo sapiens
ctgcctccatcttta

SEQ ID NO: 139557 - DNA, 15 bp, Homo sapiens
tctgcctccatcttt

SEQ ID NO: 139558 - DNA, 15 bp, Homo sapiens
ttctgcctccatctt

SEQ ID NO: 139559 - DNA, 15 bp, Homo sapiens
tttctgcctccatct

SEQ ID NO: 139560 - DNA, 15 bp, Homo sapiens
ctttctgcctccatc

SEQ ID NO: 139561 - DNA, 15 bp, Homo sapiens
actttctgcctccat

SEQ ID NO: 139562 - DNA, 15 bp, Homo sapiens
tactttctgcctcca

SEQ ID NO: 139563 - DNA, 15 bp, Homo sapiens
ctactttctgcctcc

SEQ ID NO: 139564 - DNA, 15 bp, Homo sapiens
cctactttctgcctc

SEQ ID NO: 139565 - DNA, 15 bp, Homo sapiens
ccctactttctgcct

SEQ ID NO: 139566 - DNA, 15 bp, Homo sapiens
accctactttctgcc

SEQ ID NO: 139567 - DNA, 15 bp, Homo sapiens
aaccctactttctgc

SEQ ID NO: 139568 - DNA, 15 bp, Homo sapiens
caaccctactttctg

SEQ ID NO: 139569 - DNA, 15 bp, Homo sapiens
ccaaccctactttct

SEQ ID NO: 139570 - DNA, 15 bp, Homo sapiens
tccaaccctactttc

SEQ ID NO: 139571 - DNA, 15 bp, Homo sapiens
ctccaaccctacttt

SEQ ID NO: 139572 - DNA, 15 bp, Homo sapiens
cctccaaccctactt

SEQ ID NO: 139573 - DNA, 15 bp, Homo sapiens
tcctccaaccctact

SEQ ID NO: 139574 - DNA, 15 bp, Homo sapiens
ttcctccaaccctac

SEQ ID NO: 139575 - DNA, 15 bp, Homo sapiens
tttcctccaacccta

SEQ ID NO: 139576 - DNA, 15 bp, Homo sapiens
ttttcctccaaccct

SEQ ID NO: 139577 - DNA, 15 bp, Homo sapiens
attttcctccaaccc

SEQ ID NO: 139578 - DNA, 15 bp, Homo sapiens
cattttcctccaacc

SEQ ID NO: 139579 - DNA, 15 bp, Homo sapiens
ccattttcctccaac

SEQ ID NO: 139580 - DNA, 15 bp, Homo sapiens
cccattttcctccaa

SEQ ID NO: 139581 - DNA, 15 bp, Homo sapiens
ccccattttcctcca

SEQ ID NO: 139582 - DNA, 15 bp, Homo sapiens
accccattttcctcc

SEQ ID NO: 139583 - DNA, 15 bp, Homo sapiens
caccccattttcctc

SEQ ID NO: 139584 - DNA, 15 bp, Homo sapiens
tcaccccattttcct

SEQ ID NO: 139585 - DNA, 15 bp, Homo sapiens
ctcaccccattttcc

SEQ ID NO: 139586 - DNA, 15 bp, Homo sapiens
tctcaccccattttc

SEQ ID NO: 139587 - DNA, 15 bp, Homo sapiens
ttctcaccccatttt

SEQ ID NO: 139588 - DNA, 15 bp, Homo sapiens
tttctcaccccattt

SEQ ID NO: 139589 - DNA, 15 bp, Homo sapiens
atttctcaccccatt

SEQ ID NO: 139590 - DNA, 15 bp, Homo sapiens
catttctcaccccat

SEQ ID NO: 139591 - DNA, 15 bp, Homo sapiens
gcatttctcacccca

SEQ ID NO: 139592 - DNA, 15 bp, Homo sapiens
agcatttctcacccc

SEQ ID NO: 139593 - DNA, 15 bp, Homo sapiens
gagcatttctcaccc

SEQ ID NO: 139594 - DNA, 15 bp, Homo sapiens
ggagcatttctcacc

SEQ ID NO: 139595 - DNA, 15 bp, Homo sapiens
gggagcatttctcac

SEQ ID NO: 139596 - DNA, 15 bp, Homo sapiens
agggagcatttctca

SEQ ID NO: 139597 - DNA, 15 bp, Homo sapiens
aagggagcatttctc

SEQ ID NO: 139598 - DNA, 15 bp, Homo sapiens
gaagggagcatttct

SEQ ID NO: 139599 - DNA, 15 bp, Homo sapiens
ggaagggagcatttc

SEQ ID NO: 139600 - DNA, 15 bp, Homo sapiens
gggaagggagcattt

SEQ ID NO: 139601 - DNA, 15 bp, Homo sapiens
agggaagggagcatt

SEQ ID NO: 139602 - DNA, 15 bp, Homo sapiens
gagggaagggagcat

SEQ ID NO: 139603 - DNA, 15 bp, Homo sapiens
agagggaagggagca

SEQ ID NO: 139604 - DNA, 15 bp, Homo sapiens
cagagggaagggagc

SEQ ID NO: 139605 - DNA, 15 bp, Homo sapiens
gcagagggaagggag

SEQ ID NO: 139606 - DNA, 15 bp, Homo sapiens
ggcagagggaaggga

SEQ ID NO: 139607 - DNA, 15 bp, Homo sapiens
aggcagagggaaggg

SEQ ID NO: 139608 - DNA, 15 bp, Homo sapiens
gaggcagagggaagg

SEQ ID NO: 139609 - DNA, 15 bp, Homo sapiens
agaggcagagggaag

SEQ ID NO: 139610 - DNA, 15 bp, Homo sapiens
gagaggcagagggaa

SEQ ID NO: 139611 - DNA, 15 bp, Homo sapiens
tgagaggcagaggga

SEQ ID NO: 139612 - DNA, 15 bp, Homo sapiens
atgagaggcagaggg

SEQ ID NO: 139613 - DNA, 15 bp, Homo sapiens
gatgagaggcagagg

SEQ ID NO: 139614 - DNA, 15 bp, Homo sapiens
tgatgagaggcagag

SEQ ID NO: 139615 - DNA, 15 bp, Homo sapiens
gtgatgagaggcaga

SEQ ID NO: 139616 - DNA, 15 bp, Homo sapiens
ggtgatgagaggcag

SEQ ID NO: 139617 - DNA, 15 bp, Homo sapiens
gggtgatgagaggca

SEQ ID NO: 139618 - DNA, 15 bp, Homo sapiens
tgggtgatgagaggc

SEQ ID NO: 139619 - DNA, 15 bp, Homo sapiens
gtgggtgatgagagg

SEQ ID NO: 139620 - DNA, 15 bp, Homo sapiens
cgtgggtgatgagag

SEQ ID NO: 139621 - DNA, 15 bp, Homo sapiens
ccgtgggtgatgaga

SEQ ID NO: 139622 - DNA, 15 bp, Homo sapiens
gccgtgggtgatgag

SEQ ID NO: 139623 - DNA, 15 bp, Homo sapiens
tgccgtgggtgatga

SEQ ID NO: 139624 - DNA, 15 bp, Homo sapiens
gtgccgtgggtgatg

SEQ ID NO: 139625 - DNA, 15 bp, Homo sapiens
tgtgccgtgggtgat

SEQ ID NO: 139626 - DNA, 15 bp, Homo sapiens
gtgtgccgtgggtga

SEQ ID NO: 139627 - DNA, 15 bp, Homo sapiens
ggtgtgccgtgggtg

SEQ ID NO: 139628 - DNA, 15 bp, Homo sapiens
gggtgtgccgtgggt

SEQ ID NO: 139629 - DNA, 15 bp, Homo sapiens
ggggtgtgccgtggg

SEQ ID NO: 139630 - DNA, 15 bp, Homo sapiens
aggggtgtgccgtgg

SEQ ID NO: 139631 - DNA, 15 bp, Homo sapiens
taggggtgtgccgtg

SEQ ID NO: 139632 - DNA, 15 bp, Homo sapiens
ataggggtgtgccgt

SEQ ID NO: 139633 - DNA, 15 bp, Homo sapiens
tataggggtgtgccg

SEQ ID NO: 139634 - DNA, 15 bp, Homo sapiens
gtataggggtgtgcc

SEQ ID NO: 139635 - DNA, 15 bp, Homo sapiens
ggtataggggtgtgc

SEQ ID NO: 139636 - DNA, 15 bp, Homo sapiens
tggtataggggtgtg

SEQ ID NO: 139637 - DNA, 15 bp, Homo sapiens
gtggtataggggtgt

SEQ ID NO: 139638 - DNA, 15 bp, Homo sapiens
agtggtataggggtg

SEQ ID NO: 139639 - DNA, 15 bp, Homo sapiens
tagtggtataggggt

SEQ ID NO: 139640 - DNA, 15 bp, Homo sapiens
atagtggtatagggg

SEQ ID NO: 139641 - DNA, 15 bp, Homo sapiens
tatagtggtataggg

SEQ ID NO: 139642 - DNA, 15 bp, Homo sapiens
ctatagtggtatagg

SEQ ID NO: 139643 - DNA, 15 bp, Homo sapiens
cctatagtggtatag

SEQ ID NO: 139644 - DNA, 15 bp, Homo sapiens
tcctatagtggtata

SEQ ID NO: 139645 - DNA, 15 bp, Homo sapiens
ttcctatagtggtat

SEQ ID NO: 139646 - DNA, 15 bp, Homo sapiens
cttcctatagtggta

SEQ ID NO: 139647 - DNA, 15 bp, Homo sapiens
ccttcctatagtggt

SEQ ID NO: 139648 - DNA, 15 bp, Homo sapiens
tccttcctatagtgg

SEQ ID NO: 139649 - DNA, 15 bp, Homo sapiens
gtccttcctatagtg

SEQ ID NO: 139650 - DNA, 15 bp, Homo sapiens
cgtccttcctatagt

SEQ ID NO: 139651 - DNA, 15 bp, Homo sapiens
tcgtccttcctatag

SEQ ID NO: 139652 - DNA, 15 bp, Homo sapiens
ctcgtccttcctata

SEQ ID NO: 139653 - DNA, 15 bp, Homo sapiens
cctcgtccttcctat

SEQ ID NO: 139654 - DNA, 15 bp, Homo sapiens
ccctcgtccttccta

SEQ ID NO: 139655 - DNA, 15 bp, Homo sapiens
tccctcgtccttcct

SEQ ID NO: 139656 - DNA, 15 bp, Homo sapiens
ctccctcgtccttcc

SEQ ID NO: 139657 - DNA, 15 bp, Homo sapiens
tctccctcgtccttc

SEQ ID NO: 139658 - DNA, 15 bp, Homo sapiens
ctctccctcgtcctt

SEQ ID NO: 139659 - DNA, 15 bp, Homo sapiens
cctctccctcgtcct

SEQ ID NO: 139660 - DNA, 15 bp, Homo sapiens
ccctctccctcgtcc

SEQ ID NO: 139661 - DNA, 15 bp, Homo sapiens
cccctctccctcgtc

SEQ ID NO: 139662 - DNA, 15 bp, Homo sapiens
tcccctctccctcgt

SEQ ID NO: 139663 - DNA, 15 bp, Homo sapiens
ttcccctctccctcg

SEQ ID NO: 139664 - DNA, 15 bp, Homo sapiens
attcccctctccctc

SEQ ID NO: 139665 - DNA, 15 bp, Homo sapiens
cattcccctctccct

SEQ ID NO: 139666 - DNA, 15 bp, Homo sapiens
ccattcccctctccc

SEQ ID NO: 139667 - DNA, 15 bp, Homo sapiens
tccattcccctctcc

SEQ ID NO: 139668 - DNA, 15 bp, Homo sapiens
ctccattcccctctc

SEQ ID NO: 139669 - DNA, 15 bp, Homo sapiens
tctccattcccctct

SEQ ID NO: 139670 - DNA, 15 bp, Homo sapiens
ctctccattcccctc

SEQ ID NO: 139671 - DNA, 15 bp, Homo sapiens
tctctccattcccct

SEQ ID NO: 139672 - DNA, 15 bp, Homo sapiens
ctctctccattcccc

SEQ ID NO: 139673 - DNA, 15 bp, Homo sapiens
tctctctccattccc

SEQ ID NO: 139674 - DNA, 15 bp, Homo sapiens
ctctctctccattcc

SEQ ID NO: 139675 - DNA, 15 bp, Homo sapiens
cctctctctccattc

SEQ ID NO: 139676 - DNA, 15 bp, Homo sapiens
tcctctctctccatt

SEQ ID NO: 139677 - DNA, 15 bp, Homo sapiens
ttcctctctctccat

SEQ ID NO: 139678 - DNA, 15 bp, Homo sapiens
tttcctctctctcca

SEQ ID NO: 139679 - DNA, 15 bp, Homo sapiens
ctttcctctctctcc

SEQ ID NO: 139680 - DNA, 15 bp, Homo sapiens
cctttcctctctctc

SEQ ID NO: 139681 - DNA, 15 bp, Homo sapiens
tcctttcctctctct

SEQ ID NO: 139682 - DNA, 15 bp, Homo sapiens
ttcctttcctctctc

SEQ ID NO: 139683 - DNA, 15 bp, Homo sapiens
cttcctttcctctct

SEQ ID NO: 139684 - DNA, 15 bp, Homo sapiens
tcttcctttcctctc

SEQ ID NO: 139685 - DNA, 15 bp, Homo sapiens
ttcttcctttcctct

SEQ ID NO: 139686 - DNA, 15 bp, Homo sapiens
attcttcctttcctc

SEQ ID NO: 139687 - DNA, 15 bp, Homo sapiens
aattcttcctttcct

SEQ ID NO: 139688 - DNA, 15 bp, Homo sapiens
aaattcttcctttcc

SEQ ID NO: 139689 - DNA, 15 bp, Homo sapiens
aaaattcttcctttc

SEQ ID NO: 139690 - DNA, 15 bp, Homo sapiens
caaaattcttccttt

SEQ ID NO: 139691 - DNA, 15 bp, Homo sapiens
gcaaaattcttcctt

SEQ ID NO: 139692 - DNA, 15 bp, Homo sapiens
tgcaaaattcttcct

SEQ ID NO: 139693 - DNA, 15 bp, Homo sapiens
ctgcaaaattcttcc

SEQ ID NO: 139694 - DNA, 15 bp, Homo sapiens
actgcaaaattcttc

SEQ ID NO: 139695 - DNA, 15 bp, Homo sapiens
tactgcaaaattctt

SEQ ID NO: 139696 - DNA, 15 bp, Homo sapiens
gtactgcaaaattct

SEQ ID NO: 139697 - DNA, 15 bp, Homo sapiens
cgtactgcaaaattc

SEQ ID NO: 139698 - DNA, 15 bp, Homo sapiens
tcgtactgcaaaatt

SEQ ID NO: 139699 - DNA, 15 bp, Homo sapiens
ctcgtactgcaaaat

SEQ ID NO: 139700 - DNA, 15 bp, Homo sapiens
tctcgtactgcaaaa

SEQ ID NO: 139701 - DNA, 15 bp, Homo sapiens
atctcgtactgcaaa

SEQ ID NO: 139702 - DNA, 15 bp, Homo sapiens
catctcgtactgcaa

SEQ ID NO: 139703 - DNA, 15 bp, Homo sapiens
acatctcgtactgca

SEQ ID NO: 139704 - DNA, 15 bp, Homo sapiens
gacatctcgtactgc

SEQ ID NO: 139705 - DNA, 15 bp, Homo sapiens
tgacatctcgtactg

SEQ ID NO: 139706 - DNA, 15 bp, Homo sapiens
ctgacatctcgtact

SEQ ID NO: 139707 - DNA, 15 bp, Homo sapiens
cctgacatctcgtac

SEQ ID NO: 139708 - DNA, 15 bp, Homo sapiens
gcctgacatctcgta

SEQ ID NO: 139709 - DNA, 15 bp, Homo sapiens
tgcctgacatctcgt

SEQ ID NO: 139710 - DNA, 15 bp, Homo sapiens
atgcctgacatctcg

SEQ ID NO: 139711 - DNA, 15 bp, Homo sapiens
aatgcctgacatctc

SEQ ID NO: 139712 - DNA, 15 bp, Homo sapiens
caatgcctgacatct

SEQ ID NO: 139713 - DNA, 15 bp, Homo sapiens
tcaatgcctgacatc

SEQ ID NO: 139714 - DNA, 15 bp, Homo sapiens
ttcaatgcctgacat

SEQ ID NO: 139715 - DNA, 15 bp, Homo sapiens
tttcaatgcctgaca

SEQ ID NO: 139716 - DNA, 15 bp, Homo sapiens
ctttcaatgcctgac

SEQ ID NO: 139717 - DNA, 15 bp, Homo sapiens
cctttcaatgcctga

SEQ ID NO: 139718 - DNA, 15 bp, Homo sapiens
ccctttcaatgcctg

SEQ ID NO: 139719 - DNA, 15 bp, Homo sapiens
accctttcaatgcct

SEQ ID NO: 139720 - DNA, 15 bp, Homo sapiens
aaccctttcaatgcc

SEQ ID NO: 139721 - DNA, 15 bp, Homo sapiens
taaccctttcaatgc

SEQ ID NO: 139722 - DNA, 15 bp, Homo sapiens
ttaaccctttcaatg

SEQ ID NO: 139723 - DNA, 15 bp, Homo sapiens
gttaaccctttcaat

SEQ ID NO: 139724 - DNA, 15 bp, Homo sapiens
agttaaccctttcaa

SEQ ID NO: 139725 - DNA, 15 bp, Homo sapiens
gagttaaccctttca

SEQ ID NO: 139726 - DNA, 15 bp, Homo sapiens
tgagttaaccctttc

SEQ ID NO: 139727 - DNA, 15 bp, Homo sapiens
ctgagttaacccttt

SEQ ID NO: 139728 - DNA, 15 bp, Homo sapiens
cctgagttaaccctt

SEQ ID NO: 139729 - DNA, 15 bp, Homo sapiens
ccctgagttaaccct

SEQ ID NO: 139730 - DNA, 15 bp, Homo sapiens
cccctgagttaaccc

SEQ ID NO: 139731 - DNA, 15 bp, Homo sapiens
gcccctgagttaacc

SEQ ID NO: 139732 - DNA, 15 bp, Homo sapiens
cgcccctgagttaac

SEQ ID NO: 139733 - DNA, 15 bp, Homo sapiens
tcgcccctgagttaa

SEQ ID NO: 139734 - DNA, 15 bp, Homo sapiens
ctcgcccctgagtta

SEQ ID NO: 139735 - DNA, 15 bp, Homo sapiens
cctcgcccctgagtt

SEQ ID NO: 139736 - DNA, 15 bp, Homo sapiens
gcctcgcccctgagt

SEQ ID NO: 139737 - DNA, 15 bp, Homo sapiens
ggcctcgcccctgag

SEQ ID NO: 139738 - DNA, 15 bp, Homo sapiens
aggcctcgcccctga

SEQ ID NO: 139739 - DNA, 15 bp, Homo sapiens
gaggcctcgcccctg

SEQ ID NO: 139740 - DNA, 15 bp, Homo sapiens
tgaggcctcgcccct

SEQ ID NO: 139741 - DNA, 15 bp, Homo sapiens
ctgaggcctcgcccc

SEQ ID NO: 139742 - DNA, 15 bp, Homo sapiens
actgaggcctcgccc

SEQ ID NO: 139743 - DNA, 15 bp, Homo sapiens
aactgaggcctcgcc

SEQ ID NO: 139744 - DNA, 15 bp, Homo sapiens
aaactgaggcctcgc

SEQ ID NO: 139745 - DNA, 15 bp, Homo sapiens
caaactgaggcctcg

SEQ ID NO: 139746 - DNA, 15 bp, Homo sapiens
gcaaactgaggcctc

SEQ ID NO: 139747 - DNA, 15 bp, Homo sapiens
ggcaaactgaggcct

SEQ ID NO: 139748 - DNA, 15 bp, Homo sapiens
tggcaaactgaggcc

SEQ ID NO: 139749 - DNA, 15 bp, Homo sapiens
gtggcaaactgaggc

SEQ ID NO: 139750 - DNA, 15 bp, Homo sapiens
ggtggcaaactgagg

SEQ ID NO: 139751 - DNA, 15 bp, Homo sapiens
aggtggcaaactgag

SEQ ID NO: 139752 - DNA, 15 bp, Homo sapiens
caggtggcaaactga

SEQ ID NO: 139753 - DNA, 15 bp, Homo sapiens
acaggtggcaaactg

SEQ ID NO: 139754 - DNA, 15 bp, Homo sapiens
tacaggtggcaaact

SEQ ID NO: 139755 - DNA, 15 bp, Homo sapiens
ttacaggtggcaaac

SEQ ID NO: 139756 - DNA, 15 bp, Homo sapiens
tttacaggtggcaaa

SEQ ID NO: 139757 - DNA, 15 bp, Homo sapiens
ttttacaggtggcaa

SEQ ID NO: 139758 - DNA, 15 bp, Homo sapiens
gttttacaggtggca

SEQ ID NO: 139759 - DNA, 15 bp, Homo sapiens
cgttttacaggtggc

SEQ ID NO: 139760 - DNA, 15 bp, Homo sapiens
ccgttttacaggtgg

SEQ ID NO: 139761 - DNA, 15 bp, Homo sapiens
tccgttttacaggtg

SEQ ID NO: 139762 - DNA, 15 bp, Homo sapiens
ctccgttttacaggt

SEQ ID NO: 139763 - DNA, 15 bp, Homo sapiens
cctccgttttacagg

SEQ ID NO: 139764 - DNA, 15 bp, Homo sapiens
tcctccgttttacag

SEQ ID NO: 139765 - DNA, 15 bp, Homo sapiens
atcctccgttttaca

SEQ ID NO: 139766 - DNA, 15 bp, Homo sapiens
aatcctccgttttac

SEQ ID NO: 139767 - DNA, 15 bp, Homo sapiens
caatcctccgtttta

SEQ ID NO: 139768 - DNA, 15 bp, Homo sapiens
ccaatcctccgtttt

SEQ ID NO: 139769 - DNA, 15 bp, Homo sapiens
tccaatcctccgttt

SEQ ID NO: 139770 - DNA, 15 bp, Homo sapiens
atccaatcctccgtt

SEQ ID NO: 139771 - DNA, 15 bp, Homo sapiens
catccaatcctccgt

SEQ ID NO: 139772 - DNA, 15 bp, Homo sapiens
tcatccaatcctccg

SEQ ID NO: 139773 - DNA, 15 bp, Homo sapiens
ctcatccaatcctcc

SEQ ID NO: 139774 - DNA, 15 bp, Homo sapiens
cctcatccaatcctc

SEQ ID NO: 139775 - DNA, 15 bp, Homo sapiens
gcctcatccaatcct

SEQ ID NO: 139776 - DNA, 15 bp, Homo sapiens
ggcctcatccaatcc

SEQ ID NO: 139777 - DNA, 15 bp, Homo sapiens
tggcctcatccaatc

SEQ ID NO: 139778 - DNA, 15 bp, Homo sapiens
atggcctcatccaat

SEQ ID NO: 139779 - DNA, 15 bp, Homo sapiens
aatggcctcatccaa

SEQ ID NO: 139780 - DNA, 15 bp, Homo sapiens
gaatggcctcatcca

SEQ ID NO: 139781 - DNA, 15 bp, Homo sapiens
agaatggcctcatcc

SEQ ID NO: 139782 - DNA, 15 bp, Homo sapiens
cagaatggcctcatc

SEQ ID NO: 139783 - DNA, 15 bp, Homo sapiens
tcagaatggcctcat

SEQ ID NO: 139784 - DNA, 15 bp, Homo sapiens
ctcagaatggcctca

SEQ ID NO: 139785 - DNA, 15 bp, Homo sapiens
cctcagaatggcctc

SEQ ID NO: 139786 - DNA, 15 bp, Homo sapiens
ccctcagaatggcct

SEQ ID NO: 139787 - DNA, 15 bp, Homo sapiens
accctcagaatggcc

SEQ ID NO: 139788 - DNA, 15 bp, Homo sapiens
gaccctcagaatggc

SEQ ID NO: 139789 - DNA, 15 bp, Homo sapiens
ggaccctcagaatgg

SEQ ID NO: 139790 - DNA, 15 bp, Homo sapiens
gggaccctcagaatg

SEQ ID NO: 139791 - DNA, 15 bp, Homo sapiens
agggaccctcagaat

SEQ ID NO: 139792 - DNA, 15 bp, Homo sapiens
cagggaccctcagaa

SEQ ID NO: 139793 - DNA, 15 bp, Homo sapiens
ccagggaccctcaga

SEQ ID NO: 139794 - DNA, 15 bp, Homo sapiens
accagggaccctcag

SEQ ID NO: 139795 - DNA, 15 bp, Homo sapiens
caccagggaccctca

SEQ ID NO: 139796 - DNA, 15 bp, Homo sapiens
ccaccagggaccctc

SEQ ID NO: 139797 - DNA, 15 bp, Homo sapiens
gccaccagggaccct

SEQ ID NO: 139798 - DNA, 15 bp, Homo sapiens
agccaccagggaccc

SEQ ID NO: 139799 - DNA, 15 bp, Homo sapiens
gagccaccagggacc

SEQ ID NO: 139800 - DNA, 15 bp, Homo sapiens
ggagccaccagggac

SEQ ID NO: 139801 - DNA, 15 bp, Homo sapiens
tggagccaccaggga

SEQ ID NO: 139802 - DNA, 15 bp, Homo sapiens
ctggagccaccaggg

SEQ ID NO: 139803 - DNA, 15 bp, Homo sapiens
gctggagccaccagg

SEQ ID NO: 139804 - DNA, 15 bp, Homo sapiens
tgctggagccaccag

SEQ ID NO: 139805 - DNA, 15 bp, Homo sapiens
ctgctggagccacca

SEQ ID NO: 139806 - DNA, 15 bp, Homo sapiens
actgctggagccacc

SEQ ID NO: 139807 - DNA, 15 bp, Homo sapiens
gactgctggagccac

SEQ ID NO: 139808 - DNA, 15 bp, Homo sapiens
ggactgctggagcca

SEQ ID NO: 139809 - DNA, 15 bp, Homo sapiens
gggactgctggagcc

SEQ ID NO: 139810 - DNA, 15 bp, Homo sapiens
agggactgctggagc

SEQ ID NO: 139811 - DNA, 15 bp, Homo sapiens
aagggactgctggag

SEQ ID NO: 139812 - DNA, 15 bp, Homo sapiens
caagggactgctgga

SEQ ID NO: 139813 - DNA, 15 bp, Homo sapiens
gcaagggactgctgg

SEQ ID NO: 139814 - DNA, 15 bp, Homo sapiens
tgcaagggactgctg

SEQ ID NO: 139815 - DNA, 15 bp, Homo sapiens
atgcaagggactgct

SEQ ID NO: 139816 - DNA, 15 bp, Homo sapiens
aatgcaagggactgc

SEQ ID NO: 139817 - DNA, 15 bp, Homo sapiens
aaatgcaagggactg

SEQ ID NO: 139818 - DNA, 15 bp, Homo sapiens
aaaatgcaagggact

SEQ ID NO: 139819 - DNA, 15 bp, Homo sapiens
aaaaatgcaagggac

SEQ ID NO: 139820 - DNA, 15 bp, Homo sapiens
taaaaatgcaaggga

SEQ ID NO: 139821 - DNA, 15 bp, Homo sapiens
ataaaaatgcaaggg

SEQ ID NO: 139822 - DNA, 15 bp, Homo sapiens
tataaaaatgcaagg

SEQ ID NO: 139823 - DNA, 15 bp, Homo sapiens
ttataaaaatgcaag

SEQ ID NO: 139824 - DNA, 15 bp, Homo sapiens
cttataaaaatgcaa

SEQ ID NO: 139825 - DNA, 15 bp, Homo sapiens
tcttataaaaatgca

SEQ ID NO: 139826 - DNA, 15 bp, Homo sapiens
ttcttataaaaatgc

SEQ ID NO: 139827 - DNA, 15 bp, Homo sapiens
attcttataaaaatg

SEQ ID NO: 139828 - DNA, 15 bp, Homo sapiens
aattcttataaaaat

SEQ ID NO: 139829 - DNA, 15 bp, Homo sapiens
caattcttataaaaa

SEQ ID NO: 139830 - DNA, 15 bp, Homo sapiens
acaattcttataaaa

SEQ ID NO: 139831 - DNA, 15 bp, Homo sapiens
cacaattcttataaa

SEQ ID NO: 139832 - DNA, 15 bp, Homo sapiens
tcacaattcttataa

SEQ ID NO: 139833 - DNA, 15 bp, Homo sapiens
atcacaattcttata

SEQ ID NO: 139834 - DNA, 15 bp, Homo sapiens
aatcacaattcttat

SEQ ID NO: 139835 - DNA, 15 bp, Homo sapiens
caatcacaattctta

SEQ ID NO: 139836 - DNA, 15 bp, Homo sapiens
acaatcacaattctt

SEQ ID NO: 139837 - DNA, 15 bp, Homo sapiens
cacaatcacaattct

SEQ ID NO: 139838 - DNA, 15 bp, Homo sapiens
gcacaatcacaattc

SEQ ID NO: 139839 - DNA, 15 bp, Homo sapiens
agcacaatcacaatt

SEQ ID NO: 139840 - DNA, 15 bp, Homo sapiens
gagcacaatcacaat

SEQ ID NO: 139841 - DNA, 15 bp, Homo sapiens
ggagcacaatcacaa

SEQ ID NO: 139842 - DNA, 15 bp, Homo sapiens
aggagcacaatcaca

SEQ ID NO: 139843 - DNA, 15 bp, Homo sapiens
caggagcacaatcac

SEQ ID NO: 139844 - DNA, 15 bp, Homo sapiens
gcaggagcacaatca

SEQ ID NO: 139845 - DNA, 15 bp, Homo sapiens
ggcaggagcacaatc

SEQ ID NO: 139846 - DNA, 15 bp, Homo sapiens
aggcaggagcacaat

SEQ ID NO: 139847 - DNA, 15 bp, Homo sapiens
caggcaggagcacaa

SEQ ID NO: 139848 - DNA, 15 bp, Homo sapiens
acaggcaggagcaca

SEQ ID NO: 139849 - DNA, 15 bp, Homo sapiens
aacaggcaggagcac

SEQ ID NO: 139850 - DNA, 15 bp, Homo sapiens
gaacaggcaggagca

SEQ ID NO: 139851 - DNA, 15 bp, Homo sapiens
agaacaggcaggagc

SEQ ID NO: 139852 - DNA, 15 bp, Homo sapiens
cagaacaggcaggag

SEQ ID NO: 139853 - DNA, 15 bp, Homo sapiens
gcagaacaggcagga

SEQ ID NO: 139854 - DNA, 15 bp, Homo sapiens
ggcagaacaggcagg

SEQ ID NO: 139855 - DNA, 15 bp, Homo sapiens
gggcagaacaggcag

SEQ ID NO: 139856 - DNA, 15 bp, Homo sapiens
ggggcagaacaggca

SEQ ID NO: 139857 - DNA, 15 bp, Homo sapiens
aggggcagaacaggc

SEQ ID NO: 139858 - DNA, 15 bp, Homo sapiens
taggggcagaacagg

SEQ ID NO: 139859 - DNA, 15 bp, Homo sapiens
gtaggggcagaacag

SEQ ID NO: 139860 - DNA, 15 bp, Homo sapiens
tgtaggggcagaaca

SEQ ID NO: 139861 - DNA, 15 bp, Homo sapiens
gtgtaggggcagaac

SEQ ID NO: 139862 - DNA, 15 bp, Homo sapiens
ggtgtaggggcagaa

SEQ ID NO: 139863 - DNA, 15 bp, Homo sapiens
tggtgtaggggcaga

SEQ ID NO: 139864 - DNA, 15 bp, Homo sapiens
gtggtgtaggggcag

SEQ ID NO: 139865 - DNA, 15 bp, Homo sapiens
ggtggtgtaggggca

SEQ ID NO: 139866 - DNA, 15 bp, Homo sapiens
gggtggtgtaggggc

SEQ ID NO: 139867 - DNA, 15 bp, Homo sapiens
tgggtggtgtagggg

SEQ ID NO: 139868 - DNA, 15 bp, Homo sapiens
gtgggtggtgtaggg

SEQ ID NO: 139869 - DNA, 15 bp, Homo sapiens
ggtgggtggtgtagg

SEQ ID NO: 139870 - DNA, 15 bp, Homo sapiens
aggtgggtggtgtag

SEQ ID NO: 139871 - DNA, 15 bp, Homo sapiens
aaggtgggtggtgta

SEQ ID NO: 139872 - DNA, 15 bp, Homo sapiens
gaaggtgggtggtgt

SEQ ID NO: 139873 - DNA, 15 bp, Homo sapiens
agaaggtgggtggtg

SEQ ID NO: 139874 - DNA, 15 bp, Homo sapiens
cagaaggtgggtggt

SEQ ID NO: 139875 - DNA, 15 bp, Homo sapiens
gcagaaggtgggtgg

SEQ ID NO: 139876 - DNA, 15 bp, Homo sapiens
tgcagaaggtgggtg

SEQ ID NO: 139877 - DNA, 15 bp, Homo sapiens
ctgcagaaggtgggt

SEQ ID NO: 139878 - DNA, 15 bp, Homo sapiens
gctgcagaaggtggg

SEQ ID NO: 139879 - DNA, 15 bp, Homo sapiens
ggctgcagaaggtgg

SEQ ID NO: 139880 - DNA, 15 bp, Homo sapiens
aggctgcagaaggtg

SEQ ID NO: 139881 - DNA, 15 bp, Homo sapiens
gaggctgcagaaggt

SEQ ID NO: 139882 - DNA, 15 bp, Homo sapiens
tgaggctgcagaagg

SEQ ID NO: 139883 - DNA, 15 bp, Homo sapiens
ctgaggctgcagaag

SEQ ID NO: 139884 - DNA, 15 bp, Homo sapiens
cctgaggctgcagaa

SEQ ID NO: 139885 - DNA, 15 bp, Homo sapiens
gcctgaggctgcaga

SEQ ID NO: 139886 - DNA, 15 bp, Homo sapiens
tgcctgaggctgcag

SEQ ID NO: 139887 - DNA, 15 bp, Homo sapiens
ctgcctgaggctgca

SEQ ID NO: 139888 - DNA, 15 bp, Homo sapiens
actgcctgaggctgc

SEQ ID NO: 139889 - DNA, 15 bp, Homo sapiens
aactgcctgaggctg

SEQ ID NO: 139890 - DNA, 15 bp, Homo sapiens
caactgcctgaggct

SEQ ID NO: 139891 - DNA, 15 bp, Homo sapiens
ccaactgcctgaggc

SEQ ID NO: 139892 - DNA, 15 bp, Homo sapiens
tccaactgcctgagg

SEQ ID NO: 139893 - DNA, 15 bp, Homo sapiens
ctccaactgcctgag

SEQ ID NO: 139894 - DNA, 15 bp, Homo sapiens
tctccaactgcctga

SEQ ID NO: 139895 - DNA, 15 bp, Homo sapiens
atctccaactgcctg

SEQ ID NO: 139896 - DNA, 15 bp, Homo sapiens
catctccaactgcct

SEQ ID NO: 139897 - DNA, 15 bp, Homo sapiens
tcatctccaactgcc

SEQ ID NO: 139898 - DNA, 15 bp, Homo sapiens
atcatctccaactgc

SEQ ID NO: 139899 - DNA, 15 bp, Homo sapiens
catcatctccaactg

SEQ ID NO: 139900 - DNA, 15 bp, Homo sapiens
acatcatctccaact

SEQ ID NO: 139901 - DNA, 15 bp, Homo sapiens
gacatcatctccaac

SEQ ID NO: 139902 - DNA, 15 bp, Homo sapiens
tgacatcatctccaa

SEQ ID NO: 139903 - DNA, 15 bp, Homo sapiens
ttgacatcatctcca

SEQ ID NO: 139904 - DNA, 15 bp, Homo sapiens
tttgacatcatctcc

SEQ ID NO: 139905 - DNA, 15 bp, Homo sapiens
ttttgacatcatctc

SEQ ID NO: 139906 - DNA, 15 bp, Homo sapiens
cttttgacatcatct

SEQ ID NO: 139907 - DNA, 15 bp, Homo sapiens
ccttttgacatcatc

SEQ ID NO: 139908 - DNA, 15 bp, Homo sapiens
tccttttgacatcat

SEQ ID NO: 139909 - DNA, 15 bp, Homo sapiens
ttccttttgacatca

SEQ ID NO: 139910 - DNA, 15 bp, Homo sapiens
gttccttttgacatc

SEQ ID NO: 139911 - DNA, 15 bp, Homo sapiens
tgttccttttgacat

SEQ ID NO: 139912 - DNA, 15 bp, Homo sapiens
ctgttccttttgaca

SEQ ID NO: 139913 - DNA, 15 bp, Homo sapiens
tctgttccttttgac

SEQ ID NO: 139914 - DNA, 15 bp, Homo sapiens
ttctgttccttttga

SEQ ID NO: 139915 - DNA, 15 bp, Homo sapiens
cttctgttccttttg

SEQ ID NO: 139916 - DNA, 15 bp, Homo sapiens
ccttctgttcctttt

SEQ ID NO: 139917 - DNA, 15 bp, Homo sapiens
cccttctgttccttt

SEQ ID NO: 139918 - DNA, 15 bp, Homo sapiens
ccccttctgttcctt

SEQ ID NO: 139919 - DNA, 15 bp, Homo sapiens
accccttctgttcct

SEQ ID NO: 139920 - DNA, 15 bp, Homo sapiens
caccccttctgttcc

SEQ ID NO: 139921 - DNA, 15 bp, Homo sapiens
ccaccccttctgttc

SEQ ID NO: 139922 - DNA, 15 bp, Homo sapiens
tccaccccttctgtt

SEQ ID NO: 139923 - DNA, 15 bp, Homo sapiens
ttccaccccttctgt

SEQ ID NO: 139924 - DNA, 15 bp, Homo sapiens
tttccaccccttctg

SEQ ID NO: 139925 - DNA, 15 bp, Homo sapiens
ctttccaccccttct

SEQ ID NO: 139926 - DNA, 15 bp, Homo sapiens
actttccaccccttc

SEQ ID NO: 139927 - DNA, 15 bp, Homo sapiens
cactttccacccctt

SEQ ID NO: 139928 - DNA, 15 bp, Homo sapiens
gcactttccacccct

SEQ ID NO: 139929 - DNA, 15 bp, Homo sapiens
agcactttccacccc

SEQ ID NO: 139930 - DNA, 15 bp, Homo sapiens
cagcactttccaccc

SEQ ID NO: 139931 - DNA, 15 bp, Homo sapiens
ccagcactttccacc

SEQ ID NO: 139932 - DNA, 15 bp, Homo sapiens
tccagcactttccac

SEQ ID NO: 139933 - DNA, 15 bp, Homo sapiens
ctccagcactttcca

SEQ ID NO: 139934 - DNA, 15 bp, Homo sapiens
cctccagcactttcc

SEQ ID NO: 139935 - DNA, 15 bp, Homo sapiens
ccctccagcactttc

SEQ ID NO: 139936 - DNA, 15 bp, Homo sapiens
gccctccagcacttt

SEQ ID NO: 139937 - DNA, 15 bp, Homo sapiens
tgccctccagcactt

SEQ ID NO: 139938 - DNA, 15 bp, Homo sapiens
atgccctccagcact

SEQ ID NO: 139939 - DNA, 15 bp, Homo sapiens
catgccctccagcac

SEQ ID NO: 139940 - DNA, 15 bp, Homo sapiens
ccatgccctccagca

SEQ ID NO: 139941 - DNA, 15 bp, Homo sapiens
tccatgccctccagc

SEQ ID NO: 139942 - DNA, 15 bp, Homo sapiens
ttccatgccctccag

SEQ ID NO: 139943 - DNA, 15 bp, Homo sapiens
attccatgccctcca

SEQ ID NO: 139944 - DNA, 15 bp, Homo sapiens
cattccatgccctcc

SEQ ID NO: 139945 - DNA, 15 bp, Homo sapiens
ccattccatgccctc

SEQ ID NO: 139946 - DNA, 15 bp, Homo sapiens
accattccatgccct

SEQ ID NO: 139947 - DNA, 15 bp, Homo sapiens
aaccattccatgccc

SEQ ID NO: 139948 - DNA, 15 bp, Homo sapiens
aaaccattccatgcc

SEQ ID NO: 139949 - DNA, 15 bp, Homo sapiens
gaaaccattccatgc

SEQ ID NO: 139950 - DNA, 15 bp, Homo sapiens
agaaaccattccatg

SEQ ID NO: 139951 - DNA, 15 bp, Homo sapiens
gagaaaccattccat

SEQ ID NO: 139952 - DNA, 15 bp, Homo sapiens
ggagaaaccattcca

SEQ ID NO: 139953 - DNA, 15 bp, Homo sapiens
gggagaaaccattcc

SEQ ID NO: 139954 - DNA, 15 bp, Homo sapiens
tgggagaaaccattc

SEQ ID NO: 139955 - DNA, 15 bp, Homo sapiens
ctgggagaaaccatt

SEQ ID NO: 139956 - DNA, 15 bp, Homo sapiens
tctgggagaaaccat

SEQ ID NO: 139957 - DNA, 15 bp, Homo sapiens
ttctgggagaaacca

SEQ ID NO: 139958 - DNA, 15 bp, Homo sapiens
cttctgggagaaacc

SEQ ID NO: 139959 - DNA, 15 bp, Homo sapiens
ccttctgggagaaac

SEQ ID NO: 139960 - DNA, 15 bp, Homo sapiens
gccttctgggagaaa

SEQ ID NO: 139961 - DNA, 15 bp, Homo sapiens
agccttctgggagaa

SEQ ID NO: 139962 - DNA, 15 bp, Homo sapiens
cagccttctgggaga

SEQ ID NO: 139963 - DNA, 15 bp, Homo sapiens
tcagccttctgggag

SEQ ID NO: 139964 - DNA, 15 bp, Homo sapiens
ctcagccttctggga

SEQ ID NO: 139965 - DNA, 15 bp, Homo sapiens
cctcagccttctggg

SEQ ID NO: 139966 - DNA, 15 bp, Homo sapiens
ccctcagccttctgg

SEQ ID NO: 139967 - DNA, 15 bp, Homo sapiens
accctcagccttctg

SEQ ID NO: 139968 - DNA, 15 bp, Homo sapiens
gaccctcagccttct

SEQ ID NO: 139969 - DNA, 15 bp, Homo sapiens
agaccctcagccttc

SEQ ID NO: 139970 - DNA, 15 bp, Homo sapiens
cagaccctcagcctt

SEQ ID NO: 139971 - DNA, 15 bp, Homo sapiens
tcagaccctcagcct

SEQ ID NO: 139972 - DNA, 15 bp, Homo sapiens
ttcagaccctcagcc

SEQ ID NO: 139973 - DNA, 15 bp, Homo sapiens
tttcagaccctcagc

SEQ ID NO: 139974 - DNA, 15 bp, Homo sapiens
ttttcagaccctcag

SEQ ID NO: 139975 - DNA, 15 bp, Homo sapiens
cttttcagaccctca

SEQ ID NO: 139976 - DNA, 15 bp, Homo sapiens
tcttttcagaccctc

SEQ ID NO: 139977 - DNA, 15 bp, Homo sapiens
ctcttttcagaccct

SEQ ID NO: 139978 - DNA, 15 bp, Homo sapiens
cctcttttcagaccc

SEQ ID NO: 139979 - DNA, 15 bp, Homo sapiens
gcctcttttcagacc

SEQ ID NO: 139980 - DNA, 15 bp, Homo sapiens
agcctcttttcagac

SEQ ID NO: 139981 - DNA, 15 bp, Homo sapiens
aagcctcttttcaga

SEQ ID NO: 139982 - DNA, 15 bp, Homo sapiens
taagcctcttttcag

SEQ ID NO: 139983 - DNA, 15 bp, Homo sapiens
ctaagcctcttttca

SEQ ID NO: 139984 - DNA, 15 bp, Homo sapiens
tctaagcctcttttc

SEQ ID NO: 139985 - DNA, 15 bp, Homo sapiens
ttctaagcctctttt

SEQ ID NO: 139986 - DNA, 15 bp, Homo sapiens
cttctaagcctcttt

SEQ ID NO: 139987 - DNA, 15 bp, Homo sapiens
gcttctaagcctctt

SEQ ID NO: 139988 - DNA, 15 bp, Homo sapiens
ggcttctaagcctct

SEQ ID NO: 139989 - DNA, 15 bp, Homo sapiens
aggcttctaagcctc

SEQ ID NO: 139990 - DNA, 15 bp, Homo sapiens
caggcttctaagcct

SEQ ID NO: 139991 - DNA, 15 bp, Homo sapiens
ccaggcttctaagcc

SEQ ID NO: 139992 - DNA, 15 bp, Homo sapiens
accaggcttctaagc

SEQ ID NO: 139993 - DNA, 15 bp, Homo sapiens
taccaggcttctaag

SEQ ID NO: 139994 - DNA, 15 bp, Homo sapiens
ctaccaggcttctaa

SEQ ID NO: 139995 - DNA, 15 bp, Homo sapiens
gctaccaggcttcta

SEQ ID NO: 139996 - DNA, 15 bp, Homo sapiens
ggctaccaggcttct

SEQ ID NO: 139997 - DNA, 15 bp, Homo sapiens
tggctaccaggcttc

SEQ ID NO: 139998 - DNA, 15 bp, Homo sapiens
ctggctaccaggctt

SEQ ID NO: 139999 - DNA, 15 bp, Homo sapiens
tctggctaccaggct

SEQ ID NO: 140000 - DNA, 15 bp, Homo sapiens
ctctggctaccaggc

SEQ ID NO: 140001 - DNA, 15 bp, Homo sapiens
gctctggctaccagg

SEQ ID NO: 140002 - DNA, 15 bp, Homo sapiens
tgctctggctaccag

SEQ ID NO: 140003 - DNA, 15 bp, Homo sapiens
ctgctctggctacca

SEQ ID NO: 140004 - DNA, 15 bp, Homo sapiens
cctgctctggctacc

SEQ ID NO: 140005 - DNA, 15 bp, Homo sapiens
tcctgctctggctac

SEQ ID NO: 140006 - DNA, 15 bp, Homo sapiens
gtcctgctctggcta

SEQ ID NO: 140007 - DNA, 15 bp, Homo sapiens
cgtcctgctctggct

SEQ ID NO: 140008 - DNA, 15 bp, Homo sapiens
ccgtcctgctctggc

SEQ ID NO: 140009 - DNA, 15 bp, Homo sapiens
tccgtcctgctctgg

SEQ ID NO: 140010 - DNA, 15 bp, Homo sapiens
gtccgtcctgctctg

SEQ ID NO: 140011 - DNA, 15 bp, Homo sapiens
ggtccgtcctgctct

SEQ ID NO: 140012 - DNA, 15 bp, Homo sapiens
aggtccgtcctgctc

SEQ ID NO: 140013 - DNA, 15 bp, Homo sapiens
caggtccgtcctgct

SEQ ID NO: 140014 - DNA, 15 bp, Homo sapiens
ccaggtccgtcctgc

SEQ ID NO: 140015 - DNA, 15 bp, Homo sapiens
accaggtccgtcctg

SEQ ID NO: 140016 - DNA, 15 bp, Homo sapiens
caccaggtccgtcct

SEQ ID NO: 140017 - DNA, 15 bp, Homo sapiens
ccaccaggtccgtcc

SEQ ID NO: 140018 - DNA, 15 bp, Homo sapiens
tccaccaggtccgtc

SEQ ID NO: 140019 - DNA, 15 bp, Homo sapiens
gtccaccaggtccgt

SEQ ID NO: 140020 - DNA, 15 bp, Homo sapiens
ggtccaccaggtccg

SEQ ID NO: 140021 - DNA, 15 bp, Homo sapiens
gggtccaccaggtcc

SEQ ID NO: 140022 - DNA, 15 bp, Homo sapiens
tgggtccaccaggtc

SEQ ID NO: 140023 - DNA, 15 bp, Homo sapiens
atgggtccaccaggt

SEQ ID NO: 140024 - DNA, 15 bp, Homo sapiens
gatgggtccaccagg

SEQ ID NO: 140025 - DNA, 15 bp, Homo sapiens
agatgggtccaccag

SEQ ID NO: 140026 - DNA, 15 bp, Homo sapiens
cagatgggtccacca

SEQ ID NO: 140027 - DNA, 15 bp, Homo sapiens
ccagatgggtccacc

SEQ ID NO: 140028 - DNA, 15 bp, Homo sapiens
accagatgggtccac

SEQ ID NO: 140029 - DNA, 15 bp, Homo sapiens
caccagatgggtcca

SEQ ID NO: 140030 - DNA, 15 bp, Homo sapiens
tcaccagatgggtcc

SEQ ID NO: 140031 - DNA, 15 bp, Homo sapiens
atcaccagatgggtc

SEQ ID NO: 140032 - DNA, 15 bp, Homo sapiens
gatcaccagatgggt

SEQ ID NO: 140033 - DNA, 15 bp, Homo sapiens
ggatcaccagatggg

SEQ ID NO: 140034 - DNA, 15 bp, Homo sapiens
aggatcaccagatgg

SEQ ID NO: 140035 - DNA, 15 bp, Homo sapiens
caggatcaccagatg

SEQ ID NO: 140036 - DNA, 15 bp, Homo sapiens
ccaggatcaccagat

SEQ ID NO: 140037 - DNA, 15 bp, Homo sapiens
cccaggatcaccaga

SEQ ID NO: 140038 - DNA, 15 bp, Homo sapiens
ccccaggatcaccag

SEQ ID NO: 140039 - DNA, 15 bp, Homo sapiens
gccccaggatcacca

SEQ ID NO: 140040 - DNA, 15 bp, Homo sapiens
agccccaggatcacc

SEQ ID NO: 140041 - DNA, 15 bp, Homo sapiens
cagccccaggatcac

SEQ ID NO: 140042 - DNA, 15 bp, Homo sapiens
gcagccccaggatca

SEQ ID NO: 140043 - DNA, 15 bp, Homo sapiens
agcagccccaggatc

SEQ ID NO: 140044 - DNA, 15 bp, Homo sapiens
gagcagccccaggat

SEQ ID NO: 140045 - DNA, 15 bp, Homo sapiens
agagcagccccagga

SEQ ID NO: 140046 - DNA, 15 bp, Homo sapiens
cagagcagccccagg

SEQ ID NO: 140047 - DNA, 15 bp, Homo sapiens
ccagagcagccccag

SEQ ID NO: 140048 - DNA, 15 bp, Homo sapiens
cccagagcagcccca

SEQ ID NO: 140049 - DNA, 15 bp, Homo sapiens
ccccagagcagcccc

SEQ ID NO: 140050 - DNA, 15 bp, Homo sapiens
gccccagagcagccc

SEQ ID NO: 140051 - DNA, 15 bp, Homo sapiens
ggccccagagcagcc

SEQ ID NO: 140052 - DNA, 15 bp, Homo sapiens
aggccccagagcagc

SEQ ID NO: 140053 - DNA, 15 bp, Homo sapiens
caggccccagagcag

SEQ ID NO: 140054 - DNA, 15 bp, Homo sapiens
ccaggccccagagca

SEQ ID NO: 140055 - DNA, 15 bp, Homo sapiens
accaggccccagagc

SEQ ID NO: 140056 - DNA, 15 bp, Homo sapiens
caccaggccccagag

SEQ ID NO: 140057 - DNA, 15 bp, Homo sapiens
tcaccaggccccaga

SEQ ID NO: 140058 - DNA, 15 bp, Homo sapiens
ttcaccaggccccag

SEQ ID NO: 140059 - DNA, 15 bp, Homo sapiens
attcaccaggcccca

SEQ ID NO: 140060 - DNA, 15 bp, Homo sapiens
cattcaccaggcccc

SEQ ID NO: 140061 - DNA, 15 bp, Homo sapiens
ccattcaccaggccc

SEQ ID NO: 140062 - DNA, 15 bp, Homo sapiens
accattcaccaggcc

SEQ ID NO: 140063 - DNA, 15 bp, Homo sapiens
caccattcaccaggc

SEQ ID NO: 140064 - DNA, 15 bp, Homo sapiens
tcaccattcaccagg

SEQ ID NO: 140065 - DNA, 15 bp, Homo sapiens
ttcaccattcaccag

SEQ ID NO: 140066 - DNA, 15 bp, Homo sapiens
attcaccattcacca

SEQ ID NO: 140067 - DNA, 15 bp, Homo sapiens
cattcaccattcacc

SEQ ID NO: 140068 - DNA, 15 bp, Homo sapiens
ccattcaccattcac

SEQ ID NO: 140069 - DNA, 15 bp, Homo sapiens
tccattcaccattca

SEQ ID NO: 140070 - DNA, 15 bp, Homo sapiens
gtccattcaccattc

SEQ ID NO: 140071 - DNA, 15 bp, Homo sapiens
ggtccattcaccatt

SEQ ID NO: 140072 - DNA, 15 bp, Homo sapiens
tggtccattcaccat

SEQ ID NO: 140073 - DNA, 15 bp, Homo sapiens
ctggtccattcacca

SEQ ID NO: 140074 - DNA, 15 bp, Homo sapiens
tctggtccattcacc

SEQ ID NO: 140075 - DNA, 15 bp, Homo sapiens
ctctggtccattcac

SEQ ID NO: 140076 - DNA, 15 bp, Homo sapiens
cctctggtccattca

SEQ ID NO: 140077 - DNA, 15 bp, Homo sapiens
gcctctggtccattc

SEQ ID NO: 140078 - DNA, 15 bp, Homo sapiens
tgcctctggtccatt

SEQ ID NO: 140079 - DNA, 15 bp, Homo sapiens
gtgcctctggtccat

SEQ ID NO: 140080 - DNA, 15 bp, Homo sapiens
ggtgcctctggtcca

SEQ ID NO: 140081 - DNA, 15 bp, Homo sapiens
aggtgcctctggtcc

SEQ ID NO: 140082 - DNA, 15 bp, Homo sapiens
aaggtgcctctggtc

SEQ ID NO: 140083 - DNA, 15 bp, Homo sapiens
aaaggtgcctctggt

SEQ ID NO: 140084 - DNA, 15 bp, Homo sapiens
aaaaggtgcctctgg

SEQ ID NO: 140085 - DNA, 15 bp, Homo sapiens
caaaaggtgcctctg

SEQ ID NO: 140086 - DNA, 15 bp, Homo sapiens
ccaaaaggtgcctct

SEQ ID NO: 140087 - DNA, 15 bp, Homo sapiens
cccaaaaggtgcctc

SEQ ID NO: 140088 - DNA, 15 bp, Homo sapiens
gcccaaaaggtgcct

SEQ ID NO: 140089 - DNA, 15 bp, Homo sapiens
agcccaaaaggtgcc

SEQ ID NO: 140090 - DNA, 15 bp, Homo sapiens
gagcccaaaaggtgc

SEQ ID NO: 140091 - DNA, 15 bp, Homo sapiens
agagcccaaaaggtg

SEQ ID NO: 140092 - DNA, 15 bp, Homo sapiens
cagagcccaaaaggt

SEQ ID NO: 140093 - DNA, 15 bp, Homo sapiens
tcagagcccaaaagg

SEQ ID NO: 140094 - DNA, 15 bp, Homo sapiens
ttcagagcccaaaag

SEQ ID NO: 140095 - DNA, 15 bp, Homo sapiens
gttcagagcccaaaa

SEQ ID NO: 140096 - DNA, 15 bp, Homo sapiens
tgttcagagcccaaa

SEQ ID NO: 140097 - DNA, 15 bp, Homo sapiens
ttgttcagagcccaa

SEQ ID NO: 140098 - DNA, 15 bp, Homo sapiens
tttgttcagagccca

SEQ ID NO: 140099 - DNA, 15 bp, Homo sapiens
ctttgttcagagccc

SEQ ID NO: 140100 - DNA, 15 bp, Homo sapiens
tctttgttcagagcc

SEQ ID NO: 140101 - DNA, 15 bp, Homo sapiens
ttctttgttcagagc

SEQ ID NO: 140102 - DNA, 15 bp, Homo sapiens
cttctttgttcagag

SEQ ID NO: 140103 - DNA, 15 bp, Homo sapiens
tcttctttgttcaga

SEQ ID NO: 140104 - DNA, 15 bp, Homo sapiens
ttcttctttgttcag

SEQ ID NO: 140105 - DNA, 15 bp, Homo sapiens
tttcttctttgttca

SEQ ID NO: 140106 - DNA, 15 bp, Homo sapiens
ctttcttctttgttc

SEQ ID NO: 140107 - DNA, 15 bp, Homo sapiens
cctttcttctttgtt

SEQ ID NO: 140108 - DNA, 15 bp, Homo sapiens
gcctttcttctttgt

SEQ ID NO: 140109 - DNA, 15 bp, Homo sapiens
ggcctttcttctttg

SEQ ID NO: 140110 - DNA, 15 bp, Homo sapiens
tggcctttcttcttt

SEQ ID NO: 140111 - DNA, 15 bp, Homo sapiens
ctggcctttcttctt

SEQ ID NO: 140112 - DNA, 15 bp, Homo sapiens
cctggcctttcttct

SEQ ID NO: 140113 - DNA, 15 bp, Homo sapiens
gcctggcctttcttc

SEQ ID NO: 140114 - DNA, 15 bp, Homo sapiens
agcctggcctttctt

SEQ ID NO: 140115 - DNA, 15 bp, Homo sapiens
gagcctggcctttct

SEQ ID NO: 140116 - DNA, 15 bp, Homo sapiens
ggagcctggcctttc

SEQ ID NO: 140117 - DNA, 15 bp, Homo sapiens
tggagcctggccttt

SEQ ID NO: 140118 - DNA, 15 bp, Homo sapiens
ctggagcctggcctt

SEQ ID NO: 140119 - DNA, 15 bp, Homo sapiens
tctggagcctggcct

SEQ ID NO: 140120 - DNA, 15 bp, Homo sapiens
gtctggagcctggcc

SEQ ID NO: 140121 - DNA, 15 bp, Homo sapiens
ggtctggagcctggc

SEQ ID NO: 140122 - DNA, 15 bp, Homo sapiens
gggtctggagcctgg

SEQ ID NO: 140123 - DNA, 15 bp, Homo sapiens
tgggtctggagcctg

SEQ ID NO: 140124 - DNA, 15 bp, Homo sapiens
ctgggtctggagcct

SEQ ID NO: 140125 - DNA, 15 bp, Homo sapiens
gctgggtctggagcc

SEQ ID NO: 140126 - DNA, 15 bp, Homo sapiens
ggctgggtctggagc

SEQ ID NO: 140127 - DNA, 15 bp, Homo sapiens
gggctgggtctggag

SEQ ID NO: 140128 - DNA, 15 bp, Homo sapiens
agggctgggtctgga

SEQ ID NO: 140129 - DNA, 15 bp, Homo sapiens
gagggctgggtctgg

SEQ ID NO: 140130 - DNA, 15 bp, Homo sapiens
ggagggctgggtctg

SEQ ID NO: 140131 - DNA, 15 bp, Homo sapiens
aggagggctgggtct

SEQ ID NO: 140132 - DNA, 15 bp, Homo sapiens
caggagggctgggtc

SEQ ID NO: 140133 - DNA, 15 bp, Homo sapiens
gcaggagggctgggt

SEQ ID NO: 140134 - DNA, 15 bp, Homo sapiens
ggcaggagggctggg

SEQ ID NO: 140135 - DNA, 15 bp, Homo sapiens
aggcaggagggctgg

SEQ ID NO: 140136 - DNA, 15 bp, Homo sapiens
caggcaggagggctg

SEQ ID NO: 140137 - DNA, 15 bp, Homo sapiens
ccaggcaggagggct

SEQ ID NO: 140138 - DNA, 15 bp, Homo sapiens
accaggcaggagggc

SEQ ID NO: 140139 - DNA, 15 bp, Homo sapiens
caccaggcaggaggg

SEQ ID NO: 140140 - DNA, 15 bp, Homo sapiens
ccaccaggcaggagg

SEQ ID NO: 140141 - DNA, 15 bp, Homo sapiens
cccaccaggcaggag

SEQ ID NO: 140142 - DNA, 15 bp, Homo sapiens
gcccaccaggcagga

SEQ ID NO: 140143 - DNA, 15 bp, Homo sapiens
agcccaccaggcagg

SEQ ID NO: 140144 - DNA, 15 bp, Homo sapiens
aagcccaccaggcag

SEQ ID NO: 140145 - DNA, 15 bp, Homo sapiens
aaagcccaccaggca

SEQ ID NO: 140146 - DNA, 15 bp, Homo sapiens
aaaagcccaccaggc

SEQ ID NO: 140147 - DNA, 15 bp, Homo sapiens
aaaaagcccaccagg

SEQ ID NO: 140148 - DNA, 15 bp, Homo sapiens
taaaaagcccaccag

SEQ ID NO: 140149 - DNA, 15 bp, Homo sapiens
ctaaaaagcccacca

SEQ ID NO: 140150 - DNA, 15 bp, Homo sapiens
actaaaaagcccacc

SEQ ID NO: 140151 - DNA, 15 bp, Homo sapiens
aactaaaaagcccac

SEQ ID NO: 140152 - DNA, 15 bp, Homo sapiens
caactaaaaagccca

SEQ ID NO: 140153 - DNA, 15 bp, Homo sapiens
ccaactaaaaagccc

SEQ ID NO: 140154 - DNA, 15 bp, Homo sapiens
gccaactaaaaagcc

SEQ ID NO: 140155 - DNA, 15 bp, Homo sapiens
tgccaactaaaaagc

SEQ ID NO: 140156 - DNA, 15 bp, Homo sapiens
gtgccaactaaaaag

SEQ ID NO: 140157 - DNA, 15 bp, Homo sapiens
agtgccaactaaaaa

SEQ ID NO: 140158 - DNA, 15 bp, Homo sapiens
aagtgccaactaaaa

SEQ ID NO: 140159 - DNA, 15 bp, Homo sapiens
aaagtgccaactaaa

SEQ ID NO: 140160 - DNA, 15 bp, Homo sapiens
gaaagtgccaactaa

SEQ ID NO: 140161 - DNA, 15 bp, Homo sapiens
ggaaagtgccaacta

SEQ ID NO: 140162 - DNA, 15 bp, Homo sapiens
gggaaagtgccaact

SEQ ID NO: 140163 - DNA, 15 bp, Homo sapiens
ggggaaagtgccaac

SEQ ID NO: 140164 - DNA, 15 bp, Homo sapiens
aggggaaagtgccaa

SEQ ID NO: 140165 - DNA, 15 bp, Homo sapiens
taggggaaagtgcca

SEQ ID NO: 140166 - DNA, 15 bp, Homo sapiens
ataggggaaagtgcc

SEQ ID NO: 140167 - DNA, 15 bp, Homo sapiens
aataggggaaagtgc

SEQ ID NO: 140168 - DNA, 15 bp, Homo sapiens
aaataggggaaagtg

SEQ ID NO: 140169 - DNA, 15 bp, Homo sapiens
taaataggggaaagt

SEQ ID NO: 140170 - DNA, 15 bp, Homo sapiens
ctaaataggggaaag

SEQ ID NO: 140171 - DNA, 15 bp, Homo sapiens
cctaaataggggaaa

SEQ ID NO: 140172 - DNA, 15 bp, Homo sapiens
tcctaaataggggaa

SEQ ID NO: 140173 - DNA, 15 bp, Homo sapiens
ttcctaaatagggga

SEQ ID NO: 140174 - DNA, 15 bp, Homo sapiens
gttcctaaatagggg

SEQ ID NO: 140175 - DNA, 15 bp, Homo sapiens
ggttcctaaataggg

SEQ ID NO: 140176 - DNA, 15 bp, Homo sapiens
aggttcctaaatagg

SEQ ID NO: 140177 - DNA, 15 bp, Homo sapiens
caggttcctaaatag

SEQ ID NO: 140178 - DNA, 15 bp, Homo sapiens
acaggttcctaaata

SEQ ID NO: 140179 - DNA, 15 bp, Homo sapiens
cacaggttcctaaat

SEQ ID NO: 140180 - DNA, 15 bp, Homo sapiens
gcacaggttcctaaa

SEQ ID NO: 140181 - DNA, 15 bp, Homo sapiens
agcacaggttcctaa

SEQ ID NO: 140182 - DNA, 15 bp, Homo sapiens
tagcacaggttccta

SEQ ID NO: 140183 - DNA, 15 bp, Homo sapiens
gtagcacaggttcct

SEQ ID NO: 140184 - DNA, 15 bp, Homo sapiens
agtagcacaggttcc

SEQ ID NO: 140185 - DNA, 15 bp, Homo sapiens
gagtagcacaggttc

SEQ ID NO: 140186 - DNA, 15 bp, Homo sapiens
agagtagcacaggtt

SEQ ID NO: 140187 - DNA, 15 bp, Homo sapiens
cagagtagcacaggt

SEQ ID NO: 140188 - DNA, 15 bp, Homo sapiens
tcagagtagcacagg

SEQ ID NO: 140189 - DNA, 15 bp, Homo sapiens
atcagagtagcacag

SEQ ID NO: 140190 - DNA, 15 bp, Homo sapiens
tatcagagtagcaca

SEQ ID NO: 140191 - DNA, 15 bp, Homo sapiens
ctatcagagtagcac

SEQ ID NO: 140192 - DNA, 15 bp, Homo sapiens
cctatcagagtagca

SEQ ID NO: 140193 - DNA, 15 bp, Homo sapiens
gcctatcagagtagc

SEQ ID NO: 140194 - DNA, 15 bp, Homo sapiens
agcctatcagagtag

SEQ ID NO: 140195 - DNA, 15 bp, Homo sapiens
cagcctatcagagta

SEQ ID NO: 140196 - DNA, 15 bp, Homo sapiens
tcagcctatcagagt

SEQ ID NO: 140197 - DNA, 15 bp, Homo sapiens
ctcagcctatcagag

SEQ ID NO: 140198 - DNA, 15 bp, Homo sapiens
cctcagcctatcaga

SEQ ID NO: 140199 - DNA, 15 bp, Homo sapiens
gcctcagcctatcag

SEQ ID NO: 140200 - DNA, 15 bp, Homo sapiens
tgcctcagcctatca

SEQ ID NO: 140201 - DNA, 15 bp, Homo sapiens
ctgcctcagcctatc

SEQ ID NO: 140202 - DNA, 15 bp, Homo sapiens
gctgcctcagcctat

SEQ ID NO: 140203 - DNA, 15 bp, Homo sapiens
ggctgcctcagccta

SEQ ID NO: 140204 - DNA, 15 bp, Homo sapiens
gggctgcctcagcct

SEQ ID NO: 140205 - DNA, 15 bp, Homo sapiens
tgggctgcctcagcc

SEQ ID NO: 140206 - DNA, 15 bp, Homo sapiens
ctgggctgcctcagc

SEQ ID NO: 140207 - DNA, 15 bp, Homo sapiens
cctgggctgcctcag

SEQ ID NO: 140208 - DNA, 15 bp, Homo sapiens
gcctgggctgcctca

SEQ ID NO: 140209 - DNA, 15 bp, Homo sapiens
cgcctgggctgcctc

SEQ ID NO: 140210 - DNA, 15 bp, Homo sapiens
gcgcctgggctgcct

SEQ ID NO: 140211 - DNA, 15 bp, Homo sapiens
ggcgcctgggctgcc

SEQ ID NO: 140212 - DNA, 15 bp, Homo sapiens
aggcgcctgggctgc

SEQ ID NO: 140213 - DNA, 15 bp, Homo sapiens
caggcgcctgggctg

SEQ ID NO: 140214 - DNA, 15 bp, Homo sapiens
acaggcgcctgggct

SEQ ID NO: 140215 - DNA, 15 bp, Homo sapiens
cacaggcgcctgggc

SEQ ID NO: 140216 - DNA, 15 bp, Homo sapiens
acacaggcgcctggg

SEQ ID NO: 140217 - DNA, 15 bp, Homo sapiens
aacacaggcgcctgg

SEQ ID NO: 140218 - DNA, 15 bp, Homo sapiens
taacacaggcgcctg

SEQ ID NO: 140219 - DNA, 15 bp, Homo sapiens
ttaacacaggcgcct

SEQ ID NO: 140220 - DNA, 15 bp, Homo sapiens
cttaacacaggcgcc

SEQ ID NO: 140221 - DNA, 15 bp, Homo sapiens
ccttaacacaggcgc

SEQ ID NO: 140222 - DNA, 15 bp, Homo sapiens
accttaacacaggcg

SEQ ID NO: 140223 - DNA, 15 bp, Homo sapiens
aaccttaacacaggc

SEQ ID NO: 140224 - DNA, 15 bp, Homo sapiens
caaccttaacacagg

SEQ ID NO: 140225 - DNA, 15 bp, Homo sapiens
gcaaccttaacacag

SEQ ID NO: 140226 - DNA, 15 bp, Homo sapiens
agcaaccttaacaca

SEQ ID NO: 140227 - DNA, 15 bp, Homo sapiens
aagcaaccttaacac

SEQ ID NO: 140228 - DNA, 15 bp, Homo sapiens
taagcaaccttaaca

SEQ ID NO: 140229 - DNA, 15 bp, Homo sapiens
ttaagcaaccttaac

SEQ ID NO: 140230 - DNA, 15 bp, Homo sapiens
gttaagcaaccttaa

SEQ ID NO: 140231 - DNA, 15 bp, Homo sapiens
tgttaagcaacctta

SEQ ID NO: 140232 - DNA, 15 bp, Homo sapiens
atgttaagcaacctt

SEQ ID NO: 140233 - DNA, 15 bp, Homo sapiens
gatgttaagcaacct

SEQ ID NO: 140234 - DNA, 15 bp, Homo sapiens
agatgttaagcaacc

SEQ ID NO: 140235 - DNA, 15 bp, Homo sapiens
cagatgttaagcaac

SEQ ID NO: 140236 - DNA, 15 bp, Homo sapiens
ccagatgttaagcaa

SEQ ID NO: 140237 - DNA, 15 bp, Homo sapiens
accagatgttaagca

SEQ ID NO: 140238 - DNA, 15 bp, Homo sapiens
taccagatgttaagc

SEQ ID NO: 140239 - DNA, 15 bp, Homo sapiens
ataccagatgttaag

SEQ ID NO: 140240 - DNA, 15 bp, Homo sapiens
aataccagatgttaa

SEQ ID NO: 140241 - DNA, 15 bp, Homo sapiens
aaataccagatgtta

SEQ ID NO: 140242 - DNA, 15 bp, Homo sapiens
caaataccagatgtt

SEQ ID NO: 140243 - DNA, 15 bp, Homo sapiens
acaaataccagatgt

SEQ ID NO: 140244 - DNA, 15 bp, Homo sapiens
gacaaataccagatg

SEQ ID NO: 140245 - DNA, 15 bp, Homo sapiens
agacaaataccagat

SEQ ID NO: 140246 - DNA, 15 bp, Homo sapiens
gagacaaataccaga

SEQ ID NO: 140247 - DNA, 15 bp, Homo sapiens
ggagacaaataccag

SEQ ID NO: 140248 - DNA, 15 bp, Homo sapiens
tggagacaaatacca

SEQ ID NO: 140249 - DNA, 15 bp, Homo sapiens
ctggagacaaatacc

SEQ ID NO: 140250 - DNA, 15 bp, Homo sapiens
tctggagacaaatac

SEQ ID NO: 140251 - DNA, 15 bp, Homo sapiens
gtctggagacaaata

SEQ ID NO: 140252 - DNA, 15 bp, Homo sapiens
agtctggagacaaat

SEQ ID NO: 140253 - DNA, 15 bp, Homo sapiens
gagtctggagacaaa

SEQ ID NO: 140254 - DNA, 15 bp, Homo sapiens
agagtctggagacaa

SEQ ID NO: 140255 - DNA, 15 bp, Homo sapiens
aagagtctggagaca

SEQ ID NO: 140256 - DNA, 15 bp, Homo sapiens
aaagagtctggagac

SEQ ID NO: 140257 - DNA, 15 bp, Homo sapiens
aaaagagtctggaga

SEQ ID NO: 140258 - DNA, 15 bp, Homo sapiens
gaaaagagtctggag

SEQ ID NO: 140259 - DNA, 15 bp, Homo sapiens
agaaaagagtctgga

SEQ ID NO: 140260 - DNA, 15 bp, Homo sapiens
gagaaaagagtctgg

SEQ ID NO: 140261 - DNA, 15 bp, Homo sapiens
agagaaaagagtctg

SEQ ID NO: 140262 - DNA, 15 bp, Homo sapiens
tagagaaaagagtct

SEQ ID NO: 140263 - DNA, 15 bp, Homo sapiens
atagagaaaagagtc

SEQ ID NO: 140264 - DNA, 15 bp, Homo sapiens
gatagagaaaagagt

SEQ ID NO: 140265 - DNA, 15 bp, Homo sapiens
tgatagagaaaagag

SEQ ID NO: 140266 - DNA, 15 bp, Homo sapiens
ctgatagagaaaaga

SEQ ID NO: 140267 - DNA, 15 bp, Homo sapiens
cctgatagagaaaag

SEQ ID NO: 140268 - DNA, 15 bp, Homo sapiens
ccctgatagagaaaa

SEQ ID NO: 140269 - DNA, 15 bp, Homo sapiens
tccctgatagagaaa

SEQ ID NO: 140270 - DNA, 15 bp, Homo sapiens
atccctgatagagaa

SEQ ID NO: 140271 - DNA, 15 bp, Homo sapiens
aatccctgatagaga

SEQ ID NO: 140272 - DNA, 15 bp, Homo sapiens
taatccctgatagag

SEQ ID NO: 140273 - DNA, 15 bp, Homo sapiens
ataatccctgataga

SEQ ID NO: 140274 - DNA, 15 bp, Homo sapiens
cataatccctgatag

SEQ ID NO: 140275 - DNA, 15 bp, Homo sapiens
acataatccctgata

SEQ ID NO: 140276 - DNA, 15 bp, Homo sapiens
cacataatccctgat

SEQ ID NO: 140277 - DNA, 15 bp, Homo sapiens
acacataatccctga

SEQ ID NO: 140278 - DNA, 15 bp, Homo sapiens
aacacataatccctg

SEQ ID NO: 140279 - DNA, 15 bp, Homo sapiens
gaacacataatccct

SEQ ID NO: 140280 - DNA, 15 bp, Homo sapiens
agaacacataatccc

SEQ ID NO: 140281 - DNA, 15 bp, Homo sapiens
cagaacacataatcc

SEQ ID NO: 140282 - DNA, 15 bp, Homo sapiens
tcagaacacataatc

SEQ ID NO: 140283 - DNA, 15 bp, Homo sapiens
ctcagaacacataat

SEQ ID NO: 140284 - DNA, 15 bp, Homo sapiens
cctcagaacacataa

SEQ ID NO: 140285 - DNA, 15 bp, Homo sapiens
gcctcagaacacata

SEQ ID NO: 140286 - DNA, 15 bp, Homo sapiens
tgcctcagaacacat

SEQ ID NO: 140287 - DNA, 15 bp, Homo sapiens
gtgcctcagaacaca

SEQ ID NO: 140288 - DNA, 15 bp, Homo sapiens
ggtgcctcagaacac

SEQ ID NO: 140289 - DNA, 15 bp, Homo sapiens
gggtgcctcagaaca

SEQ ID NO: 140290 - DNA, 15 bp, Homo sapiens
tgggtgcctcagaac

SEQ ID NO: 140291 - DNA, 15 bp, Homo sapiens
ttgggtgcctcagaa

SEQ ID NO: 140292 - DNA, 15 bp, Homo sapiens
tttgggtgcctcaga

SEQ ID NO: 140293 - DNA, 15 bp, Homo sapiens
ttttgggtgcctcag

SEQ ID NO: 140294 - DNA, 15 bp, Homo sapiens
gttttgggtgcctca

SEQ ID NO: 140295 - DNA, 15 bp, Homo sapiens
tgttttgggtgcctc

SEQ ID NO: 140296 - DNA, 15 bp, Homo sapiens
atgttttgggtgcct

SEQ ID NO: 140297 - DNA, 15 bp, Homo sapiens
gatgttttgggtgcc

SEQ ID NO: 140298 - DNA, 15 bp, Homo sapiens
agatgttttgggtgc

SEQ ID NO: 140299 - DNA, 15 bp, Homo sapiens
aagatgttttgggtg

SEQ ID NO: 140300 - DNA, 15 bp, Homo sapiens
aaagatgttttgggt

SEQ ID NO: 140301 - DNA, 15 bp, Homo sapiens
gaaagatgttttggg

SEQ ID NO: 140302 - DNA, 15 bp, Homo sapiens
agaaagatgttttgg

SEQ ID NO: 140303 - DNA, 15 bp, Homo sapiens
cagaaagatgttttg

SEQ ID NO: 140304 - DNA, 15 bp, Homo sapiens
acagaaagatgtttt

SEQ ID NO: 140305 - DNA, 15 bp, Homo sapiens
tacagaaagatgttt

SEQ ID NO: 140306 - DNA, 15 bp, Homo sapiens
gtacagaaagatgtt

SEQ ID NO: 140307 - DNA, 15 bp, Homo sapiens
tgtacagaaagatgt

SEQ ID NO: 140308 - DNA, 15 bp, Homo sapiens
gtgtacagaaagatg

SEQ ID NO: 140309 - DNA, 15 bp, Homo sapiens
ggtgtacagaaagat

SEQ ID NO: 140310 - DNA, 15 bp, Homo sapiens
tggtgtacagaaaga

SEQ ID NO: 140311 - DNA, 15 bp, Homo sapiens
ttggtgtacagaaag

SEQ ID NO: 140312 - DNA, 15 bp, Homo sapiens
cttggtgtacagaaa

SEQ ID NO: 140313 - DNA, 15 bp, Homo sapiens
acttggtgtacagaa

SEQ ID NO: 140314 - DNA, 15 bp, Homo sapiens
aacttggtgtacaga

SEQ ID NO: 140315 - DNA, 15 bp, Homo sapiens
gaacttggtgtacag

SEQ ID NO: 140316 - DNA, 15 bp, Homo sapiens
ggaacttggtgtaca

SEQ ID NO: 140317 - DNA, 15 bp, Homo sapiens
aggaacttggtgtac

SEQ ID NO: 140318 - DNA, 15 bp, Homo sapiens
aaggaacttggtgta

SEQ ID NO: 140319 - DNA, 15 bp, Homo sapiens
gaaggaacttggtgt

SEQ ID NO: 140320 - DNA, 15 bp, Homo sapiens
tgaaggaacttggtg

SEQ ID NO: 140321 - DNA, 15 bp, Homo sapiens
atgaaggaacttggt

SEQ ID NO: 140322 - DNA, 15 bp, Homo sapiens
catgaaggaacttgg

SEQ ID NO: 140323 - DNA, 15 bp, Homo sapiens
tcatgaaggaacttg

SEQ ID NO: 140324 - DNA, 15 bp, Homo sapiens
ttcatgaaggaactt

SEQ ID NO: 140325 - DNA, 15 bp, Homo sapiens
cttcatgaaggaact

SEQ ID NO: 140326 - DNA, 15 bp, Homo sapiens
tcttcatgaaggaac

SEQ ID NO: 140327 - DNA, 15 bp, Homo sapiens
gtcttcatgaaggaa

SEQ ID NO: 140328 - DNA, 15 bp, Homo sapiens
agtcttcatgaagga

SEQ ID NO: 140329 - DNA, 15 bp, Homo sapiens
aagtcttcatgaagg

SEQ ID NO: 140330 - DNA, 15 bp, Homo sapiens
gaagtcttcatgaag

SEQ ID NO: 140331 - DNA, 15 bp, Homo sapiens
ggaagtcttcatgaa

SEQ ID NO: 140332 - DNA, 15 bp, Homo sapiens
cggaagtcttcatga

SEQ ID NO: 140333 - DNA, 15 bp, Homo sapiens
ccggaagtcttcatg

SEQ ID NO: 140334 - DNA, 15 bp, Homo sapiens
cccggaagtcttcat

SEQ ID NO: 140335 - DNA, 15 bp, Homo sapiens
acccggaagtcttca

SEQ ID NO: 140336 - DNA, 15 bp, Homo sapiens
gacccggaagtcttc

SEQ ID NO: 140337 - DNA, 15 bp, Homo sapiens
agacccggaagtctt

SEQ ID NO: 140338 - DNA, 15 bp, Homo sapiens
aagacccggaagtct

SEQ ID NO: 140339 - DNA, 15 bp, Homo sapiens
gaagacccggaagtc

SEQ ID NO: 140340 - DNA, 15 bp, Homo sapiens
agaagacccggaagt

SEQ ID NO: 140341 - DNA, 15 bp, Homo sapiens
aagaagacccggaag

SEQ ID NO: 140342 - DNA, 15 bp, Homo sapiens
aaagaagacccggaa

SEQ ID NO: 140343 - DNA, 15 bp, Homo sapiens
gaaagaagacccgga

SEQ ID NO: 140344 - DNA, 15 bp, Homo sapiens
ggaaagaagacccgg

SEQ ID NO: 140345 - DNA, 15 bp, Homo sapiens
tggaaagaagacccg

SEQ ID NO: 140346 - DNA, 15 bp, Homo sapiens
gtggaaagaagaccc

SEQ ID NO: 140347 - DNA, 15 bp, Homo sapiens
agtggaaagaagacc

SEQ ID NO: 140348 - DNA, 15 bp, Homo sapiens
aagtggaaagaagac

SEQ ID NO: 140349 - DNA, 15 bp, Homo sapiens
gaagtggaaagaaga

SEQ ID NO: 140350 - DNA, 15 bp, Homo sapiens
tgaagtggaaagaag

SEQ ID NO: 140351 - DNA, 15 bp, Homo sapiens
gtgaagtggaaagaa

SEQ ID NO: 140352 - DNA, 15 bp, Homo sapiens
tgtgaagtggaaaga

SEQ ID NO: 140353 - DNA, 15 bp, Homo sapiens
gtgtgaagtggaaag

SEQ ID NO: 140354 - DNA, 15 bp, Homo sapiens
agtgtgaagtggaaa

SEQ ID NO: 140355 - DNA, 15 bp, Homo sapiens
gagtgtgaagtggaa

SEQ ID NO: 140356 - DNA, 15 bp, Homo sapiens
ggagtgtgaagtgga

SEQ ID NO: 140357 - DNA, 15 bp, Homo sapiens
gggagtgtgaagtgg

SEQ ID NO: 140358 - DNA, 15 bp, Homo sapiens
agggagtgtgaagtg

SEQ ID NO: 140359 - DNA, 15 bp, Homo sapiens
aagggagtgtgaagt

SEQ ID NO: 140360 - DNA, 15 bp, Homo sapiens
aaagggagtgtgaag

SEQ ID NO: 140361 - DNA, 15 bp, Homo sapiens
aaaagggagtgtgaa

SEQ ID NO: 140362 - DNA, 15 bp, Homo sapiens
taaaagggagtgtga

SEQ ID NO: 140363 - DNA, 15 bp, Homo sapiens
ataaaagggagtgtg

SEQ ID NO: 140364 - DNA, 15 bp, Homo sapiens
gataaaagggagtgt

SEQ ID NO: 140365 - DNA, 15 bp, Homo sapiens
agataaaagggagtg

SEQ ID NO: 140366 - DNA, 15 bp, Homo sapiens
gagataaaagggagt

SEQ ID NO: 140367 - DNA, 15 bp, Homo sapiens
tgagataaaagggag

SEQ ID NO: 140368 - DNA, 15 bp, Homo sapiens
ttgagataaaaggga

SEQ ID NO: 140369 - DNA, 15 bp, Homo sapiens
cttgagataaaaggg

SEQ ID NO: 140370 - DNA, 15 bp, Homo sapiens
gcttgagataaaagg

SEQ ID NO: 140371 - DNA, 15 bp, Homo sapiens
agcttgagataaaag

SEQ ID NO: 140372 - DNA, 15 bp, Homo sapiens
aagcttgagataaaa

SEQ ID NO: 140373 - DNA, 15 bp, Homo sapiens
taagcttgagataaa

SEQ ID NO: 140374 - DNA, 15 bp, Homo sapiens
ataagcttgagataa

SEQ ID NO: 140375 - DNA, 15 bp, Homo sapiens
aataagcttgagata

SEQ ID NO: 140376 - DNA, 15 bp, Homo sapiens
gaataagcttgagat

SEQ ID NO: 140377 - DNA, 15 bp, Homo sapiens
agaataagcttgaga

SEQ ID NO: 140378 - DNA, 15 bp, Homo sapiens
cagaataagcttgag

SEQ ID NO: 140379 - DNA, 15 bp, Homo sapiens
gcagaataagcttga

SEQ ID NO: 140380 - DNA, 15 bp, Homo sapiens
ggcagaataagcttg

SEQ ID NO: 140381 - DNA, 15 bp, Homo sapiens
tggcagaataagctt

SEQ ID NO: 140382 - DNA, 15 bp, Homo sapiens
gtggcagaataagct

SEQ ID NO: 140383 - DNA, 15 bp, Homo sapiens
tgtggcagaataagc

SEQ ID NO: 140384 - DNA, 15 bp, Homo sapiens
ctgtggcagaataag

SEQ ID NO: 140385 - DNA, 15 bp, Homo sapiens
cctgtggcagaataa

SEQ ID NO: 140386 - DNA, 15 bp, Homo sapiens
gcctgtggcagaata

SEQ ID NO: 140387 - DNA, 15 bp, Homo sapiens
tgcctgtggcagaat

SEQ ID NO: 140388 - DNA, 15 bp, Homo sapiens
atgcctgtggcagaa

SEQ ID NO: 140389 - DNA, 15 bp, Homo sapiens
aatgcctgtggcaga

SEQ ID NO: 140390 - DNA, 15 bp, Homo sapiens
aaatgcctgtggcag

SEQ ID NO: 140391 - DNA, 15 bp, Homo sapiens
caaatgcctgtggca

SEQ ID NO: 140392 - DNA, 15 bp, Homo sapiens
ccaaatgcctgtggc

SEQ ID NO: 140393 - DNA, 15 bp, Homo sapiens
accaaatgcctgtgg

SEQ ID NO: 140394 - DNA, 15 bp, Homo sapiens
aaccaaatgcctgtg

SEQ ID NO: 140395 - DNA, 15 bp, Homo sapiens
taaccaaatgcctgt

SEQ ID NO: 140396 - DNA, 15 bp, Homo sapiens
ttaaccaaatgcctg

SEQ ID NO: 140397 - DNA, 15 bp, Homo sapiens
cttaaccaaatgcct

SEQ ID NO: 140398 - DNA, 15 bp, Homo sapiens
gcttaaccaaatgcc

SEQ ID NO: 140399 - DNA, 15 bp, Homo sapiens
tgcttaaccaaatgc

SEQ ID NO: 140400 - DNA, 15 bp, Homo sapiens
ttgcttaaccaaatg

SEQ ID NO: 140401 - DNA, 15 bp, Homo sapiens
tttgcttaaccaaat

SEQ ID NO: 140402 - DNA, 15 bp, Homo sapiens
atttgcttaaccaaa

SEQ ID NO: 140403 - DNA, 15 bp, Homo sapiens
tatttgcttaaccaa

SEQ ID NO: 140404 - DNA, 15 bp, Homo sapiens
atatttgcttaacca

SEQ ID NO: 140405 - DNA, 15 bp, Homo sapiens
catatttgcttaacc

SEQ ID NO: 140406 - DNA, 15 bp, Homo sapiens
acatatttgcttaac

SEQ ID NO: 140407 - DNA, 15 bp, Homo sapiens
aacatatttgcttaa

SEQ ID NO: 140408 - DNA, 15 bp, Homo sapiens
caacatatttgctta

SEQ ID NO: 140409 - DNA, 15 bp, Homo sapiens
gcaacatatttgctt

SEQ ID NO: 140410 - DNA, 15 bp, Homo sapiens
agcaacatatttgct

SEQ ID NO: 140411 - DNA, 15 bp, Homo sapiens
gagcaacatatttgc

SEQ ID NO: 140412 - DNA, 15 bp, Homo sapiens
tgagcaacatatttg

SEQ ID NO: 140413 - DNA, 15 bp, Homo sapiens
atgagcaacatattt

SEQ ID NO: 140414 - DNA, 15 bp, Homo sapiens
aatgagcaacatatt

SEQ ID NO: 140415 - DNA, 15 bp, Homo sapiens
caatgagcaacatat

SEQ ID NO: 140416 - DNA, 15 bp, Homo sapiens
ccaatgagcaacata

SEQ ID NO: 140417 - DNA, 15 bp, Homo sapiens
gccaatgagcaacat

SEQ ID NO: 140418 - DNA, 15 bp, Homo sapiens
tgccaatgagcaaca

SEQ ID NO: 140419 - DNA, 15 bp, Homo sapiens
ttgccaatgagcaac

SEQ ID NO: 140420 - DNA, 15 bp, Homo sapiens
gttgccaatgagcaa

SEQ ID NO: 140421 - DNA, 15 bp, Homo sapiens
agttgccaatgagca

SEQ ID NO: 140422 - DNA, 15 bp, Homo sapiens
aagttgccaatgagc

SEQ ID NO: 140423 - DNA, 15 bp, Homo sapiens
caagttgccaatgag

SEQ ID NO: 140424 - DNA, 15 bp, Homo sapiens
acaagttgccaatga

SEQ ID NO: 140425 - DNA, 15 bp, Homo sapiens
gacaagttgccaatg

SEQ ID NO: 140426 - DNA, 15 bp, Homo sapiens
ggacaagttgccaat

SEQ ID NO: 140427 - DNA, 15 bp, Homo sapiens
gggacaagttgccaa

SEQ ID NO: 140428 - DNA, 15 bp, Homo sapiens
tgggacaagttgcca

SEQ ID NO: 140429 - DNA, 15 bp, Homo sapiens
atgggacaagttgcc

SEQ ID NO: 140430 - DNA, 15 bp, Homo sapiens
tatgggacaagttgc

SEQ ID NO: 140431 - DNA, 15 bp, Homo sapiens
gtatgggacaagttg

SEQ ID NO: 140432 - DNA, 15 bp, Homo sapiens
ggtatgggacaagtt

SEQ ID NO: 140433 - DNA, 15 bp, Homo sapiens
aggtatgggacaagt

SEQ ID NO: 140434 - DNA, 15 bp, Homo sapiens
caggtatgggacaag

SEQ ID NO: 140435 - DNA, 15 bp, Homo sapiens
ccaggtatgggacaa

SEQ ID NO: 140436 - DNA, 15 bp, Homo sapiens
cccaggtatgggaca

SEQ ID NO: 140437 - DNA, 15 bp, Homo sapiens
gcccaggtatgggac

SEQ ID NO: 140438 - DNA, 15 bp, Homo sapiens
ggcccaggtatggga

SEQ ID NO: 140439 - DNA, 15 bp, Homo sapiens
tggcccaggtatggg

SEQ ID NO: 140440 - DNA, 15 bp, Homo sapiens
ctggcccaggtatgg

SEQ ID NO: 140441 - DNA, 15 bp, Homo sapiens
cctggcccaggtatg

SEQ ID NO: 140442 - DNA, 15 bp, Homo sapiens
acctggcccaggtat

SEQ ID NO: 140443 - DNA, 15 bp, Homo sapiens
aacctggcccaggta

SEQ ID NO: 140444 - DNA, 15 bp, Homo sapiens
taacctggcccaggt

SEQ ID NO: 140445 - DNA, 15 bp, Homo sapiens
ataacctggcccagg

SEQ ID NO: 140446 - DNA, 15 bp, Homo sapiens
cataacctggcccag

SEQ ID NO: 140447 - DNA, 15 bp, Homo sapiens
tcataacctggccca

SEQ ID NO: 140448 - DNA, 15 bp, Homo sapiens
ttcataacctggccc

SEQ ID NO: 140449 - DNA, 15 bp, Homo sapiens
cttcataacctggcc

SEQ ID NO: 140450 - DNA, 15 bp, Homo sapiens
tcttcataacctggc

SEQ ID NO: 140451 - DNA, 15 bp, Homo sapiens
ctcttcataacctgg

SEQ ID NO: 140452 - DNA, 15 bp, Homo sapiens
cctcttcataacctg

SEQ ID NO: 140453 - DNA, 15 bp, Homo sapiens
tcctcttcataacct

SEQ ID NO: 140454 - DNA, 15 bp, Homo sapiens
atcctcttcataacc

SEQ ID NO: 140455 - DNA, 15 bp, Homo sapiens
aatcctcttcataac

SEQ ID NO: 140456 - DNA, 15 bp, Homo sapiens
gaatcctcttcataa

SEQ ID NO: 140457 - DNA, 15 bp, Homo sapiens
ggaatcctcttcata

SEQ ID NO: 140458 - DNA, 15 bp, Homo sapiens
tggaatcctcttcat

SEQ ID NO: 140459 - DNA, 15 bp, Homo sapiens
ttggaatcctcttca

SEQ ID NO: 140460 - DNA, 15 bp, Homo sapiens
cttggaatcctcttc

SEQ ID NO: 140461 - DNA, 15 bp, Homo sapiens
tcttggaatcctctt

SEQ ID NO: 140462 - DNA, 15 bp, Homo sapiens
ctcttggaatcctct

SEQ ID NO: 140463 - DNA, 15 bp, Homo sapiens
actcttggaatcctc

SEQ ID NO: 140464 - DNA, 15 bp, Homo sapiens
cactcttggaatcct

SEQ ID NO: 140465 - DNA, 15 bp, Homo sapiens
acactcttggaatcc

SEQ ID NO: 140466 - DNA, 15 bp, Homo sapiens
gacactcttggaatc

SEQ ID NO: 140467 - DNA, 15 bp, Homo sapiens
tgacactcttggaat

SEQ ID NO: 140468 - DNA, 15 bp, Homo sapiens
ctgacactcttggaa

SEQ ID NO: 140469 - DNA, 15 bp, Homo sapiens
actgacactcttgga

SEQ ID NO: 140470 - DNA, 15 bp, Homo sapiens
gactgacactcttgg

SEQ ID NO: 140471 - DNA, 15 bp, Homo sapiens
tgactgacactcttg

SEQ ID NO: 140472 - DNA, 15 bp, Homo sapiens
atgactgacactctt

SEQ ID NO: 140473 - DNA, 15 bp, Homo sapiens
catgactgacactct

SEQ ID NO: 140474 - DNA, 15 bp, Homo sapiens
acatgactgacactc

SEQ ID NO: 140475 - DNA, 15 bp, Homo sapiens
cacatgactgacact

SEQ ID NO: 140476 - DNA, 15 bp, Homo sapiens
ccacatgactgacac

SEQ ID NO: 140477 - DNA, 15 bp, Homo sapiens
accacatgactgaca

SEQ ID NO: 140478 - DNA, 15 bp, Homo sapiens
caccacatgactgac

SEQ ID NO: 140479 - DNA, 15 bp, Homo sapiens
gcaccacatgactga

SEQ ID NO: 140480 - DNA, 15 bp, Homo sapiens
agcaccacatgactg

SEQ ID NO: 140481 - DNA, 15 bp, Homo sapiens
aagcaccacatgact

SEQ ID NO: 140482 - DNA, 15 bp, Homo sapiens
caagcaccacatgac

SEQ ID NO: 140483 - DNA, 15 bp, Homo sapiens
gcaagcaccacatga

SEQ ID NO: 140484 - DNA, 15 bp, Homo sapiens
agcaagcaccacatg

SEQ ID NO: 140485 - DNA, 15 bp, Homo sapiens
aagcaagcaccacat

SEQ ID NO: 140486 - DNA, 15 bp, Homo sapiens
caagcaagcaccaca

SEQ ID NO: 140487 - DNA, 15 bp, Homo sapiens
ccaagcaagcaccac

SEQ ID NO: 140488 - DNA, 15 bp, Homo sapiens
cccaagcaagcacca

SEQ ID NO: 140489 - DNA, 15 bp, Homo sapiens
ccccaagcaagcacc

SEQ ID NO: 140490 - DNA, 15 bp, Homo sapiens
cccccaagcaagcac

SEQ ID NO: 140491 - DNA, 15 bp, Homo sapiens
tcccccaagcaagca

SEQ ID NO: 140492 - DNA, 15 bp, Homo sapiens
ctcccccaagcaagc

SEQ ID NO: 140493 - DNA, 15 bp, Homo sapiens
gctcccccaagcaag

SEQ ID NO: 140494 - DNA, 15 bp, Homo sapiens
ggctcccccaagcaa

SEQ ID NO: 140495 - DNA, 15 bp, Homo sapiens
gggctcccccaagca

SEQ ID NO: 140496 - DNA, 15 bp, Homo sapiens
tgggctcccccaagc

SEQ ID NO: 140497 - DNA, 15 bp, Homo sapiens
ttgggctcccccaag

SEQ ID NO: 140498 - DNA, 15 bp, Homo sapiens
cttgggctcccccaa

SEQ ID NO: 140499 - DNA, 15 bp, Homo sapiens
gcttgggctccccca

SEQ ID NO: 140500 - DNA, 15 bp, Homo sapiens
agcttgggctccccc

SEQ ID NO: 140501 - DNA, 15 bp, Homo sapiens
cagcttgggctcccc

SEQ ID NO: 140502 - DNA, 15 bp, Homo sapiens
tcagcttgggctccc

SEQ ID NO: 140503 - DNA, 15 bp, Homo sapiens
ctcagcttgggctcc

SEQ ID NO: 140504 - DNA, 15 bp, Homo sapiens
gctcagcttgggctc

SEQ ID NO: 140505 - DNA, 15 bp, Homo sapiens
agctcagcttgggct

SEQ ID NO: 140506 - DNA, 15 bp, Homo sapiens
cagctcagcttgggc

SEQ ID NO: 140507 - DNA, 15 bp, Homo sapiens
ccagctcagcttggg

SEQ ID NO: 140508 - DNA, 15 bp, Homo sapiens
cccagctcagcttgg

SEQ ID NO: 140509 - DNA, 15 bp, Homo sapiens
ccccagctcagcttg

SEQ ID NO: 140510 - DNA, 15 bp, Homo sapiens
gccccagctcagctt

SEQ ID NO: 140511 - DNA, 15 bp, Homo sapiens
agccccagctcagct

SEQ ID NO: 140512 - DNA, 15 bp, Homo sapiens
cagccccagctcagc

SEQ ID NO: 140513 - DNA, 15 bp, Homo sapiens
ccagccccagctcag

SEQ ID NO: 140514 - DNA, 15 bp, Homo sapiens
cccagccccagctca

SEQ ID NO: 140515 - DNA, 15 bp, Homo sapiens
acccagccccagctc

SEQ ID NO: 140516 - DNA, 15 bp, Homo sapiens
cacccagccccagct

SEQ ID NO: 140517 - DNA, 15 bp, Homo sapiens
tcacccagccccagc

SEQ ID NO: 140518 - DNA, 15 bp, Homo sapiens
ctcacccagccccag

SEQ ID NO: 140519 - DNA, 15 bp, Homo sapiens
cctcacccagcccca

SEQ ID NO: 140520 - DNA, 15 bp, Homo sapiens
ccctcacccagcccc

SEQ ID NO: 140521 - DNA, 15 bp, Homo sapiens
tccctcacccagccc

SEQ ID NO: 140522 - DNA, 15 bp, Homo sapiens
atccctcacccagcc

SEQ ID NO: 140523 - DNA, 15 bp, Homo sapiens
catccctcacccagc

SEQ ID NO: 140524 - DNA, 15 bp, Homo sapiens
ccatccctcacccag

SEQ ID NO: 140525 - DNA, 15 bp, Homo sapiens
tccatccctcaccca

SEQ ID NO: 140526 - DNA, 15 bp, Homo sapiens
gtccatccctcaccc

SEQ ID NO: 140527 - DNA, 15 bp, Homo sapiens
tgtccatccctcacc

SEQ ID NO: 140528 - DNA, 15 bp, Homo sapiens
ttgtccatccctcac

SEQ ID NO: 140529 - DNA, 15 bp, Homo sapiens
cttgtccatccctca

SEQ ID NO: 140530 - DNA, 15 bp, Homo sapiens
ccttgtccatccctc

SEQ ID NO: 140531 - DNA, 15 bp, Homo sapiens
cccttgtccatccct

SEQ ID NO: 140532 - DNA, 15 bp, Homo sapiens
ccccttgtccatccc

SEQ ID NO: 140533 - DNA, 15 bp, Homo sapiens
cccccttgtccatcc

SEQ ID NO: 140534 - DNA, 15 bp, Homo sapiens
gcccccttgtccatc

SEQ ID NO: 140535 - DNA, 15 bp, Homo sapiens
agcccccttgtccat

SEQ ID NO: 140536 - DNA, 15 bp, Homo sapiens
gagcccccttgtcca

SEQ ID NO: 140537 - DNA, 15 bp, Homo sapiens
ggagcccccttgtcc

SEQ ID NO: 140538 - DNA, 15 bp, Homo sapiens
aggagcccccttgtc

SEQ ID NO: 140539 - DNA, 15 bp, Homo sapiens
aaggagcccccttgt

SEQ ID NO: 140540 - DNA, 15 bp, Homo sapiens
gaaggagcccccttg

SEQ ID NO: 140541 - DNA, 15 bp, Homo sapiens
ggaaggagccccctt

SEQ ID NO: 140542 - DNA, 15 bp, Homo sapiens
aggaaggagccccct

SEQ ID NO: 140543 - DNA, 15 bp, Homo sapiens
gaggaaggagccccc

SEQ ID NO: 140544 - DNA, 15 bp, Homo sapiens
agaggaaggagcccc

SEQ ID NO: 140545 - DNA, 15 bp, Homo sapiens
cagaggaaggagccc

SEQ ID NO: 140546 - DNA, 15 bp, Homo sapiens
gcagaggaaggagcc

SEQ ID NO: 140547 - DNA, 15 bp, Homo sapiens
agcagaggaaggagc

SEQ ID NO: 140548 - DNA, 15 bp, Homo sapiens
gagcagaggaaggag

SEQ ID NO: 140549 - DNA, 15 bp, Homo sapiens
tgagcagaggaagga

SEQ ID NO: 140550 - DNA, 15 bp, Homo sapiens
atgagcagaggaagg

SEQ ID NO: 140551 - DNA, 15 bp, Homo sapiens
catgagcagaggaag

SEQ ID NO: 140552 - DNA, 15 bp, Homo sapiens
gcatgagcagaggaa

SEQ ID NO: 140553 - DNA, 15 bp, Homo sapiens
tgcatgagcagagga

SEQ ID NO: 140554 - DNA, 15 bp, Homo sapiens
ctgcatgagcagagg

SEQ ID NO: 140555 - DNA, 15 bp, Homo sapiens
actgcatgagcagag

SEQ ID NO: 140556 - DNA, 15 bp, Homo sapiens
cactgcatgagcaga

SEQ ID NO: 140557 - DNA, 15 bp, Homo sapiens
tcactgcatgagcag

SEQ ID NO: 140558 - DNA, 15 bp, Homo sapiens
ctcactgcatgagca

SEQ ID NO: 140559 - DNA, 15 bp, Homo sapiens
cctcactgcatgagc

SEQ ID NO: 140560 - DNA, 15 bp, Homo sapiens
acctcactgcatgag

SEQ ID NO: 140561 - DNA, 15 bp, Homo sapiens
cacctcactgcatga

SEQ ID NO: 140562 - DNA, 15 bp, Homo sapiens
ccacctcactgcatg

SEQ ID NO: 140563 - DNA, 15 bp, Homo sapiens
tccacctcactgcat

SEQ ID NO: 140564 - DNA, 15 bp, Homo sapiens
ttccacctcactgca

SEQ ID NO: 140565 - DNA, 15 bp, Homo sapiens
tttccacctcactgc

SEQ ID NO: 140566 - DNA, 15 bp, Homo sapiens
ctttccacctcactg

SEQ ID NO: 140567 - DNA, 15 bp, Homo sapiens
cctttccacctcact

SEQ ID NO: 140568 - DNA, 15 bp, Homo sapiens
ccctttccacctcac

SEQ ID NO: 140569 - DNA, 15 bp, Homo sapiens
gccctttccacctca

SEQ ID NO: 140570 - DNA, 15 bp, Homo sapiens
tgccctttccacctc

SEQ ID NO: 140571 - DNA, 15 bp, Homo sapiens
atgccctttccacct

SEQ ID NO: 140572 - DNA, 15 bp, Homo sapiens
catgccctttccacc

SEQ ID NO: 140573 - DNA, 15 bp, Homo sapiens
ccatgccctttccac

SEQ ID NO: 140574 - DNA, 15 bp, Homo sapiens
cccatgccctttcca

SEQ ID NO: 140575 - DNA, 15 bp, Homo sapiens
ccccatgccctttcc

SEQ ID NO: 140576 - DNA, 15 bp, Homo sapiens
accccatgccctttc

SEQ ID NO: 140577 - DNA, 15 bp, Homo sapiens
aaccccatgcccttt

SEQ ID NO: 140578 - DNA, 15 bp, Homo sapiens
caaccccatgccctt

SEQ ID NO: 140579 - DNA, 15 bp, Homo sapiens
ccaaccccatgccct

SEQ ID NO: 140580 - DNA, 15 bp, Homo sapiens
cccaaccccatgccc

SEQ ID NO: 140581 - DNA, 15 bp, Homo sapiens
ccccaaccccatgcc

SEQ ID NO: 140582 - DNA, 15 bp, Homo sapiens
accccaaccccatgc

SEQ ID NO: 140583 - DNA, 15 bp, Homo sapiens
caccccaaccccatg

SEQ ID NO: 140584 - DNA, 15 bp, Homo sapiens
gcaccccaaccccat

SEQ ID NO: 140585 - DNA, 15 bp, Homo sapiens
tgcaccccaacccca

SEQ ID NO: 140586 - DNA, 15 bp, Homo sapiens
ttgcaccccaacccc

SEQ ID NO: 140587 - DNA, 15 bp, Homo sapiens
cttgcaccccaaccc

SEQ ID NO: 140588 - DNA, 15 bp, Homo sapiens
ccttgcaccccaacc

SEQ ID NO: 140589 - DNA, 15 bp, Homo sapiens
tccttgcaccccaac

SEQ ID NO: 140590 - DNA, 15 bp, Homo sapiens
gtccttgcaccccaa

SEQ ID NO: 140591 - DNA, 15 bp, Homo sapiens
ggtccttgcacccca

SEQ ID NO: 140592 - DNA, 15 bp, Homo sapiens
aggtccttgcacccc

SEQ ID NO: 140593 - DNA, 15 bp, Homo sapiens
caggtccttgcaccc

SEQ ID NO: 140594 - DNA, 15 bp, Homo sapiens
ccaggtccttgcacc

SEQ ID NO: 140595 - DNA, 15 bp, Homo sapiens
cccaggtccttgcac

SEQ ID NO: 140596 - DNA, 15 bp, Homo sapiens
acccaggtccttgca

SEQ ID NO: 140597 - DNA, 15 bp, Homo sapiens
aacccaggtccttgc

SEQ ID NO: 140598 - DNA, 15 bp, Homo sapiens
gaacccaggtccttg

SEQ ID NO: 140599 - DNA, 15 bp, Homo sapiens
ggaacccaggtcctt

SEQ ID NO: 140600 - DNA, 15 bp, Homo sapiens
aggaacccaggtcct

SEQ ID NO: 140601 - DNA, 15 bp, Homo sapiens
gaggaacccaggtcc

SEQ ID NO: 140602 - DNA, 15 bp, Homo sapiens
agaggaacccaggtc

SEQ ID NO: 140603 - DNA, 15 bp, Homo sapiens
gagaggaacccaggt

SEQ ID NO: 140604 - DNA, 15 bp, Homo sapiens
agagaggaacccagg

SEQ ID NO: 140605 - DNA, 15 bp, Homo sapiens
aagagaggaacccag

SEQ ID NO: 140606 - DNA, 15 bp, Homo sapiens
caagagaggaaccca

SEQ ID NO: 140607 - DNA, 15 bp, Homo sapiens
gcaagagaggaaccc

SEQ ID NO: 140608 - DNA, 15 bp, Homo sapiens
ggcaagagaggaacc

SEQ ID NO: 140609 - DNA, 15 bp, Homo sapiens
aggcaagagaggaac

SEQ ID NO: 140610 - DNA, 15 bp, Homo sapiens
gaggcaagagaggaa

SEQ ID NO: 140611 - DNA, 15 bp, Homo sapiens
ggaggcaagagagga

SEQ ID NO: 140612 - DNA, 15 bp, Homo sapiens
gggaggcaagagagg

SEQ ID NO: 140613 - DNA, 15 bp, Homo sapiens
ggggaggcaagagag

SEQ ID NO: 140614 - DNA, 15 bp, Homo sapiens
aggggaggcaagaga

SEQ ID NO: 140615 - DNA, 15 bp, Homo sapiens
caggggaggcaagag

SEQ ID NO: 140616 - DNA, 15 bp, Homo sapiens
acaggggaggcaaga

SEQ ID NO: 140617 - DNA, 15 bp, Homo sapiens
cacaggggaggcaag

SEQ ID NO: 140618 - DNA, 15 bp, Homo sapiens
acacaggggaggcaa

SEQ ID NO: 140619 - DNA, 15 bp, Homo sapiens
cacacaggggaggca

SEQ ID NO: 140620 - DNA, 15 bp, Homo sapiens
ccacacaggggaggc

SEQ ID NO: 140621 - DNA, 15 bp, Homo sapiens
accacacaggggagg

SEQ ID NO: 140622 - DNA, 15 bp, Homo sapiens
gaccacacaggggag

SEQ ID NO: 140623 - DNA, 15 bp, Homo sapiens
agaccacacagggga

SEQ ID NO: 140624 - DNA, 15 bp, Homo sapiens
aagaccacacagggg

SEQ ID NO: 140625 - DNA, 15 bp, Homo sapiens
caagaccacacaggg

SEQ ID NO: 140626 - DNA, 15 bp, Homo sapiens
ccaagaccacacagg

SEQ ID NO: 140627 - DNA, 15 bp, Homo sapiens
cccaagaccacacag

SEQ ID NO: 140628 - DNA, 15 bp, Homo sapiens
gcccaagaccacaca

SEQ ID NO: 140629 - DNA, 15 bp, Homo sapiens
tgcccaagaccacac

SEQ ID NO: 140630 - DNA, 15 bp, Homo sapiens
ttgcccaagaccaca

SEQ ID NO: 140631 - DNA, 15 bp, Homo sapiens
cttgcccaagaccac

SEQ ID NO: 140632 - DNA, 15 bp, Homo sapiens
acttgcccaagacca

SEQ ID NO: 140633 - DNA, 15 bp, Homo sapiens
aacttgcccaagacc

SEQ ID NO: 140634 - DNA, 15 bp, Homo sapiens
caacttgcccaagac

SEQ ID NO: 140635 - DNA, 15 bp, Homo sapiens
acaacttgcccaaga

SEQ ID NO: 140636 - DNA, 15 bp, Homo sapiens
gacaacttgcccaag

SEQ ID NO: 140637 - DNA, 15 bp, Homo sapiens
agacaacttgcccaa

SEQ ID NO: 140638 - DNA, 15 bp, Homo sapiens
tagacaacttgccca

SEQ ID NO: 140639 - DNA, 15 bp, Homo sapiens
gtagacaacttgccc

SEQ ID NO: 140640 - DNA, 15 bp, Homo sapiens
ggtagacaacttgcc

SEQ ID NO: 140641 - DNA, 15 bp, Homo sapiens
gggtagacaacttgc

SEQ ID NO: 140642 - DNA, 15 bp, Homo sapiens
agggtagacaacttg

SEQ ID NO: 140643 - DNA, 15 bp, Homo sapiens
gagggtagacaactt

SEQ ID NO: 140644 - DNA, 15 bp, Homo sapiens
ggagggtagacaact

SEQ ID NO: 140645 - DNA, 15 bp, Homo sapiens
aggagggtagacaac

SEQ ID NO: 140646 - DNA, 15 bp, Homo sapiens
gaggagggtagacaa

SEQ ID NO: 140647 - DNA, 15 bp, Homo sapiens
tgaggagggtagaca

SEQ ID NO: 140648 - DNA, 15 bp, Homo sapiens
atgaggagggtagac

SEQ ID NO: 140649 - DNA, 15 bp, Homo sapiens
catgaggagggtaga

SEQ ID NO: 140650 - DNA, 15 bp, Homo sapiens
gcatgaggagggtag

SEQ ID NO: 140651 - DNA, 15 bp, Homo sapiens
ggcatgaggagggta

SEQ ID NO: 140652 - DNA, 15 bp, Homo sapiens
aggcatgaggagggt

SEQ ID NO: 140653 - DNA, 15 bp, Homo sapiens
gaggcatgaggaggg

SEQ ID NO: 140654 - DNA, 15 bp, Homo sapiens
tgaggcatgaggagg

SEQ ID NO: 140655 - DNA, 15 bp, Homo sapiens
ctgaggcatgaggag

SEQ ID NO: 140656 - DNA, 15 bp, Homo sapiens
actgaggcatgagga

SEQ ID NO: 140657 - DNA, 15 bp, Homo sapiens
aactgaggcatgagg

SEQ ID NO: 140658 - DNA, 15 bp, Homo sapiens
aaactgaggcatgag

SEQ ID NO: 140659 - DNA, 15 bp, Homo sapiens
gaaactgaggcatga

SEQ ID NO: 140660 - DNA, 15 bp, Homo sapiens
ggaaactgaggcatg

SEQ ID NO: 140661 - DNA, 15 bp, Homo sapiens
tggaaactgaggcat

SEQ ID NO: 140662 - DNA, 15 bp, Homo sapiens
atggaaactgaggca

SEQ ID NO: 140663 - DNA, 15 bp, Homo sapiens
aatggaaactgaggc

SEQ ID NO: 140664 - DNA, 15 bp, Homo sapiens
taatggaaactgagg

SEQ ID NO: 140665 - DNA, 15 bp, Homo sapiens
gtaatggaaactgag

SEQ ID NO: 140666 - DNA, 15 bp, Homo sapiens
tgtaatggaaactga

SEQ ID NO: 140667 - DNA, 15 bp, Homo sapiens
atgtaatggaaactg

SEQ ID NO: 140668 - DNA, 15 bp, Homo sapiens
catgtaatggaaact

SEQ ID NO: 140669 - DNA, 15 bp, Homo sapiens
acatgtaatggaaac

SEQ ID NO: 140670 - DNA, 15 bp, Homo sapiens
tacatgtaatggaaa

SEQ ID NO: 140671 - DNA, 15 bp, Homo sapiens
ctacatgtaatggaa

SEQ ID NO: 140672 - DNA, 15 bp, Homo sapiens
cctacatgtaatgga

SEQ ID NO: 140673 - DNA, 15 bp, Homo sapiens
ccctacatgtaatgg

SEQ ID NO: 140674 - DNA, 15 bp, Homo sapiens
accctacatgtaatg

SEQ ID NO: 140675 - DNA, 15 bp, Homo sapiens
caccctacatgtaat

SEQ ID NO: 140676 - DNA, 15 bp, Homo sapiens
tcaccctacatgtaa

SEQ ID NO: 140677 - DNA, 15 bp, Homo sapiens
ttcaccctacatgta

SEQ ID NO: 140678 - DNA, 15 bp, Homo sapiens
cttcaccctacatgt

SEQ ID NO: 140679 - DNA, 15 bp, Homo sapiens
tcttcaccctacatg

SEQ ID NO: 140680 - DNA, 15 bp, Homo sapiens
gtcttcaccctacat

SEQ ID NO: 140681 - DNA, 15 bp, Homo sapiens
ggtcttcaccctaca

SEQ ID NO: 140682 - DNA, 15 bp, Homo sapiens
tggtcttcaccctac

SEQ ID NO: 140683 - DNA, 15 bp, Homo sapiens
gtggtcttcacccta

SEQ ID NO: 140684 - DNA, 15 bp, Homo sapiens
tgtggtcttcaccct

SEQ ID NO: 140685 - DNA, 15 bp, Homo sapiens
ctgtggtcttcaccc

SEQ ID NO: 140686 - DNA, 15 bp, Homo sapiens
tctgtggtcttcacc

SEQ ID NO: 140687 - DNA, 15 bp, Homo sapiens
ctctgtggtcttcac

SEQ ID NO: 140688 - DNA, 15 bp, Homo sapiens
tctctgtggtcttca

SEQ ID NO: 140689 - DNA, 15 bp, Homo sapiens
ttctctgtggtcttc

SEQ ID NO: 140690 - DNA, 15 bp, Homo sapiens
tttctctgtggtctt

SEQ ID NO: 140691 - DNA, 15 bp, Homo sapiens
ctttctctgtggtct

SEQ ID NO: 140692 - DNA, 15 bp, Homo sapiens
actttctctgtggtc

SEQ ID NO: 140693 - DNA, 15 bp, Homo sapiens
aactttctctgtggt

SEQ ID NO: 140694 - DNA, 15 bp, Homo sapiens
gaactttctctgtgg

SEQ ID NO: 140695 - DNA, 15 bp, Homo sapiens
ggaactttctctgtg

SEQ ID NO: 140696 - DNA, 15 bp, Homo sapiens
tggaactttctctgt

SEQ ID NO: 140697 - DNA, 15 bp, Homo sapiens
gtggaactttctctg

SEQ ID NO: 140698 - DNA, 15 bp, Homo sapiens
ggtggaactttctct

SEQ ID NO: 140699 - DNA, 15 bp, Homo sapiens
aggtggaactttctc

SEQ ID NO: 140700 - DNA, 15 bp, Homo sapiens
taggtggaactttct

SEQ ID NO: 140701 - DNA, 15 bp, Homo sapiens
ctaggtggaactttc

SEQ ID NO: 140702 - DNA, 15 bp, Homo sapiens
gctaggtggaacttt

SEQ ID NO: 140703 - DNA, 15 bp, Homo sapiens
tgctaggtggaactt

SEQ ID NO: 140704 - DNA, 15 bp, Homo sapiens
gtgctaggtggaact

SEQ ID NO: 140705 - DNA, 15 bp, Homo sapiens
tgtgctaggtggaac

SEQ ID NO: 140706 - DNA, 15 bp, Homo sapiens
atgtgctaggtggaa

SEQ ID NO: 140707 - DNA, 15 bp, Homo sapiens
catgtgctaggtgga

SEQ ID NO: 140708 - DNA, 15 bp, Homo sapiens
tcatgtgctaggtgg

SEQ ID NO: 140709 - DNA, 15 bp, Homo sapiens
ttcatgtgctaggtg

SEQ ID NO: 140710 - DNA, 15 bp, Homo sapiens
tttcatgtgctaggt

SEQ ID NO: 140711 - DNA, 15 bp, Homo sapiens
ttttcatgtgctagg

SEQ ID NO: 140712 - DNA, 15 bp, Homo sapiens
tttttcatgtgctag

SEQ ID NO: 140713 - DNA, 15 bp, Homo sapiens
atttttcatgtgcta

SEQ ID NO: 140714 - DNA, 15 bp, Homo sapiens
tatttttcatgtgct

SEQ ID NO: 140715 - DNA, 15 bp, Homo sapiens
gtatttttcatgtgc

SEQ ID NO: 140716 - DNA, 15 bp, Homo sapiens
agtatttttcatgtg

SEQ ID NO: 140717 - DNA, 15 bp, Homo sapiens
gagtatttttcatgt

SEQ ID NO: 140718 - DNA, 15 bp, Homo sapiens
tgagtatttttcatg

SEQ ID NO: 140719 - DNA, 15 bp, Homo sapiens
ctgagtatttttcat

SEQ ID NO: 140720 - DNA, 15 bp, Homo sapiens
actgagtatttttca

SEQ ID NO: 140721 - DNA, 15 bp, Homo sapiens
tactgagtatttttc

SEQ ID NO: 140722 - DNA, 15 bp, Homo sapiens
ctactgagtattttt

SEQ ID NO: 140723 - DNA, 15 bp, Homo sapiens
cctactgagtatttt

SEQ ID NO: 140724 - DNA, 15 bp, Homo sapiens
acctactgagtattt

SEQ ID NO: 140725 - DNA, 15 bp, Homo sapiens
tacctactgagtatt

SEQ ID NO: 140726 - DNA, 15 bp, Homo sapiens
ttacctactgagtat

SEQ ID NO: 140727 - DNA, 15 bp, Homo sapiens
attacctactgagta

SEQ ID NO: 140728 - DNA, 15 bp, Homo sapiens
cattacctactgagt

SEQ ID NO: 140729 - DNA, 15 bp, Homo sapiens
ccattacctactgag

SEQ ID NO: 140730 - DNA, 15 bp, Homo sapiens
gccattacctactga

SEQ ID NO: 140731 - DNA, 15 bp, Homo sapiens
agccattacctactg

SEQ ID NO: 140732 - DNA, 15 bp, Homo sapiens
gagccattacctact

SEQ ID NO: 140733 - DNA, 15 bp, Homo sapiens
ggagccattacctac

SEQ ID NO: 140734 - DNA, 15 bp, Homo sapiens
gggagccattaccta

SEQ ID NO: 140735 - DNA, 15 bp, Homo sapiens
tgggagccattacct

SEQ ID NO: 140736 - DNA, 15 bp, Homo sapiens
atgggagccattacc

SEQ ID NO: 140737 - DNA, 15 bp, Homo sapiens
aatgggagccattac

SEQ ID NO: 140738 - DNA, 15 bp, Homo sapiens
aaatgggagccatta

SEQ ID NO: 140739 - DNA, 15 bp, Homo sapiens
aaaatgggagccatt

SEQ ID NO: 140740 - DNA, 15 bp, Homo sapiens
aaaaatgggagccat

SEQ ID NO: 140741 - DNA, 15 bp, Homo sapiens
caaaaatgggagcca

SEQ ID NO: 140742 - DNA, 15 bp, Homo sapiens
acaaaaatgggagcc

SEQ ID NO: 140743 - DNA, 15 bp, Homo sapiens
cacaaaaatgggagc

SEQ ID NO: 140744 - DNA, 15 bp, Homo sapiens
tcacaaaaatgggag

SEQ ID NO: 140745 - DNA, 15 bp, Homo sapiens
atcacaaaaatggga

SEQ ID NO: 140746 - DNA, 15 bp, Homo sapiens
catcacaaaaatggg

SEQ ID NO: 140747 - DNA, 15 bp, Homo sapiens
acatcacaaaaatgg

SEQ ID NO: 140748 - DNA, 15 bp, Homo sapiens
tacatcacaaaaatg

SEQ ID NO: 140749 - DNA, 15 bp, Homo sapiens
atacatcacaaaaat

SEQ ID NO: 140750 - DNA, 15 bp, Homo sapiens
gatacatcacaaaaa

SEQ ID NO: 140751 - DNA, 15 bp, Homo sapiens
ggatacatcacaaaa

SEQ ID NO: 140752 - DNA, 15 bp, Homo sapiens
tggatacatcacaaa

SEQ ID NO: 140753 - DNA, 15 bp, Homo sapiens
ctggatacatcacaa

SEQ ID NO: 140754 - DNA, 15 bp, Homo sapiens
cctggatacatcaca

SEQ ID NO: 140755 - DNA, 15 bp, Homo sapiens
acctggatacatcac

SEQ ID NO: 140756 - DNA, 15 bp, Homo sapiens
tacctggatacatca

SEQ ID NO: 140757 - DNA, 15 bp, Homo sapiens
ctacctggatacatc

SEQ ID NO: 140758 - DNA, 15 bp, Homo sapiens
tctacctggatacat

SEQ ID NO: 140759 - DNA, 15 bp, Homo sapiens
ttctacctggataca

SEQ ID NO: 140760 - DNA, 15 bp, Homo sapiens
attctacctggatac

SEQ ID NO: 140761 - DNA, 15 bp, Homo sapiens
tattctacctggata

SEQ ID NO: 140762 - DNA, 15 bp, Homo sapiens
ttattctacctggat

SEQ ID NO: 140763 - DNA, 15 bp, Homo sapiens
attattctacctgga

SEQ ID NO: 140764 - DNA, 15 bp, Homo sapiens
cattattctacctgg

SEQ ID NO: 140765 - DNA, 15 bp, Homo sapiens
ccattattctacctg

SEQ ID NO: 140766 - DNA, 15 bp, Homo sapiens
gccattattctacct

SEQ ID NO: 140767 - DNA, 15 bp, Homo sapiens
tgccattattctacc

SEQ ID NO: 140768 - DNA, 15 bp, Homo sapiens
atgccattattctac

SEQ ID NO: 140769 - DNA, 15 bp, Homo sapiens
aatgccattattcta

SEQ ID NO: 140770 - DNA, 15 bp, Homo sapiens
aaatgccattattct

SEQ ID NO: 140771 - DNA, 15 bp, Homo sapiens
taaatgccattattc

SEQ ID NO: 140772 - DNA, 15 bp, Homo sapiens
ctaaatgccattatt

SEQ ID NO: 140773 - DNA, 15 bp, Homo sapiens
gctaaatgccattat

SEQ ID NO: 140774 - DNA, 15 bp, Homo sapiens
tgctaaatgccatta

SEQ ID NO: 140775 - DNA, 15 bp, Homo sapiens
ctgctaaatgccatt

SEQ ID NO: 140776 - DNA, 15 bp, Homo sapiens
tctgctaaatgccat

SEQ ID NO: 140777 - DNA, 15 bp, Homo sapiens
ttctgctaaatgcca

SEQ ID NO: 140778 - DNA, 15 bp, Homo sapiens
cttctgctaaatgcc

SEQ ID NO: 140779 - DNA, 15 bp, Homo sapiens
acttctgctaaatgc

SEQ ID NO: 140780 - DNA, 15 bp, Homo sapiens
gacttctgctaaatg

SEQ ID NO: 140781 - DNA, 15 bp, Homo sapiens
tgacttctgctaaat

SEQ ID NO: 140782 - DNA, 15 bp, Homo sapiens
ctgacttctgctaaa

SEQ ID NO: 140783 - DNA, 15 bp, Homo sapiens
actgacttctgctaa

SEQ ID NO: 140784 - DNA, 15 bp, Homo sapiens
aactgacttctgcta

SEQ ID NO: 140785 - DNA, 15 bp, Homo sapiens
aaactgacttctgct

SEQ ID NO: 140786 - DNA, 15 bp, Homo sapiens
taaactgacttctgc

SEQ ID NO: 140787 - DNA, 15 bp, Homo sapiens
ataaactgacttctg

SEQ ID NO: 140788 - DNA, 15 bp, Homo sapiens
aataaactgacttct

SEQ ID NO: 140789 - DNA, 15 bp, Homo sapiens
gaataaactgacttc

SEQ ID NO: 140790 - DNA, 15 bp, Homo sapiens
tgaataaactgactt

SEQ ID NO: 140791 - DNA, 15 bp, Homo sapiens
ttgaataaactgact

SEQ ID NO: 140792 - DNA, 15 bp, Homo sapiens
cttgaataaactgac

SEQ ID NO: 140793 - DNA, 15 bp, Homo sapiens
gcttgaataaactga

SEQ ID NO: 140794 - DNA, 15 bp, Homo sapiens
agcttgaataaactg

SEQ ID NO: 140795 - DNA, 15 bp, Homo sapiens
gagcttgaataaact

SEQ ID NO: 140796 - DNA, 15 bp, Homo sapiens
tgagcttgaataaac

SEQ ID NO: 140797 - DNA, 15 bp, Homo sapiens
gtgagcttgaataaa

SEQ ID NO: 140798 - DNA, 15 bp, Homo sapiens
ggtgagcttgaataa

SEQ ID NO: 140799 - DNA, 15 bp, Homo sapiens
aggtgagcttgaata

SEQ ID NO: 140800 - DNA, 15 bp, Homo sapiens
aaggtgagcttgaat

SEQ ID NO: 140801 - DNA, 15 bp, Homo sapiens
aaaggtgagcttgaa

SEQ ID NO: 140802 - DNA, 15 bp, Homo sapiens
caaaggtgagcttga

SEQ ID NO: 140803 - DNA, 15 bp, Homo sapiens
tcaaaggtgagcttg

SEQ ID NO: 140804 - DNA, 15 bp, Homo sapiens
ctcaaaggtgagctt

SEQ ID NO: 140805 - DNA, 15 bp, Homo sapiens
actcaaaggtgagct

SEQ ID NO: 140806 - DNA, 15 bp, Homo sapiens
gactcaaaggtgagc

SEQ ID NO: 140807 - DNA, 15 bp, Homo sapiens
agactcaaaggtgag

SEQ ID NO: 140808 - DNA, 15 bp, Homo sapiens
tagactcaaaggtga

SEQ ID NO: 140809 - DNA, 15 bp, Homo sapiens
atagactcaaaggtg

SEQ ID NO: 140810 - DNA, 15 bp, Homo sapiens
gatagactcaaaggt

SEQ ID NO: 140811 - DNA, 15 bp, Homo sapiens
agatagactcaaagg

SEQ ID NO: 140812 - DNA, 15 bp, Homo sapiens
aagatagactcaaag

SEQ ID NO: 140813 - DNA, 15 bp, Homo sapiens
taagatagactcaaa

SEQ ID NO: 140814 - DNA, 15 bp, Homo sapiens
gtaagatagactcaa

SEQ ID NO: 140815 - DNA, 15 bp, Homo sapiens
tgtaagatagactca

SEQ ID NO: 140816 - DNA, 15 bp, Homo sapiens
gtgtaagatagactc

SEQ ID NO: 140817 - DNA, 15 bp, Homo sapiens
tgtgtaagatagact

SEQ ID NO: 140818 - DNA, 15 bp, Homo sapiens
ttgtgtaagatagac

SEQ ID NO: 140819 - DNA, 15 bp, Homo sapiens
tttgtgtaagataga

SEQ ID NO: 140820 - DNA, 15 bp, Homo sapiens
ctttgtgtaagatag

SEQ ID NO: 140821 - DNA, 15 bp, Homo sapiens
gctttgtgtaagata

SEQ ID NO: 140822 - DNA, 15 bp, Homo sapiens
tgctttgtgtaagat

SEQ ID NO: 140823 - DNA, 15 bp, Homo sapiens
gtgctttgtgtaaga

SEQ ID NO: 140824 - DNA, 15 bp, Homo sapiens
agtgctttgtgtaag

SEQ ID NO: 140825 - DNA, 15 bp, Homo sapiens
cagtgctttgtgtaa

SEQ ID NO: 140826 - DNA, 15 bp, Homo sapiens
ccagtgctttgtgta

SEQ ID NO: 140827 - DNA, 15 bp, Homo sapiens
accagtgctttgtgt

SEQ ID NO: 140828 - DNA, 15 bp, Homo sapiens
aaccagtgctttgtg

SEQ ID NO: 140829 - DNA, 15 bp, Homo sapiens
taaccagtgctttgt

SEQ ID NO: 140830 - DNA, 15 bp, Homo sapiens
ctaaccagtgctttg

SEQ ID NO: 140831 - DNA, 15 bp, Homo sapiens
cctaaccagtgcttt

SEQ ID NO: 140832 - DNA, 15 bp, Homo sapiens
acctaaccagtgctt

SEQ ID NO: 140833 - DNA, 15 bp, Homo sapiens
cacctaaccagtgct

SEQ ID NO: 140834 - DNA, 15 bp, Homo sapiens
tcacctaaccagtgc

SEQ ID NO: 140835 - DNA, 15 bp, Homo sapiens
ctcacctaaccagtg

SEQ ID NO: 140836 - DNA, 15 bp, Homo sapiens
cctcacctaaccagt

SEQ ID NO: 140837 - DNA, 15 bp, Homo sapiens
ccctcacctaaccag

SEQ ID NO: 140838 - DNA, 15 bp, Homo sapiens
tccctcacctaacca

SEQ ID NO: 140839 - DNA, 15 bp, Homo sapiens
atccctcacctaacc

SEQ ID NO: 140840 - DNA, 15 bp, Homo sapiens
catccctcacctaac

SEQ ID NO: 140841 - DNA, 15 bp, Homo sapiens
ccatccctcacctaa

SEQ ID NO: 140842 - DNA, 15 bp, Homo sapiens
gccatccctcaccta

SEQ ID NO: 140843 - DNA, 15 bp, Homo sapiens
cgccatccctcacct

SEQ ID NO: 140844 - DNA, 15 bp, Homo sapiens
tcgccatccctcacc

SEQ ID NO: 140845 - DNA, 15 bp, Homo sapiens
atcgccatccctcac

SEQ ID NO: 140846 - DNA, 15 bp, Homo sapiens
catcgccatccctca

SEQ ID NO: 140847 - DNA, 15 bp, Homo sapiens
tcatcgccatccctc

SEQ ID NO: 140848 - DNA, 15 bp, Homo sapiens
ctcatcgccatccct

SEQ ID NO: 140849 - DNA, 15 bp, Homo sapiens
gctcatcgccatccc

SEQ ID NO: 140850 - DNA, 15 bp, Homo sapiens
ggctcatcgccatcc

SEQ ID NO: 140851 - DNA, 15 bp, Homo sapiens
gggctcatcgccatc

SEQ ID NO: 140852 - DNA, 15 bp, Homo sapiens
ggggctcatcgccat

SEQ ID NO: 140853 - DNA, 15 bp, Homo sapiens
cggggctcatcgcca

SEQ ID NO: 140854 - DNA, 15 bp, Homo sapiens
ccggggctcatcgcc

SEQ ID NO: 140855 - DNA, 15 bp, Homo sapiens
tccggggctcatcgc

SEQ ID NO: 140856 - DNA, 15 bp, Homo sapiens
ctccggggctcatcg

SEQ ID NO: 140857 - DNA, 15 bp, Homo sapiens
tctccggggctcatc

SEQ ID NO: 140858 - DNA, 15 bp, Homo sapiens
ttctccggggctcat

SEQ ID NO: 140859 - DNA, 15 bp, Homo sapiens
attctccggggctca

SEQ ID NO: 140860 - DNA, 15 bp, Homo sapiens
aattctccggggctc

SEQ ID NO: 140861 - DNA, 15 bp, Homo sapiens
gaattctccggggct

SEQ ID NO: 140862 - DNA, 15 bp, Homo sapiens
ggaattctccggggc

SEQ ID NO: 140863 - DNA, 15 bp, Homo sapiens
cggaattctccgggg

SEQ ID NO: 140864 - DNA, 15 bp, Homo sapiens
gcggaattctccggg

SEQ ID NO: 140865 - DNA, 15 bp, Homo sapiens
tgcggaattctccgg

SEQ ID NO: 140866 - DNA, 15 bp, Homo sapiens
atgcggaattctccg

SEQ ID NO: 140867 - DNA, 15 bp, Homo sapiens
catgcggaattctcc

SEQ ID NO: 140868 - DNA, 15 bp, Homo sapiens
gcatgcggaattctc

SEQ ID NO: 140869 - DNA, 15 bp, Homo sapiens
agcatgcggaattct

SEQ ID NO: 140870 - DNA, 15 bp, Homo sapiens
aagcatgcggaattc

SEQ ID NO: 140871 - DNA, 15 bp, Homo sapiens
gaagcatgcggaatt

SEQ ID NO: 140872 - DNA, 15 bp, Homo sapiens
ggaagcatgcggaat

SEQ ID NO: 140873 - DNA, 15 bp, Homo sapiens
gggaagcatgcggaa

SEQ ID NO: 140874 - DNA, 15 bp, Homo sapiens
agggaagcatgcgga

SEQ ID NO: 140875 - DNA, 15 bp, Homo sapiens
aagggaagcatgcgg

SEQ ID NO: 140876 - DNA, 15 bp, Homo sapiens
gaagggaagcatgcg

SEQ ID NO: 140877 - DNA, 15 bp, Homo sapiens
agaagggaagcatgc

SEQ ID NO: 140878 - DNA, 15 bp, Homo sapiens
aagaagggaagcatg

SEQ ID NO: 140879 - DNA, 15 bp, Homo sapiens
aaagaagggaagcat

SEQ ID NO: 140880 - DNA, 15 bp, Homo sapiens
taaagaagggaagca

SEQ ID NO: 140881 - DNA, 15 bp, Homo sapiens
ctaaagaagggaagc

SEQ ID NO: 140882 - DNA, 15 bp, Homo sapiens
gctaaagaagggaag

SEQ ID NO: 140883 - DNA, 15 bp, Homo sapiens
agctaaagaagggaa

SEQ ID NO: 140884 - DNA, 15 bp, Homo sapiens
aagctaaagaaggga

SEQ ID NO: 140885 - DNA, 15 bp, Homo sapiens
aaagctaaagaaggg

SEQ ID NO: 140886 - DNA, 15 bp, Homo sapiens
gaaagctaaagaagg

SEQ ID NO: 140887 - DNA, 15 bp, Homo sapiens
ggaaagctaaagaag

SEQ ID NO: 140888 - DNA, 15 bp, Homo sapiens
tggaaagctaaagaa

SEQ ID NO: 140889 - DNA, 15 bp, Homo sapiens
ctggaaagctaaaga

SEQ ID NO: 140890 - DNA, 15 bp, Homo sapiens
gctggaaagctaaag

SEQ ID NO: 140891 - DNA, 15 bp, Homo sapiens
agctggaaagctaaa

SEQ ID NO: 140892 - DNA, 15 bp, Homo sapiens
tagctggaaagctaa

SEQ ID NO: 140893 - DNA, 15 bp, Homo sapiens
ctagctggaaagcta

SEQ ID NO: 140894 - DNA, 15 bp, Homo sapiens
tctagctggaaagct

SEQ ID NO: 140895 - DNA, 15 bp, Homo sapiens
atctagctggaaagc

SEQ ID NO: 140896 - DNA, 15 bp, Homo sapiens
aatctagctggaaag

SEQ ID NO: 140897 - DNA, 15 bp, Homo sapiens
caatctagctggaaa

SEQ ID NO: 140898 - DNA, 15 bp, Homo sapiens
acaatctagctggaa

SEQ ID NO: 140899 - DNA, 15 bp, Homo sapiens
tacaatctagctgga

SEQ ID NO: 140900 - DNA, 15 bp, Homo sapiens
ttacaatctagctgg

SEQ ID NO: 140901 - DNA, 15 bp, Homo sapiens
cttacaatctagctg

SEQ ID NO: 140902 - DNA, 15 bp, Homo sapiens
gcttacaatctagct

SEQ ID NO: 140903 - DNA, 15 bp, Homo sapiens
agcttacaatctagc

SEQ ID NO: 140904 - DNA, 15 bp, Homo sapiens
gagcttacaatctag

SEQ ID NO: 140905 - DNA, 15 bp, Homo sapiens
ggagcttacaatcta

SEQ ID NO: 140906 - DNA, 15 bp, Homo sapiens
aggagcttacaatct

SEQ ID NO: 140907 - DNA, 15 bp, Homo sapiens
taggagcttacaatc

SEQ ID NO: 140908 - DNA, 15 bp, Homo sapiens
ttaggagcttacaat

SEQ ID NO: 140909 - DNA, 15 bp, Homo sapiens
gttaggagcttacaa

SEQ ID NO: 140910 - DNA, 15 bp, Homo sapiens
agttaggagcttaca

SEQ ID NO: 140911 - DNA, 15 bp, Homo sapiens
cagttaggagcttac

SEQ ID NO: 140912 - DNA, 15 bp, Homo sapiens
ccagttaggagctta

SEQ ID NO: 140913 - DNA, 15 bp, Homo sapiens
tccagttaggagctt

SEQ ID NO: 140914 - DNA, 15 bp, Homo sapiens
atccagttaggagct

SEQ ID NO: 140915 - DNA, 15 bp, Homo sapiens
gatccagttaggagc

SEQ ID NO: 140916 - DNA, 15 bp, Homo sapiens
ggatccagttaggag

SEQ ID NO: 140917 - DNA, 15 bp, Homo sapiens
aggatccagttagga

SEQ ID NO: 140918 - DNA, 15 bp, Homo sapiens
aaggatccagttagg

SEQ ID NO: 140919 - DNA, 15 bp, Homo sapiens
gaaggatccagttag

SEQ ID NO: 140920 - DNA, 15 bp, Homo sapiens
tgaaggatccagtta

SEQ ID NO: 140921 - DNA, 15 bp, Homo sapiens
ctgaaggatccagtt

SEQ ID NO: 140922 - DNA, 15 bp, Homo sapiens
cctgaaggatccagt

SEQ ID NO: 140923 - DNA, 15 bp, Homo sapiens
tcctgaaggatccag

SEQ ID NO: 140924 - DNA, 15 bp, Homo sapiens
atcctgaaggatcca

SEQ ID NO: 140925 - DNA, 15 bp, Homo sapiens
aatcctgaaggatcc

SEQ ID NO: 140926 - DNA, 15 bp, Homo sapiens
aaatcctgaaggatc

SEQ ID NO: 140927 - DNA, 15 bp, Homo sapiens
caaatcctgaaggat

SEQ ID NO: 140928 - DNA, 15 bp, Homo sapiens
ccaaatcctgaagga

SEQ ID NO: 140929 - DNA, 15 bp, Homo sapiens
gccaaatcctgaagg

SEQ ID NO: 140930 - DNA, 15 bp, Homo sapiens
tgccaaatcctgaag

SEQ ID NO: 140931 - DNA, 15 bp, Homo sapiens
gtgccaaatcctgaa

SEQ ID NO: 140932 - DNA, 15 bp, Homo sapiens
tgtgccaaatcctga

SEQ ID NO: 140933 - DNA, 15 bp, Homo sapiens
gtgtgccaaatcctg

SEQ ID NO: 140934 - DNA, 15 bp, Homo sapiens
agtgtgccaaatcct

SEQ ID NO: 140935 - DNA, 15 bp, Homo sapiens
gagtgtgccaaatcc

SEQ ID NO: 140936 - DNA, 15 bp, Homo sapiens
agagtgtgccaaatc

SEQ ID NO: 140937 - DNA, 15 bp, Homo sapiens
cagagtgtgccaaat

SEQ ID NO: 140938 - DNA, 15 bp, Homo sapiens
ccagagtgtgccaaa

SEQ ID NO: 140939 - DNA, 15 bp, Homo sapiens
accagagtgtgccaa

SEQ ID NO: 140940 - DNA, 15 bp, Homo sapiens
gaccagagtgtgcca

SEQ ID NO: 140941 - DNA, 15 bp, Homo sapiens
agaccagagtgtgcc

SEQ ID NO: 140942 - DNA, 15 bp, Homo sapiens
cagaccagagtgtgc

SEQ ID NO: 140943 - DNA, 15 bp, Homo sapiens
acagaccagagtgtg

SEQ ID NO: 140944 - DNA, 15 bp, Homo sapiens
cacagaccagagtgt

SEQ ID NO: 140945 - DNA, 15 bp, Homo sapiens
ccacagaccagagtg

SEQ ID NO: 140946 - DNA, 15 bp, Homo sapiens
cccacagaccagagt

SEQ ID NO: 140947 - DNA, 15 bp, Homo sapiens
gcccacagaccagag

SEQ ID NO: 140948 - DNA, 15 bp, Homo sapiens
ggcccacagaccaga

SEQ ID NO: 140949 - DNA, 15 bp, Homo sapiens
tggcccacagaccag

SEQ ID NO: 140950 - DNA, 15 bp, Homo sapiens
gtggcccacagacca

SEQ ID NO: 140951 - DNA, 15 bp, Homo sapiens
agtggcccacagacc

SEQ ID NO: 140952 - DNA, 15 bp, Homo sapiens
cagtggcccacagac

SEQ ID NO: 140953 - DNA, 15 bp, Homo sapiens
tcagtggcccacaga

SEQ ID NO: 140954 - DNA, 15 bp, Homo sapiens
ctcagtggcccacag

SEQ ID NO: 140955 - DNA, 15 bp, Homo sapiens
tctcagtggcccaca

SEQ ID NO: 140956 - DNA, 15 bp, Homo sapiens
gtctcagtggcccac

SEQ ID NO: 140957 - DNA, 15 bp, Homo sapiens
tgtctcagtggccca

SEQ ID NO: 140958 - DNA, 15 bp, Homo sapiens
ctgtctcagtggccc

SEQ ID NO: 140959 - DNA, 15 bp, Homo sapiens
cctgtctcagtggcc

SEQ ID NO: 140960 - DNA, 15 bp, Homo sapiens
tcctgtctcagtggc

SEQ ID NO: 140961 - DNA, 15 bp, Homo sapiens
gtcctgtctcagtgg

SEQ ID NO: 140962 - DNA, 15 bp, Homo sapiens
tgtcctgtctcagtg

SEQ ID NO: 140963 - DNA, 15 bp, Homo sapiens
atgtcctgtctcagt

SEQ ID NO: 140964 - DNA, 15 bp, Homo sapiens
tatgtcctgtctcag

SEQ ID NO: 140965 - DNA, 15 bp, Homo sapiens
gtatgtcctgtctca

SEQ ID NO: 140966 - DNA, 15 bp, Homo sapiens
tgtatgtcctgtctc

SEQ ID NO: 140967 - DNA, 15 bp, Homo sapiens
atgtatgtcctgtct

SEQ ID NO: 140968 - DNA, 15 bp, Homo sapiens
gatgtatgtcctgtc

SEQ ID NO: 140969 - DNA, 15 bp, Homo sapiens
agatgtatgtcctgt

SEQ ID NO: 140970 - DNA, 15 bp, Homo sapiens
aagatgtatgtcctg

SEQ ID NO: 140971 - DNA, 15 bp, Homo sapiens
gaagatgtatgtcct

SEQ ID NO: 140972 - DNA, 15 bp, Homo sapiens
agaagatgtatgtcc

SEQ ID NO: 140973 - DNA, 15 bp, Homo sapiens
aagaagatgtatgtc

SEQ ID NO: 140974 - DNA, 15 bp, Homo sapiens
gaagaagatgtatgt

SEQ ID NO: 140975 - DNA, 15 bp, Homo sapiens
tgaagaagatgtatg

SEQ ID NO: 140976 - DNA, 15 bp, Homo sapiens
atgaagaagatgtat

SEQ ID NO: 140977 - DNA, 15 bp, Homo sapiens
aatgaagaagatgta

SEQ ID NO: 140978 - DNA, 15 bp, Homo sapiens
aaatgaagaagatgt

SEQ ID NO: 140979 - DNA, 15 bp, Homo sapiens
gaaatgaagaagatg

SEQ ID NO: 140980 - DNA, 15 bp, Homo sapiens
agaaatgaagaagat

SEQ ID NO: 140981 - DNA, 15 bp, Homo sapiens
aagaaatgaagaaga

SEQ ID NO: 140982 - DNA, 15 bp, Homo sapiens
aaagaaatgaagaag

SEQ ID NO: 140983 - DNA, 15 bp, Homo sapiens
gaaagaaatgaagaa

SEQ ID NO: 140984 - DNA, 15 bp, Homo sapiens
agaaagaaatgaaga

SEQ ID NO: 140985 - DNA, 15 bp, Homo sapiens
cagaaagaaatgaag

SEQ ID NO: 140986 - DNA, 15 bp, Homo sapiens
acagaaagaaatgaa

SEQ ID NO: 140987 - DNA, 15 bp, Homo sapiens
tacagaaagaaatga

SEQ ID NO: 140988 - DNA, 15 bp, Homo sapiens
atacagaaagaaatg

SEQ ID NO: 140989 - DNA, 15 bp, Homo sapiens
aatacagaaagaaat

SEQ ID NO: 140990 - DNA, 15 bp, Homo sapiens
gaatacagaaagaaa

SEQ ID NO: 140991 - DNA, 15 bp, Homo sapiens
ggaatacagaaagaa

SEQ ID NO: 140992 - DNA, 15 bp, Homo sapiens
gggaatacagaaaga

SEQ ID NO: 140993 - DNA, 15 bp, Homo sapiens
tgggaatacagaaag

SEQ ID NO: 140994 - DNA, 15 bp, Homo sapiens
ctgggaatacagaaa

SEQ ID NO: 140995 - DNA, 15 bp, Homo sapiens
gctgggaatacagaa

SEQ ID NO: 140996 - DNA, 15 bp, Homo sapiens
tgctgggaatacaga

SEQ ID NO: 140997 - DNA, 15 bp, Homo sapiens
gtgctgggaatacag

SEQ ID NO: 140998 - DNA, 15 bp, Homo sapiens
ggtgctgggaataca

SEQ ID NO: 140999 - DNA, 15 bp, Homo sapiens
tggtgctgggaatac

SEQ ID NO: 141000 - DNA, 15 bp, Homo sapiens
ttggtgctgggaata

SEQ ID NO: 141001 - DNA, 15 bp, Homo sapiens
tttggtgctgggaat

SEQ ID NO: 141002 - DNA, 15 bp, Homo sapiens
gtttggtgctgggaa

SEQ ID NO: 141003 - DNA, 15 bp, Homo sapiens
tgtttggtgctggga

SEQ ID NO: 141004 - DNA, 15 bp, Homo sapiens
gtgtttggtgctggg

SEQ ID NO: 141005 - DNA, 15 bp, Homo sapiens
cgtgtttggtgctgg

SEQ ID NO: 141006 - DNA, 15 bp, Homo sapiens
acgtgtttggtgctg

SEQ ID NO: 141007 - DNA, 15 bp, Homo sapiens
cacgtgtttggtgct

SEQ ID NO: 141008 - DNA, 15 bp, Homo sapiens
ccacgtgtttggtgc

SEQ ID NO: 141009 - DNA, 15 bp, Homo sapiens
gccacgtgtttggtg

SEQ ID NO: 141010 - DNA, 15 bp, Homo sapiens
tgccacgtgtttggt

SEQ ID NO: 141011 - DNA, 15 bp, Homo sapiens
atgccacgtgtttgg

SEQ ID NO: 141012 - DNA, 15 bp, Homo sapiens
catgccacgtgtttg

SEQ ID NO: 141013 - DNA, 15 bp, Homo sapiens
acatgccacgtgttt

SEQ ID NO: 141014 - DNA, 15 bp, Homo sapiens
gacatgccacgtgtt

SEQ ID NO: 141015 - DNA, 15 bp, Homo sapiens
agacatgccacgtgt

SEQ ID NO: 141016 - DNA, 15 bp, Homo sapiens
gagacatgccacgtg

SEQ ID NO: 141017 - DNA, 15 bp, Homo sapiens
agagacatgccacgt

SEQ ID NO: 141018 - DNA, 15 bp, Homo sapiens
cagagacatgccacg

SEQ ID NO: 141019 - DNA, 15 bp, Homo sapiens
ccagagacatgccac

SEQ ID NO: 141020 - DNA, 15 bp, Homo sapiens
accagagacatgcca

SEQ ID NO: 141021 - DNA, 15 bp, Homo sapiens
caccagagacatgcc

SEQ ID NO: 141022 - DNA, 15 bp, Homo sapiens
ccaccagagacatgc

SEQ ID NO: 141023 - DNA, 15 bp, Homo sapiens
cccaccagagacatg

SEQ ID NO: 141024 - DNA, 15 bp, Homo sapiens
gcccaccagagacat

SEQ ID NO: 141025 - DNA, 15 bp, Homo sapiens
tgcccaccagagaca

SEQ ID NO: 141026 - DNA, 15 bp, Homo sapiens
atgcccaccagagac

SEQ ID NO: 141027 - DNA, 15 bp, Homo sapiens
aatgcccaccagaga

SEQ ID NO: 141028 - DNA, 15 bp, Homo sapiens
aaatgcccaccagag

SEQ ID NO: 141029 - DNA, 15 bp, Homo sapiens
caaatgcccaccaga

SEQ ID NO: 141030 - DNA, 15 bp, Homo sapiens
ccaaatgcccaccag

SEQ ID NO: 141031 - DNA, 15 bp, Homo sapiens
accaaatgcccacca

SEQ ID NO: 141032 - DNA, 15 bp, Homo sapiens
taccaaatgcccacc

SEQ ID NO: 141033 - DNA, 15 bp, Homo sapiens
ctaccaaatgcccac

SEQ ID NO: 141034 - DNA, 15 bp, Homo sapiens
tctaccaaatgccca

SEQ ID NO: 141035 - DNA, 15 bp, Homo sapiens
atctaccaaatgccc

SEQ ID NO: 141036 - DNA, 15 bp, Homo sapiens
catctaccaaatgcc

SEQ ID NO: 141037 - DNA, 15 bp, Homo sapiens
ccatctaccaaatgc

SEQ ID NO: 141038 - DNA, 15 bp, Homo sapiens
accatctaccaaatg

SEQ ID NO: 141039 - DNA, 15 bp, Homo sapiens
caccatctaccaaat

SEQ ID NO: 141040 - DNA, 15 bp, Homo sapiens
ccaccatctaccaaa

SEQ ID NO: 141041 - DNA, 15 bp, Homo sapiens
cccaccatctaccaa

SEQ ID NO: 141042 - DNA, 15 bp, Homo sapiens
gcccaccatctacca

SEQ ID NO: 141043 - DNA, 15 bp, Homo sapiens
cgcccaccatctacc

SEQ ID NO: 141044 - DNA, 15 bp, Homo sapiens
tcgcccaccatctac

SEQ ID NO: 141045 - DNA, 15 bp, Homo sapiens
ttcgcccaccatcta

SEQ ID NO: 141046 - DNA, 15 bp, Homo sapiens
attcgcccaccatct

SEQ ID NO: 141047 - DNA, 15 bp, Homo sapiens
cattcgcccaccatc

SEQ ID NO: 141048 - DNA, 15 bp, Homo sapiens
tcattcgcccaccat

SEQ ID NO: 141049 - DNA, 15 bp, Homo sapiens
ttcattcgcccacca

SEQ ID NO: 141050 - DNA, 15 bp, Homo sapiens
attcattcgcccacc

SEQ ID NO: 141051 - DNA, 15 bp, Homo sapiens
cattcattcgcccac

SEQ ID NO: 141052 - DNA, 15 bp, Homo sapiens
tcattcattcgccca

SEQ ID NO: 141053 - DNA, 15 bp, Homo sapiens
ttcattcattcgccc

SEQ ID NO: 141054 - DNA, 15 bp, Homo sapiens
gttcattcattcgcc

SEQ ID NO: 141055 - DNA, 15 bp, Homo sapiens
tgttcattcattcgc

SEQ ID NO: 141056 - DNA, 15 bp, Homo sapiens
ttgttcattcattcg

SEQ ID NO: 141057 - DNA, 15 bp, Homo sapiens
tttgttcattcattc

SEQ ID NO: 141058 - DNA, 15 bp, Homo sapiens
gtttgttcattcatt

SEQ ID NO: 141059 - DNA, 15 bp, Homo sapiens
cgtttgttcattcat

SEQ ID NO: 141060 - DNA, 15 bp, Homo sapiens
tcgtttgttcattca

SEQ ID NO: 141061 - DNA, 15 bp, Homo sapiens
ctcgtttgttcattc

SEQ ID NO: 141062 - DNA, 15 bp, Homo sapiens
gctcgtttgttcatt

SEQ ID NO: 141063 - DNA, 15 bp, Homo sapiens
tgctcgtttgttcat

SEQ ID NO: 141064 - DNA, 15 bp, Homo sapiens
atgctcgtttgttca

SEQ ID NO: 141065 - DNA, 15 bp, Homo sapiens
aatgctcgtttgttc

SEQ ID NO: 141066 - DNA, 15 bp, Homo sapiens
gaatgctcgtttgtt

SEQ ID NO: 141067 - DNA, 15 bp, Homo sapiens
tgaatgctcgtttgt

SEQ ID NO: 141068 - DNA, 15 bp, Homo sapiens
ctgaatgctcgtttg

SEQ ID NO: 141069 - DNA, 15 bp, Homo sapiens
actgaatgctcgttt

SEQ ID NO: 141070 - DNA, 15 bp, Homo sapiens
tactgaatgctcgtt

SEQ ID NO: 141071 - DNA, 15 bp, Homo sapiens
ttactgaatgctcgt

SEQ ID NO: 141072 - DNA, 15 bp, Homo sapiens
gttactgaatgctcg

SEQ ID NO: 141073 - DNA, 15 bp, Homo sapiens
ggttactgaatgctc

SEQ ID NO: 141074 - DNA, 15 bp, Homo sapiens
aggttactgaatgct

SEQ ID NO: 141075 - DNA, 15 bp, Homo sapiens
gaggttactgaatgc

SEQ ID NO: 141076 - DNA, 15 bp, Homo sapiens
agaggttactgaatg

SEQ ID NO: 141077 - DNA, 15 bp, Homo sapiens
aagaggttactgaat

SEQ ID NO: 141078 - DNA, 15 bp, Homo sapiens
caagaggttactgaa

SEQ ID NO: 141079 - DNA, 15 bp, Homo sapiens
gcaagaggttactga

SEQ ID NO: 141080 - DNA, 15 bp, Homo sapiens
agcaagaggttactg

SEQ ID NO: 141081 - DNA, 15 bp, Homo sapiens
cagcaagaggttact

SEQ ID NO: 141082 - DNA, 15 bp, Homo sapiens
tcagcaagaggttac

SEQ ID NO: 141083 - DNA, 15 bp, Homo sapiens
atcagcaagaggtta

SEQ ID NO: 141084 - DNA, 15 bp, Homo sapiens
catcagcaagaggtt

SEQ ID NO: 141085 - DNA, 15 bp, Homo sapiens
tcatcagcaagaggt

SEQ ID NO: 141086 - DNA, 15 bp, Homo sapiens
ttcatcagcaagagg

SEQ ID NO: 141087 - DNA, 15 bp, Homo sapiens
attcatcagcaagag

SEQ ID NO: 141088 - DNA, 15 bp, Homo sapiens
aattcatcagcaaga

SEQ ID NO: 141089 - DNA, 15 bp, Homo sapiens
caattcatcagcaag

SEQ ID NO: 141090 - DNA, 15 bp, Homo sapiens
tcaattcatcagcaa

SEQ ID NO: 141091 - DNA, 15 bp, Homo sapiens
gtcaattcatcagca

SEQ ID NO: 141092 - DNA, 15 bp, Homo sapiens
agtcaattcatcagc

SEQ ID NO: 141093 - DNA, 15 bp, Homo sapiens
tagtcaattcatcag

SEQ ID NO: 141094 - DNA, 15 bp, Homo sapiens
ttagtcaattcatca

SEQ ID NO: 141095 - DNA, 15 bp, Homo sapiens
attagtcaattcatc

SEQ ID NO: 141096 - DNA, 15 bp, Homo sapiens
tattagtcaattcat

SEQ ID NO: 141097 - DNA, 15 bp, Homo sapiens
gtattagtcaattca

SEQ ID NO: 141098 - DNA, 15 bp, Homo sapiens
agtattagtcaattc

SEQ ID NO: 141099 - DNA, 15 bp, Homo sapiens
gagtattagtcaatt

SEQ ID NO: 141100 - DNA, 15 bp, Homo sapiens
ggagtattagtcaat

SEQ ID NO: 141101 - DNA, 15 bp, Homo sapiens
tggagtattagtcaa

SEQ ID NO: 141102 - DNA, 15 bp, Homo sapiens
gtggagtattagtca

SEQ ID NO: 141103 - DNA, 15 bp, Homo sapiens
tgtggagtattagtc

SEQ ID NO: 141104 - DNA, 15 bp, Homo sapiens
gtgtggagtattagt

SEQ ID NO: 141105 - DNA, 15 bp, Homo sapiens
agtgtggagtattag

SEQ ID NO: 141106 - DNA, 15 bp, Homo sapiens
cagtgtggagtatta

SEQ ID NO: 141107 - DNA, 15 bp, Homo sapiens
ccagtgtggagtatt

SEQ ID NO: 141108 - DNA, 15 bp, Homo sapiens
accagtgtggagtat

SEQ ID NO: 141109 - DNA, 15 bp, Homo sapiens
aaccagtgtggagta

SEQ ID NO: 141110 - DNA, 15 bp, Homo sapiens
taaccagtgtggagt

SEQ ID NO: 141111 - DNA, 15 bp, Homo sapiens
gtaaccagtgtggag

SEQ ID NO: 141112 - DNA, 15 bp, Homo sapiens
tgtaaccagtgtgga

SEQ ID NO: 141113 - DNA, 15 bp, Homo sapiens
atgtaaccagtgtgg

SEQ ID NO: 141114 - DNA, 15 bp, Homo sapiens
aatgtaaccagtgtg

SEQ ID NO: 141115 - DNA, 15 bp, Homo sapiens
aaatgtaaccagtgt

SEQ ID NO: 141116 - DNA, 15 bp, Homo sapiens
taaatgtaaccagtg

SEQ ID NO: 141117 - DNA, 15 bp, Homo sapiens
ataaatgtaaccagt

SEQ ID NO: 141118 - DNA, 15 bp, Homo sapiens
tataaatgtaaccag

SEQ ID NO: 141119 - DNA, 15 bp, Homo sapiens
atataaatgtaacca

SEQ ID NO: 141120 - DNA, 15 bp, Homo sapiens
aatataaatgtaacc

SEQ ID NO: 141121 - DNA, 15 bp, Homo sapiens
aaatataaatgtaac

SEQ ID NO: 141122 - DNA, 15 bp, Homo sapiens
aaaatataaatgtaa

SEQ ID NO: 141123 - DNA, 15 bp, Homo sapiens
caaaatataaatgta

SEQ ID NO: 141124 - DNA, 15 bp, Homo sapiens
ccaaaatataaatgt

SEQ ID NO: 141125 - DNA, 15 bp, Homo sapiens
cccaaaatataaatg

SEQ ID NO: 141126 - DNA, 15 bp, Homo sapiens
gcccaaaatataaat

SEQ ID NO: 141127 - DNA, 15 bp, Homo sapiens
tgcccaaaatataaa

SEQ ID NO: 141128 - DNA, 15 bp, Homo sapiens
gtgcccaaaatataa

SEQ ID NO: 141129 - DNA, 15 bp, Homo sapiens
agtgcccaaaatata

SEQ ID NO: 141130 - DNA, 15 bp, Homo sapiens
cagtgcccaaaatat

SEQ ID NO: 141131 - DNA, 15 bp, Homo sapiens
tcagtgcccaaaata

SEQ ID NO: 141132 - DNA, 15 bp, Homo sapiens
ttcagtgcccaaaat

SEQ ID NO: 141133 - DNA, 15 bp, Homo sapiens
attcagtgcccaaaa

SEQ ID NO: 141134 - DNA, 15 bp, Homo sapiens
gattcagtgcccaaa

SEQ ID NO: 141135 - DNA, 15 bp, Homo sapiens
agattcagtgcccaa

SEQ ID NO: 141136 - DNA, 15 bp, Homo sapiens
gagattcagtgccca

SEQ ID NO: 141137 - DNA, 15 bp, Homo sapiens
agagattcagtgccc

SEQ ID NO: 141138 - DNA, 15 bp, Homo sapiens
aagagattcagtgcc

SEQ ID NO: 141139 - DNA, 15 bp, Homo sapiens
aaagagattcagtgc

SEQ ID NO: 141140 - DNA, 15 bp, Homo sapiens
caaagagattcagtg

SEQ ID NO: 141141 - DNA, 15 bp, Homo sapiens
acaaagagattcagt

SEQ ID NO: 141142 - DNA, 15 bp, Homo sapiens
aacaaagagattcag

SEQ ID NO: 141143 - DNA, 15 bp, Homo sapiens
aaacaaagagattca

SEQ ID NO: 141144 - DNA, 15 bp, Homo sapiens
aaaacaaagagattc

SEQ ID NO: 141145 - DNA, 15 bp, Homo sapiens
gaaaacaaagagatt

SEQ ID NO: 141146 - DNA, 15 bp, Homo sapiens
agaaaacaaagagat

SEQ ID NO: 141147 - DNA, 15 bp, Homo sapiens
cagaaaacaaagaga

SEQ ID NO: 141148 - DNA, 15 bp, Homo sapiens
ccagaaaacaaagag

SEQ ID NO: 141149 - DNA, 15 bp, Homo sapiens
gccagaaaacaaaga

SEQ ID NO: 141150 - DNA, 15 bp, Homo sapiens
agccagaaaacaaag

SEQ ID NO: 141151 - DNA, 15 bp, Homo sapiens
gagccagaaaacaaa

SEQ ID NO: 141152 - DNA, 15 bp, Homo sapiens
agagccagaaaacaa

SEQ ID NO: 141153 - DNA, 15 bp, Homo sapiens
gagagccagaaaaca

SEQ ID NO: 141154 - DNA, 15 bp, Homo sapiens
agagagccagaaaac

SEQ ID NO: 141155 - DNA, 15 bp, Homo sapiens
gagagagccagaaaa

SEQ ID NO: 141156 - DNA, 15 bp, Homo sapiens
tgagagagccagaaa

SEQ ID NO: 141157 - DNA, 15 bp, Homo sapiens
ctgagagagccagaa

SEQ ID NO: 141158 - DNA, 15 bp, Homo sapiens
cctgagagagccaga

SEQ ID NO: 141159 - DNA, 15 bp, Homo sapiens
ccctgagagagccag

SEQ ID NO: 141160 - DNA, 15 bp, Homo sapiens
accctgagagagcca

SEQ ID NO: 141161 - DNA, 15 bp, Homo sapiens
taccctgagagagcc

SEQ ID NO: 141162 - DNA, 15 bp, Homo sapiens
ataccctgagagagc

SEQ ID NO: 141163 - DNA, 15 bp, Homo sapiens
aataccctgagagag

SEQ ID NO: 141164 - DNA, 15 bp, Homo sapiens
aaataccctgagaga

SEQ ID NO: 141165 - DNA, 15 bp, Homo sapiens
taaataccctgagag

SEQ ID NO: 141166 - DNA, 15 bp, Homo sapiens
ttaaataccctgaga

SEQ ID NO: 141167 - DNA, 15 bp, Homo sapiens
attaaataccctgag

SEQ ID NO: 141168 - DNA, 15 bp, Homo sapiens
aattaaataccctga

SEQ ID NO: 141169 - DNA, 15 bp, Homo sapiens
aaattaaataccctg

SEQ ID NO: 141170 - DNA, 15 bp, Homo sapiens
aaaattaaataccct

SEQ ID NO: 141171 - DNA, 15 bp, Homo sapiens
aaaaattaaataccc

SEQ ID NO: 141172 - DNA, 15 bp, Homo sapiens
aaaaaattaaatacc

SEQ ID NO: 141173 - DNA, 15 bp, Homo sapiens
gaaaaaattaaatac

SEQ ID NO: 141174 - DNA, 15 bp, Homo sapiens
agaaaaaattaaata

SEQ ID NO: 141175 - DNA, 15 bp, Homo sapiens
cagaaaaaattaaat

SEQ ID NO: 141176 - DNA, 15 bp, Homo sapiens
ccagaaaaaattaaa

SEQ ID NO: 141177 - DNA, 15 bp, Homo sapiens
tccagaaaaaattaa

SEQ ID NO: 141178 - DNA, 15 bp, Homo sapiens
ttccagaaaaaatta

SEQ ID NO: 141179 - DNA, 15 bp, Homo sapiens
cttccagaaaaaatt

SEQ ID NO: 141180 - DNA, 15 bp, Homo sapiens
gcttccagaaaaaat

SEQ ID NO: 141181 - DNA, 15 bp, Homo sapiens
agcttccagaaaaaa

SEQ ID NO: 141182 - DNA, 15 bp, Homo sapiens
cagcttccagaaaaa

SEQ ID NO: 141183 - DNA, 15 bp, Homo sapiens
tcagcttccagaaaa

SEQ ID NO: 141184 - DNA, 15 bp, Homo sapiens
ctcagcttccagaaa

SEQ ID NO: 141185 - DNA, 15 bp, Homo sapiens
cctcagcttccagaa

SEQ ID NO: 141186 - DNA, 15 bp, Homo sapiens
acctcagcttccaga

SEQ ID NO: 141187 - DNA, 15 bp, Homo sapiens
aacctcagcttccag

SEQ ID NO: 141188 - DNA, 15 bp, Homo sapiens
caacctcagcttcca

SEQ ID NO: 141189 - DNA, 15 bp, Homo sapiens
tcaacctcagcttcc

SEQ ID NO: 141190 - DNA, 15 bp, Homo sapiens
ctcaacctcagcttc

SEQ ID NO: 141191 - DNA, 15 bp, Homo sapiens
gctcaacctcagctt

SEQ ID NO: 141192 - DNA, 15 bp, Homo sapiens
ggctcaacctcagct

SEQ ID NO: 141193 - DNA, 15 bp, Homo sapiens
aggctcaacctcagc

SEQ ID NO: 141194 - DNA, 15 bp, Homo sapiens
aaggctcaacctcag

SEQ ID NO: 141195 - DNA, 15 bp, Homo sapiens
aaaggctcaacctca

SEQ ID NO: 141196 - DNA, 15 bp, Homo sapiens
gaaaggctcaacctc

SEQ ID NO: 141197 - DNA, 15 bp, Homo sapiens
tgaaaggctcaacct

SEQ ID NO: 141198 - DNA, 15 bp, Homo sapiens
ctgaaaggctcaacc

SEQ ID NO: 141199 - DNA, 15 bp, Homo sapiens
cctgaaaggctcaac

SEQ ID NO: 141200 - DNA, 15 bp, Homo sapiens
gcctgaaaggctcaa

SEQ ID NO: 141201 - DNA, 15 bp, Homo sapiens
ggcctgaaaggctca

SEQ ID NO: 141202 - DNA, 15 bp, Homo sapiens
tggcctgaaaggctc

SEQ ID NO: 141203 - DNA, 15 bp, Homo sapiens
gtggcctgaaaggct

SEQ ID NO: 141204 - DNA, 15 bp, Homo sapiens
ggtggcctgaaaggc

SEQ ID NO: 141205 - DNA, 15 bp, Homo sapiens
aggtggcctgaaagg

SEQ ID NO: 141206 - DNA, 15 bp, Homo sapiens
aaggtggcctgaaag

SEQ ID NO: 141207 - DNA, 15 bp, Homo sapiens
aaaggtggcctgaaa

SEQ ID NO: 141208 - DNA, 15 bp, Homo sapiens
taaaggtggcctgaa

SEQ ID NO: 141209 - DNA, 15 bp, Homo sapiens
gtaaaggtggcctga

SEQ ID NO: 141210 - DNA, 15 bp, Homo sapiens
ggtaaaggtggcctg

SEQ ID NO: 141211 - DNA, 15 bp, Homo sapiens
tggtaaaggtggcct

SEQ ID NO: 141212 - DNA, 15 bp, Homo sapiens
ctggtaaaggtggcc

SEQ ID NO: 141213 - DNA, 15 bp, Homo sapiens
cctggtaaaggtggc

SEQ ID NO: 141214 - DNA, 15 bp, Homo sapiens
acctggtaaaggtgg

SEQ ID NO: 141215 - DNA, 15 bp, Homo sapiens
gacctggtaaaggtg

SEQ ID NO: 141216 - DNA, 15 bp, Homo sapiens
ggacctggtaaaggt

SEQ ID NO: 141217 - DNA, 15 bp, Homo sapiens
gggacctggtaaagg

SEQ ID NO: 141218 - DNA, 15 bp, Homo sapiens
tgggacctggtaaag

SEQ ID NO: 141219 - DNA, 15 bp, Homo sapiens
ctgggacctggtaaa

SEQ ID NO: 141220 - DNA, 15 bp, Homo sapiens
cctgggacctggtaa

SEQ ID NO: 141221 - DNA, 15 bp, Homo sapiens
gcctgggacctggta

SEQ ID NO: 141222 - DNA, 15 bp, Homo sapiens
agcctgggacctggt

SEQ ID NO: 141223 - DNA, 15 bp, Homo sapiens
gagcctgggacctgg

SEQ ID NO: 141224 - DNA, 15 bp, Homo sapiens
ggagcctgggacctg

SEQ ID NO: 141225 - DNA, 15 bp, Homo sapiens
tggagcctgggacct

SEQ ID NO: 141226 - DNA, 15 bp, Homo sapiens
ttggagcctgggacc

SEQ ID NO: 141227 - DNA, 15 bp, Homo sapiens
cttggagcctgggac

SEQ ID NO: 141228 - DNA, 15 bp, Homo sapiens
acttggagcctggga

SEQ ID NO: 141229 - DNA, 15 bp, Homo sapiens
tacttggagcctggg

SEQ ID NO: 141230 - DNA, 15 bp, Homo sapiens
ctacttggagcctgg

SEQ ID NO: 141231 - DNA, 15 bp, Homo sapiens
tctacttggagcctg

SEQ ID NO: 141232 - DNA, 15 bp, Homo sapiens
gtctacttggagcct

SEQ ID NO: 141233 - DNA, 15 bp, Homo sapiens
agtctacttggagcc

SEQ ID NO: 141234 - DNA, 15 bp, Homo sapiens
tagtctacttggagc

SEQ ID NO: 141235 - DNA, 15 bp, Homo sapiens
ctagtctacttggag

SEQ ID NO: 141236 - DNA, 15 bp, Homo sapiens
tctagtctacttgga

SEQ ID NO: 141237 - DNA, 15 bp, Homo sapiens
gtctagtctacttgg

SEQ ID NO: 141238 - DNA, 15 bp, Homo sapiens
tgtctagtctacttg

SEQ ID NO: 141239 - DNA, 15 bp, Homo sapiens
gtgtctagtctactt

SEQ ID NO: 141240 - DNA, 15 bp, Homo sapiens
ggtgtctagtctact

SEQ ID NO: 141241 - DNA, 15 bp, Homo sapiens
gggtgtctagtctac

SEQ ID NO: 141242 - DNA, 15 bp, Homo sapiens
tgggtgtctagtcta

SEQ ID NO: 141243 - DNA, 15 bp, Homo sapiens
gtgggtgtctagtct

SEQ ID NO: 141244 - DNA, 15 bp, Homo sapiens
ggtgggtgtctagtc

SEQ ID NO: 141245 - DNA, 15 bp, Homo sapiens
gggtgggtgtctagt

SEQ ID NO: 141246 - DNA, 15 bp, Homo sapiens
tgggtgggtgtctag

SEQ ID NO: 141247 - DNA, 15 bp, Homo sapiens
ctgggtgggtgtcta

SEQ ID NO: 141248 - DNA, 15 bp, Homo sapiens
cctgggtgggtgtct

SEQ ID NO: 141249 - DNA, 15 bp, Homo sapiens
gcctgggtgggtgtc

SEQ ID NO: 141250 - DNA, 15 bp, Homo sapiens
ggcctgggtgggtgt

SEQ ID NO: 141251 - DNA, 15 bp, Homo sapiens
aggcctgggtgggtg

SEQ ID NO: 141252 - DNA, 15 bp, Homo sapiens
caggcctgggtgggt

SEQ ID NO: 141253 - DNA, 15 bp, Homo sapiens
ccaggcctgggtggg

SEQ ID NO: 141254 - DNA, 15 bp, Homo sapiens
cccaggcctgggtgg

SEQ ID NO: 141255 - DNA, 15 bp, Homo sapiens
gcccaggcctgggtg

SEQ ID NO: 141256 - DNA, 15 bp, Homo sapiens
tgcccaggcctgggt

SEQ ID NO: 141257 - DNA, 15 bp, Homo sapiens
ctgcccaggcctggg

SEQ ID NO: 141258 - DNA, 15 bp, Homo sapiens
actgcccaggcctgg

SEQ ID NO: 141259 - DNA, 15 bp, Homo sapiens
cactgcccaggcctg

SEQ ID NO: 141260 - DNA, 15 bp, Homo sapiens
ccactgcccaggcct

SEQ ID NO: 141261 - DNA, 15 bp, Homo sapiens
accactgcccaggcc

SEQ ID NO: 141262 - DNA, 15 bp, Homo sapiens
taccactgcccaggc

SEQ ID NO: 141263 - DNA, 15 bp, Homo sapiens
ctaccactgcccagg

SEQ ID NO: 141264 - DNA, 15 bp, Homo sapiens
cctaccactgcccag

SEQ ID NO: 141265 - DNA, 15 bp, Homo sapiens
ccctaccactgccca

SEQ ID NO: 141266 - DNA, 15 bp, Homo sapiens
tccctaccactgccc

SEQ ID NO: 141267 - DNA, 15 bp, Homo sapiens
ctccctaccactgcc

SEQ ID NO: 141268 - DNA, 15 bp, Homo sapiens
cctccctaccactgc

SEQ ID NO: 141269 - DNA, 15 bp, Homo sapiens
ccctccctaccactg

SEQ ID NO: 141270 - DNA, 15 bp, Homo sapiens
accctccctaccact

SEQ ID NO: 141271 - DNA, 15 bp, Homo sapiens
caccctccctaccac

SEQ ID NO: 141272 - DNA, 15 bp, Homo sapiens
acaccctccctacca

SEQ ID NO: 141273 - DNA, 15 bp, Homo sapiens
cacaccctccctacc

SEQ ID NO: 141274 - DNA, 15 bp, Homo sapiens
tcacaccctccctac

SEQ ID NO: 141275 - DNA, 15 bp, Homo sapiens
gtcacaccctcccta

SEQ ID NO: 141276 - DNA, 15 bp, Homo sapiens
ggtcacaccctccct

SEQ ID NO: 141277 - DNA, 15 bp, Homo sapiens
gggtcacaccctccc

SEQ ID NO: 141278 - DNA, 15 bp, Homo sapiens
tgggtcacaccctcc

SEQ ID NO: 141279 - DNA, 15 bp, Homo sapiens
ctgggtcacaccctc

SEQ ID NO: 141280 - DNA, 15 bp, Homo sapiens
cctgggtcacaccct

SEQ ID NO: 141281 - DNA, 15 bp, Homo sapiens
gcctgggtcacaccc

SEQ ID NO: 141282 - DNA, 15 bp, Homo sapiens
tgcctgggtcacacc

SEQ ID NO: 141283 - DNA, 15 bp, Homo sapiens
atgcctgggtcacac

SEQ ID NO: 141284 - DNA, 15 bp, Homo sapiens
aatgcctgggtcaca

SEQ ID NO: 141285 - DNA, 15 bp, Homo sapiens
caatgcctgggtcac

SEQ ID NO: 141286 - DNA, 15 bp, Homo sapiens
ccaatgcctgggtca

SEQ ID NO: 141287 - DNA, 15 bp, Homo sapiens
gccaatgcctgggtc

SEQ ID NO: 141288 - DNA, 15 bp, Homo sapiens
ggccaatgcctgggt

SEQ ID NO: 141289 - DNA, 15 bp, Homo sapiens
aggccaatgcctggg

SEQ ID NO: 141290 - DNA, 15 bp, Homo sapiens
caggccaatgcctgg

SEQ ID NO: 141291 - DNA, 15 bp, Homo sapiens
gcaggccaatgcctg

SEQ ID NO: 141292 - DNA, 15 bp, Homo sapiens
tgcaggccaatgcct

SEQ ID NO: 141293 - DNA, 15 bp, Homo sapiens
ttgcaggccaatgcc

SEQ ID NO: 141294 - DNA, 15 bp, Homo sapiens
tttgcaggccaatgc

SEQ ID NO: 141295 - DNA, 15 bp, Homo sapiens
atttgcaggccaatg

SEQ ID NO: 141296 - DNA, 15 bp, Homo sapiens
aatttgcaggccaat

SEQ ID NO: 141297 - DNA, 15 bp, Homo sapiens
aaatttgcaggccaa

SEQ ID NO: 141298 - DNA, 15 bp, Homo sapiens
caaatttgcaggcca

SEQ ID NO: 141299 - DNA, 15 bp, Homo sapiens
gcaaatttgcaggcc

SEQ ID NO: 141300 - DNA, 15 bp, Homo sapiens
ggcaaatttgcaggc

SEQ ID NO: 141301 - DNA, 15 bp, Homo sapiens
gggcaaatttgcagg

SEQ ID NO: 141302 - DNA, 15 bp, Homo sapiens
ggggcaaatttgcag

SEQ ID NO: 141303 - DNA, 15 bp, Homo sapiens
tggggcaaatttgca

SEQ ID NO: 141304 - DNA, 15 bp, Homo sapiens
ctggggcaaatttgc

SEQ ID NO: 141305 - DNA, 15 bp, Homo sapiens
gctggggcaaatttg

SEQ ID NO: 141306 - DNA, 15 bp, Homo sapiens
agctggggcaaattt

SEQ ID NO: 141307 - DNA, 15 bp, Homo sapiens
gagctggggcaaatt

SEQ ID NO: 141308 - DNA, 15 bp, Homo sapiens
ggagctggggcaaat

SEQ ID NO: 141309 - DNA, 15 bp, Homo sapiens
aggagctggggcaaa

SEQ ID NO: 141310 - DNA, 15 bp, Homo sapiens
aaggagctggggcaa

SEQ ID NO: 141311 - DNA, 15 bp, Homo sapiens
gaaggagctggggca

SEQ ID NO: 141312 - DNA, 15 bp, Homo sapiens
agaaggagctggggc

SEQ ID NO: 141313 - DNA, 15 bp, Homo sapiens
aagaaggagctgggg

SEQ ID NO: 141314 - DNA, 15 bp, Homo sapiens
caagaaggagctggg

SEQ ID NO: 141315 - DNA, 15 bp, Homo sapiens
gcaagaaggagctgg

SEQ ID NO: 141316 - DNA, 15 bp, Homo sapiens
ggcaagaaggagctg

SEQ ID NO: 141317 - DNA, 15 bp, Homo sapiens
tggcaagaaggagct

SEQ ID NO: 141318 - DNA, 15 bp, Homo sapiens
ttggcaagaaggagc

SEQ ID NO: 141319 - DNA, 15 bp, Homo sapiens
attggcaagaaggag

SEQ ID NO: 141320 - DNA, 15 bp, Homo sapiens
cattggcaagaagga

SEQ ID NO: 141321 - DNA, 15 bp, Homo sapiens
tcattggcaagaagg

SEQ ID NO: 141322 - DNA, 15 bp, Homo sapiens
gtcattggcaagaag

SEQ ID NO: 141323 - DNA, 15 bp, Homo sapiens
agtcattggcaagaa

SEQ ID NO: 141324 - DNA, 15 bp, Homo sapiens
aagtcattggcaaga

SEQ ID NO: 141325 - DNA, 15 bp, Homo sapiens
caagtcattggcaag

SEQ ID NO: 141326 - DNA, 15 bp, Homo sapiens
acaagtcattggcaa

SEQ ID NO: 141327 - DNA, 15 bp, Homo sapiens
gacaagtcattggca

SEQ ID NO: 141328 - DNA, 15 bp, Homo sapiens
tgacaagtcattggc

SEQ ID NO: 141329 - DNA, 15 bp, Homo sapiens
gtgacaagtcattgg

SEQ ID NO: 141330 - DNA, 15 bp, Homo sapiens
tgtgacaagtcattg

SEQ ID NO: 141331 - DNA, 15 bp, Homo sapiens
ctgtgacaagtcatt

SEQ ID NO: 141332 - DNA, 15 bp, Homo sapiens
cctgtgacaagtcat

SEQ ID NO: 141333 - DNA, 15 bp, Homo sapiens
ccctgtgacaagtca

SEQ ID NO: 141334 - DNA, 15 bp, Homo sapiens
gccctgtgacaagtc

SEQ ID NO: 141335 - DNA, 15 bp, Homo sapiens
agccctgtgacaagt

SEQ ID NO: 141336 - DNA, 15 bp, Homo sapiens
gagccctgtgacaag

SEQ ID NO: 141337 - DNA, 15 bp, Homo sapiens
ggagccctgtgacaa

SEQ ID NO: 141338 - DNA, 15 bp, Homo sapiens
aggagccctgtgaca

SEQ ID NO: 141339 - DNA, 15 bp, Homo sapiens
caggagccctgtgac

SEQ ID NO: 141340 - DNA, 15 bp, Homo sapiens
tcaggagccctgtga

SEQ ID NO: 141341 - DNA, 15 bp, Homo sapiens
ttcaggagccctgtg

SEQ ID NO: 141342 - DNA, 15 bp, Homo sapiens
cttcaggagccctgt

SEQ ID NO: 141343 - DNA, 15 bp, Homo sapiens
gcttcaggagccctg

SEQ ID NO: 141344 - DNA, 15 bp, Homo sapiens
ggcttcaggagccct

SEQ ID NO: 141345 - DNA, 15 bp, Homo sapiens
aggcttcaggagccc

SEQ ID NO: 141346 - DNA, 15 bp, Homo sapiens
gaggcttcaggagcc

SEQ ID NO: 141347 - DNA, 15 bp, Homo sapiens
agaggcttcaggagc

SEQ ID NO: 141348 - DNA, 15 bp, Homo sapiens
gagaggcttcaggag

SEQ ID NO: 141349 - DNA, 15 bp, Homo sapiens
tgagaggcttcagga

SEQ ID NO: 141350 - DNA, 15 bp, Homo sapiens
atgagaggcttcagg

SEQ ID NO: 141351 - DNA, 15 bp, Homo sapiens
catgagaggcttcag

SEQ ID NO: 141352 - DNA, 15 bp, Homo sapiens
gcatgagaggcttca

SEQ ID NO: 141353 - DNA, 15 bp, Homo sapiens
ggcatgagaggcttc

SEQ ID NO: 141354 - DNA, 15 bp, Homo sapiens
aggcatgagaggctt

SEQ ID NO: 141355 - DNA, 15 bp, Homo sapiens
caggcatgagaggct

SEQ ID NO: 141356 - DNA, 15 bp, Homo sapiens
tcaggcatgagaggc

SEQ ID NO: 141357 - DNA, 15 bp, Homo sapiens
gtcaggcatgagagg

SEQ ID NO: 141358 - DNA, 15 bp, Homo sapiens
agtcaggcatgagag

SEQ ID NO: 141359 - DNA, 15 bp, Homo sapiens
cagtcaggcatgaga

SEQ ID NO: 141360 - DNA, 15 bp, Homo sapiens
gcagtcaggcatgag

SEQ ID NO: 141361 - DNA, 15 bp, Homo sapiens
ggcagtcaggcatga

SEQ ID NO: 141362 - DNA, 15 bp, Homo sapiens
aggcagtcaggcatg

SEQ ID NO: 141363 - DNA, 15 bp, Homo sapiens
gaggcagtcaggcat

SEQ ID NO: 141364 - DNA, 15 bp, Homo sapiens
tgaggcagtcaggca

SEQ ID NO: 141365 - DNA, 15 bp, Homo sapiens
ctgaggcagtcaggc

SEQ ID NO: 141366 - DNA, 15 bp, Homo sapiens
tctgaggcagtcagg

SEQ ID NO: 141367 - DNA, 15 bp, Homo sapiens
ttctgaggcagtcag

SEQ ID NO: 141368 - DNA, 15 bp, Homo sapiens
cttctgaggcagtca

SEQ ID NO: 141369 - DNA, 15 bp, Homo sapiens
tcttctgaggcagtc

SEQ ID NO: 141370 - DNA, 15 bp, Homo sapiens
ttcttctgaggcagt

SEQ ID NO: 141371 - DNA, 15 bp, Homo sapiens
tttcttctgaggcag

SEQ ID NO: 141372 - DNA, 15 bp, Homo sapiens
ctttcttctgaggca

SEQ ID NO: 141373 - DNA, 15 bp, Homo sapiens
cctttcttctgaggc

SEQ ID NO: 141374 - DNA, 15 bp, Homo sapiens
ccctttcttctgagg

SEQ ID NO: 141375 - DNA, 15 bp, Homo sapiens
accctttcttctgag

SEQ ID NO: 141376 - DNA, 15 bp, Homo sapiens
taccctttcttctga

SEQ ID NO: 141377 - DNA, 15 bp, Homo sapiens
ataccctttcttctg

SEQ ID NO: 141378 - DNA, 15 bp, Homo sapiens
aataccctttcttct

SEQ ID NO: 141379 - DNA, 15 bp, Homo sapiens
aaataccctttcttc

SEQ ID NO: 141380 - DNA, 15 bp, Homo sapiens
aaaataccctttctt

SEQ ID NO: 141381 - DNA, 15 bp, Homo sapiens
caaaataccctttct

SEQ ID NO: 141382 - DNA, 15 bp, Homo sapiens
acaaaataccctttc

SEQ ID NO: 141383 - DNA, 15 bp, Homo sapiens
cacaaaatacccttt

SEQ ID NO: 141384 - DNA, 15 bp, Homo sapiens
tcacaaaataccctt

SEQ ID NO: 141385 - DNA, 15 bp, Homo sapiens
ctcacaaaataccct

SEQ ID NO: 141386 - DNA, 15 bp, Homo sapiens
gctcacaaaataccc

SEQ ID NO: 141387 - DNA, 15 bp, Homo sapiens
agctcacaaaatacc

SEQ ID NO: 141388 - DNA, 15 bp, Homo sapiens
gagctcacaaaatac

SEQ ID NO: 141389 - DNA, 15 bp, Homo sapiens
agagctcacaaaata

SEQ ID NO: 141390 - DNA, 15 bp, Homo sapiens
cagagctcacaaaat

SEQ ID NO: 141391 - DNA, 15 bp, Homo sapiens
acagagctcacaaaa

SEQ ID NO: 141392 - DNA, 15 bp, Homo sapiens
cacagagctcacaaa

SEQ ID NO: 141393 - DNA, 15 bp, Homo sapiens
ccacagagctcacaa

SEQ ID NO: 141394 - DNA, 15 bp, Homo sapiens
cccacagagctcaca

SEQ ID NO: 141395 - DNA, 15 bp, Homo sapiens
acccacagagctcac

SEQ ID NO: 141396 - DNA, 15 bp, Homo sapiens
cacccacagagctca

SEQ ID NO: 141397 - DNA, 15 bp, Homo sapiens
acacccacagagctc

SEQ ID NO: 141398 - DNA, 15 bp, Homo sapiens
aacacccacagagct

SEQ ID NO: 141399 - DNA, 15 bp, Homo sapiens
taacacccacagagc

SEQ ID NO: 141400 - DNA, 15 bp, Homo sapiens
ttaacacccacagag

SEQ ID NO: 141401 - DNA, 15 bp, Homo sapiens
cttaacacccacaga

SEQ ID NO: 141402 - DNA, 15 bp, Homo sapiens
acttaacacccacag

SEQ ID NO: 141403 - DNA, 15 bp, Homo sapiens
cacttaacacccaca

SEQ ID NO: 141404 - DNA, 15 bp, Homo sapiens
acacttaacacccac

SEQ ID NO: 141405 - DNA, 15 bp, Homo sapiens
aacacttaacaccca

SEQ ID NO: 141406 - DNA, 15 bp, Homo sapiens
caacacttaacaccc

SEQ ID NO: 141407 - DNA, 15 bp, Homo sapiens
tcaacacttaacacc

SEQ ID NO: 141408 - DNA, 15 bp, Homo sapiens
ctcaacacttaacac

SEQ ID NO: 141409 - DNA, 15 bp, Homo sapiens
cctcaacacttaaca

SEQ ID NO: 141410 - DNA, 15 bp, Homo sapiens
tcctcaacacttaac

SEQ ID NO: 141411 - DNA, 15 bp, Homo sapiens
ctcctcaacacttaa

SEQ ID NO: 141412 - DNA, 15 bp, Homo sapiens
gctcctcaacactta

SEQ ID NO: 141413 - DNA, 15 bp, Homo sapiens
tgctcctcaacactt

SEQ ID NO: 141414 - DNA, 15 bp, Homo sapiens
ctgctcctcaacact

SEQ ID NO: 141415 - DNA, 15 bp, Homo sapiens
actgctcctcaacac

SEQ ID NO: 141416 - DNA, 15 bp, Homo sapiens
aactgctcctcaaca

SEQ ID NO: 141417 - DNA, 15 bp, Homo sapiens
gaactgctcctcaac

SEQ ID NO: 141418 - DNA, 15 bp, Homo sapiens
ggaactgctcctcaa

SEQ ID NO: 141419 - DNA, 15 bp, Homo sapiens
gggaactgctcctca

SEQ ID NO: 141420 - DNA, 15 bp, Homo sapiens
tgggaactgctcctc

SEQ ID NO: 141421 - DNA, 15 bp, Homo sapiens
gtgggaactgctcct

SEQ ID NO: 141422 - DNA, 15 bp, Homo sapiens
ggtgggaactgctcc

SEQ ID NO: 141423 - DNA, 15 bp, Homo sapiens
tggtgggaactgctc

SEQ ID NO: 141424 - DNA, 15 bp, Homo sapiens
ctggtgggaactgct

SEQ ID NO: 141425 - DNA, 15 bp, Homo sapiens
gctggtgggaactgc

SEQ ID NO: 141426 - DNA, 15 bp, Homo sapiens
tgctggtgggaactg

SEQ ID NO: 141427 - DNA, 15 bp, Homo sapiens
ctgctggtgggaact

SEQ ID NO: 141428 - DNA, 15 bp, Homo sapiens
tctgctggtgggaac

SEQ ID NO: 141429 - DNA, 15 bp, Homo sapiens
gtctgctggtgggaa

SEQ ID NO: 141430 - DNA, 15 bp, Homo sapiens
tgtctgctggtggga

SEQ ID NO: 141431 - DNA, 15 bp, Homo sapiens
ctgtctgctggtggg

SEQ ID NO: 141432 - DNA, 15 bp, Homo sapiens
gctgtctgctggtgg

SEQ ID NO: 141433 - DNA, 15 bp, Homo sapiens
ggctgtctgctggtg

SEQ ID NO: 141434 - DNA, 15 bp, Homo sapiens
aggctgtctgctggt

SEQ ID NO: 141435 - DNA, 15 bp, Homo sapiens
aaggctgtctgctgg

SEQ ID NO: 141436 - DNA, 15 bp, Homo sapiens
gaaggctgtctgctg

SEQ ID NO: 141437 - DNA, 15 bp, Homo sapiens
tgaaggctgtctgct

SEQ ID NO: 141438 - DNA, 15 bp, Homo sapiens
gtgaaggctgtctgc

SEQ ID NO: 141439 - DNA, 15 bp, Homo sapiens
ggtgaaggctgtctg

SEQ ID NO: 141440 - DNA, 15 bp, Homo sapiens
aggtgaaggctgtct

SEQ ID NO: 141441 - DNA, 15 bp, Homo sapiens
caggtgaaggctgtc

SEQ ID NO: 141442 - DNA, 15 bp, Homo sapiens
acaggtgaaggctgt

SEQ ID NO: 141443 - DNA, 15 bp, Homo sapiens
cacaggtgaaggctg

SEQ ID NO: 141444 - DNA, 15 bp, Homo sapiens
acacaggtgaaggct

SEQ ID NO: 141445 - DNA, 15 bp, Homo sapiens
aacacaggtgaaggc

SEQ ID NO: 141446 - DNA, 15 bp, Homo sapiens
aaacacaggtgaagg

SEQ ID NO: 141447 - DNA, 15 bp, Homo sapiens
caaacacaggtgaag

SEQ ID NO: 141448 - DNA, 15 bp, Homo sapiens
tcaaacacaggtgaa

SEQ ID NO: 141449 - DNA, 15 bp, Homo sapiens
atcaaacacaggtga

SEQ ID NO: 141450 - DNA, 15 bp, Homo sapiens
tatcaaacacaggtg

SEQ ID NO: 141451 - DNA, 15 bp, Homo sapiens
ttatcaaacacaggt

SEQ ID NO: 141452 - DNA, 15 bp, Homo sapiens
tttatcaaacacagg

SEQ ID NO: 141453 - DNA, 15 bp, Homo sapiens
ttttatcaaacacag

SEQ ID NO: 141454 - DNA, 15 bp, Homo sapiens
attttatcaaacaca

SEQ ID NO: 141455 - DNA, 15 bp, Homo sapiens
cattttatcaaacac

SEQ ID NO: 141456 - DNA, 15 bp, Homo sapiens
tcattttatcaaaca

SEQ ID NO: 141457 - DNA, 15 bp, Homo sapiens
gtcattttatcaaac

SEQ ID NO: 141458 - DNA, 15 bp, Homo sapiens
tgtcattttatcaaa

SEQ ID NO: 141459 - DNA, 15 bp, Homo sapiens
ttgtcattttatcaa

SEQ ID NO: 141460 - DNA, 15 bp, Homo sapiens
tttgtcattttatca

SEQ ID NO: 141461 - DNA, 15 bp, Homo sapiens
atttgtcattttatc

SEQ ID NO: 141462 - DNA, 15 bp, Homo sapiens
aatttgtcattttat

SEQ ID NO: 141463 - DNA, 15 bp, Homo sapiens
gaatttgtcatttta

SEQ ID NO: 141464 - DNA, 15 bp, Homo sapiens
tgaatttgtcatttt

SEQ ID NO: 141465 - DNA, 15 bp, Homo sapiens
atgaatttgtcattt

SEQ ID NO: 141466 - DNA, 15 bp, Homo sapiens
aatgaatttgtcatt

SEQ ID NO: 141467 - DNA, 15 bp, Homo sapiens
aaatgaatttgtcat

SEQ ID NO: 141468 - DNA, 15 bp, Homo sapiens
aaaatgaatttgtca

SEQ ID NO: 141469 - DNA, 15 bp, Homo sapiens
aaaaatgaatttgtc

SEQ ID NO: 141470 - DNA, 15 bp, Homo sapiens
aaaaaatgaatttgt

SEQ ID NO: 141471 - DNA, 15 bp, Homo sapiens
aaaaaaatgaatttg

SEQ ID NO: 141472 - DNA, 15 bp, Homo sapiens
gaaaaaaatgaattt

SEQ ID NO: 141473 - DNA, 15 bp, Homo sapiens
agaaaaaaatgaatt

SEQ ID NO: 141474 - DNA, 15 bp, Homo sapiens
aagaaaaaaatgaat

SEQ ID NO: 141475 - DNA, 15 bp, Homo sapiens
gaagaaaaaaatgaa

SEQ ID NO: 141476 - DNA, 15 bp, Homo sapiens
agaagaaaaaaatga

SEQ ID NO: 141477 - DNA, 15 bp, Homo sapiens
gagaagaaaaaaatg

SEQ ID NO: 141478 - DNA, 15 bp, Homo sapiens
agagaagaaaaaaat

SEQ ID NO: 141479 - DNA, 15 bp, Homo sapiens
tagagaagaaaaaaa

SEQ ID NO: 141480 - DNA, 15 bp, Homo sapiens
gtagagaagaaaaaa

SEQ ID NO: 141481 - DNA, 15 bp, Homo sapiens
ggtagagaagaaaaa

SEQ ID NO: 141482 - DNA, 15 bp, Homo sapiens
gggtagagaagaaaa

SEQ ID NO: 141483 - DNA, 15 bp, Homo sapiens
ggggtagagaagaaa

SEQ ID NO: 141484 - DNA, 15 bp, Homo sapiens
tggggtagagaagaa

SEQ ID NO: 141485 - DNA, 15 bp, Homo sapiens
atggggtagagaaga

SEQ ID NO: 141486 - DNA, 15 bp, Homo sapiens
gatggggtagagaag

SEQ ID NO: 141487 - DNA, 15 bp, Homo sapiens
ggatggggtagagaa

SEQ ID NO: 141488 - DNA, 15 bp, Homo sapiens
tggatggggtagaga

SEQ ID NO: 141489 - DNA, 15 bp, Homo sapiens
atggatggggtagag

SEQ ID NO: 141490 - DNA, 15 bp, Homo sapiens
gatggatggggtaga

SEQ ID NO: 141491 - DNA, 15 bp, Homo sapiens
agatggatggggtag

SEQ ID NO: 141492 - DNA, 15 bp, Homo sapiens
gagatggatggggta

SEQ ID NO: 141493 - DNA, 15 bp, Homo sapiens
ggagatggatggggt

SEQ ID NO: 141494 - DNA, 15 bp, Homo sapiens
aggagatggatgggg

SEQ ID NO: 141495 - DNA, 15 bp, Homo sapiens
gaggagatggatggg

SEQ ID NO: 141496 - DNA, 15 bp, Homo sapiens
agaggagatggatgg

SEQ ID NO: 141497 - DNA, 15 bp, Homo sapiens
aagaggagatggatg

SEQ ID NO: 141498 - DNA, 15 bp, Homo sapiens
aaagaggagatggat

SEQ ID NO: 141499 - DNA, 15 bp, Homo sapiens
gaaagaggagatgga

SEQ ID NO: 141500 - DNA, 15 bp, Homo sapiens
ggaaagaggagatgg

SEQ ID NO: 141501 - DNA, 15 bp, Homo sapiens
aggaaagaggagatg

SEQ ID NO: 141502 - DNA, 15 bp, Homo sapiens
aaggaaagaggagat

SEQ ID NO: 141503 - DNA, 15 bp, Homo sapiens
gaaggaaagaggaga

SEQ ID NO: 141504 - DNA, 15 bp, Homo sapiens
ggaaggaaagaggag

SEQ ID NO: 141505 - DNA, 15 bp, Homo sapiens
gggaaggaaagagga

SEQ ID NO: 141506 - DNA, 15 bp, Homo sapiens
agggaaggaaagagg

SEQ ID NO: 141507 - DNA, 15 bp, Homo sapiens
cagggaaggaaagag

SEQ ID NO: 141508 - DNA, 15 bp, Homo sapiens
acagggaaggaaaga

SEQ ID NO: 141509 - DNA, 15 bp, Homo sapiens
gacagggaaggaaag

SEQ ID NO: 141510 - DNA, 15 bp, Homo sapiens
agacagggaaggaaa

SEQ ID NO: 141511 - DNA, 15 bp, Homo sapiens
cagacagggaaggaa

SEQ ID NO: 141512 - DNA, 15 bp, Homo sapiens
tcagacagggaagga

SEQ ID NO: 141513 - DNA, 15 bp, Homo sapiens
ttcagacagggaagg

SEQ ID NO: 141514 - DNA, 15 bp, Homo sapiens
cttcagacagggaag

SEQ ID NO: 141515 - DNA, 15 bp, Homo sapiens
ccttcagacagggaa

SEQ ID NO: 141516 - DNA, 15 bp, Homo sapiens
cccttcagacaggga

SEQ ID NO: 141517 - DNA, 15 bp, Homo sapiens
ccccttcagacaggg

SEQ ID NO: 141518 - DNA, 15 bp, Homo sapiens
gccccttcagacagg

SEQ ID NO: 141519 - DNA, 15 bp, Homo sapiens
ggccccttcagacag

SEQ ID NO: 141520 - DNA, 15 bp, Homo sapiens
aggccccttcagaca

SEQ ID NO: 141521 - DNA, 15 bp, Homo sapiens
gaggccccttcagac

SEQ ID NO: 141522 - DNA, 15 bp, Homo sapiens
agaggccccttcaga

SEQ ID NO: 141523 - DNA, 15 bp, Homo sapiens
cagaggccccttcag

SEQ ID NO: 141524 - DNA, 15 bp, Homo sapiens
acagaggccccttca

SEQ ID NO: 141525 - DNA, 15 bp, Homo sapiens
gacagaggccccttc

SEQ ID NO: 141526 - DNA, 15 bp, Homo sapiens
tgacagaggcccctt

SEQ ID NO: 141527 - DNA, 15 bp, Homo sapiens
ctgacagaggcccct

SEQ ID NO: 141528 - DNA, 15 bp, Homo sapiens
cctgacagaggcccc

SEQ ID NO: 141529 - DNA, 15 bp, Homo sapiens
gcctgacagaggccc

SEQ ID NO: 141530 - DNA, 15 bp, Homo sapiens
ggcctgacagaggcc

SEQ ID NO: 141531 - DNA, 15 bp, Homo sapiens
tggcctgacagaggc

SEQ ID NO: 141532 - DNA, 15 bp, Homo sapiens
ctggcctgacagagg

SEQ ID NO: 141533 - DNA, 15 bp, Homo sapiens
gctggcctgacagag

SEQ ID NO: 141534 - DNA, 15 bp, Homo sapiens
ggctggcctgacaga

SEQ ID NO: 141535 - DNA, 15 bp, Homo sapiens
tggctggcctgacag

SEQ ID NO: 141536 - DNA, 15 bp, Homo sapiens
gtggctggcctgaca

SEQ ID NO: 141537 - DNA, 15 bp, Homo sapiens
ggtggctggcctgac

SEQ ID NO: 141538 - DNA, 15 bp, Homo sapiens
tggtggctggcctga

SEQ ID NO: 141539 - DNA, 15 bp, Homo sapiens
ctggtggctggcctg

SEQ ID NO: 141540 - DNA, 15 bp, Homo sapiens
gctggtggctggcct

SEQ ID NO: 141541 - DNA, 15 bp, Homo sapiens
agctggtggctggcc

SEQ ID NO: 141542 - DNA, 15 bp, Homo sapiens
tagctggtggctggc

SEQ ID NO: 141543 - DNA, 15 bp, Homo sapiens
atagctggtggctgg

SEQ ID NO: 141544 - DNA, 15 bp, Homo sapiens
gatagctggtggctg

SEQ ID NO: 141545 - DNA, 15 bp, Homo sapiens
cgatagctggtggct

SEQ ID NO: 141546 - DNA, 15 bp, Homo sapiens
acgatagctggtggc

SEQ ID NO: 141547 - DNA, 15 bp, Homo sapiens
cacgatagctggtgg

SEQ ID NO: 141548 - DNA, 15 bp, Homo sapiens
tcacgatagctggtg

SEQ ID NO: 141549 - DNA, 15 bp, Homo sapiens
ctcacgatagctggt

SEQ ID NO: 141550 - DNA, 15 bp, Homo sapiens
tctcacgatagctgg

SEQ ID NO: 141551 - DNA, 15 bp, Homo sapiens
ctctcacgatagctg

SEQ ID NO: 141552 - DNA, 15 bp, Homo sapiens
cctctcacgatagct

SEQ ID NO: 141553 - DNA, 15 bp, Homo sapiens
tcctctcacgatagc

SEQ ID NO: 141554 - DNA, 15 bp, Homo sapiens
ctcctctcacgatag

SEQ ID NO: 141555 - DNA, 15 bp, Homo sapiens
gctcctctcacgata

SEQ ID NO: 141556 - DNA, 15 bp, Homo sapiens
ggctcctctcacgat

SEQ ID NO: 141557 - DNA, 15 bp, Homo sapiens
tggctcctctcacga

SEQ ID NO: 141558 - DNA, 15 bp, Homo sapiens
ttggctcctctcacg

SEQ ID NO: 141559 - DNA, 15 bp, Homo sapiens
cttggctcctctcac

SEQ ID NO: 141560 - DNA, 15 bp, Homo sapiens
acttggctcctctca

SEQ ID NO: 141561 - DNA, 15 bp, Homo sapiens
aacttggctcctctc

SEQ ID NO: 141562 - DNA, 15 bp, Homo sapiens
gaacttggctcctct

SEQ ID NO: 141563 - DNA, 15 bp, Homo sapiens
ggaacttggctcctc

SEQ ID NO: 141564 - DNA, 15 bp, Homo sapiens
aggaacttggctcct

SEQ ID NO: 141565 - DNA, 15 bp, Homo sapiens
gaggaacttggctcc

SEQ ID NO: 141566 - DNA, 15 bp, Homo sapiens
tgaggaacttggctc

SEQ ID NO: 141567 - DNA, 15 bp, Homo sapiens
atgaggaacttggct

SEQ ID NO: 141568 - DNA, 15 bp, Homo sapiens
aatgaggaacttggc

SEQ ID NO: 141569 - DNA, 15 bp, Homo sapiens
caatgaggaacttgg

SEQ ID NO: 141570 - DNA, 15 bp, Homo sapiens
gcaatgaggaacttg

SEQ ID NO: 141571 - DNA, 15 bp, Homo sapiens
ggcaatgaggaactt

SEQ ID NO: 141572 - DNA, 15 bp, Homo sapiens
gggcaatgaggaact

SEQ ID NO: 141573 - DNA, 15 bp, Homo sapiens
agggcaatgaggaac

SEQ ID NO: 141574 - DNA, 15 bp, Homo sapiens
cagggcaatgaggaa

SEQ ID NO: 141575 - DNA, 15 bp, Homo sapiens
acagggcaatgagga

SEQ ID NO: 141576 - DNA, 15 bp, Homo sapiens
cacagggcaatgagg

SEQ ID NO: 141577 - DNA, 15 bp, Homo sapiens
gcacagggcaatgag

SEQ ID NO: 141578 - DNA, 15 bp, Homo sapiens
agcacagggcaatga

SEQ ID NO: 141579 - DNA, 15 bp, Homo sapiens
cagcacagggcaatg

SEQ ID NO: 141580 - DNA, 15 bp, Homo sapiens
tcagcacagggcaat

SEQ ID NO: 141581 - DNA, 15 bp, Homo sapiens
ttcagcacagggcaa

SEQ ID NO: 141582 - DNA, 15 bp, Homo sapiens
gttcagcacagggca

SEQ ID NO: 141583 - DNA, 15 bp, Homo sapiens
ggttcagcacagggc

SEQ ID NO: 141584 - DNA, 15 bp, Homo sapiens
cggttcagcacaggg

SEQ ID NO: 141585 - DNA, 15 bp, Homo sapiens
tcggttcagcacagg

SEQ ID NO: 141586 - DNA, 15 bp, Homo sapiens
ttcggttcagcacag

SEQ ID NO: 141587 - DNA, 15 bp, Homo sapiens
gttcggttcagcaca

SEQ ID NO: 141588 - DNA, 15 bp, Homo sapiens
agttcggttcagcac

SEQ ID NO: 141589 - DNA, 15 bp, Homo sapiens
cagttcggttcagca

SEQ ID NO: 141590 - DNA, 15 bp, Homo sapiens
gcagttcggttcagc

SEQ ID NO: 141591 - DNA, 15 bp, Homo sapiens
tgcagttcggttcag

SEQ ID NO: 141592 - DNA, 15 bp, Homo sapiens
ctgcagttcggttca

SEQ ID NO: 141593 - DNA, 15 bp, Homo sapiens
gctgcagttcggttc

SEQ ID NO: 141594 - DNA, 15 bp, Homo sapiens
tgctgcagttcggtt

SEQ ID NO: 141595 - DNA, 15 bp, Homo sapiens
ttgctgcagttcggt

SEQ ID NO: 141596 - DNA, 15 bp, Homo sapiens
cttgctgcagttcgg

SEQ ID NO: 141597 - DNA, 15 bp, Homo sapiens
acttgctgcagttcg

SEQ ID NO: 141598 - DNA, 15 bp, Homo sapiens
aacttgctgcagttc

SEQ ID NO: 141599 - DNA, 15 bp, Homo sapiens
caacttgctgcagtt

SEQ ID NO: 141600 - DNA, 15 bp, Homo sapiens
ccaacttgctgcagt

SEQ ID NO: 141601 - DNA, 15 bp, Homo sapiens
tccaacttgctgcag

SEQ ID NO: 141602 - DNA, 15 bp, Homo sapiens
atccaacttgctgca

SEQ ID NO: 141603 - DNA, 15 bp, Homo sapiens
tatccaacttgctgc

SEQ ID NO: 141604 - DNA, 15 bp, Homo sapiens
ctatccaacttgctg

SEQ ID NO: 141605 - DNA, 15 bp, Homo sapiens
tctatccaacttgct

SEQ ID NO: 141606 - DNA, 15 bp, Homo sapiens
ctctatccaacttgc

SEQ ID NO: 141607 - DNA, 15 bp, Homo sapiens
cctctatccaacttg

SEQ ID NO: 141608 - DNA, 15 bp, Homo sapiens
tcctctatccaactt

SEQ ID NO: 141609 - DNA, 15 bp, Homo sapiens
ctcctctatccaact

SEQ ID NO: 141610 - DNA, 15 bp, Homo sapiens
cctcctctatccaac

SEQ ID NO: 141611 - DNA, 15 bp, Homo sapiens
gcctcctctatccaa

SEQ ID NO: 141612 - DNA, 15 bp, Homo sapiens
tgcctcctctatcca

SEQ ID NO: 141613 - DNA, 15 bp, Homo sapiens
ctgcctcctctatcc

SEQ ID NO: 141614 - DNA, 15 bp, Homo sapiens
actgcctcctctatc

SEQ ID NO: 141615 - DNA, 15 bp, Homo sapiens
aactgcctcctctat

SEQ ID NO: 141616 - DNA, 15 bp, Homo sapiens
aaactgcctcctcta

SEQ ID NO: 141617 - DNA, 15 bp, Homo sapiens
aaaactgcctcctct

SEQ ID NO: 141618 - DNA, 15 bp, Homo sapiens
caaaactgcctcctc

SEQ ID NO: 141619 - DNA, 15 bp, Homo sapiens
ccaaaactgcctcct

SEQ ID NO: 141620 - DNA, 15 bp, Homo sapiens
gccaaaactgcctcc

SEQ ID NO: 141621 - DNA, 15 bp, Homo sapiens
agccaaaactgcctc

SEQ ID NO: 141622 - DNA, 15 bp, Homo sapiens
aagccaaaactgcct

SEQ ID NO: 141623 - DNA, 15 bp, Homo sapiens
caagccaaaactgcc

SEQ ID NO: 141624 - DNA, 15 bp, Homo sapiens
tcaagccaaaactgc

SEQ ID NO: 141625 - DNA, 15 bp, Homo sapiens
ttcaagccaaaactg

SEQ ID NO: 141626 - DNA, 15 bp, Homo sapiens
gttcaagccaaaact

SEQ ID NO: 141627 - DNA, 15 bp, Homo sapiens
cgttcaagccaaaac

SEQ ID NO: 141628 - DNA, 15 bp, Homo sapiens
gcgttcaagccaaaa

SEQ ID NO: 141629 - DNA, 15 bp, Homo sapiens
tgcgttcaagccaaa

SEQ ID NO: 141630 - DNA, 15 bp, Homo sapiens
ttgcgttcaagccaa

SEQ ID NO: 141631 - DNA, 15 bp, Homo sapiens
tttgcgttcaagcca

SEQ ID NO: 141632 - DNA, 15 bp, Homo sapiens
gtttgcgttcaagcc

SEQ ID NO: 141633 - DNA, 15 bp, Homo sapiens
tgtttgcgttcaagc

SEQ ID NO: 141634 - DNA, 15 bp, Homo sapiens
atgtttgcgttcaag

SEQ ID NO: 141635 - DNA, 15 bp, Homo sapiens
gatgtttgcgttcaa

SEQ ID NO: 141636 - DNA, 15 bp, Homo sapiens
ggatgtttgcgttca

SEQ ID NO: 141637 - DNA, 15 bp, Homo sapiens
aggatgtttgcgttc

SEQ ID NO: 141638 - DNA, 15 bp, Homo sapiens
caggatgtttgcgtt

SEQ ID NO: 141639 - DNA, 15 bp, Homo sapiens
acaggatgtttgcgt

SEQ ID NO: 141640 - DNA, 15 bp, Homo sapiens
gacaggatgtttgcg

SEQ ID NO: 141641 - DNA, 15 bp, Homo sapiens
cgacaggatgtttgc

SEQ ID NO: 141642 - DNA, 15 bp, Homo sapiens
ccgacaggatgtttg

SEQ ID NO: 141643 - DNA, 15 bp, Homo sapiens
tccgacaggatgttt

SEQ ID NO: 141644 - DNA, 15 bp, Homo sapiens
ctccgacaggatgtt

SEQ ID NO: 141645 - DNA, 15 bp, Homo sapiens
tctccgacaggatgt

SEQ ID NO: 141646 - DNA, 15 bp, Homo sapiens
ttctccgacaggatg

SEQ ID NO: 141647 - DNA, 15 bp, Homo sapiens
gttctccgacaggat

SEQ ID NO: 141648 - DNA, 15 bp, Homo sapiens
tgttctccgacagga

SEQ ID NO: 141649 - DNA, 15 bp, Homo sapiens
ctgttctccgacagg

SEQ ID NO: 141650 - DNA, 15 bp, Homo sapiens
tctgttctccgacag

SEQ ID NO: 141651 - DNA, 15 bp, Homo sapiens
ctctgttctccgaca

SEQ ID NO: 141652 - DNA, 15 bp, Homo sapiens
actctgttctccgac

SEQ ID NO: 141653 - DNA, 15 bp, Homo sapiens
cactctgttctccga

SEQ ID NO: 141654 - DNA, 15 bp, Homo sapiens
tcactctgttctccg

SEQ ID NO: 141655 - DNA, 15 bp, Homo sapiens
atcactctgttctcc

SEQ ID NO: 141656 - DNA, 15 bp, Homo sapiens
aatcactctgttctc

SEQ ID NO: 141657 - DNA, 15 bp, Homo sapiens
taatcactctgttct

SEQ ID NO: 141658 - DNA, 15 bp, Homo sapiens
ataatcactctgttc

SEQ ID NO: 141659 - DNA, 15 bp, Homo sapiens
tataatcactctgtt

SEQ ID NO: 141660 - DNA, 15 bp, Homo sapiens
ctataatcactctgt

SEQ ID NO: 141661 - DNA, 15 bp, Homo sapiens
actataatcactctg

SEQ ID NO: 141662 - DNA, 15 bp, Homo sapiens
aactataatcactct

SEQ ID NO: 141663 - DNA, 15 bp, Homo sapiens
aaactataatcactc

SEQ ID NO: 141664 - DNA, 15 bp, Homo sapiens
aaaactataatcact

SEQ ID NO: 141665 - DNA, 15 bp, Homo sapiens
taaaactataatcac

SEQ ID NO: 141666 - DNA, 15 bp, Homo sapiens
ctaaaactataatca

SEQ ID NO: 141667 - DNA, 15 bp, Homo sapiens
gctaaaactataatc

SEQ ID NO: 141668 - DNA, 15 bp, Homo sapiens
agctaaaactataat

SEQ ID NO: 141669 - DNA, 15 bp, Homo sapiens
cagctaaaactataa

SEQ ID NO: 141670 - DNA, 15 bp, Homo sapiens
gcagctaaaactata

SEQ ID NO: 141671 - DNA, 15 bp, Homo sapiens
tgcagctaaaactat

SEQ ID NO: 141672 - DNA, 15 bp, Homo sapiens
gtgcagctaaaacta

SEQ ID NO: 141673 - DNA, 15 bp, Homo sapiens
tgtgcagctaaaact

SEQ ID NO: 141674 - DNA, 15 bp, Homo sapiens
gtgtgcagctaaaac

SEQ ID NO: 141675 - DNA, 15 bp, Homo sapiens
cgtgtgcagctaaaa

SEQ ID NO: 141676 - DNA, 15 bp, Homo sapiens
ccgtgtgcagctaaa

SEQ ID NO: 141677 - DNA, 15 bp, Homo sapiens
cccgtgtgcagctaa

SEQ ID NO: 141678 - DNA, 15 bp, Homo sapiens
ccccgtgtgcagcta

SEQ ID NO: 141679 - DNA, 15 bp, Homo sapiens
tccccgtgtgcagct

SEQ ID NO: 141680 - DNA, 15 bp, Homo sapiens
ttccccgtgtgcagc

SEQ ID NO: 141681 - DNA, 15 bp, Homo sapiens
tttccccgtgtgcag

SEQ ID NO: 141682 - DNA, 15 bp, Homo sapiens
atttccccgtgtgca

SEQ ID NO: 141683 - DNA, 15 bp, Homo sapiens
tatttccccgtgtgc

SEQ ID NO: 141684 - DNA, 15 bp, Homo sapiens
ttatttccccgtgtg

SEQ ID NO: 141685 - DNA, 15 bp, Homo sapiens
gttatttccccgtgt

SEQ ID NO: 141686 - DNA, 15 bp, Homo sapiens
tgttatttccccgtg

SEQ ID NO: 141687 - DNA, 15 bp, Homo sapiens
ctgttatttccccgt

SEQ ID NO: 141688 - DNA, 15 bp, Homo sapiens
gctgttatttccccg

SEQ ID NO: 141689 - DNA, 15 bp, Homo sapiens
tgctgttatttcccc

SEQ ID NO: 141690 - DNA, 15 bp, Homo sapiens
gtgctgttatttccc

SEQ ID NO: 141691 - DNA, 15 bp, Homo sapiens
tgtgctgttatttcc

SEQ ID NO: 141692 - DNA, 15 bp, Homo sapiens
ctgtgctgttatttc

SEQ ID NO: 141693 - DNA, 15 bp, Homo sapiens
tctgtgctgttattt

SEQ ID NO: 141694 - DNA, 15 bp, Homo sapiens
ctctgtgctgttatt

SEQ ID NO: 141695 - DNA, 15 bp, Homo sapiens
cctctgtgctgttat

SEQ ID NO: 141696 - DNA, 15 bp, Homo sapiens
acctctgtgctgtta

SEQ ID NO: 141697 - DNA, 15 bp, Homo sapiens
cacctctgtgctgtt

SEQ ID NO: 141698 - DNA, 15 bp, Homo sapiens
tcacctctgtgctgt

SEQ ID NO: 141699 - DNA, 15 bp, Homo sapiens
ttcacctctgtgctg

SEQ ID NO: 141700 - DNA, 15 bp, Homo sapiens
attcacctctgtgct

SEQ ID NO: 141701 - DNA, 15 bp, Homo sapiens
gattcacctctgtgc

SEQ ID NO: 141702 - DNA, 15 bp, Homo sapiens
tgattcacctctgtg

SEQ ID NO: 141703 - DNA, 15 bp, Homo sapiens
atgattcacctctgt

SEQ ID NO: 141704 - DNA, 15 bp, Homo sapiens
catgattcacctctg

SEQ ID NO: 141705 - DNA, 15 bp, Homo sapiens
ccatgattcacctct

SEQ ID NO: 141706 - DNA, 15 bp, Homo sapiens
gccatgattcacctc

SEQ ID NO: 141707 - DNA, 15 bp, Homo sapiens
tgccatgattcacct

SEQ ID NO: 141708 - DNA, 15 bp, Homo sapiens
atgccatgattcacc

SEQ ID NO: 141709 - DNA, 15 bp, Homo sapiens
gatgccatgattcac

SEQ ID NO: 141710 - DNA, 15 bp, Homo sapiens
agatgccatgattca

SEQ ID NO: 141711 - DNA, 15 bp, Homo sapiens
cagatgccatgattc

SEQ ID NO: 141712 - DNA, 15 bp, Homo sapiens
acagatgccatgatt

SEQ ID NO: 141713 - DNA, 15 bp, Homo sapiens
aacagatgccatgat

SEQ ID NO: 141714 - DNA, 15 bp, Homo sapiens
aaacagatgccatga

SEQ ID NO: 141715 - DNA, 15 bp, Homo sapiens
taaacagatgccatg

SEQ ID NO: 141716 - DNA, 15 bp, Homo sapiens
gtaaacagatgccat

SEQ ID NO: 141717 - DNA, 15 bp, Homo sapiens
agtaaacagatgcca

SEQ ID NO: 141718 - DNA, 15 bp, Homo sapiens
cagtaaacagatgcc

SEQ ID NO: 141719 - DNA, 15 bp, Homo sapiens
gcagtaaacagatgc

SEQ ID NO: 141720 - DNA, 15 bp, Homo sapiens
agcagtaaacagatg

SEQ ID NO: 141721 - DNA, 15 bp, Homo sapiens
tagcagtaaacagat

SEQ ID NO: 141722 - DNA, 15 bp, Homo sapiens
ttagcagtaaacaga

SEQ ID NO: 141723 - DNA, 15 bp, Homo sapiens
attagcagtaaacag

SEQ ID NO: 141724 - DNA, 15 bp, Homo sapiens
aattagcagtaaaca

SEQ ID NO: 141725 - DNA, 15 bp, Homo sapiens
taattagcagtaaac

SEQ ID NO: 141726 - DNA, 15 bp, Homo sapiens
ttaattagcagtaaa

SEQ ID NO: 141727 - DNA, 15 bp, Homo sapiens
gttaattagcagtaa

SEQ ID NO: 141728 - DNA, 15 bp, Homo sapiens
ggttaattagcagta

SEQ ID NO: 141729 - DNA, 15 bp, Homo sapiens
gggttaattagcagt

SEQ ID NO: 141730 - DNA, 15 bp, Homo sapiens
ggggttaattagcag

SEQ ID NO: 141731 - DNA, 15 bp, Homo sapiens
aggggttaattagca

SEQ ID NO: 141732 - DNA, 15 bp, Homo sapiens
gaggggttaattagc

SEQ ID NO: 141733 - DNA, 15 bp, Homo sapiens
ggaggggttaattag

SEQ ID NO: 141734 - DNA, 15 bp, Homo sapiens
cggaggggttaatta

SEQ ID NO: 141735 - DNA, 15 bp, Homo sapiens
acggaggggttaatt

SEQ ID NO: 141736 - DNA, 15 bp, Homo sapiens
cacggaggggttaat

SEQ ID NO: 141737 - DNA, 15 bp, Homo sapiens
acacggaggggttaa

SEQ ID NO: 141738 - DNA, 15 bp, Homo sapiens
tacacggaggggtta

SEQ ID NO: 141739 - DNA, 15 bp, Homo sapiens
gtacacggaggggtt

SEQ ID NO: 141740 - DNA, 15 bp, Homo sapiens
tgtacacggaggggt

SEQ ID NO: 141741 - DNA, 15 bp, Homo sapiens
gtgtacacggagggg

SEQ ID NO: 141742 - DNA, 15 bp, Homo sapiens
ggtgtacacggaggg

SEQ ID NO: 141743 - DNA, 15 bp, Homo sapiens
tggtgtacacggagg

SEQ ID NO: 141744 - DNA, 15 bp, Homo sapiens
ctggtgtacacggag

SEQ ID NO: 141745 - DNA, 15 bp, Homo sapiens
actggtgtacacgga

SEQ ID NO: 141746 - DNA, 15 bp, Homo sapiens
cactggtgtacacgg

SEQ ID NO: 141747 - DNA, 15 bp, Homo sapiens
acactggtgtacacg

SEQ ID NO: 141748 - DNA, 15 bp, Homo sapiens
aacactggtgtacac

SEQ ID NO: 141749 - DNA, 15 bp, Homo sapiens
caacactggtgtaca

SEQ ID NO: 141750 - DNA, 15 bp, Homo sapiens
acaacactggtgtac

SEQ ID NO: 141751 - DNA, 15 bp, Homo sapiens
tacaacactggtgta

SEQ ID NO: 141752 - DNA, 15 bp, Homo sapiens
atacaacactggtgt

SEQ ID NO: 141753 - DNA, 15 bp, Homo sapiens
catacaacactggtg

SEQ ID NO: 141754 - DNA, 15 bp, Homo sapiens
acatacaacactggt

SEQ ID NO: 141755 - DNA, 15 bp, Homo sapiens
cacatacaacactgg

SEQ ID NO: 141756 - DNA, 15 bp, Homo sapiens
tcacatacaacactg

SEQ ID NO: 141757 - DNA, 15 bp, Homo sapiens
ctcacatacaacact

SEQ ID NO: 141758 - DNA, 15 bp, Homo sapiens
gctcacatacaacac

SEQ ID NO: 141759 - DNA, 15 bp, Homo sapiens
ggctcacatacaaca

SEQ ID NO: 141760 - DNA, 15 bp, Homo sapiens
cggctcacatacaac

SEQ ID NO: 141761 - DNA, 15 bp, Homo sapiens
ccggctcacatacaa

SEQ ID NO: 141762 - DNA, 15 bp, Homo sapiens
gccggctcacataca

SEQ ID NO: 141763 - DNA, 15 bp, Homo sapiens
ggccggctcacatac

SEQ ID NO: 141764 - DNA, 15 bp, Homo sapiens
aggccggctcacata

SEQ ID NO: 141765 - DNA, 15 bp, Homo sapiens
caggccggctcacat

SEQ ID NO: 141766 - DNA, 15 bp, Homo sapiens
gcaggccggctcaca

SEQ ID NO: 141767 - DNA, 15 bp, Homo sapiens
cgcaggccggctcac

SEQ ID NO: 141768 - DNA, 15 bp, Homo sapiens
ccgcaggccggctca

SEQ ID NO: 141769 - DNA, 15 bp, Homo sapiens
accgcaggccggctc

SEQ ID NO: 141770 - DNA, 15 bp, Homo sapiens
gaccgcaggccggct

SEQ ID NO: 141771 - DNA, 15 bp, Homo sapiens
agaccgcaggccggc

SEQ ID NO: 141772 - DNA, 15 bp, Homo sapiens
cagaccgcaggccgg

SEQ ID NO: 141773 - DNA, 15 bp, Homo sapiens
tcagaccgcaggccg

SEQ ID NO: 141774 - DNA, 15 bp, Homo sapiens
ttcagaccgcaggcc

SEQ ID NO: 141775 - DNA, 15 bp, Homo sapiens
gttcagaccgcaggc

SEQ ID NO: 141776 - DNA, 15 bp, Homo sapiens
ggttcagaccgcagg

SEQ ID NO: 141777 - DNA, 15 bp, Homo sapiens
cggttcagaccgcag

SEQ ID NO: 141778 - DNA, 15 bp, Homo sapiens
gcggttcagaccgca

SEQ ID NO: 141779 - DNA, 15 bp, Homo sapiens
ggcggttcagaccgc

SEQ ID NO: 141780 - DNA, 15 bp, Homo sapiens
aggcggttcagaccg

SEQ ID NO: 141781 - DNA, 15 bp, Homo sapiens
gaggcggttcagacc

SEQ ID NO: 141782 - DNA, 15 bp, Homo sapiens
ggaggcggttcagac

SEQ ID NO: 141783 - DNA, 15 bp, Homo sapiens
aggaggcggttcaga

SEQ ID NO: 141784 - DNA, 15 bp, Homo sapiens
taggaggcggttcag

SEQ ID NO: 141785 - DNA, 15 bp, Homo sapiens
ataggaggcggttca

SEQ ID NO: 141786 - DNA, 15 bp, Homo sapiens
tataggaggcggttc

SEQ ID NO: 141787 - DNA, 15 bp, Homo sapiens
ttataggaggcggtt

SEQ ID NO: 141788 - DNA, 15 bp, Homo sapiens
cttataggaggcggt

SEQ ID NO: 141789 - DNA, 15 bp, Homo sapiens
ccttataggaggcgg

SEQ ID NO: 141790 - DNA, 15 bp, Homo sapiens
tccttataggaggcg

SEQ ID NO: 141791 - DNA, 15 bp, Homo sapiens
ctccttataggaggc

SEQ ID NO: 141792 - DNA, 15 bp, Homo sapiens
cctccttataggagg

SEQ ID NO: 141793 - DNA, 15 bp, Homo sapiens
ccctccttataggag

SEQ ID NO: 141794 - DNA, 15 bp, Homo sapiens
gccctccttatagga

SEQ ID NO: 141795 - DNA, 15 bp, Homo sapiens
agccctccttatagg

SEQ ID NO: 141796 - DNA, 15 bp, Homo sapiens
gagccctccttatag

SEQ ID NO: 141797 - DNA, 15 bp, Homo sapiens
ggagccctccttata

SEQ ID NO: 141798 - DNA, 15 bp, Homo sapiens
gggagccctccttat

SEQ ID NO: 141799 - DNA, 15 bp, Homo sapiens
agggagccctcctta

SEQ ID NO: 141800 - DNA, 15 bp, Homo sapiens
aagggagccctcctt

SEQ ID NO: 141801 - DNA, 15 bp, Homo sapiens
caagggagccctcct

SEQ ID NO: 141802 - DNA, 15 bp, Homo sapiens
ccaagggagccctcc

SEQ ID NO: 141803 - DNA, 15 bp, Homo sapiens
gccaagggagccctc

SEQ ID NO: 141804 - DNA, 15 bp, Homo sapiens
tgccaagggagccct

SEQ ID NO: 141805 - DNA, 15 bp, Homo sapiens
ctgccaagggagccc

SEQ ID NO: 141806 - DNA, 15 bp, Homo sapiens
gctgccaagggagcc

SEQ ID NO: 141807 - DNA, 15 bp, Homo sapiens
ggctgccaagggagc

SEQ ID NO: 141808 - DNA, 15 bp, Homo sapiens
tggctgccaagggag

SEQ ID NO: 141809 - DNA, 15 bp, Homo sapiens
ttggctgccaaggga

SEQ ID NO: 141810 - DNA, 15 bp, Homo sapiens
tttggctgccaaggg

SEQ ID NO: 141811 - DNA, 15 bp, Homo sapiens
ttttggctgccaagg

SEQ ID NO: 141812 - DNA, 15 bp, Homo sapiens
gttttggctgccaag

SEQ ID NO: 141813 - DNA, 15 bp, Homo sapiens
ggttttggctgccaa

SEQ ID NO: 141814 - DNA, 15 bp, Homo sapiens
tggttttggctgcca

SEQ ID NO: 141815 - DNA, 15 bp, Homo sapiens
ctggttttggctgcc

SEQ ID NO: 141816 - DNA, 15 bp, Homo sapiens
actggttttggctgc

SEQ ID NO: 141817 - DNA, 15 bp, Homo sapiens
aactggttttggctg

SEQ ID NO: 141818 - DNA, 15 bp, Homo sapiens
caactggttttggct

SEQ ID NO: 141819 - DNA, 15 bp, Homo sapiens
ccaactggttttggc

SEQ ID NO: 141820 - DNA, 15 bp, Homo sapiens
gccaactggttttgg

SEQ ID NO: 141821 - DNA, 15 bp, Homo sapiens
ggccaactggttttg

SEQ ID NO: 141822 - DNA, 15 bp, Homo sapiens
gggccaactggtttt

SEQ ID NO: 141823 - DNA, 15 bp, Homo sapiens
tgggccaactggttt

SEQ ID NO: 141824 - DNA, 15 bp, Homo sapiens
ttgggccaactggtt

SEQ ID NO: 141825 - DNA, 15 bp, Homo sapiens
tttgggccaactggt

SEQ ID NO: 141826 - DNA, 15 bp, Homo sapiens
atttgggccaactgg

SEQ ID NO: 141827 - DNA, 15 bp, Homo sapiens
catttgggccaactg

SEQ ID NO: 141828 - DNA, 15 bp, Homo sapiens
gcatttgggccaact

SEQ ID NO: 141829 - DNA, 15 bp, Homo sapiens
ggcatttgggccaac

SEQ ID NO: 141830 - DNA, 15 bp, Homo sapiens
aggcatttgggccaa

SEQ ID NO: 141831 - DNA, 15 bp, Homo sapiens
aaggcatttgggcca

SEQ ID NO: 141832 - DNA, 15 bp, Homo sapiens
caaggcatttgggcc

SEQ ID NO: 141833 - DNA, 15 bp, Homo sapiens
tcaaggcatttgggc

SEQ ID NO: 141834 - DNA, 15 bp, Homo sapiens
atcaaggcatttggg

SEQ ID NO: 141835 - DNA, 15 bp, Homo sapiens
tatcaaggcatttgg

SEQ ID NO: 141836 - DNA, 15 bp, Homo sapiens
ctatcaaggcatttg

SEQ ID NO: 141837 - DNA, 15 bp, Homo sapiens
cctatcaaggcattt

SEQ ID NO: 141838 - DNA, 15 bp, Homo sapiens
gcctatcaaggcatt

SEQ ID NO: 141839 - DNA, 15 bp, Homo sapiens
agcctatcaaggcat

SEQ ID NO: 141840 - DNA, 15 bp, Homo sapiens
aagcctatcaaggca

SEQ ID NO: 141841 - DNA, 15 bp, Homo sapiens
gaagcctatcaaggc

SEQ ID NO: 141842 - DNA, 15 bp, Homo sapiens
ggaagcctatcaagg

SEQ ID NO: 141843 - DNA, 15 bp, Homo sapiens
aggaagcctatcaag

SEQ ID NO: 141844 - DNA, 15 bp, Homo sapiens
caggaagcctatcaa

SEQ ID NO: 141845 - DNA, 15 bp, Homo sapiens
gcaggaagcctatca

SEQ ID NO: 141846 - DNA, 15 bp, Homo sapiens
agcaggaagcctatc

SEQ ID NO: 141847 - DNA, 15 bp, Homo sapiens
aagcaggaagcctat

SEQ ID NO: 141848 - DNA, 15 bp, Homo sapiens
gaagcaggaagccta

SEQ ID NO: 141849 - DNA, 15 bp, Homo sapiens
tgaagcaggaagcct

SEQ ID NO: 141850 - DNA, 15 bp, Homo sapiens
gtgaagcaggaagcc

SEQ ID NO: 141851 - DNA, 15 bp, Homo sapiens
agtgaagcaggaagc

SEQ ID NO: 141852 - DNA, 15 bp, Homo sapiens
aagtgaagcaggaag

SEQ ID NO: 141853 - DNA, 15 bp, Homo sapiens
caagtgaagcaggaa

SEQ ID NO: 141854 - DNA, 15 bp, Homo sapiens
acaagtgaagcagga

SEQ ID NO: 141855 - DNA, 15 bp, Homo sapiens
aacaagtgaagcagg

SEQ ID NO: 141856 - DNA, 15 bp, Homo sapiens
caacaagtgaagcag

SEQ ID NO: 141857 - DNA, 15 bp, Homo sapiens
gcaacaagtgaagca

SEQ ID NO: 141858 - DNA, 15 bp, Homo sapiens
ggcaacaagtgaagc

SEQ ID NO: 141859 - DNA, 15 bp, Homo sapiens
gggcaacaagtgaag

SEQ ID NO: 141860 - DNA, 15 bp, Homo sapiens
tgggcaacaagtgaa

SEQ ID NO: 141861 - DNA, 15 bp, Homo sapiens
atgggcaacaagtga

SEQ ID NO: 141862 - DNA, 15 bp, Homo sapiens
catgggcaacaagtg

SEQ ID NO: 141863 - DNA, 15 bp, Homo sapiens
acatgggcaacaagt

SEQ ID NO: 141864 - DNA, 15 bp, Homo sapiens
cacatgggcaacaag

SEQ ID NO: 141865 - DNA, 15 bp, Homo sapiens
ccacatgggcaacaa

SEQ ID NO: 141866 - DNA, 15 bp, Homo sapiens
accacatgggcaaca

SEQ ID NO: 141867 - DNA, 15 bp, Homo sapiens
gaccacatgggcaac

SEQ ID NO: 141868 - DNA, 15 bp, Homo sapiens
agaccacatgggcaa

SEQ ID NO: 141869 - DNA, 15 bp, Homo sapiens
cagaccacatgggca

SEQ ID NO: 141870 - DNA, 15 bp, Homo sapiens
tcagaccacatgggc

SEQ ID NO: 141871 - DNA, 15 bp, Homo sapiens
atcagaccacatggg

SEQ ID NO: 141872 - DNA, 15 bp, Homo sapiens
aatcagaccacatgg

SEQ ID NO: 141873 - DNA, 15 bp, Homo sapiens
aaatcagaccacatg

SEQ ID NO: 141874 - DNA, 15 bp, Homo sapiens
aaaatcagaccacat

SEQ ID NO: 141875 - DNA, 15 bp, Homo sapiens
taaaatcagaccaca

SEQ ID NO: 141876 - DNA, 15 bp, Homo sapiens
ctaaaatcagaccac

SEQ ID NO: 141877 - DNA, 15 bp, Homo sapiens
tctaaaatcagacca

SEQ ID NO: 141878 - DNA, 15 bp, Homo sapiens
atctaaaatcagacc

SEQ ID NO: 141879 - DNA, 15 bp, Homo sapiens
tatctaaaatcagac

SEQ ID NO: 141880 - DNA, 15 bp, Homo sapiens
ttatctaaaatcaga

SEQ ID NO: 141881 - DNA, 15 bp, Homo sapiens
tttatctaaaatcag

SEQ ID NO: 141882 - DNA, 15 bp, Homo sapiens
ttttatctaaaatca

SEQ ID NO: 141883 - DNA, 15 bp, Homo sapiens
cttttatctaaaatc

SEQ ID NO: 141884 - DNA, 15 bp, Homo sapiens
gcttttatctaaaat

SEQ ID NO: 141885 - DNA, 15 bp, Homo sapiens
tgcttttatctaaaa

SEQ ID NO: 141886 - DNA, 15 bp, Homo sapiens
atgcttttatctaaa

SEQ ID NO: 141887 - DNA, 15 bp, Homo sapiens
aatgcttttatctaa

SEQ ID NO: 141888 - DNA, 15 bp, Homo sapiens
caatgcttttatcta

SEQ ID NO: 141889 - DNA, 15 bp, Homo sapiens
gcaatgcttttatct

SEQ ID NO: 141890 - DNA, 15 bp, Homo sapiens
agcaatgcttttatc

SEQ ID NO: 141891 - DNA, 15 bp, Homo sapiens
aagcaatgcttttat

SEQ ID NO: 141892 - DNA, 15 bp, Homo sapiens
aaagcaatgctttta

SEQ ID NO: 141893 - DNA, 15 bp, Homo sapiens
aaaagcaatgctttt

SEQ ID NO: 141894 - DNA, 15 bp, Homo sapiens
caaaagcaatgcttt

SEQ ID NO: 141895 - DNA, 15 bp, Homo sapiens
ccaaaagcaatgctt

SEQ ID NO: 141896 - DNA, 15 bp, Homo sapiens
cccaaaagcaatgct

SEQ ID NO: 141897 - DNA, 15 bp, Homo sapiens
gcccaaaagcaatgc

SEQ ID NO: 141898 - DNA, 15 bp, Homo sapiens
ggcccaaaagcaatg

SEQ ID NO: 141899 - DNA, 15 bp, Homo sapiens
tggcccaaaagcaat

SEQ ID NO: 141900 - DNA, 15 bp, Homo sapiens
ctggcccaaaagcaa

SEQ ID NO: 141901 - DNA, 15 bp, Homo sapiens
tctggcccaaaagca

SEQ ID NO: 141902 - DNA, 15 bp, Homo sapiens
atctggcccaaaagc

SEQ ID NO: 141903 - DNA, 15 bp, Homo sapiens
tatctggcccaaaag

SEQ ID NO: 141904 - DNA, 15 bp, Homo sapiens
ttatctggcccaaaa

SEQ ID NO: 141905 - DNA, 15 bp, Homo sapiens
cttatctggcccaaa

SEQ ID NO: 141906 - DNA, 15 bp, Homo sapiens
gcttatctggcccaa

SEQ ID NO: 141907 - DNA, 15 bp, Homo sapiens
agcttatctggccca

SEQ ID NO: 141908 - DNA, 15 bp, Homo sapiens
aagcttatctggccc

SEQ ID NO: 141909 - DNA, 15 bp, Homo sapiens
aaagcttatctggcc

SEQ ID NO: 141910 - DNA, 15 bp, Homo sapiens
caaagcttatctggc

SEQ ID NO: 141911 - DNA, 15 bp, Homo sapiens
tcaaagcttatctgg

SEQ ID NO: 141912 - DNA, 15 bp, Homo sapiens
ctcaaagcttatctg

SEQ ID NO: 141913 - DNA, 15 bp, Homo sapiens
actcaaagcttatct

SEQ ID NO: 141914 - DNA, 15 bp, Homo sapiens
aactcaaagcttatc

SEQ ID NO: 141915 - DNA, 15 bp, Homo sapiens
gaactcaaagcttat

SEQ ID NO: 141916 - DNA, 15 bp, Homo sapiens
agaactcaaagctta

SEQ ID NO: 141917 - DNA, 15 bp, Homo sapiens
aagaactcaaagctt

SEQ ID NO: 141918 - DNA, 15 bp, Homo sapiens
aaagaactcaaagct

SEQ ID NO: 141919 - DNA, 15 bp, Homo sapiens
taaagaactcaaagc

SEQ ID NO: 141920 - DNA, 15 bp, Homo sapiens
ttaaagaactcaaag

SEQ ID NO: 141921 - DNA, 15 bp, Homo sapiens
attaaagaactcaaa

SEQ ID NO: 141922 - DNA, 15 bp, Homo sapiens
cattaaagaactcaa

SEQ ID NO: 141923 - DNA, 15 bp, Homo sapiens
tcattaaagaactca

SEQ ID NO: 141924 - DNA, 15 bp, Homo sapiens
ttcattaaagaactc

SEQ ID NO: 141925 - DNA, 15 bp, Homo sapiens
cttcattaaagaact

SEQ ID NO: 141926 - DNA, 15 bp, Homo sapiens
gcttcattaaagaac

SEQ ID NO: 141927 - DNA, 15 bp, Homo sapiens
tgcttcattaaagaa

SEQ ID NO: 141928 - DNA, 15 bp, Homo sapiens
gtgcttcattaaaga

SEQ ID NO: 141929 - DNA, 15 bp, Homo sapiens
agtgcttcattaaag

SEQ ID NO: 141930 - DNA, 15 bp, Homo sapiens
cagtgcttcattaaa

SEQ ID NO: 141931 - DNA, 15 bp, Homo sapiens
acagtgcttcattaa

SEQ ID NO: 141932 - DNA, 15 bp, Homo sapiens
cacagtgcttcatta

SEQ ID NO: 141933 - DNA, 15 bp, Homo sapiens
acacagtgcttcatt

SEQ ID NO: 141934 - DNA, 15 bp, Homo sapiens
cacacagtgcttcat

SEQ ID NO: 141935 - DNA, 15 bp, Homo sapiens
acacacagtgcttca

SEQ ID NO: 141936 - DNA, 15 bp, Homo sapiens
tacacacagtgcttc

SEQ ID NO: 141937 - DNA, 15 bp, Homo sapiens
atacacacagtgctt

SEQ ID NO: 141938 - DNA, 15 bp, Homo sapiens
aatacacacagtgct

SEQ ID NO: 141939 - DNA, 15 bp, Homo sapiens
caatacacacagtgc

SEQ ID NO: 141940 - DNA, 15 bp, Homo sapiens
ccaatacacacagtg

SEQ ID NO: 141941 - DNA, 15 bp, Homo sapiens
tccaatacacacagt

SEQ ID NO: 141942 - DNA, 15 bp, Homo sapiens
ctccaatacacacag

SEQ ID NO: 141943 - DNA, 15 bp, Homo sapiens
tctccaatacacaca

SEQ ID NO: 141944 - DNA, 15 bp, Homo sapiens
ctctccaatacacac

SEQ ID NO: 141945 - DNA, 15 bp, Homo sapiens
tctctccaatacaca

SEQ ID NO: 141946 - DNA, 15 bp, Homo sapiens
ctctctccaatacac

SEQ ID NO: 141947 - DNA, 15 bp, Homo sapiens
cctctctccaataca

SEQ ID NO: 141948 - DNA, 15 bp, Homo sapiens
gcctctctccaatac

SEQ ID NO: 141949 - DNA, 15 bp, Homo sapiens
tgcctctctccaata

SEQ ID NO: 141950 - DNA, 15 bp, Homo sapiens
gtgcctctctccaat

SEQ ID NO: 141951 - DNA, 15 bp, Homo sapiens
tgtgcctctctccaa

SEQ ID NO: 141952 - DNA, 15 bp, Homo sapiens
ctgtgcctctctcca

SEQ ID NO: 141953 - DNA, 15 bp, Homo sapiens
tctgtgcctctctcc

SEQ ID NO: 141954 - DNA, 15 bp, Homo sapiens
ctctgtgcctctctc

SEQ ID NO: 141955 - DNA, 15 bp, Homo sapiens
gctctgtgcctctct

SEQ ID NO: 141956 - DNA, 15 bp, Homo sapiens
tgctctgtgcctctc

SEQ ID NO: 141957 - DNA, 15 bp, Homo sapiens
gtgctctgtgcctct

SEQ ID NO: 141958 - DNA, 15 bp, Homo sapiens
ggtgctctgtgcctc

SEQ ID NO: 141959 - DNA, 15 bp, Homo sapiens
gggtgctctgtgcct

SEQ ID NO: 141960 - DNA, 15 bp, Homo sapiens
tgggtgctctgtgcc

SEQ ID NO: 141961 - DNA, 15 bp, Homo sapiens
ctgggtgctctgtgc

SEQ ID NO: 141962 - DNA, 15 bp, Homo sapiens
tctgggtgctctgtg

SEQ ID NO: 141963 - DNA, 15 bp, Homo sapiens
ctctgggtgctctgt

SEQ ID NO: 141964 - DNA, 15 bp, Homo sapiens
gctctgggtgctctg

SEQ ID NO: 141965 - DNA, 15 bp, Homo sapiens
agctctgggtgctct

SEQ ID NO: 141966 - DNA, 15 bp, Homo sapiens
cagctctgggtgctc

SEQ ID NO: 141967 - DNA, 15 bp, Homo sapiens
tcagctctgggtgct

SEQ ID NO: 141968 - DNA, 15 bp, Homo sapiens
ttcagctctgggtgc

SEQ ID NO: 141969 - DNA, 15 bp, Homo sapiens
cttcagctctgggtg

SEQ ID NO: 141970 - DNA, 15 bp, Homo sapiens
gcttcagctctgggt

SEQ ID NO: 141971 - DNA, 15 bp, Homo sapiens
agcttcagctctggg

SEQ ID NO: 141972 - DNA, 15 bp, Homo sapiens
cagcttcagctctgg

SEQ ID NO: 141973 - DNA, 15 bp, Homo sapiens
ccagcttcagctctg

SEQ ID NO: 141974 - DNA, 15 bp, Homo sapiens
accagcttcagctct

SEQ ID NO: 141975 - DNA, 15 bp, Homo sapiens
gaccagcttcagctc

SEQ ID NO: 141976 - DNA, 15 bp, Homo sapiens
tgaccagcttcagct

SEQ ID NO: 141977 - DNA, 15 bp, Homo sapiens
ctgaccagcttcagc

SEQ ID NO: 141978 - DNA, 15 bp, Homo sapiens
actgaccagcttcag

SEQ ID NO: 141979 - DNA, 15 bp, Homo sapiens
gactgaccagcttca

SEQ ID NO: 141980 - DNA, 15 bp, Homo sapiens
ggactgaccagcttc

SEQ ID NO: 141981 - DNA, 15 bp, Homo sapiens
aggactgaccagctt

SEQ ID NO: 141982 - DNA, 15 bp, Homo sapiens
caggactgaccagct

SEQ ID NO: 141983 - DNA, 15 bp, Homo sapiens
ccaggactgaccagc

SEQ ID NO: 141984 - DNA, 15 bp, Homo sapiens
accaggactgaccag

SEQ ID NO: 141985 - DNA, 15 bp, Homo sapiens
gaccaggactgacca

SEQ ID NO: 141986 - DNA, 15 bp, Homo sapiens
cgaccaggactgacc

SEQ ID NO: 141987 - DNA, 15 bp, Homo sapiens
ccgaccaggactgac

SEQ ID NO: 141988 - DNA, 15 bp, Homo sapiens
gccgaccaggactga

SEQ ID NO: 141989 - DNA, 15 bp, Homo sapiens
ggccgaccaggactg

SEQ ID NO: 141990 - DNA, 15 bp, Homo sapiens
tggccgaccaggact

SEQ ID NO: 141991 - DNA, 15 bp, Homo sapiens
gtggccgaccaggac

SEQ ID NO: 141992 - DNA, 15 bp, Homo sapiens
tgtggccgaccagga

SEQ ID NO: 141993 - DNA, 15 bp, Homo sapiens
ctgtggccgaccagg

SEQ ID NO: 141994 - DNA, 15 bp, Homo sapiens
actgtggccgaccag

SEQ ID NO: 141995 - DNA, 15 bp, Homo sapiens
aactgtggccgacca

SEQ ID NO: 141996 - DNA, 15 bp, Homo sapiens
aaactgtggccgacc

SEQ ID NO: 141997 - DNA, 15 bp, Homo sapiens
taaactgtggccgac

SEQ ID NO: 141998 - DNA, 15 bp, Homo sapiens
ataaactgtggccga

SEQ ID NO: 141999 - DNA, 15 bp, Homo sapiens
cataaactgtggccg

SEQ ID NO: 142000 - DNA, 15 bp, Homo sapiens
ccataaactgtggcc

SEQ ID NO: 142001 - DNA, 15 bp, Homo sapiens
cccataaactgtggc

SEQ ID NO: 142002 - DNA, 15 bp, Homo sapiens
ccccataaactgtgg

SEQ ID NO: 142003 - DNA, 15 bp, Homo sapiens
gccccataaactgtg

SEQ ID NO: 142004 - DNA, 15 bp, Homo sapiens
agccccataaactgt

SEQ ID NO: 142005 - DNA, 15 bp, Homo sapiens
gagccccataaactg

SEQ ID NO: 142006 - DNA, 15 bp, Homo sapiens
ggagccccataaact

SEQ ID NO: 142007 - DNA, 15 bp, Homo sapiens
aggagccccataaac

SEQ ID NO: 142008 - DNA, 15 bp, Homo sapiens
caggagccccataaa

SEQ ID NO: 142009 - DNA, 15 bp, Homo sapiens
ccaggagccccataa

SEQ ID NO: 142010 - DNA, 15 bp, Homo sapiens
cccaggagccccata

SEQ ID NO: 142011 - DNA, 15 bp, Homo sapiens
tcccaggagccccat

SEQ ID NO: 142012 - DNA, 15 bp, Homo sapiens
ctcccaggagcccca

SEQ ID NO: 142013 - DNA, 15 bp, Homo sapiens
cctcccaggagcccc

SEQ ID NO: 142014 - DNA, 15 bp, Homo sapiens
acctcccaggagccc

SEQ ID NO: 142015 - DNA, 15 bp, Homo sapiens
aacctcccaggagcc

SEQ ID NO: 142016 - DNA, 15 bp, Homo sapiens
aaacctcccaggagc

SEQ ID NO: 142017 - DNA, 15 bp, Homo sapiens
aaaacctcccaggag

SEQ ID NO: 142018 - DNA, 15 bp, Homo sapiens
taaaacctcccagga

SEQ ID NO: 142019 - DNA, 15 bp, Homo sapiens
ttaaaacctcccagg

SEQ ID NO: 142020 - DNA, 15 bp, Homo sapiens
tttaaaacctcccag

SEQ ID NO: 142021 - DNA, 15 bp, Homo sapiens
gtttaaaacctccca

SEQ ID NO: 142022 - DNA, 15 bp, Homo sapiens
agtttaaaacctccc

SEQ ID NO: 142023 - DNA, 15 bp, Homo sapiens
gagtttaaaacctcc

SEQ ID NO: 142024 - DNA, 15 bp, Homo sapiens
agagtttaaaacctc

SEQ ID NO: 142025 - DNA, 15 bp, Homo sapiens
cagagtttaaaacct

SEQ ID NO: 142026 - DNA, 15 bp, Homo sapiens
acagagtttaaaacc

SEQ ID NO: 142027 - DNA, 15 bp, Homo sapiens
cacagagtttaaaac

SEQ ID NO: 142028 - DNA, 15 bp, Homo sapiens
gcacagagtttaaaa

SEQ ID NO: 142029 - DNA, 15 bp, Homo sapiens
agcacagagtttaaa

SEQ ID NO: 142030 - DNA, 15 bp, Homo sapiens
cagcacagagtttaa

SEQ ID NO: 142031 - DNA, 15 bp, Homo sapiens
gcagcacagagttta

SEQ ID NO: 142032 - DNA, 15 bp, Homo sapiens
tgcagcacagagttt

SEQ ID NO: 142033 - DNA, 15 bp, Homo sapiens
ttgcagcacagagtt

SEQ ID NO: 142034 - DNA, 15 bp, Homo sapiens
gttgcagcacagagt

SEQ ID NO: 142035 - DNA, 15 bp, Homo sapiens
agttgcagcacagag

SEQ ID NO: 142036 - DNA, 15 bp, Homo sapiens
cagttgcagcacaga

SEQ ID NO: 142037 - DNA, 15 bp, Homo sapiens
ccagttgcagcacag

SEQ ID NO: 142038 - DNA, 15 bp, Homo sapiens
cccagttgcagcaca

SEQ ID NO: 142039 - DNA, 15 bp, Homo sapiens
ccccagttgcagcac

SEQ ID NO: 142040 - DNA, 15 bp, Homo sapiens
tccccagttgcagca

SEQ ID NO: 142041 - DNA, 15 bp, Homo sapiens
ttccccagttgcagc

SEQ ID NO: 142042 - DNA, 15 bp, Homo sapiens
cttccccagttgcag

SEQ ID NO: 142043 - DNA, 15 bp, Homo sapiens
ccttccccagttgca

SEQ ID NO: 142044 - DNA, 15 bp, Homo sapiens
accttccccagttgc

SEQ ID NO: 142045 - DNA, 15 bp, Homo sapiens
aaccttccccagttg

SEQ ID NO: 142046 - DNA, 15 bp, Homo sapiens
caaccttccccagtt

SEQ ID NO: 142047 - DNA, 15 bp, Homo sapiens
acaaccttccccagt

SEQ ID NO: 142048 - DNA, 15 bp, Homo sapiens
cacaaccttccccag

SEQ ID NO: 142049 - DNA, 15 bp, Homo sapiens
ccacaaccttcccca

SEQ ID NO: 142050 - DNA, 15 bp, Homo sapiens
cccacaaccttcccc

SEQ ID NO: 142051 - DNA, 15 bp, Homo sapiens
ccccacaaccttccc

SEQ ID NO: 142052 - DNA, 15 bp, Homo sapiens
cccccacaaccttcc

SEQ ID NO: 142053 - DNA, 15 bp, Homo sapiens
tcccccacaaccttc

SEQ ID NO: 142054 - DNA, 15 bp, Homo sapiens
ttcccccacaacctt

SEQ ID NO: 142055 - DNA, 15 bp, Homo sapiens
cttcccccacaacct

SEQ ID NO: 142056 - DNA, 15 bp, Homo sapiens
ccttcccccacaacc

SEQ ID NO: 142057 - DNA, 15 bp, Homo sapiens
accttcccccacaac

SEQ ID NO: 142058 - DNA, 15 bp, Homo sapiens
aaccttcccccacaa

SEQ ID NO: 142059 - DNA, 15 bp, Homo sapiens
caaccttcccccaca

SEQ ID NO: 142060 - DNA, 15 bp, Homo sapiens
ccaaccttcccccac

SEQ ID NO: 142061 - DNA, 15 bp, Homo sapiens
cccaaccttccccca

SEQ ID NO: 142062 - DNA, 15 bp, Homo sapiens
acccaaccttccccc

SEQ ID NO: 142063 - DNA, 15 bp, Homo sapiens
gacccaaccttcccc

SEQ ID NO: 142064 - DNA, 15 bp, Homo sapiens
ggacccaaccttccc

SEQ ID NO: 142065 - DNA, 15 bp, Homo sapiens
tggacccaaccttcc

SEQ ID NO: 142066 - DNA, 15 bp, Homo sapiens
ctggacccaaccttc

SEQ ID NO: 142067 - DNA, 15 bp, Homo sapiens
cctggacccaacctt

SEQ ID NO: 142068 - DNA, 15 bp, Homo sapiens
ccctggacccaacct

SEQ ID NO: 142069 - DNA, 15 bp, Homo sapiens
tccctggacccaacc

SEQ ID NO: 142070 - DNA, 15 bp, Homo sapiens
ctccctggacccaac

SEQ ID NO: 142071 - DNA, 15 bp, Homo sapiens
gctccctggacccaa

SEQ ID NO: 142072 - DNA, 15 bp, Homo sapiens
agctccctggaccca

SEQ ID NO: 142073 - DNA, 15 bp, Homo sapiens
tagctccctggaccc

SEQ ID NO: 142074 - DNA, 15 bp, Homo sapiens
gtagctccctggacc

SEQ ID NO: 142075 - DNA, 15 bp, Homo sapiens
agtagctccctggac

SEQ ID NO: 142076 - DNA, 15 bp, Homo sapiens
tagtagctccctgga

SEQ ID NO: 142077 - DNA, 15 bp, Homo sapiens
atagtagctccctgg

SEQ ID NO: 142078 - DNA, 15 bp, Homo sapiens
aatagtagctccctg

SEQ ID NO: 142079 - DNA, 15 bp, Homo sapiens
aaatagtagctccct

SEQ ID NO: 142080 - DNA, 15 bp, Homo sapiens
taaatagtagctccc

SEQ ID NO: 142081 - DNA, 15 bp, Homo sapiens
ataaatagtagctcc

SEQ ID NO: 142082 - DNA, 15 bp, Homo sapiens
aataaatagtagctc

SEQ ID NO: 142083 - DNA, 15 bp, Homo sapiens
caataaatagtagct

SEQ ID NO: 142084 - DNA, 15 bp, Homo sapiens
tcaataaatagtagc

SEQ ID NO: 142085 - DNA, 15 bp, Homo sapiens
ctcaataaatagtag

SEQ ID NO: 142086 - DNA, 15 bp, Homo sapiens
cctcaataaatagta

SEQ ID NO: 142087 - DNA, 15 bp, Homo sapiens
ccctcaataaatagt

SEQ ID NO: 142088 - DNA, 15 bp, Homo sapiens
gccctcaataaatag

SEQ ID NO: 142089 - DNA, 15 bp, Homo sapiens
agccctcaataaata

SEQ ID NO: 142090 - DNA, 15 bp, Homo sapiens
aagccctcaataaat

SEQ ID NO: 142091 - DNA, 15 bp, Homo sapiens
taagccctcaataaa

SEQ ID NO: 142092 - DNA, 15 bp, Homo sapiens
gtaagccctcaataa

SEQ ID NO: 142093 - DNA, 15 bp, Homo sapiens
tgtaagccctcaata

SEQ ID NO: 142094 - DNA, 15 bp, Homo sapiens
ttgtaagccctcaat

SEQ ID NO: 142095 - DNA, 15 bp, Homo sapiens
attgtaagccctcaa

SEQ ID NO: 142096 - DNA, 15 bp, Homo sapiens
tattgtaagccctca

SEQ ID NO: 142097 - DNA, 15 bp, Homo sapiens
atattgtaagccctc

SEQ ID NO: 142098 - DNA, 15 bp, Homo sapiens
tatattgtaagccct

SEQ ID NO: 142099 - DNA, 15 bp, Homo sapiens
atatattgtaagccc

SEQ ID NO: 142100 - DNA, 15 bp, Homo sapiens
gatatattgtaagcc

SEQ ID NO: 142101 - DNA, 15 bp, Homo sapiens
tgatatattgtaagc

SEQ ID NO: 142102 - DNA, 15 bp, Homo sapiens
gtgatatattgtaag

SEQ ID NO: 142103 - DNA, 15 bp, Homo sapiens
tgtgatatattgtaa

SEQ ID NO: 142104 - DNA, 15 bp, Homo sapiens
atgtgatatattgta

SEQ ID NO: 142105 - DNA, 15 bp, Homo sapiens
aatgtgatatattgt

SEQ ID NO: 142106 - DNA, 15 bp, Homo sapiens
gaatgtgatatattg

SEQ ID NO: 142107 - DNA, 15 bp, Homo sapiens
agaatgtgatatatt

SEQ ID NO: 142108 - DNA, 15 bp, Homo sapiens
cagaatgtgatatat

SEQ ID NO: 142109 - DNA, 15 bp, Homo sapiens
tcagaatgtgatata

SEQ ID NO: 142110 - DNA, 15 bp, Homo sapiens
ctcagaatgtgatat

SEQ ID NO: 142111 - DNA, 15 bp, Homo sapiens
gctcagaatgtgata

SEQ ID NO: 142112 - DNA, 15 bp, Homo sapiens
agctcagaatgtgat

SEQ ID NO: 142113 - DNA, 15 bp, Homo sapiens
cagctcagaatgtga

SEQ ID NO: 142114 - DNA, 15 bp, Homo sapiens
ccagctcagaatgtg

SEQ ID NO: 142115 - DNA, 15 bp, Homo sapiens
gccagctcagaatgt

SEQ ID NO: 142116 - DNA, 15 bp, Homo sapiens
ggccagctcagaatg

SEQ ID NO: 142117 - DNA, 15 bp, Homo sapiens
tggccagctcagaat

SEQ ID NO: 142118 - DNA, 15 bp, Homo sapiens
gtggccagctcagaa

SEQ ID NO: 142119 - DNA, 15 bp, Homo sapiens
agtggccagctcaga

SEQ ID NO: 142120 - DNA, 15 bp, Homo sapiens
aagtggccagctcag

SEQ ID NO: 142121 - DNA, 15 bp, Homo sapiens
aaagtggccagctca

SEQ ID NO: 142122 - DNA, 15 bp, Homo sapiens
taaagtggccagctc

SEQ ID NO: 142123 - DNA, 15 bp, Homo sapiens
gtaaagtggccagct

SEQ ID NO: 142124 - DNA, 15 bp, Homo sapiens
tgtaaagtggccagc

SEQ ID NO: 142125 - DNA, 15 bp, Homo sapiens
atgtaaagtggccag

SEQ ID NO: 142126 - DNA, 15 bp, Homo sapiens
gatgtaaagtggcca

SEQ ID NO: 142127 - DNA, 15 bp, Homo sapiens
agatgtaaagtggcc

SEQ ID NO: 142128 - DNA, 15 bp, Homo sapiens
aagatgtaaagtggc

SEQ ID NO: 142129 - DNA, 15 bp, Homo sapiens
taagatgtaaagtgg

SEQ ID NO: 142130 - DNA, 15 bp, Homo sapiens
ctaagatgtaaagtg

SEQ ID NO: 142131 - DNA, 15 bp, Homo sapiens
gctaagatgtaaagt

SEQ ID NO: 142132 - DNA, 15 bp, Homo sapiens
agctaagatgtaaag

SEQ ID NO: 142133 - DNA, 15 bp, Homo sapiens
cagctaagatgtaaa

SEQ ID NO: 142134 - DNA, 15 bp, Homo sapiens
ccagctaagatgtaa

SEQ ID NO: 142135 - DNA, 15 bp, Homo sapiens
accagctaagatgta

SEQ ID NO: 142136 - DNA, 15 bp, Homo sapiens
taccagctaagatgt

SEQ ID NO: 142137 - DNA, 15 bp, Homo sapiens
ttaccagctaagatg

SEQ ID NO: 142138 - DNA, 15 bp, Homo sapiens
tttaccagctaagat

SEQ ID NO: 142139 - DNA, 15 bp, Homo sapiens
ttttaccagctaaga

SEQ ID NO: 142140 - DNA, 15 bp, Homo sapiens
attttaccagctaag

SEQ ID NO: 142141 - DNA, 15 bp, Homo sapiens
aattttaccagctaa

SEQ ID NO: 142142 - DNA, 15 bp, Homo sapiens
gaattttaccagcta

SEQ ID NO: 142143 - DNA, 15 bp, Homo sapiens
agaattttaccagct

SEQ ID NO: 142144 - DNA, 15 bp, Homo sapiens
gagaattttaccagc

SEQ ID NO: 142145 - DNA, 15 bp, Homo sapiens
tgagaattttaccag

SEQ ID NO: 142146 - DNA, 15 bp, Homo sapiens
gtgagaattttacca

SEQ ID NO: 142147 - DNA, 15 bp, Homo sapiens
tgtgagaattttacc

SEQ ID NO: 142148 - DNA, 15 bp, Homo sapiens
ctgtgagaattttac

SEQ ID NO: 142149 - DNA, 15 bp, Homo sapiens
actgtgagaatttta

SEQ ID NO: 142150 - DNA, 15 bp, Homo sapiens
cactgtgagaatttt

SEQ ID NO: 142151 - DNA, 15 bp, Homo sapiens
tcactgtgagaattt

SEQ ID NO: 142152 - DNA, 15 bp, Homo sapiens
atcactgtgagaatt

SEQ ID NO: 142153 - DNA, 15 bp, Homo sapiens
gatcactgtgagaat

SEQ ID NO: 142154 - DNA, 15 bp, Homo sapiens
ggatcactgtgagaa

SEQ ID NO: 142155 - DNA, 15 bp, Homo sapiens
aggatcactgtgaga

SEQ ID NO: 142156 - DNA, 15 bp, Homo sapiens
caggatcactgtgag

SEQ ID NO: 142157 - DNA, 15 bp, Homo sapiens
tcaggatcactgtga

SEQ ID NO: 142158 - DNA, 15 bp, Homo sapiens
ttcaggatcactgtg

SEQ ID NO: 142159 - DNA, 15 bp, Homo sapiens
cttcaggatcactgt

SEQ ID NO: 142160 - DNA, 15 bp, Homo sapiens
ccttcaggatcactg

SEQ ID NO: 142161 - DNA, 15 bp, Homo sapiens
tccttcaggatcact

SEQ ID NO: 142162 - DNA, 15 bp, Homo sapiens
gtccttcaggatcac

SEQ ID NO: 142163 - DNA, 15 bp, Homo sapiens
tgtccttcaggatca

SEQ ID NO: 142164 - DNA, 15 bp, Homo sapiens
ttgtccttcaggatc

SEQ ID NO: 142165 - DNA, 15 bp, Homo sapiens
cttgtccttcaggat

SEQ ID NO: 142166 - DNA, 15 bp, Homo sapiens
acttgtccttcagga

SEQ ID NO: 142167 - DNA, 15 bp, Homo sapiens
cacttgtccttcagg

SEQ ID NO: 142168 - DNA, 15 bp, Homo sapiens
acacttgtccttcag

SEQ ID NO: 142169 - DNA, 15 bp, Homo sapiens
cacacttgtccttca

SEQ ID NO: 142170 - DNA, 15 bp, Homo sapiens
ccacacttgtccttc

SEQ ID NO: 142171 - DNA, 15 bp, Homo sapiens
accacacttgtcctt

SEQ ID NO: 142172 - DNA, 15 bp, Homo sapiens
aaccacacttgtcct

SEQ ID NO: 142173 - DNA, 15 bp, Homo sapiens
gaaccacacttgtcc

SEQ ID NO: 142174 - DNA, 15 bp, Homo sapiens
tgaaccacacttgtc

SEQ ID NO: 142175 - DNA, 15 bp, Homo sapiens
ctgaaccacacttgt

SEQ ID NO: 142176 - DNA, 15 bp, Homo sapiens
cctgaaccacacttg

SEQ ID NO: 142177 - DNA, 15 bp, Homo sapiens
tcctgaaccacactt

SEQ ID NO: 142178 - DNA, 15 bp, Homo sapiens
ctcctgaaccacact

SEQ ID NO: 142179 - DNA, 15 bp, Homo sapiens
gctcctgaaccacac

SEQ ID NO: 142180 - DNA, 15 bp, Homo sapiens
agctcctgaaccaca

SEQ ID NO: 142181 - DNA, 15 bp, Homo sapiens
cagctcctgaaccac

SEQ ID NO: 142182 - DNA, 15 bp, Homo sapiens
tcagctcctgaacca

SEQ ID NO: 142183 - DNA, 15 bp, Homo sapiens
ctcagctcctgaacc

SEQ ID NO: 142184 - DNA, 15 bp, Homo sapiens
tctcagctcctgaac

SEQ ID NO: 142185 - DNA, 15 bp, Homo sapiens
gtctcagctcctgaa

SEQ ID NO: 142186 - DNA, 15 bp, Homo sapiens
agtctcagctcctga

SEQ ID NO: 142187 - DNA, 15 bp, Homo sapiens
gagtctcagctcctg

SEQ ID NO: 142188 - DNA, 15 bp, Homo sapiens
tgagtctcagctcct

SEQ ID NO: 142189 - DNA, 15 bp, Homo sapiens
atgagtctcagctcc

SEQ ID NO: 142190 - DNA, 15 bp, Homo sapiens
tatgagtctcagctc

SEQ ID NO: 142191 - DNA, 15 bp, Homo sapiens
ctatgagtctcagct

SEQ ID NO: 142192 - DNA, 15 bp, Homo sapiens
tctatgagtctcagc

SEQ ID NO: 142193 - DNA, 15 bp, Homo sapiens
ctctatgagtctcag

SEQ ID NO: 142194 - DNA, 15 bp, Homo sapiens
cctctatgagtctca

SEQ ID NO: 142195 - DNA, 15 bp, Homo sapiens
acctctatgagtctc

SEQ ID NO: 142196 - DNA, 15 bp, Homo sapiens
aacctctatgagtct

SEQ ID NO: 142197 - DNA, 15 bp, Homo sapiens
taacctctatgagtc

SEQ ID NO: 142198 - DNA, 15 bp, Homo sapiens
ttaacctctatgagt

SEQ ID NO: 142199 - DNA, 15 bp, Homo sapiens
cttaacctctatgag

SEQ ID NO: 142200 - DNA, 15 bp, Homo sapiens
tcttaacctctatga

SEQ ID NO: 142201 - DNA, 15 bp, Homo sapiens
ttcttaacctctatg

SEQ ID NO: 142202 - DNA, 15 bp, Homo sapiens
tttcttaacctctat

SEQ ID NO: 142203 - DNA, 15 bp, Homo sapiens
atttcttaacctcta

SEQ ID NO: 142204 - DNA, 15 bp, Homo sapiens
gatttcttaacctct

SEQ ID NO: 142205 - DNA, 15 bp, Homo sapiens
tgatttcttaacctc

SEQ ID NO: 142206 - DNA, 15 bp, Homo sapiens
gtgatttcttaacct

SEQ ID NO: 142207 - DNA, 15 bp, Homo sapiens
ggtgatttcttaacc

SEQ ID NO: 142208 - DNA, 15 bp, Homo sapiens
aggtgatttcttaac

SEQ ID NO: 142209 - DNA, 15 bp, Homo sapiens
caggtgatttcttaa

SEQ ID NO: 142210 - DNA, 15 bp, Homo sapiens
ccaggtgatttctta

SEQ ID NO: 142211 - DNA, 15 bp, Homo sapiens
accaggtgatttctt

SEQ ID NO: 142212 - DNA, 15 bp, Homo sapiens
caccaggtgatttct

SEQ ID NO: 142213 - DNA, 15 bp, Homo sapiens
ccaccaggtgatttc

SEQ ID NO: 142214 - DNA, 15 bp, Homo sapiens
accaccaggtgattt

SEQ ID NO: 142215 - DNA, 15 bp, Homo sapiens
caccaccaggtgatt

SEQ ID NO: 142216 - DNA, 15 bp, Homo sapiens
ccaccaccaggtgat

SEQ ID NO: 142217 - DNA, 15 bp, Homo sapiens
cccaccaccaggtga

SEQ ID NO: 142218 - DNA, 15 bp, Homo sapiens
ccccaccaccaggtg

SEQ ID NO: 142219 - DNA, 15 bp, Homo sapiens
accccaccaccaggt

SEQ ID NO: 142220 - DNA, 15 bp, Homo sapiens
aaccccaccaccagg

SEQ ID NO: 142221 - DNA, 15 bp, Homo sapiens
aaaccccaccaccag

SEQ ID NO: 142222 - DNA, 15 bp, Homo sapiens
aaaaccccaccacca

SEQ ID NO: 142223 - DNA, 15 bp, Homo sapiens
caaaaccccaccacc

SEQ ID NO: 142224 - DNA, 15 bp, Homo sapiens
ccaaaaccccaccac

SEQ ID NO: 142225 - DNA, 15 bp, Homo sapiens
cccaaaaccccacca

SEQ ID NO: 142226 - DNA, 15 bp, Homo sapiens
ccccaaaaccccacc

SEQ ID NO: 142227 - DNA, 15 bp, Homo sapiens
tccccaaaaccccac

SEQ ID NO: 142228 - DNA, 15 bp, Homo sapiens
ctccccaaaacccca

SEQ ID NO: 142229 - DNA, 15 bp, Homo sapiens
cctccccaaaacccc

SEQ ID NO: 142230 - DNA, 15 bp, Homo sapiens
ccctccccaaaaccc

SEQ ID NO: 142231 - DNA, 15 bp, Homo sapiens
gccctccccaaaacc

SEQ ID NO: 142232 - DNA, 15 bp, Homo sapiens
ggccctccccaaaac

SEQ ID NO: 142233 - DNA, 15 bp, Homo sapiens
tggccctccccaaaa

SEQ ID NO: 142234 - DNA, 15 bp, Homo sapiens
gtggccctccccaaa

SEQ ID NO: 142235 - DNA, 15 bp, Homo sapiens
tgtggccctccccaa

SEQ ID NO: 142236 - DNA, 15 bp, Homo sapiens
gtgtggccctcccca

SEQ ID NO: 142237 - DNA, 15 bp, Homo sapiens
tgtgtggccctcccc

SEQ ID NO: 142238 - DNA, 15 bp, Homo sapiens
ctgtgtggccctccc

SEQ ID NO: 142239 - DNA, 15 bp, Homo sapiens
cctgtgtggccctcc

SEQ ID NO: 142240 - DNA, 15 bp, Homo sapiens
gcctgtgtggccctc

SEQ ID NO: 142241 - DNA, 15 bp, Homo sapiens
tgcctgtgtggccct

SEQ ID NO: 142242 - DNA, 15 bp, Homo sapiens
atgcctgtgtggccc

SEQ ID NO: 142243 - DNA, 15 bp, Homo sapiens
gatgcctgtgtggcc

SEQ ID NO: 142244 - DNA, 15 bp, Homo sapiens
ggatgcctgtgtggc

SEQ ID NO: 142245 - DNA, 15 bp, Homo sapiens
gggatgcctgtgtgg

SEQ ID NO: 142246 - DNA, 15 bp, Homo sapiens
tgggatgcctgtgtg

SEQ ID NO: 142247 - DNA, 15 bp, Homo sapiens
ttgggatgcctgtgt

SEQ ID NO: 142248 - DNA, 15 bp, Homo sapiens
cttgggatgcctgtg

SEQ ID NO: 142249 - DNA, 15 bp, Homo sapiens
tcttgggatgcctgt

SEQ ID NO: 142250 - DNA, 15 bp, Homo sapiens
ctcttgggatgcctg

SEQ ID NO: 142251 - DNA, 15 bp, Homo sapiens
cctcttgggatgcct

SEQ ID NO: 142252 - DNA, 15 bp, Homo sapiens
acctcttgggatgcc

SEQ ID NO: 142253 - DNA, 15 bp, Homo sapiens
tacctcttgggatgc

SEQ ID NO: 142254 - DNA, 15 bp, Homo sapiens
ctacctcttgggatg

SEQ ID NO: 142255 - DNA, 15 bp, Homo sapiens
tctacctcttgggat

SEQ ID NO: 142256 - DNA, 15 bp, Homo sapiens
ttctacctcttggga

SEQ ID NO: 142257 - DNA, 15 bp, Homo sapiens
cttctacctcttggg

SEQ ID NO: 142258 - DNA, 15 bp, Homo sapiens
tcttctacctcttgg

SEQ ID NO: 142259 - DNA, 15 bp, Homo sapiens
gtcttctacctcttg

SEQ ID NO: 142260 - DNA, 15 bp, Homo sapiens
tgtcttctacctctt

SEQ ID NO: 142261 - DNA, 15 bp, Homo sapiens
ttgtcttctacctct

SEQ ID NO: 142262 - DNA, 15 bp, Homo sapiens
cttgtcttctacctc

SEQ ID NO: 142263 - DNA, 15 bp, Homo sapiens
gcttgtcttctacct

SEQ ID NO: 142264 - DNA, 15 bp, Homo sapiens
agcttgtcttctacc

SEQ ID NO: 142265 - DNA, 15 bp, Homo sapiens
gagcttgtcttctac

SEQ ID NO: 142266 - DNA, 15 bp, Homo sapiens
tgagcttgtcttcta

SEQ ID NO: 142267 - DNA, 15 bp, Homo sapiens
ctgagcttgtcttct

SEQ ID NO: 142268 - DNA, 15 bp, Homo sapiens
tctgagcttgtcttc

SEQ ID NO: 142269 - DNA, 15 bp, Homo sapiens
gtctgagcttgtctt

SEQ ID NO: 142270 - DNA, 15 bp, Homo sapiens
tgtctgagcttgtct

SEQ ID NO: 142271 - DNA, 15 bp, Homo sapiens
atgtctgagcttgtc

SEQ ID NO: 142272 - DNA, 15 bp, Homo sapiens
gatgtctgagcttgt

SEQ ID NO: 142273 - DNA, 15 bp, Homo sapiens
ggatgtctgagcttg

SEQ ID NO: 142274 - DNA, 15 bp, Homo sapiens
tggatgtctgagctt

SEQ ID NO: 142275 - DNA, 15 bp, Homo sapiens
ctggatgtctgagct

SEQ ID NO: 142276 - DNA, 15 bp, Homo sapiens
cctggatgtctgagc

SEQ ID NO: 142277 - DNA, 15 bp, Homo sapiens
tcctggatgtctgag

SEQ ID NO: 142278 - DNA, 15 bp, Homo sapiens
ttcctggatgtctga

SEQ ID NO: 142279 - DNA, 15 bp, Homo sapiens
gttcctggatgtctg

SEQ ID NO: 142280 - DNA, 15 bp, Homo sapiens
agttcctggatgtct

SEQ ID NO: 142281 - DNA, 15 bp, Homo sapiens
aagttcctggatgtc

SEQ ID NO: 142282 - DNA, 15 bp, Homo sapiens
taagttcctggatgt

SEQ ID NO: 142283 - DNA, 15 bp, Homo sapiens
gtaagttcctggatg

SEQ ID NO: 142284 - DNA, 15 bp, Homo sapiens
tgtaagttcctggat

SEQ ID NO: 142285 - DNA, 15 bp, Homo sapiens
ctgtaagttcctgga

SEQ ID NO: 142286 - DNA, 15 bp, Homo sapiens
tctgtaagttcctgg

SEQ ID NO: 142287 - DNA, 15 bp, Homo sapiens
gtctgtaagttcctg

SEQ ID NO: 142288 - DNA, 15 bp, Homo sapiens
agtctgtaagttcct

SEQ ID NO: 142289 - DNA, 15 bp, Homo sapiens
aagtctgtaagttcc

SEQ ID NO: 142290 - DNA, 15 bp, Homo sapiens
taagtctgtaagttc

SEQ ID NO: 142291 - DNA, 15 bp, Homo sapiens
ataagtctgtaagtt

SEQ ID NO: 142292 - DNA, 15 bp, Homo sapiens
aataagtctgtaagt

SEQ ID NO: 142293 - DNA, 15 bp, Homo sapiens
caataagtctgtaag

SEQ ID NO: 142294 - DNA, 15 bp, Homo sapiens
acaataagtctgtaa

SEQ ID NO: 142295 - DNA, 15 bp, Homo sapiens
cacaataagtctgta

SEQ ID NO: 142296 - DNA, 15 bp, Homo sapiens
acacaataagtctgt

SEQ ID NO: 142297 - DNA, 15 bp, Homo sapiens
cacacaataagtctg

SEQ ID NO: 142298 - DNA, 15 bp, Homo sapiens
acacacaataagtct

SEQ ID NO: 142299 - DNA, 15 bp, Homo sapiens
cacacacaataagtc

SEQ ID NO: 142300 - DNA, 15 bp, Homo sapiens
tcacacacaataagt

SEQ ID NO: 142301 - DNA, 15 bp, Homo sapiens
ctcacacacaataag

SEQ ID NO: 142302 - DNA, 15 bp, Homo sapiens
tctcacacacaataa

SEQ ID NO: 142303 - DNA, 15 bp, Homo sapiens
atctcacacacaata

SEQ ID NO: 142304 - DNA, 15 bp, Homo sapiens
tatctcacacacaat

SEQ ID NO: 142305 - DNA, 15 bp, Homo sapiens
ctatctcacacacaa

SEQ ID NO: 142306 - DNA, 15 bp, Homo sapiens
actatctcacacaca

SEQ ID NO: 142307 - DNA, 15 bp, Homo sapiens
aactatctcacacac

SEQ ID NO: 142308 - DNA, 15 bp, Homo sapiens
gaactatctcacaca

SEQ ID NO: 142309 - DNA, 15 bp, Homo sapiens
ggaactatctcacac

SEQ ID NO: 142310 - DNA, 15 bp, Homo sapiens
tggaactatctcaca

SEQ ID NO: 142311 - DNA, 15 bp, Homo sapiens
atggaactatctcac

SEQ ID NO: 142312 - DNA, 15 bp, Homo sapiens
tatggaactatctca

SEQ ID NO: 142313 - DNA, 15 bp, Homo sapiens
gtatggaactatctc

SEQ ID NO: 142314 - DNA, 15 bp, Homo sapiens
ggtatggaactatct

SEQ ID NO: 142315 - DNA, 15 bp, Homo sapiens
tggtatggaactatc

SEQ ID NO: 142316 - DNA, 15 bp, Homo sapiens
atggtatggaactat

SEQ ID NO: 142317 - DNA, 15 bp, Homo sapiens
aatggtatggaacta

SEQ ID NO: 142318 - DNA, 15 bp, Homo sapiens
aaatggtatggaact

SEQ ID NO: 142319 - DNA, 15 bp, Homo sapiens
caaatggtatggaac

SEQ ID NO: 142320 - DNA, 15 bp, Homo sapiens
acaaatggtatggaa

SEQ ID NO: 142321 - DNA, 15 bp, Homo sapiens
tacaaatggtatgga

SEQ ID NO: 142322 - DNA, 15 bp, Homo sapiens
ttacaaatggtatgg

SEQ ID NO: 142323 - DNA, 15 bp, Homo sapiens
attacaaatggtatg

SEQ ID NO: 142324 - DNA, 15 bp, Homo sapiens
aattacaaatggtat

SEQ ID NO: 142325 - DNA, 15 bp, Homo sapiens
aaattacaaatggta

SEQ ID NO: 142326 - DNA, 15 bp, Homo sapiens
taaattacaaatggt

SEQ ID NO: 142327 - DNA, 15 bp, Homo sapiens
ataaattacaaatgg

SEQ ID NO: 142328 - DNA, 15 bp, Homo sapiens
aataaattacaaatg

SEQ ID NO: 142329 - DNA, 15 bp, Homo sapiens
gaataaattacaaat

SEQ ID NO: 142330 - DNA, 15 bp, Homo sapiens
ggaataaattacaaa

SEQ ID NO: 142331 - DNA, 15 bp, Homo sapiens
gggaataaattacaa

SEQ ID NO: 142332 - DNA, 15 bp, Homo sapiens
tgggaataaattaca

SEQ ID NO: 142333 - DNA, 15 bp, Homo sapiens
ttgggaataaattac

SEQ ID NO: 142334 - DNA, 15 bp, Homo sapiens
tttgggaataaatta

SEQ ID NO: 142335 - DNA, 15 bp, Homo sapiens
ttttgggaataaatt

SEQ ID NO: 142336 - DNA, 15 bp, Homo sapiens
attttgggaataaat

SEQ ID NO: 142337 - DNA, 15 bp, Homo sapiens
tattttgggaataaa

SEQ ID NO: 142338 - DNA, 15 bp, Homo sapiens
ttattttgggaataa

SEQ ID NO: 142339 - DNA, 15 bp, Homo sapiens
tttattttgggaata

SEQ ID NO: 142340 - DNA, 15 bp, Homo sapiens
gtttattttgggaat

SEQ ID NO: 142341 - DNA, 15 bp, Homo sapiens
tgtttattttgggaa

SEQ ID NO: 142342 - DNA, 15 bp, Homo sapiens
ctgtttattttggga

SEQ ID NO: 142343 - DNA, 15 bp, Homo sapiens
actgtttattttggg

SEQ ID NO: 142344 - DNA, 15 bp, Homo sapiens
aactgtttattttgg

SEQ ID NO: 142345 - DNA, 15 bp, Homo sapiens
taactgtttattttg

SEQ ID NO: 142346 - DNA, 15 bp, Homo sapiens
ataactgtttatttt

SEQ ID NO: 142347 - DNA, 15 bp, Homo sapiens
aataactgtttattt

SEQ ID NO: 142348 - DNA, 15 bp, Homo sapiens
caataactgtttatt

SEQ ID NO: 142349 - DNA, 15 bp, Homo sapiens
tcaataactgtttat

SEQ ID NO: 142350 - DNA, 15 bp, Homo sapiens
ctcaataactgttta

SEQ ID NO: 142351 - DNA, 15 bp, Homo sapiens
gctcaataactgttt

SEQ ID NO: 142352 - DNA, 15 bp, Homo sapiens
tgctcaataactgtt

SEQ ID NO: 142353 - DNA, 15 bp, Homo sapiens
atgctcaataactgt

SEQ ID NO: 142354 - DNA, 15 bp, Homo sapiens
gatgctcaataactg

SEQ ID NO: 142355 - DNA, 15 bp, Homo sapiens
agatgctcaataact

SEQ ID NO: 142356 - DNA, 15 bp, Homo sapiens
tagatgctcaataac

SEQ ID NO: 142357 - DNA, 15 bp, Homo sapiens
atagatgctcaataa

SEQ ID NO: 142358 - DNA, 15 bp, Homo sapiens
aatagatgctcaata

SEQ ID NO: 142359 - DNA, 15 bp, Homo sapiens
caatagatgctcaat

SEQ ID NO: 142360 - DNA, 15 bp, Homo sapiens
gcaatagatgctcaa

SEQ ID NO: 142361 - DNA, 15 bp, Homo sapiens
tgcaatagatgctca

SEQ ID NO: 142362 - DNA, 15 bp, Homo sapiens
atgcaatagatgctc

SEQ ID NO: 142363 - DNA, 15 bp, Homo sapiens
catgcaatagatgct

SEQ ID NO: 142364 - DNA, 15 bp, Homo sapiens
gcatgcaatagatgc

SEQ ID NO: 142365 - DNA, 15 bp, Homo sapiens
ggcatgcaatagatg

SEQ ID NO: 142366 - DNA, 15 bp, Homo sapiens
aggcatgcaatagat

SEQ ID NO: 142367 - DNA, 15 bp, Homo sapiens
caggcatgcaataga

SEQ ID NO: 142368 - DNA, 15 bp, Homo sapiens
acaggcatgcaatag

SEQ ID NO: 142369 - DNA, 15 bp, Homo sapiens
cacaggcatgcaata

SEQ ID NO: 142370 - DNA, 15 bp, Homo sapiens
gcacaggcatgcaat

SEQ ID NO: 142371 - DNA, 15 bp, Homo sapiens
agcacaggcatgcaa

SEQ ID NO: 142372 - DNA, 15 bp, Homo sapiens
gagcacaggcatgca

SEQ ID NO: 142373 - DNA, 15 bp, Homo sapiens
tgagcacaggcatgc

SEQ ID NO: 142374 - DNA, 15 bp, Homo sapiens
ctgagcacaggcatg

SEQ ID NO: 142375 - DNA, 15 bp, Homo sapiens
actgagcacaggcat

SEQ ID NO: 142376 - DNA, 15 bp, Homo sapiens
cactgagcacaggca

SEQ ID NO: 142377 - DNA, 15 bp, Homo sapiens
ccactgagcacaggc

SEQ ID NO: 142378 - DNA, 15 bp, Homo sapiens
cccactgagcacagg

SEQ ID NO: 142379 - DNA, 15 bp, Homo sapiens
ccccactgagcacag

SEQ ID NO: 142380 - DNA, 15 bp, Homo sapiens
cccccactgagcaca

SEQ ID NO: 142381 - DNA, 15 bp, Homo sapiens
acccccactgagcac

SEQ ID NO: 142382 - DNA, 15 bp, Homo sapiens
cacccccactgagca

SEQ ID NO: 142383 - DNA, 15 bp, Homo sapiens
ccacccccactgagc

SEQ ID NO: 142384 - DNA, 15 bp, Homo sapiens
cccacccccactgag

SEQ ID NO: 142385 - DNA, 15 bp, Homo sapiens
ccccacccccactga

SEQ ID NO: 142386 - DNA, 15 bp, Homo sapiens
cccccacccccactg

SEQ ID NO: 142387 - DNA, 15 bp, Homo sapiens
ccccccacccccact

SEQ ID NO: 142388 - DNA, 15 bp, Homo sapiens
tccccccacccccac

SEQ ID NO: 142389 - DNA, 15 bp, Homo sapiens
ctccccccaccccca

SEQ ID NO: 142390 - DNA, 15 bp, Homo sapiens
actccccccaccccc

SEQ ID NO: 142391 - DNA, 15 bp, Homo sapiens
tactccccccacccc

SEQ ID NO: 142392 - DNA, 15 bp, Homo sapiens
ctactccccccaccc

SEQ ID NO: 142393 - DNA, 15 bp, Homo sapiens
cctactccccccacc

SEQ ID NO: 142394 - DNA, 15 bp, Homo sapiens
ccctactccccccac

SEQ ID NO: 142395 - DNA, 15 bp, Homo sapiens
tccctactcccccca

SEQ ID NO: 142396 - DNA, 15 bp, Homo sapiens
ctccctactcccccc

SEQ ID NO: 142397 - DNA, 15 bp, Homo sapiens
tctccctactccccc

SEQ ID NO: 142398 - DNA, 15 bp, Homo sapiens
ctctccctactcccc

SEQ ID NO: 142399 - DNA, 15 bp, Homo sapiens
tctctccctactccc

SEQ ID NO: 142400 - DNA, 15 bp, Homo sapiens
ctctctccctactcc

SEQ ID NO: 142401 - DNA, 15 bp, Homo sapiens
tctctctccctactc

SEQ ID NO: 142402 - DNA, 15 bp, Homo sapiens
ttctctctccctact

SEQ ID NO: 142403 - DNA, 15 bp, Homo sapiens
attctctctccctac

SEQ ID NO: 142404 - DNA, 15 bp, Homo sapiens
gattctctctcccta

SEQ ID NO: 142405 - DNA, 15 bp, Homo sapiens
ggattctctctccct

SEQ ID NO: 142406 - DNA, 15 bp, Homo sapiens
tggattctctctccc

SEQ ID NO: 142407 - DNA, 15 bp, Homo sapiens
ctggattctctctcc

SEQ ID NO: 142408 - DNA, 15 bp, Homo sapiens
tctggattctctctc

SEQ ID NO: 142409 - DNA, 15 bp, Homo sapiens
ttctggattctctct

SEQ ID NO: 142410 - DNA, 15 bp, Homo sapiens
tttctggattctctc

SEQ ID NO: 142411 - DNA, 15 bp, Homo sapiens
ctttctggattctct

SEQ ID NO: 142412 - DNA, 15 bp, Homo sapiens
cctttctggattctc

SEQ ID NO: 142413 - DNA, 15 bp, Homo sapiens
tcctttctggattct

SEQ ID NO: 142414 - DNA, 15 bp, Homo sapiens
ctcctttctggattc

SEQ ID NO: 142415 - DNA, 15 bp, Homo sapiens
actcctttctggatt

SEQ ID NO: 142416 - DNA, 15 bp, Homo sapiens
gactcctttctggat

SEQ ID NO: 142417 - DNA, 15 bp, Homo sapiens
tgactcctttctgga

SEQ ID NO: 142418 - DNA, 15 bp, Homo sapiens
ctgactcctttctgg

SEQ ID NO: 142419 - DNA, 15 bp, Homo sapiens
gctgactcctttctg

SEQ ID NO: 142420 - DNA, 15 bp, Homo sapiens
agctgactcctttct

SEQ ID NO: 142421 - DNA, 15 bp, Homo sapiens
gagctgactcctttc

SEQ ID NO: 142422 - DNA, 15 bp, Homo sapiens
ggagctgactccttt

SEQ ID NO: 142423 - DNA, 15 bp, Homo sapiens
tggagctgactcctt

SEQ ID NO: 142424 - DNA, 15 bp, Homo sapiens
ctggagctgactcct

SEQ ID NO: 142425 - DNA, 15 bp, Homo sapiens
gctggagctgactcc

SEQ ID NO: 142426 - DNA, 15 bp, Homo sapiens
agctggagctgactc

SEQ ID NO: 142427 - DNA, 15 bp, Homo sapiens
aagctggagctgact

SEQ ID NO: 142428 - DNA, 15 bp, Homo sapiens
aaagctggagctgac

SEQ ID NO: 142429 - DNA, 15 bp, Homo sapiens
caaagctggagctga

SEQ ID NO: 142430 - DNA, 15 bp, Homo sapiens
acaaagctggagctg

SEQ ID NO: 142431 - DNA, 15 bp, Homo sapiens
gacaaagctggagct

SEQ ID NO: 142432 - DNA, 15 bp, Homo sapiens
agacaaagctggagc

SEQ ID NO: 142433 - DNA, 15 bp, Homo sapiens
aagacaaagctggag

SEQ ID NO: 142434 - DNA, 15 bp, Homo sapiens
gaagacaaagctgga

SEQ ID NO: 142435 - DNA, 15 bp, Homo sapiens
ggaagacaaagctgg

SEQ ID NO: 142436 - DNA, 15 bp, Homo sapiens
tggaagacaaagctg

SEQ ID NO: 142437 - DNA, 15 bp, Homo sapiens
atggaagacaaagct

SEQ ID NO: 142438 - DNA, 15 bp, Homo sapiens
tatggaagacaaagc

SEQ ID NO: 142439 - DNA, 15 bp, Homo sapiens
ttatggaagacaaag

SEQ ID NO: 142440 - DNA, 15 bp, Homo sapiens
cttatggaagacaaa

SEQ ID NO: 142441 - DNA, 15 bp, Homo sapiens
gcttatggaagacaa

SEQ ID NO: 142442 - DNA, 15 bp, Homo sapiens
tgcttatggaagaca

SEQ ID NO: 142443 - DNA, 15 bp, Homo sapiens
ttgcttatggaagac

SEQ ID NO: 142444 - DNA, 15 bp, Homo sapiens
tttgcttatggaaga

SEQ ID NO: 142445 - DNA, 15 bp, Homo sapiens
atttgcttatggaag

SEQ ID NO: 142446 - DNA, 15 bp, Homo sapiens
catttgcttatggaa

SEQ ID NO: 142447 - DNA, 15 bp, Homo sapiens
ccatttgcttatgga

SEQ ID NO: 142448 - DNA, 15 bp, Homo sapiens
gccatttgcttatgg

SEQ ID NO: 142449 - DNA, 15 bp, Homo sapiens
agccatttgcttatg

SEQ ID NO: 142450 - DNA, 15 bp, Homo sapiens
aagccatttgcttat

SEQ ID NO: 142451 - DNA, 15 bp, Homo sapiens
taagccatttgctta

SEQ ID NO: 142452 - DNA, 15 bp, Homo sapiens
ctaagccatttgctt

SEQ ID NO: 142453 - DNA, 15 bp, Homo sapiens
tctaagccatttgct

SEQ ID NO: 142454 - DNA, 15 bp, Homo sapiens
ctctaagccatttgc

SEQ ID NO: 142455 - DNA, 15 bp, Homo sapiens
cctctaagccatttg

SEQ ID NO: 142456 - DNA, 15 bp, Homo sapiens
ccctctaagccattt

SEQ ID NO: 142457 - DNA, 15 bp, Homo sapiens
cccctctaagccatt

SEQ ID NO: 142458 - DNA, 15 bp, Homo sapiens
tcccctctaagccat

SEQ ID NO: 142459 - DNA, 15 bp, Homo sapiens
atcccctctaagcca

SEQ ID NO: 142460 - DNA, 15 bp, Homo sapiens
aatcccctctaagcc

SEQ ID NO: 142461 - DNA, 15 bp, Homo sapiens
caatcccctctaagc

SEQ ID NO: 142462 - DNA, 15 bp, Homo sapiens
acaatcccctctaag

SEQ ID NO: 142463 - DNA, 15 bp, Homo sapiens
aacaatcccctctaa

SEQ ID NO: 142464 - DNA, 15 bp, Homo sapiens
gaacaatcccctcta

SEQ ID NO: 142465 - DNA, 15 bp, Homo sapiens
tgaacaatcccctct

SEQ ID NO: 142466 - DNA, 15 bp, Homo sapiens
atgaacaatcccctc

SEQ ID NO: 142467 - DNA, 15 bp, Homo sapiens
aatgaacaatcccct

SEQ ID NO: 142468 - DNA, 15 bp, Homo sapiens
aaatgaacaatcccc

SEQ ID NO: 142469 - DNA, 15 bp, Homo sapiens
aaaatgaacaatccc

SEQ ID NO: 142470 - DNA, 15 bp, Homo sapiens
gaaaatgaacaatcc

SEQ ID NO: 142471 - DNA, 15 bp, Homo sapiens
tgaaaatgaacaatc

SEQ ID NO: 142472 - DNA, 15 bp, Homo sapiens
gtgaaaatgaacaat

SEQ ID NO: 142473 - DNA, 15 bp, Homo sapiens
agtgaaaatgaacaa

SEQ ID NO: 142474 - DNA, 15 bp, Homo sapiens
cagtgaaaatgaaca

SEQ ID NO: 142475 - DNA, 15 bp, Homo sapiens
acagtgaaaatgaac

SEQ ID NO: 142476 - DNA, 15 bp, Homo sapiens
aacagtgaaaatgaa

SEQ ID NO: 142477 - DNA, 15 bp, Homo sapiens
aaacagtgaaaatga

SEQ ID NO: 142478 - DNA, 15 bp, Homo sapiens
aaaacagtgaaaatg

SEQ ID NO: 142479 - DNA, 15 bp, Homo sapiens
caaaacagtgaaaat

SEQ ID NO: 142480 - DNA, 15 bp, Homo sapiens
acaaaacagtgaaaa

SEQ ID NO: 142481 - DNA, 15 bp, Homo sapiens
aacaaaacagtgaaa

SEQ ID NO: 142482 - DNA, 15 bp, Homo sapiens
aaacaaaacagtgaa

SEQ ID NO: 142483 - DNA, 15 bp, Homo sapiens
aaaacaaaacagtga

SEQ ID NO: 142484 - DNA, 15 bp, Homo sapiens
caaaacaaaacagtg

SEQ ID NO: 142485 - DNA, 15 bp, Homo sapiens
ccaaaacaaaacagt

SEQ ID NO: 142486 - DNA, 15 bp, Homo sapiens
cccaaaacaaaacag

SEQ ID NO: 142487 - DNA, 15 bp, Homo sapiens
ccccaaaacaaaaca

SEQ ID NO: 142488 - DNA, 15 bp, Homo sapiens
gccccaaaacaaaac

SEQ ID NO: 142489 - DNA, 15 bp, Homo sapiens
tgccccaaaacaaaa

SEQ ID NO: 142490 - DNA, 15 bp, Homo sapiens
ttgccccaaaacaaa

SEQ ID NO: 142491 - DNA, 15 bp, Homo sapiens
cttgccccaaaacaa

SEQ ID NO: 142492 - DNA, 15 bp, Homo sapiens
ccttgccccaaaaca

SEQ ID NO: 142493 - DNA, 15 bp, Homo sapiens
tccttgccccaaaac

SEQ ID NO: 142494 - DNA, 15 bp, Homo sapiens
ctccttgccccaaaa

SEQ ID NO: 142495 - DNA, 15 bp, Homo sapiens
cctccttgccccaaa

SEQ ID NO: 142496 - DNA, 15 bp, Homo sapiens
acctccttgccccaa

SEQ ID NO: 142497 - DNA, 15 bp, Homo sapiens
cacctccttgcccca

SEQ ID NO: 142498 - DNA, 15 bp, Homo sapiens
acacctccttgcccc

SEQ ID NO: 142499 - DNA, 15 bp, Homo sapiens
cacacctccttgccc

SEQ ID NO: 142500 - DNA, 15 bp, Homo sapiens
acacacctccttgcc

SEQ ID NO: 142501 - DNA, 15 bp, Homo sapiens
gacacacctccttgc

SEQ ID NO: 142502 - DNA, 15 bp, Homo sapiens
tgacacacctccttg

SEQ ID NO: 142503 - DNA, 15 bp, Homo sapiens
ctgacacacctcctt

SEQ ID NO: 142504 - DNA, 15 bp, Homo sapiens
cctgacacacctcct

SEQ ID NO: 142505 - DNA, 15 bp, Homo sapiens
ccctgacacacctcc

SEQ ID NO: 142506 - DNA, 15 bp, Homo sapiens
tccctgacacacctc

SEQ ID NO: 142507 - DNA, 15 bp, Homo sapiens
ctccctgacacacct

SEQ ID NO: 142508 - DNA, 15 bp, Homo sapiens
cctccctgacacacc

SEQ ID NO: 142509 - DNA, 15 bp, Homo sapiens
acctccctgacacac

SEQ ID NO: 142510 - DNA, 15 bp, Homo sapiens
cacctccctgacaca

SEQ ID NO: 142511 - DNA, 15 bp, Homo sapiens
tcacctccctgacac

SEQ ID NO: 142512 - DNA, 15 bp, Homo sapiens
ctcacctccctgaca

SEQ ID NO: 142513 - DNA, 15 bp, Homo sapiens
cctcacctccctgac

SEQ ID NO: 142514 - DNA, 15 bp, Homo sapiens
tcctcacctccctga

SEQ ID NO: 142515 - DNA, 15 bp, Homo sapiens
ctcctcacctccctg

SEQ ID NO: 142516 - DNA, 15 bp, Homo sapiens
cctcctcacctccct

SEQ ID NO: 142517 - DNA, 15 bp, Homo sapiens
acctcctcacctccc

SEQ ID NO: 142518 - DNA, 15 bp, Homo sapiens
tacctcctcacctcc

SEQ ID NO: 142519 - DNA, 15 bp, Homo sapiens
ctacctcctcacctc

SEQ ID NO: 142520 - DNA, 15 bp, Homo sapiens
tctacctcctcacct

SEQ ID NO: 142521 - DNA, 15 bp, Homo sapiens
ctctacctcctcacc

SEQ ID NO: 142522 - DNA, 15 bp, Homo sapiens
actctacctcctcac

SEQ ID NO: 142523 - DNA, 15 bp, Homo sapiens
tactctacctcctca

SEQ ID NO: 142524 - DNA, 15 bp, Homo sapiens
ctactctacctcctc

SEQ ID NO: 142525 - DNA, 15 bp, Homo sapiens
tctactctacctcct

SEQ ID NO: 142526 - DNA, 15 bp, Homo sapiens
ctctactctacctcc

SEQ ID NO: 142527 - DNA, 15 bp, Homo sapiens
tctctactctacctc

SEQ ID NO: 142528 - DNA, 15 bp, Homo sapiens
ttctctactctacct

SEQ ID NO: 142529 - DNA, 15 bp, Homo sapiens
attctctactctacc

SEQ ID NO: 142530 - DNA, 15 bp, Homo sapiens
gattctctactctac

SEQ ID NO: 142531 - DNA, 15 bp, Homo sapiens
tgattctctactcta

SEQ ID NO: 142532 - DNA, 15 bp, Homo sapiens
atgattctctactct

SEQ ID NO: 142533 - DNA, 15 bp, Homo sapiens
gatgattctctactc

SEQ ID NO: 142534 - DNA, 15 bp, Homo sapiens
ggatgattctctact

SEQ ID NO: 142535 - DNA, 15 bp, Homo sapiens
aggatgattctctac

SEQ ID NO: 142536 - DNA, 15 bp, Homo sapiens
gaggatgattctcta

SEQ ID NO: 142537 - DNA, 15 bp, Homo sapiens
ggaggatgattctct

SEQ ID NO: 142538 - DNA, 15 bp, Homo sapiens
tggaggatgattctc

SEQ ID NO: 142539 - DNA, 15 bp, Homo sapiens
gtggaggatgattct

SEQ ID NO: 142540 - DNA, 15 bp, Homo sapiens
ggtggaggatgattc

SEQ ID NO: 142541 - DNA, 15 bp, Homo sapiens
cggtggaggatgatt

SEQ ID NO: 142542 - DNA, 15 bp, Homo sapiens
acggtggaggatgat

SEQ ID NO: 142543 - DNA, 15 bp, Homo sapiens
cacggtggaggatga

SEQ ID NO: 142544 - DNA, 15 bp, Homo sapiens
tcacggtggaggatg

SEQ ID NO: 142545 - DNA, 15 bp, Homo sapiens
ttcacggtggaggat

SEQ ID NO: 142546 - DNA, 15 bp, Homo sapiens
cttcacggtggagga

SEQ ID NO: 142547 - DNA, 15 bp, Homo sapiens
acttcacggtggagg

SEQ ID NO: 142548 - DNA, 15 bp, Homo sapiens
cacttcacggtggag

SEQ ID NO: 142549 - DNA, 15 bp, Homo sapiens
tcacttcacggtgga

SEQ ID NO: 142550 - DNA, 15 bp, Homo sapiens
ttcacttcacggtgg

SEQ ID NO: 142551 - DNA, 15 bp, Homo sapiens
cttcacttcacggtg

SEQ ID NO: 142552 - DNA, 15 bp, Homo sapiens
tcttcacttcacggt

SEQ ID NO: 142553 - DNA, 15 bp, Homo sapiens
ctcttcacttcacgg

SEQ ID NO: 142554 - DNA, 15 bp, Homo sapiens
tctcttcacttcacg

SEQ ID NO: 142555 - DNA, 15 bp, Homo sapiens
ctctcttcacttcac

SEQ ID NO: 142556 - DNA, 15 bp, Homo sapiens
cctctcttcacttca

SEQ ID NO: 142557 - DNA, 15 bp, Homo sapiens
tcctctcttcacttc

SEQ ID NO: 142558 - DNA, 15 bp, Homo sapiens
ttcctctcttcactt

SEQ ID NO: 142559 - DNA, 15 bp, Homo sapiens
cttcctctcttcact

SEQ ID NO: 142560 - DNA, 15 bp, Homo sapiens
ccttcctctcttcac

SEQ ID NO: 142561 - DNA, 15 bp, Homo sapiens
accttcctctcttca

SEQ ID NO: 142562 - DNA, 15 bp, Homo sapiens
taccttcctctcttc

SEQ ID NO: 142563 - DNA, 15 bp, Homo sapiens
gtaccttcctctctt

SEQ ID NO: 142564 - DNA, 15 bp, Homo sapiens
ggtaccttcctctct

SEQ ID NO: 142565 - DNA, 15 bp, Homo sapiens
gggtaccttcctctc

SEQ ID NO: 142566 - DNA, 15 bp, Homo sapiens
ggggtaccttcctct

SEQ ID NO: 142567 - DNA, 15 bp, Homo sapiens
gggggtaccttcctc

SEQ ID NO: 142568 - DNA, 15 bp, Homo sapiens
tgggggtaccttcct

SEQ ID NO: 142569 - DNA, 15 bp, Homo sapiens
gtgggggtaccttcc

SEQ ID NO: 142570 - DNA, 15 bp, Homo sapiens
tgtgggggtaccttc

SEQ ID NO: 142571 - DNA, 15 bp, Homo sapiens
atgtgggggtacctt

SEQ ID NO: 142572 - DNA, 15 bp, Homo sapiens
aatgtgggggtacct

SEQ ID NO: 142573 - DNA, 15 bp, Homo sapiens
caatgtgggggtacc

SEQ ID NO: 142574 - DNA, 15 bp, Homo sapiens
ccaatgtgggggtac

SEQ ID NO: 142575 - DNA, 15 bp, Homo sapiens
tccaatgtgggggta

SEQ ID NO: 142576 - DNA, 15 bp, Homo sapiens
ttccaatgtgggggt

SEQ ID NO: 142577 - DNA, 15 bp, Homo sapiens
tttccaatgtggggg

SEQ ID NO: 142578 - DNA, 15 bp, Homo sapiens
atttccaatgtgggg

SEQ ID NO: 142579 - DNA, 15 bp, Homo sapiens
tatttccaatgtggg

SEQ ID NO: 142580 - DNA, 15 bp, Homo sapiens
atatttccaatgtgg

SEQ ID NO: 142581 - DNA, 15 bp, Homo sapiens
catatttccaatgtg

SEQ ID NO: 142582 - DNA, 15 bp, Homo sapiens
gcatatttccaatgt

SEQ ID NO: 142583 - DNA, 15 bp, Homo sapiens
ggcatatttccaatg

SEQ ID NO: 142584 - DNA, 15 bp, Homo sapiens
aggcatatttccaat

SEQ ID NO: 142585 - DNA, 15 bp, Homo sapiens
aaggcatatttccaa

SEQ ID NO: 142586 - DNA, 15 bp, Homo sapiens
caaggcatatttcca

SEQ ID NO: 142587 - DNA, 15 bp, Homo sapiens
tcaaggcatatttcc

SEQ ID NO: 142588 - DNA, 15 bp, Homo sapiens
ctcaaggcatatttc

SEQ ID NO: 142589 - DNA, 15 bp, Homo sapiens
cctcaaggcatattt

SEQ ID NO: 142590 - DNA, 15 bp, Homo sapiens
tcctcaaggcatatt

SEQ ID NO: 142591 - DNA, 15 bp, Homo sapiens
gtcctcaaggcatat

SEQ ID NO: 142592 - DNA, 15 bp, Homo sapiens
ggtcctcaaggcata

SEQ ID NO: 142593 - DNA, 15 bp, Homo sapiens
tggtcctcaaggcat

SEQ ID NO: 142594 - DNA, 15 bp, Homo sapiens
ctggtcctcaaggca

SEQ ID NO: 142595 - DNA, 15 bp, Homo sapiens
tctggtcctcaaggc

SEQ ID NO: 142596 - DNA, 15 bp, Homo sapiens
ttctggtcctcaagg

SEQ ID NO: 142597 - DNA, 15 bp, Homo sapiens
cttctggtcctcaag

SEQ ID NO: 142598 - DNA, 15 bp, Homo sapiens
ccttctggtcctcaa

SEQ ID NO: 142599 - DNA, 15 bp, Homo sapiens
tccttctggtcctca

SEQ ID NO: 142600 - DNA, 15 bp, Homo sapiens
ttccttctggtcctc

SEQ ID NO: 142601 - DNA, 15 bp, Homo sapiens
attccttctggtcct

SEQ ID NO: 142602 - DNA, 15 bp, Homo sapiens
aattccttctggtcc

SEQ ID NO: 142603 - DNA, 15 bp, Homo sapiens
caattccttctggtc

SEQ ID NO: 142604 - DNA, 15 bp, Homo sapiens
tcaattccttctggt

SEQ ID NO: 142605 - DNA, 15 bp, Homo sapiens
gtcaattccttctgg

SEQ ID NO: 142606 - DNA, 15 bp, Homo sapiens
ggtcaattccttctg

SEQ ID NO: 142607 - DNA, 15 bp, Homo sapiens
tggtcaattccttct

SEQ ID NO: 142608 - DNA, 15 bp, Homo sapiens
ctggtcaattccttc

SEQ ID NO: 142609 - DNA, 15 bp, Homo sapiens
actggtcaattcctt

SEQ ID NO: 142610 - DNA, 15 bp, Homo sapiens
gactggtcaattcct

SEQ ID NO: 142611 - DNA, 15 bp, Homo sapiens
agactggtcaattcc

SEQ ID NO: 142612 - DNA, 15 bp, Homo sapiens
aagactggtcaattc

SEQ ID NO: 142613 - DNA, 15 bp, Homo sapiens
aaagactggtcaatt

SEQ ID NO: 142614 - DNA, 15 bp, Homo sapiens
aaaagactggtcaat

SEQ ID NO: 142615 - DNA, 15 bp, Homo sapiens
caaaagactggtcaa

SEQ ID NO: 142616 - DNA, 15 bp, Homo sapiens
tcaaaagactggtca

SEQ ID NO: 142617 - DNA, 15 bp, Homo sapiens
gtcaaaagactggtc

SEQ ID NO: 142618 - DNA, 15 bp, Homo sapiens
agtcaaaagactggt

SEQ ID NO: 142619 - DNA, 15 bp, Homo sapiens
aagtcaaaagactgg

SEQ ID NO: 142620 - DNA, 15 bp, Homo sapiens
aaagtcaaaagactg

SEQ ID NO: 142621 - DNA, 15 bp, Homo sapiens
gaaagtcaaaagact

SEQ ID NO: 142622 - DNA, 15 bp, Homo sapiens
tgaaagtcaaaagac

SEQ ID NO: 142623 - DNA, 15 bp, Homo sapiens
atgaaagtcaaaaga

SEQ ID NO: 142624 - DNA, 15 bp, Homo sapiens
aatgaaagtcaaaag

SEQ ID NO: 142625 - DNA, 15 bp, Homo sapiens
aaatgaaagtcaaaa

SEQ ID NO: 142626 - DNA, 15 bp, Homo sapiens
aaaatgaaagtcaaa

SEQ ID NO: 142627 - DNA, 15 bp, Homo sapiens
aaaaatgaaagtcaa

SEQ ID NO: 142628 - DNA, 15 bp, Homo sapiens
aaaaaatgaaagtca

SEQ ID NO: 142629 - DNA, 15 bp, Homo sapiens
taaaaaatgaaagtc

SEQ ID NO: 142630 - DNA, 15 bp, Homo sapiens
ttaaaaaatgaaagt

SEQ ID NO: 142631 - DNA, 15 bp, Homo sapiens
tttaaaaaatgaaag

SEQ ID NO: 142632 - DNA, 15 bp, Homo sapiens
ttttaaaaaatgaaa

SEQ ID NO: 142633 - DNA, 15 bp, Homo sapiens
attttaaaaaatgaa

SEQ ID NO: 142634 - DNA, 15 bp, Homo sapiens
aattttaaaaaatga

SEQ ID NO: 142635 - DNA, 15 bp, Homo sapiens
caattttaaaaaatg

SEQ ID NO: 142636 - DNA, 15 bp, Homo sapiens
tcaattttaaaaaat

SEQ ID NO: 142637 - DNA, 15 bp, Homo sapiens
ttcaattttaaaaaa

SEQ ID NO: 142638 - DNA, 15 bp, Homo sapiens
cttcaattttaaaaa

SEQ ID NO: 142639 - DNA, 15 bp, Homo sapiens
acttcaattttaaaa

SEQ ID NO: 142640 - DNA, 15 bp, Homo sapiens
gacttcaattttaaa

SEQ ID NO: 142641 - DNA, 15 bp, Homo sapiens
agacttcaattttaa

SEQ ID NO: 142642 - DNA, 15 bp, Homo sapiens
tagacttcaatttta

SEQ ID NO: 142643 - DNA, 15 bp, Homo sapiens
ttagacttcaatttt

SEQ ID NO: 142644 - DNA, 15 bp, Homo sapiens
gttagacttcaattt

SEQ ID NO: 142645 - DNA, 15 bp, Homo sapiens
tgttagacttcaatt

SEQ ID NO: 142646 - DNA, 15 bp, Homo sapiens
atgttagacttcaat

SEQ ID NO: 142647 - DNA, 15 bp, Homo sapiens
tatgttagacttcaa

SEQ ID NO: 142648 - DNA, 15 bp, Homo sapiens
gtatgttagacttca

SEQ ID NO: 142649 - DNA, 15 bp, Homo sapiens
tgtatgttagacttc

SEQ ID NO: 142650 - DNA, 15 bp, Homo sapiens
atgtatgttagactt

SEQ ID NO: 142651 - DNA, 15 bp, Homo sapiens
catgtatgttagact

SEQ ID NO: 142652 - DNA, 15 bp, Homo sapiens
acatgtatgttagac

SEQ ID NO: 142653 - DNA, 15 bp, Homo sapiens
tacatgtatgttaga

SEQ ID NO: 142654 - DNA, 15 bp, Homo sapiens
ctacatgtatgttag

SEQ ID NO: 142655 - DNA, 15 bp, Homo sapiens
cctacatgtatgtta

SEQ ID NO: 142656 - DNA, 15 bp, Homo sapiens
ccctacatgtatgtt

SEQ ID NO: 142657 - DNA, 15 bp, Homo sapiens
gccctacatgtatgt

SEQ ID NO: 142658 - DNA, 15 bp, Homo sapiens
tgccctacatgtatg

SEQ ID NO: 142659 - DNA, 15 bp, Homo sapiens
atgccctacatgtat

SEQ ID NO: 142660 - DNA, 15 bp, Homo sapiens
catgccctacatgta

SEQ ID NO: 142661 - DNA, 15 bp, Homo sapiens
gcatgccctacatgt

SEQ ID NO: 142662 - DNA, 15 bp, Homo sapiens
tgcatgccctacatg

SEQ ID NO: 142663 - DNA, 15 bp, Homo sapiens
gtgcatgccctacat

SEQ ID NO: 142664 - DNA, 15 bp, Homo sapiens
tgtgcatgccctaca

SEQ ID NO: 142665 - DNA, 15 bp, Homo sapiens
ctgtgcatgccctac

SEQ ID NO: 142666 - DNA, 15 bp, Homo sapiens
tctgtgcatgcccta

SEQ ID NO: 142667 - DNA, 15 bp, Homo sapiens
gtctgtgcatgccct

SEQ ID NO: 142668 - DNA, 15 bp, Homo sapiens
tgtctgtgcatgccc

SEQ ID NO: 142669 - DNA, 15 bp, Homo sapiens
atgtctgtgcatgcc

SEQ ID NO: 142670 - DNA, 15 bp, Homo sapiens
tatgtctgtgcatgc

SEQ ID NO: 142671 - DNA, 15 bp, Homo sapiens
ttatgtctgtgcatg

SEQ ID NO: 142672 - DNA, 15 bp, Homo sapiens
cttatgtctgtgcat

SEQ ID NO: 142673 - DNA, 15 bp, Homo sapiens
ccttatgtctgtgca

SEQ ID NO: 142674 - DNA, 15 bp, Homo sapiens
accttatgtctgtgc

SEQ ID NO: 142675 - DNA, 15 bp, Homo sapiens
caccttatgtctgtg

SEQ ID NO: 142676 - DNA, 15 bp, Homo sapiens
acaccttatgtctgt

SEQ ID NO: 142677 - DNA, 15 bp, Homo sapiens
tacaccttatgtctg

SEQ ID NO: 142678 - DNA, 15 bp, Homo sapiens
gtacaccttatgtct

SEQ ID NO: 142679 - DNA, 15 bp, Homo sapiens
tgtacaccttatgtc

SEQ ID NO: 142680 - DNA, 15 bp, Homo sapiens
ctgtacaccttatgt

SEQ ID NO: 142681 - DNA, 15 bp, Homo sapiens
cctgtacaccttatg

SEQ ID NO: 142682 - DNA, 15 bp, Homo sapiens
acctgtacaccttat

SEQ ID NO: 142683 - DNA, 15 bp, Homo sapiens
aacctgtacacctta

SEQ ID NO: 142684 - DNA, 15 bp, Homo sapiens
caacctgtacacctt

SEQ ID NO: 142685 - DNA, 15 bp, Homo sapiens
ccaacctgtacacct

SEQ ID NO: 142686 - DNA, 15 bp, Homo sapiens
accaacctgtacacc

SEQ ID NO: 142687 - DNA, 15 bp, Homo sapiens
taccaacctgtacac

SEQ ID NO: 142688 - DNA, 15 bp, Homo sapiens
gtaccaacctgtaca

SEQ ID NO: 142689 - DNA, 15 bp, Homo sapiens
tgtaccaacctgtac

SEQ ID NO: 142690 - DNA, 15 bp, Homo sapiens
ttgtaccaacctgta

SEQ ID NO: 142691 - DNA, 15 bp, Homo sapiens
attgtaccaacctgt

SEQ ID NO: 142692 - DNA, 15 bp, Homo sapiens
cattgtaccaacctg

SEQ ID NO: 142693 - DNA, 15 bp, Homo sapiens
acattgtaccaacct

SEQ ID NO: 142694 - DNA, 15 bp, Homo sapiens
tacattgtaccaacc

SEQ ID NO: 142695 - DNA, 15 bp, Homo sapiens
atacattgtaccaac

SEQ ID NO: 142696 - DNA, 15 bp, Homo sapiens
catacattgtaccaa

SEQ ID NO: 142697 - DNA, 15 bp, Homo sapiens
gcatacattgtacca

SEQ ID NO: 142698 - DNA, 15 bp, Homo sapiens
cgcatacattgtacc

SEQ ID NO: 142699 - DNA, 15 bp, Homo sapiens
gcgcatacattgtac

SEQ ID NO: 142700 - DNA, 15 bp, Homo sapiens
ggcgcatacattgta

SEQ ID NO: 142701 - DNA, 15 bp, Homo sapiens
aggcgcatacattgt

SEQ ID NO: 142702 - DNA, 15 bp, Homo sapiens
caggcgcatacattg

SEQ ID NO: 142703 - DNA, 15 bp, Homo sapiens
acaggcgcatacatt

SEQ ID NO: 142704 - DNA, 15 bp, Homo sapiens
cacaggcgcatacat

SEQ ID NO: 142705 - DNA, 15 bp, Homo sapiens
gcacaggcgcataca

SEQ ID NO: 142706 - DNA, 15 bp, Homo sapiens
tgcacaggcgcatac

SEQ ID NO: 142707 - DNA, 15 bp, Homo sapiens
ctgcacaggcgcata

SEQ ID NO: 142708 - DNA, 15 bp, Homo sapiens
gctgcacaggcgcat

SEQ ID NO: 142709 - DNA, 15 bp, Homo sapiens
ggctgcacaggcgca

SEQ ID NO: 142710 - DNA, 15 bp, Homo sapiens
cggctgcacaggcgc

SEQ ID NO: 142711 - DNA, 15 bp, Homo sapiens
gcggctgcacaggcg

SEQ ID NO: 142712 - DNA, 15 bp, Homo sapiens
ggcggctgcacaggc

SEQ ID NO: 142713 - DNA, 15 bp, Homo sapiens
aggcggctgcacagg

SEQ ID NO: 142714 - DNA, 15 bp, Homo sapiens
caggcggctgcacag

SEQ ID NO: 142715 - DNA, 15 bp, Homo sapiens
acaggcggctgcaca

SEQ ID NO: 142716 - DNA, 15 bp, Homo sapiens
aacaggcggctgcac

SEQ ID NO: 142717 - DNA, 15 bp, Homo sapiens
gaacaggcggctgca

SEQ ID NO: 142718 - DNA, 15 bp, Homo sapiens
agaacaggcggctgc

SEQ ID NO: 142719 - DNA, 15 bp, Homo sapiens
aagaacaggcggctg

SEQ ID NO: 142720 - DNA, 15 bp, Homo sapiens
caagaacaggcggct

SEQ ID NO: 142721 - DNA, 15 bp, Homo sapiens
ccaagaacaggcggc

SEQ ID NO: 142722 - DNA, 15 bp, Homo sapiens
tccaagaacaggcgg

SEQ ID NO: 142723 - DNA, 15 bp, Homo sapiens
ctccaagaacaggcg

SEQ ID NO: 142724 - DNA, 15 bp, Homo sapiens
cctccaagaacaggc

SEQ ID NO: 142725 - DNA, 15 bp, Homo sapiens
gcctccaagaacagg

SEQ ID NO: 142726 - DNA, 15 bp, Homo sapiens
tgcctccaagaacag

SEQ ID NO: 142727 - DNA, 15 bp, Homo sapiens
ttgcctccaagaaca

SEQ ID NO: 142728 - DNA, 15 bp, Homo sapiens
cttgcctccaagaac

SEQ ID NO: 142729 - DNA, 15 bp, Homo sapiens
tcttgcctccaagaa

SEQ ID NO: 142730 - DNA, 15 bp, Homo sapiens
ctcttgcctccaaga

SEQ ID NO: 142731 - DNA, 15 bp, Homo sapiens
gctcttgcctccaag

SEQ ID NO: 142732 - DNA, 15 bp, Homo sapiens
ggctcttgcctccaa

SEQ ID NO: 142733 - DNA, 15 bp, Homo sapiens
gggctcttgcctcca

SEQ ID NO: 142734 - DNA, 15 bp, Homo sapiens
agggctcttgcctcc

SEQ ID NO: 142735 - DNA, 15 bp, Homo sapiens
tagggctcttgcctc

SEQ ID NO: 142736 - DNA, 15 bp, Homo sapiens
atagggctcttgcct

SEQ ID NO: 142737 - DNA, 15 bp, Homo sapiens
catagggctcttgcc

SEQ ID NO: 142738 - DNA, 15 bp, Homo sapiens
tcatagggctcttgc

SEQ ID NO: 142739 - DNA, 15 bp, Homo sapiens
ctcatagggctcttg

SEQ ID NO: 142740 - DNA, 15 bp, Homo sapiens
actcatagggctctt

SEQ ID NO: 142741 - DNA, 15 bp, Homo sapiens
aactcatagggctct

SEQ ID NO: 142742 - DNA, 15 bp, Homo sapiens
caactcatagggctc

SEQ ID NO: 142743 - DNA, 15 bp, Homo sapiens
gcaactcatagggct

SEQ ID NO: 142744 - DNA, 15 bp, Homo sapiens
tgcaactcatagggc

SEQ ID NO: 142745 - DNA, 15 bp, Homo sapiens
atgcaactcataggg

SEQ ID NO: 142746 - DNA, 15 bp, Homo sapiens
catgcaactcatagg

SEQ ID NO: 142747 - DNA, 15 bp, Homo sapiens
acatgcaactcatag

SEQ ID NO: 142748 - DNA, 15 bp, Homo sapiens
cacatgcaactcata

SEQ ID NO: 142749 - DNA, 15 bp, Homo sapiens
ccacatgcaactcat

SEQ ID NO: 142750 - DNA, 15 bp, Homo sapiens
accacatgcaactca

SEQ ID NO: 142751 - DNA, 15 bp, Homo sapiens
gaccacatgcaactc

SEQ ID NO: 142752 - DNA, 15 bp, Homo sapiens
agaccacatgcaact

SEQ ID NO: 142753 - DNA, 15 bp, Homo sapiens
aagaccacatgcaac

SEQ ID NO: 142754 - DNA, 15 bp, Homo sapiens
gaagaccacatgcaa

SEQ ID NO: 142755 - DNA, 15 bp, Homo sapiens
tgaagaccacatgca

SEQ ID NO: 142756 - DNA, 15 bp, Homo sapiens
ctgaagaccacatgc

SEQ ID NO: 142757 - DNA, 15 bp, Homo sapiens
cctgaagaccacatg

SEQ ID NO: 142758 - DNA, 15 bp, Homo sapiens
gcctgaagaccacat

SEQ ID NO: 142759 - DNA, 15 bp, Homo sapiens
tgcctgaagaccaca

SEQ ID NO: 142760 - DNA, 15 bp, Homo sapiens
ctgcctgaagaccac

SEQ ID NO: 142761 - DNA, 15 bp, Homo sapiens
tctgcctgaagacca

SEQ ID NO: 142762 - DNA, 15 bp, Homo sapiens
ttctgcctgaagacc

SEQ ID NO: 142763 - DNA, 15 bp, Homo sapiens
attctgcctgaagac

SEQ ID NO: 142764 - DNA, 15 bp, Homo sapiens
cattctgcctgaaga

SEQ ID NO: 142765 - DNA, 15 bp, Homo sapiens
tcattctgcctgaag

SEQ ID NO: 142766 - DNA, 15 bp, Homo sapiens
ctcattctgcctgaa

SEQ ID NO: 142767 - DNA, 15 bp, Homo sapiens
cctcattctgcctga

SEQ ID NO: 142768 - DNA, 15 bp, Homo sapiens
tcctcattctgcctg

SEQ ID NO: 142769 - DNA, 15 bp, Homo sapiens
ctcctcattctgcct

SEQ ID NO: 142770 - DNA, 15 bp, Homo sapiens
tctcctcattctgcc

SEQ ID NO: 142771 - DNA, 15 bp, Homo sapiens
atctcctcattctgc

SEQ ID NO: 142772 - DNA, 15 bp, Homo sapiens
catctcctcattctg

SEQ ID NO: 142773 - DNA, 15 bp, Homo sapiens
gcatctcctcattct

SEQ ID NO: 142774 - DNA, 15 bp, Homo sapiens
ggcatctcctcattc

SEQ ID NO: 142775 - DNA, 15 bp, Homo sapiens
cggcatctcctcatt

SEQ ID NO: 142776 - DNA, 15 bp, Homo sapiens
tcggcatctcctcat

SEQ ID NO: 142777 - DNA, 15 bp, Homo sapiens
gtcggcatctcctca

SEQ ID NO: 142778 - DNA, 15 bp, Homo sapiens
ggtcggcatctcctc

SEQ ID NO: 142779 - DNA, 15 bp, Homo sapiens
tggtcggcatctcct

SEQ ID NO: 142780 - DNA, 15 bp, Homo sapiens
gtggtcggcatctcc

SEQ ID NO: 142781 - DNA, 15 bp, Homo sapiens
tgtggtcggcatctc

SEQ ID NO: 142782 - DNA, 15 bp, Homo sapiens
ttgtggtcggcatct

SEQ ID NO: 142783 - DNA, 15 bp, Homo sapiens
cttgtggtcggcatc

SEQ ID NO: 142784 - DNA, 15 bp, Homo sapiens
gcttgtggtcggcat

SEQ ID NO: 142785 - DNA, 15 bp, Homo sapiens
cgcttgtggtcggca

SEQ ID NO: 142786 - DNA, 15 bp, Homo sapiens
gcgcttgtggtcggc

SEQ ID NO: 142787 - DNA, 15 bp, Homo sapiens
agcgcttgtggtcgg

SEQ ID NO: 142788 - DNA, 15 bp, Homo sapiens
gagcgcttgtggtcg

SEQ ID NO: 142789 - DNA, 15 bp, Homo sapiens
ggagcgcttgtggtc

SEQ ID NO: 142790 - DNA, 15 bp, Homo sapiens
aggagcgcttgtggt

SEQ ID NO: 142791 - DNA, 15 bp, Homo sapiens
taggagcgcttgtgg

SEQ ID NO: 142792 - DNA, 15 bp, Homo sapiens
ctaggagcgcttgtg

SEQ ID NO: 142793 - DNA, 15 bp, Homo sapiens
cctaggagcgcttgt

SEQ ID NO: 142794 - DNA, 15 bp, Homo sapiens
tcctaggagcgcttg

SEQ ID NO: 142795 - DNA, 15 bp, Homo sapiens
ttcctaggagcgctt

SEQ ID NO: 142796 - DNA, 15 bp, Homo sapiens
attcctaggagcgct

SEQ ID NO: 142797 - DNA, 15 bp, Homo sapiens
aattcctaggagcgc

SEQ ID NO: 142798 - DNA, 15 bp, Homo sapiens
gaattcctaggagcg

SEQ ID NO: 142799 - DNA, 15 bp, Homo sapiens
tgaattcctaggagc

SEQ ID NO: 142800 - DNA, 15 bp, Homo sapiens
ctgaattcctaggag

SEQ ID NO: 142801 - DNA, 15 bp, Homo sapiens
tctgaattcctagga

SEQ ID NO: 142802 - DNA, 15 bp, Homo sapiens
ctctgaattcctagg

SEQ ID NO: 142803 - DNA, 15 bp, Homo sapiens
cctctgaattcctag

SEQ ID NO: 142804 - DNA, 15 bp, Homo sapiens
tcctctgaattccta

SEQ ID NO: 142805 - DNA, 15 bp, Homo sapiens
ttcctctgaattcct

SEQ ID NO: 142806 - DNA, 15 bp, Homo sapiens
tttcctctgaattcc

SEQ ID NO: 142807 - DNA, 15 bp, Homo sapiens
atttcctctgaattc

SEQ ID NO: 142808 - DNA, 15 bp, Homo sapiens
catttcctctgaatt

SEQ ID NO: 142809 - DNA, 15 bp, Homo sapiens
ccatttcctctgaat

SEQ ID NO: 142810 - DNA, 15 bp, Homo sapiens
tccatttcctctgaa

SEQ ID NO: 142811 - DNA, 15 bp, Homo sapiens
ctccatttcctctga

SEQ ID NO: 142812 - DNA, 15 bp, Homo sapiens
gctccatttcctctg

SEQ ID NO: 142813 - DNA, 15 bp, Homo sapiens
cgctccatttcctct

SEQ ID NO: 142814 - DNA, 15 bp, Homo sapiens
gcgctccatttcctc

SEQ ID NO: 142815 - DNA, 15 bp, Homo sapiens
tgcgctccatttcct

SEQ ID NO: 142816 - DNA, 15 bp, Homo sapiens
ttgcgctccatttcc

SEQ ID NO: 142817 - DNA, 15 bp, Homo sapiens
attgcgctccatttc

SEQ ID NO: 142818 - DNA, 15 bp, Homo sapiens
cattgcgctccattt

SEQ ID NO: 142819 - DNA, 15 bp, Homo sapiens
tcattgcgctccatt

SEQ ID NO: 142820 - DNA, 15 bp, Homo sapiens
ttcattgcgctccat

SEQ ID NO: 142821 - DNA, 15 bp, Homo sapiens
gttcattgcgctcca

SEQ ID NO: 142822 - DNA, 15 bp, Homo sapiens
ggttcattgcgctcc

SEQ ID NO: 142823 - DNA, 15 bp, Homo sapiens
gggttcattgcgctc

SEQ ID NO: 142824 - DNA, 15 bp, Homo sapiens
ggggttcattgcgct

SEQ ID NO: 142825 - DNA, 15 bp, Homo sapiens
aggggttcattgcgc

SEQ ID NO: 142826 - DNA, 15 bp, Homo sapiens
gaggggttcattgcg

SEQ ID NO: 142827 - DNA, 15 bp, Homo sapiens
ggaggggttcattgc

SEQ ID NO: 142828 - DNA, 15 bp, Homo sapiens
tggaggggttcattg

SEQ ID NO: 142829 - DNA, 15 bp, Homo sapiens
ttggaggggttcatt

SEQ ID NO: 142830 - DNA, 15 bp, Homo sapiens
tttggaggggttcat

SEQ ID NO: 142831 - DNA, 15 bp, Homo sapiens
atttggaggggttca

SEQ ID NO: 142832 - DNA, 15 bp, Homo sapiens
gatttggaggggttc

SEQ ID NO: 142833 - DNA, 15 bp, Homo sapiens
agatttggaggggtt

SEQ ID NO: 142834 - DNA, 15 bp, Homo sapiens
tagatttggaggggt

SEQ ID NO: 142835 - DNA, 15 bp, Homo sapiens
ctagatttggagggg

SEQ ID NO: 142836 - DNA, 15 bp, Homo sapiens
actagatttggaggg

SEQ ID NO: 142837 - DNA, 15 bp, Homo sapiens
aactagatttggagg

SEQ ID NO: 142838 - DNA, 15 bp, Homo sapiens
aaactagatttggag

SEQ ID NO: 142839 - DNA, 15 bp, Homo sapiens
gaaactagatttgga

SEQ ID NO: 142840 - DNA, 15 bp, Homo sapiens
ggaaactagatttgg

SEQ ID NO: 142841 - DNA, 15 bp, Homo sapiens
tggaaactagatttg

SEQ ID NO: 142842 - DNA, 15 bp, Homo sapiens
gtggaaactagattt

SEQ ID NO: 142843 - DNA, 15 bp, Homo sapiens
ggtggaaactagatt

SEQ ID NO: 142844 - DNA, 15 bp, Homo sapiens
tggtggaaactagat

SEQ ID NO: 142845 - DNA, 15 bp, Homo sapiens
ctggtggaaactaga

SEQ ID NO: 142846 - DNA, 15 bp, Homo sapiens
tctggtggaaactag

SEQ ID NO: 142847 - DNA, 15 bp, Homo sapiens
ttctggtggaaacta

SEQ ID NO: 142848 - DNA, 15 bp, Homo sapiens
cttctggtggaaact

SEQ ID NO: 142849 - DNA, 15 bp, Homo sapiens
ccttctggtggaaac

SEQ ID NO: 142850 - DNA, 15 bp, Homo sapiens
cccttctggtggaaa

SEQ ID NO: 142851 - DNA, 15 bp, Homo sapiens
tcccttctggtggaa

SEQ ID NO: 142852 - DNA, 15 bp, Homo sapiens
ctcccttctggtgga

SEQ ID NO: 142853 - DNA, 15 bp, Homo sapiens
tctcccttctggtgg

SEQ ID NO: 142854 - DNA, 15 bp, Homo sapiens
ctctcccttctggtg

SEQ ID NO: 142855 - DNA, 15 bp, Homo sapiens
cctctcccttctggt

SEQ ID NO: 142856 - DNA, 15 bp, Homo sapiens
tcctctcccttctgg

SEQ ID NO: 142857 - DNA, 15 bp, Homo sapiens
ttcctctcccttctg

SEQ ID NO: 142858 - DNA, 15 bp, Homo sapiens
cttcctctcccttct

SEQ ID NO: 142859 - DNA, 15 bp, Homo sapiens
tcttcctctcccttc

SEQ ID NO: 142860 - DNA, 15 bp, Homo sapiens
atcttcctctccctt

SEQ ID NO: 142861 - DNA, 15 bp, Homo sapiens
catcttcctctccct

SEQ ID NO: 142862 - DNA, 15 bp, Homo sapiens
tcatcttcctctccc

SEQ ID NO: 142863 - DNA, 15 bp, Homo sapiens
ttcatcttcctctcc

SEQ ID NO: 142864 - DNA, 15 bp, Homo sapiens
attcatcttcctctc

SEQ ID NO: 142865 - DNA, 15 bp, Homo sapiens
tattcatcttcctct

SEQ ID NO: 142866 - DNA, 15 bp, Homo sapiens
atattcatcttcctc

SEQ ID NO: 142867 - DNA, 15 bp, Homo sapiens
aatattcatcttcct

SEQ ID NO: 142868 - DNA, 15 bp, Homo sapiens
gaatattcatcttcc

SEQ ID NO: 142869 - DNA, 15 bp, Homo sapiens
tgaatattcatcttc

SEQ ID NO: 142870 - DNA, 15 bp, Homo sapiens
atgaatattcatctt

SEQ ID NO: 142871 - DNA, 15 bp, Homo sapiens
catgaatattcatct

SEQ ID NO: 142872 - DNA, 15 bp, Homo sapiens
ccatgaatattcatc

SEQ ID NO: 142873 - DNA, 15 bp, Homo sapiens
tccatgaatattcat

SEQ ID NO: 142874 - DNA, 15 bp, Homo sapiens
atccatgaatattca

SEQ ID NO: 142875 - DNA, 15 bp, Homo sapiens
gatccatgaatattc

SEQ ID NO: 142876 - DNA, 15 bp, Homo sapiens
agatccatgaatatt

SEQ ID NO: 142877 - DNA, 15 bp, Homo sapiens
aagatccatgaatat

SEQ ID NO: 142878 - DNA, 15 bp, Homo sapiens
caagatccatgaata

SEQ ID NO: 142879 - DNA, 15 bp, Homo sapiens
tcaagatccatgaat

SEQ ID NO: 142880 - DNA, 15 bp, Homo sapiens
atcaagatccatgaa

SEQ ID NO: 142881 - DNA, 15 bp, Homo sapiens
gatcaagatccatga

SEQ ID NO: 142882 - DNA, 15 bp, Homo sapiens
agatcaagatccatg

SEQ ID NO: 142883 - DNA, 15 bp, Homo sapiens
gagatcaagatccat

SEQ ID NO: 142884 - DNA, 15 bp, Homo sapiens
agagatcaagatcca

SEQ ID NO: 142885 - DNA, 15 bp, Homo sapiens
aagagatcaagatcc

SEQ ID NO: 142886 - DNA, 15 bp, Homo sapiens
aaagagatcaagatc

SEQ ID NO: 142887 - DNA, 15 bp, Homo sapiens
aaaagagatcaagat

SEQ ID NO: 142888 - DNA, 15 bp, Homo sapiens
aaaaagagatcaaga

SEQ ID NO: 142889 - DNA, 15 bp, Homo sapiens
caaaaagagatcaag

SEQ ID NO: 142890 - DNA, 15 bp, Homo sapiens
gcaaaaagagatcaa

SEQ ID NO: 142891 - DNA, 15 bp, Homo sapiens
tgcaaaaagagatca

SEQ ID NO: 142892 - DNA, 15 bp, Homo sapiens
atgcaaaaagagatc

SEQ ID NO: 142893 - DNA, 15 bp, Homo sapiens
gatgcaaaaagagat

SEQ ID NO: 142894 - DNA, 15 bp, Homo sapiens
tgatgcaaaaagaga

SEQ ID NO: 142895 - DNA, 15 bp, Homo sapiens
atgatgcaaaaagag

SEQ ID NO: 142896 - DNA, 15 bp, Homo sapiens
aatgatgcaaaaaga

SEQ ID NO: 142897 - DNA, 15 bp, Homo sapiens
aaatgatgcaaaaag

SEQ ID NO: 142898 - DNA, 15 bp, Homo sapiens
taaatgatgcaaaaa

SEQ ID NO: 142899 - DNA, 15 bp, Homo sapiens
gtaaatgatgcaaaa

SEQ ID NO: 142900 - DNA, 15 bp, Homo sapiens
tgtaaatgatgcaaa

SEQ ID NO: 142901 - DNA, 15 bp, Homo sapiens
atgtaaatgatgcaa

SEQ ID NO: 142902 - DNA, 15 bp, Homo sapiens
aatgtaaatgatgca

SEQ ID NO: 142903 - DNA, 15 bp, Homo sapiens
aaatgtaaatgatgc

SEQ ID NO: 142904 - DNA, 15 bp, Homo sapiens
aaaatgtaaatgatg

SEQ ID NO: 142905 - DNA, 15 bp, Homo sapiens
caaaatgtaaatgat

SEQ ID NO: 142906 - DNA, 15 bp, Homo sapiens
gcaaaatgtaaatga

SEQ ID NO: 142907 - DNA, 15 bp, Homo sapiens
agcaaaatgtaaatg

SEQ ID NO: 142908 - DNA, 15 bp, Homo sapiens
aagcaaaatgtaaat

SEQ ID NO: 142909 - DNA, 15 bp, Homo sapiens
aaagcaaaatgtaaa

SEQ ID NO: 142910 - DNA, 15 bp, Homo sapiens
gaaagcaaaatgtaa

SEQ ID NO: 142911 - DNA, 15 bp, Homo sapiens
agaaagcaaaatgta

SEQ ID NO: 142912 - DNA, 15 bp, Homo sapiens
gagaaagcaaaatgt

SEQ ID NO: 142913 - DNA, 15 bp, Homo sapiens
ggagaaagcaaaatg

SEQ ID NO: 142914 - DNA, 15 bp, Homo sapiens
tggagaaagcaaaat

SEQ ID NO: 142915 - DNA, 15 bp, Homo sapiens
ctggagaaagcaaaa

SEQ ID NO: 142916 - DNA, 15 bp, Homo sapiens
tctggagaaagcaaa

SEQ ID NO: 142917 - DNA, 15 bp, Homo sapiens
atctggagaaagcaa

SEQ ID NO: 142918 - DNA, 15 bp, Homo sapiens
aatctggagaaagca

SEQ ID NO: 142919 - DNA, 15 bp, Homo sapiens
aaatctggagaaagc

SEQ ID NO: 142920 - DNA, 15 bp, Homo sapiens
caaatctggagaaag

SEQ ID NO: 142921 - DNA, 15 bp, Homo sapiens
tcaaatctggagaaa

SEQ ID NO: 142922 - DNA, 15 bp, Homo sapiens
ctcaaatctggagaa

SEQ ID NO: 142923 - DNA, 15 bp, Homo sapiens
cctcaaatctggaga

SEQ ID NO: 142924 - DNA, 15 bp, Homo sapiens
gcctcaaatctggag

SEQ ID NO: 142925 - DNA, 15 bp, Homo sapiens
agcctcaaatctgga

SEQ ID NO: 142926 - DNA, 15 bp, Homo sapiens
gagcctcaaatctgg

SEQ ID NO: 142927 - DNA, 15 bp, Homo sapiens
ggagcctcaaatctg

SEQ ID NO: 142928 - DNA, 15 bp, Homo sapiens
gggagcctcaaatct

SEQ ID NO: 142929 - DNA, 15 bp, Homo sapiens
ggggagcctcaaatc

SEQ ID NO: 142930 - DNA, 15 bp, Homo sapiens
tggggagcctcaaat

SEQ ID NO: 142931 - DNA, 15 bp, Homo sapiens
gtggggagcctcaaa

SEQ ID NO: 142932 - DNA, 15 bp, Homo sapiens
ggtggggagcctcaa

SEQ ID NO: 142933 - DNA, 15 bp, Homo sapiens
aggtggggagcctca

SEQ ID NO: 142934 - DNA, 15 bp, Homo sapiens
caggtggggagcctc

SEQ ID NO: 142935 - DNA, 15 bp, Homo sapiens
gcaggtggggagcct

SEQ ID NO: 142936 - DNA, 15 bp, Homo sapiens
ggcaggtggggagcc

SEQ ID NO: 142937 - DNA, 15 bp, Homo sapiens
gggcaggtggggagc

SEQ ID NO: 142938 - DNA, 15 bp, Homo sapiens
ggggcaggtggggag

SEQ ID NO: 142939 - DNA, 15 bp, Homo sapiens
aggggcaggtgggga

SEQ ID NO: 142940 - DNA, 15 bp, Homo sapiens
caggggcaggtgggg

SEQ ID NO: 142941 - DNA, 15 bp, Homo sapiens
tcaggggcaggtggg

SEQ ID NO: 142942 - DNA, 15 bp, Homo sapiens
ctcaggggcaggtgg

SEQ ID NO: 142943 - DNA, 15 bp, Homo sapiens
actcaggggcaggtg

SEQ ID NO: 142944 - DNA, 15 bp, Homo sapiens
aactcaggggcaggt

SEQ ID NO: 142945 - DNA, 15 bp, Homo sapiens
gaactcaggggcagg

SEQ ID NO: 142946 - DNA, 15 bp, Homo sapiens
agaactcaggggcag

SEQ ID NO: 142947 - DNA, 15 bp, Homo sapiens
cagaactcaggggca

SEQ ID NO: 142948 - DNA, 15 bp, Homo sapiens
tcagaactcaggggc

SEQ ID NO: 142949 - DNA, 15 bp, Homo sapiens
ttcagaactcagggg

SEQ ID NO: 142950 - DNA, 15 bp, Homo sapiens
cttcagaactcaggg

SEQ ID NO: 142951 - DNA, 15 bp, Homo sapiens
tcttcagaactcagg

SEQ ID NO: 142952 - DNA, 15 bp, Homo sapiens
ttcttcagaactcag

SEQ ID NO: 142953 - DNA, 15 bp, Homo sapiens
attcttcagaactca

SEQ ID NO: 142954 - DNA, 15 bp, Homo sapiens
tattcttcagaactc

SEQ ID NO: 142955 - DNA, 15 bp, Homo sapiens
ttattcttcagaact

SEQ ID NO: 142956 - DNA, 15 bp, Homo sapiens
attattcttcagaac

SEQ ID NO: 142957 - DNA, 15 bp, Homo sapiens
aattattcttcagaa

SEQ ID NO: 142958 - DNA, 15 bp, Homo sapiens
caattattcttcaga

SEQ ID NO: 142959 - DNA, 15 bp, Homo sapiens
acaattattcttcag

SEQ ID NO: 142960 - DNA, 15 bp, Homo sapiens
aacaattattcttca

SEQ ID NO: 142961 - DNA, 15 bp, Homo sapiens
aaacaattattcttc

SEQ ID NO: 142962 - DNA, 15 bp, Homo sapiens
gaaacaattattctt

SEQ ID NO: 142963 - DNA, 15 bp, Homo sapiens
tgaaacaattattct

SEQ ID NO: 142964 - DNA, 15 bp, Homo sapiens
atgaaacaattattc

SEQ ID NO: 142965 - DNA, 15 bp, Homo sapiens
catgaaacaattatt

SEQ ID NO: 142966 - DNA, 15 bp, Homo sapiens
gcatgaaacaattat

SEQ ID NO: 142967 - DNA, 15 bp, Homo sapiens
tgcatgaaacaatta

SEQ ID NO: 142968 - DNA, 15 bp, Homo sapiens
atgcatgaaacaatt

SEQ ID NO: 142969 - DNA, 15 bp, Homo sapiens
gatgcatgaaacaat

SEQ ID NO: 142970 - DNA, 15 bp, Homo sapiens
tgatgcatgaaacaa

SEQ ID NO: 142971 - DNA, 15 bp, Homo sapiens
gtgatgcatgaaaca

SEQ ID NO: 142972 - DNA, 15 bp, Homo sapiens
tgtgatgcatgaaac

SEQ ID NO: 142973 - DNA, 15 bp, Homo sapiens
atgtgatgcatgaaa

SEQ ID NO: 142974 - DNA, 15 bp, Homo sapiens
aatgtgatgcatgaa

SEQ ID NO: 142975 - DNA, 15 bp, Homo sapiens
aaatgtgatgcatga

SEQ ID NO: 142976 - DNA, 15 bp, Homo sapiens
aaaatgtgatgcatg

SEQ ID NO: 142977 - DNA, 15 bp, Homo sapiens
aaaaatgtgatgcat

SEQ ID NO: 142978 - DNA, 15 bp, Homo sapiens
taaaaatgtgatgca

SEQ ID NO: 142979 - DNA, 15 bp, Homo sapiens
gtaaaaatgtgatgc

SEQ ID NO: 142980 - DNA, 15 bp, Homo sapiens
agtaaaaatgtgatg

SEQ ID NO: 142981 - DNA, 15 bp, Homo sapiens
cagtaaaaatgtgat

SEQ ID NO: 142982 - DNA, 15 bp, Homo sapiens
gcagtaaaaatgtga

SEQ ID NO: 142983 - DNA, 15 bp, Homo sapiens
tgcagtaaaaatgtg

SEQ ID NO: 142984 - DNA, 15 bp, Homo sapiens
atgcagtaaaaatgt

SEQ ID NO: 142985 - DNA, 15 bp, Homo sapiens
aatgcagtaaaaatg

SEQ ID NO: 142986 - DNA, 15 bp, Homo sapiens
caatgcagtaaaaat

SEQ ID NO: 142987 - DNA, 15 bp, Homo sapiens
ccaatgcagtaaaaa

SEQ ID NO: 142988 - DNA, 15 bp, Homo sapiens
cccaatgcagtaaaa

SEQ ID NO: 142989 - DNA, 15 bp, Homo sapiens
tcccaatgcagtaaa

SEQ ID NO: 142990 - DNA, 15 bp, Homo sapiens
ctcccaatgcagtaa

SEQ ID NO: 142991 - DNA, 15 bp, Homo sapiens
tctcccaatgcagta

SEQ ID NO: 142992 - DNA, 15 bp, Homo sapiens
ttctcccaatgcagt

SEQ ID NO: 142993 - DNA, 15 bp, Homo sapiens
tttctcccaatgcag

SEQ ID NO: 142994 - DNA, 15 bp, Homo sapiens
ttttctcccaatgca

SEQ ID NO: 142995 - DNA, 15 bp, Homo sapiens
tttttctcccaatgc

SEQ ID NO: 142996 - DNA, 15 bp, Homo sapiens
ctttttctcccaatg

SEQ ID NO: 142997 - DNA, 15 bp, Homo sapiens
tctttttctcccaat

SEQ ID NO: 142998 - DNA, 15 bp, Homo sapiens
ctctttttctcccaa

SEQ ID NO: 142999 - DNA, 15 bp, Homo sapiens
cctctttttctccca

SEQ ID NO: 143000 - DNA, 15 bp, Homo sapiens
ccctctttttctccc

SEQ ID NO: 143001 - DNA, 15 bp, Homo sapiens
tccctctttttctcc

SEQ ID NO: 143002 - DNA, 15 bp, Homo sapiens
ttccctctttttctc

SEQ ID NO: 143003 - DNA, 15 bp, Homo sapiens
tttccctctttttct

SEQ ID NO: 143004 - DNA, 15 bp, Homo sapiens
ttttccctctttttc

SEQ ID NO: 143005 - DNA, 15 bp, Homo sapiens
tttttccctcttttt

SEQ ID NO: 143006 - DNA, 15 bp, Homo sapiens
ctttttccctctttt

SEQ ID NO: 143007 - DNA, 15 bp, Homo sapiens
tctttttccctcttt

SEQ ID NO: 143008 - DNA, 15 bp, Homo sapiens
ttctttttccctctt

SEQ ID NO: 143009 - DNA, 15 bp, Homo sapiens
tttctttttccctct

SEQ ID NO: 143010 - DNA, 15 bp, Homo sapiens
ttttctttttccctc

SEQ ID NO: 143011 - DNA, 15 bp, Homo sapiens
attttctttttccct

SEQ ID NO: 143012 - DNA, 15 bp, Homo sapiens
tattttctttttccc

SEQ ID NO: 143013 - DNA, 15 bp, Homo sapiens
ttattttctttttcc

SEQ ID NO: 143014 - DNA, 15 bp, Homo sapiens
tttattttctttttc

SEQ ID NO: 143015 - DNA, 15 bp, Homo sapiens
atttattttcttttt

SEQ ID NO: 143016 - DNA, 15 bp, Homo sapiens
aatttattttctttt

SEQ ID NO: 143017 - DNA, 15 bp, Homo sapiens
caatttattttcttt

SEQ ID NO: 143018 - DNA, 15 bp, Homo sapiens
ccaatttattttctt

SEQ ID NO: 143019 - DNA, 15 bp, Homo sapiens
cccaatttattttct

SEQ ID NO: 143020 - DNA, 15 bp, Homo sapiens
tcccaatttattttc

SEQ ID NO: 143021 - DNA, 15 bp, Homo sapiens
ctcccaatttatttt

SEQ ID NO: 143022 - DNA, 15 bp, Homo sapiens
tctcccaatttattt

SEQ ID NO: 143023 - DNA, 15 bp, Homo sapiens
ttctcccaatttatt

SEQ ID NO: 143024 - DNA, 15 bp, Homo sapiens
cttctcccaatttat

SEQ ID NO: 143025 - DNA, 15 bp, Homo sapiens
tcttctcccaattta

SEQ ID NO: 143026 - DNA, 15 bp, Homo sapiens
ttcttctcccaattt

SEQ ID NO: 143027 - DNA, 15 bp, Homo sapiens
tttcttctcccaatt

SEQ ID NO: 143028 - DNA, 15 bp, Homo sapiens
ttttcttctcccaat

SEQ ID NO: 143029 - DNA, 15 bp, Homo sapiens
cttttcttctcccaa

SEQ ID NO: 143030 - DNA, 15 bp, Homo sapiens
tcttttcttctccca

SEQ ID NO: 143031 - DNA, 15 bp, Homo sapiens
atcttttcttctccc

SEQ ID NO: 143032 - DNA, 15 bp, Homo sapiens
catcttttcttctcc

SEQ ID NO: 143033 - DNA, 15 bp, Homo sapiens
tcatcttttcttctc

SEQ ID NO: 143034 - DNA, 15 bp, Homo sapiens
atcatcttttcttct

SEQ ID NO: 143035 - DNA, 15 bp, Homo sapiens
tatcatcttttcttc

SEQ ID NO: 143036 - DNA, 15 bp, Homo sapiens
ctatcatcttttctt

SEQ ID NO: 143037 - DNA, 15 bp, Homo sapiens
cctatcatcttttct

SEQ ID NO: 143038 - DNA, 15 bp, Homo sapiens
tcctatcatcttttc

SEQ ID NO: 143039 - DNA, 15 bp, Homo sapiens
gtcctatcatctttt

SEQ ID NO: 143040 - DNA, 15 bp, Homo sapiens
agtcctatcatcttt

SEQ ID NO: 143041 - DNA, 15 bp, Homo sapiens
aagtcctatcatctt

SEQ ID NO: 143042 - DNA, 15 bp, Homo sapiens
gaagtcctatcatct

SEQ ID NO: 143043 - DNA, 15 bp, Homo sapiens
agaagtcctatcatc

SEQ ID NO: 143044 - DNA, 15 bp, Homo sapiens
aagaagtcctatcat

SEQ ID NO: 143045 - DNA, 15 bp, Homo sapiens
caagaagtcctatca

SEQ ID NO: 143046 - DNA, 15 bp, Homo sapiens
tcaagaagtcctatc

SEQ ID NO: 143047 - DNA, 15 bp, Homo sapiens
gtcaagaagtcctat

SEQ ID NO: 143048 - DNA, 15 bp, Homo sapiens
agtcaagaagtccta

SEQ ID NO: 143049 - DNA, 15 bp, Homo sapiens
tagtcaagaagtcct

SEQ ID NO: 143050 - DNA, 15 bp, Homo sapiens
ctagtcaagaagtcc

SEQ ID NO: 143051 - DNA, 15 bp, Homo sapiens
actagtcaagaagtc

SEQ ID NO: 143052 - DNA, 15 bp, Homo sapiens
aactagtcaagaagt

SEQ ID NO: 143053 - DNA, 15 bp, Homo sapiens
gaactagtcaagaag

SEQ ID NO: 143054 - DNA, 15 bp, Homo sapiens
tgaactagtcaagaa

SEQ ID NO: 143055 - DNA, 15 bp, Homo sapiens
ctgaactagtcaaga

SEQ ID NO: 143056 - DNA, 15 bp, Homo sapiens
gctgaactagtcaag

SEQ ID NO: 143057 - DNA, 15 bp, Homo sapiens
ggctgaactagtcaa

SEQ ID NO: 143058 - DNA, 15 bp, Homo sapiens
tggctgaactagtca

SEQ ID NO: 143059 - DNA, 15 bp, Homo sapiens
ctggctgaactagtc

SEQ ID NO: 143060 - DNA, 15 bp, Homo sapiens
actggctgaactagt

SEQ ID NO: 143061 - DNA, 15 bp, Homo sapiens
aactggctgaactag

SEQ ID NO: 143062 - DNA, 15 bp, Homo sapiens
aaactggctgaacta

SEQ ID NO: 143063 - DNA, 15 bp, Homo sapiens
gaaactggctgaact

SEQ ID NO: 143064 - DNA, 15 bp, Homo sapiens
cgaaactggctgaac

SEQ ID NO: 143065 - DNA, 15 bp, Homo sapiens
acgaaactggctgaa

SEQ ID NO: 143066 - DNA, 15 bp, Homo sapiens
cacgaaactggctga

SEQ ID NO: 143067 - DNA, 15 bp, Homo sapiens
tcacgaaactggctg

SEQ ID NO: 143068 - DNA, 15 bp, Homo sapiens
gtcacgaaactggct

SEQ ID NO: 143069 - DNA, 15 bp, Homo sapiens
ggtcacgaaactggc

SEQ ID NO: 143070 - DNA, 15 bp, Homo sapiens
tggtcacgaaactgg

SEQ ID NO: 143071 - DNA, 15 bp, Homo sapiens
atggtcacgaaactg

SEQ ID NO: 143072 - DNA, 15 bp, Homo sapiens
catggtcacgaaact

SEQ ID NO: 143073 - DNA, 15 bp, Homo sapiens
tcatggtcacgaaac

SEQ ID NO: 143074 - DNA, 15 bp, Homo sapiens
gtcatggtcacgaaa

SEQ ID NO: 143075 - DNA, 15 bp, Homo sapiens
ggtcatggtcacgaa

SEQ ID NO: 143076 - DNA, 15 bp, Homo sapiens
aggtcatggtcacga

SEQ ID NO: 143077 - DNA, 15 bp, Homo sapiens
taggtcatggtcacg

SEQ ID NO: 143078 - DNA, 15 bp, Homo sapiens
ctaggtcatggtcac

SEQ ID NO: 143079 - DNA, 15 bp, Homo sapiens
tctaggtcatggtca

SEQ ID NO: 143080 - DNA, 15 bp, Homo sapiens
ttctaggtcatggtc

SEQ ID NO: 143081 - DNA, 15 bp, Homo sapiens
attctaggtcatggt

SEQ ID NO: 143082 - DNA, 15 bp, Homo sapiens
cattctaggtcatgg

SEQ ID NO: 143083 - DNA, 15 bp, Homo sapiens
acgtcaaagagatgt

SEQ ID NO: 143084 - DNA, 15 bp, Homo sapiens
tacgtcaaagagatg

SEQ ID NO: 143085 - DNA, 15 bp, Homo sapiens
gtacgtcaaagagat

SEQ ID NO: 143086 - DNA, 15 bp, Homo sapiens
agtacgtcaaagaga

SEQ ID NO: 143087 - DNA, 15 bp, Homo sapiens
cagtacgtcaaagag

SEQ ID NO: 143088 - DNA, 15 bp, Homo sapiens
tcagtacgtcaaaga

SEQ ID NO: 143089 - DNA, 15 bp, Homo sapiens
atcagtacgtcaaag

SEQ ID NO: 143090 - DNA, 15 bp, Homo sapiens
aatcagtacgtcaaa

SEQ ID NO: 143091 - DNA, 15 bp, Homo sapiens
aaatcagtacgtcaa

SEQ ID NO: 143092 - DNA, 15 bp, Homo sapiens
gaaatcagtacgtca

SEQ ID NO: 143093 - DNA, 15 bp, Homo sapiens
tgaaatcagtacgtc

SEQ ID NO: 143094 - DNA, 15 bp, Homo sapiens
atgaaatcagtacgt

SEQ ID NO: 143095 - DNA, 15 bp, Homo sapiens
aatgaaatcagtacg

SEQ ID NO: 143096 - DNA, 15 bp, Homo sapiens
aaatgaaatcagtac

SEQ ID NO: 143097 - DNA, 15 bp, Homo sapiens
gaaatgaaatcagta

SEQ ID NO: 143098 - DNA, 15 bp, Homo sapiens
ggaaatgaaatcagt

SEQ ID NO: 143099 - DNA, 15 bp, Homo sapiens
aggaaatgaaatcag

SEQ ID NO: 143100 - DNA, 15 bp, Homo sapiens
aaggaaatgaaatca

SEQ ID NO: 143101 - DNA, 15 bp, Homo sapiens
aaaggaaatgaaatc

SEQ ID NO: 143102 - DNA, 15 bp, Homo sapiens
caaaggaaatgaaat

SEQ ID NO: 143103 - DNA, 15 bp, Homo sapiens
ccaaaggaaatgaaa

SEQ ID NO: 143104 - DNA, 15 bp, Homo sapiens
tccaaaggaaatgaa

SEQ ID NO: 143105 - DNA, 15 bp, Homo sapiens
atccaaaggaaatga

SEQ ID NO: 143106 - DNA, 15 bp, Homo sapiens
tatccaaaggaaatg

SEQ ID NO: 143107 - DNA, 15 bp, Homo sapiens
atatccaaaggaaat

SEQ ID NO: 143108 - DNA, 15 bp, Homo sapiens
tatatccaaaggaaa

SEQ ID NO: 143109 - DNA, 15 bp, Homo sapiens
atatatccaaaggaa

SEQ ID NO: 143110 - DNA, 15 bp, Homo sapiens
tatatatccaaagga

SEQ ID NO: 143111 - DNA, 15 bp, Homo sapiens
ttatatatccaaagg

SEQ ID NO: 143112 - DNA, 15 bp, Homo sapiens
gttatatatccaaag

SEQ ID NO: 143113 - DNA, 15 bp, Homo sapiens
ggttatatatccaaa

SEQ ID NO: 143114 - DNA, 15 bp, Homo sapiens
tggttatatatccaa

SEQ ID NO: 143115 - DNA, 15 bp, Homo sapiens
ctggttatatatcca

SEQ ID NO: 143116 - DNA, 15 bp, Homo sapiens
actggttatatatcc

SEQ ID NO: 143117 - DNA, 15 bp, Homo sapiens
tactggttatatatc

SEQ ID NO: 143118 - DNA, 15 bp, Homo sapiens
ctactggttatatat

SEQ ID NO: 143119 - DNA, 15 bp, Homo sapiens
actactggttatata

SEQ ID NO: 143120 - DNA, 15 bp, Homo sapiens
cactactggttatat

SEQ ID NO: 143121 - DNA, 15 bp, Homo sapiens
tcactactggttata

SEQ ID NO: 143122 - DNA, 15 bp, Homo sapiens
ctcactactggttat

SEQ ID NO: 143123 - DNA, 15 bp, Homo sapiens
tctcactactggtta

SEQ ID NO: 143124 - DNA, 15 bp, Homo sapiens
atctcactactggtt

SEQ ID NO: 143125 - DNA, 15 bp, Homo sapiens
aatctcactactggt

SEQ ID NO: 143126 - DNA, 15 bp, Homo sapiens
caatctcactactgg

SEQ ID NO: 143127 - DNA, 15 bp, Homo sapiens
gcaatctcactactg

SEQ ID NO: 143128 - DNA, 15 bp, Homo sapiens
agcaatctcactact

SEQ ID NO: 143129 - DNA, 15 bp, Homo sapiens
cagcaatctcactac

SEQ ID NO: 143130 - DNA, 15 bp, Homo sapiens
ccagcaatctcacta

SEQ ID NO: 143131 - DNA, 15 bp, Homo sapiens
tccagcaatctcact

SEQ ID NO: 143132 - DNA, 15 bp, Homo sapiens
atccagcaatctcac

SEQ ID NO: 143133 - DNA, 15 bp, Homo sapiens
gatccagcaatctca

SEQ ID NO: 143134 - DNA, 15 bp, Homo sapiens
tgatccagcaatctc

SEQ ID NO: 143135 - DNA, 15 bp, Homo sapiens
atgatccagcaatct

SEQ ID NO: 143136 - DNA, 15 bp, Homo sapiens
tatgatccagcaatc

SEQ ID NO: 143137 - DNA, 15 bp, Homo sapiens
atatgatccagcaat

SEQ ID NO: 143138 - DNA, 15 bp, Homo sapiens
catatgatccagcaa

SEQ ID NO: 143139 - DNA, 15 bp, Homo sapiens
ccatatgatccagca

SEQ ID NO: 143140 - DNA, 15 bp, Homo sapiens
accatatgatccagc

SEQ ID NO: 143141 - DNA, 15 bp, Homo sapiens
taccatatgatccag

SEQ ID NO: 143142 - DNA, 15 bp, Homo sapiens
ctaccatatgatcca

SEQ ID NO: 143143 - DNA, 15 bp, Homo sapiens
actaccatatgatcc

SEQ ID NO: 143144 - DNA, 15 bp, Homo sapiens
aactaccatatgatc

SEQ ID NO: 143145 - DNA, 15 bp, Homo sapiens
gaactaccatatgat

SEQ ID NO: 143146 - DNA, 15 bp, Homo sapiens
agaactaccatatga

SEQ ID NO: 143147 - DNA, 15 bp, Homo sapiens
tagaactaccatatg

SEQ ID NO: 143148 - DNA, 15 bp, Homo sapiens
atagaactaccatat

SEQ ID NO: 143149 - DNA, 15 bp, Homo sapiens
aatagaactaccata

SEQ ID NO: 143150 - DNA, 15 bp, Homo sapiens
aaatagaactaccat

SEQ ID NO: 143151 - DNA, 15 bp, Homo sapiens
aaaatagaactacca

SEQ ID NO: 143152 - DNA, 15 bp, Homo sapiens
aaaaatagaactacc

SEQ ID NO: 143153 - DNA, 15 bp, Homo sapiens
caaaaatagaactac

SEQ ID NO: 143154 - DNA, 15 bp, Homo sapiens
tcaaaaatagaacta

SEQ ID NO: 143155 - DNA, 15 bp, Homo sapiens
atcaaaaatagaact

SEQ ID NO: 143156 - DNA, 15 bp, Homo sapiens
aatcaaaaatagaac

SEQ ID NO: 143157 - DNA, 15 bp, Homo sapiens
aaatcaaaaatagaa

SEQ ID NO: 143158 - DNA, 15 bp, Homo sapiens
aaaatcaaaaataga

SEQ ID NO: 143159 - DNA, 15 bp, Homo sapiens
aaaaatcaaaaatag

SEQ ID NO: 143160 - DNA, 15 bp, Homo sapiens
gaaaaatcaaaaata

SEQ ID NO: 143161 - DNA, 15 bp, Homo sapiens
agaaaaatcaaaaat

SEQ ID NO: 143162 - DNA, 15 bp, Homo sapiens
cagaaaaatcaaaaa

SEQ ID NO: 143163 - DNA, 15 bp, Homo sapiens
tcagaaaaatcaaaa

SEQ ID NO: 143164 - DNA, 15 bp, Homo sapiens
ctcagaaaaatcaaa

SEQ ID NO: 143165 - DNA, 15 bp, Homo sapiens
cctcagaaaaatcaa

SEQ ID NO: 143166 - DNA, 15 bp, Homo sapiens
tcctcagaaaaatca

SEQ ID NO: 143167 - DNA, 15 bp, Homo sapiens
ttcctcagaaaaatc

SEQ ID NO: 143168 - DNA, 15 bp, Homo sapiens
gttcctcagaaaaat

SEQ ID NO: 143169 - DNA, 15 bp, Homo sapiens
ggttcctcagaaaaa

SEQ ID NO: 143170 - DNA, 15 bp, Homo sapiens
aggttcctcagaaaa

SEQ ID NO: 143171 - DNA, 15 bp, Homo sapiens
gaggttcctcagaaa

SEQ ID NO: 143172 - DNA, 15 bp, Homo sapiens
ggaggttcctcagaa

SEQ ID NO: 143173 - DNA, 15 bp, Homo sapiens
tggaggttcctcaga

SEQ ID NO: 143174 - DNA, 15 bp, Homo sapiens
atggaggttcctcag

SEQ ID NO: 143175 - DNA, 15 bp, Homo sapiens
tatggaggttcctca

SEQ ID NO: 143176 - DNA, 15 bp, Homo sapiens
gtatggaggttcctc

SEQ ID NO: 143177 - DNA, 15 bp, Homo sapiens
agtatggaggttcct

SEQ ID NO: 143178 - DNA, 15 bp, Homo sapiens
cagtatggaggttcc

SEQ ID NO: 143179 - DNA, 15 bp, Homo sapiens
acagtatggaggttc

SEQ ID NO: 143180 - DNA, 15 bp, Homo sapiens
aacagtatggaggtt

SEQ ID NO: 143181 - DNA, 15 bp, Homo sapiens
aaacagtatggaggt

SEQ ID NO: 143182 - DNA, 15 bp, Homo sapiens
aaaacagtatggagg

SEQ ID NO: 143183 - DNA, 15 bp, Homo sapiens
gaaaacagtatggag

SEQ ID NO: 143184 - DNA, 15 bp, Homo sapiens
ggaaaacagtatgga

SEQ ID NO: 143185 - DNA, 15 bp, Homo sapiens
tggaaaacagtatgg

SEQ ID NO: 143186 - DNA, 15 bp, Homo sapiens
atggaaaacagtatg

SEQ ID NO: 143187 - DNA, 15 bp, Homo sapiens
tatggaaaacagtat

SEQ ID NO: 143188 - DNA, 15 bp, Homo sapiens
ttatggaaaacagta

SEQ ID NO: 143189 - DNA, 15 bp, Homo sapiens
attatggaaaacagt

SEQ ID NO: 143190 - DNA, 15 bp, Homo sapiens
cattatggaaaacag

SEQ ID NO: 143191 - DNA, 15 bp, Homo sapiens
tcattatggaaaaca

SEQ ID NO: 143192 - DNA, 15 bp, Homo sapiens
gtcattatggaaaac

SEQ ID NO: 143193 - DNA, 15 bp, Homo sapiens
agtcattatggaaaa

SEQ ID NO: 143194 - DNA, 15 bp, Homo sapiens
aagtcattatggaaa

SEQ ID NO: 143195 - DNA, 15 bp, Homo sapiens
aaagtcattatggaa

SEQ ID NO: 143196 - DNA, 15 bp, Homo sapiens
taaagtcattatgga

SEQ ID NO: 143197 - DNA, 15 bp, Homo sapiens
ataaagtcattatgg

SEQ ID NO: 143198 - DNA, 15 bp, Homo sapiens
gataaagtcattatg

SEQ ID NO: 143199 - DNA, 15 bp, Homo sapiens
tgataaagtcattat

SEQ ID NO: 143200 - DNA, 15 bp, Homo sapiens
ttgataaagtcatta

SEQ ID NO: 143201 - DNA, 15 bp, Homo sapiens
attgataaagtcatt

SEQ ID NO: 143202 - DNA, 15 bp, Homo sapiens
aattgataaagtcat

SEQ ID NO: 143203 - DNA, 15 bp, Homo sapiens
aaattgataaagtca

SEQ ID NO: 143204 - DNA, 15 bp, Homo sapiens
taaattgataaagtc

SEQ ID NO: 143205 - DNA, 15 bp, Homo sapiens
gtaaattgataaagt

SEQ ID NO: 143206 - DNA, 15 bp, Homo sapiens
tgtaaattgataaag

SEQ ID NO: 143207 - DNA, 15 bp, Homo sapiens
ctgtaaattgataaa

SEQ ID NO: 143208 - DNA, 15 bp, Homo sapiens
actgtaaattgataa

SEQ ID NO: 143209 - DNA, 15 bp, Homo sapiens
gactgtaaattgata

SEQ ID NO: 143210 - DNA, 15 bp, Homo sapiens
ggactgtaaattgat

SEQ ID NO: 143211 - DNA, 15 bp, Homo sapiens
gggactgtaaattga

SEQ ID NO: 143212 - DNA, 15 bp, Homo sapiens
tgggactgtaaattg

SEQ ID NO: 143213 - DNA, 15 bp, Homo sapiens
gtgggactgtaaatt

SEQ ID NO: 143214 - DNA, 15 bp, Homo sapiens
ggtgggactgtaaat

SEQ ID NO: 143215 - DNA, 15 bp, Homo sapiens
tggtgggactgtaaa

SEQ ID NO: 143216 - DNA, 15 bp, Homo sapiens
ttggtgggactgtaa

SEQ ID NO: 143217 - DNA, 15 bp, Homo sapiens
gttggtgggactgta

SEQ ID NO: 143218 - DNA, 15 bp, Homo sapiens
tgttggtgggactgt

SEQ ID NO: 143219 - DNA, 15 bp, Homo sapiens
ctgttggtgggactg

SEQ ID NO: 143220 - DNA, 15 bp, Homo sapiens
actgttggtgggact

SEQ ID NO: 143221 - DNA, 15 bp, Homo sapiens
cactgttggtgggac

SEQ ID NO: 143222 - DNA, 15 bp, Homo sapiens
acactgttggtggga

SEQ ID NO: 143223 - DNA, 15 bp, Homo sapiens
tacactgttggtggg

SEQ ID NO: 143224 - DNA, 15 bp, Homo sapiens
ttacactgttggtgg

SEQ ID NO: 143225 - DNA, 15 bp, Homo sapiens
gttacactgttggtg

SEQ ID NO: 143226 - DNA, 15 bp, Homo sapiens
tgttacactgttggt

SEQ ID NO: 143227 - DNA, 15 bp, Homo sapiens
ctgttacactgttgg

SEQ ID NO: 143228 - DNA, 15 bp, Homo sapiens
cctgttacactgttg

SEQ ID NO: 143229 - DNA, 15 bp, Homo sapiens
ccctgttacactgtt

SEQ ID NO: 143230 - DNA, 15 bp, Homo sapiens
accctgttacactgt

SEQ ID NO: 143231 - DNA, 15 bp, Homo sapiens
aaccctgttacactg

SEQ ID NO: 143232 - DNA, 15 bp, Homo sapiens
gaaccctgttacact

SEQ ID NO: 143233 - DNA, 15 bp, Homo sapiens
agaaccctgttacac

SEQ ID NO: 143234 - DNA, 15 bp, Homo sapiens
gagaaccctgttaca

SEQ ID NO: 143235 - DNA, 15 bp, Homo sapiens
agagaaccctgttac

SEQ ID NO: 143236 - DNA, 15 bp, Homo sapiens
aagagaaccctgtta

SEQ ID NO: 143237 - DNA, 15 bp, Homo sapiens
aaagagaaccctgtt

SEQ ID NO: 143238 - DNA, 15 bp, Homo sapiens
aaaagagaaccctgt

SEQ ID NO: 143239 - DNA, 15 bp, Homo sapiens
gaaaagagaaccctg

SEQ ID NO: 143240 - DNA, 15 bp, Homo sapiens
agaaaagagaaccct

SEQ ID NO: 143241 - DNA, 15 bp, Homo sapiens
aagaaaagagaaccc

SEQ ID NO: 143242 - DNA, 15 bp, Homo sapiens
aaagaaaagagaacc

SEQ ID NO: 143243 - DNA, 15 bp, Homo sapiens
taaagaaaagagaac

SEQ ID NO: 143244 - DNA, 15 bp, Homo sapiens
ataaagaaaagagaa

SEQ ID NO: 143245 - DNA, 15 bp, Homo sapiens
tataaagaaaagaga

SEQ ID NO: 143246 - DNA, 15 bp, Homo sapiens
gtataaagaaaagag

SEQ ID NO: 143247 - DNA, 15 bp, Homo sapiens
ggtataaagaaaaga

SEQ ID NO: 143248 - DNA, 15 bp, Homo sapiens
gggtataaagaaaag

SEQ ID NO: 143249 - DNA, 15 bp, Homo sapiens
tgggtataaagaaaa

SEQ ID NO: 143250 - DNA, 15 bp, Homo sapiens
gtgggtataaagaaa

SEQ ID NO: 143251 - DNA, 15 bp, Homo sapiens
tgtgggtataaagaa

SEQ ID NO: 143252 - DNA, 15 bp, Homo sapiens
gtgtgggtataaaga

SEQ ID NO: 143253 - DNA, 15 bp, Homo sapiens
ggtgtgggtataaag

SEQ ID NO: 143254 - DNA, 15 bp, Homo sapiens
tggtgtgggtataaa

SEQ ID NO: 143255 - DNA, 15 bp, Homo sapiens
ctggtgtgggtataa

SEQ ID NO: 143256 - DNA, 15 bp, Homo sapiens
gctggtgtgggtata

SEQ ID NO: 143257 - DNA, 15 bp, Homo sapiens
tgctggtgtgggtat

SEQ ID NO: 143258 - DNA, 15 bp, Homo sapiens
gtgctggtgtgggta

SEQ ID NO: 143259 - DNA, 15 bp, Homo sapiens
agtgctggtgtgggt

SEQ ID NO: 143260 - DNA, 15 bp, Homo sapiens
aagtgctggtgtggg

SEQ ID NO: 143261 - DNA, 15 bp, Homo sapiens
caagtgctggtgtgg

SEQ ID NO: 143262 - DNA, 15 bp, Homo sapiens
gcaagtgctggtgtg

SEQ ID NO: 143263 - DNA, 15 bp, Homo sapiens
agcaagtgctggtgt

SEQ ID NO: 143264 - DNA, 15 bp, Homo sapiens
gagcaagtgctggtg

SEQ ID NO: 143265 - DNA, 15 bp, Homo sapiens
agagcaagtgctggt

SEQ ID NO: 143266 - DNA, 15 bp, Homo sapiens
gagagcaagtgctgg

SEQ ID NO: 143267 - DNA, 15 bp, Homo sapiens
agagagcaagtgctg

SEQ ID NO: 143268 - DNA, 15 bp, Homo sapiens
gagagagcaagtgct

SEQ ID NO: 143269 - DNA, 15 bp, Homo sapiens
agagagagcaagtgc

SEQ ID NO: 143270 - DNA, 15 bp, Homo sapiens
gagagagagcaagtg

SEQ ID NO: 143271 - DNA, 15 bp, Homo sapiens
agagagagagcaagt

SEQ ID NO: 143272 - DNA, 15 bp, Homo sapiens
agagagagagagaga

SEQ ID NO: 143273 - DNA, 15 bp, Homo sapiens
aagagagagagagag

SEQ ID NO: 143274 - DNA, 15 bp, Homo sapiens
aaagagagagagaga

SEQ ID NO: 143275 - DNA, 15 bp, Homo sapiens
aaaagagagagagag

SEQ ID NO: 143276 - DNA, 15 bp, Homo sapiens
aaaaagagagagaga

SEQ ID NO: 143277 - DNA, 15 bp, Homo sapiens
aaaaaagagagagag

SEQ ID NO: 143278 - DNA, 15 bp, Homo sapiens
aaaaaaagagagaga

SEQ ID NO: 143279 - DNA, 15 bp, Homo sapiens
caaaaaaagagagag

SEQ ID NO: 143280 - DNA, 15 bp, Homo sapiens
gcaaaaaaagagaga

SEQ ID NO: 143281 - DNA, 15 bp, Homo sapiens
agcaaaaaaagagag

SEQ ID NO: 143282 - DNA, 15 bp, Homo sapiens
aagcaaaaaaagaga

SEQ ID NO: 143283 - DNA, 15 bp, Homo sapiens
taagcaaaaaaagag

SEQ ID NO: 143284 - DNA, 15 bp, Homo sapiens
ataagcaaaaaaaga

SEQ ID NO: 143285 - DNA, 15 bp, Homo sapiens
tataagcaaaaaaag

SEQ ID NO: 143286 - DNA, 15 bp, Homo sapiens
ctataagcaaaaaaa

SEQ ID NO: 143287 - DNA, 15 bp, Homo sapiens
gctataagcaaaaaa

SEQ ID NO: 143288 - DNA, 15 bp, Homo sapiens
ggctataagcaaaaa

SEQ ID NO: 143289 - DNA, 15 bp, Homo sapiens
tggctataagcaaaa

SEQ ID NO: 143290 - DNA, 15 bp, Homo sapiens
atggctataagcaaa

SEQ ID NO: 143291 - DNA, 15 bp, Homo sapiens
aatggctataagcaa

SEQ ID NO: 143292 - DNA, 15 bp, Homo sapiens
aaatggctataagca

SEQ ID NO: 143293 - DNA, 15 bp, Homo sapiens
aaaatggctataagc

SEQ ID NO: 143294 - DNA, 15 bp, Homo sapiens
taaaatggctataag

SEQ ID NO: 143295 - DNA, 15 bp, Homo sapiens
ttaaaatggctataa

SEQ ID NO: 143296 - DNA, 15 bp, Homo sapiens
gttaaaatggctata

SEQ ID NO: 143297 - DNA, 15 bp, Homo sapiens
tgttaaaatggctat

SEQ ID NO: 143298 - DNA, 15 bp, Homo sapiens
ctgttaaaatggcta

SEQ ID NO: 143299 - DNA, 15 bp, Homo sapiens
cctgttaaaatggct

SEQ ID NO: 143300 - DNA, 15 bp, Homo sapiens
acctgttaaaatggc

SEQ ID NO: 143301 - DNA, 15 bp, Homo sapiens
cacctgttaaaatgg

SEQ ID NO: 143302 - DNA, 15 bp, Homo sapiens
acacctgttaaaatg

SEQ ID NO: 143303 - DNA, 15 bp, Homo sapiens
cacacctgttaaaat

SEQ ID NO: 143304 - DNA, 15 bp, Homo sapiens
tcacacctgttaaaa

SEQ ID NO: 143305 - DNA, 15 bp, Homo sapiens
ctcacacctgttaaa

SEQ ID NO: 143306 - DNA, 15 bp, Homo sapiens
cctcacacctgttaa

SEQ ID NO: 143307 - DNA, 15 bp, Homo sapiens
acctcacacctgtta

SEQ ID NO: 143308 - DNA, 15 bp, Homo sapiens
aacctcacacctgtt

SEQ ID NO: 143309 - DNA, 15 bp, Homo sapiens
taacctcacacctgt

SEQ ID NO: 143310 - DNA, 15 bp, Homo sapiens
ataacctcacacctg

SEQ ID NO: 143311 - DNA, 15 bp, Homo sapiens
tataacctcacacct

SEQ ID NO: 143312 - DNA, 15 bp, Homo sapiens
ttataacctcacacc

SEQ ID NO: 143313 - DNA, 15 bp, Homo sapiens
gttataacctcacac

SEQ ID NO: 143314 - DNA, 15 bp, Homo sapiens
agttataacctcaca

SEQ ID NO: 143315 - DNA, 15 bp, Homo sapiens
gagttataacctcac

SEQ ID NO: 143316 - DNA, 15 bp, Homo sapiens
tgagttataacctca

SEQ ID NO: 143317 - DNA, 15 bp, Homo sapiens
atgagttataacctc

SEQ ID NO: 143318 - DNA, 15 bp, Homo sapiens
gatgagttataacct

SEQ ID NO: 143319 - DNA, 15 bp, Homo sapiens
cgatgagttataacc

SEQ ID NO: 143320 - DNA, 15 bp, Homo sapiens
acgatgagttataac

SEQ ID NO: 143321 - DNA, 15 bp, Homo sapiens
cacgatgagttataa

SEQ ID NO: 143322 - DNA, 15 bp, Homo sapiens
ccacgatgagttata

SEQ ID NO: 143323 - DNA, 15 bp, Homo sapiens
gccacgatgagttat

SEQ ID NO: 143324 - DNA, 15 bp, Homo sapiens
agccacgatgagtta

SEQ ID NO: 143325 - DNA, 15 bp, Homo sapiens
aagccacgatgagtt

SEQ ID NO: 143326 - DNA, 15 bp, Homo sapiens
aaagccacgatgagt

SEQ ID NO: 143327 - DNA, 15 bp, Homo sapiens
caaagccacgatgag

SEQ ID NO: 143328 - DNA, 15 bp, Homo sapiens
tcaaagccacgatga

SEQ ID NO: 143329 - DNA, 15 bp, Homo sapiens
atcaaagccacgatg

SEQ ID NO: 143330 - DNA, 15 bp, Homo sapiens
aatcaaagccacgat

SEQ ID NO: 143331 - DNA, 15 bp, Homo sapiens
caatcaaagccacga

SEQ ID NO: 143332 - DNA, 15 bp, Homo sapiens
acaatcaaagccacg

SEQ ID NO: 143333 - DNA, 15 bp, Homo sapiens
cacaatcaaagccac

SEQ ID NO: 143334 - DNA, 15 bp, Homo sapiens
acacaatcaaagcca

SEQ ID NO: 143335 - DNA, 15 bp, Homo sapiens
tacacaatcaaagcc

SEQ ID NO: 143336 - DNA, 15 bp, Homo sapiens
ctacacaatcaaagc

SEQ ID NO: 143337 - DNA, 15 bp, Homo sapiens
gctacacaatcaaag

SEQ ID NO: 143338 - DNA, 15 bp, Homo sapiens
ggctacacaatcaaa

SEQ ID NO: 143339 - DNA, 15 bp, Homo sapiens
gggctacacaatcaa

SEQ ID NO: 143340 - DNA, 15 bp, Homo sapiens
agggctacacaatca

SEQ ID NO: 143341 - DNA, 15 bp, Homo sapiens
cagggctacacaatc

SEQ ID NO: 143342 - DNA, 15 bp, Homo sapiens
tcagggctacacaat

SEQ ID NO: 143343 - DNA, 15 bp, Homo sapiens
atcagggctacacaa

SEQ ID NO: 143344 - DNA, 15 bp, Homo sapiens
catcagggctacaca

SEQ ID NO: 143345 - DNA, 15 bp, Homo sapiens
tcatcagggctacac

SEQ ID NO: 143346 - DNA, 15 bp, Homo sapiens
atcatcagggctaca

SEQ ID NO: 143347 - DNA, 15 bp, Homo sapiens
aatcatcagggctac

SEQ ID NO: 143348 - DNA, 15 bp, Homo sapiens
taatcatcagggcta

SEQ ID NO: 143349 - DNA, 15 bp, Homo sapiens
ctaatcatcagggct

SEQ ID NO: 143350 - DNA, 15 bp, Homo sapiens
actaatcatcagggc

SEQ ID NO: 143351 - DNA, 15 bp, Homo sapiens
cactaatcatcaggg

SEQ ID NO: 143352 - DNA, 15 bp, Homo sapiens
tcactaatcatcagg

SEQ ID NO: 143353 - DNA, 15 bp, Homo sapiens
atcactaatcatcag

SEQ ID NO: 143354 - DNA, 15 bp, Homo sapiens
catcactaatcatca

SEQ ID NO: 143355 - DNA, 15 bp, Homo sapiens
acatcactaatcatc

SEQ ID NO: 143356 - DNA, 15 bp, Homo sapiens
aacatcactaatcat

SEQ ID NO: 143357 - DNA, 15 bp, Homo sapiens
caacatcactaatca

SEQ ID NO: 143358 - DNA, 15 bp, Homo sapiens
tcaacatcactaatc

SEQ ID NO: 143359 - DNA, 15 bp, Homo sapiens
ctcaacatcactaat

SEQ ID NO: 143360 - DNA, 15 bp, Homo sapiens
gctcaacatcactaa

SEQ ID NO: 143361 - DNA, 15 bp, Homo sapiens
tgctcaacatcacta

SEQ ID NO: 143362 - DNA, 15 bp, Homo sapiens
gtgctcaacatcact

SEQ ID NO: 143363 - DNA, 15 bp, Homo sapiens
ggtgctcaacatcac

SEQ ID NO: 143364 - DNA, 15 bp, Homo sapiens
aggtgctcaacatca

SEQ ID NO: 143365 - DNA, 15 bp, Homo sapiens
aaggtgctcaacatc

SEQ ID NO: 143366 - DNA, 15 bp, Homo sapiens
aaaggtgctcaacat

SEQ ID NO: 143367 - DNA, 15 bp, Homo sapiens
aaaaggtgctcaaca

SEQ ID NO: 143368 - DNA, 15 bp, Homo sapiens
aaaaaggtgctcaac

SEQ ID NO: 143369 - DNA, 15 bp, Homo sapiens
taaaaaggtgctcaa

SEQ ID NO: 143370 - DNA, 15 bp, Homo sapiens
ataaaaaggtgctca

SEQ ID NO: 143371 - DNA, 15 bp, Homo sapiens
tataaaaaggtgctc

SEQ ID NO: 143372 - DNA, 15 bp, Homo sapiens
atataaaaaggtgct

SEQ ID NO: 143373 - DNA, 15 bp, Homo sapiens
tatataaaaaggtgc

SEQ ID NO: 143374 - DNA, 15 bp, Homo sapiens
gtatataaaaaggtg

SEQ ID NO: 143375 - DNA, 15 bp, Homo sapiens
ggtatataaaaaggt

SEQ ID NO: 143376 - DNA, 15 bp, Homo sapiens
aggtatataaaaagg

SEQ ID NO: 143377 - DNA, 15 bp, Homo sapiens
caggtatataaaaag

SEQ ID NO: 143378 - DNA, 15 bp, Homo sapiens
acaggtatataaaaa

SEQ ID NO: 143379 - DNA, 15 bp, Homo sapiens
cacaggtatataaaa

SEQ ID NO: 143380 - DNA, 15 bp, Homo sapiens
ccacaggtatataaa

SEQ ID NO: 143381 - DNA, 15 bp, Homo sapiens
cccacaggtatataa

SEQ ID NO: 143382 - DNA, 15 bp, Homo sapiens
gcccacaggtatata

SEQ ID NO: 143383 - DNA, 15 bp, Homo sapiens
ggcccacaggtatat

SEQ ID NO: 143384 - DNA, 15 bp, Homo sapiens
tggcccacaggtata

SEQ ID NO: 143385 - DNA, 15 bp, Homo sapiens
atggcccacaggtat

SEQ ID NO: 143386 - DNA, 15 bp, Homo sapiens
aatggcccacaggta

SEQ ID NO: 143387 - DNA, 15 bp, Homo sapiens
aaatggcccacaggt

SEQ ID NO: 143388 - DNA, 15 bp, Homo sapiens
caaatggcccacagg

SEQ ID NO: 143389 - DNA, 15 bp, Homo sapiens
acaaatggcccacag

SEQ ID NO: 143390 - DNA, 15 bp, Homo sapiens
tacaaatggcccaca

SEQ ID NO: 143391 - DNA, 15 bp, Homo sapiens
atacaaatggcccac

SEQ ID NO: 143392 - DNA, 15 bp, Homo sapiens
catacaaatggccca

SEQ ID NO: 143393 - DNA, 15 bp, Homo sapiens
gcatacaaatggccc

SEQ ID NO: 143394 - DNA, 15 bp, Homo sapiens
ggcatacaaatggcc

SEQ ID NO: 143395 - DNA, 15 bp, Homo sapiens
aggcatacaaatggc

SEQ ID NO: 143396 - DNA, 15 bp, Homo sapiens
aaggcatacaaatgg

SEQ ID NO: 143397 - DNA, 15 bp, Homo sapiens
gaaggcatacaaatg

SEQ ID NO: 143398 - DNA, 15 bp, Homo sapiens
ggaaggcatacaaat

SEQ ID NO: 143399 - DNA, 15 bp, Homo sapiens
aggaaggcatacaaa

SEQ ID NO: 143400 - DNA, 15 bp, Homo sapiens
aaggaaggcatacaa

SEQ ID NO: 143401 - DNA, 15 bp, Homo sapiens
caaggaaggcataca

SEQ ID NO: 143402 - DNA, 15 bp, Homo sapiens
ccaaggaaggcatac

SEQ ID NO: 143403 - DNA, 15 bp, Homo sapiens
tccaaggaaggcata

SEQ ID NO: 143404 - DNA, 15 bp, Homo sapiens
ttccaaggaaggcat

SEQ ID NO: 143405 - DNA, 15 bp, Homo sapiens
tttccaaggaaggca

SEQ ID NO: 143406 - DNA, 15 bp, Homo sapiens
ttttccaaggaaggc

SEQ ID NO: 143407 - DNA, 15 bp, Homo sapiens
tttttccaaggaagg

SEQ ID NO: 143408 - DNA, 15 bp, Homo sapiens
atttttccaaggaag

SEQ ID NO: 143409 - DNA, 15 bp, Homo sapiens
catttttccaaggaa

SEQ ID NO: 143410 - DNA, 15 bp, Homo sapiens
acatttttccaagga

SEQ ID NO: 143411 - DNA, 15 bp, Homo sapiens
gacatttttccaagg

SEQ ID NO: 143412 - DNA, 15 bp, Homo sapiens
agacatttttccaag

SEQ ID NO: 143413 - DNA, 15 bp, Homo sapiens
tagacatttttccaa

SEQ ID NO: 143414 - DNA, 15 bp, Homo sapiens
atagacatttttcca

SEQ ID NO: 143415 - DNA, 15 bp, Homo sapiens
catagacatttttcc

SEQ ID NO: 143416 - DNA, 15 bp, Homo sapiens
gcatagacatttttc

SEQ ID NO: 143417 - DNA, 15 bp, Homo sapiens
tgcatagacattttt

SEQ ID NO: 143418 - DNA, 15 bp, Homo sapiens
ttgcatagacatttt

SEQ ID NO: 143419 - DNA, 15 bp, Homo sapiens
gttgcatagacattt

SEQ ID NO: 143420 - DNA, 15 bp, Homo sapiens
cgttgcatagacatt

SEQ ID NO: 143421 - DNA, 15 bp, Homo sapiens
ccgttgcatagacat

SEQ ID NO: 143422 - DNA, 15 bp, Homo sapiens
accgttgcatagaca

SEQ ID NO: 143423 - DNA, 15 bp, Homo sapiens
aaccgttgcatagac

SEQ ID NO: 143424 - DNA, 15 bp, Homo sapiens
gaaccgttgcataga

SEQ ID NO: 143425 - DNA, 15 bp, Homo sapiens
agaaccgttgcatag

SEQ ID NO: 143426 - DNA, 15 bp, Homo sapiens
aagaaccgttgcata

SEQ ID NO: 143427 - DNA, 15 bp, Homo sapiens
aaagaaccgttgcat

SEQ ID NO: 143428 - DNA, 15 bp, Homo sapiens
aaaagaaccgttgca

SEQ ID NO: 143429 - DNA, 15 bp, Homo sapiens
aaaaagaaccgttgc

SEQ ID NO: 143430 - DNA, 15 bp, Homo sapiens
caaaaagaaccgttg

SEQ ID NO: 143431 - DNA, 15 bp, Homo sapiens
tcaaaaagaaccgtt

SEQ ID NO: 143432 - DNA, 15 bp, Homo sapiens
atcaaaaagaaccgt

SEQ ID NO: 143433 - DNA, 15 bp, Homo sapiens
tatcaaaaagaaccg

SEQ ID NO: 143434 - DNA, 15 bp, Homo sapiens
ctatcaaaaagaacc

SEQ ID NO: 143435 - DNA, 15 bp, Homo sapiens
tctatcaaaaagaac

SEQ ID NO: 143436 - DNA, 15 bp, Homo sapiens
ctctatcaaaaagaa

SEQ ID NO: 143437 - DNA, 15 bp, Homo sapiens
tctctatcaaaaaga

SEQ ID NO: 143438 - DNA, 15 bp, Homo sapiens
atctctatcaaaaag

SEQ ID NO: 143439 - DNA, 15 bp, Homo sapiens
catctctatcaaaaa

SEQ ID NO: 143440 - DNA, 15 bp, Homo sapiens
acatctctatcaaaa

SEQ ID NO: 143441 - DNA, 15 bp, Homo sapiens
aacatctctatcaaa

SEQ ID NO: 143442 - DNA, 15 bp, Homo sapiens
taacatctctatcaa

SEQ ID NO: 143443 - DNA, 15 bp, Homo sapiens
ttaacatctctatca

SEQ ID NO: 143444 - DNA, 15 bp, Homo sapiens
tttaacatctctatc

SEQ ID NO: 143445 - DNA, 15 bp, Homo sapiens
atttaacatctctat

SEQ ID NO: 143446 - DNA, 15 bp, Homo sapiens
tatttaacatctcta

SEQ ID NO: 143447 - DNA, 15 bp, Homo sapiens
ttatttaacatctct

SEQ ID NO: 143448 - DNA, 15 bp, Homo sapiens
tttatttaacatctc

SEQ ID NO: 143449 - DNA, 15 bp, Homo sapiens
ctttatttaacatct

SEQ ID NO: 143450 - DNA, 15 bp, Homo sapiens
gctttatttaacatc

SEQ ID NO: 143451 - DNA, 15 bp, Homo sapiens
tgctttatttaacat

SEQ ID NO: 143452 - DNA, 15 bp, Homo sapiens
ctgctttatttaaca

SEQ ID NO: 143453 - DNA, 15 bp, Homo sapiens
actgctttatttaac

SEQ ID NO: 143454 - DNA, 15 bp, Homo sapiens
aactgctttatttaa

SEQ ID NO: 143455 - DNA, 15 bp, Homo sapiens
gaactgctttattta

SEQ ID NO: 143456 - DNA, 15 bp, Homo sapiens
agaactgctttattt

SEQ ID NO: 143457 - DNA, 15 bp, Homo sapiens
cagaactgctttatt

SEQ ID NO: 143458 - DNA, 15 bp, Homo sapiens
ccagaactgctttat

SEQ ID NO: 143459 - DNA, 15 bp, Homo sapiens
cccagaactgcttta

SEQ ID NO: 143460 - DNA, 15 bp, Homo sapiens
gcccagaactgcttt

SEQ ID NO: 143461 - DNA, 15 bp, Homo sapiens
tgcccagaactgctt

SEQ ID NO: 143462 - DNA, 15 bp, Homo sapiens
ctgcccagaactgct

SEQ ID NO: 143463 - DNA, 15 bp, Homo sapiens
tctgcccagaactgc

SEQ ID NO: 143464 - DNA, 15 bp, Homo sapiens
ctctgcccagaactg

SEQ ID NO: 143465 - DNA, 15 bp, Homo sapiens
cctctgcccagaact

SEQ ID NO: 143466 - DNA, 15 bp, Homo sapiens
ccctctgcccagaac

SEQ ID NO: 143467 - DNA, 15 bp, Homo sapiens
tccctctgcccagaa

SEQ ID NO: 143468 - DNA, 15 bp, Homo sapiens
ctccctctgcccaga

SEQ ID NO: 143469 - DNA, 15 bp, Homo sapiens
tctccctctgcccag

SEQ ID NO: 143470 - DNA, 15 bp, Homo sapiens
atctccctctgccca

SEQ ID NO: 143471 - DNA, 15 bp, Homo sapiens
gatctccctctgccc

SEQ ID NO: 143472 - DNA, 15 bp, Homo sapiens
tgatctccctctgcc

SEQ ID NO: 143473 - DNA, 15 bp, Homo sapiens
ttgatctccctctgc

SEQ ID NO: 143474 - DNA, 15 bp, Homo sapiens
attgatctccctctg

SEQ ID NO: 143475 - DNA, 15 bp, Homo sapiens
cattgatctccctct

SEQ ID NO: 143476 - DNA, 15 bp, Homo sapiens
gcattgatctccctc

SEQ ID NO: 143477 - DNA, 15 bp, Homo sapiens
tgcattgatctccct

SEQ ID NO: 143478 - DNA, 15 bp, Homo sapiens
ttgcattgatctccc

SEQ ID NO: 143479 - DNA, 15 bp, Homo sapiens
cttgcattgatctcc

SEQ ID NO: 143480 - DNA, 15 bp, Homo sapiens
acttgcattgatctc

SEQ ID NO: 143481 - DNA, 15 bp, Homo sapiens
cacttgcattgatct

SEQ ID NO: 143482 - DNA, 15 bp, Homo sapiens
acacttgcattgatc

SEQ ID NO: 143483 - DNA, 15 bp, Homo sapiens
gacacttgcattgat

SEQ ID NO: 143484 - DNA, 15 bp, Homo sapiens
agacacttgcattga

SEQ ID NO: 143485 - DNA, 15 bp, Homo sapiens
tagacacttgcattg

SEQ ID NO: 143486 - DNA, 15 bp, Homo sapiens
atagacacttgcatt

SEQ ID NO: 143487 - DNA, 15 bp, Homo sapiens
tatagacacttgcat

SEQ ID NO: 143488 - DNA, 15 bp, Homo sapiens
ttatagacacttgca

SEQ ID NO: 143489 - DNA, 15 bp, Homo sapiens
gttatagacacttgc

SEQ ID NO: 143490 - DNA, 15 bp, Homo sapiens
tgttatagacacttg

SEQ ID NO: 143491 - DNA, 15 bp, Homo sapiens
ctgttatagacactt

SEQ ID NO: 143492 - DNA, 15 bp, Homo sapiens
cctgttatagacact

SEQ ID NO: 143493 - DNA, 15 bp, Homo sapiens
gcctgttatagacac

SEQ ID NO: 143494 - DNA, 15 bp, Homo sapiens
agcctgttatagaca

SEQ ID NO: 143495 - DNA, 15 bp, Homo sapiens
cagcctgttatagac

SEQ ID NO: 143496 - DNA, 15 bp, Homo sapiens
tcagcctgttataga

SEQ ID NO: 143497 - DNA, 15 bp, Homo sapiens
ctcagcctgttatag

SEQ ID NO: 143498 - DNA, 15 bp, Homo sapiens
tctcagcctgttata

SEQ ID NO: 143499 - DNA, 15 bp, Homo sapiens
ctctcagcctgttat

SEQ ID NO: 143500 - DNA, 15 bp, Homo sapiens
actctcagcctgtta

SEQ ID NO: 143501 - DNA, 15 bp, Homo sapiens
aactctcagcctgtt

SEQ ID NO: 143502 - DNA, 15 bp, Homo sapiens
caactctcagcctgt

SEQ ID NO: 143503 - DNA, 15 bp, Homo sapiens
tcaactctcagcctg

SEQ ID NO: 143504 - DNA, 15 bp, Homo sapiens
atcaactctcagcct

SEQ ID NO: 143505 - DNA, 15 bp, Homo sapiens
aatcaactctcagcc

SEQ ID NO: 143506 - DNA, 15 bp, Homo sapiens
gaatcaactctcagc

SEQ ID NO: 143507 - DNA, 15 bp, Homo sapiens
tgaatcaactctcag

SEQ ID NO: 143508 - DNA, 15 bp, Homo sapiens
gtgaatcaactctca

SEQ ID NO: 143509 - DNA, 15 bp, Homo sapiens
agtgaatcaactctc

SEQ ID NO: 143510 - DNA, 15 bp, Homo sapiens
cagtgaatcaactct

SEQ ID NO: 143511 - DNA, 15 bp, Homo sapiens
ccagtgaatcaactc

SEQ ID NO: 143512 - DNA, 15 bp, Homo sapiens
accagtgaatcaact

SEQ ID NO: 143513 - DNA, 15 bp, Homo sapiens
caccagtgaatcaac

SEQ ID NO: 143514 - DNA, 15 bp, Homo sapiens
tcaccagtgaatcaa

SEQ ID NO: 143515 - DNA, 15 bp, Homo sapiens
ttcaccagtgaatca

SEQ ID NO: 143516 - DNA, 15 bp, Homo sapiens
gttcaccagtgaatc

SEQ ID NO: 143517 - DNA, 15 bp, Homo sapiens
tgttcaccagtgaat

SEQ ID NO: 143518 - DNA, 15 bp, Homo sapiens
ctgttcaccagtgaa

SEQ ID NO: 143519 - DNA, 15 bp, Homo sapiens
cctgttcaccagtga

SEQ ID NO: 143520 - DNA, 15 bp, Homo sapiens
tcctgttcaccagtg

SEQ ID NO: 143521 - DNA, 15 bp, Homo sapiens
gtcctgttcaccagt

SEQ ID NO: 143522 - DNA, 15 bp, Homo sapiens
tgtcctgttcaccag

SEQ ID NO: 143523 - DNA, 15 bp, Homo sapiens
ttgtcctgttcacca

SEQ ID NO: 143524 - DNA, 15 bp, Homo sapiens
gttgtcctgttcacc

SEQ ID NO: 143525 - DNA, 15 bp, Homo sapiens
ggttgtcctgttcac

SEQ ID NO: 143526 - DNA, 15 bp, Homo sapiens
tggttgtcctgttca

SEQ ID NO: 143527 - DNA, 15 bp, Homo sapiens
ttggttgtcctgttc

SEQ ID NO: 143528 - DNA, 15 bp, Homo sapiens
cttggttgtcctgtt

SEQ ID NO: 143529 - DNA, 15 bp, Homo sapiens
ccttggttgtcctgt

SEQ ID NO: 143530 - DNA, 15 bp, Homo sapiens
accttggttgtcctg

SEQ ID NO: 143531 - DNA, 15 bp, Homo sapiens
gaccttggttgtcct

SEQ ID NO: 143532 - DNA, 15 bp, Homo sapiens
ggaccttggttgtcc

SEQ ID NO: 143533 - DNA, 15 bp, Homo sapiens
gggaccttggttgtc

SEQ ID NO: 143534 - DNA, 15 bp, Homo sapiens
agggaccttggttgt

SEQ ID NO: 143535 - DNA, 15 bp, Homo sapiens
cagggaccttggttg

SEQ ID NO: 143536 - DNA, 15 bp, Homo sapiens
gcagggaccttggtt

SEQ ID NO: 143537 - DNA, 15 bp, Homo sapiens
ggcagggaccttggt

SEQ ID NO: 143538 - DNA, 15 bp, Homo sapiens
gggcagggaccttgg

SEQ ID NO: 143539 - DNA, 15 bp, Homo sapiens
agggcagggaccttg

SEQ ID NO: 143540 - DNA, 15 bp, Homo sapiens
gagggcagggacctt

SEQ ID NO: 143541 - DNA, 15 bp, Homo sapiens
tgagggcagggacct

SEQ ID NO: 143542 - DNA, 15 bp, Homo sapiens
ctgagggcagggacc

SEQ ID NO: 143543 - DNA, 15 bp, Homo sapiens
tctgagggcagggac

SEQ ID NO: 143544 - DNA, 15 bp, Homo sapiens
ctctgagggcaggga

SEQ ID NO: 143545 - DNA, 15 bp, Homo sapiens
cctctgagggcaggg

SEQ ID NO: 143546 - DNA, 15 bp, Homo sapiens
acctctgagggcagg

SEQ ID NO: 143547 - DNA, 15 bp, Homo sapiens
gacctctgagggcag

SEQ ID NO: 143548 - DNA, 15 bp, Homo sapiens
agacctctgagggca

SEQ ID NO: 143549 - DNA, 15 bp, Homo sapiens
cagacctctgagggc

SEQ ID NO: 143550 - DNA, 15 bp, Homo sapiens
tcagacctctgaggg

SEQ ID NO: 143551 - DNA, 15 bp, Homo sapiens
ctcagacctctgagg

SEQ ID NO: 143552 - DNA, 15 bp, Homo sapiens
gctcagacctctgag

SEQ ID NO: 143553 - DNA, 15 bp, Homo sapiens
tgctcagacctctga

SEQ ID NO: 143554 - DNA, 15 bp, Homo sapiens
ttgctcagacctctg

SEQ ID NO: 143555 - DNA, 15 bp, Homo sapiens
attgctcagacctct

SEQ ID NO: 143556 - DNA, 15 bp, Homo sapiens
aattgctcagacctc

SEQ ID NO: 143557 - DNA, 15 bp, Homo sapiens
gaattgctcagacct

SEQ ID NO: 143558 - DNA, 15 bp, Homo sapiens
ggaattgctcagacc

SEQ ID NO: 143559 - DNA, 15 bp, Homo sapiens
tggaattgctcagac

SEQ ID NO: 143560 - DNA, 15 bp, Homo sapiens
atggaattgctcaga

SEQ ID NO: 143561 - DNA, 15 bp, Homo sapiens
gatggaattgctcag

SEQ ID NO: 143562 - DNA, 15 bp, Homo sapiens
tgatggaattgctca

SEQ ID NO: 143563 - DNA, 15 bp, Homo sapiens
atgatggaattgctc

SEQ ID NO: 143564 - DNA, 15 bp, Homo sapiens
gatgatggaattgct

SEQ ID NO: 143565 - DNA, 15 bp, Homo sapiens
tgatgatggaattgc

SEQ ID NO: 143566 - DNA, 15 bp, Homo sapiens
ctgatgatggaattg

SEQ ID NO: 143567 - DNA, 15 bp, Homo sapiens
actgatgatggaatt

SEQ ID NO: 143568 - DNA, 15 bp, Homo sapiens
cactgatgatggaat

SEQ ID NO: 143569 - DNA, 15 bp, Homo sapiens
tcactgatgatggaa

SEQ ID NO: 143570 - DNA, 15 bp, Homo sapiens
gtcactgatgatgga

SEQ ID NO: 143571 - DNA, 15 bp, Homo sapiens
agtcactgatgatgg

SEQ ID NO: 143572 - DNA, 15 bp, Homo sapiens
tagtcactgatgatg

SEQ ID NO: 143573 - DNA, 15 bp, Homo sapiens
ctagtcactgatgat

SEQ ID NO: 143574 - DNA, 15 bp, Homo sapiens
tctagtcactgatga

SEQ ID NO: 143575 - DNA, 15 bp, Homo sapiens
atctagtcactgatg

SEQ ID NO: 143576 - DNA, 15 bp, Homo sapiens
aatctagtcactgat

SEQ ID NO: 143577 - DNA, 15 bp, Homo sapiens
caatctagtcactga

SEQ ID NO: 143578 - DNA, 15 bp, Homo sapiens
tcaatctagtcactg

SEQ ID NO: 143579 - DNA, 15 bp, Homo sapiens
ttcaatctagtcact

SEQ ID NO: 143580 - DNA, 15 bp, Homo sapiens
gttcaatctagtcac

SEQ ID NO: 143581 - DNA, 15 bp, Homo sapiens
tgttcaatctagtca

SEQ ID NO: 143582 - DNA, 15 bp, Homo sapiens
ctgttcaatctagtc

SEQ ID NO: 143583 - DNA, 15 bp, Homo sapiens
tctgttcaatctagt

SEQ ID NO: 143584 - DNA, 15 bp, Homo sapiens
atctgttcaatctag

SEQ ID NO: 143585 - DNA, 15 bp, Homo sapiens
tatctgttcaatcta

SEQ ID NO: 143586 - DNA, 15 bp, Homo sapiens
ttatctgttcaatct

SEQ ID NO: 143587 - DNA, 15 bp, Homo sapiens
attatctgttcaatc

SEQ ID NO: 143588 - DNA, 15 bp, Homo sapiens
gattatctgttcaat

SEQ ID NO: 143589 - DNA, 15 bp, Homo sapiens
ggattatctgttcaa

SEQ ID NO: 143590 - DNA, 15 bp, Homo sapiens
gggattatctgttca

SEQ ID NO: 143591 - DNA, 15 bp, Homo sapiens
ggggattatctgttc

SEQ ID NO: 143592 - DNA, 15 bp, Homo sapiens
aggggattatctgtt

SEQ ID NO: 143593 - DNA, 15 bp, Homo sapiens
gaggggattatctgt

SEQ ID NO: 143594 - DNA, 15 bp, Homo sapiens
agaggggattatctg

SEQ ID NO: 143595 - DNA, 15 bp, Homo sapiens
aagaggggattatct

SEQ ID NO: 143596 - DNA, 15 bp, Homo sapiens
taagaggggattatc

SEQ ID NO: 143597 - DNA, 15 bp, Homo sapiens
gtaagaggggattat

SEQ ID NO: 143598 - DNA, 15 bp, Homo sapiens
tgtaagaggggatta

SEQ ID NO: 143599 - DNA, 15 bp, Homo sapiens
gtgtaagaggggatt

SEQ ID NO: 143600 - DNA, 15 bp, Homo sapiens
tgtgtaagaggggat

SEQ ID NO: 143601 - DNA, 15 bp, Homo sapiens
gtgtgtaagagggga

SEQ ID NO: 143602 - DNA, 15 bp, Homo sapiens
cgtgtgtaagagggg

SEQ ID NO: 143603 - DNA, 15 bp, Homo sapiens
acgtgtgtaagaggg

SEQ ID NO: 143604 - DNA, 15 bp, Homo sapiens
tacgtgtgtaagagg

SEQ ID NO: 143605 - DNA, 15 bp, Homo sapiens
atacgtgtgtaagag

SEQ ID NO: 143606 - DNA, 15 bp, Homo sapiens
tatacgtgtgtaaga

SEQ ID NO: 143607 - DNA, 15 bp, Homo sapiens
atatacgtgtgtaag

SEQ ID NO: 143608 - DNA, 15 bp, Homo sapiens
catatacgtgtgtaa

SEQ ID NO: 143609 - DNA, 15 bp, Homo sapiens
gcatatacgtgtgta

SEQ ID NO: 143610 - DNA, 15 bp, Homo sapiens
tgcatatacgtgtgt

SEQ ID NO: 143611 - DNA, 15 bp, Homo sapiens
gtgcatatacgtgtg

SEQ ID NO: 143612 - DNA, 15 bp, Homo sapiens
tgtgcatatacgtgt

SEQ ID NO: 143613 - DNA, 15 bp, Homo sapiens
gtgtgcatatacgtg

SEQ ID NO: 143614 - DNA, 15 bp, Homo sapiens
agtgtgcatatacgt

SEQ ID NO: 143615 - DNA, 15 bp, Homo sapiens
aagtgtgcatatacg

SEQ ID NO: 143616 - DNA, 15 bp, Homo sapiens
gaagtgtgcatatac

SEQ ID NO: 143617 - DNA, 15 bp, Homo sapiens
tgaagtgtgcatata

SEQ ID NO: 143618 - DNA, 15 bp, Homo sapiens
ctgaagtgtgcatat

SEQ ID NO: 143619 - DNA, 15 bp, Homo sapiens
gctgaagtgtgcata

SEQ ID NO: 143620 - DNA, 15 bp, Homo sapiens
ggctgaagtgtgcat

SEQ ID NO: 143621 - DNA, 15 bp, Homo sapiens
aggctgaagtgtgca

SEQ ID NO: 143622 - DNA, 15 bp, Homo sapiens
caggctgaagtgtgc

SEQ ID NO: 143623 - DNA, 15 bp, Homo sapiens
ccaggctgaagtgtg

SEQ ID NO: 143624 - DNA, 15 bp, Homo sapiens
tccaggctgaagtgt

SEQ ID NO: 143625 - DNA, 15 bp, Homo sapiens
ctccaggctgaagtg

SEQ ID NO: 143626 - DNA, 15 bp, Homo sapiens
actccaggctgaagt

SEQ ID NO: 143627 - DNA, 15 bp, Homo sapiens
cactccaggctgaag

SEQ ID NO: 143628 - DNA, 15 bp, Homo sapiens
acactccaggctgaa

SEQ ID NO: 143629 - DNA, 15 bp, Homo sapiens
cacactccaggctga

SEQ ID NO: 143630 - DNA, 15 bp, Homo sapiens
tcacactccaggctg

SEQ ID NO: 143631 - DNA, 15 bp, Homo sapiens
atcacactccaggct

SEQ ID NO: 143632 - DNA, 15 bp, Homo sapiens
catcacactccaggc

SEQ ID NO: 143633 - DNA, 15 bp, Homo sapiens
tcatcacactccagg

SEQ ID NO: 143634 - DNA, 15 bp, Homo sapiens
ctcatcacactccag

SEQ ID NO: 143635 - DNA, 15 bp, Homo sapiens
tctcatcacactcca

SEQ ID NO: 143636 - DNA, 15 bp, Homo sapiens
ctctcatcacactcc

SEQ ID NO: 143637 - DNA, 15 bp, Homo sapiens
tctctcatcacactc

SEQ ID NO: 143638 - DNA, 15 bp, Homo sapiens
gtctctcatcacact

SEQ ID NO: 143639 - DNA, 15 bp, Homo sapiens
agtctctcatcacac

SEQ ID NO: 143640 - DNA, 15 bp, Homo sapiens
tagtctctcatcaca

SEQ ID NO: 143641 - DNA, 15 bp, Homo sapiens
atagtctctcatcac

SEQ ID NO: 143642 - DNA, 15 bp, Homo sapiens
catagtctctcatca

SEQ ID NO: 143643 - DNA, 15 bp, Homo sapiens
ccatagtctctcatc

SEQ ID NO: 143644 - DNA, 15 bp, Homo sapiens
tccatagtctctcat

SEQ ID NO: 143645 - DNA, 15 bp, Homo sapiens
gtccatagtctctca

SEQ ID NO: 143646 - DNA, 15 bp, Homo sapiens
agtccatagtctctc

SEQ ID NO: 143647 - DNA, 15 bp, Homo sapiens
tagtccatagtctct

SEQ ID NO: 143648 - DNA, 15 bp, Homo sapiens
atagtccatagtctc

SEQ ID NO: 143649 - DNA, 15 bp, Homo sapiens
tatagtccatagtct

SEQ ID NO: 143650 - DNA, 15 bp, Homo sapiens
ttatagtccatagtc

SEQ ID NO: 143651 - DNA, 15 bp, Homo sapiens
attatagtccatagt

SEQ ID NO: 143652 - DNA, 15 bp, Homo sapiens
cattatagtccatag

SEQ ID NO: 143653 - DNA, 15 bp, Homo sapiens
gcattatagtccata

SEQ ID NO: 143654 - DNA, 15 bp, Homo sapiens
cgcattatagtccat

SEQ ID NO: 143655 - DNA, 15 bp, Homo sapiens
acgcattatagtcca

SEQ ID NO: 143656 - DNA, 15 bp, Homo sapiens
cacgcattatagtcc

SEQ ID NO: 143657 - DNA, 15 bp, Homo sapiens
acacgcattatagtc

SEQ ID NO: 143658 - DNA, 15 bp, Homo sapiens
cacacgcattatagt

SEQ ID NO: 143659 - DNA, 15 bp, Homo sapiens
acacacgcattatag

SEQ ID NO: 143660 - DNA, 15 bp, Homo sapiens
cacacacgcattata

SEQ ID NO: 143661 - DNA, 15 bp, Homo sapiens
acacacacgcattat

SEQ ID NO: 143662 - DNA, 15 bp, Homo sapiens
cacacacacgcatta

SEQ ID NO: 143663 - DNA, 15 bp, Homo sapiens
acacacacacgcatt

SEQ ID NO: 143664 - DNA, 15 bp, Homo sapiens
cacacacacacgcat

SEQ ID NO: 143665 - DNA, 15 bp, Homo sapiens
ccacacacacacgca

SEQ ID NO: 143666 - DNA, 15 bp, Homo sapiens
cccacacacacacgc

SEQ ID NO: 143667 - DNA, 15 bp, Homo sapiens
ccccacacacacacg

SEQ ID NO: 143668 - DNA, 15 bp, Homo sapiens
cccccacacacacac

SEQ ID NO: 143669 - DNA, 15 bp, Homo sapiens
acccccacacacaca

SEQ ID NO: 143670 - DNA, 15 bp, Homo sapiens
cacccccacacacac

SEQ ID NO: 143671 - DNA, 15 bp, Homo sapiens
gcacccccacacaca

SEQ ID NO: 143672 - DNA, 15 bp, Homo sapiens
tgcacccccacacac

SEQ ID NO: 143673 - DNA, 15 bp, Homo sapiens
atgcacccccacaca

SEQ ID NO: 143674 - DNA, 15 bp, Homo sapiens
gatgcacccccacac

SEQ ID NO: 143675 - DNA, 15 bp, Homo sapiens
ggatgcacccccaca

SEQ ID NO: 143676 - DNA, 15 bp, Homo sapiens
aggatgcacccccac

SEQ ID NO: 143677 - DNA, 15 bp, Homo sapiens
gaggatgcaccccca

SEQ ID NO: 143678 - DNA, 15 bp, Homo sapiens
agaggatgcaccccc

SEQ ID NO: 143679 - DNA, 15 bp, Homo sapiens
gagaggatgcacccc

SEQ ID NO: 143680 - DNA, 15 bp, Homo sapiens
ggagaggatgcaccc

SEQ ID NO: 143681 - DNA, 15 bp, Homo sapiens
aggagaggatgcacc

SEQ ID NO: 143682 - DNA, 15 bp, Homo sapiens
aaggagaggatgcac

SEQ ID NO: 143683 - DNA, 15 bp, Homo sapiens
caaggagaggatgca

SEQ ID NO: 143684 - DNA, 15 bp, Homo sapiens
ccaaggagaggatgc

SEQ ID NO: 143685 - DNA, 15 bp, Homo sapiens
gccaaggagaggatg

SEQ ID NO: 143686 - DNA, 15 bp, Homo sapiens
ggccaaggagaggat

SEQ ID NO: 143687 - DNA, 15 bp, Homo sapiens
cggccaaggagagga

SEQ ID NO: 143688 - DNA, 15 bp, Homo sapiens
ccggccaaggagagg

SEQ ID NO: 143689 - DNA, 15 bp, Homo sapiens
cccggccaaggagag

SEQ ID NO: 143690 - DNA, 15 bp, Homo sapiens
ccccggccaaggaga

SEQ ID NO: 143691 - DNA, 15 bp, Homo sapiens
gccccggccaaggag

SEQ ID NO: 143692 - DNA, 15 bp, Homo sapiens
agccccggccaagga

SEQ ID NO: 143693 - DNA, 15 bp, Homo sapiens
gagccccggccaagg

SEQ ID NO: 143694 - DNA, 15 bp, Homo sapiens
tgagccccggccaag

SEQ ID NO: 143695 - DNA, 15 bp, Homo sapiens
ctgagccccggccaa

SEQ ID NO: 143696 - DNA, 15 bp, Homo sapiens
cctgagccccggcca

SEQ ID NO: 143697 - DNA, 15 bp, Homo sapiens
ccctgagccccggcc

SEQ ID NO: 143698 - DNA, 15 bp, Homo sapiens
tccctgagccccggc

SEQ ID NO: 143699 - DNA, 15 bp, Homo sapiens
ttccctgagccccgg

SEQ ID NO: 143700 - DNA, 15 bp, Homo sapiens
cttccctgagccccg

SEQ ID NO: 143701 - DNA, 15 bp, Homo sapiens
ccttccctgagcccc

SEQ ID NO: 143702 - DNA, 15 bp, Homo sapiens
gccttccctgagccc

SEQ ID NO: 143703 - DNA, 15 bp, Homo sapiens
agccttccctgagcc

SEQ ID NO: 143704 - DNA, 15 bp, Homo sapiens
aagccttccctgagc

SEQ ID NO: 143705 - DNA, 15 bp, Homo sapiens
gaagccttccctgag

SEQ ID NO: 143706 - DNA, 15 bp, Homo sapiens
ggaagccttccctga

SEQ ID NO: 143707 - DNA, 15 bp, Homo sapiens
gggaagccttccctg

SEQ ID NO: 143708 - DNA, 15 bp, Homo sapiens
agggaagccttccct

SEQ ID NO: 143709 - DNA, 15 bp, Homo sapiens
cagggaagccttccc

SEQ ID NO: 143710 - DNA, 15 bp, Homo sapiens
gcagggaagccttcc

SEQ ID NO: 143711 - DNA, 15 bp, Homo sapiens
tgcagggaagccttc

SEQ ID NO: 143712 - DNA, 15 bp, Homo sapiens
ctgcagggaagcctt

SEQ ID NO: 143713 - DNA, 15 bp, Homo sapiens
tctgcagggaagcct

SEQ ID NO: 143714 - DNA, 15 bp, Homo sapiens
ttctgcagggaagcc

SEQ ID NO: 143715 - DNA, 15 bp, Homo sapiens
tttctgcagggaagc

SEQ ID NO: 143716 - DNA, 15 bp, Homo sapiens
atttctgcagggaag

SEQ ID NO: 143717 - DNA, 15 bp, Homo sapiens
catttctgcagggaa

SEQ ID NO: 143718 - DNA, 15 bp, Homo sapiens
tcatttctgcaggga

SEQ ID NO: 143719 - DNA, 15 bp, Homo sapiens
ctcatttctgcaggg

SEQ ID NO: 143720 - DNA, 15 bp, Homo sapiens
tctcatttctgcagg

SEQ ID NO: 143721 - DNA, 15 bp, Homo sapiens
gtctcatttctgcag

SEQ ID NO: 143722 - DNA, 15 bp, Homo sapiens
ggtctcatttctgca

SEQ ID NO: 143723 - DNA, 15 bp, Homo sapiens
aggtctcatttctgc

SEQ ID NO: 143724 - DNA, 15 bp, Homo sapiens
taggtctcatttctg

SEQ ID NO: 143725 - DNA, 15 bp, Homo sapiens
gtaggtctcatttct

SEQ ID NO: 143726 - DNA, 15 bp, Homo sapiens
tgtaggtctcatttc

SEQ ID NO: 143727 - DNA, 15 bp, Homo sapiens
ctgtaggtctcattt

SEQ ID NO: 143728 - DNA, 15 bp, Homo sapiens
cctgtaggtctcatt

SEQ ID NO: 143729 - DNA, 15 bp, Homo sapiens
gcctgtaggtctcat

SEQ ID NO: 143730 - DNA, 15 bp, Homo sapiens
ggcctgtaggtctca

SEQ ID NO: 143731 - DNA, 15 bp, Homo sapiens
gggcctgtaggtctc

SEQ ID NO: 143732 - DNA, 15 bp, Homo sapiens
cgggcctgtaggtct

SEQ ID NO: 143733 - DNA, 15 bp, Homo sapiens
ccgggcctgtaggtc

SEQ ID NO: 143734 - DNA, 15 bp, Homo sapiens
gccgggcctgtaggt

SEQ ID NO: 143735 - DNA, 15 bp, Homo sapiens
tgccgggcctgtagg

SEQ ID NO: 143736 - DNA, 15 bp, Homo sapiens
atgccgggcctgtag

SEQ ID NO: 143737 - DNA, 15 bp, Homo sapiens
catgccgggcctgta

SEQ ID NO: 143738 - DNA, 15 bp, Homo sapiens
ccatgccgggcctgt

SEQ ID NO: 143739 - DNA, 15 bp, Homo sapiens
accatgccgggcctg

SEQ ID NO: 143740 - DNA, 15 bp, Homo sapiens
caccatgccgggcct

SEQ ID NO: 143741 - DNA, 15 bp, Homo sapiens
tcaccatgccgggcc

SEQ ID NO: 143742 - DNA, 15 bp, Homo sapiens
gtcaccatgccgggc

SEQ ID NO: 143743 - DNA, 15 bp, Homo sapiens
agtcaccatgccggg

SEQ ID NO: 143744 - DNA, 15 bp, Homo sapiens
gagtcaccatgccgg

SEQ ID NO: 143745 - DNA, 15 bp, Homo sapiens
tgagtcaccatgccg

SEQ ID NO: 143746 - DNA, 15 bp, Homo sapiens
atgagtcaccatgcc

SEQ ID NO: 143747 - DNA, 15 bp, Homo sapiens
catgagtcaccatgc

SEQ ID NO: 143748 - DNA, 15 bp, Homo sapiens
tcatgagtcaccatg

SEQ ID NO: 143749 - DNA, 15 bp, Homo sapiens
gtcatgagtcaccat

SEQ ID NO: 143750 - DNA, 15 bp, Homo sapiens
agtcatgagtcacca

SEQ ID NO: 143751 - DNA, 15 bp, Homo sapiens
cagtcatgagtcacc

SEQ ID NO: 143752 - DNA, 15 bp, Homo sapiens
acagtcatgagtcac

SEQ ID NO: 143753 - DNA, 15 bp, Homo sapiens
tacagtcatgagtca

SEQ ID NO: 143754 - DNA, 15 bp, Homo sapiens
ttacagtcatgagtc

SEQ ID NO: 143755 - DNA, 15 bp, Homo sapiens
gttacagtcatgagt

SEQ ID NO: 143756 - DNA, 15 bp, Homo sapiens
ggttacagtcatgag

SEQ ID NO: 143757 - DNA, 15 bp, Homo sapiens
gggttacagtcatga

SEQ ID NO: 143758 - DNA, 15 bp, Homo sapiens
ggggttacagtcatg

SEQ ID NO: 143759 - DNA, 15 bp, Homo sapiens
tggggttacagtcat

SEQ ID NO: 143760 - DNA, 15 bp, Homo sapiens
ctggggttacagtca

SEQ ID NO: 143761 - DNA, 15 bp, Homo sapiens
gctggggttacagtc

SEQ ID NO: 143762 - DNA, 15 bp, Homo sapiens
tgctggggttacagt

SEQ ID NO: 143763 - DNA, 15 bp, Homo sapiens
gtgctggggttacag

SEQ ID NO: 143764 - DNA, 15 bp, Homo sapiens
agtgctggggttaca

SEQ ID NO: 143765 - DNA, 15 bp, Homo sapiens
aagtgctggggttac

SEQ ID NO: 143766 - DNA, 15 bp, Homo sapiens
aaagtgctggggtta

SEQ ID NO: 143767 - DNA, 15 bp, Homo sapiens
gaaagtgctggggtt

SEQ ID NO: 143768 - DNA, 15 bp, Homo sapiens
tgaaagtgctggggt

SEQ ID NO: 143769 - DNA, 15 bp, Homo sapiens
ctgaaagtgctgggg

SEQ ID NO: 143770 - DNA, 15 bp, Homo sapiens
tctgaaagtgctggg

SEQ ID NO: 143771 - DNA, 15 bp, Homo sapiens
ctctgaaagtgctgg

SEQ ID NO: 143772 - DNA, 15 bp, Homo sapiens
cctctgaaagtgctg

SEQ ID NO: 143773 - DNA, 15 bp, Homo sapiens
acctctgaaagtgct

SEQ ID NO: 143774 - DNA, 15 bp, Homo sapiens
gacctctgaaagtgc

SEQ ID NO: 143775 - DNA, 15 bp, Homo sapiens
tgacctctgaaagtg

SEQ ID NO: 143776 - DNA, 15 bp, Homo sapiens
ttgacctctgaaagt

SEQ ID NO: 143777 - DNA, 15 bp, Homo sapiens
cttgacctctgaaag

SEQ ID NO: 143778 - DNA, 15 bp, Homo sapiens
ccttgacctctgaaa

SEQ ID NO: 143779 - DNA, 15 bp, Homo sapiens
gccttgacctctgaa

SEQ ID NO: 143780 - DNA, 15 bp, Homo sapiens
cgccttgacctctga

SEQ ID NO: 143781 - DNA, 15 bp, Homo sapiens
ccgccttgacctctg

SEQ ID NO: 143782 - DNA, 15 bp, Homo sapiens
cccgccttgacctct

SEQ ID NO: 143783 - DNA, 15 bp, Homo sapiens
acccgccttgacctc

SEQ ID NO: 143784 - DNA, 15 bp, Homo sapiens
cacccgccttgacct

SEQ ID NO: 143785 - DNA, 15 bp, Homo sapiens
ccacccgccttgacc

SEQ ID NO: 143786 - DNA, 15 bp, Homo sapiens
tccacccgccttgac

SEQ ID NO: 143787 - DNA, 15 bp, Homo sapiens
atccacccgccttga

SEQ ID NO: 143788 - DNA, 15 bp, Homo sapiens
gatccacccgccttg

SEQ ID NO: 143789 - DNA, 15 bp, Homo sapiens
cgatccacccgcctt

SEQ ID NO: 143790 - DNA, 15 bp, Homo sapiens
gcgatccacccgcct

SEQ ID NO: 143791 - DNA, 15 bp, Homo sapiens
agcgatccacccgcc

SEQ ID NO: 143792 - DNA, 15 bp, Homo sapiens
aagcgatccacccgc

SEQ ID NO: 143793 - DNA, 15 bp, Homo sapiens
caagcgatccacccg

SEQ ID NO: 143794 - DNA, 15 bp, Homo sapiens
tcaagcgatccaccc

SEQ ID NO: 143795 - DNA, 15 bp, Homo sapiens
ctcaagcgatccacc

SEQ ID NO: 143796 - DNA, 15 bp, Homo sapiens
gctcaagcgatccac

SEQ ID NO: 143797 - DNA, 15 bp, Homo sapiens
ggctcaagcgatcca

SEQ ID NO: 143798 - DNA, 15 bp, Homo sapiens
gggctcaagcgatcc

SEQ ID NO: 143799 - DNA, 15 bp, Homo sapiens
tgggctcaagcgatc

SEQ ID NO: 143800 - DNA, 15 bp, Homo sapiens
ctgggctcaagcgat

SEQ ID NO: 143801 - DNA, 15 bp, Homo sapiens
cctgggctcaagcga

SEQ ID NO: 143802 - DNA, 15 bp, Homo sapiens
tcctgggctcaagcg

SEQ ID NO: 143803 - DNA, 15 bp, Homo sapiens
ctcctgggctcaagc

SEQ ID NO: 143804 - DNA, 15 bp, Homo sapiens
actcctgggctcaag

SEQ ID NO: 143805 - DNA, 15 bp, Homo sapiens
aactcctgggctcaa

SEQ ID NO: 143806 - DNA, 15 bp, Homo sapiens
aaactcctgggctca

SEQ ID NO: 143807 - DNA, 15 bp, Homo sapiens
caaactcctgggctc

SEQ ID NO: 143808 - DNA, 15 bp, Homo sapiens
tcaaactcctgggct

SEQ ID NO: 143809 - DNA, 15 bp, Homo sapiens
ctcaaactcctgggc

SEQ ID NO: 143810 - DNA, 15 bp, Homo sapiens
tctcaaactcctggg

SEQ ID NO: 143811 - DNA, 15 bp, Homo sapiens
gtctcaaactcctgg

SEQ ID NO: 143812 - DNA, 15 bp, Homo sapiens
ggtctcaaactcctg

SEQ ID NO: 143813 - DNA, 15 bp, Homo sapiens
tggtctcaaactcct

SEQ ID NO: 143814 - DNA, 15 bp, Homo sapiens
ctggtctcaaactcc

SEQ ID NO: 143815 - DNA, 15 bp, Homo sapiens
gctggtctcaaactc

SEQ ID NO: 143816 - DNA, 15 bp, Homo sapiens
ggctggtctcaaact

SEQ ID NO: 143817 - DNA, 15 bp, Homo sapiens
aggctggtctcaaac

SEQ ID NO: 143818 - DNA, 15 bp, Homo sapiens
caggctggtctcaaa

SEQ ID NO: 143819 - DNA, 15 bp, Homo sapiens
ccaggctggtctcaa

SEQ ID NO: 143820 - DNA, 15 bp, Homo sapiens
cccaggctggtctca

SEQ ID NO: 143821 - DNA, 15 bp, Homo sapiens
gcccaggctggtctc

SEQ ID NO: 143822 - DNA, 15 bp, Homo sapiens
tgcccaggctggtct

SEQ ID NO: 143823 - DNA, 15 bp, Homo sapiens
ttgcccaggctggtc

SEQ ID NO: 143824 - DNA, 15 bp, Homo sapiens
gttgcccaggctggt

SEQ ID NO: 143825 - DNA, 15 bp, Homo sapiens
tgttgcccaggctgg

SEQ ID NO: 143826 - DNA, 15 bp, Homo sapiens
atgttgcccaggctg

SEQ ID NO: 143827 - DNA, 15 bp, Homo sapiens
catgttgcccaggct

SEQ ID NO: 143828 - DNA, 15 bp, Homo sapiens
ccatgttgcccaggc

SEQ ID NO: 143829 - DNA, 15 bp, Homo sapiens
gccatgttgcccagg

SEQ ID NO: 143830 - DNA, 15 bp, Homo sapiens
tgccatgttgcccag

SEQ ID NO: 143831 - DNA, 15 bp, Homo sapiens
ttgccatgttgccca

SEQ ID NO: 143832 - DNA, 15 bp, Homo sapiens
tttgccatgttgccc

SEQ ID NO: 143833 - DNA, 15 bp, Homo sapiens
ttttgccatgttgcc

SEQ ID NO: 143834 - DNA, 15 bp, Homo sapiens
gttttgccatgttgc

SEQ ID NO: 143835 - DNA, 15 bp, Homo sapiens
agttttgccatgttg

SEQ ID NO: 143836 - DNA, 15 bp, Homo sapiens
gagttttgccatgtt

SEQ ID NO: 143837 - DNA, 15 bp, Homo sapiens
ggagttttgccatgt

SEQ ID NO: 143838 - DNA, 15 bp, Homo sapiens
tggagttttgccatg

SEQ ID NO: 143839 - DNA, 15 bp, Homo sapiens
atggagttttgccat

SEQ ID NO: 143840 - DNA, 15 bp, Homo sapiens
gatggagttttgcca

SEQ ID NO: 143841 - DNA, 15 bp, Homo sapiens
agatggagttttgcc

SEQ ID NO: 143842 - DNA, 15 bp, Homo sapiens
gagatggagttttgc

SEQ ID NO: 143843 - DNA, 15 bp, Homo sapiens
agagatggagttttg

SEQ ID NO: 143844 - DNA, 15 bp, Homo sapiens
tagagatggagtttt

SEQ ID NO: 143845 - DNA, 15 bp, Homo sapiens
gtagagatggagttt

SEQ ID NO: 143846 - DNA, 15 bp, Homo sapiens
cgtagagatggagtt

SEQ ID NO: 143847 - DNA, 15 bp, Homo sapiens
tcgtagagatggagt

SEQ ID NO: 143848 - DNA, 15 bp, Homo sapiens
ttcgtagagatggag

SEQ ID NO: 143849 - DNA, 15 bp, Homo sapiens
tttcgtagagatgga

SEQ ID NO: 143850 - DNA, 15 bp, Homo sapiens
ttttcgtagagatgg

SEQ ID NO: 143851 - DNA, 15 bp, Homo sapiens
tttttcgtagagatg

SEQ ID NO: 143852 - DNA, 15 bp, Homo sapiens
atttttcgtagagat

SEQ ID NO: 143853 - DNA, 15 bp, Homo sapiens
tatttttcgtagaga

SEQ ID NO: 143854 - DNA, 15 bp, Homo sapiens
gtatttttcgtagag

SEQ ID NO: 143855 - DNA, 15 bp, Homo sapiens
tgtatttttcgtaga

SEQ ID NO: 143856 - DNA, 15 bp, Homo sapiens
ttgtatttttcgtag

SEQ ID NO: 143857 - DNA, 15 bp, Homo sapiens
tttgtatttttcgta

SEQ ID NO: 143858 - DNA, 15 bp, Homo sapiens
ttttgtatttttcgt

SEQ ID NO: 143859 - DNA, 15 bp, Homo sapiens
tttttgtatttttcg

SEQ ID NO: 143860 - DNA, 15 bp, Homo sapiens
ttttttgtatttttc

SEQ ID NO: 143861 - DNA, 15 bp, Homo sapiens
attttttgtattttt

SEQ ID NO: 143862 - DNA, 15 bp, Homo sapiens
aattttttgtatttt

SEQ ID NO: 143863 - DNA, 15 bp, Homo sapiens
taattttttgtattt

SEQ ID NO: 143864 - DNA, 15 bp, Homo sapiens
ctaattttttgtatt

SEQ ID NO: 143865 - DNA, 15 bp, Homo sapiens
gctaattttttgtat

SEQ ID NO: 143866 - DNA, 15 bp, Homo sapiens
ggctaattttttgta

SEQ ID NO: 143867 - DNA, 15 bp, Homo sapiens
tggctaattttttgt

SEQ ID NO: 143868 - DNA, 15 bp, Homo sapiens
ctggctaattttttg

SEQ ID NO: 143869 - DNA, 15 bp, Homo sapiens
cctggctaatttttt

SEQ ID NO: 143870 - DNA, 15 bp, Homo sapiens
gcctggctaattttt

SEQ ID NO: 143871 - DNA, 15 bp, Homo sapiens
cgcctggctaatttt

SEQ ID NO: 143872 - DNA, 15 bp, Homo sapiens
acgcctggctaattt

SEQ ID NO: 143873 - DNA, 15 bp, Homo sapiens
cacgcctggctaatt

SEQ ID NO: 143874 - DNA, 15 bp, Homo sapiens
ccacgcctggctaat

SEQ ID NO: 143875 - DNA, 15 bp, Homo sapiens
accacgcctggctaa

SEQ ID NO: 143876 - DNA, 15 bp, Homo sapiens
caccacgcctggcta

SEQ ID NO: 143877 - DNA, 15 bp, Homo sapiens
ccaccacgcctggct

SEQ ID NO: 143878 - DNA, 15 bp, Homo sapiens
gccaccacgcctggc

SEQ ID NO: 143879 - DNA, 15 bp, Homo sapiens
tgccaccacgcctgg

SEQ ID NO: 143880 - DNA, 15 bp, Homo sapiens
gtgccaccacgcctg

SEQ ID NO: 143881 - DNA, 15 bp, Homo sapiens
tgtgccaccacgcct

SEQ ID NO: 143882 - DNA, 15 bp, Homo sapiens
atgtgccaccacgcc

SEQ ID NO: 143883 - DNA, 15 bp, Homo sapiens
gatgtgccaccacgc

SEQ ID NO: 143884 - DNA, 15 bp, Homo sapiens
ggatgtgccaccacg

SEQ ID NO: 143885 - DNA, 15 bp, Homo sapiens
gggatgtgccaccac

SEQ ID NO: 143886 - DNA, 15 bp, Homo sapiens
ggggatgtgccacca

SEQ ID NO: 143887 - DNA, 15 bp, Homo sapiens
cggggatgtgccacc

SEQ ID NO: 143888 - DNA, 15 bp, Homo sapiens
acggggatgtgccac

SEQ ID NO: 143889 - DNA, 15 bp, Homo sapiens
tacggggatgtgcca

SEQ ID NO: 143890 - DNA, 15 bp, Homo sapiens
ctacggggatgtgcc

SEQ ID NO: 143891 - DNA, 15 bp, Homo sapiens
actacggggatgtgc

SEQ ID NO: 143892 - DNA, 15 bp, Homo sapiens
gactacggggatgtg

SEQ ID NO: 143893 - DNA, 15 bp, Homo sapiens
ggactacggggatgt

SEQ ID NO: 143894 - DNA, 15 bp, Homo sapiens
gggactacggggatg

SEQ ID NO: 143895 - DNA, 15 bp, Homo sapiens
tgggactacggggat

SEQ ID NO: 143896 - DNA, 15 bp, Homo sapiens
ctgggactacgggga

SEQ ID NO: 143897 - DNA, 15 bp, Homo sapiens
gctgggactacgggg

SEQ ID NO: 143898 - DNA, 15 bp, Homo sapiens
agctgggactacggg

SEQ ID NO: 143899 - DNA, 15 bp, Homo sapiens
tagctgggactacgg

SEQ ID NO: 143900 - DNA, 15 bp, Homo sapiens
gtagctgggactacg

SEQ ID NO: 143901 - DNA, 15 bp, Homo sapiens
agtagctgggactac

SEQ ID NO: 143902 - DNA, 15 bp, Homo sapiens
gagtagctgggacta

SEQ ID NO: 143903 - DNA, 15 bp, Homo sapiens
agagtagctgggact

SEQ ID NO: 143904 - DNA, 15 bp, Homo sapiens
aagagtagctgggac

SEQ ID NO: 143905 - DNA, 15 bp, Homo sapiens
caagagtagctggga

SEQ ID NO: 143906 - DNA, 15 bp, Homo sapiens
tcaagagtagctggg

SEQ ID NO: 143907 - DNA, 15 bp, Homo sapiens
ctcaagagtagctgg

SEQ ID NO: 143908 - DNA, 15 bp, Homo sapiens
cctcaagagtagctg

SEQ ID NO: 143909 - DNA, 15 bp, Homo sapiens
gcctcaagagtagct

SEQ ID NO: 143910 - DNA, 15 bp, Homo sapiens
agcctcaagagtagc

SEQ ID NO: 143911 - DNA, 15 bp, Homo sapiens
cagcctcaagagtag

SEQ ID NO: 143912 - DNA, 15 bp, Homo sapiens
tcagcctcaagagta

SEQ ID NO: 143913 - DNA, 15 bp, Homo sapiens
ctcagcctcaagagt

SEQ ID NO: 143914 - DNA, 15 bp, Homo sapiens
tctcagcctcaagag

SEQ ID NO: 143915 - DNA, 15 bp, Homo sapiens
atctcagcctcaaga

SEQ ID NO: 143916 - DNA, 15 bp, Homo sapiens
catctcagcctcaag

SEQ ID NO: 143917 - DNA, 15 bp, Homo sapiens
ccatctcagcctcaa

SEQ ID NO: 143918 - DNA, 15 bp, Homo sapiens
cccatctcagcctca

SEQ ID NO: 143919 - DNA, 15 bp, Homo sapiens
tcccatctcagcctc

SEQ ID NO: 143920 - DNA, 15 bp, Homo sapiens
atcccatctcagcct

SEQ ID NO: 143921 - DNA, 15 bp, Homo sapiens
catcccatctcagcc

SEQ ID NO: 143922 - DNA, 15 bp, Homo sapiens
tcatcccatctcagc

SEQ ID NO: 143923 - DNA, 15 bp, Homo sapiens
atcatcccatctcag

SEQ ID NO: 143924 - DNA, 15 bp, Homo sapiens
aatcatcccatctca

SEQ ID NO: 143925 - DNA, 15 bp, Homo sapiens
caatcatcccatctc

SEQ ID NO: 143926 - DNA, 15 bp, Homo sapiens
gcaatcatcccatct

SEQ ID NO: 143927 - DNA, 15 bp, Homo sapiens
agcaatcatcccatc

SEQ ID NO: 143928 - DNA, 15 bp, Homo sapiens
aagcaatcatcccat

SEQ ID NO: 143929 - DNA, 15 bp, Homo sapiens
caagcaatcatccca

SEQ ID NO: 143930 - DNA, 15 bp, Homo sapiens
tcaagcaatcatccc

SEQ ID NO: 143931 - DNA, 15 bp, Homo sapiens
ctcaagcaatcatcc

SEQ ID NO: 143932 - DNA, 15 bp, Homo sapiens
gctcaagcaatcatc

SEQ ID NO: 143933 - DNA, 15 bp, Homo sapiens
ggctcaagcaatcat

SEQ ID NO: 143934 - DNA, 15 bp, Homo sapiens
aggctcaagcaatca

SEQ ID NO: 143935 - DNA, 15 bp, Homo sapiens
caggctcaagcaatc

SEQ ID NO: 143936 - DNA, 15 bp, Homo sapiens
ccaggctcaagcaat

SEQ ID NO: 143937 - DNA, 15 bp, Homo sapiens
cccaggctcaagcaa

SEQ ID NO: 143938 - DNA, 15 bp, Homo sapiens
tcccaggctcaagca

SEQ ID NO: 143939 - DNA, 15 bp, Homo sapiens
ctcccaggctcaagc

SEQ ID NO: 143940 - DNA, 15 bp, Homo sapiens
cctcccaggctcaag

SEQ ID NO: 143941 - DNA, 15 bp, Homo sapiens
acctcccaggctcaa

SEQ ID NO: 143942 - DNA, 15 bp, Homo sapiens
cacctcccaggctca

SEQ ID NO: 143943 - DNA, 15 bp, Homo sapiens
ccacctcccaggctc

SEQ ID NO: 143944 - DNA, 15 bp, Homo sapiens
tccacctcccaggct

SEQ ID NO: 143945 - DNA, 15 bp, Homo sapiens
ctccacctcccaggc

SEQ ID NO: 143946 - DNA, 15 bp, Homo sapiens
cctccacctcccagg

SEQ ID NO: 143947 - DNA, 15 bp, Homo sapiens
acctccacctcccag

SEQ ID NO: 143948 - DNA, 15 bp, Homo sapiens
aacctccacctccca

SEQ ID NO: 143949 - DNA, 15 bp, Homo sapiens
caacctccacctccc

SEQ ID NO: 143950 - DNA, 15 bp, Homo sapiens
gcaacctccacctcc

SEQ ID NO: 143951 - DNA, 15 bp, Homo sapiens
tgcaacctccacctc

SEQ ID NO: 143952 - DNA, 15 bp, Homo sapiens
ctgcaacctccacct

SEQ ID NO: 143953 - DNA, 15 bp, Homo sapiens
actgcaacctccacc

SEQ ID NO: 143954 - DNA, 15 bp, Homo sapiens
cactgcaacctccac

SEQ ID NO: 143955 - DNA, 15 bp, Homo sapiens
tcactgcaacctcca

SEQ ID NO: 143956 - DNA, 15 bp, Homo sapiens
ttcactgcaacctcc

SEQ ID NO: 143957 - DNA, 15 bp, Homo sapiens
gttcactgcaacctc

SEQ ID NO: 143958 - DNA, 15 bp, Homo sapiens
ggttcactgcaacct

SEQ ID NO: 143959 - DNA, 15 bp, Homo sapiens
tggttcactgcaacc

SEQ ID NO: 143960 - DNA, 15 bp, Homo sapiens
ttggttcactgcaac

SEQ ID NO: 143961 - DNA, 15 bp, Homo sapiens
cttggttcactgcaa

SEQ ID NO: 143962 - DNA, 15 bp, Homo sapiens
tcttggttcactgca

SEQ ID NO: 143963 - DNA, 15 bp, Homo sapiens
atcttggttcactgc

SEQ ID NO: 143964 - DNA, 15 bp, Homo sapiens
aatcttggttcactg

SEQ ID NO: 143965 - DNA, 15 bp, Homo sapiens
caatcttggttcact

SEQ ID NO: 143966 - DNA, 15 bp, Homo sapiens
acaatcttggttcac

SEQ ID NO: 143967 - DNA, 15 bp, Homo sapiens
tacaatcttggttca

SEQ ID NO: 143968 - DNA, 15 bp, Homo sapiens
atacaatcttggttc

SEQ ID NO: 143969 - DNA, 15 bp, Homo sapiens
gatacaatcttggtt

SEQ ID NO: 143970 - DNA, 15 bp, Homo sapiens
tgatacaatcttggt

SEQ ID NO: 143971 - DNA, 15 bp, Homo sapiens
atgatacaatcttgg

SEQ ID NO: 143972 - DNA, 15 bp, Homo sapiens
aatgatacaatcttg

SEQ ID NO: 143973 - DNA, 15 bp, Homo sapiens
caatgatacaatctt

SEQ ID NO: 143974 - DNA, 15 bp, Homo sapiens
gcaatgatacaatct

SEQ ID NO: 143975 - DNA, 15 bp, Homo sapiens
tgcaatgatacaatc

SEQ ID NO: 143976 - DNA, 15 bp, Homo sapiens
gtgcaatgatacaat

SEQ ID NO: 143977 - DNA, 15 bp, Homo sapiens
agtgcaatgatacaa

SEQ ID NO: 143978 - DNA, 15 bp, Homo sapiens
gagtgcaatgataca

SEQ ID NO: 143979 - DNA, 15 bp, Homo sapiens
ggagtgcaatgatac

SEQ ID NO: 143980 - DNA, 15 bp, Homo sapiens
aggagtgcaatgata

SEQ ID NO: 143981 - DNA, 15 bp, Homo sapiens
taggagtgcaatgat

SEQ ID NO: 143982 - DNA, 15 bp, Homo sapiens
gtaggagtgcaatga

SEQ ID NO: 143983 - DNA, 15 bp, Homo sapiens
ggtaggagtgcaatg

SEQ ID NO: 143984 - DNA, 15 bp, Homo sapiens
aggtaggagtgcaat

SEQ ID NO: 143985 - DNA, 15 bp, Homo sapiens
caggtaggagtgcaa

SEQ ID NO: 143986 - DNA, 15 bp, Homo sapiens
ccaggtaggagtgca

SEQ ID NO: 143987 - DNA, 15 bp, Homo sapiens
cccaggtaggagtgc

SEQ ID NO: 143988 - DNA, 15 bp, Homo sapiens
gcccaggtaggagtg

SEQ ID NO: 143989 - DNA, 15 bp, Homo sapiens
tgcccaggtaggagt

SEQ ID NO: 143990 - DNA, 15 bp, Homo sapiens
ttgcccaggtaggag

SEQ ID NO: 143991 - DNA, 15 bp, Homo sapiens
gttgcccaggtagga

SEQ ID NO: 143992 - DNA, 15 bp, Homo sapiens
tgttgcccaggtagg

SEQ ID NO: 143993 - DNA, 15 bp, Homo sapiens
ctgttgcccaggtag

SEQ ID NO: 143994 - DNA, 15 bp, Homo sapiens
tctgttgcccaggta

SEQ ID NO: 143995 - DNA, 15 bp, Homo sapiens
ctctgttgcccaggt

SEQ ID NO: 143996 - DNA, 15 bp, Homo sapiens
actctgttgcccagg

SEQ ID NO: 143997 - DNA, 15 bp, Homo sapiens
cactctgttgcccag

SEQ ID NO: 143998 - DNA, 15 bp, Homo sapiens
tcactctgttgccca

SEQ ID NO: 143999 - DNA, 15 bp, Homo sapiens
ctcactctgttgccc

SEQ ID NO: 144000 - DNA, 15 bp, Homo sapiens
tctcactctgttgcc

SEQ ID NO: 144001 - DNA, 15 bp, Homo sapiens
gtctcactctgttgc

SEQ ID NO: 144002 - DNA, 15 bp, Homo sapiens
ggtctcactctgttg

SEQ ID NO: 144003 - DNA, 15 bp, Homo sapiens
gggtctcactctgtt

SEQ ID NO: 144004 - DNA, 15 bp, Homo sapiens
agggtctcactctgt

SEQ ID NO: 144005 - DNA, 15 bp, Homo sapiens
cagggtctcactctg

SEQ ID NO: 144006 - DNA, 15 bp, Homo sapiens
acagggtctcactct

SEQ ID NO: 144007 - DNA, 15 bp, Homo sapiens
gacagggtctcactc

SEQ ID NO: 144008 - DNA, 15 bp, Homo sapiens
agacagggtctcact

SEQ ID NO: 144009 - DNA, 15 bp, Homo sapiens
gagacagggtctcac

SEQ ID NO: 144010 - DNA, 15 bp, Homo sapiens
ggagacagggtctca

SEQ ID NO: 144011 - DNA, 15 bp, Homo sapiens
tggagacagggtctc

SEQ ID NO: 144012 - DNA, 15 bp, Homo sapiens
ttggagacagggtct

SEQ ID NO: 144013 - DNA, 15 bp, Homo sapiens
tttggagacagggtc

SEQ ID NO: 144014 - DNA, 15 bp, Homo sapiens
ttttggagacagggt

SEQ ID NO: 144015 - DNA, 15 bp, Homo sapiens
tttttggagacaggg

SEQ ID NO: 144016 - DNA, 15 bp, Homo sapiens
ttttttggagacagg

SEQ ID NO: 144017 - DNA, 15 bp, Homo sapiens
tttttttggagacag

SEQ ID NO: 144018 - DNA, 15 bp, Homo sapiens
ttttttttggagaca

SEQ ID NO: 144019 - DNA, 15 bp, Homo sapiens
cttttttttggagac

SEQ ID NO: 144020 - DNA, 15 bp, Homo sapiens
tcttttttttggaga

SEQ ID NO: 144021 - DNA, 15 bp, Homo sapiens
ttcttttttttggag

SEQ ID NO: 144022 - DNA, 15 bp, Homo sapiens
tttcttttttttgga

SEQ ID NO: 144023 - DNA, 15 bp, Homo sapiens
atttcttttttttgg

SEQ ID NO: 144024 - DNA, 15 bp, Homo sapiens
catttcttttttttg

SEQ ID NO: 144025 - DNA, 15 bp, Homo sapiens
tcatttctttttttt

SEQ ID NO: 144026 - DNA, 15 bp, Homo sapiens
ctcatttcttttttt

SEQ ID NO: 144027 - DNA, 15 bp, Homo sapiens
tctcatttctttttt

SEQ ID NO: 144028 - DNA, 15 bp, Homo sapiens
atctcatttcttttt

SEQ ID NO: 144029 - DNA, 15 bp, Homo sapiens
gatctcatttctttt

SEQ ID NO: 144030 - DNA, 15 bp, Homo sapiens
agatctcatttcttt

SEQ ID NO: 144031 - DNA, 15 bp, Homo sapiens
tagatctcatttctt

SEQ ID NO: 144032 - DNA, 15 bp, Homo sapiens
gtagatctcatttct

SEQ ID NO: 144033 - DNA, 15 bp, Homo sapiens
tgtagatctcatttc

SEQ ID NO: 144034 - DNA, 15 bp, Homo sapiens
ctgtagatctcattt

SEQ ID NO: 144035 - DNA, 15 bp, Homo sapiens
cctgtagatctcatt

SEQ ID NO: 144036 - DNA, 15 bp, Homo sapiens
tcctgtagatctcat

SEQ ID NO: 144037 - DNA, 15 bp, Homo sapiens
atcctgtagatctca

SEQ ID NO: 144038 - DNA, 15 bp, Homo sapiens
catcctgtagatctc

SEQ ID NO: 144039 - DNA, 15 bp, Homo sapiens
tcatcctgtagatct

SEQ ID NO: 144040 - DNA, 15 bp, Homo sapiens
ttcatcctgtagatc

SEQ ID NO: 144041 - DNA, 15 bp, Homo sapiens
cttcatcctgtagat

SEQ ID NO: 144042 - DNA, 15 bp, Homo sapiens
tcttcatcctgtaga

SEQ ID NO: 144043 - DNA, 15 bp, Homo sapiens
ctcttcatcctgtag

SEQ ID NO: 144044 - DNA, 15 bp, Homo sapiens
cctcttcatcctgta

SEQ ID NO: 144045 - DNA, 15 bp, Homo sapiens
gcctcttcatcctgt

SEQ ID NO: 144046 - DNA, 15 bp, Homo sapiens
tgcctcttcatcctg

SEQ ID NO: 144047 - DNA, 15 bp, Homo sapiens
atgcctcttcatcct

SEQ ID NO: 144048 - DNA, 15 bp, Homo sapiens
aatgcctcttcatcc

SEQ ID NO: 144049 - DNA, 15 bp, Homo sapiens
taatgcctcttcatc

SEQ ID NO: 144050 - DNA, 15 bp, Homo sapiens
ctaatgcctcttcat

SEQ ID NO: 144051 - DNA, 15 bp, Homo sapiens
gctaatgcctcttca

SEQ ID NO: 144052 - DNA, 15 bp, Homo sapiens
ggctaatgcctcttc

SEQ ID NO: 144053 - DNA, 15 bp, Homo sapiens
tggctaatgcctctt

SEQ ID NO: 144054 - DNA, 15 bp, Homo sapiens
ctggctaatgcctct

SEQ ID NO: 144055 - DNA, 15 bp, Homo sapiens
cctggctaatgcctc

SEQ ID NO: 144056 - DNA, 15 bp, Homo sapiens
ccctggctaatgcct

SEQ ID NO: 144057 - DNA, 15 bp, Homo sapiens
cccctggctaatgcc

SEQ ID NO: 144058 - DNA, 15 bp, Homo sapiens
acccctggctaatgc

SEQ ID NO: 144059 - DNA, 15 bp, Homo sapiens
cacccctggctaatg

SEQ ID NO: 144060 - DNA, 15 bp, Homo sapiens
ccacccctggctaat

SEQ ID NO: 144061 - DNA, 15 bp, Homo sapiens
cccacccctggctaa

SEQ ID NO: 144062 - DNA, 15 bp, Homo sapiens
acccacccctggcta

SEQ ID NO: 144063 - DNA, 15 bp, Homo sapiens
cacccacccctggct

SEQ ID NO: 144064 - DNA, 15 bp, Homo sapiens
gcacccacccctggc

SEQ ID NO: 144065 - DNA, 15 bp, Homo sapiens
tgcacccacccctgg

SEQ ID NO: 144066 - DNA, 15 bp, Homo sapiens
ctgcacccacccctg

SEQ ID NO: 144067 - DNA, 15 bp, Homo sapiens
cctgcacccacccct

SEQ ID NO: 144068 - DNA, 15 bp, Homo sapiens
ccctgcacccacccc

SEQ ID NO: 144069 - DNA, 15 bp, Homo sapiens
cccctgcacccaccc

SEQ ID NO: 144070 - DNA, 15 bp, Homo sapiens
ccccctgcacccacc

SEQ ID NO: 144071 - DNA, 15 bp, Homo sapiens
tccccctgcacccac

SEQ ID NO: 144072 - DNA, 15 bp, Homo sapiens
gtccccctgcaccca

SEQ ID NO: 144073 - DNA, 15 bp, Homo sapiens
cgtccccctgcaccc

SEQ ID NO: 144074 - DNA, 15 bp, Homo sapiens
acgtccccctgcacc

SEQ ID NO: 144075 - DNA, 15 bp, Homo sapiens
cacgtccccctgcac

SEQ ID NO: 144076 - DNA, 15 bp, Homo sapiens
gcacgtccccctgca

SEQ ID NO: 144077 - DNA, 15 bp, Homo sapiens
tgcacgtccccctgc

SEQ ID NO: 144078 - DNA, 15 bp, Homo sapiens
ctgcacgtccccctg

SEQ ID NO: 144079 - DNA, 15 bp, Homo sapiens
tctgcacgtccccct

SEQ ID NO: 144080 - DNA, 15 bp, Homo sapiens
ctctgcacgtccccc

SEQ ID NO: 144081 - DNA, 15 bp, Homo sapiens
cctctgcacgtcccc

SEQ ID NO: 144082 - DNA, 15 bp, Homo sapiens
tcctctgcacgtccc

SEQ ID NO: 144083 - DNA, 15 bp, Homo sapiens
ttcctctgcacgtcc

SEQ ID NO: 144084 - DNA, 15 bp, Homo sapiens
attcctctgcacgtc

SEQ ID NO: 144085 - DNA, 15 bp, Homo sapiens
cattcctctgcacgt

SEQ ID NO: 144086 - DNA, 15 bp, Homo sapiens
ccattcctctgcacg

SEQ ID NO: 144087 - DNA, 15 bp, Homo sapiens
accattcctctgcac

SEQ ID NO: 144088 - DNA, 15 bp, Homo sapiens
caccattcctctgca

SEQ ID NO: 144089 - DNA, 15 bp, Homo sapiens
acaccattcctctgc

SEQ ID NO: 144090 - DNA, 15 bp, Homo sapiens
gacaccattcctctg

SEQ ID NO: 144091 - DNA, 15 bp, Homo sapiens
agacaccattcctct

SEQ ID NO: 144092 - DNA, 15 bp, Homo sapiens
aagacaccattcctc

SEQ ID NO: 144093 - DNA, 15 bp, Homo sapiens
aaagacaccattcct

SEQ ID NO: 144094 - DNA, 15 bp, Homo sapiens
caaagacaccattcc

SEQ ID NO: 144095 - DNA, 15 bp, Homo sapiens
tcaaagacaccattc

SEQ ID NO: 144096 - DNA, 15 bp, Homo sapiens
ttcaaagacaccatt

SEQ ID NO: 144097 - DNA, 15 bp, Homo sapiens
cttcaaagacaccat

SEQ ID NO: 144098 - DNA, 15 bp, Homo sapiens
tcttcaaagacacca

SEQ ID NO: 144099 - DNA, 15 bp, Homo sapiens
gtcttcaaagacacc

SEQ ID NO: 144100 - DNA, 15 bp, Homo sapiens
agtcttcaaagacac

SEQ ID NO: 144101 - DNA, 15 bp, Homo sapiens
gagtcttcaaagaca

SEQ ID NO: 144102 - DNA, 15 bp, Homo sapiens
agagtcttcaaagac

SEQ ID NO: 144103 - DNA, 15 bp, Homo sapiens
cagagtcttcaaaga

SEQ ID NO: 144104 - DNA, 15 bp, Homo sapiens
tcagagtcttcaaag

SEQ ID NO: 144105 - DNA, 15 bp, Homo sapiens
ctcagagtcttcaaa

SEQ ID NO: 144106 - DNA, 15 bp, Homo sapiens
cctcagagtcttcaa

SEQ ID NO: 144107 - DNA, 15 bp, Homo sapiens
gcctcagagtcttca

SEQ ID NO: 144108 - DNA, 15 bp, Homo sapiens
agcctcagagtcttc

SEQ ID NO: 144109 - DNA, 15 bp, Homo sapiens
cagcctcagagtctt

SEQ ID NO: 144110 - DNA, 15 bp, Homo sapiens
ccagcctcagagtct

SEQ ID NO: 144111 - DNA, 15 bp, Homo sapiens
tccagcctcagagtc

SEQ ID NO: 144112 - DNA, 15 bp, Homo sapiens
ttccagcctcagagt

SEQ ID NO: 144113 - DNA, 15 bp, Homo sapiens
gttccagcctcagag

SEQ ID NO: 144114 - DNA, 15 bp, Homo sapiens
tgttccagcctcaga

SEQ ID NO: 144115 - DNA, 15 bp, Homo sapiens
ttgttccagcctcag

SEQ ID NO: 144116 - DNA, 15 bp, Homo sapiens
tttgttccagcctca

SEQ ID NO: 144117 - DNA, 15 bp, Homo sapiens
ctttgttccagcctc

SEQ ID NO: 144118 - DNA, 15 bp, Homo sapiens
gctttgttccagcct

SEQ ID NO: 144119 - DNA, 15 bp, Homo sapiens
agctttgttccagcc

SEQ ID NO: 144120 - DNA, 15 bp, Homo sapiens
aagctttgttccagc

SEQ ID NO: 144121 - DNA, 15 bp, Homo sapiens
gaagctttgttccag

SEQ ID NO: 144122 - DNA, 15 bp, Homo sapiens
tgaagctttgttcca

SEQ ID NO: 144123 - DNA, 15 bp, Homo sapiens
atgaagctttgttcc

SEQ ID NO: 144124 - DNA, 15 bp, Homo sapiens
catgaagctttgttc

SEQ ID NO: 144125 - DNA, 15 bp, Homo sapiens
ccatgaagctttgtt

SEQ ID NO: 144126 - DNA, 15 bp, Homo sapiens
tccatgaagctttgt

SEQ ID NO: 144127 - DNA, 15 bp, Homo sapiens
ttccatgaagctttg

SEQ ID NO: 144128 - DNA, 15 bp, Homo sapiens
cttccatgaagcttt

SEQ ID NO: 144129 - DNA, 15 bp, Homo sapiens
ccttccatgaagctt

SEQ ID NO: 144130 - DNA, 15 bp, Homo sapiens
tccttccatgaagct

SEQ ID NO: 144131 - DNA, 15 bp, Homo sapiens
ttccttccatgaagc

SEQ ID NO: 144132 - DNA, 15 bp, Homo sapiens
attccttccatgaag

SEQ ID NO: 144133 - DNA, 15 bp, Homo sapiens
cattccttccatgaa

SEQ ID NO: 144134 - DNA, 15 bp, Homo sapiens
tcattccttccatga

SEQ ID NO: 144135 - DNA, 15 bp, Homo sapiens
ctcattccttccatg

SEQ ID NO: 144136 - DNA, 15 bp, Homo sapiens
tctcattccttccat

SEQ ID NO: 144137 - DNA, 15 bp, Homo sapiens
ctctcattccttcca

SEQ ID NO: 144138 - DNA, 15 bp, Homo sapiens
gctctcattccttcc

SEQ ID NO: 144139 - DNA, 15 bp, Homo sapiens
agctctcattccttc

SEQ ID NO: 144140 - DNA, 15 bp, Homo sapiens
cagctctcattcctt

SEQ ID NO: 144141 - DNA, 15 bp, Homo sapiens
ccagctctcattcct

SEQ ID NO: 144142 - DNA, 15 bp, Homo sapiens
tccagctctcattcc

SEQ ID NO: 144143 - DNA, 15 bp, Homo sapiens
ttccagctctcattc

SEQ ID NO: 144144 - DNA, 15 bp, Homo sapiens
cttccagctctcatt

SEQ ID NO: 144145 - DNA, 15 bp, Homo sapiens
ccttccagctctcat

SEQ ID NO: 144146 - DNA, 15 bp, Homo sapiens
tccttccagctctca

SEQ ID NO: 144147 - DNA, 15 bp, Homo sapiens
gtccttccagctctc

SEQ ID NO: 144148 - DNA, 15 bp, Homo sapiens
cgtccttccagctct

SEQ ID NO: 144149 - DNA, 15 bp, Homo sapiens
ccgtccttccagctc

SEQ ID NO: 144150 - DNA, 15 bp, Homo sapiens
cccgtccttccagct

SEQ ID NO: 144151 - DNA, 15 bp, Homo sapiens
ccccgtccttccagc

SEQ ID NO: 144152 - DNA, 15 bp, Homo sapiens
tccccgtccttccag

SEQ ID NO: 144153 - DNA, 15 bp, Homo sapiens
ctccccgtccttcca

SEQ ID NO: 144154 - DNA, 15 bp, Homo sapiens
cctccccgtccttcc

SEQ ID NO: 144155 - DNA, 15 bp, Homo sapiens
tcctccccgtccttc

SEQ ID NO: 144156 - DNA, 15 bp, Homo sapiens
gtcctccccgtcctt

SEQ ID NO: 144157 - DNA, 15 bp, Homo sapiens
agtcctccccgtcct

SEQ ID NO: 144158 - DNA, 15 bp, Homo sapiens
aagtcctccccgtcc

SEQ ID NO: 144159 - DNA, 15 bp, Homo sapiens
taagtcctccccgtc

SEQ ID NO: 144160 - DNA, 15 bp, Homo sapiens
ctaagtcctccccgt

SEQ ID NO: 144161 - DNA, 15 bp, Homo sapiens
cctaagtcctccccg

SEQ ID NO: 144162 - DNA, 15 bp, Homo sapiens
gcctaagtcctcccc

SEQ ID NO: 144163 - DNA, 15 bp, Homo sapiens
tgcctaagtcctccc

SEQ ID NO: 144164 - DNA, 15 bp, Homo sapiens
ctgcctaagtcctcc

SEQ ID NO: 144165 - DNA, 15 bp, Homo sapiens
tctgcctaagtcctc

SEQ ID NO: 144166 - DNA, 15 bp, Homo sapiens
ttctgcctaagtcct

SEQ ID NO: 144167 - DNA, 15 bp, Homo sapiens
tttctgcctaagtcc

SEQ ID NO: 144168 - DNA, 15 bp, Homo sapiens
ctttctgcctaagtc

SEQ ID NO: 144169 - DNA, 15 bp, Homo sapiens
gctttctgcctaagt

SEQ ID NO: 144170 - DNA, 15 bp, Homo sapiens
tgctttctgcctaag

SEQ ID NO: 144171 - DNA, 15 bp, Homo sapiens
ctgctttctgcctaa

SEQ ID NO: 144172 - DNA, 15 bp, Homo sapiens
gctgctttctgccta

SEQ ID NO: 144173 - DNA, 15 bp, Homo sapiens
tgctgctttctgcct

SEQ ID NO: 144174 - DNA, 15 bp, Homo sapiens
atgctgctttctgcc

SEQ ID NO: 144175 - DNA, 15 bp, Homo sapiens
tatgctgctttctgc

SEQ ID NO: 144176 - DNA, 15 bp, Homo sapiens
ctatgctgctttctg

SEQ ID NO: 144177 - DNA, 15 bp, Homo sapiens
actatgctgctttct

SEQ ID NO: 144178 - DNA, 15 bp, Homo sapiens
gactatgctgctttc

SEQ ID NO: 144179 - DNA, 15 bp, Homo sapiens
ggactatgctgcttt

SEQ ID NO: 144180 - DNA, 15 bp, Homo sapiens
tggactatgctgctt

SEQ ID NO: 144181 - DNA, 15 bp, Homo sapiens
ctggactatgctgct

SEQ ID NO: 144182 - DNA, 15 bp, Homo sapiens
cctggactatgctgc

SEQ ID NO: 144183 - DNA, 15 bp, Homo sapiens
gcctggactatgctg

SEQ ID NO: 144184 - DNA, 15 bp, Homo sapiens
ggcctggactatgct

SEQ ID NO: 144185 - DNA, 15 bp, Homo sapiens
tggcctggactatgc

SEQ ID NO: 144186 - DNA, 15 bp, Homo sapiens
gtggcctggactatg

SEQ ID NO: 144187 - DNA, 15 bp, Homo sapiens
tgtggcctggactat

SEQ ID NO: 144188 - DNA, 15 bp, Homo sapiens
ctgtggcctggacta

SEQ ID NO: 144189 - DNA, 15 bp, Homo sapiens
cctgtggcctggact

SEQ ID NO: 144190 - DNA, 15 bp, Homo sapiens
ccctgtggcctggac

SEQ ID NO: 144191 - DNA, 15 bp, Homo sapiens
tccctgtggcctgga

SEQ ID NO: 144192 - DNA, 15 bp, Homo sapiens
gtccctgtggcctgg

SEQ ID NO: 144193 - DNA, 15 bp, Homo sapiens
ggtccctgtggcctg

SEQ ID NO: 144194 - DNA, 15 bp, Homo sapiens
gggtccctgtggcct

SEQ ID NO: 144195 - DNA, 15 bp, Homo sapiens
agggtccctgtggcc

SEQ ID NO: 144196 - DNA, 15 bp, Homo sapiens
tagggtccctgtggc

SEQ ID NO: 144197 - DNA, 15 bp, Homo sapiens
ctagggtccctgtgg

SEQ ID NO: 144198 - DNA, 15 bp, Homo sapiens
cctagggtccctgtg

SEQ ID NO: 144199 - DNA, 15 bp, Homo sapiens
tcctagggtccctgt

SEQ ID NO: 144200 - DNA, 15 bp, Homo sapiens
ttcctagggtccctg

SEQ ID NO: 144201 - DNA, 15 bp, Homo sapiens
tttcctagggtccct

SEQ ID NO: 144202 - DNA, 15 bp, Homo sapiens
ctttcctagggtccc

SEQ ID NO: 144203 - DNA, 15 bp, Homo sapiens
tctttcctagggtcc

SEQ ID NO: 144204 - DNA, 15 bp, Homo sapiens
ctctttcctagggtc

SEQ ID NO: 144205 - DNA, 15 bp, Homo sapiens
cctctttcctagggt

SEQ ID NO: 144206 - DNA, 15 bp, Homo sapiens
tcctctttcctaggg

SEQ ID NO: 144207 - DNA, 15 bp, Homo sapiens
atcctctttcctagg

SEQ ID NO: 144208 - DNA, 15 bp, Homo sapiens
catcctctttcctag

SEQ ID NO: 144209 - DNA, 15 bp, Homo sapiens
ccatcctctttccta

SEQ ID NO: 144210 - DNA, 15 bp, Homo sapiens
tccatcctctttcct

SEQ ID NO: 144211 - DNA, 15 bp, Homo sapiens
ctccatcctctttcc

SEQ ID NO: 144212 - DNA, 15 bp, Homo sapiens
cctccatcctctttc

SEQ ID NO: 144213 - DNA, 15 bp, Homo sapiens
tcctccatcctcttt

SEQ ID NO: 144214 - DNA, 15 bp, Homo sapiens
ttcctccatcctctt

SEQ ID NO: 144215 - DNA, 15 bp, Homo sapiens
tttcctccatcctct

SEQ ID NO: 144216 - DNA, 15 bp, Homo sapiens
ctttcctccatcctc

SEQ ID NO: 144217 - DNA, 15 bp, Homo sapiens
tctttcctccatcct

SEQ ID NO: 144218 - DNA, 15 bp, Homo sapiens
ctctttcctccatcc

SEQ ID NO: 144219 - DNA, 15 bp, Homo sapiens
cctctttcctccatc

SEQ ID NO: 144220 - DNA, 15 bp, Homo sapiens
tcctctttcctccat

SEQ ID NO: 144221 - DNA, 15 bp, Homo sapiens
atcctctttcctcca

SEQ ID NO: 144222 - DNA, 15 bp, Homo sapiens
catcctctttcctcc

SEQ ID NO: 144223 - DNA, 15 bp, Homo sapiens
tcatcctctttcctc

SEQ ID NO: 144224 - DNA, 15 bp, Homo sapiens
gtcatcctctttcct

SEQ ID NO: 144225 - DNA, 15 bp, Homo sapiens
tgtcatcctctttcc

SEQ ID NO: 144226 - DNA, 15 bp, Homo sapiens
ttgtcatcctctttc

SEQ ID NO: 144227 - DNA, 15 bp, Homo sapiens
attgtcatcctcttt

SEQ ID NO: 144228 - DNA, 15 bp, Homo sapiens
tattgtcatcctctt

SEQ ID NO: 144229 - DNA, 15 bp, Homo sapiens
atattgtcatcctct

SEQ ID NO: 144230 - DNA, 15 bp, Homo sapiens
catattgtcatcctc

SEQ ID NO: 144231 - DNA, 15 bp, Homo sapiens
acatattgtcatcct

SEQ ID NO: 144232 - DNA, 15 bp, Homo sapiens
aacatattgtcatcc

SEQ ID NO: 144233 - DNA, 15 bp, Homo sapiens
taacatattgtcatc

SEQ ID NO: 144234 - DNA, 15 bp, Homo sapiens
gtaacatattgtcat

SEQ ID NO: 144235 - DNA, 15 bp, Homo sapiens
cgtaacatattgtca

SEQ ID NO: 144236 - DNA, 15 bp, Homo sapiens
ccgtaacatattgtc

SEQ ID NO: 144237 - DNA, 15 bp, Homo sapiens
cccgtaacatattgt

SEQ ID NO: 144238 - DNA, 15 bp, Homo sapiens
tcccgtaacatattg

SEQ ID NO: 144239 - DNA, 15 bp, Homo sapiens
ttcccgtaacatatt

SEQ ID NO: 144240 - DNA, 15 bp, Homo sapiens
cttcccgtaacatat

SEQ ID NO: 144241 - DNA, 15 bp, Homo sapiens
ccttcccgtaacata

SEQ ID NO: 144242 - DNA, 15 bp, Homo sapiens
gccttcccgtaacat

SEQ ID NO: 144243 - DNA, 15 bp, Homo sapiens
tgccttcccgtaaca

SEQ ID NO: 144244 - DNA, 15 bp, Homo sapiens
ctgccttcccgtaac

SEQ ID NO: 144245 - DNA, 15 bp, Homo sapiens
cctgccttcccgtaa

SEQ ID NO: 144246 - DNA, 15 bp, Homo sapiens
ccctgccttcccgta

SEQ ID NO: 144247 - DNA, 15 bp, Homo sapiens
tccctgccttcccgt

SEQ ID NO: 144248 - DNA, 15 bp, Homo sapiens
atccctgccttcccg

SEQ ID NO: 144249 - DNA, 15 bp, Homo sapiens
catccctgccttccc

SEQ ID NO: 144250 - DNA, 15 bp, Homo sapiens
ccatccctgccttcc

SEQ ID NO: 144251 - DNA, 15 bp, Homo sapiens
cccatccctgccttc

SEQ ID NO: 144252 - DNA, 15 bp, Homo sapiens
acccatccctgcctt

SEQ ID NO: 144253 - DNA, 15 bp, Homo sapiens
gacccatccctgcct

SEQ ID NO: 144254 - DNA, 15 bp, Homo sapiens
agacccatccctgcc

SEQ ID NO: 144255 - DNA, 15 bp, Homo sapiens
gagacccatccctgc

SEQ ID NO: 144256 - DNA, 15 bp, Homo sapiens
agagacccatccctg

SEQ ID NO: 144257 - DNA, 15 bp, Homo sapiens
aagagacccatccct

SEQ ID NO: 144258 - DNA, 15 bp, Homo sapiens
aaagagacccatccc

SEQ ID NO: 144259 - DNA, 15 bp, Homo sapiens
aaaagagacccatcc

SEQ ID NO: 144260 - DNA, 15 bp, Homo sapiens
caaaagagacccatc

SEQ ID NO: 144261 - DNA, 15 bp, Homo sapiens
acaaaagagacccat

SEQ ID NO: 144262 - DNA, 15 bp, Homo sapiens
cacaaaagagaccca

SEQ ID NO: 144263 - DNA, 15 bp, Homo sapiens
tcacaaaagagaccc

SEQ ID NO: 144264 - DNA, 15 bp, Homo sapiens
ttcacaaaagagacc

SEQ ID NO: 144265 - DNA, 15 bp, Homo sapiens
attcacaaaagagac

SEQ ID NO: 144266 - DNA, 15 bp, Homo sapiens
aattcacaaaagaga

SEQ ID NO: 144267 - DNA, 15 bp, Homo sapiens
taattcacaaaagag

SEQ ID NO: 144268 - DNA, 15 bp, Homo sapiens
gtaattcacaaaaga

SEQ ID NO: 144269 - DNA, 15 bp, Homo sapiens
agtaattcacaaaag

SEQ ID NO: 144270 - DNA, 15 bp, Homo sapiens
aagtaattcacaaaa

SEQ ID NO: 144271 - DNA, 15 bp, Homo sapiens
taagtaattcacaaa

SEQ ID NO: 144272 - DNA, 15 bp, Homo sapiens
ttaagtaattcacaa

SEQ ID NO: 144273 - DNA, 15 bp, Homo sapiens
gttaagtaattcaca

SEQ ID NO: 144274 - DNA, 15 bp, Homo sapiens
ggttaagtaattcac

SEQ ID NO: 144275 - DNA, 15 bp, Homo sapiens
gggttaagtaattca

SEQ ID NO: 144276 - DNA, 15 bp, Homo sapiens
ggggttaagtaattc

SEQ ID NO: 144277 - DNA, 15 bp, Homo sapiens
aggggttaagtaatt

SEQ ID NO: 144278 - DNA, 15 bp, Homo sapiens
taggggttaagtaat

SEQ ID NO: 144279 - DNA, 15 bp, Homo sapiens
ttaggggttaagtaa

SEQ ID NO: 144280 - DNA, 15 bp, Homo sapiens
attaggggttaagta

SEQ ID NO: 144281 - DNA, 15 bp, Homo sapiens
cattaggggttaagt

SEQ ID NO: 144282 - DNA, 15 bp, Homo sapiens
ccattaggggttaag

SEQ ID NO: 144283 - DNA, 15 bp, Homo sapiens
gccattaggggttaa

SEQ ID NO: 144284 - DNA, 15 bp, Homo sapiens
agccattaggggtta

SEQ ID NO: 144285 - DNA, 15 bp, Homo sapiens
tagccattaggggtt

SEQ ID NO: 144286 - DNA, 15 bp, Homo sapiens
ctagccattaggggt

SEQ ID NO: 144287 - DNA, 15 bp, Homo sapiens
gctagccattagggg

SEQ ID NO: 144288 - DNA, 15 bp, Homo sapiens
tgctagccattaggg

SEQ ID NO: 144289 - DNA, 15 bp, Homo sapiens
ctgctagccattagg

SEQ ID NO: 144290 - DNA, 15 bp, Homo sapiens
actgctagccattag

SEQ ID NO: 144291 - DNA, 15 bp, Homo sapiens
cactgctagccatta

SEQ ID NO: 144292 - DNA, 15 bp, Homo sapiens
acactgctagccatt

SEQ ID NO: 144293 - DNA, 15 bp, Homo sapiens
aacactgctagccat

SEQ ID NO: 144294 - DNA, 15 bp, Homo sapiens
caacactgctagcca

SEQ ID NO: 144295 - DNA, 15 bp, Homo sapiens
tcaacactgctagcc

SEQ ID NO: 144296 - DNA, 15 bp, Homo sapiens
ctcaacactgctagc

SEQ ID NO: 144297 - DNA, 15 bp, Homo sapiens
gctcaacactgctag

SEQ ID NO: 144298 - DNA, 15 bp, Homo sapiens
tgctcaacactgcta

SEQ ID NO: 144299 - DNA, 15 bp, Homo sapiens
ctgctcaacactgct

SEQ ID NO: 144300 - DNA, 15 bp, Homo sapiens
cctgctcaacactgc

SEQ ID NO: 144301 - DNA, 15 bp, Homo sapiens
tcctgctcaacactg

SEQ ID NO: 144302 - DNA, 15 bp, Homo sapiens
ctcctgctcaacact

SEQ ID NO: 144303 - DNA, 15 bp, Homo sapiens
tctcctgctcaacac

SEQ ID NO: 144304 - DNA, 15 bp, Homo sapiens
ttctcctgctcaaca

SEQ ID NO: 144305 - DNA, 15 bp, Homo sapiens
cttctcctgctcaac

SEQ ID NO: 144306 - DNA, 15 bp, Homo sapiens
ccttctcctgctcaa

SEQ ID NO: 144307 - DNA, 15 bp, Homo sapiens
cccttctcctgctca

SEQ ID NO: 144308 - DNA, 15 bp, Homo sapiens
tcccttctcctgctc

SEQ ID NO: 144309 - DNA, 15 bp, Homo sapiens
gtcccttctcctgct

SEQ ID NO: 144310 - DNA, 15 bp, Homo sapiens
ggtcccttctcctgc

SEQ ID NO: 144311 - DNA, 15 bp, Homo sapiens
aggtcccttctcctg

SEQ ID NO: 144312 - DNA, 15 bp, Homo sapiens
gaggtcccttctcct

SEQ ID NO: 144313 - DNA, 15 bp, Homo sapiens
agaggtcccttctcc

SEQ ID NO: 144314 - DNA, 15 bp, Homo sapiens
gagaggtcccttctc

SEQ ID NO: 144315 - DNA, 15 bp, Homo sapiens
cgagaggtcccttct

SEQ ID NO: 144316 - DNA, 15 bp, Homo sapiens
tcgagaggtcccttc

SEQ ID NO: 144317 - DNA, 15 bp, Homo sapiens
ctcgagaggtccctt

SEQ ID NO: 144318 - DNA, 15 bp, Homo sapiens
actcgagaggtccct

SEQ ID NO: 144319 - DNA, 15 bp, Homo sapiens
cactcgagaggtccc

SEQ ID NO: 144320 - DNA, 15 bp, Homo sapiens
ccactcgagaggtcc

SEQ ID NO: 144321 - DNA, 15 bp, Homo sapiens
gccactcgagaggtc

SEQ ID NO: 144322 - DNA, 15 bp, Homo sapiens
agccactcgagaggt

SEQ ID NO: 144323 - DNA, 15 bp, Homo sapiens
cagccactcgagagg

SEQ ID NO: 144324 - DNA, 15 bp, Homo sapiens
tcagccactcgagag

SEQ ID NO: 144325 - DNA, 15 bp, Homo sapiens
ctcagccactcgaga

SEQ ID NO: 144326 - DNA, 15 bp, Homo sapiens
actcagccactcgag

SEQ ID NO: 144327 - DNA, 15 bp, Homo sapiens
cactcagccactcga

SEQ ID NO: 144328 - DNA, 15 bp, Homo sapiens
acactcagccactcg

SEQ ID NO: 144329 - DNA, 15 bp, Homo sapiens
cacactcagccactc

SEQ ID NO: 144330 - DNA, 15 bp, Homo sapiens
ccacactcagccact

SEQ ID NO: 144331 - DNA, 15 bp, Homo sapiens
cccacactcagccac

SEQ ID NO: 144332 - DNA, 15 bp, Homo sapiens
acccacactcagcca

SEQ ID NO: 144333 - DNA, 15 bp, Homo sapiens
cacccacactcagcc

SEQ ID NO: 144334 - DNA, 15 bp, Homo sapiens
acacccacactcagc

SEQ ID NO: 144335 - DNA, 15 bp, Homo sapiens
gacacccacactcag

SEQ ID NO: 144336 - DNA, 15 bp, Homo sapiens
tgacacccacactca

SEQ ID NO: 144337 - DNA, 15 bp, Homo sapiens
ctgacacccacactc

SEQ ID NO: 144338 - DNA, 15 bp, Homo sapiens
actgacacccacact

SEQ ID NO: 144339 - DNA, 15 bp, Homo sapiens
aactgacacccacac

SEQ ID NO: 144340 - DNA, 15 bp, Homo sapiens
aaactgacacccaca

SEQ ID NO: 144341 - DNA, 15 bp, Homo sapiens
aaaactgacacccac

SEQ ID NO: 144342 - DNA, 15 bp, Homo sapiens
gaaaactgacaccca

SEQ ID NO: 144343 - DNA, 15 bp, Homo sapiens
ggaaaactgacaccc

SEQ ID NO: 144344 - DNA, 15 bp, Homo sapiens
gggaaaactgacacc

SEQ ID NO: 144345 - DNA, 15 bp, Homo sapiens
agggaaaactgacac

SEQ ID NO: 144346 - DNA, 15 bp, Homo sapiens
aagggaaaactgaca

SEQ ID NO: 144347 - DNA, 15 bp, Homo sapiens
caagggaaaactgac

SEQ ID NO: 144348 - DNA, 15 bp, Homo sapiens
gcaagggaaaactga

SEQ ID NO: 144349 - DNA, 15 bp, Homo sapiens
agcaagggaaaactg

SEQ ID NO: 144350 - DNA, 15 bp, Homo sapiens
cagcaagggaaaact

SEQ ID NO: 144351 - DNA, 15 bp, Homo sapiens
gcagcaagggaaaac

SEQ ID NO: 144352 - DNA, 15 bp, Homo sapiens
agcagcaagggaaaa

SEQ ID NO: 144353 - DNA, 15 bp, Homo sapiens
cagcagcaagggaaa

SEQ ID NO: 144354 - DNA, 15 bp, Homo sapiens
acagcagcaagggaa

SEQ ID NO: 144355 - DNA, 15 bp, Homo sapiens
tacagcagcaaggga

SEQ ID NO: 144356 - DNA, 15 bp, Homo sapiens
ttacagcagcaaggg

SEQ ID NO: 144357 - DNA, 15 bp, Homo sapiens
gttacagcagcaagg

SEQ ID NO: 144358 - DNA, 15 bp, Homo sapiens
cgttacagcagcaag

SEQ ID NO: 144359 - DNA, 15 bp, Homo sapiens
tcgttacagcagcaa

SEQ ID NO: 144360 - DNA, 15 bp, Homo sapiens
gtcgttacagcagca

SEQ ID NO: 144361 - DNA, 15 bp, Homo sapiens
ggtcgttacagcagc

SEQ ID NO: 144362 - DNA, 15 bp, Homo sapiens
tggtcgttacagcag

SEQ ID NO: 144363 - DNA, 15 bp, Homo sapiens
gtggtcgttacagca

SEQ ID NO: 144364 - DNA, 15 bp, Homo sapiens
tgtggtcgttacagc

SEQ ID NO: 144365 - DNA, 15 bp, Homo sapiens
ttgtggtcgttacag

SEQ ID NO: 144366 - DNA, 15 bp, Homo sapiens
tttgtggtcgttaca

SEQ ID NO: 144367 - DNA, 15 bp, Homo sapiens
gtttgtggtcgttac

SEQ ID NO: 144368 - DNA, 15 bp, Homo sapiens
tgtttgtggtcgtta

SEQ ID NO: 144369 - DNA, 15 bp, Homo sapiens
atgtttgtggtcgtt

SEQ ID NO: 144370 - DNA, 15 bp, Homo sapiens
tatgtttgtggtcgt

SEQ ID NO: 144371 - DNA, 15 bp, Homo sapiens
ctatgtttgtggtcg

SEQ ID NO: 144372 - DNA, 15 bp, Homo sapiens
actatgtttgtggtc

SEQ ID NO: 144373 - DNA, 15 bp, Homo sapiens
cactatgtttgtggt

SEQ ID NO: 144374 - DNA, 15 bp, Homo sapiens
gcactatgtttgtgg

SEQ ID NO: 144375 - DNA, 15 bp, Homo sapiens
ggcactatgtttgtg

SEQ ID NO: 144376 - DNA, 15 bp, Homo sapiens
aggcactatgtttgt

SEQ ID NO: 144377 - DNA, 15 bp, Homo sapiens
aaggcactatgtttg

SEQ ID NO: 144378 - DNA, 15 bp, Homo sapiens
taaggcactatgttt

SEQ ID NO: 144379 - DNA, 15 bp, Homo sapiens
ttaaggcactatgtt

SEQ ID NO: 144380 - DNA, 15 bp, Homo sapiens
cttaaggcactatgt

SEQ ID NO: 144381 - DNA, 15 bp, Homo sapiens
tcttaaggcactatg

SEQ ID NO: 144382 - DNA, 15 bp, Homo sapiens
atcttaaggcactat

SEQ ID NO: 144383 - DNA, 15 bp, Homo sapiens
tatcttaaggcacta

SEQ ID NO: 144384 - DNA, 15 bp, Homo sapiens
ttatcttaaggcact

SEQ ID NO: 144385 - DNA, 15 bp, Homo sapiens
gttatcttaaggcac

SEQ ID NO: 144386 - DNA, 15 bp, Homo sapiens
tgttatcttaaggca

SEQ ID NO: 144387 - DNA, 15 bp, Homo sapiens
gtgttatcttaaggc

SEQ ID NO: 144388 - DNA, 15 bp, Homo sapiens
tgtgttatcttaagg

SEQ ID NO: 144389 - DNA, 15 bp, Homo sapiens
ttgtgttatcttaag

SEQ ID NO: 144390 - DNA, 15 bp, Homo sapiens
tttgtgttatcttaa

SEQ ID NO: 144391 - DNA, 15 bp, Homo sapiens
atttgtgttatctta

SEQ ID NO: 144392 - DNA, 15 bp, Homo sapiens
tatttgtgttatctt

SEQ ID NO: 144393 - DNA, 15 bp, Homo sapiens
atatttgtgttatct

SEQ ID NO: 144394 - DNA, 15 bp, Homo sapiens
tatatttgtgttatc

SEQ ID NO: 144395 - DNA, 15 bp, Homo sapiens
gtatatttgtgttat

SEQ ID NO: 144396 - DNA, 15 bp, Homo sapiens
agtatatttgtgtta

SEQ ID NO: 144397 - DNA, 15 bp, Homo sapiens
gagtatatttgtgtt

SEQ ID NO: 144398 - DNA, 15 bp, Homo sapiens
ggagtatatttgtgt

SEQ ID NO: 144399 - DNA, 15 bp, Homo sapiens
aggagtatatttgtg

SEQ ID NO: 144400 - DNA, 15 bp, Homo sapiens
taggagtatatttgt

SEQ ID NO: 144401 - DNA, 15 bp, Homo sapiens
gtaggagtatatttg

SEQ ID NO: 144402 - DNA, 15 bp, Homo sapiens
tgtaggagtatattt

SEQ ID NO: 144403 - DNA, 15 bp, Homo sapiens
ctgtaggagtatatt

SEQ ID NO: 144404 - DNA, 15 bp, Homo sapiens
actgtaggagtatat

SEQ ID NO: 144405 - DNA, 15 bp, Homo sapiens
aactgtaggagtata

SEQ ID NO: 144406 - DNA, 15 bp, Homo sapiens
gaactgtaggagtat

SEQ ID NO: 144407 - DNA, 15 bp, Homo sapiens
agaactgtaggagta

SEQ ID NO: 144408 - DNA, 15 bp, Homo sapiens
cagaactgtaggagt

SEQ ID NO: 144409 - DNA, 15 bp, Homo sapiens
tcagaactgtaggag

SEQ ID NO: 144410 - DNA, 15 bp, Homo sapiens
ttcagaactgtagga

SEQ ID NO: 144411 - DNA, 15 bp, Homo sapiens
cttcagaactgtagg

SEQ ID NO: 144412 - DNA, 15 bp, Homo sapiens
ccttcagaactgtag

SEQ ID NO: 144413 - DNA, 15 bp, Homo sapiens
gccttcagaactgta

SEQ ID NO: 144414 - DNA, 15 bp, Homo sapiens
cgccttcagaactgt

SEQ ID NO: 144415 - DNA, 15 bp, Homo sapiens
tcgccttcagaactg

SEQ ID NO: 144416 - DNA, 15 bp, Homo sapiens
ctcgccttcagaact

SEQ ID NO: 144417 - DNA, 15 bp, Homo sapiens
tctcgccttcagaac

SEQ ID NO: 144418 - DNA, 15 bp, Homo sapiens
ttctcgccttcagaa

SEQ ID NO: 144419 - DNA, 15 bp, Homo sapiens
cttctcgccttcaga

SEQ ID NO: 144420 - DNA, 15 bp, Homo sapiens
acttctcgccttcag

SEQ ID NO: 144421 - DNA, 15 bp, Homo sapiens
gacttctcgccttca

SEQ ID NO: 144422 - DNA, 15 bp, Homo sapiens
cgacttctcgccttc

SEQ ID NO: 144423 - DNA, 15 bp, Homo sapiens
ccgacttctcgcctt

SEQ ID NO: 144424 - DNA, 15 bp, Homo sapiens
tccgacttctcgcct

SEQ ID NO: 144425 - DNA, 15 bp, Homo sapiens
ttccgacttctcgcc

SEQ ID NO: 144426 - DNA, 15 bp, Homo sapiens
tttccgacttctcgc

SEQ ID NO: 144427 - DNA, 15 bp, Homo sapiens
atttccgacttctcg

SEQ ID NO: 144428 - DNA, 15 bp, Homo sapiens
gatttccgacttctc

SEQ ID NO: 144429 - DNA, 15 bp, Homo sapiens
tgatttccgacttct

SEQ ID NO: 144430 - DNA, 15 bp, Homo sapiens
ctgatttccgacttc

SEQ ID NO: 144431 - DNA, 15 bp, Homo sapiens
actgatttccgactt

SEQ ID NO: 144432 - DNA, 15 bp, Homo sapiens
aactgatttccgact

SEQ ID NO: 144433 - DNA, 15 bp, Homo sapiens
aaactgatttccgac

SEQ ID NO: 144434 - DNA, 15 bp, Homo sapiens
gaaactgatttccga

SEQ ID NO: 144435 - DNA, 15 bp, Homo sapiens
ggaaactgatttccg

SEQ ID NO: 144436 - DNA, 15 bp, Homo sapiens
gggaaactgatttcc

SEQ ID NO: 144437 - DNA, 15 bp, Homo sapiens
agggaaactgatttc

SEQ ID NO: 144438 - DNA, 15 bp, Homo sapiens
cagggaaactgattt

SEQ ID NO: 144439 - DNA, 15 bp, Homo sapiens
ccagggaaactgatt

SEQ ID NO: 144440 - DNA, 15 bp, Homo sapiens
cccagggaaactgat

SEQ ID NO: 144441 - DNA, 15 bp, Homo sapiens
gcccagggaaactga

SEQ ID NO: 144442 - DNA, 15 bp, Homo sapiens
agcccagggaaactg

SEQ ID NO: 144443 - DNA, 15 bp, Homo sapiens
aagcccagggaaact

SEQ ID NO: 144444 - DNA, 15 bp, Homo sapiens
aaagcccagggaaac

SEQ ID NO: 144445 - DNA, 15 bp, Homo sapiens
aaaagcccagggaaa

SEQ ID NO: 144446 - DNA, 15 bp, Homo sapiens
taaaagcccagggaa

SEQ ID NO: 144447 - DNA, 15 bp, Homo sapiens
ttaaaagcccaggga

SEQ ID NO: 144448 - DNA, 15 bp, Homo sapiens
tttaaaagcccaggg

SEQ ID NO: 144449 - DNA, 15 bp, Homo sapiens
ctttaaaagcccagg

SEQ ID NO: 144450 - DNA, 15 bp, Homo sapiens
actttaaaagcccag

SEQ ID NO: 144451 - DNA, 15 bp, Homo sapiens
gactttaaaagccca

SEQ ID NO: 144452 - DNA, 15 bp, Homo sapiens
tgactttaaaagccc

SEQ ID NO: 144453 - DNA, 15 bp, Homo sapiens
ttgactttaaaagcc

SEQ ID NO: 144454 - DNA, 15 bp, Homo sapiens
tttgactttaaaagc

SEQ ID NO: 144455 - DNA, 15 bp, Homo sapiens
ctttgactttaaaag

SEQ ID NO: 144456 - DNA, 15 bp, Homo sapiens
gctttgactttaaaa

SEQ ID NO: 144457 - DNA, 15 bp, Homo sapiens
cgctttgactttaaa

SEQ ID NO: 144458 - DNA, 15 bp, Homo sapiens
acgctttgactttaa

SEQ ID NO: 144459 - DNA, 15 bp, Homo sapiens
gacgctttgacttta

SEQ ID NO: 144460 - DNA, 15 bp, Homo sapiens
agacgctttgacttt

SEQ ID NO: 144461 - DNA, 15 bp, Homo sapiens
cagacgctttgactt

SEQ ID NO: 144462 - DNA, 15 bp, Homo sapiens
gcagacgctttgact

SEQ ID NO: 144463 - DNA, 15 bp, Homo sapiens
tgcagacgctttgac

SEQ ID NO: 144464 - DNA, 15 bp, Homo sapiens
ctgcagacgctttga

SEQ ID NO: 144465 - DNA, 15 bp, Homo sapiens
cctgcagacgctttg

SEQ ID NO: 144466 - DNA, 15 bp, Homo sapiens
ccctgcagacgcttt

SEQ ID NO: 144467 - DNA, 15 bp, Homo sapiens
gccctgcagacgctt

SEQ ID NO: 144468 - DNA, 15 bp, Homo sapiens
agccctgcagacgct

SEQ ID NO: 144469 - DNA, 15 bp, Homo sapiens
cagccctgcagacgc

SEQ ID NO: 144470 - DNA, 15 bp, Homo sapiens
ccagccctgcagacg

SEQ ID NO: 144471 - DNA, 15 bp, Homo sapiens
accagccctgcagac

SEQ ID NO: 144472 - DNA, 15 bp, Homo sapiens
aaccagccctgcaga

SEQ ID NO: 144473 - DNA, 15 bp, Homo sapiens
gaaccagccctgcag

SEQ ID NO: 144474 - DNA, 15 bp, Homo sapiens
ggaaccagccctgca

SEQ ID NO: 144475 - DNA, 15 bp, Homo sapiens
aggaaccagccctgc

SEQ ID NO: 144476 - DNA, 15 bp, Homo sapiens
aaggaaccagccctg

SEQ ID NO: 144477 - DNA, 15 bp, Homo sapiens
gaaggaaccagccct

SEQ ID NO: 144478 - DNA, 15 bp, Homo sapiens
agaaggaaccagccc

SEQ ID NO: 144479 - DNA, 15 bp, Homo sapiens
cagaaggaaccagcc

SEQ ID NO: 144480 - DNA, 15 bp, Homo sapiens
ccagaaggaaccagc

SEQ ID NO: 144481 - DNA, 15 bp, Homo sapiens
tccagaaggaaccag

SEQ ID NO: 144482 - DNA, 15 bp, Homo sapiens
ctccagaaggaacca

SEQ ID NO: 144483 - DNA, 15 bp, Homo sapiens
cctccagaaggaacc

SEQ ID NO: 144484 - DNA, 15 bp, Homo sapiens
gcctccagaaggaac

SEQ ID NO: 144485 - DNA, 15 bp, Homo sapiens
agcctccagaaggaa

SEQ ID NO: 144486 - DNA, 15 bp, Homo sapiens
gagcctccagaagga

SEQ ID NO: 144487 - DNA, 15 bp, Homo sapiens
agagcctccagaagg

SEQ ID NO: 144488 - DNA, 15 bp, Homo sapiens
cagagcctccagaag

SEQ ID NO: 144489 - DNA, 15 bp, Homo sapiens
tcagagcctccagaa

SEQ ID NO: 144490 - DNA, 15 bp, Homo sapiens
ctcagagcctccaga

SEQ ID NO: 144491 - DNA, 15 bp, Homo sapiens
cctcagagcctccag

SEQ ID NO: 144492 - DNA, 15 bp, Homo sapiens
ccctcagagcctcca

SEQ ID NO: 144493 - DNA, 15 bp, Homo sapiens
cccctcagagcctcc

SEQ ID NO: 144494 - DNA, 15 bp, Homo sapiens
gcccctcagagcctc

SEQ ID NO: 144495 - DNA, 15 bp, Homo sapiens
tgcccctcagagcct

SEQ ID NO: 144496 - DNA, 15 bp, Homo sapiens
ttgcccctcagagcc

SEQ ID NO: 144497 - DNA, 15 bp, Homo sapiens
cttgcccctcagagc

SEQ ID NO: 144498 - DNA, 15 bp, Homo sapiens
acttgcccctcagag

SEQ ID NO: 144499 - DNA, 15 bp, Homo sapiens
gacttgcccctcaga

SEQ ID NO: 144500 - DNA, 15 bp, Homo sapiens
cgacttgcccctcag

SEQ ID NO: 144501 - DNA, 15 bp, Homo sapiens
acgacttgcccctca

SEQ ID NO: 144502 - DNA, 15 bp, Homo sapiens
aacgacttgcccctc

SEQ ID NO: 144503 - DNA, 15 bp, Homo sapiens
aaacgacttgcccct

SEQ ID NO: 144504 - DNA, 15 bp, Homo sapiens
aaaacgacttgcccc

SEQ ID NO: 144505 - DNA, 15 bp, Homo sapiens
aaaaacgacttgccc

SEQ ID NO: 144506 - DNA, 15 bp, Homo sapiens
gaaaaacgacttgcc

SEQ ID NO: 144507 - DNA, 15 bp, Homo sapiens
agaaaaacgacttgc

SEQ ID NO: 144508 - DNA, 15 bp, Homo sapiens
aagaaaaacgacttg

SEQ ID NO: 144509 - DNA, 15 bp, Homo sapiens
caagaaaaacgactt

SEQ ID NO: 144510 - DNA, 15 bp, Homo sapiens
gcaagaaaaacgact

SEQ ID NO: 144511 - DNA, 15 bp, Homo sapiens
ggcaagaaaaacgac

SEQ ID NO: 144512 - DNA, 15 bp, Homo sapiens
aggcaagaaaaacga

SEQ ID NO: 144513 - DNA, 15 bp, Homo sapiens
aaggcaagaaaaacg

SEQ ID NO: 144514 - DNA, 15 bp, Homo sapiens
aaaggcaagaaaaac

SEQ ID NO: 144515 - DNA, 15 bp, Homo sapiens
aaaaggcaagaaaaa

SEQ ID NO: 144516 - DNA, 15 bp, Homo sapiens
caaaaggcaagaaaa

SEQ ID NO: 144517 - DNA, 15 bp, Homo sapiens
gcaaaaggcaagaaa

SEQ ID NO: 144518 - DNA, 15 bp, Homo sapiens
tgcaaaaggcaagaa

SEQ ID NO: 144519 - DNA, 15 bp, Homo sapiens
ctgcaaaaggcaaga

SEQ ID NO: 144520 - DNA, 15 bp, Homo sapiens
gctgcaaaaggcaag

SEQ ID NO: 144521 - DNA, 15 bp, Homo sapiens
agctgcaaaaggcaa

SEQ ID NO: 144522 - DNA, 15 bp, Homo sapiens
aagctgcaaaaggca

SEQ ID NO: 144523 - DNA, 15 bp, Homo sapiens
gaagctgcaaaaggc

SEQ ID NO: 144524 - DNA, 15 bp, Homo sapiens
ggaagctgcaaaagg

SEQ ID NO: 144525 - DNA, 15 bp, Homo sapiens
tggaagctgcaaaag

SEQ ID NO: 144526 - DNA, 15 bp, Homo sapiens
ctggaagctgcaaaa

SEQ ID NO: 144527 - DNA, 15 bp, Homo sapiens
actggaagctgcaaa

SEQ ID NO: 144528 - DNA, 15 bp, Homo sapiens
tactggaagctgcaa

SEQ ID NO: 144529 - DNA, 15 bp, Homo sapiens
ctactggaagctgca

SEQ ID NO: 144530 - DNA, 15 bp, Homo sapiens
gctactggaagctgc

SEQ ID NO: 144531 - DNA, 15 bp, Homo sapiens
ggctactggaagctg

SEQ ID NO: 144532 - DNA, 15 bp, Homo sapiens
tggctactggaagct

SEQ ID NO: 144533 - DNA, 15 bp, Homo sapiens
gtggctactggaagc

SEQ ID NO: 144534 - DNA, 15 bp, Homo sapiens
ggtggctactggaag

SEQ ID NO: 144535 - DNA, 15 bp, Homo sapiens
aggtggctactggaa

SEQ ID NO: 144536 - DNA, 15 bp, Homo sapiens
caggtggctactgga

SEQ ID NO: 144537 - DNA, 15 bp, Homo sapiens
gcaggtggctactgg

SEQ ID NO: 144538 - DNA, 15 bp, Homo sapiens
tgcaggtggctactg

SEQ ID NO: 144539 - DNA, 15 bp, Homo sapiens
atgcaggtggctact

SEQ ID NO: 144540 - DNA, 15 bp, Homo sapiens
gatgcaggtggctac

SEQ ID NO: 144541 - DNA, 15 bp, Homo sapiens
ggatgcaggtggcta

SEQ ID NO: 144542 - DNA, 15 bp, Homo sapiens
gggatgcaggtggct

SEQ ID NO: 144543 - DNA, 15 bp, Homo sapiens
ggggatgcaggtggc

SEQ ID NO: 144544 - DNA, 15 bp, Homo sapiens
tggggatgcaggtgg

SEQ ID NO: 144545 - DNA, 15 bp, Homo sapiens
ctggggatgcaggtg

SEQ ID NO: 144546 - DNA, 15 bp, Homo sapiens
actggggatgcaggt

SEQ ID NO: 144547 - DNA, 15 bp, Homo sapiens
gactggggatgcagg

SEQ ID NO: 144548 - DNA, 15 bp, Homo sapiens
agactggggatgcag

SEQ ID NO: 144549 - DNA, 15 bp, Homo sapiens
aagactggggatgca

SEQ ID NO: 144550 - DNA, 15 bp, Homo sapiens
caagactggggatgc

SEQ ID NO: 144551 - DNA, 15 bp, Homo sapiens
acaagactggggatg

SEQ ID NO: 144552 - DNA, 15 bp, Homo sapiens
cacaagactggggat

SEQ ID NO: 144553 - DNA, 15 bp, Homo sapiens
ccacaagactgggga

SEQ ID NO: 144554 - DNA, 15 bp, Homo sapiens
gccacaagactgggg

SEQ ID NO: 144555 - DNA, 15 bp, Homo sapiens
agccacaagactggg

SEQ ID NO: 144556 - DNA, 15 bp, Homo sapiens
aagccacaagactgg

SEQ ID NO: 144557 - DNA, 15 bp, Homo sapiens
aaagccacaagactg

SEQ ID NO: 144558 - DNA, 15 bp, Homo sapiens
gaaagccacaagact

SEQ ID NO: 144559 - DNA, 15 bp, Homo sapiens
agaaagccacaagac

SEQ ID NO: 144560 - DNA, 15 bp, Homo sapiens
cagaaagccacaaga

SEQ ID NO: 144561 - DNA, 15 bp, Homo sapiens
gcagaaagccacaag

SEQ ID NO: 144562 - DNA, 15 bp, Homo sapiens
agcagaaagccacaa

SEQ ID NO: 144563 - DNA, 15 bp, Homo sapiens
gagcagaaagccaca

SEQ ID NO: 144564 - DNA, 15 bp, Homo sapiens
ggagcagaaagccac

SEQ ID NO: 144565 - DNA, 15 bp, Homo sapiens
cggagcagaaagcca

SEQ ID NO: 144566 - DNA, 15 bp, Homo sapiens
acggagcagaaagcc

SEQ ID NO: 144567 - DNA, 15 bp, Homo sapiens
tacggagcagaaagc

SEQ ID NO: 144568 - DNA, 15 bp, Homo sapiens
atacggagcagaaag

SEQ ID NO: 144569 - DNA, 15 bp, Homo sapiens
gatacggagcagaaa

SEQ ID NO: 144570 - DNA, 15 bp, Homo sapiens
ggatacggagcagaa

SEQ ID NO: 144571 - DNA, 15 bp, Homo sapiens
tggatacggagcaga

SEQ ID NO: 144572 - DNA, 15 bp, Homo sapiens
ttggatacggagcag

SEQ ID NO: 144573 - DNA, 15 bp, Homo sapiens
tttggatacggagca

SEQ ID NO: 144574 - DNA, 15 bp, Homo sapiens
ctttggatacggagc

SEQ ID NO: 144575 - DNA, 15 bp, Homo sapiens
gctttggatacggag

SEQ ID NO: 144576 - DNA, 15 bp, Homo sapiens
tgctttggatacgga

SEQ ID NO: 144577 - DNA, 15 bp, Homo sapiens
gtgctttggatacgg

SEQ ID NO: 144578 - DNA, 15 bp, Homo sapiens
tgtgctttggatacg

SEQ ID NO: 144579 - DNA, 15 bp, Homo sapiens
atgtgctttggatac

SEQ ID NO: 144580 - DNA, 15 bp, Homo sapiens
aatgtgctttggata

SEQ ID NO: 144581 - DNA, 15 bp, Homo sapiens
caatgtgctttggat

SEQ ID NO: 144582 - DNA, 15 bp, Homo sapiens
gcaatgtgctttgga

SEQ ID NO: 144583 - DNA, 15 bp, Homo sapiens
agcaatgtgctttgg

SEQ ID NO: 144584 - DNA, 15 bp, Homo sapiens
gagcaatgtgctttg

SEQ ID NO: 144585 - DNA, 15 bp, Homo sapiens
ggagcaatgtgcttt

SEQ ID NO: 144586 - DNA, 15 bp, Homo sapiens
tggagcaatgtgctt

SEQ ID NO: 144587 - DNA, 15 bp, Homo sapiens
atggagcaatgtgct

SEQ ID NO: 144588 - DNA, 15 bp, Homo sapiens
gatggagcaatgtgc

SEQ ID NO: 144589 - DNA, 15 bp, Homo sapiens
agatggagcaatgtg

SEQ ID NO: 144590 - DNA, 15 bp, Homo sapiens
gagatggagcaatgt

SEQ ID NO: 144591 - DNA, 15 bp, Homo sapiens
tgagatggagcaatg

SEQ ID NO: 144592 - DNA, 15 bp, Homo sapiens
ctgagatggagcaat

SEQ ID NO: 144593 - DNA, 15 bp, Homo sapiens
actgagatggagcaa

SEQ ID NO: 144594 - DNA, 15 bp, Homo sapiens
aactgagatggagca

SEQ ID NO: 144595 - DNA, 15 bp, Homo sapiens
aaactgagatggagc

SEQ ID NO: 144596 - DNA, 15 bp, Homo sapiens
gaaactgagatggag

SEQ ID NO: 144597 - DNA, 15 bp, Homo sapiens
ggaaactgagatgga

SEQ ID NO: 144598 - DNA, 15 bp, Homo sapiens
tggaaactgagatgg

SEQ ID NO: 144599 - DNA, 15 bp, Homo sapiens
atggaaactgagatg

SEQ ID NO: 144600 - DNA, 15 bp, Homo sapiens
gatggaaactgagat

SEQ ID NO: 144601 - DNA, 15 bp, Homo sapiens
tgatggaaactgaga

SEQ ID NO: 144602 - DNA, 15 bp, Homo sapiens
atgatggaaactgag

SEQ ID NO: 144603 - DNA, 15 bp, Homo sapiens
gatgatggaaactga

SEQ ID NO: 144604 - DNA, 15 bp, Homo sapiens
tgatgatggaaactg

SEQ ID NO: 144605 - DNA, 15 bp, Homo sapiens
gtgatgatggaaact

SEQ ID NO: 144606 - DNA, 15 bp, Homo sapiens
tgtgatgatggaaac

SEQ ID NO: 144607 - DNA, 15 bp, Homo sapiens
atgtgatgatggaaa

SEQ ID NO: 144608 - DNA, 15 bp, Homo sapiens
gatgtgatgatggaa

SEQ ID NO: 144609 - DNA, 15 bp, Homo sapiens
agatgtgatgatgga

SEQ ID NO: 144610 - DNA, 15 bp, Homo sapiens
gagatgtgatgatgg

SEQ ID NO: 144611 - DNA, 15 bp, Homo sapiens
agagatgtgatgatg

SEQ ID NO: 144612 - DNA, 15 bp, Homo sapiens
aagagatgtgatgat

SEQ ID NO: 144613 - DNA, 15 bp, Homo sapiens
taagagatgtgatga

SEQ ID NO: 144614 - DNA, 15 bp, Homo sapiens
gtaagagatgtgatg

SEQ ID NO: 144615 - DNA, 15 bp, Homo sapiens
agtaagagatgtgat

SEQ ID NO: 144616 - DNA, 15 bp, Homo sapiens
aagtaagagatgtga

SEQ ID NO: 144617 - DNA, 15 bp, Homo sapiens
aaagtaagagatgtg

SEQ ID NO: 144618 - DNA, 15 bp, Homo sapiens
gaaagtaagagatgt

SEQ ID NO: 144619 - DNA, 15 bp, Homo sapiens
agaaagtaagagatg

SEQ ID NO: 144620 - DNA, 15 bp, Homo sapiens
gagaaagtaagagat

SEQ ID NO: 144621 - DNA, 15 bp, Homo sapiens
agagaaagtaagaga

SEQ ID NO: 144622 - DNA, 15 bp, Homo sapiens
aagagaaagtaagag

SEQ ID NO: 144623 - DNA, 15 bp, Homo sapiens
gaagagaaagtaaga

SEQ ID NO: 144624 - DNA, 15 bp, Homo sapiens
agaagagaaagtaag

SEQ ID NO: 144625 - DNA, 15 bp, Homo sapiens
cagaagagaaagtaa

SEQ ID NO: 144626 - DNA, 15 bp, Homo sapiens
acagaagagaaagta

SEQ ID NO: 144627 - DNA, 15 bp, Homo sapiens
cacagaagagaaagt

SEQ ID NO: 144628 - DNA, 15 bp, Homo sapiens
acacagaagagaaag

SEQ ID NO: 144629 - DNA, 15 bp, Homo sapiens
gacacagaagagaaa

SEQ ID NO: 144630 - DNA, 15 bp, Homo sapiens
tgacacagaagagaa

SEQ ID NO: 144631 - DNA, 15 bp, Homo sapiens
ttgacacagaagaga

SEQ ID NO: 144632 - DNA, 15 bp, Homo sapiens
tttgacacagaagag

SEQ ID NO: 144633 - DNA, 15 bp, Homo sapiens
atttgacacagaaga

SEQ ID NO: 144634 - DNA, 15 bp, Homo sapiens
gatttgacacagaag

SEQ ID NO: 144635 - DNA, 15 bp, Homo sapiens
agatttgacacagaa

SEQ ID NO: 144636 - DNA, 15 bp, Homo sapiens
gagatttgacacaga

SEQ ID NO: 144637 - DNA, 15 bp, Homo sapiens
ggagatttgacacag

SEQ ID NO: 144638 - DNA, 15 bp, Homo sapiens
gggagatttgacaca

SEQ ID NO: 144639 - DNA, 15 bp, Homo sapiens
agggagatttgacac

SEQ ID NO: 144640 - DNA, 15 bp, Homo sapiens
gagggagatttgaca

SEQ ID NO: 144641 - DNA, 15 bp, Homo sapiens
agagggagatttgac

SEQ ID NO: 144642 - DNA, 15 bp, Homo sapiens
tagagggagatttga

SEQ ID NO: 144643 - DNA, 15 bp, Homo sapiens
gtagagggagatttg

SEQ ID NO: 144644 - DNA, 15 bp, Homo sapiens
ggtagagggagattt

SEQ ID NO: 144645 - DNA, 15 bp, Homo sapiens
aggtagagggagatt

SEQ ID NO: 144646 - DNA, 15 bp, Homo sapiens
gaggtagagggagat

SEQ ID NO: 144647 - DNA, 15 bp, Homo sapiens
ggaggtagagggaga

SEQ ID NO: 144648 - DNA, 15 bp, Homo sapiens
gggaggtagagggag

SEQ ID NO: 144649 - DNA, 15 bp, Homo sapiens
agggaggtagaggga

SEQ ID NO: 144650 - DNA, 15 bp, Homo sapiens
gagggaggtagaggg

SEQ ID NO: 144651 - DNA, 15 bp, Homo sapiens
agagggaggtagagg

SEQ ID NO: 144652 - DNA, 15 bp, Homo sapiens
aagagggaggtagag

SEQ ID NO: 144653 - DNA, 15 bp, Homo sapiens
aaagagggaggtaga

SEQ ID NO: 144654 - DNA, 15 bp, Homo sapiens
caaagagggaggtag

SEQ ID NO: 144655 - DNA, 15 bp, Homo sapiens
tcaaagagggaggta

SEQ ID NO: 144656 - DNA, 15 bp, Homo sapiens
ttcaaagagggaggt

SEQ ID NO: 144657 - DNA, 15 bp, Homo sapiens
cttcaaagagggagg

SEQ ID NO: 144658 - DNA, 15 bp, Homo sapiens
ccttcaaagagggag

SEQ ID NO: 144659 - DNA, 15 bp, Homo sapiens
tccttcaaagaggga

SEQ ID NO: 144660 - DNA, 15 bp, Homo sapiens
gtccttcaaagaggg

SEQ ID NO: 144661 - DNA, 15 bp, Homo sapiens
ggtccttcaaagagg

SEQ ID NO: 144662 - DNA, 15 bp, Homo sapiens
aggtccttcaaagag

SEQ ID NO: 144663 - DNA, 15 bp, Homo sapiens
aaggtccttcaaaga

SEQ ID NO: 144664 - DNA, 15 bp, Homo sapiens
aaaggtccttcaaag

SEQ ID NO: 144665 - DNA, 15 bp, Homo sapiens
caaaggtccttcaaa

SEQ ID NO: 144666 - DNA, 15 bp, Homo sapiens
acaaaggtccttcaa

SEQ ID NO: 144667 - DNA, 15 bp, Homo sapiens
cacaaaggtccttca

SEQ ID NO: 144668 - DNA, 15 bp, Homo sapiens
tcacaaaggtccttc

SEQ ID NO: 144669 - DNA, 15 bp, Homo sapiens
atcacaaaggtcctt

SEQ ID NO: 144670 - DNA, 15 bp, Homo sapiens
aatcacaaaggtcct

SEQ ID NO: 144671 - DNA, 15 bp, Homo sapiens
caatcacaaaggtcc

SEQ ID NO: 144672 - DNA, 15 bp, Homo sapiens
gcaatcacaaaggtc

SEQ ID NO: 144673 - DNA, 15 bp, Homo sapiens
tgcaatcacaaaggt

SEQ ID NO: 144674 - DNA, 15 bp, Homo sapiens
atgcaatcacaaagg

SEQ ID NO: 144675 - DNA, 15 bp, Homo sapiens
aatgcaatcacaaag

SEQ ID NO: 144676 - DNA, 15 bp, Homo sapiens
aaatgcaatcacaaa

SEQ ID NO: 144677 - DNA, 15 bp, Homo sapiens
taaatgcaatcacaa

SEQ ID NO: 144678 - DNA, 15 bp, Homo sapiens
ctaaatgcaatcaca

SEQ ID NO: 144679 - DNA, 15 bp, Homo sapiens
cctaaatgcaatcac

SEQ ID NO: 144680 - DNA, 15 bp, Homo sapiens
ccctaaatgcaatca

SEQ ID NO: 144681 - DNA, 15 bp, Homo sapiens
gccctaaatgcaatc

SEQ ID NO: 144682 - DNA, 15 bp, Homo sapiens
ggccctaaatgcaat

SEQ ID NO: 144683 - DNA, 15 bp, Homo sapiens
gggccctaaatgcaa

SEQ ID NO: 144684 - DNA, 15 bp, Homo sapiens
tgggccctaaatgca

SEQ ID NO: 144685 - DNA, 15 bp, Homo sapiens
gtgggccctaaatgc

SEQ ID NO: 144686 - DNA, 15 bp, Homo sapiens
ggtgggccctaaatg

SEQ ID NO: 144687 - DNA, 15 bp, Homo sapiens
aggtgggccctaaat

SEQ ID NO: 144688 - DNA, 15 bp, Homo sapiens
caggtgggccctaaa

SEQ ID NO: 144689 - DNA, 15 bp, Homo sapiens
ccaggtgggccctaa

SEQ ID NO: 144690 - DNA, 15 bp, Homo sapiens
tccaggtgggcccta

SEQ ID NO: 144691 - DNA, 15 bp, Homo sapiens
atccaggtgggccct

SEQ ID NO: 144692 - DNA, 15 bp, Homo sapiens
catccaggtgggccc

SEQ ID NO: 144693 - DNA, 15 bp, Homo sapiens
tcatccaggtgggcc

SEQ ID NO: 144694 - DNA, 15 bp, Homo sapiens
atcatccaggtgggc

SEQ ID NO: 144695 - DNA, 15 bp, Homo sapiens
gatcatccaggtggg

SEQ ID NO: 144696 - DNA, 15 bp, Homo sapiens
ggatcatccaggtgg

SEQ ID NO: 144697 - DNA, 15 bp, Homo sapiens
tggatcatccaggtg

SEQ ID NO: 144698 - DNA, 15 bp, Homo sapiens
ctggatcatccaggt

SEQ ID NO: 144699 - DNA, 15 bp, Homo sapiens
cctggatcatccagg

SEQ ID NO: 144700 - DNA, 15 bp, Homo sapiens
gcctggatcatccag

SEQ ID NO: 144701 - DNA, 15 bp, Homo sapiens
agcctggatcatcca

SEQ ID NO: 144702 - DNA, 15 bp, Homo sapiens
tagcctggatcatcc

SEQ ID NO: 144703 - DNA, 15 bp, Homo sapiens
ttagcctggatcatc

SEQ ID NO: 144704 - DNA, 15 bp, Homo sapiens
attagcctggatcat

SEQ ID NO: 144705 - DNA, 15 bp, Homo sapiens
gattagcctggatca

SEQ ID NO: 144706 - DNA, 15 bp, Homo sapiens
agattagcctggatc

SEQ ID NO: 144707 - DNA, 15 bp, Homo sapiens
gagattagcctggat

SEQ ID NO: 144708 - DNA, 15 bp, Homo sapiens
agagattagcctgga

SEQ ID NO: 144709 - DNA, 15 bp, Homo sapiens
aagagattagcctgg

SEQ ID NO: 144710 - DNA, 15 bp, Homo sapiens
gaagagattagcctg

SEQ ID NO: 144711 - DNA, 15 bp, Homo sapiens
tgaagagattagcct

SEQ ID NO: 144712 - DNA, 15 bp, Homo sapiens
atgaagagattagcc

SEQ ID NO: 144713 - DNA, 15 bp, Homo sapiens
gatgaagagattagc

SEQ ID NO: 144714 - DNA, 15 bp, Homo sapiens
agatgaagagattag

SEQ ID NO: 144715 - DNA, 15 bp, Homo sapiens
gagatgaagagatta

SEQ ID NO: 144716 - DNA, 15 bp, Homo sapiens
tgagatgaagagatt

SEQ ID NO: 144717 - DNA, 15 bp, Homo sapiens
ttgagatgaagagat

SEQ ID NO: 144718 - DNA, 15 bp, Homo sapiens
cttgagatgaagaga

SEQ ID NO: 144719 - DNA, 15 bp, Homo sapiens
ccttgagatgaagag

SEQ ID NO: 144720 - DNA, 15 bp, Homo sapiens
accttgagatgaaga

SEQ ID NO: 144721 - DNA, 15 bp, Homo sapiens
gaccttgagatgaag

SEQ ID NO: 144722 - DNA, 15 bp, Homo sapiens
ggaccttgagatgaa

SEQ ID NO: 144723 - DNA, 15 bp, Homo sapiens
aggaccttgagatga

SEQ ID NO: 144724 - DNA, 15 bp, Homo sapiens
aaggaccttgagatg

SEQ ID NO: 144725 - DNA, 15 bp, Homo sapiens
taaggaccttgagat

SEQ ID NO: 144726 - DNA, 15 bp, Homo sapiens
ttaaggaccttgaga

SEQ ID NO: 144727 - DNA, 15 bp, Homo sapiens
attaaggaccttgag

SEQ ID NO: 144728 - DNA, 15 bp, Homo sapiens
aattaaggaccttga

SEQ ID NO: 144729 - DNA, 15 bp, Homo sapiens
taattaaggaccttg

SEQ ID NO: 144730 - DNA, 15 bp, Homo sapiens
ttaattaaggacctt

SEQ ID NO: 144731 - DNA, 15 bp, Homo sapiens
tttaattaaggacct

SEQ ID NO: 144732 - DNA, 15 bp, Homo sapiens
atttaattaaggacc

SEQ ID NO: 144733 - DNA, 15 bp, Homo sapiens
aatttaattaaggac

SEQ ID NO: 144734 - DNA, 15 bp, Homo sapiens
taatttaattaagga

SEQ ID NO: 144735 - DNA, 15 bp, Homo sapiens
ataatttaattaagg

SEQ ID NO: 144736 - DNA, 15 bp, Homo sapiens
cataatttaattaag

SEQ ID NO: 144737 - DNA, 15 bp, Homo sapiens
acataatttaattaa

SEQ ID NO: 144738 - DNA, 15 bp, Homo sapiens
gacataatttaatta

SEQ ID NO: 144739 - DNA, 15 bp, Homo sapiens
agacataatttaatt

SEQ ID NO: 144740 - DNA, 15 bp, Homo sapiens
cagacataatttaat

SEQ ID NO: 144741 - DNA, 15 bp, Homo sapiens
acagacataatttaa

SEQ ID NO: 144742 - DNA, 15 bp, Homo sapiens
tacagacataattta

SEQ ID NO: 144743 - DNA, 15 bp, Homo sapiens
ctacagacataattt

SEQ ID NO: 144744 - DNA, 15 bp, Homo sapiens
tctacagacataatt

SEQ ID NO: 144745 - DNA, 15 bp, Homo sapiens
ctctacagacataat

SEQ ID NO: 144746 - DNA, 15 bp, Homo sapiens
actctacagacataa

SEQ ID NO: 144747 - DNA, 15 bp, Homo sapiens
gactctacagacata

SEQ ID NO: 144748 - DNA, 15 bp, Homo sapiens
ggactctacagacat

SEQ ID NO: 144749 - DNA, 15 bp, Homo sapiens
gggactctacagaca

SEQ ID NO: 144750 - DNA, 15 bp, Homo sapiens
agggactctacagac

SEQ ID NO: 144751 - DNA, 15 bp, Homo sapiens
aagggactctacaga

SEQ ID NO: 144752 - DNA, 15 bp, Homo sapiens
caagggactctacag

SEQ ID NO: 144753 - DNA, 15 bp, Homo sapiens
acaagggactctaca

SEQ ID NO: 144754 - DNA, 15 bp, Homo sapiens
cacaagggactctac

SEQ ID NO: 144755 - DNA, 15 bp, Homo sapiens
gcacaagggactcta

SEQ ID NO: 144756 - DNA, 15 bp, Homo sapiens
ggcacaagggactct

SEQ ID NO: 144757 - DNA, 15 bp, Homo sapiens
tggcacaagggactc

SEQ ID NO: 144758 - DNA, 15 bp, Homo sapiens
ctggcacaagggact

SEQ ID NO: 144759 - DNA, 15 bp, Homo sapiens
actggcacaagggac

SEQ ID NO: 144760 - DNA, 15 bp, Homo sapiens
aactggcacaaggga

SEQ ID NO: 144761 - DNA, 15 bp, Homo sapiens
taactggcacaaggg

SEQ ID NO: 144762 - DNA, 15 bp, Homo sapiens
ttaactggcacaagg

SEQ ID NO: 144763 - DNA, 15 bp, Homo sapiens
cttaactggcacaag

SEQ ID NO: 144764 - DNA, 15 bp, Homo sapiens
ccttaactggcacaa

SEQ ID NO: 144765 - DNA, 15 bp, Homo sapiens
accttaactggcaca

SEQ ID NO: 144766 - DNA, 15 bp, Homo sapiens
gaccttaactggcac

SEQ ID NO: 144767 - DNA, 15 bp, Homo sapiens
cgaccttaactggca

SEQ ID NO: 144768 - DNA, 15 bp, Homo sapiens
gcgaccttaactggc

SEQ ID NO: 144769 - DNA, 15 bp, Homo sapiens
tgcgaccttaactgg

SEQ ID NO: 144770 - DNA, 15 bp, Homo sapiens
ctgcgaccttaactg

SEQ ID NO: 144771 - DNA, 15 bp, Homo sapiens
actgcgaccttaact

SEQ ID NO: 144772 - DNA, 15 bp, Homo sapiens
gactgcgaccttaac

SEQ ID NO: 144773 - DNA, 15 bp, Homo sapiens
tgactgcgaccttaa

SEQ ID NO: 144774 - DNA, 15 bp, Homo sapiens
gtgactgcgacctta

SEQ ID NO: 144775 - DNA, 15 bp, Homo sapiens
tgtgactgcgacctt

SEQ ID NO: 144776 - DNA, 15 bp, Homo sapiens
ctgtgactgcgacct

SEQ ID NO: 144777 - DNA, 15 bp, Homo sapiens
tctgtgactgcgacc

SEQ ID NO: 144778 - DNA, 15 bp, Homo sapiens
atctgtgactgcgac

SEQ ID NO: 144779 - DNA, 15 bp, Homo sapiens
aatctgtgactgcga

SEQ ID NO: 144780 - DNA, 15 bp, Homo sapiens
gaatctgtgactgcg

SEQ ID NO: 144781 - DNA, 15 bp, Homo sapiens
ggaatctgtgactgc

SEQ ID NO: 144782 - DNA, 15 bp, Homo sapiens
tggaatctgtgactg

SEQ ID NO: 144783 - DNA, 15 bp, Homo sapiens
ctggaatctgtgact

SEQ ID NO: 144784 - DNA, 15 bp, Homo sapiens
cctggaatctgtgac

SEQ ID NO: 144785 - DNA, 15 bp, Homo sapiens
ccctggaatctgtga

SEQ ID NO: 144786 - DNA, 15 bp, Homo sapiens
tccctggaatctgtg

SEQ ID NO: 144787 - DNA, 15 bp, Homo sapiens
atccctggaatctgt

SEQ ID NO: 144788 - DNA, 15 bp, Homo sapiens
catccctggaatctg

SEQ ID NO: 144789 - DNA, 15 bp, Homo sapiens
tcatccctggaatct

SEQ ID NO: 144790 - DNA, 15 bp, Homo sapiens
ctcatccctggaatc

SEQ ID NO: 144791 - DNA, 15 bp, Homo sapiens
cctcatccctggaat

SEQ ID NO: 144792 - DNA, 15 bp, Homo sapiens
tcctcatccctggaa

SEQ ID NO: 144793 - DNA, 15 bp, Homo sapiens
gtcctcatccctgga

SEQ ID NO: 144794 - DNA, 15 bp, Homo sapiens
cgtcctcatccctgg

SEQ ID NO: 144795 - DNA, 15 bp, Homo sapiens
acgtcctcatccctg

SEQ ID NO: 144796 - DNA, 15 bp, Homo sapiens
cacgtcctcatccct

SEQ ID NO: 144797 - DNA, 15 bp, Homo sapiens
ccacgtcctcatccc

SEQ ID NO: 144798 - DNA, 15 bp, Homo sapiens
tccacgtcctcatcc

SEQ ID NO: 144799 - DNA, 15 bp, Homo sapiens
gtccacgtcctcatc

SEQ ID NO: 144800 - DNA, 15 bp, Homo sapiens
tgtccacgtcctcat

SEQ ID NO: 144801 - DNA, 15 bp, Homo sapiens
atgtccacgtcctca

SEQ ID NO: 144802 - DNA, 15 bp, Homo sapiens
gatgtccacgtcctc

SEQ ID NO: 144803 - DNA, 15 bp, Homo sapiens
agatgtccacgtcct

SEQ ID NO: 144804 - DNA, 15 bp, Homo sapiens
aagatgtccacgtcc

SEQ ID NO: 144805 - DNA, 15 bp, Homo sapiens
gaagatgtccacgtc

SEQ ID NO: 144806 - DNA, 15 bp, Homo sapiens
agaagatgtccacgt

SEQ ID NO: 144807 - DNA, 15 bp, Homo sapiens
tagaagatgtccacg

SEQ ID NO: 144808 - DNA, 15 bp, Homo sapiens
ctagaagatgtccac

SEQ ID NO: 144809 - DNA, 15 bp, Homo sapiens
cctagaagatgtcca

SEQ ID NO: 144810 - DNA, 15 bp, Homo sapiens
ccctagaagatgtcc

SEQ ID NO: 144811 - DNA, 15 bp, Homo sapiens
gccctagaagatgtc

SEQ ID NO: 144812 - DNA, 15 bp, Homo sapiens
ggccctagaagatgt

SEQ ID NO: 144813 - DNA, 15 bp, Homo sapiens
tggccctagaagatg

SEQ ID NO: 144814 - DNA, 15 bp, Homo sapiens
atggccctagaagat

SEQ ID NO: 144815 - DNA, 15 bp, Homo sapiens
catggccctagaaga

SEQ ID NO: 144816 - DNA, 15 bp, Homo sapiens
tcatggccctagaag

SEQ ID NO: 144817 - DNA, 15 bp, Homo sapiens
atcatggccctagaa

SEQ ID NO: 144818 - DNA, 15 bp, Homo sapiens
aatcatggccctaga

SEQ ID NO: 144819 - DNA, 15 bp, Homo sapiens
gaatcatggccctag

SEQ ID NO: 144820 - DNA, 15 bp, Homo sapiens
tgaatcatggcccta

SEQ ID NO: 144821 - DNA, 15 bp, Homo sapiens
ctgaatcatggccct

SEQ ID NO: 144822 - DNA, 15 bp, Homo sapiens
gctgaatcatggccc

SEQ ID NO: 144823 - DNA, 15 bp, Homo sapiens
ggctgaatcatggcc

SEQ ID NO: 144824 - DNA, 15 bp, Homo sapiens
gggctgaatcatggc

SEQ ID NO: 144825 - DNA, 15 bp, Homo sapiens
tgggctgaatcatgg

SEQ ID NO: 144826 - DNA, 15 bp, Homo sapiens
gtgggctgaatcatg

SEQ ID NO: 144827 - DNA, 15 bp, Homo sapiens
ggtgggctgaatcat

SEQ ID NO: 144828 - DNA, 15 bp, Homo sapiens
aggtgggctgaatca

SEQ ID NO: 144829 - DNA, 15 bp, Homo sapiens
gaggtgggctgaatc

SEQ ID NO: 144830 - DNA, 15 bp, Homo sapiens
tgaggtgggctgaat

SEQ ID NO: 144831 - DNA, 15 bp, Homo sapiens
ctgaggtgggctgaa

SEQ ID NO: 144832 - DNA, 15 bp, Homo sapiens
gctgaggtgggctga

SEQ ID NO: 144833 - DNA, 15 bp, Homo sapiens
tgctgaggtgggctg

SEQ ID NO: 144834 - DNA, 15 bp, Homo sapiens
atgctgaggtgggct

SEQ ID NO: 144835 - DNA, 15 bp, Homo sapiens
tatgctgaggtgggc

SEQ ID NO: 144836 - DNA, 15 bp, Homo sapiens
atatgctgaggtggg

SEQ ID NO: 144837 - DNA, 15 bp, Homo sapiens
tatatgctgaggtgg

SEQ ID NO: 144838 - DNA, 15 bp, Homo sapiens
ctatatgctgaggtg

SEQ ID NO: 144839 - DNA, 15 bp, Homo sapiens
tctatatgctgaggt

SEQ ID NO: 144840 - DNA, 15 bp, Homo sapiens
atctatatgctgagg

SEQ ID NO: 144841 - DNA, 15 bp, Homo sapiens
catctatatgctgag

SEQ ID NO: 144842 - DNA, 15 bp, Homo sapiens
tcatctatatgctga

SEQ ID NO: 144843 - DNA, 15 bp, Homo sapiens
ttcatctatatgctg

SEQ ID NO: 144844 - DNA, 15 bp, Homo sapiens
attcatctatatgct

SEQ ID NO: 144845 - DNA, 15 bp, Homo sapiens
cattcatctatatgc

SEQ ID NO: 144846 - DNA, 15 bp, Homo sapiens
gcattcatctatatg

SEQ ID NO: 144847 - DNA, 15 bp, Homo sapiens
ggcattcatctatat

SEQ ID NO: 144848 - DNA, 15 bp, Homo sapiens
tggcattcatctata

SEQ ID NO: 144849 - DNA, 15 bp, Homo sapiens
atggcattcatctat

SEQ ID NO: 144850 - DNA, 15 bp, Homo sapiens
aatggcattcatcta

SEQ ID NO: 144851 - DNA, 15 bp, Homo sapiens
aaatggcattcatct

SEQ ID NO: 144852 - DNA, 15 bp, Homo sapiens
aaaatggcattcatc

SEQ ID NO: 144853 - DNA, 15 bp, Homo sapiens
aaaaatggcattcat

SEQ ID NO: 144854 - DNA, 15 bp, Homo sapiens
taaaaatggcattca

SEQ ID NO: 144855 - DNA, 15 bp, Homo sapiens
ataaaaatggcattc

SEQ ID NO: 144856 - DNA, 15 bp, Homo sapiens
cataaaaatggcatt

SEQ ID NO: 144857 - DNA, 15 bp, Homo sapiens
ccataaaaatggcat

SEQ ID NO: 144858 - DNA, 15 bp, Homo sapiens
cccataaaaatggca

SEQ ID NO: 144859 - DNA, 15 bp, Homo sapiens
tcccataaaaatggc

SEQ ID NO: 144860 - DNA, 15 bp, Homo sapiens
ttcccataaaaatgg

SEQ ID NO: 144861 - DNA, 15 bp, Homo sapiens
attcccataaaaatg

SEQ ID NO: 144862 - DNA, 15 bp, Homo sapiens
gattcccataaaaat

SEQ ID NO: 144863 - DNA, 15 bp, Homo sapiens
tgattcccataaaaa

SEQ ID NO: 144864 - DNA, 15 bp, Homo sapiens
ctgattcccataaaa

SEQ ID NO: 144865 - DNA, 15 bp, Homo sapiens
actgattcccataaa

SEQ ID NO: 144866 - DNA, 15 bp, Homo sapiens
cactgattcccataa

SEQ ID NO: 144867 - DNA, 15 bp, Homo sapiens
tcactgattcccata

SEQ ID NO: 144868 - DNA, 15 bp, Homo sapiens
ctcactgattcccat

SEQ ID NO: 144869 - DNA, 15 bp, Homo sapiens
cctcactgattccca

SEQ ID NO: 144870 - DNA, 15 bp, Homo sapiens
gcctcactgattccc

SEQ ID NO: 144871 - DNA, 15 bp, Homo sapiens
tgcctcactgattcc

SEQ ID NO: 144872 - DNA, 15 bp, Homo sapiens
atgcctcactgattc

SEQ ID NO: 144873 - DNA, 15 bp, Homo sapiens
catgcctcactgatt

SEQ ID NO: 144874 - DNA, 15 bp, Homo sapiens
gcatgcctcactgat

SEQ ID NO: 144875 - DNA, 15 bp, Homo sapiens
agcatgcctcactga

SEQ ID NO: 144876 - DNA, 15 bp, Homo sapiens
tagcatgcctcactg

SEQ ID NO: 144877 - DNA, 15 bp, Homo sapiens
ttagcatgcctcact

SEQ ID NO: 144878 - DNA, 15 bp, Homo sapiens
cttagcatgcctcac

SEQ ID NO: 144879 - DNA, 15 bp, Homo sapiens
gcttagcatgcctca

SEQ ID NO: 144880 - DNA, 15 bp, Homo sapiens
tgcttagcatgcctc

SEQ ID NO: 144881 - DNA, 15 bp, Homo sapiens
ctgcttagcatgcct

SEQ ID NO: 144882 - DNA, 15 bp, Homo sapiens
cctgcttagcatgcc

SEQ ID NO: 144883 - DNA, 15 bp, Homo sapiens
tcctgcttagcatgc

SEQ ID NO: 144884 - DNA, 15 bp, Homo sapiens
ttcctgcttagcatg

SEQ ID NO: 144885 - DNA, 15 bp, Homo sapiens
cttcctgcttagcat

SEQ ID NO: 144886 - DNA, 15 bp, Homo sapiens
gcttcctgcttagca

SEQ ID NO: 144887 - DNA, 15 bp, Homo sapiens
tgcttcctgcttagc

SEQ ID NO: 144888 - DNA, 15 bp, Homo sapiens
ttgcttcctgcttag

SEQ ID NO: 144889 - DNA, 15 bp, Homo sapiens
attgcttcctgctta

SEQ ID NO: 144890 - DNA, 15 bp, Homo sapiens
cattgcttcctgctt

SEQ ID NO: 144891 - DNA, 15 bp, Homo sapiens
gcattgcttcctgct

SEQ ID NO: 144892 - DNA, 15 bp, Homo sapiens
ggcattgcttcctgc

SEQ ID NO: 144893 - DNA, 15 bp, Homo sapiens
aggcattgcttcctg

SEQ ID NO: 144894 - DNA, 15 bp, Homo sapiens
aaggcattgcttcct

SEQ ID NO: 144895 - DNA, 15 bp, Homo sapiens
aaaggcattgcttcc

SEQ ID NO: 144896 - DNA, 15 bp, Homo sapiens
aaaaggcattgcttc

SEQ ID NO: 144897 - DNA, 15 bp, Homo sapiens
caaaaggcattgctt

SEQ ID NO: 144898 - DNA, 15 bp, Homo sapiens
gcaaaaggcattgct

SEQ ID NO: 144899 - DNA, 15 bp, Homo sapiens
tgcaaaaggcattgc

SEQ ID NO: 144900 - DNA, 15 bp, Homo sapiens
ttgcaaaaggcattg

SEQ ID NO: 144901 - DNA, 15 bp, Homo sapiens
cttgcaaaaggcatt

SEQ ID NO: 144902 - DNA, 15 bp, Homo sapiens
gcttgcaaaaggcat

SEQ ID NO: 144903 - DNA, 15 bp, Homo sapiens
tgcttgcaaaaggca

SEQ ID NO: 144904 - DNA, 15 bp, Homo sapiens
ctgcttgcaaaaggc

SEQ ID NO: 144905 - DNA, 15 bp, Homo sapiens
tctgcttgcaaaagg

SEQ ID NO: 144906 - DNA, 15 bp, Homo sapiens
ctctgcttgcaaaag

SEQ ID NO: 144907 - DNA, 15 bp, Homo sapiens
cctctgcttgcaaaa

SEQ ID NO: 144908 - DNA, 15 bp, Homo sapiens
acctctgcttgcaaa

SEQ ID NO: 144909 - DNA, 15 bp, Homo sapiens
tacctctgcttgcaa

SEQ ID NO: 144910 - DNA, 15 bp, Homo sapiens
ctacctctgcttgca

SEQ ID NO: 144911 - DNA, 15 bp, Homo sapiens
cctacctctgcttgc

SEQ ID NO: 144912 - DNA, 15 bp, Homo sapiens
tcctacctctgcttg

SEQ ID NO: 144913 - DNA, 15 bp, Homo sapiens
ttcctacctctgctt

SEQ ID NO: 144914 - DNA, 15 bp, Homo sapiens
cttcctacctctgct

SEQ ID NO: 144915 - DNA, 15 bp, Homo sapiens
tcttcctacctctgc

SEQ ID NO: 144916 - DNA, 15 bp, Homo sapiens
atcttcctacctctg

SEQ ID NO: 144917 - DNA, 15 bp, Homo sapiens
gatcttcctacctct

SEQ ID NO: 144918 - DNA, 15 bp, Homo sapiens
cgatcttcctacctc

SEQ ID NO: 144919 - DNA, 15 bp, Homo sapiens
ccgatcttcctacct

SEQ ID NO: 144920 - DNA, 15 bp, Homo sapiens
accgatcttcctacc

SEQ ID NO: 144921 - DNA, 15 bp, Homo sapiens
gaccgatcttcctac

SEQ ID NO: 144922 - DNA, 15 bp, Homo sapiens
agaccgatcttccta

SEQ ID NO: 144923 - DNA, 15 bp, Homo sapiens
tagaccgatcttcct

SEQ ID NO: 144924 - DNA, 15 bp, Homo sapiens
ctagaccgatcttcc

SEQ ID NO: 144925 - DNA, 15 bp, Homo sapiens
actagaccgatcttc

SEQ ID NO: 144926 - DNA, 15 bp, Homo sapiens
gactagaccgatctt

SEQ ID NO: 144927 - DNA, 15 bp, Homo sapiens
ggactagaccgatct

SEQ ID NO: 144928 - DNA, 15 bp, Homo sapiens
cggactagaccgatc

SEQ ID NO: 144929 - DNA, 15 bp, Homo sapiens
acggactagaccgat

SEQ ID NO: 144930 - DNA, 15 bp, Homo sapiens
gacggactagaccga

SEQ ID NO: 144931 - DNA, 15 bp, Homo sapiens
tgacggactagaccg

SEQ ID NO: 144932 - DNA, 15 bp, Homo sapiens
ctgacggactagacc

SEQ ID NO: 144933 - DNA, 15 bp, Homo sapiens
gctgacggactagac

SEQ ID NO: 144934 - DNA, 15 bp, Homo sapiens
agctgacggactaga

SEQ ID NO: 144935 - DNA, 15 bp, Homo sapiens
cagctgacggactag

SEQ ID NO: 144936 - DNA, 15 bp, Homo sapiens
ccagctgacggacta

SEQ ID NO: 144937 - DNA, 15 bp, Homo sapiens
gccagctgacggact

SEQ ID NO: 144938 - DNA, 15 bp, Homo sapiens
tgccagctgacggac

SEQ ID NO: 144939 - DNA, 15 bp, Homo sapiens
gtgccagctgacgga

SEQ ID NO: 144940 - DNA, 15 bp, Homo sapiens
agtgccagctgacgg

SEQ ID NO: 144941 - DNA, 15 bp, Homo sapiens
cagtgccagctgacg

SEQ ID NO: 144942 - DNA, 15 bp, Homo sapiens
ccagtgccagctgac

SEQ ID NO: 144943 - DNA, 15 bp, Homo sapiens
gccagtgccagctga

SEQ ID NO: 144944 - DNA, 15 bp, Homo sapiens
ggccagtgccagctg

SEQ ID NO: 144945 - DNA, 15 bp, Homo sapiens
tggccagtgccagct

SEQ ID NO: 144946 - DNA, 15 bp, Homo sapiens
ctggccagtgccagc

SEQ ID NO: 144947 - DNA, 15 bp, Homo sapiens
cctggccagtgccag

SEQ ID NO: 144948 - DNA, 15 bp, Homo sapiens
gcctggccagtgcca

SEQ ID NO: 144949 - DNA, 15 bp, Homo sapiens
agcctggccagtgcc

SEQ ID NO: 144950 - DNA, 15 bp, Homo sapiens
gagcctggccagtgc

SEQ ID NO: 144951 - DNA, 15 bp, Homo sapiens
ggagcctggccagtg

SEQ ID NO: 144952 - DNA, 15 bp, Homo sapiens
tggagcctggccagt

SEQ ID NO: 144953 - DNA, 15 bp, Homo sapiens
gtggagcctggccag

SEQ ID NO: 144954 - DNA, 15 bp, Homo sapiens
agtggagcctggcca

SEQ ID NO: 144955 - DNA, 15 bp, Homo sapiens
cagtggagcctggcc

SEQ ID NO: 144956 - DNA, 15 bp, Homo sapiens
acagtggagcctggc

SEQ ID NO: 144957 - DNA, 15 bp, Homo sapiens
gacagtggagcctgg

SEQ ID NO: 144958 - DNA, 15 bp, Homo sapiens
ggacagtggagcctg

SEQ ID NO: 144959 - DNA, 15 bp, Homo sapiens
tggacagtggagcct

SEQ ID NO: 144960 - DNA, 15 bp, Homo sapiens
atggacagtggagcc

SEQ ID NO: 144961 - DNA, 15 bp, Homo sapiens
aatggacagtggagc

SEQ ID NO: 144962 - DNA, 15 bp, Homo sapiens
taatggacagtggag

SEQ ID NO: 144963 - DNA, 15 bp, Homo sapiens
ataatggacagtgga

SEQ ID NO: 144964 - DNA, 15 bp, Homo sapiens
gataatggacagtgg

SEQ ID NO: 144965 - DNA, 15 bp, Homo sapiens
ggataatggacagtg

SEQ ID NO: 144966 - DNA, 15 bp, Homo sapiens
aggataatggacagt

SEQ ID NO: 144967 - DNA, 15 bp, Homo sapiens
gaggataatggacag

SEQ ID NO: 144968 - DNA, 15 bp, Homo sapiens
ggaggataatggaca

SEQ ID NO: 144969 - DNA, 15 bp, Homo sapiens
aggaggataatggac

SEQ ID NO: 144970 - DNA, 15 bp, Homo sapiens
gaggaggataatgga

SEQ ID NO: 144971 - DNA, 15 bp, Homo sapiens
tgaggaggataatgg

SEQ ID NO: 144972 - DNA, 15 bp, Homo sapiens
gtgaggaggataatg

SEQ ID NO: 144973 - DNA, 15 bp, Homo sapiens
ggtgaggaggataat

SEQ ID NO: 144974 - DNA, 15 bp, Homo sapiens
aggtgaggaggataa

SEQ ID NO: 144975 - DNA, 15 bp, Homo sapiens
caggtgaggaggata

SEQ ID NO: 144976 - DNA, 15 bp, Homo sapiens
gcaggtgaggaggat

SEQ ID NO: 144977 - DNA, 15 bp, Homo sapiens
ggcaggtgaggagga

SEQ ID NO: 144978 - DNA, 15 bp, Homo sapiens
gggcaggtgaggagg

SEQ ID NO: 144979 - DNA, 15 bp, Homo sapiens
agggcaggtgaggag

SEQ ID NO: 144980 - DNA, 15 bp, Homo sapiens
tagggcaggtgagga

SEQ ID NO: 144981 - DNA, 15 bp, Homo sapiens
ttagggcaggtgagg

SEQ ID NO: 144982 - DNA, 15 bp, Homo sapiens
attagggcaggtgag

SEQ ID NO: 144983 - DNA, 15 bp, Homo sapiens
gattagggcaggtga

SEQ ID NO: 144984 - DNA, 15 bp, Homo sapiens
agattagggcaggtg

SEQ ID NO: 144985 - DNA, 15 bp, Homo sapiens
aagattagggcaggt

SEQ ID NO: 144986 - DNA, 15 bp, Homo sapiens
aaagattagggcagg

SEQ ID NO: 144987 - DNA, 15 bp, Homo sapiens
gaaagattagggcag

SEQ ID NO: 144988 - DNA, 15 bp, Homo sapiens
ggaaagattagggca

SEQ ID NO: 144989 - DNA, 15 bp, Homo sapiens
aggaaagattagggc

SEQ ID NO: 144990 - DNA, 15 bp, Homo sapiens
aaggaaagattaggg

SEQ ID NO: 144991 - DNA, 15 bp, Homo sapiens
aaaggaaagattagg

SEQ ID NO: 144992 - DNA, 15 bp, Homo sapiens
taaaggaaagattag

SEQ ID NO: 144993 - DNA, 15 bp, Homo sapiens
ataaaggaaagatta

SEQ ID NO: 144994 - DNA, 15 bp, Homo sapiens
aataaaggaaagatt

SEQ ID NO: 144995 - DNA, 15 bp, Homo sapiens
caataaaggaaagat

SEQ ID NO: 144996 - DNA, 15 bp, Homo sapiens
gcaataaaggaaaga

SEQ ID NO: 144997 - DNA, 15 bp, Homo sapiens
agcaataaaggaaag

SEQ ID NO: 144998 - DNA, 15 bp, Homo sapiens
gagcaataaaggaaa

SEQ ID NO: 144999 - DNA, 15 bp, Homo sapiens
ggagcaataaaggaa

SEQ ID NO: 145000 - DNA, 15 bp, Homo sapiens
aggagcaataaagga

SEQ ID NO: 145001 - DNA, 15 bp, Homo sapiens
taggagcaataaagg

SEQ ID NO: 145002 - DNA, 15 bp, Homo sapiens
ttaggagcaataaag

SEQ ID NO: 145003 - DNA, 15 bp, Homo sapiens
cttaggagcaataaa

SEQ ID NO: 145004 - DNA, 15 bp, Homo sapiens
acttaggagcaataa

SEQ ID NO: 145005 - DNA, 15 bp, Homo sapiens
cacttaggagcaata

SEQ ID NO: 145006 - DNA, 15 bp, Homo sapiens
tcacttaggagcaat

SEQ ID NO: 145007 - DNA, 15 bp, Homo sapiens
atcacttaggagcaa

SEQ ID NO: 145008 - DNA, 15 bp, Homo sapiens
tatcacttaggagca

SEQ ID NO: 145009 - DNA, 15 bp, Homo sapiens
gtatcacttaggagc

SEQ ID NO: 145010 - DNA, 15 bp, Homo sapiens
ggtatcacttaggag

SEQ ID NO: 145011 - DNA, 15 bp, Homo sapiens
tggtatcacttagga

SEQ ID NO: 145012 - DNA, 15 bp, Homo sapiens
gtggtatcacttagg

SEQ ID NO: 145013 - DNA, 15 bp, Homo sapiens
cgtggtatcacttag

SEQ ID NO: 145014 - DNA, 15 bp, Homo sapiens
acgtggtatcactta

SEQ ID NO: 145015 - DNA, 15 bp, Homo sapiens
tacgtggtatcactt

SEQ ID NO: 145016 - DNA, 15 bp, Homo sapiens
ctacgtggtatcact

SEQ ID NO: 145017 - DNA, 15 bp, Homo sapiens
gctacgtggtatcac

SEQ ID NO: 145018 - DNA, 15 bp, Homo sapiens
agctacgtggtatca

SEQ ID NO: 145019 - DNA, 15 bp, Homo sapiens
aagctacgtggtatc

SEQ ID NO: 145020 - DNA, 15 bp, Homo sapiens
gaagctacgtggtat

SEQ ID NO: 145021 - DNA, 15 bp, Homo sapiens
agaagctacgtggta

SEQ ID NO: 145022 - DNA, 15 bp, Homo sapiens
aagaagctacgtggt

SEQ ID NO: 145023 - DNA, 15 bp, Homo sapiens
gaagaagctacgtgg

SEQ ID NO: 145024 - DNA, 15 bp, Homo sapiens
tgaagaagctacgtg

SEQ ID NO: 145025 - DNA, 15 bp, Homo sapiens
ctgaagaagctacgt

SEQ ID NO: 145026 - DNA, 15 bp, Homo sapiens
actgaagaagctacg

SEQ ID NO: 145027 - DNA, 15 bp, Homo sapiens
gactgaagaagctac

SEQ ID NO: 145028 - DNA, 15 bp, Homo sapiens
agactgaagaagcta

SEQ ID NO: 145029 - DNA, 15 bp, Homo sapiens
gagactgaagaagct

SEQ ID NO: 145030 - DNA, 15 bp, Homo sapiens
tgagactgaagaagc

SEQ ID NO: 145031 - DNA, 15 bp, Homo sapiens
ttgagactgaagaag

SEQ ID NO: 145032 - DNA, 15 bp, Homo sapiens
tttgagactgaagaa

SEQ ID NO: 145033 - DNA, 15 bp, Homo sapiens
atttgagactgaaga

SEQ ID NO: 145034 - DNA, 15 bp, Homo sapiens
gatttgagactgaag

SEQ ID NO: 145035 - DNA, 15 bp, Homo sapiens
tgatttgagactgaa

SEQ ID NO: 145036 - DNA, 15 bp, Homo sapiens
atgatttgagactga

SEQ ID NO: 145037 - DNA, 15 bp, Homo sapiens
gatgatttgagactg

SEQ ID NO: 145038 - DNA, 15 bp, Homo sapiens
ggatgatttgagact

SEQ ID NO: 145039 - DNA, 15 bp, Homo sapiens
aggatgatttgagac

SEQ ID NO: 145040 - DNA, 15 bp, Homo sapiens
taggatgatttgaga

SEQ ID NO: 145041 - DNA, 15 bp, Homo sapiens
gtaggatgatttgag

SEQ ID NO: 145042 - DNA, 15 bp, Homo sapiens
agtaggatgatttga

SEQ ID NO: 145043 - DNA, 15 bp, Homo sapiens
gagtaggatgatttg

SEQ ID NO: 145044 - DNA, 15 bp, Homo sapiens
tgagtaggatgattt

SEQ ID NO: 145045 - DNA, 15 bp, Homo sapiens
ctgagtaggatgatt

SEQ ID NO: 145046 - DNA, 15 bp, Homo sapiens
tctgagtaggatgat

SEQ ID NO: 145047 - DNA, 15 bp, Homo sapiens
gtctgagtaggatga

SEQ ID NO: 145048 - DNA, 15 bp, Homo sapiens
ggtctgagtaggatg

SEQ ID NO: 145049 - DNA, 15 bp, Homo sapiens
gggtctgagtaggat

SEQ ID NO: 145050 - DNA, 15 bp, Homo sapiens
agggtctgagtagga

SEQ ID NO: 145051 - DNA, 15 bp, Homo sapiens
aagggtctgagtagg

SEQ ID NO: 145052 - DNA, 15 bp, Homo sapiens
aaagggtctgagtag

SEQ ID NO: 145053 - DNA, 15 bp, Homo sapiens
aaaagggtctgagta

SEQ ID NO: 145054 - DNA, 15 bp, Homo sapiens
gaaaagggtctgagt

SEQ ID NO: 145055 - DNA, 15 bp, Homo sapiens
agaaaagggtctgag

SEQ ID NO: 145056 - DNA, 15 bp, Homo sapiens
cagaaaagggtctga

SEQ ID NO: 145057 - DNA, 15 bp, Homo sapiens
tcagaaaagggtctg

SEQ ID NO: 145058 - DNA, 15 bp, Homo sapiens
gtcagaaaagggtct

SEQ ID NO: 145059 - DNA, 15 bp, Homo sapiens
tgtcagaaaagggtc

SEQ ID NO: 145060 - DNA, 15 bp, Homo sapiens
atgtcagaaaagggt

SEQ ID NO: 145061 - DNA, 15 bp, Homo sapiens
aatgtcagaaaaggg

SEQ ID NO: 145062 - DNA, 15 bp, Homo sapiens
gaatgtcagaaaagg

SEQ ID NO: 145063 - DNA, 15 bp, Homo sapiens
tgaatgtcagaaaag

SEQ ID NO: 145064 - DNA, 15 bp, Homo sapiens
ctgaatgtcagaaaa

SEQ ID NO: 145065 - DNA, 15 bp, Homo sapiens
tctgaatgtcagaaa

SEQ ID NO: 145066 - DNA, 15 bp, Homo sapiens
ctctgaatgtcagaa

SEQ ID NO: 145067 - DNA, 15 bp, Homo sapiens
gctctgaatgtcaga

SEQ ID NO: 145068 - DNA, 15 bp, Homo sapiens
ggctctgaatgtcag

SEQ ID NO: 145069 - DNA, 15 bp, Homo sapiens
aggctctgaatgtca

SEQ ID NO: 145070 - DNA, 15 bp, Homo sapiens
aaggctctgaatgtc

SEQ ID NO: 145071 - DNA, 15 bp, Homo sapiens
gaaggctctgaatgt

SEQ ID NO: 145072 - DNA, 15 bp, Homo sapiens
ggaaggctctgaatg

SEQ ID NO: 145073 - DNA, 15 bp, Homo sapiens
aggaaggctctgaat

SEQ ID NO: 145074 - DNA, 15 bp, Homo sapiens
aaggaaggctctgaa

SEQ ID NO: 145075 - DNA, 15 bp, Homo sapiens
taaggaaggctctga

SEQ ID NO: 145076 - DNA, 15 bp, Homo sapiens
ataaggaaggctctg

SEQ ID NO: 145077 - DNA, 15 bp, Homo sapiens
gataaggaaggctct

SEQ ID NO: 145078 - DNA, 15 bp, Homo sapiens
ggataaggaaggctc

SEQ ID NO: 145079 - DNA, 15 bp, Homo sapiens
gggataaggaaggct

SEQ ID NO: 145080 - DNA, 15 bp, Homo sapiens
tgggataaggaaggc

SEQ ID NO: 145081 - DNA, 15 bp, Homo sapiens
gtgggataaggaagg

SEQ ID NO: 145082 - DNA, 15 bp, Homo sapiens
tgtgggataaggaag

SEQ ID NO: 145083 - DNA, 15 bp, Homo sapiens
ctgtgggataaggaa

SEQ ID NO: 145084 - DNA, 15 bp, Homo sapiens
actgtgggataagga

SEQ ID NO: 145085 - DNA, 15 bp, Homo sapiens
aactgtgggataagg

SEQ ID NO: 145086 - DNA, 15 bp, Homo sapiens
gaactgtgggataag

SEQ ID NO: 145087 - DNA, 15 bp, Homo sapiens
agaactgtgggataa

SEQ ID NO: 145088 - DNA, 15 bp, Homo sapiens
aagaactgtgggata

SEQ ID NO: 145089 - DNA, 15 bp, Homo sapiens
aaagaactgtgggat

SEQ ID NO: 145090 - DNA, 15 bp, Homo sapiens
gaaagaactgtggga

SEQ ID NO: 145091 - DNA, 15 bp, Homo sapiens
agaaagaactgtggg

SEQ ID NO: 145092 - DNA, 15 bp, Homo sapiens
cagaaagaactgtgg

SEQ ID NO: 145093 - DNA, 15 bp, Homo sapiens
acagaaagaactgtg

SEQ ID NO: 145094 - DNA, 15 bp, Homo sapiens
gacagaaagaactgt

SEQ ID NO: 145095 - DNA, 15 bp, Homo sapiens
ggacagaaagaactg

SEQ ID NO: 145096 - DNA, 15 bp, Homo sapiens
aggacagaaagaact

SEQ ID NO: 145097 - DNA, 15 bp, Homo sapiens
aaggacagaaagaac

SEQ ID NO: 145098 - DNA, 15 bp, Homo sapiens
aaaggacagaaagaa

SEQ ID NO: 145099 - DNA, 15 bp, Homo sapiens
aaaaggacagaaaga

SEQ ID NO: 145100 - DNA, 15 bp, Homo sapiens
gaaaaggacagaaag

SEQ ID NO: 145101 - DNA, 15 bp, Homo sapiens
ggaaaaggacagaaa

SEQ ID NO: 145102 - DNA, 15 bp, Homo sapiens
gggaaaaggacagaa

SEQ ID NO: 145103 - DNA, 15 bp, Homo sapiens
agggaaaaggacaga

SEQ ID NO: 145104 - DNA, 15 bp, Homo sapiens
aagggaaaaggacag

SEQ ID NO: 145105 - DNA, 15 bp, Homo sapiens
gaagggaaaaggaca

SEQ ID NO: 145106 - DNA, 15 bp, Homo sapiens
ggaagggaaaaggac

SEQ ID NO: 145107 - DNA, 15 bp, Homo sapiens
aggaagggaaaagga

SEQ ID NO: 145108 - DNA, 15 bp, Homo sapiens
taggaagggaaaagg

SEQ ID NO: 145109 - DNA, 15 bp, Homo sapiens
ataggaagggaaaag

SEQ ID NO: 145110 - DNA, 15 bp, Homo sapiens
gataggaagggaaaa

SEQ ID NO: 145111 - DNA, 15 bp, Homo sapiens
agataggaagggaaa

SEQ ID NO: 145112 - DNA, 15 bp, Homo sapiens
cagataggaagggaa

SEQ ID NO: 145113 - DNA, 15 bp, Homo sapiens
tcagataggaaggga

SEQ ID NO: 145114 - DNA, 15 bp, Homo sapiens
atcagataggaaggg

SEQ ID NO: 145115 - DNA, 15 bp, Homo sapiens
tatcagataggaagg

SEQ ID NO: 145116 - DNA, 15 bp, Homo sapiens
ttatcagataggaag

SEQ ID NO: 145117 - DNA, 15 bp, Homo sapiens
tttatcagataggaa

SEQ ID NO: 145118 - DNA, 15 bp, Homo sapiens
atttatcagatagga

SEQ ID NO: 145119 - DNA, 15 bp, Homo sapiens
gatttatcagatagg

SEQ ID NO: 145120 - DNA, 15 bp, Homo sapiens
ggatttatcagatag

SEQ ID NO: 145121 - DNA, 15 bp, Homo sapiens
aggatttatcagata

SEQ ID NO: 145122 - DNA, 15 bp, Homo sapiens
aaggatttatcagat

SEQ ID NO: 145123 - DNA, 15 bp, Homo sapiens
caaggatttatcaga

SEQ ID NO: 145124 - DNA, 15 bp, Homo sapiens
acaaggatttatcag

SEQ ID NO: 145125 - DNA, 15 bp, Homo sapiens
cacaaggatttatca

SEQ ID NO: 145126 - DNA, 15 bp, Homo sapiens
tcacaaggatttatc

SEQ ID NO: 145127 - DNA, 15 bp, Homo sapiens
ctcacaaggatttat

SEQ ID NO: 145128 - DNA, 15 bp, Homo sapiens
actcacaaggattta

SEQ ID NO: 145129 - DNA, 15 bp, Homo sapiens
tactcacaaggattt

SEQ ID NO: 145130 - DNA, 15 bp, Homo sapiens
ctactcacaaggatt

SEQ ID NO: 145131 - DNA, 15 bp, Homo sapiens
actactcacaaggat

SEQ ID NO: 145132 - DNA, 15 bp, Homo sapiens
aactactcacaagga

SEQ ID NO: 145133 - DNA, 15 bp, Homo sapiens
caactactcacaagg

SEQ ID NO: 145134 - DNA, 15 bp, Homo sapiens
tcaactactcacaag

SEQ ID NO: 145135 - DNA, 15 bp, Homo sapiens
gtcaactactcacaa

SEQ ID NO: 145136 - DNA, 15 bp, Homo sapiens
tgtcaactactcaca

SEQ ID NO: 145137 - DNA, 15 bp, Homo sapiens
ttgtcaactactcac

SEQ ID NO: 145138 - DNA, 15 bp, Homo sapiens
tttgtcaactactca

SEQ ID NO: 145139 - DNA, 15 bp, Homo sapiens
ttttgtcaactactc

SEQ ID NO: 145140 - DNA, 15 bp, Homo sapiens
cttttgtcaactact

SEQ ID NO: 145141 - DNA, 15 bp, Homo sapiens
tcttttgtcaactac

SEQ ID NO: 145142 - DNA, 15 bp, Homo sapiens
ctcttttgtcaacta

SEQ ID NO: 145143 - DNA, 15 bp, Homo sapiens
actcttttgtcaact

SEQ ID NO: 145144 - DNA, 15 bp, Homo sapiens
cactcttttgtcaac

SEQ ID NO: 145145 - DNA, 15 bp, Homo sapiens
gcactcttttgtcaa

SEQ ID NO: 145146 - DNA, 15 bp, Homo sapiens
ggcactcttttgtca

SEQ ID NO: 145147 - DNA, 15 bp, Homo sapiens
aggcactcttttgtc

SEQ ID NO: 145148 - DNA, 15 bp, Homo sapiens
caggcactcttttgt

SEQ ID NO: 145149 - DNA, 15 bp, Homo sapiens
tcaggcactcttttg

SEQ ID NO: 145150 - DNA, 15 bp, Homo sapiens
ttcaggcactctttt

SEQ ID NO: 145151 - DNA, 15 bp, Homo sapiens
cttcaggcactcttt

SEQ ID NO: 145152 - DNA, 15 bp, Homo sapiens
tcttcaggcactctt

SEQ ID NO: 145153 - DNA, 15 bp, Homo sapiens
atcttcaggcactct

SEQ ID NO: 145154 - DNA, 15 bp, Homo sapiens
catcttcaggcactc

SEQ ID NO: 145155 - DNA, 15 bp, Homo sapiens
acatcttcaggcact

SEQ ID NO: 145156 - DNA, 15 bp, Homo sapiens
gacatcttcaggcac

SEQ ID NO: 145157 - DNA, 15 bp, Homo sapiens
tgacatcttcaggca

SEQ ID NO: 145158 - DNA, 15 bp, Homo sapiens
ctgacatcttcaggc

SEQ ID NO: 145159 - DNA, 15 bp, Homo sapiens
cctgacatcttcagg

SEQ ID NO: 145160 - DNA, 15 bp, Homo sapiens
ccctgacatcttcag

SEQ ID NO: 145161 - DNA, 15 bp, Homo sapiens
gccctgacatcttca

SEQ ID NO: 145162 - DNA, 15 bp, Homo sapiens
tgccctgacatcttc

SEQ ID NO: 145163 - DNA, 15 bp, Homo sapiens
ctgccctgacatctt

SEQ ID NO: 145164 - DNA, 15 bp, Homo sapiens
tctgccctgacatct

SEQ ID NO: 145165 - DNA, 15 bp, Homo sapiens
ctctgccctgacatc

SEQ ID NO: 145166 - DNA, 15 bp, Homo sapiens
cctctgccctgacat

SEQ ID NO: 145167 - DNA, 15 bp, Homo sapiens
gcctctgccctgaca

SEQ ID NO: 145168 - DNA, 15 bp, Homo sapiens
agcctctgccctgac

SEQ ID NO: 145169 - DNA, 15 bp, Homo sapiens
gagcctctgccctga

SEQ ID NO: 145170 - DNA, 15 bp, Homo sapiens
tgagcctctgccctg

SEQ ID NO: 145171 - DNA, 15 bp, Homo sapiens
gtgagcctctgccct

SEQ ID NO: 145172 - DNA, 15 bp, Homo sapiens
agtgagcctctgccc

SEQ ID NO: 145173 - DNA, 15 bp, Homo sapiens
aagtgagcctctgcc

SEQ ID NO: 145174 - DNA, 15 bp, Homo sapiens
gaagtgagcctctgc

SEQ ID NO: 145175 - DNA, 15 bp, Homo sapiens
agaagtgagcctctg

SEQ ID NO: 145176 - DNA, 15 bp, Homo sapiens
cagaagtgagcctct

SEQ ID NO: 145177 - DNA, 15 bp, Homo sapiens
ccagaagtgagcctc

SEQ ID NO: 145178 - DNA, 15 bp, Homo sapiens
accagaagtgagcct

SEQ ID NO: 145179 - DNA, 15 bp, Homo sapiens
gaccagaagtgagcc

SEQ ID NO: 145180 - DNA, 15 bp, Homo sapiens
agaccagaagtgagc

SEQ ID NO: 145181 - DNA, 15 bp, Homo sapiens
cagaccagaagtgag

SEQ ID NO: 145182 - DNA, 15 bp, Homo sapiens
acagaccagaagtga

SEQ ID NO: 145183 - DNA, 15 bp, Homo sapiens
gacagaccagaagtg

SEQ ID NO: 145184 - DNA, 15 bp, Homo sapiens
agacagaccagaagt

SEQ ID NO: 145185 - DNA, 15 bp, Homo sapiens
tagacagaccagaag

SEQ ID NO: 145186 - DNA, 15 bp, Homo sapiens
ctagacagaccagaa

SEQ ID NO: 145187 - DNA, 15 bp, Homo sapiens
actagacagaccaga

SEQ ID NO: 145188 - DNA, 15 bp, Homo sapiens
aactagacagaccag

SEQ ID NO: 145189 - DNA, 15 bp, Homo sapiens
caactagacagacca

SEQ ID NO: 145190 - DNA, 15 bp, Homo sapiens
ccaactagacagacc

SEQ ID NO: 145191 - DNA, 15 bp, Homo sapiens
cccaactagacagac

SEQ ID NO: 145192 - DNA, 15 bp, Homo sapiens
acccaactagacaga

SEQ ID NO: 145193 - DNA, 15 bp, Homo sapiens
cacccaactagacag

SEQ ID NO: 145194 - DNA, 15 bp, Homo sapiens
tcacccaactagaca

SEQ ID NO: 145195 - DNA, 15 bp, Homo sapiens
ctcacccaactagac

SEQ ID NO: 145196 - DNA, 15 bp, Homo sapiens
actcacccaactaga

SEQ ID NO: 145197 - DNA, 15 bp, Homo sapiens
gactcacccaactag

SEQ ID NO: 145198 - DNA, 15 bp, Homo sapiens
agactcacccaacta

SEQ ID NO: 145199 - DNA, 15 bp, Homo sapiens
cagactcacccaact

SEQ ID NO: 145200 - DNA, 15 bp, Homo sapiens
tcagactcacccaac

SEQ ID NO: 145201 - DNA, 15 bp, Homo sapiens
ttcagactcacccaa

SEQ ID NO: 145202 - DNA, 15 bp, Homo sapiens
gttcagactcaccca

SEQ ID NO: 145203 - DNA, 15 bp, Homo sapiens
agttcagactcaccc

SEQ ID NO: 145204 - DNA, 15 bp, Homo sapiens
aagttcagactcacc

SEQ ID NO: 145205 - DNA, 15 bp, Homo sapiens
caagttcagactcac

SEQ ID NO: 145206 - DNA, 15 bp, Homo sapiens
tcaagttcagactca

SEQ ID NO: 145207 - DNA, 15 bp, Homo sapiens
ctcaagttcagactc

SEQ ID NO: 145208 - DNA, 15 bp, Homo sapiens
cctcaagttcagact

SEQ ID NO: 145209 - DNA, 15 bp, Homo sapiens
gcctcaagttcagac

SEQ ID NO: 145210 - DNA, 15 bp, Homo sapiens
ggcctcaagttcaga

SEQ ID NO: 145211 - DNA, 15 bp, Homo sapiens
gggcctcaagttcag

SEQ ID NO: 145212 - DNA, 15 bp, Homo sapiens
ggggcctcaagttca

SEQ ID NO: 145213 - DNA, 15 bp, Homo sapiens
tggggcctcaagttc

SEQ ID NO: 145214 - DNA, 15 bp, Homo sapiens
ctggggcctcaagtt

SEQ ID NO: 145215 - DNA, 15 bp, Homo sapiens
cctggggcctcaagt

SEQ ID NO: 145216 - DNA, 15 bp, Homo sapiens
ccctggggcctcaag

SEQ ID NO: 145217 - DNA, 15 bp, Homo sapiens
gccctggggcctcaa

SEQ ID NO: 145218 - DNA, 15 bp, Homo sapiens
agccctggggcctca

SEQ ID NO: 145219 - DNA, 15 bp, Homo sapiens
aagccctggggcctc

SEQ ID NO: 145220 - DNA, 15 bp, Homo sapiens
taagccctggggcct

SEQ ID NO: 145221 - DNA, 15 bp, Homo sapiens
ataagccctggggcc

SEQ ID NO: 145222 - DNA, 15 bp, Homo sapiens
aataagccctggggc

SEQ ID NO: 145223 - DNA, 15 bp, Homo sapiens
caataagccctgggg

SEQ ID NO: 145224 - DNA, 15 bp, Homo sapiens
ccaataagccctggg

SEQ ID NO: 145225 - DNA, 15 bp, Homo sapiens
tccaataagccctgg

SEQ ID NO: 145226 - DNA, 15 bp, Homo sapiens
ctccaataagccctg

SEQ ID NO: 145227 - DNA, 15 bp, Homo sapiens
cctccaataagccct

SEQ ID NO: 145228 - DNA, 15 bp, Homo sapiens
gcctccaataagccc

SEQ ID NO: 145229 - DNA, 15 bp, Homo sapiens
tgcctccaataagcc

SEQ ID NO: 145230 - DNA, 15 bp, Homo sapiens
ttgcctccaataagc

SEQ ID NO: 145231 - DNA, 15 bp, Homo sapiens
tttgcctccaataag

SEQ ID NO: 145232 - DNA, 15 bp, Homo sapiens
gtttgcctccaataa

SEQ ID NO: 145233 - DNA, 15 bp, Homo sapiens
agtttgcctccaata

SEQ ID NO: 145234 - DNA, 15 bp, Homo sapiens
cagtttgcctccaat

SEQ ID NO: 145235 - DNA, 15 bp, Homo sapiens
tcagtttgcctccaa

SEQ ID NO: 145236 - DNA, 15 bp, Homo sapiens
ctcagtttgcctcca

SEQ ID NO: 145237 - DNA, 15 bp, Homo sapiens
actcagtttgcctcc

SEQ ID NO: 145238 - DNA, 15 bp, Homo sapiens
gactcagtttgcctc

SEQ ID NO: 145239 - DNA, 15 bp, Homo sapiens
tgactcagtttgcct

SEQ ID NO: 145240 - DNA, 15 bp, Homo sapiens
atgactcagtttgcc

SEQ ID NO: 145241 - DNA, 15 bp, Homo sapiens
catgactcagtttgc

SEQ ID NO: 145242 - DNA, 15 bp, Homo sapiens
ccatgactcagtttg

SEQ ID NO: 145243 - DNA, 15 bp, Homo sapiens
tccatgactcagttt

SEQ ID NO: 145244 - DNA, 15 bp, Homo sapiens
ctccatgactcagtt

SEQ ID NO: 145245 - DNA, 15 bp, Homo sapiens
tctccatgactcagt

SEQ ID NO: 145246 - DNA, 15 bp, Homo sapiens
ctctccatgactcag

SEQ ID NO: 145247 - DNA, 15 bp, Homo sapiens
cctctccatgactca

SEQ ID NO: 145248 - DNA, 15 bp, Homo sapiens
ccctctccatgactc

SEQ ID NO: 145249 - DNA, 15 bp, Homo sapiens
tccctctccatgact

SEQ ID NO: 145250 - DNA, 15 bp, Homo sapiens
ctccctctccatgac

SEQ ID NO: 145251 - DNA, 15 bp, Homo sapiens
tctccctctccatga

SEQ ID NO: 145252 - DNA, 15 bp, Homo sapiens
ctctccctctccatg

SEQ ID NO: 145253 - DNA, 15 bp, Homo sapiens
actctccctctccat

SEQ ID NO: 145254 - DNA, 15 bp, Homo sapiens
tactctccctctcca

SEQ ID NO: 145255 - DNA, 15 bp, Homo sapiens
gtactctccctctcc

SEQ ID NO: 145256 - DNA, 15 bp, Homo sapiens
tgtactctccctctc

SEQ ID NO: 145257 - DNA, 15 bp, Homo sapiens
ctgtactctccctct

SEQ ID NO: 145258 - DNA, 15 bp, Homo sapiens
actgtactctccctc

SEQ ID NO: 145259 - DNA, 15 bp, Homo sapiens
tactgtactctccct

SEQ ID NO: 145260 - DNA, 15 bp, Homo sapiens
ttactgtactctccc

SEQ ID NO: 145261 - DNA, 15 bp, Homo sapiens
cttactgtactctcc

SEQ ID NO: 145262 - DNA, 15 bp, Homo sapiens
ccttactgtactctc

SEQ ID NO: 145263 - DNA, 15 bp, Homo sapiens
gccttactgtactct

SEQ ID NO: 145264 - DNA, 15 bp, Homo sapiens
ggccttactgtactc

SEQ ID NO: 145265 - DNA, 15 bp, Homo sapiens
tggccttactgtact

SEQ ID NO: 145266 - DNA, 15 bp, Homo sapiens
gtggccttactgtac

SEQ ID NO: 145267 - DNA, 15 bp, Homo sapiens
agtggccttactgta

SEQ ID NO: 145268 - DNA, 15 bp, Homo sapiens
tagtggccttactgt

SEQ ID NO: 145269 - DNA, 15 bp, Homo sapiens
gtagtggccttactg

SEQ ID NO: 145270 - DNA, 15 bp, Homo sapiens
ggtagtggccttact

SEQ ID NO: 145271 - DNA, 15 bp, Homo sapiens
tggtagtggccttac

SEQ ID NO: 145272 - DNA, 15 bp, Homo sapiens
ttggtagtggcctta

SEQ ID NO: 145273 - DNA, 15 bp, Homo sapiens
cttggtagtggcctt

SEQ ID NO: 145274 - DNA, 15 bp, Homo sapiens
ccttggtagtggcct

SEQ ID NO: 145275 - DNA, 15 bp, Homo sapiens
cccttggtagtggcc

SEQ ID NO: 145276 - DNA, 15 bp, Homo sapiens
gcccttggtagtggc

SEQ ID NO: 145277 - DNA, 15 bp, Homo sapiens
agcccttggtagtgg

SEQ ID NO: 145278 - DNA, 15 bp, Homo sapiens
cagcccttggtagtg

SEQ ID NO: 145279 - DNA, 15 bp, Homo sapiens
ccagcccttggtagt

SEQ ID NO: 145280 - DNA, 15 bp, Homo sapiens
gccagcccttggtag

SEQ ID NO: 145281 - DNA, 15 bp, Homo sapiens
agccagcccttggta

SEQ ID NO: 145282 - DNA, 15 bp, Homo sapiens
cagccagcccttggt

SEQ ID NO: 145283 - DNA, 15 bp, Homo sapiens
gcagccagcccttgg

SEQ ID NO: 145284 - DNA, 15 bp, Homo sapiens
tgcagccagcccttg

SEQ ID NO: 145285 - DNA, 15 bp, Homo sapiens
ctgcagccagccctt

SEQ ID NO: 145286 - DNA, 15 bp, Homo sapiens
tctgcagccagccct

SEQ ID NO: 145287 - DNA, 15 bp, Homo sapiens
ctctgcagccagccc

SEQ ID NO: 145288 - DNA, 15 bp, Homo sapiens
cctctgcagccagcc

SEQ ID NO: 145289 - DNA, 15 bp, Homo sapiens
ccctctgcagccagc

SEQ ID NO: 145290 - DNA, 15 bp, Homo sapiens
accctctgcagccag

SEQ ID NO: 145291 - DNA, 15 bp, Homo sapiens
caccctctgcagcca

SEQ ID NO: 145292 - DNA, 15 bp, Homo sapiens
gcaccctctgcagcc

SEQ ID NO: 145293 - DNA, 15 bp, Homo sapiens
tgcaccctctgcagc

SEQ ID NO: 145294 - DNA, 15 bp, Homo sapiens
ttgcaccctctgcag

SEQ ID NO: 145295 - DNA, 15 bp, Homo sapiens
cttgcaccctctgca

SEQ ID NO: 145296 - DNA, 15 bp, Homo sapiens
ccttgcaccctctgc

SEQ ID NO: 145297 - DNA, 15 bp, Homo sapiens
cccttgcaccctctg

SEQ ID NO: 145298 - DNA, 15 bp, Homo sapiens
acccttgcaccctct

SEQ ID NO: 145299 - DNA, 15 bp, Homo sapiens
aacccttgcaccctc

SEQ ID NO: 145300 - DNA, 15 bp, Homo sapiens
caacccttgcaccct

SEQ ID NO: 145301 - DNA, 15 bp, Homo sapiens
gcaacccttgcaccc

SEQ ID NO: 145302 - DNA, 15 bp, Homo sapiens
tgcaacccttgcacc

SEQ ID NO: 145303 - DNA, 15 bp, Homo sapiens
gtgcaacccttgcac

SEQ ID NO: 145304 - DNA, 15 bp, Homo sapiens
cgtgcaacccttgca

SEQ ID NO: 145305 - DNA, 15 bp, Homo sapiens
ccgtgcaacccttgc

SEQ ID NO: 145306 - DNA, 15 bp, Homo sapiens
cccgtgcaacccttg

SEQ ID NO: 145307 - DNA, 15 bp, Homo sapiens
acccgtgcaaccctt

SEQ ID NO: 145308 - DNA, 15 bp, Homo sapiens
aacccgtgcaaccct

SEQ ID NO: 145309 - DNA, 15 bp, Homo sapiens
aaacccgtgcaaccc

SEQ ID NO: 145310 - DNA, 15 bp, Homo sapiens
aaaacccgtgcaacc

SEQ ID NO: 145311 - DNA, 15 bp, Homo sapiens
caaaacccgtgcaac

SEQ ID NO: 145312 - DNA, 15 bp, Homo sapiens
ccaaaacccgtgcaa

SEQ ID NO: 145313 - DNA, 15 bp, Homo sapiens
cccaaaacccgtgca

SEQ ID NO: 145314 - DNA, 15 bp, Homo sapiens
ccccaaaacccgtgc

SEQ ID NO: 145315 - DNA, 15 bp, Homo sapiens
accccaaaacccgtg

SEQ ID NO: 145316 - DNA, 15 bp, Homo sapiens
aaccccaaaacccgt

SEQ ID NO: 145317 - DNA, 15 bp, Homo sapiens
caaccccaaaacccg

SEQ ID NO: 145318 - DNA, 15 bp, Homo sapiens
acaaccccaaaaccc

SEQ ID NO: 145319 - DNA, 15 bp, Homo sapiens
aacaaccccaaaacc

SEQ ID NO: 145320 - DNA, 15 bp, Homo sapiens
caacaaccccaaaac

SEQ ID NO: 145321 - DNA, 15 bp, Homo sapiens
ccaacaaccccaaaa

SEQ ID NO: 145322 - DNA, 15 bp, Homo sapiens
gccaacaaccccaaa

SEQ ID NO: 145323 - DNA, 15 bp, Homo sapiens
agccaacaaccccaa

SEQ ID NO: 145324 - DNA, 15 bp, Homo sapiens
aagccaacaacccca

SEQ ID NO: 145325 - DNA, 15 bp, Homo sapiens
gaagccaacaacccc

SEQ ID NO: 145326 - DNA, 15 bp, Homo sapiens
ggaagccaacaaccc

SEQ ID NO: 145327 - DNA, 15 bp, Homo sapiens
gggaagccaacaacc

SEQ ID NO: 145328 - DNA, 15 bp, Homo sapiens
ggggaagccaacaac

SEQ ID NO: 145329 - DNA, 15 bp, Homo sapiens
tggggaagccaacaa

SEQ ID NO: 145330 - DNA, 15 bp, Homo sapiens
ctggggaagccaaca

SEQ ID NO: 145331 - DNA, 15 bp, Homo sapiens
tctggggaagccaac

SEQ ID NO: 145332 - DNA, 15 bp, Homo sapiens
ctctggggaagccaa

SEQ ID NO: 145333 - DNA, 15 bp, Homo sapiens
cctctggggaagcca

SEQ ID NO: 145334 - DNA, 15 bp, Homo sapiens
ccctctggggaagcc

SEQ ID NO: 145335 - DNA, 15 bp, Homo sapiens
cccctctggggaagc

SEQ ID NO: 145336 - DNA, 15 bp, Homo sapiens
acccctctggggaag

SEQ ID NO: 145337 - DNA, 15 bp, Homo sapiens
aacccctctggggaa

SEQ ID NO: 145338 - DNA, 15 bp, Homo sapiens
gaacccctctgggga

SEQ ID NO: 145339 - DNA, 15 bp, Homo sapiens
agaacccctctgggg

SEQ ID NO: 145340 - DNA, 15 bp, Homo sapiens
aagaacccctctggg

SEQ ID NO: 145341 - DNA, 15 bp, Homo sapiens
aaagaacccctctgg

SEQ ID NO: 145342 - DNA, 15 bp, Homo sapiens
caaagaacccctctg

SEQ ID NO: 145343 - DNA, 15 bp, Homo sapiens
acaaagaacccctct

SEQ ID NO: 145344 - DNA, 15 bp, Homo sapiens
tacaaagaacccctc

SEQ ID NO: 145345 - DNA, 15 bp, Homo sapiens
atacaaagaacccct

SEQ ID NO: 145346 - DNA, 15 bp, Homo sapiens
catacaaagaacccc

SEQ ID NO: 145347 - DNA, 15 bp, Homo sapiens
ccatacaaagaaccc

SEQ ID NO: 145348 - DNA, 15 bp, Homo sapiens
accatacaaagaacc

SEQ ID NO: 145349 - DNA, 15 bp, Homo sapiens
caccatacaaagaac

SEQ ID NO: 145350 - DNA, 15 bp, Homo sapiens
acaccatacaaagaa

SEQ ID NO: 145351 - DNA, 15 bp, Homo sapiens
gacaccatacaaaga

SEQ ID NO: 145352 - DNA, 15 bp, Homo sapiens
tgacaccatacaaag

SEQ ID NO: 145353 - DNA, 15 bp, Homo sapiens
ttgacaccatacaaa

SEQ ID NO: 145354 - DNA, 15 bp, Homo sapiens
cttgacaccatacaa

SEQ ID NO: 145355 - DNA, 15 bp, Homo sapiens
ccttgacaccataca

SEQ ID NO: 145356 - DNA, 15 bp, Homo sapiens
accttgacaccatac

SEQ ID NO: 145357 - DNA, 15 bp, Homo sapiens
caccttgacaccata

SEQ ID NO: 145358 - DNA, 15 bp, Homo sapiens
gcaccttgacaccat

SEQ ID NO: 145359 - DNA, 15 bp, Homo sapiens
ggcaccttgacacca

SEQ ID NO: 145360 - DNA, 15 bp, Homo sapiens
aggcaccttgacacc

SEQ ID NO: 145361 - DNA, 15 bp, Homo sapiens
caggcaccttgacac

SEQ ID NO: 145362 - DNA, 15 bp, Homo sapiens
acaggcaccttgaca

SEQ ID NO: 145363 - DNA, 15 bp, Homo sapiens
cacaggcaccttgac

SEQ ID NO: 145364 - DNA, 15 bp, Homo sapiens
ccacaggcaccttga

SEQ ID NO: 145365 - DNA, 15 bp, Homo sapiens
cccacaggcaccttg

SEQ ID NO: 145366 - DNA, 15 bp, Homo sapiens
gcccacaggcacctt

SEQ ID NO: 145367 - DNA, 15 bp, Homo sapiens
tgcccacaggcacct

SEQ ID NO: 145368 - DNA, 15 bp, Homo sapiens
atgcccacaggcacc

SEQ ID NO: 145369 - DNA, 15 bp, Homo sapiens
aatgcccacaggcac

SEQ ID NO: 145370 - DNA, 15 bp, Homo sapiens
taatgcccacaggca

SEQ ID NO: 145371 - DNA, 15 bp, Homo sapiens
ctaatgcccacaggc

SEQ ID NO: 145372 - DNA, 15 bp, Homo sapiens
cctaatgcccacagg

SEQ ID NO: 145373 - DNA, 15 bp, Homo sapiens
acctaatgcccacag

SEQ ID NO: 145374 - DNA, 15 bp, Homo sapiens
cacctaatgcccaca

SEQ ID NO: 145375 - DNA, 15 bp, Homo sapiens
tcacctaatgcccac

SEQ ID NO: 145376 - DNA, 15 bp, Homo sapiens
gtcacctaatgccca

SEQ ID NO: 145377 - DNA, 15 bp, Homo sapiens
agtcacctaatgccc

SEQ ID NO: 145378 - DNA, 15 bp, Homo sapiens
tagtcacctaatgcc

SEQ ID NO: 145379 - DNA, 15 bp, Homo sapiens
ttagtcacctaatgc

SEQ ID NO: 145380 - DNA, 15 bp, Homo sapiens
tttagtcacctaatg

SEQ ID NO: 145381 - DNA, 15 bp, Homo sapiens
ttttagtcacctaat

SEQ ID NO: 145382 - DNA, 15 bp, Homo sapiens
cttttagtcacctaa

SEQ ID NO: 145383 - DNA, 15 bp, Homo sapiens
ccttttagtcaccta

SEQ ID NO: 145384 - DNA, 15 bp, Homo sapiens
tccttttagtcacct

SEQ ID NO: 145385 - DNA, 15 bp, Homo sapiens
gtccttttagtcacc

SEQ ID NO: 145386 - DNA, 15 bp, Homo sapiens
agtccttttagtcac

SEQ ID NO: 145387 - DNA, 15 bp, Homo sapiens
cagtccttttagtca

SEQ ID NO: 145388 - DNA, 15 bp, Homo sapiens
tcagtccttttagtc

SEQ ID NO: 145389 - DNA, 15 bp, Homo sapiens
ttcagtccttttagt

SEQ ID NO: 145390 - DNA, 15 bp, Homo sapiens
gttcagtccttttag

SEQ ID NO: 145391 - DNA, 15 bp, Homo sapiens
tgttcagtcctttta

SEQ ID NO: 145392 - DNA, 15 bp, Homo sapiens
gtgttcagtcctttt

SEQ ID NO: 145393 - DNA, 15 bp, Homo sapiens
cgtgttcagtccttt

SEQ ID NO: 145394 - DNA, 15 bp, Homo sapiens
tcgtgttcagtcctt

SEQ ID NO: 145395 - DNA, 15 bp, Homo sapiens
atcgtgttcagtcct

SEQ ID NO: 145396 - DNA, 15 bp, Homo sapiens
tatcgtgttcagtcc

SEQ ID NO: 145397 - DNA, 15 bp, Homo sapiens
ttatcgtgttcagtc

SEQ ID NO: 145398 - DNA, 15 bp, Homo sapiens
tttatcgtgttcagt

SEQ ID NO: 145399 - DNA, 15 bp, Homo sapiens
gtttatcgtgttcag

SEQ ID NO: 145400 - DNA, 15 bp, Homo sapiens
agtttatcgtgttca

SEQ ID NO: 145401 - DNA, 15 bp, Homo sapiens
gagtttatcgtgttc

SEQ ID NO: 145402 - DNA, 15 bp, Homo sapiens
agagtttatcgtgtt

SEQ ID NO: 145403 - DNA, 15 bp, Homo sapiens
aagagtttatcgtgt

SEQ ID NO: 145404 - DNA, 15 bp, Homo sapiens
caagagtttatcgtg

SEQ ID NO: 145405 - DNA, 15 bp, Homo sapiens
ccaagagtttatcgt

SEQ ID NO: 145406 - DNA, 15 bp, Homo sapiens
accaagagtttatcg

SEQ ID NO: 145407 - DNA, 15 bp, Homo sapiens
caccaagagtttatc

SEQ ID NO: 145408 - DNA, 15 bp, Homo sapiens
ccaccaagagtttat

SEQ ID NO: 145409 - DNA, 15 bp, Homo sapiens
gccaccaagagttta

SEQ ID NO: 145410 - DNA, 15 bp, Homo sapiens
agccaccaagagttt

SEQ ID NO: 145411 - DNA, 15 bp, Homo sapiens
gagccaccaagagtt

SEQ ID NO: 145412 - DNA, 15 bp, Homo sapiens
agagccaccaagagt

SEQ ID NO: 145413 - DNA, 15 bp, Homo sapiens
aagagccaccaagag

SEQ ID NO: 145414 - DNA, 15 bp, Homo sapiens
gaagagccaccaaga

SEQ ID NO: 145415 - DNA, 15 bp, Homo sapiens
ggaagagccaccaag

SEQ ID NO: 145416 - DNA, 15 bp, Homo sapiens
aggaagagccaccaa

SEQ ID NO: 145417 - DNA, 15 bp, Homo sapiens
caggaagagccacca

SEQ ID NO: 145418 - DNA, 15 bp, Homo sapiens
gcaggaagagccacc

SEQ ID NO: 145419 - DNA, 15 bp, Homo sapiens
agcaggaagagccac

SEQ ID NO: 145420 - DNA, 15 bp, Homo sapiens
cagcaggaagagcca

SEQ ID NO: 145421 - DNA, 15 bp, Homo sapiens
gcagcaggaagagcc

SEQ ID NO: 145422 - DNA, 15 bp, Homo sapiens
tgcagcaggaagagc

SEQ ID NO: 145423 - DNA, 15 bp, Homo sapiens
ctgcagcaggaagag

SEQ ID NO: 145424 - DNA, 15 bp, Homo sapiens
cctgcagcaggaaga

SEQ ID NO: 145425 - DNA, 15 bp, Homo sapiens
tcctgcagcaggaag

SEQ ID NO: 145426 - DNA, 15 bp, Homo sapiens
ttcctgcagcaggaa

SEQ ID NO: 145427 - DNA, 15 bp, Homo sapiens
cttcctgcagcagga

SEQ ID NO: 145428 - DNA, 15 bp, Homo sapiens
ccttcctgcagcagg

SEQ ID NO: 145429 - DNA, 15 bp, Homo sapiens
cccttcctgcagcag

SEQ ID NO: 145430 - DNA, 15 bp, Homo sapiens
tcccttcctgcagca

SEQ ID NO: 145431 - DNA, 15 bp, Homo sapiens
ttcccttcctgcagc

SEQ ID NO: 145432 - DNA, 15 bp, Homo sapiens
attcccttcctgcag

SEQ ID NO: 145433 - DNA, 15 bp, Homo sapiens
tattcccttcctgca

SEQ ID NO: 145434 - DNA, 15 bp, Homo sapiens
gtattcccttcctgc

SEQ ID NO: 145435 - DNA, 15 bp, Homo sapiens
agtattcccttcctg

SEQ ID NO: 145436 - DNA, 15 bp, Homo sapiens
gagtattcccttcct

SEQ ID NO: 145437 - DNA, 15 bp, Homo sapiens
ggagtattcccttcc

SEQ ID NO: 145438 - DNA, 15 bp, Homo sapiens
tggagtattcccttc

SEQ ID NO: 145439 - DNA, 15 bp, Homo sapiens
ttggagtattccctt

SEQ ID NO: 145440 - DNA, 15 bp, Homo sapiens
cttggagtattccct

SEQ ID NO: 145441 - DNA, 15 bp, Homo sapiens
acttggagtattccc

SEQ ID NO: 145442 - DNA, 15 bp, Homo sapiens
aacttggagtattcc

SEQ ID NO: 145443 - DNA, 15 bp, Homo sapiens
gaacttggagtattc

SEQ ID NO: 145444 - DNA, 15 bp, Homo sapiens
ggaacttggagtatt

SEQ ID NO: 145445 - DNA, 15 bp, Homo sapiens
gggaacttggagtat

SEQ ID NO: 145446 - DNA, 15 bp, Homo sapiens
tgggaacttggagta

SEQ ID NO: 145447 - DNA, 15 bp, Homo sapiens
ctgggaacttggagt

SEQ ID NO: 145448 - DNA, 15 bp, Homo sapiens
tctgggaacttggag

SEQ ID NO: 145449 - DNA, 15 bp, Homo sapiens
ctctgggaacttgga

SEQ ID NO: 145450 - DNA, 15 bp, Homo sapiens
cctctgggaacttgg

SEQ ID NO: 145451 - DNA, 15 bp, Homo sapiens
tcctctgggaacttg

SEQ ID NO: 145452 - DNA, 15 bp, Homo sapiens
ctcctctgggaactt

SEQ ID NO: 145453 - DNA, 15 bp, Homo sapiens
tctcctctgggaact

SEQ ID NO: 145454 - DNA, 15 bp, Homo sapiens
gtctcctctgggaac

SEQ ID NO: 145455 - DNA, 15 bp, Homo sapiens
ggtctcctctgggaa

SEQ ID NO: 145456 - DNA, 15 bp, Homo sapiens
tggtctcctctggga

SEQ ID NO: 145457 - DNA, 15 bp, Homo sapiens
gtggtctcctctggg

SEQ ID NO: 145458 - DNA, 15 bp, Homo sapiens
ggtggtctcctctgg

SEQ ID NO: 145459 - DNA, 15 bp, Homo sapiens
gggtggtctcctctg

SEQ ID NO: 145460 - DNA, 15 bp, Homo sapiens
tgggtggtctcctct

SEQ ID NO: 145461 - DNA, 15 bp, Homo sapiens
ctgggtggtctcctc

SEQ ID NO: 145462 - DNA, 15 bp, Homo sapiens
actgggtggtctcct

SEQ ID NO: 145463 - DNA, 15 bp, Homo sapiens
cactgggtggtctcc

SEQ ID NO: 145464 - DNA, 15 bp, Homo sapiens
tcactgggtggtctc

SEQ ID NO: 145465 - DNA, 15 bp, Homo sapiens
atcactgggtggtct

SEQ ID NO: 145466 - DNA, 15 bp, Homo sapiens
catcactgggtggtc

SEQ ID NO: 145467 - DNA, 15 bp, Homo sapiens
ccatcactgggtggt

SEQ ID NO: 145468 - DNA, 15 bp, Homo sapiens
tccatcactgggtgg

SEQ ID NO: 145469 - DNA, 15 bp, Homo sapiens
ctccatcactgggtg

SEQ ID NO: 145470 - DNA, 15 bp, Homo sapiens
actccatcactgggt

SEQ ID NO: 145471 - DNA, 15 bp, Homo sapiens
cactccatcactggg

SEQ ID NO: 145472 - DNA, 15 bp, Homo sapiens
tcactccatcactgg

SEQ ID NO: 145473 - DNA, 15 bp, Homo sapiens
ttcactccatcactg

SEQ ID NO: 145474 - DNA, 15 bp, Homo sapiens
cttcactccatcact

SEQ ID NO: 145475 - DNA, 15 bp, Homo sapiens
gcttcactccatcac

SEQ ID NO: 145476 - DNA, 15 bp, Homo sapiens
agcttcactccatca

SEQ ID NO: 145477 - DNA, 15 bp, Homo sapiens
cagcttcactccatc

SEQ ID NO: 145478 - DNA, 15 bp, Homo sapiens
gcagcttcactccat

SEQ ID NO: 145479 - DNA, 15 bp, Homo sapiens
tgcagcttcactcca

SEQ ID NO: 145480 - DNA, 15 bp, Homo sapiens
atgcagcttcactcc

SEQ ID NO: 145481 - DNA, 15 bp, Homo sapiens
gatgcagcttcactc

SEQ ID NO: 145482 - DNA, 15 bp, Homo sapiens
ggatgcagcttcact

SEQ ID NO: 145483 - DNA, 15 bp, Homo sapiens
aggatgcagcttcac

SEQ ID NO: 145484 - DNA, 15 bp, Homo sapiens
aaggatgcagcttca

SEQ ID NO: 145485 - DNA, 15 bp, Homo sapiens
caaggatgcagcttc

SEQ ID NO: 145486 - DNA, 15 bp, Homo sapiens
ccaaggatgcagctt

SEQ ID NO: 145487 - DNA, 15 bp, Homo sapiens
gccaaggatgcagct

SEQ ID NO: 145488 - DNA, 15 bp, Homo sapiens
agccaaggatgcagc

SEQ ID NO: 145489 - DNA, 15 bp, Homo sapiens
gagccaaggatgcag

SEQ ID NO: 145490 - DNA, 15 bp, Homo sapiens
ggagccaaggatgca

SEQ ID NO: 145491 - DNA, 15 bp, Homo sapiens
gggagccaaggatgc

SEQ ID NO: 145492 - DNA, 15 bp, Homo sapiens
ggggagccaaggatg

SEQ ID NO: 145493 - DNA, 15 bp, Homo sapiens
aggggagccaaggat

SEQ ID NO: 145494 - DNA, 15 bp, Homo sapiens
gaggggagccaagga

SEQ ID NO: 145495 - DNA, 15 bp, Homo sapiens
tgaggggagccaagg

SEQ ID NO: 145496 - DNA, 15 bp, Homo sapiens
ctgaggggagccaag

SEQ ID NO: 145497 - DNA, 15 bp, Homo sapiens
gctgaggggagccaa

SEQ ID NO: 145498 - DNA, 15 bp, Homo sapiens
agctgaggggagcca

SEQ ID NO: 145499 - DNA, 15 bp, Homo sapiens
gagctgaggggagcc

SEQ ID NO: 145500 - DNA, 15 bp, Homo sapiens
tgagctgaggggagc

SEQ ID NO: 145501 - DNA, 15 bp, Homo sapiens
ctgagctgaggggag

SEQ ID NO: 145502 - DNA, 15 bp, Homo sapiens
cctgagctgagggga

SEQ ID NO: 145503 - DNA, 15 bp, Homo sapiens
tcctgagctgagggg

SEQ ID NO: 145504 - DNA, 15 bp, Homo sapiens
gtcctgagctgaggg

SEQ ID NO: 145505 - DNA, 15 bp, Homo sapiens
ggtcctgagctgagg

SEQ ID NO: 145506 - DNA, 15 bp, Homo sapiens
gggtcctgagctgag

SEQ ID NO: 145507 - DNA, 15 bp, Homo sapiens
agggtcctgagctga

SEQ ID NO: 145508 - DNA, 15 bp, Homo sapiens
gagggtcctgagctg

SEQ ID NO: 145509 - DNA, 15 bp, Homo sapiens
tgagggtcctgagct

SEQ ID NO: 145510 - DNA, 15 bp, Homo sapiens
ctgagggtcctgagc

SEQ ID NO: 145511 - DNA, 15 bp, Homo sapiens
tctgagggtcctgag

SEQ ID NO: 145512 - DNA, 15 bp, Homo sapiens
ttctgagggtcctga

SEQ ID NO: 145513 - DNA, 15 bp, Homo sapiens
tttctgagggtcctg

SEQ ID NO: 145514 - DNA, 15 bp, Homo sapiens
ctttctgagggtcct

SEQ ID NO: 145515 - DNA, 15 bp, Homo sapiens
cctttctgagggtcc

SEQ ID NO: 145516 - DNA, 15 bp, Homo sapiens
tcctttctgagggtc

SEQ ID NO: 145517 - DNA, 15 bp, Homo sapiens
gtcctttctgagggt

SEQ ID NO: 145518 - DNA, 15 bp, Homo sapiens
agtcctttctgaggg

SEQ ID NO: 145519 - DNA, 15 bp, Homo sapiens
aagtcctttctgagg

SEQ ID NO: 145520 - DNA, 15 bp, Homo sapiens
taagtcctttctgag

SEQ ID NO: 145521 - DNA, 15 bp, Homo sapiens
ctaagtcctttctga

SEQ ID NO: 145522 - DNA, 15 bp, Homo sapiens
cctaagtcctttctg

SEQ ID NO: 145523 - DNA, 15 bp, Homo sapiens
tcctaagtcctttct

SEQ ID NO: 145524 - DNA, 15 bp, Homo sapiens
ttcctaagtcctttc

SEQ ID NO: 145525 - DNA, 15 bp, Homo sapiens
cttcctaagtccttt

SEQ ID NO: 145526 - DNA, 15 bp, Homo sapiens
tcttcctaagtcctt

SEQ ID NO: 145527 - DNA, 15 bp, Homo sapiens
gtcttcctaagtcct

SEQ ID NO: 145528 - DNA, 15 bp, Homo sapiens
cgtcttcctaagtcc

SEQ ID NO: 145529 - DNA, 15 bp, Homo sapiens
ccgtcttcctaagtc

SEQ ID NO: 145530 - DNA, 15 bp, Homo sapiens
cccgtcttcctaagt

SEQ ID NO: 145531 - DNA, 15 bp, Homo sapiens
gcccgtcttcctaag

SEQ ID NO: 145532 - DNA, 15 bp, Homo sapiens
tgcccgtcttcctaa

SEQ ID NO: 145533 - DNA, 15 bp, Homo sapiens
gtgcccgtcttccta

SEQ ID NO: 145534 - DNA, 15 bp, Homo sapiens
agtgcccgtcttcct

SEQ ID NO: 145535 - DNA, 15 bp, Homo sapiens
cagtgcccgtcttcc

SEQ ID NO: 145536 - DNA, 15 bp, Homo sapiens
gcagtgcccgtcttc

SEQ ID NO: 145537 - DNA, 15 bp, Homo sapiens
ggcagtgcccgtctt

SEQ ID NO: 145538 - DNA, 15 bp, Homo sapiens
tggcagtgcccgtct

SEQ ID NO: 145539 - DNA, 15 bp, Homo sapiens
ctggcagtgcccgtc

SEQ ID NO: 145540 - DNA, 15 bp, Homo sapiens
tctggcagtgcccgt

SEQ ID NO: 145541 - DNA, 15 bp, Homo sapiens
atctggcagtgcccg

SEQ ID NO: 145542 - DNA, 15 bp, Homo sapiens
tatctggcagtgccc

SEQ ID NO: 145543 - DNA, 15 bp, Homo sapiens
gtatctggcagtgcc

SEQ ID NO: 145544 - DNA, 15 bp, Homo sapiens
tgtatctggcagtgc

SEQ ID NO: 145545 - DNA, 15 bp, Homo sapiens
ctgtatctggcagtg

SEQ ID NO: 145546 - DNA, 15 bp, Homo sapiens
tctgtatctggcagt

SEQ ID NO: 145547 - DNA, 15 bp, Homo sapiens
gtctgtatctggcag

SEQ ID NO: 145548 - DNA, 15 bp, Homo sapiens
cgtctgtatctggca

SEQ ID NO: 145549 - DNA, 15 bp, Homo sapiens
acgtctgtatctggc

SEQ ID NO: 145550 - DNA, 15 bp, Homo sapiens
gacgtctgtatctgg

SEQ ID NO: 145551 - DNA, 15 bp, Homo sapiens
agacgtctgtatctg

SEQ ID NO: 145552 - DNA, 15 bp, Homo sapiens
aagacgtctgtatct

SEQ ID NO: 145553 - DNA, 15 bp, Homo sapiens
aaagacgtctgtatc

SEQ ID NO: 145554 - DNA, 15 bp, Homo sapiens
gaaagacgtctgtat

SEQ ID NO: 145555 - DNA, 15 bp, Homo sapiens
agaaagacgtctgta

SEQ ID NO: 145556 - DNA, 15 bp, Homo sapiens
cagaaagacgtctgt

SEQ ID NO: 145557 - DNA, 15 bp, Homo sapiens
ccagaaagacgtctg

SEQ ID NO: 145558 - DNA, 15 bp, Homo sapiens
tccagaaagacgtct

SEQ ID NO: 145559 - DNA, 15 bp, Homo sapiens
gtccagaaagacgtc

SEQ ID NO: 145560 - DNA, 15 bp, Homo sapiens
agtccagaaagacgt

SEQ ID NO: 145561 - DNA, 15 bp, Homo sapiens
gagtccagaaagacg

SEQ ID NO: 145562 - DNA, 15 bp, Homo sapiens
agagtccagaaagac

SEQ ID NO: 145563 - DNA, 15 bp, Homo sapiens
tagagtccagaaaga

SEQ ID NO: 145564 - DNA, 15 bp, Homo sapiens
ctagagtccagaaag

SEQ ID NO: 145565 - DNA, 15 bp, Homo sapiens
cctagagtccagaaa

SEQ ID NO: 145566 - DNA, 15 bp, Homo sapiens
tcctagagtccagaa

SEQ ID NO: 145567 - DNA, 15 bp, Homo sapiens
ttcctagagtccaga

SEQ ID NO: 145568 - DNA, 15 bp, Homo sapiens
cttcctagagtccag

SEQ ID NO: 145569 - DNA, 15 bp, Homo sapiens
ccttcctagagtcca

SEQ ID NO: 145570 - DNA, 15 bp, Homo sapiens
cccttcctagagtcc

SEQ ID NO: 145571 - DNA, 15 bp, Homo sapiens
ccccttcctagagtc

SEQ ID NO: 145572 - DNA, 15 bp, Homo sapiens
accccttcctagagt

SEQ ID NO: 145573 - DNA, 15 bp, Homo sapiens
caccccttcctagag

SEQ ID NO: 145574 - DNA, 15 bp, Homo sapiens
gcaccccttcctaga

SEQ ID NO: 145575 - DNA, 15 bp, Homo sapiens
ggcaccccttcctag

SEQ ID NO: 145576 - DNA, 15 bp, Homo sapiens
aggcaccccttccta

SEQ ID NO: 145577 - DNA, 15 bp, Homo sapiens
aaggcaccccttcct

SEQ ID NO: 145578 - DNA, 15 bp, Homo sapiens
aaaggcaccccttcc

SEQ ID NO: 145579 - DNA, 15 bp, Homo sapiens
aaaaggcaccccttc

SEQ ID NO: 145580 - DNA, 15 bp, Homo sapiens
aaaaaggcacccctt

SEQ ID NO: 145581 - DNA, 15 bp, Homo sapiens
aaaaaaggcacccct

SEQ ID NO: 145582 - DNA, 15 bp, Homo sapiens
gaaaaaaggcacccc

SEQ ID NO: 145583 - DNA, 15 bp, Homo sapiens
agaaaaaaggcaccc

SEQ ID NO: 145584 - DNA, 15 bp, Homo sapiens
aagaaaaaaggcacc

SEQ ID NO: 145585 - DNA, 15 bp, Homo sapiens
aaagaaaaaaggcac

SEQ ID NO: 145586 - DNA, 15 bp, Homo sapiens
aaaagaaaaaaggca

SEQ ID NO: 145587 - DNA, 15 bp, Homo sapiens
gaaaagaaaaaaggc

SEQ ID NO: 145588 - DNA, 15 bp, Homo sapiens
agaaaagaaaaaagg

SEQ ID NO: 145589 - DNA, 15 bp, Homo sapiens
aagaaaagaaaaaag

SEQ ID NO: 145590 - DNA, 15 bp, Homo sapiens
aaagaaaagaaaaaa

SEQ ID NO: 145591 - DNA, 15 bp, Homo sapiens
taaagaaaagaaaaa

SEQ ID NO: 145592 - DNA, 15 bp, Homo sapiens
ttaaagaaaagaaaa

SEQ ID NO: 145593 - DNA, 15 bp, Homo sapiens
cttaaagaaaagaaa

SEQ ID NO: 145594 - DNA, 15 bp, Homo sapiens
tcttaaagaaaagaa

SEQ ID NO: 145595 - DNA, 15 bp, Homo sapiens
ctcttaaagaaaaga

SEQ ID NO: 145596 - DNA, 15 bp, Homo sapiens
tctcttaaagaaaag

SEQ ID NO: 145597 - DNA, 15 bp, Homo sapiens
atctcttaaagaaaa

SEQ ID NO: 145598 - DNA, 15 bp, Homo sapiens
tatctcttaaagaaa

SEQ ID NO: 145599 - DNA, 15 bp, Homo sapiens
ctatctcttaaagaa

SEQ ID NO: 145600 - DNA, 15 bp, Homo sapiens
actatctcttaaaga

SEQ ID NO: 145601 - DNA, 15 bp, Homo sapiens
gactatctcttaaag

SEQ ID NO: 145602 - DNA, 15 bp, Homo sapiens
agactatctcttaaa

SEQ ID NO: 145603 - DNA, 15 bp, Homo sapiens
gagactatctcttaa

SEQ ID NO: 145604 - DNA, 15 bp, Homo sapiens
tgagactatctctta

SEQ ID NO: 145605 - DNA, 15 bp, Homo sapiens
gtgagactatctctt

SEQ ID NO: 145606 - DNA, 15 bp, Homo sapiens
agtgagactatctct

SEQ ID NO: 145607 - DNA, 15 bp, Homo sapiens
gagtgagactatctc

SEQ ID NO: 145608 - DNA, 15 bp, Homo sapiens
agagtgagactatct

SEQ ID NO: 145609 - DNA, 15 bp, Homo sapiens
cagagtgagactatc

SEQ ID NO: 145610 - DNA, 15 bp, Homo sapiens
acagagtgagactat

SEQ ID NO: 145611 - DNA, 15 bp, Homo sapiens
aacagagtgagacta

SEQ ID NO: 145612 - DNA, 15 bp, Homo sapiens
caacagagtgagact

SEQ ID NO: 145613 - DNA, 15 bp, Homo sapiens
tagcctgggcaacag

SEQ ID NO: 145614 - DNA, 15 bp, Homo sapiens
ctagcctgggcaaca

SEQ ID NO: 145615 - DNA, 15 bp, Homo sapiens
tctagcctgggcaac

SEQ ID NO: 145616 - DNA, 15 bp, Homo sapiens
ctctagcctgggcaa

SEQ ID NO: 145617 - DNA, 15 bp, Homo sapiens
actctagcctgggca

SEQ ID NO: 145618 - DNA, 15 bp, Homo sapiens
cactctagcctgggc

SEQ ID NO: 145619 - DNA, 15 bp, Homo sapiens
gcactctagcctggg

SEQ ID NO: 145620 - DNA, 15 bp, Homo sapiens
tgcactctagcctgg

SEQ ID NO: 145621 - DNA, 15 bp, Homo sapiens
ctgcactctagcctg

SEQ ID NO: 145622 - DNA, 15 bp, Homo sapiens
actgcactctagcct

SEQ ID NO: 145623 - DNA, 15 bp, Homo sapiens
cactgcactctagcc

SEQ ID NO: 145624 - DNA, 15 bp, Homo sapiens
ccactgcactctagc

SEQ ID NO: 145625 - DNA, 15 bp, Homo sapiens
gccactgcactctag

SEQ ID NO: 145626 - DNA, 15 bp, Homo sapiens
tgccactgcactcta

SEQ ID NO: 145627 - DNA, 15 bp, Homo sapiens
atgccactgcactct

SEQ ID NO: 145628 - DNA, 15 bp, Homo sapiens
ccatgccactgcact

SEQ ID NO: 145629 - DNA, 15 bp, Homo sapiens
accatgccactgcac

SEQ ID NO: 145630 - DNA, 15 bp, Homo sapiens
gaccatgccactgca

SEQ ID NO: 145631 - DNA, 15 bp, Homo sapiens
tgaccatgccactgc

SEQ ID NO: 145632 - DNA, 15 bp, Homo sapiens
atgaccatgccactg

SEQ ID NO: 145633 - DNA, 15 bp, Homo sapiens
tatgaccatgccact

SEQ ID NO: 145634 - DNA, 15 bp, Homo sapiens
ttatgaccatgccac

SEQ ID NO: 145635 - DNA, 15 bp, Homo sapiens
gttatgaccatgcca

SEQ ID NO: 145636 - DNA, 15 bp, Homo sapiens
agttatgaccatgcc

SEQ ID NO: 145637 - DNA, 15 bp, Homo sapiens
aagttatgaccatgc

SEQ ID NO: 145638 - DNA, 15 bp, Homo sapiens
taagttatgaccatg

SEQ ID NO: 145639 - DNA, 15 bp, Homo sapiens
gtaagttatgaccat

SEQ ID NO: 145640 - DNA, 15 bp, Homo sapiens
agtaagttatgacca

SEQ ID NO: 145641 - DNA, 15 bp, Homo sapiens
cagtaagttatgacc

SEQ ID NO: 145642 - DNA, 15 bp, Homo sapiens
gcagtaagttatgac

SEQ ID NO: 145643 - DNA, 15 bp, Homo sapiens
tgcagtaagttatga

SEQ ID NO: 145644 - DNA, 15 bp, Homo sapiens
ctgcagtaagttatg

SEQ ID NO: 145645 - DNA, 15 bp, Homo sapiens
gctgcagtaagttat

SEQ ID NO: 145646 - DNA, 15 bp, Homo sapiens
ggctgcagtaagtta

SEQ ID NO: 145647 - DNA, 15 bp, Homo sapiens
aggctgcagtaagtt

SEQ ID NO: 145648 - DNA, 15 bp, Homo sapiens
aaggctgcagtaagt

SEQ ID NO: 145649 - DNA, 15 bp, Homo sapiens
caaggctgcagtaag

SEQ ID NO: 145650 - DNA, 15 bp, Homo sapiens
tcaaggctgcagtaa

SEQ ID NO: 145651 - DNA, 15 bp, Homo sapiens
ttcaaggctgcagta

SEQ ID NO: 145652 - DNA, 15 bp, Homo sapiens
gttcaaggctgcagt

SEQ ID NO: 145653 - DNA, 15 bp, Homo sapiens
agttcaaggctgcag

SEQ ID NO: 145654 - DNA, 15 bp, Homo sapiens
gagttcaaggctgca

SEQ ID NO: 145655 - DNA, 15 bp, Homo sapiens
ggagttcaaggctgc

SEQ ID NO: 145656 - DNA, 15 bp, Homo sapiens
aggagttcaaggctg

SEQ ID NO: 145657 - DNA, 15 bp, Homo sapiens
caggagttcaaggct

SEQ ID NO: 145658 - DNA, 15 bp, Homo sapiens
tcaggagttcaaggc

SEQ ID NO: 145659 - DNA, 15 bp, Homo sapiens
ctcaggagttcaagg

SEQ ID NO: 145660 - DNA, 15 bp, Homo sapiens
gctcaggagttcaag

SEQ ID NO: 145661 - DNA, 15 bp, Homo sapiens
agctcaggagttcaa

SEQ ID NO: 145662 - DNA, 15 bp, Homo sapiens
gagctcaggagttca

SEQ ID NO: 145663 - DNA, 15 bp, Homo sapiens
tgagctcaggagttc

SEQ ID NO: 145664 - DNA, 15 bp, Homo sapiens
ttgagctcaggagtt

SEQ ID NO: 145665 - DNA, 15 bp, Homo sapiens
cttgagctcaggagt

SEQ ID NO: 145666 - DNA, 15 bp, Homo sapiens
acttgagctcaggag

SEQ ID NO: 145667 - DNA, 15 bp, Homo sapiens
cacttgagctcagga

SEQ ID NO: 145668 - DNA, 15 bp, Homo sapiens
tcacttgagctcagg

SEQ ID NO: 145669 - DNA, 15 bp, Homo sapiens
atcacttgagctcag

SEQ ID NO: 145670 - DNA, 15 bp, Homo sapiens
gatcacttgagctca

SEQ ID NO: 145671 - DNA, 15 bp, Homo sapiens
ggatcacttgagctc

SEQ ID NO: 145672 - DNA, 15 bp, Homo sapiens
aggatcacttgagct

SEQ ID NO: 145673 - DNA, 15 bp, Homo sapiens
ggaggatcacttgag

SEQ ID NO: 145674 - DNA, 15 bp, Homo sapiens
gggaggatcacttga

SEQ ID NO: 145675 - DNA, 15 bp, Homo sapiens
tgggaggatcacttg

SEQ ID NO: 145676 - DNA, 15 bp, Homo sapiens
gtgggaggatcactt

SEQ ID NO: 145677 - DNA, 15 bp, Homo sapiens
tgtgggaggatcact

SEQ ID NO: 145678 - DNA, 15 bp, Homo sapiens
atgtgggaggatcac

SEQ ID NO: 145679 - DNA, 15 bp, Homo sapiens
gatgtgggaggatca

SEQ ID NO: 145680 - DNA, 15 bp, Homo sapiens
tgatgtgggaggatc

SEQ ID NO: 145681 - DNA, 15 bp, Homo sapiens
ctgatgtgggaggat

SEQ ID NO: 145682 - DNA, 15 bp, Homo sapiens
gctgatgtgggagga

SEQ ID NO: 145683 - DNA, 15 bp, Homo sapiens
ggctgatgtgggagg

SEQ ID NO: 145684 - DNA, 15 bp, Homo sapiens
aggctgatgtgggag

SEQ ID NO: 145685 - DNA, 15 bp, Homo sapiens
gaggctgatgtggga

SEQ ID NO: 145686 - DNA, 15 bp, Homo sapiens
ggaggctgatgtggg

SEQ ID NO: 145687 - DNA, 15 bp, Homo sapiens
gggaggctgatgtgg

SEQ ID NO: 145688 - DNA, 15 bp, Homo sapiens
tgggaggctgatgtg

SEQ ID NO: 145689 - DNA, 15 bp, Homo sapiens
ttgggaggctgatgt

SEQ ID NO: 145690 - DNA, 15 bp, Homo sapiens
cttgggaggctgatg

SEQ ID NO: 145691 - DNA, 15 bp, Homo sapiens
acttgggaggctgat

SEQ ID NO: 145692 - DNA, 15 bp, Homo sapiens
tagctacttgggagg

SEQ ID NO: 145693 - DNA, 15 bp, Homo sapiens
ctagctacttgggag

SEQ ID NO: 145694 - DNA, 15 bp, Homo sapiens
cctagctacttggga

SEQ ID NO: 145695 - DNA, 15 bp, Homo sapiens
tcctagctacttggg

SEQ ID NO: 145696 - DNA, 15 bp, Homo sapiens
gtcctagctacttgg

SEQ ID NO: 145697 - DNA, 15 bp, Homo sapiens
agtcctagctacttg

SEQ ID NO: 145698 - DNA, 15 bp, Homo sapiens
tagtcctagctactt

SEQ ID NO: 145699 - DNA, 15 bp, Homo sapiens
gtagtcctagctact

SEQ ID NO: 145700 - DNA, 15 bp, Homo sapiens
tgtagtcctagctac

SEQ ID NO: 145701 - DNA, 15 bp, Homo sapiens
ctgtagtcctagcta

SEQ ID NO: 145702 - DNA, 15 bp, Homo sapiens
cctgtagtcctagct

SEQ ID NO: 145703 - DNA, 15 bp, Homo sapiens
acctgtagtcctagc

SEQ ID NO: 145704 - DNA, 15 bp, Homo sapiens
cacctgtagtcctag

SEQ ID NO: 145705 - DNA, 15 bp, Homo sapiens
gcacctgtagtccta

SEQ ID NO: 145706 - DNA, 15 bp, Homo sapiens
cgcacctgtagtcct

SEQ ID NO: 145707 - DNA, 15 bp, Homo sapiens
gcgcacctgtagtcc

SEQ ID NO: 145708 - DNA, 15 bp, Homo sapiens
tgcgcacctgtagtc

SEQ ID NO: 145709 - DNA, 15 bp, Homo sapiens
gtgcgcacctgtagt

SEQ ID NO: 145710 - DNA, 15 bp, Homo sapiens
agtgcgcacctgtag

SEQ ID NO: 145711 - DNA, 15 bp, Homo sapiens
tagtgcgcacctgta

SEQ ID NO: 145712 - DNA, 15 bp, Homo sapiens
gtagtgcgcacctgt

SEQ ID NO: 145713 - DNA, 15 bp, Homo sapiens
agtagtgcgcacctg

SEQ ID NO: 145714 - DNA, 15 bp, Homo sapiens
cagtagtgcgcacct

SEQ ID NO: 145715 - DNA, 15 bp, Homo sapiens
acagtagtgcgcacc

SEQ ID NO: 145716 - DNA, 15 bp, Homo sapiens
cacagtagtgcgcac

SEQ ID NO: 145717 - DNA, 15 bp, Homo sapiens
gcacagtagtgcgca

SEQ ID NO: 145718 - DNA, 15 bp, Homo sapiens
ggcacagtagtgcgc

SEQ ID NO: 145719 - DNA, 15 bp, Homo sapiens
gggcacagtagtgcg

SEQ ID NO: 145720 - DNA, 15 bp, Homo sapiens
tgggcacagtagtgc

SEQ ID NO: 145721 - DNA, 15 bp, Homo sapiens
ctgggcacagtagtg

SEQ ID NO: 145722 - DNA, 15 bp, Homo sapiens
gctgggcacagtagt

SEQ ID NO: 145723 - DNA, 15 bp, Homo sapiens
agctgggcacagtag

SEQ ID NO: 145724 - DNA, 15 bp, Homo sapiens
tagctgggcacagta

SEQ ID NO: 145725 - DNA, 15 bp, Homo sapiens
ttagctgggcacagt

SEQ ID NO: 145726 - DNA, 15 bp, Homo sapiens
attagctgggcacag

SEQ ID NO: 145727 - DNA, 15 bp, Homo sapiens
aattagctgggcaca

SEQ ID NO: 145728 - DNA, 15 bp, Homo sapiens
aaattagctgggcac

SEQ ID NO: 145729 - DNA, 15 bp, Homo sapiens
aaaattagctgggca

SEQ ID NO: 145730 - DNA, 15 bp, Homo sapiens
aaaaattagctgggc

SEQ ID NO: 145731 - DNA, 15 bp, Homo sapiens
aaaaaattagctggg

SEQ ID NO: 145732 - DNA, 15 bp, Homo sapiens
taaaaaattagctgg

SEQ ID NO: 145733 - DNA, 15 bp, Homo sapiens
ttaaaaaattagctg

SEQ ID NO: 145734 - DNA, 15 bp, Homo sapiens
attaaaaaattagct

SEQ ID NO: 145735 - DNA, 15 bp, Homo sapiens
aattaaaaaattagc

SEQ ID NO: 145736 - DNA, 15 bp, Homo sapiens
taattaaaaaattag

SEQ ID NO: 145737 - DNA, 15 bp, Homo sapiens
ataattaaaaaatta

SEQ ID NO: 145738 - DNA, 15 bp, Homo sapiens
aataattaaaaaatt

SEQ ID NO: 145739 - DNA, 15 bp, Homo sapiens
aaataattaaaaaat

SEQ ID NO: 145740 - DNA, 15 bp, Homo sapiens
aaaataattaaaaaa

SEQ ID NO: 145741 - DNA, 15 bp, Homo sapiens
caaaataattaaaaa

SEQ ID NO: 145742 - DNA, 15 bp, Homo sapiens
acaaaataattaaaa

SEQ ID NO: 145743 - DNA, 15 bp, Homo sapiens
tacaaaataattaaa

SEQ ID NO: 145744 - DNA, 15 bp, Homo sapiens
ctacaaaataattaa

SEQ ID NO: 145745 - DNA, 15 bp, Homo sapiens
tctacaaaataatta

SEQ ID NO: 145746 - DNA, 15 bp, Homo sapiens
ctctacaaaataatt

SEQ ID NO: 145747 - DNA, 15 bp, Homo sapiens
tctctacaaaataat

SEQ ID NO: 145748 - DNA, 15 bp, Homo sapiens
atctctacaaaataa

SEQ ID NO: 145749 - DNA, 15 bp, Homo sapiens
catctctacaaaata

SEQ ID NO: 145750 - DNA, 15 bp, Homo sapiens
ccatctctacaaaat

SEQ ID NO: 145751 - DNA, 15 bp, Homo sapiens
cccatctctacaaaa

SEQ ID NO: 145752 - DNA, 15 bp, Homo sapiens
ccccatctctacaaa

SEQ ID NO: 145753 - DNA, 15 bp, Homo sapiens
accccatctctacaa

SEQ ID NO: 145754 - DNA, 15 bp, Homo sapiens
gaccccatctctaca

SEQ ID NO: 145755 - DNA, 15 bp, Homo sapiens
agaccccatctctac

SEQ ID NO: 145756 - DNA, 15 bp, Homo sapiens
aagaccccatctcta

SEQ ID NO: 145757 - DNA, 15 bp, Homo sapiens
caagaccccatctct

SEQ ID NO: 145758 - DNA, 15 bp, Homo sapiens
tcaagaccccatctc

SEQ ID NO: 145759 - DNA, 15 bp, Homo sapiens
ttcaagaccccatct

SEQ ID NO: 145760 - DNA, 15 bp, Homo sapiens
gttcaagaccccatc

SEQ ID NO: 145761 - DNA, 15 bp, Homo sapiens
agttcaagaccccat

SEQ ID NO: 145762 - DNA, 15 bp, Homo sapiens
gagttcaagacccca

SEQ ID NO: 145763 - DNA, 15 bp, Homo sapiens
ggagttcaagacccc

SEQ ID NO: 145764 - DNA, 15 bp, Homo sapiens
gggagttcaagaccc

SEQ ID NO: 145765 - DNA, 15 bp, Homo sapiens
tgggagttcaagacc

SEQ ID NO: 145766 - DNA, 15 bp, Homo sapiens
ctgggagttcaagac

SEQ ID NO: 145767 - DNA, 15 bp, Homo sapiens
gctgggagttcaaga

SEQ ID NO: 145768 - DNA, 15 bp, Homo sapiens
ggctgggagttcaag

SEQ ID NO: 145769 - DNA, 15 bp, Homo sapiens
aggctgggagttcaa

SEQ ID NO: 145770 - DNA, 15 bp, Homo sapiens
gaggctgggagttca

SEQ ID NO: 145771 - DNA, 15 bp, Homo sapiens
tgaggctgggagttc

SEQ ID NO: 145772 - DNA, 15 bp, Homo sapiens
ttgaggctgggagtt

SEQ ID NO: 145773 - DNA, 15 bp, Homo sapiens
cttgaggctgggagt

SEQ ID NO: 145774 - DNA, 15 bp, Homo sapiens
gcttgaggctgggag

SEQ ID NO: 145775 - DNA, 15 bp, Homo sapiens
cgcttgaggctggga

SEQ ID NO: 145776 - DNA, 15 bp, Homo sapiens
tcgcttgaggctggg

SEQ ID NO: 145777 - DNA, 15 bp, Homo sapiens
atcgcttgaggctgg

SEQ ID NO: 145778 - DNA, 15 bp, Homo sapiens
gatcgcttgaggctg

SEQ ID NO: 145779 - DNA, 15 bp, Homo sapiens
cgatcgcttgaggct

SEQ ID NO: 145780 - DNA, 15 bp, Homo sapiens
acgatcgcttgaggc

SEQ ID NO: 145781 - DNA, 15 bp, Homo sapiens
gacgatcgcttgagg

SEQ ID NO: 145782 - DNA, 15 bp, Homo sapiens
ggacgatcgcttgag

SEQ ID NO: 145783 - DNA, 15 bp, Homo sapiens
gggacgatcgcttga

SEQ ID NO: 145784 - DNA, 15 bp, Homo sapiens
ggggacgatcgcttg

SEQ ID NO: 145785 - DNA, 15 bp, Homo sapiens
aggggacgatcgctt

SEQ ID NO: 145786 - DNA, 15 bp, Homo sapiens
gaggggacgatcgct

SEQ ID NO: 145787 - DNA, 15 bp, Homo sapiens
agaggggacgatcgc

SEQ ID NO: 145788 - DNA, 15 bp, Homo sapiens
aagaggggacgatcg

SEQ ID NO: 145789 - DNA, 15 bp, Homo sapiens
caagaggggacgatc

SEQ ID NO: 145790 - DNA, 15 bp, Homo sapiens
ccaagaggggacgat

SEQ ID NO: 145791 - DNA, 15 bp, Homo sapiens
gccaagaggggacga

SEQ ID NO: 145792 - DNA, 15 bp, Homo sapiens
ggccaagaggggacg

SEQ ID NO: 145793 - DNA, 15 bp, Homo sapiens
aggccaagaggggac

SEQ ID NO: 145794 - DNA, 15 bp, Homo sapiens
gaggccaagagggga

SEQ ID NO: 145795 - DNA, 15 bp, Homo sapiens
ggaggccaagagggg

SEQ ID NO: 145796 - DNA, 15 bp, Homo sapiens
gggaggccaagaggg

SEQ ID NO: 145797 - DNA, 15 bp, Homo sapiens
tgggaggccaagagg

SEQ ID NO: 145798 - DNA, 15 bp, Homo sapiens
ttgggaggccaagag

SEQ ID NO: 145799 - DNA, 15 bp, Homo sapiens
tttgggaggccaaga

SEQ ID NO: 145800 - DNA, 15 bp, Homo sapiens
gctttgggaggccaa

SEQ ID NO: 145801 - DNA, 15 bp, Homo sapiens
tgctttgggaggcca

SEQ ID NO: 145802 - DNA, 15 bp, Homo sapiens
gtgctttgggaggcc

SEQ ID NO: 145803 - DNA, 15 bp, Homo sapiens
agtgctttgggaggc

SEQ ID NO: 145804 - DNA, 15 bp, Homo sapiens
cagtgctttgggagg

SEQ ID NO: 145805 - DNA, 15 bp, Homo sapiens
ccagtgctttgggag

SEQ ID NO: 145806 - DNA, 15 bp, Homo sapiens
cccagtgctttggga

SEQ ID NO: 145807 - DNA, 15 bp, Homo sapiens
tcccagtgctttggg

SEQ ID NO: 145808 - DNA, 15 bp, Homo sapiens
atcccagtgctttgg

SEQ ID NO: 145809 - DNA, 15 bp, Homo sapiens
aatcccagtgctttg

SEQ ID NO: 145810 - DNA, 15 bp, Homo sapiens
taatcccagtgcttt

SEQ ID NO: 145811 - DNA, 15 bp, Homo sapiens
gtaatcccagtgctt

SEQ ID NO: 145812 - DNA, 15 bp, Homo sapiens
tgtaatcccagtgct

SEQ ID NO: 145813 - DNA, 15 bp, Homo sapiens
ctgtaatcccagtgc

SEQ ID NO: 145814 - DNA, 15 bp, Homo sapiens
cctgtaatcccagtg

SEQ ID NO: 145815 - DNA, 15 bp, Homo sapiens
acctgtaatcccagt

SEQ ID NO: 145816 - DNA, 15 bp, Homo sapiens
ggccaggcacagtgg

SEQ ID NO: 145817 - DNA, 15 bp, Homo sapiens
tggccaggcacagtg

SEQ ID NO: 145818 - DNA, 15 bp, Homo sapiens
ttggccaggcacagt

SEQ ID NO: 145819 - DNA, 15 bp, Homo sapiens
tttggccaggcacag

SEQ ID NO: 145820 - DNA, 15 bp, Homo sapiens
ctttggccaggcaca

SEQ ID NO: 145821 - DNA, 15 bp, Homo sapiens
tctttggccaggcac

SEQ ID NO: 145822 - DNA, 15 bp, Homo sapiens
atctttggccaggca

SEQ ID NO: 145823 - DNA, 15 bp, Homo sapiens
catctttggccaggc

SEQ ID NO: 145824 - DNA, 15 bp, Homo sapiens
gcatctttggccagg

SEQ ID NO: 145825 - DNA, 15 bp, Homo sapiens
ggcatctttggccag

SEQ ID NO: 145826 - DNA, 15 bp, Homo sapiens
aggcatctttggcca

SEQ ID NO: 145827 - DNA, 15 bp, Homo sapiens
aaggcatctttggcc

SEQ ID NO: 145828 - DNA, 15 bp, Homo sapiens
aaaggcatctttggc

SEQ ID NO: 145829 - DNA, 15 bp, Homo sapiens
aaaaggcatctttgg

SEQ ID NO: 145830 - DNA, 15 bp, Homo sapiens
aaaaaggcatctttg

SEQ ID NO: 145831 - DNA, 15 bp, Homo sapiens
caaaaaggcatcttt

SEQ ID NO: 145832 - DNA, 15 bp, Homo sapiens
tcaaaaaggcatctt

SEQ ID NO: 145833 - DNA, 15 bp, Homo sapiens
ctcaaaaaggcatct

SEQ ID NO: 145834 - DNA, 15 bp, Homo sapiens
cctcaaaaaggcatc

SEQ ID NO: 145835 - DNA, 15 bp, Homo sapiens
ccctcaaaaaggcat

SEQ ID NO: 145836 - DNA, 15 bp, Homo sapiens
gccctcaaaaaggca

SEQ ID NO: 145837 - DNA, 15 bp, Homo sapiens
ggccctcaaaaaggc

SEQ ID NO: 145838 - DNA, 15 bp, Homo sapiens
tggccctcaaaaagg

SEQ ID NO: 145839 - DNA, 15 bp, Homo sapiens
atggccctcaaaaag

SEQ ID NO: 145840 - DNA, 15 bp, Homo sapiens
catggccctcaaaaa

SEQ ID NO: 145841 - DNA, 15 bp, Homo sapiens
tcatggccctcaaaa

SEQ ID NO: 145842 - DNA, 15 bp, Homo sapiens
ctcatggccctcaaa

SEQ ID NO: 145843 - DNA, 15 bp, Homo sapiens
cctcatggccctcaa

SEQ ID NO: 145844 - DNA, 15 bp, Homo sapiens
ccctcatggccctca

SEQ ID NO: 145845 - DNA, 15 bp, Homo sapiens
cccctcatggccctc

SEQ ID NO: 145846 - DNA, 15 bp, Homo sapiens
acccctcatggccct

SEQ ID NO: 145847 - DNA, 15 bp, Homo sapiens
aacccctcatggccc

SEQ ID NO: 145848 - DNA, 15 bp, Homo sapiens
caacccctcatggcc

SEQ ID NO: 145849 - DNA, 15 bp, Homo sapiens
gcaacccctcatggc

SEQ ID NO: 145850 - DNA, 15 bp, Homo sapiens
agcaacccctcatgg

SEQ ID NO: 145851 - DNA, 15 bp, Homo sapiens
cagcaacccctcatg

SEQ ID NO: 145852 - DNA, 15 bp, Homo sapiens
gcagcaacccctcat

SEQ ID NO: 145853 - DNA, 15 bp, Homo sapiens
agcagcaacccctca

SEQ ID NO: 145854 - DNA, 15 bp, Homo sapiens
gagcagcaacccctc

SEQ ID NO: 145855 - DNA, 15 bp, Homo sapiens
agagcagcaacccct

SEQ ID NO: 145856 - DNA, 15 bp, Homo sapiens
cagagcagcaacccc

SEQ ID NO: 145857 - DNA, 15 bp, Homo sapiens
ccagagcagcaaccc

SEQ ID NO: 145858 - DNA, 15 bp, Homo sapiens
cccagagcagcaacc

SEQ ID NO: 145859 - DNA, 15 bp, Homo sapiens
acccagagcagcaac

SEQ ID NO: 145860 - DNA, 15 bp, Homo sapiens
gacccagagcagcaa

SEQ ID NO: 145861 - DNA, 15 bp, Homo sapiens
agacccagagcagca

SEQ ID NO: 145862 - DNA, 15 bp, Homo sapiens
cagacccagagcagc

SEQ ID NO: 145863 - DNA, 15 bp, Homo sapiens
ccagacccagagcag

SEQ ID NO: 145864 - DNA, 15 bp, Homo sapiens
cccagacccagagca

SEQ ID NO: 145865 - DNA, 15 bp, Homo sapiens
gcccagacccagagc

SEQ ID NO: 145866 - DNA, 15 bp, Homo sapiens
tgcccagacccagag

SEQ ID NO: 145867 - DNA, 15 bp, Homo sapiens
atgcccagacccaga

SEQ ID NO: 145868 - DNA, 15 bp, Homo sapiens
aatgcccagacccag

SEQ ID NO: 145869 - DNA, 15 bp, Homo sapiens
aaatgcccagaccca

SEQ ID NO: 145870 - DNA, 15 bp, Homo sapiens
gaaatgcccagaccc

SEQ ID NO: 145871 - DNA, 15 bp, Homo sapiens
agaaatgcccagacc

SEQ ID NO: 145872 - DNA, 15 bp, Homo sapiens
gagaaatgcccagac

SEQ ID NO: 145873 - DNA, 15 bp, Homo sapiens
agagaaatgcccaga

SEQ ID NO: 145874 - DNA, 15 bp, Homo sapiens
cagagaaatgcccag

SEQ ID NO: 145875 - DNA, 15 bp, Homo sapiens
ccagagaaatgccca

SEQ ID NO: 145876 - DNA, 15 bp, Homo sapiens
tccagagaaatgccc

SEQ ID NO: 145877 - DNA, 15 bp, Homo sapiens
ctccagagaaatgcc

SEQ ID NO: 145878 - DNA, 15 bp, Homo sapiens
cctccagagaaatgc

SEQ ID NO: 145879 - DNA, 15 bp, Homo sapiens
tcctccagagaaatg

SEQ ID NO: 145880 - DNA, 15 bp, Homo sapiens
ctcctccagagaaat

SEQ ID NO: 145881 - DNA, 15 bp, Homo sapiens
gctcctccagagaaa

SEQ ID NO: 145882 - DNA, 15 bp, Homo sapiens
agctcctccagagaa

SEQ ID NO: 145883 - DNA, 15 bp, Homo sapiens
cagctcctccagaga

SEQ ID NO: 145884 - DNA, 15 bp, Homo sapiens
gcagctcctccagag

SEQ ID NO: 145885 - DNA, 15 bp, Homo sapiens
agcagctcctccaga

SEQ ID NO: 145886 - DNA, 15 bp, Homo sapiens
aagcagctcctccag

SEQ ID NO: 145887 - DNA, 15 bp, Homo sapiens
caagcagctcctcca

SEQ ID NO: 145888 - DNA, 15 bp, Homo sapiens
acaagcagctcctcc

SEQ ID NO: 145889 - DNA, 15 bp, Homo sapiens
tacaagcagctcctc

SEQ ID NO: 145890 - DNA, 15 bp, Homo sapiens
gtacaagcagctcct

SEQ ID NO: 145891 - DNA, 15 bp, Homo sapiens
tgtacaagcagctcc

SEQ ID NO: 145892 - DNA, 15 bp, Homo sapiens
ctgtacaagcagctc

SEQ ID NO: 145893 - DNA, 15 bp, Homo sapiens
gctgtacaagcagct

SEQ ID NO: 145894 - DNA, 15 bp, Homo sapiens
tgctgtacaagcagc

SEQ ID NO: 145895 - DNA, 15 bp, Homo sapiens
ttgctgtacaagcag

SEQ ID NO: 145896 - DNA, 15 bp, Homo sapiens
attgctgtacaagca

SEQ ID NO: 145897 - DNA, 15 bp, Homo sapiens
cattgctgtacaagc

SEQ ID NO: 145898 - DNA, 15 bp, Homo sapiens
tcattgctgtacaag

SEQ ID NO: 145899 - DNA, 15 bp, Homo sapiens
atcattgctgtacaa

SEQ ID NO: 145900 - DNA, 15 bp, Homo sapiens
aatcattgctgtaca

SEQ ID NO: 145901 - DNA, 15 bp, Homo sapiens
caatcattgctgtac

SEQ ID NO: 145902 - DNA, 15 bp, Homo sapiens
acaatcattgctgta

SEQ ID NO: 145903 - DNA, 15 bp, Homo sapiens
gacaatcattgctgt

SEQ ID NO: 145904 - DNA, 15 bp, Homo sapiens
ggacaatcattgctg

SEQ ID NO: 145905 - DNA, 15 bp, Homo sapiens
gggacaatcattgct

SEQ ID NO: 145906 - DNA, 15 bp, Homo sapiens
tgggacaatcattgc

SEQ ID NO: 145907 - DNA, 15 bp, Homo sapiens
atgggacaatcattg

SEQ ID NO: 145908 - DNA, 15 bp, Homo sapiens
gatgggacaatcatt

SEQ ID NO: 145909 - DNA, 15 bp, Homo sapiens
ggatgggacaatcat

SEQ ID NO: 145910 - DNA, 15 bp, Homo sapiens
gggatgggacaatca

SEQ ID NO: 145911 - DNA, 15 bp, Homo sapiens
agggatgggacaatc

SEQ ID NO: 145912 - DNA, 15 bp, Homo sapiens
gagggatgggacaat

SEQ ID NO: 145913 - DNA, 15 bp, Homo sapiens
ggagggatgggacaa

SEQ ID NO: 145914 - DNA, 15 bp, Homo sapiens
aggagggatgggaca

SEQ ID NO: 145915 - DNA, 15 bp, Homo sapiens
aaggagggatgggac

SEQ ID NO: 145916 - DNA, 15 bp, Homo sapiens
aaaggagggatggga

SEQ ID NO: 145917 - DNA, 15 bp, Homo sapiens
aaaaggagggatggg

SEQ ID NO: 145918 - DNA, 15 bp, Homo sapiens
taaaaggagggatgg

SEQ ID NO: 145919 - DNA, 15 bp, Homo sapiens
ctaaaaggagggatg

SEQ ID NO: 145920 - DNA, 15 bp, Homo sapiens
actaaaaggagggat

SEQ ID NO: 145921 - DNA, 15 bp, Homo sapiens
gactaaaaggaggga

SEQ ID NO: 145922 - DNA, 15 bp, Homo sapiens
ggactaaaaggaggg

SEQ ID NO: 145923 - DNA, 15 bp, Homo sapiens
gggactaaaaggagg

SEQ ID NO: 145924 - DNA, 15 bp, Homo sapiens
tgggactaaaaggag

SEQ ID NO: 145925 - DNA, 15 bp, Homo sapiens
gtgggactaaaagga

SEQ ID NO: 145926 - DNA, 15 bp, Homo sapiens
tgtgggactaaaagg

SEQ ID NO: 145927 - DNA, 15 bp, Homo sapiens
ctgtgggactaaaag

SEQ ID NO: 145928 - DNA, 15 bp, Homo sapiens
cctgtgggactaaaa

SEQ ID NO: 145929 - DNA, 15 bp, Homo sapiens
acctgtgggactaaa

SEQ ID NO: 145930 - DNA, 15 bp, Homo sapiens
gacctgtgggactaa

SEQ ID NO: 145931 - DNA, 15 bp, Homo sapiens
tgacctgtgggacta

SEQ ID NO: 145932 - DNA, 15 bp, Homo sapiens
ctgacctgtgggact

SEQ ID NO: 145933 - DNA, 15 bp, Homo sapiens
tctgacctgtgggac

SEQ ID NO: 145934 - DNA, 15 bp, Homo sapiens
ctctgacctgtggga

SEQ ID NO: 145935 - DNA, 15 bp, Homo sapiens
actctgacctgtggg

SEQ ID NO: 145936 - DNA, 15 bp, Homo sapiens
cactctgacctgtgg

SEQ ID NO: 145937 - DNA, 15 bp, Homo sapiens
ccactctgacctgtg

SEQ ID NO: 145938 - DNA, 15 bp, Homo sapiens
cccactctgacctgt

SEQ ID NO: 145939 - DNA, 15 bp, Homo sapiens
tcccactctgacctg

SEQ ID NO: 145940 - DNA, 15 bp, Homo sapiens
gtcccactctgacct

SEQ ID NO: 145941 - DNA, 15 bp, Homo sapiens
agtcccactctgacc

SEQ ID NO: 145942 - DNA, 15 bp, Homo sapiens
aagtcccactctgac

SEQ ID NO: 145943 - DNA, 15 bp, Homo sapiens
taagtcccactctga

SEQ ID NO: 145944 - DNA, 15 bp, Homo sapiens
ctaagtcccactctg

SEQ ID NO: 145945 - DNA, 15 bp, Homo sapiens
cctaagtcccactct

SEQ ID NO: 145946 - DNA, 15 bp, Homo sapiens
tcctaagtcccactc

SEQ ID NO: 145947 - DNA, 15 bp, Homo sapiens
gtcctaagtcccact

SEQ ID NO: 145948 - DNA, 15 bp, Homo sapiens
tgtcctaagtcccac

SEQ ID NO: 145949 - DNA, 15 bp, Homo sapiens
ctgtcctaagtccca

SEQ ID NO: 145950 - DNA, 15 bp, Homo sapiens
actgtcctaagtccc

SEQ ID NO: 145951 - DNA, 15 bp, Homo sapiens
cactgtcctaagtcc

SEQ ID NO: 145952 - DNA, 15 bp, Homo sapiens
ccactgtcctaagtc

SEQ ID NO: 145953 - DNA, 15 bp, Homo sapiens
cccactgtcctaagt

SEQ ID NO: 145954 - DNA, 15 bp, Homo sapiens
tcccactgtcctaag

SEQ ID NO: 145955 - DNA, 15 bp, Homo sapiens
gtcccactgtcctaa

SEQ ID NO: 145956 - DNA, 15 bp, Homo sapiens
tgtcccactgtccta

SEQ ID NO: 145957 - DNA, 15 bp, Homo sapiens
ctgtcccactgtcct

SEQ ID NO: 145958 - DNA, 15 bp, Homo sapiens
actgtcccactgtcc

SEQ ID NO: 145959 - DNA, 15 bp, Homo sapiens
cactgtcccactgtc

SEQ ID NO: 145960 - DNA, 15 bp, Homo sapiens
ccactgtcccactgt

SEQ ID NO: 145961 - DNA, 15 bp, Homo sapiens
cccactgtcccactg

SEQ ID NO: 145962 - DNA, 15 bp, Homo sapiens
tcccactgtcccact

SEQ ID NO: 145963 - DNA, 15 bp, Homo sapiens
gtcccactgtcccac

SEQ ID NO: 145964 - DNA, 15 bp, Homo sapiens
ggtcccactgtccca

SEQ ID NO: 145965 - DNA, 15 bp, Homo sapiens
gggtcccactgtccc

SEQ ID NO: 145966 - DNA, 15 bp, Homo sapiens
tgggtcccactgtcc

SEQ ID NO: 145967 - DNA, 15 bp, Homo sapiens
ttgggtcccactgtc

SEQ ID NO: 145968 - DNA, 15 bp, Homo sapiens
tttgggtcccactgt

SEQ ID NO: 145969 - DNA, 15 bp, Homo sapiens
ttttgggtcccactg

SEQ ID NO: 145970 - DNA, 15 bp, Homo sapiens
gttttgggtcccact

SEQ ID NO: 145971 - DNA, 15 bp, Homo sapiens
agttttgggtcccac

SEQ ID NO: 145972 - DNA, 15 bp, Homo sapiens
aagttttgggtccca

SEQ ID NO: 145973 - DNA, 15 bp, Homo sapiens
taagttttgggtccc

SEQ ID NO: 145974 - DNA, 15 bp, Homo sapiens
ttaagttttgggtcc

SEQ ID NO: 145975 - DNA, 15 bp, Homo sapiens
tttaagttttgggtc

SEQ ID NO: 145976 - DNA, 15 bp, Homo sapiens
ctttaagttttgggt

SEQ ID NO: 145977 - DNA, 15 bp, Homo sapiens
gctttaagttttggg

SEQ ID NO: 145978 - DNA, 15 bp, Homo sapiens
ggctttaagttttgg

SEQ ID NO: 145979 - DNA, 15 bp, Homo sapiens
tggctttaagttttg

SEQ ID NO: 145980 - DNA, 15 bp, Homo sapiens
ctggctttaagtttt

SEQ ID NO: 145981 - DNA, 15 bp, Homo sapiens
gctggctttaagttt

SEQ ID NO: 145982 - DNA, 15 bp, Homo sapiens
ggctggctttaagtt

SEQ ID NO: 145983 - DNA, 15 bp, Homo sapiens
aggctggctttaagt

SEQ ID NO: 145984 - DNA, 15 bp, Homo sapiens
caggctggctttaag

SEQ ID NO: 145985 - DNA, 15 bp, Homo sapiens
ccaggctggctttaa

SEQ ID NO: 145986 - DNA, 15 bp, Homo sapiens
accaggctggcttta

SEQ ID NO: 145987 - DNA, 15 bp, Homo sapiens
taccaggctggcttt

SEQ ID NO: 145988 - DNA, 15 bp, Homo sapiens
ataccaggctggctt

SEQ ID NO: 145989 - DNA, 15 bp, Homo sapiens
aataccaggctggct

SEQ ID NO: 145990 - DNA, 15 bp, Homo sapiens
aaataccaggctggc

SEQ ID NO: 145991 - DNA, 15 bp, Homo sapiens
gaaataccaggctgg

SEQ ID NO: 145992 - DNA, 15 bp, Homo sapiens
tgaaataccaggctg

SEQ ID NO: 145993 - DNA, 15 bp, Homo sapiens
ctgaaataccaggct

SEQ ID NO: 145994 - DNA, 15 bp, Homo sapiens
gctgaaataccaggc

SEQ ID NO: 145995 - DNA, 15 bp, Homo sapiens
tgctgaaataccagg

SEQ ID NO: 145996 - DNA, 15 bp, Homo sapiens
ctgctgaaataccag

SEQ ID NO: 145997 - DNA, 15 bp, Homo sapiens
actgctgaaatacca

SEQ ID NO: 145998 - DNA, 15 bp, Homo sapiens
tactgctgaaatacc

SEQ ID NO: 145999 - DNA, 15 bp, Homo sapiens
atactgctgaaatac

SEQ ID NO: 146000 - DNA, 15 bp, Homo sapiens
aatactgctgaaata

SEQ ID NO: 146001 - DNA, 15 bp, Homo sapiens
taatactgctgaaat

SEQ ID NO: 146002 - DNA, 15 bp, Homo sapiens
ataatactgctgaaa

SEQ ID NO: 146003 - DNA, 15 bp, Homo sapiens
gataatactgctgaa

SEQ ID NO: 146004 - DNA, 15 bp, Homo sapiens
agataatactgctga

SEQ ID NO: 146005 - DNA, 15 bp, Homo sapiens
cagataatactgctg

SEQ ID NO: 146006 - DNA, 15 bp, Homo sapiens
acagataatactgct

SEQ ID NO: 146007 - DNA, 15 bp, Homo sapiens
aacagataatactgc

SEQ ID NO: 146008 - DNA, 15 bp, Homo sapiens
taacagataatactg

SEQ ID NO: 146009 - DNA, 15 bp, Homo sapiens
gtaacagataatact

SEQ ID NO: 146010 - DNA, 15 bp, Homo sapiens
ggtaacagataatac

SEQ ID NO: 146011 - DNA, 15 bp, Homo sapiens
aggtaacagataata

SEQ ID NO: 146012 - DNA, 15 bp, Homo sapiens
taggtaacagataat

SEQ ID NO: 146013 - DNA, 15 bp, Homo sapiens
ctaggtaacagataa

SEQ ID NO: 146014 - DNA, 15 bp, Homo sapiens
tctaggtaacagata

SEQ ID NO: 146015 - DNA, 15 bp, Homo sapiens
ctctaggtaacagat

SEQ ID NO: 146016 - DNA, 15 bp, Homo sapiens
tctctaggtaacaga

SEQ ID NO: 146017 - DNA, 15 bp, Homo sapiens
ctctctaggtaacag

SEQ ID NO: 146018 - DNA, 15 bp, Homo sapiens
tctctctaggtaaca

SEQ ID NO: 146019 - DNA, 15 bp, Homo sapiens
ctctctctaggtaac

SEQ ID NO: 146020 - DNA, 15 bp, Homo sapiens
cctctctctaggtaa

SEQ ID NO: 146021 - DNA, 15 bp, Homo sapiens
gcctctctctaggta

SEQ ID NO: 146022 - DNA, 15 bp, Homo sapiens
agcctctctctaggt

SEQ ID NO: 146023 - DNA, 15 bp, Homo sapiens
cagcctctctctagg

SEQ ID NO: 146024 - DNA, 15 bp, Homo sapiens
tcagcctctctctag

SEQ ID NO: 146025 - DNA, 15 bp, Homo sapiens
atcagcctctctcta

SEQ ID NO: 146026 - DNA, 15 bp, Homo sapiens
catcagcctctctct

SEQ ID NO: 146027 - DNA, 15 bp, Homo sapiens
gcatcagcctctctc

SEQ ID NO: 146028 - DNA, 15 bp, Homo sapiens
tgcatcagcctctct

SEQ ID NO: 146029 - DNA, 15 bp, Homo sapiens
ctgcatcagcctctc

SEQ ID NO: 146030 - DNA, 15 bp, Homo sapiens
cctgcatcagcctct

SEQ ID NO: 146031 - DNA, 15 bp, Homo sapiens
ccctgcatcagcctc

SEQ ID NO: 146032 - DNA, 15 bp, Homo sapiens
cccctgcatcagcct

SEQ ID NO: 146033 - DNA, 15 bp, Homo sapiens
acccctgcatcagcc

SEQ ID NO: 146034 - DNA, 15 bp, Homo sapiens
cacccctgcatcagc

SEQ ID NO: 146035 - DNA, 15 bp, Homo sapiens
acacccctgcatcag

SEQ ID NO: 146036 - DNA, 15 bp, Homo sapiens
gacacccctgcatca

SEQ ID NO: 146037 - DNA, 15 bp, Homo sapiens
agacacccctgcatc

SEQ ID NO: 146038 - DNA, 15 bp, Homo sapiens
cagacacccctgcat

SEQ ID NO: 146039 - DNA, 15 bp, Homo sapiens
ccagacacccctgca

SEQ ID NO: 146040 - DNA, 15 bp, Homo sapiens
cccagacacccctgc

SEQ ID NO: 146041 - DNA, 15 bp, Homo sapiens
tcccagacacccctg

SEQ ID NO: 146042 - DNA, 15 bp, Homo sapiens
ctcccagacacccct

SEQ ID NO: 146043 - DNA, 15 bp, Homo sapiens
cctcccagacacccc

SEQ ID NO: 146044 - DNA, 15 bp, Homo sapiens
gcctcccagacaccc

SEQ ID NO: 146045 - DNA, 15 bp, Homo sapiens
agcctcccagacacc

SEQ ID NO: 146046 - DNA, 15 bp, Homo sapiens
cagcctcccagacac

SEQ ID NO: 146047 - DNA, 15 bp, Homo sapiens
ccagcctcccagaca

SEQ ID NO: 146048 - DNA, 15 bp, Homo sapiens
tccagcctcccagac

SEQ ID NO: 146049 - DNA, 15 bp, Homo sapiens
ctccagcctcccaga

SEQ ID NO: 146050 - DNA, 15 bp, Homo sapiens
cctccagcctcccag

SEQ ID NO: 146051 - DNA, 15 bp, Homo sapiens
ccctccagcctccca

SEQ ID NO: 146052 - DNA, 15 bp, Homo sapiens
gccctccagcctccc

SEQ ID NO: 146053 - DNA, 15 bp, Homo sapiens
agccctccagcctcc

SEQ ID NO: 146054 - DNA, 15 bp, Homo sapiens
cagccctccagcctc

SEQ ID NO: 146055 - DNA, 15 bp, Homo sapiens
gcagccctccagcct

SEQ ID NO: 146056 - DNA, 15 bp, Homo sapiens
tgcagccctccagcc

SEQ ID NO: 146057 - DNA, 15 bp, Homo sapiens
gtgcagccctccagc

SEQ ID NO: 146058 - DNA, 15 bp, Homo sapiens
ggtgcagccctccag

SEQ ID NO: 146059 - DNA, 15 bp, Homo sapiens
tggtgcagccctcca

SEQ ID NO: 146060 - DNA, 15 bp, Homo sapiens
ttggtgcagccctcc

SEQ ID NO: 146061 - DNA, 15 bp, Homo sapiens
cttggtgcagccctc

SEQ ID NO: 146062 - DNA, 15 bp, Homo sapiens
ccttggtgcagccct

SEQ ID NO: 146063 - DNA, 15 bp, Homo sapiens
cccttggtgcagccc

SEQ ID NO: 146064 - DNA, 15 bp, Homo sapiens
acccttggtgcagcc

SEQ ID NO: 146065 - DNA, 15 bp, Homo sapiens
cacccttggtgcagc

SEQ ID NO: 146066 - DNA, 15 bp, Homo sapiens
ccacccttggtgcag

SEQ ID NO: 146067 - DNA, 15 bp, Homo sapiens
tccacccttggtgca

SEQ ID NO: 146068 - DNA, 15 bp, Homo sapiens
atccacccttggtgc

SEQ ID NO: 146069 - DNA, 15 bp, Homo sapiens
catccacccttggtg

SEQ ID NO: 146070 - DNA, 15 bp, Homo sapiens
ccatccacccttggt

SEQ ID NO: 146071 - DNA, 15 bp, Homo sapiens
gccatccacccttgg

SEQ ID NO: 146072 - DNA, 15 bp, Homo sapiens
tgccatccacccttg

SEQ ID NO: 146073 - DNA, 15 bp, Homo sapiens
ctgccatccaccctt

SEQ ID NO: 146074 - DNA, 15 bp, Homo sapiens
tctgccatccaccct

SEQ ID NO: 146075 - DNA, 15 bp, Homo sapiens
ctctgccatccaccc

SEQ ID NO: 146076 - DNA, 15 bp, Homo sapiens
gctctgccatccacc

SEQ ID NO: 146077 - DNA, 15 bp, Homo sapiens
ggctctgccatccac

SEQ ID NO: 146078 - DNA, 15 bp, Homo sapiens
aggctctgccatcca

SEQ ID NO: 146079 - DNA, 15 bp, Homo sapiens
caggctctgccatcc

SEQ ID NO: 146080 - DNA, 15 bp, Homo sapiens
tcaggctctgccatc

SEQ ID NO: 146081 - DNA, 15 bp, Homo sapiens
ctcaggctctgccat

SEQ ID NO: 146082 - DNA, 15 bp, Homo sapiens
gctcaggctctgcca

SEQ ID NO: 146083 - DNA, 15 bp, Homo sapiens
ggctcaggctctgcc

SEQ ID NO: 146084 - DNA, 15 bp, Homo sapiens
tggctcaggctctgc

SEQ ID NO: 146085 - DNA, 15 bp, Homo sapiens
atggctcaggctctg

SEQ ID NO: 146086 - DNA, 15 bp, Homo sapiens
catggctcaggctct

SEQ ID NO: 146087 - DNA, 15 bp, Homo sapiens
ccatggctcaggctc

SEQ ID NO: 146088 - DNA, 15 bp, Homo sapiens
cccatggctcaggct

SEQ ID NO: 146089 - DNA, 15 bp, Homo sapiens
acccatggctcaggc

SEQ ID NO: 146090 - DNA, 15 bp, Homo sapiens
gacccatggctcagg

SEQ ID NO: 146091 - DNA, 15 bp, Homo sapiens
agacccatggctcag

SEQ ID NO: 146092 - DNA, 15 bp, Homo sapiens
tagacccatggctca

SEQ ID NO: 146093 - DNA, 15 bp, Homo sapiens
ctagacccatggctc

SEQ ID NO: 146094 - DNA, 15 bp, Homo sapiens
cctagacccatggct

SEQ ID NO: 146095 - DNA, 15 bp, Homo sapiens
gcctagacccatggc

SEQ ID NO: 146096 - DNA, 15 bp, Homo sapiens
ggcctagacccatgg

SEQ ID NO: 146097 - DNA, 15 bp, Homo sapiens
cggcctagacccatg

SEQ ID NO: 146098 - DNA, 15 bp, Homo sapiens
gcggcctagacccat

SEQ ID NO: 146099 - DNA, 15 bp, Homo sapiens
tgcggcctagaccca

SEQ ID NO: 146100 - DNA, 15 bp, Homo sapiens
ctgcggcctagaccc

SEQ ID NO: 146101 - DNA, 15 bp, Homo sapiens
gctgcggcctagacc

SEQ ID NO: 146102 - DNA, 15 bp, Homo sapiens
tgctgcggcctagac

SEQ ID NO: 146103 - DNA, 15 bp, Homo sapiens
gtgctgcggcctaga

SEQ ID NO: 146104 - DNA, 15 bp, Homo sapiens
agtgctgcggcctag

SEQ ID NO: 146105 - DNA, 15 bp, Homo sapiens
cagtgctgcggccta

SEQ ID NO: 146106 - DNA, 15 bp, Homo sapiens
gcagtgctgcggcct

SEQ ID NO: 146107 - DNA, 15 bp, Homo sapiens
ggcagtgctgcggcc

SEQ ID NO: 146108 - DNA, 15 bp, Homo sapiens
tggcagtgctgcggc

SEQ ID NO: 146109 - DNA, 15 bp, Homo sapiens
atggcagtgctgcgg

SEQ ID NO: 146110 - DNA, 15 bp, Homo sapiens
catggcagtgctgcg

SEQ ID NO: 146111 - DNA, 15 bp, Homo sapiens
gcatggcagtgctgc

SEQ ID NO: 146112 - DNA, 15 bp, Homo sapiens
cgcatggcagtgctg

SEQ ID NO: 146113 - DNA, 15 bp, Homo sapiens
ccgcatggcagtgct

SEQ ID NO: 146114 - DNA, 15 bp, Homo sapiens
gccgcatggcagtgc

SEQ ID NO: 146115 - DNA, 15 bp, Homo sapiens
agccgcatggcagtg

SEQ ID NO: 146116 - DNA, 15 bp, Homo sapiens
cagccgcatggcagt

SEQ ID NO: 146117 - DNA, 15 bp, Homo sapiens
ccagccgcatggcag

SEQ ID NO: 146118 - DNA, 15 bp, Homo sapiens
cccagccgcatggca

SEQ ID NO: 146119 - DNA, 15 bp, Homo sapiens
tcccagccgcatggc

SEQ ID NO: 146120 - DNA, 15 bp, Homo sapiens
ttcccagccgcatgg

SEQ ID NO: 146121 - DNA, 15 bp, Homo sapiens
cttcccagccgcatg

SEQ ID NO: 146122 - DNA, 15 bp, Homo sapiens
tcttcccagccgcat

SEQ ID NO: 146123 - DNA, 15 bp, Homo sapiens
atcttcccagccgca

SEQ ID NO: 146124 - DNA, 15 bp, Homo sapiens
catcttcccagccgc

SEQ ID NO: 146125 - DNA, 15 bp, Homo sapiens
ccatcttcccagccg

SEQ ID NO: 146126 - DNA, 15 bp, Homo sapiens
accatcttcccagcc

SEQ ID NO: 146127 - DNA, 15 bp, Homo sapiens
taccatcttcccagc

SEQ ID NO: 146128 - DNA, 15 bp, Homo sapiens
ctaccatcttcccag

SEQ ID NO: 146129 - DNA, 15 bp, Homo sapiens
actaccatcttccca

SEQ ID NO: 146130 - DNA, 15 bp, Homo sapiens
cactaccatcttccc

SEQ ID NO: 146131 - DNA, 15 bp, Homo sapiens
acactaccatcttcc

SEQ ID NO: 146132 - DNA, 15 bp, Homo sapiens
cacactaccatcttc

SEQ ID NO: 146133 - DNA, 15 bp, Homo sapiens
acacactaccatctt

SEQ ID NO: 146134 - DNA, 15 bp, Homo sapiens
cacacactaccatct

SEQ ID NO: 146135 - DNA, 15 bp, Homo sapiens
ccacacactaccatc

SEQ ID NO: 146136 - DNA, 15 bp, Homo sapiens
cccacacactaccat

SEQ ID NO: 146137 - DNA, 15 bp, Homo sapiens
acccacacactacca

SEQ ID NO: 146138 - DNA, 15 bp, Homo sapiens
tacccacacactacc

SEQ ID NO: 146139 - DNA, 15 bp, Homo sapiens
atacccacacactac

SEQ ID NO: 146140 - DNA, 15 bp, Homo sapiens
tatacccacacacta

SEQ ID NO: 146141 - DNA, 15 bp, Homo sapiens
ctatacccacacact

SEQ ID NO: 146142 - DNA, 15 bp, Homo sapiens
actatacccacacac

SEQ ID NO: 146143 - DNA, 15 bp, Homo sapiens
gactatacccacaca

SEQ ID NO: 146144 - DNA, 15 bp, Homo sapiens
tgactatacccacac

SEQ ID NO: 146145 - DNA, 15 bp, Homo sapiens
atgactatacccaca

SEQ ID NO: 146146 - DNA, 15 bp, Homo sapiens
catgactatacccac

SEQ ID NO: 146147 - DNA, 15 bp, Homo sapiens
ccatgactataccca

SEQ ID NO: 146148 - DNA, 15 bp, Homo sapiens
cccatgactataccc

SEQ ID NO: 146149 - DNA, 15 bp, Homo sapiens
acccatgactatacc

SEQ ID NO: 146150 - DNA, 15 bp, Homo sapiens
cacccatgactatac

SEQ ID NO: 146151 - DNA, 15 bp, Homo sapiens
acacccatgactata

SEQ ID NO: 146152 - DNA, 15 bp, Homo sapiens
aacacccatgactat

SEQ ID NO: 146153 - DNA, 15 bp, Homo sapiens
caacacccatgacta

SEQ ID NO: 146154 - DNA, 15 bp, Homo sapiens
gcaacacccatgact

SEQ ID NO: 146155 - DNA, 15 bp, Homo sapiens
cgcaacacccatgac

SEQ ID NO: 146156 - DNA, 15 bp, Homo sapiens
ccgcaacacccatga

SEQ ID NO: 146157 - DNA, 15 bp, Homo sapiens
gccgcaacacccatg

SEQ ID NO: 146158 - DNA, 15 bp, Homo sapiens
agccgcaacacccat

SEQ ID NO: 146159 - DNA, 15 bp, Homo sapiens
aagccgcaacaccca

SEQ ID NO: 146160 - DNA, 15 bp, Homo sapiens
taagccgcaacaccc

SEQ ID NO: 146161 - DNA, 15 bp, Homo sapiens
ataagccgcaacacc

SEQ ID NO: 146162 - DNA, 15 bp, Homo sapiens
gataagccgcaacac

SEQ ID NO: 146163 - DNA, 15 bp, Homo sapiens
agataagccgcaaca

SEQ ID NO: 146164 - DNA, 15 bp, Homo sapiens
cagataagccgcaac

SEQ ID NO: 146165 - DNA, 15 bp, Homo sapiens
gcagataagccgcaa

SEQ ID NO: 146166 - DNA, 15 bp, Homo sapiens
tgcagataagccgca

SEQ ID NO: 146167 - DNA, 15 bp, Homo sapiens
gtgcagataagccgc

SEQ ID NO: 146168 - DNA, 15 bp, Homo sapiens
ggtgcagataagccg

SEQ ID NO: 146169 - DNA, 15 bp, Homo sapiens
aggtgcagataagcc

SEQ ID NO: 146170 - DNA, 15 bp, Homo sapiens
caggtgcagataagc

SEQ ID NO: 146171 - DNA, 15 bp, Homo sapiens
gcaggtgcagataag

SEQ ID NO: 146172 - DNA, 15 bp, Homo sapiens
agcaggtgcagataa

SEQ ID NO: 146173 - DNA, 15 bp, Homo sapiens
aagcaggtgcagata

SEQ ID NO: 146174 - DNA, 15 bp, Homo sapiens
caagcaggtgcagat

SEQ ID NO: 146175 - DNA, 15 bp, Homo sapiens
gcaagcaggtgcaga

SEQ ID NO: 146176 - DNA, 15 bp, Homo sapiens
cgcaagcaggtgcag

SEQ ID NO: 146177 - DNA, 15 bp, Homo sapiens
acgcaagcaggtgca

SEQ ID NO: 146178 - DNA, 15 bp, Homo sapiens
aacgcaagcaggtgc

SEQ ID NO: 146179 - DNA, 15 bp, Homo sapiens
gaacgcaagcaggtg

SEQ ID NO: 146180 - DNA, 15 bp, Homo sapiens
tgaacgcaagcaggt

SEQ ID NO: 146181 - DNA, 15 bp, Homo sapiens
ctgaacgcaagcagg

SEQ ID NO: 146182 - DNA, 15 bp, Homo sapiens
cctgaacgcaagcag

SEQ ID NO: 146183 - DNA, 15 bp, Homo sapiens
gcctgaacgcaagca

SEQ ID NO: 146184 - DNA, 15 bp, Homo sapiens
tgcctgaacgcaagc

SEQ ID NO: 146185 - DNA, 15 bp, Homo sapiens
ctgcctgaacgcaag

SEQ ID NO: 146186 - DNA, 15 bp, Homo sapiens
tctgcctgaacgcaa

SEQ ID NO: 146187 - DNA, 15 bp, Homo sapiens
ttctgcctgaacgca

SEQ ID NO: 146188 - DNA, 15 bp, Homo sapiens
cttctgcctgaacgc

SEQ ID NO: 146189 - DNA, 15 bp, Homo sapiens
gcttctgcctgaacg

SEQ ID NO: 146190 - DNA, 15 bp, Homo sapiens
tgcttctgcctgaac

SEQ ID NO: 146191 - DNA, 15 bp, Homo sapiens
ctgcttctgcctgaa

SEQ ID NO: 146192 - DNA, 15 bp, Homo sapiens
cctgcttctgcctga

SEQ ID NO: 146193 - DNA, 15 bp, Homo sapiens
ccctgcttctgcctg

SEQ ID NO: 146194 - DNA, 15 bp, Homo sapiens
accctgcttctgcct

SEQ ID NO: 146195 - DNA, 15 bp, Homo sapiens
taccctgcttctgcc

SEQ ID NO: 146196 - DNA, 15 bp, Homo sapiens
ctaccctgcttctgc

SEQ ID NO: 146197 - DNA, 15 bp, Homo sapiens
gctaccctgcttctg

SEQ ID NO: 146198 - DNA, 15 bp, Homo sapiens
cgctaccctgcttct

SEQ ID NO: 146199 - DNA, 15 bp, Homo sapiens
acgctaccctgcttc

SEQ ID NO: 146200 - DNA, 15 bp, Homo sapiens
cacgctaccctgctt

SEQ ID NO: 146201 - DNA, 15 bp, Homo sapiens
ccacgctaccctgct

SEQ ID NO: 146202 - DNA, 15 bp, Homo sapiens
gccacgctaccctgc

SEQ ID NO: 146203 - DNA, 15 bp, Homo sapiens
tgccacgctaccctg

SEQ ID NO: 146204 - DNA, 15 bp, Homo sapiens
atgccacgctaccct

SEQ ID NO: 146205 - DNA, 15 bp, Homo sapiens
catgccacgctaccc

SEQ ID NO: 146206 - DNA, 15 bp, Homo sapiens
ccatgccacgctacc

SEQ ID NO: 146207 - DNA, 15 bp, Homo sapiens
accatgccacgctac

SEQ ID NO: 146208 - DNA, 15 bp, Homo sapiens
caccatgccacgcta

SEQ ID NO: 146209 - DNA, 15 bp, Homo sapiens
tcaccatgccacgct

SEQ ID NO: 146210 - DNA, 15 bp, Homo sapiens
ctcaccatgccacgc

SEQ ID NO: 146211 - DNA, 15 bp, Homo sapiens
cctcaccatgccacg

SEQ ID NO: 146212 - DNA, 15 bp, Homo sapiens
tcctcaccatgccac

SEQ ID NO: 146213 - DNA, 15 bp, Homo sapiens
gtcctcaccatgcca

SEQ ID NO: 146214 - DNA, 15 bp, Homo sapiens
ggtcctcaccatgcc

SEQ ID NO: 146215 - DNA, 15 bp, Homo sapiens
tggtcctcaccatgc

SEQ ID NO: 146216 - DNA, 15 bp, Homo sapiens
atggtcctcaccatg

SEQ ID NO: 146217 - DNA, 15 bp, Homo sapiens
catggtcctcaccat

SEQ ID NO: 146218 - DNA, 15 bp, Homo sapiens
ccatggtcctcacca

SEQ ID NO: 146219 - DNA, 15 bp, Homo sapiens
tccatggtcctcacc

SEQ ID NO: 146220 - DNA, 15 bp, Homo sapiens
atccatggtcctcac

SEQ ID NO: 146221 - DNA, 15 bp, Homo sapiens
aatccatggtcctca

SEQ ID NO: 146222 - DNA, 15 bp, Homo sapiens
gaatccatggtcctc

SEQ ID NO: 146223 - DNA, 15 bp, Homo sapiens
tgaatccatggtcct

SEQ ID NO: 146224 - DNA, 15 bp, Homo sapiens
ctgaatccatggtcc

SEQ ID NO: 146225 - DNA, 15 bp, Homo sapiens
actgaatccatggtc

SEQ ID NO: 146226 - DNA, 15 bp, Homo sapiens
aactgaatccatggt

SEQ ID NO: 146227 - DNA, 15 bp, Homo sapiens
gaactgaatccatgg

SEQ ID NO: 146228 - DNA, 15 bp, Homo sapiens
ggaactgaatccatg

SEQ ID NO: 146229 - DNA, 15 bp, Homo sapiens
tggaactgaatccat

SEQ ID NO: 146230 - DNA, 15 bp, Homo sapiens
ctggaactgaatcca

SEQ ID NO: 146231 - DNA, 15 bp, Homo sapiens
gctggaactgaatcc

SEQ ID NO: 146232 - DNA, 15 bp, Homo sapiens
agctggaactgaatc

SEQ ID NO: 146233 - DNA, 15 bp, Homo sapiens
gagctggaactgaat

SEQ ID NO: 146234 - DNA, 15 bp, Homo sapiens
cgagctggaactgaa

SEQ ID NO: 146235 - DNA, 15 bp, Homo sapiens
ccgagctggaactga

SEQ ID NO: 146236 - DNA, 15 bp, Homo sapiens
gccgagctggaactg

SEQ ID NO: 146237 - DNA, 15 bp, Homo sapiens
agccgagctggaact

SEQ ID NO: 146238 - DNA, 15 bp, Homo sapiens
cagccgagctggaac

SEQ ID NO: 146239 - DNA, 15 bp, Homo sapiens
gcagccgagctggaa

SEQ ID NO: 146240 - DNA, 15 bp, Homo sapiens
agcagccgagctgga

SEQ ID NO: 146241 - DNA, 15 bp, Homo sapiens
cagcagccgagctgg

SEQ ID NO: 146242 - DNA, 15 bp, Homo sapiens
tcagcagccgagctg

SEQ ID NO: 146243 - DNA, 15 bp, Homo sapiens
atcagcagccgagct

SEQ ID NO: 146244 - DNA, 15 bp, Homo sapiens
tatcagcagccgagc

SEQ ID NO: 146245 - DNA, 15 bp, Homo sapiens
ctatcagcagccgag

SEQ ID NO: 146246 - DNA, 15 bp, Homo sapiens
gctatcagcagccga

SEQ ID NO: 146247 - DNA, 15 bp, Homo sapiens
agctatcagcagccg

SEQ ID NO: 146248 - DNA, 15 bp, Homo sapiens
cagctatcagcagcc

SEQ ID NO: 146249 - DNA, 15 bp, Homo sapiens
gcagctatcagcagc

SEQ ID NO: 146250 - DNA, 15 bp, Homo sapiens
tgcagctatcagcag

SEQ ID NO: 146251 - DNA, 15 bp, Homo sapiens
atgcagctatcagca

SEQ ID NO: 146252 - DNA, 15 bp, Homo sapiens
catgcagctatcagc

SEQ ID NO: 146253 - DNA, 15 bp, Homo sapiens
tcatgcagctatcag

SEQ ID NO: 146254 - DNA, 15 bp, Homo sapiens
gtcatgcagctatca

SEQ ID NO: 146255 - DNA, 15 bp, Homo sapiens
ggtcatgcagctatc

SEQ ID NO: 146256 - DNA, 15 bp, Homo sapiens
aggtcatgcagctat

SEQ ID NO: 146257 - DNA, 15 bp, Homo sapiens
aaggtcatgcagcta

SEQ ID NO: 146258 - DNA, 15 bp, Homo sapiens
caaggtcatgcagct

SEQ ID NO: 146259 - DNA, 15 bp, Homo sapiens
ccaaggtcatgcagc

SEQ ID NO: 146260 - DNA, 15 bp, Homo sapiens
cccaaggtcatgcag

SEQ ID NO: 146261 - DNA, 15 bp, Homo sapiens
ccccaaggtcatgca

SEQ ID NO: 146262 - DNA, 15 bp, Homo sapiens
tccccaaggtcatgc

SEQ ID NO: 146263 - DNA, 15 bp, Homo sapiens
ttccccaaggtcatg

SEQ ID NO: 146264 - DNA, 15 bp, Homo sapiens
cttccccaaggtcat

SEQ ID NO: 146265 - DNA, 15 bp, Homo sapiens
acttccccaaggtca

SEQ ID NO: 146266 - DNA, 15 bp, Homo sapiens
aacttccccaaggtc

SEQ ID NO: 146267 - DNA, 15 bp, Homo sapiens
caacttccccaaggt

SEQ ID NO: 146268 - DNA, 15 bp, Homo sapiens
gcaacttccccaagg

SEQ ID NO: 146269 - DNA, 15 bp, Homo sapiens
tgcaacttccccaag

SEQ ID NO: 146270 - DNA, 15 bp, Homo sapiens
gtgcaacttccccaa

SEQ ID NO: 146271 - DNA, 15 bp, Homo sapiens
tgtgcaacttcccca

SEQ ID NO: 146272 - DNA, 15 bp, Homo sapiens
atgtgcaacttcccc

SEQ ID NO: 146273 - DNA, 15 bp, Homo sapiens
gatgtgcaacttccc

SEQ ID NO: 146274 - DNA, 15 bp, Homo sapiens
ggatgtgcaacttcc

SEQ ID NO: 146275 - DNA, 15 bp, Homo sapiens
aggatgtgcaacttc

SEQ ID NO: 146276 - DNA, 15 bp, Homo sapiens
gaggatgtgcaactt

SEQ ID NO: 146277 - DNA, 15 bp, Homo sapiens
ggaggatgtgcaact

SEQ ID NO: 146278 - DNA, 15 bp, Homo sapiens
tggaggatgtgcaac

SEQ ID NO: 146279 - DNA, 15 bp, Homo sapiens
atggaggatgtgcaa

SEQ ID NO: 146280 - DNA, 15 bp, Homo sapiens
tatggaggatgtgca

SEQ ID NO: 146281 - DNA, 15 bp, Homo sapiens
ttatggaggatgtgc

SEQ ID NO: 146282 - DNA, 15 bp, Homo sapiens
cttatggaggatgtg

SEQ ID NO: 146283 - DNA, 15 bp, Homo sapiens
acttatggaggatgt

SEQ ID NO: 146284 - DNA, 15 bp, Homo sapiens
gacttatggaggatg

SEQ ID NO: 146285 - DNA, 15 bp, Homo sapiens
ggacttatggaggat

SEQ ID NO: 146286 - DNA, 15 bp, Homo sapiens
aggacttatggagga

SEQ ID NO: 146287 - DNA, 15 bp, Homo sapiens
taggacttatggagg

SEQ ID NO: 146288 - DNA, 15 bp, Homo sapiens
ctaggacttatggag

SEQ ID NO: 146289 - DNA, 15 bp, Homo sapiens
actaggacttatgga

SEQ ID NO: 146290 - DNA, 15 bp, Homo sapiens
aactaggacttatgg

SEQ ID NO: 146291 - DNA, 15 bp, Homo sapiens
aaactaggacttatg

SEQ ID NO: 146292 - DNA, 15 bp, Homo sapiens
aaaactaggacttat

SEQ ID NO: 146293 - DNA, 15 bp, Homo sapiens
gaaaactaggactta

SEQ ID NO: 146294 - DNA, 15 bp, Homo sapiens
agaaaactaggactt

SEQ ID NO: 146295 - DNA, 15 bp, Homo sapiens
tagaaaactaggact

SEQ ID NO: 146296 - DNA, 15 bp, Homo sapiens
atagaaaactaggac

SEQ ID NO: 146297 - DNA, 15 bp, Homo sapiens
tatagaaaactagga

SEQ ID NO: 146298 - DNA, 15 bp, Homo sapiens
ttatagaaaactagg

SEQ ID NO: 146299 - DNA, 15 bp, Homo sapiens
gttatagaaaactag

SEQ ID NO: 146300 - DNA, 15 bp, Homo sapiens
tgttatagaaaacta

SEQ ID NO: 146301 - DNA, 15 bp, Homo sapiens
atgttatagaaaact

SEQ ID NO: 146302 - DNA, 15 bp, Homo sapiens
catgttatagaaaac

SEQ ID NO: 146303 - DNA, 15 bp, Homo sapiens
ccatgttatagaaaa

SEQ ID NO: 146304 - DNA, 15 bp, Homo sapiens
cccatgttatagaaa

SEQ ID NO: 146305 - DNA, 15 bp, Homo sapiens
gcccatgttatagaa

SEQ ID NO: 146306 - DNA, 15 bp, Homo sapiens
tgcccatgttataga

SEQ ID NO: 146307 - DNA, 15 bp, Homo sapiens
atgcccatgttatag

SEQ ID NO: 146308 - DNA, 15 bp, Homo sapiens
gatgcccatgttata

SEQ ID NO: 146309 - DNA, 15 bp, Homo sapiens
ggatgcccatgttat

SEQ ID NO: 146310 - DNA, 15 bp, Homo sapiens
gggatgcccatgtta

SEQ ID NO: 146311 - DNA, 15 bp, Homo sapiens
agggatgcccatgtt

SEQ ID NO: 146312 - DNA, 15 bp, Homo sapiens
cagggatgcccatgt

SEQ ID NO: 146313 - DNA, 15 bp, Homo sapiens
tcagggatgcccatg

SEQ ID NO: 146314 - DNA, 15 bp, Homo sapiens
atcagggatgcccat

SEQ ID NO: 146315 - DNA, 15 bp, Homo sapiens
catcagggatgccca

SEQ ID NO: 146316 - DNA, 15 bp, Homo sapiens
acatcagggatgccc

SEQ ID NO: 146317 - DNA, 15 bp, Homo sapiens
tacatcagggatgcc

SEQ ID NO: 146318 - DNA, 15 bp, Homo sapiens
ctacatcagggatgc

SEQ ID NO: 146319 - DNA, 15 bp, Homo sapiens
tctacatcagggatg

SEQ ID NO: 146320 - DNA, 15 bp, Homo sapiens
ctctacatcagggat

SEQ ID NO: 146321 - DNA, 15 bp, Homo sapiens
gctctacatcaggga

SEQ ID NO: 146322 - DNA, 15 bp, Homo sapiens
tgctctacatcaggg

SEQ ID NO: 146323 - DNA, 15 bp, Homo sapiens
atgctctacatcagg

SEQ ID NO: 146324 - DNA, 15 bp, Homo sapiens
aatgctctacatcag

SEQ ID NO: 146325 - DNA, 15 bp, Homo sapiens
aaatgctctacatca

SEQ ID NO: 146326 - DNA, 15 bp, Homo sapiens
caaatgctctacatc

SEQ ID NO: 146327 - DNA, 15 bp, Homo sapiens
acaaatgctctacat

SEQ ID NO: 146328 - DNA, 15 bp, Homo sapiens
cacaaatgctctaca

SEQ ID NO: 146329 - DNA, 15 bp, Homo sapiens
gcacaaatgctctac

SEQ ID NO: 146330 - DNA, 15 bp, Homo sapiens
tgcacaaatgctcta

SEQ ID NO: 146331 - DNA, 15 bp, Homo sapiens
ctgcacaaatgctct

SEQ ID NO: 146332 - DNA, 15 bp, Homo sapiens
actgcacaaatgctc

SEQ ID NO: 146333 - DNA, 15 bp, Homo sapiens
aactgcacaaatgct

SEQ ID NO: 146334 - DNA, 15 bp, Homo sapiens
caactgcacaaatgc

SEQ ID NO: 146335 - DNA, 15 bp, Homo sapiens
acaactgcacaaatg

SEQ ID NO: 146336 - DNA, 15 bp, Homo sapiens
cacaactgcacaaat

SEQ ID NO: 146337 - DNA, 15 bp, Homo sapiens
acacaactgcacaaa

SEQ ID NO: 146338 - DNA, 15 bp, Homo sapiens
cacacaactgcacaa

SEQ ID NO: 146339 - DNA, 15 bp, Homo sapiens
acacacaactgcaca

SEQ ID NO: 146340 - DNA, 15 bp, Homo sapiens
tacacacaactgcac

SEQ ID NO: 146341 - DNA, 15 bp, Homo sapiens
ttacacacaactgca

SEQ ID NO: 146342 - DNA, 15 bp, Homo sapiens
tttacacacaactgc

SEQ ID NO: 146343 - DNA, 15 bp, Homo sapiens
ctttacacacaactg

SEQ ID NO: 146344 - DNA, 15 bp, Homo sapiens
cctttacacacaact

SEQ ID NO: 146345 - DNA, 15 bp, Homo sapiens
tcctttacacacaac

SEQ ID NO: 146346 - DNA, 15 bp, Homo sapiens
atcctttacacacaa

SEQ ID NO: 146347 - DNA, 15 bp, Homo sapiens
catcctttacacaca

SEQ ID NO: 146348 - DNA, 15 bp, Homo sapiens
acatcctttacacac

SEQ ID NO: 146349 - DNA, 15 bp, Homo sapiens
cacatcctttacaca

SEQ ID NO: 146350 - DNA, 15 bp, Homo sapiens
ccacatcctttacac

SEQ ID NO: 146351 - DNA, 15 bp, Homo sapiens
gccacatcctttaca

SEQ ID NO: 146352 - DNA, 15 bp, Homo sapiens
tgccacatcctttac

SEQ ID NO: 146353 - DNA, 15 bp, Homo sapiens
ctgccacatccttta

SEQ ID NO: 146354 - DNA, 15 bp, Homo sapiens
actgccacatccttt

SEQ ID NO: 146355 - DNA, 15 bp, Homo sapiens
aactgccacatcctt

SEQ ID NO: 146356 - DNA, 15 bp, Homo sapiens
taactgccacatcct

SEQ ID NO: 146357 - DNA, 15 bp, Homo sapiens
ctaactgccacatcc

SEQ ID NO: 146358 - DNA, 15 bp, Homo sapiens
cctaactgccacatc

SEQ ID NO: 146359 - DNA, 15 bp, Homo sapiens
tcctaactgccacat

SEQ ID NO: 146360 - DNA, 15 bp, Homo sapiens
ttcctaactgccaca

SEQ ID NO: 146361 - DNA, 15 bp, Homo sapiens
cttcctaactgccac

SEQ ID NO: 146362 - DNA, 15 bp, Homo sapiens
gcttcctaactgcca

SEQ ID NO: 146363 - DNA, 15 bp, Homo sapiens
tgcttcctaactgcc

SEQ ID NO: 146364 - DNA, 15 bp, Homo sapiens
gtgcttcctaactgc

SEQ ID NO: 146365 - DNA, 15 bp, Homo sapiens
ggtgcttcctaactg

SEQ ID NO: 146366 - DNA, 15 bp, Homo sapiens
aggtgcttcctaact

SEQ ID NO: 146367 - DNA, 15 bp, Homo sapiens
taggtgcttcctaac

SEQ ID NO: 146368 - DNA, 15 bp, Homo sapiens
gtaggtgcttcctaa

SEQ ID NO: 146369 - DNA, 15 bp, Homo sapiens
ggtaggtgcttccta

SEQ ID NO: 146370 - DNA, 15 bp, Homo sapiens
tggtaggtgcttcct

SEQ ID NO: 146371 - DNA, 15 bp, Homo sapiens
ttggtaggtgcttcc

SEQ ID NO: 146372 - DNA, 15 bp, Homo sapiens
cttggtaggtgcttc

SEQ ID NO: 146373 - DNA, 15 bp, Homo sapiens
acttggtaggtgctt

SEQ ID NO: 146374 - DNA, 15 bp, Homo sapiens
cacttggtaggtgct

SEQ ID NO: 146375 - DNA, 15 bp, Homo sapiens
acacttggtaggtgc

SEQ ID NO: 146376 - DNA, 15 bp, Homo sapiens
cacacttggtaggtg

SEQ ID NO: 146377 - DNA, 15 bp, Homo sapiens
tcacacttggtaggt

SEQ ID NO: 146378 - DNA, 15 bp, Homo sapiens
ctcacacttggtagg

SEQ ID NO: 146379 - DNA, 15 bp, Homo sapiens
gctcacacttggtag

SEQ ID NO: 146380 - DNA, 15 bp, Homo sapiens
ggctcacacttggta

SEQ ID NO: 146381 - DNA, 15 bp, Homo sapiens
tggctcacacttggt

SEQ ID NO: 146382 - DNA, 15 bp, Homo sapiens
atggctcacacttgg

SEQ ID NO: 146383 - DNA, 15 bp, Homo sapiens
aatggctcacacttg

SEQ ID NO: 146384 - DNA, 15 bp, Homo sapiens
aaatggctcacactt

SEQ ID NO: 146385 - DNA, 15 bp, Homo sapiens
gaaatggctcacact

SEQ ID NO: 146386 - DNA, 15 bp, Homo sapiens
agaaatggctcacac

SEQ ID NO: 146387 - DNA, 15 bp, Homo sapiens
cagaaatggctcaca

SEQ ID NO: 146388 - DNA, 15 bp, Homo sapiens
acagaaatggctcac

SEQ ID NO: 146389 - DNA, 15 bp, Homo sapiens
aacagaaatggctca

SEQ ID NO: 146390 - DNA, 15 bp, Homo sapiens
caacagaaatggctc

SEQ ID NO: 146391 - DNA, 15 bp, Homo sapiens
acaacagaaatggct

SEQ ID NO: 146392 - DNA, 15 bp, Homo sapiens
gacaacagaaatggc

SEQ ID NO: 146393 - DNA, 15 bp, Homo sapiens
tgacaacagaaatgg

SEQ ID NO: 146394 - DNA, 15 bp, Homo sapiens
atgacaacagaaatg

SEQ ID NO: 146395 - DNA, 15 bp, Homo sapiens
aatgacaacagaaat

SEQ ID NO: 146396 - DNA, 15 bp, Homo sapiens
caatgacaacagaaa

SEQ ID NO: 146397 - DNA, 15 bp, Homo sapiens
gcaatgacaacagaa

SEQ ID NO: 146398 - DNA, 15 bp, Homo sapiens
ggcaatgacaacaga

SEQ ID NO: 146399 - DNA, 15 bp, Homo sapiens
tggcaatgacaacag

SEQ ID NO: 146400 - DNA, 15 bp, Homo sapiens
atggcaatgacaaca

SEQ ID NO: 146401 - DNA, 15 bp, Homo sapiens
catggcaatgacaac

SEQ ID NO: 146402 - DNA, 15 bp, Homo sapiens
acatggcaatgacaa

SEQ ID NO: 146403 - DNA, 15 bp, Homo sapiens
tacatggcaatgaca

SEQ ID NO: 146404 - DNA, 15 bp, Homo sapiens
atacatggcaatgac

SEQ ID NO: 146405 - DNA, 15 bp, Homo sapiens
gatacatggcaatga

SEQ ID NO: 146406 - DNA, 15 bp, Homo sapiens
tgatacatggcaatg

SEQ ID NO: 146407 - DNA, 15 bp, Homo sapiens
ctgatacatggcaat

SEQ ID NO: 146408 - DNA, 15 bp, Homo sapiens
gctgatacatggcaa

SEQ ID NO: 146409 - DNA, 15 bp, Homo sapiens
ggctgatacatggca

SEQ ID NO: 146410 - DNA, 15 bp, Homo sapiens
tggctgatacatggc

SEQ ID NO: 146411 - DNA, 15 bp, Homo sapiens
ctggctgatacatgg

SEQ ID NO: 146412 - DNA, 15 bp, Homo sapiens
gctggctgatacatg

SEQ ID NO: 146413 - DNA, 15 bp, Homo sapiens
ggctggctgatacat

SEQ ID NO: 146414 - DNA, 15 bp, Homo sapiens
aggctggctgataca

SEQ ID NO: 146415 - DNA, 15 bp, Homo sapiens
caggctggctgatac

SEQ ID NO: 146416 - DNA, 15 bp, Homo sapiens
tcaggctggctgata

SEQ ID NO: 146417 - DNA, 15 bp, Homo sapiens
ctcaggctggctgat

SEQ ID NO: 146418 - DNA, 15 bp, Homo sapiens
cctcaggctggctga

SEQ ID NO: 146419 - DNA, 15 bp, Homo sapiens
ccctcaggctggctg

SEQ ID NO: 146420 - DNA, 15 bp, Homo sapiens
gccctcaggctggct

SEQ ID NO: 146421 - DNA, 15 bp, Homo sapiens
ggccctcaggctggc

SEQ ID NO: 146422 - DNA, 15 bp, Homo sapiens
aggccctcaggctgg

SEQ ID NO: 146423 - DNA, 15 bp, Homo sapiens
caggccctcaggctg

SEQ ID NO: 146424 - DNA, 15 bp, Homo sapiens
gcaggccctcaggct

SEQ ID NO: 146425 - DNA, 15 bp, Homo sapiens
tgcaggccctcaggc

SEQ ID NO: 146426 - DNA, 15 bp, Homo sapiens
ctgcaggccctcagg

SEQ ID NO: 146427 - DNA, 15 bp, Homo sapiens
cctgcaggccctcag

SEQ ID NO: 146428 - DNA, 15 bp, Homo sapiens
ccctgcaggccctca

SEQ ID NO: 146429 - DNA, 15 bp, Homo sapiens
gccctgcaggccctc

SEQ ID NO: 146430 - DNA, 15 bp, Homo sapiens
ggccctgcaggccct

SEQ ID NO: 146431 - DNA, 15 bp, Homo sapiens
aggccctgcaggccc

SEQ ID NO: 146432 - DNA, 15 bp, Homo sapiens
caggccctgcaggcc

SEQ ID NO: 146433 - DNA, 15 bp, Homo sapiens
ccaggccctgcaggc

SEQ ID NO: 146434 - DNA, 15 bp, Homo sapiens
gccaggccctgcagg

SEQ ID NO: 146435 - DNA, 15 bp, Homo sapiens
ggccaggccctgcag

SEQ ID NO: 146436 - DNA, 15 bp, Homo sapiens
aggccaggccctgca

SEQ ID NO: 146437 - DNA, 15 bp, Homo sapiens
caggccaggccctgc

SEQ ID NO: 146438 - DNA, 15 bp, Homo sapiens
ccaggccaggccctg

SEQ ID NO: 146439 - DNA, 15 bp, Homo sapiens
cccaggccaggccct

SEQ ID NO: 146440 - DNA, 15 bp, Homo sapiens
tcccaggccaggccc

SEQ ID NO: 146441 - DNA, 15 bp, Homo sapiens
atcccaggccaggcc

SEQ ID NO: 146442 - DNA, 15 bp, Homo sapiens
catcccaggccaggc

SEQ ID NO: 146443 - DNA, 15 bp, Homo sapiens
acatcccaggccagg

SEQ ID NO: 146444 - DNA, 15 bp, Homo sapiens
cacatcccaggccag

SEQ ID NO: 146445 - DNA, 15 bp, Homo sapiens
ccacatcccaggcca

SEQ ID NO: 146446 - DNA, 15 bp, Homo sapiens
cccacatcccaggcc

SEQ ID NO: 146447 - DNA, 15 bp, Homo sapiens
tcccacatcccaggc

SEQ ID NO: 146448 - DNA, 15 bp, Homo sapiens
ttcccacatcccagg

SEQ ID NO: 146449 - DNA, 15 bp, Homo sapiens
tttcccacatcccag

SEQ ID NO: 146450 - DNA, 15 bp, Homo sapiens
ctttcccacatccca

SEQ ID NO: 146451 - DNA, 15 bp, Homo sapiens
gctttcccacatccc

SEQ ID NO: 146452 - DNA, 15 bp, Homo sapiens
agctttcccacatcc

SEQ ID NO: 146453 - DNA, 15 bp, Homo sapiens
aagctttcccacatc

SEQ ID NO: 146454 - DNA, 15 bp, Homo sapiens
aaagctttcccacat

SEQ ID NO: 146455 - DNA, 15 bp, Homo sapiens
gaaagctttcccaca

SEQ ID NO: 146456 - DNA, 15 bp, Homo sapiens
ggaaagctttcccac

SEQ ID NO: 146457 - DNA, 15 bp, Homo sapiens
tggaaagctttccca

SEQ ID NO: 146458 - DNA, 15 bp, Homo sapiens
ctggaaagctttccc

SEQ ID NO: 146459 - DNA, 15 bp, Homo sapiens
tctggaaagctttcc

SEQ ID NO: 146460 - DNA, 15 bp, Homo sapiens
ttctggaaagctttc

SEQ ID NO: 146461 - DNA, 15 bp, Homo sapiens
tttctggaaagcttt

SEQ ID NO: 146462 - DNA, 15 bp, Homo sapiens
ctttctggaaagctt

SEQ ID NO: 146463 - DNA, 15 bp, Homo sapiens
cctttctggaaagct

SEQ ID NO: 146464 - DNA, 15 bp, Homo sapiens
ccctttctggaaagc

SEQ ID NO: 146465 - DNA, 15 bp, Homo sapiens
tccctttctggaaag

SEQ ID NO: 146466 - DNA, 15 bp, Homo sapiens
ctccctttctggaaa

SEQ ID NO: 146467 - DNA, 15 bp, Homo sapiens
gctccctttctggaa

SEQ ID NO: 146468 - DNA, 15 bp, Homo sapiens
tgctccctttctgga

SEQ ID NO: 146469 - DNA, 15 bp, Homo sapiens
ctgctccctttctgg

SEQ ID NO: 146470 - DNA, 15 bp, Homo sapiens
cctgctccctttctg

SEQ ID NO: 146471 - DNA, 15 bp, Homo sapiens
tcctgctccctttct

SEQ ID NO: 146472 - DNA, 15 bp, Homo sapiens
ctcctgctccctttc

SEQ ID NO: 146473 - DNA, 15 bp, Homo sapiens
tctcctgctcccttt

SEQ ID NO: 146474 - DNA, 15 bp, Homo sapiens
atctcctgctccctt

SEQ ID NO: 146475 - DNA, 15 bp, Homo sapiens
catctcctgctccct

SEQ ID NO: 146476 - DNA, 15 bp, Homo sapiens
ccatctcctgctccc

SEQ ID NO: 146477 - DNA, 15 bp, Homo sapiens
gccatctcctgctcc

SEQ ID NO: 146478 - DNA, 15 bp, Homo sapiens
cgccatctcctgctc

SEQ ID NO: 146479 - DNA, 15 bp, Homo sapiens
gcgccatctcctgct

SEQ ID NO: 146480 - DNA, 15 bp, Homo sapiens
ggcgccatctcctgc

SEQ ID NO: 146481 - DNA, 15 bp, Homo sapiens
gggcgccatctcctg

SEQ ID NO: 146482 - DNA, 15 bp, Homo sapiens
agggcgccatctcct

SEQ ID NO: 146483 - DNA, 15 bp, Homo sapiens
cagggcgccatctcc

SEQ ID NO: 146484 - DNA, 15 bp, Homo sapiens
acagggcgccatctc

SEQ ID NO: 146485 - DNA, 15 bp, Homo sapiens
gacagggcgccatct

SEQ ID NO: 146486 - DNA, 15 bp, Homo sapiens
tgacagggcgccatc

SEQ ID NO: 146487 - DNA, 15 bp, Homo sapiens
gtgacagggcgccat

SEQ ID NO: 146488 - DNA, 15 bp, Homo sapiens
ggtgacagggcgcca

SEQ ID NO: 146489 - DNA, 15 bp, Homo sapiens
aggtgacagggcgcc

SEQ ID NO: 146490 - DNA, 15 bp, Homo sapiens
gaggtgacagggcgc

SEQ ID NO: 146491 - DNA, 15 bp, Homo sapiens
ggaggtgacagggcg

SEQ ID NO: 146492 - DNA, 15 bp, Homo sapiens
gggaggtgacagggc

SEQ ID NO: 146493 - DNA, 15 bp, Homo sapiens
agggaggtgacaggg

SEQ ID NO: 146494 - DNA, 15 bp, Homo sapiens
gagggaggtgacagg

SEQ ID NO: 146495 - DNA, 15 bp, Homo sapiens
tgagggaggtgacag

SEQ ID NO: 146496 - DNA, 15 bp, Homo sapiens
ttgagggaggtgaca

SEQ ID NO: 146497 - DNA, 15 bp, Homo sapiens
gttgagggaggtgac

SEQ ID NO: 146498 - DNA, 15 bp, Homo sapiens
agttgagggaggtga

SEQ ID NO: 146499 - DNA, 15 bp, Homo sapiens
cagttgagggaggtg

SEQ ID NO: 146500 - DNA, 15 bp, Homo sapiens
ccagttgagggaggt

SEQ ID NO: 146501 - DNA, 15 bp, Homo sapiens
cccagttgagggagg

SEQ ID NO: 146502 - DNA, 15 bp, Homo sapiens
gcccagttgagggag

SEQ ID NO: 146503 - DNA, 15 bp, Homo sapiens
ggcccagttgaggga

SEQ ID NO: 146504 - DNA, 15 bp, Homo sapiens
tggcccagttgaggg

SEQ ID NO: 146505 - DNA, 15 bp, Homo sapiens
ctggcccagttgagg

SEQ ID NO: 146506 - DNA, 15 bp, Homo sapiens
tctggcccagttgag

SEQ ID NO: 146507 - DNA, 15 bp, Homo sapiens
ctctggcccagttga

SEQ ID NO: 146508 - DNA, 15 bp, Homo sapiens
actctggcccagttg

SEQ ID NO: 146509 - DNA, 15 bp, Homo sapiens
cactctggcccagtt

SEQ ID NO: 146510 - DNA, 15 bp, Homo sapiens
acactctggcccagt

SEQ ID NO: 146511 - DNA, 15 bp, Homo sapiens
cacactctggcccag

SEQ ID NO: 146512 - DNA, 15 bp, Homo sapiens
ccacactctggccca

SEQ ID NO: 146513 - DNA, 15 bp, Homo sapiens
cccacactctggccc

SEQ ID NO: 146514 - DNA, 15 bp, Homo sapiens
ccccacactctggcc

SEQ ID NO: 146515 - DNA, 15 bp, Homo sapiens
tccccacactctggc

SEQ ID NO: 146516 - DNA, 15 bp, Homo sapiens
ctccccacactctgg

SEQ ID NO: 146517 - DNA, 15 bp, Homo sapiens
cctccccacactctg

SEQ ID NO: 146518 - DNA, 15 bp, Homo sapiens
gcctccccacactct

SEQ ID NO: 146519 - DNA, 15 bp, Homo sapiens
agcctccccacactc

SEQ ID NO: 146520 - DNA, 15 bp, Homo sapiens
cagcctccccacact

SEQ ID NO: 146521 - DNA, 15 bp, Homo sapiens
gcagcctccccacac

SEQ ID NO: 146522 - DNA, 15 bp, Homo sapiens
agcagcctccccaca

SEQ ID NO: 146523 - DNA, 15 bp, Homo sapiens
gagcagcctccccac

SEQ ID NO: 146524 - DNA, 15 bp, Homo sapiens
cgagcagcctcccca

SEQ ID NO: 146525 - DNA, 15 bp, Homo sapiens
ccgagcagcctcccc

SEQ ID NO: 146526 - DNA, 15 bp, Homo sapiens
cccgagcagcctccc

SEQ ID NO: 146527 - DNA, 15 bp, Homo sapiens
ccccgagcagcctcc

SEQ ID NO: 146528 - DNA, 15 bp, Homo sapiens
gccccgagcagcctc

SEQ ID NO: 146529 - DNA, 15 bp, Homo sapiens
agccccgagcagcct

SEQ ID NO: 146530 - DNA, 15 bp, Homo sapiens
aagccccgagcagcc

SEQ ID NO: 146531 - DNA, 15 bp, Homo sapiens
caagccccgagcagc

SEQ ID NO: 146532 - DNA, 15 bp, Homo sapiens
gcaagccccgagcag

SEQ ID NO: 146533 - DNA, 15 bp, Homo sapiens
agcaagccccgagca

SEQ ID NO: 146534 - DNA, 15 bp, Homo sapiens
gagcaagccccgagc

SEQ ID NO: 146535 - DNA, 15 bp, Homo sapiens
ggagcaagccccgag

SEQ ID NO: 146536 - DNA, 15 bp, Homo sapiens
aggagcaagccccga

SEQ ID NO: 146537 - DNA, 15 bp, Homo sapiens
aaggagcaagccccg

SEQ ID NO: 146538 - DNA, 15 bp, Homo sapiens
gaaggagcaagcccc

SEQ ID NO: 146539 - DNA, 15 bp, Homo sapiens
agaaggagcaagccc

SEQ ID NO: 146540 - DNA, 15 bp, Homo sapiens
cagaaggagcaagcc

SEQ ID NO: 146541 - DNA, 15 bp, Homo sapiens
tcagaaggagcaagc

SEQ ID NO: 146542 - DNA, 15 bp, Homo sapiens
ttcagaaggagcaag

SEQ ID NO: 146543 - DNA, 15 bp, Homo sapiens
tttcagaaggagcaa

SEQ ID NO: 146544 - DNA, 15 bp, Homo sapiens
gtttcagaaggagca

SEQ ID NO: 146545 - DNA, 15 bp, Homo sapiens
tgtttcagaaggagc

SEQ ID NO: 146546 - DNA, 15 bp, Homo sapiens
gtgtttcagaaggag

SEQ ID NO: 146547 - DNA, 15 bp, Homo sapiens
ggtgtttcagaagga

SEQ ID NO: 146548 - DNA, 15 bp, Homo sapiens
gggtgtttcagaagg

SEQ ID NO: 146549 - DNA, 15 bp, Homo sapiens
ggggtgtttcagaag

SEQ ID NO: 146550 - DNA, 15 bp, Homo sapiens
aggggtgtttcagaa

SEQ ID NO: 146551 - DNA, 15 bp, Homo sapiens
caggggtgtttcaga

SEQ ID NO: 146552 - DNA, 15 bp, Homo sapiens
tcaggggtgtttcag

SEQ ID NO: 146553 - DNA, 15 bp, Homo sapiens
gtcaggggtgtttca

SEQ ID NO: 146554 - DNA, 15 bp, Homo sapiens
cgtcaggggtgtttc

SEQ ID NO: 146555 - DNA, 15 bp, Homo sapiens
tcgtcaggggtgttt

SEQ ID NO: 146556 - DNA, 15 bp, Homo sapiens
gtcgtcaggggtgtt

SEQ ID NO: 146557 - DNA, 15 bp, Homo sapiens
agtcgtcaggggtgt

SEQ ID NO: 146558 - DNA, 15 bp, Homo sapiens
cagtcgtcaggggtg

SEQ ID NO: 146559 - DNA, 15 bp, Homo sapiens
acagtcgtcaggggt

SEQ ID NO: 146560 - DNA, 15 bp, Homo sapiens
gacagtcgtcagggg

SEQ ID NO: 146561 - DNA, 15 bp, Homo sapiens
ggacagtcgtcaggg

SEQ ID NO: 146562 - DNA, 15 bp, Homo sapiens
gggacagtcgtcagg

SEQ ID NO: 146563 - DNA, 15 bp, Homo sapiens
tgggacagtcgtcag

SEQ ID NO: 146564 - DNA, 15 bp, Homo sapiens
ctgggacagtcgtca

SEQ ID NO: 146565 - DNA, 15 bp, Homo sapiens
gctgggacagtcgtc

SEQ ID NO: 146566 - DNA, 15 bp, Homo sapiens
tgctgggacagtcgt

SEQ ID NO: 146567 - DNA, 15 bp, Homo sapiens
ctgctgggacagtcg

SEQ ID NO: 146568 - DNA, 15 bp, Homo sapiens
tctgctgggacagtc

SEQ ID NO: 146569 - DNA, 15 bp, Homo sapiens
ctctgctgggacagt

SEQ ID NO: 146570 - DNA, 15 bp, Homo sapiens
cctctgctgggacag

SEQ ID NO: 146571 - DNA, 15 bp, Homo sapiens
tcctctgctgggaca

SEQ ID NO: 146572 - DNA, 15 bp, Homo sapiens
ctcctctgctgggac

SEQ ID NO: 146573 - DNA, 15 bp, Homo sapiens
cctcctctgctggga

SEQ ID NO: 146574 - DNA, 15 bp, Homo sapiens
ccctcctctgctggg

SEQ ID NO: 146575 - DNA, 15 bp, Homo sapiens
tccctcctctgctgg

SEQ ID NO: 146576 - DNA, 15 bp, Homo sapiens
ctccctcctctgctg

SEQ ID NO: 146577 - DNA, 15 bp, Homo sapiens
cctccctcctctgct

SEQ ID NO: 146578 - DNA, 15 bp, Homo sapiens
gcctccctcctctgc

SEQ ID NO: 146579 - DNA, 15 bp, Homo sapiens
agcctccctcctctg

SEQ ID NO: 146580 - DNA, 15 bp, Homo sapiens
cagcctccctcctct

SEQ ID NO: 146581 - DNA, 15 bp, Homo sapiens
gcagcctccctcctc

SEQ ID NO: 146582 - DNA, 15 bp, Homo sapiens
ggcagcctccctcct

SEQ ID NO: 146583 - DNA, 15 bp, Homo sapiens
aggcagcctccctcc

SEQ ID NO: 146584 - DNA, 15 bp, Homo sapiens
aaggcagcctccctc

SEQ ID NO: 146585 - DNA, 15 bp, Homo sapiens
caaggcagcctccct

SEQ ID NO: 146586 - DNA, 15 bp, Homo sapiens
ccaaggcagcctccc

SEQ ID NO: 146587 - DNA, 15 bp, Homo sapiens
tccaaggcagcctcc

SEQ ID NO: 146588 - DNA, 15 bp, Homo sapiens
ttccaaggcagcctc

SEQ ID NO: 146589 - DNA, 15 bp, Homo sapiens
cttccaaggcagcct

SEQ ID NO: 146590 - DNA, 15 bp, Homo sapiens
gcttccaaggcagcc

SEQ ID NO: 146591 - DNA, 15 bp, Homo sapiens
ggcttccaaggcagc

SEQ ID NO: 146592 - DNA, 15 bp, Homo sapiens
aggcttccaaggcag

SEQ ID NO: 146593 - DNA, 15 bp, Homo sapiens
caggcttccaaggca

SEQ ID NO: 146594 - DNA, 15 bp, Homo sapiens
ccaggcttccaaggc

SEQ ID NO: 146595 - DNA, 15 bp, Homo sapiens
gccaggcttccaagg

SEQ ID NO: 146596 - DNA, 15 bp, Homo sapiens
agccaggcttccaag

SEQ ID NO: 146597 - DNA, 15 bp, Homo sapiens
cagccaggcttccaa

SEQ ID NO: 146598 - DNA, 15 bp, Homo sapiens
gcagccaggcttcca

SEQ ID NO: 146599 - DNA, 15 bp, Homo sapiens
tgcagccaggcttcc

SEQ ID NO: 146600 - DNA, 15 bp, Homo sapiens
gtgcagccaggcttc

SEQ ID NO: 146601 - DNA, 15 bp, Homo sapiens
agtgcagccaggctt

SEQ ID NO: 146602 - DNA, 15 bp, Homo sapiens
cagtgcagccaggct

SEQ ID NO: 146603 - DNA, 15 bp, Homo sapiens
acagtgcagccaggc

SEQ ID NO: 146604 - DNA, 15 bp, Homo sapiens
cacagtgcagccagg

SEQ ID NO: 146605 - DNA, 15 bp, Homo sapiens
acacagtgcagccag

SEQ ID NO: 146606 - DNA, 15 bp, Homo sapiens
tacacagtgcagcca

SEQ ID NO: 146607 - DNA, 15 bp, Homo sapiens
ctacacagtgcagcc

SEQ ID NO: 146608 - DNA, 15 bp, Homo sapiens
cctacacagtgcagc

SEQ ID NO: 146609 - DNA, 15 bp, Homo sapiens
ccctacacagtgcag

SEQ ID NO: 146610 - DNA, 15 bp, Homo sapiens
tccctacacagtgca

SEQ ID NO: 146611 - DNA, 15 bp, Homo sapiens
ctccctacacagtgc

SEQ ID NO: 146612 - DNA, 15 bp, Homo sapiens
cctccctacacagtg

SEQ ID NO: 146613 - DNA, 15 bp, Homo sapiens
ccctccctacacagt

SEQ ID NO: 146614 - DNA, 15 bp, Homo sapiens
accctccctacacag

SEQ ID NO: 146615 - DNA, 15 bp, Homo sapiens
taccctccctacaca

SEQ ID NO: 146616 - DNA, 15 bp, Homo sapiens
gtaccctccctacac

SEQ ID NO: 146617 - DNA, 15 bp, Homo sapiens
ggtaccctccctaca

SEQ ID NO: 146618 - DNA, 15 bp, Homo sapiens
gggtaccctccctac

SEQ ID NO: 146619 - DNA, 15 bp, Homo sapiens
tgggtaccctcccta

SEQ ID NO: 146620 - DNA, 15 bp, Homo sapiens
ctgggtaccctccct

SEQ ID NO: 146621 - DNA, 15 bp, Homo sapiens
gctgggtaccctccc

SEQ ID NO: 146622 - DNA, 15 bp, Homo sapiens
tgctgggtaccctcc

SEQ ID NO: 146623 - DNA, 15 bp, Homo sapiens
ctgctgggtaccctc

SEQ ID NO: 146624 - DNA, 15 bp, Homo sapiens
tctgctgggtaccct

SEQ ID NO: 146625 - DNA, 15 bp, Homo sapiens
ctctgctgggtaccc

SEQ ID NO: 146626 - DNA, 15 bp, Homo sapiens
cctctgctgggtacc

SEQ ID NO: 146627 - DNA, 15 bp, Homo sapiens
ccctctgctgggtac

SEQ ID NO: 146628 - DNA, 15 bp, Homo sapiens
gccctctgctgggta

SEQ ID NO: 146629 - DNA, 15 bp, Homo sapiens
agccctctgctgggt

SEQ ID NO: 146630 - DNA, 15 bp, Homo sapiens
cagccctctgctggg

SEQ ID NO: 146631 - DNA, 15 bp, Homo sapiens
ccagccctctgctgg

SEQ ID NO: 146632 - DNA, 15 bp, Homo sapiens
cccagccctctgctg

SEQ ID NO: 146633 - DNA, 15 bp, Homo sapiens
tcccagccctctgct

SEQ ID NO: 146634 - DNA, 15 bp, Homo sapiens
ctcccagccctctgc

SEQ ID NO: 146635 - DNA, 15 bp, Homo sapiens
cctcccagccctctg

SEQ ID NO: 146636 - DNA, 15 bp, Homo sapiens
acctcccagccctct

SEQ ID NO: 146637 - DNA, 15 bp, Homo sapiens
gacctcccagccctc

SEQ ID NO: 146638 - DNA, 15 bp, Homo sapiens
agacctcccagccct

SEQ ID NO: 146639 - DNA, 15 bp, Homo sapiens
gagacctcccagccc

SEQ ID NO: 146640 - DNA, 15 bp, Homo sapiens
ggagacctcccagcc

SEQ ID NO: 146641 - DNA, 15 bp, Homo sapiens
tggagacctcccagc

SEQ ID NO: 146642 - DNA, 15 bp, Homo sapiens
ctggagacctcccag

SEQ ID NO: 146643 - DNA, 15 bp, Homo sapiens
cctggagacctccca

SEQ ID NO: 146644 - DNA, 15 bp, Homo sapiens
gcctggagacctccc

SEQ ID NO: 146645 - DNA, 15 bp, Homo sapiens
ggcctggagacctcc

SEQ ID NO: 146646 - DNA, 15 bp, Homo sapiens
gggcctggagacctc

SEQ ID NO: 146647 - DNA, 15 bp, Homo sapiens
ggggcctggagacct

SEQ ID NO: 146648 - DNA, 15 bp, Homo sapiens
aggggcctggagacc

SEQ ID NO: 146649 - DNA, 15 bp, Homo sapiens
aaggggcctggagac

SEQ ID NO: 146650 - DNA, 15 bp, Homo sapiens
aaaggggcctggaga

SEQ ID NO: 146651 - DNA, 15 bp, Homo sapiens
caaaggggcctggag

SEQ ID NO: 146652 - DNA, 15 bp, Homo sapiens
tcaaaggggcctgga

SEQ ID NO: 146653 - DNA, 15 bp, Homo sapiens
ctcaaaggggcctgg

SEQ ID NO: 146654 - DNA, 15 bp, Homo sapiens
gctcaaaggggcctg

SEQ ID NO: 146655 - DNA, 15 bp, Homo sapiens
tgctcaaaggggcct

SEQ ID NO: 146656 - DNA, 15 bp, Homo sapiens
gtgctcaaaggggcc

SEQ ID NO: 146657 - DNA, 15 bp, Homo sapiens
agtgctcaaaggggc

SEQ ID NO: 146658 - DNA, 15 bp, Homo sapiens
cagtgctcaaagggg

SEQ ID NO: 146659 - DNA, 15 bp, Homo sapiens
tcagtgctcaaaggg

SEQ ID NO: 146660 - DNA, 15 bp, Homo sapiens
gtcagtgctcaaagg

SEQ ID NO: 146661 - DNA, 15 bp, Homo sapiens
tgtcagtgctcaaag

SEQ ID NO: 146662 - DNA, 15 bp, Homo sapiens
ctgtcagtgctcaaa

SEQ ID NO: 146663 - DNA, 15 bp, Homo sapiens
gctgtcagtgctcaa

SEQ ID NO: 146664 - DNA, 15 bp, Homo sapiens
ggctgtcagtgctca

SEQ ID NO: 146665 - DNA, 15 bp, Homo sapiens
gggctgtcagtgctc

SEQ ID NO: 146666 - DNA, 15 bp, Homo sapiens
tgggctgtcagtgct

SEQ ID NO: 146667 - DNA, 15 bp, Homo sapiens
atgggctgtcagtgc

SEQ ID NO: 146668 - DNA, 15 bp, Homo sapiens
gatgggctgtcagtg

SEQ ID NO: 146669 - DNA, 15 bp, Homo sapiens
tgatgggctgtcagt

SEQ ID NO: 146670 - DNA, 15 bp, Homo sapiens
atgatgggctgtcag

SEQ ID NO: 146671 - DNA, 15 bp, Homo sapiens
gatgatgggctgtca

SEQ ID NO: 146672 - DNA, 15 bp, Homo sapiens
agatgatgggctgtc

SEQ ID NO: 146673 - DNA, 15 bp, Homo sapiens
cagatgatgggctgt

SEQ ID NO: 146674 - DNA, 15 bp, Homo sapiens
tcagatgatgggctg

SEQ ID NO: 146675 - DNA, 15 bp, Homo sapiens
gtcagatgatgggct

SEQ ID NO: 146676 - DNA, 15 bp, Homo sapiens
ggtcagatgatgggc

SEQ ID NO: 146677 - DNA, 15 bp, Homo sapiens
aggtcagatgatggg

SEQ ID NO: 146678 - DNA, 15 bp, Homo sapiens
gaggtcagatgatgg

SEQ ID NO: 146679 - DNA, 15 bp, Homo sapiens
agaggtcagatgatg

SEQ ID NO: 146680 - DNA, 15 bp, Homo sapiens
gagaggtcagatgat

SEQ ID NO: 146681 - DNA, 15 bp, Homo sapiens
ggagaggtcagatga

SEQ ID NO: 146682 - DNA, 15 bp, Homo sapiens
tggagaggtcagatg

SEQ ID NO: 146683 - DNA, 15 bp, Homo sapiens
ctggagaggtcagat

SEQ ID NO: 146684 - DNA, 15 bp, Homo sapiens
cctggagaggtcaga

SEQ ID NO: 146685 - DNA, 15 bp, Homo sapiens
tcctggagaggtcag

SEQ ID NO: 146686 - DNA, 15 bp, Homo sapiens
ttcctggagaggtca

SEQ ID NO: 146687 - DNA, 15 bp, Homo sapiens
gttcctggagaggtc

SEQ ID NO: 146688 - DNA, 15 bp, Homo sapiens
ggttcctggagaggt

SEQ ID NO: 146689 - DNA, 15 bp, Homo sapiens
gggttcctggagagg

SEQ ID NO: 146690 - DNA, 15 bp, Homo sapiens
tgggttcctggagag

SEQ ID NO: 146691 - DNA, 15 bp, Homo sapiens
gtgggttcctggaga

SEQ ID NO: 146692 - DNA, 15 bp, Homo sapiens
cgtgggttcctggag

SEQ ID NO: 146693 - DNA, 15 bp, Homo sapiens
tcgtgggttcctgga

SEQ ID NO: 146694 - DNA, 15 bp, Homo sapiens
ctcgtgggttcctgg

SEQ ID NO: 146695 - DNA, 15 bp, Homo sapiens
tctcgtgggttcctg

SEQ ID NO: 146696 - DNA, 15 bp, Homo sapiens
ttctcgtgggttcct

SEQ ID NO: 146697 - DNA, 15 bp, Homo sapiens
tttctcgtgggttcc

SEQ ID NO: 146698 - DNA, 15 bp, Homo sapiens
ctttctcgtgggttc

SEQ ID NO: 146699 - DNA, 15 bp, Homo sapiens
gctttctcgtgggtt

SEQ ID NO: 146700 - DNA, 15 bp, Homo sapiens
tgctttctcgtgggt

SEQ ID NO: 146701 - DNA, 15 bp, Homo sapiens
atgctttctcgtggg

SEQ ID NO: 146702 - DNA, 15 bp, Homo sapiens
catgctttctcgtgg

SEQ ID NO: 146703 - DNA, 15 bp, Homo sapiens
tcatgctttctcgtg

SEQ ID NO: 146704 - DNA, 15 bp, Homo sapiens
ctcatgctttctcgt

SEQ ID NO: 146705 - DNA, 15 bp, Homo sapiens
tctcatgctttctcg

SEQ ID NO: 146706 - DNA, 15 bp, Homo sapiens
atctcatgctttctc

SEQ ID NO: 146707 - DNA, 15 bp, Homo sapiens
catctcatgctttct

SEQ ID NO: 146708 - DNA, 15 bp, Homo sapiens
tcatctcatgctttc

SEQ ID NO: 146709 - DNA, 15 bp, Homo sapiens
ttcatctcatgcttt

SEQ ID NO: 146710 - DNA, 15 bp, Homo sapiens
gttcatctcatgctt

SEQ ID NO: 146711 - DNA, 15 bp, Homo sapiens
tgttcatctcatgct

SEQ ID NO: 146712 - DNA, 15 bp, Homo sapiens
ctgttcatctcatgc

SEQ ID NO: 146713 - DNA, 15 bp, Homo sapiens
tctgttcatctcatg

SEQ ID NO: 146714 - DNA, 15 bp, Homo sapiens
gtctgttcatctcat

SEQ ID NO: 146715 - DNA, 15 bp, Homo sapiens
tgtctgttcatctca

SEQ ID NO: 146716 - DNA, 15 bp, Homo sapiens
ctgtctgttcatctc

SEQ ID NO: 146717 - DNA, 15 bp, Homo sapiens
tctgtctgttcatct

SEQ ID NO: 146718 - DNA, 15 bp, Homo sapiens
gtctgtctgttcatc

SEQ ID NO: 146719 - DNA, 15 bp, Homo sapiens
agtctgtctgttcat

SEQ ID NO: 146720 - DNA, 15 bp, Homo sapiens
aagtctgtctgttca

SEQ ID NO: 146721 - DNA, 15 bp, Homo sapiens
caagtctgtctgttc

SEQ ID NO: 146722 - DNA, 15 bp, Homo sapiens
ccaagtctgtctgtt

SEQ ID NO: 146723 - DNA, 15 bp, Homo sapiens
gccaagtctgtctgt

SEQ ID NO: 146724 - DNA, 15 bp, Homo sapiens
agccaagtctgtctg

SEQ ID NO: 146725 - DNA, 15 bp, Homo sapiens
aagccaagtctgtct

SEQ ID NO: 146726 - DNA, 15 bp, Homo sapiens
caagccaagtctgtc

SEQ ID NO: 146727 - DNA, 15 bp, Homo sapiens
tcaagccaagtctgt

SEQ ID NO: 146728 - DNA, 15 bp, Homo sapiens
ttcaagccaagtctg

SEQ ID NO: 146729 - DNA, 15 bp, Homo sapiens
cttcaagccaagtct

SEQ ID NO: 146730 - DNA, 15 bp, Homo sapiens
gcttcaagccaagtc

SEQ ID NO: 146731 - DNA, 15 bp, Homo sapiens
agcttcaagccaagt

SEQ ID NO: 146732 - DNA, 15 bp, Homo sapiens
gagcttcaagccaag

SEQ ID NO: 146733 - DNA, 15 bp, Homo sapiens
tgagcttcaagccaa

SEQ ID NO: 146734 - DNA, 15 bp, Homo sapiens
gtgagcttcaagcca

SEQ ID NO: 146735 - DNA, 15 bp, Homo sapiens
agtgagcttcaagcc

SEQ ID NO: 146736 - DNA, 15 bp, Homo sapiens
aagtgagcttcaagc

SEQ ID NO: 146737 - DNA, 15 bp, Homo sapiens
gaagtgagcttcaag

SEQ ID NO: 146738 - DNA, 15 bp, Homo sapiens
ggaagtgagcttcaa

SEQ ID NO: 146739 - DNA, 15 bp, Homo sapiens
aggaagtgagcttca

SEQ ID NO: 146740 - DNA, 15 bp, Homo sapiens
taggaagtgagcttc

SEQ ID NO: 146741 - DNA, 15 bp, Homo sapiens
ctaggaagtgagctt

SEQ ID NO: 146742 - DNA, 15 bp, Homo sapiens
actaggaagtgagct

SEQ ID NO: 146743 - DNA, 15 bp, Homo sapiens
aactaggaagtgagc

SEQ ID NO: 146744 - DNA, 15 bp, Homo sapiens
caactaggaagtgag

SEQ ID NO: 146745 - DNA, 15 bp, Homo sapiens
acaactaggaagtga

SEQ ID NO: 146746 - DNA, 15 bp, Homo sapiens
cacaactaggaagtg

SEQ ID NO: 146747 - DNA, 15 bp, Homo sapiens
acacaactaggaagt

SEQ ID NO: 146748 - DNA, 15 bp, Homo sapiens
aacacaactaggaag

SEQ ID NO: 146749 - DNA, 15 bp, Homo sapiens
taacacaactaggaa

SEQ ID NO: 146750 - DNA, 15 bp, Homo sapiens
gtaacacaactagga

SEQ ID NO: 146751 - DNA, 15 bp, Homo sapiens
agtaacacaactagg

SEQ ID NO: 146752 - DNA, 15 bp, Homo sapiens
gagtaacacaactag

SEQ ID NO: 146753 - DNA, 15 bp, Homo sapiens
ggagtaacacaacta

SEQ ID NO: 146754 - DNA, 15 bp, Homo sapiens
aggagtaacacaact

SEQ ID NO: 146755 - DNA, 15 bp, Homo sapiens
gaggagtaacacaac

SEQ ID NO: 146756 - DNA, 15 bp, Homo sapiens
tgaggagtaacacaa

SEQ ID NO: 146757 - DNA, 15 bp, Homo sapiens
ctgaggagtaacaca

SEQ ID NO: 146758 - DNA, 15 bp, Homo sapiens
cctgaggagtaacac

SEQ ID NO: 146759 - DNA, 15 bp, Homo sapiens
ccctgaggagtaaca

SEQ ID NO: 146760 - DNA, 15 bp, Homo sapiens
gccctgaggagtaac

SEQ ID NO: 146761 - DNA, 15 bp, Homo sapiens
ggccctgaggagtaa

SEQ ID NO: 146762 - DNA, 15 bp, Homo sapiens
aggccctgaggagta

SEQ ID NO: 146763 - DNA, 15 bp, Homo sapiens
gaggccctgaggagt

SEQ ID NO: 146764 - DNA, 15 bp, Homo sapiens
tgaggccctgaggag

SEQ ID NO: 146765 - DNA, 15 bp, Homo sapiens
ctgaggccctgagga

SEQ ID NO: 146766 - DNA, 15 bp, Homo sapiens
actgaggccctgagg

SEQ ID NO: 146767 - DNA, 15 bp, Homo sapiens
aactgaggccctgag

SEQ ID NO: 146768 - DNA, 15 bp, Homo sapiens
aaactgaggccctga

SEQ ID NO: 146769 - DNA, 15 bp, Homo sapiens
aaaactgaggccctg

SEQ ID NO: 146770 - DNA, 15 bp, Homo sapiens
caaaactgaggccct

SEQ ID NO: 146771 - DNA, 15 bp, Homo sapiens
gcaaaactgaggccc

SEQ ID NO: 146772 - DNA, 15 bp, Homo sapiens
ggcaaaactgaggcc

SEQ ID NO: 146773 - DNA, 15 bp, Homo sapiens
cggcaaaactgaggc

SEQ ID NO: 146774 - DNA, 15 bp, Homo sapiens
gcggcaaaactgagg

SEQ ID NO: 146775 - DNA, 15 bp, Homo sapiens
ggcggcaaaactgag

SEQ ID NO: 146776 - DNA, 15 bp, Homo sapiens
aggcggcaaaactga

SEQ ID NO: 146777 - DNA, 15 bp, Homo sapiens
taggcggcaaaactg

SEQ ID NO: 146778 - DNA, 15 bp, Homo sapiens
ttaggcggcaaaact

SEQ ID NO: 146779 - DNA, 15 bp, Homo sapiens
tttaggcggcaaaac

SEQ ID NO: 146780 - DNA, 15 bp, Homo sapiens
ttttaggcggcaaaa

SEQ ID NO: 146781 - DNA, 15 bp, Homo sapiens
cttttaggcggcaaa

SEQ ID NO: 146782 - DNA, 15 bp, Homo sapiens
tcttttaggcggcaa

SEQ ID NO: 146783 - DNA, 15 bp, Homo sapiens
atcttttaggcggca

SEQ ID NO: 146784 - DNA, 15 bp, Homo sapiens
catcttttaggcggc

SEQ ID NO: 146785 - DNA, 15 bp, Homo sapiens
ccatcttttaggcgg

SEQ ID NO: 146786 - DNA, 15 bp, Homo sapiens
cccatcttttaggcg

SEQ ID NO: 146787 - DNA, 15 bp, Homo sapiens
tcccatcttttaggc

SEQ ID NO: 146788 - DNA, 15 bp, Homo sapiens
ttcccatcttttagg

SEQ ID NO: 146789 - DNA, 15 bp, Homo sapiens
attcccatcttttag

SEQ ID NO: 146790 - DNA, 15 bp, Homo sapiens
gattcccatctttta

SEQ ID NO: 146791 - DNA, 15 bp, Homo sapiens
tgattcccatctttt

SEQ ID NO: 146792 - DNA, 15 bp, Homo sapiens
gtgattcccatcttt

SEQ ID NO: 146793 - DNA, 15 bp, Homo sapiens
cgtgattcccatctt

SEQ ID NO: 146794 - DNA, 15 bp, Homo sapiens
acgtgattcccatct

SEQ ID NO: 146795 - DNA, 15 bp, Homo sapiens
gacgtgattcccatc

SEQ ID NO: 146796 - DNA, 15 bp, Homo sapiens
ggacgtgattcccat

SEQ ID NO: 146797 - DNA, 15 bp, Homo sapiens
gggacgtgattccca

SEQ ID NO: 146798 - DNA, 15 bp, Homo sapiens
tgggacgtgattccc

SEQ ID NO: 146799 - DNA, 15 bp, Homo sapiens
gtgggacgtgattcc

SEQ ID NO: 146800 - DNA, 15 bp, Homo sapiens
agtgggacgtgattc

SEQ ID NO: 146801 - DNA, 15 bp, Homo sapiens
aagtgggacgtgatt

SEQ ID NO: 146802 - DNA, 15 bp, Homo sapiens
caagtgggacgtgat

SEQ ID NO: 146803 - DNA, 15 bp, Homo sapiens
gcaagtgggacgtga

SEQ ID NO: 146804 - DNA, 15 bp, Homo sapiens
ggcaagtgggacgtg

SEQ ID NO: 146805 - DNA, 15 bp, Homo sapiens
cggcaagtgggacgt

SEQ ID NO: 146806 - DNA, 15 bp, Homo sapiens
ccggcaagtgggacg

SEQ ID NO: 146807 - DNA, 15 bp, Homo sapiens
cccggcaagtgggac

SEQ ID NO: 146808 - DNA, 15 bp, Homo sapiens
acccggcaagtggga

SEQ ID NO: 146809 - DNA, 15 bp, Homo sapiens
cacccggcaagtggg

SEQ ID NO: 146810 - DNA, 15 bp, Homo sapiens
gcacccggcaagtgg

SEQ ID NO: 146811 - DNA, 15 bp, Homo sapiens
agcacccggcaagtg

SEQ ID NO: 146812 - DNA, 15 bp, Homo sapiens
aagcacccggcaagt

SEQ ID NO: 146813 - DNA, 15 bp, Homo sapiens
aaagcacccggcaag

SEQ ID NO: 146814 - DNA, 15 bp, Homo sapiens
caaagcacccggcaa

SEQ ID NO: 146815 - DNA, 15 bp, Homo sapiens
tcaaagcacccggca

SEQ ID NO: 146816 - DNA, 15 bp, Homo sapiens
ttcaaagcacccggc

SEQ ID NO: 146817 - DNA, 15 bp, Homo sapiens
cttcaaagcacccgg

SEQ ID NO: 146818 - DNA, 15 bp, Homo sapiens
gcttcaaagcacccg

SEQ ID NO: 146819 - DNA, 15 bp, Homo sapiens
agcttcaaagcaccc

SEQ ID NO: 146820 - DNA, 15 bp, Homo sapiens
gagcttcaaagcacc

SEQ ID NO: 146821 - DNA, 15 bp, Homo sapiens
tgagcttcaaagcac

SEQ ID NO: 146822 - DNA, 15 bp, Homo sapiens
ctgagcttcaaagca

SEQ ID NO: 146823 - DNA, 15 bp, Homo sapiens
cctgagcttcaaagc

SEQ ID NO: 146824 - DNA, 15 bp, Homo sapiens
tcctgagcttcaaag

SEQ ID NO: 146825 - DNA, 15 bp, Homo sapiens
ttcctgagcttcaaa

SEQ ID NO: 146826 - DNA, 15 bp, Homo sapiens
tttcctgagcttcaa

SEQ ID NO: 146827 - DNA, 15 bp, Homo sapiens
ctttcctgagcttca

SEQ ID NO: 146828 - DNA, 15 bp, Homo sapiens
tctttcctgagcttc

SEQ ID NO: 146829 - DNA, 15 bp, Homo sapiens
atctttcctgagctt

SEQ ID NO: 146830 - DNA, 15 bp, Homo sapiens
catctttcctgagct

SEQ ID NO: 146831 - DNA, 15 bp, Homo sapiens
tcatctttcctgagc

SEQ ID NO: 146832 - DNA, 15 bp, Homo sapiens
ttcatctttcctgag

SEQ ID NO: 146833 - DNA, 15 bp, Homo sapiens
cttcatctttcctga

SEQ ID NO: 146834 - DNA, 15 bp, Homo sapiens
gcttcatctttcctg

SEQ ID NO: 146835 - DNA, 15 bp, Homo sapiens
tgcttcatctttcct

SEQ ID NO: 146836 - DNA, 15 bp, Homo sapiens
atgcttcatctttcc

SEQ ID NO: 146837 - DNA, 15 bp, Homo sapiens
gatgcttcatctttc

SEQ ID NO: 146838 - DNA, 15 bp, Homo sapiens
agatgcttcatcttt

SEQ ID NO: 146839 - DNA, 15 bp, Homo sapiens
gagatgcttcatctt

SEQ ID NO: 146840 - DNA, 15 bp, Homo sapiens
agagatgcttcatct

SEQ ID NO: 146841 - DNA, 15 bp, Homo sapiens
aagagatgcttcatc

SEQ ID NO: 146842 - DNA, 15 bp, Homo sapiens
aaagagatgcttcat

SEQ ID NO: 146843 - DNA, 15 bp, Homo sapiens
aaaagagatgcttca

SEQ ID NO: 146844 - DNA, 15 bp, Homo sapiens
taaaagagatgcttc

SEQ ID NO: 146845 - DNA, 15 bp, Homo sapiens
ctaaaagagatgctt

SEQ ID NO: 146846 - DNA, 15 bp, Homo sapiens
tctaaaagagatgct

SEQ ID NO: 146847 - DNA, 15 bp, Homo sapiens
ctctaaaagagatgc

SEQ ID NO: 146848 - DNA, 15 bp, Homo sapiens
cctctaaaagagatg

SEQ ID NO: 146849 - DNA, 15 bp, Homo sapiens
gcctctaaaagagat

SEQ ID NO: 146850 - DNA, 15 bp, Homo sapiens
ggcctctaaaagaga

SEQ ID NO: 146851 - DNA, 15 bp, Homo sapiens
gggcctctaaaagag

SEQ ID NO: 146852 - DNA, 15 bp, Homo sapiens
agggcctctaaaaga

SEQ ID NO: 146853 - DNA, 15 bp, Homo sapiens
gagggcctctaaaag

SEQ ID NO: 146854 - DNA, 15 bp, Homo sapiens
tgagggcctctaaaa

SEQ ID NO: 146855 - DNA, 15 bp, Homo sapiens
ctgagggcctctaaa

SEQ ID NO: 146856 - DNA, 15 bp, Homo sapiens
cctgagggcctctaa

SEQ ID NO: 146857 - DNA, 15 bp, Homo sapiens
ccctgagggcctcta

SEQ ID NO: 146858 - DNA, 15 bp, Homo sapiens
gccctgagggcctct

SEQ ID NO: 146859 - DNA, 15 bp, Homo sapiens
agccctgagggcctc

SEQ ID NO: 146860 - DNA, 15 bp, Homo sapiens
cagccctgagggcct

SEQ ID NO: 146861 - DNA, 15 bp, Homo sapiens
gcagccctgagggcc

SEQ ID NO: 146862 - DNA, 15 bp, Homo sapiens
tgcagccctgagggc

SEQ ID NO: 146863 - DNA, 15 bp, Homo sapiens
ctgcagccctgaggg

SEQ ID NO: 146864 - DNA, 15 bp, Homo sapiens
cctgcagccctgagg

SEQ ID NO: 146865 - DNA, 15 bp, Homo sapiens
gcctgcagccctgag

SEQ ID NO: 146866 - DNA, 15 bp, Homo sapiens
tgcctgcagccctga

SEQ ID NO: 146867 - DNA, 15 bp, Homo sapiens
gtgcctgcagccctg

SEQ ID NO: 146868 - DNA, 15 bp, Homo sapiens
ggtgcctgcagccct

SEQ ID NO: 146869 - DNA, 15 bp, Homo sapiens
tggtgcctgcagccc

SEQ ID NO: 146870 - DNA, 15 bp, Homo sapiens
atggtgcctgcagcc

SEQ ID NO: 146871 - DNA, 15 bp, Homo sapiens
catggtgcctgcagc

SEQ ID NO: 146872 - DNA, 15 bp, Homo sapiens
gcatggtgcctgcag

SEQ ID NO: 146873 - DNA, 15 bp, Homo sapiens
ggcatggtgcctgca

SEQ ID NO: 146874 - DNA, 15 bp, Homo sapiens
tggcatggtgcctgc

SEQ ID NO: 146875 - DNA, 15 bp, Homo sapiens
ctggcatggtgcctg

SEQ ID NO: 146876 - DNA, 15 bp, Homo sapiens
gctggcatggtgcct

SEQ ID NO: 146877 - DNA, 15 bp, Homo sapiens
agctggcatggtgcc

SEQ ID NO: 146878 - DNA, 15 bp, Homo sapiens
gagctggcatggtgc

SEQ ID NO: 146879 - DNA, 15 bp, Homo sapiens
agagctggcatggtg

SEQ ID NO: 146880 - DNA, 15 bp, Homo sapiens
aagagctggcatggt

SEQ ID NO: 146881 - DNA, 15 bp, Homo sapiens
aaagagctggcatgg

SEQ ID NO: 146882 - DNA, 15 bp, Homo sapiens
gaaagagctggcatg

SEQ ID NO: 146883 - DNA, 15 bp, Homo sapiens
ggaaagagctggcat

SEQ ID NO: 146884 - DNA, 15 bp, Homo sapiens
aggaaagagctggca

SEQ ID NO: 146885 - DNA, 15 bp, Homo sapiens
caggaaagagctggc

SEQ ID NO: 146886 - DNA, 15 bp, Homo sapiens
acaggaaagagctgg

SEQ ID NO: 146887 - DNA, 15 bp, Homo sapiens
cacaggaaagagctg

SEQ ID NO: 146888 - DNA, 15 bp, Homo sapiens
acacaggaaagagct

SEQ ID NO: 146889 - DNA, 15 bp, Homo sapiens
aacacaggaaagagc

SEQ ID NO: 146890 - DNA, 15 bp, Homo sapiens
taacacaggaaagag

SEQ ID NO: 146891 - DNA, 15 bp, Homo sapiens
gtaacacaggaaaga

SEQ ID NO: 146892 - DNA, 15 bp, Homo sapiens
ggtaacacaggaaag

SEQ ID NO: 146893 - DNA, 15 bp, Homo sapiens
aggtaacacaggaaa

SEQ ID NO: 146894 - DNA, 15 bp, Homo sapiens
gaggtaacacaggaa

SEQ ID NO: 146895 - DNA, 15 bp, Homo sapiens
ggaggtaacacagga

SEQ ID NO: 146896 - DNA, 15 bp, Homo sapiens
aggaggtaacacagg

SEQ ID NO: 146897 - DNA, 15 bp, Homo sapiens
aaggaggtaacacag

SEQ ID NO: 146898 - DNA, 15 bp, Homo sapiens
taaggaggtaacaca

SEQ ID NO: 146899 - DNA, 15 bp, Homo sapiens
ttaaggaggtaacac

SEQ ID NO: 146900 - DNA, 15 bp, Homo sapiens
gttaaggaggtaaca

SEQ ID NO: 146901 - DNA, 15 bp, Homo sapiens
ggttaaggaggtaac

SEQ ID NO: 146902 - DNA, 15 bp, Homo sapiens
gggttaaggaggtaa

SEQ ID NO: 146903 - DNA, 15 bp, Homo sapiens
agggttaaggaggta

SEQ ID NO: 146904 - DNA, 15 bp, Homo sapiens
gagggttaaggaggt

SEQ ID NO: 146905 - DNA, 15 bp, Homo sapiens
agagggttaaggagg

SEQ ID NO: 146906 - DNA, 15 bp, Homo sapiens
aagagggttaaggag

SEQ ID NO: 146907 - DNA, 15 bp, Homo sapiens
gaagagggttaagga

SEQ ID NO: 146908 - DNA, 15 bp, Homo sapiens
tgaagagggttaagg

SEQ ID NO: 146909 - DNA, 15 bp, Homo sapiens
ttgaagagggttaag

SEQ ID NO: 146910 - DNA, 15 bp, Homo sapiens
cttgaagagggttaa

SEQ ID NO: 146911 - DNA, 15 bp, Homo sapiens
ccttgaagagggtta

SEQ ID NO: 146912 - DNA, 15 bp, Homo sapiens
tccttgaagagggtt

SEQ ID NO: 146913 - DNA, 15 bp, Homo sapiens
ctccttgaagagggt

SEQ ID NO: 146914 - DNA, 15 bp, Homo sapiens
cctccttgaagaggg

SEQ ID NO: 146915 - DNA, 15 bp, Homo sapiens
ccctccttgaagagg

SEQ ID NO: 146916 - DNA, 15 bp, Homo sapiens
gccctccttgaagag

SEQ ID NO: 146917 - DNA, 15 bp, Homo sapiens
tgccctccttgaaga

SEQ ID NO: 146918 - DNA, 15 bp, Homo sapiens
atgccctccttgaag

SEQ ID NO: 146919 - DNA, 15 bp, Homo sapiens
gatgccctccttgaa

SEQ ID NO: 146920 - DNA, 15 bp, Homo sapiens
ggatgccctccttga

SEQ ID NO: 146921 - DNA, 15 bp, Homo sapiens
cggatgccctccttg

SEQ ID NO: 146922 - DNA, 15 bp, Homo sapiens
ccggatgccctcctt

SEQ ID NO: 146923 - DNA, 15 bp, Homo sapiens
cccggatgccctcct

SEQ ID NO: 146924 - DNA, 15 bp, Homo sapiens
tcccggatgccctcc

SEQ ID NO: 146925 - DNA, 15 bp, Homo sapiens
gtcccggatgccctc

SEQ ID NO: 146926 - DNA, 15 bp, Homo sapiens
tgtcccggatgccct

SEQ ID NO: 146927 - DNA, 15 bp, Homo sapiens
ctgtcccggatgccc

SEQ ID NO: 146928 - DNA, 15 bp, Homo sapiens
actgtcccggatgcc

SEQ ID NO: 146929 - DNA, 15 bp, Homo sapiens
gactgtcccggatgc

SEQ ID NO: 146930 - DNA, 15 bp, Homo sapiens
ggactgtcccggatg

SEQ ID NO: 146931 - DNA, 15 bp, Homo sapiens
gggactgtcccggat

SEQ ID NO: 146932 - DNA, 15 bp, Homo sapiens
agggactgtcccgga

SEQ ID NO: 146933 - DNA, 15 bp, Homo sapiens
cagggactgtcccgg

SEQ ID NO: 146934 - DNA, 15 bp, Homo sapiens
ccagggactgtcccg

SEQ ID NO: 146935 - DNA, 15 bp, Homo sapiens
gccagggactgtccc

SEQ ID NO: 146936 - DNA, 15 bp, Homo sapiens
tgccagggactgtcc

SEQ ID NO: 146937 - DNA, 15 bp, Homo sapiens
ttgccagggactgtc

SEQ ID NO: 146938 - DNA, 15 bp, Homo sapiens
gttgccagggactgt

SEQ ID NO: 146939 - DNA, 15 bp, Homo sapiens
agttgccagggactg

SEQ ID NO: 146940 - DNA, 15 bp, Homo sapiens
tagttgccagggact

SEQ ID NO: 146941 - DNA, 15 bp, Homo sapiens
ctagttgccagggac

SEQ ID NO: 146942 - DNA, 15 bp, Homo sapiens
gctagttgccaggga

SEQ ID NO: 146943 - DNA, 15 bp, Homo sapiens
tgctagttgccaggg

SEQ ID NO: 146944 - DNA, 15 bp, Homo sapiens
ttgctagttgccagg

SEQ ID NO: 146945 - DNA, 15 bp, Homo sapiens
cttgctagttgccag

SEQ ID NO: 146946 - DNA, 15 bp, Homo sapiens
gcttgctagttgcca

SEQ ID NO: 146947 - DNA, 15 bp, Homo sapiens
tgcttgctagttgcc

SEQ ID NO: 146948 - DNA, 15 bp, Homo sapiens
gtgcttgctagttgc

SEQ ID NO: 146949 - DNA, 15 bp, Homo sapiens
ggtgcttgctagttg

SEQ ID NO: 146950 - DNA, 15 bp, Homo sapiens
gggtgcttgctagtt

SEQ ID NO: 146951 - DNA, 15 bp, Homo sapiens
tgggtgcttgctagt

SEQ ID NO: 146952 - DNA, 15 bp, Homo sapiens
ttgggtgcttgctag

SEQ ID NO: 146953 - DNA, 15 bp, Homo sapiens
gttgggtgcttgcta

SEQ ID NO: 146954 - DNA, 15 bp, Homo sapiens
tgttgggtgcttgct

SEQ ID NO: 146955 - DNA, 15 bp, Homo sapiens
gtgttgggtgcttgc

SEQ ID NO: 146956 - DNA, 15 bp, Homo sapiens
tgtgttgggtgcttg

SEQ ID NO: 146957 - DNA, 15 bp, Homo sapiens
ctgtgttgggtgctt

SEQ ID NO: 146958 - DNA, 15 bp, Homo sapiens
cctgtgttgggtgct

SEQ ID NO: 146959 - DNA, 15 bp, Homo sapiens
ccctgtgttgggtgc

SEQ ID NO: 146960 - DNA, 15 bp, Homo sapiens
gccctgtgttgggtg

SEQ ID NO: 146961 - DNA, 15 bp, Homo sapiens
ggccctgtgttgggt

SEQ ID NO: 146962 - DNA, 15 bp, Homo sapiens
gggccctgtgttggg

SEQ ID NO: 146963 - DNA, 15 bp, Homo sapiens
agggccctgtgttgg

SEQ ID NO: 146964 - DNA, 15 bp, Homo sapiens
aagggccctgtgttg

SEQ ID NO: 146965 - DNA, 15 bp, Homo sapiens
gaagggccctgtgtt

SEQ ID NO: 146966 - DNA, 15 bp, Homo sapiens
agaagggccctgtgt

SEQ ID NO: 146967 - DNA, 15 bp, Homo sapiens
aagaagggccctgtg

SEQ ID NO: 146968 - DNA, 15 bp, Homo sapiens
taagaagggccctgt

SEQ ID NO: 146969 - DNA, 15 bp, Homo sapiens
gtaagaagggccctg

SEQ ID NO: 146970 - DNA, 15 bp, Homo sapiens
ggtaagaagggccct

SEQ ID NO: 146971 - DNA, 15 bp, Homo sapiens
tggtaagaagggccc

SEQ ID NO: 146972 - DNA, 15 bp, Homo sapiens
ctggtaagaagggcc

SEQ ID NO: 146973 - DNA, 15 bp, Homo sapiens
cctggtaagaagggc

SEQ ID NO: 146974 - DNA, 15 bp, Homo sapiens
acctggtaagaaggg

SEQ ID NO: 146975 - DNA, 15 bp, Homo sapiens
cacctggtaagaagg

SEQ ID NO: 146976 - DNA, 15 bp, Homo sapiens
ccacctggtaagaag

SEQ ID NO: 146977 - DNA, 15 bp, Homo sapiens
gccacctggtaagaa

SEQ ID NO: 146978 - DNA, 15 bp, Homo sapiens
ggccacctggtaaga

SEQ ID NO: 146979 - DNA, 15 bp, Homo sapiens
aggccacctggtaag

SEQ ID NO: 146980 - DNA, 15 bp, Homo sapiens
gaggccacctggtaa

SEQ ID NO: 146981 - DNA, 15 bp, Homo sapiens
agaggccacctggta

SEQ ID NO: 146982 - DNA, 15 bp, Homo sapiens
cagaggccacctggt

SEQ ID NO: 146983 - DNA, 15 bp, Homo sapiens
tcagaggccacctgg

SEQ ID NO: 146984 - DNA, 15 bp, Homo sapiens
ctcagaggccacctg

SEQ ID NO: 146985 - DNA, 15 bp, Homo sapiens
cctcagaggccacct

SEQ ID NO: 146986 - DNA, 15 bp, Homo sapiens
tcctcagaggccacc

SEQ ID NO: 146987 - DNA, 15 bp, Homo sapiens
gtcctcagaggccac

SEQ ID NO: 146988 - DNA, 15 bp, Homo sapiens
ggtcctcagaggcca

SEQ ID NO: 146989 - DNA, 15 bp, Homo sapiens
aggtcctcagaggcc

SEQ ID NO: 146990 - DNA, 15 bp, Homo sapiens
aaggtcctcagaggc

SEQ ID NO: 146991 - DNA, 15 bp, Homo sapiens
aaaggtcctcagagg

SEQ ID NO: 146992 - DNA, 15 bp, Homo sapiens
gaaaggtcctcagag

SEQ ID NO: 146993 - DNA, 15 bp, Homo sapiens
tgaaaggtcctcaga

SEQ ID NO: 146994 - DNA, 15 bp, Homo sapiens
ctgaaaggtcctcag

SEQ ID NO: 146995 - DNA, 15 bp, Homo sapiens
gctgaaaggtcctca

SEQ ID NO: 146996 - DNA, 15 bp, Homo sapiens
ggctgaaaggtcctc

SEQ ID NO: 146997 - DNA, 15 bp, Homo sapiens
tggctgaaaggtcct

SEQ ID NO: 146998 - DNA, 15 bp, Homo sapiens
atggctgaaaggtcc

SEQ ID NO: 146999 - DNA, 15 bp, Homo sapiens
catggctgaaaggtc

SEQ ID NO: 147000 - DNA, 15 bp, Homo sapiens
acatggctgaaaggt

SEQ ID NO: 147001 - DNA, 15 bp, Homo sapiens
cacatggctgaaagg

SEQ ID NO: 147002 - DNA, 15 bp, Homo sapiens
gcacatggctgaaag

SEQ ID NO: 147003 - DNA, 15 bp, Homo sapiens
ggcacatggctgaaa

SEQ ID NO: 147004 - DNA, 15 bp, Homo sapiens
gggcacatggctgaa

SEQ ID NO: 147005 - DNA, 15 bp, Homo sapiens
ggggcacatggctga

SEQ ID NO: 147006 - DNA, 15 bp, Homo sapiens
aggggcacatggctg

SEQ ID NO: 147007 - DNA, 15 bp, Homo sapiens
caggggcacatggct

SEQ ID NO: 147008 - DNA, 15 bp, Homo sapiens
ccaggggcacatggc

SEQ ID NO: 147009 - DNA, 15 bp, Homo sapiens
cccaggggcacatgg

SEQ ID NO: 147010 - DNA, 15 bp, Homo sapiens
gcccaggggcacatg

SEQ ID NO: 147011 - DNA, 15 bp, Homo sapiens
agcccaggggcacat

SEQ ID NO: 147012 - DNA, 15 bp, Homo sapiens
cagcccaggggcaca

SEQ ID NO: 147013 - DNA, 15 bp, Homo sapiens
gcagcccaggggcac

SEQ ID NO: 147014 - DNA, 15 bp, Homo sapiens
cgcagcccaggggca

SEQ ID NO: 147015 - DNA, 15 bp, Homo sapiens
ccgcagcccaggggc

SEQ ID NO: 147016 - DNA, 15 bp, Homo sapiens
gccgcagcccagggg

SEQ ID NO: 147017 - DNA, 15 bp, Homo sapiens
agccgcagcccaggg

SEQ ID NO: 147018 - DNA, 15 bp, Homo sapiens
cagccgcagcccagg

SEQ ID NO: 147019 - DNA, 15 bp, Homo sapiens
ccagccgcagcccag

SEQ ID NO: 147020 - DNA, 15 bp, Homo sapiens
cccagccgcagccca

SEQ ID NO: 147021 - DNA, 15 bp, Homo sapiens
gcccagccgcagccc

SEQ ID NO: 147022 - DNA, 15 bp, Homo sapiens
cgcccagccgcagcc

SEQ ID NO: 147023 - DNA, 15 bp, Homo sapiens
gcgcccagccgcagc

SEQ ID NO: 147024 - DNA, 15 bp, Homo sapiens
cgcgcccagccgcag

SEQ ID NO: 147025 - DNA, 15 bp, Homo sapiens
ccgcgcccagccgca

SEQ ID NO: 147026 - DNA, 15 bp, Homo sapiens
accgcgcccagccgc

SEQ ID NO: 147027 - DNA, 15 bp, Homo sapiens
gaccgcgcccagccg

SEQ ID NO: 147028 - DNA, 15 bp, Homo sapiens
ggaccgcgcccagcc

SEQ ID NO: 147029 - DNA, 15 bp, Homo sapiens
aggaccgcgcccagc

SEQ ID NO: 147030 - DNA, 15 bp, Homo sapiens
aaggaccgcgcccag

SEQ ID NO: 147031 - DNA, 15 bp, Homo sapiens
caaggaccgcgccca

SEQ ID NO: 147032 - DNA, 15 bp, Homo sapiens
ccaaggaccgcgccc

SEQ ID NO: 147033 - DNA, 15 bp, Homo sapiens
cccaaggaccgcgcc

SEQ ID NO: 147034 - DNA, 15 bp, Homo sapiens
tcccaaggaccgcgc

SEQ ID NO: 147035 - DNA, 15 bp, Homo sapiens
ctcccaaggaccgcg

SEQ ID NO: 147036 - DNA, 15 bp, Homo sapiens
cctcccaaggaccgc

SEQ ID NO: 147037 - DNA, 15 bp, Homo sapiens
ccctcccaaggaccg

SEQ ID NO: 147038 - DNA, 15 bp, Homo sapiens
tccctcccaaggacc

SEQ ID NO: 147039 - DNA, 15 bp, Homo sapiens
atccctcccaaggac

SEQ ID NO: 147040 - DNA, 15 bp, Homo sapiens
catccctcccaagga

SEQ ID NO: 147041 - DNA, 15 bp, Homo sapiens
acatccctcccaagg

SEQ ID NO: 147042 - DNA, 15 bp, Homo sapiens
gacatccctcccaag

SEQ ID NO: 147043 - DNA, 15 bp, Homo sapiens
ggacatccctcccaa

SEQ ID NO: 147044 - DNA, 15 bp, Homo sapiens
gggacatccctccca

SEQ ID NO: 147045 - DNA, 15 bp, Homo sapiens
agggacatccctccc

SEQ ID NO: 147046 - DNA, 15 bp, Homo sapiens
gagggacatccctcc

SEQ ID NO: 147047 - DNA, 15 bp, Homo sapiens
agagggacatccctc

SEQ ID NO: 147048 - DNA, 15 bp, Homo sapiens
cagagggacatccct

SEQ ID NO: 147049 - DNA, 15 bp, Homo sapiens
acagagggacatccc

SEQ ID NO: 147050 - DNA, 15 bp, Homo sapiens
cacagagggacatcc

SEQ ID NO: 147051 - DNA, 15 bp, Homo sapiens
ccacagagggacatc

SEQ ID NO: 147052 - DNA, 15 bp, Homo sapiens
accacagagggacat

SEQ ID NO: 147053 - DNA, 15 bp, Homo sapiens
aaccacagagggaca

SEQ ID NO: 147054 - DNA, 15 bp, Homo sapiens
gaaccacagagggac

SEQ ID NO: 147055 - DNA, 15 bp, Homo sapiens
ggaaccacagaggga

SEQ ID NO: 147056 - DNA, 15 bp, Homo sapiens
aggaaccacagaggg

SEQ ID NO: 147057 - DNA, 15 bp, Homo sapiens
caggaaccacagagg

SEQ ID NO: 147058 - DNA, 15 bp, Homo sapiens
ccaggaaccacagag

SEQ ID NO: 147059 - DNA, 15 bp, Homo sapiens
tccaggaaccacaga

SEQ ID NO: 147060 - DNA, 15 bp, Homo sapiens
ttccaggaaccacag

SEQ ID NO: 147061 - DNA, 15 bp, Homo sapiens
tttccaggaaccaca

SEQ ID NO: 147062 - DNA, 15 bp, Homo sapiens
ctttccaggaaccac

SEQ ID NO: 147063 - DNA, 15 bp, Homo sapiens
gctttccaggaacca

SEQ ID NO: 147064 - DNA, 15 bp, Homo sapiens
ggctttccaggaacc

SEQ ID NO: 147065 - DNA, 15 bp, Homo sapiens
gggctttccaggaac

SEQ ID NO: 147066 - DNA, 15 bp, Homo sapiens
cgggctttccaggaa

SEQ ID NO: 147067 - DNA, 15 bp, Homo sapiens
ccgggctttccagga

SEQ ID NO: 147068 - DNA, 15 bp, Homo sapiens
gccgggctttccagg

SEQ ID NO: 147069 - DNA, 15 bp, Homo sapiens
tgccgggctttccag

SEQ ID NO: 147070 - DNA, 15 bp, Homo sapiens
ctgccgggctttcca

SEQ ID NO: 147071 - DNA, 15 bp, Homo sapiens
gctgccgggctttcc

SEQ ID NO: 147072 - DNA, 15 bp, Homo sapiens
agctgccgggctttc

SEQ ID NO: 147073 - DNA, 15 bp, Homo sapiens
cagctgccgggcttt

SEQ ID NO: 147074 - DNA, 15 bp, Homo sapiens
ccagctgccgggctt

SEQ ID NO: 147075 - DNA, 15 bp, Homo sapiens
gccagctgccgggct

SEQ ID NO: 147076 - DNA, 15 bp, Homo sapiens
agccagctgccgggc

SEQ ID NO: 147077 - DNA, 15 bp, Homo sapiens
cagccagctgccggg

SEQ ID NO: 147078 - DNA, 15 bp, Homo sapiens
gcagccagctgccgg

SEQ ID NO: 147079 - DNA, 15 bp, Homo sapiens
agcagccagctgccg

SEQ ID NO: 147080 - DNA, 15 bp, Homo sapiens
aagcagccagctgcc

SEQ ID NO: 147081 - DNA, 15 bp, Homo sapiens
aaagcagccagctgc

SEQ ID NO: 147082 - DNA, 15 bp, Homo sapiens
caaagcagccagctg

SEQ ID NO: 147083 - DNA, 15 bp, Homo sapiens
acaaagcagccagct

SEQ ID NO: 147084 - DNA, 15 bp, Homo sapiens
aacaaagcagccagc

SEQ ID NO: 147085 - DNA, 15 bp, Homo sapiens
gaacaaagcagccag

SEQ ID NO: 147086 - DNA, 15 bp, Homo sapiens
agaacaaagcagcca

SEQ ID NO: 147087 - DNA, 15 bp, Homo sapiens
cagaacaaagcagcc

SEQ ID NO: 147088 - DNA, 15 bp, Homo sapiens
ccagaacaaagcagc

SEQ ID NO: 147089 - DNA, 15 bp, Homo sapiens
gccagaacaaagcag

SEQ ID NO: 147090 - DNA, 15 bp, Homo sapiens
ggccagaacaaagca

SEQ ID NO: 147091 - DNA, 15 bp, Homo sapiens
tggccagaacaaagc

SEQ ID NO: 147092 - DNA, 15 bp, Homo sapiens
gtggccagaacaaag

SEQ ID NO: 147093 - DNA, 15 bp, Homo sapiens
agtggccagaacaaa

SEQ ID NO: 147094 - DNA, 15 bp, Homo sapiens
cagtggccagaacaa

SEQ ID NO: 147095 - DNA, 15 bp, Homo sapiens
ccagtggccagaaca

SEQ ID NO: 147096 - DNA, 15 bp, Homo sapiens
cccagtggccagaac

SEQ ID NO: 147097 - DNA, 15 bp, Homo sapiens
acccagtggccagaa

SEQ ID NO: 147098 - DNA, 15 bp, Homo sapiens
cacccagtggccaga

SEQ ID NO: 147099 - DNA, 15 bp, Homo sapiens
acacccagtggccag

SEQ ID NO: 147100 - DNA, 15 bp, Homo sapiens
gacacccagtggcca

SEQ ID NO: 147101 - DNA, 15 bp, Homo sapiens
agacacccagtggcc

SEQ ID NO: 147102 - DNA, 15 bp, Homo sapiens
cagacacccagtggc

SEQ ID NO: 147103 - DNA, 15 bp, Homo sapiens
gcagacacccagtgg

SEQ ID NO: 147104 - DNA, 15 bp, Homo sapiens
agcagacacccagtg

SEQ ID NO: 147105 - DNA, 15 bp, Homo sapiens
cagcagacacccagt

SEQ ID NO: 147106 - DNA, 15 bp, Homo sapiens
acagcagacacccag

SEQ ID NO: 147107 - DNA, 15 bp, Homo sapiens
aacagcagacaccca

SEQ ID NO: 147108 - DNA, 15 bp, Homo sapiens
taacagcagacaccc

SEQ ID NO: 147109 - DNA, 15 bp, Homo sapiens
ctaacagcagacacc

SEQ ID NO: 147110 - DNA, 15 bp, Homo sapiens
cctaacagcagacac

SEQ ID NO: 147111 - DNA, 15 bp, Homo sapiens
tcctaacagcagaca

SEQ ID NO: 147112 - DNA, 15 bp, Homo sapiens
gtcctaacagcagac

SEQ ID NO: 147113 - DNA, 15 bp, Homo sapiens
agtcctaacagcaga

SEQ ID NO: 147114 - DNA, 15 bp, Homo sapiens
cagtcctaacagcag

SEQ ID NO: 147115 - DNA, 15 bp, Homo sapiens
gcagtcctaacagca

SEQ ID NO: 147116 - DNA, 15 bp, Homo sapiens
cgcagtcctaacagc

SEQ ID NO: 147117 - DNA, 15 bp, Homo sapiens
ccgcagtcctaacag

SEQ ID NO: 147118 - DNA, 15 bp, Homo sapiens
cccgcagtcctaaca

SEQ ID NO: 147119 - DNA, 15 bp, Homo sapiens
acccgcagtcctaac

SEQ ID NO: 147120 - DNA, 15 bp, Homo sapiens
aacccgcagtcctaa

SEQ ID NO: 147121 - DNA, 15 bp, Homo sapiens
aaacccgcagtccta

SEQ ID NO: 147122 - DNA, 15 bp, Homo sapiens
aaaacccgcagtcct

SEQ ID NO: 147123 - DNA, 15 bp, Homo sapiens
taaaacccgcagtcc

SEQ ID NO: 147124 - DNA, 15 bp, Homo sapiens
ataaaacccgcagtc

SEQ ID NO: 147125 - DNA, 15 bp, Homo sapiens
cataaaacccgcagt

SEQ ID NO: 147126 - DNA, 15 bp, Homo sapiens
ccataaaacccgcag

SEQ ID NO: 147127 - DNA, 15 bp, Homo sapiens
gccataaaacccgca

SEQ ID NO: 147128 - DNA, 15 bp, Homo sapiens
agccataaaacccgc

SEQ ID NO: 147129 - DNA, 15 bp, Homo sapiens
cagccataaaacccg

SEQ ID NO: 147130 - DNA, 15 bp, Homo sapiens
acagccataaaaccc

SEQ ID NO: 147131 - DNA, 15 bp, Homo sapiens
aacagccataaaacc

SEQ ID NO: 147132 - DNA, 15 bp, Homo sapiens
aaacagccataaaac

SEQ ID NO: 147133 - DNA, 15 bp, Homo sapiens
gaaacagccataaaa

SEQ ID NO: 147134 - DNA, 15 bp, Homo sapiens
ggaaacagccataaa

SEQ ID NO: 147135 - DNA, 15 bp, Homo sapiens
aggaaacagccataa

SEQ ID NO: 147136 - DNA, 15 bp, Homo sapiens
aaggaaacagccata

SEQ ID NO: 147137 - DNA, 15 bp, Homo sapiens
caaggaaacagccat

SEQ ID NO: 147138 - DNA, 15 bp, Homo sapiens
acaaggaaacagcca

SEQ ID NO: 147139 - DNA, 15 bp, Homo sapiens
cacaaggaaacagcc

SEQ ID NO: 147140 - DNA, 15 bp, Homo sapiens
gcacaaggaaacagc

SEQ ID NO: 147141 - DNA, 15 bp, Homo sapiens
agcacaaggaaacag

SEQ ID NO: 147142 - DNA, 15 bp, Homo sapiens
gagcacaaggaaaca

SEQ ID NO: 147143 - DNA, 15 bp, Homo sapiens
tgagcacaaggaaac

SEQ ID NO: 147144 - DNA, 15 bp, Homo sapiens
ttgagcacaaggaaa

SEQ ID NO: 147145 - DNA, 15 bp, Homo sapiens
gttgagcacaaggaa

SEQ ID NO: 147146 - DNA, 15 bp, Homo sapiens
ggttgagcacaagga

SEQ ID NO: 147147 - DNA, 15 bp, Homo sapiens
aggttgagcacaagg

SEQ ID NO: 147148 - DNA, 15 bp, Homo sapiens
aaggttgagcacaag

SEQ ID NO: 147149 - DNA, 15 bp, Homo sapiens
aaaggttgagcacaa

SEQ ID NO: 147150 - DNA, 15 bp, Homo sapiens
aaaaggttgagcaca

SEQ ID NO: 147151 - DNA, 15 bp, Homo sapiens
taaaaggttgagcac

SEQ ID NO: 147152 - DNA, 15 bp, Homo sapiens
ataaaaggttgagca

SEQ ID NO: 147153 - DNA, 15 bp, Homo sapiens
tataaaaggttgagc

SEQ ID NO: 147154 - DNA, 15 bp, Homo sapiens
ctataaaaggttgag

SEQ ID NO: 147155 - DNA, 15 bp, Homo sapiens
cctataaaaggttga

SEQ ID NO: 147156 - DNA, 15 bp, Homo sapiens
acctataaaaggttg

SEQ ID NO: 147157 - DNA, 15 bp, Homo sapiens
cacctataaaaggtt

SEQ ID NO: 147158 - DNA, 15 bp, Homo sapiens
tcacctataaaaggt

SEQ ID NO: 147159 - DNA, 15 bp, Homo sapiens
gtcacctataaaagg

SEQ ID NO: 147160 - DNA, 15 bp, Homo sapiens
ggtcacctataaaag

SEQ ID NO: 147161 - DNA, 15 bp, Homo sapiens
gggtcacctataaaa

SEQ ID NO: 147162 - DNA, 15 bp, Homo sapiens
agggtcacctataaa

SEQ ID NO: 147163 - DNA, 15 bp, Homo sapiens
cagggtcacctataa

SEQ ID NO: 147164 - DNA, 15 bp, Homo sapiens
acagggtcacctata

SEQ ID NO: 147165 - DNA, 15 bp, Homo sapiens
cacagggtcacctat

SEQ ID NO: 147166 - DNA, 15 bp, Homo sapiens
acacagggtcaccta

SEQ ID NO: 147167 - DNA, 15 bp, Homo sapiens
aacacagggtcacct

SEQ ID NO: 147168 - DNA, 15 bp, Homo sapiens
aaacacagggtcacc

SEQ ID NO: 147169 - DNA, 15 bp, Homo sapiens
aaaacacagggtcac

SEQ ID NO: 147170 - DNA, 15 bp, Homo sapiens
aaaaacacagggtca

SEQ ID NO: 147171 - DNA, 15 bp, Homo sapiens
aaaaaacacagggtc

SEQ ID NO: 147172 - DNA, 15 bp, Homo sapiens
caaaaaacacagggt

SEQ ID NO: 147173 - DNA, 15 bp, Homo sapiens
ccaaaaaacacaggg

SEQ ID NO: 147174 - DNA, 15 bp, Homo sapiens
tccaaaaaacacagg

SEQ ID NO: 147175 - DNA, 15 bp, Homo sapiens
ctccaaaaaacacag

SEQ ID NO: 147176 - DNA, 15 bp, Homo sapiens
gctccaaaaaacaca

SEQ ID NO: 147177 - DNA, 15 bp, Homo sapiens
ggctccaaaaaacac

SEQ ID NO: 147178 - DNA, 15 bp, Homo sapiens
tggctccaaaaaaca

SEQ ID NO: 147179 - DNA, 15 bp, Homo sapiens
gtggctccaaaaaac

SEQ ID NO: 147180 - DNA, 15 bp, Homo sapiens
tgtggctccaaaaaa

SEQ ID NO: 147181 - DNA, 15 bp, Homo sapiens
gtgtggctccaaaaa

SEQ ID NO: 147182 - DNA, 15 bp, Homo sapiens
ggtgtggctccaaaa

SEQ ID NO: 147183 - DNA, 15 bp, Homo sapiens
aggtgtggctccaaa

SEQ ID NO: 147184 - DNA, 15 bp, Homo sapiens
caggtgtggctccaa

SEQ ID NO: 147185 - DNA, 15 bp, Homo sapiens
tcaggtgtggctcca

SEQ ID NO: 147186 - DNA, 15 bp, Homo sapiens
atcaggtgtggctcc

SEQ ID NO: 147187 - DNA, 15 bp, Homo sapiens
catcaggtgtggctc

SEQ ID NO: 147188 - DNA, 15 bp, Homo sapiens
ccatcaggtgtggct

SEQ ID NO: 147189 - DNA, 15 bp, Homo sapiens
cccatcaggtgtggc

SEQ ID NO: 147190 - DNA, 15 bp, Homo sapiens
ccccatcaggtgtgg

SEQ ID NO: 147191 - DNA, 15 bp, Homo sapiens
cccccatcaggtgtg

SEQ ID NO: 147192 - DNA, 15 bp, Homo sapiens
gcccccatcaggtgt

SEQ ID NO: 147193 - DNA, 15 bp, Homo sapiens
ggcccccatcaggtg

SEQ ID NO: 147194 - DNA, 15 bp, Homo sapiens
tggcccccatcaggt

SEQ ID NO: 147195 - DNA, 15 bp, Homo sapiens
ttggcccccatcagg

SEQ ID NO: 147196 - DNA, 15 bp, Homo sapiens
cttggcccccatcag

SEQ ID NO: 147197 - DNA, 15 bp, Homo sapiens
ccttggcccccatca

SEQ ID NO: 147198 - DNA, 15 bp, Homo sapiens
gccttggcccccatc

SEQ ID NO: 147199 - DNA, 15 bp, Homo sapiens
ggccttggcccccat

SEQ ID NO: 147200 - DNA, 15 bp, Homo sapiens
aggccttggccccca

SEQ ID NO: 147201 - DNA, 15 bp, Homo sapiens
aaggccttggccccc

SEQ ID NO: 147202 - DNA, 15 bp, Homo sapiens
aaaggccttggcccc

SEQ ID NO: 147203 - DNA, 15 bp, Homo sapiens
caaaggccttggccc

SEQ ID NO: 147204 - DNA, 15 bp, Homo sapiens
tcaaaggccttggcc

SEQ ID NO: 147205 - DNA, 15 bp, Homo sapiens
ttcaaaggccttggc

SEQ ID NO: 147206 - DNA, 15 bp, Homo sapiens
tttcaaaggccttgg

SEQ ID NO: 147207 - DNA, 15 bp, Homo sapiens
atttcaaaggccttg

SEQ ID NO: 147208 - DNA, 15 bp, Homo sapiens
catttcaaaggcctt

SEQ ID NO: 147209 - DNA, 15 bp, Homo sapiens
acatttcaaaggcct

SEQ ID NO: 147210 - DNA, 15 bp, Homo sapiens
aacatttcaaaggcc

SEQ ID NO: 147211 - DNA, 15 bp, Homo sapiens
gaacatttcaaaggc

SEQ ID NO: 147212 - DNA, 15 bp, Homo sapiens
ggaacatttcaaagg

SEQ ID NO: 147213 - DNA, 15 bp, Homo sapiens
tggaacatttcaaag

SEQ ID NO: 147214 - DNA, 15 bp, Homo sapiens
ctggaacatttcaaa

SEQ ID NO: 147215 - DNA, 15 bp, Homo sapiens
tctggaacatttcaa

SEQ ID NO: 147216 - DNA, 15 bp, Homo sapiens
ctctggaacatttca

SEQ ID NO: 147217 - DNA, 15 bp, Homo sapiens
actctggaacatttc

SEQ ID NO: 147218 - DNA, 15 bp, Homo sapiens
gactctggaacattt

SEQ ID NO: 147219 - DNA, 15 bp, Homo sapiens
agactctggaacatt

SEQ ID NO: 147220 - DNA, 15 bp, Homo sapiens
aagactctggaacat

SEQ ID NO: 147221 - DNA, 15 bp, Homo sapiens
aaagactctggaaca

SEQ ID NO: 147222 - DNA, 15 bp, Homo sapiens
taaagactctggaac

SEQ ID NO: 147223 - DNA, 15 bp, Homo sapiens
ataaagactctggaa

SEQ ID NO: 147224 - DNA, 15 bp, Homo sapiens
cataaagactctgga

SEQ ID NO: 147225 - DNA, 15 bp, Homo sapiens
ccataaagactctgg

SEQ ID NO: 147226 - DNA, 15 bp, Homo sapiens
cccataaagactctg

SEQ ID NO: 147227 - DNA, 15 bp, Homo sapiens
gcccataaagactct

SEQ ID NO: 147228 - DNA, 15 bp, Homo sapiens
agcccataaagactc

SEQ ID NO: 147229 - DNA, 15 bp, Homo sapiens
cagcccataaagact

SEQ ID NO: 147230 - DNA, 15 bp, Homo sapiens
gcagcccataaagac

SEQ ID NO: 147231 - DNA, 15 bp, Homo sapiens
tgcagcccataaaga

SEQ ID NO: 147232 - DNA, 15 bp, Homo sapiens
ctgcagcccataaag

SEQ ID NO: 147233 - DNA, 15 bp, Homo sapiens
gctgcagcccataaa

SEQ ID NO: 147234 - DNA, 15 bp, Homo sapiens
cgctgcagcccataa

SEQ ID NO: 147235 - DNA, 15 bp, Homo sapiens
ccgctgcagcccata

SEQ ID NO: 147236 - DNA, 15 bp, Homo sapiens
gccgctgcagcccat

SEQ ID NO: 147237 - DNA, 15 bp, Homo sapiens
tgccgctgcagccca

SEQ ID NO: 147238 - DNA, 15 bp, Homo sapiens
atgccgctgcagccc

SEQ ID NO: 147239 - DNA, 15 bp, Homo sapiens
tatgccgctgcagcc

SEQ ID NO: 147240 - DNA, 15 bp, Homo sapiens
atatgccgctgcagc

SEQ ID NO: 147241 - DNA, 15 bp, Homo sapiens
catatgccgctgcag

SEQ ID NO: 147242 - DNA, 15 bp, Homo sapiens
ccatatgccgctgca

SEQ ID NO: 147243 - DNA, 15 bp, Homo sapiens
accatatgccgctgc

SEQ ID NO: 147244 - DNA, 15 bp, Homo sapiens
caccatatgccgctg

SEQ ID NO: 147245 - DNA, 15 bp, Homo sapiens
ccaccatatgccgct

SEQ ID NO: 147246 - DNA, 15 bp, Homo sapiens
cccaccatatgccgc

SEQ ID NO: 147247 - DNA, 15 bp, Homo sapiens
acccaccatatgccg

SEQ ID NO: 147248 - DNA, 15 bp, Homo sapiens
cacccaccatatgcc

SEQ ID NO: 147249 - DNA, 15 bp, Homo sapiens
ccacccaccatatgc

SEQ ID NO: 147250 - DNA, 15 bp, Homo sapiens
gccacccaccatatg

SEQ ID NO: 147251 - DNA, 15 bp, Homo sapiens
ggccacccaccatat

SEQ ID NO: 147252 - DNA, 15 bp, Homo sapiens
gggccacccaccata

SEQ ID NO: 147253 - DNA, 15 bp, Homo sapiens
tgggccacccaccat

SEQ ID NO: 147254 - DNA, 15 bp, Homo sapiens
ttgggccacccacca

SEQ ID NO: 147255 - DNA, 15 bp, Homo sapiens
cttgggccacccacc

SEQ ID NO: 147256 - DNA, 15 bp, Homo sapiens
gcttgggccacccac

SEQ ID NO: 147257 - DNA, 15 bp, Homo sapiens
agcttgggccaccca

SEQ ID NO: 147258 - DNA, 15 bp, Homo sapiens
cagcttgggccaccc

SEQ ID NO: 147259 - DNA, 15 bp, Homo sapiens
gcagcttgggccacc

SEQ ID NO: 147260 - DNA, 15 bp, Homo sapiens
ggcagcttgggccac

SEQ ID NO: 147261 - DNA, 15 bp, Homo sapiens
aggcagcttgggcca

SEQ ID NO: 147262 - DNA, 15 bp, Homo sapiens
caggcagcttgggcc

SEQ ID NO: 147263 - DNA, 15 bp, Homo sapiens
tcaggcagcttgggc

SEQ ID NO: 147264 - DNA, 15 bp, Homo sapiens
gtcaggcagcttggg

SEQ ID NO: 147265 - DNA, 15 bp, Homo sapiens
tgtcaggcagcttgg

SEQ ID NO: 147266 - DNA, 15 bp, Homo sapiens
ttgtcaggcagcttg

SEQ ID NO: 147267 - DNA, 15 bp, Homo sapiens
cttgtcaggcagctt

SEQ ID NO: 147268 - DNA, 15 bp, Homo sapiens
ccttgtcaggcagct

SEQ ID NO: 147269 - DNA, 15 bp, Homo sapiens
tccttgtcaggcagc

SEQ ID NO: 147270 - DNA, 15 bp, Homo sapiens
ttccttgtcaggcag

SEQ ID NO: 147271 - DNA, 15 bp, Homo sapiens
cttccttgtcaggca

SEQ ID NO: 147272 - DNA, 15 bp, Homo sapiens
ccttccttgtcaggc

SEQ ID NO: 147273 - DNA, 15 bp, Homo sapiens
cccttccttgtcagg

SEQ ID NO: 147274 - DNA, 15 bp, Homo sapiens
ccccttccttgtcag

SEQ ID NO: 147275 - DNA, 15 bp, Homo sapiens
accccttccttgtca

SEQ ID NO: 147276 - DNA, 15 bp, Homo sapiens
caccccttccttgtc

SEQ ID NO: 147277 - DNA, 15 bp, Homo sapiens
ccaccccttccttgt

SEQ ID NO: 147278 - DNA, 15 bp, Homo sapiens
cccaccccttccttg

SEQ ID NO: 147279 - DNA, 15 bp, Homo sapiens
ccccaccccttcctt

SEQ ID NO: 147280 - DNA, 15 bp, Homo sapiens
cccccaccccttcct

SEQ ID NO: 147281 - DNA, 15 bp, Homo sapiens
tcccccaccccttcc

SEQ ID NO: 147282 - DNA, 15 bp, Homo sapiens
ctcccccaccccttc

SEQ ID NO: 147283 - DNA, 15 bp, Homo sapiens
cctcccccacccctt

SEQ ID NO: 147284 - DNA, 15 bp, Homo sapiens
ccctcccccacccct

SEQ ID NO: 147285 - DNA, 15 bp, Homo sapiens
accctcccccacccc

SEQ ID NO: 147286 - DNA, 15 bp, Homo sapiens
caccctcccccaccc

SEQ ID NO: 147287 - DNA, 15 bp, Homo sapiens
ccaccctcccccacc

SEQ ID NO: 147288 - DNA, 15 bp, Homo sapiens
tccaccctcccccac

SEQ ID NO: 147289 - DNA, 15 bp, Homo sapiens
ctccaccctccccca

SEQ ID NO: 147290 - DNA, 15 bp, Homo sapiens
cctccaccctccccc

SEQ ID NO: 147291 - DNA, 15 bp, Homo sapiens
gcctccaccctcccc

SEQ ID NO: 147292 - DNA, 15 bp, Homo sapiens
tgcctccaccctccc

SEQ ID NO: 147293 - DNA, 15 bp, Homo sapiens
ctgcctccaccctcc

SEQ ID NO: 147294 - DNA, 15 bp, Homo sapiens
cctgcctccaccctc

SEQ ID NO: 147295 - DNA, 15 bp, Homo sapiens
ccctgcctccaccct

SEQ ID NO: 147296 - DNA, 15 bp, Homo sapiens
tccctgcctccaccc

SEQ ID NO: 147297 - DNA, 15 bp, Homo sapiens
ctccctgcctccacc

SEQ ID NO: 147298 - DNA, 15 bp, Homo sapiens
cctccctgcctccac

SEQ ID NO: 147299 - DNA, 15 bp, Homo sapiens
gcctccctgcctcca

SEQ ID NO: 147300 - DNA, 15 bp, Homo sapiens
ggcctccctgcctcc

SEQ ID NO: 147301 - DNA, 15 bp, Homo sapiens
tggcctccctgcctc

SEQ ID NO: 147302 - DNA, 15 bp, Homo sapiens
ctggcctccctgcct

SEQ ID NO: 147303 - DNA, 15 bp, Homo sapiens
cctggcctccctgcc

SEQ ID NO: 147304 - DNA, 15 bp, Homo sapiens
tcctggcctccctgc

SEQ ID NO: 147305 - DNA, 15 bp, Homo sapiens
gtcctggcctccctg

SEQ ID NO: 147306 - DNA, 15 bp, Homo sapiens
ggtcctggcctccct

SEQ ID NO: 147307 - DNA, 15 bp, Homo sapiens
aggtcctggcctccc

SEQ ID NO: 147308 - DNA, 15 bp, Homo sapiens
caggtcctggcctcc

SEQ ID NO: 147309 - DNA, 15 bp, Homo sapiens
gcaggtcctggcctc

SEQ ID NO: 147310 - DNA, 15 bp, Homo sapiens
tgcaggtcctggcct

SEQ ID NO: 147311 - DNA, 15 bp, Homo sapiens
atgcaggtcctggcc

SEQ ID NO: 147312 - DNA, 15 bp, Homo sapiens
aatgcaggtcctggc

SEQ ID NO: 147313 - DNA, 15 bp, Homo sapiens
aaatgcaggtcctgg

SEQ ID NO: 147314 - DNA, 15 bp, Homo sapiens
gaaatgcaggtcctg

SEQ ID NO: 147315 - DNA, 15 bp, Homo sapiens
ggaaatgcaggtcct

SEQ ID NO: 147316 - DNA, 15 bp, Homo sapiens
tggaaatgcaggtcc

SEQ ID NO: 147317 - DNA, 15 bp, Homo sapiens
ctggaaatgcaggtc

SEQ ID NO: 147318 - DNA, 15 bp, Homo sapiens
cctggaaatgcaggt

SEQ ID NO: 147319 - DNA, 15 bp, Homo sapiens
acctggaaatgcagg

SEQ ID NO: 147320 - DNA, 15 bp, Homo sapiens
cacctggaaatgcag

SEQ ID NO: 147321 - DNA, 15 bp, Homo sapiens
tcacctggaaatgca

SEQ ID NO: 147322 - DNA, 15 bp, Homo sapiens
ctcacctggaaatgc

SEQ ID NO: 147323 - DNA, 15 bp, Homo sapiens
gctcacctggaaatg

SEQ ID NO: 147324 - DNA, 15 bp, Homo sapiens
ggctcacctggaaat

SEQ ID NO: 147325 - DNA, 15 bp, Homo sapiens
aggctcacctggaaa

SEQ ID NO: 147326 - DNA, 15 bp, Homo sapiens
caggctcacctggaa

SEQ ID NO: 147327 - DNA, 15 bp, Homo sapiens
tcaggctcacctgga

SEQ ID NO: 147328 - DNA, 15 bp, Homo sapiens
ctcaggctcacctgg

SEQ ID NO: 147329 - DNA, 15 bp, Homo sapiens
tctcaggctcacctg

SEQ ID NO: 147330 - DNA, 15 bp, Homo sapiens
gtctcaggctcacct

SEQ ID NO: 147331 - DNA, 15 bp, Homo sapiens
ggtctcaggctcacc

SEQ ID NO: 147332 - DNA, 15 bp, Homo sapiens
aggtctcaggctcac

SEQ ID NO: 147333 - DNA, 15 bp, Homo sapiens
gaggtctcaggctca

SEQ ID NO: 147334 - DNA, 15 bp, Homo sapiens
tgaggtctcaggctc

SEQ ID NO: 147335 - DNA, 15 bp, Homo sapiens
ctgaggtctcaggct

SEQ ID NO: 147336 - DNA, 15 bp, Homo sapiens
tctgaggtctcaggc

SEQ ID NO: 147337 - DNA, 15 bp, Homo sapiens
gtctgaggtctcagg

SEQ ID NO: 147338 - DNA, 15 bp, Homo sapiens
cgtctgaggtctcag

SEQ ID NO: 147339 - DNA, 15 bp, Homo sapiens
ccgtctgaggtctca

SEQ ID NO: 147340 - DNA, 15 bp, Homo sapiens
tccgtctgaggtctc

SEQ ID NO: 147341 - DNA, 15 bp, Homo sapiens
atccgtctgaggtct

SEQ ID NO: 147342 - DNA, 15 bp, Homo sapiens
catccgtctgaggtc

SEQ ID NO: 147343 - DNA, 15 bp, Homo sapiens
acatccgtctgaggt

SEQ ID NO: 147344 - DNA, 15 bp, Homo sapiens
cacatccgtctgagg

SEQ ID NO: 147345 - DNA, 15 bp, Homo sapiens
acacatccgtctgag

SEQ ID NO: 147346 - DNA, 15 bp, Homo sapiens
aacacatccgtctga

SEQ ID NO: 147347 - DNA, 15 bp, Homo sapiens
caacacatccgtctg

SEQ ID NO: 147348 - DNA, 15 bp, Homo sapiens
acaacacatccgtct

SEQ ID NO: 147349 - DNA, 15 bp, Homo sapiens
aacaacacatccgtc

SEQ ID NO: 147350 - DNA, 15 bp, Homo sapiens
aaacaacacatccgt

SEQ ID NO: 147351 - DNA, 15 bp, Homo sapiens
aaaacaacacatccg

SEQ ID NO: 147352 - DNA, 15 bp, Homo sapiens
aaaaacaacacatcc

SEQ ID NO: 147353 - DNA, 15 bp, Homo sapiens
gaaaaacaacacatc

SEQ ID NO: 147354 - DNA, 15 bp, Homo sapiens
agaaaaacaacacat

SEQ ID NO: 147355 - DNA, 15 bp, Homo sapiens
tagaaaaacaacaca

SEQ ID NO: 147356 - DNA, 15 bp, Homo sapiens
ctagaaaaacaacac

SEQ ID NO: 147357 - DNA, 15 bp, Homo sapiens
actagaaaaacaaca

SEQ ID NO: 147358 - DNA, 15 bp, Homo sapiens
aactagaaaaacaac

SEQ ID NO: 147359 - DNA, 15 bp, Homo sapiens
caactagaaaaacaa

SEQ ID NO: 147360 - DNA, 15 bp, Homo sapiens
gcaactagaaaaaca

SEQ ID NO: 147361 - DNA, 15 bp, Homo sapiens
ggcaactagaaaaac

SEQ ID NO: 147362 - DNA, 15 bp, Homo sapiens
aggcaactagaaaaa

SEQ ID NO: 147363 - DNA, 15 bp, Homo sapiens
taggcaactagaaaa

SEQ ID NO: 147364 - DNA, 15 bp, Homo sapiens
gtaggcaactagaaa

SEQ ID NO: 147365 - DNA, 15 bp, Homo sapiens
agtaggcaactagaa

SEQ ID NO: 147366 - DNA, 15 bp, Homo sapiens
aagtaggcaactaga

SEQ ID NO: 147367 - DNA, 15 bp, Homo sapiens
taagtaggcaactag

SEQ ID NO: 147368 - DNA, 15 bp, Homo sapiens
ctaagtaggcaacta

SEQ ID NO: 147369 - DNA, 15 bp, Homo sapiens
cctaagtaggcaact

SEQ ID NO: 147370 - DNA, 15 bp, Homo sapiens
acctaagtaggcaac

SEQ ID NO: 147371 - DNA, 15 bp, Homo sapiens
gacctaagtaggcaa

SEQ ID NO: 147372 - DNA, 15 bp, Homo sapiens
agacctaagtaggca

SEQ ID NO: 147373 - DNA, 15 bp, Homo sapiens
tagacctaagtaggc

SEQ ID NO: 147374 - DNA, 15 bp, Homo sapiens
gtagacctaagtagg

SEQ ID NO: 147375 - DNA, 15 bp, Homo sapiens
agtagacctaagtag

SEQ ID NO: 147376 - DNA, 15 bp, Homo sapiens
tagtagacctaagta

SEQ ID NO: 147377 - DNA, 15 bp, Homo sapiens
ttagtagacctaagt

SEQ ID NO: 147378 - DNA, 15 bp, Homo sapiens
attagtagacctaag

SEQ ID NO: 147379 - DNA, 15 bp, Homo sapiens
gattagtagacctaa

SEQ ID NO: 147380 - DNA, 15 bp, Homo sapiens
agattagtagaccta

SEQ ID NO: 147381 - DNA, 15 bp, Homo sapiens
aagattagtagacct

SEQ ID NO: 147382 - DNA, 15 bp, Homo sapiens
aaagattagtagacc

SEQ ID NO: 147383 - DNA, 15 bp, Homo sapiens
taaagattagtagac

SEQ ID NO: 147384 - DNA, 15 bp, Homo sapiens
ctaaagattagtaga

SEQ ID NO: 147385 - DNA, 15 bp, Homo sapiens
cctaaagattagtag

SEQ ID NO: 147386 - DNA, 15 bp, Homo sapiens
tcctaaagattagta

SEQ ID NO: 147387 - DNA, 15 bp, Homo sapiens
ttcctaaagattagt

SEQ ID NO: 147388 - DNA, 15 bp, Homo sapiens
cttcctaaagattag

SEQ ID NO: 147389 - DNA, 15 bp, Homo sapiens
ccttcctaaagatta

SEQ ID NO: 147390 - DNA, 15 bp, Homo sapiens
tccttcctaaagatt

SEQ ID NO: 147391 - DNA, 15 bp, Homo sapiens
ttccttcctaaagat

SEQ ID NO: 147392 - DNA, 15 bp, Homo sapiens
attccttcctaaaga

SEQ ID NO: 147393 - DNA, 15 bp, Homo sapiens
cattccttcctaaag

SEQ ID NO: 147394 - DNA, 15 bp, Homo sapiens
tcattccttcctaaa

SEQ ID NO: 147395 - DNA, 15 bp, Homo sapiens
atcattccttcctaa

SEQ ID NO: 147396 - DNA, 15 bp, Homo sapiens
tatcattccttccta

SEQ ID NO: 147397 - DNA, 15 bp, Homo sapiens
ctatcattccttcct

SEQ ID NO: 147398 - DNA, 15 bp, Homo sapiens
gctatcattccttcc

SEQ ID NO: 147399 - DNA, 15 bp, Homo sapiens
ggctatcattccttc

SEQ ID NO: 147400 - DNA, 15 bp, Homo sapiens
aggctatcattcctt

SEQ ID NO: 147401 - DNA, 15 bp, Homo sapiens
caggctatcattcct

SEQ ID NO: 147402 - DNA, 15 bp, Homo sapiens
ccaggctatcattcc

SEQ ID NO: 147403 - DNA, 15 bp, Homo sapiens
accaggctatcattc

SEQ ID NO: 147404 - DNA, 15 bp, Homo sapiens
aaccaggctatcatt

SEQ ID NO: 147405 - DNA, 15 bp, Homo sapiens
aaaccaggctatcat

SEQ ID NO: 147406 - DNA, 15 bp, Homo sapiens
taaaccaggctatca

SEQ ID NO: 147407 - DNA, 15 bp, Homo sapiens
ataaaccaggctatc

SEQ ID NO: 147408 - DNA, 15 bp, Homo sapiens
cataaaccaggctat

SEQ ID NO: 147409 - DNA, 15 bp, Homo sapiens
ccataaaccaggcta

SEQ ID NO: 147410 - DNA, 15 bp, Homo sapiens
cccataaaccaggct

SEQ ID NO: 147411 - DNA, 15 bp, Homo sapiens
tcccataaaccaggc

SEQ ID NO: 147412 - DNA, 15 bp, Homo sapiens
atcccataaaccagg

SEQ ID NO: 147413 - DNA, 15 bp, Homo sapiens
tatcccataaaccag

SEQ ID NO: 147414 - DNA, 15 bp, Homo sapiens
atatcccataaacca

SEQ ID NO: 147415 - DNA, 15 bp, Homo sapiens
catatcccataaacc

SEQ ID NO: 147416 - DNA, 15 bp, Homo sapiens
tcatatcccataaac

SEQ ID NO: 147417 - DNA, 15 bp, Homo sapiens
gtcatatcccataaa

SEQ ID NO: 147418 - DNA, 15 bp, Homo sapiens
tgtcatatcccataa

SEQ ID NO: 147419 - DNA, 15 bp, Homo sapiens
atgtcatatcccata

SEQ ID NO: 147420 - DNA, 15 bp, Homo sapiens
tatgtcatatcccat

SEQ ID NO: 147421 - DNA, 15 bp, Homo sapiens
ttatgtcatatccca

SEQ ID NO: 147422 - DNA, 15 bp, Homo sapiens
cttatgtcatatccc

SEQ ID NO: 147423 - DNA, 15 bp, Homo sapiens
acttatgtcatatcc

SEQ ID NO: 147424 - DNA, 15 bp, Homo sapiens
aacttatgtcatatc

SEQ ID NO: 147425 - DNA, 15 bp, Homo sapiens
aaacttatgtcatat

SEQ ID NO: 147426 - DNA, 15 bp, Homo sapiens
aaaacttatgtcata

SEQ ID NO: 147427 - DNA, 15 bp, Homo sapiens
aaaaacttatgtcat

SEQ ID NO: 147428 - DNA, 15 bp, Homo sapiens
gaaaaacttatgtca

SEQ ID NO: 147429 - DNA, 15 bp, Homo sapiens
agaaaaacttatgtc

SEQ ID NO: 147430 - DNA, 15 bp, Homo sapiens
tagaaaaacttatgt

SEQ ID NO: 147431 - DNA, 15 bp, Homo sapiens
ttagaaaaacttatg

SEQ ID NO: 147432 - DNA, 15 bp, Homo sapiens
tttagaaaaacttat

SEQ ID NO: 147433 - DNA, 15 bp, Homo sapiens
ttttagaaaaactta

SEQ ID NO: 147434 - DNA, 15 bp, Homo sapiens
cttttagaaaaactt

SEQ ID NO: 147435 - DNA, 15 bp, Homo sapiens
ccttttagaaaaact

SEQ ID NO: 147436 - DNA, 15 bp, Homo sapiens
cccttttagaaaaac

SEQ ID NO: 147437 - DNA, 15 bp, Homo sapiens
tcccttttagaaaaa

SEQ ID NO: 147438 - DNA, 15 bp, Homo sapiens
gtcccttttagaaaa

SEQ ID NO: 147439 - DNA, 15 bp, Homo sapiens
ggtcccttttagaaa

SEQ ID NO: 147440 - DNA, 15 bp, Homo sapiens
aggtcccttttagaa

SEQ ID NO: 147441 - DNA, 15 bp, Homo sapiens
caggtcccttttaga

SEQ ID NO: 147442 - DNA, 15 bp, Homo sapiens
tcaggtcccttttag

SEQ ID NO: 147443 - DNA, 15 bp, Homo sapiens
ctcaggtccctttta

SEQ ID NO: 147444 - DNA, 15 bp, Homo sapiens
tctcaggtccctttt

SEQ ID NO: 147445 - DNA, 15 bp, Homo sapiens
atctcaggtcccttt

SEQ ID NO: 147446 - DNA, 15 bp, Homo sapiens
catctcaggtccctt

SEQ ID NO: 147447 - DNA, 15 bp, Homo sapiens
tcatctcaggtccct

SEQ ID NO: 147448 - DNA, 15 bp, Homo sapiens
ttcatctcaggtccc

SEQ ID NO: 147449 - DNA, 15 bp, Homo sapiens
cttcatctcaggtcc

SEQ ID NO: 147450 - DNA, 15 bp, Homo sapiens
tcttcatctcaggtc

SEQ ID NO: 147451 - DNA, 15 bp, Homo sapiens
ttcttcatctcaggt

SEQ ID NO: 147452 - DNA, 15 bp, Homo sapiens
attcttcatctcagg

SEQ ID NO: 147453 - DNA, 15 bp, Homo sapiens
aattcttcatctcag

SEQ ID NO: 147454 - DNA, 15 bp, Homo sapiens
taattcttcatctca

SEQ ID NO: 147455 - DNA, 15 bp, Homo sapiens
ctaattcttcatctc

SEQ ID NO: 147456 - DNA, 15 bp, Homo sapiens
cctaattcttcatct

SEQ ID NO: 147457 - DNA, 15 bp, Homo sapiens
gcctaattcttcatc

SEQ ID NO: 147458 - DNA, 15 bp, Homo sapiens
tgcctaattcttcat

SEQ ID NO: 147459 - DNA, 15 bp, Homo sapiens
ttgcctaattcttca

SEQ ID NO: 147460 - DNA, 15 bp, Homo sapiens
gttgcctaattcttc

SEQ ID NO: 147461 - DNA, 15 bp, Homo sapiens
agttgcctaattctt

SEQ ID NO: 147462 - DNA, 15 bp, Homo sapiens
gagttgcctaattct

SEQ ID NO: 147463 - DNA, 15 bp, Homo sapiens
agagttgcctaattc

SEQ ID NO: 147464 - DNA, 15 bp, Homo sapiens
aagagttgcctaatt

SEQ ID NO: 147465 - DNA, 15 bp, Homo sapiens
aaagagttgcctaat

SEQ ID NO: 147466 - DNA, 15 bp, Homo sapiens
aaaagagttgcctaa

SEQ ID NO: 147467 - DNA, 15 bp, Homo sapiens
aaaaagagttgccta

SEQ ID NO: 147468 - DNA, 15 bp, Homo sapiens
aaaaaagagttgcct

SEQ ID NO: 147469 - DNA, 15 bp, Homo sapiens
aaaaaaagagttgcc

SEQ ID NO: 147470 - DNA, 15 bp, Homo sapiens
aaaaaaaagagttgc

SEQ ID NO: 147471 - DNA, 15 bp, Homo sapiens
caaaaaaaagagttg

SEQ ID NO: 147472 - DNA, 15 bp, Homo sapiens
ccaaaaaaaagagtt

SEQ ID NO: 147473 - DNA, 15 bp, Homo sapiens
cccaaaaaaaagagt

SEQ ID NO: 147474 - DNA, 15 bp, Homo sapiens
ccccaaaaaaaagag

SEQ ID NO: 147475 - DNA, 15 bp, Homo sapiens
cccccaaaaaaaaga

SEQ ID NO: 147476 - DNA, 15 bp, Homo sapiens
ccccccaaaaaaaag

SEQ ID NO: 147477 - DNA, 15 bp, Homo sapiens
gccccccaaaaaaaa

SEQ ID NO: 147478 - DNA, 15 bp, Homo sapiens
cgccccccaaaaaaa

SEQ ID NO: 147479 - DNA, 15 bp, Homo sapiens
ccgccccccaaaaaa

SEQ ID NO: 147480 - DNA, 15 bp, Homo sapiens
cccgccccccaaaaa

SEQ ID NO: 147481 - DNA, 15 bp, Homo sapiens
ccccgccccccaaaa

SEQ ID NO: 147482 - DNA, 15 bp, Homo sapiens
cccccgccccccaaa

SEQ ID NO: 147483 - DNA, 15 bp, Homo sapiens
tcccccgccccccaa

SEQ ID NO: 147484 - DNA, 15 bp, Homo sapiens
atcccccgcccccca

SEQ ID NO: 147485 - DNA, 15 bp, Homo sapiens
catcccccgcccccc

SEQ ID NO: 147486 - DNA, 15 bp, Homo sapiens
ccatcccccgccccc

SEQ ID NO: 147487 - DNA, 15 bp, Homo sapiens
cccatcccccgcccc

SEQ ID NO: 147488 - DNA, 15 bp, Homo sapiens
ccccatcccccgccc

SEQ ID NO: 147489 - DNA, 15 bp, Homo sapiens
accccatcccccgcc

SEQ ID NO: 147490 - DNA, 15 bp, Homo sapiens
aaccccatcccccgc

SEQ ID NO: 147491 - DNA, 15 bp, Homo sapiens
aaaccccatcccccg

SEQ ID NO: 147492 - DNA, 15 bp, Homo sapiens
aaaaccccatccccc

SEQ ID NO: 147493 - DNA, 15 bp, Homo sapiens
caaaaccccatcccc

SEQ ID NO: 147494 - DNA, 15 bp, Homo sapiens
gcaaaaccccatccc

SEQ ID NO: 147495 - DNA, 15 bp, Homo sapiens
agcaaaaccccatcc

SEQ ID NO: 147496 - DNA, 15 bp, Homo sapiens
gagcaaaaccccatc

SEQ ID NO: 147497 - DNA, 15 bp, Homo sapiens
agagcaaaaccccat

SEQ ID NO: 147498 - DNA, 15 bp, Homo sapiens
cagagcaaaacccca

SEQ ID NO: 147499 - DNA, 15 bp, Homo sapiens
acagagcaaaacccc

SEQ ID NO: 147500 - DNA, 15 bp, Homo sapiens
aacagagcaaaaccc

SEQ ID NO: 147501 - DNA, 15 bp, Homo sapiens
caacagagcaaaacc

SEQ ID NO: 147502 - DNA, 15 bp, Homo sapiens
acaacagagcaaaac

SEQ ID NO: 147503 - DNA, 15 bp, Homo sapiens
cacaacagagcaaaa

SEQ ID NO: 147504 - DNA, 15 bp, Homo sapiens
gcacaacagagcaaa

SEQ ID NO: 147505 - DNA, 15 bp, Homo sapiens
tgcacaacagagcaa

SEQ ID NO: 147506 - DNA, 15 bp, Homo sapiens
ctgcacaacagagca

SEQ ID NO: 147507 - DNA, 15 bp, Homo sapiens
cctgcacaacagagc

SEQ ID NO: 147508 - DNA, 15 bp, Homo sapiens
gcctgcacaacagag

SEQ ID NO: 147509 - DNA, 15 bp, Homo sapiens
agcctgcacaacaga

SEQ ID NO: 147510 - DNA, 15 bp, Homo sapiens
cagcctgcacaacag

SEQ ID NO: 147511 - DNA, 15 bp, Homo sapiens
ccagcctgcacaaca

SEQ ID NO: 147512 - DNA, 15 bp, Homo sapiens
tccagcctgcacaac

SEQ ID NO: 147513 - DNA, 15 bp, Homo sapiens
ctccagcctgcacaa

SEQ ID NO: 147514 - DNA, 15 bp, Homo sapiens
actccagcctgcaca

SEQ ID NO: 147515 - DNA, 15 bp, Homo sapiens
cactccagcctgcac

SEQ ID NO: 147516 - DNA, 15 bp, Homo sapiens
gcactccagcctgca

SEQ ID NO: 147517 - DNA, 15 bp, Homo sapiens
gattgcaccactgca

SEQ ID NO: 147518 - DNA, 15 bp, Homo sapiens
tgattgcaccactgc

SEQ ID NO: 147519 - DNA, 15 bp, Homo sapiens
atgattgcaccactg

SEQ ID NO: 147520 - DNA, 15 bp, Homo sapiens
tatgattgcaccact

SEQ ID NO: 147521 - DNA, 15 bp, Homo sapiens
ctatgattgcaccac

SEQ ID NO: 147522 - DNA, 15 bp, Homo sapiens
gctatgattgcacca

SEQ ID NO: 147523 - DNA, 15 bp, Homo sapiens
agctatgattgcacc

SEQ ID NO: 147524 - DNA, 15 bp, Homo sapiens
gagctatgattgcac

SEQ ID NO: 147525 - DNA, 15 bp, Homo sapiens
tgagctatgattgca

SEQ ID NO: 147526 - DNA, 15 bp, Homo sapiens
gtgagctatgattgc

SEQ ID NO: 147527 - DNA, 15 bp, Homo sapiens
agtgagctatgattg

SEQ ID NO: 147528 - DNA, 15 bp, Homo sapiens
cagtgagctatgatt

SEQ ID NO: 147529 - DNA, 15 bp, Homo sapiens
acagtgagctatgat

SEQ ID NO: 147530 - DNA, 15 bp, Homo sapiens
tacagtgagctatga

SEQ ID NO: 147531 - DNA, 15 bp, Homo sapiens
ctacagtgagctatg

SEQ ID NO: 147532 - DNA, 15 bp, Homo sapiens
gctacagtgagctat

SEQ ID NO: 147533 - DNA, 15 bp, Homo sapiens
ggctacagtgagcta

SEQ ID NO: 147534 - DNA, 15 bp, Homo sapiens
aggctacagtgagct

SEQ ID NO: 147535 - DNA, 15 bp, Homo sapiens
gaggctacagtgagc

SEQ ID NO: 147536 - DNA, 15 bp, Homo sapiens
ggaggctacagtgag

SEQ ID NO: 147537 - DNA, 15 bp, Homo sapiens
tggaggctacagtga

SEQ ID NO: 147538 - DNA, 15 bp, Homo sapiens
gtggaggctacagtg

SEQ ID NO: 147539 - DNA, 15 bp, Homo sapiens
ggtggaggctacagt

SEQ ID NO: 147540 - DNA, 15 bp, Homo sapiens
aggtggaggctacag

SEQ ID NO: 147541 - DNA, 15 bp, Homo sapiens
gaggtggaggctaca

SEQ ID NO: 147542 - DNA, 15 bp, Homo sapiens
ggaggtggaggctac

SEQ ID NO: 147543 - DNA, 15 bp, Homo sapiens
aggaggtggaggcta

SEQ ID NO: 147544 - DNA, 15 bp, Homo sapiens
caggaggtggaggct

SEQ ID NO: 147545 - DNA, 15 bp, Homo sapiens
tcaggaggtggaggc

SEQ ID NO: 147546 - DNA, 15 bp, Homo sapiens
ctcaggaggtggagg

SEQ ID NO: 147547 - DNA, 15 bp, Homo sapiens
actcaggaggtggag

SEQ ID NO: 147548 - DNA, 15 bp, Homo sapiens
aactcaggaggtgga

SEQ ID NO: 147549 - DNA, 15 bp, Homo sapiens
gaactcaggaggtgg

SEQ ID NO: 147550 - DNA, 15 bp, Homo sapiens
tgaactcaggaggtg

SEQ ID NO: 147551 - DNA, 15 bp, Homo sapiens
ttgaactcaggaggt

SEQ ID NO: 147552 - DNA, 15 bp, Homo sapiens
cttgaactcaggagg

SEQ ID NO: 147553 - DNA, 15 bp, Homo sapiens
gcttgaactcaggag

SEQ ID NO: 147554 - DNA, 15 bp, Homo sapiens
cgcttgaactcagga

SEQ ID NO: 147555 - DNA, 15 bp, Homo sapiens
tcgcttgaactcagg

SEQ ID NO: 147556 - DNA, 15 bp, Homo sapiens
gtcgcttgaactcag

SEQ ID NO: 147557 - DNA, 15 bp, Homo sapiens
tgtcgcttgaactca

SEQ ID NO: 147558 - DNA, 15 bp, Homo sapiens
atgtcgcttgaactc

SEQ ID NO: 147559 - DNA, 15 bp, Homo sapiens
tatgtcgcttgaact

SEQ ID NO: 147560 - DNA, 15 bp, Homo sapiens
ctatgtcgcttgaac

SEQ ID NO: 147561 - DNA, 15 bp, Homo sapiens
cctatgtcgcttgaa

SEQ ID NO: 147562 - DNA, 15 bp, Homo sapiens
acctatgtcgcttga

SEQ ID NO: 147563 - DNA, 15 bp, Homo sapiens
cacctatgtcgcttg

SEQ ID NO: 147564 - DNA, 15 bp, Homo sapiens
gcacctatgtcgctt

SEQ ID NO: 147565 - DNA, 15 bp, Homo sapiens
tgcacctatgtcgct

SEQ ID NO: 147566 - DNA, 15 bp, Homo sapiens
gtgcacctatgtcgc

SEQ ID NO: 147567 - DNA, 15 bp, Homo sapiens
tgtgcacctatgtcg

SEQ ID NO: 147568 - DNA, 15 bp, Homo sapiens
gtgtgcacctatgtc

SEQ ID NO: 147569 - DNA, 15 bp, Homo sapiens
ggtgtgcacctatgt

SEQ ID NO: 147570 - DNA, 15 bp, Homo sapiens
tggtgtgcacctatg

SEQ ID NO: 147571 - DNA, 15 bp, Homo sapiens
gtggtgtgcacctat

SEQ ID NO: 147572 - DNA, 15 bp, Homo sapiens
ggtggtgtgcaccta

SEQ ID NO: 147573 - DNA, 15 bp, Homo sapiens
tggtggtgtgcacct

SEQ ID NO: 147574 - DNA, 15 bp, Homo sapiens
atggtggtgtgcacc

SEQ ID NO: 147575 - DNA, 15 bp, Homo sapiens
catggtggtgtgcac

SEQ ID NO: 147576 - DNA, 15 bp, Homo sapiens
gcatggtggtgtgca

SEQ ID NO: 147577 - DNA, 15 bp, Homo sapiens
ggcatggtggtgtgc

SEQ ID NO: 147578 - DNA, 15 bp, Homo sapiens
gggcatggtggtgtg

SEQ ID NO: 147579 - DNA, 15 bp, Homo sapiens
tgggcatggtggtgt

SEQ ID NO: 147580 - DNA, 15 bp, Homo sapiens
ctgggcatggtggtg

SEQ ID NO: 147581 - DNA, 15 bp, Homo sapiens
gctgggcatggtggt

SEQ ID NO: 147582 - DNA, 15 bp, Homo sapiens
agctgggcatggtgg

SEQ ID NO: 147583 - DNA, 15 bp, Homo sapiens
tagctgggcatggtg

SEQ ID NO: 147584 - DNA, 15 bp, Homo sapiens
ttagctgggcatggt

SEQ ID NO: 147585 - DNA, 15 bp, Homo sapiens
attagctgggcatgg

SEQ ID NO: 147586 - DNA, 15 bp, Homo sapiens
aattagctgggcatg

SEQ ID NO: 147587 - DNA, 15 bp, Homo sapiens
aaattagctgggcat

SEQ ID NO: 147588 - DNA, 15 bp, Homo sapiens
aaaaaaattagctgg

SEQ ID NO: 147589 - DNA, 15 bp, Homo sapiens
taaaaaaaattagct

SEQ ID NO: 147590 - DNA, 15 bp, Homo sapiens
ttaaaaaaaattagc

SEQ ID NO: 147591 - DNA, 15 bp, Homo sapiens
attaaaaaaaattag

SEQ ID NO: 147592 - DNA, 15 bp, Homo sapiens
aattaaaaaaaatta

SEQ ID NO: 147593 - DNA, 15 bp, Homo sapiens
taattaaaaaaaatt

SEQ ID NO: 147594 - DNA, 15 bp, Homo sapiens
ttaattaaaaaaaat

SEQ ID NO: 147595 - DNA, 15 bp, Homo sapiens
cttaattaaaaaaaa

SEQ ID NO: 147596 - DNA, 15 bp, Homo sapiens
acttaattaaaaaaa

SEQ ID NO: 147597 - DNA, 15 bp, Homo sapiens
tacttaattaaaaaa

SEQ ID NO: 147598 - DNA, 15 bp, Homo sapiens
ttacttaattaaaaa

SEQ ID NO: 147599 - DNA, 15 bp, Homo sapiens
tttacttaattaaaa

SEQ ID NO: 147600 - DNA, 15 bp, Homo sapiens
atttacttaattaaa

SEQ ID NO: 147601 - DNA, 15 bp, Homo sapiens
aatttacttaattaa

SEQ ID NO: 147602 - DNA, 15 bp, Homo sapiens
aaatttacttaatta

SEQ ID NO: 147603 - DNA, 15 bp, Homo sapiens
aaaatttacttaatt

SEQ ID NO: 147604 - DNA, 15 bp, Homo sapiens
aaaaatttacttaat

SEQ ID NO: 147605 - DNA, 15 bp, Homo sapiens
aaaaaatttacttaa

SEQ ID NO: 147606 - DNA, 15 bp, Homo sapiens
caaaaaatttactta

SEQ ID NO: 147607 - DNA, 15 bp, Homo sapiens
ccaaaaaatttactt

SEQ ID NO: 147608 - DNA, 15 bp, Homo sapiens
cccaaaaaatttact

SEQ ID NO: 147609 - DNA, 15 bp, Homo sapiens
ccccaaaaaatttac

SEQ ID NO: 147610 - DNA, 15 bp, Homo sapiens
cccccaaaaaattta

SEQ ID NO: 147611 - DNA, 15 bp, Homo sapiens
acccccaaaaaattt

SEQ ID NO: 147612 - DNA, 15 bp, Homo sapiens
tacccccaaaaaatt

SEQ ID NO: 147613 - DNA, 15 bp, Homo sapiens
ctacccccaaaaaat

SEQ ID NO: 147614 - DNA, 15 bp, Homo sapiens
tctacccccaaaaaa

SEQ ID NO: 147615 - DNA, 15 bp, Homo sapiens
ttctacccccaaaaa

SEQ ID NO: 147616 - DNA, 15 bp, Homo sapiens
tttctacccccaaaa

SEQ ID NO: 147617 - DNA, 15 bp, Homo sapiens
atttctacccccaaa

SEQ ID NO: 147618 - DNA, 15 bp, Homo sapiens
catttctacccccaa

SEQ ID NO: 147619 - DNA, 15 bp, Homo sapiens
tcatttctaccccca

SEQ ID NO: 147620 - DNA, 15 bp, Homo sapiens
ctcatttctaccccc

SEQ ID NO: 147621 - DNA, 15 bp, Homo sapiens
cctcatttctacccc

SEQ ID NO: 147622 - DNA, 15 bp, Homo sapiens
acctcatttctaccc

SEQ ID NO: 147623 - DNA, 15 bp, Homo sapiens
gacctcatttctacc

SEQ ID NO: 147624 - DNA, 15 bp, Homo sapiens
agacctcatttctac

SEQ ID NO: 147625 - DNA, 15 bp, Homo sapiens
gagacctcatttcta

SEQ ID NO: 147626 - DNA, 15 bp, Homo sapiens
tgagacctcatttct

SEQ ID NO: 147627 - DNA, 15 bp, Homo sapiens
atgagacctcatttc

SEQ ID NO: 147628 - DNA, 15 bp, Homo sapiens
aatgagacctcattt

SEQ ID NO: 147629 - DNA, 15 bp, Homo sapiens
gaatgagacctcatt

SEQ ID NO: 147630 - DNA, 15 bp, Homo sapiens
agaatgagacctcat

SEQ ID NO: 147631 - DNA, 15 bp, Homo sapiens
cagaatgagacctca

SEQ ID NO: 147632 - DNA, 15 bp, Homo sapiens
acagaatgagacctc

SEQ ID NO: 147633 - DNA, 15 bp, Homo sapiens
aacagaatgagacct

SEQ ID NO: 147634 - DNA, 15 bp, Homo sapiens
caacagaatgagacc

SEQ ID NO: 147635 - DNA, 15 bp, Homo sapiens
gcaacagaatgagac

SEQ ID NO: 147636 - DNA, 15 bp, Homo sapiens
ggcaacagaatgaga

SEQ ID NO: 147637 - DNA, 15 bp, Homo sapiens
gggcaacagaatgag

SEQ ID NO: 147638 - DNA, 15 bp, Homo sapiens
tgggcaacagaatga

SEQ ID NO: 147639 - DNA, 15 bp, Homo sapiens
ctgggcaacagaatg

SEQ ID NO: 147640 - DNA, 15 bp, Homo sapiens
cctgggcaacagaat

SEQ ID NO: 147641 - DNA, 15 bp, Homo sapiens
gcctgggcaacagaa

SEQ ID NO: 147642 - DNA, 15 bp, Homo sapiens
aagaccagcctgggc

SEQ ID NO: 147643 - DNA, 15 bp, Homo sapiens
caagaccagcctggg

SEQ ID NO: 147644 - DNA, 15 bp, Homo sapiens
cagttcaagaccagc

SEQ ID NO: 147645 - DNA, 15 bp, Homo sapiens
gcagttcaagaccag

SEQ ID NO: 147646 - DNA, 15 bp, Homo sapiens
agcagttcaagacca

SEQ ID NO: 147647 - DNA, 15 bp, Homo sapiens
cagcagttcaagacc

SEQ ID NO: 147648 - DNA, 15 bp, Homo sapiens
ccagcagttcaagac

SEQ ID NO: 147649 - DNA, 15 bp, Homo sapiens
gccagcagttcaaga

SEQ ID NO: 147650 - DNA, 15 bp, Homo sapiens
ggccagcagttcaag

SEQ ID NO: 147651 - DNA, 15 bp, Homo sapiens
aggccagcagttcaa

SEQ ID NO: 147652 - DNA, 15 bp, Homo sapiens
gaggccagcagttca

SEQ ID NO: 147653 - DNA, 15 bp, Homo sapiens
tgaggccagcagttc

SEQ ID NO: 147654 - DNA, 15 bp, Homo sapiens
ttgaggccagcagtt

SEQ ID NO: 147655 - DNA, 15 bp, Homo sapiens
cttgaggccagcagt

SEQ ID NO: 147656 - DNA, 15 bp, Homo sapiens
acttgaggccagcag

SEQ ID NO: 147657 - DNA, 15 bp, Homo sapiens
cacttgaggccagca

SEQ ID NO: 147658 - DNA, 15 bp, Homo sapiens
tcacttgaggccagc

SEQ ID NO: 147659 - DNA, 15 bp, Homo sapiens
atcacttgaggccag

SEQ ID NO: 147660 - DNA, 15 bp, Homo sapiens
gatcacttgaggcca

SEQ ID NO: 147661 - DNA, 15 bp, Homo sapiens
ggatcacttgaggcc

SEQ ID NO: 147662 - DNA, 15 bp, Homo sapiens
aggatcacttgaggc

SEQ ID NO: 147663 - DNA, 15 bp, Homo sapiens
gaggatcacttgagg

SEQ ID NO: 147664 - DNA, 15 bp, Homo sapiens
aggaggatcacttga

SEQ ID NO: 147665 - DNA, 15 bp, Homo sapiens
caggaggatcacttg

SEQ ID NO: 147666 - DNA, 15 bp, Homo sapiens
gcaggaggatcactt

SEQ ID NO: 147667 - DNA, 15 bp, Homo sapiens
ggcaggaggatcact

SEQ ID NO: 147668 - DNA, 15 bp, Homo sapiens
aggcaggaggatcac

SEQ ID NO: 147669 - DNA, 15 bp, Homo sapiens
gaggcaggaggatca

SEQ ID NO: 147670 - DNA, 15 bp, Homo sapiens
tgaggcaggaggatc

SEQ ID NO: 147671 - DNA, 15 bp, Homo sapiens
ctgaggcaggaggat

SEQ ID NO: 147672 - DNA, 15 bp, Homo sapiens
gctgaggcaggagga

SEQ ID NO: 147673 - DNA, 15 bp, Homo sapiens
ggctgaggcaggagg

SEQ ID NO: 147674 - DNA, 15 bp, Homo sapiens
tactttgggaggctg

SEQ ID NO: 147675 - DNA, 15 bp, Homo sapiens
gtactttgggaggct

SEQ ID NO: 147676 - DNA, 15 bp, Homo sapiens
agtactttgggaggc

SEQ ID NO: 147677 - DNA, 15 bp, Homo sapiens
cagtactttgggagg

SEQ ID NO: 147678 - DNA, 15 bp, Homo sapiens
ccagtactttgggag

SEQ ID NO: 147679 - DNA, 15 bp, Homo sapiens
cccagtactttggga

SEQ ID NO: 147680 - DNA, 15 bp, Homo sapiens
tcccagtactttggg

SEQ ID NO: 147681 - DNA, 15 bp, Homo sapiens
atcccagtactttgg

SEQ ID NO: 147682 - DNA, 15 bp, Homo sapiens
aatcccagtactttg

SEQ ID NO: 147683 - DNA, 15 bp, Homo sapiens
taatcccagtacttt

SEQ ID NO: 147684 - DNA, 15 bp, Homo sapiens
ataatcccagtactt

SEQ ID NO: 147685 - DNA, 15 bp, Homo sapiens
tataatcccagtact

SEQ ID NO: 147686 - DNA, 15 bp, Homo sapiens
ctataatcccagtac

SEQ ID NO: 147687 - DNA, 15 bp, Homo sapiens
tctataatcccagta

SEQ ID NO: 147688 - DNA, 15 bp, Homo sapiens
ttctataatcccagt

SEQ ID NO: 147689 - DNA, 15 bp, Homo sapiens
cttctataatcccag

SEQ ID NO: 147690 - DNA, 15 bp, Homo sapiens
acttctataatccca

SEQ ID NO: 147691 - DNA, 15 bp, Homo sapiens
cacttctataatccc

SEQ ID NO: 147692 - DNA, 15 bp, Homo sapiens
tcacttctataatcc

SEQ ID NO: 147693 - DNA, 15 bp, Homo sapiens
ctcacttctataatc

SEQ ID NO: 147694 - DNA, 15 bp, Homo sapiens
gctcacttctataat

SEQ ID NO: 147695 - DNA, 15 bp, Homo sapiens
ggctcacttctataa

SEQ ID NO: 147696 - DNA, 15 bp, Homo sapiens
tggctcacttctata

SEQ ID NO: 147697 - DNA, 15 bp, Homo sapiens
gtggctcacttctat

SEQ ID NO: 147698 - DNA, 15 bp, Homo sapiens
agtggctcacttcta

SEQ ID NO: 147699 - DNA, 15 bp, Homo sapiens
cagtggctcacttct

SEQ ID NO: 147700 - DNA, 15 bp, Homo sapiens
acagtggctcacttc

SEQ ID NO: 147701 - DNA, 15 bp, Homo sapiens
cacagtggctcactt

SEQ ID NO: 147702 - DNA, 15 bp, Homo sapiens
gcacagtggctcact

SEQ ID NO: 147703 - DNA, 15 bp, Homo sapiens
gttggccaggcacag

SEQ ID NO: 147704 - DNA, 15 bp, Homo sapiens
tgttggccaggcaca

SEQ ID NO: 147705 - DNA, 15 bp, Homo sapiens
ttgttggccaggcac

SEQ ID NO: 147706 - DNA, 15 bp, Homo sapiens
gttgttggccaggca

SEQ ID NO: 147707 - DNA, 15 bp, Homo sapiens
agttgttggccaggc

SEQ ID NO: 147708 - DNA, 15 bp, Homo sapiens
aagttgttggccagg

SEQ ID NO: 147709 - DNA, 15 bp, Homo sapiens
aaagttgttggccag

SEQ ID NO: 147710 - DNA, 15 bp, Homo sapiens
aaaagttgttggcca

SEQ ID NO: 147711 - DNA, 15 bp, Homo sapiens
taaaagttgttggcc

SEQ ID NO: 147712 - DNA, 15 bp, Homo sapiens
ttaaaagttgttggc

SEQ ID NO: 147713 - DNA, 15 bp, Homo sapiens
tttaaaagttgttgg

SEQ ID NO: 147714 - DNA, 15 bp, Homo sapiens
ttttaaaagttgttg

SEQ ID NO: 147715 - DNA, 15 bp, Homo sapiens
tttttaaaagttgtt

SEQ ID NO: 147716 - DNA, 15 bp, Homo sapiens
gtttttaaaagttgt

SEQ ID NO: 147717 - DNA, 15 bp, Homo sapiens
agtttttaaaagttg

SEQ ID NO: 147718 - DNA, 15 bp, Homo sapiens
tagtttttaaaagtt

SEQ ID NO: 147719 - DNA, 15 bp, Homo sapiens
ttagtttttaaaagt

SEQ ID NO: 147720 - DNA, 15 bp, Homo sapiens
tttagtttttaaaag

SEQ ID NO: 147721 - DNA, 15 bp, Homo sapiens
ttttagtttttaaaa

SEQ ID NO: 147722 - DNA, 15 bp, Homo sapiens
attttagtttttaaa

SEQ ID NO: 147723 - DNA, 15 bp, Homo sapiens
tattttagtttttaa

SEQ ID NO: 147724 - DNA, 15 bp, Homo sapiens
ttattttagttttta

SEQ ID NO: 147725 - DNA, 15 bp, Homo sapiens
tttattttagttttt

SEQ ID NO: 147726 - DNA, 15 bp, Homo sapiens
atttattttagtttt

SEQ ID NO: 147727 - DNA, 15 bp, Homo sapiens
tatttattttagttt

SEQ ID NO: 147728 - DNA, 15 bp, Homo sapiens
atatttattttagtt

SEQ ID NO: 147729 - DNA, 15 bp, Homo sapiens
gatatttattttagt

SEQ ID NO: 147730 - DNA, 15 bp, Homo sapiens
tgatatttattttag

SEQ ID NO: 147731 - DNA, 15 bp, Homo sapiens
atgatatttatttta

SEQ ID NO: 147732 - DNA, 15 bp, Homo sapiens
catgatatttatttt

SEQ ID NO: 147733 - DNA, 15 bp, Homo sapiens
gcatgatatttattt

SEQ ID NO: 147734 - DNA, 15 bp, Homo sapiens
ggcatgatatttatt

SEQ ID NO: 147735 - DNA, 15 bp, Homo sapiens
aggcatgatatttat

SEQ ID NO: 147736 - DNA, 15 bp, Homo sapiens
caggcatgatattta

SEQ ID NO: 147737 - DNA, 15 bp, Homo sapiens
gcaggcatgatattt

SEQ ID NO: 147738 - DNA, 15 bp, Homo sapiens
agcaggcatgatatt

SEQ ID NO: 147739 - DNA, 15 bp, Homo sapiens
cagcaggcatgatat

SEQ ID NO: 147740 - DNA, 15 bp, Homo sapiens
tcagcaggcatgata

SEQ ID NO: 147741 - DNA, 15 bp, Homo sapiens
atcagcaggcatgat

SEQ ID NO: 147742 - DNA, 15 bp, Homo sapiens
aatcagcaggcatga

SEQ ID NO: 147743 - DNA, 15 bp, Homo sapiens
caatcagcaggcatg

SEQ ID NO: 147744 - DNA, 15 bp, Homo sapiens
acaatcagcaggcat

SEQ ID NO: 147745 - DNA, 15 bp, Homo sapiens
aacaatcagcaggca

SEQ ID NO: 147746 - DNA, 15 bp, Homo sapiens
aaacaatcagcaggc

SEQ ID NO: 147747 - DNA, 15 bp, Homo sapiens
aaaacaatcagcagg

SEQ ID NO: 147748 - DNA, 15 bp, Homo sapiens
aaaaacaatcagcag

SEQ ID NO: 147749 - DNA, 15 bp, Homo sapiens
aaaaaacaatcagca

SEQ ID NO: 147750 - DNA, 15 bp, Homo sapiens
gaaaaaacaatcagc

SEQ ID NO: 147751 - DNA, 15 bp, Homo sapiens
agaaaaaacaatcag

SEQ ID NO: 147752 - DNA, 15 bp, Homo sapiens
aagaaaaaacaatca

SEQ ID NO: 147753 - DNA, 15 bp, Homo sapiens
caagaaaaaacaatc

SEQ ID NO: 147754 - DNA, 15 bp, Homo sapiens
tcaagaaaaaacaat

SEQ ID NO: 147755 - DNA, 15 bp, Homo sapiens
ctcaagaaaaaacaa

SEQ ID NO: 147756 - DNA, 15 bp, Homo sapiens
tctcaagaaaaaaca

SEQ ID NO: 147757 - DNA, 15 bp, Homo sapiens
gtctcaagaaaaaac

SEQ ID NO: 147758 - DNA, 15 bp, Homo sapiens
agtctcaagaaaaaa

SEQ ID NO: 147759 - DNA, 15 bp, Homo sapiens
aagtctcaagaaaaa

SEQ ID NO: 147760 - DNA, 15 bp, Homo sapiens
gaagtctcaagaaaa

SEQ ID NO: 147761 - DNA, 15 bp, Homo sapiens
agaagtctcaagaaa

SEQ ID NO: 147762 - DNA, 15 bp, Homo sapiens
aagaagtctcaagaa

SEQ ID NO: 147763 - DNA, 15 bp, Homo sapiens
aaagaagtctcaaga

SEQ ID NO: 147764 - DNA, 15 bp, Homo sapiens
aaaagaagtctcaag

SEQ ID NO: 147765 - DNA, 15 bp, Homo sapiens
aaaaagaagtctcaa

SEQ ID NO: 147766 - DNA, 15 bp, Homo sapiens
aaaaaagaagtctca

SEQ ID NO: 147767 - DNA, 15 bp, Homo sapiens
aaaaaaagaagtctc

SEQ ID NO: 147768 - DNA, 15 bp, Homo sapiens
gaaaaaaagaagtct

SEQ ID NO: 147769 - DNA, 15 bp, Homo sapiens
agaaaaaaagaagtc

SEQ ID NO: 147770 - DNA, 15 bp, Homo sapiens
aagaaaaaaagaagt

SEQ ID NO: 147771 - DNA, 15 bp, Homo sapiens
gaagaaaaaaagaag

SEQ ID NO: 147772 - DNA, 15 bp, Homo sapiens
agaagaaaaaaagaa

SEQ ID NO: 147773 - DNA, 15 bp, Homo sapiens
gagaagaaaaaaaga

SEQ ID NO: 147774 - DNA, 15 bp, Homo sapiens
agagaagaaaaaaag

SEQ ID NO: 147775 - DNA, 15 bp, Homo sapiens
aagagaagaaaaaaa

SEQ ID NO: 147776 - DNA, 15 bp, Homo sapiens
aaagagaagaaaaaa

SEQ ID NO: 147777 - DNA, 15 bp, Homo sapiens
gaaagagaagaaaaa

SEQ ID NO: 147778 - DNA, 15 bp, Homo sapiens
tgaaagagaagaaaa

SEQ ID NO: 147779 - DNA, 15 bp, Homo sapiens
ctgaaagagaagaaa

SEQ ID NO: 147780 - DNA, 15 bp, Homo sapiens
actgaaagagaagaa

SEQ ID NO: 147781 - DNA, 15 bp, Homo sapiens
aactgaaagagaaga

SEQ ID NO: 147782 - DNA, 15 bp, Homo sapiens
aaactgaaagagaag

SEQ ID NO: 147783 - DNA, 15 bp, Homo sapiens
gaaactgaaagagaa

SEQ ID NO: 147784 - DNA, 15 bp, Homo sapiens
agaaactgaaagaga

SEQ ID NO: 147785 - DNA, 15 bp, Homo sapiens
cagaaactgaaagag

SEQ ID NO: 147786 - DNA, 15 bp, Homo sapiens
acagaaactgaaaga

SEQ ID NO: 147787 - DNA, 15 bp, Homo sapiens
aacagaaactgaaag

SEQ ID NO: 147788 - DNA, 15 bp, Homo sapiens
taacagaaactgaaa

SEQ ID NO: 147789 - DNA, 15 bp, Homo sapiens
gtaacagaaactgaa

SEQ ID NO: 147790 - DNA, 15 bp, Homo sapiens
agtaacagaaactga

SEQ ID NO: 147791 - DNA, 15 bp, Homo sapiens
tagtaacagaaactg

SEQ ID NO: 147792 - DNA, 15 bp, Homo sapiens
atagtaacagaaact

SEQ ID NO: 147793 - DNA, 15 bp, Homo sapiens
catagtaacagaaac

SEQ ID NO: 147794 - DNA, 15 bp, Homo sapiens
acatagtaacagaaa

SEQ ID NO: 147795 - DNA, 15 bp, Homo sapiens
gacatagtaacagaa

SEQ ID NO: 147796 - DNA, 15 bp, Homo sapiens
ggacatagtaacaga

SEQ ID NO: 147797 - DNA, 15 bp, Homo sapiens
gggacatagtaacag

SEQ ID NO: 147798 - DNA, 15 bp, Homo sapiens
agggacatagtaaca

SEQ ID NO: 147799 - DNA, 15 bp, Homo sapiens
gagggacatagtaac

SEQ ID NO: 147800 - DNA, 15 bp, Homo sapiens
tgagggacatagtaa

SEQ ID NO: 147801 - DNA, 15 bp, Homo sapiens
gtgagggacatagta

SEQ ID NO: 147802 - DNA, 15 bp, Homo sapiens
agtgagggacatagt

SEQ ID NO: 147803 - DNA, 15 bp, Homo sapiens
cagtgagggacatag

SEQ ID NO: 147804 - DNA, 15 bp, Homo sapiens
acagtgagggacata

SEQ ID NO: 147805 - DNA, 15 bp, Homo sapiens
gacagtgagggacat

SEQ ID NO: 147806 - DNA, 15 bp, Homo sapiens
ggacagtgagggaca

SEQ ID NO: 147807 - DNA, 15 bp, Homo sapiens
aggacagtgagggac

SEQ ID NO: 147808 - DNA, 15 bp, Homo sapiens
aaggacagtgaggga

SEQ ID NO: 147809 - DNA, 15 bp, Homo sapiens
caaggacagtgaggg

SEQ ID NO: 147810 - DNA, 15 bp, Homo sapiens
tcaaggacagtgagg

SEQ ID NO: 147811 - DNA, 15 bp, Homo sapiens
gtcaaggacagtgag

SEQ ID NO: 147812 - DNA, 15 bp, Homo sapiens
tgtcaaggacagtga

SEQ ID NO: 147813 - DNA, 15 bp, Homo sapiens
ttgtcaaggacagtg

SEQ ID NO: 147814 - DNA, 15 bp, Homo sapiens
tttgtcaaggacagt

SEQ ID NO: 147815 - DNA, 15 bp, Homo sapiens
ttttgtcaaggacag

SEQ ID NO: 147816 - DNA, 15 bp, Homo sapiens
cttttgtcaaggaca

SEQ ID NO: 147817 - DNA, 15 bp, Homo sapiens
tcttttgtcaaggac

SEQ ID NO: 147818 - DNA, 15 bp, Homo sapiens
ctcttttgtcaagga

SEQ ID NO: 147819 - DNA, 15 bp, Homo sapiens
cctcttttgtcaagg

SEQ ID NO: 147820 - DNA, 15 bp, Homo sapiens
gcctcttttgtcaag

SEQ ID NO: 147821 - DNA, 15 bp, Homo sapiens
agcctcttttgtcaa

SEQ ID NO: 147822 - DNA, 15 bp, Homo sapiens
aagcctcttttgtca

SEQ ID NO: 147823 - DNA, 15 bp, Homo sapiens
aaagcctcttttgtc

SEQ ID NO: 147824 - DNA, 15 bp, Homo sapiens
aaaagcctcttttgt

SEQ ID NO: 147825 - DNA, 15 bp, Homo sapiens
aaaaagcctcttttg

SEQ ID NO: 147826 - DNA, 15 bp, Homo sapiens
taaaaagcctctttt

SEQ ID NO: 147827 - DNA, 15 bp, Homo sapiens
ataaaaagcctcttt

SEQ ID NO: 147828 - DNA, 15 bp, Homo sapiens
cataaaaagcctctt

SEQ ID NO: 147829 - DNA, 15 bp, Homo sapiens
gcataaaaagcctct

SEQ ID NO: 147830 - DNA, 15 bp, Homo sapiens
ggcataaaaagcctc

SEQ ID NO: 147831 - DNA, 15 bp, Homo sapiens
gggcataaaaagcct

SEQ ID NO: 147832 - DNA, 15 bp, Homo sapiens
tgggcataaaaagcc

SEQ ID NO: 147833 - DNA, 15 bp, Homo sapiens
gtgggcataaaaagc

SEQ ID NO: 147834 - DNA, 15 bp, Homo sapiens
agtgggcataaaaag

SEQ ID NO: 147835 - DNA, 15 bp, Homo sapiens
cagtgggcataaaaa

SEQ ID NO: 147836 - DNA, 15 bp, Homo sapiens
acagtgggcataaaa

SEQ ID NO: 147837 - DNA, 15 bp, Homo sapiens
cacagtgggcataaa

SEQ ID NO: 147838 - DNA, 15 bp, Homo sapiens
ccacagtgggcataa

SEQ ID NO: 147839 - DNA, 15 bp, Homo sapiens
cccacagtgggcata

SEQ ID NO: 147840 - DNA, 15 bp, Homo sapiens
acccacagtgggcat

SEQ ID NO: 147841 - DNA, 15 bp, Homo sapiens
aacccacagtgggca

SEQ ID NO: 147842 - DNA, 15 bp, Homo sapiens
aaacccacagtgggc

SEQ ID NO: 147843 - DNA, 15 bp, Homo sapiens
aaaacccacagtggg

SEQ ID NO: 147844 - DNA, 15 bp, Homo sapiens
caaaacccacagtgg

SEQ ID NO: 147845 - DNA, 15 bp, Homo sapiens
gcaaaacccacagtg

SEQ ID NO: 147846 - DNA, 15 bp, Homo sapiens
tgcaaaacccacagt

SEQ ID NO: 147847 - DNA, 15 bp, Homo sapiens
ctgcaaaacccacag

SEQ ID NO: 147848 - DNA, 15 bp, Homo sapiens
cctgcaaaacccaca

SEQ ID NO: 147849 - DNA, 15 bp, Homo sapiens
acctgcaaaacccac

SEQ ID NO: 147850 - DNA, 15 bp, Homo sapiens
cacctgcaaaaccca

SEQ ID NO: 147851 - DNA, 15 bp, Homo sapiens
tcacctgcaaaaccc

SEQ ID NO: 147852 - DNA, 15 bp, Homo sapiens
atcacctgcaaaacc

SEQ ID NO: 147853 - DNA, 15 bp, Homo sapiens
tatcacctgcaaaac

SEQ ID NO: 147854 - DNA, 15 bp, Homo sapiens
ctatcacctgcaaaa

SEQ ID NO: 147855 - DNA, 15 bp, Homo sapiens
actatcacctgcaaa

SEQ ID NO: 147856 - DNA, 15 bp, Homo sapiens
aactatcacctgcaa

SEQ ID NO: 147857 - DNA, 15 bp, Homo sapiens
aaactatcacctgca

SEQ ID NO: 147858 - DNA, 15 bp, Homo sapiens
taaactatcacctgc

SEQ ID NO: 147859 - DNA, 15 bp, Homo sapiens
ctaaactatcacctg

SEQ ID NO: 147860 - DNA, 15 bp, Homo sapiens
actaaactatcacct

SEQ ID NO: 147861 - DNA, 15 bp, Homo sapiens
cactaaactatcacc

SEQ ID NO: 147862 - DNA, 15 bp, Homo sapiens
acactaaactatcac

SEQ ID NO: 147863 - DNA, 15 bp, Homo sapiens
tacactaaactatca

SEQ ID NO: 147864 - DNA, 15 bp, Homo sapiens
ctacactaaactatc

SEQ ID NO: 147865 - DNA, 15 bp, Homo sapiens
tctacactaaactat

SEQ ID NO: 147866 - DNA, 15 bp, Homo sapiens
ttctacactaaacta

SEQ ID NO: 147867 - DNA, 15 bp, Homo sapiens
attctacactaaact

SEQ ID NO: 147868 - DNA, 15 bp, Homo sapiens
cattctacactaaac

SEQ ID NO: 147869 - DNA, 15 bp, Homo sapiens
ccattctacactaaa

SEQ ID NO: 147870 - DNA, 15 bp, Homo sapiens
accattctacactaa

SEQ ID NO: 147871 - DNA, 15 bp, Homo sapiens
taccattctacacta

SEQ ID NO: 147872 - DNA, 15 bp, Homo sapiens
ctaccattctacact

SEQ ID NO: 147873 - DNA, 15 bp, Homo sapiens
actaccattctacac

SEQ ID NO: 147874 - DNA, 15 bp, Homo sapiens
cactaccattctaca

SEQ ID NO: 147875 - DNA, 15 bp, Homo sapiens
tcactaccattctac

SEQ ID NO: 147876 - DNA, 15 bp, Homo sapiens
ttcactaccattcta

SEQ ID NO: 147877 - DNA, 15 bp, Homo sapiens
tttcactaccattct

SEQ ID NO: 147878 - DNA, 15 bp, Homo sapiens
ctttcactaccattc

SEQ ID NO: 147879 - DNA, 15 bp, Homo sapiens
gctttcactaccatt

SEQ ID NO: 147880 - DNA, 15 bp, Homo sapiens
ggctttcactaccat

SEQ ID NO: 147881 - DNA, 15 bp, Homo sapiens
tggctttcactacca

SEQ ID NO: 147882 - DNA, 15 bp, Homo sapiens
atggctttcactacc

SEQ ID NO: 147883 - DNA, 15 bp, Homo sapiens
catggctttcactac

SEQ ID NO: 147884 - DNA, 15 bp, Homo sapiens
ccatggctttcacta

SEQ ID NO: 147885 - DNA, 15 bp, Homo sapiens
cccatggctttcact

SEQ ID NO: 147886 - DNA, 15 bp, Homo sapiens
gcccatggctttcac

SEQ ID NO: 147887 - DNA, 15 bp, Homo sapiens
agcccatggctttca

SEQ ID NO: 147888 - DNA, 15 bp, Homo sapiens
aagcccatggctttc

SEQ ID NO: 147889 - DNA, 15 bp, Homo sapiens
taagcccatggcttt

SEQ ID NO: 147890 - DNA, 15 bp, Homo sapiens
ctaagcccatggctt

SEQ ID NO: 147891 - DNA, 15 bp, Homo sapiens
cctaagcccatggct

SEQ ID NO: 147892 - DNA, 15 bp, Homo sapiens
ccctaagcccatggc

SEQ ID NO: 147893 - DNA, 15 bp, Homo sapiens
accctaagcccatgg

SEQ ID NO: 147894 - DNA, 15 bp, Homo sapiens
gaccctaagcccatg

SEQ ID NO: 147895 - DNA, 15 bp, Homo sapiens
tgaccctaagcccat

SEQ ID NO: 147896 - DNA, 15 bp, Homo sapiens
ctgaccctaagccca

SEQ ID NO: 147897 - DNA, 15 bp, Homo sapiens
tctgaccctaagccc

SEQ ID NO: 147898 - DNA, 15 bp, Homo sapiens
gtctgaccctaagcc

SEQ ID NO: 147899 - DNA, 15 bp, Homo sapiens
tgtctgaccctaagc

SEQ ID NO: 147900 - DNA, 15 bp, Homo sapiens
ttgtctgaccctaag

SEQ ID NO: 147901 - DNA, 15 bp, Homo sapiens
tttgtctgaccctaa

SEQ ID NO: 147902 - DNA, 15 bp, Homo sapiens
ctttgtctgacccta

SEQ ID NO: 147903 - DNA, 15 bp, Homo sapiens
gctttgtctgaccct

SEQ ID NO: 147904 - DNA, 15 bp, Homo sapiens
agctttgtctgaccc

SEQ ID NO: 147905 - DNA, 15 bp, Homo sapiens
aagctttgtctgacc

SEQ ID NO: 147906 - DNA, 15 bp, Homo sapiens
caagctttgtctgac

SEQ ID NO: 147907 - DNA, 15 bp, Homo sapiens
ccaagctttgtctga

SEQ ID NO: 147908 - DNA, 15 bp, Homo sapiens
accaagctttgtctg

SEQ ID NO: 147909 - DNA, 15 bp, Homo sapiens
aaccaagctttgtct

SEQ ID NO: 147910 - DNA, 15 bp, Homo sapiens
aaaccaagctttgtc

SEQ ID NO: 147911 - DNA, 15 bp, Homo sapiens
caaaccaagctttgt

SEQ ID NO: 147912 - DNA, 15 bp, Homo sapiens
tcaaaccaagctttg

SEQ ID NO: 147913 - DNA, 15 bp, Homo sapiens
ttcaaaccaagcttt

SEQ ID NO: 147914 - DNA, 15 bp, Homo sapiens
attcaaaccaagctt

SEQ ID NO: 147915 - DNA, 15 bp, Homo sapiens
gattcaaaccaagct

SEQ ID NO: 147916 - DNA, 15 bp, Homo sapiens
ggattcaaaccaagc

SEQ ID NO: 147917 - DNA, 15 bp, Homo sapiens
aggattcaaaccaag

SEQ ID NO: 147918 - DNA, 15 bp, Homo sapiens
caggattcaaaccaa

SEQ ID NO: 147919 - DNA, 15 bp, Homo sapiens
acaggattcaaacca

SEQ ID NO: 147920 - DNA, 15 bp, Homo sapiens
gacaggattcaaacc

SEQ ID NO: 147921 - DNA, 15 bp, Homo sapiens
ggacaggattcaaac

SEQ ID NO: 147922 - DNA, 15 bp, Homo sapiens
gggacaggattcaaa

SEQ ID NO: 147923 - DNA, 15 bp, Homo sapiens
agggacaggattcaa

SEQ ID NO: 147924 - DNA, 15 bp, Homo sapiens
tagggacaggattca

SEQ ID NO: 147925 - DNA, 15 bp, Homo sapiens
gtagggacaggattc

SEQ ID NO: 147926 - DNA, 15 bp, Homo sapiens
ggtagggacaggatt

SEQ ID NO: 147927 - DNA, 15 bp, Homo sapiens
tggtagggacaggat

SEQ ID NO: 147928 - DNA, 15 bp, Homo sapiens
gtggtagggacagga

SEQ ID NO: 147929 - DNA, 15 bp, Homo sapiens
agtggtagggacagg

SEQ ID NO: 147930 - DNA, 15 bp, Homo sapiens
cagtggtagggacag

SEQ ID NO: 147931 - DNA, 15 bp, Homo sapiens
tcagtggtagggaca

SEQ ID NO: 147932 - DNA, 15 bp, Homo sapiens
ttcagtggtagggac

SEQ ID NO: 147933 - DNA, 15 bp, Homo sapiens
gttcagtggtaggga

SEQ ID NO: 147934 - DNA, 15 bp, Homo sapiens
agttcagtggtaggg

SEQ ID NO: 147935 - DNA, 15 bp, Homo sapiens
cagttcagtggtagg

SEQ ID NO: 147936 - DNA, 15 bp, Homo sapiens
tcagttcagtggtag

SEQ ID NO: 147937 - DNA, 15 bp, Homo sapiens
gtcagttcagtggta

SEQ ID NO: 147938 - DNA, 15 bp, Homo sapiens
agtcagttcagtggt

SEQ ID NO: 147939 - DNA, 15 bp, Homo sapiens
aagtcagttcagtgg

SEQ ID NO: 147940 - DNA, 15 bp, Homo sapiens
caagtcagttcagtg

SEQ ID NO: 147941 - DNA, 15 bp, Homo sapiens
tcaagtcagttcagt

SEQ ID NO: 147942 - DNA, 15 bp, Homo sapiens
atcaagtcagttcag

SEQ ID NO: 147943 - DNA, 15 bp, Homo sapiens
aatcaagtcagttca

SEQ ID NO: 147944 - DNA, 15 bp, Homo sapiens
caatcaagtcagttc

SEQ ID NO: 147945 - DNA, 15 bp, Homo sapiens
acaatcaagtcagtt

SEQ ID NO: 147946 - DNA, 15 bp, Homo sapiens
gacaatcaagtcagt

SEQ ID NO: 147947 - DNA, 15 bp, Homo sapiens
tgacaatcaagtcag

SEQ ID NO: 147948 - DNA, 15 bp, Homo sapiens
gtgacaatcaagtca

SEQ ID NO: 147949 - DNA, 15 bp, Homo sapiens
ggtgacaatcaagtc

SEQ ID NO: 147950 - DNA, 15 bp, Homo sapiens
aggtgacaatcaagt

SEQ ID NO: 147951 - DNA, 15 bp, Homo sapiens
taggtgacaatcaag

SEQ ID NO: 147952 - DNA, 15 bp, Homo sapiens
ctaggtgacaatcaa

SEQ ID NO: 147953 - DNA, 15 bp, Homo sapiens
tctaggtgacaatca

SEQ ID NO: 147954 - DNA, 15 bp, Homo sapiens
gtctaggtgacaatc

SEQ ID NO: 147955 - DNA, 15 bp, Homo sapiens
agtctaggtgacaat

SEQ ID NO: 147956 - DNA, 15 bp, Homo sapiens
tagtctaggtgacaa

SEQ ID NO: 147957 - DNA, 15 bp, Homo sapiens
ctagtctaggtgaca

SEQ ID NO: 147958 - DNA, 15 bp, Homo sapiens
tctagtctaggtgac

SEQ ID NO: 147959 - DNA, 15 bp, Homo sapiens
ctctagtctaggtga

SEQ ID NO: 147960 - DNA, 15 bp, Homo sapiens
cctctagtctaggtg

SEQ ID NO: 147961 - DNA, 15 bp, Homo sapiens
tcctctagtctaggt

SEQ ID NO: 147962 - DNA, 15 bp, Homo sapiens
ctcctctagtctagg

SEQ ID NO: 147963 - DNA, 15 bp, Homo sapiens
gctcctctagtctag

SEQ ID NO: 147964 - DNA, 15 bp, Homo sapiens
tgctcctctagtcta

SEQ ID NO: 147965 - DNA, 15 bp, Homo sapiens
ttgctcctctagtct

SEQ ID NO: 147966 - DNA, 15 bp, Homo sapiens
gttgctcctctagtc

SEQ ID NO: 147967 - DNA, 15 bp, Homo sapiens
agttgctcctctagt

SEQ ID NO: 147968 - DNA, 15 bp, Homo sapiens
gagttgctcctctag

SEQ ID NO: 147969 - DNA, 15 bp, Homo sapiens
ggagttgctcctcta

SEQ ID NO: 147970 - DNA, 15 bp, Homo sapiens
aggagttgctcctct

SEQ ID NO: 147971 - DNA, 15 bp, Homo sapiens
taggagttgctcctc

SEQ ID NO: 147972 - DNA, 15 bp, Homo sapiens
ctaggagttgctcct

SEQ ID NO: 147973 - DNA, 15 bp, Homo sapiens
gctaggagttgctcc

SEQ ID NO: 147974 - DNA, 15 bp, Homo sapiens
tgctaggagttgctc

SEQ ID NO: 147975 - DNA, 15 bp, Homo sapiens
atgctaggagttgct

SEQ ID NO: 147976 - DNA, 15 bp, Homo sapiens
aatgctaggagttgc

SEQ ID NO: 147977 - DNA, 15 bp, Homo sapiens
gaatgctaggagttg

SEQ ID NO: 147978 - DNA, 15 bp, Homo sapiens
tgaatgctaggagtt

SEQ ID NO: 147979 - DNA, 15 bp, Homo sapiens
gtgaatgctaggagt

SEQ ID NO: 147980 - DNA, 15 bp, Homo sapiens
agtgaatgctaggag

SEQ ID NO: 147981 - DNA, 15 bp, Homo sapiens
aagtgaatgctagga

SEQ ID NO: 147982 - DNA, 15 bp, Homo sapiens
gaagtgaatgctagg

SEQ ID NO: 147983 - DNA, 15 bp, Homo sapiens
ggaagtgaatgctag

SEQ ID NO: 147984 - DNA, 15 bp, Homo sapiens
aggaagtgaatgcta

SEQ ID NO: 147985 - DNA, 15 bp, Homo sapiens
gaggaagtgaatgct

SEQ ID NO: 147986 - DNA, 15 bp, Homo sapiens
cgaggaagtgaatgc

SEQ ID NO: 147987 - DNA, 15 bp, Homo sapiens
ccgaggaagtgaatg

SEQ ID NO: 147988 - DNA, 15 bp, Homo sapiens
cccgaggaagtgaat

SEQ ID NO: 147989 - DNA, 15 bp, Homo sapiens
ccccgaggaagtgaa

SEQ ID NO: 147990 - DNA, 15 bp, Homo sapiens
gccccgaggaagtga

SEQ ID NO: 147991 - DNA, 15 bp, Homo sapiens
ggccccgaggaagtg

SEQ ID NO: 147992 - DNA, 15 bp, Homo sapiens
tggccccgaggaagt

SEQ ID NO: 147993 - DNA, 15 bp, Homo sapiens
ctggccccgaggaag

SEQ ID NO: 147994 - DNA, 15 bp, Homo sapiens
cctggccccgaggaa

SEQ ID NO: 147995 - DNA, 15 bp, Homo sapiens
tcctggccccgagga

SEQ ID NO: 147996 - DNA, 15 bp, Homo sapiens
gtcctggccccgagg

SEQ ID NO: 147997 - DNA, 15 bp, Homo sapiens
tgtcctggccccgag

SEQ ID NO: 147998 - DNA, 15 bp, Homo sapiens
ttgtcctggccccga

SEQ ID NO: 147999 - DNA, 15 bp, Homo sapiens
cttgtcctggccccg

SEQ ID NO: 148000 - DNA, 15 bp, Homo sapiens
acttgtcctggcccc

SEQ ID NO: 148001 - DNA, 15 bp, Homo sapiens
aacttgtcctggccc

SEQ ID NO: 148002 - DNA, 15 bp, Homo sapiens
caacttgtcctggcc

SEQ ID NO: 148003 - DNA, 15 bp, Homo sapiens
ccaacttgtcctggc

SEQ ID NO: 148004 - DNA, 15 bp, Homo sapiens
gccaacttgtcctgg

SEQ ID NO: 148005 - DNA, 15 bp, Homo sapiens
tgccaacttgtcctg

SEQ ID NO: 148006 - DNA, 15 bp, Homo sapiens
atgccaacttgtcct

SEQ ID NO: 148007 - DNA, 15 bp, Homo sapiens
gatgccaacttgtcc

SEQ ID NO: 148008 - DNA, 15 bp, Homo sapiens
ggatgccaacttgtc

SEQ ID NO: 148009 - DNA, 15 bp, Homo sapiens
aggatgccaacttgt

SEQ ID NO: 148010 - DNA, 15 bp, Homo sapiens
caggatgccaacttg

SEQ ID NO: 148011 - DNA, 15 bp, Homo sapiens
gcaggatgccaactt

SEQ ID NO: 148012 - DNA, 15 bp, Homo sapiens
agcaggatgccaact

SEQ ID NO: 148013 - DNA, 15 bp, Homo sapiens
cagcaggatgccaac

SEQ ID NO: 148014 - DNA, 15 bp, Homo sapiens
gcagcaggatgccaa

SEQ ID NO: 148015 - DNA, 15 bp, Homo sapiens
tgcagcaggatgcca

SEQ ID NO: 148016 - DNA, 15 bp, Homo sapiens
gtgcagcaggatgcc

SEQ ID NO: 148017 - DNA, 15 bp, Homo sapiens
tgtgcagcaggatgc

SEQ ID NO: 148018 - DNA, 15 bp, Homo sapiens
gtgtgcagcaggatg

SEQ ID NO: 148019 - DNA, 15 bp, Homo sapiens
tgtgtgcagcaggat

SEQ ID NO: 148020 - DNA, 15 bp, Homo sapiens
ctgtgtgcagcagga

SEQ ID NO: 148021 - DNA, 15 bp, Homo sapiens
cctgtgtgcagcagg

SEQ ID NO: 148022 - DNA, 15 bp, Homo sapiens
ccctgtgtgcagcag

SEQ ID NO: 148023 - DNA, 15 bp, Homo sapiens
gccctgtgtgcagca

SEQ ID NO: 148024 - DNA, 15 bp, Homo sapiens
tgccctgtgtgcagc

SEQ ID NO: 148025 - DNA, 15 bp, Homo sapiens
ttgccctgtgtgcag

SEQ ID NO: 148026 - DNA, 15 bp, Homo sapiens
gttgccctgtgtgca

SEQ ID NO: 148027 - DNA, 15 bp, Homo sapiens
ggttgccctgtgtgc

SEQ ID NO: 148028 - DNA, 15 bp, Homo sapiens
aggttgccctgtgtg

SEQ ID NO: 148029 - DNA, 15 bp, Homo sapiens
caggttgccctgtgt

SEQ ID NO: 148030 - DNA, 15 bp, Homo sapiens
ccaggttgccctgtg

SEQ ID NO: 148031 - DNA, 15 bp, Homo sapiens
tccaggttgccctgt

SEQ ID NO: 148032 - DNA, 15 bp, Homo sapiens
ctccaggttgccctg

SEQ ID NO: 148033 - DNA, 15 bp, Homo sapiens
tctccaggttgccct

SEQ ID NO: 148034 - DNA, 15 bp, Homo sapiens
ttctccaggttgccc

SEQ ID NO: 148035 - DNA, 15 bp, Homo sapiens
attctccaggttgcc

SEQ ID NO: 148036 - DNA, 15 bp, Homo sapiens
gattctccaggttgc

SEQ ID NO: 148037 - DNA, 15 bp, Homo sapiens
tgattctccaggttg

SEQ ID NO: 148038 - DNA, 15 bp, Homo sapiens
ttgattctccaggtt

SEQ ID NO: 148039 - DNA, 15 bp, Homo sapiens
cttgattctccaggt

SEQ ID NO: 148040 - DNA, 15 bp, Homo sapiens
tcttgattctccagg

SEQ ID NO: 148041 - DNA, 15 bp, Homo sapiens
ctcttgattctccag

SEQ ID NO: 148042 - DNA, 15 bp, Homo sapiens
tctcttgattctcca

SEQ ID NO: 148043 - DNA, 15 bp, Homo sapiens
ttctcttgattctcc

SEQ ID NO: 148044 - DNA, 15 bp, Homo sapiens
cttctcttgattctc

SEQ ID NO: 148045 - DNA, 15 bp, Homo sapiens
ccttctcttgattct

SEQ ID NO: 148046 - DNA, 15 bp, Homo sapiens
gccttctcttgattc

SEQ ID NO: 148047 - DNA, 15 bp, Homo sapiens
agccttctcttgatt

SEQ ID NO: 148048 - DNA, 15 bp, Homo sapiens
cagccttctcttgat

SEQ ID NO: 148049 - DNA, 15 bp, Homo sapiens
gcagccttctcttga

SEQ ID NO: 148050 - DNA, 15 bp, Homo sapiens
ggcagccttctcttg

SEQ ID NO: 148051 - DNA, 15 bp, Homo sapiens
tggcagccttctctt

SEQ ID NO: 148052 - DNA, 15 bp, Homo sapiens
ctggcagccttctct

SEQ ID NO: 148053 - DNA, 15 bp, Homo sapiens
gctggcagccttctc

SEQ ID NO: 148054 - DNA, 15 bp, Homo sapiens
ggctggcagccttct

SEQ ID NO: 148055 - DNA, 15 bp, Homo sapiens
aggctggcagccttc

SEQ ID NO: 148056 - DNA, 15 bp, Homo sapiens
gaggctggcagcctt

SEQ ID NO: 148057 - DNA, 15 bp, Homo sapiens
tgaggctggcagcct

SEQ ID NO: 148058 - DNA, 15 bp, Homo sapiens
ctgaggctggcagcc

SEQ ID NO: 148059 - DNA, 15 bp, Homo sapiens
tctgaggctggcagc

SEQ ID NO: 148060 - DNA, 15 bp, Homo sapiens
atctgaggctggcag

SEQ ID NO: 148061 - DNA, 15 bp, Homo sapiens
catctgaggctggca

SEQ ID NO: 148062 - DNA, 15 bp, Homo sapiens
gcatctgaggctggc

SEQ ID NO: 148063 - DNA, 15 bp, Homo sapiens
ggcatctgaggctgg

SEQ ID NO: 148064 - DNA, 15 bp, Homo sapiens
tggcatctgaggctg

SEQ ID NO: 148065 - DNA, 15 bp, Homo sapiens
ctggcatctgaggct

SEQ ID NO: 148066 - DNA, 15 bp, Homo sapiens
actggcatctgaggc

SEQ ID NO: 148067 - DNA, 15 bp, Homo sapiens
cactggcatctgagg

SEQ ID NO: 148068 - DNA, 15 bp, Homo sapiens
ccactggcatctgag

SEQ ID NO: 148069 - DNA, 15 bp, Homo sapiens
gccactggcatctga

SEQ ID NO: 148070 - DNA, 15 bp, Homo sapiens
agccactggcatctg

SEQ ID NO: 148071 - DNA, 15 bp, Homo sapiens
gagccactggcatct

SEQ ID NO: 148072 - DNA, 15 bp, Homo sapiens
ggagccactggcatc

SEQ ID NO: 148073 - DNA, 15 bp, Homo sapiens
gggagccactggcat

SEQ ID NO: 148074 - DNA, 15 bp, Homo sapiens
agggagccactggca

SEQ ID NO: 148075 - DNA, 15 bp, Homo sapiens
tagggagccactggc

SEQ ID NO: 148076 - DNA, 15 bp, Homo sapiens
ctagggagccactgg

SEQ ID NO: 148077 - DNA, 15 bp, Homo sapiens
cctagggagccactg

SEQ ID NO: 148078 - DNA, 15 bp, Homo sapiens
tcctagggagccact

SEQ ID NO: 148079 - DNA, 15 bp, Homo sapiens
ttcctagggagccac

SEQ ID NO: 148080 - DNA, 15 bp, Homo sapiens
tttcctagggagcca

SEQ ID NO: 148081 - DNA, 15 bp, Homo sapiens
ctttcctagggagcc

SEQ ID NO: 148082 - DNA, 15 bp, Homo sapiens
tctttcctagggagc

SEQ ID NO: 148083 - DNA, 15 bp, Homo sapiens
atctttcctagggag

SEQ ID NO: 148084 - DNA, 15 bp, Homo sapiens
tatctttcctaggga

SEQ ID NO: 148085 - DNA, 15 bp, Homo sapiens
ctatctttcctaggg

SEQ ID NO: 148086 - DNA, 15 bp, Homo sapiens
actatctttcctagg

SEQ ID NO: 148087 - DNA, 15 bp, Homo sapiens
cactatctttcctag

SEQ ID NO: 148088 - DNA, 15 bp, Homo sapiens
acactatctttccta

SEQ ID NO: 148089 - DNA, 15 bp, Homo sapiens
aacactatctttcct

SEQ ID NO: 148090 - DNA, 15 bp, Homo sapiens
taacactatctttcc

SEQ ID NO: 148091 - DNA, 15 bp, Homo sapiens
ctaacactatctttc

SEQ ID NO: 148092 - DNA, 15 bp, Homo sapiens
actaacactatcttt

SEQ ID NO: 148093 - DNA, 15 bp, Homo sapiens
aactaacactatctt

SEQ ID NO: 148094 - DNA, 15 bp, Homo sapiens
caactaacactatct

SEQ ID NO: 148095 - DNA, 15 bp, Homo sapiens
ccaactaacactatc

SEQ ID NO: 148096 - DNA, 15 bp, Homo sapiens
accaactaacactat

SEQ ID NO: 148097 - DNA, 15 bp, Homo sapiens
gaccaactaacacta

SEQ ID NO: 148098 - DNA, 15 bp, Homo sapiens
ggaccaactaacact

SEQ ID NO: 148099 - DNA, 15 bp, Homo sapiens
gggaccaactaacac

SEQ ID NO: 148100 - DNA, 15 bp, Homo sapiens
ggggaccaactaaca

SEQ ID NO: 148101 - DNA, 15 bp, Homo sapiens
tggggaccaactaac

SEQ ID NO: 148102 - DNA, 15 bp, Homo sapiens
ctggggaccaactaa

SEQ ID NO: 148103 - DNA, 15 bp, Homo sapiens
actggggaccaacta

SEQ ID NO: 148104 - DNA, 15 bp, Homo sapiens
tactggggaccaact

SEQ ID NO: 148105 - DNA, 15 bp, Homo sapiens
ttactggggaccaac

SEQ ID NO: 148106 - DNA, 15 bp, Homo sapiens
attactggggaccaa

SEQ ID NO: 148107 - DNA, 15 bp, Homo sapiens
tattactggggacca

SEQ ID NO: 148108 - DNA, 15 bp, Homo sapiens
atattactggggacc

SEQ ID NO: 148109 - DNA, 15 bp, Homo sapiens
gatattactggggac

SEQ ID NO: 148110 - DNA, 15 bp, Homo sapiens
agatattactgggga

SEQ ID NO: 148111 - DNA, 15 bp, Homo sapiens
cagatattactgggg

SEQ ID NO: 148112 - DNA, 15 bp, Homo sapiens
ccagatattactggg

SEQ ID NO: 148113 - DNA, 15 bp, Homo sapiens
gccagatattactgg

SEQ ID NO: 148114 - DNA, 15 bp, Homo sapiens
ggccagatattactg

SEQ ID NO: 148115 - DNA, 15 bp, Homo sapiens
aggccagatattact

SEQ ID NO: 148116 - DNA, 15 bp, Homo sapiens
aaggccagatattac

SEQ ID NO: 148117 - DNA, 15 bp, Homo sapiens
aaaggccagatatta

SEQ ID NO: 148118 - DNA, 15 bp, Homo sapiens
taaaggccagatatt

SEQ ID NO: 148119 - DNA, 15 bp, Homo sapiens
ataaaggccagatat

SEQ ID NO: 148120 - DNA, 15 bp, Homo sapiens
gataaaggccagata

SEQ ID NO: 148121 - DNA, 15 bp, Homo sapiens
tgataaaggccagat

SEQ ID NO: 148122 - DNA, 15 bp, Homo sapiens
gtgataaaggccaga

SEQ ID NO: 148123 - DNA, 15 bp, Homo sapiens
tgtgataaaggccag

SEQ ID NO: 148124 - DNA, 15 bp, Homo sapiens
gtgtgataaaggcca

SEQ ID NO: 148125 - DNA, 15 bp, Homo sapiens
tgtgtgataaaggcc

SEQ ID NO: 148126 - DNA, 15 bp, Homo sapiens
gtgtgtgataaaggc

SEQ ID NO: 148127 - DNA, 15 bp, Homo sapiens
ggtgtgtgataaagg

SEQ ID NO: 148128 - DNA, 15 bp, Homo sapiens
aggtgtgtgataaag

SEQ ID NO: 148129 - DNA, 15 bp, Homo sapiens
aaggtgtgtgataaa

SEQ ID NO: 148130 - DNA, 15 bp, Homo sapiens
aaaggtgtgtgataa

SEQ ID NO: 148131 - DNA, 15 bp, Homo sapiens
taaaggtgtgtgata

SEQ ID NO: 148132 - DNA, 15 bp, Homo sapiens
ataaaggtgtgtgat

SEQ ID NO: 148133 - DNA, 15 bp, Homo sapiens
cataaaggtgtgtga

SEQ ID NO: 148134 - DNA, 15 bp, Homo sapiens
acataaaggtgtgtg

SEQ ID NO: 148135 - DNA, 15 bp, Homo sapiens
cacataaaggtgtgt

SEQ ID NO: 148136 - DNA, 15 bp, Homo sapiens
acacataaaggtgtg

SEQ ID NO: 148137 - DNA, 15 bp, Homo sapiens
gacacataaaggtgt

SEQ ID NO: 148138 - DNA, 15 bp, Homo sapiens
tgacacataaaggtg

SEQ ID NO: 148139 - DNA, 15 bp, Homo sapiens
ctgacacataaaggt

SEQ ID NO: 148140 - DNA, 15 bp, Homo sapiens
cctgacacataaagg

SEQ ID NO: 148141 - DNA, 15 bp, Homo sapiens
gcctgacacataaag

SEQ ID NO: 148142 - DNA, 15 bp, Homo sapiens
tgcctgacacataaa

SEQ ID NO: 148143 - DNA, 15 bp, Homo sapiens
gtgcctgacacataa

SEQ ID NO: 148144 - DNA, 15 bp, Homo sapiens
ggtgcctgacacata

SEQ ID NO: 148145 - DNA, 15 bp, Homo sapiens
cggtgcctgacacat

SEQ ID NO: 148146 - DNA, 15 bp, Homo sapiens
acggtgcctgacaca

SEQ ID NO: 148147 - DNA, 15 bp, Homo sapiens
aacggtgcctgacac

SEQ ID NO: 148148 - DNA, 15 bp, Homo sapiens
caacggtgcctgaca

SEQ ID NO: 148149 - DNA, 15 bp, Homo sapiens
acaacggtgcctgac

SEQ ID NO: 148150 - DNA, 15 bp, Homo sapiens
cacaacggtgcctga

SEQ ID NO: 148151 - DNA, 15 bp, Homo sapiens
tcacaacggtgcctg

SEQ ID NO: 148152 - DNA, 15 bp, Homo sapiens
ctcacaacggtgcct

SEQ ID NO: 148153 - DNA, 15 bp, Homo sapiens
gctcacaacggtgcc

SEQ ID NO: 148154 - DNA, 15 bp, Homo sapiens
tgctcacaacggtgc

SEQ ID NO: 148155 - DNA, 15 bp, Homo sapiens
ttgctcacaacggtg

SEQ ID NO: 148156 - DNA, 15 bp, Homo sapiens
attgctcacaacggt

SEQ ID NO: 148157 - DNA, 15 bp, Homo sapiens
aattgctcacaacgg

SEQ ID NO: 148158 - DNA, 15 bp, Homo sapiens
gaattgctcacaacg

SEQ ID NO: 148159 - DNA, 15 bp, Homo sapiens
tgaattgctcacaac

SEQ ID NO: 148160 - DNA, 15 bp, Homo sapiens
gtgaattgctcacaa

SEQ ID NO: 148161 - DNA, 15 bp, Homo sapiens
tgtgaattgctcaca

SEQ ID NO: 148162 - DNA, 15 bp, Homo sapiens
atgtgaattgctcac

SEQ ID NO: 148163 - DNA, 15 bp, Homo sapiens
aatgtgaattgctca

SEQ ID NO: 148164 - DNA, 15 bp, Homo sapiens
taatgtgaattgctc

SEQ ID NO: 148165 - DNA, 15 bp, Homo sapiens
ctaatgtgaattgct

SEQ ID NO: 148166 - DNA, 15 bp, Homo sapiens
actaatgtgaattgc

SEQ ID NO: 148167 - DNA, 15 bp, Homo sapiens
gactaatgtgaattg

SEQ ID NO: 148168 - DNA, 15 bp, Homo sapiens
ggactaatgtgaatt

SEQ ID NO: 148169 - DNA, 15 bp, Homo sapiens
aggactaatgtgaat

SEQ ID NO: 148170 - DNA, 15 bp, Homo sapiens
caggactaatgtgaa

SEQ ID NO: 148171 - DNA, 15 bp, Homo sapiens
ccaggactaatgtga

SEQ ID NO: 148172 - DNA, 15 bp, Homo sapiens
tccaggactaatgtg

SEQ ID NO: 148173 - DNA, 15 bp, Homo sapiens
ctccaggactaatgt

SEQ ID NO: 148174 - DNA, 15 bp, Homo sapiens
cctccaggactaatg

SEQ ID NO: 148175 - DNA, 15 bp, Homo sapiens
gcctccaggactaat

SEQ ID NO: 148176 - DNA, 15 bp, Homo sapiens
tgcctccaggactaa

SEQ ID NO: 148177 - DNA, 15 bp, Homo sapiens
ctgcctccaggacta

SEQ ID NO: 148178 - DNA, 15 bp, Homo sapiens
cctgcctccaggact

SEQ ID NO: 148179 - DNA, 15 bp, Homo sapiens
tcctgcctccaggac

SEQ ID NO: 148180 - DNA, 15 bp, Homo sapiens
ttcctgcctccagga

SEQ ID NO: 148181 - DNA, 15 bp, Homo sapiens
tttcctgcctccagg

SEQ ID NO: 148182 - DNA, 15 bp, Homo sapiens
atttcctgcctccag

SEQ ID NO: 148183 - DNA, 15 bp, Homo sapiens
catttcctgcctcca

SEQ ID NO: 148184 - DNA, 15 bp, Homo sapiens
acatttcctgcctcc

SEQ ID NO: 148185 - DNA, 15 bp, Homo sapiens
gacatttcctgcctc

SEQ ID NO: 148186 - DNA, 15 bp, Homo sapiens
tgacatttcctgcct

SEQ ID NO: 148187 - DNA, 15 bp, Homo sapiens
atgacatttcctgcc

SEQ ID NO: 148188 - DNA, 15 bp, Homo sapiens
aatgacatttcctgc

SEQ ID NO: 148189 - DNA, 15 bp, Homo sapiens
taatgacatttcctg

SEQ ID NO: 148190 - DNA, 15 bp, Homo sapiens
ttaatgacatttcct

SEQ ID NO: 148191 - DNA, 15 bp, Homo sapiens
gttaatgacatttcc

SEQ ID NO: 148192 - DNA, 15 bp, Homo sapiens
ggttaatgacatttc

SEQ ID NO: 148193 - DNA, 15 bp, Homo sapiens
aggttaatgacattt

SEQ ID NO: 148194 - DNA, 15 bp, Homo sapiens
gaggttaatgacatt

SEQ ID NO: 148195 - DNA, 15 bp, Homo sapiens
tgaggttaatgacat

SEQ ID NO: 148196 - DNA, 15 bp, Homo sapiens
atgaggttaatgaca

SEQ ID NO: 148197 - DNA, 15 bp, Homo sapiens
catgaggttaatgac

SEQ ID NO: 148198 - DNA, 15 bp, Homo sapiens
acatgaggttaatga

SEQ ID NO: 148199 - DNA, 15 bp, Homo sapiens
aacatgaggttaatg

SEQ ID NO: 148200 - DNA, 15 bp, Homo sapiens
caacatgaggttaat

SEQ ID NO: 148201 - DNA, 15 bp, Homo sapiens
gcaacatgaggttaa

SEQ ID NO: 148202 - DNA, 15 bp, Homo sapiens
tgcaacatgaggtta

SEQ ID NO: 148203 - DNA, 15 bp, Homo sapiens
ctgcaacatgaggtt

SEQ ID NO: 148204 - DNA, 15 bp, Homo sapiens
cctgcaacatgaggt

SEQ ID NO: 148205 - DNA, 15 bp, Homo sapiens
acctgcaacatgagg

SEQ ID NO: 148206 - DNA, 15 bp, Homo sapiens
tacctgcaacatgag

SEQ ID NO: 148207 - DNA, 15 bp, Homo sapiens
ctacctgcaacatga

SEQ ID NO: 148208 - DNA, 15 bp, Homo sapiens
cctacctgcaacatg

SEQ ID NO: 148209 - DNA, 15 bp, Homo sapiens
ccctacctgcaacat

SEQ ID NO: 148210 - DNA, 15 bp, Homo sapiens
cccctacctgcaaca

SEQ ID NO: 148211 - DNA, 15 bp, Homo sapiens
tcccctacctgcaac

SEQ ID NO: 148212 - DNA, 15 bp, Homo sapiens
ttcccctacctgcaa

SEQ ID NO: 148213 - DNA, 15 bp, Homo sapiens
gttcccctacctgca

SEQ ID NO: 148214 - DNA, 15 bp, Homo sapiens
agttcccctacctgc

SEQ ID NO: 148215 - DNA, 15 bp, Homo sapiens
cagttcccctacctg

SEQ ID NO: 148216 - DNA, 15 bp, Homo sapiens
tcagttcccctacct

SEQ ID NO: 148217 - DNA, 15 bp, Homo sapiens
ctcagttcccctacc

SEQ ID NO: 148218 - DNA, 15 bp, Homo sapiens
cctcagttcccctac

SEQ ID NO: 148219 - DNA, 15 bp, Homo sapiens
acctcagttccccta

SEQ ID NO: 148220 - DNA, 15 bp, Homo sapiens
aacctcagttcccct

SEQ ID NO: 148221 - DNA, 15 bp, Homo sapiens
taacctcagttcccc

SEQ ID NO: 148222 - DNA, 15 bp, Homo sapiens
ttaacctcagttccc

SEQ ID NO: 148223 - DNA, 15 bp, Homo sapiens
cttaacctcagttcc

SEQ ID NO: 148224 - DNA, 15 bp, Homo sapiens
acttaacctcagttc

SEQ ID NO: 148225 - DNA, 15 bp, Homo sapiens
tacttaacctcagtt

SEQ ID NO: 148226 - DNA, 15 bp, Homo sapiens
ttacttaacctcagt

SEQ ID NO: 148227 - DNA, 15 bp, Homo sapiens
gttacttaacctcag

SEQ ID NO: 148228 - DNA, 15 bp, Homo sapiens
agttacttaacctca

SEQ ID NO: 148229 - DNA, 15 bp, Homo sapiens
aagttacttaacctc

SEQ ID NO: 148230 - DNA, 15 bp, Homo sapiens
caagttacttaacct

SEQ ID NO: 148231 - DNA, 15 bp, Homo sapiens
acaagttacttaacc

SEQ ID NO: 148232 - DNA, 15 bp, Homo sapiens
gacaagttacttaac

SEQ ID NO: 148233 - DNA, 15 bp, Homo sapiens
agacaagttacttaa

SEQ ID NO: 148234 - DNA, 15 bp, Homo sapiens
tagacaagttactta

SEQ ID NO: 148235 - DNA, 15 bp, Homo sapiens
ttagacaagttactt

SEQ ID NO: 148236 - DNA, 15 bp, Homo sapiens
cttagacaagttact

SEQ ID NO: 148237 - DNA, 15 bp, Homo sapiens
ccttagacaagttac

SEQ ID NO: 148238 - DNA, 15 bp, Homo sapiens
gccttagacaagtta

SEQ ID NO: 148239 - DNA, 15 bp, Homo sapiens
ggccttagacaagtt

SEQ ID NO: 148240 - DNA, 15 bp, Homo sapiens
tggccttagacaagt

SEQ ID NO: 148241 - DNA, 15 bp, Homo sapiens
gtggccttagacaag

SEQ ID NO: 148242 - DNA, 15 bp, Homo sapiens
tgtggccttagacaa

SEQ ID NO: 148243 - DNA, 15 bp, Homo sapiens
gtgtggccttagaca

SEQ ID NO: 148244 - DNA, 15 bp, Homo sapiens
tgtgtggccttagac

SEQ ID NO: 148245 - DNA, 15 bp, Homo sapiens
atgtgtggccttaga

SEQ ID NO: 148246 - DNA, 15 bp, Homo sapiens
catgtgtggccttag

SEQ ID NO: 148247 - DNA, 15 bp, Homo sapiens
acatgtgtggcctta

SEQ ID NO: 148248 - DNA, 15 bp, Homo sapiens
tacatgtgtggcctt

SEQ ID NO: 148249 - DNA, 15 bp, Homo sapiens
ctacatgtgtggcct

SEQ ID NO: 148250 - DNA, 15 bp, Homo sapiens
gctacatgtgtggcc

SEQ ID NO: 148251 - DNA, 15 bp, Homo sapiens
tgctacatgtgtggc

SEQ ID NO: 148252 - DNA, 15 bp, Homo sapiens
ttgctacatgtgtgg

SEQ ID NO: 148253 - DNA, 15 bp, Homo sapiens
cttgctacatgtgtg

SEQ ID NO: 148254 - DNA, 15 bp, Homo sapiens
acttgctacatgtgt

SEQ ID NO: 148255 - DNA, 15 bp, Homo sapiens
cacttgctacatgtg

SEQ ID NO: 148256 - DNA, 15 bp, Homo sapiens
ccacttgctacatgt

SEQ ID NO: 148257 - DNA, 15 bp, Homo sapiens
gccacttgctacatg

SEQ ID NO: 148258 - DNA, 15 bp, Homo sapiens
tgccacttgctacat

SEQ ID NO: 148259 - DNA, 15 bp, Homo sapiens
ctgccacttgctaca

SEQ ID NO: 148260 - DNA, 15 bp, Homo sapiens
tctgccacttgctac

SEQ ID NO: 148261 - DNA, 15 bp, Homo sapiens
ctctgccacttgcta

SEQ ID NO: 148262 - DNA, 15 bp, Homo sapiens
cctctgccacttgct

SEQ ID NO: 148263 - DNA, 15 bp, Homo sapiens
gcctctgccacttgc

SEQ ID NO: 148264 - DNA, 15 bp, Homo sapiens
tgcctctgccacttg

SEQ ID NO: 148265 - DNA, 15 bp, Homo sapiens
ctgcctctgccactt

SEQ ID NO: 148266 - DNA, 15 bp, Homo sapiens
cctgcctctgccact

SEQ ID NO: 148267 - DNA, 15 bp, Homo sapiens
tcctgcctctgccac

SEQ ID NO: 148268 - DNA, 15 bp, Homo sapiens
atcctgcctctgcca

SEQ ID NO: 148269 - DNA, 15 bp, Homo sapiens
aatcctgcctctgcc

SEQ ID NO: 148270 - DNA, 15 bp, Homo sapiens
aaatcctgcctctgc

SEQ ID NO: 148271 - DNA, 15 bp, Homo sapiens
caaatcctgcctctg

SEQ ID NO: 148272 - DNA, 15 bp, Homo sapiens
tcaaatcctgcctct

SEQ ID NO: 148273 - DNA, 15 bp, Homo sapiens
ttcaaatcctgcctc

SEQ ID NO: 148274 - DNA, 15 bp, Homo sapiens
attcaaatcctgcct

SEQ ID NO: 148275 - DNA, 15 bp, Homo sapiens
gattcaaatcctgcc

SEQ ID NO: 148276 - DNA, 15 bp, Homo sapiens
tgattcaaatcctgc

SEQ ID NO: 148277 - DNA, 15 bp, Homo sapiens
ctgattcaaatcctg

SEQ ID NO: 148278 - DNA, 15 bp, Homo sapiens
cctgattcaaatcct

SEQ ID NO: 148279 - DNA, 15 bp, Homo sapiens
gcctgattcaaatcc

SEQ ID NO: 148280 - DNA, 15 bp, Homo sapiens
tgcctgattcaaatc

SEQ ID NO: 148281 - DNA, 15 bp, Homo sapiens
ctgcctgattcaaat

SEQ ID NO: 148282 - DNA, 15 bp, Homo sapiens
gctgcctgattcaaa

SEQ ID NO: 148283 - DNA, 15 bp, Homo sapiens
ggctgcctgattcaa

SEQ ID NO: 148284 - DNA, 15 bp, Homo sapiens
gggctgcctgattca

SEQ ID NO: 148285 - DNA, 15 bp, Homo sapiens
tgggctgcctgattc

SEQ ID NO: 148286 - DNA, 15 bp, Homo sapiens
ttgggctgcctgatt

SEQ ID NO: 148287 - DNA, 15 bp, Homo sapiens
attgggctgcctgat

SEQ ID NO: 148288 - DNA, 15 bp, Homo sapiens
cattgggctgcctga

SEQ ID NO: 148289 - DNA, 15 bp, Homo sapiens
gcattgggctgcctg

SEQ ID NO: 148290 - DNA, 15 bp, Homo sapiens
ggcattgggctgcct

SEQ ID NO: 148291 - DNA, 15 bp, Homo sapiens
tggcattgggctgcc

SEQ ID NO: 148292 - DNA, 15 bp, Homo sapiens
ctggcattgggctgc

SEQ ID NO: 148293 - DNA, 15 bp, Homo sapiens
actggcattgggctg

SEQ ID NO: 148294 - DNA, 15 bp, Homo sapiens
cactggcattgggct

SEQ ID NO: 148295 - DNA, 15 bp, Homo sapiens
acactggcattgggc

SEQ ID NO: 148296 - DNA, 15 bp, Homo sapiens
gacactggcattggg

SEQ ID NO: 148297 - DNA, 15 bp, Homo sapiens
agacactggcattgg

SEQ ID NO: 148298 - DNA, 15 bp, Homo sapiens
cagacactggcattg

SEQ ID NO: 148299 - DNA, 15 bp, Homo sapiens
gcagacactggcatt

SEQ ID NO: 148300 - DNA, 15 bp, Homo sapiens
tgcagacactggcat

SEQ ID NO: 148301 - DNA, 15 bp, Homo sapiens
gtgcagacactggca

SEQ ID NO: 148302 - DNA, 15 bp, Homo sapiens
agtgcagacactggc

SEQ ID NO: 148303 - DNA, 15 bp, Homo sapiens
aagtgcagacactgg

SEQ ID NO: 148304 - DNA, 15 bp, Homo sapiens
taagtgcagacactg

SEQ ID NO: 148305 - DNA, 15 bp, Homo sapiens
ctaagtgcagacact

SEQ ID NO: 148306 - DNA, 15 bp, Homo sapiens
tctaagtgcagacac

SEQ ID NO: 148307 - DNA, 15 bp, Homo sapiens
ttctaagtgcagaca

SEQ ID NO: 148308 - DNA, 15 bp, Homo sapiens
attctaagtgcagac

SEQ ID NO: 148309 - DNA, 15 bp, Homo sapiens
gattctaagtgcaga

SEQ ID NO: 148310 - DNA, 15 bp, Homo sapiens
tgattctaagtgcag

SEQ ID NO: 148311 - DNA, 15 bp, Homo sapiens
gtgattctaagtgca

SEQ ID NO: 148312 - DNA, 15 bp, Homo sapiens
agtgattctaagtgc

SEQ ID NO: 148313 - DNA, 15 bp, Homo sapiens
cagtgattctaagtg

SEQ ID NO: 148314 - DNA, 15 bp, Homo sapiens
tcagtgattctaagt

SEQ ID NO: 148315 - DNA, 15 bp, Homo sapiens
ctcagtgattctaag

SEQ ID NO: 148316 - DNA, 15 bp, Homo sapiens
tctcagtgattctaa

SEQ ID NO: 148317 - DNA, 15 bp, Homo sapiens
ctctcagtgattcta

SEQ ID NO: 148318 - DNA, 15 bp, Homo sapiens
gctctcagtgattct

SEQ ID NO: 148319 - DNA, 15 bp, Homo sapiens
ggctctcagtgattc

SEQ ID NO: 148320 - DNA, 15 bp, Homo sapiens
tggctctcagtgatt

SEQ ID NO: 148321 - DNA, 15 bp, Homo sapiens
atggctctcagtgat

SEQ ID NO: 148322 - DNA, 15 bp, Homo sapiens
tatggctctcagtga

SEQ ID NO: 148323 - DNA, 15 bp, Homo sapiens
atatggctctcagtg

SEQ ID NO: 148324 - DNA, 15 bp, Homo sapiens
aatatggctctcagt

SEQ ID NO: 148325 - DNA, 15 bp, Homo sapiens
caatatggctctcag

SEQ ID NO: 148326 - DNA, 15 bp, Homo sapiens
gcaatatggctctca

SEQ ID NO: 148327 - DNA, 15 bp, Homo sapiens
ggcaatatggctctc

SEQ ID NO: 148328 - DNA, 15 bp, Homo sapiens
aggcaatatggctct

SEQ ID NO: 148329 - DNA, 15 bp, Homo sapiens
aaggcaatatggctc

SEQ ID NO: 148330 - DNA, 15 bp, Homo sapiens
aaaggcaatatggct

SEQ ID NO: 148331 - DNA, 15 bp, Homo sapiens
gaaaggcaatatggc

SEQ ID NO: 148332 - DNA, 15 bp, Homo sapiens
agaaaggcaatatgg

SEQ ID NO: 148333 - DNA, 15 bp, Homo sapiens
cagaaaggcaatatg

SEQ ID NO: 148334 - DNA, 15 bp, Homo sapiens
tcagaaaggcaatat

SEQ ID NO: 148335 - DNA, 15 bp, Homo sapiens
ctcagaaaggcaata

SEQ ID NO: 148336 - DNA, 15 bp, Homo sapiens
cctcagaaaggcaat

SEQ ID NO: 148337 - DNA, 15 bp, Homo sapiens
ccctcagaaaggcaa

SEQ ID NO: 148338 - DNA, 15 bp, Homo sapiens
gccctcagaaaggca

SEQ ID NO: 148339 - DNA, 15 bp, Homo sapiens
agccctcagaaaggc

SEQ ID NO: 148340 - DNA, 15 bp, Homo sapiens
cagccctcagaaagg

SEQ ID NO: 148341 - DNA, 15 bp, Homo sapiens
acagccctcagaaag

SEQ ID NO: 148342 - DNA, 15 bp, Homo sapiens
aacagccctcagaaa

SEQ ID NO: 148343 - DNA, 15 bp, Homo sapiens
gaacagccctcagaa

SEQ ID NO: 148344 - DNA, 15 bp, Homo sapiens
agaacagccctcaga

SEQ ID NO: 148345 - DNA, 15 bp, Homo sapiens
aagaacagccctcag

SEQ ID NO: 148346 - DNA, 15 bp, Homo sapiens
caagaacagccctca

SEQ ID NO: 148347 - DNA, 15 bp, Homo sapiens
tcaagaacagccctc

SEQ ID NO: 148348 - DNA, 15 bp, Homo sapiens
atcaagaacagccct

SEQ ID NO: 148349 - DNA, 15 bp, Homo sapiens
gatcaagaacagccc

SEQ ID NO: 148350 - DNA, 15 bp, Homo sapiens
agatcaagaacagcc

SEQ ID NO: 148351 - DNA, 15 bp, Homo sapiens
cagatcaagaacagc

SEQ ID NO: 148352 - DNA, 15 bp, Homo sapiens
tcagatcaagaacag

SEQ ID NO: 148353 - DNA, 15 bp, Homo sapiens
ctcagatcaagaaca

SEQ ID NO: 148354 - DNA, 15 bp, Homo sapiens
tctcagatcaagaac

SEQ ID NO: 148355 - DNA, 15 bp, Homo sapiens
ctctcagatcaagaa

SEQ ID NO: 148356 - DNA, 15 bp, Homo sapiens
tctctcagatcaaga

SEQ ID NO: 148357 - DNA, 15 bp, Homo sapiens
gtctctcagatcaag

SEQ ID NO: 148358 - DNA, 15 bp, Homo sapiens
agtctctcagatcaa

SEQ ID NO: 148359 - DNA, 15 bp, Homo sapiens
tagtctctcagatca

SEQ ID NO: 148360 - DNA, 15 bp, Homo sapiens
ctagtctctcagatc

SEQ ID NO: 148361 - DNA, 15 bp, Homo sapiens
tctagtctctcagat

SEQ ID NO: 148362 - DNA, 15 bp, Homo sapiens
ctctagtctctcaga

SEQ ID NO: 148363 - DNA, 15 bp, Homo sapiens
actctagtctctcag

SEQ ID NO: 148364 - DNA, 15 bp, Homo sapiens
gactctagtctctca

SEQ ID NO: 148365 - DNA, 15 bp, Homo sapiens
ggactctagtctctc

SEQ ID NO: 148366 - DNA, 15 bp, Homo sapiens
aggactctagtctct

SEQ ID NO: 148367 - DNA, 15 bp, Homo sapiens
gaggactctagtctc

SEQ ID NO: 148368 - DNA, 15 bp, Homo sapiens
agaggactctagtct

SEQ ID NO: 148369 - DNA, 15 bp, Homo sapiens
cagaggactctagtc

SEQ ID NO: 148370 - DNA, 15 bp, Homo sapiens
acagaggactctagt

SEQ ID NO: 148371 - DNA, 15 bp, Homo sapiens
gacagaggactctag

SEQ ID NO: 148372 - DNA, 15 bp, Homo sapiens
tgacagaggactcta

SEQ ID NO: 148373 - DNA, 15 bp, Homo sapiens
ttgacagaggactct

SEQ ID NO: 148374 - DNA, 15 bp, Homo sapiens
cttgacagaggactc

SEQ ID NO: 148375 - DNA, 15 bp, Homo sapiens
tcttgacagaggact

SEQ ID NO: 148376 - DNA, 15 bp, Homo sapiens
ctcttgacagaggac

SEQ ID NO: 148377 - DNA, 15 bp, Homo sapiens
gctcttgacagagga

SEQ ID NO: 148378 - DNA, 15 bp, Homo sapiens
agctcttgacagagg

SEQ ID NO: 148379 - DNA, 15 bp, Homo sapiens
tagctcttgacagag

SEQ ID NO: 148380 - DNA, 15 bp, Homo sapiens
ctagctcttgacaga

SEQ ID NO: 148381 - DNA, 15 bp, Homo sapiens
actagctcttgacag

SEQ ID NO: 148382 - DNA, 15 bp, Homo sapiens
tactagctcttgaca

SEQ ID NO: 148383 - DNA, 15 bp, Homo sapiens
gtactagctcttgac

SEQ ID NO: 148384 - DNA, 15 bp, Homo sapiens
agtactagctcttga

SEQ ID NO: 148385 - DNA, 15 bp, Homo sapiens
cagtactagctcttg

SEQ ID NO: 148386 - DNA, 15 bp, Homo sapiens
ccagtactagctctt

SEQ ID NO: 148387 - DNA, 15 bp, Homo sapiens
cccagtactagctct

SEQ ID NO: 148388 - DNA, 15 bp, Homo sapiens
gcccagtactagctc

SEQ ID NO: 148389 - DNA, 15 bp, Homo sapiens
tgcccagtactagct

SEQ ID NO: 148390 - DNA, 15 bp, Homo sapiens
ctgcccagtactagc

SEQ ID NO: 148391 - DNA, 15 bp, Homo sapiens
gctgcccagtactag

SEQ ID NO: 148392 - DNA, 15 bp, Homo sapiens
ggctgcccagtacta

SEQ ID NO: 148393 - DNA, 15 bp, Homo sapiens
gggctgcccagtact

SEQ ID NO: 148394 - DNA, 15 bp, Homo sapiens
agggctgcccagtac

SEQ ID NO: 148395 - DNA, 15 bp, Homo sapiens
cagggctgcccagta

SEQ ID NO: 148396 - DNA, 15 bp, Homo sapiens
ccagggctgcccagt

SEQ ID NO: 148397 - DNA, 15 bp, Homo sapiens
cccagggctgcccag

SEQ ID NO: 148398 - DNA, 15 bp, Homo sapiens
ccccagggctgccca

SEQ ID NO: 148399 - DNA, 15 bp, Homo sapiens
cccccagggctgccc

SEQ ID NO: 148400 - DNA, 15 bp, Homo sapiens
gcccccagggctgcc

SEQ ID NO: 148401 - DNA, 15 bp, Homo sapiens
agcccccagggctgc

SEQ ID NO: 148402 - DNA, 15 bp, Homo sapiens
cagcccccagggctg

SEQ ID NO: 148403 - DNA, 15 bp, Homo sapiens
ccagcccccagggct

SEQ ID NO: 148404 - DNA, 15 bp, Homo sapiens
cccagcccccagggc

SEQ ID NO: 148405 - DNA, 15 bp, Homo sapiens
acccagcccccaggg

SEQ ID NO: 148406 - DNA, 15 bp, Homo sapiens
aacccagcccccagg

SEQ ID NO: 148407 - DNA, 15 bp, Homo sapiens
caacccagcccccag

SEQ ID NO: 148408 - DNA, 15 bp, Homo sapiens
acaacccagccccca

SEQ ID NO: 148409 - DNA, 15 bp, Homo sapiens
cacaacccagccccc

SEQ ID NO: 148410 - DNA, 15 bp, Homo sapiens
ccacaacccagcccc

SEQ ID NO: 148411 - DNA, 15 bp, Homo sapiens
cccacaacccagccc

SEQ ID NO: 148412 - DNA, 15 bp, Homo sapiens
ccccacaacccagcc

SEQ ID NO: 148413 - DNA, 15 bp, Homo sapiens
accccacaacccagc

SEQ ID NO: 148414 - DNA, 15 bp, Homo sapiens
caccccacaacccag

SEQ ID NO: 148415 - DNA, 15 bp, Homo sapiens
acaccccacaaccca

SEQ ID NO: 148416 - DNA, 15 bp, Homo sapiens
cacaccccacaaccc

SEQ ID NO: 148417 - DNA, 15 bp, Homo sapiens
ccacaccccacaacc

SEQ ID NO: 148418 - DNA, 15 bp, Homo sapiens
cccacaccccacaac

SEQ ID NO: 148419 - DNA, 15 bp, Homo sapiens
gcccacaccccacaa

SEQ ID NO: 148420 - DNA, 15 bp, Homo sapiens
agcccacaccccaca

SEQ ID NO: 148421 - DNA, 15 bp, Homo sapiens
cagcccacaccccac

SEQ ID NO: 148422 - DNA, 15 bp, Homo sapiens
acagcccacacccca

SEQ ID NO: 148423 - DNA, 15 bp, Homo sapiens
cacagcccacacccc

SEQ ID NO: 148424 - DNA, 15 bp, Homo sapiens
ccacagcccacaccc

SEQ ID NO: 148425 - DNA, 15 bp, Homo sapiens
tccacagcccacacc

SEQ ID NO: 148426 - DNA, 15 bp, Homo sapiens
ttccacagcccacac

SEQ ID NO: 148427 - DNA, 15 bp, Homo sapiens
cttccacagcccaca

SEQ ID NO: 148428 - DNA, 15 bp, Homo sapiens
ccttccacagcccac

SEQ ID NO: 148429 - DNA, 15 bp, Homo sapiens
tccttccacagccca

SEQ ID NO: 148430 - DNA, 15 bp, Homo sapiens
ctccttccacagccc

SEQ ID NO: 148431 - DNA, 15 bp, Homo sapiens
actccttccacagcc

SEQ ID NO: 148432 - DNA, 15 bp, Homo sapiens
tactccttccacagc

SEQ ID NO: 148433 - DNA, 15 bp, Homo sapiens
ttactccttccacag

SEQ ID NO: 148434 - DNA, 15 bp, Homo sapiens
cttactccttccaca

SEQ ID NO: 148435 - DNA, 15 bp, Homo sapiens
ccttactccttccac

SEQ ID NO: 148436 - DNA, 15 bp, Homo sapiens
cccttactccttcca

SEQ ID NO: 148437 - DNA, 15 bp, Homo sapiens
tcccttactccttcc

SEQ ID NO: 148438 - DNA, 15 bp, Homo sapiens
ctcccttactccttc

SEQ ID NO: 148439 - DNA, 15 bp, Homo sapiens
cctcccttactcctt

SEQ ID NO: 148440 - DNA, 15 bp, Homo sapiens
acctcccttactcct

SEQ ID NO: 148441 - DNA, 15 bp, Homo sapiens
cacctcccttactcc

SEQ ID NO: 148442 - DNA, 15 bp, Homo sapiens
gcacctcccttactc

SEQ ID NO: 148443 - DNA, 15 bp, Homo sapiens
agcacctcccttact

SEQ ID NO: 148444 - DNA, 15 bp, Homo sapiens
aagcacctcccttac

SEQ ID NO: 148445 - DNA, 15 bp, Homo sapiens
aaagcacctccctta

SEQ ID NO: 148446 - DNA, 15 bp, Homo sapiens
gaaagcacctccctt

SEQ ID NO: 148447 - DNA, 15 bp, Homo sapiens
agaaagcacctccct

SEQ ID NO: 148448 - DNA, 15 bp, Homo sapiens
cagaaagcacctccc

SEQ ID NO: 148449 - DNA, 15 bp, Homo sapiens
gcagaaagcacctcc

SEQ ID NO: 148450 - DNA, 15 bp, Homo sapiens
agcagaaagcacctc

SEQ ID NO: 148451 - DNA, 15 bp, Homo sapiens
cagcagaaagcacct

SEQ ID NO: 148452 - DNA, 15 bp, Homo sapiens
acagcagaaagcacc

SEQ ID NO: 148453 - DNA, 15 bp, Homo sapiens
cacagcagaaagcac

SEQ ID NO: 148454 - DNA, 15 bp, Homo sapiens
acacagcagaaagca

SEQ ID NO: 148455 - DNA, 15 bp, Homo sapiens
tacacagcagaaagc

SEQ ID NO: 148456 - DNA, 15 bp, Homo sapiens
ttacacagcagaaag

SEQ ID NO: 148457 - DNA, 15 bp, Homo sapiens
attacacagcagaaa

SEQ ID NO: 148458 - DNA, 15 bp, Homo sapiens
cattacacagcagaa

SEQ ID NO: 148459 - DNA, 15 bp, Homo sapiens
ccattacacagcaga

SEQ ID NO: 148460 - DNA, 15 bp, Homo sapiens
cccattacacagcag

SEQ ID NO: 148461 - DNA, 15 bp, Homo sapiens
ccccattacacagca

SEQ ID NO: 148462 - DNA, 15 bp, Homo sapiens
gccccattacacagc

SEQ ID NO: 148463 - DNA, 15 bp, Homo sapiens
tgccccattacacag

SEQ ID NO: 148464 - DNA, 15 bp, Homo sapiens
ctgccccattacaca

SEQ ID NO: 148465 - DNA, 15 bp, Homo sapiens
cctgccccattacac

SEQ ID NO: 148466 - DNA, 15 bp, Homo sapiens
acctgccccattaca

SEQ ID NO: 148467 - DNA, 15 bp, Homo sapiens
cacctgccccattac

SEQ ID NO: 148468 - DNA, 15 bp, Homo sapiens
ccacctgccccatta

SEQ ID NO: 148469 - DNA, 15 bp, Homo sapiens
accacctgccccatt

SEQ ID NO: 148470 - DNA, 15 bp, Homo sapiens
aaccacctgccccat

SEQ ID NO: 148471 - DNA, 15 bp, Homo sapiens
caaccacctgcccca

SEQ ID NO: 148472 - DNA, 15 bp, Homo sapiens
ccaaccacctgcccc

SEQ ID NO: 148473 - DNA, 15 bp, Homo sapiens
cccaaccacctgccc

SEQ ID NO: 148474 - DNA, 15 bp, Homo sapiens
acccaaccacctgcc

SEQ ID NO: 148475 - DNA, 15 bp, Homo sapiens
cacccaaccacctgc

SEQ ID NO: 148476 - DNA, 15 bp, Homo sapiens
acacccaaccacctg

SEQ ID NO: 148477 - DNA, 15 bp, Homo sapiens
cacacccaaccacct

SEQ ID NO: 148478 - DNA, 15 bp, Homo sapiens
tcacacccaaccacc

SEQ ID NO: 148479 - DNA, 15 bp, Homo sapiens
ttcacacccaaccac

SEQ ID NO: 148480 - DNA, 15 bp, Homo sapiens
gttcacacccaacca

SEQ ID NO: 148481 - DNA, 15 bp, Homo sapiens
agttcacacccaacc

SEQ ID NO: 148482 - DNA, 15 bp, Homo sapiens
gagttcacacccaac

SEQ ID NO: 148483 - DNA, 15 bp, Homo sapiens
cgagttcacacccaa

SEQ ID NO: 148484 - DNA, 15 bp, Homo sapiens
gcgagttcacaccca

SEQ ID NO: 148485 - DNA, 15 bp, Homo sapiens
ggcgagttcacaccc

SEQ ID NO: 148486 - DNA, 15 bp, Homo sapiens
aggcgagttcacacc

SEQ ID NO: 148487 - DNA, 15 bp, Homo sapiens
caggcgagttcacac

SEQ ID NO: 148488 - DNA, 15 bp, Homo sapiens
tcaggcgagttcaca

SEQ ID NO: 148489 - DNA, 15 bp, Homo sapiens
gtcaggcgagttcac

SEQ ID NO: 148490 - DNA, 15 bp, Homo sapiens
agtcaggcgagttca

SEQ ID NO: 148491 - DNA, 15 bp, Homo sapiens
aagtcaggcgagttc

SEQ ID NO: 148492 - DNA, 15 bp, Homo sapiens
taagtcaggcgagtt

SEQ ID NO: 148493 - DNA, 15 bp, Homo sapiens
gtaagtcaggcgagt

SEQ ID NO: 148494 - DNA, 15 bp, Homo sapiens
cgtaagtcaggcgag

SEQ ID NO: 148495 - DNA, 15 bp, Homo sapiens
ccgtaagtcaggcga

SEQ ID NO: 148496 - DNA, 15 bp, Homo sapiens
gccgtaagtcaggcg

SEQ ID NO: 148497 - DNA, 15 bp, Homo sapiens
ggccgtaagtcaggc

SEQ ID NO: 148498 - DNA, 15 bp, Homo sapiens
gggccgtaagtcagg

SEQ ID NO: 148499 - DNA, 15 bp, Homo sapiens
ggggccgtaagtcag

SEQ ID NO: 148500 - DNA, 15 bp, Homo sapiens
tggggccgtaagtca

SEQ ID NO: 148501 - DNA, 15 bp, Homo sapiens
ctggggccgtaagtc

SEQ ID NO: 148502 - DNA, 15 bp, Homo sapiens
gctggggccgtaagt

SEQ ID NO: 148503 - DNA, 15 bp, Homo sapiens
agctggggccgtaag

SEQ ID NO: 148504 - DNA, 15 bp, Homo sapiens
cagctggggccgtaa

SEQ ID NO: 148505 - DNA, 15 bp, Homo sapiens
acagctggggccgta

SEQ ID NO: 148506 - DNA, 15 bp, Homo sapiens
aacagctggggccgt

SEQ ID NO: 148507 - DNA, 15 bp, Homo sapiens
aaacagctggggccg

SEQ ID NO: 148508 - DNA, 15 bp, Homo sapiens
gaaacagctggggcc

SEQ ID NO: 148509 - DNA, 15 bp, Homo sapiens
ggaaacagctggggc

SEQ ID NO: 148510 - DNA, 15 bp, Homo sapiens
aggaaacagctgggg

SEQ ID NO: 148511 - DNA, 15 bp, Homo sapiens
gaggaaacagctggg

SEQ ID NO: 148512 - DNA, 15 bp, Homo sapiens
agaggaaacagctgg

SEQ ID NO: 148513 - DNA, 15 bp, Homo sapiens
aagaggaaacagctg

SEQ ID NO: 148514 - DNA, 15 bp, Homo sapiens
gaagaggaaacagct

SEQ ID NO: 148515 - DNA, 15 bp, Homo sapiens
agaagaggaaacagc

SEQ ID NO: 148516 - DNA, 15 bp, Homo sapiens
tagaagaggaaacag

SEQ ID NO: 148517 - DNA, 15 bp, Homo sapiens
ttagaagaggaaaca

SEQ ID NO: 148518 - DNA, 15 bp, Homo sapiens
gttagaagaggaaac

SEQ ID NO: 148519 - DNA, 15 bp, Homo sapiens
agttagaagaggaaa

SEQ ID NO: 148520 - DNA, 15 bp, Homo sapiens
gagttagaagaggaa

SEQ ID NO: 148521 - DNA, 15 bp, Homo sapiens
ggagttagaagagga

SEQ ID NO: 148522 - DNA, 15 bp, Homo sapiens
aggagttagaagagg

SEQ ID NO: 148523 - DNA, 15 bp, Homo sapiens
gaggagttagaagag

SEQ ID NO: 148524 - DNA, 15 bp, Homo sapiens
ggaggagttagaaga

SEQ ID NO: 148525 - DNA, 15 bp, Homo sapiens
aggaggagttagaag

SEQ ID NO: 148526 - DNA, 15 bp, Homo sapiens
gaggaggagttagaa

SEQ ID NO: 148527 - DNA, 15 bp, Homo sapiens
ggaggaggagttaga

SEQ ID NO: 148528 - DNA, 15 bp, Homo sapiens
gggaggaggagttag

SEQ ID NO: 148529 - DNA, 15 bp, Homo sapiens
tgggaggaggagtta

SEQ ID NO: 148530 - DNA, 15 bp, Homo sapiens
ctgggaggaggagtt

SEQ ID NO: 148531 - DNA, 15 bp, Homo sapiens
tctgggaggaggagt

SEQ ID NO: 148532 - DNA, 15 bp, Homo sapiens
atctgggaggaggag

SEQ ID NO: 148533 - DNA, 15 bp, Homo sapiens
catctgggaggagga

SEQ ID NO: 148534 - DNA, 15 bp, Homo sapiens
gcatctgggaggagg

SEQ ID NO: 148535 - DNA, 15 bp, Homo sapiens
ggcatctgggaggag

SEQ ID NO: 148536 - DNA, 15 bp, Homo sapiens
aggcatctgggagga

SEQ ID NO: 148537 - DNA, 15 bp, Homo sapiens
caggcatctgggagg

SEQ ID NO: 148538 - DNA, 15 bp, Homo sapiens
gcaggcatctgggag

SEQ ID NO: 148539 - DNA, 15 bp, Homo sapiens
ggcaggcatctggga

SEQ ID NO: 148540 - DNA, 15 bp, Homo sapiens
tggcaggcatctggg

SEQ ID NO: 148541 - DNA, 15 bp, Homo sapiens
ctggcaggcatctgg

SEQ ID NO: 148542 - DNA, 15 bp, Homo sapiens
cctggcaggcatctg

SEQ ID NO: 148543 - DNA, 15 bp, Homo sapiens
tcctggcaggcatct

SEQ ID NO: 148544 - DNA, 15 bp, Homo sapiens
atcctggcaggcatc

SEQ ID NO: 148545 - DNA, 15 bp, Homo sapiens
catcctggcaggcat

SEQ ID NO: 148546 - DNA, 15 bp, Homo sapiens
gcatcctggcaggca

SEQ ID NO: 148547 - DNA, 15 bp, Homo sapiens
ggcatcctggcaggc

SEQ ID NO: 148548 - DNA, 15 bp, Homo sapiens
tggcatcctggcagg

SEQ ID NO: 148549 - DNA, 15 bp, Homo sapiens
ctggcatcctggcag

SEQ ID NO: 148550 - DNA, 15 bp, Homo sapiens
tctggcatcctggca

SEQ ID NO: 148551 - DNA, 15 bp, Homo sapiens
ctctggcatcctggc

SEQ ID NO: 148552 - DNA, 15 bp, Homo sapiens
cctctggcatcctgg

SEQ ID NO: 148553 - DNA, 15 bp, Homo sapiens
acctctggcatcctg

SEQ ID NO: 148554 - DNA, 15 bp, Homo sapiens
aacctctggcatcct

SEQ ID NO: 148555 - DNA, 15 bp, Homo sapiens
taacctctggcatcc

SEQ ID NO: 148556 - DNA, 15 bp, Homo sapiens
ctaacctctggcatc

SEQ ID NO: 148557 - DNA, 15 bp, Homo sapiens
tctaacctctggcat

SEQ ID NO: 148558 - DNA, 15 bp, Homo sapiens
ctctaacctctggca

SEQ ID NO: 148559 - DNA, 15 bp, Homo sapiens
cctctaacctctggc

SEQ ID NO: 148560 - DNA, 15 bp, Homo sapiens
ccctctaacctctgg

SEQ ID NO: 148561 - DNA, 15 bp, Homo sapiens
tccctctaacctctg

SEQ ID NO: 148562 - DNA, 15 bp, Homo sapiens
ctccctctaacctct

SEQ ID NO: 148563 - DNA, 15 bp, Homo sapiens
cctccctctaacctc

SEQ ID NO: 148564 - DNA, 15 bp, Homo sapiens
acctccctctaacct

SEQ ID NO: 148565 - DNA, 15 bp, Homo sapiens
cacctccctctaacc

SEQ ID NO: 148566 - DNA, 15 bp, Homo sapiens
acacctccctctaac

SEQ ID NO: 148567 - DNA, 15 bp, Homo sapiens
cacacctccctctaa

SEQ ID NO: 148568 - DNA, 15 bp, Homo sapiens
acacacctccctcta

SEQ ID NO: 148569 - DNA, 15 bp, Homo sapiens
gacacacctccctct

SEQ ID NO: 148570 - DNA, 15 bp, Homo sapiens
ggacacacctccctc

SEQ ID NO: 148571 - DNA, 15 bp, Homo sapiens
tggacacacctccct

SEQ ID NO: 148572 - DNA, 15 bp, Homo sapiens
ttggacacacctccc

SEQ ID NO: 148573 - DNA, 15 bp, Homo sapiens
attggacacacctcc

SEQ ID NO: 148574 - DNA, 15 bp, Homo sapiens
gattggacacacctc

SEQ ID NO: 148575 - DNA, 15 bp, Homo sapiens
tgattggacacacct

SEQ ID NO: 148576 - DNA, 15 bp, Homo sapiens
atgattggacacacc

SEQ ID NO: 148577 - DNA, 15 bp, Homo sapiens
catgattggacacac

SEQ ID NO: 148578 - DNA, 15 bp, Homo sapiens
ccatgattggacaca

SEQ ID NO: 148579 - DNA, 15 bp, Homo sapiens
tccatgattggacac

SEQ ID NO: 148580 - DNA, 15 bp, Homo sapiens
gtccatgattggaca

SEQ ID NO: 148581 - DNA, 15 bp, Homo sapiens
agtccatgattggac

SEQ ID NO: 148582 - DNA, 15 bp, Homo sapiens
cagtccatgattgga

SEQ ID NO: 148583 - DNA, 15 bp, Homo sapiens
ccagtccatgattgg

SEQ ID NO: 148584 - DNA, 15 bp, Homo sapiens
tccagtccatgattg

SEQ ID NO: 148585 - DNA, 15 bp, Homo sapiens
atccagtccatgatt

SEQ ID NO: 148586 - DNA, 15 bp, Homo sapiens
gatccagtccatgat

SEQ ID NO: 148587 - DNA, 15 bp, Homo sapiens
agatccagtccatga

SEQ ID NO: 148588 - DNA, 15 bp, Homo sapiens
cagatccagtccatg

SEQ ID NO: 148589 - DNA, 15 bp, Homo sapiens
tcagatccagtccat

SEQ ID NO: 148590 - DNA, 15 bp, Homo sapiens
ctcagatccagtcca

SEQ ID NO: 148591 - DNA, 15 bp, Homo sapiens
cctcagatccagtcc

SEQ ID NO: 148592 - DNA, 15 bp, Homo sapiens
acctcagatccagtc

SEQ ID NO: 148593 - DNA, 15 bp, Homo sapiens
gacctcagatccagt

SEQ ID NO: 148594 - DNA, 15 bp, Homo sapiens
ggacctcagatccag

SEQ ID NO: 148595 - DNA, 15 bp, Homo sapiens
gggacctcagatcca

SEQ ID NO: 148596 - DNA, 15 bp, Homo sapiens
agggacctcagatcc

SEQ ID NO: 148597 - DNA, 15 bp, Homo sapiens
gagggacctcagatc

SEQ ID NO: 148598 - DNA, 15 bp, Homo sapiens
agagggacctcagat

SEQ ID NO: 148599 - DNA, 15 bp, Homo sapiens
gagagggacctcaga

SEQ ID NO: 148600 - DNA, 15 bp, Homo sapiens
ggagagggacctcag

SEQ ID NO: 148601 - DNA, 15 bp, Homo sapiens
aggagagggacctca

SEQ ID NO: 148602 - DNA, 15 bp, Homo sapiens
aaggagagggacctc

SEQ ID NO: 148603 - DNA, 15 bp, Homo sapiens
gaaggagagggacct

SEQ ID NO: 148604 - DNA, 15 bp, Homo sapiens
ggaaggagagggacc

SEQ ID NO: 148605 - DNA, 15 bp, Homo sapiens
gggaaggagagggac

SEQ ID NO: 148606 - DNA, 15 bp, Homo sapiens
agggaaggagaggga

SEQ ID NO: 148607 - DNA, 15 bp, Homo sapiens
cagggaaggagaggg

SEQ ID NO: 148608 - DNA, 15 bp, Homo sapiens
gcagggaaggagagg

SEQ ID NO: 148609 - DNA, 15 bp, Homo sapiens
agcagggaaggagag

SEQ ID NO: 148610 - DNA, 15 bp, Homo sapiens
aagcagggaaggaga

SEQ ID NO: 148611 - DNA, 15 bp, Homo sapiens
taagcagggaaggag

SEQ ID NO: 148612 - DNA, 15 bp, Homo sapiens
ataagcagggaagga

SEQ ID NO: 148613 - DNA, 15 bp, Homo sapiens
cataagcagggaagg

SEQ ID NO: 148614 - DNA, 15 bp, Homo sapiens
tcataagcagggaag

SEQ ID NO: 148615 - DNA, 15 bp, Homo sapiens
gtcataagcagggaa

SEQ ID NO: 148616 - DNA, 15 bp, Homo sapiens
tgtcataagcaggga

SEQ ID NO: 148617 - DNA, 15 bp, Homo sapiens
gtgtcataagcaggg

SEQ ID NO: 148618 - DNA, 15 bp, Homo sapiens
tgtgtcataagcagg

SEQ ID NO: 148619 - DNA, 15 bp, Homo sapiens
ttgtgtcataagcag

SEQ ID NO: 148620 - DNA, 15 bp, Homo sapiens
tttgtgtcataagca

SEQ ID NO: 148621 - DNA, 15 bp, Homo sapiens
atttgtgtcataagc

SEQ ID NO: 148622 - DNA, 15 bp, Homo sapiens
catttgtgtcataag

SEQ ID NO: 148623 - DNA, 15 bp, Homo sapiens
gcatttgtgtcataa

SEQ ID NO: 148624 - DNA, 15 bp, Homo sapiens
agcatttgtgtcata

SEQ ID NO: 148625 - DNA, 15 bp, Homo sapiens
gagcatttgtgtcat

SEQ ID NO: 148626 - DNA, 15 bp, Homo sapiens
tgagcatttgtgtca

SEQ ID NO: 148627 - DNA, 15 bp, Homo sapiens
ctgagcatttgtgtc

SEQ ID NO: 148628 - DNA, 15 bp, Homo sapiens
tctgagcatttgtgt

SEQ ID NO: 148629 - DNA, 15 bp, Homo sapiens
gtctgagcatttgtg

SEQ ID NO: 148630 - DNA, 15 bp, Homo sapiens
ggtctgagcatttgt

SEQ ID NO: 148631 - DNA, 15 bp, Homo sapiens
gggtctgagcatttg

SEQ ID NO: 148632 - DNA, 15 bp, Homo sapiens
agggtctgagcattt

SEQ ID NO: 148633 - DNA, 15 bp, Homo sapiens
cagggtctgagcatt

SEQ ID NO: 148634 - DNA, 15 bp, Homo sapiens
acagggtctgagcat

SEQ ID NO: 148635 - DNA, 15 bp, Homo sapiens
aacagggtctgagca

SEQ ID NO: 148636 - DNA, 15 bp, Homo sapiens
gaacagggtctgagc

SEQ ID NO: 148637 - DNA, 15 bp, Homo sapiens
agaacagggtctgag

SEQ ID NO: 148638 - DNA, 15 bp, Homo sapiens
gagaacagggtctga

SEQ ID NO: 148639 - DNA, 15 bp, Homo sapiens
ggagaacagggtctg

SEQ ID NO: 148640 - DNA, 15 bp, Homo sapiens
aggagaacagggtct

SEQ ID NO: 148641 - DNA, 15 bp, Homo sapiens
caggagaacagggtc

SEQ ID NO: 148642 - DNA, 15 bp, Homo sapiens
tcaggagaacagggt

SEQ ID NO: 148643 - DNA, 15 bp, Homo sapiens
ttcaggagaacaggg

SEQ ID NO: 148644 - DNA, 15 bp, Homo sapiens
ccttcaggagaacag

SEQ ID NO: 148645 - DNA, 15 bp, Homo sapiens
cccttcaggagaaca

SEQ ID NO: 148646 - DNA, 15 bp, Homo sapiens
tcccttcaggagaac

SEQ ID NO: 148647 - DNA, 15 bp, Homo sapiens
gtcccttcaggagaa

SEQ ID NO: 148648 - DNA, 15 bp, Homo sapiens
tgtcccttcaggaga

SEQ ID NO: 148649 - DNA, 15 bp, Homo sapiens
gtgtcccttcaggag

SEQ ID NO: 148650 - DNA, 15 bp, Homo sapiens
tgtgtcccttcagga

SEQ ID NO: 148651 - DNA, 15 bp, Homo sapiens
ctgtgtcccttcagg

SEQ ID NO: 148652 - DNA, 15 bp, Homo sapiens
tctgtgtcccttcag

SEQ ID NO: 148653 - DNA, 15 bp, Homo sapiens
ttctgtgtcccttca

SEQ ID NO: 148654 - DNA, 15 bp, Homo sapiens
gttctgtgtcccttc

SEQ ID NO: 148655 - DNA, 15 bp, Homo sapiens
ggttctgtgtccctt

SEQ ID NO: 148656 - DNA, 15 bp, Homo sapiens
aggttctgtgtccct

SEQ ID NO: 148657 - DNA, 15 bp, Homo sapiens
caggttctgtgtccc

SEQ ID NO: 148658 - DNA, 15 bp, Homo sapiens
acaggttctgtgtcc

SEQ ID NO: 148659 - DNA, 15 bp, Homo sapiens
gacaggttctgtgtc

SEQ ID NO: 148660 - DNA, 15 bp, Homo sapiens
agacaggttctgtgt

SEQ ID NO: 148661 - DNA, 15 bp, Homo sapiens
gagacaggttctgtg

SEQ ID NO: 148662 - DNA, 15 bp, Homo sapiens
ggagacaggttctgt

SEQ ID NO: 148663 - DNA, 15 bp, Homo sapiens
gggagacaggttctg

SEQ ID NO: 148664 - DNA, 15 bp, Homo sapiens
agggagacaggttct

SEQ ID NO: 148665 - DNA, 15 bp, Homo sapiens
cagggagacaggttc

SEQ ID NO: 148666 - DNA, 15 bp, Homo sapiens
acagggagacaggtt

SEQ ID NO: 148667 - DNA, 15 bp, Homo sapiens
aacagggagacaggt

SEQ ID NO: 148668 - DNA, 15 bp, Homo sapiens
aaacagggagacagg

SEQ ID NO: 148669 - DNA, 15 bp, Homo sapiens
caaacagggagacag

SEQ ID NO: 148670 - DNA, 15 bp, Homo sapiens
ccaaacagggagaca

SEQ ID NO: 148671 - DNA, 15 bp, Homo sapiens
tccaaacagggagac

SEQ ID NO: 148672 - DNA, 15 bp, Homo sapiens
atccaaacagggaga

SEQ ID NO: 148673 - DNA, 15 bp, Homo sapiens
aatccaaacagggag

SEQ ID NO: 148674 - DNA, 15 bp, Homo sapiens
caatccaaacaggga

SEQ ID NO: 148675 - DNA, 15 bp, Homo sapiens
gcaatccaaacaggg

SEQ ID NO: 148676 - DNA, 15 bp, Homo sapiens
tgcaatccaaacagg

SEQ ID NO: 148677 - DNA, 15 bp, Homo sapiens
ttgcaatccaaacag

SEQ ID NO: 148678 - DNA, 15 bp, Homo sapiens
cttgcaatccaaaca

SEQ ID NO: 148679 - DNA, 15 bp, Homo sapiens
gcttgcaatccaaac

SEQ ID NO: 148680 - DNA, 15 bp, Homo sapiens
agcttgcaatccaaa

SEQ ID NO: 148681 - DNA, 15 bp, Homo sapiens
gagcttgcaatccaa

SEQ ID NO: 148682 - DNA, 15 bp, Homo sapiens
ggagcttgcaatcca

SEQ ID NO: 148683 - DNA, 15 bp, Homo sapiens
tggagcttgcaatcc

SEQ ID NO: 148684 - DNA, 15 bp, Homo sapiens
ctggagcttgcaatc

SEQ ID NO: 148685 - DNA, 15 bp, Homo sapiens
tctggagcttgcaat

SEQ ID NO: 148686 - DNA, 15 bp, Homo sapiens
gtctggagcttgcaa

SEQ ID NO: 148687 - DNA, 15 bp, Homo sapiens
agtctggagcttgca

SEQ ID NO: 148688 - DNA, 15 bp, Homo sapiens
cagtctggagcttgc

SEQ ID NO: 148689 - DNA, 15 bp, Homo sapiens
gcagtctggagcttg

SEQ ID NO: 148690 - DNA, 15 bp, Homo sapiens
tgcagtctggagctt

SEQ ID NO: 148691 - DNA, 15 bp, Homo sapiens
atgcagtctggagct

SEQ ID NO: 148692 - DNA, 15 bp, Homo sapiens
gatgcagtctggagc

SEQ ID NO: 148693 - DNA, 15 bp, Homo sapiens
ggatgcagtctggag

SEQ ID NO: 148694 - DNA, 15 bp, Homo sapiens
aggatgcagtctgga

SEQ ID NO: 148695 - DNA, 15 bp, Homo sapiens
aaggatgcagtctgg

SEQ ID NO: 148696 - DNA, 15 bp, Homo sapiens
caaggatgcagtctg

SEQ ID NO: 148697 - DNA, 15 bp, Homo sapiens
tcaaggatgcagtct

SEQ ID NO: 148698 - DNA, 15 bp, Homo sapiens
ttcaaggatgcagtc

SEQ ID NO: 148699 - DNA, 15 bp, Homo sapiens
cttcaaggatgcagt

SEQ ID NO: 148700 - DNA, 15 bp, Homo sapiens
acttcaaggatgcag

SEQ ID NO: 148701 - DNA, 15 bp, Homo sapiens
cacttcaaggatgca

SEQ ID NO: 148702 - DNA, 15 bp, Homo sapiens
ccacttcaaggatgc

SEQ ID NO: 148703 - DNA, 15 bp, Homo sapiens
cccacttcaaggatg

SEQ ID NO: 148704 - DNA, 15 bp, Homo sapiens
tcccacttcaaggat

SEQ ID NO: 148705 - DNA, 15 bp, Homo sapiens
gtcccacttcaagga

SEQ ID NO: 148706 - DNA, 15 bp, Homo sapiens
tgtcccacttcaagg

SEQ ID NO: 148707 - DNA, 15 bp, Homo sapiens
ttgtcccacttcaag

SEQ ID NO: 148708 - DNA, 15 bp, Homo sapiens
gttgtcccacttcaa

SEQ ID NO: 148709 - DNA, 15 bp, Homo sapiens
tgttgtcccacttca

SEQ ID NO: 148710 - DNA, 15 bp, Homo sapiens
ctgttgtcccacttc

SEQ ID NO: 148711 - DNA, 15 bp, Homo sapiens
tctgttgtcccactt

SEQ ID NO: 148712 - DNA, 15 bp, Homo sapiens
ctctgttgtcccact

SEQ ID NO: 148713 - DNA, 15 bp, Homo sapiens
cctctgttgtcccac

SEQ ID NO: 148714 - DNA, 15 bp, Homo sapiens
ccctctgttgtccca

SEQ ID NO: 148715 - DNA, 15 bp, Homo sapiens
tccctctgttgtccc

SEQ ID NO: 148716 - DNA, 15 bp, Homo sapiens
ttccctctgttgtcc

SEQ ID NO: 148717 - DNA, 15 bp, Homo sapiens
tttccctctgttgtc

SEQ ID NO: 148718 - DNA, 15 bp, Homo sapiens
atttccctctgttgt

SEQ ID NO: 148719 - DNA, 15 bp, Homo sapiens
gatttccctctgttg

SEQ ID NO: 148720 - DNA, 15 bp, Homo sapiens
agatttccctctgtt

SEQ ID NO: 148721 - DNA, 15 bp, Homo sapiens
tagatttccctctgt

SEQ ID NO: 148722 - DNA, 15 bp, Homo sapiens
atagatttccctctg

SEQ ID NO: 148723 - DNA, 15 bp, Homo sapiens
gatagatttccctct

SEQ ID NO: 148724 - DNA, 15 bp, Homo sapiens
agatagatttccctc

SEQ ID NO: 148725 - DNA, 15 bp, Homo sapiens
gagatagatttccct

SEQ ID NO: 148726 - DNA, 15 bp, Homo sapiens
tgagatagatttccc

SEQ ID NO: 148727 - DNA, 15 bp, Homo sapiens
ctgagatagatttcc

SEQ ID NO: 148728 - DNA, 15 bp, Homo sapiens
gctgagatagatttc

SEQ ID NO: 148729 - DNA, 15 bp, Homo sapiens
ggctgagatagattt

SEQ ID NO: 148730 - DNA, 15 bp, Homo sapiens
aggctgagatagatt

SEQ ID NO: 148731 - DNA, 15 bp, Homo sapiens
gaggctgagatagat

SEQ ID NO: 148732 - DNA, 15 bp, Homo sapiens
tgaggctgagataga

SEQ ID NO: 148733 - DNA, 15 bp, Homo sapiens
atgaggctgagatag

SEQ ID NO: 148734 - DNA, 15 bp, Homo sapiens
catgaggctgagata

SEQ ID NO: 148735 - DNA, 15 bp, Homo sapiens
tcatgaggctgagat

SEQ ID NO: 148736 - DNA, 15 bp, Homo sapiens
atcatgaggctgaga

SEQ ID NO: 148737 - DNA, 15 bp, Homo sapiens
gatcatgaggctgag

SEQ ID NO: 148738 - DNA, 15 bp, Homo sapiens
ggatcatgaggctga

SEQ ID NO: 148739 - DNA, 15 bp, Homo sapiens
tggatcatgaggctg

SEQ ID NO: 148740 - DNA, 15 bp, Homo sapiens
atggatcatgaggct

SEQ ID NO: 148741 - DNA, 15 bp, Homo sapiens
catggatcatgaggc

SEQ ID NO: 148742 - DNA, 15 bp, Homo sapiens
ccatggatcatgagg

SEQ ID NO: 148743 - DNA, 15 bp, Homo sapiens
tccatggatcatgag

SEQ ID NO: 148744 - DNA, 15 bp, Homo sapiens
gtccatggatcatga

SEQ ID NO: 148745 - DNA, 15 bp, Homo sapiens
cgtccatggatcatg

SEQ ID NO: 148746 - DNA, 15 bp, Homo sapiens
gcgtccatggatcat

SEQ ID NO: 148747 - DNA, 15 bp, Homo sapiens
tgcgtccatggatca

SEQ ID NO: 148748 - DNA, 15 bp, Homo sapiens
atgcgtccatggatc

SEQ ID NO: 148749 - DNA, 15 bp, Homo sapiens
gatgcgtccatggat

SEQ ID NO: 148750 - DNA, 15 bp, Homo sapiens
agatgcgtccatgga

SEQ ID NO: 148751 - DNA, 15 bp, Homo sapiens
gagatgcgtccatgg

SEQ ID NO: 148752 - DNA, 15 bp, Homo sapiens
tgagatgcgtccatg

SEQ ID NO: 148753 - DNA, 15 bp, Homo sapiens
atgagatgcgtccat

SEQ ID NO: 148754 - DNA, 15 bp, Homo sapiens
aatgagatgcgtcca

SEQ ID NO: 148755 - DNA, 15 bp, Homo sapiens
gaatgagatgcgtcc

SEQ ID NO: 148756 - DNA, 15 bp, Homo sapiens
tgaatgagatgcgtc

SEQ ID NO: 148757 - DNA, 15 bp, Homo sapiens
ctgaatgagatgcgt

SEQ ID NO: 148758 - DNA, 15 bp, Homo sapiens
actgaatgagatgcg

SEQ ID NO: 148759 - DNA, 15 bp, Homo sapiens
gactgaatgagatgc

SEQ ID NO: 148760 - DNA, 15 bp, Homo sapiens
ggactgaatgagatg

SEQ ID NO: 148761 - DNA, 15 bp, Homo sapiens
aggactgaatgagat

SEQ ID NO: 148762 - DNA, 15 bp, Homo sapiens
caggactgaatgaga

SEQ ID NO: 148763 - DNA, 15 bp, Homo sapiens
ccaggactgaatgag

SEQ ID NO: 148764 - DNA, 15 bp, Homo sapiens
cccaggactgaatga

SEQ ID NO: 148765 - DNA, 15 bp, Homo sapiens
gcccaggactgaatg

SEQ ID NO: 148766 - DNA, 15 bp, Homo sapiens
agcccaggactgaat

SEQ ID NO: 148767 - DNA, 15 bp, Homo sapiens
gagcccaggactgaa

SEQ ID NO: 148768 - DNA, 15 bp, Homo sapiens
ggagcccaggactga

SEQ ID NO: 148769 - DNA, 15 bp, Homo sapiens
aggagcccaggactg

SEQ ID NO: 148770 - DNA, 15 bp, Homo sapiens
aaggagcccaggact

SEQ ID NO: 148771 - DNA, 15 bp, Homo sapiens
caaggagcccaggac

SEQ ID NO: 148772 - DNA, 15 bp, Homo sapiens
gcaaggagcccagga

SEQ ID NO: 148773 - DNA, 15 bp, Homo sapiens
agcaaggagcccagg

SEQ ID NO: 148774 - DNA, 15 bp, Homo sapiens
cagcaaggagcccag

SEQ ID NO: 148775 - DNA, 15 bp, Homo sapiens
ccagcaaggagccca

SEQ ID NO: 148776 - DNA, 15 bp, Homo sapiens
gccagcaaggagccc

SEQ ID NO: 148777 - DNA, 15 bp, Homo sapiens
ggccagcaaggagcc

SEQ ID NO: 148778 - DNA, 15 bp, Homo sapiens
gggccagcaaggagc

SEQ ID NO: 148779 - DNA, 15 bp, Homo sapiens
ggggccagcaaggag

SEQ ID NO: 148780 - DNA, 15 bp, Homo sapiens
aggggccagcaagga

SEQ ID NO: 148781 - DNA, 15 bp, Homo sapiens
caggggccagcaagg

SEQ ID NO: 148782 - DNA, 15 bp, Homo sapiens
ccaggggccagcaag

SEQ ID NO: 148783 - DNA, 15 bp, Homo sapiens
accaggggccagcaa

SEQ ID NO: 148784 - DNA, 15 bp, Homo sapiens
caccaggggccagca

SEQ ID NO: 148785 - DNA, 15 bp, Homo sapiens
gcaccaggggccagc

SEQ ID NO: 148786 - DNA, 15 bp, Homo sapiens
agcaccaggggccag

SEQ ID NO: 148787 - DNA, 15 bp, Homo sapiens
cagcaccaggggcca

SEQ ID NO: 148788 - DNA, 15 bp, Homo sapiens
gcagcaccaggggcc

SEQ ID NO: 148789 - DNA, 15 bp, Homo sapiens
tgcagcaccaggggc

SEQ ID NO: 148790 - DNA, 15 bp, Homo sapiens
ctgcagcaccagggg

SEQ ID NO: 148791 - DNA, 15 bp, Homo sapiens
tctgcagcaccaggg

SEQ ID NO: 148792 - DNA, 15 bp, Homo sapiens
ttctgcagcaccagg

SEQ ID NO: 148793 - DNA, 15 bp, Homo sapiens
tttctgcagcaccag

SEQ ID NO: 148794 - DNA, 15 bp, Homo sapiens
atttctgcagcacca

SEQ ID NO: 148795 - DNA, 15 bp, Homo sapiens
gatttctgcagcacc

SEQ ID NO: 148796 - DNA, 15 bp, Homo sapiens
ggatttctgcagcac

SEQ ID NO: 148797 - DNA, 15 bp, Homo sapiens
tggatttctgcagca

SEQ ID NO: 148798 - DNA, 15 bp, Homo sapiens
atggatttctgcagc

SEQ ID NO: 148799 - DNA, 15 bp, Homo sapiens
catggatttctgcag

SEQ ID NO: 148800 - DNA, 15 bp, Homo sapiens
ccatggatttctgca

SEQ ID NO: 148801 - DNA, 15 bp, Homo sapiens
gccatggatttctgc

SEQ ID NO: 148802 - DNA, 15 bp, Homo sapiens
agccatggatttctg

SEQ ID NO: 148803 - DNA, 15 bp, Homo sapiens
cagccatggatttct

SEQ ID NO: 148804 - DNA, 15 bp, Homo sapiens
tcagccatggatttc

SEQ ID NO: 148805 - DNA, 15 bp, Homo sapiens
ctcagccatggattt

SEQ ID NO: 148806 - DNA, 15 bp, Homo sapiens
cctcagccatggatt

SEQ ID NO: 148807 - DNA, 15 bp, Homo sapiens
ccctcagccatggat

SEQ ID NO: 148808 - DNA, 15 bp, Homo sapiens
cccctcagccatgga

SEQ ID NO: 148809 - DNA, 15 bp, Homo sapiens
ccccctcagccatgg

SEQ ID NO: 148810 - DNA, 15 bp, Homo sapiens
accccctcagccatg

SEQ ID NO: 148811 - DNA, 15 bp, Homo sapiens
caccccctcagccat

SEQ ID NO: 148812 - DNA, 15 bp, Homo sapiens
ccaccccctcagcca

SEQ ID NO: 148813 - DNA, 15 bp, Homo sapiens
tccaccccctcagcc

SEQ ID NO: 148814 - DNA, 15 bp, Homo sapiens
ctccaccccctcagc

SEQ ID NO: 148815 - DNA, 15 bp, Homo sapiens
tctccaccccctcag

SEQ ID NO: 148816 - DNA, 15 bp, Homo sapiens
atctccaccccctca

SEQ ID NO: 148817 - DNA, 15 bp, Homo sapiens
catctccaccccctc

SEQ ID NO: 148818 - DNA, 15 bp, Homo sapiens
ccatctccaccccct

SEQ ID NO: 148819 - DNA, 15 bp, Homo sapiens
cccatctccaccccc

SEQ ID NO: 148820 - DNA, 15 bp, Homo sapiens
acccatctccacccc

SEQ ID NO: 148821 - DNA, 15 bp, Homo sapiens
cacccatctccaccc

SEQ ID NO: 148822 - DNA, 15 bp, Homo sapiens
ccacccatctccacc

SEQ ID NO: 148823 - DNA, 15 bp, Homo sapiens
cccacccatctccac

SEQ ID NO: 148824 - DNA, 15 bp, Homo sapiens
ccccacccatctcca

SEQ ID NO: 148825 - DNA, 15 bp, Homo sapiens
cccccacccatctcc

SEQ ID NO: 148826 - DNA, 15 bp, Homo sapiens
ccccccacccatctc

SEQ ID NO: 148827 - DNA, 15 bp, Homo sapiens
cccccccacccatct

SEQ ID NO: 148828 - DNA, 15 bp, Homo sapiens
tcccccccacccatc

SEQ ID NO: 148829 - DNA, 15 bp, Homo sapiens
gtcccccccacccat

SEQ ID NO: 148830 - DNA, 15 bp, Homo sapiens
ggtcccccccaccca

SEQ ID NO: 148831 - DNA, 15 bp, Homo sapiens
cggtcccccccaccc

SEQ ID NO: 148832 - DNA, 15 bp, Homo sapiens
tcggtcccccccacc

SEQ ID NO: 148833 - DNA, 15 bp, Homo sapiens
ttcggtcccccccac

SEQ ID NO: 148834 - DNA, 15 bp, Homo sapiens
cttcggtccccccca

SEQ ID NO: 148835 - DNA, 15 bp, Homo sapiens
ccttcggtccccccc

SEQ ID NO: 148836 - DNA, 15 bp, Homo sapiens
tccttcggtcccccc

SEQ ID NO: 148837 - DNA, 15 bp, Homo sapiens
ttccttcggtccccc

SEQ ID NO: 148838 - DNA, 15 bp, Homo sapiens
cttccttcggtcccc

SEQ ID NO: 148839 - DNA, 15 bp, Homo sapiens
gcttccttcggtccc

SEQ ID NO: 148840 - DNA, 15 bp, Homo sapiens
agcttccttcggtcc

SEQ ID NO: 148841 - DNA, 15 bp, Homo sapiens
cagcttccttcggtc

SEQ ID NO: 148842 - DNA, 15 bp, Homo sapiens
acagcttccttcggt

SEQ ID NO: 148843 - DNA, 15 bp, Homo sapiens
cacagcttccttcgg

SEQ ID NO: 148844 - DNA, 15 bp, Homo sapiens
gcacagcttccttcg

SEQ ID NO: 148845 - DNA, 15 bp, Homo sapiens
tgcacagcttccttc

SEQ ID NO: 148846 - DNA, 15 bp, Homo sapiens
ttgcacagcttcctt

SEQ ID NO: 148847 - DNA, 15 bp, Homo sapiens
cttgcacagcttcct

SEQ ID NO: 148848 - DNA, 15 bp, Homo sapiens
gcttgcacagcttcc

SEQ ID NO: 148849 - DNA, 15 bp, Homo sapiens
ggcttgcacagcttc

SEQ ID NO: 148850 - DNA, 15 bp, Homo sapiens
aggcttgcacagctt

SEQ ID NO: 148851 - DNA, 15 bp, Homo sapiens
caggcttgcacagct

SEQ ID NO: 148852 - DNA, 15 bp, Homo sapiens
tcaggcttgcacagc

SEQ ID NO: 148853 - DNA, 15 bp, Homo sapiens
gtcaggcttgcacag

SEQ ID NO: 148854 - DNA, 15 bp, Homo sapiens
agtcaggcttgcaca

SEQ ID NO: 148855 - DNA, 15 bp, Homo sapiens
gagtcaggcttgcac

SEQ ID NO: 148856 - DNA, 15 bp, Homo sapiens
agagtcaggcttgca

SEQ ID NO: 148857 - DNA, 15 bp, Homo sapiens
cagagtcaggcttgc

SEQ ID NO: 148858 - DNA, 15 bp, Homo sapiens
gcagagtcaggcttg

SEQ ID NO: 148859 - DNA, 15 bp, Homo sapiens
tgcagagtcaggctt

SEQ ID NO: 148860 - DNA, 15 bp, Homo sapiens
ctgcagagtcaggct

SEQ ID NO: 148861 - DNA, 15 bp, Homo sapiens
cctgcagagtcaggc

SEQ ID NO: 148862 - DNA, 15 bp, Homo sapiens
tcctgcagagtcagg

SEQ ID NO: 148863 - DNA, 15 bp, Homo sapiens
ttcctgcagagtcag

SEQ ID NO: 148864 - DNA, 15 bp, Homo sapiens
cttcctgcagagtca

SEQ ID NO: 148865 - DNA, 15 bp, Homo sapiens
acttcctgcagagtc

SEQ ID NO: 148866 - DNA, 15 bp, Homo sapiens
gacttcctgcagagt

SEQ ID NO: 148867 - DNA, 15 bp, Homo sapiens
ggacttcctgcagag

SEQ ID NO: 148868 - DNA, 15 bp, Homo sapiens
aggacttcctgcaga

SEQ ID NO: 148869 - DNA, 15 bp, Homo sapiens
caggacttcctgcag

SEQ ID NO: 148870 - DNA, 15 bp, Homo sapiens
gcaggacttcctgca

SEQ ID NO: 148871 - DNA, 15 bp, Homo sapiens
cgcaggacttcctgc

SEQ ID NO: 148872 - DNA, 15 bp, Homo sapiens
tcgcaggacttcctg

SEQ ID NO: 148873 - DNA, 15 bp, Homo sapiens
ttcgcaggacttcct

SEQ ID NO: 148874 - DNA, 15 bp, Homo sapiens
gttcgcaggacttcc

SEQ ID NO: 148875 - DNA, 15 bp, Homo sapiens
cgttcgcaggacttc

SEQ ID NO: 148876 - DNA, 15 bp, Homo sapiens
gcgttcgcaggactt

SEQ ID NO: 148877 - DNA, 15 bp, Homo sapiens
agcgttcgcaggact

SEQ ID NO: 148878 - DNA, 15 bp, Homo sapiens
cagcgttcgcaggac

SEQ ID NO: 148879 - DNA, 15 bp, Homo sapiens
ccagcgttcgcagga

SEQ ID NO: 148880 - DNA, 15 bp, Homo sapiens
gccagcgttcgcagg

SEQ ID NO: 148881 - DNA, 15 bp, Homo sapiens
tgccagcgttcgcag

SEQ ID NO: 148882 - DNA, 15 bp, Homo sapiens
atgccagcgttcgca

SEQ ID NO: 148883 - DNA, 15 bp, Homo sapiens
aatgccagcgttcgc

SEQ ID NO: 148884 - DNA, 15 bp, Homo sapiens
taatgccagcgttcg

SEQ ID NO: 148885 - DNA, 15 bp, Homo sapiens
ttaatgccagcgttc

SEQ ID NO: 148886 - DNA, 15 bp, Homo sapiens
tttaatgccagcgtt

SEQ ID NO: 148887 - DNA, 15 bp, Homo sapiens
ttttaatgccagcgt

SEQ ID NO: 148888 - DNA, 15 bp, Homo sapiens
tttttaatgccagcg

SEQ ID NO: 148889 - DNA, 15 bp, Homo sapiens
gtttttaatgccagc

SEQ ID NO: 148890 - DNA, 15 bp, Homo sapiens
tgtttttaatgccag

SEQ ID NO: 148891 - DNA, 15 bp, Homo sapiens
gtgtttttaatgcca

SEQ ID NO: 148892 - DNA, 15 bp, Homo sapiens
ggtgtttttaatgcc

SEQ ID NO: 148893 - DNA, 15 bp, Homo sapiens
tggtgtttttaatgc

SEQ ID NO: 148894 - DNA, 15 bp, Homo sapiens
atggtgtttttaatg

SEQ ID NO: 148895 - DNA, 15 bp, Homo sapiens
aatggtgtttttaat

SEQ ID NO: 148896 - DNA, 15 bp, Homo sapiens
caatggtgtttttaa

SEQ ID NO: 148897 - DNA, 15 bp, Homo sapiens
gcaatggtgttttta

SEQ ID NO: 148898 - DNA, 15 bp, Homo sapiens
ggcaatggtgttttt

SEQ ID NO: 148899 - DNA, 15 bp, Homo sapiens
aggcaatggtgtttt

SEQ ID NO: 148900 - DNA, 15 bp, Homo sapiens
caggcaatggtgttt

SEQ ID NO: 148901 - DNA, 15 bp, Homo sapiens
acaggcaatggtgtt

SEQ ID NO: 148902 - DNA, 15 bp, Homo sapiens
aacaggcaatggtgt

SEQ ID NO: 148903 - DNA, 15 bp, Homo sapiens
caacaggcaatggtg

SEQ ID NO: 148904 - DNA, 15 bp, Homo sapiens
gcaacaggcaatggt

SEQ ID NO: 148905 - DNA, 15 bp, Homo sapiens
agcaacaggcaatgg

SEQ ID NO: 148906 - DNA, 15 bp, Homo sapiens
aagcaacaggcaatg

SEQ ID NO: 148907 - DNA, 15 bp, Homo sapiens
aaagcaacaggcaat

SEQ ID NO: 148908 - DNA, 15 bp, Homo sapiens
taaagcaacaggcaa

SEQ ID NO: 148909 - DNA, 15 bp, Homo sapiens
ataaagcaacaggca

SEQ ID NO: 148910 - DNA, 15 bp, Homo sapiens
aataaagcaacaggc

SEQ ID NO: 148911 - DNA, 15 bp, Homo sapiens
aaataaagcaacagg

SEQ ID NO: 148912 - DNA, 15 bp, Homo sapiens
aaaataaagcaacag

SEQ ID NO: 148913 - DNA, 15 bp, Homo sapiens
aaaaataaagcaaca

SEQ ID NO: 148914 - DNA, 15 bp, Homo sapiens
taaaaataaagcaac

SEQ ID NO: 148915 - DNA, 15 bp, Homo sapiens
ctaaaaataaagcaa

SEQ ID NO: 148916 - DNA, 15 bp, Homo sapiens
actaaaaataaagca

SEQ ID NO: 148917 - DNA, 15 bp, Homo sapiens
cactaaaaataaagc

SEQ ID NO: 148918 - DNA, 15 bp, Homo sapiens
ccactaaaaataaag

SEQ ID NO: 148919 - DNA, 15 bp, Homo sapiens
accactaaaaataaa

SEQ ID NO: 148920 - DNA, 15 bp, Homo sapiens
taccactaaaaataa

SEQ ID NO: 148921 - DNA, 15 bp, Homo sapiens
gtaccactaaaaata

SEQ ID NO: 148922 - DNA, 15 bp, Homo sapiens
tgtaccactaaaaat

SEQ ID NO: 148923 - DNA, 15 bp, Homo sapiens
ttgtaccactaaaaa

SEQ ID NO: 148924 - DNA, 15 bp, Homo sapiens
cttgtaccactaaaa

SEQ ID NO: 148925 - DNA, 15 bp, Homo sapiens
ccttgtaccactaaa

SEQ ID NO: 148926 - DNA, 15 bp, Homo sapiens
tccttgtaccactaa

SEQ ID NO: 148927 - DNA, 15 bp, Homo sapiens
ctccttgtaccacta

SEQ ID NO: 148928 - DNA, 15 bp, Homo sapiens
gctccttgtaccact

SEQ ID NO: 148929 - DNA, 15 bp, Homo sapiens
ggctccttgtaccac

SEQ ID NO: 148930 - DNA, 15 bp, Homo sapiens
gggctccttgtacca

SEQ ID NO: 148931 - DNA, 15 bp, Homo sapiens
agggctccttgtacc

SEQ ID NO: 148932 - DNA, 15 bp, Homo sapiens
cagggctccttgtac

SEQ ID NO: 148933 - DNA, 15 bp, Homo sapiens
tcagggctccttgta

SEQ ID NO: 148934 - DNA, 15 bp, Homo sapiens
ctcagggctccttgt

SEQ ID NO: 148935 - DNA, 15 bp, Homo sapiens
cctcagggctccttg

SEQ ID NO: 148936 - DNA, 15 bp, Homo sapiens
ccctcagggctcctt

SEQ ID NO: 148937 - DNA, 15 bp, Homo sapiens
gccctcagggctcct

SEQ ID NO: 148938 - DNA, 15 bp, Homo sapiens
tgccctcagggctcc

SEQ ID NO: 148939 - DNA, 15 bp, Homo sapiens
gtgccctcagggctc

SEQ ID NO: 148940 - DNA, 15 bp, Homo sapiens
ggtgccctcagggct

SEQ ID NO: 148941 - DNA, 15 bp, Homo sapiens
tggtgccctcagggc

SEQ ID NO: 148942 - DNA, 15 bp, Homo sapiens
ctggtgccctcaggg

SEQ ID NO: 148943 - DNA, 15 bp, Homo sapiens
cctggtgccctcagg

SEQ ID NO: 148944 - DNA, 15 bp, Homo sapiens
ccctggtgccctcag

SEQ ID NO: 148945 - DNA, 15 bp, Homo sapiens
cccctggtgccctca

SEQ ID NO: 148946 - DNA, 15 bp, Homo sapiens
ccccctggtgccctc

SEQ ID NO: 148947 - DNA, 15 bp, Homo sapiens
cccccctggtgccct

SEQ ID NO: 148948 - DNA, 15 bp, Homo sapiens
tcccccctggtgccc

SEQ ID NO: 148949 - DNA, 15 bp, Homo sapiens
atcccccctggtgcc

SEQ ID NO: 148950 - DNA, 15 bp, Homo sapiens
catcccccctggtgc

SEQ ID NO: 148951 - DNA, 15 bp, Homo sapiens
acatcccccctggtg

SEQ ID NO: 148952 - DNA, 15 bp, Homo sapiens
cacatcccccctggt

SEQ ID NO: 148953 - DNA, 15 bp, Homo sapiens
ccacatcccccctgg

SEQ ID NO: 148954 - DNA, 15 bp, Homo sapiens
cccacatcccccctg

SEQ ID NO: 148955 - DNA, 15 bp, Homo sapiens
tcccacatcccccct

SEQ ID NO: 148956 - DNA, 15 bp, Homo sapiens
ttcccacatcccccc

SEQ ID NO: 148957 - DNA, 15 bp, Homo sapiens
attcccacatccccc

SEQ ID NO: 148958 - DNA, 15 bp, Homo sapiens
gattcccacatcccc

SEQ ID NO: 148959 - DNA, 15 bp, Homo sapiens
ggattcccacatccc

SEQ ID NO: 148960 - DNA, 15 bp, Homo sapiens
aggattcccacatcc

SEQ ID NO: 148961 - DNA, 15 bp, Homo sapiens
taggattcccacatc

SEQ ID NO: 148962 - DNA, 15 bp, Homo sapiens
ataggattcccacat

SEQ ID NO: 148963 - DNA, 15 bp, Homo sapiens
aataggattcccaca

SEQ ID NO: 148964 - DNA, 15 bp, Homo sapiens
aaataggattcccac

SEQ ID NO: 148965 - DNA, 15 bp, Homo sapiens
aaaataggattccca

SEQ ID NO: 148966 - DNA, 15 bp, Homo sapiens
aaaaataggattccc

SEQ ID NO: 148967 - DNA, 15 bp, Homo sapiens
aaaaaataggattcc

SEQ ID NO: 148968 - DNA, 15 bp, Homo sapiens
caaaaaataggattc

SEQ ID NO: 148969 - DNA, 15 bp, Homo sapiens
gcaaaaaataggatt

SEQ ID NO: 148970 - DNA, 15 bp, Homo sapiens
agcaaaaaataggat

SEQ ID NO: 148971 - DNA, 15 bp, Homo sapiens
gagcaaaaaatagga

SEQ ID NO: 148972 - DNA, 15 bp, Homo sapiens
agagcaaaaaatagg

SEQ ID NO: 148973 - DNA, 15 bp, Homo sapiens
cagagcaaaaaatag

SEQ ID NO: 148974 - DNA, 15 bp, Homo sapiens
acagagcaaaaaata

SEQ ID NO: 148975 - DNA, 15 bp, Homo sapiens
gacagagcaaaaaat

SEQ ID NO: 148976 - DNA, 15 bp, Homo sapiens
agacagagcaaaaaa

SEQ ID NO: 148977 - DNA, 15 bp, Homo sapiens
aagacagagcaaaaa

SEQ ID NO: 148978 - DNA, 15 bp, Homo sapiens
caagacagagcaaaa

SEQ ID NO: 148979 - DNA, 15 bp, Homo sapiens
gcaagacagagcaaa

SEQ ID NO: 148980 - DNA, 15 bp, Homo sapiens
agcaagacagagcaa

SEQ ID NO: 148981 - DNA, 15 bp, Homo sapiens
tagcaagacagagca

SEQ ID NO: 148982 - DNA, 15 bp, Homo sapiens
ttagcaagacagagc

SEQ ID NO: 148983 - DNA, 15 bp, Homo sapiens
attagcaagacagag

SEQ ID NO: 148984 - DNA, 15 bp, Homo sapiens
cattagcaagacaga

SEQ ID NO: 148985 - DNA, 15 bp, Homo sapiens
ccattagcaagacag

SEQ ID NO: 148986 - DNA, 15 bp, Homo sapiens
tccattagcaagaca

SEQ ID NO: 148987 - DNA, 15 bp, Homo sapiens
ttccattagcaagac

SEQ ID NO: 148988 - DNA, 15 bp, Homo sapiens
gttccattagcaaga

SEQ ID NO: 148989 - DNA, 15 bp, Homo sapiens
ggttccattagcaag

SEQ ID NO: 148990 - DNA, 15 bp, Homo sapiens
aggttccattagcaa

SEQ ID NO: 148991 - DNA, 15 bp, Homo sapiens
gaggttccattagca

SEQ ID NO: 148992 - DNA, 15 bp, Homo sapiens
agaggttccattagc

SEQ ID NO: 148993 - DNA, 15 bp, Homo sapiens
tagaggttccattag

SEQ ID NO: 148994 - DNA, 15 bp, Homo sapiens
ctagaggttccatta

SEQ ID NO: 148995 - DNA, 15 bp, Homo sapiens
gctagaggttccatt

SEQ ID NO: 148996 - DNA, 15 bp, Homo sapiens
tgctagaggttccat

SEQ ID NO: 148997 - DNA, 15 bp, Homo sapiens
ctgctagaggttcca

SEQ ID NO: 148998 - DNA, 15 bp, Homo sapiens
actgctagaggttcc

SEQ ID NO: 148999 - DNA, 15 bp, Homo sapiens
aactgctagaggttc

SEQ ID NO: 149000 - DNA, 15 bp, Homo sapiens
aaactgctagaggtt

SEQ ID NO: 149001 - DNA, 15 bp, Homo sapiens
aaaactgctagaggt

SEQ ID NO: 149002 - DNA, 15 bp, Homo sapiens
aaaaactgctagagg

SEQ ID NO: 149003 - DNA, 15 bp, Homo sapiens
taaaaactgctagag

SEQ ID NO: 149004 - DNA, 15 bp, Homo sapiens
ataaaaactgctaga

SEQ ID NO: 149005 - DNA, 15 bp, Homo sapiens
cataaaaactgctag

SEQ ID NO: 149006 - DNA, 15 bp, Homo sapiens
gcataaaaactgcta

SEQ ID NO: 149007 - DNA, 15 bp, Homo sapiens
ggcataaaaactgct

SEQ ID NO: 149008 - DNA, 15 bp, Homo sapiens
aggcataaaaactgc

SEQ ID NO: 149009 - DNA, 15 bp, Homo sapiens
caggcataaaaactg

SEQ ID NO: 149010 - DNA, 15 bp, Homo sapiens
tcaggcataaaaact

SEQ ID NO: 149011 - DNA, 15 bp, Homo sapiens
atcaggcataaaaac

SEQ ID NO: 149012 - DNA, 15 bp, Homo sapiens
aatcaggcataaaaa

SEQ ID NO: 149013 - DNA, 15 bp, Homo sapiens
aaatcaggcataaaa

SEQ ID NO: 149014 - DNA, 15 bp, Homo sapiens
caaatcaggcataaa

SEQ ID NO: 149015 - DNA, 15 bp, Homo sapiens
acaaatcaggcataa

SEQ ID NO: 149016 - DNA, 15 bp, Homo sapiens
aacaaatcaggcata

SEQ ID NO: 149017 - DNA, 15 bp, Homo sapiens
aaacaaatcaggcat

SEQ ID NO: 149018 - DNA, 15 bp, Homo sapiens
gaaacaaatcaggca

SEQ ID NO: 149019 - DNA, 15 bp, Homo sapiens
ggaaacaaatcaggc

SEQ ID NO: 149020 - DNA, 15 bp, Homo sapiens
gggaaacaaatcagg

SEQ ID NO: 149021 - DNA, 15 bp, Homo sapiens
agggaaacaaatcag

SEQ ID NO: 149022 - DNA, 15 bp, Homo sapiens
gagggaaacaaatca

SEQ ID NO: 149023 - DNA, 15 bp, Homo sapiens
agagggaaacaaatc

SEQ ID NO: 149024 - DNA, 15 bp, Homo sapiens
cagagggaaacaaat

SEQ ID NO: 149025 - DNA, 15 bp, Homo sapiens
tcagagggaaacaaa

SEQ ID NO: 149026 - DNA, 15 bp, Homo sapiens
ttcagagggaaacaa

SEQ ID NO: 149027 - DNA, 15 bp, Homo sapiens
cttcagagggaaaca

SEQ ID NO: 149028 - DNA, 15 bp, Homo sapiens
acttcagagggaaac

SEQ ID NO: 149029 - DNA, 15 bp, Homo sapiens
gacttcagagggaaa

SEQ ID NO: 149030 - DNA, 15 bp, Homo sapiens
agacttcagagggaa

SEQ ID NO: 149031 - DNA, 15 bp, Homo sapiens
cagacttcagaggga

SEQ ID NO: 149032 - DNA, 15 bp, Homo sapiens
acagacttcagaggg

SEQ ID NO: 149033 - DNA, 15 bp, Homo sapiens
gacagacttcagagg

SEQ ID NO: 149034 - DNA, 15 bp, Homo sapiens
tgacagacttcagag

SEQ ID NO: 149035 - DNA, 15 bp, Homo sapiens
atgacagacttcaga

SEQ ID NO: 149036 - DNA, 15 bp, Homo sapiens
catgacagacttcag

SEQ ID NO: 149037 - DNA, 15 bp, Homo sapiens
gcatgacagacttca

SEQ ID NO: 149038 - DNA, 15 bp, Homo sapiens
ggcatgacagacttc

SEQ ID NO: 149039 - DNA, 15 bp, Homo sapiens
aggcatgacagactt

SEQ ID NO: 149040 - DNA, 15 bp, Homo sapiens
caggcatgacagact

SEQ ID NO: 149041 - DNA, 15 bp, Homo sapiens
gcaggcatgacagac

SEQ ID NO: 149042 - DNA, 15 bp, Homo sapiens
tgcaggcatgacaga

SEQ ID NO: 149043 - DNA, 15 bp, Homo sapiens
ctgcaggcatgacag

SEQ ID NO: 149044 - DNA, 15 bp, Homo sapiens
gctgcaggcatgaca

SEQ ID NO: 149045 - DNA, 15 bp, Homo sapiens
ggctgcaggcatgac

SEQ ID NO: 149046 - DNA, 15 bp, Homo sapiens
gggctgcaggcatga

SEQ ID NO: 149047 - DNA, 15 bp, Homo sapiens
ggggctgcaggcatg

SEQ ID NO: 149048 - DNA, 15 bp, Homo sapiens
tggggctgcaggcat

SEQ ID NO: 149049 - DNA, 15 bp, Homo sapiens
ctggggctgcaggca

SEQ ID NO: 149050 - DNA, 15 bp, Homo sapiens
tctggggctgcaggc

SEQ ID NO: 149051 - DNA, 15 bp, Homo sapiens
gtctggggctgcagg

SEQ ID NO: 149052 - DNA, 15 bp, Homo sapiens
agtctggggctgcag

SEQ ID NO: 149053 - DNA, 15 bp, Homo sapiens
cagtctggggctgca

SEQ ID NO: 149054 - DNA, 15 bp, Homo sapiens
acagtctggggctgc

SEQ ID NO: 149055 - DNA, 15 bp, Homo sapiens
tacagtctggggctg

SEQ ID NO: 149056 - DNA, 15 bp, Homo sapiens
gtacagtctggggct

SEQ ID NO: 149057 - DNA, 15 bp, Homo sapiens
agtacagtctggggc

SEQ ID NO: 149058 - DNA, 15 bp, Homo sapiens
gagtacagtctgggg

SEQ ID NO: 149059 - DNA, 15 bp, Homo sapiens
agagtacagtctggg

SEQ ID NO: 149060 - DNA, 15 bp, Homo sapiens
aagagtacagtctgg

SEQ ID NO: 149061 - DNA, 15 bp, Homo sapiens
gaagagtacagtctg

SEQ ID NO: 149062 - DNA, 15 bp, Homo sapiens
ggaagagtacagtct

SEQ ID NO: 149063 - DNA, 15 bp, Homo sapiens
aggaagagtacagtc

SEQ ID NO: 149064 - DNA, 15 bp, Homo sapiens
aaggaagagtacagt

SEQ ID NO: 149065 - DNA, 15 bp, Homo sapiens
caaggaagagtacag

SEQ ID NO: 149066 - DNA, 15 bp, Homo sapiens
gcaaggaagagtaca

SEQ ID NO: 149067 - DNA, 15 bp, Homo sapiens
tgcaaggaagagtac

SEQ ID NO: 149068 - DNA, 15 bp, Homo sapiens
gtgcaaggaagagta

SEQ ID NO: 149069 - DNA, 15 bp, Homo sapiens
tgtgcaaggaagagt

SEQ ID NO: 149070 - DNA, 15 bp, Homo sapiens
gtgtgcaaggaagag

SEQ ID NO: 149071 - DNA, 15 bp, Homo sapiens
tgtgtgcaaggaaga

SEQ ID NO: 149072 - DNA, 15 bp, Homo sapiens
ctgtgtgcaaggaag

SEQ ID NO: 149073 - DNA, 15 bp, Homo sapiens
gctgtgtgcaaggaa

SEQ ID NO: 149074 - DNA, 15 bp, Homo sapiens
agctgtgtgcaagga

SEQ ID NO: 149075 - DNA, 15 bp, Homo sapiens
gagctgtgtgcaagg

SEQ ID NO: 149076 - DNA, 15 bp, Homo sapiens
tgagctgtgtgcaag

SEQ ID NO: 149077 - DNA, 15 bp, Homo sapiens
ctgagctgtgtgcaa

SEQ ID NO: 149078 - DNA, 15 bp, Homo sapiens
tctgagctgtgtgca

SEQ ID NO: 149079 - DNA, 15 bp, Homo sapiens
ctctgagctgtgtgc

SEQ ID NO: 149080 - DNA, 15 bp, Homo sapiens
cctctgagctgtgtg

SEQ ID NO: 149081 - DNA, 15 bp, Homo sapiens
tcctctgagctgtgt

SEQ ID NO: 149082 - DNA, 15 bp, Homo sapiens
ttcctctgagctgtg

SEQ ID NO: 149083 - DNA, 15 bp, Homo sapiens
gttcctctgagctgt

SEQ ID NO: 149084 - DNA, 15 bp, Homo sapiens
tgttcctctgagctg

SEQ ID NO: 149085 - DNA, 15 bp, Homo sapiens
atgttcctctgagct

SEQ ID NO: 149086 - DNA, 15 bp, Homo sapiens
tatgttcctctgagc

SEQ ID NO: 149087 - DNA, 15 bp, Homo sapiens
ctatgttcctctgag

SEQ ID NO: 149088 - DNA, 15 bp, Homo sapiens
tctatgttcctctga

SEQ ID NO: 149089 - DNA, 15 bp, Homo sapiens
gtctatgttcctctg

SEQ ID NO: 149090 - DNA, 15 bp, Homo sapiens
cgtctatgttcctct

SEQ ID NO: 149091 - DNA, 15 bp, Homo sapiens
tcgtctatgttcctc

SEQ ID NO: 149092 - DNA, 15 bp, Homo sapiens
atcgtctatgttcct

SEQ ID NO: 149093 - DNA, 15 bp, Homo sapiens
catcgtctatgttcc

SEQ ID NO: 149094 - DNA, 15 bp, Homo sapiens
ccatcgtctatgttc

SEQ ID NO: 149095 - DNA, 15 bp, Homo sapiens
accatcgtctatgtt

SEQ ID NO: 149096 - DNA, 15 bp, Homo sapiens
caccatcgtctatgt

SEQ ID NO: 149097 - DNA, 15 bp, Homo sapiens
acaccatcgtctatg

SEQ ID NO: 149098 - DNA, 15 bp, Homo sapiens
gacaccatcgtctat

SEQ ID NO: 149099 - DNA, 15 bp, Homo sapiens
tgacaccatcgtcta

SEQ ID NO: 149100 - DNA, 15 bp, Homo sapiens
ctgacaccatcgtct

SEQ ID NO: 149101 - DNA, 15 bp, Homo sapiens
gctgacaccatcgtc

SEQ ID NO: 149102 - DNA, 15 bp, Homo sapiens
agctgacaccatcgt

SEQ ID NO: 149103 - DNA, 15 bp, Homo sapiens
cagctgacaccatcg

SEQ ID NO: 149104 - DNA, 15 bp, Homo sapiens
acagctgacaccatc

SEQ ID NO: 149105 - DNA, 15 bp, Homo sapiens
aacagctgacaccat

SEQ ID NO: 149106 - DNA, 15 bp, Homo sapiens
caacagctgacacca

SEQ ID NO: 149107 - DNA, 15 bp, Homo sapiens
ccaacagctgacacc

SEQ ID NO: 149108 - DNA, 15 bp, Homo sapiens
tccaacagctgacac

SEQ ID NO: 149109 - DNA, 15 bp, Homo sapiens
gtccaacagctgaca

SEQ ID NO: 149110 - DNA, 15 bp, Homo sapiens
agtccaacagctgac

SEQ ID NO: 149111 - DNA, 15 bp, Homo sapiens
aagtccaacagctga

SEQ ID NO: 149112 - DNA, 15 bp, Homo sapiens
caagtccaacagctg

SEQ ID NO: 149113 - DNA, 15 bp, Homo sapiens
gcaagtccaacagct

SEQ ID NO: 149114 - DNA, 15 bp, Homo sapiens
tgcaagtccaacagc

SEQ ID NO: 149115 - DNA, 15 bp, Homo sapiens
ctgcaagtccaacag

SEQ ID NO: 149116 - DNA, 15 bp, Homo sapiens
gctgcaagtccaaca

SEQ ID NO: 149117 - DNA, 15 bp, Homo sapiens
ggctgcaagtccaac

SEQ ID NO: 149118 - DNA, 15 bp, Homo sapiens
gggctgcaagtccaa

SEQ ID NO: 149119 - DNA, 15 bp, Homo sapiens
ggggctgcaagtcca

SEQ ID NO: 149120 - DNA, 15 bp, Homo sapiens
tggggctgcaagtcc

SEQ ID NO: 149121 - DNA, 15 bp, Homo sapiens
gtggggctgcaagtc

SEQ ID NO: 149122 - DNA, 15 bp, Homo sapiens
agtggggctgcaagt

SEQ ID NO: 149123 - DNA, 15 bp, Homo sapiens
aagtggggctgcaag

SEQ ID NO: 149124 - DNA, 15 bp, Homo sapiens
gaagtggggctgcaa

SEQ ID NO: 149125 - DNA, 15 bp, Homo sapiens
ggaagtggggctgca

SEQ ID NO: 149126 - DNA, 15 bp, Homo sapiens
aggaagtggggctgc

SEQ ID NO: 149127 - DNA, 15 bp, Homo sapiens
caggaagtggggctg

SEQ ID NO: 149128 - DNA, 15 bp, Homo sapiens
gcaggaagtggggct

SEQ ID NO: 149129 - DNA, 15 bp, Homo sapiens
ggcaggaagtggggc

SEQ ID NO: 149130 - DNA, 15 bp, Homo sapiens
tggcaggaagtgggg

SEQ ID NO: 149131 - DNA, 15 bp, Homo sapiens
ctggcaggaagtggg

SEQ ID NO: 149132 - DNA, 15 bp, Homo sapiens
gctggcaggaagtgg

SEQ ID NO: 149133 - DNA, 15 bp, Homo sapiens
ggctggcaggaagtg

SEQ ID NO: 149134 - DNA, 15 bp, Homo sapiens
gggctggcaggaagt

SEQ ID NO: 149135 - DNA, 15 bp, Homo sapiens
ggggctggcaggaag

SEQ ID NO: 149136 - DNA, 15 bp, Homo sapiens
cggggctggcaggaa

SEQ ID NO: 149137 - DNA, 15 bp, Homo sapiens
ccggggctggcagga

SEQ ID NO: 149138 - DNA, 15 bp, Homo sapiens
gccggggctggcagg

SEQ ID NO: 149139 - DNA, 15 bp, Homo sapiens
agccggggctggcag

SEQ ID NO: 149140 - DNA, 15 bp, Homo sapiens
aagccggggctggca

SEQ ID NO: 149141 - DNA, 15 bp, Homo sapiens
gaagccggggctggc

SEQ ID NO: 149142 - DNA, 15 bp, Homo sapiens
ggaagccggggctgg

SEQ ID NO: 149143 - DNA, 15 bp, Homo sapiens
gggaagccggggctg

SEQ ID NO: 149144 - DNA, 15 bp, Homo sapiens
agggaagccggggct

SEQ ID NO: 149145 - DNA, 15 bp, Homo sapiens
cagggaagccggggc

SEQ ID NO: 149146 - DNA, 15 bp, Homo sapiens
tcagggaagccgggg

SEQ ID NO: 149147 - DNA, 15 bp, Homo sapiens
ctcagggaagccggg

SEQ ID NO: 149148 - DNA, 15 bp, Homo sapiens
tctcagggaagccgg

SEQ ID NO: 149149 - DNA, 15 bp, Homo sapiens
ttctcagggaagccg

SEQ ID NO: 149150 - DNA, 15 bp, Homo sapiens
cttctcagggaagcc

SEQ ID NO: 149151 - DNA, 15 bp, Homo sapiens
ccttctcagggaagc

SEQ ID NO: 149152 - DNA, 15 bp, Homo sapiens
tccttctcagggaag

SEQ ID NO: 149153 - DNA, 15 bp, Homo sapiens
ttccttctcagggaa

SEQ ID NO: 149154 - DNA, 15 bp, Homo sapiens
cttccttctcaggga

SEQ ID NO: 149155 - DNA, 15 bp, Homo sapiens
tcttccttctcaggg

SEQ ID NO: 149156 - DNA, 15 bp, Homo sapiens
ctcttccttctcagg

SEQ ID NO: 149157 - DNA, 15 bp, Homo sapiens
cctcttccttctcag

SEQ ID NO: 149158 - DNA, 15 bp, Homo sapiens
ccctcttccttctca

SEQ ID NO: 149159 - DNA, 15 bp, Homo sapiens
gccctcttccttctc

SEQ ID NO: 149160 - DNA, 15 bp, Homo sapiens
ggccctcttccttct

SEQ ID NO: 149161 - DNA, 15 bp, Homo sapiens
cggccctcttccttc

SEQ ID NO: 149162 - DNA, 15 bp, Homo sapiens
gcggccctcttcctt

SEQ ID NO: 149163 - DNA, 15 bp, Homo sapiens
ggcggccctcttcct

SEQ ID NO: 149164 - DNA, 15 bp, Homo sapiens
aggcggccctcttcc

SEQ ID NO: 149165 - DNA, 15 bp, Homo sapiens
gaggcggccctcttc

SEQ ID NO: 149166 - DNA, 15 bp, Homo sapiens
agaggcggccctctt

SEQ ID NO: 149167 - DNA, 15 bp, Homo sapiens
gagaggcggccctct

SEQ ID NO: 149168 - DNA, 15 bp, Homo sapiens
agagaggcggccctc

SEQ ID NO: 149169 - DNA, 15 bp, Homo sapiens
aagagaggcggccct

SEQ ID NO: 149170 - DNA, 15 bp, Homo sapiens
caagagaggcggccc

SEQ ID NO: 149171 - DNA, 15 bp, Homo sapiens
acaagagaggcggcc

SEQ ID NO: 149172 - DNA, 15 bp, Homo sapiens
aacaagagaggcggc

SEQ ID NO: 149173 - DNA, 15 bp, Homo sapiens
aaacaagagaggcgg

SEQ ID NO: 149174 - DNA, 15 bp, Homo sapiens
gaaacaagagaggcg

SEQ ID NO: 149175 - DNA, 15 bp, Homo sapiens
tgaaacaagagaggc

SEQ ID NO: 149176 - DNA, 15 bp, Homo sapiens
atgaaacaagagagg

SEQ ID NO: 149177 - DNA, 15 bp, Homo sapiens
tatgaaacaagagag

SEQ ID NO: 149178 - DNA, 15 bp, Homo sapiens
gtatgaaacaagaga

SEQ ID NO: 149179 - DNA, 15 bp, Homo sapiens
ggtatgaaacaagag

SEQ ID NO: 149180 - DNA, 15 bp, Homo sapiens
gggtatgaaacaaga

SEQ ID NO: 149181 - DNA, 15 bp, Homo sapiens
agggtatgaaacaag

SEQ ID NO: 149182 - DNA, 15 bp, Homo sapiens
aagggtatgaaacaa

SEQ ID NO: 149183 - DNA, 15 bp, Homo sapiens
gaagggtatgaaaca

SEQ ID NO: 149184 - DNA, 15 bp, Homo sapiens
ggaagggtatgaaac

SEQ ID NO: 149185 - DNA, 15 bp, Homo sapiens
gggaagggtatgaaa

SEQ ID NO: 149186 - DNA, 15 bp, Homo sapiens
ggggaagggtatgaa

SEQ ID NO: 149187 - DNA, 15 bp, Homo sapiens
tggggaagggtatga

SEQ ID NO: 149188 - DNA, 15 bp, Homo sapiens
atggggaagggtatg

SEQ ID NO: 149189 - DNA, 15 bp, Homo sapiens
aatggggaagggtat

SEQ ID NO: 149190 - DNA, 15 bp, Homo sapiens
gaatggggaagggta

SEQ ID NO: 149191 - DNA, 15 bp, Homo sapiens
agaatggggaagggt

SEQ ID NO: 149192 - DNA, 15 bp, Homo sapiens
aagaatggggaaggg

SEQ ID NO: 149193 - DNA, 15 bp, Homo sapiens
caagaatggggaagg

SEQ ID NO: 149194 - DNA, 15 bp, Homo sapiens
ccaagaatggggaag

SEQ ID NO: 149195 - DNA, 15 bp, Homo sapiens
gccaagaatggggaa

SEQ ID NO: 149196 - DNA, 15 bp, Homo sapiens
agccaagaatgggga

SEQ ID NO: 149197 - DNA, 15 bp, Homo sapiens
aagccaagaatgggg

SEQ ID NO: 149198 - DNA, 15 bp, Homo sapiens
caagccaagaatggg

SEQ ID NO: 149199 - DNA, 15 bp, Homo sapiens
ccaagccaagaatgg

SEQ ID NO: 149200 - DNA, 15 bp, Homo sapiens
accaagccaagaatg

SEQ ID NO: 149201 - DNA, 15 bp, Homo sapiens
aaccaagccaagaat

SEQ ID NO: 149202 - DNA, 15 bp, Homo sapiens
taaccaagccaagaa

SEQ ID NO: 149203 - DNA, 15 bp, Homo sapiens
gtaaccaagccaaga

SEQ ID NO: 149204 - DNA, 15 bp, Homo sapiens
tgtaaccaagccaag

SEQ ID NO: 149205 - DNA, 15 bp, Homo sapiens
atgtaaccaagccaa

SEQ ID NO: 149206 - DNA, 15 bp, Homo sapiens
aatgtaaccaagcca

SEQ ID NO: 149207 - DNA, 15 bp, Homo sapiens
caatgtaaccaagcc

SEQ ID NO: 149208 - DNA, 15 bp, Homo sapiens
acaatgtaaccaagc

SEQ ID NO: 149209 - DNA, 15 bp, Homo sapiens
cacaatgtaaccaag

SEQ ID NO: 149210 - DNA, 15 bp, Homo sapiens
gcacaatgtaaccaa

SEQ ID NO: 149211 - DNA, 15 bp, Homo sapiens
agcacaatgtaacca

SEQ ID NO: 149212 - DNA, 15 bp, Homo sapiens
aagcacaatgtaacc

SEQ ID NO: 149213 - DNA, 15 bp, Homo sapiens
caagcacaatgtaac

SEQ ID NO: 149214 - DNA, 15 bp, Homo sapiens
acaagcacaatgtaa

SEQ ID NO: 149215 - DNA, 15 bp, Homo sapiens
gacaagcacaatgta

SEQ ID NO: 149216 - DNA, 15 bp, Homo sapiens
tgacaagcacaatgt

SEQ ID NO: 149217 - DNA, 15 bp, Homo sapiens
ttgacaagcacaatg

SEQ ID NO: 149218 - DNA, 15 bp, Homo sapiens
tttgacaagcacaat

SEQ ID NO: 149219 - DNA, 15 bp, Homo sapiens
atttgacaagcacaa

SEQ ID NO: 149220 - DNA, 15 bp, Homo sapiens
tatttgacaagcaca

SEQ ID NO: 149221 - DNA, 15 bp, Homo sapiens
ttatttgacaagcac

SEQ ID NO: 149222 - DNA, 15 bp, Homo sapiens
cttatttgacaagca

SEQ ID NO: 149223 - DNA, 15 bp, Homo sapiens
gcttatttgacaagc

SEQ ID NO: 149224 - DNA, 15 bp, Homo sapiens
tgcttatttgacaag

SEQ ID NO: 149225 - DNA, 15 bp, Homo sapiens
gtgcttatttgacaa

SEQ ID NO: 149226 - DNA, 15 bp, Homo sapiens
agtgcttatttgaca

SEQ ID NO: 149227 - DNA, 15 bp, Homo sapiens
gagtgcttatttgac

SEQ ID NO: 149228 - DNA, 15 bp, Homo sapiens
tgagtgcttatttga

SEQ ID NO: 149229 - DNA, 15 bp, Homo sapiens
ctgagtgcttatttg

SEQ ID NO: 149230 - DNA, 15 bp, Homo sapiens
gctgagtgcttattt

SEQ ID NO: 149231 - DNA, 15 bp, Homo sapiens
agctgagtgcttatt

SEQ ID NO: 149232 - DNA, 15 bp, Homo sapiens
gagctgagtgcttat

SEQ ID NO: 149233 - DNA, 15 bp, Homo sapiens
ggagctgagtgctta

SEQ ID NO: 149234 - DNA, 15 bp, Homo sapiens
gggagctgagtgctt

SEQ ID NO: 149235 - DNA, 15 bp, Homo sapiens
ggggagctgagtgct

SEQ ID NO: 149236 - DNA, 15 bp, Homo sapiens
aggggagctgagtgc

SEQ ID NO: 149237 - DNA, 15 bp, Homo sapiens
gaggggagctgagtg

SEQ ID NO: 149238 - DNA, 15 bp, Homo sapiens
agaggggagctgagt

SEQ ID NO: 149239 - DNA, 15 bp, Homo sapiens
cagaggggagctgag

SEQ ID NO: 149240 - DNA, 15 bp, Homo sapiens
tcagaggggagctga

SEQ ID NO: 149241 - DNA, 15 bp, Homo sapiens
ctcagaggggagctg

SEQ ID NO: 149242 - DNA, 15 bp, Homo sapiens
tctcagaggggagct

SEQ ID NO: 149243 - DNA, 15 bp, Homo sapiens
atctcagaggggagc

SEQ ID NO: 149244 - DNA, 15 bp, Homo sapiens
catctcagaggggag

SEQ ID NO: 149245 - DNA, 15 bp, Homo sapiens
tcatctcagagggga

SEQ ID NO: 149246 - DNA, 15 bp, Homo sapiens
ttcatctcagagggg

SEQ ID NO: 149247 - DNA, 15 bp, Homo sapiens
attcatctcagaggg

SEQ ID NO: 149248 - DNA, 15 bp, Homo sapiens
cattcatctcagagg

SEQ ID NO: 149249 - DNA, 15 bp, Homo sapiens
gcattcatctcagag

SEQ ID NO: 149250 - DNA, 15 bp, Homo sapiens
tgcattcatctcaga

SEQ ID NO: 149251 - DNA, 15 bp, Homo sapiens
atgcattcatctcag

SEQ ID NO: 149252 - DNA, 15 bp, Homo sapiens
tatgcattcatctca

SEQ ID NO: 149253 - DNA, 15 bp, Homo sapiens
atatgcattcatctc

SEQ ID NO: 149254 - DNA, 15 bp, Homo sapiens
aatatgcattcatct

SEQ ID NO: 149255 - DNA, 15 bp, Homo sapiens
gaatatgcattcatc

SEQ ID NO: 149256 - DNA, 15 bp, Homo sapiens
ggaatatgcattcat

SEQ ID NO: 149257 - DNA, 15 bp, Homo sapiens
gggaatatgcattca

SEQ ID NO: 149258 - DNA, 15 bp, Homo sapiens
cgggaatatgcattc

SEQ ID NO: 149259 - DNA, 15 bp, Homo sapiens
ccgggaatatgcatt

SEQ ID NO: 149260 - DNA, 15 bp, Homo sapiens
tccgggaatatgcat

SEQ ID NO: 149261 - DNA, 15 bp, Homo sapiens
ctccgggaatatgca

SEQ ID NO: 149262 - DNA, 15 bp, Homo sapiens
cctccgggaatatgc

SEQ ID NO: 149263 - DNA, 15 bp, Homo sapiens
acctccgggaatatg

SEQ ID NO: 149264 - DNA, 15 bp, Homo sapiens
cacctccgggaatat

SEQ ID NO: 149265 - DNA, 15 bp, Homo sapiens
acacctccgggaata

SEQ ID NO: 149266 - DNA, 15 bp, Homo sapiens
gacacctccgggaat

SEQ ID NO: 149267 - DNA, 15 bp, Homo sapiens
ggacacctccgggaa

SEQ ID NO: 149268 - DNA, 15 bp, Homo sapiens
gggacacctccggga

SEQ ID NO: 149269 - DNA, 15 bp, Homo sapiens
ggggacacctccggg

SEQ ID NO: 149270 - DNA, 15 bp, Homo sapiens
aggggacacctccgg

SEQ ID NO: 149271 - DNA, 15 bp, Homo sapiens
caggggacacctccg

SEQ ID NO: 149272 - DNA, 15 bp, Homo sapiens
ccaggggacacctcc

SEQ ID NO: 149273 - DNA, 15 bp, Homo sapiens
tccaggggacacctc

SEQ ID NO: 149274 - DNA, 15 bp, Homo sapiens
gtccaggggacacct

SEQ ID NO: 149275 - DNA, 15 bp, Homo sapiens
tgtccaggggacacc

SEQ ID NO: 149276 - DNA, 15 bp, Homo sapiens
atgtccaggggacac

SEQ ID NO: 149277 - DNA, 15 bp, Homo sapiens
catgtccaggggaca

SEQ ID NO: 149278 - DNA, 15 bp, Homo sapiens
gcatgtccaggggac

SEQ ID NO: 149279 - DNA, 15 bp, Homo sapiens
agcatgtccagggga

SEQ ID NO: 149280 - DNA, 15 bp, Homo sapiens
gagcatgtccagggg

SEQ ID NO: 149281 - DNA, 15 bp, Homo sapiens
agagcatgtccaggg

SEQ ID NO: 149282 - DNA, 15 bp, Homo sapiens
cagagcatgtccagg

SEQ ID NO: 149283 - DNA, 15 bp, Homo sapiens
tcagagcatgtccag

SEQ ID NO: 149284 - DNA, 15 bp, Homo sapiens
ctcagagcatgtcca

SEQ ID NO: 149285 - DNA, 15 bp, Homo sapiens
tctcagagcatgtcc

SEQ ID NO: 149286 - DNA, 15 bp, Homo sapiens
ttctcagagcatgtc

SEQ ID NO: 149287 - DNA, 15 bp, Homo sapiens
attctcagagcatgt

SEQ ID NO: 149288 - DNA, 15 bp, Homo sapiens
cattctcagagcatg

SEQ ID NO: 149289 - DNA, 15 bp, Homo sapiens
acattctcagagcat

SEQ ID NO: 149290 - DNA, 15 bp, Homo sapiens
aacattctcagagca

SEQ ID NO: 149291 - DNA, 15 bp, Homo sapiens
gaacattctcagagc

SEQ ID NO: 149292 - DNA, 15 bp, Homo sapiens
ggaacattctcagag

SEQ ID NO: 149293 - DNA, 15 bp, Homo sapiens
gggaacattctcaga

SEQ ID NO: 149294 - DNA, 15 bp, Homo sapiens
tgggaacattctcag

SEQ ID NO: 149295 - DNA, 15 bp, Homo sapiens
atgggaacattctca

SEQ ID NO: 149296 - DNA, 15 bp, Homo sapiens
catgggaacattctc

SEQ ID NO: 149297 - DNA, 15 bp, Homo sapiens
gcatgggaacattct

SEQ ID NO: 149298 - DNA, 15 bp, Homo sapiens
agcatgggaacattc

SEQ ID NO: 149299 - DNA, 15 bp, Homo sapiens
aagcatgggaacatt

SEQ ID NO: 149300 - DNA, 15 bp, Homo sapiens
caagcatgggaacat

SEQ ID NO: 149301 - DNA, 15 bp, Homo sapiens
gcaagcatgggaaca

SEQ ID NO: 149302 - DNA, 15 bp, Homo sapiens
agcaagcatgggaac

SEQ ID NO: 149303 - DNA, 15 bp, Homo sapiens
aagcaagcatgggaa

SEQ ID NO: 149304 - DNA, 15 bp, Homo sapiens
aaagcaagcatggga

SEQ ID NO: 149305 - DNA, 15 bp, Homo sapiens
caaagcaagcatggg

SEQ ID NO: 149306 - DNA, 15 bp, Homo sapiens
ccaaagcaagcatgg

SEQ ID NO: 149307 - DNA, 15 bp, Homo sapiens
accaaagcaagcatg

SEQ ID NO: 149308 - DNA, 15 bp, Homo sapiens
aaccaaagcaagcat

SEQ ID NO: 149309 - DNA, 15 bp, Homo sapiens
taaccaaagcaagca

SEQ ID NO: 149310 - DNA, 15 bp, Homo sapiens
gtaaccaaagcaagc

SEQ ID NO: 149311 - DNA, 15 bp, Homo sapiens
agtaaccaaagcaag

SEQ ID NO: 149312 - DNA, 15 bp, Homo sapiens
gagtaaccaaagcaa

SEQ ID NO: 149313 - DNA, 15 bp, Homo sapiens
tgagtaaccaaagca

SEQ ID NO: 149314 - DNA, 15 bp, Homo sapiens
ctgagtaaccaaagc

SEQ ID NO: 149315 - DNA, 15 bp, Homo sapiens
tctgagtaaccaaag

SEQ ID NO: 149316 - DNA, 15 bp, Homo sapiens
ttctgagtaaccaaa

SEQ ID NO: 149317 - DNA, 15 bp, Homo sapiens
gttctgagtaaccaa

SEQ ID NO: 149318 - DNA, 15 bp, Homo sapiens
ggttctgagtaacca

SEQ ID NO: 149319 - DNA, 15 bp, Homo sapiens
gggttctgagtaacc

SEQ ID NO: 149320 - DNA, 15 bp, Homo sapiens
ggggttctgagtaac

SEQ ID NO: 149321 - DNA, 15 bp, Homo sapiens
cggggttctgagtaa

SEQ ID NO: 149322 - DNA, 15 bp, Homo sapiens
tcggggttctgagta

SEQ ID NO: 149323 - DNA, 15 bp, Homo sapiens
ttcggggttctgagt

SEQ ID NO: 149324 - DNA, 15 bp, Homo sapiens
tttcggggttctgag

SEQ ID NO: 149325 - DNA, 15 bp, Homo sapiens
atttcggggttctga

SEQ ID NO: 149326 - DNA, 15 bp, Homo sapiens
gatttcggggttctg

SEQ ID NO: 149327 - DNA, 15 bp, Homo sapiens
ggatttcggggttct

SEQ ID NO: 149328 - DNA, 15 bp, Homo sapiens
tggatttcggggttc

SEQ ID NO: 149329 - DNA, 15 bp, Homo sapiens
gtggatttcggggtt

SEQ ID NO: 149330 - DNA, 15 bp, Homo sapiens
cgtggatttcggggt

SEQ ID NO: 149331 - DNA, 15 bp, Homo sapiens
ccgtggatttcgggg

SEQ ID NO: 149332 - DNA, 15 bp, Homo sapiens
cccgtggatttcggg

SEQ ID NO: 149333 - DNA, 15 bp, Homo sapiens
tcccgtggatttcgg

SEQ ID NO: 149334 - DNA, 15 bp, Homo sapiens
ctcccgtggatttcg

SEQ ID NO: 149335 - DNA, 15 bp, Homo sapiens
cctcccgtggatttc

SEQ ID NO: 149336 - DNA, 15 bp, Homo sapiens
ccctcccgtggattt

SEQ ID NO: 149337 - DNA, 15 bp, Homo sapiens
tccctcccgtggatt

SEQ ID NO: 149338 - DNA, 15 bp, Homo sapiens
atccctcccgtggat

SEQ ID NO: 149339 - DNA, 15 bp, Homo sapiens
catccctcccgtgga

SEQ ID NO: 149340 - DNA, 15 bp, Homo sapiens
tcatccctcccgtgg

SEQ ID NO: 149341 - DNA, 15 bp, Homo sapiens
ctcatccctcccgtg

SEQ ID NO: 149342 - DNA, 15 bp, Homo sapiens
cctcatccctcccgt

SEQ ID NO: 149343 - DNA, 15 bp, Homo sapiens
ccctcatccctcccg

SEQ ID NO: 149344 - DNA, 15 bp, Homo sapiens
accctcatccctccc

SEQ ID NO: 149345 - DNA, 15 bp, Homo sapiens
caccctcatccctcc

SEQ ID NO: 149346 - DNA, 15 bp, Homo sapiens
ccaccctcatccctc

SEQ ID NO: 149347 - DNA, 15 bp, Homo sapiens
accaccctcatccct

SEQ ID NO: 149348 - DNA, 15 bp, Homo sapiens
aaccaccctcatccc

SEQ ID NO: 149349 - DNA, 15 bp, Homo sapiens
caaccaccctcatcc

SEQ ID NO: 149350 - DNA, 15 bp, Homo sapiens
ccaaccaccctcatc

SEQ ID NO: 149351 - DNA, 15 bp, Homo sapiens
gccaaccaccctcat

SEQ ID NO: 149352 - DNA, 15 bp, Homo sapiens
agccaaccaccctca

SEQ ID NO: 149353 - DNA, 15 bp, Homo sapiens
cagccaaccaccctc

SEQ ID NO: 149354 - DNA, 15 bp, Homo sapiens
ccagccaaccaccct

SEQ ID NO: 149355 - DNA, 15 bp, Homo sapiens
gccagccaaccaccc

SEQ ID NO: 149356 - DNA, 15 bp, Homo sapiens
tgccagccaaccacc

SEQ ID NO: 149357 - DNA, 15 bp, Homo sapiens
ctgccagccaaccac

SEQ ID NO: 149358 - DNA, 15 bp, Homo sapiens
cctgccagccaacca

SEQ ID NO: 149359 - DNA, 15 bp, Homo sapiens
tcctgccagccaacc

SEQ ID NO: 149360 - DNA, 15 bp, Homo sapiens
ctcctgccagccaac

SEQ ID NO: 149361 - DNA, 15 bp, Homo sapiens
cctcctgccagccaa

SEQ ID NO: 149362 - DNA, 15 bp, Homo sapiens
ccctcctgccagcca

SEQ ID NO: 149363 - DNA, 15 bp, Homo sapiens
cccctcctgccagcc

SEQ ID NO: 149364 - DNA, 15 bp, Homo sapiens
gcccctcctgccagc

SEQ ID NO: 149365 - DNA, 15 bp, Homo sapiens
agcccctcctgccag

SEQ ID NO: 149366 - DNA, 15 bp, Homo sapiens
cagcccctcctgcca

SEQ ID NO: 149367 - DNA, 15 bp, Homo sapiens
gcagcccctcctgcc

SEQ ID NO: 149368 - DNA, 15 bp, Homo sapiens
agcagcccctcctgc

SEQ ID NO: 149369 - DNA, 15 bp, Homo sapiens
cagcagcccctcctg

SEQ ID NO: 149370 - DNA, 15 bp, Homo sapiens
ccagcagcccctcct

SEQ ID NO: 149371 - DNA, 15 bp, Homo sapiens
tccagcagcccctcc

SEQ ID NO: 149372 - DNA, 15 bp, Homo sapiens
ctccagcagcccctc

SEQ ID NO: 149373 - DNA, 15 bp, Homo sapiens
cctccagcagcccct

SEQ ID NO: 149374 - DNA, 15 bp, Homo sapiens
ccctccagcagcccc

SEQ ID NO: 149375 - DNA, 15 bp, Homo sapiens
gccctccagcagccc

SEQ ID NO: 149376 - DNA, 15 bp, Homo sapiens
agccctccagcagcc

SEQ ID NO: 149377 - DNA, 15 bp, Homo sapiens
cagccctccagcagc

SEQ ID NO: 149378 - DNA, 15 bp, Homo sapiens
tcagccctccagcag

SEQ ID NO: 149379 - DNA, 15 bp, Homo sapiens
ttcagccctccagca

SEQ ID NO: 149380 - DNA, 15 bp, Homo sapiens
gttcagccctccagc

SEQ ID NO: 149381 - DNA, 15 bp, Homo sapiens
tgttcagccctccag

SEQ ID NO: 149382 - DNA, 15 bp, Homo sapiens
ttgttcagccctcca

SEQ ID NO: 149383 - DNA, 15 bp, Homo sapiens
tttgttcagccctcc

SEQ ID NO: 149384 - DNA, 15 bp, Homo sapiens
atttgttcagccctc

SEQ ID NO: 149385 - DNA, 15 bp, Homo sapiens
catttgttcagccct

SEQ ID NO: 149386 - DNA, 15 bp, Homo sapiens
gcatttgttcagccc

SEQ ID NO: 149387 - DNA, 15 bp, Homo sapiens
ggcatttgttcagcc

SEQ ID NO: 149388 - DNA, 15 bp, Homo sapiens
gggcatttgttcagc

SEQ ID NO: 149389 - DNA, 15 bp, Homo sapiens
cgggcatttgttcag

SEQ ID NO: 149390 - DNA, 15 bp, Homo sapiens
acgggcatttgttca

SEQ ID NO: 149391 - DNA, 15 bp, Homo sapiens
cacgggcatttgttc

SEQ ID NO: 149392 - DNA, 15 bp, Homo sapiens
acacgggcatttgtt

SEQ ID NO: 149393 - DNA, 15 bp, Homo sapiens
cacacgggcatttgt

SEQ ID NO: 149394 - DNA, 15 bp, Homo sapiens
ccacacgggcatttg

SEQ ID NO: 149395 - DNA, 15 bp, Homo sapiens
cccacacgggcattt

SEQ ID NO: 149396 - DNA, 15 bp, Homo sapiens
ccccacacgggcatt

SEQ ID NO: 149397 - DNA, 15 bp, Homo sapiens
accccacacgggcat

SEQ ID NO: 149398 - DNA, 15 bp, Homo sapiens
caccccacacgggca

SEQ ID NO: 149399 - DNA, 15 bp, Homo sapiens
gcaccccacacgggc

SEQ ID NO: 149400 - DNA, 15 bp, Homo sapiens
agcaccccacacggg

SEQ ID NO: 149401 - DNA, 15 bp, Homo sapiens
cagcaccccacacgg

SEQ ID NO: 149402 - DNA, 15 bp, Homo sapiens
ccagcaccccacacg

SEQ ID NO: 149403 - DNA, 15 bp, Homo sapiens
accagcaccccacac

SEQ ID NO: 149404 - DNA, 15 bp, Homo sapiens
gaccagcaccccaca

SEQ ID NO: 149405 - DNA, 15 bp, Homo sapiens
agaccagcaccccac

SEQ ID NO: 149406 - DNA, 15 bp, Homo sapiens
gagaccagcacccca

SEQ ID NO: 149407 - DNA, 15 bp, Homo sapiens
ggagaccagcacccc

SEQ ID NO: 149408 - DNA, 15 bp, Homo sapiens
aggagaccagcaccc

SEQ ID NO: 149409 - DNA, 15 bp, Homo sapiens
taggagaccagcacc

SEQ ID NO: 149410 - DNA, 15 bp, Homo sapiens
ataggagaccagcac

SEQ ID NO: 149411 - DNA, 15 bp, Homo sapiens
cataggagaccagca

SEQ ID NO: 149412 - DNA, 15 bp, Homo sapiens
ccataggagaccagc

SEQ ID NO: 149413 - DNA, 15 bp, Homo sapiens
accataggagaccag

SEQ ID NO: 149414 - DNA, 15 bp, Homo sapiens
taccataggagacca

SEQ ID NO: 149415 - DNA, 15 bp, Homo sapiens
ctaccataggagacc

SEQ ID NO: 149416 - DNA, 15 bp, Homo sapiens
cctaccataggagac

SEQ ID NO: 149417 - DNA, 15 bp, Homo sapiens
tcctaccataggaga

SEQ ID NO: 149418 - DNA, 15 bp, Homo sapiens
atcctaccataggag

SEQ ID NO: 149419 - DNA, 15 bp, Homo sapiens
aatcctaccatagga

SEQ ID NO: 149420 - DNA, 15 bp, Homo sapiens
caatcctaccatagg

SEQ ID NO: 149421 - DNA, 15 bp, Homo sapiens
gcaatcctaccatag

SEQ ID NO: 149422 - DNA, 15 bp, Homo sapiens
tgcaatcctaccata

SEQ ID NO: 149423 - DNA, 15 bp, Homo sapiens
ttgcaatcctaccat

SEQ ID NO: 149424 - DNA, 15 bp, Homo sapiens
cttgcaatcctacca

SEQ ID NO: 149425 - DNA, 15 bp, Homo sapiens
ccttgcaatcctacc

SEQ ID NO: 149426 - DNA, 15 bp, Homo sapiens
cccttgcaatcctac

SEQ ID NO: 149427 - DNA, 15 bp, Homo sapiens
gcccttgcaatccta

SEQ ID NO: 149428 - DNA, 15 bp, Homo sapiens
agcccttgcaatcct

SEQ ID NO: 149429 - DNA, 15 bp, Homo sapiens
cagcccttgcaatcc

SEQ ID NO: 149430 - DNA, 15 bp, Homo sapiens
gcagcccttgcaatc

SEQ ID NO: 149431 - DNA, 15 bp, Homo sapiens
agcagcccttgcaat

SEQ ID NO: 149432 - DNA, 15 bp, Homo sapiens
tagcagcccttgcaa

SEQ ID NO: 149433 - DNA, 15 bp, Homo sapiens
ctagcagcccttgca

SEQ ID NO: 149434 - DNA, 15 bp, Homo sapiens
cctagcagcccttgc

SEQ ID NO: 149435 - DNA, 15 bp, Homo sapiens
acctagcagcccttg

SEQ ID NO: 149436 - DNA, 15 bp, Homo sapiens
tacctagcagccctt

SEQ ID NO: 149437 - DNA, 15 bp, Homo sapiens
ctacctagcagccct

SEQ ID NO: 149438 - DNA, 15 bp, Homo sapiens
cctacctagcagccc

SEQ ID NO: 149439 - DNA, 15 bp, Homo sapiens
tcctacctagcagcc

SEQ ID NO: 149440 - DNA, 15 bp, Homo sapiens
gtcctacctagcagc

SEQ ID NO: 149441 - DNA, 15 bp, Homo sapiens
agtcctacctagcag

SEQ ID NO: 149442 - DNA, 15 bp, Homo sapiens
cagtcctacctagca

SEQ ID NO: 149443 - DNA, 15 bp, Homo sapiens
tcagtcctacctagc

SEQ ID NO: 149444 - DNA, 15 bp, Homo sapiens
atcagtcctacctag

SEQ ID NO: 149445 - DNA, 15 bp, Homo sapiens
tatcagtcctaccta

SEQ ID NO: 149446 - DNA, 15 bp, Homo sapiens
atatcagtcctacct

SEQ ID NO: 149447 - DNA, 15 bp, Homo sapiens
catatcagtcctacc

SEQ ID NO: 149448 - DNA, 15 bp, Homo sapiens
acatatcagtcctac

SEQ ID NO: 149449 - DNA, 15 bp, Homo sapiens
cacatatcagtccta

SEQ ID NO: 149450 - DNA, 15 bp, Homo sapiens
gcacatatcagtcct

SEQ ID NO: 149451 - DNA, 15 bp, Homo sapiens
ggcacatatcagtcc

SEQ ID NO: 149452 - DNA, 15 bp, Homo sapiens
gggcacatatcagtc

SEQ ID NO: 149453 - DNA, 15 bp, Homo sapiens
tgggcacatatcagt

SEQ ID NO: 149454 - DNA, 15 bp, Homo sapiens
ctgggcacatatcag

SEQ ID NO: 149455 - DNA, 15 bp, Homo sapiens
actgggcacatatca

SEQ ID NO: 149456 - DNA, 15 bp, Homo sapiens
cactgggcacatatc

SEQ ID NO: 149457 - DNA, 15 bp, Homo sapiens
gcactgggcacatat

SEQ ID NO: 149458 - DNA, 15 bp, Homo sapiens
ggcactgggcacata

SEQ ID NO: 149459 - DNA, 15 bp, Homo sapiens
gggcactgggcacat

SEQ ID NO: 149460 - DNA, 15 bp, Homo sapiens
tgggcactgggcaca

SEQ ID NO: 149461 - DNA, 15 bp, Homo sapiens
ctgggcactgggcac

SEQ ID NO: 149462 - DNA, 15 bp, Homo sapiens
cctgggcactgggca

SEQ ID NO: 149463 - DNA, 15 bp, Homo sapiens
acctgggcactgggc

SEQ ID NO: 149464 - DNA, 15 bp, Homo sapiens
cacctgggcactggg

SEQ ID NO: 149465 - DNA, 15 bp, Homo sapiens
tcacctgggcactgg

SEQ ID NO: 149466 - DNA, 15 bp, Homo sapiens
gtcacctgggcactg

SEQ ID NO: 149467 - DNA, 15 bp, Homo sapiens
tgtcacctgggcact

SEQ ID NO: 149468 - DNA, 15 bp, Homo sapiens
ttgtcacctgggcac

SEQ ID NO: 149469 - DNA, 15 bp, Homo sapiens
tttgtcacctgggca

SEQ ID NO: 149470 - DNA, 15 bp, Homo sapiens
atttgtcacctgggc

SEQ ID NO: 149471 - DNA, 15 bp, Homo sapiens
catttgtcacctggg

SEQ ID NO: 149472 - DNA, 15 bp, Homo sapiens
tcatttgtcacctgg

SEQ ID NO: 149473 - DNA, 15 bp, Homo sapiens
gtcatttgtcacctg

SEQ ID NO: 149474 - DNA, 15 bp, Homo sapiens
tgtcatttgtcacct

SEQ ID NO: 149475 - DNA, 15 bp, Homo sapiens
ctgtcatttgtcacc

SEQ ID NO: 149476 - DNA, 15 bp, Homo sapiens
tctgtcatttgtcac

SEQ ID NO: 149477 - DNA, 15 bp, Homo sapiens
gtctgtcatttgtca

SEQ ID NO: 149478 - DNA, 15 bp, Homo sapiens
tgtctgtcatttgtc

SEQ ID NO: 149479 - DNA, 15 bp, Homo sapiens
ctgtctgtcatttgt

SEQ ID NO: 149480 - DNA, 15 bp, Homo sapiens
gctgtctgtcatttg

SEQ ID NO: 149481 - DNA, 15 bp, Homo sapiens
agctgtctgtcattt

SEQ ID NO: 149482 - DNA, 15 bp, Homo sapiens
aagctgtctgtcatt

SEQ ID NO: 149483 - DNA, 15 bp, Homo sapiens
caagctgtctgtcat

SEQ ID NO: 149484 - DNA, 15 bp, Homo sapiens
acaagctgtctgtca

SEQ ID NO: 149485 - DNA, 15 bp, Homo sapiens
cacaagctgtctgtc

SEQ ID NO: 149486 - DNA, 15 bp, Homo sapiens
ccacaagctgtctgt

SEQ ID NO: 149487 - DNA, 15 bp, Homo sapiens
cccacaagctgtctg

SEQ ID NO: 149488 - DNA, 15 bp, Homo sapiens
ccccacaagctgtct

SEQ ID NO: 149489 - DNA, 15 bp, Homo sapiens
gccccacaagctgtc

SEQ ID NO: 149490 - DNA, 15 bp, Homo sapiens
tgccccacaagctgt

SEQ ID NO: 149491 - DNA, 15 bp, Homo sapiens
ctgccccacaagctg

SEQ ID NO: 149492 - DNA, 15 bp, Homo sapiens
cctgccccacaagct

SEQ ID NO: 149493 - DNA, 15 bp, Homo sapiens
ccctgccccacaagc

SEQ ID NO: 149494 - DNA, 15 bp, Homo sapiens
tccctgccccacaag

SEQ ID NO: 149495 - DNA, 15 bp, Homo sapiens
ttccctgccccacaa

SEQ ID NO: 149496 - DNA, 15 bp, Homo sapiens
cttccctgccccaca

SEQ ID NO: 149497 - DNA, 15 bp, Homo sapiens
gcttccctgccccac

SEQ ID NO: 149498 - DNA, 15 bp, Homo sapiens
tgcttccctgcccca

SEQ ID NO: 149499 - DNA, 15 bp, Homo sapiens
gtgcttccctgcccc

SEQ ID NO: 149500 - DNA, 15 bp, Homo sapiens
ggtgcttccctgccc

SEQ ID NO: 149501 - DNA, 15 bp, Homo sapiens
aggtgcttccctgcc

SEQ ID NO: 149502 - DNA, 15 bp, Homo sapiens
gaggtgcttccctgc

SEQ ID NO: 149503 - DNA, 15 bp, Homo sapiens
ggaggtgcttccctg

SEQ ID NO: 149504 - DNA, 15 bp, Homo sapiens
aggaggtgcttccct

SEQ ID NO: 149505 - DNA, 15 bp, Homo sapiens
taggaggtgcttccc

SEQ ID NO: 149506 - DNA, 15 bp, Homo sapiens
ctaggaggtgcttcc

SEQ ID NO: 149507 - DNA, 15 bp, Homo sapiens
actaggaggtgcttc

SEQ ID NO: 149508 - DNA, 15 bp, Homo sapiens
cactaggaggtgctt

SEQ ID NO: 149509 - DNA, 15 bp, Homo sapiens
acactaggaggtgct

SEQ ID NO: 149510 - DNA, 15 bp, Homo sapiens
cacactaggaggtgc

SEQ ID NO: 149511 - DNA, 15 bp, Homo sapiens
gcacactaggaggtg

SEQ ID NO: 149512 - DNA, 15 bp, Homo sapiens
agcacactaggaggt

SEQ ID NO: 149513 - DNA, 15 bp, Homo sapiens
tagcacactaggagg

SEQ ID NO: 149514 - DNA, 15 bp, Homo sapiens
gtagcacactaggag

SEQ ID NO: 149515 - DNA, 15 bp, Homo sapiens
ggtagcacactagga

SEQ ID NO: 149516 - DNA, 15 bp, Homo sapiens
aggtagcacactagg

SEQ ID NO: 149517 - DNA, 15 bp, Homo sapiens
gaggtagcacactag

SEQ ID NO: 149518 - DNA, 15 bp, Homo sapiens
ggaggtagcacacta

SEQ ID NO: 149519 - DNA, 15 bp, Homo sapiens
tggaggtagcacact

SEQ ID NO: 149520 - DNA, 15 bp, Homo sapiens
atggaggtagcacac

SEQ ID NO: 149521 - DNA, 15 bp, Homo sapiens
tatggaggtagcaca

SEQ ID NO: 149522 - DNA, 15 bp, Homo sapiens
atatggaggtagcac

SEQ ID NO: 149523 - DNA, 15 bp, Homo sapiens
aatatggaggtagca

SEQ ID NO: 149524 - DNA, 15 bp, Homo sapiens
gaatatggaggtagc

SEQ ID NO: 149525 - DNA, 15 bp, Homo sapiens
agaatatggaggtag

SEQ ID NO: 149526 - DNA, 15 bp, Homo sapiens
aagaatatggaggta

SEQ ID NO: 149527 - DNA, 15 bp, Homo sapiens
gaagaatatggaggt

SEQ ID NO: 149528 - DNA, 15 bp, Homo sapiens
agaagaatatggagg

SEQ ID NO: 149529 - DNA, 15 bp, Homo sapiens
tagaagaatatggag

SEQ ID NO: 149530 - DNA, 15 bp, Homo sapiens
gtagaagaatatgga

SEQ ID NO: 149531 - DNA, 15 bp, Homo sapiens
tgtagaagaatatgg

SEQ ID NO: 149532 - DNA, 15 bp, Homo sapiens
gtgtagaagaatatg

SEQ ID NO: 149533 - DNA, 15 bp, Homo sapiens
ggtgtagaagaatat

SEQ ID NO: 149534 - DNA, 15 bp, Homo sapiens
tggtgtagaagaata

SEQ ID NO: 149535 - DNA, 15 bp, Homo sapiens
atggtgtagaagaat

SEQ ID NO: 149536 - DNA, 15 bp, Homo sapiens
gatggtgtagaagaa

SEQ ID NO: 149537 - DNA, 15 bp, Homo sapiens
tgatggtgtagaaga

SEQ ID NO: 149538 - DNA, 15 bp, Homo sapiens
ttgatggtgtagaag

SEQ ID NO: 149539 - DNA, 15 bp, Homo sapiens
tttgatggtgtagaa

SEQ ID NO: 149540 - DNA, 15 bp, Homo sapiens
atttgatggtgtaga

SEQ ID NO: 149541 - DNA, 15 bp, Homo sapiens
aatttgatggtgtag

SEQ ID NO: 149542 - DNA, 15 bp, Homo sapiens
aaatttgatggtgta

SEQ ID NO: 149543 - DNA, 15 bp, Homo sapiens
aaaatttgatggtgt

SEQ ID NO: 149544 - DNA, 15 bp, Homo sapiens
taaaatttgatggtg

SEQ ID NO: 149545 - DNA, 15 bp, Homo sapiens
ttaaaatttgatggt

SEQ ID NO: 149546 - DNA, 15 bp, Homo sapiens
tttaaaatttgatgg

SEQ ID NO: 149547 - DNA, 15 bp, Homo sapiens
ttttaaaatttgatg

SEQ ID NO: 149548 - DNA, 15 bp, Homo sapiens
tttttaaaatttgat

SEQ ID NO: 149549 - DNA, 15 bp, Homo sapiens
gtttttaaaatttga

SEQ ID NO: 149550 - DNA, 15 bp, Homo sapiens
ggtttttaaaatttg

SEQ ID NO: 149551 - DNA, 15 bp, Homo sapiens
cggtttttaaaattt

SEQ ID NO: 149552 - DNA, 15 bp, Homo sapiens
tcggtttttaaaatt

SEQ ID NO: 149553 - DNA, 15 bp, Homo sapiens
ctcggtttttaaaat

SEQ ID NO: 149554 - DNA, 15 bp, Homo sapiens
gctcggtttttaaaa

SEQ ID NO: 149555 - DNA, 15 bp, Homo sapiens
agctcggtttttaaa

SEQ ID NO: 149556 - DNA, 15 bp, Homo sapiens
aagctcggtttttaa

SEQ ID NO: 149557 - DNA, 15 bp, Homo sapiens
aaagctcggttttta

SEQ ID NO: 149558 - DNA, 15 bp, Homo sapiens
taaagctcggttttt

SEQ ID NO: 149559 - DNA, 15 bp, Homo sapiens
ataaagctcggtttt

SEQ ID NO: 149560 - DNA, 15 bp, Homo sapiens
aataaagctcggttt

SEQ ID NO: 149561 - DNA, 15 bp, Homo sapiens
caataaagctcggtt

SEQ ID NO: 149562 - DNA, 15 bp, Homo sapiens
tcaataaagctcggt

SEQ ID NO: 149563 - DNA, 15 bp, Homo sapiens
ctcaataaagctcgg

SEQ ID NO: 149564 - DNA, 15 bp, Homo sapiens
cctcaataaagctcg

SEQ ID NO: 149565 - DNA, 15 bp, Homo sapiens
acctcaataaagctc

SEQ ID NO: 149566 - DNA, 15 bp, Homo sapiens
tacctcaataaagct

SEQ ID NO: 149567 - DNA, 15 bp, Homo sapiens
atacctcaataaagc

SEQ ID NO: 149568 - DNA, 15 bp, Homo sapiens
gatacctcaataaag

SEQ ID NO: 149569 - DNA, 15 bp, Homo sapiens
tgatacctcaataaa

SEQ ID NO: 149570 - DNA, 15 bp, Homo sapiens
gtgatacctcaataa

SEQ ID NO: 149571 - DNA, 15 bp, Homo sapiens
agtgatacctcaata

SEQ ID NO: 149572 - DNA, 15 bp, Homo sapiens
gagtgatacctcaat

SEQ ID NO: 149573 - DNA, 15 bp, Homo sapiens
tgagtgatacctcaa

SEQ ID NO: 149574 - DNA, 15 bp, Homo sapiens
gtgagtgatacctca

SEQ ID NO: 149575 - DNA, 15 bp, Homo sapiens
tgtgagtgatacctc

SEQ ID NO: 149576 - DNA, 15 bp, Homo sapiens
atgtgagtgatacct

SEQ ID NO: 149577 - DNA, 15 bp, Homo sapiens
catgtgagtgatacc

SEQ ID NO: 149578 - DNA, 15 bp, Homo sapiens
gcatgtgagtgatac

SEQ ID NO: 149579 - DNA, 15 bp, Homo sapiens
agcatgtgagtgata

SEQ ID NO: 149580 - DNA, 15 bp, Homo sapiens
tagcatgtgagtgat

SEQ ID NO: 149581 - DNA, 15 bp, Homo sapiens
atagcatgtgagtga

SEQ ID NO: 149582 - DNA, 15 bp, Homo sapiens
tatagcatgtgagtg

SEQ ID NO: 149583 - DNA, 15 bp, Homo sapiens
ttatagcatgtgagt

SEQ ID NO: 149584 - DNA, 15 bp, Homo sapiens
tttatagcatgtgag

SEQ ID NO: 149585 - DNA, 15 bp, Homo sapiens
ttttatagcatgtga

SEQ ID NO: 149586 - DNA, 15 bp, Homo sapiens
attttatagcatgtg

SEQ ID NO: 149587 - DNA, 15 bp, Homo sapiens
aattttatagcatgt

SEQ ID NO: 149588 - DNA, 15 bp, Homo sapiens
aaattttatagcatg

SEQ ID NO: 149589 - DNA, 15 bp, Homo sapiens
taaattttatagcat

SEQ ID NO: 149590 - DNA, 15 bp, Homo sapiens
gtaaattttatagca

SEQ ID NO: 149591 - DNA, 15 bp, Homo sapiens
agtaaattttatagc

SEQ ID NO: 149592 - DNA, 15 bp, Homo sapiens
gagtaaattttatag

SEQ ID NO: 149593 - DNA, 15 bp, Homo sapiens
tgagtaaattttata

SEQ ID NO: 149594 - DNA, 15 bp, Homo sapiens
atgagtaaattttat

SEQ ID NO: 149595 - DNA, 15 bp, Homo sapiens
aatgagtaaatttta

SEQ ID NO: 149596 - DNA, 15 bp, Homo sapiens
aaatgagtaaatttt

SEQ ID NO: 149597 - DNA, 15 bp, Homo sapiens
caaatgagtaaattt

SEQ ID NO: 149598 - DNA, 15 bp, Homo sapiens
gcaaatgagtaaatt

SEQ ID NO: 149599 - DNA, 15 bp, Homo sapiens
tgcaaatgagtaaat

SEQ ID NO: 149600 - DNA, 15 bp, Homo sapiens
ctgcaaatgagtaaa

SEQ ID NO: 149601 - DNA, 15 bp, Homo sapiens
actgcaaatgagtaa

SEQ ID NO: 149602 - DNA, 15 bp, Homo sapiens
cactgcaaatgagta

SEQ ID NO: 149603 - DNA, 15 bp, Homo sapiens
ccactgcaaatgagt

SEQ ID NO: 149604 - DNA, 15 bp, Homo sapiens
accactgcaaatgag

SEQ ID NO: 149605 - DNA, 15 bp, Homo sapiens
aaccactgcaaatga

SEQ ID NO: 149606 - DNA, 15 bp, Homo sapiens
aaaccactgcaaatg

SEQ ID NO: 149607 - DNA, 15 bp, Homo sapiens
aaaaccactgcaaat

SEQ ID NO: 149608 - DNA, 15 bp, Homo sapiens
aaaaaccactgcaaa

SEQ ID NO: 149609 - DNA, 15 bp, Homo sapiens
taaaaaccactgcaa

SEQ ID NO: 149610 - DNA, 15 bp, Homo sapiens
ctaaaaaccactgca

SEQ ID NO: 149611 - DNA, 15 bp, Homo sapiens
actaaaaaccactgc

SEQ ID NO: 149612 - DNA, 15 bp, Homo sapiens
tactaaaaaccactg

SEQ ID NO: 149613 - DNA, 15 bp, Homo sapiens
atactaaaaaccact

SEQ ID NO: 149614 - DNA, 15 bp, Homo sapiens
tatactaaaaaccac

SEQ ID NO: 149615 - DNA, 15 bp, Homo sapiens
atatactaaaaacca

SEQ ID NO: 149616 - DNA, 15 bp, Homo sapiens
tatatactaaaaacc

SEQ ID NO: 149617 - DNA, 15 bp, Homo sapiens
gtatatactaaaaac

SEQ ID NO: 149618 - DNA, 15 bp, Homo sapiens
tgtatatactaaaaa

SEQ ID NO: 149619 - DNA, 15 bp, Homo sapiens
ctgtatatactaaaa

SEQ ID NO: 149620 - DNA, 15 bp, Homo sapiens
tctgtatatactaaa

SEQ ID NO: 149621 - DNA, 15 bp, Homo sapiens
ctctgtatatactaa

SEQ ID NO: 149622 - DNA, 15 bp, Homo sapiens
tctctgtatatacta

SEQ ID NO: 149623 - DNA, 15 bp, Homo sapiens
ctctctgtatatact

SEQ ID NO: 149624 - DNA, 15 bp, Homo sapiens
actctctgtatatac

SEQ ID NO: 149625 - DNA, 15 bp, Homo sapiens
aactctctgtatata

SEQ ID NO: 149626 - DNA, 15 bp, Homo sapiens
caactctctgtatat

SEQ ID NO: 149627 - DNA, 15 bp, Homo sapiens
acaactctctgtata

SEQ ID NO: 149628 - DNA, 15 bp, Homo sapiens
cacaactctctgtat

SEQ ID NO: 149629 - DNA, 15 bp, Homo sapiens
gcacaactctctgta

SEQ ID NO: 149630 - DNA, 15 bp, Homo sapiens
tgcacaactctctgt

SEQ ID NO: 149631 - DNA, 15 bp, Homo sapiens
ttgcacaactctctg

SEQ ID NO: 149632 - DNA, 15 bp, Homo sapiens
attgcacaactctct

SEQ ID NO: 149633 - DNA, 15 bp, Homo sapiens
gattgcacaactctc

SEQ ID NO: 149634 - DNA, 15 bp, Homo sapiens
tgattgcacaactct

SEQ ID NO: 149635 - DNA, 15 bp, Homo sapiens
atgattgcacaactc

SEQ ID NO: 149636 - DNA, 15 bp, Homo sapiens
aatgattgcacaact

SEQ ID NO: 149637 - DNA, 15 bp, Homo sapiens
caatgattgcacaac

SEQ ID NO: 149638 - DNA, 15 bp, Homo sapiens
gcaatgattgcacaa

SEQ ID NO: 149639 - DNA, 15 bp, Homo sapiens
agcaatgattgcaca

SEQ ID NO: 149640 - DNA, 15 bp, Homo sapiens
tagcaatgattgcac

SEQ ID NO: 149641 - DNA, 15 bp, Homo sapiens
atagcaatgattgca

SEQ ID NO: 149642 - DNA, 15 bp, Homo sapiens
aatagcaatgattgc

SEQ ID NO: 149643 - DNA, 15 bp, Homo sapiens
taatagcaatgattg

SEQ ID NO: 149644 - DNA, 15 bp, Homo sapiens
ataatagcaatgatt

SEQ ID NO: 149645 - DNA, 15 bp, Homo sapiens
aataatagcaatgat

SEQ ID NO: 149646 - DNA, 15 bp, Homo sapiens
aaataatagcaatga

SEQ ID NO: 149647 - DNA, 15 bp, Homo sapiens
taaataatagcaatg

SEQ ID NO: 149648 - DNA, 15 bp, Homo sapiens
ttaaataatagcaat

SEQ ID NO: 149649 - DNA, 15 bp, Homo sapiens
attaaataatagcaa

SEQ ID NO: 149650 - DNA, 15 bp, Homo sapiens
aattaaataatagca

SEQ ID NO: 149651 - DNA, 15 bp, Homo sapiens
gaattaaataatagc

SEQ ID NO: 149652 - DNA, 15 bp, Homo sapiens
ggaattaaataatag

SEQ ID NO: 149653 - DNA, 15 bp, Homo sapiens
tggaattaaataata

SEQ ID NO: 149654 - DNA, 15 bp, Homo sapiens
ctggaattaaataat

SEQ ID NO: 149655 - DNA, 15 bp, Homo sapiens
tctggaattaaataa

SEQ ID NO: 149656 - DNA, 15 bp, Homo sapiens
ttctggaattaaata

SEQ ID NO: 149657 - DNA, 15 bp, Homo sapiens
gttctggaattaaat

SEQ ID NO: 149658 - DNA, 15 bp, Homo sapiens
tgttctggaattaaa

SEQ ID NO: 149659 - DNA, 15 bp, Homo sapiens
atgttctggaattaa

SEQ ID NO: 149660 - DNA, 15 bp, Homo sapiens
aatgttctggaatta

SEQ ID NO: 149661 - DNA, 15 bp, Homo sapiens
aaatgttctggaatt

SEQ ID NO: 149662 - DNA, 15 bp, Homo sapiens
aaaatgttctggaat

SEQ ID NO: 149663 - DNA, 15 bp, Homo sapiens
gaaaatgttctggaa

SEQ ID NO: 149664 - DNA, 15 bp, Homo sapiens
tgaaaatgttctgga

SEQ ID NO: 149665 - DNA, 15 bp, Homo sapiens
atgaaaatgttctgg

SEQ ID NO: 149666 - DNA, 15 bp, Homo sapiens
gatgaaaatgttctg

SEQ ID NO: 149667 - DNA, 15 bp, Homo sapiens
tgatgaaaatgttct

SEQ ID NO: 149668 - DNA, 15 bp, Homo sapiens
ttgatgaaaatgttc

SEQ ID NO: 149669 - DNA, 15 bp, Homo sapiens
gttgatgaaaatgtt

SEQ ID NO: 149670 - DNA, 15 bp, Homo sapiens
ggttgatgaaaatgt

SEQ ID NO: 149671 - DNA, 15 bp, Homo sapiens
aggttgatgaaaatg

SEQ ID NO: 149672 - DNA, 15 bp, Homo sapiens
taggttgatgaaaat

SEQ ID NO: 149673 - DNA, 15 bp, Homo sapiens
ttaggttgatgaaaa

SEQ ID NO: 149674 - DNA, 15 bp, Homo sapiens
tttaggttgatgaaa

SEQ ID NO: 149675 - DNA, 15 bp, Homo sapiens
ttttaggttgatgaa

SEQ ID NO: 149676 - DNA, 15 bp, Homo sapiens
cttttaggttgatga

SEQ ID NO: 149677 - DNA, 15 bp, Homo sapiens
tcttttaggttgatg

SEQ ID NO: 149678 - DNA, 15 bp, Homo sapiens
ttcttttaggttgat

SEQ ID NO: 149679 - DNA, 15 bp, Homo sapiens
tttcttttaggttga

SEQ ID NO: 149680 - DNA, 15 bp, Homo sapiens
gtttcttttaggttg

SEQ ID NO: 149681 - DNA, 15 bp, Homo sapiens
tgtttcttttaggtt

SEQ ID NO: 149682 - DNA, 15 bp, Homo sapiens
ttgtttcttttaggt

SEQ ID NO: 149683 - DNA, 15 bp, Homo sapiens
tttgtttcttttagg

SEQ ID NO: 149684 - DNA, 15 bp, Homo sapiens
gtttgtttcttttag

SEQ ID NO: 149685 - DNA, 15 bp, Homo sapiens
ggtttgtttctttta

SEQ ID NO: 149686 - DNA, 15 bp, Homo sapiens
gggtttgtttctttt

SEQ ID NO: 149687 - DNA, 15 bp, Homo sapiens
ggggtttgtttcttt

SEQ ID NO: 149688 - DNA, 15 bp, Homo sapiens
tggggtttgtttctt

SEQ ID NO: 149689 - DNA, 15 bp, Homo sapiens
atggggtttgtttct

SEQ ID NO: 149690 - DNA, 15 bp, Homo sapiens
tatggggtttgtttc

SEQ ID NO: 149691 - DNA, 15 bp, Homo sapiens
gtatggggtttgttt

SEQ ID NO: 149692 - DNA, 15 bp, Homo sapiens
ggtatggggtttgtt

SEQ ID NO: 149693 - DNA, 15 bp, Homo sapiens
gggtatggggtttgt

SEQ ID NO: 149694 - DNA, 15 bp, Homo sapiens
tgggtatggggtttg

SEQ ID NO: 149695 - DNA, 15 bp, Homo sapiens
atgggtatggggttt

SEQ ID NO: 149696 - DNA, 15 bp, Homo sapiens
catgggtatggggtt

SEQ ID NO: 149697 - DNA, 15 bp, Homo sapiens
tcatgggtatggggt

SEQ ID NO: 149698 - DNA, 15 bp, Homo sapiens
ctcatgggtatgggg

SEQ ID NO: 149699 - DNA, 15 bp, Homo sapiens
gctcatgggtatggg

SEQ ID NO: 149700 - DNA, 15 bp, Homo sapiens
tgctcatgggtatgg

SEQ ID NO: 149701 - DNA, 15 bp, Homo sapiens
ctgctcatgggtatg

SEQ ID NO: 149702 - DNA, 15 bp, Homo sapiens
actgctcatgggtat

SEQ ID NO: 149703 - DNA, 15 bp, Homo sapiens
gactgctcatgggta

SEQ ID NO: 149704 - DNA, 15 bp, Homo sapiens
tgactgctcatgggt

SEQ ID NO: 149705 - DNA, 15 bp, Homo sapiens
gtgactgctcatggg

SEQ ID NO: 149706 - DNA, 15 bp, Homo sapiens
agtgactgctcatgg

SEQ ID NO: 149707 - DNA, 15 bp, Homo sapiens
gagtgactgctcatg

SEQ ID NO: 149708 - DNA, 15 bp, Homo sapiens
ggagtgactgctcat

SEQ ID NO: 149709 - DNA, 15 bp, Homo sapiens
gggagtgactgctca

SEQ ID NO: 149710 - DNA, 15 bp, Homo sapiens
ggggagtgactgctc

SEQ ID NO: 149711 - DNA, 15 bp, Homo sapiens
tggggagtgactgct

SEQ ID NO: 149712 - DNA, 15 bp, Homo sapiens
gtggggagtgactgc

SEQ ID NO: 149713 - DNA, 15 bp, Homo sapiens
tgtggggagtgactg

SEQ ID NO: 149714 - DNA, 15 bp, Homo sapiens
gtgtggggagtgact

SEQ ID NO: 149715 - DNA, 15 bp, Homo sapiens
ggtgtggggagtgac

SEQ ID NO: 149716 - DNA, 15 bp, Homo sapiens
gggtgtggggagtga

SEQ ID NO: 149717 - DNA, 15 bp, Homo sapiens
ggggtgtggggagtg

SEQ ID NO: 149718 - DNA, 15 bp, Homo sapiens
aggggtgtggggagt

SEQ ID NO: 149719 - DNA, 15 bp, Homo sapiens
gaggggtgtggggag

SEQ ID NO: 149720 - DNA, 15 bp, Homo sapiens
ggaggggtgtgggga

SEQ ID NO: 149721 - DNA, 15 bp, Homo sapiens
aggaggggtgtgggg

SEQ ID NO: 149722 - DNA, 15 bp, Homo sapiens
aaggaggggtgtggg

SEQ ID NO: 149723 - DNA, 15 bp, Homo sapiens
gaaggaggggtgtgg

SEQ ID NO: 149724 - DNA, 15 bp, Homo sapiens
ggaaggaggggtgtg

SEQ ID NO: 149725 - DNA, 15 bp, Homo sapiens
gggaaggaggggtgt

SEQ ID NO: 149726 - DNA, 15 bp, Homo sapiens
ggggaaggaggggtg

SEQ ID NO: 149727 - DNA, 15 bp, Homo sapiens
tggggaaggaggggt

SEQ ID NO: 149728 - DNA, 15 bp, Homo sapiens
ctggggaaggagggg

SEQ ID NO: 149729 - DNA, 15 bp, Homo sapiens
gctggggaaggaggg

SEQ ID NO: 149730 - DNA, 15 bp, Homo sapiens
ggctggggaaggagg

SEQ ID NO: 149731 - DNA, 15 bp, Homo sapiens
aggctggggaaggag

SEQ ID NO: 149732 - DNA, 15 bp, Homo sapiens
gaggctggggaagga

SEQ ID NO: 149733 - DNA, 15 bp, Homo sapiens
tgaggctggggaagg

SEQ ID NO: 149734 - DNA, 15 bp, Homo sapiens
ctgaggctggggaag

SEQ ID NO: 149735 - DNA, 15 bp, Homo sapiens
tctgaggctggggaa

SEQ ID NO: 149736 - DNA, 15 bp, Homo sapiens
gtctgaggctgggga

SEQ ID NO: 149737 - DNA, 15 bp, Homo sapiens
cgtctgaggctgggg

SEQ ID NO: 149738 - DNA, 15 bp, Homo sapiens
gcgtctgaggctggg

SEQ ID NO: 149739 - DNA, 15 bp, Homo sapiens
agcgtctgaggctgg

SEQ ID NO: 149740 - DNA, 15 bp, Homo sapiens
tagcgtctgaggctg

SEQ ID NO: 149741 - DNA, 15 bp, Homo sapiens
gtagcgtctgaggct

SEQ ID NO: 149742 - DNA, 15 bp, Homo sapiens
agtagcgtctgaggc

SEQ ID NO: 149743 - DNA, 15 bp, Homo sapiens
cagtagcgtctgagg

SEQ ID NO: 149744 - DNA, 15 bp, Homo sapiens
tcagtagcgtctgag

SEQ ID NO: 149745 - DNA, 15 bp, Homo sapiens
ttcagtagcgtctga

SEQ ID NO: 149746 - DNA, 15 bp, Homo sapiens
gttcagtagcgtctg

SEQ ID NO: 149747 - DNA, 15 bp, Homo sapiens
agttcagtagcgtct

SEQ ID NO: 149748 - DNA, 15 bp, Homo sapiens
cagttcagtagcgtc

SEQ ID NO: 149749 - DNA, 15 bp, Homo sapiens
gcagttcagtagcgt

SEQ ID NO: 149750 - DNA, 15 bp, Homo sapiens
agcagttcagtagcg

SEQ ID NO: 149751 - DNA, 15 bp, Homo sapiens
cagcagttcagtagc

SEQ ID NO: 149752 - DNA, 15 bp, Homo sapiens
acagcagttcagtag

SEQ ID NO: 149753 - DNA, 15 bp, Homo sapiens
gacagcagttcagta

SEQ ID NO: 149754 - DNA, 15 bp, Homo sapiens
agacagcagttcagt

SEQ ID NO: 149755 - DNA, 15 bp, Homo sapiens
cagacagcagttcag

SEQ ID NO: 149756 - DNA, 15 bp, Homo sapiens
acagacagcagttca

SEQ ID NO: 149757 - DNA, 15 bp, Homo sapiens
gacagacagcagttc

SEQ ID NO: 149758 - DNA, 15 bp, Homo sapiens
agacagacagcagtt

SEQ ID NO: 149759 - DNA, 15 bp, Homo sapiens
cagacagacagcagt

SEQ ID NO: 149760 - DNA, 15 bp, Homo sapiens
acagacagacagcag

SEQ ID NO: 149761 - DNA, 15 bp, Homo sapiens
tacagacagacagca

SEQ ID NO: 149762 - DNA, 15 bp, Homo sapiens
gtacagacagacagc

SEQ ID NO: 149763 - DNA, 15 bp, Homo sapiens
cgtacagacagacag

SEQ ID NO: 149764 - DNA, 15 bp, Homo sapiens
ccgtacagacagaca

SEQ ID NO: 149765 - DNA, 15 bp, Homo sapiens
tccgtacagacagac

SEQ ID NO: 149766 - DNA, 15 bp, Homo sapiens
atccgtacagacaga

SEQ ID NO: 149767 - DNA, 15 bp, Homo sapiens
aatccgtacagacag

SEQ ID NO: 149768 - DNA, 15 bp, Homo sapiens
aaatccgtacagaca

SEQ ID NO: 149769 - DNA, 15 bp, Homo sapiens
caaatccgtacagac

SEQ ID NO: 149770 - DNA, 15 bp, Homo sapiens
gcaaatccgtacaga

SEQ ID NO: 149771 - DNA, 15 bp, Homo sapiens
ggcaaatccgtacag

SEQ ID NO: 149772 - DNA, 15 bp, Homo sapiens
gggcaaatccgtaca

SEQ ID NO: 149773 - DNA, 15 bp, Homo sapiens
ggggcaaatccgtac

SEQ ID NO: 149774 - DNA, 15 bp, Homo sapiens
aggggcaaatccgta

SEQ ID NO: 149775 - DNA, 15 bp, Homo sapiens
aaggggcaaatccgt

SEQ ID NO: 149776 - DNA, 15 bp, Homo sapiens
caaggggcaaatccg

SEQ ID NO: 149777 - DNA, 15 bp, Homo sapiens
acaaggggcaaatcc

SEQ ID NO: 149778 - DNA, 15 bp, Homo sapiens
cacaaggggcaaatc

SEQ ID NO: 149779 - DNA, 15 bp, Homo sapiens
ccacaaggggcaaat

SEQ ID NO: 149780 - DNA, 15 bp, Homo sapiens
gccacaaggggcaaa

SEQ ID NO: 149781 - DNA, 15 bp, Homo sapiens
ggccacaaggggcaa

SEQ ID NO: 149782 - DNA, 15 bp, Homo sapiens
tggccacaaggggca

SEQ ID NO: 149783 - DNA, 15 bp, Homo sapiens
atggccacaaggggc

SEQ ID NO: 149784 - DNA, 15 bp, Homo sapiens
aatggccacaagggg

SEQ ID NO: 149785 - DNA, 15 bp, Homo sapiens
gaatggccacaaggg

SEQ ID NO: 149786 - DNA, 15 bp, Homo sapiens
ggaatggccacaagg

SEQ ID NO: 149787 - DNA, 15 bp, Homo sapiens
tggaatggccacaag

SEQ ID NO: 149788 - DNA, 15 bp, Homo sapiens
atggaatggccacaa

SEQ ID NO: 149789 - DNA, 15 bp, Homo sapiens
gatggaatggccaca

SEQ ID NO: 149790 - DNA, 15 bp, Homo sapiens
agatggaatggccac

SEQ ID NO: 149791 - DNA, 15 bp, Homo sapiens
tagatggaatggcca

SEQ ID NO: 149792 - DNA, 15 bp, Homo sapiens
ttagatggaatggcc

SEQ ID NO: 149793 - DNA, 15 bp, Homo sapiens
tttagatggaatggc

SEQ ID NO: 149794 - DNA, 15 bp, Homo sapiens
atttagatggaatgg

SEQ ID NO: 149795 - DNA, 15 bp, Homo sapiens
catttagatggaatg

SEQ ID NO: 149796 - DNA, 15 bp, Homo sapiens
acatttagatggaat

SEQ ID NO: 149797 - DNA, 15 bp, Homo sapiens
cacatttagatggaa

SEQ ID NO: 149798 - DNA, 15 bp, Homo sapiens
gcacatttagatgga

SEQ ID NO: 149799 - DNA, 15 bp, Homo sapiens
agcacatttagatgg

SEQ ID NO: 149800 - DNA, 15 bp, Homo sapiens
gagcacatttagatg

SEQ ID NO: 149801 - DNA, 15 bp, Homo sapiens
tgagcacatttagat

SEQ ID NO: 149802 - DNA, 15 bp, Homo sapiens
atgagcacatttaga

SEQ ID NO: 149803 - DNA, 15 bp, Homo sapiens
tatgagcacatttag

SEQ ID NO: 149804 - DNA, 15 bp, Homo sapiens
gtatgagcacattta

SEQ ID NO: 149805 - DNA, 15 bp, Homo sapiens
tgtatgagcacattt

SEQ ID NO: 149806 - DNA, 15 bp, Homo sapiens
ttgtatgagcacatt

SEQ ID NO: 149807 - DNA, 15 bp, Homo sapiens
attgtatgagcacat

SEQ ID NO: 149808 - DNA, 15 bp, Homo sapiens
tattgtatgagcaca

SEQ ID NO: 149809 - DNA, 15 bp, Homo sapiens
ctattgtatgagcac

SEQ ID NO: 149810 - DNA, 15 bp, Homo sapiens
cctattgtatgagca

SEQ ID NO: 149811 - DNA, 15 bp, Homo sapiens
acctattgtatgagc

SEQ ID NO: 149812 - DNA, 15 bp, Homo sapiens
cacctattgtatgag

SEQ ID NO: 149813 - DNA, 15 bp, Homo sapiens
ccacctattgtatga

SEQ ID NO: 149814 - DNA, 15 bp, Homo sapiens
gccacctattgtatg

SEQ ID NO: 149815 - DNA, 15 bp, Homo sapiens
ggccacctattgtat

SEQ ID NO: 149816 - DNA, 15 bp, Homo sapiens
aggccacctattgta

SEQ ID NO: 149817 - DNA, 15 bp, Homo sapiens
aaggccacctattgt

SEQ ID NO: 149818 - DNA, 15 bp, Homo sapiens
aaaggccacctattg

SEQ ID NO: 149819 - DNA, 15 bp, Homo sapiens
gaaaggccacctatt

SEQ ID NO: 149820 - DNA, 15 bp, Homo sapiens
agaaaggccacctat

SEQ ID NO: 149821 - DNA, 15 bp, Homo sapiens
cagaaaggccaccta

SEQ ID NO: 149822 - DNA, 15 bp, Homo sapiens
tcagaaaggccacct

SEQ ID NO: 149823 - DNA, 15 bp, Homo sapiens
ctcagaaaggccacc

SEQ ID NO: 149824 - DNA, 15 bp, Homo sapiens
gctcagaaaggccac

SEQ ID NO: 149825 - DNA, 15 bp, Homo sapiens
ggctcagaaaggcca

SEQ ID NO: 149826 - DNA, 15 bp, Homo sapiens
gggctcagaaaggcc

SEQ ID NO: 149827 - DNA, 15 bp, Homo sapiens
cgggctcagaaaggc

SEQ ID NO: 149828 - DNA, 15 bp, Homo sapiens
acgggctcagaaagg

SEQ ID NO: 149829 - DNA, 15 bp, Homo sapiens
cacgggctcagaaag

SEQ ID NO: 149830 - DNA, 15 bp, Homo sapiens
acacgggctcagaaa

SEQ ID NO: 149831 - DNA, 15 bp, Homo sapiens
gacacgggctcagaa

SEQ ID NO: 149832 - DNA, 15 bp, Homo sapiens
tgacacgggctcaga

SEQ ID NO: 149833 - DNA, 15 bp, Homo sapiens
atgacacgggctcag

SEQ ID NO: 149834 - DNA, 15 bp, Homo sapiens
catgacacgggctca

SEQ ID NO: 149835 - DNA, 15 bp, Homo sapiens
gcatgacacgggctc

SEQ ID NO: 149836 - DNA, 15 bp, Homo sapiens
agcatgacacgggct

SEQ ID NO: 149837 - DNA, 15 bp, Homo sapiens
tagcatgacacgggc

SEQ ID NO: 149838 - DNA, 15 bp, Homo sapiens
gtagcatgacacggg

SEQ ID NO: 149839 - DNA, 15 bp, Homo sapiens
tgtagcatgacacgg

SEQ ID NO: 149840 - DNA, 15 bp, Homo sapiens
ttgtagcatgacacg

SEQ ID NO: 149841 - DNA, 15 bp, Homo sapiens
attgtagcatgacac

SEQ ID NO: 149842 - DNA, 15 bp, Homo sapiens
tattgtagcatgaca

SEQ ID NO: 149843 - DNA, 15 bp, Homo sapiens
ctattgtagcatgac

SEQ ID NO: 149844 - DNA, 15 bp, Homo sapiens
actattgtagcatga

SEQ ID NO: 149845 - DNA, 15 bp, Homo sapiens
cactattgtagcatg

SEQ ID NO: 149846 - DNA, 15 bp, Homo sapiens
tcactattgtagcat

SEQ ID NO: 149847 - DNA, 15 bp, Homo sapiens
ttcactattgtagca

SEQ ID NO: 149848 - DNA, 15 bp, Homo sapiens
gttcactattgtagc

SEQ ID NO: 149849 - DNA, 15 bp, Homo sapiens
ggttcactattgtag

SEQ ID NO: 149850 - DNA, 15 bp, Homo sapiens
gggttcactattgta

SEQ ID NO: 149851 - DNA, 15 bp, Homo sapiens
ggggttcactattgt

SEQ ID NO: 149852 - DNA, 15 bp, Homo sapiens
aggggttcactattg

SEQ ID NO: 149853 - DNA, 15 bp, Homo sapiens
taggggttcactatt

SEQ ID NO: 149854 - DNA, 15 bp, Homo sapiens
ataggggttcactat

SEQ ID NO: 149855 - DNA, 15 bp, Homo sapiens
gataggggttcacta

SEQ ID NO: 149856 - DNA, 15 bp, Homo sapiens
ggataggggttcact

SEQ ID NO: 149857 - DNA, 15 bp, Homo sapiens
aggataggggttcac

SEQ ID NO: 149858 - DNA, 15 bp, Homo sapiens
taggataggggttca

SEQ ID NO: 149859 - DNA, 15 bp, Homo sapiens
ataggataggggttc

SEQ ID NO: 149860 - DNA, 15 bp, Homo sapiens
aataggataggggtt

SEQ ID NO: 149861 - DNA, 15 bp, Homo sapiens
gaataggataggggt

SEQ ID NO: 149862 - DNA, 15 bp, Homo sapiens
agaataggatagggg

SEQ ID NO: 149863 - DNA, 15 bp, Homo sapiens
tagaataggataggg

SEQ ID NO: 149864 - DNA, 15 bp, Homo sapiens
atagaataggatagg

SEQ ID NO: 149865 - DNA, 15 bp, Homo sapiens
catagaataggatag

SEQ ID NO: 149866 - DNA, 15 bp, Homo sapiens
tcatagaataggata

SEQ ID NO: 149867 - DNA, 15 bp, Homo sapiens
gtcatagaataggat

SEQ ID NO: 149868 - DNA, 15 bp, Homo sapiens
tgtcatagaatagga

SEQ ID NO: 149869 - DNA, 15 bp, Homo sapiens
ctgtcatagaatagg

SEQ ID NO: 149870 - DNA, 15 bp, Homo sapiens
tctgtcatagaatag

SEQ ID NO: 149871 - DNA, 15 bp, Homo sapiens
gtctgtcatagaata

SEQ ID NO: 149872 - DNA, 15 bp, Homo sapiens
tgtctgtcatagaat

SEQ ID NO: 149873 - DNA, 15 bp, Homo sapiens
atgtctgtcatagaa

SEQ ID NO: 149874 - DNA, 15 bp, Homo sapiens
catgtctgtcataga

SEQ ID NO: 149875 - DNA, 15 bp, Homo sapiens
tcatgtctgtcatag

SEQ ID NO: 149876 - DNA, 15 bp, Homo sapiens
ctcatgtctgtcata

SEQ ID NO: 149877 - DNA, 15 bp, Homo sapiens
tctcatgtctgtcat

SEQ ID NO: 149878 - DNA, 15 bp, Homo sapiens
ctctcatgtctgtca

SEQ ID NO: 149879 - DNA, 15 bp, Homo sapiens
actctcatgtctgtc

SEQ ID NO: 149880 - DNA, 15 bp, Homo sapiens
cactctcatgtctgt

SEQ ID NO: 149881 - DNA, 15 bp, Homo sapiens
gcactctcatgtctg

SEQ ID NO: 149882 - DNA, 15 bp, Homo sapiens
agcactctcatgtct

SEQ ID NO: 149883 - DNA, 15 bp, Homo sapiens
gagcactctcatgtc

SEQ ID NO: 149884 - DNA, 15 bp, Homo sapiens
tgagcactctcatgt

SEQ ID NO: 149885 - DNA, 15 bp, Homo sapiens
ctgagcactctcatg

SEQ ID NO: 149886 - DNA, 15 bp, Homo sapiens
tctgagcactctcat

SEQ ID NO: 149887 - DNA, 15 bp, Homo sapiens
ttctgagcactctca

SEQ ID NO: 149888 - DNA, 15 bp, Homo sapiens
gttctgagcactctc

SEQ ID NO: 149889 - DNA, 15 bp, Homo sapiens
ggttctgagcactct

SEQ ID NO: 149890 - DNA, 15 bp, Homo sapiens
aggttctgagcactc

SEQ ID NO: 149891 - DNA, 15 bp, Homo sapiens
caggttctgagcact

SEQ ID NO: 149892 - DNA, 15 bp, Homo sapiens
tcaggttctgagcac

SEQ ID NO: 149893 - DNA, 15 bp, Homo sapiens
ttcaggttctgagca

SEQ ID NO: 149894 - DNA, 15 bp, Homo sapiens
cttcaggttctgagc

SEQ ID NO: 149895 - DNA, 15 bp, Homo sapiens
tcttcaggttctgag

SEQ ID NO: 149896 - DNA, 15 bp, Homo sapiens
ctcttcaggttctga

SEQ ID NO: 149897 - DNA, 15 bp, Homo sapiens
actcttcaggttctg

SEQ ID NO: 149898 - DNA, 15 bp, Homo sapiens
aactcttcaggttct

SEQ ID NO: 149899 - DNA, 15 bp, Homo sapiens
caactcttcaggttc

SEQ ID NO: 149900 - DNA, 15 bp, Homo sapiens
ccaactcttcaggtt

SEQ ID NO: 149901 - DNA, 15 bp, Homo sapiens
gccaactcttcaggt

SEQ ID NO: 149902 - DNA, 15 bp, Homo sapiens
tgccaactcttcagg

SEQ ID NO: 149903 - DNA, 15 bp, Homo sapiens
atgccaactcttcag

SEQ ID NO: 149904 - DNA, 15 bp, Homo sapiens
aatgccaactcttca

SEQ ID NO: 149905 - DNA, 15 bp, Homo sapiens
taatgccaactcttc

SEQ ID NO: 149906 - DNA, 15 bp, Homo sapiens
ataatgccaactctt

SEQ ID NO: 149907 - DNA, 15 bp, Homo sapiens
gataatgccaactct

SEQ ID NO: 149908 - DNA, 15 bp, Homo sapiens
tgataatgccaactc

SEQ ID NO: 149909 - DNA, 15 bp, Homo sapiens
gtgataatgccaact

SEQ ID NO: 149910 - DNA, 15 bp, Homo sapiens
tgtgataatgccaac

SEQ ID NO: 149911 - DNA, 15 bp, Homo sapiens
ttgtgataatgccaa

SEQ ID NO: 149912 - DNA, 15 bp, Homo sapiens
cttgtgataatgcca

SEQ ID NO: 149913 - DNA, 15 bp, Homo sapiens
gcttgtgataatgcc

SEQ ID NO: 149914 - DNA, 15 bp, Homo sapiens
cgcttgtgataatgc

SEQ ID NO: 149915 - DNA, 15 bp, Homo sapiens
gcgcttgtgataatg

SEQ ID NO: 149916 - DNA, 15 bp, Homo sapiens
tgcgcttgtgataat

SEQ ID NO: 149917 - DNA, 15 bp, Homo sapiens
atgcgcttgtgataa

SEQ ID NO: 149918 - DNA, 15 bp, Homo sapiens
gatgcgcttgtgata

SEQ ID NO: 149919 - DNA, 15 bp, Homo sapiens
ggatgcgcttgtgat

SEQ ID NO: 149920 - DNA, 15 bp, Homo sapiens
gggatgcgcttgtga

SEQ ID NO: 149921 - DNA, 15 bp, Homo sapiens
ggggatgcgcttgtg

SEQ ID NO: 149922 - DNA, 15 bp, Homo sapiens
cggggatgcgcttgt

SEQ ID NO: 149923 - DNA, 15 bp, Homo sapiens
acggggatgcgcttg

SEQ ID NO: 149924 - DNA, 15 bp, Homo sapiens
gacggggatgcgctt

SEQ ID NO: 149925 - DNA, 15 bp, Homo sapiens
agacggggatgcgct

SEQ ID NO: 149926 - DNA, 15 bp, Homo sapiens
gagacggggatgcgc

SEQ ID NO: 149927 - DNA, 15 bp, Homo sapiens
ggagacggggatgcg

SEQ ID NO: 149928 - DNA, 15 bp, Homo sapiens
gggagacggggatgc

SEQ ID NO: 149929 - DNA, 15 bp, Homo sapiens
ggggagacggggatg

SEQ ID NO: 149930 - DNA, 15 bp, Homo sapiens
gggggagacggggat

SEQ ID NO: 149931 - DNA, 15 bp, Homo sapiens
tgggggagacgggga

SEQ ID NO: 149932 - DNA, 15 bp, Homo sapiens
ttgggggagacgggg

SEQ ID NO: 149933 - DNA, 15 bp, Homo sapiens
tttgggggagacggg

SEQ ID NO: 149934 - DNA, 15 bp, Homo sapiens
gtttgggggagacgg

SEQ ID NO: 149935 - DNA, 15 bp, Homo sapiens
ggtttgggggagacg

SEQ ID NO: 149936 - DNA, 15 bp, Homo sapiens
tggtttgggggagac

SEQ ID NO: 149937 - DNA, 15 bp, Homo sapiens
ctggtttgggggaga

SEQ ID NO: 149938 - DNA, 15 bp, Homo sapiens
cctggtttgggggag

SEQ ID NO: 149939 - DNA, 15 bp, Homo sapiens
gcctggtttggggga

SEQ ID NO: 149940 - DNA, 15 bp, Homo sapiens
agcctggtttggggg

SEQ ID NO: 149941 - DNA, 15 bp, Homo sapiens
aagcctggtttgggg

SEQ ID NO: 149942 - DNA, 15 bp, Homo sapiens
gaagcctggtttggg

SEQ ID NO: 149943 - DNA, 15 bp, Homo sapiens
tgaagcctggtttgg

SEQ ID NO: 149944 - DNA, 15 bp, Homo sapiens
ctgaagcctggtttg

SEQ ID NO: 149945 - DNA, 15 bp, Homo sapiens
actgaagcctggttt

SEQ ID NO: 149946 - DNA, 15 bp, Homo sapiens
cactgaagcctggtt

SEQ ID NO: 149947 - DNA, 15 bp, Homo sapiens
gcactgaagcctggt

SEQ ID NO: 149948 - DNA, 15 bp, Homo sapiens
ggcactgaagcctgg

SEQ ID NO: 149949 - DNA, 15 bp, Homo sapiens
tggcactgaagcctg

SEQ ID NO: 149950 - DNA, 15 bp, Homo sapiens
ctggcactgaagcct

SEQ ID NO: 149951 - DNA, 15 bp, Homo sapiens
cctggcactgaagcc

SEQ ID NO: 149952 - DNA, 15 bp, Homo sapiens
ccctggcactgaagc

SEQ ID NO: 149953 - DNA, 15 bp, Homo sapiens
gccctggcactgaag

SEQ ID NO: 149954 - DNA, 15 bp, Homo sapiens
tgccctggcactgaa

SEQ ID NO: 149955 - DNA, 15 bp, Homo sapiens
ctgccctggcactga

SEQ ID NO: 149956 - DNA, 15 bp, Homo sapiens
tctgccctggcactg

SEQ ID NO: 149957 - DNA, 15 bp, Homo sapiens
gtctgccctggcact

SEQ ID NO: 149958 - DNA, 15 bp, Homo sapiens
tgtctgccctggcac

SEQ ID NO: 149959 - DNA, 15 bp, Homo sapiens
atgtctgccctggca

SEQ ID NO: 149960 - DNA, 15 bp, Homo sapiens
catgtctgccctggc

SEQ ID NO: 149961 - DNA, 15 bp, Homo sapiens
ccatgtctgccctgg

SEQ ID NO: 149962 - DNA, 15 bp, Homo sapiens
cccatgtctgccctg

SEQ ID NO: 149963 - DNA, 15 bp, Homo sapiens
tcccatgtctgccct

SEQ ID NO: 149964 - DNA, 15 bp, Homo sapiens
ctcccatgtctgccc

SEQ ID NO: 149965 - DNA, 15 bp, Homo sapiens
tctcccatgtctgcc

SEQ ID NO: 149966 - DNA, 15 bp, Homo sapiens
gtctcccatgtctgc

SEQ ID NO: 149967 - DNA, 15 bp, Homo sapiens
ggtctcccatgtctg

SEQ ID NO: 149968 - DNA, 15 bp, Homo sapiens
aggtctcccatgtct

SEQ ID NO: 149969 - DNA, 15 bp, Homo sapiens
caggtctcccatgtc

SEQ ID NO: 149970 - DNA, 15 bp, Homo sapiens
ccaggtctcccatgt

SEQ ID NO: 149971 - DNA, 15 bp, Homo sapiens
cccaggtctcccatg

SEQ ID NO: 149972 - DNA, 15 bp, Homo sapiens
tcccaggtctcccat

SEQ ID NO: 149973 - DNA, 15 bp, Homo sapiens
ttcccaggtctccca

SEQ ID NO: 149974 - DNA, 15 bp, Homo sapiens
cttcccaggtctccc

SEQ ID NO: 149975 - DNA, 15 bp, Homo sapiens
gcttcccaggtctcc

SEQ ID NO: 149976 - DNA, 15 bp, Homo sapiens
ggcttcccaggtctc

SEQ ID NO: 149977 - DNA, 15 bp, Homo sapiens
aggcttcccaggtct

SEQ ID NO: 149978 - DNA, 15 bp, Homo sapiens
caggcttcccaggtc

SEQ ID NO: 149979 - DNA, 15 bp, Homo sapiens
gcaggcttcccaggt

SEQ ID NO: 149980 - DNA, 15 bp, Homo sapiens
ggcaggcttcccagg

SEQ ID NO: 149981 - DNA, 15 bp, Homo sapiens
gggcaggcttcccag

SEQ ID NO: 149982 - DNA, 15 bp, Homo sapiens
ggggcaggcttccca

SEQ ID NO: 149983 - DNA, 15 bp, Homo sapiens
gggggcaggcttccc

SEQ ID NO: 149984 - DNA, 15 bp, Homo sapiens
tgggggcaggcttcc

SEQ ID NO: 149985 - DNA, 15 bp, Homo sapiens
ctgggggcaggcttc

SEQ ID NO: 149986 - DNA, 15 bp, Homo sapiens
tctgggggcaggctt

SEQ ID NO: 149987 - DNA, 15 bp, Homo sapiens
atctgggggcaggct

SEQ ID NO: 149988 - DNA, 15 bp, Homo sapiens
aatctgggggcaggc

SEQ ID NO: 149989 - DNA, 15 bp, Homo sapiens
aaatctgggggcagg

SEQ ID NO: 149990 - DNA, 15 bp, Homo sapiens
aaaatctgggggcag

SEQ ID NO: 149991 - DNA, 15 bp, Homo sapiens
caaaatctgggggca

SEQ ID NO: 149992 - DNA, 15 bp, Homo sapiens
gcaaaatctgggggc

SEQ ID NO: 149993 - DNA, 15 bp, Homo sapiens
agcaaaatctggggg

SEQ ID NO: 149994 - DNA, 15 bp, Homo sapiens
cagcaaaatctgggg

SEQ ID NO: 149995 - DNA, 15 bp, Homo sapiens
acagcaaaatctggg

SEQ ID NO: 149996 - DNA, 15 bp, Homo sapiens
gacagcaaaatctgg

SEQ ID NO: 149997 - DNA, 15 bp, Homo sapiens
tgacagcaaaatctg

SEQ ID NO: 149998 - DNA, 15 bp, Homo sapiens
ctgacagcaaaatct

SEQ ID NO: 149999 - DNA, 15 bp, Homo sapiens
cctgacagcaaaatc

SEQ ID NO: 150000 - DNA, 15 bp, Homo sapiens
gcctgacagcaaaat

SEQ ID NO: 150001 - DNA, 15 bp, Homo sapiens
tgcctgacagcaaaa

SEQ ID NO: 150002 - DNA, 15 bp, Homo sapiens
atgcctgacagcaaa

SEQ ID NO: 150003 - DNA, 15 bp, Homo sapiens
aatgcctgacagcaa

SEQ ID NO: 150004 - DNA, 15 bp, Homo sapiens
caatgcctgacagca

SEQ ID NO: 150005 - DNA, 15 bp, Homo sapiens
ccaatgcctgacagc

SEQ ID NO: 150006 - DNA, 15 bp, Homo sapiens
accaatgcctgacag

SEQ ID NO: 150007 - DNA, 15 bp, Homo sapiens
caccaatgcctgaca

SEQ ID NO: 150008 - DNA, 15 bp, Homo sapiens
tcaccaatgcctgac

SEQ ID NO: 150009 - DNA, 15 bp, Homo sapiens
ctcaccaatgcctga

SEQ ID NO: 150010 - DNA, 15 bp, Homo sapiens
actcaccaatgcctg

SEQ ID NO: 150011 - DNA, 15 bp, Homo sapiens
aactcaccaatgcct

SEQ ID NO: 150012 - DNA, 15 bp, Homo sapiens
aaactcaccaatgcc

SEQ ID NO: 150013 - DNA, 15 bp, Homo sapiens
aaaactcaccaatgc

SEQ ID NO: 150014 - DNA, 15 bp, Homo sapiens
caaaactcaccaatg

SEQ ID NO: 150015 - DNA, 15 bp, Homo sapiens
acaaaactcaccaat

SEQ ID NO: 150016 - DNA, 15 bp, Homo sapiens
cacaaaactcaccaa

SEQ ID NO: 150017 - DNA, 15 bp, Homo sapiens
acacaaaactcacca

SEQ ID NO: 150018 - DNA, 15 bp, Homo sapiens
gacacaaaactcacc

SEQ ID NO: 150019 - DNA, 15 bp, Homo sapiens
ggacacaaaactcac

SEQ ID NO: 150020 - DNA, 15 bp, Homo sapiens
gggacacaaaactca

SEQ ID NO: 150021 - DNA, 15 bp, Homo sapiens
agggacacaaaactc

SEQ ID NO: 150022 - DNA, 15 bp, Homo sapiens
gagggacacaaaact

SEQ ID NO: 150023 - DNA, 15 bp, Homo sapiens
tgagggacacaaaac

SEQ ID NO: 150024 - DNA, 15 bp, Homo sapiens
gtgagggacacaaaa

SEQ ID NO: 150025 - DNA, 15 bp, Homo sapiens
tgtgagggacacaaa

SEQ ID NO: 150026 - DNA, 15 bp, Homo sapiens
ttgtgagggacacaa

SEQ ID NO: 150027 - DNA, 15 bp, Homo sapiens
cttgtgagggacaca

SEQ ID NO: 150028 - DNA, 15 bp, Homo sapiens
acttgtgagggacac

SEQ ID NO: 150029 - DNA, 15 bp, Homo sapiens
cacttgtgagggaca

SEQ ID NO: 150030 - DNA, 15 bp, Homo sapiens
ccacttgtgagggac

SEQ ID NO: 150031 - DNA, 15 bp, Homo sapiens
cccacttgtgaggga

SEQ ID NO: 150032 - DNA, 15 bp, Homo sapiens
tcccacttgtgaggg

SEQ ID NO: 150033 - DNA, 15 bp, Homo sapiens
ttcccacttgtgagg

SEQ ID NO: 150034 - DNA, 15 bp, Homo sapiens
attcccacttgtgag

SEQ ID NO: 150035 - DNA, 15 bp, Homo sapiens
tattcccacttgtga

SEQ ID NO: 150036 - DNA, 15 bp, Homo sapiens
gtattcccacttgtg

SEQ ID NO: 150037 - DNA, 15 bp, Homo sapiens
tgtattcccacttgt

SEQ ID NO: 150038 - DNA, 15 bp, Homo sapiens
atgtattcccacttg

SEQ ID NO: 150039 - DNA, 15 bp, Homo sapiens
aatgtattcccactt

SEQ ID NO: 150040 - DNA, 15 bp, Homo sapiens
gaatgtattcccact

SEQ ID NO: 150041 - DNA, 15 bp, Homo sapiens
tgaatgtattcccac

SEQ ID NO: 150042 - DNA, 15 bp, Homo sapiens
ttgaatgtattccca

SEQ ID NO: 150043 - DNA, 15 bp, Homo sapiens
tttgaatgtattccc

SEQ ID NO: 150044 - DNA, 15 bp, Homo sapiens
ttttgaatgtattcc

SEQ ID NO: 150045 - DNA, 15 bp, Homo sapiens
cttttgaatgtattc

SEQ ID NO: 150046 - DNA, 15 bp, Homo sapiens
tcttttgaatgtatt

SEQ ID NO: 150047 - DNA, 15 bp, Homo sapiens
gtcttttgaatgtat

SEQ ID NO: 150048 - DNA, 15 bp, Homo sapiens
ggtcttttgaatgta

SEQ ID NO: 150049 - DNA, 15 bp, Homo sapiens
gggtcttttgaatgt

SEQ ID NO: 150050 - DNA, 15 bp, Homo sapiens
ggggtcttttgaatg

SEQ ID NO: 150051 - DNA, 15 bp, Homo sapiens
aggggtcttttgaat

SEQ ID NO: 150052 - DNA, 15 bp, Homo sapiens
gaggggtcttttgaa

SEQ ID NO: 150053 - DNA, 15 bp, Homo sapiens
ggaggggtcttttga

SEQ ID NO: 150054 - DNA, 15 bp, Homo sapiens
gggaggggtcttttg

SEQ ID NO: 150055 - DNA, 15 bp, Homo sapiens
tgggaggggtctttt

SEQ ID NO: 150056 - DNA, 15 bp, Homo sapiens
gtgggaggggtcttt

SEQ ID NO: 150057 - DNA, 15 bp, Homo sapiens
ggtgggaggggtctt

SEQ ID NO: 150058 - DNA, 15 bp, Homo sapiens
tggtgggaggggtct

SEQ ID NO: 150059 - DNA, 15 bp, Homo sapiens
ttggtgggaggggtc

SEQ ID NO: 150060 - DNA, 15 bp, Homo sapiens
gttggtgggaggggt

SEQ ID NO: 150061 - DNA, 15 bp, Homo sapiens
agttggtgggagggg

SEQ ID NO: 150062 - DNA, 15 bp, Homo sapiens
cagttggtgggaggg

SEQ ID NO: 150063 - DNA, 15 bp, Homo sapiens
ccagttggtgggagg

SEQ ID NO: 150064 - DNA, 15 bp, Homo sapiens
cccagttggtgggag

SEQ ID NO: 150065 - DNA, 15 bp, Homo sapiens
tcccagttggtggga

SEQ ID NO: 150066 - DNA, 15 bp, Homo sapiens
atcccagttggtggg

SEQ ID NO: 150067 - DNA, 15 bp, Homo sapiens
catcccagttggtgg

SEQ ID NO: 150068 - DNA, 15 bp, Homo sapiens
ccatcccagttggtg

SEQ ID NO: 150069 - DNA, 15 bp, Homo sapiens
accatcccagttggt

SEQ ID NO: 150070 - DNA, 15 bp, Homo sapiens
caccatcccagttgg

SEQ ID NO: 150071 - DNA, 15 bp, Homo sapiens
tcaccatcccagttg

SEQ ID NO: 150072 - DNA, 15 bp, Homo sapiens
ttcaccatcccagtt

SEQ ID NO: 150073 - DNA, 15 bp, Homo sapiens
tttcaccatcccagt

SEQ ID NO: 150074 - DNA, 15 bp, Homo sapiens
ttttcaccatcccag

SEQ ID NO: 150075 - DNA, 15 bp, Homo sapiens
cttttcaccatccca

SEQ ID NO: 150076 - DNA, 15 bp, Homo sapiens
acttttcaccatccc

SEQ ID NO: 150077 - DNA, 15 bp, Homo sapiens
tacttttcaccatcc

SEQ ID NO: 150078 - DNA, 15 bp, Homo sapiens
atacttttcaccatc

SEQ ID NO: 150079 - DNA, 15 bp, Homo sapiens
tatacttttcaccat

SEQ ID NO: 150080 - DNA, 15 bp, Homo sapiens
ttatacttttcacca

SEQ ID NO: 150081 - DNA, 15 bp, Homo sapiens
tttatacttttcacc

SEQ ID NO: 150082 - DNA, 15 bp, Homo sapiens
ctttatacttttcac

SEQ ID NO: 150083 - DNA, 15 bp, Homo sapiens
cctttatacttttca

SEQ ID NO: 150084 - DNA, 15 bp, Homo sapiens
tcctttatacttttc

SEQ ID NO: 150085 - DNA, 15 bp, Homo sapiens
gtcctttatactttt

SEQ ID NO: 150086 - DNA, 15 bp, Homo sapiens
tgtcctttatacttt

SEQ ID NO: 150087 - DNA, 15 bp, Homo sapiens
ctgtcctttatactt

SEQ ID NO: 150088 - DNA, 15 bp, Homo sapiens
actgtcctttatact

SEQ ID NO: 150089 - DNA, 15 bp, Homo sapiens
gactgtcctttatac

SEQ ID NO: 150090 - DNA, 15 bp, Homo sapiens
agactgtcctttata

SEQ ID NO: 150091 - DNA, 15 bp, Homo sapiens
gagactgtcctttat

SEQ ID NO: 150092 - DNA, 15 bp, Homo sapiens
tgagactgtccttta

SEQ ID NO: 150093 - DNA, 15 bp, Homo sapiens
atgagactgtccttt

SEQ ID NO: 150094 - DNA, 15 bp, Homo sapiens
aatgagactgtcctt

SEQ ID NO: 150095 - DNA, 15 bp, Homo sapiens
gaatgagactgtcct

SEQ ID NO: 150096 - DNA, 15 bp, Homo sapiens
agaatgagactgtcc

SEQ ID NO: 150097 - DNA, 15 bp, Homo sapiens
gagaatgagactgtc

SEQ ID NO: 150098 - DNA, 15 bp, Homo sapiens
tgagaatgagactgt

SEQ ID NO: 150099 - DNA, 15 bp, Homo sapiens
ctgagaatgagactg

SEQ ID NO: 150100 - DNA, 15 bp, Homo sapiens
actgagaatgagact

SEQ ID NO: 150101 - DNA, 15 bp, Homo sapiens
cactgagaatgagac

SEQ ID NO: 150102 - DNA, 15 bp, Homo sapiens
gcactgagaatgaga

SEQ ID NO: 150103 - DNA, 15 bp, Homo sapiens
ggcactgagaatgag

SEQ ID NO: 150104 - DNA, 15 bp, Homo sapiens
tggcactgagaatga

SEQ ID NO: 150105 - DNA, 15 bp, Homo sapiens
atggcactgagaatg

SEQ ID NO: 150106 - DNA, 15 bp, Homo sapiens
aatggcactgagaat

SEQ ID NO: 150107 - DNA, 15 bp, Homo sapiens
aaatggcactgagaa

SEQ ID NO: 150108 - DNA, 15 bp, Homo sapiens
taaatggcactgaga

SEQ ID NO: 150109 - DNA, 15 bp, Homo sapiens
ctaaatggcactgag

SEQ ID NO: 150110 - DNA, 15 bp, Homo sapiens
tctaaatggcactga

SEQ ID NO: 150111 - DNA, 15 bp, Homo sapiens
ttctaaatggcactg

SEQ ID NO: 150112 - DNA, 15 bp, Homo sapiens
attctaaatggcact

SEQ ID NO: 150113 - DNA, 15 bp, Homo sapiens
tattctaaatggcac

SEQ ID NO: 150114 - DNA, 15 bp, Homo sapiens
ctattctaaatggca

SEQ ID NO: 150115 - DNA, 15 bp, Homo sapiens
cctattctaaatggc

SEQ ID NO: 150116 - DNA, 15 bp, Homo sapiens
ccctattctaaatgg

SEQ ID NO: 150117 - DNA, 15 bp, Homo sapiens
gccctattctaaatg

SEQ ID NO: 150118 - DNA, 15 bp, Homo sapiens
tgccctattctaaat

SEQ ID NO: 150119 - DNA, 15 bp, Homo sapiens
ctgccctattctaaa

SEQ ID NO: 150120 - DNA, 15 bp, Homo sapiens
actgccctattctaa

SEQ ID NO: 150121 - DNA, 15 bp, Homo sapiens
aactgccctattcta

SEQ ID NO: 150122 - DNA, 15 bp, Homo sapiens
aaactgccctattct

SEQ ID NO: 150123 - DNA, 15 bp, Homo sapiens
aaaactgccctattc

SEQ ID NO: 150124 - DNA, 15 bp, Homo sapiens
caaaactgccctatt

SEQ ID NO: 150125 - DNA, 15 bp, Homo sapiens
tcaaaactgccctat

SEQ ID NO: 150126 - DNA, 15 bp, Homo sapiens
atcaaaactgcccta

SEQ ID NO: 150127 - DNA, 15 bp, Homo sapiens
catcaaaactgccct

SEQ ID NO: 150128 - DNA, 15 bp, Homo sapiens
tcatcaaaactgccc

SEQ ID NO: 150129 - DNA, 15 bp, Homo sapiens
ctcatcaaaactgcc

SEQ ID NO: 150130 - DNA, 15 bp, Homo sapiens
cctcatcaaaactgc

SEQ ID NO: 150131 - DNA, 15 bp, Homo sapiens
tcctcatcaaaactg

SEQ ID NO: 150132 - DNA, 15 bp, Homo sapiens
ctcctcatcaaaact

SEQ ID NO: 150133 - DNA, 15 bp, Homo sapiens
gctcctcatcaaaac

SEQ ID NO: 150134 - DNA, 15 bp, Homo sapiens
tgctcctcatcaaaa

SEQ ID NO: 150135 - DNA, 15 bp, Homo sapiens
ttgctcctcatcaaa

SEQ ID NO: 150136 - DNA, 15 bp, Homo sapiens
cttgctcctcatcaa

SEQ ID NO: 150137 - DNA, 15 bp, Homo sapiens
ccttgctcctcatca

SEQ ID NO: 150138 - DNA, 15 bp, Homo sapiens
accttgctcctcatc

SEQ ID NO: 150139 - DNA, 15 bp, Homo sapiens
caccttgctcctcat

SEQ ID NO: 150140 - DNA, 15 bp, Homo sapiens
tcaccttgctcctca

SEQ ID NO: 150141 - DNA, 15 bp, Homo sapiens
ctcaccttgctcctc

SEQ ID NO: 150142 - DNA, 15 bp, Homo sapiens
actcaccttgctcct

SEQ ID NO: 150143 - DNA, 15 bp, Homo sapiens
aactcaccttgctcc

SEQ ID NO: 150144 - DNA, 15 bp, Homo sapiens
aaactcaccttgctc

SEQ ID NO: 150145 - DNA, 15 bp, Homo sapiens
gaaactcaccttgct

SEQ ID NO: 150146 - DNA, 15 bp, Homo sapiens
agaaactcaccttgc

SEQ ID NO: 150147 - DNA, 15 bp, Homo sapiens
aagaaactcaccttg

SEQ ID NO: 150148 - DNA, 15 bp, Homo sapiens
taagaaactcacctt

SEQ ID NO: 150149 - DNA, 15 bp, Homo sapiens
ctaagaaactcacct

SEQ ID NO: 150150 - DNA, 15 bp, Homo sapiens
cctaagaaactcacc

SEQ ID NO: 150151 - DNA, 15 bp, Homo sapiens
acctaagaaactcac

SEQ ID NO: 150152 - DNA, 15 bp, Homo sapiens
cacctaagaaactca

SEQ ID NO: 150153 - DNA, 15 bp, Homo sapiens
ccacctaagaaactc

SEQ ID NO: 150154 - DNA, 15 bp, Homo sapiens
accacctaagaaact

SEQ ID NO: 150155 - DNA, 15 bp, Homo sapiens
caccacctaagaaac

SEQ ID NO: 150156 - DNA, 15 bp, Homo sapiens
acaccacctaagaaa

SEQ ID NO: 150157 - DNA, 15 bp, Homo sapiens
cacaccacctaagaa

SEQ ID NO: 150158 - DNA, 15 bp, Homo sapiens
ccacaccacctaaga

SEQ ID NO: 150159 - DNA, 15 bp, Homo sapiens
gccacaccacctaag

SEQ ID NO: 150160 - DNA, 15 bp, Homo sapiens
agccacaccacctaa

SEQ ID NO: 150161 - DNA, 15 bp, Homo sapiens
gagccacaccaccta

SEQ ID NO: 150162 - DNA, 15 bp, Homo sapiens
agagccacaccacct

SEQ ID NO: 150163 - DNA, 15 bp, Homo sapiens
aagagccacaccacc

SEQ ID NO: 150164 - DNA, 15 bp, Homo sapiens
gaagagccacaccac

SEQ ID NO: 150165 - DNA, 15 bp, Homo sapiens
agaagagccacacca

SEQ ID NO: 150166 - DNA, 15 bp, Homo sapiens
gagaagagccacacc

SEQ ID NO: 150167 - DNA, 15 bp, Homo sapiens
cgagaagagccacac

SEQ ID NO: 150168 - DNA, 15 bp, Homo sapiens
tcgagaagagccaca

SEQ ID NO: 150169 - DNA, 15 bp, Homo sapiens
ttcgagaagagccac

SEQ ID NO: 150170 - DNA, 15 bp, Homo sapiens
tttcgagaagagcca

SEQ ID NO: 150171 - DNA, 15 bp, Homo sapiens
atttcgagaagagcc

SEQ ID NO: 150172 - DNA, 15 bp, Homo sapiens
gatttcgagaagagc

SEQ ID NO: 150173 - DNA, 15 bp, Homo sapiens
tgatttcgagaagag

SEQ ID NO: 150174 - DNA, 15 bp, Homo sapiens
ttgatttcgagaaga

SEQ ID NO: 150175 - DNA, 15 bp, Homo sapiens
cttgatttcgagaag

SEQ ID NO: 150176 - DNA, 15 bp, Homo sapiens
ccttgatttcgagaa

SEQ ID NO: 150177 - DNA, 15 bp, Homo sapiens
cccttgatttcgaga

SEQ ID NO: 150178 - DNA, 15 bp, Homo sapiens
tcccttgatttcgag

SEQ ID NO: 150179 - DNA, 15 bp, Homo sapiens
ctcccttgatttcga

SEQ ID NO: 150180 - DNA, 15 bp, Homo sapiens
gctcccttgatttcg

SEQ ID NO: 150181 - DNA, 15 bp, Homo sapiens
agctcccttgatttc

SEQ ID NO: 150182 - DNA, 15 bp, Homo sapiens
cagctcccttgattt

SEQ ID NO: 150183 - DNA, 15 bp, Homo sapiens
ccagctcccttgatt

SEQ ID NO: 150184 - DNA, 15 bp, Homo sapiens
tccagctcccttgat

SEQ ID NO: 150185 - DNA, 15 bp, Homo sapiens
ctccagctcccttga

SEQ ID NO: 150186 - DNA, 15 bp, Homo sapiens
gctccagctcccttg

SEQ ID NO: 150187 - DNA, 15 bp, Homo sapiens
agctccagctccctt

SEQ ID NO: 150188 - DNA, 15 bp, Homo sapiens
cagctccagctccct

SEQ ID NO: 150189 - DNA, 15 bp, Homo sapiens
ccagctccagctccc

SEQ ID NO: 150190 - DNA, 15 bp, Homo sapiens
tccagctccagctcc

SEQ ID NO: 150191 - DNA, 15 bp, Homo sapiens
gtccagctccagctc

SEQ ID NO: 150192 - DNA, 15 bp, Homo sapiens
agtccagctccagct

SEQ ID NO: 150193 - DNA, 15 bp, Homo sapiens
gagtccagctccagc

SEQ ID NO: 150194 - DNA, 15 bp, Homo sapiens
ggagtccagctccag

SEQ ID NO: 150195 - DNA, 15 bp, Homo sapiens
aggagtccagctcca

SEQ ID NO: 150196 - DNA, 15 bp, Homo sapiens
caggagtccagctcc

SEQ ID NO: 150197 - DNA, 15 bp, Homo sapiens
gcaggagtccagctc

SEQ ID NO: 150198 - DNA, 15 bp, Homo sapiens
agcaggagtccagct

SEQ ID NO: 150199 - DNA, 15 bp, Homo sapiens
tagcaggagtccagc

SEQ ID NO: 150200 - DNA, 15 bp, Homo sapiens
atagcaggagtccag

SEQ ID NO: 150201 - DNA, 15 bp, Homo sapiens
tatagcaggagtcca

SEQ ID NO: 150202 - DNA, 15 bp, Homo sapiens
atatagcaggagtcc

SEQ ID NO: 150203 - DNA, 15 bp, Homo sapiens
gatatagcaggagtc

SEQ ID NO: 150204 - DNA, 15 bp, Homo sapiens
ggatatagcaggagt

SEQ ID NO: 150205 - DNA, 15 bp, Homo sapiens
gggatatagcaggag

SEQ ID NO: 150206 - DNA, 15 bp, Homo sapiens
agggatatagcagga

SEQ ID NO: 150207 - DNA, 15 bp, Homo sapiens
aagggatatagcagg

SEQ ID NO: 150208 - DNA, 15 bp, Homo sapiens
caagggatatagcag

SEQ ID NO: 150209 - DNA, 15 bp, Homo sapiens
gcaagggatatagca

SEQ ID NO: 150210 - DNA, 15 bp, Homo sapiens
agcaagggatatagc

SEQ ID NO: 150211 - DNA, 15 bp, Homo sapiens
gagcaagggatatag

SEQ ID NO: 150212 - DNA, 15 bp, Homo sapiens
tgagcaagggatata

SEQ ID NO: 150213 - DNA, 15 bp, Homo sapiens
ctgagcaagggatat

SEQ ID NO: 150214 - DNA, 15 bp, Homo sapiens
tctgagcaagggata

SEQ ID NO: 150215 - DNA, 15 bp, Homo sapiens
ttctgagcaagggat

SEQ ID NO: 150216 - DNA, 15 bp, Homo sapiens
gttctgagcaaggga

SEQ ID NO: 150217 - DNA, 15 bp, Homo sapiens
agttctgagcaaggg

SEQ ID NO: 150218 - DNA, 15 bp, Homo sapiens
gagttctgagcaagg

SEQ ID NO: 150219 - DNA, 15 bp, Homo sapiens
agagttctgagcaag

SEQ ID NO: 150220 - DNA, 15 bp, Homo sapiens
cagagttctgagcaa

SEQ ID NO: 150221 - DNA, 15 bp, Homo sapiens
acagagttctgagca

SEQ ID NO: 150222 - DNA, 15 bp, Homo sapiens
tacagagttctgagc

SEQ ID NO: 150223 - DNA, 15 bp, Homo sapiens
gtacagagttctgag

SEQ ID NO: 150224 - DNA, 15 bp, Homo sapiens
agtacagagttctga

SEQ ID NO: 150225 - DNA, 15 bp, Homo sapiens
cagtacagagttctg

SEQ ID NO: 150226 - DNA, 15 bp, Homo sapiens
gcagtacagagttct

SEQ ID NO: 150227 - DNA, 15 bp, Homo sapiens
ggcagtacagagttc

SEQ ID NO: 150228 - DNA, 15 bp, Homo sapiens
aggcagtacagagtt

SEQ ID NO: 150229 - DNA, 15 bp, Homo sapiens
caggcagtacagagt

SEQ ID NO: 150230 - DNA, 15 bp, Homo sapiens
ccaggcagtacagag

SEQ ID NO: 150231 - DNA, 15 bp, Homo sapiens
tccaggcagtacaga

SEQ ID NO: 150232 - DNA, 15 bp, Homo sapiens
atccaggcagtacag

SEQ ID NO: 150233 - DNA, 15 bp, Homo sapiens
gatccaggcagtaca

SEQ ID NO: 150234 - DNA, 15 bp, Homo sapiens
agatccaggcagtac

SEQ ID NO: 150235 - DNA, 15 bp, Homo sapiens
cagatccaggcagta

SEQ ID NO: 150236 - DNA, 15 bp, Homo sapiens
tcagatccaggcagt

SEQ ID NO: 150237 - DNA, 15 bp, Homo sapiens
atcagatccaggcag

SEQ ID NO: 150238 - DNA, 15 bp, Homo sapiens
gatcagatccaggca

SEQ ID NO: 150239 - DNA, 15 bp, Homo sapiens
tgatcagatccaggc

SEQ ID NO: 150240 - DNA, 15 bp, Homo sapiens
atgatcagatccagg

SEQ ID NO: 150241 - DNA, 15 bp, Homo sapiens
aatgatcagatccag

SEQ ID NO: 150242 - DNA, 15 bp, Homo sapiens
taatgatcagatcca

SEQ ID NO: 150243 - DNA, 15 bp, Homo sapiens
ctaatgatcagatcc

SEQ ID NO: 150244 - DNA, 15 bp, Homo sapiens
gctaatgatcagatc

SEQ ID NO: 150245 - DNA, 15 bp, Homo sapiens
tgctaatgatcagat

SEQ ID NO: 150246 - DNA, 15 bp, Homo sapiens
ctgctaatgatcaga

SEQ ID NO: 150247 - DNA, 15 bp, Homo sapiens
tctgctaatgatcag

SEQ ID NO: 150248 - DNA, 15 bp, Homo sapiens
ctctgctaatgatca

SEQ ID NO: 150249 - DNA, 15 bp, Homo sapiens
actctgctaatgatc

SEQ ID NO: 150250 - DNA, 15 bp, Homo sapiens
gactctgctaatgat

SEQ ID NO: 150251 - DNA, 15 bp, Homo sapiens
agactctgctaatga

SEQ ID NO: 150252 - DNA, 15 bp, Homo sapiens
cagactctgctaatg

SEQ ID NO: 150253 - DNA, 15 bp, Homo sapiens
gcagactctgctaat

SEQ ID NO: 150254 - DNA, 15 bp, Homo sapiens
cgcagactctgctaa

SEQ ID NO: 150255 - DNA, 15 bp, Homo sapiens
gcgcagactctgcta

SEQ ID NO: 150256 - DNA, 15 bp, Homo sapiens
ggcgcagactctgct

SEQ ID NO: 150257 - DNA, 15 bp, Homo sapiens
tggcgcagactctgc

SEQ ID NO: 150258 - DNA, 15 bp, Homo sapiens
gtggcgcagactctg

SEQ ID NO: 150259 - DNA, 15 bp, Homo sapiens
ggtggcgcagactct

SEQ ID NO: 150260 - DNA, 15 bp, Homo sapiens
aggtggcgcagactc

SEQ ID NO: 150261 - DNA, 15 bp, Homo sapiens
caggtggcgcagact

SEQ ID NO: 150262 - DNA, 15 bp, Homo sapiens
gcaggtggcgcagac

SEQ ID NO: 150263 - DNA, 15 bp, Homo sapiens
agcaggtggcgcaga

SEQ ID NO: 150264 - DNA, 15 bp, Homo sapiens
aagcaggtggcgcag

SEQ ID NO: 150265 - DNA, 15 bp, Homo sapiens
aaagcaggtggcgca

SEQ ID NO: 150266 - DNA, 15 bp, Homo sapiens
caaagcaggtggcgc

SEQ ID NO: 150267 - DNA, 15 bp, Homo sapiens
ccaaagcaggtggcg

SEQ ID NO: 150268 - DNA, 15 bp, Homo sapiens
gccaaagcaggtggc

SEQ ID NO: 150269 - DNA, 15 bp, Homo sapiens
agccaaagcaggtgg

SEQ ID NO: 150270 - DNA, 15 bp, Homo sapiens
gagccaaagcaggtg

SEQ ID NO: 150271 - DNA, 15 bp, Homo sapiens
agagccaaagcaggt

SEQ ID NO: 150272 - DNA, 15 bp, Homo sapiens
aagagccaaagcagg

SEQ ID NO: 150273 - DNA, 15 bp, Homo sapiens
caagagccaaagcag

SEQ ID NO: 150274 - DNA, 15 bp, Homo sapiens
ccaagagccaaagca

SEQ ID NO: 150275 - DNA, 15 bp, Homo sapiens
accaagagccaaagc

SEQ ID NO: 150276 - DNA, 15 bp, Homo sapiens
gaccaagagccaaag

SEQ ID NO: 150277 - DNA, 15 bp, Homo sapiens
ggaccaagagccaaa

SEQ ID NO: 150278 - DNA, 15 bp, Homo sapiens
tggaccaagagccaa

SEQ ID NO: 150279 - DNA, 15 bp, Homo sapiens
ttggaccaagagcca

SEQ ID NO: 150280 - DNA, 15 bp, Homo sapiens
tttggaccaagagcc

SEQ ID NO: 150281 - DNA, 15 bp, Homo sapiens
ttttggaccaagagc

SEQ ID NO: 150282 - DNA, 15 bp, Homo sapiens
tttttggaccaagag

SEQ ID NO: 150283 - DNA, 15 bp, Homo sapiens
ttttttggaccaaga

SEQ ID NO: 150284 - DNA, 15 bp, Homo sapiens
attttttggaccaag

SEQ ID NO: 150285 - DNA, 15 bp, Homo sapiens
aattttttggaccaa

SEQ ID NO: 150286 - DNA, 15 bp, Homo sapiens
aaattttttggacca

SEQ ID NO: 150287 - DNA, 15 bp, Homo sapiens
caaattttttggacc

SEQ ID NO: 150288 - DNA, 15 bp, Homo sapiens
gcaaattttttggac

SEQ ID NO: 150289 - DNA, 15 bp, Homo sapiens
agcaaattttttgga

SEQ ID NO: 150290 - DNA, 15 bp, Homo sapiens
cagcaaattttttgg

SEQ ID NO: 150291 - DNA, 15 bp, Homo sapiens
acagcaaattttttg

SEQ ID NO: 150292 - DNA, 15 bp, Homo sapiens
tacagcaaatttttt

SEQ ID NO: 150293 - DNA, 15 bp, Homo sapiens
atacagcaaattttt

SEQ ID NO: 150294 - DNA, 15 bp, Homo sapiens
gatacagcaaatttt

SEQ ID NO: 150295 - DNA, 15 bp, Homo sapiens
ggatacagcaaattt

SEQ ID NO: 150296 - DNA, 15 bp, Homo sapiens
aggatacagcaaatt

SEQ ID NO: 150297 - DNA, 15 bp, Homo sapiens
aaggatacagcaaat

SEQ ID NO: 150298 - DNA, 15 bp, Homo sapiens
caaggatacagcaaa

SEQ ID NO: 150299 - DNA, 15 bp, Homo sapiens
ccaaggatacagcaa

SEQ ID NO: 150300 - DNA, 15 bp, Homo sapiens
gccaaggatacagca

SEQ ID NO: 150301 - DNA, 15 bp, Homo sapiens
agccaaggatacagc

SEQ ID NO: 150302 - DNA, 15 bp, Homo sapiens
aagccaaggatacag

SEQ ID NO: 150303 - DNA, 15 bp, Homo sapiens
taagccaaggataca

SEQ ID NO: 150304 - DNA, 15 bp, Homo sapiens
ctaagccaaggatac

SEQ ID NO: 150305 - DNA, 15 bp, Homo sapiens
gctaagccaaggata

SEQ ID NO: 150306 - DNA, 15 bp, Homo sapiens
agctaagccaaggat

SEQ ID NO: 150307 - DNA, 15 bp, Homo sapiens
tagctaagccaagga

SEQ ID NO: 150308 - DNA, 15 bp, Homo sapiens
gtagctaagccaagg

SEQ ID NO: 150309 - DNA, 15 bp, Homo sapiens
agtagctaagccaag

SEQ ID NO: 150310 - DNA, 15 bp, Homo sapiens
gagtagctaagccaa

SEQ ID NO: 150311 - DNA, 15 bp, Homo sapiens
agagtagctaagcca

SEQ ID NO: 150312 - DNA, 15 bp, Homo sapiens
cagagtagctaagcc

SEQ ID NO: 150313 - DNA, 15 bp, Homo sapiens
acagagtagctaagc

SEQ ID NO: 150314 - DNA, 15 bp, Homo sapiens
cacagagtagctaag

SEQ ID NO: 150315 - DNA, 15 bp, Homo sapiens
acacagagtagctaa

SEQ ID NO: 150316 - DNA, 15 bp, Homo sapiens
gacacagagtagcta

SEQ ID NO: 150317 - DNA, 15 bp, Homo sapiens
ggacacagagtagct

SEQ ID NO: 150318 - DNA, 15 bp, Homo sapiens
aggacacagagtagc

SEQ ID NO: 150319 - DNA, 15 bp, Homo sapiens
aaggacacagagtag

SEQ ID NO: 150320 - DNA, 15 bp, Homo sapiens
caaggacacagagta

SEQ ID NO: 150321 - DNA, 15 bp, Homo sapiens
tcaaggacacagagt

SEQ ID NO: 150322 - DNA, 15 bp, Homo sapiens
ctcaaggacacagag

SEQ ID NO: 150323 - DNA, 15 bp, Homo sapiens
cctcaaggacacaga

SEQ ID NO: 150324 - DNA, 15 bp, Homo sapiens
ccctcaaggacacag

SEQ ID NO: 150325 - DNA, 15 bp, Homo sapiens
gccctcaaggacaca

SEQ ID NO: 150326 - DNA, 15 bp, Homo sapiens
ggccctcaaggacac

SEQ ID NO: 150327 - DNA, 15 bp, Homo sapiens
tggccctcaaggaca

SEQ ID NO: 150328 - DNA, 15 bp, Homo sapiens
ctggccctcaaggac

SEQ ID NO: 150329 - DNA, 15 bp, Homo sapiens
cctggccctcaagga

SEQ ID NO: 150330 - DNA, 15 bp, Homo sapiens
tcctggccctcaagg

SEQ ID NO: 150331 - DNA, 15 bp, Homo sapiens
ctcctggccctcaag

SEQ ID NO: 150332 - DNA, 15 bp, Homo sapiens
cctcctggccctcaa

SEQ ID NO: 150333 - DNA, 15 bp, Homo sapiens
acctcctggccctca

SEQ ID NO: 150334 - DNA, 15 bp, Homo sapiens
aacctcctggccctc

SEQ ID NO: 150335 - DNA, 15 bp, Homo sapiens
caacctcctggccct

SEQ ID NO: 150336 - DNA, 15 bp, Homo sapiens
gcaacctcctggccc

SEQ ID NO: 150337 - DNA, 15 bp, Homo sapiens
ggcaacctcctggcc

SEQ ID NO: 150338 - DNA, 15 bp, Homo sapiens
aggcaacctcctggc

SEQ ID NO: 150339 - DNA, 15 bp, Homo sapiens
aaggcaacctcctgg

SEQ ID NO: 150340 - DNA, 15 bp, Homo sapiens
caaggcaacctcctg

SEQ ID NO: 150341 - DNA, 15 bp, Homo sapiens
tcaaggcaacctcct

SEQ ID NO: 150342 - DNA, 15 bp, Homo sapiens
ttcaaggcaacctcc

SEQ ID NO: 150343 - DNA, 15 bp, Homo sapiens
cttcaaggcaacctc

SEQ ID NO: 150344 - DNA, 15 bp, Homo sapiens
acttcaaggcaacct

SEQ ID NO: 150345 - DNA, 15 bp, Homo sapiens
gacttcaaggcaacc

SEQ ID NO: 150346 - DNA, 15 bp, Homo sapiens
ggacttcaaggcaac

SEQ ID NO: 150347 - DNA, 15 bp, Homo sapiens
tggacttcaaggcaa

SEQ ID NO: 150348 - DNA, 15 bp, Homo sapiens
atggacttcaaggca

SEQ ID NO: 150349 - DNA, 15 bp, Homo sapiens
catggacttcaaggc

SEQ ID NO: 150350 - DNA, 15 bp, Homo sapiens
acatggacttcaagg

SEQ ID NO: 150351 - DNA, 15 bp, Homo sapiens
cacatggacttcaag

SEQ ID NO: 150352 - DNA, 15 bp, Homo sapiens
ccacatggacttcaa

SEQ ID NO: 150353 - DNA, 15 bp, Homo sapiens
accacatggacttca

SEQ ID NO: 150354 - DNA, 15 bp, Homo sapiens
aaccacatggacttc

SEQ ID NO: 150355 - DNA, 15 bp, Homo sapiens
gaaccacatggactt

SEQ ID NO: 150356 - DNA, 15 bp, Homo sapiens
ggaaccacatggact

SEQ ID NO: 150357 - DNA, 15 bp, Homo sapiens
aggaaccacatggac

SEQ ID NO: 150358 - DNA, 15 bp, Homo sapiens
caggaaccacatgga

SEQ ID NO: 150359 - DNA, 15 bp, Homo sapiens
ccaggaaccacatgg

SEQ ID NO: 150360 - DNA, 15 bp, Homo sapiens
accaggaaccacatg

SEQ ID NO: 150361 - DNA, 15 bp, Homo sapiens
aaccaggaaccacat

SEQ ID NO: 150362 - DNA, 15 bp, Homo sapiens
caaccaggaaccaca

SEQ ID NO: 150363 - DNA, 15 bp, Homo sapiens
tcaaccaggaaccac

SEQ ID NO: 150364 - DNA, 15 bp, Homo sapiens
ctcaaccaggaacca

SEQ ID NO: 150365 - DNA, 15 bp, Homo sapiens
actcaaccaggaacc

SEQ ID NO: 150366 - DNA, 15 bp, Homo sapiens
gactcaaccaggaac

SEQ ID NO: 150367 - DNA, 15 bp, Homo sapiens
tgactcaaccaggaa

SEQ ID NO: 150368 - DNA, 15 bp, Homo sapiens
gtgactcaaccagga

SEQ ID NO: 150369 - DNA, 15 bp, Homo sapiens
agtgactcaaccagg

SEQ ID NO: 150370 - DNA, 15 bp, Homo sapiens
cagtgactcaaccag

SEQ ID NO: 150371 - DNA, 15 bp, Homo sapiens
tcagtgactcaacca

SEQ ID NO: 150372 - DNA, 15 bp, Homo sapiens
gtcagtgactcaacc

SEQ ID NO: 150373 - DNA, 15 bp, Homo sapiens
tgtcagtgactcaac

SEQ ID NO: 150374 - DNA, 15 bp, Homo sapiens
ttgtcagtgactcaa

SEQ ID NO: 150375 - DNA, 15 bp, Homo sapiens
tttgtcagtgactca

SEQ ID NO: 150376 - DNA, 15 bp, Homo sapiens
atttgtcagtgactc

SEQ ID NO: 150377 - DNA, 15 bp, Homo sapiens
tatttgtcagtgact

SEQ ID NO: 150378 - DNA, 15 bp, Homo sapiens
ttatttgtcagtgac

SEQ ID NO: 150379 - DNA, 15 bp, Homo sapiens
tttatttgtcagtga

SEQ ID NO: 150380 - DNA, 15 bp, Homo sapiens
ctttatttgtcagtg

SEQ ID NO: 150381 - DNA, 15 bp, Homo sapiens
actttatttgtcagt

SEQ ID NO: 150382 - DNA, 15 bp, Homo sapiens
cactttatttgtcag

SEQ ID NO: 150383 - DNA, 15 bp, Homo sapiens
ccactttatttgtca

SEQ ID NO: 150384 - DNA, 15 bp, Homo sapiens
gccactttatttgtc

SEQ ID NO: 150385 - DNA, 15 bp, Homo sapiens
ggccactttatttgt

SEQ ID NO: 150386 - DNA, 15 bp, Homo sapiens
aggccactttatttg

SEQ ID NO: 150387 - DNA, 15 bp, Homo sapiens
aaggccactttattt

SEQ ID NO: 150388 - DNA, 15 bp, Homo sapiens
caaggccactttatt

SEQ ID NO: 150389 - DNA, 15 bp, Homo sapiens
ccaaggccactttat

SEQ ID NO: 150390 - DNA, 15 bp, Homo sapiens
accaaggccacttta

SEQ ID NO: 150391 - DNA, 15 bp, Homo sapiens
caccaaggccacttt

SEQ ID NO: 150392 - DNA, 15 bp, Homo sapiens
gcaccaaggccactt

SEQ ID NO: 150393 - DNA, 15 bp, Homo sapiens
agcaccaaggccact

SEQ ID NO: 150394 - DNA, 15 bp, Homo sapiens
aagcaccaaggccac

SEQ ID NO: 150395 - DNA, 15 bp, Homo sapiens
taagcaccaaggcca

SEQ ID NO: 150396 - DNA, 15 bp, Homo sapiens
gtaagcaccaaggcc

SEQ ID NO: 150397 - DNA, 15 bp, Homo sapiens
ggtaagcaccaaggc

SEQ ID NO: 150398 - DNA, 15 bp, Homo sapiens
tggtaagcaccaagg

SEQ ID NO: 150399 - DNA, 15 bp, Homo sapiens
ctggtaagcaccaag

SEQ ID NO: 150400 - DNA, 15 bp, Homo sapiens
cctggtaagcaccaa

SEQ ID NO: 150401 - DNA, 15 bp, Homo sapiens
ccctggtaagcacca

SEQ ID NO: 150402 - DNA, 15 bp, Homo sapiens
gccctggtaagcacc

SEQ ID NO: 150403 - DNA, 15 bp, Homo sapiens
ggccctggtaagcac

SEQ ID NO: 150404 - DNA, 15 bp, Homo sapiens
gggccctggtaagca

SEQ ID NO: 150405 - DNA, 15 bp, Homo sapiens
cgggccctggtaagc

SEQ ID NO: 150406 - DNA, 15 bp, Homo sapiens
ccgggccctggtaag

SEQ ID NO: 150407 - DNA, 15 bp, Homo sapiens
cccgggccctggtaa

SEQ ID NO: 150408 - DNA, 15 bp, Homo sapiens
ccccgggccctggta

SEQ ID NO: 150409 - DNA, 15 bp, Homo sapiens
tccccgggccctggt

SEQ ID NO: 150410 - DNA, 15 bp, Homo sapiens
ctccccgggccctgg

SEQ ID NO: 150411 - DNA, 15 bp, Homo sapiens
tctccccgggccctg

SEQ ID NO: 150412 - DNA, 15 bp, Homo sapiens
ctctccccgggccct

SEQ ID NO: 150413 - DNA, 15 bp, Homo sapiens
cctctccccgggccc

SEQ ID NO: 150414 - DNA, 15 bp, Homo sapiens
tcctctccccgggcc

SEQ ID NO: 150415 - DNA, 15 bp, Homo sapiens
ctcctctccccgggc

SEQ ID NO: 150416 - DNA, 15 bp, Homo sapiens
tctcctctccccggg

SEQ ID NO: 150417 - DNA, 15 bp, Homo sapiens
gtctcctctccccgg

SEQ ID NO: 150418 - DNA, 15 bp, Homo sapiens
tgtctcctctccccg

SEQ ID NO: 150419 - DNA, 15 bp, Homo sapiens
gtgtctcctctcccc

SEQ ID NO: 150420 - DNA, 15 bp, Homo sapiens
ggtgtctcctctccc

SEQ ID NO: 150421 - DNA, 15 bp, Homo sapiens
tggtgtctcctctcc

SEQ ID NO: 150422 - DNA, 15 bp, Homo sapiens
atggtgtctcctctc

SEQ ID NO: 150423 - DNA, 15 bp, Homo sapiens
catggtgtctcctct

SEQ ID NO: 150424 - DNA, 15 bp, Homo sapiens
ccatggtgtctcctc

SEQ ID NO: 150425 - DNA, 15 bp, Homo sapiens
accatggtgtctcct

SEQ ID NO: 150426 - DNA, 15 bp, Homo sapiens
taccatggtgtctcc

SEQ ID NO: 150427 - DNA, 15 bp, Homo sapiens
ttaccatggtgtctc

SEQ ID NO: 150428 - DNA, 15 bp, Homo sapiens
attaccatggtgtct

SEQ ID NO: 150429 - DNA, 15 bp, Homo sapiens
cattaccatggtgtc

SEQ ID NO: 150430 - DNA, 15 bp, Homo sapiens
tcattaccatggtgt

SEQ ID NO: 150431 - DNA, 15 bp, Homo sapiens
gtcattaccatggtg

SEQ ID NO: 150432 - DNA, 15 bp, Homo sapiens
ggtcattaccatggt

SEQ ID NO: 150433 - DNA, 15 bp, Homo sapiens
aggtcattaccatgg

SEQ ID NO: 150434 - DNA, 15 bp, Homo sapiens
gaggtcattaccatg

SEQ ID NO: 150435 - DNA, 15 bp, Homo sapiens
tgaggtcattaccat

SEQ ID NO: 150436 - DNA, 15 bp, Homo sapiens
ctgaggtcattacca

SEQ ID NO: 150437 - DNA, 15 bp, Homo sapiens
tctgaggtcattacc

SEQ ID NO: 150438 - DNA, 15 bp, Homo sapiens
gtctgaggtcattac

SEQ ID NO: 150439 - DNA, 15 bp, Homo sapiens
tgtctgaggtcatta

SEQ ID NO: 150440 - DNA, 15 bp, Homo sapiens
ttgtctgaggtcatt

SEQ ID NO: 150441 - DNA, 15 bp, Homo sapiens
attgtctgaggtcat

SEQ ID NO: 150442 - DNA, 15 bp, Homo sapiens
tattgtctgaggtca

SEQ ID NO: 150443 - DNA, 15 bp, Homo sapiens
ttattgtctgaggtc

SEQ ID NO: 150444 - DNA, 15 bp, Homo sapiens
tttattgtctgaggt

SEQ ID NO: 150445 - DNA, 15 bp, Homo sapiens
gtttattgtctgagg

SEQ ID NO: 150446 - DNA, 15 bp, Homo sapiens
tgtttattgtctgag

SEQ ID NO: 150447 - DNA, 15 bp, Homo sapiens
ctgtttattgtctga

SEQ ID NO: 150448 - DNA, 15 bp, Homo sapiens
tctgtttattgtctg

SEQ ID NO: 150449 - DNA, 15 bp, Homo sapiens
gtctgtttattgtct

SEQ ID NO: 150450 - DNA, 15 bp, Homo sapiens
ggtctgtttattgtc

SEQ ID NO: 150451 - DNA, 15 bp, Homo sapiens
tggtctgtttattgt

SEQ ID NO: 150452 - DNA, 15 bp, Homo sapiens
atggtctgtttattg

SEQ ID NO: 150453 - DNA, 15 bp, Homo sapiens
aatggtctgtttatt

SEQ ID NO: 150454 - DNA, 15 bp, Homo sapiens
caatggtctgtttat

SEQ ID NO: 150455 - DNA, 15 bp, Homo sapiens
ccaatggtctgttta

SEQ ID NO: 150456 - DNA, 15 bp, Homo sapiens
cccaatggtctgttt

SEQ ID NO: 150457 - DNA, 15 bp, Homo sapiens
tcccaatggtctgtt

SEQ ID NO: 150458 - DNA, 15 bp, Homo sapiens
atcccaatggtctgt

SEQ ID NO: 150459 - DNA, 15 bp, Homo sapiens
aatcccaatggtctg

SEQ ID NO: 150460 - DNA, 15 bp, Homo sapiens
caatcccaatggtct

SEQ ID NO: 150461 - DNA, 15 bp, Homo sapiens
ccaatcccaatggtc

SEQ ID NO: 150462 - DNA, 15 bp, Homo sapiens
tccaatcccaatggt

SEQ ID NO: 150463 - DNA, 15 bp, Homo sapiens
gtccaatcccaatgg

SEQ ID NO: 150464 - DNA, 15 bp, Homo sapiens
agtccaatcccaatg

SEQ ID NO: 150465 - DNA, 15 bp, Homo sapiens
cagtccaatcccaat

SEQ ID NO: 150466 - DNA, 15 bp, Homo sapiens
acagtccaatcccaa

SEQ ID NO: 150467 - DNA, 15 bp, Homo sapiens
cacagtccaatccca

SEQ ID NO: 150468 - DNA, 15 bp, Homo sapiens
ccacagtccaatccc

SEQ ID NO: 150469 - DNA, 15 bp, Homo sapiens
gccacagtccaatcc

SEQ ID NO: 150470 - DNA, 15 bp, Homo sapiens
ggccacagtccaatc

SEQ ID NO: 150471 - DNA, 15 bp, Homo sapiens
aggccacagtccaat

SEQ ID NO: 150472 - DNA, 15 bp, Homo sapiens
gaggccacagtccaa

SEQ ID NO: 150473 - DNA, 15 bp, Homo sapiens
ggaggccacagtcca

SEQ ID NO: 150474 - DNA, 15 bp, Homo sapiens
tggaggccacagtcc

SEQ ID NO: 150475 - DNA, 15 bp, Homo sapiens
ctggaggccacagtc

SEQ ID NO: 150476 - DNA, 15 bp, Homo sapiens
actggaggccacagt

SEQ ID NO: 150477 - DNA, 15 bp, Homo sapiens
cactggaggccacag

SEQ ID NO: 150478 - DNA, 15 bp, Homo sapiens
acactggaggccaca

SEQ ID NO: 150479 - DNA, 15 bp, Homo sapiens
gacactggaggccac

SEQ ID NO: 150480 - DNA, 15 bp, Homo sapiens
agacactggaggcca

SEQ ID NO: 150481 - DNA, 15 bp, Homo sapiens
aagacactggaggcc

SEQ ID NO: 150482 - DNA, 15 bp, Homo sapiens
caagacactggaggc

SEQ ID NO: 150483 - DNA, 15 bp, Homo sapiens
gcaagacactggagg

SEQ ID NO: 150484 - DNA, 15 bp, Homo sapiens
agcaagacactggag

SEQ ID NO: 150485 - DNA, 15 bp, Homo sapiens
cagcaagacactgga

SEQ ID NO: 150486 - DNA, 15 bp, Homo sapiens
tcagcaagacactgg

SEQ ID NO: 150487 - DNA, 15 bp, Homo sapiens
gtcagcaagacactg

SEQ ID NO: 150488 - DNA, 15 bp, Homo sapiens
agtcagcaagacact

SEQ ID NO: 150489 - DNA, 15 bp, Homo sapiens
gagtcagcaagacac

SEQ ID NO: 150490 - DNA, 15 bp, Homo sapiens
ggagtcagcaagaca

SEQ ID NO: 150491 - DNA, 15 bp, Homo sapiens
aggagtcagcaagac

SEQ ID NO: 150492 - DNA, 15 bp, Homo sapiens
caggagtcagcaaga

SEQ ID NO: 150493 - DNA, 15 bp, Homo sapiens
acaggagtcagcaag

SEQ ID NO: 150494 - DNA, 15 bp, Homo sapiens
gacaggagtcagcaa

SEQ ID NO: 150495 - DNA, 15 bp, Homo sapiens
agacaggagtcagca

SEQ ID NO: 150496 - DNA, 15 bp, Homo sapiens
aagacaggagtcagc

SEQ ID NO: 150497 - DNA, 15 bp, Homo sapiens
caagacaggagtcag

SEQ ID NO: 150498 - DNA, 15 bp, Homo sapiens
ccaagacaggagtca

SEQ ID NO: 150499 - DNA, 15 bp, Homo sapiens
tccaagacaggagtc

SEQ ID NO: 150500 - DNA, 15 bp, Homo sapiens
ttccaagacaggagt

SEQ ID NO: 150501 - DNA, 15 bp, Homo sapiens
gttccaagacaggag

SEQ ID NO: 150502 - DNA, 15 bp, Homo sapiens
ggttccaagacagga

SEQ ID NO: 150503 - DNA, 15 bp, Homo sapiens
tggttccaagacagg

SEQ ID NO: 150504 - DNA, 15 bp, Homo sapiens
ttggttccaagacag

SEQ ID NO: 150505 - DNA, 15 bp, Homo sapiens
tttggttccaagaca

SEQ ID NO: 150506 - DNA, 15 bp, Homo sapiens
atttggttccaagac

SEQ ID NO: 150507 - DNA, 15 bp, Homo sapiens
catttggttccaaga

SEQ ID NO: 150508 - DNA, 15 bp, Homo sapiens
gcatttggttccaag

SEQ ID NO: 150509 - DNA, 15 bp, Homo sapiens
tgcatttggttccaa

SEQ ID NO: 150510 - DNA, 15 bp, Homo sapiens
ctgcatttggttcca

SEQ ID NO: 150511 - DNA, 15 bp, Homo sapiens
tctgcatttggttcc

SEQ ID NO: 150512 - DNA, 15 bp, Homo sapiens
ttctgcatttggttc

SEQ ID NO: 150513 - DNA, 15 bp, Homo sapiens
cttctgcatttggtt

SEQ ID NO: 150514 - DNA, 15 bp, Homo sapiens
gcttctgcatttggt

SEQ ID NO: 150515 - DNA, 15 bp, Homo sapiens
agcttctgcatttgg

SEQ ID NO: 150516 - DNA, 15 bp, Homo sapiens
tagcttctgcatttg

SEQ ID NO: 150517 - DNA, 15 bp, Homo sapiens
gtagcttctgcattt

SEQ ID NO: 150518 - DNA, 15 bp, Homo sapiens
agtagcttctgcatt

SEQ ID NO: 150519 - DNA, 15 bp, Homo sapiens
aagtagcttctgcat

SEQ ID NO: 150520 - DNA, 15 bp, Homo sapiens
aaagtagcttctgca

SEQ ID NO: 150521 - DNA, 15 bp, Homo sapiens
caaagtagcttctgc

SEQ ID NO: 150522 - DNA, 15 bp, Homo sapiens
acaaagtagcttctg

SEQ ID NO: 150523 - DNA, 15 bp, Homo sapiens
gacaaagtagcttct

SEQ ID NO: 150524 - DNA, 15 bp, Homo sapiens
ggacaaagtagcttc

SEQ ID NO: 150525 - DNA, 15 bp, Homo sapiens
aggacaaagtagctt

SEQ ID NO: 150526 - DNA, 15 bp, Homo sapiens
caggacaaagtagct

SEQ ID NO: 150527 - DNA, 15 bp, Homo sapiens
gcaggacaaagtagc

SEQ ID NO: 150528 - DNA, 15 bp, Homo sapiens
tgcaggacaaagtag

SEQ ID NO: 150529 - DNA, 15 bp, Homo sapiens
ctgcaggacaaagta

SEQ ID NO: 150530 - DNA, 15 bp, Homo sapiens
gctgcaggacaaagt

SEQ ID NO: 150531 - DNA, 15 bp, Homo sapiens
agctgcaggacaaag

SEQ ID NO: 150532 - DNA, 15 bp, Homo sapiens
cagctgcaggacaaa

SEQ ID NO: 150533 - DNA, 15 bp, Homo sapiens
tcagctgcaggacaa

SEQ ID NO: 150534 - DNA, 15 bp, Homo sapiens
atcagctgcaggaca

SEQ ID NO: 150535 - DNA, 15 bp, Homo sapiens
catcagctgcaggac

SEQ ID NO: 150536 - DNA, 15 bp, Homo sapiens
ccatcagctgcagga

SEQ ID NO: 150537 - DNA, 15 bp, Homo sapiens
cccatcagctgcagg

SEQ ID NO: 150538 - DNA, 15 bp, Homo sapiens
tcccatcagctgcag

SEQ ID NO: 150539 - DNA, 15 bp, Homo sapiens
ttcccatcagctgca

SEQ ID NO: 150540 - DNA, 15 bp, Homo sapiens
attcccatcagctgc

SEQ ID NO: 150541 - DNA, 15 bp, Homo sapiens
tattcccatcagctg

SEQ ID NO: 150542 - DNA, 15 bp, Homo sapiens
ttattcccatcagct

SEQ ID NO: 150543 - DNA, 15 bp, Homo sapiens
cttattcccatcagc

SEQ ID NO: 150544 - DNA, 15 bp, Homo sapiens
gcttattcccatcag

SEQ ID NO: 150545 - DNA, 15 bp, Homo sapiens
agcttattcccatca

SEQ ID NO: 150546 - DNA, 15 bp, Homo sapiens
cagcttattcccatc

SEQ ID NO: 150547 - DNA, 15 bp, Homo sapiens
gcagcttattcccat

SEQ ID NO: 150548 - DNA, 15 bp, Homo sapiens
ggcagcttattccca

SEQ ID NO: 150549 - DNA, 15 bp, Homo sapiens
tggcagcttattccc

SEQ ID NO: 150550 - DNA, 15 bp, Homo sapiens
ctggcagcttattcc

SEQ ID NO: 150551 - DNA, 15 bp, Homo sapiens
gctggcagcttattc

SEQ ID NO: 150552 - DNA, 15 bp, Homo sapiens
tgctggcagcttatt

SEQ ID NO: 150553 - DNA, 15 bp, Homo sapiens
ctgctggcagcttat

SEQ ID NO: 150554 - DNA, 15 bp, Homo sapiens
tctgctggcagctta

SEQ ID NO: 150555 - DNA, 15 bp, Homo sapiens
atctgctggcagctt

SEQ ID NO: 150556 - DNA, 15 bp, Homo sapiens
tatctgctggcagct

SEQ ID NO: 150557 - DNA, 15 bp, Homo sapiens
atatctgctggcagc

SEQ ID NO: 150558 - DNA, 15 bp, Homo sapiens
aatatctgctggcag

SEQ ID NO: 150559 - DNA, 15 bp, Homo sapiens
aaatatctgctggca

SEQ ID NO: 150560 - DNA, 15 bp, Homo sapiens
aaaatatctgctggc

SEQ ID NO: 150561 - DNA, 15 bp, Homo sapiens
caaaatatctgctgg

SEQ ID NO: 150562 - DNA, 15 bp, Homo sapiens
ccaaaatatctgctg

SEQ ID NO: 150563 - DNA, 15 bp, Homo sapiens
accaaaatatctgct

SEQ ID NO: 150564 - DNA, 15 bp, Homo sapiens
caccaaaatatctgc

SEQ ID NO: 150565 - DNA, 15 bp, Homo sapiens
gcaccaaaatatctg

SEQ ID NO: 150566 - DNA, 15 bp, Homo sapiens
ggcaccaaaatatct

SEQ ID NO: 150567 - DNA, 15 bp, Homo sapiens
aggcaccaaaatatc

SEQ ID NO: 150568 - DNA, 15 bp, Homo sapiens
taggcaccaaaatat

SEQ ID NO: 150569 - DNA, 15 bp, Homo sapiens
ctaggcaccaaaata

SEQ ID NO: 150570 - DNA, 15 bp, Homo sapiens
tctaggcaccaaaat

SEQ ID NO: 150571 - DNA, 15 bp, Homo sapiens
atctaggcaccaaaa

SEQ ID NO: 150572 - DNA, 15 bp, Homo sapiens
aatctaggcaccaaa

SEQ ID NO: 150573 - DNA, 15 bp, Homo sapiens
taatctaggcaccaa

SEQ ID NO: 150574 - DNA, 15 bp, Homo sapiens
ataatctaggcacca

SEQ ID NO: 150575 - DNA, 15 bp, Homo sapiens
cataatctaggcacc

SEQ ID NO: 150576 - DNA, 15 bp, Homo sapiens
tcataatctaggcac

SEQ ID NO: 150577 - DNA, 15 bp, Homo sapiens
ttcataatctaggca

SEQ ID NO: 150578 - DNA, 15 bp, Homo sapiens
tttcataatctaggc

SEQ ID NO: 150579 - DNA, 15 bp, Homo sapiens
ctttcataatctagg

SEQ ID NO: 150580 - DNA, 15 bp, Homo sapiens
cctttcataatctag

SEQ ID NO: 150581 - DNA, 15 bp, Homo sapiens
tcctttcataatcta

SEQ ID NO: 150582 - DNA, 15 bp, Homo sapiens
ctcctttcataatct

SEQ ID NO: 150583 - DNA, 15 bp, Homo sapiens
tctcctttcataatc

SEQ ID NO: 150584 - DNA, 15 bp, Homo sapiens
ctctcctttcataat

SEQ ID NO: 150585 - DNA, 15 bp, Homo sapiens
actctcctttcataa

SEQ ID NO: 150586 - DNA, 15 bp, Homo sapiens
gactctcctttcata

SEQ ID NO: 150587 - DNA, 15 bp, Homo sapiens
tgactctcctttcat

SEQ ID NO: 150588 - DNA, 15 bp, Homo sapiens
ttgactctcctttca

SEQ ID NO: 150589 - DNA, 15 bp, Homo sapiens
attgactctcctttc

SEQ ID NO: 150590 - DNA, 15 bp, Homo sapiens
tattgactctccttt

SEQ ID NO: 150591 - DNA, 15 bp, Homo sapiens
atattgactctcctt

SEQ ID NO: 150592 - DNA, 15 bp, Homo sapiens
catattgactctcct

SEQ ID NO: 150593 - DNA, 15 bp, Homo sapiens
acatattgactctcc

SEQ ID NO: 150594 - DNA, 15 bp, Homo sapiens
tacatattgactctc

SEQ ID NO: 150595 - DNA, 15 bp, Homo sapiens
ttacatattgactct

SEQ ID NO: 150596 - DNA, 15 bp, Homo sapiens
attacatattgactc

SEQ ID NO: 150597 - DNA, 15 bp, Homo sapiens
gattacatattgact

SEQ ID NO: 150598 - DNA, 15 bp, Homo sapiens
ggattacatattgac

SEQ ID NO: 150599 - DNA, 15 bp, Homo sapiens
tggattacatattga

SEQ ID NO: 150600 - DNA, 15 bp, Homo sapiens
gtggattacatattg

SEQ ID NO: 150601 - DNA, 15 bp, Homo sapiens
cgtggattacatatt

SEQ ID NO: 150602 - DNA, 15 bp, Homo sapiens
ccgtggattacatat

SEQ ID NO: 150603 - DNA, 15 bp, Homo sapiens
cccgtggattacata

SEQ ID NO: 150604 - DNA, 15 bp, Homo sapiens
acccgtggattacat

SEQ ID NO: 150605 - DNA, 15 bp, Homo sapiens
tacccgtggattaca

SEQ ID NO: 150606 - DNA, 15 bp, Homo sapiens
atacccgtggattac

SEQ ID NO: 150607 - DNA, 15 bp, Homo sapiens
tatacccgtggatta

SEQ ID NO: 150608 - DNA, 15 bp, Homo sapiens
ttatacccgtggatt

SEQ ID NO: 150609 - DNA, 15 bp, Homo sapiens
tttatacccgtggat

SEQ ID NO: 150610 - DNA, 15 bp, Homo sapiens
ctttatacccgtgga

SEQ ID NO: 150611 - DNA, 15 bp, Homo sapiens
cctttatacccgtgg

SEQ ID NO: 150612 - DNA, 15 bp, Homo sapiens
acctttatacccgtg

SEQ ID NO: 150613 - DNA, 15 bp, Homo sapiens
gacctttatacccgt

SEQ ID NO: 150614 - DNA, 15 bp, Homo sapiens
tgacctttatacccg

SEQ ID NO: 150615 - DNA, 15 bp, Homo sapiens
atgacctttataccc

SEQ ID NO: 150616 - DNA, 15 bp, Homo sapiens
gatgacctttatacc

SEQ ID NO: 150617 - DNA, 15 bp, Homo sapiens
tgatgacctttatac

SEQ ID NO: 150618 - DNA, 15 bp, Homo sapiens
gtgatgacctttata

SEQ ID NO: 150619 - DNA, 15 bp, Homo sapiens
tgtgatgacctttat

SEQ ID NO: 150620 - DNA, 15 bp, Homo sapiens
atgtgatgaccttta

SEQ ID NO: 150621 - DNA, 15 bp, Homo sapiens
catgtgatgaccttt

SEQ ID NO: 150622 - DNA, 15 bp, Homo sapiens
ccatgtgatgacctt

SEQ ID NO: 150623 - DNA, 15 bp, Homo sapiens
accatgtgatgacct

SEQ ID NO: 150624 - DNA, 15 bp, Homo sapiens
gaccatgtgatgacc

SEQ ID NO: 150625 - DNA, 15 bp, Homo sapiens
ggaccatgtgatgac

SEQ ID NO: 150626 - DNA, 15 bp, Homo sapiens
cggaccatgtgatga

SEQ ID NO: 150627 - DNA, 15 bp, Homo sapiens
tcggaccatgtgatg

SEQ ID NO: 150628 - DNA, 15 bp, Homo sapiens
ctcggaccatgtgat

SEQ ID NO: 150629 - DNA, 15 bp, Homo sapiens
actcggaccatgtga

SEQ ID NO: 150630 - DNA, 15 bp, Homo sapiens
gactcggaccatgtg

SEQ ID NO: 150631 - DNA, 15 bp, Homo sapiens
agactcggaccatgt

SEQ ID NO: 150632 - DNA, 15 bp, Homo sapiens
tagactcggaccatg

SEQ ID NO: 150633 - DNA, 15 bp, Homo sapiens
ttagactcggaccat

SEQ ID NO: 150634 - DNA, 15 bp, Homo sapiens
cttagactcggacca

SEQ ID NO: 150635 - DNA, 15 bp, Homo sapiens
ccttagactcggacc

SEQ ID NO: 150636 - DNA, 15 bp, Homo sapiens
gccttagactcggac

SEQ ID NO: 150637 - DNA, 15 bp, Homo sapiens
cgccttagactcgga

SEQ ID NO: 150638 - DNA, 15 bp, Homo sapiens
tcgccttagactcgg

SEQ ID NO: 150639 - DNA, 15 bp, Homo sapiens
atcgccttagactcg

SEQ ID NO: 150640 - DNA, 15 bp, Homo sapiens
catcgccttagactc

SEQ ID NO: 150641 - DNA, 15 bp, Homo sapiens
ccatcgccttagact

SEQ ID NO: 150642 - DNA, 15 bp, Homo sapiens
accatcgccttagac

SEQ ID NO: 150643 - DNA, 15 bp, Homo sapiens
caccatcgccttaga

SEQ ID NO: 150644 - DNA, 15 bp, Homo sapiens
acaccatcgccttag

SEQ ID NO: 150645 - DNA, 15 bp, Homo sapiens
aacaccatcgcctta

SEQ ID NO: 150646 - DNA, 15 bp, Homo sapiens
taacaccatcgcctt

SEQ ID NO: 150647 - DNA, 15 bp, Homo sapiens
ataacaccatcgcct

SEQ ID NO: 150648 - DNA, 15 bp, Homo sapiens
aataacaccatcgcc

SEQ ID NO: 150649 - DNA, 15 bp, Homo sapiens
aaataacaccatcgc

SEQ ID NO: 150650 - DNA, 15 bp, Homo sapiens
caaataacaccatcg

SEQ ID NO: 150651 - DNA, 15 bp, Homo sapiens
acaaataacaccatc

SEQ ID NO: 150652 - DNA, 15 bp, Homo sapiens
cacaaataacaccat

SEQ ID NO: 150653 - DNA, 15 bp, Homo sapiens
gcacaaataacacca

SEQ ID NO: 150654 - DNA, 15 bp, Homo sapiens
agcacaaataacacc

SEQ ID NO: 150655 - DNA, 15 bp, Homo sapiens
aagcacaaataacac

SEQ ID NO: 150656 - DNA, 15 bp, Homo sapiens
caagcacaaataaca

SEQ ID NO: 150657 - DNA, 15 bp, Homo sapiens
tcaagcacaaataac

SEQ ID NO: 150658 - DNA, 15 bp, Homo sapiens
atcaagcacaaataa

SEQ ID NO: 150659 - DNA, 15 bp, Homo sapiens
aatcaagcacaaata

SEQ ID NO: 150660 - DNA, 15 bp, Homo sapiens
caatcaagcacaaat

SEQ ID NO: 150661 - DNA, 15 bp, Homo sapiens
ccaatcaagcacaaa

SEQ ID NO: 150662 - DNA, 15 bp, Homo sapiens
gccaatcaagcacaa

SEQ ID NO: 150663 - DNA, 15 bp, Homo sapiens
cgccaatcaagcaca

SEQ ID NO: 150664 - DNA, 15 bp, Homo sapiens
ccgccaatcaagcac

SEQ ID NO: 150665 - DNA, 15 bp, Homo sapiens
tccgccaatcaagca

SEQ ID NO: 150666 - DNA, 15 bp, Homo sapiens
ttccgccaatcaagc

SEQ ID NO: 150667 - DNA, 15 bp, Homo sapiens
attccgccaatcaag

SEQ ID NO: 150668 - DNA, 15 bp, Homo sapiens
gattccgccaatcaa

SEQ ID NO: 150669 - DNA, 15 bp, Homo sapiens
agattccgccaatca

SEQ ID NO: 150670 - DNA, 15 bp, Homo sapiens
aagattccgccaatc

SEQ ID NO: 150671 - DNA, 15 bp, Homo sapiens
taagattccgccaat

SEQ ID NO: 150672 - DNA, 15 bp, Homo sapiens
ataagattccgccaa

SEQ ID NO: 150673 - DNA, 15 bp, Homo sapiens
cataagattccgcca

SEQ ID NO: 150674 - DNA, 15 bp, Homo sapiens
gcataagattccgcc

SEQ ID NO: 150675 - DNA, 15 bp, Homo sapiens
agcataagattccgc

SEQ ID NO: 150676 - DNA, 15 bp, Homo sapiens
cagcataagattccg

SEQ ID NO: 150677 - DNA, 15 bp, Homo sapiens
tcagcataagattcc

SEQ ID NO: 150678 - DNA, 15 bp, Homo sapiens
gtcagcataagattc

SEQ ID NO: 150679 - DNA, 15 bp, Homo sapiens
agtcagcataagatt

SEQ ID NO: 150680 - DNA, 15 bp, Homo sapiens
cagtcagcataagat

SEQ ID NO: 150681 - DNA, 15 bp, Homo sapiens
gcagtcagcataaga

SEQ ID NO: 150682 - DNA, 15 bp, Homo sapiens
agcagtcagcataag

SEQ ID NO: 150683 - DNA, 15 bp, Homo sapiens
aagcagtcagcataa

SEQ ID NO: 150684 - DNA, 15 bp, Homo sapiens
gaagcagtcagcata

SEQ ID NO: 150685 - DNA, 15 bp, Homo sapiens
agaagcagtcagcat

SEQ ID NO: 150686 - DNA, 15 bp, Homo sapiens
aagaagcagtcagca

SEQ ID NO: 150687 - DNA, 15 bp, Homo sapiens
gaagaagcagtcagc

SEQ ID NO: 150688 - DNA, 15 bp, Homo sapiens
tgaagaagcagtcag

SEQ ID NO: 150689 - DNA, 15 bp, Homo sapiens
gtgaagaagcagtca

SEQ ID NO: 150690 - DNA, 15 bp, Homo sapiens
agtgaagaagcagtc

SEQ ID NO: 150691 - DNA, 15 bp, Homo sapiens
aagtgaagaagcagt

SEQ ID NO: 150692 - DNA, 15 bp, Homo sapiens
gaagtgaagaagcag

SEQ ID NO: 150693 - DNA, 15 bp, Homo sapiens
tgaagtgaagaagca

SEQ ID NO: 150694 - DNA, 15 bp, Homo sapiens
gtgaagtgaagaagc

SEQ ID NO: 150695 - DNA, 15 bp, Homo sapiens
ggtgaagtgaagaag

SEQ ID NO: 150696 - DNA, 15 bp, Homo sapiens
tggtgaagtgaagaa

SEQ ID NO: 150697 - DNA, 15 bp, Homo sapiens
atggtgaagtgaaga

SEQ ID NO: 150698 - DNA, 15 bp, Homo sapiens
aatggtgaagtgaag

SEQ ID NO: 150699 - DNA, 15 bp, Homo sapiens
aaatggtgaagtgaa

SEQ ID NO: 150700 - DNA, 15 bp, Homo sapiens
taaatggtgaagtga

SEQ ID NO: 150701 - DNA, 15 bp, Homo sapiens
ctaaatggtgaagtg

SEQ ID NO: 150702 - DNA, 15 bp, Homo sapiens
tctaaatggtgaagt

SEQ ID NO: 150703 - DNA, 15 bp, Homo sapiens
ctctaaatggtgaag

SEQ ID NO: 150704 - DNA, 15 bp, Homo sapiens
tctctaaatggtgaa

SEQ ID NO: 150705 - DNA, 15 bp, Homo sapiens
ctctctaaatggtga

SEQ ID NO: 150706 - DNA, 15 bp, Homo sapiens
actctctaaatggtg

SEQ ID NO: 150707 - DNA, 15 bp, Homo sapiens
cactctctaaatggt

SEQ ID NO: 150708 - DNA, 15 bp, Homo sapiens
ccactctctaaatgg

SEQ ID NO: 150709 - DNA, 15 bp, Homo sapiens
tccactctctaaatg

SEQ ID NO: 150710 - DNA, 15 bp, Homo sapiens
gtccactctctaaat

SEQ ID NO: 150711 - DNA, 15 bp, Homo sapiens
tgtccactctctaaa

SEQ ID NO: 150712 - DNA, 15 bp, Homo sapiens
atgtccactctctaa

SEQ ID NO: 150713 - DNA, 15 bp, Homo sapiens
gatgtccactctcta

SEQ ID NO: 150714 - DNA, 15 bp, Homo sapiens
tgatgtccactctct

SEQ ID NO: 150715 - DNA, 15 bp, Homo sapiens
gtgatgtccactctc

SEQ ID NO: 150716 - DNA, 15 bp, Homo sapiens
tgtgatgtccactct

SEQ ID NO: 150717 - DNA, 15 bp, Homo sapiens
gtgtgatgtccactc

SEQ ID NO: 150718 - DNA, 15 bp, Homo sapiens
tgtgtgatgtccact

SEQ ID NO: 150719 - DNA, 15 bp, Homo sapiens
atgtgtgatgtccac

SEQ ID NO: 150720 - DNA, 15 bp, Homo sapiens
aatgtgtgatgtcca

SEQ ID NO: 150721 - DNA, 15 bp, Homo sapiens
taatgtgtgatgtcc

SEQ ID NO: 150722 - DNA, 15 bp, Homo sapiens
ctaatgtgtgatgtc

SEQ ID NO: 150723 - DNA, 15 bp, Homo sapiens
actaatgtgtgatgt

SEQ ID NO: 150724 - DNA, 15 bp, Homo sapiens
gactaatgtgtgatg

SEQ ID NO: 150725 - DNA, 15 bp, Homo sapiens
tgactaatgtgtgat

SEQ ID NO: 150726 - DNA, 15 bp, Homo sapiens
ttgactaatgtgtga

SEQ ID NO: 150727 - DNA, 15 bp, Homo sapiens
attgactaatgtgtg

SEQ ID NO: 150728 - DNA, 15 bp, Homo sapiens
cattgactaatgtgt

SEQ ID NO: 150729 - DNA, 15 bp, Homo sapiens
ccattgactaatgtg

SEQ ID NO: 150730 - DNA, 15 bp, Homo sapiens
gccattgactaatgt

SEQ ID NO: 150731 - DNA, 15 bp, Homo sapiens
tgccattgactaatg

SEQ ID NO: 150732 - DNA, 15 bp, Homo sapiens
gtgccattgactaat

SEQ ID NO: 150733 - DNA, 15 bp, Homo sapiens
tgtgccattgactaa

SEQ ID NO: 150734 - DNA, 15 bp, Homo sapiens
gtgtgccattgacta

SEQ ID NO: 150735 - DNA, 15 bp, Homo sapiens
tgtgtgccattgact

SEQ ID NO: 150736 - DNA, 15 bp, Homo sapiens
atgtgtgccattgac

SEQ ID NO: 150737 - DNA, 15 bp, Homo sapiens
aatgtgtgccattga

SEQ ID NO: 150738 - DNA, 15 bp, Homo sapiens
aaatgtgtgccattg

SEQ ID NO: 150739 - DNA, 15 bp, Homo sapiens
caaatgtgtgccatt

SEQ ID NO: 150740 - DNA, 15 bp, Homo sapiens
ccaaatgtgtgccat

SEQ ID NO: 150741 - DNA, 15 bp, Homo sapiens
cccaaatgtgtgcca

SEQ ID NO: 150742 - DNA, 15 bp, Homo sapiens
acccaaatgtgtgcc

SEQ ID NO: 150743 - DNA, 15 bp, Homo sapiens
aacccaaatgtgtgc

SEQ ID NO: 150744 - DNA, 15 bp, Homo sapiens
aaacccaaatgtgtg

SEQ ID NO: 150745 - DNA, 15 bp, Homo sapiens
caaacccaaatgtgt

SEQ ID NO: 150746 - DNA, 15 bp, Homo sapiens
tcaaacccaaatgtg

SEQ ID NO: 150747 - DNA, 15 bp, Homo sapiens
ttcaaacccaaatgt

SEQ ID NO: 150748 - DNA, 15 bp, Homo sapiens
cttcaaacccaaatg

SEQ ID NO: 150749 - DNA, 15 bp, Homo sapiens
tcttcaaacccaaat

SEQ ID NO: 150750 - DNA, 15 bp, Homo sapiens
atcttcaaacccaaa

SEQ ID NO: 150751 - DNA, 15 bp, Homo sapiens
tatcttcaaacccaa

SEQ ID NO: 150752 - DNA, 15 bp, Homo sapiens
ctatcttcaaaccca

SEQ ID NO: 150753 - DNA, 15 bp, Homo sapiens
cctatcttcaaaccc

SEQ ID NO: 150754 - DNA, 15 bp, Homo sapiens
acctatcttcaaacc

SEQ ID NO: 150755 - DNA, 15 bp, Homo sapiens
aacctatcttcaaac

SEQ ID NO: 150756 - DNA, 15 bp, Homo sapiens
gaacctatcttcaaa

SEQ ID NO: 150757 - DNA, 15 bp, Homo sapiens
tgaacctatcttcaa

SEQ ID NO: 150758 - DNA, 15 bp, Homo sapiens
ttgaacctatcttca

SEQ ID NO: 150759 - DNA, 15 bp, Homo sapiens
attgaacctatcttc

SEQ ID NO: 150760 - DNA, 15 bp, Homo sapiens
aattgaacctatctt

SEQ ID NO: 150761 - DNA, 15 bp, Homo sapiens
caattgaacctatct

SEQ ID NO: 150762 - DNA, 15 bp, Homo sapiens
acaattgaacctatc

SEQ ID NO: 150763 - DNA, 15 bp, Homo sapiens
tacaattgaacctat

SEQ ID NO: 150764 - DNA, 15 bp, Homo sapiens
atacaattgaaccta

SEQ ID NO: 150765 - DNA, 15 bp, Homo sapiens
gatacaattgaacct

SEQ ID NO: 150766 - DNA, 15 bp, Homo sapiens
agatacaattgaacc

SEQ ID NO: 150767 - DNA, 15 bp, Homo sapiens
gagatacaattgaac

SEQ ID NO: 150768 - DNA, 15 bp, Homo sapiens
ggagatacaattgaa

SEQ ID NO: 150769 - DNA, 15 bp, Homo sapiens
cggagatacaattga

SEQ ID NO: 150770 - DNA, 15 bp, Homo sapiens
acggagatacaattg

SEQ ID NO: 150771 - DNA, 15 bp, Homo sapiens
cacggagatacaatt

SEQ ID NO: 150772 - DNA, 15 bp, Homo sapiens
acacggagatacaat

SEQ ID NO: 150773 - DNA, 15 bp, Homo sapiens
aacacggagatacaa

SEQ ID NO: 150774 - DNA, 15 bp, Homo sapiens
aaacacggagataca

SEQ ID NO: 150775 - DNA, 15 bp, Homo sapiens
aaaacacggagatac

SEQ ID NO: 150776 - DNA, 15 bp, Homo sapiens
gaaaacacggagata

SEQ ID NO: 150777 - DNA, 15 bp, Homo sapiens
tgaaaacacggagat

SEQ ID NO: 150778 - DNA, 15 bp, Homo sapiens
atgaaaacacggaga

SEQ ID NO: 150779 - DNA, 15 bp, Homo sapiens
catgaaaacacggag

SEQ ID NO: 150780 - DNA, 15 bp, Homo sapiens
tcatgaaaacacgga

SEQ ID NO: 150781 - DNA, 15 bp, Homo sapiens
gtcatgaaaacacgg

SEQ ID NO: 150782 - DNA, 15 bp, Homo sapiens
tgtcatgaaaacacg

SEQ ID NO: 150783 - DNA, 15 bp, Homo sapiens
atgtcatgaaaacac

SEQ ID NO: 150784 - DNA, 15 bp, Homo sapiens
gatgtcatgaaaaca

SEQ ID NO: 150785 - DNA, 15 bp, Homo sapiens
agatgtcatgaaaac

SEQ ID NO: 150786 - DNA, 15 bp, Homo sapiens
aagatgtcatgaaaa

SEQ ID NO: 150787 - DNA, 15 bp, Homo sapiens
taagatgtcatgaaa

SEQ ID NO: 150788 - DNA, 15 bp, Homo sapiens
ctaagatgtcatgaa

SEQ ID NO: 150789 - DNA, 15 bp, Homo sapiens
tctaagatgtcatga

SEQ ID NO: 150790 - DNA, 15 bp, Homo sapiens
ctctaagatgtcatg

SEQ ID NO: 150791 - DNA, 15 bp, Homo sapiens
tctctaagatgtcat

SEQ ID NO: 150792 - DNA, 15 bp, Homo sapiens
atctctaagatgtca

SEQ ID NO: 150793 - DNA, 15 bp, Homo sapiens
gatctctaagatgtc

SEQ ID NO: 150794 - DNA, 15 bp, Homo sapiens
cgatctctaagatgt

SEQ ID NO: 150795 - DNA, 15 bp, Homo sapiens
acgatctctaagatg

SEQ ID NO: 150796 - DNA, 15 bp, Homo sapiens
gacgatctctaagat

SEQ ID NO: 150797 - DNA, 15 bp, Homo sapiens
ggacgatctctaaga

SEQ ID NO: 150798 - DNA, 15 bp, Homo sapiens
cggacgatctctaag

SEQ ID NO: 150799 - DNA, 15 bp, Homo sapiens
acggacgatctctaa

SEQ ID NO: 150800 - DNA, 15 bp, Homo sapiens
gacggacgatctcta

SEQ ID NO: 150801 - DNA, 15 bp, Homo sapiens
ggacggacgatctct

SEQ ID NO: 150802 - DNA, 15 bp, Homo sapiens
aggacggacgatctc

SEQ ID NO: 150803 - DNA, 15 bp, Homo sapiens
aaggacggacgatct

SEQ ID NO: 150804 - DNA, 15 bp, Homo sapiens
aaaggacggacgatc

SEQ ID NO: 150805 - DNA, 15 bp, Homo sapiens
aaaaggacggacgat

SEQ ID NO: 150806 - DNA, 15 bp, Homo sapiens
gaaaaggacggacga

SEQ ID NO: 150807 - DNA, 15 bp, Homo sapiens
tgaaaaggacggacg

SEQ ID NO: 150808 - DNA, 15 bp, Homo sapiens
gtgaaaaggacggac

SEQ ID NO: 150809 - DNA, 15 bp, Homo sapiens
agtgaaaaggacgga

SEQ ID NO: 150810 - DNA, 15 bp, Homo sapiens
gagtgaaaaggacgg

SEQ ID NO: 150811 - DNA, 15 bp, Homo sapiens
tgagtgaaaaggacg

SEQ ID NO: 150812 - DNA, 15 bp, Homo sapiens
atgagtgaaaaggac

SEQ ID NO: 150813 - DNA, 15 bp, Homo sapiens
catgagtgaaaagga

SEQ ID NO: 150814 - DNA, 15 bp, Homo sapiens
tcatgagtgaaaagg

SEQ ID NO: 150815 - DNA, 15 bp, Homo sapiens
ctcatgagtgaaaag

SEQ ID NO: 150816 - DNA, 15 bp, Homo sapiens
cctcatgagtgaaaa

SEQ ID NO: 150817 - DNA, 15 bp, Homo sapiens
gcctcatgagtgaaa

SEQ ID NO: 150818 - DNA, 15 bp, Homo sapiens
agcctcatgagtgaa

SEQ ID NO: 150819 - DNA, 15 bp, Homo sapiens
aagcctcatgagtga

SEQ ID NO: 150820 - DNA, 15 bp, Homo sapiens
aaagcctcatgagtg

SEQ ID NO: 150821 - DNA, 15 bp, Homo sapiens
caaagcctcatgagt

SEQ ID NO: 150822 - DNA, 15 bp, Homo sapiens
ccaaagcctcatgag

SEQ ID NO: 150823 - DNA, 15 bp, Homo sapiens
cccaaagcctcatga

SEQ ID NO: 150824 - DNA, 15 bp, Homo sapiens
ccccaaagcctcatg

SEQ ID NO: 150825 - DNA, 15 bp, Homo sapiens
accccaaagcctcat

SEQ ID NO: 150826 - DNA, 15 bp, Homo sapiens
caccccaaagcctca

SEQ ID NO: 150827 - DNA, 15 bp, Homo sapiens
ccaccccaaagcctc

SEQ ID NO: 150828 - DNA, 15 bp, Homo sapiens
tccaccccaaagcct

SEQ ID NO: 150829 - DNA, 15 bp, Homo sapiens
ctccaccccaaagcc

SEQ ID NO: 150830 - DNA, 15 bp, Homo sapiens
tctccaccccaaagc

SEQ ID NO: 150831 - DNA, 15 bp, Homo sapiens
atctccaccccaaag

SEQ ID NO: 150832 - DNA, 15 bp, Homo sapiens
tatctccaccccaaa

SEQ ID NO: 150833 - DNA, 15 bp, Homo sapiens
ctatctccaccccaa

SEQ ID NO: 150834 - DNA, 15 bp, Homo sapiens
actatctccacccca

SEQ ID NO: 150835 - DNA, 15 bp, Homo sapiens
tactatctccacccc

SEQ ID NO: 150836 - DNA, 15 bp, Homo sapiens
ttactatctccaccc

SEQ ID NO: 150837 - DNA, 15 bp, Homo sapiens
tttactatctccacc

SEQ ID NO: 150838 - DNA, 15 bp, Homo sapiens
ctttactatctccac

SEQ ID NO: 150839 - DNA, 15 bp, Homo sapiens
cctttactatctcca

SEQ ID NO: 150840 - DNA, 15 bp, Homo sapiens
acctttactatctcc

SEQ ID NO: 150841 - DNA, 15 bp, Homo sapiens
cacctttactatctc

SEQ ID NO: 150842 - DNA, 15 bp, Homo sapiens
ccacctttactatct

SEQ ID NO: 150843 - DNA, 15 bp, Homo sapiens
gccacctttactatc

SEQ ID NO: 150844 - DNA, 15 bp, Homo sapiens
agccacctttactat

SEQ ID NO: 150845 - DNA, 15 bp, Homo sapiens
cagccacctttacta

SEQ ID NO: 150846 - DNA, 15 bp, Homo sapiens
tcagccacctttact

SEQ ID NO: 150847 - DNA, 15 bp, Homo sapiens
atcagccacctttac

SEQ ID NO: 150848 - DNA, 15 bp, Homo sapiens
catcagccaccttta

SEQ ID NO: 150849 - DNA, 15 bp, Homo sapiens
acatcagccaccttt

SEQ ID NO: 150850 - DNA, 15 bp, Homo sapiens
gacatcagccacctt

SEQ ID NO: 150851 - DNA, 15 bp, Homo sapiens
ggacatcagccacct

SEQ ID NO: 150852 - DNA, 15 bp, Homo sapiens
gggacatcagccacc

SEQ ID NO: 150853 - DNA, 15 bp, Homo sapiens
agggacatcagccac

SEQ ID NO: 150854 - DNA, 15 bp, Homo sapiens
cagggacatcagcca

SEQ ID NO: 150855 - DNA, 15 bp, Homo sapiens
ccagggacatcagcc

SEQ ID NO: 150856 - DNA, 15 bp, Homo sapiens
tccagggacatcagc

SEQ ID NO: 150857 - DNA, 15 bp, Homo sapiens
atccagggacatcag

SEQ ID NO: 150858 - DNA, 15 bp, Homo sapiens
catccagggacatca

SEQ ID NO: 150859 - DNA, 15 bp, Homo sapiens
acatccagggacatc

SEQ ID NO: 150860 - DNA, 15 bp, Homo sapiens
cacatccagggacat

SEQ ID NO: 150861 - DNA, 15 bp, Homo sapiens
tcacatccagggaca

SEQ ID NO: 150862 - DNA, 15 bp, Homo sapiens
ctcacatccagggac

SEQ ID NO: 150863 - DNA, 15 bp, Homo sapiens
actcacatccaggga

SEQ ID NO: 150864 - DNA, 15 bp, Homo sapiens
cactcacatccaggg

SEQ ID NO: 150865 - DNA, 15 bp, Homo sapiens
acactcacatccagg

SEQ ID NO: 150866 - DNA, 15 bp, Homo sapiens
cacactcacatccag

SEQ ID NO: 150867 - DNA, 15 bp, Homo sapiens
gcacactcacatcca

SEQ ID NO: 150868 - DNA, 15 bp, Homo sapiens
agcacactcacatcc

SEQ ID NO: 150869 - DNA, 15 bp, Homo sapiens
tagcacactcacatc

SEQ ID NO: 150870 - DNA, 15 bp, Homo sapiens
ctagcacactcacat

SEQ ID NO: 150871 - DNA, 15 bp, Homo sapiens
actagcacactcaca

SEQ ID NO: 150872 - DNA, 15 bp, Homo sapiens
aactagcacactcac

SEQ ID NO: 150873 - DNA, 15 bp, Homo sapiens
gaactagcacactca

SEQ ID NO: 150874 - DNA, 15 bp, Homo sapiens
tgaactagcacactc

SEQ ID NO: 150875 - DNA, 15 bp, Homo sapiens
ctgaactagcacact

SEQ ID NO: 150876 - DNA, 15 bp, Homo sapiens
gctgaactagcacac

SEQ ID NO: 150877 - DNA, 15 bp, Homo sapiens
tgctgaactagcaca

SEQ ID NO: 150878 - DNA, 15 bp, Homo sapiens
atgctgaactagcac

SEQ ID NO: 150879 - DNA, 15 bp, Homo sapiens
catgctgaactagca

SEQ ID NO: 150880 - DNA, 15 bp, Homo sapiens
ccatgctgaactagc

SEQ ID NO: 150881 - DNA, 15 bp, Homo sapiens
cccatgctgaactag

SEQ ID NO: 150882 - DNA, 15 bp, Homo sapiens
tcccatgctgaacta

SEQ ID NO: 150883 - DNA, 15 bp, Homo sapiens
gtcccatgctgaact

SEQ ID NO: 150884 - DNA, 15 bp, Homo sapiens
ggtcccatgctgaac

SEQ ID NO: 150885 - DNA, 15 bp, Homo sapiens
aggtcccatgctgaa

SEQ ID NO: 150886 - DNA, 15 bp, Homo sapiens
gaggtcccatgctga

SEQ ID NO: 150887 - DNA, 15 bp, Homo sapiens
tgaggtcccatgctg

SEQ ID NO: 150888 - DNA, 15 bp, Homo sapiens
ctgaggtcccatgct

SEQ ID NO: 150889 - DNA, 15 bp, Homo sapiens
cctgaggtcccatgc

SEQ ID NO: 150890 - DNA, 15 bp, Homo sapiens
gcctgaggtcccatg

SEQ ID NO: 150891 - DNA, 15 bp, Homo sapiens
tgcctgaggtcccat

SEQ ID NO: 150892 - DNA, 15 bp, Homo sapiens
ctgcctgaggtccca

SEQ ID NO: 150893 - DNA, 15 bp, Homo sapiens
tctgcctgaggtccc

SEQ ID NO: 150894 - DNA, 15 bp, Homo sapiens
ttctgcctgaggtcc

SEQ ID NO: 150895 - DNA, 15 bp, Homo sapiens
gttctgcctgaggtc

SEQ ID NO: 150896 - DNA, 15 bp, Homo sapiens
ggttctgcctgaggt

SEQ ID NO: 150897 - DNA, 15 bp, Homo sapiens
aggttctgcctgagg

SEQ ID NO: 150898 - DNA, 15 bp, Homo sapiens
aaggttctgcctgag

SEQ ID NO: 150899 - DNA, 15 bp, Homo sapiens
gaaggttctgcctga

SEQ ID NO: 150900 - DNA, 15 bp, Homo sapiens
ggaaggttctgcctg

SEQ ID NO: 150901 - DNA, 15 bp, Homo sapiens
gggaaggttctgcct

SEQ ID NO: 150902 - DNA, 15 bp, Homo sapiens
ggggaaggttctgcc

SEQ ID NO: 150903 - DNA, 15 bp, Homo sapiens
tggggaaggttctgc

SEQ ID NO: 150904 - DNA, 15 bp, Homo sapiens
gtggggaaggttctg

SEQ ID NO: 150905 - DNA, 15 bp, Homo sapiens
cgtggggaaggttct

SEQ ID NO: 150906 - DNA, 15 bp, Homo sapiens
acgtggggaaggttc

SEQ ID NO: 150907 - DNA, 15 bp, Homo sapiens
cacgtggggaaggtt

SEQ ID NO: 150908 - DNA, 15 bp, Homo sapiens
tcacgtggggaaggt

SEQ ID NO: 150909 - DNA, 15 bp, Homo sapiens
ctcacgtggggaagg

SEQ ID NO: 150910 - DNA, 15 bp, Homo sapiens
gctcacgtggggaag

SEQ ID NO: 150911 - DNA, 15 bp, Homo sapiens
ggctcacgtggggaa

SEQ ID NO: 150912 - DNA, 15 bp, Homo sapiens
gggctcacgtgggga

SEQ ID NO: 150913 - DNA, 15 bp, Homo sapiens
ggggctcacgtgggg

SEQ ID NO: 150914 - DNA, 15 bp, Homo sapiens
tggggctcacgtggg

SEQ ID NO: 150915 - DNA, 15 bp, Homo sapiens
ctggggctcacgtgg

SEQ ID NO: 150916 - DNA, 15 bp, Homo sapiens
actggggctcacgtg

SEQ ID NO: 150917 - DNA, 15 bp, Homo sapiens
cactggggctcacgt

SEQ ID NO: 150918 - DNA, 15 bp, Homo sapiens
tcactggggctcacg

SEQ ID NO: 150919 - DNA, 15 bp, Homo sapiens
gtcactggggctcac

SEQ ID NO: 150920 - DNA, 15 bp, Homo sapiens
ggtcactggggctca

SEQ ID NO: 150921 - DNA, 15 bp, Homo sapiens
aggtcactggggctc

SEQ ID NO: 150922 - DNA, 15 bp, Homo sapiens
aaggtcactggggct

SEQ ID NO: 150923 - DNA, 15 bp, Homo sapiens
gaaggtcactggggc

SEQ ID NO: 150924 - DNA, 15 bp, Homo sapiens
agaaggtcactgggg

SEQ ID NO: 150925 - DNA, 15 bp, Homo sapiens
gagaaggtcactggg

SEQ ID NO: 150926 - DNA, 15 bp, Homo sapiens
agagaaggtcactgg

SEQ ID NO: 150927 - DNA, 15 bp, Homo sapiens
cagagaaggtcactg

SEQ ID NO: 150928 - DNA, 15 bp, Homo sapiens
gcagagaaggtcact

SEQ ID NO: 150929 - DNA, 15 bp, Homo sapiens
ggcagagaaggtcac

SEQ ID NO: 150930 - DNA, 15 bp, Homo sapiens
cggcagagaaggtca

SEQ ID NO: 150931 - DNA, 15 bp, Homo sapiens
tcggcagagaaggtc

SEQ ID NO: 150932 - DNA, 15 bp, Homo sapiens
ctcggcagagaaggt

SEQ ID NO: 150933 - DNA, 15 bp, Homo sapiens
tctcggcagagaagg

SEQ ID NO: 150934 - DNA, 15 bp, Homo sapiens
gtctcggcagagaag

SEQ ID NO: 150935 - DNA, 15 bp, Homo sapiens
ggtctcggcagagaa

SEQ ID NO: 150936 - DNA, 15 bp, Homo sapiens
gggtctcggcagaga

SEQ ID NO: 150937 - DNA, 15 bp, Homo sapiens
agggtctcggcagag

SEQ ID NO: 150938 - DNA, 15 bp, Homo sapiens
cagggtctcggcaga

SEQ ID NO: 150939 - DNA, 15 bp, Homo sapiens
gcagggtctcggcag

SEQ ID NO: 150940 - DNA, 15 bp, Homo sapiens
ggcagggtctcggca

SEQ ID NO: 150941 - DNA, 15 bp, Homo sapiens
aggcagggtctcggc

SEQ ID NO: 150942 - DNA, 15 bp, Homo sapiens
gaggcagggtctcgg

SEQ ID NO: 150943 - DNA, 15 bp, Homo sapiens
agaggcagggtctcg

SEQ ID NO: 150944 - DNA, 15 bp, Homo sapiens
aagaggcagggtctc

SEQ ID NO: 150945 - DNA, 15 bp, Homo sapiens
taagaggcagggtct

SEQ ID NO: 150946 - DNA, 15 bp, Homo sapiens
ctaagaggcagggtc

SEQ ID NO: 150947 - DNA, 15 bp, Homo sapiens
tctaagaggcagggt

SEQ ID NO: 150948 - DNA, 15 bp, Homo sapiens
ctctaagaggcaggg

SEQ ID NO: 150949 - DNA, 15 bp, Homo sapiens
cctctaagaggcagg

SEQ ID NO: 150950 - DNA, 15 bp, Homo sapiens
acctctaagaggcag

SEQ ID NO: 150951 - DNA, 15 bp, Homo sapiens
cacctctaagaggca

SEQ ID NO: 150952 - DNA, 15 bp, Homo sapiens
acacctctaagaggc

SEQ ID NO: 150953 - DNA, 15 bp, Homo sapiens
cacacctctaagagg

SEQ ID NO: 150954 - DNA, 15 bp, Homo sapiens
tcacacctctaagag

SEQ ID NO: 150955 - DNA, 15 bp, Homo sapiens
ttcacacctctaaga

SEQ ID NO: 150956 - DNA, 15 bp, Homo sapiens
cttcacacctctaag

SEQ ID NO: 150957 - DNA, 15 bp, Homo sapiens
gcttcacacctctaa

SEQ ID NO: 150958 - DNA, 15 bp, Homo sapiens
agcttcacacctcta

SEQ ID NO: 150959 - DNA, 15 bp, Homo sapiens
gagcttcacacctct

SEQ ID NO: 150960 - DNA, 15 bp, Homo sapiens
tgagcttcacacctc

SEQ ID NO: 150961 - DNA, 15 bp, Homo sapiens
ttgagcttcacacct

SEQ ID NO: 150962 - DNA, 15 bp, Homo sapiens
tttgagcttcacacc

SEQ ID NO: 150963 - DNA, 15 bp, Homo sapiens
ctttgagcttcacac

SEQ ID NO: 150964 - DNA, 15 bp, Homo sapiens
cctttgagcttcaca

SEQ ID NO: 150965 - DNA, 15 bp, Homo sapiens
tcctttgagcttcac

SEQ ID NO: 150966 - DNA, 15 bp, Homo sapiens
ctcctttgagcttca

SEQ ID NO: 150967 - DNA, 15 bp, Homo sapiens
tctcctttgagcttc

SEQ ID NO: 150968 - DNA, 15 bp, Homo sapiens
atctcctttgagctt

SEQ ID NO: 150969 - DNA, 15 bp, Homo sapiens
gatctcctttgagct

SEQ ID NO: 150970 - DNA, 15 bp, Homo sapiens
tgatctcctttgagc

SEQ ID NO: 150971 - DNA, 15 bp, Homo sapiens
atgatctcctttgag

SEQ ID NO: 150972 - DNA, 15 bp, Homo sapiens
catgatctcctttga

SEQ ID NO: 150973 - DNA, 15 bp, Homo sapiens
acatgatctcctttg

SEQ ID NO: 150974 - DNA, 15 bp, Homo sapiens
aacatgatctccttt

SEQ ID NO: 150975 - DNA, 15 bp, Homo sapiens
aaacatgatctcctt

SEQ ID NO: 150976 - DNA, 15 bp, Homo sapiens
gaaacatgatctcct

SEQ ID NO: 150977 - DNA, 15 bp, Homo sapiens
agaaacatgatctcc

SEQ ID NO: 150978 - DNA, 15 bp, Homo sapiens
cagaaacatgatctc

SEQ ID NO: 150979 - DNA, 15 bp, Homo sapiens
tcagaaacatgatct

SEQ ID NO: 150980 - DNA, 15 bp, Homo sapiens
ttcagaaacatgatc

SEQ ID NO: 150981 - DNA, 15 bp, Homo sapiens
attcagaaacatgat

SEQ ID NO: 150982 - DNA, 15 bp, Homo sapiens
tattcagaaacatga

SEQ ID NO: 150983 - DNA, 15 bp, Homo sapiens
gtattcagaaacatg

SEQ ID NO: 150984 - DNA, 15 bp, Homo sapiens
tgtattcagaaacat

SEQ ID NO: 150985 - DNA, 15 bp, Homo sapiens
atgtattcagaaaca

SEQ ID NO: 150986 - DNA, 15 bp, Homo sapiens
aatgtattcagaaac

SEQ ID NO: 150987 - DNA, 15 bp, Homo sapiens
aaatgtattcagaaa

SEQ ID NO: 150988 - DNA, 15 bp, Homo sapiens
aaaatgtattcagaa

SEQ ID NO: 150989 - DNA, 15 bp, Homo sapiens
caaaatgtattcaga

SEQ ID NO: 150990 - DNA, 15 bp, Homo sapiens
gcaaaatgtattcag

SEQ ID NO: 150991 - DNA, 15 bp, Homo sapiens
tgcaaaatgtattca

SEQ ID NO: 150992 - DNA, 15 bp, Homo sapiens
ttgcaaaatgtattc

SEQ ID NO: 150993 - DNA, 15 bp, Homo sapiens
tttgcaaaatgtatt

SEQ ID NO: 150994 - DNA, 15 bp, Homo sapiens
ctttgcaaaatgtat

SEQ ID NO: 150995 - DNA, 15 bp, Homo sapiens
cctttgcaaaatgta

SEQ ID NO: 150996 - DNA, 15 bp, Homo sapiens
acctttgcaaaatgt

SEQ ID NO: 150997 - DNA, 15 bp, Homo sapiens
cacctttgcaaaatg

SEQ ID NO: 150998 - DNA, 15 bp, Homo sapiens
ccacctttgcaaaat

SEQ ID NO: 150999 - DNA, 15 bp, Homo sapiens
gccacctttgcaaaa

SEQ ID NO: 151000 - DNA, 15 bp, Homo sapiens
tgccacctttgcaaa

SEQ ID NO: 151001 - DNA, 15 bp, Homo sapiens
ttgccacctttgcaa

SEQ ID NO: 151002 - DNA, 15 bp, Homo sapiens
cttgccacctttgca

SEQ ID NO: 151003 - DNA, 15 bp, Homo sapiens
ccttgccacctttgc

SEQ ID NO: 151004 - DNA, 15 bp, Homo sapiens
cccttgccacctttg

SEQ ID NO: 151005 - DNA, 15 bp, Homo sapiens
gcccttgccaccttt

SEQ ID NO: 151006 - DNA, 15 bp, Homo sapiens
agcccttgccacctt

SEQ ID NO: 151007 - DNA, 15 bp, Homo sapiens
cagcccttgccacct

SEQ ID NO: 151008 - DNA, 15 bp, Homo sapiens
tcagcccttgccacc

SEQ ID NO: 151009 - DNA, 15 bp, Homo sapiens
gtcagcccttgccac

SEQ ID NO: 151010 - DNA, 15 bp, Homo sapiens
ggtcagcccttgcca

SEQ ID NO: 151011 - DNA, 15 bp, Homo sapiens
cggtcagcccttgcc

SEQ ID NO: 151012 - DNA, 15 bp, Homo sapiens
acggtcagcccttgc

SEQ ID NO: 151013 - DNA, 15 bp, Homo sapiens
tacggtcagcccttg

SEQ ID NO: 151014 - DNA, 15 bp, Homo sapiens
ttacggtcagccctt

SEQ ID NO: 151015 - DNA, 15 bp, Homo sapiens
tttacggtcagccct

SEQ ID NO: 151016 - DNA, 15 bp, Homo sapiens
ttttacggtcagccc

SEQ ID NO: 151017 - DNA, 15 bp, Homo sapiens
cttttacggtcagcc

SEQ ID NO: 151018 - DNA, 15 bp, Homo sapiens
gcttttacggtcagc

SEQ ID NO: 151019 - DNA, 15 bp, Homo sapiens
ggcttttacggtcag

SEQ ID NO: 151020 - DNA, 15 bp, Homo sapiens
tggcttttacggtca

SEQ ID NO: 151021 - DNA, 15 bp, Homo sapiens
ctggcttttacggtc

SEQ ID NO: 151022 - DNA, 15 bp, Homo sapiens
cctggcttttacggt

SEQ ID NO: 151023 - DNA, 15 bp, Homo sapiens
gcctggcttttacgg

SEQ ID NO: 151024 - DNA, 15 bp, Homo sapiens
tgcctggcttttacg

SEQ ID NO: 151025 - DNA, 15 bp, Homo sapiens
ctgcctggcttttac

SEQ ID NO: 151026 - DNA, 15 bp, Homo sapiens
actgcctggctttta

SEQ ID NO: 151027 - DNA, 15 bp, Homo sapiens
gactgcctggctttt

SEQ ID NO: 151028 - DNA, 15 bp, Homo sapiens
tgactgcctggcttt

SEQ ID NO: 151029 - DNA, 15 bp, Homo sapiens
ctgactgcctggctt

SEQ ID NO: 151030 - DNA, 15 bp, Homo sapiens
tctgactgcctggct

SEQ ID NO: 151031 - DNA, 15 bp, Homo sapiens
gtctgactgcctggc

SEQ ID NO: 151032 - DNA, 15 bp, Homo sapiens
ggtctgactgcctgg

SEQ ID NO: 151033 - DNA, 15 bp, Homo sapiens
aggtctgactgcctg

SEQ ID NO: 151034 - DNA, 15 bp, Homo sapiens
aaggtctgactgcct

SEQ ID NO: 151035 - DNA, 15 bp, Homo sapiens
gaaggtctgactgcc

SEQ ID NO: 151036 - DNA, 15 bp, Homo sapiens
ggaaggtctgactgc

SEQ ID NO: 151037 - DNA, 15 bp, Homo sapiens
aggaaggtctgactg

SEQ ID NO: 151038 - DNA, 15 bp, Homo sapiens
caggaaggtctgact

SEQ ID NO: 151039 - DNA, 15 bp, Homo sapiens
gcaggaaggtctgac

SEQ ID NO: 151040 - DNA, 15 bp, Homo sapiens
ggcaggaaggtctga

SEQ ID NO: 151041 - DNA, 15 bp, Homo sapiens
aggcaggaaggtctg

SEQ ID NO: 151042 - DNA, 15 bp, Homo sapiens
caggcaggaaggtct

SEQ ID NO: 151043 - DNA, 15 bp, Homo sapiens
acaggcaggaaggtc

SEQ ID NO: 151044 - DNA, 15 bp, Homo sapiens
cacaggcaggaaggt

SEQ ID NO: 151045 - DNA, 15 bp, Homo sapiens
tcacaggcaggaagg

SEQ ID NO: 151046 - DNA, 15 bp, Homo sapiens
ttcacaggcaggaag

SEQ ID NO: 151047 - DNA, 15 bp, Homo sapiens
cttcacaggcaggaa

SEQ ID NO: 151048 - DNA, 15 bp, Homo sapiens
ccttcacaggcagga

SEQ ID NO: 151049 - DNA, 15 bp, Homo sapiens
cccttcacaggcagg

SEQ ID NO: 151050 - DNA, 15 bp, Homo sapiens
gcccttcacaggcag

SEQ ID NO: 151051 - DNA, 15 bp, Homo sapiens
ggcccttcacaggca

SEQ ID NO: 151052 - DNA, 15 bp, Homo sapiens
tggcccttcacaggc

SEQ ID NO: 151053 - DNA, 15 bp, Homo sapiens
ttggcccttcacagg

SEQ ID NO: 151054 - DNA, 15 bp, Homo sapiens
cttggcccttcacag

SEQ ID NO: 151055 - DNA, 15 bp, Homo sapiens
tcttggcccttcaca

SEQ ID NO: 151056 - DNA, 15 bp, Homo sapiens
atcttggcccttcac

SEQ ID NO: 151057 - DNA, 15 bp, Homo sapiens
catcttggcccttca

SEQ ID NO: 151058 - DNA, 15 bp, Homo sapiens
tcatcttggcccttc

SEQ ID NO: 151059 - DNA, 15 bp, Homo sapiens
ttcatcttggccctt

SEQ ID NO: 151060 - DNA, 15 bp, Homo sapiens
cttcatcttggccct

SEQ ID NO: 151061 - DNA, 15 bp, Homo sapiens
acttcatcttggccc

SEQ ID NO: 151062 - DNA, 15 bp, Homo sapiens
gacttcatcttggcc

SEQ ID NO: 151063 - DNA, 15 bp, Homo sapiens
agacttcatcttggc

SEQ ID NO: 151064 - DNA, 15 bp, Homo sapiens
gagacttcatcttgg

SEQ ID NO: 151065 - DNA, 15 bp, Homo sapiens
agagacttcatcttg

SEQ ID NO: 151066 - DNA, 15 bp, Homo sapiens
gagagacttcatctt

SEQ ID NO: 151067 - DNA, 15 bp, Homo sapiens
agagagacttcatct

SEQ ID NO: 151068 - DNA, 15 bp, Homo sapiens
aagagagacttcatc

SEQ ID NO: 151069 - DNA, 15 bp, Homo sapiens
aaagagagacttcat

SEQ ID NO: 151070 - DNA, 15 bp, Homo sapiens
aaaagagagacttca

SEQ ID NO: 151071 - DNA, 15 bp, Homo sapiens
caaaagagagacttc

SEQ ID NO: 151072 - DNA, 15 bp, Homo sapiens
gcaaaagagagactt

SEQ ID NO: 151073 - DNA, 15 bp, Homo sapiens
agcaaaagagagact

SEQ ID NO: 151074 - DNA, 15 bp, Homo sapiens
aagcaaaagagagac

SEQ ID NO: 151075 - DNA, 15 bp, Homo sapiens
gaagcaaaagagaga

SEQ ID NO: 151076 - DNA, 15 bp, Homo sapiens
cgaagcaaaagagag

SEQ ID NO: 151077 - DNA, 15 bp, Homo sapiens
gcgaagcaaaagaga

SEQ ID NO: 151078 - DNA, 15 bp, Homo sapiens
tgcgaagcaaaagag

SEQ ID NO: 151079 - DNA, 15 bp, Homo sapiens
ctgcgaagcaaaaga

SEQ ID NO: 151080 - DNA, 15 bp, Homo sapiens
tctgcgaagcaaaag

SEQ ID NO: 151081 - DNA, 15 bp, Homo sapiens
atctgcgaagcaaaa

SEQ ID NO: 151082 - DNA, 15 bp, Homo sapiens
catctgcgaagcaaa

SEQ ID NO: 151083 - DNA, 15 bp, Homo sapiens
tcatctgcgaagcaa

SEQ ID NO: 151084 - DNA, 15 bp, Homo sapiens
ctcatctgcgaagca

SEQ ID NO: 151085 - DNA, 15 bp, Homo sapiens
tctcatctgcgaagc

SEQ ID NO: 151086 - DNA, 15 bp, Homo sapiens
ttctcatctgcgaag

SEQ ID NO: 151087 - DNA, 15 bp, Homo sapiens
tttctcatctgcgaa

SEQ ID NO: 151088 - DNA, 15 bp, Homo sapiens
ttttctcatctgcga

SEQ ID NO: 151089 - DNA, 15 bp, Homo sapiens
attttctcatctgcg

SEQ ID NO: 151090 - DNA, 15 bp, Homo sapiens
aattttctcatctgc

SEQ ID NO: 151091 - DNA, 15 bp, Homo sapiens
caattttctcatctg

SEQ ID NO: 151092 - DNA, 15 bp, Homo sapiens
tcaattttctcatct

SEQ ID NO: 151093 - DNA, 15 bp, Homo sapiens
gtcaattttctcatc

SEQ ID NO: 151094 - DNA, 15 bp, Homo sapiens
agtcaattttctcat

SEQ ID NO: 151095 - DNA, 15 bp, Homo sapiens
aagtcaattttctca

SEQ ID NO: 151096 - DNA, 15 bp, Homo sapiens
aaagtcaattttctc

SEQ ID NO: 151097 - DNA, 15 bp, Homo sapiens
caaagtcaattttct

SEQ ID NO: 151098 - DNA, 15 bp, Homo sapiens
gcaaagtcaattttc

SEQ ID NO: 151099 - DNA, 15 bp, Homo sapiens
agcaaagtcaatttt

SEQ ID NO: 151100 - DNA, 15 bp, Homo sapiens
gagcaaagtcaattt

SEQ ID NO: 151101 - DNA, 15 bp, Homo sapiens
tgagcaaagtcaatt

SEQ ID NO: 151102 - DNA, 15 bp, Homo sapiens
ctgagcaaagtcaat

SEQ ID NO: 151103 - DNA, 15 bp, Homo sapiens
actgagcaaagtcaa

SEQ ID NO: 151104 - DNA, 15 bp, Homo sapiens
cactgagcaaagtca

SEQ ID NO: 151105 - DNA, 15 bp, Homo sapiens
ccactgagcaaagtc

SEQ ID NO: 151106 - DNA, 15 bp, Homo sapiens
cccactgagcaaagt

SEQ ID NO: 151107 - DNA, 15 bp, Homo sapiens
tcccactgagcaaag

SEQ ID NO: 151108 - DNA, 15 bp, Homo sapiens
ctcccactgagcaaa

SEQ ID NO: 151109 - DNA, 15 bp, Homo sapiens
cctcccactgagcaa

SEQ ID NO: 151110 - DNA, 15 bp, Homo sapiens
ccctcccactgagca

SEQ ID NO: 151111 - DNA, 15 bp, Homo sapiens
tccctcccactgagc

SEQ ID NO: 151112 - DNA, 15 bp, Homo sapiens
atccctcccactgag

SEQ ID NO: 151113 - DNA, 15 bp, Homo sapiens
catccctcccactga

SEQ ID NO: 151114 - DNA, 15 bp, Homo sapiens
acatccctcccactg

SEQ ID NO: 151115 - DNA, 15 bp, Homo sapiens
gacatccctcccact

SEQ ID NO: 151116 - DNA, 15 bp, Homo sapiens
agacatccctcccac

SEQ ID NO: 151117 - DNA, 15 bp, Homo sapiens
cagacatccctccca

SEQ ID NO: 151118 - DNA, 15 bp, Homo sapiens
tcagacatccctccc

SEQ ID NO: 151119 - DNA, 15 bp, Homo sapiens
gtcagacatccctcc

SEQ ID NO: 151120 - DNA, 15 bp, Homo sapiens
ggtcagacatccctc

SEQ ID NO: 151121 - DNA, 15 bp, Homo sapiens
tggtcagacatccct

SEQ ID NO: 151122 - DNA, 15 bp, Homo sapiens
atggtcagacatccc

SEQ ID NO: 151123 - DNA, 15 bp, Homo sapiens
gatggtcagacatcc

SEQ ID NO: 151124 - DNA, 15 bp, Homo sapiens
agatggtcagacatc

SEQ ID NO: 151125 - DNA, 15 bp, Homo sapiens
cagatggtcagacat

SEQ ID NO: 151126 - DNA, 15 bp, Homo sapiens
tcagatggtcagaca

SEQ ID NO: 151127 - DNA, 15 bp, Homo sapiens
ttcagatggtcagac

SEQ ID NO: 151128 - DNA, 15 bp, Homo sapiens
attcagatggtcaga

SEQ ID NO: 151129 - DNA, 15 bp, Homo sapiens
gattcagatggtcag

SEQ ID NO: 151130 - DNA, 15 bp, Homo sapiens
agattcagatggtca

SEQ ID NO: 151131 - DNA, 15 bp, Homo sapiens
cagattcagatggtc

SEQ ID NO: 151132 - DNA, 15 bp, Homo sapiens
ccagattcagatggt

SEQ ID NO: 151133 - DNA, 15 bp, Homo sapiens
cccagattcagatgg

SEQ ID NO: 151134 - DNA, 15 bp, Homo sapiens
ccccagattcagatg

SEQ ID NO: 151135 - DNA, 15 bp, Homo sapiens
tccccagattcagat

SEQ ID NO: 151136 - DNA, 15 bp, Homo sapiens
ctccccagattcaga

SEQ ID NO: 151137 - DNA, 15 bp, Homo sapiens
tctccccagattcag

SEQ ID NO: 151138 - DNA, 15 bp, Homo sapiens
ttctccccagattca

SEQ ID NO: 151139 - DNA, 15 bp, Homo sapiens
attctccccagattc

SEQ ID NO: 151140 - DNA, 15 bp, Homo sapiens
gattctccccagatt

SEQ ID NO: 151141 - DNA, 15 bp, Homo sapiens
tgattctccccagat

SEQ ID NO: 151142 - DNA, 15 bp, Homo sapiens
atgattctccccaga

SEQ ID NO: 151143 - DNA, 15 bp, Homo sapiens
aatgattctccccag

SEQ ID NO: 151144 - DNA, 15 bp, Homo sapiens
taatgattctcccca

SEQ ID NO: 151145 - DNA, 15 bp, Homo sapiens
ttaatgattctcccc

SEQ ID NO: 151146 - DNA, 15 bp, Homo sapiens
cttaatgattctccc

SEQ ID NO: 151147 - DNA, 15 bp, Homo sapiens
acttaatgattctcc

SEQ ID NO: 151148 - DNA, 15 bp, Homo sapiens
cacttaatgattctc

SEQ ID NO: 151149 - DNA, 15 bp, Homo sapiens
gcacttaatgattct

SEQ ID NO: 151150 - DNA, 15 bp, Homo sapiens
ggcacttaatgattc

SEQ ID NO: 151151 - DNA, 15 bp, Homo sapiens
gggcacttaatgatt

SEQ ID NO: 151152 - DNA, 15 bp, Homo sapiens
tgggcacttaatgat

SEQ ID NO: 151153 - DNA, 15 bp, Homo sapiens
atgggcacttaatga

SEQ ID NO: 151154 - DNA, 15 bp, Homo sapiens
aatgggcacttaatg

SEQ ID NO: 151155 - DNA, 15 bp, Homo sapiens
taatgggcacttaat

SEQ ID NO: 151156 - DNA, 15 bp, Homo sapiens
ataatgggcacttaa

SEQ ID NO: 151157 - DNA, 15 bp, Homo sapiens
cataatgggcactta

SEQ ID NO: 151158 - DNA, 15 bp, Homo sapiens
acataatgggcactt

SEQ ID NO: 151159 - DNA, 15 bp, Homo sapiens
cacataatgggcact

SEQ ID NO: 151160 - DNA, 15 bp, Homo sapiens
ccacataatgggcac

SEQ ID NO: 151161 - DNA, 15 bp, Homo sapiens
gccacataatgggca

SEQ ID NO: 151162 - DNA, 15 bp, Homo sapiens
agccacataatgggc

SEQ ID NO: 151163 - DNA, 15 bp, Homo sapiens
cagccacataatggg

SEQ ID NO: 151164 - DNA, 15 bp, Homo sapiens
acagccacataatgg

SEQ ID NO: 151165 - DNA, 15 bp, Homo sapiens
gacagccacataatg

SEQ ID NO: 151166 - DNA, 15 bp, Homo sapiens
tgacagccacataat

SEQ ID NO: 151167 - DNA, 15 bp, Homo sapiens
gtgacagccacataa

SEQ ID NO: 151168 - DNA, 15 bp, Homo sapiens
agtgacagccacata

SEQ ID NO: 151169 - DNA, 15 bp, Homo sapiens
cagtgacagccacat

SEQ ID NO: 151170 - DNA, 15 bp, Homo sapiens
acagtgacagccaca

SEQ ID NO: 151171 - DNA, 15 bp, Homo sapiens
cacagtgacagccac

SEQ ID NO: 151172 - DNA, 15 bp, Homo sapiens
acacagtgacagcca

SEQ ID NO: 151173 - DNA, 15 bp, Homo sapiens
aacacagtgacagcc

SEQ ID NO: 151174 - DNA, 15 bp, Homo sapiens
taacacagtgacagc

SEQ ID NO: 151175 - DNA, 15 bp, Homo sapiens
ctaacacagtgacag

SEQ ID NO: 151176 - DNA, 15 bp, Homo sapiens
cctaacacagtgaca

SEQ ID NO: 151177 - DNA, 15 bp, Homo sapiens
gcctaacacagtgac

SEQ ID NO: 151178 - DNA, 15 bp, Homo sapiens
tgcctaacacagtga

SEQ ID NO: 151179 - DNA, 15 bp, Homo sapiens
ctgcctaacacagtg

SEQ ID NO: 151180 - DNA, 15 bp, Homo sapiens
actgcctaacacagt

SEQ ID NO: 151181 - DNA, 15 bp, Homo sapiens
aactgcctaacacag

SEQ ID NO: 151182 - DNA, 15 bp, Homo sapiens
aaactgcctaacaca

SEQ ID NO: 151183 - DNA, 15 bp, Homo sapiens
caaactgcctaacac

SEQ ID NO: 151184 - DNA, 15 bp, Homo sapiens
tcaaactgcctaaca

SEQ ID NO: 151185 - DNA, 15 bp, Homo sapiens
gtcaaactgcctaac

SEQ ID NO: 151186 - DNA, 15 bp, Homo sapiens
tgtcaaactgcctaa

SEQ ID NO: 151187 - DNA, 15 bp, Homo sapiens
ttgtcaaactgccta

SEQ ID NO: 151188 - DNA, 15 bp, Homo sapiens
cttgtcaaactgcct

SEQ ID NO: 151189 - DNA, 15 bp, Homo sapiens
gcttgtcaaactgcc

SEQ ID NO: 151190 - DNA, 15 bp, Homo sapiens
tgcttgtcaaactgc

SEQ ID NO: 151191 - DNA, 15 bp, Homo sapiens
atgcttgtcaaactg

SEQ ID NO: 151192 - DNA, 15 bp, Homo sapiens
tatgcttgtcaaact

SEQ ID NO: 151193 - DNA, 15 bp, Homo sapiens
gtatgcttgtcaaac

SEQ ID NO: 151194 - DNA, 15 bp, Homo sapiens
ggtatgcttgtcaaa

SEQ ID NO: 151195 - DNA, 15 bp, Homo sapiens
gggtatgcttgtcaa

SEQ ID NO: 151196 - DNA, 15 bp, Homo sapiens
agggtatgcttgtca

SEQ ID NO: 151197 - DNA, 15 bp, Homo sapiens
cagggtatgcttgtc

SEQ ID NO: 151198 - DNA, 15 bp, Homo sapiens
ccagggtatgcttgt

SEQ ID NO: 151199 - DNA, 15 bp, Homo sapiens
tccagggtatgcttg

SEQ ID NO: 151200 - DNA, 15 bp, Homo sapiens
ctccagggtatgctt

SEQ ID NO: 151201 - DNA, 15 bp, Homo sapiens
gctccagggtatgct

SEQ ID NO: 151202 - DNA, 15 bp, Homo sapiens
ggctccagggtatgc

SEQ ID NO: 151203 - DNA, 15 bp, Homo sapiens
aggctccagggtatg

SEQ ID NO: 151204 - DNA, 15 bp, Homo sapiens
caggctccagggtat

SEQ ID NO: 151205 - DNA, 15 bp, Homo sapiens
ccaggctccagggta

SEQ ID NO: 151206 - DNA, 15 bp, Homo sapiens
cccaggctccagggt

SEQ ID NO: 151207 - DNA, 15 bp, Homo sapiens
tcccaggctccaggg

SEQ ID NO: 151208 - DNA, 15 bp, Homo sapiens
ctcccaggctccagg

SEQ ID NO: 151209 - DNA, 15 bp, Homo sapiens
cctcccaggctccag

SEQ ID NO: 151210 - DNA, 15 bp, Homo sapiens
ccctcccaggctcca

SEQ ID NO: 151211 - DNA, 15 bp, Homo sapiens
cccctcccaggctcc

SEQ ID NO: 151212 - DNA, 15 bp, Homo sapiens
ccccctcccaggctc

SEQ ID NO: 151213 - DNA, 15 bp, Homo sapiens
tccccctcccaggct

SEQ ID NO: 151214 - DNA, 15 bp, Homo sapiens
ctccccctcccaggc

SEQ ID NO: 151215 - DNA, 15 bp, Homo sapiens
actccccctcccagg

SEQ ID NO: 151216 - DNA, 15 bp, Homo sapiens
cactccccctcccag

SEQ ID NO: 151217 - DNA, 15 bp, Homo sapiens
ccactccccctccca

SEQ ID NO: 151218 - DNA, 15 bp, Homo sapiens
accactccccctccc

SEQ ID NO: 151219 - DNA, 15 bp, Homo sapiens
caccactccccctcc

SEQ ID NO: 151220 - DNA, 15 bp, Homo sapiens
ccaccactccccctc

SEQ ID NO: 151221 - DNA, 15 bp, Homo sapiens
tccaccactccccct

SEQ ID NO: 151222 - DNA, 15 bp, Homo sapiens
ctccaccactccccc

SEQ ID NO: 151223 - DNA, 15 bp, Homo sapiens
actccaccactcccc

SEQ ID NO: 151224 - DNA, 15 bp, Homo sapiens
cactccaccactccc

SEQ ID NO: 151225 - DNA, 15 bp, Homo sapiens
ccactccaccactcc

SEQ ID NO: 151226 - DNA, 15 bp, Homo sapiens
tccactccaccactc

SEQ ID NO: 151227 - DNA, 15 bp, Homo sapiens
ctccactccaccact

SEQ ID NO: 151228 - DNA, 15 bp, Homo sapiens
actccactccaccac

SEQ ID NO: 151229 - DNA, 15 bp, Homo sapiens
cactccactccacca

SEQ ID NO: 151230 - DNA, 15 bp, Homo sapiens
tcactccactccacc

SEQ ID NO: 151231 - DNA, 15 bp, Homo sapiens
ctcactccactccac

SEQ ID NO: 151232 - DNA, 15 bp, Homo sapiens
gctcactccactcca

SEQ ID NO: 151233 - DNA, 15 bp, Homo sapiens
agctcactccactcc

SEQ ID NO: 151234 - DNA, 15 bp, Homo sapiens
aagctcactccactc

SEQ ID NO: 151235 - DNA, 15 bp, Homo sapiens
taagctcactccact

SEQ ID NO: 151236 - DNA, 15 bp, Homo sapiens
ttaagctcactccac

SEQ ID NO: 151237 - DNA, 15 bp, Homo sapiens
cttaagctcactcca

SEQ ID NO: 151238 - DNA, 15 bp, Homo sapiens
ccttaagctcactcc

SEQ ID NO: 151239 - DNA, 15 bp, Homo sapiens
tccttaagctcactc

SEQ ID NO: 151240 - DNA, 15 bp, Homo sapiens
gtccttaagctcact

SEQ ID NO: 151241 - DNA, 15 bp, Homo sapiens
agtccttaagctcac

SEQ ID NO: 151242 - DNA, 15 bp, Homo sapiens
cagtccttaagctca

SEQ ID NO: 151243 - DNA, 15 bp, Homo sapiens
ccagtccttaagctc

SEQ ID NO: 151244 - DNA, 15 bp, Homo sapiens
tccagtccttaagct

SEQ ID NO: 151245 - DNA, 15 bp, Homo sapiens
ttccagtccttaagc

SEQ ID NO: 151246 - DNA, 15 bp, Homo sapiens
gttccagtccttaag

SEQ ID NO: 151247 - DNA, 15 bp, Homo sapiens
tgttccagtccttaa

SEQ ID NO: 151248 - DNA, 15 bp, Homo sapiens
ctgttccagtcctta

SEQ ID NO: 151249 - DNA, 15 bp, Homo sapiens
tctgttccagtcctt

SEQ ID NO: 151250 - DNA, 15 bp, Homo sapiens
ttctgttccagtcct

SEQ ID NO: 151251 - DNA, 15 bp, Homo sapiens
cttctgttccagtcc

SEQ ID NO: 151252 - DNA, 15 bp, Homo sapiens
gcttctgttccagtc

SEQ ID NO: 151253 - DNA, 15 bp, Homo sapiens
ggcttctgttccagt

SEQ ID NO: 151254 - DNA, 15 bp, Homo sapiens
gggcttctgttccag

SEQ ID NO: 151255 - DNA, 15 bp, Homo sapiens
agggcttctgttcca

SEQ ID NO: 151256 - DNA, 15 bp, Homo sapiens
aagggcttctgttcc

SEQ ID NO: 151257 - DNA, 15 bp, Homo sapiens
caagggcttctgttc

SEQ ID NO: 151258 - DNA, 15 bp, Homo sapiens
ccaagggcttctgtt

SEQ ID NO: 151259 - DNA, 15 bp, Homo sapiens
accaagggcttctgt

SEQ ID NO: 151260 - DNA, 15 bp, Homo sapiens
caccaagggcttctg

SEQ ID NO: 151261 - DNA, 15 bp, Homo sapiens
gcaccaagggcttct

SEQ ID NO: 151262 - DNA, 15 bp, Homo sapiens
tgcaccaagggcttc

SEQ ID NO: 151263 - DNA, 15 bp, Homo sapiens
atgcaccaagggctt

SEQ ID NO: 151264 - DNA, 15 bp, Homo sapiens
catgcaccaagggct

SEQ ID NO: 151265 - DNA, 15 bp, Homo sapiens
gcatgcaccaagggc

SEQ ID NO: 151266 - DNA, 15 bp, Homo sapiens
ggcatgcaccaaggg

SEQ ID NO: 151267 - DNA, 15 bp, Homo sapiens
aggcatgcaccaagg

SEQ ID NO: 151268 - DNA, 15 bp, Homo sapiens
caggcatgcaccaag

SEQ ID NO: 151269 - DNA, 15 bp, Homo sapiens
ccaggcatgcaccaa

SEQ ID NO: 151270 - DNA, 15 bp, Homo sapiens
cccaggcatgcacca

SEQ ID NO: 151271 - DNA, 15 bp, Homo sapiens
gcccaggcatgcacc

SEQ ID NO: 151272 - DNA, 15 bp, Homo sapiens
cgcccaggcatgcac

SEQ ID NO: 151273 - DNA, 15 bp, Homo sapiens
gcgcccaggcatgca

SEQ ID NO: 151274 - DNA, 15 bp, Homo sapiens
agcgcccaggcatgc

SEQ ID NO: 151275 - DNA, 15 bp, Homo sapiens
cagcgcccaggcatg

SEQ ID NO: 151276 - DNA, 15 bp, Homo sapiens
acagcgcccaggcat

SEQ ID NO: 151277 - DNA, 15 bp, Homo sapiens
gacagcgcccaggca

SEQ ID NO: 151278 - DNA, 15 bp, Homo sapiens
tgacagcgcccaggc

SEQ ID NO: 151279 - DNA, 15 bp, Homo sapiens
gtgacagcgcccagg

SEQ ID NO: 151280 - DNA, 15 bp, Homo sapiens
ggtgacagcgcccag

SEQ ID NO: 151281 - DNA, 15 bp, Homo sapiens
aggtgacagcgccca

SEQ ID NO: 151282 - DNA, 15 bp, Homo sapiens
taggtgacagcgccc

SEQ ID NO: 151283 - DNA, 15 bp, Homo sapiens
gtaggtgacagcgcc

SEQ ID NO: 151284 - DNA, 15 bp, Homo sapiens
agtaggtgacagcgc

SEQ ID NO: 151285 - DNA, 15 bp, Homo sapiens
cagtaggtgacagcg

SEQ ID NO: 151286 - DNA, 15 bp, Homo sapiens
tcagtaggtgacagc

SEQ ID NO: 151287 - DNA, 15 bp, Homo sapiens
gtcagtaggtgacag

SEQ ID NO: 151288 - DNA, 15 bp, Homo sapiens
agtcagtaggtgaca

SEQ ID NO: 151289 - DNA, 15 bp, Homo sapiens
tagtcagtaggtgac

SEQ ID NO: 151290 - DNA, 15 bp, Homo sapiens
atagtcagtaggtga

SEQ ID NO: 151291 - DNA, 15 bp, Homo sapiens
catagtcagtaggtg

SEQ ID NO: 151292 - DNA, 15 bp, Homo sapiens
acatagtcagtaggt

SEQ ID NO: 151293 - DNA, 15 bp, Homo sapiens
cacatagtcagtagg

SEQ ID NO: 151294 - DNA, 15 bp, Homo sapiens
tcacatagtcagtag

SEQ ID NO: 151295 - DNA, 15 bp, Homo sapiens
gtcacatagtcagta

SEQ ID NO: 151296 - DNA, 15 bp, Homo sapiens
ggtcacatagtcagt

SEQ ID NO: 151297 - DNA, 15 bp, Homo sapiens
aggtcacatagtcag

SEQ ID NO: 151298 - DNA, 15 bp, Homo sapiens
aaggtcacatagtca

SEQ ID NO: 151299 - DNA, 15 bp, Homo sapiens
caaggtcacatagtc

SEQ ID NO: 151300 - DNA, 15 bp, Homo sapiens
tcaaggtcacatagt

SEQ ID NO: 151301 - DNA, 15 bp, Homo sapiens
ttcaaggtcacatag

SEQ ID NO: 151302 - DNA, 15 bp, Homo sapiens
gttcaaggtcacata

SEQ ID NO: 151303 - DNA, 15 bp, Homo sapiens
tgttcaaggtcacat

SEQ ID NO: 151304 - DNA, 15 bp, Homo sapiens
ttgttcaaggtcaca

SEQ ID NO: 151305 - DNA, 15 bp, Homo sapiens
cttgttcaaggtcac

SEQ ID NO: 151306 - DNA, 15 bp, Homo sapiens
ccttgttcaaggtca

SEQ ID NO: 151307 - DNA, 15 bp, Homo sapiens
accttgttcaaggtc

SEQ ID NO: 151308 - DNA, 15 bp, Homo sapiens
caccttgttcaaggt

SEQ ID NO: 151309 - DNA, 15 bp, Homo sapiens
acaccttgttcaagg

SEQ ID NO: 151310 - DNA, 15 bp, Homo sapiens
cacaccttgttcaag

SEQ ID NO: 151311 - DNA, 15 bp, Homo sapiens
acacaccttgttcaa

SEQ ID NO: 151312 - DNA, 15 bp, Homo sapiens
gacacaccttgttca

SEQ ID NO: 151313 - DNA, 15 bp, Homo sapiens
agacacaccttgttc

SEQ ID NO: 151314 - DNA, 15 bp, Homo sapiens
cagacacaccttgtt

SEQ ID NO: 151315 - DNA, 15 bp, Homo sapiens
acagacacaccttgt

SEQ ID NO: 151316 - DNA, 15 bp, Homo sapiens
cacagacacaccttg

SEQ ID NO: 151317 - DNA, 15 bp, Homo sapiens
acacagacacacctt

SEQ ID NO: 151318 - DNA, 15 bp, Homo sapiens
tacacagacacacct

SEQ ID NO: 151319 - DNA, 15 bp, Homo sapiens
atacacagacacacc

SEQ ID NO: 151320 - DNA, 15 bp, Homo sapiens
catacacagacacac

SEQ ID NO: 151321 - DNA, 15 bp, Homo sapiens
acatacacagacaca

SEQ ID NO: 151322 - DNA, 15 bp, Homo sapiens
cacatacacagacac

SEQ ID NO: 151323 - DNA, 15 bp, Homo sapiens
acacatacacagaca

SEQ ID NO: 151324 - DNA, 15 bp, Homo sapiens
cacacatacacagac

SEQ ID NO: 151325 - DNA, 15 bp, Homo sapiens
acacacatacacaga

SEQ ID NO: 151326 - DNA, 15 bp, Homo sapiens
cacacacatacacag

SEQ ID NO: 151327 - DNA, 15 bp, Homo sapiens
acacacacatacaca

SEQ ID NO: 151328 - DNA, 15 bp, Homo sapiens
cacacacacatacac

SEQ ID NO: 151329 - DNA, 15 bp, Homo sapiens
acacacacacataca

SEQ ID NO: 151330 - DNA, 15 bp, Homo sapiens
cacacacacacatac

SEQ ID NO: 151331 - DNA, 15 bp, Homo sapiens
gcacacacacacata

SEQ ID NO: 151332 - DNA, 15 bp, Homo sapiens
tgcacacacacacat

SEQ ID NO: 151333 - DNA, 15 bp, Homo sapiens
atgcacacacacaca

SEQ ID NO: 151334 - DNA, 15 bp, Homo sapiens
catgcacacacacac

SEQ ID NO: 151335 - DNA, 15 bp, Homo sapiens
acatgcacacacaca

SEQ ID NO: 151336 - DNA, 15 bp, Homo sapiens
cacatgcacacacac

SEQ ID NO: 151337 - DNA, 15 bp, Homo sapiens
gcacatgcacacaca

SEQ ID NO: 151338 - DNA, 15 bp, Homo sapiens
cgcacatgcacacac

SEQ ID NO: 151339 - DNA, 15 bp, Homo sapiens
gcgcacatgcacaca

SEQ ID NO: 151340 - DNA, 15 bp, Homo sapiens
tgcgcacatgcacac

SEQ ID NO: 151341 - DNA, 15 bp, Homo sapiens
atgcgcacatgcaca

SEQ ID NO: 151342 - DNA, 15 bp, Homo sapiens
tatgcgcacatgcac

SEQ ID NO: 151343 - DNA, 15 bp, Homo sapiens
atatgcgcacatgca

SEQ ID NO: 151344 - DNA, 15 bp, Homo sapiens
catatgcgcacatgc

SEQ ID NO: 151345 - DNA, 15 bp, Homo sapiens
acatatgcgcacatg

SEQ ID NO: 151346 - DNA, 15 bp, Homo sapiens
cacatatgcgcacat

SEQ ID NO: 151347 - DNA, 15 bp, Homo sapiens
acacatatgcgcaca

SEQ ID NO: 151348 - DNA, 15 bp, Homo sapiens
cacacatatgcgcac

SEQ ID NO: 151349 - DNA, 15 bp, Homo sapiens
acacacatatgcgca

SEQ ID NO: 151350 - DNA, 15 bp, Homo sapiens
cacacacatatgcgc

SEQ ID NO: 151351 - DNA, 15 bp, Homo sapiens
acacacacatatgcg

SEQ ID NO: 151352 - DNA, 15 bp, Homo sapiens
cacacacacatatgc

SEQ ID NO: 151353 - DNA, 15 bp, Homo sapiens
gcacacacacatatg

SEQ ID NO: 151354 - DNA, 15 bp, Homo sapiens
tgcacacacacatat

SEQ ID NO: 151355 - DNA, 15 bp, Homo sapiens
atgcacacacacata

SEQ ID NO: 151356 - DNA, 15 bp, Homo sapiens
catgcacacacacat

SEQ ID NO: 151357 - DNA, 15 bp, Homo sapiens
acacatgcacacaca

SEQ ID NO: 151358 - DNA, 15 bp, Homo sapiens
cacacatgcacacac

SEQ ID NO: 151359 - DNA, 15 bp, Homo sapiens
acacacatgcacaca

SEQ ID NO: 151360 - DNA, 15 bp, Homo sapiens
cacacacatgcacac

SEQ ID NO: 151361 - DNA, 15 bp, Homo sapiens
acacacacatgcaca

SEQ ID NO: 151362 - DNA, 15 bp, Homo sapiens
cacacacacatgcac

SEQ ID NO: 151363 - DNA, 15 bp, Homo sapiens
acacacacacatgca

SEQ ID NO: 151364 - DNA, 15 bp, Homo sapiens
cacacacacacatgc

SEQ ID NO: 151365 - DNA, 15 bp, Homo sapiens
acacacacacacatg

SEQ ID NO: 151366 - DNA, 15 bp, Homo sapiens
cacacacacacacat

SEQ ID NO: 151367 - DNA, 15 bp, Homo sapiens
tcaaacacacacaca

SEQ ID NO: 151368 - DNA, 15 bp, Homo sapiens
ctcaaacacacacac

SEQ ID NO: 151369 - DNA, 15 bp, Homo sapiens
tctcaaacacacaca

SEQ ID NO: 151370 - DNA, 15 bp, Homo sapiens
atctcaaacacacac

SEQ ID NO: 151371 - DNA, 15 bp, Homo sapiens
catctcaaacacaca

SEQ ID NO: 151372 - DNA, 15 bp, Homo sapiens
ccatctcaaacacac

SEQ ID NO: 151373 - DNA, 15 bp, Homo sapiens
tccatctcaaacaca

SEQ ID NO: 151374 - DNA, 15 bp, Homo sapiens
ctccatctcaaacac

SEQ ID NO: 151375 - DNA, 15 bp, Homo sapiens
actccatctcaaaca

SEQ ID NO: 151376 - DNA, 15 bp, Homo sapiens
aactccatctcaaac

SEQ ID NO: 151377 - DNA, 15 bp, Homo sapiens
aaactccatctcaaa

SEQ ID NO: 151378 - DNA, 15 bp, Homo sapiens
gaaactccatctcaa

SEQ ID NO: 151379 - DNA, 15 bp, Homo sapiens
cgaaactccatctca

SEQ ID NO: 151380 - DNA, 15 bp, Homo sapiens
agcgaaactccatct

SEQ ID NO: 151381 - DNA, 15 bp, Homo sapiens
gagcgaaactccatc

SEQ ID NO: 151382 - DNA, 15 bp, Homo sapiens
agagcgaaactccat

SEQ ID NO: 151383 - DNA, 15 bp, Homo sapiens
cagagcgaaactcca

SEQ ID NO: 151384 - DNA, 15 bp, Homo sapiens
acagagcgaaactcc

SEQ ID NO: 151385 - DNA, 15 bp, Homo sapiens
gacagagcgaaactc

SEQ ID NO: 151386 - DNA, 15 bp, Homo sapiens
tgacagagcgaaact

SEQ ID NO: 151387 - DNA, 15 bp, Homo sapiens
gtgacagagcgaaac

SEQ ID NO: 151388 - DNA, 15 bp, Homo sapiens
ggtgacagagcgaaa

SEQ ID NO: 151389 - DNA, 15 bp, Homo sapiens
gggtgacagagcgaa

SEQ ID NO: 151390 - DNA, 15 bp, Homo sapiens
gcagcctgggtgaca

SEQ ID NO: 151391 - DNA, 15 bp, Homo sapiens
tgcagcctgggtgac

SEQ ID NO: 151392 - DNA, 15 bp, Homo sapiens
ctgcagcctgggtga

SEQ ID NO: 151393 - DNA, 15 bp, Homo sapiens
actgcagcctgggtg

SEQ ID NO: 151394 - DNA, 15 bp, Homo sapiens
cactgcagcctgggt

SEQ ID NO: 151395 - DNA, 15 bp, Homo sapiens
gcactgcagcctggg

SEQ ID NO: 151396 - DNA, 15 bp, Homo sapiens
tgcactgcagcctgg

SEQ ID NO: 151397 - DNA, 15 bp, Homo sapiens
ttgcactgcagcctg

SEQ ID NO: 151398 - DNA, 15 bp, Homo sapiens
attgcactgcagcct

SEQ ID NO: 151399 - DNA, 15 bp, Homo sapiens
cattgcactgcagcc

SEQ ID NO: 151400 - DNA, 15 bp, Homo sapiens
ccattgcactgcagc

SEQ ID NO: 151401 - DNA, 15 bp, Homo sapiens
gccattgcactgcag

SEQ ID NO: 151402 - DNA, 15 bp, Homo sapiens
cgccattgcactgca

SEQ ID NO: 151403 - DNA, 15 bp, Homo sapiens
acgccattgcactgc

SEQ ID NO: 151404 - DNA, 15 bp, Homo sapiens
cacgccattgcactg

SEQ ID NO: 151405 - DNA, 15 bp, Homo sapiens
tcacgccattgcact

SEQ ID NO: 151406 - DNA, 15 bp, Homo sapiens
gtcacgccattgcac

SEQ ID NO: 151407 - DNA, 15 bp, Homo sapiens
ggtcacgccattgca

SEQ ID NO: 151408 - DNA, 15 bp, Homo sapiens
aggtcacgccattgc

SEQ ID NO: 151409 - DNA, 15 bp, Homo sapiens
gaggtcacgccattg

SEQ ID NO: 151410 - DNA, 15 bp, Homo sapiens
tgaggtcacgccatt

SEQ ID NO: 151411 - DNA, 15 bp, Homo sapiens
ctgaggtcacgccat

SEQ ID NO: 151412 - DNA, 15 bp, Homo sapiens
gctgaggtcacgcca

SEQ ID NO: 151413 - DNA, 15 bp, Homo sapiens
agctgaggtcacgcc

SEQ ID NO: 151414 - DNA, 15 bp, Homo sapiens
gagctgaggtcacgc

SEQ ID NO: 151415 - DNA, 15 bp, Homo sapiens
tgagctgaggtcacg

SEQ ID NO: 151416 - DNA, 15 bp, Homo sapiens
gtgagctgaggtcac

SEQ ID NO: 151417 - DNA, 15 bp, Homo sapiens
ggtgagctgaggtca

SEQ ID NO: 151418 - DNA, 15 bp, Homo sapiens
cggtgagctgaggtc

SEQ ID NO: 151419 - DNA, 15 bp, Homo sapiens
gcggtgagctgaggt

SEQ ID NO: 151420 - DNA, 15 bp, Homo sapiens
tgcggtgagctgagg

SEQ ID NO: 151421 - DNA, 15 bp, Homo sapiens
ttgcggtgagctgag

SEQ ID NO: 151422 - DNA, 15 bp, Homo sapiens
gttgcggtgagctga

SEQ ID NO: 151423 - DNA, 15 bp, Homo sapiens
ggttgcggtgagctg

SEQ ID NO: 151424 - DNA, 15 bp, Homo sapiens
aggttgcggtgagct

SEQ ID NO: 151425 - DNA, 15 bp, Homo sapiens
gaggttgcggtgagc

SEQ ID NO: 151426 - DNA, 15 bp, Homo sapiens
agaggttgcggtgag

SEQ ID NO: 151427 - DNA, 15 bp, Homo sapiens
gagaggttgcggtga

SEQ ID NO: 151428 - DNA, 15 bp, Homo sapiens
ggagaggttgcggtg

SEQ ID NO: 151429 - DNA, 15 bp, Homo sapiens
aggagaggttgcggt

SEQ ID NO: 151430 - DNA, 15 bp, Homo sapiens
gaggagaggttgcgg

SEQ ID NO: 151431 - DNA, 15 bp, Homo sapiens
ggaggagaggttgcg

SEQ ID NO: 151432 - DNA, 15 bp, Homo sapiens
aggaggagaggttgc

SEQ ID NO: 151433 - DNA, 15 bp, Homo sapiens
caggaggagaggttg

SEQ ID NO: 151434 - DNA, 15 bp, Homo sapiens
ccaggaggagaggtt

SEQ ID NO: 151435 - DNA, 15 bp, Homo sapiens
cccaggaggagaggt

SEQ ID NO: 151436 - DNA, 15 bp, Homo sapiens
acccaggaggagagg

SEQ ID NO: 151437 - DNA, 15 bp, Homo sapiens
aacccaggaggagag

SEQ ID NO: 151438 - DNA, 15 bp, Homo sapiens
gaacccaggaggaga

SEQ ID NO: 151439 - DNA, 15 bp, Homo sapiens
tgaacccaggaggag

SEQ ID NO: 151440 - DNA, 15 bp, Homo sapiens
ttgaacccaggagga

SEQ ID NO: 151441 - DNA, 15 bp, Homo sapiens
cgcttgaacccagga

SEQ ID NO: 151442 - DNA, 15 bp, Homo sapiens
tcgcttgaacccagg

SEQ ID NO: 151443 - DNA, 15 bp, Homo sapiens
atcgcttgaacccag

SEQ ID NO: 151444 - DNA, 15 bp, Homo sapiens
aatcgcttgaaccca

SEQ ID NO: 151445 - DNA, 15 bp, Homo sapiens
gaatcgcttgaaccc

SEQ ID NO: 151446 - DNA, 15 bp, Homo sapiens
agaatcgcttgaacc

SEQ ID NO: 151447 - DNA, 15 bp, Homo sapiens
gagaatcgcttgaac

SEQ ID NO: 151448 - DNA, 15 bp, Homo sapiens
ggagaatcgcttgaa

SEQ ID NO: 151449 - DNA, 15 bp, Homo sapiens
aggagaatcgcttga

SEQ ID NO: 151450 - DNA, 15 bp, Homo sapiens
caggagaatcgcttg

SEQ ID NO: 151451 - DNA, 15 bp, Homo sapiens
gcaggagaatcgctt

SEQ ID NO: 151452 - DNA, 15 bp, Homo sapiens
ggcaggagaatcgct

SEQ ID NO: 151453 - DNA, 15 bp, Homo sapiens
aggcaggagaatcgc

SEQ ID NO: 151454 - DNA, 15 bp, Homo sapiens
gaggcaggagaatcg

SEQ ID NO: 151455 - DNA, 15 bp, Homo sapiens
tgaggcaggagaatc

SEQ ID NO: 151456 - DNA, 15 bp, Homo sapiens
ggtggcacatgcctg

SEQ ID NO: 151457 - DNA, 15 bp, Homo sapiens
tggtggcacatgcct

SEQ ID NO: 151458 - DNA, 15 bp, Homo sapiens
ttggtggcacatgcc

SEQ ID NO: 151459 - DNA, 15 bp, Homo sapiens
cttggtggcacatgc

SEQ ID NO: 151460 - DNA, 15 bp, Homo sapiens
gcttggtggcacatg

SEQ ID NO: 151461 - DNA, 15 bp, Homo sapiens
ggcttggtggcacat

SEQ ID NO: 151462 - DNA, 15 bp, Homo sapiens
gggcttggtggcaca

SEQ ID NO: 151463 - DNA, 15 bp, Homo sapiens
cgggcttggtggcac

SEQ ID NO: 151464 - DNA, 15 bp, Homo sapiens
ccgggcttggtggca

SEQ ID NO: 151465 - DNA, 15 bp, Homo sapiens
gccgggcttggtggc

SEQ ID NO: 151466 - DNA, 15 bp, Homo sapiens
agccgggcttggtgg

SEQ ID NO: 151467 - DNA, 15 bp, Homo sapiens
tagccgggcttggtg

SEQ ID NO: 151468 - DNA, 15 bp, Homo sapiens
ttagccgggcttggt

SEQ ID NO: 151469 - DNA, 15 bp, Homo sapiens
attagccgggcttgg

SEQ ID NO: 151470 - DNA, 15 bp, Homo sapiens
aattagccgggcttg

SEQ ID NO: 151471 - DNA, 15 bp, Homo sapiens
aaattagccgggctt

SEQ ID NO: 151472 - DNA, 15 bp, Homo sapiens
aaaattagccgggct

SEQ ID NO: 151473 - DNA, 15 bp, Homo sapiens
caaaattagccgggc

SEQ ID NO: 151474 - DNA, 15 bp, Homo sapiens
acaaaattagccggg

SEQ ID NO: 151475 - DNA, 15 bp, Homo sapiens
tacaaaattagccgg

SEQ ID NO: 151476 - DNA, 15 bp, Homo sapiens
atacaaaattagccg

SEQ ID NO: 151477 - DNA, 15 bp, Homo sapiens
aatacaaaattagcc

SEQ ID NO: 151478 - DNA, 15 bp, Homo sapiens
aaatacaaaattagc

SEQ ID NO: 151479 - DNA, 15 bp, Homo sapiens
aaaatacaaaattag

SEQ ID NO: 151480 - DNA, 15 bp, Homo sapiens
aaaaatacaaaatta

SEQ ID NO: 151481 - DNA, 15 bp, Homo sapiens
taaaaatacaaaatt

SEQ ID NO: 151482 - DNA, 15 bp, Homo sapiens
ctaaaaatacaaaat

SEQ ID NO: 151483 - DNA, 15 bp, Homo sapiens
agaaaccccatctct

SEQ ID NO: 151484 - DNA, 15 bp, Homo sapiens
gagaaaccccatctc

SEQ ID NO: 151485 - DNA, 15 bp, Homo sapiens
ggagaaaccccatct

SEQ ID NO: 151486 - DNA, 15 bp, Homo sapiens
tggagaaaccccatc

SEQ ID NO: 151487 - DNA, 15 bp, Homo sapiens
atggagaaaccccat

SEQ ID NO: 151488 - DNA, 15 bp, Homo sapiens
catggagaaacccca

SEQ ID NO: 151489 - DNA, 15 bp, Homo sapiens
acatggagaaacccc

SEQ ID NO: 151490 - DNA, 15 bp, Homo sapiens
aacatggagaaaccc

SEQ ID NO: 151491 - DNA, 15 bp, Homo sapiens
caacatggagaaacc

SEQ ID NO: 151492 - DNA, 15 bp, Homo sapiens
ccaacatggagaaac

SEQ ID NO: 151493 - DNA, 15 bp, Homo sapiens
accaacatggagaaa

SEQ ID NO: 151494 - DNA, 15 bp, Homo sapiens
gaccaacatggagaa

SEQ ID NO: 151495 - DNA, 15 bp, Homo sapiens
tgaccaacatggaga

SEQ ID NO: 151496 - DNA, 15 bp, Homo sapiens
ctgaccaacatggag

SEQ ID NO: 151497 - DNA, 15 bp, Homo sapiens
cctgaccaacatgga

SEQ ID NO: 151498 - DNA, 15 bp, Homo sapiens
gcctgaccaacatgg

SEQ ID NO: 151499 - DNA, 15 bp, Homo sapiens
agcctgaccaacatg

SEQ ID NO: 151500 - DNA, 15 bp, Homo sapiens
cagcctgaccaacat

SEQ ID NO: 151501 - DNA, 15 bp, Homo sapiens
ccagcctgaccaaca

SEQ ID NO: 151502 - DNA, 15 bp, Homo sapiens
accagcctgaccaac

SEQ ID NO: 151503 - DNA, 15 bp, Homo sapiens
gaccagcctgaccaa

SEQ ID NO: 151504 - DNA, 15 bp, Homo sapiens
agaccagcctgacca

SEQ ID NO: 151505 - DNA, 15 bp, Homo sapiens
gagaccagcctgacc

SEQ ID NO: 151506 - DNA, 15 bp, Homo sapiens
tgagaccagcctgac

SEQ ID NO: 151507 - DNA, 15 bp, Homo sapiens
ttgagaccagcctga

SEQ ID NO: 151508 - DNA, 15 bp, Homo sapiens
tttgagaccagcctg

SEQ ID NO: 151509 - DNA, 15 bp, Homo sapiens
gtttgagaccagcct

SEQ ID NO: 151510 - DNA, 15 bp, Homo sapiens
agtttgagaccagcc

SEQ ID NO: 151511 - DNA, 15 bp, Homo sapiens
cagtttgagaccagc

SEQ ID NO: 151512 - DNA, 15 bp, Homo sapiens
gcagtttgagaccag

SEQ ID NO: 151513 - DNA, 15 bp, Homo sapiens
ggcagtttgagacca

SEQ ID NO: 151514 - DNA, 15 bp, Homo sapiens
cggcagtttgagacc

SEQ ID NO: 151515 - DNA, 15 bp, Homo sapiens
tcggcagtttgagac

SEQ ID NO: 151516 - DNA, 15 bp, Homo sapiens
gtcggcagtttgaga

SEQ ID NO: 151517 - DNA, 15 bp, Homo sapiens
ggtcggcagtttgag

SEQ ID NO: 151518 - DNA, 15 bp, Homo sapiens
aggtcggcagtttga

SEQ ID NO: 151519 - DNA, 15 bp, Homo sapiens
gaggtcggcagtttg

SEQ ID NO: 151520 - DNA, 15 bp, Homo sapiens
tgaggtcggcagttt

SEQ ID NO: 151521 - DNA, 15 bp, Homo sapiens
ctgaggtcggcagtt

SEQ ID NO: 151522 - DNA, 15 bp, Homo sapiens
cctgaggtcggcagt

SEQ ID NO: 151523 - DNA, 15 bp, Homo sapiens
acctgaggtcggcag

SEQ ID NO: 151524 - DNA, 15 bp, Homo sapiens
cacctgaggtcggca

SEQ ID NO: 151525 - DNA, 15 bp, Homo sapiens
tcacctgaggtcggc

SEQ ID NO: 151526 - DNA, 15 bp, Homo sapiens
atcacctgaggtcgg

SEQ ID NO: 151527 - DNA, 15 bp, Homo sapiens
gatcacctgaggtcg

SEQ ID NO: 151528 - DNA, 15 bp, Homo sapiens
tgccaaggcaggtgg

SEQ ID NO: 151529 - DNA, 15 bp, Homo sapiens
atgccaaggcaggtg

SEQ ID NO: 151530 - DNA, 15 bp, Homo sapiens
gatgccaaggcaggt

SEQ ID NO: 151531 - DNA, 15 bp, Homo sapiens
ggatgccaaggcagg

SEQ ID NO: 151532 - DNA, 15 bp, Homo sapiens
gggatgccaaggcag

SEQ ID NO: 151533 - DNA, 15 bp, Homo sapiens
tgggatgccaaggca

SEQ ID NO: 151534 - DNA, 15 bp, Homo sapiens
ttgggatgccaaggc

SEQ ID NO: 151535 - DNA, 15 bp, Homo sapiens
tttgggatgccaagg

SEQ ID NO: 151536 - DNA, 15 bp, Homo sapiens
ctttgggatgccaag

SEQ ID NO: 151537 - DNA, 15 bp, Homo sapiens
actttgggatgccaa

SEQ ID NO: 151538 - DNA, 15 bp, Homo sapiens
aactttgggatgcca

SEQ ID NO: 151539 - DNA, 15 bp, Homo sapiens
gaactttgggatgcc

SEQ ID NO: 151540 - DNA, 15 bp, Homo sapiens
agaactttgggatgc

SEQ ID NO: 151541 - DNA, 15 bp, Homo sapiens
cagaactttgggatg

SEQ ID NO: 151542 - DNA, 15 bp, Homo sapiens
ccagaactttgggat

SEQ ID NO: 151543 - DNA, 15 bp, Homo sapiens
tccagaactttggga

SEQ ID NO: 151544 - DNA, 15 bp, Homo sapiens
ttccagaactttggg

SEQ ID NO: 151545 - DNA, 15 bp, Homo sapiens
attccagaactttgg

SEQ ID NO: 151546 - DNA, 15 bp, Homo sapiens
aattccagaactttg

SEQ ID NO: 151547 - DNA, 15 bp, Homo sapiens
taattccagaacttt

SEQ ID NO: 151548 - DNA, 15 bp, Homo sapiens
ataattccagaactt

SEQ ID NO: 151549 - DNA, 15 bp, Homo sapiens
tataattccagaact

SEQ ID NO: 151550 - DNA, 15 bp, Homo sapiens
ctataattccagaac

SEQ ID NO: 151551 - DNA, 15 bp, Homo sapiens
cctataattccagaa

SEQ ID NO: 151552 - DNA, 15 bp, Homo sapiens
gcctataattccaga

SEQ ID NO: 151553 - DNA, 15 bp, Homo sapiens
tgcctataattccag

SEQ ID NO: 151554 - DNA, 15 bp, Homo sapiens
atgcctataattcca

SEQ ID NO: 151555 - DNA, 15 bp, Homo sapiens
tatgcctataattcc

SEQ ID NO: 151556 - DNA, 15 bp, Homo sapiens
ttatgcctataattc

SEQ ID NO: 151557 - DNA, 15 bp, Homo sapiens
cttatgcctataatt

SEQ ID NO: 151558 - DNA, 15 bp, Homo sapiens
gcttatgcctataat

SEQ ID NO: 151559 - DNA, 15 bp, Homo sapiens
ggcttatgcctataa

SEQ ID NO: 151560 - DNA, 15 bp, Homo sapiens
tggcttatgcctata

SEQ ID NO: 151561 - DNA, 15 bp, Homo sapiens
gtggcttatgcctat

SEQ ID NO: 151562 - DNA, 15 bp, Homo sapiens
agtggcttatgccta

SEQ ID NO: 151563 - DNA, 15 bp, Homo sapiens
cagtggcttatgcct

SEQ ID NO: 151564 - DNA, 15 bp, Homo sapiens
acagtggcttatgcc

SEQ ID NO: 151565 - DNA, 15 bp, Homo sapiens
cacagtggcttatgc

SEQ ID NO: 151566 - DNA, 15 bp, Homo sapiens
gcacagtggcttatg

SEQ ID NO: 151567 - DNA, 15 bp, Homo sapiens
ggcacagtggcttat

SEQ ID NO: 151568 - DNA, 15 bp, Homo sapiens
gggcacagtggctta

SEQ ID NO: 151569 - DNA, 15 bp, Homo sapiens
cgggcacagtggctt

SEQ ID NO: 151570 - DNA, 15 bp, Homo sapiens
ccgggcacagtggct

SEQ ID NO: 151571 - DNA, 15 bp, Homo sapiens
gccgggcacagtggc

SEQ ID NO: 151572 - DNA, 15 bp, Homo sapiens
ggccgggcacagtgg

SEQ ID NO: 151573 - DNA, 15 bp, Homo sapiens
aggccgggcacagtg

SEQ ID NO: 151574 - DNA, 15 bp, Homo sapiens
gaggccgggcacagt

SEQ ID NO: 151575 - DNA, 15 bp, Homo sapiens
agaggccgggcacag

SEQ ID NO: 151576 - DNA, 15 bp, Homo sapiens
cagaggccgggcaca

SEQ ID NO: 151577 - DNA, 15 bp, Homo sapiens
acagaggccgggcac

SEQ ID NO: 151578 - DNA, 15 bp, Homo sapiens
cacagaggccgggca

SEQ ID NO: 151579 - DNA, 15 bp, Homo sapiens
acacagaggccgggc

SEQ ID NO: 151580 - DNA, 15 bp, Homo sapiens
cacacagaggccggg

SEQ ID NO: 151581 - DNA, 15 bp, Homo sapiens
acacacagaggccgg

SEQ ID NO: 151582 - DNA, 15 bp, Homo sapiens
cacacacagaggccg

SEQ ID NO: 151583 - DNA, 15 bp, Homo sapiens
acacacacagaggcc

SEQ ID NO: 151584 - DNA, 15 bp, Homo sapiens
cacacacacagaggc

SEQ ID NO: 151585 - DNA, 15 bp, Homo sapiens
acacacacacagagg

SEQ ID NO: 151586 - DNA, 15 bp, Homo sapiens
aacacacacacagag

SEQ ID NO: 151587 - DNA, 15 bp, Homo sapiens
aaacacacacacaga

SEQ ID NO: 151588 - DNA, 15 bp, Homo sapiens
aaaacacacacacag

SEQ ID NO: 151589 - DNA, 15 bp, Homo sapiens
caaaacacacacaca

SEQ ID NO: 151590 - DNA, 15 bp, Homo sapiens
acaaaacacacacac

SEQ ID NO: 151591 - DNA, 15 bp, Homo sapiens
tacaaaacacacaca

SEQ ID NO: 151592 - DNA, 15 bp, Homo sapiens
ctacaaaacacacac

SEQ ID NO: 151593 - DNA, 15 bp, Homo sapiens
gctacaaaacacaca

SEQ ID NO: 151594 - DNA, 15 bp, Homo sapiens
tgctacaaaacacac

SEQ ID NO: 151595 - DNA, 15 bp, Homo sapiens
ttgctacaaaacaca

SEQ ID NO: 151596 - DNA, 15 bp, Homo sapiens
gttgctacaaaacac

SEQ ID NO: 151597 - DNA, 15 bp, Homo sapiens
agttgctacaaaaca

SEQ ID NO: 151598 - DNA, 15 bp, Homo sapiens
aagttgctacaaaac

SEQ ID NO: 151599 - DNA, 15 bp, Homo sapiens
gaagttgctacaaaa

SEQ ID NO: 151600 - DNA, 15 bp, Homo sapiens
agaagttgctacaaa

SEQ ID NO: 151601 - DNA, 15 bp, Homo sapiens
gagaagttgctacaa

SEQ ID NO: 151602 - DNA, 15 bp, Homo sapiens
agagaagttgctaca

SEQ ID NO: 151603 - DNA, 15 bp, Homo sapiens
cagagaagttgctac

SEQ ID NO: 151604 - DNA, 15 bp, Homo sapiens
acagagaagttgcta

SEQ ID NO: 151605 - DNA, 15 bp, Homo sapiens
cacagagaagttgct

SEQ ID NO: 151606 - DNA, 15 bp, Homo sapiens
acacagagaagttgc

SEQ ID NO: 151607 - DNA, 15 bp, Homo sapiens
gacacagagaagttg

SEQ ID NO: 151608 - DNA, 15 bp, Homo sapiens
ggacacagagaagtt

SEQ ID NO: 151609 - DNA, 15 bp, Homo sapiens
aggacacagagaagt

SEQ ID NO: 151610 - DNA, 15 bp, Homo sapiens
caggacacagagaag

SEQ ID NO: 151611 - DNA, 15 bp, Homo sapiens
tcaggacacagagaa

SEQ ID NO: 151612 - DNA, 15 bp, Homo sapiens
atcaggacacagaga

SEQ ID NO: 151613 - DNA, 15 bp, Homo sapiens
tatcaggacacagag

SEQ ID NO: 151614 - DNA, 15 bp, Homo sapiens
ctatcaggacacaga

SEQ ID NO: 151615 - DNA, 15 bp, Homo sapiens
gctatcaggacacag

SEQ ID NO: 151616 - DNA, 15 bp, Homo sapiens
ggctatcaggacaca

SEQ ID NO: 151617 - DNA, 15 bp, Homo sapiens
tggctatcaggacac

SEQ ID NO: 151618 - DNA, 15 bp, Homo sapiens
gtggctatcaggaca

SEQ ID NO: 151619 - DNA, 15 bp, Homo sapiens
tgtggctatcaggac

SEQ ID NO: 151620 - DNA, 15 bp, Homo sapiens
ctgtggctatcagga

SEQ ID NO: 151621 - DNA, 15 bp, Homo sapiens
cctgtggctatcagg

SEQ ID NO: 151622 - DNA, 15 bp, Homo sapiens
ccctgtggctatcag

SEQ ID NO: 151623 - DNA, 15 bp, Homo sapiens
cccctgtggctatca

SEQ ID NO: 151624 - DNA, 15 bp, Homo sapiens
gcccctgtggctatc

SEQ ID NO: 151625 - DNA, 15 bp, Homo sapiens
agcccctgtggctat

SEQ ID NO: 151626 - DNA, 15 bp, Homo sapiens
cagcccctgtggcta

SEQ ID NO: 151627 - DNA, 15 bp, Homo sapiens
gcagcccctgtggct

SEQ ID NO: 151628 - DNA, 15 bp, Homo sapiens
agcagcccctgtggc

SEQ ID NO: 151629 - DNA, 15 bp, Homo sapiens
cagcagcccctgtgg

SEQ ID NO: 151630 - DNA, 15 bp, Homo sapiens
acagcagcccctgtg

SEQ ID NO: 151631 - DNA, 15 bp, Homo sapiens
cacagcagcccctgt

SEQ ID NO: 151632 - DNA, 15 bp, Homo sapiens
tcacagcagcccctg

SEQ ID NO: 151633 - DNA, 15 bp, Homo sapiens
ctcacagcagcccct

SEQ ID NO: 151634 - DNA, 15 bp, Homo sapiens
cctcacagcagcccc

SEQ ID NO: 151635 - DNA, 15 bp, Homo sapiens
tcctcacagcagccc

SEQ ID NO: 151636 - DNA, 15 bp, Homo sapiens
gtcctcacagcagcc

SEQ ID NO: 151637 - DNA, 15 bp, Homo sapiens
agtcctcacagcagc

SEQ ID NO: 151638 - DNA, 15 bp, Homo sapiens
tagtcctcacagcag

SEQ ID NO: 151639 - DNA, 15 bp, Homo sapiens
ttagtcctcacagca

SEQ ID NO: 151640 - DNA, 15 bp, Homo sapiens
cttagtcctcacagc

SEQ ID NO: 151641 - DNA, 15 bp, Homo sapiens
acttagtcctcacag

SEQ ID NO: 151642 - DNA, 15 bp, Homo sapiens
cacttagtcctcaca

SEQ ID NO: 151643 - DNA, 15 bp, Homo sapiens
tcacttagtcctcac

SEQ ID NO: 151644 - DNA, 15 bp, Homo sapiens
gtcacttagtcctca

SEQ ID NO: 151645 - DNA, 15 bp, Homo sapiens
cgtcacttagtcctc

SEQ ID NO: 151646 - DNA, 15 bp, Homo sapiens
tcgtcacttagtcct

SEQ ID NO: 151647 - DNA, 15 bp, Homo sapiens
ctcgtcacttagtcc

SEQ ID NO: 151648 - DNA, 15 bp, Homo sapiens
cctcgtcacttagtc

SEQ ID NO: 151649 - DNA, 15 bp, Homo sapiens
acctcgtcacttagt

SEQ ID NO: 151650 - DNA, 15 bp, Homo sapiens
cacctcgtcacttag

SEQ ID NO: 151651 - DNA, 15 bp, Homo sapiens
acacctcgtcactta

SEQ ID NO: 151652 - DNA, 15 bp, Homo sapiens
tacacctcgtcactt

SEQ ID NO: 151653 - DNA, 15 bp, Homo sapiens
atacacctcgtcact

SEQ ID NO: 151654 - DNA, 15 bp, Homo sapiens
catacacctcgtcac

SEQ ID NO: 151655 - DNA, 15 bp, Homo sapiens
acatacacctcgtca

SEQ ID NO: 151656 - DNA, 15 bp, Homo sapiens
gacatacacctcgtc

SEQ ID NO: 151657 - DNA, 15 bp, Homo sapiens
tgacatacacctcgt

SEQ ID NO: 151658 - DNA, 15 bp, Homo sapiens
ctgacatacacctcg

SEQ ID NO: 151659 - DNA, 15 bp, Homo sapiens
cctgacatacacctc

SEQ ID NO: 151660 - DNA, 15 bp, Homo sapiens
acctgacatacacct

SEQ ID NO: 151661 - DNA, 15 bp, Homo sapiens
cacctgacatacacc

SEQ ID NO: 151662 - DNA, 15 bp, Homo sapiens
gcacctgacatacac

SEQ ID NO: 151663 - DNA, 15 bp, Homo sapiens
agcacctgacataca

SEQ ID NO: 151664 - DNA, 15 bp, Homo sapiens
aagcacctgacatac

SEQ ID NO: 151665 - DNA, 15 bp, Homo sapiens
caagcacctgacata

SEQ ID NO: 151666 - DNA, 15 bp, Homo sapiens
ccaagcacctgacat

SEQ ID NO: 151667 - DNA, 15 bp, Homo sapiens
tccaagcacctgaca

SEQ ID NO: 151668 - DNA, 15 bp, Homo sapiens
ttccaagcacctgac

SEQ ID NO: 151669 - DNA, 15 bp, Homo sapiens
attccaagcacctga

SEQ ID NO: 151670 - DNA, 15 bp, Homo sapiens
cattccaagcacctg

SEQ ID NO: 151671 - DNA, 15 bp, Homo sapiens
acattccaagcacct

SEQ ID NO: 151672 - DNA, 15 bp, Homo sapiens
gacattccaagcacc

SEQ ID NO: 151673 - DNA, 15 bp, Homo sapiens
tgacattccaagcac

SEQ ID NO: 151674 - DNA, 15 bp, Homo sapiens
ctgacattccaagca

SEQ ID NO: 151675 - DNA, 15 bp, Homo sapiens
actgacattccaagc

SEQ ID NO: 151676 - DNA, 15 bp, Homo sapiens
gactgacattccaag

SEQ ID NO: 151677 - DNA, 15 bp, Homo sapiens
ggactgacattccaa

SEQ ID NO: 151678 - DNA, 15 bp, Homo sapiens
tggactgacattcca

SEQ ID NO: 151679 - DNA, 15 bp, Homo sapiens
atggactgacattcc

SEQ ID NO: 151680 - DNA, 15 bp, Homo sapiens
gatggactgacattc

SEQ ID NO: 151681 - DNA, 15 bp, Homo sapiens
ggatggactgacatt

SEQ ID NO: 151682 - DNA, 15 bp, Homo sapiens
gggatggactgacat

SEQ ID NO: 151683 - DNA, 15 bp, Homo sapiens
tgggatggactgaca

SEQ ID NO: 151684 - DNA, 15 bp, Homo sapiens
gtgggatggactgac

SEQ ID NO: 151685 - DNA, 15 bp, Homo sapiens
ggtgggatggactga

SEQ ID NO: 151686 - DNA, 15 bp, Homo sapiens
aggtgggatggactg

SEQ ID NO: 151687 - DNA, 15 bp, Homo sapiens
gaggtgggatggact

SEQ ID NO: 151688 - DNA, 15 bp, Homo sapiens
ggaggtgggatggac

SEQ ID NO: 151689 - DNA, 15 bp, Homo sapiens
aggaggtgggatgga

SEQ ID NO: 151690 - DNA, 15 bp, Homo sapiens
caggaggtgggatgg

SEQ ID NO: 151691 - DNA, 15 bp, Homo sapiens
gcaggaggtgggatg

SEQ ID NO: 151692 - DNA, 15 bp, Homo sapiens
agcaggaggtgggat

SEQ ID NO: 151693 - DNA, 15 bp, Homo sapiens
gagcaggaggtggga

SEQ ID NO: 151694 - DNA, 15 bp, Homo sapiens
agagcaggaggtggg

SEQ ID NO: 151695 - DNA, 15 bp, Homo sapiens
gagagcaggaggtgg

SEQ ID NO: 151696 - DNA, 15 bp, Homo sapiens
ggagagcaggaggtg

SEQ ID NO: 151697 - DNA, 15 bp, Homo sapiens
gggagagcaggaggt

SEQ ID NO: 151698 - DNA, 15 bp, Homo sapiens
ggggagagcaggagg

SEQ ID NO: 151699 - DNA, 15 bp, Homo sapiens
tggggagagcaggag

SEQ ID NO: 151700 - DNA, 15 bp, Homo sapiens
gtggggagagcagga

SEQ ID NO: 151701 - DNA, 15 bp, Homo sapiens
agtggggagagcagg

SEQ ID NO: 151702 - DNA, 15 bp, Homo sapiens
tagtggggagagcag

SEQ ID NO: 151703 - DNA, 15 bp, Homo sapiens
ctagtggggagagca

SEQ ID NO: 151704 - DNA, 15 bp, Homo sapiens
cctagtggggagagc

SEQ ID NO: 151705 - DNA, 15 bp, Homo sapiens
gcctagtggggagag

SEQ ID NO: 151706 - DNA, 15 bp, Homo sapiens
agcctagtggggaga

SEQ ID NO: 151707 - DNA, 15 bp, Homo sapiens
cagcctagtggggag

SEQ ID NO: 151708 - DNA, 15 bp, Homo sapiens
gcagcctagtgggga

SEQ ID NO: 151709 - DNA, 15 bp, Homo sapiens
ggcagcctagtgggg

SEQ ID NO: 151710 - DNA, 15 bp, Homo sapiens
tggcagcctagtggg

SEQ ID NO: 151711 - DNA, 15 bp, Homo sapiens
gtggcagcctagtgg

SEQ ID NO: 151712 - DNA, 15 bp, Homo sapiens
ggtggcagcctagtg

SEQ ID NO: 151713 - DNA, 15 bp, Homo sapiens
aggtggcagcctagt

SEQ ID NO: 151714 - DNA, 15 bp, Homo sapiens
gaggtggcagcctag

SEQ ID NO: 151715 - DNA, 15 bp, Homo sapiens
ggaggtggcagccta

SEQ ID NO: 151716 - DNA, 15 bp, Homo sapiens
aggaggtggcagcct

SEQ ID NO: 151717 - DNA, 15 bp, Homo sapiens
gaggaggtggcagcc

SEQ ID NO: 151718 - DNA, 15 bp, Homo sapiens
ggaggaggtggcagc

SEQ ID NO: 151719 - DNA, 15 bp, Homo sapiens
aggaggaggtggcag

SEQ ID NO: 151720 - DNA, 15 bp, Homo sapiens
gaggaggaggtggca

SEQ ID NO: 151721 - DNA, 15 bp, Homo sapiens
ggaggaggaggtggc

SEQ ID NO: 151722 - DNA, 15 bp, Homo sapiens
aggaggaggaggtgg

SEQ ID NO: 151723 - DNA, 15 bp, Homo sapiens
gaggaggaggaggtg

SEQ ID NO: 151724 - DNA, 15 bp, Homo sapiens
ggaggaggaggaggt

SEQ ID NO: 151725 - DNA, 15 bp, Homo sapiens
tggaggaggaggagg

SEQ ID NO: 151726 - DNA, 15 bp, Homo sapiens
atggaggaggaggag

SEQ ID NO: 151727 - DNA, 15 bp, Homo sapiens
aatggaggaggagga

SEQ ID NO: 151728 - DNA, 15 bp, Homo sapiens
taatggaggaggagg

SEQ ID NO: 151729 - DNA, 15 bp, Homo sapiens
gtaatggaggaggag

SEQ ID NO: 151730 - DNA, 15 bp, Homo sapiens
ggtaatggaggagga

SEQ ID NO: 151731 - DNA, 15 bp, Homo sapiens
aggtaatggaggagg

SEQ ID NO: 151732 - DNA, 15 bp, Homo sapiens
aaggtaatggaggag

SEQ ID NO: 151733 - DNA, 15 bp, Homo sapiens
aaaggtaatggagga

SEQ ID NO: 151734 - DNA, 15 bp, Homo sapiens
aaaaggtaatggagg

SEQ ID NO: 151735 - DNA, 15 bp, Homo sapiens
caaaaggtaatggag

SEQ ID NO: 151736 - DNA, 15 bp, Homo sapiens
tcaaaaggtaatgga

SEQ ID NO: 151737 - DNA, 15 bp, Homo sapiens
atcaaaaggtaatgg

SEQ ID NO: 151738 - DNA, 15 bp, Homo sapiens
tatcaaaaggtaatg

SEQ ID NO: 151739 - DNA, 15 bp, Homo sapiens
ctatcaaaaggtaat

SEQ ID NO: 151740 - DNA, 15 bp, Homo sapiens
cctatcaaaaggtaa

SEQ ID NO: 151741 - DNA, 15 bp, Homo sapiens
acctatcaaaaggta

SEQ ID NO: 151742 - DNA, 15 bp, Homo sapiens
gacctatcaaaaggt

SEQ ID NO: 151743 - DNA, 15 bp, Homo sapiens
agacctatcaaaagg

SEQ ID NO: 151744 - DNA, 15 bp, Homo sapiens
cagacctatcaaaag

SEQ ID NO: 151745 - DNA, 15 bp, Homo sapiens
tcagacctatcaaaa

SEQ ID NO: 151746 - DNA, 15 bp, Homo sapiens
atcagacctatcaaa

SEQ ID NO: 151747 - DNA, 15 bp, Homo sapiens
aatcagacctatcaa

SEQ ID NO: 151748 - DNA, 15 bp, Homo sapiens
taatcagacctatca

SEQ ID NO: 151749 - DNA, 15 bp, Homo sapiens
gtaatcagacctatc

SEQ ID NO: 151750 - DNA, 15 bp, Homo sapiens
ggtaatcagacctat

SEQ ID NO: 151751 - DNA, 15 bp, Homo sapiens
aggtaatcagaccta

SEQ ID NO: 151752 - DNA, 15 bp, Homo sapiens
aaggtaatcagacct

SEQ ID NO: 151753 - DNA, 15 bp, Homo sapiens
gaaggtaatcagacc

SEQ ID NO: 151754 - DNA, 15 bp, Homo sapiens
tgaaggtaatcagac

SEQ ID NO: 151755 - DNA, 15 bp, Homo sapiens
atgaaggtaatcaga

SEQ ID NO: 151756 - DNA, 15 bp, Homo sapiens
aatgaaggtaatcag

SEQ ID NO: 151757 - DNA, 15 bp, Homo sapiens
aaatgaaggtaatca

SEQ ID NO: 151758 - DNA, 15 bp, Homo sapiens
aaaatgaaggtaatc

SEQ ID NO: 151759 - DNA, 15 bp, Homo sapiens
taaaatgaaggtaat

SEQ ID NO: 151760 - DNA, 15 bp, Homo sapiens
gtaaaatgaaggtaa

SEQ ID NO: 151761 - DNA, 15 bp, Homo sapiens
tgtaaaatgaaggta

SEQ ID NO: 151762 - DNA, 15 bp, Homo sapiens
ctgtaaaatgaaggt

SEQ ID NO: 151763 - DNA, 15 bp, Homo sapiens
tctgtaaaatgaagg

SEQ ID NO: 151764 - DNA, 15 bp, Homo sapiens
atctgtaaaatgaag

SEQ ID NO: 151765 - DNA, 15 bp, Homo sapiens
catctgtaaaatgaa

SEQ ID NO: 151766 - DNA, 15 bp, Homo sapiens
tcatctgtaaaatga

SEQ ID NO: 151767 - DNA, 15 bp, Homo sapiens
gtcatctgtaaaatg

SEQ ID NO: 151768 - DNA, 15 bp, Homo sapiens
agtcatctgtaaaat

SEQ ID NO: 151769 - DNA, 15 bp, Homo sapiens
gagtcatctgtaaaa

SEQ ID NO: 151770 - DNA, 15 bp, Homo sapiens
agagtcatctgtaaa

SEQ ID NO: 151771 - DNA, 15 bp, Homo sapiens
cagagtcatctgtaa

SEQ ID NO: 151772 - DNA, 15 bp, Homo sapiens
ccagagtcatctgta

SEQ ID NO: 151773 - DNA, 15 bp, Homo sapiens
cccagagtcatctgt

SEQ ID NO: 151774 - DNA, 15 bp, Homo sapiens
acccagagtcatctg

SEQ ID NO: 151775 - DNA, 15 bp, Homo sapiens
gacccagagtcatct

SEQ ID NO: 151776 - DNA, 15 bp, Homo sapiens
tgacccagagtcatc

SEQ ID NO: 151777 - DNA, 15 bp, Homo sapiens
gtgacccagagtcat

SEQ ID NO: 151778 - DNA, 15 bp, Homo sapiens
agtgacccagagtca

SEQ ID NO: 151779 - DNA, 15 bp, Homo sapiens
gagtgacccagagtc

SEQ ID NO: 151780 - DNA, 15 bp, Homo sapiens
agagtgacccagagt

SEQ ID NO: 151781 - DNA, 15 bp, Homo sapiens
aagagtgacccagag

SEQ ID NO: 151782 - DNA, 15 bp, Homo sapiens
gaagagtgacccaga

SEQ ID NO: 151783 - DNA, 15 bp, Homo sapiens
tgaagagtgacccag

SEQ ID NO: 151784 - DNA, 15 bp, Homo sapiens
atgaagagtgaccca

SEQ ID NO: 151785 - DNA, 15 bp, Homo sapiens
gatgaagagtgaccc

SEQ ID NO: 151786 - DNA, 15 bp, Homo sapiens
agatgaagagtgacc

SEQ ID NO: 151787 - DNA, 15 bp, Homo sapiens
aagatgaagagtgac

SEQ ID NO: 151788 - DNA, 15 bp, Homo sapiens
aaagatgaagagtga

SEQ ID NO: 151789 - DNA, 15 bp, Homo sapiens
aaaagatgaagagtg

SEQ ID NO: 151790 - DNA, 15 bp, Homo sapiens
caaaagatgaagagt

SEQ ID NO: 151791 - DNA, 15 bp, Homo sapiens
acaaaagatgaagag

SEQ ID NO: 151792 - DNA, 15 bp, Homo sapiens
tacaaaagatgaaga

SEQ ID NO: 151793 - DNA, 15 bp, Homo sapiens
ctacaaaagatgaag

SEQ ID NO: 151794 - DNA, 15 bp, Homo sapiens
tctacaaaagatgaa

SEQ ID NO: 151795 - DNA, 15 bp, Homo sapiens
ttctacaaaagatga

SEQ ID NO: 151796 - DNA, 15 bp, Homo sapiens
tttctacaaaagatg

SEQ ID NO: 151797 - DNA, 15 bp, Homo sapiens
atttctacaaaagat

SEQ ID NO: 151798 - DNA, 15 bp, Homo sapiens
tatttctacaaaaga

SEQ ID NO: 151799 - DNA, 15 bp, Homo sapiens
gtatttctacaaaag

SEQ ID NO: 151800 - DNA, 15 bp, Homo sapiens
ggtatttctacaaaa

SEQ ID NO: 151801 - DNA, 15 bp, Homo sapiens
aggtatttctacaaa

SEQ ID NO: 151802 - DNA, 15 bp, Homo sapiens
gaggtatttctacaa

SEQ ID NO: 151803 - DNA, 15 bp, Homo sapiens
agaggtatttctaca

SEQ ID NO: 151804 - DNA, 15 bp, Homo sapiens
cagaggtatttctac

SEQ ID NO: 151805 - DNA, 15 bp, Homo sapiens
acagaggtatttcta

SEQ ID NO: 151806 - DNA, 15 bp, Homo sapiens
tacagaggtatttct

SEQ ID NO: 151807 - DNA, 15 bp, Homo sapiens
ctacagaggtatttc

SEQ ID NO: 151808 - DNA, 15 bp, Homo sapiens
gctacagaggtattt

SEQ ID NO: 151809 - DNA, 15 bp, Homo sapiens
tgctacagaggtatt

SEQ ID NO: 151810 - DNA, 15 bp, Homo sapiens
ttgctacagaggtat

SEQ ID NO: 151811 - DNA, 15 bp, Homo sapiens
tttgctacagaggta

SEQ ID NO: 151812 - DNA, 15 bp, Homo sapiens
atttgctacagaggt

SEQ ID NO: 151813 - DNA, 15 bp, Homo sapiens
catttgctacagagg

SEQ ID NO: 151814 - DNA, 15 bp, Homo sapiens
acatttgctacagag

SEQ ID NO: 151815 - DNA, 15 bp, Homo sapiens
gacatttgctacaga

SEQ ID NO: 151816 - DNA, 15 bp, Homo sapiens
tgacatttgctacag

SEQ ID NO: 151817 - DNA, 15 bp, Homo sapiens
atgacatttgctaca

SEQ ID NO: 151818 - DNA, 15 bp, Homo sapiens
catgacatttgctac

SEQ ID NO: 151819 - DNA, 15 bp, Homo sapiens
ccatgacatttgcta

SEQ ID NO: 151820 - DNA, 15 bp, Homo sapiens
cccatgacatttgct

SEQ ID NO: 151821 - DNA, 15 bp, Homo sapiens
ccccatgacatttgc

SEQ ID NO: 151822 - DNA, 15 bp, Homo sapiens
tccccatgacatttg

SEQ ID NO: 151823 - DNA, 15 bp, Homo sapiens
gtccccatgacattt

SEQ ID NO: 151824 - DNA, 15 bp, Homo sapiens
tgtccccatgacatt

SEQ ID NO: 151825 - DNA, 15 bp, Homo sapiens
atgtccccatgacat

SEQ ID NO: 151826 - DNA, 15 bp, Homo sapiens
aatgtccccatgaca

SEQ ID NO: 151827 - DNA, 15 bp, Homo sapiens
gaatgtccccatgac

SEQ ID NO: 151828 - DNA, 15 bp, Homo sapiens
agaatgtccccatga

SEQ ID NO: 151829 - DNA, 15 bp, Homo sapiens
gagaatgtccccatg

SEQ ID NO: 151830 - DNA, 15 bp, Homo sapiens
tgagaatgtccccat

SEQ ID NO: 151831 - DNA, 15 bp, Homo sapiens
atgagaatgtcccca

SEQ ID NO: 151832 - DNA, 15 bp, Homo sapiens
gatgagaatgtcccc

SEQ ID NO: 151833 - DNA, 15 bp, Homo sapiens
agatgagaatgtccc

SEQ ID NO: 151834 - DNA, 15 bp, Homo sapiens
aagatgagaatgtcc

SEQ ID NO: 151835 - DNA, 15 bp, Homo sapiens
aaagatgagaatgtc

SEQ ID NO: 151836 - DNA, 15 bp, Homo sapiens
caaagatgagaatgt

SEQ ID NO: 151837 - DNA, 15 bp, Homo sapiens
ccaaagatgagaatg

SEQ ID NO: 151838 - DNA, 15 bp, Homo sapiens
accaaagatgagaat

SEQ ID NO: 151839 - DNA, 15 bp, Homo sapiens
taccaaagatgagaa

SEQ ID NO: 151840 - DNA, 15 bp, Homo sapiens
ctaccaaagatgaga

SEQ ID NO: 151841 - DNA, 15 bp, Homo sapiens
gctaccaaagatgag

SEQ ID NO: 151842 - DNA, 15 bp, Homo sapiens
tgctaccaaagatga

SEQ ID NO: 151843 - DNA, 15 bp, Homo sapiens
ctgctaccaaagatg

SEQ ID NO: 151844 - DNA, 15 bp, Homo sapiens
cctgctaccaaagat

SEQ ID NO: 151845 - DNA, 15 bp, Homo sapiens
ccctgctaccaaaga

SEQ ID NO: 151846 - DNA, 15 bp, Homo sapiens
tccctgctaccaaag

SEQ ID NO: 151847 - DNA, 15 bp, Homo sapiens
ctccctgctaccaaa

SEQ ID NO: 151848 - DNA, 15 bp, Homo sapiens
gctccctgctaccaa

SEQ ID NO: 151849 - DNA, 15 bp, Homo sapiens
agctccctgctacca

SEQ ID NO: 151850 - DNA, 15 bp, Homo sapiens
gagctccctgctacc

SEQ ID NO: 151851 - DNA, 15 bp, Homo sapiens
tgagctccctgctac

SEQ ID NO: 151852 - DNA, 15 bp, Homo sapiens
gtgagctccctgcta

SEQ ID NO: 151853 - DNA, 15 bp, Homo sapiens
agtgagctccctgct

SEQ ID NO: 151854 - DNA, 15 bp, Homo sapiens
cagtgagctccctgc

SEQ ID NO: 151855 - DNA, 15 bp, Homo sapiens
gcagtgagctccctg

SEQ ID NO: 151856 - DNA, 15 bp, Homo sapiens
ggcagtgagctccct

SEQ ID NO: 151857 - DNA, 15 bp, Homo sapiens
aggcagtgagctccc

SEQ ID NO: 151858 - DNA, 15 bp, Homo sapiens
gaggcagtgagctcc

SEQ ID NO: 151859 - DNA, 15 bp, Homo sapiens
ggaggcagtgagctc

SEQ ID NO: 151860 - DNA, 15 bp, Homo sapiens
aggaggcagtgagct

SEQ ID NO: 151861 - DNA, 15 bp, Homo sapiens
taggaggcagtgagc

SEQ ID NO: 151862 - DNA, 15 bp, Homo sapiens
ctaggaggcagtgag

SEQ ID NO: 151863 - DNA, 15 bp, Homo sapiens
cctaggaggcagtga

SEQ ID NO: 151864 - DNA, 15 bp, Homo sapiens
acctaggaggcagtg

SEQ ID NO: 151865 - DNA, 15 bp, Homo sapiens
tacctaggaggcagt

SEQ ID NO: 151866 - DNA, 15 bp, Homo sapiens
atacctaggaggcag

SEQ ID NO: 151867 - DNA, 15 bp, Homo sapiens
catacctaggaggca

SEQ ID NO: 151868 - DNA, 15 bp, Homo sapiens
acatacctaggaggc

SEQ ID NO: 151869 - DNA, 15 bp, Homo sapiens
aacatacctaggagg

SEQ ID NO: 151870 - DNA, 15 bp, Homo sapiens
caacatacctaggag

SEQ ID NO: 151871 - DNA, 15 bp, Homo sapiens
acaacatacctagga

SEQ ID NO: 151872 - DNA, 15 bp, Homo sapiens
aacaacatacctagg

SEQ ID NO: 151873 - DNA, 15 bp, Homo sapiens
gaacaacatacctag

SEQ ID NO: 151874 - DNA, 15 bp, Homo sapiens
ggaacaacataccta

SEQ ID NO: 151875 - DNA, 15 bp, Homo sapiens
tggaacaacatacct

SEQ ID NO: 151876 - DNA, 15 bp, Homo sapiens
atggaacaacatacc

SEQ ID NO: 151877 - DNA, 15 bp, Homo sapiens
aatggaacaacatac

SEQ ID NO: 151878 - DNA, 15 bp, Homo sapiens
aaatggaacaacata

SEQ ID NO: 151879 - DNA, 15 bp, Homo sapiens
aaaatggaacaacat

SEQ ID NO: 151880 - DNA, 15 bp, Homo sapiens
caaaatggaacaaca

SEQ ID NO: 151881 - DNA, 15 bp, Homo sapiens
ccaaaatggaacaac

SEQ ID NO: 151882 - DNA, 15 bp, Homo sapiens
tccaaaatggaacaa

SEQ ID NO: 151883 - DNA, 15 bp, Homo sapiens
ttccaaaatggaaca

SEQ ID NO: 151884 - DNA, 15 bp, Homo sapiens
attccaaaatggaac

SEQ ID NO: 151885 - DNA, 15 bp, Homo sapiens
tattccaaaatggaa

SEQ ID NO: 151886 - DNA, 15 bp, Homo sapiens
ctattccaaaatgga

SEQ ID NO: 151887 - DNA, 15 bp, Homo sapiens
gctattccaaaatgg

SEQ ID NO: 151888 - DNA, 15 bp, Homo sapiens
agctattccaaaatg

SEQ ID NO: 151889 - DNA, 15 bp, Homo sapiens
aagctattccaaaat

SEQ ID NO: 151890 - DNA, 15 bp, Homo sapiens
gaagctattccaaaa

SEQ ID NO: 151891 - DNA, 15 bp, Homo sapiens
tgaagctattccaaa

SEQ ID NO: 151892 - DNA, 15 bp, Homo sapiens
atgaagctattccaa

SEQ ID NO: 151893 - DNA, 15 bp, Homo sapiens
catgaagctattcca

SEQ ID NO: 151894 - DNA, 15 bp, Homo sapiens
acatgaagctattcc

SEQ ID NO: 151895 - DNA, 15 bp, Homo sapiens
cacatgaagctattc

SEQ ID NO: 151896 - DNA, 15 bp, Homo sapiens
tcacatgaagctatt

SEQ ID NO: 151897 - DNA, 15 bp, Homo sapiens
ttcacatgaagctat

SEQ ID NO: 151898 - DNA, 15 bp, Homo sapiens
attcacatgaagcta

SEQ ID NO: 151899 - DNA, 15 bp, Homo sapiens
gattcacatgaagct

SEQ ID NO: 151900 - DNA, 15 bp, Homo sapiens
agattcacatgaagc

SEQ ID NO: 151901 - DNA, 15 bp, Homo sapiens
aagattcacatgaag

SEQ ID NO: 151902 - DNA, 15 bp, Homo sapiens
taagattcacatgaa

SEQ ID NO: 151903 - DNA, 15 bp, Homo sapiens
ctaagattcacatga

SEQ ID NO: 151904 - DNA, 15 bp, Homo sapiens
gctaagattcacatg

SEQ ID NO: 151905 - DNA, 15 bp, Homo sapiens
tgctaagattcacat

SEQ ID NO: 151906 - DNA, 15 bp, Homo sapiens
atgctaagattcaca

SEQ ID NO: 151907 - DNA, 15 bp, Homo sapiens
catgctaagattcac

SEQ ID NO: 151908 - DNA, 15 bp, Homo sapiens
acatgctaagattca

SEQ ID NO: 151909 - DNA, 15 bp, Homo sapiens
cacatgctaagattc

SEQ ID NO: 151910 - DNA, 15 bp, Homo sapiens
gcacatgctaagatt

SEQ ID NO: 151911 - DNA, 15 bp, Homo sapiens
ggcacatgctaagat

SEQ ID NO: 151912 - DNA, 15 bp, Homo sapiens
tggcacatgctaaga

SEQ ID NO: 151913 - DNA, 15 bp, Homo sapiens
ttggcacatgctaag

SEQ ID NO: 151914 - DNA, 15 bp, Homo sapiens
cttggcacatgctaa

SEQ ID NO: 151915 - DNA, 15 bp, Homo sapiens
ccttggcacatgcta

SEQ ID NO: 151916 - DNA, 15 bp, Homo sapiens
accttggcacatgct

SEQ ID NO: 151917 - DNA, 15 bp, Homo sapiens
caccttggcacatgc

SEQ ID NO: 151918 - DNA, 15 bp, Homo sapiens
ccaccttggcacatg

SEQ ID NO: 151919 - DNA, 15 bp, Homo sapiens
tccaccttggcacat

SEQ ID NO: 151920 - DNA, 15 bp, Homo sapiens
atccaccttggcaca

SEQ ID NO: 151921 - DNA, 15 bp, Homo sapiens
catccaccttggcac

SEQ ID NO: 151922 - DNA, 15 bp, Homo sapiens
acatccaccttggca

SEQ ID NO: 151923 - DNA, 15 bp, Homo sapiens
cacatccaccttggc

SEQ ID NO: 151924 - DNA, 15 bp, Homo sapiens
ccacatccaccttgg

SEQ ID NO: 151925 - DNA, 15 bp, Homo sapiens
tccacatccaccttg

SEQ ID NO: 151926 - DNA, 15 bp, Homo sapiens
ctccacatccacctt

SEQ ID NO: 151927 - DNA, 15 bp, Homo sapiens
actccacatccacct

SEQ ID NO: 151928 - DNA, 15 bp, Homo sapiens
gactccacatccacc

SEQ ID NO: 151929 - DNA, 15 bp, Homo sapiens
agactccacatccac

SEQ ID NO: 151930 - DNA, 15 bp, Homo sapiens
aagactccacatcca

SEQ ID NO: 151931 - DNA, 15 bp, Homo sapiens
aaagactccacatcc

SEQ ID NO: 151932 - DNA, 15 bp, Homo sapiens
caaagactccacatc

SEQ ID NO: 151933 - DNA, 15 bp, Homo sapiens
gcaaagactccacat

SEQ ID NO: 151934 - DNA, 15 bp, Homo sapiens
tgcaaagactccaca

SEQ ID NO: 151935 - DNA, 15 bp, Homo sapiens
atgcaaagactccac

SEQ ID NO: 151936 - DNA, 15 bp, Homo sapiens
gatgcaaagactcca

SEQ ID NO: 151937 - DNA, 15 bp, Homo sapiens
tgatgcaaagactcc

SEQ ID NO: 151938 - DNA, 15 bp, Homo sapiens
ctgatgcaaagactc

SEQ ID NO: 151939 - DNA, 15 bp, Homo sapiens
tctgatgcaaagact

SEQ ID NO: 151940 - DNA, 15 bp, Homo sapiens
ttctgatgcaaagac

SEQ ID NO: 151941 - DNA, 15 bp, Homo sapiens
attctgatgcaaaga

SEQ ID NO: 151942 - DNA, 15 bp, Homo sapiens
gattctgatgcaaag

SEQ ID NO: 151943 - DNA, 15 bp, Homo sapiens
ggattctgatgcaaa

SEQ ID NO: 151944 - DNA, 15 bp, Homo sapiens
aggattctgatgcaa

SEQ ID NO: 151945 - DNA, 15 bp, Homo sapiens
caggattctgatgca

SEQ ID NO: 151946 - DNA, 15 bp, Homo sapiens
tcaggattctgatgc

SEQ ID NO: 151947 - DNA, 15 bp, Homo sapiens
ttcaggattctgatg

SEQ ID NO: 151948 - DNA, 15 bp, Homo sapiens
gttcaggattctgat

SEQ ID NO: 151949 - DNA, 15 bp, Homo sapiens
agttcaggattctga

SEQ ID NO: 151950 - DNA, 15 bp, Homo sapiens
cagttcaggattctg

SEQ ID NO: 151951 - DNA, 15 bp, Homo sapiens
gcagttcaggattct

SEQ ID NO: 151952 - DNA, 15 bp, Homo sapiens
agcagttcaggattc

SEQ ID NO: 151953 - DNA, 15 bp, Homo sapiens
gagcagttcaggatt

SEQ ID NO: 151954 - DNA, 15 bp, Homo sapiens
tgagcagttcaggat

SEQ ID NO: 151955 - DNA, 15 bp, Homo sapiens
atgagcagttcagga

SEQ ID NO: 151956 - DNA, 15 bp, Homo sapiens
gatgagcagttcagg

SEQ ID NO: 151957 - DNA, 15 bp, Homo sapiens
ggatgagcagttcag

SEQ ID NO: 151958 - DNA, 15 bp, Homo sapiens
aggatgagcagttca

SEQ ID NO: 151959 - DNA, 15 bp, Homo sapiens
caggatgagcagttc

SEQ ID NO: 151960 - DNA, 15 bp, Homo sapiens
tcaggatgagcagtt

SEQ ID NO: 151961 - DNA, 15 bp, Homo sapiens
ttcaggatgagcagt

SEQ ID NO: 151962 - DNA, 15 bp, Homo sapiens
tttcaggatgagcag

SEQ ID NO: 151963 - DNA, 15 bp, Homo sapiens
ttttcaggatgagca

SEQ ID NO: 151964 - DNA, 15 bp, Homo sapiens
tttttcaggatgagc

SEQ ID NO: 151965 - DNA, 15 bp, Homo sapiens
ttttttcaggatgag

SEQ ID NO: 151966 - DNA, 15 bp, Homo sapiens
attttttcaggatga

SEQ ID NO: 151967 - DNA, 15 bp, Homo sapiens
cattttttcaggatg

SEQ ID NO: 151968 - DNA, 15 bp, Homo sapiens
tcattttttcaggat

SEQ ID NO: 151969 - DNA, 15 bp, Homo sapiens
atcattttttcagga

SEQ ID NO: 151970 - DNA, 15 bp, Homo sapiens
catcattttttcagg

SEQ ID NO: 151971 - DNA, 15 bp, Homo sapiens
gcatcattttttcag

SEQ ID NO: 151972 - DNA, 15 bp, Homo sapiens
cgcatcattttttca

SEQ ID NO: 151973 - DNA, 15 bp, Homo sapiens
tcgcatcattttttc

SEQ ID NO: 151974 - DNA, 15 bp, Homo sapiens
atcgcatcatttttt

SEQ ID NO: 151975 - DNA, 15 bp, Homo sapiens
gatcgcatcattttt

SEQ ID NO: 151976 - DNA, 15 bp, Homo sapiens
tgatcgcatcatttt

SEQ ID NO: 151977 - DNA, 15 bp, Homo sapiens
ctgatcgcatcattt

SEQ ID NO: 151978 - DNA, 15 bp, Homo sapiens
gctgatcgcatcatt

SEQ ID NO: 151979 - DNA, 15 bp, Homo sapiens
ggctgatcgcatcat

SEQ ID NO: 151980 - DNA, 15 bp, Homo sapiens
aggctgatcgcatca

SEQ ID NO: 151981 - DNA, 15 bp, Homo sapiens
caggctgatcgcatc

SEQ ID NO: 151982 - DNA, 15 bp, Homo sapiens
gcaggctgatcgcat

SEQ ID NO: 151983 - DNA, 15 bp, Homo sapiens
agcaggctgatcgca

SEQ ID NO: 151984 - DNA, 15 bp, Homo sapiens
aagcaggctgatcgc

SEQ ID NO: 151985 - DNA, 15 bp, Homo sapiens
gaagcaggctgatcg

SEQ ID NO: 151986 - DNA, 15 bp, Homo sapiens
ggaagcaggctgatc

SEQ ID NO: 151987 - DNA, 15 bp, Homo sapiens
gggaagcaggctgat

SEQ ID NO: 151988 - DNA, 15 bp, Homo sapiens
tgggaagcaggctga

SEQ ID NO: 151989 - DNA, 15 bp, Homo sapiens
gtgggaagcaggctg

SEQ ID NO: 151990 - DNA, 15 bp, Homo sapiens
tgtgggaagcaggct

SEQ ID NO: 151991 - DNA, 15 bp, Homo sapiens
ctgtgggaagcaggc

SEQ ID NO: 151992 - DNA, 15 bp, Homo sapiens
gctgtgggaagcagg

SEQ ID NO: 151993 - DNA, 15 bp, Homo sapiens
cgctgtgggaagcag

SEQ ID NO: 151994 - DNA, 15 bp, Homo sapiens
acgctgtgggaagca

SEQ ID NO: 151995 - DNA, 15 bp, Homo sapiens
tacgctgtgggaagc

SEQ ID NO: 151996 - DNA, 15 bp, Homo sapiens
atacgctgtgggaag

SEQ ID NO: 151997 - DNA, 15 bp, Homo sapiens
catacgctgtgggaa

SEQ ID NO: 151998 - DNA, 15 bp, Homo sapiens
gcatacgctgtggga

SEQ ID NO: 151999 - DNA, 15 bp, Homo sapiens
agcatacgctgtggg

SEQ ID NO: 152000 - DNA, 15 bp, Homo sapiens
gagcatacgctgtgg

SEQ ID NO: 152001 - DNA, 15 bp, Homo sapiens
tgagcatacgctgtg

SEQ ID NO: 152002 - DNA, 15 bp, Homo sapiens
ctgagcatacgctgt

SEQ ID NO: 152003 - DNA, 15 bp, Homo sapiens
cctgagcatacgctg

SEQ ID NO: 152004 - DNA, 15 bp, Homo sapiens
ccctgagcatacgct

SEQ ID NO: 152005 - DNA, 15 bp, Homo sapiens
accctgagcatacgc

SEQ ID NO: 152006 - DNA, 15 bp, Homo sapiens
caccctgagcatacg

SEQ ID NO: 152007 - DNA, 15 bp, Homo sapiens
tcaccctgagcatac

SEQ ID NO: 152008 - DNA, 15 bp, Homo sapiens
gtcaccctgagcata

SEQ ID NO: 152009 - DNA, 15 bp, Homo sapiens
agtcaccctgagcat

SEQ ID NO: 152010 - DNA, 15 bp, Homo sapiens
aagtcaccctgagca

SEQ ID NO: 152011 - DNA, 15 bp, Homo sapiens
gaagtcaccctgagc

SEQ ID NO: 152012 - DNA, 15 bp, Homo sapiens
agaagtcaccctgag

SEQ ID NO: 152013 - DNA, 15 bp, Homo sapiens
aagaagtcaccctga

SEQ ID NO: 152014 - DNA, 15 bp, Homo sapiens
caagaagtcaccctg

SEQ ID NO: 152015 - DNA, 15 bp, Homo sapiens
acaagaagtcaccct

SEQ ID NO: 152016 - DNA, 15 bp, Homo sapiens
cacaagaagtcaccc

SEQ ID NO: 152017 - DNA, 15 bp, Homo sapiens
tcacaagaagtcacc

SEQ ID NO: 152018 - DNA, 15 bp, Homo sapiens
gtcacaagaagtcac

SEQ ID NO: 152019 - DNA, 15 bp, Homo sapiens
tgtcacaagaagtca

SEQ ID NO: 152020 - DNA, 15 bp, Homo sapiens
atgtcacaagaagtc

SEQ ID NO: 152021 - DNA, 15 bp, Homo sapiens
catgtcacaagaagt

SEQ ID NO: 152022 - DNA, 15 bp, Homo sapiens
ccatgtcacaagaag

SEQ ID NO: 152023 - DNA, 15 bp, Homo sapiens
tccatgtcacaagaa

SEQ ID NO: 152024 - DNA, 15 bp, Homo sapiens
ctccatgtcacaaga

SEQ ID NO: 152025 - DNA, 15 bp, Homo sapiens
tctccatgtcacaag

SEQ ID NO: 152026 - DNA, 15 bp, Homo sapiens
atctccatgtcacaa

SEQ ID NO: 152027 - DNA, 15 bp, Homo sapiens
catctccatgtcaca

SEQ ID NO: 152028 - DNA, 15 bp, Homo sapiens
ccatctccatgtcac

SEQ ID NO: 152029 - DNA, 15 bp, Homo sapiens
accatctccatgtca

SEQ ID NO: 152030 - DNA, 15 bp, Homo sapiens
aaccatctccatgtc

SEQ ID NO: 152031 - DNA, 15 bp, Homo sapiens
caaccatctccatgt

SEQ ID NO: 152032 - DNA, 15 bp, Homo sapiens
ccaaccatctccatg

SEQ ID NO: 152033 - DNA, 15 bp, Homo sapiens
gccaaccatctccat

SEQ ID NO: 152034 - DNA, 15 bp, Homo sapiens
tgccaaccatctcca

SEQ ID NO: 152035 - DNA, 15 bp, Homo sapiens
ctgccaaccatctcc

SEQ ID NO: 152036 - DNA, 15 bp, Homo sapiens
actgccaaccatctc

SEQ ID NO: 152037 - DNA, 15 bp, Homo sapiens
cactgccaaccatct

SEQ ID NO: 152038 - DNA, 15 bp, Homo sapiens
tcactgccaaccatc

SEQ ID NO: 152039 - DNA, 15 bp, Homo sapiens
ctcactgccaaccat

SEQ ID NO: 152040 - DNA, 15 bp, Homo sapiens
gctcactgccaacca

SEQ ID NO: 152041 - DNA, 15 bp, Homo sapiens
agctcactgccaacc

SEQ ID NO: 152042 - DNA, 15 bp, Homo sapiens
aagctcactgccaac

SEQ ID NO: 152043 - DNA, 15 bp, Homo sapiens
aaagctcactgccaa

SEQ ID NO: 152044 - DNA, 15 bp, Homo sapiens
gaaagctcactgcca

SEQ ID NO: 152045 - DNA, 15 bp, Homo sapiens
agaaagctcactgcc

SEQ ID NO: 152046 - DNA, 15 bp, Homo sapiens
gagaaagctcactgc

SEQ ID NO: 152047 - DNA, 15 bp, Homo sapiens
agagaaagctcactg

SEQ ID NO: 152048 - DNA, 15 bp, Homo sapiens
aagagaaagctcact

SEQ ID NO: 152049 - DNA, 15 bp, Homo sapiens
caagagaaagctcac

SEQ ID NO: 152050 - DNA, 15 bp, Homo sapiens
acaagagaaagctca

SEQ ID NO: 152051 - DNA, 15 bp, Homo sapiens
cacaagagaaagctc

SEQ ID NO: 152052 - DNA, 15 bp, Homo sapiens
tcacaagagaaagct

SEQ ID NO: 152053 - DNA, 15 bp, Homo sapiens
gtcacaagagaaagc

SEQ ID NO: 152054 - DNA, 15 bp, Homo sapiens
agtcacaagagaaag

SEQ ID NO: 152055 - DNA, 15 bp, Homo sapiens
aagtcacaagagaaa

SEQ ID NO: 152056 - DNA, 15 bp, Homo sapiens
gaagtcacaagagaa

SEQ ID NO: 152057 - DNA, 15 bp, Homo sapiens
tgaagtcacaagaga

SEQ ID NO: 152058 - DNA, 15 bp, Homo sapiens
gtgaagtcacaagag

SEQ ID NO: 152059 - DNA, 15 bp, Homo sapiens
tgtgaagtcacaaga

SEQ ID NO: 152060 - DNA, 15 bp, Homo sapiens
gtgtgaagtcacaag

SEQ ID NO: 152061 - DNA, 15 bp, Homo sapiens
tgtgtgaagtcacaa

SEQ ID NO: 152062 - DNA, 15 bp, Homo sapiens
ctgtgtgaagtcaca

SEQ ID NO: 152063 - DNA, 15 bp, Homo sapiens
cctgtgtgaagtcac

SEQ ID NO: 152064 - DNA, 15 bp, Homo sapiens
ccctgtgtgaagtca

SEQ ID NO: 152065 - DNA, 15 bp, Homo sapiens
tccctgtgtgaagtc

SEQ ID NO: 152066 - DNA, 15 bp, Homo sapiens
gtccctgtgtgaagt

SEQ ID NO: 152067 - DNA, 15 bp, Homo sapiens
tgtccctgtgtgaag

SEQ ID NO: 152068 - DNA, 15 bp, Homo sapiens
ttgtccctgtgtgaa

SEQ ID NO: 152069 - DNA, 15 bp, Homo sapiens
cttgtccctgtgtga

SEQ ID NO: 152070 - DNA, 15 bp, Homo sapiens
acttgtccctgtgtg

SEQ ID NO: 152071 - DNA, 15 bp, Homo sapiens
gacttgtccctgtgt

SEQ ID NO: 152072 - DNA, 15 bp, Homo sapiens
agacttgtccctgtg

SEQ ID NO: 152073 - DNA, 15 bp, Homo sapiens
cagacttgtccctgt

SEQ ID NO: 152074 - DNA, 15 bp, Homo sapiens
acagacttgtccctg

SEQ ID NO: 152075 - DNA, 15 bp, Homo sapiens
cacagacttgtccct

SEQ ID NO: 152076 - DNA, 15 bp, Homo sapiens
ccacagacttgtccc

SEQ ID NO: 152077 - DNA, 15 bp, Homo sapiens
gccacagacttgtcc

SEQ ID NO: 152078 - DNA, 15 bp, Homo sapiens
tgccacagacttgtc

SEQ ID NO: 152079 - DNA, 15 bp, Homo sapiens
atgccacagacttgt

SEQ ID NO: 152080 - DNA, 15 bp, Homo sapiens
aatgccacagacttg

SEQ ID NO: 152081 - DNA, 15 bp, Homo sapiens
aaatgccacagactt

SEQ ID NO: 152082 - DNA, 15 bp, Homo sapiens
aaaatgccacagact

SEQ ID NO: 152083 - DNA, 15 bp, Homo sapiens
taaaatgccacagac

SEQ ID NO: 152084 - DNA, 15 bp, Homo sapiens
ttaaaatgccacaga

SEQ ID NO: 152085 - DNA, 15 bp, Homo sapiens
cttaaaatgccacag

SEQ ID NO: 152086 - DNA, 15 bp, Homo sapiens
ccttaaaatgccaca

SEQ ID NO: 152087 - DNA, 15 bp, Homo sapiens
tccttaaaatgccac

SEQ ID NO: 152088 - DNA, 15 bp, Homo sapiens
gtccttaaaatgcca

SEQ ID NO: 152089 - DNA, 15 bp, Homo sapiens
agtccttaaaatgcc

SEQ ID NO: 152090 - DNA, 15 bp, Homo sapiens
tagtccttaaaatgc

SEQ ID NO: 152091 - DNA, 15 bp, Homo sapiens
ctagtccttaaaatg

SEQ ID NO: 152092 - DNA, 15 bp, Homo sapiens
actagtccttaaaat

SEQ ID NO: 152093 - DNA, 15 bp, Homo sapiens
cactagtccttaaaa

SEQ ID NO: 152094 - DNA, 15 bp, Homo sapiens
tcactagtccttaaa

SEQ ID NO: 152095 - DNA, 15 bp, Homo sapiens
ctcactagtccttaa

SEQ ID NO: 152096 - DNA, 15 bp, Homo sapiens
tctcactagtcctta

SEQ ID NO: 152097 - DNA, 15 bp, Homo sapiens
ctctcactagtcctt

SEQ ID NO: 152098 - DNA, 15 bp, Homo sapiens
actctcactagtcct

SEQ ID NO: 152099 - DNA, 15 bp, Homo sapiens
aactctcactagtcc

SEQ ID NO: 152100 - DNA, 15 bp, Homo sapiens
gaactctcactagtc

SEQ ID NO: 152101 - DNA, 15 bp, Homo sapiens
tgaactctcactagt

SEQ ID NO: 152102 - DNA, 15 bp, Homo sapiens
ctgaactctcactag

SEQ ID NO: 152103 - DNA, 15 bp, Homo sapiens
cctgaactctcacta

SEQ ID NO: 152104 - DNA, 15 bp, Homo sapiens
tcctgaactctcact

SEQ ID NO: 152105 - DNA, 15 bp, Homo sapiens
atcctgaactctcac

SEQ ID NO: 152106 - DNA, 15 bp, Homo sapiens
catcctgaactctca

SEQ ID NO: 152107 - DNA, 15 bp, Homo sapiens
ccatcctgaactctc

SEQ ID NO: 152108 - DNA, 15 bp, Homo sapiens
tccatcctgaactct

SEQ ID NO: 152109 - DNA, 15 bp, Homo sapiens
ctccatcctgaactc

SEQ ID NO: 152110 - DNA, 15 bp, Homo sapiens
cctccatcctgaact

SEQ ID NO: 152111 - DNA, 15 bp, Homo sapiens
acctccatcctgaac

SEQ ID NO: 152112 - DNA, 15 bp, Homo sapiens
cacctccatcctgaa

SEQ ID NO: 152113 - DNA, 15 bp, Homo sapiens
tcacctccatcctga

SEQ ID NO: 152114 - DNA, 15 bp, Homo sapiens
ttcacctccatcctg

SEQ ID NO: 152115 - DNA, 15 bp, Homo sapiens
cttcacctccatcct

SEQ ID NO: 152116 - DNA, 15 bp, Homo sapiens
ccttcacctccatcc

SEQ ID NO: 152117 - DNA, 15 bp, Homo sapiens
tccttcacctccatc

SEQ ID NO: 152118 - DNA, 15 bp, Homo sapiens
ctccttcacctccat

SEQ ID NO: 152119 - DNA, 15 bp, Homo sapiens
tctccttcacctcca

SEQ ID NO: 152120 - DNA, 15 bp, Homo sapiens
atctccttcacctcc

SEQ ID NO: 152121 - DNA, 15 bp, Homo sapiens
aatctccttcacctc

SEQ ID NO: 152122 - DNA, 15 bp, Homo sapiens
caatctccttcacct

SEQ ID NO: 152123 - DNA, 15 bp, Homo sapiens
ccaatctccttcacc

SEQ ID NO: 152124 - DNA, 15 bp, Homo sapiens
gccaatctccttcac

SEQ ID NO: 152125 - DNA, 15 bp, Homo sapiens
ggccaatctccttca

SEQ ID NO: 152126 - DNA, 15 bp, Homo sapiens
gggccaatctccttc

SEQ ID NO: 152127 - DNA, 15 bp, Homo sapiens
tgggccaatctcctt

SEQ ID NO: 152128 - DNA, 15 bp, Homo sapiens
ctgggccaatctcct

SEQ ID NO: 152129 - DNA, 15 bp, Homo sapiens
tctgggccaatctcc

SEQ ID NO: 152130 - DNA, 15 bp, Homo sapiens
ctctgggccaatctc

SEQ ID NO: 152131 - DNA, 15 bp, Homo sapiens
tctctgggccaatct

SEQ ID NO: 152132 - DNA, 15 bp, Homo sapiens
ctctctgggccaatc

SEQ ID NO: 152133 - DNA, 15 bp, Homo sapiens
gctctctgggccaat

SEQ ID NO: 152134 - DNA, 15 bp, Homo sapiens
agctctctgggccaa

SEQ ID NO: 152135 - DNA, 15 bp, Homo sapiens
tagctctctgggcca

SEQ ID NO: 152136 - DNA, 15 bp, Homo sapiens
gtagctctctgggcc

SEQ ID NO: 152137 - DNA, 15 bp, Homo sapiens
tgtagctctctgggc

SEQ ID NO: 152138 - DNA, 15 bp, Homo sapiens
ctgtagctctctggg

SEQ ID NO: 152139 - DNA, 15 bp, Homo sapiens
tctgtagctctctgg

SEQ ID NO: 152140 - DNA, 15 bp, Homo sapiens
ctctgtagctctctg

SEQ ID NO: 152141 - DNA, 15 bp, Homo sapiens
actctgtagctctct

SEQ ID NO: 152142 - DNA, 15 bp, Homo sapiens
aactctgtagctctc

SEQ ID NO: 152143 - DNA, 15 bp, Homo sapiens
caactctgtagctct

SEQ ID NO: 152144 - DNA, 15 bp, Homo sapiens
tcaactctgtagctc

SEQ ID NO: 152145 - DNA, 15 bp, Homo sapiens
ctcaactctgtagct

SEQ ID NO: 152146 - DNA, 15 bp, Homo sapiens
cctcaactctgtagc

SEQ ID NO: 152147 - DNA, 15 bp, Homo sapiens
tcctcaactctgtag

SEQ ID NO: 152148 - DNA, 15 bp, Homo sapiens
ctcctcaactctgta

SEQ ID NO: 152149 - DNA, 15 bp, Homo sapiens
tctcctcaactctgt

SEQ ID NO: 152150 - DNA, 15 bp, Homo sapiens
ctctcctcaactctg

SEQ ID NO: 152151 - DNA, 15 bp, Homo sapiens
cctctcctcaactct

SEQ ID NO: 152152 - DNA, 15 bp, Homo sapiens
tcctctcctcaactc

SEQ ID NO: 152153 - DNA, 15 bp, Homo sapiens
ctcctctcctcaact

SEQ ID NO: 152154 - DNA, 15 bp, Homo sapiens
cctcctctcctcaac

SEQ ID NO: 152155 - DNA, 15 bp, Homo sapiens
ccctcctctcctcaa

SEQ ID NO: 152156 - DNA, 15 bp, Homo sapiens
cccctcctctcctca

SEQ ID NO: 152157 - DNA, 15 bp, Homo sapiens
acccctcctctcctc

SEQ ID NO: 152158 - DNA, 15 bp, Homo sapiens
cacccctcctctcct

SEQ ID NO: 152159 - DNA, 15 bp, Homo sapiens
ccacccctcctctcc

SEQ ID NO: 152160 - DNA, 15 bp, Homo sapiens
gccacccctcctctc

SEQ ID NO: 152161 - DNA, 15 bp, Homo sapiens
tgccacccctcctct

SEQ ID NO: 152162 - DNA, 15 bp, Homo sapiens
gtgccacccctcctc

SEQ ID NO: 152163 - DNA, 15 bp, Homo sapiens
tgtgccacccctcct

SEQ ID NO: 152164 - DNA, 15 bp, Homo sapiens
gtgtgccacccctcc

SEQ ID NO: 152165 - DNA, 15 bp, Homo sapiens
tgtgtgccacccctc

SEQ ID NO: 152166 - DNA, 15 bp, Homo sapiens
ctgtgtgccacccct

SEQ ID NO: 152167 - DNA, 15 bp, Homo sapiens
cctgtgtgccacccc

SEQ ID NO: 152168 - DNA, 15 bp, Homo sapiens
tcctgtgtgccaccc

SEQ ID NO: 152169 - DNA, 15 bp, Homo sapiens
ctcctgtgtgccacc

SEQ ID NO: 152170 - DNA, 15 bp, Homo sapiens
cctcctgtgtgccac

SEQ ID NO: 152171 - DNA, 15 bp, Homo sapiens
tcctcctgtgtgcca

SEQ ID NO: 152172 - DNA, 15 bp, Homo sapiens
gtcctcctgtgtgcc

SEQ ID NO: 152173 - DNA, 15 bp, Homo sapiens
cgtcctcctgtgtgc

SEQ ID NO: 152174 - DNA, 15 bp, Homo sapiens
ccgtcctcctgtgtg

SEQ ID NO: 152175 - DNA, 15 bp, Homo sapiens
tccgtcctcctgtgt

SEQ ID NO: 152176 - DNA, 15 bp, Homo sapiens
gtccgtcctcctgtg

SEQ ID NO: 152177 - DNA, 15 bp, Homo sapiens
ggtccgtcctcctgt

SEQ ID NO: 152178 - DNA, 15 bp, Homo sapiens
tggtccgtcctcctg

SEQ ID NO: 152179 - DNA, 15 bp, Homo sapiens
atggtccgtcctcct

SEQ ID NO: 152180 - DNA, 15 bp, Homo sapiens
gatggtccgtcctcc

SEQ ID NO: 152181 - DNA, 15 bp, Homo sapiens
tgatggtccgtcctc

SEQ ID NO: 152182 - DNA, 15 bp, Homo sapiens
ctgatggtccgtcct

SEQ ID NO: 152183 - DNA, 15 bp, Homo sapiens
cctgatggtccgtcc

SEQ ID NO: 152184 - DNA, 15 bp, Homo sapiens
ccctgatggtccgtc

SEQ ID NO: 152185 - DNA, 15 bp, Homo sapiens
cccctgatggtccgt

SEQ ID NO: 152186 - DNA, 15 bp, Homo sapiens
gcccctgatggtccg

SEQ ID NO: 152187 - DNA, 15 bp, Homo sapiens
agcccctgatggtcc

SEQ ID NO: 152188 - DNA, 15 bp, Homo sapiens
gagcccctgatggtc

SEQ ID NO: 152189 - DNA, 15 bp, Homo sapiens
tgagcccctgatggt

SEQ ID NO: 152190 - DNA, 15 bp, Homo sapiens
ctgagcccctgatgg

SEQ ID NO: 152191 - DNA, 15 bp, Homo sapiens
cctgagcccctgatg

SEQ ID NO: 152192 - DNA, 15 bp, Homo sapiens
gcctgagcccctgat

SEQ ID NO: 152193 - DNA, 15 bp, Homo sapiens
agcctgagcccctga

SEQ ID NO: 152194 - DNA, 15 bp, Homo sapiens
cagcctgagcccctg

SEQ ID NO: 152195 - DNA, 15 bp, Homo sapiens
ccagcctgagcccct

SEQ ID NO: 152196 - DNA, 15 bp, Homo sapiens
gccagcctgagcccc

SEQ ID NO: 152197 - DNA, 15 bp, Homo sapiens
cgccagcctgagccc

SEQ ID NO: 152198 - DNA, 15 bp, Homo sapiens
ccgccagcctgagcc

SEQ ID NO: 152199 - DNA, 15 bp, Homo sapiens
gccgccagcctgagc

SEQ ID NO: 152200 - DNA, 15 bp, Homo sapiens
agccgccagcctgag

SEQ ID NO: 152201 - DNA, 15 bp, Homo sapiens
cagccgccagcctga

SEQ ID NO: 152202 - DNA, 15 bp, Homo sapiens
tcagccgccagcctg

SEQ ID NO: 152203 - DNA, 15 bp, Homo sapiens
ctcagccgccagcct

SEQ ID NO: 152204 - DNA, 15 bp, Homo sapiens
cctcagccgccagcc

SEQ ID NO: 152205 - DNA, 15 bp, Homo sapiens
acctcagccgccagc

SEQ ID NO: 152206 - DNA, 15 bp, Homo sapiens
cacctcagccgccag

SEQ ID NO: 152207 - DNA, 15 bp, Homo sapiens
ccacctcagccgcca

SEQ ID NO: 152208 - DNA, 15 bp, Homo sapiens
cccacctcagccgcc

SEQ ID NO: 152209 - DNA, 15 bp, Homo sapiens
tcccacctcagccgc

SEQ ID NO: 152210 - DNA, 15 bp, Homo sapiens
ctcccacctcagccg

SEQ ID NO: 152211 - DNA, 15 bp, Homo sapiens
actcccacctcagcc

SEQ ID NO: 152212 - DNA, 15 bp, Homo sapiens
cactcccacctcagc

SEQ ID NO: 152213 - DNA, 15 bp, Homo sapiens
ccactcccacctcag

SEQ ID NO: 152214 - DNA, 15 bp, Homo sapiens
accactcccacctca

SEQ ID NO: 152215 - DNA, 15 bp, Homo sapiens
caccactcccacctc

SEQ ID NO: 152216 - DNA, 15 bp, Homo sapiens
acaccactcccacct

SEQ ID NO: 152217 - DNA, 15 bp, Homo sapiens
gacaccactcccacc

SEQ ID NO: 152218 - DNA, 15 bp, Homo sapiens
tgacaccactcccac

SEQ ID NO: 152219 - DNA, 15 bp, Homo sapiens
atgacaccactccca

SEQ ID NO: 152220 - DNA, 15 bp, Homo sapiens
aatgacaccactccc

SEQ ID NO: 152221 - DNA, 15 bp, Homo sapiens
taatgacaccactcc

SEQ ID NO: 152222 - DNA, 15 bp, Homo sapiens
ataatgacaccactc

SEQ ID NO: 152223 - DNA, 15 bp, Homo sapiens
gataatgacaccact

SEQ ID NO: 152224 - DNA, 15 bp, Homo sapiens
agataatgacaccac

SEQ ID NO: 152225 - DNA, 15 bp, Homo sapiens
aagataatgacacca

SEQ ID NO: 152226 - DNA, 15 bp, Homo sapiens
gaagataatgacacc

SEQ ID NO: 152227 - DNA, 15 bp, Homo sapiens
ggaagataatgacac

SEQ ID NO: 152228 - DNA, 15 bp, Homo sapiens
cggaagataatgaca

SEQ ID NO: 152229 - DNA, 15 bp, Homo sapiens
ccggaagataatgac

SEQ ID NO: 152230 - DNA, 15 bp, Homo sapiens
cccggaagataatga

SEQ ID NO: 152231 - DNA, 15 bp, Homo sapiens
acccggaagataatg

SEQ ID NO: 152232 - DNA, 15 bp, Homo sapiens
gacccggaagataat

SEQ ID NO: 152233 - DNA, 15 bp, Homo sapiens
ggacccggaagataa

SEQ ID NO: 152234 - DNA, 15 bp, Homo sapiens
gggacccggaagata

SEQ ID NO: 152235 - DNA, 15 bp, Homo sapiens
tgggacccggaagat

SEQ ID NO: 152236 - DNA, 15 bp, Homo sapiens
ctgggacccggaaga

SEQ ID NO: 152237 - DNA, 15 bp, Homo sapiens
cctgggacccggaag

SEQ ID NO: 152238 - DNA, 15 bp, Homo sapiens
gcctgggacccggaa

SEQ ID NO: 152239 - DNA, 15 bp, Homo sapiens
ggcctgggacccgga

SEQ ID NO: 152240 - DNA, 15 bp, Homo sapiens
aggcctgggacccgg

SEQ ID NO: 152241 - DNA, 15 bp, Homo sapiens
aaggcctgggacccg

SEQ ID NO: 152242 - DNA, 15 bp, Homo sapiens
caaggcctgggaccc

SEQ ID NO: 152243 - DNA, 15 bp, Homo sapiens
acaaggcctgggacc

SEQ ID NO: 152244 - DNA, 15 bp, Homo sapiens
aacaaggcctgggac

SEQ ID NO: 152245 - DNA, 15 bp, Homo sapiens
gaacaaggcctggga

SEQ ID NO: 152246 - DNA, 15 bp, Homo sapiens
ggaacaaggcctggg

SEQ ID NO: 152247 - DNA, 15 bp, Homo sapiens
aggaacaaggcctgg

SEQ ID NO: 152248 - DNA, 15 bp, Homo sapiens
gaggaacaaggcctg

SEQ ID NO: 152249 - DNA, 15 bp, Homo sapiens
ggaggaacaaggcct

SEQ ID NO: 152250 - DNA, 15 bp, Homo sapiens
aggaggaacaaggcc

SEQ ID NO: 152251 - DNA, 15 bp, Homo sapiens
caggaggaacaaggc

SEQ ID NO: 152252 - DNA, 15 bp, Homo sapiens
tcaggaggaacaagg

SEQ ID NO: 152253 - DNA, 15 bp, Homo sapiens
gtcaggaggaacaag

SEQ ID NO: 152254 - DNA, 15 bp, Homo sapiens
ggtcaggaggaacaa

SEQ ID NO: 152255 - DNA, 15 bp, Homo sapiens
gggtcaggaggaaca

SEQ ID NO: 152256 - DNA, 15 bp, Homo sapiens
agggtcaggaggaac

SEQ ID NO: 152257 - DNA, 15 bp, Homo sapiens
cagggtcaggaggaa

SEQ ID NO: 152258 - DNA, 15 bp, Homo sapiens
tcagggtcaggagga

SEQ ID NO: 152259 - DNA, 15 bp, Homo sapiens
ttcagggtcaggagg

SEQ ID NO: 152260 - DNA, 15 bp, Homo sapiens
tttcagggtcaggag

SEQ ID NO: 152261 - DNA, 15 bp, Homo sapiens
ctttcagggtcagga

SEQ ID NO: 152262 - DNA, 15 bp, Homo sapiens
cctttcagggtcagg

SEQ ID NO: 152263 - DNA, 15 bp, Homo sapiens
gcctttcagggtcag

SEQ ID NO: 152264 - DNA, 15 bp, Homo sapiens
tgcctttcagggtca

SEQ ID NO: 152265 - DNA, 15 bp, Homo sapiens
ctgcctttcagggtc

SEQ ID NO: 152266 - DNA, 15 bp, Homo sapiens
actgcctttcagggt

SEQ ID NO: 152267 - DNA, 15 bp, Homo sapiens
tactgcctttcaggg

SEQ ID NO: 152268 - DNA, 15 bp, Homo sapiens
atactgcctttcagg

SEQ ID NO: 152269 - DNA, 15 bp, Homo sapiens
aatactgcctttcag

SEQ ID NO: 152270 - DNA, 15 bp, Homo sapiens
caatactgcctttca

SEQ ID NO: 152271 - DNA, 15 bp, Homo sapiens
ccaatactgcctttc

SEQ ID NO: 152272 - DNA, 15 bp, Homo sapiens
cccaatactgccttt

SEQ ID NO: 152273 - DNA, 15 bp, Homo sapiens
acccaatactgcctt

SEQ ID NO: 152274 - DNA, 15 bp, Homo sapiens
tacccaatactgcct

SEQ ID NO: 152275 - DNA, 15 bp, Homo sapiens
ctacccaatactgcc

SEQ ID NO: 152276 - DNA, 15 bp, Homo sapiens
tctacccaatactgc

SEQ ID NO: 152277 - DNA, 15 bp, Homo sapiens
ctctacccaatactg

SEQ ID NO: 152278 - DNA, 15 bp, Homo sapiens
cctctacccaatact

SEQ ID NO: 152279 - DNA, 15 bp, Homo sapiens
gcctctacccaatac

SEQ ID NO: 152280 - DNA, 15 bp, Homo sapiens
tgcctctacccaata

SEQ ID NO: 152281 - DNA, 15 bp, Homo sapiens
atgcctctacccaat

SEQ ID NO: 152282 - DNA, 15 bp, Homo sapiens
gatgcctctacccaa

SEQ ID NO: 152283 - DNA, 15 bp, Homo sapiens
ggatgcctctaccca

SEQ ID NO: 152284 - DNA, 15 bp, Homo sapiens
gggatgcctctaccc

SEQ ID NO: 152285 - DNA, 15 bp, Homo sapiens
ggggatgcctctacc

SEQ ID NO: 152286 - DNA, 15 bp, Homo sapiens
aggggatgcctctac

SEQ ID NO: 152287 - DNA, 15 bp, Homo sapiens
aaggggatgcctcta

SEQ ID NO: 152288 - DNA, 15 bp, Homo sapiens
caaggggatgcctct

SEQ ID NO: 152289 - DNA, 15 bp, Homo sapiens
acaaggggatgcctc

SEQ ID NO: 152290 - DNA, 15 bp, Homo sapiens
aacaaggggatgcct

SEQ ID NO: 152291 - DNA, 15 bp, Homo sapiens
aaacaaggggatgcc

SEQ ID NO: 152292 - DNA, 15 bp, Homo sapiens
aaaacaaggggatgc

SEQ ID NO: 152293 - DNA, 15 bp, Homo sapiens
caaaacaaggggatg

SEQ ID NO: 152294 - DNA, 15 bp, Homo sapiens
gcaaaacaaggggat

SEQ ID NO: 152295 - DNA, 15 bp, Homo sapiens
tgcaaaacaagggga

SEQ ID NO: 152296 - DNA, 15 bp, Homo sapiens
ctgcaaaacaagggg

SEQ ID NO: 152297 - DNA, 15 bp, Homo sapiens
tctgcaaaacaaggg

SEQ ID NO: 152298 - DNA, 15 bp, Homo sapiens
gtctgcaaaacaagg

SEQ ID NO: 152299 - DNA, 15 bp, Homo sapiens
ggtctgcaaaacaag

SEQ ID NO: 152300 - DNA, 15 bp, Homo sapiens
aggtctgcaaaacaa

SEQ ID NO: 152301 - DNA, 15 bp, Homo sapiens
gaggtctgcaaaaca

SEQ ID NO: 152302 - DNA, 15 bp, Homo sapiens
agaggtctgcaaaac

SEQ ID NO: 152303 - DNA, 15 bp, Homo sapiens
tagaggtctgcaaaa

SEQ ID NO: 152304 - DNA, 15 bp, Homo sapiens
atagaggtctgcaaa

SEQ ID NO: 152305 - DNA, 15 bp, Homo sapiens
aatagaggtctgcaa

SEQ ID NO: 152306 - DNA, 15 bp, Homo sapiens
taatagaggtctgca

SEQ ID NO: 152307 - DNA, 15 bp, Homo sapiens
ttaatagaggtctgc

SEQ ID NO: 152308 - DNA, 15 bp, Homo sapiens
tttaatagaggtctg

SEQ ID NO: 152309 - DNA, 15 bp, Homo sapiens
ttttaatagaggtct

SEQ ID NO: 152310 - DNA, 15 bp, Homo sapiens
gttttaatagaggtc

SEQ ID NO: 152311 - DNA, 15 bp, Homo sapiens
tgttttaatagaggt

SEQ ID NO: 152312 - DNA, 15 bp, Homo sapiens
ttgttttaatagagg

SEQ ID NO: 152313 - DNA, 15 bp, Homo sapiens
tttgttttaatagag

SEQ ID NO: 152314 - DNA, 15 bp, Homo sapiens
ctttgttttaataga

SEQ ID NO: 152315 - DNA, 15 bp, Homo sapiens
cctttgttttaatag

SEQ ID NO: 152316 - DNA, 15 bp, Homo sapiens
tcctttgttttaata

SEQ ID NO: 152317 - DNA, 15 bp, Homo sapiens
ctcctttgttttaat

SEQ ID NO: 152318 - DNA, 15 bp, Homo sapiens
tctcctttgttttaa

SEQ ID NO: 152319 - DNA, 15 bp, Homo sapiens
ttctcctttgtttta

SEQ ID NO: 152320 - DNA, 15 bp, Homo sapiens
gttctcctttgtttt

SEQ ID NO: 152321 - DNA, 15 bp, Homo sapiens
tgttctcctttgttt

SEQ ID NO: 152322 - DNA, 15 bp, Homo sapiens
ttgttctcctttgtt

SEQ ID NO: 152323 - DNA, 15 bp, Homo sapiens
attgttctcctttgt

SEQ ID NO: 152324 - DNA, 15 bp, Homo sapiens
gattgttctcctttg

SEQ ID NO: 152325 - DNA, 15 bp, Homo sapiens
tgattgttctccttt

SEQ ID NO: 152326 - DNA, 15 bp, Homo sapiens
atgattgttctcctt

SEQ ID NO: 152327 - DNA, 15 bp, Homo sapiens
catgattgttctcct

SEQ ID NO: 152328 - DNA, 15 bp, Homo sapiens
acatgattgttctcc

SEQ ID NO: 152329 - DNA, 15 bp, Homo sapiens
tacatgattgttctc

SEQ ID NO: 152330 - DNA, 15 bp, Homo sapiens
ttacatgattgttct

SEQ ID NO: 152331 - DNA, 15 bp, Homo sapiens
attacatgattgttc

SEQ ID NO: 152332 - DNA, 15 bp, Homo sapiens
cattacatgattgtt

SEQ ID NO: 152333 - DNA, 15 bp, Homo sapiens
tcattacatgattgt

SEQ ID NO: 152334 - DNA, 15 bp, Homo sapiens
atcattacatgattg

SEQ ID NO: 152335 - DNA, 15 bp, Homo sapiens
gatcattacatgatt

SEQ ID NO: 152336 - DNA, 15 bp, Homo sapiens
agatcattacatgat

SEQ ID NO: 152337 - DNA, 15 bp, Homo sapiens
gagatcattacatga

SEQ ID NO: 152338 - DNA, 15 bp, Homo sapiens
agagatcattacatg

SEQ ID NO: 152339 - DNA, 15 bp, Homo sapiens
gagagatcattacat

SEQ ID NO: 152340 - DNA, 15 bp, Homo sapiens
agagagatcattaca

SEQ ID NO: 152341 - DNA, 15 bp, Homo sapiens
tagagagatcattac

SEQ ID NO: 152342 - DNA, 15 bp, Homo sapiens
ttagagagatcatta

SEQ ID NO: 152343 - DNA, 15 bp, Homo sapiens
attagagagatcatt

SEQ ID NO: 152344 - DNA, 15 bp, Homo sapiens
aattagagagatcat

SEQ ID NO: 152345 - DNA, 15 bp, Homo sapiens
caattagagagatca

SEQ ID NO: 152346 - DNA, 15 bp, Homo sapiens
gcaattagagagatc

SEQ ID NO: 152347 - DNA, 15 bp, Homo sapiens
agcaattagagagat

SEQ ID NO: 152348 - DNA, 15 bp, Homo sapiens
cagcaattagagaga

SEQ ID NO: 152349 - DNA, 15 bp, Homo sapiens
tcagcaattagagag

SEQ ID NO: 152350 - DNA, 15 bp, Homo sapiens
ttcagcaattagaga

SEQ ID NO: 152351 - DNA, 15 bp, Homo sapiens
tttcagcaattagag

SEQ ID NO: 152352 - DNA, 15 bp, Homo sapiens
atttcagcaattaga

SEQ ID NO: 152353 - DNA, 15 bp, Homo sapiens
catttcagcaattag

SEQ ID NO: 152354 - DNA, 15 bp, Homo sapiens
tcatttcagcaatta

SEQ ID NO: 152355 - DNA, 15 bp, Homo sapiens
gtcatttcagcaatt

SEQ ID NO: 152356 - DNA, 15 bp, Homo sapiens
tgtcatttcagcaat

SEQ ID NO: 152357 - DNA, 15 bp, Homo sapiens
atgtcatttcagcaa

SEQ ID NO: 152358 - DNA, 15 bp, Homo sapiens
aatgtcatttcagca

SEQ ID NO: 152359 - DNA, 15 bp, Homo sapiens
gaatgtcatttcagc

SEQ ID NO: 152360 - DNA, 15 bp, Homo sapiens
tgaatgtcatttcag

SEQ ID NO: 152361 - DNA, 15 bp, Homo sapiens
ttgaatgtcatttca

SEQ ID NO: 152362 - DNA, 15 bp, Homo sapiens
attgaatgtcatttc

SEQ ID NO: 152363 - DNA, 15 bp, Homo sapiens
tattgaatgtcattt

SEQ ID NO: 152364 - DNA, 15 bp, Homo sapiens
atattgaatgtcatt

SEQ ID NO: 152365 - DNA, 15 bp, Homo sapiens
catattgaatgtcat

SEQ ID NO: 152366 - DNA, 15 bp, Homo sapiens
tcatattgaatgtca

SEQ ID NO: 152367 - DNA, 15 bp, Homo sapiens
atcatattgaatgtc

SEQ ID NO: 152368 - DNA, 15 bp, Homo sapiens
gatcatattgaatgt

SEQ ID NO: 152369 - DNA, 15 bp, Homo sapiens
ggatcatattgaatg

SEQ ID NO: 152370 - DNA, 15 bp, Homo sapiens
tggatcatattgaat

SEQ ID NO: 152371 - DNA, 15 bp, Homo sapiens
ctggatcatattgaa

SEQ ID NO: 152372 - DNA, 15 bp, Homo sapiens
actggatcatattga

SEQ ID NO: 152373 - DNA, 15 bp, Homo sapiens
tactggatcatattg

SEQ ID NO: 152374 - DNA, 15 bp, Homo sapiens
ctactggatcatatt

SEQ ID NO: 152375 - DNA, 15 bp, Homo sapiens
cctactggatcatat

SEQ ID NO: 152376 - DNA, 15 bp, Homo sapiens
acctactggatcata

SEQ ID NO: 152377 - DNA, 15 bp, Homo sapiens
cacctactggatcat

SEQ ID NO: 152378 - DNA, 15 bp, Homo sapiens
gcacctactggatca

SEQ ID NO: 152379 - DNA, 15 bp, Homo sapiens
agcacctactggatc

SEQ ID NO: 152380 - DNA, 15 bp, Homo sapiens
aagcacctactggat

SEQ ID NO: 152381 - DNA, 15 bp, Homo sapiens
gaagcacctactgga

SEQ ID NO: 152382 - DNA, 15 bp, Homo sapiens
tgaagcacctactgg

SEQ ID NO: 152383 - DNA, 15 bp, Homo sapiens
atgaagcacctactg

SEQ ID NO: 152384 - DNA, 15 bp, Homo sapiens
catgaagcacctact

SEQ ID NO: 152385 - DNA, 15 bp, Homo sapiens
tcatgaagcacctac

SEQ ID NO: 152386 - DNA, 15 bp, Homo sapiens
atcatgaagcaccta

SEQ ID NO: 152387 - DNA, 15 bp, Homo sapiens
gatcatgaagcacct

SEQ ID NO: 152388 - DNA, 15 bp, Homo sapiens
tgatcatgaagcacc

SEQ ID NO: 152389 - DNA, 15 bp, Homo sapiens
gtgatcatgaagcac

SEQ ID NO: 152390 - DNA, 15 bp, Homo sapiens
tgtgatcatgaagca

SEQ ID NO: 152391 - DNA, 15 bp, Homo sapiens
gtgtgatcatgaagc

SEQ ID NO: 152392 - DNA, 15 bp, Homo sapiens
tgtgtgatcatgaag

SEQ ID NO: 152393 - DNA, 15 bp, Homo sapiens
atgtgtgatcatgaa

SEQ ID NO: 152394 - DNA, 15 bp, Homo sapiens
gatgtgtgatcatga

SEQ ID NO: 152395 - DNA, 15 bp, Homo sapiens
cgatgtgtgatcatg

SEQ ID NO: 152396 - DNA, 15 bp, Homo sapiens
acgatgtgtgatcat

SEQ ID NO: 152397 - DNA, 15 bp, Homo sapiens
gacgatgtgtgatca

SEQ ID NO: 152398 - DNA, 15 bp, Homo sapiens
tgacgatgtgtgatc

SEQ ID NO: 152399 - DNA, 15 bp, Homo sapiens
ttgacgatgtgtgat

SEQ ID NO: 152400 - DNA, 15 bp, Homo sapiens
gttgacgatgtgtga

SEQ ID NO: 152401 - DNA, 15 bp, Homo sapiens
agttgacgatgtgtg

SEQ ID NO: 152402 - DNA, 15 bp, Homo sapiens
gagttgacgatgtgt

SEQ ID NO: 152403 - DNA, 15 bp, Homo sapiens
agagttgacgatgtg

SEQ ID NO: 152404 - DNA, 15 bp, Homo sapiens
cagagttgacgatgt

SEQ ID NO: 152405 - DNA, 15 bp, Homo sapiens
gcagagttgacgatg

SEQ ID NO: 152406 - DNA, 15 bp, Homo sapiens
cgcagagttgacgat

SEQ ID NO: 152407 - DNA, 15 bp, Homo sapiens
gcgcagagttgacga

SEQ ID NO: 152408 - DNA, 15 bp, Homo sapiens
tgcgcagagttgacg

SEQ ID NO: 152409 - DNA, 15 bp, Homo sapiens
ctgcgcagagttgac

SEQ ID NO: 152410 - DNA, 15 bp, Homo sapiens
actgcgcagagttga

SEQ ID NO: 152411 - DNA, 15 bp, Homo sapiens
cactgcgcagagttg

SEQ ID NO: 152412 - DNA, 15 bp, Homo sapiens
ccactgcgcagagtt

SEQ ID NO: 152413 - DNA, 15 bp, Homo sapiens
cccactgcgcagagt

SEQ ID NO: 152414 - DNA, 15 bp, Homo sapiens
tcccactgcgcagag

SEQ ID NO: 152415 - DNA, 15 bp, Homo sapiens
ttcccactgcgcaga

SEQ ID NO: 152416 - DNA, 15 bp, Homo sapiens
gttcccactgcgcag

SEQ ID NO: 152417 - DNA, 15 bp, Homo sapiens
agttcccactgcgca

SEQ ID NO: 152418 - DNA, 15 bp, Homo sapiens
aagttcccactgcgc

SEQ ID NO: 152419 - DNA, 15 bp, Homo sapiens
taagttcccactgcg

SEQ ID NO: 152420 - DNA, 15 bp, Homo sapiens
gtaagttcccactgc

SEQ ID NO: 152421 - DNA, 15 bp, Homo sapiens
agtaagttcccactg

SEQ ID NO: 152422 - DNA, 15 bp, Homo sapiens
aagtaagttcccact

SEQ ID NO: 152423 - DNA, 15 bp, Homo sapiens
taagtaagttcccac

SEQ ID NO: 152424 - DNA, 15 bp, Homo sapiens
ttaagtaagttccca

SEQ ID NO: 152425 - DNA, 15 bp, Homo sapiens
attaagtaagttccc

SEQ ID NO: 152426 - DNA, 15 bp, Homo sapiens
gattaagtaagttcc

SEQ ID NO: 152427 - DNA, 15 bp, Homo sapiens
agattaagtaagttc

SEQ ID NO: 152428 - DNA, 15 bp, Homo sapiens
cagattaagtaagtt

SEQ ID NO: 152429 - DNA, 15 bp, Homo sapiens
tcagattaagtaagt

SEQ ID NO: 152430 - DNA, 15 bp, Homo sapiens
ttcagattaagtaag

SEQ ID NO: 152431 - DNA, 15 bp, Homo sapiens
cttcagattaagtaa

SEQ ID NO: 152432 - DNA, 15 bp, Homo sapiens
tcttcagattaagta

SEQ ID NO: 152433 - DNA, 15 bp, Homo sapiens
gtcttcagattaagt

SEQ ID NO: 152434 - DNA, 15 bp, Homo sapiens
tgtcttcagattaag

SEQ ID NO: 152435 - DNA, 15 bp, Homo sapiens
ctgtcttcagattaa

SEQ ID NO: 152436 - DNA, 15 bp, Homo sapiens
tctgtcttcagatta

SEQ ID NO: 152437 - DNA, 15 bp, Homo sapiens
atctgtcttcagatt

SEQ ID NO: 152438 - DNA, 15 bp, Homo sapiens
tatctgtcttcagat

SEQ ID NO: 152439 - DNA, 15 bp, Homo sapiens
ctatctgtcttcaga

SEQ ID NO: 152440 - DNA, 15 bp, Homo sapiens
gctatctgtcttcag

SEQ ID NO: 152441 - DNA, 15 bp, Homo sapiens
agctatctgtcttca

SEQ ID NO: 152442 - DNA, 15 bp, Homo sapiens
tagctatctgtcttc

SEQ ID NO: 152443 - DNA, 15 bp, Homo sapiens
gtagctatctgtctt

SEQ ID NO: 152444 - DNA, 15 bp, Homo sapiens
agtagctatctgtct

SEQ ID NO: 152445 - DNA, 15 bp, Homo sapiens
cagtagctatctgtc

SEQ ID NO: 152446 - DNA, 15 bp, Homo sapiens
tcagtagctatctgt

SEQ ID NO: 152447 - DNA, 15 bp, Homo sapiens
ttcagtagctatctg

SEQ ID NO: 152448 - DNA, 15 bp, Homo sapiens
tttcagtagctatct

SEQ ID NO: 152449 - DNA, 15 bp, Homo sapiens
atttcagtagctatc

SEQ ID NO: 152450 - DNA, 15 bp, Homo sapiens
gatttcagtagctat

SEQ ID NO: 152451 - DNA, 15 bp, Homo sapiens
agatttcagtagcta

SEQ ID NO: 152452 - DNA, 15 bp, Homo sapiens
gagatttcagtagct

SEQ ID NO: 152453 - DNA, 15 bp, Homo sapiens
agagatttcagtagc

SEQ ID NO: 152454 - DNA, 15 bp, Homo sapiens
tagagatttcagtag

SEQ ID NO: 152455 - DNA, 15 bp, Homo sapiens
ctagagatttcagta

SEQ ID NO: 152456 - DNA, 15 bp, Homo sapiens
gctagagatttcagt

SEQ ID NO: 152457 - DNA, 15 bp, Homo sapiens
tgctagagatttcag

SEQ ID NO: 152458 - DNA, 15 bp, Homo sapiens
ttgctagagatttca

SEQ ID NO: 152459 - DNA, 15 bp, Homo sapiens
tttgctagagatttc

SEQ ID NO: 152460 - DNA, 15 bp, Homo sapiens
gtttgctagagattt

SEQ ID NO: 152461 - DNA, 15 bp, Homo sapiens
ggtttgctagagatt

SEQ ID NO: 152462 - DNA, 15 bp, Homo sapiens
aggtttgctagagat

SEQ ID NO: 152463 - DNA, 15 bp, Homo sapiens
aaggtttgctagaga

SEQ ID NO: 152464 - DNA, 15 bp, Homo sapiens
taaggtttgctagag

SEQ ID NO: 152465 - DNA, 15 bp, Homo sapiens
ataaggtttgctaga

SEQ ID NO: 152466 - DNA, 15 bp, Homo sapiens
aataaggtttgctag

SEQ ID NO: 152467 - DNA, 15 bp, Homo sapiens
gaataaggtttgcta

SEQ ID NO: 152468 - DNA, 15 bp, Homo sapiens
ggaataaggtttgct

SEQ ID NO: 152469 - DNA, 15 bp, Homo sapiens
aggaataaggtttgc

SEQ ID NO: 152470 - DNA, 15 bp, Homo sapiens
caggaataaggtttg

SEQ ID NO: 152471 - DNA, 15 bp, Homo sapiens
tcaggaataaggttt

SEQ ID NO: 152472 - DNA, 15 bp, Homo sapiens
atcaggaataaggtt

SEQ ID NO: 152473 - DNA, 15 bp, Homo sapiens
tatcaggaataaggt

SEQ ID NO: 152474 - DNA, 15 bp, Homo sapiens
ctatcaggaataagg

SEQ ID NO: 152475 - DNA, 15 bp, Homo sapiens
tctatcaggaataag

SEQ ID NO: 152476 - DNA, 15 bp, Homo sapiens
atctatcaggaataa

SEQ ID NO: 152477 - DNA, 15 bp, Homo sapiens
tatctatcaggaata

SEQ ID NO: 152478 - DNA, 15 bp, Homo sapiens
ctatctatcaggaat

SEQ ID NO: 152479 - DNA, 15 bp, Homo sapiens
tctatctatcaggaa

SEQ ID NO: 152480 - DNA, 15 bp, Homo sapiens
gtctatctatcagga

SEQ ID NO: 152481 - DNA, 15 bp, Homo sapiens
tgtctatctatcagg

SEQ ID NO: 152482 - DNA, 15 bp, Homo sapiens
atgtctatctatcag

SEQ ID NO: 152483 - DNA, 15 bp, Homo sapiens
catgtctatctatca

SEQ ID NO: 152484 - DNA, 15 bp, Homo sapiens
tcatgtctatctatc

SEQ ID NO: 152485 - DNA, 15 bp, Homo sapiens
ctcatgtctatctat

SEQ ID NO: 152486 - DNA, 15 bp, Homo sapiens
tctcatgtctatcta

SEQ ID NO: 152487 - DNA, 15 bp, Homo sapiens
atctcatgtctatct

SEQ ID NO: 152488 - DNA, 15 bp, Homo sapiens
catctcatgtctatc

SEQ ID NO: 152489 - DNA, 15 bp, Homo sapiens
gcatctcatgtctat

SEQ ID NO: 152490 - DNA, 15 bp, Homo sapiens
tgcatctcatgtcta

SEQ ID NO: 152491 - DNA, 15 bp, Homo sapiens
ttgcatctcatgtct

SEQ ID NO: 152492 - DNA, 15 bp, Homo sapiens
attgcatctcatgtc

SEQ ID NO: 152493 - DNA, 15 bp, Homo sapiens
gattgcatctcatgt

SEQ ID NO: 152494 - DNA, 15 bp, Homo sapiens
ggattgcatctcatg

SEQ ID NO: 152495 - DNA, 15 bp, Homo sapiens
gggattgcatctcat

SEQ ID NO: 152496 - DNA, 15 bp, Homo sapiens
agggattgcatctca

SEQ ID NO: 152497 - DNA, 15 bp, Homo sapiens
aagggattgcatctc

SEQ ID NO: 152498 - DNA, 15 bp, Homo sapiens
gaagggattgcatct

SEQ ID NO: 152499 - DNA, 15 bp, Homo sapiens
tgaagggattgcatc

SEQ ID NO: 152500 - DNA, 15 bp, Homo sapiens
ctgaagggattgcat

SEQ ID NO: 152501 - DNA, 15 bp, Homo sapiens
cctgaagggattgca

SEQ ID NO: 152502 - DNA, 15 bp, Homo sapiens
acctgaagggattgc

SEQ ID NO: 152503 - DNA, 15 bp, Homo sapiens
aacctgaagggattg

SEQ ID NO: 152504 - DNA, 15 bp, Homo sapiens
taacctgaagggatt

SEQ ID NO: 152505 - DNA, 15 bp, Homo sapiens
ttaacctgaagggat

SEQ ID NO: 152506 - DNA, 15 bp, Homo sapiens
tttaacctgaaggga

SEQ ID NO: 152507 - DNA, 15 bp, Homo sapiens
ttttaacctgaaggg

SEQ ID NO: 152508 - DNA, 15 bp, Homo sapiens
tttttaacctgaagg

SEQ ID NO: 152509 - DNA, 15 bp, Homo sapiens
ctttttaacctgaag

SEQ ID NO: 152510 - DNA, 15 bp, Homo sapiens
tctttttaacctgaa

SEQ ID NO: 152511 - DNA, 15 bp, Homo sapiens
ttctttttaacctga

SEQ ID NO: 152512 - DNA, 15 bp, Homo sapiens
cttctttttaacctg

SEQ ID NO: 152513 - DNA, 15 bp, Homo sapiens
tcttctttttaacct

SEQ ID NO: 152514 - DNA, 15 bp, Homo sapiens
gtcttctttttaacc

SEQ ID NO: 152515 - DNA, 15 bp, Homo sapiens
tgtcttctttttaac

SEQ ID NO: 152516 - DNA, 15 bp, Homo sapiens
ttgtcttctttttaa

SEQ ID NO: 152517 - DNA, 15 bp, Homo sapiens
cttgtcttcttttta

SEQ ID NO: 152518 - DNA, 15 bp, Homo sapiens
tcttgtcttcttttt

SEQ ID NO: 152519 - DNA, 15 bp, Homo sapiens
ttcttgtcttctttt

SEQ ID NO: 152520 - DNA, 15 bp, Homo sapiens
gttcttgtcttcttt

SEQ ID NO: 152521 - DNA, 15 bp, Homo sapiens
cgttcttgtcttctt

SEQ ID NO: 152522 - DNA, 15 bp, Homo sapiens
gcgttcttgtcttct

SEQ ID NO: 152523 - DNA, 15 bp, Homo sapiens
ggcgttcttgtcttc

SEQ ID NO: 152524 - DNA, 15 bp, Homo sapiens
gggcgttcttgtctt

SEQ ID NO: 152525 - DNA, 15 bp, Homo sapiens
tgggcgttcttgtct

SEQ ID NO: 152526 - DNA, 15 bp, Homo sapiens
gtgggcgttcttgtc

SEQ ID NO: 152527 - DNA, 15 bp, Homo sapiens
agtgggcgttcttgt

SEQ ID NO: 152528 - DNA, 15 bp, Homo sapiens
tagtgggcgttcttg

SEQ ID NO: 152529 - DNA, 15 bp, Homo sapiens
atagtgggcgttctt

SEQ ID NO: 152530 - DNA, 15 bp, Homo sapiens
gatagtgggcgttct

SEQ ID NO: 152531 - DNA, 15 bp, Homo sapiens
tgatagtgggcgttc

SEQ ID NO: 152532 - DNA, 15 bp, Homo sapiens
gtgatagtgggcgtt

SEQ ID NO: 152533 - DNA, 15 bp, Homo sapiens
ggtgatagtgggcgt

SEQ ID NO: 152534 - DNA, 15 bp, Homo sapiens
aggtgatagtgggcg

SEQ ID NO: 152535 - DNA, 15 bp, Homo sapiens
gaggtgatagtgggc

SEQ ID NO: 152536 - DNA, 15 bp, Homo sapiens
agaggtgatagtggg

SEQ ID NO: 152537 - DNA, 15 bp, Homo sapiens
gagaggtgatagtgg

SEQ ID NO: 152538 - DNA, 15 bp, Homo sapiens
agagaggtgatagtg

SEQ ID NO: 152539 - DNA, 15 bp, Homo sapiens
aagagaggtgatagt

SEQ ID NO: 152540 - DNA, 15 bp, Homo sapiens
taagagaggtgatag

SEQ ID NO: 152541 - DNA, 15 bp, Homo sapiens
ataagagaggtgata

SEQ ID NO: 152542 - DNA, 15 bp, Homo sapiens
aataagagaggtgat

SEQ ID NO: 152543 - DNA, 15 bp, Homo sapiens
gaataagagaggtga

SEQ ID NO: 152544 - DNA, 15 bp, Homo sapiens
tgaataagagaggtg

SEQ ID NO: 152545 - DNA, 15 bp, Homo sapiens
ttgaataagagaggt

SEQ ID NO: 152546 - DNA, 15 bp, Homo sapiens
gttgaataagagagg

SEQ ID NO: 152547 - DNA, 15 bp, Homo sapiens
ggttgaataagagag

SEQ ID NO: 152548 - DNA, 15 bp, Homo sapiens
aggttgaataagaga

SEQ ID NO: 152549 - DNA, 15 bp, Homo sapiens
aaggttgaataagag

SEQ ID NO: 152550 - DNA, 15 bp, Homo sapiens
caaggttgaataaga

SEQ ID NO: 152551 - DNA, 15 bp, Homo sapiens
gcaaggttgaataag

SEQ ID NO: 152552 - DNA, 15 bp, Homo sapiens
tgcaaggttgaataa

SEQ ID NO: 152553 - DNA, 15 bp, Homo sapiens
gtgcaaggttgaata

SEQ ID NO: 152554 - DNA, 15 bp, Homo sapiens
ggtgcaaggttgaat

SEQ ID NO: 152555 - DNA, 15 bp, Homo sapiens
gggtgcaaggttgaa

SEQ ID NO: 152556 - DNA, 15 bp, Homo sapiens
agggtgcaaggttga

SEQ ID NO: 152557 - DNA, 15 bp, Homo sapiens
tagggtgcaaggttg

SEQ ID NO: 152558 - DNA, 15 bp, Homo sapiens
ctagggtgcaaggtt

SEQ ID NO: 152559 - DNA, 15 bp, Homo sapiens
cctagggtgcaaggt

SEQ ID NO: 152560 - DNA, 15 bp, Homo sapiens
acctagggtgcaagg

SEQ ID NO: 152561 - DNA, 15 bp, Homo sapiens
gacctagggtgcaag

SEQ ID NO: 152562 - DNA, 15 bp, Homo sapiens
tgacctagggtgcaa

SEQ ID NO: 152563 - DNA, 15 bp, Homo sapiens
ctgacctagggtgca

SEQ ID NO: 152564 - DNA, 15 bp, Homo sapiens
tctgacctagggtgc

SEQ ID NO: 152565 - DNA, 15 bp, Homo sapiens
ctctgacctagggtg

SEQ ID NO: 152566 - DNA, 15 bp, Homo sapiens
gctctgacctagggt

SEQ ID NO: 152567 - DNA, 15 bp, Homo sapiens
ggctctgacctaggg

SEQ ID NO: 152568 - DNA, 15 bp, Homo sapiens
tggctctgacctagg

SEQ ID NO: 152569 - DNA, 15 bp, Homo sapiens
ctggctctgacctag

SEQ ID NO: 152570 - DNA, 15 bp, Homo sapiens
gctggctctgaccta

SEQ ID NO: 152571 - DNA, 15 bp, Homo sapiens
cgctggctctgacct

SEQ ID NO: 152572 - DNA, 15 bp, Homo sapiens
gcgctggctctgacc

SEQ ID NO: 152573 - DNA, 15 bp, Homo sapiens
tgcgctggctctgac

SEQ ID NO: 152574 - DNA, 15 bp, Homo sapiens
ttgcgctggctctga

SEQ ID NO: 152575 - DNA, 15 bp, Homo sapiens
attgcgctggctctg

SEQ ID NO: 152576 - DNA, 15 bp, Homo sapiens
tattgcgctggctct

SEQ ID NO: 152577 - DNA, 15 bp, Homo sapiens
gtattgcgctggctc

SEQ ID NO: 152578 - DNA, 15 bp, Homo sapiens
ggtattgcgctggct

SEQ ID NO: 152579 - DNA, 15 bp, Homo sapiens
tggtattgcgctggc

SEQ ID NO: 152580 - DNA, 15 bp, Homo sapiens
gtggtattgcgctgg

SEQ ID NO: 152581 - DNA, 15 bp, Homo sapiens
tgtggtattgcgctg

SEQ ID NO: 152582 - DNA, 15 bp, Homo sapiens
ttgtggtattgcgct

SEQ ID NO: 152583 - DNA, 15 bp, Homo sapiens
cttgtggtattgcgc

SEQ ID NO: 152584 - DNA, 15 bp, Homo sapiens
tcttgtggtattgcg

SEQ ID NO: 152585 - DNA, 15 bp, Homo sapiens
ctcttgtggtattgc

SEQ ID NO: 152586 - DNA, 15 bp, Homo sapiens
tctcttgtggtattg

SEQ ID NO: 152587 - DNA, 15 bp, Homo sapiens
ttctcttgtggtatt

SEQ ID NO: 152588 - DNA, 15 bp, Homo sapiens
tttctcttgtggtat

SEQ ID NO: 152589 - DNA, 15 bp, Homo sapiens
ttttctcttgtggta

SEQ ID NO: 152590 - DNA, 15 bp, Homo sapiens
gttttctcttgtggt

SEQ ID NO: 152591 - DNA, 15 bp, Homo sapiens
ggttttctcttgtgg

SEQ ID NO: 152592 - DNA, 15 bp, Homo sapiens
tggttttctcttgtg

SEQ ID NO: 152593 - DNA, 15 bp, Homo sapiens
ttggttttctcttgt

SEQ ID NO: 152594 - DNA, 15 bp, Homo sapiens
attggttttctcttg

SEQ ID NO: 152595 - DNA, 15 bp, Homo sapiens
tattggttttctctt

SEQ ID NO: 152596 - DNA, 15 bp, Homo sapiens
ctattggttttctct

SEQ ID NO: 152597 - DNA, 15 bp, Homo sapiens
tctattggttttctc

SEQ ID NO: 152598 - DNA, 15 bp, Homo sapiens
ctctattggttttct

SEQ ID NO: 152599 - DNA, 15 bp, Homo sapiens
tctctattggttttc

SEQ ID NO: 152600 - DNA, 15 bp, Homo sapiens
gtctctattggtttt

SEQ ID NO: 152601 - DNA, 15 bp, Homo sapiens
tgtctctattggttt

SEQ ID NO: 152602 - DNA, 15 bp, Homo sapiens
atgtctctattggtt

SEQ ID NO: 152603 - DNA, 15 bp, Homo sapiens
tatgtctctattggt

SEQ ID NO: 152604 - DNA, 15 bp, Homo sapiens
ttatgtctctattgg

SEQ ID NO: 152605 - DNA, 15 bp, Homo sapiens
cttatgtctctattg

SEQ ID NO: 152606 - DNA, 15 bp, Homo sapiens
acttatgtctctatt

SEQ ID NO: 152607 - DNA, 15 bp, Homo sapiens
gacttatgtctctat

SEQ ID NO: 152608 - DNA, 15 bp, Homo sapiens
agacttatgtctcta

SEQ ID NO: 152609 - DNA, 15 bp, Homo sapiens
aagacttatgtctct

SEQ ID NO: 152610 - DNA, 15 bp, Homo sapiens
caagacttatgtctc

SEQ ID NO: 152611 - DNA, 15 bp, Homo sapiens
ccaagacttatgtct

SEQ ID NO: 152612 - DNA, 15 bp, Homo sapiens
tccaagacttatgtc

SEQ ID NO: 152613 - DNA, 15 bp, Homo sapiens
ttccaagacttatgt

SEQ ID NO: 152614 - DNA, 15 bp, Homo sapiens
tttccaagacttatg

SEQ ID NO: 152615 - DNA, 15 bp, Homo sapiens
ctttccaagacttat

SEQ ID NO: 152616 - DNA, 15 bp, Homo sapiens
cctttccaagactta

SEQ ID NO: 152617 - DNA, 15 bp, Homo sapiens
tcctttccaagactt

SEQ ID NO: 152618 - DNA, 15 bp, Homo sapiens
ttcctttccaagact

SEQ ID NO: 152619 - DNA, 15 bp, Homo sapiens
cttcctttccaagac

SEQ ID NO: 152620 - DNA, 15 bp, Homo sapiens
tcttcctttccaaga

SEQ ID NO: 152621 - DNA, 15 bp, Homo sapiens
ctcttcctttccaag

SEQ ID NO: 152622 - DNA, 15 bp, Homo sapiens
tctcttcctttccaa

SEQ ID NO: 152623 - DNA, 15 bp, Homo sapiens
atctcttcctttcca

SEQ ID NO: 152624 - DNA, 15 bp, Homo sapiens
catctcttcctttcc

SEQ ID NO: 152625 - DNA, 15 bp, Homo sapiens
tcatctcttcctttc

SEQ ID NO: 152626 - DNA, 15 bp, Homo sapiens
ttcatctcttccttt

SEQ ID NO: 152627 - DNA, 15 bp, Homo sapiens
cttcatctcttcctt

SEQ ID NO: 152628 - DNA, 15 bp, Homo sapiens
ccttcatctcttcct

SEQ ID NO: 152629 - DNA, 15 bp, Homo sapiens
gccttcatctcttcc

SEQ ID NO: 152630 - DNA, 15 bp, Homo sapiens
tgccttcatctcttc

SEQ ID NO: 152631 - DNA, 15 bp, Homo sapiens
atgccttcatctctt

SEQ ID NO: 152632 - DNA, 15 bp, Homo sapiens
gatgccttcatctct

SEQ ID NO: 152633 - DNA, 15 bp, Homo sapiens
tgatgccttcatctc

SEQ ID NO: 152634 - DNA, 15 bp, Homo sapiens
atgatgccttcatct

SEQ ID NO: 152635 - DNA, 15 bp, Homo sapiens
aatgatgccttcatc

SEQ ID NO: 152636 - DNA, 15 bp, Homo sapiens
taatgatgccttcat

SEQ ID NO: 152637 - DNA, 15 bp, Homo sapiens
ataatgatgccttca

SEQ ID NO: 152638 - DNA, 15 bp, Homo sapiens
aataatgatgccttc

SEQ ID NO: 152639 - DNA, 15 bp, Homo sapiens
aaataatgatgcctt

SEQ ID NO: 152640 - DNA, 15 bp, Homo sapiens
aaaataatgatgcct

SEQ ID NO: 152641 - DNA, 15 bp, Homo sapiens
gaaaataatgatgcc

SEQ ID NO: 152642 - DNA, 15 bp, Homo sapiens
agaaaataatgatgc

SEQ ID NO: 152643 - DNA, 15 bp, Homo sapiens
cagaaaataatgatg

SEQ ID NO: 152644 - DNA, 15 bp, Homo sapiens
ccagaaaataatgat

SEQ ID NO: 152645 - DNA, 15 bp, Homo sapiens
accagaaaataatga

SEQ ID NO: 152646 - DNA, 15 bp, Homo sapiens
caccagaaaataatg

SEQ ID NO: 152647 - DNA, 15 bp, Homo sapiens
gcaccagaaaataat

SEQ ID NO: 152648 - DNA, 15 bp, Homo sapiens
tgcaccagaaaataa

SEQ ID NO: 152649 - DNA, 15 bp, Homo sapiens
ctgcaccagaaaata

SEQ ID NO: 152650 - DNA, 15 bp, Homo sapiens
gctgcaccagaaaat

SEQ ID NO: 152651 - DNA, 15 bp, Homo sapiens
ggctgcaccagaaaa

SEQ ID NO: 152652 - DNA, 15 bp, Homo sapiens
tggctgcaccagaaa

SEQ ID NO: 152653 - DNA, 15 bp, Homo sapiens
atggctgcaccagaa

SEQ ID NO: 152654 - DNA, 15 bp, Homo sapiens
gatggctgcaccaga

SEQ ID NO: 152655 - DNA, 15 bp, Homo sapiens
tgatggctgcaccag

SEQ ID NO: 152656 - DNA, 15 bp, Homo sapiens
atgatggctgcacca

SEQ ID NO: 152657 - DNA, 15 bp, Homo sapiens
gatgatggctgcacc

SEQ ID NO: 152658 - DNA, 15 bp, Homo sapiens
agatgatggctgcac

SEQ ID NO: 152659 - DNA, 15 bp, Homo sapiens
cagatgatggctgca

SEQ ID NO: 152660 - DNA, 15 bp, Homo sapiens
ccagatgatggctgc

SEQ ID NO: 152661 - DNA, 15 bp, Homo sapiens
gccagatgatggctg

SEQ ID NO: 152662 - DNA, 15 bp, Homo sapiens
agccagatgatggct

SEQ ID NO: 152663 - DNA, 15 bp, Homo sapiens
cagccagatgatggc

SEQ ID NO: 152664 - DNA, 15 bp, Homo sapiens
ccagccagatgatgg

SEQ ID NO: 152665 - DNA, 15 bp, Homo sapiens
tccagccagatgatg

SEQ ID NO: 152666 - DNA, 15 bp, Homo sapiens
ctccagccagatgat

SEQ ID NO: 152667 - DNA, 15 bp, Homo sapiens
cctccagccagatga

SEQ ID NO: 152668 - DNA, 15 bp, Homo sapiens
tcctccagccagatg

SEQ ID NO: 152669 - DNA, 15 bp, Homo sapiens
ttcctccagccagat

SEQ ID NO: 152670 - DNA, 15 bp, Homo sapiens
tttcctccagccaga

SEQ ID NO: 152671 - DNA, 15 bp, Homo sapiens
atttcctccagccag

SEQ ID NO: 152672 - DNA, 15 bp, Homo sapiens
gatttcctccagcca

SEQ ID NO: 152673 - DNA, 15 bp, Homo sapiens
cgatttcctccagcc

SEQ ID NO: 152674 - DNA, 15 bp, Homo sapiens
acgatttcctccagc

SEQ ID NO: 152675 - DNA, 15 bp, Homo sapiens
tacgatttcctccag

SEQ ID NO: 152676 - DNA, 15 bp, Homo sapiens
ctacgatttcctcca

SEQ ID NO: 152677 - DNA, 15 bp, Homo sapiens
tctacgatttcctcc

SEQ ID NO: 152678 - DNA, 15 bp, Homo sapiens
gtctacgatttcctc

SEQ ID NO: 152679 - DNA, 15 bp, Homo sapiens
agtctacgatttcct

SEQ ID NO: 152680 - DNA, 15 bp, Homo sapiens
gagtctacgatttcc

SEQ ID NO: 152681 - DNA, 15 bp, Homo sapiens
ggagtctacgatttc

SEQ ID NO: 152682 - DNA, 15 bp, Homo sapiens
cggagtctacgattt

SEQ ID NO: 152683 - DNA, 15 bp, Homo sapiens
tcggagtctacgatt

SEQ ID NO: 152684 - DNA, 15 bp, Homo sapiens
ttcggagtctacgat

SEQ ID NO: 152685 - DNA, 15 bp, Homo sapiens
attcggagtctacga

SEQ ID NO: 152686 - DNA, 15 bp, Homo sapiens
cattcggagtctacg

SEQ ID NO: 152687 - DNA, 15 bp, Homo sapiens
acattcggagtctac

SEQ ID NO: 152688 - DNA, 15 bp, Homo sapiens
tacattcggagtcta

SEQ ID NO: 152689 - DNA, 15 bp, Homo sapiens
atacattcggagtct

SEQ ID NO: 152690 - DNA, 15 bp, Homo sapiens
tatacattcggagtc

SEQ ID NO: 152691 - DNA, 15 bp, Homo sapiens
ttatacattcggagt

SEQ ID NO: 152692 - DNA, 15 bp, Homo sapiens
tttatacattcggag

SEQ ID NO: 152693 - DNA, 15 bp, Homo sapiens
atttatacattcgga

SEQ ID NO: 152694 - DNA, 15 bp, Homo sapiens
aatttatacattcgg

SEQ ID NO: 152695 - DNA, 15 bp, Homo sapiens
taatttatacattcg

SEQ ID NO: 152696 - DNA, 15 bp, Homo sapiens
ataatttatacattc

SEQ ID NO: 152697 - DNA, 15 bp, Homo sapiens
aataatttatacatt

SEQ ID NO: 152698 - DNA, 15 bp, Homo sapiens
taataatttatacat

SEQ ID NO: 152699 - DNA, 15 bp, Homo sapiens
ctaataatttataca

SEQ ID NO: 152700 - DNA, 15 bp, Homo sapiens
tctaataatttatac

SEQ ID NO: 152701 - DNA, 15 bp, Homo sapiens
ttctaataatttata

SEQ ID NO: 152702 - DNA, 15 bp, Homo sapiens
cttctaataatttat

SEQ ID NO: 152703 - DNA, 15 bp, Homo sapiens
gcttctaataattta

SEQ ID NO: 152704 - DNA, 15 bp, Homo sapiens
tgcttctaataattt

SEQ ID NO: 152705 - DNA, 15 bp, Homo sapiens
ttgcttctaataatt

SEQ ID NO: 152706 - DNA, 15 bp, Homo sapiens
gttgcttctaataat

SEQ ID NO: 152707 - DNA, 15 bp, Homo sapiens
tgttgcttctaataa

SEQ ID NO: 152708 - DNA, 15 bp, Homo sapiens
ctgttgcttctaata

SEQ ID NO: 152709 - DNA, 15 bp, Homo sapiens
tctgttgcttctaat

SEQ ID NO: 152710 - DNA, 15 bp, Homo sapiens
ctctgttgcttctaa

SEQ ID NO: 152711 - DNA, 15 bp, Homo sapiens
actctgttgcttcta

SEQ ID NO: 152712 - DNA, 15 bp, Homo sapiens
aactctgttgcttct

SEQ ID NO: 152713 - DNA, 15 bp, Homo sapiens
caactctgttgcttc

SEQ ID NO: 152714 - DNA, 15 bp, Homo sapiens
tcaactctgttgctt

SEQ ID NO: 152715 - DNA, 15 bp, Homo sapiens
ctcaactctgttgct

SEQ ID NO: 152716 - DNA, 15 bp, Homo sapiens
gctcaactctgttgc

SEQ ID NO: 152717 - DNA, 15 bp, Homo sapiens
ggctcaactctgttg

SEQ ID NO: 152718 - DNA, 15 bp, Homo sapiens
tggctcaactctgtt

SEQ ID NO: 152719 - DNA, 15 bp, Homo sapiens
ctggctcaactctgt

SEQ ID NO: 152720 - DNA, 15 bp, Homo sapiens
cctggctcaactctg

SEQ ID NO: 152721 - DNA, 15 bp, Homo sapiens
acctggctcaactct

SEQ ID NO: 152722 - DNA, 15 bp, Homo sapiens
cacctggctcaactc

SEQ ID NO: 152723 - DNA, 15 bp, Homo sapiens
ccacctggctcaact

SEQ ID NO: 152724 - DNA, 15 bp, Homo sapiens
gccacctggctcaac

SEQ ID NO: 152725 - DNA, 15 bp, Homo sapiens
ggccacctggctcaa

SEQ ID NO: 152726 - DNA, 15 bp, Homo sapiens
tggccacctggctca

SEQ ID NO: 152727 - DNA, 15 bp, Homo sapiens
ttggccacctggctc

SEQ ID NO: 152728 - DNA, 15 bp, Homo sapiens
tttggccacctggct

SEQ ID NO: 152729 - DNA, 15 bp, Homo sapiens
ctttggccacctggc

SEQ ID NO: 152730 - DNA, 15 bp, Homo sapiens
cctttggccacctgg

SEQ ID NO: 152731 - DNA, 15 bp, Homo sapiens
acctttggccacctg

SEQ ID NO: 152732 - DNA, 15 bp, Homo sapiens
gacctttggccacct

SEQ ID NO: 152733 - DNA, 15 bp, Homo sapiens
tgacctttggccacc

SEQ ID NO: 152734 - DNA, 15 bp, Homo sapiens
ctgacctttggccac

SEQ ID NO: 152735 - DNA, 15 bp, Homo sapiens
tctgacctttggcca

SEQ ID NO: 152736 - DNA, 15 bp, Homo sapiens
atctgacctttggcc

SEQ ID NO: 152737 - DNA, 15 bp, Homo sapiens
tatctgacctttggc

SEQ ID NO: 152738 - DNA, 15 bp, Homo sapiens
atatctgacctttgg

SEQ ID NO: 152739 - DNA, 15 bp, Homo sapiens
aatatctgacctttg

SEQ ID NO: 152740 - DNA, 15 bp, Homo sapiens
taatatctgaccttt

SEQ ID NO: 152741 - DNA, 15 bp, Homo sapiens
ttaatatctgacctt

SEQ ID NO: 152742 - DNA, 15 bp, Homo sapiens
tttaatatctgacct

SEQ ID NO: 152743 - DNA, 15 bp, Homo sapiens
ttttaatatctgacc

SEQ ID NO: 152744 - DNA, 15 bp, Homo sapiens
attttaatatctgac

SEQ ID NO: 152745 - DNA, 15 bp, Homo sapiens
cattttaatatctga

SEQ ID NO: 152746 - DNA, 15 bp, Homo sapiens
gcattttaatatctg

SEQ ID NO: 152747 - DNA, 15 bp, Homo sapiens
tgcattttaatatct

SEQ ID NO: 152748 - DNA, 15 bp, Homo sapiens
atgcattttaatatc

SEQ ID NO: 152749 - DNA, 15 bp, Homo sapiens
tatgcattttaatat

SEQ ID NO: 152750 - DNA, 15 bp, Homo sapiens
atatgcattttaata

SEQ ID NO: 152751 - DNA, 15 bp, Homo sapiens
aatatgcattttaat

SEQ ID NO: 152752 - DNA, 15 bp, Homo sapiens
taatatgcattttaa

SEQ ID NO: 152753 - DNA, 15 bp, Homo sapiens
ttaatatgcatttta

SEQ ID NO: 152754 - DNA, 15 bp, Homo sapiens
tttaatatgcatttt

SEQ ID NO: 152755 - DNA, 15 bp, Homo sapiens
atttaatatgcattt

SEQ ID NO: 152756 - DNA, 15 bp, Homo sapiens
catttaatatgcatt

SEQ ID NO: 152757 - DNA, 15 bp, Homo sapiens
gcatttaatatgcat

SEQ ID NO: 152758 - DNA, 15 bp, Homo sapiens
tgcatttaatatgca

SEQ ID NO: 152759 - DNA, 15 bp, Homo sapiens
atgcatttaatatgc

SEQ ID NO: 152760 - DNA, 15 bp, Homo sapiens
aatgcatttaatatg

SEQ ID NO: 152761 - DNA, 15 bp, Homo sapiens
aaatgcatttaatat

SEQ ID NO: 152762 - DNA, 15 bp, Homo sapiens
aaaatgcatttaata

SEQ ID NO: 152763 - DNA, 15 bp, Homo sapiens
aaaaatgcatttaat

SEQ ID NO: 152764 - DNA, 15 bp, Homo sapiens
caaaaatgcatttaa

SEQ ID NO: 152765 - DNA, 15 bp, Homo sapiens
tcaaaaatgcattta

SEQ ID NO: 152766 - DNA, 15 bp, Homo sapiens
atcaaaaatgcattt

SEQ ID NO: 152767 - DNA, 15 bp, Homo sapiens
tatcaaaaatgcatt

SEQ ID NO: 152768 - DNA, 15 bp, Homo sapiens
ctatcaaaaatgcat

SEQ ID NO: 152769 - DNA, 15 bp, Homo sapiens
tctatcaaaaatgca

SEQ ID NO: 152770 - DNA, 15 bp, Homo sapiens
gtctatcaaaaatgc

SEQ ID NO: 152771 - DNA, 15 bp, Homo sapiens
ggtctatcaaaaatg

SEQ ID NO: 152772 - DNA, 15 bp, Homo sapiens
tggtctatcaaaaat

SEQ ID NO: 152773 - DNA, 15 bp, Homo sapiens
ttggtctatcaaaaa

SEQ ID NO: 152774 - DNA, 15 bp, Homo sapiens
gttggtctatcaaaa

SEQ ID NO: 152775 - DNA, 15 bp, Homo sapiens
tgttggtctatcaaa

SEQ ID NO: 152776 - DNA, 15 bp, Homo sapiens
ctgttggtctatcaa

SEQ ID NO: 152777 - DNA, 15 bp, Homo sapiens
gctgttggtctatca

SEQ ID NO: 152778 - DNA, 15 bp, Homo sapiens
tgctgttggtctatc

SEQ ID NO: 152779 - DNA, 15 bp, Homo sapiens
ttgctgttggtctat

SEQ ID NO: 152780 - DNA, 15 bp, Homo sapiens
tttgctgttggtcta

SEQ ID NO: 152781 - DNA, 15 bp, Homo sapiens
atttgctgttggtct

SEQ ID NO: 152782 - DNA, 15 bp, Homo sapiens
tatttgctgttggtc

SEQ ID NO: 152783 - DNA, 15 bp, Homo sapiens
ttatttgctgttggt

SEQ ID NO: 152784 - DNA, 15 bp, Homo sapiens
attatttgctgttgg

SEQ ID NO: 152785 - DNA, 15 bp, Homo sapiens
aattatttgctgttg

SEQ ID NO: 152786 - DNA, 15 bp, Homo sapiens
caattatttgctgtt

SEQ ID NO: 152787 - DNA, 15 bp, Homo sapiens
ccaattatttgctgt

SEQ ID NO: 152788 - DNA, 15 bp, Homo sapiens
tccaattatttgctg

SEQ ID NO: 152789 - DNA, 15 bp, Homo sapiens
ttccaattatttgct

SEQ ID NO: 152790 - DNA, 15 bp, Homo sapiens
tttccaattatttgc

SEQ ID NO: 152791 - DNA, 15 bp, Homo sapiens
ttttccaattatttg

SEQ ID NO: 152792 - DNA, 15 bp, Homo sapiens
gttttccaattattt

SEQ ID NO: 152793 - DNA, 15 bp, Homo sapiens
tgttttccaattatt

SEQ ID NO: 152794 - DNA, 15 bp, Homo sapiens
gtgttttccaattat

SEQ ID NO: 152795 - DNA, 15 bp, Homo sapiens
tgtgttttccaatta

SEQ ID NO: 152796 - DNA, 15 bp, Homo sapiens
ttgtgttttccaatt

SEQ ID NO: 152797 - DNA, 15 bp, Homo sapiens
attgtgttttccaat

SEQ ID NO: 152798 - DNA, 15 bp, Homo sapiens
tattgtgttttccaa

SEQ ID NO: 152799 - DNA, 15 bp, Homo sapiens
ctattgtgttttcca

SEQ ID NO: 152800 - DNA, 15 bp, Homo sapiens
tctattgtgttttcc

SEQ ID NO: 152801 - DNA, 15 bp, Homo sapiens
ctctattgtgttttc

SEQ ID NO: 152802 - DNA, 15 bp, Homo sapiens
cctctattgtgtttt

SEQ ID NO: 152803 - DNA, 15 bp, Homo sapiens
tcctctattgtgttt

SEQ ID NO: 152804 - DNA, 15 bp, Homo sapiens
ttcctctattgtgtt

SEQ ID NO: 152805 - DNA, 15 bp, Homo sapiens
tttcctctattgtgt

SEQ ID NO: 152806 - DNA, 15 bp, Homo sapiens
gtttcctctattgtg

SEQ ID NO: 152807 - DNA, 15 bp, Homo sapiens
ggtttcctctattgt

SEQ ID NO: 152808 - DNA, 15 bp, Homo sapiens
tggtttcctctattg

SEQ ID NO: 152809 - DNA, 15 bp, Homo sapiens
ttggtttcctctatt

SEQ ID NO: 152810 - DNA, 15 bp, Homo sapiens
cttggtttcctctat

SEQ ID NO: 152811 - DNA, 15 bp, Homo sapiens
ccttggtttcctcta

SEQ ID NO: 152812 - DNA, 15 bp, Homo sapiens
gccttggtttcctct

SEQ ID NO: 152813 - DNA, 15 bp, Homo sapiens
agccttggtttcctc

SEQ ID NO: 152814 - DNA, 15 bp, Homo sapiens
gagccttggtttcct

SEQ ID NO: 152815 - DNA, 15 bp, Homo sapiens
ggagccttggtttcc

SEQ ID NO: 152816 - DNA, 15 bp, Homo sapiens
cggagccttggtttc

SEQ ID NO: 152817 - DNA, 15 bp, Homo sapiens
acggagccttggttt

SEQ ID NO: 152818 - DNA, 15 bp, Homo sapiens
cacggagccttggtt

SEQ ID NO: 152819 - DNA, 15 bp, Homo sapiens
acacggagccttggt

SEQ ID NO: 152820 - DNA, 15 bp, Homo sapiens
cacacggagccttgg

SEQ ID NO: 152821 - DNA, 15 bp, Homo sapiens
ccacacggagccttg

SEQ ID NO: 152822 - DNA, 15 bp, Homo sapiens
cccacacggagcctt

SEQ ID NO: 152823 - DNA, 15 bp, Homo sapiens
ccccacacggagcct

SEQ ID NO: 152824 - DNA, 15 bp, Homo sapiens
gccccacacggagcc

SEQ ID NO: 152825 - DNA, 15 bp, Homo sapiens
cgccccacacggagc

SEQ ID NO: 152826 - DNA, 15 bp, Homo sapiens
ccgccccacacggag

SEQ ID NO: 152827 - DNA, 15 bp, Homo sapiens
cccgccccacacgga

SEQ ID NO: 152828 - DNA, 15 bp, Homo sapiens
ccccgccccacacgg

SEQ ID NO: 152829 - DNA, 15 bp, Homo sapiens
accccgccccacacg

SEQ ID NO: 152830 - DNA, 15 bp, Homo sapiens
aaccccgccccacac

SEQ ID NO: 152831 - DNA, 15 bp, Homo sapiens
aaaccccgccccaca

SEQ ID NO: 152832 - DNA, 15 bp, Homo sapiens
aaaaccccgccccac

SEQ ID NO: 152833 - DNA, 15 bp, Homo sapiens
caaaaccccgcccca

SEQ ID NO: 152834 - DNA, 15 bp, Homo sapiens
gcaaaaccccgcccc

SEQ ID NO: 152835 - DNA, 15 bp, Homo sapiens
tgcaaaaccccgccc

SEQ ID NO: 152836 - DNA, 15 bp, Homo sapiens
atgcaaaaccccgcc

SEQ ID NO: 152837 - DNA, 15 bp, Homo sapiens
aatgcaaaaccccgc

SEQ ID NO: 152838 - DNA, 15 bp, Homo sapiens
taatgcaaaaccccg

SEQ ID NO: 152839 - DNA, 15 bp, Homo sapiens
ataatgcaaaacccc

SEQ ID NO: 152840 - DNA, 15 bp, Homo sapiens
gataatgcaaaaccc

SEQ ID NO: 152841 - DNA, 15 bp, Homo sapiens
ggataatgcaaaacc

SEQ ID NO: 152842 - DNA, 15 bp, Homo sapiens
tggataatgcaaaac

SEQ ID NO: 152843 - DNA, 15 bp, Homo sapiens
ctggataatgcaaaa

SEQ ID NO: 152844 - DNA, 15 bp, Homo sapiens
actggataatgcaaa

SEQ ID NO: 152845 - DNA, 15 bp, Homo sapiens
cactggataatgcaa

SEQ ID NO: 152846 - DNA, 15 bp, Homo sapiens
tcactggataatgca

SEQ ID NO: 152847 - DNA, 15 bp, Homo sapiens
ctcactggataatgc

SEQ ID NO: 152848 - DNA, 15 bp, Homo sapiens
cctcactggataatg

SEQ ID NO: 152849 - DNA, 15 bp, Homo sapiens
gcctcactggataat

SEQ ID NO: 152850 - DNA, 15 bp, Homo sapiens
tgcctcactggataa

SEQ ID NO: 152851 - DNA, 15 bp, Homo sapiens
atgcctcactggata

SEQ ID NO: 152852 - DNA, 15 bp, Homo sapiens
gatgcctcactggat

SEQ ID NO: 152853 - DNA, 15 bp, Homo sapiens
ggatgcctcactgga

SEQ ID NO: 152854 - DNA, 15 bp, Homo sapiens
tggatgcctcactgg

SEQ ID NO: 152855 - DNA, 15 bp, Homo sapiens
gtggatgcctcactg

SEQ ID NO: 152856 - DNA, 15 bp, Homo sapiens
cgtggatgcctcact

SEQ ID NO: 152857 - DNA, 15 bp, Homo sapiens
gcgtggatgcctcac

SEQ ID NO: 152858 - DNA, 15 bp, Homo sapiens
agcgtggatgcctca

SEQ ID NO: 152859 - DNA, 15 bp, Homo sapiens
cagcgtggatgcctc

SEQ ID NO: 152860 - DNA, 15 bp, Homo sapiens
gcagcgtggatgcct

SEQ ID NO: 152861 - DNA, 15 bp, Homo sapiens
agcagcgtggatgcc

SEQ ID NO: 152862 - DNA, 15 bp, Homo sapiens
cagcagcgtggatgc

SEQ ID NO: 152863 - DNA, 15 bp, Homo sapiens
tcagcagcgtggatg

SEQ ID NO: 152864 - DNA, 15 bp, Homo sapiens
atcagcagcgtggat

SEQ ID NO: 152865 - DNA, 15 bp, Homo sapiens
aatcagcagcgtgga

SEQ ID NO: 152866 - DNA, 15 bp, Homo sapiens
gaatcagcagcgtgg

SEQ ID NO: 152867 - DNA, 15 bp, Homo sapiens
agaatcagcagcgtg

SEQ ID NO: 152868 - DNA, 15 bp, Homo sapiens
gagaatcagcagcgt

SEQ ID NO: 152869 - DNA, 15 bp, Homo sapiens
agagaatcagcagcg

SEQ ID NO: 152870 - DNA, 15 bp, Homo sapiens
aagagaatcagcagc

SEQ ID NO: 152871 - DNA, 15 bp, Homo sapiens
aaagagaatcagcag

SEQ ID NO: 152872 - DNA, 15 bp, Homo sapiens
gaaagagaatcagca

SEQ ID NO: 152873 - DNA, 15 bp, Homo sapiens
agaaagagaatcagc

SEQ ID NO: 152874 - DNA, 15 bp, Homo sapiens
tagaaagagaatcag

SEQ ID NO: 152875 - DNA, 15 bp, Homo sapiens
ttagaaagagaatca

SEQ ID NO: 152876 - DNA, 15 bp, Homo sapiens
attagaaagagaatc

SEQ ID NO: 152877 - DNA, 15 bp, Homo sapiens
cattagaaagagaat

SEQ ID NO: 152878 - DNA, 15 bp, Homo sapiens
tcattagaaagagaa

SEQ ID NO: 152879 - DNA, 15 bp, Homo sapiens
atcattagaaagaga

SEQ ID NO: 152880 - DNA, 15 bp, Homo sapiens
tatcattagaaagag

SEQ ID NO: 152881 - DNA, 15 bp, Homo sapiens
atatcattagaaaga

SEQ ID NO: 152882 - DNA, 15 bp, Homo sapiens
aatatcattagaaag

SEQ ID NO: 152883 - DNA, 15 bp, Homo sapiens
aaatatcattagaaa

SEQ ID NO: 152884 - DNA, 15 bp, Homo sapiens
caaatatcattagaa

SEQ ID NO: 152885 - DNA, 15 bp, Homo sapiens
acaaatatcattaga

SEQ ID NO: 152886 - DNA, 15 bp, Homo sapiens
tacaaatatcattag

SEQ ID NO: 152887 - DNA, 15 bp, Homo sapiens
gtacaaatatcatta

SEQ ID NO: 152888 - DNA, 15 bp, Homo sapiens
tgtacaaatatcatt

SEQ ID NO: 152889 - DNA, 15 bp, Homo sapiens
ctgtacaaatatcat

SEQ ID NO: 152890 - DNA, 15 bp, Homo sapiens
gctgtacaaatatca

SEQ ID NO: 152891 - DNA, 15 bp, Homo sapiens
tgctgtacaaatatc

SEQ ID NO: 152892 - DNA, 15 bp, Homo sapiens
atgctgtacaaatat

SEQ ID NO: 152893 - DNA, 15 bp, Homo sapiens
catgctgtacaaata

SEQ ID NO: 152894 - DNA, 15 bp, Homo sapiens
tcatgctgtacaaat

SEQ ID NO: 152895 - DNA, 15 bp, Homo sapiens
atcatgctgtacaaa

SEQ ID NO: 152896 - DNA, 15 bp, Homo sapiens
tatcatgctgtacaa

SEQ ID NO: 152897 - DNA, 15 bp, Homo sapiens
ttatcatgctgtaca

SEQ ID NO: 152898 - DNA, 15 bp, Homo sapiens
tttatcatgctgtac

SEQ ID NO: 152899 - DNA, 15 bp, Homo sapiens
ctttatcatgctgta

SEQ ID NO: 152900 - DNA, 15 bp, Homo sapiens
gctttatcatgctgt

SEQ ID NO: 152901 - DNA, 15 bp, Homo sapiens
tgctttatcatgctg

SEQ ID NO: 152902 - DNA, 15 bp, Homo sapiens
ctgctttatcatgct

SEQ ID NO: 152903 - DNA, 15 bp, Homo sapiens
actgctttatcatgc

SEQ ID NO: 152904 - DNA, 15 bp, Homo sapiens
tactgctttatcatg

SEQ ID NO: 152905 - DNA, 15 bp, Homo sapiens
atactgctttatcat

SEQ ID NO: 152906 - DNA, 15 bp, Homo sapiens
gatactgctttatca

SEQ ID NO: 152907 - DNA, 15 bp, Homo sapiens
cgatactgctttatc

SEQ ID NO: 152908 - DNA, 15 bp, Homo sapiens
acgatactgctttat

SEQ ID NO: 152909 - DNA, 15 bp, Homo sapiens
tacgatactgcttta

SEQ ID NO: 152910 - DNA, 15 bp, Homo sapiens
atacgatactgcttt

SEQ ID NO: 152911 - DNA, 15 bp, Homo sapiens
tatacgatactgctt

SEQ ID NO: 152912 - DNA, 15 bp, Homo sapiens
gtatacgatactgct

SEQ ID NO: 152913 - DNA, 15 bp, Homo sapiens
tgtatacgatactgc

SEQ ID NO: 152914 - DNA, 15 bp, Homo sapiens
atgtatacgatactg

SEQ ID NO: 152915 - DNA, 15 bp, Homo sapiens
gatgtatacgatact

SEQ ID NO: 152916 - DNA, 15 bp, Homo sapiens
ggatgtatacgatac

SEQ ID NO: 152917 - DNA, 15 bp, Homo sapiens
tggatgtatacgata

SEQ ID NO: 152918 - DNA, 15 bp, Homo sapiens
ctggatgtatacgat

SEQ ID NO: 152919 - DNA, 15 bp, Homo sapiens
gctggatgtatacga

SEQ ID NO: 152920 - DNA, 15 bp, Homo sapiens
ggctggatgtatacg

SEQ ID NO: 152921 - DNA, 15 bp, Homo sapiens
gggctggatgtatac

SEQ ID NO: 152922 - DNA, 15 bp, Homo sapiens
tgggctggatgtata

SEQ ID NO: 152923 - DNA, 15 bp, Homo sapiens
gtgggctggatgtat

SEQ ID NO: 152924 - DNA, 15 bp, Homo sapiens
agtgggctggatgta

SEQ ID NO: 152925 - DNA, 15 bp, Homo sapiens
cagtgggctggatgt

SEQ ID NO: 152926 - DNA, 15 bp, Homo sapiens
ccagtgggctggatg

SEQ ID NO: 152927 - DNA, 15 bp, Homo sapiens
cccagtgggctggat

SEQ ID NO: 152928 - DNA, 15 bp, Homo sapiens
ccccagtgggctgga

SEQ ID NO: 152929 - DNA, 15 bp, Homo sapiens
gccccagtgggctgg

SEQ ID NO: 152930 - DNA, 15 bp, Homo sapiens
tgccccagtgggctg

SEQ ID NO: 152931 - DNA, 15 bp, Homo sapiens
ttgccccagtgggct

SEQ ID NO: 152932 - DNA, 15 bp, Homo sapiens
cttgccccagtgggc

SEQ ID NO: 152933 - DNA, 15 bp, Homo sapiens
ccttgccccagtggg

SEQ ID NO: 152934 - DNA, 15 bp, Homo sapiens
gccttgccccagtgg

SEQ ID NO: 152935 - DNA, 15 bp, Homo sapiens
tgccttgccccagtg

SEQ ID NO: 152936 - DNA, 15 bp, Homo sapiens
ctgccttgccccagt

SEQ ID NO: 152937 - DNA, 15 bp, Homo sapiens
tctgccttgccccag

SEQ ID NO: 152938 - DNA, 15 bp, Homo sapiens
atctgccttgcccca

SEQ ID NO: 152939 - DNA, 15 bp, Homo sapiens
tatctgccttgcccc

SEQ ID NO: 152940 - DNA, 15 bp, Homo sapiens
gtatctgccttgccc

SEQ ID NO: 152941 - DNA, 15 bp, Homo sapiens
ggtatctgccttgcc

SEQ ID NO: 152942 - DNA, 15 bp, Homo sapiens
aggtatctgccttgc

SEQ ID NO: 152943 - DNA, 15 bp, Homo sapiens
aaggtatctgccttg

SEQ ID NO: 152944 - DNA, 15 bp, Homo sapiens
aaaggtatctgcctt

SEQ ID NO: 152945 - DNA, 15 bp, Homo sapiens
taaaggtatctgcct

SEQ ID NO: 152946 - DNA, 15 bp, Homo sapiens
ataaaggtatctgcc

SEQ ID NO: 152947 - DNA, 15 bp, Homo sapiens
aataaaggtatctgc

SEQ ID NO: 152948 - DNA, 15 bp, Homo sapiens
aaataaaggtatctg

SEQ ID NO: 152949 - DNA, 15 bp, Homo sapiens
aaaataaaggtatct

SEQ ID NO: 152950 - DNA, 15 bp, Homo sapiens
caaaataaaggtatc

SEQ ID NO: 152951 - DNA, 15 bp, Homo sapiens
tcaaaataaaggtat

SEQ ID NO: 152952 - DNA, 15 bp, Homo sapiens
gtcaaaataaaggta

SEQ ID NO: 152953 - DNA, 15 bp, Homo sapiens
agtcaaaataaaggt

SEQ ID NO: 152954 - DNA, 15 bp, Homo sapiens
aagtcaaaataaagg

SEQ ID NO: 152955 - DNA, 15 bp, Homo sapiens
aaagtcaaaataaag

SEQ ID NO: 152956 - DNA, 15 bp, Homo sapiens
aaaagtcaaaataaa

SEQ ID NO: 152957 - DNA, 15 bp, Homo sapiens
taaaagtcaaaataa

SEQ ID NO: 152958 - DNA, 15 bp, Homo sapiens
ctaaaagtcaaaata

SEQ ID NO: 152959 - DNA, 15 bp, Homo sapiens
cctaaaagtcaaaat

SEQ ID NO: 152960 - DNA, 15 bp, Homo sapiens
ccctaaaagtcaaaa

SEQ ID NO: 152961 - DNA, 15 bp, Homo sapiens
tccctaaaagtcaaa

SEQ ID NO: 152962 - DNA, 15 bp, Homo sapiens
ctccctaaaagtcaa

SEQ ID NO: 152963 - DNA, 15 bp, Homo sapiens
cctccctaaaagtca

SEQ ID NO: 152964 - DNA, 15 bp, Homo sapiens
tcctccctaaaagtc

SEQ ID NO: 152965 - DNA, 15 bp, Homo sapiens
ttcctccctaaaagt

SEQ ID NO: 152966 - DNA, 15 bp, Homo sapiens
cttcctccctaaaag

SEQ ID NO: 152967 - DNA, 15 bp, Homo sapiens
tcttcctccctaaaa

SEQ ID NO: 152968 - DNA, 15 bp, Homo sapiens
ttcttcctccctaaa

SEQ ID NO: 152969 - DNA, 15 bp, Homo sapiens
gttcttcctccctaa

SEQ ID NO: 152970 - DNA, 15 bp, Homo sapiens
ggttcttcctcccta

SEQ ID NO: 152971 - DNA, 15 bp, Homo sapiens
tggttcttcctccct

SEQ ID NO: 152972 - DNA, 15 bp, Homo sapiens
ctggttcttcctccc

SEQ ID NO: 152973 - DNA, 15 bp, Homo sapiens
tctggttcttcctcc

SEQ ID NO: 152974 - DNA, 15 bp, Homo sapiens
ctctggttcttcctc

SEQ ID NO: 152975 - DNA, 15 bp, Homo sapiens
cctctggttcttcct

SEQ ID NO: 152976 - DNA, 15 bp, Homo sapiens
gcctctggttcttcc

SEQ ID NO: 152977 - DNA, 15 bp, Homo sapiens
agcctctggttcttc

SEQ ID NO: 152978 - DNA, 15 bp, Homo sapiens
gagcctctggttctt

SEQ ID NO: 152979 - DNA, 15 bp, Homo sapiens
tgagcctctggttct

SEQ ID NO: 152980 - DNA, 15 bp, Homo sapiens
ctgagcctctggttc

SEQ ID NO: 152981 - DNA, 15 bp, Homo sapiens
tctgagcctctggtt

SEQ ID NO: 152982 - DNA, 15 bp, Homo sapiens
ctctgagcctctggt

SEQ ID NO: 152983 - DNA, 15 bp, Homo sapiens
cctctgagcctctgg

SEQ ID NO: 152984 - DNA, 15 bp, Homo sapiens
acctctgagcctctg

SEQ ID NO: 152985 - DNA, 15 bp, Homo sapiens
aacctctgagcctct

SEQ ID NO: 152986 - DNA, 15 bp, Homo sapiens
taacctctgagcctc

SEQ ID NO: 152987 - DNA, 15 bp, Homo sapiens
ctaacctctgagcct

SEQ ID NO: 152988 - DNA, 15 bp, Homo sapiens
tctaacctctgagcc

SEQ ID NO: 152989 - DNA, 15 bp, Homo sapiens
ctctaacctctgagc

SEQ ID NO: 152990 - DNA, 15 bp, Homo sapiens
gctctaacctctgag

SEQ ID NO: 152991 - DNA, 15 bp, Homo sapiens
tgctctaacctctga

SEQ ID NO: 152992 - DNA, 15 bp, Homo sapiens
gtgctctaacctctg

SEQ ID NO: 152993 - DNA, 15 bp, Homo sapiens
ggtgctctaacctct

SEQ ID NO: 152994 - DNA, 15 bp, Homo sapiens
gggtgctctaacctc

SEQ ID NO: 152995 - DNA, 15 bp, Homo sapiens
agggtgctctaacct

SEQ ID NO: 152996 - DNA, 15 bp, Homo sapiens
aagggtgctctaacc

SEQ ID NO: 152997 - DNA, 15 bp, Homo sapiens
caagggtgctctaac

SEQ ID NO: 152998 - DNA, 15 bp, Homo sapiens
gcaagggtgctctaa

SEQ ID NO: 152999 - DNA, 15 bp, Homo sapiens
ggcaagggtgctcta

SEQ ID NO: 153000 - DNA, 15 bp, Homo sapiens
gggcaagggtgctct

SEQ ID NO: 153001 - DNA, 15 bp, Homo sapiens
tgggcaagggtgctc

SEQ ID NO: 153002 - DNA, 15 bp, Homo sapiens
ttgggcaagggtgct

SEQ ID NO: 153003 - DNA, 15 bp, Homo sapiens
cttgggcaagggtgc

SEQ ID NO: 153004 - DNA, 15 bp, Homo sapiens
gcttgggcaagggtg

SEQ ID NO: 153005 - DNA, 15 bp, Homo sapiens
agcttgggcaagggt

SEQ ID NO: 153006 - DNA, 15 bp, Homo sapiens
cagcttgggcaaggg

SEQ ID NO: 153007 - DNA, 15 bp, Homo sapiens
tcagcttgggcaagg

SEQ ID NO: 153008 - DNA, 15 bp, Homo sapiens
gtcagcttgggcaag

SEQ ID NO: 153009 - DNA, 15 bp, Homo sapiens
agtcagcttgggcaa

SEQ ID NO: 153010 - DNA, 15 bp, Homo sapiens
gagtcagcttgggca

SEQ ID NO: 153011 - DNA, 15 bp, Homo sapiens
tgagtcagcttgggc

SEQ ID NO: 153012 - DNA, 15 bp, Homo sapiens
ctgagtcagcttggg

SEQ ID NO: 153013 - DNA, 15 bp, Homo sapiens
actgagtcagcttgg

SEQ ID NO: 153014 - DNA, 15 bp, Homo sapiens
cactgagtcagcttg

SEQ ID NO: 153015 - DNA, 15 bp, Homo sapiens
tcactgagtcagctt

SEQ ID NO: 153016 - DNA, 15 bp, Homo sapiens
gtcactgagtcagct

SEQ ID NO: 153017 - DNA, 15 bp, Homo sapiens
agtcactgagtcagc

SEQ ID NO: 153018 - DNA, 15 bp, Homo sapiens
tagtcactgagtcag

SEQ ID NO: 153019 - DNA, 15 bp, Homo sapiens
ctagtcactgagtca

SEQ ID NO: 153020 - DNA, 15 bp, Homo sapiens
cctagtcactgagtc

SEQ ID NO: 153021 - DNA, 15 bp, Homo sapiens
tcctagtcactgagt

SEQ ID NO: 153022 - DNA, 15 bp, Homo sapiens
ctcctagtcactgag

SEQ ID NO: 153023 - DNA, 15 bp, Homo sapiens
cctcctagtcactga

SEQ ID NO: 153024 - DNA, 15 bp, Homo sapiens
gcctcctagtcactg

SEQ ID NO: 153025 - DNA, 15 bp, Homo sapiens
agcctcctagtcact

SEQ ID NO: 153026 - DNA, 15 bp, Homo sapiens
cagcctcctagtcac

SEQ ID NO: 153027 - DNA, 15 bp, Homo sapiens
tcagcctcctagtca

SEQ ID NO: 153028 - DNA, 15 bp, Homo sapiens
ctcagcctcctagtc

SEQ ID NO: 153029 - DNA, 15 bp, Homo sapiens
gctcagcctcctagt

SEQ ID NO: 153030 - DNA, 15 bp, Homo sapiens
agctcagcctcctag

SEQ ID NO: 153031 - DNA, 15 bp, Homo sapiens
cagctcagcctccta

SEQ ID NO: 153032 - DNA, 15 bp, Homo sapiens
ccagctcagcctcct

SEQ ID NO: 153033 - DNA, 15 bp, Homo sapiens
cccagctcagcctcc

SEQ ID NO: 153034 - DNA, 15 bp, Homo sapiens
ccccagctcagcctc

SEQ ID NO: 153035 - DNA, 15 bp, Homo sapiens
gccccagctcagcct

SEQ ID NO: 153036 - DNA, 15 bp, Homo sapiens
ggccccagctcagcc

SEQ ID NO: 153037 - DNA, 15 bp, Homo sapiens
aggccccagctcagc

SEQ ID NO: 153038 - DNA, 15 bp, Homo sapiens
caggccccagctcag

SEQ ID NO: 153039 - DNA, 15 bp, Homo sapiens
ccaggccccagctca

SEQ ID NO: 153040 - DNA, 15 bp, Homo sapiens
gccaggccccagctc

SEQ ID NO: 153041 - DNA, 15 bp, Homo sapiens
ggccaggccccagct

SEQ ID NO: 153042 - DNA, 15 bp, Homo sapiens
gggccaggccccagc

SEQ ID NO: 153043 - DNA, 15 bp, Homo sapiens
ggggccaggccccag

SEQ ID NO: 153044 - DNA, 15 bp, Homo sapiens
gggggccaggcccca

SEQ ID NO: 153045 - DNA, 15 bp, Homo sapiens
agggggccaggcccc

SEQ ID NO: 153046 - DNA, 15 bp, Homo sapiens
cagggggccaggccc

SEQ ID NO: 153047 - DNA, 15 bp, Homo sapiens
ccagggggccaggcc

SEQ ID NO: 153048 - DNA, 15 bp, Homo sapiens
tccagggggccaggc

SEQ ID NO: 153049 - DNA, 15 bp, Homo sapiens
gtccagggggccagg

SEQ ID NO: 153050 - DNA, 15 bp, Homo sapiens
ggtccagggggccag

SEQ ID NO: 153051 - DNA, 15 bp, Homo sapiens
tggtccagggggcca

SEQ ID NO: 153052 - DNA, 15 bp, Homo sapiens
ttggtccagggggcc

SEQ ID NO: 153053 - DNA, 15 bp, Homo sapiens
gttggtccagggggc

SEQ ID NO: 153054 - DNA, 15 bp, Homo sapiens
ggttggtccaggggg

SEQ ID NO: 153055 - DNA, 15 bp, Homo sapiens
gggttggtccagggg

SEQ ID NO: 153056 - DNA, 15 bp, Homo sapiens
agggttggtccaggg

SEQ ID NO: 153057 - DNA, 15 bp, Homo sapiens
gagggttggtccagg

SEQ ID NO: 153058 - DNA, 15 bp, Homo sapiens
tgagggttggtccag

SEQ ID NO: 153059 - DNA, 15 bp, Homo sapiens
atgagggttggtcca

SEQ ID NO: 153060 - DNA, 15 bp, Homo sapiens
aatgagggttggtcc

SEQ ID NO: 153061 - DNA, 15 bp, Homo sapiens
gaatgagggttggtc

SEQ ID NO: 153062 - DNA, 15 bp, Homo sapiens
ggaatgagggttggt

SEQ ID NO: 153063 - DNA, 15 bp, Homo sapiens
aggaatgagggttgg

SEQ ID NO: 153064 - DNA, 15 bp, Homo sapiens
aaggaatgagggttg

SEQ ID NO: 153065 - DNA, 15 bp, Homo sapiens
aaaggaatgagggtt

SEQ ID NO: 153066 - DNA, 15 bp, Homo sapiens
aaaaggaatgagggt

SEQ ID NO: 153067 - DNA, 15 bp, Homo sapiens
aaaaaggaatgaggg

SEQ ID NO: 153068 - DNA, 15 bp, Homo sapiens
caaaaaggaatgagg

SEQ ID NO: 153069 - DNA, 15 bp, Homo sapiens
gcaaaaaggaatgag

SEQ ID NO: 153070 - DNA, 15 bp, Homo sapiens
agcaaaaaggaatga

SEQ ID NO: 153071 - DNA, 15 bp, Homo sapiens
cagcaaaaaggaatg

SEQ ID NO: 153072 - DNA, 15 bp, Homo sapiens
gcagcaaaaaggaat

SEQ ID NO: 153073 - DNA, 15 bp, Homo sapiens
agcagcaaaaaggaa

SEQ ID NO: 153074 - DNA, 15 bp, Homo sapiens
aagcagcaaaaagga

SEQ ID NO: 153075 - DNA, 15 bp, Homo sapiens
aaagcagcaaaaagg

SEQ ID NO: 153076 - DNA, 15 bp, Homo sapiens
gaaagcagcaaaaag

SEQ ID NO: 153077 - DNA, 15 bp, Homo sapiens
agaaagcagcaaaaa

SEQ ID NO: 153078 - DNA, 15 bp, Homo sapiens
tagaaagcagcaaaa

SEQ ID NO: 153079 - DNA, 15 bp, Homo sapiens
gtagaaagcagcaaa

SEQ ID NO: 153080 - DNA, 15 bp, Homo sapiens
ggtagaaagcagcaa

SEQ ID NO: 153081 - DNA, 15 bp, Homo sapiens
gggtagaaagcagca

SEQ ID NO: 153082 - DNA, 15 bp, Homo sapiens
tgggtagaaagcagc

SEQ ID NO: 153083 - DNA, 15 bp, Homo sapiens
gtgggtagaaagcag

SEQ ID NO: 153084 - DNA, 15 bp, Homo sapiens
ggtgggtagaaagca

SEQ ID NO: 153085 - DNA, 15 bp, Homo sapiens
gggtgggtagaaagc

SEQ ID NO: 153086 - DNA, 15 bp, Homo sapiens
ggggtgggtagaaag

SEQ ID NO: 153087 - DNA, 15 bp, Homo sapiens
tggggtgggtagaaa

SEQ ID NO: 153088 - DNA, 15 bp, Homo sapiens
gtggggtgggtagaa

SEQ ID NO: 153089 - DNA, 15 bp, Homo sapiens
ggtggggtgggtaga

SEQ ID NO: 153090 - DNA, 15 bp, Homo sapiens
aggtggggtgggtag

SEQ ID NO: 153091 - DNA, 15 bp, Homo sapiens
aaggtggggtgggta

SEQ ID NO: 153092 - DNA, 15 bp, Homo sapiens
gaaggtggggtgggt

SEQ ID NO: 153093 - DNA, 15 bp, Homo sapiens
agaaggtggggtggg

SEQ ID NO: 153094 - DNA, 15 bp, Homo sapiens
aagaaggtggggtgg

SEQ ID NO: 153095 - DNA, 15 bp, Homo sapiens
gaagaaggtggggtg

SEQ ID NO: 153096 - DNA, 15 bp, Homo sapiens
tgaagaaggtggggt

SEQ ID NO: 153097 - DNA, 15 bp, Homo sapiens
ctgaagaaggtgggg

SEQ ID NO: 153098 - DNA, 15 bp, Homo sapiens
tctgaagaaggtggg

SEQ ID NO: 153099 - DNA, 15 bp, Homo sapiens
gtctgaagaaggtgg

SEQ ID NO: 153100 - DNA, 15 bp, Homo sapiens
ggtctgaagaaggtg

SEQ ID NO: 153101 - DNA, 15 bp, Homo sapiens
aggtctgaagaaggt

SEQ ID NO: 153102 - DNA, 15 bp, Homo sapiens
aaggtctgaagaagg

SEQ ID NO: 153103 - DNA, 15 bp, Homo sapiens
taaggtctgaagaag

SEQ ID NO: 153104 - DNA, 15 bp, Homo sapiens
gtaaggtctgaagaa

SEQ ID NO: 153105 - DNA, 15 bp, Homo sapiens
agtaaggtctgaaga

SEQ ID NO: 153106 - DNA, 15 bp, Homo sapiens
aagtaaggtctgaag

SEQ ID NO: 153107 - DNA, 15 bp, Homo sapiens
aaagtaaggtctgaa

SEQ ID NO: 153108 - DNA, 15 bp, Homo sapiens
gaaagtaaggtctga

SEQ ID NO: 153109 - DNA, 15 bp, Homo sapiens
agaaagtaaggtctg

SEQ ID NO: 153110 - DNA, 15 bp, Homo sapiens
gagaaagtaaggtct

SEQ ID NO: 153111 - DNA, 15 bp, Homo sapiens
ggagaaagtaaggtc

SEQ ID NO: 153112 - DNA, 15 bp, Homo sapiens
tggagaaagtaaggt

SEQ ID NO: 153113 - DNA, 15 bp, Homo sapiens
gtggagaaagtaagg

SEQ ID NO: 153114 - DNA, 15 bp, Homo sapiens
ggtggagaaagtaag

SEQ ID NO: 153115 - DNA, 15 bp, Homo sapiens
tggtggagaaagtaa

SEQ ID NO: 153116 - DNA, 15 bp, Homo sapiens
atggtggagaaagta

SEQ ID NO: 153117 - DNA, 15 bp, Homo sapiens
aatggtggagaaagt

SEQ ID NO: 153118 - DNA, 15 bp, Homo sapiens
aaatggtggagaaag

SEQ ID NO: 153119 - DNA, 15 bp, Homo sapiens
caaatggtggagaaa

SEQ ID NO: 153120 - DNA, 15 bp, Homo sapiens
acaaatggtggagaa

SEQ ID NO: 153121 - DNA, 15 bp, Homo sapiens
gacaaatggtggaga

SEQ ID NO: 153122 - DNA, 15 bp, Homo sapiens
agacaaatggtggag

SEQ ID NO: 153123 - DNA, 15 bp, Homo sapiens
aagacaaatggtgga

SEQ ID NO: 153124 - DNA, 15 bp, Homo sapiens
caagacaaatggtgg

SEQ ID NO: 153125 - DNA, 15 bp, Homo sapiens
acaagacaaatggtg

SEQ ID NO: 153126 - DNA, 15 bp, Homo sapiens
aacaagacaaatggt

SEQ ID NO: 153127 - DNA, 15 bp, Homo sapiens
gaacaagacaaatgg

SEQ ID NO: 153128 - DNA, 15 bp, Homo sapiens
agaacaagacaaatg

SEQ ID NO: 153129 - DNA, 15 bp, Homo sapiens
cagaacaagacaaat

SEQ ID NO: 153130 - DNA, 15 bp, Homo sapiens
gcagaacaagacaaa

SEQ ID NO: 153131 - DNA, 15 bp, Homo sapiens
ggcagaacaagacaa

SEQ ID NO: 153132 - DNA, 15 bp, Homo sapiens
tggcagaacaagaca

SEQ ID NO: 153133 - DNA, 15 bp, Homo sapiens
ctggcagaacaagac

SEQ ID NO: 153134 - DNA, 15 bp, Homo sapiens
gctggcagaacaaga

SEQ ID NO: 153135 - DNA, 15 bp, Homo sapiens
agctggcagaacaag

SEQ ID NO: 153136 - DNA, 15 bp, Homo sapiens
aagctggcagaacaa

SEQ ID NO: 153137 - DNA, 15 bp, Homo sapiens
aaagctggcagaaca

SEQ ID NO: 153138 - DNA, 15 bp, Homo sapiens
aaaagctggcagaac

SEQ ID NO: 153139 - DNA, 15 bp, Homo sapiens
gaaaagctggcagaa

SEQ ID NO: 153140 - DNA, 15 bp, Homo sapiens
cgaaaagctggcaga

SEQ ID NO: 153141 - DNA, 15 bp, Homo sapiens
acgaaaagctggcag

SEQ ID NO: 153142 - DNA, 15 bp, Homo sapiens
aacgaaaagctggca

SEQ ID NO: 153143 - DNA, 15 bp, Homo sapiens
caacgaaaagctggc

SEQ ID NO: 153144 - DNA, 15 bp, Homo sapiens
acaacgaaaagctgg

SEQ ID NO: 153145 - DNA, 15 bp, Homo sapiens
gacaacgaaaagctg

SEQ ID NO: 153146 - DNA, 15 bp, Homo sapiens
agacaacgaaaagct

SEQ ID NO: 153147 - DNA, 15 bp, Homo sapiens
cagacaacgaaaagc

SEQ ID NO: 153148 - DNA, 15 bp, Homo sapiens
gcagacaacgaaaag

SEQ ID NO: 153149 - DNA, 15 bp, Homo sapiens
ggcagacaacgaaaa

SEQ ID NO: 153150 - DNA, 15 bp, Homo sapiens
aggcagacaacgaaa

SEQ ID NO: 153151 - DNA, 15 bp, Homo sapiens
gaggcagacaacgaa

SEQ ID NO: 153152 - DNA, 15 bp, Homo sapiens
agaggcagacaacga

SEQ ID NO: 153153 - DNA, 15 bp, Homo sapiens
tagaggcagacaacg

SEQ ID NO: 153154 - DNA, 15 bp, Homo sapiens
ctagaggcagacaac

SEQ ID NO: 153155 - DNA, 15 bp, Homo sapiens
actagaggcagacaa

SEQ ID NO: 153156 - DNA, 15 bp, Homo sapiens
tactagaggcagaca

SEQ ID NO: 153157 - DNA, 15 bp, Homo sapiens
gtactagaggcagac

SEQ ID NO: 153158 - DNA, 15 bp, Homo sapiens
ggtactagaggcaga

SEQ ID NO: 153159 - DNA, 15 bp, Homo sapiens
tggtactagaggcag

SEQ ID NO: 153160 - DNA, 15 bp, Homo sapiens
ctggtactagaggca

SEQ ID NO: 153161 - DNA, 15 bp, Homo sapiens
gctggtactagaggc

SEQ ID NO: 153162 - DNA, 15 bp, Homo sapiens
agctggtactagagg

SEQ ID NO: 153163 - DNA, 15 bp, Homo sapiens
cagctggtactagag

SEQ ID NO: 153164 - DNA, 15 bp, Homo sapiens
tcagctggtactaga

SEQ ID NO: 153165 - DNA, 15 bp, Homo sapiens
ctcagctggtactag

SEQ ID NO: 153166 - DNA, 15 bp, Homo sapiens
gctcagctggtacta

SEQ ID NO: 153167 - DNA, 15 bp, Homo sapiens
agctcagctggtact

SEQ ID NO: 153168 - DNA, 15 bp, Homo sapiens
cagctcagctggtac

SEQ ID NO: 153169 - DNA, 15 bp, Homo sapiens
ccagctcagctggta

SEQ ID NO: 153170 - DNA, 15 bp, Homo sapiens
cccagctcagctggt

SEQ ID NO: 153171 - DNA, 15 bp, Homo sapiens
acccagctcagctgg

SEQ ID NO: 153172 - DNA, 15 bp, Homo sapiens
cacccagctcagctg

SEQ ID NO: 153173 - DNA, 15 bp, Homo sapiens
ccacccagctcagct

SEQ ID NO: 153174 - DNA, 15 bp, Homo sapiens
cccacccagctcagc

SEQ ID NO: 153175 - DNA, 15 bp, Homo sapiens
tcccacccagctcag

SEQ ID NO: 153176 - DNA, 15 bp, Homo sapiens
ctcccacccagctca

SEQ ID NO: 153177 - DNA, 15 bp, Homo sapiens
cctcccacccagctc

SEQ ID NO: 153178 - DNA, 15 bp, Homo sapiens
ccctcccacccagct

SEQ ID NO: 153179 - DNA, 15 bp, Homo sapiens
tccctcccacccagc

SEQ ID NO: 153180 - DNA, 15 bp, Homo sapiens
ctccctcccacccag

SEQ ID NO: 153181 - DNA, 15 bp, Homo sapiens
tctccctcccaccca

SEQ ID NO: 153182 - DNA, 15 bp, Homo sapiens
ctctccctcccaccc

SEQ ID NO: 153183 - DNA, 15 bp, Homo sapiens
actctccctcccacc

SEQ ID NO: 153184 - DNA, 15 bp, Homo sapiens
gactctccctcccac

SEQ ID NO: 153185 - DNA, 15 bp, Homo sapiens
agactctccctccca

SEQ ID NO: 153186 - DNA, 15 bp, Homo sapiens
cagactctccctccc

SEQ ID NO: 153187 - DNA, 15 bp, Homo sapiens
ccagactctccctcc

SEQ ID NO: 153188 - DNA, 15 bp, Homo sapiens
cccagactctccctc

SEQ ID NO: 153189 - DNA, 15 bp, Homo sapiens
tcccagactctccct

SEQ ID NO: 153190 - DNA, 15 bp, Homo sapiens
ctcccagactctccc

SEQ ID NO: 153191 - DNA, 15 bp, Homo sapiens
actcccagactctcc

SEQ ID NO: 153192 - DNA, 15 bp, Homo sapiens
cactcccagactctc

SEQ ID NO: 153193 - DNA, 15 bp, Homo sapiens
acactcccagactct

SEQ ID NO: 153194 - DNA, 15 bp, Homo sapiens
aacactcccagactc

SEQ ID NO: 153195 - DNA, 15 bp, Homo sapiens
gaacactcccagact

SEQ ID NO: 153196 - DNA, 15 bp, Homo sapiens
cgaacactcccagac

SEQ ID NO: 153197 - DNA, 15 bp, Homo sapiens
ccgaacactcccaga

SEQ ID NO: 153198 - DNA, 15 bp, Homo sapiens
tccgaacactcccag

SEQ ID NO: 153199 - DNA, 15 bp, Homo sapiens
atccgaacactccca

SEQ ID NO: 153200 - DNA, 15 bp, Homo sapiens
aatccgaacactccc

SEQ ID NO: 153201 - DNA, 15 bp, Homo sapiens
aaatccgaacactcc

SEQ ID NO: 153202 - DNA, 15 bp, Homo sapiens
caaatccgaacactc

SEQ ID NO: 153203 - DNA, 15 bp, Homo sapiens
ccaaatccgaacact

SEQ ID NO: 153204 - DNA, 15 bp, Homo sapiens
cccaaatccgaacac

SEQ ID NO: 153205 - DNA, 15 bp, Homo sapiens
acccaaatccgaaca

SEQ ID NO: 153206 - DNA, 15 bp, Homo sapiens
aacccaaatccgaac

SEQ ID NO: 153207 - DNA, 15 bp, Homo sapiens
taacccaaatccgaa

SEQ ID NO: 153208 - DNA, 15 bp, Homo sapiens
ctaacccaaatccga

SEQ ID NO: 153209 - DNA, 15 bp, Homo sapiens
gctaacccaaatccg

SEQ ID NO: 153210 - DNA, 15 bp, Homo sapiens
tgctaacccaaatcc

SEQ ID NO: 153211 - DNA, 15 bp, Homo sapiens
atgctaacccaaatc

SEQ ID NO: 153212 - DNA, 15 bp, Homo sapiens
gatgctaacccaaat

SEQ ID NO: 153213 - DNA, 15 bp, Homo sapiens
agatgctaacccaaa

SEQ ID NO: 153214 - DNA, 15 bp, Homo sapiens
tagatgctaacccaa

SEQ ID NO: 153215 - DNA, 15 bp, Homo sapiens
gtagatgctaaccca

SEQ ID NO: 153216 - DNA, 15 bp, Homo sapiens
agtagatgctaaccc

SEQ ID NO: 153217 - DNA, 15 bp, Homo sapiens
gagtagatgctaacc

SEQ ID NO: 153218 - DNA, 15 bp, Homo sapiens
agagtagatgctaac

SEQ ID NO: 153219 - DNA, 15 bp, Homo sapiens
cagagtagatgctaa

SEQ ID NO: 153220 - DNA, 15 bp, Homo sapiens
acagagtagatgcta

SEQ ID NO: 153221 - DNA, 15 bp, Homo sapiens
tacagagtagatgct

SEQ ID NO: 153222 - DNA, 15 bp, Homo sapiens
ctacagagtagatgc

SEQ ID NO: 153223 - DNA, 15 bp, Homo sapiens
actacagagtagatg

SEQ ID NO: 153224 - DNA, 15 bp, Homo sapiens
cactacagagtagat

SEQ ID NO: 153225 - DNA, 15 bp, Homo sapiens
acactacagagtaga

SEQ ID NO: 153226 - DNA, 15 bp, Homo sapiens
gacactacagagtag

SEQ ID NO: 153227 - DNA, 15 bp, Homo sapiens
agacactacagagta

SEQ ID NO: 153228 - DNA, 15 bp, Homo sapiens
aagacactacagagt

SEQ ID NO: 153229 - DNA, 15 bp, Homo sapiens
aaagacactacagag

SEQ ID NO: 153230 - DNA, 15 bp, Homo sapiens
gaaagacactacaga

SEQ ID NO: 153231 - DNA, 15 bp, Homo sapiens
tgaaagacactacag

SEQ ID NO: 153232 - DNA, 15 bp, Homo sapiens
atgaaagacactaca

SEQ ID NO: 153233 - DNA, 15 bp, Homo sapiens
catgaaagacactac

SEQ ID NO: 153234 - DNA, 15 bp, Homo sapiens
tcatgaaagacacta

SEQ ID NO: 153235 - DNA, 15 bp, Homo sapiens
ctcatgaaagacact

SEQ ID NO: 153236 - DNA, 15 bp, Homo sapiens
gctcatgaaagacac

SEQ ID NO: 153237 - DNA, 15 bp, Homo sapiens
ggctcatgaaagaca

SEQ ID NO: 153238 - DNA, 15 bp, Homo sapiens
tggctcatgaaagac

SEQ ID NO: 153239 - DNA, 15 bp, Homo sapiens
gtggctcatgaaaga

SEQ ID NO: 153240 - DNA, 15 bp, Homo sapiens
tgtggctcatgaaag

SEQ ID NO: 153241 - DNA, 15 bp, Homo sapiens
ctgtggctcatgaaa

SEQ ID NO: 153242 - DNA, 15 bp, Homo sapiens
gctgtggctcatgaa

SEQ ID NO: 153243 - DNA, 15 bp, Homo sapiens
ggctgtggctcatga

SEQ ID NO: 153244 - DNA, 15 bp, Homo sapiens
aggctgtggctcatg

SEQ ID NO: 153245 - DNA, 15 bp, Homo sapiens
caggctgtggctcat

SEQ ID NO: 153246 - DNA, 15 bp, Homo sapiens
tcaggctgtggctca

SEQ ID NO: 153247 - DNA, 15 bp, Homo sapiens
gtcaggctgtggctc

SEQ ID NO: 153248 - DNA, 15 bp, Homo sapiens
ggtcaggctgtggct

SEQ ID NO: 153249 - DNA, 15 bp, Homo sapiens
aggtcaggctgtggc

SEQ ID NO: 153250 - DNA, 15 bp, Homo sapiens
aaggtcaggctgtgg

SEQ ID NO: 153251 - DNA, 15 bp, Homo sapiens
gaaggtcaggctgtg

SEQ ID NO: 153252 - DNA, 15 bp, Homo sapiens
ggaaggtcaggctgt

SEQ ID NO: 153253 - DNA, 15 bp, Homo sapiens
gggaaggtcaggctg

SEQ ID NO: 153254 - DNA, 15 bp, Homo sapiens
tgggaaggtcaggct

SEQ ID NO: 153255 - DNA, 15 bp, Homo sapiens
ctgggaaggtcaggc

SEQ ID NO: 153256 - DNA, 15 bp, Homo sapiens
cctgggaaggtcagg

SEQ ID NO: 153257 - DNA, 15 bp, Homo sapiens
tcctgggaaggtcag

SEQ ID NO: 153258 - DNA, 15 bp, Homo sapiens
gtcctgggaaggtca

SEQ ID NO: 153259 - DNA, 15 bp, Homo sapiens
cgtcctgggaaggtc

SEQ ID NO: 153260 - DNA, 15 bp, Homo sapiens
gcgtcctgggaaggt

SEQ ID NO: 153261 - DNA, 15 bp, Homo sapiens
agcgtcctgggaagg

SEQ ID NO: 153262 - DNA, 15 bp, Homo sapiens
aagcgtcctgggaag

SEQ ID NO: 153263 - DNA, 15 bp, Homo sapiens
caagcgtcctgggaa

SEQ ID NO: 153264 - DNA, 15 bp, Homo sapiens
gcaagcgtcctggga

SEQ ID NO: 153265 - DNA, 15 bp, Homo sapiens
agcaagcgtcctggg

SEQ ID NO: 153266 - DNA, 15 bp, Homo sapiens
cagcaagcgtcctgg

SEQ ID NO: 153267 - DNA, 15 bp, Homo sapiens
gcagcaagcgtcctg

SEQ ID NO: 153268 - DNA, 15 bp, Homo sapiens
tgcagcaagcgtcct

SEQ ID NO: 153269 - DNA, 15 bp, Homo sapiens
gtgcagcaagcgtcc

SEQ ID NO: 153270 - DNA, 15 bp, Homo sapiens
agtgcagcaagcgtc

SEQ ID NO: 153271 - DNA, 15 bp, Homo sapiens
cagtgcagcaagcgt

SEQ ID NO: 153272 - DNA, 15 bp, Homo sapiens
ccagtgcagcaagcg

SEQ ID NO: 153273 - DNA, 15 bp, Homo sapiens
tccagtgcagcaagc

SEQ ID NO: 153274 - DNA, 15 bp, Homo sapiens
atccagtgcagcaag

SEQ ID NO: 153275 - DNA, 15 bp, Homo sapiens
catccagtgcagcaa

SEQ ID NO: 153276 - DNA, 15 bp, Homo sapiens
gcatccagtgcagca

SEQ ID NO: 153277 - DNA, 15 bp, Homo sapiens
cgcatccagtgcagc

SEQ ID NO: 153278 - DNA, 15 bp, Homo sapiens
ccgcatccagtgcag

SEQ ID NO: 153279 - DNA, 15 bp, Homo sapiens
cccgcatccagtgca

SEQ ID NO: 153280 - DNA, 15 bp, Homo sapiens
ccccgcatccagtgc

SEQ ID NO: 153281 - DNA, 15 bp, Homo sapiens
gccccgcatccagtg

SEQ ID NO: 153282 - DNA, 15 bp, Homo sapiens
tgccccgcatccagt

SEQ ID NO: 153283 - DNA, 15 bp, Homo sapiens
ctgccccgcatccag

SEQ ID NO: 153284 - DNA, 15 bp, Homo sapiens
cctgccccgcatcca

SEQ ID NO: 153285 - DNA, 15 bp, Homo sapiens
ccctgccccgcatcc

SEQ ID NO: 153286 - DNA, 15 bp, Homo sapiens
tccctgccccgcatc

SEQ ID NO: 153287 - DNA, 15 bp, Homo sapiens
atccctgccccgcat

SEQ ID NO: 153288 - DNA, 15 bp, Homo sapiens
catccctgccccgca

SEQ ID NO: 153289 - DNA, 15 bp, Homo sapiens
ccatccctgccccgc

SEQ ID NO: 153290 - DNA, 15 bp, Homo sapiens
cccatccctgccccg

SEQ ID NO: 153291 - DNA, 15 bp, Homo sapiens
acccatccctgcccc

SEQ ID NO: 153292 - DNA, 15 bp, Homo sapiens
aacccatccctgccc

SEQ ID NO: 153293 - DNA, 15 bp, Homo sapiens
gaacccatccctgcc

SEQ ID NO: 153294 - DNA, 15 bp, Homo sapiens
agaacccatccctgc

SEQ ID NO: 153295 - DNA, 15 bp, Homo sapiens
aagaacccatccctg

SEQ ID NO: 153296 - DNA, 15 bp, Homo sapiens
gaagaacccatccct

SEQ ID NO: 153297 - DNA, 15 bp, Homo sapiens
agaagaacccatccc

SEQ ID NO: 153298 - DNA, 15 bp, Homo sapiens
cagaagaacccatcc

SEQ ID NO: 153299 - DNA, 15 bp, Homo sapiens
tcagaagaacccatc

SEQ ID NO: 153300 - DNA, 15 bp, Homo sapiens
ctcagaagaacccat

SEQ ID NO: 153301 - DNA, 15 bp, Homo sapiens
cctcagaagaaccca

SEQ ID NO: 153302 - DNA, 15 bp, Homo sapiens
ccctcagaagaaccc

SEQ ID NO: 153303 - DNA, 15 bp, Homo sapiens
tccctcagaagaacc

SEQ ID NO: 153304 - DNA, 15 bp, Homo sapiens
ctccctcagaagaac

SEQ ID NO: 153305 - DNA, 15 bp, Homo sapiens
cctccctcagaagaa

SEQ ID NO: 153306 - DNA, 15 bp, Homo sapiens
tcctccctcagaaga

SEQ ID NO: 153307 - DNA, 15 bp, Homo sapiens
ctcctccctcagaag

SEQ ID NO: 153308 - DNA, 15 bp, Homo sapiens
tctcctccctcagaa

SEQ ID NO: 153309 - DNA, 15 bp, Homo sapiens
ctctcctccctcaga

SEQ ID NO: 153310 - DNA, 15 bp, Homo sapiens
tctctcctccctcag

SEQ ID NO: 153311 - DNA, 15 bp, Homo sapiens
ctctctcctccctca

SEQ ID NO: 153312 - DNA, 15 bp, Homo sapiens
gctctctcctccctc

SEQ ID NO: 153313 - DNA, 15 bp, Homo sapiens
ggctctctcctccct

SEQ ID NO: 153314 - DNA, 15 bp, Homo sapiens
tggctctctcctccc

SEQ ID NO: 153315 - DNA, 15 bp, Homo sapiens
ctggctctctcctcc

SEQ ID NO: 153316 - DNA, 15 bp, Homo sapiens
cctggctctctcctc

SEQ ID NO: 153317 - DNA, 15 bp, Homo sapiens
gcctggctctctcct

SEQ ID NO: 153318 - DNA, 15 bp, Homo sapiens
cgcctggctctctcc

SEQ ID NO: 153319 - DNA, 15 bp, Homo sapiens
ccgcctggctctctc

SEQ ID NO: 153320 - DNA, 15 bp, Homo sapiens
accgcctggctctct

SEQ ID NO: 153321 - DNA, 15 bp, Homo sapiens
aaccgcctggctctc

SEQ ID NO: 153322 - DNA, 15 bp, Homo sapiens
caaccgcctggctct

SEQ ID NO: 153323 - DNA, 15 bp, Homo sapiens
acaaccgcctggctc

SEQ ID NO: 153324 - DNA, 15 bp, Homo sapiens
aacaaccgcctggct

SEQ ID NO: 153325 - DNA, 15 bp, Homo sapiens
aaacaaccgcctggc

SEQ ID NO: 153326 - DNA, 15 bp, Homo sapiens
caaacaaccgcctgg

SEQ ID NO: 153327 - DNA, 15 bp, Homo sapiens
ccaaacaaccgcctg

SEQ ID NO: 153328 - DNA, 15 bp, Homo sapiens
gccaaacaaccgcct

SEQ ID NO: 153329 - DNA, 15 bp, Homo sapiens
cgccaaacaaccgcc

SEQ ID NO: 153330 - DNA, 15 bp, Homo sapiens
acgccaaacaaccgc

SEQ ID NO: 153331 - DNA, 15 bp, Homo sapiens
cacgccaaacaaccg

SEQ ID NO: 153332 - DNA, 15 bp, Homo sapiens
ccacgccaaacaacc

SEQ ID NO: 153333 - DNA, 15 bp, Homo sapiens
gccacgccaaacaac

SEQ ID NO: 153334 - DNA, 15 bp, Homo sapiens
ggccacgccaaacaa

SEQ ID NO: 153335 - DNA, 15 bp, Homo sapiens
aggccacgccaaaca

SEQ ID NO: 153336 - DNA, 15 bp, Homo sapiens
caggccacgccaaac

SEQ ID NO: 153337 - DNA, 15 bp, Homo sapiens
ccaggccacgccaaa

SEQ ID NO: 153338 - DNA, 15 bp, Homo sapiens
cccaggccacgccaa

SEQ ID NO: 153339 - DNA, 15 bp, Homo sapiens
acccaggccacgcca

SEQ ID NO: 153340 - DNA, 15 bp, Homo sapiens
gacccaggccacgcc

SEQ ID NO: 153341 - DNA, 15 bp, Homo sapiens
ggacccaggccacgc

SEQ ID NO: 153342 - DNA, 15 bp, Homo sapiens
gggacccaggccacg

SEQ ID NO: 153343 - DNA, 15 bp, Homo sapiens
agggacccaggccac

SEQ ID NO: 153344 - DNA, 15 bp, Homo sapiens
gagggacccaggcca

SEQ ID NO: 153345 - DNA, 15 bp, Homo sapiens
agagggacccaggcc

SEQ ID NO: 153346 - DNA, 15 bp, Homo sapiens
gagagggacccaggc

SEQ ID NO: 153347 - DNA, 15 bp, Homo sapiens
agagagggacccagg

SEQ ID NO: 153348 - DNA, 15 bp, Homo sapiens
gagagagggacccag

SEQ ID NO: 153349 - DNA, 15 bp, Homo sapiens
agagagagggaccca

SEQ ID NO: 153350 - DNA, 15 bp, Homo sapiens
aagagagagggaccc

SEQ ID NO: 153351 - DNA, 15 bp, Homo sapiens
aaagagagagggacc

SEQ ID NO: 153352 - DNA, 15 bp, Homo sapiens
caaagagagagggac

SEQ ID NO: 153353 - DNA, 15 bp, Homo sapiens
gcaaagagagaggga

SEQ ID NO: 153354 - DNA, 15 bp, Homo sapiens
cgcaaagagagaggg

SEQ ID NO: 153355 - DNA, 15 bp, Homo sapiens
acgcaaagagagagg

SEQ ID NO: 153356 - DNA, 15 bp, Homo sapiens
aacgcaaagagagag

SEQ ID NO: 153357 - DNA, 15 bp, Homo sapiens
caacgcaaagagaga

SEQ ID NO: 153358 - DNA, 15 bp, Homo sapiens
acaacgcaaagagag

SEQ ID NO: 153359 - DNA, 15 bp, Homo sapiens
gacaacgcaaagaga

SEQ ID NO: 153360 - DNA, 15 bp, Homo sapiens
agacaacgcaaagag

SEQ ID NO: 153361 - DNA, 15 bp, Homo sapiens
gagacaacgcaaaga

SEQ ID NO: 153362 - DNA, 15 bp, Homo sapiens
ggagacaacgcaaag

SEQ ID NO: 153363 - DNA, 15 bp, Homo sapiens
gggagacaacgcaaa

SEQ ID NO: 153364 - DNA, 15 bp, Homo sapiens
ggggagacaacgcaa

SEQ ID NO: 153365 - DNA, 15 bp, Homo sapiens
aggggagacaacgca

SEQ ID NO: 153366 - DNA, 15 bp, Homo sapiens
gaggggagacaacgc

SEQ ID NO: 153367 - DNA, 15 bp, Homo sapiens
ggaggggagacaacg

SEQ ID NO: 153368 - DNA, 15 bp, Homo sapiens
gggaggggagacaac

SEQ ID NO: 153369 - DNA, 15 bp, Homo sapiens
ggggaggggagacaa

SEQ ID NO: 153370 - DNA, 15 bp, Homo sapiens
aggggaggggagaca

SEQ ID NO: 153371 - DNA, 15 bp, Homo sapiens
gaggggaggggagac

SEQ ID NO: 153372 - DNA, 15 bp, Homo sapiens
ggaggggaggggaga

SEQ ID NO: 153373 - DNA, 15 bp, Homo sapiens
tggaggggaggggag

SEQ ID NO: 153374 - DNA, 15 bp, Homo sapiens
gtggaggggagggga

SEQ ID NO: 153375 - DNA, 15 bp, Homo sapiens
tgtggaggggagggg

SEQ ID NO: 153376 - DNA, 15 bp, Homo sapiens
gtgtggaggggaggg

SEQ ID NO: 153377 - DNA, 15 bp, Homo sapiens
agtgtggaggggagg

SEQ ID NO: 153378 - DNA, 15 bp, Homo sapiens
cagtgtggaggggag

SEQ ID NO: 153379 - DNA, 15 bp, Homo sapiens
gcagtgtggagggga

SEQ ID NO: 153380 - DNA, 15 bp, Homo sapiens
agcagtgtggagggg

SEQ ID NO: 153381 - DNA, 15 bp, Homo sapiens
gagcagtgtggaggg

SEQ ID NO: 153382 - DNA, 15 bp, Homo sapiens
ggagcagtgtggagg

SEQ ID NO: 153383 - DNA, 15 bp, Homo sapiens
aggagcagtgtggag

SEQ ID NO: 153384 - DNA, 15 bp, Homo sapiens
gaggagcagtgtgga

SEQ ID NO: 153385 - DNA, 15 bp, Homo sapiens
agaggagcagtgtgg

SEQ ID NO: 153386 - DNA, 15 bp, Homo sapiens
cagaggagcagtgtg

SEQ ID NO: 153387 - DNA, 15 bp, Homo sapiens
tcagaggagcagtgt

SEQ ID NO: 153388 - DNA, 15 bp, Homo sapiens
ctcagaggagcagtg

SEQ ID NO: 153389 - DNA, 15 bp, Homo sapiens
actcagaggagcagt

SEQ ID NO: 153390 - DNA, 15 bp, Homo sapiens
gactcagaggagcag

SEQ ID NO: 153391 - DNA, 15 bp, Homo sapiens
agactcagaggagca

SEQ ID NO: 153392 - DNA, 15 bp, Homo sapiens
cagactcagaggagc

SEQ ID NO: 153393 - DNA, 15 bp, Homo sapiens
tcagactcagaggag

SEQ ID NO: 153394 - DNA, 15 bp, Homo sapiens
gtcagactcagagga

SEQ ID NO: 153395 - DNA, 15 bp, Homo sapiens
agtcagactcagagg

SEQ ID NO: 153396 - DNA, 15 bp, Homo sapiens
aagtcagactcagag

SEQ ID NO: 153397 - DNA, 15 bp, Homo sapiens
taagtcagactcaga

SEQ ID NO: 153398 - DNA, 15 bp, Homo sapiens
gtaagtcagactcag

SEQ ID NO: 153399 - DNA, 15 bp, Homo sapiens
tgtaagtcagactca

SEQ ID NO: 153400 - DNA, 15 bp, Homo sapiens
atgtaagtcagactc

SEQ ID NO: 153401 - DNA, 15 bp, Homo sapiens
gatgtaagtcagact

SEQ ID NO: 153402 - DNA, 15 bp, Homo sapiens
agatgtaagtcagac

SEQ ID NO: 153403 - DNA, 15 bp, Homo sapiens
aagatgtaagtcaga

SEQ ID NO: 153404 - DNA, 15 bp, Homo sapiens
aaagatgtaagtcag

SEQ ID NO: 153405 - DNA, 15 bp, Homo sapiens
caaagatgtaagtca

SEQ ID NO: 153406 - DNA, 15 bp, Homo sapiens
gcaaagatgtaagtc

SEQ ID NO: 153407 - DNA, 15 bp, Homo sapiens
agcaaagatgtaagt

SEQ ID NO: 153408 - DNA, 15 bp, Homo sapiens
aagcaaagatgtaag

SEQ ID NO: 153409 - DNA, 15 bp, Homo sapiens
aaagcaaagatgtaa

SEQ ID NO: 153410 - DNA, 15 bp, Homo sapiens
aaaagcaaagatgta

SEQ ID NO: 153411 - DNA, 15 bp, Homo sapiens
aaaaagcaaagatgt

SEQ ID NO: 153412 - DNA, 15 bp, Homo sapiens
aaaaaagcaaagatg

SEQ ID NO: 153413 - DNA, 15 bp, Homo sapiens
caaaaaagcaaagat

SEQ ID NO: 153414 - DNA, 15 bp, Homo sapiens
acaaaaaagcaaaga

SEQ ID NO: 153415 - DNA, 15 bp, Homo sapiens
aacaaaaaagcaaag

SEQ ID NO: 153416 - DNA, 15 bp, Homo sapiens
aaacaaaaaagcaaa

SEQ ID NO: 153417 - DNA, 15 bp, Homo sapiens
aaaacaaaaaagcaa

SEQ ID NO: 153418 - DNA, 15 bp, Homo sapiens
taaaacaaaaaagca

SEQ ID NO: 153419 - DNA, 15 bp, Homo sapiens
ataaaacaaaaaagc

SEQ ID NO: 153420 - DNA, 15 bp, Homo sapiens
aataaaacaaaaaag

SEQ ID NO: 153421 - DNA, 15 bp, Homo sapiens
aaataaaacaaaaaa

SEQ ID NO: 153422 - DNA, 15 bp, Homo sapiens
taaataaaacaaaaa

SEQ ID NO: 153423 - DNA, 15 bp, Homo sapiens
ttaaataaaacaaaa

SEQ ID NO: 153424 - DNA, 15 bp, Homo sapiens
attaaataaaacaaa

SEQ ID NO: 153425 - DNA, 15 bp, Homo sapiens
cattaaataaaacaa

SEQ ID NO: 153426 - DNA, 15 bp, Homo sapiens
acattaaataaaaca

SEQ ID NO: 153427 - DNA, 15 bp, Homo sapiens
cacattaaataaaac

SEQ ID NO: 153428 - DNA, 15 bp, Homo sapiens
acacattaaataaaa

SEQ ID NO: 153429 - DNA, 15 bp, Homo sapiens
cacacattaaataaa

SEQ ID NO: 153430 - DNA, 15 bp, Homo sapiens
acacacattaaataa

SEQ ID NO: 153431 - DNA, 15 bp, Homo sapiens
aacacacattaaata

SEQ ID NO: 153432 - DNA, 15 bp, Homo sapiens
gaacacacattaaat

SEQ ID NO: 153433 - DNA, 15 bp, Homo sapiens
tgaacacacattaaa

SEQ ID NO: 153434 - DNA, 15 bp, Homo sapiens
ttgaacacacattaa

SEQ ID NO: 153435 - DNA, 15 bp, Homo sapiens
tttgaacacacatta

SEQ ID NO: 153436 - DNA, 15 bp, Homo sapiens
ttttgaacacacatt

SEQ ID NO: 153437 - DNA, 15 bp, Homo sapiens
cttttgaacacacat

SEQ ID NO: 153438 - DNA, 15 bp, Homo sapiens
acttttgaacacaca

SEQ ID NO: 153439 - DNA, 15 bp, Homo sapiens
aacttttgaacacac

SEQ ID NO: 153440 - DNA, 15 bp, Homo sapiens
taacttttgaacaca

SEQ ID NO: 153441 - DNA, 15 bp, Homo sapiens
ataacttttgaacac

SEQ ID NO: 153442 - DNA, 15 bp, Homo sapiens
tataacttttgaaca

SEQ ID NO: 153443 - DNA, 15 bp, Homo sapiens
ttataacttttgaac

SEQ ID NO: 153444 - DNA, 15 bp, Homo sapiens
tttataacttttgaa

SEQ ID NO: 153445 - DNA, 15 bp, Homo sapiens
ttttataacttttga

SEQ ID NO: 153446 - DNA, 15 bp, Homo sapiens
tttttataacttttg

SEQ ID NO: 153447 - DNA, 15 bp, Homo sapiens
atttttataactttt

SEQ ID NO: 153448 - DNA, 15 bp, Homo sapiens
tatttttataacttt

SEQ ID NO: 153449 - DNA, 15 bp, Homo sapiens
ctatttttataactt

SEQ ID NO: 153450 - DNA, 15 bp, Homo sapiens
gctatttttataact

SEQ ID NO: 153451 - DNA, 15 bp, Homo sapiens
tgctatttttataac

SEQ ID NO: 153452 - DNA, 15 bp, Homo sapiens
atgctatttttataa

SEQ ID NO: 153453 - DNA, 15 bp, Homo sapiens
tatgctatttttata

SEQ ID NO: 153454 - DNA, 15 bp, Homo sapiens
atatgctatttttat

SEQ ID NO: 153455 - DNA, 15 bp, Homo sapiens
catatgctattttta

SEQ ID NO: 153456 - DNA, 15 bp, Homo sapiens
acatatgctattttt

SEQ ID NO: 153457 - DNA, 15 bp, Homo sapiens
aacatatgctatttt

SEQ ID NO: 153458 - DNA, 15 bp, Homo sapiens
gaacatatgctattt

SEQ ID NO: 153459 - DNA, 15 bp, Homo sapiens
tgaacatatgctatt

SEQ ID NO: 153460 - DNA, 15 bp, Homo sapiens
gtgaacatatgctat

SEQ ID NO: 153461 - DNA, 15 bp, Homo sapiens
tgtgaacatatgcta

SEQ ID NO: 153462 - DNA, 15 bp, Homo sapiens
ctgtgaacatatgct

SEQ ID NO: 153463 - DNA, 15 bp, Homo sapiens
gctgtgaacatatgc

SEQ ID NO: 153464 - DNA, 15 bp, Homo sapiens
tgctgtgaacatatg

SEQ ID NO: 153465 - DNA, 15 bp, Homo sapiens
ttgctgtgaacatat

SEQ ID NO: 153466 - DNA, 15 bp, Homo sapiens
gttgctgtgaacata

SEQ ID NO: 153467 - DNA, 15 bp, Homo sapiens
agttgctgtgaacat

SEQ ID NO: 153468 - DNA, 15 bp, Homo sapiens
cagttgctgtgaaca

SEQ ID NO: 153469 - DNA, 15 bp, Homo sapiens
ccagttgctgtgaac

SEQ ID NO: 153470 - DNA, 15 bp, Homo sapiens
accagttgctgtgaa

SEQ ID NO: 153471 - DNA, 15 bp, Homo sapiens
caccagttgctgtga

SEQ ID NO: 153472 - DNA, 15 bp, Homo sapiens
ccaccagttgctgtg

SEQ ID NO: 153473 - DNA, 15 bp, Homo sapiens
tccaccagttgctgt

SEQ ID NO: 153474 - DNA, 15 bp, Homo sapiens
ttccaccagttgctg

SEQ ID NO: 153475 - DNA, 15 bp, Homo sapiens
attccaccagttgct

SEQ ID NO: 153476 - DNA, 15 bp, Homo sapiens
gattccaccagttgc

SEQ ID NO: 153477 - DNA, 15 bp, Homo sapiens
tgattccaccagttg

SEQ ID NO: 153478 - DNA, 15 bp, Homo sapiens
atgattccaccagtt

SEQ ID NO: 153479 - DNA, 15 bp, Homo sapiens
tatgattccaccagt

SEQ ID NO: 153480 - DNA, 15 bp, Homo sapiens
ttatgattccaccag

SEQ ID NO: 153481 - DNA, 15 bp, Homo sapiens
attatgattccacca

SEQ ID NO: 153482 - DNA, 15 bp, Homo sapiens
tattatgattccacc

SEQ ID NO: 153483 - DNA, 15 bp, Homo sapiens
atattatgattccac

SEQ ID NO: 153484 - DNA, 15 bp, Homo sapiens
catattatgattcca

SEQ ID NO: 153485 - DNA, 15 bp, Homo sapiens
ccatattatgattcc

SEQ ID NO: 153486 - DNA, 15 bp, Homo sapiens
tccatattatgattc

SEQ ID NO: 153487 - DNA, 15 bp, Homo sapiens
ctccatattatgatt

SEQ ID NO: 153488 - DNA, 15 bp, Homo sapiens
tctccatattatgat

SEQ ID NO: 153489 - DNA, 15 bp, Homo sapiens
ttctccatattatga

SEQ ID NO: 153490 - DNA, 15 bp, Homo sapiens
tttctccatattatg

SEQ ID NO: 153491 - DNA, 15 bp, Homo sapiens
ttttctccatattat

SEQ ID NO: 153492 - DNA, 15 bp, Homo sapiens
tttttctccatatta

SEQ ID NO: 153493 - DNA, 15 bp, Homo sapiens
ctttttctccatatt

SEQ ID NO: 153494 - DNA, 15 bp, Homo sapiens
tctttttctccatat

SEQ ID NO: 153495 - DNA, 15 bp, Homo sapiens
ttctttttctccata

SEQ ID NO: 153496 - DNA, 15 bp, Homo sapiens
tttctttttctccat

SEQ ID NO: 153497 - DNA, 15 bp, Homo sapiens
ctttctttttctcca

SEQ ID NO: 153498 - DNA, 15 bp, Homo sapiens
actttctttttctcc

SEQ ID NO: 153499 - DNA, 15 bp, Homo sapiens
gactttctttttctc

SEQ ID NO: 153500 - DNA, 15 bp, Homo sapiens
agactttctttttct

SEQ ID NO: 153501 - DNA, 15 bp, Homo sapiens
aagactttctttttc

SEQ ID NO: 153502 - DNA, 15 bp, Homo sapiens
aaagactttcttttt

SEQ ID NO: 153503 - DNA, 15 bp, Homo sapiens
gaaagactttctttt

SEQ ID NO: 153504 - DNA, 15 bp, Homo sapiens
agaaagactttcttt

SEQ ID NO: 153505 - DNA, 15 bp, Homo sapiens
aagaaagactttctt

SEQ ID NO: 153506 - DNA, 15 bp, Homo sapiens
taagaaagactttct

SEQ ID NO: 153507 - DNA, 15 bp, Homo sapiens
ataagaaagactttc

SEQ ID NO: 153508 - DNA, 15 bp, Homo sapiens
aataagaaagacttt

SEQ ID NO: 153509 - DNA, 15 bp, Homo sapiens
aaataagaaagactt

SEQ ID NO: 153510 - DNA, 15 bp, Homo sapiens
taaataagaaagact

SEQ ID NO: 153511 - DNA, 15 bp, Homo sapiens
gtaaataagaaagac

SEQ ID NO: 153512 - DNA, 15 bp, Homo sapiens
agtaaataagaaaga

SEQ ID NO: 153513 - DNA, 15 bp, Homo sapiens
cagtaaataagaaag

SEQ ID NO: 153514 - DNA, 15 bp, Homo sapiens
acagtaaataagaaa

SEQ ID NO: 153515 - DNA, 15 bp, Homo sapiens
aacagtaaataagaa

SEQ ID NO: 153516 - DNA, 15 bp, Homo sapiens
aaacagtaaataaga

SEQ ID NO: 153517 - DNA, 15 bp, Homo sapiens
caaacagtaaataag

SEQ ID NO: 153518 - DNA, 15 bp, Homo sapiens
tcaaacagtaaataa

SEQ ID NO: 153519 - DNA, 15 bp, Homo sapiens
atcaaacagtaaata

SEQ ID NO: 153520 - DNA, 15 bp, Homo sapiens
catcaaacagtaaat

SEQ ID NO: 153521 - DNA, 15 bp, Homo sapiens
ccatcaaacagtaaa

SEQ ID NO: 153522 - DNA, 15 bp, Homo sapiens
gccatcaaacagtaa

SEQ ID NO: 153523 - DNA, 15 bp, Homo sapiens
agccatcaaacagta

SEQ ID NO: 153524 - DNA, 15 bp, Homo sapiens
gagccatcaaacagt

SEQ ID NO: 153525 - DNA, 15 bp, Homo sapiens
agagccatcaaacag

SEQ ID NO: 153526 - DNA, 15 bp, Homo sapiens
gagagccatcaaaca

SEQ ID NO: 153527 - DNA, 15 bp, Homo sapiens
cgagagccatcaaac

SEQ ID NO: 153528 - DNA, 15 bp, Homo sapiens
ccgagagccatcaaa

SEQ ID NO: 153529 - DNA, 15 bp, Homo sapiens
tccgagagccatcaa

SEQ ID NO: 153530 - DNA, 15 bp, Homo sapiens
atccgagagccatca

SEQ ID NO: 153531 - DNA, 15 bp, Homo sapiens
catccgagagccatc

SEQ ID NO: 153532 - DNA, 15 bp, Homo sapiens
gcatccgagagccat

SEQ ID NO: 153533 - DNA, 15 bp, Homo sapiens
ggcatccgagagcca

SEQ ID NO: 153534 - DNA, 15 bp, Homo sapiens
tggcatccgagagcc

SEQ ID NO: 153535 - DNA, 15 bp, Homo sapiens
atggcatccgagagc

SEQ ID NO: 153536 - DNA, 15 bp, Homo sapiens
catggcatccgagag

SEQ ID NO: 153537 - DNA, 15 bp, Homo sapiens
gcatggcatccgaga

SEQ ID NO: 153538 - DNA, 15 bp, Homo sapiens
tgcatggcatccgag

SEQ ID NO: 153539 - DNA, 15 bp, Homo sapiens
gtgcatggcatccga

SEQ ID NO: 153540 - DNA, 15 bp, Homo sapiens
agtgcatggcatccg

SEQ ID NO: 153541 - DNA, 15 bp, Homo sapiens
gagtgcatggcatcc

SEQ ID NO: 153542 - DNA, 15 bp, Homo sapiens
ggagtgcatggcatc

SEQ ID NO: 153543 - DNA, 15 bp, Homo sapiens
aggagtgcatggcat

SEQ ID NO: 153544 - DNA, 15 bp, Homo sapiens
gaggagtgcatggca

SEQ ID NO: 153545 - DNA, 15 bp, Homo sapiens
agaggagtgcatggc

SEQ ID NO: 153546 - DNA, 15 bp, Homo sapiens
gagaggagtgcatgg

SEQ ID NO: 153547 - DNA, 15 bp, Homo sapiens
ggagaggagtgcatg

SEQ ID NO: 153548 - DNA, 15 bp, Homo sapiens
aggagaggagtgcat

SEQ ID NO: 153549 - DNA, 15 bp, Homo sapiens
caggagaggagtgca

SEQ ID NO: 153550 - DNA, 15 bp, Homo sapiens
gcaggagaggagtgc

SEQ ID NO: 153551 - DNA, 15 bp, Homo sapiens
tgcaggagaggagtg

SEQ ID NO: 153552 - DNA, 15 bp, Homo sapiens
ctgcaggagaggagt

SEQ ID NO: 153553 - DNA, 15 bp, Homo sapiens
gctgcaggagaggag

SEQ ID NO: 153554 - DNA, 15 bp, Homo sapiens
agctgcaggagagga

SEQ ID NO: 153555 - DNA, 15 bp, Homo sapiens
aagctgcaggagagg

SEQ ID NO: 153556 - DNA, 15 bp, Homo sapiens
aaagctgcaggagag

SEQ ID NO: 153557 - DNA, 15 bp, Homo sapiens
gaaagctgcaggaga

SEQ ID NO: 153558 - DNA, 15 bp, Homo sapiens
ggaaagctgcaggag

SEQ ID NO: 153559 - DNA, 15 bp, Homo sapiens
aggaaagctgcagga

SEQ ID NO: 153560 - DNA, 15 bp, Homo sapiens
caggaaagctgcagg

SEQ ID NO: 153561 - DNA, 15 bp, Homo sapiens
ccaggaaagctgcag

SEQ ID NO: 153562 - DNA, 15 bp, Homo sapiens
gccaggaaagctgca

SEQ ID NO: 153563 - DNA, 15 bp, Homo sapiens
ggccaggaaagctgc

SEQ ID NO: 153564 - DNA, 15 bp, Homo sapiens
tggccaggaaagctg

SEQ ID NO: 153565 - DNA, 15 bp, Homo sapiens
ttggccaggaaagct

SEQ ID NO: 153566 - DNA, 15 bp, Homo sapiens
cttggccaggaaagc

SEQ ID NO: 153567 - DNA, 15 bp, Homo sapiens
acttggccaggaaag

SEQ ID NO: 153568 - DNA, 15 bp, Homo sapiens
cacttggccaggaaa

SEQ ID NO: 153569 - DNA, 15 bp, Homo sapiens
gcacttggccaggaa

SEQ ID NO: 153570 - DNA, 15 bp, Homo sapiens
agcacttggccagga

SEQ ID NO: 153571 - DNA, 15 bp, Homo sapiens
aagcacttggccagg

SEQ ID NO: 153572 - DNA, 15 bp, Homo sapiens
taagcacttggccag

SEQ ID NO: 153573 - DNA, 15 bp, Homo sapiens
ctaagcacttggcca

SEQ ID NO: 153574 - DNA, 15 bp, Homo sapiens
cctaagcacttggcc

SEQ ID NO: 153575 - DNA, 15 bp, Homo sapiens
ccctaagcacttggc

SEQ ID NO: 153576 - DNA, 15 bp, Homo sapiens
gccctaagcacttgg

SEQ ID NO: 153577 - DNA, 15 bp, Homo sapiens
ggccctaagcacttg

SEQ ID NO: 153578 - DNA, 15 bp, Homo sapiens
aggccctaagcactt

SEQ ID NO: 153579 - DNA, 15 bp, Homo sapiens
taggccctaagcact

SEQ ID NO: 153580 - DNA, 15 bp, Homo sapiens
ctaggccctaagcac

SEQ ID NO: 153581 - DNA, 15 bp, Homo sapiens
cctaggccctaagca

SEQ ID NO: 153582 - DNA, 15 bp, Homo sapiens
ccctaggccctaagc

SEQ ID NO: 153583 - DNA, 15 bp, Homo sapiens
accctaggccctaag

SEQ ID NO: 153584 - DNA, 15 bp, Homo sapiens
caccctaggccctaa

SEQ ID NO: 153585 - DNA, 15 bp, Homo sapiens
ccaccctaggcccta

SEQ ID NO: 153586 - DNA, 15 bp, Homo sapiens
tccaccctaggccct

SEQ ID NO: 153587 - DNA, 15 bp, Homo sapiens
gtccaccctaggccc

SEQ ID NO: 153588 - DNA, 15 bp, Homo sapiens
ggtccaccctaggcc

SEQ ID NO: 153589 - DNA, 15 bp, Homo sapiens
gggtccaccctaggc

SEQ ID NO: 153590 - DNA, 15 bp, Homo sapiens
agggtccaccctagg

SEQ ID NO: 153591 - DNA, 15 bp, Homo sapiens
aagggtccaccctag

SEQ ID NO: 153592 - DNA, 15 bp, Homo sapiens
gaagggtccacccta

SEQ ID NO: 153593 - DNA, 15 bp, Homo sapiens
ggaagggtccaccct

SEQ ID NO: 153594 - DNA, 15 bp, Homo sapiens
tggaagggtccaccc

SEQ ID NO: 153595 - DNA, 15 bp, Homo sapiens
gtggaagggtccacc

SEQ ID NO: 153596 - DNA, 15 bp, Homo sapiens
agtggaagggtccac

SEQ ID NO: 153597 - DNA, 15 bp, Homo sapiens
aagtggaagggtcca

SEQ ID NO: 153598 - DNA, 15 bp, Homo sapiens
taagtggaagggtcc

SEQ ID NO: 153599 - DNA, 15 bp, Homo sapiens
ataagtggaagggtc

SEQ ID NO: 153600 - DNA, 15 bp, Homo sapiens
aataagtggaagggt

SEQ ID NO: 153601 - DNA, 15 bp, Homo sapiens
aaataagtggaaggg

SEQ ID NO: 153602 - DNA, 15 bp, Homo sapiens
gaaataagtggaagg

SEQ ID NO: 153603 - DNA, 15 bp, Homo sapiens
ggaaataagtggaag

SEQ ID NO: 153604 - DNA, 15 bp, Homo sapiens
gggaaataagtggaa

SEQ ID NO: 153605 - DNA, 15 bp, Homo sapiens
ggggaaataagtgga

SEQ ID NO: 153606 - DNA, 15 bp, Homo sapiens
tggggaaataagtgg

SEQ ID NO: 153607 - DNA, 15 bp, Homo sapiens
ctggggaaataagtg

SEQ ID NO: 153608 - DNA, 15 bp, Homo sapiens
cctggggaaataagt

SEQ ID NO: 153609 - DNA, 15 bp, Homo sapiens
gcctggggaaataag

SEQ ID NO: 153610 - DNA, 15 bp, Homo sapiens
ggcctggggaaataa

SEQ ID NO: 153611 - DNA, 15 bp, Homo sapiens
gggcctggggaaata

SEQ ID NO: 153612 - DNA, 15 bp, Homo sapiens
cgggcctggggaaat

SEQ ID NO: 153613 - DNA, 15 bp, Homo sapiens
ccgggcctggggaaa

SEQ ID NO: 153614 - DNA, 15 bp, Homo sapiens
cccgggcctggggaa

SEQ ID NO: 153615 - DNA, 15 bp, Homo sapiens
acccgggcctgggga

SEQ ID NO: 153616 - DNA, 15 bp, Homo sapiens
gacccgggcctgggg

SEQ ID NO: 153617 - DNA, 15 bp, Homo sapiens
tgacccgggcctggg

SEQ ID NO: 153618 - DNA, 15 bp, Homo sapiens
ttgacccgggcctgg

SEQ ID NO: 153619 - DNA, 15 bp, Homo sapiens
cttgacccgggcctg

SEQ ID NO: 153620 - DNA, 15 bp, Homo sapiens
tcttgacccgggcct

SEQ ID NO: 153621 - DNA, 15 bp, Homo sapiens
atcttgacccgggcc

SEQ ID NO: 153622 - DNA, 15 bp, Homo sapiens
tatcttgacccgggc

SEQ ID NO: 153623 - DNA, 15 bp, Homo sapiens
ctatcttgacccggg

SEQ ID NO: 153624 - DNA, 15 bp, Homo sapiens
cctatcttgacccgg

SEQ ID NO: 153625 - DNA, 15 bp, Homo sapiens
gcctatcttgacccg

SEQ ID NO: 153626 - DNA, 15 bp, Homo sapiens
tgcctatcttgaccc

SEQ ID NO: 153627 - DNA, 15 bp, Homo sapiens
ttgcctatcttgacc

SEQ ID NO: 153628 - DNA, 15 bp, Homo sapiens
tttgcctatcttgac

SEQ ID NO: 153629 - DNA, 15 bp, Homo sapiens
gtttgcctatcttga

SEQ ID NO: 153630 - DNA, 15 bp, Homo sapiens
tgtttgcctatcttg

SEQ ID NO: 153631 - DNA, 15 bp, Homo sapiens
ctgtttgcctatctt

SEQ ID NO: 153632 - DNA, 15 bp, Homo sapiens
cctgtttgcctatct

SEQ ID NO: 153633 - DNA, 15 bp, Homo sapiens
acctgtttgcctatc

SEQ ID NO: 153634 - DNA, 15 bp, Homo sapiens
aacctgtttgcctat

SEQ ID NO: 153635 - DNA, 15 bp, Homo sapiens
aaacctgtttgccta

SEQ ID NO: 153636 - DNA, 15 bp, Homo sapiens
aaaacctgtttgcct

SEQ ID NO: 153637 - DNA, 15 bp, Homo sapiens
gaaaacctgtttgcc

SEQ ID NO: 153638 - DNA, 15 bp, Homo sapiens
ggaaaacctgtttgc

SEQ ID NO: 153639 - DNA, 15 bp, Homo sapiens
tggaaaacctgtttg

SEQ ID NO: 153640 - DNA, 15 bp, Homo sapiens
atggaaaacctgttt

SEQ ID NO: 153641 - DNA, 15 bp, Homo sapiens
aatggaaaacctgtt

SEQ ID NO: 153642 - DNA, 15 bp, Homo sapiens
gaatggaaaacctgt

SEQ ID NO: 153643 - DNA, 15 bp, Homo sapiens
tgaatggaaaacctg

SEQ ID NO: 153644 - DNA, 15 bp, Homo sapiens
atgaatggaaaacct

SEQ ID NO: 153645 - DNA, 15 bp, Homo sapiens
aatgaatggaaaacc

SEQ ID NO: 153646 - DNA, 15 bp, Homo sapiens
gaatgaatggaaaac

SEQ ID NO: 153647 - DNA, 15 bp, Homo sapiens
tgaatgaatggaaaa

SEQ ID NO: 153648 - DNA, 15 bp, Homo sapiens
ctgaatgaatggaaa

SEQ ID NO: 153649 - DNA, 15 bp, Homo sapiens
gctgaatgaatggaa

SEQ ID NO: 153650 - DNA, 15 bp, Homo sapiens
tgctgaatgaatgga

SEQ ID NO: 153651 - DNA, 15 bp, Homo sapiens
ttgctgaatgaatgg

SEQ ID NO: 153652 - DNA, 15 bp, Homo sapiens
tttgctgaatgaatg

SEQ ID NO: 153653 - DNA, 15 bp, Homo sapiens
ttttgctgaatgaat

SEQ ID NO: 153654 - DNA, 15 bp, Homo sapiens
tttttgctgaatgaa

SEQ ID NO: 153655 - DNA, 15 bp, Homo sapiens
atttttgctgaatga

SEQ ID NO: 153656 - DNA, 15 bp, Homo sapiens
aatttttgctgaatg

SEQ ID NO: 153657 - DNA, 15 bp, Homo sapiens
aaatttttgctgaat

SEQ ID NO: 153658 - DNA, 15 bp, Homo sapiens
caaatttttgctgaa

SEQ ID NO: 153659 - DNA, 15 bp, Homo sapiens
gcaaatttttgctga

SEQ ID NO: 153660 - DNA, 15 bp, Homo sapiens
agcaaatttttgctg

SEQ ID NO: 153661 - DNA, 15 bp, Homo sapiens
cagcaaatttttgct

SEQ ID NO: 153662 - DNA, 15 bp, Homo sapiens
ccagcaaatttttgc

SEQ ID NO: 153663 - DNA, 15 bp, Homo sapiens
tccagcaaatttttg

SEQ ID NO: 153664 - DNA, 15 bp, Homo sapiens
atccagcaaattttt

SEQ ID NO: 153665 - DNA, 15 bp, Homo sapiens
tatccagcaaatttt

SEQ ID NO: 153666 - DNA, 15 bp, Homo sapiens
atatccagcaaattt

SEQ ID NO: 153667 - DNA, 15 bp, Homo sapiens
aatatccagcaaatt

SEQ ID NO: 153668 - DNA, 15 bp, Homo sapiens
aaatatccagcaaat

SEQ ID NO: 153669 - DNA, 15 bp, Homo sapiens
taaatatccagcaaa

SEQ ID NO: 153670 - DNA, 15 bp, Homo sapiens
gtaaatatccagcaa

SEQ ID NO: 153671 - DNA, 15 bp, Homo sapiens
agtaaatatccagca

SEQ ID NO: 153672 - DNA, 15 bp, Homo sapiens
cagtaaatatccagc

SEQ ID NO: 153673 - DNA, 15 bp, Homo sapiens
acagtaaatatccag

SEQ ID NO: 153674 - DNA, 15 bp, Homo sapiens
cacagtaaatatcca

SEQ ID NO: 153675 - DNA, 15 bp, Homo sapiens
acacagtaaatatcc

SEQ ID NO: 153676 - DNA, 15 bp, Homo sapiens
cacacagtaaatatc

SEQ ID NO: 153677 - DNA, 15 bp, Homo sapiens
gcacacagtaaatat

SEQ ID NO: 153678 - DNA, 15 bp, Homo sapiens
agcacacagtaaata

SEQ ID NO: 153679 - DNA, 15 bp, Homo sapiens
tagcacacagtaaat

SEQ ID NO: 153680 - DNA, 15 bp, Homo sapiens
ctagcacacagtaaa

SEQ ID NO: 153681 - DNA, 15 bp, Homo sapiens
cctagcacacagtaa

SEQ ID NO: 153682 - DNA, 15 bp, Homo sapiens
acctagcacacagta

SEQ ID NO: 153683 - DNA, 15 bp, Homo sapiens
cacctagcacacagt

SEQ ID NO: 153684 - DNA, 15 bp, Homo sapiens
gcacctagcacacag

SEQ ID NO: 153685 - DNA, 15 bp, Homo sapiens
agcacctagcacaca

SEQ ID NO: 153686 - DNA, 15 bp, Homo sapiens
cagcacctagcacac

SEQ ID NO: 153687 - DNA, 15 bp, Homo sapiens
ccagcacctagcaca

SEQ ID NO: 153688 - DNA, 15 bp, Homo sapiens
cccagcacctagcac

SEQ ID NO: 153689 - DNA, 15 bp, Homo sapiens
ccccagcacctagca

SEQ ID NO: 153690 - DNA, 15 bp, Homo sapiens
tccccagcacctagc

SEQ ID NO: 153691 - DNA, 15 bp, Homo sapiens
atccccagcacctag

SEQ ID NO: 153692 - DNA, 15 bp, Homo sapiens
catccccagcaccta

SEQ ID NO: 153693 - DNA, 15 bp, Homo sapiens
gcatccccagcacct

SEQ ID NO: 153694 - DNA, 15 bp, Homo sapiens
ggcatccccagcacc

SEQ ID NO: 153695 - DNA, 15 bp, Homo sapiens
tggcatccccagcac

SEQ ID NO: 153696 - DNA, 15 bp, Homo sapiens
gtggcatccccagca

SEQ ID NO: 153697 - DNA, 15 bp, Homo sapiens
tgtggcatccccagc

SEQ ID NO: 153698 - DNA, 15 bp, Homo sapiens
ctgtggcatccccag

SEQ ID NO: 153699 - DNA, 15 bp, Homo sapiens
cctgtggcatcccca

SEQ ID NO: 153700 - DNA, 15 bp, Homo sapiens
ccctgtggcatcccc

SEQ ID NO: 153701 - DNA, 15 bp, Homo sapiens
tccctgtggcatccc

SEQ ID NO: 153702 - DNA, 15 bp, Homo sapiens
ttccctgtggcatcc

SEQ ID NO: 153703 - DNA, 15 bp, Homo sapiens
gttccctgtggcatc

SEQ ID NO: 153704 - DNA, 15 bp, Homo sapiens
tgttccctgtggcat

SEQ ID NO: 153705 - DNA, 15 bp, Homo sapiens
ttgttccctgtggca

SEQ ID NO: 153706 - DNA, 15 bp, Homo sapiens
cttgttccctgtggc

SEQ ID NO: 153707 - DNA, 15 bp, Homo sapiens
tcttgttccctgtgg

SEQ ID NO: 153708 - DNA, 15 bp, Homo sapiens
gtcttgttccctgtg

SEQ ID NO: 153709 - DNA, 15 bp, Homo sapiens
tgtcttgttccctgt

SEQ ID NO: 153710 - DNA, 15 bp, Homo sapiens
ctgtcttgttccctg

SEQ ID NO: 153711 - DNA, 15 bp, Homo sapiens
cctgtcttgttccct

SEQ ID NO: 153712 - DNA, 15 bp, Homo sapiens
ccctgtcttgttccc

SEQ ID NO: 153713 - DNA, 15 bp, Homo sapiens
tccctgtcttgttcc

SEQ ID NO: 153714 - DNA, 15 bp, Homo sapiens
ttccctgtcttgttc

SEQ ID NO: 153715 - DNA, 15 bp, Homo sapiens
tttccctgtcttgtt

SEQ ID NO: 153716 - DNA, 15 bp, Homo sapiens
ttttccctgtcttgt

SEQ ID NO: 153717 - DNA, 15 bp, Homo sapiens
tttttccctgtcttg

SEQ ID NO: 153718 - DNA, 15 bp, Homo sapiens
gtttttccctgtctt

SEQ ID NO: 153719 - DNA, 15 bp, Homo sapiens
ggtttttccctgtct

SEQ ID NO: 153720 - DNA, 15 bp, Homo sapiens
gggtttttccctgtc

SEQ ID NO: 153721 - DNA, 15 bp, Homo sapiens
agggtttttccctgt

SEQ ID NO: 153722 - DNA, 15 bp, Homo sapiens
aagggtttttccctg

SEQ ID NO: 153723 - DNA, 15 bp, Homo sapiens
caagggtttttccct

SEQ ID NO: 153724 - DNA, 15 bp, Homo sapiens
gcaagggtttttccc

SEQ ID NO: 153725 - DNA, 15 bp, Homo sapiens
ggcaagggtttttcc

SEQ ID NO: 153726 - DNA, 15 bp, Homo sapiens
gggcaagggtttttc

SEQ ID NO: 153727 - DNA, 15 bp, Homo sapiens
agggcaagggttttt

SEQ ID NO: 153728 - DNA, 15 bp, Homo sapiens
gagggcaagggtttt

SEQ ID NO: 153729 - DNA, 15 bp, Homo sapiens
agagggcaagggttt

SEQ ID NO: 153730 - DNA, 15 bp, Homo sapiens
aagagggcaagggtt

SEQ ID NO: 153731 - DNA, 15 bp, Homo sapiens
caagagggcaagggt

SEQ ID NO: 153732 - DNA, 15 bp, Homo sapiens
ccaagagggcaaggg

SEQ ID NO: 153733 - DNA, 15 bp, Homo sapiens
tccaagagggcaagg

SEQ ID NO: 153734 - DNA, 15 bp, Homo sapiens
ctccaagagggcaag

SEQ ID NO: 153735 - DNA, 15 bp, Homo sapiens
gctccaagagggcaa

SEQ ID NO: 153736 - DNA, 15 bp, Homo sapiens
agctccaagagggca

SEQ ID NO: 153737 - DNA, 15 bp, Homo sapiens
cagctccaagagggc

SEQ ID NO: 153738 - DNA, 15 bp, Homo sapiens
tcagctccaagaggg

SEQ ID NO: 153739 - DNA, 15 bp, Homo sapiens
gtcagctccaagagg

SEQ ID NO: 153740 - DNA, 15 bp, Homo sapiens
tgtcagctccaagag

SEQ ID NO: 153741 - DNA, 15 bp, Homo sapiens
ctgtcagctccaaga

SEQ ID NO: 153742 - DNA, 15 bp, Homo sapiens
actgtcagctccaag

SEQ ID NO: 153743 - DNA, 15 bp, Homo sapiens
gactgtcagctccaa

SEQ ID NO: 153744 - DNA, 15 bp, Homo sapiens
ggactgtcagctcca

SEQ ID NO: 153745 - DNA, 15 bp, Homo sapiens
tggactgtcagctcc

SEQ ID NO: 153746 - DNA, 15 bp, Homo sapiens
ctggactgtcagctc

SEQ ID NO: 153747 - DNA, 15 bp, Homo sapiens
cctggactgtcagct

SEQ ID NO: 153748 - DNA, 15 bp, Homo sapiens
ccctggactgtcagc

SEQ ID NO: 153749 - DNA, 15 bp, Homo sapiens
cccctggactgtcag

SEQ ID NO: 153750 - DNA, 15 bp, Homo sapiens
tcccctggactgtca

SEQ ID NO: 153751 - DNA, 15 bp, Homo sapiens
atcccctggactgtc

SEQ ID NO: 153752 - DNA, 15 bp, Homo sapiens
aatcccctggactgt

SEQ ID NO: 153753 - DNA, 15 bp, Homo sapiens
taatcccctggactg

SEQ ID NO: 153754 - DNA, 15 bp, Homo sapiens
ttaatcccctggact

SEQ ID NO: 153755 - DNA, 15 bp, Homo sapiens
tttaatcccctggac

SEQ ID NO: 153756 - DNA, 15 bp, Homo sapiens
ttttaatcccctgga

SEQ ID NO: 153757 - DNA, 15 bp, Homo sapiens
attttaatcccctgg

SEQ ID NO: 153758 - DNA, 15 bp, Homo sapiens
tattttaatcccctg

SEQ ID NO: 153759 - DNA, 15 bp, Homo sapiens
atattttaatcccct

SEQ ID NO: 153760 - DNA, 15 bp, Homo sapiens
aatattttaatcccc

SEQ ID NO: 153761 - DNA, 15 bp, Homo sapiens
aaatattttaatccc

SEQ ID NO: 153762 - DNA, 15 bp, Homo sapiens
aaaatattttaatcc

SEQ ID NO: 153763 - DNA, 15 bp, Homo sapiens
taaaatattttaatc

SEQ ID NO: 153764 - DNA, 15 bp, Homo sapiens
gtaaaatattttaat

SEQ ID NO: 153765 - DNA, 15 bp, Homo sapiens
tgtaaaatattttaa

SEQ ID NO: 153766 - DNA, 15 bp, Homo sapiens
ctgtaaaatatttta

SEQ ID NO: 153767 - DNA, 15 bp, Homo sapiens
actgtaaaatatttt

SEQ ID NO: 153768 - DNA, 15 bp, Homo sapiens
cactgtaaaatattt

SEQ ID NO: 153769 - DNA, 15 bp, Homo sapiens
ccactgtaaaatatt

SEQ ID NO: 153770 - DNA, 15 bp, Homo sapiens
cccactgtaaaatat

SEQ ID NO: 153771 - DNA, 15 bp, Homo sapiens
gcccactgtaaaata

SEQ ID NO: 153772 - DNA, 15 bp, Homo sapiens
ggcccactgtaaaat

SEQ ID NO: 153773 - DNA, 15 bp, Homo sapiens
cggcccactgtaaaa

SEQ ID NO: 153774 - DNA, 15 bp, Homo sapiens
ccggcccactgtaaa

SEQ ID NO: 153775 - DNA, 15 bp, Homo sapiens
cccggcccactgtaa

SEQ ID NO: 153776 - DNA, 15 bp, Homo sapiens
acccggcccactgta

SEQ ID NO: 153777 - DNA, 15 bp, Homo sapiens
cacccggcccactgt

SEQ ID NO: 153778 - DNA, 15 bp, Homo sapiens
gcacccggcccactg

SEQ ID NO: 153779 - DNA, 15 bp, Homo sapiens
tgcacccggcccact

SEQ ID NO: 153780 - DNA, 15 bp, Homo sapiens
ctgcacccggcccac

SEQ ID NO: 153781 - DNA, 15 bp, Homo sapiens
actgcacccggccca

SEQ ID NO: 153782 - DNA, 15 bp, Homo sapiens
cactgcacccggccc

SEQ ID NO: 153783 - DNA, 15 bp, Homo sapiens
ccactgcacccggcc

SEQ ID NO: 153784 - DNA, 15 bp, Homo sapiens
gccactgcacccggc

SEQ ID NO: 153785 - DNA, 15 bp, Homo sapiens
agccactgcacccgg

SEQ ID NO: 153786 - DNA, 15 bp, Homo sapiens
gagccactgcacccg

SEQ ID NO: 153787 - DNA, 15 bp, Homo sapiens
tgagccactgcaccc

SEQ ID NO: 153788 - DNA, 15 bp, Homo sapiens
atgagccactgcacc

SEQ ID NO: 153789 - DNA, 15 bp, Homo sapiens
catgagccactgcac

SEQ ID NO: 153790 - DNA, 15 bp, Homo sapiens
gcatgagccactgca

SEQ ID NO: 153791 - DNA, 15 bp, Homo sapiens
ggcatgagccactgc

SEQ ID NO: 153792 - DNA, 15 bp, Homo sapiens
aggcatgagccactg

SEQ ID NO: 153793 - DNA, 15 bp, Homo sapiens
caggcatgagccact

SEQ ID NO: 153794 - DNA, 15 bp, Homo sapiens
acaggcatgagccac

SEQ ID NO: 153795 - DNA, 15 bp, Homo sapiens
tacaggcatgagcca

SEQ ID NO: 153796 - DNA, 15 bp, Homo sapiens
ttacaggcatgagcc

SEQ ID NO: 153797 - DNA, 15 bp, Homo sapiens
attacaggcatgagc

SEQ ID NO: 153798 - DNA, 15 bp, Homo sapiens
gattacaggcatgag

SEQ ID NO: 153799 - DNA, 15 bp, Homo sapiens
ggattacaggcatga

SEQ ID NO: 153800 - DNA, 15 bp, Homo sapiens
gggattacaggcatg

SEQ ID NO: 153801 - DNA, 15 bp, Homo sapiens
tgggattacaggcat

SEQ ID NO: 153802 - DNA, 15 bp, Homo sapiens
ctgggattacaggca

SEQ ID NO: 153803 - DNA, 15 bp, Homo sapiens
gctgggattacaggc

SEQ ID NO: 153804 - DNA, 15 bp, Homo sapiens
tgctgggattacagg

SEQ ID NO: 153805 - DNA, 15 bp, Homo sapiens
gtgctgggattacag

SEQ ID NO: 153806 - DNA, 15 bp, Homo sapiens
agtgctgggattaca

SEQ ID NO: 153807 - DNA, 15 bp, Homo sapiens
aagtgctgggattac

SEQ ID NO: 153808 - DNA, 15 bp, Homo sapiens
aaagtgctgggatta

SEQ ID NO: 153809 - DNA, 15 bp, Homo sapiens
caaagtgctgggatt

SEQ ID NO: 153810 - DNA, 15 bp, Homo sapiens
ccaaagtgctgggat

SEQ ID NO: 153811 - DNA, 15 bp, Homo sapiens
cccaaagtgctggga

SEQ ID NO: 153812 - DNA, 15 bp, Homo sapiens
tcccaaagtgctggg

SEQ ID NO: 153813 - DNA, 15 bp, Homo sapiens
ctcccaaagtgctgg

SEQ ID NO: 153814 - DNA, 15 bp, Homo sapiens
cctcccaaagtgctg

SEQ ID NO: 153815 - DNA, 15 bp, Homo sapiens
gcctcccaaagtgct

SEQ ID NO: 153816 - DNA, 15 bp, Homo sapiens
ggcctcccaaagtgc

SEQ ID NO: 153817 - DNA, 15 bp, Homo sapiens
tggcctcccaaagtg

SEQ ID NO: 153818 - DNA, 15 bp, Homo sapiens
ttggcctcccaaagt

SEQ ID NO: 153819 - DNA, 15 bp, Homo sapiens
cttggcctcccaaag

SEQ ID NO: 153820 - DNA, 15 bp, Homo sapiens
ccttggcctcccaaa

SEQ ID NO: 153821 - DNA, 15 bp, Homo sapiens
accttggcctcccaa

SEQ ID NO: 153822 - DNA, 15 bp, Homo sapiens
caccttggcctccca

SEQ ID NO: 153823 - DNA, 15 bp, Homo sapiens
ccaccttggcctccc

SEQ ID NO: 153824 - DNA, 15 bp, Homo sapiens
cccaccttggcctcc

SEQ ID NO: 153825 - DNA, 15 bp, Homo sapiens
gcccaccttggcctc

SEQ ID NO: 153826 - DNA, 15 bp, Homo sapiens
cgcccaccttggcct

SEQ ID NO: 153827 - DNA, 15 bp, Homo sapiens
ccgcccaccttggcc

SEQ ID NO: 153828 - DNA, 15 bp, Homo sapiens
tccgcccaccttggc

SEQ ID NO: 153829 - DNA, 15 bp, Homo sapiens
atccgcccaccttgg

SEQ ID NO: 153830 - DNA, 15 bp, Homo sapiens
gatccgcccaccttg

SEQ ID NO: 153831 - DNA, 15 bp, Homo sapiens
tgatccgcccacctt

SEQ ID NO: 153832 - DNA, 15 bp, Homo sapiens
gtgatccgcccacct

SEQ ID NO: 153833 - DNA, 15 bp, Homo sapiens
agtgatccgcccacc

SEQ ID NO: 153834 - DNA, 15 bp, Homo sapiens
aagtgatccgcccac

SEQ ID NO: 153835 - DNA, 15 bp, Homo sapiens
caagtgatccgccca

SEQ ID NO: 153836 - DNA, 15 bp, Homo sapiens
tcaagtgatccgccc

SEQ ID NO: 153837 - DNA, 15 bp, Homo sapiens
ctcaagtgatccgcc

SEQ ID NO: 153838 - DNA, 15 bp, Homo sapiens
cctcaagtgatccgc

SEQ ID NO: 153839 - DNA, 15 bp, Homo sapiens
acctcaagtgatccg

SEQ ID NO: 153840 - DNA, 15 bp, Homo sapiens
gacctcaagtgatcc

SEQ ID NO: 153841 - DNA, 15 bp, Homo sapiens
tgacctcaagtgatc

SEQ ID NO: 153842 - DNA, 15 bp, Homo sapiens
atgacctcaagtgat

SEQ ID NO: 153843 - DNA, 15 bp, Homo sapiens
catgacctcaagtga

SEQ ID NO: 153844 - DNA, 15 bp, Homo sapiens
tcatgacctcaagtg

SEQ ID NO: 153845 - DNA, 15 bp, Homo sapiens
ttcatgacctcaagt

SEQ ID NO: 153846 - DNA, 15 bp, Homo sapiens
attcatgacctcaag

SEQ ID NO: 153847 - DNA, 15 bp, Homo sapiens
aattcatgacctcaa

SEQ ID NO: 153848 - DNA, 15 bp, Homo sapiens
gaattcatgacctca

SEQ ID NO: 153849 - DNA, 15 bp, Homo sapiens
tgaattcatgacctc

SEQ ID NO: 153850 - DNA, 15 bp, Homo sapiens
ttgaattcatgacct

SEQ ID NO: 153851 - DNA, 15 bp, Homo sapiens
cttgaattcatgacc

SEQ ID NO: 153852 - DNA, 15 bp, Homo sapiens
tcttgaattcatgac

SEQ ID NO: 153853 - DNA, 15 bp, Homo sapiens
gtcttgaattcatga

SEQ ID NO: 153854 - DNA, 15 bp, Homo sapiens
ggtcttgaattcatg

SEQ ID NO: 153855 - DNA, 15 bp, Homo sapiens
tggtcttgaattcat

SEQ ID NO: 153856 - DNA, 15 bp, Homo sapiens
ctggtcttgaattca

SEQ ID NO: 153857 - DNA, 15 bp, Homo sapiens
gctggtcttgaattc

SEQ ID NO: 153858 - DNA, 15 bp, Homo sapiens
ggctggtcttgaatt

SEQ ID NO: 153859 - DNA, 15 bp, Homo sapiens
aggctggtcttgaat

SEQ ID NO: 153860 - DNA, 15 bp, Homo sapiens
caggctggtcttgaa

SEQ ID NO: 153861 - DNA, 15 bp, Homo sapiens
ccaggctggtcttga

SEQ ID NO: 153862 - DNA, 15 bp, Homo sapiens
gccaggctggtcttg

SEQ ID NO: 153863 - DNA, 15 bp, Homo sapiens
ggccaggctggtctt

SEQ ID NO: 153864 - DNA, 15 bp, Homo sapiens
tggccaggctggtct

SEQ ID NO: 153865 - DNA, 15 bp, Homo sapiens
ttggccaggctggtc

SEQ ID NO: 153866 - DNA, 15 bp, Homo sapiens
gttggccaggctggt

SEQ ID NO: 153867 - DNA, 15 bp, Homo sapiens
tgttggccaggctgg

SEQ ID NO: 153868 - DNA, 15 bp, Homo sapiens
atgttggccaggctg

SEQ ID NO: 153869 - DNA, 15 bp, Homo sapiens
catgttggccaggct

SEQ ID NO: 153870 - DNA, 15 bp, Homo sapiens
ccatgttggccaggc

SEQ ID NO: 153871 - DNA, 15 bp, Homo sapiens
accatgttggccagg

SEQ ID NO: 153872 - DNA, 15 bp, Homo sapiens
caccatgttggccag

SEQ ID NO: 153873 - DNA, 15 bp, Homo sapiens
tcaccatgttggcca

SEQ ID NO: 153874 - DNA, 15 bp, Homo sapiens
ttcaccatgttggcc

SEQ ID NO: 153875 - DNA, 15 bp, Homo sapiens
tttcaccatgttggc

SEQ ID NO: 153876 - DNA, 15 bp, Homo sapiens
gtttcaccatgttgg

SEQ ID NO: 153877 - DNA, 15 bp, Homo sapiens
ggtttcaccatgttg

SEQ ID NO: 153878 - DNA, 15 bp, Homo sapiens
gggtttcaccatgtt

SEQ ID NO: 153879 - DNA, 15 bp, Homo sapiens
agggtttcaccatgt

SEQ ID NO: 153880 - DNA, 15 bp, Homo sapiens
cagggtttcaccatg

SEQ ID NO: 153881 - DNA, 15 bp, Homo sapiens
acagggtttcaccat

SEQ ID NO: 153882 - DNA, 15 bp, Homo sapiens
gacagggtttcacca

SEQ ID NO: 153883 - DNA, 15 bp, Homo sapiens
agacagggtttcacc

SEQ ID NO: 153884 - DNA, 15 bp, Homo sapiens
gagacagggtttcac

SEQ ID NO: 153885 - DNA, 15 bp, Homo sapiens
agagacagggtttca

SEQ ID NO: 153886 - DNA, 15 bp, Homo sapiens
tagagacagggtttc

SEQ ID NO: 153887 - DNA, 15 bp, Homo sapiens
gtagagacagggttt

SEQ ID NO: 153888 - DNA, 15 bp, Homo sapiens
agtagagacagggtt

SEQ ID NO: 153889 - DNA, 15 bp, Homo sapiens
tagtagagacagggt

SEQ ID NO: 153890 - DNA, 15 bp, Homo sapiens
ttagtagagacaggg

SEQ ID NO: 153891 - DNA, 15 bp, Homo sapiens
tttagtagagacagg

SEQ ID NO: 153892 - DNA, 15 bp, Homo sapiens
ttttagtagagacag

SEQ ID NO: 153893 - DNA, 15 bp, Homo sapiens
tttttagtagagaca

SEQ ID NO: 153894 - DNA, 15 bp, Homo sapiens
atttttagtagagac

SEQ ID NO: 153895 - DNA, 15 bp, Homo sapiens
tatttttagtagaga

SEQ ID NO: 153896 - DNA, 15 bp, Homo sapiens
gtatttttagtagag

SEQ ID NO: 153897 - DNA, 15 bp, Homo sapiens
tgtatttttagtaga

SEQ ID NO: 153898 - DNA, 15 bp, Homo sapiens
ttgtatttttagtag

SEQ ID NO: 153899 - DNA, 15 bp, Homo sapiens
tttgtatttttagta

SEQ ID NO: 153900 - DNA, 15 bp, Homo sapiens
ttttgtatttttagt

SEQ ID NO: 153901 - DNA, 15 bp, Homo sapiens
tttttgtatttttag

SEQ ID NO: 153902 - DNA, 15 bp, Homo sapiens
atttttgtattttta

SEQ ID NO: 153903 - DNA, 15 bp, Homo sapiens
aatttttgtattttt

SEQ ID NO: 153904 - DNA, 15 bp, Homo sapiens
taatttttgtatttt

SEQ ID NO: 153905 - DNA, 15 bp, Homo sapiens
ctaatttttgtattt

SEQ ID NO: 153906 - DNA, 15 bp, Homo sapiens
gctaatttttgtatt

SEQ ID NO: 153907 - DNA, 15 bp, Homo sapiens
ggctaatttttgtat

SEQ ID NO: 153908 - DNA, 15 bp, Homo sapiens
tggctaatttttgta

SEQ ID NO: 153909 - DNA, 15 bp, Homo sapiens
ctggctaatttttgt

SEQ ID NO: 153910 - DNA, 15 bp, Homo sapiens
cctggctaatttttg

SEQ ID NO: 153911 - DNA, 15 bp, Homo sapiens
acctggctaattttt

SEQ ID NO: 153912 - DNA, 15 bp, Homo sapiens
cacctggctaatttt

SEQ ID NO: 153913 - DNA, 15 bp, Homo sapiens
acacctggctaattt

SEQ ID NO: 153914 - DNA, 15 bp, Homo sapiens
cacacctggctaatt

SEQ ID NO: 153915 - DNA, 15 bp, Homo sapiens
ccacacctggctaat

SEQ ID NO: 153916 - DNA, 15 bp, Homo sapiens
accacacctggctaa

SEQ ID NO: 153917 - DNA, 15 bp, Homo sapiens
caccacacctggcta

SEQ ID NO: 153918 - DNA, 15 bp, Homo sapiens
ccaccacacctggct

SEQ ID NO: 153919 - DNA, 15 bp, Homo sapiens
gccaccacacctggc

SEQ ID NO: 153920 - DNA, 15 bp, Homo sapiens
tgccaccacacctgg

SEQ ID NO: 153921 - DNA, 15 bp, Homo sapiens
gtgccaccacacctg

SEQ ID NO: 153922 - DNA, 15 bp, Homo sapiens
tgtgccaccacacct

SEQ ID NO: 153923 - DNA, 15 bp, Homo sapiens
gtgtgccaccacacc

SEQ ID NO: 153924 - DNA, 15 bp, Homo sapiens
tgtgtgccaccacac

SEQ ID NO: 153925 - DNA, 15 bp, Homo sapiens
gtgtgtgccaccaca

SEQ ID NO: 153926 - DNA, 15 bp, Homo sapiens
ggtgtgtgccaccac

SEQ ID NO: 153927 - DNA, 15 bp, Homo sapiens
aggtgtgtgccacca

SEQ ID NO: 153928 - DNA, 15 bp, Homo sapiens
caggtgtgtgccacc

SEQ ID NO: 153929 - DNA, 15 bp, Homo sapiens
acaggtgtgtgccac

SEQ ID NO: 153930 - DNA, 15 bp, Homo sapiens
tacaggtgtgtgcca

SEQ ID NO: 153931 - DNA, 15 bp, Homo sapiens
ttacaggtgtgtgcc

SEQ ID NO: 153932 - DNA, 15 bp, Homo sapiens
attacaggtgtgtgc

SEQ ID NO: 153933 - DNA, 15 bp, Homo sapiens
gattacaggtgtgtg

SEQ ID NO: 153934 - DNA, 15 bp, Homo sapiens
ggattacaggtgtgt

SEQ ID NO: 153935 - DNA, 15 bp, Homo sapiens
tggattacaggtgtg

SEQ ID NO: 153936 - DNA, 15 bp, Homo sapiens
ctggattacaggtgt

SEQ ID NO: 153937 - DNA, 15 bp, Homo sapiens
gctggattacaggtg

SEQ ID NO: 153938 - DNA, 15 bp, Homo sapiens
agctggattacaggt

SEQ ID NO: 153939 - DNA, 15 bp, Homo sapiens
tagctggattacagg

SEQ ID NO: 153940 - DNA, 15 bp, Homo sapiens
gtagctggattacag

SEQ ID NO: 153941 - DNA, 15 bp, Homo sapiens
agtagctggattaca

SEQ ID NO: 153942 - DNA, 15 bp, Homo sapiens
cagtagctggattac

SEQ ID NO: 153943 - DNA, 15 bp, Homo sapiens
ccagtagctggatta

SEQ ID NO: 153944 - DNA, 15 bp, Homo sapiens
cccagtagctggatt

SEQ ID NO: 153945 - DNA, 15 bp, Homo sapiens
ccccagtagctggat

SEQ ID NO: 153946 - DNA, 15 bp, Homo sapiens
tccccagtagctgga

SEQ ID NO: 153947 - DNA, 15 bp, Homo sapiens
ctccccagtagctgg

SEQ ID NO: 153948 - DNA, 15 bp, Homo sapiens
cctccccagtagctg

SEQ ID NO: 153949 - DNA, 15 bp, Homo sapiens
gcctccccagtagct

SEQ ID NO: 153950 - DNA, 15 bp, Homo sapiens
agcctccccagtagc

SEQ ID NO: 153951 - DNA, 15 bp, Homo sapiens
cagcctccccagtag

SEQ ID NO: 153952 - DNA, 15 bp, Homo sapiens
tcagcctccccagta

SEQ ID NO: 153953 - DNA, 15 bp, Homo sapiens
ctcagcctccccagt

SEQ ID NO: 153954 - DNA, 15 bp, Homo sapiens
cctcagcctccccag

SEQ ID NO: 153955 - DNA, 15 bp, Homo sapiens
gcctcagcctcccca

SEQ ID NO: 153956 - DNA, 15 bp, Homo sapiens
tgcctcagcctcccc

SEQ ID NO: 153957 - DNA, 15 bp, Homo sapiens
ctgcctcagcctccc

SEQ ID NO: 153958 - DNA, 15 bp, Homo sapiens
cctgcctcagcctcc

SEQ ID NO: 153959 - DNA, 15 bp, Homo sapiens
tcctgcctcagcctc

SEQ ID NO: 153960 - DNA, 15 bp, Homo sapiens
ctcctgcctcagcct

SEQ ID NO: 153961 - DNA, 15 bp, Homo sapiens
tctcctgcctcagcc

SEQ ID NO: 153962 - DNA, 15 bp, Homo sapiens
ttctcctgcctcagc

SEQ ID NO: 153963 - DNA, 15 bp, Homo sapiens
attctcctgcctcag

SEQ ID NO: 153964 - DNA, 15 bp, Homo sapiens
gattctcctgcctca

SEQ ID NO: 153965 - DNA, 15 bp, Homo sapiens
tgattctcctgcctc

SEQ ID NO: 153966 - DNA, 15 bp, Homo sapiens
gtgattctcctgcct

SEQ ID NO: 153967 - DNA, 15 bp, Homo sapiens
agtgattctcctgcc

SEQ ID NO: 153968 - DNA, 15 bp, Homo sapiens
aagtgattctcctgc

SEQ ID NO: 153969 - DNA, 15 bp, Homo sapiens
caagtgattctcctg

SEQ ID NO: 153970 - DNA, 15 bp, Homo sapiens
tcaagtgattctcct

SEQ ID NO: 153971 - DNA, 15 bp, Homo sapiens
ttcaagtgattctcc

SEQ ID NO: 153972 - DNA, 15 bp, Homo sapiens
gttcaagtgattctc

SEQ ID NO: 153973 - DNA, 15 bp, Homo sapiens
ggttcaagtgattct

SEQ ID NO: 153974 - DNA, 15 bp, Homo sapiens
aggttcaagtgattc

SEQ ID NO: 153975 - DNA, 15 bp, Homo sapiens
caggttcaagtgatt

SEQ ID NO: 153976 - DNA, 15 bp, Homo sapiens
ccaggttcaagtgat

SEQ ID NO: 153977 - DNA, 15 bp, Homo sapiens
cccaggttcaagtga

SEQ ID NO: 153978 - DNA, 15 bp, Homo sapiens
tcccaggttcaagtg

SEQ ID NO: 153979 - DNA, 15 bp, Homo sapiens
ctcccaggttcaagt

SEQ ID NO: 153980 - DNA, 15 bp, Homo sapiens
cctcccaggttcaag

SEQ ID NO: 153981 - DNA, 15 bp, Homo sapiens
gcctcccaggttcaa

SEQ ID NO: 153982 - DNA, 15 bp, Homo sapiens
cgcctcccaggttca

SEQ ID NO: 153983 - DNA, 15 bp, Homo sapiens
ccgcctcccaggttc

SEQ ID NO: 153984 - DNA, 15 bp, Homo sapiens
tccgcctcccaggtt

SEQ ID NO: 153985 - DNA, 15 bp, Homo sapiens
ctccgcctcccaggt

SEQ ID NO: 153986 - DNA, 15 bp, Homo sapiens
cctccgcctcccagg

SEQ ID NO: 153987 - DNA, 15 bp, Homo sapiens
acctccgcctcccag

SEQ ID NO: 153988 - DNA, 15 bp, Homo sapiens
aacctccgcctccca

SEQ ID NO: 153989 - DNA, 15 bp, Homo sapiens
caacctccgcctccc

SEQ ID NO: 153990 - DNA, 15 bp, Homo sapiens
gcaacctccgcctcc

SEQ ID NO: 153991 - DNA, 15 bp, Homo sapiens
tgcaacctccgcctc

SEQ ID NO: 153992 - DNA, 15 bp, Homo sapiens
ctgcaacctccgcct

SEQ ID NO: 153993 - DNA, 15 bp, Homo sapiens
actgcaacctccgcc

SEQ ID NO: 153994 - DNA, 15 bp, Homo sapiens
cactgcaacctccgc

SEQ ID NO: 153995 - DNA, 15 bp, Homo sapiens
tcactgcaacctccg

SEQ ID NO: 153996 - DNA, 15 bp, Homo sapiens
cggttcactgcaacc

SEQ ID NO: 153997 - DNA, 15 bp, Homo sapiens
tcggttcactgcaac

SEQ ID NO: 153998 - DNA, 15 bp, Homo sapiens
ctcggttcactgcaa

SEQ ID NO: 153999 - DNA, 15 bp, Homo sapiens
tctcggttcactgca

SEQ ID NO: 154000 - DNA, 15 bp, Homo sapiens
atctcggttcactgc

SEQ ID NO: 154001 - DNA, 15 bp, Homo sapiens
gatctcggttcactg

SEQ ID NO: 154002 - DNA, 15 bp, Homo sapiens
cgatctcggttcact

SEQ ID NO: 154003 - DNA, 15 bp, Homo sapiens
gcgatctcggttcac

SEQ ID NO: 154004 - DNA, 15 bp, Homo sapiens
cgcgatctcggttca

SEQ ID NO: 154005 - DNA, 15 bp, Homo sapiens
gcgcgatctcggttc

SEQ ID NO: 154006 - DNA, 15 bp, Homo sapiens
ggcgcgatctcggtt

SEQ ID NO: 154007 - DNA, 15 bp, Homo sapiens
tggcgcgatctcggt

SEQ ID NO: 154008 - DNA, 15 bp, Homo sapiens
gtggcgcgatctcgg

SEQ ID NO: 154009 - DNA, 15 bp, Homo sapiens
agtggcgcgatctcg

SEQ ID NO: 154010 - DNA, 15 bp, Homo sapiens
cagtggcgcgatctc

SEQ ID NO: 154011 - DNA, 15 bp, Homo sapiens
gcagtggcgcgatct

SEQ ID NO: 154012 - DNA, 15 bp, Homo sapiens
tgcagtggcgcgatc

SEQ ID NO: 154013 - DNA, 15 bp, Homo sapiens
gtgcagtggcgcgat

SEQ ID NO: 154014 - DNA, 15 bp, Homo sapiens
agtgcagtggcgcga

SEQ ID NO: 154015 - DNA, 15 bp, Homo sapiens
gagtgcagtggcgcg

SEQ ID NO: 154016 - DNA, 15 bp, Homo sapiens
ggagtgcagtggcgc

SEQ ID NO: 154017 - DNA, 15 bp, Homo sapiens
tggagtgcagtggcg

SEQ ID NO: 154018 - DNA, 15 bp, Homo sapiens
ctggagtgcagtggc

SEQ ID NO: 154019 - DNA, 15 bp, Homo sapiens
gctggagtgcagtgg

SEQ ID NO: 154020 - DNA, 15 bp, Homo sapiens
ggctggagtgcagtg

SEQ ID NO: 154021 - DNA, 15 bp, Homo sapiens
aggctggagtgcagt

SEQ ID NO: 154022 - DNA, 15 bp, Homo sapiens
caggctggagtgcag

SEQ ID NO: 154023 - DNA, 15 bp, Homo sapiens
ccaggctggagtgca

SEQ ID NO: 154024 - DNA, 15 bp, Homo sapiens
cccaggctggagtgc

SEQ ID NO: 154025 - DNA, 15 bp, Homo sapiens
acccaggctggagtg

SEQ ID NO: 154026 - DNA, 15 bp, Homo sapiens
cacccaggctggagt

SEQ ID NO: 154027 - DNA, 15 bp, Homo sapiens
ccacccaggctggag

SEQ ID NO: 154028 - DNA, 15 bp, Homo sapiens
gccacccaggctgga

SEQ ID NO: 154029 - DNA, 15 bp, Homo sapiens
tgccacccaggctgg

SEQ ID NO: 154030 - DNA, 15 bp, Homo sapiens
ttgccacccaggctg

SEQ ID NO: 154031 - DNA, 15 bp, Homo sapiens
tttgccacccaggct

SEQ ID NO: 154032 - DNA, 15 bp, Homo sapiens
ctttgccacccaggc

SEQ ID NO: 154033 - DNA, 15 bp, Homo sapiens
actttgccacccagg

SEQ ID NO: 154034 - DNA, 15 bp, Homo sapiens
cactttgccacccag

SEQ ID NO: 154035 - DNA, 15 bp, Homo sapiens
tcactttgccaccca

SEQ ID NO: 154036 - DNA, 15 bp, Homo sapiens
ctcactttgccaccc

SEQ ID NO: 154037 - DNA, 15 bp, Homo sapiens
tctcactttgccacc

SEQ ID NO: 154038 - DNA, 15 bp, Homo sapiens
gtctcactttgccac

SEQ ID NO: 154039 - DNA, 15 bp, Homo sapiens
agtctcactttgcca

SEQ ID NO: 154040 - DNA, 15 bp, Homo sapiens
gagtctcactttgcc

SEQ ID NO: 154041 - DNA, 15 bp, Homo sapiens
tgagtctcactttgc

SEQ ID NO: 154042 - DNA, 15 bp, Homo sapiens
ctgagtctcactttg

SEQ ID NO: 154043 - DNA, 15 bp, Homo sapiens
actgagtctcacttt

SEQ ID NO: 154044 - DNA, 15 bp, Homo sapiens
gactgagtctcactt

SEQ ID NO: 154045 - DNA, 15 bp, Homo sapiens
agactgagtctcact

SEQ ID NO: 154046 - DNA, 15 bp, Homo sapiens
gagactgagtctcac

SEQ ID NO: 154047 - DNA, 15 bp, Homo sapiens
tgagactgagtctca

SEQ ID NO: 154048 - DNA, 15 bp, Homo sapiens
ttgagactgagtctc

SEQ ID NO: 154049 - DNA, 15 bp, Homo sapiens
attgagactgagtct

SEQ ID NO: 154050 - DNA, 15 bp, Homo sapiens
tattgagactgagtc

SEQ ID NO: 154051 - DNA, 15 bp, Homo sapiens
ttattgagactgagt

SEQ ID NO: 154052 - DNA, 15 bp, Homo sapiens
tttattgagactgag

SEQ ID NO: 154053 - DNA, 15 bp, Homo sapiens
ttttattgagactga

SEQ ID NO: 154054 - DNA, 15 bp, Homo sapiens
tttttattgagactg

SEQ ID NO: 154055 - DNA, 15 bp, Homo sapiens
atttttattgagact

SEQ ID NO: 154056 - DNA, 15 bp, Homo sapiens
catttttattgagac

SEQ ID NO: 154057 - DNA, 15 bp, Homo sapiens
tcatttttattgaga

SEQ ID NO: 154058 - DNA, 15 bp, Homo sapiens
ttcatttttattgag

SEQ ID NO: 154059 - DNA, 15 bp, Homo sapiens
tttcatttttattga

SEQ ID NO: 154060 - DNA, 15 bp, Homo sapiens
ttttcatttttattg

SEQ ID NO: 154061 - DNA, 15 bp, Homo sapiens
gttttcatttttatt

SEQ ID NO: 154062 - DNA, 15 bp, Homo sapiens
tgttttcatttttat

SEQ ID NO: 154063 - DNA, 15 bp, Homo sapiens
ttgttttcattttta

SEQ ID NO: 154064 - DNA, 15 bp, Homo sapiens
tttgttttcattttt

SEQ ID NO: 154065 - DNA, 15 bp, Homo sapiens
ttttgttttcatttt

SEQ ID NO: 154066 - DNA, 15 bp, Homo sapiens
gttttgttttcattt

SEQ ID NO: 154067 - DNA, 15 bp, Homo sapiens
tgttttgttttcatt

SEQ ID NO: 154068 - DNA, 15 bp, Homo sapiens
ttgttttgttttcat

SEQ ID NO: 154069 - DNA, 15 bp, Homo sapiens
tttgttttgttttca

SEQ ID NO: 154070 - DNA, 15 bp, Homo sapiens
ttttgttttgttttc

SEQ ID NO: 154071 - DNA, 15 bp, Homo sapiens
gttttgttttgtttt

SEQ ID NO: 154072 - DNA, 15 bp, Homo sapiens
tgttttgttttgttt

SEQ ID NO: 154073 - DNA, 15 bp, Homo sapiens
ttgttttgttttgtt

SEQ ID NO: 154074 - DNA, 15 bp, Homo sapiens
tttgttttgttttgt

SEQ ID NO: 154075 - DNA, 15 bp, Homo sapiens
ttttgttttgttttg

SEQ ID NO: 154076 - DNA, 15 bp, Homo sapiens
tttttgttttgtttt

SEQ ID NO: 154077 - DNA, 15 bp, Homo sapiens
atttttgttttgttt

SEQ ID NO: 154078 - DNA, 15 bp, Homo sapiens
tatttttgttttgtt

SEQ ID NO: 154079 - DNA, 15 bp, Homo sapiens
atatttttgttttgt

SEQ ID NO: 154080 - DNA, 15 bp, Homo sapiens
gatatttttgttttg

SEQ ID NO: 154081 - DNA, 15 bp, Homo sapiens
agatatttttgtttt

SEQ ID NO: 154082 - DNA, 15 bp, Homo sapiens
aagatatttttgttt

SEQ ID NO: 154083 - DNA, 15 bp, Homo sapiens
taagatatttttgtt

SEQ ID NO: 154084 - DNA, 15 bp, Homo sapiens
gtaagatatttttgt

SEQ ID NO: 154085 - DNA, 15 bp, Homo sapiens
tgtaagatatttttg

SEQ ID NO: 154086 - DNA, 15 bp, Homo sapiens
ctgtaagatattttt

SEQ ID NO: 154087 - DNA, 15 bp, Homo sapiens
tctgtaagatatttt

SEQ ID NO: 154088 - DNA, 15 bp, Homo sapiens
ctctgtaagatattt

SEQ ID NO: 154089 - DNA, 15 bp, Homo sapiens
tctctgtaagatatt

SEQ ID NO: 154090 - DNA, 15 bp, Homo sapiens
ttctctgtaagatat

SEQ ID NO: 154091 - DNA, 15 bp, Homo sapiens
cttctctgtaagata

SEQ ID NO: 154092 - DNA, 15 bp, Homo sapiens
acttctctgtaagat

SEQ ID NO: 154093 - DNA, 15 bp, Homo sapiens
cacttctctgtaaga

SEQ ID NO: 154094 - DNA, 15 bp, Homo sapiens
tcacttctctgtaag

SEQ ID NO: 154095 - DNA, 15 bp, Homo sapiens
ttcacttctctgtaa

SEQ ID NO: 154096 - DNA, 15 bp, Homo sapiens
attcacttctctgta

SEQ ID NO: 154097 - DNA, 15 bp, Homo sapiens
cattcacttctctgt

SEQ ID NO: 154098 - DNA, 15 bp, Homo sapiens
gcattcacttctctg

SEQ ID NO: 154099 - DNA, 15 bp, Homo sapiens
tgcattcacttctct

SEQ ID NO: 154100 - DNA, 15 bp, Homo sapiens
ctgcattcacttctc

SEQ ID NO: 154101 - DNA, 15 bp, Homo sapiens
gctgcattcacttct

SEQ ID NO: 154102 - DNA, 15 bp, Homo sapiens
ggctgcattcacttc

SEQ ID NO: 154103 - DNA, 15 bp, Homo sapiens
tggctgcattcactt

SEQ ID NO: 154104 - DNA, 15 bp, Homo sapiens
ttggctgcattcact

SEQ ID NO: 154105 - DNA, 15 bp, Homo sapiens
attggctgcattcac

SEQ ID NO: 154106 - DNA, 15 bp, Homo sapiens
cattggctgcattca

SEQ ID NO: 154107 - DNA, 15 bp, Homo sapiens
tcattggctgcattc

SEQ ID NO: 154108 - DNA, 15 bp, Homo sapiens
atcattggctgcatt

SEQ ID NO: 154109 - DNA, 15 bp, Homo sapiens
tatcattggctgcat

SEQ ID NO: 154110 - DNA, 15 bp, Homo sapiens
ttatcattggctgca

SEQ ID NO: 154111 - DNA, 15 bp, Homo sapiens
cttatcattggctgc

SEQ ID NO: 154112 - DNA, 15 bp, Homo sapiens
acttatcattggctg

SEQ ID NO: 154113 - DNA, 15 bp, Homo sapiens
cacttatcattggct

SEQ ID NO: 154114 - DNA, 15 bp, Homo sapiens
gcacttatcattggc

SEQ ID NO: 154115 - DNA, 15 bp, Homo sapiens
agcacttatcattgg

SEQ ID NO: 154116 - DNA, 15 bp, Homo sapiens
tagcacttatcattg

SEQ ID NO: 154117 - DNA, 15 bp, Homo sapiens
atagcacttatcatt

SEQ ID NO: 154118 - DNA, 15 bp, Homo sapiens
catagcacttatcat

SEQ ID NO: 154119 - DNA, 15 bp, Homo sapiens
ccatagcacttatca

SEQ ID NO: 154120 - DNA, 15 bp, Homo sapiens
tccatagcacttatc

SEQ ID NO: 154121 - DNA, 15 bp, Homo sapiens
ctccatagcacttat

SEQ ID NO: 154122 - DNA, 15 bp, Homo sapiens
tctccatagcactta

SEQ ID NO: 154123 - DNA, 15 bp, Homo sapiens
ttctccatagcactt

SEQ ID NO: 154124 - DNA, 15 bp, Homo sapiens
tttctccatagcact

SEQ ID NO: 154125 - DNA, 15 bp, Homo sapiens
ttttctccatagcac

SEQ ID NO: 154126 - DNA, 15 bp, Homo sapiens
tttttctccatagca

SEQ ID NO: 154127 - DNA, 15 bp, Homo sapiens
atttttctccatagc

SEQ ID NO: 154128 - DNA, 15 bp, Homo sapiens
tatttttctccatag

SEQ ID NO: 154129 - DNA, 15 bp, Homo sapiens
ttatttttctccata

SEQ ID NO: 154130 - DNA, 15 bp, Homo sapiens
tttatttttctccat

SEQ ID NO: 154131 - DNA, 15 bp, Homo sapiens
ttttatttttctcca

SEQ ID NO: 154132 - DNA, 15 bp, Homo sapiens
gttttatttttctcc

SEQ ID NO: 154133 - DNA, 15 bp, Homo sapiens
tgttttatttttctc

SEQ ID NO: 154134 - DNA, 15 bp, Homo sapiens
ctgttttatttttct

SEQ ID NO: 154135 - DNA, 15 bp, Homo sapiens
cctgttttatttttc

SEQ ID NO: 154136 - DNA, 15 bp, Homo sapiens
tcctgttttattttt

SEQ ID NO: 154137 - DNA, 15 bp, Homo sapiens
atcctgttttatttt

SEQ ID NO: 154138 - DNA, 15 bp, Homo sapiens
tatcctgttttattt

SEQ ID NO: 154139 - DNA, 15 bp, Homo sapiens
ttatcctgttttatt

SEQ ID NO: 154140 - DNA, 15 bp, Homo sapiens
tttatcctgttttat

SEQ ID NO: 154141 - DNA, 15 bp, Homo sapiens
ctttatcctgtttta

SEQ ID NO: 154142 - DNA, 15 bp, Homo sapiens
actttatcctgtttt

SEQ ID NO: 154143 - DNA, 15 bp, Homo sapiens
aactttatcctgttt

SEQ ID NO: 154144 - DNA, 15 bp, Homo sapiens
gaactttatcctgtt

SEQ ID NO: 154145 - DNA, 15 bp, Homo sapiens
ggaactttatcctgt

SEQ ID NO: 154146 - DNA, 15 bp, Homo sapiens
aggaactttatcctg

SEQ ID NO: 154147 - DNA, 15 bp, Homo sapiens
gaggaactttatcct

SEQ ID NO: 154148 - DNA, 15 bp, Homo sapiens
ggaggaactttatcc

SEQ ID NO: 154149 - DNA, 15 bp, Homo sapiens
gggaggaactttatc

SEQ ID NO: 154150 - DNA, 15 bp, Homo sapiens
agggaggaactttat

SEQ ID NO: 154151 - DNA, 15 bp, Homo sapiens
cagggaggaacttta

SEQ ID NO: 154152 - DNA, 15 bp, Homo sapiens
acagggaggaacttt

SEQ ID NO: 154153 - DNA, 15 bp, Homo sapiens
aacagggaggaactt

SEQ ID NO: 154154 - DNA, 15 bp, Homo sapiens
aaacagggaggaact

SEQ ID NO: 154155 - DNA, 15 bp, Homo sapiens
aaaacagggaggaac

SEQ ID NO: 154156 - DNA, 15 bp, Homo sapiens
caaaacagggaggaa

SEQ ID NO: 154157 - DNA, 15 bp, Homo sapiens
acaaaacagggagga

SEQ ID NO: 154158 - DNA, 15 bp, Homo sapiens
tacaaaacagggagg

SEQ ID NO: 154159 - DNA, 15 bp, Homo sapiens
ttacaaaacagggag

SEQ ID NO: 154160 - DNA, 15 bp, Homo sapiens
attacaaaacaggga

SEQ ID NO: 154161 - DNA, 15 bp, Homo sapiens
tagtagcaaacagtc

SEQ ID NO: 154162 - DNA, 15 bp, Homo sapiens
ttagtagcaaacagt

SEQ ID NO: 154163 - DNA, 15 bp, Homo sapiens
tttagtagcaaacag

SEQ ID NO: 154164 - DNA, 15 bp, Homo sapiens
ttttagtagcaaaca

SEQ ID NO: 154165 - DNA, 15 bp, Homo sapiens
gttttagtagcaaac

SEQ ID NO: 154166 - DNA, 15 bp, Homo sapiens
ggttttagtagcaaa

SEQ ID NO: 154167 - DNA, 15 bp, Homo sapiens
aggttttagtagcaa

SEQ ID NO: 154168 - DNA, 15 bp, Homo sapiens
aaggttttagtagca

SEQ ID NO: 154169 - DNA, 15 bp, Homo sapiens
aaaggttttagtagc

SEQ ID NO: 154170 - DNA, 15 bp, Homo sapiens
aaaaggttttagtag

SEQ ID NO: 154171 - DNA, 15 bp, Homo sapiens
aaaaaggttttagta

SEQ ID NO: 154172 - DNA, 15 bp, Homo sapiens
aaaaaaggttttagt

SEQ ID NO: 154173 - DNA, 15 bp, Homo sapiens
aaaaaaaggttttag

SEQ ID NO: 154174 - DNA, 15 bp, Homo sapiens
aaaaaaaaggtttta

SEQ ID NO: 154175 - DNA, 15 bp, Homo sapiens
aaaaaaaaaggtttt

SEQ ID NO: 154176 - DNA, 15 bp, Homo sapiens
aaaaaaaaaaggttt

SEQ ID NO: 154177 - DNA, 15 bp, Homo sapiens
aaaaaaaaaaaggtt

SEQ ID NO: 154178 - DNA, 15 bp, Homo sapiens
aaaaaaaaaaaaggt

SEQ ID NO: 154179 - DNA, 15 bp, Homo sapiens
aagactctgtctcaa

SEQ ID NO: 154180 - DNA, 15 bp, Homo sapiens
caagactctgtctca

SEQ ID NO: 154181 - DNA, 15 bp, Homo sapiens
gcaagactctgtctc

SEQ ID NO: 154182 - DNA, 15 bp, Homo sapiens
agcaagactctgtct

SEQ ID NO: 154183 - DNA, 15 bp, Homo sapiens
gagcaagactctgtc

SEQ ID NO: 154184 - DNA, 15 bp, Homo sapiens
agagcaagactctgt

SEQ ID NO: 154185 - DNA, 15 bp, Homo sapiens
cagagcaagactctg

SEQ ID NO: 154186 - DNA, 15 bp, Homo sapiens
acagagcaagactct

SEQ ID NO: 154187 - DNA, 15 bp, Homo sapiens
tacagagcaagactc

SEQ ID NO: 154188 - DNA, 15 bp, Homo sapiens
ttacagagcaagact

SEQ ID NO: 154189 - DNA, 15 bp, Homo sapiens
gttacagagcaagac

SEQ ID NO: 154190 - DNA, 15 bp, Homo sapiens
ggttacagagcaaga

SEQ ID NO: 154191 - DNA, 15 bp, Homo sapiens
gggttacagagcaag

SEQ ID NO: 154192 - DNA, 15 bp, Homo sapiens
tgggttacagagcaa

SEQ ID NO: 154193 - DNA, 15 bp, Homo sapiens
ctgggttacagagca

SEQ ID NO: 154194 - DNA, 15 bp, Homo sapiens
cctgggttacagagc

SEQ ID NO: 154195 - DNA, 15 bp, Homo sapiens
gcctgggttacagag

SEQ ID NO: 154196 - DNA, 15 bp, Homo sapiens
agcctgggttacaga

SEQ ID NO: 154197 - DNA, 15 bp, Homo sapiens
cagcctgggttacag

SEQ ID NO: 154198 - DNA, 15 bp, Homo sapiens
ccagcctgggttaca

SEQ ID NO: 154199 - DNA, 15 bp, Homo sapiens
tccagcctgggttac

SEQ ID NO: 154200 - DNA, 15 bp, Homo sapiens
ctccagcctgggtta

SEQ ID NO: 154201 - DNA, 15 bp, Homo sapiens
actccagcctgggtt

SEQ ID NO: 154202 - DNA, 15 bp, Homo sapiens
acgccactgcactcc

SEQ ID NO: 154203 - DNA, 15 bp, Homo sapiens
cacgccactgcactc

SEQ ID NO: 154204 - DNA, 15 bp, Homo sapiens
tcacgccactgcact

SEQ ID NO: 154205 - DNA, 15 bp, Homo sapiens
atcacgccactgcac

SEQ ID NO: 154206 - DNA, 15 bp, Homo sapiens
gatcacgccactgca

SEQ ID NO: 154207 - DNA, 15 bp, Homo sapiens
agatcacgccactgc

SEQ ID NO: 154208 - DNA, 15 bp, Homo sapiens
aagatcacgccactg

SEQ ID NO: 154209 - DNA, 15 bp, Homo sapiens
caagatcacgccact

SEQ ID NO: 154210 - DNA, 15 bp, Homo sapiens
ccaagatcacgccac

SEQ ID NO: 154211 - DNA, 15 bp, Homo sapiens
gccaagatcacgcca

SEQ ID NO: 154212 - DNA, 15 bp, Homo sapiens
agccaagatcacgcc

SEQ ID NO: 154213 - DNA, 15 bp, Homo sapiens
gagccaagatcacgc

SEQ ID NO: 154214 - DNA, 15 bp, Homo sapiens
tgagccaagatcacg

SEQ ID NO: 154215 - DNA, 15 bp, Homo sapiens
gtgagccaagatcac

SEQ ID NO: 154216 - DNA, 15 bp, Homo sapiens
agtgagccaagatca

SEQ ID NO: 154217 - DNA, 15 bp, Homo sapiens
ttgcagtgagccaag

SEQ ID NO: 154218 - DNA, 15 bp, Homo sapiens
gttgcagtgagccaa

SEQ ID NO: 154219 - DNA, 15 bp, Homo sapiens
ggttgcagtgagcca

SEQ ID NO: 154220 - DNA, 15 bp, Homo sapiens
agtggaggttgcagt

SEQ ID NO: 154221 - DNA, 15 bp, Homo sapiens
aagtggaggttgcag

SEQ ID NO: 154222 - DNA, 15 bp, Homo sapiens
gaagtggaggttgca

SEQ ID NO: 154223 - DNA, 15 bp, Homo sapiens
ggaagtggaggttgc

SEQ ID NO: 154224 - DNA, 15 bp, Homo sapiens
gggaagtggaggttg

SEQ ID NO: 154225 - DNA, 15 bp, Homo sapiens
tgggaagtggaggtt

SEQ ID NO: 154226 - DNA, 15 bp, Homo sapiens
ctgggaagtggaggt

SEQ ID NO: 154227 - DNA, 15 bp, Homo sapiens
cctgggaagtggagg

SEQ ID NO: 154228 - DNA, 15 bp, Homo sapiens
acctgggaagtggag

SEQ ID NO: 154229 - DNA, 15 bp, Homo sapiens
aacctgggaagtgga

SEQ ID NO: 154230 - DNA, 15 bp, Homo sapiens
gaacctgggaagtgg

SEQ ID NO: 154231 - DNA, 15 bp, Homo sapiens
tgaacctgggaagtg

SEQ ID NO: 154232 - DNA, 15 bp, Homo sapiens
ttgaacctgggaagt

SEQ ID NO: 154233 - DNA, 15 bp, Homo sapiens
cttgaacctgggaag

SEQ ID NO: 154234 - DNA, 15 bp, Homo sapiens
acttgaacctgggaa

SEQ ID NO: 154235 - DNA, 15 bp, Homo sapiens
cacttgaacctggga

SEQ ID NO: 154236 - DNA, 15 bp, Homo sapiens
tcacttgaacctggg

SEQ ID NO: 154237 - DNA, 15 bp, Homo sapiens
atcacttgaacctgg

SEQ ID NO: 154238 - DNA, 15 bp, Homo sapiens
cagagaatcacttga

SEQ ID NO: 154239 - DNA, 15 bp, Homo sapiens
ccagagaatcacttg

SEQ ID NO: 154240 - DNA, 15 bp, Homo sapiens
gccagagaatcactt

SEQ ID NO: 154241 - DNA, 15 bp, Homo sapiens
ggccagagaatcact

SEQ ID NO: 154242 - DNA, 15 bp, Homo sapiens
cggccagagaatcac

SEQ ID NO: 154243 - DNA, 15 bp, Homo sapiens
gcggccagagaatca

SEQ ID NO: 154244 - DNA, 15 bp, Homo sapiens
tgcggccagagaatc

SEQ ID NO: 154245 - DNA, 15 bp, Homo sapiens
ctgcggccagagaat

SEQ ID NO: 154246 - DNA, 15 bp, Homo sapiens
actgcggccagagaa

SEQ ID NO: 154247 - DNA, 15 bp, Homo sapiens
gactgcggccagaga
